United States Patent Application Publication US 2007/0048756 A1 - sequence listing, part 16

SEQ ID NO: 544839 - DNA, 33 bp, Homo sapien
cagttgacatgctggtaacactacagtgaggag

SEQ ID NO: 544840 - DNA, 33 bp, Homo sapien
cagttgacatgctggtgacactacagtgaggag

SEQ ID NO: 544841 - DNA, 33 bp, Homo sapien
tttccagaaagctccacccccagaacttggttg

SEQ ID NO: 544842 - DNA, 33 bp, Homo sapien
tttccagaaagctccatccccagaacttggttg

SEQ ID NO: 544843 - DNA, 33 bp, Homo sapien
ttcaattaacaattgcccagatcaaactccaac

SEQ ID NO: 544844 - DNA, 33 bp, Homo sapien
ttcaattaacaattgctcagatcaaactccaac

SEQ ID NO: 544845 - DNA, 33 bp, Homo sapien
gcaactaattagcccaacctgagttatacattc

SEQ ID NO: 544846 - DNA, 33 bp, Homo sapien
gcaactaattagcccagcctgagttatacattc

SEQ ID NO: 544847 - DNA, 33 bp, Homo sapien
tattcaccccaattcaactagtgcataaactat

SEQ ID NO: 544848 - DNA, 33 bp, Homo sapien
tattcaccccaattcagctagtgcataaactat

SEQ ID NO: 544849 - DNA, 33 bp, Homo sapien
ggccaaagtgggttacaatatattcaggcattc

SEQ ID NO: 544850 - DNA, 33 bp, Homo sapien
ggccaaagtgggttacgatatattcaggcattc

SEQ ID NO: 544851 - DNA, 33 bp, Homo sapien
attcacattatttccaatagaggactcaaagta

SEQ ID NO: 544852 - DNA, 33 bp, Homo sapien
attcacattatttccagtagaggactcaaagta

SEQ ID NO: 544853 - DNA, 33 bp, Homo sapien
taaaatccatttgttgaaatagctgcgtgactt

SEQ ID NO: 544854 - DNA, 33 bp, Homo sapien
taaaatccatttgttggaatagctgcgtgactt

SEQ ID NO: 544855 - DNA, 33 bp, Homo sapien
gtcaaataaaattgagaaatgctgcatactata

SEQ ID NO: 544856 - DNA, 33 bp, Homo sapien
gtcaaataaaattgagcaatgctgcatactata

SEQ ID NO: 544857 - DNA, 33 bp, Homo sapien
ttgtctcttgaagcagaatattagagaaacaga

SEQ ID NO: 544858 - DNA, 33 bp, Homo sapien
ttgtctcttgaagcaggatattagagaaacaga

SEQ ID NO: 544859 - DNA, 33 bp, Homo sapien
tttattcatcgtattacatgaacagtatatatg

SEQ ID NO: 544860 - DNA, 33 bp, Homo sapien
tttattcatcgtattatatgaacagtatatatg

SEQ ID NO: 544861 - DNA, 33 bp, Homo sapien
ggaattttgattaaaactgcactgaacctgtac

SEQ ID NO: 544862 - DNA, 33 bp, Homo sapien
ggaattttgattaaaattgcactgaacctgtac

SEQ ID NO: 544863 - DNA, 33 bp, Homo sapien
aattttgaacaagtcacgtattgctgatggata

SEQ ID NO: 544864 - DNA, 33 bp, Homo sapien
aattttgaacaagtcatgtattgctgatggata

SEQ ID NO: 544865 - DNA, 33 bp, Homo sapien
aattaggtcattgctaaactgtccataatatgt

SEQ ID NO: 544866 - DNA, 33 bp, Homo sapien
aattaggtcattgctacactgtccataatatgt

SEQ ID NO: 544867 - DNA, 33 bp, Homo sapien
caacaaaatcgagatacaaaggaaaaactcagt

SEQ ID NO: 544868 - DNA, 33 bp, Homo sapien
caacaaaatcgagatagaaaggaaaaactcagt

SEQ ID NO: 544869 - DNA, 33 bp, Homo sapien
tgattctgtaggtagacagttccaactgctgag

SEQ ID NO: 544870 - DNA, 33 bp, Homo sapien
tgattctgtaggtagatagttccaactgctgag

SEQ ID NO: 544871 - DNA, 33 bp, Homo sapien
cttactgccctgctaaaggtgccaatgtatgca

SEQ ID NO: 544872 - DNA, 33 bp, Homo sapien
cttactgccctgctaagggtgccaatgtatgca

SEQ ID NO: 544873 - DNA, 33 bp, Homo sapien
tgtctttaagacatcacgcttgccaaatctgtg

SEQ ID NO: 544874 - DNA, 33 bp, Homo sapien
tgtctttaagacatcatgcttgccaaatctgtg

SEQ ID NO: 544875 - DNA, 33 bp, Homo sapien
aatcctttactcacatcatgaaaattgagagat

SEQ ID NO: 544876 - DNA, 33 bp, Homo sapien
aatcctttactcacatgatgaaaattgagagat

SEQ ID NO: 544877 - DNA, 33 bp, Homo sapien
tgatcaaagcatagaactaagcacaaagaagat

SEQ ID NO: 544878 - DNA, 33 bp, Homo sapien
tgatcaaagcatagaagtaagcacaaagaagat

SEQ ID NO: 544879 - DNA, 33 bp, Homo sapien
agttcatgctccaaacagagaacagacccatta

SEQ ID NO: 544880 - DNA, 33 bp, Homo sapien
agttcatgctccaaacggagaacagacccatta

SEQ ID NO: 544881 - DNA, 33 bp, Homo sapien
gaaagacactcattaaatgggaggaaattctat

SEQ ID NO: 544882 - DNA, 33 bp, Homo sapien
gaaagacactcattaagtgggaggaaattctat

SEQ ID NO: 544883 - DNA, 33 bp, Homo sapien
aataccaaacggcaaccgagttacagaaaatgg

SEQ ID NO: 544884 - DNA, 33 bp, Homo sapien
aataccaaacggcaactgagttacagaaaatgg

SEQ ID NO: 544885 - DNA, 33 bp, Homo sapien
gtttacagaaaagtgacgaaatatggaaagtat

SEQ ID NO: 544886 - DNA, 33 bp, Homo sapien
gtttacagaaaagtgatgaaatatggaaagtat

SEQ ID NO: 544887 - DNA, 33 bp, Homo sapien
atctctctcctccaaccagtaccatggtcactt

SEQ ID NO: 544888 - DNA, 33 bp, Homo sapien
atctctctcctccaactagtaccatggtcactt

SEQ ID NO: 544889 - DNA, 33 bp, Homo sapien
ggctttagcagctgaaagcattttgtttaatac

SEQ ID NO: 544890 - DNA, 33 bp, Homo sapien
ggctttagcagctgaaggcattttgtttaatac

SEQ ID NO: 544891 - DNA, 33 bp, Homo sapien
caggagattggagacaacttattcacatttctt

SEQ ID NO: 544892 - DNA, 33 bp, Homo sapien
caggagattggagacagcttattcacatttctt

SEQ ID NO: 544893 - DNA, 33 bp, Homo sapien
ttttggcatggagttacgttaccacagaaacac

SEQ ID NO: 544894 - DNA, 33 bp, Homo sapien
ttttggcatggagttatgttaccacagaaacac

SEQ ID NO: 544895 - DNA, 33 bp, Homo sapien
attgtccagaattaaaagtgatcatcctaatta

SEQ ID NO: 544896 - DNA, 33 bp, Homo sapien
attgtccagaattaaacgtgatcatcctaatta

SEQ ID NO: 544897 - DNA, 33 bp, Homo sapien
gagagagttgcaatagacagctctagtttctct

SEQ ID NO: 544898 - DNA, 33 bp, Homo sapien
gagagagttgcaataggcagctctagtttctct

SEQ ID NO: 544899 - DNA, 33 bp, Homo sapien
tacagaactgacactcaagattagtgatgccat

SEQ ID NO: 544900 - DNA, 33 bp, Homo sapien
tacagaactgacactcgagattagtgatgccat

SEQ ID NO: 544901 - DNA, 33 bp, Homo sapien
aattagcctagatcacgctggtaactggtaaca

SEQ ID NO: 544902 - DNA, 33 bp, Homo sapien
aattagcctagatcactctggtaactggtaaca

SEQ ID NO: 544903 - DNA, 33 bp, Homo sapien
aacacatactaaggcaaaattccatagtaaagc

SEQ ID NO: 544904 - DNA, 33 bp, Homo sapien
aacacatactaaggcacaattccatagtaaagc

SEQ ID NO: 544905 - DNA, 33 bp, Homo sapien
cttgaggggtgaaaacaattttgtaacagagtg

SEQ ID NO: 544906 - DNA, 33 bp, Homo sapien
cttgaggggtgaaaacgattttgtaacagagtg

SEQ ID NO: 544907 - DNA, 33 bp, Homo sapien
tggtaaaccactgacagaagttcaagagtccaa

SEQ ID NO: 544908 - DNA, 33 bp, Homo sapien
tggtaaaccactgacataagttcaagagtccaa

SEQ ID NO: 544909 - DNA, 33 bp, Homo sapien
ttggctctggaggtcacagtacttgggtctatg

SEQ ID NO: 544910 - DNA, 33 bp, Homo sapien
ttggctctggaggtcagagtacttgggtctatg

SEQ ID NO: 544911 - DNA, 33 bp, Homo sapien
gggagatgctagacaacgtagaatttcttacaa

SEQ ID NO: 544912 - DNA, 33 bp, Homo sapien
gggagatgctagacaatgtagaatttcttacaa

SEQ ID NO: 544913 - DNA, 33 bp, Homo sapien
tgaactcttaaaagcccaagaacatttcttaat

SEQ ID NO: 544914 - DNA, 33 bp, Homo sapien
tgaactcttaaaagccgaagaacatttcttaat

SEQ ID NO: 544915 - DNA, 33 bp, Homo sapien
taagattgtgtcacatcagtgatataggtaggc

SEQ ID NO: 544916 - DNA, 33 bp, Homo sapien
taagattgtgtcacattagtgatataggtaggc

SEQ ID NO: 544917 - DNA, 33 bp, Homo sapien
tgccaagatgtgttagaatttctctagaatcat

SEQ ID NO: 544918 - DNA, 33 bp, Homo sapien
tgccaagatgtgttaggatttctctagaatcat

SEQ ID NO: 544919 - DNA, 33 bp, Homo sapien
ctggagaacaaccacaaaaattctatgtattac

SEQ ID NO: 544920 - DNA, 33 bp, Homo sapien
ctggagaacaaccacacaaattctatgtattac

SEQ ID NO: 544921 - DNA, 33 bp, Homo sapien
tcattgaacagtagcaccacctactaaccctca

SEQ ID NO: 544922 - DNA, 33 bp, Homo sapien
tcattgaacagtagcatcacctactaaccctca

SEQ ID NO: 544923 - DNA, 33 bp, Homo sapien
ctcttgatcgtgcaacagagatatatgaaaaat

SEQ ID NO: 544924 - DNA, 33 bp, Homo sapien
ctcttgatcgtgcaactgagatatatgaaaaat

SEQ ID NO: 544925 - DNA, 33 bp, Homo sapien
actcttctggcttccacaaagcccggcgctttc

SEQ ID NO: 544926 - DNA, 33 bp, Homo sapien
actcttctggcttccataaagcccggcgctttc

SEQ ID NO: 544927 - DNA, 33 bp, Homo sapien
tactctcaaataccaacgtacaaaggtggcatc

SEQ ID NO: 544928 - DNA, 33 bp, Homo sapien
tactctcaaataccaatgtacaaaggtggcatc

SEQ ID NO: 544929 - DNA, 33 bp, Homo sapien
tatgtccatccaagaccaaataactgctgacag

SEQ ID NO: 544930 - DNA, 33 bp, Homo sapien
tatgtccatccaagacgaaataactgctgacag

SEQ ID NO: 544931 - DNA, 33 bp, Homo sapien
ttagaacctttgggaaaagaagacacttgcatc

SEQ ID NO: 544932 - DNA, 33 bp, Homo sapien
ttagaacctttgggaagagaagacacttgcatc

SEQ ID NO: 544933 - DNA, 33 bp, Homo sapien
actaattgtcttggaccagtgagttaacttagt

SEQ ID NO: 544934 - DNA, 33 bp, Homo sapien
actaattgtcttggactagtgagttaacttagt

SEQ ID NO: 544935 - DNA, 33 bp, Homo sapien
gtgtgactatactgataagaaacacttggagat

SEQ ID NO: 544936 - DNA, 33 bp, Homo sapien
gtgtgactatactgatgagaaacacttggagat

SEQ ID NO: 544937 - DNA, 33 bp, Homo sapien
agggcacataaatgaacggatgtaatccccccc

SEQ ID NO: 544938 - DNA, 33 bp, Homo sapien
agggcacataaatgaatggatgtaatccccccc

SEQ ID NO: 544939 - DNA, 33 bp, Homo sapien
gtgaattataatgatgacagccactacactcca

SEQ ID NO: 544940 - DNA, 33 bp, Homo sapien
gtgaattataatgatgtcagccactacactcca

SEQ ID NO: 544941 - DNA, 33 bp, Homo sapien
accaattatgctttcccgacagtacccaaagtc

SEQ ID NO: 544942 - DNA, 33 bp, Homo sapien
accaattatgctttcctgacagtacccaaagtc

SEQ ID NO: 544943 - DNA, 33 bp, Homo sapien
cacaaattcccccgcactatgtattctatactg

SEQ ID NO: 544944 - DNA, 33 bp, Homo sapien
cacaaattcccccgcagtatgtattctatactg

SEQ ID NO: 544945 - DNA, 33 bp, Homo sapien
agattttagtctccgcaaaggaacttcttgctt

SEQ ID NO: 544946 - DNA, 33 bp, Homo sapien
agattttagtctccgcgaaggaacttcttgctt

SEQ ID NO: 544947 - DNA, 33 bp, Homo sapien
cttgatactaggtacaaatgcttccagtggtat

SEQ ID NO: 544948 - DNA, 33 bp, Homo sapien
cttgatactaggtacacatgcttccagtggtat

SEQ ID NO: 544949 - DNA, 33 bp, Homo sapien
ctgaaacttgctcaaaacagtctccatttgtaa

SEQ ID NO: 544950 - DNA, 33 bp, Homo sapien
ctgaaacttgctcaaagcagtctccatttgtaa

SEQ ID NO: 544951 - DNA, 33 bp, Homo sapien
aagacactctgctatcactaccataagttgctt

SEQ ID NO: 544952 - DNA, 33 bp, Homo sapien
aagacactctgctatctctaccataagttgctt

SEQ ID NO: 544953 - DNA, 33 bp, Homo sapien
tcacattttttttcagaccaggatctaaaacaa

SEQ ID NO: 544954 - DNA, 33 bp, Homo sapien
tcacattttttttcaggccaggatctaaaacaa

SEQ ID NO: 544955 - DNA, 33 bp, Homo sapien
aagtgacgaagaggaacagagaaaaacctttct

SEQ ID NO: 544956 - DNA, 33 bp, Homo sapien
aagtgacgaagaggaatagagaaaaacctttct

SEQ ID NO: 544957 - DNA, 33 bp, Homo sapien
gatctgagatgtccacacaaacaaagttgggca

SEQ ID NO: 544958 - DNA, 33 bp, Homo sapien
gatctgagatgtccacgcaaacaaagttgggca

SEQ ID NO: 544959 - DNA, 33 bp, Homo sapien
taccttttatagacaaagaaactgaagaacaca

SEQ ID NO: 544960 - DNA, 33 bp, Homo sapien
taccttttatagacaaggaaactgaagaacaca

SEQ ID NO: 544961 - DNA, 33 bp, Homo sapien
ttgtctataaaaggtacgtaattatcattccca

SEQ ID NO: 544962 - DNA, 33 bp, Homo sapien
ttgtctataaaaggtatgtaattatcattccca

SEQ ID NO: 544963 - DNA, 33 bp, Homo sapien
cagtgaaatcataatccccgaggctgggatcct

SEQ ID NO: 544964 - DNA, 33 bp, Homo sapien
cagtgaaatcataatctccgaggctgggatcct

SEQ ID NO: 544965 - DNA, 33 bp, Homo sapien
atttaatagaaatatgcaaagaagcaaaagaga

SEQ ID NO: 544966 - DNA, 33 bp, Homo sapien
atttaatagaaatatggaaagaagcaaaagaga

SEQ ID NO: 544967 - DNA, 33 bp, Homo sapien
gcaaatccattgagaaagaaagcagattagtag

SEQ ID NO: 544968 - DNA, 33 bp, Homo sapien
gcaaatccattgagaaggaaagcagattagtag

SEQ ID NO: 544969 - DNA, 33 bp, Homo sapien
agaatgctggtaaaacaatatttcttggtgtgt

SEQ ID NO: 544970 - DNA, 33 bp, Homo sapien
agaatgctggtaaaacgatatttcttggtgtgt

SEQ ID NO: 544971 - DNA, 33 bp, Homo sapien
gcatttggtccacaccagatatcagagtccctt

SEQ ID NO: 544972 - DNA, 33 bp, Homo sapien
gcatttggtccacacccgatatcagagtccctt

SEQ ID NO: 544973 - DNA, 33 bp, Homo sapien
gtgattctctgaaaacacccaggattttagtcc

SEQ ID NO: 544974 - DNA, 33 bp, Homo sapien
gtgattctctgaaaacgcccaggattttagtcc

SEQ ID NO: 544975 - DNA, 33 bp, Homo sapien
actcccaactggtctaaaacacgctccctctgc

SEQ ID NO: 544976 - DNA, 33 bp, Homo sapien
actcccaactggtctataacacgctccctctgc

SEQ ID NO: 544977 - DNA, 33 bp, Homo sapien
aacatgggacttcagacgatttaactaactttg

SEQ ID NO: 544978 - DNA, 33 bp, Homo sapien
aacatgggacttcagatgatttaactaactttg

SEQ ID NO: 544979 - DNA, 33 bp, Homo sapien
cagagttgtgagcaccaggaaaaagtgctaatg

SEQ ID NO: 544980 - DNA, 33 bp, Homo sapien
cagagttgtgagcaccgggaaaaagtgctaatg

SEQ ID NO: 544981 - DNA, 33 bp, Homo sapien
ctctagatcacaaaggacaagcagtttccagga

SEQ ID NO: 544982 - DNA, 33 bp, Homo sapien
ctctagatcacaaagggcaagcagtttccagga

SEQ ID NO: 544983 - DNA, 33 bp, Homo sapien
ttgttgagtgcttataagttccaagccttgtaa

SEQ ID NO: 544984 - DNA, 33 bp, Homo sapien
ttgttgagtgcttatatgttccaagccttgtaa

SEQ ID NO: 544985 - DNA, 33 bp, Homo sapien
aggagaagagagacaacgctaagaataacttgc

SEQ ID NO: 544986 - DNA, 33 bp, Homo sapien
aggagaagagagacaatgctaagaataacttgc

SEQ ID NO: 544987 - DNA, 33 bp, Homo sapien
cctcatataggcctagaacaaaattggcatttg

SEQ ID NO: 544988 - DNA, 33 bp, Homo sapien
cctcatataggcctagcacaaaattggcatttg

SEQ ID NO: 544989 - DNA, 33 bp, Homo sapien
aatgtgtgttgtgtagaatttttagcacaggcc

SEQ ID NO: 544990 - DNA, 33 bp, Homo sapien
aatgtgtgttgtgtagtatttttagcacaggcc

SEQ ID NO: 544991 - DNA, 33 bp, Homo sapien
aagaggttaattccatcagatgagctatcacat

SEQ ID NO: 544992 - DNA, 33 bp, Homo sapien
aagaggttaattccatgagatgagctatcacat

SEQ ID NO: 544993 - DNA, 33 bp, Homo sapien
catctgagggtaatggaatctcgagagataatg

SEQ ID NO: 544994 - DNA, 33 bp, Homo sapien
catctgagggtaatggcatctcgagagataatg

SEQ ID NO: 544995 - DNA, 33 bp, Homo sapien
cctaaactagttgagactaaattgtccctttac

SEQ ID NO: 544996 - DNA, 33 bp, Homo sapien
cctaaactagttgagagtaaattgtccctttac

SEQ ID NO: 544997 - DNA, 33 bp, Homo sapien
tgcataaatgcaacaccgtggaatgcagcaggt

SEQ ID NO: 544998 - DNA, 33 bp, Homo sapien
tgcataaatgcaacactgtggaatgcagcaggt

SEQ ID NO: 544999 - DNA, 33 bp, Homo sapien
cattatgcctgatttaactcaatgcataatcac

SEQ ID NO: 545000 - DNA, 33 bp, Homo sapien
cattatgcctgatttagctcaatgcataatcac

SEQ ID NO: 545001 - DNA, 33 bp, Homo sapien
gtctaaaagagtgccactaatacctaattcaca

SEQ ID NO: 545002 - DNA, 33 bp, Homo sapien
gtctaaaagagtgccattaatacctaattcaca

SEQ ID NO: 545003 - DNA, 33 bp, Homo sapien
ccaaagcagcaatgacagcaggcaaaaccagca

SEQ ID NO: 545004 - DNA, 33 bp, Homo sapien
ccaaagcagcaatgacggcaggcaaaaccagca

SEQ ID NO: 545005 - DNA, 33 bp, Homo sapien
cacaagtagactaagacagtaagcaaggaacac

SEQ ID NO: 545006 - DNA, 33 bp, Homo sapien
cacaagtagactaagagagtaagcaaggaacac

SEQ ID NO: 545007 - DNA, 33 bp, Homo sapien
ggtatcctatcattgaggttcacatttattctt

SEQ ID NO: 545008 - DNA, 33 bp, Homo sapien
ggtatcctatcattgatgttcacatttattctt

SEQ ID NO: 545009 - DNA, 33 bp, Homo sapien
gctgcaaaagtcaaaggcactgctaatactgtg

SEQ ID NO: 545010 - DNA, 33 bp, Homo sapien
gctgcaaaagtcaaagtcactgctaatactgtg

SEQ ID NO: 545011 - DNA, 33 bp, Homo sapien
aagaacagttcaataagtagttttgcaatgtta

SEQ ID NO: 545012 - DNA, 33 bp, Homo sapien
aagaacagttcaataattagttttgcaatgtta

SEQ ID NO: 545013 - DNA, 33 bp, Homo sapien
ctgttgtcaactcgagcactttttcagattccc

SEQ ID NO: 545014 - DNA, 33 bp, Homo sapien
ctgttgtcaactcgagtactttttcagattccc

SEQ ID NO: 545015 - DNA, 33 bp, Homo sapien
ccataatgatattgccaaagatgaatatgtata

SEQ ID NO: 545016 - DNA, 33 bp, Homo sapien
ccataatgatattgcctaagatgaatatgtata

SEQ ID NO: 545017 - DNA, 33 bp, Homo sapien
tagtaatcataagtacaatggcaatcgtaactc

SEQ ID NO: 545018 - DNA, 33 bp, Homo sapien
tagtaatcataagtaccatggcaatcgtaactc

SEQ ID NO: 545019 - DNA, 33 bp, Homo sapien
ggcagtttattcaatacactgtttagttcagct

SEQ ID NO: 545020 - DNA, 33 bp, Homo sapien
ggcagtttattcaatatactgtttagttcagct

SEQ ID NO: 545021 - DNA, 33 bp, Homo sapien
aatagacctcagagaaccctcagaaattctgga

SEQ ID NO: 545022 - DNA, 33 bp, Homo sapien
aatagacctcagagaatcctcagaaattctgga

SEQ ID NO: 545023 - DNA, 33 bp, Homo sapien
gcaccttgtcacttgcaaatcaatgagagccct

SEQ ID NO: 545024 - DNA, 33 bp, Homo sapien
gcaccttgtcacttgctaatcaatgagagccct

SEQ ID NO: 545025 - DNA, 33 bp, Homo sapien
gtaaagtagaacgtaacataggcaattatgtat

SEQ ID NO: 545026 - DNA, 33 bp, Homo sapien
gtaaagtagaacgtaatataggcaattatgtat

SEQ ID NO: 545027 - DNA, 33 bp, Homo sapien
tggatggggaatagtcacaaagagatacaattt

SEQ ID NO: 545028 - DNA, 33 bp, Homo sapien
tggatggggaatagtcccaaagagatacaattt

SEQ ID NO: 545029 - DNA, 33 bp, Homo sapien
caccaaatgtcaataccgatgcttgatggtatg

SEQ ID NO: 545030 - DNA, 33 bp, Homo sapien
caccaaatgtcaatactgatgcttgatggtatg

SEQ ID NO: 545031 - DNA, 33 bp, Homo sapien
ggcagatcttcaaaacaaatctggtgaattaag

SEQ ID NO: 545032 - DNA, 33 bp, Homo sapien
ggcagatcttcaaaacgaatctggtgaattaag

SEQ ID NO: 545033 - DNA, 33 bp, Homo sapien
gtgtctgagaaatttcaccttgactttttttta

SEQ ID NO: 545034 - DNA, 33 bp, Homo sapien
gtgtctgagaaatttcgccttgactttttttta

SEQ ID NO: 545035 - DNA, 33 bp, Homo sapien
ccgagtctgggtcccacagaaaaatgctgaatg

SEQ ID NO: 545036 - DNA, 33 bp, Homo sapien
ccgagtctgggtcccagagaaaaatgctgaatg

SEQ ID NO: 545037 - DNA, 33 bp, Homo sapien
aaaggagtccttgccaaaaatctcagtgatttc

SEQ ID NO: 545038 - DNA, 33 bp, Homo sapien
aaaggagtccttgccacaaatctcagtgatttc

SEQ ID NO: 545039 - DNA, 33 bp, Homo sapien
ttcttattttgaatgcaagtgtaaacagaattt

SEQ ID NO: 545040 - DNA, 33 bp, Homo sapien
ttcttattttgaatgctagtgtaaacagaattt

SEQ ID NO: 545041 - DNA, 33 bp, Homo sapien
caatcttccgaggtaacgggcttagaattgaaa

SEQ ID NO: 545042 - DNA, 33 bp, Homo sapien
caatcttccgaggtaatgggcttagaattgaaa

SEQ ID NO: 545043 - DNA, 33 bp, Homo sapien
ctatattgagaagttccatcacgttaacattta

SEQ ID NO: 545044 - DNA, 33 bp, Homo sapien
ctatattgagaagttctatcacgttaacattta

SEQ ID NO: 545045 - DNA, 33 bp, Homo sapien
cttctcttcttctgtaacaacttaagcaaaggc

SEQ ID NO: 545046 - DNA, 33 bp, Homo sapien
cttctcttcttctgtagcaacttaagcaaaggc

SEQ ID NO: 545047 - DNA, 33 bp, Homo sapien
tttggattgcagaaaagaatttgacagttttca

SEQ ID NO: 545048 - DNA, 33 bp, Homo sapien
tttggattgcagaaaataatttgacagttttca

SEQ ID NO: 545049 - DNA, 33 bp, Homo sapien
ccaggatcttcaagagccagagtagttcagagt

SEQ ID NO: 545050 - DNA, 33 bp, Homo sapien
ccaggatcttcaagagtcagagtagttcagagt

SEQ ID NO: 545051 - DNA, 33 bp, Homo sapien
ttacctaagttatagcagagaagaaatatattt

SEQ ID NO: 545052 - DNA, 33 bp, Homo sapien
ttacctaagttatagccgagaagaaatatattt

SEQ ID NO: 545053 - DNA, 33 bp, Homo sapien
cttctctgtaaaacacaaagtgtatgacatgtc

SEQ ID NO: 545054 - DNA, 33 bp, Homo sapien
cttctctgtaaaacacgaagtgtatgacatgtc

SEQ ID NO: 545055 - DNA, 33 bp, Homo sapien
agagataatgaaatccagatgtaagaaggcaaa

SEQ ID NO: 545056 - DNA, 33 bp, Homo sapien
agagataatgaaatccggatgtaagaaggcaaa

SEQ ID NO: 545057 - DNA, 33 bp, Homo sapien
tttagccattcttctccaaaactggtattttat

SEQ ID NO: 545058 - DNA, 33 bp, Homo sapien
tttagccattcttctctaaaactggtattttat

SEQ ID NO: 545059 - DNA, 33 bp, Homo sapien
tctaagaggagtcccactaatcagtttccagtt

SEQ ID NO: 545060 - DNA, 33 bp, Homo sapien
tctaagaggagtcccagtaatcagtttccagtt

SEQ ID NO: 545061 - DNA, 33 bp, Homo sapien
cattgattgtcactaaatagggattgaaccaat

SEQ ID NO: 545062 - DNA, 33 bp, Homo sapien
cattgattgtcactaactagggattgaaccaat

SEQ ID NO: 545063 - DNA, 33 bp, Homo sapien
atctaaagagcaccggaattctgtagctcaaaa

SEQ ID NO: 545064 - DNA, 33 bp, Homo sapien
atctaaagagcaccgggattctgtagctcaaaa

SEQ ID NO: 545065 - DNA, 33 bp, Homo sapien
gggtggcttccacgtacatggaatatggaaatg

SEQ ID NO: 545066 - DNA, 33 bp, Homo sapien
gggtggcttccacgtatatggaatatggaaatg

SEQ ID NO: 545067 - DNA, 33 bp, Homo sapien
gtgtttggagcacctaaagtagtttctgtcttc

SEQ ID NO: 545068 - DNA, 33 bp, Homo sapien
gtgtttggagcacctacagtagtttctgtcttc

SEQ ID NO: 545069 - DNA, 33 bp, Homo sapien
tcagaagccagtggtcaataaagaatagaaaat

SEQ ID NO: 545070 - DNA, 33 bp, Homo sapien
tcagaagccagtggtccataaagaatagaaaat

SEQ ID NO: 545071 - DNA, 33 bp, Homo sapien
cataatttcagttacacacttgttcactgtctg

SEQ ID NO: 545072 - DNA, 33 bp, Homo sapien
cataatttcagttacatacttgttcactgtctg

SEQ ID NO: 545073 - DNA, 33 bp, Homo sapien
ttaatatgcaggtaaacagagtcacagtaggag

SEQ ID NO: 545074 - DNA, 33 bp, Homo sapien
ttaatatgcaggtaaatagagtcacagtaggag

SEQ ID NO: 545075 - DNA, 33 bp, Homo sapien
ttaagaatattgtgatcagctactacctgaaga

SEQ ID NO: 545076 - DNA, 33 bp, Homo sapien
ttaagaatattgtgattagctactacctgaaga

SEQ ID NO: 545077 - DNA, 33 bp, Homo sapien
ctattgccaccagagaaccatttagatatgtag

SEQ ID NO: 545078 - DNA, 33 bp, Homo sapien
ctattgccaccagagagccatttagatatgtag

SEQ ID NO: 545079 - DNA, 33 bp, Homo sapien
gaaatgagatttaggaaggagatatgagcatga

SEQ ID NO: 545080 - DNA, 33 bp, Homo sapien
gaaatgagatttaggagggagatatgagcatga

SEQ ID NO: 545081 - DNA, 33 bp, Homo sapien
tcgtgtcctcaaagaaacttaatcagtggcaca

SEQ ID NO: 545082 - DNA, 33 bp, Homo sapien
tcgtgtcctcaaagaaccttaatcagtggcaca

SEQ ID NO: 545083 - DNA, 33 bp, Homo sapien
tggagatggcactcaaagtgaggagtcccacca

SEQ ID NO: 545084 - DNA, 33 bp, Homo sapien
tggagatggcactcaacgtgaggagtcccacca

SEQ ID NO: 545085 - DNA, 33 bp, Homo sapien
tcaacgtgtgtagagcactagttttcctgaaaa

SEQ ID NO: 545086 - DNA, 33 bp, Homo sapien
tcaacgtgtgtagagcgctagttttcctgaaaa

SEQ ID NO: 545087 - DNA, 33 bp, Homo sapien
ttccaattatctgttacctcccaatagaatcct

SEQ ID NO: 545088 - DNA, 33 bp, Homo sapien
ttccaattatctgttatctcccaatagaatcct

SEQ ID NO: 545089 - DNA, 33 bp, Homo sapien
gaaattcttcttgccacgattaactttcatttc

SEQ ID NO: 545090 - DNA, 33 bp, Homo sapien
gaaattcttcttgccatgattaactttcatttc

SEQ ID NO: 545091 - DNA, 33 bp, Homo sapien
aaggcaggctccggacaatagccagaaagcttg

SEQ ID NO: 545092 - DNA, 33 bp, Homo sapien
aaggcaggctccggaccatagccagaaagcttg

SEQ ID NO: 545093 - DNA, 33 bp, Homo sapien
ggtttatttgagaagtaaaatgtatcaaggcag

SEQ ID NO: 545094 - DNA, 33 bp, Homo sapien
ggtttatttgagaagtgaaatgtatcaaggcag

SEQ ID NO: 545095 - DNA, 33 bp, Homo sapien
ctatatattcatgtctaaaatgtggtagagtct

SEQ ID NO: 545096 - DNA, 33 bp, Homo sapien
ctatatattcatgtctgaaatgtggtagagtct

SEQ ID NO: 545097 - DNA, 33 bp, Homo sapien
atagaacactaatctccgagaatctcaaagtat

SEQ ID NO: 545098 - DNA, 33 bp, Homo sapien
atagaacactaatctctgagaatctcaaagtat

SEQ ID NO: 545099 - DNA, 33 bp, Homo sapien
atctgattgcaggacacaaacctttgatcacta

SEQ ID NO: 545100 - DNA, 33 bp, Homo sapien
atctgattgcaggacagaaacctttgatcacta

SEQ ID NO: 545101 - DNA, 33 bp, Homo sapien
cctagtacattaccagcaatgttgtagcaatca

SEQ ID NO: 545102 - DNA, 33 bp, Homo sapien
cctagtacattaccaggaatgttgtagcaatca

SEQ ID NO: 545103 - DNA, 33 bp, Homo sapien
ctccaactaactgctcgaatgaagagaaaaatg

SEQ ID NO: 545104 - DNA, 33 bp, Homo sapien
ctccaactaactgctctaatgaagagaaaaatg

SEQ ID NO: 545105 - DNA, 33 bp, Homo sapien
atcccatgctctcaaactctgtgtttatttcct

SEQ ID NO: 545106 - DNA, 33 bp, Homo sapien
atcccatgctctcaaattctgtgtttatttcct

SEQ ID NO: 545107 - DNA, 33 bp, Homo sapien
ttaaaacataaagaaaagttgacactgaaaaag

SEQ ID NO: 545108 - DNA, 33 bp, Homo sapien
ttaaaacataaagaaaggttgacactgaaaaag

SEQ ID NO: 545109 - DNA, 33 bp, Homo sapien
catgtgctcctcatagaaaatccacattttatc

SEQ ID NO: 545110 - DNA, 33 bp, Homo sapien
catgtgctcctcatagcaaatccacattttatc

SEQ ID NO: 545111 - DNA, 33 bp, Homo sapien
tgtatatgaagtgccacgggataagtgctccaa

SEQ ID NO: 545112 - DNA, 33 bp, Homo sapien
tgtatatgaagtgccatgggataagtgctccaa

SEQ ID NO: 545113 - DNA, 33 bp, Homo sapien
gaaatacagaaatacacaatcttaggttcctcc

SEQ ID NO: 545114 - DNA, 33 bp, Homo sapien
gaaatacagaaatacagaatcttaggttcctcc

SEQ ID NO: 545115 - DNA, 33 bp, Homo sapien
ggaaacataagaaagcgccagggatgagacaga

SEQ ID NO: 545116 - DNA, 33 bp, Homo sapien
ggaaacataagaaagctccagggatgagacaga

SEQ ID NO: 545117 - DNA, 33 bp, Homo sapien
cagatgttttggcaaccgaatgaaggcacaaac

SEQ ID NO: 545118 - DNA, 33 bp, Homo sapien
cagatgttttggcaactgaatgaaggcacaaac

SEQ ID NO: 545119 - DNA, 33 bp, Homo sapien
ttaagaacccctctaacgatgaggcaaaatgat

SEQ ID NO: 545120 - DNA, 33 bp, Homo sapien
ttaagaacccctctaatgatgaggcaaaatgat

SEQ ID NO: 545121 - DNA, 33 bp, Homo sapien
gactaagttggagtgccactgtgaattgctcgt

SEQ ID NO: 545122 - DNA, 33 bp, Homo sapien
gactaagttggagtgctactgtgaattgctcgt

SEQ ID NO: 545123 - DNA, 33 bp, Homo sapien
caccagcataaggagacggtagccggtgtcact

SEQ ID NO: 545124 - DNA, 33 bp, Homo sapien
caccagcataaggagatggtagccggtgtcact

SEQ ID NO: 545125 - DNA, 33 bp, Homo sapien
cccttctcaagagcaaacattttccattaattc

SEQ ID NO: 545126 - DNA, 33 bp, Homo sapien
cccttctcaagagcaagcattttccattaattc

SEQ ID NO: 545127 - DNA, 33 bp, Homo sapien
gctaaccttagattacaacccttagattacaac

SEQ ID NO: 545128 - DNA, 33 bp, Homo sapien
gctaaccttagattacgacccttagattacaac

SEQ ID NO: 545129 - DNA, 33 bp, Homo sapien
gaatctaatcagtctactactattgttgcctct

SEQ ID NO: 545130 - DNA, 33 bp, Homo sapien
gaatctaatcagtctattactattgttgcctct

SEQ ID NO: 545131 - DNA, 33 bp, Homo sapien
gtgggaaaatgggaccacatacatcaatatcta

SEQ ID NO: 545132 - DNA, 33 bp, Homo sapien
gtgggaaaatgggaccgcatacatcaatatcta

SEQ ID NO: 545133 - DNA, 33 bp, Homo sapien
agatttaatgtgaaaaaggatcttcagtaggtg

SEQ ID NO: 545134 - DNA, 33 bp, Homo sapien
agatttaatgtgaaaagggatcttcagtaggtg

SEQ ID NO: 545135 - DNA, 33 bp, Homo sapien
ctctgagctcttcaaaatgaaccataagctggg

SEQ ID NO: 545136 - DNA, 33 bp, Homo sapien
ctctgagctcttcaaactgaaccataagctggg

SEQ ID NO: 545137 - DNA, 33 bp, Homo sapien
atttatccaaaatgaccgaggcatttcccttaa

SEQ ID NO: 545138 - DNA, 33 bp, Homo sapien
atttatccaaaatgactgaggcatttcccttaa

SEQ ID NO: 545139 - DNA, 33 bp, Homo sapien
tctttctgaaaacttcaaaatcaaaaagttgct

SEQ ID NO: 545140 - DNA, 33 bp, Homo sapien
tctttctgaaaacttcgaaatcaaaaagttgct

SEQ ID NO: 545141 - DNA, 33 bp, Homo sapien
tacattgcttccagtgaaaatactaggcactat

SEQ ID NO: 545142 - DNA, 33 bp, Homo sapien
tacattgcttccagtggaaatactaggcactat

SEQ ID NO: 545143 - DNA, 33 bp, Homo sapien
tcttcctcttttgtcactcgtgtatagctctgt

SEQ ID NO: 545144 - DNA, 33 bp, Homo sapien
tcttcctcttttgtcattcgtgtatagctctgt

SEQ ID NO: 545145 - DNA, 33 bp, Homo sapien
ctttgtttagtaccaacgttctcattaacacat

SEQ ID NO: 545146 - DNA, 33 bp, Homo sapien
ctttgtttagtaccaatgttctcattaacacat

SEQ ID NO: 545147 - DNA, 33 bp, Homo sapien
acaagggactggatccacagccagatttaattt

SEQ ID NO: 545148 - DNA, 33 bp, Homo sapien
acaagggactggatccgcagccagatttaattt

SEQ ID NO: 545149 - DNA, 33 bp, Homo sapien
attcctgacctgtttgaaggttatatcactgta

SEQ ID NO: 545150 - DNA, 33 bp, Homo sapien
attcctgacctgtttgcaggttatatcactgta

SEQ ID NO: 545151 - DNA, 33 bp, Homo sapien
cacagaaagacatttagatcaccattcactgga

SEQ ID NO: 545152 - DNA, 33 bp, Homo sapien
cacagaaagacatttatatcaccattcactgga

SEQ ID NO: 545153 - DNA, 33 bp, Homo sapien
cccgaagtcacaataggacaaattcagtcttag

SEQ ID NO: 545154 - DNA, 33 bp, Homo sapien
cccgaagtcacaatagtacaaattcagtcttag

SEQ ID NO: 545155 - DNA, 33 bp, Homo sapien
gactgaagatagtagagccaaaaaaatggacgc

SEQ ID NO: 545156 - DNA, 33 bp, Homo sapien
gactgaagatagtagatccaaaaaaatggacgc

SEQ ID NO: 545157 - DNA, 33 bp, Homo sapien
ctgagaatggcttttcacatgatcccaaaatgg

SEQ ID NO: 545158 - DNA, 33 bp, Homo sapien
ctgagaatggcttttcgcatgatcccaaaatgg

SEQ ID NO: 545159 - DNA, 33 bp, Homo sapien
atgagtccatttgcagaagataccgtccaaatg

SEQ ID NO: 545160 - DNA, 33 bp, Homo sapien
atgagtccatttgcaggagataccgtccaaatg

SEQ ID NO: 545161 - DNA, 33 bp, Homo sapien
aggtacagactgagcaagatgtaataaaatact

SEQ ID NO: 545162 - DNA, 33 bp, Homo sapien
aggtacagactgagcatgatgtaataaaatact

SEQ ID NO: 545163 - DNA, 33 bp, Homo sapien
cttgtaagcattggaaaaggaactgaaagtgtt

SEQ ID NO: 545164 - DNA, 33 bp, Homo sapien
cttgtaagcattggaagaggaactgaaagtgtt

SEQ ID NO: 545165 - DNA, 33 bp, Homo sapien
aaaaggagttgaaacacaagccctttctaagcc

SEQ ID NO: 545166 - DNA, 33 bp, Homo sapien
aaaaggagttgaaacagaagccctttctaagcc

SEQ ID NO: 545167 - DNA, 33 bp, Homo sapien
tattcttaagtaaaacacggtgagctccacaga

SEQ ID NO: 545168 - DNA, 33 bp, Homo sapien
tattcttaagtaaaacgcggtgagctccacaga

SEQ ID NO: 545169 - DNA, 33 bp, Homo sapien
atttgtcagcttttaacgtgaatatccagaact

SEQ ID NO: 545170 - DNA, 33 bp, Homo sapien
atttgtcagcttttaatgtgaatatccagaact

SEQ ID NO: 545171 - DNA, 33 bp, Homo sapien
aacaggtctttaagcacggcaattttaagttga

SEQ ID NO: 545172 - DNA, 33 bp, Homo sapien
aacaggtctttaagcatggcaattttaagttga

SEQ ID NO: 545173 - DNA, 33 bp, Homo sapien
cagacaagcaaatcccacaatatattcaagatt

SEQ ID NO: 545174 - DNA, 33 bp, Homo sapien
cagacaagcaaatcccgcaatatattcaagatt

SEQ ID NO: 545175 - DNA, 33 bp, Homo sapien
aatggctgaaaaaaaaacacaaggattactgtt

SEQ ID NO: 545176 - DNA, 33 bp, Homo sapien
aatggctgaaaaaaaaccacaaggattactgtt

SEQ ID NO: 545177 - DNA, 33 bp, Homo sapien
tccccaccttagagaactgagcctgtcgagtta

SEQ ID NO: 545178 - DNA, 33 bp, Homo sapien
tccccaccttagagaattgagcctgtcgagtta

SEQ ID NO: 545179 - DNA, 33 bp, Homo sapien
tttattatataaggcaagattgatagcaggatg

SEQ ID NO: 545180 - DNA, 33 bp, Homo sapien
tttattatataaggcaggattgatagcaggatg

SEQ ID NO: 545181 - DNA, 33 bp, Homo sapien
gcatcagacttccatgccacacatttgctgcca

SEQ ID NO: 545182 - DNA, 33 bp, Homo sapien
gcatcagacttccatgtcacacatttgctgcca

SEQ ID NO: 545183 - DNA, 33 bp, Homo sapien
atggtccactgtcttccaagttgaaagagttgg

SEQ ID NO: 545184 - DNA, 33 bp, Homo sapien
atggtccactgtcttctaagttgaaagagttgg

SEQ ID NO: 545185 - DNA, 33 bp, Homo sapien
agcaaagaatgagaaagcatgagtacaggttgt

SEQ ID NO: 545186 - DNA, 33 bp, Homo sapien
agcaaagaatgagaaatcatgagtacaggttgt

SEQ ID NO: 545187 - DNA, 33 bp, Homo sapien
tcgatggaacaagcacaacactgagagatgaga

SEQ ID NO: 545188 - DNA, 33 bp, Homo sapien
tcgatggaacaagcactacactgagagatgaga

SEQ ID NO: 545189 - DNA, 33 bp, Homo sapien
attttaaaatccttcaaacagacaacaaagcaa

SEQ ID NO: 545190 - DNA, 33 bp, Homo sapien
attttaaaatccttcagacagacaacaaagcaa

SEQ ID NO: 545191 - DNA, 33 bp, Homo sapien
agtgccaatgggaaaaaatttgtggttcaagaa

SEQ ID NO: 545192 - DNA, 33 bp, Homo sapien
agtgccaatgggaaaagatttgtggttcaagaa

SEQ ID NO: 545193 - DNA, 33 bp, Homo sapien
aaggagaccagtaagaacaaggttgagaagcta

SEQ ID NO: 545194 - DNA, 33 bp, Homo sapien
aaggagaccagtaagagcaaggttgagaagcta

SEQ ID NO: 545195 - DNA, 33 bp, Homo sapien
acgtgccatataaacccaaaagttctatttctc

SEQ ID NO: 545196 - DNA, 33 bp, Homo sapien
acgtgccatataaacctaaaagttctatttctc

SEQ ID NO: 545197 - DNA, 33 bp, Homo sapien
aatgcaaaactgtggaaaaaagtaagtcaactt

SEQ ID NO: 545198 - DNA, 33 bp, Homo sapien
aatgcaaaactgtggacaaaagtaagtcaactt

SEQ ID NO: 545199 - DNA, 33 bp, Homo sapien
gtcacagatttgataccggaggatctcaaagca

SEQ ID NO: 545200 - DNA, 33 bp, Homo sapien
gtcacagatttgatactggaggatctcaaagca

SEQ ID NO: 545201 - DNA, 33 bp, Homo sapien
tacattgttcaatgtaactttcccatcattttt

SEQ ID NO: 545202 - DNA, 33 bp, Homo sapien
tacattgttcaatgtagctttcccatcattttt

SEQ ID NO: 545203 - DNA, 33 bp, Homo sapien
ttaactgatgtctttacaaggattcccaaaaga

SEQ ID NO: 545204 - DNA, 33 bp, Homo sapien
ttaactgatgtctttataaggattcccaaaaga

SEQ ID NO: 545205 - DNA, 33 bp, Homo sapien
aaagtcactcctaaaaatagtctgttactttgc

SEQ ID NO: 545206 - DNA, 33 bp, Homo sapien
aaagtcactcctaaaattagtctgttactttgc

SEQ ID NO: 545207 - DNA, 33 bp, Homo sapien
taaaacccaatattacccagtatggctgatctc

SEQ ID NO: 545208 - DNA, 33 bp, Homo sapien
taaaacccaatattacgcagtatggctgatctc

SEQ ID NO: 545209 - DNA, 33 bp, Homo sapien
gaaggaaaacttgcagcagagttagaggcgata

SEQ ID NO: 545210 - DNA, 33 bp, Homo sapien
gaaggaaaacttgcagtagagttagaggcgata

SEQ ID NO: 545211 - DNA, 33 bp, Homo sapien
tttgtaatccacctgaaataaaacagattgccc

SEQ ID NO: 545212 - DNA, 33 bp, Homo sapien
tttgtaatccacctgagataaaacagattgccc

SEQ ID NO: 545213 - DNA, 33 bp, Homo sapien
agctttaaaatactaaatccgagtactatttca

SEQ ID NO: 545214 - DNA, 33 bp, Homo sapien
agctttaaaatactaattccgagtactatttca

SEQ ID NO: 545215 - DNA, 33 bp, Homo sapien
catgttaaataatgaaaggaataccacattaga

SEQ ID NO: 545216 - DNA, 33 bp, Homo sapien
catgttaaataatgaacggaataccacattaga

SEQ ID NO: 545217 - DNA, 33 bp, Homo sapien
atctagattagaacataaggcttaaagagatgc

SEQ ID NO: 545218 - DNA, 33 bp, Homo sapien
atctagattagaacattaggcttaaagagatgc

SEQ ID NO: 545219 - DNA, 33 bp, Homo sapien
ggtaacagcaagaaaaaccacggaagtaacaat

SEQ ID NO: 545220 - DNA, 33 bp, Homo sapien
ggtaacagcaagaaaagccacggaagtaacaat

SEQ ID NO: 545221 - DNA, 33 bp, Homo sapien
acgttgtaattaatgaagaataagttgaatact

SEQ ID NO: 545222 - DNA, 33 bp, Homo sapien
acgttgtaattaatgatgaataagttgaatact

SEQ ID NO: 545223 - DNA, 33 bp, Homo sapien
taagctaatgggagaaaataaaggagaagctat

SEQ ID NO: 545224 - DNA, 33 bp, Homo sapien
taagctaatgggagaagataaaggagaagctat

SEQ ID NO: 545225 - DNA, 33 bp, Homo sapien
ttctaagtgctctataagtatccaacaactttt

SEQ ID NO: 545226 - DNA, 33 bp, Homo sapien
ttctaagtgctctatatgtatccaacaactttt

SEQ ID NO: 545227 - DNA, 33 bp, Homo sapien
gatatttaaggctaaacaccacgaggaagtgca

SEQ ID NO: 545228 - DNA, 33 bp, Homo sapien
gatatttaaggctaaataccacgaggaagtgca

SEQ ID NO: 545229 - DNA, 33 bp, Homo sapien
ttcaaagaaaggtctacgttagtgattgcagtc

SEQ ID NO: 545230 - DNA, 33 bp, Homo sapien
ttcaaagaaaggtctatgttagtgattgcagtc

SEQ ID NO: 545231 - DNA, 33 bp, Homo sapien
tcattatatagccatacgacagtcctctctcct

SEQ ID NO: 545232 - DNA, 33 bp, Homo sapien
tcattatatagccatatgacagtcctctctcct

SEQ ID NO: 545233 - DNA, 33 bp, Homo sapien
tctgctaagcatatcacggacgtccagctggca

SEQ ID NO: 545234 - DNA, 33 bp, Homo sapien
tctgctaagcatatcatggacgtccagctggca

SEQ ID NO: 545235 - DNA, 33 bp, Homo sapien
agctgtgtgtaatcaaagaaagcttatcgtttc

SEQ ID NO: 545236 - DNA, 33 bp, Homo sapien
agctgtgtgtaatcaaggaaagcttatcgtttc

SEQ ID NO: 545237 - DNA, 33 bp, Homo sapien
aaacaggtataatagcacccaccagtcaaaagt

SEQ ID NO: 545238 - DNA, 33 bp, Homo sapien
aaacaggtataatagctcccaccagtcaaaagt

SEQ ID NO: 545239 - DNA, 33 bp, Homo sapien
tacaacctgctcttacactaagtgagacaaagg

SEQ ID NO: 545240 - DNA, 33 bp, Homo sapien
tacaacctgctcttaccctaagtgagacaaagg

SEQ ID NO: 545241 - DNA, 33 bp, Homo sapien
ttcaaattgcctaaaaaggcgtttggaggccta

SEQ ID NO: 545242 - DNA, 33 bp, Homo sapien
ttcaaattgcctaaaagggcgtttggaggccta

SEQ ID NO: 545243 - DNA, 33 bp, Homo sapien
gtcatcaaaccttttgcactgcaatgctgattt

SEQ ID NO: 545244 - DNA, 33 bp, Homo sapien
gtcatcaaaccttttgtactgcaatgctgattt

SEQ ID NO: 545245 - DNA, 33 bp, Homo sapien
gacagtataagaggtaaacctggataaaagaag

SEQ ID NO: 545246 - DNA, 33 bp, Homo sapien
gacagtataagaggtagacctggataaaagaag

SEQ ID NO: 545247 - DNA, 33 bp, Homo sapien
acgagcctcctctgtaccataactttgagttct

SEQ ID NO: 545248 - DNA, 33 bp, Homo sapien
acgagcctcctctgtatcataactttgagttct

SEQ ID NO: 545249 - DNA, 33 bp, Homo sapien
tcattatcactgagaactcatgggcagctggtg

SEQ ID NO: 545250 - DNA, 33 bp, Homo sapien
tcattatcactgagaattcatgggcagctggtg

SEQ ID NO: 545251 - DNA, 33 bp, Homo sapien
ctattcgtctgttctccgaatctgggaaaactc

SEQ ID NO: 545252 - DNA, 33 bp, Homo sapien
ctattcgtctgttctctgaatctgggaaaactc

SEQ ID NO: 545253 - DNA, 33 bp, Homo sapien
acaaattataaaagcacggtgtgtaacccaata

SEQ ID NO: 545254 - DNA, 33 bp, Homo sapien
acaaattataaaagcatggtgtgtaacccaata

SEQ ID NO: 545255 - DNA, 33 bp, Homo sapien
agagaaagttggaaaagtatccaccaaagagtt

SEQ ID NO: 545256 - DNA, 33 bp, Homo sapien
agagaaagttggaaaattatccaccaaagagtt

SEQ ID NO: 545257 - DNA, 33 bp, Homo sapien
aactaaactttatctacgtggctccatttccta

SEQ ID NO: 545258 - DNA, 33 bp, Homo sapien
aactaaactttatctatgtggctccatttccta

SEQ ID NO: 545259 - DNA, 33 bp, Homo sapien
actgccctgatccaagcattatgctatttgtat

SEQ ID NO: 545260 - DNA, 33 bp, Homo sapien
actgccctgatccaagtattatgctatttgtat

SEQ ID NO: 545261 - DNA, 33 bp, Homo sapien
aatattgaaagaggacaagaagctcaaatgagg

SEQ ID NO: 545262 - DNA, 33 bp, Homo sapien
aatattgaaagaggacgagaagctcaaatgagg

SEQ ID NO: 545263 - DNA, 33 bp, Homo sapien
catgaagaaaattagacgtgaataaatcattta

SEQ ID NO: 545264 - DNA, 33 bp, Homo sapien
catgaagaaaattagatgtgaataaatcattta

SEQ ID NO: 545265 - DNA, 33 bp, Homo sapien
tagccatggctaaaaagggccaaggtgtacctc

SEQ ID NO: 545266 - DNA, 33 bp, Homo sapien
tagccatggctaaaaatggccaaggtgtacctc

SEQ ID NO: 545267 - DNA, 33 bp, Homo sapien
atgaatgcagaatcccaggaagttcagatgaga

SEQ ID NO: 545268 - DNA, 33 bp, Homo sapien
atgaatgcagaatcccgggaagttcagatgaga

SEQ ID NO: 545269 - DNA, 33 bp, Homo sapien
aacactgacagaaaaaagagctaaaacttatat

SEQ ID NO: 545270 - DNA, 33 bp, Homo sapien
aacactgacagaaaaaggagctaaaacttatat

SEQ ID NO: 545271 - DNA, 33 bp, Homo sapien
attctttgcctagaccaatatccagaagagttt

SEQ ID NO: 545272 - DNA, 33 bp, Homo sapien
attctttgcctagaccgatatccagaagagttt

SEQ ID NO: 545273 - DNA, 33 bp, Homo sapien
ttgcttgagccaaacacattcctaactgataca

SEQ ID NO: 545274 - DNA, 33 bp, Homo sapien
ttgcttgagccaaacagattcctaactgataca

SEQ ID NO: 545275 - DNA, 33 bp, Homo sapien
gtttagctttaactcaagagattcagttcagct

SEQ ID NO: 545276 - DNA, 33 bp, Homo sapien
gtttagctttaactcaggagattcagttcagct

SEQ ID NO: 545277 - DNA, 33 bp, Homo sapien
aaggggtctggcagtcacatcatgagagacctt

SEQ ID NO: 545278 - DNA, 33 bp, Homo sapien
aaggggtctggcagtcgcatcatgagagacctt

SEQ ID NO: 545279 - DNA, 33 bp, Homo sapien
aaatcattgcttctatcagtcagaggtatcaaa

SEQ ID NO: 545280 - DNA, 33 bp, Homo sapien
aaatcattgcttctatgagtcagaggtatcaaa

SEQ ID NO: 545281 - DNA, 33 bp, Homo sapien
aaaactgatggtctaacagtaagttgatatgtt

SEQ ID NO: 545282 - DNA, 33 bp, Homo sapien
aaaactgatggtctaatagtaagttgatatgtt

SEQ ID NO: 545283 - DNA, 33 bp, Homo sapien
gtgcagtattgtttgaagggcccaagtagcaac

SEQ ID NO: 545284 - DNA, 33 bp, Homo sapien
gtgcagtattgtttgatgggcccaagtagcaac

SEQ ID NO: 545285 - DNA, 33 bp, Homo sapien
tccagcataaaggacacgtgtcataacagagta

SEQ ID NO: 545286 - DNA, 33 bp, Homo sapien
tccagcataaaggacatgtgtcataacagagta

SEQ ID NO: 545287 - DNA, 33 bp, Homo sapien
aatatttttctccacagggagcatttggaaggc

SEQ ID NO: 545288 - DNA, 33 bp, Homo sapien
aatatttttctccacatggagcatttggaaggc

SEQ ID NO: 545289 - DNA, 33 bp, Homo sapien
tcagagcctgcacaaaacctcctcaaatccagc

SEQ ID NO: 545290 - DNA, 33 bp, Homo sapien
tcagagcctgcacaaaccctcctcaaatccagc

SEQ ID NO: 545291 - DNA, 33 bp, Homo sapien
caaaggctctaccagaatcactggacagcatat

SEQ ID NO: 545292 - DNA, 33 bp, Homo sapien
caaaggctctaccagagtcactggacagcatat

SEQ ID NO: 545293 - DNA, 33 bp, Homo sapien
tttgctttttccattaccttcataaagtaacga

SEQ ID NO: 545294 - DNA, 33 bp, Homo sapien
tttgctttttccattagcttcataaagtaacga

SEQ ID NO: 545295 - DNA, 33 bp, Homo sapien
cccaaaacatcatcagaacaaatctctaagcgc

SEQ ID NO: 545296 - DNA, 33 bp, Homo sapien
cccaaaacatcatcaggacaaatctctaagcgc

SEQ ID NO: 545297 - DNA, 33 bp, Homo sapien
aggagaataaaatagcaatgatggaaaagcttt

SEQ ID NO: 545298 - DNA, 33 bp, Homo sapien
aggagaataaaatagcgatgatggaaaagcttt

SEQ ID NO: 545299 - DNA, 33 bp, Homo sapien
tcactgttggaagataaataaccctcagctgtc

SEQ ID NO: 545300 - DNA, 33 bp, Homo sapien
tcactgttggaagatagataaccctcagctgtc

SEQ ID NO: 545301 - DNA, 33 bp, Homo sapien
ttttatcttcatattacgttggtttgaggaaga

SEQ ID NO: 545302 - DNA, 33 bp, Homo sapien
ttttatcttcatattatgttggtttgaggaaga

SEQ ID NO: 545303 - DNA, 33 bp, Homo sapien
tttctgtctacactagaacaaatttacataaat

SEQ ID NO: 545304 - DNA, 33 bp, Homo sapien
tttctgtctacactaggacaaatttacataaat

SEQ ID NO: 545305 - DNA, 33 bp, Homo sapien
aaatgttctgagttggaaacactgaggtataca

SEQ ID NO: 545306 - DNA, 33 bp, Homo sapien
aaatgttctgagttgggaacactgaggtataca

SEQ ID NO: 545307 - DNA, 33 bp, Homo sapien
actgtggtatatgccgcagtgaaggtacgatga

SEQ ID NO: 545308 - DNA, 33 bp, Homo sapien
actgtggtatatgccgtagtgaaggtacgatga

SEQ ID NO: 545309 - DNA, 33 bp, Homo sapien
acaagccatgtctgctgaattgattttttgatt

SEQ ID NO: 545310 - DNA, 33 bp, Homo sapien
acaagccatgtctgcttaattgattttttgatt

SEQ ID NO: 545311 - DNA, 33 bp, Homo sapien
tattcatgttatgtaacctaatgaccacttgga

SEQ ID NO: 545312 - DNA, 33 bp, Homo sapien
tattcatgttatgtaatctaatgaccacttgga

SEQ ID NO: 545313 - DNA, 33 bp, Homo sapien
cagtttacgaattctcccctctgttgtgtttaa

SEQ ID NO: 545314 - DNA, 33 bp, Homo sapien
cagtttacgaattctctcctctgttgtgtttaa

SEQ ID NO: 545315 - DNA, 33 bp, Homo sapien
agctattaaaccatcaaagagttgtttatgaaa

SEQ ID NO: 545316 - DNA, 33 bp, Homo sapien
agctattaaaccatcagagagttgtttatgaaa

SEQ ID NO: 545317 - DNA, 33 bp, Homo sapien
attgccagctgtaataccctgtgaaaacatcat

SEQ ID NO: 545318 - DNA, 33 bp, Homo sapien
attgccagctgtaatatcctgtgaaaacatcat

SEQ ID NO: 545319 - DNA, 33 bp, Homo sapien
cattttcactgcagaacttaaaatccagcaata

SEQ ID NO: 545320 - DNA, 33 bp, Homo sapien
cattttcactgcagaatttaaaatccagcaata

SEQ ID NO: 545321 - DNA, 33 bp, Homo sapien
tttgctgtgcgtttcccataatctcagttaatg

SEQ ID NO: 545322 - DNA, 33 bp, Homo sapien
tttgctgtgcgtttcctataatctcagttaatg

SEQ ID NO: 545323 - DNA, 33 bp, Homo sapien
taacagtataaagttcacaatgttcgatgtccc

SEQ ID NO: 545324 - DNA, 33 bp, Homo sapien
taacagtataaagttcccaatgttcgatgtccc

SEQ ID NO: 545325 - DNA, 33 bp, Homo sapien
gacaaagaaaaaatcaatagaattgtctggtcc

SEQ ID NO: 545326 - DNA, 33 bp, Homo sapien
gacaaagaaaaaatcagtagaattgtctggtcc

SEQ ID NO: 545327 - DNA, 33 bp, Homo sapien
agtgttcggttatacacggtgaagaaggaagat

SEQ ID NO: 545328 - DNA, 33 bp, Homo sapien
agtgttcggttatacatggtgaagaaggaagat

SEQ ID NO: 545329 - DNA, 33 bp, Homo sapien
taaggttctgataaatcactcatctggttacaa

SEQ ID NO: 545330 - DNA, 33 bp, Homo sapien
taaggttctgataaattactcatctggttacaa

SEQ ID NO: 545331 - DNA, 33 bp, Homo sapien
ctggctgaggaacaagaacctcgattcagaaga

SEQ ID NO: 545332 - DNA, 33 bp, Homo sapien
ctggctgaggaacaaggacctcgattcagaaga

SEQ ID NO: 545333 - DNA, 33 bp, Homo sapien
cattagagtaaagcagaaagaaggcctggaaga

SEQ ID NO: 545334 - DNA, 33 bp, Homo sapien
cattagagtaaagcaggaagaaggcctggaaga

SEQ ID NO: 545335 - DNA, 33 bp, Homo sapien
ggtgatatttagtcaacctactataatgcctaa

SEQ ID NO: 545336 - DNA, 33 bp, Homo sapien
ggtgatatttagtcaatctactataatgcctaa

SEQ ID NO: 545337 - DNA, 33 bp, Homo sapien
gccattctagtgacataatagttgtaacagagg

SEQ ID NO: 545338 - DNA, 33 bp, Homo sapien
gccattctagtgacatgatagttgtaacagagg

SEQ ID NO: 545339 - DNA, 33 bp, Homo sapien
agaacttcaaaatcccaaatcatatactcgttt

SEQ ID NO: 545340 - DNA, 33 bp, Homo sapien
agaacttcaaaatcccgaatcatatactcgttt

SEQ ID NO: 545341 - DNA, 33 bp, Homo sapien
caaggatcctattaaacagcttgcaatatacag

SEQ ID NO: 545342 - DNA, 33 bp, Homo sapien
caaggatcctattaaatagcttgcaatatacag

SEQ ID NO: 545343 - DNA, 33 bp, Homo sapien
acttggttctagtcaacttccaaccctttgctc

SEQ ID NO: 545344 - DNA, 33 bp, Homo sapien
acttggttctagtcaatttccaaccctttgctc

SEQ ID NO: 545345 - DNA, 33 bp, Homo sapien
tgaacatcttttcatacgctcactttgccattt

SEQ ID NO: 545346 - DNA, 33 bp, Homo sapien
tgaacatcttttcatatgctcactttgccattt

SEQ ID NO: 545347 - DNA, 33 bp, Homo sapien
acacacgtcataacggaaatacgtattgtgctt

SEQ ID NO: 545348 - DNA, 33 bp, Homo sapien
acacacgtcataacgggaatacgtattgtgctt

SEQ ID NO: 545349 - DNA, 33 bp, Homo sapien
tcccaaagtgttgtggaattataggtgcaagcc

SEQ ID NO: 545350 - DNA, 33 bp, Homo sapien
tcccaaagtgttgtgggattataggtgcaagcc

SEQ ID NO: 545351 - DNA, 33 bp, Homo sapien
taattctgaaattgaaaaagaaaatcatttact

SEQ ID NO: 545352 - DNA, 33 bp, Homo sapien
taattctgaaattgaagaagaaaatcatttact

SEQ ID NO: 545353 - DNA, 33 bp, Homo sapien
cctgagtgcaagacagaaatatttgtgtgagat

SEQ ID NO: 545354 - DNA, 33 bp, Homo sapien
cctgagtgcaagacagtaatatttgtgtgagat

SEQ ID NO: 545355 - DNA, 33 bp, Homo sapien
tagagagaagttacaggagcccaatgcagtgca

SEQ ID NO: 545356 - DNA, 33 bp, Homo sapien
tagagagaagttacagtagcccaatgcagtgca

SEQ ID NO: 545357 - DNA, 33 bp, Homo sapien
gcctccttgtactacaatctctttctgtaatgc

SEQ ID NO: 545358 - DNA, 33 bp, Homo sapien
gcctccttgtactacagtctctttctgtaatgc

SEQ ID NO: 545359 - DNA, 33 bp, Homo sapien
ttcagctcaaaaatctaagacaaaatacactgg

SEQ ID NO: 545360 - DNA, 33 bp, Homo sapien
ttcagctcaaaaatctcagacaaaatacactgg

SEQ ID NO: 545361 - DNA, 33 bp, Homo sapien
gaagctggagtgggcactgatgggacagagagg

SEQ ID NO: 545362 - DNA, 33 bp, Homo sapien
gaagctggagtgggcattgatgggacagagagg

SEQ ID NO: 545363 - DNA, 33 bp, Homo sapien
aatcatccatccaaagaccagatcctacaataa

SEQ ID NO: 545364 - DNA, 33 bp, Homo sapien
aatcatccatccaaagtccagatcctacaataa

SEQ ID NO: 545365 - DNA, 33 bp, Homo sapien
gaagctctaaaggaagcctatggttcactccac

SEQ ID NO: 545366 - DNA, 33 bp, Homo sapien
gaagctctaaaggaagtctatggttcactccac

SEQ ID NO: 545367 - DNA, 33 bp, Homo sapien
gcaactctccaaggcaaccaaattacagccaag

SEQ ID NO: 545368 - DNA, 33 bp, Homo sapien
gcaactctccaaggcacccaaattacagccaag

SEQ ID NO: 545369 - DNA, 33 bp, Homo sapien
attagaacagctgatgacatactgaagggggtg

SEQ ID NO: 545370 - DNA, 33 bp, Homo sapien
attagaacagctgatggcatactgaagggggtg

SEQ ID NO: 545371 - DNA, 33 bp, Homo sapien
tttagcatttccttcaatcaagaacgtcagctg

SEQ ID NO: 545372 - DNA, 33 bp, Homo sapien
tttagcatttccttcagtcaagaacgtcagctg

SEQ ID NO: 545373 - DNA, 33 bp, Homo sapien
aattttgctgctctaaaaatgcttctgttgccg

SEQ ID NO: 545374 - DNA, 33 bp, Homo sapien
aattttgctgctctaacaatgcttctgttgccg

SEQ ID NO: 545375 - DNA, 33 bp, Homo sapien
gacaagatccatcaaccgtgccaccgctatgag

SEQ ID NO: 545376 - DNA, 33 bp, Homo sapien
gacaagatccatcaactgtgccaccgctatgag

SEQ ID NO: 545377 - DNA, 33 bp, Homo sapien
cgtctcccagtctgcaagaactctactctccag

SEQ ID NO: 545378 - DNA, 33 bp, Homo sapien
cgtctcccagtctgcatgaactctactctccag

SEQ ID NO: 545379 - DNA, 33 bp, Homo sapien
gaggtgttcctactcacgagcaaggctaattcc

SEQ ID NO: 545380 - DNA, 33 bp, Homo sapien
gaggtgttcctactcatgagcaaggctaattcc

SEQ ID NO: 545381 - DNA, 33 bp, Homo sapien
ctggcaactttgccaacgacttcctatttgtcc

SEQ ID NO: 545382 - DNA, 33 bp, Homo sapien
ctggcaactttgccaatgacttcctatttgtcc

SEQ ID NO: 545383 - DNA, 33 bp, Homo sapien
ctaggcttgtgataaaaatttaactctcactgg

SEQ ID NO: 545384 - DNA, 33 bp, Homo sapien
ctaggcttgtgataaagatttaactctcactgg

SEQ ID NO: 545385 - DNA, 33 bp, Homo sapien
tccaatgccatagaaacggaatgtcatactcca

SEQ ID NO: 545386 - DNA, 33 bp, Homo sapien
tccaatgccatagaaatggaatgtcatactcca

SEQ ID NO: 545387 - DNA, 33 bp, Homo sapien
gtaggttctttacaaacgattaagtgaagatga

SEQ ID NO: 545388 - DNA, 33 bp, Homo sapien
gtaggttctttacaaatgattaagtgaagatga

SEQ ID NO: 545389 - DNA, 33 bp, Homo sapien
aaaattgcagaggacaaagctattacataaaat

SEQ ID NO: 545390 - DNA, 33 bp, Homo sapien
aaaattgcagaggacacagctattacataaaat

SEQ ID NO: 545391 - DNA, 33 bp, Homo sapien
gcatataattttctggccacagtgattatttca

SEQ ID NO: 545392 - DNA, 33 bp, Homo sapien
gcatataattttctggtcacagtgattatttca

SEQ ID NO: 545393 - DNA, 33 bp, Homo sapien
ctggcttcctctttcacggtagcaaaatgactg

SEQ ID NO: 545394 - DNA, 33 bp, Homo sapien
ctggcttcctctttcatggtagcaaaatgactg

SEQ ID NO: 545395 - DNA, 33 bp, Homo sapien
atgaccccataaagtacccatgttcccatttgt

SEQ ID NO: 545396 - DNA, 33 bp, Homo sapien
atgaccccataaagtatccatgttcccatttgt

SEQ ID NO: 545397 - DNA, 33 bp, Homo sapien
catttgtccctgagcaacatttctgtcctgatg

SEQ ID NO: 545398 - DNA, 33 bp, Homo sapien
catttgtccctgagcagcatttctgtcctgatg

SEQ ID NO: 545399 - DNA, 33 bp, Homo sapien
tctatcagacaaagcaatgacaggacccgcacc

SEQ ID NO: 545400 - DNA, 33 bp, Homo sapien
tctatcagacaaagcagtgacaggacccgcacc

SEQ ID NO: 545401 - DNA, 33 bp, Homo sapien
ttattgcacaaccgtacgaatggaaatgaagaa

SEQ ID NO: 545402 - DNA, 33 bp, Homo sapien
ttattgcacaaccgtatgaatggaaatgaagaa

SEQ ID NO: 545403 - DNA, 33 bp, Homo sapien
aatagaaacaatgaaaacagaatcctatttgaa

SEQ ID NO: 545404 - DNA, 33 bp, Homo sapien
aatagaaacaatgaaagcagaatcctatttgaa

SEQ ID NO: 545405 - DNA, 33 bp, Homo sapien
gggtgaacatctaaaccggcacatctagacatg

SEQ ID NO: 545406 - DNA, 33 bp, Homo sapien
gggtgaacatctaaactggcacatctagacatg

SEQ ID NO: 545407 - DNA, 33 bp, Homo sapien
ctcagcagctggctgcagaagaaagaacaggaa

SEQ ID NO: 545408 - DNA, 33 bp, Homo sapien
ctcagcagctggctgcggaagaaagaacaggaa

SEQ ID NO: 545409 - DNA, 33 bp, Homo sapien
atttagaactgttaccaataatttaatctagtt

SEQ ID NO: 545410 - DNA, 33 bp, Homo sapien
atttagaactgttaccgataatttaatctagtt

SEQ ID NO: 545411 - DNA, 33 bp, Homo sapien
acacatcaactctgccaattacatcatgggttt

SEQ ID NO: 545412 - DNA, 33 bp, Homo sapien
acacatcaactctgccgattacatcatgggttt

SEQ ID NO: 545413 - DNA, 33 bp, Homo sapien
agtttgatgtgccaggacccaaaattgggaatt

SEQ ID NO: 545414 - DNA, 33 bp, Homo sapien
agtttgatgtgccaggtcccaaaattgggaatt

SEQ ID NO: 545415 - DNA, 33 bp, Homo sapien
tatttcaatattgcctaaagagtttcatttcag

SEQ ID NO: 545416 - DNA, 33 bp, Homo sapien
tatttcaatattgcctgaagagtttcatttcag

SEQ ID NO: 545417 - DNA, 33 bp, Homo sapien
ttagtaagagatggtacggtgctaagtttaaca

SEQ ID NO: 545418 - DNA, 33 bp, Homo sapien
ttagtaagagatggtatggtgctaagtttaaca

SEQ ID NO: 545419 - DNA, 33 bp, Homo sapien
tcaaatgaaaatagtaaagggagagccatataa

SEQ ID NO: 545420 - DNA, 33 bp, Homo sapien
tcaaatgaaaatagtacagggagagccatataa

SEQ ID NO: 545421 - DNA, 33 bp, Homo sapien
taagctattataaagaacaggtgtcacagaaga

SEQ ID NO: 545422 - DNA, 33 bp, Homo sapien
taagctattataaagaccaggtgtcacagaaga

SEQ ID NO: 545423 - DNA, 33 bp, Homo sapien
tcttcctcaagagaacgctgtgaaaatttcctc

SEQ ID NO: 545424 - DNA, 33 bp, Homo sapien
tcttcctcaagagaactctgtgaaaatttcctc

SEQ ID NO: 545425 - DNA, 33 bp, Homo sapien
cagaatctctctaaaagaattgttgcagaatga

SEQ ID NO: 545426 - DNA, 33 bp, Homo sapien
cagaatctctctaaaataattgttgcagaatga

SEQ ID NO: 545427 - DNA, 33 bp, Homo sapien
tgaggcttccattaagacgtttggtccattttt

SEQ ID NO: 545428 - DNA, 33 bp, Homo sapien
tgaggcttccattaaggcgtttggtccattttt

SEQ ID NO: 545429 - DNA, 33 bp, Homo sapien
tggatgttgtttagaccggtaaagtgcggtgtg

SEQ ID NO: 545430 - DNA, 33 bp, Homo sapien
tggatgttgtttagactggtaaagtgcggtgtg

SEQ ID NO: 545431 - DNA, 33 bp, Homo sapien
cctgaaactaggccaaaatgatgataggcagag

SEQ ID NO: 545432 - DNA, 33 bp, Homo sapien
cctgaaactaggccaagatgatgataggcagag

SEQ ID NO: 545433 - DNA, 33 bp, Homo sapien
gggtttatgcctagaaacagaattgcaaggaca

SEQ ID NO: 545434 - DNA, 33 bp, Homo sapien
gggtttatgcctagaagcagaattgcaaggaca

SEQ ID NO: 545435 - DNA, 33 bp, Homo sapien
cagcccaagcaaactgaatcaatctatctatct

SEQ ID NO: 545436 - DNA, 33 bp, Homo sapien
cagcccaagcaaactggatcaatctatctatct

SEQ ID NO: 545437 - DNA, 33 bp, Homo sapien
ggaccctcgccaaacactaagtctgctaacacc

SEQ ID NO: 545438 - DNA, 33 bp, Homo sapien
ggaccctcgccaaacattaagtctgctaacacc

SEQ ID NO: 545439 - DNA, 33 bp, Homo sapien
gggaacaggatcatctcaaacagcacccatgtt

SEQ ID NO: 545440 - DNA, 33 bp, Homo sapien
gggaacaggatcatctgaaacagcacccatgtt

SEQ ID NO: 545441 - DNA, 33 bp, Homo sapien
aagtgacagcatagaacagcctgaggacatatt

SEQ ID NO: 545442 - DNA, 33 bp, Homo sapien
aagtgacagcatagaagagcctgaggacatatt

SEQ ID NO: 545443 - DNA, 33 bp, Homo sapien
gggaaaactgtcatcaaataggtattatatggc

SEQ ID NO: 545444 - DNA, 33 bp, Homo sapien
gggaaaactgtcatcagataggtattatatggc

SEQ ID NO: 545445 - DNA, 33 bp, Homo sapien
tttttccgattgtttcaagttccatactggaga

SEQ ID NO: 545446 - DNA, 33 bp, Homo sapien
tttttccgattgtttcgagttccatactggaga

SEQ ID NO: 545447 - DNA, 33 bp, Homo sapien
gtccttttaatagttgcatggtattctcttgta

SEQ ID NO: 545448 - DNA, 33 bp, Homo sapien
gtccttttaatagttgtatggtattctcttgta

SEQ ID NO: 545449 - DNA, 33 bp, Homo sapien
acttcgagatgtctaacaaacaggccacagaac

SEQ ID NO: 545450 - DNA, 33 bp, Homo sapien
acttcgagatgtctaagaaacaggccacagaac

SEQ ID NO: 545451 - DNA, 33 bp, Homo sapien
caaaaatggaaggcacaaatttaagcagccttt

SEQ ID NO: 545452 - DNA, 33 bp, Homo sapien
caaaaatggaaggcacgaatttaagcagccttt

SEQ ID NO: 545453 - DNA, 33 bp, Homo sapien
ccaaagcatagctctcactctgaatgtgtctga

SEQ ID NO: 545454 - DNA, 33 bp, Homo sapien
ccaaagcatagctctcgctctgaatgtgtctga

SEQ ID NO: 545455 - DNA, 33 bp, Homo sapien
ttctgagtgtatgagacgaataatgaatgtggt

SEQ ID NO: 545456 - DNA, 33 bp, Homo sapien
ttctgagtgtatgagatgaataatgaatgtggt

SEQ ID NO: 545457 - DNA, 33 bp, Homo sapien
aaatatagaacccccacgtgatccagcaattcc

SEQ ID NO: 545458 - DNA, 33 bp, Homo sapien
aaatatagaacccccatgtgatccagcaattcc

SEQ ID NO: 545459 - DNA, 33 bp, Homo sapien
aaaacaacgacaatacaatcaggtctgacaaaa

SEQ ID NO: 545460 - DNA, 33 bp, Homo sapien
aaaacaacgacaatacgatcaggtctgacaaaa

SEQ ID NO: 545461 - DNA, 33 bp, Homo sapien
taattgtctggtcatacagccatttgcatatta

SEQ ID NO: 545462 - DNA, 33 bp, Homo sapien
taattgtctggtcatagagccatttgcatatta

SEQ ID NO: 545463 - DNA, 33 bp, Homo sapien
ttgcttcatgaattatcataaggcaaacacctt

SEQ ID NO: 545464 - DNA, 33 bp, Homo sapien
ttgcttcatgaattattataaggcaaacacctt

SEQ ID NO: 545465 - DNA, 33 bp, Homo sapien
aggagagaaggaggagaaaaccacaggatatga

SEQ ID NO: 545466 - DNA, 33 bp, Homo sapien
aggagagaaggaggaggaaaccacaggatatga

SEQ ID NO: 545467 - DNA, 33 bp, Homo sapien
ctactcaaatatcaccaagacacatggaacatg

SEQ ID NO: 545468 - DNA, 33 bp, Homo sapien
ctactcaaatatcacccagacacatggaacatg

SEQ ID NO: 545469 - DNA, 33 bp, Homo sapien
gaatgtgacctgtccacggcggagaagtattac

SEQ ID NO: 545470 - DNA, 33 bp, Homo sapien
gaatgtgacctgtccatggcggagaagtattac

SEQ ID NO: 545471 - DNA, 33 bp, Homo sapien
agcagtgcgtgcatctcaaactaacctgtcctc

SEQ ID NO: 545472 - DNA, 33 bp, Homo sapien
agcagtgcgtgcatctgaaactaacctgtcctc

SEQ ID NO: 545473 - DNA, 33 bp, Homo sapien
aaaagtagggtggcaacagagaaaacaaagatt

SEQ ID NO: 545474 - DNA, 33 bp, Homo sapien
aaaagtagggtggcaagagagaaaacaaagatt

SEQ ID NO: 545475 - DNA, 33 bp, Homo sapien
acagcgggctagctaaaagagtggtggctagac

SEQ ID NO: 545476 - DNA, 33 bp, Homo sapien
acagcgggctagctaagagagtggtggctagac

SEQ ID NO: 545477 - DNA, 33 bp, Homo sapien
caacgaagtatgagcaaaagtaaagtgtgtcac

SEQ ID NO: 545478 - DNA, 33 bp, Homo sapien
caacgaagtatgagcagaagtaaagtgtgtcac

SEQ ID NO: 545479 - DNA, 33 bp, Homo sapien
ctttacttgctggccacatagatagtgacatca

SEQ ID NO: 545480 - DNA, 33 bp, Homo sapien
ctttacttgctggccagatagatagtgacatca

SEQ ID NO: 545481 - DNA, 33 bp, Homo sapien
aatgcaacattttaagccaatggtttcacatgg

SEQ ID NO: 545482 - DNA, 33 bp, Homo sapien
aatgcaacattttaaggcaatggtttcacatgg

SEQ ID NO: 545483 - DNA, 33 bp, Homo sapien
catcaagtttatccaccattcatctagtaagtt

SEQ ID NO: 545484 - DNA, 33 bp, Homo sapien
catcaagtttatccactattcatctagtaagtt

SEQ ID NO: 545485 - DNA, 33 bp, Homo sapien
ggatagtaaaattacactgaattgtagatcata

SEQ ID NO: 545486 - DNA, 33 bp, Homo sapien
ggatagtaaaattacattgaattgtagatcata

SEQ ID NO: 545487 - DNA, 33 bp, Homo sapien
gagaacaccaccaaaaatgtgaaccagtaattt

SEQ ID NO: 545488 - DNA, 33 bp, Homo sapien
gagaacaccaccaaaactgtgaaccagtaattt

SEQ ID NO: 545489 - DNA, 33 bp, Homo sapien
tctctcagtcttaggaggtagggaacattcttc

SEQ ID NO: 545490 - DNA, 33 bp, Homo sapien
tctctcagtcttaggatgtagggaacattcttc

SEQ ID NO: 545491 - DNA, 33 bp, Homo sapien
aaatcctagcccaaaaatgcagtgttagaagta

SEQ ID NO: 545492 - DNA, 33 bp, Homo sapien
aaatcctagcccaaaagtgcagtgttagaagta

SEQ ID NO: 545493 - DNA, 33 bp, Homo sapien
cactaagcctcagaacacagctgaaatagtttg

SEQ ID NO: 545494 - DNA, 33 bp, Homo sapien
cactaagcctcagaacgcagctgaaatagtttg

SEQ ID NO: 545495 - DNA, 33 bp, Homo sapien
tggaagtgttgggggagataattctttaaatgc

SEQ ID NO: 545496 - DNA, 33 bp, Homo sapien
tggaagtgttgggggatataattctttaaatgc

SEQ ID NO: 545497 - DNA, 33 bp, Homo sapien
cccccaacacttccaccgtcctctagaggtaac

SEQ ID NO: 545498 - DNA, 33 bp, Homo sapien
cccccaacacttccactgtcctctagaggtaac

SEQ ID NO: 545499 - DNA, 33 bp, Homo sapien
cttgtaagggttttcaaaatttgcaggaagatt

SEQ ID NO: 545500 - DNA, 33 bp, Homo sapien
cttgtaagggttttcagaatttgcaggaagatt

SEQ ID NO: 545501 - DNA, 33 bp, Homo sapien
aatgcatgagtcagaacattggcctgcaaacct

SEQ ID NO: 545502 - DNA, 33 bp, Homo sapien
aatgcatgagtcagaatattggcctgcaaacct

SEQ ID NO: 545503 - DNA, 33 bp, Homo sapien
atagtcaaaaggtagacgcccaactgtccatcg

SEQ ID NO: 545504 - DNA, 33 bp, Homo sapien
atagtcaaaaggtagatgcccaactgtccatcg

SEQ ID NO: 545505 - DNA, 33 bp, Homo sapien
tacaggttcaatgccacgtgatttcataggttg

SEQ ID NO: 545506 - DNA, 33 bp, Homo sapien
tacaggttcaatgccatgtgatttcataggttg

SEQ ID NO: 545507 - DNA, 33 bp, Homo sapien
gctgagtttcctacctcactctgaatctcctcg

SEQ ID NO: 545508 - DNA, 33 bp, Homo sapien
gctgagtttcctaccttactctgaatctcctcg

SEQ ID NO: 545509 - DNA, 33 bp, Homo sapien
agcctaaaatagtaaaactgtatctctctatct

SEQ ID NO: 545510 - DNA, 33 bp, Homo sapien
agcctaaaatagtaaagctgtatctctctatct

SEQ ID NO: 545511 - DNA, 33 bp, Homo sapien
aactagacctgggcagactgatgtcctatggat

SEQ ID NO: 545512 - DNA, 33 bp, Homo sapien
aactagacctgggcagcctgatgtcctatggat

SEQ ID NO: 545513 - DNA, 33 bp, Homo sapien
acactgcatagtagccaccactgtttatcccag

SEQ ID NO: 545514 - DNA, 33 bp, Homo sapien
acactgcatagtagccgccactgtttatcccag

SEQ ID NO: 545515 - DNA, 33 bp, Homo sapien
tctacacatttcagaacggcttgctgcactttt

SEQ ID NO: 545516 - DNA, 33 bp, Homo sapien
tctacacatttcagaatggcttgctgcactttt

SEQ ID NO: 545517 - DNA, 33 bp, Homo sapien
tttaaaaatgtcattacaccccttctcccaagc

SEQ ID NO: 545518 - DNA, 33 bp, Homo sapien
tttaaaaatgtcattataccccttctcccaagc

SEQ ID NO: 545519 - DNA, 33 bp, Homo sapien
tgttcttttattctgaagattgcactcttgttg

SEQ ID NO: 545520 - DNA, 33 bp, Homo sapien
tgttcttttattctgaggattgcactcttgttg

SEQ ID NO: 545521 - DNA, 33 bp, Homo sapien
tgccgttgataaaaacaccgccgagctggttga

SEQ ID NO: 545522 - DNA, 33 bp, Homo sapien
tgccgttgataaaaacgccgccgagctggttga

SEQ ID NO: 545523 - DNA, 33 bp, Homo sapien
gtaacatgaggataggacagaagactgcgaaat

SEQ ID NO: 545524 - DNA, 33 bp, Homo sapien
gtaacatgaggataggccagaagactgcgaaat

SEQ ID NO: 545525 - DNA, 33 bp, Homo sapien
acctgtttctaatctacacatggtctctgaagc

SEQ ID NO: 545526 - DNA, 33 bp, Homo sapien
acctgtttctaatctatacatggtctctgaagc

SEQ ID NO: 545527 - DNA, 33 bp, Homo sapien
gcaatcccaaagcacccagacatcatgctcagg

SEQ ID NO: 545528 - DNA, 33 bp, Homo sapien
gcaatcccaaagcaccgagacatcatgctcagg

SEQ ID NO: 545529 - DNA, 33 bp, Homo sapien
ttgctgaagttttagcaatcagttaacaggttg

SEQ ID NO: 545530 - DNA, 33 bp, Homo sapien
ttgctgaagttttagccatcagttaacaggttg

SEQ ID NO: 545531 - DNA, 33 bp, Homo sapien
cacttatcagtcaaaaagagagatgaaatccac

SEQ ID NO: 545532 - DNA, 33 bp, Homo sapien
cacttatcagtcaaaaggagagatgaaatccac

SEQ ID NO: 545533 - DNA, 33 bp, Homo sapien
tgagctttcagcaaccaatgccaaagtggaaca

SEQ ID NO: 545534 - DNA, 33 bp, Homo sapien
tgagctttcagcaaccgatgccaaagtggaaca

SEQ ID NO: 545535 - DNA, 33 bp, Homo sapien
ttggcatatcataattaaactgcaaatcaaaga

SEQ ID NO: 545536 - DNA, 33 bp, Homo sapien
ttggcatatcataattcaactgcaaatcaaaga

SEQ ID NO: 545537 - DNA, 33 bp, Homo sapien
tgctgctgctctaatgaatccagtgttttggtg

SEQ ID NO: 545538 - DNA, 33 bp, Homo sapien
tgctgctgctctaatgcatccagtgttttggtg

SEQ ID NO: 545539 - DNA, 33 bp, Homo sapien
cagaggggttatagcacatgtccagcatctcac

SEQ ID NO: 545540 - DNA, 33 bp, Homo sapien
cagaggggttatagcatatgtccagcatctcac

SEQ ID NO: 545541 - DNA, 33 bp, Homo sapien
agactgctggttgcccacaaaaaaattctgtcc

SEQ ID NO: 545542 - DNA, 33 bp, Homo sapien
agactgctggttgcccgcaaaaaaattctgtcc

SEQ ID NO: 545543 - DNA, 33 bp, Homo sapien
gcacctgctttagagcactcagcagaagatagc

SEQ ID NO: 545544 - DNA, 33 bp, Homo sapien
gcacctgctttagagcgctcagcagaagatagc

SEQ ID NO: 545545 - DNA, 33 bp, Homo sapien
agtgccttcctcagcagtacattagactaagga

SEQ ID NO: 545546 - DNA, 33 bp, Homo sapien
agtgccttcctcagcattacattagactaagga

SEQ ID NO: 545547 - DNA, 33 bp, Homo sapien
cacacgaagagaaagtaaaattcatgcccgtta

SEQ ID NO: 545548 - DNA, 33 bp, Homo sapien
cacacgaagagaaagttaaattcatgcccgtta

SEQ ID NO: 545549 - DNA, 33 bp, Homo sapien
atgtccagacttgaaactgttgagtgaaaaaaa

SEQ ID NO: 545550 - DNA, 33 bp, Homo sapien
atgtccagacttgaaattgttgagtgaaaaaaa

SEQ ID NO: 545551 - DNA, 33 bp, Homo sapien
acttggatgtatgtcacgggcaataacaagcca

SEQ ID NO: 545552 - DNA, 33 bp, Homo sapien
acttggatgtatgtcatgggcaataacaagcca

SEQ ID NO: 545553 - DNA, 33 bp, Homo sapien
cccatgactttatttccactcgttcctctgctc

SEQ ID NO: 545554 - DNA, 33 bp, Homo sapien
cccatgactttatttctactcgttcctctgctc

SEQ ID NO: 545555 - DNA, 33 bp, Homo sapien
tcaatctgcccttgaaagctaggtgaacactct

SEQ ID NO: 545556 - DNA, 33 bp, Homo sapien
tcaatctgcccttgaatgctaggtgaacactct

SEQ ID NO: 545557 - DNA, 33 bp, Homo sapien
ctggggaaagccataacgtaataaagcagacaa

SEQ ID NO: 545558 - DNA, 33 bp, Homo sapien
ctggggaaagccataatgtaataaagcagacaa

SEQ ID NO: 545559 - DNA, 33 bp, Homo sapien
gtggctctcctcaaagcctgccatcaaagccta

SEQ ID NO: 545560 - DNA, 33 bp, Homo sapien
gtggctctcctcaaagtctgccatcaaagccta

SEQ ID NO: 545561 - DNA, 33 bp, Homo sapien
cccaagaatttaaaggaaagtattggctctcaa

SEQ ID NO: 545562 - DNA, 33 bp, Homo sapien
cccaagaatttaaagggaagtattggctctcaa

SEQ ID NO: 545563 - DNA, 33 bp, Homo sapien
aattcagtctcaagccaagcagtgcacaggact

SEQ ID NO: 545564 - DNA, 33 bp, Homo sapien
aattcagtctcaagccgagcagtgcacaggact

SEQ ID NO: 545565 - DNA, 33 bp, Homo sapien
tagccacagcaagagaaaaactgagttccttac

SEQ ID NO: 545566 - DNA, 33 bp, Homo sapien
tagccacagcaagagagaaactgagttccttac

SEQ ID NO: 545567 - DNA, 33 bp, Homo sapien
atggctgctgtagatacaggcacttgcaaatga

SEQ ID NO: 545568 - DNA, 33 bp, Homo sapien
atggctgctgtagatataggcacttgcaaatga

SEQ ID NO: 545569 - DNA, 33 bp, Homo sapien
atttataaaggccacaaccccgcatctagcatg

SEQ ID NO: 545570 - DNA, 33 bp, Homo sapien
atttataaaggccacagccccgcatctagcatg

SEQ ID NO: 545571 - DNA, 33 bp, Homo sapien
agtgtttttcatcatacgccatggcttcaacca

SEQ ID NO: 545572 - DNA, 33 bp, Homo sapien
agtgtttttcatcatatgccatggcttcaacca

SEQ ID NO: 545573 - DNA, 33 bp, Homo sapien
gcaagagctgggagatgaaacaaccatcatcta

SEQ ID NO: 545574 - DNA, 33 bp, Homo sapien
gcaagagctgggagattaaacaaccatcatcta

SEQ ID NO: 545575 - DNA, 33 bp, Homo sapien
gcctccaaagctaaaaattgttctgaaaatgaa

SEQ ID NO: 545576 - DNA, 33 bp, Homo sapien
gcctccaaagctaaaagttgttctgaaaatgaa

SEQ ID NO: 545577 - DNA, 33 bp, Homo sapien
gtgagtacataccagaaagctgctgaaaatcca

SEQ ID NO: 545578 - DNA, 33 bp, Homo sapien
gtgagtacataccagagagctgctgaaaatcca

SEQ ID NO: 545579 - DNA, 33 bp, Homo sapien
tatgctgtgcgggaaaaatgatctcgtctatct

SEQ ID NO: 545580 - DNA, 33 bp, Homo sapien
tatgctgtgcgggaaagatgatctcgtctatct

SEQ ID NO: 545581 - DNA, 33 bp, Homo sapien
ggaggacaaaatactaagcaaattaattcagga

SEQ ID NO: 545582 - DNA, 33 bp, Homo sapien
ggaggacaaaatactaggcaaattaattcagga

SEQ ID NO: 545583 - DNA, 33 bp, Homo sapien
ttgctgctgaataaagacaactaatccataatt

SEQ ID NO: 545584 - DNA, 33 bp, Homo sapien
ttgctgctgaataaaggcaactaatccataatt

SEQ ID NO: 545585 - DNA, 33 bp, Homo sapien
gtgatgatatttgataaccttttacctggagga

SEQ ID NO: 545586 - DNA, 33 bp, Homo sapien
gtgatgatatttgatagccttttacctggagga

SEQ ID NO: 545587 - DNA, 33 bp, Homo sapien
tactcacacgccctgaacatcaaagctgtgtgc

SEQ ID NO: 545588 - DNA, 33 bp, Homo sapien
tactcacacgccctgagcatcaaagctgtgtgc

SEQ ID NO: 545589 - DNA, 33 bp, Homo sapien
ggaagtatttacccaaacccatcgtttcttgga

SEQ ID NO: 545590 - DNA, 33 bp, Homo sapien
ggaagtatttacccaatcccatcgtttcttgga

SEQ ID NO: 545591 - DNA, 33 bp, Homo sapien
ctaggactttcaaagacgacaaaagcactaata

SEQ ID NO: 545592 - DNA, 33 bp, Homo sapien
ctaggactttcaaagatgacaaaagcactaata

SEQ ID NO: 545593 - DNA, 33 bp, Homo sapien
tcccacttttgagtgacagcataaaatgtttgg

SEQ ID NO: 545594 - DNA, 33 bp, Homo sapien
tcccacttttgagtgagagcataaaatgtttgg

SEQ ID NO: 545595 - DNA, 33 bp, Homo sapien
gaaggaggcgatggaagaaagcaagccactgtt

SEQ ID NO: 545596 - DNA, 33 bp, Homo sapien
gaaggaggcgatggaataaagcaagccactgtt

SEQ ID NO: 545597 - DNA, 33 bp, Homo sapien
gacacctcggtgaagacggtgacagtatttgtg

SEQ ID NO: 545598 - DNA, 33 bp, Homo sapien
gacacctcggtgaagatggtgacagtatttgtg

SEQ ID NO: 545599 - DNA, 33 bp, Homo sapien
tatttggttcagcagacagagaacgcatctcta

SEQ ID NO: 545600 - DNA, 33 bp, Homo sapien
tatttggttcagcagatagagaacgcatctcta

SEQ ID NO: 545601 - DNA, 33 bp, Homo sapien
agctttacatctcatacgtcctgctcaaagtac

SEQ ID NO: 545602 - DNA, 33 bp, Homo sapien
agctttacatctcatatgtcctgctcaaagtac

SEQ ID NO: 545603 - DNA, 33 bp, Homo sapien
cttcacagctctgttagaagcagatccttacaa

SEQ ID NO: 545604 - DNA, 33 bp, Homo sapien
cttcacagctctgttataagcagatccttacaa

SEQ ID NO: 545605 - DNA, 33 bp, Homo sapien
gtaggtaccatctctgaaaaaaagctgggtctc

SEQ ID NO: 545606 - DNA, 33 bp, Homo sapien
gtaggtaccatctctggaaaaaagctgggtctc

SEQ ID NO: 545607 - DNA, 33 bp, Homo sapien
tttctaagcagttctgaagcatctactgtaaaa

SEQ ID NO: 545608 - DNA, 33 bp, Homo sapien
tttctaagcagttctggagcatctactgtaaaa

SEQ ID NO: 545609 - DNA, 33 bp, Homo sapien
tactctgctttacggcacattagtcctagctag

SEQ ID NO: 545610 - DNA, 33 bp, Homo sapien
tactctgctttacggcgcattagtcctagctag

SEQ ID NO: 545611 - DNA, 33 bp, Homo sapien
gggaatgagtgaatagaaggcgaggtgccatgt

SEQ ID NO: 545612 - DNA, 33 bp, Homo sapien
gggaatgagtgaataggaggcgaggtgccatgt

SEQ ID NO: 545613 - DNA, 33 bp, Homo sapien
ctctgtatttcctgaaatgaatggtggcctgcc

SEQ ID NO: 545614 - DNA, 33 bp, Homo sapien
ctctgtatttcctgaattgaatggtggcctgcc

SEQ ID NO: 545615 - DNA, 33 bp, Homo sapien; identical to SEQ ID NO: 545613

SEQ ID NO: 545616 - DNA, 33 bp, Homo sapien; identical to SEQ ID NO: 545614

SEQ ID NO: 545617 - DNA, 33 bp, Homo sapien
cccattttggccaatgcataaaactgctgatac

SEQ ID NO: 545618 - DNA, 33 bp, Homo sapien
cccattttggccaatgtataaaactgctgatac

SEQ ID NO: 545619 - DNA, 33 bp, Homo sapien
tgtagaaaatgttaaaatgctaatgagagatga

SEQ ID NO: 545620 - DNA, 33 bp, Homo sapien
tgtagaaaatgttaaagtgctaatgagagatga

SEQ ID NO: 545621 - DNA, 33 bp, Homo sapien
gataatgctgagagaaagtaccagttgcccctt

SEQ ID NO: 545622 - DNA, 33 bp, Homo sapien
gataatgctgagagaatgtaccagttgcccctt

SEQ ID NO: 545623 - DNA, 33 bp, Homo sapien
aaacatatgagtgtcacaggaatacatcttatt

SEQ ID NO: 545624 - DNA, 33 bp, Homo sapien
aaacatatgagtgtcataggaatacatcttatt

SEQ ID NO: 545625 - DNA, 33 bp, Homo sapien
tctttgaagaaagacaagttttgagtttggagc

SEQ ID NO: 545626 - DNA, 33 bp, Homo sapien
tctttgaagaaagacaggttttgagtttggagc

SEQ ID NO: 545627 - DNA, 33 bp, Homo sapien
gcaatgtgacactgccaatcttccaatcaggag

SEQ ID NO: 545628 - DNA, 33 bp, Homo sapien
gcaatgtgacactgccgatcttccaatcaggag

SEQ ID NO: 545629 - DNA, 33 bp, Homo sapien
cgtgtgccaggcgctacactatgtgcattacat

SEQ ID NO: 545630 - DNA, 33 bp, Homo sapien
cgtgtgccaggcgctatactatgtgcattacat

SEQ ID NO: 545631 - DNA, 33 bp, Homo sapien
tagcttgtttgccccaaatggagaggtccgaga

SEQ ID NO: 545632 - DNA, 33 bp, Homo sapien
tagcttgtttgccccagatggagaggtccgaga

SEQ ID NO: 545633 - DNA, 33 bp, Homo sapien
aattactgtcccagggaaaatgcaaatgaaggt

SEQ ID NO: 545634 - DNA, 33 bp, Homo sapien
aattactgtcccagggcaaatgcaaatgaaggt

SEQ ID NO: 545635 - DNA, 33 bp, Homo sapien
aattgttgtaacactacgactgattactgttag

SEQ ID NO: 545636 - DNA, 33 bp, Homo sapien
aattgttgtaacactatgactgattactgttag

SEQ ID NO: 545637 - DNA, 33 bp, Homo sapien
gcttgtagactaagacagccatagagaactttc

SEQ ID NO: 545638 - DNA, 33 bp, Homo sapien
gcttgtagactaagaccgccatagagaactttc

SEQ ID NO: 545639 - DNA, 33 bp, Homo sapien
ctgcaaatcctttggacgctcaaattccctgag

SEQ ID NO: 545640 - DNA, 33 bp, Homo sapien
ctgcaaatcctttggatgctcaaattccctgag

SEQ ID NO: 545641 - DNA, 33 bp, Homo sapien
tcaaagtttgatcagacaagctacagtgaaata

SEQ ID NO: 545642 - DNA, 33 bp, Homo sapien
tcaaagtttgatcagataagctacagtgaaata

SEQ ID NO: 545643 - DNA, 33 bp, Homo sapien
ggcccatgtgtgtttacggtctcttagagtaaa

SEQ ID NO: 545644 - DNA, 33 bp, Homo sapien
ggcccatgtgtgtttatggtctcttagagtaaa

SEQ ID NO: 545645 - DNA, 33 bp, Homo sapien
agaaacccagagtaaaattagcatatcattttc

SEQ ID NO: 545646 - DNA, 33 bp, Homo sapien
agaaacccagagtaaagttagcatatcattttc

SEQ ID NO: 545647 - DNA, 33 bp, Homo sapien
atcacacactggaggacgcattgaagccctggg

SEQ ID NO: 545648 - DNA, 33 bp, Homo sapien
atcacacactggaggatgcattgaagccctggg

SEQ ID NO: 545649 - DNA, 33 bp, Homo sapien
aacagcgacaagttggacagcccatctgaatcc

SEQ ID NO: 545650 - DNA, 33 bp, Homo sapien
aacagcgacaagttggtcagcccatctgaatcc

SEQ ID NO: 545651 - DNA, 33 bp, Homo sapien
gagccaccattgacaccaggttcccgaggagcc

SEQ ID NO: 545652 - DNA, 33 bp, Homo sapien
gagccaccattgacactaggttcccgaggagcc

SEQ ID NO: 545653 - DNA, 33 bp, Homo sapien
ttgcctaaaaatggtacgactttgacttaggca

SEQ ID NO: 545654 - DNA, 33 bp, Homo sapien
ttgcctaaaaatggtatgactttgacttaggca

SEQ ID NO: 545655 - DNA, 33 bp, Homo sapien
cagctgtcttccagccaggccctgtgctatgca

SEQ ID NO: 545656 - DNA, 33 bp, Homo sapien
cagctgtcttccagccgggccctgtgctatgca

SEQ ID NO: 545657 - DNA, 33 bp, Homo sapien
ttcataaagttttccaaatatgattgctaagag

SEQ ID NO: 545658 - DNA, 33 bp, Homo sapien
ttcataaagttttccagatatgattgctaagag

SEQ ID NO: 545659 - DNA, 33 bp, Homo sapien
agcagccttgtaccaacaaatgctctgagccct

SEQ ID NO: 545660 - DNA, 33 bp, Homo sapien
agcagccttgtaccaataaatgctctgagccct

SEQ ID NO: 545661 - DNA, 33 bp, Homo sapien
ttcatattaaaacaacacaaacataccttactg

SEQ ID NO: 545662 - DNA, 33 bp, Homo sapien
ttcatattaaaacaacgcaaacataccttactg

SEQ ID NO: 545663 - DNA, 33 bp, Homo sapien
tcaggactttaggtaaaaggcaaatattcagta

SEQ ID NO: 545664 - DNA, 33 bp, Homo sapien
tcaggactttaggtaagaggcaaatattcagta

SEQ ID NO: 545665 - DNA, 33 bp, Homo sapien
caaggtcaatgtatcaacaggtctggtttctcc

SEQ ID NO: 545666 - DNA, 33 bp, Homo sapien
caaggtcaatgtatcaccaggtctggtttctcc

SEQ ID NO: 545667 - DNA, 33 bp, Homo sapien
aacagttacttctctgcaccatggatgacctgc

SEQ ID NO: 545668 - DNA, 33 bp, Homo sapien
aacagttacttctctgtaccatggatgacctgc

SEQ ID NO: 545669 - DNA, 33 bp, Homo sapien
tgaggagcacttagaaaaggaagcggagttcat

SEQ ID NO: 545670 - DNA, 33 bp, Homo sapien
tgaggagcacttagaataggaagcggagttcat

SEQ ID NO: 545671 - DNA, 33 bp, Homo sapien
tgaagacatcaacctcaccatgttggaaaactg

SEQ ID NO: 545672 - DNA, 33 bp, Homo sapien
tgaagacatcaacctcgccatgttggaaaactg

SEQ ID NO: 545673 - DNA, 33 bp, Homo sapien
aacattgcttcaaaggaacctagaaatgctagc

SEQ ID NO: 545674 - DNA, 33 bp, Homo sapien
aacattgcttcaaagggacctagaaatgctagc

SEQ ID NO: 545675 - DNA, 33 bp, Homo sapien
ctagctctgtgttttccctatgtctcacaaagg

SEQ ID NO: 545676 - DNA, 33 bp, Homo sapien
ctagctctgtgttttcgctatgtctcacaaagg

SEQ ID NO: 545677 - DNA, 33 bp, Homo sapien
tctgggcaagtagcgccccagtgattaagtaac

SEQ ID NO: 545678 - DNA, 33 bp, Homo sapien
tctgggcaagtagcgctccagtgattaagtaac

SEQ ID NO: 545679 - DNA, 33 bp, Homo sapien
tagtggaagacattggaatatagaaaataggtt

SEQ ID NO: 545680 - DNA, 33 bp, Homo sapien
tagtggaagacattgggatatagaaaataggtt

SEQ ID NO: 545681 - DNA, 33 bp, Homo sapien
atgatactaaacaccaagacattctctggagct

SEQ ID NO: 545682 - DNA, 33 bp, Homo sapien
atgatactaaacaccaggacattctctggagct

SEQ ID NO: 545683 - DNA, 33 bp, Homo sapien
taggcctcattctcaactcttcttccagatgta

SEQ ID NO: 545684 - DNA, 33 bp, Homo sapien
taggcctcattctcaagtcttcttccagatgta

SEQ ID NO: 545685 - DNA, 33 bp, Homo sapien
taatccaactttgcataacaccaagcctgtttg

SEQ ID NO: 545686 - DNA, 33 bp, Homo sapien
taatccaactttgcatgacaccaagcctgtttg

SEQ ID NO: 545687 - DNA, 33 bp, Homo sapien
tgtgcctggctctaaaataagcggcaaatatat

SEQ ID NO: 545688 - DNA, 33 bp, Homo sapien
tgtgcctggctctaaagtaagcggcaaatatat

SEQ ID NO: 545689 - DNA, 33 bp, Homo sapien
aaaaatatcagaaagacagaccgggcacggtgg

SEQ ID NO: 545690 - DNA, 33 bp, Homo sapien
aaaaatatcagaaagagagaccgggcacggtgg

SEQ ID NO: 545691 - DNA, 33 bp, Homo sapien
gtacataaagctctccaaacagtgcgtggcatg

SEQ ID NO: 545692 - DNA, 33 bp, Homo sapien
gtacataaagctctccgaacagtgcgtggcatg

SEQ ID NO: 545693 - DNA, 33 bp, Homo sapien
tagactgggaagatgacggaacttggaggcttg

SEQ ID NO: 545694 - DNA, 33 bp, Homo sapien
tagactgggaagatgagggaacttggaggcttg

SEQ ID NO: 545695 - DNA, 33 bp, Homo sapien
aaaaagcttggagatcactgttataaagaagta

SEQ ID NO: 545696 - DNA, 33 bp, Homo sapien
aaaaagcttggagatcgctgttataaagaagta

SEQ ID NO: 545697 - DNA, 33 bp, Homo sapien
acaataactgcaggcaataataacaattatttg

SEQ ID NO: 545698 - DNA, 33 bp, Homo sapien
acaataactgcaggcagtaataacaattatttg

SEQ ID NO: 545699 - DNA, 33 bp, Homo sapien
atattcacaccctactaacagagcaagcagaca

SEQ ID NO: 545700 - DNA, 33 bp, Homo sapien
atattcacaccctactgacagagcaagcagaca

SEQ ID NO: 545701 - DNA, 33 bp, Homo sapien
tttgagtccccttacaccaatgtctttatgtaa

SEQ ID NO: 545702 - DNA, 33 bp, Homo sapien
tttgagtccccttacatcaatgtctttatgtaa

SEQ ID NO: 545703 - DNA, 33 bp, Homo sapien
cttctcataactaccccatttctcaaaaacaga

SEQ ID NO: 545704 - DNA, 33 bp, Homo sapien
cttctcataactacccgatttctcaaaaacaga

SEQ ID NO: 545705 - DNA, 33 bp, Homo sapien
tttaaagacaagatgaaagtatacctagaggga

SEQ ID NO: 545706 - DNA, 33 bp, Homo sapien
tttaaagacaagatgacagtatacctagaggga

SEQ ID NO: 545707 - DNA, 33 bp, Homo sapien
ctgatagccacttgaccattgtttcttgccact

SEQ ID NO: 545708 - DNA, 33 bp, Homo sapien
ctgatagccacttgactattgtttcttgccact

SEQ ID NO: 545709 - DNA, 33 bp, Homo sapien
gaaaagttatatgtagaaaactctaaagacaca

SEQ ID NO: 545710 - DNA, 33 bp, Homo sapien
gaaaagttatatgtaggaaactctaaagacaca

SEQ ID NO: 545711 - DNA, 33 bp, Homo sapien
gcatgcgtaacctaaactgaaggatggaaatag

SEQ ID NO: 545712 - DNA, 33 bp, Homo sapien
gcatgcgtaacctaaagtgaaggatggaaatag

SEQ ID NO: 545713 - DNA, 33 bp, Homo sapien
gaacaacctttcttcacaaacaaatgagaatga

SEQ ID NO: 545714 - DNA, 33 bp, Homo sapien
gaacaacctttcttcagaaacaaatgagaatga

SEQ ID NO: 545715 - DNA, 33 bp, Homo sapien
gcattagcaagacagaaagagcctgtgtcctta

SEQ ID NO: 545716 - DNA, 33 bp, Homo sapien
gcattagcaagacagagagagcctgtgtcctta

SEQ ID NO: 545717 - DNA, 33 bp, Homo sapien
cttttcattgctttaacgatacagttagaaatc

SEQ ID NO: 545718 - DNA, 33 bp, Homo sapien
cttttcattgctttaatgatacagttagaaatc

SEQ ID NO: 545719 - DNA, 33 bp, Homo sapien
ggttctctttaaaatgacagcaagacaatttaa

SEQ ID NO: 545720 - DNA, 33 bp, Homo sapien
ggttctctttaaaatgccagcaagacaatttaa

SEQ ID NO: 545721 - DNA, 33 bp, Homo sapien
gctcagcctgggaaaagttcctgatgcttgaca

SEQ ID NO: 545722 - DNA, 33 bp, Homo sapien
gctcagcctgggaaaatttcctgatgcttgaca

SEQ ID NO: 545723 - DNA, 33 bp, Homo sapien
caagcaaacttcttaacccctctgagcctccac

SEQ ID NO: 545724 - DNA, 33 bp, Homo sapien
caagcaaacttcttaatccctctgagcctccac

SEQ ID NO: 545725 - DNA, 33 bp, Homo sapien
aaggatctattgaagaataaaataacccgtctt

SEQ ID NO: 545726 - DNA, 33 bp, Homo sapien
aaggatctattgaagagtaaaataacccgtctt

SEQ ID NO: 545727 - DNA, 33 bp, Homo sapien
aggaacaggtgggttcagaaatagaagcaagga

SEQ ID NO: 545728 - DNA, 33 bp, Homo sapien
aggaacaggtgggttcggaaatagaagcaagga

SEQ ID NO: 545729 - DNA, 33 bp, Homo sapien
agatactccctactgaaagcattgtctcatgag

SEQ ID NO: 545730 - DNA, 33 bp, Homo sapien
agatactccctactgatagcattgtctcatgag

SEQ ID NO: 545731 - DNA, 33 bp, Homo sapien
tatattgtgaaaaaatgatgaccacaatcaatt

SEQ ID NO: 545732 - DNA, 33 bp, Homo sapien
tatattgtgaaaaaattatgaccacaatcaatt

SEQ ID NO: 545733 - DNA, 33 bp, Homo sapien
caagcttagaaacttaccattttagccaaatga

SEQ ID NO: 545734 - DNA, 33 bp, Homo sapien
caagcttagaaacttatcattttagccaaatga

SEQ ID NO: 545735 - DNA, 33 bp, Homo sapien
tctgtctcaattatcaatctttacactccaatc

SEQ ID NO: 545736 - DNA, 33 bp, Homo sapien
tctgtctcaattatcactctttacactccaatc

SEQ ID NO: 545737 - DNA, 33 bp, Homo sapien
ttttgttgggttgggacagaaacacgtagatga

SEQ ID NO: 545738 - DNA, 33 bp, Homo sapien
ttttgttgggttgggatagaaacacgtagatga

SEQ ID NO: 545739 - DNA, 33 bp, Homo sapien
atgcttatattctacccgctaaatgtgcttatt

SEQ ID NO: 545740 - DNA, 33 bp, Homo sapien
atgcttatattctacctgctaaatgtgcttatt

SEQ ID NO: 545741 - DNA, 33 bp, Homo sapien
gtcacagtaaagagtccgactaggtcctgtgga

SEQ ID NO: 545742 - DNA, 33 bp, Homo sapien
gtcacagtaaagagtctgactaggtcctgtgga

SEQ ID NO: 545743 - DNA, 33 bp, Homo sapien
ttcattgtggtctcatcaaattttctccagaga

SEQ ID NO: 545744 - DNA, 33 bp, Homo sapien
ttcattgtggtctcattaaattttctccagaga

SEQ ID NO: 545745 - DNA, 33 bp, Homo sapien
ggctgtcctaagtcaacttaccctgcatctctt

SEQ ID NO: 545746 - DNA, 33 bp, Homo sapien
ggctgtcctaagtcaatttaccctgcatctctt

SEQ ID NO: 545747 - DNA, 33 bp, Homo sapien
aatagcttagatcacacacgcatggttgattca

SEQ ID NO: 545748 - DNA, 33 bp, Homo sapien
aatagcttagatcacatacgcatggttgattca

SEQ ID NO: 545749 - DNA, 33 bp, Homo sapien
gtatacctattatgcaatacgggttacaaattc

SEQ ID NO: 545750 - DNA, 33 bp, Homo sapien
gtatacctattatgcagtacgggttacaaattc

SEQ ID NO: 545751 - DNA, 33 bp, Homo sapien
tttcacttacgtctcacaacaatttattgatgt

SEQ ID NO: 545752 - DNA, 33 bp, Homo sapien
tttcacttacgtctcataacaatttattgatgt

SEQ ID NO: 545753 - DNA, 33 bp, Homo sapien
ggaaatgtcagcagcacgaggcaagtgacacac

SEQ ID NO: 545754 - DNA, 33 bp, Homo sapien
ggaaatgtcagcagcatgaggcaagtgacacac

SEQ ID NO: 545755 - DNA, 33 bp, Homo sapien
tggtccctgggataaaatgagttatggagagag

SEQ ID NO: 545756 - DNA, 33 bp, Homo sapien
tggtccctgggataaagtgagttatggagagag

SEQ ID NO: 545757 - DNA, 33 bp, Homo sapien
ggttctcttgaaagatcaggtctgccgtcaatg

SEQ ID NO: 545758 - DNA, 33 bp, Homo sapien
ggttctcttgaaagattaggtctgccgtcaatg

SEQ ID NO: 545759 - DNA, 33 bp, Homo sapien
gggattagttaaatccccaagctttgagtgacc

SEQ ID NO: 545760 - DNA, 33 bp, Homo sapien
gggattagttaaatccgcaagctttgagtgacc

SEQ ID NO: 545761 - DNA, 33 bp, Homo sapien
agattcatgctcaatccaggaatccacattttt

SEQ ID NO: 545762 - DNA, 33 bp, Homo sapien
agattcatgctcaatctaggaatccacattttt

SEQ ID NO: 545763 - DNA, 33 bp, Homo sapien
gcaggaaactcacaggcccagagattatgtgaa

SEQ ID NO: 545764 - DNA, 33 bp, Homo sapien
gcaggaaactcacaggtccagagattatgtgaa

SEQ ID NO: 545765 - DNA, 33 bp, Homo sapien
ttggtggttttcataacatggtctttggagccc

SEQ ID NO: 545766 - DNA, 33 bp, Homo sapien
ttggtggttttcataatatggtctttggagccc

SEQ ID NO: 545767 - DNA, 33 bp, Homo sapien
tcattttgtcagtccaccctcaaaggagatgaa

SEQ ID NO: 545768 - DNA, 33 bp, Homo sapien
tcattttgtcagtccagcctcaaaggagatgaa

SEQ ID NO: 545769 - DNA, 33 bp, Homo sapien
tttcatcaatggaacacgagcaaaagtgatgaa

SEQ ID NO: 545770 - DNA, 33 bp, Homo sapien
tttcatcaatggaacatgagcaaaagtgatgaa

SEQ ID NO: 545771 - DNA, 33 bp, Homo sapien
taagtcacaccaaaaacgctgtgtctccatcat

SEQ ID NO: 545772 - DNA, 33 bp, Homo sapien
taagtcacaccaaaaatgctgtgtctccatcat

SEQ ID NO: 545773 - DNA, 33 bp, Homo sapien
cttttctccctaagcccgaacactgcaggatgc

SEQ ID NO: 545774 - DNA, 33 bp, Homo sapien
cttttctccctaagccggaacactgcaggatgc

SEQ ID NO: 545775 - DNA, 33 bp, Homo sapien
atattcagtcttagggaagtgtggcccagacca

SEQ ID NO: 545776 - DNA, 33 bp, Homo sapien
atattcagtcttaggggagtgtggcccagacca

SEQ ID NO: 545777 - DNA, 33 bp, Homo sapien
atgttcaccttatcatgagtgcaagacaaatac

SEQ ID NO: 545778 - DNA, 33 bp, Homo sapien
atgttcaccttatcattagtgcaagacaaatac

SEQ ID NO: 545779 - DNA, 33 bp, Homo sapien
ttctactagagttaaaagaggccaactgcagtg

SEQ ID NO: 545780 - DNA, 33 bp, Homo sapien
ttctactagagttaaacgaggccaactgcagtg

SEQ ID NO: 545781 - DNA, 33 bp, Homo sapien
aggagggggcagacgaggagctggaggagacct

SEQ ID NO: 545782 - DNA, 33 bp, Homo sapien
aggagggggcagacgatgagctggaggagacct

SEQ ID NO: 545783 - DNA, 33 bp, Homo sapien
aaaagaggaaagactacaatgcagagtagaaaa

SEQ ID NO: 545784 - DNA, 33 bp, Homo sapien
aaaagaggaaagactataatgcagagtagaaaa

SEQ ID NO: 545785 - DNA, 33 bp, Homo sapien
tatgtcttgccagaaaatattaaagacccctca

SEQ ID NO: 545786 - DNA, 33 bp, Homo sapien
tatgtcttgccagaaactattaaagacccctca

SEQ ID NO: 545787 - DNA, 33 bp, Homo sapien
ccaatggggtttctacagagcaatccattcaca

SEQ ID NO: 545788 - DNA, 33 bp, Homo sapien
ccaatggggtttctacggagcaatccattcaca

SEQ ID NO: 545789 - DNA, 33 bp, Homo sapien
agttatccagggacttaaaaaggccagcaaagt

SEQ ID NO: 545790 - DNA, 33 bp, Homo sapien
agttatccagggactttaaaaggccagcaaagt

SEQ ID NO: 545791 - DNA, 33 bp, Homo sapien
ctgtgttttccattaaagtttttttcacttggt

SEQ ID NO: 545792 - DNA, 33 bp, Homo sapien
ctgtgttttccattaaggtttttttcacttggt

SEQ ID NO: 545793 - DNA, 33 bp, Homo sapien
ggtctgggatgcactccacagtgaagatagggt

SEQ ID NO: 545794 - DNA, 33 bp, Homo sapien
ggtctgggatgcactctacagtgaagatagggt

SEQ ID NO: 545795 - DNA, 33 bp, Homo sapien
ttttaaactaatcaccagcaagtggaacaggcg

SEQ ID NO: 545796 - DNA, 33 bp, Homo sapien
ttttaaactaatcaccggcaagtggaacaggcg

SEQ ID NO: 545797 - DNA, 33 bp, Homo sapien
agctttttgcttgtagaccccttgaaactacct

SEQ ID NO: 545798 - DNA, 33 bp, Homo sapien
agctttttgcttgtaggccccttgaaactacct

SEQ ID NO: 545799 - DNA, 33 bp, Homo sapien
ttttcagatggcctgaaataatagggtgctgag

SEQ ID NO: 545800 - DNA, 33 bp, Homo sapien
ttttcagatggcctgatataatagggtgctgag

SEQ ID NO: 545801 - DNA, 33 bp, Homo sapien
agagtctgaaagatagaaatcgaattccagaca

SEQ ID NO: 545802 - DNA, 33 bp, Homo sapien
agagtctgaaagatagtaatcgaattccagaca

SEQ ID NO: 545803 - DNA, 33 bp, Homo sapien
ctaaaagagtgtaaaactcagttagggcaaatc

SEQ ID NO: 545804 - DNA, 33 bp, Homo sapien
ctaaaagagtgtaaaattcagttagggcaaatc

SEQ ID NO: 545805 - DNA, 33 bp, Homo sapien
aagacacaaactaaaccgtcctcaaaatcaaaa

SEQ ID NO: 545806 - DNA, 33 bp, Homo sapien
aagacacaaactaaactgtcctcaaaatcaaaa

SEQ ID NO: 545807 - DNA, 33 bp, Homo sapien
gaaagagagaagctcaatattcttcacctgtag

SEQ ID NO: 545808 - DNA, 33 bp, Homo sapien
gaaagagagaagctcagtattcttcacctgtag

SEQ ID NO: 545809 - DNA, 33 bp, Homo sapien
catgggtgtgctttgaaggaggtgtggagcctg

SEQ ID NO: 545810 - DNA, 33 bp, Homo sapien
catgggtgtgctttgagggaggtgtggagcctg

SEQ ID NO: 545811 - DNA, 33 bp, Homo sapien
ggcagaacctgtatcaacatatttgcaggtgaa

SEQ ID NO: 545812 - DNA, 33 bp, Homo sapien
ggcagaacctgtatcaccatatttgcaggtgaa

SEQ ID NO: 545813 - DNA, 33 bp, Homo sapien
ttgctaacaacttaaaacaatgttctgagtccc

SEQ ID NO: 545814 - DNA, 33 bp, Homo sapien
ttgctaacaacttaaagcaatgttctgagtccc

SEQ ID NO: 545815 - DNA, 33 bp, Homo sapien
gtcatgtggttcagtactaagagcagttttaga

SEQ ID NO: 545816 - DNA, 33 bp, Homo sapien
gtcatgtggttcagtattaagagcagttttaga

SEQ ID NO: 545817 - DNA, 33 bp, Homo sapien
taaaattatccctgtcccaaggtcgcatgagca

SEQ ID NO: 545818 - DNA, 33 bp, Homo sapien
taaaattatccctgtctcaaggtcgcatgagca

SEQ ID NO: 545819 - DNA, 33 bp, Homo sapien
ctatcatgaactcaggaccattagtttagtctg

SEQ ID NO: 545820 - DNA, 33 bp, Homo sapien
ctatcatgaactcaggtccattagtttagtctg

SEQ ID NO: 545821 - DNA, 33 bp, Homo sapien
tttctagttttcactacatcttgcaaattaaca

SEQ ID NO: 545822 - DNA, 33 bp, Homo sapien
tttctagttttcactatatcttgcaaattaaca

SEQ ID NO: 545823 - DNA, 33 bp, Homo sapien
gttacataatgttttccctgtggatctctggat

SEQ ID NO: 545824 - DNA, 33 bp, Homo sapien
gttacataatgttttctctgtggatctctggat

SEQ ID NO: 545825 - DNA, 33 bp, Homo sapien
tgaatttctgaaagacaccaaaagaatatatca

SEQ ID NO: 545826 - DNA, 33 bp, Homo sapien
tgaatttctgaaagacgccaaaagaatatatca

SEQ ID NO: 545827 - DNA, 33 bp, Homo sapien
gcacatctgattttcaagatgcatggttactta

SEQ ID NO: 545828 - DNA, 33 bp, Homo sapien
gcacatctgattttcacgatgcatggttactta

SEQ ID NO: 545829 - DNA, 33 bp, Homo sapien
gtcaaaggagacctcacaattacagtgacttgc

SEQ ID NO: 545830 - DNA, 33 bp, Homo sapien
gtcaaaggagacctcataattacagtgacttgc

SEQ ID NO: 545831 - DNA, 33 bp, Homo sapien
aagaaaagatatttcaccaaaatgaagtcatta

SEQ ID NO: 545832 - DNA, 33 bp, Homo sapien
aagaaaagatatttcagcaaaatgaagtcatta

SEQ ID NO: 545833 - DNA, 33 bp, Homo sapien
tctgaaaatgagtgaacggacattaaccacgag

SEQ ID NO: 545834 - DNA, 33 bp, Homo sapien
tctgaaaatgagtgaatggacattaaccacgag

SEQ ID NO: 545835 - DNA, 33 bp, Homo sapien
atcatgcctcctgatacggtttagctgtgtccc

SEQ ID NO: 545836 - DNA, 33 bp, Homo sapien
atcatgcctcctgatagggtttagctgtgtccc

SEQ ID NO: 545837 - DNA, 33 bp, Homo sapien
aaggacacccattagcaatcagcaggcctgggt

SEQ ID NO: 545838 - DNA, 33 bp, Homo sapien
aaggacacccattagcgatcagcaggcctgggt

SEQ ID NO: 545839 - DNA, 33 bp, Homo sapien
tgtttgctttcccacaaagaaaatatccatcca

SEQ ID NO: 545840 - DNA, 33 bp, Homo sapien
tgtttgctttcccacagagaaaatatccatcca

SEQ ID NO: 545841 - DNA, 33 bp, Homo sapien
aaagttgagagaagtactaccatttcaccttta

SEQ ID NO: 545842 - DNA, 33 bp, Homo sapien
aaagttgagagaagtagtaccatttcaccttta

SEQ ID NO: 545843 - DNA, 33 bp, Homo sapien
tatttacttgcaaaaagtcagagcgatgtttat

SEQ ID NO: 545844 - DNA, 33 bp, Homo sapien
tatttacttgcaaaaattcagagcgatgtttat

SEQ ID NO: 545845 - DNA, 33 bp, Homo sapien
agtttaagcaactaccggaattgacatctaagt

SEQ ID NO: 545846 - DNA, 33 bp, Homo sapien
agtttaagcaactacctgaattgacatctaagt

SEQ ID NO: 545847 - DNA, 33 bp, Homo sapien
cattcatacctttccaatcatcacagctctgga

SEQ ID NO: 545848 - DNA, 33 bp, Homo sapien
cattcatacctttccactcatcacagctctgga

SEQ ID NO: 545849 - DNA, 33 bp, Homo sapien
cttagtagaacaacgaagattaaaatggactat

SEQ ID NO: 545850 - DNA, 33 bp, Homo sapien
cttagtagaacaacgaggattaaaatggactat

SEQ ID NO: 545851 - DNA, 33 bp, Homo sapien
tgaaagatctgagtgaacagttaaaaattgaga

SEQ ID NO: 545852 - DNA, 33 bp, Homo sapien
tgaaagatctgagtgatcagttaaaaattgaga

SEQ ID NO: 545853 - DNA, 33 bp, Homo sapien
actgctgaagtctaaaatgatccactaacatga

SEQ ID NO: 545854 - DNA, 33 bp, Homo sapien
actgctgaagtctaaagtgatccactaacatga

SEQ ID NO: 545855 - DNA, 33 bp, Homo sapien
gagattagtcagacacaatcggcagggagagca

SEQ ID NO: 545856 - DNA, 33 bp, Homo sapien
gagattagtcagacacgatcggcagggagagca

SEQ ID NO: 545857 - DNA, 33 bp, Homo sapien
ccagagagtgaattcacgccttccaaaatgtga

SEQ ID NO: 545858 - DNA, 33 bp, Homo sapien
ccagagagtgaattcatgccttccaaaatgtga

SEQ ID NO: 545859 - DNA, 33 bp, Homo sapien
ctcaaagagggcatgaccttcaagaattaataa

SEQ ID NO: 545860 - DNA, 33 bp, Homo sapien
ctcaaagagggcatgatcttcaagaattaataa

SEQ ID NO: 545861 - DNA, 33 bp, Homo sapien
gctgtaatggctgtcaccattggaaaacaatga

SEQ ID NO: 545862 - DNA, 33 bp, Homo sapien
gctgtaatggctgtcatcattggaaaacaatga

SEQ ID NO: 545863 - DNA, 33 bp, Homo sapien
gcatggccttcaggagcaaaatgggtttggtga

SEQ ID NO: 545864 - DNA, 33 bp, Homo sapien
gcatggccttcaggaggaaaatgggtttggtga

SEQ ID NO: 545865 - DNA, 33 bp, Homo sapien
cctgttgcactgcatcacctgtttaccaagggt

SEQ ID NO: 545866 - DNA, 33 bp, Homo sapien
cctgttgcactgcatcgcctgtttaccaagggt

SEQ ID NO: 545867 - DNA, 33 bp, Homo sapien
ccagaccctgggatgaggtatgtaggtgccagc

SEQ ID NO: 545868 - DNA, 33 bp, Homo sapien
ccagaccctgggatgatgtatgtaggtgccagc

SEQ ID NO: 545869 - DNA, 33 bp, Homo sapien
ctagtcttttcgtaagaatcagacaagaaaaaa

SEQ ID NO: 545870 - DNA, 33 bp, Homo sapien
ctagtcttttcgtaagtatcagacaagaaaaaa

SEQ ID NO: 545871 - DNA, 33 bp, Homo sapien
gctcagggtctcatcaaagcaaagtgttgactc

SEQ ID NO: 545872 - DNA, 33 bp, Homo sapien
gctcagggtctcatcagagcaaagtgttgactc

SEQ ID NO: 545873 - DNA, 33 bp, Homo sapien
agcagctaaacaaacactgacctcaagataagc

SEQ ID NO: 545874 - DNA, 33 bp, Homo sapien
agcagctaaacaaacattgacctcaagataagc

SEQ ID NO: 545875 - DNA, 33 bp, Homo sapien
gtttcctggctcctccaactttcttctgagaaa

SEQ ID NO: 545876 - DNA, 33 bp, Homo sapien
gtttcctggctcctccgactttcttctgagaaa

SEQ ID NO: 545877 - DNA, 33 bp, Homo sapien
actaatcataccaagacaggattcatctgccca

SEQ ID NO: 545878 - DNA, 33 bp, Homo sapien
actaatcataccaagagaggattcatctgccca

SEQ ID NO: 545879 - DNA, 33 bp, Homo sapien
atcatgtaaacaatatcagagccattgactttg

SEQ ID NO: 545880 - DNA, 33 bp, Homo sapien
atcatgtaaacaatattagagccattgactttg

SEQ ID NO: 545881 - DNA, 33 bp, Homo sapien
agtaagtgtaagaaccaagatgtattctcacct

SEQ ID NO: 545882 - DNA, 33 bp, Homo sapien
agtaagtgtaagaacctagatgtattctcacct

SEQ ID NO: 545883 - DNA, 33 bp, Homo sapien
atttttatttcagagactacagtcctttcagca

SEQ ID NO: 545884 - DNA, 33 bp, Homo sapien
atttttatttcagagattacagtcctttcagca

SEQ ID NO: 545885 - DNA, 33 bp, Homo sapien
cagtgtgcttttagaacgaatactcaccatcaa

SEQ ID NO: 545886 - DNA, 33 bp, Homo sapien
cagtgtgcttttagaatgaatactcaccatcaa

SEQ ID NO: 545887 - DNA, 33 bp, Homo sapien
ggactagtgatactggccaagtgcattcttcag

SEQ ID NO: 545888 - DNA, 33 bp, Homo sapien
ggactagtgatactggtcaagtgcattcttcag

SEQ ID NO: 545889 - DNA, 33 bp, Homo sapien
aaatgagattactagcaaatctatcggcagcat

SEQ ID NO: 545890 - DNA, 33 bp, Homo sapien
aaatgagattactagcgaatctatcggcagcat

SEQ ID NO: 545891 - DNA, 33 bp, Homo sapien
aagtatctggatagtacaaagtcagacaacact

SEQ ID NO: 545892 - DNA, 33 bp, Homo sapien
aagtatctggatagtataaagtcagacaacact

SEQ ID NO: 545893 - DNA, 33 bp, Homo sapien
tagaggtgtctttcaaagatggaaagaactatg

SEQ ID NO: 545894 - DNA, 33 bp, Homo sapien
tagaggtgtctttcaatgatggaaagaactatg

SEQ ID NO: 545895 - DNA, 33 bp, Homo sapien
gttttatgtgtcagaaatctataatgtatctgc

SEQ ID NO: 545896 - DNA, 33 bp, Homo sapien
gttttatgtgtcagaattctataatgtatctgc

SEQ ID NO: 545897 - DNA, 33 bp, Homo sapien
gccaagttgaataaccacaaagattatttatag

SEQ ID NO: 545898 - DNA, 33 bp, Homo sapien
gccaagttgaataaccgcaaagattatttatag

SEQ ID NO: 545899 - DNA, 33 bp, Homo sapien
tggggctggagtatacaaagctcctggatctct

SEQ ID NO: 545900 - DNA, 33 bp, Homo sapien
tggggctggagtataccaagctcctggatctct

SEQ ID NO: 545901 - DNA, 33 bp, Homo sapien
gcagtaaccctttgagcagagtgtctgtgtggt

SEQ ID NO: 545902 - DNA, 33 bp, Homo sapien
gcagtaaccctttgagtagagtgtctgtgtggt

SEQ ID NO: 545903 - DNA, 33 bp, Homo sapien
gctaagtgtaaaatcaatcctggtgtaagccta

SEQ ID NO: 545904 - DNA, 33 bp, Homo sapien
gctaagtgtaaaatcagtcctggtgtaagccta

SEQ ID NO: 545905 - DNA, 33 bp, Homo sapien
gcactctggctatgtcacaagtctggaacaata

SEQ ID NO: 545906 - DNA, 33 bp, Homo sapien
gcactctggctatgtctcaagtctggaacaata

SEQ ID NO: 545907 - DNA, 33 bp, Homo sapien
gagagacacatagataaccgaaagagtaaaaag

SEQ ID NO: 545908 - DNA, 33 bp, Homo sapien
gagagacacatagatacccgaaagagtaaaaag

SEQ ID NO: 545909 - DNA, 33 bp, Homo sapien
taaagatcagttttgcacttatagctccttttt

SEQ ID NO: 545910 - DNA, 33 bp, Homo sapien
taaagatcagttttgcgcttatagctccttttt

SEQ ID NO: 545911 - DNA, 33 bp, Homo sapien
tcctagagatttcaaactaataagaaccagaag

SEQ ID NO: 545912 - DNA, 33 bp, Homo sapien
tcctagagatttcaaagtaataagaaccagaag

SEQ ID NO: 545913 - DNA, 33 bp, Homo sapien
cacagtatgagctgacactgagaattcaaaaga

SEQ ID NO: 545914 - DNA, 33 bp, Homo sapien
cacagtatgagctgacgctgagaattcaaaaga

SEQ ID NO: 545915 - DNA, 33 bp, Homo sapien
gcttccaaaagactaacgcaccatgtagatatg

SEQ ID NO: 545916 - DNA, 33 bp, Homo sapien
gcttccaaaagactaatgcaccatgtagatatg

SEQ ID NO: 545917 - DNA, 33 bp, Homo sapien
ggacacctcatttgcacggtttgatgtgagaaa

SEQ ID NO: 545918 - DNA, 33 bp, Homo sapien
ggacacctcatttgcatggtttgatgtgagaaa

SEQ ID NO: 545919 - DNA, 33 bp, Homo sapien
atacagaattacattaaaaagtggcccaattaa

SEQ ID NO: 545920 - DNA, 33 bp, Homo sapien
atacagaattacattacaaagtggcccaattaa

SEQ ID NO: 545921 - DNA, 33 bp, Homo sapien
tctttagtttacaatgacagggccctctcctac

SEQ ID NO: 545922 - DNA, 33 bp, Homo sapien
tctttagtttacaatggcagggccctctcctac

SEQ ID NO: 545923 - DNA, 33 bp, Homo sapien
ccccagtgagttctaaagcaacagagactcact

SEQ ID NO: 545924 - DNA, 33 bp, Homo sapien
ccccagtgagttctaaggcaacagagactcact

SEQ ID NO: 545925 - DNA, 33 bp, Homo sapien
gatgagtcacccttccactgtaagtccagcaat

SEQ ID NO: 545926 - DNA, 33 bp, Homo sapien
gatgagtcacccttccgctgtaagtccagcaat

SEQ ID NO: 545927 - DNA, 33 bp, Homo sapien
cttgggtaaaatggcacggtgattgggaatgaa

SEQ ID NO: 545928 - DNA, 33 bp, Homo sapien
cttgggtaaaatggcatggtgattgggaatgaa

SEQ ID NO: 545929 - DNA, 33 bp, Homo sapien
agaaaggcactagcaacctctcatcgatggaaa

SEQ ID NO: 545930 - DNA, 33 bp, Homo sapien
agaaaggcactagcaatctctcatcgatggaaa

SEQ ID NO: 545931 - DNA, 33 bp, Homo sapien
tctcatcgatggaaataatttcaacaactgttc

SEQ ID NO: 545932 - DNA, 33 bp, Homo sapien
tctcatcgatggaaatgatttcaacaactgttc

SEQ ID NO: 545933 - DNA, 33 bp, Homo sapien
ctgaaaagagcattgacgtgtttttcatccaag

SEQ ID NO: 545934 - DNA, 33 bp, Homo sapien
ctgaaaagagcattgatgtgtttttcatccaag

SEQ ID NO: 545935 - DNA, 33 bp, Homo sapien
ttgaattttctaactccgaatccaggactttat

SEQ ID NO: 545936 - DNA, 33 bp, Homo sapien
ttgaattttctaactctgaatccaggactttat

SEQ ID NO: 545937 - DNA, 33 bp, Homo sapien
aagtggttttagaaggacaaggtaggctttgga

SEQ ID NO: 545938 - DNA, 33 bp, Homo sapien
aagtggttttagaaggtcaaggtaggctttgga

SEQ ID NO: 545939 - DNA, 33 bp, Homo sapien
acttctcttaaccccaaattgtctgtccttcat

SEQ ID NO: 545940 - DNA, 33 bp, Homo sapien
acttctcttaaccccagattgtctgtccttcat

SEQ ID NO: 545941 - DNA, 33 bp, Homo sapien
ggcacttttctcatgaaccttttgtgagaatca

SEQ ID NO: 545942 - DNA, 33 bp, Homo sapien
ggcacttttctcatgacccttttgtgagaatca

SEQ ID NO: 545943 - DNA, 33 bp, Homo sapien
gtgcacttctgaataaactcaatatttttggag

SEQ ID NO: 545944 - DNA, 33 bp, Homo sapien
gtgcacttctgaataagctcaatatttttggag

SEQ ID NO: 545945 - DNA, 33 bp, Homo sapien
ccaccagcacagaaaaagcaggccatagaaatg

SEQ ID NO: 545946 - DNA, 33 bp, Homo sapien
ccaccagcacagaaaaggcaggccatagaaatg

SEQ ID NO: 545947 - DNA, 33 bp, Homo sapien
ataatttagatccaacagtctttgtataaactg

SEQ ID NO: 545948 - DNA, 33 bp, Homo sapien
ataatttagatccaactgtctttgtataaactg

SEQ ID NO: 545949 - DNA, 33 bp, Homo sapien
agtcatgcaccccctacgcttaaagaataactg

SEQ ID NO: 545950 - DNA, 33 bp, Homo sapien
agtcatgcaccccctatgcttaaagaataactg

SEQ ID NO: 545951 - DNA, 33 bp, Homo sapien
actcatccagctcacacgcgctgactaactgac

SEQ ID NO: 545952 - DNA, 33 bp, Homo sapien
actcatccagctcacaggcgctgactaactgac

SEQ ID NO: 545953 - DNA, 33 bp, Homo sapien
aaataccatattgtcaactgaacccactccaat

SEQ ID NO: 545954 - DNA, 33 bp, Homo sapien
aaataccatattgtcatctgaacccactccaat

SEQ ID NO: 545955 - DNA, 33 bp, Homo sapien
cactctgaccagagaaaaattataccatgaaaa

SEQ ID NO: 545956 - DNA, 33 bp, Homo sapien
cactctgaccagagaataattataccatgaaaa

SEQ ID NO: 545957 - DNA, 33 bp, Homo sapien
tattggtgttttatagacattaatgcagtttag

SEQ ID NO: 545958 - DNA, 33 bp, Homo sapien
tattggtgttttataggcattaatgcagtttag

SEQ ID NO: 545959 - DNA, 33 bp, Homo sapien
agagagagcttcaagacaatagctcagagagtt

SEQ ID NO: 545960 - DNA, 33 bp, Homo sapien
agagagagcttcaagataatagctcagagagtt

SEQ ID NO: 545961 - DNA, 33 bp, Homo sapien
aaactaagttccagacactttacatgcatgcaa

SEQ ID NO: 545962 - DNA, 33 bp, Homo sapien
aaactaagttccagacgctttacatgcatgcaa

SEQ ID NO: 545963 - DNA, 33 bp, Homo sapien
ccagctccttatcatacgtactcacagtgcctt

SEQ ID NO: 545964 - DNA, 33 bp, Homo sapien
ccagctccttatcatatgtactcacagtgcctt

SEQ ID NO: 545965 - DNA, 33 bp, Homo sapien
tttaaatattttaacactcgacttttggcggcc

SEQ ID NO: 545966 - DNA, 33 bp, Homo sapien
tttaaatattttaacattcgacttttggcggcc

SEQ ID NO: 545967 - DNA, 33 bp, Homo sapien
tggcggccagccctgcagagttttaatagaaag

SEQ ID NO: 545968 - DNA, 33 bp, Homo sapien
tggcggccagccctgccgagttttaatagaaag

SEQ ID NO: 545969 - DNA, 33 bp, Homo sapien
actatggaaaacaatacagcgattctttaaaga

SEQ ID NO: 545970 - DNA, 33 bp, Homo sapien
actatggaaaacaatagagcgattctttaaaga

SEQ ID NO: 545971 - DNA, 33 bp, Homo sapien
aaacataaaacatggcaaactcactgaatgact

SEQ ID NO: 545972 - DNA, 33 bp, Homo sapien
aaacataaaacatggcgaactcactgaatgact

SEQ ID NO: 545973 - DNA, 33 bp, Homo sapien
tttaacatcactaaaaatacaagcaaatttaaa

SEQ ID NO: 545974 - DNA, 33 bp, Homo sapien
tttaacatcactaaaactacaagcaaatttaaa

SEQ ID NO: 545975 - DNA, 33 bp, Homo sapien
atgatggcacatattgaaaatcaatgactcatt

SEQ ID NO: 545976 - DNA, 33 bp, Homo sapien
atgatggcacatattggaaatcaatgactcatt

SEQ ID NO: 545977 - DNA, 33 bp, Homo sapien
aggatgtacctgagtaaatagtatgttggggtg

SEQ ID NO: 545978 - DNA, 33 bp, Homo sapien
aggatgtacctgagtagatagtatgttggggtg

SEQ ID NO: 545979 - DNA, 33 bp, Homo sapien
catagtcttatgtgaacaagaaatttatttgtt

SEQ ID NO: 545980 - DNA, 33 bp, Homo sapien
catagtcttatgtgaagaagaaatttatttgtt

SEQ ID NO: 545981 - DNA, 33 bp, Homo sapien
tgctttatgtgtccaaaataagatgatcacatt

SEQ ID NO: 545982 - DNA, 33 bp, Homo sapien
tgctttatgtgtccaagataagatgatcacatt

SEQ ID NO: 545983 - DNA, 33 bp, Homo sapien
tataggcaatttttaaatggttcaaaaggagag

SEQ ID NO: 545984 - DNA, 33 bp, Homo sapien
tataggcaatttttaagtggttcaaaaggagag

SEQ ID NO: 545985 - DNA, 33 bp, Homo sapien
ggccattattatatctcaaagctccacaatagt

SEQ ID NO: 545986 - DNA, 33 bp, Homo sapien
ggccattattatatctgaaagctccacaatagt

SEQ ID NO: 545987 - DNA, 33 bp, Homo sapien
tttgaggcttgcctgcactgtgtcactaccatt

SEQ ID NO: 545988 - DNA, 33 bp, Homo sapien
tttgaggcttgcctgcgctgtgtcactaccatt

SEQ ID NO: 545989 - DNA, 33 bp, Homo sapien
aatgagacaacaatcaaaagctgcagagctgta

SEQ ID NO: 545990 - DNA, 33 bp, Homo sapien
aatgagacaacaatcagaagctgcagagctgta

SEQ ID NO: 545991 - DNA, 33 bp, Homo sapien
aaggggaacattaaaacagatcctgacatagtt

SEQ ID NO: 545992 - DNA, 33 bp, Homo sapien
aaggggaacattaaaatagatcctgacatagtt

SEQ ID NO: 545993 - DNA, 33 bp, Homo sapien
tgtgacctgacctagggatgttgtctcaagaag

SEQ ID NO: 545994 - DNA, 33 bp, Homo sapien
tgtgacctgacctaggtatgttgtctcaagaag

SEQ ID NO: 545995 - DNA, 33 bp, Homo sapien
gttcacacatgatatccactatgctggtcttct

SEQ ID NO: 545996 - DNA, 33 bp, Homo sapien
gttcacacatgatatctactatgctggtcttct

SEQ ID NO: 545997 - DNA, 33 bp, Homo sapien
cccctttcccttaacaataagattcacagtcct

SEQ ID NO: 545998 - DNA, 33 bp, Homo sapien
cccctttcccttaacagtaagattcacagtcct

SEQ ID NO: 545999 - DNA, 33 bp, Homo sapien
gatctgggtagggacaaaaagcctaaacatcac

SEQ ID NO: 546000 - DNA, 33 bp, Homo sapien
gatctgggtagggacacaaagcctaaacatcac

SEQ ID NO: 546001 - DNA, 33 bp, Homo sapien
caataccacatctctaacctttatggcacagga

SEQ ID NO: 546002 - DNA, 33 bp, Homo sapien
caataccacatctctatcctttatggcacagga

SEQ ID NO: 546003 - DNA, 33 bp, Homo sapien
tgactcttctagttcaaggaattatttggccaa

SEQ ID NO: 546004 - DNA, 33 bp, Homo sapien
tgactcttctagttcagggaattatttggccaa

SEQ ID NO: 546005 - DNA, 33 bp, Homo sapien
ttgtttaatgtaaaaaatgcactgtttctcttc

SEQ ID NO: 546006 - DNA, 33 bp, Homo sapien
ttgtttaatgtaaaaattgcactgtttctcttc

SEQ ID NO: 546007 - DNA, 33 bp, Homo sapien
tcgtgccaatgattcccaaaacattgacattcc

SEQ ID NO: 546008 - DNA, 33 bp, Homo sapien
tcgtgccaatgattcctaaaacattgacattcc

SEQ ID NO: 546009 - DNA, 33 bp, Homo sapien
ttccattgaaacatcaaaatgaagagaaaaatg

SEQ ID NO: 546010 - DNA, 33 bp, Homo sapien
ttccattgaaacatcagaatgaagagaaaaatg

SEQ ID NO: 546011 - DNA, 33 bp, Homo sapien
gccttttgttttcttaacatctactaatcagag

SEQ ID NO: 546012 - DNA, 33 bp, Homo sapien
gccttttgttttcttagcatctactaatcagag

SEQ ID NO: 546013 - DNA, 33 bp, Homo sapien
aatgaacctgaaaataaccttattgagtgagga

SEQ ID NO: 546014 - DNA, 33 bp, Homo sapien
aatgaacctgaaaatacccttattgagtgagga

SEQ ID NO: 546015 - DNA, 33 bp, Homo sapien
cctaatgaatcctcttcaagaactcaagagaac

SEQ ID NO: 546016 - DNA, 33 bp, Homo sapien
cctaatgaatcctctttaagaactcaagagaac

SEQ ID NO: 546017 - DNA, 33 bp, Homo sapien
tctgttatctctacagacacttgcttccctacc

SEQ ID NO: 546018 - DNA, 33 bp, Homo sapien
tctgttatctctacagccacttgcttccctacc

SEQ ID NO: 546019 - DNA, 33 bp, Homo sapien
actaattgctgacttcaagaattaagactcaga

SEQ ID NO: 546020 - DNA, 33 bp, Homo sapien
actaattgctgacttccagaattaagactcaga

SEQ ID NO: 546021 - DNA, 33 bp, Homo sapien
gtgtgaataactaaagaagaggcagctgccaca

SEQ ID NO: 546022 - DNA, 33 bp, Homo sapien
gtgtgaataactaaaggagaggcagctgccaca

SEQ ID NO: 546023 - DNA, 33 bp, Homo sapien
ttccaaatttgatggaacatggattcactataa

SEQ ID NO: 546024 - DNA, 33 bp, Homo sapien
ttccaaatttgatggagcatggattcactataa

SEQ ID NO: 546025 - DNA, 33 bp, Homo sapien
tctttatatcctcatacagctgcgggtaaagca

SEQ ID NO: 546026 - DNA, 33 bp, Homo sapien
tctttatatcctcatatagctgcgggtaaagca

SEQ ID NO: 546027 - DNA, 33 bp, Homo sapien
taggtgagcaacataaacttgaattggtttgga

SEQ ID NO: 546028 - DNA, 33 bp, Homo sapien
taggtgagcaacataaccttgaattggtttgga

SEQ ID NO: 546029 - DNA, 33 bp, Homo sapien
gtttgcttttctggaaataaataagttgattgt

SEQ ID NO: 546030 - DNA, 33 bp, Homo sapien
gtttgcttttctggaactaaataagttgattgt

SEQ ID NO: 546031 - DNA, 33 bp, Homo sapien
ctatcaatgatgcctacgtgaataactttgtgc

SEQ ID NO: 546032 - DNA, 33 bp, Homo sapien
ctatcaatgatgcctatgtgaataactttgtgc

SEQ ID NO: 546033 - DNA, 33 bp, Homo sapien
aaagcagtctgataaaaaggactttaaatgaag

SEQ ID NO: 546034 - DNA, 33 bp, Homo sapien
aaagcagtctgataaacaggactttaaatgaag

SEQ ID NO: 546035 - DNA, 33 bp, Homo sapien
atacagacaagagtgacgaagaaattgatgggg

SEQ ID NO: 546036 - DNA, 33 bp, Homo sapien
atacagacaagagtgatgaagaaattgatgggg

SEQ ID NO: 546037 - DNA, 33 bp, Homo sapien
tttttcttgttattcaccacatttcaatactat

SEQ ID NO: 546038 - DNA, 33 bp, Homo sapien
tttttcttgttattcatcacatttcaatactat

SEQ ID NO: 546039 - DNA, 33 bp, Homo sapien
atcctccacatttttccagtctatataaaacac

SEQ ID NO: 546040 - DNA, 33 bp, Homo sapien
atcctccacatttttcgagtctatataaaacac

SEQ ID NO: 546041 - DNA, 33 bp, Homo sapien
aacttggaggtttacactgaaaatgacttgcaa

SEQ ID NO: 546042 - DNA, 33 bp, Homo sapien
aacttggaggtttacattgaaaatgacttgcaa

SEQ ID NO: 546043 - DNA, 33 bp, Homo sapien
ttcgaagacacatgtaaggaaattattgtcctg

SEQ ID NO: 546044 - DNA, 33 bp, Homo sapien
ttcgaagacacatgtatggaaattattgtcctg

SEQ ID NO: 546045 - DNA, 33 bp, Homo sapien
catcacagtccataaacgtgatatagaaagttt

SEQ ID NO: 546046 - DNA, 33 bp, Homo sapien
catcacagtccataaaggtgatatagaaagttt

SEQ ID NO: 546047 - DNA, 33 bp, Homo sapien
cttctaagttcccgctcacttgcagattctaga

SEQ ID NO: 546048 - DNA, 33 bp, Homo sapien
cttctaagttcccgctgacttgcagattctaga

SEQ ID NO: 546049 - DNA, 33 bp, Homo sapien
gtaaagttgaagcagaatactcattgcagttgt

SEQ ID NO: 546050 - DNA, 33 bp, Homo sapien
gtaaagttgaagcagactactcattgcagttgt

SEQ ID NO: 546051 - DNA, 33 bp, Homo sapien
tttctgttgaattcagactagagcattgacaca

SEQ ID NO: 546052 - DNA, 33 bp, Homo sapien
tttctgttgaattcaggctagagcattgacaca

SEQ ID NO: 546053 - DNA, 33 bp, Homo sapien
ggtcacagccaaattacaacccaagataatatt

SEQ ID NO: 546054 - DNA, 33 bp, Homo sapien
ggtcacagccaaattataacccaagataatatt

SEQ ID NO: 546055 - DNA, 33 bp, Homo sapien
ggatatgcttttcatacgctgggaaacatgcat

SEQ ID NO: 546056 - DNA, 33 bp, Homo sapien
ggatatgcttttcatatgctgggaaacatgcat

SEQ ID NO: 546057 - DNA, 33 bp, Homo sapien
tttattgcctatataaatggaaagaaattcaaa

SEQ ID NO: 546058 - DNA, 33 bp, Homo sapien
tttattgcctatataagtggaaagaaattcaaa

SEQ ID NO: 546059 - DNA, 33 bp, Homo sapien
ttcacaattgaacacaaagagctattgccttac

SEQ ID NO: 546060 - DNA, 33 bp, Homo sapien
ttcacaattgaacacatagagctattgccttac

SEQ ID NO: 546061 - DNA, 33 bp, Homo sapien
ttggataaaccatagcagcatagtgatgagtta

SEQ ID NO: 546062 - DNA, 33 bp, Homo sapien
ttggataaaccatagcggcatagtgatgagtta

SEQ ID NO: 546063 - DNA, 33 bp, Homo sapien
aataacttatcaatgcaaacaaaagtaatgcga

SEQ ID NO: 546064 - DNA, 33 bp, Homo sapien
aataacttatcaatgcgaacaaaagtaatgcga

SEQ ID NO: 546065 - DNA, 33 bp, Homo sapien
atgtacagcgggaaaacgatagctaataatatt

SEQ ID NO: 546066 - DNA, 33 bp, Homo sapien
atgtacagcgggaaaatgatagctaataatatt

SEQ ID NO: 546067 - DNA, 33 bp, Homo sapien
tgacatggtgtatccaagataatatacatgaag

SEQ ID NO: 546068 - DNA, 33 bp, Homo sapien
tgacatggtgtatccaggataatatacatgaag

SEQ ID NO: 546069 - DNA, 33 bp, Homo sapien
aaacctgtgaagctccagaaatctgccaaagtt

SEQ ID NO: 546070 - DNA, 33 bp, Homo sapien
aaacctgtgaagctccggaaatctgccaaagtt

SEQ ID NO: 546071 - DNA, 33 bp, Homo sapien
ggtaagcctgttttcacagaactacaagtttcg

SEQ ID NO: 546072 - DNA, 33 bp, Homo sapien
ggtaagcctgttttcatagaactacaagtttcg

SEQ ID NO: 546073 - DNA, 33 bp, Homo sapien
ttgaaaggaaggcaccacttagaatgtggattt

SEQ ID NO: 546074 - DNA, 33 bp, Homo sapien
ttgaaaggaaggcacctcttagaatgtggattt

SEQ ID NO: 546075 - DNA, 33 bp, Homo sapien
gctggaataatgaaaaactgcttaaggaaaatt

SEQ ID NO: 546076 - DNA, 33 bp, Homo sapien
gctggaataatgaaaatctgcttaaggaaaatt

SEQ ID NO: 546077 - DNA, 33 bp, Homo sapien
cacctcagggtagcaaaatgtctgtcacagttc

SEQ ID NO: 546078 - DNA, 33 bp, Homo sapien
cacctcagggtagcaagatgtctgtcacagttc

SEQ ID NO: 546079 - DNA, 33 bp, Homo sapien
agagaaaaaggtaacaactgaaatgaaaatggg

SEQ ID NO: 546080 - DNA, 33 bp, Homo sapien
agagaaaaaggtaacatctgaaatgaaaatggg

SEQ ID NO: 546081 - DNA, 33 bp, Homo sapien
agttcagataaatacaaactgaagacatagggg

SEQ ID NO: 546082 - DNA, 33 bp, Homo sapien
agttcagataaatacacactgaagacatagggg

SEQ ID NO: 546083 - DNA, 33 bp, Homo sapien
tagatgagctaataaccggtactaatgataaac

SEQ ID NO: 546084 - DNA, 33 bp, Homo sapien
tagatgagctaataactggtactaatgataaac

SEQ ID NO: 546085 - DNA, 33 bp, Homo sapien
aaaggacagccttatggaatagtaccaattcaa

SEQ ID NO: 546086 - DNA, 33 bp, Homo sapien
aaaggacagccttatgtaatagtaccaattcaa

SEQ ID NO: 546087 - DNA, 33 bp, Homo sapien
gatagcaatttaagaaataaagtatgcacacac

SEQ ID NO: 546088 - DNA, 33 bp, Homo sapien
gatagcaatttaagaattaaagtatgcacacac

SEQ ID NO: 546089 - DNA, 33 bp, Homo sapien
cttttccaagtctccaatatctatttttccact

SEQ ID NO: 546090 - DNA, 33 bp, Homo sapien
cttttccaagtctccagtatctatttttccact

SEQ ID NO: 546091 - DNA, 33 bp, Homo sapien
ccaatcagtgggaagaacgtgtagaaaagaaca

SEQ ID NO: 546092 - DNA, 33 bp, Homo sapien
ccaatcagtgggaagagcgtgtagaaaagaaca

SEQ ID NO: 546093 - DNA, 33 bp, Homo sapien
aaatattgtttgtttcaagtatcaacaaaatag

SEQ ID NO: 546094 - DNA, 33 bp, Homo sapien
aaatattgtttgtttctagtatcaacaaaatag

SEQ ID NO: 546095 - DNA, 33 bp, Homo sapien
ccatgcctggttaggaactgcccatcttcagct

SEQ ID NO: 546096 - DNA, 33 bp, Homo sapien
ccatgcctggttaggatctgcccatcttcagct

SEQ ID NO: 546097 - DNA, 33 bp, Homo sapien
gggttgaatatcagaaagacttaaaaggctatc

SEQ ID NO: 546098 - DNA, 33 bp, Homo sapien
gggttgaatatcagaaggacttaaaaggctatc

SEQ ID NO: 546099 - DNA, 33 bp, Homo sapien
ttctgatattcaacccagagtctcccaaattcg

SEQ ID NO: 546100 - DNA, 33 bp, Homo sapien
ttctgatattcaacccggagtctcccaaattcg

SEQ ID NO: 546101 - DNA, 33 bp, Homo sapien
cagagagcagaggtggaaaaccagaatcccaaa

SEQ ID NO: 546102 - DNA, 33 bp, Homo sapien
cagagagcagaggtgggaaaccagaatcccaaa

SEQ ID NO: 546103 - DNA, 33 bp, Homo sapien
gagatacccctggcaccaacccatttctgtcca

SEQ ID NO: 546104 - DNA, 33 bp, Homo sapien
gagatacccctggcacgaacccatttctgtcca

SEQ ID NO: 546105 - DNA, 33 bp, Homo sapien
tggtcgtttcctagggccagttttggcttgaaa

SEQ ID NO: 546106 - DNA, 33 bp, Homo sapien
tggtcgtttcctagggtcagttttggcttgaaa

SEQ ID NO: 546107 - DNA, 33 bp, Homo sapien
tttagtgtttccaatgcagaagaacttgagagg

SEQ ID NO: 546108 - DNA, 33 bp, Homo sapien
tttagtgtttccaatgtagaagaacttgagagg

SEQ ID NO: 546109 - DNA, 33 bp, Homo sapien
tgtggttatttctgtagaagtctggcttcagag

SEQ ID NO: 546110 - DNA, 33 bp, Homo sapien
tgtggttatttctgtataagtctggcttcagag

SEQ ID NO: 546111 - DNA, 33 bp, Homo sapien
gagtgttctgcataccccagccttgggccatgc

SEQ ID NO: 546112 - DNA, 33 bp, Homo sapien
gagtgttctgcatacctcagccttgggccatgc

SEQ ID NO: 546113 - DNA, 33 bp, Homo sapien
acatatataggagccacggtgttctctgctcct

SEQ ID NO: 546114 - DNA, 33 bp, Homo sapien
acatatataggagccatggtgttctctgctcct

SEQ ID NO: 546115 - DNA, 33 bp, Homo sapien
gattttttgtcctctcaagctttcttattgatt

SEQ ID NO: 546116 - DNA, 33 bp, Homo sapien
gattttttgtcctctcgagctttcttattgatt

SEQ ID NO: 546117 - DNA, 33 bp, Homo sapien
ctttcgtttgagtcacaatctgctcatttagca

SEQ ID NO: 546118 - DNA, 33 bp, Homo sapien
ctttcgtttgagtcacgatctgctcatttagca

SEQ ID NO: 546119 - DNA, 33 bp, Homo sapien
atgcagcaaatgcttcaaataatagtaaactat

SEQ ID NO: 546120 - DNA, 33 bp, Homo sapien
atgcagcaaatgcttccaataatagtaaactat

SEQ ID NO: 546121 - DNA, 33 bp, Homo sapien
tcagttcccagtcacaataattgagtgttaatt

SEQ ID NO: 546122 - DNA, 33 bp, Homo sapien
tcagttcccagtcacagtaattgagtgttaatt

SEQ ID NO: 546123 - DNA, 33 bp, Homo sapien
aaaggatttccaagcacctttccctttgatccc

SEQ ID NO: 546124 - DNA, 33 bp, Homo sapien
aaaggatttccaagcatctttccctttgatccc

SEQ ID NO: 546125 - DNA, 33 bp, Homo sapien
agcgaaaacaatcataagtaaggatcattacaa

SEQ ID NO: 546126 - DNA, 33 bp, Homo sapien
agcgaaaacaatcataggtaaggatcattacaa

SEQ ID NO: 546127 - DNA, 33 bp, Homo sapien
tgtacattgctttgtgcaatatggtcattttca

SEQ ID NO: 546128 - DNA, 33 bp, Homo sapien
tgtacattgctttgtgtaatatggtcattttca

SEQ ID NO: 546129 - DNA, 33 bp, Homo sapien
atgaggcaacattaacccggcaggcccagagaa

SEQ ID NO: 546130 - DNA, 33 bp, Homo sapien
atgaggcaacattaactcggcaggcccagagaa

SEQ ID NO: 546131 - DNA, 33 bp, Homo sapien
agattcttgtcctgaacagtttaataagccact

SEQ ID NO: 546132 - DNA, 33 bp, Homo sapien
agattcttgtcctgaatagtttaataagccact

SEQ ID NO: 546133 - DNA, 33 bp, Homo sapien
gatctgggtcaataaaagtgatatttgtgttat

SEQ ID NO: 546134 - DNA, 33 bp, Homo sapien
gatctgggtcaataaatgtgatatttgtgttat

SEQ ID NO: 546135 - DNA, 33 bp, Homo sapien
caaaaatatccaaaaaagatacatgagataatc

SEQ ID NO: 546136 - DNA, 33 bp, Homo sapien
caaaaatatccaaaaatgatacatgagataatc

SEQ ID NO: 546137 - DNA, 33 bp, Homo sapien
tgcctagatctgccaggaagcatctaccagttt

SEQ ID NO: 546138 - DNA, 33 bp, Homo sapien
tgcctagatctgccagtaagcatctaccagttt

SEQ ID NO: 546139 - DNA, 33 bp, Homo sapien
actagcgagggccgccaattctttcttacaact

SEQ ID NO: 546140 - DNA, 33 bp, Homo sapien
actagcgagggccgccgattctttcttacaact

SEQ ID NO: 546141 - DNA, 33 bp, Homo sapien
tcataatcactgtcccagagtttaacaggtacc

SEQ ID NO: 546142 - DNA, 33 bp, Homo sapien
tcataatcactgtcccggagtttaacaggtacc

SEQ ID NO: 546143 - DNA, 33 bp, Homo sapien
tgtaactacattcttaaggtggcataatatcat

SEQ ID NO: 546144 - DNA, 33 bp, Homo sapien
tgtaactacattcttatggtggcataatatcat

SEQ ID NO: 546145 - DNA, 33 bp, Homo sapien
acatccattaagcaacagttaattctgacttaa

SEQ ID NO: 546146 - DNA, 33 bp, Homo sapien
acatccattaagcaacggttaattctgacttaa

SEQ ID NO: 546147 - DNA, 33 bp, Homo sapien
gtgaagattacttgaaattaggagctcaagacc

SEQ ID NO: 546148 - DNA, 33 bp, Homo sapien
gtgaagattacttgaagttaggagctcaagacc

SEQ ID NO: 546149 - DNA, 33 bp, Homo sapien
agcatcataggtttaacagccatactctagaag

SEQ ID NO: 546150 - DNA, 33 bp, Homo sapien
agcatcataggtttaatagccatactctagaag

SEQ ID NO: 546151 - DNA, 33 bp, Homo sapien
aattggtttgcaatacagggttactagaaaagg

SEQ ID NO: 546152 - DNA, 33 bp, Homo sapien
aattggtttgcaatacggggttactagaaaagg

SEQ ID NO: 546153 - DNA, 33 bp, Homo sapien
cgtgtcaaaaagtagaactccatgttagtattt

SEQ ID NO: 546154 - DNA, 33 bp, Homo sapien
cgtgtcaaaaagtagagctccatgttagtattt

SEQ ID NO: 546155 - DNA, 33 bp, Homo sapien
gctgctgagtttactccatagctttcaaacctt

SEQ ID NO: 546156 - DNA, 33 bp, Homo sapien
gctgctgagtttactcgatagctttcaaacctt

SEQ ID NO: 546157 - DNA, 33 bp, Homo sapien
cttcaatataaaagaacaactgcattgaataaa

SEQ ID NO: 546158 - DNA, 33 bp, Homo sapien
cttcaatataaaagaagaactgcattgaataaa

SEQ ID NO: 546159 - DNA, 33 bp, Homo sapien
tatttggtggtttgaacgatgggtgcccctagt

SEQ ID NO: 546160 - DNA, 33 bp, Homo sapien
tatttggtggtttgaatgatgggtgcccctagt

SEQ ID NO: 546161 - DNA, 33 bp, Homo sapien
aaatatttctagtgacagatctaaaataagaaa

SEQ ID NO: 546162 - DNA, 33 bp, Homo sapien
aaatatttctagtgaccgatctaaaataagaaa

SEQ ID NO: 546163 - DNA, 33 bp, Homo sapien
agtgttcagaatactacgtggcatacaataagt

SEQ ID NO: 546164 - DNA, 33 bp, Homo sapien
agtgttcagaatactatgtggcatacaataagt

SEQ ID NO: 546165 - DNA, 33 bp, Homo sapien
aaggagtcaaacaccacaaagatcactagtgtg

SEQ ID NO: 546166 - DNA, 33 bp, Homo sapien
aaggagtcaaacaccataaagatcactagtgtg

SEQ ID NO: 546167 - DNA, 33 bp, Homo sapien
cacacacagatggggtaaagacctctgtccctc

SEQ ID NO: 546168 - DNA, 33 bp, Homo sapien
cacacacagatggggtgaagacctctgtccctc

SEQ ID NO: 546169 - DNA, 33 bp, Homo sapien
cttcatggtgtacaacaggtcattcaaccatgc

SEQ ID NO: 546170 - DNA, 33 bp, Homo sapien
cttcatggtgtacaacgggtcattcaaccatgc

SEQ ID NO: 546171 - DNA, 33 bp, Homo sapien
ggtccgtggctctgaaagatactgcagacacga

SEQ ID NO: 546172 - DNA, 33 bp, Homo sapien
ggtccgtggctctgaaggatactgcagacacga

SEQ ID NO: 546173 - DNA, 33 bp, Homo sapien
aatgttacacactgataaaaagtattccagaaa

SEQ ID NO: 546174 - DNA, 33 bp, Homo sapien
aatgttacacactgattaaaagtattccagaaa

SEQ ID NO: 546175 - DNA, 33 bp, Homo sapien
catttcacaccccccaagatgaccataacaaaa

SEQ ID NO: 546176 - DNA, 33 bp, Homo sapien
catttcacaccccccaggatgaccataacaaaa

SEQ ID NO: 546177 - DNA, 33 bp, Homo sapien
taaacggatcaaccaaatgcagtatagaatgct

SEQ ID NO: 546178 - DNA, 33 bp, Homo sapien
taaacggatcaaccaagtgcagtatagaatgct

SEQ ID NO: 546179 - DNA, 33 bp, Homo sapien
agcaggatggtcaaaactaagtgagagaaaggc

SEQ ID NO: 546180 - DNA, 33 bp, Homo sapien
agcaggatggtcaaaattaagtgagagaaaggc

SEQ ID NO: 546181 - DNA, 33 bp, Homo sapien
aatgccaggggtaaaaactgattgaagtgagtt

SEQ ID NO: 546182 - DNA, 33 bp, Homo sapien
aatgccaggggtaaaacctgattgaagtgagtt

SEQ ID NO: 546183 - DNA, 33 bp, Homo sapien
ggcgagggaagaacaaagtgagctggctcctga

SEQ ID NO: 546184 - DNA, 33 bp, Homo sapien
ggcgagggaagaacaaggtgagctggctcctga

SEQ ID NO: 546185 - DNA, 33 bp, Homo sapien
tcttttttcaggagcacgtgtgattgtgatttt

SEQ ID NO: 546186 - DNA, 33 bp, Homo sapien
tcttttttcaggagcatgtgtgattgtgatttt

SEQ ID NO: 546187 - DNA, 33 bp, Homo sapien
gagacgtttagcaatacacttacacagttaata

SEQ ID NO: 546188 - DNA, 33 bp, Homo sapien
gagacgtttagcaatagacttacacagttaata

SEQ ID NO: 546189 - DNA, 33 bp, Homo sapien
gagagatgtgatttaaatgagaaatttgcaaaa

SEQ ID NO: 546190 - DNA, 33 bp, Homo sapien
gagagatgtgatttaagtgagaaatttgcaaaa

SEQ ID NO: 546191 - DNA, 33 bp, Homo sapien
tgaaagctctgacttaactggcctttcactctg

SEQ ID NO: 546192 - DNA, 33 bp, Homo sapien
tgaaagctctgacttagctggcctttcactctg

SEQ ID NO: 546193 - DNA, 33 bp, Homo sapien
gatctagaaaatgagacgtgttgaagcggggaa

SEQ ID NO: 546194 - DNA, 33 bp, Homo sapien
gatctagaaaatgagatgtgttgaagcggggaa

SEQ ID NO: 546195 - DNA, 33 bp, Homo sapien
gctcagcatccctttgcaacacttttgacatct

SEQ ID NO: 546196 - DNA, 33 bp, Homo sapien
gctcagcatccctttggaacacttttgacatct

SEQ ID NO: 546197 - DNA, 33 bp, Homo sapien
catttccctaatgtcaatagttgcagacacttt

SEQ ID NO: 546198 - DNA, 33 bp, Homo sapien
catttccctaatgtcagtagttgcagacacttt

SEQ ID NO: 546199 - DNA, 33 bp, Homo sapien
gtaccataaagtatctaaaactccagtggtgat

SEQ ID NO: 546200 - DNA, 33 bp, Homo sapien
gtaccataaagtatctgaaactccagtggtgat

SEQ ID NO: 546201 - DNA, 33 bp, Homo sapien
agcaagtttcttgcaccattttcactgatcttt

SEQ ID NO: 546202 - DNA, 33 bp, Homo sapien
agcaagtttcttgcacgattttcactgatcttt

SEQ ID NO: 546203 - DNA, 33 bp, Homo sapien
ctgaggcgagctgcacccgggttactgaacagc

SEQ ID NO: 546204 - DNA, 33 bp, Homo sapien
ctgaggcgagctgcactcgggttactgaacagc

SEQ ID NO: 546205 - DNA, 33 bp, Homo sapien
ttttggcaaagtgaccaagaatagtgaggcgtg

SEQ ID NO: 546206 - DNA, 33 bp, Homo sapien
ttttggcaaagtgacccagaatagtgaggcgtg

SEQ ID NO: 546207 - DNA, 33 bp, Homo sapien
tcgagctgctgtgtccaaactcacagggcccag

SEQ ID NO: 546208 - DNA, 33 bp, Homo sapien
tcgagctgctgtgtccgaactcacagggcccag

SEQ ID NO: 546209 - DNA, 33 bp, Homo sapien
tcaaggcagcggctaacaggacaaaatgacatg

SEQ ID NO: 546210 - DNA, 33 bp, Homo sapien
tcaaggcagcggctaagaggacaaaatgacatg

SEQ ID NO: 546211 - DNA, 33 bp, Homo sapien
cccactgagaagggacaccacgaatttacccaa

SEQ ID NO: 546212 - DNA, 33 bp, Homo sapien
cccactgagaagggacgccacgaatttacccaa

SEQ ID NO: 546213 - DNA, 33 bp, Homo sapien
tgtgcgtcctcttcagaccttttacacggggga

SEQ ID NO: 546214 - DNA, 33 bp, Homo sapien
tgtgcgtcctcttcaggccttttacacggggga

SEQ ID NO: 546215 - DNA, 33 bp, Homo sapien
aagagagggccatgcacgttgtaaagccctaca

SEQ ID NO: 546216 - DNA, 33 bp, Homo sapien
aagagagggccatgcatgttgtaaagccctaca

SEQ ID NO: 546217 - DNA, 33 bp, Homo sapien
aacggccggctttggaagctgaaagacaattcc

SEQ ID NO: 546218 - DNA, 33 bp, Homo sapien
aacggccggctttggaggctgaaagacaattcc

SEQ ID NO: 546219 - DNA, 33 bp, Homo sapien
ttagaatttggattcacaagacatgaacattaa

SEQ ID NO: 546220 - DNA, 33 bp, Homo sapien
ttagaatttggattcagaagacatgaacattaa

SEQ ID NO: 546221 - DNA, 33 bp, Homo sapien
tagtatatttgaattacgatctaagtaagctcc

SEQ ID NO: 546222 - DNA, 33 bp, Homo sapien
tagtatatttgaattaggatctaagtaagctcc

SEQ ID NO: 546223 - DNA, 33 bp, Homo sapien
ctttccttagtttagaatcagagtctccgtctg

SEQ ID NO: 546224 - DNA, 33 bp, Homo sapien
ctttccttagtttagagtcagagtctccgtctg

SEQ ID NO: 546225 - DNA, 33 bp, Homo sapien
tgtcttgggtactgcagaaggaaacccatatcc

SEQ ID NO: 546226 - DNA, 33 bp, Homo sapien
tgtcttgggtactgcataaggaaacccatatcc

SEQ ID NO: 546227 - DNA, 33 bp, Homo sapien
tgctaccctgacttcaaaggaacaaagtgggtt

SEQ ID NO: 546228 - DNA, 33 bp, Homo sapien
tgctaccctgacttcagaggaacaaagtgggtt

SEQ ID NO: 546229 - DNA, 33 bp, Homo sapien
tgcaagaaaattcagcaccctctctccataggc

SEQ ID NO: 546230 - DNA, 33 bp, Homo sapien
tgcaagaaaattcagcgccctctctccataggc

SEQ ID NO: 546231 - DNA, 33 bp, Homo sapien
agttattggaatgtgacgtctctctcaaaacat

SEQ ID NO: 546232 - DNA, 33 bp, Homo sapien
agttattggaatgtgatgtctctctcaaaacat

SEQ ID NO: 546233 - DNA, 33 bp, Homo sapien
tttaattctgccttcaaaatgcctagttaaccc

SEQ ID NO: 546234 - DNA, 33 bp, Homo sapien
tttaattctgccttcacaatgcctagttaaccc

SEQ ID NO: 546235 - DNA, 33 bp, Homo sapien
gatgtaaatgtggttaagtgataccatattaaa

SEQ ID NO: 546236 - DNA, 33 bp, Homo sapien
gatgtaaatgtggttaggtgataccatattaaa

SEQ ID NO: 546237 - DNA, 33 bp, Homo sapien
agtgaaatggtacgaaaaatagaaagaaaggta

SEQ ID NO: 546238 - DNA, 33 bp, Homo sapien
agtgaaatggtacgaagaatagaaagaaaggta

SEQ ID NO: 546239 - DNA, 33 bp, Homo sapien
aaatgtgaaagactagaactcaacactgatctc

SEQ ID NO: 546240 - DNA, 33 bp, Homo sapien
aaatgtgaaagactaggactcaacactgatctc

SEQ ID NO: 546241 - DNA, 33 bp, Homo sapien
tcatttcgcattcctgaagaggtgttccaagct

SEQ ID NO: 546242 - DNA, 33 bp, Homo sapien
tcatttcgcattcctgcagaggtgttccaagct

SEQ ID NO: 546243 - DNA, 33 bp, Homo sapien
tgtgctaactgactagaaaattccctacaagca

SEQ ID NO: 546244 - DNA, 33 bp, Homo sapien
tgtgctaactgactaggaaattccctacaagca

SEQ ID NO: 546245 - DNA, 33 bp, Homo sapien
gaaagcaagttaatggcccatgtcatagaacta

SEQ ID NO: 546246 - DNA, 33 bp, Homo sapien
gaaagcaagttaatggtccatgtcatagaacta

SEQ ID NO: 546247 - DNA, 33 bp, Homo sapien
tttcacatggtacttaacaattgatatggcttg

SEQ ID NO: 546248 - DNA, 33 bp, Homo sapien
tttcacatggtacttaccaattgatatggcttg

SEQ ID NO: 546249 - DNA, 33 bp, Homo sapien
aaggtggacatggaataaaaagtactatttcta

SEQ ID NO: 546250 - DNA, 33 bp, Homo sapien
aaggtggacatggaatgaaaagtactatttcta

SEQ ID NO: 546251 - DNA, 33 bp, Homo sapien
cttagaagaatggttacacaactcacaaattga

SEQ ID NO: 546252 - DNA, 33 bp, Homo sapien
cttagaagaatggttagacaactcacaaattga

SEQ ID NO: 546253 - DNA, 33 bp, Homo sapien
cctgcctttgccaagcaacttgagtcactgtat

SEQ ID NO: 546254 - DNA, 33 bp, Homo sapien
cctgcctttgccaagcgacttgagtcactgtat

SEQ ID NO: 546255 - DNA, 33 bp, Homo sapien
gcatgtgactgaaactaagccaatcagaattcc

SEQ ID NO: 546256 - DNA, 33 bp, Homo sapien
gcatgtgactgaaactgagccaatcagaattcc

SEQ ID NO: 546257 - DNA, 33 bp, Homo sapien
tgtggctttctcataaatgttaagtctagataa

SEQ ID NO: 546258 - DNA, 33 bp, Homo sapien
tgtggctttctcataagtgttaagtctagataa

SEQ ID NO: 546259 - DNA, 33 bp, Homo sapien
atgttgcatcccttctaactctcttccatgtta

SEQ ID NO: 546260 - DNA, 33 bp, Homo sapien
atgttgcatcccttctgactctcttccatgtta

SEQ ID NO: 546261 - DNA, 33 bp, Homo sapien
tttggcagtggttccaccgttcatggagatgtt

SEQ ID NO: 546262 - DNA, 33 bp, Homo sapien
tttggcagtggttccatcgttcatggagatgtt

SEQ ID NO: 546263 - DNA, 33 bp, Homo sapien
cttcattgttagcgaagatttgtccgttttttt

SEQ ID NO: 546264 - DNA, 33 bp, Homo sapien
cttcattgttagcgaatatttgtccgttttttt

SEQ ID NO: 546265 - DNA, 33 bp, Homo sapien
ctcaaaatgttccttcaacactacaggaaagaa

SEQ ID NO: 546266 - DNA, 33 bp, Homo sapien
ctcaaaatgttccttcgacactacaggaaagaa

SEQ ID NO: 546267 - DNA, 33 bp, Homo sapien
agttctttgttaataaccagtcctctcaggaac

SEQ ID NO: 546268 - DNA, 33 bp, Homo sapien
agttctttgttaataatcagtcctctcaggaac

SEQ ID NO: 546269 - DNA, 33 bp, Homo sapien
aaatatccaaaccataacaattggattaagggc

SEQ ID NO: 546270 - DNA, 33 bp, Homo sapien
aaatatccaaaccatagcaattggattaagggc

SEQ ID NO: 546271 - DNA, 33 bp, Homo sapien
ctggaatgcatgtccacctagaacttcagaatg

SEQ ID NO: 546272 - DNA, 33 bp, Homo sapien
ctggaatgcatgtccagctagaacttcagaatg

SEQ ID NO: 546273 - DNA, 33 bp, Homo sapien
ctcacatctctttgtaccacctctccgtacatt

SEQ ID NO: 546274 - DNA, 33 bp, Homo sapien
ctcacatctctttgtatcacctctccgtacatt

SEQ ID NO: 546275 - DNA, 33 bp, Homo sapien
gcttgggccggcctcacatctcagcaggaaact

SEQ ID NO: 546276 - DNA, 33 bp, Homo sapien
gcttgggccggcctcagatctcagcaggaaact

SEQ ID NO: 546277 - DNA, 33 bp, Homo sapien
aggcttaggctggaaagcaccatattctcaagg

SEQ ID NO: 546278 - DNA, 33 bp, Homo sapien
aggcttaggctggaaatcaccatattctcaagg

SEQ ID NO: 546279 - DNA, 33 bp, Homo sapien
ttcaggattacacttgcaggaagtatcagagcc

SEQ ID NO: 546280 - DNA, 33 bp, Homo sapien
ttcaggattacacttgtaggaagtatcagagcc

SEQ ID NO: 546281 - DNA, 33 bp, Homo sapien
agggacagctcctaccccagttaaccagttatg

SEQ ID NO: 546282 - DNA, 33 bp, Homo sapien
agggacagctcctacctcagttaaccagttatg

SEQ ID NO: 546283 - DNA, 33 bp, Homo sapien
gaatttccccggagcacattagacctggtgata

SEQ ID NO: 546284 - DNA, 33 bp, Homo sapien
gaatttccccggagcatattagacctggtgata

SEQ ID NO: 546285 - DNA, 33 bp, Homo sapien
aaaagactggcaaaccaaataaaacctgaagtc

SEQ ID NO: 546286 - DNA, 33 bp, Homo sapien
aaaagactggcaaaccgaataaaacctgaagtc

SEQ ID NO: 546287 - DNA, 33 bp, Homo sapien
ttccacaatgactaaaataatatacactcccac

SEQ ID NO: 546288 - DNA, 33 bp, Homo sapien
ttccacaatgactaaagtaatatacactcccac

SEQ ID NO: 546289 - DNA, 33 bp, Homo sapien
gacagtctggcacagcaagcccttagtgactac

SEQ ID NO: 546290 - DNA, 33 bp, Homo sapien
gacagtctggcacagcgagcccttagtgactac

SEQ ID NO: 546291 - DNA, 33 bp, Homo sapien
tgggccagatgaggaacagaaggaagcccttac

SEQ ID NO: 546292 - DNA, 33 bp, Homo sapien
tgggccagatgaggaatagaaggaagcccttac

SEQ ID NO: 546293 - DNA, 33 bp, Homo sapien
acactagtgcaccaaaacatcggttgagtactg

SEQ ID NO: 546294 - DNA, 33 bp, Homo sapien
acactagtgcaccaaaccatcggttgagtactg

SEQ ID NO: 546295 - DNA, 33 bp, Homo sapien
tcaatagggaaggcccaagtttcaagaggcaga

SEQ ID NO: 546296 - DNA, 33 bp, Homo sapien
tcaatagggaaggccccagtttcaagaggcaga

SEQ ID NO: 546297 - DNA, 33 bp, Homo sapien
gctcaaggaaacttataacccaggcatgaaata

SEQ ID NO: 546298 - DNA, 33 bp, Homo sapien
gctcaaggaaacttatgacccaggcatgaaata

SEQ ID NO: 546299 - DNA, 33 bp, Homo sapien
agtgtctgtgatgtcaacaagttttttctggca

SEQ ID NO: 546300 - DNA, 33 bp, Homo sapien
agtgtctgtgatgtcagcaagttttttctggca

SEQ ID NO: 546301 - DNA, 33 bp, Homo sapien
gtattatctatgtttccatacttgatggactta

SEQ ID NO: 546302 - DNA, 33 bp, Homo sapien
gtattatctatgtttctatacttgatggactta

SEQ ID NO: 546303 - DNA, 33 bp, Homo sapien
atacagggtgtcctcaaagtctgggaaagaaag

SEQ ID NO: 546304 - DNA, 33 bp, Homo sapien
atacagggtgtcctcagagtctgggaaagaaag

SEQ ID NO: 546305 - DNA, 33 bp, Homo sapien
tctgtggagatgaagacggaggacagaagaggc

SEQ ID NO: 546306 - DNA, 33 bp, Homo sapien
tctgtggagatgaagatggaggacagaagaggc

SEQ ID NO: 546307 - DNA, 33 bp, Homo sapien
gggcttccaatttatccatatggttgggttttc

SEQ ID NO: 546308 - DNA, 33 bp, Homo sapien
gggcttccaatttatctatatggttgggttttc

SEQ ID NO: 546309 - DNA, 33 bp, Homo sapien
tgtttggctaaggaaagcttcttctgtggaaca

SEQ ID NO: 546310 - DNA, 33 bp, Homo sapien
tgtttggctaaggaaatcttcttctgtggaaca

SEQ ID NO: 546311 - DNA, 33 bp, Homo sapien
tgttgacagtttgagtaaagaatgtatagtggg

SEQ ID NO: 546312 - DNA, 33 bp, Homo sapien
tgttgacagtttgagttaagaatgtatagtggg

SEQ ID NO: 546313 - DNA, 33 bp, Homo sapien
atctcttacaaggacactcatcatttggattta

SEQ ID NO: 546314 - DNA, 33 bp, Homo sapien
atctcttacaaggacattcatcatttggattta

SEQ ID NO: 546315 - DNA, 33 bp, Homo sapien
catctcagttcactcaaatcgacttctactcca

SEQ ID NO: 546316 - DNA, 33 bp, Homo sapien
catctcagttcactcatatcgacttctactcca

SEQ ID NO: 546317 - DNA, 33 bp, Homo sapien
cccatcctcaaattgccacctaaaggacacctt

SEQ ID NO: 546318 - DNA, 33 bp, Homo sapien
cccatcctcaaattgctacctaaaggacacctt

SEQ ID NO: 546319 - DNA, 33 bp, Homo sapien
gatagggaatcagggaccactggctccatgtaa

SEQ ID NO: 546320 - DNA, 33 bp, Homo sapien
gatagggaatcagggatcactggctccatgtaa

SEQ ID NO: 546321 - DNA, 33 bp, Homo sapien
gcatgttttgtgacaccgagctccttccagcac

SEQ ID NO: 546322 - DNA, 33 bp, Homo sapien
gcatgttttgtgacactgagctccttccagcac

SEQ ID NO: 546323 - DNA, 33 bp, Homo sapien
aattgactgggtcacaaggtgcgtggatatttg

SEQ ID NO: 546324 - DNA, 33 bp, Homo sapien
aattgactgggtcacagggtgcgtggatatttg

SEQ ID NO: 546325 - DNA, 33 bp, Homo sapien
atcctctgatggaaaactggttagtgcattttt

SEQ ID NO: 546326 - DNA, 33 bp, Homo sapien
atcctctgatggaaaagtggttagtgcattttt

SEQ ID NO: 546327 - DNA, 33 bp, Homo sapien
tgtagaaatcatttaaggtgtgcattggttagc

SEQ ID NO: 546328 - DNA, 33 bp, Homo sapien
tgtagaaatcatttaatgtgtgcattggttagc

SEQ ID NO: 546329 - DNA, 33 bp, Homo sapien
agatttttgggtgaacagctcccctcagtaata

SEQ ID NO: 546330 - DNA, 33 bp, Homo sapien
agatttttgggtgaacggctcccctcagtaata

SEQ ID NO: 546331 - DNA, 33 bp, Homo sapien
cagccatgttggctataagaatcaaattttatg

SEQ ID NO: 546332 - DNA, 33 bp, Homo sapien
cagccatgttggctatgagaatcaaattttatg

SEQ ID NO: 546333 - DNA, 33 bp, Homo sapien
ggggatggtatctcacaaatggttcaacgccat

SEQ ID NO: 546334 - DNA, 33 bp, Homo sapien
ggggatggtatctcacgaatggttcaacgccat

SEQ ID NO: 546335 - DNA, 33 bp, Homo sapien
gtgctcatgagatatacacacagtagactatac

SEQ ID NO: 546336 - DNA, 33 bp, Homo sapien
gtgctcatgagatatatacacagtagactatac

SEQ ID NO: 546337 - DNA, 33 bp, Homo sapien
actgtttgaaaatccacgcacccaagcttgact

SEQ ID NO: 546338 - DNA, 33 bp, Homo sapien
actgtttgaaaatccatgcacccaagcttgact

SEQ ID NO: 546339 - DNA, 33 bp, Homo sapien
aaatctcatgacccctaacgagttaacactaaa

SEQ ID NO: 546340 - DNA, 33 bp, Homo sapien
aaatctcatgacccctgacgagttaacactaaa

SEQ ID NO: 546341 - DNA, 33 bp, Homo sapien
agtggtcctccaaaaacagacttgttctatttc

SEQ ID NO: 546342 - DNA, 33 bp, Homo sapien
agtggtcctccaaaaagagacttgttctatttc

SEQ ID NO: 546343 - DNA, 33 bp, Homo sapien
tatgatattatgcagcaatgtagccttctattt

SEQ ID NO: 546344 - DNA, 33 bp, Homo sapien
tatgatattatgcagccatgtagccttctattt

SEQ ID NO: 546345 - DNA, 33 bp, Homo sapien
gatctcactatgagaaaattatcctgcatcatt

SEQ ID NO: 546346 - DNA, 33 bp, Homo sapien
gatctcactatgagaagattatcctgcatcatt

SEQ ID NO: 546347 - DNA, 33 bp, Homo sapien
attaacaatagccacaataagaataaaatatct

SEQ ID NO: 546348 - DNA, 33 bp, Homo sapien
attaacaatagccacagtaagaataaaatatct

SEQ ID NO: 546349 - DNA, 33 bp, Homo sapien
gtctttgcccaaaatccccttgatctgataaag

SEQ ID NO: 546350 - DNA, 33 bp, Homo sapien
gtctttgcccaaaatctccttgatctgataaag

SEQ ID NO: 546351 - DNA, 33 bp, Homo sapien
attctgttcagcagaaactcagtggaaattgtg

SEQ ID NO: 546352 - DNA, 33 bp, Homo sapien
attctgttcagcagaacctcagtggaaattgtg

SEQ ID NO: 546353 - DNA, 33 bp, Homo sapien
tctcctgtttagtgacggactatgatattttaa

SEQ ID NO: 546354 - DNA, 33 bp, Homo sapien
tctcctgtttagtgactgactatgatattttaa

SEQ ID NO: 546355 - DNA, 33 bp, Homo sapien
gtcacatggaaaccaaacattccttaaaatgct

SEQ ID NO: 546356 - DNA, 33 bp, Homo sapien
gtcacatggaaaccaagcattccttaaaatgct

SEQ ID NO: 546357 - DNA, 33 bp, Homo sapien
tgtgtgtgtgtgtagacgtctccataagactca

SEQ ID NO: 546358 - DNA, 33 bp, Homo sapien
tgtgtgtgtgtgtagatgtctccataagactca

SEQ ID NO: 546359 - DNA, 33 bp, Homo sapien
gggtatagaagctcaaatgcaatgaagagctga

SEQ ID NO: 546360 - DNA, 33 bp, Homo sapien
gggtatagaagctcaattgcaatgaagagctga

SEQ ID NO: 546361 - DNA, 33 bp, Homo sapien
agtctcccaacctacaaaagcaaactaagagaa

SEQ ID NO: 546362 - DNA, 33 bp, Homo sapien
agtctcccaacctacacaagcaaactaagagaa

SEQ ID NO: 546363 - DNA, 33 bp, Homo sapien
ctattatgtttgtctcaatggaattatgttgta

SEQ ID NO: 546364 - DNA, 33 bp, Homo sapien
ctattatgtttgtctcgatggaattatgttgta

SEQ ID NO: 546365 - DNA, 33 bp, Homo sapien
tcataagggaaaccaacgtcacacatatgtcta

SEQ ID NO: 546366 - DNA, 33 bp, Homo sapien
tcataagggaaaccaatgtcacacatatgtcta

SEQ ID NO: 546367 - DNA, 33 bp, Homo sapien
aaatgataaaaagagactaaattagctgtaaag

SEQ ID NO: 546368 - DNA, 33 bp, Homo sapien
aaatgataaaaagagattaaattagctgtaaag

SEQ ID NO: 546369 - DNA, 33 bp, Homo sapien
aatcaatatgcagcaaaacttagcacattggtg

SEQ ID NO: 546370 - DNA, 33 bp, Homo sapien
aatcaatatgcagcaacacttagcacattggtg

SEQ ID NO: 546371 - DNA, 33 bp, Homo sapien
cttatcaggtgaggccagctattttagagaagg

SEQ ID NO: 546372 - DNA, 33 bp, Homo sapien
cttatcaggtgaggccggctattttagagaagg

SEQ ID NO: 546373 - DNA, 33 bp, Homo sapien
agtcttgctctggaatcatctttgttaaactaa

SEQ ID NO: 546374 - DNA, 33 bp, Homo sapien
agtcttgctctggaatgatctttgttaaactaa

SEQ ID NO: 546375 - DNA, 33 bp, Homo sapien
taaactatggagtcacagcatcattggtattca

SEQ ID NO: 546376 - DNA, 33 bp, Homo sapien
taaactatggagtcaccgcatcattggtattca

SEQ ID NO: 546377 - DNA, 33 bp, Homo sapien
gccttcccagtcagggaaaacgactttcagatg

SEQ ID NO: 546378 - DNA, 33 bp, Homo sapien
gccttcccagtcaggggaaacgactttcagatg

SEQ ID NO: 546379 - DNA, 33 bp, Homo sapien
ttttctacagtctgaccatagggacatcttgca

SEQ ID NO: 546380 - DNA, 33 bp, Homo sapien
ttttctacagtctgacgatagggacatcttgca

SEQ ID NO: 546381 - DNA, 33 bp, Homo sapien
tggttgtcaactccaaactccctaactagatct

SEQ ID NO: 546382 - DNA, 33 bp, Homo sapien
tggttgtcaactccaatctccctaactagatct

SEQ ID NO: 546383 - DNA, 33 bp, Homo sapien
ctggcgttagattctacggatcttgctttcttc

SEQ ID NO: 546384 - DNA, 33 bp, Homo sapien
ctggcgttagattctatggatcttgctttcttc

SEQ ID NO: 546385 - DNA, 33 bp, Homo sapien
ttcaatcagccataaaagtcacagatgatcagt

SEQ ID NO: 546386 - DNA, 33 bp, Homo sapien
ttcaatcagccataaaggtcacagatgatcagt

SEQ ID NO: 546387 - DNA, 33 bp, Homo sapien
agagctaacaagacacagaactgctccgttacc

SEQ ID NO: 546388 - DNA, 33 bp, Homo sapien
agagctaacaagacacggaactgctccgttacc

SEQ ID NO: 546389 - DNA, 33 bp, Homo sapien
acatcacactgttaacaatgattactactggaa

SEQ ID NO: 546390 - DNA, 33 bp, Homo sapien
acatcacactgttaacgatgattactactggaa

SEQ ID NO: 546391 - DNA, 33 bp, Homo sapien
ctggattaaaatgcaagaggtaaagaaacaaaa

SEQ ID NO: 546392 - DNA, 33 bp, Homo sapien
ctggattaaaatgcaataggtaaagaaacaaaa

SEQ ID NO: 546393 - DNA, 33 bp, Homo sapien
ttgtgtctgaaccttaacttggttactcctatg

SEQ ID NO: 546394 - DNA, 33 bp, Homo sapien
ttgtgtctgaaccttagcttggttactcctatg

SEQ ID NO: 546395 - DNA, 33 bp, Homo sapien
atatatctaagagtaaaagcaacaagaggaaaa

SEQ ID NO: 546396 - DNA, 33 bp, Homo sapien
atatatctaagagtaagagcaacaagaggaaaa

SEQ ID NO: 546397 - DNA, 33 bp, Homo sapien
tgagaacttttacttcactgtattgcccatgcc

SEQ ID NO: 546398 - DNA, 33 bp, Homo sapien
tgagaacttttacttcgctgtattgcccatgcc

SEQ ID NO: 546399 - DNA, 33 bp, Homo sapien
caatggatattaggggaaaattagcaagttcag

SEQ ID NO: 546400 - DNA, 33 bp, Homo sapien
caatggatattagggggaaattagcaagttcag

SEQ ID NO: 546401 - DNA, 33 bp, Homo sapien
tctctgtggttagacaaaattaagaaattatga

SEQ ID NO: 546402 - DNA, 33 bp, Homo sapien
tctctgtggttagacacaattaagaaattatga

SEQ ID NO: 546403 - DNA, 33 bp, Homo sapien
ctatcttcttacaacacacaatttagaaatgag

SEQ ID NO: 546404 - DNA, 33 bp, Homo sapien
ctatcttcttacaacatacaatttagaaatgag

SEQ ID NO: 546405 - DNA, 33 bp, Homo sapien
agtcacccctatgacaacatcatttaaatgcac

SEQ ID NO: 546406 - DNA, 33 bp, Homo sapien
agtcacccctatgacagcatcatttaaatgcac

SEQ ID NO: 546407 - DNA, 33 bp, Homo sapien
cgatttcaagcccaaaatcctcccaaatccttg

SEQ ID NO: 546408 - DNA, 33 bp, Homo sapien
cgatttcaagcccaaagtcctcccaaatccttg

SEQ ID NO: 546409 - DNA, 33 bp, Homo sapien
aaatagctcaatttaacgagtaacaagagtcct

SEQ ID NO: 546410 - DNA, 33 bp, Homo sapien
aaatagctcaatttaatgagtaacaagagtcct

SEQ ID NO: 546411 - DNA, 33 bp, Homo sapien
tttgtatccctacaaacactaacaactgtgtta

SEQ ID NO: 546412 - DNA, 33 bp, Homo sapien
tttgtatccctacaaatactaacaactgtgtta

SEQ ID NO: 546413 - DNA, 33 bp, Homo sapien
taatctggatttactgaaattactaaagaaact

SEQ ID NO: 546414 - DNA, 33 bp, Homo sapien
taatctggatttactggaattactaaagaaact

SEQ ID NO: 546415 - DNA, 33 bp, Homo sapien
aaaatgtcgaggaaaacggagatccaaattgtt

SEQ ID NO: 546416 - DNA, 33 bp, Homo sapien
aaaatgtcgaggaaaatggagatccaaattgtt

SEQ ID NO: 546417 - DNA, 33 bp, Homo sapien
tgcttaaaacagagccaaatatcacccttacca

SEQ ID NO: 546418 - DNA, 33 bp, Homo sapien
tgcttaaaacagagccgaatatcacccttacca

SEQ ID NO: 546419 - DNA, 33 bp, Homo sapien
tcatgagacacgaaacaattgcatatctataga

SEQ ID NO: 546420 - DNA, 33 bp, Homo sapien
tcatgagacacgaaaccattgcatatctataga

SEQ ID NO: 546421 - DNA, 33 bp, Homo sapien
aatgtcaaacttcacaatagaactatacattca

SEQ ID NO: 546422 - DNA, 33 bp, Homo sapien
aatgtcaaacttcacagtagaactatacattca

SEQ ID NO: 546423 - DNA, 33 bp, Homo sapien
agagttcctgtgcaagcaatgagagacctaatg

SEQ ID NO: 546424 - DNA, 33 bp, Homo sapien
agagttcctgtgcaaggaatgagagacctaatg

SEQ ID NO: 546425 - DNA, 33 bp, Homo sapien
aaaatacacagtcagccagtggtgagtcaacag

SEQ ID NO: 546426 - DNA, 33 bp, Homo sapien
aaaatacacagtcagctagtggtgagtcaacag

SEQ ID NO: 546427 - DNA, 33 bp, Homo sapien
gaaattacctgtctcaaaagtgtctctccgatt

SEQ ID NO: 546428 - DNA, 33 bp, Homo sapien
gaaattacctgtctcagaagtgtctctccgatt

SEQ ID NO: 546429 - DNA, 33 bp, Homo sapien
gttacaactgagctaacccactttaaaggcaac

SEQ ID NO: 546430 - DNA, 33 bp, Homo sapien
gttacaactgagctaatccactttaaaggcaac

SEQ ID NO: 546431 - DNA, 33 bp, Homo sapien
atgtcttgtgataggcgaccctctggagtttct

SEQ ID NO: 546432 - DNA, 33 bp, Homo sapien
atgtcttgtgataggctaccctctggagtttct

SEQ ID NO: 546433 - DNA, 33 bp, Homo sapien
taaggtatgaaggaatgaaagagcaatttacca

SEQ ID NO: 546434 - DNA, 33 bp, Homo sapien
taaggtatgaaggaattaaagagcaatttacca

SEQ ID NO: 546435 - DNA, 33 bp, Homo sapien
acctaataatttcaaacagtgtaatgctccaag

SEQ ID NO: 546436 - DNA, 33 bp, Homo sapien
acctaataatttcaaagagtgtaatgctccaag

SEQ ID NO: 546437 - DNA, 33 bp, Homo sapien
ctttttatatccttagcccgtttttttgagata

SEQ ID NO: 546438 - DNA, 33 bp, Homo sapien
ctttttatatccttagtccgtttttttgagata

SEQ ID NO: 546439 - DNA, 33 bp, Homo sapien
atctgacctacagagagaattgttgctaaaagc

SEQ ID NO: 546440 - DNA, 33 bp, Homo sapien
atctgacctacagagataattgttgctaaaagc

SEQ ID NO: 546441 - DNA, 33 bp, Homo sapien
aaatgtactgaaatggcattatgccctagatcc

SEQ ID NO: 546442 - DNA, 33 bp, Homo sapien
aaatgtactgaaatggtattatgccctagatcc

SEQ ID NO: 546443 - DNA, 33 bp, Homo sapien
tcaatgccgctaaacaatcttcaggatcatact

SEQ ID NO: 546444 - DNA, 33 bp, Homo sapien
tcaatgccgctaaacagtcttcaggatcatact

SEQ ID NO: 546445 - DNA, 33 bp, Homo sapien
agggaaagtagaacacagaattacatggaaacc

SEQ ID NO: 546446 - DNA, 33 bp, Homo sapien
agggaaagtagaacacggaattacatggaaacc

SEQ ID NO: 546447 - DNA, 33 bp, Homo sapien
attaattgtaaaacacaagcattttgtcaaaca

SEQ ID NO: 546448 - DNA, 33 bp, Homo sapien
attaattgtaaaacactagcattttgtcaaaca

SEQ ID NO: 546449 - DNA, 33 bp, Homo sapien
ggatacagtttatgccagcagaatgaaaacatc

SEQ ID NO: 546450 - DNA, 33 bp, Homo sapien
ggatacagtttatgccggcagaatgaaaacatc

SEQ ID NO: 546451 - DNA, 33 bp, Homo sapien
gaaaaacaaaattcacaattctgtacatcaatc

SEQ ID NO: 546452 - DNA, 33 bp, Homo sapien
gaaaaacaaaattcaccattctgtacatcaatc

SEQ ID NO: 546453 - DNA, 33 bp, Homo sapien
taattatcaccacatcaaactaataaagtaaat

SEQ ID NO: 546454 - DNA, 33 bp, Homo sapien
taattatcaccacatcgaactaataaagtaaat

SEQ ID NO: 546455 - DNA, 33 bp, Homo sapien
tgactgaaccagaaaacattatataagtgctct

SEQ ID NO: 546456 - DNA, 33 bp, Homo sapien
tgactgaaccagaaaagattatataagtgctct

SEQ ID NO: 546457 - DNA, 33 bp, Homo sapien
tgtacactaataaggacgagatgaggaagaagc

SEQ ID NO: 546458 - DNA, 33 bp, Homo sapien
tgtacactaataaggatgagatgaggaagaagc

SEQ ID NO: 546459 - DNA, 33 bp, Homo sapien
gcctagcccccagtacaatgatattttgaggtg

SEQ ID NO: 546460 - DNA, 33 bp, Homo sapien
gcctagcccccagtacgatgatattttgaggtg

SEQ ID NO: 546461 - DNA, 33 bp, Homo sapien
gccagaaagtaagatacagtcttagtgagtttg

SEQ ID NO: 546462 - DNA, 33 bp, Homo sapien
gccagaaagtaagatatagtcttagtgagtttg

SEQ ID NO: 546463 - DNA, 33 bp, Homo sapien
agggttgttttaataacgtgtcagctggtcaag

SEQ ID NO: 546464 - DNA, 33 bp, Homo sapien
agggttgttttaataaggtgtcagctggtcaag

SEQ ID NO: 546465 - DNA, 33 bp, Homo sapien
ttgtcatggagtttcaagttaaaatccctgctg

SEQ ID NO: 546466 - DNA, 33 bp, Homo sapien
ttgtcatggagtttcaggttaaaatccctgctg

SEQ ID NO: 546467 - DNA, 33 bp, Homo sapien
tccatgacaacaaggaatccaccaggcaggtct

SEQ ID NO: 546468 - DNA, 33 bp, Homo sapien
tccatgacaacaaggagtccaccaggcaggtct

SEQ ID NO: 546469 - DNA, 33 bp, Homo sapien
tctgagccttcaacgaatcataatctttttgct

SEQ ID NO: 546470 - DNA, 33 bp, Homo sapien
tctgagccttcaacgagtcataatctttttgct

SEQ ID NO: 546471 - DNA, 33 bp, Homo sapien
ggtgttaagaatggcaccttgggagctggcatg

SEQ ID NO: 546472 - DNA, 33 bp, Homo sapien
ggtgttaagaatggcatcttgggagctggcatg

SEQ ID NO: 546473 - DNA, 33 bp, Homo sapien
agaatggcccaagatacgtatttttattagcat

SEQ ID NO: 546474 - DNA, 33 bp, Homo sapien
agaatggcccaagatatgtatttttattagcat

SEQ ID NO: 546475 - DNA, 33 bp, Homo sapien
aattccactctggttacaaacttacagacacca

SEQ ID NO: 546476 - DNA, 33 bp, Homo sapien
aattccactctggttagaaacttacagacacca

SEQ ID NO: 546477 - DNA, 33 bp, Homo sapien
cgtcaaccagggctgcgctaattagattgcttc

SEQ ID NO: 546478 - DNA, 33 bp, Homo sapien
cgtcaaccagggctgctctaattagattgcttc

SEQ ID NO: 546479 - DNA, 33 bp, Homo sapien
cactctctggagggccagcagtgcttgaggata

SEQ ID NO: 546480 - DNA, 33 bp, Homo sapien
cactctctggagggccggcagtgcttgaggata

SEQ ID NO: 546481 - DNA, 33 bp, Homo sapien
ctcaacaaagttctgaagaatgaataaacatgg

SEQ ID NO: 546482 - DNA, 33 bp, Homo sapien
ctcaacaaagttctgaggaatgaataaacatgg

SEQ ID NO: 546483 - DNA, 33 bp, Homo sapien
attgctcactgggcgcgctggcagagacagctg

SEQ ID NO: 546484 - DNA, 33 bp, Homo sapien
attgctcactgggcgctctggcagagacagctg

SEQ ID NO: 546485 - DNA, 33 bp, Homo sapien
ttctttcagttttagcaactctctagtacttaa

SEQ ID NO: 546486 - DNA, 33 bp, Homo sapien
ttctttcagttttagcgactctctagtacttaa

SEQ ID NO: 546487 - DNA, 33 bp, Homo sapien
aattaagatagtgccaagaactcaattttagct

SEQ ID NO: 546488 - DNA, 33 bp, Homo sapien
aattaagatagtgccaggaactcaattttagct

SEQ ID NO: 546489 - DNA, 33 bp, Homo sapien
aggtcatttcctgtaaataagtatgagagagga

SEQ ID NO: 546490 - DNA, 33 bp, Homo sapien
aggtcatttcctgtaagtaagtatgagagagga

SEQ ID NO: 546491 - DNA, 33 bp, Homo sapien
gcgaggcattctagaacctggggcactacttgg

SEQ ID NO: 546492 - DNA, 33 bp, Homo sapien
gcgaggcattctagaatctggggcactacttgg

SEQ ID NO: 546493 - DNA, 33 bp, Homo sapien
atcttcccacttactacactcttcttaccaggt

SEQ ID NO: 546494 - DNA, 33 bp, Homo sapien
atcttcccacttactatactcttcttaccaggt

SEQ ID NO: 546495 - DNA, 33 bp, Homo sapien
gaggcatattttcaacgctctgttaactaaaaa

SEQ ID NO: 546496 - DNA, 33 bp, Homo sapien
gaggcatattttcaactctctgttaactaaaaa

SEQ ID NO: 546497 - DNA, 33 bp, Homo sapien
tgtttatagacagaaaactttagtgtagaatta

SEQ ID NO: 546498 - DNA, 33 bp, Homo sapien
tgtttatagacagaaagctttagtgtagaatta

SEQ ID NO: 546499 - DNA, 33 bp, Homo sapien
tgatctctgcgttttcacttgctctcactagaa

SEQ ID NO: 546500 - DNA, 33 bp, Homo sapien
tgatctctgcgttttctcttgctctcactagaa

SEQ ID NO: 546501 - DNA, 33 bp, Homo sapien
tcttttccttaacagacctgttgtgagttgtaa

SEQ ID NO: 546502 - DNA, 33 bp, Homo sapien
tcttttccttaacagagctgttgtgagttgtaa

SEQ ID NO: 546503 - DNA, 33 bp, Homo sapien
tgcagatgaaagaacactgggtggaagatacac

SEQ ID NO: 546504 - DNA, 33 bp, Homo sapien
tgcagatgaaagaacattgggtggaagatacac

SEQ ID NO: 546505 - DNA, 33 bp, Homo sapien
acaacatgtcaaaaacggagctcattcctcccc

SEQ ID NO: 546506 - DNA, 33 bp, Homo sapien
acaacatgtcaaaaactgagctcattcctcccc

SEQ ID NO: 546507 - DNA, 33 bp, Homo sapien
ccaaaggatagcctccacccatagcgttattta

SEQ ID NO: 546508 - DNA, 33 bp, Homo sapien
ccaaaggatagcctccgcccatagcgttattta

SEQ ID NO: 546509 - DNA, 33 bp, Homo sapien
ttcatatccatgttacagaacttagcacactgc

SEQ ID NO: 546510 - DNA, 33 bp, Homo sapien
ttcatatccatgttacggaacttagcacactgc

SEQ ID NO: 546511 - DNA, 33 bp, Homo sapien
tgcctgacacatactacgtttttgaaagcttga

SEQ ID NO: 546512 - DNA, 33 bp, Homo sapien
tgcctgacacatactaggtttttgaaagcttga

SEQ ID NO: 546513 - DNA, 33 bp, Homo sapien
gaatcacataggcaggaataggcttagcactgt

SEQ ID NO: 546514 - DNA, 33 bp, Homo sapien
gaatcacataggcaggtataggcttagcactgt

SEQ ID NO: 546515 - DNA, 33 bp, Homo sapien
tatgaagggtaggacacctatcctggcatcatg

SEQ ID NO: 546516 - DNA, 33 bp, Homo sapien
tatgaagggtaggacatctatcctggcatcatg

SEQ ID NO: 546517 - DNA, 33 bp, Homo sapien
cccacggataaggagcactgactatattacaca

SEQ ID NO: 546518 - DNA, 33 bp, Homo sapien
cccacggataaggagcgctgactatattacaca

SEQ ID NO: 546519 - DNA, 33 bp, Homo sapien
cccagtgttcatggcacgttaggatcaggcaac

SEQ ID NO: 546520 - DNA, 33 bp, Homo sapien
cccagtgttcatggcatgttaggatcaggcaac

SEQ ID NO: 546521 - DNA, 33 bp, Homo sapien
atacacacacatttggaaactctaaaatgtaat

SEQ ID NO: 546522 - DNA, 33 bp, Homo sapien
atacacacacatttgggaactctaaaatgtaat

SEQ ID NO: 546523 - DNA, 33 bp, Homo sapien
aaatgggtgagcaaacaaaaatagaagtgatgg

SEQ ID NO: 546524 - DNA, 33 bp, Homo sapien
aaatgggtgagcaaacgaaaatagaagtgatgg

SEQ ID NO: 546525 - DNA, 33 bp, Homo sapien
atttggtattggagacaagaattccgatgtcag

SEQ ID NO: 546526 - DNA, 33 bp, Homo sapien
atttggtattggagacgagaattccgatgtcag

SEQ ID NO: 546527 - DNA, 33 bp, Homo sapien
taaagaacttggagaacgatagagatcaagatg

SEQ ID NO: 546528 - DNA, 33 bp, Homo sapien
taaagaacttggagaaggatagagatcaagatg

SEQ ID NO: 546529 - DNA, 33 bp, Homo sapien
aaataataatctccacaagggacattacttttt

SEQ ID NO: 546530 - DNA, 33 bp, Homo sapien
aaataataatctccacgagggacattacttttt

SEQ ID NO: 546531 - DNA, 33 bp, Homo sapien
tcatttctagtcctcaaagcagaaataattaga

SEQ ID NO: 546532 - DNA, 33 bp, Homo sapien
tcatttctagtcctcagagcagaaataattaga

SEQ ID NO: 546533 - DNA, 33 bp, Homo sapien
tcctgcaccaagctcacatcgggtttcacatag

SEQ ID NO: 546534 - DNA, 33 bp, Homo sapien
tcctgcaccaagctcatatcgggtttcacatag

SEQ ID NO: 546535 - DNA, 33 bp, Homo sapien
acccaccctacacatgaacatttatccatactt

SEQ ID NO: 546536 - DNA, 33 bp, Homo sapien
acccaccctacacatgtacatttatccatactt

SEQ ID NO: 546537 - DNA, 33 bp, Homo sapien
gtttcaggagatacaaaggctaatccaaaaatg

SEQ ID NO: 546538 - DNA, 33 bp, Homo sapien
gtttcaggagatacaatggctaatccaaaaatg

SEQ ID NO: 546539 - DNA, 33 bp, Homo sapien
caaaatttaccatccaaactgaccatatgtatg

SEQ ID NO: 546540 - DNA, 33 bp, Homo sapien
caaaatttaccatccagactgaccatatgtatg

SEQ ID NO: 546541 - DNA, 33 bp, Homo sapien
tgagtaaaagtcttgacactaggatttattgct

SEQ ID NO: 546542 - DNA, 33 bp, Homo sapien
tgagtaaaagtcttgatactaggatttattgct

SEQ ID NO: 546543 - DNA, 33 bp, Homo sapien
ggctttggaaaaaatacggtgtggatagtgaca

SEQ ID NO: 546544 - DNA, 33 bp, Homo sapien
ggctttggaaaaaatatggtgtggatagtgaca

SEQ ID NO: 546545 - DNA, 33 bp, Homo sapien
aattcttagttacttcaccttacaaagatacat

SEQ ID NO: 546546 - DNA, 33 bp, Homo sapien
aattcttagttacttcgccttacaaagatacat

SEQ ID NO: 546547 - DNA, 33 bp, Homo sapien
aaatactcaagggttacgcatctgtacccttaa

SEQ ID NO: 546548 - DNA, 33 bp, Homo sapien
aaatactcaagggttatgcatctgtacccttaa

SEQ ID NO: 546549 - DNA, 33 bp, Homo sapien
actttgtaatagaaccagaggacttttgtattt

SEQ ID NO: 546550 - DNA, 33 bp, Homo sapien
actttgtaatagaaccggaggacttttgtattt

SEQ ID NO: 546551 - DNA, 33 bp, Homo sapien
gttagagagattaacccgccaaaatcatacatt

SEQ ID NO: 546552 - DNA, 33 bp, Homo sapien
gttagagagattaacctgccaaaatcatacatt

SEQ ID NO: 546553 - DNA, 33 bp, Homo sapien
tgcctcttgaaaatgtaaataaagtcacaggtt

SEQ ID NO: 546554 - DNA, 33 bp, Homo sapien
tgcctcttgaaaatgtgaataaagtcacaggtt

SEQ ID NO: 546555 - DNA, 33 bp, Homo sapien
atttcatctctggagaagtctttcccaaccaat

SEQ ID NO: 546556 - DNA, 33 bp, Homo sapien
atttcatctctggagaggtctttcccaaccaat

SEQ ID NO: 546557 - DNA, 33 bp, Homo sapien
ggtgttattctgaaaacggctctaaaaaccaaa

SEQ ID NO: 546558 - DNA, 33 bp, Homo sapien
ggtgttattctgaaaatggctctaaaaaccaaa

SEQ ID NO: 546559 - DNA, 33 bp, Homo sapien
tggatgttatatcagaatcacctgggtagatac

SEQ ID NO: 546560 - DNA, 33 bp, Homo sapien
tggatgttatatcagagtcacctgggtagatac

SEQ ID NO: 546561 - DNA, 33 bp, Homo sapien
gttaagtggcctagccagaactgaattcaggca

SEQ ID NO: 546562 - DNA, 33 bp, Homo sapien
gttaagtggcctagccggaactgaattcaggca

SEQ ID NO: 546563 - DNA, 33 bp, Homo sapien
atatgcctcagtcaaactctacttaccacctaa

SEQ ID NO: 546564 - DNA, 33 bp, Homo sapien
atatgcctcagtcaaattctacttaccacctaa

SEQ ID NO: 546565 - DNA, 33 bp, Homo sapien
cagagttctcagggtgaaaatgatttaaatggc

SEQ ID NO: 546566 - DNA, 33 bp, Homo sapien
cagagttctcagggtggaaatgatttaaatggc

SEQ ID NO: 546567 - DNA, 33 bp, Homo sapien
ggaagaatgctgaatgaacttcgaactttcacc

SEQ ID NO: 546568 - DNA, 33 bp, Homo sapien
ggaagaatgctgaatggacttcgaactttcacc

SEQ ID NO: 546569 - DNA, 33 bp, Homo sapien
tgaccagggacataaaagaaactgctcagaggc

SEQ ID NO: 546570 - DNA, 33 bp, Homo sapien
tgaccagggacataaaggaaactgctcagaggc

SEQ ID NO: 546571 - DNA, 33 bp, Homo sapien
cagatggtcatagggaaagagcaggagagtaat

SEQ ID NO: 546572 - DNA, 33 bp, Homo sapien
cagatggtcatagggagagagcaggagagtaat

SEQ ID NO: 546573 - DNA, 33 bp, Homo sapien
ttagtttaagatgtaacgtctcatatgcttatg

SEQ ID NO: 546574 - DNA, 33 bp, Homo sapien
ttagtttaagatgtaatgtctcatatgcttatg

SEQ ID NO: 546575 - DNA, 33 bp, Homo sapien
agccatgcaaaaattaaaggactcagagaccaa

SEQ ID NO: 546576 - DNA, 33 bp, Homo sapien
agccatgcaaaaattagaggactcagagaccaa

SEQ ID NO: 546577 - DNA, 33 bp, Homo sapien
ctttcagttaggttcacacaatgggaggcacca

SEQ ID NO: 546578 - DNA, 33 bp, Homo sapien
ctttcagttaggttcatacaatgggaggcacca

SEQ ID NO: 546579 - DNA, 33 bp, Homo sapien
gcctctccagatctaaagttcaccttcctccac

SEQ ID NO: 546580 - DNA, 33 bp, Homo sapien
gcctctccagatctaatgttcaccttcctccac

SEQ ID NO: 546581 - DNA, 33 bp, Homo sapien
atttcagagatctttccagttcctccttgtagt

SEQ ID NO: 546582 - DNA, 33 bp, Homo sapien
atttcagagatctttctagttcctccttgtagt

SEQ ID NO: 546583 - DNA, 33 bp, Homo sapien
ctgtctgcatatgctccctttagactttatcat

SEQ ID NO: 546584 - DNA, 33 bp, Homo sapien
ctgtctgcatatgctcgctttagactttatcat

SEQ ID NO: 546585 - DNA, 33 bp, Homo sapien
tgtctagagtaagttacagatccagaagaaaat

SEQ ID NO: 546586 - DNA, 33 bp, Homo sapien
tgtctagagtaagttatagatccagaagaaaat

SEQ ID NO: 546587 - DNA, 33 bp, Homo sapien
gtttaagtcactttggacagctaggaaacagct

SEQ ID NO: 546588 - DNA, 33 bp, Homo sapien
gtttaagtcactttgggcagctaggaaacagct

SEQ ID NO: 546589 - DNA, 33 bp, Homo sapien
acctctgtcaagatacagggctattctatcacc

SEQ ID NO: 546590 - DNA, 33 bp, Homo sapien
acctctgtcaagatacggggctattctatcacc

SEQ ID NO: 546591 - DNA, 33 bp, Homo sapien
ttagaaagtgtggaaaaaaaacttgtcatttta

SEQ ID NO: 546592 - DNA, 33 bp, Homo sapien
ttagaaagtgtggaaagaaaacttgtcatttta

SEQ ID NO: 546593 - DNA, 33 bp, Homo sapien
atgggaaatccagggcgctcttaatgttccatt

SEQ ID NO: 546594 - DNA, 33 bp, Homo sapien
atgggaaatccagggctctcttaatgttccatt

SEQ ID NO: 546595 - DNA, 33 bp, Homo sapien
ggcgtaaattaaaggcagccatgcatatgcacg

SEQ ID NO: 546596 - DNA, 33 bp, Homo sapien
ggcgtaaattaaaggctgccatgcatatgcacg

SEQ ID NO: 546597 - DNA, 33 bp, Homo sapien
cgtgcttaaagctgcacgcgaaaatgattttct

SEQ ID NO: 546598 - DNA, 33 bp, Homo sapien
cgtgcttaaagctgcatgcgaaaatgattttct

SEQ ID NO: 546599 - DNA, 33 bp, Homo sapien
tgagtggagaagacacaattggtgggtccactt

SEQ ID NO: 546600 - DNA, 33 bp, Homo sapien
tgagtggagaagacaccattggtgggtccactt

SEQ ID NO: 546601 - DNA, 33 bp, Homo sapien
tcaaagccccttccaactgtgtaaattgtatca

SEQ ID NO: 546602 - DNA, 33 bp, Homo sapien
tcaaagccccttccaagtgtgtaaattgtatca

SEQ ID NO: 546603 - DNA, 33 bp, Homo sapien
attccttcatccataaaacgaaagtgtcaagaa

SEQ ID NO: 546604 - DNA, 33 bp, Homo sapien
attccttcatccataagacgaaagtgtcaagaa

SEQ ID NO: 546605 - DNA, 33 bp, Homo sapien
aaaaaggcatagtatgaaaaacggagaccaggt

SEQ ID NO: 546606 - DNA, 33 bp, Homo sapien
aaaaaggcatagtatggaaaacggagaccaggt

SEQ ID NO: 546607 - DNA, 33 bp, Homo sapien
catctgtaatagtgcacaaatatttggtagata

SEQ ID NO: 546608 - DNA, 33 bp, Homo sapien
catctgtaatagtgcataaatatttggtagata

SEQ ID NO: 546609 - DNA, 33 bp, Homo sapien
attacagatgtttccacgagcatttacccagca

SEQ ID NO: 546610 - DNA, 33 bp, Homo sapien
attacagatgtttccatgagcatttacccagca

SEQ ID NO: 546611 - DNA, 33 bp, Homo sapien
agagagacacatctctaactgcgagaaccaacc

SEQ ID NO: 546612 - DNA, 33 bp, Homo sapien
agagagacacatctctgactgcgagaaccaacc

SEQ ID NO: 546613 - DNA, 33 bp, Homo sapien
aaggtccttattcacacatggctatgataagaa

SEQ ID NO: 546614 - DNA, 33 bp, Homo sapien
aaggtccttattcacatatggctatgataagaa

SEQ ID NO: 546615 - DNA, 33 bp, Homo sapien
ttcaataccaactgcaagcccttggttgtttta

SEQ ID NO: 546616 - DNA, 33 bp, Homo sapien
ttcaataccaactgcaggcccttggttgtttta

SEQ ID NO: 546617 - DNA, 33 bp, Homo sapien
ataaatataggtcaacaatgataaaatcttcag

SEQ ID NO: 546618 - DNA, 33 bp, Homo sapien
ataaatataggtcaaccatgataaaatcttcag

SEQ ID NO: 546619 - DNA, 33 bp, Homo sapien
ctctcaggggcagaccaagtttgcattgccagt

SEQ ID NO: 546620 - DNA, 33 bp, Homo sapien
ctctcaggggcagaccgagtttgcattgccagt

SEQ ID NO: 546621 - DNA, 33 bp, Homo sapien
catggctttgagttaccactgatttttccactc

SEQ ID NO: 546622 - DNA, 33 bp, Homo sapien
catggctttgagttactactgatttttccactc

SEQ ID NO: 546623 - DNA, 33 bp, Homo sapien
ggagtggcaaagacacagaaaatgggctgccat

SEQ ID NO: 546624 - DNA, 33 bp, Homo sapien
ggagtggcaaagacacggaaaatgggctgccat

SEQ ID NO: 546625 - DNA, 33 bp, Homo sapien
tactttccacagtccaaatgaaccctgggtttt

SEQ ID NO: 546626 - DNA, 33 bp, Homo sapien
tactttccacagtccacatgaaccctgggtttt

SEQ ID NO: 546627 - DNA, 33 bp, Homo sapien
ttgaagtggcaattgacgagatgtccaagaagg

SEQ ID NO: 546628 - DNA, 33 bp, Homo sapien
ttgaagtggcaattgatgagatgtccaagaagg

SEQ ID NO: 546629 - DNA, 33 bp, Homo sapien
agaacggcgtcacataagtcacctggatgtagg

SEQ ID NO: 546630 - DNA, 33 bp, Homo sapien
agaacggcgtcacataggtcacctggatgtagg

SEQ ID NO: 546631 - DNA, 33 bp, Homo sapien
tgagtttgacaaatagcaaggaagacaggctgg

SEQ ID NO: 546632 - DNA, 33 bp, Homo sapien
tgagtttgacaaataggaaggaagacaggctgg

SEQ ID NO: 546633 - DNA, 33 bp, Homo sapien
taagagatcttttacagtcttgaaaaggaagac

SEQ ID NO: 546634 - DNA, 33 bp, Homo sapien
taagagatcttttacattcttgaaaaggaagac

SEQ ID NO: 546635 - DNA, 33 bp, Homo sapien
agtggagacagagaaacgaatggtctgaaaaat

SEQ ID NO: 546636 - DNA, 33 bp, Homo sapien
agtggagacagagaaatgaatggtctgaaaaat

SEQ ID NO: 546637 - DNA, 33 bp, Homo sapien
ataagtttacgccatacattaaagtgaaattaa

SEQ ID NO: 546638 - DNA, 33 bp, Homo sapien
ataagtttacgccatatattaaagtgaaattaa

SEQ ID NO: 546639 - DNA, 33 bp, Homo sapien
aaattgaagaaaaccaataaaggcaggtgttag

SEQ ID NO: 546640 - DNA, 33 bp, Homo sapien
aaattgaagaaaaccagtaaaggcaggtgttag

SEQ ID NO: 546641 - DNA, 33 bp, Homo sapien
catggccagttcaaaccagctgtaaatgaggac

SEQ ID NO: 546642 - DNA, 33 bp, Homo sapien
catggccagttcaaactagctgtaaatgaggac

SEQ ID NO: 546643 - DNA, 33 bp, Homo sapien
ctgagttaactcactacggtggcaagcttcccc

SEQ ID NO: 546644 - DNA, 33 bp, Homo sapien
ctgagttaactcactatggtggcaagcttcccc

SEQ ID NO: 546645 - DNA, 33 bp, Homo sapien
ctattaattatggctacgcatcacagtttggag

SEQ ID NO: 546646 - DNA, 33 bp, Homo sapien
ctattaattatggctaggcatcacagtttggag

SEQ ID NO: 546647 - DNA, 33 bp, Homo sapien
gaataaaatacgaaagaattgaaattaggcaat

SEQ ID NO: 546648 - DNA, 33 bp, Homo sapien
gaataaaatacgaaaggattgaaattaggcaat

SEQ ID NO: 546649 - DNA, 33 bp, Homo sapien
taattacctagtggtccgacaagtgtatggtaa

SEQ ID NO: 546650 - DNA, 33 bp, Homo sapien
taattacctagtggtcggacaagtgtatggtaa

SEQ ID NO: 546651 - DNA, 33 bp, Homo sapien
gaggtagggccttgtacgcctgagctcttttgg

SEQ ID NO: 546652 - DNA, 33 bp, Homo sapien
gaggtagggccttgtatgcctgagctcttttgg

SEQ ID NO: 546653 - DNA, 33 bp, Homo sapien
taaatgtaatcaactcacattttactcgggaaa

SEQ ID NO: 546654 - DNA, 33 bp, Homo sapien
taaatgtaatcaactcgcattttactcgggaaa

SEQ ID NO: 546655 - DNA, 33 bp, Homo sapien
gaatactacaaaggaagaatgttaagggcataa

SEQ ID NO: 546656 - DNA, 33 bp, Homo sapien
gaatactacaaaggaataatgttaagggcataa

SEQ ID NO: 546657 - DNA, 33 bp, Homo sapien
atggatcagaacagcacattaacataaactaaa

SEQ ID NO: 546658 - DNA, 33 bp, Homo sapien
atggatcagaacagcatattaacataaactaaa

SEQ ID NO: 546659 - DNA, 33 bp, Homo sapien
atgttaaaaatgatcccgatgtcatattggtct

SEQ ID NO: 546660 - DNA, 33 bp, Homo sapien
atgttaaaaatgatcctgatgtcatattggtct

SEQ ID NO: 546661 - DNA, 33 bp, Homo sapien
tattcaatacctttccacttgcagaatcttgaa

SEQ ID NO: 546662 - DNA, 33 bp, Homo sapien
tattcaatacctttccgcttgcagaatcttgaa

SEQ ID NO: 546663 - DNA, 33 bp, Homo sapien
gaatgaattctcaagcaatctgatagttttata

SEQ ID NO: 546664 - DNA, 33 bp, Homo sapien
gaatgaattctcaagcgatctgatagttttata

SEQ ID NO: 546665 - DNA, 33 bp, Homo sapien
cacaattctaaagataccatgtcagaccacttg

SEQ ID NO: 546666 - DNA, 33 bp, Homo sapien
cacaattctaaagatatcatgtcagaccacttg

SEQ ID NO: 546667 - DNA, 33 bp, Homo sapien
ccaatttgctgcagaactgtctgttggatttta

SEQ ID NO: 546668 - DNA, 33 bp, Homo sapien
ccaatttgctgcagaattgtctgttggatttta

SEQ ID NO: 546669 - DNA, 33 bp, Homo sapien
tgataaaaaacagagacgtggttggcctagtga

SEQ ID NO: 546670 - DNA, 33 bp, Homo sapien
tgataaaaaacagagatgtggttggcctagtga

SEQ ID NO: 546671 - DNA, 33 bp, Homo sapien
tgtgactagtttatacgggggggacaagtccaa

SEQ ID NO: 546672 - DNA, 33 bp, Homo sapien
tgtgactagtttatactggggggacaagtccaa

SEQ ID NO: 546673 - DNA, 33 bp, Homo sapien
aaacaaaaatctagaaacttagtccttgaaacc

SEQ ID NO: 546674 - DNA, 33 bp, Homo sapien
aaacaaaaatctagaagcttagtccttgaaacc

SEQ ID NO: 546675 - DNA, 33 bp, Homo sapien
ttaagtatttaacgaacgcttactttgtaccaa

SEQ ID NO: 546676 - DNA, 33 bp, Homo sapien
ttaagtatttaacgaatgcttactttgtaccaa

SEQ ID NO: 546677 - DNA, 33 bp, Homo sapien
taatgcgttctgttcaaatttctaatccatcat

SEQ ID NO: 546678 - DNA, 33 bp, Homo sapien
taatgcgttctgttcagatttctaatccatcat

SEQ ID NO: 546679 - DNA, 33 bp, Homo sapien
ggaatgaatcacagaacataaggtgagaaagtc

SEQ ID NO: 546680 - DNA, 33 bp, Homo sapien
ggaatgaatcacagaatataaggtgagaaagtc

SEQ ID NO: 546681 - DNA, 33 bp, Homo sapien
tctttgccttataatgacagtcccaggcctggc

SEQ ID NO: 546682 - DNA, 33 bp, Homo sapien
tctttgccttataatggcagtcccaggcctggc

SEQ ID NO: 546683 - DNA, 33 bp, Homo sapien
acatttggctttcgaaacgctgcttcctactct

SEQ ID NO: 546684 - DNA, 33 bp, Homo sapien
acatttggctttcgaatcgctgcttcctactct

SEQ ID NO: 546685 - DNA, 33 bp, Homo sapien
ttgcactgaaagtttcaagttctgaccggtttg

SEQ ID NO: 546686 - DNA, 33 bp, Homo sapien
ttgcactgaaagtttcgagttctgaccggtttg

SEQ ID NO: 546687 - DNA, 33 bp, Homo sapien
atttgtcattggagacagctttcattttaagtt

SEQ ID NO: 546688 - DNA, 33 bp, Homo sapien
atttgtcattggagacggctttcattttaagtt

SEQ ID NO: 546689 - DNA, 33 bp, Homo sapien
atcccaagtgaatgaaaaaagagtgaatcggga

SEQ ID NO: 546690 - DNA, 33 bp, Homo sapien
atcccaagtgaatgaagaaagagtgaatcggga

SEQ ID NO: 546691 - DNA, 33 bp, Homo sapien
ataatttgctgtatgaaggtaagtacatagaac

SEQ ID NO: 546692 - DNA, 33 bp, Homo sapien
ataatttgctgtatgagggtaagtacatagaac

SEQ ID NO: 546693 - DNA, 33 bp, Homo sapien
aaaacaggacccaagactaaatggtaaatacaa

SEQ ID NO: 546694 - DNA, 33 bp, Homo sapien
aaaacaggacccaagattaaatggtaaatacaa

SEQ ID NO: 546695 - DNA, 33 bp, Homo sapien
aatagtactaggctaccggggcaaggaaaagtt

SEQ ID NO: 546696 - DNA, 33 bp, Homo sapien
aatagtactaggctactggggcaaggaaaagtt

SEQ ID NO: 546697 - DNA, 33 bp, Homo sapien
agcattggttttcagaaatcagagagggctttg

SEQ ID NO: 546698 - DNA, 33 bp, Homo sapien
agcattggttttcagatatcagagagggctttg

SEQ ID NO: 546699 - DNA, 33 bp, Homo sapien
gcgagttcattattcactcagagcctgttttct

SEQ ID NO: 546700 - DNA, 33 bp, Homo sapien
gcgagttcattattcattcagagcctgttttct

SEQ ID NO: 546701 - DNA, 33 bp, Homo sapien
gtgacatccatggtaccaacagctgagatctcg

SEQ ID NO: 546702 - DNA, 33 bp, Homo sapien
gtgacatccatggtactaacagctgagatctcg

SEQ ID NO: 546703 - DNA, 33 bp, Homo sapien
caatttttgtaactcgacctgaattaattcgca

SEQ ID NO: 546704 - DNA, 33 bp, Homo sapien
caatttttgtaactcggcctgaattaattcgca

SEQ ID NO: 546705 - DNA, 33 bp, Homo sapien
ttactaaataagacaacaggctgaattatgctc

SEQ ID NO: 546706 - DNA, 33 bp, Homo sapien
ttactaaataagacaataggctgaattatgctc

SEQ ID NO: 546707 - DNA, 33 bp, Homo sapien
gcctggctgtccttgcactttttcagacaaatg

SEQ ID NO: 546708 - DNA, 33 bp, Homo sapien
gcctggctgtccttgcgctttttcagacaaatg

SEQ ID NO: 546709 - DNA, 33 bp, Homo sapien
agatctaaaatgagaagaagtgccacagttttt

SEQ ID NO: 546710 - DNA, 33 bp, Homo sapien
agatctaaaatgagaataagtgccacagttttt

SEQ ID NO: 546711 - DNA, 33 bp, Homo sapien
cactgcaggctacaagaaaccagaaagtgacag

SEQ ID NO: 546712 - DNA, 33 bp, Homo sapien
cactgcaggctacaaggaaccagaaagtgacag

SEQ ID NO: 546713 - DNA, 33 bp, Homo sapien
tatttgccatacagttcaaccccagcaaaacaa

SEQ ID NO: 546714 - DNA, 33 bp, Homo sapien
tatttgccatacagtttaaccccagcaaaacaa

SEQ ID NO: 546715 - DNA, 33 bp, Homo sapien
gtctggtatctggtacacgagaaagattacttt

SEQ ID NO: 546716 - DNA, 33 bp, Homo sapien
gtctggtatctggtactcgagaaagattacttt

SEQ ID NO: 546717 - DNA, 33 bp, Homo sapien
taaggattaggtagcactgaaaatctcttgggc

SEQ ID NO: 546718 - DNA, 33 bp, Homo sapien
taaggattaggtagcattgaaaatctcttgggc

SEQ ID NO: 546719 - DNA, 33 bp, Homo sapien
gatatctccctcagaaattcaagctgttcttat

SEQ ID NO: 546720 - DNA, 33 bp, Homo sapien
gatatctccctcagaatttcaagctgttcttat

SEQ ID NO: 546721 - DNA, 33 bp, Homo sapien
gggtccacttttctcaacttatgagttctgtac

SEQ ID NO: 546722 - DNA, 33 bp, Homo sapien
gggtccacttttctcaccttatgagttctgtac

SEQ ID NO: 546723 - DNA, 33 bp, Homo sapien
aaatttggagaatgcaaaaaaatcaaaatggca

SEQ ID NO: 546724 - DNA, 33 bp, Homo sapien
aaatttggagaatgcagaaaaatcaaaatggca

SEQ ID NO: 546725 - DNA, 33 bp, Homo sapien
gtcggtaaagcataaaatgttttgcagatataa

SEQ ID NO: 546726 - DNA, 33 bp, Homo sapien
gtcggtaaagcataaactgttttgcagatataa

SEQ ID NO: 546727 - DNA, 33 bp, Homo sapien
caggaatattgccgcaaccatttaacatacaaa

SEQ ID NO: 546728 - DNA, 33 bp, Homo sapien
caggaatattgccgcagccatttaacatacaaa

SEQ ID NO: 546729 - DNA, 33 bp, Homo sapien
aatgagagcttgaaaacctgtacttattacaga

SEQ ID NO: 546730 - DNA, 33 bp, Homo sapien
aatgagagcttgaaaatctgtacttattacaga

SEQ ID NO: 546731 - DNA, 33 bp, Homo sapien
tgatgatgccatttccagattggatagcctatc

SEQ ID NO: 546732 - DNA, 33 bp, Homo sapien
tgatgatgccatttccggattggatagcctatc

SEQ ID NO: 546733 - DNA, 33 bp, Homo sapien
tctacattctcactcacgtgcacagcacccttt

SEQ ID NO: 546734 - DNA, 33 bp, Homo sapien
tctacattctcactcatgtgcacagcacccttt

SEQ ID NO: 546735 - DNA, 33 bp, Homo sapien
aacatagtactccaatgatagcctttcagacag

SEQ ID NO: 546736 - DNA, 33 bp, Homo sapien
aacatagtactccaattatagcctttcagacag

SEQ ID NO: 546737 - DNA, 33 bp, Homo sapien
agaggttagggaagtcacccagaggtacctggc

SEQ ID NO: 546738 - DNA, 33 bp, Homo sapien
agaggttagggaagtcgcccagaggtacctggc

SEQ ID NO: 546739 - DNA, 33 bp, Homo sapien
aggaggagctccgggcacaaaaagggcaccagc

SEQ ID NO: 546740 - DNA, 33 bp, Homo sapien
aggaggagctccgggcgcaaaaagggcaccagc

SEQ ID NO: 546741 - DNA, 33 bp, Homo sapien
gtaataaagttaaatacctcatctagaagcagg

SEQ ID NO: 546742 - DNA, 33 bp, Homo sapien
gtaataaagttaaatagctcatctagaagcagg

SEQ ID NO: 546743 - DNA, 33 bp, Homo sapien
taagaaagtcatctaacgtcttggtgttcttta

SEQ ID NO: 546744 - DNA, 33 bp, Homo sapien
taagaaagtcatctaatgtcttggtgttcttta

SEQ ID NO: 546745 - DNA, 33 bp, Homo sapien
accccaaacaagcataccagtttttttctatat

SEQ ID NO: 546746 - DNA, 33 bp, Homo sapien
accccaaacaagcatatcagtttttttctatat

SEQ ID NO: 546747 - DNA, 33 bp, Homo sapien
agccatgtgagcctgccgacctgcaagactcca

SEQ ID NO: 546748 - DNA, 33 bp, Homo sapien
agccatgtgagcctgctgacctgcaagactcca

SEQ ID NO: 546749 - DNA, 33 bp, Homo sapien
gagtggagctcaggaaactgctcttgtagcaag

SEQ ID NO: 546750 - DNA, 33 bp, Homo sapien
gagtggagctcaggaacctgctcttgtagcaag

SEQ ID NO: 546751 - DNA, 33 bp, Homo sapien
atttccataacaacaacactggcaaaatgttct

SEQ ID NO: 546752 - DNA, 33 bp, Homo sapien
atttccataacaacaagactggcaaaatgttct

SEQ ID NO: 546753 - DNA, 33 bp, Homo sapien
gggaactggtatttagaagctgtgtaatgttaa

SEQ ID NO: 546754 - DNA, 33 bp, Homo sapien
gggaactggtatttagcagctgtgtaatgttaa

SEQ ID NO: 546755 - DNA, 33 bp, Homo sapien
atcaagatgatttaacaaaagtatgcacgcatt

SEQ ID NO: 546756 - DNA, 33 bp, Homo sapien
atcaagatgatttaaccaaagtatgcacgcatt

SEQ ID NO: 546757 - DNA, 33 bp, Homo sapien
ggcattaattgctcagaaatctgtcacaacaca

SEQ ID NO: 546758 - DNA, 33 bp, Homo sapien
ggcattaattgctcagtaatctgtcacaacaca

SEQ ID NO: 546759 - DNA, 33 bp, Homo sapien
tctccattttaccgcaaatactattgaggctta

SEQ ID NO: 546760 - DNA, 33 bp, Homo sapien
tctccattttaccgcagatactattgaggctta

SEQ ID NO: 546761 - DNA, 33 bp, Homo sapien
atgcatcaagaaaaaccaaattatgtccaagtg

SEQ ID NO: 546762 - DNA, 33 bp, Homo sapien
atgcatcaagaaaaactaaattatgtccaagtg

SEQ ID NO: 546763 - DNA, 33 bp, Homo sapien
gactggtcataaacttaaaactccagtaactta

SEQ ID NO: 546764 - DNA, 33 bp, Homo sapien
gactggtcataaacttcaaactccagtaactta

SEQ ID NO: 546765 - DNA, 33 bp, Homo sapien
ccacattcagggtatacgcatttatcagtaagt

SEQ ID NO: 546766 - DNA, 33 bp, Homo sapien
ccacattcagggtatatgcatttatcagtaagt

SEQ ID NO: 546767 - DNA, 33 bp, Homo sapien
gaaggatgaataaatgacacttgggaggaaaag

SEQ ID NO: 546768 - DNA, 33 bp, Homo sapien
gaaggatgaataaatggcacttgggaggaaaag

SEQ ID NO: 546769 - DNA, 33 bp, Homo sapien
aaatgtatgaaaggaacgtgagatagattctgc

SEQ ID NO: 546770 - DNA, 33 bp, Homo sapien
aaatgtatgaaaggaatgtgagatagattctgc

SEQ ID NO: 546771 - DNA, 33 bp, Homo sapien
ccaaaagctgaacgtaccctgaattacctcttt

SEQ ID NO: 546772 - DNA, 33 bp, Homo sapien
ccaaaagctgaacgtatcctgaattacctcttt

SEQ ID NO: 546773 - DNA, 33 bp, Homo sapien
aaaaggcctgaaaaaaattctgccccattccca

SEQ ID NO: 546774 - DNA, 33 bp, Homo sapien
aaaaggcctgaaaaaagttctgccccattccca

SEQ ID NO: 546775 - DNA, 33 bp, Homo sapien
gtgcatatgtgacatacgatattgtttatatac

SEQ ID NO: 546776 - DNA, 33 bp, Homo sapien
gtgcatatgtgacataggatattgtttatatac

SEQ ID NO: 546777 - DNA, 33 bp, Homo sapien
aagtgaagctagatgccagaaaggtaggctgaa

SEQ ID NO: 546778 - DNA, 33 bp, Homo sapien
aagtgaagctagatgctagaaaggtaggctgaa

SEQ ID NO: 546779 - DNA, 33 bp, Homo sapien
gttcttcacatgttgcacccctcggacccacgc

SEQ ID NO: 546780 - DNA, 33 bp, Homo sapien
gttcttcacatgttgcgcccctcggacccacgc

SEQ ID NO: 546781 - DNA, 33 bp, Homo sapien
attgcagcaacagaaacctattaagatcctttg

SEQ ID NO: 546782 - DNA, 33 bp, Homo sapien
attgcagcaacagaaatctattaagatcctttg

SEQ ID NO: 546783 - DNA, 33 bp, Homo sapien
caaaaaagttgagttccaacatcactttcattt

SEQ ID NO: 546784 - DNA, 33 bp, Homo sapien
caaaaaagttgagttctaacatcactttcattt

SEQ ID NO: 546785 - DNA, 33 bp, Homo sapien
tctgtattgccactaactcagtcacattcatta

SEQ ID NO: 546786 - DNA, 33 bp, Homo sapien
tctgtattgccactaattcagtcacattcatta

SEQ ID NO: 546787 - DNA, 33 bp, Homo sapien
caactcagttaaatggaaatacatactcccaga

SEQ ID NO: 546788 - DNA, 33 bp, Homo sapien
caactcagttaaatggtaatacatactcccaga

SEQ ID NO: 546789 - DNA, 33 bp, Homo sapien
tcagtttcttacctacacaatcaagatagtagt

SEQ ID NO: 546790 - DNA, 33 bp, Homo sapien
tcagtttcttacctacgcaatcaagatagtagt

SEQ ID NO: 546791 - DNA, 33 bp, Homo sapien
aatctacaaacacatacagtgactcactagctc

SEQ ID NO: 546792 - DNA, 33 bp, Homo sapien
aatctacaaacacatagagtgactcactagctc

SEQ ID NO: 546793 - DNA, 33 bp, Homo sapien
tttacattcccaacagaaataaatgagaattcc

SEQ ID NO: 546794 - DNA, 33 bp, Homo sapien
tttacattcccaacagcaataaatgagaattcc

SEQ ID NO: 546795 - DNA, 33 bp, Homo sapien
ttgaatggctttgatccgaatgttgatagtgat

SEQ ID NO: 546796 - DNA, 33 bp, Homo sapien
ttgaatggctttgatctgaatgttgatagtgat

SEQ ID NO: 546797 - DNA, 33 bp, Homo sapien
taagaaggaagtcaataatggagtcagttttaa

SEQ ID NO: 546798 - DNA, 33 bp, Homo sapien
taagaaggaagtcaatcatggagtcagttttaa

SEQ ID NO: 546799 - DNA, 33 bp, Homo sapien
ccttcaggtgtcagaaaaacaacactgaatttt

SEQ ID NO: 546800 - DNA, 33 bp, Homo sapien
ccttcaggtgtcagaagaacaacactgaatttt

SEQ ID NO: 546801 - DNA, 33 bp, Homo sapien
cttcataggaagctcaagttttcaaagggacta

SEQ ID NO: 546802 - DNA, 33 bp, Homo sapien
cttcataggaagctcaggttttcaaagggacta

SEQ ID NO: 546803 - DNA, 33 bp, Homo sapien
catgtttacattgttaacctgtcaaattatgaa

SEQ ID NO: 546804 - DNA, 33 bp, Homo sapien
catgtttacattgttaccctgtcaaattatgaa

SEQ ID NO: 546805 - DNA, 33 bp, Homo sapien
gtaatgtgataccatcaaggagggtacttcagt

SEQ ID NO: 546806 - DNA, 33 bp, Homo sapien
gtaatgtgataccatcgaggagggtacttcagt

SEQ ID NO: 546807 - DNA, 33 bp, Homo sapien
ctaataaggccagcaccggaaagttatagcaca

SEQ ID NO: 546808 - DNA, 33 bp, Homo sapien
ctaataaggccagcactggaaagttatagcaca

SEQ ID NO: 546809 - DNA, 33 bp, Homo sapien
tgtgtgcctgctgtgacgagtgaacatgcaagt

SEQ ID NO: 546810 - DNA, 33 bp, Homo sapien
tgtgtgcctgctgtgatgagtgaacatgcaagt

SEQ ID NO: 546811 - DNA, 33 bp, Homo sapien
cataggtactatgatacactaagactttactct

SEQ ID NO: 546812 - DNA, 33 bp, Homo sapien
cataggtactatgatagactaagactttactct

SEQ ID NO: 546813 - DNA, 33 bp, Homo sapien
caaacattatttcacactgaaaactctcaacaa

SEQ ID NO: 546814 - DNA, 33 bp, Homo sapien
caaacattatttcacattgaaaactctcaacaa

SEQ ID NO: 546815 - DNA, 33 bp, Homo sapien
ctccttgaaaggtagactacactcgttttctca

SEQ ID NO: 546816 - DNA, 33 bp, Homo sapien
ctccttgaaaggtagattacactcgttttctca

SEQ ID NO: 546817 - DNA, 33 bp, Homo sapien
gaaagttcattgtttgcataatgatatggtttg

SEQ ID NO: 546818 - DNA, 33 bp, Homo sapien
gaaagttcattgtttgtataatgatatggtttg

SEQ ID NO: 546819 - DNA, 33 bp, Homo sapien
aatgatatattcaaggcatcatgcagaagagat

SEQ ID NO: 546820 - DNA, 33 bp, Homo sapien
aatgatatattcaaggtatcatgcagaagagat

SEQ ID NO: 546821 - DNA, 33 bp, Homo sapien
tgtgtctacagcctaacatttttgttaaatcaa

SEQ ID NO: 546822 - DNA, 33 bp, Homo sapien
tgtgtctacagcctaatatttttgttaaatcaa

SEQ ID NO: 546823 - DNA, 33 bp, Homo sapien
ggtttggtagggcagacatatggaggaactgtt

SEQ ID NO: 546824 - DNA, 33 bp, Homo sapien
ggtttggtagggcagatatatggaggaactgtt

SEQ ID NO: 546825 - DNA, 33 bp, Homo sapien
tgttgcaactccttcacgtttaatttagccaat

SEQ ID NO: 546826 - DNA, 33 bp, Homo sapien
tgttgcaactccttcatgtttaatttagccaat

SEQ ID NO: 546827 - DNA, 33 bp, Homo sapien
tagctacttagtcaaaatggccttcccaaccgg

SEQ ID NO: 546828 - DNA, 33 bp, Homo sapien
tagctacttagtcaaactggccttcccaaccgg

SEQ ID NO: 546829 - DNA, 33 bp, Homo sapien
aaaccttccttccactcactgggttccctgctg

SEQ ID NO: 546830 - DNA, 33 bp, Homo sapien
aaaccttccttccactgactgggttccctgctg

SEQ ID NO: 546831 - DNA, 33 bp, Homo sapien
tgtaccttgcaaaatccaccactaagaaagagg

SEQ ID NO: 546832 - DNA, 33 bp, Homo sapien
tgtaccttgcaaaatctaccactaagaaagagg

SEQ ID NO: 546833 - DNA, 33 bp, Homo sapien
atgcataacctataacactctagtagacttcac

SEQ ID NO: 546834 - DNA, 33 bp, Homo sapien
atgcataacctataactctctagtagacttcac

SEQ ID NO: 546835 - DNA, 33 bp, Homo sapien
gttaagggattggcggaaaaagagtgggatgta

SEQ ID NO: 546836 - DNA, 33 bp, Homo sapien
gttaagggattggcgggaaaagagtgggatgta

SEQ ID NO: 546837 - DNA, 33 bp, Homo sapien
tagattcaaaaaagcacgtgttagagaagtcaa

SEQ ID NO: 546838 - DNA, 33 bp, Homo sapien
tagattcaaaaaagcatgtgttagagaagtcaa

SEQ ID NO: 546839 - DNA, 33 bp, Homo sapien
gcagtgcaatataatactaaatggcttcctata

SEQ ID NO: 546840 - DNA, 33 bp, Homo sapien
gcagtgcaatataatattaaatggcttcctata

SEQ ID NO: 546841 - DNA, 33 bp, Homo sapien
tgcaagacatgctaaaagaagtgcttcaggagg

SEQ ID NO: 546842 - DNA, 33 bp, Homo sapien
tgcaagacatgctaaaggaagtgcttcaggagg

SEQ ID NO: 546843 - DNA, 33 bp, Homo sapien
gtgaggcagattactcaagtggagacacctccg

SEQ ID NO: 546844 - DNA, 33 bp, Homo sapien
gtgaggcagattactcgagtggagacacctccg

SEQ ID NO: 546845 - DNA, 33 bp, Homo sapien
acagcttgtcagaggcaatcagtactccaccga

SEQ ID NO: 546846 - DNA, 33 bp, Homo sapien
acagcttgtcagaggcgatcagtactccaccga

SEQ ID NO: 546847 - DNA, 33 bp, Homo sapien
cattctttttgatacaaaattttacaccctggc

SEQ ID NO: 546848 - DNA, 33 bp, Homo sapien
cattctttttgatacagaattttacaccctggc

SEQ ID NO: 546849 - DNA, 33 bp, Homo sapien
agtggtgttactctgaacagtgcatttttattt

SEQ ID NO: 546850 - DNA, 33 bp, Homo sapien
agtggtgttactctgaccagtgcatttttattt

SEQ ID NO: 546851 - DNA, 33 bp, Homo sapien
ccaagtctacagcaaacgaggtgcaactgtaat

SEQ ID NO: 546852 - DNA, 33 bp, Homo sapien
ccaagtctacagcaaatgaggtgcaactgtaat

SEQ ID NO: 546853 - DNA, 33 bp, Homo sapien
cttctcttctgccgtacgaggaatagcacttct

SEQ ID NO: 546854 - DNA, 33 bp, Homo sapien
cttctcttctgccgtatgaggaatagcacttct

SEQ ID NO: 546855 - DNA, 33 bp, Homo sapien
tttctttcctgtcataatatcaggggaatagaa

SEQ ID NO: 546856 - DNA, 33 bp, Homo sapien
tttctttcctgtcatagtatcaggggaatagaa

SEQ ID NO: 546857 - DNA, 33 bp, Homo sapien
tactgaaactttggcagagtttagtggggatgg

SEQ ID NO: 546858 - DNA, 33 bp, Homo sapien
tactgaaactttggcatagtttagtggggatgg

SEQ ID NO: 546859 - DNA, 33 bp, Homo sapien
cattggaaaaggcacactaagaacattagtagt

SEQ ID NO: 546860 - DNA, 33 bp, Homo sapien
cattggaaaaggcacattaagaacattagtagt

SEQ ID NO: 546861 - DNA, 33 bp, Homo sapien
tgtggcatcttaacacaggtatcttgagttcat

SEQ ID NO: 546862 - DNA, 33 bp, Homo sapien
tgtggcatcttaacacgggtatcttgagttcat

SEQ ID NO: 546863 - DNA, 33 bp, Homo sapien
tttcttacattcgggaagaaaaatctatttgcc

SEQ ID NO: 546864 - DNA, 33 bp, Homo sapien
tttcttacattcgggaggaaaaatctatttgcc

SEQ ID NO: 546865 - DNA, 33 bp, Homo sapien
atgaaatcggcaaggcaaaagataagtttcagt

SEQ ID NO: 546866 - DNA, 33 bp, Homo sapien
atgaaatcggcaaggcgaaagataagtttcagt

SEQ ID NO: 546867 - DNA, 33 bp, Homo sapien
gataagtttcagttaagccagtcttatagagtc

SEQ ID NO: 546868 - DNA, 33 bp, Homo sapien
gataagtttcagttaatccagtcttatagagtc

SEQ ID NO: 546869 - DNA, 33 bp, Homo sapien
ttcagtttcacacaatcacatcaataagtagtc

SEQ ID NO: 546870 - DNA, 33 bp, Homo sapien
ttcagtttcacacaatgacatcaataagtagtc

SEQ ID NO: 546871 - DNA, 33 bp, Homo sapien
actgatttttaagtcacgaatatagtgcagcat

SEQ ID NO: 546872 - DNA, 33 bp, Homo sapien
actgatttttaagtcatgaatatagtgcagcat

SEQ ID NO: 546873 - DNA, 33 bp, Homo sapien
gtgcattggatgaaatcacttgaatactgtcaa

SEQ ID NO: 546874 - DNA, 33 bp, Homo sapien
gtgcattggatgaaattacttgaatactgtcaa

SEQ ID NO: 546875 - DNA, 33 bp, Homo sapien
aaagaagctagacacaaaggattacatattgaa

SEQ ID NO: 546876 - DNA, 33 bp, Homo sapien
aaagaagctagacacagaggattacatattgaa

SEQ ID NO: 546877 - DNA, 33 bp, Homo sapien
aatgaagaagctcatacaagctcatagataatc

SEQ ID NO: 546878 - DNA, 33 bp, Homo sapien
aatgaagaagctcatagaagctcatagataatc

SEQ ID NO: 546879 - DNA, 33 bp, Homo sapien
catgaaagaattctaaccctcttacctctcatg

SEQ ID NO: 546880 - DNA, 33 bp, Homo sapien
catgaaagaattctaatcctcttacctctcatg

SEQ ID NO: 546881 - DNA, 33 bp, Homo sapien
cgccctcaatatccaacctttattatcaatttc

SEQ ID NO: 546882 - DNA, 33 bp, Homo sapien
cgccctcaatatccaatctttattatcaatttc

SEQ ID NO: 546883 - DNA, 33 bp, Homo sapien
gactgaattattaaaaaatttctgagaggtaaa

SEQ ID NO: 546884 - DNA, 33 bp, Homo sapien
gactgaattattaaaacatttctgagaggtaaa

SEQ ID NO: 546885 - DNA, 33 bp, Homo sapien
aaatcaagacatgatgccaactgttaggattct

SEQ ID NO: 546886 - DNA, 33 bp, Homo sapien
aaatcaagacatgatgtcaactgttaggattct

SEQ ID NO: 546887 - DNA, 33 bp, Homo sapien
tgtaacttcttgtcacaacattattcttcatag

SEQ ID NO: 546888 - DNA, 33 bp, Homo sapien
tgtaacttcttgtcacgacattattcttcatag

SEQ ID NO: 546889 - DNA, 33 bp, Homo sapien
aaggagatactaagataaactgcattttgctaa

SEQ ID NO: 546890 - DNA, 33 bp, Homo sapien
aaggagatactaagattaactgcattttgctaa

SEQ ID NO: 546891 - DNA, 33 bp, Homo sapien
ggctgcattttcatccagaggctacaggtaaaa

SEQ ID NO: 546892 - DNA, 33 bp, Homo sapien
ggctgcattttcatccggaggctacaggtaaaa

SEQ ID NO: 546893 - DNA, 33 bp, Homo sapien
gtgatgttaggttccaggtagatgttaccctgg

SEQ ID NO: 546894 - DNA, 33 bp, Homo sapien
gtgatgttaggttccatgtagatgttaccctgg

SEQ ID NO: 546895 - DNA, 33 bp, Homo sapien
atttgtattacctccaagacctctacaggaaat

SEQ ID NO: 546896 - DNA, 33 bp, Homo sapien
atttgtattacctccatgacctctacaggaaat

SEQ ID NO: 546897 - DNA, 33 bp, Homo sapien
ttagtcatcggggacacgaaaatatgactaagg

SEQ ID NO: 546898 - DNA, 33 bp, Homo sapien
ttagtcatcggggacatgaaaatatgactaagg

SEQ ID NO: 546899 - DNA, 33 bp, Homo sapien
aactatgaaacgctgacgagagaagttgaagag

SEQ ID NO: 546900 - DNA, 33 bp, Homo sapien
aactatgaaacgctgatgagagaagttgaagag

SEQ ID NO: 546901 - DNA, 33 bp, Homo sapien
gtttgattttctggtgaaacaatgccctctcca

SEQ ID NO: 546902 - DNA, 33 bp, Homo sapien
gtttgattttctggtgcaacaatgccctctcca

SEQ ID NO: 546903 - DNA, 33 bp, Homo sapien
atattcaaatgtattcaatgtttacagtgagaa

SEQ ID NO: 546904 - DNA, 33 bp, Homo sapien
atattcaaatgtattcgatgtttacagtgagaa

SEQ ID NO: 546905 - DNA, 33 bp, Homo sapien
tgtaacatcagagtcaagatgaatacatgaagg

SEQ ID NO: 546906 - DNA, 33 bp, Homo sapien
tgtaacatcagagtcaggatgaatacatgaagg

SEQ ID NO: 546907 - DNA, 33 bp, Homo sapien
aacaagtgaagatctgcaaacaggccaagagaa

SEQ ID NO: 546908 - DNA, 33 bp, Homo sapien
aacaagtgaagatctggaaacaggccaagagaa

SEQ ID NO: 546909 - DNA, 33 bp, Homo sapien
gctgacctctctgcaacgcgggctcctgggagt

SEQ ID NO: 546910 - DNA, 33 bp, Homo sapien
gctgacctctctgcaatgcgggctcctgggagt

SEQ ID NO: 546911 - DNA, 33 bp, Homo sapien
tggagagaggagtagaaaggcaggccatagcct

SEQ ID NO: 546912 - DNA, 33 bp, Homo sapien
tggagagaggagtagagaggcaggccatagcct

SEQ ID NO: 546913 - DNA, 33 bp, Homo sapien
actagcttcttaaatcactgcatgcttttagtg

SEQ ID NO: 546914 - DNA, 33 bp, Homo sapien
actagcttcttaaatcgctgcatgcttttagtg

SEQ ID NO: 546915 - DNA, 33 bp, Homo sapien
ataagatgatgttacacatagtttaagttgata

SEQ ID NO: 546916 - DNA, 33 bp, Homo sapien
ataagatgatgttacatatagtttaagttgata

SEQ ID NO: 546917 - DNA, 33 bp, Homo sapien
acagttggataaacaggagctcaatctagttta

SEQ ID NO: 546918 - DNA, 33 bp, Homo sapien
acagttggataaacagtagctcaatctagttta

SEQ ID NO: 546919 - DNA, 33 bp, Homo sapien
attaaatatccataaaggaggtagatatcgtgt

SEQ ID NO: 546920 - DNA, 33 bp, Homo sapien
attaaatatccataaatgaggtagatatcgtgt

SEQ ID NO: 546921 - DNA, 33 bp, Homo sapien
taaggacccagtaatacgcaaagtaaaaataat

SEQ ID NO: 546922 - DNA, 33 bp, Homo sapien
taaggacccagtaatatgcaaagtaaaaataat

SEQ ID NO: 546923 - DNA, 33 bp, Homo sapien
gcagtacacgtatagacggtggagataaaatta

SEQ ID NO: 546924 - DNA, 33 bp, Homo sapien
gcagtacacgtatagatggtggagataaaatta

SEQ ID NO: 546925 - DNA, 33 bp, Homo sapien
atatataaaatagatacgctgtggatgtttcac

SEQ ID NO: 546926 - DNA, 33 bp, Homo sapien
atatataaaatagatatgctgtggatgtttcac

SEQ ID NO: 546927 - DNA, 33 bp, Homo sapien
ccagccaggtggacaacgtggaatacagaattg

SEQ ID NO: 546928 - DNA, 33 bp, Homo sapien
ccagccaggtggacaatgtggaatacagaattg

SEQ ID NO: 546929 - DNA, 33 bp, Homo sapien
ttttctctacaaataaagacactgaggttcaaa

SEQ ID NO: 546930 - DNA, 33 bp, Homo sapien
ttttctctacaaataaggacactgaggttcaaa

SEQ ID NO: 546931 - DNA, 33 bp, Homo sapien
tctatctcattcacacaaagaaagagtggaaat

SEQ ID NO: 546932 - DNA, 33 bp, Homo sapien
tctatctcattcacacgaagaaagagtggaaat

SEQ ID NO: 546933 - DNA, 33 bp, Homo sapien
agatatagcatttcccacaatattcaaaaaatg

SEQ ID NO: 546934 - DNA, 33 bp, Homo sapien
agatatagcatttcccgcaatattcaaaaaatg

SEQ ID NO: 546935 - DNA, 33 bp, Homo sapien
caataagcaattgattcgaaaacctgtgtaatc

SEQ ID NO: 546936 - DNA, 33 bp, Homo sapien
caataagcaattgatttgaaaacctgtgtaatc

SEQ ID NO: 546937 - DNA, 33 bp, Homo sapien
ccagctttttattaaccgtaggcagaaaggatc

SEQ ID NO: 546938 - DNA, 33 bp, Homo sapien
ccagctttttattaactgtaggcagaaaggatc

SEQ ID NO: 546939 - DNA, 33 bp, Homo sapien
ttgacagataacatcacagacaatcaatgctct

SEQ ID NO: 546940 - DNA, 33 bp, Homo sapien
ttgacagataacatcatagacaatcaatgctct

SEQ ID NO: 546941 - DNA, 33 bp, Homo sapien
agggtttgaagttgaccctgtagacaattgagt

SEQ ID NO: 546942 - DNA, 33 bp, Homo sapien
agggtttgaagttgactctgtagacaattgagt

SEQ ID NO: 546943 - DNA, 33 bp, Homo sapien
actggccaaaaagcacaccaagcaattcatgga

SEQ ID NO: 546944 - DNA, 33 bp, Homo sapien
actggccaaaaagcacgccaagcaattcatgga

SEQ ID NO: 546945 - DNA, 33 bp, Homo sapien
acctaagtcgggataaccacagtatcacctcct

SEQ ID NO: 546946 - DNA, 33 bp, Homo sapien
acctaagtcgggataatcacagtatcacctcct

SEQ ID NO: 546947 - DNA, 33 bp, Homo sapien
taccacattaaacagcacagattacagaatgtt

SEQ ID NO: 546948 - DNA, 33 bp, Homo sapien
taccacattaaacagcgcagattacagaatgtt

SEQ ID NO: 546949 - DNA, 33 bp, Homo sapien
ttatatctgctcttcaaagttgtttgatatttg

SEQ ID NO: 546950 - DNA, 33 bp, Homo sapien
ttatatctgctcttcagagttgtttgatatttg

SEQ ID NO: 546951 - DNA, 33 bp, Homo sapien
tggccctgcattcctcagagctgtcttcacttt

SEQ ID NO: 546952 - DNA, 33 bp, Homo sapien
tggccctgcattcctcggagctgtcttcacttt

SEQ ID NO: 546953 - DNA, 33 bp, Homo sapien
gaaataggggaatgggccacgtctggatcacct

SEQ ID NO: 546954 - DNA, 33 bp, Homo sapien
gaaataggggaatgggtcacgtctggatcacct

SEQ ID NO: 546955 - DNA, 33 bp, Homo sapien
tggtagcatttaaggactagtgatttgtggagt

SEQ ID NO: 546956 - DNA, 33 bp, Homo sapien
tggtagcatttaaggattagtgatttgtggagt

SEQ ID NO: 546957 - DNA, 33 bp, Homo sapien
aagatctatgaatgaaaataaagtgttacacac

SEQ ID NO: 546958 - DNA, 33 bp, Homo sapien
aagatctatgaatgaagataaagtgttacacac

SEQ ID NO: 546959 - DNA, 33 bp, Homo sapien
aatagtctcaaatatacagtctggcacacttat

SEQ ID NO: 546960 - DNA, 33 bp, Homo sapien
aatagtctcaaatatatagtctggcacacttat

SEQ ID NO: 546961 - DNA, 33 bp, Homo sapien
ctcaatactcacaacaagggtctattccaacca

SEQ ID NO: 546962 - DNA, 33 bp, Homo sapien
ctcaatactcacaacatgggtctattccaacca

SEQ ID NO: 546963 - DNA, 33 bp, Homo sapien
ttaagtcctacttgagaatagagcaaaagacag

SEQ ID NO: 546964 - DNA, 33 bp, Homo sapien
ttaagtcctacttgagtatagagcaaaagacag

SEQ ID NO: 546965 - DNA, 33 bp, Homo sapien
ggcatatgtcctcttaccagggctgagcagtcc

SEQ ID NO: 546966 - DNA, 33 bp, Homo sapien
ggcatatgtcctcttagcagggctgagcagtcc

SEQ ID NO: 546967 - DNA, 33 bp, Homo sapien
ggtaagaaacaggaagcatagtcgtgtattgaa

SEQ ID NO: 546968 - DNA, 33 bp, Homo sapien
ggtaagaaacaggaaggatagtcgtgtattgaa

SEQ ID NO: 546969 - DNA, 33 bp, Homo sapien
tcctaatcagcctaaggagtcctttgtgtcaga

SEQ ID NO: 546970 - DNA, 33 bp, Homo sapien
tcctaatcagcctaagtagtcctttgtgtcaga

SEQ ID NO: 546971 - DNA, 33 bp, Homo sapien
tagttaagggtaagctcaagtttaaattcatta

SEQ ID NO: 546972 - DNA, 33 bp, Homo sapien
tagttaagggtaagctgaagtttaaattcatta

SEQ ID NO: 546973 - DNA, 33 bp, Homo sapien
gtgtatcattcctaataattaaaatgcttatga

SEQ ID NO: 546974 - DNA, 33 bp, Homo sapien
gtgtatcattcctaattattaaaatgcttatga

SEQ ID NO: 546975 - DNA, 33 bp, Homo sapien
tctttttccttctccaatgcttaaacaggacct

SEQ ID NO: 546976 - DNA, 33 bp, Homo sapien
tctttttccttctccagtgcttaaacaggacct

SEQ ID NO: 546977 - DNA, 33 bp, Homo sapien
aagcactgacaggccactgcgcaggcagacagc

SEQ ID NO: 546978 - DNA, 33 bp, Homo sapien
aagcactgacaggccattgcgcaggcagacagc

SEQ ID NO: 546979 - DNA, 33 bp, Homo sapien
tctgacccatatccacggatcattatacaggct

SEQ ID NO: 546980 - DNA, 33 bp, Homo sapien
tctgacccatatccactgatcattatacaggct

SEQ ID NO: 546981 - DNA, 33 bp, Homo sapien
cagtatttctctatcaatgaaagaacagagtaa

SEQ ID NO: 546982 - DNA, 33 bp, Homo sapien
cagtatttctctatcagtgaaagaacagagtaa

SEQ ID NO: 546983 - DNA, 33 bp, Homo sapien
tgctctgctgacataacatcttttatagcaact

SEQ ID NO: 546984 - DNA, 33 bp, Homo sapien
tgctctgctgacataatatcttttatagcaact

SEQ ID NO: 546985 - DNA, 33 bp, Homo sapien
ttaagttaggaaaaacacttcatgaataaaacc

SEQ ID NO: 546986 - DNA, 33 bp, Homo sapien
ttaagttaggaaaaactcttcatgaataaaacc

SEQ ID NO: 546987 - DNA, 33 bp, Homo sapien
cttaccttcttatcaccgtccttaagtcacatt

SEQ ID NO: 546988 - DNA, 33 bp, Homo sapien
cttaccttcttatcactgtccttaagtcacatt

SEQ ID NO: 546989 - DNA, 33 bp, Homo sapien
gttcagatttgtcaaaaccgaggtttcctaaag

SEQ ID NO: 546990 - DNA, 33 bp, Homo sapien
gttcagatttgtcaaacccgaggtttcctaaag

SEQ ID NO: 546991 - DNA, 33 bp, Homo sapien
ctgatggatttcaagcagacagcaagacaagga

SEQ ID NO: 546992 - DNA, 33 bp, Homo sapien
ctgatggatttcaagcggacagcaagacaagga

SEQ ID NO: 546993 - DNA, 33 bp, Homo sapien
gtaaaaggcatatatgaaccaaagcagatagag

SEQ ID NO: 546994 - DNA, 33 bp, Homo sapien
gtaaaaggcatatatggaccaaagcagatagag

SEQ ID NO: 546995 - DNA, 33 bp, Homo sapien
aaacacataaaaacaccgcactgacttaggata

SEQ ID NO: 546996 - DNA, 33 bp, Homo sapien
aaacacataaaaacactgcactgacttaggata

SEQ ID NO: 546997 - DNA, 33 bp, Homo sapien
ggcctggaagacattacgtaaaatgaaattagc

SEQ ID NO: 546998 - DNA, 33 bp, Homo sapien
ggcctggaagacattatgtaaaatgaaattagc

SEQ ID NO: 546999 - DNA, 33 bp, Homo sapien
aggtgccttctgaggacggtggcatcgatttcc

SEQ ID NO: 547000 - DNA, 33 bp, Homo sapien
aggtgccttctgaggatggtggcatcgatttcc

SEQ ID NO: 547001 - DNA, 33 bp, Homo sapien
tcatagtctaaaatgccgaagagacataccaaa

SEQ ID NO: 547002 - DNA, 33 bp, Homo sapien
tcatagtctaaaatgctgaagagacataccaaa

SEQ ID NO: 547003 - DNA, 33 bp, Homo sapien
ccctcaaggagacaaagagagtagtaagaagat

SEQ ID NO: 547004 - DNA, 33 bp, Homo sapien
ccctcaaggagacaaatagagtagtaagaagat

SEQ ID NO: 547005 - DNA, 33 bp, Homo sapien
ggcctccttgattctaactgacccctgtacgtc

SEQ ID NO: 547006 - DNA, 33 bp, Homo sapien
ggcctccttgattctatctgacccctgtacgtc

SEQ ID NO: 547007 - DNA, 33 bp, Homo sapien
ggtccttaagtgaataccggcagtagcctgaca

SEQ ID NO: 547008 - DNA, 33 bp, Homo sapien
ggtccttaagtgaatatcggcagtagcctgaca

SEQ ID NO: 547009 - DNA, 33 bp, Homo sapien
atgtaccccactatccaattacataatgctatg

SEQ ID NO: 547010 - DNA, 33 bp, Homo sapien
atgtaccccactatcctattacataatgctatg

SEQ ID NO: 547011 - DNA, 33 bp, Homo sapien
agctggtcaatggggaagtatgctacaggaaag

SEQ ID NO: 547012 - DNA, 33 bp, Homo sapien
agctggtcaatggggatgtatgctacaggaaag

SEQ ID NO: 547013 - DNA, 33 bp, Homo sapien
ctcaccaactatttaacgttgctccttcctcta

SEQ ID NO: 547014 - DNA, 33 bp, Homo sapien
ctcaccaactatttaatgttgctccttcctcta

SEQ ID NO: 547015 - DNA, 33 bp, Homo sapien
gggaagccaggtcatagaaggctatgtgtactg

SEQ ID NO: 547016 - DNA, 33 bp, Homo sapien
gggaagccaggtcatataaggctatgtgtactg

SEQ ID NO: 547017 - DNA, 33 bp, Homo sapien
tttggagtcggatgagaaagtctgtgacatata

SEQ ID NO: 547018 - DNA, 33 bp, Homo sapien
tttggagtcggatgaggaagtctgtgacatata

SEQ ID NO: 547019 - DNA, 33 bp, Homo sapien
catttttatgtatcctaaacactgagttaatac

SEQ ID NO: 547020 - DNA, 33 bp, Homo sapien
catttttatgtatcctcaacactgagttaatac

SEQ ID NO: 547021 - DNA, 33 bp, Homo sapien
ttatttaatgaattctcaatataaccttgtctg

SEQ ID NO: 547022 - DNA, 33 bp, Homo sapien
ttatttaatgaattctgaatataaccttgtctg

SEQ ID NO: 547023 - DNA, 33 bp, Homo sapien
atataataaatgaagaaagtgagctattaaaaa

SEQ ID NO: 547024 - DNA, 33 bp, Homo sapien
atataataaatgaagacagtgagctattaaaaa

SEQ ID NO: 547025 - DNA, 33 bp, Homo sapien
ggcatgcagttattcaacccatcccttcaattc

SEQ ID NO: 547026 - DNA, 33 bp, Homo sapien
ggcatgcagttattcatcccatcccttcaattc

SEQ ID NO: 547027 - DNA, 33 bp, Homo sapien
aagactacatctttcacattggtactcagtatc

SEQ ID NO: 547028 - DNA, 33 bp, Homo sapien
aagactacatctttcatattggtactcagtatc

SEQ ID NO: 547029 - DNA, 33 bp, Homo sapien
ggttttataatatagcggatccttccctttata

SEQ ID NO: 547030 - DNA, 33 bp, Homo sapien
ggttttataatatagctgatccttccctttata

SEQ ID NO: 547031 - DNA, 33 bp, Homo sapien
ccacctaatggtcatcacttgattttacaaacc

SEQ ID NO: 547032 - DNA, 33 bp, Homo sapien
ccacctaatggtcatcgcttgattttacaaacc

SEQ ID NO: 547033 - DNA, 33 bp, Homo sapien
gaacttccagagttacaaccctcaaggctgcca

SEQ ID NO: 547034 - DNA, 33 bp, Homo sapien
gaacttccagagttacgaccctcaaggctgcca

SEQ ID NO: 547035 - DNA, 33 bp, Homo sapien
ttatttggatttctcccgatactggtagtatgg

SEQ ID NO: 547036 - DNA, 33 bp, Homo sapien
ttatttggatttctcctgatactggtagtatgg

SEQ ID NO: 547037 - DNA, 33 bp, Homo sapien
attacagaaatgacaaaattttaaaactgtaat

SEQ ID NO: 547038 - DNA, 33 bp, Homo sapien
attacagaaatgacaacattttaaaactgtaat

SEQ ID NO: 547039 - DNA, 33 bp, Homo sapien
ttagagtgtgtttcaacgcatcctaataacctg

SEQ ID NO: 547040 - DNA, 33 bp, Homo sapien
ttagagtgtgtttcaatgcatcctaataacctg

SEQ ID NO: 547041 - DNA, 33 bp, Homo sapien
agctaatttatgatcacccatcctaaaccaaga

SEQ ID NO: 547042 - DNA, 33 bp, Homo sapien
agctaatttatgatcatccatcctaaaccaaga

SEQ ID NO: 547043 - DNA, 33 bp, Homo sapien
ctcattgattctttgacgctagtaaatgaaatt

SEQ ID NO: 547044 - DNA, 33 bp, Homo sapien
ctcattgattctttgatgctagtaaatgaaatt

SEQ ID NO: 547045 - DNA, 33 bp, Homo sapien
tgaagatcaagtgtaaagagaataagaaaaaaa

SEQ ID NO: 547046 - DNA, 33 bp, Homo sapien
tgaagatcaagtgtaaggagaataagaaaaaaa

SEQ ID NO: 547047 - DNA, 33 bp, Homo sapien
taaattgcacaagtgactcaacttttacttctg

SEQ ID NO: 547048 - DNA, 33 bp, Homo sapien
taaattgcacaagtgagtcaacttttacttctg

SEQ ID NO: 547049 - DNA, 33 bp, Homo sapien
tcctgaattttaatagaataattgccaagaatt

SEQ ID NO: 547050 - DNA, 33 bp, Homo sapien
tcctgaattttaataggataattgccaagaatt

SEQ ID NO: 547051 - DNA, 33 bp, Homo sapien
ttctttcttggcaaataaaatagtgttttctct

SEQ ID NO: 547052 - DNA, 33 bp, Homo sapien
ttctttcttggcaaatcaaatagtgttttctct

SEQ ID NO: 547053 - DNA, 33 bp, Homo sapien
ttgttgttagcctttcccacactctccaggctc

SEQ ID NO: 547054 - DNA, 33 bp, Homo sapien
ttgttgttagcctttctcacactctccaggctc

SEQ ID NO: 547055 - DNA, 33 bp, Homo sapien
tgccaaagtcatgcacactttagtttagcccct

SEQ ID NO: 547056 - DNA, 33 bp, Homo sapien
tgccaaagtcatgcacgctttagtttagcccct

SEQ ID NO: 547057 - DNA, 33 bp, Homo sapien
cacttctccagataaactggattcctaaaatag

SEQ ID NO: 547058 - DNA, 33 bp, Homo sapien
cacttctccagataaattggattcctaaaatag

SEQ ID NO: 547059 - DNA, 33 bp, Homo sapien
aactgtttagccaaaaattttatcatcagtgaa

SEQ ID NO: 547060 - DNA, 33 bp, Homo sapien
aactgtttagccaaaacttttatcatcagtgaa

SEQ ID NO: 547061 - DNA, 33 bp, Homo sapien
attttgacagggatggcatttggaatgctgcat

SEQ ID NO: 547062 - DNA, 33 bp, Homo sapien
attttgacagggatggtatttggaatgctgcat

SEQ ID NO: 547063 - DNA, 33 bp, Homo sapien
ttatcattcaaggaaccatctaggaaggaacac

SEQ ID NO: 547064 - DNA, 33 bp, Homo sapien
ttatcattcaaggaacgatctaggaaggaacac

SEQ ID NO: 547065 - DNA, 33 bp, Homo sapien
gcctccattctaatgcaaacaattataagctga

SEQ ID NO: 547066 - DNA, 33 bp, Homo sapien
gcctccattctaatgccaacaattataagctga

SEQ ID NO: 547067 - DNA, 33 bp, Homo sapien
catcgataaaacataaatagatttcttcttttt

SEQ ID NO: 547068 - DNA, 33 bp, Homo sapien
catcgataaaacataattagatttcttcttttt

SEQ ID NO: 547069 - DNA, 33 bp, Homo sapien
aaactgtcacatcctaaagaagggtaaggaaac

SEQ ID NO: 547070 - DNA, 33 bp, Homo sapien
aaactgtcacatcctagagaagggtaaggaaac

SEQ ID NO: 547071 - DNA, 33 bp, Homo sapien
accagtactcctcaaaactccaaaggtcatcca

SEQ ID NO: 547072 - DNA, 33 bp, Homo sapien
accagtactcctcaaagctccaaaggtcatcca

SEQ ID NO: 547073 - DNA, 33 bp, Homo sapien
tgggatactgccatataagtgtgtgcaggatgg

SEQ ID NO: 547074 - DNA, 33 bp, Homo sapien
tgggatactgccatatgagtgtgtgcaggatgg

SEQ ID NO: 547075 - DNA, 33 bp, Homo sapien
tcaatggctaatgtgcagatattgttcttgaga

SEQ ID NO: 547076 - DNA, 33 bp, Homo sapien
tcaatggctaatgtgcggatattgttcttgaga

SEQ ID NO: 547077 - DNA, 33 bp, Homo sapien
gaatacggtataaaacgccagactggtggtggc

SEQ ID NO: 547078 - DNA, 33 bp, Homo sapien
gaatacggtataaaactccagactggtggtggc

SEQ ID NO: 547079 - DNA, 33 bp, Homo sapien
gccgtaatcacatttcaaaagtatgcatttttc

SEQ ID NO: 547080 - DNA, 33 bp, Homo sapien
gccgtaatcacatttcgaaagtatgcatttttc

SEQ ID NO: 547081 - DNA, 33 bp, Homo sapien
actaccctgtcttataatactgctctctctgaa

SEQ ID NO: 547082 - DNA, 33 bp, Homo sapien
actaccctgtcttatagtactgctctctctgaa

SEQ ID NO: 547083 - DNA, 33 bp, Homo sapien
actaagagataacatgaaacaggaatggagaag

SEQ ID NO: 547084 - DNA, 33 bp, Homo sapien
actaagagataacatgtaacaggaatggagaag

SEQ ID NO: 547085 - DNA, 33 bp, Homo sapien
tttgatggtatatttgaatgaatgtgttctccc

SEQ ID NO: 547086 - DNA, 33 bp, Homo sapien
tttgatggtatatttggatgaatgtgttctccc

SEQ ID NO: 547087 - DNA, 33 bp, Homo sapien
ggactattttccacacccttacgattgcatccc

SEQ ID NO: 547088 - DNA, 33 bp, Homo sapien
ggactattttccacactcttacgattgcatccc

SEQ ID NO: 547089 - DNA, 33 bp, Homo sapien
tgccactcagtgtcaacggcaccctctagtcac

SEQ ID NO: 547090 - DNA, 33 bp, Homo sapien
tgccactcagtgtcaatggcaccctctagtcac

SEQ ID NO: 547091 - DNA, 33 bp, Homo sapien
tcagcctcaggtacataatggtaaagatcacat

SEQ ID NO: 547092 - DNA, 33 bp, Homo sapien
tcagcctcaggtacatcatggtaaagatcacat

SEQ ID NO: 547093 - DNA, 33 bp, Homo sapien
taacagttttggcacccacaaagtggaagtttg

SEQ ID NO: 547094 - DNA, 33 bp, Homo sapien
taacagttttggcacctacaaagtggaagtttg

SEQ ID NO: 547095 - DNA, 33 bp, Homo sapien
caaaagcagatgggtcaaaaggaaaggacatgg

SEQ ID NO: 547096 - DNA, 33 bp, Homo sapien
caaaagcagatgggtcgaaaggaaaggacatgg

SEQ ID NO: 547097 - DNA, 33 bp, Homo sapien
atttcctttatttcagaaagacgttaatatggt

SEQ ID NO: 547098 - DNA, 33 bp, Homo sapien
atttcctttatttcagtaagacgttaatatggt

SEQ ID NO: 547099 - DNA, 33 bp, Homo sapien
aaacatatacgtcctgcaatattatacagctat

SEQ ID NO: 547100 - DNA, 33 bp, Homo sapien
aaacatatacgtcctggaatattatacagctat

SEQ ID NO: 547101 - DNA, 33 bp, Homo sapien
gtgtccatggaaaatgcaatcaataaatgtttt

SEQ ID NO: 547102 - DNA, 33 bp, Homo sapien
gtgtccatggaaaatgtaatcaataaatgtttt

SEQ ID NO: 547103 - DNA, 33 bp, Homo sapien
cttctttgtggattcaccctttaaaatggtgta

SEQ ID NO: 547104 - DNA, 33 bp, Homo sapien
cttctttgtggattcatcctttaaaatggtgta

SEQ ID NO: 547105 - DNA, 33 bp, Homo sapien
aagaccaaaaccaccaaactgactatagttacc

SEQ ID NO: 547106 - DNA, 33 bp, Homo sapien
aagaccaaaaccaccagactgactatagttacc

SEQ ID NO: 547107 - DNA, 33 bp, Homo sapien
aactgctgcattcagcaaaaaaccagatcattt

SEQ ID NO: 547108 - DNA, 33 bp, Homo sapien
aactgctgcattcagccaaaaaccagatcattt

SEQ ID NO: 547109 - DNA, 33 bp, Homo sapien
tttcagaaagtccagaaaaaaggaatgcaaaat

SEQ ID NO: 547110 - DNA, 33 bp, Homo sapien
tttcagaaagtccagacaaaaggaatgcaaaat

SEQ ID NO: 547111 - DNA, 33 bp, Homo sapien
gaatggcttcaccacagagtaaaactacagaag

SEQ ID NO: 547112 - DNA, 33 bp, Homo sapien
gaatggcttcaccacatagtaaaactacagaag

SEQ ID NO: 547113 - DNA, 33 bp, Homo sapien
catttattgcctatgcccatttttccttttcta

SEQ ID NO: 547114 - DNA, 33 bp, Homo sapien
catttattgcctatgctcatttttccttttcta

SEQ ID NO: 547115 - DNA, 33 bp, Homo sapien
tgatgagctgtcttgacggaggccacaaagagt

SEQ ID NO: 547116 - DNA, 33 bp, Homo sapien
tgatgagctgtcttgatggaggccacaaagagt

SEQ ID NO: 547117 - DNA, 33 bp, Homo sapien
gtaggctaatcattcacgtgctttagagctttg

SEQ ID NO: 547118 - DNA, 33 bp, Homo sapien
gtaggctaatcattcatgtgctttagagctttg

SEQ ID NO: 547119 - DNA, 33 bp, Homo sapien
tctgatatctattgtcacagtcacaatttatcc

SEQ ID NO: 547120 - DNA, 33 bp, Homo sapien
tctgatatctattgtcgcagtcacaatttatcc

SEQ ID NO: 547121 - DNA, 33 bp, Homo sapien
atgtagttgcaaaaaccgctatagtcatgtgtc

SEQ ID NO: 547122 - DNA, 33 bp, Homo sapien
atgtagttgcaaaaacggctatagtcatgtgtc

SEQ ID NO: 547123 - DNA, 33 bp, Homo sapien
tacccatgtcatagaacaaagctgcattaccat

SEQ ID NO: 547124 - DNA, 33 bp, Homo sapien
tacccatgtcatagaataaagctgcattaccat

SEQ ID NO: 547125 - DNA, 33 bp, Homo sapien
ataagttgaaactaaaatattggactgaaatac

SEQ ID NO: 547126 - DNA, 33 bp, Homo sapien
ataagttgaaactaaagtattggactgaaatac

SEQ ID NO: 547127 - DNA, 33 bp, Homo sapien
aatttggtttagggataactggtgggtgcatgg

SEQ ID NO: 547128 - DNA, 33 bp, Homo sapien
aatttggtttagggatgactggtgggtgcatgg

SEQ ID NO: 547129 - DNA, 33 bp, Homo sapien
agcctaaaatagcacacatttattactcatagt

SEQ ID NO: 547130 - DNA, 33 bp, Homo sapien
agcctaaaatagcacagatttattactcatagt

SEQ ID NO: 547131 - DNA, 33 bp, Homo sapien
ttgtagaaattcagaaatcgctgaagagagttg

SEQ ID NO: 547132 - DNA, 33 bp, Homo sapien
ttgtagaaattcagaattcgctgaagagagttg

SEQ ID NO: 547133 - DNA, 33 bp, Homo sapien
aaaatgttaaggagtgaagctcatggtatgtgt

SEQ ID NO: 547134 - DNA, 33 bp, Homo sapien
aaaatgttaaggagtgcagctcatggtatgtgt

SEQ ID NO: 547135 - DNA, 33 bp, Homo sapien
tgctaagtctgttttcaatgttagtatcaagtg

SEQ ID NO: 547136 - DNA, 33 bp, Homo sapien
tgctaagtctgttttcgatgttagtatcaagtg

SEQ ID NO: 547137 - DNA, 33 bp, Homo sapien
atgtttttctgcacatcaaatgacttcacaacc

SEQ ID NO: 547138 - DNA, 33 bp, Homo sapien
atgtttttctgcacattaaatgacttcacaacc

SEQ ID NO: 547139 - DNA, 33 bp, Homo sapien
gcttgttctacaataaaataaactgtctatata

SEQ ID NO: 547140 - DNA, 33 bp, Homo sapien
gcttgttctacaataacataaactgtctatata

SEQ ID NO: 547141 - DNA, 33 bp, Homo sapien
agggtgtaattcttaacggagactgtgtttaag

SEQ ID NO: 547142 - DNA, 33 bp, Homo sapien
agggtgtaattcttaatggagactgtgtttaag

SEQ ID NO: 547143 - DNA, 33 bp, Homo sapien
aaaaaagttatcccaccagtaaaggctcacaat

SEQ ID NO: 547144 - DNA, 33 bp, Homo sapien
aaaaaagttatcccactagtaaaggctcacaat

SEQ ID NO: 547145 - DNA, 33 bp, Homo sapien
gcttgagcaactgggcaatgccatatcctaaga

SEQ ID NO: 547146 - DNA, 33 bp, Homo sapien
gcttgagcaactgggcgatgccatatcctaaga

SEQ ID NO: 547147 - DNA, 33 bp, Homo sapien
cttcatattctttagaagatgtatcatgtacat

SEQ ID NO: 547148 - DNA, 33 bp, Homo sapien
cttcatattctttagatgatgtatcatgtacat

SEQ ID NO: 547149 - DNA, 33 bp, Homo sapien
taacgtcaactcaaaacggatcaaatacctaag

SEQ ID NO: 547150 - DNA, 33 bp, Homo sapien
taacgtcaactcaaaatggatcaaatacctaag

SEQ ID NO: 547151 - DNA, 33 bp, Homo sapien
gacttccagaccaggaaagcaaacacctccaat

SEQ ID NO: 547152 - DNA, 33 bp, Homo sapien
gacttccagaccaggagagcaaacacctccaat

SEQ ID NO: 547153 - DNA, 33 bp, Homo sapien
caggcttgtgaactgtaaaagctttgggctgtg

SEQ ID NO: 547154 - DNA, 33 bp, Homo sapien
caggcttgtgaactgtgaaagctttgggctgtg

SEQ ID NO: 547155 - DNA, 33 bp, Homo sapien
ccatatcagctacaataataaagacatttgcgc

SEQ ID NO: 547156 - DNA, 33 bp, Homo sapien
ccatatcagctacaatgataaagacatttgcgc

SEQ ID NO: 547157 - DNA, 33 bp, Homo sapien
tgggaattgtctgtacagcccacaaactggccc

SEQ ID NO: 547158 - DNA, 33 bp, Homo sapien
tgggaattgtctgtacggcccacaaactggccc

SEQ ID NO: 547159 - DNA, 33 bp, Homo sapien
catgtgttgtttaacaatggtgatacattccaa

SEQ ID NO: 547160 - DNA, 33 bp, Homo sapien
catgtgttgtttaacagtggtgatacattccaa

SEQ ID NO: 547161 - DNA, 33 bp, Homo sapien
ggtaaataattttggcactggtatttgaattta

SEQ ID NO: 547162 - DNA, 33 bp, Homo sapien
ggtaaataattttggcgctggtatttgaattta

SEQ ID NO: 547163 - DNA, 33 bp, Homo sapien
ttttctagaggcataacgattcaggaaaagttg

SEQ ID NO: 547164 - DNA, 33 bp, Homo sapien
ttttctagaggcataatgattcaggaaaagttg

SEQ ID NO: 547165 - DNA, 33 bp, Homo sapien
gttctttgactgcatcaagctcgacattgagac

SEQ ID NO: 547166 - DNA, 33 bp, Homo sapien
gttctttgactgcatcgagctcgacattgagac

SEQ ID NO: 547167 - DNA, 33 bp, Homo sapien
gaggaacaacagcaaccgaaagggtgtcaattt

SEQ ID NO: 547168 - DNA, 33 bp, Homo sapien
gaggaacaacagcaactgaaagggtgtcaattt

SEQ ID NO: 547169 - DNA, 33 bp, Homo sapien
aaagcattccattttacaatcagacagttcaga

SEQ ID NO: 547170 - DNA, 33 bp, Homo sapien
aaagcattccattttataatcagacagttcaga

SEQ ID NO: 547171 - DNA, 33 bp, Homo sapien
tttacatttatggctaagatatgtgtgtatgtg

SEQ ID NO: 547172 - DNA, 33 bp, Homo sapien
tttacatttatggctaggatatgtgtgtatgtg

SEQ ID NO: 547173 - DNA, 33 bp, Homo sapien
ttggcaattggacataacttaagaattggtctg

SEQ ID NO: 547174 - DNA, 33 bp, Homo sapien
ttggcaattggacatagcttaagaattggtctg

SEQ ID NO: 547175 - DNA, 33 bp, Homo sapien
ccatatctaactttccaatacagtcttaagata

SEQ ID NO: 547176 - DNA, 33 bp, Homo sapien
ccatatctaactttccgatacagtcttaagata

SEQ ID NO: 547177 - DNA, 33 bp, Homo sapien
atttaaggtgagacttcaaagccaagaagatgt

SEQ ID NO: 547178 - DNA, 33 bp, Homo sapien
atttaaggtgagacttgaaagccaagaagatgt

SEQ ID NO: 547179 - DNA, 33 bp, Homo sapien
aatgcctatgctctcaaattaaaagccaactga

SEQ ID NO: 547180 - DNA, 33 bp, Homo sapien
aatgcctatgctctcagattaaaagccaactga

SEQ ID NO: 547181 - DNA, 33 bp, Homo sapien
cctgacttgacttaaacgtataaaagaggaagt

SEQ ID NO: 547182 - DNA, 33 bp, Homo sapien
cctgacttgacttaaaggtataaaagaggaagt

SEQ ID NO: 547183 - DNA, 33 bp, Homo sapien
gccctaaaatcaagggaagacgatgacttgtta

SEQ ID NO: 547184 - DNA, 33 bp, Homo sapien
gccctaaaatcaaggggagacgatgacttgtta

SEQ ID NO: 547185 - DNA, 33 bp, Homo sapien
tgtaaactgtaggacagaaaaagagtgctcagc

SEQ ID NO: 547186 - DNA, 33 bp, Homo sapien
tgtaaactgtaggacataaaaagagtgctcagc

SEQ ID NO: 547187 - DNA, 33 bp, Homo sapien
agaattgtagctaactcaaacatagctgagcac

SEQ ID NO: 547188 - DNA, 33 bp, Homo sapien
agaattgtagctaactgaaacatagctgagcac

SEQ ID NO: 547189 - DNA, 33 bp, Homo sapien
aagtgcatgcctcttacgctcactcttatctta

SEQ ID NO: 547190 - DNA, 33 bp, Homo sapien
aagtgcatgcctcttatgctcactcttatctta

SEQ ID NO: 547191 - DNA, 33 bp, Homo sapien
gggaggaagttagagcacaaagaggagactaag

SEQ ID NO: 547192 - DNA, 33 bp, Homo sapien
gggaggaagttagagcgcaaagaggagactaag

SEQ ID NO: 547193 - DNA, 33 bp, Homo sapien
gactagaactcatacccaatggtagtcagggta

SEQ ID NO: 547194 - DNA, 33 bp, Homo sapien
gactagaactcatacctaatggtagtcagggta

SEQ ID NO: 547195 - DNA, 33 bp, Homo sapien
tgagctagagaaaacacgtcaaatgagcttctt

SEQ ID NO: 547196 - DNA, 33 bp, Homo sapien
tgagctagagaaaacatgtcaaatgagcttctt

SEQ ID NO: 547197 - DNA, 33 bp, Homo sapien
cttctaatccttaagacgaaagagacaaatact

SEQ ID NO: 547198 - DNA, 33 bp, Homo sapien
cttctaatccttaagatgaaagagacaaatact

SEQ ID NO: 547199 - DNA, 33 bp, Homo sapien
caaaaaagcaaaagcaatagttgacctagaatt

SEQ ID NO: 547200 - DNA, 33 bp, Homo sapien
caaaaaagcaaaagcagtagttgacctagaatt

SEQ ID NO: 547201 - DNA, 33 bp, Homo sapien
caaaccatatcttgccaccactgataatgttgc

SEQ ID NO: 547202 - DNA, 33 bp, Homo sapien
caaaccatatcttgccgccactgataatgttgc

SEQ ID NO: 547203 - DNA, 33 bp, Homo sapien
atagaactgtttagaaaatgatatggtttggtt

SEQ ID NO: 547204 - DNA, 33 bp, Homo sapien
atagaactgtttagaatatgatatggtttggtt

SEQ ID NO: 547205 - DNA, 33 bp, Homo sapien
atatagtttctcctgaagtacaccactcgattt

SEQ ID NO: 547206 - DNA, 33 bp, Homo sapien
atatagtttctcctgatgtacaccactcgattt

SEQ ID NO: 547207 - DNA, 33 bp, Homo sapien
accctctacactgagaaccatttttactgctca

SEQ ID NO: 547208 - DNA, 33 bp, Homo sapien
accctctacactgagagccatttttactgctca

SEQ ID NO: 547209 - DNA, 33 bp, Homo sapien
cttgagctcttgtccaacatctaagaagaatga

SEQ ID NO: 547210 - DNA, 33 bp, Homo sapien
cttgagctcttgtccagcatctaagaagaatga

SEQ ID NO: 547211 - DNA, 33 bp, Homo sapien
cagagggggtgttacaatgctcctttagttcta

SEQ ID NO: 547212 - DNA, 33 bp, Homo sapien
cagagggggtgttacagtgctcctttagttcta

SEQ ID NO: 547213 - DNA, 33 bp, Homo sapien
taccagcctcataagaacctcctatgctggatt

SEQ ID NO: 547214 - DNA, 33 bp, Homo sapien
taccagcctcataagagcctcctatgctggatt

SEQ ID NO: 547215 - DNA, 33 bp, Homo sapien
tcaatcatgattgctcaaataagaaataaatga

SEQ ID NO: 547216 - DNA, 33 bp, Homo sapien
tcaatcatgattgctccaataagaaataaatga

SEQ ID NO: 547217 - DNA, 33 bp, Homo sapien
tgcttatatagcagcactcctttaggcataatc

SEQ ID NO: 547218 - DNA, 33 bp, Homo sapien
tgcttatatagcagcagtcctttaggcataatc

SEQ ID NO: 547219 - DNA, 33 bp, Homo sapien
agtgctaaagggcaaacaatatcagtatctgaa

SEQ ID NO: 547220 - DNA, 33 bp, Homo sapien
agtgctaaagggcaaagaatatcagtatctgaa

SEQ ID NO: 547221 - DNA, 33 bp, Homo sapien
tttcctcagaaattgacggaacaaatagacaag

SEQ ID NO: 547222 - DNA, 33 bp, Homo sapien
tttcctcagaaattgatggaacaaatagacaag

SEQ ID NO: 547223 - DNA, 33 bp, Homo sapien
ccctagtacagttggaacccaatgtcaagctgc

SEQ ID NO: 547224 - DNA, 33 bp, Homo sapien
ccctagtacagttggagcccaatgtcaagctgc

SEQ ID NO: 547225 - DNA, 33 bp, Homo sapien
tggctggtagctaggtcaatactcagccacggc

SEQ ID NO: 547226 - DNA, 33 bp, Homo sapien
tggctggtagctaggttaatactcagccacggc

SEQ ID NO: 547227 - DNA, 33 bp, Homo sapien
tactagctacctagcaatgattcttcaccagta

SEQ ID NO: 547228 - DNA, 33 bp, Homo sapien
tactagctacctagcactgattcttcaccagta

SEQ ID NO: 547229 - DNA, 33 bp, Homo sapien
tgattcttcaccagtacaaaatgaatgaaatga

SEQ ID NO: 547230 - DNA, 33 bp, Homo sapien
tgattcttcaccagtataaaatgaatgaaatga

SEQ ID NO: 547231 - DNA, 33 bp, Homo sapien
tgaaataatcactttcaaatttgtacttggggc

SEQ ID NO: 547232 - DNA, 33 bp, Homo sapien
tgaaataatcactttccaatttgtacttggggc

SEQ ID NO: 547233 - DNA, 33 bp, Homo sapien
cttctcatttgggaaaaacttaggttcaagtca

SEQ ID NO: 547234 - DNA, 33 bp, Homo sapien
cttctcatttgggaaagacttaggttcaagtca

SEQ ID NO: 547235 - DNA, 33 bp, Homo sapien
attccattactgaggaagcaagcactaaagtaa

SEQ ID NO: 547236 - DNA, 33 bp, Homo sapien
attccattactgaggatgcaagcactaaagtaa

SEQ ID NO: 547237 - DNA, 33 bp, Homo sapien
catacagttttctcaaggtctgttataagtata

SEQ ID NO: 547238 - DNA, 33 bp, Homo sapien
catacagttttctcaatgtctgttataagtata

SEQ ID NO: 547239 - DNA, 33 bp, Homo sapien
aagacaaaattggctacgtcatcagattattgc

SEQ ID NO: 547240 - DNA, 33 bp, Homo sapien
aagacaaaattggctatgtcatcagattattgc

SEQ ID NO: 547241 - DNA, 33 bp, Homo sapien
atgttgttgatttaaaaaaaggagctgatctca

SEQ ID NO: 547242 - DNA, 33 bp, Homo sapien
atgttgttgatttaaataaaggagctgatctca

SEQ ID NO: 547243 - DNA, 33 bp, Homo sapien
acctggatccaatgacactgagagaaataaaag

SEQ ID NO: 547244 - DNA, 33 bp, Homo sapien
acctggatccaatgacgctgagagaaataaaag

SEQ ID NO: 547245 - DNA, 33 bp, Homo sapien
catagaatgctataaaagtttccagtacctgct

SEQ ID NO: 547246 - DNA, 33 bp, Homo sapien
catagaatgctataaatgtttccagtacctgct

SEQ ID NO: 547247 - DNA, 33 bp, Homo sapien
ttctccttgagcactacaacaagaataacaatg

SEQ ID NO: 547248 - DNA, 33 bp, Homo sapien
ttctccttgagcactagaacaagaataacaatg

SEQ ID NO: 547249 - DNA, 33 bp, Homo sapien
aaaacacttatcaactgacacttctcatttact

SEQ ID NO: 547250 - DNA, 33 bp, Homo sapien
aaaacacttatcaacttacacttctcatttact

SEQ ID NO: 547251 - DNA, 33 bp, Homo sapien
actggatcataggggcaaatttatccctcgctg

SEQ ID NO: 547252 - DNA, 33 bp, Homo sapien
actggatcataggggcgaatttatccctcgctg

SEQ ID NO: 547253 - DNA, 33 bp, Homo sapien
acatctgtggcattacaaacattaaatatttat

SEQ ID NO: 547254 - DNA, 33 bp, Homo sapien
acatctgtggcattaccaacattaaatatttat

SEQ ID NO: 547255 - DNA, 33 bp, Homo sapien
ctcatctaagttctgaacctcaaattggttccc

SEQ ID NO: 547256 - DNA, 33 bp, Homo sapien
ctcatctaagttctgaccctcaaattggttccc

SEQ ID NO: 547257 - DNA, 33 bp, Homo sapien
tgtaattcatttccctcaatgtatgccctttag

SEQ ID NO: 547258 - DNA, 33 bp, Homo sapien
tgtaattcatttcccttaatgtatgccctttag

SEQ ID NO: 547259 - DNA, 33 bp, Homo sapien
accacatggccttagcagcctatcatgaactgg

SEQ ID NO: 547260 - DNA, 33 bp, Homo sapien
accacatggccttagctgcctatcatgaactgg

SEQ ID NO: 547261 - DNA, 33 bp, Homo sapien
aatagcttttagaaaaatcagttatggcaccaa

SEQ ID NO: 547262 - DNA, 33 bp, Homo sapien
aatagcttttagaaaactcagttatggcaccaa

SEQ ID NO: 547263 - DNA, 33 bp, Homo sapien
aagaaagtgtgacacaatcaaataactgaaata

SEQ ID NO: 547264 - DNA, 33 bp, Homo sapien
aagaaagtgtgacacagtcaaataactgaaata

SEQ ID NO: 547265 - DNA, 33 bp, Homo sapien
aatttatatcagtttgaatcagaaatcttattc

SEQ ID NO: 547266 - DNA, 33 bp, Homo sapien
aatttatatcagtttggatcagaaatcttattc

SEQ ID NO: 547267 - DNA, 33 bp, Homo sapien
gtgactgccataaacaatcagtgcaagcaacat

SEQ ID NO: 547268 - DNA, 33 bp, Homo sapien
gtgactgccataaacagtcagtgcaagcaacat

SEQ ID NO: 547269 - DNA, 33 bp, Homo sapien
ctcctctaaaaacaaaagttgaagccatggtga

SEQ ID NO: 547270 - DNA, 33 bp, Homo sapien
ctcctctaaaaacaaaggttgaagccatggtga

SEQ ID NO: 547271 - DNA, 33 bp, Homo sapien
ttatcagcaattcagacgtttcaacttaataaa

SEQ ID NO: 547272 - DNA, 33 bp, Homo sapien
ttatcagcaattcagatgtttcaacttaataaa

SEQ ID NO: 547273 - DNA, 33 bp, Homo sapien
catatgaataagacacagaaattttatgaagac

SEQ ID NO: 547274 - DNA, 33 bp, Homo sapien
catatgaataagacacggaaattttatgaagac

SEQ ID NO: 547275 - DNA, 33 bp, Homo sapien
tgtttttgtaaggacaactctaactgcttacag

SEQ ID NO: 547276 - DNA, 33 bp, Homo sapien
tgtttttgtaaggacatctctaactgcttacag

SEQ ID NO: 547277 - DNA, 33 bp, Homo sapien
tggcaactttgattaaacatcgtcaagaaaaat

SEQ ID NO: 547278 - DNA, 33 bp, Homo sapien
tggcaactttgattaagcatcgtcaagaaaaat

SEQ ID NO: 547279 - DNA, 33 bp, Homo sapien
ataatctgaagcaaggaaaggagatgaagatgc

SEQ ID NO: 547280 - DNA, 33 bp, Homo sapien
ataatctgaagcaaggtaaggagatgaagatgc

SEQ ID NO: 547281 - DNA, 33 bp, Homo sapien
tgaggacaagatatgacataatggttaatttag

SEQ ID NO: 547282 - DNA, 33 bp, Homo sapien
tgaggacaagatatgatataatggttaatttag

SEQ ID NO: 547283 - DNA, 33 bp, Homo sapien
cattgtatagcattaactctgaggctaagcaaa

SEQ ID NO: 547284 - DNA, 33 bp, Homo sapien
cattgtatagcattaattctgaggctaagcaaa

SEQ ID NO: 547285 - DNA, 33 bp, Homo sapien
catctaacaacctgaaatggttaggcacagttg

SEQ ID NO: 547286 - DNA, 33 bp, Homo sapien
catctaacaacctgaagtggttaggcacagttg

SEQ ID NO: 547287 - DNA, 33 bp, Homo sapien
agaaacttttgattggccaatgctagggctgaa

SEQ ID NO: 547288 - DNA, 33 bp, Homo sapien
agaaacttttgattggtcaatgctagggctgaa

SEQ ID NO: 547289 - DNA, 33 bp, Homo sapien
tgcagaatgctagctaaaaagtttttgtagatt

SEQ ID NO: 547290 - DNA, 33 bp, Homo sapien
tgcagaatgctagctataaagtttttgtagatt

SEQ ID NO: 547291 - DNA, 33 bp, Homo sapien
aaagtgaagatcccagaaaaagtggagaaaact

SEQ ID NO: 547292 - DNA, 33 bp, Homo sapien
aaagtgaagatcccagcaaaagtggagaaaact

SEQ ID NO: 547293 - DNA, 33 bp, Homo sapien
cctattactcaactcaacctttgggtatttctt

SEQ ID NO: 547294 - DNA, 33 bp, Homo sapien
cctattactcaactcagcctttgggtatttctt

SEQ ID NO: 547295 - DNA, 33 bp, Homo sapien
tggaagataaagggaaaggttttcatcaggagg

SEQ ID NO: 547296 - DNA, 33 bp, Homo sapien
tggaagataaagggaagggttttcatcaggagg

SEQ ID NO: 547297 - DNA, 33 bp, Homo sapien
gaaccacggagaactggaatgagagtgatggat

SEQ ID NO: 547298 - DNA, 33 bp, Homo sapien
gaaccacggagaactgtaatgagagtgatggat

SEQ ID NO: 547299 - DNA, 33 bp, Homo sapien
attttctctcttgtgaaatagacccacagccca

SEQ ID NO: 547300 - DNA, 33 bp, Homo sapien
attttctctcttgtgagatagacccacagccca

SEQ ID NO: 547301 - DNA, 33 bp, Homo sapien
gccagctaagaaataacgagagacagtacaaag

SEQ ID NO: 547302 - DNA, 33 bp, Homo sapien
gccagctaagaaataaggagagacagtacaaag

SEQ ID NO: 547303 - DNA, 33 bp, Homo sapien
ttatttcttagctggccgacatttatggaaaat

SEQ ID NO: 547304 - DNA, 33 bp, Homo sapien
ttatttcttagctggctgacatttatggaaaat

SEQ ID NO: 547305 - DNA, 33 bp, Homo sapien
ccacagagaagaaagacagtgaaacggtttggc

SEQ ID NO: 547306 - DNA, 33 bp, Homo sapien
ccacagagaagaaagagagtgaaacggtttggc

SEQ ID NO: 547307 - DNA, 33 bp, Homo sapien
gcaaaatcaccctaaccgagatgctatgagatt

SEQ ID NO: 547308 - DNA, 33 bp, Homo sapien
gcaaaatcaccctaactgagatgctatgagatt

SEQ ID NO: 547309 - DNA, 33 bp, Homo sapien
aattagaaaagatgccagaaagccacacagcag

SEQ ID NO: 547310 - DNA, 33 bp, Homo sapien
aattagaaaagatgccggaaagccacacagcag

SEQ ID NO: 547311 - DNA, 33 bp, Homo sapien
atatctgtgacttgcacaagccagatatgtgac

SEQ ID NO: 547312 - DNA, 33 bp, Homo sapien
atatctgtgacttgcataagccagatatgtgac

SEQ ID NO: 547313 - DNA, 33 bp, Homo sapien
ctgtcaatgttacgacacactatgctgaatacc

SEQ ID NO: 547314 - DNA, 33 bp, Homo sapien
ctgtcaatgttacgacccactatgctgaatacc

SEQ ID NO: 547315 - DNA, 33 bp, Homo sapien
tgccaccatagaaacacggttcagtgtggtgat

SEQ ID NO: 547316 - DNA, 33 bp, Homo sapien
tgccaccatagaaacagggttcagtgtggtgat

SEQ ID NO: 547317 - DNA, 33 bp, Homo sapien
agtgtattattcaccactgcatctcaggcaatg

SEQ ID NO: 547318 - DNA, 33 bp, Homo sapien
agtgtattattcaccattgcatctcaggcaatg

SEQ ID NO: 547319 - DNA, 33 bp, Homo sapien
aacttatatcaaagaacgttaggggatttgcca

SEQ ID NO: 547320 - DNA, 33 bp, Homo sapien
aacttatatcaaagaatgttaggggatttgcca

SEQ ID NO: 547321 - DNA, 33 bp, Homo sapien
aaaaacagtcttaagaagcgtagtaaacaacag

SEQ ID NO: 547322 - DNA, 33 bp, Homo sapien
aaaaacagtcttaagaggcgtagtaaacaacag

SEQ ID NO: 547323 - DNA, 33 bp, Homo sapien
taaaacactggctatgaaacaattccatctgta

SEQ ID NO: 547324 - DNA, 33 bp, Homo sapien
taaaacactggctatgcaacaattccatctgta

SEQ ID NO: 547325 - DNA, 33 bp, Homo sapien
gctcctctcttatttgaaggatgtattatttgc

SEQ ID NO: 547326 - DNA, 33 bp, Homo sapien
gctcctctcttatttggaggatgtattatttgc

SEQ ID NO: 547327 - DNA, 33 bp, Homo sapien
ttggaaaaattccatacgagtaatagacaccag

SEQ ID NO: 547328 - DNA, 33 bp, Homo sapien
ttggaaaaattccatatgagtaatagacaccag

SEQ ID NO: 547329 - DNA, 33 bp, Homo sapien
agataagagacatggaagagataccttgaaact

SEQ ID NO: 547330 - DNA, 33 bp, Homo sapien
agataagagacatggaggagataccttgaaact

SEQ ID NO: 547331 - DNA, 33 bp, Homo sapien
atgcaagtattcaaacccagccaattgtataca

SEQ ID NO: 547332 - DNA, 33 bp, Homo sapien
atgcaagtattcaaactcagccaattgtataca

SEQ ID NO: 547333 - DNA, 33 bp, Homo sapien
gcaattaaaaatcttgaaactgttgaaggaact

SEQ ID NO: 547334 - DNA, 33 bp, Homo sapien
gcaattaaaaatcttggaactgttgaaggaact

SEQ ID NO: 547335 - DNA, 33 bp, Homo sapien
ctttcttgaaactgacagcaactccaacagctc

SEQ ID NO: 547336 - DNA, 33 bp, Homo sapien
ctttcttgaaactgacggcaactccaacagctc

SEQ ID NO: 547337 - DNA, 33 bp, Homo sapien
tgtaggcagtgaaaaacgctccctagttttatt

SEQ ID NO: 547338 - DNA, 33 bp, Homo sapien
tgtaggcagtgaaaaatgctccctagttttatt

SEQ ID NO: 547339 - DNA, 33 bp, Homo sapien
cctggatgatgtagctcaaggaaagagggctaa

SEQ ID NO: 547340 - DNA, 33 bp, Homo sapien
cctggatgatgtagcttaaggaaagagggctaa

SEQ ID NO: 547341 - DNA, 33 bp, Homo sapien
cgtcacagtgctgaaaatcactatgggatcatg

SEQ ID NO: 547342 - DNA, 33 bp, Homo sapien
cgtcacagtgctgaaagtcactatgggatcatg

SEQ ID NO: 547343 - DNA, 33 bp, Homo sapien
aaattgaagccctgaaacattctcagtctgagt

SEQ ID NO: 547344 - DNA, 33 bp, Homo sapien
aaattgaagccctgaagcattctcagtctgagt

SEQ ID NO: 547345 - DNA, 33 bp, Homo sapien
aagaagaggagtagtacgaacaagtacacttta

SEQ ID NO: 547346 - DNA, 33 bp, Homo sapien
aagaagaggagtagtatgaacaagtacacttta

SEQ ID NO: 547347 - DNA, 33 bp, Homo sapien
tgcacatacattctcacagctttagacaatgca

SEQ ID NO: 547348 - DNA, 33 bp, Homo sapien
tgcacatacattctcatagctttagacaatgca

SEQ ID NO: 547349 - DNA, 33 bp, Homo sapien
aaatgcttactacatacgtccacttgaatgttc

SEQ ID NO: 547350 - DNA, 33 bp, Homo sapien
aaatgcttactacatatgtccacttgaatgttc

SEQ ID NO: 547351 - DNA, 33 bp, Homo sapien
atatcttaaaatgtagcacttaacgtggatgga

SEQ ID NO: 547352 - DNA, 33 bp, Homo sapien
atatcttaaaatgtagtacttaacgtggatgga

SEQ ID NO: 547353 - DNA, 33 bp, Homo sapien
tgttactgggacttcacagagacaaaatgcaag

SEQ ID NO: 547354 - DNA, 33 bp, Homo sapien
tgttactgggacttcatagagacaaaatgcaag

SEQ ID NO: 547355 - DNA, 33 bp, Homo sapien
ggataatggcataacaacctttctcatgaacca

SEQ ID NO: 547356 - DNA, 33 bp, Homo sapien
ggataatggcataacaccctttctcatgaacca

SEQ ID NO: 547357 - DNA, 33 bp, Homo sapien
tagtgatgattcccaaaaatgattcccaagtgt

SEQ ID NO: 547358 - DNA, 33 bp, Homo sapien
tagtgatgattcccaagaatgattcccaagtgt

SEQ ID NO: 547359 - DNA, 33 bp, Homo sapien
ctagatggaattttcaaagttaaaggtatagcg

SEQ ID NO: 547360 - DNA, 33 bp, Homo sapien
ctagatggaattttcacagttaaaggtatagcg

SEQ ID NO: 547361 - DNA, 33 bp, Homo sapien
taaattaaatagggaacaaattggttattacaa

SEQ ID NO: 547362 - DNA, 33 bp, Homo sapien
taaattaaatagggaagaaattggttattacaa

SEQ ID NO: 547363 - DNA, 33 bp, Homo sapien
tgtggagttgttgacaaaaagtccaaccaaaaa

SEQ ID NO: 547364 - DNA, 33 bp, Homo sapien
tgtggagttgttgacagaaagtccaaccaaaaa

SEQ ID NO: 547365 - DNA, 33 bp, Homo sapien
agggagaaaacattacagagtgtgagaaagaaa

SEQ ID NO: 547366 - DNA, 33 bp, Homo sapien
agggagaaaacattacggagtgtgagaaagaaa

SEQ ID NO: 547367 - DNA, 33 bp, Homo sapien
gtatttaatgactgtgaattggagctgtgattg

SEQ ID NO: 547368 - DNA, 33 bp, Homo sapien
gtatttaatgactgtggattggagctgtgattg

SEQ ID NO: 547369 - DNA, 33 bp, Homo sapien
gaagagagacagacaagtacatacagcacgtga

SEQ ID NO: 547370 - DNA, 33 bp, Homo sapien
gaagagagacagacaattacatacagcacgtga

SEQ ID NO: 547371 - DNA, 33 bp, Homo sapien
tgaactttttcgttaaagagacaccattggaag

SEQ ID NO: 547372 - DNA, 33 bp, Homo sapien
tgaactttttcgttaatgagacaccattggaag

SEQ ID NO: 547373 - DNA, 33 bp, Homo sapien
aggtttgtgggggtacgctatgatgttcacaaa

SEQ ID NO: 547374 - DNA, 33 bp, Homo sapien
aggtttgtgggggtactctatgatgttcacaaa

SEQ ID NO: 547375 - DNA, 33 bp, Homo sapien
ctccccacaggtatagacaaccacatactcaac

SEQ ID NO: 547376 - DNA, 33 bp, Homo sapien
ctccccacaggtatagtcaaccacatactcaac

SEQ ID NO: 547377 - DNA, 33 bp, Homo sapien
acagtttcggtaaatacaagttacacagtctga

SEQ ID NO: 547378 - DNA, 33 bp, Homo sapien
acagtttcggtaaatagaagttacacagtctga

SEQ ID NO: 547379 - DNA, 33 bp, Homo sapien
cccaaacttgaatgcaaaaaatccaccttcaga

SEQ ID NO: 547380 - DNA, 33 bp, Homo sapien
cccaaacttgaatgcagaaaatccaccttcaga

SEQ ID NO: 547381 - DNA, 33 bp, Homo sapien
agctccaacatactcaaatataaacgcccagct

SEQ ID NO: 547382 - DNA, 33 bp, Homo sapien
agctccaacatactcagatataaacgcccagct

SEQ ID NO: 547383 - DNA, 33 bp, Homo sapien
actcaacagataacaaactgacttgggatttcc

SEQ ID NO: 547384 - DNA, 33 bp, Homo sapien
actcaacagataacaagctgacttgggatttcc

SEQ ID NO: 547385 - DNA, 33 bp, Homo sapien
ggcagactgttaagaaagaagaaaactgcctga

SEQ ID NO: 547386 - DNA, 33 bp, Homo sapien
ggcagactgttaagaaggaagaaaactgcctga

SEQ ID NO: 547387 - DNA, 33 bp, Homo sapien; identical to SEQ ID NO: 547385

SEQ ID NO: 547388 - DNA, 33 bp, Homo sapien; identical to SEQ ID NO: 547386

SEQ ID NO: 547389 - DNA, 33 bp, Homo sapien
gggcaagttaattaaaatcatttgtacctcact

SEQ ID NO: 547390 - DNA, 33 bp, Homo sapien
gggcaagttaattaaagtcatttgtacctcact

SEQ ID NO: 547391 - DNA, 33 bp, Homo sapien
gaagactctccagttacgttttagcaacccagg

SEQ ID NO: 547392 - DNA, 33 bp, Homo sapien
gaagactctccagttatgttttagcaacccagg

SEQ ID NO: 547393 - DNA, 33 bp, Homo sapien
ttgagcacctgctaaaaggaaggaatgagagca

SEQ ID NO: 547394 - DNA, 33 bp, Homo sapien
ttgagcacctgctaaatggaaggaatgagagca

SEQ ID NO: 547395 - DNA, 33 bp, Homo sapien
cactgtacttgactgacgttaggttttatccct

SEQ ID NO: 547396 - DNA, 33 bp, Homo sapien
cactgtacttgactgatgttaggttttatccct

SEQ ID NO: 547397 - DNA, 33 bp, Homo sapien
gaggctaccctcaaaaatgtttgtaaagttagt

SEQ ID NO: 547398 - DNA, 33 bp, Homo sapien
gaggctaccctcaaaattgtttgtaaagttagt

SEQ ID NO: 547399 - DNA, 33 bp, Homo sapien
atgagtaaaggttaccactgtgtctatccactc

SEQ ID NO: 547400 - DNA, 33 bp, Homo sapien
atgagtaaaggttaccgctgtgtctatccactc

SEQ ID NO: 547401 - DNA, 33 bp, Homo sapien
actaagtctattaatgcagttattgcttgttgg

SEQ ID NO: 547402 - DNA, 33 bp, Homo sapien
actaagtctattaatgtagttattgcttgttgg

SEQ ID NO: 547403 - DNA, 33 bp, Homo sapien
gtgtttttgcttttgacgatatttttagaatgt

SEQ ID NO: 547404 - DNA, 33 bp, Homo sapien
gtgtttttgcttttgatgatatttttagaatgt

SEQ ID NO: 547405 - DNA, 33 bp, Homo sapien
tgcttgacttgagaacactattctctgattggt

SEQ ID NO: 547406 - DNA, 33 bp, Homo sapien
tgcttgacttgagaacgctattctctgattggt

SEQ ID NO: 547407 - DNA, 33 bp, Homo sapien
tcaaaataaaataaaacggaaggatcgaaacac

SEQ ID NO: 547408 - DNA, 33 bp, Homo sapien
tcaaaataaaataaaatggaaggatcgaaacac

SEQ ID NO: 547409 - DNA, 33 bp, Homo sapien
gcccaagattttatcactgaatccatgccagat

SEQ ID NO: 547410 - DNA, 33 bp, Homo sapien
gcccaagattttatcattgaatccatgccagat

SEQ ID NO: 547411 - DNA, 33 bp, Homo sapien
atgcatctttcaaaaaatttagtggaatctcat

SEQ ID NO: 547412 - DNA, 33 bp, Homo sapien
atgcatctttcaaaaattttagtggaatctcat

SEQ ID NO: 547413 - DNA, 33 bp, Homo sapien
aaactcttttctcagacgtttccaacactctcg

SEQ ID NO: 547414 - DNA, 33 bp, Homo sapien
aaactcttttctcagatgtttccaacactctcg

SEQ ID NO: 547415 - DNA, 33 bp, Homo sapien
cttttttacatcgttacgtcatcccttatactc

SEQ ID NO: 547416 - DNA, 33 bp, Homo sapien
cttttttacatcgttatgtcatcccttatactc

SEQ ID NO: 547417 - DNA, 33 bp, Homo sapien
gaaagacacatttagtaaccccatgtccccttc

SEQ ID NO: 547418 - DNA, 33 bp, Homo sapien
gaaagacacatttagtgaccccatgtccccttc

SEQ ID NO: 547419 - DNA, 33 bp, Homo sapien
agctgcttctagacacaaaagggaaatggagaa

SEQ ID NO: 547420 - DNA, 33 bp, Homo sapien
agctgcttctagacacgaaagggaaatggagaa

SEQ ID NO: 547421 - DNA, 33 bp, Homo sapien
tgagagcaaaacatcaatgatgacatctcatcg

SEQ ID NO: 547422 - DNA, 33 bp, Homo sapien
tgagagcaaaacatcagtgatgacatctcatcg

SEQ ID NO: 547423 - DNA, 33 bp, Homo sapien
caaagcaggtcacaaagccatccaagactggga

SEQ ID NO: 547424 - DNA, 33 bp, Homo sapien
caaagcaggtcacaaatccatccaagactggga

SEQ ID NO: 547425 - DNA, 33 bp, Homo sapien
ttagactttagatccacgtagatcaagaagatc

SEQ ID NO: 547426 - DNA, 33 bp, Homo sapien
ttagactttagatccatgtagatcaagaagatc

SEQ ID NO: 547427 - DNA, 33 bp, Homo sapien
tgaaggaaaaggaggaagaacagcagtatatct

SEQ ID NO: 547428 - DNA, 33 bp, Homo sapien
tgaaggaaaaggaggaggaacagcagtatatct

SEQ ID NO: 547429 - DNA, 33 bp, Homo sapien
ttaatcctcacgataactctataaacctggtac

SEQ ID NO: 547430 - DNA, 33 bp, Homo sapien
ttaatcctcacgataagtctataaacctggtac

SEQ ID NO: 547431 - DNA, 33 bp, Homo sapien
ataaaggcaaaattccacataaaaccgtcagac

SEQ ID NO: 547432 - DNA, 33 bp, Homo sapien
ataaaggcaaaattccgcataaaaccgtcagac

SEQ ID NO: 547433 - DNA, 33 bp, Homo sapien
tcgtgttattttatgcactttgcttatgcttat

SEQ ID NO: 547434 - DNA, 33 bp, Homo sapien
tcgtgttattttatgcgctttgcttatgcttat

SEQ ID NO: 547435 - DNA, 33 bp, Homo sapien
agggaaaaagttctgccgataggtcaaataagg

SEQ ID NO: 547436 - DNA, 33 bp, Homo sapien
agggaaaaagttctgctgataggtcaaataagg

SEQ ID NO: 547437 - DNA, 33 bp, Homo sapien
atattccaaaagccacacccaccattattttta

SEQ ID NO: 547438 - DNA, 33 bp, Homo sapien
atattccaaaagccacgcccaccattattttta

SEQ ID NO: 547439 - DNA, 33 bp, Homo sapien
aatccttttctgcactaaaaattcgagttcatg

SEQ ID NO: 547440 - DNA, 33 bp, Homo sapien
aatccttttctgcactgaaaattcgagttcatg

SEQ ID NO: 547441 - DNA, 33 bp, Homo sapien
tagagaggcaacttctaacaaaatgaggaaaat

SEQ ID NO: 547442 - DNA, 33 bp, Homo sapien
tagagaggcaacttctgacaaaatgaggaaaat

SEQ ID NO: 547443 - DNA, 33 bp, Homo sapien
aattttgtctgaaagacgacataatcagtttta

SEQ ID NO: 547444 - DNA, 33 bp, Homo sapien
aattttgtctgaaagatgacataatcagtttta

SEQ ID NO: 547445 - DNA, 33 bp, Homo sapien
aagtcaccgtcttaaaatcaaacatcatatttg

SEQ ID NO: 547446 - DNA, 33 bp, Homo sapien
aagtcaccgtcttaaattcaaacatcatatttg

SEQ ID NO: 547447 - DNA, 33 bp, Homo sapien
ggctttttgatgtaccagagcgaatcatgagct

SEQ ID NO: 547448 - DNA, 33 bp, Homo sapien
ggctttttgatgtaccggagcgaatcatgagct

SEQ ID NO: 547449 - DNA, 33 bp, Homo sapien
gagctttctctgtccaagtgttcaagctggagg

SEQ ID NO: 547450 - DNA, 33 bp, Homo sapien
gagctttctctgtccaggtgttcaagctggagg

SEQ ID NO: 547451 - DNA, 33 bp, Homo sapien
gtcttggctgagcccaacttttgcattctaagc

SEQ ID NO: 547452 - DNA, 33 bp, Homo sapien
gtcttggctgagcccagcttttgcattctaagc

SEQ ID NO: 547453 - DNA, 33 bp, Homo sapien
atctttcagagcatgacccagtagagatggcag

SEQ ID NO: 547454 - DNA, 33 bp, Homo sapien
atctttcagagcatgatccagtagagatggcag

SEQ ID NO: 547455 - DNA, 33 bp, Homo sapien
agctatctactactcaggcaaataggattatct

SEQ ID NO: 547456 - DNA, 33 bp, Homo sapien
agctatctactactcatgcaaataggattatct

SEQ ID NO: 547457 - DNA, 33 bp, Homo sapien
catccttctcccaagaaacaatgtggcccctca

SEQ ID NO: 547458 - DNA, 33 bp, Homo sapien
catccttctcccaagacacaatgtggcccctca

SEQ ID NO: 547459 - DNA, 33 bp, Homo sapien
aataattcaactgggacggcagattagaaattt

SEQ ID NO: 547460 - DNA, 33 bp, Homo sapien
aataattcaactgggatggcagattagaaattt

SEQ ID NO: 547461 - DNA, 33 bp, Homo sapien
taggccaatccagacaactatttaagttttaaa

SEQ ID NO: 547462 - DNA, 33 bp, Homo sapien
taggccaatccagacacctatttaagttttaaa

SEQ ID NO: 547463 - DNA, 33 bp, Homo sapien
ctctctaattctgtaacgctggccaagaatcaa

SEQ ID NO: 547464 - DNA, 33 bp, Homo sapien
ctctctaattctgtaatgctggccaagaatcaa

SEQ ID NO: 547465 - DNA, 33 bp, Homo sapien
agatgcaagtctacaacggaacagaggattaaa

SEQ ID NO: 547466 - DNA, 33 bp, Homo sapien
agatgcaagtctacaatggaacagaggattaaa

SEQ ID NO: 547467 - DNA, 33 bp, Homo sapien
caccaaagtccatggaaacattggagaagtcaa

SEQ ID NO: 547468 - DNA, 33 bp, Homo sapien
caccaaagtccatggagacattggagaagtcaa

SEQ ID NO: 547469 - DNA, 33 bp, Homo sapien
gtgaggactgatttagcagaggctctaaaagga

SEQ ID NO: 547470 - DNA, 33 bp, Homo sapien
gtgaggactgatttagtagaggctctaaaagga

SEQ ID NO: 547471 - DNA, 33 bp, Homo sapien
acctacctacttcagacggttgtcatgagaatt

SEQ ID NO: 547472 - DNA, 33 bp, Homo sapien
acctacctacttcagatggttgtcatgagaatt

SEQ ID NO: 547473 - DNA, 33 bp, Homo sapien
cccagaatattcaaaacgtcttcttcagaatga

SEQ ID NO: 547474 - DNA, 33 bp, Homo sapien
cccagaatattcaaaatgtcttcttcagaatga

SEQ ID NO: 547475 - DNA, 33 bp, Homo sapien
tcttcttcagaatgaccccagaagtttccatct

SEQ ID NO: 547476 - DNA, 33 bp, Homo sapien
tcttcttcagaatgacgccagaagtttccatct

SEQ ID NO: 547477 - DNA, 33 bp, Homo sapien
aacccagcgatattaactcactaatactactct

SEQ ID NO: 547478 - DNA, 33 bp, Homo sapien
aacccagcgatattaattcactaatactactct

SEQ ID NO: 547479 - DNA, 33 bp, Homo sapien
tattgttttcctaatacgtggcttggaagggag

SEQ ID NO: 547480 - DNA, 33 bp, Homo sapien
tattgttttcctaatatgtggcttggaagggag

SEQ ID NO: 547481 - DNA, 33 bp, Homo sapien
cagccttgcagcttcacgagaaaagttcatgga

SEQ ID NO: 547482 - DNA, 33 bp, Homo sapien
cagccttgcagcttcatgagaaaagttcatgga

SEQ ID NO: 547483 - DNA, 33 bp, Homo sapien
aaaaagagtcttcttgcaactgataaattaata

SEQ ID NO: 547484 - DNA, 33 bp, Homo sapien
aaaaagagtcttcttgtaactgataaattaata

SEQ ID NO: 547485 - DNA, 33 bp, Homo sapien
ctttgaaaggaaaaagaagcctcaaatacttga

SEQ ID NO: 547486 - DNA, 33 bp, Homo sapien
ctttgaaaggaaaaaggagcctcaaatacttga

SEQ ID NO: 547487 - DNA, 33 bp, Homo sapien
tcatgggtgtgaagtgaaatgttgtgattttga

SEQ ID NO: 547488 - DNA, 33 bp, Homo sapien
tcatgggtgtgaagtggaatgttgtgattttga

SEQ ID NO: 547489 - DNA, 33 bp, Homo sapien
cttttgtgattccctacaacaagttttatagaa

SEQ ID NO: 547490 - DNA, 33 bp, Homo sapien
cttttgtgattccctataacaagttttatagaa

SEQ ID NO: 547491 - DNA, 33 bp, Homo sapien
taagaatgtagttcccaaaacaattttttcttg

SEQ ID NO: 547492 - DNA, 33 bp, Homo sapien
taagaatgtagttcccgaaacaattttttcttg

SEQ ID NO: 547493 - DNA, 33 bp, Homo sapien
ctgctggtgacaatgaacccatatttggtctca

SEQ ID NO: 547494 - DNA, 33 bp, Homo sapien
ctgctggtgacaatgaccccatatttggtctca

SEQ ID NO: 547495 - DNA, 33 bp, Homo sapien
ttcttttcttgtttggaaagtatacacgtcttg

SEQ ID NO: 547496 - DNA, 33 bp, Homo sapien
ttcttttcttgtttggcaagtatacacgtcttg

SEQ ID NO: 547497 - DNA, 33 bp, Homo sapien
cacagagaaaagaacactgagagatgggataat

SEQ ID NO: 547498 - DNA, 33 bp, Homo sapien
cacagagaaaagaacattgagagatgggataat

SEQ ID NO: 547499 - DNA, 33 bp, Homo sapien
gttgtggccaggcaaacgtccttggaaagcctt

SEQ ID NO: 547500 - DNA, 33 bp, Homo sapien
gttgtggccaggcaaatgtccttggaaagcctt

SEQ ID NO: 547501 - DNA, 33 bp, Homo sapien
taatttcccacctctcaaacgcatagttagaaa

SEQ ID NO: 547502 - DNA, 33 bp, Homo sapien
taatttcccacctctctaacgcatagttagaaa

SEQ ID NO: 547503 - DNA, 33 bp, Homo sapien
tagtttataaacagtcaagtatatctgtgcttc

SEQ ID NO: 547504 - DNA, 33 bp, Homo sapien
tagtttataaacagtctagtatatctgtgcttc

SEQ ID NO: 547505 - DNA, 33 bp, Homo sapien
aaacattttctccagactaaacgttttcctttg

SEQ ID NO: 547506 - DNA, 33 bp, Homo sapien
aaacattttctccagattaaacgttttcctttg

SEQ ID NO: 547507 - DNA, 33 bp, Homo sapien
ggaatagggctaggaacaagacttcgtttccac

SEQ ID NO: 547508 - DNA, 33 bp, Homo sapien
ggaatagggctaggaataagacttcgtttccac

SEQ ID NO: 547509 - DNA, 33 bp, Homo sapien
tggtggatggtgaaaacatactatttgttctag

SEQ ID NO: 547510 - DNA, 33 bp, Homo sapien
tggtggatggtgaaaatatactatttgttctag

SEQ ID NO: 547511 - DNA, 33 bp, Homo sapien
aacagtaagtctgtgacacaaggtgtattatct

SEQ ID NO: 547512 - DNA, 33 bp, Homo sapien
aacagtaagtctgtgatacaaggtgtattatct

SEQ ID NO: 547513 - DNA, 33 bp, Homo sapien
atctctggaaagataaacaaaacccagcagtga

SEQ ID NO: 547514 - DNA, 33 bp, Homo sapien
atctctggaaagataatcaaaacccagcagtga

SEQ ID NO: 547515 - DNA, 33 bp, Homo sapien
gagaggattggaaaagaataagtccgtggagtt

SEQ ID NO: 547516 - DNA, 33 bp, Homo sapien
gagaggattggaaaagcataagtccgtggagtt

SEQ ID NO: 547517 - DNA, 33 bp, Homo sapien
gccaacatccctcttgcatcactgaatcataag

SEQ ID NO: 547518 - DNA, 33 bp, Homo sapien
gccaacatccctcttggatcactgaatcataag

SEQ ID NO: 547519 - DNA, 33 bp, Homo sapien
cctgcatccagaactccccgggccccgtcacgg

SEQ ID NO: 547520 - DNA, 33 bp, Homo sapien
cctgcatccagaactctccgggccccgtcacgg

SEQ ID NO: 547521 - DNA, 33 bp, Homo sapien
aagcaagtgatatttacgtatacatctctaagg

SEQ ID NO: 547522 - DNA, 33 bp, Homo sapien
aagcaagtgatatttatgtatacatctctaagg

SEQ ID NO: 547523 - DNA, 33 bp, Homo sapien
gttggatggagcatccactatggaatagaaaca

SEQ ID NO: 547524 - DNA, 33 bp, Homo sapien
gttggatggagcatccgctatggaatagaaaca

SEQ ID NO: 547525 - DNA, 33 bp, Homo sapien
agaatcttccttctggaatcctactttttatgt

SEQ ID NO: 547526 - DNA, 33 bp, Homo sapien
agaatcttccttctgggatcctactttttatgt

SEQ ID NO: 547527 - DNA, 33 bp, Homo sapien
agacaggggtcataaactcaagtgcctagagga

SEQ ID NO: 547528 - DNA, 33 bp, Homo sapien
agacaggggtcataaattcaagtgcctagagga

SEQ ID NO: 547529 - DNA, 33 bp, Homo sapien
atacataaataatgcacgaattttttgctatgt

SEQ ID NO: 547530 - DNA, 33 bp, Homo sapien
atacataaataatgcatgaattttttgctatgt

SEQ ID NO: 547531 - DNA, 33 bp, Homo sapien
tactgcccatgtagtcaccctcatcctaacata

SEQ ID NO: 547532 - DNA, 33 bp, Homo sapien
tactgcccatgtagtcgccctcatcctaacata

SEQ ID NO: 547533 - DNA, 33 bp, Homo sapien
caggacacaagcaacactgcgtttggccagatg

SEQ ID NO: 547534 - DNA, 33 bp, Homo sapien
caggacacaagcaacattgcgtttggccagatg

SEQ ID NO: 547535 - DNA, 33 bp, Homo sapien
actgtcctggttaaaccgcaaagactgcagctc

SEQ ID NO: 547536 - DNA, 33 bp, Homo sapien
actgtcctggttaaactgcaaagactgcagctc

SEQ ID NO: 547537 - DNA, 33 bp, Homo sapien
aatttcacagttactcagaaagttaaacataaa

SEQ ID NO: 547538 - DNA, 33 bp, Homo sapien
aatttcacagttactcggaaagttaaacataaa

SEQ ID NO: 547539 - DNA, 33 bp, Homo sapien
taattgacaaccatcaagcaaataacaatgcat

SEQ ID NO: 547540 - DNA, 33 bp, Homo sapien
taattgacaaccatcaggcaaataacaatgcat

SEQ ID NO: 547541 - DNA, 33 bp, Homo sapien
ccagaaccttctaacaaatatagctccattcct

SEQ ID NO: 547542 - DNA, 33 bp, Homo sapien
ccagaaccttctaacagatatagctccattcct

SEQ ID NO: 547543 - DNA, 33 bp, Homo sapien
cctaatgacagtaagaatctgagtttcatcata

SEQ ID NO: 547544 - DNA, 33 bp, Homo sapien
cctaatgacagtaagactctgagtttcatcata

SEQ ID NO: 547545 - DNA, 33 bp, Homo sapien
attgcagtagaatagaataagtaagaccaactt

SEQ ID NO: 547546 - DNA, 33 bp, Homo sapien
attgcagtagaatagagtaagtaagaccaactt

SEQ ID NO: 547547 - DNA, 33 bp, Homo sapien
tgggtgaagatcaatgaatctcaacctgaacac

SEQ ID NO: 547548 - DNA, 33 bp, Homo sapien
tgggtgaagatcaatgcatctcaacctgaacac

SEQ ID NO: 547549 - DNA, 33 bp, Homo sapien
ctgcacctttgtcctcagaagtaaaacctagcc

SEQ ID NO: 547550 - DNA, 33 bp, Homo sapien
ctgcacctttgtcctccgaagtaaaacctagcc

SEQ ID NO: 547551 - DNA, 33 bp, Homo sapien
tgaaagttatgaaagaacctgatggagactcca

SEQ ID NO: 547552 - DNA, 33 bp, Homo sapien
tgaaagttatgaaagagcctgatggagactcca

SEQ ID NO: 547553 - DNA, 33 bp, Homo sapien
gtctagtttaaggtgccagtggatgtgtgcatg

SEQ ID NO: 547554 - DNA, 33 bp, Homo sapien
gtctagtttaaggtgctagtggatgtgtgcatg

SEQ ID NO: 547555 - DNA, 33 bp, Homo sapien
actggcatctaaaaccagcaattacttgtaaga

SEQ ID NO: 547556 - DNA, 33 bp, Homo sapien
actggcatctaaaaccggcaattacttgtaaga

SEQ ID NO: 547557 - DNA, 33 bp, Homo sapien
gctttgttccacatcaagtcttttatgctaagc

SEQ ID NO: 547558 - DNA, 33 bp, Homo sapien
gctttgttccacatcacgtcttttatgctaagc

SEQ ID NO: 547559 - DNA, 33 bp, Homo sapien
aaaagaaaacaaagcccggactgaagtgcatgg

SEQ ID NO: 547560 - DNA, 33 bp, Homo sapien
aaaagaaaacaaagcctggactgaagtgcatgg

SEQ ID NO: 547561 - DNA, 33 bp, Homo sapien
ttgttccagtaattagaaagttctctggacaaa

SEQ ID NO: 547562 - DNA, 33 bp, Homo sapien
ttgttccagtaattaggaagttctctggacaaa

SEQ ID NO: 547563 - DNA, 33 bp, Homo sapien
atggtcttgggttacaacaaaagattcttagat

SEQ ID NO: 547564 - DNA, 33 bp, Homo sapien
atggtcttgggttacatcaaaagattcttagat

SEQ ID NO: 547565 - DNA, 33 bp, Homo sapien
atggaaggtatttataaggaccagaaatctaag

SEQ ID NO: 547566 - DNA, 33 bp, Homo sapien
atggaaggtatttatatggaccagaaatctaag

SEQ ID NO: 547567 - DNA, 33 bp, Homo sapien
ggctagcaggctatagaaagggttgtaattggt

SEQ ID NO: 547568 - DNA, 33 bp, Homo sapien
ggctagcaggctataggaagggttgtaattggt

SEQ ID NO: 547569 - DNA, 33 bp, Homo sapien
aacttcattggaagtacctaaatatgtgctttg

SEQ ID NO: 547570 - DNA, 33 bp, Homo sapien
aacttcattggaagtatctaaatatgtgctttg

SEQ ID NO: 547571 - DNA, 33 bp, Homo sapien
atcaaatacagaaacaagcgtggttttaaaatg

SEQ ID NO: 547572 - DNA, 33 bp, Homo sapien
atcaaatacagaaacaggcgtggttttaaaatg

SEQ ID NO: 547573 - DNA, 33 bp, Homo sapien
agctgagaaattcttacgtgggtcagagttagc

SEQ ID NO: 547574 - DNA, 33 bp, Homo sapien
agctgagaaattcttatgtgggtcagagttagc

SEQ ID NO: 547575 - DNA, 33 bp, Homo sapien
atcatcttaacacgggaagtattcctgaggttc

SEQ ID NO: 547576 - DNA, 33 bp, Homo sapien
atcatcttaacacgggcagtattcctgaggttc

SEQ ID NO: 547577 - DNA, 33 bp, Homo sapien
aatgaagacaaacaaacggaaggtgccgaaagc

SEQ ID NO: 547578 - DNA, 33 bp, Homo sapien
aatgaagacaaacaaatggaaggtgccgaaagc

SEQ ID NO: 547579 - DNA, 33 bp, Homo sapien
cccgcgtcctcctggcacattgccactgtggct

SEQ ID NO: 547580 - DNA, 33 bp, Homo sapien
cccgcgtcctcctggcgcattgccactgtggct

SEQ ID NO: 547581 - DNA, 33 bp, Homo sapien
ttttttgtttttggaactcatcacagaatttta

SEQ ID NO: 547582 - DNA, 33 bp, Homo sapien
ttttttgtttttggaagtcatcacagaatttta

SEQ ID NO: 547583 - DNA, 33 bp, Homo sapien
agagtttctagcagataataacagtgacaattg

SEQ ID NO: 547584 - DNA, 33 bp, Homo sapien
agagtttctagcagatgataacagtgacaattg

SEQ ID NO: 547585 - DNA, 33 bp, Homo sapien
agggcagcgtgctaaacacgggaaggcaagacc

SEQ ID NO: 547586 - DNA, 33 bp, Homo sapien
agggcagcgtgctaaatacgggaaggcaagacc

SEQ ID NO: 547587 - DNA, 33 bp, Homo sapien
ttttactgattcatcaacaccttaaatgatcac

SEQ ID NO: 547588 - DNA, 33 bp, Homo sapien
ttttactgattcatcagcaccttaaatgatcac

SEQ ID NO: 547589 - DNA, 33 bp, Homo sapien
tagttatctttgacatcaacaagaacaagattc

SEQ ID NO: 547590 - DNA, 33 bp, Homo sapien
tagttatctttgacatgaacaagaacaagattc

SEQ ID NO: 547591 - DNA, 33 bp, Homo sapien
ggccagacattactcagggaaaatagaagatgc

SEQ ID NO: 547592 - DNA, 33 bp, Homo sapien
ggccagacattactcatggaaaatagaagatgc

SEQ ID NO: 547593 - DNA, 33 bp, Homo sapien
acctgactcaaactcaagtatctaggattatag

SEQ ID NO: 547594 - DNA, 33 bp, Homo sapien
acctgactcaaactcaggtatctaggattatag

SEQ ID NO: 547595 - DNA, 33 bp, Homo sapien
tggagacaaaggactgaaactgaaggaaaaatc

SEQ ID NO: 547596 - DNA, 33 bp, Homo sapien
tggagacaaaggactggaactgaaggaaaaatc

SEQ ID NO: 547597 - DNA, 33 bp, Homo sapien
gaagagacgagggtctaacagagctgaaattga

SEQ ID NO: 547598 - DNA, 33 bp, Homo sapien
gaagagacgagggtcttacagagctgaaattga

SEQ ID NO: 547599 - DNA, 33 bp, Homo sapien
cccaagaggtatgagacaatcatgacaaaggat

SEQ ID NO: 547600 - DNA, 33 bp, Homo sapien
cccaagaggtatgagagaatcatgacaaaggat

SEQ ID NO: 547601 - DNA, 33 bp, Homo sapien
gccactcctctgccgccattgggaagtggttcc

SEQ ID NO: 547602 - DNA, 33 bp, Homo sapien
gccactcctctgccgctattgggaagtggttcc

SEQ ID NO: 547603 - DNA, 33 bp, Homo sapien
tcagaaaccaacagcaatactttaaaaccaaag

SEQ ID NO: 547604 - DNA, 33 bp, Homo sapien
tcagaaaccaacagcagtactttaaaaccaaag

SEQ ID NO: 547605 - DNA, 33 bp, Homo sapien
tagattgcaataaatacccagatttggcagata

SEQ ID NO: 547606 - DNA, 33 bp, Homo sapien
tagattgcaataaatatccagatttggcagata

SEQ ID NO: 547607 - DNA, 33 bp, Homo sapien
gagttaaaccaatagaacattctgtcctaaggc

SEQ ID NO: 547608 - DNA, 33 bp, Homo sapien
gagttaaaccaatagagcattctgtcctaaggc

SEQ ID NO: 547609 - DNA, 33 bp, Homo sapien
aacataaacctcatcaccaacaagaaatctaag

SEQ ID NO: 547610 - DNA, 33 bp, Homo sapien
aacataaacctcatcatcaacaagaaatctaag

SEQ ID NO: 547611 - DNA, 33 bp, Homo sapien
taacagctcagttgcaaggagaacagatccatg

SEQ ID NO: 547612 - DNA, 33 bp, Homo sapien
taacagctcagttgcagggagaacagatccatg

SEQ ID NO: 547613 - DNA, 33 bp, Homo sapien
acagaggaggaagacacgaagagcctgcaggca

SEQ ID NO: 547614 - DNA, 33 bp, Homo sapien
acagaggaggaagacatgaagagcctgcaggca

SEQ ID NO: 547615 - DNA, 33 bp, Homo sapien
agtgacaactgtagaacatttggatcttgagtg

SEQ ID NO: 547616 - DNA, 33 bp, Homo sapien
agtgacaactgtagaatatttggatcttgagtg

SEQ ID NO: 547617 - DNA, 33 bp, Homo sapien
ttactcatgagtttcacgttggtttgcatcact

SEQ ID NO: 547618 - DNA, 33 bp, Homo sapien
ttactcatgagtttcatgttggtttgcatcact

SEQ ID NO: 547619 - DNA, 33 bp, Homo sapien
tgtagattccgcataccggccctttgtcggatg

SEQ ID NO: 547620 - DNA, 33 bp, Homo sapien
tgtagattccgcatactggccctttgtcggatg

SEQ ID NO: 547621 - DNA, 33 bp, Homo sapien
ctgaatatttatggaaccaaaattatgacaata

SEQ ID NO: 547622 - DNA, 33 bp, Homo sapien
ctgaatatttatggaagcaaaattatgacaata

SEQ ID NO: 547623 - DNA, 33 bp, Homo sapien
agacaaagcttttccaactttgtggttattgaa

SEQ ID NO: 547624 - DNA, 33 bp, Homo sapien
agacaaagcttttccacctttgtggttattgaa

SEQ ID NO: 547625 - DNA, 33 bp, Homo sapien
agccttatctgcatgcaataactttgtgggagg

SEQ ID NO: 547626 - DNA, 33 bp, Homo sapien
agccttatctgcatgcgataactttgtgggagg

SEQ ID NO: 547627 - DNA, 33 bp, Homo sapien
tctttgctgctcctaaaactccatggatgcttc

SEQ ID NO: 547628 - DNA, 33 bp, Homo sapien
tctttgctgctcctaagactccatggatgcttc

SEQ ID NO: 547629 - DNA, 33 bp, Homo sapien
agtgtcatattaagcactattatgttctacatt

SEQ ID NO: 547630 - DNA, 33 bp, Homo sapien
agtgtcatattaagcattattatgttctacatt

SEQ ID NO: 547631 - DNA, 33 bp, Homo sapien
ctgtttattgattttcaaatattttccatctgg

SEQ ID NO: 547632 - DNA, 33 bp, Homo sapien
ctgtttattgattttcgaatattttccatctgg

SEQ ID NO: 547633 - DNA, 33 bp, Homo sapien
gagctcagagccaaaccgagagacagacaagac

SEQ ID NO: 547634 - DNA, 33 bp, Homo sapien
gagctcagagccaaactgagagacagacaagac

SEQ ID NO: 547635 - DNA, 33 bp, Homo sapien
cagctgaggagagaggaaatttagtgtgggagc

SEQ ID NO: 547636 - DNA, 33 bp, Homo sapien
cagctgaggagagagggaatttagtgtgggagc

SEQ ID NO: 547637 - DNA, 33 bp, Homo sapien
catttttattattgaaaaccaaccctctcaatt

SEQ ID NO: 547638 - DNA, 33 bp, Homo sapien
catttttattattgaacaccaaccctctcaatt

SEQ ID NO: 547639 - DNA, 33 bp, Homo sapien
cagtaaccatgagcacagagatagcaatggagg

SEQ ID NO: 547640 - DNA, 33 bp, Homo sapien
cagtaaccatgagcaccgagatagcaatggagg

SEQ ID NO: 547641 - DNA, 33 bp, Homo sapien
ttaaaaaagttttgccgatgcatccaccctatg

SEQ ID NO: 547642 - DNA, 33 bp, Homo sapien
ttaaaaaagttttgcctatgcatccaccctatg

SEQ ID NO: 547643 - DNA, 33 bp, Homo sapien
ttgatttgggtgataacgtggcataggaaattt

SEQ ID NO: 547644 - DNA, 33 bp, Homo sapien
ttgatttgggtgataatgtggcataggaaattt

SEQ ID NO: 547645 - DNA, 33 bp, Homo sapien
atatttatagcagacaaaagtgctccatatagt

SEQ ID NO: 547646 - DNA, 33 bp, Homo sapien
atatttatagcagacagaagtgctccatatagt

SEQ ID NO: 547647 - DNA, 33 bp, Homo sapien
ttgagcattgctggataaatagggtgcaataag

SEQ ID NO: 547648 - DNA, 33 bp, Homo sapien
ttgagcattgctggatgaatagggtgcaataag

SEQ ID NO: 547649 - DNA, 33 bp, Homo sapien
gtttaaaaatgagttcaagtgtatttagaaact

SEQ ID NO: 547650 - DNA, 33 bp, Homo sapien
gtttaaaaatgagttcgagtgtatttagaaact

SEQ ID NO: 547651 - DNA, 33 bp, Homo sapien
tggttcgagctcttaacgtcacagttggtattt

SEQ ID NO: 547652 - DNA, 33 bp, Homo sapien
tggttcgagctcttaatgtcacagttggtattt

SEQ ID NO: 547653 - DNA, 33 bp, Homo sapien
tgagatgaggttccaaatgattggaagcaagac

SEQ ID NO: 547654 - DNA, 33 bp, Homo sapien
tgagatgaggttccaactgattggaagcaagac

SEQ ID NO: 547655 - DNA, 33 bp, Homo sapien
ctctttgatgcactgactcaaaattctcttcca

SEQ ID NO: 547656 - DNA, 33 bp, Homo sapien
ctctttgatgcactgattcaaaattctcttcca

SEQ ID NO: 547657 - DNA, 33 bp, Homo sapien
caacaggggagctccacaaatgcaccgtggatg

SEQ ID NO: 547658 - DNA, 33 bp, Homo sapien
caacaggggagctccataaatgcaccgtggatg

SEQ ID NO: 547659 - DNA, 33 bp, Homo sapien
aggccataatgtaaaacttcagctacatctgtc

SEQ ID NO: 547660 - DNA, 33 bp, Homo sapien
aggccataatgtaaaatttcagctacatctgtc

SEQ ID NO: 547661 - DNA, 33 bp, Homo sapien
aatgttctaatggaaaatcagtgtagattaaag

SEQ ID NO: 547662 - DNA, 33 bp, Homo sapien
aatgttctaatggaaagtcagtgtagattaaag

SEQ ID NO: 547663 - DNA, 33 bp, Homo sapien
gtcatgctggttctacacagagtttcaactctt

SEQ ID NO: 547664 - DNA, 33 bp, Homo sapien
gtcatgctggttctacgcagagtttcaactctt

SEQ ID NO: 547665 - DNA, 33 bp, Homo sapien
agatgagagccaataactgaacaatcaagagtt

SEQ ID NO: 547666 - DNA, 33 bp, Homo sapien
agatgagagccaataattgaacaatcaagagtt

SEQ ID NO: 547667 - DNA, 33 bp, Homo sapien
gaagagatggggctagaactgcgttaacagaga

SEQ ID NO: 547668 - DNA, 33 bp, Homo sapien
gaagagatggggctagtactgcgttaacagaga

SEQ ID NO: 547669 - DNA, 33 bp, Homo sapien
aaaaactgcacatttaacccaaactcaggtatg

SEQ ID NO: 547670 - DNA, 33 bp, Homo sapien
aaaaactgcacatttatcccaaactcaggtatg

SEQ ID NO: 547671 - DNA, 33 bp, Homo sapien
atatttcttgctttaaatccaaatcactataga

SEQ ID NO: 547672 - DNA, 33 bp, Homo sapien
atatttcttgctttaattccaaatcactataga

SEQ ID NO: 547673 - DNA, 33 bp, Homo sapien
tacaactgtgggcacactctatagtgatttgga

SEQ ID NO: 547674 - DNA, 33 bp, Homo sapien
tacaactgtgggcacattctatagtgatttgga

SEQ ID NO: 547675 - DNA, 33 bp, Homo sapien
tttgcagagccaatcccaaagacttttgttaat

SEQ ID NO: 547676 - DNA, 33 bp, Homo sapien
tttgcagagccaatcctaaagacttttgttaat

SEQ ID NO: 547677 - DNA, 33 bp, Homo sapien
ttcctgtgttatctctaaatcttcaatacactt

SEQ ID NO: 547678 - DNA, 33 bp, Homo sapien
ttcctgtgttatctctgaatcttcaatacactt

SEQ ID NO: 547679 - DNA, 33 bp, Homo sapien
ctctgtcactggttcccctgtaagacagtactc

SEQ ID NO: 547680 - DNA, 33 bp, Homo sapien
ctctgtcactggttcctctgtaagacagtactc

SEQ ID NO: 547681 - DNA, 33 bp, Homo sapien
acgaagtttctcatagcaagccacatcttactc

SEQ ID NO: 547682 - DNA, 33 bp, Homo sapien
acgaagtttctcataggaagccacatcttactc

SEQ ID NO: 547683 - DNA, 33 bp, Homo sapien
tgtcaggccaaaaaaccatgtggaaaagcacag

SEQ ID NO: 547684 - DNA, 33 bp, Homo sapien
tgtcaggccaaaaaactatgtggaaaagcacag

SEQ ID NO: 547685 - DNA, 33 bp, Homo sapien
ctgcattgcataagacaggcaaaattttcttac

SEQ ID NO: 547686 - DNA, 33 bp, Homo sapien
ctgcattgcataagacgggcaaaattttcttac

SEQ ID NO: 547687 - DNA, 33 bp, Homo sapien
ctaactctgacaaagaaggtgcagtgagggctc

SEQ ID NO: 547688 - DNA, 33 bp, Homo sapien
ctaactctgacaaagacggtgcagtgagggctc

SEQ ID NO: 547689 - DNA, 33 bp, Homo sapien
ccacccttggacatcaaagaaatctcactgcag

SEQ ID NO: 547690 - DNA, 33 bp, Homo sapien
ccacccttggacatcacagaaatctcactgcag

SEQ ID NO: 547691 - DNA, 33 bp, Homo sapien
tccagtgaagaagaataacacccatggactgct

SEQ ID NO: 547692 - DNA, 33 bp, Homo sapien
tccagtgaagaagaatgacacccatggactgct

SEQ ID NO: 547693 - DNA, 33 bp, Homo sapien
gaaataggacgtcgaaactgaatgcattacatg

SEQ ID NO: 547694 - DNA, 33 bp, Homo sapien
gaaataggacgtcgaagctgaatgcattacatg

SEQ ID NO: 547695 - DNA, 33 bp, Homo sapien
aacaaaggttgacctacgtgcagttttatatac

SEQ ID NO: 547696 - DNA, 33 bp, Homo sapien
aacaaaggttgacctatgtgcagttttatatac

SEQ ID NO: 547697 - DNA, 33 bp, Homo sapien
agtcatgtgcaaatacggtaccattctatataa

SEQ ID NO: 547698 - DNA, 33 bp, Homo sapien
agtcatgtgcaaatactgtaccattctatataa

SEQ ID NO: 547699 - DNA, 33 bp, Homo sapien
atggaggcccaggaaacacctattgtagtagaa

SEQ ID NO: 547700 - DNA, 33 bp, Homo sapien
atggaggcccaggaaagacctattgtagtagaa

SEQ ID NO: 547701 - DNA, 33 bp, Homo sapien
cctctctgctattgtgcatcctctccccactgt

SEQ ID NO: 547702 - DNA, 33 bp, Homo sapien
cctctctgctattgtgtatcctctccccactgt

SEQ ID NO: 547703 - DNA, 33 bp, Homo sapien
ggtgctcctgctaaagaagaagatatagaactt

SEQ ID NO: 547704 - DNA, 33 bp, Homo sapien
ggtgctcctgctaaaggagaagatatagaactt

SEQ ID NO: 547705 - DNA, 33 bp, Homo sapien
aagaagctacttatcacgaaaaaaggcaaggat

SEQ ID NO: 547706 - DNA, 33 bp, Homo sapien
aagaagctacttatcaggaaaaaaggcaaggat

SEQ ID NO: 547707 - DNA, 33 bp, Homo sapien
tgtactgtctattggaaaattcacttaaccaga

SEQ ID NO: 547708 - DNA, 33 bp, Homo sapien
tgtactgtctattggacaattcacttaaccaga

SEQ ID NO: 547709 - DNA, 33 bp, Homo sapien
ttttcaccactgagtacgcagatcttccccttg

SEQ ID NO: 547710 - DNA, 33 bp, Homo sapien
ttttcaccactgagtatgcagatcttccccttg

SEQ ID NO: 547711 - DNA, 33 bp, Homo sapien
ggtccacctggagatcacggactgccaggctat

SEQ ID NO: 547712 - DNA, 33 bp, Homo sapien
ggtccacctggagatcgcggactgccaggctat

SEQ ID NO: 547713 - DNA, 33 bp, Homo sapien
tagatcaaactattcaaagaggcttgttaaaat

SEQ ID NO: 547714 - DNA, 33 bp, Homo sapien
tagatcaaactattcagagaggcttgttaaaat

SEQ ID NO: 547715 - DNA, 33 bp, Homo sapien
aagaacaacaaaaaaagaacctgtatctaggcc

SEQ ID NO: 547716 - DNA, 33 bp, Homo sapien
aagaacaacaaaaaaataacctgtatctaggcc

SEQ ID NO: 547717 - DNA, 33 bp, Homo sapien
actcatctcagacttagaaaaataaatttccaa

SEQ ID NO: 547718 - DNA, 33 bp, Homo sapien
actcatctcagacttataaaaataaatttccaa

SEQ ID NO: 547719 - DNA, 33 bp, Homo sapien
gagagctgtactcagaaaattgggaagagaata

SEQ ID NO: 547720 - DNA, 33 bp, Homo sapien
gagagctgtactcagataattgggaagagaata

SEQ ID NO: 547721 - DNA, 33 bp, Homo sapien
taacaaatagcctaataatgtaagtgaatgatt

SEQ ID NO: 547722 - DNA, 33 bp, Homo sapien
taacaaatagcctaattatgtaagtgaatgatt

SEQ ID NO: 547723 - DNA, 33 bp, Homo sapien
ttctcactaagctagcagagccataaattacac

SEQ ID NO: 547724 - DNA, 33 bp, Homo sapien
ttctcactaagctagcggagccataaattacac

SEQ ID NO: 547725 - DNA, 33 bp, Homo sapien
caaggcactgtcactacggtgattgtatgaagt

SEQ ID NO: 547726 - DNA, 33 bp, Homo sapien
caaggcactgtcactatggtgattgtatgaagt

SEQ ID NO: 547727 - DNA, 33 bp, Homo sapien
aagtttgaatgctgcaagttatgaaatatttgg

SEQ ID NO: 547728 - DNA, 33 bp, Homo sapien
aagtttgaatgctgcacgttatgaaatatttgg

SEQ ID NO: 547729 - DNA, 33 bp, Homo sapien
acataaggtatgcaccaacatttatggaatgag

SEQ ID NO: 547730 - DNA, 33 bp, Homo sapien
acataaggtatgcaccgacatttatggaatgag

SEQ ID NO: 547731 - DNA, 33 bp, Homo sapien
atattcagagcaatgaaaaaatagattccgagt

SEQ ID NO: 547732 - DNA, 33 bp, Homo sapien
atattcagagcaatgagaaaatagattccgagt

SEQ ID NO: 547733 - DNA, 33 bp, Homo sapien
gcttggtgctgaataacatgatagttaagttga

SEQ ID NO: 547734 - DNA, 33 bp, Homo sapien
gcttggtgctgaataagatgatagttaagttga

SEQ ID NO: 547735 - DNA, 33 bp, Homo sapien
gctgggattagggtgacatgagttagatgccaa

SEQ ID NO: 547736 - DNA, 33 bp, Homo sapien
gctgggattagggtgagatgagttagatgccaa

SEQ ID NO: 547737 - DNA, 33 bp, Homo sapien
aaaactaagtgcataaccactgaaggatgattc

SEQ ID NO: 547738 - DNA, 33 bp, Homo sapien
aaaactaagtgcataatcactgaaggatgattc

SEQ ID NO: 547739 - DNA, 33 bp, Homo sapien
tgaaatgtggaacaatcactttggaacctttgt

SEQ ID NO: 547740 - DNA, 33 bp, Homo sapien
tgaaatgtggaacaattactttggaacctttgt

SEQ ID NO: 547741 - DNA, 33 bp, Homo sapien
cggttatgccaggttcaagatgaacaactgagg

SEQ ID NO: 547742 - DNA, 33 bp, Homo sapien
cggttatgccaggttccagatgaacaactgagg

SEQ ID NO: 547743 - DNA, 33 bp, Homo sapien
tgatatatgtagagcacaacatccctcaacaca

SEQ ID NO: 547744 - DNA, 33 bp, Homo sapien
tgatatatgtagagcagaacatccctcaacaca

SEQ ID NO: 547745 - DNA, 33 bp, Homo sapien
aaacaaattgttgaaacttaaacagatgagaag

SEQ ID NO: 547746 - DNA, 33 bp, Homo sapien
aaacaaattgttgaaagttaaacagatgagaag

SEQ ID NO: 547747 - DNA, 33 bp, Homo sapien
caaatgtaaggagtaccaaacccgagtggaact

SEQ ID NO: 547748 - DNA, 33 bp, Homo sapien
caaatgtaaggagtactaaacccgagtggaact

SEQ ID NO: 547749 - DNA, 33 bp, Homo sapien
ctgacagcattctcacactggaggacttcatct

SEQ ID NO: 547750 - DNA, 33 bp, Homo sapien
ctgacagcattctcacgctggaggacttcatct

SEQ ID NO: 547751 - DNA, 33 bp, Homo sapien
tcatttctaaagctaggattgtaaccaaaacac

SEQ ID NO: 547752 - DNA, 33 bp, Homo sapien
tcatttctaaagctagtattgtaaccaaaacac

SEQ ID NO: 547753 - DNA, 33 bp, Homo sapien
gatatgatgataagggaagagcttctggaaggt

SEQ ID NO: 547754 - DNA, 33 bp, Homo sapien
gatatgatgataagggtagagcttctggaaggt

SEQ ID NO: 547755 - DNA, 33 bp, Homo sapien
cccatgacaagacgaacgacagcatcgttgagg

SEQ ID NO: 547756 - DNA, 33 bp, Homo sapien
cccatgacaagacgaatgacagcatcgttgagg

SEQ ID NO: 547757 - DNA, 33 bp, Homo sapien
gaaaagatgatgtagacactgctggtttggact

SEQ ID NO: 547758 - DNA, 33 bp, Homo sapien
gaaaagatgatgtagatactgctggtttggact

SEQ ID NO: 547759 - DNA, 33 bp, Homo sapien
agattgttggaatcaccactctccacaaacagt

SEQ ID NO: 547760 - DNA, 33 bp, Homo sapien
agattgttggaatcactactctccacaaacagt

SEQ ID NO: 547761 - DNA, 33 bp, Homo sapien
accaaccttaccaataccttgttgtcggacttc

SEQ ID NO: 547762 - DNA, 33 bp, Homo sapien
accaaccttaccaatatcttgttgtcggacttc

SEQ ID NO: 547763 - DNA, 33 bp, Homo sapien
caaaaccttgcttccacgtgtggtcttcccccg

SEQ ID NO: 547764 - DNA, 33 bp, Homo sapien
caaaaccttgcttccaggtgtggtcttcccccg

SEQ ID NO: 547765 - DNA, 33 bp, Homo sapien
taaaaaccagtaataacctgaccttcaagcatg

SEQ ID NO: 547766 - DNA, 33 bp, Homo sapien
taaaaaccagtaataatctgaccttcaagcatg

SEQ ID NO: 547767 - DNA, 33 bp, Homo sapien
agagagagagagacaaatgtaggtgcagtattt

SEQ ID NO: 547768 - DNA, 33 bp, Homo sapien
agagagagagagacaagtgtaggtgcagtattt

SEQ ID NO: 547769 - DNA, 33 bp, Homo sapien
aaaacctaagcttgagacagggcatggtaattc

SEQ ID NO: 547770 - DNA, 33 bp, Homo sapien
aaaacctaagcttgaggcagggcatggtaattc

SEQ ID NO: 547771 - DNA, 33 bp, Homo sapien
atttcaaacaactcaaataagtttcctgtcccc

SEQ ID NO: 547772 - DNA, 33 bp, Homo sapien
atttcaaacaactcaagtaagtttcctgtcccc

SEQ ID NO: 547773 - DNA, 33 bp, Homo sapien
aggattatctaagatcaaacacacagaatgaca

SEQ ID NO: 547774 - DNA, 33 bp, Homo sapien
aggattatctaagatccaacacacagaatgaca

SEQ ID NO: 547775 - DNA, 33 bp, Homo sapien
gttacttggtattttgcatagattattgggcca

SEQ ID NO: 547776 - DNA, 33 bp, Homo sapien
gttacttggtattttgtatagattattgggcca

SEQ ID NO: 547777 - DNA, 33 bp, Homo sapien
tgggctatggagtgataaaataagcaatgactg

SEQ ID NO: 547778 - DNA, 33 bp, Homo sapien
tgggctatggagtgatgaaataagcaatgactg

SEQ ID NO: 547779 - DNA, 33 bp, Homo sapien
atactactagaaaagccgaaaacaaagtgtgac

SEQ ID NO: 547780 - DNA, 33 bp, Homo sapien
atactactagaaaagctgaaaacaaagtgtgac

SEQ ID NO: 547781 - DNA, 33 bp, Homo sapien
ggtccttatctggtcaggggggaaatcgcttct

SEQ ID NO: 547782 - DNA, 33 bp, Homo sapien
ggtccttatctggtcatgggggaaatcgcttct

SEQ ID NO: 547783 - DNA, 33 bp, Homo sapien
tttcttcttgtaacagacatatacattttattc

SEQ ID NO: 547784 - DNA, 33 bp, Homo sapien
tttcttcttgtaacaggcatatacattttattc

SEQ ID NO: 547785 - DNA, 33 bp, Homo sapien
atttgccatgaaacacaggtaaacttaaaatgg

SEQ ID NO: 547786 - DNA, 33 bp, Homo sapien
atttgccatgaaacacgggtaaacttaaaatgg

SEQ ID NO: 547787 - DNA, 33 bp, Homo sapien
taaatatattcacagggatgtacaaccaccatc

SEQ ID NO: 547788 - DNA, 33 bp, Homo sapien
taaatatattcacaggtatgtacaaccaccatc

SEQ ID NO: 547789 - DNA, 33 bp, Homo sapien
aaaagagaggtcttaacagtcagaagttttgtt

SEQ ID NO: 547790 - DNA, 33 bp, Homo sapien
aaaagagaggtcttaagagtcagaagttttgtt

SEQ ID NO: 547791 - DNA, 33 bp, Homo sapien
attatgcagacaggtaaccctctacattttaaa

SEQ ID NO: 547792 - DNA, 33 bp, Homo sapien
attatgcagacaggtatccctctacattttaaa

SEQ ID NO: 547793 - DNA, 33 bp, Homo sapien
tacttgggtctttgcacattaaatacctcagtg

SEQ ID NO: 547794 - DNA, 33 bp, Homo sapien
tacttgggtctttgcagattaaatacctcagtg

SEQ ID NO: 547795 - DNA, 33 bp, Homo sapien
tttgttagtttatgtaggaacatcttatgcacc

SEQ ID NO: 547796 - DNA, 33 bp, Homo sapien
tttgttagtttatgtatgaacatcttatgcacc

SEQ ID NO: 547797 - DNA, 33 bp, Homo sapien
tattcatctgttcttccataccattagaagagc

SEQ ID NO: 547798 - DNA, 33 bp, Homo sapien
tattcatctgttcttcgataccattagaagagc

SEQ ID NO: 547799 - DNA, 33 bp, Homo sapien
ccgcagggttcaagtgaaatctgaccctactgt

SEQ ID NO: 547800 - DNA, 33 bp, Homo sapien
ccgcagggttcaagtggaatctgaccctactgt

SEQ ID NO: 547801 - DNA, 33 bp, Homo sapien
aacttaggtgtgataacgtaggatatctgatgg

SEQ ID NO: 547802 - DNA, 33 bp, Homo sapien
aacttaggtgtgataatgtaggatatctgatgg

SEQ ID NO: 547803 - DNA, 33 bp, Homo sapien
ctgcagatggcacaaactgtaagccttagtgtc

SEQ ID NO: 547804 - DNA, 33 bp, Homo sapien
ctgcagatggcacaaagtgtaagccttagtgtc

SEQ ID NO: 547805 - DNA, 33 bp, Homo sapien
ctttgacctgacccaacgagtggaagtgagatg

SEQ ID NO: 547806 - DNA, 33 bp, Homo sapien
ctttgacctgacccaatgagtggaagtgagatg

SEQ ID NO: 547807 - DNA, 33 bp, Homo sapien
tctcccaaagacataacaaggaagacttactta

SEQ ID NO: 547808 - DNA, 33 bp, Homo sapien
tctcccaaagacataataaggaagacttactta

SEQ ID NO: 547809 - DNA, 33 bp, Homo sapien
cattgtaggaagagggcaggccagctgatggga

SEQ ID NO: 547810 - DNA, 33 bp, Homo sapien
cattgtaggaagagggtaggccagctgatggga

SEQ ID NO: 547811 - DNA, 33 bp, Homo sapien
aaataataaagtactaagtttcctggttggctc

SEQ ID NO: 547812 - DNA, 33 bp, Homo sapien
aaataataaagtactacgtttcctggttggctc

SEQ ID NO: 547813 - DNA, 33 bp, Homo sapien
agataaagatgggaaacgaggaaacggaaaaag

SEQ ID NO: 547814 - DNA, 33 bp, Homo sapien
agataaagatgggaaatgaggaaacggaaaaag

SEQ ID NO: 547815 - DNA, 33 bp, Homo sapien
tgctgaaaccttgtaacgtgcaaggcaatacag

SEQ ID NO: 547816 - DNA, 33 bp, Homo sapien
tgctgaaaccttgtaatgtgcaaggcaatacag

SEQ ID NO: 547817 - DNA, 33 bp, Homo sapien
attcagacagcctaaaccaagactccaactcac

SEQ ID NO: 547818 - DNA, 33 bp, Homo sapien
attcagacagcctaaagcaagactccaactcac

SEQ ID NO: 547819 - DNA, 33 bp, Homo sapien
agatggtctgtcaggcacggccacaagaagagg

SEQ ID NO: 547820 - DNA, 33 bp, Homo sapien
agatggtctgtcaggcgcggccacaagaagagg

SEQ ID NO: 547821 - DNA, 33 bp, Homo sapien
gccactgactaataggacacaagcatgacctga

SEQ ID NO: 547822 - DNA, 33 bp, Homo sapien
gccactgactaatagggcacaagcatgacctga

SEQ ID NO: 547823 - DNA, 33 bp, Homo sapien
ttcatatcttgatggacacggagcagtggaggg

SEQ ID NO: 547824 - DNA, 33 bp, Homo sapien
ttcatatcttgatggatacggagcagtggaggg

SEQ ID NO: 547825 - DNA, 33 bp, Homo sapien
tccaaactaataggaacgatctcatggaaaaat

SEQ ID NO: 547826 - DNA, 33 bp, Homo sapien
tccaaactaataggaatgatctcatggaaaaat

SEQ ID NO: 547827 - DNA, 33 bp, Homo sapien
agaaccatagaatctcaacagtcagaaaaagtg

SEQ ID NO: 547828 - DNA, 33 bp, Homo sapien
agaaccatagaatctcgacagtcagaaaaagtg

SEQ ID NO: 547829 - DNA, 33 bp, Homo sapien
ttaaatatttcagaaaacatctttggactttag

SEQ ID NO: 547830 - DNA, 33 bp, Homo sapien
ttaaatatttcagaaaccatctttggactttag

SEQ ID NO: 547831 - DNA, 33 bp, Homo sapien
caggaatggttttggcaaagtattgaagatgaa

SEQ ID NO: 547832 - DNA, 33 bp, Homo sapien
caggaatggttttggcgaagtattgaagatgaa

SEQ ID NO: 547833 - DNA, 33 bp, Homo sapien
cctgtagagaatttaaaagcaatagtaaaactg

SEQ ID NO: 547834 - DNA, 33 bp, Homo sapien
cctgtagagaatttaagagcaatagtaaaactg

SEQ ID NO: 547835 - DNA, 33 bp, Homo sapien
tttctatgtgtaaatacgtttagatacacaaat

SEQ ID NO: 547836 - DNA, 33 bp, Homo sapien
tttctatgtgtaaatatgtttagatacacaaat

SEQ ID NO: 547837 - DNA, 33 bp, Homo sapien
catgcaagatactaccaactaaacatagcaaaa

SEQ ID NO: 547838 - DNA, 33 bp, Homo sapien
catgcaagatactaccgactaaacatagcaaaa

SEQ ID NO: 547839 - DNA, 33 bp, Homo sapien
aaaatgagactcgttacctgactgttagggttt

SEQ ID NO: 547840 - DNA, 33 bp, Homo sapien
aaaatgagactcgttatctgactgttagggttt

SEQ ID NO: 547841 - DNA, 33 bp, Homo sapien
tctgctaggtcaaaaactcatgctataatatat

SEQ ID NO: 547842 - DNA, 33 bp, Homo sapien
tctgctaggtcaaaaattcatgctataatatat

SEQ ID NO: 547843 - DNA, 33 bp, Homo sapien
gtacagtaaaatagcacacggttttgttaaaat

SEQ ID NO: 547844 - DNA, 33 bp, Homo sapien
gtacagtaaaatagcatacggttttgttaaaat

SEQ ID NO: 547845 - DNA, 33 bp, Homo sapien
tccagtctatgatttacgaaagcctaaattcaa

SEQ ID NO: 547846 - DNA, 33 bp, Homo sapien
tccagtctatgatttatgaaagcctaaattcaa

SEQ ID NO: 547847 - DNA, 33 bp, Homo sapien
agtcatcatcttgcaaagtattattagtttcat

SEQ ID NO: 547848 - DNA, 33 bp, Homo sapien
agtcatcatcttgcaaggtattattagtttcat

SEQ ID NO: 547849 - DNA, 33 bp, Homo sapien
atccctatattctagcgcctcatgactcgtgtc

SEQ ID NO: 547850 - DNA, 33 bp, Homo sapien
atccctatattctagctcctcatgactcgtgtc

SEQ ID NO: 547851 - DNA, 33 bp, Homo sapien
aaaaagcctagattcacatgtctgaaattgttg

SEQ ID NO: 547852 - DNA, 33 bp, Homo sapien
aaaaagcctagattcatatgtctgaaattgttg

SEQ ID NO: 547853 - DNA, 33 bp, Homo sapien
ccttccccacaagtccaactgagtcaataactg

SEQ ID NO: 547854 - DNA, 33 bp, Homo sapien
ccttccccacaagtcccactgagtcaataactg

SEQ ID NO: 547855 - DNA, 33 bp, Homo sapien
cctgtctccagtgagaaataaatgtctcttgat

SEQ ID NO: 547856 - DNA, 33 bp, Homo sapien
cctgtctccagtgagagataaatgtctcttgat

SEQ ID NO: 547857 - DNA, 33 bp, Homo sapien
gacagagccaggtgacacagttccttacattgg

SEQ ID NO: 547858 - DNA, 33 bp, Homo sapien
gacagagccaggtgacgcagttccttacattgg

SEQ ID NO: 547859 - DNA, 33 bp, Homo sapien
caagttcagacagaagaaaaggagaagcaattt

SEQ ID NO: 547860 - DNA, 33 bp, Homo sapien
caagttcagacagaaggaaaggagaagcaattt

SEQ ID NO: 547861 - DNA, 33 bp, Homo sapien
catgtatatctgactacctgttttcaatttatt

SEQ ID NO: 547862 - DNA, 33 bp, Homo sapien
catgtatatctgactatctgttttcaatttatt

SEQ ID NO: 547863 - DNA, 33 bp, Homo sapien
ggcctcctgctttctccagcaacctcagtgatc

SEQ ID NO: 547864 - DNA, 33 bp, Homo sapien
ggcctcctgctttctctagcaacctcagtgatc

SEQ ID NO: 547865 - DNA, 33 bp, Homo sapien
atccccctcgccgagaaggtagagagagtgatc

SEQ ID NO: 547866 - DNA, 33 bp, Homo sapien
atccccctcgccgagatggtagagagagtgatc

SEQ ID NO: 547867 - DNA, 33 bp, Homo sapien; identical to SEQ ID NO: 547865

SEQ ID NO: 547868 - DNA, 33 bp, Homo sapien; identical to SEQ ID NO: 547866

SEQ ID NO: 547869 - DNA, 33 bp, Homo sapien
aaaaagtagaatatcaatcaccattttgcaacc

SEQ ID NO: 547870 - DNA, 33 bp, Homo sapien
aaaaagtagaatatcagtcaccattttgcaacc

SEQ ID NO: 547871 - DNA, 33 bp, Homo sapien
agagacataagggccaaactccctcagttggtt

SEQ ID NO: 547872 - DNA, 33 bp, Homo sapien
agagacataagggccagactccctcagttggtt

SEQ ID NO: 547873 - DNA, 33 bp, Homo sapien
tggaacttacgctgcaggttctgatcaacaacc

SEQ ID NO: 547874 - DNA, 33 bp, Homo sapien
tggaacttacgctgcatgttctgatcaacaacc

SEQ ID NO: 547875 - DNA, 33 bp, Homo sapien
tccagagttaaaggccggcccggctaatctcta

SEQ ID NO: 547876 - DNA, 33 bp, Homo sapien
tccagagttaaaggcctgcccggctaatctcta

SEQ ID NO: 547877 - DNA, 33 bp, Homo sapien
atttctgaatgtattaccttgcaccttatatct

SEQ ID NO: 547878 - DNA, 33 bp, Homo sapien
atttctgaatgtattatcttgcaccttatatct

SEQ ID NO: 547879 - DNA, 33 bp, Homo sapien
cctttctccaacgataaatttgagagctccaat

SEQ ID NO: 547880 - DNA, 33 bp, Homo sapien
cctttctccaacgatacatttgagagctccaat

SEQ ID NO: 547881 - DNA, 33 bp, Homo sapien
ccctgctcttgttccacgcctctttaactgtga

SEQ ID NO: 547882 - DNA, 33 bp, Homo sapien
ccctgctcttgttccatgcctctttaactgtga

SEQ ID NO: 547883 - DNA, 33 bp, Homo sapien
gtaggacgaggtggccaagtggttaagatgata

SEQ ID NO: 547884 - DNA, 33 bp, Homo sapien
gtaggacgaggtggccgagtggttaagatgata

SEQ ID NO: 547885 - DNA, 33 bp, Homo sapien
tgaagagcttttaatcacggcagtcggccaggc

SEQ ID NO: 547886 - DNA, 33 bp, Homo sapien
tgaagagcttttaatcgcggcagtcggccaggc

SEQ ID NO: 547887 - DNA, 33 bp, Homo sapien
tgctgtgctctccagaaaggatgaatgctgtgt

SEQ ID NO: 547888 - DNA, 33 bp, Homo sapien
tgctgtgctctccagagaggatgaatgctgtgt

SEQ ID NO: 547889 - DNA, 33 bp, Homo sapien
cgggaaaaagtgaacaaagtgagatcacacttc

SEQ ID NO: 547890 - DNA, 33 bp, Homo sapien
cgggaaaaagtgaacacagtgagatcacacttc

SEQ ID NO: 547891 - DNA, 33 bp, Homo sapien
ccagctggcttcatgacgcaaggtttagtaact

SEQ ID NO: 547892 - DNA, 33 bp, Homo sapien
ccagctggcttcatgatgcaaggtttagtaact

SEQ ID NO: 547893 - DNA, 33 bp, Homo sapien
aatgacggaattgcacaggagaagtgtggatag

SEQ ID NO: 547894 - DNA, 33 bp, Homo sapien
aatgacggaattgcacgggagaagtgtggatag

SEQ ID NO: 547895 - DNA, 33 bp, Homo sapien
acacatatcggcctcaaacagaagacaaagcca

SEQ ID NO: 547896 - DNA, 33 bp, Homo sapien
acacatatcggcctcagacagaagacaaagcca

SEQ ID NO: 547897 - DNA, 33 bp, Homo sapien
gttagcatgattcccaaatgaagattcggaaaa

SEQ ID NO: 547898 - DNA, 33 bp, Homo sapien
gttagcatgattcccagatgaagattcggaaaa

SEQ ID NO: 547899 - DNA, 33 bp, Homo sapien
atattccaagttctaaagtgtgatgtgtaaata

SEQ ID NO: 547900 - DNA, 33 bp, Homo sapien
atattccaagttctaaggtgtgatgtgtaaata

SEQ ID NO: 547901 - DNA, 33 bp, Homo sapien
ggaattttcagatttacgatagagagctaccaa

SEQ ID NO: 547902 - DNA, 33 bp, Homo sapien
ggaattttcagatttatgatagagagctaccaa

SEQ ID NO: 547903 - DNA, 33 bp, Homo sapien
ttatgtaaaatgaatacggcctgtaccccgtac

SEQ ID NO: 547904 - DNA, 33 bp, Homo sapien
ttatgtaaaatgaatatggcctgtaccccgtac

SEQ ID NO: 547905 - DNA, 33 bp, Homo sapien
atttctccttcctccactcctgttgtctcttct

SEQ ID NO: 547906 - DNA, 33 bp, Homo sapien
atttctccttcctccattcctgttgtctcttct

SEQ ID NO: 547907 - DNA, 33 bp, Homo sapien
tttattcattcaaccaagagatgtttattgaac

SEQ ID NO: 547908 - DNA, 33 bp, Homo sapien
tttattcattcaaccaggagatgtttattgaac

SEQ ID NO: 547909 - DNA, 33 bp, Homo sapien
gaagaaaaccacagcactgcggagagaaagctc

SEQ ID NO: 547910 - DNA, 33 bp, Homo sapien
gaagaaaaccacagcattgcggagagaaagctc

SEQ ID NO: 547911 - DNA, 33 bp, Homo sapien
ggtgacattttgacatcatgccaatatcctgtt

SEQ ID NO: 547912 - DNA, 33 bp, Homo sapien
ggtgacattttgacatgatgccaatatcctgtt

SEQ ID NO: 547913 - DNA, 33 bp, Homo sapien
tcccaaatactggcttaaaacaagtgccccaga

SEQ ID NO: 547914 - DNA, 33 bp, Homo sapien
tcccaaatactggctttaaacaagtgccccaga

SEQ ID NO: 547915 - DNA, 33 bp, Homo sapien
ttcatgaccagtaaaggctgctgctataatgtc

SEQ ID NO: 547916 - DNA, 33 bp, Homo sapien
ttcatgaccagtaaagtctgctgctataatgtc

SEQ ID NO: 547917 - DNA, 33 bp, Homo sapien; identical to SEQ ID NO: 547915

SEQ ID NO: 547918 - DNA, 33 bp, Homo sapien; identical to SEQ ID NO: 547916

SEQ ID NO: 547919 - DNA, 33 bp, Homo sapien
cagatgccagctagcaaataaaagtggtgcatg

SEQ ID NO: 547920 - DNA, 33 bp, Homo sapien
cagatgccagctagcatataaaagtggtgcatg

SEQ ID NO: 547921 - DNA, 33 bp, Homo sapien
gcttaaaactctccagaccttcatgcggcttgt

SEQ ID NO: 547922 - DNA, 33 bp, Homo sapien
gcttaaaactctccaggccttcatgcggcttgt

SEQ ID NO: 547923 - DNA, 33 bp, Homo sapien
ccgatgaggtatcgcacagagatctcatgattt

SEQ ID NO: 547924 - DNA, 33 bp, Homo sapien
ccgatgaggtatcgcatagagatctcatgattt

SEQ ID NO: 547925 - DNA, 33 bp, Homo sapien
aagactgtttgtgtcacattaaacttttcagca

SEQ ID NO: 547926 - DNA, 33 bp, Homo sapien
aagactgtttgtgtcatattaaacttttcagca

SEQ ID NO: 547927 - DNA, 33 bp, Homo sapien
ctgaaaccaaactctacgatcaaaagcaaacta

SEQ ID NO: 547928 - DNA, 33 bp, Homo sapien
ctgaaaccaaactctaggatcaaaagcaaacta

SEQ ID NO: 547929 - DNA, 33 bp, Homo sapien
acctaaacaggtaatccaagcagctgttgcgta

SEQ ID NO: 547930 - DNA, 33 bp, Homo sapien
acctaaacaggtaatctaagcagctgttgcgta

SEQ ID NO: 547931 - DNA, 33 bp, Homo sapien
gctatgatctctcagaaggaatttttctcaacc

SEQ ID NO: 547932 - DNA, 33 bp, Homo sapien
gctatgatctctcagagggaatttttctcaacc

SEQ ID NO: 547933 - DNA, 33 bp, Homo sapien
accatagtttgatataacagatataattctagc

SEQ ID NO: 547934 - DNA, 33 bp, Homo sapien
accatagtttgatataccagatataattctagc

SEQ ID NO: 547935 - DNA, 33 bp, Homo sapien
ctttgtgccaagcacccgaaataagacttggac

SEQ ID NO: 547936 - DNA, 33 bp, Homo sapien
ctttgtgccaagcacctgaaataagacttggac

SEQ ID NO: 547937 - DNA, 33 bp, Homo sapien
gtaccttcaacacatacgtaagaatctaatctg

SEQ ID NO: 547938 - DNA, 33 bp, Homo sapien
gtaccttcaacacatatgtaagaatctaatctg

SEQ ID NO: 547939 - DNA, 33 bp, Homo sapien
aacaacttgtacaacacagaacatcacacaagt

SEQ ID NO: 547940 - DNA, 33 bp, Homo sapien
aacaacttgtacaacatagaacatcacacaagt

SEQ ID NO: 547941 - DNA, 33 bp, Homo sapien
cacgattgagtgactacagttaatatgaagact

SEQ ID NO: 547942 - DNA, 33 bp, Homo sapien
cacgattgagtgactatagttaatatgaagact

SEQ ID NO: 547943 - DNA, 33 bp, Homo sapien
gtgtgacatgatttgtaaaatggctcttttttg

SEQ ID NO: 547944 - DNA, 33 bp, Homo sapien
gtgtgacatgatttgtgaaatggctcttttttg

SEQ ID NO: 547945 - DNA, 33 bp, Homo sapien
gccactgagtgtgcccaatgaatcccctcctgg

SEQ ID NO: 547946 - DNA, 33 bp, Homo sapien
gccactgagtgtgcccgatgaatcccctcctgg

SEQ ID NO: 547947 - DNA, 33 bp, Homo sapien
aaattcaacacaatcaccaaagaataagaggga

SEQ ID NO: 547948 - DNA, 33 bp, Homo sapien
aaattcaacacaatcatcaaagaataagaggga

SEQ ID NO: 547949 - DNA, 33 bp, Homo sapien
atcttgctgaaatccacgtgaaaaatgatgaag

SEQ ID NO: 547950 - DNA, 33 bp, Homo sapien
atcttgctgaaatccaggtgaaaaatgatgaag

SEQ ID NO: 547951 - DNA, 33 bp, Homo sapien
gtaggaggtgacacagacattgcataacattac

SEQ ID NO: 547952 - DNA, 33 bp, Homo sapien
gtaggaggtgacacaggcattgcataacattac

SEQ ID NO: 547953 - DNA, 33 bp, Homo sapien
caagatgatgcagatacagtgtagaaataaaca

SEQ ID NO: 547954 - DNA, 33 bp, Homo sapien
caagatgatgcagatagagtgtagaaataaaca

SEQ ID NO: 547955 - DNA, 33 bp, Homo sapien
aaaggagtagatgaaaacacagtatagcataat

SEQ ID NO: 547956 - DNA, 33 bp, Homo sapien
aaaggagtagatgaaagcacagtatagcataat

SEQ ID NO: 547957 - DNA, 33 bp, Homo sapien
tttattatctcagtgacgaccatctgtgttggt

SEQ ID NO: 547958 - DNA, 33 bp, Homo sapien
tttattatctcagtgatgaccatctgtgttggt

SEQ ID NO: 547959 - DNA, 33 bp, Homo sapien
tgcagacatagagtagaatcataaatacttgcc

SEQ ID NO: 547960 - DNA, 33 bp, Homo sapien
tgcagacatagagtagcatcataaatacttgcc

SEQ ID NO: 547961 - DNA, 33 bp, Homo sapien
gtggttatcaaggatacggtgtagacatagttt

SEQ ID NO: 547962 - DNA, 33 bp, Homo sapien
gtggttatcaaggatatggtgtagacatagttt

SEQ ID NO: 547963 - DNA, 33 bp, Homo sapien
atagggcggtgttatacgttatcagggagatga

SEQ ID NO: 547964 - DNA, 33 bp, Homo sapien
atagggcggtgttatatgttatcagggagatga

SEQ ID NO: 547965 - DNA, 33 bp, Homo sapien
tgttcttacaaataaaatgatcatcagggagac

SEQ ID NO: 547966 - DNA, 33 bp, Homo sapien
tgttcttacaaataaagtgatcatcagggagac

SEQ ID NO: 547967 - DNA, 33 bp, Homo sapien
atagtataggggcataagtgtcagagagatggc

SEQ ID NO: 547968 - DNA, 33 bp, Homo sapien
atagtataggggcatacgtgtcagagagatggc

SEQ ID NO: 547969 - DNA, 33 bp, Homo sapien
atgctatatctatgtcaccttctttctcttttt

SEQ ID NO: 547970 - DNA, 33 bp, Homo sapien
atgctatatctatgtcgccttctttctcttttt

SEQ ID NO: 547971 - DNA, 33 bp, Homo sapien
atgatgcaaaatagtaaagcactctacaaggtt

SEQ ID NO: 547972 - DNA, 33 bp, Homo sapien
atgatgcaaaatagtatagcactctacaaggtt

SEQ ID NO: 547973 - DNA, 33 bp, Homo sapien
ggcctcaactaaagtcaccaactatcttatccc

SEQ ID NO: 547974 - DNA, 33 bp, Homo sapien
ggcctcaactaaagtcgccaactatcttatccc

SEQ ID NO: 547975 - DNA, 33 bp, Homo sapien
ttgtggtacagttaaacttaggaccacactggc

SEQ ID NO: 547976 - DNA, 33 bp, Homo sapien
ttgtggtacagttaaagttaggaccacactggc

SEQ ID NO: 547977 - DNA, 33 bp, Homo sapien
aagacctcagaaggaacgggagcaccttgatct

SEQ ID NO: 547978 - DNA, 33 bp, Homo sapien
aagacctcagaaggaatgggagcaccttgatct

SEQ ID NO: 547979 - DNA, 33 bp, Homo sapien
cgcaaaaaacacctcactctcagcagacatcac

SEQ ID NO: 547980 - DNA, 33 bp, Homo sapien
cgcaaaaaacacctcattctcagcagacatcac

SEQ ID NO: 547981 - DNA, 33 bp, Homo sapien
atggctcatgactttaacattgattttcaaact

SEQ ID NO: 547982 - DNA, 33 bp, Homo sapien
atggctcatgactttagcattgattttcaaact

SEQ ID NO: 547983 - DNA, 33 bp, Homo sapien
tgaggagctgagtacacggaatcctgtcttcca

SEQ ID NO: 547984 - DNA, 33 bp, Homo sapien
tgaggagctgagtacatggaatcctgtcttcca

SEQ ID NO: 547985 - DNA, 33 bp, Homo sapien
cttaatgtggattcctaaatatctagtaagctc

SEQ ID NO: 547986 - DNA, 33 bp, Homo sapien
cttaatgtggattcctgaatatctagtaagctc

SEQ ID NO: 547987 - DNA, 33 bp, Homo sapien
tggattccaatttgaaacttgccatgttgatgc

SEQ ID NO: 547988 - DNA, 33 bp, Homo sapien
tggattccaatttgaatcttgccatgttgatgc

SEQ ID NO: 547989 - DNA, 33 bp, Homo sapien
tcaggatgaaaatataagagagcattacatttg

SEQ ID NO: 547990 - DNA, 33 bp, Homo sapien
tcaggatgaaaatataggagagcattacatttg

SEQ ID NO: 547991 - DNA, 33 bp, Homo sapien
tagtgtctatgtccgccaagcttgaatttaggt

SEQ ID NO: 547992 - DNA, 33 bp, Homo sapien
tagtgtctatgtccgctaagcttgaatttaggt

SEQ ID NO: 547993 - DNA, 33 bp, Homo sapien
aagggaaaaatgcctcaagggaacacgtgcata

SEQ ID NO: 547994 - DNA, 33 bp, Homo sapien
aagggaaaaatgcctctagggaacacgtgcata

SEQ ID NO: 547995 - DNA, 33 bp, Homo sapien
aagcagatgattatcacatacagtgacaccgtg

SEQ ID NO: 547996 - DNA, 33 bp, Homo sapien
aagcagatgattatcatatacagtgacaccgtg

SEQ ID NO: 547997 - DNA, 33 bp, Homo sapien
tgcgattattggtaccaagtaaagaggtggtga

SEQ ID NO: 547998 - DNA, 33 bp, Homo sapien
tgcgattattggtaccgagtaaagaggtggtga

SEQ ID NO: 547999 - DNA, 33 bp, Homo sapien
gtcctgttgcttgacacagtcggcaagagtatc

SEQ ID NO: 548000 - DNA, 33 bp, Homo sapien
gtcctgttgcttgacatagtcggcaagagtatc

SEQ ID NO: 548001 - DNA, 33 bp, Homo sapien
aaattataccatgccaactaaagaggactactc

SEQ ID NO: 548002 - DNA, 33 bp, Homo sapien
aaattataccatgccatctaaagaggactactc

SEQ ID NO: 548003 - DNA, 33 bp, Homo sapien
ttggtaaaaagcaagacgcctctatattttgat

SEQ ID NO: 548004 - DNA, 33 bp, Homo sapien
ttggtaaaaagcaagatgcctctatattttgat

SEQ ID NO: 548005 - DNA, 33 bp, Homo sapien
cctaatggaaattacaagctagatggtctctaa

SEQ ID NO: 548006 - DNA, 33 bp, Homo sapien
cctaatggaaattacaggctagatggtctctaa

SEQ ID NO: 548007 - DNA, 33 bp, Homo sapien
ggaaccacttctggaccggctgaccgttgggga

SEQ ID NO: 548008 - DNA, 33 bp, Homo sapien
ggaaccacttctggactggctgaccgttgggga

SEQ ID NO: 548009 - DNA, 33 bp, Homo sapien
caaggaagccattgccaagggattgctcaagga

SEQ ID NO: 548010 - DNA, 33 bp, Homo sapien
caaggaagccattgccgagggattgctcaagga

SEQ ID NO: 548011 - DNA, 33 bp, Homo sapien
gacttctgctgaaaaccacctggaaatgacgtc

SEQ ID NO: 548012 - DNA, 33 bp, Homo sapien
gacttctgctgaaaactacctggaaatgacgtc

SEQ ID NO: 548013 - DNA, 33 bp, Homo sapien
ttcacttttgagcctccaaatagctctccaaca

SEQ ID NO: 548014 - DNA, 33 bp, Homo sapien
ttcacttttgagcctctaaatagctctccaaca

SEQ ID NO: 548015 - DNA, 33 bp, Homo sapien
ctctccacatttgctacctgaaccaagataaaa

SEQ ID NO: 548016 - DNA, 33 bp, Homo sapien
ctctccacatttgctagctgaaccaagataaaa

SEQ ID NO: 548017 - DNA, 33 bp, Homo sapien
acaaagcaagacacaaaccaacttcttgcttat

SEQ ID NO: 548018 - DNA, 33 bp, Homo sapien
acaaagcaagacacaatccaacttcttgcttat

SEQ ID NO: 548019 - DNA, 33 bp, Homo sapien
acataggtcaaatcaaagtgtataccctgaata

SEQ ID NO: 548020 - DNA, 33 bp, Homo sapien
acataggtcaaatcaaggtgtataccctgaata

SEQ ID NO: 548021 - DNA, 33 bp, Homo sapien
aaatcacagaatttgacaacaagaagttacttt

SEQ ID NO: 548022 - DNA, 33 bp, Homo sapien
aaatcacagaatttgagaacaagaagttacttt

SEQ ID NO: 548023 - DNA, 33 bp, Homo sapien
cgcgtgttgcttatagacaggaatgcatcctga

SEQ ID NO: 548024 - DNA, 33 bp, Homo sapien
cgcgtgttgcttatagtcaggaatgcatcctga

SEQ ID NO: 548025 - DNA, 33 bp, Homo sapien
ttctttataatgcagcaatgtctcacatttgtg

SEQ ID NO: 548026 - DNA, 33 bp, Homo sapien
ttctttataatgcagctatgtctcacatttgtg

SEQ ID NO: 548027 - DNA, 33 bp, Homo sapien
acattactaattctcacagacatgcaaatcaaa

SEQ ID NO: 548028 - DNA, 33 bp, Homo sapien
acattactaattctcagagacatgcaaatcaaa

SEQ ID NO: 548029 - DNA, 33 bp, Homo sapien
caaatggaggctttgaactattaaatgtcttgc

SEQ ID NO: 548030 - DNA, 33 bp, Homo sapien
caaatggaggctttgatctattaaatgtcttgc

SEQ ID NO: 548031 - DNA, 33 bp, Homo sapien
gatgaagcttagaaacggtgatgcatatattcc

SEQ ID NO: 548032 - DNA, 33 bp, Homo sapien
gatgaagcttagaaactgtgatgcatatattcc

SEQ ID NO: 548033 - DNA, 33 bp, Homo sapien
aaagattagtttgaggacatagcacttaagaga

SEQ ID NO: 548034 - DNA, 33 bp, Homo sapien
aaagattagtttgagggcatagcacttaagaga

SEQ ID NO: 548035 - DNA, 33 bp, Homo sapien
ctgcaaagagtataaaagtaattctatctatcc

SEQ ID NO: 548036 - DNA, 33 bp, Homo sapien
ctgcaaagagtataaaggtaattctatctatcc

SEQ ID NO: 548037 - DNA, 33 bp, Homo sapien
ccaaataagagcttccaaccgatggggcctttc

SEQ ID NO: 548038 - DNA, 33 bp, Homo sapien
ccaaataagagcttccgaccgatggggcctttc

SEQ ID NO: 548039 - DNA, 33 bp, Homo sapien
cagatcaatttttagtaacgtataatgtagcca

SEQ ID NO: 548040 - DNA, 33 bp, Homo sapien
cagatcaatttttagtgacgtataatgtagcca

SEQ ID NO: 548041 - DNA, 33 bp, Homo sapien
ttatggactctaaaaaataaaaacatcacatta

SEQ ID NO: 548042 - DNA, 33 bp, Homo sapien
ttatggactctaaaaagtaaaaacatcacatta

SEQ ID NO: 548043 - DNA, 33 bp, Homo sapien
gtatcagaaatgcaggaaaatttagacaatatc

SEQ ID NO: 548044 - DNA, 33 bp, Homo sapien
gtatcagaaatgcagggaaatttagacaatatc

SEQ ID NO: 548045 - DNA, 33 bp, Homo sapien
tattgactgaaggagaatagagaagtaggagaa

SEQ ID NO: 548046 - DNA, 33 bp, Homo sapien
tattgactgaaggagagtagagaagtaggagaa

SEQ ID NO: 548047 - DNA, 33 bp, Homo sapien
agtagaaacaccaacacactgatgagcaaacta

SEQ ID NO: 548048 - DNA, 33 bp, Homo sapien
agtagaaacaccaacatactgatgagcaaacta

SEQ ID NO: 548049 - DNA, 33 bp, Homo sapien
cctgagactctgcaaacgataaggagataagga

SEQ ID NO: 548050 - DNA, 33 bp, Homo sapien
cctgagactctgcaaatgataaggagataagga

SEQ ID NO: 548051 - DNA, 33 bp, Homo sapien
gggactctgaaaacttcaaatagcttagaacat

SEQ ID NO: 548052 - DNA, 33 bp, Homo sapien
gggactctgaaaacttgaaatagcttagaacat

SEQ ID NO: 548053 - DNA, 33 bp, Homo sapien
tcacacacagtgaaaaggatgctcaaggaactg

SEQ ID NO: 548054 - DNA, 33 bp, Homo sapien
tcacacacagtgaaaatgatgctcaaggaactg

SEQ ID NO: 548055 - DNA, 33 bp, Homo sapien
cggtttcactatatcccaaatagcaaaccttca

SEQ ID NO: 548056 - DNA, 33 bp, Homo sapien
cggtttcactatatcctaaatagcaaaccttca

SEQ ID NO: 548057 - DNA, 33 bp, Homo sapien
agtgaagcatagattgaaaatgcccagctattg

SEQ ID NO: 548058 - DNA, 33 bp, Homo sapien
agtgaagcatagattggaaatgcccagctattg

SEQ ID NO: 548059 - DNA, 33 bp, Homo sapien
aggctgtcctgataaaccaccactcttcacagt

SEQ ID NO: 548060 - DNA, 33 bp, Homo sapien
aggctgtcctgataaatcaccactcttcacagt

SEQ ID NO: 548061 - DNA, 33 bp, Homo sapien
agggatggcctgcatgaaagggatctactagcc

SEQ ID NO: 548062 - DNA, 33 bp, Homo sapien
agggatggcctgcatggaagggatctactagcc

SEQ ID NO: 548063 - DNA, 33 bp, Homo sapien
tgaagtggtctttctacgacgtttcatatctgg

SEQ ID NO: 548064 - DNA, 33 bp, Homo sapien
tgaagtggtctttctatgacgtttcatatctgg

SEQ ID NO: 548065 - DNA, 33 bp, Homo sapien
tctggtcactctagaaagaaatcacatctaaat

SEQ ID NO: 548066 - DNA, 33 bp, Homo sapien
tctggtcactctagaaggaaatcacatctaaat

SEQ ID NO: 548067 - DNA, 33 bp, Homo sapien
cggttgtagtattctacatagttgcattaagtt

SEQ ID NO: 548068 - DNA, 33 bp, Homo sapien
cggttgtagtattctatatagttgcattaagtt

SEQ ID NO: 548069 - DNA, 33 bp, Homo sapien
aggaaacattaataaacacattcagagtagtca

SEQ ID NO: 548070 - DNA, 33 bp, Homo sapien
aggaaacattaataaagacattcagagtagtca

SEQ ID NO: 548071 - DNA, 33 bp, Homo sapien
aagaggagaaaatccacgaggactatgacatga

SEQ ID NO: 548072 - DNA, 33 bp, Homo sapien
aagaggagaaaatccatgaggactatgacatga

SEQ ID NO: 548073 - DNA, 33 bp, Homo sapien
ggtgccatacactttcacacaaccagattttgg

SEQ ID NO: 548074 - DNA, 33 bp, Homo sapien
ggtgccatacactttcgcacaaccagattttgg

SEQ ID NO: 548075 - DNA, 33 bp, Homo sapien
acacaagtgaagtcaacgtacctttttaatcac

SEQ ID NO: 548076 - DNA, 33 bp, Homo sapien
acacaagtgaagtcaatgtacctttttaatcac

SEQ ID NO: 548077 - DNA, 33 bp, Homo sapien
aagaattatgtattcaagtgaaaataagtgggt

SEQ ID NO: 548078 - DNA, 33 bp, Homo sapien
aagaattatgtattcaggtgaaaataagtgggt

SEQ ID NO: 548079 - DNA, 33 bp, Homo sapien
tttttctgttgttttaaagaaaatgattgctct

SEQ ID NO: 548080 - DNA, 33 bp, Homo sapien
tttttctgttgttttacagaaaatgattgctct

SEQ ID NO: 548081 - DNA, 33 bp, Homo sapien
ctggatgcacaatttcaacaaaccttccattta

SEQ ID NO: 548082 - DNA, 33 bp, Homo sapien
ctggatgcacaatttccacaaaccttccattta

SEQ ID NO: 548083 - DNA, 33 bp, Homo sapien
accagttaatgactctaaaatggcctgtagatc

SEQ ID NO: 548084 - DNA, 33 bp, Homo sapien
accagttaatgactctgaaatggcctgtagatc

SEQ ID NO: 548085 - DNA, 33 bp, Homo sapien
tcctcacctcttccaaacttcatagaattgaag

SEQ ID NO: 548086 - DNA, 33 bp, Homo sapien
tcctcacctcttccaaccttcatagaattgaag

SEQ ID NO: 548087 - DNA, 33 bp, Homo sapien
tttttctgtaccagaaaatttcaagtgcttcca

SEQ ID NO: 548088 - DNA, 33 bp, Homo sapien
tttttctgtaccagaacatttcaagtgcttcca

SEQ ID NO: 548089 - DNA, 33 bp, Homo sapien
acctgtcaattatgtcaaattctcctaagaatt

SEQ ID NO: 548090 - DNA, 33 bp, Homo sapien
acctgtcaattatgtcgaattctcctaagaatt

SEQ ID NO: 548091 - DNA, 33 bp, Homo sapien
tgtgatctctcgcaaacgaaccaaactgatcag

SEQ ID NO: 548092 - DNA, 33 bp, Homo sapien
tgtgatctctcgcaaatgaaccaaactgatcag

SEQ ID NO: 548093 - DNA, 33 bp, Homo sapien
cacaaagccttatttacatttcttactcatgct

SEQ ID NO: 548094 - DNA, 33 bp, Homo sapien
cacaaagccttatttatatttcttactcatgct

SEQ ID NO: 548095 - DNA, 33 bp, Homo sapien
tcataatgcatacttacatttatgtgacattct

SEQ ID NO: 548096 - DNA, 33 bp, Homo sapien
tcataatgcatacttatatttatgtgacattct

SEQ ID NO: 548097 - DNA, 33 bp, Homo sapien
cagaaatgtagtcacacagaatttcctgtaatt

SEQ ID NO: 548098 - DNA, 33 bp, Homo sapien
cagaaatgtagtcacatagaatttcctgtaatt

SEQ ID NO: 548099 - DNA, 33 bp, Homo sapien
tatttggtgatctgtacgccagaaagataaaga

SEQ ID NO: 548100 - DNA, 33 bp, Homo sapien
tatttggtgatctgtatgccagaaagataaaga

SEQ ID NO: 548101 - DNA, 33 bp, Homo sapien
ttatattattgggtaactgaggttgatctttgt

SEQ ID NO: 548102 - DNA, 33 bp, Homo sapien
ttatattattgggtaattgaggttgatctttgt

SEQ ID NO: 548103 - DNA, 33 bp, Homo sapien
ctctactgagatctgaggtagccaaactaaata

SEQ ID NO: 548104 - DNA, 33 bp, Homo sapien
ctctactgagatctgatgtagccaaactaaata

SEQ ID NO: 548105 - DNA, 33 bp, Homo sapien
accactagagaacacacggcctagtgagtgaac

SEQ ID NO: 548106 - DNA, 33 bp, Homo sapien
accactagagaacacatggcctagtgagtgaac

SEQ ID NO: 548107 - DNA, 33 bp, Homo sapien
ctggcttcaaactatacaaaacgttacagtaat

SEQ ID NO: 548108 - DNA, 33 bp, Homo sapien
ctggcttcaaactatataaaacgttacagtaat

SEQ ID NO: 548109 - DNA, 33 bp, Homo sapien
ccttgctttgttcagaaccaacagttcccttaa

SEQ ID NO: 548110 - DNA, 33 bp, Homo sapien
ccttgctttgttcagatccaacagttcccttaa

SEQ ID NO: 548111 - DNA, 33 bp, Homo sapien
agcctcttctgcaccccactggctctttgcacg

SEQ ID NO: 548112 - DNA, 33 bp, Homo sapien
agcctcttctgcacccgactggctctttgcacg

SEQ ID NO: 548113 - DNA, 33 bp, Homo sapien
atttcattgtctgggacgaagccttgacatcag

SEQ ID NO: 548114 - DNA, 33 bp, Homo sapien
atttcattgtctgggatgaagccttgacatcag

SEQ ID NO: 548115 - DNA, 33 bp, Homo sapien
accctggttaaagccacgacttcctcatttact

SEQ ID NO: 548116 - DNA, 33 bp, Homo sapien
accctggttaaagccatgacttcctcatttact

SEQ ID NO: 548117 - DNA, 33 bp, Homo sapien
agatttatttgcaagaacaccaatacagaaagg

SEQ ID NO: 548118 - DNA, 33 bp, Homo sapien
agatttatttgcaagagcaccaatacagaaagg

SEQ ID NO: 548119 - DNA, 33 bp, Homo sapien
ataagccactaataacacttgacttcatctggc

SEQ ID NO: 548120 - DNA, 33 bp, Homo sapien
ataagccactaataactcttgacttcatctggc

SEQ ID NO: 548121 - DNA, 33 bp, Homo sapien
tgcatttacatatgaaaaggctagagtgggagg

SEQ ID NO: 548122 - DNA, 33 bp, Homo sapien
tgcatttacatatgaataggctagagtgggagg

SEQ ID NO: 548123 - DNA, 33 bp, Homo sapien
gttatagtattgagtacgcagggtccaaatatt

SEQ ID NO: 548124 - DNA, 33 bp, Homo sapien
gttatagtattgagtatgcagggtccaaatatt

SEQ ID NO: 548125 - DNA, 33 bp, Homo sapien
ccaggcagtaaattcacccctatcacacaccct

SEQ ID NO: 548126 - DNA, 33 bp, Homo sapien
ccaggcagtaaattcatccctatcacacaccct

SEQ ID NO: 548127 - DNA, 33 bp, Homo sapien
ctggaaccttcagcaaatatttggacctttttg

SEQ ID NO: 548128 - DNA, 33 bp, Homo sapien
ctggaaccttcagcaagtatttggacctttttg

SEQ ID NO: 548129 - DNA, 33 bp, Homo sapien
gaagggaataattaagacatatctaaaagtatc

SEQ ID NO: 548130 - DNA, 33 bp, Homo sapien
gaagggaataattaagtcatatctaaaagtatc

SEQ ID NO: 548131 - DNA, 33 bp, Homo sapien
ttgctgtaaaatgtaaaccttgctaaatcaaac

SEQ ID NO: 548132 - DNA, 33 bp, Homo sapien
ttgctgtaaaatgtaatccttgctaaatcaaac

SEQ ID NO: 548133 - DNA, 33 bp, Homo sapien
gagtttcagtaatacccacaccggtggctccca

SEQ ID NO: 548134 - DNA, 33 bp, Homo sapien
gagtttcagtaatacctacaccggtggctccca

SEQ ID NO: 548135 - DNA, 33 bp, Homo sapien
agccagtcttaaatggaagaaccaatgagcagg

SEQ ID NO: 548136 - DNA, 33 bp, Homo sapien
agccagtcttaaatgggagaaccaatgagcagg

SEQ ID NO: 548137 - DNA, 33 bp, Homo sapien
tattagagatgccacaagtatgaattgaagttt

SEQ ID NO: 548138 - DNA, 33 bp, Homo sapien
tattagagatgccacaggtatgaattgaagttt

SEQ ID NO: 548139 - DNA, 33 bp, Homo sapien
gtgttactggtctatcccttcgaattacatata

SEQ ID NO: 548140 - DNA, 33 bp, Homo sapien
gtgttactggtctatctcttcgaattacatata

SEQ ID NO: 548141 - DNA, 33 bp, Homo sapien
actcaaaaatgattgccgaaagaaattagaaat

SEQ ID NO: 548142 - DNA, 33 bp, Homo sapien
actcaaaaatgattgctgaaagaaattagaaat

SEQ ID NO: 548143 - DNA, 33 bp, Homo sapien
tgtctgctgatagatgaacatttccaacttttg

SEQ ID NO: 548144 - DNA, 33 bp, Homo sapien
tgtctgctgatagatggacatttccaacttttg

SEQ ID NO: 548145 - DNA, 33 bp, Homo sapien
cttgtccctactttccaagcatctgattcggct

SEQ ID NO: 548146 - DNA, 33 bp, Homo sapien
cttgtccctactttccgagcatctgattcggct

SEQ ID NO: 548147 - DNA, 33 bp, Homo sapien
ggatttggaggagagcaagagttcttctgggta

SEQ ID NO: 548148 - DNA, 33 bp, Homo sapien
ggatttggaggagagcgagagttcttctgggta

SEQ ID NO: 548149 - DNA, 33 bp, Homo sapien
atagagtttacttagcaaaaaatgtagcaagta

SEQ ID NO: 548150 - DNA, 33 bp, Homo sapien
atagagtttacttagcgaaaaatgtagcaagta

SEQ ID NO: 548151 - DNA, 33 bp, Homo sapien
gagaaggccatttcaaagtggatttcacctggt

SEQ ID NO: 548152 - DNA, 33 bp, Homo sapien
gagaaggccatttcaatgtggatttcacctggt

SEQ ID NO: 548153 - DNA, 33 bp, Homo sapien
tgtacagtttcaaatcagaataagactgaaatg

SEQ ID NO: 548154 - DNA, 33 bp, Homo sapien
tgtacagtttcaaatcggaataagactgaaatg

SEQ ID NO: 548155 - DNA, 33 bp, Homo sapien
acccattgctactaacagaaagtcagaagaaac

SEQ ID NO: 548156 - DNA, 33 bp, Homo sapien
acccattgctactaacggaaagtcagaagaaac

SEQ ID NO: 548157 - DNA, 33 bp, Homo sapien
acatcattaatttccaagcaagaaggtgataaa

SEQ ID NO: 548158 - DNA, 33 bp, Homo sapien
acatcattaatttccaggcaagaaggtgataaa

SEQ ID NO: 548159 - DNA, 33 bp, Homo sapien
catttgttgactgtgcccaagtatgcaatgagc

SEQ ID NO: 548160 - DNA, 33 bp, Homo sapien
catttgttgactgtgctcaagtatgcaatgagc

SEQ ID NO: 548161 - DNA, 33 bp, Homo sapien
aagtacagtatctccaaattcaataaaacgata

SEQ ID NO: 548162 - DNA, 33 bp, Homo sapien
aagtacagtatctccacattcaataaaacgata

SEQ ID NO: 548163 - DNA, 33 bp, Homo sapien
taacccctgagcctgaaataaaagtgaaaaaaa

SEQ ID NO: 548164 - DNA, 33 bp, Homo sapien
taacccctgagcctgagataaaagtgaaaaaaa

SEQ ID NO: 548165 - DNA, 33 bp, Homo sapien
tcaagtgtccctgagaatcatgagttcccctgc

SEQ ID NO: 548166 - DNA, 33 bp, Homo sapien
tcaagtgtccctgagagtcatgagttcccctgc

SEQ ID NO: 548167 - DNA, 33 bp, Homo sapien
tttatttggataattcaattacatctgcctgag

SEQ ID NO: 548168 - DNA, 33 bp, Homo sapien
tttatttggataattcgattacatctgcctgag

SEQ ID NO: 548169 - DNA, 33 bp, Homo sapien
tgtccttcactcatcacctttctgcaaggtata

SEQ ID NO: 548170 - DNA, 33 bp, Homo sapien
tgtccttcactcatcagctttctgcaaggtata

SEQ ID NO: 548171 - DNA, 33 bp, Homo sapien
tcataagattcaaaagactagaaagaaggcatt

SEQ ID NO: 548172 - DNA, 33 bp, Homo sapien
tcataagattcaaaagtctagaaagaaggcatt

SEQ ID NO: 548173 - DNA, 33 bp, Homo sapien
ttgagcactagagatacagcaggaaacaagtta

SEQ ID NO: 548174 - DNA, 33 bp, Homo sapien
ttgagcactagagatatagcaggaaacaagtta

SEQ ID NO: 548175 - DNA, 33 bp, Homo sapien
ttggcaactatgaaaccgatggcttctcataca

SEQ ID NO: 548176 - DNA, 33 bp, Homo sapien
ttggcaactatgaaactgatggcttctcataca

SEQ ID NO: 548177 - DNA, 33 bp, Homo sapien
ttgtttttgtcgttccagattgctattataaga

SEQ ID NO: 548178 - DNA, 33 bp, Homo sapien
ttgtttttgtcgttccggattgctattataaga

SEQ ID NO: 548179 - DNA, 33 bp, Homo sapien
tattttaaaattgtaaataagctccatacagct

SEQ ID NO: 548180 - DNA, 33 bp, Homo sapien
tattttaaaattgtaactaagctccatacagct

SEQ ID NO: 548181 - DNA, 33 bp, Homo sapien
gggaattgggaaaacaatgaacctgagtgtgtg

SEQ ID NO: 548182 - DNA, 33 bp, Homo sapien
gggaattgggaaaacattgaacctgagtgtgtg

SEQ ID NO: 548183 - DNA, 33 bp, Homo sapien
actcacctactatctacggttacataagtgata

SEQ ID NO: 548184 - DNA, 33 bp, Homo sapien
actcacctactatctatggttacataagtgata

SEQ ID NO: 548185 - DNA, 33 bp, Homo sapien
ctttcgaaacatcacacaatttttaatcatttc

SEQ ID NO: 548186 - DNA, 33 bp, Homo sapien
ctttcgaaacatcacataatttttaatcatttc

SEQ ID NO: 548187 - DNA, 33 bp, Homo sapien
taaaggcttgtatccactcaaaaatgaagtttc

SEQ ID NO: 548188 - DNA, 33 bp, Homo sapien
taaaggcttgtatccattcaaaaatgaagtttc

SEQ ID NO: 548189 - DNA, 33 bp, Homo sapien
acttaaatgtttgccgaagtagtgaggtaactc

SEQ ID NO: 548190 - DNA, 33 bp, Homo sapien
acttaaatgtttgccggagtagtgaggtaactc

SEQ ID NO: 548191 - DNA, 33 bp, Homo sapien
tgcagatgatggtggaccagcagctcacagttt

SEQ ID NO: 548192 - DNA, 33 bp, Homo sapien
tgcagatgatggtggatcagcagctcacagttt

SEQ ID NO: 548193 - DNA, 33 bp, Homo sapien
tttattccttaaccaaatatctattgaccagct

SEQ ID NO: 548194 - DNA, 33 bp, Homo sapien
tttattccttaaccaagtatctattgaccagct

SEQ ID NO: 548195 - DNA, 33 bp, Homo sapien
accggcaggatctgaaatgcatcagcttctggc

SEQ ID NO: 548196 - DNA, 33 bp, Homo sapien
accggcaggatctgaagtgcatcagcttctggc

SEQ ID NO: 548197 - DNA, 33 bp, Homo sapien
gcccacctccatgaacgatctctcatcacacca

SEQ ID NO: 548198 - DNA, 33 bp, Homo sapien
gcccacctccatgaactatctctcatcacacca

SEQ ID NO: 548199 - DNA, 33 bp, Homo sapien
tttgatagagtctttacgagaacaactaaataa

SEQ ID NO: 548200 - DNA, 33 bp, Homo sapien
tttgatagagtctttatgagaacaactaaataa

SEQ ID NO: 548201 - DNA, 33 bp, Homo sapien
aattacacagttctgccgacactttgagtttag

SEQ ID NO: 548202 - DNA, 33 bp, Homo sapien
aattacacagttctgctgacactttgagtttag

SEQ ID NO: 548203 - DNA, 33 bp, Homo sapien
cgtacttattgagaacacttaggacagccatta

SEQ ID NO: 548204 - DNA, 33 bp, Homo sapien
cgtacttattgagaacccttaggacagccatta

SEQ ID NO: 548205 - DNA, 33 bp, Homo sapien
gcctgtgatatttaccaaagtgttatataacag

SEQ ID NO: 548206 - DNA, 33 bp, Homo sapien
gcctgtgatatttaccgaagtgttatataacag

SEQ ID NO: 548207 - DNA, 33 bp, Homo sapien
tacatagctacttccacgttgcccagttaatat

SEQ ID NO: 548208 - DNA, 33 bp, Homo sapien
tacatagctacttccatgttgcccagttaatat

SEQ ID NO: 548209 - DNA, 33 bp, Homo sapien
tttagctgtcttaacccacattgtattaggtat

SEQ ID NO: 548210 - DNA, 33 bp, Homo sapien
tttagctgtcttaacctacattgtattaggtat

SEQ ID NO: 548211 - DNA, 33 bp, Homo sapien
tctagaattgagtaagacagtgcttataagagg

SEQ ID NO: 548212 - DNA, 33 bp, Homo sapien
tctagaattgagtaagtcagtgcttataagagg

SEQ ID NO: 548213 - DNA, 33 bp, Homo sapien
ctaacattacatcatcaaagcaagtcatcaatc

SEQ ID NO: 548214 - DNA, 33 bp, Homo sapien
ctaacattacatcatcgaagcaagtcatcaatc

SEQ ID NO: 548215 - DNA, 33 bp, Homo sapien
aaacaaataatacaggacagttttttcagttta

SEQ ID NO: 548216 - DNA, 33 bp, Homo sapien
aaacaaataatacaggccagttttttcagttta

SEQ ID NO: 548217 - DNA, 33 bp, Homo sapien
catggtatgctgggggccataacacgtttgctt

SEQ ID NO: 548218 - DNA, 33 bp, Homo sapien
catggtatgctgggggtcataacacgtttgctt

SEQ ID NO: 548219 - DNA, 33 bp, Homo sapien
tcttttcattctctacagagcctatgagatcaa

SEQ ID NO: 548220 - DNA, 33 bp, Homo sapien
tcttttcattctctactgagcctatgagatcaa

SEQ ID NO: 548221 - DNA, 33 bp, Homo sapien
ttcagtcagaatatagccataaatcagttgtaa

SEQ ID NO: 548222 - DNA, 33 bp, Homo sapien
ttcagtcagaatatagtcataaatcagttgtaa

SEQ ID NO: 548223 - DNA, 33 bp, Homo sapien
tgcattctttcaataaccagaaaagacacaagt

SEQ ID NO: 548224 - DNA, 33 bp, Homo sapien
tgcattctttcaataatcagaaaagacacaagt

SEQ ID NO: 548225 - DNA, 33 bp, Homo sapien
aagtaaaacggataataagtggaatttccagga

SEQ ID NO: 548226 - DNA, 33 bp, Homo sapien
aagtaaaacggataatgagtggaatttccagga

SEQ ID NO: 548227 - DNA, 33 bp, Homo sapien
gaactttctgggtttacagaaatgcccattatc

SEQ ID NO: 548228 - DNA, 33 bp, Homo sapien
gaactttctgggtttatagaaatgcccattatc

SEQ ID NO: 548229 - DNA, 33 bp, Homo sapien
ggtatattgcaggacaaaaacttaggggaggaa

SEQ ID NO: 548230 - DNA, 33 bp, Homo sapien
ggtatattgcaggacagaaacttaggggaggaa

SEQ ID NO: 548231 - DNA, 33 bp, Homo sapien
ctaactgtgaaaataagtgaagggtgtggccaa

SEQ ID NO: 548232 - DNA, 33 bp, Homo sapien
ctaactgtgaaaataattgaagggtgtggccaa

SEQ ID NO: 548233 - DNA, 33 bp, Homo sapien
caacatcatcatttcagaagtctatttgggttt

SEQ ID NO: 548234 - DNA, 33 bp, Homo sapien
caacatcatcatttcataagtctatttgggttt

SEQ ID NO: 548235 - DNA, 33 bp, Homo sapien
gatgtggcctgtctagaatttctgctgaatact

SEQ ID NO: 548236 - DNA, 33 bp, Homo sapien
gatgtggcctgtctaggatttctgctgaatact

SEQ ID NO: 548237 - DNA, 33 bp, Homo sapien
accgatttcatttgccaccaaactcaataagcc

SEQ ID NO: 548238 - DNA, 33 bp, Homo sapien
accgatttcatttgccgccaaactcaataagcc

SEQ ID NO: 548239 - DNA, 33 bp, Homo sapien
ttctggagttgatacaccaagtttgaggctccc

SEQ ID NO: 548240 - DNA, 33 bp, Homo sapien
ttctggagttgatacagcaagtttgaggctccc

SEQ ID NO: 548241 - DNA, 33 bp, Homo sapien
gctttcaattgtggaccggaatgtgaaatatgt

SEQ ID NO: 548242 - DNA, 33 bp, Homo sapien
gctttcaattgtggactggaatgtgaaatatgt

SEQ ID NO: 548243 - DNA, 33 bp, Homo sapien
attccagtcacttaaaactgagcgcttttcctt

SEQ ID NO: 548244 - DNA, 33 bp, Homo sapien
attccagtcacttaaatctgagcgcttttcctt

SEQ ID NO: 548245 - DNA, 33 bp, Homo sapien
caacaaagcttccaaaaacgtatattgaggaag

SEQ ID NO: 548246 - DNA, 33 bp, Homo sapien
caacaaagcttccaaagacgtatattgaggaag

SEQ ID NO: 548247 - DNA, 33 bp, Homo sapien
ttcttctctattcaaactctatccttccttttt

SEQ ID NO: 548248 - DNA, 33 bp, Homo sapien
ttcttctctattcaaattctatccttccttttt

SEQ ID NO: 548249 - DNA, 33 bp, Homo sapien
gcattgtgtcatctggcactcaggagccagtgc

SEQ ID NO: 548250 - DNA, 33 bp, Homo sapien
gcattgtgtcatctggtactcaggagccagtgc

SEQ ID NO: 548251 - DNA, 33 bp, Homo sapien
ttcgtgttagctctcaagggcagtctttagtgc

SEQ ID NO: 548252 - DNA, 33 bp, Homo sapien
ttcgtgttagctctcatgggcagtctttagtgc

SEQ ID NO: 548253 - DNA, 33 bp, Homo sapien
tttaaactcatctccaaggtctacaccataaac

SEQ ID NO: 548254 - DNA, 33 bp, Homo sapien
tttaaactcatctccagggtctacaccataaac

SEQ ID NO: 548255 - DNA, 33 bp, Homo sapien
tctaaataaaattgacagatggactaggtccat

SEQ ID NO: 548256 - DNA, 33 bp, Homo sapien
tctaaataaaattgacggatggactaggtccat

SEQ ID NO: 548257 - DNA, 33 bp, Homo sapien
cctcagattgaaagccagaagtcagaggcagtt

SEQ ID NO: 548258 - DNA, 33 bp, Homo sapien
cctcagattgaaagccggaagtcagaggcagtt

SEQ ID NO: 548259 - DNA, 33 bp, Homo sapien
tttgtggggattattacaattcaatgtgtgatt

SEQ ID NO: 548260 - DNA, 33 bp, Homo sapien
tttgtggggattattagaattcaatgtgtgatt

SEQ ID NO: 548261 - DNA, 33 bp, Homo sapien
ctggttggcaacaagacggacttcagtgctgac

SEQ ID NO: 548262 - DNA, 33 bp, Homo sapien
ctggttggcaacaagatggacttcagtgctgac

SEQ ID NO: 548263 - DNA, 33 bp, Homo sapien
atcttgtccttttaaggaagttgaggtggaaaa

SEQ ID NO: 548264 - DNA, 33 bp, Homo sapien
atcttgtccttttaagtaagttgaggtggaaaa

SEQ ID NO: 548265 - DNA, 33 bp, Homo sapien
ggtaaagagtccgaggcactgacagttcagata

SEQ ID NO: 548266 - DNA, 33 bp, Homo sapien
ggtaaagagtccgaggtactgacagttcagata

SEQ ID NO: 548267 - DNA, 33 bp, Homo sapien
taattaagtgaaattaggggtctataatcacaa

SEQ ID NO: 548268 - DNA, 33 bp, Homo sapien
taattaagtgaaattatgggtctataatcacaa

SEQ ID NO: 548269 - DNA, 33 bp, Homo sapien
tgcattgtctggttaaaagtcaagctgcctaag

SEQ ID NO: 548270 - DNA, 33 bp, Homo sapien
tgcattgtctggttaagagtcaagctgcctaag

SEQ ID NO: 548271 - DNA, 33 bp, Homo sapien
tagaactggcttagtcaaatcaaggttgtgtct

SEQ ID NO: 548272 - DNA, 33 bp, Homo sapien
tagaactggcttagtcgaatcaaggttgtgtct

SEQ ID NO: 548273 - DNA, 33 bp, Homo sapien
ctttgcatttctttgacagcatcacccaagccc

SEQ ID NO: 548274 - DNA, 33 bp, Homo sapien
ctttgcatttctttgatagcatcacccaagccc

SEQ ID NO: 548275 - DNA, 33 bp, Homo sapien
tcaatctatttgcactaaccaagaagacctgac

SEQ ID NO: 548276 - DNA, 33 bp, Homo sapien
tcaatctatttgcactgaccaagaagacctgac

SEQ ID NO: 548277 - DNA, 33 bp, Homo sapien
tcttctgcctggttgcaaatgtatgctttcgta

SEQ ID NO: 548278 - DNA, 33 bp, Homo sapien
tcttctgcctggttgcgaatgtatgctttcgta

SEQ ID NO: 548279 - DNA, 33 bp, Homo sapien
gaaacaaataatttacaaagacctctgttaggc

SEQ ID NO: 548280 - DNA, 33 bp, Homo sapien
gaaacaaataatttaccaagacctctgttaggc

SEQ ID NO: 548281 - DNA, 33 bp, Homo sapien
attagtcctcaaaaccacaagaggaaaaactta

SEQ ID NO: 548282 - DNA, 33 bp, Homo sapien
attagtcctcaaaaccgcaagaggaaaaactta

SEQ ID NO: 548283 - DNA, 33 bp, Homo sapien
aaatccaataatagctcaaaaagagaatattct

SEQ ID NO: 548284 - DNA, 33 bp, Homo sapien
aaatccaataatagctgaaaaagagaatattct

SEQ ID NO: 548285 - DNA, 33 bp, Homo sapien
ccttcttttctgaagcaataaaatgtatcctca

SEQ ID NO: 548286 - DNA, 33 bp, Homo sapien
ccttcttttctgaagcgataaaatgtatcctca

SEQ ID NO: 548287 - DNA, 33 bp, Homo sapien
cattcttaatggttagcatatggctgggaaatg

SEQ ID NO: 548288 - DNA, 33 bp, Homo sapien
cattcttaatggttagtatatggctgggaaatg

SEQ ID NO: 548289 - DNA, 33 bp, Homo sapien
tgtataaacttggatgcactactgagctactct

SEQ ID NO: 548290 - DNA, 33 bp, Homo sapien
tgtataaacttggatgtactactgagctactct

SEQ ID NO: 548291 - DNA, 33 bp, Homo sapien
cagattggggagttggaaaatacttcaaatcaa

SEQ ID NO: 548292 - DNA, 33 bp, Homo sapien
cagattggggagttgggaaatacttcaaatcaa

SEQ ID NO: 548293 - DNA, 33 bp, Homo sapien
agttcagggatcaggacgcagcctttccccagc

SEQ ID NO: 548294 - DNA, 33 bp, Homo sapien
agttcagggatcaggaggcagcctttccccagc

SEQ ID NO: 548295 - DNA, 33 bp, Homo sapien
aagggcaatattaaaaactgctaccttcttgca

SEQ ID NO: 548296 - DNA, 33 bp, Homo sapien
aagggcaatattaaaacctgctaccttcttgca

SEQ ID NO: 548297 - DNA, 33 bp, Homo sapien
cgagtttaaaaatttccaatgtcactgcttgat

SEQ ID NO: 548298 - DNA, 33 bp, Homo sapien
cgagtttaaaaatttctaatgtcactgcttgat

SEQ ID NO: 548299 - DNA, 33 bp, Homo sapien
agattgtgcctctcgaatagaccaagcaaacct

SEQ ID NO: 548300 - DNA, 33 bp, Homo sapien
agattgtgcctctcgagtagaccaagcaaacct

SEQ ID NO: 548301 - DNA, 33 bp, Homo sapien
tgcttcacacaatactaaagatttatatcccac

SEQ ID NO: 548302 - DNA, 33 bp, Homo sapien
tgcttcacacaatactgaagatttatatcccac

SEQ ID NO: 548303 - DNA, 33 bp, Homo sapien
tttggttatttttagtgaagagcatgaatcatc

SEQ ID NO: 548304 - DNA, 33 bp, Homo sapien
tttggttatttttagttaagagcatgaatcatc

SEQ ID NO: 548305 - DNA, 33 bp, Homo sapien
tacagaaaacaaacaaatggcatctgagagcat

SEQ ID NO: 548306 - DNA, 33 bp, Homo sapien
tacagaaaacaaacaagtggcatctgagagcat

SEQ ID NO: 548307 - DNA, 33 bp, Homo sapien
catctgggctcgacccaaaccttgttctaagat

SEQ ID NO: 548308 - DNA, 33 bp, Homo sapien
catctgggctcgacccgaaccttgttctaagat

SEQ ID NO: 548309 - DNA, 33 bp, Homo sapien
tgccctcatgatctcacctaagtccaattacct

SEQ ID NO: 548310 - DNA, 33 bp, Homo sapien
tgccctcatgatctcatctaagtccaattacct

SEQ ID NO: 548311 - DNA, 33 bp, Homo sapien
tcacttcaaattagaaagtgagaactgtgtaaa

SEQ ID NO: 548312 - DNA, 33 bp, Homo sapien
tcacttcaaattagaaggtgagaactgtgtaaa

SEQ ID NO: 548313 - DNA, 33 bp, Homo sapien
tgctgagcctaagtcacgtaagatttgaatgag

SEQ ID NO: 548314 - DNA, 33 bp, Homo sapien
tgctgagcctaagtcatgtaagatttgaatgag

SEQ ID NO: 548315 - DNA, 33 bp, Homo sapien
cgtgtcttcacgtgacaggaaggaagagctgaa

SEQ ID NO: 548316 - DNA, 33 bp, Homo sapien
cgtgtcttcacgtgaccggaaggaagagctgaa

SEQ ID NO: 548317 - DNA, 33 bp, Homo sapien
aggattctccttaaccaaacctgacattggtgc

SEQ ID NO: 548318 - DNA, 33 bp, Homo sapien
aggattctccttaaccgaacctgacattggtgc

SEQ ID NO: 548319 - DNA, 33 bp, Homo sapien
agcagagggagaggtaacagacctgtcaggaaa

SEQ ID NO: 548320 - DNA, 33 bp, Homo sapien
agcagagggagaggtatcagacctgtcaggaaa

SEQ ID NO: 548321 - DNA, 33 bp, Homo sapien
tcaggatattttgagacgaacggctacttcagc

SEQ ID NO: 548322 - DNA, 33 bp, Homo sapien
tcaggatattttgagatgaacggctacttcagc

SEQ ID NO: 548323 - DNA, 33 bp, Homo sapien
attgtaatacctaatacgtttttatgccattaa

SEQ ID NO: 548324 - DNA, 33 bp, Homo sapien
attgtaatacctaatatgtttttatgccattaa

SEQ ID NO: 548325 - DNA, 33 bp, Homo sapien
acctctccaaaaagaaaagctgtttgaggcatg

SEQ ID NO: 548326 - DNA, 33 bp, Homo sapien
acctctccaaaaagaagagctgtttgaggcatg

SEQ ID NO: 548327 - DNA, 33 bp, Homo sapien
gtagaccgttggattgcagaacattgagtttaa

SEQ ID NO: 548328 - DNA, 33 bp, Homo sapien
gtagaccgttggattgtagaacattgagtttaa

SEQ ID NO: 548329 - DNA, 33 bp, Homo sapien
ggttctggaaggccaacggttgacagcagggtc

SEQ ID NO: 548330 - DNA, 33 bp, Homo sapien
ggttctggaaggccaatggttgacagcagggtc

SEQ ID NO: 548331 - DNA, 33 bp, Homo sapien
agtttgttgggtgtgaataaatcagttacaaca

SEQ ID NO: 548332 - DNA, 33 bp, Homo sapien
agtttgttgggtgtgactaaatcagttacaaca

SEQ ID NO: 548333 - DNA, 33 bp, Homo sapien
aataaattcagctacccaccaggattgtcatta

SEQ ID NO: 548334 - DNA, 33 bp, Homo sapien
aataaattcagctaccgaccaggattgtcatta

SEQ ID NO: 548335 - DNA, 33 bp, Homo sapien
tgtatttgggtgcttacaattgctcatggtatg

SEQ ID NO: 548336 - DNA, 33 bp, Homo sapien
tgtatttgggtgcttataattgctcatggtatg

SEQ ID NO: 548337 - DNA, 33 bp, Homo sapien
cataactctggaaaaaatgtgctgcattacagt

SEQ ID NO: 548338 - DNA, 33 bp, Homo sapien
cataactctggaaaaactgtgctgcattacagt

SEQ ID NO: 548339 - DNA, 33 bp, Homo sapien
taggccttctagtaaacaagccatgatacccta

SEQ ID NO: 548340 - DNA, 33 bp, Homo sapien
taggccttctagtaaataagccatgatacccta

SEQ ID NO: 548341 - DNA, 33 bp, Homo sapien
taaagttgttctctaaaattaaaagcacttacc

SEQ ID NO: 548342 - DNA, 33 bp, Homo sapien
taaagttgttctctaagattaaaagcacttacc

SEQ ID NO: 548343 - DNA, 33 bp, Homo sapien
gagttattttattgaaatcaggctgtatgccga

SEQ ID NO: 548344 - DNA, 33 bp, Homo sapien
gagttattttattgaagtcaggctgtatgccga

SEQ ID NO: 548345 - DNA, 33 bp, Homo sapien
tcacactatctgacttaaaaatctattacaaag

SEQ ID NO: 548346 - DNA, 33 bp, Homo sapien
tcacactatctgacttcaaaatctattacaaag

SEQ ID NO: 548347 - DNA, 33 bp, Homo sapien
atcctccatgaagtcgccagtgagagagctcta

SEQ ID NO: 548348 - DNA, 33 bp, Homo sapien
atcctccatgaagtcgtcagtgagagagctcta

SEQ ID NO: 548349 - DNA, 33 bp, Homo sapien
atggagcggatcagagaagttatgttccatgga

SEQ ID NO: 548350 - DNA, 33 bp, Homo sapien
atggagcggatcagagcagttatgttccatgga

SEQ ID NO: 548351 - DNA, 33 bp, Homo sapien
acgatttagtccatcaatctgaaccaagtaaga

SEQ ID NO: 548352 - DNA, 33 bp, Homo sapien
acgatttagtccatcagtctgaaccaagtaaga

SEQ ID NO: 548353 - DNA, 33 bp, Homo sapien
ataattatcctttgccactagcatccagcaata

SEQ ID NO: 548354 - DNA, 33 bp, Homo sapien
ataattatcctttgccgctagcatccagcaata

SEQ ID NO: 548355 - DNA, 33 bp, Homo sapien
gtcagaatgaatactacgttttagcttttcaaa

SEQ ID NO: 548356 - DNA, 33 bp, Homo sapien
gtcagaatgaatactatgttttagcttttcaaa

SEQ ID NO: 548357 - DNA, 33 bp, Homo sapien
cctctattgtttaccacgtttgaaatctctgat

SEQ ID NO: 548358 - DNA, 33 bp, Homo sapien
cctctattgtttaccatgtttgaaatctctgat

SEQ ID NO: 548359 - DNA, 33 bp, Homo sapien
tggttgatgaaaattacatctgctgcctaatat

SEQ ID NO: 548360 - DNA, 33 bp, Homo sapien
tggttgatgaaaattatatctgctgcctaatat

SEQ ID NO: 548361 - DNA, 33 bp, Homo sapien
ccctttgtctcttaaaaaacccactgaactatc

SEQ ID NO: 548362 - DNA, 33 bp, Homo sapien
ccctttgtctcttaaataacccactgaactatc

SEQ ID NO: 548363 - DNA, 33 bp, Homo sapien
aaagactcaactgtgtcaagccatggaagtttc

SEQ ID NO: 548364 - DNA, 33 bp, Homo sapien
aaagactcaactgtgttaagccatggaagtttc

SEQ ID NO: 548365 - DNA, 33 bp, Homo sapien
tgctgttctctttcagaatgccatgctgtgcag

SEQ ID NO: 548366 - DNA, 33 bp, Homo sapien
tgctgttctctttcaggatgccatgctgtgcag

SEQ ID NO: 548367 - DNA, 33 bp, Homo sapien
gaatggagcaagttaccgcgaactcctcatcca

SEQ ID NO: 548368 - DNA, 33 bp, Homo sapien
gaatggagcaagttactgcgaactcctcatcca

SEQ ID NO: 548369 - DNA, 33 bp, Homo sapien
ttatcctctattgctccctaagtagcacctgag

SEQ ID NO: 548370 - DNA, 33 bp, Homo sapien
ttatcctctattgctctctaagtagcacctgag

SEQ ID NO: 548371 - DNA, 33 bp, Homo sapien
gtccttttctctgatcccctctactcagaatat

SEQ ID NO: 548372 - DNA, 33 bp, Homo sapien
gtccttttctctgatctcctctactcagaatat

SEQ ID NO: 548373 - DNA, 33 bp, Homo sapien
aaaagttaaagcgtgaacattgttgaaaaatgt

SEQ ID NO: 548374 - DNA, 33 bp, Homo sapien
aaaagttaaagcgtgagcattgttgaaaaatgt

SEQ ID NO: 548375 - DNA, 33 bp, Homo sapien
cattcatctttatgccaaaaaaaaataaggtga

SEQ ID NO: 548376 - DNA, 33 bp, Homo sapien
cattcatctttatgccgaaaaaaaataaggtga

SEQ ID NO: 548377 - DNA, 33 bp, Homo sapien
cacggacatagtaaaaataatatacattaacct

SEQ ID NO: 548378 - DNA, 33 bp, Homo sapien
cacggacatagtaaaagtaatatacattaacct

SEQ ID NO: 548379 - DNA, 33 bp, Homo sapien
tcagtacatccagttacccaaaacagcgctgga

SEQ ID NO: 548380 - DNA, 33 bp, Homo sapien
tcagtacatccagttatccaaaacagcgctgga

SEQ ID NO: 548381 - DNA, 33 bp, Homo sapien
acttctgctctttactcaattaaggataatgaa

SEQ ID NO: 548382 - DNA, 33 bp, Homo sapien
acttctgctctttactgaattaaggataatgaa

SEQ ID NO: 548383 - DNA, 33 bp, Homo sapien
aaatccctgctcttcaatataggtaccgagaac

SEQ ID NO: 548384 - DNA, 33 bp, Homo sapien
aaatccctgctcttcagtataggtaccgagaac

SEQ ID NO: 548385 - DNA, 33 bp, Homo sapien
ctgtttgctcaaactacgtggactcccaaaggg

SEQ ID NO: 548386 - DNA, 33 bp, Homo sapien
ctgtttgctcaaactatgtggactcccaaaggg

SEQ ID NO: 548387 - DNA, 33 bp, Homo sapien
cttcattcttgggccaatcctccagtgctgaga

SEQ ID NO: 548388 - DNA, 33 bp, Homo sapien
cttcattcttgggccagtcctccagtgctgaga

SEQ ID NO: 548389 - DNA, 33 bp, Homo sapien
tgtagcttccggggtggacatagcatactttgg

SEQ ID NO: 548390 - DNA, 33 bp, Homo sapien
tgtagcttccggggtgtacatagcatactttgg

SEQ ID NO: 548391 - DNA, 33 bp, Homo sapien
gccagtattcaccctactacagatggttctctt

SEQ ID NO: 548392 - DNA, 33 bp, Homo sapien
gccagtattcaccctattacagatggttctctt

SEQ ID NO: 548393 - DNA, 33 bp, Homo sapien
aaagtgaggtcacaaaagataaagagctttgcc

SEQ ID NO: 548394 - DNA, 33 bp, Homo sapien
aaagtgaggtcacaaaggataaagagctttgcc

SEQ ID NO: 548395 - DNA, 33 bp, Homo sapien
tgtataatatccttccacgctaggtacactagc

SEQ ID NO: 548396 - DNA, 33 bp, Homo sapien
tgtataatatccttccgcgctaggtacactagc

SEQ ID NO: 548397 - DNA, 33 bp, Homo sapien
tagcataaggagtgtgaatttgaacatatattt

SEQ ID NO: 548398 - DNA, 33 bp, Homo sapien
tagcataaggagtgtgtatttgaacatatattt

SEQ ID NO: 548399 - DNA, 33 bp, Homo sapien
atggtctgtcctaaagcagtgaatttcctaagg

SEQ ID NO: 548400 - DNA, 33 bp, Homo sapien
atggtctgtcctaaagtagtgaatttcctaagg

SEQ ID NO: 548401 - DNA, 33 bp, Homo sapien
gttattattgcctacaatcaccctgctgtgctg

SEQ ID NO: 548402 - DNA, 33 bp, Homo sapien
gttattattgcctacagtcaccctgctgtgctg

SEQ ID NO: 548403 - DNA, 33 bp, Homo sapien
tttacaaagacgtcatcaattttaaaactgcag

SEQ ID NO: 548404 - DNA, 33 bp, Homo sapien
tttacaaagacgtcatgaattttaaaactgcag

SEQ ID NO: 548405 - DNA, 33 bp, Homo sapien
tggataacctggggaccgtaatacctacttcag

SEQ ID NO: 548406 - DNA, 33 bp, Homo sapien
tggataacctggggactgtaatacctacttcag

SEQ ID NO: 548407 - DNA, 33 bp, Homo sapien
tccgaggtactgccaaatgaaatgaattccacc

SEQ ID NO: 548408 - DNA, 33 bp, Homo sapien
tccgaggtactgccaagtgaaatgaattccacc

SEQ ID NO: 548409 - DNA, 33 bp, Homo sapien
acacattttctttatgcatctctgtgcaccttt

SEQ ID NO: 548410 - DNA, 33 bp, Homo sapien
acacattttctttatggatctctgtgcaccttt

SEQ ID NO: 548411 - DNA, 33 bp, Homo sapien
aagagccctgctcctacagcaaactttggtgta

SEQ ID NO: 548412 - DNA, 33 bp, Homo sapien
aagagccctgctcctatagcaaactttggtgta

SEQ ID NO: 548413 - DNA, 33 bp, Homo sapien
aaattaacaggttcaaagcaccagggaatgcta

SEQ ID NO: 548414 - DNA, 33 bp, Homo sapien
aaattaacaggttcaacgcaccagggaatgcta

SEQ ID NO: 548415 - DNA, 33 bp, Homo sapien
aaacctgtttgtgatacacaatattcctcacta

SEQ ID NO: 548416 - DNA, 33 bp, Homo sapien
aaacctgtttgtgatatacaatattcctcacta

SEQ ID NO: 548417 - DNA, 33 bp, Homo sapien
atactaacaactccacaaaagcgaccaactcaa

SEQ ID NO: 548418 - DNA, 33 bp, Homo sapien
atactaacaactccacgaaagcgaccaactcaa

SEQ ID NO: 548419 - DNA, 33 bp, Homo sapien
agcaaggcaggtagaaaagacaaaatcagaagg

SEQ ID NO: 548420 - DNA, 33 bp, Homo sapien
agcaaggcaggtagaagagacaaaatcagaagg

SEQ ID NO: 548421 - DNA, 33 bp, Homo sapien
gaaggtttctcctcccaattcagagcttgatac

SEQ ID NO: 548422 - DNA, 33 bp, Homo sapien
gaaggtttctcctcccgattcagagcttgatac

SEQ ID NO: 548423 - DNA, 33 bp, Homo sapien
atgttctaccatacagacaactcaaatgtcaga

SEQ ID NO: 548424 - DNA, 33 bp, Homo sapien
atgttctaccatacaggcaactcaaatgtcaga

SEQ ID NO: 548425 - DNA, 33 bp, Homo sapien
caattagagaagtgtacaagcaatggattaaaa

SEQ ID NO: 548426 - DNA, 33 bp, Homo sapien
caattagagaagtgtataagcaatggattaaaa

SEQ ID NO: 548427 - DNA, 33 bp, Homo sapien
ttatgaaagacgtaagccaattttaaccattct

SEQ ID NO: 548428 - DNA, 33 bp, Homo sapien
ttatgaaagacgtaaggcaattttaaccattct

SEQ ID NO: 548429 - DNA, 33 bp, Homo sapien
aatgtataatccctgacaaatgtgttgaacacc

SEQ ID NO: 548430 - DNA, 33 bp, Homo sapien
aatgtataatccctgataaatgtgttgaacacc

SEQ ID NO: 548431 - DNA, 33 bp, Homo sapien
ttttatttgtgcaacaatcagatttctgtggct

SEQ ID NO: 548432 - DNA, 33 bp, Homo sapien
ttttatttgtgcaacactcagatttctgtggct

SEQ ID NO: 548433 - DNA, 33 bp, Homo sapien
agaaaagttataataaccaacctagatcaccaa

SEQ ID NO: 548434 - DNA, 33 bp, Homo sapien
agaaaagttataataatcaacctagatcaccaa

SEQ ID NO: 548435 - DNA, 33 bp, Homo sapien
actacctacttttgccagatactaggctctgca

SEQ ID NO: 548436 - DNA, 33 bp, Homo sapien
actacctacttttgccggatactaggctctgca

SEQ ID NO: 548437 - DNA, 33 bp, Homo sapien
gagaatcccctgtcaacctgtacgtgtggttat

SEQ ID NO: 548438 - DNA, 33 bp, Homo sapien
gagaatcccctgtcaatctgtacgtgtggttat

SEQ ID NO: 548439 - DNA, 33 bp, Homo sapien
gatttgttctcttgctcaaccactagtttgact

SEQ ID NO: 548440 - DNA, 33 bp, Homo sapien
gatttgttctcttgcttaaccactagtttgact

SEQ ID NO: 548441 - DNA, 33 bp, Homo sapien
ccagtaggtcaggatagacacaaaaatttatag

SEQ ID NO: 548442 - DNA, 33 bp, Homo sapien
ccagtaggtcaggatatacacaaaaatttatag

SEQ ID NO: 548443 - DNA, 33 bp, Homo sapien
tggccttcagtttctccctaaaatgcggataaa

SEQ ID NO: 548444 - DNA, 33 bp, Homo sapien
tggccttcagtttctctctaaaatgcggataaa

SEQ ID NO: 548445 - DNA, 33 bp, Homo sapien
tatattggaacctttacagaatgcctcatgaga

SEQ ID NO: 548446 - DNA, 33 bp, Homo sapien
tatattggaacctttatagaatgcctcatgaga

SEQ ID NO: 548447 - DNA, 33 bp, Homo sapien
tttcaaggagagtcaaacaatactctttgggaa

SEQ ID NO: 548448 - DNA, 33 bp, Homo sapien
tttcaaggagagtcaagcaatactctttgggaa

SEQ ID NO: 548449 - DNA, 33 bp, Homo sapien
gccagttgagtttttacacatcagttaatcttt

SEQ ID NO: 548450 - DNA, 33 bp, Homo sapien
gccagttgagtttttatacatcagttaatcttt

SEQ ID NO: 548451 - DNA, 33 bp, Homo sapien
tgggtcttatttgttgcaatatatctgccagag

SEQ ID NO: 548452 - DNA, 33 bp, Homo sapien
tgggtcttatttgttgtaatatatctgccagag

SEQ ID NO: 548453 - DNA, 33 bp, Homo sapien
agagagtctgtatgaaccagtatacccaaaata

SEQ ID NO: 548454 - DNA, 33 bp, Homo sapien
agagagtctgtatgaagcagtatacccaaaata

SEQ ID NO: 548455 - DNA, 33 bp, Homo sapien
cattcacaggaacagacaagtatcttgaaaatg

SEQ ID NO: 548456 - DNA, 33 bp, Homo sapien
cattcacaggaacagagaagtatcttgaaaatg

SEQ ID NO: 548457 - DNA, 33 bp, Homo sapien
cttgctgcaatggctcgctgttagctccaccgc

SEQ ID NO: 548458 - DNA, 33 bp, Homo sapien
cttgctgcaatggctctctgttagctccaccgc

SEQ ID NO: 548459 - DNA, 33 bp, Homo sapien
tgtgggaaggtcacaacattaaacaaataaaaa

SEQ ID NO: 548460 - DNA, 33 bp, Homo sapien
tgtgggaaggtcacaatattaaacaaataaaaa

SEQ ID NO: 548461 - DNA, 33 bp, Homo sapien
ccttgtcctgtaggcacgtgctaaatcacaaga

SEQ ID NO: 548462 - DNA, 33 bp, Homo sapien
ccttgtcctgtaggcatgtgctaaatcacaaga

SEQ ID NO: 548463 - DNA, 33 bp, Homo sapien
tacaaggaattttgtcccttcatcagatgaaaa

SEQ ID NO: 548464 - DNA, 33 bp, Homo sapien
tacaaggaattttgtctcttcatcagatgaaaa

SEQ ID NO: 548465 - DNA, 33 bp, Homo sapien
ggaaaaacaaggatccacttttctgtgtgtgtg

SEQ ID NO: 548466 - DNA, 33 bp, Homo sapien
ggaaaaacaaggatccgcttttctgtgtgtgtg

SEQ ID NO: 548467 - DNA, 33 bp, Homo sapien
tactatgctttacccagtgacctctaaccctag

SEQ ID NO: 548468 - DNA, 33 bp, Homo sapien
tactatgctttacccattgacctctaaccctag

SEQ ID NO: 548469 - DNA, 33 bp, Homo sapien
ttcctggttcacctcccgctgtcctcttctcca

SEQ ID NO: 548470 - DNA, 33 bp, Homo sapien
ttcctggttcacctcctgctgtcctcttctcca

SEQ ID NO: 548471 - DNA, 33 bp, Homo sapien
aagggctttagtgtcaccttacagactttagac

SEQ ID NO: 548472 - DNA, 33 bp, Homo sapien
aagggctttagtgtcatcttacagactttagac

SEQ ID NO: 548473 - DNA, 33 bp, Homo sapien
tagtcctatctttaaaagtatttcagccttctc

SEQ ID NO: 548474 - DNA, 33 bp, Homo sapien
tagtcctatctttaaacgtatttcagccttctc

SEQ ID NO: 548475 - DNA, 33 bp, Homo sapien
ccacgtttgctgagcactagaaaagctttgcag

SEQ ID NO: 548476 - DNA, 33 bp, Homo sapien
ccacgtttgctgagcagtagaaaagctttgcag

SEQ ID NO: 548477 - DNA, 33 bp, Homo sapien
ccactccctgagttccagatggcctttgccaag

SEQ ID NO: 548478 - DNA, 33 bp, Homo sapien
ccactccctgagttccggatggcctttgccaag

SEQ ID NO: 548479 - DNA, 33 bp, Homo sapien
aatgatcctctctctacataacctgggccagtt

SEQ ID NO: 548480 - DNA, 33 bp, Homo sapien
aatgatcctctctctatataacctgggccagtt

SEQ ID NO: 548481 - DNA, 33 bp, Homo sapien
aatcccttgaatgtccaatcgtgaatgttaaac

SEQ ID NO: 548482 - DNA, 33 bp, Homo sapien
aatcccttgaatgtccgatcgtgaatgttaaac

SEQ ID NO: 548483 - DNA, 33 bp, Homo sapien
atgttgaagtggtaaacaagcagagttactcat

SEQ ID NO: 548484 - DNA, 33 bp, Homo sapien
atgttgaagtggtaaagaagcagagttactcat

SEQ ID NO: 548485 - DNA, 33 bp, Homo sapien
gcagcgcttcagagacaggcatgcacattagag

SEQ ID NO: 548486 - DNA, 33 bp, Homo sapien
gcagcgcttcagagacgggcatgcacattagag

SEQ ID NO: 548487 - DNA, 33 bp, Homo sapien
cctgtgtctttcaaacaatggaaatctggaaag

SEQ ID NO: 548488 - DNA, 33 bp, Homo sapien
cctgtgtctttcaaacgatggaaatctggaaag

SEQ ID NO: 548489 - DNA, 33 bp, Homo sapien
aaaagttcctacctcaaaagtttgttgtgagga

SEQ ID NO: 548490 - DNA, 33 bp, Homo sapien
aaaagttcctacctcagaagtttgttgtgagga

SEQ ID NO: 548491 - DNA, 33 bp, Homo sapien
ttattaaaggtaacaaaatactggccacagtgt

SEQ ID NO: 548492 - DNA, 33 bp, Homo sapien
ttattaaaggtaacaatatactggccacagtgt

SEQ ID NO: 548493 - DNA, 33 bp, Homo sapien
ttgctcagtattaaaaatgacaggccgggcatg

SEQ ID NO: 548494 - DNA, 33 bp, Homo sapien
ttgctcagtattaaaattgacaggccgggcatg

SEQ ID NO: 548495 - DNA, 33 bp, Homo sapien
acagtagtgatcacaaagtggagctaaagtact

SEQ ID NO: 548496 - DNA, 33 bp, Homo sapien
acagtagtgatcacaacgtggagctaaagtact

SEQ ID NO: 548497 - DNA, 33 bp, Homo sapien
cgtaacagtcgtcgaactaggcctcaaaaacat

SEQ ID NO: 548498 - DNA, 33 bp, Homo sapien
cgtaacagtcgtcgaagtaggcctcaaaaacat

SEQ ID NO: 548499 - DNA, 33 bp, Homo sapien
gtcctgctgtcgaggcaattttgatacatacaa

SEQ ID NO: 548500 - DNA, 33 bp, Homo sapien
gtcctgctgtcgaggcgattttgatacatacaa

SEQ ID NO: 548501 - DNA, 33 bp, Homo sapien
gaatgggaagagaccaaccagaagttgaattgg

SEQ ID NO: 548502 - DNA, 33 bp, Homo sapien
gaatgggaagagaccacccagaagttgaattgg

SEQ ID NO: 548503 - DNA, 33 bp, Homo sapien
tgttttctcatttcccacttgattctacttccc

SEQ ID NO: 548504 - DNA, 33 bp, Homo sapien
tgttttctcatttcccgcttgattctacttccc

SEQ ID NO: 548505 - DNA, 33 bp, Homo sapien
aaatgatttcatttgacgtaagggcctagcaaa

SEQ ID NO: 548506 - DNA, 33 bp, Homo sapien
aaatgatttcatttgatgtaagggcctagcaaa

SEQ ID NO: 548507 - DNA, 33 bp, Homo sapien
tatttattgagggttcaatttgtgctggacact

SEQ ID NO: 548508 - DNA, 33 bp, Homo sapien
tatttattgagggttccatttgtgctggacact

SEQ ID NO: 548509 - DNA, 33 bp, Homo sapien
tgttcctgacttttcaactatactctcctatat

SEQ ID NO: 548510 - DNA, 33 bp, Homo sapien
tgttcctgacttttcatctatactctcctatat

SEQ ID NO: 548511 - DNA, 33 bp, Homo sapien
cttacatattgcctcacagaaggtagtacattg

SEQ ID NO: 548512 - DNA, 33 bp, Homo sapien
cttacatattgcctcatagaaggtagtacattg

SEQ ID NO: 548513 - DNA, 33 bp, Homo sapien
atgaggaaactgaggaaagagtcgaagatcaca

SEQ ID NO: 548514 - DNA, 33 bp, Homo sapien
atgaggaaactgaggagagagtcgaagatcaca

SEQ ID NO: 548515 - DNA, 33 bp, Homo sapien
tgaaaaaagtagatccaccttctgtatcagcta

SEQ ID NO: 548516 - DNA, 33 bp, Homo sapien
tgaaaaaagtagatccgccttctgtatcagcta

SEQ ID NO: 548517 - DNA, 33 bp, Homo sapien
cagaagcagatctctcaaatcttttctccatgt

SEQ ID NO: 548518 - DNA, 33 bp, Homo sapien
cagaagcagatctctcgaatcttttctccatgt

SEQ ID NO: 548519 - DNA, 33 bp, Homo sapien
caagcaagttttgcaagatcatctttaattgtt

SEQ ID NO: 548520 - DNA, 33 bp, Homo sapien
caagcaagttttgcaatatcatctttaattgtt

SEQ ID NO: 548521 - DNA, 33 bp, Homo sapien
tccttttgctctgatgaatgaactctcaccctt

SEQ ID NO: 548522 - DNA, 33 bp, Homo sapien
tccttttgctctgatgcatgaactctcaccctt

SEQ ID NO: 548523 - DNA, 33 bp, Homo sapien
gtgaaaagaaacaacaacaaaggaatccatgac

SEQ ID NO: 548524 - DNA, 33 bp, Homo sapien
gtgaaaagaaacaacatcaaaggaatccatgac

SEQ ID NO: 548525 - DNA, 33 bp, Homo sapien
attgctattaaaatcccgaccattaagtcttat

SEQ ID NO: 548526 - DNA, 33 bp, Homo sapien
attgctattaaaatcctgaccattaagtcttat

SEQ ID NO: 548527 - DNA, 33 bp, Homo sapien
gaaaaaaagttctcctaaaaatatggctttagg

SEQ ID NO: 548528 - DNA, 33 bp, Homo sapien
gaaaaaaagttctcctgaaaatatggctttagg

SEQ ID NO: 548529 - DNA, 33 bp, Homo sapien
cataaggaggagtcaaatctgtaagcaggtagg

SEQ ID NO: 548530 - DNA, 33 bp, Homo sapien
cataaggaggagtcaactctgtaagcaggtagg

SEQ ID NO: 548531 - DNA, 33 bp, Homo sapien
aatagttataggactgaaagatgtgagtcctct

SEQ ID NO: 548532 - DNA, 33 bp, Homo sapien
aatagttataggactggaagatgtgagtcctct

SEQ ID NO: 548533 - DNA, 33 bp, Homo sapien
attctgtttttagttcaagggccattgtttatt

SEQ ID NO: 548534 - DNA, 33 bp, Homo sapien
attctgtttttagttcgagggccattgtttatt

SEQ ID NO: 548535 - DNA, 33 bp, Homo sapien
aatgtagagcctgagaacctaaggaagtatctg

SEQ ID NO: 548536 - DNA, 33 bp, Homo sapien
aatgtagagcctgagagcctaaggaagtatctg

SEQ ID NO: 548537 - DNA, 33 bp, Homo sapien
gcattaggaaaatgtccaggtatgagcagtttt

SEQ ID NO: 548538 - DNA, 33 bp, Homo sapien
gcattaggaaaatgtctaggtatgagcagtttt

SEQ ID NO: 548539 - DNA, 33 bp, Homo sapien
tgtaatgggagtaatacagttgatgatggtact

SEQ ID NO: 548540 - DNA, 33 bp, Homo sapien
tgtaatgggagtaatatagttgatgatggtact

SEQ ID NO: 548541 - DNA, 33 bp, Homo sapien
gcacagagtagaggcacggtaacgatgtgttgt

SEQ ID NO: 548542 - DNA, 33 bp, Homo sapien
gcacagagtagaggcatggtaacgatgtgttgt

SEQ ID NO: 548543 - DNA, 33 bp, Homo sapien
agtgttctggtctggacgaaatgagagaactcc

SEQ ID NO: 548544 - DNA, 33 bp, Homo sapien
agtgttctggtctggatgaaatgagagaactcc

SEQ ID NO: 548545 - DNA, 33 bp, Homo sapien
tgagagaactccaagaaggatgtcgaaactggg

SEQ ID NO: 548546 - DNA, 33 bp, Homo sapien
tgagagaactccaagagggatgtcgaaactggg

SEQ ID NO: 548547 - DNA, 33 bp, Homo sapien
gtaagccatcaagggcacttctttgtagcctct

SEQ ID NO: 548548 - DNA, 33 bp, Homo sapien
gtaagccatcaagggcgcttctttgtagcctct

SEQ ID NO: 548549 - DNA, 33 bp, Homo sapien
aactaatgactgaatacgattctagtaatgtgg

SEQ ID NO: 548550 - DNA, 33 bp, Homo sapien
aactaatgactgaataggattctagtaatgtgg

SEQ ID NO: 548551 - DNA, 33 bp, Homo sapien
gcattttaccagggaacgttttgacacagctat

SEQ ID NO: 548552 - DNA, 33 bp, Homo sapien
gcattttaccagggaatgttttgacacagctat

SEQ ID NO: 548553 - DNA, 33 bp, Homo sapien
gaatgaattaggctggccaaagtgtcttatgcc

SEQ ID NO: 548554 - DNA, 33 bp, Homo sapien
gaatgaattaggctgggcaaagtgtcttatgcc

SEQ ID NO: 548555 - DNA, 33 bp, Homo sapien
gtgatgcgcaaaccacaaaagaagccatcagtt

SEQ ID NO: 548556 - DNA, 33 bp, Homo sapien
gtgatgcgcaaaccacgaaagaagccatcagtt

SEQ ID NO: 548557 - DNA, 33 bp, Homo sapien
tcagattttgagggaaaaacttttagcatttcc

SEQ ID NO: 548558 - DNA, 33 bp, Homo sapien
tcagattttgagggaagaacttttagcatttcc

SEQ ID NO: 548559 - DNA, 33 bp, Homo sapien
tgtgcctcacagagaaaagatgctcacgaaaca

SEQ ID NO: 548560 - DNA, 33 bp, Homo sapien
tgtgcctcacagagaagagatgctcacgaaaca

SEQ ID NO: 548561 - DNA, 33 bp, Homo sapien
ttgggccttggataaacggcttaaatatctctt

SEQ ID NO: 548562 - DNA, 33 bp, Homo sapien
ttgggccttggataaatggcttaaatatctctt

SEQ ID NO: 548563 - DNA, 33 bp, Homo sapien
actcaaaaatgtttaacgaacactgtcataaag

SEQ ID NO: 548564 - DNA, 33 bp, Homo sapien
actcaaaaatgtttaatgaacactgtcataaag

SEQ ID NO: 548565 - DNA, 33 bp, Homo sapien
gaaactggcatacacaatagagattgaagtacg

SEQ ID NO: 548566 - DNA, 33 bp, Homo sapien
gaaactggcatacacactagagattgaagtacg

SEQ ID NO: 548567 - DNA, 33 bp, Homo sapien
gtctggatgcatttacaaagctgtttgagaata

SEQ ID NO: 548568 - DNA, 33 bp, Homo sapien
gtctggatgcatttacgaagctgtttgagaata

SEQ ID NO: 548569 - DNA, 33 bp, Homo sapien
ggcagtctgttcacacgcagattgggattttgg

SEQ ID NO: 548570 - DNA, 33 bp, Homo sapien
ggcagtctgttcacactcagattgggattttgg

SEQ ID NO: 548571 - DNA, 33 bp, Homo sapien
tggagaatccaagtaaggaaggaaatagaagaa

SEQ ID NO: 548572 - DNA, 33 bp, Homo sapien
tggagaatccaagtaatgaaggaaatagaagaa

SEQ ID NO: 548573 - DNA, 33 bp, Homo sapien
tctctcccactatcaaagtctgcttcccaatgt

SEQ ID NO: 548574 - DNA, 33 bp, Homo sapien
tctctcccactatcaaggtctgcttcccaatgt

SEQ ID NO: 548575 - DNA, 33 bp, Homo sapien
gtcaaactcacaattacggcattaaaacaggac

SEQ ID NO: 548576 - DNA, 33 bp, Homo sapien
gtcaaactcacaattatggcattaaaacaggac

SEQ ID NO: 548577 - DNA, 33 bp, Homo sapien
cattgacatgggggagaacagtaattgtggcat

SEQ ID NO: 548578 - DNA, 33 bp, Homo sapien
cattgacatgggggaggacagtaattgtggcat

SEQ ID NO: 548579 - DNA, 33 bp, Homo sapien
cttcacaaagtggctcacagagatggtctccga

SEQ ID NO: 548580 - DNA, 33 bp, Homo sapien
cttcacaaagtggctcccagagatggtctccga

SEQ ID NO: 548581 - DNA, 33 bp, Homo sapien
ttgatggagctgagtgacaaagggcaggtccca

SEQ ID NO: 548582 - DNA, 33 bp, Homo sapien
ttgatggagctgagtggcaaagggcaggtccca

SEQ ID NO: 548583 - DNA, 33 bp, Homo sapien
cacacacacaggagtacgaggcagagaattaaa

SEQ ID NO: 548584 - DNA, 33 bp, Homo sapien
cacacacacaggagtatgaggcagagaattaaa

SEQ ID NO: 548585 - DNA, 33 bp, Homo sapien
cccaaagttaggtctactaattctgatattttg

SEQ ID NO: 548586 - DNA, 33 bp, Homo sapien
cccaaagttaggtctattaattctgatattttg

SEQ ID NO: 548587 - DNA, 33 bp, Homo sapien
aattgcaaagcacaaaattgcaaagcacagaaa

SEQ ID NO: 548588 - DNA, 33 bp, Homo sapien
aattgcaaagcacaaacttgcaaagcacagaaa

SEQ ID NO: 548589 - DNA, 33 bp, Homo sapien
ttttgggtagaggcaagttagtttcatcatctt

SEQ ID NO: 548590 - DNA, 33 bp, Homo sapien
ttttgggtagaggcaatttagtttcatcatctt

SEQ ID NO: 548591 - DNA, 33 bp, Homo sapien
cttcttatcaaagataccaggacagtttaatca

SEQ ID NO: 548592 - DNA, 33 bp, Homo sapien
cttcttatcaaagatatcaggacagtttaatca

SEQ ID NO: 548593 - DNA, 33 bp, Homo sapien
acaagttagtttctgaccctcagagataatatg

SEQ ID NO: 548594 - DNA, 33 bp, Homo sapien
acaagttagtttctgagcctcagagataatatg

SEQ ID NO: 548595 - DNA, 33 bp, Homo sapien
gatttaagatacattaagaatgctcacttagcc

SEQ ID NO: 548596 - DNA, 33 bp, Homo sapien
gatttaagatacattaggaatgctcacttagcc

SEQ ID NO: 548597 - DNA, 33 bp, Homo sapien
tgatcattcctacataacgttgtcaaagtagaa

SEQ ID NO: 548598 - DNA, 33 bp, Homo sapien
tgatcattcctacataccgttgtcaaagtagaa

SEQ ID NO: 548599 - DNA, 33 bp, Homo sapien
tcgccctacgacaatcaccgctttcgatgaagt

SEQ ID NO: 548600 - DNA, 33 bp, Homo sapien
tcgccctacgacaatcgccgctttcgatgaagt

SEQ ID NO: 548601 - DNA, 33 bp, Homo sapien
acctgcttcccgattccactcccttactgccac

SEQ ID NO: 548602 - DNA, 33 bp, Homo sapien
acctgcttcccgattctactcccttactgccac

SEQ ID NO: 548603 - DNA, 33 bp, Homo sapien
aacatattgtccacacagtaaagaagagagcat

SEQ ID NO: 548604 - DNA, 33 bp, Homo sapien
aacatattgtccacacggtaaagaagagagcat

SEQ ID NO: 548605 - DNA, 33 bp, Homo sapien
tcaacaccaactataaaaagagaccctagaagt

SEQ ID NO: 548606 - DNA, 33 bp, Homo sapien
tcaacaccaactataataagagaccctagaagt

SEQ ID NO: 548607 - DNA, 33 bp, Homo sapien
gttgctgccgaggagacagaaggagttcccagg

SEQ ID NO: 548608 - DNA, 33 bp, Homo sapien
gttgctgccgaggagatagaaggagttcccagg

SEQ ID NO: 548609 - DNA, 33 bp, Homo sapien
tgctttcgtgaagtaaagtcaacacaatttcag

SEQ ID NO: 548610 - DNA, 33 bp, Homo sapien
tgctttcgtgaagtaaggtcaacacaatttcag

SEQ ID NO: 548611 - DNA, 33 bp, Homo sapien
gtgggaacataaacccagaaatgcttatagact

SEQ ID NO: 548612 - DNA, 33 bp, Homo sapien
gtgggaacataaacccggaaatgcttatagact

SEQ ID NO: 548613 - DNA, 33 bp, Homo sapien
gttcctttttgaaatccagggacttattctgag

SEQ ID NO: 548614 - DNA, 33 bp, Homo sapien
gttcctttttgaaatcgagggacttattctgag

SEQ ID NO: 548615 - DNA, 33 bp, Homo sapien
aaagaactcacagagccgaagatgctggccatc

SEQ ID NO: 548616 - DNA, 33 bp, Homo sapien
aaagaactcacagagctgaagatgctggccatc

SEQ ID NO: 548617 - DNA, 33 bp, Homo sapien
aagattaaccatgctgaaaaatgccaaagaaaa

SEQ ID NO: 548618 - DNA, 33 bp, Homo sapien
aagattaaccatgctgcaaaatgccaaagaaaa

SEQ ID NO: 548619 - DNA, 33 bp, Homo sapien
cagcatctagcccctcgaacctgttattctcgg

SEQ ID NO: 548620 - DNA, 33 bp, Homo sapien
cagcatctagcccctctaacctgttattctcgg

SEQ ID NO: 548621 - DNA, 33 bp, Homo sapien
aaatgtgtttttgagagattttgatgtcctgga

SEQ ID NO: 548622 - DNA, 33 bp, Homo sapien
aaatgtgtttttgagatattttgatgtcctgga

SEQ ID NO: 548623 - DNA, 33 bp, Homo sapien
atgtttccaaaaataacgagttgcttaggcctt

SEQ ID NO: 548624 - DNA, 33 bp, Homo sapien
atgtttccaaaaataatgagttgcttaggcctt

SEQ ID NO: 548625 - DNA, 33 bp, Homo sapien
cattcagagcttttgaagcccaaatcttgccaa

SEQ ID NO: 548626 - DNA, 33 bp, Homo sapien
cattcagagcttttgaggcccaaatcttgccaa

SEQ ID NO: 548627 - DNA, 33 bp, Homo sapien
atagagattgagaaaacgttgagatcacactgt

SEQ ID NO: 548628 - DNA, 33 bp, Homo sapien
atagagattgagaaaatgttgagatcacactgt

SEQ ID NO: 548629 - DNA, 33 bp, Homo sapien
tcagacaggaagcgctcaccaccagtaggattc

SEQ ID NO: 548630 - DNA, 33 bp, Homo sapien
tcagacaggaagcgctgaccaccagtaggattc

SEQ ID NO: 548631 - DNA, 33 bp, Homo sapien
ggcagataacaactaccctcttctctacatatg

SEQ ID NO: 548632 - DNA, 33 bp, Homo sapien
ggcagataacaactactctcttctctacatatg

SEQ ID NO: 548633 - DNA, 33 bp, Homo sapien
catcctgacatcatccacagcagttcagaagtt

SEQ ID NO: 548634 - DNA, 33 bp, Homo sapien
catcctgacatcatccgcagcagttcagaagtt

SEQ ID NO: 548635 - DNA, 33 bp, Homo sapien
agtggtgctaaggtgtcaattatgcatgagatc

SEQ ID NO: 548636 - DNA, 33 bp, Homo sapien
agtggtgctaaggtgtgaattatgcatgagatc

SEQ ID NO: 548637 - DNA, 33 bp, Homo sapien
gcacctatgggcagtacaccgtcacatgacttt

SEQ ID NO: 548638 - DNA, 33 bp, Homo sapien
gcacctatgggcagtataccgtcacatgacttt

SEQ ID NO: 548639 - DNA, 33 bp, Homo sapien
aactctctctagcataacaacctagcacccaag

SEQ ID NO: 548640 - DNA, 33 bp, Homo sapien
aactctctctagcatagcaacctagcacccaag

SEQ ID NO: 548641 - DNA, 33 bp, Homo sapien
catgagtaaatcttccaaatgatcaacccctag

SEQ ID NO: 548642 - DNA, 33 bp, Homo sapien
catgagtaaatcttccgaatgatcaacccctag

SEQ ID NO: 548643 - DNA, 33 bp, Homo sapien
caccttgctatgcccaatgccaggatctgaatg

SEQ ID NO: 548644 - DNA, 33 bp, Homo sapien
caccttgctatgcccagtgccaggatctgaatg

SEQ ID NO: 548645 - DNA, 33 bp, Homo sapien
ataacgttttatcaaaagctagttccattcaga

SEQ ID NO: 548646 - DNA, 33 bp, Homo sapien
ataacgttttatcaaatgctagttccattcaga

SEQ ID NO: 548647 - DNA, 33 bp, Homo sapien
taagaatagaatacaaaaactctccaaggaagc

SEQ ID NO: 548648 - DNA, 33 bp, Homo sapien
taagaatagaatacaagaactctccaaggaagc

SEQ ID NO: 548649 - DNA, 33 bp, Homo sapien
cccaggtttctcattacgagtttacaccaggag

SEQ ID NO: 548650 - DNA, 33 bp, Homo sapien
cccaggtttctcattaggagtttacaccaggag

SEQ ID NO: 548651 - DNA, 33 bp, Homo sapien
actcacatactaccggaaaagatctatgttagg

SEQ ID NO: 548652 - DNA, 33 bp, Homo sapien
actcacatactaccgggaaagatctatgttagg

SEQ ID NO: 548653 - DNA, 33 bp, Homo sapien
taaattgttatcattacgttcaaacttaacagc

SEQ ID NO: 548654 - DNA, 33 bp, Homo sapien
taaattgttatcattatgttcaaacttaacagc

SEQ ID NO: 548655 - DNA, 33 bp, Homo sapien
acaaccttatccttggacactgaaatctggatt

SEQ ID NO: 548656 - DNA, 33 bp, Homo sapien
acaaccttatccttggccactgaaatctggatt

SEQ ID NO: 548657 - DNA, 33 bp, Homo sapien
ttttatatggggaaaaatacaatccttttctta

SEQ ID NO: 548658 - DNA, 33 bp, Homo sapien
ttttatatggggaaaactacaatccttttctta

SEQ ID NO: 548659 - DNA, 33 bp, Homo sapien
aaagagatgatgattacctcgatctagttaagg

SEQ ID NO: 548660 - DNA, 33 bp, Homo sapien
aaagagatgatgattagctcgatctagttaagg

SEQ ID NO: 548661 - DNA, 33 bp, Homo sapien
taattttatgttgacaagtgttttgatctttcc

SEQ ID NO: 548662 - DNA, 33 bp, Homo sapien
taattttatgttgacacgtgttttgatctttcc

SEQ ID NO: 548663 - DNA, 33 bp, Homo sapien
ccttagacattctaccaattcacattcctgcca

SEQ ID NO: 548664 - DNA, 33 bp, Homo sapien
ccttagacattctacctattcacattcctgcca

SEQ ID NO: 548665 - DNA, 33 bp, Homo sapien
ctgagcttgggaagtcaagtgtacagtgtgcca

SEQ ID NO: 548666 - DNA, 33 bp, Homo sapien
ctgagcttgggaagtcgagtgtacagtgtgcca

SEQ ID NO: 548667 - DNA, 33 bp, Homo sapien
gtgtcgcctacacaaccgtctatctttcattat

SEQ ID NO: 548668 - DNA, 33 bp, Homo sapien
gtgtcgcctacacaactgtctatctttcattat

SEQ ID NO: 548669 - DNA, 33 bp, Homo sapien
gaaaaaattaatgccaataccttgagagtgggt

SEQ ID NO: 548670 - DNA, 33 bp, Homo sapien
gaaaaaattaatgccattaccttgagagtgggt

SEQ ID NO: 548671 - DNA, 33 bp, Homo sapien
ttccattgttctgataccattctggatggatgg

SEQ ID NO: 548672 - DNA, 33 bp, Homo sapien
ttccattgttctgatagcattctggatggatgg

SEQ ID NO: 548673 - DNA, 33 bp, Homo sapien
tagttgttggcactcacggtgacctttaaaaaa

SEQ ID NO: 548674 - DNA, 33 bp, Homo sapien
tagttgttggcactcatggtgacctttaaaaaa

SEQ ID NO: 548675 - DNA, 33 bp, Homo sapien
aacaacctgtgtgaagacattttgagcttgttt

SEQ ID NO: 548676 - DNA, 33 bp, Homo sapien
aacaacctgtgtgaagccattttgagcttgttt

SEQ ID NO: 548677 - DNA, 33 bp, Homo sapien
tttgtgtatgggagggaaaagtgaaatttttat

SEQ ID NO: 548678 - DNA, 33 bp, Homo sapien
tttgtgtatgggaggggaaagtgaaatttttat

SEQ ID NO: 548679 - DNA, 33 bp, Homo sapien
tggcaggagtcagatacaaacttaaactgtgat

SEQ ID NO: 548680 - DNA, 33 bp, Homo sapien
tggcaggagtcagatagaaacttaaactgtgat

SEQ ID NO: 548681 - DNA, 33 bp, Homo sapien
tgacagccagaagggacggaaaagaccaagaat

SEQ ID NO: 548682 - DNA, 33 bp, Homo sapien
tgacagccagaagggatggaaaagaccaagaat

SEQ ID NO: 548683 - DNA, 33 bp, Homo sapien
cttgtctttttgtagcacttgaagttaactgat

SEQ ID NO: 548684 - DNA, 33 bp, Homo sapien
cttgtctttttgtagcgcttgaagttaactgat

SEQ ID NO: 548685 - DNA, 33 bp, Homo sapien
gcataccatgtattcaaacttctctataaagtt

SEQ ID NO: 548686 - DNA, 33 bp, Homo sapien
gcataccatgtattcagacttctctataaagtt

SEQ ID NO: 548687 - DNA, 33 bp, Homo sapien
ggaggtcttataaccactggggttggcaactct

SEQ ID NO: 548688 - DNA, 33 bp, Homo sapien
ggaggtcttataaccattggggttggcaactct

SEQ ID NO: 548689 - DNA, 33 bp, Homo sapien
tctagccattacgaatcatgtaatttatagtta

SEQ ID NO: 548690 - DNA, 33 bp, Homo sapien
tctagccattacgaatgatgtaatttatagtta

SEQ ID NO: 548691 - DNA, 33 bp, Homo sapien
agcacgcagggtttatcgtatcgtgaacatcta

SEQ ID NO: 548692 - DNA, 33 bp, Homo sapien
agcacgcagggtttattgtatcgtgaacatcta

SEQ ID NO: 548693 - DNA, 33 bp, Homo sapien
ctctaggttttttcctcagatttttgctgtaaa

SEQ ID NO: 548694 - DNA, 33 bp, Homo sapien
ctctaggttttttcctgagatttttgctgtaaa

SEQ ID NO: 548695 - DNA, 33 bp, Homo sapien
attaatatgcataaaaccgcagttgttctaaag

SEQ ID NO: 548696 - DNA, 33 bp, Homo sapien
attaatatgcataaaatcgcagttgttctaaag

SEQ ID NO: 548697 - DNA, 33 bp, Homo sapien
ccatttgcttattgaaactctacctggatacct

SEQ ID NO: 548698 - DNA, 33 bp, Homo sapien
ccatttgcttattgaagctctacctggatacct

SEQ ID NO: 548699 - DNA, 33 bp, Homo sapien
ggtgtgcagatagccaacggtgatactggaatc

SEQ ID NO: 548700 - DNA, 33 bp, Homo sapien
ggtgtgcagatagccagcggtgatactggaatc

SEQ ID NO: 548701 - DNA, 33 bp, Homo sapien
acacagttgcacaaaagaacttcaaagttttta

SEQ ID NO: 548702 - DNA, 33 bp, Homo sapien
acacagttgcacaaaataacttcaaagttttta

SEQ ID NO: 548703 - DNA, 33 bp, Homo sapien
cttctctcttcctaaacgactttgtctttttgc

SEQ ID NO: 548704 - DNA, 33 bp, Homo sapien
cttctctcttcctaaatgactttgtctttttgc

SEQ ID NO: 548705 - DNA, 33 bp, Homo sapien
ttttgaagtcagggtaaaactcattggttatga

SEQ ID NO: 548706 - DNA, 33 bp, Homo sapien
ttttgaagtcagggtagaactcattggttatga

SEQ ID NO: 548707 - DNA, 33 bp, Homo sapien
tggaagaaattttacactaacttgtctcaggaa

SEQ ID NO: 548708 - DNA, 33 bp, Homo sapien
tggaagaaattttacattaacttgtctcaggaa

SEQ ID NO: 548709 - DNA, 33 bp, Homo sapien
caggtctatttggtcccacagtctataaacctg

SEQ ID NO: 548710 - DNA, 33 bp, Homo sapien
caggtctatttggtcctacagtctataaacctg

SEQ ID NO: 548711 - DNA, 33 bp, Homo sapien
acatcaactggtaaacaggtaagtacatccata

SEQ ID NO: 548712 - DNA, 33 bp, Homo sapien
acatcaactggtaaacgggtaagtacatccata

SEQ ID NO: 548713 - DNA, 33 bp, Homo sapien
ttgcttaaggaaacacagctagctaggaccaga

SEQ ID NO: 548714 - DNA, 33 bp, Homo sapien
ttgcttaaggaaacacggctagctaggaccaga

SEQ ID NO: 548715 - DNA, 33 bp, Homo sapien
cacggccagacctgacgccgtagtatcgcttct

SEQ ID NO: 548716 - DNA, 33 bp, Homo sapien
cacggccagacctgactccgtagtatcgcttct

SEQ ID NO: 548717 - DNA, 33 bp, Homo sapien
agaaactagttctgaaattattggatatggttt

SEQ ID NO: 548718 - DNA, 33 bp, Homo sapien
agaaactagttctgaagttattggatatggttt

SEQ ID NO: 548719 - DNA, 33 bp, Homo sapien
acaatgtttacaaaaggatgagaaattagaacc

SEQ ID NO: 548720 - DNA, 33 bp, Homo sapien
acaatgtttacaaaagtatgagaaattagaacc

SEQ ID NO: 548721 - DNA, 33 bp, Homo sapien
gggcttcctctcccaaataatgtgtgtagctgg

SEQ ID NO: 548722 - DNA, 33 bp, Homo sapien
gggcttcctctcccaactaatgtgtgtagctgg

SEQ ID NO: 548723 - DNA, 33 bp, Homo sapien
gtgttctgagaaaggcagcaacacataacacca

SEQ ID NO: 548724 - DNA, 33 bp, Homo sapien
gtgttctgagaaaggcggcaacacataacacca

SEQ ID NO: 548725 - DNA, 33 bp, Homo sapien
cagattcggaatcatcaacaagtagccctacct

SEQ ID NO: 548726 - DNA, 33 bp, Homo sapien
cagattcggaatcatccacaagtagccctacct

SEQ ID NO: 548727 - DNA, 33 bp, Homo sapien
cttacacatagcagacactcaaaaactatatat

SEQ ID NO: 548728 - DNA, 33 bp, Homo sapien
cttacacatagcagaccctcaaaaactatatat

SEQ ID NO: 548729 - DNA, 33 bp, Homo sapien
attttttattttccttaaaatgcacatgttatc

SEQ ID NO: 548730 - DNA, 33 bp, Homo sapien
attttttattttcctttaaatgcacatgttatc

SEQ ID NO: 548731 - DNA, 33 bp, Homo sapien
aggttaagaaggacccaatcacagcacgaataa

SEQ ID NO: 548732 - DNA, 33 bp, Homo sapien
aggttaagaaggacccgatcacagcacgaataa

SEQ ID NO: 548733 - DNA, 33 bp, Homo sapien
attcaaatttgtatgccgattctaaaaggcaaa

SEQ ID NO: 548734 - DNA, 33 bp, Homo sapien
attcaaatttgtatgctgattctaaaaggcaaa

SEQ ID NO: 548735 - DNA, 33 bp, Homo sapien
ctctatcttcagaagtcacaggatatacctaaa

SEQ ID NO: 548736 - DNA, 33 bp, Homo sapien
ctctatcttcagaagttacaggatatacctaaa

SEQ ID NO: 548737 - DNA, 33 bp, Homo sapien
atagccattggatgtcaaccatcacttatgtgg

SEQ ID NO: 548738 - DNA, 33 bp, Homo sapien
atagccattggatgtcgaccatcacttatgtgg

SEQ ID NO: 548739 - DNA, 33 bp, Homo sapien
catactgatgtagaaacaaagaccaaccagatg

SEQ ID NO: 548740 - DNA, 33 bp, Homo sapien
catactgatgtagaaataaagaccaaccagatg

SEQ ID NO: 548741 - DNA, 33 bp, Homo sapien
tagcagcacatgccacaggttaagagccagcat

SEQ ID NO: 548742 - DNA, 33 bp, Homo sapien
tagcagcacatgccacgggttaagagccagcat

SEQ ID NO: 548743 - DNA, 33 bp, Homo sapien
ttagagcactagggacagactaaggccaggacc

SEQ ID NO: 548744 - DNA, 33 bp, Homo sapien
ttagagcactagggacggactaaggccaggacc

SEQ ID NO: 548745 - DNA, 33 bp, Homo sapien
tactcaccagcaggaaaaaactagaggcttcag

SEQ ID NO: 548746 - DNA, 33 bp, Homo sapien
tactcaccagcaggaagaaactagaggcttcag

SEQ ID NO: 548747 - DNA, 33 bp, Homo sapien
ttgttccatttttgcaaccttttggagtcatgt

SEQ ID NO: 548748 - DNA, 33 bp, Homo sapien
ttgttccatttttgcagccttttggagtcatgt

SEQ ID NO: 548749 - DNA, 33 bp, Homo sapien
tgtaaactggtacccactcatggagctgcaggg

SEQ ID NO: 548750 - DNA, 33 bp, Homo sapien
tgtaaactggtacccattcatggagctgcaggg

SEQ ID NO: 548751 - DNA, 33 bp, Homo sapien
aattgccttcagatccaatgttggtttcatcct

SEQ ID NO: 548752 - DNA, 33 bp, Homo sapien
aattgccttcagatcccatgttggtttcatcct

SEQ ID NO: 548753 - DNA, 33 bp, Homo sapien
ctgccgatctgggaacagagcatggtttttttc

SEQ ID NO: 548754 - DNA, 33 bp, Homo sapien
ctgccgatctgggaacggagcatggtttttttc

SEQ ID NO: 548755 - DNA, 33 bp, Homo sapien
atacgttgtgaaggaacgaccctaggagagctg

SEQ ID NO: 548756 - DNA, 33 bp, Homo sapien
atacgttgtgaaggaatgaccctaggagagctg

SEQ ID NO: 548757 - DNA, 33 bp, Homo sapien
tctgatgatgtggaaaaagcgctagatactggg

SEQ ID NO: 548758 - DNA, 33 bp, Homo sapien
tctgatgatgtggaaagagcgctagatactggg

SEQ ID NO: 548759 - DNA, 33 bp, Homo sapien
tggctctgacagatgacgtagtgaattgaggaa

SEQ ID NO: 548760 - DNA, 33 bp, Homo sapien
tggctctgacagatgaggtagtgaattgaggaa

SEQ ID NO: 548761 - DNA, 33 bp, Homo sapien
taaccattgtgaaagacctcgaagcaattcctc

SEQ ID NO: 548762 - DNA, 33 bp, Homo sapien
taaccattgtgaaagatctcgaagcaattcctc

SEQ ID NO: 548763 - DNA, 33 bp, Homo sapien
ggccctgagcaggaacaaggtgggagcattcgg

SEQ ID NO: 548764 - DNA, 33 bp, Homo sapien
ggccctgagcaggaacgaggtgggagcattcgg

SEQ ID NO: 548765 - DNA, 33 bp, Homo sapien
ctcacagcataggtcaccagataccgaatgctc

SEQ ID NO: 548766 - DNA, 33 bp, Homo sapien
ctcacagcataggtcatcagataccgaatgctc

SEQ ID NO: 548767 - DNA, 33 bp, Homo sapien
taaggagcttgtaaaccaactgtgacgctaagc

SEQ ID NO: 548768 - DNA, 33 bp, Homo sapien
taaggagcttgtaaactaactgtgacgctaagc

SEQ ID NO: 548769 - DNA, 33 bp, Homo sapien
acatgaagacagagcacggatctgttgatgtga

SEQ ID NO: 548770 - DNA, 33 bp, Homo sapien
acatgaagacagagcatggatctgttgatgtga

SEQ ID NO: 548771 - DNA, 33 bp, Homo sapien
attagccttacctttcaatctggactttcgggc

SEQ ID NO: 548772 - DNA, 33 bp, Homo sapien
attagccttacctttcgatctggactttcgggc

SEQ ID NO: 548773 - DNA, 33 bp, Homo sapien
acagccaatgtgataccaaatgggaaaaaatct

SEQ ID NO: 548774 - DNA, 33 bp, Homo sapien
acagccaatgtgatactaaatgggaaaaaatct

SEQ ID NO: 548775 - DNA, 33 bp, Homo sapien
ctcactgctttggaaagccctctaatttttctg

SEQ ID NO: 548776 - DNA, 33 bp, Homo sapien
ctcactgctttggaaatccctctaatttttctg

SEQ ID NO: 548777 - DNA, 33 bp, Homo sapien
tcagggccagaaattacacagttatgagataaa

SEQ ID NO: 548778 - DNA, 33 bp, Homo sapien
tcagggccagaaattatacagttatgagataaa

SEQ ID NO: 548779 - DNA, 33 bp, Homo sapien
aaaatcacagaactctcacatgacaaatgtgat

SEQ ID NO: 548780 - DNA, 33 bp, Homo sapien
aaaatcacagaactctgacatgacaaatgtgat

SEQ ID NO: 548781 - DNA, 33 bp, Homo sapien
aacatgcacaattttaacagcacatgcccacaa

SEQ ID NO: 548782 - DNA, 33 bp, Homo sapien
aacatgcacaattttaccagcacatgcccacaa

SEQ ID NO: 548783 - DNA, 33 bp, Homo sapien
gaaagtacagcttgtccaaagtgcagcttgatc

SEQ ID NO: 548784 - DNA, 33 bp, Homo sapien
gaaagtacagcttgtcgaaagtgcagcttgatc

SEQ ID NO: 548785 - DNA, 33 bp, Homo sapien
gttcctgagatctaaaactttttcttcctccat

SEQ ID NO: 548786 - DNA, 33 bp, Homo sapien
gttcctgagatctaaacctttttcttcctccat

SEQ ID NO: 548787 - DNA, 33 bp, Homo sapien
tggtgcttcctatgaacggcagagcagagacac

SEQ ID NO: 548788 - DNA, 33 bp, Homo sapien
tggtgcttcctatgaatggcagagcagagacac

SEQ ID NO: 548789 - DNA, 33 bp, Homo sapien
ccaaactcaacttttacgtgtgaaaccattttg

SEQ ID NO: 548790 - DNA, 33 bp, Homo sapien
ccaaactcaacttttatgtgtgaaaccattttg

SEQ ID NO: 548791 - DNA, 33 bp, Homo sapien
cagaacaaaatcatcaagttgaagatcccggaa

SEQ ID NO: 548792 - DNA, 33 bp, Homo sapien
cagaacaaaatcatcaggttgaagatcccggaa

SEQ ID NO: 548793 - DNA, 33 bp, Homo sapien
atgatttcttgagctaaatggacagtgaaaggg

SEQ ID NO: 548794 - DNA, 33 bp, Homo sapien
atgatttcttgagctacatggacagtgaaaggg

SEQ ID NO: 548795 - DNA, 33 bp, Homo sapien
tgggtataggaaacaaggacaattcccagcaac

SEQ ID NO: 548796 - DNA, 33 bp, Homo sapien
tgggtataggaaacaatgacaattcccagcaac

SEQ ID NO: 548797 - DNA, 33 bp, Homo sapien
tgcctagaacttgtcaagataagattattacag

SEQ ID NO: 548798 - DNA, 33 bp, Homo sapien
tgcctagaacttgtcaggataagattattacag

SEQ ID NO: 548799 - DNA, 33 bp, Homo sapien
cctctgtctgctttcaaggagtgctaagagcat

SEQ ID NO: 548800 - DNA, 33 bp, Homo sapien
cctctgtctgctttcatggagtgctaagagcat

SEQ ID NO: 548801 - DNA, 33 bp, Homo sapien
ctctgaccagatatgtaaaaaataccagaacag

SEQ ID NO: 548802 - DNA, 33 bp, Homo sapien
ctctgaccagatatgtcaaaaataccagaacag

SEQ ID NO: 548803 - DNA, 33 bp, Homo sapien
aatgtcatacactttaaattcttgctggacatt

SEQ ID NO: 548804 - DNA, 33 bp, Homo sapien
aatgtcatacactttatattcttgctggacatt

SEQ ID NO: 548805 - DNA, 33 bp, Homo sapien
aaagtggcacttgcatcatactcagatttcaat

SEQ ID NO: 548806 - DNA, 33 bp, Homo sapien
aaagtggcacttgcatgatactcagatttcaat

SEQ ID NO: 548807 - DNA, 33 bp, Homo sapien
tagctggattggagaaaggtaaatggaggatag

SEQ ID NO: 548808 - DNA, 33 bp, Homo sapien
tagctggattggagaagggtaaatggaggatag

SEQ ID NO: 548809 - DNA, 33 bp, Homo sapien
tgtttcttggagcctccctttcctagatgcatt

SEQ ID NO: 548810 - DNA, 33 bp, Homo sapien
tgtttcttggagcctctctttcctagatgcatt

SEQ ID NO: 548811 - DNA, 33 bp, Homo sapien
ggatttcttgcatcccacatggcagattccaat

SEQ ID NO: 548812 - DNA, 33 bp, Homo sapien
ggatttcttgcatcccgcatggcagattccaat

SEQ ID NO: 548813 - DNA, 33 bp, Homo sapien
cccctgcgtgaacagaagatcttttccaacctg

SEQ ID NO: 548814 - DNA, 33 bp, Homo sapien
cccctgcgtgaacagaggatcttttccaacctg

SEQ ID NO: 548815 - DNA, 33 bp, Homo sapien
aacctcaaggagaaaaattagagaaaattgtac

SEQ ID NO: 548816 - DNA, 33 bp, Homo sapien
aacctcaaggagaaaagttagagaaaattgtac

SEQ ID NO: 548817 - DNA, 33 bp, Homo sapien
ggcccccctaggtagacagtggcacagaagcat

SEQ ID NO: 548818 - DNA, 33 bp, Homo sapien
ggcccccctaggtagagagtggcacagaagcat

SEQ ID NO: 548819 - DNA, 33 bp, Homo sapien
aatataatccatgatacgagataggagatatcc

SEQ ID NO: 548820 - DNA, 33 bp, Homo sapien
aatataatccatgatatgagataggagatatcc

SEQ ID NO: 548821 - DNA, 33 bp, Homo sapien
aagcttttttcccatgccaactggaaaacaaag

SEQ ID NO: 548822 - DNA, 33 bp, Homo sapien
aagcttttttcccatgtcaactggaaaacaaag

SEQ ID NO: 548823 - DNA, 33 bp, Homo sapien
tattacagcagcaataccttttgtaagacaaaa

SEQ ID NO: 548824 - DNA, 33 bp, Homo sapien
tattacagcagcaatatcttttgtaagacaaaa

SEQ ID NO: 548825 - DNA, 33 bp, Homo sapien
caggcactcgtaggagaagaaacaaaaatggcc

SEQ ID NO: 548826 - DNA, 33 bp, Homo sapien
caggcactcgtaggaggagaaacaaaaatggcc

SEQ ID NO: 548827 - DNA, 33 bp, Homo sapien
tgatggaggtattccaatgacaaggggccaggc

SEQ ID NO: 548828 - DNA, 33 bp, Homo sapien
tgatggaggtattccagtgacaaggggccaggc

SEQ ID NO: 548829 - DNA, 33 bp, Homo sapien
caatgaaaaaaatctgaattttgagttgaaggt

SEQ ID NO: 548830 - DNA, 33 bp, Homo sapien
caatgaaaaaaatctgtattttgagttgaaggt

SEQ ID NO: 548831 - DNA, 33 bp, Homo sapien
tgatatactcacccagaataattgttgtatgct

SEQ ID NO: 548832 - DNA, 33 bp, Homo sapien
tgatatactcacccaggataattgttgtatgct

SEQ ID NO: 548833 - DNA, 33 bp, Homo sapien
ctgggcaaggggtctacacttcacctttagaga

SEQ ID NO: 548834 - DNA, 33 bp, Homo sapien
ctgggcaaggggtctagacttcacctttagaga

SEQ ID NO: 548835 - DNA, 33 bp, Homo sapien
caacagtatatccttaaggtcttgctccagggc

SEQ ID NO: 548836 - DNA, 33 bp, Homo sapien
caacagtatatccttacggtcttgctccagggc

SEQ ID NO: 548837 - DNA, 33 bp, Homo sapien
gcttacctatatggcacatctctgaatctttgt

SEQ ID NO: 548838 - DNA, 33 bp, Homo sapien
gcttacctatatggcatatctctgaatctttgt

SEQ ID NO: 548839 - DNA, 33 bp, Homo sapien
aacctgaggaggcccaccaagctctgagtttct

SEQ ID NO: 548840 - DNA, 33 bp, Homo sapien
aacctgaggaggcccatcaagctctgagtttct

SEQ ID NO: 548841 - DNA, 33 bp, Homo sapien
aaatacagctctacatcatccttgccatacctt

SEQ ID NO: 548842 - DNA, 33 bp, Homo sapien
aaatacagctctacattatccttgccatacctt

SEQ ID NO: 548843 - DNA, 33 bp, Homo sapien
ggggttccagaaggaaagaagttctcagggaag

SEQ ID NO: 548844 - DNA, 33 bp, Homo sapien
ggggttccagaaggaatgaagttctcagggaag

SEQ ID NO: 548845 - DNA, 33 bp, Homo sapien
tactgccacatgtctaagccacattcctaatcc

SEQ ID NO: 548846 - DNA, 33 bp, Homo sapien
tactgccacatgtctaggccacattcctaatcc

SEQ ID NO: 548847 - DNA, 33 bp, Homo sapien
taataagcaggtgccaagacactggtgaggaca

SEQ ID NO: 548848 - DNA, 33 bp, Homo sapien
taataagcaggtgccaggacactggtgaggaca

SEQ ID NO: 548849 - DNA, 33 bp, Homo sapien
tagttaacaaaatagacgtgtcatgagtcttct

SEQ ID NO: 548850 - DNA, 33 bp, Homo sapien
tagttaacaaaatagatgtgtcatgagtcttct

SEQ ID NO: 548851 - DNA, 33 bp, Homo sapien
caattaagagtaatacagattttagtacttggc

SEQ ID NO: 548852 - DNA, 33 bp, Homo sapien
caattaagagtaatacggattttagtacttggc

SEQ ID NO: 548853 - DNA, 33 bp, Homo sapien
tctcagcgatgaaaaacagagtaactatgaaca

SEQ ID NO: 548854 - DNA, 33 bp, Homo sapien
tctcagcgatgaaaaatagagtaactatgaaca

SEQ ID NO: 548855 - DNA, 33 bp, Homo sapien
aacacctcaatgcctaccaacaggtgaataaac

SEQ ID NO: 548856 - DNA, 33 bp, Homo sapien
aacacctcaatgcctatcaacaggtgaataaac

SEQ ID NO: 548857 - DNA, 33 bp, Homo sapien
tttagctcaaactatacgcaaaaactaactcaa

SEQ ID NO: 548858 - DNA, 33 bp, Homo sapien
tttagctcaaactatatgcaaaaactaactcaa

SEQ ID NO: 548859 - DNA, 33 bp, Homo sapien
atacatttttttatccactcaataactcatggt

SEQ ID NO: 548860 - DNA, 33 bp, Homo sapien
atacatttttttatccgctcaataactcatggt

SEQ ID NO: 548861 - DNA, 33 bp, Homo sapien
acttttctgcaccatcaaaatctttatcaagat

SEQ ID NO: 548862 - DNA, 33 bp, Homo sapien
acttttctgcaccatcgaaatctttatcaagat

SEQ ID NO: 548863 - DNA, 33 bp, Homo sapien
atctttttagctggaacgtaagcaactcacctc

SEQ ID NO: 548864 - DNA, 33 bp, Homo sapien
atctttttagctggaatgtaagcaactcacctc

SEQ ID NO: 548865 - DNA, 33 bp, Homo sapien
catcaacctcaaggagaatgtcctctcattgca

SEQ ID NO: 548866 - DNA, 33 bp, Homo sapien
catcaacctcaaggaggatgtcctctcattgca

SEQ ID NO: 548867 - DNA, 33 bp, Homo sapien
tggagcagaatgggaacgagaacgcagaaaaac

SEQ ID NO: 548868 - DNA, 33 bp, Homo sapien
tggagcagaatgggaatgagaacgcagaaaaac

SEQ ID NO: 548869 - DNA, 33 bp, Homo sapien
atctttataaatgaacagccactgatttttcta

SEQ ID NO: 548870 - DNA, 33 bp, Homo sapien
atctttataaatgaactgccactgatttttcta

SEQ ID NO: 548871 - DNA, 33 bp, Homo sapien
aaccttgaacagtccagctaatacagagttatt

SEQ ID NO: 548872 - DNA, 33 bp, Homo sapien
aaccttgaacagtccatctaatacagagttatt

SEQ ID NO: 548873 - DNA, 33 bp, Homo sapien
ctgtggttctccaagacgcatgttaatcttttt

SEQ ID NO: 548874 - DNA, 33 bp, Homo sapien
ctgtggttctccaagaggcatgttaatcttttt

SEQ ID NO: 548875 - DNA, 33 bp, Homo sapien
gagaaccacagttccacctctttagtagttttt

SEQ ID NO: 548876 - DNA, 33 bp, Homo sapien
gagaaccacagttccatctctttagtagttttt

SEQ ID NO: 548877 - DNA, 33 bp, Homo sapien
aggatgacaacttgcaaatttgaaacttgtttg

SEQ ID NO: 548878 - DNA, 33 bp, Homo sapien
aggatgacaacttgcagatttgaaacttgtttg

SEQ ID NO: 548879 - DNA, 33 bp, Homo sapien
ccatttaagacccaaacggcccaaggaaccaat

SEQ ID NO: 548880 - DNA, 33 bp, Homo sapien
ccatttaagacccaaatggcccaaggaaccaat

SEQ ID NO: 548881 - DNA, 33 bp, Homo sapien
ggacatccagcacaagaaggaaggaacattttg

SEQ ID NO: 548882 - DNA, 33 bp, Homo sapien
ggacatccagcacaaggaggaaggaacattttg

SEQ ID NO: 548883 - DNA, 33 bp, Homo sapien; identical to SEQ ID NO: 548881

SEQ ID NO: 548884 - DNA, 33 bp, Homo sapien; identical to SEQ ID NO: 548882

SEQ ID NO: 548885 - DNA, 33 bp, Homo sapien
aaaacacatttgaacaatagtaaacattgagat

SEQ ID NO: 548886 - DNA, 33 bp, Homo sapien
aaaacacatttgaacattagtaaacattgagat

SEQ ID NO: 548887 - DNA, 33 bp, Homo sapien
cctctttgttcccagcactcagactgtggccac

SEQ ID NO: 548888 - DNA, 33 bp, Homo sapien
cctctttgttcccagcgctcagactgtggccac

SEQ ID NO: 548889 - DNA, 33 bp, Homo sapien
ttacaggaaccttggcaaagtgtatacagactg

SEQ ID NO: 548890 - DNA, 33 bp, Homo sapien
ttacaggaaccttggcgaagtgtatacagactg

SEQ ID NO: 548891 - DNA, 33 bp, Homo sapien
tttgaattacttagcccggcattaaagtgctcc

SEQ ID NO: 548892 - DNA, 33 bp, Homo sapien
tttgaattacttagcctggcattaaagtgctcc

SEQ ID NO: 548893 - DNA, 33 bp, Homo sapien
actcttacaacatctgcatctattgctgaaaca

SEQ ID NO: 548894 - DNA, 33 bp, Homo sapien
actcttacaacatctgtatctattgctgaaaca

SEQ ID NO: 548895 - DNA, 33 bp, Homo sapien
ctccaactcaaaatcagatttttttcattgatg

SEQ ID NO: 548896 - DNA, 33 bp, Homo sapien
ctccaactcaaaatcatatttttttcattgatg

SEQ ID NO: 548897 - DNA, 33 bp, Homo sapien
aaaagctcaactccccccaaacagcatctggct

SEQ ID NO: 548898 - DNA, 33 bp, Homo sapien
aaaagctcaactccccgcaaacagcatctggct

SEQ ID NO: 548899 - DNA, 33 bp, Homo sapien
ggaccacattaagaagacatgtgagctaaaaat

SEQ ID NO: 548900 - DNA, 33 bp, Homo sapien
ggaccacattaagaagtcatgtgagctaaaaat

SEQ ID NO: 548901 - DNA, 33 bp, Homo sapien
tgcttctgtttctttacctatgactttatactg

SEQ ID NO: 548902 - DNA, 33 bp, Homo sapien
tgcttctgtttctttagctatgactttatactg

SEQ ID NO: 548903 - DNA, 33 bp, Homo sapien
gcgaccgagaagactccctttacatcagtataa

SEQ ID NO: 548904 - DNA, 33 bp, Homo sapien
gcgaccgagaagactcgctttacatcagtataa

SEQ ID NO: 548905 - DNA, 33 bp, Homo sapien
actggaatcttgagagaacaaaagcttctcatt

SEQ ID NO: 548906 - DNA, 33 bp, Homo sapien
actggaatcttgagaggacaaaagcttctcatt

SEQ ID NO: 548907 - DNA, 33 bp, Homo sapien
aaaaaatgtccttgaaacaaaattgtccttagc

SEQ ID NO: 548908 - DNA, 33 bp, Homo sapien
aaaaaatgtccttgaaccaaaattgtccttagc

SEQ ID NO: 548909 - DNA, 33 bp, Homo sapien
tagttttcttcatacaagtctcatacctttcag

SEQ ID NO: 548910 - DNA, 33 bp, Homo sapien
tagttttcttcatacaggtctcatacctttcag

SEQ ID NO: 548911 - DNA, 33 bp, Homo sapien
gtaaagcagccccaaaataagttatgctttgat

SEQ ID NO: 548912 - DNA, 33 bp, Homo sapien
gtaaagcagccccaaagtaagttatgctttgat

SEQ ID NO: 548913 - DNA, 33 bp, Homo sapien
tttaccatagccatacgccatgagctaagagaa

SEQ ID NO: 548914 - DNA, 33 bp, Homo sapien
tttaccatagccatactccatgagctaagagaa

SEQ ID NO: 548915 - DNA, 33 bp, Homo sapien
catagcatccaccaaagtgactactacctgccc

SEQ ID NO: 548916 - DNA, 33 bp, Homo sapien
catagcatccaccaaattgactactacctgccc

SEQ ID NO: 548917 - DNA, 33 bp, Homo sapien
gtcacagctttcaggacgccctaagaggcaagc

SEQ ID NO: 548918 - DNA, 33 bp, Homo sapien
gtcacagctttcaggatgccctaagaggcaagc

SEQ ID NO: 548919 - DNA, 33 bp, Homo sapien
gtcaagtttgccttcaatgaagcagaagtggtt

SEQ ID NO: 548920 - DNA, 33 bp, Homo sapien
gtcaagtttgccttcagtgaagcagaagtggtt

SEQ ID NO: 548921 - DNA, 33 bp, Homo sapien
gtagtcccatcgtaacgctaggagcatctgtac

SEQ ID NO: 548922 - DNA, 33 bp, Homo sapien
gtagtcccatcgtaactctaggagcatctgtac

SEQ ID NO: 548923 - DNA, 33 bp, Homo sapien
aagacatttgttacatcaagagtttttaattgc

SEQ ID NO: 548924 - DNA, 33 bp, Homo sapien
aagacatttgttacattaagagtttttaattgc

SEQ ID NO: 548925 - DNA, 33 bp, Homo sapien
agccttctgacacttgaatgaatgagtttagaa

SEQ ID NO: 548926 - DNA, 33 bp, Homo sapien
agccttctgacacttggatgaatgagtttagaa

SEQ ID NO: 548927 - DNA, 33 bp, Homo sapien
tggatatcacagacacggggtagggatgtggga

SEQ ID NO: 548928 - DNA, 33 bp, Homo sapien
tggatatcacagacactgggtagggatgtggga

SEQ ID NO: 548929 - DNA, 33 bp, Homo sapien
ttactccaaacttctacctgaagtctaacaggt

SEQ ID NO: 548930 - DNA, 33 bp, Homo sapien
ttactccaaacttctatctgaagtctaacaggt

SEQ ID NO: 548931 - DNA, 33 bp, Homo sapien
atgcttttacctggtaagaatggtttcctctta

SEQ ID NO: 548932 - DNA, 33 bp, Homo sapien
atgcttttacctggtaggaatggtttcctctta

SEQ ID NO: 548933 - DNA, 33 bp, Homo sapien
gcactaaatagaccacaaacggactcttgttta

SEQ ID NO: 548934 - DNA, 33 bp, Homo sapien
gcactaaatagaccacgaacggactcttgttta

SEQ ID NO: 548935 - DNA, 33 bp, Homo sapien
atcctgttaaacaaataatttgggtcttccatc

SEQ ID NO: 548936 - DNA, 33 bp, Homo sapien
atcctgttaaacaaatcatttgggtcttccatc

SEQ ID NO: 548937 - DNA, 33 bp, Homo sapien
agccccaggagaaaaaatcctccagatgctcaa

SEQ ID NO: 548938 - DNA, 33 bp, Homo sapien
agccccaggagaaaaactcctccagatgctcaa

SEQ ID NO: 548939 - DNA, 33 bp, Homo sapien
atttggacacaccgatcaacacatagatacatg

SEQ ID NO: 548940 - DNA, 33 bp, Homo sapien
atttggacacaccgattaacacatagatacatg

SEQ ID NO: 548941 - DNA, 33 bp, Homo sapien
ggaattcttggacctgaaaggaagcattttttt

SEQ ID NO: 548942 - DNA, 33 bp, Homo sapien
ggaattcttggacctgcaaggaagcattttttt

SEQ ID NO: 548943 - DNA, 33 bp, Homo sapien
gttattttcctgtcaaccaattttatagcctgt

SEQ ID NO: 548944 - DNA, 33 bp, Homo sapien
gttattttcctgtcaatcaattttatagcctgt

SEQ ID NO: 548945 - DNA, 33 bp, Homo sapien
ggttcattgattttggaaggaactcctctgcaa

SEQ ID NO: 548946 - DNA, 33 bp, Homo sapien
ggttcattgattttgggaggaactcctctgcaa

SEQ ID NO: 548947 - DNA, 33 bp, Homo sapien
gacatttatgctgcagaaagtcctatcattttc

SEQ ID NO: 548948 - DNA, 33 bp, Homo sapien
gacatttatgctgcaggaagtcctatcattttc

SEQ ID NO: 548949 - DNA, 33 bp, Homo sapien
actgtgtctttaactacggcttgcttaagagtt

SEQ ID NO: 548950 - DNA, 33 bp, Homo sapien
actgtgtctttaactatggcttgcttaagagtt

SEQ ID NO: 548951 - DNA, 33 bp, Homo sapien
ctcatcgatgctgaccactatttttaggctgct

SEQ ID NO: 548952 - DNA, 33 bp, Homo sapien
ctcatcgatgctgaccgctatttttaggctgct

SEQ ID NO: 548953 - DNA, 33 bp, Homo sapien
gagagatggggcataaagtgagcaatggcaggt

SEQ ID NO: 548954 - DNA, 33 bp, Homo sapien
gagagatggggcataacgtgagcaatggcaggt

SEQ ID NO: 548955 - DNA, 33 bp, Homo sapien
gaaaagctgctttttcacctcagaaccgtatta

SEQ ID NO: 548956 - DNA, 33 bp, Homo sapien
gaaaagctgctttttcgcctcagaaccgtatta

SEQ ID NO: 548957 - DNA, 33 bp, Homo sapien
tctatagtagcctgaactaaaaactcatcaaca

SEQ ID NO: 548958 - DNA, 33 bp, Homo sapien
tctatagtagcctgaattaaaaactcatcaaca

SEQ ID NO: 548959 - DNA, 33 bp, Homo sapien
ttgttttctgctacaaagttttcctgaaggacc

SEQ ID NO: 548960 - DNA, 33 bp, Homo sapien
ttgttttctgctacaatgttttcctgaaggacc

SEQ ID NO: 548961 - DNA, 33 bp, Homo sapien
tcactttatttaattacggctagaaagataatc

SEQ ID NO: 548962 - DNA, 33 bp, Homo sapien
tcactttatttaattatggctagaaagataatc

SEQ ID NO: 548963 - DNA, 33 bp, Homo sapien
taatagatgggctttagggaccgaatatatgta

SEQ ID NO: 548964 - DNA, 33 bp, Homo sapien
taatagatgggctttatggaccgaatatatgta

SEQ ID NO: 548965 - DNA, 33 bp, Homo sapien
tgtgaaaaagccacccaatattctgcctccaac

SEQ ID NO: 548966 - DNA, 33 bp, Homo sapien
tgtgaaaaagccacccgatattctgcctccaac

SEQ ID NO: 548967 - DNA, 33 bp, Homo sapien
tataaaaagtctaagaaggttacaggccaggtg

SEQ ID NO: 548968 - DNA, 33 bp, Homo sapien
tataaaaagtctaagacggttacaggccaggtg

SEQ ID NO: 548969 - DNA, 33 bp, Homo sapien
acaatgagctaggactaaaatcctggacaccca

SEQ ID NO: 548970 - DNA, 33 bp, Homo sapien
acaatgagctaggactgaaatcctggacaccca

SEQ ID NO: 548971 - DNA, 33 bp, Homo sapien
cgagacagaacaaaaactttcctgcttaattct

SEQ ID NO: 548972 - DNA, 33 bp, Homo sapien
cgagacagaacaaaaattttcctgcttaattct

SEQ ID NO: 548973 - DNA, 33 bp, Homo sapien
tatgttcattgtgtgacaattattctgtaggct

SEQ ID NO: 548974 - DNA, 33 bp, Homo sapien
tatgttcattgtgtgataattattctgtaggct

SEQ ID NO: 548975 - DNA, 33 bp, Homo sapien
ggacatatattttggcaaacatgacatcactga

SEQ ID NO: 548976 - DNA, 33 bp, Homo sapien
ggacatatattttggcgaacatgacatcactga

SEQ ID NO: 548977 - DNA, 33 bp, Homo sapien
gatatttcttcccataagcctcttcctgtctct

SEQ ID NO: 548978 - DNA, 33 bp, Homo sapien
gatatttcttcccataggcctcttcctgtctct

SEQ ID NO: 548979 - DNA, 33 bp, Homo sapien
ttagggagaagatgagaaggatagaggccaaga

SEQ ID NO: 548980 - DNA, 33 bp, Homo sapien
ttagggagaagatgagtaggatagaggccaaga

SEQ ID NO: 548981 - DNA, 33 bp, Homo sapien
cgtaccaaagttcaggaatgtttgtgctgtctt

SEQ ID NO: 548982 - DNA, 33 bp, Homo sapien
cgtaccaaagttcaggtatgtttgtgctgtctt

SEQ ID NO: 548983 - DNA, 33 bp, Homo sapien
cccctatgccacatcaaccatcgagcccggtgc

SEQ ID NO: 548984 - DNA, 33 bp, Homo sapien
cccctatgccacatcagccatcgagcccggtgc

SEQ ID NO: 548985 - DNA, 33 bp, Homo sapien
ttccctttctggtaaaatggccattactgtcaa

SEQ ID NO: 548986 - DNA, 33 bp, Homo sapien
ttccctttctggtaaagtggccattactgtcaa

SEQ ID NO: 548987 - DNA, 33 bp, Homo sapien
cttgtggcaacttctagcaaataggacaaacat

SEQ ID NO: 548988 - DNA, 33 bp, Homo sapien
cttgtggcaacttctatcaaataggacaaacat

SEQ ID NO: 548989 - DNA, 33 bp, Homo sapien
cacctcttctatactcacgctcctcagcttctc

SEQ ID NO: 548990 - DNA, 33 bp, Homo sapien
cacctcttctatactcgcgctcctcagcttctc

SEQ ID NO: 548991 - DNA, 33 bp, Homo sapien
tcgaggctctccaagtaaaaaaggagagagggt

SEQ ID NO: 548992 - DNA, 33 bp, Homo sapien
tcgaggctctccaagtgaaaaaggagagagggt

SEQ ID NO: 548993 - DNA, 33 bp, Homo sapien
gaaaaagacacggagacacagagagaacaggac

SEQ ID NO: 548994 - DNA, 33 bp, Homo sapien
gaaaaagacacggagagacagagagaacaggac

SEQ ID NO: 548995 - DNA, 33 bp, Homo sapien
tgaatgaataaacgaaatgtggtagagatgtat

SEQ ID NO: 548996 - DNA, 33 bp, Homo sapien
tgaatgaataaacgaattgtggtagagatgtat

SEQ ID NO: 548997 - DNA, 33 bp, Homo sapien
tttgcaaaagggtaagccaggataggtagcgtt

SEQ ID NO: 548998 - DNA, 33 bp, Homo sapien
tttgcaaaagggtaagtcaggataggtagcgtt

SEQ ID NO: 548999 - DNA, 33 bp, Homo sapien
tcttctggtcctccagacatgattctgtaagtc

SEQ ID NO: 549000 - DNA, 33 bp, Homo sapien
tcttctggtcctccagtcatgattctgtaagtc

SEQ ID NO: 549001 - DNA, 33 bp, Homo sapien
aatgcaacaatgacaaccttaaaggcagctaga

SEQ ID NO: 549002 - DNA, 33 bp, Homo sapien
aatgcaacaatgacaatcttaaaggcagctaga

SEQ ID NO: 549003 - DNA, 33 bp, Homo sapien
atgattctagcccataacaatgaaaatgcattt

SEQ ID NO: 549004 - DNA, 33 bp, Homo sapien
atgattctagcccatagcaatgaaaatgcattt

SEQ ID NO: 549005 - DNA, 33 bp, Homo sapien
atagcaagcgctctaacgacctctgtttcactg

SEQ ID NO: 549006 - DNA, 33 bp, Homo sapien
atagcaagcgctctaatgacctctgtttcactg

SEQ ID NO: 549007 - DNA, 33 bp, Homo sapien
acatttcatttcttacaaggcagctggtggaga

SEQ ID NO: 549008 - DNA, 33 bp, Homo sapien
acatttcatttcttacgaggcagctggtggaga

SEQ ID NO: 549009 - DNA, 33 bp, Homo sapien
gtcctgagccagggagaatcttcccagttgtct

SEQ ID NO: 549010 - DNA, 33 bp, Homo sapien
gtcctgagccagggagcatcttcccagttgtct

SEQ ID NO: 549011 - DNA, 33 bp, Homo sapien
tatgtgtgacaacttgaataaaatctcattcat

SEQ ID NO: 549012 - DNA, 33 bp, Homo sapien
tatgtgtgacaacttggataaaatctcattcat

SEQ ID NO: 549013 - DNA, 33 bp, Homo sapien
accacaaccctggtaccatactcatttctcaga

SEQ ID NO: 549014 - DNA, 33 bp, Homo sapien
accacaaccctggtacgatactcatttctcaga

SEQ ID NO: 549015 - DNA, 33 bp, Homo sapien
atactgggtaggtgcccagcatatgctctcagc

SEQ ID NO: 549016 - DNA, 33 bp, Homo sapien
atactgggtaggtgcctagcatatgctctcagc

SEQ ID NO: 549017 - DNA, 33 bp, Homo sapien
agccagcttggttagtcacctcaaatggggccc

SEQ ID NO: 549018 - DNA, 33 bp, Homo sapien
agccagcttggttagttacctcaaatggggccc

SEQ ID NO: 549019 - DNA, 33 bp, Homo sapien
cagaggaaagagggccacacaaacaaaggcata

SEQ ID NO: 549020 - DNA, 33 bp, Homo sapien
cagaggaaagagggccgcacaaacaaaggcata

SEQ ID NO: 549021 - DNA, 33 bp, Homo sapien
tgttctgaaggagcacgccgagctgtgagagag

SEQ ID NO: 549022 - DNA, 33 bp, Homo sapien
tgttctgaaggagcactccgagctgtgagagag

SEQ ID NO: 549023 - DNA, 33 bp, Homo sapien
agccctaaggaagaacacttcagacaacaaatc

SEQ ID NO: 549024 - DNA, 33 bp, Homo sapien
agccctaaggaagaacccttcagacaacaaatc

SEQ ID NO: 549025 - DNA, 33 bp, Homo sapien
ggggagctctccgcaccgtcttgagcagctgtg

SEQ ID NO: 549026 - DNA, 33 bp, Homo sapien
ggggagctctccgcacggtcttgagcagctgtg

SEQ ID NO: 549027 - DNA, 33 bp, Homo sapien
ctgggcacctcagaaacgtgaactgggcaaccc

SEQ ID NO: 549028 - DNA, 33 bp, Homo sapien
ctgggcacctcagaaatgtgaactgggcaaccc

SEQ ID NO: 549029 - DNA, 33 bp, Homo sapien
ctcgtcaaacaaactaaataagacatcagggac

SEQ ID NO: 549030 - DNA, 33 bp, Homo sapien
ctcgtcaaacaaactagataagacatcagggac

SEQ ID NO: 549031 - DNA, 33 bp, Homo sapien
ggctctccaaccagcacgttcttccttccagct

SEQ ID NO: 549032 - DNA, 33 bp, Homo sapien
ggctctccaaccagcatgttcttccttccagct

SEQ ID NO: 549033 - DNA, 33 bp, Homo sapien
gggtgtcttgcagtgaaaaagagagactggact

SEQ ID NO: 549034 - DNA, 33 bp, Homo sapien
gggtgtcttgcagtgagaaagagagactggact

SEQ ID NO: 549035 - DNA, 33 bp, Homo sapien
catgcttaagacacaaagatacaggtctacttc

SEQ ID NO: 549036 - DNA, 33 bp, Homo sapien
catgcttaagacacaaggatacaggtctacttc

SEQ ID NO: 549037 - DNA, 33 bp, Homo sapien
acagttaagtaagagaactttgagactctgtag

SEQ ID NO: 549038 - DNA, 33 bp, Homo sapien
acagttaagtaagagagctttgagactctgtag

SEQ ID NO: 549039 - DNA, 33 bp, Homo sapien
tctcctatcagacaccaaaagatgacacttttt

SEQ ID NO: 549040 - DNA, 33 bp, Homo sapien
tctcctatcagacaccgaaagatgacacttttt

SEQ ID NO: 549041 - DNA, 33 bp, Homo sapien
gaattctgaaatttgaatagatcatgaataagc

SEQ ID NO: 549042 - DNA, 33 bp, Homo sapien
gaattctgaaatttgactagatcatgaataagc

SEQ ID NO: 549043 - DNA, 33 bp, Homo sapien
tcagcgtacttcctgacgaaaatgttcctggac

SEQ ID NO: 549044 - DNA, 33 bp, Homo sapien
tcagcgtacttcctgatgaaaatgttcctggac

SEQ ID NO: 549045 - DNA, 33 bp, Homo sapien
ggtcacctagtccatgccaatacctcttcagaa

SEQ ID NO: 549046 - DNA, 33 bp, Homo sapien
ggtcacctagtccatgtcaatacctcttcagaa

SEQ ID NO: 549047 - DNA, 33 bp, Homo sapien
tggagcctgacttccaaatatgatcaaatgata

SEQ ID NO: 549048 - DNA, 33 bp, Homo sapien
tggagcctgacttccacatatgatcaaatgata

SEQ ID NO: 549049 - DNA, 33 bp, Homo sapien
attaaaagagagctcacagtattaaccaaattc

SEQ ID NO: 549050 - DNA, 33 bp, Homo sapien
attaaaagagagctcagagtattaaccaaattc

SEQ ID NO: 549051 - DNA, 33 bp, Homo sapien
agtttagctaccctgaaattatgatgggaggtc

SEQ ID NO: 549052 - DNA, 33 bp, Homo sapien
agtttagctaccctgagattatgatgggaggtc

SEQ ID NO: 549053 - DNA, 33 bp, Homo sapien
cccagtttgagctgtccgaagtttttggctgca

SEQ ID NO: 549054 - DNA, 33 bp, Homo sapien
cccagtttgagctgtctgaagtttttggctgca

SEQ ID NO: 549055 - DNA, 33 bp, Homo sapien
ttttctctgagctggcgcttaacagttgctctt

SEQ ID NO: 549056 - DNA, 33 bp, Homo sapien
ttttctctgagctggctcttaacagttgctctt

SEQ ID NO: 549057 - DNA, 33 bp, Homo sapien
tctgtcataacctcacaaagagagtgccaagca

SEQ ID NO: 549058 - DNA, 33 bp, Homo sapien
tctgtcataacctcacgaagagagtgccaagca

SEQ ID NO: 549059 - DNA, 33 bp, Homo sapien
tgggtaatttaaagccacaggtgaggttattac

SEQ ID NO: 549060 - DNA, 33 bp, Homo sapien
tgggtaatttaaagccgcaggtgaggttattac

SEQ ID NO: 549061 - DNA, 33 bp, Homo sapien
tcagagccaaactggaccagaatttagagcatg

SEQ ID NO: 549062 - DNA, 33 bp, Homo sapien
tcagagccaaactggatcagaatttagagcatg

SEQ ID NO: 549063 - DNA, 33 bp, Homo sapien
ttacctggaaacttcaagtatctagaacatagc

SEQ ID NO: 549064 - DNA, 33 bp, Homo sapien
ttacctggaaacttcaggtatctagaacatagc

SEQ ID NO: 549065 - DNA, 33 bp, Homo sapien
acttttaaactgtcacggcttactctttcctaa

SEQ ID NO: 549066 - DNA, 33 bp, Homo sapien
acttttaaactgtcactgcttactctttcctaa

SEQ ID NO: 549067 - DNA, 33 bp, Homo sapien
catcctagccaaggccacaacacataagtgaag

SEQ ID NO: 549068 - DNA, 33 bp, Homo sapien
catcctagccaaggccgcaacacataagtgaag

SEQ ID NO: 549069 - DNA, 33 bp, Homo sapien
tactagggaatctcacaaggtgatcagtttgca

SEQ ID NO: 549070 - DNA, 33 bp, Homo sapien
tactagggaatctcacgaggtgatcagtttgca

SEQ ID NO: 549071 - DNA, 33 bp, Homo sapien
gaaggggaggctgacccgcaaggactctactaa

SEQ ID NO: 549072 - DNA, 33 bp, Homo sapien
gaaggggaggctgacctgcaaggactctactaa

SEQ ID NO: 549073 - DNA, 33 bp, Homo sapien
tggagccaatcacaccagagttgatgagggaag

SEQ ID NO: 549074 - DNA, 33 bp, Homo sapien
tggagccaatcacaccggagttgatgagggaag

SEQ ID NO: 549075 - DNA, 33 bp, Homo sapien
ccctacactcatcctacctcaatctggcttcta

SEQ ID NO: 549076 - DNA, 33 bp, Homo sapien
ccctacactcatcctagctcaatctggcttcta

SEQ ID NO: 549077 - DNA, 33 bp, Homo sapien
atcttgattctcaagacgttaaaatgtgaagaa

SEQ ID NO: 549078 - DNA, 33 bp, Homo sapien
atcttgattctcaagatgttaaaatgtgaagaa

SEQ ID NO: 549079 - DNA, 33 bp, Homo sapien
tgaaaagggcaaataacgacttatattgttgca

SEQ ID NO: 549080 - DNA, 33 bp, Homo sapien
tgaaaagggcaaataatgacttatattgttgca

SEQ ID NO: 549081 - DNA, 33 bp, Homo sapien
cttgtttttctcccctcacagccccagctcgtg

SEQ ID NO: 549082 - DNA, 33 bp, Homo sapien
cttgtttttctccccttacagccccagctcgtg

SEQ ID NO: 549083 - DNA, 33 bp, Homo sapien
gctgagagaagagagcagaaatgagggaatgga

SEQ ID NO: 549084 - DNA, 33 bp, Homo sapien
gctgagagaagagagcggaaatgagggaatgga

SEQ ID NO: 549085 - DNA, 33 bp, Homo sapien
atgaatgaaatattaccataggcttcaacatgg

SEQ ID NO: 549086 - DNA, 33 bp, Homo sapien
atgaatgaaatattactataggcttcaacatgg

SEQ ID NO: 549087 - DNA, 33 bp, Homo sapien
ctcccgtgttcaataaaactgtgacacaaacac

SEQ ID NO: 549088 - DNA, 33 bp, Homo sapien
ctcccgtgttcaataagactgtgacacaaacac

SEQ ID NO: 549089 - DNA, 33 bp, Homo sapien
aatttggcagtttctacgactatgatgggagat

SEQ ID NO: 549090 - DNA, 33 bp, Homo sapien
aatttggcagtttctaggactatgatgggagat

SEQ ID NO: 549091 - DNA, 33 bp, Homo sapien
tagacagctgagaggaactgatcatgtagggag

SEQ ID NO: 549092 - DNA, 33 bp, Homo sapien
tagacagctgagaggacctgatcatgtagggag

SEQ ID NO: 549093 - DNA, 33 bp, Homo sapien
tcccaccagagaatcccatactagtgaccactg

SEQ ID NO: 549094 - DNA, 33 bp, Homo sapien
tcccaccagagaatcctatactagtgaccactg

SEQ ID NO: 549095 - DNA, 33 bp, Homo sapien
tgtcccttgctttttcactcatcaatgtttctt

SEQ ID NO: 549096 - DNA, 33 bp, Homo sapien
tgtcccttgctttttcgctcatcaatgtttctt

SEQ ID NO: 549097 - DNA, 33 bp, Homo sapien
aataagaccttcccaacgacaaactgtatgtga

SEQ ID NO: 549098 - DNA, 33 bp, Homo sapien
aataagaccttcccaatgacaaactgtatgtga

SEQ ID NO: 549099 - DNA, 33 bp, Homo sapien
tacttgtgctgttcacagaggtggtcatctcac

SEQ ID NO: 549100 - DNA, 33 bp, Homo sapien
tacttgtgctgttcacggaggtggtcatctcac

SEQ ID NO: 549101 - DNA, 33 bp, Homo sapien
actccatcagaccctgaacggggatagctctta

SEQ ID NO: 549102 - DNA, 33 bp, Homo sapien
actccatcagaccctggacggggatagctctta

SEQ ID NO: 549103 - DNA, 33 bp, Homo sapien
agccacttaatatatgacaatgtgttacagcag

SEQ ID NO: 549104 - DNA, 33 bp, Homo sapien
agccacttaatatatggcaatgtgttacagcag

SEQ ID NO: 549105 - DNA, 33 bp, Homo sapien
tgcatctgagttcaaacgtctgtcactcactgg

SEQ ID NO: 549106 - DNA, 33 bp, Homo sapien
tgcatctgagttcaaaggtctgtcactcactgg

SEQ ID NO: 549107 - DNA, 33 bp, Homo sapien
aacataacttaattccactgaactcaacactta

SEQ ID NO: 549108 - DNA, 33 bp, Homo sapien
aacataacttaattccgctgaactcaacactta

SEQ ID NO: 549109 - DNA, 33 bp, Homo sapien
gtgttctctctcacgacgtgatgccttccgcca

SEQ ID NO: 549110 - DNA, 33 bp, Homo sapien
gtgttctctctcacgatgtgatgccttccgcca

SEQ ID NO: 549111 - DNA, 33 bp, Homo sapien
gagaaggcaatagggcaaaggtccaaataaggg

SEQ ID NO: 549112 - DNA, 33 bp, Homo sapien
gagaaggcaatagggcgaaggtccaaataaggg

SEQ ID NO: 549113 - DNA, 33 bp, Homo sapien
ttcctgggacccagaaatgtgaccttatttgga

SEQ ID NO: 549114 - DNA, 33 bp, Homo sapien
ttcctgggacccagaagtgtgaccttatttgga

SEQ ID NO: 549115 - DNA, 33 bp, Homo sapien
ctgggttgatggaggacgagaaggatcagggag

SEQ ID NO: 549116 - DNA, 33 bp, Homo sapien
ctgggttgatggaggatgagaaggatcagggag

SEQ ID NO: 549117 - DNA, 33 bp, Homo sapien
tgagctctgtcctctaacaccttatctcacctc

SEQ ID NO: 549118 - DNA, 33 bp, Homo sapien
tgagctctgtcctctagcaccttatctcacctc

SEQ ID NO: 549119 - DNA, 33 bp, Homo sapien
ccactggcaacatgacaaatgcacccgagttaa

SEQ ID NO: 549120 - DNA, 33 bp, Homo sapien
ccactggcaacatgacgaatgcacccgagttaa

SEQ ID NO: 549121 - DNA, 33 bp, Homo sapien
acactgtctctagaaacagcttcttttagggtc

SEQ ID NO: 549122 - DNA, 33 bp, Homo sapien
acactgtctctagaaatagcttcttttagggtc

SEQ ID NO: 549123 - DNA, 33 bp, Homo sapien
ccacaacacgaccccacgcaactcccacacctg

SEQ ID NO: 549124 - DNA, 33 bp, Homo sapien
ccacaacacgaccccatgcaactcccacacctg

SEQ ID NO: 549125 - DNA, 33 bp, Homo sapien
tacaggctctggcttcactgggaaactcaggaa

SEQ ID NO: 549126 - DNA, 33 bp, Homo sapien
tacaggctctggcttcgctgggaaactcaggaa

SEQ ID NO: 549127 - DNA, 33 bp, Homo sapien
ggttggtttatcagcacattaaaagcacctcct

SEQ ID NO: 549128 - DNA, 33 bp, Homo sapien
ggttggtttatcagcatattaaaagcacctcct

SEQ ID NO: 549129 - DNA, 33 bp, Homo sapien
taaaggcacaaaacagacaccacatgatcctct

SEQ ID NO: 549130 - DNA, 33 bp, Homo sapien
taaaggcacaaaacaggcaccacatgatcctct

SEQ ID NO: 549131 - DNA, 33 bp, Homo sapien
gcgtctgtcgtgacagaaatcaaatcagtcatt

SEQ ID NO: 549132 - DNA, 33 bp, Homo sapien
gcgtctgtcgtgacagcaatcaaatcagtcatt

SEQ ID NO: 549133 - DNA, 33 bp, Homo sapien
acagcaaattagccaaaataaaatgccagtaca

SEQ ID NO: 549134 - DNA, 33 bp, Homo sapien
acagcaaattagccaagataaaatgccagtaca

SEQ ID NO: 549135 - DNA, 33 bp, Homo sapien
agggtgactgcacctcaaataaaggccagataa

SEQ ID NO: 549136 - DNA, 33 bp, Homo sapien
agggtgactgcacctcgaataaaggccagataa

SEQ ID NO: 549137 - DNA, 33 bp, Homo sapien
caggacctagtctttgaaatgccaacgcaggga

SEQ ID NO: 549138 - DNA, 33 bp, Homo sapien
caggacctagtctttggaatgccaacgcaggga

SEQ ID NO: 549139 - DNA, 33 bp, Homo sapien
atgagttaagcatgcgacctgattccaattcca

SEQ ID NO: 549140 - DNA, 33 bp, Homo sapien
atgagttaagcatgcggcctgattccaattcca

SEQ ID NO: 549141 - DNA, 33 bp, Homo sapien
atacaggattttataccacatatttgttgtctg

SEQ ID NO: 549142 - DNA, 33 bp, Homo sapien
atacaggattttatactacatatttgttgtctg

SEQ ID NO: 549143 - DNA, 33 bp, Homo sapien
gactttgtctacatccagagagagtgcccacaa

SEQ ID NO: 549144 - DNA, 33 bp, Homo sapien
gactttgtctacatccggagagagtgcccacaa

SEQ ID NO: 549145 - DNA, 33 bp, Homo sapien
gaagctaatccaaatccgactcacaggtggccc

SEQ ID NO: 549146 - DNA, 33 bp, Homo sapien
gaagctaatccaaatctgactcacaggtggccc

SEQ ID NO: 549147 - DNA, 33 bp, Homo sapien
gctcaagtgatcttcacgccttatactccagag

SEQ ID NO: 549148 - DNA, 33 bp, Homo sapien
gctcaagtgatcttcatgccttatactccagag

SEQ ID NO: 549149 - DNA, 33 bp, Homo sapien
tcacagctctacgtaactctcccgtcttctggc

SEQ ID NO: 549150 - DNA, 33 bp, Homo sapien
tcacagctctacgtaagtctcccgtcttctggc

SEQ ID NO: 549151 - DNA, 33 bp, Homo sapien
tacccttccaatacgccgcaaacattaaaaaca

SEQ ID NO: 549152 - DNA, 33 bp, Homo sapien
tacccttccaatacgctgcaaacattaaaaaca

SEQ ID NO: 549153 - DNA, 33 bp, Homo sapien
ttacacacctgagcatcaggaaccaaaagtcca

SEQ ID NO: 549154 - DNA, 33 bp, Homo sapien
ttacacacctgagcatgaggaaccaaaagtcca

SEQ ID NO: 549155 - DNA, 33 bp, Homo sapien
taatgggaggcctctcagaataaattaagtcag

SEQ ID NO: 549156 - DNA, 33 bp, Homo sapien
taatgggaggcctctcggaataaattaagtcag

SEQ ID NO: 549157 - DNA, 33 bp, Homo sapien
ggtttcagataaaataagtctgcctcatcaaga

SEQ ID NO: 549158 - DNA, 33 bp, Homo sapien
ggtttcagataaaatacgtctgcctcatcaaga

SEQ ID NO: 549159 - DNA, 33 bp, Homo sapien
ttcaaagaatgaaaccgctaaaatagctagatt

SEQ ID NO: 549160 - DNA, 33 bp, Homo sapien
ttcaaagaatgaaacctctaaaatagctagatt

SEQ ID NO: 549161 - DNA, 33 bp, Homo sapien
ctagtagcctttgccagtaatataaactgggta

SEQ ID NO: 549162 - DNA, 33 bp, Homo sapien
ctagtagcctttgccattaatataaactgggta

SEQ ID NO: 549163 - DNA, 33 bp, Homo sapien
tgcatatgattgaagcagaaagagtaaaactaa

SEQ ID NO: 549164 - DNA, 33 bp, Homo sapien
tgcatatgattgaagcggaaagagtaaaactaa

SEQ ID NO: 549165 - DNA, 33 bp, Homo sapien
tgatcatgatagcctacgctgtactgtgcaagt

SEQ ID NO: 549166 - DNA, 33 bp, Homo sapien
tgatcatgatagcctatgctgtactgtgcaagt

SEQ ID NO: 549167 - DNA, 33 bp, Homo sapien
atcaggcttctaatccgggaacaaaggaaggaa

SEQ ID NO: 549168 - DNA, 33 bp, Homo sapien
atcaggcttctaatcctggaacaaaggaaggaa

SEQ ID NO: 549169 - DNA, 33 bp, Homo sapien
gaagaaagatggaggcactatactgcacactga

SEQ ID NO: 549170 - DNA, 33 bp, Homo sapien
gaagaaagatggaggcgctatactgcacactga

SEQ ID NO: 549171 - DNA, 33 bp, Homo sapien
agagacagttcttgatcacatgacatagtgaaa

SEQ ID NO: 549172 - DNA, 33 bp, Homo sapien
agagacagttcttgattacatgacatagtgaaa

SEQ ID NO: 549173 - DNA, 33 bp, Homo sapien
attctccttctgggataaaaaagaagttcagga

SEQ ID NO: 549174 - DNA, 33 bp, Homo sapien
attctccttctgggatgaaaaagaagttcagga

SEQ ID NO: 549175 - DNA, 33 bp, Homo sapien
gaagagaatccaataacatcccaaagggaggta

SEQ ID NO: 549176 - DNA, 33 bp, Homo sapien
gaagagaatccaataatatcccaaagggaggta

SEQ ID NO: 549177 - DNA, 33 bp, Homo sapien
aagcattttccattcccaagtaggaattccagt

SEQ ID NO: 549178 - DNA, 33 bp, Homo sapien
aagcattttccattccgaagtaggaattccagt

SEQ ID NO: 549179 - DNA, 33 bp, Homo sapien
gcagaaatgactgactgacttcagaggctaggt

SEQ ID NO: 549180 - DNA, 33 bp, Homo sapien
gcagaaatgactgacttacttcagaggctaggt

SEQ ID NO: 549181 - DNA, 33 bp, Homo sapien
actgtcttcctagaaaccttgcagcagctccac

SEQ ID NO: 549182 - DNA, 33 bp, Homo sapien
actgtcttcctagaaatcttgcagcagctccac

SEQ ID NO: 549183 - DNA, 33 bp, Homo sapien
aggagacagtcctaccaccccgactgttatgtt

SEQ ID NO: 549184 - DNA, 33 bp, Homo sapien
aggagacagtcctaccgccccgactgttatgtt

SEQ ID NO: 549185 - DNA, 33 bp, Homo sapien
taatactacagtattacgccaaatgctaagtgt

SEQ ID NO: 549186 - DNA, 33 bp, Homo sapien
taatactacagtattatgccaaatgctaagtgt

SEQ ID NO: 549187 - DNA, 33 bp, Homo sapien
ctagctcaggaaagtacaatacagggcacagtg

SEQ ID NO: 549188 - DNA, 33 bp, Homo sapien
ctagctcaggaaagtataatacagggcacagtg

SEQ ID NO: 549189 - DNA, 33 bp, Homo sapien
gagtaaaaaactgttcacagctaatccacacag

SEQ ID NO: 549190 - DNA, 33 bp, Homo sapien
gagtaaaaaactgttcgcagctaatccacacag

SEQ ID NO: 549191 - DNA, 33 bp, Homo sapien
agatttttacctaaacgctctataatccagctc

SEQ ID NO: 549192 - DNA, 33 bp, Homo sapien
agatttttacctaaactctctataatccagctc

SEQ ID NO: 549193 - DNA, 33 bp, Homo sapien
aggctggatagaatgaagaccacattgcctcct

SEQ ID NO: 549194 - DNA, 33 bp, Homo sapien
aggctggatagaatgaggaccacattgcctcct

SEQ ID NO: 549195 - DNA, 33 bp, Homo sapien
acatgaggaacctccactccagcagacttcggc

SEQ ID NO: 549196 - DNA, 33 bp, Homo sapien
acatgaggaacctccattccagcagacttcggc

SEQ ID NO: 549197 - DNA, 33 bp, Homo sapien
ggcatgtaagaaaatcccttcattgggtcagga

SEQ ID NO: 549198 - DNA, 33 bp, Homo sapien
ggcatgtaagaaaatctcttcattgggtcagga

SEQ ID NO: 549199 - DNA, 33 bp, Homo sapien
caagtggaaagcacaccggatactttcacttgt

SEQ ID NO: 549200 - DNA, 33 bp, Homo sapien
caagtggaaagcacactggatactttcacttgt

SEQ ID NO: 549201 - DNA, 33 bp, Homo sapien
aactctgggacggttacggaagattgaggttgt

SEQ ID NO: 549202 - DNA, 33 bp, Homo sapien
aactctgggacggttatggaagattgaggttgt

SEQ ID NO: 549203 - DNA, 33 bp, Homo sapien
ggagagactttaaagaaccttctggaacctccg

SEQ ID NO: 549204 - DNA, 33 bp, Homo sapien
ggagagactttaaagagccttctggaacctccg

SEQ ID NO: 549205 - DNA, 33 bp, Homo sapien
agaagcttctgaccacagagtacctgggggtaa

SEQ ID NO: 549206 - DNA, 33 bp, Homo sapien
agaagcttctgaccacggagtacctgggggtaa

SEQ ID NO: 549207 - DNA, 33 bp, Homo sapien
gtcgccctttggaagaacgctggttttgtcaga

SEQ ID NO: 549208 - DNA, 33 bp, Homo sapien
gtcgccctttggaagagcgctggttttgtcaga

SEQ ID NO: 549209 - DNA, 33 bp, Homo sapien
agatttgtgccaggaaatgtacccgtcatcata

SEQ ID NO: 549210 - DNA, 33 bp, Homo sapien
agatttgtgccaggaagtgtacccgtcatcata

SEQ ID NO: 549211 - DNA, 33 bp, Homo sapien
ttgaaatttgagacaactcttggaaaacaattt

SEQ ID NO: 549212 - DNA, 33 bp, Homo sapien
ttgaaatttgagacaagtcttggaaaacaattt

SEQ ID NO: 549213 - DNA, 33 bp, Homo sapien
agattaagtagcaggagaaaacgaatgttgacc

SEQ ID NO: 549214 - DNA, 33 bp, Homo sapien
agattaagtagcaggataaaacgaatgttgacc

SEQ ID NO: 549215 - DNA, 33 bp, Homo sapien
agaagcaaatgtcaaaaatcttgtcctgccaca

SEQ ID NO: 549216 - DNA, 33 bp, Homo sapien
agaagcaaatgtcaaagatcttgtcctgccaca

SEQ ID NO: 549217 - DNA, 33 bp, Homo sapien
gatccaagcagatggcacctaaggtttgccctt

SEQ ID NO: 549218 - DNA, 33 bp, Homo sapien
gatccaagcagatggcgcctaaggtttgccctt

SEQ ID NO: 549219 - DNA, 33 bp, Homo sapien
ggtggatcaggaactacgtcagggagagttaga

SEQ ID NO: 549220 - DNA, 33 bp, Homo sapien
ggtggatcaggaactatgtcagggagagttaga

SEQ ID NO: 549221 - DNA, 33 bp, Homo sapien
ggaagactagaggtgcgaggagacatggctcca

SEQ ID NO: 549222 - DNA, 33 bp, Homo sapien
ggaagactagaggtgctaggagacatggctcca

SEQ ID NO: 549223 - DNA, 33 bp, Homo sapien
aaggaggaaaatgttacgtccaatgagcgattg

SEQ ID NO: 549224 - DNA, 33 bp, Homo sapien
aaggaggaaaatgttatgtccaatgagcgattg

SEQ ID NO: 549225 - DNA, 33 bp, Homo sapien
acaaatgaggagccaaatacctgaaagctatga

SEQ ID NO: 549226 - DNA, 33 bp, Homo sapien
acaaatgaggagccaagtacctgaaagctatga

SEQ ID NO: 549227 - DNA, 33 bp, Homo sapien
cccagttacacgatgacgatttattacagattg

SEQ ID NO: 549228 - DNA, 33 bp, Homo sapien
cccagttacacgatgaggatttattacagattg

SEQ ID NO: 549229 - DNA, 33 bp, Homo sapien
aaggatatgaaccaaccgcgaagcaggctcacc

SEQ ID NO: 549230 - DNA, 33 bp, Homo sapien
aaggatatgaaccaactgcgaagcaggctcacc

SEQ ID NO: 549231 - DNA, 33 bp, Homo sapien
aggggttcattaaagacatttatctgatatgca

SEQ ID NO: 549232 - DNA, 33 bp, Homo sapien
aggggttcattaaagagatttatctgatatgca

SEQ ID NO: 549233 - DNA, 33 bp, Homo sapien
atcctttgtgtacccgcaactaaaatacttttt

SEQ ID NO: 549234 - DNA, 33 bp, Homo sapien
atcctttgtgtacccgtaactaaaatacttttt

SEQ ID NO: 549235 - DNA, 33 bp, Homo sapien
tagtatctaatttctcccgtgatttctactttg

SEQ ID NO: 549236 - DNA, 33 bp, Homo sapien
tagtatctaatttctctcgtgatttctactttg

SEQ ID NO: 549237 - DNA, 33 bp, Homo sapien
ttccttatccagaatacaggctgcaaggccttc

SEQ ID NO: 549238 - DNA, 33 bp, Homo sapien
ttccttatccagaatataggctgcaaggccttc

SEQ ID NO: 549239 - DNA, 33 bp, Homo sapien
aagaataagcaatatacgtagtgcagaacaaat

SEQ ID NO: 549240 - DNA, 33 bp, Homo sapien
aagaataagcaatataggtagtgcagaacaaat

SEQ ID NO: 549241 - DNA, 33 bp, Homo sapien
acatctatgaaaatgtaaaagtccatacccttg

SEQ ID NO: 549242 - DNA, 33 bp, Homo sapien
acatctatgaaaatgtgaaagtccatacccttg

SEQ ID NO: 549243 - DNA, 33 bp, Homo sapien
tatccagaatcagcaaatctgtagacagagggc

SEQ ID NO: 549244 - DNA, 33 bp, Homo sapien
tatccagaatcagcaagtctgtagacagagggc

SEQ ID NO: 549245 - DNA, 33 bp, Homo sapien
tgttttgagacgtccacgataaaattttgaaaa

SEQ ID NO: 549246 - DNA, 33 bp, Homo sapien
tgttttgagacgtccatgataaaattttgaaaa

SEQ ID NO: 549247 - DNA, 33 bp, Homo sapien
acaaaaaactcccaaaatttgcaataaagatta

SEQ ID NO: 549248 - DNA, 33 bp, Homo sapien
acaaaaaactcccaaagtttgcaataaagatta

SEQ ID NO: 549249 - DNA, 33 bp, Homo sapien
ctgacgtgctgcggagacatacatggtgctcac

SEQ ID NO: 549250 - DNA, 33 bp, Homo sapien
ctgacgtgctgcggagtcatacatggtgctcac

SEQ ID NO: 549251 - DNA, 33 bp, Homo sapien
gtttaatccattaaagacattaacacagggcct

SEQ ID NO: 549252 - DNA, 33 bp, Homo sapien
gtttaatccattaaaggcattaacacagggcct

SEQ ID NO: 549253 - DNA, 33 bp, Homo sapien
atgcatacaagaatcacacacaggccaagcacg

SEQ ID NO: 549254 - DNA, 33 bp, Homo sapien
atgcatacaagaatcatacacaggccaagcacg

SEQ ID NO: 549255 - DNA, 33 bp, Homo sapien
aatcaccatttggcagaccatcatagtaataat

SEQ ID NO: 549256 - DNA, 33 bp, Homo sapien
aatcaccatttggcaggccatcatagtaataat

SEQ ID NO: 549257 - DNA, 33 bp, Homo sapien
tttgtgttgatgttcaaatttgtcccagatttg

SEQ ID NO: 549258 - DNA, 33 bp, Homo sapien
tttgtgttgatgttcagatttgtcccagatttg

SEQ ID NO: 549259 - DNA, 33 bp, Homo sapien
ctgaggaggttggcccaaagaggaaatatggcg

SEQ ID NO: 549260 - DNA, 33 bp, Homo sapien
ctgaggaggttggcccgaagaggaaatatggcg

SEQ ID NO: 549261 - DNA, 33 bp, Homo sapien
gcagtgatggtagcaacggaaggtgaattacac

SEQ ID NO: 549262 - DNA, 33 bp, Homo sapien
gcagtgatggtagcaatggaaggtgaattacac

SEQ ID NO: 549263 - DNA, 33 bp, Homo sapien
agacaaggaaaattcacgtggtctccaattttt

SEQ ID NO: 549264 - DNA, 33 bp, Homo sapien
agacaaggaaaattcatgtggtctccaattttt

SEQ ID NO: 549265 - DNA, 33 bp, Homo sapien
caggctggcagttcctaaaatgattatagagtt

SEQ ID NO: 549266 - DNA, 33 bp, Homo sapien
caggctggcagttcctcaaatgattatagagtt

SEQ ID NO: 549267 - DNA, 33 bp, Homo sapien
ctatcacttgaatgaaacttgaaaagtgaaaga

SEQ ID NO: 549268 - DNA, 33 bp, Homo sapien
ctatcacttgaatgaatcttgaaaagtgaaaga

SEQ ID NO: 549269 - DNA, 33 bp, Homo sapien
tgtactgtacactttcaatgggtatgtgaatta

SEQ ID NO: 549270 - DNA, 33 bp, Homo sapien
tgtactgtacactttcgatgggtatgtgaatta

SEQ ID NO: 549271 - DNA, 33 bp, Homo sapien
gtatgtgaattatgtaccaataaaactgttttt

SEQ ID NO: 549272 - DNA, 33 bp, Homo sapien
gtatgtgaattatgtatcaataaaactgttttt

SEQ ID NO: 549273 - DNA, 33 bp, Homo sapien
ctcattttcaatgtcactagagcatatatatac

SEQ ID NO: 549274 - DNA, 33 bp, Homo sapien
ctcattttcaatgtcattagagcatatatatac

SEQ ID NO: 549275 - DNA, 33 bp, Homo sapien
tgtttccatgtttaaacgatcagggaagagctg

SEQ ID NO: 549276 - DNA, 33 bp, Homo sapien
tgtttccatgtttaaatgatcagggaagagctg

SEQ ID NO: 549277 - DNA, 33 bp, Homo sapien
gaagaagaattacaaccacacctgacacacagc

SEQ ID NO: 549278 - DNA, 33 bp, Homo sapien
gaagaagaattacaactacacctgacacacagc

SEQ ID NO: 549279 - DNA, 33 bp, Homo sapien
aaataagtctgggaaaagctgtgtgcagtactg

SEQ ID NO: 549280 - DNA, 33 bp, Homo sapien
aaataagtctgggaaacgctgtgtgcagtactg

SEQ ID NO: 549281 - DNA, 33 bp, Homo sapien
ttagcgctgaggctcaaagtaactctcccttag

SEQ ID NO: 549282 - DNA, 33 bp, Homo sapien
ttagcgctgaggctcagagtaactctcccttag

SEQ ID NO: 549283 - DNA, 33 bp, Homo sapien
acagattaataaggcaccattagataaccagta

SEQ ID NO: 549284 - DNA, 33 bp, Homo sapien
acagattaataaggcatcattagataaccagta

SEQ ID NO: 549285 - DNA, 33 bp, Homo sapien
gggcttcctgtgactaaccaccaaagggaccct

SEQ ID NO: 549286 - DNA, 33 bp, Homo sapien
gggcttcctgtgactatccaccaaagggaccct

SEQ ID NO: 549287 - DNA, 33 bp, Homo sapien
cctgaaatatctgaaaatcagtgttctttgtgg

SEQ ID NO: 549288 - DNA, 33 bp, Homo sapien
cctgaaatatctgaaactcagtgttctttgtgg

SEQ ID NO: 549289 - DNA, 33 bp, Homo sapien
tcttgtctttgtctccagatgttgatatggccc

SEQ ID NO: 549290 - DNA, 33 bp, Homo sapien
tcttgtctttgtctccggatgttgatatggccc

SEQ ID NO: 549291 - DNA, 33 bp, Homo sapien
tgcgtggcacgtagtcaagtgctatgtgggcct

SEQ ID NO: 549292 - DNA, 33 bp, Homo sapien
tgcgtggcacgtagtcgagtgctatgtgggcct

SEQ ID NO: 549293 - DNA, 33 bp, Homo sapien
gttgctgcattttggacgtcttaaatattcctt

SEQ ID NO: 549294 - DNA, 33 bp, Homo sapien
gttgctgcattttggatgtcttaaatattcctt

SEQ ID NO: 549295 - DNA, 33 bp, Homo sapien
cagaaatctcttctaccgcttccttgattgctt

SEQ ID NO: 549296 - DNA, 33 bp, Homo sapien
cagaaatctcttctactgcttccttgattgctt

SEQ ID NO: 549297 - DNA, 33 bp, Homo sapien
tgctcatcaacgaggacgtgcaacgccttctta

SEQ ID NO: 549298 - DNA, 33 bp, Homo sapien
tgctcatcaacgaggatgtgcaacgccttctta

SEQ ID NO: 549299 - DNA, 33 bp, Homo sapien
cacaaggcttagcctcaacgtgtcagaaatggg

SEQ ID NO: 549300 - DNA, 33 bp, Homo sapien
cacaaggcttagcctctacgtgtcagaaatggg

SEQ ID NO: 549301 - DNA, 33 bp, Homo sapien
gtgacccctgtgagccacttctcgtatgtaaaa

SEQ ID NO: 549302 - DNA, 33 bp, Homo sapien
gtgacccctgtgagccgcttctcgtatgtaaaa

SEQ ID NO: 549303 - DNA, 33 bp, Homo sapien
ggctcaccagaaggctcactaaaaatgtgctcc

SEQ ID NO: 549304 - DNA, 33 bp, Homo sapien
ggctcaccagaaggcttactaaaaatgtgctcc

SEQ ID NO: 549305 - DNA, 33 bp, Homo sapien
ccgactctgcaatgtgaaatccaaatgctcccg

SEQ ID NO: 549306 - DNA, 33 bp, Homo sapien
ccgactctgcaatgtgcaatccaaatgctcccg

SEQ ID NO: 549307 - DNA, 33 bp, Homo sapien
actgactttctgataccgcattcatggacacct

SEQ ID NO: 549308 - DNA, 33 bp, Homo sapien
actgactttctgatactgcattcatggacacct

SEQ ID NO: 549309 - DNA, 33 bp, Homo sapien
gcaaggtgctgttacccaaaggcaggaaaatag

SEQ ID NO: 549310 - DNA, 33 bp, Homo sapien
gcaaggtgctgttacctaaaggcaggaaaatag

SEQ ID NO: 549311 - DNA, 33 bp, Homo sapien
atcctgagcattttcactacagggctgtctgtc

SEQ ID NO: 549312 - DNA, 33 bp, Homo sapien
atcctgagcattttcattacagggctgtctgtc

SEQ ID NO: 549313 - DNA, 33 bp, Homo sapien
cacaggtatcgaagctaaagtaaaaaacaatca

SEQ ID NO: 549314 - DNA, 33 bp, Homo sapien
cacaggtatcgaagctgaagtaaaaaacaatca

SEQ ID NO: 549315 - DNA, 33 bp, Homo sapien
ctcaaccactgtgctacatactctactgcagta

SEQ ID NO: 549316 - DNA, 33 bp, Homo sapien
ctcaaccactgtgctatatactctactgcagta

SEQ ID NO: 549317 - DNA, 33 bp, Homo sapien
tcataataagaggtaacgacatgactttagttt

SEQ ID NO: 549318 - DNA, 33 bp, Homo sapien
tcataataagaggtaatgacatgactttagttt

SEQ ID NO: 549319 - DNA, 33 bp, Homo sapien
gaaactgaacaaagtacacaaaggatccctctg

SEQ ID NO: 549320 - DNA, 33 bp, Homo sapien
gaaactgaacaaagtatacaaaggatccctctg

SEQ ID NO: 549321 - DNA, 33 bp, Homo sapien
tccccgataagatggaaaaccagacagctccaa

SEQ ID NO: 549322 - DNA, 33 bp, Homo sapien
tccccgataagatggagaaccagacagctccaa

SEQ ID NO: 549323 - DNA, 33 bp, Homo sapien
cagtgaccaaagcaccacaattttagacacagt

SEQ ID NO: 549324 - DNA, 33 bp, Homo sapien
cagtgaccaaagcaccgcaattttagacacagt

SEQ ID NO: 549325 - DNA, 33 bp, Homo sapien
attccaggtgggcacacaggtttctgtagagag

SEQ ID NO: 549326 - DNA, 33 bp, Homo sapien
attccaggtgggcacagaggtttctgtagagag

SEQ ID NO: 549327 - DNA, 33 bp, Homo sapien
gcttccagggtcaccaggcttgttcacatcaag

SEQ ID NO: 549328 - DNA, 33 bp, Homo sapien
gcttccagggtcaccatgcttgttcacatcaag

SEQ ID NO: 549329 - DNA, 33 bp, Homo sapien
caatttcctcttcttcccaggcattgcaagact

SEQ ID NO: 549330 - DNA, 33 bp, Homo sapien
caatttcctcttcttctcaggcattgcaagact

SEQ ID NO: 549331 - DNA, 33 bp, Homo sapien
tgctcctggaaaggaccgagtagtgccgtctac

SEQ ID NO: 549332 - DNA, 33 bp, Homo sapien
tgctcctggaaaggactgagtagtgccgtctac

SEQ ID NO: 549333 - DNA, 33 bp, Homo sapien
aataatatatatcaccaaaagagaattttaaag

SEQ ID NO: 549334 - DNA, 33 bp, Homo sapien
aataatatatatcaccgaaagagaattttaaag

SEQ ID NO: 549335 - DNA, 33 bp, Homo sapien
tttctcagggctgaagcctctcactgccccact

SEQ ID NO: 549336 - DNA, 33 bp, Homo sapien
tttctcagggctgaaggctctcactgccccact

SEQ ID NO: 549337 - DNA, 33 bp, Homo sapien
ggtcgttctcctgaaacgatgacctgttttgtc

SEQ ID NO: 549338 - DNA, 33 bp, Homo sapien
ggtcgttctcctgaaatgatgacctgttttgtc

SEQ ID NO: 549339 - DNA, 33 bp, Homo sapien
ccccttcaggctgcaaactacggtcagcaacta

SEQ ID NO: 549340 - DNA, 33 bp, Homo sapien
ccccttcaggctgcaagctacggtcagcaacta

SEQ ID NO: 549341 - DNA, 33 bp, Homo sapien
atttactggtcacctaccaatttagcaggcagt

SEQ ID NO: 549342 - DNA, 33 bp, Homo sapien
atttactggtcacctatcaatttagcaggcagt

SEQ ID NO: 549343 - DNA, 33 bp, Homo sapien
atggccgtggttccatcaggggttgctctcagt

SEQ ID NO: 549344 - DNA, 33 bp, Homo sapien
atggccgtggttccattaggggttgctctcagt

SEQ ID NO: 549345 - DNA, 33 bp, Homo sapien
gatcagccagggggaaaataagattaataatga

SEQ ID NO: 549346 - DNA, 33 bp, Homo sapien
gatcagccagggggaagataagattaataatga

SEQ ID NO: 549347 - DNA, 33 bp, Homo sapien
ccgtccatctgtccaactggcattttgttggtt

SEQ ID NO: 549348 - DNA, 33 bp, Homo sapien
ccgtccatctgtccaattggcattttgttggtt

SEQ ID NO: 549349 - DNA, 33 bp, Homo sapien
tatagtgatcacaacaatgtggtattgtcataa

SEQ ID NO: 549350 - DNA, 33 bp, Homo sapien
tatagtgatcacaacagtgtggtattgtcataa

SEQ ID NO: 549351 - DNA, 33 bp, Homo sapien
tggatcctcacgcaaacagacctccagcgggtc

SEQ ID NO: 549352 - DNA, 33 bp, Homo sapien
tggatcctcacgcaaatagacctccagcgggtc

SEQ ID NO: 549353 - DNA, 33 bp, Homo sapien
ttttgtacaccagcaaattcagctttaaatcct

SEQ ID NO: 549354 - DNA, 33 bp, Homo sapien
ttttgtacaccagcaagttcagctttaaatcct

SEQ ID NO: 549355 - DNA, 33 bp, Homo sapien
atccactgaatccctgaatgcctgacaccctct

SEQ ID NO: 549356 - DNA, 33 bp, Homo sapien
atccactgaatccctggatgcctgacaccctct

SEQ ID NO: 549357 - DNA, 33 bp, Homo sapien
ggtaaaatctgaatacagagtacaagtgaaaat

SEQ ID NO: 549358 - DNA, 33 bp, Homo sapien
ggtaaaatctgaatacggagtacaagtgaaaat

SEQ ID NO: 549359 - DNA, 33 bp, Homo sapien
gtaaagggtgtatgcactcatgagcatttattc

SEQ ID NO: 549360 - DNA, 33 bp, Homo sapien
gtaaagggtgtatgcattcatgagcatttattc

SEQ ID NO: 549361 - DNA, 33 bp, Homo sapien
ccatcacagtatgtaagaaaatatccttaattc

SEQ ID NO: 549362 - DNA, 33 bp, Homo sapien
ccatcacagtatgtaataaaatatccttaattc

SEQ ID NO: 549363 - DNA, 33 bp, Homo sapien
agcatccagcatgggcaaaaaataaaagccaga

SEQ ID NO: 549364 - DNA, 33 bp, Homo sapien
agcatccagcatgggcgaaaaataaaagccaga

SEQ ID NO: 549365 - DNA, 33 bp, Homo sapien
gtggatgctgaacgacagagaaaaatggatgag

SEQ ID NO: 549366 - DNA, 33 bp, Homo sapien
gtggatgctgaacgacggagaaaaatggatgag

SEQ ID NO: 549367 - DNA, 33 bp, Homo sapien
tgaacaaatgtttatgcagcatccattgtgagc

SEQ ID NO: 549368 - DNA, 33 bp, Homo sapien
tgaacaaatgtttatggagcatccattgtgagc

SEQ ID NO: 549369 - DNA, 33 bp, Homo sapien
ctcctaatacaatcaacttccttcaactggtat

SEQ ID NO: 549370 - DNA, 33 bp, Homo sapien
ctcctaatacaatcaagttccttcaactggtat

SEQ ID NO: 549371 - DNA, 33 bp, Homo sapien
taggtttgctcttactcactctaaaaatggttg

SEQ ID NO: 549372 - DNA, 33 bp, Homo sapien
taggtttgctcttactgactctaaaaatggttg

SEQ ID NO: 549373 - DNA, 33 bp, Homo sapien
aacctcacaaaactagcaagtacacataagtta

SEQ ID NO: 549374 - DNA, 33 bp, Homo sapien
aacctcacaaaactaggaagtacacataagtta

SEQ ID NO: 549375 - DNA, 33 bp, Homo sapien
attgtggttgtttttacggagacctaagtagag

SEQ ID NO: 549376 - DNA, 33 bp, Homo sapien
attgtggttgtttttatggagacctaagtagag

SEQ ID NO: 549377 - DNA, 33 bp, Homo sapien
acagaagtaccttgaaaatgaagtttagatgtt

SEQ ID NO: 549378 - DNA, 33 bp, Homo sapien
acagaagtaccttgaagatgaagtttagatgtt

SEQ ID NO: 549379 - DNA, 33 bp, Homo sapien
tttgtggctaaccgaacctttcccctacacctt

SEQ ID NO: 549380 - DNA, 33 bp, Homo sapien
tttgtggctaaccgaatctttcccctacacctt

SEQ ID NO: 549381 - DNA, 33 bp, Homo sapien
atagattagttacaaaaaggaatgagcaaaaaa

SEQ ID NO: 549382 - DNA, 33 bp, Homo sapien
atagattagttacaaacaggaatgagcaaaaaa

SEQ ID NO: 549383 - DNA, 33 bp, Homo sapien
gaattgctgtttgcaactgatctaacttactac

SEQ ID NO: 549384 - DNA, 33 bp, Homo sapien
gaattgctgtttgcaattgatctaacttactac

SEQ ID NO: 549385 - DNA, 33 bp, Homo sapien
attgagtacttaattacgcaagtttctatagaa

SEQ ID NO: 549386 - DNA, 33 bp, Homo sapien
attgagtacttaattatgcaagtttctatagaa

SEQ ID NO: 549387 - DNA, 33 bp, Homo sapien
tctacctggcctgtacaaactgtacctcaaggt

SEQ ID NO: 549388 - DNA, 33 bp, Homo sapien
tctacctggcctgtacgaactgtacctcaaggt

SEQ ID NO: 549389 - DNA, 33 bp, Homo sapien
aatgttggaatgcccacctcgtgccaggcaccg

SEQ ID NO: 549390 - DNA, 33 bp, Homo sapien
aatgttggaatgcccagctcgtgccaggcaccg

SEQ ID NO: 549391 - DNA, 33 bp, Homo sapien
aaaagtttgatattctcaaggttatggtttgtt

SEQ ID NO: 549392 - DNA, 33 bp, Homo sapien
aaaagtttgatattcttaaggttatggtttgtt

SEQ ID NO: 549393 - DNA, 33 bp, Homo sapien
tacaaaagaaatatacacagaggacaaagcaag

SEQ ID NO: 549394 - DNA, 33 bp, Homo sapien
tacaaaagaaatatacgcagaggacaaagcaag

SEQ ID NO: 549395 - DNA, 33 bp, Homo sapien
ccctactctggctatacaatgtccgccattaag

SEQ ID NO: 549396 - DNA, 33 bp, Homo sapien
ccctactctggctatagaatgtccgccattaag

SEQ ID NO: 549397 - DNA, 33 bp, Homo sapien
ccttcagaatccaaacagcattgatgggagtga

SEQ ID NO: 549398 - DNA, 33 bp, Homo sapien
ccttcagaatccaaacggcattgatgggagtga

SEQ ID NO: 549399 - DNA, 33 bp, Homo sapien
tggaattgataagacactgtaggtttgaccacc

SEQ ID NO: 549400 - DNA, 33 bp, Homo sapien
tggaattgataagacattgtaggtttgaccacc

SEQ ID NO: 549401 - DNA, 33 bp, Homo sapien
ttacaggtgagaatcacagataacagtcaatgg

SEQ ID NO: 549402 - DNA, 33 bp, Homo sapien
ttacaggtgagaatcatagataacagtcaatgg

SEQ ID NO: 549403 - DNA, 33 bp, Homo sapien
tctttccaagattaagcccaagctctaatttga

SEQ ID NO: 549404 - DNA, 33 bp, Homo sapien
tctttccaagattaagtccaagctctaatttga

SEQ ID NO: 549405 - DNA, 33 bp, Homo sapien
tccgtcatctgctccaatggaacctgctgtcct

SEQ ID NO: 549406 - DNA, 33 bp, Homo sapien
tccgtcatctgctccagtggaacctgctgtcct

SEQ ID NO: 549407 - DNA, 33 bp, Homo sapien
acatgaatgaaactatcaagcagtagtcaaatg

SEQ ID NO: 549408 - DNA, 33 bp, Homo sapien
acatgaatgaaactattaagcagtagtcaaatg

SEQ ID NO: 549409 - DNA, 33 bp, Homo sapien
ggtatttgaacaattacatttggaacagaaaag

SEQ ID NO: 549410 - DNA, 33 bp, Homo sapien
ggtatttgaacaattatatttggaacagaaaag

SEQ ID NO: 549411 - DNA, 33 bp, Homo sapien
tcaagattagagtagcaacttaatattttcaaa

SEQ ID NO: 549412 - DNA, 33 bp, Homo sapien
tcaagattagagtagcgacttaatattttcaaa

SEQ ID NO: 549413 - DNA, 33 bp, Homo sapien
ggcatcacagtttataaagaaatcagcaaattt

SEQ ID NO: 549414 - DNA, 33 bp, Homo sapien
ggcatcacagtttatatagaaatcagcaaattt

SEQ ID NO: 549415 - DNA, 33 bp, Homo sapien
aaatggacaaaacaaacgaagcaattgtgtcta

SEQ ID NO: 549416 - DNA, 33 bp, Homo sapien
aaatggacaaaacaaatgaagcaattgtgtcta

SEQ ID NO: 549417 - DNA, 33 bp, Homo sapien
ttttcctctttttgaacgctctcttgctgaaca

SEQ ID NO: 549418 - DNA, 33 bp, Homo sapien
ttttcctctttttgaatgctctcttgctgaaca

SEQ ID NO: 549419 - DNA, 33 bp, Homo sapien
taagggaatagagtgaaagtctaggagcagtgc

SEQ ID NO: 549420 - DNA, 33 bp, Homo sapien
taagggaatagagtgagagtctaggagcagtgc

SEQ ID NO: 549421 - DNA, 33 bp, Homo sapien
gagaaagtcagagagaatcagtggcctaaagct

SEQ ID NO: 549422 - DNA, 33 bp, Homo sapien
gagaaagtcagagagattcagtggcctaaagct

SEQ ID NO: 549423 - DNA, 33 bp, Homo sapien
caattctcctggtggactatggtgactaaagca

SEQ ID NO: 549424 - DNA, 33 bp, Homo sapien
caattctcctggtggattatggtgactaaagca

SEQ ID NO: 549425 - DNA, 33 bp, Homo sapien
ttatatgaacagcatggatgaggaacacccagg

SEQ ID NO: 549426 - DNA, 33 bp, Homo sapien
ttatatgaacagcatgtatgaggaacacccagg

SEQ ID NO: 549427 - DNA, 33 bp, Homo sapien
atcagcttcttgtgaaatggtgatagaggatgg

SEQ ID NO: 549428 - DNA, 33 bp, Homo sapien
atcagcttcttgtgaagtggtgatagaggatgg

SEQ ID NO: 549429 - DNA, 33 bp, Homo sapien
tgtgtgtatgaaaatacagaaaatgaaccaatt

SEQ ID NO: 549430 - DNA, 33 bp, Homo sapien
tgtgtgtatgaaaatatagaaaatgaaccaatt

SEQ ID NO: 549431 - DNA, 33 bp, Homo sapien
agtgtaactgacttagcagtcctgagaaagctg

SEQ ID NO: 549432 - DNA, 33 bp, Homo sapien
agtgtaactgacttaggagtcctgagaaagctg

SEQ ID NO: 549433 - DNA, 33 bp, Homo sapien
acgagggcttttgtgccaccagtgtaaatgtca

SEQ ID NO: 549434 - DNA, 33 bp, Homo sapien
acgagggcttttgtgctaccagtgtaaatgtca

SEQ ID NO: 549435 - DNA, 33 bp, Homo sapien
agaaatatgtcgttaaatgattttgtcagtgtg

SEQ ID NO: 549436 - DNA, 33 bp, Homo sapien
agaaatatgtcgttaagtgattttgtcagtgtg

SEQ ID NO: 549437 - DNA, 33 bp, Homo sapien
taaaaaattatagtcaacaaggcagcttgctag

SEQ ID NO: 549438 - DNA, 33 bp, Homo sapien
taaaaaattatagtcagcaaggcagcttgctag

SEQ ID NO: 549439 - DNA, 33 bp, Homo sapien
ctggactaaataatagaaagtggctataagggt

SEQ ID NO: 549440 - DNA, 33 bp, Homo sapien
ctggactaaataataggaagtggctataagggt

SEQ ID NO: 549441 - DNA, 33 bp, Homo sapien
tgagtgcttctggtcacgcgggccagaactgct

SEQ ID NO: 549442 - DNA, 33 bp, Homo sapien
tgagtgcttctggtcatgcgggccagaactgct

SEQ ID NO: 549443 - DNA, 33 bp, Homo sapien
tcgttaccacatctccactgggattaccttcaa

SEQ ID NO: 549444 - DNA, 33 bp, Homo sapien
tcgttaccacatctccgctgggattaccttcaa

SEQ ID NO: 549445 - DNA, 33 bp, Homo sapien
actcttcaaccttttcccaaagagcagagagtc

SEQ ID NO: 549446 - DNA, 33 bp, Homo sapien
actcttcaaccttttctcaaagagcagagagtc

SEQ ID NO: 549447 - DNA, 33 bp, Homo sapien
gctgccttgctgctgacgagtgcccagtccctt

SEQ ID NO: 549448 - DNA, 33 bp, Homo sapien
gctgccttgctgctgaggagtgcccagtccctt

SEQ ID NO: 549449 - DNA, 33 bp, Homo sapien
tctggtgttattttaacgtacagaagtacttaa

SEQ ID NO: 549450 - DNA, 33 bp, Homo sapien
tctggtgttattttaatgtacagaagtacttaa

SEQ ID NO: 549451 - DNA, 33 bp, Homo sapien
tataaaaatcttgatagccagtagagctacact

SEQ ID NO: 549452 - DNA, 33 bp, Homo sapien
tataaaaatcttgatatccagtagagctacact

SEQ ID NO: 549453 - DNA, 33 bp, Homo sapien
ttggtagaatattgaacgtgaacccacgaggtc

SEQ ID NO: 549454 - DNA, 33 bp, Homo sapien
ttggtagaatattgaatgtgaacccacgaggtc

SEQ ID NO: 549455 - DNA, 33 bp, Homo sapien
acatagaaccaactgagattctctccttgacat

SEQ ID NO: 549456 - DNA, 33 bp, Homo sapien
acatagaaccaactgatattctctccttgacat

SEQ ID NO: 549457 - DNA, 33 bp, Homo sapien
ggcatcctccaggtacggactcacggagcccca

SEQ ID NO: 549458 - DNA, 33 bp, Homo sapien
ggcatcctccaggtactgactcacggagcccca

SEQ ID NO: 549459 - DNA, 33 bp, Homo sapien
tcaggtgttcaagggagaagggtgttctggaaa

SEQ ID NO: 549460 - DNA, 33 bp, Homo sapien
tcaggtgttcaagggataagggtgttctggaaa

SEQ ID NO: 549461 - DNA, 33 bp, Homo sapien
gctcccaagacttacaaaatgcaacctgggggc

SEQ ID NO: 549462 - DNA, 33 bp, Homo sapien
gctcccaagacttacacaatgcaacctgggggc

SEQ ID NO: 549463 - DNA, 33 bp, Homo sapien
tcaagaaattgactacagccaggatctccccat

SEQ ID NO: 549464 - DNA, 33 bp, Homo sapien
tcaagaaattgactacggccaggatctccccat

SEQ ID NO: 549465 - DNA, 33 bp, Homo sapien
tccctgggcatcatcccaggtaatgaggctccc

SEQ ID NO: 549466 - DNA, 33 bp, Homo sapien
tccctgggcatcatcctaggtaatgaggctccc

SEQ ID NO: 549467 - DNA, 33 bp, Homo sapien
ttggaaatgacccctacatttaatgagtatctg

SEQ ID NO: 549468 - DNA, 33 bp, Homo sapien
ttggaaatgacccctatatttaatgagtatctg

SEQ ID NO: 549469 - DNA, 33 bp, Homo sapien
attggctgtaccattacgtgtccaccagcaagc

SEQ ID NO: 549470 - DNA, 33 bp, Homo sapien
attggctgtaccattatgtgtccaccagcaagc

SEQ ID NO: 549471 - DNA, 33 bp, Homo sapien
agccaatctgcaaaacaagctggtaatttctcc

SEQ ID NO: 549472 - DNA, 33 bp, Homo sapien
agccaatctgcaaaacgagctggtaatttctcc

SEQ ID NO: 549473 - DNA, 33 bp, Homo sapien
atagaaggcaatgagcacctgtcgggggaacaa

SEQ ID NO: 549474 - DNA, 33 bp, Homo sapien
atagaaggcaatgagcgcctgtcgggggaacaa

SEQ ID NO: 549475 - DNA, 33 bp, Homo sapien
agcagatgctgttcaagatgttcttgtaatagg

SEQ ID NO: 549476 - DNA, 33 bp, Homo sapien
agcagatgctgttcaatatgttcttgtaatagg

SEQ ID NO: 549477 - DNA, 33 bp, Homo sapien
tcagtcccacttctgacaccactatgtgacatt

SEQ ID NO: 549478 - DNA, 33 bp, Homo sapien
tcagtcccacttctgataccactatgtgacatt

SEQ ID NO: 549479 - DNA, 33 bp, Homo sapien
taggacagaaatgtgaagaaaggtatgaagata

SEQ ID NO: 549480 - DNA, 33 bp, Homo sapien
taggacagaaatgtgaggaaaggtatgaagata

SEQ ID NO: 549481 - DNA, 33 bp, Homo sapien
cctgttattattcccacgttacagatgagaaaa

SEQ ID NO: 549482 - DNA, 33 bp, Homo sapien
cctgttattattcccatgttacagatgagaaaa

SEQ ID NO: 549483 - DNA, 33 bp, Homo sapien
aacagtcgctgtgaataaatgtggctcccgatg

SEQ ID NO: 549484 - DNA, 33 bp, Homo sapien
aacagtcgctgtgaatgaatgtggctcccgatg

SEQ ID NO: 549485 - DNA, 33 bp, Homo sapien
atccagagaaggcaccaaggaaagatctctgct

SEQ ID NO: 549486 - DNA, 33 bp, Homo sapien
atccagagaaggcaccgaggaaagatctctgct

SEQ ID NO: 549487 - DNA, 33 bp, Homo sapien
ggctgggccctccttacctgcatgggccggaag

SEQ ID NO: 549488 - DNA, 33 bp, Homo sapien
ggctgggccctccttatctgcatgggccggaag

SEQ ID NO: 549489 - DNA, 33 bp, Homo sapien
ttagccagagcccgaaaaggctgcattctcctg

SEQ ID NO: 549490 - DNA, 33 bp, Homo sapien
ttagccagagcccgaacaggctgcattctcctg

SEQ ID NO: 549491 - DNA, 33 bp, Homo sapien
caagtccattgctccacctggctagagtgggag

SEQ ID NO: 549492 - DNA, 33 bp, Homo sapien
caagtccattgctccatctggctagagtgggag

SEQ ID NO: 549493 - DNA, 33 bp, Homo sapien
ctgggcagaagaggaacgacagagtccccctgc

SEQ ID NO: 549494 - DNA, 33 bp, Homo sapien
ctgggcagaagaggaatgacagagtccccctgc

SEQ ID NO: 549495 - DNA, 33 bp, Homo sapien
aataaaatcaagtgtgaagtgccatctggtgtg

SEQ ID NO: 549496 - DNA, 33 bp, Homo sapien
aataaaatcaagtgtggagtgccatctggtgtg

SEQ ID NO: 549497 - DNA, 33 bp, Homo sapien
aaagaacaaatacgcacgaacacacttctctga

SEQ ID NO: 549498 - DNA, 33 bp, Homo sapien
aaagaacaaatacgcaggaacacacttctctga

SEQ ID NO: 549499 - DNA, 33 bp, Homo sapien
ttataaaaaagatgaaagatagtaagtgttgac

SEQ ID NO: 549500 - DNA, 33 bp, Homo sapien
ttataaaaaagatgaaggatagtaagtgttgac

SEQ ID NO: 549501 - DNA, 33 bp, Homo sapien
atggtagacagtgaaactcatatctataaaaat

SEQ ID NO: 549502 - DNA, 33 bp, Homo sapien
atggtagacagtgaaattcatatctataaaaat

SEQ ID NO: 549503 - DNA, 33 bp, Homo sapien
cgtcctaggatccacactgggctgtcgatgact

SEQ ID NO: 549504 - DNA, 33 bp, Homo sapien
cgtcctaggatccacattgggctgtcgatgact

SEQ ID NO: 549505 - DNA, 33 bp, Homo sapien
ggactcaccttgtaccagcactgttgcatctca

SEQ ID NO: 549506 - DNA, 33 bp, Homo sapien
ggactcaccttgtacctgcactgttgcatctca

SEQ ID NO: 549507 - DNA, 33 bp, Homo sapien
cagaagtggctcaggcaaatgtgctgggcctcc

SEQ ID NO: 549508 - DNA, 33 bp, Homo sapien
cagaagtggctcaggcgaatgtgctgggcctcc

SEQ ID NO: 549509 - DNA, 33 bp, Homo sapien
tgtgtgcacatgtgggaagacactggctgggga

SEQ ID NO: 549510 - DNA, 33 bp, Homo sapien
tgtgtgcacatgtggggagacactggctgggga

SEQ ID NO: 549511 - DNA, 33 bp, Homo sapien
ccccttctgcagtttcacatcccatcctgtctc

SEQ ID NO: 549512 - DNA, 33 bp, Homo sapien
ccccttctgcagtttcgcatcccatcctgtctc

SEQ ID NO: 549513 - DNA, 33 bp, Homo sapien
ttcatccgctcgcacaagttacctcttagaagc

SEQ ID NO: 549514 - DNA, 33 bp, Homo sapien
ttcatccgctcgcacaggttacctcttagaagc

SEQ ID NO: 549515 - DNA, 33 bp, Homo sapien
cttctgagttctctataaaaccccactggcgag

SEQ ID NO: 549516 - DNA, 33 bp, Homo sapien
cttctgagttctctatcaaaccccactggcgag

SEQ ID NO: 549517 - DNA, 33 bp, Homo sapien
ggacctgggagtcaccaaggaaagaggctaaat

SEQ ID NO: 549518 - DNA, 33 bp, Homo sapien
ggacctgggagtcaccgaggaaagaggctaaat

SEQ ID NO: 549519 - DNA, 33 bp, Homo sapien
tcttctaaaattggagacattatcatgaggaaa

SEQ ID NO: 549520 - DNA, 33 bp, Homo sapien
tcttctaaaattggagtcattatcatgaggaaa

SEQ ID NO: 549521 - DNA, 33 bp, Homo sapien
aaaatgctgattatcaatctgagccttcggtga

SEQ ID NO: 549522 - DNA, 33 bp, Homo sapien
aaaatgctgattatcagtctgagccttcggtga

SEQ ID NO: 549523 - DNA, 33 bp, Homo sapien
cttcctttgtgtcgggaattagttaacctcaga

SEQ ID NO: 549524 - DNA, 33 bp, Homo sapien
cttcctttgtgtcgggcattagttaacctcaga

SEQ ID NO: 549525 - DNA, 33 bp, Homo sapien
ggagtgctgttttcaactgctaatttcaaatga

SEQ ID NO: 549526 - DNA, 33 bp, Homo sapien
ggagtgctgttttcaattgctaatttcaaatga

SEQ ID NO: 549527 - DNA, 33 bp, Homo sapien
aacaagatgctgggataactgtacccctcttca

SEQ ID NO: 549528 - DNA, 33 bp, Homo sapien
aacaagatgctgggatgactgtacccctcttca

SEQ ID NO: 549529 - DNA, 33 bp, Homo sapien
tttgttgctaatgctaacatctctctggtttta

SEQ ID NO: 549530 - DNA, 33 bp, Homo sapien
tttgttgctaatgctaccatctctctggtttta

SEQ ID NO: 549531 - DNA, 33 bp, Homo sapien
atatgtgtggtcaaacaaaattaggcagttctc

SEQ ID NO: 549532 - DNA, 33 bp, Homo sapien
atatgtgtggtcaaacgaaattaggcagttctc

SEQ ID NO: 549533 - DNA, 33 bp, Homo sapien
taatggtccagccctaaaataaatggctttctt

SEQ ID NO: 549534 - DNA, 33 bp, Homo sapien
taatggtccagccctagaataaatggctttctt

SEQ ID NO: 549535 - DNA, 33 bp, Homo sapien
gaaggggtggtgtttgcaaatggcaccgatacg

SEQ ID NO: 549536 - DNA, 33 bp, Homo sapien
gaaggggtggtgtttgtaaatggcaccgatacg

SEQ ID NO: 549537 - DNA, 33 bp, Homo sapien
ttgtaacaaccatctcacaatactgctgagagg

SEQ ID NO: 549538 - DNA, 33 bp, Homo sapien
ttgtaacaaccatctcccaatactgctgagagg

SEQ ID NO: 549539 - DNA, 33 bp, Homo sapien
aggccataagaacacaagtaaagtgtttcagga

SEQ ID NO: 549540 - DNA, 33 bp, Homo sapien
aggccataagaacacaggtaaagtgtttcagga

SEQ ID NO: 549541 - DNA, 33 bp, Homo sapien
ctaagatagcactggcaaactaaacaagatctt

SEQ ID NO: 549542 - DNA, 33 bp, Homo sapien
ctaagatagcactggcgaactaaacaagatctt

SEQ ID NO: 549543 - DNA, 33 bp, Homo sapien
aggcatcatcttgaaacggaaagagcactagac

SEQ ID NO: 549544 - DNA, 33 bp, Homo sapien
aggcatcatcttgaaatggaaagagcactagac

SEQ ID NO: 549545 - DNA, 33 bp, Homo sapien
gaatctttgtctactcaatacccattgtcagct

SEQ ID NO: 549546 - DNA, 33 bp, Homo sapien
gaatctttgtctactcgatacccattgtcagct

SEQ ID NO: 549547 - DNA, 33 bp, Homo sapien
cccattgtcagctccacagttgtggtatcttgc

SEQ ID NO: 549548 - DNA, 33 bp, Homo sapien
cccattgtcagctccatagttgtggtatcttgc

SEQ ID NO: 549549 - DNA, 33 bp, Homo sapien
aatagctggtatctgccaaactgctgagcaggc

SEQ ID NO: 549550 - DNA, 33 bp, Homo sapien
aatagctggtatctgctaaactgctgagcaggc

SEQ ID NO: 549551 - DNA, 33 bp, Homo sapien
cactaatgagaaaaacaggactactgtgatgaa

SEQ ID NO: 549552 - DNA, 33 bp, Homo sapien
cactaatgagaaaaacgggactactgtgatgaa

SEQ ID NO: 549553 - DNA, 33 bp, Homo sapien
ttagctagaaaaattacgtttctccttgccgct

SEQ ID NO: 549554 - DNA, 33 bp, Homo sapien
ttagctagaaaaattatgtttctccttgccgct

SEQ ID NO: 549555 - DNA, 33 bp, Homo sapien
gaagagggccttaaaccctagctatgagaagct

SEQ ID NO: 549556 - DNA, 33 bp, Homo sapien
gaagagggccttaaactctagctatgagaagct

SEQ ID NO: 549557 - DNA, 33 bp, Homo sapien
cacttacatacctcaaagctaaagagtttccat

SEQ ID NO: 549558 - DNA, 33 bp, Homo sapien
cacttacatacctcaaggctaaagagtttccat

SEQ ID NO: 549559 - DNA, 33 bp, Homo sapien
tttattcttgaattgccaatgttacatttttta

SEQ ID NO: 549560 - DNA, 33 bp, Homo sapien
tttattcttgaattgcgaatgttacatttttta

SEQ ID NO: 549561 - DNA, 33 bp, Homo sapien
cttagctggctagctcaccctccagctttgaga

SEQ ID NO: 549562 - DNA, 33 bp, Homo sapien
cttagctggctagctctccctccagctttgaga

SEQ ID NO: 549563 - DNA, 33 bp, Homo sapien
atcatcattagtaagaatatcatcatgttgtta

SEQ ID NO: 549564 - DNA, 33 bp, Homo sapien
atcatcattagtaagagtatcatcatgttgtta

SEQ ID NO: 549565 - DNA, 33 bp, Homo sapien
acagtgaatgtgatttaaaaaggttttgtcata

SEQ ID NO: 549566 - DNA, 33 bp, Homo sapien
acagtgaatgtgattttaaaaggttttgtcata

SEQ ID NO: 549567 - DNA, 33 bp, Homo sapien
agtgattctgggttctcaagtgaaagctgggag

SEQ ID NO: 549568 - DNA, 33 bp, Homo sapien
agtgattctgggttcttaagtgaaagctgggag

SEQ ID NO: 549569 - DNA, 33 bp, Homo sapien
aagctggttattgccaagcctattaacacttaa

SEQ ID NO: 549570 - DNA, 33 bp, Homo sapien
aagctggttattgccaggcctattaacacttaa

SEQ ID NO: 549571 - DNA, 33 bp, Homo sapien
agttgtcttttccatcaaaaacatactggccct

SEQ ID NO: 549572 - DNA, 33 bp, Homo sapien
agttgtcttttccatccaaaacatactggccct

SEQ ID NO: 549573 - DNA, 33 bp, Homo sapien
acattagcgagacctcaatctcatctcttaaga

SEQ ID NO: 549574 - DNA, 33 bp, Homo sapien
acattagcgagacctcgatctcatctcttaaga

SEQ ID NO: 549575 - DNA, 33 bp, Homo sapien
attctgtatgactccaacggtgacattctggaa

SEQ ID NO: 549576 - DNA, 33 bp, Homo sapien
attctgtatgactccagcggtgacattctggaa

SEQ ID NO: 549577 - DNA, 33 bp, Homo sapien
agtgaaatgttatgtgcatgctggtaaaccctt

SEQ ID NO: 549578 - DNA, 33 bp, Homo sapien
agtgaaatgttatgtgtatgctggtaaaccctt

SEQ ID NO: 549579 - DNA, 33 bp, Homo sapien
cattcttgatacataccgagttaagggtttacc

SEQ ID NO: 549580 - DNA, 33 bp, Homo sapien
cattcttgatacatactgagttaagggtttacc

SEQ ID NO: 549581 - DNA, 33 bp, Homo sapien
tatttgcctttttcaacgtgttgacatttgtac

SEQ ID NO: 549582 - DNA, 33 bp, Homo sapien
tatttgcctttttcaatgtgttgacatttgtac

SEQ ID NO: 549583 - DNA, 33 bp, Homo sapien
tttctcaagatgactaacagactttcatctgca

SEQ ID NO: 549584 - DNA, 33 bp, Homo sapien
tttctcaagatgactagcagactttcatctgca

SEQ ID NO: 549585 - DNA, 33 bp, Homo sapien
tcctggtcgttctgggcacagccagggaggagc

SEQ ID NO: 549586 - DNA, 33 bp, Homo sapien
tcctggtcgttctgggtacagccagggaggagc

SEQ ID NO: 549587 - DNA, 33 bp, Homo sapien
gaggtgggaagaacatcagtgagacgggcatgt

SEQ ID NO: 549588 - DNA, 33 bp, Homo sapien
gaggtgggaagaacattagtgagacgggcatgt

SEQ ID NO: 549589 - DNA, 33 bp, Homo sapien
gcaatagggagctaccaaatgttgtatattgcc

SEQ ID NO: 549590 - DNA, 33 bp, Homo sapien
gcaatagggagctaccgaatgttgtatattgcc

SEQ ID NO: 549591 - DNA, 33 bp, Homo sapien
gagagaagactgtgacagccaactggagtgggc

SEQ ID NO: 549592 - DNA, 33 bp, Homo sapien
gagagaagactgtgacggccaactggagtgggc

SEQ ID NO: 549593 - DNA, 33 bp, Homo sapien
gagtcccagtcaaagtaaacaggttcagtgtgg

SEQ ID NO: 549594 - DNA, 33 bp, Homo sapien
gagtcccagtcaaagttaacaggttcagtgtgg

SEQ ID NO: 549595 - DNA, 33 bp, Homo sapien
ttccttgcacttagctaaagtctgtctcaccca

SEQ ID NO: 549596 - DNA, 33 bp, Homo sapien
ttccttgcacttagctgaagtctgtctcaccca

SEQ ID NO: 549597 - DNA, 33 bp, Homo sapien
ctgaatcctgaatgcaagggccacagtcctacc

SEQ ID NO: 549598 - DNA, 33 bp, Homo sapien
ctgaatcctgaatgcaggggccacagtcctacc

SEQ ID NO: 549599 - DNA, 33 bp, Homo sapien
ggaagagaagtatggacacaattaggcggactg

SEQ ID NO: 549600 - DNA, 33 bp, Homo sapien
ggaagagaagtatggatacaattaggcggactg

SEQ ID NO: 549601 - DNA, 33 bp, Homo sapien
aagcaaagaagacgcactattgtatatttcaaa

SEQ ID NO: 549602 - DNA, 33 bp, Homo sapien
aagcaaagaagacgcattattgtatatttcaaa

SEQ ID NO: 549603 - DNA, 33 bp, Homo sapien
gggatgccagtatctcaaaattttgcctgcaat

SEQ ID NO: 549604 - DNA, 33 bp, Homo sapien
gggatgccagtatctccaaattttgcctgcaat

SEQ ID NO: 549605 - DNA, 33 bp, Homo sapien
aatgttattccagaaacgttggagtactggcac

SEQ ID NO: 549606 - DNA, 33 bp, Homo sapien
aatgttattccagaaatgttggagtactggcac

SEQ ID NO: 549607 - DNA, 33 bp, Homo sapien
caacagggcagaaggcagaatgcatcttaattc

SEQ ID NO: 549608 - DNA, 33 bp, Homo sapien
caacagggcagaaggcggaatgcatcttaattc

SEQ ID NO: 549609 - DNA, 33 bp, Homo sapien
agccactgtgtctggccgagacatctattttaa

SEQ ID NO: 549610 - DNA, 33 bp, Homo sapien
agccactgtgtctggcggagacatctattttaa

SEQ ID NO: 549611 - DNA, 33 bp, Homo sapien
atgacagtttacggacaggcttcatgaactgga

SEQ ID NO: 549612 - DNA, 33 bp, Homo sapien
atgacagtttacggacgggcttcatgaactgga

SEQ ID NO: 549613 - DNA, 33 bp, Homo sapien
agtcactctgccaatcacttaagaaagatgttt

SEQ ID NO: 549614 - DNA, 33 bp, Homo sapien
agtcactctgccaatcgcttaagaaagatgttt

SEQ ID NO: 549615 - DNA, 33 bp, Homo sapien
gccaaccactcattgcaccttaaacactggcac

SEQ ID NO: 549616 - DNA, 33 bp, Homo sapien
gccaaccactcattgcgccttaaacactggcac

SEQ ID NO: 549617 - DNA, 33 bp, Homo sapien
taagggtgccttgaaaagataaattataacacc

SEQ ID NO: 549618 - DNA, 33 bp, Homo sapien
taagggtgccttgaaacgataaattataacacc

SEQ ID NO: 549619 - DNA, 33 bp, Homo sapien
gctgtgtgatctaacgaaatttggactcgaaca

SEQ ID NO: 549620 - DNA, 33 bp, Homo sapien
gctgtgtgatctaacggaatttggactcgaaca

SEQ ID NO: 549621 - DNA, 33 bp, Homo sapien
tatgcagaaatcctttcaaacctcacaaagctc

SEQ ID NO: 549622 - DNA, 33 bp, Homo sapien
tatgcagaaatccttttaaacctcacaaagctc

SEQ ID NO: 549623 - DNA, 33 bp, Homo sapien
gatgggcaaagaaataccaggatagtgctggta

SEQ ID NO: 549624 - DNA, 33 bp, Homo sapien
gatgggcaaagaaatatcaggatagtgctggta

SEQ ID NO: 549625 - DNA, 33 bp, Homo sapien
ttgtaaaaatacggaaaagaatggcagcggaaa

SEQ ID NO: 549626 - DNA, 33 bp, Homo sapien
ttgtaaaaatacggaacagaatggcagcggaaa

SEQ ID NO: 549627 - DNA, 33 bp, Homo sapien
ctgaggaagagtaataagtggcagagtttgggt

SEQ ID NO: 549628 - DNA, 33 bp, Homo sapien
ctgaggaagagtaataggtggcagagtttgggt

SEQ ID NO: 549629 - DNA, 33 bp, Homo sapien
ggaggggagaactggactccactaaaataatcc

SEQ ID NO: 549630 - DNA, 33 bp, Homo sapien
ggaggggagaactggattccactaaaataatcc

SEQ ID NO: 549631 - DNA, 33 bp, Homo sapien
gaggtaccgcatacaccacactactttatacct

SEQ ID NO: 549632 - DNA, 33 bp, Homo sapien
gaggtaccgcatacactacactactttatacct

SEQ ID NO: 549633 - DNA, 33 bp, Homo sapien
gcctagaatttgagccacttggttgcctgggtg

SEQ ID NO: 549634 - DNA, 33 bp, Homo sapien
gcctagaatttgagccgcttggttgcctgggtg

SEQ ID NO: 549635 - DNA, 33 bp, Homo sapien
atgcaactttcagaccaggagagctctgactgc

SEQ ID NO: 549636 - DNA, 33 bp, Homo sapien
atgcaactttcagaccgggagagctctgactgc

SEQ ID NO: 549637 - DNA, 33 bp, Homo sapien
gaggaaaccattaaaaattggggctcctactct

SEQ ID NO: 549638 - DNA, 33 bp, Homo sapien
gaggaaaccattaaaagttggggctcctactct

SEQ ID NO: 549639 - DNA, 33 bp, Homo sapien
tgctgaataactgatacgttttgagaaaatttt

SEQ ID NO: 549640 - DNA, 33 bp, Homo sapien
tgctgaataactgataggttttgagaaaatttt

SEQ ID NO: 549641 - DNA, 33 bp, Homo sapien
acttagtgtggtcgccaaagataaatccacccc

SEQ ID NO: 549642 - DNA, 33 bp, Homo sapien
acttagtgtggtcgccgaagataaatccacccc

SEQ ID NO: 549643 - DNA, 33 bp, Homo sapien
cttgatggtttcccaccgcgctaagggcttgcc

SEQ ID NO: 549644 - DNA, 33 bp, Homo sapien
cttgatggtttcccactgcgctaagggcttgcc

SEQ ID NO: 549645 - DNA, 33 bp, Homo sapien
accatcctacagatgacgagaaggcacagagag

SEQ ID NO: 549646 - DNA, 33 bp, Homo sapien
accatcctacagatgaggagaaggcacagagag

SEQ ID NO: 549647 - DNA, 33 bp, Homo sapien
cagaatccacattcgcactaactggatgtgggg

SEQ ID NO: 549648 - DNA, 33 bp, Homo sapien
cagaatccacattcgcgctaactggatgtgggg

SEQ ID NO: 549649 - DNA, 33 bp, Homo sapien
aggctggcgcctcttccaccacaagggaggctg

SEQ ID NO: 549650 - DNA, 33 bp, Homo sapien
aggctggcgcctcttctaccacaagggaggctg

SEQ ID NO: 549651 - DNA, 33 bp, Homo sapien
ccccccacatcctccaggtaaactgactgctca

SEQ ID NO: 549652 - DNA, 33 bp, Homo sapien
ccccccacatcctccatgtaaactgactgctca

SEQ ID NO: 549653 - DNA, 33 bp, Homo sapien
tgtctggagtgagaaacacgctcgccagcctca

SEQ ID NO: 549654 - DNA, 33 bp, Homo sapien
tgtctggagtgagaaagacgctcgccagcctca

SEQ ID NO: 549655 - DNA, 33 bp, Homo sapien
tcagtggattcgattaaaatagttatgatctat

SEQ ID NO: 549656 - DNA, 33 bp, Homo sapien
tcagtggattcgattagaatagttatgatctat

SEQ ID NO: 549657 - DNA, 33 bp, Homo sapien
ccgcataacggtacacaatgtcacacacgtcag

SEQ ID NO: 549658 - DNA, 33 bp, Homo sapien
ccgcataacggtacacgatgtcacacacgtcag

SEQ ID NO: 549659 - DNA, 33 bp, Homo sapien
cctttccttttcaaaggattcaatgggcagatg

SEQ ID NO: 549660 - DNA, 33 bp, Homo sapien
cctttccttttcaaagtattcaatgggcagatg

SEQ ID NO: 549661 - DNA, 33 bp, Homo sapien
taaacctgtccaaccaacggtttgatgcatgag

SEQ ID NO: 549662 - DNA, 33 bp, Homo sapien
taaacctgtccaaccaccggtttgatgcatgag

SEQ ID NO: 549663 - DNA, 33 bp, Homo sapien
acattccaaacatctgcaagtagagaagccagt

SEQ ID NO: 549664 - DNA, 33 bp, Homo sapien
acattccaaacatctggaagtagagaagccagt

SEQ ID NO: 549665 - DNA, 33 bp, Homo sapien
cctgaagatcaggacacagatgctgtcggccag

SEQ ID NO: 549666 - DNA, 33 bp, Homo sapien
cctgaagatcaggacagagatgctgtcggccag

SEQ ID NO: 549667 - DNA, 33 bp, Homo sapien
tgaatgaatgaagagcaagcagagcctggatcc

SEQ ID NO: 549668 - DNA, 33 bp, Homo sapien
tgaatgaatgaagagcgagcagagcctggatcc

SEQ ID NO: 549669 - DNA, 33 bp, Homo sapien
ttgagatcctacagcccgaggagattaagctgc

SEQ ID NO: 549670 - DNA, 33 bp, Homo sapien
ttgagatcctacagcctgaggagattaagctgc

SEQ ID NO: 549671 - DNA, 33 bp, Homo sapien
gcggaaccatttagagccaaacatgtcaaaagc

SEQ ID NO: 549672 - DNA, 33 bp, Homo sapien
gcggaaccatttagaggcaaacatgtcaaaagc

SEQ ID NO: 549673 - DNA, 33 bp, Homo sapien
ggctggtgtggaaatgaatcacccggtcgcgcc

SEQ ID NO: 549674 - DNA, 33 bp, Homo sapien
ggctggtgtggaaatgcatcacccggtcgcgcc

SEQ ID NO: 549675 - DNA, 33 bp, Homo sapien
tttaaaaagtatatacacacgcttaaaattcca

SEQ ID NO: 549676 - DNA, 33 bp, Homo sapien
tttaaaaagtatatacgcacgcttaaaattcca

SEQ ID NO: 549677 - DNA, 33 bp, Homo sapien
tcaatctttttaatacagcccaagtggcatgat

SEQ ID NO: 549678 - DNA, 33 bp, Homo sapien
tcaatctttttaatacggcccaagtggcatgat

SEQ ID NO: 549679 - DNA, 33 bp, Homo sapien
aacccaagctagcttcaataaacacctgacaag

SEQ ID NO: 549680 - DNA, 33 bp, Homo sapien
aacccaagctagcttcgataaacacctgacaag

SEQ ID NO: 549681 - DNA, 33 bp, Homo sapien
gacaacagagcagtccacagagagaaacaggga

SEQ ID NO: 549682 - DNA, 33 bp, Homo sapien
gacaacagagcagtccgcagagagaaacaggga

SEQ ID NO: 549683 - DNA, 33 bp, Homo sapien
ctagttaacgtatgcaataaacctgaaatttat

SEQ ID NO: 549684 - DNA, 33 bp, Homo sapien
ctagttaacgtatgcattaaacctgaaatttat

SEQ ID NO: 549685 - DNA, 33 bp, Homo sapien
ggcaataaaaccataacgattggtgttatttct

SEQ ID NO: 549686 - DNA, 33 bp, Homo sapien
ggcaataaaaccataatgattggtgttatttct

SEQ ID NO: 549687 - DNA, 33 bp, Homo sapien
aaattgcagagattaaactgtaattttcagtgg

SEQ ID NO: 549688 - DNA, 33 bp, Homo sapien
aaattgcagagattaagctgtaattttcagtgg

SEQ ID NO: 549689 - DNA, 33 bp, Homo sapien
agaaccagctacttccaacacaggtttgtatca

SEQ ID NO: 549690 - DNA, 33 bp, Homo sapien
agaaccagctacttccgacacaggtttgtatca

SEQ ID NO: 549691 - DNA, 33 bp, Homo sapien
taagaggttgaatgaacgaaaagcaggcaaatt

SEQ ID NO: 549692 - DNA, 33 bp, Homo sapien
taagaggttgaatgaatgaaaagcaggcaaatt

SEQ ID NO: 549693 - DNA, 33 bp, Homo sapien
tatctggtttagtagcccttccattttttatgt

SEQ ID NO: 549694 - DNA, 33 bp, Homo sapien
tatctggtttagtagctcttccattttttatgt

SEQ ID NO: 549695 - DNA, 33 bp, Homo sapien
ggtggacctgctggtaacgctcggtgacgccag

SEQ ID NO: 549696 - DNA, 33 bp, Homo sapien
ggtggacctgctggtagcgctcggtgacgccag

SEQ ID NO: 549697 - DNA, 33 bp, Homo sapien
tacaagtcctcagccacatttgggaaacgtgcc

SEQ ID NO: 549698 - DNA, 33 bp, Homo sapien
tacaagtcctcagccatatttgggaaacgtgcc

SEQ ID NO: 549699 - DNA, 33 bp, Homo sapien
gtgtgatcctggacaagttactgagtgtctctg

SEQ ID NO: 549700 - DNA, 33 bp, Homo sapien
gtgtgatcctggacaatttactgagtgtctctg

SEQ ID NO: 549701 - DNA, 33 bp, Homo sapien
cagggctgcacaagaaacaggagacacccaccc

SEQ ID NO: 549702 - DNA, 33 bp, Homo sapien
cagggctgcacaagaagcaggagacacccaccc

SEQ ID NO: 549703 - DNA, 33 bp, Homo sapien
atgaactagatatgcaacatcaccctacagata

SEQ ID NO: 549704 - DNA, 33 bp, Homo sapien
atgaactagatatgcagcatcaccctacagata

SEQ ID NO: 549705 - DNA, 33 bp, Homo sapien
agagaccacaagcaaactagttcgggcagcctc

SEQ ID NO: 549706 - DNA, 33 bp, Homo sapien
agagaccacaagcaaagtagttcgggcagcctc

SEQ ID NO: 549707 - DNA, 33 bp, Homo sapien
gaagaaccctttggcccgccaggtagccgccag

SEQ ID NO: 549708 - DNA, 33 bp, Homo sapien
gaagaaccctttggcctgccaggtagccgccag

SEQ ID NO: 549709 - DNA, 33 bp, Homo sapien
gtcgtttggatgctcaatctaaaatcaacaggc

SEQ ID NO: 549710 - DNA, 33 bp, Homo sapien
gtcgtttggatgctcagtctaaaatcaacaggc

SEQ ID NO: 549711 - DNA, 33 bp, Homo sapien
gttcctaccagtgacccagattgtggcgacctc

SEQ ID NO: 549712 - DNA, 33 bp, Homo sapien
gttcctaccagtgacctagattgtggcgacctc

SEQ ID NO: 549713 - DNA, 33 bp, Homo sapien
tcactgtcacagtccactctaaacctgccttca

SEQ ID NO: 549714 - DNA, 33 bp, Homo sapien
tcactgtcacagtccattctaaacctgccttca

SEQ ID NO: 549715 - DNA, 33 bp, Homo sapien
gcgtgttggtctttcccgccatgtaaataggaa

SEQ ID NO: 549716 - DNA, 33 bp, Homo sapien
gcgtgttggtctttcctgccatgtaaataggaa

SEQ ID NO: 549717 - DNA, 33 bp, Homo sapien
aaggctccctgggccacgagcttatccccagaa

SEQ ID NO: 549718 - DNA, 33 bp, Homo sapien
aaggctccctgggccatgagcttatccccagaa

SEQ ID NO: 549719 - DNA, 33 bp, Homo sapien
tctcaaaaaaaaaagacgagctgttgtggagac

SEQ ID NO: 549720 - DNA, 33 bp, Homo sapien
tctcaaaaaaaaaagatgagctgttgtggagac

SEQ ID NO: 549721 - DNA, 33 bp, Homo sapien
gttttcattgacagggaagtgattgctcacagg

SEQ ID NO: 549722 - DNA, 33 bp, Homo sapien
gttttcattgacaggggagtgattgctcacagg

SEQ ID NO: 549723 - DNA, 33 bp, Homo sapien
agatttcctcagctaaacttcttctctcctttc

SEQ ID NO: 549724 - DNA, 33 bp, Homo sapien
agatttcctcagctaaccttcttctctcctttc

SEQ ID NO: 549725 - DNA, 33 bp, Homo sapien
tcaggctctgagtggaccaatcatcaagcagcc

SEQ ID NO: 549726 - DNA, 33 bp, Homo sapien
tcaggctctgagtggatcaatcatcaagcagcc

SEQ ID NO: 549727 - DNA, 33 bp, Homo sapien
caatgctccttacaacagattttcgataacctc

SEQ ID NO: 549728 - DNA, 33 bp, Homo sapien
caatgctccttacaacggattttcgataacctc

SEQ ID NO: 549729 - DNA, 33 bp, Homo sapien
ggatatcgggaggggggattgcaaaagcgtgtt

SEQ ID NO: 549730 - DNA, 33 bp, Homo sapien
ggatatcgggagggggtattgcaaaagcgtgtt

SEQ ID NO: 549731 - DNA, 33 bp, Homo sapien
gaaggtgcaataacctcaccagtacaagacaga

SEQ ID NO: 549732 - DNA, 33 bp, Homo sapien
gaaggtgcaataacctgaccagtacaagacaga

SEQ ID NO: 549733 - DNA, 33 bp, Homo sapien
ttgtgtaggtcttgacaaatttctagttcaact

SEQ ID NO: 549734 - DNA, 33 bp, Homo sapien
ttgtgtaggtcttgaccaatttctagttcaact

SEQ ID NO: 549735 - DNA, 33 bp, Homo sapien
cacatccatctctgtaaggctaatgtttcatgt

SEQ ID NO: 549736 - DNA, 33 bp, Homo sapien
cacatccatctctgtagggctaatgtttcatgt

SEQ ID NO: 549737 - DNA, 33 bp, Homo sapien
tttctatctttacaccaaaaacctgttcttcca

SEQ ID NO: 549738 - DNA, 33 bp, Homo sapien
tttctatctttacaccgaaaacctgttcttcca

SEQ ID NO: 549739 - DNA, 33 bp, Homo sapien
taaagtggagataataagacctcctttgaaggt

SEQ ID NO: 549740 - DNA, 33 bp, Homo sapien
taaagtggagataataggacctcctttgaaggt

SEQ ID NO: 549741 - DNA, 33 bp, Homo sapien
agggcgaaactcctaacctcagagagtccaaca

SEQ ID NO: 549742 - DNA, 33 bp, Homo sapien
agggcgaaactcctaatctcagagagtccaaca

SEQ ID NO: 549743 - DNA, 33 bp, Homo sapien
tctagtgtctcagtgacggggtggttacttttc

SEQ ID NO: 549744 - DNA, 33 bp, Homo sapien
tctagtgtctcagtgatggggtggttacttttc

SEQ ID NO: 549745 - DNA, 33 bp, Homo sapien
tcattgatagtacctgaaatgtgttcggcttgt

SEQ ID NO: 549746 - DNA, 33 bp, Homo sapien
tcattgatagtacctgcaatgtgttcggcttgt

SEQ ID NO: 549747 - DNA, 33 bp, Homo sapien
acaagaaagataccaccggctgcttgggaaacc

SEQ ID NO: 549748 - DNA, 33 bp, Homo sapien
acaagaaagataccactggctgcttgggaaacc

SEQ ID NO: 549749 - DNA, 33 bp, Homo sapien
cacatcttttggtaccacacacccgtatagatg

SEQ ID NO: 549750 - DNA, 33 bp, Homo sapien
cacatcttttggtacctcacacccgtatagatg

SEQ ID NO: 549751 - DNA, 33 bp, Homo sapien
ggaaatagcaaggggacgagcttccttaattgc

SEQ ID NO: 549752 - DNA, 33 bp, Homo sapien
ggaaatagcaaggggatgagcttccttaattgc

SEQ ID NO: 549753 - DNA, 33 bp, Homo sapien
cctggagtctgagaaacagatgttgccgtggtc

SEQ ID NO: 549754 - DNA, 33 bp, Homo sapien
cctggagtctgagaaagagatgttgccgtggtc

SEQ ID NO: 549755 - DNA, 33 bp, Homo sapien
ggggatcttgttcaaacgctgattctgaattcc

SEQ ID NO: 549756 - DNA, 33 bp, Homo sapien
ggggatcttgttcaaatgctgattctgaattcc

SEQ ID NO: 549757 - DNA, 33 bp, Homo sapien
tcatttagggacagggaagttgttctgatctgt

SEQ ID NO: 549758 - DNA, 33 bp, Homo sapien
tcatttagggacaggggagttgttctgatctgt

SEQ ID NO: 549759 - DNA, 33 bp, Homo sapien
gtgctggctgggacccaccgtgcaatgctgcag

SEQ ID NO: 549760 - DNA, 33 bp, Homo sapien
gtgctggctgggacccgccgtgcaatgctgcag

SEQ ID NO: 549761 - DNA, 33 bp, Homo sapien
caaagacaaggagtgcaacaggagtgctgggag

SEQ ID NO: 549762 - DNA, 33 bp, Homo sapien
caaagacaaggagtgcgacaggagtgctgggag

SEQ ID NO: 549763 - DNA, 33 bp, Homo sapien
ttctggtcttctttaacgtgttccttgaataga

SEQ ID NO: 549764 - DNA, 33 bp, Homo sapien
ttctggtcttctttaatgtgttccttgaataga

SEQ ID NO: 549765 - DNA, 33 bp, Homo sapien
aatcggcctcctataaaatccactcctggatcc

SEQ ID NO: 549766 - DNA, 33 bp, Homo sapien
aatcggcctcctataacatccactcctggatcc

SEQ ID NO: 549767 - DNA, 33 bp, Homo sapien
gcccagccgagacttgcaactttagattgtttt

SEQ ID NO: 549768 - DNA, 33 bp, Homo sapien
gcccagccgagacttggaactttagattgtttt

SEQ ID NO: 549769 - DNA, 33 bp, Homo sapien
acgggagggctttgcaccagtaactaggccctt

SEQ ID NO: 549770 - DNA, 33 bp, Homo sapien
acgggagggctttgcatcagtaactaggccctt

SEQ ID NO: 549771 - DNA, 33 bp, Homo sapien
gtgaatcgtttggtcaactgttgaggacaggct

SEQ ID NO: 549772 - DNA, 33 bp, Homo sapien
gtgaatcgtttggtcagctgttgaggacaggct

SEQ ID NO: 549773 - DNA, 33 bp, Homo sapien
ccatgtctgcctgaccagagagcctgtgttcct

SEQ ID NO: 549774 - DNA, 33 bp, Homo sapien
ccatgtctgcctgaccggagagcctgtgttcct

SEQ ID NO: 549775 - DNA, 33 bp, Homo sapien
aagaacagaatctccactgaagcagaactaaga

SEQ ID NO: 549776 - DNA, 33 bp, Homo sapien
aagaacagaatctccattgaagcagaactaaga

SEQ ID NO: 549777 - DNA, 33 bp, Homo sapien
tttccctaacacctcaacactacctggacttcc

SEQ ID NO: 549778 - DNA, 33 bp, Homo sapien
tttccctaacacctcaccactacctggacttcc

SEQ ID NO: 549779 - DNA, 33 bp, Homo sapien
gtcttcttctcgggtacgtagtgccgatggaga

SEQ ID NO: 549780 - DNA, 33 bp, Homo sapien
gtcttcttctcgggtatgtagtgccgatggaga

SEQ ID NO: 549781 - DNA, 33 bp, Homo sapien
atggtaagataaaacacgatgatgtgaggaaga

SEQ ID NO: 549782 - DNA, 33 bp, Homo sapien
atggtaagataaaacaggatgatgtgaggaaga

SEQ ID NO: 549783 - DNA, 33 bp, Homo sapien
aagcatttacaaatcagcaagaaaaagataaac

SEQ ID NO: 549784 - DNA, 33 bp, Homo sapien
aagcatttacaaatcatcaagaaaaagataaac

SEQ ID NO: 549785 - DNA, 33 bp, Homo sapien
ctcacctggtattagaagaaacacattttccat

SEQ ID NO: 549786 - DNA, 33 bp, Homo sapien
ctcacctggtattagatgaaacacattttccat

SEQ ID NO: 549787 - DNA, 33 bp, Homo sapien
gtctgtgggggtgagaacacacatttgcattat

SEQ ID NO: 549788 - DNA, 33 bp, Homo sapien
gtctgtgggggtgagaccacacatttgcattat

SEQ ID NO: 549789 - DNA, 33 bp, Homo sapien
acaggtgcgtccagaaccgccgtggggcacaaa

SEQ ID NO: 549790 - DNA, 33 bp, Homo sapien
acaggtgcgtccagaatcgccgtggggcacaaa

SEQ ID NO: 549791 - DNA, 33 bp, Homo sapien
ccagagctgggttccaatcccaattttgccgtg

SEQ ID NO: 549792 - DNA, 33 bp, Homo sapien
ccagagctgggttccagtcccaattttgccgtg

SEQ ID NO: 549793 - DNA, 33 bp, Homo sapien
gctctaaaattctaaacttccatttcagtcaag

SEQ ID NO: 549794 - DNA, 33 bp, Homo sapien
gctctaaaattctaaatttccatttcagtcaag

SEQ ID NO: 549795 - DNA, 33 bp, Homo sapien
accagtgaaccatcttcaactacagtgctagaa

SEQ ID NO: 549796 - DNA, 33 bp, Homo sapien
accagtgaaccatctttaactacagtgctagaa

SEQ ID NO: 549797 - DNA, 33 bp, Homo sapien
acaaacatttttgtacccttaagctgcaagcag

SEQ ID NO: 549798 - DNA, 33 bp, Homo sapien
acaaacatttttgtactcttaagctgcaagcag

SEQ ID NO: 549799 - DNA, 33 bp, Homo sapien
tgcacaatcagaatgcaatataaggtagcaatt

SEQ ID NO: 549800 - DNA, 33 bp, Homo sapien
tgcacaatcagaatgcgatataaggtagcaatt

SEQ ID NO: 549801 - DNA, 33 bp, Homo sapien
gcctagaactgcatgccaagttatcagtgtttt

SEQ ID NO: 549802 - DNA, 33 bp, Homo sapien
gcctagaactgcatgctaagttatcagtgtttt

SEQ ID NO: 549803 - DNA, 33 bp, Homo sapien
ggtgagaattatcagactatagtgagcagctga

SEQ ID NO: 549804 - DNA, 33 bp, Homo sapien
ggtgagaattatcagattatagtgagcagctga

SEQ ID NO: 549805 - DNA, 33 bp, Homo sapien
acaggaactgcaaatacgagctgagcctttgac

SEQ ID NO: 549806 - DNA, 33 bp, Homo sapien
acaggaactgcaaatatgagctgagcctttgac

SEQ ID NO: 549807 - DNA, 33 bp, Homo sapien
ggcacaaatgctgatcaacccaaatatttatgt

SEQ ID NO: 549808 - DNA, 33 bp, Homo sapien
ggcacaaatgctgatcgacccaaatatttatgt

SEQ ID NO: 549809 - DNA, 33 bp, Homo sapien
ggtttattcagttccactatttctcagtacatt

SEQ ID NO: 549810 - DNA, 33 bp, Homo sapien
ggtttattcagttccattatttctcagtacatt

SEQ ID NO: 549811 - DNA, 33 bp, Homo sapien
tccacatggctttacaaaagtctaaacctttca

SEQ ID NO: 549812 - DNA, 33 bp, Homo sapien
tccacatggctttacagaagtctaaacctttca

SEQ ID NO: 549813 - DNA, 33 bp, Homo sapien
gctcttgtgtggggtacagtagtgtgatctcag

SEQ ID NO: 549814 - DNA, 33 bp, Homo sapien
gctcttgtgtggggtatagtagtgtgatctcag

SEQ ID NO: 549815 - DNA, 33 bp, Homo sapien
gtgagtaggattcacacggcaggaaagccactc

SEQ ID NO: 549816 - DNA, 33 bp, Homo sapien
gtgagtaggattcacatggcaggaaagccactc

SEQ ID NO: 549817 - DNA, 33 bp, Homo sapien
gatacatggcaagtgaacaggaaacagggcaga

SEQ ID NO: 549818 - DNA, 33 bp, Homo sapien
gatacatggcaagtgagcaggaaacagggcaga

SEQ ID NO: 549819 - DNA, 33 bp, Homo sapien
agatcgagtgatttgaaaatggcttatcaagcc

SEQ ID NO: 549820 - DNA, 33 bp, Homo sapien
agatcgagtgatttgacaatggcttatcaagcc

SEQ ID NO: 549821 - DNA, 33 bp, Homo sapien
tccaagtccttaaccacctacagacttcaacaa

SEQ ID NO: 549822 - DNA, 33 bp, Homo sapien
tccaagtccttaaccatctacagacttcaacaa

SEQ ID NO: 549823 - DNA, 33 bp, Homo sapien
ccgtccggctaatgaacagtggcatcacattgc

SEQ ID NO: 549824 - DNA, 33 bp, Homo sapien
ccgtccggctaatgaagagtggcatcacattgc

SEQ ID NO: 549825 - DNA, 33 bp, Homo sapien
gctctgaagaacagtgaaagagatgtgaggaca

SEQ ID NO: 549826 - DNA, 33 bp, Homo sapien
gctctgaagaacagtggaagagatgtgaggaca

SEQ ID NO: 549827 - DNA, 33 bp, Homo sapien
cccacaaaattcgacacatttaaaaatctccgt

SEQ ID NO: 549828 - DNA, 33 bp, Homo sapien
cccacaaaattcgacatatttaaaaatctccgt

SEQ ID NO: 549829 - DNA, 33 bp, Homo sapien
ggtagacctaaagccacgcactgagggagctgg

SEQ ID NO: 549830 - DNA, 33 bp, Homo sapien
ggtagacctaaagccatgcactgagggagctgg

SEQ ID NO: 549831 - DNA, 33 bp, Homo sapien
gccacagagttgagaacagagttgagatggcca

SEQ ID NO: 549832 - DNA, 33 bp, Homo sapien
gccacagagttgagaagagagttgagatggcca

SEQ ID NO: 549833 - DNA, 33 bp, Homo sapien
gtgggctgaatgaacgcatctgccagtgacctt

SEQ ID NO: 549834 - DNA, 33 bp, Homo sapien
gtgggctgaatgaacggatctgccagtgacctt

SEQ ID NO: 549835 - DNA, 33 bp, Homo sapien
cacatgaggctgccgccgaacagcaggtgacca

SEQ ID NO: 549836 - DNA, 33 bp, Homo sapien
cacatgaggctgccgctgaacagcaggtgacca

SEQ ID NO: 549837 - DNA, 33 bp, Homo sapien
cagacagcaccgatgccgaagaggacaaaatcc

SEQ ID NO: 549838 - DNA, 33 bp, Homo sapien
cagacagcaccgatgctgaagaggacaaaatcc

SEQ ID NO: 549839 - DNA, 33 bp, Homo sapien
atacacacagtgcacaaatggctgactgctgac

SEQ ID NO: 549840 - DNA, 33 bp, Homo sapien
atacacacagtgcacacatggctgactgctgac

SEQ ID NO: 549841 - DNA, 33 bp, Homo sapien
ttaactaagctcaaaaagcatcaaagcacaggg

SEQ ID NO: 549842 - DNA, 33 bp, Homo sapien
ttaactaagctcaaaaggcatcaaagcacaggg

SEQ ID NO: 549843 - DNA, 33 bp, Homo sapien
tttaactcaaacattcaatgaccaagacaaagt

SEQ ID NO: 549844 - DNA, 33 bp, Homo sapien
tttaactcaaacattcgatgaccaagacaaagt

SEQ ID NO: 549845 - DNA, 33 bp, Homo sapien
tagcgaagactatacaatgaagttcccaagtca

SEQ ID NO: 549846 - DNA, 33 bp, Homo sapien
tagcgaagactatacagtgaagttcccaagtca

SEQ ID NO: 549847 - DNA, 33 bp, Homo sapien
ctctgaaatgtgtgcactcttagcgccactttg

SEQ ID NO: 549848 - DNA, 33 bp, Homo sapien
ctctgaaatgtgtgcattcttagcgccactttg

SEQ ID NO: 549849 - DNA, 33 bp, Homo sapien
aaacaaatggaagaaactggcttcacatgaaaa

SEQ ID NO: 549850 - DNA, 33 bp, Homo sapien
aaacaaatggaagaaattggcttcacatgaaaa

SEQ ID NO: 549851 - DNA, 33 bp, Homo sapien
ggaggcaggaagtctacgtgcaggttgaatgtg

SEQ ID NO: 549852 - DNA, 33 bp, Homo sapien
ggaggcaggaagtctatgtgcaggttgaatgtg

SEQ ID NO: 549853 - DNA, 33 bp, Homo sapien
acgtgtcacaaagaagaattaggttggacgtga

SEQ ID NO: 549854 - DNA, 33 bp, Homo sapien
acgtgtcacaaagaaggattaggttggacgtga

SEQ ID NO: 549855 - DNA, 33 bp, Homo sapien
aaagctctagacgcaacgttcaaatatgtagaa

SEQ ID NO: 549856 - DNA, 33 bp, Homo sapien
aaagctctagacgcaaggttcaaatatgtagaa

SEQ ID NO: 549857 - DNA, 33 bp, Homo sapien
attttccagctaaaaaactgccgtaacatttta

SEQ ID NO: 549858 - DNA, 33 bp, Homo sapien
attttccagctaaaaagctgccgtaacatttta

SEQ ID NO: 549859 - DNA, 33 bp, Homo sapien
acattgacagaacagactattattcactcaaac

SEQ ID NO: 549860 - DNA, 33 bp, Homo sapien
acattgacagaacagagtattattcactcaaac

SEQ ID NO: 549861 - DNA, 33 bp, Homo sapien
cccaaatatctgtcaaccgatgaatgagcaaac

SEQ ID NO: 549862 - DNA, 33 bp, Homo sapien
cccaaatatctgtcaagcgatgaatgagcaaac

SEQ ID NO: 549863 - DNA, 33 bp, Homo sapien
ttttgatccaacagtaccgtttcagctgtttta

SEQ ID NO: 549864 - DNA, 33 bp, Homo sapien
ttttgatccaacagtatcgtttcagctgtttta

SEQ ID NO: 549865 - DNA, 33 bp, Homo sapien
ttatggaaatttccaaacagacacggaagtaga

SEQ ID NO: 549866 - DNA, 33 bp, Homo sapien
ttatggaaatttccaagcagacacggaagtaga

SEQ ID NO: 549867 - DNA, 33 bp, Homo sapien
gaaaatactatttgcaccatcagactgacaaaa

SEQ ID NO: 549868 - DNA, 33 bp, Homo sapien
gaaaatactatttgcatcatcagactgacaaaa

SEQ ID NO: 549869 - DNA, 33 bp, Homo sapien
ggtaaaaagtgtgaaccggcatttaccagaaga

SEQ ID NO: 549870 - DNA, 33 bp, Homo sapien
ggtaaaaagtgtgaactggcatttaccagaaga

SEQ ID NO: 549871 - DNA, 33 bp, Homo sapien
aagttctaaatgcacaaaatcatgtgatctcac

SEQ ID NO: 549872 - DNA, 33 bp, Homo sapien
aagttctaaatgcacagaatcatgtgatctcac

SEQ ID NO: 549873 - DNA, 33 bp, Homo sapien
ggagattagaaactagaaaacattcagaacgca

SEQ ID NO: 549874 - DNA, 33 bp, Homo sapien
ggagattagaaactaggaaacattcagaacgca

SEQ ID NO: 549875 - DNA, 33 bp, Homo sapien
ccaggaccacgatacccgagacatttctcttcc

SEQ ID NO: 549876 - DNA, 33 bp, Homo sapien
ccaggaccacgatacctgagacatttctcttcc

SEQ ID NO: 549877 - DNA, 33 bp, Homo sapien
tgtgccaagaagacgaagataagcatattcaca

SEQ ID NO: 549878 - DNA, 33 bp, Homo sapien
tgtgccaagaagacgaggataagcatattcaca

SEQ ID NO: 549879 - DNA, 33 bp, Homo sapien
gtaaagataattcacgacaacactatgagaaat

SEQ ID NO: 549880 - DNA, 33 bp, Homo sapien
gtaaagataattcacggcaacactatgagaaat

SEQ ID NO: 549881 - DNA, 33 bp, Homo sapien
ctaaaaattccgcaaggagagagagggtactgg

SEQ ID NO: 549882 - DNA, 33 bp, Homo sapien
ctaaaaattccgcaagtagagagagggtactgg

SEQ ID NO: 549883 - DNA, 33 bp, Homo sapien
tctaatgtcttggctagaactgcctcacgcact

SEQ ID NO: 549884 - DNA, 33 bp, Homo sapien
tctaatgtcttggctataactgcctcacgcact

SEQ ID NO: 549885 - DNA, 33 bp, Homo sapien
cagtgatcatgtcaacacgtcccccttcacacc

SEQ ID NO: 549886 - DNA, 33 bp, Homo sapien
cagtgatcatgtcaacgcgtcccccttcacacc

SEQ ID NO: 549887 - DNA, 33 bp, Homo sapien
cggacagtctgccatccaacggattcatcattg

SEQ ID NO: 549888 - DNA, 33 bp, Homo sapien
cggacagtctgccatcgaacggattcatcattg

SEQ ID NO: 549889 - DNA, 33 bp, Homo sapien
atctatcttgtctcccaagttcctggtacaatg

SEQ ID NO: 549890 - DNA, 33 bp, Homo sapien
atctatcttgtctccccagttcctggtacaatg

SEQ ID NO: 549891 - DNA, 33 bp, Homo sapien
caagccctgcttaaacgactctttatatgtaat

SEQ ID NO: 549892 - DNA, 33 bp, Homo sapien
caagccctgcttaaactactctttatatgtaat

SEQ ID NO: 549893 - DNA, 33 bp, Homo sapien
ctggccagatgatacaatattcttaagaggata

SEQ ID NO: 549894 - DNA, 33 bp, Homo sapien
ctggccagatgatacagtattcttaagaggata

SEQ ID NO: 549895 - DNA, 33 bp, Homo sapien
acattcctttcaagcaactagaagatgagtgtg

SEQ ID NO: 549896 - DNA, 33 bp, Homo sapien
acattcctttcaagcagctagaagatgagtgtg

SEQ ID NO: 549897 - DNA, 33 bp, Homo sapien
aaacctggataaataacgagcagtaaactccag

SEQ ID NO: 549898 - DNA, 33 bp, Homo sapien
aaacctggataaataatgagcagtaaactccag

SEQ ID NO: 549899 - DNA, 33 bp, Homo sapien
taaagtgtttaagcagaagtagtaacatatagt

SEQ ID NO: 549900 - DNA, 33 bp, Homo sapien
taaagtgtttaagcagtagtagtaacatatagt

SEQ ID NO: 549901 - DNA, 33 bp, Homo sapien
atatcacacctagcaactaaaccgcatacattc

SEQ ID NO: 549902 - DNA, 33 bp, Homo sapien
atatcacacctagcaattaaaccgcatacattc

SEQ ID NO: 549903 - DNA, 33 bp, Homo sapien
ttgtaaattgggaatacgaaacaagtaaacctt

SEQ ID NO: 549904 - DNA, 33 bp, Homo sapien
ttgtaaattgggaatatgaaacaagtaaacctt

SEQ ID NO: 549905 - DNA, 33 bp, Homo sapien
ctggagtgtttgtggccgatgtattgaaatgta

SEQ ID NO: 549906 - DNA, 33 bp, Homo sapien
ctggagtgtttgtggctgatgtattgaaatgta

SEQ ID NO: 549907 - DNA, 33 bp, Homo sapien
cagaactggcatagtacattggtagagaaaaat

SEQ ID NO: 549908 - DNA, 33 bp, Homo sapien
cagaactggcatagtagattggtagagaaaaat

SEQ ID NO: 549909 - DNA, 33 bp, Homo sapien
ttttgattcttagttcactgatggtcccaacat

SEQ ID NO: 549910 - DNA, 33 bp, Homo sapien
ttttgattcttagttcgctgatggtcccaacat

SEQ ID NO: 549911 - DNA, 33 bp, Homo sapien
ttgtggctatgtaacaaaatttccttatttttc

SEQ ID NO: 549912 - DNA, 33 bp, Homo sapien
ttgtggctatgtaacagaatttccttatttttc

SEQ ID NO: 549913 - DNA, 33 bp, Homo sapien
gagtagcatttgctgacataccaacttgtacat

SEQ ID NO: 549914 - DNA, 33 bp, Homo sapien
gagtagcatttgctgagataccaacttgtacat

SEQ ID NO: 549915 - DNA, 33 bp, Homo sapien
tgactttgttttggaccatcccaaagctgtgat

SEQ ID NO: 549916 - DNA, 33 bp, Homo sapien
tgactttgttttggactatcccaaagctgtgat

SEQ ID NO: 549917 - DNA, 33 bp, Homo sapien
gcatatgagaggtccaactgttcacactcacca

SEQ ID NO: 549918 - DNA, 33 bp, Homo sapien
gcatatgagaggtccagctgttcacactcacca

SEQ ID NO: 549919 - DNA, 33 bp, Homo sapien
tgtccaccaaaagctaactttgaatttggatct

SEQ ID NO: 549920 - DNA, 33 bp, Homo sapien
tgtccaccaaaagctacctttgaatttggatct

SEQ ID NO: 549921 - DNA, 33 bp, Homo sapien
cctggatagactcaagaagattttgttacagga

SEQ ID NO: 549922 - DNA, 33 bp, Homo sapien
cctggatagactcaaggagattttgttacagga

SEQ ID NO: 549923 - DNA, 33 bp, Homo sapien; identical to SEQ ID NO: 549921

SEQ ID NO: 549924 - DNA, 33 bp, Homo sapien; identical to SEQ ID NO: 549922

SEQ ID NO: 549925 - DNA, 33 bp, Homo sapien
ctaaggcctcccactaaaattgtttacttcaag

SEQ ID NO: 549926 - DNA, 33 bp, Homo sapien
ctaaggcctcccactagaattgtttacttcaag

SEQ ID NO: 549927 - DNA, 33 bp, Homo sapien; identical to SEQ ID NO: 549925

SEQ ID NO: 549928 - DNA, 33 bp, Homo sapien; identical to SEQ ID NO: 549926

SEQ ID NO: 549929 - DNA, 33 bp, Homo sapien
aattaaatactttaacaaagatagcagatcatc

SEQ ID NO: 549930 - DNA, 33 bp, Homo sapien
aattaaatactttaaccaagatagcagatcatc

SEQ ID NO: 549931 - DNA, 33 bp, Homo sapien
ccacaacaagtgaatcaaaccctcctggccagc

SEQ ID NO: 549932 - DNA, 33 bp, Homo sapien
ccacaacaagtgaatcgaaccctcctggccagc

SEQ ID NO: 549933 - DNA, 33 bp, Homo sapien
ttttctttgcttagagcatgagttgccatcttc

SEQ ID NO: 549934 - DNA, 33 bp, Homo sapien
ttttctttgcttagagtatgagttgccatcttc

SEQ ID NO: 549935 - DNA, 33 bp, Homo sapien
gcaatgttaagtttagaagcagaattattaacc

SEQ ID NO: 549936 - DNA, 33 bp, Homo sapien
gcaatgttaagtttagtagcagaattattaacc

SEQ ID NO: 549937 - DNA, 33 bp, Homo sapien
cttggatatggcccaaccacagaagtaaattgt

SEQ ID NO: 549938 - DNA, 33 bp, Homo sapien
cttggatatggcccaatcacagaagtaaattgt

SEQ ID NO: 549939 - DNA, 33 bp, Homo sapien; identical to SEQ ID NO: 549937

SEQ ID NO: 549940 - DNA, 33 bp, Homo sapien; identical to SEQ ID NO: 549938

SEQ ID NO: 549941 - DNA, 33 bp, Homo sapien
tttcaaacatacacaacggagagactcagtgta

SEQ ID NO: 549942 - DNA, 33 bp, Homo sapien
tttcaaacatacacaatggagagactcagtgta

SEQ ID NO: 549943 - DNA, 33 bp, Homo sapien; identical to SEQ ID NO: 549941

SEQ ID NO: 549944 - DNA, 33 bp, Homo sapien; identical to SEQ ID NO: 549942

SEQ ID NO: 549945 - DNA, 33 bp, Homo sapien
gagagactcagtgtaacgagcacccacttatcc

SEQ ID NO: 549946 - DNA, 33 bp, Homo sapien
gagagactcagtgtaatgagcacccacttatcc

SEQ ID NO: 549947 - DNA, 33 bp, Homo sapien
actatggactcctaaaagggagaggaaaggctg

SEQ ID NO: 549948 - DNA, 33 bp, Homo sapien
actatggactcctaaaggggagaggaaaggctg

SEQ ID NO: 549949 - DNA, 33 bp, Homo sapien
ctgttgaatccctcacgaaatgctcctcagtgt

SEQ ID NO: 549950 - DNA, 33 bp, Homo sapien
ctgttgaatccctcactaaatgctcctcagtgt

SEQ ID NO: 549951 - DNA, 33 bp, Homo sapien; identical to SEQ ID NO: 549949

SEQ ID NO: 549952 - DNA, 33 bp, Homo sapien; identical to SEQ ID NO: 549950

SEQ ID NO: 549953 - DNA, 33 bp, Homo sapien
ctcctataatatagtaagtggaagaagtacaga

SEQ ID NO: 549954 - DNA, 33 bp, Homo sapien
ctcctataatatagtacgtggaagaagtacaga

SEQ ID NO: 549955 - DNA, 33 bp, Homo sapien
tggggtacaacttcccggccttgctaattaatt

SEQ ID NO: 549956 - DNA, 33 bp, Homo sapien
tggggtacaacttccctgccttgctaattaatt

SEQ ID NO: 549957 - DNA, 33 bp, Homo sapien
tttttacccaagtttacgcaagtgtcacagctg

SEQ ID NO: 549958 - DNA, 33 bp, Homo sapien
tttttacccaagtttatgcaagtgtcacagctg

SEQ ID NO: 549959 - DNA, 33 bp, Homo sapien
ggagccagaattcaagaccatacattctttgta

SEQ ID NO: 549960 - DNA, 33 bp, Homo sapien
ggagccagaattcaagcccatacattctttgta

SEQ ID NO: 549961 - DNA, 33 bp, Homo sapien
ctttgaaagaaaaggacgtaaagagagctgatc

SEQ ID NO: 549962 - DNA, 33 bp, Homo sapien
ctttgaaagaaaaggatgtaaagagagctgatc

SEQ ID NO: 549963 - DNA, 33 bp, Homo sapien; identical to SEQ ID NO: 549961

SEQ ID NO: 549964 - DNA, 33 bp, Homo sapien; identical to SEQ ID NO: 549962

SEQ ID NO: 549965 - DNA, 33 bp, Homo sapien
ttgcttctaaggtgctaactctttcagaccctt

SEQ ID NO: 549966 - DNA, 33 bp, Homo sapien
ttgcttctaaggtgctcactctttcagaccctt

SEQ ID NO: 549967 - DNA, 33 bp, Homo sapien
gctggcattttgaatacaggagagacccaaaga

SEQ ID NO: 549968 - DNA, 33 bp, Homo sapien
gctggcattttgaatagaggagagacccaaaga

SEQ ID NO: 549969 - DNA, 33 bp, Homo sapien
tgatcattgtaagctgccaatcctcttgggagg

SEQ ID NO: 549970 - DNA, 33 bp, Homo sapien
tgatcattgtaagctggcaatcctcttgggagg

SEQ ID NO: 549971 - DNA, 33 bp, Homo sapien; identical to SEQ ID NO: 549969

SEQ ID NO: 549972 - DNA, 33 bp, Homo sapien; identical to SEQ ID NO: 549970

SEQ ID NO: 549973 - DNA, 33 bp, Homo sapien
ggcctgcctccttcgcgcatttcagagaatttc

SEQ ID NO: 549974 - DNA, 33 bp, Homo sapien
ggcctgcctccttcgctcatttcagagaatttc

SEQ ID NO: 549975 - DNA, 33 bp, Homo sapien
gatggggataactgaaatggttccagggattct

SEQ ID NO: 549976 - DNA, 33 bp, Homo sapien
gatggggataactgaactggttccagggattct

SEQ ID NO: 549977 - DNA, 33 bp, Homo sapien
agtcctagacgtgggactagaaattagatgaca

SEQ ID NO: 549978 - DNA, 33 bp, Homo sapien
agtcctagacgtgggagtagaaattagatgaca

SEQ ID NO: 549979 - DNA, 33 bp, Homo sapien
ctcaaagaggactctccctgaagtggctgtcaa

SEQ ID NO: 549980 - DNA, 33 bp, Homo sapien
ctcaaagaggactctctctgaagtggctgtcaa

SEQ ID NO: 549981 - DNA, 33 bp, Homo sapien
atcctggtgtgaaaaacgaccaaaaccagatag

SEQ ID NO: 549982 - DNA, 33 bp, Homo sapien
atcctggtgtgaaaaatgaccaaaaccagatag

SEQ ID NO: 549983 - DNA, 33 bp, Homo sapien
aacacagcacatccaaaatgcagacaacattgc

SEQ ID NO: 549984 - DNA, 33 bp, Homo sapien
aacacagcacatccaagatgcagacaacattgc

SEQ ID NO: 549985 - DNA, 33 bp, Homo sapien
tgttggattgtaatagaagaatgtttcttgtga

SEQ ID NO: 549986 - DNA, 33 bp, Homo sapien
tgttggattgtaataggagaatgtttcttgtga

SEQ ID NO: 549987 - DNA, 33 bp, Homo sapien
gtttgtactttttgtaccctaaggaagctttgt

SEQ ID NO: 549988 - DNA, 33 bp, Homo sapien
gtttgtactttttgtatcctaaggaagctttgt

SEQ ID NO: 549989 - DNA, 33 bp, Homo sapien
ctccaacccccttaaaactgtctgcatcttaag

SEQ ID NO: 549990 - DNA, 33 bp, Homo sapien
ctccaacccccttaaagctgtctgcatcttaag

SEQ ID NO: 549991 - DNA, 33 bp, Homo sapien
ggaggaatagttgagaagctgagatgttgcacc

SEQ ID NO: 549992 - DNA, 33 bp, Homo sapien
ggaggaatagttgagaggctgagatgttgcacc

SEQ ID NO: 549993 - DNA, 33 bp, Homo sapien
tctctgctgaatgtgacgctatttgctaaccct

SEQ ID NO: 549994 - DNA, 33 bp, Homo sapien
tctctgctgaatgtgatgctatttgctaaccct

SEQ ID NO: 549995 - DNA, 33 bp, Homo sapien
acgcctatcttgaaaaactcatctgaccctgtg

SEQ ID NO: 549996 - DNA, 33 bp, Homo sapien
acgcctatcttgaaaagctcatctgaccctgtg

SEQ ID NO: 549997 - DNA, 33 bp, Homo sapien
acccattaatctataactgcctttcgttatggg

SEQ ID NO: 549998 - DNA, 33 bp, Homo sapien
acccattaatctataattgcctttcgttatggg

SEQ ID NO: 549999 - DNA, 33 bp, Homo sapien
ggtgcctttacaaacactgtccgtgagtcacag

SEQ ID NO: 550000 - DNA, 33 bp, Homo sapien
ggtgcctttacaaacagtgtccgtgagtcacag

SEQ ID NO: 550001 - DNA, 33 bp, Homo sapien; identical to SEQ ID NO: 549999

SEQ ID NO: 550002 - DNA, 33 bp, Homo sapien; identical to SEQ ID NO: 550000

SEQ ID NO: 550003 - DNA, 33 bp, Homo sapien; identical to SEQ ID NO: 549999

SEQ ID NO: 550004 - DNA, 33 bp, Homo sapien; identical to SEQ ID NO: 550000

SEQ ID NO: 550005 - DNA, 33 bp, Homo sapien
cagggacactacattcagaactgatccatcctg

SEQ ID NO: 550006 - DNA, 33 bp, Homo sapien
cagggacactacattcggaactgatccatcctg

SEQ ID NO: 550007 - DNA, 33 bp, Homo sapien
ggtacttagccagcaccgccgcgcagaggttaa

SEQ ID NO: 550008 - DNA, 33 bp, Homo sapien
ggtacttagccagcactgccgcgcagaggttaa

SEQ ID NO: 550009 - DNA, 33 bp, Homo sapien
atctcagagttcggaaagcaaagtaatggttgc

SEQ ID NO: 550010 - DNA, 33 bp, Homo sapien
atctcagagttcggaaggcaaagtaatggttgc

SEQ ID NO: 550011 - DNA, 33 bp, Homo sapien; identical to SEQ ID NO: 550009

SEQ ID NO: 550012 - DNA, 33 bp, Homo sapien; identical to SEQ ID NO: 550010

SEQ ID NO: 550013 - DNA, 33 bp, Homo sapien
gcaccataaacacaacaagaaagtacctttctg

SEQ ID NO: 550014 - DNA, 33 bp, Homo sapien
gcaccataaacacaacgagaaagtacctttctg

SEQ ID NO: 550015 - DNA, 33 bp, Homo sapien
cacgggttatgccccaaatgaagaccttttggg

SEQ ID NO: 550016 - DNA, 33 bp, Homo sapien
cacgggttatgccccagatgaagaccttttggg

SEQ ID NO: 550017 - DNA, 33 bp, Homo sapien
ccgcagtcctaaacaacaggatgtcttcagccc

SEQ ID NO: 550018 - DNA, 33 bp, Homo sapien
ccgcagtcctaaacaataggatgtcttcagccc

SEQ ID NO: 550019 - DNA, 33 bp, Homo sapien
tcccttttgacttcaaatcagtcatcagaattt

SEQ ID NO: 550020 - DNA, 33 bp, Homo sapien
tcccttttgacttcaactcagtcatcagaattt

SEQ ID NO: 550021 - DNA, 33 bp, Homo sapien
gttactctgagtatcccgaaaacctgtaccttt

SEQ ID NO: 550022 - DNA, 33 bp, Homo sapien
gttactctgagtatcctgaaaacctgtaccttt

SEQ ID NO: 550023 - DNA, 33 bp, Homo sapien
ttaggcttcttttccaaaaattaaacagaaggc

SEQ ID NO: 550024 - DNA, 33 bp, Homo sapien
ttaggcttcttttccagaaattaaacagaaggc

SEQ ID NO: 550025 - DNA, 33 bp, Homo sapien
tatatatggcaaaaaccaatcgatacaccaagt

SEQ ID NO: 550026 - DNA, 33 bp, Homo sapien
tatatatggcaaaaacgaatcgatacaccaagt

SEQ ID NO: 550027 - DNA, 33 bp, Homo sapien
gttgtacatcagagacagagcattttacacctt

SEQ ID NO: 550028 - DNA, 33 bp, Homo sapien
gttgtacatcagagacggagcattttacacctt

SEQ ID NO: 550029 - DNA, 33 bp, Homo sapien
ctttagcacttagacaacatgtgggtcatctgt

SEQ ID NO: 550030 - DNA, 33 bp, Homo sapien
ctttagcacttagacaccatgtgggtcatctgt

SEQ ID NO: 550031 - DNA, 33 bp, Homo sapien
gcagaacaaggaataacgcaggaattttatgag

SEQ ID NO: 550032 - DNA, 33 bp, Homo sapien
gcagaacaaggaataatgcaggaattttatgag

SEQ ID NO: 550033 - DNA, 33 bp, Homo sapien
aaaagtggagcccaaaagatttccctgtcattt

SEQ ID NO: 550034 - DNA, 33 bp, Homo sapien
aaaagtggagcccaaaggatttccctgtcattt

SEQ ID NO: 550035 - DNA, 33 bp, Homo sapien
gagaaattcatatcagcatctctcataactcct

SEQ ID NO: 550036 - DNA, 33 bp, Homo sapien
gagaaattcatatcagtatctctcataactcct

SEQ ID NO: 550037 - DNA, 33 bp, Homo sapien
ccctgatacgcagaccacagagcagctggactt

SEQ ID NO: 550038 - DNA, 33 bp, Homo sapien
ccctgatacgcagaccgcagagcagctggactt

SEQ ID NO: 550039 - DNA, 33 bp, Homo sapien; identical to SEQ ID NO: 550037

SEQ ID NO: 550040 - DNA, 33 bp, Homo sapien; identical to SEQ ID NO: 550038

SEQ ID NO: 550041 - DNA, 33 bp, Homo sapien
tggggtcctagatataggcacagctctgagcat

SEQ ID NO: 550042 - DNA, 33 bp, Homo sapien
tggggtcctagatatatgcacagctctgagcat

SEQ ID NO: 550043 - DNA, 33 bp, Homo sapien
agtccctctgataaaacttctcccggcgatttg

SEQ ID NO: 550044 - DNA, 33 bp, Homo sapien
agtccctctgataaaagttctcccggcgatttg

SEQ ID NO: 550045 - DNA, 33 bp, Homo sapien
cctgcagcctcagtgaataatcattccctcctt

SEQ ID NO: 550046 - DNA, 33 bp, Homo sapien
cctgcagcctcagtgagtaatcattccctcctt

SEQ ID NO: 550047 - DNA, 33 bp, Homo sapien
tgagctatccaaaggaagtttacacaattctaa

SEQ ID NO: 550048 - DNA, 33 bp, Homo sapien
tgagctatccaaaggaggtttacacaattctaa

SEQ ID NO: 550049 - DNA, 33 bp, Homo sapien
acatgacttgaataacaagagctgaggctcaca

SEQ ID NO: 550050 - DNA, 33 bp, Homo sapien
acatgacttgaataacgagagctgaggctcaca

SEQ ID NO: 550051 - DNA, 33 bp, Homo sapien; identical to SEQ ID NO: 550049

SEQ ID NO: 550052 - DNA, 33 bp, Homo sapien; identical to SEQ ID NO: 550050

SEQ ID NO: 550053 - DNA, 33 bp, Homo sapien
ggagcctgcgcttgagcaaagagctgaacaacc

SEQ ID NO: 550054 - DNA, 33 bp, Homo sapien
ggagcctgcgcttgagtaaagagctgaacaacc

SEQ ID NO: 550055 - DNA, 33 bp, Homo sapien
aacacaaaactataccacattgctacaaaattc

SEQ ID NO: 550056 - DNA, 33 bp, Homo sapien
aacacaaaactataccgcattgctacaaaattc

SEQ ID NO: 550057 - DNA, 33 bp, Homo sapien
ctccttttgtataaaccgagttgcttttgttag

SEQ ID NO: 550058 - DNA, 33 bp, Homo sapien
ctccttttgtataaactgagttgcttttgttag

SEQ ID NO: 550059 - DNA, 33 bp, Homo sapien
ccagattccagctccacgtggcgaagttctaca

SEQ ID NO: 550060 - DNA, 33 bp, Homo sapien
ccagattccagctccatgtggcgaagttctaca

SEQ ID NO: 550061 - DNA, 33 bp, Homo sapien; identical to SEQ ID NO: 550059

SEQ ID NO: 550062 - DNA, 33 bp, Homo sapien; identical to SEQ ID NO: 550060

SEQ ID NO: 550063 - DNA, 33 bp, Homo sapien
acatattcagaatacactggtgaaactcatgct

SEQ ID NO: 550064 - DNA, 33 bp, Homo sapien
acatattcagaatacattggtgaaactcatgct

SEQ ID NO: 550065 - DNA, 33 bp, Homo sapien
cagtcccagataaagaagtgccaggccacggaa

SEQ ID NO: 550066 - DNA, 33 bp, Homo sapien
cagtcccagataaagacgtgccaggccacggaa

SEQ ID NO: 550067 - DNA, 33 bp, Homo sapien
ctttctaaatattccacaactatttccctgaac

SEQ ID NO: 550068 - DNA, 33 bp, Homo sapien
ctttctaaatattccagaactatttccctgaac

SEQ ID NO: 550069 - DNA, 33 bp, Homo sapien
aatgagaaacatcgaagtaaggtcttaccttaa

SEQ ID NO: 550070 - DNA, 33 bp, Homo sapien
aatgagaaacatcgaattaaggtcttaccttaa

SEQ ID NO: 550071 - DNA, 33 bp, Homo sapien
ttttcaagctagtaaactggaataaagagcaga

SEQ ID NO: 550072 - DNA, 33 bp, Homo sapien
ttttcaagctagtaaattggaataaagagcaga

SEQ ID NO: 550073 - DNA, 33 bp, Homo sapien
ttgatgtggtctccagaatagcttccagccaca

SEQ ID NO: 550074 - DNA, 33 bp, Homo sapien
ttgatgtggtctccaggatagcttccagccaca

SEQ ID NO: 550075 - DNA, 33 bp, Homo sapien
gggaaacagacatataaatgacacttactgttt

SEQ ID NO: 550076 - DNA, 33 bp, Homo sapien
gggaaacagacatatagatgacacttactgttt

SEQ ID NO: 550077 - DNA, 33 bp, Homo sapien
aataaaggaaagaaacaaaggagagatccaggt

SEQ ID NO: 550078 - DNA, 33 bp, Homo sapien
aataaaggaaagaaacgaaggagagatccaggt

SEQ ID NO: 550079 - DNA, 33 bp, Homo sapien
agatgccaaagtgacaagcaaaaaaaaggtaca

SEQ ID NO: 550080 - DNA, 33 bp, Homo sapien
agatgccaaagtgacaggcaaaaaaaaggtaca

SEQ ID NO: 550081 - DNA, 33 bp, Homo sapien
gcattaaacggacacaaaaggttcacaagatct

SEQ ID NO: 550082 - DNA, 33 bp, Homo sapien
gcattaaacggacacagaaggttcacaagatct

SEQ ID NO: 550083 - DNA, 33 bp, Homo sapien
attggaaaaggtacaaattaaatgtgtagatcc

SEQ ID NO: 550084 - DNA, 33 bp, Homo sapien
attggaaaaggtacaagttaaatgtgtagatcc

SEQ ID NO: 550085 - DNA, 33 bp, Homo sapien
gtggtgctccagctaaagaaagaagaaccctgt

SEQ ID NO: 550086 - DNA, 33 bp, Homo sapien
gtggtgctccagctaaggaaagaagaaccctgt

SEQ ID NO: 550087 - DNA, 33 bp, Homo sapien
atgccattctctgtaacacctcaccctaccacc

SEQ ID NO: 550088 - DNA, 33 bp, Homo sapien
atgccattctctgtaatacctcaccctaccacc

SEQ ID NO: 550089 - DNA, 33 bp, Homo sapien
gtcttatttggataaacggcccctgattttgca

SEQ ID NO: 550090 - DNA, 33 bp, Homo sapien
gtcttatttggataaatggcccctgattttgca

SEQ ID NO: 550091 - DNA, 33 bp, Homo sapien
ctgctgtacaatagcaactttagaatgtttggg

SEQ ID NO: 550092 - DNA, 33 bp, Homo sapien
ctgctgtacaatagcagctttagaatgtttggg

SEQ ID NO: 550093 - DNA, 33 bp, Homo sapien
gaatatattgctaccaactatgtgttgtacctg

SEQ ID NO: 550094 - DNA, 33 bp, Homo sapien
gaatatattgctaccagctatgtgttgtacctg

SEQ ID NO: 550095 - DNA, 33 bp, Homo sapien
tggtcttatcattctacggcaaatccaaagttt

SEQ ID NO: 550096 - DNA, 33 bp, Homo sapien
tggtcttatcattctatggcaaatccaaagttt

SEQ ID NO: 550097 - DNA, 33 bp, Homo sapien
aggcccagtgagtatacctgttggcctgagaat

SEQ ID NO: 550098 - DNA, 33 bp, Homo sapien
aggcccagtgagtatatctgttggcctgagaat

SEQ ID NO: 550099 - DNA, 33 bp, Homo sapien
aagctcaatgaaactagcaagaactcagtgttg

SEQ ID NO: 550100 - DNA, 33 bp, Homo sapien
aagctcaatgaaactatcaagaactcagtgttg

SEQ ID NO: 550101 - DNA, 33 bp, Homo sapien
acatggaataggccaaagacagtggctcatggc

SEQ ID NO: 550102 - DNA, 33 bp, Homo sapien
acatggaataggccaaggacagtggctcatggc

SEQ ID NO: 550103 - DNA, 33 bp, Homo sapien
ccaagtcaatgtactacgcagaagcctgtgcaa

SEQ ID NO: 550104 - DNA, 33 bp, Homo sapien
ccaagtcaatgtactatgcagaagcctgtgcaa

SEQ ID NO: 550105 - DNA, 33 bp, Homo sapien; identical to SEQ ID NO: 550103

SEQ ID NO: 550106 - DNA, 33 bp, Homo sapien; identical to SEQ ID NO: 550104

SEQ ID NO: 550107 - DNA, 33 bp, Homo sapien
taactgtaatcaattacgacatccatctctttc

SEQ ID NO: 550108 - DNA, 33 bp, Homo sapien
taactgtaatcaattaggacatccatctctttc

SEQ ID NO: 550109 - DNA, 33 bp, Homo sapien
cagaaagaatggattcaatgtaaaatgtgaaag

SEQ ID NO: 550110 - DNA, 33 bp, Homo sapien
cagaaagaatggattccatgtaaaatgtgaaag

SEQ ID NO: 550111 - DNA, 33 bp, Homo sapien; identical to SEQ ID NO: 550109

SEQ ID NO: 550112 - DNA, 33 bp, Homo sapien; identical to SEQ ID NO: 550110

SEQ ID NO: 550113 - DNA, 33 bp, Homo sapien
taacccctgacataaaagggacttagagctgaa

SEQ ID NO: 550114 - DNA, 33 bp, Homo sapien
taacccctgacataaatgggacttagagctgaa

SEQ ID NO: 550115 - DNA, 33 bp, Homo sapien
tgaagtgagaactccaagtagaagcaggcagta

SEQ ID NO: 550116 - DNA, 33 bp, Homo sapien
tgaagtgagaactccaggtagaagcaggcagta

SEQ ID NO: 550117 - DNA, 33 bp, Homo sapien
attgcttatccagcaacggatgatgtgcttttg

SEQ ID NO: 550118 - DNA, 33 bp, Homo sapien
attgcttatccagcaagggatgatgtgcttttg

SEQ ID NO: 550119 - DNA, 33 bp, Homo sapien
gcagctgttttaataacggagaagaaggacaac

SEQ ID NO: 550120 - DNA, 33 bp, Homo sapien
gcagctgttttaataatggagaagaaggacaac

SEQ ID NO: 550121 - DNA, 33 bp, Homo sapien
aaaggctctgtttgcacgaggactctgttccct

SEQ ID NO: 550122 - DNA, 33 bp, Homo sapien
aaaggctctgtttgcatgaggactctgttccct

SEQ ID NO: 550123 - DNA, 33 bp, Homo sapien
gtaacactgcactgaaaatactaatgtcaagta

SEQ ID NO: 550124 - DNA, 33 bp, Homo sapien
gtaacactgcactgaagatactaatgtcaagta

SEQ ID NO: 550125 - DNA, 33 bp, Homo sapien; identical to SEQ ID NO: 550123

SEQ ID NO: 550126 - DNA, 33 bp, Homo sapien; identical to SEQ ID NO: 550124

SEQ ID NO: 550127 - DNA, 33 bp, Homo sapien
cctgcctccaccactcaccggttatgtaaccat

SEQ ID NO: 550128 - DNA, 33 bp, Homo sapien
cctgcctccaccactcgccggttatgtaaccat

SEQ ID NO: 550129 - DNA, 33 bp, Homo sapien
tactcaacaaatgttaactaacgtcacagggga

SEQ ID NO: 550130 - DNA, 33 bp, Homo sapien
tactcaacaaatgttagctaacgtcacagggga

SEQ ID NO: 550131 - DNA, 33 bp, Homo sapien
gtgaactttcctcataccaactaaatgcagtat

SEQ ID NO: 550132 - DNA, 33 bp, Homo sapien
gtgaactttcctcatatcaactaaatgcagtat

SEQ ID NO: 550133 - DNA, 33 bp, Homo sapien; identical to SEQ ID NO: 550131

SEQ ID NO: 550134 - DNA, 33 bp, Homo sapien; identical to SEQ ID NO: 550132

SEQ ID NO: 550135 - DNA, 33 bp, Homo sapien
cattcagtgtgcaaagaaaaacatcttgtttct

SEQ ID NO: 550136 - DNA, 33 bp, Homo sapien
cattcagtgtgcaaaggaaaacatcttgtttct

SEQ ID NO: 550137 - DNA, 33 bp, Homo sapien
tatacgaatctactgacgtgataaaattgcatt

SEQ ID NO: 550138 - DNA, 33 bp, Homo sapien
tatacgaatctactgatgtgataaaattgcatt

SEQ ID NO: 550139 - DNA, 33 bp, Homo sapien
taactactgccacaaccgaattttggaactgtt

SEQ ID NO: 550140 - DNA, 33 bp, Homo sapien
taactactgccacaactgaattttggaactgtt

SEQ ID NO: 550141 - DNA, 33 bp, Homo sapien
tctcactctccagggaaccagctgctctcttcc

SEQ ID NO: 550142 - DNA, 33 bp, Homo sapien
tctcactctccagggacccagctgctctcttcc

SEQ ID NO: 550143 - DNA, 33 bp, Homo sapien
ggagtgcagctaggagaccattacaagaacaaa

SEQ ID NO: 550144 - DNA, 33 bp, Homo sapien
ggagtgcagctaggaggccattacaagaacaaa

SEQ ID NO: 550145 - DNA, 33 bp, Homo sapien
tcttttaaacagcaagcataagaggaatgggaa

SEQ ID NO: 550146 - DNA, 33 bp, Homo sapien
tcttttaaacagcaaggataagaggaatgggaa

SEQ ID NO: 550147 - DNA, 33 bp, Homo sapien; identical to SEQ ID NO: 550145

SEQ ID NO: 550148 - DNA, 33 bp, Homo sapien; identical to SEQ ID NO: 550146

SEQ ID NO: 550149 - DNA, 33 bp, Homo sapien
gcattgccagccaacaaaaaggaaggggcagag

SEQ ID NO: 550150 - DNA, 33 bp, Homo sapien
gcattgccagccaacagaaaggaaggggcagag

SEQ ID NO: 550151 - DNA, 33 bp, Homo sapien
gttcattttctaattcacatgaagtaagaatta

SEQ ID NO: 550152 - DNA, 33 bp, Homo sapien
gttcattttctaattcgcatgaagtaagaatta

SEQ ID NO: 550153 - DNA, 33 bp, Homo sapien
cagtatctgttgaatgaaggtggtatgttggca

SEQ ID NO: 550154 - DNA, 33 bp, Homo sapien
cagtatctgttgaatggaggtggtatgttggca

SEQ ID NO: 550155 - DNA, 33 bp, Homo sapien; identical to SEQ ID NO: 550153

SEQ ID NO: 550156 - DNA, 33 bp, Homo sapien; identical to SEQ ID NO: 550154

SEQ ID NO: 550157 - DNA, 33 bp, Homo sapien
ctaccccaaattattgaaagtctctctagcagc

SEQ ID NO: 550158 - DNA, 33 bp, Homo sapien
ctaccccaaattattggaagtctctctagcagc

SEQ ID NO: 550159 - DNA, 33 bp, Homo sapien
tccacacgcaaggcagacatccacgtcacatcc

SEQ ID NO: 550160 - DNA, 33 bp, Homo sapien
tccacacgcaaggcaggcatccacgtcacatcc

SEQ ID NO: 550161 - DNA, 33 bp, Homo sapien; identical to SEQ ID NO: 550159

SEQ ID NO: 550162 - DNA, 33 bp, Homo sapien; identical to SEQ ID NO: 550160

SEQ ID NO: 550163 - DNA, 33 bp, Homo sapien
atcaaccaaatccacaatgagagacagtctact

SEQ ID NO: 550164 - DNA, 33 bp, Homo sapien
atcaaccaaatccacattgagagacagtctact

SEQ ID NO: 550165 - DNA, 33 bp, Homo sapien
gaccggtagaactaagaaaacgtgtcgtaatct

SEQ ID NO: 550166 - DNA, 33 bp, Homo sapien
gaccggtagaactaaggaaacgtgtcgtaatct

SEQ ID NO: 550167 - DNA, 33 bp, Homo sapien
gtggtttgttagtatcaaaagctggctgtcttc

SEQ ID NO: 550168 - DNA, 33 bp, Homo sapien
gtggtttgttagtatcgaaagctggctgtcttc

SEQ ID NO: 550169 - DNA, 33 bp, Homo sapien; identical to SEQ ID NO: 550167

SEQ ID NO: 550170 - DNA, 33 bp, Homo sapien; identical to SEQ ID NO: 550168

SEQ ID NO: 550171 - DNA, 33 bp, Homo sapien
gaggggtggagaaaaactcattgaaatatggtt

SEQ ID NO: 550172 - DNA, 33 bp, Homo sapien
gaggggtggagaaaaagtcattgaaatatggtt

SEQ ID NO: 550173 - DNA, 33 bp, Homo sapien; identical to SEQ ID NO: 550171

SEQ ID NO: 550174 - DNA, 33 bp, Homo sapien; identical to SEQ ID NO: 550172

SEQ ID NO: 550175 - DNA, 33 bp, Homo sapien
agatattacaacatccaagtaagaacattgata

SEQ ID NO: 550176 - DNA, 33 bp, Homo sapien
agatattacaacatcccagtaagaacattgata

SEQ ID NO: 550177 - DNA, 33 bp, Homo sapien
gcctcatcagaattagccacctggtcaatctcc

SEQ ID NO: 550178 - DNA, 33 bp, Homo sapien
gcctcatcagaattaggcacctggtcaatctcc

SEQ ID NO: 550179 - DNA, 33 bp, Homo sapien; identical to SEQ ID NO: 550177

SEQ ID NO: 550180 - DNA, 33 bp, Homo sapien; identical to SEQ ID NO: 550178

SEQ ID NO: 550181 - DNA, 33 bp, Homo sapien
caaggagtaagaggaaagtcactgaagtggacc

SEQ ID NO: 550182 - DNA, 33 bp, Homo sapien
caaggagtaagaggaaggtcactgaagtggacc

SEQ ID NO: 550183 - DNA, 33 bp, Homo sapien
agatgctcagttattaaatgaccaagtaaataa

SEQ ID NO: 550184 - DNA, 33 bp, Homo sapien
agatgctcagttattacatgaccaagtaaataa

SEQ ID NO: 550185 - DNA, 33 bp, Homo sapien
cagaagacctgaacaacgtaactttaagactga

SEQ ID NO: 550186 - DNA, 33 bp, Homo sapien
cagaagacctgaacaatgtaactttaagactga

SEQ ID NO: 550187 - DNA, 33 bp, Homo sapien; identical to SEQ ID NO: 550185

SEQ ID NO: 550188 - DNA, 33 bp, Homo sapien; identical to SEQ ID NO: 550186

SEQ ID NO: 550189 - DNA, 33 bp, Homo sapien
gtcaggccccagtcacagaaattacagcactgg

SEQ ID NO: 550190 - DNA, 33 bp, Homo sapien
gtcaggccccagtcacggaaattacagcactgg

SEQ ID NO: 550191 - DNA, 33 bp, Homo sapien
tatgggtctgtatttacctatgtttggaaggag

SEQ ID NO: 550192 - DNA, 33 bp, Homo sapien
tatgggtctgtatttatctatgtttggaaggag

SEQ ID NO: 550193 - DNA, 33 bp, Homo sapien
tttgtcaatatctcatgaattctgttccttctt

SEQ ID NO: 550194 - DNA, 33 bp, Homo sapien
tttgtcaatatctcattaattctgttccttctt

SEQ ID NO: 550195 - DNA, 33 bp, Homo sapien
cccagagttcttttaaaggtcgataggaggatt

SEQ ID NO: 550196 - DNA, 33 bp, Homo sapien
cccagagttcttttaatggtcgataggaggatt

SEQ ID NO: 550197 - DNA, 33 bp, Homo sapien
aagtttaggaaagcaacaccatccatgtgtaat

SEQ ID NO: 550198 - DNA, 33 bp, Homo sapien
aagtttaggaaagcaataccatccatgtgtaat

SEQ ID NO: 550199 - DNA, 33 bp, Homo sapien; identical to SEQ ID NO: 550197

SEQ ID NO: 550200 - DNA, 33 bp, Homo sapien; identical to SEQ ID NO: 550198

SEQ ID NO: 550201 - DNA, 33 bp, Homo sapien
aaagctatccttattacacaagaatggaccgtt

SEQ ID NO: 550202 - DNA, 33 bp, Homo sapien
aaagctatccttattagacaagaatggaccgtt

SEQ ID NO: 550203 - DNA, 33 bp, Homo sapien
tgttttccaaacaagcaaataaaccaacaaact

SEQ ID NO: 550204 - DNA, 33 bp, Homo sapien
tgttttccaaacaagcgaataaaccaacaaact

SEQ ID NO: 550205 - DNA, 33 bp, Homo sapien
tattttcaattaacaacgtggcaattgaaggca

SEQ ID NO: 550206 - DNA, 33 bp, Homo sapien
tattttcaattaacaatgtggcaattgaaggca

SEQ ID NO: 550207 - DNA, 33 bp, Homo sapien
ttacctctcattaactcacctaccatactagac

SEQ ID NO: 550208 - DNA, 33 bp, Homo sapien
ttacctctcattaacttacctaccatactagac

SEQ ID NO: 550209 - DNA, 33 bp, Homo sapien
tggaaaatgctgagtacacgggctgaacccggg

SEQ ID NO: 550210 - DNA, 33 bp, Homo sapien
tggaaaatgctgagtatacgggctgaacccggg

SEQ ID NO: 550211 - DNA, 33 bp, Homo sapien
atgattaagcacaataggactataaaatggaaa

SEQ ID NO: 550212 - DNA, 33 bp, Homo sapien
atgattaagcacaatatgactataaaatggaaa

SEQ ID NO: 550213 - DNA, 33 bp, Homo sapien
ggggatccaggctgacaaacttcctggacccta

SEQ ID NO: 550214 - DNA, 33 bp, Homo sapien
ggggatccaggctgacgaacttcctggacccta

SEQ ID NO: 550215 - DNA, 33 bp, Homo sapien
gaatgttttatggacacgtcgagttaggaaaaa

SEQ ID NO: 550216 - DNA, 33 bp, Homo sapien
gaatgttttatggacatgtcgagttaggaaaaa

SEQ ID NO: 550217 - DNA, 33 bp, Homo sapien
gctataggggaaatcaggttgcattaggttcct

SEQ ID NO: 550218 - DNA, 33 bp, Homo sapien
gctataggggaaatcatgttgcattaggttcct

SEQ ID NO: 550219 - DNA, 33 bp, Homo sapien
taactgatgaatgaaaaggaactaagagaagga

SEQ ID NO: 550220 - DNA, 33 bp, Homo sapien
taactgatgaatgaaagggaactaagagaagga

SEQ ID NO: 550221 - DNA, 33 bp, Homo sapien
ataactttataggcaaccagctaggtatgctct

SEQ ID NO: 550222 - DNA, 33 bp, Homo sapien
ataactttataggcaatcagctaggtatgctct

SEQ ID NO: 550223 - DNA, 33 bp, Homo sapien; identical to SEQ ID NO: 550221

SEQ ID NO: 550224 - DNA, 33 bp, Homo sapien; identical to SEQ ID NO: 550222

SEQ ID NO: 550225 - DNA, 33 bp, Homo sapien
gcatttgctgcacttacgttctagttcattaaa

SEQ ID NO: 550226 - DNA, 33 bp, Homo sapien
gcatttgctgcacttatgttctagttcattaaa

SEQ ID NO: 550227 - DNA, 33 bp, Homo sapien; identical to SEQ ID NO: 550225

SEQ ID NO: 550228 - DNA, 33 bp, Homo sapien; identical to SEQ ID NO: 550226

SEQ ID NO: 550229 - DNA, 33 bp, Homo sapien
gttgcaaaagtacatcacaggagtatttgaggt

SEQ ID NO: 550230 - DNA, 33 bp, Homo sapien
gttgcaaaagtacatcgcaggagtatttgaggt

SEQ ID NO: 550231 - DNA, 33 bp, Homo sapien
ctgaatgtgggggatacaatagtgagcgaacct

SEQ ID NO: 550232 - DNA, 33 bp, Homo sapien
ctgaatgtgggggatataatagtgagcgaacct

SEQ ID NO: 550233 - DNA, 33 bp, Homo sapien
tatttctgcacatctcaatactaaagtctaaga

SEQ ID NO: 550234 - DNA, 33 bp, Homo sapien
tatttctgcacatctcgatactaaagtctaaga

SEQ ID NO: 550235 - DNA, 33 bp, Homo sapien; identical to SEQ ID NO: 550233

SEQ ID NO: 550236 - DNA, 33 bp, Homo sapien; identical to SEQ ID NO: 550234

SEQ ID NO: 550237 - DNA, 33 bp, Homo sapien
tgtattatcatgaccagaagtatttttcacagc

SEQ ID NO: 550238 - DNA, 33 bp, Homo sapien
tgtattatcatgaccataagtatttttcacagc

SEQ ID NO: 550239 - DNA, 33 bp, Homo sapien
atgaaaaatcaaaataacaagtagacagtcaca

SEQ ID NO: 550240 - DNA, 33 bp, Homo sapien
atgaaaaatcaaaatagcaagtagacagtcaca

SEQ ID NO: 550241 - DNA, 33 bp, Homo sapien; identical to SEQ ID NO: 550239

SEQ ID NO: 550242 - DNA, 33 bp, Homo sapien; identical to SEQ ID NO: 550240

SEQ ID NO: 550243 - DNA, 33 bp, Homo sapien
agaaaatccagataaaatatcaataaggaagca

SEQ ID NO: 550244 - DNA, 33 bp, Homo sapien
agaaaatccagataaagtatcaataaggaagca

SEQ ID NO: 550245 - DNA, 33 bp, Homo sapien
gtaagcaagactttgcaaacttgagttgtagaa

SEQ ID NO: 550246 - DNA, 33 bp, Homo sapien
gtaagcaagactttgccaacttgagttgtagaa

SEQ ID NO: 550247 - DNA, 33 bp, Homo sapien
cttgcttactactccaacatctatcctctcagt

SEQ ID NO: 550248 - DNA, 33 bp, Homo sapien
cttgcttactactccaccatctatcctctcagt

SEQ ID NO: 550249 - DNA, 33 bp, Homo sapien
tgaggggagaaactgagcatggtgagatgctgg

SEQ ID NO: 550250 - DNA, 33 bp, Homo sapien
tgaggggagaaactgatcatggtgagatgctgg

SEQ ID NO: 550251 - DNA, 33 bp, Homo sapien
aaaatcaatactagtaacacttactttggcaat

SEQ ID NO: 550252 - DNA, 33 bp, Homo sapien
aaaatcaatactagtagcacttactttggcaat

SEQ ID NO: 550253 - DNA, 33 bp, Homo sapien; identical to SEQ ID NO: 550251

SEQ ID NO: 550254 - DNA, 33 bp, Homo sapien; identical to SEQ ID NO: 550252

SEQ ID NO: 550255 - DNA, 33 bp, Homo sapien
tgcagaagaaaggcacagaactaggtgattgct

SEQ ID NO: 550256 - DNA, 33 bp, Homo sapien
tgcagaagaaaggcacggaactaggtgattgct

SEQ ID NO: 550257 - DNA, 33 bp, Homo sapien
gcaaacactttggaaaacaaattttggactgct

SEQ ID NO: 550258 - DNA, 33 bp, Homo sapien
gcaaacactttggaaagcaaattttggactgct

SEQ ID NO: 550259 - DNA, 33 bp, Homo sapien
acaagtctctaggaaaagcaaacatttccccca

SEQ ID NO: 550260 - DNA, 33 bp, Homo sapien
acaagtctctaggaaacgcaaacatttccccca

SEQ ID NO: 550261 - DNA, 33 bp, Homo sapien; identical to SEQ ID NO: 550259

SEQ ID NO: 550262 - DNA, 33 bp, Homo sapien; identical to SEQ ID NO: 550260

SEQ ID NO: 550263 - DNA, 33 bp, Homo sapien
agcaaggtagacagtacgggatcagaacctgat

SEQ ID NO: 550264 - DNA, 33 bp, Homo sapien
agcaaggtagacagtatgggatcagaacctgat

SEQ ID NO: 550265 - DNA, 33 bp, Homo sapien
atgaagggcacacgtaagaggaatctcaagatg

SEQ ID NO: 550266 - DNA, 33 bp, Homo sapien
atgaagggcacacgtaggaggaatctcaagatg

SEQ ID NO: 550267 - DNA, 33 bp, Homo sapien
cgagcctgtttctgaaaacaaacatgatctact

SEQ ID NO: 550268 - DNA, 33 bp, Homo sapien
cgagcctgtttctgaagacaaacatgatctact

SEQ ID NO: 550269 - DNA, 33 bp, Homo sapien
ttttctatccctggaacgtctcagtgtcgtctg

SEQ ID NO: 550270 - DNA, 33 bp, Homo sapien
ttttctatccctggaatgtctcagtgtcgtctg

SEQ ID NO: 550271 - DNA, 33 bp, Homo sapien
gtcacaaaaggatgtaggtaagagaagtgggaa

SEQ ID NO: 550272 - DNA, 33 bp, Homo sapien
gtcacaaaaggatgtatgtaagagaagtgggaa

SEQ ID NO: 550273 - DNA, 33 bp, Homo sapien
tcttgttccctctttcaattccaccttcatctg

SEQ ID NO: 550274 - DNA, 33 bp, Homo sapien
tcttgttccctctttcgattccaccttcatctg

SEQ ID NO: 550275 - DNA, 33 bp, Homo sapien
cagatataattcagtcaaggatcttgagatgag

SEQ ID NO: 550276 - DNA, 33 bp, Homo sapien
cagatataattcagtcgaggatcttgagatgag

SEQ ID NO: 550277 - DNA, 33 bp, Homo sapien
ttattctgcagtatgaagaagccaacctattct

SEQ ID NO: 550278 - DNA, 33 bp, Homo sapien
ttattctgcagtatgaggaagccaacctattct

SEQ ID NO: 550279 - DNA, 33 bp, Homo sapien
tcctcccacaggctggaacacttttcagagtgg

SEQ ID NO: 550280 - DNA, 33 bp, Homo sapien
tcctcccacaggctgggacacttttcagagtgg

SEQ ID NO: 550281 - DNA, 33 bp, Homo sapien
aatgaccctgtttccaaacaaaacaacattctg

SEQ ID NO: 550282 - DNA, 33 bp, Homo sapien
aatgaccctgtttccagacaaaacaacattctg

SEQ ID NO: 550283 - DNA, 33 bp, Homo sapien
cctcctctcagtttaaccagtcacatctgcaat

SEQ ID NO: 550284 - DNA, 33 bp, Homo sapien
cctcctctcagtttaagcagtcacatctgcaat

SEQ ID NO: 550285 - DNA, 33 bp, Homo sapien
gctaaattgtgtcacacagaaacataagtatca

SEQ ID NO: 550286 - DNA, 33 bp, Homo sapien
gctaaattgtgtcacatagaaacataagtatca

SEQ ID NO: 550287 - DNA, 33 bp, Homo sapien
cttggaagtcacaatgcatttttcacaaaacag

SEQ ID NO: 550288 - DNA, 33 bp, Homo sapien
cttggaagtcacaatgtatttttcacaaaacag

SEQ ID NO: 550289 - DNA, 33 bp, Homo sapien
agcagactttgcactaacgggtctctaattgcc

SEQ ID NO: 550290 - DNA, 33 bp, Homo sapien
agcagactttgcactatcgggtctctaattgcc

SEQ ID NO: 550291 - DNA, 33 bp, Homo sapien
ccttcagaaacccaaacaaagacagtggcctaa

SEQ ID NO: 550292 - DNA, 33 bp, Homo sapien
ccttcagaaacccaaataaagacagtggcctaa

SEQ ID NO: 550293 - DNA, 33 bp, Homo sapien
cactttgaattggtaacccccactacttcagaa

SEQ ID NO: 550294 - DNA, 33 bp, Homo sapien
cactttgaattggtaatccccactacttcagaa

SEQ ID NO: 550295 - DNA, 33 bp, Homo sapien
gcagaatctcctatcacagtggagcaaaagaaa

SEQ ID NO: 550296 - DNA, 33 bp, Homo sapien
gcagaatctcctatcatagtggagcaaaagaaa

SEQ ID NO: 550297 - DNA, 33 bp, Homo sapien
cagcgggagggaaagagaacggattgaaagcca

SEQ ID NO: 550298 - DNA, 33 bp, Homo sapien
cagcgggagggaaagataacggattgaaagcca

SEQ ID NO: 550299 - DNA, 33 bp, Homo sapien
gcggacagaaaatccaactcggtcacaagaaca

SEQ ID NO: 550300 - DNA, 33 bp, Homo sapien
gcggacagaaaatccacctcggtcacaagaaca

SEQ ID NO: 550301 - DNA, 33 bp, Homo sapien
catgcatttccttttgcagcaggcatcctgctc

SEQ ID NO: 550302 - DNA, 33 bp, Homo sapien
catgcatttccttttgtagcaggcatcctgctc

SEQ ID NO: 550303 - DNA, 33 bp, Homo sapien
cttttgatgccaccaaataaaggagcatgaact

SEQ ID NO: 550304 - DNA, 33 bp, Homo sapien
cttttgatgccaccaagtaaaggagcatgaact

SEQ ID NO: 550305 - DNA, 33 bp, Homo sapien
cagccccatgcccgccaaactatttttgaaaaa

SEQ ID NO: 550306 - DNA, 33 bp, Homo sapien
cagccccatgcccgccgaactatttttgaaaaa

SEQ ID NO: 550307 - DNA, 33 bp, Homo sapien
tactcttccttcaacactgactttctggatgac

SEQ ID NO: 550308 - DNA, 33 bp, Homo sapien
tactcttccttcaacattgactttctggatgac

SEQ ID NO: 550309 - DNA, 33 bp, Homo sapien
gagtttattgtagttgaaggaaagtcctacctc

SEQ ID NO: 550310 - DNA, 33 bp, Homo sapien
gagtttattgtagttggaggaaagtcctacctc

SEQ ID NO: 550311 - DNA, 33 bp, Homo sapien
gttgggttatttgccaatctctcactctgtact

SEQ ID NO: 550312 - DNA, 33 bp, Homo sapien
gttgggttatttgccagtctctcactctgtact

SEQ ID NO: 550313 - DNA, 33 bp, Homo sapien
tctgtcatcaatcataacaacatggttgatgtg

SEQ ID NO: 550314 - DNA, 33 bp, Homo sapien
tctgtcatcaatcatagcaacatggttgatgtg

SEQ ID NO: 550315 - DNA, 33 bp, Homo sapien
cacctctttggagagcaagggcaatgtcttcct

SEQ ID NO: 550316 - DNA, 33 bp, Homo sapien
cacctctttggagagcgagggcaatgtcttcct

SEQ ID NO: 550317 - DNA, 33 bp, Homo sapien
tttgagatttatctcacctcttttttcagctgt

SEQ ID NO: 550318 - DNA, 33 bp, Homo sapien
tttgagatttatctcatctcttttttcagctgt

SEQ ID NO: 550319 - DNA, 33 bp, Homo sapien
agtttcctgtgaaaatcagacctcgaccgtgca

SEQ ID NO: 550320 - DNA, 33 bp, Homo sapien
agtttcctgtgaaaatgagacctcgaccgtgca

SEQ ID NO: 550321 - DNA, 33 bp, Homo sapien
tctgctttaaagactcaaattgtggaaaggtgg

SEQ ID NO: 550322 - DNA, 33 bp, Homo sapien
tctgctttaaagactcgaattgtggaaaggtgg

SEQ ID NO: 550323 - DNA, 33 bp, Homo sapien
aaatatttgaaaacaaaaaaacatacctgatgt

SEQ ID NO: 550324 - DNA, 33 bp, Homo sapien
aaatatttgaaaacaagaaaacatacctgatgt

SEQ ID NO: 550325 - DNA, 33 bp, Homo sapien
aattaggtttacgtgacagaaggatatctaaat

SEQ ID NO: 550326 - DNA, 33 bp, Homo sapien
aattaggtttacgtgagagaaggatatctaaat

SEQ ID NO: 550327 - DNA, 33 bp, Homo sapien
atattgtttctctggacataaattaggtttacg

SEQ ID NO: 550328 - DNA, 33 bp, Homo sapien
atattgtttctctggatataaattaggtttacg

SEQ ID NO: 550329 - DNA, 33 bp, Homo sapien
tttatagtccaggaaaatctattgaaaaatatc

SEQ ID NO: 550330 - DNA, 33 bp, Homo sapien
tttatagtccaggaaagtctattgaaaaatatc

SEQ ID NO: 550331 - DNA, 33 bp, Homo sapien
agttaatttctgtttcacacaagttgttttaga

SEQ ID NO: 550332 - DNA, 33 bp, Homo sapien
agttaatttctgtttcgcacaagttgttttaga

SEQ ID NO: 550333 - DNA, 33 bp, Homo sapien
gcaactgagggatatacgaagtaggtgcattcc

SEQ ID NO: 550334 - DNA, 33 bp, Homo sapien
gcaactgagggatataggaagtaggtgcattcc

SEQ ID NO: 550335 - DNA, 33 bp, Homo sapien
ctctcctcttgtctgcaatgatctttcccaact

SEQ ID NO: 550336 - DNA, 33 bp, Homo sapien
ctctcctcttgtctgcgatgatctttcccaact

SEQ ID NO: 550337 - DNA, 33 bp, Homo sapien
ttcaagtcctattgcacgaattgtatcagtttc

SEQ ID NO: 550338 - DNA, 33 bp, Homo sapien
ttcaagtcctattgcatgaattgtatcagtttc

SEQ ID NO: 550339 - DNA, 33 bp, Homo sapien
ttaaattctctattagccattgaattcagaaat

SEQ ID NO: 550340 - DNA, 33 bp, Homo sapien
ttaaattctctattaggcattgaattcagaaat

SEQ ID NO: 550341 - DNA, 33 bp, Homo sapien
gaccaccctagttgaaactgccaacatctttcc

SEQ ID NO: 550342 - DNA, 33 bp, Homo sapien
gaccaccctagttgaagctgccaacatctttcc

SEQ ID NO: 550343 - DNA, 33 bp, Homo sapien
gagtcttcaagcctaaacaaggcacatgggccg

SEQ ID NO: 550344 - DNA, 33 bp, Homo sapien
gagtcttcaagcctaaccaaggcacatgggccg

SEQ ID NO: 550345 - DNA, 33 bp, Homo sapien
tgtggctatcaaagaaagatcaacgagctgcaa

SEQ ID NO: 550346 - DNA, 33 bp, Homo sapien
tgtggctatcaaagaaggatcaacgagctgcaa

SEQ ID NO: 550347 - DNA, 33 bp, Homo sapien
accttgtgttcactacagaaccttccctacctt

SEQ ID NO: 550348 - DNA, 33 bp, Homo sapien
accttgtgttcactacggaaccttccctacctt

SEQ ID NO: 550349 - DNA, 33 bp, Homo sapien
gcatctctgggaagcactaggtaagtaaaacct

SEQ ID NO: 550350 - DNA, 33 bp, Homo sapien
gcatctctgggaagcattaggtaagtaaaacct

SEQ ID NO: 550351 - DNA, 33 bp, Homo sapien
cagtgaatccagaacacagaaacctggcgagct

SEQ ID NO: 550352 - DNA, 33 bp, Homo sapien
cagtgaatccagaacatagaaacctggcgagct

SEQ ID NO: 550353 - DNA, 33 bp, Homo sapien
tggtgagccctgaagaatcaaggattatgatca

SEQ ID NO: 550354 - DNA, 33 bp, Homo sapien
tggtgagccctgaagagtcaaggattatgatca

SEQ ID NO: 550355 - DNA, 33 bp, Homo sapien
acagtagcaagcatgacaacgcttctgggaaaa

SEQ ID NO: 550356 - DNA, 33 bp, Homo sapien
acagtagcaagcatgagaacgcttctgggaaaa

SEQ ID NO: 550357 - DNA, 33 bp, Homo sapien
gaactcacacaaataccataaagacgatgatgg

SEQ ID NO: 550358 - DNA, 33 bp, Homo sapien
gaactcacacaaatacgataaagacgatgatgg

SEQ ID NO: 550359 - DNA, 33 bp, Homo sapien
taaaatactacctcaagtcttgataaaacaaag

SEQ ID NO: 550360 - DNA, 33 bp, Homo sapien
taaaatactacctcaattcttgataaaacaaag

SEQ ID NO: 550361 - DNA, 33 bp, Homo sapien
cttctgttctcacgccacgccacaacaatcaac

SEQ ID NO: 550362 - DNA, 33 bp, Homo sapien
cttctgttctcacgccgcgccacaacaatcaac

SEQ ID NO: 550363 - DNA, 33 bp, Homo sapien
tgtgtaataaagtcaacgtggatacttcccctc

SEQ ID NO: 550364 - DNA, 33 bp, Homo sapien
tgtgtaataaagtcaatgtggatacttcccctc

SEQ ID NO: 550365 - DNA, 33 bp, Homo sapien
agcttggtcctttctcgccggcagaagtgagga

SEQ ID NO: 550366 - DNA, 33 bp, Homo sapien
agcttggtcctttctctccggcagaagtgagga

SEQ ID NO: 550367 - DNA, 33 bp, Homo sapien
tggaaagaaaatccacacgtatggctggcagga

SEQ ID NO: 550368 - DNA, 33 bp, Homo sapien
tggaaagaaaatccacccgtatggctggcagga

SEQ ID NO: 550369 - DNA, 33 bp, Homo sapien
gaaaaggtgcttttgaaggaaaaggagtgtaag

SEQ ID NO: 550370 - DNA, 33 bp, Homo sapien
gaaaaggtgcttttgagggaaaaggagtgtaag

SEQ ID NO: 550371 - DNA, 33 bp, Homo sapien
cacagaatatgtctaaccccaaaacagagcaca

SEQ ID NO: 550372 - DNA, 33 bp, Homo sapien
cacagaatatgtctaatcccaaaacagagcaca

SEQ ID NO: 550373 - DNA, 33 bp, Homo sapien
ctctagttctttcctaagtgtaggttcttatct

SEQ ID NO: 550374 - DNA, 33 bp, Homo sapien
ctctagttctttcctaggtgtaggttcttatct

SEQ ID NO: 550375 - DNA, 33 bp, Homo sapien
tatggggtgtctgaaacaaagttttccttaaat

SEQ ID NO: 550376 - DNA, 33 bp, Homo sapien
tatggggtgtctgaaataaagttttccttaaat

SEQ ID NO: 550377 - DNA, 33 bp, Homo sapien
caaaggctaagcatgaaggtcttgtctaccagt

SEQ ID NO: 550378 - DNA, 33 bp, Homo sapien
caaaggctaagcatgagggtcttgtctaccagt

SEQ ID NO: 550379 - DNA, 33 bp, Homo sapien
aatggcaggtgatttgaatggtggtaggagcgt

SEQ ID NO: 550380 - DNA, 33 bp, Homo sapien
aatggcaggtgatttggatggtggtaggagcgt

SEQ ID NO: 550381 - DNA, 33 bp, Homo sapien
tgcacctttagagtccaacagctttccttcgca

SEQ ID NO: 550382 - DNA, 33 bp, Homo sapien
tgcacctttagagtcccacagctttccttcgca

SEQ ID NO: 550383 - DNA, 33 bp, Homo sapien
ggatatggaccgacccaactgcacctttagagt

SEQ ID NO: 550384 - DNA, 33 bp, Homo sapien
ggatatggaccgaccccactgcacctttagagt

SEQ ID NO: 550385 - DNA, 33 bp, Homo sapien
tgacaccaaaatcgaaacatggatatgctcagc

SEQ ID NO: 550386 - DNA, 33 bp, Homo sapien
tgacaccaaaatcgaaccatggatatgctcagc

SEQ ID NO: 550387 - DNA, 33 bp, Homo sapien
gaacttgcacagagaaaccaaattgtggatggt

SEQ ID NO: 550388 - DNA, 33 bp, Homo sapien
gaacttgcacagagaagccaaattgtggatggt

SEQ ID NO: 550389 - DNA, 33 bp, Homo sapien
gacctatgcagttgaaacctccggagatgggtc

SEQ ID NO: 550390 - DNA, 33 bp, Homo sapien
gacctatgcagttgaagcctccggagatgggtc

SEQ ID NO: 550391 - DNA, 33 bp, Homo sapien
ctaaaaactggctaaaccaacagtggtcaagac

SEQ ID NO: 550392 - DNA, 33 bp, Homo sapien
ctaaaaactggctaaagcaacagtggtcaagac

SEQ ID NO: 550393 - DNA, 33 bp, Homo sapien
ttttaaagaatctatcaacatggaaatggtatt

SEQ ID NO: 550394 - DNA, 33 bp, Homo sapien
ttttaaagaatctatcgacatggaaatggtatt

SEQ ID NO: 550395 - DNA, 33 bp, Homo sapien
tgggggattgatctgacgggcaagttgcagggg

SEQ ID NO: 550396 - DNA, 33 bp, Homo sapien
tgggggattgatctgatgggcaagttgcagggg

SEQ ID NO: 550397 - DNA, 33 bp, Homo sapien
tgtcagttgttccaaactcagggtgcaatttcc

SEQ ID NO: 550398 - DNA, 33 bp, Homo sapien
tgtcagttgttccaaattcagggtgcaatttcc

SEQ ID NO: 550399 - DNA, 33 bp, Homo sapien
accagcaacccagggcaaagcagaagaggtatt

SEQ ID NO: 550400 - DNA, 33 bp, Homo sapien
accagcaacccagggcgaagcagaagaggtatt

SEQ ID NO: 550401 - DNA, 33 bp, Homo sapien
tgtcgaactgtgataaacatctagactagaaga

SEQ ID NO: 550402 - DNA, 33 bp, Homo sapien
tgtcgaactgtgataagcatctagactagaaga

SEQ ID NO: 550403 - DNA, 33 bp, Homo sapien
gcttctcagttgccaacggaaatttgaaaaatg

SEQ ID NO: 550404 - DNA, 33 bp, Homo sapien
gcttctcagttgccaatggaaatttgaaaaatg

SEQ ID NO: 550405 - DNA, 33 bp, Homo sapien
attcattatagcaatagctaagtctccttctta

SEQ ID NO: 550406 - DNA, 33 bp, Homo sapien
attcattatagcaatatctaagtctccttctta

SEQ ID NO: 550407 - DNA, 33 bp, Homo sapien
aggtaggattcatgccacaagtcataagaagga

SEQ ID NO: 550408 - DNA, 33 bp, Homo sapien
aggtaggattcatgccgcaagtcataagaagga

SEQ ID NO: 550409 - DNA, 33 bp, Homo sapien
agtgagaccttgactccatcagaatagggacag

SEQ ID NO: 550410 - DNA, 33 bp, Homo sapien
agtgagaccttgactctatcagaatagggacag

SEQ ID NO: 550411 - DNA, 33 bp, Homo sapien
aggttcctgccttgaaatgttctccttcatggt

SEQ ID NO: 550412 - DNA, 33 bp, Homo sapien
aggttcctgccttgaattgttctccttcatggt

SEQ ID NO: 550413 - DNA, 33 bp, Homo sapien
agtgttcttgataaccaaagtagcattcttcac

SEQ ID NO: 550414 - DNA, 33 bp, Homo sapien
agtgttcttgataacccaagtagcattcttcac

SEQ ID NO: 550415 - DNA, 33 bp, Homo sapien
ccgtgccatactggaaatgtggaaaaacatcta

SEQ ID NO: 550416 - DNA, 33 bp, Homo sapien
ccgtgccatactggaattgtggaaaaacatcta

SEQ ID NO: 550417 - DNA, 33 bp, Homo sapien
gccccctgaagatggcaagaggcacccagtgac

SEQ ID NO: 550418 - DNA, 33 bp, Homo sapien
gccccctgaagatggcgagaggcacccagtgac

SEQ ID NO: 550419 - DNA, 33 bp, Homo sapien
caagtattcgctctgcaatagttcactaagctg

SEQ ID NO: 550420 - DNA, 33 bp, Homo sapien
caagtattcgctctgcgatagttcactaagctg

SEQ ID NO: 550421 - DNA, 33 bp, Homo sapien
gaaaatatgagacatcaaagctatccaaccccc

SEQ ID NO: 550422 - DNA, 33 bp, Homo sapien
gaaaatatgagacatcgaagctatccaaccccc

SEQ ID NO: 550423 - DNA, 33 bp, Homo sapien
gtgaccacatgacacactagggctggtaggact

SEQ ID NO: 550424 - DNA, 33 bp, Homo sapien
gtgaccacatgacacagtagggctggtaggact

SEQ ID NO: 550425 - DNA, 33 bp, Homo sapien
ttagaaaaatctctcaaatctatccctttttct

SEQ ID NO: 550426 - DNA, 33 bp, Homo sapien
ttagaaaaatctctcagatctatccctttttct

SEQ ID NO: 550427 - DNA, 33 bp, Homo sapien
cctgcaggtcccaccagattgagacagtgagcc

SEQ ID NO: 550428 - DNA, 33 bp, Homo sapien
cctgcaggtcccaccatattgagacagtgagcc

SEQ ID NO: 550429 - DNA, 33 bp, Homo sapien
aaggaacatgaaggaaaagcccacataacccct

SEQ ID NO: 550430 - DNA, 33 bp, Homo sapien
aaggaacatgaaggaagagcccacataacccct

SEQ ID NO: 550431 - DNA, 33 bp, Homo sapien
aagcggataaaagacactcaggtttagaccctt

SEQ ID NO: 550432 - DNA, 33 bp, Homo sapien
aagcggataaaagacattcaggtttagaccctt

SEQ ID NO: 550433 - DNA, 33 bp, Homo sapien
acctcgtaaaatgttcaacactctcataagtgg

SEQ ID NO: 550434 - DNA, 33 bp, Homo sapien
acctcgtaaaatgttcgacactctcataagtgg

SEQ ID NO: 550435 - DNA, 33 bp, Homo sapien
gaatttttctgttggcactcaataggttacaaa

SEQ ID NO: 550436 - DNA, 33 bp, Homo sapien
gaatttttctgttggcgctcaataggttacaaa

SEQ ID NO: 550437 - DNA, 33 bp, Homo sapien
gagctgaaagacagaacgtgttccactggatct

SEQ ID NO: 550438 - DNA, 33 bp, Homo sapien
gagctgaaagacagaatgtgttccactggatct

SEQ ID NO: 550439 - DNA, 33 bp, Homo sapien
tctgccatattctccaatgcgacctttgcatct

SEQ ID NO: 550440 - DNA, 33 bp, Homo sapien
tctgccatattctccagtgcgacctttgcatct

SEQ ID NO: 550441 - DNA, 33 bp, Homo sapien
acataatatggcctcaataaatgatggctcttc

SEQ ID NO: 550442 - DNA, 33 bp, Homo sapien
acataatatggcctcagtaaatgatggctcttc

SEQ ID NO: 550443 - DNA, 33 bp, Homo sapien
accttccttctcataccaccattctctcctgct

SEQ ID NO: 550444 - DNA, 33 bp, Homo sapien
accttccttctcatactaccattctctcctgct

SEQ ID NO: 550445 - DNA, 33 bp, Homo sapien
aacagggagaaattgaggatgaggattaacttg

SEQ ID NO: 550446 - DNA, 33 bp, Homo sapien
aacagggagaaattgatgatgaggattaacttg

SEQ ID NO: 550447 - DNA, 33 bp, Homo sapien
gtggtgggcagaataacggtcccccaaatgctc

SEQ ID NO: 550448 - DNA, 33 bp, Homo sapien
gtggtgggcagaataatggtcccccaaatgctc

SEQ ID NO: 550449 - DNA, 33 bp, Homo sapien
taaccatcacttagtaacaattaagcctgtcgc

SEQ ID NO: 550450 - DNA, 33 bp, Homo sapien
taaccatcacttagtagcaattaagcctgtcgc

SEQ ID NO: 550451 - DNA, 33 bp, Homo sapien
ggcttcctgcttgaaaaccaattcttatatgaa

SEQ ID NO: 550452 - DNA, 33 bp, Homo sapien
ggcttcctgcttgaaacccaattcttatatgaa

SEQ ID NO: 550453 - DNA, 33 bp, Homo sapien
actttcagataggtaaatgatagacagaccagt

SEQ ID NO: 550454 - DNA, 33 bp, Homo sapien
actttcagataggtaagtgatagacagaccagt

SEQ ID NO: 550455 - DNA, 33 bp, Homo sapien
tagcagactgttaacacgttttgaaaaattaag

SEQ ID NO: 550456 - DNA, 33 bp, Homo sapien
tagcagactgttaacatgttttgaaaaattaag

SEQ ID NO: 550457 - DNA, 33 bp, Homo sapien
tggggatttctacataggaaggttgcagggaca

SEQ ID NO: 550458 - DNA, 33 bp, Homo sapien
tggggatttctacatatgaaggttgcagggaca

SEQ ID NO: 550459 - DNA, 33 bp, Homo sapien
tgctggtgctattgcaagcaaatgaaatgtgtc

SEQ ID NO: 550460 - DNA, 33 bp, Homo sapien
tgctggtgctattgcaggcaaatgaaatgtgtc

SEQ ID NO: 550461 - DNA, 33 bp, Homo sapien
tgtctgatcacgtagacaacacaatttctttga

SEQ ID NO: 550462 - DNA, 33 bp, Homo sapien
tgtctgatcacgtagataacacaatttctttga

SEQ ID NO: 550463 - DNA, 33 bp, Homo sapien
agcacattagtagcgcaccccacacctgcaagc

SEQ ID NO: 550464 - DNA, 33 bp, Homo sapien
agcacattagtagcgccccccacacctgcaagc

SEQ ID NO: 550465 - DNA, 33 bp, Homo sapien
tacattgggcagtgccacgctatagccaactgt

SEQ ID NO: 550466 - DNA, 33 bp, Homo sapien
tacattgggcagtgccgcgctatagccaactgt

SEQ ID NO: 550467 - DNA, 33 bp, Homo sapien
cctaaattaggaaaaccacatcttggctttcat

SEQ ID NO: 550468 - DNA, 33 bp, Homo sapien
cctaaattaggaaaactacatcttggctttcat

SEQ ID NO: 550469 - DNA, 33 bp, Homo sapien
gagggtgctatttaacaaacaccctctttccag

SEQ ID NO: 550470 - DNA, 33 bp, Homo sapien
gagggtgctatttaaccaacaccctctttccag

SEQ ID NO: 550471 - DNA, 33 bp, Homo sapien
taggttgtagaacttacgttaaatgttccctct

SEQ ID NO: 550472 - DNA, 33 bp, Homo sapien
taggttgtagaacttatgttaaatgttccctct

SEQ ID NO: 550473 - DNA, 33 bp, Homo sapien
gatcctggttttggaaagcttaaattagacaca

SEQ ID NO: 550474 - DNA, 33 bp, Homo sapien
gatcctggttttggaacgcttaaattagacaca

SEQ ID NO: 550475 - DNA, 33 bp, Homo sapien
agtacaccctatgttcaatgtgttatttcagca

SEQ ID NO: 550476 - DNA, 33 bp, Homo sapien
agtacaccctatgttcgatgtgttatttcagca

SEQ ID NO: 550477 - DNA, 33 bp, Homo sapien
agacttcctccaaaacacactgaattccatgca

SEQ ID NO: 550478 - DNA, 33 bp, Homo sapien
agacttcctccaaaacgcactgaattccatgca

SEQ ID NO: 550479 - DNA, 33 bp, Homo sapien
caggcctcattcttgaactttcccacattgtcc

SEQ ID NO: 550480 - DNA, 33 bp, Homo sapien
caggcctcattcttgatctttcccacattgtcc

SEQ ID NO: 550481 - DNA, 33 bp, Homo sapien
gcaaaattaaacacaagataactggaaaatatt

SEQ ID NO: 550482 - DNA, 33 bp, Homo sapien
gcaaaattaaacacaatataactggaaaatatt

SEQ ID NO: 550483 - DNA, 33 bp, Homo sapien
gataggaataaacttaactccatcttatcagca

SEQ ID NO: 550484 - DNA, 33 bp, Homo sapien
gataggaataaacttagctccatcttatcagca

SEQ ID NO: 550485 - DNA, 33 bp, Homo sapien
taagttgaattgggacccaagaagtagaggaac

SEQ ID NO: 550486 - DNA, 33 bp, Homo sapien
taagttgaattgggactcaagaagtagaggaac

SEQ ID NO: 550487 - DNA, 33 bp, Homo sapien
tgactgttttgaccccactgtactccagtttag

SEQ ID NO: 550488 - DNA, 33 bp, Homo sapien
tgactgttttgaccccgctgtactccagtttag

SEQ ID NO: 550489 - DNA, 33 bp, Homo sapien
ggcttaagtggcggtacctcctgtttgcttctg

SEQ ID NO: 550490 - DNA, 33 bp, Homo sapien
ggcttaagtggcggtagctcctgtttgcttctg

SEQ ID NO: 550491 - DNA, 33 bp, Homo sapien
acattccaaatagtcaccaggtaaagcgctaaa

SEQ ID NO: 550492 - DNA, 33 bp, Homo sapien
acattccaaatagtcatcaggtaaagcgctaaa

SEQ ID NO: 550493 - DNA, 33 bp, Homo sapien
tcttctgtcatgccaaaattgggcaccctgagc

SEQ ID NO: 550494 - DNA, 33 bp, Homo sapien
tcttctgtcatgccaacattgggcaccctgagc

SEQ ID NO: 550495 - DNA, 33 bp, Homo sapien
tttcaacaagaacctgaatgaaggaagggccat

SEQ ID NO: 550496 - DNA, 33 bp, Homo sapien
tttcaacaagaacctggatgaaggaagggccat

SEQ ID NO: 550497 - DNA, 33 bp, Homo sapien
gaagaggcttccttagccataaacatatttctt

SEQ ID NO: 550498 - DNA, 33 bp, Homo sapien
gaagaggcttccttagtcataaacatatttctt

SEQ ID NO: 550499 - DNA, 33 bp, Homo sapien
tgcacagtcaatgaataaagtactgaacttcag

SEQ ID NO: 550500 - DNA, 33 bp, Homo sapien
tgcacagtcaatgaatgaagtactgaacttcag

SEQ ID NO: 550501 - DNA, 33 bp, Homo sapien
gtcagcggcatggtcaaagagagtgctttgggt

SEQ ID NO: 550502 - DNA, 33 bp, Homo sapien
gtcagcggcatggtcagagagagtgctttgggt

SEQ ID NO: 550503 - DNA, 33 bp, Homo sapien
agctgccagcaatcacaaatctgttttcagtct

SEQ ID NO: 550504 - DNA, 33 bp, Homo sapien
agctgccagcaatcacgaatctgttttcagtct

SEQ ID NO: 550505 - DNA, 33 bp, Homo sapien
aatggatcgttgcagacgtcgaatgttggggat

SEQ ID NO: 550506 - DNA, 33 bp, Homo sapien
aatggatcgttgcagatgtcgaatgttggggat

SEQ ID NO: 550507 - DNA, 33 bp, Homo sapien
catgaaatccagaagaacatcacaaaggtgccc

SEQ ID NO: 550508 - DNA, 33 bp, Homo sapien
catgaaatccagaagaccatcacaaaggtgccc

SEQ ID NO: 550509 - DNA, 33 bp, Homo sapien
atatcagtagctattaaacgttctgttccttat

SEQ ID NO: 550510 - DNA, 33 bp, Homo sapien
atatcagtagctattacacgttctgttccttat

SEQ ID NO: 550511 - DNA, 33 bp, Homo sapien
caggaaacaactaagcacaagaagacagctccg

SEQ ID NO: 550512 - DNA, 33 bp, Homo sapien
caggaaacaactaagcccaagaagacagctccg

SEQ ID NO: 550513 - DNA, 33 bp, Homo sapien
gacaagaaactcaaccacatagtagcccagtgg

SEQ ID NO: 550514 - DNA, 33 bp, Homo sapien
gacaagaaactcaaccgcatagtagcccagtgg

SEQ ID NO: 550515 - DNA, 33 bp, Homo sapien
ggtaacccatataacaagtccctgaatctttat

SEQ ID NO: 550516 - DNA, 33 bp, Homo sapien
ggtaacccatataacaggtccctgaatctttat

SEQ ID NO: 550517 - DNA, 33 bp, Homo sapien
tgttaggaaatgcttacgcatagcttgtagcac

SEQ ID NO: 550518 - DNA, 33 bp, Homo sapien
tgttaggaaatgcttatgcatagcttgtagcac

SEQ ID NO: 550519 - DNA, 33 bp, Homo sapien
aatgtgaattgctttgaaacttcacttcatcct

SEQ ID NO: 550520 - DNA, 33 bp, Homo sapien
aatgtgaattgctttggaacttcacttcatcct

SEQ ID NO: 550521 - DNA, 33 bp, Homo sapien
ctagagtattgaaaccccagaaaattatgtaac

SEQ ID NO: 550522 - DNA, 33 bp, Homo sapien
ctagagtattgaaaccgcagaaaattatgtaac

SEQ ID NO: 550523 - DNA, 33 bp, Homo sapien
tctctaatttttctcaggactgcctctttgatc

SEQ ID NO: 550524 - DNA, 33 bp, Homo sapien
tctctaatttttctcatgactgcctctttgatc

SEQ ID NO: 550525 - DNA, 33 bp, Homo sapien
ctcttgtgagttagcacagtatgtgttctttta

SEQ ID NO: 550526 - DNA, 33 bp, Homo sapien
ctcttgtgagttagcatagtatgtgttctttta

SEQ ID NO: 550527 - DNA, 33 bp, Homo sapien
ccactgaaccaagtaccggcccagccacagaat

SEQ ID NO: 550528 - DNA, 33 bp, Homo sapien
ccactgaaccaagtactggcccagccacagaat

SEQ ID NO: 550529 - DNA, 33 bp, Homo sapien
atgtccagttcgctgacgtccctcatggataca

SEQ ID NO: 550530 - DNA, 33 bp, Homo sapien
atgtccagttcgctgatgtccctcatggataca

SEQ ID NO: 550531 - DNA, 33 bp, Homo sapien
gttagcatttccaagacgtatttcacctgttcc

SEQ ID NO: 550532 - DNA, 33 bp, Homo sapien
gttagcatttccaagatgtatttcacctgttcc

SEQ ID NO: 550533 - DNA, 33 bp, Homo sapien
tcttggaaatgctaaccgtaggcaatggaaagt

SEQ ID NO: 550534 - DNA, 33 bp, Homo sapien
tcttggaaatgctaactgtaggcaatggaaagt

SEQ ID NO: 550535 - DNA, 33 bp, Homo sapien
agtcgacagttttacacaacattctgaatctta

SEQ ID NO: 550536 - DNA, 33 bp, Homo sapien
agtcgacagttttacagaacattctgaatctta

SEQ ID NO: 550537 - DNA, 33 bp, Homo sapien
ttgtattcaatttttacacatctgtttgttctt

SEQ ID NO: 550538 - DNA, 33 bp, Homo sapien
ttgtattcaatttttatacatctgtttgttctt

SEQ ID NO: 550539 - DNA, 33 bp, Homo sapien
ccttgacatcagcaggaaaagcttaatggagtc

SEQ ID NO: 550540 - DNA, 33 bp, Homo sapien
ccttgacatcagcagggaaagcttaatggagtc

SEQ ID NO: 550541 - DNA, 33 bp, Homo sapien
ttccctgctgcgctgaaaattgactttccctga

SEQ ID NO: 550542 - DNA, 33 bp, Homo sapien
ttccctgctgcgctgataattgactttccctga

SEQ ID NO: 550543 - DNA, 33 bp, Homo sapien
caagagcatcagcataacagaacattaaaatgg

SEQ ID NO: 550544 - DNA, 33 bp, Homo sapien
caagagcatcagcatagcagaacattaaaatgg

SEQ ID NO: 550545 - DNA, 33 bp, Homo sapien
acactgggatttcttacaggttgctccacaaag

SEQ ID NO: 550546 - DNA, 33 bp, Homo sapien
acactgggatttcttataggttgctccacaaag

SEQ ID NO: 550547 - DNA, 33 bp, Homo sapien
tctttattccattacaataatctactacctatt

SEQ ID NO: 550548 - DNA, 33 bp, Homo sapien
tctttattccattacactaatctactacctatt

SEQ ID NO: 550549 - DNA, 33 bp, Homo sapien
acattgcagtgacgaaatgtggttaaatctgct

SEQ ID NO: 550550 - DNA, 33 bp, Homo sapien
acattgcagtgacgaattgtggttaaatctgct

SEQ ID NO: 550551 - DNA, 33 bp, Homo sapien
gggagtgagaagttcaaagggttagtcttgcta

SEQ ID NO: 550552 - DNA, 33 bp, Homo sapien
gggagtgagaagttcagagggttagtcttgcta

SEQ ID NO: 550553 - DNA, 33 bp, Homo sapien
atgattggatccagagaataacgtgattgatga

SEQ ID NO: 550554 - DNA, 33 bp, Homo sapien
atgattggatccagagcataacgtgattgatga

SEQ ID NO: 550555 - DNA, 33 bp, Homo sapien
agtgagaaaatgatgacagcaaaagggatccca

SEQ ID NO: 550556 - DNA, 33 bp, Homo sapien
agtgagaaaatgatgatagcaaaagggatccca

SEQ ID NO: 550557 - DNA, 33 bp, Homo sapien
agacctttaagaacggaaagctggagaacagga

SEQ ID NO: 550558 - DNA, 33 bp, Homo sapien
agacctttaagaacgggaagctggagaacagga

SEQ ID NO: 550559 - DNA, 33 bp, Homo sapien
ctgccctacaggaatcaacaacagcttgaagtg

SEQ ID NO: 550560 - DNA, 33 bp, Homo sapien
ctgccctacaggaatcgacaacagcttgaagtg

SEQ ID NO: 550561 - DNA, 33 bp, Homo sapien
tattaggaagccaagcaacagtggaatgaatgt

SEQ ID NO: 550562 - DNA, 33 bp, Homo sapien
tattaggaagccaagcgacagtggaatgaatgt

SEQ ID NO: 550563 - DNA, 33 bp, Homo sapien
acaatacaggtttgaactgaatcgtctaaggaa

SEQ ID NO: 550564 - DNA, 33 bp, Homo sapien
acaatacaggtttgaattgaatcgtctaaggaa

SEQ ID NO: 550565 - DNA, 33 bp, Homo sapien
tagtgagcagatggatcaggactaattttgcaa

SEQ ID NO: 550566 - DNA, 33 bp, Homo sapien
tagtgagcagatggattaggactaattttgcaa

SEQ ID NO: 550567 - DNA, 33 bp, Homo sapien
ataatttggaaattcaagtcaacagaggatgag

SEQ ID NO: 550568 - DNA, 33 bp, Homo sapien
ataatttggaaattcatgtcaacagaggatgag

SEQ ID NO: 550569 - DNA, 33 bp, Homo sapien
cagctagaaaagaggactcagtgtagagccaca

SEQ ID NO: 550570 - DNA, 33 bp, Homo sapien
cagctagaaaagaggattcagtgtagagccaca

SEQ ID NO: 550571 - DNA, 33 bp, Homo sapien
actcaaatgtttcaaaactctgtgcacatccac

SEQ ID NO: 550572 - DNA, 33 bp, Homo sapien
actcaaatgtttcaaagctctgtgcacatccac

SEQ ID NO: 550573 - DNA, 33 bp, Homo sapien
cctatcttataataaactgttgaatatctcatg

SEQ ID NO: 550574 - DNA, 33 bp, Homo sapien
cctatcttataataaagtgttgaatatctcatg

SEQ ID NO: 550575 - DNA, 33 bp, Homo sapien
aatcaacacagctttacggcatttttaatattt

SEQ ID NO: 550576 - DNA, 33 bp, Homo sapien
aatcaacacagctttatggcatttttaatattt

SEQ ID NO: 550577 - DNA, 33 bp, Homo sapien
tatcaccacatcattacgccaccatgccacgat

SEQ ID NO: 550578 - DNA, 33 bp, Homo sapien
tatcaccacatcattatgccaccatgccacgat

SEQ ID NO: 550579 - DNA, 33 bp, Homo sapien
gcagaagagagaactacgtaagaagggtgctta

SEQ ID NO: 550580 - DNA, 33 bp, Homo sapien
gcagaagagagaactaggtaagaagggtgctta

SEQ ID NO: 550581 - DNA, 33 bp, Homo sapien
caagactttgaaacttcaagcccattcccatca

SEQ ID NO: 550582 - DNA, 33 bp, Homo sapien
caagactttgaaacttgaagcccattcccatca

SEQ ID NO: 550583 - DNA, 33 bp, Homo sapien
actgtcagtcggctaaggtaagcgtcctgagca

SEQ ID NO: 550584 - DNA, 33 bp, Homo sapien
actgtcagtcggctaatgtaagcgtcctgagca

SEQ ID NO: 550585 - DNA, 33 bp, Homo sapien
actgatgtgcagggaaaggcaccctcatactta

SEQ ID NO: 550586 - DNA, 33 bp, Homo sapien
actgatgtgcagggaagggcaccctcatactta

SEQ ID NO: 550587 - DNA, 33 bp, Homo sapien
tactcccctatgcagaacggttctccgagctct

SEQ ID NO: 550588 - DNA, 33 bp, Homo sapien
tactcccctatgcagatcggttctccgagctct

SEQ ID NO: 550589 - DNA, 33 bp, Homo sapien
gattcaatctgctctccactgacgtgttctgtt

SEQ ID NO: 550590 - DNA, 33 bp, Homo sapien
gattcaatctgctctctactgacgtgttctgtt

SEQ ID NO: 550591 - DNA, 33 bp, Homo sapien
atttctctcttagcacaggcattaattggatat

SEQ ID NO: 550592 - DNA, 33 bp, Homo sapien
atttctctcttagcaccggcattaattggatat

SEQ ID NO: 550593 - DNA, 33 bp, Homo sapien
actcctgccttcttatcaaagctgcaggccttg

SEQ ID NO: 550594 - DNA, 33 bp, Homo sapien
actcctgccttcttatgaaagctgcaggccttg

SEQ ID NO: 550595 - DNA, 33 bp, Homo sapien
ccctccactcctaccaacttctctttggctcca

SEQ ID NO: 550596 - DNA, 33 bp, Homo sapien
ccctccactcctaccaccttctctttggctcca

SEQ ID NO: 550597 - DNA, 33 bp, Homo sapien
tgagacatcatcatacaaagttgaacatgtatg

SEQ ID NO: 550598 - DNA, 33 bp, Homo sapien
tgagacatcatcataccaagttgaacatgtatg

SEQ ID NO: 550599 - DNA, 33 bp, Homo sapien
ttgtgccaagaaatacagatgttctcacagaat

SEQ ID NO: 550600 - DNA, 33 bp, Homo sapien
ttgtgccaagaaatacggatgttctcacagaat

SEQ ID NO: 550601 - DNA, 33 bp, Homo sapien
aaacgcagtttcacatcatggccaaaaccatct

SEQ ID NO: 550602 - DNA, 33 bp, Homo sapien
aaacgcagtttcacatgatggccaaaaccatct

SEQ ID NO: 550603 - DNA, 33 bp, Homo sapien
gctcccagtggaaccacgtgattggaaggagtt

SEQ ID NO: 550604 - DNA, 33 bp, Homo sapien
gctcccagtggaaccatgtgattggaaggagtt

SEQ ID NO: 550605 - DNA, 33 bp, Homo sapien
catgcacacataaaacaaacataagcagacaac

SEQ ID NO: 550606 - DNA, 33 bp, Homo sapien
catgcacacataaaaccaacataagcagacaac

SEQ ID NO: 550607 - DNA, 33 bp, Homo sapien
gtaactcaaaacaatacgagcagtttatgacaa

SEQ ID NO: 550608 - DNA, 33 bp, Homo sapien
gtaactcaaaacaatatgagcagtttatgacaa

SEQ ID NO: 550609 - DNA, 33 bp, Homo sapien; identical to SEQ ID NO: 550607

SEQ ID NO: 550610 - DNA, 33 bp, Homo sapien; identical to SEQ ID NO: 550608

SEQ ID NO: 550611 - DNA, 33 bp, Homo sapien
attggaatccgggaacgaagttggcagactgta

SEQ ID NO: 550612 - DNA, 33 bp, Homo sapien
attggaatccgggaactaagttggcagactgta

SEQ ID NO: 550613 - DNA, 33 bp, Homo sapien
aagcttctcagaggaacagtttacacttgctgc

SEQ ID NO: 550614 - DNA, 33 bp, Homo sapien
aagcttctcagaggaatagtttacacttgctgc

SEQ ID NO: 550615 - DNA, 33 bp, Homo sapien
gaatccccaagacctcaccagcctggtggcaga

SEQ ID NO: 550616 - DNA, 33 bp, Homo sapien
gaatccccaagacctcgccagcctggtggcaga

SEQ ID NO: 550617 - DNA, 33 bp, Homo sapien
atcttcagtctctcaaccttgtaccttccaggc

SEQ ID NO: 550618 - DNA, 33 bp, Homo sapien
atcttcagtctctcaatcttgtaccttccaggc

SEQ ID NO: 550619 - DNA, 33 bp, Homo sapien
tcatacctagaatatacgtcgatttcagtcaag

SEQ ID NO: 550620 - DNA, 33 bp, Homo sapien
tcatacctagaatatatgtcgatttcagtcaag

SEQ ID NO: 550621 - DNA, 33 bp, Homo sapien
ccccaggaagaaagccaatacccttctctgaag

SEQ ID NO: 550622 - DNA, 33 bp, Homo sapien
ccccaggaagaaagccgatacccttctctgaag

SEQ ID NO: 550623 - DNA, 33 bp, Homo sapien
gtaggctgtcatgcacacaggaccaaagaccat

SEQ ID NO: 550624 - DNA, 33 bp, Homo sapien
gtaggctgtcatgcactcaggaccaaagaccat

SEQ ID NO: 550625 - DNA, 33 bp, Homo sapien
tatcatttgtaaaagacggaactgccagcgtct

SEQ ID NO: 550626 - DNA, 33 bp, Homo sapien
tatcatttgtaaaagatggaactgccagcgtct

SEQ ID NO: 550627 - DNA, 33 bp, Homo sapien
acagcctacagagggaagacaggtaataactct

SEQ ID NO: 550628 - DNA, 33 bp, Homo sapien
acagcctacagagggatgacaggtaataactct

SEQ ID NO: 550629 - DNA, 33 bp, Homo sapien
acatgagatctgtgtaaaagggtgtatccccca

SEQ ID NO: 550630 - DNA, 33 bp, Homo sapien
acatgagatctgtgtataagggtgtatccccca

SEQ ID NO: 550631 - DNA, 33 bp, Homo sapien
aattaagaccatcaaaataagctccagaaagag

SEQ ID NO: 550632 - DNA, 33 bp, Homo sapien
aattaagaccatcaaactaagctccagaaagag

SEQ ID NO: 550633 - DNA, 33 bp, Homo sapien
taggcaacaagacagtcacaggttaagttacca

SEQ ID NO: 550634 - DNA, 33 bp, Homo sapien
taggcaacaagacagtgacaggttaagttacca

SEQ ID NO: 550635 - DNA, 33 bp, Homo sapien
cacgaaggcctcagataaagtggagctccccaa

SEQ ID NO: 550636 - DNA, 33 bp, Homo sapien
cacgaaggcctcagatgaagtggagctccccaa

SEQ ID NO: 550637 - DNA, 33 bp, Homo sapien
agaagcagaacggaaacctgaactgcatttttc

SEQ ID NO: 550638 - DNA, 33 bp, Homo sapien
agaagcagaacggaaagctgaactgcatttttc

SEQ ID NO: 550639 - DNA, 33 bp, Homo sapien
agacaattatggtacacgaatgaaaggaggata

SEQ ID NO: 550640 - DNA, 33 bp, Homo sapien
agacaattatggtacatgaatgaaaggaggata

SEQ ID NO: 550641 - DNA, 33 bp, Homo sapien
ggatttgtgcctgtcaaggaaagagagaacata

SEQ ID NO: 550642 - DNA, 33 bp, Homo sapien
ggatttgtgcctgtcagggaaagagagaacata

SEQ ID NO: 550643 - DNA, 33 bp, Homo sapien
gggcagttgcagtgtacgtagtgagccctggag

SEQ ID NO: 550644 - DNA, 33 bp, Homo sapien
gggcagttgcagtgtatgtagtgagccctggag

SEQ ID NO: 550645 - DNA, 33 bp, Homo sapien
gtactgaaaatgtcaacagcaaggatcatggta

SEQ ID NO: 550646 - DNA, 33 bp, Homo sapien
gtactgaaaatgtcaatagcaaggatcatggta

SEQ ID NO: 550647 - DNA, 33 bp, Homo sapien
cagtgacgttgacatcacaggcttttctggcca

SEQ ID NO: 550648 - DNA, 33 bp, Homo sapien
cagtgacgttgacatcgcaggcttttctggcca

SEQ ID NO: 550649 - DNA, 33 bp, Homo sapien
agctcatagatagcccactgaccaaccaaaagc

SEQ ID NO: 550650 - DNA, 33 bp, Homo sapien
agctcatagatagcccgctgaccaaccaaaagc

SEQ ID NO: 550651 - DNA, 33 bp, Homo sapien
accagcactgaactgacggtaaatccagtggca

SEQ ID NO: 550652 - DNA, 33 bp, Homo sapien
accagcactgaactgatggtaaatccagtggca

SEQ ID NO: 550653 - DNA, 33 bp, Homo sapien
ctggccaggttgtatgacaatgcccagttctca

SEQ ID NO: 550654 - DNA, 33 bp, Homo sapien
ctggccaggttgtatggcaatgcccagttctca

SEQ ID NO: 550655 - DNA, 33 bp, Homo sapien
ggactacacagatggccgagcatgatatttggt

SEQ ID NO: 550656 - DNA, 33 bp, Homo sapien
ggactacacagatggctgagcatgatatttggt

SEQ ID NO: 550657 - DNA, 33 bp, Homo sapien
gtagagaggagaaaaactggacattttacagaa

SEQ ID NO: 550658 - DNA, 33 bp, Homo sapien
gtagagaggagaaaaagtggacattttacagaa

SEQ ID NO: 550659 - DNA, 33 bp, Homo sapien
tcaaaacgacctcaaggagcaaagtaaaaacac

SEQ ID NO: 550660 - DNA, 33 bp, Homo sapien
tcaaaacgacctcaagtagcaaagtaaaaacac

SEQ ID NO: 550661 - DNA, 33 bp, Homo sapien
atgtaattttgcctaacgatataaacatggaag

SEQ ID NO: 550662 - DNA, 33 bp, Homo sapien
atgtaattttgcctaatgatataaacatggaag

SEQ ID NO: 550663 - DNA, 33 bp, Homo sapien
tgttggatcttaaagcccaggatgatggtatta

SEQ ID NO: 550664 - DNA, 33 bp, Homo sapien
tgttggatcttaaagcgcaggatgatggtatta

SEQ ID NO: 550665 - DNA, 33 bp, Homo sapien
cctgacattcatgactcaactctgccatttctt

SEQ ID NO: 550666 - DNA, 33 bp, Homo sapien
cctgacattcatgactgaactctgccatttctt

SEQ ID NO: 550667 - DNA, 33 bp, Homo sapien
ctgcccgctggaaaccactcttgggcttgacca

SEQ ID NO: 550668 - DNA, 33 bp, Homo sapien
ctgcccgctggaaaccgctcttgggcttgacca

SEQ ID NO: 550669 - DNA, 33 bp, Homo sapien
aatacacctggataaaccaataactttaaattt

SEQ ID NO: 550670 - DNA, 33 bp, Homo sapien
aatacacctggataaatcaataactttaaattt

SEQ ID NO: 550671 - DNA, 33 bp, Homo sapien
aatttactgcagaaaccaactgctcacagggag

SEQ ID NO: 550672 - DNA, 33 bp, Homo sapien
aatttactgcagaaacgaactgctcacagggag

SEQ ID NO: 550673 - DNA, 33 bp, Homo sapien
tactggaaaaaaattacgtgtaagtggacctgt

SEQ ID NO: 550674 - DNA, 33 bp, Homo sapien
tactggaaaaaaattatgtgtaagtggacctgt

SEQ ID NO: 550675 - DNA, 33 bp, Homo sapien
ccagaagcagcattgccctttatataggcagga

SEQ ID NO: 550676 - DNA, 33 bp, Homo sapien
ccagaagcagcattgctctttatataggcagga

SEQ ID NO: 550677 - DNA, 33 bp, Homo sapien
attcggaacgacttcaatcaggacgggcaagga

SEQ ID NO: 550678 - DNA, 33 bp, Homo sapien
attcggaacgacttcagtcaggacgggcaagga

SEQ ID NO: 550679 - DNA, 33 bp, Homo sapien
gcaaagttctgtttataaattgctaggagaaag

SEQ ID NO: 550680 - DNA, 33 bp, Homo sapien
gcaaagttctgtttatgaattgctaggagaaag

SEQ ID NO: 550681 - DNA, 33 bp, Homo sapien
taaagggcaaagaagaacacaaggcataggata

SEQ ID NO: 550682 - DNA, 33 bp, Homo sapien
taaagggcaaagaagagcacaaggcataggata

SEQ ID NO: 550683 - DNA, 33 bp, Homo sapien
aatgttgatgccttaaacgcatacttcagtttt

SEQ ID NO: 550684 - DNA, 33 bp, Homo sapien
aatgttgatgccttaagcgcatacttcagtttt

SEQ ID NO: 550685 - DNA, 33 bp, Homo sapien
tttgagttctgaccaacacggctacaactaaag

SEQ ID NO: 550686 - DNA, 33 bp, Homo sapien
tttgagttctgaccaatacggctacaactaaag

SEQ ID NO: 550687 - DNA, 33 bp, Homo sapien
atgctccagatggttaagatgataacatttata

SEQ ID NO: 550688 - DNA, 33 bp, Homo sapien
atgctccagatggttaggatgataacatttata

SEQ ID NO: 550689 - DNA, 33 bp, Homo sapien
gatcggtggacctgagaccaaactgccgattac

SEQ ID NO: 550690 - DNA, 33 bp, Homo sapien
gatcggtggacctgaggccaaactgccgattac

SEQ ID NO: 550691 - DNA, 33 bp, Homo sapien
tgtttcttgaaacaaccggagaataaggcatcc

SEQ ID NO: 550692 - DNA, 33 bp, Homo sapien
tgtttcttgaaacaactggagaataaggcatcc

SEQ ID NO: 550693 - DNA, 33 bp, Homo sapien
tggagatcccagctaagagcgtctttgtggttt

SEQ ID NO: 550694 - DNA, 33 bp, Homo sapien
tggagatcccagctaatagcgtctttgtggttt

SEQ ID NO: 550695 - DNA, 33 bp, Homo sapien
tgactagggatgggcactcatttgcattagtaa

SEQ ID NO: 550696 - DNA, 33 bp, Homo sapien
tgactagggatgggcattcatttgcattagtaa

SEQ ID NO: 550697 - DNA, 33 bp, Homo sapien
tccaccgtgcaatttacaaaatcctgctatgtc

SEQ ID NO: 550698 - DNA, 33 bp, Homo sapien
tccaccgtgcaatttataaaatcctgctatgtc

SEQ ID NO: 550699 - DNA, 33 bp, Homo sapien
gttgagatcggcaatacgtaaccctggaggtac

SEQ ID NO: 550700 - DNA, 33 bp, Homo sapien
gttgagatcggcaatatgtaaccctggaggtac

SEQ ID NO: 550701 - DNA, 33 bp, Homo sapien
ggtaacgcagccaagacgtgagcctgacaaaac

SEQ ID NO: 550702 - DNA, 33 bp, Homo sapien
ggtaacgcagccaagatgtgagcctgacaaaac

SEQ ID NO: 550703 - DNA, 33 bp, Homo sapien
gttttcatggaatctgcaaagtgcagccaagtc

SEQ ID NO: 550704 - DNA, 33 bp, Homo sapien
gttttcatggaatctgtaaagtgcagccaagtc

SEQ ID NO: 550705 - DNA, 33 bp, Homo sapien
tgccagagaatccctaacgaattctatcttaat

SEQ ID NO: 550706 - DNA, 33 bp, Homo sapien
tgccagagaatccctatcgaattctatcttaat

SEQ ID NO: 550707 - DNA, 33 bp, Homo sapien
tcctccagctcatgacacttgcttatgcttttt

SEQ ID NO: 550708 - DNA, 33 bp, Homo sapien
tcctccagctcatgactcttgcttatgcttttt

SEQ ID NO: 550709 - DNA, 33 bp, Homo sapien
tttgctcctttttgacacaggtacatcctcctt

SEQ ID NO: 550710 - DNA, 33 bp, Homo sapien
tttgctcctttttgacgcaggtacatcctcctt

SEQ ID NO: 550711 - DNA, 33 bp, Homo sapien
tgcaacatgagaaaacagtttccacaattggtg

SEQ ID NO: 550712 - DNA, 33 bp, Homo sapien
tgcaacatgagaaaacggtttccacaattggtg

SEQ ID NO: 550713 - DNA, 33 bp, Homo sapien
ttgtacaacacctttacatattcctcattatca

SEQ ID NO: 550714 - DNA, 33 bp, Homo sapien
ttgtacaacacctttatatattcctcattatca

SEQ ID NO: 550715 - DNA, 33 bp, Homo sapien
tcagaaccctccttgaacctggtggagacacac

SEQ ID NO: 550716 - DNA, 33 bp, Homo sapien
tcagaaccctccttgaccctggtggagacacac

SEQ ID NO: 550717 - DNA, 33 bp, Homo sapien
ttattcctaggccacccggactaataacagcca

SEQ ID NO: 550718 - DNA, 33 bp, Homo sapien
ttattcctaggccacctggactaataacagcca

SEQ ID NO: 550719 - DNA, 33 bp, Homo sapien
gctgccatcatgctcaagtgatagttttctgag

SEQ ID NO: 550720 - DNA, 33 bp, Homo sapien
gctgccatcatgctcaggtgatagttttctgag

SEQ ID NO: 550721 - DNA, 33 bp, Homo sapien
gctgaaaaccactgacactatttttgtcaagac

SEQ ID NO: 550722 - DNA, 33 bp, Homo sapien
gctgaaaaccactgaccctatttttgtcaagac

SEQ ID NO: 550723 - DNA, 33 bp, Homo sapien
taggagctgtgtgttacgaaacagtgaggaaga

SEQ ID NO: 550724 - DNA, 33 bp, Homo sapien
taggagctgtgtgttaggaaacagtgaggaaga

SEQ ID NO: 550725 - DNA, 33 bp, Homo sapien
atcccaagggagagctaaaaccatgaggtgaaa

SEQ ID NO: 550726 - DNA, 33 bp, Homo sapien
atcccaagggagagcttaaaccatgaggtgaaa

SEQ ID NO: 550727 - DNA, 33 bp, Homo sapien
aggcagagtaggaggacgtttagaagctatttc

SEQ ID NO: 550728 - DNA, 33 bp, Homo sapien
aggcagagtaggaggatgtttagaagctatttc

SEQ ID NO: 550729 - DNA, 33 bp, Homo sapien
gctgacctcatgtgtagaatggtgtgataataa

SEQ ID NO: 550730 - DNA, 33 bp, Homo sapien
gctgacctcatgtgtataatggtgtgataataa

SEQ ID NO: 550731 - DNA, 33 bp, Homo sapien
tcttttgccaaataccagaggaagaaaaggcct

SEQ ID NO: 550732 - DNA, 33 bp, Homo sapien
tcttttgccaaataccggaggaagaaaaggcct

SEQ ID NO: 550733 - DNA, 33 bp, Homo sapien
cgtgacatatgaaggcacgtgtttatgacctgc

SEQ ID NO: 550734 - DNA, 33 bp, Homo sapien
cgtgacatatgaaggcgcgtgtttatgacctgc

SEQ ID NO: 550735 - DNA, 33 bp, Homo sapien
ctggccactgaataaaatctgcttgcctttttt

SEQ ID NO: 550736 - DNA, 33 bp, Homo sapien
ctggccactgaataaactctgcttgcctttttt

SEQ ID NO: 550737 - DNA, 33 bp, Homo sapien
ttttataatcaccataacaagtaatcctatctt

SEQ ID NO: 550738 - DNA, 33 bp, Homo sapien
ttttataatcaccatagcaagtaatcctatctt

SEQ ID NO: 550739 - DNA, 33 bp, Homo sapien
agtgtcactgtctcacagctctaaattgtaaac

SEQ ID NO: 550740 - DNA, 33 bp, Homo sapien
agtgtcactgtctcaccgctctaaattgtaaac

SEQ ID NO: 550741 - DNA, 33 bp, Homo sapien
ccgattaggtgatataataacttcagtgagatc

SEQ ID NO: 550742 - DNA, 33 bp, Homo sapien
ccgattaggtgatatagtaacttcagtgagatc

SEQ ID NO: 550743 - DNA, 33 bp, Homo sapien
tgggcatcgcatttacaagtttagatgaatgta

SEQ ID NO: 550744 - DNA, 33 bp, Homo sapien
tgggcatcgcatttacgagtttagatgaatgta

SEQ ID NO: 550745 - DNA, 33 bp, Homo sapien
aggtaaagagagatgtaaagaatgaagcctgaa

SEQ ID NO: 550746 - DNA, 33 bp, Homo sapien
aggtaaagagagatgtgaagaatgaagcctgaa

SEQ ID NO: 550747 - DNA, 33 bp, Homo sapien
atgttatttatgggaggaggttcagggcttcag

SEQ ID NO: 550748 - DNA, 33 bp, Homo sapien
atgttatttatgggagtaggttcagggcttcag

SEQ ID NO: 550749 - DNA, 33 bp, Homo sapien
tggcaagcctcggctacacttggataaactttc

SEQ ID NO: 550750 - DNA, 33 bp, Homo sapien
tggcaagcctcggctatacttggataaactttc

SEQ ID NO: 550751 - DNA, 33 bp, Homo sapien
aaagacacaggaattacgggactgttcacgtaa

SEQ ID NO: 550752 - DNA, 33 bp, Homo sapien
aaagacacaggaattatgggactgttcacgtaa

SEQ ID NO: 550753 - DNA, 33 bp, Homo sapien
ttccttagctggtcaacgcttaaatcaaattcc

SEQ ID NO: 550754 - DNA, 33 bp, Homo sapien
ttccttagctggtcaatgcttaaatcaaattcc

SEQ ID NO: 550755 - DNA, 33 bp, Homo sapien
ctggtttctagggttacgaagatgaattaagat

SEQ ID NO: 550756 - DNA, 33 bp, Homo sapien
ctggtttctagggttatgaagatgaattaagat

SEQ ID NO: 550757 - DNA, 33 bp, Homo sapien
agagtggtttttatcaagattgcaaactgaaac

SEQ ID NO: 550758 - DNA, 33 bp, Homo sapien
agagtggtttttatcaggattgcaaactgaaac

SEQ ID NO: 550759 - DNA, 33 bp, Homo sapien
ctgtgtgtctgaggacagaggacgacaaggact

SEQ ID NO: 550760 - DNA, 33 bp, Homo sapien
ctgtgtgtctgaggaccgaggacgacaaggact

SEQ ID NO: 550761 - DNA, 33 bp, Homo sapien
ttaggtgcggtctttgcagaaggcctttaagta

SEQ ID NO: 550762 - DNA, 33 bp, Homo sapien
ttaggtgcggtctttggagaaggcctttaagta

SEQ ID NO: 550763 - DNA, 33 bp, Homo sapien
ccttcacgtcttgatacctctctcttgctcctt

SEQ ID NO: 550764 - DNA, 33 bp, Homo sapien
ccttcacgtcttgatatctctctcttgctcctt

SEQ ID NO: 550765 - DNA, 33 bp, Homo sapien
gatgcattgtccctgaatagaaagatagagaag

SEQ ID NO: 550766 - DNA, 33 bp, Homo sapien
gatgcattgtccctgagtagaaagatagagaag

SEQ ID NO: 550767 - DNA, 33 bp, Homo sapien
attacattcagcttcaccatgtgtgtggacatt

SEQ ID NO: 550768 - DNA, 33 bp, Homo sapien
attacattcagcttcatcatgtgtgtggacatt

SEQ ID NO: 550769 - DNA, 33 bp, Homo sapien
aggatctccatttaacacaagtgcttctcccaa

SEQ ID NO: 550770 - DNA, 33 bp, Homo sapien
aggatctccatttaactcaagtgcttctcccaa

SEQ ID NO: 550771 - DNA, 33 bp, Homo sapien
atggagtgaacaggagaaagaccttgatatggt

SEQ ID NO: 550772 - DNA, 33 bp, Homo sapien
atggagtgaacaggaggaagaccttgatatggt

SEQ ID NO: 550773 - DNA, 33 bp, Homo sapien
ctcatggagctgacacaagcctcagggggataa

SEQ ID NO: 550774 - DNA, 33 bp, Homo sapien
ctcatggagctgacacgagcctcagggggataa

SEQ ID NO: 550775 - DNA, 33 bp, Homo sapien
ttgaaatgaaagaaccagcagaatgaacacagc

SEQ ID NO: 550776 - DNA, 33 bp, Homo sapien
ttgaaatgaaagaaccggcagaatgaacacagc

SEQ ID NO: 550777 - DNA, 33 bp, Homo sapien
gggaaaattggtagcactagatgagaggtggac

SEQ ID NO: 550778 - DNA, 33 bp, Homo sapien
gggaaaattggtagcattagatgagaggtggac

SEQ ID NO: 550779 - DNA, 33 bp, Homo sapien
tcaaatcttgcctggacgattgcagtgtttcac

SEQ ID NO: 550780 - DNA, 33 bp, Homo sapien
tcaaatcttgcctggatgattgcagtgtttcac

SEQ ID NO: 550781 - DNA, 33 bp, Homo sapien
gtggatgctcggtgaccgaaggaaggaatcaat

SEQ ID NO: 550782 - DNA, 33 bp, Homo sapien
gtggatgctcggtgactgaaggaaggaatcaat

SEQ ID NO: 550783 - DNA, 33 bp, Homo sapien
atgtaaacctttcagacaggctgacagctatct

SEQ ID NO: 550784 - DNA, 33 bp, Homo sapien
atgtaaacctttcagagaggctgacagctatct

SEQ ID NO: 550785 - DNA, 33 bp, Homo sapien
gccatctacctgatacaagtggtcatcccacag

SEQ ID NO: 550786 - DNA, 33 bp, Homo sapien
gccatctacctgatacgagtggtcatcccacag

SEQ ID NO: 550787 - DNA, 33 bp, Homo sapien
ataagcagtcatttaacctaatgttggcaacaa

SEQ ID NO: 550788 - DNA, 33 bp, Homo sapien
ataagcagtcatttaatctaatgttggcaacaa

SEQ ID NO: 550789 - DNA, 33 bp, Homo sapien
tatttatatggcttaggagagttttctcaacat

SEQ ID NO: 550790 - DNA, 33 bp, Homo sapien
tatttatatggcttagtagagttttctcaacat

SEQ ID NO: 550791 - DNA, 33 bp, Homo sapien
caactctaagaaagtgaaaaactgaagctattc

SEQ ID NO: 550792 - DNA, 33 bp, Homo sapien
caactctaagaaagtggaaaactgaagctattc

SEQ ID NO: 550793 - DNA, 33 bp, Homo sapien
gttaacatgaatgaaaatatcaaccagcattta

SEQ ID NO: 550794 - DNA, 33 bp, Homo sapien
gttaacatgaatgaaattatcaaccagcattta

SEQ ID NO: 550795 - DNA, 33 bp, Homo sapien
tctataaggatttgaaaccatctcctttatata

SEQ ID NO: 550796 - DNA, 33 bp, Homo sapien
tctataaggatttgaagccatctcctttatata

SEQ ID NO: 550797 - DNA, 33 bp, Homo sapien
ggcactgaaacaggaaagcagagtaggcagtag

SEQ ID NO: 550798 - DNA, 33 bp, Homo sapien
ggcactgaaacaggaatgcagagtaggcagtag

SEQ ID NO: 550799 - DNA, 33 bp, Homo sapien
attcggatttatgcagcaagtaatggatgcacc

SEQ ID NO: 550800 - DNA, 33 bp, Homo sapien
attcggatttatgcaggaagtaatggatgcacc

SEQ ID NO: 550801 - DNA, 33 bp, Homo sapien
aagcataatcctgtaactgggttgatagttcaa

SEQ ID NO: 550802 - DNA, 33 bp, Homo sapien
aagcataatcctgtaattgggttgatagttcaa

SEQ ID NO: 550803 - DNA, 33 bp, Homo sapien
tgagaccctctgtgaaccctggtgtccttgcct

SEQ ID NO: 550804 - DNA, 33 bp, Homo sapien
tgagaccctctgtgaatcctggtgtccttgcct

SEQ ID NO: 550805 - DNA, 33 bp, Homo sapien
gaaggcagcgctgagcaacatctctatgctggc

SEQ ID NO: 550806 - DNA, 33 bp, Homo sapien
gaaggcagcgctgagcgacatctctatgctggc

SEQ ID NO: 550807 - DNA, 33 bp, Homo sapien
atggtatgtctcctgccgagcacgttcccttca

SEQ ID NO: 550808 - DNA, 33 bp, Homo sapien
atggtatgtctcctgctgagcacgttcccttca

SEQ ID NO: 550809 - DNA, 33 bp, Homo sapien
tgttcatctttgcttccatgtacatttaaaagc

SEQ ID NO: 550810 - DNA, 33 bp, Homo sapien
tgttcatctttgcttcgatgtacatttaaaagc

SEQ ID NO: 550811 - DNA, 33 bp, Homo sapien
acactgtgggacagaacgcaacagctgcctaaa

SEQ ID NO: 550812 - DNA, 33 bp, Homo sapien
acactgtgggacagaatgcaacagctgcctaaa

SEQ ID NO: 550813 - DNA, 33 bp, Homo sapien
atcttgcaaaacagctaacaattttatgccgcc

SEQ ID NO: 550814 - DNA, 33 bp, Homo sapien
atcttgcaaaacagctgacaattttatgccgcc

SEQ ID NO: 550815 - DNA, 33 bp, Homo sapien
ggttttcaaaggaaaaaatgcggaggattatgt

SEQ ID NO: 550816 - DNA, 33 bp, Homo sapien
ggttttcaaaggaaaacatgcggaggattatgt

SEQ ID NO: 550817 - DNA, 33 bp, Homo sapien
accatgattgatgaagacgaaggtgtacccata

SEQ ID NO: 550818 - DNA, 33 bp, Homo sapien
accatgattgatgaagccgaaggtgtacccata

SEQ ID NO: 550819 - DNA, 33 bp, Homo sapien
tgcatacatgtttcacagggttgcaagcataac

SEQ ID NO: 550820 - DNA, 33 bp, Homo sapien
tgcatacatgtttcacggggttgcaagcataac

SEQ ID NO: 550821 - DNA, 33 bp, Homo sapien
agtggctggggaggaaaggttaaacagtgtttg

SEQ ID NO: 550822 - DNA, 33 bp, Homo sapien
agtggctggggaggaacggttaaacagtgtttg

SEQ ID NO: 550823 - DNA, 33 bp, Homo sapien
ccgttcactatgacaacattacctagcggtctt

SEQ ID NO: 550824 - DNA, 33 bp, Homo sapien
ccgttcactatgacaagattacctagcggtctt

SEQ ID NO: 550825 - DNA, 33 bp, Homo sapien
ctccatactctttcaaaggacgatatcagctgt

SEQ ID NO: 550826 - DNA, 33 bp, Homo sapien
ctccatactctttcaatggacgatatcagctgt

SEQ ID NO: 550827 - DNA, 33 bp, Homo sapien
cagtatcttttaggggaacaagattcaacccat

SEQ ID NO: 550828 - DNA, 33 bp, Homo sapien
cagtatcttttagggggacaagattcaacccat

SEQ ID NO: 550829 - DNA, 33 bp, Homo sapien
attttccatagccttcactaaaataacgtgtgt

SEQ ID NO: 550830 - DNA, 33 bp, Homo sapien
attttccatagccttcgctaaaataacgtgtgt

SEQ ID NO: 550831 - DNA, 33 bp, Homo sapien
gaaaaaaaaaggatgaccatatggaattttcag

SEQ ID NO: 550832 - DNA, 33 bp, Homo sapien
gaaaaaaaaaggatgatcatatggaattttcag

SEQ ID NO: 550833 - DNA, 33 bp, Homo sapien
tggtgtttaagtcagaacagtgcgtcctgtcta

SEQ ID NO: 550834 - DNA, 33 bp, Homo sapien
tggtgtttaagtcagagcagtgcgtcctgtcta

SEQ ID NO: 550835 - DNA, 33 bp, Homo sapien
aaaatgcttctggaataaaactctaagagcaca

SEQ ID NO: 550836 - DNA, 33 bp, Homo sapien
aaaatgcttctggaatgaaactctaagagcaca

SEQ ID NO: 550837 - DNA, 33 bp, Homo sapien
ccaaagacccaccttacctgcacaatctgagca

SEQ ID NO: 550838 - DNA, 33 bp, Homo sapien
ccaaagacccaccttatctgcacaatctgagca

SEQ ID NO: 550839 - DNA, 33 bp, Homo sapien
gtgaactgcatattcgaaggatctaggttgtgt

SEQ ID NO: 550840 - DNA, 33 bp, Homo sapien
gtgaactgcatattcggaggatctaggttgtgt

SEQ ID NO: 550841 - DNA, 33 bp, Homo sapien; identical to SEQ ID NO: 550839

SEQ ID NO: 550842 - DNA, 33 bp, Homo sapien; identical to SEQ ID NO: 550840

SEQ ID NO: 550843 - DNA, 33 bp, Homo sapien
aattgtgtacaggcaacatcaggttagtcgaaa

SEQ ID NO: 550844 - DNA, 33 bp, Homo sapien
aattgtgtacaggcaatatcaggttagtcgaaa

SEQ ID NO: 550845 - DNA, 33 bp, Homo sapien
caccaatacatcaaaccggacattgttgtaagt

SEQ ID NO: 550846 - DNA, 33 bp, Homo sapien
caccaatacatcaaactggacattgttgtaagt

SEQ ID NO: 550847 - DNA, 33 bp, Homo sapien
aaaagaaaaacaattccatggctctgcagtgca

SEQ ID NO: 550848 - DNA, 33 bp, Homo sapien
aaaagaaaaacaattctatggctctgcagtgca

SEQ ID NO: 550849 - DNA, 33 bp, Homo sapien
atttcataaaaagcacactattctatcctgagg

SEQ ID NO: 550850 - DNA, 33 bp, Homo sapien
atttcataaaaagcaccctattctatcctgagg

SEQ ID NO: 550851 - DNA, 33 bp, Homo sapien
atatatgattaacgtcagaacctaattaaggct

SEQ ID NO: 550852 - DNA, 33 bp, Homo sapien
atatatgattaacgtcggaacctaattaaggct

SEQ ID NO: 550853 - DNA, 33 bp, Homo sapien
actgtcaaaactagatcacaagttgctgggctt

SEQ ID NO: 550854 - DNA, 33 bp, Homo sapien
actgtcaaaactagattacaagttgctgggctt

SEQ ID NO: 550855 - DNA, 33 bp, Homo sapien
tcagcaagttgtagaactgtttcagtctcagtt

SEQ ID NO: 550856 - DNA, 33 bp, Homo sapien
tcagcaagttgtagaattgtttcagtctcagtt

SEQ ID NO: 550857 - DNA, 33 bp, Homo sapien
gtaaaagaatttggcaatatccaaaagatctac

SEQ ID NO: 550858 - DNA, 33 bp, Homo sapien
gtaaaagaatttggcactatccaaaagatctac

SEQ ID NO: 550859 - DNA, 33 bp, Homo sapien
caaatctattgaacccaggaaattggttcagta

SEQ ID NO: 550860 - DNA, 33 bp, Homo sapien
caaatctattgaacccgggaaattggttcagta

SEQ ID NO: 550861 - DNA, 33 bp, Homo sapien
actccaggaacaatgagcactcgctactgccag

SEQ ID NO: 550862 - DNA, 33 bp, Homo sapien
actccaggaacaatgatcactcgctactgccag

SEQ ID NO: 550863 - DNA, 33 bp, Homo sapien
aaagagactgcaaatacatatgactttggaggg

SEQ ID NO: 550864 - DNA, 33 bp, Homo sapien
aaagagactgcaaatagatatgactttggaggg

SEQ ID NO: 550865 - DNA, 33 bp, Homo sapien
acttgtctatggatcaagatggctctgtccagg

SEQ ID NO: 550866 - DNA, 33 bp, Homo sapien
acttgtctatggatcaggatggctctgtccagg

SEQ ID NO: 550867 - DNA, 33 bp, Homo sapien
acgaaaatgagccaccaagatctgctgtaggaa

SEQ ID NO: 550868 - DNA, 33 bp, Homo sapien
acgaaaatgagccaccgagatctgctgtaggaa

SEQ ID NO: 550869 - DNA, 33 bp, Homo sapien
ccattgacacaggtccagaaccaccaggcctga

SEQ ID NO: 550870 - DNA, 33 bp, Homo sapien
ccattgacacaggtccggaaccaccaggcctga

SEQ ID NO: 550871 - DNA, 33 bp, Homo sapien
tgagtaatgattctgaaaaaacttgcgcattca

SEQ ID NO: 550872 - DNA, 33 bp, Homo sapien
tgagtaatgattctgagaaaacttgcgcattca

SEQ ID NO: 550873 - DNA, 33 bp, Homo sapien
aatgtgcactaagaacaatgaaaacttatcaaa

SEQ ID NO: 550874 - DNA, 33 bp, Homo sapien
aatgtgcactaagaacgatgaaaacttatcaaa

SEQ ID NO: 550875 - DNA, 33 bp, Homo sapien
acaaaagcaaaacccacagctttcattttccat

SEQ ID NO: 550876 - DNA, 33 bp, Homo sapien
acaaaagcaaaacccagagctttcattttccat

SEQ ID NO: 550877 - DNA, 33 bp, Homo sapien
aaataaggcctggaaagaaacattcagatatct

SEQ ID NO: 550878 - DNA, 33 bp, Homo sapien
aaataaggcctggaaataaacattcagatatct

SEQ ID NO: 550879 - DNA, 33 bp, Homo sapien
agagaggggatagtggaatgtaaactaaaggta

SEQ ID NO: 550880 - DNA, 33 bp, Homo sapien
agagaggggatagtgggatgtaaactaaaggta

SEQ ID NO: 550881 - DNA, 33 bp, Homo sapien
gtgaacttggaattgcaatagcactaatacaac

SEQ ID NO: 550882 - DNA, 33 bp, Homo sapien
gtgaacttggaattgcgatagcactaatacaac

SEQ ID NO: 550883 - DNA, 33 bp, Homo sapien
aattaccaaaaatgtacgctgtggcagacggca

SEQ ID NO: 550884 - DNA, 33 bp, Homo sapien
aattaccaaaaatgtatgctgtggcagacggca

SEQ ID NO: 550885 - DNA, 33 bp, Homo sapien
ttacactctactgttacggggttcaggtcagaa

SEQ ID NO: 550886 - DNA, 33 bp, Homo sapien
ttacactctactgttatggggttcaggtcagaa

SEQ ID NO: 550887 - DNA, 33 bp, Homo sapien
agcaatggtggagaaacctggggcacacacagg

SEQ ID NO: 550888 - DNA, 33 bp, Homo sapien
agcaatggtggagaaatctggggcacacacagg

SEQ ID NO: 550889 - DNA, 33 bp, Homo sapien
tgcttcctccacgtccactcggagtgttcttct

SEQ ID NO: 550890 - DNA, 33 bp, Homo sapien
tgcttcctccacgtccgctcggagtgttcttct

SEQ ID NO: 550891 - DNA, 33 bp, Homo sapien
ttgggtcttctaagcccccatccatgtcacctg

SEQ ID NO: 550892 - DNA, 33 bp, Homo sapien
ttgggtcttctaagcctccatccatgtcacctg

SEQ ID NO: 550893 - DNA, 33 bp, Homo sapien
tggctgttactgacccagaacagggaaatcgcc

SEQ ID NO: 550894 - DNA, 33 bp, Homo sapien
tggctgttactgacccggaacagggaaatcgcc

SEQ ID NO: 550895 - DNA, 33 bp, Homo sapien
gtaggtacatagataacggcaacttattaaagt

SEQ ID NO: 550896 - DNA, 33 bp, Homo sapien
gtaggtacatagataatggcaacttattaaagt

SEQ ID NO: 550897 - DNA, 33 bp, Homo sapien
cactgcaacctctatcacctgggtataagaggt

SEQ ID NO: 550898 - DNA, 33 bp, Homo sapien
cactgcaacctctatctcctgggtataagaggt

SEQ ID NO: 550899 - DNA, 33 bp, Homo sapien
accacaggagactctacgggacaaatactctaa

SEQ ID NO: 550900 - DNA, 33 bp, Homo sapien
accacaggagactctatgggacaaatactctaa

SEQ ID NO: 550901 - DNA, 33 bp, Homo sapien
ttgagtcaggatccaaataagatccctttgttg

SEQ ID NO: 550902 - DNA, 33 bp, Homo sapien
ttgagtcaggatccaagtaagatccctttgttg

SEQ ID NO: 550903 - DNA, 33 bp, Homo sapien
tgcagcacatcaaagcgccaggtatactcagca

SEQ ID NO: 550904 - DNA, 33 bp, Homo sapien
tgcagcacatcaaagctccaggtatactcagca

SEQ ID NO: 550905 - DNA, 33 bp, Homo sapien
cttgatcagcttctcaaatggactaagggccac

SEQ ID NO: 550906 - DNA, 33 bp, Homo sapien
cttgatcagcttctcagatggactaagggccac

SEQ ID NO: 550907 - DNA, 33 bp, Homo sapien
aatagactgaagaaacacgataaagagctcaga

SEQ ID NO: 550908 - DNA, 33 bp, Homo sapien
aatagactgaagaaacgcgataaagagctcaga

SEQ ID NO: 550909 - DNA, 33 bp, Homo sapien
agcagtttacatttccaagaagagcgcatcagt

SEQ ID NO: 550910 - DNA, 33 bp, Homo sapien
agcagtttacatttccgagaagagcgcatcagt

SEQ ID NO: 550911 - DNA, 33 bp, Homo sapien
tctagtaacacagaaacggcgactgagcacttg

SEQ ID NO: 550912 - DNA, 33 bp, Homo sapien
tctagtaacacagaaatggcgactgagcacttg

SEQ ID NO: 550913 - DNA, 33 bp, Homo sapien
tgttcgttgtcaaaaactggagcatcttaacct

SEQ ID NO: 550914 - DNA, 33 bp, Homo sapien
tgttcgttgtcaaaaattggagcatcttaacct

SEQ ID NO: 550915 - DNA, 33 bp, Homo sapien
tgagctagaatctgaaagtacaggaatacataa

SEQ ID NO: 550916 - DNA, 33 bp, Homo sapien
tgagctagaatctgaacgtacaggaatacataa

SEQ ID NO: 550917 - DNA, 33 bp, Homo sapien
cttgtctctgttctacactaagagcttaggttc

SEQ ID NO: 550918 - DNA, 33 bp, Homo sapien
cttgtctctgttctactctaagagcttaggttc

SEQ ID NO: 550919 - DNA, 33 bp, Homo sapien
aatatatcaccaaggcaacttcctctcagtgag

SEQ ID NO: 550920 - DNA, 33 bp, Homo sapien
aatatatcaccaaggccacttcctctcagtgag

SEQ ID NO: 550921 - DNA, 33 bp, Homo sapien
ccacagcaattaactgcatttcgggtgaaagat

SEQ ID NO: 550922 - DNA, 33 bp, Homo sapien
ccacagcaattaactgtatttcgggtgaaagat

SEQ ID NO: 550923 - DNA, 33 bp, Homo sapien
tgaagcttaccatttgaaagctaacataagatg

SEQ ID NO: 550924 - DNA, 33 bp, Homo sapien
tgaagcttaccatttgcaagctaacataagatg

SEQ ID NO: 550925 - DNA, 33 bp, Homo sapien
tctccttggctatacacggagaatagaattggg

SEQ ID NO: 550926 - DNA, 33 bp, Homo sapien
tctccttggctatacatggagaatagaattggg

SEQ ID NO: 550927 - DNA, 33 bp, Homo sapien
caaaatgcagttagacaaaatggttaggaagaa

SEQ ID NO: 550928 - DNA, 33 bp, Homo sapien
caaaatgcagttagaccaaatggttaggaagaa

SEQ ID NO: 550929 - DNA, 33 bp, Homo sapien
gattggttgactggacccgtttttatgctaacc

SEQ ID NO: 550930 - DNA, 33 bp, Homo sapien
gattggttgactggactcgtttttatgctaacc

SEQ ID NO: 550931 - DNA, 33 bp, Homo sapien
taaatgcatatatctcaaaaaataagattgcag

SEQ ID NO: 550932 - DNA, 33 bp, Homo sapien
taaatgcatatatctcgaaaaataagattgcag

SEQ ID NO: 550933 - DNA, 33 bp, Homo sapien
agccactcggcagcaacagaaaactcataatat

SEQ ID NO: 550934 - DNA, 33 bp, Homo sapien
agccactcggcagcaatagaaaactcataatat

SEQ ID NO: 550935 - DNA, 33 bp, Homo sapien
aaataaaaatctcatgaagctctttatccaagt

SEQ ID NO: 550936 - DNA, 33 bp, Homo sapien
aaataaaaatctcatggagctctttatccaagt

SEQ ID NO: 550937 - DNA, 33 bp, Homo sapien
aaggcatgacaagtccagacgtaggttttgtaa

SEQ ID NO: 550938 - DNA, 33 bp, Homo sapien
aaggcatgacaagtccggacgtaggttttgtaa

SEQ ID NO: 550939 - DNA, 33 bp, Homo sapien
tcaggggtgaggtcacagctggagatacatatg

SEQ ID NO: 550940 - DNA, 33 bp, Homo sapien
tcaggggtgaggtcacggctggagatacatatg

SEQ ID NO: 550941 - DNA, 33 bp, Homo sapien
ggtggcatgtgcgtggacagtgtggagtcatat

SEQ ID NO: 550942 - DNA, 33 bp, Homo sapien
ggtggcatgtgcgtgggcagtgtggagtcatat

SEQ ID NO: 550943 - DNA, 33 bp, Homo sapien
ttgggatgctttgcacacacggcctatgggaag

SEQ ID NO: 550944 - DNA, 33 bp, Homo sapien
ttgggatgctttgcacgcacggcctatgggaag

SEQ ID NO: 550945 - DNA, 33 bp, Homo sapien
tgtgtaccaagtaatgccacctacagttttgat

SEQ ID NO: 550946 - DNA, 33 bp, Homo sapien
tgtgtaccaagtaatgtcacctacagttttgat

SEQ ID NO: 550947 - DNA, 33 bp, Homo sapien
tctatctgccagccagaaatgcacccaatggaa

SEQ ID NO: 550948 - DNA, 33 bp, Homo sapien
tctatctgccagccaggaatgcacccaatggaa

SEQ ID NO: 550949 - DNA, 33 bp, Homo sapien
tttttaactaagaaaggactccaacctcatgga

SEQ ID NO: 550950 - DNA, 33 bp, Homo sapien
tttttaactaagaaagtactccaacctcatgga

SEQ ID NO: 550951 - DNA, 33 bp, Homo sapien
tcaccaatgaacacatcacaatctctccatttc

SEQ ID NO: 550952 - DNA, 33 bp, Homo sapien
tcaccaatgaacacattacaatctctccatttc

SEQ ID NO: 550953 - DNA, 33 bp, Homo sapien
tcaaatcctcaaccgacgtgacattctcaccag

SEQ ID NO: 550954 - DNA, 33 bp, Homo sapien
tcaaatcctcaaccgatgtgacattctcaccag

SEQ ID NO: 550955 - DNA, 33 bp, Homo sapien
gggcatgaggctttacagatacctttatacaca

SEQ ID NO: 550956 - DNA, 33 bp, Homo sapien
gggcatgaggctttacggatacctttatacaca

SEQ ID NO: 550957 - DNA, 33 bp, Homo sapien
atcaacagccagacaacgatcacaaaaattaac

SEQ ID NO: 550958 - DNA, 33 bp, Homo sapien
atcaacagccagacaatgatcacaaaaattaac

SEQ ID NO: 550959 - DNA, 33 bp, Homo sapien
acaaaccgctaagcttcaagcactgatcaaagg

SEQ ID NO: 550960 - DNA, 33 bp, Homo sapien
acaaaccgctaagcttgaagcactgatcaaagg

SEQ ID NO: 550961 - DNA, 33 bp, Homo sapien
gatgagttatcagttgcagtattgacattttct

SEQ ID NO: 550962 - DNA, 33 bp, Homo sapien
gatgagttatcagttgtagtattgacattttct

SEQ ID NO: 550963 - DNA, 33 bp, Homo sapien
taaattgttgagttccaagtcttgtctaataat

SEQ ID NO: 550964 - DNA, 33 bp, Homo sapien
taaattgttgagttcccagtcttgtctaataat

SEQ ID NO: 550965 - DNA, 33 bp, Homo sapien
ggcttgtcttctcaccagccggtttggagtcca

SEQ ID NO: 550966 - DNA, 33 bp, Homo sapien
ggcttgtcttctcaccggccggtttggagtcca

SEQ ID NO: 550967 - DNA, 33 bp, Homo sapien
tccacctgcgcagggcaagtcctcccactcact

SEQ ID NO: 550968 - DNA, 33 bp, Homo sapien
tccacctgcgcagggcgagtcctcccactcact

SEQ ID NO: 550969 - DNA, 33 bp, Homo sapien
ggcatgagaaaataaaggtacagtttcaatcac

SEQ ID NO: 550970 - DNA, 33 bp, Homo sapien
ggcatgagaaaataaatgtacagtttcaatcac

SEQ ID NO: 550971 - DNA, 33 bp, Homo sapien
cagcaaataatgctcactaatagtaacagtatc

SEQ ID NO: 550972 - DNA, 33 bp, Homo sapien
cagcaaataatgctcagtaatagtaacagtatc

SEQ ID NO: 550973 - DNA, 33 bp, Homo sapien
ataataataataaatcaaggaatggacaaatga

SEQ ID NO: 550974 - DNA, 33 bp, Homo sapien
ataataataataaatcgaggaatggacaaatga

SEQ ID NO: 550975 - DNA, 33 bp, Homo sapien
agaagaagaagaagaaaaaagatggagcaatcg

SEQ ID NO: 550976 - DNA, 33 bp, Homo sapien
agaagaagaagaagaagaaagatggagcaatcg

SEQ ID NO: 550977 - DNA, 33 bp, Homo sapien
attaaacctcaaagaacgttccccgatagtgac

SEQ ID NO: 550978 - DNA, 33 bp, Homo sapien
attaaacctcaaagaatgttccccgatagtgac

SEQ ID NO: 550979 - DNA, 33 bp, Homo sapien
gtgaattgattgcacccctcctgtggcgtggag

SEQ ID NO: 550980 - DNA, 33 bp, Homo sapien
gtgaattgattgcacctctcctgtggcgtggag

SEQ ID NO: 550981 - DNA, 33 bp, Homo sapien
accactgtgcccaagcaaccctggatgcgctgg

SEQ ID NO: 550982 - DNA, 33 bp, Homo sapien
accactgtgcccaagcgaccctggatgcgctgg

SEQ ID NO: 550983 - DNA, 33 bp, Homo sapien
aaacacaaaacaaacacgtgtgaatagatgagg

SEQ ID NO: 550984 - DNA, 33 bp, Homo sapien
aaacacaaaacaaacatgtgtgaatagatgagg

SEQ ID NO: 550985 - DNA, 33 bp, Homo sapien
tggcggattactgctcacctcttcaagccgatg

SEQ ID NO: 550986 - DNA, 33 bp, Homo sapien
tggcggattactgctctcctcttcaagccgatg

SEQ ID NO: 550987 - DNA, 33 bp, Homo sapien
agaagagtctggcatacgtgagcgcgctacaaa

SEQ ID NO: 550988 - DNA, 33 bp, Homo sapien
agaagagtctggcatatgtgagcgcgctacaaa

SEQ ID NO: 550989 - DNA, 33 bp, Homo sapien
agtggaaaacagcaaagtgagtttctgactaag

SEQ ID NO: 550990 - DNA, 33 bp, Homo sapien
agtggaaaacagcaaattgagtttctgactaag

SEQ ID NO: 550991 - DNA, 33 bp, Homo sapien
tttgcaaagtgaagttcaaagggtttgcctgcc

SEQ ID NO: 550992 - DNA, 33 bp, Homo sapien
tttgcaaagtgaagttgaaagggtttgcctgcc

SEQ ID NO: 550993 - DNA, 33 bp, Homo sapien
tgcagatgtatgtgtaagtcctcagtactgcga

SEQ ID NO: 550994 - DNA, 33 bp, Homo sapien
tgcagatgtatgtgtaggtcctcagtactgcga

SEQ ID NO: 550995 - DNA, 33 bp, Homo sapien
gagagaagcgacacaccaacacaggaaaagcaa

SEQ ID NO: 550996 - DNA, 33 bp, Homo sapien
gagagaagcgacacacgaacacaggaaaagcaa

SEQ ID NO: 550997 - DNA, 33 bp, Homo sapien
gacacatttaaagtgacgtgaactagtttatta

SEQ ID NO: 550998 - DNA, 33 bp, Homo sapien
gacacatttaaagtgatgtgaactagtttatta

SEQ ID NO: 550999 - DNA, 33 bp, Homo sapien
cagcctccttttgcaaatccacctgccgttctg

SEQ ID NO: 551000 - DNA, 33 bp, Homo sapien
cagcctccttttgcaagtccacctgccgttctg

SEQ ID NO: 551001 - DNA, 33 bp, Homo sapien
aatgcttaaggaggacactactcactcagatac

SEQ ID NO: 551002 - DNA, 33 bp, Homo sapien
aatgcttaaggaggacgctactcactcagatac

SEQ ID NO: 551003 - DNA, 33 bp, Homo sapien
tttgcactttgccatacgagatgcgggctgcgg

SEQ ID NO: 551004 - DNA, 33 bp, Homo sapien
tttgcactttgccatatgagatgcgggctgcgg

SEQ ID NO: 551005 - DNA, 33 bp, Homo sapien
cctgggatggattctcaacaaaggtacagtaat

SEQ ID NO: 551006 - DNA, 33 bp, Homo sapien
cctgggatggattctcgacaaaggtacagtaat

SEQ ID NO: 551007 - DNA, 33 bp, Homo sapien
ctcttccatcaaatccccgatttcctacctggt

SEQ ID NO: 551008 - DNA, 33 bp, Homo sapien
ctcttccatcaaatcctcgatttcctacctggt

SEQ ID NO: 551009 - DNA, 33 bp, Homo sapien
tttctttgaagtctaaagtagatattgatcctt

SEQ ID NO: 551010 - DNA, 33 bp, Homo sapien
tttctttgaagtctaaggtagatattgatcctt

SEQ ID NO: 551011 - DNA, 33 bp, Homo sapien
gggaacagggcccaagcactatggtcaaggaag

SEQ ID NO: 551012 - DNA, 33 bp, Homo sapien
gggaacagggcccaaggactatggtcaaggaag

SEQ ID NO: 551013 - DNA, 33 bp, Homo sapien
gtgatatgactaccaacatataccaaaaattct

SEQ ID NO: 551014 - DNA, 33 bp, Homo sapien
gtgatatgactaccaatatataccaaaaattct

SEQ ID NO: 551015 - DNA, 33 bp, Homo sapien
tgaaaaattgaagatgaagagtaataaagtgtg

SEQ ID NO: 551016 - DNA, 33 bp, Homo sapien
tgaaaaattgaagatggagagtaataaagtgtg

SEQ ID NO: 551017 - DNA, 33 bp, Homo sapien
cagacacttctgagaacgagctacatcctctgt

SEQ ID NO: 551018 - DNA, 33 bp, Homo sapien
cagacacttctgagaatgagctacatcctctgt

SEQ ID NO: 551019 - DNA, 33 bp, Homo sapien
ccaaatgtggaccgacaggctataacagaatca

SEQ ID NO: 551020 - DNA, 33 bp, Homo sapien
ccaaatgtggaccgacgggctataacagaatca

SEQ ID NO: 551021 - DNA, 33 bp, Homo sapien
aagctaggtgtgtcctcaaatatctccacactt

SEQ ID NO: 551022 - DNA, 33 bp, Homo sapien
aagctaggtgtgtccttaaatatctccacactt

SEQ ID NO: 551023 - DNA, 33 bp, Homo sapien
cgctgatgccacaacaagaaggcacttgggcta

SEQ ID NO: 551024 - DNA, 33 bp, Homo sapien
cgctgatgccacaacaggaaggcacttgggcta

SEQ ID NO: 551025 - DNA, 33 bp, Homo sapien
gcctgcatggagaaaccaagaaatcctacgtga

SEQ ID NO: 551026 - DNA, 33 bp, Homo sapien
gcctgcatggagaaactaagaaatcctacgtga

SEQ ID NO: 551027 - DNA, 33 bp, Homo sapien
aattatgatgacgtaccattaaatgacatcagc

SEQ ID NO: 551028 - DNA, 33 bp, Homo sapien
aattatgatgacgtacgattaaatgacatcagc

SEQ ID NO: 551029 - DNA, 33 bp, Homo sapien
cattcctcactagatcactagactgtgtcacct

SEQ ID NO: 551030 - DNA, 33 bp, Homo sapien
cattcctcactagatccctagactgtgtcacct

SEQ ID NO: 551031 - DNA, 33 bp, Homo sapien
aagcaaatacctgtgaagctacaacttccgtga

SEQ ID NO: 551032 - DNA, 33 bp, Homo sapien
aagcaaatacctgtgatgctacaacttccgtga

SEQ ID NO: 551033 - DNA, 33 bp, Homo sapien
gctgtgtataggtagcaacagggcccctttgag

SEQ ID NO: 551034 - DNA, 33 bp, Homo sapien
gctgtgtataggtagcgacagggcccctttgag

SEQ ID NO: 551035 - DNA, 33 bp, Homo sapien
ccagacattttcaggactaatttgagaatgtgc

SEQ ID NO: 551036 - DNA, 33 bp, Homo sapien
ccagacattttcaggagtaatttgagaatgtgc

SEQ ID NO: 551037 - DNA, 33 bp, Homo sapien
gcacacttaacgtttccagtaagagaagcacag

SEQ ID NO: 551038 - DNA, 33 bp, Homo sapien
gcacacttaacgtttctagtaagagaagcacag

SEQ ID NO: 551039 - DNA, 33 bp, Homo sapien
gacagcaaaaggaaaaaatttgcgcaggagaat

SEQ ID NO: 551040 - DNA, 33 bp, Homo sapien
gacagcaaaaggaaaacatttgcgcaggagaat

SEQ ID NO: 551041 - DNA, 33 bp, Homo sapien
tgcaggtaggttctgtcaatgtgccccggcacc

SEQ ID NO: 551042 - DNA, 33 bp, Homo sapien
tgcaggtaggttctgtgaatgtgccccggcacc

SEQ ID NO: 551043 - DNA, 33 bp, Homo sapien
ttaaaatgtcttaaataattgtccagagaatat

SEQ ID NO: 551044 - DNA, 33 bp, Homo sapien
ttaaaatgtcttaaatcattgtccagagaatat

SEQ ID NO: 551045 - DNA, 33 bp, Homo sapien
tgtaatttttatgccactgatacctttttcaac

SEQ ID NO: 551046 - DNA, 33 bp, Homo sapien
tgtaatttttatgccagtgatacctttttcaac

SEQ ID NO: 551047 - DNA, 33 bp, Homo sapien
gaatcaaaacacgcacagcttcaaaacagttca

SEQ ID NO: 551048 - DNA, 33 bp, Homo sapien
gaatcaaaacacgcacggcttcaaaacagttca

SEQ ID NO: 551049 - DNA, 33 bp, Homo sapien
agacattgtccataaaatacctaatactatagt

SEQ ID NO: 551050 - DNA, 33 bp, Homo sapien
agacattgtccataaattacctaatactatagt

SEQ ID NO: 551051 - DNA, 33 bp, Homo sapien
cgtcaccggcattgaactacacttccaaggtta

SEQ ID NO: 551052 - DNA, 33 bp, Homo sapien
cgtcaccggcattgaattacacttccaaggtta

SEQ ID NO: 551053 - DNA, 33 bp, Homo sapien
ggtaaactaacacttacgcattgtatggaactg

SEQ ID NO: 551054 - DNA, 33 bp, Homo sapien
ggtaaactaacacttatgcattgtatggaactg

SEQ ID NO: 551055 - DNA, 33 bp, Homo sapien
caatcctggccaaatgcatactgaattgccact

SEQ ID NO: 551056 - DNA, 33 bp, Homo sapien
caatcctggccaaatgtatactgaattgccact

SEQ ID NO: 551057 - DNA, 33 bp, Homo sapien
aagcagtgcctagaaaaaggtatcactcaggag

SEQ ID NO: 551058 - DNA, 33 bp, Homo sapien
aagcagtgcctagaaacaggtatcactcaggag

SEQ ID NO: 551059 - DNA, 33 bp, Homo sapien
aggactggagagtttacgagatacaccatgacg

SEQ ID NO: 551060 - DNA, 33 bp, Homo sapien
aggactggagagtttatgagatacaccatgacg

SEQ ID NO: 551061 - DNA, 33 bp, Homo sapien
gaattacgattttatacgcccaacttaacttcc

SEQ ID NO: 551062 - DNA, 33 bp, Homo sapien
gaattacgattttatatgcccaacttaacttcc

SEQ ID NO: 551063 - DNA, 33 bp, Homo sapien
agagtgtgttccctgacgagggagtagatttca

SEQ ID NO: 551064 - DNA, 33 bp, Homo sapien
agagtgtgttccctgatgagggagtagatttca

SEQ ID NO: 551065 - DNA, 33 bp, Homo sapien
tgagtgtctcagaaagaaaactgcaggagtgca

SEQ ID NO: 551066 - DNA, 33 bp, Homo sapien
tgagtgtctcagaaaggaaactgcaggagtgca

SEQ ID NO: 551067 - DNA, 33 bp, Homo sapien
gactaagtgttcgttacggaaaagtgggatgtc

SEQ ID NO: 551068 - DNA, 33 bp, Homo sapien
gactaagtgttcgttatggaaaagtgggatgtc

SEQ ID NO: 551069 - DNA, 33 bp, Homo sapien
tggtggtcttggttcaaaatgggaagaggcatt

SEQ ID NO: 551070 - DNA, 33 bp, Homo sapien
tggtggtcttggttcacaatgggaagaggcatt

SEQ ID NO: 551071 - DNA, 33 bp, Homo sapien
gatgtgggtgtcacagcatggtccgtgtttaac

SEQ ID NO: 551072 - DNA, 33 bp, Homo sapien
gatgtgggtgtcacagtatggtccgtgtttaac

SEQ ID NO: 551073 - DNA, 33 bp, Homo sapien
acccgcgctacagacacggtgcttcattatgat

SEQ ID NO: 551074 - DNA, 33 bp, Homo sapien
acccgcgctacagacatggtgcttcattatgat

SEQ ID NO: 551075 - DNA, 33 bp, Homo sapien
tatgaggagattgtacagatattaaagaacaaa

SEQ ID NO: 551076 - DNA, 33 bp, Homo sapien
tatgaggagattgtacggatattaaagaacaaa

SEQ ID NO: 551077 - DNA, 33 bp, Homo sapien
ttatctcttcggtcccaagaatagccaaccaac

SEQ ID NO: 551078 - DNA, 33 bp, Homo sapien
ttatctcttcggtcccgagaatagccaaccaac

SEQ ID NO: 551079 - DNA, 33 bp, Homo sapien
tcttctgaggttgtaacgcctaactcaggcaag

SEQ ID NO: 551080 - DNA, 33 bp, Homo sapien
tcttctgaggttgtaatgcctaactcaggcaag

SEQ ID NO: 551081 - DNA, 33 bp, Homo sapien
gtctccacttaacctaagagtccaacattatcc

SEQ ID NO: 551082 - DNA, 33 bp, Homo sapien
gtctccacttaacctaggagtccaacattatcc

SEQ ID NO: 551083 - DNA, 33 bp, Homo sapien
aatgaagctgagcaataaacagggagctgctat

SEQ ID NO: 551084 - DNA, 33 bp, Homo sapien
aatgaagctgagcaatcaacagggagctgctat

SEQ ID NO: 551085 - DNA, 33 bp, Homo sapien
cttaagcaagaaagaacgtatcactttacagat

SEQ ID NO: 551086 - DNA, 33 bp, Homo sapien
cttaagcaagaaagaatgtatcactttacagat

SEQ ID NO: 551087 - DNA, 33 bp, Homo sapien
tatcctaaatatacaaagagttctcagatatca

SEQ ID NO: 551088 - DNA, 33 bp, Homo sapien
tatcctaaatatacaaggagttctcagatatca

SEQ ID NO: 551089 - DNA, 33 bp, Homo sapien
cctcaaatgaactaaacagtaacttgaaacctt

SEQ ID NO: 551090 - DNA, 33 bp, Homo sapien
cctcaaatgaactaaagagtaacttgaaacctt

SEQ ID NO: 551091 - DNA, 33 bp, Homo sapien
ggaacactgttctttcccagtttattcaaattt

SEQ ID NO: 551092 - DNA, 33 bp, Homo sapien
ggaacactgttctttcgcagtttattcaaattt

SEQ ID NO: 551093 - DNA, 33 bp, Homo sapien
cccgcctctctaaaaaagattagcttcacaatg

SEQ ID NO: 551094 - DNA, 33 bp, Homo sapien
cccgcctctctaaaaaggattagcttcacaatg

SEQ ID NO: 551095 - DNA, 33 bp, Homo sapien
gaagcctatgcaaagacgactactaatcaaatg

SEQ ID NO: 551096 - DNA, 33 bp, Homo sapien
gaagcctatgcaaagatgactactaatcaaatg

SEQ ID NO: 551097 - DNA, 33 bp, Homo sapien
cttctaattgacttaccggatgcaaagctttca

SEQ ID NO: 551098 - DNA, 33 bp, Homo sapien
cttctaattgacttactggatgcaaagctttca

SEQ ID NO: 551099 - DNA, 33 bp, Homo sapien
caacctcaagtcacgcacaaatacaagggtctt

SEQ ID NO: 551100 - DNA, 33 bp, Homo sapien
caacctcaagtcacgcgcaaatacaagggtctt

SEQ ID NO: 551101 - DNA, 33 bp, Homo sapien
ggagcaggaatccaaacggagttcccaggtctc

SEQ ID NO: 551102 - DNA, 33 bp, Homo sapien
ggagcaggaatccaaatggagttcccaggtctc

SEQ ID NO: 551103 - DNA, 33 bp, Homo sapien
gctgggagatgcttggacacagagagtgaggtg

SEQ ID NO: 551104 - DNA, 33 bp, Homo sapien
gctgggagatgcttgggcacagagagtgaggtg

SEQ ID NO: 551105 - DNA, 33 bp, Homo sapien
tgactccgggtttccccagcccagcacaaggac

SEQ ID NO: 551106 - DNA, 33 bp, Homo sapien
tgactccgggtttccctagcccagcacaaggac

SEQ ID NO: 551107 - DNA, 33 bp, Homo sapien
agggaaaaaaatgcagcatacttctaattgcct

SEQ ID NO: 551108 - DNA, 33 bp, Homo sapien
agggaaaaaaatgcagtatacttctaattgcct

SEQ ID NO: 551109 - DNA, 33 bp, Homo sapien
tttattaaagagaatgaatagacatcaaataga

SEQ ID NO: 551110 - DNA, 33 bp, Homo sapien
tttattaaagagaatggatagacatcaaataga

SEQ ID NO: 551111 - DNA, 33 bp, Homo sapien
aacatctgagggctgcagaggccgagaaaaaca

SEQ ID NO: 551112 - DNA, 33 bp, Homo sapien
aacatctgagggctgctgaggccgagaaaaaca

SEQ ID NO: 551113 - DNA, 33 bp, Homo sapien
aaaaatgcattctgtcaatctgctgaagcacag

SEQ ID NO: 551114 - DNA, 33 bp, Homo sapien
aaaaatgcattctgtcgatctgctgaagcacag

SEQ ID NO: 551115 - DNA, 33 bp, Homo sapien
cttagaaaataccagacccacgaagaacaaatg

SEQ ID NO: 551116 - DNA, 33 bp, Homo sapien
cttagaaaataccagatccacgaagaacaaatg

SEQ ID NO: 551117 - DNA, 33 bp, Homo sapien
acatactgaattcaacacaagaaatatcatata

SEQ ID NO: 551118 - DNA, 33 bp, Homo sapien
acatactgaattcaacgcaagaaatatcatata

SEQ ID NO: 551119 - DNA, 33 bp, Homo sapien
agctccagtgtagacaacgagactgatctcttc

SEQ ID NO: 551120 - DNA, 33 bp, Homo sapien
agctccagtgtagacagcgagactgatctcttc

SEQ ID NO: 551121 - DNA, 33 bp, Homo sapien
ctgctgcaaatcctcactcctggttctactggg

SEQ ID NO: 551122 - DNA, 33 bp, Homo sapien
ctgctgcaaatcctcattcctggttctactggg

SEQ ID NO: 551123 - DNA, 33 bp, Homo sapien
ctccaagttcttcaataaccggatgagaatctg

SEQ ID NO: 551124 - DNA, 33 bp, Homo sapien
ctccaagttcttcaatgaccggatgagaatctg

SEQ ID NO: 551125 - DNA, 33 bp, Homo sapien
ctgttctgttttgaccagatggttcatcctagc

SEQ ID NO: 551126 - DNA, 33 bp, Homo sapien
ctgttctgttttgaccggatggttcatcctagc

SEQ ID NO: 551127 - DNA, 33 bp, Homo sapien
atgcttaagtgttggaaaggagagcgacagcac

SEQ ID NO: 551128 - DNA, 33 bp, Homo sapien
atgcttaagtgttggagaggagagcgacagcac

SEQ ID NO: 551129 - DNA, 33 bp, Homo sapien
gtctgtggatctacgcaagtgcttagatagaaa

SEQ ID NO: 551130 - DNA, 33 bp, Homo sapien
gtctgtggatctacgcgagtgcttagatagaaa

SEQ ID NO: 551131 - DNA, 33 bp, Homo sapien
atccttatctgtgggacgaaaattaagttaggg

SEQ ID NO: 551132 - DNA, 33 bp, Homo sapien
atccttatctgtgggatgaaaattaagttaggg

SEQ ID NO: 551133 - DNA, 33 bp, Homo sapien
ggagagttctggatcacctgtgaatacgcatgg

SEQ ID NO: 551134 - DNA, 33 bp, Homo sapien
ggagagttctggatcatctgtgaatacgcatgg

SEQ ID NO: 551135 - DNA, 33 bp, Homo sapien
aaactccaatgatgtccctctgcttacaaatga

SEQ ID NO: 551136 - DNA, 33 bp, Homo sapien
aaactccaatgatgtctctctgcttacaaatga

SEQ ID NO: 551137 - DNA, 33 bp, Homo sapien
tcatcacagtgctttacatggcaaaaaatcaga

SEQ ID NO: 551138 - DNA, 33 bp, Homo sapien
tcatcacagtgctttatatggcaaaaaatcaga

SEQ ID NO: 551139 - DNA, 33 bp, Homo sapien
tgcagcgtggaatttgaaattgtggtaacagct

SEQ ID NO: 551140 - DNA, 33 bp, Homo sapien
tgcagcgtggaatttggaattgtggtaacagct

SEQ ID NO: 551141 - DNA, 33 bp, Homo sapien
cgctacgttatggtaccgcacacacgcacaagc

SEQ ID NO: 551142 - DNA, 33 bp, Homo sapien
cgctacgttatggtactgcacacacgcacaagc

SEQ ID NO: 551143 - DNA, 33 bp, Homo sapien
ttgtctctgaccctgaagtctcatatcttagac

SEQ ID NO: 551144 - DNA, 33 bp, Homo sapien
ttgtctctgaccctgatgtctcatatcttagac

SEQ ID NO: 551145 - DNA, 33 bp, Homo sapien
tgcagcaacaaaggacacttctgatttgcaccc

SEQ ID NO: 551146 - DNA, 33 bp, Homo sapien
tgcagcaacaaaggacgcttctgatttgcaccc

SEQ ID NO: 551147 - DNA, 33 bp, Homo sapien
agggtttgcttcagagaaagaatctagaggtgt

SEQ ID NO: 551148 - DNA, 33 bp, Homo sapien
agggtttgcttcagaggaagaatctagaggtgt

SEQ ID NO: 551149 - DNA, 33 bp, Homo sapien
tcacagccaatgcttaccaagtatttgcaatgt

SEQ ID NO: 551150 - DNA, 33 bp, Homo sapien
tcacagccaatgcttatcaagtatttgcaatgt

SEQ ID NO: 551151 - DNA, 33 bp, Homo sapien
cattgctacgtcctcacgtgatagaagaggcaa

SEQ ID NO: 551152 - DNA, 33 bp, Homo sapien
cattgctacgtcctcatgtgatagaagaggcaa

SEQ ID NO: 551153 - DNA, 33 bp, Homo sapien
ctctctccctctgagcacacccggaggaaaggc

SEQ ID NO: 551154 - DNA, 33 bp, Homo sapien
ctctctccctctgagcgcacccggaggaaaggc

SEQ ID NO: 551155 - DNA, 33 bp, Homo sapien
cctcttctgagatttcacccagcctgatgaggc

SEQ ID NO: 551156 - DNA, 33 bp, Homo sapien
cctcttctgagatttcgcccagcctgatgaggc

SEQ ID NO: 551157 - DNA, 33 bp, Homo sapien
aggaatgtggatttcccctcatttccagaacat

SEQ ID NO: 551158 - DNA, 33 bp, Homo sapien
aggaatgtggatttcctctcatttccagaacat

SEQ ID NO: 551159 - DNA, 33 bp, Homo sapien
acattgctctaaaggacccctgtgcctatcaga

SEQ ID NO: 551160 - DNA, 33 bp, Homo sapien
acattgctctaaaggatccctgtgcctatcaga

SEQ ID NO: 551161 - DNA, 33 bp, Homo sapien
agagcttctccactgaacaagaacaatgactta

SEQ ID NO: 551162 - DNA, 33 bp, Homo sapien
agagcttctccactgaccaagaacaatgactta

SEQ ID NO: 551163 - DNA, 33 bp, Homo sapien
tgtccttggaggatgaacatgaagagtctttgc

SEQ ID NO: 551164 - DNA, 33 bp, Homo sapien
tgtccttggaggatgatcatgaagagtctttgc

SEQ ID NO: 551165 - DNA, 33 bp, Homo sapien
tgtctactccagagcaagtgccacacaacttgg

SEQ ID NO: 551166 - DNA, 33 bp, Homo sapien
tgtctactccagagcaggtgccacacaacttgg

SEQ ID NO: 551167 - DNA, 33 bp, Homo sapien
agcccctgcagaattacctacttttggagccac

SEQ ID NO: 551168 - DNA, 33 bp, Homo sapien
agcccctgcagaattatctacttttggagccac

SEQ ID NO: 551169 - DNA, 33 bp, Homo sapien
ccctgttcatctccccaagtcatgaccagctct

SEQ ID NO: 551170 - DNA, 33 bp, Homo sapien
ccctgttcatctcccccagtcatgaccagctct

SEQ ID NO: 551171 - DNA, 33 bp, Homo sapien
gactgtgaaaataaaacggaaatgccaagtcaa

SEQ ID NO: 551172 - DNA, 33 bp, Homo sapien
gactgtgaaaataaaatggaaatgccaagtcaa

SEQ ID NO: 551173 - DNA, 33 bp, Homo sapien
ccagagtgagaccaaacgcttgatttatgataa

SEQ ID NO: 551174 - DNA, 33 bp, Homo sapien
ccagagtgagaccaaatgcttgatttatgataa

SEQ ID NO: 551175 - DNA, 33 bp, Homo sapien
ttcattatagtgaacactgaggttgactttcca

SEQ ID NO: 551176 - DNA, 33 bp, Homo sapien
ttcattatagtgaacattgaggttgactttcca

SEQ ID NO: 551177 - DNA, 33 bp, Homo sapien
tacgtaaccaattccacgtgtaaagttgtttct

SEQ ID NO: 551178 - DNA, 33 bp, Homo sapien
tacgtaaccaattccatgtgtaaagttgtttct

SEQ ID NO: 551179 - DNA, 33 bp, Homo sapien
tttccgtaaagcctgccaagcctgactcagtga

SEQ ID NO: 551180 - DNA, 33 bp, Homo sapien
tttccgtaaagcctgctaagcctgactcagtga

SEQ ID NO: 551181 - DNA, 33 bp, Homo sapien
tcatgactgtttcacaaattcgtattccaggta

SEQ ID NO: 551182 - DNA, 33 bp, Homo sapien
tcatgactgtttcacagattcgtattccaggta

SEQ ID NO: 551183 - DNA, 33 bp, Homo sapien
ttatctttagtccctgaaacaactttgcattgt

SEQ ID NO: 551184 - DNA, 33 bp, Homo sapien
ttatctttagtccctgcaacaactttgcattgt

SEQ ID NO: 551185 - DNA, 33 bp, Homo sapien
tcctgtggagtgataaaaggagaaacacttctc

SEQ ID NO: 551186 - DNA, 33 bp, Homo sapien
tcctgtggagtgataagaggagaaacacttctc

SEQ ID NO: 551187 - DNA, 33 bp, Homo sapien
aaccggttctcacccagtcctcctagctacctg

SEQ ID NO: 551188 - DNA, 33 bp, Homo sapien
aaccggttctcacccattcctcctagctacctg

SEQ ID NO: 551189 - DNA, 33 bp, Homo sapien
ggactccggtgacttaaggagacagatgctgta

SEQ ID NO: 551190 - DNA, 33 bp, Homo sapien
ggactccggtgacttacggagacagatgctgta

SEQ ID NO: 551191 - DNA, 33 bp, Homo sapien
gtgaacaagatttgtaaagtcagctccactgtg

SEQ ID NO: 551192 - DNA, 33 bp, Homo sapien
gtgaacaagatttgtacagtcagctccactgtg

SEQ ID NO: 551193 - DNA, 33 bp, Homo sapien
ctccatgcaggcaacaatatggatgaatgtgaa

SEQ ID NO: 551194 - DNA, 33 bp, Homo sapien
ctccatgcaggcaacagtatggatgaatgtgaa

SEQ ID NO: 551195 - DNA, 33 bp, Homo sapien
ctggtactgaggaaacagcagcccggacagtga

SEQ ID NO: 551196 - DNA, 33 bp, Homo sapien
ctggtactgaggaaacggcagcccggacagtga

SEQ ID NO: 551197 - DNA, 33 bp, Homo sapien
ccttgctgaagatgagaaatgccacattttttt

SEQ ID NO: 551198 - DNA, 33 bp, Homo sapien
ccttgctgaagatgagtaatgccacattttttt

SEQ ID NO: 551199 - DNA, 33 bp, Homo sapien
tttaaaaataaccaacaacaagctatatcaggc

SEQ ID NO: 551200 - DNA, 33 bp, Homo sapien
tttaaaaataaccaacgacaagctatatcaggc

SEQ ID NO: 551201 - DNA, 33 bp, Homo sapien
attatttctccagttcacattatttagccagag

SEQ ID NO: 551202 - DNA, 33 bp, Homo sapien
attatttctccagttcgcattatttagccagag

SEQ ID NO: 551203 - DNA, 33 bp, Homo sapien
gtccacccacacaaataagcttcctctgtcaaa

SEQ ID NO: 551204 - DNA, 33 bp, Homo sapien
gtccacccacacaaatgagcttcctctgtcaaa

SEQ ID NO: 551205 - DNA, 33 bp, Homo sapien
agcagccctctctttaaatacagaaaaatatct

SEQ ID NO: 551206 - DNA, 33 bp, Homo sapien
agcagccctctctttagatacagaaaaatatct

SEQ ID NO: 551207 - DNA, 33 bp, Homo sapien
tagatgcatattctgacggccttctttggaaag

SEQ ID NO: 551208 - DNA, 33 bp, Homo sapien
tagatgcatattctgatggccttctttggaaag

SEQ ID NO: 551209 - DNA, 33 bp, Homo sapien
gatgaagaataattaacacaacatatgctttca

SEQ ID NO: 551210 - DNA, 33 bp, Homo sapien
gatgaagaataattaagacaacatatgctttca

SEQ ID NO: 551211 - DNA, 33 bp, Homo sapien
cccttctatgtcttccacctgctcctgccatgt

SEQ ID NO: 551212 - DNA, 33 bp, Homo sapien
cccttctatgtcttcctcctgctcctgccatgt

SEQ ID NO: 551213 - DNA, 33 bp, Homo sapien
ctacaatgaattagtaaaaggtaggcagtccag

SEQ ID NO: 551214 - DNA, 33 bp, Homo sapien
ctacaatgaattagtacaaggtaggcagtccag

SEQ ID NO: 551215 - DNA, 33 bp, Homo sapien
agaaaaatgggcaagaacttgtagtggaatggt

SEQ ID NO: 551216 - DNA, 33 bp, Homo sapien
agaaaaatgggcaagatcttgtagtggaatggt

SEQ ID NO: 551217 - DNA, 33 bp, Homo sapien
ttgtttctctttacaccaccattccactacaag

SEQ ID NO: 551218 - DNA, 33 bp, Homo sapien
ttgtttctctttacactaccattccactacaag

SEQ ID NO: 551219 - DNA, 33 bp, Homo sapien
gatttcacactgagacagggaagaagtggtgat

SEQ ID NO: 551220 - DNA, 33 bp, Homo sapien
gatttcacactgagacggggaagaagtggtgat

SEQ ID NO: 551221 - DNA, 33 bp, Homo sapien
gtttacagtttattgtgaagtgcacgtttggtt

SEQ ID NO: 551222 - DNA, 33 bp, Homo sapien
gtttacagtttattgttaagtgcacgtttggtt

SEQ ID NO: 551223 - DNA, 33 bp, Homo sapien
cctgtccccacttacccgctctgccctgcaatc

SEQ ID NO: 551224 - DNA, 33 bp, Homo sapien
cctgtccccacttacctgctctgccctgcaatc

SEQ ID NO: 551225 - DNA, 33 bp, Homo sapien
cttctactgactgtggaaagaggtacaagtgcc

SEQ ID NO: 551226 - DNA, 33 bp, Homo sapien
cttctactgactgtgggaagaggtacaagtgcc

SEQ ID NO: 551227 - DNA, 33 bp, Homo sapien
taggtttcaaataaaacgcaaaggttgagaaaa

SEQ ID NO: 551228 - DNA, 33 bp, Homo sapien
taggtttcaaataaaatgcaaaggttgagaaaa

SEQ ID NO: 551229 - DNA, 33 bp, Homo sapien
gggaatgatttctctacgcaaaacttattccat

SEQ ID NO: 551230 - DNA, 33 bp, Homo sapien
gggaatgatttctctatgcaaaacttattccat

SEQ ID NO: 551231 - DNA, 33 bp, Homo sapien
tgattgttcttcattccatattgcactgaagtt

SEQ ID NO: 551232 - DNA, 33 bp, Homo sapien
tgattgttcttcattctatattgcactgaagtt

SEQ ID NO: 551233 - DNA, 33 bp, Homo sapien
agatgttataaatttgaacggaagacacaccag

SEQ ID NO: 551234 - DNA, 33 bp, Homo sapien
agatgttataaatttggacggaagacacaccag

SEQ ID NO: 551235 - DNA, 33 bp, Homo sapien
ggacaaggcgggaccaaggtttgatgccacgag

SEQ ID NO: 551236 - DNA, 33 bp, Homo sapien
ggacaaggcgggaccagggtttgatgccacgag

SEQ ID NO: 551237 - DNA, 33 bp, Homo sapien
caaggaagtgcccctgcatcttggaacagctta

SEQ ID NO: 551238 - DNA, 33 bp, Homo sapien
caaggaagtgcccctgtatcttggaacagctta

SEQ ID NO: 551239 - DNA, 33 bp, Homo sapien
tcttgattactgtagcaatatgataagccttaa

SEQ ID NO: 551240 - DNA, 33 bp, Homo sapien
tcttgattactgtagctatatgataagccttaa

SEQ ID NO: 551241 - DNA, 33 bp, Homo sapien
tggatttctccctcccccgattttcagctgtgt

SEQ ID NO: 551242 - DNA, 33 bp, Homo sapien
tggatttctccctccctcgattttcagctgtgt

SEQ ID NO: 551243 - DNA, 33 bp, Homo sapien
ctaaccaagttcccaccgtgatacgatgatttg

SEQ ID NO: 551244 - DNA, 33 bp, Homo sapien
ctaaccaagttcccactgtgatacgatgatttg

SEQ ID NO: 551245 - DNA, 33 bp, Homo sapien
ttcattcttggccacaaccctggtactgacaaa

SEQ ID NO: 551246 - DNA, 33 bp, Homo sapien
ttcattcttggccacatccctggtactgacaaa

SEQ ID NO: 551247 - DNA, 33 bp, Homo sapien
agttacaatttactgaacatcttcttggcatct

SEQ ID NO: 551248 - DNA, 33 bp, Homo sapien
agttacaatttactgagcatcttcttggcatct

SEQ ID NO: 551249 - DNA, 33 bp, Homo sapien
acccatactatgccaagcacaatactcaatgtg

SEQ ID NO: 551250 - DNA, 33 bp, Homo sapien
acccatactatgccaatcacaatactcaatgtg

SEQ ID NO: 551251 - DNA, 33 bp, Homo sapien
ggtcaaaggcaaataccggctctcgaacgaaca

SEQ ID NO: 551252 - DNA, 33 bp, Homo sapien
ggtcaaaggcaaatactggctctcgaacgaaca

SEQ ID NO: 551253 - DNA, 33 bp, Homo sapien
ttcattagaaaataaaaactgggcatttgatta

SEQ ID NO: 551254 - DNA, 33 bp, Homo sapien
ttcattagaaaataaatactgggcatttgatta

SEQ ID NO: 551255 - DNA, 33 bp, Homo sapien
acaaccccacgtaggacagaggtttcacagagc

SEQ ID NO: 551256 - DNA, 33 bp, Homo sapien
acaaccccacgtaggagagaggtttcacagagc

SEQ ID NO: 551257 - DNA, 33 bp, Homo sapien
gtctccacagtgtagacgctacccacccattag

SEQ ID NO: 551258 - DNA, 33 bp, Homo sapien
gtctccacagtgtagatgctacccacccattag

SEQ ID NO: 551259 - DNA, 33 bp, Homo sapien
tggcttagcaaaaagagatgtttagtggcttgc

SEQ ID NO: 551260 - DNA, 33 bp, Homo sapien
tggcttagcaaaaagatatgtttagtggcttgc

SEQ ID NO: 551261 - DNA, 33 bp, Homo sapien
acagagctctctgcttcaactcaacgtcacggc

SEQ ID NO: 551262 - DNA, 33 bp, Homo sapien
acagagctctctgcttgaactcaacgtcacggc

SEQ ID NO: 551263 - DNA, 33 bp, Homo sapien
tcagatagatacgttaagtgagttgcttttctt

SEQ ID NO: 551264 - DNA, 33 bp, Homo sapien
tcagatagatacgttaggtgagttgcttttctt

SEQ ID NO: 551265 - DNA, 33 bp, Homo sapien
taattctggctcataaataatagtagcaaaaag

SEQ ID NO: 551266 - DNA, 33 bp, Homo sapien
taattctggctcataagtaatagtagcaaaaag

SEQ ID NO: 551267 - DNA, 33 bp, Homo sapien
gcagaacacactcaataacagttaatcaagtca

SEQ ID NO: 551268 - DNA, 33 bp, Homo sapien
gcagaacacactcaatcacagttaatcaagtca

SEQ ID NO: 551269 - DNA, 33 bp, Homo sapien
agatgggagtttttacactatagacattggcaa

SEQ ID NO: 551270 - DNA, 33 bp, Homo sapien
agatgggagtttttacgctatagacattggcaa

SEQ ID NO: 551271 - DNA, 33 bp, Homo sapien
cagcacattatgaaaactcaactgctaccttgc

SEQ ID NO: 551272 - DNA, 33 bp, Homo sapien
cagcacattatgaaaagtcaactgctaccttgc

SEQ ID NO: 551273 - DNA, 33 bp, Homo sapien
aagcttctaaagatgaagaaggcacagaaagga

SEQ ID NO: 551274 - DNA, 33 bp, Homo sapien
aagcttctaaagatgacgaaggcacagaaagga

SEQ ID NO: 551275 - DNA, 33 bp, Homo sapien
agtgtatcaaatcgtcaataaaagtgtggcaga

SEQ ID NO: 551276 - DNA, 33 bp, Homo sapien
agtgtatcaaatcgtccataaaagtgtggcaga

SEQ ID NO: 551277 - DNA, 33 bp, Homo sapien
ggcagggacagggaaccgatggagccctcagca

SEQ ID NO: 551278 - DNA, 33 bp, Homo sapien
ggcagggacagggaactgatggagccctcagca

SEQ ID NO: 551279 - DNA, 33 bp, Homo sapien
aaaagccaataaagaaaggccagagggagagaa

SEQ ID NO: 551280 - DNA, 33 bp, Homo sapien
aaaagccaataaagaagggccagagggagagaa

SEQ ID NO: 551281 - DNA, 33 bp, Homo sapien
ggtgttatctgctcaaagagaccagagcgtttg

SEQ ID NO: 551282 - DNA, 33 bp, Homo sapien
ggtgttatctgctcaaggagaccagagcgtttg

SEQ ID NO: 551283 - DNA, 33 bp, Homo sapien
gtgccccacagcttaactgcgccccaaacctga

SEQ ID NO: 551284 - DNA, 33 bp, Homo sapien
gtgccccacagcttaagtgcgccccaaacctga

SEQ ID NO: 551285 - DNA, 33 bp, Homo sapien
ttaataaaggtggagaagtaattttgagggtga

SEQ ID NO: 551286 - DNA, 33 bp, Homo sapien
ttaataaaggtggagaggtaattttgagggtga

SEQ ID NO: 551287 - DNA, 33 bp, Homo sapien
cagttgagtgaatggacagaagaatgagtgaag

SEQ ID NO: 551288 - DNA, 33 bp, Homo sapien
cagttgagtgaatggatagaagaatgagtgaag

SEQ ID NO: 551289 - DNA, 33 bp, Homo sapien
tggagtccgttcacacagtgggaagacaggaga

SEQ ID NO: 551290 - DNA, 33 bp, Homo sapien
tggagtccgttcacacggtgggaagacaggaga

SEQ ID NO: 551291 - DNA, 33 bp, Homo sapien
agtgtaaattgccccaaactttctctggaaata

SEQ ID NO: 551292 - DNA, 33 bp, Homo sapien
agtgtaaattgccccagactttctctggaaata

SEQ ID NO: 551293 - DNA, 33 bp, Homo sapien
ttgcttacagaataaacgtggaatgaaatgtac

SEQ ID NO: 551294 - DNA, 33 bp, Homo sapien
ttgcttacagaataaatgtggaatgaaatgtac

SEQ ID NO: 551295 - DNA, 33 bp, Homo sapien
tcctgtgctggggggacggaaggcaacgaagaa

SEQ ID NO: 551296 - DNA, 33 bp, Homo sapien
tcctgtgctggggggatggaaggcaacgaagaa

SEQ ID NO: 551297 - DNA, 33 bp, Homo sapien
tttcagctcagatggaggtggcgtggggtcaac

SEQ ID NO: 551298 - DNA, 33 bp, Homo sapien
tttcagctcagatggatgtggcgtggggtcaac

SEQ ID NO: 551299 - DNA, 33 bp, Homo sapien
agtccatgcctaccaaaggcagcttagtgagga

SEQ ID NO: 551300 - DNA, 33 bp, Homo sapien
agtccatgcctaccaacggcagcttagtgagga

SEQ ID NO: 551301 - DNA, 33 bp, Homo sapien
tgcgtgatatctctcgcacacatgtgcacgtgc

SEQ ID NO: 551302 - DNA, 33 bp, Homo sapien
tgcgtgatatctctcgtacacatgtgcacgtgc

SEQ ID NO: 551303 - DNA, 33 bp, Homo sapien
catgggttaaaatcaagatacaattctcatgcc

SEQ ID NO: 551304 - DNA, 33 bp, Homo sapien
catgggttaaaatcaatatacaattctcatgcc

SEQ ID NO: 551305 - DNA, 33 bp, Homo sapien
aggagaggagagtcaaatctgggaagggcaccc

SEQ ID NO: 551306 - DNA, 33 bp, Homo sapien
aggagaggagagtcaagtctgggaagggcaccc

SEQ ID NO: 551307 - DNA, 33 bp, Homo sapien
actttccccctaaccactatcatggccgtggag

SEQ ID NO: 551308 - DNA, 33 bp, Homo sapien
actttccccctaaccagtatcatggccgtggag

SEQ ID NO: 551309 - DNA, 33 bp, Homo sapien
agaggaacctggtgaaggtcaacttcctgacat

SEQ ID NO: 551310 - DNA, 33 bp, Homo sapien
agaggaacctggtgaatgtcaacttcctgacat

SEQ ID NO: 551311 - DNA, 33 bp, Homo sapien
acactgaaaaaagagcactaaggttgatctgta

SEQ ID NO: 551312 - DNA, 33 bp, Homo sapien
acactgaaaaaagagccctaaggttgatctgta

SEQ ID NO: 551313 - DNA, 33 bp, Homo sapien
aaaagtgggaaaccaacaatctaagaatgagga

SEQ ID NO: 551314 - DNA, 33 bp, Homo sapien
aaaagtgggaaaccaataatctaagaatgagga

SEQ ID NO: 551315 - DNA, 33 bp, Homo sapien
taaatgagataatgcacctagaactcttagctc

SEQ ID NO: 551316 - DNA, 33 bp, Homo sapien
taaatgagataatgcatctagaactcttagctc

SEQ ID NO: 551317 - DNA, 33 bp, Homo sapien
caaaaacagcgtgagacactctgagggtcctct

SEQ ID NO: 551318 - DNA, 33 bp, Homo sapien
caaaaacagcgtgagagactctgagggtcctct

SEQ ID NO: 551319 - DNA, 33 bp, Homo sapien
aatcaaacttcaaaaaattgaatcagtcaatct

SEQ ID NO: 551320 - DNA, 33 bp, Homo sapien
aatcaaacttcaaaaagttgaatcagtcaatct

SEQ ID NO: 551321 - DNA, 33 bp, Homo sapien
atgctactaagtttacagaattttctcacttaa

SEQ ID NO: 551322 - DNA, 33 bp, Homo sapien
atgctactaagtttacggaattttctcacttaa

SEQ ID NO: 551323 - DNA, 33 bp, Homo sapien
caatcatttggattcaagccaattcaaaatgct

SEQ ID NO: 551324 - DNA, 33 bp, Homo sapien
caatcatttggattcacgccaattcaaaatgct

SEQ ID NO: 551325 - DNA, 33 bp, Homo sapien
gcgcatagaatttacaaagcagtcctgagagaa

SEQ ID NO: 551326 - DNA, 33 bp, Homo sapien
gcgcatagaatttacacagcagtcctgagagaa

SEQ ID NO: 551327 - DNA, 33 bp, Homo sapien
tggctgctgagggcacaagcccccacaaaggaa

SEQ ID NO: 551328 - DNA, 33 bp, Homo sapien
tggctgctgagggcacgagcccccacaaaggaa

SEQ ID NO: 551329 - DNA, 33 bp, Homo sapien
agaaagcataatgtacaatttttccattttgta

SEQ ID NO: 551330 - DNA, 33 bp, Homo sapien
agaaagcataatgtacgatttttccattttgta

SEQ ID NO: 551331 - DNA, 33 bp, Homo sapien
gcacatcccttgataactctgtgtaattaattg

SEQ ID NO: 551332 - DNA, 33 bp, Homo sapien
gcacatcccttgataagtctgtgtaattaattg

SEQ ID NO: 551333 - DNA, 33 bp, Homo sapien
atatcatcttgcataaacgtgaagaatataatg

SEQ ID NO: 551334 - DNA, 33 bp, Homo sapien
atatcatcttgcataatcgtgaagaatataatg

SEQ ID NO: 551335 - DNA, 33 bp, Homo sapien
ataggccaaaggtcacagcagaacaaccaggcc

SEQ ID NO: 551336 - DNA, 33 bp, Homo sapien
ataggccaaaggtcacggcagaacaaccaggcc

SEQ ID NO: 551337 - DNA, 33 bp, Homo sapien
tcgtggcagccttgtgcaaccgtgcaatcatag

SEQ ID NO: 551338 - DNA, 33 bp, Homo sapien
tcgtggcagccttgtggaaccgtgcaatcatag

SEQ ID NO: 551339 - DNA, 33 bp, Homo sapien
cacaccctgctctgtacggctgccctgtaagta

SEQ ID NO: 551340 - DNA, 33 bp, Homo sapien
cacaccctgctctgtatggctgccctgtaagta

SEQ ID NO: 551341 - DNA, 33 bp, Homo sapien
acctccttcagtctaccagtgtccttaaggcct

SEQ ID NO: 551342 - DNA, 33 bp, Homo sapien
acctccttcagtctactagtgtccttaaggcct

SEQ ID NO: 551343 - DNA, 33 bp, Homo sapien
ccgaagctcatctgaccacaaactgtgttttaa

SEQ ID NO: 551344 - DNA, 33 bp, Homo sapien
ccgaagctcatctgactacaaactgtgttttaa

SEQ ID NO: 551345 - DNA, 33 bp, Homo sapien
agacaattagcacctgaaacatctagagtgtaa

SEQ ID NO: 551346 - DNA, 33 bp, Homo sapien
agacaattagcacctggaacatctagagtgtaa

SEQ ID NO: 551347 - DNA, 33 bp, Homo sapien
aaatggaatatttggtcacattctcctgtagag

SEQ ID NO: 551348 - DNA, 33 bp, Homo sapien
aaatggaatatttggttacattctcctgtagag

SEQ ID NO: 551349 - DNA, 33 bp, Homo sapien
gttcaaagaagcaaaaagttatgattaggaaat

SEQ ID NO: 551350 - DNA, 33 bp, Homo sapien
gttcaaagaagcaaaaggttatgattaggaaat

SEQ ID NO: 551351 - DNA, 33 bp, Homo sapien
gctatgctggaagaggcatcagagaagtcagag

SEQ ID NO: 551352 - DNA, 33 bp, Homo sapien
gctatgctggaagaggtatcagagaagtcagag

SEQ ID NO: 551353 - DNA, 33 bp, Homo sapien
ctctaatcacttcacccgcgttacctcatcgac

SEQ ID NO: 551354 - DNA, 33 bp, Homo sapien
ctctaatcacttcacctgcgttacctcatcgac

SEQ ID NO: 551355 - DNA, 33 bp, Homo sapien
atccctcccttttcaacgagagaaagcctggct

SEQ ID NO: 551356 - DNA, 33 bp, Homo sapien
atccctcccttttcaatgagagaaagcctggct

SEQ ID NO: 551357 - DNA, 33 bp, Homo sapien
tcttccttggataaacactcactcaggtccttt

SEQ ID NO: 551358 - DNA, 33 bp, Homo sapien
tcttccttggataaacgctcactcaggtccttt

SEQ ID NO: 551359 - DNA, 33 bp, Homo sapien
gaagctagcacaggacgcgcgtgctgacataga

SEQ ID NO: 551360 - DNA, 33 bp, Homo sapien
gaagctagcacaggactcgcgtgctgacataga

SEQ ID NO: 551361 - DNA, 33 bp, Homo sapien
aaaataagccagacacagaaagcaaatactgta

SEQ ID NO: 551362 - DNA, 33 bp, Homo sapien
aaaataagccagacacggaaagcaaatactgta

SEQ ID NO: 551363 - DNA, 33 bp, Homo sapien
attttcatacgtctgcacacatacacaaatgca

SEQ ID NO: 551364 - DNA, 33 bp, Homo sapien
attttcatacgtctgcgcacatacacaaatgca

SEQ ID NO: 551365 - DNA, 33 bp, Homo sapien
tccgtctgtgcttaacagcttgtccggtttgtc

SEQ ID NO: 551366 - DNA, 33 bp, Homo sapien
tccgtctgtgcttaacggcttgtccggtttgtc

SEQ ID NO: 551367 - DNA, 33 bp, Homo sapien
ggtttgtgcctatgcagggtttaaagaaatgga

SEQ ID NO: 551368 - DNA, 33 bp, Homo sapien
ggtttgtgcctatgcatggtttaaagaaatgga

SEQ ID NO: 551369 - DNA, 33 bp, Homo sapien
taagattgaaaagcaacgaccatcatagtaaca

SEQ ID NO: 551370 - DNA, 33 bp, Homo sapien
taagattgaaaagcaatgaccatcatagtaaca

SEQ ID NO: 551371 - DNA, 33 bp, Homo sapien
tgttaatccgtgggcccagtttccattttcttt

SEQ ID NO: 551372 - DNA, 33 bp, Homo sapien
tgttaatccgtgggcctagtttccattttcttt

SEQ ID NO: 551373 - DNA, 33 bp, Homo sapien
tgtcctaagcagctgaaacaattctggaaagag

SEQ ID NO: 551374 - DNA, 33 bp, Homo sapien
tgtcctaagcagctgagacaattctggaaagag

SEQ ID NO: 551375 - DNA, 33 bp, Homo sapien
cattgcttttaaggtaacatcaaaagaagaaaa

SEQ ID NO: 551376 - DNA, 33 bp, Homo sapien
cattgcttttaaggtagcatcaaaagaagaaaa

SEQ ID NO: 551377 - DNA, 33 bp, Homo sapien
cttgccccagaaggaaaagtgaagagtaatgat

SEQ ID NO: 551378 - DNA, 33 bp, Homo sapien
cttgccccagaaggaagagtgaagagtaatgat

SEQ ID NO: 551379 - DNA, 33 bp, Homo sapien
aagcaccactcataaccagcagggcggcagaag

SEQ ID NO: 551380 - DNA, 33 bp, Homo sapien
aagcaccactcataacgagcagggcggcagaag

SEQ ID NO: 551381 - DNA, 33 bp, Homo sapien
gcaggccctttctttgcagccccctgccagtgc

SEQ ID NO: 551382 - DNA, 33 bp, Homo sapien
gcaggccctttctttgtagccccctgccagtgc

SEQ ID NO: 551383 - DNA, 33 bp, Homo sapien
accagcttgcagagagcagccaccgtcaccctc

SEQ ID NO: 551384 - DNA, 33 bp, Homo sapien
accagcttgcagagaggagccaccgtcaccctc

SEQ ID NO: 551385 - DNA, 33 bp, Homo sapien
catgtctcttgaatgcccccgtctgtcaccacc

SEQ ID NO: 551386 - DNA, 33 bp, Homo sapien
catgtctcttgaatgcgcccgtctgtcaccacc

SEQ ID NO: 551387 - DNA, 33 bp, Homo sapien
agggaagagttgaaagaaggagactgaattgga

SEQ ID NO: 551388 - DNA, 33 bp, Homo sapien
agggaagagttgaaaggaggagactgaattgga

SEQ ID NO: 551389 - DNA, 33 bp, Homo sapien
cctgtgaaatgtccaaatgtagttgccctagaa

SEQ ID NO: 551390 - DNA, 33 bp, Homo sapien
cctgtgaaatgtccaagtgtagttgccctagaa

SEQ ID NO: 551391 - DNA, 33 bp, Homo sapien
ggaatgacaggttgcaagacggactttctcagg

SEQ ID NO: 551392 - DNA, 33 bp, Homo sapien
ggaatgacaggttgcaggacggactttctcagg

SEQ ID NO: 551393 - DNA, 33 bp, Homo sapien
aacctgctgtggccaccgtattttcttataaca

SEQ ID NO: 551394 - DNA, 33 bp, Homo sapien
aacctgctgtggccactgtattttcttataaca

SEQ ID NO: 551395 - DNA, 33 bp, Homo sapien
gcttgtagctcacttggatttcaaacaggctcc

SEQ ID NO: 551396 - DNA, 33 bp, Homo sapien
gcttgtagctcacttgtatttcaaacaggctcc

SEQ ID NO: 551397 - DNA, 33 bp, Homo sapien
ggcaggtttccataaaaaggagtggagctcttg

SEQ ID NO: 551398 - DNA, 33 bp, Homo sapien
ggcaggtttccataaagaggagtggagctcttg

SEQ ID NO: 551399 - DNA, 33 bp, Homo sapien
gagcttcctacagtcacgcactctttgcaccat

SEQ ID NO: 551400 - DNA, 33 bp, Homo sapien
gagcttcctacagtcatgcactctttgcaccat

SEQ ID NO: 551401 - DNA, 33 bp, Homo sapien
agcattagggccagaacactcaacctcaggcag

SEQ ID NO: 551402 - DNA, 33 bp, Homo sapien
agcattagggccagaagactcaacctcaggcag

SEQ ID NO: 551403 - DNA, 33 bp, Homo sapien
agctagttcctgaccaataataaagtatgtgtt

SEQ ID NO: 551404 - DNA, 33 bp, Homo sapien
agctagttcctgaccagtaataaagtatgtgtt

SEQ ID NO: 551405 - DNA, 33 bp, Homo sapien
tccatgttatgctttacctatttgttcattcat

SEQ ID NO: 551406 - DNA, 33 bp, Homo sapien
tccatgttatgctttatctatttgttcattcat

SEQ ID NO: 551407 - DNA, 33 bp, Homo sapien
caggaaggatttgctcaagttttatggctctta

SEQ ID NO: 551408 - DNA, 33 bp, Homo sapien
caggaaggatttgctcgagttttatggctctta

SEQ ID NO: 551409 - DNA, 33 bp, Homo sapien
catagcaactaattataaaagtgtcattttgtg

SEQ ID NO: 551410 - DNA, 33 bp, Homo sapien
catagcaactaattatgaaagtgtcattttgtg

SEQ ID NO: 551411 - DNA, 33 bp, Homo sapien
gcacggtttgtagctaactttatgagcaacaag

SEQ ID NO: 551412 - DNA, 33 bp, Homo sapien
gcacggtttgtagctatctttatgagcaacaag

SEQ ID NO: 551413 - DNA, 33 bp, Homo sapien
gaagaaaacattggaccagtcacgcatcctgag

SEQ ID NO: 551414 - DNA, 33 bp, Homo sapien
gaagaaaacattggacgagtcacgcatcctgag

SEQ ID NO: 551415 - DNA, 33 bp, Homo sapien
aatttgttctgttaacaccaggagcctctcaca

SEQ ID NO: 551416 - DNA, 33 bp, Homo sapien
aatttgttctgttaactccaggagcctctcaca

SEQ ID NO: 551417 - DNA, 33 bp, Homo sapien
catgcaaaaaccaccacgggacatcataataag

SEQ ID NO: 551418 - DNA, 33 bp, Homo sapien
catgcaaaaaccaccaggggacatcataataag

SEQ ID NO: 551419 - DNA, 33 bp, Homo sapien
acaggcttccaggttccactgtttgaaactgaa

SEQ ID NO: 551420 - DNA, 33 bp, Homo sapien
acaggcttccaggttctactgtttgaaactgaa

SEQ ID NO: 551421 - DNA, 33 bp, Homo sapien
tggatacaaaactccacgggacaactctgtctt

SEQ ID NO: 551422 - DNA, 33 bp, Homo sapien
tggatacaaaactccatgggacaactctgtctt

SEQ ID NO: 551423 - DNA, 33 bp, Homo sapien
ttgatgagggccagaacgaagccagtgcagatg

SEQ ID NO: 551424 - DNA, 33 bp, Homo sapien
ttgatgagggccagaatgaagccagtgcagatg

SEQ ID NO: 551425 - DNA, 33 bp, Homo sapien
ctatgacctgaattgaaccagaaaatgcagagt

SEQ ID NO: 551426 - DNA, 33 bp, Homo sapien
ctatgacctgaattgagccagaaaatgcagagt

SEQ ID NO: 551427 - DNA, 33 bp, Homo sapien
gtaattctttgaaatccaacagcccatttagtc

SEQ ID NO: 551428 - DNA, 33 bp, Homo sapien
gtaattctttgaaatcgaacagcccatttagtc

SEQ ID NO: 551429 - DNA, 33 bp, Homo sapien
ctctatctgaccttcacagaactagtctgagat

SEQ ID NO: 551430 - DNA, 33 bp, Homo sapien
ctctatctgaccttcagagaactagtctgagat

SEQ ID NO: 551431 - DNA, 33 bp, Homo sapien
ctagtctgagatctacaacaacttcagaatcca

SEQ ID NO: 551432 - DNA, 33 bp, Homo sapien
ctagtctgagatctacgacaacttcagaatcca

SEQ ID NO: 551433 - DNA, 33 bp, Homo sapien
tagaaatgtcatgatacatagaccaatatactt

SEQ ID NO: 551434 - DNA, 33 bp, Homo sapien
tagaaatgtcatgatagatagaccaatatactt

SEQ ID NO: 551435 - DNA, 33 bp, Homo sapien
gaacgggaaagtcatgaaatattaactcttggc

SEQ ID NO: 551436 - DNA, 33 bp, Homo sapien
gaacgggaaagtcatggaatattaactcttggc

SEQ ID NO: 551437 - DNA, 33 bp, Homo sapien
cactctcaaacacaagcagacttagaagctgca

SEQ ID NO: 551438 - DNA, 33 bp, Homo sapien
cactctcaaacacaagtagacttagaagctgca

SEQ ID NO: 551439 - DNA, 33 bp, Homo sapien
gaaaaaaagtttccaactgttatgcttcttctt

SEQ ID NO: 551440 - DNA, 33 bp, Homo sapien
gaaaaaaagtttccaattgttatgcttcttctt

SEQ ID NO: 551441 - DNA, 33 bp, Homo sapien
atttgtatccaaaaaactatgcaaccgtgaaaa

SEQ ID NO: 551442 - DNA, 33 bp, Homo sapien
atttgtatccaaaaaattatgcaaccgtgaaaa

SEQ ID NO: 551443 - DNA, 33 bp, Homo sapien
gaccaaaacattaataaggggaagcaataaatg

SEQ ID NO: 551444 - DNA, 33 bp, Homo sapien
gaccaaaacattaatacggggaagcaataaatg

SEQ ID NO: 551445 - DNA, 33 bp, Homo sapien
aatgcctgtcccttacactattattcagctact

SEQ ID NO: 551446 - DNA, 33 bp, Homo sapien
aatgcctgtcccttacgctattattcagctact

SEQ ID NO: 551447 - DNA, 33 bp, Homo sapien
acaaaaataaatcctaaggtatgtcttgctaga

SEQ ID NO: 551448 - DNA, 33 bp, Homo sapien
acaaaaataaatcctagggtatgtcttgctaga

SEQ ID NO: 551449 - DNA, 33 bp, Homo sapien
agaggttgctgtctaccctctctccatatattt

SEQ ID NO: 551450 - DNA, 33 bp, Homo sapien
agaggttgctgtctactctctctccatatattt

SEQ ID NO: 551451 - DNA, 33 bp, Homo sapien
aagtaaactgtggcacaatcaggcaacggaata

SEQ ID NO: 551452 - DNA, 33 bp, Homo sapien
aagtaaactgtggcacgatcaggcaacggaata

SEQ ID NO: 551453 - DNA, 33 bp, Homo sapien
catgttttcttggctcactgaactgaataacaa

SEQ ID NO: 551454 - DNA, 33 bp, Homo sapien
catgttttcttggctcgctgaactgaataacaa

SEQ ID NO: 551455 - DNA, 33 bp, Homo sapien
aggttcatggccaagacccttccaggaaattca

SEQ ID NO: 551456 - DNA, 33 bp, Homo sapien
aggttcatggccaagatccttccaggaaattca

SEQ ID NO: 551457 - DNA, 33 bp, Homo sapien
gctttgaagttaaaaaggttcaaatgccagttt

SEQ ID NO: 551458 - DNA, 33 bp, Homo sapien
gctttgaagttaaaaatgttcaaatgccagttt

SEQ ID NO: 551459 - DNA, 33 bp, Homo sapien
agaaggcagtaaaatcaatgtttttcatgaata

SEQ ID NO: 551460 - DNA, 33 bp, Homo sapien
agaaggcagtaaaatccatgtttttcatgaata

SEQ ID NO: 551461 - DNA, 33 bp, Homo sapien
gcatattaagctcttaagctgaaagactagatc

SEQ ID NO: 551462 - DNA, 33 bp, Homo sapien
gcatattaagctcttacgctgaaagactagatc

SEQ ID NO: 551463 - DNA, 33 bp, Homo sapien
cttccaggaaagcccaatgatgattctccctgc

SEQ ID NO: 551464 - DNA, 33 bp, Homo sapien
cttccaggaaagcccagtgatgattctccctgc

SEQ ID NO: 551465 - DNA, 33 bp, Homo sapien
agagggacaaagacaaagaagagaatgacttga

SEQ ID NO: 551466 - DNA, 33 bp, Homo sapien
agagggacaaagacaaggaagagaatgacttga

SEQ ID NO: 551467 - DNA, 33 bp, Homo sapien
tgttctttaagcttctcaacccattggcacgtt

SEQ ID NO: 551468 - DNA, 33 bp, Homo sapien
tgttctttaagcttctgaacccattggcacgtt

SEQ ID NO: 551469 - DNA, 33 bp, Homo sapien
ggagacttagagtcataagtaatggaaagtgtg

SEQ ID NO: 551470 - DNA, 33 bp, Homo sapien
ggagacttagagtcatgagtaatggaaagtgtg

SEQ ID NO: 551471 - DNA, 33 bp, Homo sapien
tccaggaaatacaggcacgtaaggcaatgtaca

SEQ ID NO: 551472 - DNA, 33 bp, Homo sapien
tccaggaaatacaggcgcgtaaggcaatgtaca

SEQ ID NO: 551473 - DNA, 33 bp, Homo sapien
agccttatcccaggagcctacttatgcttggac

SEQ ID NO: 551474 - DNA, 33 bp, Homo sapien
agccttatcccaggagtctacttatgcttggac

SEQ ID NO: 551475 - DNA, 33 bp, Homo sapien
gtgtgcacatagagaagtcccggacagtctcct

SEQ ID NO: 551476 - DNA, 33 bp, Homo sapien
gtgtgcacatagagaattcccggacagtctcct

SEQ ID NO: 551477 - DNA, 33 bp, Homo sapien
aatacagagatatacaactcagtctctgcactt

SEQ ID NO: 551478 - DNA, 33 bp, Homo sapien
aatacagagatatacagctcagtctctgcactt

SEQ ID NO: 551479 - DNA, 33 bp, Homo sapien
gtcttcgtcaatctccacttaaggcacaactaa

SEQ ID NO: 551480 - DNA, 33 bp, Homo sapien
gtcttcgtcaatctcctcttaaggcacaactaa

SEQ ID NO: 551481 - DNA, 33 bp, Homo sapien
gccaggatgcaatgcaaactgtgacccaagaat

SEQ ID NO: 551482 - DNA, 33 bp, Homo sapien
gccaggatgcaatgcagactgtgacccaagaat

SEQ ID NO: 551483 - DNA, 33 bp, Homo sapien
caaggcacccaatgcaacaagccttcagtgagg

SEQ ID NO: 551484 - DNA, 33 bp, Homo sapien
caaggcacccaatgcagcaagccttcagtgagg

SEQ ID NO: 551485 - DNA, 33 bp, Homo sapien
taggaggaatccttaagtgtgacatcaccatac

SEQ ID NO: 551486 - DNA, 33 bp, Homo sapien
taggaggaatccttaattgtgacatcaccatac

SEQ ID NO: 551487 - DNA, 33 bp, Homo sapien
cagcagtatttatgaccggcgcccgtgatgatt

SEQ ID NO: 551488 - DNA, 33 bp, Homo sapien
cagcagtatttatgactggcgcccgtgatgatt

SEQ ID NO: 551489 - DNA, 33 bp, Homo sapien
tatcaaaggagcagaacgtgtatatattgtccc

SEQ ID NO: 551490 - DNA, 33 bp, Homo sapien
tatcaaaggagcagaatgtgtatatattgtccc

SEQ ID NO: 551491 - DNA, 33 bp, Homo sapien
gccaaaaaggatgttgaaatgggcttccagctg

SEQ ID NO: 551492 - DNA, 33 bp, Homo sapien
gccaaaaaggatgttgcaatgggcttccagctg

SEQ ID NO: 551493 - DNA, 33 bp, Homo sapien
caatgaaagagattgaagatcccaaagagctgt

SEQ ID NO: 551494 - DNA, 33 bp, Homo sapien
caatgaaagagattgaggatcccaaagagctgt

SEQ ID NO: 551495 - DNA, 33 bp, Homo sapien
tgggcagtcttatccacgtggaccgaagtgcag

SEQ ID NO: 551496 - DNA, 33 bp, Homo sapien
tgggcagtcttatccatgtggaccgaagtgcag

SEQ ID NO: 551497 - DNA, 33 bp, Homo sapien
gtgcaaccacaccaccggatatccagaaatttt

SEQ ID NO: 551498 - DNA, 33 bp, Homo sapien
gtgcaaccacaccacctgatatccagaaatttt

SEQ ID NO: 551499 - DNA, 33 bp, Homo sapien
actatatcaattcctacagaccgttagccaagg

SEQ ID NO: 551500 - DNA, 33 bp, Homo sapien
actatatcaattcctagagaccgttagccaagg

SEQ ID NO: 551501 - DNA, 33 bp, Homo sapien
gtcactattttatggaacagaatgccgtcccag

SEQ ID NO: 551502 - DNA, 33 bp, Homo sapien
gtcactattttatggagcagaatgccgtcccag

SEQ ID NO: 551503 - DNA, 33 bp, Homo sapien
ctttcacagcccagaaatcccagactaagccaa

SEQ ID NO: 551504 - DNA, 33 bp, Homo sapien
ctttcacagcccagaagtcccagactaagccaa

SEQ ID NO: 551505 - DNA, 33 bp, Homo sapien
cgttagtcctggctaacggcaaactcaacagta

SEQ ID NO: 551506 - DNA, 33 bp, Homo sapien
cgttagtcctggctaatggcaaactcaacagta

SEQ ID NO: 551507 - DNA, 33 bp, Homo sapien
agacaatgaatctgaactctcactctgctgtca

SEQ ID NO: 551508 - DNA, 33 bp, Homo sapien
agacaatgaatctgaattctcactctgctgtca

SEQ ID NO: 551509 - DNA, 33 bp, Homo sapien
gcagccgagtgaattaccccagccaacctgcgt

SEQ ID NO: 551510 - DNA, 33 bp, Homo sapien
gcagccgagtgaattatcccagccaacctgcgt

SEQ ID NO: 551511 - DNA, 33 bp, Homo sapien
ccattgcctttgtagacggtcctgtttaacacg

SEQ ID NO: 551512 - DNA, 33 bp, Homo sapien
ccattgcctttgtagagggtcctgtttaacacg

SEQ ID NO: 551513 - DNA, 33 bp, Homo sapien
gctacatttggccccaaagtgtcttggcaacat

SEQ ID NO: 551514 - DNA, 33 bp, Homo sapien
gctacatttggccccagagtgtcttggcaacat

SEQ ID NO: 551515 - DNA, 33 bp, Homo sapien
cctggctgtagcactgaagtttattcctcctca

SEQ ID NO: 551516 - DNA, 33 bp, Homo sapien
cctggctgtagcactgtagtttattcctcctca

SEQ ID NO: 551517 - DNA, 33 bp, Homo sapien
tctatgggaaatactgaaaatggacttttgaac

SEQ ID NO: 551518 - DNA, 33 bp, Homo sapien
tctatgggaaatactggaaatggacttttgaac

SEQ ID NO: 551519 - DNA, 33 bp, Homo sapien
ttcaagggcggatgaagggcagcccgagcagcc

SEQ ID NO: 551520 - DNA, 33 bp, Homo sapien
ttcaagggcggatgaatggcagcccgagcagcc

SEQ ID NO: 551521 - DNA, 33 bp, Homo sapien
acattagacactcaggaaacattctctgggaag

SEQ ID NO: 551522 - DNA, 33 bp, Homo sapien
acattagacactcagggaacattctctgggaag

SEQ ID NO: 551523 - DNA, 33 bp, Homo sapien
ccttgcagatattgagactaaatttttctcatt

SEQ ID NO: 551524 - DNA, 33 bp, Homo sapien
ccttgcagatattgagtctaaatttttctcatt

SEQ ID NO: 551525 - DNA, 33 bp, Homo sapien
acagcccccacgatgaagtacgacccttcccga

SEQ ID NO: 551526 - DNA, 33 bp, Homo sapien
acagcccccacgatgacgtacgacccttcccga

SEQ ID NO: 551527 - DNA, 33 bp, Homo sapien
aaaagtgaacatgaaacgtcaagtcattggact

SEQ ID NO: 551528 - DNA, 33 bp, Homo sapien
aaaagtgaacatgaaatgtcaagtcattggact

SEQ ID NO: 551529 - DNA, 33 bp, Homo sapien
ttaatagaaatcggaccactgcagcctttctct

SEQ ID NO: 551530 - DNA, 33 bp, Homo sapien
ttaatagaaatcggacgactgcagcctttctct

SEQ ID NO: 551531 - DNA, 33 bp, Homo sapien
ctcactcacagtcctaccactctgacactctgg

SEQ ID NO: 551532 - DNA, 33 bp, Homo sapien
ctcactcacagtcctatcactctgacactctgg

SEQ ID NO: 551533 - DNA, 33 bp, Homo sapien
ttatttatgatctcaaataatatttccatctga

SEQ ID NO: 551534 - DNA, 33 bp, Homo sapien
ttatttatgatctcaattaatatttccatctga

SEQ ID NO: 551535 - DNA, 33 bp, Homo sapien
tggtatttgaaccaaaccttgcactagggaaag

SEQ ID NO: 551536 - DNA, 33 bp, Homo sapien
tggtatttgaaccaaatcttgcactagggaaag

SEQ ID NO: 551537 - DNA, 33 bp, Homo sapien
tccaactgagctttacaattcttctcaacacgg

SEQ ID NO: 551538 - DNA, 33 bp, Homo sapien
tccaactgagctttacgattcttctcaacacgg

SEQ ID NO: 551539 - DNA, 33 bp, Homo sapien
atggtaaagttttacactagactttggcataag

SEQ ID NO: 551540 - DNA, 33 bp, Homo sapien
atggtaaagttttacagtagactttggcataag

SEQ ID NO: 551541 - DNA, 33 bp, Homo sapien
ttaattctgttttagaccccatatgaagcccct

SEQ ID NO: 551542 - DNA, 33 bp, Homo sapien
ttaattctgttttagatcccatatgaagcccct

SEQ ID NO: 551543 - DNA, 33 bp, Homo sapien
aatcaaaaagaaacagacatggggttatgttgc

SEQ ID NO: 551544 - DNA, 33 bp, Homo sapien
aatcaaaaagaaacagtcatggggttatgttgc

SEQ ID NO: 551545 - DNA, 33 bp, Homo sapien
ttgggctctggccacacggtgatttcctatcaa

SEQ ID NO: 551546 - DNA, 33 bp, Homo sapien
ttgggctctggccacatggtgatttcctatcaa

SEQ ID NO: 551547 - DNA, 33 bp, Homo sapien
tatgtgagtttccacacggatacaaaacactct

SEQ ID NO: 551548 - DNA, 33 bp, Homo sapien
tatgtgagtttccacatggatacaaaacactct

SEQ ID NO: 551549 - DNA, 33 bp, Homo sapien
ttaacctatgattcaacaggaaatagacgttaa

SEQ ID NO: 551550 - DNA, 33 bp, Homo sapien
ttaacctatgattcaataggaaatagacgttaa

SEQ ID NO: 551551 - DNA, 33 bp, Homo sapien
acgtttcttggtattgcaaagtctgttaggtta

SEQ ID NO: 551552 - DNA, 33 bp, Homo sapien
acgtttcttggtattgtaaagtctgttaggtta

SEQ ID NO: 551553 - DNA, 33 bp, Homo sapien
agcactgaagataccagtagttggttatattgg

SEQ ID NO: 551554 - DNA, 33 bp, Homo sapien
agcactgaagataccattagttggttatattgg

SEQ ID NO: 551555 - DNA, 33 bp, Homo sapien
gacaccgggtgacagcaaggagtgagaatcaag

SEQ ID NO: 551556 - DNA, 33 bp, Homo sapien
gacaccgggtgacagcgaggagtgagaatcaag

SEQ ID NO: 551557 - DNA, 33 bp, Homo sapien
agcacagcttcacagaggagcatggtttcatgt

SEQ ID NO: 551558 - DNA, 33 bp, Homo sapien
agcacagcttcacagatgagcatggtttcatgt

SEQ ID NO: 551559 - DNA, 33 bp, Homo sapien
gcaaagaggagctagccgcagtcagaagaggga

SEQ ID NO: 551560 - DNA, 33 bp, Homo sapien
gcaaagaggagctagctgcagtcagaagaggga

SEQ ID NO: 551561 - DNA, 33 bp, Homo sapien
ctgccattctggaaatgaagaagctgacaaatc

SEQ ID NO: 551562 - DNA, 33 bp, Homo sapien
ctgccattctggaaattaagaagctgacaaatc

SEQ ID NO: 551563 - DNA, 33 bp, Homo sapien
aaccttaagaggaagccgctattgttatctctc

SEQ ID NO: 551564 - DNA, 33 bp, Homo sapien
aaccttaagaggaagctgctattgttatctctc

SEQ ID NO: 551565 - DNA, 33 bp, Homo sapien
ctgccggtaacactgaagaaggctgattgagca

SEQ ID NO: 551566 - DNA, 33 bp, Homo sapien
ctgccggtaacactgaggaaggctgattgagca

SEQ ID NO: 551567 - DNA, 33 bp, Homo sapien
cgtttttggcttttcaatctaactttgcttctt

SEQ ID NO: 551568 - DNA, 33 bp, Homo sapien
cgtttttggcttttcagtctaactttgcttctt

SEQ ID NO: 551569 - DNA, 33 bp, Homo sapien
ccttaggctgtagaatcatgccagatgttagtc

SEQ ID NO: 551570 - DNA, 33 bp, Homo sapien
ccttaggctgtagaattatgccagatgttagtc

SEQ ID NO: 551571 - DNA, 33 bp, Homo sapien
tgagttttgatctggacgttttgttctgcgatg

SEQ ID NO: 551572 - DNA, 33 bp, Homo sapien
tgagttttgatctggatgttttgttctgcgatg

SEQ ID NO: 551573 - DNA, 33 bp, Homo sapien
tcaaagcctagagacaaaagccgacttcacaag

SEQ ID NO: 551574 - DNA, 33 bp, Homo sapien
tcaaagcctagagacagaagccgacttcacaag

SEQ ID NO: 551575 - DNA, 33 bp, Homo sapien
cccacatctaagatacacaaaggtcagtgacgc

SEQ ID NO: 551576 - DNA, 33 bp, Homo sapien
cccacatctaagatacccaaaggtcagtgacgc

SEQ ID NO: 551577 - DNA, 33 bp, Homo sapien
ttccataacaaatttccccacacttggtggctt

SEQ ID NO: 551578 - DNA, 33 bp, Homo sapien
ttccataacaaatttctccacacttggtggctt

SEQ ID NO: 551579 - DNA, 33 bp, Homo sapien
tttgtcgagagttgtacgcacactcatattaaa

SEQ ID NO: 551580 - DNA, 33 bp, Homo sapien
tttgtcgagagttgtatgcacactcatattaaa

SEQ ID NO: 551581 - DNA, 33 bp, Homo sapien
cagtaacactcagcacagaatttgcggtgacat

SEQ ID NO: 551582 - DNA, 33 bp, Homo sapien
cagtaacactcagcacggaatttgcggtgacat

SEQ ID NO: 551583 - DNA, 33 bp, Homo sapien
cagaagaagcaatacaactataacctctgggta

SEQ ID NO: 551584 - DNA, 33 bp, Homo sapien
cagaagaagcaatacagctataacctctgggta

SEQ ID NO: 551585 - DNA, 33 bp, Homo sapien
ttttagcaactctctgccaaatacctaagtccg

SEQ ID NO: 551586 - DNA, 33 bp, Homo sapien
ttttagcaactctctggcaaatacctaagtccg

SEQ ID NO: 551587 - DNA, 33 bp, Homo sapien
aaacactagggcatccgatagtggacagctggt

SEQ ID NO: 551588 - DNA, 33 bp, Homo sapien
aaacactagggcatcctatagtggacagctggt

SEQ ID NO: 551589 - DNA, 33 bp, Homo sapien
ggaggtggatgaaagtgaactgagaagcatctg

SEQ ID NO: 551590 - DNA, 33 bp, Homo sapien
ggaggtggatgaaagttaactgagaagcatctg

SEQ ID NO: 551591 - DNA, 33 bp, Homo sapien
aatgtcatcaatgtgacagactcctgactcttt

SEQ ID NO: 551592 - DNA, 33 bp, Homo sapien
aatgtcatcaatgtgagagactcctgactcttt

SEQ ID NO: 551593 - DNA, 33 bp, Homo sapien
atattaggcctggtcaaaccttaagttccttca

SEQ ID NO: 551594 - DNA, 33 bp, Homo sapien
atattaggcctggtcagaccttaagttccttca

SEQ ID NO: 551595 - DNA, 33 bp, Homo sapien
ctccataatcacatgactcagttccttacaaca

SEQ ID NO: 551596 - DNA, 33 bp, Homo sapien
ctccataatcacatgagtcagttccttacaaca

SEQ ID NO: 551597 - DNA, 33 bp, Homo sapien
ctgtaacgtttgcatgaaatcccattactggga

SEQ ID NO: 551598 - DNA, 33 bp, Homo sapien
ctgtaacgtttgcatggaatcccattactggga

SEQ ID NO: 551599 - DNA, 33 bp, Homo sapien
gcaggctgggtgagaaatggatatgcagttgtc

SEQ ID NO: 551600 - DNA, 33 bp, Homo sapien
gcaggctgggtgagaagtggatatgcagttgtc

SEQ ID NO: 551601 - DNA, 33 bp, Homo sapien
agagaattatcacaacagggggatctaccccta

SEQ ID NO: 551602 - DNA, 33 bp, Homo sapien
agagaattatcacaaccgggggatctaccccta

SEQ ID NO: 551603 - DNA, 33 bp, Homo sapien
accacaggaatgatgacagtaacctttatctac

SEQ ID NO: 551604 - DNA, 33 bp, Homo sapien
accacaggaatgatgatagtaacctttatctac

SEQ ID NO: 551605 - DNA, 33 bp, Homo sapien
ctgtggcattgagaacaccagcagtgatggaag

SEQ ID NO: 551606 - DNA, 33 bp, Homo sapien
ctgtggcattgagaactccagcagtgatggaag

SEQ ID NO: 551607 - DNA, 33 bp, Homo sapien
tgctatttccagaccgacatatagttgaaatta

SEQ ID NO: 551608 - DNA, 33 bp, Homo sapien
tgctatttccagaccgtcatatagttgaaatta

SEQ ID NO: 551609 - DNA, 33 bp, Homo sapien
tgggcacacaaaggcaagcagagtggtgaaatg

SEQ ID NO: 551610 - DNA, 33 bp, Homo sapien
tgggcacacaaaggcaggcagagtggtgaaatg

SEQ ID NO: 551611 - DNA, 33 bp, Homo sapien
cgaggtcggcctcataccgcacagttcagactc

SEQ ID NO: 551612 - DNA, 33 bp, Homo sapien
cgaggtcggcctcatatcgcacagttcagactc

SEQ ID NO: 551613 - DNA, 33 bp, Homo sapien
ataaaagtccatgcaccgaggtatcacaacatt

SEQ ID NO: 551614 - DNA, 33 bp, Homo sapien
ataaaagtccatgcactgaggtatcacaacatt

SEQ ID NO: 551615 - DNA, 33 bp, Homo sapien
aacccaacgagcaaaaatgatgtgttccggacc

SEQ ID NO: 551616 - DNA, 33 bp, Homo sapien
aacccaacgagcaaaagtgatgtgttccggacc

SEQ ID NO: 551617 - DNA, 33 bp, Homo sapien
agaggcagaatcaccaatgactcataccccttg

SEQ ID NO: 551618 - DNA, 33 bp, Homo sapien
agaggcagaatcaccagtgactcataccccttg

SEQ ID NO: 551619 - DNA, 33 bp, Homo sapien
cttcaaattgggtagacaggagtatagctggag

SEQ ID NO: 551620 - DNA, 33 bp, Homo sapien
cttcaaattgggtagagaggagtatagctggag

SEQ ID NO: 551621 - DNA, 33 bp, Homo sapien
gagacatggaatttcccagagggttattgctga

SEQ ID NO: 551622 - DNA, 33 bp, Homo sapien
gagacatggaatttcctagagggttattgctga

SEQ ID NO: 551623 - DNA, 33 bp, Homo sapien
accatgtgacaactgaaagatgccatgttaagc

SEQ ID NO: 551624 - DNA, 33 bp, Homo sapien
accatgtgacaactgacagatgccatgttaagc

SEQ ID NO: 551625 - DNA, 33 bp, Homo sapien
gtgaagatcttaactcaaagtgcccagttcagt

SEQ ID NO: 551626 - DNA, 33 bp, Homo sapien
gtgaagatcttaactcgaagtgcccagttcagt

SEQ ID NO: 551627 - DNA, 33 bp, Homo sapien
ctaactacacaccaaaatggttaccagacatta

SEQ ID NO: 551628 - DNA, 33 bp, Homo sapien
ctaactacacaccaaagtggttaccagacatta

SEQ ID NO: 551629 - DNA, 33 bp, Homo sapien
actcctgccaaataaacgtcttctgggcaactc

SEQ ID NO: 551630 - DNA, 33 bp, Homo sapien
actcctgccaaataaatgtcttctgggcaactc

SEQ ID NO: 551631 - DNA, 33 bp, Homo sapien
ctatactctcaagcaaggaaatcgcaccataaa

SEQ ID NO: 551632 - DNA, 33 bp, Homo sapien
ctatactctcaagcaatgaaatcgcaccataaa

SEQ ID NO: 551633 - DNA, 33 bp, Homo sapien
aggaagtttatgtttcaaatgcacacgtctgat

SEQ ID NO: 551634 - DNA, 33 bp, Homo sapien
aggaagtttatgtttccaatgcacacgtctgat

SEQ ID NO: 551635 - DNA, 33 bp, Homo sapien
aatagaagagaggaaacggaggcaagcacaatg

SEQ ID NO: 551636 - DNA, 33 bp, Homo sapien
aatagaagagaggaaatggaggcaagcacaatg

SEQ ID NO: 551637 - DNA, 33 bp, Homo sapien
ttgttgtttatatgaactaggcactgtttatac

SEQ ID NO: 551638 - DNA, 33 bp, Homo sapien
ttgttgtttatatgaattaggcactgtttatac

SEQ ID NO: 551639 - DNA, 33 bp, Homo sapien
agggctttcttacccacgggcttagtggtggct

SEQ ID NO: 551640 - DNA, 33 bp, Homo sapien
agggctttcttacccatgggcttagtggtggct

SEQ ID NO: 551641 - DNA, 33 bp, Homo sapien
gttgtctgaccaggtacgctatgtacttcttca

SEQ ID NO: 551642 - DNA, 33 bp, Homo sapien
gttgtctgaccaggtatgctatgtacttcttca

SEQ ID NO: 551643 - DNA, 33 bp, Homo sapien
ggtggagggttaaagacaaactgtacttactac

SEQ ID NO: 551644 - DNA, 33 bp, Homo sapien
ggtggagggttaaagataaactgtacttactac

SEQ ID NO: 551645 - DNA, 33 bp, Homo sapien
tatagttggaaggtacagtaaaagtgatctaac

SEQ ID NO: 551646 - DNA, 33 bp, Homo sapien
tatagttggaaggtacggtaaaagtgatctaac

SEQ ID NO: 551647 - DNA, 33 bp, Homo sapien
cctagatctgtgtaaaggttgctaacagttatt

SEQ ID NO: 551648 - DNA, 33 bp, Homo sapien
cctagatctgtgtaaatgttgctaacagttatt

SEQ ID NO: 551649 - DNA, 33 bp, Homo sapien
ctgctgagtcatcaaaagaaaacactcactcaa

SEQ ID NO: 551650 - DNA, 33 bp, Homo sapien
ctgctgagtcatcaaacgaaaacactcactcaa

SEQ ID NO: 551651 - DNA, 33 bp, Homo sapien
gagcagtctttaaacacgggcagtgcacgcaca

SEQ ID NO: 551652 - DNA, 33 bp, Homo sapien
gagcagtctttaaacatgggcagtgcacgcaca

SEQ ID NO: 551653 - DNA, 33 bp, Homo sapien
agatgttatcttgcaaagcagctatcagcaatg

SEQ ID NO: 551654 - DNA, 33 bp, Homo sapien
agatgttatcttgcaatgcagctatcagcaatg

SEQ ID NO: 551655 - DNA, 33 bp, Homo sapien
tcggttaagtaaaatacctgaagcacacacatg

SEQ ID NO: 551656 - DNA, 33 bp, Homo sapien
tcggttaagtaaaatatctgaagcacacacatg

SEQ ID NO: 551657 - DNA, 33 bp, Homo sapien
caaacctttctactgccgaggaaacaattttga

SEQ ID NO: 551658 - DNA, 33 bp, Homo sapien
caaacctttctactgctgaggaaacaattttga

SEQ ID NO: 551659 - DNA, 33 bp, Homo sapien
ctgcatgcaaggcttcaagggacaagcccttcg

SEQ ID NO: 551660 - DNA, 33 bp, Homo sapien
ctgcatgcaaggcttcgagggacaagcccttcg

SEQ ID NO: 551661 - DNA, 33 bp, Homo sapien
aaaaatcctgattctaaccctgcaaagaagtat

SEQ ID NO: 551662 - DNA, 33 bp, Homo sapien
aaaaatcctgattctagccctgcaaagaagtat

SEQ ID NO: 551663 - DNA, 33 bp, Homo sapien
caggccctctgtaacacgagtatgctgtgggaa

SEQ ID NO: 551664 - DNA, 33 bp, Homo sapien
caggccctctgtaacatgagtatgctgtgggaa

SEQ ID NO: 551665 - DNA, 33 bp, Homo sapien
tgtgagctttgagaagaaattctatccacccct

SEQ ID NO: 551666 - DNA, 33 bp, Homo sapien
tgtgagctttgagaagcaattctatccacccct

SEQ ID NO: 551667 - DNA, 33 bp, Homo sapien
tctgtagaaaacaccacagaggatgtgatacat

SEQ ID NO: 551668 - DNA, 33 bp, Homo sapien
tctgtagaaaacaccatagaggatgtgatacat

SEQ ID NO: 551669 - DNA, 33 bp, Homo sapien
ttaggaaggctttgcactgataggaagtaattg

SEQ ID NO: 551670 - DNA, 33 bp, Homo sapien
ttaggaaggctttgcattgataggaagtaattg

SEQ ID NO: 551671 - DNA, 33 bp, Homo sapien
gttctcagccttgccacctgaagattgatagca

SEQ ID NO: 551672 - DNA, 33 bp, Homo sapien
gttctcagccttgccatctgaagattgatagca

SEQ ID NO: 551673 - DNA, 33 bp, Homo sapien
gctgccatagaacccaaattctctcttgttagc

SEQ ID NO: 551674 - DNA, 33 bp, Homo sapien
gctgccatagaacccatattctctcttgttagc

SEQ ID NO: 551675 - DNA, 33 bp, Homo sapien
caatatgccttccaaacgtgtttttcatcattc

SEQ ID NO: 551676 - DNA, 33 bp, Homo sapien
caatatgccttccaaaggtgtttttcatcattc

SEQ ID NO: 551677 - DNA, 33 bp, Homo sapien
gaatcccatgttataacaggacatgatgccctc

SEQ ID NO: 551678 - DNA, 33 bp, Homo sapien
gaatcccatgttataataggacatgatgccctc

SEQ ID NO: 551679 - DNA, 33 bp, Homo sapien
atcctggagggtcttgaaaagatataaggcaat

SEQ ID NO: 551680 - DNA, 33 bp, Homo sapien
atcctggagggtcttgcaaagatataaggcaat

SEQ ID NO: 551681 - DNA, 33 bp, Homo sapien
cttattaagcgattaaatcagaagctacatgag

SEQ ID NO: 551682 - DNA, 33 bp, Homo sapien
cttattaagcgattaattcagaagctacatgag

SEQ ID NO: 551683 - DNA, 33 bp, Homo sapien
aagctcccatttcataaggacactcatcccatt

SEQ ID NO: 551684 - DNA, 33 bp, Homo sapien
aagctcccatttcatatggacactcatcccatt

SEQ ID NO: 551685 - DNA, 33 bp, Homo sapien
catggccacgcactgcgaatgtgccatcctggg

SEQ ID NO: 551686 - DNA, 33 bp, Homo sapien
catggccacgcactgctaatgtgccatcctggg

SEQ ID NO: 551687 - DNA, 33 bp, Homo sapien
ccccatccatgatgaacgacttataccttgaac

SEQ ID NO: 551688 - DNA, 33 bp, Homo sapien
ccccatccatgatgaatgacttataccttgaac

SEQ ID NO: 551689 - DNA, 33 bp, Homo sapien
ttatttgtacacagaaacctttaacaagttcaa

SEQ ID NO: 551690 - DNA, 33 bp, Homo sapien
ttatttgtacacagaagcctttaacaagttcaa

SEQ ID NO: 551691 - DNA, 33 bp, Homo sapien
gtcctgaatccaaggaagcgtcgaagaaccagg

SEQ ID NO: 551692 - DNA, 33 bp, Homo sapien
gtcctgaatccaaggaggcgtcgaagaaccagg

SEQ ID NO: 551693 - DNA, 33 bp, Homo sapien
tactttgagatacttgaagatgcacatgcagtt

SEQ ID NO: 551694 - DNA, 33 bp, Homo sapien
tactttgagatacttgtagatgcacatgcagtt

SEQ ID NO: 551695 - DNA, 33 bp, Homo sapien
aaataatacagagagaccttatatagcctttac

SEQ ID NO: 551696 - DNA, 33 bp, Homo sapien
aaataatacagagagatcttatatagcctttac

SEQ ID NO: 551697 - DNA, 33 bp, Homo sapien
gttgatcaaagtggaacattctctccttctggc

SEQ ID NO: 551698 - DNA, 33 bp, Homo sapien
gttgatcaaagtggaagattctctccttctggc

SEQ ID NO: 551699 - DNA, 33 bp, Homo sapien
gatgcgcataatcacacatttcttctgaacaga

SEQ ID NO: 551700 - DNA, 33 bp, Homo sapien
gatgcgcataatcacagatttcttctgaacaga

SEQ ID NO: 551701 - DNA, 33 bp, Homo sapien
atgacatgaggaagccacagacagagacaccca

SEQ ID NO: 551702 - DNA, 33 bp, Homo sapien
atgacatgaggaagccgcagacagagacaccca

SEQ ID NO: 551703 - DNA, 33 bp, Homo sapien
tatctcctgttgtagacactggttgcagacatc

SEQ ID NO: 551704 - DNA, 33 bp, Homo sapien
tatctcctgttgtagatactggttgcagacatc

SEQ ID NO: 551705 - DNA, 33 bp, Homo sapien
gcgtcactcaaacctgacagccttccaaatcac

SEQ ID NO: 551706 - DNA, 33 bp, Homo sapien
gcgtcactcaaacctgccagccttccaaatcac

SEQ ID NO: 551707 - DNA, 33 bp, Homo sapien
ggagaatgttggcccacaagccagcagagatcc

SEQ ID NO: 551708 - DNA, 33 bp, Homo sapien
ggagaatgttggcccataagccagcagagatcc

SEQ ID NO: 551709 - DNA, 33 bp, Homo sapien
gagccttgctctcccccgactgtcatttcactc

SEQ ID NO: 551710 - DNA, 33 bp, Homo sapien
gagccttgctctccccggactgtcatttcactc

SEQ ID NO: 551711 - DNA, 33 bp, Homo sapien
atgtcactgctcagcaacgcggtctgcaagtcc

SEQ ID NO: 551712 - DNA, 33 bp, Homo sapien
atgtcactgctcagcagcgcggtctgcaagtcc

SEQ ID NO: 551713 - DNA, 33 bp, Homo sapien
tgagtgactcagaaaaaaattaaaacaaaccag

SEQ ID NO: 551714 - DNA, 33 bp, Homo sapien
tgagtgactcagaaaagaattaaaacaaaccag

SEQ ID NO: 551715 - DNA, 33 bp, Homo sapien
cctatagaaataaccacacaggctgacctggac

SEQ ID NO: 551716 - DNA, 33 bp, Homo sapien
cctatagaaataaccatacaggctgacctggac

SEQ ID NO: 551717 - DNA, 33 bp, Homo sapien
cctttatcagcaagaacaacaccacacgacaca

SEQ ID NO: 551718 - DNA, 33 bp, Homo sapien
cctttatcagcaagaataacaccacacgacaca

SEQ ID NO: 551719 - DNA, 33 bp, Homo sapien
aggcagctcgagtgcacgtgttggcccatgctg

SEQ ID NO: 551720 - DNA, 33 bp, Homo sapien
aggcagctcgagtgcatgtgttggcccatgctg

SEQ ID NO: 551721 - DNA, 33 bp, Homo sapien
tcccacagtggaaagaaaatgagagacccgtgg

SEQ ID NO: 551722 - DNA, 33 bp, Homo sapien
tcccacagtggaaagagaatgagagacccgtgg

SEQ ID NO: 551723 - DNA, 33 bp, Homo sapien
caagaccactctgttacagggcgggcaaaatcc

SEQ ID NO: 551724 - DNA, 33 bp, Homo sapien
caagaccactctgttatagggcgggcaaaatcc

SEQ ID NO: 551725 - DNA, 33 bp, Homo sapien
aagccctgaagcttgcactgtcttgctgctcaa

SEQ ID NO: 551726 - DNA, 33 bp, Homo sapien
aagccctgaagcttgcgctgtcttgctgctcaa

SEQ ID NO: 551727 - DNA, 33 bp, Homo sapien
cctacctatctgatcaagtcatgctaaaaaaaa

SEQ ID NO: 551728 - DNA, 33 bp, Homo sapien
cctacctatctgatcaggtcatgctaaaaaaaa

SEQ ID NO: 551729 - DNA, 33 bp, Homo sapien
tgggaatggagttcagaagttcactatgaagcc

SEQ ID NO: 551730 - DNA, 33 bp, Homo sapien
tgggaatggagttcaggagttcactatgaagcc

SEQ ID NO: 551731 - DNA, 33 bp, Homo sapien
tctttgaagatcagaaaagtgggttggggcttc

SEQ ID NO: 551732 - DNA, 33 bp, Homo sapien
tctttgaagatcagaacagtgggttggggcttc

SEQ ID NO: 551733 - DNA, 33 bp, Homo sapien
catgtgcttagtccctcacagatgagtcctgct

SEQ ID NO: 551734 - DNA, 33 bp, Homo sapien
catgtgcttagtcccttacagatgagtcctgct

SEQ ID NO: 551735 - DNA, 33 bp, Homo sapien
tgcagtcccagcaaacaccgtggacacctgccg

SEQ ID NO: 551736 - DNA, 33 bp, Homo sapien
tgcagtcccagcaaacgccgtggacacctgccg

SEQ ID NO: 551737 - DNA, 33 bp, Homo sapien
cactccccgtttgagaagttggtgtgtaaaaag

SEQ ID NO: 551738 - DNA, 33 bp, Homo sapien
cactccccgtttgagaggttggtgtgtaaaaag

SEQ ID NO: 551739 - DNA, 33 bp, Homo sapien
tacacacagaacttaaccttacaaacagcaaaa

SEQ ID NO: 551740 - DNA, 33 bp, Homo sapien
tacacacagaacttaagcttacaaacagcaaaa

SEQ ID NO: 551741 - DNA, 33 bp, Homo sapien
ggtgggaccttcaagaagtgattaggtcgtgag

SEQ ID NO: 551742 - DNA, 33 bp, Homo sapien
ggtgggaccttcaagaggtgattaggtcgtgag

SEQ ID NO: 551743 - DNA, 33 bp, Homo sapien
gctgtaacctagtgaactgctacaatgtaatta

SEQ ID NO: 551744 - DNA, 33 bp, Homo sapien
gctgtaacctagtgaattgctacaatgtaatta

SEQ ID NO: 551745 - DNA, 33 bp, Homo sapien
ctttgtcctggacgaacgggatgtgaggcctcc

SEQ ID NO: 551746 - DNA, 33 bp, Homo sapien
ctttgtcctggacgaatgggatgtgaggcctcc

SEQ ID NO: 551747 - DNA, 33 bp, Homo sapien
agggcaaagctcagaaaacagggacaacaggag

SEQ ID NO: 551748 - DNA, 33 bp, Homo sapien
agggcaaagctcagaagacagggacaacaggag

SEQ ID NO: 551749 - DNA, 33 bp, Homo sapien
aaagtcaaggaaatgcaaagaccacacaccagt

SEQ ID NO: 551750 - DNA, 33 bp, Homo sapien
aaagtcaaggaaatgcgaagaccacacaccagt

SEQ ID NO: 551751 - DNA, 33 bp, Homo sapien
ctgctctttgcaattaaaggcactccaaggcca

SEQ ID NO: 551752 - DNA, 33 bp, Homo sapien
ctgctctttgcaattataggcactccaaggcca

SEQ ID NO: 551753 - DNA, 33 bp, Homo sapien
ccagcctgctgggatgaatctctttatcactct

SEQ ID NO: 551754 - DNA, 33 bp, Homo sapien
ccagcctgctgggatgcatctctttatcactct

SEQ ID NO: 551755 - DNA, 33 bp, Homo sapien
gagttttctaggtgaacaagaggaaggatacca

SEQ ID NO: 551756 - DNA, 33 bp, Homo sapien
gagttttctaggtgaagaagaggaaggatacca

SEQ ID NO: 551757 - DNA, 33 bp, Homo sapien
tctattcactctaaaacggcagcagggttgagt

SEQ ID NO: 551758 - DNA, 33 bp, Homo sapien
tctattcactctaaaatggcagcagggttgagt

SEQ ID NO: 551759 - DNA, 33 bp, Homo sapien
agggtaagtacctgaacaggtagagttgtgtct

SEQ ID NO: 551760 - DNA, 33 bp, Homo sapien
agggtaagtacctgaagaggtagagttgtgtct

SEQ ID NO: 551761 - DNA, 33 bp, Homo sapien
gggatgtgtgtccttacatctgtgagaggtcct

SEQ ID NO: 551762 - DNA, 33 bp, Homo sapien
gggatgtgtgtccttagatctgtgagaggtcct

SEQ ID NO: 551763 - DNA, 33 bp, Homo sapien
gaccctcttaagtatccgagttctggcctttca

SEQ ID NO: 551764 - DNA, 33 bp, Homo sapien
gaccctcttaagtatctgagttctggcctttca

SEQ ID NO: 551765 - DNA, 33 bp, Homo sapien
caaacttaaaaattggcatgtgttaaaataata

SEQ ID NO: 551766 - DNA, 33 bp, Homo sapien
caaacttaaaaattggtatgtgttaaaataata

SEQ ID NO: 551767 - DNA, 33 bp, Homo sapien
aaagaagatacggagacgcactaacaacctgaa

SEQ ID NO: 551768 - DNA, 33 bp, Homo sapien
aaagaagatacggagaggcactaacaacctgaa

SEQ ID NO: 551769 - DNA, 33 bp, Homo sapien
tgttcctataagtagcagagactcaaggaagaa

SEQ ID NO: 551770 - DNA, 33 bp, Homo sapien
tgttcctataagtagcggagactcaaggaagaa

SEQ ID NO: 551771 - DNA, 33 bp, Homo sapien
gccggccgacaccacacgggactgtgtttactg

SEQ ID NO: 551772 - DNA, 33 bp, Homo sapien
gccggccgacaccacatgggactgtgtttactg

SEQ ID NO: 551773 - DNA, 33 bp, Homo sapien
atacatttctgttataagccacacagcttgtgg

SEQ ID NO: 551774 - DNA, 33 bp, Homo sapien
atacatttctgttatatgccacacagcttgtgg

SEQ ID NO: 551775 - DNA, 33 bp, Homo sapien
acaatttgaaacaatccgagtatactgtttcaa

SEQ ID NO: 551776 - DNA, 33 bp, Homo sapien
acaatttgaaacaatctgagtatactgtttcaa

SEQ ID NO: 551777 - DNA, 33 bp, Homo sapien
ctgtgcaaaacactaaatgtgcctccagagcac

SEQ ID NO: 551778 - DNA, 33 bp, Homo sapien
ctgtgcaaaacactaactgtgcctccagagcac

SEQ ID NO: 551779 - DNA, 33 bp, Homo sapien
gttgaaaggtccataacgtagggggctgcctga

SEQ ID NO: 551780 - DNA, 33 bp, Homo sapien
gttgaaaggtccataatgtagggggctgcctga

SEQ ID NO: 551781 - DNA, 33 bp, Homo sapien
aggctctctgagggacaaaaaggcaatcttggt

SEQ ID NO: 551782 - DNA, 33 bp, Homo sapien
aggctctctgagggacgaaaaggcaatcttggt

SEQ ID NO: 551783 - DNA, 33 bp, Homo sapien
gagttcagtcatgaacaatgccacagtcagccc

SEQ ID NO: 551784 - DNA, 33 bp, Homo sapien
gagttcagtcatgaacgatgccacagtcagccc

SEQ ID NO: 551785 - DNA, 33 bp, Homo sapien
agctcaggcacccagaacaatgtcacctggatc

SEQ ID NO: 551786 - DNA, 33 bp, Homo sapien
agctcaggcacccagagcaatgtcacctggatc

SEQ ID NO: 551787 - DNA, 33 bp, Homo sapien
gcattattgatctacaggtgtcaacccctttct

SEQ ID NO: 551788 - DNA, 33 bp, Homo sapien
gcattattgatctacatgtgtcaacccctttct

SEQ ID NO: 551789 - DNA, 33 bp, Homo sapien
gttctgaaggtttggacatgagagagaatcaca

SEQ ID NO: 551790 - DNA, 33 bp, Homo sapien
gttctgaaggtttggatatgagagagaatcaca

SEQ ID NO: 551791 - DNA, 33 bp, Homo sapien
ttgaaggctgtatgtaccagtcaagatgctttg

SEQ ID NO: 551792 - DNA, 33 bp, Homo sapien
ttgaaggctgtatgtatcagtcaagatgctttg

SEQ ID NO: 551793 - DNA, 33 bp, Homo sapien
ccagggtcacctcaccagagggcaagggactgc

SEQ ID NO: 551794 - DNA, 33 bp, Homo sapien
ccagggtcacctcaccggagggcaagggactgc

SEQ ID NO: 551795 - DNA, 33 bp, Homo sapien
tgtccagcctgaacaacatcctgcctccagttg

SEQ ID NO: 551796 - DNA, 33 bp, Homo sapien
tgtccagcctgaacaatatcctgcctccagttg

SEQ ID NO: 551797 - DNA, 33 bp, Homo sapien
cacaggcacattgttcacgccctccaacagctc

SEQ ID NO: 551798 - DNA, 33 bp, Homo sapien
cacaggcacattgttcgcgccctccaacagctc

SEQ ID NO: 551799 - DNA, 33 bp, Homo sapien
tcagcatggaaaccacaatgagtgtcaacctgg

SEQ ID NO: 551800 - DNA, 33 bp, Homo sapien
tcagcatggaaaccacgatgagtgtcaacctgg

SEQ ID NO: 551801 - DNA, 33 bp, Homo sapien
tggagctacactggtcaacacggcagccccaag

SEQ ID NO: 551802 - DNA, 33 bp, Homo sapien
tggagctacactggtcgacacggcagccccaag

SEQ ID NO: 551803 - DNA, 33 bp, Homo sapien
atcgatcagtccagtccacctgcattggtcatg

SEQ ID NO: 551804 - DNA, 33 bp, Homo sapien
atcgatcagtccagtctacctgcattggtcatg

SEQ ID NO: 551805 - DNA, 33 bp, Homo sapien
aagtatttgcattctgcatgccttctgcaagta

SEQ ID NO: 551806 - DNA, 33 bp, Homo sapien
aagtatttgcattctgtatgccttctgcaagta

SEQ ID NO: 551807 - DNA, 33 bp, Homo sapien
tgagatgagaagtgccaaatggatataaaggtt

SEQ ID NO: 551808 - DNA, 33 bp, Homo sapien
tgagatgagaagtgcccaatggatataaaggtt

SEQ ID NO: 551809 - DNA, 33 bp, Homo sapien
ttcaccgaaaagacctaaaagcagtgtctcaaa

SEQ ID NO: 551810 - DNA, 33 bp, Homo sapien
ttcaccgaaaagacctgaaagcagtgtctcaaa

SEQ ID NO: 551811 - DNA, 33 bp, Homo sapien
tttttctgctacaagcaagactgcagcaaatga

SEQ ID NO: 551812 - DNA, 33 bp, Homo sapien
tttttctgctacaagcgagactgcagcaaatga

SEQ ID NO: 551813 - DNA, 33 bp, Homo sapien
gacaaggatggtttcacggatgaggacagagat

SEQ ID NO: 551814 - DNA, 33 bp, Homo sapien
gacaaggatggtttcatggatgaggacagagat

SEQ ID NO: 551815 - DNA, 33 bp, Homo sapien
tcctcactgtcgatggaatttttcagtgatacc

SEQ ID NO: 551816 - DNA, 33 bp, Homo sapien
tcctcactgtcgatggtatttttcagtgatacc

SEQ ID NO: 551817 - DNA, 33 bp, Homo sapien
agagccatgcacgttcagaaagcacattccagg

SEQ ID NO: 551818 - DNA, 33 bp, Homo sapien
agagccatgcacgttccgaaagcacattccagg

SEQ ID NO: 551819 - DNA, 33 bp, Homo sapien
gtaccgagctactgaacagcgtttcccatcatt

SEQ ID NO: 551820 - DNA, 33 bp, Homo sapien
gtaccgagctactgaagagcgtttcccatcatt

SEQ ID NO: 551821 - DNA, 33 bp, Homo sapien
agcagtgtcgatcaacaggaggtcgtcctgcac

SEQ ID NO: 551822 - DNA, 33 bp, Homo sapien
agcagtgtcgatcaacgggaggtcgtcctgcac

SEQ ID NO: 551823 - DNA, 33 bp, Homo sapien
acgtactgtagttgacacagcttcaattcagct

SEQ ID NO: 551824 - DNA, 33 bp, Homo sapien
acgtactgtagttgacgcagcttcaattcagct

SEQ ID NO: 551825 - DNA, 33 bp, Homo sapien
gtccgcccgaggtgacacaatggactcagagta

SEQ ID NO: 551826 - DNA, 33 bp, Homo sapien
gtccgcccgaggtgacgcaatggactcagagta

SEQ ID NO: 551827 - DNA, 33 bp, Homo sapien
ctggaggctttccaaacgcttctctgacctgac

SEQ ID NO: 551828 - DNA, 33 bp, Homo sapien
ctggaggctttccaaatgcttctctgacctgac

SEQ ID NO: 551829 - DNA, 33 bp, Homo sapien
ctgcctgattttatcaccacctttaactaatcg

SEQ ID NO: 551830 - DNA, 33 bp, Homo sapien
ctgcctgattttatcatcacctttaactaatcg

SEQ ID NO: 551831 - DNA, 33 bp, Homo sapien
gatcagaatattcaaaatcaagtctcagaagaa

SEQ ID NO: 551832 - DNA, 33 bp, Homo sapien
gatcagaatattcaaagtcaagtctcagaagaa

SEQ ID NO: 551833 - DNA, 33 bp, Homo sapien
acctggcaacagaaatgatatgtattccgagac

SEQ ID NO: 551834 - DNA, 33 bp, Homo sapien
acctggcaacagaaattatatgtattccgagac

SEQ ID NO: 551835 - DNA, 33 bp, Homo sapien
ttactctgcttttaaaatctgtggtgataccct

SEQ ID NO: 551836 - DNA, 33 bp, Homo sapien
ttactctgcttttaaactctgtggtgataccct

SEQ ID NO: 551837 - DNA, 33 bp, Homo sapien
gtgtgtgatagagagacgggaatgaacacatgg

SEQ ID NO: 551838 - DNA, 33 bp, Homo sapien
gtgtgtgatagagagatgggaatgaacacatgg

SEQ ID NO: 551839 - DNA, 33 bp, Homo sapien
cgccttgcaaagaccccaaattcatgaaggcac

SEQ ID NO: 551840 - DNA, 33 bp, Homo sapien
cgccttgcaaagacccgaaattcatgaaggcac

SEQ ID NO: 551841 - DNA, 33 bp, Homo sapien
aagcatggagcgtgtacggagaggggaggtggc

SEQ ID NO: 551842 - DNA, 33 bp, Homo sapien
aagcatggagcgtgtatggagaggggaggtggc

SEQ ID NO: 551843 - DNA, 33 bp, Homo sapien
agaacaagcgtcagcacgcagtttctccccttc

SEQ ID NO: 551844 - DNA, 33 bp, Homo sapien
agaacaagcgtcagcatgcagtttctccccttc

SEQ ID NO: 551845 - DNA, 33 bp, Homo sapien
ctgagcaccaaagaagaaaacacgtttaagtga

SEQ ID NO: 551846 - DNA, 33 bp, Homo sapien
ctgagcaccaaagaagtaaacacgtttaagtga

SEQ ID NO: 551847 - DNA, 33 bp, Homo sapien
ccggagaccagtacaggagtgaacagatgagta

SEQ ID NO: 551848 - DNA, 33 bp, Homo sapien
ccggagaccagtacagtagtgaacagatgagta

SEQ ID NO: 551849 - DNA, 33 bp, Homo sapien
aaaccatgtcaaataagttagaacctatataga

SEQ ID NO: 551850 - DNA, 33 bp, Homo sapien
aaaccatgtcaaataatttagaacctatataga

SEQ ID NO: 551851 - DNA, 33 bp, Homo sapien
tgtcttgaagactgtcactgggcccctggcata

SEQ ID NO: 551852 - DNA, 33 bp, Homo sapien
tgtcttgaagactgtcgctgggcccctggcata

SEQ ID NO: 551853 - DNA, 33 bp, Homo sapien
atatcgccacggtccacgtgcaccttatgttta

SEQ ID NO: 551854 - DNA, 33 bp, Homo sapien
atatcgccacggtccatgtgcaccttatgttta

SEQ ID NO: 551855 - DNA, 33 bp, Homo sapien
atccttctccatcctacgccattcatgccctgg

SEQ ID NO: 551856 - DNA, 33 bp, Homo sapien
atccttctccatcctatgccattcatgccctgg

SEQ ID NO: 551857 - DNA, 33 bp, Homo sapien
cgctttagcaagggaacaaaaattttgcttctc

SEQ ID NO: 551858 - DNA, 33 bp, Homo sapien
cgctttagcaagggaagaaaaattttgcttctc

SEQ ID NO: 551859 - DNA, 33 bp, Homo sapien
acacagagataattcagaatgaagcttgagaaa

SEQ ID NO: 551860 - DNA, 33 bp, Homo sapien
acacagagataattcataatgaagcttgagaaa

SEQ ID NO: 551861 - DNA, 33 bp, Homo sapien
gacacactcattagaaaaaacgagataccagta

SEQ ID NO: 551862 - DNA, 33 bp, Homo sapien
gacacactcattagaacaaacgagataccagta

SEQ ID NO: 551863 - DNA, 33 bp, Homo sapien
atatttcttagagcaaatggatcagaagaagaa

SEQ ID NO: 551864 - DNA, 33 bp, Homo sapien
atatttcttagagcaagtggatcagaagaagaa

SEQ ID NO: 551865 - DNA, 33 bp, Homo sapien
ggttgatgaggtgaaaaagtgcttgcggcctca

SEQ ID NO: 551866 - DNA, 33 bp, Homo sapien
ggttgatgaggtgaaagagtgcttgcggcctca

SEQ ID NO: 551867 - DNA, 33 bp, Homo sapien
tatgtgtaggaatcaccattttggggaaaccat

SEQ ID NO: 551868 - DNA, 33 bp, Homo sapien
tatgtgtaggaatcactattttggggaaaccat

SEQ ID NO: 551869 - DNA, 33 bp, Homo sapien
agctgcgttagagttaagcaaagtctccacttg

SEQ ID NO: 551870 - DNA, 33 bp, Homo sapien
agctgcgttagagttacgcaaagtctccacttg

SEQ ID NO: 551871 - DNA, 33 bp, Homo sapien
ttctgaaagagacacacgaaacttatgttaaag

SEQ ID NO: 551872 - DNA, 33 bp, Homo sapien
ttctgaaagagacacatgaaacttatgttaaag

SEQ ID NO: 551873 - DNA, 33 bp, Homo sapien
aataatgttggataccaaggtcctaccaagatg

SEQ ID NO: 551874 - DNA, 33 bp, Homo sapien
aataatgttggataccgaggtcctaccaagatg

SEQ ID NO: 551875 - DNA, 33 bp, Homo sapien
gtcctaccaagatgacaaaagaagagttaaatg

SEQ ID NO: 551876 - DNA, 33 bp, Homo sapien
gtcctaccaagatgacgaaagaagagttaaatg

SEQ ID NO: 551877 - DNA, 33 bp, Homo sapien
gagaaagtgaatagcacggtgacttactgagtc

SEQ ID NO: 551878 - DNA, 33 bp, Homo sapien
gagaaagtgaatagcatggtgacttactgagtc

SEQ ID NO: 551879 - DNA, 33 bp, Homo sapien
tacacattcttcttaaccacattggagacattt

SEQ ID NO: 551880 - DNA, 33 bp, Homo sapien
tacacattcttcttaagcacattggagacattt

SEQ ID NO: 551881 - DNA, 33 bp, Homo sapien
acggtcttcgtctctcagaaggcaggggaagaa

SEQ ID NO: 551882 - DNA, 33 bp, Homo sapien
acggtcttcgtctctcggaaggcaggggaagaa

SEQ ID NO: 551883 - DNA, 33 bp, Homo sapien
gcacgggagcccctaaacgccaagctcgccacg

SEQ ID NO: 551884 - DNA, 33 bp, Homo sapien
gcacgggagcccctaagcgccaagctcgccacg

SEQ ID NO: 551885 - DNA, 33 bp, Homo sapien
tttccagtttcagagacgaatacctttctttgg

SEQ ID NO: 551886 - DNA, 33 bp, Homo sapien
tttccagtttcagagatgaatacctttctttgg

SEQ ID NO: 551887 - DNA, 33 bp, Homo sapien
aaaccatttggaaaccaggcaatttctaatggt

SEQ ID NO: 551888 - DNA, 33 bp, Homo sapien
aaaccatttggaaaccgggcaatttctaatggt

SEQ ID NO: 551889 - DNA, 33 bp, Homo sapien
atggtatctacagccactaaaattacagaggat

SEQ ID NO: 551890 - DNA, 33 bp, Homo sapien
atggtatctacagccattaaaattacagaggat

SEQ ID NO: 551891 - DNA, 33 bp, Homo sapien
gcttttcttttatataactcccttctctcagga

SEQ ID NO: 551892 - DNA, 33 bp, Homo sapien
gcttttcttttatatatctcccttctctcagga

SEQ ID NO: 551893 - DNA, 33 bp, Homo sapien
gttaatcaagtgttacaaaggttcctgatgaat

SEQ ID NO: 551894 - DNA, 33 bp, Homo sapien
gttaatcaagtgttacgaaggttcctgatgaat

SEQ ID NO: 551895 - DNA, 33 bp, Homo sapien
ccaccaaatcccactacacaactcacactccta

SEQ ID NO: 551896 - DNA, 33 bp, Homo sapien
ccaccaaatcccactatacaactcacactccta

SEQ ID NO: 551897 - DNA, 33 bp, Homo sapien
ccactgttaaaaccaaaacacttgcaagtagct

SEQ ID NO: 551898 - DNA, 33 bp, Homo sapien
ccactgttaaaaccaacacacttgcaagtagct

SEQ ID NO: 551899 - DNA, 33 bp, Homo sapien
caagggctaatcaagtcaagagaatgtgtgccc

SEQ ID NO: 551900 - DNA, 33 bp, Homo sapien
caagggctaatcaagtgaagagaatgtgtgccc

SEQ ID NO: 551901 - DNA, 33 bp, Homo sapien
aggccgtcccgcgttgcaaaacctgcagacggg

SEQ ID NO: 551902 - DNA, 33 bp, Homo sapien
aggccgtcccgcgttggaaaacctgcagacggg

SEQ ID NO: 551903 - DNA, 33 bp, Homo sapien
tttgtttcttagtaaacgaaaacagtgaaggcc

SEQ ID NO: 551904 - DNA, 33 bp, Homo sapien
tttgtttcttagtaaatgaaaacagtgaaggcc

SEQ ID NO: 551905 - DNA, 33 bp, Homo sapien
accttccttgtttaccaagaaaactattcatgt

SEQ ID NO: 551906 - DNA, 33 bp, Homo sapien
accttccttgtttaccgagaaaactattcatgt

SEQ ID NO: 551907 - DNA, 33 bp, Homo sapien
gttctgccgaaagtccaaagtcctgtaatttta

SEQ ID NO: 551908 - DNA, 33 bp, Homo sapien
gttctgccgaaagtccgaagtcctgtaatttta

SEQ ID NO: 551909 - DNA, 33 bp, Homo sapien
aacccacggaaccataaaggtgctagaagaaaa

SEQ ID NO: 551910 - DNA, 33 bp, Homo sapien
aacccacggaaccatacaggtgctagaagaaaa

SEQ ID NO: 551911 - DNA, 33 bp, Homo sapien
aggctgctgctgacctcaaaaagccaatgtacg

SEQ ID NO: 551912 - DNA, 33 bp, Homo sapien
aggctgctgctgacctgaaaaagccaatgtacg

SEQ ID NO: 551913 - DNA, 33 bp, Homo sapien
cttctattcaacgtcccgagtaaagcagggatc

SEQ ID NO: 551914 - DNA, 33 bp, Homo sapien
cttctattcaacgtcctgagtaaagcagggatc

SEQ ID NO: 551915 - DNA, 33 bp, Homo sapien
ctgccaaggactctgacccctggtttatttctc

SEQ ID NO: 551916 - DNA, 33 bp, Homo sapien
ctgccaaggactctgagccctggtttatttctc

SEQ ID NO: 551917 - DNA, 33 bp, Homo sapien
atgaattcatcactaacaccatcaaacctcagt

SEQ ID NO: 551918 - DNA, 33 bp, Homo sapien
atgaattcatcactaagaccatcaaacctcagt

SEQ ID NO: 551919 - DNA, 33 bp, Homo sapien
tgagtgacagcttggcaagataataaatctcca

SEQ ID NO: 551920 - DNA, 33 bp, Homo sapien
tgagtgacagcttggcgagataataaatctcca

SEQ ID NO: 551921 - DNA, 33 bp, Homo sapien
atgtacctgtgccagcccagggatgcctacaca

SEQ ID NO: 551922 - DNA, 33 bp, Homo sapien
atgtacctgtgccagctcagggatgcctacaca

SEQ ID NO: 551923 - DNA, 33 bp, Homo sapien
ttatgtggatctcaaactctttcttatcactga

SEQ ID NO: 551924 - DNA, 33 bp, Homo sapien
ttatgtggatctcaaattctttcttatcactga

SEQ ID NO: 551925 - DNA, 33 bp, Homo sapien
ggtcgggtgagtcaaaaggagaataatcggtga

SEQ ID NO: 551926 - DNA, 33 bp, Homo sapien
ggtcgggtgagtcaaagggagaataatcggtga

SEQ ID NO: 551927 - DNA, 33 bp, Homo sapien
agcacattgggttccacgcaaagcatcttggtg

SEQ ID NO: 551928 - DNA, 33 bp, Homo sapien
agcacattgggttccatgcaaagcatcttggtg

SEQ ID NO: 551929 - DNA, 33 bp, Homo sapien
ggaaataaggagagaaacaaaggctatttatct

SEQ ID NO: 551930 - DNA, 33 bp, Homo sapien
ggaaataaggagagaagcaaaggctatttatct

SEQ ID NO: 551931 - DNA, 33 bp, Homo sapien
gcttttgagtgtctgccgaaacacaggagagtg

SEQ ID NO: 551932 - DNA, 33 bp, Homo sapien
gcttttgagtgtctgctgaaacacaggagagtg

SEQ ID NO: 551933 - DNA, 33 bp, Homo sapien
tgaatagatttcaaagacatagtattaagttaa

SEQ ID NO: 551934 - DNA, 33 bp, Homo sapien
tgaatagatttcaaagccatagtattaagttaa

SEQ ID NO: 551935 - DNA, 33 bp, Homo sapien
ctctaacagagctaaaccataaaaggtggcact

SEQ ID NO: 551936 - DNA, 33 bp, Homo sapien
ctctaacagagctaaatcataaaaggtggcact

SEQ ID NO: 551937 - DNA, 33 bp, Homo sapien
attttatggcagcctaagcagaataagatgctg

SEQ ID NO: 551938 - DNA, 33 bp, Homo sapien
attttatggcagcctacgcagaataagatgctg

SEQ ID NO: 551939 - DNA, 33 bp, Homo sapien
ataaaaaatgtacttccctaacattctaagaaa

SEQ ID NO: 551940 - DNA, 33 bp, Homo sapien
ataaaaaatgtacttctctaacattctaagaaa

SEQ ID NO: 551941 - DNA, 33 bp, Homo sapien
attaattgctttcttacctgtctgaagtttggc

SEQ ID NO: 551942 - DNA, 33 bp, Homo sapien
attaattgctttcttatctgtctgaagtttggc

SEQ ID NO: 551943 - DNA, 33 bp, Homo sapien
agatgcattctgtcccacatccactttgagtga

SEQ ID NO: 551944 - DNA, 33 bp, Homo sapien
agatgcattctgtcccgcatccactttgagtga

SEQ ID NO: 551945 - DNA, 33 bp, Homo sapien
caccgctaactttacacgtgttcaaaggttagc

SEQ ID NO: 551946 - DNA, 33 bp, Homo sapien
caccgctaactttacatgtgttcaaaggttagc

SEQ ID NO: 551947 - DNA, 33 bp, Homo sapien
gcgagatgatgtggacactttttttctaaattc

SEQ ID NO: 551948 - DNA, 33 bp, Homo sapien
gcgagatgatgtggacgctttttttctaaattc

SEQ ID NO: 551949 - DNA, 33 bp, Homo sapien
gtcacagtgatttgagccgacataccccttcaa

SEQ ID NO: 551950 - DNA, 33 bp, Homo sapien
gtcacagtgatttgaggcgacataccccttcaa

SEQ ID NO: 551951 - DNA, 33 bp, Homo sapien
aacaaaatgacaacataacaacaggagtaactg

SEQ ID NO: 551952 - DNA, 33 bp, Homo sapien
aacaaaatgacaacatgacaacaggagtaactg

SEQ ID NO: 551953 - DNA, 33 bp, Homo sapien
acatattcaattataacgtcttgtgttatgttt

SEQ ID NO: 551954 - DNA, 33 bp, Homo sapien
acatattcaattataatgtcttgtgttatgttt

SEQ ID NO: 551955 - DNA, 33 bp, Homo sapien
ctgggtgcctactgcacgcaagacacagtgctg

SEQ ID NO: 551956 - DNA, 33 bp, Homo sapien
ctgggtgcctactgcatgcaagacacagtgctg

SEQ ID NO: 551957 - DNA, 33 bp, Homo sapien
cactgcaaaagcatcaaccccagctggtccagg

SEQ ID NO: 551958 - DNA, 33 bp, Homo sapien
cactgcaaaagcatcagccccagctggtccagg

SEQ ID NO: 551959 - DNA, 33 bp, Homo sapien
gacatccagttggacaaccagaacctttgcttc

SEQ ID NO: 551960 - DNA, 33 bp, Homo sapien
gacatccagttggacatccagaacctttgcttc

SEQ ID NO: 551961 - DNA, 33 bp, Homo sapien
gggtaagcctctcagaagaaggctcacatctta

SEQ ID NO: 551962 - DNA, 33 bp, Homo sapien
gggtaagcctctcagaggaaggctcacatctta

SEQ ID NO: 551963 - DNA, 33 bp, Homo sapien
gcagattgaagagctacagtcgctcaacaaaca

SEQ ID NO: 551964 - DNA, 33 bp, Homo sapien
gcagattgaagagctatagtcgctcaacaaaca

SEQ ID NO: 551965 - DNA, 33 bp, Homo sapien
ttttccataagtagtgcagatctgtagattccc

SEQ ID NO: 551966 - DNA, 33 bp, Homo sapien
ttttccataagtagtgtagatctgtagattccc

SEQ ID NO: 551967 - DNA, 33 bp, Homo sapien
tatccaggccatgaccaaggccatgtgggaagc

SEQ ID NO: 551968 - DNA, 33 bp, Homo sapien
tatccaggccatgaccgaggccatgtgggaagc

SEQ ID NO: 551969 - DNA, 33 bp, Homo sapien
tcccttttaaatgctaaacaagtgccactaatc

SEQ ID NO: 551970 - DNA, 33 bp, Homo sapien
tcccttttaaatgctacacaagtgccactaatc

SEQ ID NO: 551971 - DNA, 33 bp, Homo sapien
agcctggttactgtcgaagaagcaggacaggcc

SEQ ID NO: 551972 - DNA, 33 bp, Homo sapien
agcctggttactgtcgcagaagcaggacaggcc

SEQ ID NO: 551973 - DNA, 33 bp, Homo sapien
cccactagagaaaccacaggatccccaagtcgg

SEQ ID NO: 551974 - DNA, 33 bp, Homo sapien
cccactagagaaaccataggatccccaagtcgg

SEQ ID NO: 551975 - DNA, 33 bp, Homo sapien
gggaagctgaggagccagaggagtcagctgatt

SEQ ID NO: 551976 - DNA, 33 bp, Homo sapien
gggaagctgaggagccggaggagtcagctgatt

SEQ ID NO: 551977 - DNA, 33 bp, Homo sapien
ccatgccgtgagtaaacacaacgtgacgctgtc

SEQ ID NO: 551978 - DNA, 33 bp, Homo sapien
ccatgccgtgagtaaatacaacgtgacgctgtc

SEQ ID NO: 551979 - DNA, 33 bp, Homo sapien
cgagcgtgaaatcaccaagttaaaatctgtaag

SEQ ID NO: 551980 - DNA, 33 bp, Homo sapien
cgagcgtgaaatcaccgagttaaaatctgtaag

SEQ ID NO: 551981 - DNA, 33 bp, Homo sapien
ggctccactgtactcaacttgtagacgaggaaa

SEQ ID NO: 551982 - DNA, 33 bp, Homo sapien
ggctccactgtactcaccttgtagacgaggaaa

SEQ ID NO: 551983 - DNA, 33 bp, Homo sapien
accgcctgcaggcctcacattcccgtcattgtt

SEQ ID NO: 551984 - DNA, 33 bp, Homo sapien
accgcctgcaggcctcgcattcccgtcattgtt

SEQ ID NO: 551985 - DNA, 33 bp, Homo sapien
gggcgtgacacacacacaggcatgatctgcact

SEQ ID NO: 551986 - DNA, 33 bp, Homo sapien
gggcgtgacacacacagaggcatgatctgcact

SEQ ID NO: 551987 - DNA, 33 bp, Homo sapien
acagagcttttgggccacatgtgttttgttttt

SEQ ID NO: 551988 - DNA, 33 bp, Homo sapien
acagagcttttgggccccatgtgttttgttttt

SEQ ID NO: 551989 - DNA, 33 bp, Homo sapien
acagcctgcatgagaacggcgcgctggtgccac

SEQ ID NO: 551990 - DNA, 33 bp, Homo sapien
acagcctgcatgagaatggcgcgctggtgccac

SEQ ID NO: 551991 - DNA, 33 bp, Homo sapien
gttgctctggagaacccacagatttagttcagt

SEQ ID NO: 551992 - DNA, 33 bp, Homo sapien
gttgctctggagaacctacagatttagttcagt

SEQ ID NO: 551993 - DNA, 33 bp, Homo sapien
tgggctcttatccaggaaagaaagagtcggcgt

SEQ ID NO: 551994 - DNA, 33 bp, Homo sapien
tgggctcttatccagggaagaaagagtcggcgt

SEQ ID NO: 551995 - DNA, 33 bp, Homo sapien
ttgttacggatactgaactgtgagccactgaga

SEQ ID NO: 551996 - DNA, 33 bp, Homo sapien
ttgttacggatactgacctgtgagccactgaga

SEQ ID NO: 551997 - DNA, 33 bp, Homo sapien
agctgaacagatgggaagtttacatatagcatt

SEQ ID NO: 551998 - DNA, 33 bp, Homo sapien
agctgaacagatgggacgtttacatatagcatt

SEQ ID NO: 551999 - DNA, 33 bp, Homo sapien
tgcctcagcttcccgaagcactggaattacagg

SEQ ID NO: 552000 - DNA, 33 bp, Homo sapien
tgcctcagcttcccgatgcactggaattacagg

SEQ ID NO: 552001 - DNA, 33 bp, Homo sapien
ctgctagtagatttggaaatgttttactattgt

SEQ ID NO: 552002 - DNA, 33 bp, Homo sapien
ctgctagtagatttggcaatgttttactattgt

SEQ ID NO: 552003 - DNA, 33 bp, Homo sapien
acatttgagtcaagcactctgtttaacaaggca

SEQ ID NO: 552004 - DNA, 33 bp, Homo sapien
acatttgagtcaagcattctgtttaacaaggca

SEQ ID NO: 552005 - DNA, 33 bp, Homo sapien
ccagatggtgcagctaagggagtgcttgcatca

SEQ ID NO: 552006 - DNA, 33 bp, Homo sapien
ccagatggtgcagctacgggagtgcttgcatca

SEQ ID NO: 552007 - DNA, 33 bp, Homo sapien
atagtaactggaagagaaatttggtacccagag

SEQ ID NO: 552008 - DNA, 33 bp, Homo sapien
atagtaactggaagagcaatttggtacccagag

SEQ ID NO: 552009 - DNA, 33 bp, Homo sapien
gttagctgactttgataacaactctgttctgat

SEQ ID NO: 552010 - DNA, 33 bp, Homo sapien
gttagctgactttgatgacaactctgttctgat

SEQ ID NO: 552011 - DNA, 33 bp, Homo sapien
aactgcaagacaataaccgtgtgtttgaagcca

SEQ ID NO: 552012 - DNA, 33 bp, Homo sapien
aactgcaagacaataatcgtgtgtttgaagcca

SEQ ID NO: 552013 - DNA, 33 bp, Homo sapien
ggcttctatgattgaactgaggtgagccagagt

SEQ ID NO: 552014 - DNA, 33 bp, Homo sapien
ggcttctatgattgaattgaggtgagccagagt

SEQ ID NO: 552015 - DNA, 33 bp, Homo sapien
cctccgcaggcgtaggaacactgtgtgagattc

SEQ ID NO: 552016 - DNA, 33 bp, Homo sapien
cctccgcaggcgtagggacactgtgtgagattc

SEQ ID NO: 552017 - DNA, 33 bp, Homo sapien
ttcatgctgggctctgcaacgaagctggcaaac

SEQ ID NO: 552018 - DNA, 33 bp, Homo sapien
ttcatgctgggctctggaacgaagctggcaaac

SEQ ID NO: 552019 - DNA, 33 bp, Homo sapien
aatgctggcagaaccacactgaggcaacagcct

SEQ ID NO: 552020 - DNA, 33 bp, Homo sapien
aatgctggcagaaccatactgaggcaacagcct

SEQ ID NO: 552021 - DNA, 33 bp, Homo sapien
gtcagtcattctaacaactttatcaagtaggtc

SEQ ID NO: 552022 - DNA, 33 bp, Homo sapien
gtcagtcattctaacatctttatcaagtaggtc

SEQ ID NO: 552023 - DNA, 33 bp, Homo sapien
ggctgtgtggacagacaggtaaagatgacacca

SEQ ID NO: 552024 - DNA, 33 bp, Homo sapien
ggctgtgtggacagacgggtaaagatgacacca

SEQ ID NO: 552025 - DNA, 33 bp, Homo sapien
tagcccacagtgaaaacctcaagaaagaaaaaa

SEQ ID NO: 552026 - DNA, 33 bp, Homo sapien
tagcccacagtgaaaagctcaagaaagaaaaaa

SEQ ID NO: 552027 - DNA, 33 bp, Homo sapien
gtcttccttcttttgaaggccgagtagtgccct

SEQ ID NO: 552028 - DNA, 33 bp, Homo sapien
gtcttccttcttttgagggccgagtagtgccct

SEQ ID NO: 552029 - DNA, 33 bp, Homo sapien
ggtggtgatggctgcacatgaatgaatttacca

SEQ ID NO: 552030 - DNA, 33 bp, Homo sapien
ggtggtgatggctgcagatgaatgaatttacca

SEQ ID NO: 552031 - DNA, 33 bp, Homo sapien
catgctaaaagccgaacgtacaggcctggcctg

SEQ ID NO: 552032 - DNA, 33 bp, Homo sapien
catgctaaaagccgaatgtacaggcctggcctg

SEQ ID NO: 552033 - DNA, 33 bp, Homo sapien
tttgccagtttttgcacgagtgtttctttttca

SEQ ID NO: 552034 - DNA, 33 bp, Homo sapien
tttgccagtttttgcatgagtgtttctttttca

SEQ ID NO: 552035 - DNA, 33 bp, Homo sapien
tttgaacaaatcaacaaacatcagccctcccct

SEQ ID NO: 552036 - DNA, 33 bp, Homo sapien
tttgaacaaatcaacagacatcagccctcccct

SEQ ID NO: 552037 - DNA, 33 bp, Homo sapien
actggaaacgctgaagaattttattttatttta

SEQ ID NO: 552038 - DNA, 33 bp, Homo sapien
actggaaacgctgaaggattttattttatttta

SEQ ID NO: 552039 - DNA, 33 bp, Homo sapien
gcctccgccgacaacactctccagttattattg

SEQ ID NO: 552040 - DNA, 33 bp, Homo sapien
gcctccgccgacaacattctccagttattattg

SEQ ID NO: 552041 - DNA, 33 bp, Homo sapien
taccagctataaaaggcagttactgggcaacaa

SEQ ID NO: 552042 - DNA, 33 bp, Homo sapien
taccagctataaaaggtagttactgggcaacaa

SEQ ID NO: 552043 - DNA, 33 bp, Homo sapien
tatccttgacagtcaacgattccaccaggatgt

SEQ ID NO: 552044 - DNA, 33 bp, Homo sapien
tatccttgacagtcaatgattccaccaggatgt

SEQ ID NO: 552045 - DNA, 33 bp, Homo sapien
tgcctatcaaaaagtacacagtcatccttcatt

SEQ ID NO: 552046 - DNA, 33 bp, Homo sapien
tgcctatcaaaaagtatacagtcatccttcatt

SEQ ID NO: 552047 - DNA, 33 bp, Homo sapien
ttttagttaatttccaatggaaagggctaacct

SEQ ID NO: 552048 - DNA, 33 bp, Homo sapien
ttttagttaatttccattggaaagggctaacct

SEQ ID NO: 552049 - DNA, 33 bp, Homo sapien
ttgaacaggaagtagccgaggcgagaaccacag

SEQ ID NO: 552050 - DNA, 33 bp, Homo sapien
ttgaacaggaagtagctgaggcgagaaccacag

SEQ ID NO: 552051 - DNA, 33 bp, Homo sapien
aagatcatctcctaacaacaggttcttcaagtt

SEQ ID NO: 552052 - DNA, 33 bp, Homo sapien
aagatcatctcctaacgacaggttcttcaagtt

SEQ ID NO: 552053 - DNA, 33 bp, Homo sapien
atcgatttgaacaaaacggttacaagctcgaca

SEQ ID NO: 552054 - DNA, 33 bp, Homo sapien
atcgatttgaacaaaatggttacaagctcgaca

SEQ ID NO: 552055 - DNA, 33 bp, Homo sapien
ggagtgatgcaagctcaacatcccgtggggctc

SEQ ID NO: 552056 - DNA, 33 bp, Homo sapien
ggagtgatgcaagctcgacatcccgtggggctc

SEQ ID NO: 552057 - DNA, 33 bp, Homo sapien
ataacctcatttaaaaaacaggcaaaatggctg

SEQ ID NO: 552058 - DNA, 33 bp, Homo sapien
ataacctcatttaaaacacaggcaaaatggctg

SEQ ID NO: 552059 - DNA, 33 bp, Homo sapien
cagtgtccgggagctacggtttctatcgtgtgg

SEQ ID NO: 552060 - DNA, 33 bp, Homo sapien
cagtgtccgggagctatggtttctatcgtgtgg

SEQ ID NO: 552061 - DNA, 33 bp, Homo sapien
caccacagacccgtgtgaagcccaggtgcaggc

SEQ ID NO: 552062 - DNA, 33 bp, Homo sapien
caccacagacccgtgttaagcccaggtgcaggc

SEQ ID NO: 552063 - DNA, 33 bp, Homo sapien
cccgttagccgatacaaatttgatatgacccaa

SEQ ID NO: 552064 - DNA, 33 bp, Homo sapien
cccgttagccgatacagatttgatatgacccaa

SEQ ID NO: 552065 - DNA, 33 bp, Homo sapien
cagaaatccagcaagaaggaactcccaccacac

SEQ ID NO: 552066 - DNA, 33 bp, Homo sapien
cagaaatccagcaagagggaactcccaccacac

SEQ ID NO: 552067 - DNA, 33 bp, Homo sapien
gaaagcccagaacacacgaaactattggcgcga

SEQ ID NO: 552068 - DNA, 33 bp, Homo sapien
gaaagcccagaacacatgaaactattggcgcga

SEQ ID NO: 552069 - DNA, 33 bp, Homo sapien
ggcctgcagtggccgcaattcgcaacggtgtgc

SEQ ID NO: 552070 - DNA, 33 bp, Homo sapien
ggcctgcagtggccgcgattcgcaacggtgtgc

SEQ ID NO: 552071 - DNA, 33 bp, Homo sapien
agagagtgctaacctaacaaagtataatatgta

SEQ ID NO: 552072 - DNA, 33 bp, Homo sapien
agagagtgctaacctatcaaagtataatatgta

SEQ ID NO: 552073 - DNA, 33 bp, Homo sapien
attttaatcatactaacggttgccttttttttt

SEQ ID NO: 552074 - DNA, 33 bp, Homo sapien
attttaatcatactaatggttgccttttttttt

SEQ ID NO: 552075 - DNA, 33 bp, Homo sapien
actgaagtagcttagacaatcaggttagaaatc

SEQ ID NO: 552076 - DNA, 33 bp, Homo sapien
actgaagtagcttagataatcaggttagaaatc

SEQ ID NO: 552077 - DNA, 33 bp, Homo sapien
caggtgaactcctgtcaatgtatataaagaaat

SEQ ID NO: 552078 - DNA, 33 bp, Homo sapien
caggtgaactcctgtccatgtatataaagaaat

SEQ ID NO: 552079 - DNA, 33 bp, Homo sapien
ggggccttcagtggtccactctgatttctttct

SEQ ID NO: 552080 - DNA, 33 bp, Homo sapien
ggggccttcagtggtctactctgatttctttct

SEQ ID NO: 552081 - DNA, 33 bp, Homo sapien
tacagggaaattagtaagcctccaacctcagcc

SEQ ID NO: 552082 - DNA, 33 bp, Homo sapien
tacagggaaattagtaggcctccaacctcagcc

SEQ ID NO: 552083 - DNA, 33 bp, Homo sapien
gccttctagtatctcaatgaaaagggagtttcg

SEQ ID NO: 552084 - DNA, 33 bp, Homo sapien
gccttctagtatctcagtgaaaagggagtttcg

SEQ ID NO: 552085 - DNA, 33 bp, Homo sapien
accacccagaggactccctgcatttttcacttt

SEQ ID NO: 552086 - DNA, 33 bp, Homo sapien
accacccagaggactcgctgcatttttcacttt

SEQ ID NO: 552087 - DNA, 33 bp, Homo sapien
agccactctcatgggcagagcgaataatcgaaa

SEQ ID NO: 552088 - DNA, 33 bp, Homo sapien
agccactctcatgggcggagcgaataatcgaaa

SEQ ID NO: 552089 - DNA, 33 bp, Homo sapien
tgtattcctagggataccatgttcaattagcca

SEQ ID NO: 552090 - DNA, 33 bp, Homo sapien
tgtattcctagggatatcatgttcaattagcca

SEQ ID NO: 552091 - DNA, 33 bp, Homo sapien
tgtgtgtgcaggtaccactctgataaagaaaac

SEQ ID NO: 552092 - DNA, 33 bp, Homo sapien
tgtgtgtgcaggtaccgctctgataaagaaaac

SEQ ID NO: 552093 - DNA, 33 bp, Homo sapien
cagagctggtttatgaagtcccagagtggctga

SEQ ID NO: 552094 - DNA, 33 bp, Homo sapien
cagagctggtttatgaggtcccagagtggctga

SEQ ID NO: 552095 - DNA, 33 bp, Homo sapien
tgattctgcttcccaccgcaatggtgcctgcac

SEQ ID NO: 552096 - DNA, 33 bp, Homo sapien
tgattctgcttcccactgcaatggtgcctgcac

SEQ ID NO: 552097 - DNA, 33 bp, Homo sapien
ctctccattttcgatagaattgctttaaagtat

SEQ ID NO: 552098 - DNA, 33 bp, Homo sapien
ctctccattttcgatataattgctttaaagtat

SEQ ID NO: 552099 - DNA, 33 bp, Homo sapien
tcctatcctccaggaaactcttgagaaaggatg

SEQ ID NO: 552100 - DNA, 33 bp, Homo sapien
tcctatcctccaggaacctcttgagaaaggatg

SEQ ID NO: 552101 - DNA, 33 bp, Homo sapien
gaactgggcagcccccaatccctggcacttctg

SEQ ID NO: 552102 - DNA, 33 bp, Homo sapien
gaactgggcagcccccgatccctggcacttctg

SEQ ID NO: 552103 - DNA, 33 bp, Homo sapien
tcacatcaagcgttccaaccctccgtttgcctg

SEQ ID NO: 552104 - DNA, 33 bp, Homo sapien
tcacatcaagcgttccgaccctccgtttgcctg

SEQ ID NO: 552105 - DNA, 33 bp, Homo sapien
acagaggaattcatcaatcaaacatccaacttt

SEQ ID NO: 552106 - DNA, 33 bp, Homo sapien
acagaggaattcatcagtcaaacatccaacttt

SEQ ID NO: 552107 - DNA, 33 bp, Homo sapien
agactgggttgaatgccgaggaatgttactctc

SEQ ID NO: 552108 - DNA, 33 bp, Homo sapien
agactgggttgaatgctgaggaatgttactctc

SEQ ID NO: 552109 - DNA, 33 bp, Homo sapien
cagtgatcacaactcagacatgatcaaaggtac

SEQ ID NO: 552110 - DNA, 33 bp, Homo sapien
cagtgatcacaactcatacatgatcaaaggtac

SEQ ID NO: 552111 - DNA, 33 bp, Homo sapien
cagtgctcacacctacagatgatccaaaaaaac

SEQ ID NO: 552112 - DNA, 33 bp, Homo sapien
cagtgctcacacctacggatgatccaaaaaaac

SEQ ID NO: 552113 - DNA, 33 bp, Homo sapien
cgggatgctgtcttcccgagaatgcagtgtgat

SEQ ID NO: 552114 - DNA, 33 bp, Homo sapien
cgggatgctgtcttcctgagaatgcagtgtgat

SEQ ID NO: 552115 - DNA, 33 bp, Homo sapien
cctgtgagcatcgtgacgctaatgtcccctgcc

SEQ ID NO: 552116 - DNA, 33 bp, Homo sapien
cctgtgagcatcgtgaggctaatgtcccctgcc

SEQ ID NO: 552117 - DNA, 33 bp, Homo sapien
caggcatcaggtaggacgagaaaagcagtagca

SEQ ID NO: 552118 - DNA, 33 bp, Homo sapien
caggcatcaggtaggatgagaaaagcagtagca

SEQ ID NO: 552119 - DNA, 33 bp, Homo sapien
ggatttaagatggctccacattctctgacactc

SEQ ID NO: 552120 - DNA, 33 bp, Homo sapien
ggatttaagatggctctacattctctgacactc

SEQ ID NO: 552121 - DNA, 33 bp, Homo sapien
cttctctatgaccacaaattatttatatctctc

SEQ ID NO: 552122 - DNA, 33 bp, Homo sapien
cttctctatgaccacagattatttatatctctc

SEQ ID NO: 552123 - DNA, 33 bp, Homo sapien
agtcagtgctatgtcaactatctgatatgtcca

SEQ ID NO: 552124 - DNA, 33 bp, Homo sapien
agtcagtgctatgtcagctatctgatatgtcca

SEQ ID NO: 552125 - DNA, 33 bp, Homo sapien
gggcagacaggaactacagatggggccaccagc

SEQ ID NO: 552126 - DNA, 33 bp, Homo sapien
gggcagacaggaactagagatggggccaccagc

SEQ ID NO: 552127 - DNA, 33 bp, Homo sapien
tgcagacttctggtccacagaatgagaatcaat

SEQ ID NO: 552128 - DNA, 33 bp, Homo sapien
tgcagacttctggtccgcagaatgagaatcaat

SEQ ID NO: 552129 - DNA, 33 bp, Homo sapien
tccttaacttaatcacaactgcatgaacccttt

SEQ ID NO: 552130 - DNA, 33 bp, Homo sapien
tccttaacttaatcacgactgcatgaacccttt

SEQ ID NO: 552131 - DNA, 33 bp, Homo sapien
attttgtaaaaagctgccaaactatcttctaaa

SEQ ID NO: 552132 - DNA, 33 bp, Homo sapien
attttgtaaaaagctgtcaaactatcttctaaa

SEQ ID NO: 552133 - DNA, 33 bp, Homo sapien
gagataaacttcatgaacaaagatgtccacagt

SEQ ID NO: 552134 - DNA, 33 bp, Homo sapien
gagataaacttcatgagcaaagatgtccacagt

SEQ ID NO: 552135 - DNA, 33 bp, Homo sapien
cactgagtgaaggccccctaatctttttgccct

SEQ ID NO: 552136 - DNA, 33 bp, Homo sapien
cactgagtgaaggccctctaatctttttgccct

SEQ ID NO: 552137 - DNA, 33 bp, Homo sapien
gctgatttttcggtcaagttggtctatttgggg

SEQ ID NO: 552138 - DNA, 33 bp, Homo sapien
gctgatttttcggtcaggttggtctatttgggg

SEQ ID NO: 552139 - DNA, 33 bp, Homo sapien
ttcagtgcagtgcatcagaaattatgaaagtct

SEQ ID NO: 552140 - DNA, 33 bp, Homo sapien
ttcagtgcagtgcatcggaaattatgaaagtct

SEQ ID NO: 552141 - DNA, 33 bp, Homo sapien
ggttgaactaatttacactcaagactagtggga

SEQ ID NO: 552142 - DNA, 33 bp, Homo sapien
ggttgaactaatttacgctcaagactagtggga

SEQ ID NO: 552143 - DNA, 33 bp, Homo sapien
ccaacaaaacacagaaagtgtagacaagagaac

SEQ ID NO: 552144 - DNA, 33 bp, Homo sapien
ccaacaaaacacagaaggtgtagacaagagaac

SEQ ID NO: 552145 - DNA, 33 bp, Homo sapien
aagtgtgagcttccaacgcttcctgggtttgaa

SEQ ID NO: 552146 - DNA, 33 bp, Homo sapien
aagtgtgagcttccaatgcttcctgggtttgaa

SEQ ID NO: 552147 - DNA, 33 bp, Homo sapien
tggaagaaataggaaacgcagcagtccgtggag

SEQ ID NO: 552148 - DNA, 33 bp, Homo sapien
tggaagaaataggaaatgcagcagtccgtggag

SEQ ID NO: 552149 - DNA, 33 bp, Homo sapien
tgttttcaaatacaagcaataagactctgggct

SEQ ID NO: 552150 - DNA, 33 bp, Homo sapien
tgttttcaaatacaagtaataagactctgggct

SEQ ID NO: 552151 - DNA, 33 bp, Homo sapien
gtgaggcctggagaaactggacattgcatagtc

SEQ ID NO: 552152 - DNA, 33 bp, Homo sapien
gtgaggcctggagaaattggacattgcatagtc

SEQ ID NO: 552153 - DNA, 33 bp, Homo sapien
tctgaacttagacacacctaaccttgcccccac

SEQ ID NO: 552154 - DNA, 33 bp, Homo sapien
tctgaacttagacacatctaaccttgcccccac

SEQ ID NO: 552155 - DNA, 33 bp, Homo sapien
tttgtagaagatctgacggctctaggtatgcat

SEQ ID NO: 552156 - DNA, 33 bp, Homo sapien
tttgtagaagatctgatggctctaggtatgcat

SEQ ID NO: 552157 - DNA, 33 bp, Homo sapien
gtcagaaggctacttcacagagggtccattgta

SEQ ID NO: 552158 - DNA, 33 bp, Homo sapien
gtcagaaggctacttctcagagggtccattgta

SEQ ID NO: 552159 - DNA, 33 bp, Homo sapien
tgcagaggaagatggcaatctgggacaggagga

SEQ ID NO: 552160 - DNA, 33 bp, Homo sapien
tgcagaggaagatggcgatctgggacaggagga

SEQ ID NO: 552161 - DNA, 33 bp, Homo sapien
atcttgttggagtcaaagctgggattgaaatct

SEQ ID NO: 552162 - DNA, 33 bp, Homo sapien
atcttgttggagtcaacgctgggattgaaatct

SEQ ID NO: 552163 - DNA, 33 bp, Homo sapien
gctactgtgccaggccaaaagtcagtacattct

SEQ ID NO: 552164 - DNA, 33 bp, Homo sapien
gctactgtgccaggccgaaagtcagtacattct

SEQ ID NO: 552165 - DNA, 33 bp, Homo sapien
tcaatcaatcaatgagcaagtccacatcatcac

SEQ ID NO: 552166 - DNA, 33 bp, Homo sapien
tcaatcaatcaatgaggaagtccacatcatcac

SEQ ID NO: 552167 - DNA, 33 bp, Homo sapien
gaagaggtctgcccagcagaggaatgtgttatc

SEQ ID NO: 552168 - DNA, 33 bp, Homo sapien
gaagaggtctgcccaggagaggaatgtgttatc

SEQ ID NO: 552169 - DNA, 33 bp, Homo sapien
gctgaagctgattggcaagacctcaaaacccag

SEQ ID NO: 552170 - DNA, 33 bp, Homo sapien
gctgaagctgattggcgagacctcaaaacccag

SEQ ID NO: 552171 - DNA, 33 bp, Homo sapien
atttttggtgctggagaagttacagaaggcaac

SEQ ID NO: 552172 - DNA, 33 bp, Homo sapien
atttttggtgctggaggagttacagaaggcaac

SEQ ID NO: 552173 - DNA, 33 bp, Homo sapien
attcttttaaatactcacggctgttcttgaact

SEQ ID NO: 552174 - DNA, 33 bp, Homo sapien
attcttttaaatactcgcggctgttcttgaact

SEQ ID NO: 552175 - DNA, 33 bp, Homo sapien
acctcactgagtcaagaattgcaaattaactta

SEQ ID NO: 552176 - DNA, 33 bp, Homo sapien
acctcactgagtcaaggattgcaaattaactta

SEQ ID NO: 552177 - DNA, 33 bp, Homo sapien
acttgcaaatctttaaatatcagagacagtatg

SEQ ID NO: 552178 - DNA, 33 bp, Homo sapien
acttgcaaatctttaattatcagagacagtatg

SEQ ID NO: 552179 - DNA, 33 bp, Homo sapien
ctatgtactaaccaaagaatcaagaccaattat

SEQ ID NO: 552180 - DNA, 33 bp, Homo sapien
ctatgtactaaccaaataatcaagaccaattat

SEQ ID NO: 552181 - DNA, 33 bp, Homo sapien
atatgtttggcaataacagaactattcgatgac

SEQ ID NO: 552182 - DNA, 33 bp, Homo sapien
atatgtttggcaataatagaactattcgatgac

SEQ ID NO: 552183 - DNA, 33 bp, Homo sapien
tctgcagctgtcagacaagatgttctgtaaatg

SEQ ID NO: 552184 - DNA, 33 bp, Homo sapien
tctgcagctgtcagacgagatgttctgtaaatg

SEQ ID NO: 552185 - DNA, 33 bp, Homo sapien
tttgactggccttatacgaaatgctcaggggag

SEQ ID NO: 552186 - DNA, 33 bp, Homo sapien
tttgactggccttatatgaaatgctcaggggag

SEQ ID NO: 552187 - DNA, 33 bp, Homo sapien
gaacagccaggatgacgcttgtgcgggtggagg

SEQ ID NO: 552188 - DNA, 33 bp, Homo sapien
gaacagccaggatgactcttgtgcgggtggagg

SEQ ID NO: 552189 - DNA, 33 bp, Homo sapien
ttctggtttcatggaacgtcttgcaagactgaa

SEQ ID NO: 552190 - DNA, 33 bp, Homo sapien
ttctggtttcatggaatgtcttgcaagactgaa

SEQ ID NO: 552191 - DNA, 33 bp, Homo sapien
gggttgaccattccaaggcctgagtttcagtag

SEQ ID NO: 552192 - DNA, 33 bp, Homo sapien
gggttgaccattccaatgcctgagtttcagtag

SEQ ID NO: 552193 - DNA, 33 bp, Homo sapien
caagccctgttaatcaatgaatattcccaacca

SEQ ID NO: 552194 - DNA, 33 bp, Homo sapien
caagccctgttaatcactgaatattcccaacca

SEQ ID NO: 552195 - DNA, 33 bp, Homo sapien
gatgtgtttgagaggacgtttacacgcgcgttc

SEQ ID NO: 552196 - DNA, 33 bp, Homo sapien
gatgtgtttgagaggatgtttacacgcgcgttc

SEQ ID NO: 552197 - DNA, 33 bp, Homo sapien
cctgacatcaaatcacaacagccagaaatgtct

SEQ ID NO: 552198 - DNA, 33 bp, Homo sapien
cctgacatcaaatcacgacagccagaaatgtct

SEQ ID NO: 552199 - DNA, 33 bp, Homo sapien
agggctccttcaacgacccccataccaccatct

SEQ ID NO: 552200 - DNA, 33 bp, Homo sapien
agggctccttcaacgatccccataccaccatct

SEQ ID NO: 552201 - DNA, 33 bp, Homo sapien
ccatttccaaataacactatatagcttcgtggc

SEQ ID NO: 552202 - DNA, 33 bp, Homo sapien
ccatttccaaataacagtatatagcttcgtggc

SEQ ID NO: 552203 - DNA, 33 bp, Homo sapien
gaaatggtaggagtcaaaagcaccacagcagca

SEQ ID NO: 552204 - DNA, 33 bp, Homo sapien
gaaatggtaggagtcagaagcaccacagcagca

SEQ ID NO: 552205 - DNA, 33 bp, Homo sapien
tcatttctctgcttacagggccgactcgttcct

SEQ ID NO: 552206 - DNA, 33 bp, Homo sapien
tcatttctctgcttacggggccgactcgttcct

SEQ ID NO: 552207 - DNA, 33 bp, Homo sapien
ccctcagtaaaactgaagtcccagtcaaaggcc

SEQ ID NO: 552208 - DNA, 33 bp, Homo sapien
ccctcagtaaaactgacgtcccagtcaaaggcc

SEQ ID NO: 552209 - DNA, 33 bp, Homo sapien
gagtctcccatgaaatcaagggacacacaggct

SEQ ID NO: 552210 - DNA, 33 bp, Homo sapien
gagtctcccatgaaattaagggacacacaggct

SEQ ID NO: 552211 - DNA, 33 bp, Homo sapien
aagatggggccaactacggtgaaagtgaatagg

SEQ ID NO: 552212 - DNA, 33 bp, Homo sapien
aagatggggccaactatggtgaaagtgaatagg

SEQ ID NO: 552213 - DNA, 33 bp, Homo sapien
atatactctaaaacaacgactcaaagtatgata

SEQ ID NO: 552214 - DNA, 33 bp, Homo sapien
atatactctaaaacaatgactcaaagtatgata

SEQ ID NO: 552215 - DNA, 33 bp, Homo sapien
agttacagccagttcaagttaatttattattga

SEQ ID NO: 552216 - DNA, 33 bp, Homo sapien
agttacagccagttcaggttaatttattattga

SEQ ID NO: 552217 - DNA, 33 bp, Homo sapien
tctgttgtctagggcacgtactgtgagtggagc

SEQ ID NO: 552218 - DNA, 33 bp, Homo sapien
tctgttgtctagggcatgtactgtgagtggagc

SEQ ID NO: 552219 - DNA, 33 bp, Homo sapien
cctcttttcttccatagagatgactgctttatg

SEQ ID NO: 552220 - DNA, 33 bp, Homo sapien
cctcttttcttccatatagatgactgctttatg

SEQ ID NO: 552221 - DNA, 33 bp, Homo sapien
tgacagaaagaccacccctgaaactccaatttt

SEQ ID NO: 552222 - DNA, 33 bp, Homo sapien
tgacagaaagaccacctctgaaactccaatttt

SEQ ID NO: 552223 - DNA, 33 bp, Homo sapien
tctatttacaaccaccaacaatagaatgcacat

SEQ ID NO: 552224 - DNA, 33 bp, Homo sapien
tctatttacaaccaccgacaatagaatgcacat

SEQ ID NO: 552225 - DNA, 33 bp, Homo sapien
cctggaaggtgccacaatagcctgggaagatag

SEQ ID NO: 552226 - DNA, 33 bp, Homo sapien
cctggaaggtgccacagtagcctgggaagatag

SEQ ID NO: 552227 - DNA, 33 bp, Homo sapien
cttgcccagtgattctaaactgtgcttccagag

SEQ ID NO: 552228 - DNA, 33 bp, Homo sapien
cttgcccagtgattctcaactgtgcttccagag

SEQ ID NO: 552229 - DNA, 33 bp, Homo sapien
acccagaaaatacagaaggctctggaagcacag

SEQ ID NO: 552230 - DNA, 33 bp, Homo sapien
acccagaaaatacagatggctctggaagcacag

SEQ ID NO: 552231 - DNA, 33 bp, Homo sapien
accaccatcatctccaagtagacataggcttcc

SEQ ID NO: 552232 - DNA, 33 bp, Homo sapien
accaccatcatctccaggtagacataggcttcc

SEQ ID NO: 552233 - DNA, 33 bp, Homo sapien
gtgtaccgcgttctgaccaaggagcattccagg

SEQ ID NO: 552234 - DNA, 33 bp, Homo sapien
gtgtaccgcgttctgagcaaggagcattccagg

SEQ ID NO: 552235 - DNA, 33 bp, Homo sapien
atgtcctaacccatagaagttgtcattttattt

SEQ ID NO: 552236 - DNA, 33 bp, Homo sapien
atgtcctaacccatagtagttgtcattttattt

SEQ ID NO: 552237 - DNA, 33 bp, Homo sapien
tcatacgtgttttctaccttatcctggatcttc

SEQ ID NO: 552238 - DNA, 33 bp, Homo sapien
tcatacgtgttttctatcttatcctggatcttc

SEQ ID NO: 552239 - DNA, 33 bp, Homo sapien
gaatgatatctggaaacgccaccaatagttggc

SEQ ID NO: 552240 - DNA, 33 bp, Homo sapien
gaatgatatctggaaatgccaccaatagttggc

SEQ ID NO: 552241 - DNA, 33 bp, Homo sapien
catttatacaaagtgaaatgagcccttggaggg

SEQ ID NO: 552242 - DNA, 33 bp, Homo sapien
catttatacaaagtgagatgagcccttggaggg

SEQ ID NO: 552243 - DNA, 33 bp, Homo sapien
actgtaatttccctacagcactgcagaatacta

SEQ ID NO: 552244 - DNA, 33 bp, Homo sapien
actgtaatttccctacggcactgcagaatacta

SEQ ID NO: 552245 - DNA, 33 bp, Homo sapien
agaaatcccagaaggaacatgatctgccatcaa

SEQ ID NO: 552246 - DNA, 33 bp, Homo sapien
agaaatcccagaaggaccatgatctgccatcaa

SEQ ID NO: 552247 - DNA, 33 bp, Homo sapien
gaatggggacgatgcactaagcggccggtgtct

SEQ ID NO: 552248 - DNA, 33 bp, Homo sapien
gaatggggacgatgcagtaagcggccggtgtct

SEQ ID NO: 552249 - DNA, 33 bp, Homo sapien
tactcgttgtcacaaaaacccacaagaaaggta

SEQ ID NO: 552250 - DNA, 33 bp, Homo sapien
tactcgttgtcacaaagacccacaagaaaggta

SEQ ID NO: 552251 - DNA, 33 bp, Homo sapien
atgaaaacattttgtacgggatctgatgattga

SEQ ID NO: 552252 - DNA, 33 bp, Homo sapien
atgaaaacattttgtatgggatctgatgattga

SEQ ID NO: 552253 - DNA, 33 bp, Homo sapien
aacgtgcagtgaataaaataatcaatgaattcc

SEQ ID NO: 552254 - DNA, 33 bp, Homo sapien
aacgtgcagtgaataacataatcaatgaattcc

SEQ ID NO: 552255 - DNA, 33 bp, Homo sapien
tgattaaaaacaagcaaaagtacacaaaagtaa

SEQ ID NO: 552256 - DNA, 33 bp, Homo sapien
tgattaaaaacaagcacaagtacacaaaagtaa

SEQ ID NO: 552257 - DNA, 33 bp, Homo sapien
ccattgcatgaggacccggatgctttctgaggg

SEQ ID NO: 552258 - DNA, 33 bp, Homo sapien
ccattgcatgaggaccgggatgctttctgaggg

SEQ ID NO: 552259 - DNA, 33 bp, Homo sapien
tgtgctaaggagagtacccatgcctgtatcccg

SEQ ID NO: 552260 - DNA, 33 bp, Homo sapien
tgtgctaaggagagtatccatgcctgtatcccg

SEQ ID NO: 552261 - DNA, 33 bp, Homo sapien
gcagggcctgattagaagtggctgagtgaacca

SEQ ID NO: 552262 - DNA, 33 bp, Homo sapien
gcagggcctgattagaggtggctgagtgaacca

SEQ ID NO: 552263 - DNA, 33 bp, Homo sapien
ccaggcactttcacagcccaaccaggtgtgcac

SEQ ID NO: 552264 - DNA, 33 bp, Homo sapien
ccaggcactttcacaggccaaccaggtgtgcac

SEQ ID NO: 552265 - DNA, 33 bp, Homo sapien
ttagggccactgtaaccgcaaactgggtggcgt

SEQ ID NO: 552266 - DNA, 33 bp, Homo sapien
ttagggccactgtaactgcaaactgggtggcgt

SEQ ID NO: 552267 - DNA, 33 bp, Homo sapien
ccaaatccacaaacagaatggacaaggccccct

SEQ ID NO: 552268 - DNA, 33 bp, Homo sapien
ccaaatccacaaacaggatggacaaggccccct

SEQ ID NO: 552269 - DNA, 33 bp, Homo sapien
gccctcttctttcacactggacaaaggacgttg

SEQ ID NO: 552270 - DNA, 33 bp, Homo sapien
gccctcttctttcacattggacaaaggacgttg

SEQ ID NO: 552271 - DNA, 33 bp, Homo sapien
tcaggaggagtccagaagttgcccagcaatggc

SEQ ID NO: 552272 - DNA, 33 bp, Homo sapien
tcaggaggagtccagaggttgcccagcaatggc

SEQ ID NO: 552273 - DNA, 33 bp, Homo sapien
tgcacccattgtctgaaataattatgaagacca

SEQ ID NO: 552274 - DNA, 33 bp, Homo sapien
tgcacccattgtctgagataattatgaagacca

SEQ ID NO: 552275 - DNA, 33 bp, Homo sapien
caagttatggtgccacaaatctcactgttctta

SEQ ID NO: 552276 - DNA, 33 bp, Homo sapien
caagttatggtgccacgaatctcactgttctta

SEQ ID NO: 552277 - DNA, 33 bp, Homo sapien
aatattattcaatcataaaaggatgaagtgcta

SEQ ID NO: 552278 - DNA, 33 bp, Homo sapien
aatattattcaatcatgaaaggatgaagtgcta

SEQ ID NO: 552279 - DNA, 33 bp, Homo sapien
agaagtgtcaatgtcaccttgaaaggacagcct

SEQ ID NO: 552280 - DNA, 33 bp, Homo sapien
agaagtgtcaatgtcatcttgaaaggacagcct

SEQ ID NO: 552281 - DNA, 33 bp, Homo sapien
gatgacagacctcagacaatttctggggcagag

SEQ ID NO: 552282 - DNA, 33 bp, Homo sapien
gatgacagacctcagagaatttctggggcagag

SEQ ID NO: 552283 - DNA, 33 bp, Homo sapien
gtctttccaaagcactaagaatgtggtgatgaa

SEQ ID NO: 552284 - DNA, 33 bp, Homo sapien
gtctttccaaagcactgagaatgtggtgatgaa

SEQ ID NO: 552285 - DNA, 33 bp, Homo sapien
aatgagaagctttcaacttaccacggccctgga

SEQ ID NO: 552286 - DNA, 33 bp, Homo sapien
aatgagaagctttcaatttaccacggccctgga

SEQ ID NO: 552287 - DNA, 33 bp, Homo sapien
tggtggatagcacacaaaatttctgtcctggcc

SEQ ID NO: 552288 - DNA, 33 bp, Homo sapien
tggtggatagcacacagaatttctgtcctggcc

SEQ ID NO: 552289 - DNA, 33 bp, Homo sapien
agtccttgggtgggtaggtttcatttctcttgg

SEQ ID NO: 552290 - DNA, 33 bp, Homo sapien
agtccttgggtgggtatgtttcatttctcttgg

SEQ ID NO: 552291 - DNA, 33 bp, Homo sapien
cctgtttgagtgagaacgtcctcatgagcctgt

SEQ ID NO: 552292 - DNA, 33 bp, Homo sapien
cctgtttgagtgagaatgtcctcatgagcctgt

SEQ ID NO: 552293 - DNA, 33 bp, Homo sapien
aacctattttcctgtcacagcttttttgatttg

SEQ ID NO: 552294 - DNA, 33 bp, Homo sapien
aacctattttcctgtcgcagcttttttgatttg

SEQ ID NO: 552295 - DNA, 33 bp, Homo sapien
ggctgtcctggtcaggaaatcataccctccctg

SEQ ID NO: 552296 - DNA, 33 bp, Homo sapien
ggctgtcctggtcaggcaatcataccctccctg

SEQ ID NO: 552297 - DNA, 33 bp, Homo sapien
gcccttcacaaggacacgtgtaaacgtcttgtg

SEQ ID NO: 552298 - DNA, 33 bp, Homo sapien
gcccttcacaaggacatgtgtaaacgtcttgtg

SEQ ID NO: 552299 - DNA, 33 bp, Homo sapien
accttcttgatctcaaattccctttgtccgaat

SEQ ID NO: 552300 - DNA, 33 bp, Homo sapien
accttcttgatctcaatttccctttgtccgaat

SEQ ID NO: 552301 - DNA, 33 bp, Homo sapien
atctcttccctgcacacgaaggagactctgctc

SEQ ID NO: 552302 - DNA, 33 bp, Homo sapien
atctcttccctgcacatgaaggagactctgctc

SEQ ID NO: 552303 - DNA, 33 bp, Homo sapien
caggctcctttatccaacgtgggaccccacttt

SEQ ID NO: 552304 - DNA, 33 bp, Homo sapien
caggctcctttatccagcgtgggaccccacttt

SEQ ID NO: 552305 - DNA, 33 bp, Homo sapien
ctgcttcagctccacaaacagaaactccaactg

SEQ ID NO: 552306 - DNA, 33 bp, Homo sapien
ctgcttcagctccacagacagaaactccaactg

SEQ ID NO: 552307 - DNA, 33 bp, Homo sapien
tcttttcacagtcagaagttaagtagacctgtg

SEQ ID NO: 552308 - DNA, 33 bp, Homo sapien
tcttttcacagtcagaggttaagtagacctgtg

SEQ ID NO: 552309 - DNA, 33 bp, Homo sapien
gccatctttgtgcataaaatcagtgctcgaaga

SEQ ID NO: 552310 - DNA, 33 bp, Homo sapien
gccatctttgtgcatacaatcagtgctcgaaga

SEQ ID NO: 552311 - DNA, 33 bp, Homo sapien
tatatatctcgatgaaagcatgcagaaggaaaa

SEQ ID NO: 552312 - DNA, 33 bp, Homo sapien
tatatatctcgatgaacgcatgcagaaggaaaa

SEQ ID NO: 552313 - DNA, 33 bp, Homo sapien
aaaaatgaccctgacccgctcaagggcatctga

SEQ ID NO: 552314 - DNA, 33 bp, Homo sapien
aaaaatgaccctgacctgctcaagggcatctga

SEQ ID NO: 552315 - DNA, 33 bp, Homo sapien
tgtcctataattggcacgcgaggctgtggtcct

SEQ ID NO: 552316 - DNA, 33 bp, Homo sapien
tgtcctataattggcatgcgaggctgtggtcct

SEQ ID NO: 552317 - DNA, 33 bp, Homo sapien
acgggtctgtgagaacacctgtgcttcatggcc

SEQ ID NO: 552318 - DNA, 33 bp, Homo sapien
acgggtctgtgagaacgcctgtgcttcatggcc

SEQ ID NO: 552319 - DNA, 33 bp, Homo sapien
ctgttcaccatcagagacctttctcccataggc

SEQ ID NO: 552320 - DNA, 33 bp, Homo sapien
ctgttcaccatcagaggcctttctcccataggc

SEQ ID NO: 552321 - DNA, 33 bp, Homo sapien
cataggcagctgagacagggcaaaaaacggtct

SEQ ID NO: 552322 - DNA, 33 bp, Homo sapien
cataggcagctgagacggggcaaaaaacggtct

SEQ ID NO: 552323 - DNA, 33 bp, Homo sapien
gccgagggttagaataataagtttgttagatgt

SEQ ID NO: 552324 - DNA, 33 bp, Homo sapien
gccgagggttagaatagtaagtttgttagatgt

SEQ ID NO: 552325 - DNA, 33 bp, Homo sapien
gccggctctcctcacaaatgaaaagccctgtcc

SEQ ID NO: 552326 - DNA, 33 bp, Homo sapien
gccggctctcctcacagatgaaaagccctgtcc

SEQ ID NO: 552327 - DNA, 33 bp, Homo sapien
ccaacatgcagaatacaaaggagctacggtact

SEQ ID NO: 552328 - DNA, 33 bp, Homo sapien
ccaacatgcagaatacgaaggagctacggtact

SEQ ID NO: 552329 - DNA, 33 bp, Homo sapien
cttcagatttcagagcaacctagcagccgtgtg

SEQ ID NO: 552330 - DNA, 33 bp, Homo sapien
cttcagatttcagagcgacctagcagccgtgtg

SEQ ID NO: 552331 - DNA, 33 bp, Homo sapien
ttgatgcaaatgccaccgaagctatttcatcag

SEQ ID NO: 552332 - DNA, 33 bp, Homo sapien
ttgatgcaaatgccactgaagctatttcatcag

SEQ ID NO: 552333 - DNA, 33 bp, Homo sapien
atttatgttggattcaataacacaaatggagcg

SEQ ID NO: 552334 - DNA, 33 bp, Homo sapien
atttatgttggattcagtaacacaaatggagcg

SEQ ID NO: 552335 - DNA, 33 bp, Homo sapien
gaattatcagcttcaagggattcgagtaggact

SEQ ID NO: 552336 - DNA, 33 bp, Homo sapien
gaattatcagcttcaatggattcgagtaggact

SEQ ID NO: 552337 - DNA, 33 bp, Homo sapien
aacattttgtctttcacatttgagtcttaatcc

SEQ ID NO: 552338 - DNA, 33 bp, Homo sapien
aacattttgtctttcatatttgagtcttaatcc

SEQ ID NO: 552339 - DNA, 33 bp, Homo sapien
gtgaatggctttactacaaacgtgtacatttat

SEQ ID NO: 552340 - DNA, 33 bp, Homo sapien
gtgaatggctttactagaaacgtgtacatttat

SEQ ID NO: 552341 - DNA, 33 bp, Homo sapien
gccttctctagcttccagaggctgccatgtccc

SEQ ID NO: 552342 - DNA, 33 bp, Homo sapien
gccttctctagcttccggaggctgccatgtccc

SEQ ID NO: 552343 - DNA, 33 bp, Homo sapien
ttgaatggaatcttccacataaatactacatat

SEQ ID NO: 552344 - DNA, 33 bp, Homo sapien
ttgaatggaatcttccgcataaatactacatat

SEQ ID NO: 552345 - DNA, 33 bp, Homo sapien
tctttttcagtgcacaatgtatgctttaatttt

SEQ ID NO: 552346 - DNA, 33 bp, Homo sapien
tctttttcagtgcacagtgtatgctttaatttt

SEQ ID NO: 552347 - DNA, 33 bp, Homo sapien
cgtaagtcactttttaacaagctgcccaggtga

SEQ ID NO: 552348 - DNA, 33 bp, Homo sapien
cgtaagtcactttttatcaagctgcccaggtga

SEQ ID NO: 552349 - DNA, 33 bp, Homo sapien
atgaacacacggtacgcagctgagtgacagatg

SEQ ID NO: 552350 - DNA, 33 bp, Homo sapien
atgaacacacggtacgtagctgagtgacagatg

SEQ ID NO: 552351 - DNA, 33 bp, Homo sapien
tggaggccatgtggccaaagggagacaggaaga

SEQ ID NO: 552352 - DNA, 33 bp, Homo sapien
tggaggccatgtggccgaagggagacaggaaga

SEQ ID NO: 552353 - DNA, 33 bp, Homo sapien
ctgggcatcgctgctacgttatttaaaattacc

SEQ ID NO: 552354 - DNA, 33 bp, Homo sapien
ctgggcatcgctgctatgttatttaaaattacc

SEQ ID NO: 552355 - DNA, 33 bp, Homo sapien
ccgttcgataacagcacgtggattccctgcgta

SEQ ID NO: 552356 - DNA, 33 bp, Homo sapien
ccgttcgataacagcatgtggattccctgcgta

SEQ ID NO: 552357 - DNA, 33 bp, Homo sapien
ttgttttcccttttacccgaatgatagtttaga

SEQ ID NO: 552358 - DNA, 33 bp, Homo sapien
ttgttttcccttttactcgaatgatagtttaga

SEQ ID NO: 552359 - DNA, 33 bp, Homo sapien
agctacacacttgggcaaaagcaattctttgtg

SEQ ID NO: 552360 - DNA, 33 bp, Homo sapien
agctacacacttgggcgaaagcaattctttgtg

SEQ ID NO: 552361 - DNA, 33 bp, Homo sapien
agcccctctgcggaccacgtgtccagactctgc

SEQ ID NO: 552362 - DNA, 33 bp, Homo sapien
agcccctctgcggaccgcgtgtccagactctgc

SEQ ID NO: 552363 - DNA, 33 bp, Homo sapien
gacagagcaggaacaccaggtgatgccaatgct

SEQ ID NO: 552364 - DNA, 33 bp, Homo sapien
gacagagcaggaacacgaggtgatgccaatgct

SEQ ID NO: 552365 - DNA, 33 bp, Homo sapien
cagatttgtttaagcgaaagtacactccacaga

SEQ ID NO: 552366 - DNA, 33 bp, Homo sapien
cagatttgtttaagcggaagtacactccacaga

SEQ ID NO: 552367 - DNA, 33 bp, Homo sapien
aatgtgtcagggttcactcgtattgtggcatgg

SEQ ID NO: 552368 - DNA, 33 bp, Homo sapien
aatgtgtcagggttcattcgtattgtggcatgg

SEQ ID NO: 552369 - DNA, 33 bp, Homo sapien
caggctgttgtaacagaatgataaggtgcagag

SEQ ID NO: 552370 - DNA, 33 bp, Homo sapien
caggctgttgtaacaggatgataaggtgcagag

SEQ ID NO: 552371 - DNA, 33 bp, Homo sapien
cggtaaggctgagaacaaggagaatcgtgtata

SEQ ID NO: 552372 - DNA, 33 bp, Homo sapien
cggtaaggctgagaacgaggagaatcgtgtata

SEQ ID NO: 552373 - DNA, 33 bp, Homo sapien
aaagcagcgctatctgaagcccacgaggaaagc

SEQ ID NO: 552374 - DNA, 33 bp, Homo sapien
aaagcagcgctatctggagcccacgaggaaagc

SEQ ID NO: 552375 - DNA, 33 bp, Homo sapien
aaataaactctggagaggaagagtccaaatgga

SEQ ID NO: 552376 - DNA, 33 bp, Homo sapien
aaataaactctggagatgaagagtccaaatgga

SEQ ID NO: 552377 - DNA, 33 bp, Homo sapien
tcttttatttcacagcaaacggaaacaagtctt

SEQ ID NO: 552378 - DNA, 33 bp, Homo sapien
tcttttatttcacagcgaacggaaacaagtctt

SEQ ID NO: 552379 - DNA, 33 bp, Homo sapien
taccagactaagtaagaaaagatctcttccacc

SEQ ID NO: 552380 - DNA, 33 bp, Homo sapien
taccagactaagtaaggaaagatctcttccacc

SEQ ID NO: 552381 - DNA, 33 bp, Homo sapien
tcgcattatgaggaccactgttttagaaacggg

SEQ ID NO: 552382 - DNA, 33 bp, Homo sapien
tcgcattatgaggaccgctgttttagaaacggg

SEQ ID NO: 552383 - DNA, 33 bp, Homo sapien
accatcaaaggacacactgaagcagagtcagac

SEQ ID NO: 552384 - DNA, 33 bp, Homo sapien
accatcaaaggacacattgaagcagagtcagac

SEQ ID NO: 552385 - DNA, 33 bp, Homo sapien
ggccacagtacctagcaagatcctatctgatgg

SEQ ID NO: 552386 - DNA, 33 bp, Homo sapien
ggccacagtacctagcgagatcctatctgatgg

SEQ ID NO: 552387 - DNA, 33 bp, Homo sapien
tggccctgaggatgacccgagcggtctgatgga

SEQ ID NO: 552388 - DNA, 33 bp, Homo sapien
tggccctgaggatgactcgagcggtctgatgga

SEQ ID NO: 552389 - DNA, 33 bp, Homo sapien
agaataagacactaagaaaaagaagagtggaat

SEQ ID NO: 552390 - DNA, 33 bp, Homo sapien
agaataagacactaaggaaaagaagagtggaat

SEQ ID NO: 552391 - DNA, 33 bp, Homo sapien
agacgccttttttttgcattggctgcaccactt

SEQ ID NO: 552392 - DNA, 33 bp, Homo sapien
agacgccttttttttggattggctgcaccactt

SEQ ID NO: 552393 - DNA, 33 bp, Homo sapien
gccacagttcacagtcaccagggtcaacagcaa

SEQ ID NO: 552394 - DNA, 33 bp, Homo sapien
gccacagttcacagtcgccagggtcaacagcaa

SEQ ID NO: 552395 - DNA, 33 bp, Homo sapien
caagtgaaaaggaacaagcgaaagaaaggaaaa

SEQ ID NO: 552396 - DNA, 33 bp, Homo sapien
caagtgaaaaggaacaggcgaaagaaaggaaaa

SEQ ID NO: 552397 - DNA, 33 bp, Homo sapien
aaaacgcttacaacgcaatgtgaaaagtacaat

SEQ ID NO: 552398 - DNA, 33 bp, Homo sapien
aaaacgcttacaacgctatgtgaaaagtacaat

SEQ ID NO: 552399 - DNA, 33 bp, Homo sapien
gagctcacaagggagacagaggagtgaccacag

SEQ ID NO: 552400 - DNA, 33 bp, Homo sapien
gagctcacaagggagatagaggagtgaccacag

SEQ ID NO: 552401 - DNA, 33 bp, Homo sapien
tacacttacccagagcaagccaatagagagaga

SEQ ID NO: 552402 - DNA, 33 bp, Homo sapien
tacacttacccagagcgagccaatagagagaga

SEQ ID NO: 552403 - DNA, 33 bp, Homo sapien
agaaactctaggagcccggaaccaacctaagaa

SEQ ID NO: 552404 - DNA, 33 bp, Homo sapien
agaaactctaggagcctggaaccaacctaagaa

SEQ ID NO: 552405 - DNA, 33 bp, Homo sapien
ctcaaatgcttctccaacaagaatgggtactag

SEQ ID NO: 552406 - DNA, 33 bp, Homo sapien
ctcaaatgcttctccagcaagaatgggtactag

SEQ ID NO: 552407 - DNA, 33 bp, Homo sapien
cttagacgcggagaagaagcatttcacagctgg

SEQ ID NO: 552408 - DNA, 33 bp, Homo sapien
cttagacgcggagaaggagcatttcacagctgg

SEQ ID NO: 552409 - DNA, 33 bp, Homo sapien
agcctcaacattttaaagattttctgcatctca

SEQ ID NO: 552410 - DNA, 33 bp, Homo sapien
agcctcaacattttaaggattttctgcatctca

SEQ ID NO: 552411 - DNA, 33 bp, Homo sapien
ggttctccccactgacagtagcccagacctgtc

SEQ ID NO: 552412 - DNA, 33 bp, Homo sapien
ggttctccccactgacggtagcccagacctgtc

SEQ ID NO: 552413 - DNA, 33 bp, Homo sapien
cctacctcttccaagacgcccaggaagtgcacc

SEQ ID NO: 552414 - DNA, 33 bp, Homo sapien
cctacctcttccaagatgcccaggaagtgcacc

SEQ ID NO: 552415 - DNA, 33 bp, Homo sapien
gcatttgtcgagtgaacgaaagaatgaaagggg

SEQ ID NO: 552416 - DNA, 33 bp, Homo sapien
gcatttgtcgagtgaatgaaagaatgaaagggg

SEQ ID NO: 552417 - DNA, 33 bp, Homo sapien
atgcctctaccttcacaacaaagtgctttgggc

SEQ ID NO: 552418 - DNA, 33 bp, Homo sapien
atgcctctaccttcacgacaaagtgctttgggc

SEQ ID NO: 552419 - DNA, 33 bp, Homo sapien
tggcagctagacctaacgtgcaccggctgagcc

SEQ ID NO: 552420 - DNA, 33 bp, Homo sapien
tggcagctagacctaatgtgcaccggctgagcc

SEQ ID NO: 552421 - DNA, 33 bp, Homo sapien
cagccacagaaaggggaaaggttatccaaccag

SEQ ID NO: 552422 - DNA, 33 bp, Homo sapien
cagccacagaaaggggcaaggttatccaaccag

SEQ ID NO: 552423 - DNA, 33 bp, Homo sapien
catgctccttatcacgacctttgtcctagttgg

SEQ ID NO: 552424 - DNA, 33 bp, Homo sapien
catgctccttatcacgccctttgtcctagttgg

SEQ ID NO: 552425 - DNA, 33 bp, Homo sapien
ctggtgggaacagcaacgggtaagatcgctttg

SEQ ID NO: 552426 - DNA, 33 bp, Homo sapien
ctggtgggaacagcaatgggtaagatcgctttg

SEQ ID NO: 552427 - DNA, 33 bp, Homo sapien
atgcagtgtgcggagaagtgcttacagccgcac

SEQ ID NO: 552428 - DNA, 33 bp, Homo sapien
atgcagtgtgcggagacgtgcttacagccgcac

SEQ ID NO: 552429 - DNA, 33 bp, Homo sapien
cagacgtttcttctctcacagttctgaaggtga

SEQ ID NO: 552430 - DNA, 33 bp, Homo sapien
cagacgtttcttctcttacagttctgaaggtga

SEQ ID NO: 552431 - DNA, 33 bp, Homo sapien
actcccaggtacgaaaagacttaacataaggca

SEQ ID NO: 552432 - DNA, 33 bp, Homo sapien
actcccaggtacgaaacgacttaacataaggca

SEQ ID NO: 552433 - DNA, 33 bp, Homo sapien
aagccctggccctgccaaaagtgaccacacagc

SEQ ID NO: 552434 - DNA, 33 bp, Homo sapien
aagccctggccctgcccaaagtgaccacacagc

SEQ ID NO: 552435 - DNA, 33 bp, Homo sapien
acaatcctgcacaaaaagtggctggtttaattt

SEQ ID NO: 552436 - DNA, 33 bp, Homo sapien
acaatcctgcacaaaacgtggctggtttaattt

SEQ ID NO: 552437 - DNA, 33 bp, Homo sapien
tcagctcgttgattgaaaagcatctttccccac

SEQ ID NO: 552438 - DNA, 33 bp, Homo sapien
tcagctcgttgattgagaagcatctttccccac

SEQ ID NO: 552439 - DNA, 33 bp, Homo sapien
gataagtgaactgaagacctgaataaatgcaaa

SEQ ID NO: 552440 - DNA, 33 bp, Homo sapien
gataagtgaactgaaggcctgaataaatgcaaa

SEQ ID NO: 552441 - DNA, 33 bp, Homo sapien
attatatacctggctcaaaactttcatggtgaa

SEQ ID NO: 552442 - DNA, 33 bp, Homo sapien
attatatacctggctcgaaactttcatggtgaa

SEQ ID NO: 552443 - DNA, 33 bp, Homo sapien
attctattgctgcgtgacaaaccaggccagact

SEQ ID NO: 552444 - DNA, 33 bp, Homo sapien
attctattgctgcgtggcaaaccaggccagact

SEQ ID NO: 552445 - DNA, 33 bp, Homo sapien
agagaagcaggtacgacggtggattcagtgaag

SEQ ID NO: 552446 - DNA, 33 bp, Homo sapien
agagaagcaggtacgatggtggattcagtgaag

SEQ ID NO: 552447 - DNA, 33 bp, Homo sapien
caacctactatgactaaaatggctaccaaacat

SEQ ID NO: 552448 - DNA, 33 bp, Homo sapien
caacctactatgactagaatggctaccaaacat

SEQ ID NO: 552449 - DNA, 33 bp, Homo sapien
tatgtgtgatctctgaaaatgaagcttccacat

SEQ ID NO: 552450 - DNA, 33 bp, Homo sapien
tatgtgtgatctctgagaatgaagcttccacat

SEQ ID NO: 552451 - DNA, 33 bp, Homo sapien
aaggggctcggaccacagctcccaggagatgcc

SEQ ID NO: 552452 - DNA, 33 bp, Homo sapien
aaggggctcggaccacggctcccaggagatgcc

SEQ ID NO: 552453 - DNA, 33 bp, Homo sapien
gtgcccttaggaccgacgggtgcacatatttct

SEQ ID NO: 552454 - DNA, 33 bp, Homo sapien
gtgcccttaggaccgatgggtgcacatatttct

SEQ ID NO: 552455 - DNA, 33 bp, Homo sapien
acctgggaaactgcacaagaagaaatgtttgtt

SEQ ID NO: 552456 - DNA, 33 bp, Homo sapien
acctgggaaactgcacgagaagaaatgtttgtt

SEQ ID NO: 552457 - DNA, 33 bp, Homo sapien
gggtgaattttgctccaagtctgacggccttgc

SEQ ID NO: 552458 - DNA, 33 bp, Homo sapien
gggtgaattttgctccgagtctgacggccttgc

SEQ ID NO: 552459 - DNA, 33 bp, Homo sapien
ggatggtgtcaaggaacctttagagtggagacc

SEQ ID NO: 552460 - DNA, 33 bp, Homo sapien
ggatggtgtcaaggaagctttagagtggagacc

SEQ ID NO: 552461 - DNA, 33 bp, Homo sapien
actaacagacagtgaccgagaggtaagatattc

SEQ ID NO: 552462 - DNA, 33 bp, Homo sapien
actaacagacagtgacggagaggtaagatattc

SEQ ID NO: 552463 - DNA, 33 bp, Homo sapien
agaaatccattttgcaaattgtgtatggccttg

SEQ ID NO: 552464 - DNA, 33 bp, Homo sapien
agaaatccattttgcatattgtgtatggccttg

SEQ ID NO: 552465 - DNA, 33 bp, Homo sapien
gtggtgagaggcagccaacaatgacctgcaggg

SEQ ID NO: 552466 - DNA, 33 bp, Homo sapien
gtggtgagaggcagccgacaatgacctgcaggg

SEQ ID NO: 552467 - DNA, 33 bp, Homo sapien
atatatctaggcttcaaggaacaaaccagccta

SEQ ID NO: 552468 - DNA, 33 bp, Homo sapien
atatatctaggcttcacggaacaaaccagccta

SEQ ID NO: 552469 - DNA, 33 bp, Homo sapien
tcttaaatttctgcaacgtaactgttggacagt

SEQ ID NO: 552470 - DNA, 33 bp, Homo sapien
tcttaaatttctgcaatgtaactgttggacagt

SEQ ID NO: 552471 - DNA, 33 bp, Homo sapien
ttgtttctcttcaagacaaaatgccctgagcag

SEQ ID NO: 552472 - DNA, 33 bp, Homo sapien
ttgtttctcttcaagataaaatgccctgagcag

SEQ ID NO: 552473 - DNA, 33 bp, Homo sapien
ttgcccgccaggcaggaattgccgagctgtccc

SEQ ID NO: 552474 - DNA, 33 bp, Homo sapien
ttgcccgccaggcaggcattgccgagctgtccc

SEQ ID NO: 552475 - DNA, 33 bp, Homo sapien
aattaacacatagaaacagtcaagcacgtagct

SEQ ID NO: 552476 - DNA, 33 bp, Homo sapien
aattaacacatagaaatagtcaagcacgtagct

SEQ ID NO: 552477 - DNA, 33 bp, Homo sapien
ccaggtgaaaaagtcaatctagaaggttatgtc

SEQ ID NO: 552478 - DNA, 33 bp, Homo sapien
ccaggtgaaaaagtcagtctagaaggttatgtc

SEQ ID NO: 552479 - DNA, 33 bp, Homo sapien
caggtctctgggataaacgcctaggagggcaac

SEQ ID NO: 552480 - DNA, 33 bp, Homo sapien
caggtctctgggataagcgcctaggagggcaac

SEQ ID NO: 552481 - DNA, 33 bp, Homo sapien
cctggaattcttcccccagatcctcacaggctg

SEQ ID NO: 552482 - DNA, 33 bp, Homo sapien
cctggaattcttcccctagatcctcacaggctg

SEQ ID NO: 552483 - DNA, 33 bp, Homo sapien
gattctggccacgtgtaaacatggcgctgctca

SEQ ID NO: 552484 - DNA, 33 bp, Homo sapien
gattctggccacgtgttaacatggcgctgctca

SEQ ID NO: 552485 - DNA, 33 bp, Homo sapien
tatcattaactttgaacggatcttttactttgc

SEQ ID NO: 552486 - DNA, 33 bp, Homo sapien
tatcattaactttgaatggatcttttactttgc

SEQ ID NO: 552487 - DNA, 33 bp, Homo sapien
agagactatgcctggcacctggtcagacagtgt

SEQ ID NO: 552488 - DNA, 33 bp, Homo sapien
agagactatgcctggcgcctggtcagacagtgt

SEQ ID NO: 552489 - DNA, 33 bp, Homo sapien
gaggccgactcttccccagccttttgattccac

SEQ ID NO: 552490 - DNA, 33 bp, Homo sapien
gaggccgactcttccctagccttttgattccac

SEQ ID NO: 552491 - DNA, 33 bp, Homo sapien
gcggttcctccagtgacgctgaacttgaccaga

SEQ ID NO: 552492 - DNA, 33 bp, Homo sapien
gcggttcctccagtgatgctgaacttgaccaga

SEQ ID NO: 552493 - DNA, 33 bp, Homo sapien
ggaggtgagctcacccaagataaacggctggac

SEQ ID NO: 552494 - DNA, 33 bp, Homo sapien
ggaggtgagctcacccgagataaacggctggac

SEQ ID NO: 552495 - DNA, 33 bp, Homo sapien
tcagggccctggaataaggagtggaggagttca

SEQ ID NO: 552496 - DNA, 33 bp, Homo sapien
tcagggccctggaatagggagtggaggagttca

SEQ ID NO: 552497 - DNA, 33 bp, Homo sapien
ggccagccggctcgcgcagagtcacctgggccg

SEQ ID NO: 552498 - DNA, 33 bp, Homo sapien
ggccagccggctcgcgtagagtcacctgggccg

SEQ ID NO: 552499 - DNA, 33 bp, Homo sapien
cttctgtgagttctaacgcacacagagatttgt

SEQ ID NO: 552500 - DNA, 33 bp, Homo sapien
cttctgtgagttctaatgcacacagagatttgt

SEQ ID NO: 552501 - DNA, 33 bp, Homo sapien
tcgccatgaaaacggaagattctgcagcgtctt

SEQ ID NO: 552502 - DNA, 33 bp, Homo sapien
tcgccatgaaaacggaggattctgcagcgtctt

SEQ ID NO: 552503 - DNA, 33 bp, Homo sapien
agtggaagtcatgtccaggaaggagcacatgaa

SEQ ID NO: 552504 - DNA, 33 bp, Homo sapien
agtggaagtcatgtccgggaaggagcacatgaa

SEQ ID NO: 552505 - DNA, 33 bp, Homo sapien
gagtgagcattcaggcaacttcagacccagccc

SEQ ID NO: 552506 - DNA, 33 bp, Homo sapien
gagtgagcattcaggccacttcagacccagccc

SEQ ID NO: 552507 - DNA, 33 bp, Homo sapien
agcccttcccgttgcaccaccctctctccacct

SEQ ID NO: 552508 - DNA, 33 bp, Homo sapien
agcccttcccgttgcatcaccctctctccacct

SEQ ID NO: 552509 - DNA, 33 bp, Homo sapien
atttctctttggctgaaagatgtttgtagtgag

SEQ ID NO: 552510 - DNA, 33 bp, Homo sapien
atttctctttggctgagagatgtttgtagtgag

SEQ ID NO: 552511 - DNA, 33 bp, Homo sapien
accgccagcttctccaacaaaaggttctgggtg

SEQ ID NO: 552512 - DNA, 33 bp, Homo sapien
accgccagcttctccagcaaaaggttctgggtg

SEQ ID NO: 552513 - DNA, 33 bp, Homo sapien
gttttaaacatgaacccggattcattgtcatct

SEQ ID NO: 552514 - DNA, 33 bp, Homo sapien
gttttaaacatgaacctggattcattgtcatct

SEQ ID NO: 552515 - DNA, 33 bp, Homo sapien
acgtaaagctaggaagcctccagtttatgtagc

SEQ ID NO: 552516 - DNA, 33 bp, Homo sapien
acgtaaagctaggaaggctccagtttatgtagc

SEQ ID NO: 552517 - DNA, 33 bp, Homo sapien
taacacatcgtcctaacagccgtgattatttct

SEQ ID NO: 552518 - DNA, 33 bp, Homo sapien
taacacatcgtcctaatagccgtgattatttct

SEQ ID NO: 552519 - DNA, 33 bp, Homo sapien
aaattctttttgtgacaaactcaagaacctgaa

SEQ ID NO: 552520 - DNA, 33 bp, Homo sapien
aaattctttttgtgacgaactcaagaacctgaa

SEQ ID NO: 552521 - DNA, 33 bp, Homo sapien
actgaggacacagagacctagcctcaagtggtt

SEQ ID NO: 552522 - DNA, 33 bp, Homo sapien
actgaggacacagagatctagcctcaagtggtt

SEQ ID NO: 552523 - DNA, 33 bp, Homo sapien
attatgaatgtctccacgtaggaagaagagata

SEQ ID NO: 552524 - DNA, 33 bp, Homo sapien
attatgaatgtctccatgtaggaagaagagata

SEQ ID NO: 552525 - DNA, 33 bp, Homo sapien
tatatgtgttgcttcccactcctctcaaagatg

SEQ ID NO: 552526 - DNA, 33 bp, Homo sapien
tatatgtgttgcttcctactcctctcaaagatg

SEQ ID NO: 552527 - DNA, 33 bp, Homo sapien
ccagttgcccacgcacaaagagactggcaacag

SEQ ID NO: 552528 - DNA, 33 bp, Homo sapien
ccagttgcccacgcacgaagagactggcaacag

SEQ ID NO: 552529 - DNA, 33 bp, Homo sapien
atcaaaaacacagttcagaaaccagcaccataa

SEQ ID NO: 552530 - DNA, 33 bp, Homo sapien
atcaaaaacacagttccgaaaccagcaccataa

SEQ ID NO: 552531 - DNA, 33 bp, Homo sapien
gaaaagtctcccggacagaaatggcttttgttg

SEQ ID NO: 552532 - DNA, 33 bp, Homo sapien
gaaaagtctcccggacggaaatggcttttgttg

SEQ ID NO: 552533 - DNA, 33 bp, Homo sapien
catccagggaaccacacgcctagaaagacccca

SEQ ID NO: 552534 - DNA, 33 bp, Homo sapien
catccagggaaccacatgcctagaaagacccca

SEQ ID NO: 552535 - DNA, 33 bp, Homo sapien
taattgccggactttgaaattcgttatgcattt

SEQ ID NO: 552536 - DNA, 33 bp, Homo sapien
taattgccggactttggaattcgttatgcattt

SEQ ID NO: 552537 - DNA, 33 bp, Homo sapien
gacacgcttgtgtagcagacacacctgagccca

SEQ ID NO: 552538 - DNA, 33 bp, Homo sapien
gacacgcttgtgtagcggacacacctgagccca

SEQ ID NO: 552539 - DNA, 33 bp, Homo sapien
ataaacagtgttataaagacatttggattgctt

SEQ ID NO: 552540 - DNA, 33 bp, Homo sapien
ataaacagtgttataaggacatttggattgctt

SEQ ID NO: 552541 - DNA, 33 bp, Homo sapien
gctctgttctagcaaacgctgctgagggacgca

SEQ ID NO: 552542 - DNA, 33 bp, Homo sapien
gctctgttctagcaaatgctgctgagggacgca

SEQ ID NO: 552543 - DNA, 33 bp, Homo sapien
gagagataaacatcctaaaactcattaggccag

SEQ ID NO: 552544 - DNA, 33 bp, Homo sapien
gagagataaacatcctgaaactcattaggccag

SEQ ID NO: 552545 - DNA, 33 bp, Homo sapien
ccaggatagcaccgtaaagacgagagcaaggca

SEQ ID NO: 552546 - DNA, 33 bp, Homo sapien
ccaggatagcaccgtagagacgagagcaaggca

SEQ ID NO: 552547 - DNA, 33 bp, Homo sapien
atttacaacagtcaaaaggtggaaggagcaatg

SEQ ID NO: 552548 - DNA, 33 bp, Homo sapien
atttacaacagtcaaacggtggaaggagcaatg

SEQ ID NO: 552549 - DNA, 33 bp, Homo sapien
gtgctcacaagcaaacaggtggcttggcaaatg

SEQ ID NO: 552550 - DNA, 33 bp, Homo sapien
gtgctcacaagcaaaccggtggcttggcaaatg

SEQ ID NO: 552551 - DNA, 33 bp, Homo sapien
tctctgtaaattcttcaaatgtctggattcctt

SEQ ID NO: 552552 - DNA, 33 bp, Homo sapien
tctctgtaaattcttcgaatgtctggattcctt

SEQ ID NO: 552553 - DNA, 33 bp, Homo sapien
aatttttaccttaacaatggaagtgctgtgcaa

SEQ ID NO: 552554 - DNA, 33 bp, Homo sapien
aatttttaccttaacagtggaagtgctgtgcaa

SEQ ID NO: 552555 - DNA, 33 bp, Homo sapien
ttccccacgtaaccacaacacatatgactatcc

SEQ ID NO: 552556 - DNA, 33 bp, Homo sapien
ttccccacgtaaccacgacacatatgactatcc

SEQ ID NO: 552557 - DNA, 33 bp, Homo sapien
ctgggtcagacaagaacgtgctctggatttcca

SEQ ID NO: 552558 - DNA, 33 bp, Homo sapien
ctgggtcagacaagaatgtgctctggatttcca

SEQ ID NO: 552559 - DNA, 33 bp, Homo sapien
cacagacacagtgagacgccggtgtgaatgcag

SEQ ID NO: 552560 - DNA, 33 bp, Homo sapien
cacagacacagtgagatgccggtgtgaatgcag

SEQ ID NO: 552561 - DNA, 33 bp, Homo sapien
ccagggatttccaggcaccacatgtgctcctgg

SEQ ID NO: 552562 - DNA, 33 bp, Homo sapien
ccagggatttccaggcgccacatgtgctcctgg

SEQ ID NO: 552563 - DNA, 33 bp, Homo sapien
attcagcaaaccttaaataagatggcagaatgt

SEQ ID NO: 552564 - DNA, 33 bp, Homo sapien
attcagcaaaccttaagtaagatggcagaatgt

SEQ ID NO: 552565 - DNA, 33 bp, Homo sapien
tgcaagaagaaaggcaaacaaaagaagacaaac

SEQ ID NO: 552566 - DNA, 33 bp, Homo sapien
tgcaagaagaaaggcagacaaaagaagacaaac

SEQ ID NO: 552567 - DNA, 33 bp, Homo sapien
gagtattggctttggacggttcatgcctgagtc

SEQ ID NO: 552568 - DNA, 33 bp, Homo sapien
gagtattggctttggatggttcatgcctgagtc

SEQ ID NO: 552569 - DNA, 33 bp, Homo sapien
cacgccaggcctgacactcagtaccagtggaga

SEQ ID NO: 552570 - DNA, 33 bp, Homo sapien
cacgccaggcctgacattcagtaccagtggaga

SEQ ID NO: 552571 - DNA, 33 bp, Homo sapien
aagtgattttgccaagacaggttttccctggcc

SEQ ID NO: 552572 - DNA, 33 bp, Homo sapien
aagtgattttgccaagtcaggttttccctggcc

SEQ ID NO: 552573 - DNA, 33 bp, Homo sapien
gaggggagggaactaaagtatgagattgtgttc

SEQ ID NO: 552574 - DNA, 33 bp, Homo sapien
gaggggagggaactaaggtatgagattgtgttc

SEQ ID NO: 552575 - DNA, 33 bp, Homo sapien
gtgcctcatcctcacacaacaaagatggaaatc

SEQ ID NO: 552576 - DNA, 33 bp, Homo sapien
gtgcctcatcctcacagaacaaagatggaaatc

SEQ ID NO: 552577 - DNA, 33 bp, Homo sapien
cttagacctggagagacaagtgccacctcccat

SEQ ID NO: 552578 - DNA, 33 bp, Homo sapien
cttagacctggagagagaagtgccacctcccat

SEQ ID NO: 552579 - DNA, 33 bp, Homo sapien
acatgcatgtacaagactctgtgaggacatgtg

SEQ ID NO: 552580 - DNA, 33 bp, Homo sapien
acatgcatgtacaagattctgtgaggacatgtg

SEQ ID NO: 552581 - DNA, 33 bp, Homo sapien
tttcctccaactcaacagctaaacaggaaccaa

SEQ ID NO: 552582 - DNA, 33 bp, Homo sapien
tttcctccaactcaacggctaaacaggaaccaa

SEQ ID NO: 552583 - DNA, 33 bp, Homo sapien
atgaacagttttctcacggaatggatcgattgg

SEQ ID NO: 552584 - DNA, 33 bp, Homo sapien
atgaacagttttctcatggaatggatcgattgg

SEQ ID NO: 552585 - DNA, 33 bp, Homo sapien
gggctgaggaggagcaagtgggaggagcgtgca

SEQ ID NO: 552586 - DNA, 33 bp, Homo sapien
gggctgaggaggagcaggtgggaggagcgtgca

SEQ ID NO: 552587 - DNA, 33 bp, Homo sapien
tcagagaagttaggcaggacatcaaagacacac

SEQ ID NO: 552588 - DNA, 33 bp, Homo sapien
tcagagaagttaggcatgacatcaaagacacac

SEQ ID NO: 552589 - DNA, 33 bp, Homo sapien
ccctctttgggacggacgtatgagagctcatta

SEQ ID NO: 552590 - DNA, 33 bp, Homo sapien
ccctctttgggacggatgtatgagagctcatta

SEQ ID NO: 552591 - DNA, 33 bp, Homo sapien
accttaaaatcccgacactatcctggtcataat

SEQ ID NO: 552592 - DNA, 33 bp, Homo sapien
accttaaaatcccgacgctatcctggtcataat

SEQ ID NO: 552593 - DNA, 33 bp, Homo sapien
gttggcgacacagcccagaagtgtgagtcctgc

SEQ ID NO: 552594 - DNA, 33 bp, Homo sapien
gttggcgacacagcccggaagtgtgagtcctgc

SEQ ID NO: 552595 - DNA, 33 bp, Homo sapien
tatgttttaagagagacgttgagaaagattcac

SEQ ID NO: 552596 - DNA, 33 bp, Homo sapien
tatgttttaagagagatgttgagaaagattcac

SEQ ID NO: 552597 - DNA, 33 bp, Homo sapien
gaactcatgaagtacacgcatctgccgggtaga

SEQ ID NO: 552598 - DNA, 33 bp, Homo sapien
gaactcatgaagtacaggcatctgccgggtaga

SEQ ID NO: 552599 - DNA, 33 bp, Homo sapien
gaagagcctgggagaaacctcattgtgcggcct

SEQ ID NO: 552600 - DNA, 33 bp, Homo sapien
gaagagcctgggagaagcctcattgtgcggcct

SEQ ID NO: 552601 - DNA, 33 bp, Homo sapien
gaggcagcaaatgcacacaatgcgcagagcacg

SEQ ID NO: 552602 - DNA, 33 bp, Homo sapien
gaggcagcaaatgcacgcaatgcgcagagcacg

SEQ ID NO: 552603 - DNA, 33 bp, Homo sapien
tgaatgtcatgaggaacctaaagcagtcacgtc

SEQ ID NO: 552604 - DNA, 33 bp, Homo sapien
tgaatgtcatgaggaatctaaagcagtcacgtc

SEQ ID NO: 552605 - DNA, 33 bp, Homo sapien
tctgctctaatagtcacacgttctgtggaatgt

SEQ ID NO: 552606 - DNA, 33 bp, Homo sapien
tctgctctaatagtcatacgttctgtggaatgt

SEQ ID NO: 552607 - DNA, 33 bp, Homo sapien
cagcagggaaaaaggaaggttcaagctaggatt

SEQ ID NO: 552608 - DNA, 33 bp, Homo sapien
cagcagggaaaaaggagggttcaagctaggatt

SEQ ID NO: 552609 - DNA, 33 bp, Homo sapien
tcatcggtctccttacagattttctctctgctg

SEQ ID NO: 552610 - DNA, 33 bp, Homo sapien
tcatcggtctccttacggattttctctctgctg

SEQ ID NO: 552611 - DNA, 33 bp, Homo sapien
atctttactgattttccctctgctggatctgtt

SEQ ID NO: 552612 - DNA, 33 bp, Homo sapien
atctttactgattttctctctgctggatctgtt

SEQ ID NO: 552613 - DNA, 33 bp, Homo sapien
gcggggactccaggaactctgtggcaggttgtt

SEQ ID NO: 552614 - DNA, 33 bp, Homo sapien
gcggggactccaggaattctgtggcaggttgtt

SEQ ID NO: 552615 - DNA, 33 bp, Homo sapien
cgtgcatccctacgtgaaacaggggcagccacc

SEQ ID NO: 552616 - DNA, 33 bp, Homo sapien
cgtgcatccctacgtggaacaggggcagccacc

SEQ ID NO: 552617 - DNA, 33 bp, Homo sapien
aatgtgaggttttacaatattctgcaagggaag

SEQ ID NO: 552618 - DNA, 33 bp, Homo sapien
aatgtgaggttttacagtattctgcaagggaag

SEQ ID NO: 552619 - DNA, 33 bp, Homo sapien
taagtatatgttgaacacgggaatggccaaatg

SEQ ID NO: 552620 - DNA, 33 bp, Homo sapien
taagtatatgttgaacgcgggaatggccaaatg

SEQ ID NO: 552621 - DNA, 33 bp, Homo sapien
tcagatttagtgacaaaatgaaattgaaagcag

SEQ ID NO: 552622 - DNA, 33 bp, Homo sapien
tcagatttagtgacaacatgaaattgaaagcag

SEQ ID NO: 552623 - DNA, 33 bp, Homo sapien
gggggaaagcagatcacgttggctaaaggacag

SEQ ID NO: 552624 - DNA, 33 bp, Homo sapien
gggggaaagcagatcatgttggctaaaggacag

SEQ ID NO: 552625 - DNA, 33 bp, Homo sapien
cacagtaagggattgacattggtattactgtgg

SEQ ID NO: 552626 - DNA, 33 bp, Homo sapien
cacagtaagggattgatattggtattactgtgg

SEQ ID NO: 552627 - DNA, 33 bp, Homo sapien
caaatatggatggccaataaacccatgaaaaca

SEQ ID NO: 552628 - DNA, 33 bp, Homo sapien
caaatatggatggccagtaaacccatgaaaaca

SEQ ID NO: 552629 - DNA, 33 bp, Homo sapien
tgtattcctggggatccagaagtctgcatacaa

SEQ ID NO: 552630 - DNA, 33 bp, Homo sapien
tgtattcctggggatctagaagtctgcatacaa

SEQ ID NO: 552631 - DNA, 33 bp, Homo sapien
ggtggactacagtttacatgctttatttaacca

SEQ ID NO: 552632 - DNA, 33 bp, Homo sapien
ggtggactacagtttatatgctttatttaacca

SEQ ID NO: 552633 - DNA, 33 bp, Homo sapien
atagctgcagtaaaagcatctggggaaattcaa

SEQ ID NO: 552634 - DNA, 33 bp, Homo sapien
atagctgcagtaaaagtatctggggaaattcaa

SEQ ID NO: 552635 - DNA, 33 bp, Homo sapien
aataggactcagaaaacaatcaaaatgaccatt

SEQ ID NO: 552636 - DNA, 33 bp, Homo sapien
aataggactcagaaaataatcaaaatgaccatt

SEQ ID NO: 552637 - DNA, 33 bp, Homo sapien
atatgggtatatcttacggtgtacatatgtgca

SEQ ID NO: 552638 - DNA, 33 bp, Homo sapien
atatgggtatatcttatggtgtacatatgtgca

SEQ ID NO: 552639 - DNA, 33 bp, Homo sapien
tcaccatgtatagacccgggaacacagcaaaga

SEQ ID NO: 552640 - DNA, 33 bp, Homo sapien
tcaccatgtatagacctgggaacacagcaaaga

SEQ ID NO: 552641 - DNA, 33 bp, Homo sapien
ggtgggtgcgggacaccacggtaaggacgtgca

SEQ ID NO: 552642 - DNA, 33 bp, Homo sapien
ggtgggtgcgggacactacggtaaggacgtgca

SEQ ID NO: 552643 - DNA, 33 bp, Homo sapien
cctcaaaattcacatcaaatcctcacccccaac

SEQ ID NO: 552644 - DNA, 33 bp, Homo sapien
cctcaaaattcacatcgaatcctcacccccaac

SEQ ID NO: 552645 - DNA, 33 bp, Homo sapien
ccacatgggcgttacactctcctttgaaatgga

SEQ ID NO: 552646 - DNA, 33 bp, Homo sapien
ccacatgggcgttacattctcctttgaaatgga

SEQ ID NO: 552647 - DNA, 33 bp, Homo sapien
ttcggaaaacgcacctaacataaccttgccttt

SEQ ID NO: 552648 - DNA, 33 bp, Homo sapien
ttcggaaaacgcacctgacataaccttgccttt

SEQ ID NO: 552649 - DNA, 33 bp, Homo sapien
agtgcattgcagggccactacccccacaaaaaa

SEQ ID NO: 552650 - DNA, 33 bp, Homo sapien
agtgcattgcagggccgctacccccacaaaaaa

SEQ ID NO: 552651 - DNA, 33 bp, Homo sapien
aggcctggtctcacgcgcaataaactccggact

SEQ ID NO: 552652 - DNA, 33 bp, Homo sapien
aggcctggtctcacgctcaataaactccggact

SEQ ID NO: 552653 - DNA, 33 bp, Homo sapien
tcacccaaagtcctgccctctatagctctgttt

SEQ ID NO: 552654 - DNA, 33 bp, Homo sapien
tcacccaaagtcctgctctctatagctctgttt

SEQ ID NO: 552655 - DNA, 33 bp, Homo sapien
tcccagcttggtttcccgagaacggagccttcg

SEQ ID NO: 552656 - DNA, 33 bp, Homo sapien
tcccagcttggtttcctgagaacggagccttcg

SEQ ID NO: 552657 - DNA, 33 bp, Homo sapien
ccgcatgttacaagacggtcccataaagatggc

SEQ ID NO: 552658 - DNA, 33 bp, Homo sapien
ccgcatgttacaagactgtcccataaagatggc

SEQ ID NO: 552659 - DNA, 33 bp, Homo sapien
gcaaatgggccttaaacagtttagctttcaaat

SEQ ID NO: 552660 - DNA, 33 bp, Homo sapien
gcaaatgggccttaaatagtttagctttcaaat

SEQ ID NO: 552661 - DNA, 33 bp, Homo sapien
agccatggccaccgagaacttctcctttccttg

SEQ ID NO: 552662 - DNA, 33 bp, Homo sapien
agccatggccaccgaggacttctcctttccttg

SEQ ID NO: 552663 - DNA, 33 bp, Homo sapien
cccacccactagggacacctttaactgatcacc

SEQ ID NO: 552664 - DNA, 33 bp, Homo sapien
cccacccactagggacgcctttaactgatcacc

SEQ ID NO: 552665 - DNA, 33 bp, Homo sapien
atacaggttagagagcaaatacagaaagcaggt

SEQ ID NO: 552666 - DNA, 33 bp, Homo sapien
atacaggttagagagcgaatacagaaagcaggt

SEQ ID NO: 552667 - DNA, 33 bp, Homo sapien
agaataaccgactaaacgcttcttggccatccc

SEQ ID NO: 552668 - DNA, 33 bp, Homo sapien
agaataaccgactaaatgcttcttggccatccc

SEQ ID NO: 552669 - DNA, 33 bp, Homo sapien
caagtgcacattttaaccaatataggccatatt

SEQ ID NO: 552670 - DNA, 33 bp, Homo sapien
caagtgcacattttaatcaatataggccatatt

SEQ ID NO: 552671 - DNA, 33 bp, Homo sapien
gcccttccatgacctcaatcccatcctggctca

SEQ ID NO: 552672 - DNA, 33 bp, Homo sapien
gcccttccatgacctcgatcccatcctggctca

SEQ ID NO: 552673 - DNA, 33 bp, Homo sapien
ccaccatcaaagcttcacagaggggaatattat

SEQ ID NO: 552674 - DNA, 33 bp, Homo sapien
ccaccatcaaagcttcgcagaggggaatattat

SEQ ID NO: 552675 - DNA, 33 bp, Homo sapien
ctctgcctccgtcttcacatggctctcttccct

SEQ ID NO: 552676 - DNA, 33 bp, Homo sapien
ctctgcctccgtcttcgcatggctctcttccct

SEQ ID NO: 552677 - DNA, 33 bp, Homo sapien
agtaacctcatttggaaacaaggtctgatatgg

SEQ ID NO: 552678 - DNA, 33 bp, Homo sapien
agtaacctcatttggagacaaggtctgatatgg

SEQ ID NO: 552679 - DNA, 33 bp, Homo sapien
agaagagtgcactttcaaacagcaagaatgtac

SEQ ID NO: 552680 - DNA, 33 bp, Homo sapien
agaagagtgcactttcgaacagcaagaatgtac

SEQ ID NO: 552681 - DNA, 33 bp, Homo sapien
gtcacattatcacaccacacttctgcccactct

SEQ ID NO: 552682 - DNA, 33 bp, Homo sapien
gtcacattatcacaccgcacttctgcccactct

SEQ ID NO: 552683 - DNA, 33 bp, Homo sapien
aacaaattcctgctgaaaaccatgtgtgaactt

SEQ ID NO: 552684 - DNA, 33 bp, Homo sapien
aacaaattcctgctgagaaccatgtgtgaactt

SEQ ID NO: 552685 - DNA, 33 bp, Homo sapien
attagagaggttaagcacctgatttttggatcc

SEQ ID NO: 552686 - DNA, 33 bp, Homo sapien
attagagaggttaagcgcctgatttttggatcc

SEQ ID NO: 552687 - DNA, 33 bp, Homo sapien
tggaggttgcagtggcaattttcagaatcaatt

SEQ ID NO: 552688 - DNA, 33 bp, Homo sapien
tggaggttgcagtggcgattttcagaatcaatt

SEQ ID NO: 552689 - DNA, 33 bp, Homo sapien
ccagagataatccccaatgatttttcatgtgta

SEQ ID NO: 552690 - DNA, 33 bp, Homo sapien
ccagagataatccccagtgatttttcatgtgta

SEQ ID NO: 552691 - DNA, 33 bp, Homo sapien
aattgaatatgcgcccactttaccagaactaga

SEQ ID NO: 552692 - DNA, 33 bp, Homo sapien
aattgaatatgcgcccgctttaccagaactaga

SEQ ID NO: 552693 - DNA, 33 bp, Homo sapien
ctgaagacgtcagcaaactcaaagccagcatga

SEQ ID NO: 552694 - DNA, 33 bp, Homo sapien
ctgaagacgtcagcaagctcaaagccagcatga

SEQ ID NO: 552695 - DNA, 33 bp, Homo sapien
gagtactgctgtgtaagattatgttgaggaggg

SEQ ID NO: 552696 - DNA, 33 bp, Homo sapien
gagtactgctgtgtaatattatgttgaggaggg

SEQ ID NO: 552697 - DNA, 33 bp, Homo sapien
gtgggtctcgcctctgcagtggtcttccccact

SEQ ID NO: 552698 - DNA, 33 bp, Homo sapien
gtgggtctcgcctctgtagtggtcttccccact

SEQ ID NO: 552699 - DNA, 33 bp, Homo sapien
acatgaattttgcgggaacacacttcagcctag

SEQ ID NO: 552700 - DNA, 33 bp, Homo sapien
acatgaattttgcggggacacacttcagcctag

SEQ ID NO: 552701 - DNA, 33 bp, Homo sapien
catagaaaactaaaaccccacctagacacatga

SEQ ID NO: 552702 - DNA, 33 bp, Homo sapien
catagaaaactaaaactccacctagacacatga

SEQ ID NO: 552703 - DNA, 33 bp, Homo sapien
ggggctgtcacccggcagccaatggcaagttct

SEQ ID NO: 552704 - DNA, 33 bp, Homo sapien
ggggctgtcacccggcggccaatggcaagttct

SEQ ID NO: 552705 - DNA, 33 bp, Homo sapien
atcactccataacccaccatgcagccctaagct

SEQ ID NO: 552706 - DNA, 33 bp, Homo sapien
atcactccataacccatcatgcagccctaagct

SEQ ID NO: 552707 - DNA, 33 bp, Homo sapien
ttaggagcaagaattaagaccagatggatggga

SEQ ID NO: 552708 - DNA, 33 bp, Homo sapien
ttaggagcaagaattaggaccagatggatggga

SEQ ID NO: 552709 - DNA, 33 bp, Homo sapien
atacagttatggggcaacaggagacacatctca

SEQ ID NO: 552710 - DNA, 33 bp, Homo sapien
atacagttatggggcagcaggagacacatctca

SEQ ID NO: 552711 - DNA, 33 bp, Homo sapien
caggaggagcgacatccgagagtccccagctca

SEQ ID NO: 552712 - DNA, 33 bp, Homo sapien
caggaggagcgacatctgagagtccccagctca

SEQ ID NO: 552713 - DNA, 33 bp, Homo sapien
gcacacagcgccatacactaagcacatggcacc

SEQ ID NO: 552714 - DNA, 33 bp, Homo sapien
gcacacagcgccatacgctaagcacatggcacc

SEQ ID NO: 552715 - DNA, 33 bp, Homo sapien
gggcttgggcctcagaagggacagacatgtccc

SEQ ID NO: 552716 - DNA, 33 bp, Homo sapien
gggcttgggcctcagaggggacagacatgtccc

SEQ ID NO: 552717 - DNA, 33 bp, Homo sapien
gagcccttgcaggcaaactctttgcaggaattc

SEQ ID NO: 552718 - DNA, 33 bp, Homo sapien
gagcccttgcaggcaagctctttgcaggaattc

SEQ ID NO: 552719 - DNA, 33 bp, Homo sapien
aggtgtcgttcaagaccccattaaacaggaaga

SEQ ID NO: 552720 - DNA, 33 bp, Homo sapien
aggtgtcgttcaagactccattaaacaggaaga

SEQ ID NO: 552721 - DNA, 33 bp, Homo sapien
gggagctgcctcttccacaaagttcaaaaggac

SEQ ID NO: 552722 - DNA, 33 bp, Homo sapien
gggagctgcctcttccgcaaagttcaaaaggac

SEQ ID NO: 552723 - DNA, 33 bp, Homo sapien
ggaaattttacataggacagaatgcacacatgc

SEQ ID NO: 552724 - DNA, 33 bp, Homo sapien
ggaaattttacatagggcagaatgcacacatgc

SEQ ID NO: 552725 - DNA, 33 bp, Homo sapien
caagctcagtgacacacaatttgcccatgtaac

SEQ ID NO: 552726 - DNA, 33 bp, Homo sapien
caagctcagtgacacataatttgcccatgtaac

SEQ ID NO: 552727 - DNA, 33 bp, Homo sapien
gacataaaatcaacaaagatgtgcatcaacagt

SEQ ID NO: 552728 - DNA, 33 bp, Homo sapien
gacataaaatcaacaaggatgtgcatcaacagt

SEQ ID NO: 552729 - DNA, 33 bp, Homo sapien
gttcctcctctattcaatcccagcatctgggtc

SEQ ID NO: 552730 - DNA, 33 bp, Homo sapien
gttcctcctctattcagtcccagcatctgggtc

SEQ ID NO: 552731 - DNA, 33 bp, Homo sapien
gttctactggtaaccccgaagagatggctaagg

SEQ ID NO: 552732 - DNA, 33 bp, Homo sapien
gttctactggtaaccctgaagagatggctaagg

SEQ ID NO: 552733 - DNA, 33 bp, Homo sapien
tccccagggaagagcaacttcaggccaccacac

SEQ ID NO: 552734 - DNA, 33 bp, Homo sapien
tccccagggaagagcagcttcaggccaccacac

SEQ ID NO: 552735 - DNA, 33 bp, Homo sapien
ttcagaatggctctaactaaacaaacaaacaaa

SEQ ID NO: 552736 - DNA, 33 bp, Homo sapien
ttcagaatggctctaattaaacaaacaaacaaa

SEQ ID NO: 552737 - DNA, 33 bp, Homo sapien
ggtctattcacacatcagaatactatacagcca

SEQ ID NO: 552738 - DNA, 33 bp, Homo sapien
ggtctattcacacatcggaatactatacagcca

SEQ ID NO: 552739 - DNA, 33 bp, Homo sapien
aagctcaacacagcacaaaactctccatgtcat

SEQ ID NO: 552740 - DNA, 33 bp, Homo sapien
aagctcaacacagcacgaaactctccatgtcat

SEQ ID NO: 552741 - DNA, 33 bp, Homo sapien
gtgacatgaagaccacagtgaggatttggcagg

SEQ ID NO: 552742 - DNA, 33 bp, Homo sapien
gtgacatgaagaccacggtgaggatttggcagg

SEQ ID NO: 552743 - DNA, 33 bp, Homo sapien
cacaaatgttcctaaaatggaatgtctgggttc

SEQ ID NO: 552744 - DNA, 33 bp, Homo sapien
cacaaatgttcctaaactggaatgtctgggttc

SEQ ID NO: 552745 - DNA, 33 bp, Homo sapien
cagagcttacatcaaaaggtgcacgggaagcaa

SEQ ID NO: 552746 - DNA, 33 bp, Homo sapien
cagagcttacatcaaagggtgcacgggaagcaa

SEQ ID NO: 552747 - DNA, 33 bp, Homo sapien
caaggctactgaaagacgtgctggagaccagcc

SEQ ID NO: 552748 - DNA, 33 bp, Homo sapien
caaggctactgaaagatgtgctggagaccagcc

SEQ ID NO: 552749 - DNA, 33 bp, Homo sapien
cctggtccatgtcagaccttttcaggccgggga

SEQ ID NO: 552750 - DNA, 33 bp, Homo sapien
cctggtccatgtcagatcttttcaggccgggga

SEQ ID NO: 552751 - DNA, 33 bp, Homo sapien
agtgtagatcacggaccgcgcccctagcccccg

SEQ ID NO: 552752 - DNA, 33 bp, Homo sapien
agtgtagatcacggactgcgcccctagcccccg

SEQ ID NO: 552753 - DNA, 33 bp, Homo sapien
atgggggctctgcctcaaatgcctggtcagtct

SEQ ID NO: 552754 - DNA, 33 bp, Homo sapien
atgggggctctgcctcgaatgcctggtcagtct

SEQ ID NO: 552755 - DNA, 33 bp, Homo sapien
aaagaactcccacttcagaaattacagggaatg

SEQ ID NO: 552756 - DNA, 33 bp, Homo sapien
aaagaactcccacttcggaaattacagggaatg

SEQ ID NO: 552757 - DNA, 33 bp, Homo sapien
gggctgctcatctctgcatcttcagctggactg

SEQ ID NO: 552758 - DNA, 33 bp, Homo sapien
gggctgctcatctctgtatcttcagctggactg

SEQ ID NO: 552759 - DNA, 33 bp, Homo sapien
gaactgtgtaatctccgacttgggcttcacccc

SEQ ID NO: 552760 - DNA, 33 bp, Homo sapien
gaactgtgtaatctcctacttgggcttcacccc

SEQ ID NO: 552761 - DNA, 33 bp, Homo sapien
gggaaggctcttcaccaagggggatctctctgc

SEQ ID NO: 552762 - DNA, 33 bp, Homo sapien
gggaaggctcttcaccgagggggatctctctgc

SEQ ID NO: 552763 - DNA, 33 bp, Homo sapien
gcatgagctgcagtgggatttactctgccagcg

SEQ ID NO: 552764 - DNA, 33 bp, Homo sapien
gcatgagctgcagtggtatttactctgccagcg

SEQ ID NO: 552765 - DNA, 33 bp, Homo sapien
cacacatgggactggaaccgtcttgcccacaca

SEQ ID NO: 552766 - DNA, 33 bp, Homo sapien
cacacatgggactggagccgtcttgcccacaca

SEQ ID NO: 552767 - DNA, 33 bp, Homo sapien
gctcactgaatgaggacgtagggattgcagtga

SEQ ID NO: 552768 - DNA, 33 bp, Homo sapien
gctcactgaatgaggatgtagggattgcagtga

SEQ ID NO: 552769 - DNA, 33 bp, Homo sapien
gaggatcagaaacagacaaattcacacccacca

SEQ ID NO: 552770 - DNA, 33 bp, Homo sapien
gaggatcagaaacagagaaattcacacccacca

SEQ ID NO: 552771 - DNA, 33 bp, Homo sapien
tattaggtccgattcccagactgaacagacatg

SEQ ID NO: 552772 - DNA, 33 bp, Homo sapien
tattaggtccgattcctagactgaacagacatg

SEQ ID NO: 552773 - DNA, 33 bp, Homo sapien
aagcgaaacgtgctcccgagctttccaccgcga

SEQ ID NO: 552774 - DNA, 33 bp, Homo sapien
aagcgaaacgtgctcctgagctttccaccgcga

SEQ ID NO: 552775 - DNA, 33 bp, Homo sapien
cacgggtgctgcacgaggctccttgctagagtg

SEQ ID NO: 552776 - DNA, 33 bp, Homo sapien
cacgggtgctgcacgatgctccttgctagagtg

SEQ ID NO: 552777 - DNA, 33 bp, Homo sapien
gaaaagcaggtaagaaacccgttctatggagct

SEQ ID NO: 552778 - DNA, 33 bp, Homo sapien
gaaaagcaggtaagaagcccgttctatggagct

SEQ ID NO: 552779 - DNA, 33 bp, Homo sapien
gcaactccatccgaggaacacactgagcatccc

SEQ ID NO: 552780 - DNA, 33 bp, Homo sapien
gcaactccatccgaggtacacactgagcatccc

SEQ ID NO: 552781 - DNA, 33 bp, Homo sapien
cttcttcaacatggacaaaccgtgccagcaact

SEQ ID NO: 552782 - DNA, 33 bp, Homo sapien
cttcttcaacatggacgaaccgtgccagcaact

SEQ ID NO: 552783 - DNA, 33 bp, Homo sapien
taaaatcaataaaatcacaaggaataaaattga

SEQ ID NO: 552784 - DNA, 33 bp, Homo sapien
taaaatcaataaaatcgcaaggaataaaattga

SEQ ID NO: 552785 - DNA, 33 bp, Homo sapien
catagcttcatctaaacgttgcgattcccataa

SEQ ID NO: 552786 - DNA, 33 bp, Homo sapien
catagcttcatctaaatgttgcgattcccataa

SEQ ID NO: 552787 - DNA, 33 bp, Homo sapien
attctcgcccacggtcacttctggggcctcgct

SEQ ID NO: 552788 - DNA, 33 bp, Homo sapien
attctcgcccacggtctcttctggggcctcgct

SEQ ID NO: 552789 - DNA, 33 bp, Homo sapien
ccccccaagtccggaggaggctgagttggggag

SEQ ID NO: 552790 - DNA, 33 bp, Homo sapien
ccccccaagtccggagtaggctgagttggggag

SEQ ID NO: 552791 - DNA, 33 bp, Homo sapien
gttgggaggaatcaccactctctgcatccaggc

SEQ ID NO: 552792 - DNA, 33 bp, Homo sapien
gttgggaggaatcaccgctctctgcatccaggc

SEQ ID NO: 552793 - DNA, 33 bp, Homo sapien
caggagatttagagagaagaaactttcaaacca

SEQ ID NO: 552794 - DNA, 33 bp, Homo sapien
caggagatttagagagtagaaactttcaaacca

SEQ ID NO: 552795 - DNA, 33 bp, Homo sapien
cacctctgtctagttccgaaacatctcatctcc

SEQ ID NO: 552796 - DNA, 33 bp, Homo sapien
cacctctgtctagttctgaaacatctcatctcc

SEQ ID NO: 552797 - DNA, 33 bp, Homo sapien
ctcctgggtgctctaacagatcagatgccacat

SEQ ID NO: 552798 - DNA, 33 bp, Homo sapien
ctcctgggtgctctaatagatcagatgccacat

SEQ ID NO: 552799 - DNA, 33 bp, Homo sapien
cattcccattccgcagaccaggagacctgtagc

SEQ ID NO: 552800 - DNA, 33 bp, Homo sapien
cattcccattccgcaggccaggagacctgtagc

SEQ ID NO: 552801 - DNA, 33 bp, Homo sapien
ccccgattcctcaggacgtgactttgggtgtgg

SEQ ID NO: 552802 - DNA, 33 bp, Homo sapien
ccccgattcctcaggatgtgactttgggtgtgg

SEQ ID NO: 552803 - DNA, 33 bp, Homo sapien
acctcatcctgggttccaagagtgggctctgcc

SEQ ID NO: 552804 - DNA, 33 bp, Homo sapien
acctcatcctgggttcgaagagtgggctctgcc

SEQ ID NO: 552805 - DNA, 33 bp, Homo sapien
agaacacacgtcacccactgacactgagcggtg

SEQ ID NO: 552806 - DNA, 33 bp, Homo sapien
agaacacacgtcacccgctgacactgagcggtg

SEQ ID NO: 552807 - DNA, 33 bp, Homo sapien
tgagaggagctagaaacgttcgtgagaagagga

SEQ ID NO: 552808 - DNA, 33 bp, Homo sapien
tgagaggagctagaaatgttcgtgagaagagga

SEQ ID NO: 552809 - DNA, 33 bp, Homo sapien
ggctgaagccacagaaatgagctggctctggtc

SEQ ID NO: 552810 - DNA, 33 bp, Homo sapien
ggctgaagccacagaagtgagctggctctggtc

SEQ ID NO: 552811 - DNA, 33 bp, Homo sapien
gcagcaccatcatttacgtatacccccaagcca

SEQ ID NO: 552812 - DNA, 33 bp, Homo sapien
gcagcaccatcatttatgtatacccccaagcca

SEQ ID NO: 552813 - DNA, 33 bp, Homo sapien
aaggttctcatctggacgggttgtttctatgca

SEQ ID NO: 552814 - DNA, 33 bp, Homo sapien
aaggttctcatctggatgggttgtttctatgca

SEQ ID NO: 552815 - DNA, 33 bp, Homo sapien
ctcctgctttgcttcacactgggttagcagtca

SEQ ID NO: 552816 - DNA, 33 bp, Homo sapien
ctcctgctttgcttcatactgggttagcagtca

SEQ ID NO: 552817 - DNA, 33 bp, Homo sapien
tgaggtaacggaggaccgaaataattgttaatg

SEQ ID NO: 552818 - DNA, 33 bp, Homo sapien
tgaggtaacggaggactgaaataattgttaatg

SEQ ID NO: 552819 - DNA, 33 bp, Homo sapien
ctgtttatatccattaaaaattgagtagagtat

SEQ ID NO: 552820 - DNA, 33 bp, Homo sapien
ctgtttatatccattagaaattgagtagagtat

SEQ ID NO: 552821 - DNA, 33 bp, Homo sapien
aagtcgcacacacacaagttggactcaaatttc

SEQ ID NO: 552822 - DNA, 33 bp, Homo sapien
aagtcgcacacacacacgttggactcaaatttc

SEQ ID NO: 552823 - DNA, 33 bp, Homo sapien
tgagcagatgccaagggatgtgtgttctttact

SEQ ID NO: 552824 - DNA, 33 bp, Homo sapien
tgagcagatgccaaggtatgtgtgttctttact

SEQ ID NO: 552825 - DNA, 33 bp, Homo sapien
cctctttccacttaaacgtgtcccatgaatctt

SEQ ID NO: 552826 - DNA, 33 bp, Homo sapien
cctctttccacttaaatgtgtcccatgaatctt

SEQ ID NO: 552827 - DNA, 33 bp, Homo sapien
caaacgtgaacgcacaatctccctctcagcctt

SEQ ID NO: 552828 - DNA, 33 bp, Homo sapien
caaacgtgaacgcacactctccctctcagcctt

SEQ ID NO: 552829 - DNA, 33 bp, Homo sapien
cagtaggccataggaaaccaagagacaatggcc

SEQ ID NO: 552830 - DNA, 33 bp, Homo sapien
cagtaggccataggaagccaagagacaatggcc

SEQ ID NO: 552831 - DNA, 33 bp, Homo sapien
acaggctaagcaggccaagtcaggcactcccag

SEQ ID NO: 552832 - DNA, 33 bp, Homo sapien
acaggctaagcaggccgagtcaggcactcccag

SEQ ID NO: 552833 - DNA, 33 bp, Homo sapien
aggaatatcatcttaacagcctgttgcccccat

SEQ ID NO: 552834 - DNA, 33 bp, Homo sapien
aggaatatcatcttaagagcctgttgcccccat

SEQ ID NO: 552835 - DNA, 33 bp, Homo sapien
ataccttctccataggacataggccaagcaaat

SEQ ID NO: 552836 - DNA, 33 bp, Homo sapien
ataccttctccatagggcataggccaagcaaat

SEQ ID NO: 552837 - DNA, 33 bp, Homo sapien
tagcctcaccttcaaacgccttacttcacagca

SEQ ID NO: 552838 - DNA, 33 bp, Homo sapien
tagcctcaccttcaaatgccttacttcacagca

SEQ ID NO: 552839 - DNA, 33 bp, Homo sapien
aaggatgcagcagagagatcggtcgctccccag

SEQ ID NO: 552840 - DNA, 33 bp, Homo sapien
aaggatgcagcagagatatcggtcgctccccag

SEQ ID NO: 552841 - DNA, 33 bp, Homo sapien
atccaggcatctgggaaccactgagcacacagg

SEQ ID NO: 552842 - DNA, 33 bp, Homo sapien
atccaggcatctgggagccactgagcacacagg

SEQ ID NO: 552843 - DNA, 33 bp, Homo sapien
agctgtgcgaggagcccatccaggctggctgca

SEQ ID NO: 552844 - DNA, 33 bp, Homo sapien
agctgtgcgaggagccgatccaggctggctgca

SEQ ID NO: 552845 - DNA, 33 bp, Homo sapien
cagaacaaagagcaacacatttccactgtttac

SEQ ID NO: 552846 - DNA, 33 bp, Homo sapien
cagaacaaagagcaacgcatttccactgtttac

SEQ ID NO: 552847 - DNA, 33 bp, Homo sapien
caccagatatcatgagacccctggcagaaatgc

SEQ ID NO: 552848 - DNA, 33 bp, Homo sapien
caccagatatcatgagccccctggcagaaatgc

SEQ ID NO: 552849 - DNA, 33 bp, Homo sapien
tcaaggtggagctgaacgtaaacggcttttctc

SEQ ID NO: 552850 - DNA, 33 bp, Homo sapien
tcaaggtggagctgaatgtaaacggcttttctc

SEQ ID NO: 552851 - DNA, 33 bp, Homo sapien
cccttctggtaatggaccttcctaggcagggac

SEQ ID NO: 552852 - DNA, 33 bp, Homo sapien
cccttctggtaatggatcttcctaggcagggac

SEQ ID NO: 552853 - DNA, 33 bp, Homo sapien
gaatcttcctcaagcacaatgagagtaagacct

SEQ ID NO: 552854 - DNA, 33 bp, Homo sapien
gaatcttcctcaagcagaatgagagtaagacct

SEQ ID NO: 552855 - DNA, 33 bp, Homo sapien
ctccttgttgctgacccacagcaaagcttgtct

SEQ ID NO: 552856 - DNA, 33 bp, Homo sapien
ctccttgttgctgaccgacagcaaagcttgtct

SEQ ID NO: 552857 - DNA, 33 bp, Homo sapien
ctgcacacgttctatcacacaagcttgctagat

SEQ ID NO: 552858 - DNA, 33 bp, Homo sapien
ctgcacacgttctatcccacaagcttgctagat

SEQ ID NO: 552859 - DNA, 33 bp, Homo sapien
tttacagcactctgtgcatttgcatgtaccact

SEQ ID NO: 552860 - DNA, 33 bp, Homo sapien
tttacagcactctgtgtatttgcatgtaccact

SEQ ID NO: 552861 - DNA, 33 bp, Homo sapien
caagccattgctctgaagatgagtgtgtttctt

SEQ ID NO: 552862 - DNA, 33 bp, Homo sapien
caagccattgctctgacgatgagtgtgtttctt

SEQ ID NO: 552863 - DNA, 33 bp, Homo sapien
atgttctcatggtctacctttctccatcctttt

SEQ ID NO: 552864 - DNA, 33 bp, Homo sapien
atgttctcatggtctatctttctccatcctttt

SEQ ID NO: 552865 - DNA, 33 bp, Homo sapien
ctggaacaggctctagcatagcatcgtgtgaca

SEQ ID NO: 552866 - DNA, 33 bp, Homo sapien
ctggaacaggctctagtatagcatcgtgtgaca

SEQ ID NO: 552867 - DNA, 33 bp, Homo sapien
atctttgttccagggcccagactgaccactctg

SEQ ID NO: 552868 - DNA, 33 bp, Homo sapien
atctttgttccagggcgcagactgaccactctg

SEQ ID NO: 552869 - DNA, 33 bp, Homo sapien
gtttggtgcaccgataggaccagtcttgtgaat

SEQ ID NO: 552870 - DNA, 33 bp, Homo sapien
gtttggtgcaccgatatgaccagtcttgtgaat

SEQ ID NO: 552871 - DNA, 33 bp, Homo sapien
agtgttttctttcacccatcaaagctttgagct

SEQ ID NO: 552872 - DNA, 33 bp, Homo sapien
agtgttttctttcaccgatcaaagctttgagct

SEQ ID NO: 552873 - DNA, 33 bp, Homo sapien
gccaccctccattgccaaccgaccaggataccc

SEQ ID NO: 552874 - DNA, 33 bp, Homo sapien
gccaccctccattgccgaccgaccaggataccc

SEQ ID NO: 552875 - DNA, 33 bp, Homo sapien
ctcacttttctcttccacccttgcttggtctgt

SEQ ID NO: 552876 - DNA, 33 bp, Homo sapien
ctcacttttctcttccgcccttgcttggtctgt

SEQ ID NO: 552877 - DNA, 33 bp, Homo sapien
caggcagggtgtaggaacgatttctgggcagtg

SEQ ID NO: 552878 - DNA, 33 bp, Homo sapien
caggcagggtgtaggagcgatttctgggcagtg

SEQ ID NO: 552879 - DNA, 33 bp, Homo sapien
tcataatgggatgatcggagcctggggttgcga

SEQ ID NO: 552880 - DNA, 33 bp, Homo sapien
tcataatgggatgatctgagcctggggttgcga

SEQ ID NO: 552881 - DNA, 33 bp, Homo sapien
tcatcgcacagaggacaaccctgaggcaaagag

SEQ ID NO: 552882 - DNA, 33 bp, Homo sapien
tcatcgcacagaggacgaccctgaggcaaagag

SEQ ID NO: 552883 - DNA, 33 bp, Homo sapien
aaagtgctggaagctacgtcagaaatctgagtg

SEQ ID NO: 552884 - DNA, 33 bp, Homo sapien
aaagtgctggaagctatgtcagaaatctgagtg

SEQ ID NO: 552885 - DNA, 33 bp, Homo sapien
catccttttgttttcaacctctctgtgtctttg

SEQ ID NO: 552886 - DNA, 33 bp, Homo sapien
catccttttgttttcagcctctctgtgtctttg

SEQ ID NO: 552887 - DNA, 33 bp, Homo sapien
ttactaaaaacattgcagaaaatctaaataaat

SEQ ID NO: 552888 - DNA, 33 bp, Homo sapien
ttactaaaaacattgcggaaaatctaaataaat

SEQ ID NO: 552889 - DNA, 33 bp, Homo sapien
aatgtatatggtagagaaagatgttaagaacat

SEQ ID NO: 552890 - DNA, 33 bp, Homo sapien
aatgtatatggtagagtaagatgttaagaacat

SEQ ID NO: 552891 - DNA, 33 bp, Homo sapien
caggtctgaggcctgcaaaagagacagggaagg

SEQ ID NO: 552892 - DNA, 33 bp, Homo sapien
caggtctgaggcctgcgaaagagacagggaagg

SEQ ID NO: 552893 - DNA, 33 bp, Homo sapien
agttaaaggtgctaaaaatacaaacctcttcct

SEQ ID NO: 552894 - DNA, 33 bp, Homo sapien
agttaaaggtgctaaatatacaaacctcttcct

SEQ ID NO: 552895 - DNA, 33 bp, Homo sapien
tgctgtatgaggttggcacagcttttattccag

SEQ ID NO: 552896 - DNA, 33 bp, Homo sapien
tgctgtatgaggttggtacagcttttattccag

SEQ ID NO: 552897 - DNA, 33 bp, Homo sapien
ggtgcacagagcaaaacaggcgtggatgaaaca

SEQ ID NO: 552898 - DNA, 33 bp, Homo sapien
ggtgcacagagcaaaataggcgtggatgaaaca

SEQ ID NO: 552899 - DNA, 33 bp, Homo sapien
cccttatcttaacccaagcctttctttctactg

SEQ ID NO: 552900 - DNA, 33 bp, Homo sapien
cccttatcttaacccaggcctttctttctactg

SEQ ID NO: 552901 - DNA, 33 bp, Homo sapien
ccccagtggaaggtaaaagaaaggacagactgg

SEQ ID NO: 552902 - DNA, 33 bp, Homo sapien
ccccagtggaaggtaacagaaaggacagactgg

SEQ ID NO: 552903 - DNA, 33 bp, Homo sapien
aaaaacgtggcaaaataaacatgagaaagtgac

SEQ ID NO: 552904 - DNA, 33 bp, Homo sapien
aaaaacgtggcaaaatgaacatgagaaagtgac

SEQ ID NO: 552905 - DNA, 33 bp, Homo sapien
caggtggttagcttgacggagattttagaggat

SEQ ID NO: 552906 - DNA, 33 bp, Homo sapien
caggtggttagcttgatggagattttagaggat

SEQ ID NO: 552907 - DNA, 33 bp, Homo sapien
atggcttagcagccccactaaaaactatttaaa

SEQ ID NO: 552908 - DNA, 33 bp, Homo sapien
atggcttagcagccccgctaaaaactatttaaa

SEQ ID NO: 552909 - DNA, 33 bp, Homo sapien
aggcggtggatgggcaacttcccactgggagat

SEQ ID NO: 552910 - DNA, 33 bp, Homo sapien
aggcggtggatgggcaccttcccactgggagat

SEQ ID NO: 552911 - DNA, 33 bp, Homo sapien
caatgtcgaagtggtccatgacgtagctgacga

SEQ ID NO: 552912 - DNA, 33 bp, Homo sapien
caatgtcgaagtggtctatgacgtagctgacga

SEQ ID NO: 552913 - DNA, 33 bp, Homo sapien
aaatatatggccacacaaaggcttgagtaagaa

SEQ ID NO: 552914 - DNA, 33 bp, Homo sapien
aaatatatggccacacgaaggcttgagtaagaa

SEQ ID NO: 552915 - DNA, 33 bp, Homo sapien
ttgagcaacttctcataagctatcggccgtttg

SEQ ID NO: 552916 - DNA, 33 bp, Homo sapien
ttgagcaacttctcatgagctatcggccgtttg

SEQ ID NO: 552917 - DNA, 33 bp, Homo sapien
aggcgagaaggtgcacactcatcactgagattc

SEQ ID NO: 552918 - DNA, 33 bp, Homo sapien
aggcgagaaggtgcacgctcatcactgagattc

SEQ ID NO: 552919 - DNA, 33 bp, Homo sapien
gagatgcagtgaagaaagcgctcagagggaaat

SEQ ID NO: 552920 - DNA, 33 bp, Homo sapien
gagatgcagtgaagaaggcgctcagagggaaat

SEQ ID NO: 552921 - DNA, 33 bp, Homo sapien
caaaaacaccattgatcaaaatttgggagatgc

SEQ ID NO: 552922 - DNA, 33 bp, Homo sapien
caaaaacaccattgattaaaatttgggagatgc

SEQ ID NO: 552923 - DNA, 33 bp, Homo sapien
gggctttgtaacatcaaatgctgagaagaacaa

SEQ ID NO: 552924 - DNA, 33 bp, Homo sapien
gggctttgtaacatcagatgctgagaagaacaa

SEQ ID NO: 552925 - DNA, 33 bp, Homo sapien
aggacactggggagaccatttagggccaccagg

SEQ ID NO: 552926 - DNA, 33 bp, Homo sapien
aggacactggggagactatttagggccaccagg

SEQ ID NO: 552927 - DNA, 33 bp, Homo sapien
actttccacttgctcacgtgtttgccttgagcg

SEQ ID NO: 552928 - DNA, 33 bp, Homo sapien
actttccacttgctcatgtgtttgccttgagcg

SEQ ID NO: 552929 - DNA, 33 bp, Homo sapien
ggagcgcgttcacctgacagaggccggtgctcc

SEQ ID NO: 552930 - DNA, 33 bp, Homo sapien
ggagcgcgttcacctggcagaggccggtgctcc

SEQ ID NO: 552931 - DNA, 33 bp, Homo sapien
tttgttctcacacagcagaatcggctcccggga

SEQ ID NO: 552932 - DNA, 33 bp, Homo sapien
tttgttctcacacagcggaatcggctcccggga

SEQ ID NO: 552933 - DNA, 33 bp, Homo sapien
ttttatagggaacaaccaagcagctttccgaaa

SEQ ID NO: 552934 - DNA, 33 bp, Homo sapien
ttttatagggaacaacgaagcagctttccgaaa

SEQ ID NO: 552935 - DNA, 33 bp, Homo sapien
gacaataccaaatgtcaagaaggcagaggagca

SEQ ID NO: 552936 - DNA, 33 bp, Homo sapien
gacaataccaaatgtcgagaaggcagaggagca

SEQ ID NO: 552937 - DNA, 33 bp, Homo sapien
ctggacactggaggacaaacaaatggtaccatt

SEQ ID NO: 552938 - DNA, 33 bp, Homo sapien
ctggacactggaggaccaacaaatggtaccatt

SEQ ID NO: 552939 - DNA, 33 bp, Homo sapien
tgcagagagtttgacaataaatcttggctattt

SEQ ID NO: 552940 - DNA, 33 bp, Homo sapien
tgcagagagtttgacagtaaatcttggctattt

SEQ ID NO: 552941 - DNA, 33 bp, Homo sapien
ctcaacacaaacagcccctcctcaggccgcctg

SEQ ID NO: 552942 - DNA, 33 bp, Homo sapien
ctcaacacaaacagcctctcctcaggccgcctg

SEQ ID NO: 552943 - DNA, 33 bp, Homo sapien
tccagagggcccattcacaagggaacaaaaggt

SEQ ID NO: 552944 - DNA, 33 bp, Homo sapien
tccagagggcccattcgcaagggaacaaaaggt

SEQ ID NO: 552945 - DNA, 33 bp, Homo sapien
gggaatcagggagaacacttttctatttgtctt

SEQ ID NO: 552946 - DNA, 33 bp, Homo sapien
gggaatcagggagaacgcttttctatttgtctt

SEQ ID NO: 552947 - DNA, 33 bp, Homo sapien
ttagcccttaggtcaccgtcccagctttcagag

SEQ ID NO: 552948 - DNA, 33 bp, Homo sapien
ttagcccttaggtcacggtcccagctttcagag

SEQ ID NO: 552949 - DNA, 33 bp, Homo sapien
ctcttctgagctcatgaaacaccccagcaaatg

SEQ ID NO: 552950 - DNA, 33 bp, Homo sapien
ctcttctgagctcatggaacaccccagcaaatg

SEQ ID NO: 552951 - DNA, 33 bp, Homo sapien
ggtcataggtgctgcaaatatcttttctcattc

SEQ ID NO: 552952 - DNA, 33 bp, Homo sapien
ggtcataggtgctgcagatatcttttctcattc

SEQ ID NO: 552953 - DNA, 33 bp, Homo sapien
ggctgaagagagagaacgccagtcccggctcct

SEQ ID NO: 552954 - DNA, 33 bp, Homo sapien
ggctgaagagagagaatgccagtcccggctcct

SEQ ID NO: 552955 - DNA, 33 bp, Homo sapien
ggtgatggatatacaacgctgtaaatatatgaa

SEQ ID NO: 552956 - DNA, 33 bp, Homo sapien
ggtgatggatatacaatgctgtaaatatatgaa

SEQ ID NO: 552957 - DNA, 33 bp, Homo sapien
agtgccaggtggagaacggctctgcggtgtgtg

SEQ ID NO: 552958 - DNA, 33 bp, Homo sapien
agtgccaggtggagaatggctctgcggtgtgtg

SEQ ID NO: 552959 - DNA, 33 bp, Homo sapien
gctcctaccgccgcacagactttgtggacagga

SEQ ID NO: 552960 - DNA, 33 bp, Homo sapien
gctcctaccgccgcacggactttgtggacagga

SEQ ID NO: 552961 - DNA, 33 bp, Homo sapien
ttggtcgccaaccaaaaagaaagcttccgaatc

SEQ ID NO: 552962 - DNA, 33 bp, Homo sapien
ttggtcgccaaccaaagagaaagcttccgaatc

SEQ ID NO: 552963 - DNA, 33 bp, Homo sapien
ctgcccatggtttactaaaacaaagctcagagc

SEQ ID NO: 552964 - DNA, 33 bp, Homo sapien
ctgcccatggtttactgaaacaaagctcagagc

SEQ ID NO: 552965 - DNA, 33 bp, Homo sapien
tagagaagtttttggacggcatcacagagaaag

SEQ ID NO: 552966 - DNA, 33 bp, Homo sapien
tagagaagtttttggatggcatcacagagaaag

SEQ ID NO: 552967 - DNA, 33 bp, Homo sapien
tgaggcacccttgggtaacaagccacttcaaaa

SEQ ID NO: 552968 - DNA, 33 bp, Homo sapien
tgaggcacccttgggtgacaagccacttcaaaa

SEQ ID NO: 552969 - DNA, 33 bp, Homo sapien
actccaccaacctcacaagtttctaacacccag

SEQ ID NO: 552970 - DNA, 33 bp, Homo sapien
actccaccaacctcacgagtttctaacacccag

SEQ ID NO: 552971 - DNA, 33 bp, Homo sapien
gctgcttaaacgcatcacaggactcacaggtgg

SEQ ID NO: 552972 - DNA, 33 bp, Homo sapien
gctgcttaaacgcatcgcaggactcacaggtgg

SEQ ID NO: 552973 - DNA, 33 bp, Homo sapien
tatgttgagctattcaaatcaaggggactcaat

SEQ ID NO: 552974 - DNA, 33 bp, Homo sapien
tatgttgagctattcacatcaaggggactcaat

SEQ ID NO: 552975 - DNA, 33 bp, Homo sapien
tggcttggagaagatacatggtgaccctggtaa

SEQ ID NO: 552976 - DNA, 33 bp, Homo sapien
tggcttggagaagatatatggtgaccctggtaa

SEQ ID NO: 552977 - DNA, 33 bp, Homo sapien
ataatgcaaagaaataatagtggaactcctctg

SEQ ID NO: 552978 - DNA, 33 bp, Homo sapien
ataatgcaaagaaatagtagtggaactcctctg

SEQ ID NO: 552979 - DNA, 33 bp, Homo sapien
tgtcagtcttgctaaactctgattaatctcaga

SEQ ID NO: 552980 - DNA, 33 bp, Homo sapien
tgtcagtcttgctaaagtctgattaatctcaga

SEQ ID NO: 552981 - DNA, 33 bp, Homo sapien
ggtcgcccaacacaacacctgctgctacgtggg

SEQ ID NO: 552982 - DNA, 33 bp, Homo sapien
ggtcgcccaacacaacgcctgctgctacgtggg

SEQ ID NO: 552983 - DNA, 33 bp, Homo sapien
gttcaggtgtcaggaaaagatgctgagtgagat

SEQ ID NO: 552984 - DNA, 33 bp, Homo sapien
gttcaggtgtcaggaagagatgctgagtgagat

SEQ ID NO: 552985 - DNA, 33 bp, Homo sapien
ggactgctgtggacaaagaaaaaaacaaggagg

SEQ ID NO: 552986 - DNA, 33 bp, Homo sapien
ggactgctgtggacaaggaaaaaaacaaggagg

SEQ ID NO: 552987 - DNA, 33 bp, Homo sapien
aaacatgatttctgctaacactattccagggtg

SEQ ID NO: 552988 - DNA, 33 bp, Homo sapien
aaacatgatttctgctgacactattccagggtg

SEQ ID NO: 552989 - DNA, 33 bp, Homo sapien
tctctgaaatctacctaaacattctggaactct

SEQ ID NO: 552990 - DNA, 33 bp, Homo sapien
tctctgaaatctacctcaacattctggaactct

SEQ ID NO: 552991 - DNA, 33 bp, Homo sapien
cgtggtaggggatgaaagtatgtctcttggtta

SEQ ID NO: 552992 - DNA, 33 bp, Homo sapien
cgtggtaggggatgaatgtatgtctcttggtta

SEQ ID NO: 552993 - DNA, 33 bp, Homo sapien
gcccacaatttaggtacgtctctggtagaagga

SEQ ID NO: 552994 - DNA, 33 bp, Homo sapien
gcccacaatttaggtatgtctctggtagaagga

SEQ ID NO: 552995 - DNA, 33 bp, Homo sapien
ctgggtcagaacccgcaatgggagaatggtcca

SEQ ID NO: 552996 - DNA, 33 bp, Homo sapien
ctgggtcagaacccgcgatgggagaatggtcca

SEQ ID NO: 552997 - DNA, 33 bp, Homo sapien
ttcataatcagctaataatctcgaagaaaaaac

SEQ ID NO: 552998 - DNA, 33 bp, Homo sapien
ttcataatcagctaatcatctcgaagaaaaaac

SEQ ID NO: 552999 - DNA, 33 bp, Homo sapien
cacaaaataaccagataaggtgcatgctaacca

SEQ ID NO: 553000 - DNA, 33 bp, Homo sapien
cacaaaataaccagatgaggtgcatgctaacca

SEQ ID NO: 553001 - DNA, 33 bp, Homo sapien
tttgatgaagaccataaattcacagacccagtt

SEQ ID NO: 553002 - DNA, 33 bp, Homo sapien
tttgatgaagaccatagattcacagacccagtt

SEQ ID NO: 553003 - DNA, 33 bp, Homo sapien
caacaggcaacacagacagtgattcttgagaga

SEQ ID NO: 553004 - DNA, 33 bp, Homo sapien
caacaggcaacacagatagtgattcttgagaga

SEQ ID NO: 553005 - DNA, 33 bp, Homo sapien
ttgcagctgcattctacgagtcttcaccaacct

SEQ ID NO: 553006 - DNA, 33 bp, Homo sapien
ttgcagctgcattctatgagtcttcaccaacct

SEQ ID NO: 553007 - DNA, 33 bp, Homo sapien
tgagaactggtttgtagaaagtgcagcccaccc

SEQ ID NO: 553008 - DNA, 33 bp, Homo sapien
tgagaactggtttgtataaagtgcagcccaccc

SEQ ID NO: 553009 - DNA, 33 bp, Homo sapien
tgagcaccatagcaggaatctcagagggccata

SEQ ID NO: 553010 - DNA, 33 bp, Homo sapien
tgagcaccatagcagggatctcagagggccata

SEQ ID NO: 553011 - DNA, 33 bp, Homo sapien
ggggttccctaagtgccaaagtcccggccccac

SEQ ID NO: 553012 - DNA, 33 bp, Homo sapien
ggggttccctaagtgctaaagtcccggccccac

SEQ ID NO: 553013 - DNA, 33 bp, Homo sapien
atgtacacctggtgaccgatcaaaggtgaggcg

SEQ ID NO: 553014 - DNA, 33 bp, Homo sapien
atgtacacctggtgactgatcaaaggtgaggcg

SEQ ID NO: 553015 - DNA, 33 bp, Homo sapien
tgtagacgggtgaggaatagaagttgacgaact

SEQ ID NO: 553016 - DNA, 33 bp, Homo sapien
tgtagacgggtgaggagtagaagttgacgaact

SEQ ID NO: 553017 - DNA, 33 bp, Homo sapien
gctcctgtactgaaaacgctcagggctacgcgg

SEQ ID NO: 553018 - DNA, 33 bp, Homo sapien
gctcctgtactgaaaatgctcagggctacgcgg

SEQ ID NO: 553019 - DNA, 33 bp, Homo sapien
catttctgggccaccacgaatagcagttgggag

SEQ ID NO: 553020 - DNA, 33 bp, Homo sapien
catttctgggccaccaggaatagcagttgggag

SEQ ID NO: 553021 - DNA, 33 bp, Homo sapien
cgtgtaagtagactgaagtcatccgtagaagca

SEQ ID NO: 553022 - DNA, 33 bp, Homo sapien
cgtgtaagtagactgatgtcatccgtagaagca

SEQ ID NO: 553023 - DNA, 33 bp, Homo sapien
atcctcgcctgcgttccatttcacccaccgtga

SEQ ID NO: 553024 - DNA, 33 bp, Homo sapien
atcctcgcctgcgttctatttcacccaccgtga

SEQ ID NO: 553025 - DNA, 33 bp, Homo sapien
agatggatgctcggcacggatggagctcgcgca

SEQ ID NO: 553026 - DNA, 33 bp, Homo sapien
agatggatgctcggcatggatggagctcgcgca

SEQ ID NO: 553027 - DNA, 33 bp, Homo sapien
tggagctcgtgaacctcacatggtgtcagtgta

SEQ ID NO: 553028 - DNA, 33 bp, Homo sapien
tggagctcgtgaaccttacatggtgtcagtgta

SEQ ID NO: 553029 - DNA, 33 bp, Homo sapien
agtgtaaaacatagacagagtgcagtatgagtt

SEQ ID NO: 553030 - DNA, 33 bp, Homo sapien
agtgtaaaacatagacggagtgcagtatgagtt

SEQ ID NO: 553031 - DNA, 33 bp, Homo sapien
aactgtatggctatacgcacacactcgcgtgtt

SEQ ID NO: 553032 - DNA, 33 bp, Homo sapien
aactgtatggctatactcacacactcgcgtgtt

SEQ ID NO: 553033 - DNA, 33 bp, Homo sapien
gctgatctggaactcactgaagagtaaaaacat

SEQ ID NO: 553034 - DNA, 33 bp, Homo sapien
gctgatctggaactcattgaagagtaaaaacat

SEQ ID NO: 553035 - DNA, 33 bp, Homo sapien
ctgcatcatctctccaagtactctcttcctatc

SEQ ID NO: 553036 - DNA, 33 bp, Homo sapien
ctgcatcatctctccaggtactctcttcctatc

SEQ ID NO: 553037 - DNA, 33 bp, Homo sapien
cactgcatggacacaaagtggtttcttcagccc

SEQ ID NO: 553038 - DNA, 33 bp, Homo sapien
cactgcatggacacaacgtggtttcttcagccc

SEQ ID NO: 553039 - DNA, 33 bp, Homo sapien
gatacgtgagccgttgcattcttgttggtaaca

SEQ ID NO: 553040 - DNA, 33 bp, Homo sapien
gatacgtgagccgttggattcttgttggtaaca

SEQ ID NO: 553041 - DNA, 33 bp, Homo sapien
ctcccccaaaaggtaactgtgcttgcagaaaag

SEQ ID NO: 553042 - DNA, 33 bp, Homo sapien
ctcccccaaaaggtaattgtgcttgcagaaaag

SEQ ID NO: 553043 - DNA, 33 bp, Homo sapien
caggtctgcataccccccaaaacagtatacact

SEQ ID NO: 553044 - DNA, 33 bp, Homo sapien
caggtctgcataccccgcaaaacagtatacact

SEQ ID NO: 553045 - DNA, 33 bp, Homo sapien
atccacattccttcagacgtttaatttcaccat

SEQ ID NO: 553046 - DNA, 33 bp, Homo sapien
atccacattccttcagccgtttaatttcaccat

SEQ ID NO: 553047 - DNA, 33 bp, Homo sapien
ctgggtgcaaattggaccaaaaatgtagtcaaa

SEQ ID NO: 553048 - DNA, 33 bp, Homo sapien
ctgggtgcaaattggatcaaaaatgtagtcaaa

SEQ ID NO: 553049 - DNA, 33 bp, Homo sapien
ttatgaagtatattaactaaacaaatgcagatc

SEQ ID NO: 553050 - DNA, 33 bp, Homo sapien
ttatgaagtatattaagtaaacaaatgcagatc

SEQ ID NO: 553051 - DNA, 33 bp, Homo sapien
gcggcaaatatgtagcaactttcagctaatcaa

SEQ ID NO: 553052 - DNA, 33 bp, Homo sapien
gcggcaaatatgtagcgactttcagctaatcaa

SEQ ID NO: 553053 - DNA, 33 bp, Homo sapien
ttgtcttttgctgttaccatctttacagtacat

SEQ ID NO: 553054 - DNA, 33 bp, Homo sapien
ttgtcttttgctgttatcatctttacagtacat

SEQ ID NO: 553055 - DNA, 33 bp, Homo sapien
cttccttacgtgaggccgatatgactgaaaaat

SEQ ID NO: 553056 - DNA, 33 bp, Homo sapien
cttccttacgtgaggctgatatgactgaaaaat

SEQ ID NO: 553057 - DNA, 33 bp, Homo sapien
ctctggagattcatgactactttctatacctaa

SEQ ID NO: 553058 - DNA, 33 bp, Homo sapien
ctctggagattcatgattactttctatacctaa

SEQ ID NO: 553059 - DNA, 33 bp, Homo sapien
ctagaagaccaatcaacgccatctctcaaggtt

SEQ ID NO: 553060 - DNA, 33 bp, Homo sapien
ctagaagaccaatcaatgccatctctcaaggtt

SEQ ID NO: 553061 - DNA, 33 bp, Homo sapien
agatcactgtatgcaaattaagttattcagaga

SEQ ID NO: 553062 - DNA, 33 bp, Homo sapien
agatcactgtatgcaagttaagttattcagaga

SEQ ID NO: 553063 - DNA, 33 bp, Homo sapien
tttctttgtaactttaagctatagaaaccattt

SEQ ID NO: 553064 - DNA, 33 bp, Homo sapien
tttctttgtaactttaggctatagaaaccattt

SEQ ID NO: 553065 - DNA, 33 bp, Homo sapien
aactgaggctgtcataactctgtggatgatgga

SEQ ID NO: 553066 - DNA, 33 bp, Homo sapien
aactgaggctgtcatacctctgtggatgatgga

SEQ ID NO: 553067 - DNA, 33 bp, Homo sapien
gcatttcagggcaccaccaaaatcaacactttc

SEQ ID NO: 553068 - DNA, 33 bp, Homo sapien
gcatttcagggcaccatcaaaatcaacactttc

SEQ ID NO: 553069 - DNA, 33 bp, Homo sapien
tcccgtgatagcgcgcaaggagtgacgcttagt

SEQ ID NO: 553070 - DNA, 33 bp, Homo sapien
tcccgtgatagcgcgcgaggagtgacgcttagt

SEQ ID NO: 553071 - DNA, 33 bp, Homo sapien
ctcatggttccacacaaaaggacacggctgagc

SEQ ID NO: 553072 - DNA, 33 bp, Homo sapien
ctcatggttccacacacaaggacacggctgagc

SEQ ID NO: 553073 - DNA, 33 bp, Homo sapien
ctttcacttggaatgacgtaaaagctatgcctc

SEQ ID NO: 553074 - DNA, 33 bp, Homo sapien
ctttcacttggaatgatgtaaaagctatgcctc

SEQ ID NO: 553075 - DNA, 33 bp, Homo sapien
tgctccacagcctctacgtttttgttctaatac

SEQ ID NO: 553076 - DNA, 33 bp, Homo sapien
tgctccacagcctctatgtttttgttctaatac

SEQ ID NO: 553077 - DNA, 33 bp, Homo sapien
cagattttgtgtaagagccactcatgacatcct

SEQ ID NO: 553078 - DNA, 33 bp, Homo sapien
cagattttgtgtaagatccactcatgacatcct

SEQ ID NO: 553079 - DNA, 33 bp, Homo sapien
gaagcaatgagtgggaaacatcttcctgccaca

SEQ ID NO: 553080 - DNA, 33 bp, Homo sapien
gaagcaatgagtgggagacatcttcctgccaca

SEQ ID NO: 553081 - DNA, 33 bp, Homo sapien
acaaggagatattttacgtgatgagaattcgga

SEQ ID NO: 553082 - DNA, 33 bp, Homo sapien
acaaggagatattttatgtgatgagaattcgga

SEQ ID NO: 553083 - DNA, 33 bp, Homo sapien
aagaaacagtgaactaaagagattgtcattagg

SEQ ID NO: 553084 - DNA, 33 bp, Homo sapien
aagaaacagtgaactagagagattgtcattagg

SEQ ID NO: 553085 - DNA, 33 bp, Homo sapien
tcccttggcttaggccaaaaactgcggcagtca

SEQ ID NO: 553086 - DNA, 33 bp, Homo sapien
tcccttggcttaggccgaaaactgcggcagtca

SEQ ID NO: 553087 - DNA, 33 bp, Homo sapien
cagagggctgtacaagacataacgcagagcaga

SEQ ID NO: 553088 - DNA, 33 bp, Homo sapien
cagagggctgtacaaggcataacgcagagcaga

SEQ ID NO: 553089 - DNA, 33 bp, Homo sapien
ggcctgttttccttgacggcaggtgccggctgg

SEQ ID NO: 553090 - DNA, 33 bp, Homo sapien
ggcctgttttccttgatggcaggtgccggctgg

SEQ ID NO: 553091 - DNA, 33 bp, Homo sapien
tccagttctgttaggacctcgtcatgtctttgg

SEQ ID NO: 553092 - DNA, 33 bp, Homo sapien
tccagttctgttaggatctcgtcatgtctttgg

SEQ ID NO: 553093 - DNA, 33 bp, Homo sapien
gagaaaaagggaaatcaattctctacatgctga

SEQ ID NO: 553094 - DNA, 33 bp, Homo sapien
gagaaaaagggaaatccattctctacatgctga

SEQ ID NO: 553095 - DNA, 33 bp, Homo sapien
acaaggaattgtcccacgatcaagtaaggttgt

SEQ ID NO: 553096 - DNA, 33 bp, Homo sapien
acaaggaattgtcccatgatcaagtaaggttgt

SEQ ID NO: 553097 - DNA, 33 bp, Homo sapien
atgacgtgagaagaaacagaaacacagagaaat

SEQ ID NO: 553098 - DNA, 33 bp, Homo sapien
atgacgtgagaagaaatagaaacacagagaaat

SEQ ID NO: 553099 - DNA, 33 bp, Homo sapien
gtcctgcttcagatacaagaaagttgaactcat

SEQ ID NO: 553100 - DNA, 33 bp, Homo sapien
gtcctgcttcagatacgagaaagttgaactcat

SEQ ID NO: 553101 - DNA, 33 bp, Homo sapien
gtggacagcgggcaccaagtaggggagacaagc

SEQ ID NO: 553102 - DNA, 33 bp, Homo sapien
gtggacagcgggcaccgagtaggggagacaagc

SEQ ID NO: 553103 - DNA, 33 bp, Homo sapien
gtgagcccgtatcaataaacttggcctgatcta

SEQ ID NO: 553104 - DNA, 33 bp, Homo sapien
gtgagcccgtatcaatcaacttggcctgatcta

SEQ ID NO: 553105 - DNA, 33 bp, Homo sapien
agtgtgagatgtttctaaaatctctacatgggc

SEQ ID NO: 553106 - DNA, 33 bp, Homo sapien
agtgtgagatgtttctgaaatctctacatgggc

SEQ ID NO: 553107 - DNA, 33 bp, Homo sapien
gctttccaagaacacactggacatcagttctag

SEQ ID NO: 553108 - DNA, 33 bp, Homo sapien
gctttccaagaacacattggacatcagttctag

SEQ ID NO: 553109 - DNA, 33 bp, Homo sapien
cctgcttttagggagacagcagtgtaggcctct

SEQ ID NO: 553110 - DNA, 33 bp, Homo sapien
cctgcttttagggagatagcagtgtaggcctct

SEQ ID NO: 553111 - DNA, 33 bp, Homo sapien
gatttcctcgttaatccgagtctcaattgaaga

SEQ ID NO: 553112 - DNA, 33 bp, Homo sapien
gatttcctcgttaatctgagtctcaattgaaga

SEQ ID NO: 553113 - DNA, 33 bp, Homo sapien
gacgcagtaaaatgcacagcaggtgtatttctt

SEQ ID NO: 553114 - DNA, 33 bp, Homo sapien
gacgcagtaaaatgcatagcaggtgtatttctt

SEQ ID NO: 553115 - DNA, 33 bp, Homo sapien
ctctttagagcagaccacaggtaaaacagtaag

SEQ ID NO: 553116 - DNA, 33 bp, Homo sapien
ctctttagagcagaccgcaggtaaaacagtaag

SEQ ID NO: 553117 - DNA, 33 bp, Homo sapien
cccccgtgctgctttcccgtctgctttgttacc

SEQ ID NO: 553118 - DNA, 33 bp, Homo sapien
cccccgtgctgctttcgcgtctgctttgttacc

SEQ ID NO: 553119 - DNA, 33 bp, Homo sapien
acaccaaaacacattaccatgaaatttaaaact

SEQ ID NO: 553120 - DNA, 33 bp, Homo sapien
acaccaaaacacattatcatgaaatttaaaact

SEQ ID NO: 553121 - DNA, 33 bp, Homo sapien
actcaattggacactgaaaagtaaagggagaaa

SEQ ID NO: 553122 - DNA, 33 bp, Homo sapien
actcaattggacactgcaaagtaaagggagaaa

SEQ ID NO: 553123 - DNA, 33 bp, Homo sapien
atcatgctttaacgtgcaagctattaattcata

SEQ ID NO: 553124 - DNA, 33 bp, Homo sapien
atcatgctttaacgtgtaagctattaattcata

SEQ ID NO: 553125 - DNA, 33 bp, Homo sapien
agcccccagatcactacaagctaaagggaggag

SEQ ID NO: 553126 - DNA, 33 bp, Homo sapien
agcccccagatcactataagctaaagggaggag

SEQ ID NO: 553127 - DNA, 33 bp, Homo sapien
cagttcagtaaaacaaacaatcacacaactata

SEQ ID NO: 553128 - DNA, 33 bp, Homo sapien
cagttcagtaaaacaagcaatcacacaactata

SEQ ID NO: 553129 - DNA, 33 bp, Homo sapien
tgtctctcctttgccacgaccctggcagtgtgg

SEQ ID NO: 553130 - DNA, 33 bp, Homo sapien
tgtctctcctttgccatgaccctggcagtgtgg

SEQ ID NO: 553131 - DNA, 33 bp, Homo sapien
aagaggaagtttagaccgaaccctgtggtacta

SEQ ID NO: 553132 - DNA, 33 bp, Homo sapien
aagaggaagtttagactgaaccctgtggtacta

SEQ ID NO: 553133 - DNA, 33 bp, Homo sapien
catggtgttttgttccaaactgcccaatacaat

SEQ ID NO: 553134 - DNA, 33 bp, Homo sapien
catggtgttttgttcccaactgcccaatacaat

SEQ ID NO: 553135 - DNA, 33 bp, Homo sapien
cagccttagtttccatcagaagtctacacgtgt

SEQ ID NO: 553136 - DNA, 33 bp, Homo sapien
cagccttagtttccattagaagtctacacgtgt

SEQ ID NO: 553137 - DNA, 33 bp, Homo sapien
tcaccacgccgagatcaccagcctgcccagaaa

SEQ ID NO: 553138 - DNA, 33 bp, Homo sapien
tcaccacgccgagatcgccagcctgcccagaaa

SEQ ID NO: 553139 - DNA, 33 bp, Homo sapien
tcctaaacacgcgagaactatactgtttttaca

SEQ ID NO: 553140 - DNA, 33 bp, Homo sapien
tcctaaacacgcgagagctatactgtttttaca

SEQ ID NO: 553141 - DNA, 33 bp, Homo sapien
atttctccagatagccagcagagtaaattaaag

SEQ ID NO: 553142 - DNA, 33 bp, Homo sapien
atttctccagatagccggcagagtaaattaaag

SEQ ID NO: 553143 - DNA, 33 bp, Homo sapien
acaatgcacatcttgacggaaactcacgatcac

SEQ ID NO: 553144 - DNA, 33 bp, Homo sapien
acaatgcacatcttgatggaaactcacgatcac

SEQ ID NO: 553145 - DNA, 33 bp, Homo sapien; identical to SEQ ID NO: 553143

SEQ ID NO: 553146 - DNA, 33 bp, Homo sapien; identical to SEQ ID NO: 553144

SEQ ID NO: 553147 - DNA, 33 bp, Homo sapien
gtttgcaattgtccacggaattcctgcagcccc

SEQ ID NO: 553148 - DNA, 33 bp, Homo sapien
gtttgcaattgtccactgaattcctgcagcccc

SEQ ID NO: 553149 - DNA, 33 bp, Homo sapien
acaacatttcaaacccaacactcagtgaaacca

SEQ ID NO: 553150 - DNA, 33 bp, Homo sapien
acaacatttcaaacccgacactcagtgaaacca

SEQ ID NO: 553151 - DNA, 33 bp, Homo sapien
ttcctgatcccaaagccgcaacagtggaacctt

SEQ ID NO: 553152 - DNA, 33 bp, Homo sapien
ttcctgatcccaaagctgcaacagtggaacctt

SEQ ID NO: 553153 - DNA, 33 bp, Homo sapien
acagactcctggtgccaacaataccagtgagga

SEQ ID NO: 553154 - DNA, 33 bp, Homo sapien
acagactcctggtgccgacaataccagtgagga

SEQ ID NO: 553155 - DNA, 33 bp, Homo sapien
tgtttaaacatggcgaacacggataactaaatg

SEQ ID NO: 553156 - DNA, 33 bp, Homo sapien
tgtttaaacatggcgagcacggataactaaatg

SEQ ID NO: 553157 - DNA, 33 bp, Homo sapien
cacaggcagtcaccagaaatgaagccactcagg

SEQ ID NO: 553158 - DNA, 33 bp, Homo sapien
cacaggcagtcaccaggaatgaagccactcagg

SEQ ID NO: 553159 - DNA, 33 bp, Homo sapien
aaaccgagctgccccccaccacctgaggcacat

SEQ ID NO: 553160 - DNA, 33 bp, Homo sapien
aaaccgagctgcccccgaccacctgaggcacat

SEQ ID NO: 553161 - DNA, 33 bp, Homo sapien
aagggcccttatgacaactcaacatattcccag

SEQ ID NO: 553162 - DNA, 33 bp, Homo sapien
aagggcccttatgacagctcaacatattcccag

SEQ ID NO: 553163 - DNA, 33 bp, Homo sapien
atttttcatcagtagcagagtaattaatgtgag

SEQ ID NO: 553164 - DNA, 33 bp, Homo sapien
atttttcatcagtagcggagtaattaatgtgag

SEQ ID NO: 553165 - DNA, 33 bp, Homo sapien
ttgaaaaaagagagaacggcaattaatacatga

SEQ ID NO: 553166 - DNA, 33 bp, Homo sapien
ttgaaaaaagagagaatggcaattaatacatga

SEQ ID NO: 553167 - DNA, 33 bp, Homo sapien
attaaacttctgcaccacaaaactctcaacaga

SEQ ID NO: 553168 - DNA, 33 bp, Homo sapien
attaaacttctgcaccgcaaaactctcaacaga

SEQ ID NO: 553169 - DNA, 33 bp, Homo sapien
aatcactccacaattaacaaagccatcaaaagt

SEQ ID NO: 553170 - DNA, 33 bp, Homo sapien
aatcactccacaattagcaaagccatcaaaagt

SEQ ID NO: 553171 - DNA, 33 bp, Homo sapien
cttgttggagaaatgaccactattattatgata

SEQ ID NO: 553172 - DNA, 33 bp, Homo sapien
cttgttggagaaatgagcactattattatgata

SEQ ID NO: 553173 - DNA, 33 bp, Homo sapien
tatttgtaatagctaacatctgaaaacaatcat

SEQ ID NO: 553174 - DNA, 33 bp, Homo sapien
tatttgtaatagctaatatctgaaaacaatcat

SEQ ID NO: 553175 - DNA, 33 bp, Homo sapien
caacttcaacagttgacagataggacaactaga

SEQ ID NO: 553176 - DNA, 33 bp, Homo sapien
caacttcaacagttgatagataggacaactaga

SEQ ID NO: 553177 - DNA, 33 bp, Homo sapien
tattcataacccctggaaagcactaatttgttc

SEQ ID NO: 553178 - DNA, 33 bp, Homo sapien
tattcataacccctggcaagcactaatttgttc

SEQ ID NO: 553179 - DNA, 33 bp, Homo sapien
cagtctacagcctacacagcggcatttggtgcg

SEQ ID NO: 553180 - DNA, 33 bp, Homo sapien
cagtctacagcctacagagcggcatttggtgcg

SEQ ID NO: 553181 - DNA, 33 bp, Homo sapien
gtctctgaggaaggtagcatagtgtgcagttca

SEQ ID NO: 553182 - DNA, 33 bp, Homo sapien
gtctctgaggaaggtatcatagtgtgcagttca

SEQ ID NO: 553183 - DNA, 33 bp, Homo sapien
gtgcagttcactggaccaaaagctttggctgca

SEQ ID NO: 553184 - DNA, 33 bp, Homo sapien
gtgcagttcactggactaaaagctttggctgca

SEQ ID NO: 553185 - DNA, 33 bp, Homo sapien
taatttcttctgggaaagatgtgttgttataga

SEQ ID NO: 553186 - DNA, 33 bp, Homo sapien
taatttcttctgggaaggatgtgttgttataga

SEQ ID NO: 553187 - DNA, 33 bp, Homo sapien
tctgatagactctgccaagaacataagatctta

SEQ ID NO: 553188 - DNA, 33 bp, Homo sapien
tctgatagactctgccgagaacataagatctta

SEQ ID NO: 553189 - DNA, 33 bp, Homo sapien
gttgctggctttggacgaggtggctttgtaatt

SEQ ID NO: 553190 - DNA, 33 bp, Homo sapien
gttgctggctttggactaggtggctttgtaatt

SEQ ID NO: 553191 - DNA, 33 bp, Homo sapien
aaggatcaagaaaccaaaaggaagaagatgtat

SEQ ID NO: 553192 - DNA, 33 bp, Homo sapien
aaggatcaagaaaccagaaggaagaagatgtat

SEQ ID NO: 553193 - DNA, 33 bp, Homo sapien
cagtgaactgggaagacggagataaataagatt

SEQ ID NO: 553194 - DNA, 33 bp, Homo sapien
cagtgaactgggaagatggagataaataagatt

SEQ ID NO: 553195 - DNA, 33 bp, Homo sapien
gatttgcctgactatagtaaccatttcacaaca

SEQ ID NO: 553196 - DNA, 33 bp, Homo sapien
gatttgcctgactatattaaccatttcacaaca

SEQ ID NO: 553197 - DNA, 33 bp, Homo sapien
atattatttactcttcaaaaaggagatcctgcc

SEQ ID NO: 553198 - DNA, 33 bp, Homo sapien
atattatttactcttcgaaaaggagatcctgcc

SEQ ID NO: 553199 - DNA, 33 bp, Homo sapien
cacccagaagtataaacggtggctcacctcagc

SEQ ID NO: 553200 - DNA, 33 bp, Homo sapien
cacccagaagtataaatggtggctcacctcagc

SEQ ID NO: 553201 - DNA, 33 bp, Homo sapien
aaaaatgcttcaataaagtaacaggctattgca

SEQ ID NO: 553202 - DNA, 33 bp, Homo sapien
aaaaatgcttcaataatgtaacaggctattgca

SEQ ID NO: 553203 - DNA, 33 bp, Homo sapien
ctagatgatgagttcacggatacttttgaaaag

SEQ ID NO: 553204 - DNA, 33 bp, Homo sapien
ctagatgatgagttcatggatacttttgaaaag

SEQ ID NO: 553205 - DNA, 33 bp, Homo sapien
gaagacagtgtggaaactcctaaagacctaaag

SEQ ID NO: 553206 - DNA, 33 bp, Homo sapien
gaagacagtgtggaaattcctaaagacctaaag

SEQ ID NO: 553207 - DNA, 33 bp, Homo sapien
aaagacacacacctgaaaatgttcattgcagta

SEQ ID NO: 553208 - DNA, 33 bp, Homo sapien
aaagacacacacctgagaatgttcattgcagta

SEQ ID NO: 553209 - DNA, 33 bp, Homo sapien
gagagatgattctatacgccaaaatttttgaca

SEQ ID NO: 553210 - DNA, 33 bp, Homo sapien
gagagatgattctatatgccaaaatttttgaca

SEQ ID NO: 553211 - DNA, 33 bp, Homo sapien
taatggcaattctacactaactctttcagaaaa

SEQ ID NO: 553212 - DNA, 33 bp, Homo sapien
taatggcaattctacattaactctttcagaaaa

SEQ ID NO: 553213 - DNA, 33 bp, Homo sapien
gcaagggaaaattcaacgaagtaggacctttgt

SEQ ID NO: 553214 - DNA, 33 bp, Homo sapien
gcaagggaaaattcaatgaagtaggacctttgt

SEQ ID NO: 553215 - DNA, 33 bp, Homo sapien
cacaaactgataggaaactttgcttcaagaggt

SEQ ID NO: 553216 - DNA, 33 bp, Homo sapien
cacaaactgataggaacctttgcttcaagaggt

SEQ ID NO: 553217 - DNA, 33 bp, Homo sapien
ttccagagcctttatcacttctctcagactttg

SEQ ID NO: 553218 - DNA, 33 bp, Homo sapien
ttccagagcctttatcgcttctctcagactttg

SEQ ID NO: 553219 - DNA, 33 bp, Homo sapien
tagtctatccatctcccactagcagttttaaca

SEQ ID NO: 553220 - DNA, 33 bp, Homo sapien
tagtctatccatctcctactagcagttttaaca

SEQ ID NO: 553221 - DNA, 33 bp, Homo sapien
tgcagtatcatttatcatgagaagtgctgggtg

SEQ ID NO: 553222 - DNA, 33 bp, Homo sapien
tgcagtatcatttatcctgagaagtgctgggtg

SEQ ID NO: 553223 - DNA, 33 bp, Homo sapien
ttctccccctttgctaagtaatagaaccctcca

SEQ ID NO: 553224 - DNA, 33 bp, Homo sapien
ttctccccctttgctacgtaatagaaccctcca

SEQ ID NO: 553225 - DNA, 33 bp, Homo sapien
gcaagaaacagtgtcactactggcttccctgct

SEQ ID NO: 553226 - DNA, 33 bp, Homo sapien
gcaagaaacagtgtcattactggcttccctgct

SEQ ID NO: 553227 - DNA, 33 bp, Homo sapien
tcttttcctcttctcgcaaagataccaattatg

SEQ ID NO: 553228 - DNA, 33 bp, Homo sapien
tcttttcctcttctcgtaaagataccaattatg

SEQ ID NO: 553229 - DNA, 33 bp, Homo sapien
ggctgtggtattctgcaatagcagccctagact

SEQ ID NO: 553230 - DNA, 33 bp, Homo sapien
ggctgtggtattctgcgatagcagccctagact

SEQ ID NO: 553231 - DNA, 33 bp, Homo sapien
ggtcaccagtaatatcaagacttctatagcttc

SEQ ID NO: 553232 - DNA, 33 bp, Homo sapien
ggtcaccagtaatatcgagacttctatagcttc

SEQ ID NO: 553233 - DNA, 33 bp, Homo sapien
tgcaaaggtattcccaatgaatttctgacttat

SEQ ID NO: 553234 - DNA, 33 bp, Homo sapien
tgcaaaggtattcccactgaatttctgacttat

SEQ ID NO: 553235 - DNA, 33 bp, Homo sapien
aggatacgggtaattacgaagcaggtaaaaatg

SEQ ID NO: 553236 - DNA, 33 bp, Homo sapien
aggatacgggtaattatgaagcaggtaaaaatg

SEQ ID NO: 553237 - DNA, 33 bp, Homo sapien
agcttatactacccacactttcctgtcattttt

SEQ ID NO: 553238 - DNA, 33 bp, Homo sapien
agcttatactacccacgctttcctgtcattttt

SEQ ID NO: 553239 - DNA, 33 bp, Homo sapien
tgaaacatatcaaacacgtccaaaactgataaa

SEQ ID NO: 553240 - DNA, 33 bp, Homo sapien
tgaaacatatcaaacatgtccaaaactgataaa

SEQ ID NO: 553241 - DNA, 33 bp, Homo sapien
tttttcaaaatataacaggctctggaaactaat

SEQ ID NO: 553242 - DNA, 33 bp, Homo sapien
tttttcaaaatataactggctctggaaactaat

SEQ ID NO: 553243 - DNA, 33 bp, Homo sapien
aaatcatcagaaaactaagaatcaaggatagaa

SEQ ID NO: 553244 - DNA, 33 bp, Homo sapien
aaatcatcagaaaactgagaatcaaggatagaa

SEQ ID NO: 553245 - DNA, 33 bp, Homo sapien
tggctataccactgacaggccgccagtcattaa

SEQ ID NO: 553246 - DNA, 33 bp, Homo sapien
tggctataccactgacgggccgccagtcattaa

SEQ ID NO: 553247 - DNA, 33 bp, Homo sapien
tgcagcaatagaaaagaataatggacatttata

SEQ ID NO: 553248 - DNA, 33 bp, Homo sapien
tgcagcaatagaaaagtataatggacatttata

SEQ ID NO: 553249 - DNA, 33 bp, Homo sapien
ttgccttttccaagaaagtgacataaatggaat

SEQ ID NO: 553250 - DNA, 33 bp, Homo sapien
ttgccttttccaagaatgtgacataaatggaat

SEQ ID NO: 553251 - DNA, 33 bp, Homo sapien
gtctcaaaacgttaaaaactacatgattccatt

SEQ ID NO: 553252 - DNA, 33 bp, Homo sapien
gtctcaaaacgttaaatactacatgattccatt

SEQ ID NO: 553253 - DNA, 33 bp, Homo sapien
tataacaatgtgagaacgacctagtaacagcat

SEQ ID NO: 553254 - DNA, 33 bp, Homo sapien
tataacaatgtgagaatgacctagtaacagcat

SEQ ID NO: 553255 - DNA, 33 bp, Homo sapien
atgcatctcccaactagaattaggatccttaaa

SEQ ID NO: 553256 - DNA, 33 bp, Homo sapien
atgcatctcccaactataattaggatccttaaa

SEQ ID NO: 553257 - DNA, 33 bp, Homo sapien; identical to SEQ ID NO: 553255

SEQ ID NO: 553258 - DNA, 33 bp, Homo sapien; identical to SEQ ID NO: 553256

SEQ ID NO: 553259 - DNA, 33 bp, Homo sapien; identical to SEQ ID NO: 553255

SEQ ID NO: 553260 - DNA, 33 bp, Homo sapien; identical to SEQ ID NO: 553256

SEQ ID NO: 553261 - DNA, 33 bp, Homo sapien
aaagacaattaactcactgaagactacgcacag

SEQ ID NO: 553262 - DNA, 33 bp, Homo sapien
aaagacaattaactcattgaagactacgcacag

SEQ ID NO: 553263 - DNA, 33 bp, Homo sapien
aggacgctattgggggaaggaaaacacaaaata

SEQ ID NO: 553264 - DNA, 33 bp, Homo sapien
aggacgctattggggggaggaaaacacaaaata

SEQ ID NO: 553265 - DNA, 33 bp, Homo sapien
cattctctccaaactcagacattttagacagat

SEQ ID NO: 553266 - DNA, 33 bp, Homo sapien
cattctctccaaactctgacattttagacagat

SEQ ID NO: 553267 - DNA, 33 bp, Homo sapien
gcagtagatttagggaccactcaacctagtgag

SEQ ID NO: 553268 - DNA, 33 bp, Homo sapien
gcagtagatttagggagcactcaacctagtgag

SEQ ID NO: 553269 - DNA, 33 bp, Homo sapien
caggagcaaggaagcacattttccctcctaaaa

SEQ ID NO: 553270 - DNA, 33 bp, Homo sapien
caggagcaaggaagcagattttccctcctaaaa

SEQ ID NO: 553271 - DNA, 33 bp, Homo sapien
acttgtctttacctgaactctgaacacagtgaa

SEQ ID NO: 553272 - DNA, 33 bp, Homo sapien
acttgtctttacctgagctctgaacacagtgaa

SEQ ID NO: 553273 - DNA, 33 bp, Homo sapien
acctctccttgatgacaccacaggaccatgtgt

SEQ ID NO: 553274 - DNA, 33 bp, Homo sapien
acctctccttgatgacgccacaggaccatgtgt

SEQ ID NO: 553275 - DNA, 33 bp, Homo sapien
tcaaactggtcaataaactgagaggaaaggcac

SEQ ID NO: 553276 - DNA, 33 bp, Homo sapien
tcaaactggtcaataatctgagaggaaaggcac

SEQ ID NO: 553277 - DNA, 33 bp, Homo sapien
actggtttttaatgtgcatgcccttcactatct

SEQ ID NO: 553278 - DNA, 33 bp, Homo sapien
actggtttttaatgtgtatgcccttcactatct

SEQ ID NO: 553279 - DNA, 33 bp, Homo sapien
ggtagctgatccttcactccctgcttggtggtg

SEQ ID NO: 553280 - DNA, 33 bp, Homo sapien
ggtagctgatccttcattccctgcttggtggtg

SEQ ID NO: 553281 - DNA, 33 bp, Homo sapien
cagtgacaagatttcacgaagtgtcatgaggtg

SEQ ID NO: 553282 - DNA, 33 bp, Homo sapien
cagtgacaagatttcatgaagtgtcatgaggtg

SEQ ID NO: 553283 - DNA, 33 bp, Homo sapien
gtgggtctaagaacgacgtgccattgaaggact

SEQ ID NO: 553284 - DNA, 33 bp, Homo sapien
gtgggtctaagaacgatgtgccattgaaggact

SEQ ID NO: 553285 - DNA, 33 bp, Homo sapien
tgaaagatttctttacccggctgtttctctctg

SEQ ID NO: 553286 - DNA, 33 bp, Homo sapien
tgaaagatttctttactcggctgtttctctctg

SEQ ID NO: 553287 - DNA, 33 bp, Homo sapien
aagggagaaggaaaaccagaacgtgcagaaaca

SEQ ID NO: 553288 - DNA, 33 bp, Homo sapien
aagggagaaggaaaacgagaacgtgcagaaaca

SEQ ID NO: 553289 - DNA, 33 bp, Homo sapien
tggtaggggttaacaactgtgtcaagggctgca

SEQ ID NO: 553290 - DNA, 33 bp, Homo sapien
tggtaggggttaacaattgtgtcaagggctgca

SEQ ID NO: 553291 - DNA, 33 bp, Homo sapien
gtcaagggctgcaagaaatcaagtaaaatcagc

SEQ ID NO: 553292 - DNA, 33 bp, Homo sapien
gtcaagggctgcaagagatcaagtaaaatcagc

SEQ ID NO: 553293 - DNA, 33 bp, Homo sapien
gtaccaggctgggttccaagtgcacaagggagt

SEQ ID NO: 553294 - DNA, 33 bp, Homo sapien
gtaccaggctgggttcgaagtgcacaagggagt

SEQ ID NO: 553295 - DNA, 33 bp, Homo sapien
gtaagagggtctgatacaggatgttagggtagg

SEQ ID NO: 553296 - DNA, 33 bp, Homo sapien
gtaagagggtctgatataggatgttagggtagg

SEQ ID NO: 553297 - DNA, 33 bp, Homo sapien
aaccatggcacaaataagtatatcattgcaccc

SEQ ID NO: 553298 - DNA, 33 bp, Homo sapien
aaccatggcacaaataggtatatcattgcaccc

SEQ ID NO: 553299 - DNA, 33 bp, Homo sapien
ggccctcggtttactaactcatcctcctctatt

SEQ ID NO: 553300 - DNA, 33 bp, Homo sapien
ggccctcggtttactagctcatcctcctctatt

SEQ ID NO: 553301 - DNA, 33 bp, Homo sapien
acacgctctgataccccataattcccttccaaa

SEQ ID NO: 553302 - DNA, 33 bp, Homo sapien
acacgctctgatacccgataattcccttccaaa

SEQ ID NO: 553303 - DNA, 33 bp, Homo sapien
ccagttgtaatgttctcaaccaggaattagatg

SEQ ID NO: 553304 - DNA, 33 bp, Homo sapien
ccagttgtaatgttctgaaccaggaattagatg

SEQ ID NO: 553305 - DNA, 33 bp, Homo sapien
agtggggacagctctaagatttcagaaaaggta

SEQ ID NO: 553306 - DNA, 33 bp, Homo sapien
agtggggacagctctaggatttcagaaaaggta

SEQ ID NO: 553307 - DNA, 33 bp, Homo sapien
aagacaagaatcactacacttctgttgctcttt

SEQ ID NO: 553308 - DNA, 33 bp, Homo sapien
aagacaagaatcactagacttctgttgctcttt

SEQ ID NO: 553309 - DNA, 33 bp, Homo sapien
cagcttgctttcaaccagagaagctgagaagaa

SEQ ID NO: 553310 - DNA, 33 bp, Homo sapien
cagcttgctttcaaccggagaagctgagaagaa

SEQ ID NO: 553311 - DNA, 33 bp, Homo sapien
ttgaaagcaagctggccaagtaagaggaggtag

SEQ ID NO: 553312 - DNA, 33 bp, Homo sapien
ttgaaagcaagctggcgaagtaagaggaggtag

SEQ ID NO: 553313 - DNA, 33 bp, Homo sapien
ctgccactgttcaaaactctccaaagactctca

SEQ ID NO: 553314 - DNA, 33 bp, Homo sapien
ctgccactgttcaaaattctccaaagactctca

SEQ ID NO: 553315 - DNA, 33 bp, Homo sapien
gcccctcataattcaactcactcccagctgttg

SEQ ID NO: 553316 - DNA, 33 bp, Homo sapien
gcccctcataattcaagtcactcccagctgttg

SEQ ID NO: 553317 - DNA, 33 bp, Homo sapien
acagcaagagatcagcaaagagatcagagatga

SEQ ID NO: 553318 - DNA, 33 bp, Homo sapien
acagcaagagatcagcgaagagatcagagatga

SEQ ID NO: 553319 - DNA, 33 bp, Homo sapien
cagggaggggtggtaacaaggagaacagtttga

SEQ ID NO: 553320 - DNA, 33 bp, Homo sapien
cagggaggggtggtaataaggagaacagtttga

SEQ ID NO: 553321 - DNA, 33 bp, Homo sapien
acaaggaaaggacaagaaacggtctcaggttgg

SEQ ID NO: 553322 - DNA, 33 bp, Homo sapien
acaaggaaaggacaaggaacggtctcaggttgg

SEQ ID NO: 553323 - DNA, 33 bp, Homo sapien
gacctaatgtatgtgacggactgagtacagagc

SEQ ID NO: 553324 - DNA, 33 bp, Homo sapien
gacctaatgtatgtgatggactgagtacagagc

SEQ ID NO: 553325 - DNA, 33 bp, Homo sapien
agagcctggaaagatacaggaaaagttccaggc

SEQ ID NO: 553326 - DNA, 33 bp, Homo sapien
agagcctggaaagatataggaaaagttccaggc

SEQ ID NO: 553327 - DNA, 33 bp, Homo sapien
acttctcaagtattacccttctgtgcctttgaa

SEQ ID NO: 553328 - DNA, 33 bp, Homo sapien
acttctcaagtattactcttctgtgcctttgaa

SEQ ID NO: 553329 - DNA, 33 bp, Homo sapien
ggatggcacttttgagcagacagttgtggtttt

SEQ ID NO: 553330 - DNA, 33 bp, Homo sapien
ggatggcacttttgagtagacagttgtggtttt

SEQ ID NO: 553331 - DNA, 33 bp, Homo sapien
ttcagttcacttaaacagagttacctactccag

SEQ ID NO: 553332 - DNA, 33 bp, Homo sapien
ttcagttcacttaaactgagttacctactccag

SEQ ID NO: 553333 - DNA, 33 bp, Homo sapien
acggtgggtcagatgcacggtaaggagggtcag

SEQ ID NO: 553334 - DNA, 33 bp, Homo sapien
acggtgggtcagatgcgcggtaaggagggtcag

SEQ ID NO: 553335 - DNA, 33 bp, Homo sapien
gtggaggcctggccaccaagtgaaaagaagtac

SEQ ID NO: 553336 - DNA, 33 bp, Homo sapien
gtggaggcctggccacgaagtgaaaagaagtac

SEQ ID NO: 553337 - DNA, 33 bp, Homo sapien
agaaggaaggggattacatgttcagtctggata

SEQ ID NO: 553338 - DNA, 33 bp, Homo sapien
agaaggaaggggattatatgttcagtctggata

SEQ ID NO: 553339 - DNA, 33 bp, Homo sapien
ttcacccttgaggaggacacgggacttccccag

SEQ ID NO: 553340 - DNA, 33 bp, Homo sapien
ttcacccttgaggagggcacgggacttccccag

SEQ ID NO: 553341 - DNA, 33 bp, Homo sapien
gagaaagaaattcataaaagcctgactctctct

SEQ ID NO: 553342 - DNA, 33 bp, Homo sapien
gagaaagaaattcatagaagcctgactctctct

SEQ ID NO: 553343 - DNA, 33 bp, Homo sapien
cattgtttacactccactgagcatccgcaatgt

SEQ ID NO: 553344 - DNA, 33 bp, Homo sapien
cattgtttacactccattgagcatccgcaatgt

SEQ ID NO: 553345 - DNA, 33 bp, Homo sapien
gaccctcattccagaacagtcttgagttagaca

SEQ ID NO: 553346 - DNA, 33 bp, Homo sapien
gaccctcattccagaatagtcttgagttagaca

SEQ ID NO: 553347 - DNA, 33 bp, Homo sapien
ttccatcctttccaaccatctcttaccagtttt

SEQ ID NO: 553348 - DNA, 33 bp, Homo sapien
ttccatcctttccaacgatctcttaccagtttt

SEQ ID NO: 553349 - DNA, 33 bp, Homo sapien
ctgcgtctgataataccgatatacaaactctgg

SEQ ID NO: 553350 - DNA, 33 bp, Homo sapien
ctgcgtctgataatactgatatacaaactctgg

SEQ ID NO: 553351 - DNA, 33 bp, Homo sapien
atgtgtatagaattcagagtagtacatccaggc

SEQ ID NO: 553352 - DNA, 33 bp, Homo sapien
atgtgtatagaattcatagtagtacatccaggc

SEQ ID NO: 553353 - DNA, 33 bp, Homo sapien
ttgggctggacttacccggatggttcttctggt

SEQ ID NO: 553354 - DNA, 33 bp, Homo sapien
ttgggctggacttacctggatggttcttctggt

SEQ ID NO: 553355 - DNA, 33 bp, Homo sapien
gttaggaacccaggagaaagaccaaatatttct

SEQ ID NO: 553356 - DNA, 33 bp, Homo sapien
gttaggaacccaggaggaagaccaaatatttct

SEQ ID NO: 553357 - DNA, 33 bp, Homo sapien
gagtaggatgatttgacgaaaacaggaagaaaa

SEQ ID NO: 553358 - DNA, 33 bp, Homo sapien
gagtaggatgatttgaggaaaacaggaagaaaa

SEQ ID NO: 553359 - DNA, 33 bp, Homo sapien
ccaatacagcatgaaaagaggcagtctctagcc

SEQ ID NO: 553360 - DNA, 33 bp, Homo sapien
ccaatacagcatgaaaggaggcagtctctagcc

SEQ ID NO: 553361 - DNA, 33 bp, Homo sapien
aggagcttcctcaaaacatgtgggttgtattaa

SEQ ID NO: 553362 - DNA, 33 bp, Homo sapien
aggagcttcctcaaaatatgtgggttgtattaa

SEQ ID NO: 553363 - DNA, 33 bp, Homo sapien
gtcattaaatctgtaccaaacaaatgcgagggc

SEQ ID NO: 553364 - DNA, 33 bp, Homo sapien
gtcattaaatctgtactaaacaaatgcgagggc

SEQ ID NO: 553365 - DNA, 33 bp, Homo sapien
tgcagtctccaccaaacaggcgcttttctgttt

SEQ ID NO: 553366 - DNA, 33 bp, Homo sapien
tgcagtctccaccaaataggcgcttttctgttt

SEQ ID NO: 553367 - DNA, 33 bp, Homo sapien
gttttgcaaaagcttcagaaagaaattatggct

SEQ ID NO: 553368 - DNA, 33 bp, Homo sapien
gttttgcaaaagcttcggaaagaaattatggct

SEQ ID NO: 553369 - DNA, 33 bp, Homo sapien
gcgtgctcttctcatgaatcacagaaacttaga

SEQ ID NO: 553370 - DNA, 33 bp, Homo sapien
gcgtgctcttctcatggatcacagaaacttaga

SEQ ID NO: 553371 - DNA, 33 bp, Homo sapien
cagattcctggcaacacagctgtgcaaaagcag

SEQ ID NO: 553372 - DNA, 33 bp, Homo sapien
cagattcctggcaacatagctgtgcaaaagcag

SEQ ID NO: 553373 - DNA, 33 bp, Homo sapien
ctagggcctgtgacaacacaagggataaagtgt

SEQ ID NO: 553374 - DNA, 33 bp, Homo sapien
ctagggcctgtgacaatacaagggataaagtgt

SEQ ID NO: 553375 - DNA, 33 bp, Homo sapien
tgcagatcagtgagaagtgatacttgagagact

SEQ ID NO: 553376 - DNA, 33 bp, Homo sapien
tgcagatcagtgagaattgatacttgagagact

SEQ ID NO: 553377 - DNA, 33 bp, Homo sapien
tacacatacagagtcacggaggttttctgacaa

SEQ ID NO: 553378 - DNA, 33 bp, Homo sapien
tacacatacagagtcatggaggttttctgacaa

SEQ ID NO: 553379 - DNA, 33 bp, Homo sapien
ggctttcagaagaatagcaagactgggatggag

SEQ ID NO: 553380 - DNA, 33 bp, Homo sapien
ggctttcagaagaatatcaagactgggatggag

SEQ ID NO: 553381 - DNA, 33 bp, Homo sapien
ttctctattccttaaccgtgacaaacacaatta

SEQ ID NO: 553382 - DNA, 33 bp, Homo sapien
ttctctattccttaactgtgacaaacacaatta

SEQ ID NO: 553383 - DNA, 33 bp, Homo sapien
agaaatagcaactctacagtagaaaaacctggc

SEQ ID NO: 553384 - DNA, 33 bp, Homo sapien
agaaatagcaactctatagtagaaaaacctggc

SEQ ID NO: 553385 - DNA, 33 bp, Homo sapien
gaaggacattctataaaatacatcaccagtctt

SEQ ID NO: 553386 - DNA, 33 bp, Homo sapien
gaaggacattctataacatacatcaccagtctt

SEQ ID NO: 553387 - DNA, 33 bp, Homo sapien
cacgatgaaggagatggaccatcagtctccttt

SEQ ID NO: 553388 - DNA, 33 bp, Homo sapien
cacgatgaaggagatgtaccatcagtctccttt

SEQ ID NO: 553389 - DNA, 33 bp, Homo sapien
agagtgcatgagagtaaagccgacctagtggag

SEQ ID NO: 553390 - DNA, 33 bp, Homo sapien
agagtgcatgagagtagagccgacctagtggag

SEQ ID NO: 553391 - DNA, 33 bp, Homo sapien
agttttagacttagagaaaaactgtgcagagac

SEQ ID NO: 553392 - DNA, 33 bp, Homo sapien
agttttagacttagagcaaaactgtgcagagac

SEQ ID NO: 553393 - DNA, 33 bp, Homo sapien
attttacatataaacacaatgtgtgggggtttt

SEQ ID NO: 553394 - DNA, 33 bp, Homo sapien
attttacatataaacataatgtgtgggggtttt

SEQ ID NO: 553395 - DNA, 33 bp, Homo sapien
ctgcagaacccacaacggctgacttactgatct

SEQ ID NO: 553396 - DNA, 33 bp, Homo sapien
ctgcagaacccacaactgctgacttactgatct

SEQ ID NO: 553397 - DNA, 33 bp, Homo sapien
cagacaagcgtgtcaccgtctttgttctcagag

SEQ ID NO: 553398 - DNA, 33 bp, Homo sapien
cagacaagcgtgtcactgtctttgttctcagag

SEQ ID NO: 553399 - DNA, 33 bp, Homo sapien
acaacaaaactgggtcacaaggtgtccccacaa

SEQ ID NO: 553400 - DNA, 33 bp, Homo sapien
acaacaaaactgggtcgcaaggtgtccccacaa

SEQ ID NO: 553401 - DNA, 33 bp, Homo sapien
aaaaatcagcactcaaggtattcagtgacaggt

SEQ ID NO: 553402 - DNA, 33 bp, Homo sapien
aaaaatcagcactcaatgtattcagtgacaggt

SEQ ID NO: 553403 - DNA, 33 bp, Homo sapien
taggtgaaaaggaacccgagtagagcagagagc

SEQ ID NO: 553404 - DNA, 33 bp, Homo sapien
taggtgaaaaggaaccggagtagagcagagagc

SEQ ID NO: 553405 - DNA, 33 bp, Homo sapien
atttgctccttaggcagattttgacacttggga

SEQ ID NO: 553406 - DNA, 33 bp, Homo sapien
atttgctccttaggcatattttgacacttggga

SEQ ID NO: 553407 - DNA, 33 bp, Homo sapien
gcactcctgtgtgccaagcccagctctactggc

SEQ ID NO: 553408 - DNA, 33 bp, Homo sapien
gcactcctgtgtgccaggcccagctctactggc

SEQ ID NO: 553409 - DNA, 33 bp, Homo sapien
ctctagtggagggagacaggtggtagacaaata

SEQ ID NO: 553410 - DNA, 33 bp, Homo sapien
ctctagtggagggagataggtggtagacaaata

SEQ ID NO: 553411 - DNA, 33 bp, Homo sapien
tagacagcatgtttgacaggagtgaagtggaag

SEQ ID NO: 553412 - DNA, 33 bp, Homo sapien
tagacagcatgtttgataggagtgaagtggaag

SEQ ID NO: 553413 - DNA, 33 bp, Homo sapien
ctgaaagaagtaccacaaaatacacttttctcc

SEQ ID NO: 553414 - DNA, 33 bp, Homo sapien
ctgaaagaagtaccacgaaatacacttttctcc

SEQ ID NO: 553415 - DNA, 33 bp, Homo sapien
gaccttttaatactagcagcaagagtttctcca

SEQ ID NO: 553416 - DNA, 33 bp, Homo sapien
gaccttttaatactaggagcaagagtttctcca

SEQ ID NO: 553417 - DNA, 33 bp, Homo sapien
aatgtacagatttaaccggacagattgctctcc

SEQ ID NO: 553418 - DNA, 33 bp, Homo sapien
aatgtacagatttaactggacagattgctctcc

SEQ ID NO: 553419 - DNA, 33 bp, Homo sapien
gaagctaattctcagccattcctgatccaacaa

SEQ ID NO: 553420 - DNA, 33 bp, Homo sapien
gaagctaattctcagctattcctgatccaacaa

SEQ ID NO: 553421 - DNA, 33 bp, Homo sapien
aggtccttggcccagactcatacggcaaggatg

SEQ ID NO: 553422 - DNA, 33 bp, Homo sapien
aggtccttggcccagagtcatacggcaaggatg

SEQ ID NO: 553423 - DNA, 33 bp, Homo sapien
tccttgcaggaatcagaactggaagagattgaa

SEQ ID NO: 553424 - DNA, 33 bp, Homo sapien
tccttgcaggaatcaggactggaagagattgaa

SEQ ID NO: 553425 - DNA, 33 bp, Homo sapien
gttacagaacaagagcagataaatagaacctga

SEQ ID NO: 553426 - DNA, 33 bp, Homo sapien
gttacagaacaagagctgataaatagaacctga

SEQ ID NO: 553427 - DNA, 33 bp, Homo sapien
gttcaacaactccacgaaggtaggggtcacgtc

SEQ ID NO: 553428 - DNA, 33 bp, Homo sapien
gttcaacaactccacggaggtaggggtcacgtc

SEQ ID NO: 553429 - DNA, 33 bp, Homo sapien
gtaggtcatcctctaaacagggaaagtctgggg

SEQ ID NO: 553430 - DNA, 33 bp, Homo sapien
gtaggtcatcctctaagcagggaaagtctgggg

SEQ ID NO: 553431 - DNA, 33 bp, Homo sapien
ggggaaggggacacaacgttatgtaggcctaac

SEQ ID NO: 553432 - DNA, 33 bp, Homo sapien
ggggaaggggacacaatgttatgtaggcctaac

SEQ ID NO: 553433 - DNA, 33 bp, Homo sapien
gtgtgtgtgaatggccagacctaaggcctgagc

SEQ ID NO: 553434 - DNA, 33 bp, Homo sapien
gtgtgtgtgaatggccggacctaaggcctgagc

SEQ ID NO: 553435 - DNA, 33 bp, Homo sapien
acctgtctgggttccacgcattaggttaaagta

SEQ ID NO: 553436 - DNA, 33 bp, Homo sapien
acctgtctgggttccatgcattaggttaaagta

SEQ ID NO: 553437 - DNA, 33 bp, Homo sapien
attgttttccctgacccaaataaggaattaagg

SEQ ID NO: 553438 - DNA, 33 bp, Homo sapien
attgttttccctgaccgaaataaggaattaagg

SEQ ID NO: 553439 - DNA, 33 bp, Homo sapien
actgcatatatagaaccctcaagcattgaactc

SEQ ID NO: 553440 - DNA, 33 bp, Homo sapien
actgcatatatagaactctcaagcattgaactc

SEQ ID NO: 553441 - DNA, 33 bp, Homo sapien
agtggatggacaccaaacaagaaaatccttaaa

SEQ ID NO: 553442 - DNA, 33 bp, Homo sapien
agtggatggacaccaagcaagaaaatccttaaa

SEQ ID NO: 553443 - DNA, 33 bp, Homo sapien
ctggcaaagtctgcggccaagcacaggtcaata

SEQ ID NO: 553444 - DNA, 33 bp, Homo sapien
ctggcaaagtctgcggtcaagcacaggtcaata

SEQ ID NO: 553445 - DNA, 33 bp, Homo sapien
tcccaggaatgccaagccgattacagctcaaga

SEQ ID NO: 553446 - DNA, 33 bp, Homo sapien
tcccaggaatgccaagtcgattacagctcaaga

SEQ ID NO: 553447 - DNA, 33 bp, Homo sapien
actgagtttgggctcactgagaaagactgctgc

SEQ ID NO: 553448 - DNA, 33 bp, Homo sapien
actgagtttgggctcagtgagaaagactgctgc

SEQ ID NO: 553449 - DNA, 33 bp, Homo sapien
tgagaaagactgctgcaattgattaacgatgtc

SEQ ID NO: 553450 - DNA, 33 bp, Homo sapien
tgagaaagactgctgcgattgattaacgatgtc

SEQ ID NO: 553451 - DNA, 33 bp, Homo sapien
tacttcagtcagcccacgtgtaacaggcattta

SEQ ID NO: 553452 - DNA, 33 bp, Homo sapien
tacttcagtcagcccatgtgtaacaggcattta

SEQ ID NO: 553453 - DNA, 33 bp, Homo sapien
gcttccaacagcccgacgggtgacagcaacagg

SEQ ID NO: 553454 - DNA, 33 bp, Homo sapien
gcttccaacagcccgatgggtgacagcaacagg

SEQ ID NO: 553455 - DNA, 33 bp, Homo sapien
cacatgatggctaagcactccatgaaaggagac

SEQ ID NO: 553456 - DNA, 33 bp, Homo sapien
cacatgatggctaagctctccatgaaaggagac

SEQ ID NO: 553457 - DNA, 33 bp, Homo sapien
cggcaagcctgttccccgagaaaatggaggaca

SEQ ID NO: 553458 - DNA, 33 bp, Homo sapien
cggcaagcctgttccctgagaaaatggaggaca

SEQ ID NO: 553459 - DNA, 33 bp, Homo sapien
tactcactctttcaataaatctacgtcggatcc

SEQ ID NO: 553460 - DNA, 33 bp, Homo sapien
tactcactctttcaatgaatctacgtcggatcc

SEQ ID NO: 553461 - DNA, 33 bp, Homo sapien
tcagttgaacaacaccacttcattgtgggggcc

SEQ ID NO: 553462 - DNA, 33 bp, Homo sapien
tcagttgaacaacaccgcttcattgtgggggcc

SEQ ID NO: 553463 - DNA, 33 bp, Homo sapien
ccctgcgctgtgaatacggtggcgtttactctt

SEQ ID NO: 553464 - DNA, 33 bp, Homo sapien
ccctgcgctgtgaatatggtggcgtttactctt

SEQ ID NO: 553465 - DNA, 33 bp, Homo sapien
ggctactcttcaacacccattccattgacttcc

SEQ ID NO: 553466 - DNA, 33 bp, Homo sapien
ggctactcttcaacacgcattccattgacttcc

SEQ ID NO: 553467 - DNA, 33 bp, Homo sapien
taattagagaaatccaaattaaaagctcatttc

SEQ ID NO: 553468 - DNA, 33 bp, Homo sapien
taattagagaaatccacattaaaagctcatttc

SEQ ID NO: 553469 - DNA, 33 bp, Homo sapien
acctcctgggctgggcacataacattctcataa

SEQ ID NO: 553470 - DNA, 33 bp, Homo sapien
acctcctgggctgggcgcataacattctcataa

SEQ ID NO: 553471 - DNA, 33 bp, Homo sapien
aaactcacacaagtcacatgctgatgaagacac

SEQ ID NO: 553472 - DNA, 33 bp, Homo sapien
aaactcacacaagtcatatgctgatgaagacac

SEQ ID NO: 553473 - DNA, 33 bp, Homo sapien
gaactaggtccctaagcagcctcatgtccccac

SEQ ID NO: 553474 - DNA, 33 bp, Homo sapien
gaactaggtccctaagtagcctcatgtccccac

SEQ ID NO: 553475 - DNA, 33 bp, Homo sapien
cagtttctctgggtcaagaatatagaacaggcc

SEQ ID NO: 553476 - DNA, 33 bp, Homo sapien
cagtttctctgggtcaggaatatagaacaggcc

SEQ ID NO: 553477 - DNA, 33 bp, Homo sapien
ggaacacgaatgataaacagctaacgctcacct

SEQ ID NO: 553478 - DNA, 33 bp, Homo sapien
ggaacacgaatgataagcagctaacgctcacct

SEQ ID NO: 553479 - DNA, 33 bp, Homo sapien
atgctgggcagagagacgtaagaggcgagtcac

SEQ ID NO: 553480 - DNA, 33 bp, Homo sapien
atgctgggcagagagatgtaagaggcgagtcac

SEQ ID NO: 553481 - DNA, 33 bp, Homo sapien
catcctctcactgcacacacaggaaggagagcc

SEQ ID NO: 553482 - DNA, 33 bp, Homo sapien
catcctctcactgcacgcacaggaaggagagcc

SEQ ID NO: 553483 - DNA, 33 bp, Homo sapien
gtcatgttcccaaacccccagagctggtcccag

SEQ ID NO: 553484 - DNA, 33 bp, Homo sapien
gtcatgttcccaaacctccagagctggtcccag

SEQ ID NO: 553485 - DNA, 33 bp, Homo sapien
cccaggctcatcggacactgccttcgcttgata

SEQ ID NO: 553486 - DNA, 33 bp, Homo sapien
cccaggctcatcggacgctgccttcgcttgata

SEQ ID NO: 553487 - DNA, 33 bp, Homo sapien
aaccacaaaccaggtaagttaagacaactgaaa

SEQ ID NO: 553488 - DNA, 33 bp, Homo sapien
aaccacaaaccaggtaggttaagacaactgaaa

SEQ ID NO: 553489 - DNA, 33 bp, Homo sapien
tgcaggattctgtctacgtaacatccttgcaaa

SEQ ID NO: 553490 - DNA, 33 bp, Homo sapien
tgcaggattctgtctatgtaacatccttgcaaa

SEQ ID NO: 553491 - DNA, 33 bp, Homo sapien
aggccaggaagcggggacattgagagccgagat

SEQ ID NO: 553492 - DNA, 33 bp, Homo sapien
aggccaggaagcgggggcattgagagccgagat

SEQ ID NO: 553493 - DNA, 33 bp, Homo sapien
ccaccacctactggcccaaagctacattgcagc

SEQ ID NO: 553494 - DNA, 33 bp, Homo sapien
ccaccacctactggcctaaagctacattgcagc

SEQ ID NO: 553495 - DNA, 33 bp, Homo sapien
ctcctacagacaccaaatgaccagctaggtaaa

SEQ ID NO: 553496 - DNA, 33 bp, Homo sapien
ctcctacagacaccaagtgaccagctaggtaaa

SEQ ID NO: 553497 - DNA, 33 bp, Homo sapien
gacaatgatggtcaacacttaggctggacctgc

SEQ ID NO: 553498 - DNA, 33 bp, Homo sapien
gacaatgatggtcaacgcttaggctggacctgc

SEQ ID NO: 553499 - DNA, 33 bp, Homo sapien
gtcattctcttcccgcagccggatggagtggag

SEQ ID NO: 553500 - DNA, 33 bp, Homo sapien
gtcattctcttcccgcggccggatggagtggag

SEQ ID NO: 553501 - DNA, 33 bp, Homo sapien
tgacctggtcattgagaaggtcttccacggaag

SEQ ID NO: 553502 - DNA, 33 bp, Homo sapien
tgacctggtcattgaggaggtcttccacggaag

SEQ ID NO: 553503 - DNA, 33 bp, Homo sapien
gtgaatgcttcctccaacttcctgagagcaggg

SEQ ID NO: 553504 - DNA, 33 bp, Homo sapien
gtgaatgcttcctccaccttcctgagagcaggg

SEQ ID NO: 553505 - DNA, 33 bp, Homo sapien
gggtctggcacaataaatagctgaggagtggca

SEQ ID NO: 553506 - DNA, 33 bp, Homo sapien
gggtctggcacaataagtagctgaggagtggca

SEQ ID NO: 553507 - DNA, 33 bp, Homo sapien
atccccgctttccacaagacttactgaagcacc

SEQ ID NO: 553508 - DNA, 33 bp, Homo sapien
atccccgctttccacatgacttactgaagcacc

SEQ ID NO: 553509 - DNA, 33 bp, Homo sapien
tgcaaataactatatcaccataacttaagaata

SEQ ID NO: 553510 - DNA, 33 bp, Homo sapien
tgcaaataactatatcgccataacttaagaata

SEQ ID NO: 553511 - DNA, 33 bp, Homo sapien; identical to SEQ ID NO: 553509

SEQ ID NO: 553512 - DNA, 33 bp, Homo sapien; identical to SEQ ID NO: 553510

SEQ ID NO: 553513 - DNA, 33 bp, Homo sapien
tgcccccacatctaataagtccatggaacccag

SEQ ID NO: 553514 - DNA, 33 bp, Homo sapien
tgcccccacatctaatgagtccatggaacccag

SEQ ID NO: 553515 - DNA, 33 bp, Homo sapien
actgctgacattcctacgttcaaaacaaaagat

SEQ ID NO: 553516 - DNA, 33 bp, Homo sapien
actgctgacattcctatgttcaaaacaaaagat

SEQ ID NO: 553517 - DNA, 33 bp, Homo sapien; identical to SEQ ID NO: 553515

SEQ ID NO: 553518 - DNA, 33 bp, Homo sapien; identical to SEQ ID NO: 553516

SEQ ID NO: 553519 - DNA, 33 bp, Homo sapien
ttttgtggagtaggtcaaagtgtaatggttgca

SEQ ID NO: 553520 - DNA, 33 bp, Homo sapien
ttttgtggagtaggtcgaagtgtaatggttgca

SEQ ID NO: 553521 - DNA, 33 bp, Homo sapien
gtgttcatgagacagaaggccggaaattaaaac

SEQ ID NO: 553522 - DNA, 33 bp, Homo sapien
gtgttcatgagacagagggccggaaattaaaac

SEQ ID NO: 553523 - DNA, 33 bp, Homo sapien
tatgtggctaatgtggaccaaattatccttaag

SEQ ID NO: 553524 - DNA, 33 bp, Homo sapien
tatgtggctaatgtggtccaaattatccttaag

SEQ ID NO: 553525 - DNA, 33 bp, Homo sapien
gtagaagagtgcaggcaagaatctcagcaagat

SEQ ID NO: 553526 - DNA, 33 bp, Homo sapien
gtagaagagtgcaggcgagaatctcagcaagat

SEQ ID NO: 553527 - DNA, 33 bp, Homo sapien
aggaaagatactgtgcccggatgtgcacgaagg

SEQ ID NO: 553528 - DNA, 33 bp, Homo sapien
aggaaagatactgtgcgcggatgtgcacgaagg

SEQ ID NO: 553529 - DNA, 33 bp, Homo sapien; identical to SEQ ID NO: 553527

SEQ ID NO: 553530 - DNA, 33 bp, Homo sapien; identical to SEQ ID NO: 553528

SEQ ID NO: 553531 - DNA, 33 bp, Homo sapien
acaaaggttctgaggcccaaggttgcttggtgc

SEQ ID NO: 553532 - DNA, 33 bp, Homo sapien
acaaaggttctgaggctcaaggttgcttggtgc

SEQ ID NO: 553533 - DNA, 33 bp, Homo sapien
catgagctcatactgaccaaacaaaccacccaa

SEQ ID NO: 553534 - DNA, 33 bp, Homo sapien
catgagctcatactgatcaaacaaaccacccaa

SEQ ID NO: 553535 - DNA, 33 bp, Homo sapien
ctaaagctaggccataatagccatcgcaacccc

SEQ ID NO: 553536 - DNA, 33 bp, Homo sapien
ctaaagctaggccatagtagccatcgcaacccc

SEQ ID NO: 553537 - DNA, 33 bp, Homo sapien
gagagaagaaaaaggcagataaactgtcattaa

SEQ ID NO: 553538 - DNA, 33 bp, Homo sapien
gagagaagaaaaaggcggataaactgtcattaa

SEQ ID NO: 553539 - DNA, 33 bp, Homo sapien
atagctgaaaagagaacgcctttccataaatcc

SEQ ID NO: 553540 - DNA, 33 bp, Homo sapien
atagctgaaaagagaatgcctttccataaatcc

SEQ ID NO: 553541 - DNA, 33 bp, Homo sapien
agagttgaaagaattacacagtgaacattcata

SEQ ID NO: 553542 - DNA, 33 bp, Homo sapien
agagttgaaagaattagacagtgaacattcata

SEQ ID NO: 553543 - DNA, 33 bp, Homo sapien
agaaagtcagtcaatacgtgcctaaaattggtc

SEQ ID NO: 553544 - DNA, 33 bp, Homo sapien
agaaagtcagtcaatatgtgcctaaaattggtc

SEQ ID NO: 553545 - DNA, 33 bp, Homo sapien
tcataaatggcctccacagaaagtctgttgctg

SEQ ID NO: 553546 - DNA, 33 bp, Homo sapien
tcataaatggcctccatagaaagtctgttgctg

SEQ ID NO: 553547 - DNA, 33 bp, Homo sapien
tgcacctgtagttaaacaagtggttctattact

SEQ ID NO: 553548 - DNA, 33 bp, Homo sapien
tgcacctgtagttaaataagtggttctattact

SEQ ID NO: 553549 - DNA, 33 bp, Homo sapien
tggttctattactcaccgggacaagaaagtgca

SEQ ID NO: 553550 - DNA, 33 bp, Homo sapien
tggttctattactcactgggacaagaaagtgca

SEQ ID NO: 553551 - DNA, 33 bp, Homo sapien
tcactaagacattccaaggttccccatgctgtg

SEQ ID NO: 553552 - DNA, 33 bp, Homo sapien
tcactaagacattccagggttccccatgctgtg

SEQ ID NO: 553553 - DNA, 33 bp, Homo sapien
tacttgttgctacagacgcaaacatggaggtaa

SEQ ID NO: 553554 - DNA, 33 bp, Homo sapien
tacttgttgctacagatgcaaacatggaggtaa

SEQ ID NO: 553555 - DNA, 33 bp, Homo sapien
ttcttgatctcacttaaccttgagaaagaaaat

SEQ ID NO: 553556 - DNA, 33 bp, Homo sapien
ttcttgatctcacttatccttgagaaagaaaat

SEQ ID NO: 553557 - DNA, 33 bp, Homo sapien
cctggagagtgagagactcagagagagtgacag

SEQ ID NO: 553558 - DNA, 33 bp, Homo sapien
cctggagagtgagagattcagagagagtgacag

SEQ ID NO: 553559 - DNA, 33 bp, Homo sapien
gtgtgaaaggctgccacgagacagtgatcgtaa

SEQ ID NO: 553560 - DNA, 33 bp, Homo sapien
gtgtgaaaggctgccatgagacagtgatcgtaa

SEQ ID NO: 553561 - DNA, 33 bp, Homo sapien
gcacccattctacagacgaaaccgtgaagggac

SEQ ID NO: 553562 - DNA, 33 bp, Homo sapien
gcacccattctacagatgaaaccgtgaagggac

SEQ ID NO: 553563 - DNA, 33 bp, Homo sapien
agtgagtagctacaacactatgctgagtcccat

SEQ ID NO: 553564 - DNA, 33 bp, Homo sapien
agtgagtagctacaacgctatgctgagtcccat

SEQ ID NO: 553565 - DNA, 33 bp, Homo sapien
gctgtcactgaacaaaatttgctctactattta

SEQ ID NO: 553566 - DNA, 33 bp, Homo sapien
gctgtcactgaacaaagtttgctctactattta

SEQ ID NO: 553567 - DNA, 33 bp, Homo sapien
tgttctaaacactttacgtgactcatctcgttt

SEQ ID NO: 553568 - DNA, 33 bp, Homo sapien
tgttctaaacactttatgtgactcatctcgttt

SEQ ID NO: 553569 - DNA, 33 bp, Homo sapien
aatcgcgacatgtggactaacctgaacctatta

SEQ ID NO: 553570 - DNA, 33 bp, Homo sapien
aatcgcgacatgtggattaacctgaacctatta

SEQ ID NO: 553571 - DNA, 33 bp, Homo sapien
atcactctcaggctgccgaattctcaggcctat

SEQ ID NO: 553572 - DNA, 33 bp, Homo sapien
atcactctcaggctgctgaattctcaggcctat

SEQ ID NO: 553573 - DNA, 33 bp, Homo sapien
gattgcggatatctacaacacattgtgtatact

SEQ ID NO: 553574 - DNA, 33 bp, Homo sapien
gattgcggatatctacgacacattgtgtatact

SEQ ID NO: 553575 - DNA, 33 bp, Homo sapien
gctagattcctcctcaggtctactgatttggaa

SEQ ID NO: 553576 - DNA, 33 bp, Homo sapien
gctagattcctcctcatgtctactgatttggaa

SEQ ID NO: 553577 - DNA, 33 bp, Homo sapien
tatgagaggtcctcgacaaatatttgtggaaag

SEQ ID NO: 553578 - DNA, 33 bp, Homo sapien
tatgagaggtcctcgataaatatttgtggaaag

SEQ ID NO: 553579 - DNA, 33 bp, Homo sapien
tttgtgtaaggggcaccagatttccactgaata

SEQ ID NO: 553580 - DNA, 33 bp, Homo sapien
tttgtgtaaggggcacgagatttccactgaata

SEQ ID NO: 553581 - DNA, 33 bp, Homo sapien
gtgctcccattgtcacaattttacagatgagga

SEQ ID NO: 553582 - DNA, 33 bp, Homo sapien
gtgctcccattgtcaccattttacagatgagga

SEQ ID NO: 553583 - DNA, 33 bp, Homo sapien
gcctttctgcctgtacaactccagtgtgtacct

SEQ ID NO: 553584 - DNA, 33 bp, Homo sapien
gcctttctgcctgtacgactccagtgtgtacct

SEQ ID NO: 553585 - DNA, 33 bp, Homo sapien
tcatttaatctcctcaataacctgcaaagtagc

SEQ ID NO: 553586 - DNA, 33 bp, Homo sapien
tcatttaatctcctcagtaacctgcaaagtagc

SEQ ID NO: 553587 - DNA, 33 bp, Homo sapien
ctggtcatccccaggccgagggtatctgtgcca

SEQ ID NO: 553588 - DNA, 33 bp, Homo sapien
ctggtcatccccaggctgagggtatctgtgcca

SEQ ID NO: 553589 - DNA, 33 bp, Homo sapien
acaaggtctgactctcgcaaccacactggggtg

SEQ ID NO: 553590 - DNA, 33 bp, Homo sapien
acaaggtctgactctctcaaccacactggggtg

SEQ ID NO: 553591 - DNA, 33 bp, Homo sapien
gtcagtcaggtcaccggagagtgccgtagggcc

SEQ ID NO: 553592 - DNA, 33 bp, Homo sapien
gtcagtcaggtcaccgtagagtgccgtagggcc

SEQ ID NO: 553593 - DNA, 33 bp, Homo sapien
cctgagagattggaagaacatttatgcattcat

SEQ ID NO: 553594 - DNA, 33 bp, Homo sapien
cctgagagattggaaggacatttatgcattcat

SEQ ID NO: 553595 - DNA, 33 bp, Homo sapien
ccttgtcctccccgtacgaaataaccaccttcc

SEQ ID NO: 553596 - DNA, 33 bp, Homo sapien
ccttgtcctccccgtatgaaataaccaccttcc

SEQ ID NO: 553597 - DNA, 33 bp, Homo sapien
ccctctcccagactcccactttgcttaccccag

SEQ ID NO: 553598 - DNA, 33 bp, Homo sapien
ccctctcccagactcctactttgcttaccccag

SEQ ID NO: 553599 - DNA, 33 bp, Homo sapien
tcctcagtcatcgcccagactgtctcctgggtc

SEQ ID NO: 553600 - DNA, 33 bp, Homo sapien
tcctcagtcatcgcccggactgtctcctgggtc

SEQ ID NO: 553601 - DNA, 33 bp, Homo sapien
tgcattccctcctcacagtcaaaatacatgcag

SEQ ID NO: 553602 - DNA, 33 bp, Homo sapien
tgcattccctcctcacggtcaaaatacatgcag

SEQ ID NO: 553603 - DNA, 33 bp, Homo sapien
ggcaggagaatcacgcaaaccggggagatggag

SEQ ID NO: 553604 - DNA, 33 bp, Homo sapien
ggcaggagaatcacgcgaaccggggagatggag

SEQ ID NO: 553605 - DNA, 33 bp, Homo sapien
aaattttaggggtatcgagcttcaggcatggct

SEQ ID NO: 553606 - DNA, 33 bp, Homo sapien
aaattttaggggtatctagcttcaggcatggct

SEQ ID NO: 553607 - DNA, 33 bp, Homo sapien
ccagccaaactggtgcagaccagaagcaaagtc

SEQ ID NO: 553608 - DNA, 33 bp, Homo sapien
ccagccaaactggtgcggaccagaagcaaagtc

SEQ ID NO: 553609 - DNA, 33 bp, Homo sapien
ggaaggaggagatacccgcaagtcttggagagc

SEQ ID NO: 553610 - DNA, 33 bp, Homo sapien
ggaaggaggagatacctgcaagtcttggagagc

SEQ ID NO: 553611 - DNA, 33 bp, Homo sapien
cttccaggcactcctactacagttaaacttaag

SEQ ID NO: 553612 - DNA, 33 bp, Homo sapien
cttccaggcactcctagtacagttaaacttaag

SEQ ID NO: 553613 - DNA, 33 bp, Homo sapien
gctggttggttgtgcccgaattccaagagggag

SEQ ID NO: 553614 - DNA, 33 bp, Homo sapien
gctggttggttgtgcctgaattccaagagggag

SEQ ID NO: 553615 - DNA, 33 bp, Homo sapien
ggtaccacagttgggaactgaaaagccagcaat

SEQ ID NO: 553616 - DNA, 33 bp, Homo sapien
ggtaccacagttgggacctgaaaagccagcaat

SEQ ID NO: 553617 - DNA, 33 bp, Homo sapien
cggtgcatgtgggtaacgttcgtaagcccaaga

SEQ ID NO: 553618 - DNA, 33 bp, Homo sapien
cggtgcatgtgggtaatgttcgtaagcccaaga

SEQ ID NO: 553619 - DNA, 33 bp, Homo sapien
ttctaattttgataccacaatgattaattctgt

SEQ ID NO: 553620 - DNA, 33 bp, Homo sapien
ttctaattttgataccgcaatgattaattctgt

SEQ ID NO: 553621 - DNA, 33 bp, Homo sapien
cgatgacgaagcttgacgtagggctcactcatt

SEQ ID NO: 553622 - DNA, 33 bp, Homo sapien
cgatgacgaagcttgatgtagggctcactcatt

SEQ ID NO: 553623 - DNA, 33 bp, Homo sapien
tgactttggatgagtcactaacccactgagcct

SEQ ID NO: 553624 - DNA, 33 bp, Homo sapien
tgactttggatgagtcgctaacccactgagcct

SEQ ID NO: 553625 - DNA, 33 bp, Homo sapien
ctcatccaaagtcaagccgccagctgcacatag

SEQ ID NO: 553626 - DNA, 33 bp, Homo sapien
ctcatccaaagtcaagtcgccagctgcacatag

SEQ ID NO: 553627 - DNA, 33 bp, Homo sapien
gggcagtccctgagacaaattgccaagtgaaaa

SEQ ID NO: 553628 - DNA, 33 bp, Homo sapien
gggcagtccctgagacgaattgccaagtgaaaa

SEQ ID NO: 553629 - DNA, 33 bp, Homo sapien
cgccactccctgaagaactagagagaaaggttc

SEQ ID NO: 553630 - DNA, 33 bp, Homo sapien
cgccactccctgaagacctagagagaaaggttc

SEQ ID NO: 553631 - DNA, 33 bp, Homo sapien
ctccactgaaatgtcacgtccttgagtgcagag

SEQ ID NO: 553632 - DNA, 33 bp, Homo sapien
ctccactgaaatgtcatgtccttgagtgcagag

SEQ ID NO: 553633 - DNA, 33 bp, Homo sapien
tgctggagacacattacagaacaaaacagacaa

SEQ ID NO: 553634 - DNA, 33 bp, Homo sapien
tgctggagacacattagagaacaaaacagacaa

SEQ ID NO: 553635 - DNA, 33 bp, Homo sapien
cctttagtgatcttaaacaaaccacctcagctc

SEQ ID NO: 553636 - DNA, 33 bp, Homo sapien
cctttagtgatcttaagcaaaccacctcagctc

SEQ ID NO: 553637 - DNA, 33 bp, Homo sapien
ccaaagttacagcaaaaattagagcttggaatt

SEQ ID NO: 553638 - DNA, 33 bp, Homo sapien
ccaaagttacagcaaatattagagcttggaatt

SEQ ID NO: 553639 - DNA, 33 bp, Homo sapien
ggtgataaagatcaccacaagtcaactgagggt

SEQ ID NO: 553640 - DNA, 33 bp, Homo sapien
ggtgataaagatcaccgcaagtcaactgagggt

SEQ ID NO: 553641 - DNA, 33 bp, Homo sapien
aaagtagcatttcctgaaaaacgaatctgtgga

SEQ ID NO: 553642 - DNA, 33 bp, Homo sapien
aaagtagcatttcctgcaaaacgaatctgtgga

SEQ ID NO: 553643 - DNA, 33 bp, Homo sapien
cagggcctgagaatccacattgctaacaggttc

SEQ ID NO: 553644 - DNA, 33 bp, Homo sapien
cagggcctgagaatccgcattgctaacaggttc

SEQ ID NO: 553645 - DNA, 33 bp, Homo sapien
actcagagatcttcaaaaactgtcctgtgagat

SEQ ID NO: 553646 - DNA, 33 bp, Homo sapien
actcagagatcttcaacaactgtcctgtgagat

SEQ ID NO: 553647 - DNA, 33 bp, Homo sapien
caggctcagaagggcaactgtgacattccttct

SEQ ID NO: 553648 - DNA, 33 bp, Homo sapien
caggctcagaagggcagctgtgacattccttct

SEQ ID NO: 553649 - DNA, 33 bp, Homo sapien
cagttaaaagagaggcacattcattgaagtata

SEQ ID NO: 553650 - DNA, 33 bp, Homo sapien
cagttaaaagagaggcgcattcattgaagtata

SEQ ID NO: 553651 - DNA, 33 bp, Homo sapien
actataaagtgctacacaaacaagaaggtggtt

SEQ ID NO: 553652 - DNA, 33 bp, Homo sapien
actataaagtgctacagaaacaagaaggtggtt

SEQ ID NO: 553653 - DNA, 33 bp, Homo sapien
ctggagctccaaacaactgccttagttcagatg

SEQ ID NO: 553654 - DNA, 33 bp, Homo sapien
ctggagctccaaacaattgccttagttcagatg

SEQ ID NO: 553655 - DNA, 33 bp, Homo sapien
cgcttcagcccaggaaagacatcaaggctgcag

SEQ ID NO: 553656 - DNA, 33 bp, Homo sapien
cgcttcagcccaggaaggacatcaaggctgcag

SEQ ID NO: 553657 - DNA, 33 bp, Homo sapien
ggaattactcagaatacaaacccaaaccattgg

SEQ ID NO: 553658 - DNA, 33 bp, Homo sapien
ggaattactcagaatagaaacccaaaccattgg

SEQ ID NO: 553659 - DNA, 33 bp, Homo sapien
ggaaggatccatctacccaatttcaagatttat

SEQ ID NO: 553660 - DNA, 33 bp, Homo sapien
ggaaggatccatctacgcaatttcaagatttat

SEQ ID NO: 553661 - DNA, 33 bp, Homo sapien
ccctgtccaaccagacggtcaactgcagcaggg

SEQ ID NO: 553662 - DNA, 33 bp, Homo sapien
ccctgtccaaccagactgtcaactgcagcaggg

SEQ ID NO: 553663 - DNA, 33 bp, Homo sapien
gcaagaccatcaactccacgaggaaagggatga

SEQ ID NO: 553664 - DNA, 33 bp, Homo sapien
gcaagaccatcaactctacgaggaaagggatga

SEQ ID NO: 553665 - DNA, 33 bp, Homo sapien
ttaggagacatttctgcagtgtgagtcatcatt

SEQ ID NO: 553666 - DNA, 33 bp, Homo sapien
ttaggagacatttctgtagtgtgagtcatcatt

SEQ ID NO: 553667 - DNA, 33 bp, Homo sapien
gtgcatcagatttgaccggaaataccatttcag

SEQ ID NO: 553668 - DNA, 33 bp, Homo sapien
gtgcatcagatttgactggaaataccatttcag

SEQ ID NO: 553669 - DNA, 33 bp, Homo sapien
gcctgccacagggaacaactatcctgtccccat

SEQ ID NO: 553670 - DNA, 33 bp, Homo sapien
gcctgccacagggaacgactatcctgtccccat

SEQ ID NO: 553671 - DNA, 33 bp, Homo sapien
tgaagacattagcttacagaaatgtcccgacag

SEQ ID NO: 553672 - DNA, 33 bp, Homo sapien
tgaagacattagcttatagaaatgtcccgacag

SEQ ID NO: 553673 - DNA, 33 bp, Homo sapien
agttaactgaactttagctgacactattagatg

SEQ ID NO: 553674 - DNA, 33 bp, Homo sapien
agttaactgaactttatctgacactattagatg

SEQ ID NO: 553675 - DNA, 33 bp, Homo sapien
aacatagtccctgtccccgtgaaacagacatcc

SEQ ID NO: 553676 - DNA, 33 bp, Homo sapien
aacatagtccctgtcctcgtgaaacagacatcc

SEQ ID NO: 553677 - DNA, 33 bp, Homo sapien
tgcacacatttaatagccatagagcacccctgg

SEQ ID NO: 553678 - DNA, 33 bp, Homo sapien
tgcacacatttaatagtcatagagcacccctgg

SEQ ID NO: 553679 - DNA, 33 bp, Homo sapien
acaatggagagctttgaaaaatttcagaggcaa

SEQ ID NO: 553680 - DNA, 33 bp, Homo sapien
acaatggagagctttggaaaatttcagaggcaa

SEQ ID NO: 553681 - DNA, 33 bp, Homo sapien
tctttattatggatggacataatgcctggatct

SEQ ID NO: 553682 - DNA, 33 bp, Homo sapien
tctttattatggatgggcataatgcctggatct

SEQ ID NO: 553683 - DNA, 33 bp, Homo sapien
tgccagtctgcctcagaacatttggtacaactt

SEQ ID NO: 553684 - DNA, 33 bp, Homo sapien
tgccagtctgcctcaggacatttggtacaactt

SEQ ID NO: 553685 - DNA, 33 bp, Homo sapien
ttggggtgctaagcaacaaaaaggcataatttc

SEQ ID NO: 553686 - DNA, 33 bp, Homo sapien
ttggggtgctaagcaagaaaaaggcataatttc

SEQ ID NO: 553687 - DNA, 33 bp, Homo sapien
gagaaccatatgcataagaagacctggatctta

SEQ ID NO: 553688 - DNA, 33 bp, Homo sapien
gagaaccatatgcataggaagacctggatctta

SEQ ID NO: 553689 - DNA, 33 bp, Homo sapien
gaccctcaagaaaagaagtctcctctgtccctc

SEQ ID NO: 553690 - DNA, 33 bp, Homo sapien
gaccctcaagaaaagatgtctcctctgtccctc

SEQ ID NO: 553691 - DNA, 33 bp, Homo sapien
ggtatgtagaccagaaagagctaaaaccctaga

SEQ ID NO: 553692 - DNA, 33 bp, Homo sapien
ggtatgtagaccagaaggagctaaaaccctaga

SEQ ID NO: 553693 - DNA, 33 bp, Homo sapien
catgcaggcggatgagaagactgcttccagggg

SEQ ID NO: 553694 - DNA, 33 bp, Homo sapien
catgcaggcggatgaggagactgcttccagggg

SEQ ID NO: 553695 - DNA, 33 bp, Homo sapien
agaggtcactgccaaagagcaactcccagtcac

SEQ ID NO: 553696 - DNA, 33 bp, Homo sapien
agaggtcactgccaaatagcaactcccagtcac

SEQ ID NO: 553697 - DNA, 33 bp, Homo sapien
tatgaggcagtatgatcatattatttacctttc

SEQ ID NO: 553698 - DNA, 33 bp, Homo sapien
tatgaggcagtatgattatattatttacctttc

SEQ ID NO: 553699 - DNA, 33 bp, Homo sapien
ctgtggctttgttctaaattatctccttctaaa

SEQ ID NO: 553700 - DNA, 33 bp, Homo sapien
ctgtggctttgttctagattatctccttctaaa

SEQ ID NO: 553701 - DNA, 33 bp, Homo sapien
gaatgatcacgtctcaactacaagtggaaaagc

SEQ ID NO: 553702 - DNA, 33 bp, Homo sapien
gaatgatcacgtctcagctacaagtggaaaagc

SEQ ID NO: 553703 - DNA, 33 bp, Homo sapien
gcaggctggatttggccagaacattgctggcag

SEQ ID NO: 553704 - DNA, 33 bp, Homo sapien
gcaggctggatttggctagaacattgctggcag

SEQ ID NO: 553705 - DNA, 33 bp, Homo sapien
gcttttctctgccttccaccagaatagtgtatt

SEQ ID NO: 553706 - DNA, 33 bp, Homo sapien
gcttttctctgccttctaccagaatagtgtatt

SEQ ID NO: 553707 - DNA, 33 bp, Homo sapien
tttaaggatacagtcaagaatggtgggatctgt

SEQ ID NO: 553708 - DNA, 33 bp, Homo sapien
tttaaggatacagtcaggaatggtgggatctgt

SEQ ID NO: 553709 - DNA, 33 bp, Homo sapien
gccatattctactgatcactcaggccagttgta

SEQ ID NO: 553710 - DNA, 33 bp, Homo sapien
gccatattctactgattactcaggccagttgta

SEQ ID NO: 553711 - DNA, 33 bp, Homo sapien
attggtaattcccaggcatttttgtccatcggc

SEQ ID NO: 553712 - DNA, 33 bp, Homo sapien
attggtaattcccaggtatttttgtccatcggc

SEQ ID NO: 553713 - DNA, 33 bp, Homo sapien
tggatgctttggaaatcatattctagcccctcc

SEQ ID NO: 553714 - DNA, 33 bp, Homo sapien
tggatgctttggaaattatattctagcccctcc

SEQ ID NO: 553715 - DNA, 33 bp, Homo sapien
tgtgccagtttgtccaatcccttattgatgggc

SEQ ID NO: 553716 - DNA, 33 bp, Homo sapien
tgtgccagtttgtccagtcccttattgatgggc

SEQ ID NO: 553717 - DNA, 33 bp, Homo sapien
aggcctggccatttcaatccaacagggaactct

SEQ ID NO: 553718 - DNA, 33 bp, Homo sapien
aggcctggccatttcagtccaacagggaactct

SEQ ID NO: 553719 - DNA, 33 bp, Homo sapien
gcccaaacagaacacacgaaacagggaaactgg

SEQ ID NO: 553720 - DNA, 33 bp, Homo sapien
gcccaaacagaacacatgaaacagggaaactgg

SEQ ID NO: 553721 - DNA, 33 bp, Homo sapien
agtggatttcatgaaacttgttgaagtaacggg

SEQ ID NO: 553722 - DNA, 33 bp, Homo sapien
agtggatttcatgaaatttgttgaagtaacggg

SEQ ID NO: 553723 - DNA, 33 bp, Homo sapien
ttagggacctctcttcaaacttgctttgtacat

SEQ ID NO: 553724 - DNA, 33 bp, Homo sapien
ttagggacctctcttcgaacttgctttgtacat

SEQ ID NO: 553725 - DNA, 33 bp, Homo sapien
gttttctattttttgcaagatgtctgtgtaggt

SEQ ID NO: 553726 - DNA, 33 bp, Homo sapien
gttttctattttttgccagatgtctgtgtaggt

SEQ ID NO: 553727 - DNA, 33 bp, Homo sapien
tttttggaaatgtatccatgtcaatgcatttaa

SEQ ID NO: 553728 - DNA, 33 bp, Homo sapien
tttttggaaatgtatcgatgtcaatgcatttaa

SEQ ID NO: 553729 - DNA, 33 bp, Homo sapien
tgagcatgaatggccaatataattcctaggttc

SEQ ID NO: 553730 - DNA, 33 bp, Homo sapien
tgagcatgaatggccagtataattcctaggttc

SEQ ID NO: 553731 - DNA, 33 bp, Homo sapien
cccatttccacggagaagactcctggtgatcac

SEQ ID NO: 553732 - DNA, 33 bp, Homo sapien
cccatttccacggagatgactcctggtgatcac

SEQ ID NO: 553733 - DNA, 33 bp, Homo sapien
tattttggaaaacttcggaacttgatagtgaga

SEQ ID NO: 553734 - DNA, 33 bp, Homo sapien
tattttggaaaacttctgaacttgatagtgaga

SEQ ID NO: 553735 - DNA, 33 bp, Homo sapien
ttctcttcacaggactcaatatttttggtaaag

SEQ ID NO: 553736 - DNA, 33 bp, Homo sapien
ttctcttcacaggacttaatatttttggtaaag

SEQ ID NO: 553737 - DNA, 33 bp, Homo sapien
tcccaggctaactgaacgctcctgtcatgaaag

SEQ ID NO: 553738 - DNA, 33 bp, Homo sapien
tcccaggctaactgaatgctcctgtcatgaaag

SEQ ID NO: 553739 - DNA, 33 bp, Homo sapien
atgctaaaaattgtaaagcattcagaacagaaa

SEQ ID NO: 553740 - DNA, 33 bp, Homo sapien
atgctaaaaattgtaaggcattcagaacagaaa

SEQ ID NO: 553741 - DNA, 33 bp, Homo sapien
gcctaggtggttcaaacaatgctgtggaattag

SEQ ID NO: 553742 - DNA, 33 bp, Homo sapien
gcctaggtggttcaaataatgctgtggaattag

SEQ ID NO: 553743 - DNA, 33 bp, Homo sapien
cctgttttttccgtaacgcatagggatatggat

SEQ ID NO: 553744 - DNA, 33 bp, Homo sapien
cctgttttttccgtaatgcatagggatatggat

SEQ ID NO: 553745 - DNA, 33 bp, Homo sapien
gcgttctgttcttataacactgcatctggtcga

SEQ ID NO: 553746 - DNA, 33 bp, Homo sapien
gcgttctgttcttatagcactgcatctggtcga

SEQ ID NO: 553747 - DNA, 33 bp, Homo sapien
gaaggccacacactgacaaagggagggctgtga

SEQ ID NO: 553748 - DNA, 33 bp, Homo sapien
gaaggccacacactgagaaagggagggctgtga

SEQ ID NO: 553749 - DNA, 33 bp, Homo sapien
atctgtttgatgattaaatcccaggagtctcag

SEQ ID NO: 553750 - DNA, 33 bp, Homo sapien
atctgtttgatgattagatcccaggagtctcag

SEQ ID NO: 553751 - DNA, 33 bp, Homo sapien
agaaaaaaacaaatggcagtgcggccagcatgt

SEQ ID NO: 553752 - DNA, 33 bp, Homo sapien
agaaaaaaacaaatggtagtgcggccagcatgt

SEQ ID NO: 553753 - DNA, 33 bp, Homo sapien
gcacgtatggataggacactgttttcgtccctt

SEQ ID NO: 553754 - DNA, 33 bp, Homo sapien
gcacgtatggataggatactgttttcgtccctt

SEQ ID NO: 553755 - DNA, 33 bp, Homo sapien
gatatggtcatgaaaaagaaaacacttgaaaga

SEQ ID NO: 553756 - DNA, 33 bp, Homo sapien
gatatggtcatgaaaaggaaaacacttgaaaga

SEQ ID NO: 553757 - DNA, 33 bp, Homo sapien
gcagttgtttattaggcagttagcttcaaacga

SEQ ID NO: 553758 - DNA, 33 bp, Homo sapien
gcagttgtttattaggtagttagcttcaaacga

SEQ ID NO: 553759 - DNA, 33 bp, Homo sapien
ttcatctttaaaacccaatgactgcaattccaa

SEQ ID NO: 553760 - DNA, 33 bp, Homo sapien
ttcatctttaaaacccgatgactgcaattccaa

SEQ ID NO: 553761 - DNA, 33 bp, Homo sapien
tgactccatcgtgaaacaagcaagacccattcc

SEQ ID NO: 553762 - DNA, 33 bp, Homo sapien
tgactccatcgtgaaataagcaagacccattcc

SEQ ID NO: 553763 - DNA, 33 bp, Homo sapien
actacacctctacaccaggcttaaatgcatcct

SEQ ID NO: 553764 - DNA, 33 bp, Homo sapien
actacacctctacaccgggcttaaatgcatcct

SEQ ID NO: 553765 - DNA, 33 bp, Homo sapien
ctctcagcttggaaaagtagatcattgtcaaaa

SEQ ID NO: 553766 - DNA, 33 bp, Homo sapien
ctctcagcttggaaaattagatcattgtcaaaa

SEQ ID NO: 553767 - DNA, 33 bp, Homo sapien
cctgtgtgacactgggaagattgcctaacctct

SEQ ID NO: 553768 - DNA, 33 bp, Homo sapien
cctgtgtgacactgggcagattgcctaacctct

SEQ ID NO: 553769 - DNA, 33 bp, Homo sapien
aaaagccagcgttggtcaatcagagaataagac

SEQ ID NO: 553770 - DNA, 33 bp, Homo sapien
aaaagccagcgttggtgaatcagagaataagac

SEQ ID NO: 553771 - DNA, 33 bp, Homo sapien
atcaataatttaaaacagtgattctcaacattt

SEQ ID NO: 553772 - DNA, 33 bp, Homo sapien
atcaataatttaaaacggtgattctcaacattt

SEQ ID NO: 553773 - DNA, 33 bp, Homo sapien
tgctttcaatttcataaactccaagacaattac

SEQ ID NO: 553774 - DNA, 33 bp, Homo sapien
tgctttcaatttcatagactccaagacaattac

SEQ ID NO: 553775 - DNA, 33 bp, Homo sapien
gatccaaaatggctaaatacccaccaggtctgt

SEQ ID NO: 553776 - DNA, 33 bp, Homo sapien
gatccaaaatggctaactacccaccaggtctgt

SEQ ID NO: 553777 - DNA, 33 bp, Homo sapien
gaaccaagcttgtgtacagtaacttgtgttgtt

SEQ ID NO: 553778 - DNA, 33 bp, Homo sapien
gaaccaagcttgtgtagagtaacttgtgttgtt

SEQ ID NO: 553779 - DNA, 33 bp, Homo sapien
tctcttacatggttaccgggaatgcaaaatggt

SEQ ID NO: 553780 - DNA, 33 bp, Homo sapien
tctcttacatggttactgggaatgcaaaatggt

SEQ ID NO: 553781 - DNA, 33 bp, Homo sapien
catgagtaggcccaaactaggtgctccgtaagt

SEQ ID NO: 553782 - DNA, 33 bp, Homo sapien
catgagtaggcccaaagtaggtgctccgtaagt

SEQ ID NO: 553783 - DNA, 33 bp, Homo sapien
gttttaaccaagaggaataacagaagattgctg

SEQ ID NO: 553784 - DNA, 33 bp, Homo sapien
gttttaaccaagaggagtaacagaagattgctg

SEQ ID NO: 553785 - DNA, 33 bp, Homo sapien
taaaaagctagctaaccgaggatggattcccaa

SEQ ID NO: 553786 - DNA, 33 bp, Homo sapien
taaaaagctagctaactgaggatggattcccaa

SEQ ID NO: 553787 - DNA, 33 bp, Homo sapien
agtctcttttctggtccagtctcattttatagg

SEQ ID NO: 553788 - DNA, 33 bp, Homo sapien
agtctcttttctggtcgagtctcattttatagg

SEQ ID NO: 553789 - DNA, 33 bp, Homo sapien
cttcgttgtcatggcaatgattaacctcatgta

SEQ ID NO: 553790 - DNA, 33 bp, Homo sapien
cttcgttgtcatggcagtgattaacctcatgta

SEQ ID NO: 553791 - DNA, 33 bp, Homo sapien
gtaagcatactacagaaagtcgtttaaaaagaa

SEQ ID NO: 553792 - DNA, 33 bp, Homo sapien
gtaagcatactacagagagtcgtttaaaaagaa

SEQ ID NO: 553793 - DNA, 33 bp, Homo sapien
tgctgagccattctggaagagtctctacccctt

SEQ ID NO: 553794 - DNA, 33 bp, Homo sapien
tgctgagccattctgggagagtctctacccctt

SEQ ID NO: 553795 - DNA, 33 bp, Homo sapien
aaatgatttgctcaaacacatactgcaagttgg

SEQ ID NO: 553796 - DNA, 33 bp, Homo sapien
aaatgatttgctcaaagacatactgcaagttgg

SEQ ID NO: 553797 - DNA, 33 bp, Homo sapien
aattaaaagtctctacacaaagcgtgccaggtg

SEQ ID NO: 553798 - DNA, 33 bp, Homo sapien
aattaaaagtctctacgcaaagcgtgccaggtg

SEQ ID NO: 553799 - DNA, 33 bp, Homo sapien
agattctctgtattcacgtgttgaaagaattag

SEQ ID NO: 553800 - DNA, 33 bp, Homo sapien
agattctctgtattcaggtgttgaaagaattag

SEQ ID NO: 553801 - DNA, 33 bp, Homo sapien
aaactccatccaccgcaccacaggagcgaggtc

SEQ ID NO: 553802 - DNA, 33 bp, Homo sapien
aaactccatccaccgcgccacaggagcgaggtc

SEQ ID NO: 553803 - DNA, 33 bp, Homo sapien
tgtgactcagctgcaccagggtaggagactcct

SEQ ID NO: 553804 - DNA, 33 bp, Homo sapien
tgtgactcagctgcactagggtaggagactcct

SEQ ID NO: 553805 - DNA, 33 bp, Homo sapien
cacgctactacccgtcaagggctggcagggtcc

SEQ ID NO: 553806 - DNA, 33 bp, Homo sapien
cacgctactacccgtcgagggctggcagggtcc

SEQ ID NO: 553807 - DNA, 33 bp, Homo sapien
cctttcacttaatttaccattgccagttttctg

SEQ ID NO: 553808 - DNA, 33 bp, Homo sapien
cctttcacttaatttatcattgccagttttctg

SEQ ID NO: 553809 - DNA, 33 bp, Homo sapien
aggatgatattgatgacacagaaaactggcaat

SEQ ID NO: 553810 - DNA, 33 bp, Homo sapien
aggatgatattgatgatacagaaaactggcaat

SEQ ID NO: 553811 - DNA, 33 bp, Homo sapien
ccaggacacatggacaaggtcttcccggcacgt

SEQ ID NO: 553812 - DNA, 33 bp, Homo sapien
ccaggacacatggacacggtcttcccggcacgt

SEQ ID NO: 553813 - DNA, 33 bp, Homo sapien
cagtgtcctgagtccactatttccattgaggga

SEQ ID NO: 553814 - DNA, 33 bp, Homo sapien
cagtgtcctgagtccattatttccattgaggga

SEQ ID NO: 553815 - DNA, 33 bp, Homo sapien
tagccagccttcaggacggtcccggatgacact

SEQ ID NO: 553816 - DNA, 33 bp, Homo sapien
tagccagccttcaggatggtcccggatgacact

SEQ ID NO: 553817 - DNA, 33 bp, Homo sapien
tgtacccctggtggtcaaagtacagtcacgcac

SEQ ID NO: 553818 - DNA, 33 bp, Homo sapien
tgtacccctggtggtcgaagtacagtcacgcac

SEQ ID NO: 553819 - DNA, 33 bp, Homo sapien
cataccatagataaatcagatcctgaaagattt

SEQ ID NO: 553820 - DNA, 33 bp, Homo sapien
cataccatagataaattagatcctgaaagattt

SEQ ID NO: 553821 - DNA, 33 bp, Homo sapien
tgacgtatgagttttacacgtgtcatgtggccc

SEQ ID NO: 553822 - DNA, 33 bp, Homo sapien
tgacgtatgagttttagacgtgtcatgtggccc

SEQ ID NO: 553823 - DNA, 33 bp, Homo sapien
ctgctcactagacttacattgtaatagcctgcc

SEQ ID NO: 553824 - DNA, 33 bp, Homo sapien
ctgctcactagacttatattgtaatagcctgcc

SEQ ID NO: 553825 - DNA, 33 bp, Homo sapien
aaatgagaaggtggaaaggtgtcttagtctact

SEQ ID NO: 553826 - DNA, 33 bp, Homo sapien
aaatgagaaggtggaagggtgtcttagtctact

SEQ ID NO: 553827 - DNA, 33 bp, Homo sapien
cagaactccatgagataaatttctcttcattat

SEQ ID NO: 553828 - DNA, 33 bp, Homo sapien
cagaactccatgagatcaatttctcttcattat

SEQ ID NO: 553829 - DNA, 33 bp, Homo sapien
attactaaggtgataaattagtgttgctttaaa

SEQ ID NO: 553830 - DNA, 33 bp, Homo sapien
attactaaggtgataagttagtgttgctttaaa

SEQ ID NO: 553831 - DNA, 33 bp, Homo sapien
ctccccatcctacttaaaaatgttgacactgtt

SEQ ID NO: 553832 - DNA, 33 bp, Homo sapien
ctccccatcctacttacaaatgttgacactgtt

SEQ ID NO: 553833 - DNA, 33 bp, Homo sapien
agaagtgcagcttgaaatgggctaaaggcagtg

SEQ ID NO: 553834 - DNA, 33 bp, Homo sapien
agaagtgcagcttgaagtgggctaaaggcagtg

SEQ ID NO: 553835 - DNA, 33 bp, Homo sapien
caactggcacaagctacaggacaaggagaagga

SEQ ID NO: 553836 - DNA, 33 bp, Homo sapien
caactggcacaagctataggacaaggagaagga

SEQ ID NO: 553837 - DNA, 33 bp, Homo sapien
gttaccatatagggaagaaggtctaaatatgaa

SEQ ID NO: 553838 - DNA, 33 bp, Homo sapien
gttaccatatagggaataaggtctaaatatgaa

SEQ ID NO: 553839 - DNA, 33 bp, Homo sapien
gtgagtttcttaatgacaaaaagtacaatgagg

SEQ ID NO: 553840 - DNA, 33 bp, Homo sapien
gtgagtttcttaatgagaaaaagtacaatgagg

SEQ ID NO: 553841 - DNA, 33 bp, Homo sapien
ctatcagtctcctcatcataagcaaagccccac

SEQ ID NO: 553842 - DNA, 33 bp, Homo sapien
ctatcagtctcctcatgataagcaaagccccac

SEQ ID NO: 553843 - DNA, 33 bp, Homo sapien
ttgagtgcgaagatgcagagaaggccgaccggg

SEQ ID NO: 553844 - DNA, 33 bp, Homo sapien
ttgagtgcgaagatgcggagaaggccgaccggg

SEQ ID NO: 553845 - DNA, 33 bp, Homo sapien
agtgtgattaaaatgacagcacaattgctgttg

SEQ ID NO: 553846 - DNA, 33 bp, Homo sapien
agtgtgattaaaatgagagcacaattgctgttg

SEQ ID NO: 553847 - DNA, 33 bp, Homo sapien
tccattgagtaaaagaagagagccataggagct

SEQ ID NO: 553848 - DNA, 33 bp, Homo sapien
tccattgagtaaaagatgagagccataggagct

SEQ ID NO: 553849 - DNA, 33 bp, Homo sapien
gtagccaaaactcttacaaattctatggtggac

SEQ ID NO: 553850 - DNA, 33 bp, Homo sapien
gtagccaaaactcttataaattctatggtggac

SEQ ID NO: 553851 - DNA, 33 bp, Homo sapien
accaaagtgctattaccggaaaagacaaatgtc

SEQ ID NO: 553852 - DNA, 33 bp, Homo sapien
accaaagtgctattactggaaaagacaaatgtc

SEQ ID NO: 553853 - DNA, 33 bp, Homo sapien
ggctggataggagaaccgcggtacatacagtcc

SEQ ID NO: 553854 - DNA, 33 bp, Homo sapien
ggctggataggagaactgcggtacatacagtcc

SEQ ID NO: 553855 - DNA, 33 bp, Homo sapien
gctccaaagcatctgacagatatagtttagctt

SEQ ID NO: 553856 - DNA, 33 bp, Homo sapien
gctccaaagcatctgagagatatagtttagctt

SEQ ID NO: 553857 - DNA, 33 bp, Homo sapien
cttgggagtctaagaactatttttgggctccaa

SEQ ID NO: 553858 - DNA, 33 bp, Homo sapien
cttgggagtctaagaagtatttttgggctccaa

SEQ ID NO: 553859 - DNA, 33 bp, Homo sapien
atagtgatgttgggataaggattacataagcca

SEQ ID NO: 553860 - DNA, 33 bp, Homo sapien
atagtgatgttgggatcaggattacataagcca

SEQ ID NO: 553861 - DNA, 33 bp, Homo sapien
gcttagtgacatagaaaaacttgcctatggcta

SEQ ID NO: 553862 - DNA, 33 bp, Homo sapien
gcttagtgacatagaataacttgcctatggcta

SEQ ID NO: 553863 - DNA, 33 bp, Homo sapien
tctcatctctgtagtcacagtaccttcttttct

SEQ ID NO: 553864 - DNA, 33 bp, Homo sapien
tctcatctctgtagtcgcagtaccttcttttct

SEQ ID NO: 553865 - DNA, 33 bp, Homo sapien
aaaattactacagataaggtggcttaaaacaaa

SEQ ID NO: 553866 - DNA, 33 bp, Homo sapien
aaaattactacagatacggtggcttaaaacaaa

SEQ ID NO: 553867 - DNA, 33 bp, Homo sapien
aaactaaaacacatacacccagaaatgtgccca

SEQ ID NO: 553868 - DNA, 33 bp, Homo sapien
aaactaaaacacatacgcccagaaatgtgccca

SEQ ID NO: 553869 - DNA, 33 bp, Homo sapien
aacaaatgctacccccaatgttctgcactaata

SEQ ID NO: 553870 - DNA, 33 bp, Homo sapien
aacaaatgctaccccccatgttctgcactaata

SEQ ID NO: 553871 - DNA, 33 bp, Homo sapien
ccccagatgggacaatcatgttgatgtgaaagt

SEQ ID NO: 553872 - DNA, 33 bp, Homo sapien
ccccagatgggacaattatgttgatgtgaaagt

SEQ ID NO: 553873 - DNA, 33 bp, Homo sapien
ataataaatgaaagtacgatgtgcattggaagg

SEQ ID NO: 553874 - DNA, 33 bp, Homo sapien
ataataaatgaaagtatgatgtgcattggaagg

SEQ ID NO: 553875 - DNA, 33 bp, Homo sapien
tcacattccggtgtaagtacaggcaaaaaataa

SEQ ID NO: 553876 - DNA, 33 bp, Homo sapien
tcacattccggtgtaattacaggcaaaaaataa

SEQ ID NO: 553877 - DNA, 33 bp, Homo sapien
tacagatgggtaaactaagctccaagaggtgaa

SEQ ID NO: 553878 - DNA, 33 bp, Homo sapien
tacagatgggtaaactgagctccaagaggtgaa

SEQ ID NO: 553879 - DNA, 33 bp, Homo sapien
atggtgcagctttccaagagctatgtgcatggg

SEQ ID NO: 553880 - DNA, 33 bp, Homo sapien
atggtgcagctttccaggagctatgtgcatggg

SEQ ID NO: 553881 - DNA, 33 bp, Homo sapien
gcagatgtgtatgcagaagtagtatgaaaatcc

SEQ ID NO: 553882 - DNA, 33 bp, Homo sapien
gcagatgtgtatgcagtagtagtatgaaaatcc

SEQ ID NO: 553883 - DNA, 33 bp, Homo sapien
aacaatgtactcttctcacgaaatgccttttgt

SEQ ID NO: 553884 - DNA, 33 bp, Homo sapien
aacaatgtactcttcttacgaaatgccttttgt

SEQ ID NO: 553885 - DNA, 33 bp, Homo sapien
cagttaattagtggaaaagccacaacaggaaag

SEQ ID NO: 553886 - DNA, 33 bp, Homo sapien
cagttaattagtggaagagccacaacaggaaag

SEQ ID NO: 553887 - DNA, 33 bp, Homo sapien
tcgtgcactgatcttgcaatctgcaactatgtt

SEQ ID NO: 553888 - DNA, 33 bp, Homo sapien
tcgtgcactgatcttgtaatctgcaactatgtt

SEQ ID NO: 553889 - DNA, 33 bp, Homo sapien
aggacccagataagaacacagttttttcgcatt

SEQ ID NO: 553890 - DNA, 33 bp, Homo sapien
aggacccagataagaatacagttttttcgcatt

SEQ ID NO: 553891 - DNA, 33 bp, Homo sapien
aaagaagaggtgatccaatcagcatattttttc

SEQ ID NO: 553892 - DNA, 33 bp, Homo sapien
aaagaagaggtgatccgatcagcatattttttc

SEQ ID NO: 553893 - DNA, 33 bp, Homo sapien
aggagcttgtgctataagtcccatcagccaaat

SEQ ID NO: 553894 - DNA, 33 bp, Homo sapien
aggagcttgtgctatatgtcccatcagccaaat

SEQ ID NO: 553895 - DNA, 33 bp, Homo sapien
tccacctcccaggatgaattgctgtccacacac

SEQ ID NO: 553896 - DNA, 33 bp, Homo sapien
tccacctcccaggatgcattgctgtccacacac

SEQ ID NO: 553897 - DNA, 33 bp, Homo sapien
gagggacagggaaaacagaagcggacacccttg

SEQ ID NO: 553898 - DNA, 33 bp, Homo sapien
gagggacagggaaaacggaagcggacacccttg

SEQ ID NO: 553899 - DNA, 33 bp, Homo sapien
ttatctgggcaagtgacatattctcgtgggaac

SEQ ID NO: 553900 - DNA, 33 bp, Homo sapien
ttatctgggcaagtgatatattctcgtgggaac

SEQ ID NO: 553901 - DNA, 33 bp, Homo sapien
taagtgcctcctgtgacatacaaaagagacaca

SEQ ID NO: 553902 - DNA, 33 bp, Homo sapien
taagtgcctcctgtgatatacaaaagagacaca

SEQ ID NO: 553903 - DNA, 33 bp, Homo sapien
cacaagactacaagaaaatgtttgtggtataat

SEQ ID NO: 553904 - DNA, 33 bp, Homo sapien
cacaagactacaagaagatgtttgtggtataat

SEQ ID NO: 553905 - DNA, 33 bp, Homo sapien
ttcgggaatgcagttacctcatcatggtcagtc

SEQ ID NO: 553906 - DNA, 33 bp, Homo sapien
ttcgggaatgcagttatctcatcatggtcagtc

SEQ ID NO: 553907 - DNA, 33 bp, Homo sapien
aaagcaagtgattagtaaatgcctgtccgttga

SEQ ID NO: 553908 - DNA, 33 bp, Homo sapien
aaagcaagtgattagtgaatgcctgtccgttga

SEQ ID NO: 553909 - DNA, 33 bp, Homo sapien
ctgttcttgtgcaagtcaagcacgctcctgcct

SEQ ID NO: 553910 - DNA, 33 bp, Homo sapien
ctgttcttgtgcaagtgaagcacgctcctgcct

SEQ ID NO: 553911 - DNA, 33 bp, Homo sapien
cttccataacaaagtaacatggcctgggcggct

SEQ ID NO: 553912 - DNA, 33 bp, Homo sapien
cttccataacaaagtagcatggcctgggcggct

SEQ ID NO: 553913 - DNA, 33 bp, Homo sapien
ctgagctattcacaaaagctgatgggaatacag

SEQ ID NO: 553914 - DNA, 33 bp, Homo sapien
ctgagctattcacaaaggctgatgggaatacag

SEQ ID NO: 553915 - DNA, 33 bp, Homo sapien
aactgcaaactgaaaacgtataagccattgcta

SEQ ID NO: 553916 - DNA, 33 bp, Homo sapien
aactgcaaactgaaaatgtataagccattgcta

SEQ ID NO: 553917 - DNA, 33 bp, Homo sapien
tttcatggttcctgtacggggctccctttaaaa

SEQ ID NO: 553918 - DNA, 33 bp, Homo sapien
tttcatggttcctgtatggggctccctttaaaa

SEQ ID NO: 553919 - DNA, 33 bp, Homo sapien
tcctggtgctggctatcaagaaggaaaagctta

SEQ ID NO: 553920 - DNA, 33 bp, Homo sapien
tcctggtgctggctattaagaaggaaaagctta

SEQ ID NO: 553921 - DNA, 33 bp, Homo sapien
ggctaaagagattgccaggattgcatgaattgg

SEQ ID NO: 553922 - DNA, 33 bp, Homo sapien
ggctaaagagattgcctggattgcatgaattgg

SEQ ID NO: 553923 - DNA, 33 bp, Homo sapien
cctgactgaattgtcaacccacaaaatagtaaa

SEQ ID NO: 553924 - DNA, 33 bp, Homo sapien
cctgactgaattgtcatcccacaaaatagtaaa

SEQ ID NO: 553925 - DNA, 33 bp, Homo sapien
agaagaccgaaccaccaaatggagccctgactg

SEQ ID NO: 553926 - DNA, 33 bp, Homo sapien
agaagaccgaaccaccgaatggagccctgactg

SEQ ID NO: 553927 - DNA, 33 bp, Homo sapien
tctttcaggatggcaacttcccctcaggctctg

SEQ ID NO: 553928 - DNA, 33 bp, Homo sapien
tctttcaggatggcaagttcccctcaggctctg

SEQ ID NO: 553929 - DNA, 33 bp, Homo sapien
agttctggtacatagcgcatgctaatatttgtt

SEQ ID NO: 553930 - DNA, 33 bp, Homo sapien
agttctggtacatagctcatgctaatatttgtt

SEQ ID NO: 553931 - DNA, 33 bp, Homo sapien
caaaacctgactctcaacatgaggaagtgttag

SEQ ID NO: 553932 - DNA, 33 bp, Homo sapien
caaaacctgactctcatcatgaggaagtgttag

SEQ ID NO: 553933 - DNA, 33 bp, Homo sapien
gttttataacgatgcgccagaatcctctacacg

SEQ ID NO: 553934 - DNA, 33 bp, Homo sapien
gttttataacgatgcgtcagaatcctctacacg

SEQ ID NO: 553935 - DNA, 33 bp, Homo sapien
gactacgtcatcttccaaagtcttcacagggcc

SEQ ID NO: 553936 - DNA, 33 bp, Homo sapien
gactacgtcatcttccgaagtcttcacagggcc

SEQ ID NO: 553937 - DNA, 33 bp, Homo sapien
gggtgaaacctttgtacatggcaggtgagaatg

SEQ ID NO: 553938 - DNA, 33 bp, Homo sapien
gggtgaaacctttgtatatggcaggtgagaatg

SEQ ID NO: 553939 - DNA, 33 bp, Homo sapien
agagcctacaatagggacaattgacctggtctg

SEQ ID NO: 553940 - DNA, 33 bp, Homo sapien
agagcctacaataggggcaattgacctggtctg

SEQ ID NO: 553941 - DNA, 33 bp, Homo sapien
ccataccaactttcatgacccagccacagaagt

SEQ ID NO: 553942 - DNA, 33 bp, Homo sapien
ccataccaactttcattacccagccacagaagt

SEQ ID NO: 553943 - DNA, 33 bp, Homo sapien
tgtgccttgttagttcaaagacagagttgaact

SEQ ID NO: 553944 - DNA, 33 bp, Homo sapien
tgtgccttgttagttccaagacagagttgaact

SEQ ID NO: 553945 - DNA, 33 bp, Homo sapien
aatttccagatcctgaaccctcataagactgtt

SEQ ID NO: 553946 - DNA, 33 bp, Homo sapien
aatttccagatcctgagccctcataagactgtt

SEQ ID NO: 553947 - DNA, 33 bp, Homo sapien
gtagtggcagtggaaaagaatgtatgagttcag

SEQ ID NO: 553948 - DNA, 33 bp, Homo sapien
gtagtggcagtggaaaggaatgtatgagttcag

SEQ ID NO: 553949 - DNA, 33 bp, Homo sapien
gaaggaacttcacccaactgcaggaggtaactg

SEQ ID NO: 553950 - DNA, 33 bp, Homo sapien
gaaggaacttcacccatctgcaggaggtaactg

SEQ ID NO: 553951 - DNA, 33 bp, Homo sapien
aggtaactgagactacactatgctgaggttggt

SEQ ID NO: 553952 - DNA, 33 bp, Homo sapien
aggtaactgagactactctatgctgaggttggt

SEQ ID NO: 553953 - DNA, 33 bp, Homo sapien
caccacctttgaaacacgcttcttaaactcacc

SEQ ID NO: 553954 - DNA, 33 bp, Homo sapien
caccacctttgaaacatgcttcttaaactcacc

SEQ ID NO: 553955 - DNA, 33 bp, Homo sapien
cacagggccttttcacactctgtttcctgtgcc

SEQ ID NO: 553956 - DNA, 33 bp, Homo sapien
cacagggccttttcacgctctgtttcctgtgcc

SEQ ID NO: 553957 - DNA, 33 bp, Homo sapien
tccttctgcataatgccatgatcgagttcttct

SEQ ID NO: 553958 - DNA, 33 bp, Homo sapien
tccttctgcataatgctatgatcgagttcttct

SEQ ID NO: 553959 - DNA, 33 bp, Homo sapien
ggctagccctgttggaagggccagaaatctttg

SEQ ID NO: 553960 - DNA, 33 bp, Homo sapien
ggctagccctgttggaggggccagaaatctttg

SEQ ID NO: 553961 - DNA, 33 bp, Homo sapien
ttcagtgcaattaacaacagtaaggagtggtga

SEQ ID NO: 553962 - DNA, 33 bp, Homo sapien
ttcagtgcaattaacaccagtaaggagtggtga

SEQ ID NO: 553963 - DNA, 33 bp, Homo sapien
taattaagattcttaaatcaaaatgttaaattc

SEQ ID NO: 553964 - DNA, 33 bp, Homo sapien
taattaagattcttaattcaaaatgttaaattc

SEQ ID NO: 553965 - DNA, 33 bp, Homo sapien
cttatatcatggaacacatagttttgcctctct

SEQ ID NO: 553966 - DNA, 33 bp, Homo sapien
cttatatcatggaacatatagttttgcctctct

SEQ ID NO: 553967 - DNA, 33 bp, Homo sapien
tcagttgtaaaaatgagcctgaagccatatctg

SEQ ID NO: 553968 - DNA, 33 bp, Homo sapien
tcagttgtaaaaatgatcctgaagccatatctg

SEQ ID NO: 553969 - DNA, 33 bp, Homo sapien
caacatatagcagagagaagtcattcttgtacc

SEQ ID NO: 553970 - DNA, 33 bp, Homo sapien
caacatatagcagagataagtcattcttgtacc

SEQ ID NO: 553971 - DNA, 33 bp, Homo sapien
actaaaattaatcataagcttggtcaagaagca

SEQ ID NO: 553972 - DNA, 33 bp, Homo sapien
actaaaattaatcatatgcttggtcaagaagca

SEQ ID NO: 553973 - DNA, 33 bp, Homo sapien
agtaagatggcaaaaccattcaaaataaagtcc

SEQ ID NO: 553974 - DNA, 33 bp, Homo sapien
agtaagatggcaaaacgattcaaaataaagtcc

SEQ ID NO: 553975 - DNA, 33 bp, Homo sapien
ctactcaaacagcaaagcctatagttgggttgc

SEQ ID NO: 553976 - DNA, 33 bp, Homo sapien
ctactcaaacagcaaatcctatagttgggttgc

SEQ ID NO: 553977 - DNA, 33 bp, Homo sapien
aacatttcttaaatgacgagcagatgaatgaat

SEQ ID NO: 553978 - DNA, 33 bp, Homo sapien
aacatttcttaaatgatgagcagatgaatgaat

SEQ ID NO: 553979 - DNA, 33 bp, Homo sapien
tccctgatttccagaaccagcgctggctcctac

SEQ ID NO: 553980 - DNA, 33 bp, Homo sapien
tccctgatttccagaagcagcgctggctcctac

SEQ ID NO: 553981 - DNA, 33 bp, Homo sapien
gcaaggtgatgtgggccatctcgcagatgactt

SEQ ID NO: 553982 - DNA, 33 bp, Homo sapien
gcaaggtgatgtgggctatctcgcagatgactt

SEQ ID NO: 553983 - DNA, 33 bp, Homo sapien; identical to SEQ ID NO: 553981

SEQ ID NO: 553984 - DNA, 33 bp, Homo sapien; identical to SEQ ID NO: 553982

SEQ ID NO: 553985 - DNA, 33 bp, Homo sapien
tgctgacccgtggggacgttcactctcaagtca

SEQ ID NO: 553986 - DNA, 33 bp, Homo sapien
tgctgacccgtggggatgttcactctcaagtca

SEQ ID NO: 553987 - DNA, 33 bp, Homo sapien
gaaaacttctcccaaacgtaagccctgtcattt

SEQ ID NO: 553988 - DNA, 33 bp, Homo sapien
gaaaacttctcccaaatgtaagccctgtcattt

SEQ ID NO: 553989 - DNA, 33 bp, Homo sapien
agactgccacgattcagatatggactctggctc

SEQ ID NO: 553990 - DNA, 33 bp, Homo sapien
agactgccacgattcatatatggactctggctc

SEQ ID NO: 553991 - DNA, 33 bp, Homo sapien
ttttgctacagttacaacattccaactgcatgc

SEQ ID NO: 553992 - DNA, 33 bp, Homo sapien
ttttgctacagttacagcattccaactgcatgc

SEQ ID NO: 553993 - DNA, 33 bp, Homo sapien
tgagtacctactatgaactaagcctctatgtgc

SEQ ID NO: 553994 - DNA, 33 bp, Homo sapien
tgagtacctactatgagctaagcctctatgtgc

SEQ ID NO: 553995 - DNA, 33 bp, Homo sapien
cattttgcctgttttaactccactaatcctcac

SEQ ID NO: 553996 - DNA, 33 bp, Homo sapien
cattttgcctgttttagctccactaatcctcac

SEQ ID NO: 553997 - DNA, 33 bp, Homo sapien
gaaaaagaaatttgcaaggaaatgtgatgactt

SEQ ID NO: 553998 - DNA, 33 bp, Homo sapien
gaaaaagaaatttgcatggaaatgtgatgactt

SEQ ID NO: 553999 - DNA, 33 bp, Homo sapien
ctccatggggtcagagaaatccacattgtaaac

SEQ ID NO: 554000 - DNA, 33 bp, Homo sapien
ctccatggggtcagaggaatccacattgtaaac

SEQ ID NO: 554001 - DNA, 33 bp, Homo sapien
caggcccggcatcatcccttactgcgctgctcc

SEQ ID NO: 554002 - DNA, 33 bp, Homo sapien
caggcccggcatcatctcttactgcgctgctcc

SEQ ID NO: 554003 - DNA, 33 bp, Homo sapien
cataatgaaaccttccagctagaaaacatcctg

SEQ ID NO: 554004 - DNA, 33 bp, Homo sapien
cataatgaaaccttccggctagaaaacatcctg

SEQ ID NO: 554005 - DNA, 33 bp, Homo sapien
ggtggactgtgacctccagggcaaggcgtttgc

SEQ ID NO: 554006 - DNA, 33 bp, Homo sapien
ggtggactgtgacctctagggcaaggcgtttgc

SEQ ID NO: 554007 - DNA, 33 bp, Homo sapien
aggctgtttctctctgacacacgtttccattct

SEQ ID NO: 554008 - DNA, 33 bp, Homo sapien
aggctgtttctctctggcacacgtttccattct

SEQ ID NO: 554009 - DNA, 33 bp, Homo sapien
cacgtttccattctccaaccaggtcagctgtag

SEQ ID NO: 554010 - DNA, 33 bp, Homo sapien
cacgtttccattctccgaccaggtcagctgtag

SEQ ID NO: 554011 - DNA, 33 bp, Homo sapien
ggactatgtaaaaagaccacagctatgattgat

SEQ ID NO: 554012 - DNA, 33 bp, Homo sapien
ggactatgtaaaaagatcacagctatgattgat

SEQ ID NO: 554013 - DNA, 33 bp, Homo sapien
aattcttgagccccaacactgactgcacaccca

SEQ ID NO: 554014 - DNA, 33 bp, Homo sapien
aattcttgagccccaatactgactgcacaccca

SEQ ID NO: 554015 - DNA, 33 bp, Homo sapien
gacattagagtgatagaaagatgtaacagtgag

SEQ ID NO: 554016 - DNA, 33 bp, Homo sapien
gacattagagtgataggaagatgtaacagtgag

SEQ ID NO: 554017 - DNA, 33 bp, Homo sapien
cggtttagaataatcccctcctcattgccatta

SEQ ID NO: 554018 - DNA, 33 bp, Homo sapien
cggtttagaataatcctctcctcattgccatta

SEQ ID NO: 554019 - DNA, 33 bp, Homo sapien
gcaccacagactcagtaactaaaacaatagaca

SEQ ID NO: 554020 - DNA, 33 bp, Homo sapien
gcaccacagactcagtgactaaaacaatagaca

SEQ ID NO: 554021 - DNA, 33 bp, Homo sapien
gcacctatttcattcaccactgagttcggatgg

SEQ ID NO: 554022 - DNA, 33 bp, Homo sapien
gcacctatttcattcatcactgagttcggatgg

SEQ ID NO: 554023 - DNA, 33 bp, Homo sapien
tattgggcacttctcacgaatggagctagcaga

SEQ ID NO: 554024 - DNA, 33 bp, Homo sapien
tattgggcacttctcatgaatggagctagcaga

SEQ ID NO: 554025 - DNA, 33 bp, Homo sapien
aggtagtcaaagaagtaaccctgttctcaggat

SEQ ID NO: 554026 - DNA, 33 bp, Homo sapien
aggtagtcaaagaagtgaccctgttctcaggat

SEQ ID NO: 554027 - DNA, 33 bp, Homo sapien
gggccacctcgcagataacctgaaggcaaaggt

SEQ ID NO: 554028 - DNA, 33 bp, Homo sapien
gggccacctcgcagatgacctgaaggcaaaggt

SEQ ID NO: 554029 - DNA, 33 bp, Homo sapien
tagatcattagcaatcaagactcctaacaaccc

SEQ ID NO: 554030 - DNA, 33 bp, Homo sapien
tagatcattagcaatcgagactcctaacaaccc

SEQ ID NO: 554031 - DNA, 33 bp, Homo sapien
tttcctaatgctgatacgactaattaccaaaac

SEQ ID NO: 554032 - DNA, 33 bp, Homo sapien
tttcctaatgctgatatgactaattaccaaaac

SEQ ID NO: 554033 - DNA, 33 bp, Homo sapien
cgacaattaaagtcaaagaaagaattctgaaag

SEQ ID NO: 554034 - DNA, 33 bp, Homo sapien
cgacaattaaagtcaaggaaagaattctgaaag

SEQ ID NO: 554035 - DNA, 33 bp, Homo sapien
gctgtgagcaccctacaaaatgaccaggtacag

SEQ ID NO: 554036 - DNA, 33 bp, Homo sapien
gctgtgagcaccctaccaaatgaccaggtacag

SEQ ID NO: 554037 - DNA, 33 bp, Homo sapien
aggaggacaaaaagggaaattgtggcagggacc

SEQ ID NO: 554038 - DNA, 33 bp, Homo sapien
aggaggacaaaaaggggaattgtggcagggacc

SEQ ID NO: 554039 - DNA, 33 bp, Homo sapien
gctgtgacctagtagaatagtggcattaaaaca

SEQ ID NO: 554040 - DNA, 33 bp, Homo sapien
gctgtgacctagtagagtagtggcattaaaaca

SEQ ID NO: 554041 - DNA, 33 bp, Homo sapien
attaaaacataccagtaaatccatcatggtttt

SEQ ID NO: 554042 - DNA, 33 bp, Homo sapien
attaaaacataccagtgaatccatcatggtttt

SEQ ID NO: 554043 - DNA, 33 bp, Homo sapien
ttatatgacattaataagtgtgtcaaatgaatc

SEQ ID NO: 554044 - DNA, 33 bp, Homo sapien
ttatatgacattaatacgtgtgtcaaatgaatc

SEQ ID NO: 554045 - DNA, 33 bp, Homo sapien
ccctatttgaaagctacacctattaactcctat

SEQ ID NO: 554046 - DNA, 33 bp, Homo sapien
ccctatttgaaagctatacctattaactcctat

SEQ ID NO: 554047 - DNA, 33 bp, Homo sapien
tgtaggaagagctcaactgctgaactcttacca

SEQ ID NO: 554048 - DNA, 33 bp, Homo sapien
tgtaggaagagctcaattgctgaactcttacca

SEQ ID NO: 554049 - DNA, 33 bp, Homo sapien
gagggaagaacacgtaataagacacagagcaga

SEQ ID NO: 554050 - DNA, 33 bp, Homo sapien
gagggaagaacacgtactaagacacagagcaga

SEQ ID NO: 554051 - DNA, 33 bp, Homo sapien
gggcttgcataacaaactactacagactgggca

SEQ ID NO: 554052 - DNA, 33 bp, Homo sapien
gggcttgcataacaaagtactacagactgggca

SEQ ID NO: 554053 - DNA, 33 bp, Homo sapien
taggaataatataaaccgtaccgaatgctcaac

SEQ ID NO: 554054 - DNA, 33 bp, Homo sapien
taggaataatataaactgtaccgaatgctcaac

SEQ ID NO: 554055 - DNA, 33 bp, Homo sapien
gctccctgtccacccacaataggcatcccaaga

SEQ ID NO: 554056 - DNA, 33 bp, Homo sapien
gctccctgtccacccataataggcatcccaaga

SEQ ID NO: 554057 - DNA, 33 bp, Homo sapien
ttggagggattctctacagtttaacaagtgcgc

SEQ ID NO: 554058 - DNA, 33 bp, Homo sapien
ttggagggattctctatagtttaacaagtgcgc

SEQ ID NO: 554059 - DNA, 33 bp, Homo sapien
gctccttgaaaagaaccgagtaggaagccagta

SEQ ID NO: 554060 - DNA, 33 bp, Homo sapien
gctccttgaaaagaactgagtaggaagccagta

SEQ ID NO: 554061 - DNA, 33 bp, Homo sapien
catgctcttccatgaaactgaacctctctgtgt

SEQ ID NO: 554062 - DNA, 33 bp, Homo sapien
catgctcttccatgaagctgaacctctctgtgt

SEQ ID NO: 554063 - DNA, 33 bp, Homo sapien
tccccattacctctccaacttcactcctggcca

SEQ ID NO: 554064 - DNA, 33 bp, Homo sapien
tccccattacctctccgacttcactcctggcca

SEQ ID NO: 554065 - DNA, 33 bp, Homo sapien
actatgtctatgtatacgaaagcaccatgtttt

SEQ ID NO: 554066 - DNA, 33 bp, Homo sapien
actatgtctatgtatatgaaagcaccatgtttt

SEQ ID NO: 554067 - DNA, 33 bp, Homo sapien
tccacagaaattgacaaaacaatctgaaattaa

SEQ ID NO: 554068 - DNA, 33 bp, Homo sapien
tccacagaaattgacagaacaatctgaaattaa

SEQ ID NO: 554069 - DNA, 33 bp, Homo sapien
gtagtgaaattactacaataatagttcaccaat

SEQ ID NO: 554070 - DNA, 33 bp, Homo sapien
gtagtgaaattactaccataatagttcaccaat

SEQ ID NO: 554071 - DNA, 33 bp, Homo sapien
gtctcacttcatcacaactacttcctcttgaat

SEQ ID NO: 554072 - DNA, 33 bp, Homo sapien
gtctcacttcatcacagctacttcctcttgaat

SEQ ID NO: 554073 - DNA, 33 bp, Homo sapien
ctgtccatgtcaagaccgtaagatgtggctggc

SEQ ID NO: 554074 - DNA, 33 bp, Homo sapien
ctgtccatgtcaagactgtaagatgtggctggc

SEQ ID NO: 554075 - DNA, 33 bp, Homo sapien
catcacctcaatttcagtaccttttgttcgtga

SEQ ID NO: 554076 - DNA, 33 bp, Homo sapien
catcacctcaatttcattaccttttgttcgtga

SEQ ID NO: 554077 - DNA, 33 bp, Homo sapien
gtggtatctggaataacgtgggagccagtctaa

SEQ ID NO: 554078 - DNA, 33 bp, Homo sapien
gtggtatctggaataatgtgggagccagtctaa

SEQ ID NO: 554079 - DNA, 33 bp, Homo sapien; identical to SEQ ID NO: 554077

SEQ ID NO: 554080 - DNA, 33 bp, Homo sapien; identical to SEQ ID NO: 554078

SEQ ID NO: 554081 - DNA, 33 bp, Homo sapien
ccgaaaaacccatgaaaaggcaaattgtacaca

SEQ ID NO: 554082 - DNA, 33 bp, Homo sapien
ccgaaaaacccatgaagaggcaaattgtacaca

SEQ ID NO: 554083 - DNA, 33 bp, Homo sapien
tatttgaatcctctgacggcatcatttaactgc

SEQ ID NO: 554084 - DNA, 33 bp, Homo sapien
tatttgaatcctctgatggcatcatttaactgc

SEQ ID NO: 554085 - DNA, 33 bp, Homo sapien
aaaaacgtcccaatgaagcgatagtcaaaagtc

SEQ ID NO: 554086 - DNA, 33 bp, Homo sapien
aaaaacgtcccaatgaggcgatagtcaaaagtc

SEQ ID NO: 554087 - DNA, 33 bp, Homo sapien
acaaatagaaacctagaaatttagtgcctattc

SEQ ID NO: 554088 - DNA, 33 bp, Homo sapien
acaaatagaaacctaggaatttagtgcctattc

SEQ ID NO: 554089 - DNA, 33 bp, Homo sapien
caatgtgttattccagcctcttaggcccaaaat

SEQ ID NO: 554090 - DNA, 33 bp, Homo sapien
caatgtgttattccagtctcttaggcccaaaat

SEQ ID NO: 554091 - DNA, 33 bp, Homo sapien
gtcagtgatgtccccaagattttgggcctaaga

SEQ ID NO: 554092 - DNA, 33 bp, Homo sapien
gtcagtgatgtccccaggattttgggcctaaga

SEQ ID NO: 554093 - DNA, 33 bp, Homo sapien
catctgtttttctttacatttcagattagccaa

SEQ ID NO: 554094 - DNA, 33 bp, Homo sapien
catctgtttttctttagatttcagattagccaa

SEQ ID NO: 554095 - DNA, 33 bp, Homo sapien
tccataggaaatgcccgcattgaaaattaatct

SEQ ID NO: 554096 - DNA, 33 bp, Homo sapien
tccataggaaatgccctcattgaaaattaatct

SEQ ID NO: 554097 - DNA, 33 bp, Homo sapien
ggaggccgagaagtcccgcgatatgctgtctgc

SEQ ID NO: 554098 - DNA, 33 bp, Homo sapien
ggaggccgagaagtcctgcgatatgctgtctgc

SEQ ID NO: 554099 - DNA, 33 bp, Homo sapien
attttgaaatcactgggaagttgcataagcatt

SEQ ID NO: 554100 - DNA, 33 bp, Homo sapien
attttgaaatcactggtaagttgcataagcatt

SEQ ID NO: 554101 - DNA, 33 bp, Homo sapien
gcccctactcattacaccccaatgccactttct

SEQ ID NO: 554102 - DNA, 33 bp, Homo sapien
gcccctactcattacatcccaatgccactttct

SEQ ID NO: 554103 - DNA, 33 bp, Homo sapien
tagttttgatgaagtacatttttcttttctttc

SEQ ID NO: 554104 - DNA, 33 bp, Homo sapien
tagttttgatgaagtagatttttcttttctttc

SEQ ID NO: 554105 - DNA, 33 bp, Homo sapien
gtgcagcagagaatacaaagtaggttaggacaa

SEQ ID NO: 554106 - DNA, 33 bp, Homo sapien
gtgcagcagagaatacgaagtaggttaggacaa

SEQ ID NO: 554107 - DNA, 33 bp, Homo sapien
aaaagttatatcaagaaaatatgctatcaatat

SEQ ID NO: 554108 - DNA, 33 bp, Homo sapien
aaaagttatatcaagagaatatgctatcaatat

SEQ ID NO: 554109 - DNA, 33 bp, Homo sapien
aacaaactccatgatgcatttttaagcgaagca

SEQ ID NO: 554110 - DNA, 33 bp, Homo sapien
aacaaactccatgatgtatttttaagcgaagca

SEQ ID NO: 554111 - DNA, 33 bp, Homo sapien
agcgagtgacatgctcaaacagttataatatat

SEQ ID NO: 554112 - DNA, 33 bp, Homo sapien
agcgagtgacatgctccaacagttataatatat

SEQ ID NO: 554113 - DNA, 33 bp, Homo sapien
ttcagcttgtaggcatcatcccaactctttgtg

SEQ ID NO: 554114 - DNA, 33 bp, Homo sapien
ttcagcttgtaggcattatcccaactctttgtg

SEQ ID NO: 554115 - DNA, 33 bp, Homo sapien
ctctccatcaactaaagatccttcatgaatggg

SEQ ID NO: 554116 - DNA, 33 bp, Homo sapien
ctctccatcaactaaatatccttcatgaatggg

SEQ ID NO: 554117 - DNA, 33 bp, Homo sapien
ctagacaatttcaaccccaacaagctcagtgca

SEQ ID NO: 554118 - DNA, 33 bp, Homo sapien
ctagacaatttcaacctcaacaagctcagtgca

SEQ ID NO: 554119 - DNA, 33 bp, Homo sapien
ctggacattcgcgctacgccaactcccgggcag

SEQ ID NO: 554120 - DNA, 33 bp, Homo sapien
ctggacattcgcgctatgccaactcccgggcag

SEQ ID NO: 554121 - DNA, 33 bp, Homo sapien
aaggaatgaggacaccactgggtcttgcagcaa

SEQ ID NO: 554122 - DNA, 33 bp, Homo sapien
aaggaatgaggacaccgctgggtcttgcagcaa

SEQ ID NO: 554123 - DNA, 33 bp, Homo sapien
gggtggaaaatgttcaatcatctgaaggaccta

SEQ ID NO: 554124 - DNA, 33 bp, Homo sapien
gggtggaaaatgttcagtcatctgaaggaccta

SEQ ID NO: 554125 - DNA, 33 bp, Homo sapien
ttaggacaagctacgacgggttaggactaaggg

SEQ ID NO: 554126 - DNA, 33 bp, Homo sapien
ttaggacaagctacgatgggttaggactaaggg

SEQ ID NO: 554127 - DNA, 33 bp, Homo sapien
tgctggcacatgagtccctgcttgagggtttat

SEQ ID NO: 554128 - DNA, 33 bp, Homo sapien
tgctggcacatgagtctctgcttgagggtttat

SEQ ID NO: 554129 - DNA, 33 bp, Homo sapien
aggggactcaggtgggacattaagagcatctgc

SEQ ID NO: 554130 - DNA, 33 bp, Homo sapien
aggggactcaggtggggcattaagagcatctgc

SEQ ID NO: 554131 - DNA, 33 bp, Homo sapien
tggctggctgaataaacgctcggatgctcttca

SEQ ID NO: 554132 - DNA, 33 bp, Homo sapien
tggctggctgaataaatgctcggatgctcttca

SEQ ID NO: 554133 - DNA, 33 bp, Homo sapien
cccttccatgtaggtcaacgcccgctcctggcc

SEQ ID NO: 554134 - DNA, 33 bp, Homo sapien
cccttccatgtaggtcgacgcccgctcctggcc

SEQ ID NO: 554135 - DNA, 33 bp, Homo sapien
cttgcttacttcttcaccggacagggaacctct

SEQ ID NO: 554136 - DNA, 33 bp, Homo sapien
cttgcttacttcttcagcggacagggaacctct

SEQ ID NO: 554137 - DNA, 33 bp, Homo sapien
agctcatttccactctaaagcctcaattctcca

SEQ ID NO: 554138 - DNA, 33 bp, Homo sapien
agctcatttccactctgaagcctcaattctcca

SEQ ID NO: 554139 - DNA, 33 bp, Homo sapien
aggtttgcaccaagaaaaagagataaagaagag

SEQ ID NO: 554140 - DNA, 33 bp, Homo sapien
aggtttgcaccaagaagaagagataaagaagag

SEQ ID NO: 554141 - DNA, 33 bp, Homo sapien
tccaaacgaatagatacggatccagagttacac

SEQ ID NO: 554142 - DNA, 33 bp, Homo sapien
tccaaacgaatagatatggatccagagttacac

SEQ ID NO: 554143 - DNA, 33 bp, Homo sapien
cactacctttccaggcaatccattttgtacagc

SEQ ID NO: 554144 - DNA, 33 bp, Homo sapien
cactacctttccaggcgatccattttgtacagc

SEQ ID NO: 554145 - DNA, 33 bp, Homo sapien
tctttaacagtaaacaataggttgtcaataaat

SEQ ID NO: 554146 - DNA, 33 bp, Homo sapien
tctttaacagtaaacagtaggttgtcaataaat

SEQ ID NO: 554147 - DNA, 33 bp, Homo sapien
gctagtctgagagaccactggagtgcaagccac

SEQ ID NO: 554148 - DNA, 33 bp, Homo sapien
gctagtctgagagaccgctggagtgcaagccac

SEQ ID NO: 554149 - DNA, 33 bp, Homo sapien
aggcttggagttatgacgttgtacgagcaaagc

SEQ ID NO: 554150 - DNA, 33 bp, Homo sapien
aggcttggagttatgaggttgtacgagcaaagc

SEQ ID NO: 554151 - DNA, 33 bp, Homo sapien
ggtttcatctgaacccagcaaatgctccatagg

SEQ ID NO: 554152 - DNA, 33 bp, Homo sapien
ggtttcatctgaacccggcaaatgctccatagg

SEQ ID NO: 554153 - DNA, 33 bp, Homo sapien
cctggaggagcactaacccatctgaggttgcat

SEQ ID NO: 554154 - DNA, 33 bp, Homo sapien
cctggaggagcactaatccatctgaggttgcat

SEQ ID NO: 554155 - DNA, 33 bp, Homo sapien
gagcacagcttccaaccggtacacctcatctaa

SEQ ID NO: 554156 - DNA, 33 bp, Homo sapien
gagcacagcttccaactggtacacctcatctaa

SEQ ID NO: 554157 - DNA, 33 bp, Homo sapien
ataaggtcaggaagacacaggtcctcggcatcc

SEQ ID NO: 554158 - DNA, 33 bp, Homo sapien
ataaggtcaggaagacccaggtcctcggcatcc

SEQ ID NO: 554159 - DNA, 33 bp, Homo sapien
aaccaaaagatggacacgatctgacttttgttt

SEQ ID NO: 554160 - DNA, 33 bp, Homo sapien
aaccaaaagatggacatgatctgacttttgttt

SEQ ID NO: 554161 - DNA, 33 bp, Homo sapien
gcctagagcagttggccgagctgagccttggag

SEQ ID NO: 554162 - DNA, 33 bp, Homo sapien
gcctagagcagttggctgagctgagccttggag

SEQ ID NO: 554163 - DNA, 33 bp, Homo sapien
gagaagtgggagtcagccctgattcttctctct

SEQ ID NO: 554164 - DNA, 33 bp, Homo sapien
gagaagtgggagtcagtcctgattcttctctct

SEQ ID NO: 554165 - DNA, 33 bp, Homo sapien
gcagcacacaatcacacagatcaccccatccac

SEQ ID NO: 554166 - DNA, 33 bp, Homo sapien
gcagcacacaatcacatagatcaccccatccac

SEQ ID NO: 554167 - DNA, 33 bp, Homo sapien
aggggcagtataagaacgagatcgccagttagt

SEQ ID NO: 554168 - DNA, 33 bp, Homo sapien
aggggcagtataagaatgagatcgccagttagt

SEQ ID NO: 554169 - DNA, 33 bp, Homo sapien
ccatattgaatgaatacatgagtggatggcaat

SEQ ID NO: 554170 - DNA, 33 bp, Homo sapien
ccatattgaatgaatatatgagtggatggcaat

SEQ ID NO: 554171 - DNA, 33 bp, Homo sapien
ggcccttttccagcccgccaggaaatcagtcaa

SEQ ID NO: 554172 - DNA, 33 bp, Homo sapien
ggcccttttccagccctccaggaaatcagtcaa

SEQ ID NO: 554173 - DNA, 33 bp, Homo sapien
ccttattgccttgtggaacattaaccggattga

SEQ ID NO: 554174 - DNA, 33 bp, Homo sapien
ccttattgccttgtgggacattaaccggattga

SEQ ID NO: 554175 - DNA, 33 bp, Homo sapien
caaagtgttagagagacgctggttgggagaggg

SEQ ID NO: 554176 - DNA, 33 bp, Homo sapien
caaagtgttagagagatgctggttgggagaggg

SEQ ID NO: 554177 - DNA, 33 bp, Homo sapien
gtcaggccagggcccaatgagacagcgcctgtg

SEQ ID NO: 554178 - DNA, 33 bp, Homo sapien
gtcaggccagggcccagtgagacagcgcctgtg

SEQ ID NO: 554179 - DNA, 33 bp, Homo sapien
cctcatgtctggctgacggaagcggctcagtct

SEQ ID NO: 554180 - DNA, 33 bp, Homo sapien
cctcatgtctggctgatggaagcggctcagtct

SEQ ID NO: 554181 - DNA, 33 bp, Homo sapien
ttgttctttaggatcactcatttcccctaaaaa

SEQ ID NO: 554182 - DNA, 33 bp, Homo sapien
ttgttctttaggatcattcatttcccctaaaaa

SEQ ID NO: 554183 - DNA, 33 bp, Homo sapien
agttactaaattgtgacatggaagacagcaaaa

SEQ ID NO: 554184 - DNA, 33 bp, Homo sapien
agttactaaattgtgatatggaagacagcaaaa

SEQ ID NO: 554185 - DNA, 33 bp, Homo sapien
tttgatgtaaacaaaactcacagactgaagaaa

SEQ ID NO: 554186 - DNA, 33 bp, Homo sapien
tttgatgtaaacaaaattcacagactgaagaaa

SEQ ID NO: 554187 - DNA, 33 bp, Homo sapien
ccagcatacctgtatacaaaaaaagtgttgata

SEQ ID NO: 554188 - DNA, 33 bp, Homo sapien
ccagcatacctgtatagaaaaaaagtgttgata

SEQ ID NO: 554189 - DNA, 33 bp, Homo sapien
gagatcctgtctgtaacgctggctggcagatca

SEQ ID NO: 554190 - DNA, 33 bp, Homo sapien
gagatcctgtctgtaatgctggctggcagatca

SEQ ID NO: 554191 - DNA, 33 bp, Homo sapien
ataatgttaaacaagaaaggcatatcatccagt

SEQ ID NO: 554192 - DNA, 33 bp, Homo sapien
ataatgttaaacaagagaggcatatcatccagt

SEQ ID NO: 554193 - DNA, 33 bp, Homo sapien
gggatgtggagataaaagataacaagggtaggg

SEQ ID NO: 554194 - DNA, 33 bp, Homo sapien
gggatgtggagataaaggataacaagggtaggg

SEQ ID NO: 554195 - DNA, 33 bp, Homo sapien
gatcgatactccctaaatccacctcccactacc

SEQ ID NO: 554196 - DNA, 33 bp, Homo sapien
gatcgatactccctaagtccacctcccactacc

SEQ ID NO: 554197 - DNA, 33 bp, Homo sapien
ctaaggttattgcaagcctccaatgggatatag

SEQ ID NO: 554198 - DNA, 33 bp, Homo sapien
ctaaggttattgcaagtctccaatgggatatag

SEQ ID NO: 554199 - DNA, 33 bp, Homo sapien
gacttgatgctgaccacaggaccggaacttcat

SEQ ID NO: 554200 - DNA, 33 bp, Homo sapien
gacttgatgctgaccagaggaccggaacttcat

SEQ ID NO: 554201 - DNA, 33 bp, Homo sapien
atttaatcctcacagcaaatcaacaaggtaggt

SEQ ID NO: 554202 - DNA, 33 bp, Homo sapien
atttaatcctcacagcgaatcaacaaggtaggt

SEQ ID NO: 554203 - DNA, 33 bp, Homo sapien
cccctattaaatcccaatcagggttgtgagaag

SEQ ID NO: 554204 - DNA, 33 bp, Homo sapien
cccctattaaatcccagtcagggttgtgagaag

SEQ ID NO: 554205 - DNA, 33 bp, Homo sapien
atcaaggtctggttaactgcagagcctgctccc

SEQ ID NO: 554206 - DNA, 33 bp, Homo sapien
atcaaggtctggttaattgcagagcctgctccc

SEQ ID NO: 554207 - DNA, 33 bp, Homo sapien
gtctaaatttctgatcgaagactctgtgagcat

SEQ ID NO: 554208 - DNA, 33 bp, Homo sapien
gtctaaatttctgatctaagactctgtgagcat

SEQ ID NO: 554209 - DNA, 33 bp, Homo sapien
gtcaggaccccccttacatgctgttagagaacc

SEQ ID NO: 554210 - DNA, 33 bp, Homo sapien
gtcaggaccccccttatatgctgttagagaacc

SEQ ID NO: 554211 - DNA, 33 bp, Homo sapien
caaccaggtatctgatcaatgtgagctaattac

SEQ ID NO: 554212 - DNA, 33 bp, Homo sapien
caaccaggtatctgattaatgtgagctaattac

SEQ ID NO: 554213 - DNA, 33 bp, Homo sapien
ccctacaagtattctacgctgttaattactctc

SEQ ID NO: 554214 - DNA, 33 bp, Homo sapien
ccctacaagtattctatgctgttaattactctc

SEQ ID NO: 554215 - DNA, 33 bp, Homo sapien
tgagcgtggatttctcaatttattctgttagga

SEQ ID NO: 554216 - DNA, 33 bp, Homo sapien
tgagcgtggatttctccatttattctgttagga

SEQ ID NO: 554217 - DNA, 33 bp, Homo sapien
cagactgggtaatataaggagactctacttcta

SEQ ID NO: 554218 - DNA, 33 bp, Homo sapien
cagactgggtaatatagggagactctacttcta

SEQ ID NO: 554219 - DNA, 33 bp, Homo sapien
gaatcaatgttttaccacttctggtcttacgtg

SEQ ID NO: 554220 - DNA, 33 bp, Homo sapien
gaatcaatgttttaccgcttctggtcttacgtg

SEQ ID NO: 554221 - DNA, 33 bp, Homo sapien
taaattcaaacttatcaataattacagtaaagg

SEQ ID NO: 554222 - DNA, 33 bp, Homo sapien
taaattcaaacttatcgataattacagtaaagg

SEQ ID NO: 554223 - DNA, 33 bp, Homo sapien
tatagtgaacaagtcaaacagagcccttgcatt

SEQ ID NO: 554224 - DNA, 33 bp, Homo sapien
tatagtgaacaagtcagacagagcccttgcatt

SEQ ID NO: 554225 - DNA, 33 bp, Homo sapien
gtcacacctctcctaaatggtggaaccaggctt

SEQ ID NO: 554226 - DNA, 33 bp, Homo sapien
gtcacacctctcctaattggtggaaccaggctt

SEQ ID NO: 554227 - DNA, 33 bp, Homo sapien
tgatgtcctagcattcaaagtcacatagcatca

SEQ ID NO: 554228 - DNA, 33 bp, Homo sapien
tgatgtcctagcattcgaagtcacatagcatca

SEQ ID NO: 554229 - DNA, 33 bp, Homo sapien
caaaacactggttagacagaactggctcaaggc

SEQ ID NO: 554230 - DNA, 33 bp, Homo sapien
caaaacactggttagagagaactggctcaaggc

SEQ ID NO: 554231 - DNA, 33 bp, Homo sapien
gtacagtagctcaaaaagaaggaaggttgtaat

SEQ ID NO: 554232 - DNA, 33 bp, Homo sapien
gtacagtagctcaaaaggaaggaaggttgtaat

SEQ ID NO: 554233 - DNA, 33 bp, Homo sapien
ttgttcgtttttcaaaggaagaagtcaaagcct

SEQ ID NO: 554234 - DNA, 33 bp, Homo sapien
ttgttcgtttttcaaatgaagaagtcaaagcct

SEQ ID NO: 554235 - DNA, 33 bp, Homo sapien
agccaatcccttattacgccaattctctcctat

SEQ ID NO: 554236 - DNA, 33 bp, Homo sapien
agccaatcccttattatgccaattctctcctat

SEQ ID NO: 554237 - DNA, 33 bp, Homo sapien
cattcaagtccactcaaaagaatatattccaca

SEQ ID NO: 554238 - DNA, 33 bp, Homo sapien
cattcaagtccactcagaagaatatattccaca

SEQ ID NO: 554239 - DNA, 33 bp, Homo sapien
tagggaagttctggcaactcaatatcattcagt

SEQ ID NO: 554240 - DNA, 33 bp, Homo sapien
tagggaagttctggcatctcaatatcattcagt

SEQ ID NO: 554241 - DNA, 33 bp, Homo sapien
gattatctggagcaacaagtcttagaggaactc

SEQ ID NO: 554242 - DNA, 33 bp, Homo sapien
gattatctggagcaacgagtcttagaggaactc

SEQ ID NO: 554243 - DNA, 33 bp, Homo sapien
gttgtctagagtgcagaaaacagcatacagcca

SEQ ID NO: 554244 - DNA, 33 bp, Homo sapien
gttgtctagagtgcagcaaacagcatacagcca

SEQ ID NO: 554245 - DNA, 33 bp, Homo sapien
agcaagctgccctgaaaattggtcctaaatgga

SEQ ID NO: 554246 - DNA, 33 bp, Homo sapien
agcaagctgccctgaagattggtcctaaatgga

SEQ ID NO: 554247 - DNA, 33 bp, Homo sapien
atgcctctcaacaaaaccagatttggactttcg

SEQ ID NO: 554248 - DNA, 33 bp, Homo sapien
atgcctctcaacaaaagcagatttggactttcg

SEQ ID NO: 554249 - DNA, 33 bp, Homo sapien
agaagaatccccctggcccaggactaagtgcat

SEQ ID NO: 554250 - DNA, 33 bp, Homo sapien
agaagaatccccctggtccaggactaagtgcat

SEQ ID NO: 554251 - DNA, 33 bp, Homo sapien
aactagcacatgatacagcgtttgtacttacat

SEQ ID NO: 554252 - DNA, 33 bp, Homo sapien
aactagcacatgatacggcgtttgtacttacat

SEQ ID NO: 554253 - DNA, 33 bp, Homo sapien
agagggctcgctgtaacgtttacactgcttagc

SEQ ID NO: 554254 - DNA, 33 bp, Homo sapien
agagggctcgctgtaatgtttacactgcttagc

SEQ ID NO: 554255 - DNA, 33 bp, Homo sapien
ccctgtgcctggcagacagaaaactttagtaaa

SEQ ID NO: 554256 - DNA, 33 bp, Homo sapien
ccctgtgcctggcagatagaaaactttagtaaa

SEQ ID NO: 554257 - DNA, 33 bp, Homo sapien
taaaaatttggtcaagccatcaaatgatttatc

SEQ ID NO: 554258 - DNA, 33 bp, Homo sapien
taaaaatttggtcaaggcatcaaatgatttatc

SEQ ID NO: 554259 - DNA, 33 bp, Homo sapien
attaatataaagtcaaccaacaatagtctagag

SEQ ID NO: 554260 - DNA, 33 bp, Homo sapien
attaatataaagtcaagcaacaatagtctagag

SEQ ID NO: 554261 - DNA, 33 bp, Homo sapien
ctagataacccatcaccccaaaaagttttatgt

SEQ ID NO: 554262 - DNA, 33 bp, Homo sapien
ctagataacccatcactccaaaaagttttatgt

SEQ ID NO: 554263 - DNA, 33 bp, Homo sapien
attcaggtttcaattcaaatgtcaaatgccaaa

SEQ ID NO: 554264 - DNA, 33 bp, Homo sapien
attcaggtttcaattccaatgtcaaatgccaaa

SEQ ID NO: 554265 - DNA, 33 bp, Homo sapien
ggtgtggggctgttagaacccaaagctcccatt

SEQ ID NO: 554266 - DNA, 33 bp, Homo sapien
ggtgtggggctgttagtacccaaagctcccatt

SEQ ID NO: 554267 - DNA, 33 bp, Homo sapien
gtagcatcttagaaaacagtacagttgtctggg

SEQ ID NO: 554268 - DNA, 33 bp, Homo sapien
gtagcatcttagaaaatagtacagttgtctggg

SEQ ID NO: 554269 - DNA, 33 bp, Homo sapien
tgaaattgcccaatgtaaaacagctaagcaagt

SEQ ID NO: 554270 - DNA, 33 bp, Homo sapien
tgaaattgcccaatgtgaaacagctaagcaagt

SEQ ID NO: 554271 - DNA, 33 bp, Homo sapien
ctcatttaatcatcaccactgtaaagttggtgt

SEQ ID NO: 554272 - DNA, 33 bp, Homo sapien
ctcatttaatcatcactactgtaaagttggtgt

SEQ ID NO: 554273 - DNA, 33 bp, Homo sapien
aaagaggctttcagacaaaatactttgacaact

SEQ ID NO: 554274 - DNA, 33 bp, Homo sapien
aaagaggctttcagacgaaatactttgacaact

SEQ ID NO: 554275 - DNA, 33 bp, Homo sapien
ggcaggaaattctatccactttgatgctcagtt

SEQ ID NO: 554276 - DNA, 33 bp, Homo sapien
ggcaggaaattctatctactttgatgctcagtt

SEQ ID NO: 554277 - DNA, 33 bp, Homo sapien
ggcagtcattgtaacacaggaggaatccacatg

SEQ ID NO: 554278 - DNA, 33 bp, Homo sapien
ggcagtcattgtaacataggaggaatccacatg

SEQ ID NO: 554279 - DNA, 33 bp, Homo sapien
ggggacacattctgagcccgggcctgctccaaa

SEQ ID NO: 554280 - DNA, 33 bp, Homo sapien
ggggacacattctgaggccgggcctgctccaaa

SEQ ID NO: 554281 - DNA, 33 bp, Homo sapien
attcctctaaggctgcactcccaactgtggtgc

SEQ ID NO: 554282 - DNA, 33 bp, Homo sapien
attcctctaaggctgcgctcccaactgtggtgc

SEQ ID NO: 554283 - DNA, 33 bp, Homo sapien
tccccactctctgtgactaattgtgctgtttgt

SEQ ID NO: 554284 - DNA, 33 bp, Homo sapien
tccccactctctgtgattaattgtgctgtttgt

SEQ ID NO: 554285 - DNA, 33 bp, Homo sapien
gaatgtgtaagttagaagaaaagagaagactgg

SEQ ID NO: 554286 - DNA, 33 bp, Homo sapien
gaatgtgtaagttagaggaaaagagaagactgg

SEQ ID NO: 554287 - DNA, 33 bp, Homo sapien
aaggggtgcccgccaaacattttgcaggtaaaa

SEQ ID NO: 554288 - DNA, 33 bp, Homo sapien
aaggggtgcccgccaagcattttgcaggtaaaa

SEQ ID NO: 554289 - DNA, 33 bp, Homo sapien
ctccaagccatcttgaccttattgcttaagcac

SEQ ID NO: 554290 - DNA, 33 bp, Homo sapien
ctccaagccatcttgatcttattgcttaagcac

SEQ ID NO: 554291 - DNA, 33 bp, Homo sapien
aaaatcagcttgtcgactcctacaaaaagagcc

SEQ ID NO: 554292 - DNA, 33 bp, Homo sapien
aaaatcagcttgtcgattcctacaaaaagagcc

SEQ ID NO: 554293 - DNA, 33 bp, Homo sapien
gctttctagaagggccagcgactgtgtagttat

SEQ ID NO: 554294 - DNA, 33 bp, Homo sapien
gctttctagaagggccggcgactgtgtagttat

SEQ ID NO: 554295 - DNA, 33 bp, Homo sapien
gtggcctcaactgtggaataatacaaataataa

SEQ ID NO: 554296 - DNA, 33 bp, Homo sapien
gtggcctcaactgtggtataatacaaataataa

SEQ ID NO: 554297 - DNA, 33 bp, Homo sapien
ctccatgcccagctaacgccaagaggagcagag

SEQ ID NO: 554298 - DNA, 33 bp, Homo sapien
ctccatgcccagctaatgccaagaggagcagag

SEQ ID NO: 554299 - DNA, 33 bp, Homo sapien
agcacttcccgtcctacagtagaccatcccttg

SEQ ID NO: 554300 - DNA, 33 bp, Homo sapien
agcacttcccgtcctagagtagaccatcccttg

SEQ ID NO: 554301 - DNA, 33 bp, Homo sapien
gggaatattgatttggcacaaagagcttagttt

SEQ ID NO: 554302 - DNA, 33 bp, Homo sapien
gggaatattgatttgggacaaagagcttagttt

SEQ ID NO: 554303 - DNA, 33 bp, Homo sapien
cattcaagagaccaacccaaactaagctctttg

SEQ ID NO: 554304 - DNA, 33 bp, Homo sapien
cattcaagagaccaactcaaactaagctctttg

SEQ ID NO: 554305 - DNA, 33 bp, Homo sapien
aactgcgacccagagaagagaagtattgatcaa

SEQ ID NO: 554306 - DNA, 33 bp, Homo sapien
aactgcgacccagagaggagaagtattgatcaa

SEQ ID NO: 554307 - DNA, 33 bp, Homo sapien
tagtcaatactgtagacgatacgaggtctagaa

SEQ ID NO: 554308 - DNA, 33 bp, Homo sapien
tagtcaatactgtagatgatacgaggtctagaa

SEQ ID NO: 554309 - DNA, 33 bp, Homo sapien
atgtttggttcagaaacaatttgttcatgtcta

SEQ ID NO: 554310 - DNA, 33 bp, Homo sapien
atgtttggttcagaaataatttgttcatgtcta

SEQ ID NO: 554311 - DNA, 33 bp, Homo sapien
agtagtttaacacgaagaatcagggaaagagac

SEQ ID NO: 554312 - DNA, 33 bp, Homo sapien
agtagtttaacacgaataatcagggaaagagac

SEQ ID NO: 554313 - DNA, 33 bp, Homo sapien
atcttttggtggtaagaaattacgaggagacaa

SEQ ID NO: 554314 - DNA, 33 bp, Homo sapien
atcttttggtggtaagcaattacgaggagacaa

SEQ ID NO: 554315 - DNA, 33 bp, Homo sapien
ttcattagtttgccaacattttatacgtatact

SEQ ID NO: 554316 - DNA, 33 bp, Homo sapien
ttcattagtttgccaatattttatacgtatact

SEQ ID NO: 554317 - DNA, 33 bp, Homo sapien
gcatatattgaactcaaagggccatatatacac

SEQ ID NO: 554318 - DNA, 33 bp, Homo sapien
gcatatattgaactcagagggccatatatacac

SEQ ID NO: 554319 - DNA, 33 bp, Homo sapien
ccaccccagtttaaaaagtatcagtggttctaa

SEQ ID NO: 554320 - DNA, 33 bp, Homo sapien
ccaccccagtttaaaatgtatcagtggttctaa

SEQ ID NO: 554321 - DNA, 33 bp, Homo sapien
gaggaggaaggatgacagggagaacattctaga

SEQ ID NO: 554322 - DNA, 33 bp, Homo sapien
gaggaggaaggatgacggggagaacattctaga

SEQ ID NO: 554323 - DNA, 33 bp, Homo sapien
agcagagacactctgcaccaaaatcgcatctgg

SEQ ID NO: 554324 - DNA, 33 bp, Homo sapien
agcagagacactctgctccaaaatcgcatctgg

SEQ ID NO: 554325 - DNA, 33 bp, Homo sapien
atagtgtatagggacaacatacagactacagtt

SEQ ID NO: 554326 - DNA, 33 bp, Homo sapien
atagtgtatagggacagcatacagactacagtt

SEQ ID NO: 554327 - DNA, 33 bp, Homo sapien
aatgaatgaataaacactgcaaatgcataaata

SEQ ID NO: 554328 - DNA, 33 bp, Homo sapien
aatgaatgaataaacagtgcaaatgcataaata

SEQ ID NO: 554329 - DNA, 33 bp, Homo sapien
gactgggtgatttatgaagaagagaggtttagt

SEQ ID NO: 554330 - DNA, 33 bp, Homo sapien
gactgggtgatttatgcagaagagaggtttagt

SEQ ID NO: 554331 - DNA, 33 bp, Homo sapien
ctcaattccctgttcaatccataaacacttggt

SEQ ID NO: 554332 - DNA, 33 bp, Homo sapien
ctcaattccctgttcactccataaacacttggt

SEQ ID NO: 554333 - DNA, 33 bp, Homo sapien
ctcttttcacttctcaaaatgttttcaaagttc

SEQ ID NO: 554334 - DNA, 33 bp, Homo sapien
ctcttttcacttctcacaatgttttcaaagttc

SEQ ID NO: 554335 - DNA, 33 bp, Homo sapien
cctgcacctccttttacaggctttgtgtcaatc

SEQ ID NO: 554336 - DNA, 33 bp, Homo sapien
cctgcacctccttttataggctttgtgtcaatc

SEQ ID NO: 554337 - DNA, 33 bp, Homo sapien
attcaggtcagcttcaacttattggacagagct

SEQ ID NO: 554338 - DNA, 33 bp, Homo sapien
attcaggtcagcttcatcttattggacagagct

SEQ ID NO: 554339 - DNA, 33 bp, Homo sapien
cttgtgagagtttgcacctttcctccgtgacag

SEQ ID NO: 554340 - DNA, 33 bp, Homo sapien
cttgtgagagtttgcatctttcctccgtgacag

SEQ ID NO: 554341 - DNA, 33 bp, Homo sapien
aacaataaggatgcaacggggaaatgattctta

SEQ ID NO: 554342 - DNA, 33 bp, Homo sapien
aacaataaggatgcaatggggaaatgattctta

SEQ ID NO: 554343 - DNA, 33 bp, Homo sapien
atctcctacgtctccaatacatttttctgaaaa

SEQ ID NO: 554344 - DNA, 33 bp, Homo sapien
atctcctacgtctccactacatttttctgaaaa

SEQ ID NO: 554345 - DNA, 33 bp, Homo sapien
tggagaccacttaacaagctgctgagaagattt

SEQ ID NO: 554346 - DNA, 33 bp, Homo sapien
tggagaccacttaacaggctgctgagaagattt

SEQ ID NO: 554347 - DNA, 33 bp, Homo sapien
tgggatcactggtgcacattccaagagacttct

SEQ ID NO: 554348 - DNA, 33 bp, Homo sapien
tgggatcactggtgcagattccaagagacttct

SEQ ID NO: 554349 - DNA, 33 bp, Homo sapien
cactttaatccggaaactattctaaaatgctga

SEQ ID NO: 554350 - DNA, 33 bp, Homo sapien
cactttaatccggaaagtattctaaaatgctga

SEQ ID NO: 554351 - DNA, 33 bp, Homo sapien
tgaacacactaaatcacacattttaaataagtg

SEQ ID NO: 554352 - DNA, 33 bp, Homo sapien
tgaacacactaaatcatacattttaaataagtg

SEQ ID NO: 554353 - DNA, 33 bp, Homo sapien
ttcactgttgatctacactagagaggttctgca

SEQ ID NO: 554354 - DNA, 33 bp, Homo sapien
ttcactgttgatctacgctagagaggttctgca

SEQ ID NO: 554355 - DNA, 33 bp, Homo sapien
ttatttccagtactatcagccacaaaaggagtg

SEQ ID NO: 554356 - DNA, 33 bp, Homo sapien
ttatttccagtactatgagccacaaaaggagtg

SEQ ID NO: 554357 - DNA, 33 bp, Homo sapien
ttttaccaagatgtaaacattcaggacagagac

SEQ ID NO: 554358 - DNA, 33 bp, Homo sapien
ttttaccaagatgtaaccattcaggacagagac

SEQ ID NO: 554359 - DNA, 33 bp, Homo sapien
tgaaactgacattcaacgccaagtgtgatctca

SEQ ID NO: 554360 - DNA, 33 bp, Homo sapien
tgaaactgacattcaatgccaagtgtgatctca

SEQ ID NO: 554361 - DNA, 33 bp, Homo sapien
aaaagctccttcacataaattacctgaccagag

SEQ ID NO: 554362 - DNA, 33 bp, Homo sapien
aaaagctccttcacatgaattacctgaccagag

SEQ ID NO: 554363 - DNA, 33 bp, Homo sapien
agtgtagatgataaacaggcctaaggtagtgag

SEQ ID NO: 554364 - DNA, 33 bp, Homo sapien
agtgtagatgataaacgggcctaaggtagtgag

SEQ ID NO: 554365 - DNA, 33 bp, Homo sapien
agtcaattttgcctgaccagatatgaccccaag

SEQ ID NO: 554366 - DNA, 33 bp, Homo sapien
agtcaattttgcctgagcagatatgaccccaag

SEQ ID NO: 554367 - DNA, 33 bp, Homo sapien
aggtgaagtcacttacgcaatatcaaacactca

SEQ ID NO: 554368 - DNA, 33 bp, Homo sapien
aggtgaagtcacttactcaatatcaaacactca

SEQ ID NO: 554369 - DNA, 33 bp, Homo sapien
cccagattttttttcccgagaacatcagtgcca

SEQ ID NO: 554370 - DNA, 33 bp, Homo sapien
cccagattttttttcctgagaacatcagtgcca

SEQ ID NO: 554371 - DNA, 33 bp, Homo sapien
ggcataatgagaaacacgtatttgatctctgct

SEQ ID NO: 554372 - DNA, 33 bp, Homo sapien
ggcataatgagaaacatgtatttgatctctgct

SEQ ID NO: 554373 - DNA, 33 bp, Homo sapien
tgaatacatgaacaaaaagaagggcaggcagat

SEQ ID NO: 554374 - DNA, 33 bp, Homo sapien
tgaatacatgaacaaatagaagggcaggcagat

SEQ ID NO: 554375 - DNA, 33 bp, Homo sapien
ggccgggacccaaggaactggaacggcagcgtg

SEQ ID NO: 554376 - DNA, 33 bp, Homo sapien
ggccgggacccaaggagctggaacggcagcgtg

SEQ ID NO: 554377 - DNA, 33 bp, Homo sapien
cagagattaaagcatacggtgatactcgttgtg

SEQ ID NO: 554378 - DNA, 33 bp, Homo sapien
cagagattaaagcatatggtgatactcgttgtg

SEQ ID NO: 554379 - DNA, 33 bp, Homo sapien
tgcccataaatagcaacgagcaggcaattttta

SEQ ID NO: 554380 - DNA, 33 bp, Homo sapien
tgcccataaatagcaatgagcaggcaattttta

SEQ ID NO: 554381 - DNA, 33 bp, Homo sapien
ttttaactggaaaaagcacaaatatctgaaatt

SEQ ID NO: 554382 - DNA, 33 bp, Homo sapien
ttttaactggaaaaaggacaaatatctgaaatt

SEQ ID NO: 554383 - DNA, 33 bp, Homo sapien
tcctcacagcactgtgaaataggtaccattttt

SEQ ID NO: 554384 - DNA, 33 bp, Homo sapien
tcctcacagcactgtgcaataggtaccattttt

SEQ ID NO: 554385 - DNA, 33 bp, Homo sapien
caaattccttcagtgcgaaaagcagaggcagct

SEQ ID NO: 554386 - DNA, 33 bp, Homo sapien
caaattccttcagtgctaaaagcagaggcagct

SEQ ID NO: 554387 - DNA, 33 bp, Homo sapien
gacagagttggagcaaatgagactcagattaag

SEQ ID NO: 554388 - DNA, 33 bp, Homo sapien
gacagagttggagcaactgagactcagattaag

SEQ ID NO: 554389 - DNA, 33 bp, Homo sapien
tttgtttatgtgtcaacggttgccaatctgcag

SEQ ID NO: 554390 - DNA, 33 bp, Homo sapien
tttgtttatgtgtcaatggttgccaatctgcag

SEQ ID NO: 554391 - DNA, 33 bp, Homo sapien
cattaaaatctcaagcactcattctattcacat

SEQ ID NO: 554392 - DNA, 33 bp, Homo sapien
cattaaaatctcaagctctcattctattcacat

SEQ ID NO: 554393 - DNA, 33 bp, Homo sapien
cagttacccacagtgaactactcattcacaaac

SEQ ID NO: 554394 - DNA, 33 bp, Homo sapien
cagttacccacagtgatctactcattcacaaac

SEQ ID NO: 554395 - DNA, 33 bp, Homo sapien
ttcacaaacacttgaccgacattcctcccttcc

SEQ ID NO: 554396 - DNA, 33 bp, Homo sapien
ttcacaaacacttgactgacattcctcccttcc

SEQ ID NO: 554397 - DNA, 33 bp, Homo sapien
tgacaccatcaaagcaagttaagggaagacaaa

SEQ ID NO: 554398 - DNA, 33 bp, Homo sapien
tgacaccatcaaagcaggttaagggaagacaaa

SEQ ID NO: 554399 - DNA, 33 bp, Homo sapien
gggcaggtttgttctaacctcttgacattagct

SEQ ID NO: 554400 - DNA, 33 bp, Homo sapien
gggcaggtttgttctagcctcttgacattagct

SEQ ID NO: 554401 - DNA, 33 bp, Homo sapien
agaatcaatagttctcagagaaaggtgaaaatt

SEQ ID NO: 554402 - DNA, 33 bp, Homo sapien
agaatcaatagttctccgagaaaggtgaaaatt

SEQ ID NO: 554403 - DNA, 33 bp, Homo sapien
ctctgtcctactggcaaccactacgctgttctt

SEQ ID NO: 554404 - DNA, 33 bp, Homo sapien
ctctgtcctactggcatccactacgctgttctt

SEQ ID NO: 554405 - DNA, 33 bp, Homo sapien
tgtgcataaggttgaccggttgtatcaatgtta

SEQ ID NO: 554406 - DNA, 33 bp, Homo sapien
tgtgcataaggttgacgggttgtatcaatgtta

SEQ ID NO: 554407 - DNA, 33 bp, Homo sapien
aataggtaaaatgatacggaaagccgatggttg

SEQ ID NO: 554408 - DNA, 33 bp, Homo sapien
aataggtaaaatgatatggaaagccgatggttg

SEQ ID NO: 554409 - DNA, 33 bp, Homo sapien
attttacctattctggccatctcatataaaagg

SEQ ID NO: 554410 - DNA, 33 bp, Homo sapien
attttacctattctgggcatctcatataaaagg

SEQ ID NO: 554411 - DNA, 33 bp, Homo sapien
tttcaaggcttatctacgttgtaagatgttatc

SEQ ID NO: 554412 - DNA, 33 bp, Homo sapien
tttcaaggcttatctatgttgtaagatgttatc

SEQ ID NO: 554413 - DNA, 33 bp, Homo sapien
aggatatcctccaacaacttctcaagaaagggc

SEQ ID NO: 554414 - DNA, 33 bp, Homo sapien
aggatatcctccaacagcttctcaagaaagggc

SEQ ID NO: 554415 - DNA, 33 bp, Homo sapien
ataagaagctcagaggaatcagcctatttgagg

SEQ ID NO: 554416 - DNA, 33 bp, Homo sapien
ataagaagctcagagggatcagcctatttgagg

SEQ ID NO: 554417 - DNA, 33 bp, Homo sapien
gcttagtagtaggtaaaatgcaaattagagcag

SEQ ID NO: 554418 - DNA, 33 bp, Homo sapien
gcttagtagtaggtaagatgcaaattagagcag

SEQ ID NO: 554419 - DNA, 33 bp, Homo sapien
tttccatagtttcaggaaaaagccaaaattaga

SEQ ID NO: 554420 - DNA, 33 bp, Homo sapien
tttccatagtttcagggaaaagccaaaattaga

SEQ ID NO: 554421 - DNA, 33 bp, Homo sapien
ctgtgttgagtatgggaaagagaagtgagacca

SEQ ID NO: 554422 - DNA, 33 bp, Homo sapien
ctgtgttgagtatggggaagagaagtgagacca

SEQ ID NO: 554423 - DNA, 33 bp, Homo sapien
tttaagtttccattaactatcaggatccaggct

SEQ ID NO: 554424 - DNA, 33 bp, Homo sapien
tttaagtttccattaattatcaggatccaggct

SEQ ID NO: 554425 - DNA, 33 bp, Homo sapien
taaagagtttactaaacgctttcttggcaaagc

SEQ ID NO: 554426 - DNA, 33 bp, Homo sapien
taaagagtttactaaatgctttcttggcaaagc

SEQ ID NO: 554427 - DNA, 33 bp, Homo sapien
caaaagtgttagaaccactgacatctcaatagg

SEQ ID NO: 554428 - DNA, 33 bp, Homo sapien
caaaagtgttagaaccgctgacatctcaatagg

SEQ ID NO: 554429 - DNA, 33 bp, Homo sapien
tcttttattagttgcccgatgactttgcccaag

SEQ ID NO: 554430 - DNA, 33 bp, Homo sapien
tcttttattagttgcctgatgactttgcccaag

SEQ ID NO: 554431 - DNA, 33 bp, Homo sapien
ctcaggtacaaaattcaagcaatacagggagtg

SEQ ID NO: 554432 - DNA, 33 bp, Homo sapien
ctcaggtacaaaattcgagcaatacagggagtg

SEQ ID NO: 554433 - DNA, 33 bp, Homo sapien
agtcccatggcttccaaataattctgtctgtca

SEQ ID NO: 554434 - DNA, 33 bp, Homo sapien
agtcccatggcttccagataattctgtctgtca

SEQ ID NO: 554435 - DNA, 33 bp, Homo sapien
tgtgcatgtctgtgaacggccaagaaagtgcag

SEQ ID NO: 554436 - DNA, 33 bp, Homo sapien
tgtgcatgtctgtgaatggccaagaaagtgcag

SEQ ID NO: 554437 - DNA, 33 bp, Homo sapien
cagttacctgtctccaccgtgaagatgaggatc

SEQ ID NO: 554438 - DNA, 33 bp, Homo sapien
cagttacctgtctccatcgtgaagatgaggatc

SEQ ID NO: 554439 - DNA, 33 bp, Homo sapien
tcctgttaaaccatcccagacatatgcagtcat

SEQ ID NO: 554440 - DNA, 33 bp, Homo sapien
tcctgttaaaccatcctagacatatgcagtcat

SEQ ID NO: 554441 - DNA, 33 bp, Homo sapien
cttactagctatgttccctggctgggtcaactt

SEQ ID NO: 554442 - DNA, 33 bp, Homo sapien
cttactagctatgttctctggctgggtcaactt

SEQ ID NO: 554443 - DNA, 33 bp, Homo sapien
caaatcatgtattgaacggataaagcactctca

SEQ ID NO: 554444 - DNA, 33 bp, Homo sapien
caaatcatgtattgaatggataaagcactctca

SEQ ID NO: 554445 - DNA, 33 bp, Homo sapien
ggagttactttacttccctgtgtctcggcttcc

SEQ ID NO: 554446 - DNA, 33 bp, Homo sapien
ggagttactttacttctctgtgtctcggcttcc

SEQ ID NO: 554447 - DNA, 33 bp, Homo sapien
tgggtcaaaagcctcagataataatgatagcta

SEQ ID NO: 554448 - DNA, 33 bp, Homo sapien
tgggtcaaaagcctcatataataatgatagcta

SEQ ID NO: 554449 - DNA, 33 bp, Homo sapien
cacatttaagcacttaataaacatctctggcct

SEQ ID NO: 554450 - DNA, 33 bp, Homo sapien
cacatttaagcacttagtaaacatctctggcct

SEQ ID NO: 554451 - DNA, 33 bp, Homo sapien
atattattgtgtatccaggaataggaaggccca

SEQ ID NO: 554452 - DNA, 33 bp, Homo sapien
atattattgtgtatccgggaataggaaggccca

SEQ ID NO: 554453 - DNA, 33 bp, Homo sapien
tgaggctactattgtaactgtttgttagcacca

SEQ ID NO: 554454 - DNA, 33 bp, Homo sapien
tgaggctactattgtacctgtttgttagcacca

SEQ ID NO: 554455 - DNA, 33 bp, Homo sapien
tgtatagtttcgaacacgaagaaaagatacaga

SEQ ID NO: 554456 - DNA, 33 bp, Homo sapien
tgtatagtttcgaacatgaagaaaagatacaga

SEQ ID NO: 554457 - DNA, 33 bp, Homo sapien
aaaatcctggaacttacgagtggtaatagcaag

SEQ ID NO: 554458 - DNA, 33 bp, Homo sapien
aaaatcctggaacttatgagtggtaatagcaag

SEQ ID NO: 554459 - DNA, 33 bp, Homo sapien
ttaatatagtccatcaaatcaacaggaaaaaat

SEQ ID NO: 554460 - DNA, 33 bp, Homo sapien
ttaatatagtccatcagatcaacaggaaaaaat

SEQ ID NO: 554461 - DNA, 33 bp, Homo sapien
gaggaggacaggggccaaatccacccctctcag

SEQ ID NO: 554462 - DNA, 33 bp, Homo sapien
gaggaggacaggggccgaatccacccctctcag

SEQ ID NO: 554463 - DNA, 33 bp, Homo sapien
ttcctttctcctattacgcatctgccacaagtg

SEQ ID NO: 554464 - DNA, 33 bp, Homo sapien
ttcctttctcctattatgcatctgccacaagtg

SEQ ID NO: 554465 - DNA, 33 bp, Homo sapien
cctacaaaattgtaataaacactgcatctggca

SEQ ID NO: 554466 - DNA, 33 bp, Homo sapien
cctacaaaattgtaatcaacactgcatctggca

SEQ ID NO: 554467 - DNA, 33 bp, Homo sapien
caagaatatagctcaaatgtctatcttgaaaag

SEQ ID NO: 554468 - DNA, 33 bp, Homo sapien
caagaatatagctcaagtgtctatcttgaaaag

SEQ ID NO: 554469 - DNA, 33 bp, Homo sapien
aggatgatatacagatcaaatgccaggtgattt

SEQ ID NO: 554470 - DNA, 33 bp, Homo sapien
aggatgatatacagatgaaatgccaggtgattt

SEQ ID NO: 554471 - DNA, 33 bp, Homo sapien
ggtttctacccgaccgaattttacgtggtgctg

SEQ ID NO: 554472 - DNA, 33 bp, Homo sapien
ggtttctacccgaccgcattttacgtggtgctg

SEQ ID NO: 554473 - DNA, 33 bp, Homo sapien
tctgctgaatatattgacaaaggaatttcatat

SEQ ID NO: 554474 - DNA, 33 bp, Homo sapien
tctgctgaatatattggcaaaggaatttcatat

SEQ ID NO: 554475 - DNA, 33 bp, Homo sapien
attggaaagcagggaaaaggtaagaactgatgg

SEQ ID NO: 554476 - DNA, 33 bp, Homo sapien
attggaaagcagggaagaggtaagaactgatgg

SEQ ID NO: 554477 - DNA, 33 bp, Homo sapien
ttcatctccaaagatactacacttgtacagggt

SEQ ID NO: 554478 - DNA, 33 bp, Homo sapien
ttcatctccaaagatattacacttgtacagggt

SEQ ID NO: 554479 - DNA, 33 bp, Homo sapien
aataaaagctataacacggtactatccttatca

SEQ ID NO: 554480 - DNA, 33 bp, Homo sapien
aataaaagctataacagggtactatccttatca

SEQ ID NO: 554481 - DNA, 33 bp, Homo sapien
atggaggcagggattacgattttgtttactaat

SEQ ID NO: 554482 - DNA, 33 bp, Homo sapien
atggaggcagggattatgattttgtttactaat

SEQ ID NO: 554483 - DNA, 33 bp, Homo sapien
catgcccggctactaaatgcagtattccaacat

SEQ ID NO: 554484 - DNA, 33 bp, Homo sapien
catgcccggctactaagtgcagtattccaacat

SEQ ID NO: 554485 - DNA, 33 bp, Homo sapien
gccctcagtacttatcaccgtctgatatcttgt

SEQ ID NO: 554486 - DNA, 33 bp, Homo sapien
gccctcagtacttatctccgtctgatatcttgt

SEQ ID NO: 554487 - DNA, 33 bp, Homo sapien
tgagaagccattggaggatttggagcagaggaa

SEQ ID NO: 554488 - DNA, 33 bp, Homo sapien
tgagaagccattggagtatttggagcagaggaa

SEQ ID NO: 554489 - DNA, 33 bp, Homo sapien
acaagggcactacaacaaagggagtaagtggta

SEQ ID NO: 554490 - DNA, 33 bp, Homo sapien
acaagggcactacaacgaagggagtaagtggta

SEQ ID NO: 554491 - DNA, 33 bp, Homo sapien
tgaaataatgtctccaaggttacacagctaatg

SEQ ID NO: 554492 - DNA, 33 bp, Homo sapien
tgaaataatgtctccagggttacacagctaatg

SEQ ID NO: 554493 - DNA, 33 bp, Homo sapien
catggtttcgagcagaaaagacgctatgggaat

SEQ ID NO: 554494 - DNA, 33 bp, Homo sapien
catggtttcgagcagagaagacgctatgggaat

SEQ ID NO: 554495 - DNA, 33 bp, Homo sapien
tacctacctgataggaagttctcgggagcacag

SEQ ID NO: 554496 - DNA, 33 bp, Homo sapien
tacctacctgataggaggttctcgggagcacag

SEQ ID NO: 554497 - DNA, 33 bp, Homo sapien
caaactagctcataaaatgcatgtagaatacaa

SEQ ID NO: 554498 - DNA, 33 bp, Homo sapien
caaactagctcataaagtgcatgtagaatacaa

SEQ ID NO: 554499 - DNA, 33 bp, Homo sapien
ccaggttatctccaaacggttggtgatgagcga

SEQ ID NO: 554500 - DNA, 33 bp, Homo sapien
ccaggttatctccaaagggttggtgatgagcga

SEQ ID NO: 554501 - DNA, 33 bp, Homo sapien
cagagcgataaccctaacaaactgccaggtggg

SEQ ID NO: 554502 - DNA, 33 bp, Homo sapien
cagagcgataaccctagcaaactgccaggtggg

SEQ ID NO: 554503 - DNA, 33 bp, Homo sapien
tctctctttcagtgcaactattcctacccactg

SEQ ID NO: 554504 - DNA, 33 bp, Homo sapien
tctctctttcagtgcagctattcctacccactg

SEQ ID NO: 554505 - DNA, 33 bp, Homo sapien
tagattccgtagtggacactgccagtgatctgc

SEQ ID NO: 554506 - DNA, 33 bp, Homo sapien
tagattccgtagtggatactgccagtgatctgc

SEQ ID NO: 554507 - DNA, 33 bp, Homo sapien
atgacaatgaaactgacggaaaatttggatgct

SEQ ID NO: 554508 - DNA, 33 bp, Homo sapien
atgacaatgaaactgatggaaaatttggatgct

SEQ ID NO: 554509 - DNA, 33 bp, Homo sapien
tgaatgtacacaacacaactttcgacaaacaca

SEQ ID NO: 554510 - DNA, 33 bp, Homo sapien
tgaatgtacacaacacgactttcgacaaacaca

SEQ ID NO: 554511 - DNA, 33 bp, Homo sapien
gttacaattaaatgagaaattcagttgctcagt

SEQ ID NO: 554512 - DNA, 33 bp, Homo sapien
gttacaattaaatgaggaattcagttgctcagt

SEQ ID NO: 554513 - DNA, 33 bp, Homo sapien
ataactgttctccagcaaaataccacagacaaa

SEQ ID NO: 554514 - DNA, 33 bp, Homo sapien
ataactgttctccagccaaataccacagacaaa

SEQ ID NO: 554515 - DNA, 33 bp, Homo sapien
tataaaaatggctctcaatctctactattgaaa

SEQ ID NO: 554516 - DNA, 33 bp, Homo sapien
tataaaaatggctctcgatctctactattgaaa

SEQ ID NO: 554517 - DNA, 33 bp, Homo sapien
gcattaataaagcttacgagactgctacatgaa

SEQ ID NO: 554518 - DNA, 33 bp, Homo sapien
gcattaataaagcttatgagactgctacatgaa

SEQ ID NO: 554519 - DNA, 33 bp, Homo sapien
ctgatttggagggtccaattgagttagcaacct

SEQ ID NO: 554520 - DNA, 33 bp, Homo sapien
ctgatttggagggtccgattgagttagcaacct

SEQ ID NO: 554521 - DNA, 33 bp, Homo sapien
tttctcactttatctacaaactgtccaaaccag

SEQ ID NO: 554522 - DNA, 33 bp, Homo sapien
tttctcactttatctataaactgtccaaaccag

SEQ ID NO: 554523 - DNA, 33 bp, Homo sapien
tagttcacacgagatacggttgtttacaagtct

SEQ ID NO: 554524 - DNA, 33 bp, Homo sapien
tagttcacacgagatatggttgtttacaagtct

SEQ ID NO: 554525 - DNA, 33 bp, Homo sapien
agaactggtttttcaacaatcaagtccactgtt

SEQ ID NO: 554526 - DNA, 33 bp, Homo sapien
agaactggtttttcaataatcaagtccactgtt

SEQ ID NO: 554527 - DNA, 33 bp, Homo sapien
tgattctgaagaaggcaatcaatccatgggctg

SEQ ID NO: 554528 - DNA, 33 bp, Homo sapien
tgattctgaagaaggcgatcaatccatgggctg

SEQ ID NO: 554529 - DNA, 33 bp, Homo sapien
tctcactgtgttttcaaatcctcagtgttttca

SEQ ID NO: 554530 - DNA, 33 bp, Homo sapien
tctcactgtgttttcagatcctcagtgttttca

SEQ ID NO: 554531 - DNA, 33 bp, Homo sapien
aactgctcacccagtgaaaagtaaatccctgca

SEQ ID NO: 554532 - DNA, 33 bp, Homo sapien
aactgctcacccagtggaaagtaaatccctgca

SEQ ID NO: 554533 - DNA, 33 bp, Homo sapien
tggccctgatggatgacgtccacctcaaggtaa

SEQ ID NO: 554534 - DNA, 33 bp, Homo sapien
tggccctgatggatgatgtccacctcaaggtaa

SEQ ID NO: 554535 - DNA, 33 bp, Homo sapien
tccatttcctagaataaaaggtcacattgttca

SEQ ID NO: 554536 - DNA, 33 bp, Homo sapien
tccatttcctagaatagaaggtcacattgttca

SEQ ID NO: 554537 - DNA, 33 bp, Homo sapien
actccagtactgagccaatggttgatagggaat

SEQ ID NO: 554538 - DNA, 33 bp, Homo sapien
actccagtactgagccgatggttgatagggaat

SEQ ID NO: 554539 - DNA, 33 bp, Homo sapien
ctatgctctggcagaacctctggctcaggcacc

SEQ ID NO: 554540 - DNA, 33 bp, Homo sapien
ctatgctctggcagaatctctggctcaggcacc

SEQ ID NO: 554541 - DNA, 33 bp, Homo sapien
atttaaccagaatatcaatcatcaagccagaac

SEQ ID NO: 554542 - DNA, 33 bp, Homo sapien
atttaaccagaatatcgatcatcaagccagaac

SEQ ID NO: 554543 - DNA, 33 bp, Homo sapien
taagggcaaaggatccaaggcatttatagacca

SEQ ID NO: 554544 - DNA, 33 bp, Homo sapien
taagggcaaaggatccgaggcatttatagacca

SEQ ID NO: 554545 - DNA, 33 bp, Homo sapien
ctgtcacaggagggaactggtaaacactgtagg

SEQ ID NO: 554546 - DNA, 33 bp, Homo sapien
ctgtcacaggagggaattggtaaacactgtagg

SEQ ID NO: 554547 - DNA, 33 bp, Homo sapien
ttaaacaacaataacgacaacaattataacaac

SEQ ID NO: 554548 - DNA, 33 bp, Homo sapien
ttaaacaacaataacggcaacaattataacaac

SEQ ID NO: 554549 - DNA, 33 bp, Homo sapien
ggctaggccatccataactgcctcaatagagcc

SEQ ID NO: 554550 - DNA, 33 bp, Homo sapien
ggctaggccatccatagctgcctcaatagagcc

SEQ ID NO: 554551 - DNA, 33 bp, Homo sapien
ctggggttatgacctgaactgtactacacagga

SEQ ID NO: 554552 - DNA, 33 bp, Homo sapien
ctggggttatgacctggactgtactacacagga

SEQ ID NO: 554553 - DNA, 33 bp, Homo sapien
gggttttagagtccagcccccattggctcacta

SEQ ID NO: 554554 - DNA, 33 bp, Homo sapien
gggttttagagtccagtccccattggctcacta

SEQ ID NO: 554555 - DNA, 33 bp, Homo sapien
ggagtttcatcctggacggtaaaaagagatcat

SEQ ID NO: 554556 - DNA, 33 bp, Homo sapien
ggagtttcatcctggagggtaaaaagagatcat

SEQ ID NO: 554557 - DNA, 33 bp, Homo sapien
aagggcacaagaaatacgtgattttgacaacat

SEQ ID NO: 554558 - DNA, 33 bp, Homo sapien
aagggcacaagaaatatgtgattttgacaacat

SEQ ID NO: 554559 - DNA, 33 bp, Homo sapien
gttactggtcctcacaactgattggagagggca

SEQ ID NO: 554560 - DNA, 33 bp, Homo sapien
gttactggtcctcacagctgattggagagggca

SEQ ID NO: 554561 - DNA, 33 bp, Homo sapien
gtgaagttgagaagagccacaaatctgtaaaag

SEQ ID NO: 554562 - DNA, 33 bp, Homo sapien
gtgaagttgagaagagtcacaaatctgtaaaag

SEQ ID NO: 554563 - DNA, 33 bp, Homo sapien
aacagtctgatttcacactgtttcataggctct

SEQ ID NO: 554564 - DNA, 33 bp, Homo sapien
aacagtctgatttcacgctgtttcataggctct

SEQ ID NO: 554565 - DNA, 33 bp, Homo sapien
atggcacagaatactcaataatgataataatta

SEQ ID NO: 554566 - DNA, 33 bp, Homo sapien
atggcacagaatactcgataatgataataatta

SEQ ID NO: 554567 - DNA, 33 bp, Homo sapien
agtgaatcacaggagcaagtgagttgcccagtg

SEQ ID NO: 554568 - DNA, 33 bp, Homo sapien
agtgaatcacaggagcgagtgagttgcccagtg

SEQ ID NO: 554569 - DNA, 33 bp, Homo sapien
agttttgcaaaaggtacaatgcagagcgttgtc

SEQ ID NO: 554570 - DNA, 33 bp, Homo sapien
agttttgcaaaaggtataatgcagagcgttgtc

SEQ ID NO: 554571 - DNA, 33 bp, Homo sapien
tgtcatatgccttcccccaagctaacctacctg

SEQ ID NO: 554572 - DNA, 33 bp, Homo sapien
tgtcatatgccttcccgcaagctaacctacctg

SEQ ID NO: 554573 - DNA, 33 bp, Homo sapien
agtaatcactaggggaccaatggctcaggcagg

SEQ ID NO: 554574 - DNA, 33 bp, Homo sapien
agtaatcactaggggatcaatggctcaggcagg

SEQ ID NO: 554575 - DNA, 33 bp, Homo sapien
gcagcattagatgacacatacattccgtcacat

SEQ ID NO: 554576 - DNA, 33 bp, Homo sapien
gcagcattagatgacatatacattccgtcacat

SEQ ID NO: 554577 - DNA, 33 bp, Homo sapien
tcaaaataaatgcaaacggactaaacttctaga

SEQ ID NO: 554578 - DNA, 33 bp, Homo sapien
tcaaaataaatgcaaatggactaaacttctaga

SEQ ID NO: 554579 - DNA, 33 bp, Homo sapien
caataaataacagataccatcacaggcatggat

SEQ ID NO: 554580 - DNA, 33 bp, Homo sapien
caataaataacagatatcatcacaggcatggat

SEQ ID NO: 554581 - DNA, 33 bp, Homo sapien
atcactgccaaaaaaacacaaggaatgctgggc

SEQ ID NO: 554582 - DNA, 33 bp, Homo sapien
atcactgccaaaaaaagacaaggaatgctgggc

SEQ ID NO: 554583 - DNA, 33 bp, Homo sapien
ggcactgaaactgaaacagcacattccacttcc

SEQ ID NO: 554584 - DNA, 33 bp, Homo sapien
ggcactgaaactgaaatagcacattccacttcc

SEQ ID NO: 554585 - DNA, 33 bp, Homo sapien
tattttgatgtattcacgacggttaaaataatt

SEQ ID NO: 554586 - DNA, 33 bp, Homo sapien
tattttgatgtattcatgacggttaaaataatt

SEQ ID NO: 554587 - DNA, 33 bp, Homo sapien
gattgaggaaatggaagccaagaatgcgtgaca

SEQ ID NO: 554588 - DNA, 33 bp, Homo sapien
gattgaggaaatggaatccaagaatgcgtgaca

SEQ ID NO: 554589 - DNA, 33 bp, Homo sapien
ggtacactgggaaagacagaaaatatgaaagac

SEQ ID NO: 554590 - DNA, 33 bp, Homo sapien
ggtacactgggaaagagagaaaatatgaaagac

SEQ ID NO: 554591 - DNA, 33 bp, Homo sapien
gacgctacatttttccccctaatgttattttga

SEQ ID NO: 554592 - DNA, 33 bp, Homo sapien
gacgctacatttttcctcctaatgttattttga

SEQ ID NO: 554593 - DNA, 33 bp, Homo sapien
ttataccatcttgttcccttctaactgttgtgg

SEQ ID NO: 554594 - DNA, 33 bp, Homo sapien
ttataccatcttgttctcttctaactgttgtgg

SEQ ID NO: 554595 - DNA, 33 bp, Homo sapien
acaatttttttaaagcgatgtgcttggtgagtg

SEQ ID NO: 554596 - DNA, 33 bp, Homo sapien
acaatttttttaaagctatgtgcttggtgagtg

SEQ ID NO: 554597 - DNA, 33 bp, Homo sapien
gtggactgagcacaaaatcaaaaactgtttcag

SEQ ID NO: 554598 - DNA, 33 bp, Homo sapien
gtggactgagcacaaagtcaaaaactgtttcag

SEQ ID NO: 554599 - DNA, 33 bp, Homo sapien
cccataattcagaaacagcttattcacttagca

SEQ ID NO: 554600 - DNA, 33 bp, Homo sapien
cccataattcagaaacggcttattcacttagca

SEQ ID NO: 554601 - DNA, 33 bp, Homo sapien
gcaggaggtgaccaataaacacttgtagaatgg

SEQ ID NO: 554602 - DNA, 33 bp, Homo sapien
gcaggaggtgaccaatcaacacttgtagaatgg

SEQ ID NO: 554603 - DNA, 33 bp, Homo sapien
tcttcctttgcttctccagtttttttgcatgga

SEQ ID NO: 554604 - DNA, 33 bp, Homo sapien
tcttcctttgcttctcgagtttttttgcatgga

SEQ ID NO: 554605 - DNA, 33 bp, Homo sapien
aagtaataagatctagcagctgttctaacaact

SEQ ID NO: 554606 - DNA, 33 bp, Homo sapien
aagtaataagatctagtagctgttctaacaact

SEQ ID NO: 554607 - DNA, 33 bp, Homo sapien
actgtccttcttcctacgaacaaaccaagtttt

SEQ ID NO: 554608 - DNA, 33 bp, Homo sapien
actgtccttcttcctatgaacaaaccaagtttt

SEQ ID NO: 554609 - DNA, 33 bp, Homo sapien
ctgaaatgaaacaagacaagacagtaatatgaa

SEQ ID NO: 554610 - DNA, 33 bp, Homo sapien
ctgaaatgaaacaagataagacagtaatatgaa

SEQ ID NO: 554611 - DNA, 33 bp, Homo sapien
agtatttgtctaaaaagtctaacctctgggctt

SEQ ID NO: 554612 - DNA, 33 bp, Homo sapien
agtatttgtctaaaaattctaacctctgggctt

SEQ ID NO: 554613 - DNA, 33 bp, Homo sapien
gaagtttgagaactaccgcactggagctgcgct

SEQ ID NO: 554614 - DNA, 33 bp, Homo sapien
gaagtttgagaactactgcactggagctgcgct

SEQ ID NO: 554615 - DNA, 33 bp, Homo sapien
acacacactcggggtacaaccttcacacaagca

SEQ ID NO: 554616 - DNA, 33 bp, Homo sapien
acacacactcggggtataaccttcacacaagca

SEQ ID NO: 554617 - DNA, 33 bp, Homo sapien
aatgacaacttcgctacacaaccatacacaccg

SEQ ID NO: 554618 - DNA, 33 bp, Homo sapien
aatgacaacttcgctatacaaccatacacaccg

SEQ ID NO: 554619 - DNA, 33 bp, Homo sapien
cctccaggaaattaaccctttagtgtttctggc

SEQ ID NO: 554620 - DNA, 33 bp, Homo sapien
cctccaggaaattaacgctttagtgtttctggc

SEQ ID NO: 554621 - DNA, 33 bp, Homo sapien
gaatattgtcagcaaactctgggacagtaatcc

SEQ ID NO: 554622 - DNA, 33 bp, Homo sapien
gaatattgtcagcaaattctgggacagtaatcc

SEQ ID NO: 554623 - DNA, 33 bp, Homo sapien
gtttgacttgctcctcactgattatagactaca

SEQ ID NO: 554624 - DNA, 33 bp, Homo sapien
gtttgacttgctcctccctgattatagactaca

SEQ ID NO: 554625 - DNA, 33 bp, Homo sapien
gcccggtcttcactggcactgctctggtgatgg

SEQ ID NO: 554626 - DNA, 33 bp, Homo sapien
gcccggtcttcactggtactgctctggtgatgg

SEQ ID NO: 554627 - DNA, 33 bp, Homo sapien
gagaaaatattcgtgacctttggttagtcaaag

SEQ ID NO: 554628 - DNA, 33 bp, Homo sapien
gagaaaatattcgtgatctttggttagtcaaag

SEQ ID NO: 554629 - DNA, 33 bp, Homo sapien
atgaaccttcttggacagcaggtgaatatattt

SEQ ID NO: 554630 - DNA, 33 bp, Homo sapien
atgaaccttcttggacggcaggtgaatatattt

SEQ ID NO: 554631 - DNA, 33 bp, Homo sapien
cattagaagtatttgcccttgcattccatttga

SEQ ID NO: 554632 - DNA, 33 bp, Homo sapien
cattagaagtatttgctcttgcattccatttga

SEQ ID NO: 554633 - DNA, 33 bp, Homo sapien
cccttcggcaggataacgtgctgtttagctaac

SEQ ID NO: 554634 - DNA, 33 bp, Homo sapien
cccttcggcaggataatgtgctgtttagctaac

SEQ ID NO: 554635 - DNA, 33 bp, Homo sapien
cagattccatcaagaggccccatgaaaatagaa

SEQ ID NO: 554636 - DNA, 33 bp, Homo sapien
cagattccatcaagagtccccatgaaaatagaa

SEQ ID NO: 554637 - DNA, 33 bp, Homo sapien
cctggctcctggtagacgagatctggctataca

SEQ ID NO: 554638 - DNA, 33 bp, Homo sapien
cctggctcctggtagatgagatctggctataca

SEQ ID NO: 554639 - DNA, 33 bp, Homo sapien
gtgttcttgccaaaaagtgtcttgttttgctga

SEQ ID NO: 554640 - DNA, 33 bp, Homo sapien
gtgttcttgccaaaaattgtcttgttttgctga

SEQ ID NO: 554641 - DNA, 33 bp, Homo sapien
cttggcccaaaccgaagggcttccaccatgccc

SEQ ID NO: 554642 - DNA, 33 bp, Homo sapien
cttggcccaaaccgaatggcttccaccatgccc

SEQ ID NO: 554643 - DNA, 33 bp, Homo sapien
ggcaaggaggagaaacagtgaccagttcttatg

SEQ ID NO: 554644 - DNA, 33 bp, Homo sapien
ggcaaggaggagaaacggtgaccagttcttatg

SEQ ID NO: 554645 - DNA, 33 bp, Homo sapien
ttccctgccaaactcacgcttcctttctcatga

SEQ ID NO: 554646 - DNA, 33 bp, Homo sapien
ttccctgccaaactcatgcttcctttctcatga

SEQ ID NO: 554647 - DNA, 33 bp, Homo sapien
ctcagaatttgactaccctagactccttatgta

SEQ ID NO: 554648 - DNA, 33 bp, Homo sapien
ctcagaatttgactactctagactccttatgta

SEQ ID NO: 554649 - DNA, 33 bp, Homo sapien
gcatttcaaattggtgcaaattgatacttgaaa

SEQ ID NO: 554650 - DNA, 33 bp, Homo sapien
gcatttcaaattggtggaaattgatacttgaaa

SEQ ID NO: 554651 - DNA, 33 bp, Homo sapien
agatcttttcctagacgccatcctcttccattg

SEQ ID NO: 554652 - DNA, 33 bp, Homo sapien
agatcttttcctagactccatcctcttccattg

SEQ ID NO: 554653 - DNA, 33 bp, Homo sapien
aaagttcatataggggaaaaagatcatctgaaa

SEQ ID NO: 554654 - DNA, 33 bp, Homo sapien
aaagttcatatagggggaaaagatcatctgaaa

SEQ ID NO: 554655 - DNA, 33 bp, Homo sapien
tggccagaggcatgccagaagcagagtatatat

SEQ ID NO: 554656 - DNA, 33 bp, Homo sapien
tggccagaggcatgccggaagcagagtatatat

SEQ ID NO: 554657 - DNA, 33 bp, Homo sapien
aaagtaaaggagtaaactgaggcaagattgtca

SEQ ID NO: 554658 - DNA, 33 bp, Homo sapien
aaagtaaaggagtaaattgaggcaagattgtca

SEQ ID NO: 554659 - DNA, 33 bp, Homo sapien
aattgcttgggatacaaaagtgaggaagtcagt

SEQ ID NO: 554660 - DNA, 33 bp, Homo sapien
aattgcttgggatacacaagtgaggaagtcagt

SEQ ID NO: 554661 - DNA, 33 bp, Homo sapien
ttttacttccagtgcaataataaatgtttccaa

SEQ ID NO: 554662 - DNA, 33 bp, Homo sapien
ttttacttccagtgcagtaataaatgtttccaa

SEQ ID NO: 554663 - DNA, 33 bp, Homo sapien
aattaggccttgctacaccaagtgtgatccacc

SEQ ID NO: 554664 - DNA, 33 bp, Homo sapien
aattaggccttgctacgccaagtgtgatccacc

SEQ ID NO: 554665 - DNA, 33 bp, Homo sapien
tttaaatagtgagtgaaaaaggaactacttctt

SEQ ID NO: 554666 - DNA, 33 bp, Homo sapien
tttaaatagtgagtgagaaaggaactacttctt

SEQ ID NO: 554667 - DNA, 33 bp, Homo sapien
agggcttttgttgagcaagtagtggttaataga

SEQ ID NO: 554668 - DNA, 33 bp, Homo sapien
agggcttttgttgagcgagtagtggttaataga

SEQ ID NO: 554669 - DNA, 33 bp, Homo sapien
gtctcagaagagctaactattttgcccaagttc

SEQ ID NO: 554670 - DNA, 33 bp, Homo sapien
gtctcagaagagctaagtattttgcccaagttc

SEQ ID NO: 554671 - DNA, 33 bp, Homo sapien
atgccaaaaataagcaagattatggggaggaga

SEQ ID NO: 554672 - DNA, 33 bp, Homo sapien
atgccaaaaataagcaggattatggggaggaga

SEQ ID NO: 554673 - DNA, 33 bp, Homo sapien
gataaccagaacacatcaaaaagcagttcaaca

SEQ ID NO: 554674 - DNA, 33 bp, Homo sapien
gataaccagaacacatgaaaaagcagttcaaca

SEQ ID NO: 554675 - DNA, 33 bp, Homo sapien
atgcataataatttaccaaatgctgcaatgcac

SEQ ID NO: 554676 - DNA, 33 bp, Homo sapien
atgcataataatttacgaaatgctgcaatgcac

SEQ ID NO: 554677 - DNA, 33 bp, Homo sapien
ggacaagaaagggacaatggtttcacttctagg

SEQ ID NO: 554678 - DNA, 33 bp, Homo sapien
ggacaagaaagggacattggtttcacttctagg

SEQ ID NO: 554679 - DNA, 33 bp, Homo sapien
gtcagaatctgtgcgacgtgagatgtgaccttc

SEQ ID NO: 554680 - DNA, 33 bp, Homo sapien
gtcagaatctgtgcgatgtgagatgtgaccttc

SEQ ID NO: 554681 - DNA, 33 bp, Homo sapien
agcatgacagtgatagaagaaattaaagtgaaa

SEQ ID NO: 554682 - DNA, 33 bp, Homo sapien
agcatgacagtgataggagaaattaaagtgaaa

SEQ ID NO: 554683 - DNA, 33 bp, Homo sapien
gtgacatgagagcttcaaaagtttagaacagct

SEQ ID NO: 554684 - DNA, 33 bp, Homo sapien
gtgacatgagagcttcgaaagtttagaacagct

SEQ ID NO: 554685 - DNA, 33 bp, Homo sapien
gcagtccgggcattctcactggagtgaatttgc

SEQ ID NO: 554686 - DNA, 33 bp, Homo sapien
gcagtccgggcattcttactggagtgaatttgc

SEQ ID NO: 554687 - DNA, 33 bp, Homo sapien
ttcctgtaatgtgctacgtgtgcaaaggaggta

SEQ ID NO: 554688 - DNA, 33 bp, Homo sapien
ttcctgtaatgtgctatgtgtgcaaaggaggta

SEQ ID NO: 554689 - DNA, 33 bp, Homo sapien
gcttcattctcattaccctgtattagttaagca

SEQ ID NO: 554690 - DNA, 33 bp, Homo sapien
gcttcattctcattactctgtattagttaagca

SEQ ID NO: 554691 - DNA, 33 bp, Homo sapien
tgttaactggttggagacagactggagaatttc

SEQ ID NO: 554692 - DNA, 33 bp, Homo sapien
tgttaactggttggagtcagactggagaatttc

SEQ ID NO: 554693 - DNA, 33 bp, Homo sapien
gaggaaggcttctttgcagttaagataagagga

SEQ ID NO: 554694 - DNA, 33 bp, Homo sapien
gaggaaggcttctttggagttaagataagagga

SEQ ID NO: 554695 - DNA, 33 bp, Homo sapien
atgagttgagagttaccagagtacgaggaaagg

SEQ ID NO: 554696 - DNA, 33 bp, Homo sapien
atgagttgagagttactagagtacgaggaaagg

SEQ ID NO: 554697 - DNA, 33 bp, Homo sapien
gcttcaaccatgaggaggagaataatatcctaa

SEQ ID NO: 554698 - DNA, 33 bp, Homo sapien
gcttcaaccatgaggatgagaataatatcctaa

SEQ ID NO: 554699 - DNA, 33 bp, Homo sapien
cactcataatccaccccgcattccactcatcag

SEQ ID NO: 554700 - DNA, 33 bp, Homo sapien
cactcataatccaccctgcattccactcatcag

SEQ ID NO: 554701 - DNA, 33 bp, Homo sapien
gcagcagaggggtgcaacataaggaacaaaatg

SEQ ID NO: 554702 - DNA, 33 bp, Homo sapien
gcagcagaggggtgcagcataaggaacaaaatg

SEQ ID NO: 554703 - DNA, 33 bp, Homo sapien
tgttttggcttaaatacgcggactttgttaact

SEQ ID NO: 554704 - DNA, 33 bp, Homo sapien
tgttttggcttaaatatgcggactttgttaact

SEQ ID NO: 554705 - DNA, 33 bp, Homo sapien
agttcctatgaggcaaagtcttaccgcctgatt

SEQ ID NO: 554706 - DNA, 33 bp, Homo sapien
agttcctatgaggcaatgtcttaccgcctgatt

SEQ ID NO: 554707 - DNA, 33 bp, Homo sapien
taagaaatgttctcaaagatatgcagatagtaa

SEQ ID NO: 554708 - DNA, 33 bp, Homo sapien
taagaaatgttctcaaggatatgcagatagtaa

SEQ ID NO: 554709 - DNA, 33 bp, Homo sapien
acgttgggtttcttccacctgttgcttactgtg

SEQ ID NO: 554710 - DNA, 33 bp, Homo sapien
acgttgggtttcttccgcctgttgcttactgtg

SEQ ID NO: 554711 - DNA, 33 bp, Homo sapien
tagaactggtactcaaaatgtccacagttaacc

SEQ ID NO: 554712 - DNA, 33 bp, Homo sapien
tagaactggtactcaagatgtccacagttaacc

SEQ ID NO: 554713 - DNA, 33 bp, Homo sapien
cagtagtgaaactaccaatgcaaaattctagct

SEQ ID NO: 554714 - DNA, 33 bp, Homo sapien
cagtagtgaaactaccgatgcaaaattctagct

SEQ ID NO: 554715 - DNA, 33 bp, Homo sapien
agacatgctttattcacgtgtttccctgtcttt

SEQ ID NO: 554716 - DNA, 33 bp, Homo sapien
agacatgctttattcatgtgtttccctgtcttt

SEQ ID NO: 554717 - DNA, 33 bp, Homo sapien
gggggatgtagtgaccaaaaggaccactctcta

SEQ ID NO: 554718 - DNA, 33 bp, Homo sapien
gggggatgtagtgaccgaaaggaccactctcta

SEQ ID NO: 554719 - DNA, 33 bp, Homo sapien
ctccatgtttggtcacaatctgtaggtgagact

SEQ ID NO: 554720 - DNA, 33 bp, Homo sapien
ctccatgtttggtcacgatctgtaggtgagact

SEQ ID NO: 554721 - DNA, 33 bp, Homo sapien
ctgcgttcagagggccaagtcaatgtcacagga

SEQ ID NO: 554722 - DNA, 33 bp, Homo sapien
ctgcgttcagagggccgagtcaatgtcacagga

SEQ ID NO: 554723 - DNA, 33 bp, Homo sapien
cacagagttaccagaaaccattggaattggcca

SEQ ID NO: 554724 - DNA, 33 bp, Homo sapien
cacagagttaccagaagccattggaattggcca

SEQ ID NO: 554725 - DNA, 33 bp, Homo sapien
atatgcaaattgaaacaaatgagtgtgttgtca

SEQ ID NO: 554726 - DNA, 33 bp, Homo sapien
atatgcaaattgaaacgaatgagtgtgttgtca

SEQ ID NO: 554727 - DNA, 33 bp, Homo sapien
gtaggattccgtaagaacctggttgctatcaaa

SEQ ID NO: 554728 - DNA, 33 bp, Homo sapien
gtaggattccgtaagaccctggttgctatcaaa

SEQ ID NO: 554729 - DNA, 33 bp, Homo sapien
tcttcttttccttttacgtattgaaagttgatg

SEQ ID NO: 554730 - DNA, 33 bp, Homo sapien
tcttcttttccttttatgtattgaaagttgatg

SEQ ID NO: 554731 - DNA, 33 bp, Homo sapien
gtctcaggataacagcagagaagactgagattt

SEQ ID NO: 554732 - DNA, 33 bp, Homo sapien
gtctcaggataacagcggagaagactgagattt

SEQ ID NO: 554733 - DNA, 33 bp, Homo sapien
gcagaattctctcacactaaatttttatacact

SEQ ID NO: 554734 - DNA, 33 bp, Homo sapien
gcagaattctctcacattaaatttttatacact

SEQ ID NO: 554735 - DNA, 33 bp, Homo sapien
gagaaggaaagaaaaacaaggaagatacagaag

SEQ ID NO: 554736 - DNA, 33 bp, Homo sapien
gagaaggaaagaaaaataaggaagatacagaag

SEQ ID NO: 554737 - DNA, 33 bp, Homo sapien
caagaaagagactctactaaacctctacctatc

SEQ ID NO: 554738 - DNA, 33 bp, Homo sapien
caagaaagagactctattaaacctctacctatc

SEQ ID NO: 554739 - DNA, 33 bp, Homo sapien
tttggcaacagtctgaactgaagagaaagcccc

SEQ ID NO: 554740 - DNA, 33 bp, Homo sapien
tttggcaacagtctgagctgaagagaaagcccc

SEQ ID NO: 554741 - DNA, 33 bp, Homo sapien
tcagtttcagcaaacccggtgcaggccccctca

SEQ ID NO: 554742 - DNA, 33 bp, Homo sapien
tcagtttcagcaaacctggtgcaggccccctca

SEQ ID NO: 554743 - DNA, 33 bp, Homo sapien
ctaaattgattttacaactcactaacagatctt

SEQ ID NO: 554744 - DNA, 33 bp, Homo sapien
ctaaattgattttacagctcactaacagatctt

SEQ ID NO: 554745 - DNA, 33 bp, Homo sapien
ggatagctgagggaaaagactagagagccctgg

SEQ ID NO: 554746 - DNA, 33 bp, Homo sapien
ggatagctgagggaaaggactagagagccctgg

SEQ ID NO: 554747 - DNA, 33 bp, Homo sapien
gctacttccatcagcaacgggtacttgtcatca

SEQ ID NO: 554748 - DNA, 33 bp, Homo sapien
gctacttccatcagcagcgggtacttgtcatca

SEQ ID NO: 554749 - DNA, 33 bp, Homo sapien
gcctgttcgtccattaaaaatgcaggattccca

SEQ ID NO: 554750 - DNA, 33 bp, Homo sapien
gcctgttcgtccattacaaatgcaggattccca

SEQ ID NO: 554751 - DNA, 33 bp, Homo sapien
tgttttgtaggtagagaccagctgaccacgtca

SEQ ID NO: 554752 - DNA, 33 bp, Homo sapien
tgttttgtaggtagaggccagctgaccacgtca

SEQ ID NO: 554753 - DNA, 33 bp, Homo sapien
ccaggtcatcagggagcacctggggtgacttca

SEQ ID NO: 554754 - DNA, 33 bp, Homo sapien
ccaggtcatcagggagtacctggggtgacttca

SEQ ID NO: 554755 - DNA, 33 bp, Homo sapien
tgctccaaggggatagaccttttttgccttaag

SEQ ID NO: 554756 - DNA, 33 bp, Homo sapien
tgctccaaggggataggccttttttgccttaag

SEQ ID NO: 554757 - DNA, 33 bp, Homo sapien
gtttcatagaactgggaacacagaagccagact

SEQ ID NO: 554758 - DNA, 33 bp, Homo sapien
gtttcatagaactgggtacacagaagccagact

SEQ ID NO: 554759 - DNA, 33 bp, Homo sapien
ttaaagtgaggtaggacgttaaggataagggaa

SEQ ID NO: 554760 - DNA, 33 bp, Homo sapien
ttaaagtgaggtaggatgttaaggataagggaa

SEQ ID NO: 554761 - DNA, 33 bp, Homo sapien
agcaggaaaacacatacacaaacccgcccgctg

SEQ ID NO: 554762 - DNA, 33 bp, Homo sapien
agcaggaaaacacatatacaaacccgcccgctg

SEQ ID NO: 554763 - DNA, 33 bp, Homo sapien
aggggcagtcctccaactcccagggcaggccct

SEQ ID NO: 554764 - DNA, 33 bp, Homo sapien
aggggcagtcctccaattcccagggcaggccct

SEQ ID NO: 554765 - DNA, 33 bp, Homo sapien
tccaagtgtggtttctcactaacaaaaaataaa

SEQ ID NO: 554766 - DNA, 33 bp, Homo sapien
tccaagtgtggtttcttactaacaaaaaataaa

SEQ ID NO: 554767 - DNA, 33 bp, Homo sapien
tgctggagctgcaggaatactttggcagtttgg

SEQ ID NO: 554768 - DNA, 33 bp, Homo sapien
tgctggagctgcaggagtactttggcagtttgg

SEQ ID NO: 554769 - DNA, 33 bp, Homo sapien
cctttgtgagggtgtcaagtagcctcaccggcc

SEQ ID NO: 554770 - DNA, 33 bp, Homo sapien
cctttgtgagggtgtcgagtagcctcaccggcc

SEQ ID NO: 554771 - DNA, 33 bp, Homo sapien
cttgtgggtcccctaaagttcctcacttgtagg

SEQ ID NO: 554772 - DNA, 33 bp, Homo sapien
cttgtgggtcccctaaggttcctcacttgtagg

SEQ ID NO: 554773 - DNA, 33 bp, Homo sapien
actagtaccagctacaagtcagccaggcgcagg

SEQ ID NO: 554774 - DNA, 33 bp, Homo sapien
actagtaccagctacaggtcagccaggcgcagg

SEQ ID NO: 554775 - DNA, 33 bp, Homo sapien
tggcctcaggttccacagccttcctatgagcag

SEQ ID NO: 554776 - DNA, 33 bp, Homo sapien
tggcctcaggttccacggccttcctatgagcag

SEQ ID NO: 554777 - DNA, 33 bp, Homo sapien
agcctctggatccagacagtttttgcctgggct

SEQ ID NO: 554778 - DNA, 33 bp, Homo sapien
agcctctggatccagagagtttttgcctgggct

SEQ ID NO: 554779 - DNA, 33 bp, Homo sapien
caatgtctcaggcaacactcttccctgcttctc

SEQ ID NO: 554780 - DNA, 33 bp, Homo sapien
caatgtctcaggcaacgctcttccctgcttctc

SEQ ID NO: 554781 - DNA, 33 bp, Homo sapien
ccatgacttccaaatacgtatcttaggatgaga

SEQ ID NO: 554782 - DNA, 33 bp, Homo sapien
ccatgacttccaaatatgtatcttaggatgaga

SEQ ID NO: 554783 - DNA, 33 bp, Homo sapien
aatgcggaaaattccaaggtgcataggggtggg

SEQ ID NO: 554784 - DNA, 33 bp, Homo sapien
aatgcggaaaattccagggtgcataggggtggg

SEQ ID NO: 554785 - DNA, 33 bp, Homo sapien
caggtatctaacagatcaaaggcatgggtttag

SEQ ID NO: 554786 - DNA, 33 bp, Homo sapien
caggtatctaacagatgaaaggcatgggtttag

SEQ ID NO: 554787 - DNA, 33 bp, Homo sapien
ccttgtatgtagtaaacgctgttcttttattag

SEQ ID NO: 554788 - DNA, 33 bp, Homo sapien
ccttgtatgtagtaaatgctgttcttttattag

SEQ ID NO: 554789 - DNA, 33 bp, Homo sapien
tttccatccttgttcaatcagccattcgggatt

SEQ ID NO: 554790 - DNA, 33 bp, Homo sapien
tttccatccttgttcagtcagccattcgggatt

SEQ ID NO: 554791 - DNA, 33 bp, Homo sapien
cctggatgggtccggacgcactctcttgcctgt

SEQ ID NO: 554792 - DNA, 33 bp, Homo sapien
cctggatgggtccggatgcactctcttgcctgt

SEQ ID NO: 554793 - DNA, 33 bp, Homo sapien
acaatctgagtgtgcacaagtttttacattaat

SEQ ID NO: 554794 - DNA, 33 bp, Homo sapien
acaatctgagtgtgcagaagtttttacattaat

SEQ ID NO: 554795 - DNA, 33 bp, Homo sapien
gaattgaactttgacaccaagtggagctgttag

SEQ ID NO: 554796 - DNA, 33 bp, Homo sapien
gaattgaactttgacatcaagtggagctgttag

SEQ ID NO: 554797 - DNA, 33 bp, Homo sapien
cttgccatagggaaaacggtcaggtaagcactt

SEQ ID NO: 554798 - DNA, 33 bp, Homo sapien
cttgccatagggaaaatggtcaggtaagcactt

SEQ ID NO: 554799 - DNA, 33 bp, Homo sapien
ggcagtggttgacacactgcacttaatacaggg

SEQ ID NO: 554800 - DNA, 33 bp, Homo sapien
ggcagtggttgacacattgcacttaatacaggg

SEQ ID NO: 554801 - DNA, 33 bp, Homo sapien
tttgtcactgtcatgaggcttggctggggttaa

SEQ ID NO: 554802 - DNA, 33 bp, Homo sapien
tttgtcactgtcatgatgcttggctggggttaa

SEQ ID NO: 554803 - DNA, 33 bp, Homo sapien
ataaagtggacaactacatcacgcgttatgcca

SEQ ID NO: 554804 - DNA, 33 bp, Homo sapien
ataaagtggacaactatatcacgcgttatgcca

SEQ ID NO: 554805 - DNA, 33 bp, Homo sapien
ctcaggttatcctcccacttagcaggtgggact

SEQ ID NO: 554806 - DNA, 33 bp, Homo sapien
ctcaggttatcctcccgcttagcaggtgggact

SEQ ID NO: 554807 - DNA, 33 bp, Homo sapien
agggagaagacctaaaaaaaacagaatttgagc

SEQ ID NO: 554808 - DNA, 33 bp, Homo sapien
agggagaagacctaaacaaaacagaatttgagc

SEQ ID NO: 554809 - DNA, 33 bp, Homo sapien
gctaggacagtgttacccgacccctttctcctt

SEQ ID NO: 554810 - DNA, 33 bp, Homo sapien
gctaggacagtgttactcgacccctttctcctt

SEQ ID NO: 554811 - DNA, 33 bp, Homo sapien
gaaatgatgatacttccatgacgacagtgagaa

SEQ ID NO: 554812 - DNA, 33 bp, Homo sapien
gaaatgatgatacttctatgacgacagtgagaa

SEQ ID NO: 554813 - DNA, 33 bp, Homo sapien
tatgaccttgaccatccaggaaacaacagctct

SEQ ID NO: 554814 - DNA, 33 bp, Homo sapien
tatgaccttgaccatctaggaaacaacagctct

SEQ ID NO: 554815 - DNA, 33 bp, Homo sapien
tgttttcacaaaggaaataaatccactggaaca

SEQ ID NO: 554816 - DNA, 33 bp, Homo sapien
tgttttcacaaaggaagtaaatccactggaaca

SEQ ID NO: 554817 - DNA, 33 bp, Homo sapien
aactggtttctcattcaatgcaggcttgtatgg

SEQ ID NO: 554818 - DNA, 33 bp, Homo sapien
aactggtttctcattcgatgcaggcttgtatgg

SEQ ID NO: 554819 - DNA, 33 bp, Homo sapien
aaattcacaaatattaccatcatgttataattg

SEQ ID NO: 554820 - DNA, 33 bp, Homo sapien
aaattcacaaatattatcatcatgttataattg

SEQ ID NO: 554821 - DNA, 33 bp, Homo sapien
tggagaaaggcacaagaagaaaacaccagtcaa

SEQ ID NO: 554822 - DNA, 33 bp, Homo sapien
tggagaaaggcacaaggagaaaacaccagtcaa

SEQ ID NO: 554823 - DNA, 33 bp, Homo sapien
gttagaatgcagggcacattaacaccagcatca

SEQ ID NO: 554824 - DNA, 33 bp, Homo sapien
gttagaatgcagggcagattaacaccagcatca

SEQ ID NO: 554825 - DNA, 33 bp, Homo sapien
accatgtgactttaacccaattcatagcacaaa

SEQ ID NO: 554826 - DNA, 33 bp, Homo sapien
accatgtgactttaactcaattcatagcacaaa

SEQ ID NO: 554827 - DNA, 33 bp, Homo sapien
tctaaagtgaacttcaaacacatccaatctgac

SEQ ID NO: 554828 - DNA, 33 bp, Homo sapien
tctaaagtgaacttcacacacatccaatctgac

SEQ ID NO: 554829 - DNA, 33 bp, Homo sapien
gtatcatggacagcaaacttatggaacttattc

SEQ ID NO: 554830 - DNA, 33 bp, Homo sapien
gtatcatggacagcaagcttatggaacttattc

SEQ ID NO: 554831 - DNA, 33 bp, Homo sapien
gtaggggagaggaaaaattcagccaagaggaca

SEQ ID NO: 554832 - DNA, 33 bp, Homo sapien
gtaggggagaggaaaagttcagccaagaggaca

SEQ ID NO: 554833 - DNA, 33 bp, Homo sapien
gctctcatgtccaaagaatccaaaaattcaaat

SEQ ID NO: 554834 - DNA, 33 bp, Homo sapien
gctctcatgtccaaaggatccaaaaattcaaat

SEQ ID NO: 554835 - DNA, 33 bp, Homo sapien
aaatttcaactgatggaaactataagacaaatg

SEQ ID NO: 554836 - DNA, 33 bp, Homo sapien
aaatttcaactgatggcaactataagacaaatg

SEQ ID NO: 554837 - DNA, 33 bp, Homo sapien
ctaccatagaattcacaatagtgttattcttgt

SEQ ID NO: 554838 - DNA, 33 bp, Homo sapien
ctaccatagaattcacgatagtgttattcttgt

SEQ ID NO: 554839 - DNA, 33 bp, Homo sapien
ggccgggctctaaaccaggctctgaatttgggc

SEQ ID NO: 554840 - DNA, 33 bp, Homo sapien
ggccgggctctaaaccgggctctgaatttgggc

SEQ ID NO: 554841 - DNA, 33 bp, Homo sapien
tctggctctaaggcaactgcaggcccaacgata

SEQ ID NO: 554842 - DNA, 33 bp, Homo sapien
tctggctctaaggcaattgcaggcccaacgata

SEQ ID NO: 554843 - DNA, 33 bp, Homo sapien
tttcttacctctgacaacatctagttccatctt

SEQ ID NO: 554844 - DNA, 33 bp, Homo sapien
tttcttacctctgacagcatctagttccatctt

SEQ ID NO: 554845 - DNA, 33 bp, Homo sapien
agggagtgtgtgagaaagaccaatatgctgaga

SEQ ID NO: 554846 - DNA, 33 bp, Homo sapien
agggagtgtgtgagaaggaccaatatgctgaga

SEQ ID NO: 554847 - DNA, 33 bp, Homo sapien
gctggattctttttgacgttcctatgccccaac

SEQ ID NO: 554848 - DNA, 33 bp, Homo sapien
gctggattctttttgatgttcctatgccccaac

SEQ ID NO: 554849 - DNA, 33 bp, Homo sapien
cgaatgagattgttgacagtgtgatgagaacta

SEQ ID NO: 554850 - DNA, 33 bp, Homo sapien
cgaatgagattgttgatagtgtgatgagaacta

SEQ ID NO: 554851 - DNA, 33 bp, Homo sapien
aagttctgagagaaaacggtttcctacctctga

SEQ ID NO: 554852 - DNA, 33 bp, Homo sapien
aagttctgagagaaaatggtttcctacctctga

SEQ ID NO: 554853 - DNA, 33 bp, Homo sapien
aaaaccatatattgaacgatgctgataacatga

SEQ ID NO: 554854 - DNA, 33 bp, Homo sapien
aaaaccatatattgaatgatgctgataacatga

SEQ ID NO: 554855 - DNA, 33 bp, Homo sapien
aaacgtagagttaccacgtgatccagaaaccca

SEQ ID NO: 554856 - DNA, 33 bp, Homo sapien
aaacgtagagttaccatgtgatccagaaaccca

SEQ ID NO: 554857 - DNA, 33 bp, Homo sapien
gagtttcgattccagcgctaacttcaatgtcca

SEQ ID NO: 554858 - DNA, 33 bp, Homo sapien
gagtttcgattccagctctaacttcaatgtcca

SEQ ID NO: 554859 - DNA, 33 bp, Homo sapien
cagccagattctgtcaaaccctcgcttctttgc

SEQ ID NO: 554860 - DNA, 33 bp, Homo sapien
cagccagattctgtcagaccctcgcttctttgc

SEQ ID NO: 554861 - DNA, 33 bp, Homo sapien
tgtctgctaagctaccaaatggtcttaaaaata

SEQ ID NO: 554862 - DNA, 33 bp, Homo sapien
tgtctgctaagctaccgaatggtcttaaaaata

SEQ ID NO: 554863 - DNA, 33 bp, Homo sapien
ttgtccttgcaaaaaaatacaaaattagcttgg

SEQ ID NO: 554864 - DNA, 33 bp, Homo sapien
ttgtccttgcaaaaaagtacaaaattagcttgg

SEQ ID NO: 554865 - DNA, 33 bp, Homo sapien
tgggttgtgagtgttacaaaattcattgtaaat

SEQ ID NO: 554866 - DNA, 33 bp, Homo sapien
tgggttgtgagtgttataaaattcattgtaaat

SEQ ID NO: 554867 - DNA, 33 bp, Homo sapien
ctccagcaatgtcaaccacttgggcttatttca

SEQ ID NO: 554868 - DNA, 33 bp, Homo sapien
ctccagcaatgtcaacgacttgggcttatttca

SEQ ID NO: 554869 - DNA, 33 bp, Homo sapien
aggcagttaaagaagcaaaatgcagcagggtgc

SEQ ID NO: 554870 - DNA, 33 bp, Homo sapien
aggcagttaaagaagcgaaatgcagcagggtgc

SEQ ID NO: 554871 - DNA, 33 bp, Homo sapien
catgatcactgagtgcagaggaaggaggcattc

SEQ ID NO: 554872 - DNA, 33 bp, Homo sapien
catgatcactgagtgcggaggaaggaggcattc

SEQ ID NO: 554873 - DNA, 33 bp, Homo sapien
gcccattcccaagcagaatcagagctgagcagc

SEQ ID NO: 554874 - DNA, 33 bp, Homo sapien
gcccattcccaagcaggatcagagctgagcagc

SEQ ID NO: 554875 - DNA, 33 bp, Homo sapien
gattgctatgccaatccgatagtggagtatggc

SEQ ID NO: 554876 - DNA, 33 bp, Homo sapien
gattgctatgccaatctgatagtggagtatggc

SEQ ID NO: 554877 - DNA, 33 bp, Homo sapien
gatccaggatgaactcacctcaagctccttaat

SEQ ID NO: 554878 - DNA, 33 bp, Homo sapien
gatccaggatgaactcgcctcaagctccttaat

SEQ ID NO: 554879 - DNA, 33 bp, Homo sapien
aaagattgaatactgcccaagtaagatctgatt

SEQ ID NO: 554880 - DNA, 33 bp, Homo sapien
aaagattgaatactgctcaagtaagatctgatt

SEQ ID NO: 554881 - DNA, 33 bp, Homo sapien
gaccaaagacactgcacgagtaaaagccaaaaa

SEQ ID NO: 554882 - DNA, 33 bp, Homo sapien
gaccaaagacactgcatgagtaaaagccaaaaa

SEQ ID NO: 554883 - DNA, 33 bp, Homo sapien
tcaatgtagccttttacggtccttgaccctgga

SEQ ID NO: 554884 - DNA, 33 bp, Homo sapien
tcaatgtagccttttatggtccttgaccctgga

SEQ ID NO: 554885 - DNA, 33 bp, Homo sapien
aggtggcaaattggaacagggtctgtggtgaag

SEQ ID NO: 554886 - DNA, 33 bp, Homo sapien
aggtggcaaattggaatagggtctgtggtgaag

SEQ ID NO: 554887 - DNA, 33 bp, Homo sapien
tggtgactcttggagaaggttctcatttgaaat

SEQ ID NO: 554888 - DNA, 33 bp, Homo sapien
tggtgactcttggagagggttctcatttgaaat

SEQ ID NO: 554889 - DNA, 33 bp, Homo sapien
atgataagtttaccacagagaaggcattaatta

SEQ ID NO: 554890 - DNA, 33 bp, Homo sapien
atgataagtttaccacggagaaggcattaatta

SEQ ID NO: 554891 - DNA, 33 bp, Homo sapien
atctatgttcataagacagactgacttgctgtt

SEQ ID NO: 554892 - DNA, 33 bp, Homo sapien
atctatgttcataagatagactgacttgctgtt

SEQ ID NO: 554893 - DNA, 33 bp, Homo sapien
acagatgctggggaggacatggagaaataggaa

SEQ ID NO: 554894 - DNA, 33 bp, Homo sapien
acagatgctggggaggtcatggagaaataggaa

SEQ ID NO: 554895 - DNA, 33 bp, Homo sapien
caacccagcacatgacagattctaaatgtttgt

SEQ ID NO: 554896 - DNA, 33 bp, Homo sapien
caacccagcacatgacggattctaaatgtttgt

SEQ ID NO: 554897 - DNA, 33 bp, Homo sapien
cacatgtggccagtgacacaacagggtaaatac

SEQ ID NO: 554898 - DNA, 33 bp, Homo sapien
cacatgtggccagtgatacaacagggtaaatac

SEQ ID NO: 554899 - DNA, 33 bp, Homo sapien
caaacacacaggctctaaaggtaatgatgtaca

SEQ ID NO: 554900 - DNA, 33 bp, Homo sapien
caaacacacaggctcttaaggtaatgatgtaca

SEQ ID NO: 554901 - DNA, 33 bp, Homo sapien
gcattcaagcaattaacaggagtgatttcaaaa

SEQ ID NO: 554902 - DNA, 33 bp, Homo sapien
gcattcaagcaattaataggagtgatttcaaaa

SEQ ID NO: 554903 - DNA, 33 bp, Homo sapien
aaaaaaagcacaaaaaattgacaatatatggat

SEQ ID NO: 554904 - DNA, 33 bp, Homo sapien
aaaaaaagcacaaaaagttgacaatatatggat

SEQ ID NO: 554905 - DNA, 33 bp, Homo sapien
gtttttggatatttgaaaattggtttgtaaaca

SEQ ID NO: 554906 - DNA, 33 bp, Homo sapien
gtttttggatatttgataattggtttgtaaaca

SEQ ID NO: 554907 - DNA, 33 bp, Homo sapien
actcaaacattggtgacatattcttagtgtgtt

SEQ ID NO: 554908 - DNA, 33 bp, Homo sapien
actcaaacattggtgatatattcttagtgtgtt

SEQ ID NO: 554909 - DNA, 33 bp, Homo sapien
tcatctcactgaggcccggacaaaaggttccag

SEQ ID NO: 554910 - DNA, 33 bp, Homo sapien
tcatctcactgaggcctggacaaaaggttccag

SEQ ID NO: 554911 - DNA, 33 bp, Homo sapien
gcaggtatgctgtgtccctttagccagggtgat

SEQ ID NO: 554912 - DNA, 33 bp, Homo sapien
gcaggtatgctgtgtcgctttagccagggtgat

SEQ ID NO: 554913 - DNA, 33 bp, Homo sapien
ggtagtcaaagctccccgcgttcggtgcatatt

SEQ ID NO: 554914 - DNA, 33 bp, Homo sapien
ggtagtcaaagctccctgcgttcggtgcatatt

SEQ ID NO: 554915 - DNA, 33 bp, Homo sapien
atacaaaattctaaccaaaatattagcaaactg

SEQ ID NO: 554916 - DNA, 33 bp, Homo sapien
atacaaaattctaacctaaatattagcaaactg

SEQ ID NO: 554917 - DNA, 33 bp, Homo sapien
ggctcactgagcttccaagttcagagtttttca

SEQ ID NO: 554918 - DNA, 33 bp, Homo sapien
ggctcactgagcttccgagttcagagtttttca

SEQ ID NO: 554919 - DNA, 33 bp, Homo sapien
ccttaacttctttaaaatgtaagctctgttttc

SEQ ID NO: 554920 - DNA, 33 bp, Homo sapien
ccttaacttctttaaagtgtaagctctgttttc

SEQ ID NO: 554921 - DNA, 33 bp, Homo sapien
acacatatgaagtaaacttaatctgtggtggaa

SEQ ID NO: 554922 - DNA, 33 bp, Homo sapien
acacatatgaagtaaatttaatctgtggtggaa

SEQ ID NO: 554923 - DNA, 33 bp, Homo sapien
acataaagttgttcataaaatacccttctggag

SEQ ID NO: 554924 - DNA, 33 bp, Homo sapien
acataaagttgttcatcaaatacccttctggag

SEQ ID NO: 554925 - DNA, 33 bp, Homo sapien
attttattttagatacaacaggaaggtaagggg

SEQ ID NO: 554926 - DNA, 33 bp, Homo sapien
attttattttagatacgacaggaaggtaagggg

SEQ ID NO: 554927 - DNA, 33 bp, Homo sapien
ctgtattgtagctccaatagacatccttaaatt

SEQ ID NO: 554928 - DNA, 33 bp, Homo sapien
ctgtattgtagctccagtagacatccttaaatt

SEQ ID NO: 554929 - DNA, 33 bp, Homo sapien
gggactgaatgtccaggagaagtggccggtcct

SEQ ID NO: 554930 - DNA, 33 bp, Homo sapien
gggactgaatgtccagtagaagtggccggtcct

SEQ ID NO: 554931 - DNA, 33 bp, Homo sapien
ggcatttggaaggcataaggatatatatggtat

SEQ ID NO: 554932 - DNA, 33 bp, Homo sapien
ggcatttggaaggcatcaggatatatatggtat

SEQ ID NO: 554933 - DNA, 33 bp, Homo sapien
tgatttgtttgaatcagggaggatgaggtgttt

SEQ ID NO: 554934 - DNA, 33 bp, Homo sapien
tgatttgtttgaatcatggaggatgaggtgttt

SEQ ID NO: 554935 - DNA, 33 bp, Homo sapien
ccaaaactgttttcccaaggtcatcgtcccttc

SEQ ID NO: 554936 - DNA, 33 bp, Homo sapien
ccaaaactgttttcccgaggtcatcgtcccttc

SEQ ID NO: 554937 - DNA, 33 bp, Homo sapien
taaggcacaaacacaacgataacataaaggaaa

SEQ ID NO: 554938 - DNA, 33 bp, Homo sapien
taaggcacaaacacaatgataacataaaggaaa

SEQ ID NO: 554939 - DNA, 33 bp, Homo sapien
ctggccgagccatgtcaaaaggcctccctcgtg

SEQ ID NO: 554940 - DNA, 33 bp, Homo sapien
ctggccgagccatgtcgaaaggcctccctcgtg

SEQ ID NO: 554941 - DNA, 33 bp, Homo sapien
agaggcgctgggctcgcagcctgtttccaagaa

SEQ ID NO: 554942 - DNA, 33 bp, Homo sapien
agaggcgctgggctcggagcctgtttccaagaa

SEQ ID NO: 554943 - DNA, 33 bp, Homo sapien
ctgagtctcctccagcactgtcgtttcgattcc

SEQ ID NO: 554944 - DNA, 33 bp, Homo sapien
ctgagtctcctccagcgctgtcgtttcgattcc

SEQ ID NO: 554945 - DNA, 33 bp, Homo sapien
gccagagctcttgcataaatccgctctcccctg

SEQ ID NO: 554946 - DNA, 33 bp, Homo sapien
gccagagctcttgcatgaatccgctctcccctg

SEQ ID NO: 554947 - DNA, 33 bp, Homo sapien
tggctggcctctgcaaacaaacataattttggg

SEQ ID NO: 554948 - DNA, 33 bp, Homo sapien
tggctggcctctgcaagcaaacataattttggg

SEQ ID NO: 554949 - DNA, 33 bp, Homo sapien
atcacctctgtcacccacttgaagttcccaaat

SEQ ID NO: 554950 - DNA, 33 bp, Homo sapien
atcacctctgtcacccccttgaagttcccaaat

SEQ ID NO: 554951 - DNA, 33 bp, Homo sapien
gaagtggcaaagggccaaaaactggtgagacag

SEQ ID NO: 554952 - DNA, 33 bp, Homo sapien
gaagtggcaaagggccgaaaactggtgagacag

SEQ ID NO: 554953 - DNA, 33 bp, Homo sapien
gcagggatccacccccacgcttgactgggaggc

SEQ ID NO: 554954 - DNA, 33 bp, Homo sapien
gcagggatccaccccctcgcttgactgggaggc

SEQ ID NO: 554955 - DNA, 33 bp, Homo sapien
ttctcagagacttcggcagaaaattcctctgac

SEQ ID NO: 554956 - DNA, 33 bp, Homo sapien
ttctcagagacttcggtagaaaattcctctgac

SEQ ID NO: 554957 - DNA, 33 bp, Homo sapien
gtgtggtgattgcagaaaatgaccacaaatttc

SEQ ID NO: 554958 - DNA, 33 bp, Homo sapien
gtgtggtgattgcagacaatgaccacaaatttc

SEQ ID NO: 554959 - DNA, 33 bp, Homo sapien
ttgccctttaatgccaaatcagatctattggta

SEQ ID NO: 554960 - DNA, 33 bp, Homo sapien
ttgccctttaatgccagatcagatctattggta

SEQ ID NO: 554961 - DNA, 33 bp, Homo sapien
aaccatgctgcagccacctactaccaatagatc

SEQ ID NO: 554962 - DNA, 33 bp, Homo sapien
aaccatgctgcagccatctactaccaatagatc

SEQ ID NO: 554963 - DNA, 33 bp, Homo sapien
atataagcagcaataaagtgtacaatttaaaga

SEQ ID NO: 554964 - DNA, 33 bp, Homo sapien
atataagcagcaataacgtgtacaatttaaaga

SEQ ID NO: 554965 - DNA, 33 bp, Homo sapien
tttctatcttctagaagtaaatcaaaatcctgt

SEQ ID NO: 554966 - DNA, 33 bp, Homo sapien
tttctatcttctagaattaaatcaaaatcctgt

SEQ ID NO: 554967 - DNA, 33 bp, Homo sapien
cttgacatctgaaacaccaaatattctccatca

SEQ ID NO: 554968 - DNA, 33 bp, Homo sapien
cttgacatctgaaacagcaaatattctccatca

SEQ ID NO: 554969 - DNA, 33 bp, Homo sapien
acacccgtctgggaaggccccaaggtcagctta

SEQ ID NO: 554970 - DNA, 33 bp, Homo sapien
acacccgtctgggaagtccccaaggtcagctta

SEQ ID NO: 554971 - DNA, 33 bp, Homo sapien
gaatgaagtagggtccaattcaggcttccaaaa

SEQ ID NO: 554972 - DNA, 33 bp, Homo sapien
gaatgaagtagggtccgattcaggcttccaaaa

SEQ ID NO: 554973 - DNA, 33 bp, Homo sapien
agacaaatggaagtaactcgtcttgttggaacc

SEQ ID NO: 554974 - DNA, 33 bp, Homo sapien
agacaaatggaagtaattcgtcttgttggaacc

SEQ ID NO: 554975 - DNA, 33 bp, Homo sapien
ccatctccaagtaagaagaagaaaggtatagaa

SEQ ID NO: 554976 - DNA, 33 bp, Homo sapien
ccatctccaagtaagatgaagaaaggtatagaa

SEQ ID NO: 554977 - DNA, 33 bp, Homo sapien
aatacagacggatttacgcttgtaaagatatag

SEQ ID NO: 554978 - DNA, 33 bp, Homo sapien
aatacagacggatttatgcttgtaaagatatag

SEQ ID NO: 554979 - DNA, 33 bp, Homo sapien
tgtcagcaaccagagaagcgaattaagtatcac

SEQ ID NO: 554980 - DNA, 33 bp, Homo sapien
tgtcagcaaccagagaggcgaattaagtatcac

SEQ ID NO: 554981 - DNA, 33 bp, Homo sapien
gcctgtgggttgtgaccctgtccttgctaatct

SEQ ID NO: 554982 - DNA, 33 bp, Homo sapien
gcctgtgggttgtgactctgtccttgctaatct

SEQ ID NO: 554983 - DNA, 33 bp, Homo sapien
ctgagctccttctgtcactattcctgttctgcc

SEQ ID NO: 554984 - DNA, 33 bp, Homo sapien
ctgagctccttctgtcgctattcctgttctgcc

SEQ ID NO: 554985 - DNA, 33 bp, Homo sapien
gttccacattctcatcaaaattggtaaatgttg

SEQ ID NO: 554986 - DNA, 33 bp, Homo sapien
gttccacattctcatcgaaattggtaaatgttg

SEQ ID NO: 554987 - DNA, 33 bp, Homo sapien
gctggtggtgcagaacagagtttagacaaggag

SEQ ID NO: 554988 - DNA, 33 bp, Homo sapien
gctggtggtgcagaacggagtttagacaaggag

SEQ ID NO: 554989 - DNA, 33 bp, Homo sapien
cacacactgagagtccagaagcagcgttcgaat

SEQ ID NO: 554990 - DNA, 33 bp, Homo sapien
cacacactgagagtccggaagcagcgttcgaat

SEQ ID NO: 554991 - DNA, 33 bp, Homo sapien
cgagtgacagcattaaaccgctgcaggaaccca

SEQ ID NO: 554992 - DNA, 33 bp, Homo sapien
cgagtgacagcattaacccgctgcaggaaccca

SEQ ID NO: 554993 - DNA, 33 bp, Homo sapien
atacataagcagaataagcataaactaaaaaaa

SEQ ID NO: 554994 - DNA, 33 bp, Homo sapien
atacataagcagaataggcataaactaaaaaaa

SEQ ID NO: 554995 - DNA, 33 bp, Homo sapien
ttcataaagtctacaggcacactaaaggccctg

SEQ ID NO: 554996 - DNA, 33 bp, Homo sapien
ttcataaagtctacagtcacactaaaggccctg

SEQ ID NO: 554997 - DNA, 33 bp, Homo sapien
ctctctcttcgttagaaattcataaagtctaca

SEQ ID NO: 554998 - DNA, 33 bp, Homo sapien
ctctctcttcgttagagattcataaagtctaca

SEQ ID NO: 554999 - DNA, 33 bp, Homo sapien
gagtaaaagcaatacaatggaacaaagatagaa

SEQ ID NO: 555000 - DNA, 33 bp, Homo sapien
gagtaaaagcaatacagtggaacaaagatagaa

SEQ ID NO: 555001 - DNA, 33 bp, Homo sapien
ccagaggcagaacttacgtatataccggtgagt

SEQ ID NO: 555002 - DNA, 33 bp, Homo sapien
ccagaggcagaacttatgtatataccggtgagt

SEQ ID NO: 555003 - DNA, 33 bp, Homo sapien
ccaggctttacagaacacagtcccacctggagc

SEQ ID NO: 555004 - DNA, 33 bp, Homo sapien
ccaggctttacagaacgcagtcccacctggagc

SEQ ID NO: 555005 - DNA, 33 bp, Homo sapien
cagcatgaagtaacaacgaggcatccacctctt

SEQ ID NO: 555006 - DNA, 33 bp, Homo sapien
cagcatgaagtaacaatgaggcatccacctctt

SEQ ID NO: 555007 - DNA, 33 bp, Homo sapien
tatttgtctgtaccacaatcatgaacgtcccca

SEQ ID NO: 555008 - DNA, 33 bp, Homo sapien
tatttgtctgtaccacgatcatgaacgtcccca

SEQ ID NO: 555009 - DNA, 33 bp, Homo sapien
ctgggtgttgatttcacgagtattgtcagtttg

SEQ ID NO: 555010 - DNA, 33 bp, Homo sapien
ctgggtgttgatttcatgagtattgtcagtttg

SEQ ID NO: 555011 - DNA, 33 bp, Homo sapien
ctaccattgcatgatacaggtctgcaaaggggt

SEQ ID NO: 555012 - DNA, 33 bp, Homo sapien
ctaccattgcatgatataggtctgcaaaggggt

SEQ ID NO: 555013 - DNA, 33 bp, Homo sapien
atggacgacaatcagaaccactaaaagggtagc

SEQ ID NO: 555014 - DNA, 33 bp, Homo sapien
atggacgacaatcagagccactaaaagggtagc

SEQ ID NO: 555015 - DNA, 33 bp, Homo sapien
gatttagaagttgatacgtactgatcagtagaa

SEQ ID NO: 555016 - DNA, 33 bp, Homo sapien
gatttagaagttgatatgtactgatcagtagaa

SEQ ID NO: 555017 - DNA, 33 bp, Homo sapien
gcagatagaaagtcaaccagaaaaatctggttg

SEQ ID NO: 555018 - DNA, 33 bp, Homo sapien
gcagatagaaagtcaatcagaaaaatctggttg

SEQ ID NO: 555019 - DNA, 33 bp, Homo sapien
tgcctggagctctggggatactgccctggatgt

SEQ ID NO: 555020 - DNA, 33 bp, Homo sapien
tgcctggagctctgggtatactgccctggatgt

SEQ ID NO: 555021 - DNA, 33 bp, Homo sapien
attatgaaatacatccagatacatccagggcag

SEQ ID NO: 555022 - DNA, 33 bp, Homo sapien
attatgaaatacatcctgatacatccagggcag

SEQ ID NO: 555023 - DNA, 33 bp, Homo sapien
ttccattagtgtagaaaagtgctggacagaatc

SEQ ID NO: 555024 - DNA, 33 bp, Homo sapien
ttccattagtgtagaacagtgctggacagaatc

SEQ ID NO: 555025 - DNA, 33 bp, Homo sapien
caaaggcatacaacataagccttgtgggcactg

SEQ ID NO: 555026 - DNA, 33 bp, Homo sapien
caaaggcatacaacatgagccttgtgggcactg

SEQ ID NO: 555027 - DNA, 33 bp, Homo sapien
taaagaagggaactaacagcaggtctttcaagc

SEQ ID NO: 555028 - DNA, 33 bp, Homo sapien
taaagaagggaactaagagcaggtctttcaagc

SEQ ID NO: 555029 - DNA, 33 bp, Homo sapien
taggctgaaactgctgaatttttacctttaccc

SEQ ID NO: 555030 - DNA, 33 bp, Homo sapien
taggctgaaactgctggatttttacctttaccc

SEQ ID NO: 555031 - DNA, 33 bp, Homo sapien
ccaacctgtgcttcaacaggatcagtgctaaat

SEQ ID NO: 555032 - DNA, 33 bp, Homo sapien
ccaacctgtgcttcaataggatcagtgctaaat

SEQ ID NO: 555033 - DNA, 33 bp, Homo sapien
gtcttgatatgagcaacagttatcctggtatgt

SEQ ID NO: 555034 - DNA, 33 bp, Homo sapien
gtcttgatatgagcaatagttatcctggtatgt

SEQ ID NO: 555035 - DNA, 33 bp, Homo sapien
gtcaattcaagtgtcaccagcacaggtttttct

SEQ ID NO: 555036 - DNA, 33 bp, Homo sapien
gtcaattcaagtgtcagcagcacaggtttttct

SEQ ID NO: 555037 - DNA, 33 bp, Homo sapien
tattttcacagaactacattcagcactaattaa

SEQ ID NO: 555038 - DNA, 33 bp, Homo sapien
tattttcacagaactatattcagcactaattaa

SEQ ID NO: 555039 - DNA, 33 bp, Homo sapien
aaagaggcagagcaaacgctaagtcaattactt

SEQ ID NO: 555040 - DNA, 33 bp, Homo sapien
aaagaggcagagcaaatgctaagtcaattactt

SEQ ID NO: 555041 - DNA, 33 bp, Homo sapien
acagaatgctaaactacgggttggcaaatactt

SEQ ID NO: 555042 - DNA, 33 bp, Homo sapien
acagaatgctaaactatgggttggcaaatactt

SEQ ID NO: 555043 - DNA, 33 bp, Homo sapien
aattatcactgaaataagcttgcacagtatcgc

SEQ ID NO: 555044 - DNA, 33 bp, Homo sapien
aattatcactgaaataggcttgcacagtatcgc

SEQ ID NO: 555045 - DNA, 33 bp, Homo sapien
gatctaaataaatggcgaaacataccttgttta

SEQ ID NO: 555046 - DNA, 33 bp, Homo sapien
gatctaaataaatggctaaacataccttgttta

SEQ ID NO: 555047 - DNA, 33 bp, Homo sapien
tagttgctggtggagacacgtggagcagacatg

SEQ ID NO: 555048 - DNA, 33 bp, Homo sapien
tagttgctggtggagatacgtggagcagacatg

SEQ ID NO: 555049 - DNA, 33 bp, Homo sapien
tctgagagcccccaacactcgtcagtccacctc

SEQ ID NO: 555050 - DNA, 33 bp, Homo sapien
tctgagagcccccaactctcgtcagtccacctc

SEQ ID NO: 555051 - DNA, 33 bp, Homo sapien
ttctcattaggacttaccttgtcaactttccag

SEQ ID NO: 555052 - DNA, 33 bp, Homo sapien
ttctcattaggacttatcttgtcaactttccag

SEQ ID NO: 555053 - DNA, 33 bp, Homo sapien
agtggcagagacaaaccgtccaatgagatactc

SEQ ID NO: 555054 - DNA, 33 bp, Homo sapien
agtggcagagacaaactgtccaatgagatactc

SEQ ID NO: 555055 - DNA, 33 bp, Homo sapien
ctgttctgattttcaacggacaaactcacttga

SEQ ID NO: 555056 - DNA, 33 bp, Homo sapien
ctgttctgattttcaatggacaaactcacttga

SEQ ID NO: 555057 - DNA, 33 bp, Homo sapien
tctctaagcagcaacactagtgctatcaatggc

SEQ ID NO: 555058 - DNA, 33 bp, Homo sapien
tctctaagcagcaacagtagtgctatcaatggc

SEQ ID NO: 555059 - DNA, 33 bp, Homo sapien
aagaggaatcaactacaaatacattcaacagtt

SEQ ID NO: 555060 - DNA, 33 bp, Homo sapien
aagaggaatcaactacgaatacattcaacagtt

SEQ ID NO: 555061 - DNA, 33 bp, Homo sapien
cacccagatcaacagaatattaccagcacccca

SEQ ID NO: 555062 - DNA, 33 bp, Homo sapien
cacccagatcaacagactattaccagcacccca

SEQ ID NO: 555063 - DNA, 33 bp, Homo sapien
cttccagtaattcgccaagatgatgaacacaga

SEQ ID NO: 555064 - DNA, 33 bp, Homo sapien
cttccagtaattcgccgagatgatgaacacaga

SEQ ID NO: 555065 - DNA, 33 bp, Homo sapien
aggggcggggcgaggaaccaagctaagagaaca

SEQ ID NO: 555066 - DNA, 33 bp, Homo sapien
aggggcggggcgaggacccaagctaagagaaca

SEQ ID NO: 555067 - DNA, 33 bp, Homo sapien
tttggcagttcaaatacggtagaagtgaagtgg

SEQ ID NO: 555068 - DNA, 33 bp, Homo sapien
tttggcagttcaaatatggtagaagtgaagtgg

SEQ ID NO: 555069 - DNA, 33 bp, Homo sapien
ggtacgttgcataataaagaaagatgtgtacta

SEQ ID NO: 555070 - DNA, 33 bp, Homo sapien
ggtacgttgcataatacagaaagatgtgtacta

SEQ ID NO: 555071 - DNA, 33 bp, Homo sapien
aagaaatccatcactgaaaaatatctgaaaaat

SEQ ID NO: 555072 - DNA, 33 bp, Homo sapien
aagaaatccatcactggaaaatatctgaaaaat

SEQ ID NO: 555073 - DNA, 33 bp, Homo sapien
tcttgtgcagtacatacattaatcacttggcaa

SEQ ID NO: 555074 - DNA, 33 bp, Homo sapien
tcttgtgcagtacatatattaatcacttggcaa

SEQ ID NO: 555075 - DNA, 33 bp, Homo sapien
tgaagcaatgagtgaacgatgtcattgggcagt

SEQ ID NO: 555076 - DNA, 33 bp, Homo sapien
tgaagcaatgagtgaaggatgtcattgggcagt

SEQ ID NO: 555077 - DNA, 33 bp, Homo sapien
cagcaggaagctgttaccaatcaccctgggtag

SEQ ID NO: 555078 - DNA, 33 bp, Homo sapien
cagcaggaagctgttatcaatcaccctgggtag

SEQ ID NO: 555079 - DNA, 33 bp, Homo sapien
aaggtggaagatgaaacagcaggaagaaatgag

SEQ ID NO: 555080 - DNA, 33 bp, Homo sapien
aaggtggaagatgaaagagcaggaagaaatgag

SEQ ID NO: 555081 - DNA, 33 bp, Homo sapien
agacaaggctttgaacacaagtagttctgtgaa

SEQ ID NO: 555082 - DNA, 33 bp, Homo sapien
agacaaggctttgaacgcaagtagttctgtgaa

SEQ ID NO: 555083 - DNA, 33 bp, Homo sapien
tttcccccgcaagactaaactccagttgcccac

SEQ ID NO: 555084 - DNA, 33 bp, Homo sapien
tttcccccgcaagactgaactccagttgcccac

SEQ ID NO: 555085 - DNA, 33 bp, Homo sapien
gagattataaccagatcaggcttattccaggta

SEQ ID NO: 555086 - DNA, 33 bp, Homo sapien
gagattataaccagatgaggcttattccaggta

SEQ ID NO: 555087 - DNA, 33 bp, Homo sapien
aaggctgtctgcagtacactcgaacttgctctg

SEQ ID NO: 555088 - DNA, 33 bp, Homo sapien
aaggctgtctgcagtatactcgaacttgctctg

SEQ ID NO: 555089 - DNA, 33 bp, Homo sapien
ctgtattagtccattcacagttgcaagcagaag

SEQ ID NO: 555090 - DNA, 33 bp, Homo sapien
ctgtattagtccattcgcagttgcaagcagaag

SEQ ID NO: 555091 - DNA, 33 bp, Homo sapien
attcaagagagcttcaccatctcaaatcacact

SEQ ID NO: 555092 - DNA, 33 bp, Homo sapien
attcaagagagcttcatcatctcaaatcacact

SEQ ID NO: 555093 - DNA, 33 bp, Homo sapien
tctggtggaagtttaacaggcggcaagatcagt

SEQ ID NO: 555094 - DNA, 33 bp, Homo sapien
tctggtggaagtttaataggcggcaagatcagt

SEQ ID NO: 555095 - DNA, 33 bp, Homo sapien
tttttaatatggttacgggaagactgtcaatta

SEQ ID NO: 555096 - DNA, 33 bp, Homo sapien
tttttaatatggttactggaagactgtcaatta

SEQ ID NO: 555097 - DNA, 33 bp, Homo sapien
ttcttgaacatatgaaatgtagtcacaataatg

SEQ ID NO: 555098 - DNA, 33 bp, Homo sapien
ttcttgaacatatgaactgtagtcacaataatg

SEQ ID NO: 555099 - DNA, 33 bp, Homo sapien
agagatccaaaagccacaataaacccaagcaca

SEQ ID NO: 555100 - DNA, 33 bp, Homo sapien
agagatccaaaagccataataaacccaagcaca

SEQ ID NO: 555101 - DNA, 33 bp, Homo sapien
tgtttacacagtgaagaattctagattgacaga

SEQ ID NO: 555102 - DNA, 33 bp, Homo sapien
tgtttacacagtgaagcattctagattgacaga

SEQ ID NO: 555103 - DNA, 33 bp, Homo sapien
tagggaagttactaaacatgacaggagaaacag

SEQ ID NO: 555104 - DNA, 33 bp, Homo sapien
tagggaagttactaaatatgacaggagaaacag

SEQ ID NO: 555105 - DNA, 33 bp, Homo sapien
tctgctgaaatgtaccaattgggaaaatgtcat

SEQ ID NO: 555106 - DNA, 33 bp, Homo sapien
tctgctgaaatgtaccgattgggaaaatgtcat

SEQ ID NO: 555107 - DNA, 33 bp, Homo sapien
aagggacacagacttcacgggggcagagcagcc

SEQ ID NO: 555108 - DNA, 33 bp, Homo sapien
aagggacacagacttcgcgggggcagagcagcc

SEQ ID NO: 555109 - DNA, 33 bp, Homo sapien
tctgcagattcgggtccaatgtctggttgagac

SEQ ID NO: 555110 - DNA, 33 bp, Homo sapien
tctgcagattcgggtctaatgtctggttgagac

SEQ ID NO: 555111 - DNA, 33 bp, Homo sapien
gtgctgattggccaagccctctgagcgtctgtt

SEQ ID NO: 555112 - DNA, 33 bp, Homo sapien
gtgctgattggccaagtcctctgagcgtctgtt

SEQ ID NO: 555113 - DNA, 33 bp, Homo sapien
tgtgttggggtatcgaagagtgtgtgtcatgac

SEQ ID NO: 555114 - DNA, 33 bp, Homo sapien
tgtgttggggtatcgaggagtgtgtgtcatgac

SEQ ID NO: 555115 - DNA, 33 bp, Homo sapien
gtcatgacatctgcaacgggcatttaaaagttg

SEQ ID NO: 555116 - DNA, 33 bp, Homo sapien
gtcatgacatctgcaatgggcatttaaaagttg

SEQ ID NO: 555117 - DNA, 33 bp, Homo sapien
tgctttcaaggggccacgcaatcaggctgcctc

SEQ ID NO: 555118 - DNA, 33 bp, Homo sapien
tgctttcaaggggccatgcaatcaggctgcctc

SEQ ID NO: 555119 - DNA, 33 bp, Homo sapien
tgctccaggaagactaccacaagcagggagggg

SEQ ID NO: 555120 - DNA, 33 bp, Homo sapien
tgctccaggaagactatcacaagcagggagggg

SEQ ID NO: 555121 - DNA, 33 bp, Homo sapien
agttttgggtaagcctaactggctgattggctt

SEQ ID NO: 555122 - DNA, 33 bp, Homo sapien
agttttgggtaagcctgactggctgattggctt

SEQ ID NO: 555123 - DNA, 33 bp, Homo sapien
tcaagcaatcaagcacacttattttaattttgc

SEQ ID NO: 555124 - DNA, 33 bp, Homo sapien
tcaagcaatcaagcacgcttattttaattttgc

SEQ ID NO: 555125 - DNA, 33 bp, Homo sapien
acttcttggaatctaccctgaaattacacctcc

SEQ ID NO: 555126 - DNA, 33 bp, Homo sapien
acttcttggaatctactctgaaattacacctcc

SEQ ID NO: 555127 - DNA, 33 bp, Homo sapien
agctcggaaattccacagtcaactcagcttcca

SEQ ID NO: 555128 - DNA, 33 bp, Homo sapien
agctcggaaattccacggtcaactcagcttcca

SEQ ID NO: 555129 - DNA, 33 bp, Homo sapien
gtcagggctggataaacttctctgtgttcaatg

SEQ ID NO: 555130 - DNA, 33 bp, Homo sapien
gtcagggctggataaagttctctgtgttcaatg

SEQ ID NO: 555131 - DNA, 33 bp, Homo sapien
gcctagccaagtccaggatttataggagatgtg

SEQ ID NO: 555132 - DNA, 33 bp, Homo sapien
gcctagccaagtccagtatttataggagatgtg

SEQ ID NO: 555133 - DNA, 33 bp, Homo sapien
aggatcatctaccttcaatggatgaacagaagt

SEQ ID NO: 555134 - DNA, 33 bp, Homo sapien
aggatcatctaccttctatggatgaacagaagt

SEQ ID NO: 555135 - DNA, 33 bp, Homo sapien
cctctaggaaggaggacgtaagactgatgtata

SEQ ID NO: 555136 - DNA, 33 bp, Homo sapien
cctctaggaaggaggatgtaagactgatgtata

SEQ ID NO: 555137 - DNA, 33 bp, Homo sapien
ggaaaagagcagtcacagagctactggcaggca

SEQ ID NO: 555138 - DNA, 33 bp, Homo sapien
ggaaaagagcagtcacggagctactggcaggca

SEQ ID NO: 555139 - DNA, 33 bp, Homo sapien
catgtagtaaaagataaaaagcacaacatttat

SEQ ID NO: 555140 - DNA, 33 bp, Homo sapien
catgtagtaaaagatacaaagcacaacatttat

SEQ ID NO: 555141 - DNA, 33 bp, Homo sapien
taatagacccaggcaaaggatgaatccaagttc

SEQ ID NO: 555142 - DNA, 33 bp, Homo sapien
taatagacccaggcaacggatgaatccaagttc

SEQ ID NO: 555143 - DNA, 33 bp, Homo sapien
atcccagacaccctacacacatgagaaataaat

SEQ ID NO: 555144 - DNA, 33 bp, Homo sapien
atcccagacaccctactcacatgagaaataaat

SEQ ID NO: 555145 - DNA, 33 bp, Homo sapien
ttaaagctaaggctcaatagggacacactacca

SEQ ID NO: 555146 - DNA, 33 bp, Homo sapien
ttaaagctaaggctcagtagggacacactacca

SEQ ID NO: 555147 - DNA, 33 bp, Homo sapien
cacatctaagtacgaaaaaggctgggaaatgtg

SEQ ID NO: 555148 - DNA, 33 bp, Homo sapien
cacatctaagtacgaagaaggctgggaaatgtg

SEQ ID NO: 555149 - DNA, 33 bp, Homo sapien
ataaatagccagatgaagggattatacaggcga

SEQ ID NO: 555150 - DNA, 33 bp, Homo sapien
ataaatagccagatgatgggattatacaggcga

SEQ ID NO: 555151 - DNA, 33 bp, Homo sapien
aggtaatttatatgctcacataaaaggtggtct

SEQ ID NO: 555152 - DNA, 33 bp, Homo sapien
aggtaatttatatgctgacataaaaggtggtct

SEQ ID NO: 555153 - DNA, 33 bp, Homo sapien
gggaaacagctgatccagccctctagctccagc

SEQ ID NO: 555154 - DNA, 33 bp, Homo sapien
gggaaacagctgatccggccctctagctccagc

SEQ ID NO: 555155 - DNA, 33 bp, Homo sapien
tgacaacgcatgcagacggcttatcccagagcc

SEQ ID NO: 555156 - DNA, 33 bp, Homo sapien
tgacaacgcatgcagatggcttatcccagagcc

SEQ ID NO: 555157 - DNA, 33 bp, Homo sapien
agcttgcctacctctgcaagatctggaatctga

SEQ ID NO: 555158 - DNA, 33 bp, Homo sapien
agcttgcctacctctggaagatctggaatctga

SEQ ID NO: 555159 - DNA, 33 bp, Homo sapien
cactgctggcaaccaacgaaggtcctcagtgaa

SEQ ID NO: 555160 - DNA, 33 bp, Homo sapien
cactgctggcaaccaatgaaggtcctcagtgaa

SEQ ID NO: 555161 - DNA, 33 bp, Homo sapien
gtgagggtaaaatgaaaatattcagtgggatag

SEQ ID NO: 555162 - DNA, 33 bp, Homo sapien
gtgagggtaaaatgaagatattcagtgggatag

SEQ ID NO: 555163 - DNA, 33 bp, Homo sapien
tcagtgcagtgttggacagaagtggcaatggca

SEQ ID NO: 555164 - DNA, 33 bp, Homo sapien
tcagtgcagtgttggatagaagtggcaatggca

SEQ ID NO: 555165 - DNA, 33 bp, Homo sapien
gggttctttcctatcacggcagcccaatcgtgg

SEQ ID NO: 555166 - DNA, 33 bp, Homo sapien
gggttctttcctatcatggcagcccaatcgtgg

SEQ ID NO: 555167 - DNA, 33 bp, Homo sapien
cccagtggacaggtgacgctaattaacaatgaa

SEQ ID NO: 555168 - DNA, 33 bp, Homo sapien
cccagtggacaggtgatgctaattaacaatgaa

SEQ ID NO: 555169 - DNA, 33 bp, Homo sapien
aaatataaagcaatcaatactttcctttacata

SEQ ID NO: 555170 - DNA, 33 bp, Homo sapien
aaatataaagcaatcagtactttcctttacata

SEQ ID NO: 555171 - DNA, 33 bp, Homo sapien
ttacattgtctgcttacgtaccattacagaaag

SEQ ID NO: 555172 - DNA, 33 bp, Homo sapien
ttacattgtctgcttatgtaccattacagaaag

SEQ ID NO: 555173 - DNA, 33 bp, Homo sapien
aggagactagaatagcactctctcctgccagag

SEQ ID NO: 555174 - DNA, 33 bp, Homo sapien
aggagactagaatagcgctctctcctgccagag

SEQ ID NO: 555175 - DNA, 33 bp, Homo sapien
aacttccccatgtagacaagcaaggtataactg

SEQ ID NO: 555176 - DNA, 33 bp, Homo sapien
aacttccccatgtagataagcaaggtataactg

SEQ ID NO: 555177 - DNA, 33 bp, Homo sapien
gaagagctgaaaagaggataaaaattcaaagca

SEQ ID NO: 555178 - DNA, 33 bp, Homo sapien
gaagagctgaaaagagtataaaaattcaaagca

SEQ ID NO: 555179 - DNA, 33 bp, Homo sapien
aaattgcacttttagacccaacactcagggaag

SEQ ID NO: 555180 - DNA, 33 bp, Homo sapien
aaattgcacttttagatccaacactcagggaag

SEQ ID NO: 555181 - DNA, 33 bp, Homo sapien
tcctgccatacacagaccctttgccaagccctg

SEQ ID NO: 555182 - DNA, 33 bp, Homo sapien
tcctgccatacacagatcctttgccaagccctg

SEQ ID NO: 555183 - DNA, 33 bp, Homo sapien
agcagacatttcacacagtgagtctacagcagg

SEQ ID NO: 555184 - DNA, 33 bp, Homo sapien
agcagacatttcacacggtgagtctacagcagg

SEQ ID NO: 555185 - DNA, 33 bp, Homo sapien
gtgatcctaagcacaaattgtccctttgtcagt

SEQ ID NO: 555186 - DNA, 33 bp, Homo sapien
gtgatcctaagcacaatttgtccctttgtcagt

SEQ ID NO: 555187 - DNA, 33 bp, Homo sapien
cagttcctcagggatgacacagagcagctgccc

SEQ ID NO: 555188 - DNA, 33 bp, Homo sapien
cagttcctcagggatgtcacagagcagctgccc

SEQ ID NO: 555189 - DNA, 33 bp, Homo sapien
cggtatgtttgtagaacgatgacgaggttggtg

SEQ ID NO: 555190 - DNA, 33 bp, Homo sapien
cggtatgtttgtagaatgatgacgaggttggtg

SEQ ID NO: 555191 - DNA, 33 bp, Homo sapien
cggtatccaagacatgaaagtgagcctggggga

SEQ ID NO: 555192 - DNA, 33 bp, Homo sapien
cggtatccaagacatggaagtgagcctggggga

SEQ ID NO: 555193 - DNA, 33 bp, Homo sapien
cagagaggttgagtaacatgaccaaagtccccc

SEQ ID NO: 555194 - DNA, 33 bp, Homo sapien
cagagaggttgagtaatatgaccaaagtccccc

SEQ ID NO: 555195 - DNA, 33 bp, Homo sapien
gacatccttgctgttccaacacatcacagacat

SEQ ID NO: 555196 - DNA, 33 bp, Homo sapien
gacatccttgctgttctaacacatcacagacat

SEQ ID NO: 555197 - DNA, 33 bp, Homo sapien
tggacctcaaagaaagcagtggccttttgcagt

SEQ ID NO: 555198 - DNA, 33 bp, Homo sapien
tggacctcaaagaaaggagtggccttttgcagt

SEQ ID NO: 555199 - DNA, 33 bp, Homo sapien
cagttgtaagacaaaccgctcctttttccttgc

SEQ ID NO: 555200 - DNA, 33 bp, Homo sapien
cagttgtaagacaaacggctcctttttccttgc

SEQ ID NO: 555201 - DNA, 33 bp, Homo sapien
tagagatcaattcgcaactgaagaatggaatgg

SEQ ID NO: 555202 - DNA, 33 bp, Homo sapien
tagagatcaattcgcagctgaagaatggaatgg

SEQ ID NO: 555203 - DNA, 33 bp, Homo sapien
tttactcaaaggccaacgtgaaagtacctgatt

SEQ ID NO: 555204 - DNA, 33 bp, Homo sapien
tttactcaaaggccaatgtgaaagtacctgatt

SEQ ID NO: 555205 - DNA, 33 bp, Homo sapien
cttcggccataatactaaacctggaaataactc

SEQ ID NO: 555206 - DNA, 33 bp, Homo sapien
cttcggccataatacttaacctggaaataactc

SEQ ID NO: 555207 - DNA, 33 bp, Homo sapien
tctcaaagcttataaaaacactcaaacctcttc

SEQ ID NO: 555208 - DNA, 33 bp, Homo sapien
tctcaaagcttataaacacactcaaacctcttc

SEQ ID NO: 555209 - DNA, 33 bp, Homo sapien
atgtttaagggtaaggaaggctattgagtactt

SEQ ID NO: 555210 - DNA, 33 bp, Homo sapien
atgtttaagggtaaggcaggctattgagtactt

SEQ ID NO: 555211 - DNA, 33 bp, Homo sapien
ctccagctccttgtccccaagttccttccctgg

SEQ ID NO: 555212 - DNA, 33 bp, Homo sapien
ctccagctccttgtcctcaagttccttccctgg

SEQ ID NO: 555213 - DNA, 33 bp, Homo sapien
agatgcctgatcccagaaacagacaatcttgat

SEQ ID NO: 555214 - DNA, 33 bp, Homo sapien
agatgcctgatcccaggaacagacaatcttgat

SEQ ID NO: 555215 - DNA, 33 bp, Homo sapien
gaggagttgggctgtggataggtgagtggtcag

SEQ ID NO: 555216 - DNA, 33 bp, Homo sapien
gaggagttgggctgtgtataggtgagtggtcag

SEQ ID NO: 555217 - DNA, 33 bp, Homo sapien
tctgaaataaagcccacgcaattcattaccacc

SEQ ID NO: 555218 - DNA, 33 bp, Homo sapien
tctgaaataaagcccaggcaattcattaccacc

SEQ ID NO: 555219 - DNA, 33 bp, Homo sapien
tggtgtacaaagttccaaatgaatttctgtagc

SEQ ID NO: 555220 - DNA, 33 bp, Homo sapien
tggtgtacaaagttccgaatgaatttctgtagc

SEQ ID NO: 555221 - DNA, 33 bp, Homo sapien
tagccaattgtggtcacgcacacctgaggttcc

SEQ ID NO: 555222 - DNA, 33 bp, Homo sapien
tagccaattgtggtcatgcacacctgaggttcc

SEQ ID NO: 555223 - DNA, 33 bp, Homo sapien
attaacttccctcagaactatcctcagggctct

SEQ ID NO: 555224 - DNA, 33 bp, Homo sapien
attaacttccctcagacctatcctcagggctct

SEQ ID NO: 555225 - DNA, 33 bp, Homo sapien
tggcttaaacaacaaaaacctatttctcacagt

SEQ ID NO: 555226 - DNA, 33 bp, Homo sapien
tggcttaaacaacaaacacctatttctcacagt

SEQ ID NO: 555227 - DNA, 33 bp, Homo sapien
cattatgggatttagcaccctaataagaagaga

SEQ ID NO: 555228 - DNA, 33 bp, Homo sapien
cattatgggatttagcgccctaataagaagaga

SEQ ID NO: 555229 - DNA, 33 bp, Homo sapien
ggacagagattccttacgcgtctgaaaacagta

SEQ ID NO: 555230 - DNA, 33 bp, Homo sapien
ggacagagattccttatgcgtctgaaaacagta

SEQ ID NO: 555231 - DNA, 33 bp, Homo sapien
agtcttgcaagtgggaccttccagggaattacc

SEQ ID NO: 555232 - DNA, 33 bp, Homo sapien
agtcttgcaagtgggatcttccagggaattacc

SEQ ID NO: 555233 - DNA, 33 bp, Homo sapien
ggtttggatcctttaacatatctgtgggagttg

SEQ ID NO: 555234 - DNA, 33 bp, Homo sapien
ggtttggatcctttaatatatctgtgggagttg

SEQ ID NO: 555235 - DNA, 33 bp, Homo sapien
gggtgggagctgctaccgaggagttaatttctg

SEQ ID NO: 555236 - DNA, 33 bp, Homo sapien
gggtgggagctgctactgaggagttaatttctg

SEQ ID NO: 555237 - DNA, 33 bp, Homo sapien
tcaaaccaacacccaacctttcagcactgtgtg

SEQ ID NO: 555238 - DNA, 33 bp, Homo sapien
tcaaaccaacacccaagctttcagcactgtgtg

SEQ ID NO: 555239 - DNA, 33 bp, Homo sapien
aatatccaaactgcatcagagagctagataaaa

SEQ ID NO: 555240 - DNA, 33 bp, Homo sapien
aatatccaaactgcattagagagctagataaaa

SEQ ID NO: 555241 - DNA, 33 bp, Homo sapien
aggaaggattgattcactaactcaaagaggcat

SEQ ID NO: 555242 - DNA, 33 bp, Homo sapien
aggaaggattgattcattaactcaaagaggcat

SEQ ID NO: 555243 - DNA, 33 bp, Homo sapien
gttgctgttgttgaaacgcctctgacagtccaa

SEQ ID NO: 555244 - DNA, 33 bp, Homo sapien
gttgctgttgttgaaatgcctctgacagtccaa

SEQ ID NO: 555245 - DNA, 33 bp, Homo sapien
ataattaggacaatctaacaatctctccataga

SEQ ID NO: 555246 - DNA, 33 bp, Homo sapien
ataattaggacaatctgacaatctctccataga

SEQ ID NO: 555247 - DNA, 33 bp, Homo sapien
tcattgcatctctcacagactttggttgacgga

SEQ ID NO: 555248 - DNA, 33 bp, Homo sapien
tcattgcatctctcacggactttggttgacgga

SEQ ID NO: 555249 - DNA, 33 bp, Homo sapien
ggtttacaaggccgcacgcactcatcacatccc

SEQ ID NO: 555250 - DNA, 33 bp, Homo sapien
ggtttacaaggccgcatgcactcatcacatccc

SEQ ID NO: 555251 - DNA, 33 bp, Homo sapien
ccaatttctgaggctacaacttttcatttttgt

SEQ ID NO: 555252 - DNA, 33 bp, Homo sapien
ccaatttctgaggctataacttttcatttttgt

SEQ ID NO: 555253 - DNA, 33 bp, Homo sapien
catgaaccactaagaggagctgtgcttggtgaa

SEQ ID NO: 555254 - DNA, 33 bp, Homo sapien
catgaaccactaagagtagctgtgcttggtgaa

SEQ ID NO: 555255 - DNA, 33 bp, Homo sapien
agctccacttgaaagaaaagtttttgaagcagg

SEQ ID NO: 555256 - DNA, 33 bp, Homo sapien
agctccacttgaaagagaagtttttgaagcagg

SEQ ID NO: 555257 - DNA, 33 bp, Homo sapien
cactatcaattggaaaagcagagaagcataggg

SEQ ID NO: 555258 - DNA, 33 bp, Homo sapien
cactatcaattggaaaggcagagaagcataggg

SEQ ID NO: 555259 - DNA, 33 bp, Homo sapien
atactgttttaggactaagcctgcagatttagt

SEQ ID NO: 555260 - DNA, 33 bp, Homo sapien
atactgttttaggactgagcctgcagatttagt

SEQ ID NO: 555261 - DNA, 33 bp, Homo sapien
tataagcatgtatgtacgcaagtttgtgtgtga

SEQ ID NO: 555262 - DNA, 33 bp, Homo sapien
tataagcatgtatgtatgcaagtttgtgtgtga

SEQ ID NO: 555263 - DNA, 33 bp, Homo sapien
gagagaggcaaaccaaaccccagcgtcaataag

SEQ ID NO: 555264 - DNA, 33 bp, Homo sapien
gagagaggcaaaccaagccccagcgtcaataag

SEQ ID NO: 555265 - DNA, 33 bp, Homo sapien
cttgccagagctaagcattgttgggctataaaa

SEQ ID NO: 555266 - DNA, 33 bp, Homo sapien
cttgccagagctaagcgttgttgggctataaaa

SEQ ID NO: 555267 - DNA, 33 bp, Homo sapien
ggataaaggaaatgtgacaatacacactgtgga

SEQ ID NO: 555268 - DNA, 33 bp, Homo sapien
ggataaaggaaatgtggcaatacacactgtgga

SEQ ID NO: 555269 - DNA, 33 bp, Homo sapien
gtttttgaatgaacaacacatgctgggtaaagg

SEQ ID NO: 555270 - DNA, 33 bp, Homo sapien
gtttttgaatgaacaatacatgctgggtaaagg

SEQ ID NO: 555271 - DNA, 33 bp, Homo sapien
ccaatgtacagtaataactcaagtggccaacag

SEQ ID NO: 555272 - DNA, 33 bp, Homo sapien
ccaatgtacagtaatatctcaagtggccaacag

SEQ ID NO: 555273 - DNA, 33 bp, Homo sapien
gtttggcactcatcccaagatatttgcagaaga

SEQ ID NO: 555274 - DNA, 33 bp, Homo sapien
gtttggcactcatccctagatatttgcagaaga

SEQ ID NO: 555275 - DNA, 33 bp, Homo sapien
gtagaagaaaccagagaccctgataccacagag

SEQ ID NO: 555276 - DNA, 33 bp, Homo sapien
gtagaagaaaccagagtccctgataccacagag

SEQ ID NO: 555277 - DNA, 33 bp, Homo sapien
aaagaacagcaaaagagatattactgctgctcc

SEQ ID NO: 555278 - DNA, 33 bp, Homo sapien
aaagaacagcaaaagatatattactgctgctcc

SEQ ID NO: 555279 - DNA, 33 bp, Homo sapien
tatcaggctaaagtaacgtaaacacaacatctg

SEQ ID NO: 555280 - DNA, 33 bp, Homo sapien
tatcaggctaaagtaatgtaaacacaacatctg

SEQ ID NO: 555281 - DNA, 33 bp, Homo sapien
atcaccttcaaaactacgacttgtttattatga

SEQ ID NO: 555282 - DNA, 33 bp, Homo sapien
atcaccttcaaaactatgacttgtttattatga

SEQ ID NO: 555283 - DNA, 33 bp, Homo sapien
agggagtctcattcccacaagatcaacctcaac

SEQ ID NO: 555284 - DNA, 33 bp, Homo sapien
agggagtctcattccctcaagatcaacctcaac

SEQ ID NO: 555285 - DNA, 33 bp, Homo sapien
atttggtaaaattcaacgcctgcatggcttaaa

SEQ ID NO: 555286 - DNA, 33 bp, Homo sapien
atttggtaaaattcaatgcctgcatggcttaaa

SEQ ID NO: 555287 - DNA, 33 bp, Homo sapien
ggaaattgcttacaaccagatgattgggaccat

SEQ ID NO: 555288 - DNA, 33 bp, Homo sapien
ggaaattgcttacaactagatgattgggaccat

SEQ ID NO: 555289 - DNA, 33 bp, Homo sapien
gaagtgatgcgtctacaacaaaaaacactcaga

SEQ ID NO: 555290 - DNA, 33 bp, Homo sapien
gaagtgatgcgtctacgacaaaaaacactcaga

SEQ ID NO: 555291 - DNA, 33 bp, Homo sapien
tgcatattcctgaagcgctgttcattttctatt

SEQ ID NO: 555292 - DNA, 33 bp, Homo sapien
tgcatattcctgaagctctgttcattttctatt

SEQ ID NO: 555293 - DNA, 33 bp, Homo sapien
gcagcagtgaaaagaaaggactattgatacaaa

SEQ ID NO: 555294 - DNA, 33 bp, Homo sapien
gcagcagtgaaaagaagggactattgatacaaa

SEQ ID NO: 555295 - DNA, 33 bp, Homo sapien
ttcatttttgacacccagaatgtttttctattt

SEQ ID NO: 555296 - DNA, 33 bp, Homo sapien
ttcatttttgacacccggaatgtttttctattt

SEQ ID NO: 555297 - DNA, 33 bp, Homo sapien
ggaagatgatgaaagacagctcgaatattaagc

SEQ ID NO: 555298 - DNA, 33 bp, Homo sapien
ggaagatgatgaaagagagctcgaatattaagc

SEQ ID NO: 555299 - DNA, 33 bp, Homo sapien
gacacaaggaaaatacaaacaacattcttctct

SEQ ID NO: 555300 - DNA, 33 bp, Homo sapien
gacacaaggaaaatacgaacaacattcttctct

SEQ ID NO: 555301 - DNA, 33 bp, Homo sapien
ttctgtctctatcacacccatttctatgcaact

SEQ ID NO: 555302 - DNA, 33 bp, Homo sapien
ttctgtctctatcacatccatttctatgcaact

SEQ ID NO: 555303 - DNA, 33 bp, Homo sapien
ctcttcagtgattccaaatgttcactggataaa

SEQ ID NO: 555304 - DNA, 33 bp, Homo sapien
ctcttcagtgattccagatgttcactggataaa

SEQ ID NO: 555305 - DNA, 33 bp, Homo sapien
tgggtggcaaggcttaagagctttggagctgtg

SEQ ID NO: 555306 - DNA, 33 bp, Homo sapien
tgggtggcaaggcttacgagctttggagctgtg

SEQ ID NO: 555307 - DNA, 33 bp, Homo sapien
catgtaatgagctccaatgatagattttaataa

SEQ ID NO: 555308 - DNA, 33 bp, Homo sapien
catgtaatgagctccagtgatagattttaataa

SEQ ID NO: 555309 - DNA, 33 bp, Homo sapien
taaaaattgttaagaactccatgaaaattaaaa

SEQ ID NO: 555310 - DNA, 33 bp, Homo sapien
taaaaattgttaagaagtccatgaaaattaaaa

SEQ ID NO: 555311 - DNA, 33 bp, Homo sapien
agtagagttaacattgacaagagtgatttggag

SEQ ID NO: 555312 - DNA, 33 bp, Homo sapien
agtagagttaacattggcaagagtgatttggag

SEQ ID NO: 555313 - DNA, 33 bp, Homo sapien
cagcaatggtcatatacgtttggtttaatgcaa

SEQ ID NO: 555314 - DNA, 33 bp, Homo sapien
cagcaatggtcatatatgtttggtttaatgcaa

SEQ ID NO: 555315 - DNA, 33 bp, Homo sapien
aaatttcccatcaagacgctaactagaggactt

SEQ ID NO: 555316 - DNA, 33 bp, Homo sapien
aaatttcccatcaagaggctaactagaggactt

SEQ ID NO: 555317 - DNA, 33 bp, Homo sapien
gttctacatccccccaaatttttcatggcaccc

SEQ ID NO: 555318 - DNA, 33 bp, Homo sapien
gttctacatccccccacatttttcatggcaccc

SEQ ID NO: 555319 - DNA, 33 bp, Homo sapien
ggagggtgtacgcacaaaaaccatgttgtattc

SEQ ID NO: 555320 - DNA, 33 bp, Homo sapien
ggagggtgtacgcacagaaaccatgttgtattc

SEQ ID NO: 555321 - DNA, 33 bp, Homo sapien
aacacaagttggatcacatcatttgtatcagtg

SEQ ID NO: 555322 - DNA, 33 bp, Homo sapien
aacacaagttggatcatatcatttgtatcagtg

SEQ ID NO: 555323 - DNA, 33 bp, Homo sapien
tctatgagaaagcttagcacaactaactttggg

SEQ ID NO: 555324 - DNA, 33 bp, Homo sapien
tctatgagaaagcttatcacaactaactttggg

SEQ ID NO: 555325 - DNA, 33 bp, Homo sapien
aggctgactgggagtacgagtagctgagtgaga

SEQ ID NO: 555326 - DNA, 33 bp, Homo sapien
aggctgactgggagtatgagtagctgagtgaga

SEQ ID NO: 555327 - DNA, 33 bp, Homo sapien
ccctaaacttcatccccggagtgtgtgactcag

SEQ ID NO: 555328 - DNA, 33 bp, Homo sapien
ccctaaacttcatccctggagtgtgtgactcag

SEQ ID NO: 555329 - DNA, 33 bp, Homo sapien
ttgagaaataaacatacgaactcgttttctctt

SEQ ID NO: 555330 - DNA, 33 bp, Homo sapien
ttgagaaataaacatatgaactcgttttctctt

SEQ ID NO: 555331 - DNA, 33 bp, Homo sapien
ttgagtcatcaaaacccctaagtagctgtccta

SEQ ID NO: 555332 - DNA, 33 bp, Homo sapien
ttgagtcatcaaaacctctaagtagctgtccta

SEQ ID NO: 555333 - DNA, 33 bp, Homo sapien
tgtttaaggcagcataagctaaactatgatgct

SEQ ID NO: 555334 - DNA, 33 bp, Homo sapien
tgtttaaggcagcataggctaaactatgatgct

SEQ ID NO: 555335 - DNA, 33 bp, Homo sapien
tttggaaattccacacagcgtatggaatttgtc

SEQ ID NO: 555336 - DNA, 33 bp, Homo sapien
tttggaaattccacacggcgtatggaatttgtc

SEQ ID NO: 555337 - DNA, 33 bp, Homo sapien
ctatgtttttgagatccatgctggttgctatag

SEQ ID NO: 555338 - DNA, 33 bp, Homo sapien
ctatgtttttgagatctatgctggttgctatag

SEQ ID NO: 555339 - DNA, 33 bp, Homo sapien
ctctggtctggacacaaataattcacaagaaac

SEQ ID NO: 555340 - DNA, 33 bp, Homo sapien
ctctggtctggacacagataattcacaagaaac

SEQ ID NO: 555341 - DNA, 33 bp, Homo sapien
cttccaccttctgctacgtgaggacgcggtaac

SEQ ID NO: 555342 - DNA, 33 bp, Homo sapien
cttccaccttctgctatgtgaggacgcggtaac

SEQ ID NO: 555343 - DNA, 33 bp, Homo sapien
agtcacttcccagaagcctcctcctaataccat

SEQ ID NO: 555344 - DNA, 33 bp, Homo sapien
agtcacttcccagaagtctcctcctaataccat

SEQ ID NO: 555345 - DNA, 33 bp, Homo sapien
tttaaaatctaaaaaggctgtgcattccccaaa

SEQ ID NO: 555346 - DNA, 33 bp, Homo sapien
tttaaaatctaaaaagtctgtgcattccccaaa

SEQ ID NO: 555347 - DNA, 33 bp, Homo sapien
ttttacaggtgaagacactaagacacagagagg

SEQ ID NO: 555348 - DNA, 33 bp, Homo sapien
ttttacaggtgaagacgctaagacacagagagg

SEQ ID NO: 555349 - DNA, 33 bp, Homo sapien
aaagtgattgtgagaaagtaaaaatggttccaa

SEQ ID NO: 555350 - DNA, 33 bp, Homo sapien
aaagtgattgtgagaaggtaaaaatggttccaa

SEQ ID NO: 555351 - DNA, 33 bp, Homo sapien
gggaaatgggggacgaagcattcacagctgaag

SEQ ID NO: 555352 - DNA, 33 bp, Homo sapien
gggaaatgggggacgaggcattcacagctgaag

SEQ ID NO: 555353 - DNA, 33 bp, Homo sapien
ccctgtgcttagagatcatactttttaggatgt

SEQ ID NO: 555354 - DNA, 33 bp, Homo sapien
ccctgtgcttagagattatactttttaggatgt

SEQ ID NO: 555355 - DNA, 33 bp, Homo sapien
taaagcattaatgaaacgagcaagtgtattcag

SEQ ID NO: 555356 - DNA, 33 bp, Homo sapien
taaagcattaatgaaatgagcaagtgtattcag

SEQ ID NO: 555357 - DNA, 33 bp, Homo sapien
gagcactagtttggtacggaacctcgatacaaa

SEQ ID NO: 555358 - DNA, 33 bp, Homo sapien
gagcactagtttggtatggaacctcgatacaaa

SEQ ID NO: 555359 - DNA, 33 bp, Homo sapien
tccaggatgaccttgacggaaaaacagacaaga

SEQ ID NO: 555360 - DNA, 33 bp, Homo sapien
tccaggatgaccttgagggaaaaacagacaaga

SEQ ID NO: 555361 - DNA, 33 bp, Homo sapien
aacacctgagttaacaagctctagtggtggtgg

SEQ ID NO: 555362 - DNA, 33 bp, Homo sapien
aacacctgagttaacaggctctagtggtggtgg

SEQ ID NO: 555363 - DNA, 33 bp, Homo sapien
gtatggttgtgctctaaaaggctgtctctcaac

SEQ ID NO: 555364 - DNA, 33 bp, Homo sapien
gtatggttgtgctctataaggctgtctctcaac

SEQ ID NO: 555365 - DNA, 33 bp, Homo sapien
actcctccgtgttccaaggtccgccctcagttt

SEQ ID NO: 555366 - DNA, 33 bp, Homo sapien
actcctccgtgttccagggtccgccctcagttt

SEQ ID NO: 555367 - DNA, 33 bp, Homo sapien
ggatgttgcaaaggaaaaaaacgaccctgaagc

SEQ ID NO: 555368 - DNA, 33 bp, Homo sapien
ggatgttgcaaaggaacaaaacgaccctgaagc

SEQ ID NO: 555369 - DNA, 33 bp, Homo sapien
tgctccactgtctgaacctcagcttgcacgagt

SEQ ID NO: 555370 - DNA, 33 bp, Homo sapien
tgctccactgtctgaatctcagcttgcacgagt

SEQ ID NO: 555371 - DNA, 33 bp, Homo sapien
cttgtccataggtatacacagatctgtgcgaca

SEQ ID NO: 555372 - DNA, 33 bp, Homo sapien
cttgtccataggtatatacagatctgtgcgaca

SEQ ID NO: 555373 - DNA, 33 bp, Homo sapien
acttatgtggcataaagaatgcagagctaggtt

SEQ ID NO: 555374 - DNA, 33 bp, Homo sapien
acttatgtggcataaataatgcagagctaggtt

SEQ ID NO: 555375 - DNA, 33 bp, Homo sapien
caaaggcaagaaaccaaaaaggaagtgaaatgc

SEQ ID NO: 555376 - DNA, 33 bp, Homo sapien
caaaggcaagaaaccagaaaggaagtgaaatgc

SEQ ID NO: 555377 - DNA, 33 bp, Homo sapien
gctaaagttgacatcagaaatactggtgaacac

SEQ ID NO: 555378 - DNA, 33 bp, Homo sapien
gctaaagttgacatcataaatactggtgaacac

SEQ ID NO: 555379 - DNA, 33 bp, Homo sapien
aggggagaaattaggacgaggtagaatccacca

SEQ ID NO: 555380 - DNA, 33 bp, Homo sapien
aggggagaaattaggatgaggtagaatccacca

SEQ ID NO: 555381 - DNA, 33 bp, Homo sapien
acatgtcaatctcacacgtaagcagatggtggg

SEQ ID NO: 555382 - DNA, 33 bp, Homo sapien
acatgtcaatctcacatgtaagcagatggtggg

SEQ ID NO: 555383 - DNA, 33 bp, Homo sapien
gatctacggtgtcacccgggcataaggatttct

SEQ ID NO: 555384 - DNA, 33 bp, Homo sapien
gatctacggtgtcacctgggcataaggatttct

SEQ ID NO: 555385 - DNA, 33 bp, Homo sapien
tattatttcactttggacaatctgatgagtaaa

SEQ ID NO: 555386 - DNA, 33 bp, Homo sapien
tattatttcactttggccaatctgatgagtaaa

SEQ ID NO: 555387 - DNA, 33 bp, Homo sapien
aattgattaaaataacaattgtggagagcacaa

SEQ ID NO: 555388 - DNA, 33 bp, Homo sapien
aattgattaaaataacgattgtggagagcacaa

SEQ ID NO: 555389 - DNA, 33 bp, Homo sapien
acactctgcacaacaaacacccaggtatctact

SEQ ID NO: 555390 - DNA, 33 bp, Homo sapien
acactctgcacaacaaccacccaggtatctact

SEQ ID NO: 555391 - DNA, 33 bp, Homo sapien
gtgatgcctgggggtaagtcattcgcatatatg

SEQ ID NO: 555392 - DNA, 33 bp, Homo sapien
gtgatgcctgggggtaggtcattcgcatatatg

SEQ ID NO: 555393 - DNA, 33 bp, Homo sapien
aatgcattctccaatcaccttctaactctgctc

SEQ ID NO: 555394 - DNA, 33 bp, Homo sapien
aatgcattctccaatcgccttctaactctgctc

SEQ ID NO: 555395 - DNA, 33 bp, Homo sapien
gctctgatactgataacgggtcttctcctcatc

SEQ ID NO: 555396 - DNA, 33 bp, Homo sapien
gctctgatactgataatgggtcttctcctcatc

SEQ ID NO: 555397 - DNA, 33 bp, Homo sapien
atcctcaaaccaaacaacttgccatcgttcata

SEQ ID NO: 555398 - DNA, 33 bp, Homo sapien
atcctcaaaccaaacagcttgccatcgttcata

SEQ ID NO: 555399 - DNA, 33 bp, Homo sapien
ctgtggatttacctacagaatggagaaaagaat

SEQ ID NO: 555400 - DNA, 33 bp, Homo sapien
ctgtggatttacctaccgaatggagaaaagaat

SEQ ID NO: 555401 - DNA, 33 bp, Homo sapien
ttacaaaatcataccacgtaaaccttcaactgt

SEQ ID NO: 555402 - DNA, 33 bp, Homo sapien
ttacaaaatcataccatgtaaaccttcaactgt

SEQ ID NO: 555403 - DNA, 33 bp, Homo sapien
ctggaggccttgattccaggtgcaatagctggc

SEQ ID NO: 555404 - DNA, 33 bp, Homo sapien
ctggaggccttgattctaggtgcaatagctggc

SEQ ID NO: 555405 - DNA, 33 bp, Homo sapien
tgttgctcacattgcccatgaccagggaagcta

SEQ ID NO: 555406 - DNA, 33 bp, Homo sapien
tgttgctcacattgcctatgaccagggaagcta

SEQ ID NO: 555407 - DNA, 33 bp, Homo sapien
gactatgtacaatataccatggattacagtggt

SEQ ID NO: 555408 - DNA, 33 bp, Homo sapien
gactatgtacaatatatcatggattacagtggt

SEQ ID NO: 555409 - DNA, 33 bp, Homo sapien
atactgccttcataacaatggtttatcttcttt

SEQ ID NO: 555410 - DNA, 33 bp, Homo sapien
atactgccttcataacgatggtttatcttcttt

SEQ ID NO: 555411 - DNA, 33 bp, Homo sapien
acacaaatattggaaactgtactttgattgata

SEQ ID NO: 555412 - DNA, 33 bp, Homo sapien
acacaaatattggaaagtgtactttgattgata

SEQ ID NO: 555413 - DNA, 33 bp, Homo sapien
atgcactttccataaggattgatacattcttta

SEQ ID NO: 555414 - DNA, 33 bp, Homo sapien
atgcactttccataagtattgatacattcttta

SEQ ID NO: 555415 - DNA, 33 bp, Homo sapien
tagttgtccacttaaaaatatgcaactgggtcc

SEQ ID NO: 555416 - DNA, 33 bp, Homo sapien
tagttgtccacttaaagatatgcaactgggtcc

SEQ ID NO: 555417 - DNA, 33 bp, Homo sapien
aagatagcaagcacaacgaaagtttctcctgtc

SEQ ID NO: 555418 - DNA, 33 bp, Homo sapien
aagatagcaagcacaatgaaagtttctcctgtc

SEQ ID NO: 555419 - DNA, 33 bp, Homo sapien
agccttcaaataagaacattgagaagagttggg

SEQ ID NO: 555420 - DNA, 33 bp, Homo sapien
agccttcaaataagaagattgagaagagttggg

SEQ ID NO: 555421 - DNA, 33 bp, Homo sapien
tcttttaactcttttacggagtgccacattaaa

SEQ ID NO: 555422 - DNA, 33 bp, Homo sapien
tcttttaactcttttatggagtgccacattaaa

SEQ ID NO: 555423 - DNA, 33 bp, Homo sapien
atttcacaggtctgagaactctaaaggtagcct

SEQ ID NO: 555424 - DNA, 33 bp, Homo sapien
atttcacaggtctgaggactctaaaggtagcct

SEQ ID NO: 555425 - DNA, 33 bp, Homo sapien
tcagctagagtcgttacgtaacaaagacaaaac

SEQ ID NO: 555426 - DNA, 33 bp, Homo sapien
tcagctagagtcgttatgtaacaaagacaaaac

SEQ ID NO: 555427 - DNA, 33 bp, Homo sapien
caatagaaatcacagacgttttatgtcacatta

SEQ ID NO: 555428 - DNA, 33 bp, Homo sapien
caatagaaatcacagatgttttatgtcacatta

SEQ ID NO: 555429 - DNA, 33 bp, Homo sapien
cccaccaccacgtctaaccatctacctgcatct

SEQ ID NO: 555430 - DNA, 33 bp, Homo sapien
cccaccaccacgtctagccatctacctgcatct

SEQ ID NO: 555431 - DNA, 33 bp, Homo sapien
aagataattagtttacaccttttgaagggaaga

SEQ ID NO: 555432 - DNA, 33 bp, Homo sapien
aagataattagtttacgccttttgaagggaaga

SEQ ID NO: 555433 - DNA, 33 bp, Homo sapien
ttctcaccctaatcttaaacgtgatgatctttc

SEQ ID NO: 555434 - DNA, 33 bp, Homo sapien
ttctcaccctaatcttgaacgtgatgatctttc

SEQ ID NO: 555435 - DNA, 33 bp, Homo sapien
ggaaaagatgaacacaaggaaatgagtgtcgaa

SEQ ID NO: 555436 - DNA, 33 bp, Homo sapien
ggaaaagatgaacacagggaaatgagtgtcgaa

SEQ ID NO: 555437 - DNA, 33 bp, Homo sapien
attcggtgtctgacaaagaagtctcctccttcc

SEQ ID NO: 555438 - DNA, 33 bp, Homo sapien
attcggtgtctgacaaggaagtctcctccttcc

SEQ ID NO: 555439 - DNA, 33 bp, Homo sapien
ttcattatcgcagcccgaagggactaaagcaat

SEQ ID NO: 555440 - DNA, 33 bp, Homo sapien
ttcattatcgcagccctaagggactaaagcaat

SEQ ID NO: 555441 - DNA, 33 bp, Homo sapien
caacacccccactatcgaaagcaagcccctctt

SEQ ID NO: 555442 - DNA, 33 bp, Homo sapien
caacacccccactatctaaagcaagcccctctt

SEQ ID NO: 555443 - DNA, 33 bp, Homo sapien
gtggtatgctggtacaatcactccatcttgacg

SEQ ID NO: 555444 - DNA, 33 bp, Homo sapien
gtggtatgctggtacagtcactccatcttgacg

SEQ ID NO: 555445 - DNA, 33 bp, Homo sapien
ccgcctggctttggaactaacagcctcatctcc

SEQ ID NO: 555446 - DNA, 33 bp, Homo sapien
ccgcctggctttggaattaacagcctcatctcc

SEQ ID NO: 555447 - DNA, 33 bp, Homo sapien
acgagagggcccgataacaaagacattgggttc

SEQ ID NO: 555448 - DNA, 33 bp, Homo sapien
acgagagggcccgatagcaaagacattgggttc

SEQ ID NO: 555449 - DNA, 33 bp, Homo sapien
tgccccacacacagaaagaaagtattatggttt

SEQ ID NO: 555450 - DNA, 33 bp, Homo sapien
tgccccacacacagaaggaaagtattatggttt

SEQ ID NO: 555451 - DNA, 33 bp, Homo sapien
atttcagatccgaggacgaaaggtcaaatattt

SEQ ID NO: 555452 - DNA, 33 bp, Homo sapien
atttcagatccgaggatgaaaggtcaaatattt

SEQ ID NO: 555453 - DNA, 33 bp, Homo sapien
accttttccttggggaagagaaatccatggtat

SEQ ID NO: 555454 - DNA, 33 bp, Homo sapien
accttttccttggggaggagaaatccatggtat

SEQ ID NO: 555455 - DNA, 33 bp, Homo sapien
gtgtatggtgactggaagtgccaacctgggaag

SEQ ID NO: 555456 - DNA, 33 bp, Homo sapien
gtgtatggtgactggaggtgccaacctgggaag

SEQ ID NO: 555457 - DNA, 33 bp, Homo sapien
ttataatggggaagaaaatatatgtggcatcag

SEQ ID NO: 555458 - DNA, 33 bp, Homo sapien
ttataatggggaagaagatatatgtggcatcag

SEQ ID NO: 555459 - DNA, 33 bp, Homo sapien
cagccattccaaataaaagaaaatggcccaaag

SEQ ID NO: 555460 - DNA, 33 bp, Homo sapien
cagccattccaaataagagaaaatggcccaaag

SEQ ID NO: 555461 - DNA, 33 bp, Homo sapien
aatatccaagacaattaaaaaaagtcctccaag

SEQ ID NO: 555462 - DNA, 33 bp, Homo sapien
aatatccaagacaatttaaaaaagtcctccaag

SEQ ID NO: 555463 - DNA, 33 bp, Homo sapien
aagcaacaaatactgaggatctctctaggaatc

SEQ ID NO: 555464 - DNA, 33 bp, Homo sapien
aagcaacaaatactgatgatctctctaggaatc

SEQ ID NO: 555465 - DNA, 33 bp, Homo sapien
gctttgtcacagaccaaggtcactcatatttgg

SEQ ID NO: 555466 - DNA, 33 bp, Homo sapien
gctttgtcacagaccacggtcactcatatttgg

SEQ ID NO: 555467 - DNA, 33 bp, Homo sapien
aggtatctttgtcataaaacgattcatttccct

SEQ ID NO: 555468 - DNA, 33 bp, Homo sapien
aggtatctttgtcatataacgattcatttccct

SEQ ID NO: 555469 - DNA, 33 bp, Homo sapien
gctttctttatcttgccatcgatgctccctaat

SEQ ID NO: 555470 - DNA, 33 bp, Homo sapien
gctttctttatcttgctatcgatgctccctaat

SEQ ID NO: 555471 - DNA, 33 bp, Homo sapien
gtcgaccagaaaatacaattcttttgaggaaaa

SEQ ID NO: 555472 - DNA, 33 bp, Homo sapien
gtcgaccagaaaatacgattcttttgaggaaaa

SEQ ID NO: 555473 - DNA, 33 bp, Homo sapien
actgaaggattacctcccttaaagtgatcacac

SEQ ID NO: 555474 - DNA, 33 bp, Homo sapien
actgaaggattacctctcttaaagtgatcacac

SEQ ID NO: 555475 - DNA, 33 bp, Homo sapien
aacaacattgctggaacccatcacaagccagtc

SEQ ID NO: 555476 - DNA, 33 bp, Homo sapien
aacaacattgctggaagccatcacaagccagtc

SEQ ID NO: 555477 - DNA, 33 bp, Homo sapien
agcctacgaaaaccaacggcattcctctacagt

SEQ ID NO: 555478 - DNA, 33 bp, Homo sapien
agcctacgaaaaccaatggcattcctctacagt

SEQ ID NO: 555479 - DNA, 33 bp, Homo sapien
aatgacaatttatgaccctttggagaatgtaca

SEQ ID NO: 555480 - DNA, 33 bp, Homo sapien
aatgacaatttatgactctttggagaatgtaca

SEQ ID NO: 555481 - DNA, 33 bp, Homo sapien
atatatgttacagttacgttcactgtgaatatg

SEQ ID NO: 555482 - DNA, 33 bp, Homo sapien
atatatgttacagttatgttcactgtgaatatg

SEQ ID NO: 555483 - DNA, 33 bp, Homo sapien
aacaccacgggttggaactgagtccacgagaca

SEQ ID NO: 555484 - DNA, 33 bp, Homo sapien
aacaccacgggttggagctgagtccacgagaca

SEQ ID NO: 555485 - DNA, 33 bp, Homo sapien
ctcctacgagtggaccacaccaccagtatacac

SEQ ID NO: 555486 - DNA, 33 bp, Homo sapien
ctcctacgagtggaccgcaccaccagtatacac

SEQ ID NO: 555487 - DNA, 33 bp, Homo sapien
taatcagtaaatggtacgcaccaaacctggccg

SEQ ID NO: 555488 - DNA, 33 bp, Homo sapien
taatcagtaaatggtatgcaccaaacctggccg

SEQ ID NO: 555489 - DNA, 33 bp, Homo sapien
catcacaaatcaatggccatgtgtttccataat

SEQ ID NO: 555490 - DNA, 33 bp, Homo sapien
catcacaaatcaatggtcatgtgtttccataat

SEQ ID NO: 555491 - DNA, 33 bp, Homo sapien
cctaaaatccagccaccacacccccaagtctgg

SEQ ID NO: 555492 - DNA, 33 bp, Homo sapien
cctaaaatccagccactacacccccaagtctgg

SEQ ID NO: 555493 - DNA, 33 bp, Homo sapien
actttcctgtgaggtaaagaaggagcaactggg

SEQ ID NO: 555494 - DNA, 33 bp, Homo sapien
actttcctgtgaggtagagaaggagcaactggg

SEQ ID NO: 555495 - DNA, 33 bp, Homo sapien
gctctcccgactccaactgcaagtgctacgcag

SEQ ID NO: 555496 - DNA, 33 bp, Homo sapien
gctctcccgactccaagtgcaagtgctacgcag

SEQ ID NO: 555497 - DNA, 33 bp, Homo sapien
gatcggtgacggtccaaatcgcagttggttgga

SEQ ID NO: 555498 - DNA, 33 bp, Homo sapien
gatcggtgacggtccacatcgcagttggttgga

SEQ ID NO: 555499 - DNA, 33 bp, Homo sapien
tctaaaaggcacctctcaagccttgctgaactt

SEQ ID NO: 555500 - DNA, 33 bp, Homo sapien
tctaaaaggcacctctgaagccttgctgaactt

SEQ ID NO: 555501 - DNA, 33 bp, Homo sapien
aagatttctccttaaaaaaggaatgatgtggag

SEQ ID NO: 555502 - DNA, 33 bp, Homo sapien
aagatttctccttaaagaaggaatgatgtggag

SEQ ID NO: 555503 - DNA, 33 bp, Homo sapien
tagccaccctgggacaaagacgaggcgatgtct

SEQ ID NO: 555504 - DNA, 33 bp, Homo sapien
tagccaccctgggacagagacgaggcgatgtct

SEQ ID NO: 555505 - DNA, 33 bp, Homo sapien
tctggtcccggtttccgagacaggtaagaatgg

SEQ ID NO: 555506 - DNA, 33 bp, Homo sapien
tctggtcccggtttcctagacaggtaagaatgg

SEQ ID NO: 555507 - DNA, 33 bp, Homo sapien
gctttgatctggctcacggtgaaataagcttgc

SEQ ID NO: 555508 - DNA, 33 bp, Homo sapien
gctttgatctggctcatggtgaaataagcttgc

SEQ ID NO: 555509 - DNA, 33 bp, Homo sapien
catctacagccatgacaaaaaagtcttgggtgc

SEQ ID NO: 555510 - DNA, 33 bp, Homo sapien
catctacagccatgacgaaaaagtcttgggtgc

SEQ ID NO: 555511 - DNA, 33 bp, Homo sapien
gagggattttcaagaacgaagcagagggtaagg

SEQ ID NO: 555512 - DNA, 33 bp, Homo sapien
gagggattttcaagaaggaagcagagggtaagg

SEQ ID NO: 555513 - DNA, 33 bp, Homo sapien
acacaacacttccccacactgcatggccattat

SEQ ID NO: 555514 - DNA, 33 bp, Homo sapien
acacaacacttccccatactgcatggccattat

SEQ ID NO: 555515 - DNA, 33 bp, Homo sapien
ctggcctcatcttgtcactctcctccatccgtg

SEQ ID NO: 555516 - DNA, 33 bp, Homo sapien
ctggcctcatcttgtcgctctcctccatccgtg

SEQ ID NO: 555517 - DNA, 33 bp, Homo sapien
tcttgggaagcacttcacaaaccataacgggca

SEQ ID NO: 555518 - DNA, 33 bp, Homo sapien
tcttgggaagcacttcgcaaaccataacgggca

SEQ ID NO: 555519 - DNA, 33 bp, Homo sapien
gaatactcatatgccaccttgatactttacatg

SEQ ID NO: 555520 - DNA, 33 bp, Homo sapien
gaatactcatatgccatcttgatactttacatg

SEQ ID NO: 555521 - DNA, 33 bp, Homo sapien
cccaatgttttcattcacgtgacaattcttctt

SEQ ID NO: 555522 - DNA, 33 bp, Homo sapien
cccaatgttttcattctcgtgacaattcttctt

SEQ ID NO: 555523 - DNA, 33 bp, Homo sapien
tcaactcctcatagacaagtgtattctttttac

SEQ ID NO: 555524 - DNA, 33 bp, Homo sapien
tcaactcctcatagaccagtgtattctttttac

SEQ ID NO: 555525 - DNA, 33 bp, Homo sapien
ttgattagaaaacacaaatggccactctttagg

SEQ ID NO: 555526 - DNA, 33 bp, Homo sapien
ttgattagaaaacacacatggccactctttagg

SEQ ID NO: 555527 - DNA, 33 bp, Homo sapien
gcccaaggctttctatgagcttttaggccttga

SEQ ID NO: 555528 - DNA, 33 bp, Homo sapien
gcccaaggctttctattagcttttaggccttga

SEQ ID NO: 555529 - DNA, 33 bp, Homo sapien
cttttctgagcttctaagaaacgtgtgtttgaa

SEQ ID NO: 555530 - DNA, 33 bp, Homo sapien
cttttctgagcttctatgaaacgtgtgtttgaa

SEQ ID NO: 555531 - DNA, 33 bp, Homo sapien
gtgaaaacatgttgaactcggtgaaagaaaaca

SEQ ID NO: 555532 - DNA, 33 bp, Homo sapien
gtgaaaacatgttgaattcggtgaaagaaaaca

SEQ ID NO: 555533 - DNA, 33 bp, Homo sapien
cccactaactaccataacttcatttcgtctgct

SEQ ID NO: 555534 - DNA, 33 bp, Homo sapien
cccactaactaccatatcttcatttcgtctgct

SEQ ID NO: 555535 - DNA, 33 bp, Homo sapien
ccacaagctaagatgaactacttgttaggcttg

SEQ ID NO: 555536 - DNA, 33 bp, Homo sapien
ccacaagctaagatgagctacttgttaggcttg

SEQ ID NO: 555537 - DNA, 33 bp, Homo sapien
tagttacctcacatagaatcttagaaaaggtct

SEQ ID NO: 555538 - DNA, 33 bp, Homo sapien
tagttacctcacataggatcttagaaaaggtct

SEQ ID NO: 555539 - DNA, 33 bp, Homo sapien
atgttactgataatgcaataaagtgtatatgct

SEQ ID NO: 555540 - DNA, 33 bp, Homo sapien
atgttactgataatgccataaagtgtatatgct

SEQ ID NO: 555541 - DNA, 33 bp, Homo sapien
aactaaattaagatgaagccaccctgaattagg

SEQ ID NO: 555542 - DNA, 33 bp, Homo sapien
aactaaattaagatgaggccaccctgaattagg

SEQ ID NO: 555543 - DNA, 33 bp, Homo sapien
aatggctttcttcccccactccaacacaatgag

SEQ ID NO: 555544 - DNA, 33 bp, Homo sapien
aatggctttcttccccgactccaacacaatgag

SEQ ID NO: 555545 - DNA, 33 bp, Homo sapien
catattgtggagcactcactatgttctaagcac

SEQ ID NO: 555546 - DNA, 33 bp, Homo sapien
catattgtggagcacttactatgttctaagcac

SEQ ID NO: 555547 - DNA, 33 bp, Homo sapien
ctccattagatttccacggatggctttttgggg

SEQ ID NO: 555548 - DNA, 33 bp, Homo sapien
ctccattagatttccagggatggctttttgggg

SEQ ID NO: 555549 - DNA, 33 bp, Homo sapien
tcccttccctgcattacgtgacaagctccttct

SEQ ID NO: 555550 - DNA, 33 bp, Homo sapien
tcccttccctgcattatgtgacaagctccttct

SEQ ID NO: 555551 - DNA, 33 bp, Homo sapien
tgcagtagcagaaggaacctactttagagagaa

SEQ ID NO: 555552 - DNA, 33 bp, Homo sapien
tgcagtagcagaaggagcctactttagagagaa

SEQ ID NO: 555553 - DNA, 33 bp, Homo sapien
agaagagaatggcgaactggaaacagataatga

SEQ ID NO: 555554 - DNA, 33 bp, Homo sapien
agaagagaatggcgaagtggaaacagataatga

SEQ ID NO: 555555 - DNA, 33 bp, Homo sapien
aaatgccctccatccacagtgaggccaggcagg

SEQ ID NO: 555556 - DNA, 33 bp, Homo sapien
aaatgccctccatccatagtgaggccaggcagg

SEQ ID NO: 555557 - DNA, 33 bp, Homo sapien
cctcatgttcaagacacccttcttactggcact

SEQ ID NO: 555558 - DNA, 33 bp, Homo sapien
cctcatgttcaagacagccttcttactggcact

SEQ ID NO: 555559 - DNA, 33 bp, Homo sapien
gttgcctatgttcaacagaggttcaaaaatatt

SEQ ID NO: 555560 - DNA, 33 bp, Homo sapien
gttgcctatgttcaaccgaggttcaaaaatatt

SEQ ID NO: 555561 - DNA, 33 bp, Homo sapien
gattcatgaaattctgaagatggaaaaaagaaa

SEQ ID NO: 555562 - DNA, 33 bp, Homo sapien
gattcatgaaattctggagatggaaaaaagaaa

SEQ ID NO: 555563 - DNA, 33 bp, Homo sapien
ccccaatcaaggatacaatagtctccccttatc

SEQ ID NO: 555564 - DNA, 33 bp, Homo sapien
ccccaatcaaggatacgatagtctccccttatc

SEQ ID NO: 555565 - DNA, 33 bp, Homo sapien
aagccaatacaagtgacaatcttttcctgtcta

SEQ ID NO: 555566 - DNA, 33 bp, Homo sapien
aagccaatacaagtgataatcttttcctgtcta

SEQ ID NO: 555567 - DNA, 33 bp, Homo sapien
gatacaatggatagaacgctgggggagactgaa

SEQ ID NO: 555568 - DNA, 33 bp, Homo sapien
gatacaatggatagaatgctgggggagactgaa

SEQ ID NO: 555569 - DNA, 33 bp, Homo sapien
tagtttcaatggactacataaatgagattcaag

SEQ ID NO: 555570 - DNA, 33 bp, Homo sapien
tagtttcaatggactatataaatgagattcaag

SEQ ID NO: 555571 - DNA, 33 bp, Homo sapien
tccacttttgaaccgggatccaaaaatccactt

SEQ ID NO: 555572 - DNA, 33 bp, Homo sapien
tccacttttgaaccggtatccaaaaatccactt

SEQ ID NO: 555573 - DNA, 33 bp, Homo sapien
gacactgtgaaaggaaaataaacctcaggaccc

SEQ ID NO: 555574 - DNA, 33 bp, Homo sapien
gacactgtgaaaggaacataaacctcaggaccc

SEQ ID NO: 555575 - DNA, 33 bp, Homo sapien
cagaaatcgctgtccaataagagctagtggtta

SEQ ID NO: 555576 - DNA, 33 bp, Homo sapien
cagaaatcgctgtccagtaagagctagtggtta

SEQ ID NO: 555577 - DNA, 33 bp, Homo sapien
tgaaagtatcaggtagacacatggacacgtacc

SEQ ID NO: 555578 - DNA, 33 bp, Homo sapien
tgaaagtatcaggtaggcacatggacacgtacc

SEQ ID NO: 555579 - DNA, 33 bp, Homo sapien
tttagttataaggaggacccaaaatgtgtgtgt

SEQ ID NO: 555580 - DNA, 33 bp, Homo sapien
tttagttataaggagggcccaaaatgtgtgtgt

SEQ ID NO: 555581 - DNA, 33 bp, Homo sapien
ggacatagtaagcaaacgcactgaattcgtaga

SEQ ID NO: 555582 - DNA, 33 bp, Homo sapien
ggacatagtaagcaaatgcactgaattcgtaga

SEQ ID NO: 555583 - DNA, 33 bp, Homo sapien
agaagcagtgcaggcaacacgtgggttttgttc

SEQ ID NO: 555584 - DNA, 33 bp, Homo sapien
agaagcagtgcaggcagcacgtgggttttgttc

SEQ ID NO: 555585 - DNA, 33 bp, Homo sapien
tgttcctaattggtcaaatatgattctcctttc

SEQ ID NO: 555586 - DNA, 33 bp, Homo sapien
tgttcctaattggtcacatatgattctcctttc

SEQ ID NO: 555587 - DNA, 33 bp, Homo sapien
tttaaaccagaaaaaaaggtcactgtggttttg

SEQ ID NO: 555588 - DNA, 33 bp, Homo sapien
tttaaaccagaaaaaatggtcactgtggttttg

SEQ ID NO: 555589 - DNA, 33 bp, Homo sapien
agcatcagaatgggtgaataaaggaagcaatag

SEQ ID NO: 555590 - DNA, 33 bp, Homo sapien
agcatcagaatgggtgcataaaggaagcaatag

SEQ ID NO: 555591 - DNA, 33 bp, Homo sapien
gccacacaacggaaaactatcagcgaagagaat

SEQ ID NO: 555592 - DNA, 33 bp, Homo sapien
gccacacaacggaaaattatcagcgaagagaat

SEQ ID NO: 555593 - DNA, 33 bp, Homo sapien
tcatattccattgacagaaagttcaaaatggag

SEQ ID NO: 555594 - DNA, 33 bp, Homo sapien
tcatattccattgacataaagttcaaaatggag

SEQ ID NO: 555595 - DNA, 33 bp, Homo sapien
caaccctgagaatgcacaagtcaagtttcatct

SEQ ID NO: 555596 - DNA, 33 bp, Homo sapien
caaccctgagaatgcataagtcaagtttcatct

SEQ ID NO: 555597 - DNA, 33 bp, Homo sapien
ccgagggacacactaccccagccaggactccct

SEQ ID NO: 555598 - DNA, 33 bp, Homo sapien
ccgagggacacactactccagccaggactccct

SEQ ID NO: 555599 - DNA, 33 bp, Homo sapien
ctattctgtgttgtgacggtctcttcagagagg

SEQ ID NO: 555600 - DNA, 33 bp, Homo sapien
ctattctgtgttgtgatggtctcttcagagagg

SEQ ID NO: 555601 - DNA, 33 bp, Homo sapien
gactgcctgaaagacaacttgggggtaagacct

SEQ ID NO: 555602 - DNA, 33 bp, Homo sapien
gactgcctgaaagacagcttgggggtaagacct

SEQ ID NO: 555603 - DNA, 33 bp, Homo sapien
atgtcatcatattaaacggccagaggaccttcc

SEQ ID NO: 555604 - DNA, 33 bp, Homo sapien
atgtcatcatattaaatggccagaggaccttcc

SEQ ID NO: 555605 - DNA, 33 bp, Homo sapien
accagctgaagccctgcagcagttgcatgaagg

SEQ ID NO: 555606 - DNA, 33 bp, Homo sapien
accagctgaagccctgtagcagttgcatgaagg

SEQ ID NO: 555607 - DNA, 33 bp, Homo sapien
tggagctcccaccaaaaacagcagaatcccctc

SEQ ID NO: 555608 - DNA, 33 bp, Homo sapien
tggagctcccaccaaagacagcagaatcccctc

SEQ ID NO: 555609 - DNA, 33 bp, Homo sapien
tgaggacaccaccataagtatttcaaagcagcc

SEQ ID NO: 555610 - DNA, 33 bp, Homo sapien
tgaggacaccaccataggtatttcaaagcagcc

SEQ ID NO: 555611 - DNA, 33 bp, Homo sapien
agatttctttggtatcaacacttcctgtttact

SEQ ID NO: 555612 - DNA, 33 bp, Homo sapien
agatttctttggtatcgacacttcctgtttact

SEQ ID NO: 555613 - DNA, 33 bp, Homo sapien
gaggtttcctctactcaccacctggggacagga

SEQ ID NO: 555614 - DNA, 33 bp, Homo sapien
gaggtttcctctactcgccacctggggacagga

SEQ ID NO: 555615 - DNA, 33 bp, Homo sapien
tccagtgagttggtaaaagcgtgagtctgggag

SEQ ID NO: 555616 - DNA, 33 bp, Homo sapien
tccagtgagttggtaagagcgtgagtctgggag

SEQ ID NO: 555617 - DNA, 33 bp, Homo sapien
atgcgtactttgccacaataaaacataaaaata

SEQ ID NO: 555618 - DNA, 33 bp, Homo sapien
atgcgtactttgccacgataaaacataaaaata

SEQ ID NO: 555619 - DNA, 33 bp, Homo sapien
ggcacacatgtagtccacaggaaaggttttttg

SEQ ID NO: 555620 - DNA, 33 bp, Homo sapien
ggcacacatgtagtccgcaggaaaggttttttg

SEQ ID NO: 555621 - DNA, 33 bp, Homo sapien
cactgcgtctggctaacgattattgaaatgttt

SEQ ID NO: 555622 - DNA, 33 bp, Homo sapien
cactgcgtctggctaatgattattgaaatgttt

SEQ ID NO: 555623 - DNA, 33 bp, Homo sapien
caataataatcataatcactaaatgcaccccag

SEQ ID NO: 555624 - DNA, 33 bp, Homo sapien
caataataatcataatgactaaatgcaccccag

SEQ ID NO: 555625 - DNA, 33 bp, Homo sapien
tggacccactactctacgtgttaagcttctttc

SEQ ID NO: 555626 - DNA, 33 bp, Homo sapien
tggacccactactctatgtgttaagcttctttc

SEQ ID NO: 555627 - DNA, 33 bp, Homo sapien
taccatggtgaaactacacagtctgtgtttggc

SEQ ID NO: 555628 - DNA, 33 bp, Homo sapien
taccatggtgaaactatacagtctgtgtttggc

SEQ ID NO: 555629 - DNA, 33 bp, Homo sapien
cagaaccatgacgacacccatgttccatcagcc

SEQ ID NO: 555630 - DNA, 33 bp, Homo sapien
cagaaccatgacgacatccatgttccatcagcc

SEQ ID NO: 555631 - DNA, 33 bp, Homo sapien
ccgaaacagagatgagaccctggcgagaaggtg

SEQ ID NO: 555632 - DNA, 33 bp, Homo sapien
ccgaaacagagatgaggccctggcgagaaggtg

SEQ ID NO: 555633 - DNA, 33 bp, Homo sapien
ttagtgttacgaacgcacttgtataaacttagg

SEQ ID NO: 555634 - DNA, 33 bp, Homo sapien
ttagtgttacgaacgcgcttgtataaacttagg

SEQ ID NO: 555635 - DNA, 33 bp, Homo sapien
cttgatgatgtctgaaatgcaagacagcaagcc

SEQ ID NO: 555636 - DNA, 33 bp, Homo sapien
cttgatgatgtctgaagtgcaagacagcaagcc

SEQ ID NO: 555637 - DNA, 33 bp, Homo sapien
ggttcgtattctcatccgaggtagcagaagcac

SEQ ID NO: 555638 - DNA, 33 bp, Homo sapien
ggttcgtattctcatctgaggtagcagaagcac

SEQ ID NO: 555639 - DNA, 33 bp, Homo sapien
aaaatttaagatgaacaaagacaacattctgaa

SEQ ID NO: 555640 - DNA, 33 bp, Homo sapien
aaaatttaagatgaacgaagacaacattctgaa

SEQ ID NO: 555641 - DNA, 33 bp, Homo sapien
ccgagtagtgcaagaacggccacccggttttgc

SEQ ID NO: 555642 - DNA, 33 bp, Homo sapien
ccgagtagtgcaagaagggccacccggttttgc

SEQ ID NO: 555643 - DNA, 33 bp, Homo sapien
tgactgggcgtcttccactgcataacactcaag

SEQ ID NO: 555644 - DNA, 33 bp, Homo sapien
tgactgggcgtcttccgctgcataacactcaag

SEQ ID NO: 555645 - DNA, 33 bp, Homo sapien
aactgactactggaccagagcccagaaaccatg

SEQ ID NO: 555646 - DNA, 33 bp, Homo sapien
aactgactactggaccggagcccagaaaccatg

SEQ ID NO: 555647 - DNA, 33 bp, Homo sapien
gttctttagtaacttacggtgattttgcatgga

SEQ ID NO: 555648 - DNA, 33 bp, Homo sapien
gttctttagtaacttatggtgattttgcatgga

SEQ ID NO: 555649 - DNA, 33 bp, Homo sapien
tgaatggtagctggcacgcactgagccatctga

SEQ ID NO: 555650 - DNA, 33 bp, Homo sapien
tgaatggtagctggcatgcactgagccatctga

SEQ ID NO: 555651 - DNA, 33 bp, Homo sapien
tgtatgggggatgtgaaggaaggttgtctgagg

SEQ ID NO: 555652 - DNA, 33 bp, Homo sapien
tgtatgggggatgtgagggaaggttgtctgagg

SEQ ID NO: 555653 - DNA, 33 bp, Homo sapien
cacgaaagctggacacaaaaaacttttccttct

SEQ ID NO: 555654 - DNA, 33 bp, Homo sapien
cacgaaagctggacacgaaaaacttttccttct

SEQ ID NO: 555655 - DNA, 33 bp, Homo sapien
aaagctctgccgtgcactctggacttgaagcac

SEQ ID NO: 555656 - DNA, 33 bp, Homo sapien
aaagctctgccgtgcattctggacttgaagcac

SEQ ID NO: 555657 - DNA, 33 bp, Homo sapien
gaaaggagaggaaaagacaagcttgcaggagga

SEQ ID NO: 555658 - DNA, 33 bp, Homo sapien
gaaaggagaggaaaaggcaagcttgcaggagga

SEQ ID NO: 555659 - DNA, 33 bp, Homo sapien
tgcccttcctgttggccgatgccatgtgtgtgg

SEQ ID NO: 555660 - DNA, 33 bp, Homo sapien
tgcccttcctgttggctgatgccatgtgtgtgg

SEQ ID NO: 555661 - DNA, 33 bp, Homo sapien
ctgtcacctaaactatcaatacatttttaatgt

SEQ ID NO: 555662 - DNA, 33 bp, Homo sapien
ctgtcacctaaactatgaatacatttttaatgt

SEQ ID NO: 555663 - DNA, 33 bp, Homo sapien
taggcaataggtaaacaaagaaatgtggctgtg

SEQ ID NO: 555664 - DNA, 33 bp, Homo sapien
taggcaataggtaaacgaagaaatgtggctgtg

SEQ ID NO: 555665 - DNA, 33 bp, Homo sapien
gacaggtcttaactccacaaactggtcagacag

SEQ ID NO: 555666 - DNA, 33 bp, Homo sapien
gacaggtcttaactccgcaaactggtcagacag

SEQ ID NO: 555667 - DNA, 33 bp, Homo sapien
atgtgtccgttgctcaataaatacaatgcaaat

SEQ ID NO: 555668 - DNA, 33 bp, Homo sapien
atgtgtccgttgctcagtaaatacaatgcaaat

SEQ ID NO: 555669 - DNA, 33 bp, Homo sapien
attatttccagatgtacaaagactaagatggtg

SEQ ID NO: 555670 - DNA, 33 bp, Homo sapien
attatttccagatgtagaaagactaagatggtg

SEQ ID NO: 555671 - DNA, 33 bp, Homo sapien
agatggaatgagaacacgagttaagtggctgtt

SEQ ID NO: 555672 - DNA, 33 bp, Homo sapien
agatggaatgagaacatgagttaagtggctgtt

SEQ ID NO: 555673 - DNA, 33 bp, Homo sapien
gtcaccaccatcaatggacaccgaccaagaaag

SEQ ID NO: 555674 - DNA, 33 bp, Homo sapien
gtcaccaccatcaatgtacaccgaccaagaaag

SEQ ID NO: 555675 - DNA, 33 bp, Homo sapien
tgaacttcattttatccgaccatctctccctgt

SEQ ID NO: 555676 - DNA, 33 bp, Homo sapien
tgaacttcattttatctgaccatctctccctgt

SEQ ID NO: 555677 - DNA, 33 bp, Homo sapien
catgcataattcgatggcagcaaaatgacgtgt

SEQ ID NO: 555678 - DNA, 33 bp, Homo sapien
catgcataattcgatgtcagcaaaatgacgtgt

SEQ ID NO: 555679 - DNA, 33 bp, Homo sapien
cctgaccagaagtgacaccttagcagaaactgg

SEQ ID NO: 555680 - DNA, 33 bp, Homo sapien
cctgaccagaagtgacgccttagcagaaactgg

SEQ ID NO: 555681 - DNA, 33 bp, Homo sapien
ttatagagattaccacaataagctgcttggtgc

SEQ ID NO: 555682 - DNA, 33 bp, Homo sapien
ttatagagattaccaccataagctgcttggtgc

SEQ ID NO: 555683 - DNA, 33 bp, Homo sapien
aaagatgacaagtctccccaaattaacttatgc

SEQ ID NO: 555684 - DNA, 33 bp, Homo sapien
aaagatgacaagtctctccaaattaacttatgc

SEQ ID NO: 555685 - DNA, 33 bp, Homo sapien
ctagatctgaggtcacagacttggctgaggtca

SEQ ID NO: 555686 - DNA, 33 bp, Homo sapien
ctagatctgaggtcacggacttggctgaggtca

SEQ ID NO: 555687 - DNA, 33 bp, Homo sapien
ggggtgtttgaaatcccgaattggctattgttg

SEQ ID NO: 555688 - DNA, 33 bp, Homo sapien
ggggtgtttgaaatcctgaattggctattgttg

SEQ ID NO: 555689 - DNA, 33 bp, Homo sapien
aaaaaatcaccctccactctaagcaaagaaacc

SEQ ID NO: 555690 - DNA, 33 bp, Homo sapien
aaaaaatcaccctccattctaagcaaagaaacc

SEQ ID NO: 555691 - DNA, 33 bp, Homo sapien
tctattacagctcatacaaacaaggtttttttt

SEQ ID NO: 555692 - DNA, 33 bp, Homo sapien
tctattacagctcatagaaacaaggtttttttt

SEQ ID NO: 555693 - DNA, 33 bp, Homo sapien
acctacaacacagataaagcaaaagttagcatt

SEQ ID NO: 555694 - DNA, 33 bp, Homo sapien
acctacaacacagatacagcaaaagttagcatt

SEQ ID NO: 555695 - DNA, 33 bp, Homo sapien
tgtcatgaattccatgcactctttggattggga

SEQ ID NO: 555696 - DNA, 33 bp, Homo sapien
tgtcatgaattccatgtactctttggattggga

SEQ ID NO: 555697 - DNA, 33 bp, Homo sapien
cggtccaggcaccaagaacattgctgatgagca

SEQ ID NO: 555698 - DNA, 33 bp, Homo sapien
cggtccaggcaccaaggacattgctgatgagca

SEQ ID NO: 555699 - DNA, 33 bp, Homo sapien
gggaatgtgaggtagccatccagtgatgtttaa

SEQ ID NO: 555700 - DNA, 33 bp, Homo sapien
gggaatgtgaggtagctatccagtgatgtttaa

SEQ ID NO: 555701 - DNA, 33 bp, Homo sapien
ctgatgctgccagttcggaaactacattttgag

SEQ ID NO: 555702 - DNA, 33 bp, Homo sapien
ctgatgctgccagttctgaaactacattttgag

SEQ ID NO: 555703 - DNA, 33 bp, Homo sapien
gtgtattctctgaccacgatgaaatagaattta

SEQ ID NO: 555704 - DNA, 33 bp, Homo sapien
gtgtattctctgaccatgatgaaatagaattta

SEQ ID NO: 555705 - DNA, 33 bp, Homo sapien
ctctccacaatttgtcaccctttgttaaaatga

SEQ ID NO: 555706 - DNA, 33 bp, Homo sapien
ctctccacaatttgtcgccctttgttaaaatga

SEQ ID NO: 555707 - DNA, 33 bp, Homo sapien
caccaggccaaggaccagatttttgtctatttt

SEQ ID NO: 555708 - DNA, 33 bp, Homo sapien
caccaggccaaggaccggatttttgtctatttt

SEQ ID NO: 555709 - DNA, 33 bp, Homo sapien
cccaggaaatcatgaaacatctttggctgtgtc

SEQ ID NO: 555710 - DNA, 33 bp, Homo sapien
cccaggaaatcatgaagcatctttggctgtgtc

SEQ ID NO: 555711 - DNA, 33 bp, Homo sapien
caacagagtgaaggaccggctacataacttgta

SEQ ID NO: 555712 - DNA, 33 bp, Homo sapien
caacagagtgaaggactggctacataacttgta

SEQ ID NO: 555713 - DNA, 33 bp, Homo sapien
actttccctctgccacagtcctagagtgatcgt

SEQ ID NO: 555714 - DNA, 33 bp, Homo sapien
actttccctctgccacggtcctagagtgatcgt

SEQ ID NO: 555715 - DNA, 33 bp, Homo sapien
taatgtcatttaatataaaagaggttaagtatt

SEQ ID NO: 555716 - DNA, 33 bp, Homo sapien
taatgtcatttaatatcaaagaggttaagtatt

SEQ ID NO: 555717 - DNA, 33 bp, Homo sapien
actctcattatgacgaagagtaaatttccatca

SEQ ID NO: 555718 - DNA, 33 bp, Homo sapien
actctcattatgacgaggagtaaatttccatca

SEQ ID NO: 555719 - DNA, 33 bp, Homo sapien
accctatgtgactttcgagactttgtgcctgcc

SEQ ID NO: 555720 - DNA, 33 bp, Homo sapien
accctatgtgactttctagactttgtgcctgcc

SEQ ID NO: 555721 - DNA, 33 bp, Homo sapien
ccacctccagcaagggacaagaaactaatctct

SEQ ID NO: 555722 - DNA, 33 bp, Homo sapien
ccacctccagcaaggggcaagaaactaatctct

SEQ ID NO: 555723 - DNA, 33 bp, Homo sapien
cttggaatttaccttgcatgacaaattcgcagt

SEQ ID NO: 555724 - DNA, 33 bp, Homo sapien
cttggaatttaccttgtatgacaaattcgcagt

SEQ ID NO: 555725 - DNA, 33 bp, Homo sapien
gtttctatacattaacaaagaactattcaaaga

SEQ ID NO: 555726 - DNA, 33 bp, Homo sapien
gtttctatacattaacgaagaactattcaaaga

SEQ ID NO: 555727 - DNA, 33 bp, Homo sapien
aaaaaaaaaatttgtacatctgctgcccaggct

SEQ ID NO: 555728 - DNA, 33 bp, Homo sapien
aaaaaaaaaatttgtagatctgctgcccaggct

SEQ ID NO: 555729 - DNA, 33 bp, Homo sapien
aaaccctctggaaggagtagcatcttagccaag

SEQ ID NO: 555730 - DNA, 33 bp, Homo sapien
aaaccctctggaaggattagcatcttagccaag

SEQ ID NO: 555731 - DNA, 33 bp, Homo sapien
gacaagaggttttagaactggagcatcatcaga

SEQ ID NO: 555732 - DNA, 33 bp, Homo sapien
gacaagaggttttagatctggagcatcatcaga

SEQ ID NO: 555733 - DNA, 33 bp, Homo sapien
caggagcctatgggaccgaatctaggagagaag

SEQ ID NO: 555734 - DNA, 33 bp, Homo sapien
caggagcctatgggactgaatctaggagagaag

SEQ ID NO: 555735 - DNA, 33 bp, Homo sapien
accgaaatggacataccacagttttacctaact

SEQ ID NO: 555736 - DNA, 33 bp, Homo sapien
accgaaatggacatactacagttttacctaact

SEQ ID NO: 555737 - DNA, 33 bp, Homo sapien
tattttggacatactaaaagacaggagacacat

SEQ ID NO: 555738 - DNA, 33 bp, Homo sapien
tattttggacatactagaagacaggagacacat

SEQ ID NO: 555739 - DNA, 33 bp, Homo sapien
aactggtggagggtaaacggactgctggaggat

SEQ ID NO: 555740 - DNA, 33 bp, Homo sapien
aactggtggagggtaagcggactgctggaggat

SEQ ID NO: 555741 - DNA, 33 bp, Homo sapien
gcaaatggcatggtctcacatatagaaaaactg

SEQ ID NO: 555742 - DNA, 33 bp, Homo sapien
gcaaatggcatggtcttacatatagaaaaactg

SEQ ID NO: 555743 - DNA, 33 bp, Homo sapien
aaccacggtgcaaaccacattgtagggggagat

SEQ ID NO: 555744 - DNA, 33 bp, Homo sapien
aaccacggtgcaaaccgcattgtagggggagat

SEQ ID NO: 555745 - DNA, 33 bp, Homo sapien
tgtagataaaggttgacggatttcattcttttt

SEQ ID NO: 555746 - DNA, 33 bp, Homo sapien
tgtagataaaggttgatggatttcattcttttt

SEQ ID NO: 555747 - DNA, 33 bp, Homo sapien
gaacagaaggataagcaagccgctttgaaaatc

SEQ ID NO: 555748 - DNA, 33 bp, Homo sapien
gaacagaaggataagcgagccgctttgaaaatc

SEQ ID NO: 555749 - DNA, 33 bp, Homo sapien
ttgtgacaaggaatgaccaggaatcctttctcc

SEQ ID NO: 555750 - DNA, 33 bp, Homo sapien
ttgtgacaaggaatgatcaggaatcctttctcc

SEQ ID NO: 555751 - DNA, 33 bp, Homo sapien
tgagacattgggccacacattgaacttcccaga

SEQ ID NO: 555752 - DNA, 33 bp, Homo sapien
tgagacattgggccacgcattgaacttcccaga

SEQ ID NO: 555753 - DNA, 33 bp, Homo sapien
acatgttgacattaacaggtctacaggggcaac

SEQ ID NO: 555754 - DNA, 33 bp, Homo sapien
acatgttgacattaacgggtctacaggggcaac

SEQ ID NO: 555755 - DNA, 33 bp, Homo sapien
aatccagtaaaatttccaccatgctacaatgtc

SEQ ID NO: 555756 - DNA, 33 bp, Homo sapien
aatccagtaaaatttctaccatgctacaatgtc

SEQ ID NO: 555757 - DNA, 33 bp, Homo sapien
gtacgtggccttacctcaatgtatactaatata

SEQ ID NO: 555758 - DNA, 33 bp, Homo sapien
gtacgtggccttacctgaatgtatactaatata

SEQ ID NO: 555759 - DNA, 33 bp, Homo sapien
actgggtctaagtcaacgtagagccattaaacc

SEQ ID NO: 555760 - DNA, 33 bp, Homo sapien
actgggtctaagtcaatgtagagccattaaacc

SEQ ID NO: 555761 - DNA, 33 bp, Homo sapien
ctcatgactctcacccaaggtaagaaggctgtt

SEQ ID NO: 555762 - DNA, 33 bp, Homo sapien
ctcatgactctcacccgaggtaagaaggctgtt

SEQ ID NO: 555763 - DNA, 33 bp, Homo sapien
ttcattggggaggatacaacttttgactttaca

SEQ ID NO: 555764 - DNA, 33 bp, Homo sapien
ttcattggggaggatataacttttgactttaca

SEQ ID NO: 555765 - DNA, 33 bp, Homo sapien
ttaaaccaagtggtcacgaaggattcttatctc

SEQ ID NO: 555766 - DNA, 33 bp, Homo sapien
ttaaaccaagtggtcaggaaggattcttatctc

SEQ ID NO: 555767 - DNA, 33 bp, Homo sapien
accacacatgatctagaatttaatatatgttta

SEQ ID NO: 555768 - DNA, 33 bp, Homo sapien
accacacatgatctagtatttaatatatgttta

SEQ ID NO: 555769 - DNA, 33 bp, Homo sapien
gcatcctgggaaataacgctggctccacataag

SEQ ID NO: 555770 - DNA, 33 bp, Homo sapien
gcatcctgggaaataatgctggctccacataag

SEQ ID NO: 555771 - DNA, 33 bp, Homo sapien
agtgaattgctcgccaacattcaagatgcagaa

SEQ ID NO: 555772 - DNA, 33 bp, Homo sapien
agtgaattgctcgccaccattcaagatgcagaa

SEQ ID NO: 555773 - DNA, 33 bp, Homo sapien
tggtgctgccatttctaaactgtggacggctgt

SEQ ID NO: 555774 - DNA, 33 bp, Homo sapien
tggtgctgccatttctcaactgtggacggctgt

SEQ ID NO: 555775 - DNA, 33 bp, Homo sapien
acaggcatctcaaaccgagcgtgtccaaaccca

SEQ ID NO: 555776 - DNA, 33 bp, Homo sapien
acaggcatctcaaacctagcgtgtccaaaccca

SEQ ID NO: 555777 - DNA, 33 bp, Homo sapien
ccctaaattccctgtcaaccatggtgttcatca

SEQ ID NO: 555778 - DNA, 33 bp, Homo sapien
ccctaaattccctgtcgaccatggtgttcatca

SEQ ID NO: 555779 - DNA, 33 bp, Homo sapien
acagccatccttaccaaatccataaaggaggaa

SEQ ID NO: 555780 - DNA, 33 bp, Homo sapien
acagccatccttaccacatccataaaggaggaa

SEQ ID NO: 555781 - DNA, 33 bp, Homo sapien
tggttattgtgtgctccactcttacctcatact

SEQ ID NO: 555782 - DNA, 33 bp, Homo sapien
tggttattgtgtgctctactcttacctcatact

SEQ ID NO: 555783 - DNA, 33 bp, Homo sapien
gaattgcttcaaagaaatgacagattgaagaga

SEQ ID NO: 555784 - DNA, 33 bp, Homo sapien
gaattgcttcaaagaactgacagattgaagaga

SEQ ID NO: 555785 - DNA, 33 bp, Homo sapien
gtttcattatgaaccacacttgggctcacagta

SEQ ID NO: 555786 - DNA, 33 bp, Homo sapien
gtttcattatgaaccagacttgggctcacagta

SEQ ID NO: 555787 - DNA, 33 bp, Homo sapien
ccagaggtctcacagactatgtcccaggtgccc

SEQ ID NO: 555788 - DNA, 33 bp, Homo sapien
ccagaggtctcacagattatgtcccaggtgccc

SEQ ID NO: 555789 - DNA, 33 bp, Homo sapien
ttcagactgaacctctaaactggaaatcaggag

SEQ ID NO: 555790 - DNA, 33 bp, Homo sapien
ttcagactgaacctctgaactggaaatcaggag

SEQ ID NO: 555791 - DNA, 33 bp, Homo sapien
agggcaaccgggacagaaacatttgtccatgtg

SEQ ID NO: 555792 - DNA, 33 bp, Homo sapien
agggcaaccgggacaggaacatttgtccatgtg

SEQ ID NO: 555793 - DNA, 33 bp, Homo sapien
gtcctctgtgtacccacccagtgtactctctct

SEQ ID NO: 555794 - DNA, 33 bp, Homo sapien
gtcctctgtgtacccatccagtgtactctctct

SEQ ID NO: 555795 - DNA, 33 bp, Homo sapien
gcagaagctcagcacccgaggtgagacagagtc

SEQ ID NO: 555796 - DNA, 33 bp, Homo sapien
gcagaagctcagcacctgaggtgagacagagtc

SEQ ID NO: 555797 - DNA, 33 bp, Homo sapien
caactggtcatgccccagagcagaactgtcatt

SEQ ID NO: 555798 - DNA, 33 bp, Homo sapien
caactggtcatgccccggagcagaactgtcatt

SEQ ID NO: 555799 - DNA, 33 bp, Homo sapien
atgtgaatacacagaaatagagcgtggagtaga

SEQ ID NO: 555800 - DNA, 33 bp, Homo sapien
atgtgaatacacagaagtagagcgtggagtaga

SEQ ID NO: 555801 - DNA, 33 bp, Homo sapien
caattgccacatgaagcctcaattaaagtcttg

SEQ ID NO: 555802 - DNA, 33 bp, Homo sapien
caattgccacatgaaggctcaattaaagtcttg

SEQ ID NO: 555803 - DNA, 33 bp, Homo sapien
gaactcttgacaaaaacattgtgaccagtggct

SEQ ID NO: 555804 - DNA, 33 bp, Homo sapien
gaactcttgacaaaaatattgtgaccagtggct

SEQ ID NO: 555805 - DNA, 33 bp, Homo sapien
cactgaactcacctccaataccaacataactga

SEQ ID NO: 555806 - DNA, 33 bp, Homo sapien
cactgaactcacctccgataccaacataactga

SEQ ID NO: 555807 - DNA, 33 bp, Homo sapien
attgttcttaagtacaagaaggctctgatgcac

SEQ ID NO: 555808 - DNA, 33 bp, Homo sapien
attgttcttaagtacaggaaggctctgatgcac

SEQ ID NO: 555809 - DNA, 33 bp, Homo sapien
tgtactaaacctaggacgcactaaactcttctt

SEQ ID NO: 555810 - DNA, 33 bp, Homo sapien
tgtactaaacctaggatgcactaaactcttctt

SEQ ID NO: 555811 - DNA, 33 bp, Homo sapien
aatacttggtcccaaacgtgttttttgacatct

SEQ ID NO: 555812 - DNA, 33 bp, Homo sapien
aatacttggtcccaaatgtgttttttgacatct

SEQ ID NO: 555813 - DNA, 33 bp, Homo sapien
agagaagtgagggaaaataaccagtcacaggcc

SEQ ID NO: 555814 - DNA, 33 bp, Homo sapien
agagaagtgagggaaagtaaccagtcacaggcc

SEQ ID NO: 555815 - DNA, 33 bp, Homo sapien; identical to SEQ ID NO: 555813

SEQ ID NO: 555816 - DNA, 33 bp, Homo sapien; identical to SEQ ID NO: 555814

SEQ ID NO: 555817 - DNA, 33 bp, Homo sapien
gcttcactcagtcagagccacttcagtagaatt

SEQ ID NO: 555818 - DNA, 33 bp, Homo sapien
gcttcactcagtcagatccacttcagtagaatt

SEQ ID NO: 555819 - DNA, 33 bp, Homo sapien
gcacgtagcttggttcaacaggcacatcagatt

SEQ ID NO: 555820 - DNA, 33 bp, Homo sapien
gcacgtagcttggttcgacaggcacatcagatt

SEQ ID NO: 555821 - DNA, 33 bp, Homo sapien
catgaagtgagactccagagactaattctttcg

SEQ ID NO: 555822 - DNA, 33 bp, Homo sapien
catgaagtgagactccggagactaattctttcg

SEQ ID NO: 555823 - DNA, 33 bp, Homo sapien
ttctatcagcattcaaaatttaaaataagttgc

SEQ ID NO: 555824 - DNA, 33 bp, Homo sapien
ttctatcagcattcaacatttaaaataagttgc

SEQ ID NO: 555825 - DNA, 33 bp, Homo sapien
aatgctgatagaaaagcctttaatagcttcatt

SEQ ID NO: 555826 - DNA, 33 bp, Homo sapien
aatgctgatagaaaaggctttaatagcttcatt

SEQ ID NO: 555827 - DNA, 33 bp, Homo sapien
gattgaataattcatcccagaccccaaagccaa

SEQ ID NO: 555828 - DNA, 33 bp, Homo sapien
gattgaataattcatctcagaccccaaagccaa

SEQ ID NO: 555829 - DNA, 33 bp, Homo sapien
agaaagtattcaatccacacaaatgagctcatt

SEQ ID NO: 555830 - DNA, 33 bp, Homo sapien
agaaagtattcaatccgcacaaatgagctcatt

SEQ ID NO: 555831 - DNA, 33 bp, Homo sapien
tttcttcctgtccctgccaatatttctgccaca

SEQ ID NO: 555832 - DNA, 33 bp, Homo sapien
tttcttcctgtccctgtcaatatttctgccaca

SEQ ID NO: 555833 - DNA, 33 bp, Homo sapien
ttctgcattatctaagccctttggattcagtat

SEQ ID NO: 555834 - DNA, 33 bp, Homo sapien
ttctgcattatctaaggcctttggattcagtat

SEQ ID NO: 555835 - DNA, 33 bp, Homo sapien
aaagaatgagaatttaagaattgacaacagaat

SEQ ID NO: 555836 - DNA, 33 bp, Homo sapien
aaagaatgagaatttaggaattgacaacagaat

SEQ ID NO: 555837 - DNA, 33 bp, Homo sapien
ccttatgaaatgtgtacctatcaaccaactgca

SEQ ID NO: 555838 - DNA, 33 bp, Homo sapien
ccttatgaaatgtgtatctatcaaccaactgca

SEQ ID NO: 555839 - DNA, 33 bp, Homo sapien
tttgcttttctgcatacgttggtgtgctcattt

SEQ ID NO: 555840 - DNA, 33 bp, Homo sapien
tttgcttttctgcatatgttggtgtgctcattt

SEQ ID NO: 555841 - DNA, 33 bp, Homo sapien
gtcataaaaaaacataacgtatgtgctgttgtt

SEQ ID NO: 555842 - DNA, 33 bp, Homo sapien
gtcataaaaaaacataccgtatgtgctgttgtt

SEQ ID NO: 555843 - DNA, 33 bp, Homo sapien
tgtcagcctgtcagagcctaaatgaggaaagag

SEQ ID NO: 555844 - DNA, 33 bp, Homo sapien
tgtcagcctgtcagagtctaaatgaggaaagag

SEQ ID NO: 555845 - DNA, 33 bp, Homo sapien
gggcaacttccagatacggaggcaaaaaagctc

SEQ ID NO: 555846 - DNA, 33 bp, Homo sapien
gggcaacttccagatatggaggcaaaaaagctc

SEQ ID NO: 555847 - DNA, 33 bp, Homo sapien
ggcatggtccatgagcaaagaagcctctagctg

SEQ ID NO: 555848 - DNA, 33 bp, Homo sapien
ggcatggtccatgagcgaagaagcctctagctg

SEQ ID NO: 555849 - DNA, 33 bp, Homo sapien
acttggagttactacaacgacatctgtgggtcg

SEQ ID NO: 555850 - DNA, 33 bp, Homo sapien
acttggagttactacagcgacatctgtgggtcg

SEQ ID NO: 555851 - DNA, 33 bp, Homo sapien
tgtttgaatccactcaagagacacgaataataa

SEQ ID NO: 555852 - DNA, 33 bp, Homo sapien
tgtttgaatccactcaggagacacgaataataa

SEQ ID NO: 555853 - DNA, 33 bp, Homo sapien
agccactccactagtacaaatccaggagattgg

SEQ ID NO: 555854 - DNA, 33 bp, Homo sapien
agccactccactagtataaatccaggagattgg

SEQ ID NO: 555855 - DNA, 33 bp, Homo sapien
tctcaggctgacccaacaattcaaccctccctt

SEQ ID NO: 555856 - DNA, 33 bp, Homo sapien
tctcaggctgacccaataattcaaccctccctt

SEQ ID NO: 555857 - DNA, 33 bp, Homo sapien
atctttacctgcttcactcgttatctccataga

SEQ ID NO: 555858 - DNA, 33 bp, Homo sapien
atctttacctgcttcattcgttatctccataga

SEQ ID NO: 555859 - DNA, 33 bp, Homo sapien
taaaaagtttacctaacgatatatctgcagtca

SEQ ID NO: 555860 - DNA, 33 bp, Homo sapien
taaaaagtttacctaatgatatatctgcagtca

SEQ ID NO: 555861 - DNA, 33 bp, Homo sapien
gggaacactcaggtggaaaaaattcacatagtg

SEQ ID NO: 555862 - DNA, 33 bp, Homo sapien
gggaacactcaggtgggaaaaattcacatagtg

SEQ ID NO: 555863 - DNA, 33 bp, Homo sapien
ttacatcctgagtctacagtcacgagttggggc

SEQ ID NO: 555864 - DNA, 33 bp, Homo sapien
ttacatcctgagtctagagtcacgagttggggc

SEQ ID NO: 555865 - DNA, 33 bp, Homo sapien
tcttggctgatacacaatattacaagagagaaa

SEQ ID NO: 555866 - DNA, 33 bp, Homo sapien
tcttggctgatacacagtattacaagagagaaa

SEQ ID NO: 555867 - DNA, 33 bp, Homo sapien
tcacttatcagtgagaactaaacaatgagaaca

SEQ ID NO: 555868 - DNA, 33 bp, Homo sapien
tcacttatcagtgagagctaaacaatgagaaca

SEQ ID NO: 555869 - DNA, 33 bp, Homo sapien
gacatgatgaaaatcaaataaaatatgtgagtg

SEQ ID NO: 555870 - DNA, 33 bp, Homo sapien
gacatgatgaaaatcagataaaatatgtgagtg

SEQ ID NO: 555871 - DNA, 33 bp, Homo sapien
taatttttgtaagaaacgcatgccttcacttcg

SEQ ID NO: 555872 - DNA, 33 bp, Homo sapien
taatttttgtaagaaatgcatgccttcacttcg

SEQ ID NO: 555873 - DNA, 33 bp, Homo sapien
gatccgttatagcttccctggtttccactgtaa

SEQ ID NO: 555874 - DNA, 33 bp, Homo sapien
gatccgttatagcttctctggtttccactgtaa

SEQ ID NO: 555875 - DNA, 33 bp, Homo sapien
ttattgcaggaaacacgggtttatgtctaaagc

SEQ ID NO: 555876 - DNA, 33 bp, Homo sapien
ttattgcaggaaacactggtttatgtctaaagc

SEQ ID NO: 555877 - DNA, 33 bp, Homo sapien
caactcacccacttcccagtttcagccccaact

SEQ ID NO: 555878 - DNA, 33 bp, Homo sapien
caactcacccacttcctagtttcagccccaact

SEQ ID NO: 555879 - DNA, 33 bp, Homo sapien
aatgcctattgttacacatgattgctagcgata

SEQ ID NO: 555880 - DNA, 33 bp, Homo sapien
aatgcctattgttacatatgattgctagcgata

SEQ ID NO: 555881 - DNA, 33 bp, Homo sapien
tccccttccatcttgccgactggctccctgtcc

SEQ ID NO: 555882 - DNA, 33 bp, Homo sapien
tccccttccatcttgctgactggctccctgtcc

SEQ ID NO: 555883 - DNA, 33 bp, Homo sapien
caatacctgagtactccccaggaaacctgagtg

SEQ ID NO: 555884 - DNA, 33 bp, Homo sapien
caatacctgagtactctccaggaaacctgagtg

SEQ ID NO: 555885 - DNA, 33 bp, Homo sapien
tgcaaggcattagtacacttatatccgtcagtg

SEQ ID NO: 555886 - DNA, 33 bp, Homo sapien
tgcaaggcattagtacgcttatatccgtcagtg

SEQ ID NO: 555887 - DNA, 33 bp, Homo sapien
gcctagcacacagtagaagctcatcaggggagg

SEQ ID NO: 555888 - DNA, 33 bp, Homo sapien
gcctagcacacagtaggagctcatcaggggagg

SEQ ID NO: 555889 - DNA, 33 bp, Homo sapien
tatatagactggttcccaaactgaactaatgaa

SEQ ID NO: 555890 - DNA, 33 bp, Homo sapien
tatatagactggttccgaaactgaactaatgaa

SEQ ID NO: 555891 - DNA, 33 bp, Homo sapien
tgttaaaatacctttgcaaggtggacagaaggg

SEQ ID NO: 555892 - DNA, 33 bp, Homo sapien
tgttaaaatacctttgtaaggtggacagaaggg

SEQ ID NO: 555893 - DNA, 33 bp, Homo sapien
ttttcttgtgcatccaactagattgtaagctcc

SEQ ID NO: 555894 - DNA, 33 bp, Homo sapien
ttttcttgtgcatccatctagattgtaagctcc

SEQ ID NO: 555895 - DNA, 33 bp, Homo sapien
gttccagggccagaaacaggaaaagtgaaaaaa

SEQ ID NO: 555896 - DNA, 33 bp, Homo sapien
gttccagggccagaaagaggaaaagtgaaaaaa

SEQ ID NO: 555897 - DNA, 33 bp, Homo sapien
ccaaccctgttcaagcaccaaccaataaatctt

SEQ ID NO: 555898 - DNA, 33 bp, Homo sapien
ccaaccctgttcaagcgccaaccaataaatctt

SEQ ID NO: 555899 - DNA, 33 bp, Homo sapien
gagaaggagaggagaaagtggactaggaatgtc

SEQ ID NO: 555900 - DNA, 33 bp, Homo sapien
gagaaggagaggagaaggtggactaggaatgtc

SEQ ID NO: 555901 - DNA, 33 bp, Homo sapien
aaaaggaatatggtaaagctggaaaatgtatga

SEQ ID NO: 555902 - DNA, 33 bp, Homo sapien
aaaaggaatatggtaatgctggaaaatgtatga

SEQ ID NO: 555903 - DNA, 33 bp, Homo sapien
atgttctggagagcataaaagaagttaagacag

SEQ ID NO: 555904 - DNA, 33 bp, Homo sapien
atgttctggagagcatgaaagaagttaagacag

SEQ ID NO: 555905 - DNA, 33 bp, Homo sapien
aatggattatcttttacagccactagaaagaac

SEQ ID NO: 555906 - DNA, 33 bp, Homo sapien
aatggattatcttttagagccactagaaagaac

SEQ ID NO: 555907 - DNA, 33 bp, Homo sapien
atcattacaagaccaagtgacaaatgctgttct

SEQ ID NO: 555908 - DNA, 33 bp, Homo sapien
atcattacaagaccaattgacaaatgctgttct

SEQ ID NO: 555909 - DNA, 33 bp, Homo sapien
tctcactgttgcttaacaagaaaaaggaacaga

SEQ ID NO: 555910 - DNA, 33 bp, Homo sapien
tctcactgttgcttaataagaaaaaggaacaga

SEQ ID NO: 555911 - DNA, 33 bp, Homo sapien
cattcgcattagtcaccctgcacagagactgtg

SEQ ID NO: 555912 - DNA, 33 bp, Homo sapien
cattcgcattagtcactctgcacagagactgtg

SEQ ID NO: 555913 - DNA, 33 bp, Homo sapien
tggagttgagaagagacgtattgaactggttct

SEQ ID NO: 555914 - DNA, 33 bp, Homo sapien
tggagttgagaagagatgtattgaactggttct

SEQ ID NO: 555915 - DNA, 33 bp, Homo sapien
atgggtctctctgatacgagggtagactttgct

SEQ ID NO: 555916 - DNA, 33 bp, Homo sapien
atgggtctctctgatatgagggtagactttgct

SEQ ID NO: 555917 - DNA, 33 bp, Homo sapien
catgtttcttctggaagtgtagaatataaggca

SEQ ID NO: 555918 - DNA, 33 bp, Homo sapien
catgtttcttctggaattgtagaatataaggca

SEQ ID NO: 555919 - DNA, 33 bp, Homo sapien
cagcattgcaataatcaccttagctcttacctg

SEQ ID NO: 555920 - DNA, 33 bp, Homo sapien
cagcattgcaataatcgccttagctcttacctg

SEQ ID NO: 555921 - DNA, 33 bp, Homo sapien
gaagcaatattatcaactacagtacagtgctta

SEQ ID NO: 555922 - DNA, 33 bp, Homo sapien
gaagcaatattatcaattacagtacagtgctta

SEQ ID NO: 555923 - DNA, 33 bp, Homo sapien
gtgttgatataacatccagttgtttgtttattg

SEQ ID NO: 555924 - DNA, 33 bp, Homo sapien
gtgttgatataacatctagttgtttgtttattg

SEQ ID NO: 555925 - DNA, 33 bp, Homo sapien
tcagtcatgttttctacgaatctctaggtgtct

SEQ ID NO: 555926 - DNA, 33 bp, Homo sapien
tcagtcatgttttctatgaatctctaggtgtct

SEQ ID NO: 555927 - DNA, 33 bp, Homo sapien
taaagtctgtacatgcaatagcataatatttgt

SEQ ID NO: 555928 - DNA, 33 bp, Homo sapien
taaagtctgtacatgcgatagcataatatttgt

SEQ ID NO: 555929 - DNA, 33 bp, Homo sapien
gctgggagagaatacacggaatgtccaagatat

SEQ ID NO: 555930 - DNA, 33 bp, Homo sapien
gctgggagagaatacagggaatgtccaagatat

SEQ ID NO: 555931 - DNA, 33 bp, Homo sapien
gcagggccatagcccaagtaggttgtaaaggcc

SEQ ID NO: 555932 - DNA, 33 bp, Homo sapien
gcagggccatagcccaggtaggttgtaaaggcc

SEQ ID NO: 555933 - DNA, 33 bp, Homo sapien
agggaaggtttattgaaggctactcaaatacag

SEQ ID NO: 555934 - DNA, 33 bp, Homo sapien
agggaaggtttattgacggctactcaaatacag

SEQ ID NO: 555935 - DNA, 33 bp, Homo sapien
cacattgcctcccaccactgtttgccatgctgt

SEQ ID NO: 555936 - DNA, 33 bp, Homo sapien
cacattgcctcccaccgctgtttgccatgctgt

SEQ ID NO: 555937 - DNA, 33 bp, Homo sapien
gtgaggccttatgcccagcaaggtgtgtcagag

SEQ ID NO: 555938 - DNA, 33 bp, Homo sapien
gtgaggccttatgcccggcaaggtgtgtcagag

SEQ ID NO: 555939 - DNA, 33 bp, Homo sapien
ggaagaaaaatctaaccaaagatccaaaccata

SEQ ID NO: 555940 - DNA, 33 bp, Homo sapien
ggaagaaaaatctaacgaaagatccaaaccata

SEQ ID NO: 555941 - DNA, 33 bp, Homo sapien
tggaatcaggccatgacggtacgtttgttttct

SEQ ID NO: 555942 - DNA, 33 bp, Homo sapien
tggaatcaggccatgatggtacgtttgttttct

SEQ ID NO: 555943 - DNA, 33 bp, Homo sapien
agtgatgtatacaataactgttggaactgtgca

SEQ ID NO: 555944 - DNA, 33 bp, Homo sapien
agtgatgtatacaatatctgttggaactgtgca

SEQ ID NO: 555945 - DNA, 33 bp, Homo sapien
gcaagaaaccagaataccatctgtggggctcag

SEQ ID NO: 555946 - DNA, 33 bp, Homo sapien
gcaagaaaccagaatatcatctgtggggctcag

SEQ ID NO: 555947 - DNA, 33 bp, Homo sapien
gcaaacatcagtaaccaaaacgaggcccactac

SEQ ID NO: 555948 - DNA, 33 bp, Homo sapien
gcaaacatcagtaaccgaaacgaggcccactac

SEQ ID NO: 555949 - DNA, 33 bp, Homo sapien
catcccagtgaaaacacgttcctcctattctac

SEQ ID NO: 555950 - DNA, 33 bp, Homo sapien
catcccagtgaaaacaggttcctcctattctac

SEQ ID NO: 555951 - DNA, 33 bp, Homo sapien
ccacatctgccagctcaatttcaaggcagcctg

SEQ ID NO: 555952 - DNA, 33 bp, Homo sapien
ccacatctgccagctcgatttcaaggcagcctg

SEQ ID NO: 555953 - DNA, 33 bp, Homo sapien
ctgagctgagccacaaagagcttctctcatatt

SEQ ID NO: 555954 - DNA, 33 bp, Homo sapien
ctgagctgagccacaaggagcttctctcatatt

SEQ ID NO: 555955 - DNA, 33 bp, Homo sapien
atcaaggatacaggaacgttctcagccccctta

SEQ ID NO: 555956 - DNA, 33 bp, Homo sapien
atcaaggatacaggaatgttctcagccccctta

SEQ ID NO: 555957 - DNA, 33 bp, Homo sapien
tcggaattagccaacagaaatgagaacttagtt

SEQ ID NO: 555958 - DNA, 33 bp, Homo sapien
tcggaattagccaacataaatgagaacttagtt

SEQ ID NO: 555959 - DNA, 33 bp, Homo sapien
agtaggtcatctgcgcggaacaaaccctttcat

SEQ ID NO: 555960 - DNA, 33 bp, Homo sapien
agtaggtcatctgcgctgaacaaaccctttcat

SEQ ID NO: 555961 - DNA, 33 bp, Homo sapien
ttcttggattagaagcagattgtgttaactgta

SEQ ID NO: 555962 - DNA, 33 bp, Homo sapien
ttcttggattagaagctgattgtgttaactgta

SEQ ID NO: 555963 - DNA, 33 bp, Homo sapien; identical to SEQ ID NO: 555961

SEQ ID NO: 555964 - DNA, 33 bp, Homo sapien; identical to SEQ ID NO: 555962

SEQ ID NO: 555965 - DNA, 33 bp, Homo sapien
caagctctgacaatgacagatatttacaagctg

SEQ ID NO: 555966 - DNA, 33 bp, Homo sapien
caagctctgacaatgatagatatttacaagctg

SEQ ID NO: 555967 - DNA, 33 bp, Homo sapien
aagtagttcactattacaaagccctgtagttac

SEQ ID NO: 555968 - DNA, 33 bp, Homo sapien
aagtagttcactattataaagccctgtagttac

SEQ ID NO: 555969 - DNA, 33 bp, Homo sapien
gaacaatcaatagcaaacactaacaattttatc

SEQ ID NO: 555970 - DNA, 33 bp, Homo sapien
gaacaatcaatagcaatcactaacaattttatc

SEQ ID NO: 555971 - DNA, 33 bp, Homo sapien
aggctggaaagaaacacatttgctcccctgtct

SEQ ID NO: 555972 - DNA, 33 bp, Homo sapien
aggctggaaagaaacatatttgctcccctgtct

SEQ ID NO: 555973 - DNA, 33 bp, Homo sapien
aaaaaagcatttcataagttgggactgcctttc

SEQ ID NO: 555974 - DNA, 33 bp, Homo sapien
aaaaaagcatttcatatgttgggactgcctttc

SEQ ID NO: 555975 - DNA, 33 bp, Homo sapien
aaagaaaaagagaagacacgcaatgattaagat

SEQ ID NO: 555976 - DNA, 33 bp, Homo sapien
aaagaaaaagagaagagacgcaatgattaagat

SEQ ID NO: 555977 - DNA, 33 bp, Homo sapien
ctctattcaggactcaatgaaaacttttaaaag

SEQ ID NO: 555978 - DNA, 33 bp, Homo sapien
ctctattcaggactcagtgaaaacttttaaaag

SEQ ID NO: 555979 - DNA, 33 bp, Homo sapien
tgtggcagtccaaggcaaagaagtgagagacag

SEQ ID NO: 555980 - DNA, 33 bp, Homo sapien
tgtggcagtccaaggcgaagaagtgagagacag

SEQ ID NO: 555981 - DNA, 33 bp, Homo sapien
gtagtttgagattaccacaaccatttaatgaaa

SEQ ID NO: 555982 - DNA, 33 bp, Homo sapien
gtagtttgagattaccgcaaccatttaatgaaa

SEQ ID NO: 555983 - DNA, 33 bp, Homo sapien
taaagatacaaaaaaaatacaggtgcacacctg

SEQ ID NO: 555984 - DNA, 33 bp, Homo sapien
taaagatacaaaaaaattacaggtgcacacctg

SEQ ID NO: 555985 - DNA, 33 bp, Homo sapien
agtttgtcccagccgacgattatctggatagag

SEQ ID NO: 555986 - DNA, 33 bp, Homo sapien
agtttgtcccagccgatgattatctggatagag

SEQ ID NO: 555987 - DNA, 33 bp, Homo sapien
gtctcattatatgggcaaaagcaagtcatatgg

SEQ ID NO: 555988 - DNA, 33 bp, Homo sapien
gtctcattatatgggccaaagcaagtcatatgg

SEQ ID NO: 555989 - DNA, 33 bp, Homo sapien
tttttcattcaagaagcactgccagcctctggc

SEQ ID NO: 555990 - DNA, 33 bp, Homo sapien
tttttcattcaagaagtactgccagcctctggc

SEQ ID NO: 555991 - DNA, 33 bp, Homo sapien
aataccttaaaaatcactagcaatcagagtttg

SEQ ID NO: 555992 - DNA, 33 bp, Homo sapien
aataccttaaaaatcagtagcaatcagagtttg

SEQ ID NO: 555993 - DNA, 33 bp, Homo sapien
aacaagaataatttgcagaaatagaaagaagca

SEQ ID NO: 555994 - DNA, 33 bp, Homo sapien
aacaagaataatttgctgaaatagaaagaagca

SEQ ID NO: 555995 - DNA, 33 bp, Homo sapien
attctgaattaggaaacgcttcatttttttaaa

SEQ ID NO: 555996 - DNA, 33 bp, Homo sapien
attctgaattaggaaatgcttcatttttttaaa

SEQ ID NO: 555997 - DNA, 33 bp, Homo sapien
ctgaaatcatgacaaaccttctattatcacaaa

SEQ ID NO: 555998 - DNA, 33 bp, Homo sapien
ctgaaatcatgacaaatcttctattatcacaaa

SEQ ID NO: 555999 - DNA, 33 bp, Homo sapien
cagatgactcagttgagccagagtttttgagag

SEQ ID NO: 556000 - DNA, 33 bp, Homo sapien
cagatgactcagttgatccagagtttttgagag

SEQ ID NO: 556001 - DNA, 33 bp, Homo sapien
ctttgcaacgggacaggaaaaaagaatgaataa

SEQ ID NO: 556002 - DNA, 33 bp, Homo sapien
ctttgcaacgggacagtaaaaaagaatgaataa

SEQ ID NO: 556003 - DNA, 33 bp, Homo sapien
tcccgtaagtaaaggaatcaaaccaagtggcat

SEQ ID NO: 556004 - DNA, 33 bp, Homo sapien
tcccgtaagtaaaggattcaaaccaagtggcat

SEQ ID NO: 556005 - DNA, 33 bp, Homo sapien
tcttttgtctaggtaccaattcttcactaagtt

SEQ ID NO: 556006 - DNA, 33 bp, Homo sapien
tcttttgtctaggtactaattcttcactaagtt

SEQ ID NO: 556007 - DNA, 33 bp, Homo sapien
aatattcaagcagttgaaaaacattatttgctg

SEQ ID NO: 556008 - DNA, 33 bp, Homo sapien
aatattcaagcagttggaaaacattatttgctg

SEQ ID NO: 556009 - DNA, 33 bp, Homo sapien
acagagaaaagccacacgtgctgttatagagtt

SEQ ID NO: 556010 - DNA, 33 bp, Homo sapien
acagagaaaagccacatgtgctgttatagagtt

SEQ ID NO: 556011 - DNA, 33 bp, Homo sapien
cctcttctggaaatgaacaggagtaacttaggt

SEQ ID NO: 556012 - DNA, 33 bp, Homo sapien
cctcttctggaaatgagcaggagtaacttaggt

SEQ ID NO: 556013 - DNA, 33 bp, Homo sapien
gtaattacaaaaggtccaatctctaaatattaa

SEQ ID NO: 556014 - DNA, 33 bp, Homo sapien
gtaattacaaaaggtctaatctctaaatattaa

SEQ ID NO: 556015 - DNA, 33 bp, Homo sapien
gtgtgtgcgtatagtcacagcttctctggggag

SEQ ID NO: 556016 - DNA, 33 bp, Homo sapien
gtgtgtgcgtatagtcgcagcttctctggggag

SEQ ID NO: 556017 - DNA, 33 bp, Homo sapien
tctttcaacatttgtacgtacctgagtattctc

SEQ ID NO: 556018 - DNA, 33 bp, Homo sapien
tctttcaacatttgtatgtacctgagtattctc

SEQ ID NO: 556019 - DNA, 33 bp, Homo sapien
agaaagagcaaatccaagacaactcgtctggac

SEQ ID NO: 556020 - DNA, 33 bp, Homo sapien
agaaagagcaaatccaggacaactcgtctggac

SEQ ID NO: 556021 - DNA, 33 bp, Homo sapien
atcaccttaattcagaagacactctcactactt

SEQ ID NO: 556022 - DNA, 33 bp, Homo sapien
atcaccttaattcagaggacactctcactactt

SEQ ID NO: 556023 - DNA, 33 bp, Homo sapien
ctctcactactttttgcaacatggttgggtgac

SEQ ID NO: 556024 - DNA, 33 bp, Homo sapien
ctctcactactttttgtaacatggttgggtgac

SEQ ID NO: 556025 - DNA, 33 bp, Homo sapien
aggaccttgaaccacaaaactcccttatcttag

SEQ ID NO: 556026 - DNA, 33 bp, Homo sapien
aggaccttgaaccacacaactcccttatcttag

SEQ ID NO: 556027 - DNA, 33 bp, Homo sapien
catcatccctgggtagcaacagcatttcttaga

SEQ ID NO: 556028 - DNA, 33 bp, Homo sapien
catcatccctgggtaggaacagcatttcttaga

SEQ ID NO: 556029 - DNA, 33 bp, Homo sapien
gttttctggaaagtgcccttaagtctcatgtcc

SEQ ID NO: 556030 - DNA, 33 bp, Homo sapien
gttttctggaaagtgctcttaagtctcatgtcc

SEQ ID NO: 556031 - DNA, 33 bp, Homo sapien
atgtctaataaagacacagtccatctggcctga

SEQ ID NO: 556032 - DNA, 33 bp, Homo sapien
atgtctaataaagacagagtccatctggcctga

SEQ ID NO: 556033 - DNA, 33 bp, Homo sapien
agcagttccagataaaccaaacagatcaaaaac

SEQ ID NO: 556034 - DNA, 33 bp, Homo sapien
agcagttccagataaatcaaacagatcaaaaac

SEQ ID NO: 556035 - DNA, 33 bp, Homo sapien
aatgatttgtcttggacccagttgtatggcatt

SEQ ID NO: 556036 - DNA, 33 bp, Homo sapien
aatgatttgtcttggatccagttgtatggcatt

SEQ ID NO: 556037 - DNA, 33 bp, Homo sapien
tacaaagtggttagagcagtacctggtgctttg

SEQ ID NO: 556038 - DNA, 33 bp, Homo sapien
tacaaagtggttagagtagtacctggtgctttg

SEQ ID NO: 556039 - DNA, 33 bp, Homo sapien
ctcgttaaataaactacgatccaatcatacaat

SEQ ID NO: 556040 - DNA, 33 bp, Homo sapien
ctcgttaaataaactatgatccaatcatacaat

SEQ ID NO: 556041 - DNA, 33 bp, Homo sapien
cgaatcagccgtaagggaagctaactggaggca

SEQ ID NO: 556042 - DNA, 33 bp, Homo sapien
cgaatcagccgtaaggtaagctaactggaggca

SEQ ID NO: 556043 - DNA, 33 bp, Homo sapien
gcaattcttttgcttcgcatttcactgtcctta

SEQ ID NO: 556044 - DNA, 33 bp, Homo sapien
gcaattcttttgcttctcatttcactgtcctta

SEQ ID NO: 556045 - DNA, 33 bp, Homo sapien
ggctgttggcttcaacaaacttgtggtcaagga

SEQ ID NO: 556046 - DNA, 33 bp, Homo sapien
ggctgttggcttcaacgaacttgtggtcaagga

SEQ ID NO: 556047 - DNA, 33 bp, Homo sapien
atttcacatttcctaaccttctacaatgaacat

SEQ ID NO: 556048 - DNA, 33 bp, Homo sapien
atttcacatttcctaatcttctacaatgaacat

SEQ ID NO: 556049 - DNA, 33 bp, Homo sapien
ctagtgtaaatgtttacgagataccaatttttt

SEQ ID NO: 556050 - DNA, 33 bp, Homo sapien
ctagtgtaaatgtttatgagataccaatttttt

SEQ ID NO: 556051 - DNA, 33 bp, Homo sapien
cagacaaattgcgtagcctaaaaatatcaaaaa

SEQ ID NO: 556052 - DNA, 33 bp, Homo sapien
cagacaaattgcgtagtctaaaaatatcaaaaa

SEQ ID NO: 556053 - DNA, 33 bp, Homo sapien
gcagatttgcattttacaacttgtcatgtcaaa

SEQ ID NO: 556054 - DNA, 33 bp, Homo sapien
gcagatttgcattttataacttgtcatgtcaaa

SEQ ID NO: 556055 - DNA, 33 bp, Homo sapien
tgtgggggcgcagggacaacctgaaaaaggttc

SEQ ID NO: 556056 - DNA, 33 bp, Homo sapien
tgtgggggcgcagggataacctgaaaaaggttc

SEQ ID NO: 556057 - DNA, 33 bp, Homo sapien
ttaaggcaactcattaaaagttgttgaagatag

SEQ ID NO: 556058 - DNA, 33 bp, Homo sapien
ttaaggcaactcattacaagttgttgaagatag

SEQ ID NO: 556059 - DNA, 33 bp, Homo sapien
caaggattcttagccccatgtccctgtatagaa

SEQ ID NO: 556060 - DNA, 33 bp, Homo sapien
caaggattcttagcccgatgtccctgtatagaa

SEQ ID NO: 556061 - DNA, 33 bp, Homo sapien
tcaggaacagtaagcaagttgaactgaaaatag

SEQ ID NO: 556062 - DNA, 33 bp, Homo sapien
tcaggaacagtaagcatgttgaactgaaaatag

SEQ ID NO: 556063 - DNA, 33 bp, Homo sapien
tttttaaaagaatttgaattgtggctgcagggt

SEQ ID NO: 556064 - DNA, 33 bp, Homo sapien
tttttaaaagaatttgcattgtggctgcagggt

SEQ ID NO: 556065 - DNA, 33 bp, Homo sapien
atattctaaatcaagcaacttaagatattttca

SEQ ID NO: 556066 - DNA, 33 bp, Homo sapien
atattctaaatcaagcgacttaagatattttca

SEQ ID NO: 556067 - DNA, 33 bp, Homo sapien
tgccagggcaccagaactatttagattaccatg

SEQ ID NO: 556068 - DNA, 33 bp, Homo sapien
tgccagggcaccagaagtatttagattaccatg

SEQ ID NO: 556069 - DNA, 33 bp, Homo sapien
agacagtgagagtgacgggcacttttttaatac

SEQ ID NO: 556070 - DNA, 33 bp, Homo sapien
agacagtgagagtgactggcacttttttaatac

SEQ ID NO: 556071 - DNA, 33 bp, Homo sapien
tgcccttgatgtaccaaagcagtgtttaccagg

SEQ ID NO: 556072 - DNA, 33 bp, Homo sapien
tgcccttgatgtaccagagcagtgtttaccagg

SEQ ID NO: 556073 - DNA, 33 bp, Homo sapien
tctgcataggtccccgaagaaatgaatgtacct

SEQ ID NO: 556074 - DNA, 33 bp, Homo sapien
tctgcataggtccccggagaaatgaatgtacct

SEQ ID NO: 556075 - DNA, 33 bp, Homo sapien
gatagtaggtggctaacagaattgacaggatgg

SEQ ID NO: 556076 - DNA, 33 bp, Homo sapien
gatagtaggtggctaatagaattgacaggatgg

SEQ ID NO: 556077 - DNA, 33 bp, Homo sapien
aactatccctgagtctaaattaaaagtcctggt

SEQ ID NO: 556078 - DNA, 33 bp, Homo sapien
aactatccctgagtctcaattaaaagtcctggt

SEQ ID NO: 556079 - DNA, 33 bp, Homo sapien
ctgctcaataactctccacccgtgttgcagagt

SEQ ID NO: 556080 - DNA, 33 bp, Homo sapien
ctgctcaataactctctacccgtgttgcagagt

SEQ ID NO: 556081 - DNA, 33 bp, Homo sapien
tccttctattcagcaaatgtcctggatatttgg

SEQ ID NO: 556082 - DNA, 33 bp, Homo sapien
tccttctattcagcaagtgtcctggatatttgg

SEQ ID NO: 556083 - DNA, 33 bp, Homo sapien
gccttgctctcagaaacgttgacctcaaccttc

SEQ ID NO: 556084 - DNA, 33 bp, Homo sapien
gccttgctctcagaaatgttgacctcaaccttc

SEQ ID NO: 556085 - DNA, 33 bp, Homo sapien
ttggtgctctcatccaaactcttgattttaagt

SEQ ID NO: 556086 - DNA, 33 bp, Homo sapien
ttggtgctctcatccagactcttgattttaagt

SEQ ID NO: 556087 - DNA, 33 bp, Homo sapien
gttgtaagcatccaaacgacccagattacataa

SEQ ID NO: 556088 - DNA, 33 bp, Homo sapien
gttgtaagcatccaaatgacccagattacataa

SEQ ID NO: 556089 - DNA, 33 bp, Homo sapien
aagtcgtatggagttaccttacccataatttgg

SEQ ID NO: 556090 - DNA, 33 bp, Homo sapien
aagtcgtatggagttatcttacccataatttgg

SEQ ID NO: 556091 - DNA, 33 bp, Homo sapien
ggaaactgctgacctgaaaatggacgtttacag

SEQ ID NO: 556092 - DNA, 33 bp, Homo sapien
ggaaactgctgacctgcaaatggacgtttacag

SEQ ID NO: 556093 - DNA, 33 bp, Homo sapien
tctgttacataagagagctgtaagtattgtacc

SEQ ID NO: 556094 - DNA, 33 bp, Homo sapien
tctgttacataagagatctgtaagtattgtacc

SEQ ID NO: 556095 - DNA, 33 bp, Homo sapien
gcaactgagcaggagaagctagtgcagaaaatt

SEQ ID NO: 556096 - DNA, 33 bp, Homo sapien
gcaactgagcaggagacgctagtgcagaaaatt

SEQ ID NO: 556097 - DNA, 33 bp, Homo sapien
tttctgcccttgggtagataaatggtgtctttc

SEQ ID NO: 556098 - DNA, 33 bp, Homo sapien
tttctgcccttgggtatataaatggtgtctttc

SEQ ID NO: 556099 - DNA, 33 bp, Homo sapien
ttttattatttccaacagagacaaacatttttc

SEQ ID NO: 556100 - DNA, 33 bp, Homo sapien
ttttattatttccaactgagacaaacatttttc

SEQ ID NO: 556101 - DNA, 33 bp, Homo sapien
tggaagaagcaaggaaggaagaagcaaggatga

SEQ ID NO: 556102 - DNA, 33 bp, Homo sapien
tggaagaagcaaggaatgaagaagcaaggatga

SEQ ID NO: 556103 - DNA, 33 bp, Homo sapien
gttgcacagcagtacaaaggggagtctctgggt

SEQ ID NO: 556104 - DNA, 33 bp, Homo sapien
gttgcacagcagtacagaggggagtctctgggt

SEQ ID NO: 556105 - DNA, 33 bp, Homo sapien
aaaaaatgccctgtaacgggtgccatgctatat

SEQ ID NO: 556106 - DNA, 33 bp, Homo sapien
aaaaaatgccctgtaatgggtgccatgctatat

SEQ ID NO: 556107 - DNA, 33 bp, Homo sapien
acagagttcttcagcactaataatcaagaaagg

SEQ ID NO: 556108 - DNA, 33 bp, Homo sapien
acagagttcttcagcattaataatcaagaaagg

SEQ ID NO: 556109 - DNA, 33 bp, Homo sapien
tgtatccataagaccacagagggggaaaagaca

SEQ ID NO: 556110 - DNA, 33 bp, Homo sapien
tgtatccataagaccatagagggggaaaagaca

SEQ ID NO: 556111 - DNA, 33 bp, Homo sapien
caaaaaagcttattccactgcaggaaagaaggt

SEQ ID NO: 556112 - DNA, 33 bp, Homo sapien
caaaaaagcttattccgctgcaggaaagaaggt

SEQ ID NO: 556113 - DNA, 33 bp, Homo sapien
aaatgccttagaaagacaaggggagagggagca

SEQ ID NO: 556114 - DNA, 33 bp, Homo sapien
aaatgccttagaaagataaggggagagggagca

SEQ ID NO: 556115 - DNA, 33 bp, Homo sapien
ctttctaaggcatttccctcaataaatctctta

SEQ ID NO: 556116 - DNA, 33 bp, Homo sapien
ctttctaaggcatttctctcaataaatctctta

SEQ ID NO: 556117 - DNA, 33 bp, Homo sapien
tcgtttttttccatcaatagaatctgtttcatg

SEQ ID NO: 556118 - DNA, 33 bp, Homo sapien
tcgtttttttccatcagtagaatctgtttcatg

SEQ ID NO: 556119 - DNA, 33 bp, Homo sapien
tagaatctgtttcatgaatgatcttttgttcct

SEQ ID NO: 556120 - DNA, 33 bp, Homo sapien
tagaatctgtttcatggatgatcttttgttcct

SEQ ID NO: 556121 - DNA, 33 bp, Homo sapien
tgtgccatcttaccaacgtattcgaggtacttg

SEQ ID NO: 556122 - DNA, 33 bp, Homo sapien
tgtgccatcttaccaatgtattcgaggtacttg

SEQ ID NO: 556123 - DNA, 33 bp, Homo sapien
gcaagcacagtacaaactgttatttacatttga

SEQ ID NO: 556124 - DNA, 33 bp, Homo sapien
gcaagcacagtacaaattgttatttacatttga

SEQ ID NO: 556125 - DNA, 33 bp, Homo sapien
atgtatctgtttgctagcctaaaaaatgttttt

SEQ ID NO: 556126 - DNA, 33 bp, Homo sapien
atgtatctgtttgctatcctaaaaaatgttttt

SEQ ID NO: 556127 - DNA, 33 bp, Homo sapien
acttggtgtgtatacccagaagtcaacagaaat

SEQ ID NO: 556128 - DNA, 33 bp, Homo sapien
acttggtgtgtatacctagaagtcaacagaaat

SEQ ID NO: 556129 - DNA, 33 bp, Homo sapien
gcctaggaaaaagtcaaatgctacaggtagaca

SEQ ID NO: 556130 - DNA, 33 bp, Homo sapien
gcctaggaaaaagtcagatgctacaggtagaca

SEQ ID NO: 556131 - DNA, 33 bp, Homo sapien
ccaatgagagtttcaacggtctcaaggaggagg

SEQ ID NO: 556132 - DNA, 33 bp, Homo sapien
ccaatgagagtttcaagggtctcaaggaggagg

SEQ ID NO: 556133 - DNA, 33 bp, Homo sapien
ttgtggagatactgtgcagacaataagaagtat

SEQ ID NO: 556134 - DNA, 33 bp, Homo sapien
ttgtggagatactgtgtagacaataagaagtat

SEQ ID NO: 556135 - DNA, 33 bp, Homo sapien
gtcttggaaaagtagactcctaacagataatgt

SEQ ID NO: 556136 - DNA, 33 bp, Homo sapien
gtcttggaaaagtagattcctaacagataatgt

SEQ ID NO: 556137 - DNA, 33 bp, Homo sapien
agttataccataaaccaaaggcctcaaaaactg

SEQ ID NO: 556138 - DNA, 33 bp, Homo sapien
agttataccataaaccgaaggcctcaaaaactg

SEQ ID NO: 556139 - DNA, 33 bp, Homo sapien
taagggcaggaaacaacctgcagattcttgtac

SEQ ID NO: 556140 - DNA, 33 bp, Homo sapien
taagggcaggaaacaagctgcagattcttgtac

SEQ ID NO: 556141 - DNA, 33 bp, Homo sapien
ttgtgttccatttgcaagtattacataaaccca

SEQ ID NO: 556142 - DNA, 33 bp, Homo sapien
ttgtgttccatttgcaggtattacataaaccca

SEQ ID NO: 556143 - DNA, 33 bp, Homo sapien
ctggataatatagtatcactgttttcagcaaaa

SEQ ID NO: 556144 - DNA, 33 bp, Homo sapien
ctggataatatagtattactgttttcagcaaaa

SEQ ID NO: 556145 - DNA, 33 bp, Homo sapien
tcattagctggcaaaacctaacaacaatcacac

SEQ ID NO: 556146 - DNA, 33 bp, Homo sapien
tcattagctggcaaaatctaacaacaatcacac

SEQ ID NO: 556147 - DNA, 33 bp, Homo sapien
atttctgaaaactacactggatgctttagaaag

SEQ ID NO: 556148 - DNA, 33 bp, Homo sapien
atttctgaaaactacattggatgctttagaaag

SEQ ID NO: 556149 - DNA, 33 bp, Homo sapien
gctttagagttcaaaccaagtcaggctcaaaca

SEQ ID NO: 556150 - DNA, 33 bp, Homo sapien
gctttagagttcaaacgaagtcaggctcaaaca

SEQ ID NO: 556151 - DNA, 33 bp, Homo sapien
gcctggcacagtacaacaggttcgtgttattat

SEQ ID NO: 556152 - DNA, 33 bp, Homo sapien
gcctggcacagtacaagaggttcgtgttattat

SEQ ID NO: 556153 - DNA, 33 bp, Homo sapien
ggatacaaatatcaagcagtttctttatctgta

SEQ ID NO: 556154 - DNA, 33 bp, Homo sapien
ggatacaaatatcaagtagtttctttatctgta

SEQ ID NO: 556155 - DNA, 33 bp, Homo sapien
gaccttaactgggacacaagacgctggattctc

SEQ ID NO: 556156 - DNA, 33 bp, Homo sapien
gaccttaactgggacataagacgctggattctc

SEQ ID NO: 556157 - DNA, 33 bp, Homo sapien
tagtatgagagataaaactttgtggtttttggg

SEQ ID NO: 556158 - DNA, 33 bp, Homo sapien
tagtatgagagataaacctttgtggtttttggg

SEQ ID NO: 556159 - DNA, 33 bp, Homo sapien
attcattcactcatcacgttgaatgctgctctg

SEQ ID NO: 556160 - DNA, 33 bp, Homo sapien
attcattcactcatcatgttgaatgctgctctg

SEQ ID NO: 556161 - DNA, 33 bp, Homo sapien
cctttatgtcacatcaacctgtttatttccttt

SEQ ID NO: 556162 - DNA, 33 bp, Homo sapien
cctttatgtcacatcaccctgtttatttccttt

SEQ ID NO: 556163 - DNA, 33 bp, Homo sapien
acttgatttgggctgaatcaatgtgtccagatc

SEQ ID NO: 556164 - DNA, 33 bp, Homo sapien
acttgatttgggctgactcaatgtgtccagatc

SEQ ID NO: 556165 - DNA, 33 bp, Homo sapien
gggaatctttataccacgggaattggcaaatca

SEQ ID NO: 556166 - DNA, 33 bp, Homo sapien
gggaatctttataccatgggaattggcaaatca

SEQ ID NO: 556167 - DNA, 33 bp, Homo sapien
tagcccttaatacacacgagttttctaattctt

SEQ ID NO: 556168 - DNA, 33 bp, Homo sapien
tagcccttaatacacatgagttttctaattctt

SEQ ID NO: 556169 - DNA, 33 bp, Homo sapien
tctgctacatggattccattcagtggctcaggt

SEQ ID NO: 556170 - DNA, 33 bp, Homo sapien
tctgctacatggattctattcagtggctcaggt

SEQ ID NO: 556171 - DNA, 33 bp, Homo sapien
acagttctggagcctagaagtccaaaatcaaga

SEQ ID NO: 556172 - DNA, 33 bp, Homo sapien
acagttctggagcctataagtccaaaatcaaga

SEQ ID NO: 556173 - DNA, 33 bp, Homo sapien
gaagggcgcagggatgaatccgtccttgcctct

SEQ ID NO: 556174 - DNA, 33 bp, Homo sapien
gaagggcgcagggatggatccgtccttgcctct

SEQ ID NO: 556175 - DNA, 33 bp, Homo sapien
ttctcctgtcagcccacagagggtagaaatggc

SEQ ID NO: 556176 - DNA, 33 bp, Homo sapien
ttctcctgtcagcccatagagggtagaaatggc

SEQ ID NO: 556177 - DNA, 33 bp, Homo sapien
atggctgaacccaagaaggtgagtagagattga

SEQ ID NO: 556178 - DNA, 33 bp, Homo sapien
atggctgaacccaagagggtgagtagagattga

SEQ ID NO: 556179 - DNA, 33 bp, Homo sapien
gaagttttactgcaaagtagggcagagcttggg

SEQ ID NO: 556180 - DNA, 33 bp, Homo sapien
gaagttttactgcaaattagggcagagcttggg

SEQ ID NO: 556181 - DNA, 33 bp, Homo sapien
tccagtacgactccgcccttcctcactcctttg

SEQ ID NO: 556182 - DNA, 33 bp, Homo sapien
tccagtacgactccgcgcttcctcactcctttg

SEQ ID NO: 556183 - DNA, 33 bp, Homo sapien
tgtaaagttatatggcaaaggttgtggatggca

SEQ ID NO: 556184 - DNA, 33 bp, Homo sapien
tgtaaagttatatggcgaaggttgtggatggca

SEQ ID NO: 556185 - DNA, 33 bp, Homo sapien
atctgttggggccagaaaactttatacagtgga

SEQ ID NO: 556186 - DNA, 33 bp, Homo sapien
atctgttggggccagagaactttatacagtgga

SEQ ID NO: 556187 - DNA, 33 bp, Homo sapien
ggtttcttccacaaaccgcatactaataatttc

SEQ ID NO: 556188 - DNA, 33 bp, Homo sapien
ggtttcttccacaaactgcatactaataatttc

SEQ ID NO: 556189 - DNA, 33 bp, Homo sapien
cctgtctctattccctaaattcctctgtgtggc

SEQ ID NO: 556190 - DNA, 33 bp, Homo sapien
cctgtctctattccctgaattcctctgtgtggc

SEQ ID NO: 556191 - DNA, 33 bp, Homo sapien
gtttgtcatttataccagcttcattgctcattc

SEQ ID NO: 556192 - DNA, 33 bp, Homo sapien
gtttgtcatttataccggcttcattgctcattc

SEQ ID NO: 556193 - DNA, 33 bp, Homo sapien
aaaagtcaacaaaccacaaagtgaaataaggaa

SEQ ID NO: 556194 - DNA, 33 bp, Homo sapien
aaaagtcaacaaaccataaagtgaaataaggaa

SEQ ID NO: 556195 - DNA, 33 bp, Homo sapien
ctgcctcagggatatacaatttaaactcctgca

SEQ ID NO: 556196 - DNA, 33 bp, Homo sapien
ctgcctcagggatatataatttaaactcctgca

SEQ ID NO: 556197 - DNA, 33 bp, Homo sapien
acttatactgacatgaaagatagccatgatatg

SEQ ID NO: 556198 - DNA, 33 bp, Homo sapien
acttatactgacatgagagatagccatgatatg

SEQ ID NO: 556199 - DNA, 33 bp, Homo sapien
taaattagtctatagacggcaatttggcagtat

SEQ ID NO: 556200 - DNA, 33 bp, Homo sapien
taaattagtctatagagggcaatttggcagtat

SEQ ID NO: 556201 - DNA, 33 bp, Homo sapien
ccaatgccatgtcccactatcctgagtcttcct

SEQ ID NO: 556202 - DNA, 33 bp, Homo sapien
ccaatgccatgtcccattatcctgagtcttcct

SEQ ID NO: 556203 - DNA, 33 bp, Homo sapien
tactgtgctcagtagcaaccaaaggataaaaat

SEQ ID NO: 556204 - DNA, 33 bp, Homo sapien
tactgtgctcagtagcgaccaaaggataaaaat

SEQ ID NO: 556205 - DNA, 33 bp, Homo sapien
agcttgagaatccatacgtcctgactacctgca

SEQ ID NO: 556206 - DNA, 33 bp, Homo sapien
agcttgagaatccatatgtcctgactacctgca

SEQ ID NO: 556207 - DNA, 33 bp, Homo sapien
ctggcattggggcaaaccatctggtaaaaggag

SEQ ID NO: 556208 - DNA, 33 bp, Homo sapien
ctggcattggggcaaatcatctggtaaaaggag

SEQ ID NO: 556209 - DNA, 33 bp, Homo sapien
gggttcctgtacaatgcatagtagagttctaga

SEQ ID NO: 556210 - DNA, 33 bp, Homo sapien
gggttcctgtacaatgtatagtagagttctaga

SEQ ID NO: 556211 - DNA, 33 bp, Homo sapien
agaggatgaccaacacaaaatcaccatcctaaa

SEQ ID NO: 556212 - DNA, 33 bp, Homo sapien
agaggatgaccaacacgaaatcaccatcctaaa

SEQ ID NO: 556213 - DNA, 33 bp, Homo sapien
tgtcatttaaggcccaaccacatgctgtctcct

SEQ ID NO: 556214 - DNA, 33 bp, Homo sapien
tgtcatttaaggcccagccacatgctgtctcct

SEQ ID NO: 556215 - DNA, 33 bp, Homo sapien
aagagatgggatgtcacgtttcattttcaagtt

SEQ ID NO: 556216 - DNA, 33 bp, Homo sapien
aagagatgggatgtcatgtttcattttcaagtt

SEQ ID NO: 556217 - DNA, 33 bp, Homo sapien
tatctggagaccttcacgttggaggagtgatgc

SEQ ID NO: 556218 - DNA, 33 bp, Homo sapien
tatctggagaccttcatgttggaggagtgatgc

SEQ ID NO: 556219 - DNA, 33 bp, Homo sapien
tggtgtctgctgaacaaaaaggcagacatagat

SEQ ID NO: 556220 - DNA, 33 bp, Homo sapien
tggtgtctgctgaacacaaaggcagacatagat

SEQ ID NO: 556221 - DNA, 33 bp, Homo sapien
ttgtgttcagtgaatacggaatatggccacatc

SEQ ID NO: 556222 - DNA, 33 bp, Homo sapien
ttgtgttcagtgaatatggaatatggccacatc

SEQ ID NO: 556223 - DNA, 33 bp, Homo sapien
ctgttctccttccttacattgcatccttcttaa

SEQ ID NO: 556224 - DNA, 33 bp, Homo sapien
ctgttctccttccttagattgcatccttcttaa

SEQ ID NO: 556225 - DNA, 33 bp, Homo sapien
ttatcactgtatactcccttgtaccctttgatt

SEQ ID NO: 556226 - DNA, 33 bp, Homo sapien
ttatcactgtatactctcttgtaccctttgatt

SEQ ID NO: 556227 - DNA, 33 bp, Homo sapien
gatggaggtctcactacatcacttaagctggtc

SEQ ID NO: 556228 - DNA, 33 bp, Homo sapien
gatggaggtctcactatatcacttaagctggtc

SEQ ID NO: 556229 - DNA, 33 bp, Homo sapien
ccagcccaataaaaccacacagttggagacaat

SEQ ID NO: 556230 - DNA, 33 bp, Homo sapien
ccagcccaataaaaccgcacagttggagacaat

SEQ ID NO: 556231 - DNA, 33 bp, Homo sapien
tgcacgggatcttctccagccattttactctga

SEQ ID NO: 556232 - DNA, 33 bp, Homo sapien
tgcacgggatcttctctagccattttactctga

SEQ ID NO: 556233 - DNA, 33 bp, Homo sapien
ctattgtgtacagagacctttgtatgctcaaaa

SEQ ID NO: 556234 - DNA, 33 bp, Homo sapien
ctattgtgtacagagagctttgtatgctcaaaa

SEQ ID NO: 556235 - DNA, 33 bp, Homo sapien
ataaattatgctccagaaagttaaaatggaagg

SEQ ID NO: 556236 - DNA, 33 bp, Homo sapien
ataaattatgctccagcaagttaaaatggaagg

SEQ ID NO: 556237 - DNA, 33 bp, Homo sapien
actgtggtcataagcacgcgctgtggggtcttt

SEQ ID NO: 556238 - DNA, 33 bp, Homo sapien
actgtggtcataagcatgcgctgtggggtcttt

SEQ ID NO: 556239 - DNA, 33 bp, Homo sapien
aggaggtggttgcataaggcagatatctggatc

SEQ ID NO: 556240 - DNA, 33 bp, Homo sapien
aggaggtggttgcatacggcagatatctggatc

SEQ ID NO: 556241 - DNA, 33 bp, Homo sapien
acaggagtgtaaataaacttaagaaagaccaca

SEQ ID NO: 556242 - DNA, 33 bp, Homo sapien
acaggagtgtaaataagcttaagaaagaccaca

SEQ ID NO: 556243 - DNA, 33 bp, Homo sapien
tattgcatggtatctcacagggattctctgtta

SEQ ID NO: 556244 - DNA, 33 bp, Homo sapien
tattgcatggtatctcgcagggattctctgtta

SEQ ID NO: 556245 - DNA, 33 bp, Homo sapien
cacacacacacacgtaaatataggtgctcctca

SEQ ID NO: 556246 - DNA, 33 bp, Homo sapien
cacacacacacacgtacatataggtgctcctca

SEQ ID NO: 556247 - DNA, 33 bp, Homo sapien
actttgttgttaaaaacgactaaattaagcttt

SEQ ID NO: 556248 - DNA, 33 bp, Homo sapien
actttgttgttaaaaatgactaaattaagcttt

SEQ ID NO: 556249 - DNA, 33 bp, Homo sapien
gaaaaaggagggcttaaaaatgtatttcaggca

SEQ ID NO: 556250 - DNA, 33 bp, Homo sapien
gaaaaaggagggcttacaaatgtatttcaggca

SEQ ID NO: 556251 - DNA, 33 bp, Homo sapien
ttccttctctctctcacagatatcagatcttta

SEQ ID NO: 556252 - DNA, 33 bp, Homo sapien
ttccttctctctctcatagatatcagatcttta

SEQ ID NO: 556253 - DNA, 33 bp, Homo sapien
aaactgttgtttagtcacatcacacaacagaat

SEQ ID NO: 556254 - DNA, 33 bp, Homo sapien
aaactgttgtttagtcgcatcacacaacagaat

SEQ ID NO: 556255 - DNA, 33 bp, Homo sapien
ttaccggacatggaacccaagatgaaaagcatc

SEQ ID NO: 556256 - DNA, 33 bp, Homo sapien
ttaccggacatggaactcaagatgaaaagcatc

SEQ ID NO: 556257 - DNA, 33 bp, Homo sapien
tcctctttttttaagagaacacactttattcat

SEQ ID NO: 556258 - DNA, 33 bp, Homo sapien
tcctctttttttaagataacacactttattcat

SEQ ID NO: 556259 - DNA, 33 bp, Homo sapien
gaactttattttctcaggtatagattgatagga

SEQ ID NO: 556260 - DNA, 33 bp, Homo sapien
gaactttattttctcatgtatagattgatagga

SEQ ID NO: 556261 - DNA, 33 bp, Homo sapien
taaaatggaagatcataagcctaaatgcccaag

SEQ ID NO: 556262 - DNA, 33 bp, Homo sapien
taaaatggaagatcatgagcctaaatgcccaag

SEQ ID NO: 556263 - DNA, 33 bp, Homo sapien
gatggtgcatcatgaacattttttaacttgttg

SEQ ID NO: 556264 - DNA, 33 bp, Homo sapien
gatggtgcatcatgaatattttttaacttgttg

SEQ ID NO: 556265 - DNA, 33 bp, Homo sapien
agaaaaatgggtgagacggcagtgaaagtgaag

SEQ ID NO: 556266 - DNA, 33 bp, Homo sapien
agaaaaatgggtgagatggcagtgaaagtgaag

SEQ ID NO: 556267 - DNA, 33 bp, Homo sapien
gtagatgccagatataacacggtaaattggtaa

SEQ ID NO: 556268 - DNA, 33 bp, Homo sapien
gtagatgccagatatagcacggtaaattggtaa

SEQ ID NO: 556269 - DNA, 33 bp, Homo sapien
agaatgggagcccgctcacctcttgtggcagct

SEQ ID NO: 556270 - DNA, 33 bp, Homo sapien
agaatgggagcccgcttacctcttgtggcagct

SEQ ID NO: 556271 - DNA, 33 bp, Homo sapien
attgtgctgaagttcacgggtgggcaaaagcag

SEQ ID NO: 556272 - DNA, 33 bp, Homo sapien
attgtgctgaagttcatgggtgggcaaaagcag

SEQ ID NO: 556273 - DNA, 33 bp, Homo sapien
gggtatggtcagcaaaaaatagttccagatata

SEQ ID NO: 556274 - DNA, 33 bp, Homo sapien
gggtatggtcagcaaagaatagttccagatata

SEQ ID NO: 556275 - DNA, 33 bp, Homo sapien
gtagaatcaaatacacactccatgaaatacatc

SEQ ID NO: 556276 - DNA, 33 bp, Homo sapien
gtagaatcaaatacactctccatgaaatacatc

SEQ ID NO: 556277 - DNA, 33 bp, Homo sapien
ctctagggtttggtaacgatgaacaaggcttat

SEQ ID NO: 556278 - DNA, 33 bp, Homo sapien
ctctagggtttggtaatgatgaacaaggcttat

SEQ ID NO: 556279 - DNA, 33 bp, Homo sapien
tgaagctgcctagaacaggatatggaaaatttg

SEQ ID NO: 556280 - DNA, 33 bp, Homo sapien
tgaagctgcctagaacgggatatggaaaatttg

SEQ ID NO: 556281 - DNA, 33 bp, Homo sapien
acaggacacactgccacggaaaaaaagccacac

SEQ ID NO: 556282 - DNA, 33 bp, Homo sapien
acaggacacactgccatggaaaaaaagccacac

SEQ ID NO: 556283 - DNA, 33 bp, Homo sapien
aaagagcaagggcttcaattatgtacaaaccag

SEQ ID NO: 556284 - DNA, 33 bp, Homo sapien
aaagagcaagggcttcgattatgtacaaaccag

SEQ ID NO: 556285 - DNA, 33 bp, Homo sapien
cttcaacctcatgttaaatcagtacttataagc

SEQ ID NO: 556286 - DNA, 33 bp, Homo sapien
cttcaacctcatgttagatcagtacttataagc

SEQ ID NO: 556287 - DNA, 33 bp, Homo sapien
aatcattaaaaacaacacgatttagcctcctat

SEQ ID NO: 556288 - DNA, 33 bp, Homo sapien
aatcattaaaaacaacgcgatttagcctcctat

SEQ ID NO: 556289 - DNA, 33 bp, Homo sapien
tttctgttgtgtaatccacccagtttatggtac

SEQ ID NO: 556290 - DNA, 33 bp, Homo sapien
tttctgttgtgtaatctacccagtttatggtac

SEQ ID NO: 556291 - DNA, 33 bp, Homo sapien
tcgagtgcataaagaccagcagttgttacatcc

SEQ ID NO: 556292 - DNA, 33 bp, Homo sapien
tcgagtgcataaagactagcagttgttacatcc

SEQ ID NO: 556293 - DNA, 33 bp, Homo sapien
accaggagagtaaacacgtggaccactttgtgt

SEQ ID NO: 556294 - DNA, 33 bp, Homo sapien
accaggagagtaaacatgtggaccactttgtgt

SEQ ID NO: 556295 - DNA, 33 bp, Homo sapien
aaatagcttctgaagacgaaggtagaataaata

SEQ ID NO: 556296 - DNA, 33 bp, Homo sapien
aaatagcttctgaagatgaaggtagaataaata

SEQ ID NO: 556297 - DNA, 33 bp, Homo sapien
atagaagcaggaggaacagacaaatgtcagata

SEQ ID NO: 556298 - DNA, 33 bp, Homo sapien
atagaagcaggaggaagagacaaatgtcagata

SEQ ID NO: 556299 - DNA, 33 bp, Homo sapien
cttctattccctcactcagtagtcaacacagaa

SEQ ID NO: 556300 - DNA, 33 bp, Homo sapien
cttctattccctcacttagtagtcaacacagaa

SEQ ID NO: 556301 - DNA, 33 bp, Homo sapien
gggatctgatgttctccccaggaagatagcatc

SEQ ID NO: 556302 - DNA, 33 bp, Homo sapien
gggatctgatgttctctccaggaagatagcatc

SEQ ID NO: 556303 - DNA, 33 bp, Homo sapien
gccttttgtgtctccactgctggaacggtatgc

SEQ ID NO: 556304 - DNA, 33 bp, Homo sapien
gccttttgtgtctccattgctggaacggtatgc

SEQ ID NO: 556305 - DNA, 33 bp, Homo sapien
gaggaacgagggataaaaaattcacctgttggg

SEQ ID NO: 556306 - DNA, 33 bp, Homo sapien
gaggaacgagggataagaaattcacctgttggg

SEQ ID NO: 556307 - DNA, 33 bp, Homo sapien
acaacactctcatccacgcaactatcaaatgcc

SEQ ID NO: 556308 - DNA, 33 bp, Homo sapien
acaacactctcatccatgcaactatcaaatgcc

SEQ ID NO: 556309 - DNA, 33 bp, Homo sapien
catttgggaaagtaaacggacaggaagccatgc

SEQ ID NO: 556310 - DNA, 33 bp, Homo sapien
catttgggaaagtaaagggacaggaagccatgc

SEQ ID NO: 556311 - DNA, 33 bp, Homo sapien
tcaaaaatatgtccacaaatatattacagattc

SEQ ID NO: 556312 - DNA, 33 bp, Homo sapien
tcaaaaatatgtccacgaatatattacagattc

SEQ ID NO: 556313 - DNA, 33 bp, Homo sapien
tgactgaaactcagtacgcaaagctgtttgttc

SEQ ID NO: 556314 - DNA, 33 bp, Homo sapien
tgactgaaactcagtatgcaaagctgtttgttc

SEQ ID NO: 556315 - DNA, 33 bp, Homo sapien
attttgactaaccacaccttcagttattttaag

SEQ ID NO: 556316 - DNA, 33 bp, Homo sapien
attttgactaaccacatcttcagttattttaag

SEQ ID NO: 556317 - DNA, 33 bp, Homo sapien
agggcaagaggcatccacatcacagaaagaccc

SEQ ID NO: 556318 - DNA, 33 bp, Homo sapien
agggcaagaggcatccgcatcacagaaagaccc

SEQ ID NO: 556319 - DNA, 33 bp, Homo sapien
aatcaaataattagcacgtgaagatagctgtta

SEQ ID NO: 556320 - DNA, 33 bp, Homo sapien
aatcaaataattagcatgtgaagatagctgtta

SEQ ID NO: 556321 - DNA, 33 bp, Homo sapien
caaaggaattgaaaccaatatgtcaaagagata

SEQ ID NO: 556322 - DNA, 33 bp, Homo sapien
caaaggaattgaaacccatatgtcaaagagata

SEQ ID NO: 556323 - DNA, 33 bp, Homo sapien
gcaaaggagtgagccacgtgaagatcttgggat

SEQ ID NO: 556324 - DNA, 33 bp, Homo sapien
gcaaaggagtgagccatgtgaagatcttgggat

SEQ ID NO: 556325 - DNA, 33 bp, Homo sapien
gctgaagggaactgataagactttcataaactt

SEQ ID NO: 556326 - DNA, 33 bp, Homo sapien
gctgaagggaactgatcagactttcataaactt

SEQ ID NO: 556327 - DNA, 33 bp, Homo sapien
agaaggatctcaggaggcaaacaccacttagga

SEQ ID NO: 556328 - DNA, 33 bp, Homo sapien
agaaggatctcaggagtcaaacaccacttagga

SEQ ID NO: 556329 - DNA, 33 bp, Homo sapien
tttattctcgctaaacaaagcagagtgcaagaa

SEQ ID NO: 556330 - DNA, 33 bp, Homo sapien
tttattctcgctaaaccaagcagagtgcaagaa

SEQ ID NO: 556331 - DNA, 33 bp, Homo sapien
ctggatcctctttcaccctttatagtagatatc

SEQ ID NO: 556332 - DNA, 33 bp, Homo sapien
ctggatcctctttcactctttatagtagatatc

SEQ ID NO: 556333 - DNA, 33 bp, Homo sapien
tggctttagagagaggaaataatctagacttgt

SEQ ID NO: 556334 - DNA, 33 bp, Homo sapien
tggctttagagagagggaataatctagacttgt

SEQ ID NO: 556335 - DNA, 33 bp, Homo sapien
cacagatcagttacacaccccatcgacatggat

SEQ ID NO: 556336 - DNA, 33 bp, Homo sapien
cacagatcagttacacgccccatcgacatggat

SEQ ID NO: 556337 - DNA, 33 bp, Homo sapien
gggacatatcagcaataacgatttggaaagcag

SEQ ID NO: 556338 - DNA, 33 bp, Homo sapien
gggacatatcagcaatgacgatttggaaagcag

SEQ ID NO: 556339 - DNA, 33 bp, Homo sapien
gaggcacgaccttagacgagacatgttcttcag

SEQ ID NO: 556340 - DNA, 33 bp, Homo sapien
gaggcacgaccttagatgagacatgttcttcag

SEQ ID NO: 556341 - DNA, 33 bp, Homo sapien
catgttccaaatctgacgtcaactgtgccaata

SEQ ID NO: 556342 - DNA, 33 bp, Homo sapien
catgttccaaatctgatgtcaactgtgccaata

SEQ ID NO: 556343 - DNA, 33 bp, Homo sapien
aaaacttgtgtccccaaatgagatacattaaat

SEQ ID NO: 556344 - DNA, 33 bp, Homo sapien
aaaacttgtgtccccagatgagatacattaaat

SEQ ID NO: 556345 - DNA, 33 bp, Homo sapien
tttccagaggtcagggacaaatgatgggtcagg

SEQ ID NO: 556346 - DNA, 33 bp, Homo sapien
tttccagaggtcagggccaaatgatgggtcagg

SEQ ID NO: 556347 - DNA, 33 bp, Homo sapien
ctcagactgcgctaccagggtacttgactttag

SEQ ID NO: 556348 - DNA, 33 bp, Homo sapien
ctcagactgcgctaccggggtacttgactttag

SEQ ID NO: 556349 - DNA, 33 bp, Homo sapien
cctgactgtgcaccaacaaaatttcatttacaa

SEQ ID NO: 556350 - DNA, 33 bp, Homo sapien
cctgactgtgcaccaataaaatttcatttacaa

SEQ ID NO: 556351 - DNA, 33 bp, Homo sapien
agagctgatttcctcaagaaaaaaataagaggt

SEQ ID NO: 556352 - DNA, 33 bp, Homo sapien
agagctgatttcctcaggaaaaaaataagaggt

SEQ ID NO: 556353 - DNA, 33 bp, Homo sapien
tagccttctggagaaacaataagacttcatcac

SEQ ID NO: 556354 - DNA, 33 bp, Homo sapien
tagccttctggagaaagaataagacttcatcac

SEQ ID NO: 556355 - DNA, 33 bp, Homo sapien
gtgaacaaaataaacactcagaaacagagccaa

SEQ ID NO: 556356 - DNA, 33 bp, Homo sapien
gtgaacaaaataaacattcagaaacagagccaa

SEQ ID NO: 556357 - DNA, 33 bp, Homo sapien
aacaaactcaaacctacgttgccttctggatga

SEQ ID NO: 556358 - DNA, 33 bp, Homo sapien
aacaaactcaaacctatgttgccttctggatga

SEQ ID NO: 556359 - DNA, 33 bp, Homo sapien
agaaatagaaagcaaacggtcttgatcaacaat

SEQ ID NO: 556360 - DNA, 33 bp, Homo sapien
agaaatagaaagcaaatggtcttgatcaacaat

SEQ ID NO: 556361 - DNA, 33 bp, Homo sapien
tccaagaggatgacacagaggaggttttggtgg

SEQ ID NO: 556362 - DNA, 33 bp, Homo sapien
tccaagaggatgacacggaggaggttttggtgg

SEQ ID NO: 556363 - DNA, 33 bp, Homo sapien
agcatattgaagagggaagggactattacacta

SEQ ID NO: 556364 - DNA, 33 bp, Homo sapien
agcatattgaagaggggagggactattacacta

SEQ ID NO: 556365 - DNA, 33 bp, Homo sapien
ttccaaggattgtttacctaagagatggaaagc

SEQ ID NO: 556366 - DNA, 33 bp, Homo sapien
ttccaaggattgtttatctaagagatggaaagc

SEQ ID NO: 556367 - DNA, 33 bp, Homo sapien
gctataggtaagggaaatgatgccactaggacc

SEQ ID NO: 556368 - DNA, 33 bp, Homo sapien
gctataggtaagggaagtgatgccactaggacc

SEQ ID NO: 556369 - DNA, 33 bp, Homo sapien
gcagtaacttcaacaacgcctcctttatcagca

SEQ ID NO: 556370 - DNA, 33 bp, Homo sapien
gcagtaacttcaacaatgcctcctttatcagca

SEQ ID NO: 556371 - DNA, 33 bp, Homo sapien
tctagttcctgggatcacttcccatgtaaacta

SEQ ID NO: 556372 - DNA, 33 bp, Homo sapien
tctagttcctgggatcgcttcccatgtaaacta

SEQ ID NO: 556373 - DNA, 33 bp, Homo sapien
agtagtaagtccattacgagtgaggtccagaaa

SEQ ID NO: 556374 - DNA, 33 bp, Homo sapien
agtagtaagtccattatgagtgaggtccagaaa

SEQ ID NO: 556375 - DNA, 33 bp, Homo sapien
ttgattcttaagaaatcatcatggactcattta

SEQ ID NO: 556376 - DNA, 33 bp, Homo sapien
ttgattcttaagaaattatcatggactcattta

SEQ ID NO: 556377 - DNA, 33 bp, Homo sapien
caacccccctccacaaggtccgctttgactctc

SEQ ID NO: 556378 - DNA, 33 bp, Homo sapien
caacccccctccacaatgtccgctttgactctc

SEQ ID NO: 556379 - DNA, 33 bp, Homo sapien
acaccaagaggaatggaatgccttagtcagcct

SEQ ID NO: 556380 - DNA, 33 bp, Homo sapien
acaccaagaggaatgggatgccttagtcagcct

SEQ ID NO: 556381 - DNA, 33 bp, Homo sapien
ggcttggaacaaacacaaatttgcacagaacat

SEQ ID NO: 556382 - DNA, 33 bp, Homo sapien
ggcttggaacaaacaccaatttgcacagaacat

SEQ ID NO: 556383 - DNA, 33 bp, Homo sapien
gcctgtcatatggcacagaagacaattaagtga

SEQ ID NO: 556384 - DNA, 33 bp, Homo sapien
gcctgtcatatggcacggaagacaattaagtga

SEQ ID NO: 556385 - DNA, 33 bp, Homo sapien
tgaggccaccatcctacaaggaagctcaagtca

SEQ ID NO: 556386 - DNA, 33 bp, Homo sapien
tgaggccaccatcctataaggaagctcaagtca

SEQ ID NO: 556387 - DNA, 33 bp, Homo sapien
tggaaaagatttattccgaaagttcctcctatg

SEQ ID NO: 556388 - DNA, 33 bp, Homo sapien
tggaaaagatttattctgaaagttcctcctatg

SEQ ID NO: 556389 - DNA, 33 bp, Homo sapien
ccaataggaaaaagcaaatgaaggttgcttctc

SEQ ID NO: 556390 - DNA, 33 bp, Homo sapien
ccaataggaaaaagcacatgaaggttgcttctc

SEQ ID NO: 556391 - DNA, 33 bp, Homo sapien
actggggagaaggataaaaggtctctgtactgc

SEQ ID NO: 556392 - DNA, 33 bp, Homo sapien
actggggagaaggatagaaggtctctgtactgc

SEQ ID NO: 556393 - DNA, 33 bp, Homo sapien
atatttagctgaagcacaatgatgaggagaagt

SEQ ID NO: 556394 - DNA, 33 bp, Homo sapien
atatttagctgaagcagaatgatgaggagaagt

SEQ ID NO: 556395 - DNA, 33 bp, Homo sapien
caagcaagggaagcaacggcctaagggagagga

SEQ ID NO: 556396 - DNA, 33 bp, Homo sapien
caagcaagggaagcaatggcctaagggagagga

SEQ ID NO: 556397 - DNA, 33 bp, Homo sapien
tcattttgtttattcactcgttggttgatagac

SEQ ID NO: 556398 - DNA, 33 bp, Homo sapien
tcattttgtttattcattcgttggttgatagac

SEQ ID NO: 556399 - DNA, 33 bp, Homo sapien
atgactaagtctgccaacttaatacttgcccat

SEQ ID NO: 556400 - DNA, 33 bp, Homo sapien
atgactaagtctgccagcttaatacttgcccat

SEQ ID NO: 556401 - DNA, 33 bp, Homo sapien
agaactttctgtgacaatggaaattttctgcat

SEQ ID NO: 556402 - DNA, 33 bp, Homo sapien
agaactttctgtgacagtggaaattttctgcat

SEQ ID NO: 556403 - DNA, 33 bp, Homo sapien
ctacgctataagaatcacttaaaagcactaact

SEQ ID NO: 556404 - DNA, 33 bp, Homo sapien
ctacgctataagaatcgcttaaaagcactaact

SEQ ID NO: 556405 - DNA, 33 bp, Homo sapien
cacacaagagtaaccaatgccaagacagacaca

SEQ ID NO: 556406 - DNA, 33 bp, Homo sapien
cacacaagagtaaccagtgccaagacagacaca

SEQ ID NO: 556407 - DNA, 33 bp, Homo sapien
gtggtggttcaaaaaactttgcaaagaagagag

SEQ ID NO: 556408 - DNA, 33 bp, Homo sapien
gtggtggttcaaaaaattttgcaaagaagagag

SEQ ID NO: 556409 - DNA, 33 bp, Homo sapien
atttaacaaagtcagcagatacactggggaaat

SEQ ID NO: 556410 - DNA, 33 bp, Homo sapien
atttaacaaagtcagcggatacactggggaaat

SEQ ID NO: 556411 - DNA, 33 bp, Homo sapien
aacatttcaaaaagccactaaaagatttgagaa

SEQ ID NO: 556412 - DNA, 33 bp, Homo sapien
aacatttcaaaaagccgctaaaagatttgagaa

SEQ ID NO: 556413 - DNA, 33 bp, Homo sapien
taattccaacactgcaaatatagccagggtagc

SEQ ID NO: 556414 - DNA, 33 bp, Homo sapien
taattccaacactgcagatatagccagggtagc

SEQ ID NO: 556415 - DNA, 33 bp, Homo sapien
gaatagagtagaacatgagaataagggaattaa

SEQ ID NO: 556416 - DNA, 33 bp, Homo sapien
gaatagagtagaacattagaataagggaattaa

SEQ ID NO: 556417 - DNA, 33 bp, Homo sapien
tggcataggccatgacaggttgagagatggtga

SEQ ID NO: 556418 - DNA, 33 bp, Homo sapien
tggcataggccatgacgggttgagagatggtga

SEQ ID NO: 556419 - DNA, 33 bp, Homo sapien
tgtgtaggttcagatcccaactccaccatttat

SEQ ID NO: 556420 - DNA, 33 bp, Homo sapien
tgtgtaggttcagatctcaactccaccatttat

SEQ ID NO: 556421 - DNA, 33 bp, Homo sapien
aacttggcttccgtgaaaacttaaatcagaaga

SEQ ID NO: 556422 - DNA, 33 bp, Homo sapien
aacttggcttccgtgacaacttaaatcagaaga

SEQ ID NO: 556423 - DNA, 33 bp, Homo sapien
gactgtctaaagtatccgaagttcttcattgct

SEQ ID NO: 556424 - DNA, 33 bp, Homo sapien
gactgtctaaagtatctgaagttcttcattgct

SEQ ID NO: 556425 - DNA, 33 bp, Homo sapien
gccaagactaacattacgttgcccatcacttgg

SEQ ID NO: 556426 - DNA, 33 bp, Homo sapien
gccaagactaacattatgttgcccatcacttgg

SEQ ID NO: 556427 - DNA, 33 bp, Homo sapien
tggatgacagaatagggaaatgcataaattctt

SEQ ID NO: 556428 - DNA, 33 bp, Homo sapien
tggatgacagaataggtaaatgcataaattctt

SEQ ID NO: 556429 - DNA, 33 bp, Homo sapien
gagtggaagccaagagaccgggaacaaagttga

SEQ ID NO: 556430 - DNA, 33 bp, Homo sapien
gagtggaagccaagaggccgggaacaaagttga

SEQ ID NO: 556431 - DNA, 33 bp, Homo sapien
tcttttttcctgaagaagcaaactcaatcaatg

SEQ ID NO: 556432 - DNA, 33 bp, Homo sapien
tcttttttcctgaagaggcaaactcaatcaatg

SEQ ID NO: 556433 - DNA, 33 bp, Homo sapien
aaacagagaatatgcaactccttattaataagc

SEQ ID NO: 556434 - DNA, 33 bp, Homo sapien
aaacagagaatatgcacctccttattaataagc

SEQ ID NO: 556435 - DNA, 33 bp, Homo sapien
ttgacattgcaaaactaagtgcatggtgagaaa

SEQ ID NO: 556436 - DNA, 33 bp, Homo sapien
ttgacattgcaaaactgagtgcatggtgagaaa

SEQ ID NO: 556437 - DNA, 33 bp, Homo sapien
accattacaaattttagagactgttctacaagg

SEQ ID NO: 556438 - DNA, 33 bp, Homo sapien
accattacaaattttatagactgttctacaagg

SEQ ID NO: 556439 - DNA, 33 bp, Homo sapien
ctacacttcaacctaactatgctgtaaaaatcc

SEQ ID NO: 556440 - DNA, 33 bp, Homo sapien
ctacacttcaacctaagtatgctgtaaaaatcc

SEQ ID NO: 556441 - DNA, 33 bp, Homo sapien
ttgtgcacatcacataaaattttttgttgagta

SEQ ID NO: 556442 - DNA, 33 bp, Homo sapien
ttgtgcacatcacatataattttttgttgagta

SEQ ID NO: 556443 - DNA, 33 bp, Homo sapien
caagactcacttcagacctgctgattcaaaata

SEQ ID NO: 556444 - DNA, 33 bp, Homo sapien
caagactcacttcagagctgctgattcaaaata

SEQ ID NO: 556445 - DNA, 33 bp, Homo sapien
atggtgaatctcacaccgactctgaaagctttc

SEQ ID NO: 556446 - DNA, 33 bp, Homo sapien
atggtgaatctcacactgactctgaaagctttc

SEQ ID NO: 556447 - DNA, 33 bp, Homo sapien
atattgcattagccagaagtgttgtcaaaaata

SEQ ID NO: 556448 - DNA, 33 bp, Homo sapien
atattgcattagccagcagtgttgtcaaaaata

SEQ ID NO: 556449 - DNA, 33 bp, Homo sapien
ggacatcctttttaaacgctgtggagcagggta

SEQ ID NO: 556450 - DNA, 33 bp, Homo sapien
ggacatcctttttaaatgctgtggagcagggta

SEQ ID NO: 556451 - DNA, 33 bp, Homo sapien
cctgctgtctccgcgaagttgggggttatccga

SEQ ID NO: 556452 - DNA, 33 bp, Homo sapien
cctgctgtctccgcgacgttgggggttatccga

SEQ ID NO: 556453 - DNA, 33 bp, Homo sapien
cgtgctgaccttaagaactgagtaacaaatgtg

SEQ ID NO: 556454 - DNA, 33 bp, Homo sapien
cgtgctgaccttaagagctgagtaacaaatgtg

SEQ ID NO: 556455 - DNA, 33 bp, Homo sapien
taaattaaagttacaactaccgtatggcccagc

SEQ ID NO: 556456 - DNA, 33 bp, Homo sapien
taaattaaagttacaagtaccgtatggcccagc

SEQ ID NO: 556457 - DNA, 33 bp, Homo sapien
tacagactttaccatcaacattttaaaaagtta

SEQ ID NO: 556458 - DNA, 33 bp, Homo sapien
tacagactttaccatcgacattttaaaaagtta

SEQ ID NO: 556459 - DNA, 33 bp, Homo sapien
tttcagtagcaacagaagttagataaacaaagg

SEQ ID NO: 556460 - DNA, 33 bp, Homo sapien
tttcagtagcaacagaggttagataaacaaagg

SEQ ID NO: 556461 - DNA, 33 bp, Homo sapien
tgggctacagaacggacgctgtgttagcagaca

SEQ ID NO: 556462 - DNA, 33 bp, Homo sapien
tgggctacagaacggatgctgtgttagcagaca

SEQ ID NO: 556463 - DNA, 33 bp, Homo sapien
tcactcacaggatagaagttccacattgcaaga

SEQ ID NO: 556464 - DNA, 33 bp, Homo sapien
tcactcacaggatagaggttccacattgcaaga

SEQ ID NO: 556465 - DNA, 33 bp, Homo sapien
aagttgaaaactgctaacataacagactgagca

SEQ ID NO: 556466 - DNA, 33 bp, Homo sapien
aagttgaaaactgctagcataacagactgagca

SEQ ID NO: 556467 - DNA, 33 bp, Homo sapien
cattctgtatttttaagtctcaccttcataacg

SEQ ID NO: 556468 - DNA, 33 bp, Homo sapien
cattctgtatttttaattctcaccttcataacg

SEQ ID NO: 556469 - DNA, 33 bp, Homo sapien
acgaactatgcctccaacgaaggtccaatatct

SEQ ID NO: 556470 - DNA, 33 bp, Homo sapien
acgaactatgcctccagcgaaggtccaatatct

SEQ ID NO: 556471 - DNA, 33 bp, Homo sapien
tgtccttaatgattcaactctagcaaatggcat

SEQ ID NO: 556472 - DNA, 33 bp, Homo sapien
tgtccttaatgattcagctctagcaaatggcat

SEQ ID NO: 556473 - DNA, 33 bp, Homo sapien
catttgcctgaaatgacgcagttatcagtagca

SEQ ID NO: 556474 - DNA, 33 bp, Homo sapien
catttgcctgaaatgatgcagttatcagtagca

SEQ ID NO: 556475 - DNA, 33 bp, Homo sapien
tttagaaacagatgcacgttgaagtatagatgt

SEQ ID NO: 556476 - DNA, 33 bp, Homo sapien
tttagaaacagatgcatgttgaagtatagatgt

SEQ ID NO: 556477 - DNA, 33 bp, Homo sapien
tagacaggcctatgaactgctgtgtggctttgg

SEQ ID NO: 556478 - DNA, 33 bp, Homo sapien
tagacaggcctatgaattgctgtgtggctttgg

SEQ ID NO: 556479 - DNA, 33 bp, Homo sapien
ctagtttgtgttaagacgttgcacaagaaaata

SEQ ID NO: 556480 - DNA, 33 bp, Homo sapien
ctagtttgtgttaagatgttgcacaagaaaata

SEQ ID NO: 556481 - DNA, 33 bp, Homo sapien
caaagtcactttgagcacatgtaataggaggca

SEQ ID NO: 556482 - DNA, 33 bp, Homo sapien
caaagtcactttgagcgcatgtaataggaggca

SEQ ID NO: 556483 - DNA, 33 bp, Homo sapien
tgcttattccaaacaaagttgtagtatgaatta

SEQ ID NO: 556484 - DNA, 33 bp, Homo sapien
tgcttattccaaacaaggttgtagtatgaatta

SEQ ID NO: 556485 - DNA, 33 bp, Homo sapien
gctgaaatacagtggccctgctttttgtttaac

SEQ ID NO: 556486 - DNA, 33 bp, Homo sapien
gctgaaatacagtggctctgctttttgtttaac

SEQ ID NO: 556487 - DNA, 33 bp, Homo sapien
tacctttcatttcttacaacatttcaggccagt

SEQ ID NO: 556488 - DNA, 33 bp, Homo sapien
tacctttcatttcttagaacatttcaggccagt

SEQ ID NO: 556489 - DNA, 33 bp, Homo sapien
caggtatgccatgcaaaaattcctgctgaagct

SEQ ID NO: 556490 - DNA, 33 bp, Homo sapien
caggtatgccatgcaacaattcctgctgaagct

SEQ ID NO: 556491 - DNA, 33 bp, Homo sapien
acacccgtctgggtaacgaaaacgccatctcca

SEQ ID NO: 556492 - DNA, 33 bp, Homo sapien
acacccgtctgggtaatgaaaacgccatctcca

SEQ ID NO: 556493 - DNA, 33 bp, Homo sapien
gtgatactagccatgaaaaagtaggttaacaat

SEQ ID NO: 556494 - DNA, 33 bp, Homo sapien
gtgatactagccatgagaaagtaggttaacaat

SEQ ID NO: 556495 - DNA, 33 bp, Homo sapien
ctggacaagcaacgtcccacaaagcactaagaa

SEQ ID NO: 556496 - DNA, 33 bp, Homo sapien
ctggacaagcaacgtctcacaaagcactaagaa

SEQ ID NO: 556497 - DNA, 33 bp, Homo sapien
tgaaattaggcattgaaaggatgagcatgtggg

SEQ ID NO: 556498 - DNA, 33 bp, Homo sapien
tgaaattaggcattgagaggatgagcatgtggg

SEQ ID NO: 556499 - DNA, 33 bp, Homo sapien
atggtttgctaaaggaaatagatatggcagaca

SEQ ID NO: 556500 - DNA, 33 bp, Homo sapien
atggtttgctaaaggatatagatatggcagaca

SEQ ID NO: 556501 - DNA, 33 bp, Homo sapien
agtttagaggtggcacaaaactgagagatgtag

SEQ ID NO: 556502 - DNA, 33 bp, Homo sapien
agtttagaggtggcacgaaactgagagatgtag

SEQ ID NO: 556503 - DNA, 33 bp, Homo sapien
aactgagattttgatgccaatgttaaactttcc

SEQ ID NO: 556504 - DNA, 33 bp, Homo sapien
aactgagattttgatgtcaatgttaaactttcc

SEQ ID NO: 556505 - DNA, 33 bp, Homo sapien
gtgtatttgtttcacacgactgttaggaaagta

SEQ ID NO: 556506 - DNA, 33 bp, Homo sapien
gtgtatttgtttcacatgactgttaggaaagta

SEQ ID NO: 556507 - DNA, 33 bp, Homo sapien
ttttagacttaaccaccgtgatttcaactaatg

SEQ ID NO: 556508 - DNA, 33 bp, Homo sapien
ttttagacttaaccactgtgatttcaactaatg

SEQ ID NO: 556509 - DNA, 33 bp, Homo sapien
gccccaccatcctttccatttacaattctcctt

SEQ ID NO: 556510 - DNA, 33 bp, Homo sapien
gccccaccatcctttctatttacaattctcctt

SEQ ID NO: 556511 - DNA, 33 bp, Homo sapien
gtattgaaccaagagactaatgagtaaggtagg

SEQ ID NO: 556512 - DNA, 33 bp, Homo sapien
gtattgaaccaagagattaatgagtaaggtagg

SEQ ID NO: 556513 - DNA, 33 bp, Homo sapien
tcaatacaatcaacaaacatttattaagcatct

SEQ ID NO: 556514 - DNA, 33 bp, Homo sapien
tcaatacaatcaacaaccatttattaagcatct

SEQ ID NO: 556515 - DNA, 33 bp, Homo sapien
aatacaagatcatgaacggtacagaatccctgg

SEQ ID NO: 556516 - DNA, 33 bp, Homo sapien
aatacaagatcatgaagggtacagaatccctgg

SEQ ID NO: 556517 - DNA, 33 bp, Homo sapien
tcaggatgtgccacagcatatcagtgaagtgac

SEQ ID NO: 556518 - DNA, 33 bp, Homo sapien
tcaggatgtgccacagtatatcagtgaagtgac

SEQ ID NO: 556519 - DNA, 33 bp, Homo sapien
ttcatggattaaaacacgtctacaggctgacag

SEQ ID NO: 556520 - DNA, 33 bp, Homo sapien
ttcatggattaaaacatgtctacaggctgacag

SEQ ID NO: 556521 - DNA, 33 bp, Homo sapien
ggattctgtacacatacaggttattatcttggg

SEQ ID NO: 556522 - DNA, 33 bp, Homo sapien
ggattctgtacacatagaggttattatcttggg

SEQ ID NO: 556523 - DNA, 33 bp, Homo sapien
aagtgaaaaacgccaaatgtacaagctctttgc

SEQ ID NO: 556524 - DNA, 33 bp, Homo sapien
aagtgaaaaacgccaagtgtacaagctctttgc

SEQ ID NO: 556525 - DNA, 33 bp, Homo sapien
gcatgtttaacttcagaagacacagccaaatag

SEQ ID NO: 556526 - DNA, 33 bp, Homo sapien
gcatgtttaacttcaggagacacagccaaatag

SEQ ID NO: 556527 - DNA, 33 bp, Homo sapien
aggtgcatttgtcaaaataaggtaaataaatta

SEQ ID NO: 556528 - DNA, 33 bp, Homo sapien
aggtgcatttgtcaaattaaggtaaataaatta

SEQ ID NO: 556529 - DNA, 33 bp, Homo sapien
ggaaaatgggaatatactaaagagttttcaaaa

SEQ ID NO: 556530 - DNA, 33 bp, Homo sapien
ggaaaatgggaatatagtaaagagttttcaaaa

SEQ ID NO: 556531 - DNA, 33 bp, Homo sapien
cttgctcaaagccacaaagctagcatatggtag

SEQ ID NO: 556532 - DNA, 33 bp, Homo sapien
cttgctcaaagccacagagctagcatatggtag

SEQ ID NO: 556533 - DNA, 33 bp, Homo sapien
agtgcctggctcatagcaagtggtcataagtgg

SEQ ID NO: 556534 - DNA, 33 bp, Homo sapien
agtgcctggctcatagtaagtggtcataagtgg

SEQ ID NO: 556535 - DNA, 33 bp, Homo sapien
gagagatcacctcaggaaagcttcaaagcatca

SEQ ID NO: 556536 - DNA, 33 bp, Homo sapien
gagagatcacctcagggaagcttcaaagcatca

SEQ ID NO: 556537 - DNA, 33 bp, Homo sapien
cccgccctcacctgtaaatttcgtctctatggt

SEQ ID NO: 556538 - DNA, 33 bp, Homo sapien
cccgccctcacctgtatatttcgtctctatggt

SEQ ID NO: 556539 - DNA, 33 bp, Homo sapien
aaaacacatgatctcaccgtttcctttaaataa

SEQ ID NO: 556540 - DNA, 33 bp, Homo sapien
aaaacacatgatctcatcgtttcctttaaataa

SEQ ID NO: 556541 - DNA, 33 bp, Homo sapien
aagacagtggtcatcaacttttttggcatcagg

SEQ ID NO: 556542 - DNA, 33 bp, Homo sapien
aagacagtggtcatcagcttttttggcatcagg

SEQ ID NO: 556543 - DNA, 33 bp, Homo sapien
tctcccatcacccccacatgagatggtctagct

SEQ ID NO: 556544 - DNA, 33 bp, Homo sapien
tctcccatcacccccagatgagatggtctagct

SEQ ID NO: 556545 - DNA, 33 bp, Homo sapien
cgtaacttctgaggtacggaaattaacatggca

SEQ ID NO: 556546 - DNA, 33 bp, Homo sapien
cgtaacttctgaggtatggaaattaacatggca

SEQ ID NO: 556547 - DNA, 33 bp, Homo sapien
gtaccttattgctcaaaagaagacatagcttca

SEQ ID NO: 556548 - DNA, 33 bp, Homo sapien
gtaccttattgctcaacagaagacatagcttca

SEQ ID NO: 556549 - DNA, 33 bp, Homo sapien
gctgttgaagaccaaactgggcagatgggagtg

SEQ ID NO: 556550 - DNA, 33 bp, Homo sapien
gctgttgaagaccaaattgggcagatgggagtg

SEQ ID NO: 556551 - DNA, 33 bp, Homo sapien
atgggagaagcggcacaaatatgcagacttaag

SEQ ID NO: 556552 - DNA, 33 bp, Homo sapien
atgggagaagcggcacgaatatgcagacttaag

SEQ ID NO: 556553 - DNA, 33 bp, Homo sapien
aaaatgagctctgtaacctcctgggtatgtgac

SEQ ID NO: 556554 - DNA, 33 bp, Homo sapien
aaaatgagctctgtaatctcctgggtatgtgac

SEQ ID NO: 556555 - DNA, 33 bp, Homo sapien
tgctttttgaaggcaaagactattggcttattt

SEQ ID NO: 556556 - DNA, 33 bp, Homo sapien
tgctttttgaaggcaaggactattggcttattt

SEQ ID NO: 556557 - DNA, 33 bp, Homo sapien
ggaagtgagagaaataccatgaaaatcctgggc

SEQ ID NO: 556558 - DNA, 33 bp, Homo sapien
ggaagtgagagaaatagcatgaaaatcctgggc

SEQ ID NO: 556559 - DNA, 33 bp, Homo sapien
ccagatgcacacgtaaacctgaacagagttaac

SEQ ID NO: 556560 - DNA, 33 bp, Homo sapien
ccagatgcacacgtaaccctgaacagagttaac

SEQ ID NO: 556561 - DNA, 33 bp, Homo sapien
gttttcaagcagaatcaagtccaccatacaaca

SEQ ID NO: 556562 - DNA, 33 bp, Homo sapien
gttttcaagcagaatctagtccaccatacaaca

SEQ ID NO: 556563 - DNA, 33 bp, Homo sapien
gccaacagttgtgccactaaaataaaaaaactc

SEQ ID NO: 556564 - DNA, 33 bp, Homo sapien
gccaacagttgtgccattaaaataaaaaaactc

SEQ ID NO: 556565 - DNA, 33 bp, Homo sapien
ttgtatgctcatcattaaaaaaattggattatt

SEQ ID NO: 556566 - DNA, 33 bp, Homo sapien
ttgtatgctcatcattgaaaaaattggattatt

SEQ ID NO: 556567 - DNA, 33 bp, Homo sapien
caaggaaatcttattacgtatgactccccctcg

SEQ ID NO: 556568 - DNA, 33 bp, Homo sapien
caaggaaatcttattatgtatgactccccctcg

SEQ ID NO: 556569 - DNA, 33 bp, Homo sapien
tggaaatgtggacaaccgtgtggatttggagct

SEQ ID NO: 556570 - DNA, 33 bp, Homo sapien
tggaaatgtggacaactgtgtggatttggagct

SEQ ID NO: 556571 - DNA, 33 bp, Homo sapien
gtaagtacagcttggtaaattgtcagaaattga

SEQ ID NO: 556572 - DNA, 33 bp, Homo sapien
gtaagtacagcttggtgaattgtcagaaattga

SEQ ID NO: 556573 - DNA, 33 bp, Homo sapien
tgcaagcaatgtctgacagttccagttgctcca

SEQ ID NO: 556574 - DNA, 33 bp, Homo sapien
tgcaagcaatgtctgagagttccagttgctcca

SEQ ID NO: 556575 - DNA, 33 bp, Homo sapien
atttccaatcatcccccgacctaacaggagcca

SEQ ID NO: 556576 - DNA, 33 bp, Homo sapien
atttccaatcatcccctgacctaacaggagcca

SEQ ID NO: 556577 - DNA, 33 bp, Homo sapien
tattataaattagtctaactccggtaatgtaca

SEQ ID NO: 556578 - DNA, 33 bp, Homo sapien
tattataaattagtctgactccggtaatgtaca

SEQ ID NO: 556579 - DNA, 33 bp, Homo sapien
acgcaagcaaataaaacggtttatgaggaaaga

SEQ ID NO: 556580 - DNA, 33 bp, Homo sapien
acgcaagcaaataaaatggtttatgaggaaaga

SEQ ID NO: 556581 - DNA, 33 bp, Homo sapien
aattcatcacccaataaaaaaagctactctcac

SEQ ID NO: 556582 - DNA, 33 bp, Homo sapien
aattcatcacccaatagaaaaagctactctcac

SEQ ID NO: 556583 - DNA, 33 bp, Homo sapien
ccatttagtggacatcagagttgagttgctcaa

SEQ ID NO: 556584 - DNA, 33 bp, Homo sapien
ccatttagtggacatcggagttgagttgctcaa

SEQ ID NO: 556585 - DNA, 33 bp, Homo sapien
atatctgaatgatggacggagttgaaggagttg

SEQ ID NO: 556586 - DNA, 33 bp, Homo sapien
atatctgaatgatggatggagttgaaggagttg

SEQ ID NO: 556587 - DNA, 33 bp, Homo sapien
atgctgatgaaatacacaacaacttaaaggtga

SEQ ID NO: 556588 - DNA, 33 bp, Homo sapien
atgctgatgaaatacataacaacttaaaggtga

SEQ ID NO: 556589 - DNA, 33 bp, Homo sapien
gaaaaaggagttgaaacgatagcatagaaaata

SEQ ID NO: 556590 - DNA, 33 bp, Homo sapien
gaaaaaggagttgaaatgatagcatagaaaata

SEQ ID NO: 556591 - DNA, 33 bp, Homo sapien
acgcagtctacgttacacacatgtcacgtaaag

SEQ ID NO: 556592 - DNA, 33 bp, Homo sapien
acgcagtctacgttacgcacatgtcacgtaaag

SEQ ID NO: 556593 - DNA, 33 bp, Homo sapien
agggccacatttcggtcaatatgtctatgtatg

SEQ ID NO: 556594 - DNA, 33 bp, Homo sapien
agggccacatttcggttaatatgtctatgtatg

SEQ ID NO: 556595 - DNA, 33 bp, Homo sapien
gagggtgcggagttaccaaaggggaatccctgg

SEQ ID NO: 556596 - DNA, 33 bp, Homo sapien
gagggtgcggagttactaaaggggaatccctgg

SEQ ID NO: 556597 - DNA, 33 bp, Homo sapien
caacaatgatatctgaacttttctccaaaagtg

SEQ ID NO: 556598 - DNA, 33 bp, Homo sapien
caacaatgatatctgaccttttctccaaaagtg

SEQ ID NO: 556599 - DNA, 33 bp, Homo sapien
ggtgagaaccattagaccatacccaactgaggg

SEQ ID NO: 556600 - DNA, 33 bp, Homo sapien
ggtgagaaccattagatcatacccaactgaggg

SEQ ID NO: 556601 - DNA, 33 bp, Homo sapien
tgttttcaatggtgtcaactaaaatgtgttatc

SEQ ID NO: 556602 - DNA, 33 bp, Homo sapien
tgttttcaatggtgtcgactaaaatgtgttatc

SEQ ID NO: 556603 - DNA, 33 bp, Homo sapien
gtctgtaacaatgtagaatgtttgtaaaaatat

SEQ ID NO: 556604 - DNA, 33 bp, Homo sapien
gtctgtaacaatgtaggatgtttgtaaaaatat

SEQ ID NO: 556605 - DNA, 33 bp, Homo sapien
acactgactttaacaccacttaaaagcttgcgt

SEQ ID NO: 556606 - DNA, 33 bp, Homo sapien
acactgactttaacactacttaaaagcttgcgt

SEQ ID NO: 556607 - DNA, 33 bp, Homo sapien
attgctctaactaaccactgtccaacagaaaca

SEQ ID NO: 556608 - DNA, 33 bp, Homo sapien
attgctctaactaacccctgtccaacagaaaca

SEQ ID NO: 556609 - DNA, 33 bp, Homo sapien
agctataggaccccgacaaaggttaatgatgtt

SEQ ID NO: 556610 - DNA, 33 bp, Homo sapien
agctataggaccccgataaaggttaatgatgtt

SEQ ID NO: 556611 - DNA, 33 bp, Homo sapien
ataaaatgcttccacacgtattctgaaatctag

SEQ ID NO: 556612 - DNA, 33 bp, Homo sapien
ataaaatgcttccacatgtattctgaaatctag

SEQ ID NO: 556613 - DNA, 33 bp, Homo sapien
ggaaatgttttgtccacctgcaaataagacagg

SEQ ID NO: 556614 - DNA, 33 bp, Homo sapien
ggaaatgttttgtccatctgcaaataagacagg

SEQ ID NO: 556615 - DNA, 33 bp, Homo sapien
cctgtaaatacgatggaaggcaatcagttgact

SEQ ID NO: 556616 - DNA, 33 bp, Homo sapien
cctgtaaatacgatgggaggcaatcagttgact

SEQ ID NO: 556617 - DNA, 33 bp, Homo sapien
tataagattgcataaaacaatacctatgaaact

SEQ ID NO: 556618 - DNA, 33 bp, Homo sapien
tataagattgcataaaccaatacctatgaaact

SEQ ID NO: 556619 - DNA, 33 bp, Homo sapien
attggatggagggtaaagttttaaagtcagcac

SEQ ID NO: 556620 - DNA, 33 bp, Homo sapien
attggatggagggtaacgttttaaagtcagcac

SEQ ID NO: 556621 - DNA, 33 bp, Homo sapien
tgagttacttgttagacgatgaaaacttagaaa

SEQ ID NO: 556622 - DNA, 33 bp, Homo sapien
tgagttacttgttagatgatgaaaacttagaaa

SEQ ID NO: 556623 - DNA, 33 bp, Homo sapien
agacttttgcttcatgccacttatgaacatatt

SEQ ID NO: 556624 - DNA, 33 bp, Homo sapien
agacttttgcttcatgtcacttatgaacatatt

SEQ ID NO: 556625 - DNA, 33 bp, Homo sapien
ttaaagtggtggaatacggttacaaagtaatgt

SEQ ID NO: 556626 - DNA, 33 bp, Homo sapien
ttaaagtggtggaatatggttacaaagtaatgt

SEQ ID NO: 556627 - DNA, 33 bp, Homo sapien
gtgagccatgcacccgaccgggaaacatttctt

SEQ ID NO: 556628 - DNA, 33 bp, Homo sapien
gtgagccatgcacccggccgggaaacatttctt

SEQ ID NO: 556629 - DNA, 33 bp, Homo sapien
gaagggctggataagcaatgctcagacatccag

SEQ ID NO: 556630 - DNA, 33 bp, Homo sapien
gaagggctggataagcgatgctcagacatccag

SEQ ID NO: 556631 - DNA, 33 bp, Homo sapien
tggaactagtattctaccctggcctagatttgg

SEQ ID NO: 556632 - DNA, 33 bp, Homo sapien
tggaactagtattctatcctggcctagatttgg

SEQ ID NO: 556633 - DNA, 33 bp, Homo sapien
gtggatagtgctgtgaaaaacataggagagcag

SEQ ID NO: 556634 - DNA, 33 bp, Homo sapien
gtggatagtgctgtgataaacataggagagcag

SEQ ID NO: 556635 - DNA, 33 bp, Homo sapien
tctttattatggtatacgaccttgctggcagaa

SEQ ID NO: 556636 - DNA, 33 bp, Homo sapien
tctttattatggtatatgaccttgctggcagaa

SEQ ID NO: 556637 - DNA, 33 bp, Homo sapien
ttctacttcaatacaccgctacattttgagaga

SEQ ID NO: 556638 - DNA, 33 bp, Homo sapien
ttctacttcaatacactgctacattttgagaga

SEQ ID NO: 556639 - DNA, 33 bp, Homo sapien
ggggtggatacagacaaggaaaagaactggggc

SEQ ID NO: 556640 - DNA, 33 bp, Homo sapien
ggggtggatacagacagggaaaagaactggggc

SEQ ID NO: 556641 - DNA, 33 bp, Homo sapien
tcacttttcttttaaaatccttgaggtgaattg

SEQ ID NO: 556642 - DNA, 33 bp, Homo sapien
tcacttttcttttaaattccttgaggtgaattg

SEQ ID NO: 556643 - DNA, 33 bp, Homo sapien
agtattatttcctctacgcaatctttttccatc

SEQ ID NO: 556644 - DNA, 33 bp, Homo sapien
agtattatttcctctatgcaatctttttccatc

SEQ ID NO: 556645 - DNA, 33 bp, Homo sapien
ttctaatggccatgagacaccagcatctaaaag

SEQ ID NO: 556646 - DNA, 33 bp, Homo sapien
ttctaatggccatgagtcaccagcatctaaaag

SEQ ID NO: 556647 - DNA, 33 bp, Homo sapien
atctaaatattggaagaagtaaataaggatcta

SEQ ID NO: 556648 - DNA, 33 bp, Homo sapien
atctaaatattggaaggagtaaataaggatcta

SEQ ID NO: 556649 - DNA, 33 bp, Homo sapien
accatcactcaactgaaaattacactccttatc

SEQ ID NO: 556650 - DNA, 33 bp, Homo sapien
accatcactcaactgacaattacactccttatc

SEQ ID NO: 556651 - DNA, 33 bp, Homo sapien
ctttctttccatcagaagcttaaaacactgttg

SEQ ID NO: 556652 - DNA, 33 bp, Homo sapien
ctttctttccatcagatgcttaaaacactgttg

SEQ ID NO: 556653 - DNA, 33 bp, Homo sapien
cacaagggagtatctacccgtatatgtgggtaa

SEQ ID NO: 556654 - DNA, 33 bp, Homo sapien
cacaagggagtatctatccgtatatgtgggtaa

SEQ ID NO: 556655 - DNA, 33 bp, Homo sapien
atagcaacccaaagcgacatatgttcaagttaa

SEQ ID NO: 556656 - DNA, 33 bp, Homo sapien
atagcaacccaaagcgtcatatgttcaagttaa

SEQ ID NO: 556657 - DNA, 33 bp, Homo sapien
ttattctgggcacattaaatacattgctactta

SEQ ID NO: 556658 - DNA, 33 bp, Homo sapien
ttattctgggcacattgaatacattgctactta

SEQ ID NO: 556659 - DNA, 33 bp, Homo sapien
ggaggaaacattgaccccactgctcaataggaa

SEQ ID NO: 556660 - DNA, 33 bp, Homo sapien
ggaggaaacattgacctcactgctcaataggaa

SEQ ID NO: 556661 - DNA, 33 bp, Homo sapien
ccttgaatctgggtgcacgtgagtgtggcagaa

SEQ ID NO: 556662 - DNA, 33 bp, Homo sapien
ccttgaatctgggtgcgcgtgagtgtggcagaa

SEQ ID NO: 556663 - DNA, 33 bp, Homo sapien
tgtgtggcttagaaaaccattagcctctaggga

SEQ ID NO: 556664 - DNA, 33 bp, Homo sapien
tgtgtggcttagaaaagcattagcctctaggga

SEQ ID NO: 556665 - DNA, 33 bp, Homo sapien
acatacctacaggtcaatagtaattctaaaacc

SEQ ID NO: 556666 - DNA, 33 bp, Homo sapien
acatacctacaggtcagtagtaattctaaaacc

SEQ ID NO: 556667 - DNA, 33 bp, Homo sapien
tattagatccattttgcagatgaaaacctgcag

SEQ ID NO: 556668 - DNA, 33 bp, Homo sapien
tattagatccattttgtagatgaaaacctgcag

SEQ ID NO: 556669 - DNA, 33 bp, Homo sapien
caggctgatgatttgcaactagtaaaaataata

SEQ ID NO: 556670 - DNA, 33 bp, Homo sapien
caggctgatgatttgcgactagtaaaaataata

SEQ ID NO: 556671 - DNA, 33 bp, Homo sapien
gtgtatacaagacagaaaagtcaatggcctaat

SEQ ID NO: 556672 - DNA, 33 bp, Homo sapien
gtgtatacaagacagagaagtcaatggcctaat

SEQ ID NO: 556673 - DNA, 33 bp, Homo sapien
gaccatcaaatacttacggctagatgctccagt

SEQ ID NO: 556674 - DNA, 33 bp, Homo sapien
gaccatcaaatacttatggctagatgctccagt

SEQ ID NO: 556675 - DNA, 33 bp, Homo sapien
gccaacaaattaaagacgatgagaaagtaagtg

SEQ ID NO: 556676 - DNA, 33 bp, Homo sapien
gccaacaaattaaagatgatgagaaagtaagtg

SEQ ID NO: 556677 - DNA, 33 bp, Homo sapien
ccaatggctcatttggaaagtgagagtttttct

SEQ ID NO: 556678 - DNA, 33 bp, Homo sapien
ccaatggctcatttgggaagtgagagtttttct

SEQ ID NO: 556679 - DNA, 33 bp, Homo sapien
atgattttgtctgctagccttttacacttcttc

SEQ ID NO: 556680 - DNA, 33 bp, Homo sapien
atgattttgtctgctatccttttacacttcttc

SEQ ID NO: 556681 - DNA, 33 bp, Homo sapien
tctgtgatagcattaaaaacgtttatgtaaaag

SEQ ID NO: 556682 - DNA, 33 bp, Homo sapien
tctgtgatagcattaacaacgtttatgtaaaag

SEQ ID NO: 556683 - DNA, 33 bp, Homo sapien
agattaatttgtaaaaatgcttgcacatggaga

SEQ ID NO: 556684 - DNA, 33 bp, Homo sapien
agattaatttgtaaaagtgcttgcacatggaga

SEQ ID NO: 556685 - DNA, 33 bp, Homo sapien
gaacgagagttagggcaaagaatatagaagacg

SEQ ID NO: 556686 - DNA, 33 bp, Homo sapien
gaacgagagttagggcgaagaatatagaagacg

SEQ ID NO: 556687 - DNA, 33 bp, Homo sapien
tgttcatttttggatgacagataaacagtgttt

SEQ ID NO: 556688 - DNA, 33 bp, Homo sapien
tgttcatttttggatggcagataaacagtgttt

SEQ ID NO: 556689 - DNA, 33 bp, Homo sapien
aaattcatactgatcccataacttcaatccagc

SEQ ID NO: 556690 - DNA, 33 bp, Homo sapien
aaattcatactgatcctataacttcaatccagc

SEQ ID NO: 556691 - DNA, 33 bp, Homo sapien
gaatcctttaataacacaggaagttcataaccc

SEQ ID NO: 556692 - DNA, 33 bp, Homo sapien
gaatcctttaataacagaggaagttcataaccc

SEQ ID NO: 556693 - DNA, 33 bp, Homo sapien
actcatttttgtgtgacgaatgtatgcaagaag

SEQ ID NO: 556694 - DNA, 33 bp, Homo sapien
actcatttttgtgtgatgaatgtatgcaagaag

SEQ ID NO: 556695 - DNA, 33 bp, Homo sapien
gtcccatgagccatataaaggacatgccctgct

SEQ ID NO: 556696 - DNA, 33 bp, Homo sapien
gtcccatgagccatatgaaggacatgccctgct

SEQ ID NO: 556697 - DNA, 33 bp, Homo sapien
ttgcttattatgaaacacgtaactcagaaatga

SEQ ID NO: 556698 - DNA, 33 bp, Homo sapien
ttgcttattatgaaacgcgtaactcagaaatga

SEQ ID NO: 556699 - DNA, 33 bp, Homo sapien
tctgagttatgaaaacaacggtcttttcacatt

SEQ ID NO: 556700 - DNA, 33 bp, Homo sapien
tctgagttatgaaaacgacggtcttttcacatt

SEQ ID NO: 556701 - DNA, 33 bp, Homo sapien
tctattgttttatgccacctagcttttgctact

SEQ ID NO: 556702 - DNA, 33 bp, Homo sapien
tctattgttttatgccgcctagcttttgctact

SEQ ID NO: 556703 - DNA, 33 bp, Homo sapien
agccccacaatgataccgagaaactggtccagc

SEQ ID NO: 556704 - DNA, 33 bp, Homo sapien
agccccacaatgatactgagaaactggtccagc

SEQ ID NO: 556705 - DNA, 33 bp, Homo sapien
gaaaaggcagactgataaaatttaagacgatat

SEQ ID NO: 556706 - DNA, 33 bp, Homo sapien
gaaaaggcagactgatcaaatttaagacgatat

SEQ ID NO: 556707 - DNA, 33 bp, Homo sapien
catatttcctctctcactctaggagcttaagga

SEQ ID NO: 556708 - DNA, 33 bp, Homo sapien
catatttcctctctcattctaggagcttaagga

SEQ ID NO: 556709 - DNA, 33 bp, Homo sapien
ctttggcggcaagctaactggcccatactcaat

SEQ ID NO: 556710 - DNA, 33 bp, Homo sapien
ctttggcggcaagctacctggcccatactcaat

SEQ ID NO: 556711 - DNA, 33 bp, Homo sapien
cagatattttagacagaaccagattgcccaaca

SEQ ID NO: 556712 - DNA, 33 bp, Homo sapien
cagatattttagacaggaccagattgcccaaca

SEQ ID NO: 556713 - DNA, 33 bp, Homo sapien
cctgagaaaggcagaacagtttttcaaaaccat

SEQ ID NO: 556714 - DNA, 33 bp, Homo sapien
cctgagaaaggcagaatagtttttcaaaaccat

SEQ ID NO: 556715 - DNA, 33 bp, Homo sapien
aaaagagctccataaagtccagtggtcaccttt

SEQ ID NO: 556716 - DNA, 33 bp, Homo sapien
aaaagagctccataaattccagtggtcaccttt

SEQ ID NO: 556717 - DNA, 33 bp, Homo sapien
ccctgagtccaaaagacagagtagaaaaggtga

SEQ ID NO: 556718 - DNA, 33 bp, Homo sapien
ccctgagtccaaaagatagagtagaaaaggtga

SEQ ID NO: 556719 - DNA, 33 bp, Homo sapien
tacagcttgaactataagagcaaaaagggtatg

SEQ ID NO: 556720 - DNA, 33 bp, Homo sapien
tacagcttgaactataggagcaaaaagggtatg

SEQ ID NO: 556721 - DNA, 33 bp, Homo sapien
tgagaactcactaacacaaagatagcaccaaga

SEQ ID NO: 556722 - DNA, 33 bp, Homo sapien
tgagaactcactaacataaagatagcaccaaga

SEQ ID NO: 556723 - DNA, 33 bp, Homo sapien
ctctctaggccaaaacacctgtcatgcagaaag

SEQ ID NO: 556724 - DNA, 33 bp, Homo sapien
ctctctaggccaaaacgcctgtcatgcagaaag

SEQ ID NO: 556725 - DNA, 33 bp, Homo sapien
gacaagagacacactgacaagtgatcagacagg

SEQ ID NO: 556726 - DNA, 33 bp, Homo sapien
gacaagagacacactggcaagtgatcagacagg

SEQ ID NO: 556727 - DNA, 33 bp, Homo sapien
cactgtgcagacttaggatggctaaggctattc

SEQ ID NO: 556728 - DNA, 33 bp, Homo sapien
cactgtgcagacttagtatggctaaggctattc

SEQ ID NO: 556729 - DNA, 33 bp, Homo sapien
tatggaagtcatttaccctgtgtgtgcttcagt

SEQ ID NO: 556730 - DNA, 33 bp, Homo sapien
tatggaagtcatttactctgtgtgtgcttcagt

SEQ ID NO: 556731 - DNA, 33 bp, Homo sapien
tagctgcctcttaaacactatactgaggtctcc

SEQ ID NO: 556732 - DNA, 33 bp, Homo sapien
tagctgcctcttaaacgctatactgaggtctcc

SEQ ID NO: 556733 - DNA, 33 bp, Homo sapien
taatattcactctttgacatgtagggcaaaatt

SEQ ID NO: 556734 - DNA, 33 bp, Homo sapien
taatattcactctttggcatgtagggcaaaatt

SEQ ID NO: 556735 - DNA, 33 bp, Homo sapien
tgattatatcttatcactacttttgtcccaaga

SEQ ID NO: 556736 - DNA, 33 bp, Homo sapien
tgattatatcttatcattacttttgtcccaaga

SEQ ID NO: 556737 - DNA, 33 bp, Homo sapien
actaatgcactccctcaagtaaaggctttgcct

SEQ ID NO: 556738 - DNA, 33 bp, Homo sapien
actaatgcactccctcgagtaaaggctttgcct

SEQ ID NO: 556739 - DNA, 33 bp, Homo sapien
ggctactcatcagtcacggtttaaaattcattt

SEQ ID NO: 556740 - DNA, 33 bp, Homo sapien
ggctactcatcagtcatggtttaaaattcattt

SEQ ID NO: 556741 - DNA, 33 bp, Homo sapien
ttaaccagctctgaaaatctgtgtgccttccca

SEQ ID NO: 556742 - DNA, 33 bp, Homo sapien
ttaaccagctctgaaagtctgtgtgccttccca

SEQ ID NO: 556743 - DNA, 33 bp, Homo sapien
acacacacagccatgaacctctagcactggaaa

SEQ ID NO: 556744 - DNA, 33 bp, Homo sapien
acacacacagccatgatcctctagcactggaaa

SEQ ID NO: 556745 - DNA, 33 bp, Homo sapien
tttgacctgtatcttgaaatggattctcccaat

SEQ ID NO: 556746 - DNA, 33 bp, Homo sapien
tttgacctgtatcttgtaatggattctcccaat

SEQ ID NO: 556747 - DNA, 33 bp, Homo sapien
agaataaaatcttctcaccactttttcaggagt

SEQ ID NO: 556748 - DNA, 33 bp, Homo sapien
agaataaaatcttctcgccactttttcaggagt

SEQ ID NO: 556749 - DNA, 33 bp, Homo sapien
actgaagagtcagctcactttaagttctcaaag

SEQ ID NO: 556750 - DNA, 33 bp, Homo sapien
actgaagagtcagctcgctttaagttctcaaag

SEQ ID NO: 556751 - DNA, 33 bp, Homo sapien
tttggcttcaattcgacggttagttattcagcc

SEQ ID NO: 556752 - DNA, 33 bp, Homo sapien
tttggcttcaattcgatggttagttattcagcc

SEQ ID NO: 556753 - DNA, 33 bp, Homo sapien
ctgttttccaatggacagaaactttttgtaaac

SEQ ID NO: 556754 - DNA, 33 bp, Homo sapien
ctgttttccaatggacggaaactttttgtaaac

SEQ ID NO: 556755 - DNA, 33 bp, Homo sapien
aagactgaaataataacatttgatcaagaccga

SEQ ID NO: 556756 - DNA, 33 bp, Homo sapien
aagactgaaataataagatttgatcaagaccga

SEQ ID NO: 556757 - DNA, 33 bp, Homo sapien
tttgaatacacccatacattttttccacagtcc

SEQ ID NO: 556758 - DNA, 33 bp, Homo sapien
tttgaatacacccatatattttttccacagtcc

SEQ ID NO: 556759 - DNA, 33 bp, Homo sapien
tatatccacatcaaacaaattatgtggattcat

SEQ ID NO: 556760 - DNA, 33 bp, Homo sapien
tatatccacatcaaacgaattatgtggattcat

SEQ ID NO: 556761 - DNA, 33 bp, Homo sapien
ttcatataggctacaaaaaaatgtttaatatat

SEQ ID NO: 556762 - DNA, 33 bp, Homo sapien
ttcatataggctacaagaaaatgtttaatatat

SEQ ID NO: 556763 - DNA, 33 bp, Homo sapien
gagtaattgaagaaacggattgtagaaattatc

SEQ ID NO: 556764 - DNA, 33 bp, Homo sapien
gagtaattgaagaaactgattgtagaaattatc

SEQ ID NO: 556765 - DNA, 33 bp, Homo sapien
ttaataatgtgagcagaaattaaagagaacatt

SEQ ID NO: 556766 - DNA, 33 bp, Homo sapien
ttaataatgtgagcaggaattaaagagaacatt

SEQ ID NO: 556767 - DNA, 33 bp, Homo sapien
tacctttggtgattgaactgtattgaaatagaa

SEQ ID NO: 556768 - DNA, 33 bp, Homo sapien
tacctttggtgattgacctgtattgaaatagaa

SEQ ID NO: 556769 - DNA, 33 bp, Homo sapien
tataaaatacaagagaagtctacatagtaaccc

SEQ ID NO: 556770 - DNA, 33 bp, Homo sapien
tataaaatacaagagatgtctacatagtaaccc

SEQ ID NO: 556771 - DNA, 33 bp, Homo sapien
tatagtaaaggactaactataaaatacaagaga

SEQ ID NO: 556772 - DNA, 33 bp, Homo sapien
tatagtaaaggactaattataaaatacaagaga

SEQ ID NO: 556773 - DNA, 33 bp, Homo sapien
caaccagatgtcttcacgacaaattttagaatc

SEQ ID NO: 556774 - DNA, 33 bp, Homo sapien
caaccagatgtcttcatgacaaattttagaatc

SEQ ID NO: 556775 - DNA, 33 bp, Homo sapien
ctgttattatggtcaccatgttcatcagtccat

SEQ ID NO: 556776 - DNA, 33 bp, Homo sapien
ctgttattatggtcactatgttcatcagtccat

SEQ ID NO: 556777 - DNA, 33 bp, Homo sapien
tatcttcaacatccaaacctaatctcatggtcc

SEQ ID NO: 556778 - DNA, 33 bp, Homo sapien
tatcttcaacatccaagcctaatctcatggtcc

SEQ ID NO: 556779 - DNA, 33 bp, Homo sapien
gtttggtcaactttcaggaacttccatttactc

SEQ ID NO: 556780 - DNA, 33 bp, Homo sapien
gtttggtcaactttcatgaacttccatttactc

SEQ ID NO: 556781 - DNA, 33 bp, Homo sapien
tcttggactttgtaacaccacttgctcagtaag

SEQ ID NO: 556782 - DNA, 33 bp, Homo sapien
tcttggactttgtaacgccacttgctcagtaag

SEQ ID NO: 556783 - DNA, 33 bp, Homo sapien
ctgctgaggcccctaaactctgcaaggaataga

SEQ ID NO: 556784 - DNA, 33 bp, Homo sapien
ctgctgaggcccctaagctctgcaaggaataga

SEQ ID NO: 556785 - DNA, 33 bp, Homo sapien
gagtgaacagcaagtgaaatgtaagacaaccaa

SEQ ID NO: 556786 - DNA, 33 bp, Homo sapien
gagtgaacagcaagtggaatgtaagacaaccaa

SEQ ID NO: 556787 - DNA, 33 bp, Homo sapien
acatttactccctcaaattcatattctatcata

SEQ ID NO: 556788 - DNA, 33 bp, Homo sapien
acatttactccctcaagttcatattctatcata

SEQ ID NO: 556789 - DNA, 33 bp, Homo sapien
tatctacctggtatctaaattccatcctcttat

SEQ ID NO: 556790 - DNA, 33 bp, Homo sapien
tatctacctggtatctgaattccatcctcttat

SEQ ID NO: 556791 - DNA, 33 bp, Homo sapien
ccatgctgtatggaaacggaaggctgtatattc

SEQ ID NO: 556792 - DNA, 33 bp, Homo sapien
ccatgctgtatggaaatggaaggctgtatattc

SEQ ID NO: 556793 - DNA, 33 bp, Homo sapien
tatgaatactgccaaaagtgaccaagtggcagc

SEQ ID NO: 556794 - DNA, 33 bp, Homo sapien
tatgaatactgccaaaggtgaccaagtggcagc

SEQ ID NO: 556795 - DNA, 33 bp, Homo sapien
tggaaacctgggtgcacaaaaaggtgggcagat

SEQ ID NO: 556796 - DNA, 33 bp, Homo sapien
tggaaacctgggtgcagaaaaaggtgggcagat

SEQ ID NO: 556797 - DNA, 33 bp, Homo sapien
ttgggaaatcttttaacatgacccacaattcct

SEQ ID NO: 556798 - DNA, 33 bp, Homo sapien
ttgggaaatcttttaatatgacccacaattcct

SEQ ID NO: 556799 - DNA, 33 bp, Homo sapien
tcaaaatttacaaatacgtctgtcaatctccca

SEQ ID NO: 556800 - DNA, 33 bp, Homo sapien
tcaaaatttacaaatatgtctgtcaatctccca

SEQ ID NO: 556801 - DNA, 33 bp, Homo sapien
tggtgctaaattatcaatctgcctcttaaactc

SEQ ID NO: 556802 - DNA, 33 bp, Homo sapien
tggtgctaaattatcagtctgcctcttaaactc

SEQ ID NO: 556803 - DNA, 33 bp, Homo sapien
ttttctattatttgcccaacctttccacccaat

SEQ ID NO: 556804 - DNA, 33 bp, Homo sapien
ttttctattatttgcctaacctttccacccaat

SEQ ID NO: 556805 - DNA, 33 bp, Homo sapien
atgcttttatccgataatactctaatgactaca

SEQ ID NO: 556806 - DNA, 33 bp, Homo sapien
atgcttttatccgatagtactctaatgactaca

SEQ ID NO: 556807 - DNA, 33 bp, Homo sapien
tgtcttggagtcatcaatgaagcattttcagag

SEQ ID NO: 556808 - DNA, 33 bp, Homo sapien
tgtcttggagtcatcattgaagcattttcagag

SEQ ID NO: 556809 - DNA, 33 bp, Homo sapien
acataaagctactaacaaagctgtggtttcaag

SEQ ID NO: 556810 - DNA, 33 bp, Homo sapien
acataaagctactaaccaagctgtggtttcaag

SEQ ID NO: 556811 - DNA, 33 bp, Homo sapien
acaaattcctcaactccatctgagacaaactca

SEQ ID NO: 556812 - DNA, 33 bp, Homo sapien
acaaattcctcaactctatctgagacaaactca

SEQ ID NO: 556813 - DNA, 33 bp, Homo sapien
tgattcaattacttcacgctcccatgtgtcaca

SEQ ID NO: 556814 - DNA, 33 bp, Homo sapien
tgattcaattacttcatgctcccatgtgtcaca

SEQ ID NO: 556815 - DNA, 33 bp, Homo sapien
gttctctgccatcataatagtctctccctgctc

SEQ ID NO: 556816 - DNA, 33 bp, Homo sapien
gttctctgccatcatagtagtctctccctgctc

SEQ ID NO: 556817 - DNA, 33 bp, Homo sapien
gttggcatcttattgccagaagatattggagag

SEQ ID NO: 556818 - DNA, 33 bp, Homo sapien
gttggcatcttattgctagaagatattggagag

SEQ ID NO: 556819 - DNA, 33 bp, Homo sapien
agaatcattggtgaaaccctctgctacctacat

SEQ ID NO: 556820 - DNA, 33 bp, Homo sapien
agaatcattggtgaaatcctctgctacctacat

SEQ ID NO: 556821 - DNA, 33 bp, Homo sapien
atccaaatctaaagggaagttatccataaaact

SEQ ID NO: 556822 - DNA, 33 bp, Homo sapien
atccaaatctaaaggggagttatccataaaact

SEQ ID NO: 556823 - DNA, 33 bp, Homo sapien
atctcctttgaaaccaaagctttataggtgccc

SEQ ID NO: 556824 - DNA, 33 bp, Homo sapien
atctcctttgaaaccatagctttataggtgccc

SEQ ID NO: 556825 - DNA, 33 bp, Homo sapien
ttgacatagatgattagctcctgatctgaagat

SEQ ID NO: 556826 - DNA, 33 bp, Homo sapien
ttgacatagatgattatctcctgatctgaagat

SEQ ID NO: 556827 - DNA, 33 bp, Homo sapien
atactatatgattttaactggcagcattttcta

SEQ ID NO: 556828 - DNA, 33 bp, Homo sapien
atactatatgattttacctggcagcattttcta

SEQ ID NO: 556829 - DNA, 33 bp, Homo sapien
gaaagaggaaacagtgcaattataaaacatgac

SEQ ID NO: 556830 - DNA, 33 bp, Homo sapien
gaaagaggaaacagtgtaattataaaacatgac

SEQ ID NO: 556831 - DNA, 33 bp, Homo sapien
ccagtagttccttctaacttttgcatttcttca

SEQ ID NO: 556832 - DNA, 33 bp, Homo sapien
ccagtagttccttctatcttttgcatttcttca

SEQ ID NO: 556833 - DNA, 33 bp, Homo sapien
tcaagtcttgccattccatttattggacaagct

SEQ ID NO: 556834 - DNA, 33 bp, Homo sapien
tcaagtcttgccattctatttattggacaagct

SEQ ID NO: 556835 - DNA, 33 bp, Homo sapien
tctgatattatctaaccgaggtgatacattata

SEQ ID NO: 556836 - DNA, 33 bp, Homo sapien
tctgatattatctaactgaggtgatacattata

SEQ ID NO: 556837 - DNA, 33 bp, Homo sapien
ctggttcactggtataagagaagttgatttatt

SEQ ID NO: 556838 - DNA, 33 bp, Homo sapien
ctggttcactggtatacgagaagttgatttatt

SEQ ID NO: 556839 - DNA, 33 bp, Homo sapien
agtagcttagatgagacccagaacttgatcagt

SEQ ID NO: 556840 - DNA, 33 bp, Homo sapien
agtagcttagatgagagccagaacttgatcagt

SEQ ID NO: 556841 - DNA, 33 bp, Homo sapien
acttgatgttccataaacagggattcagtctgt

SEQ ID NO: 556842 - DNA, 33 bp, Homo sapien
acttgatgttccataatcagggattcagtctgt

SEQ ID NO: 556843 - DNA, 33 bp, Homo sapien
ctgaactgtaaaattaaatgtgcacagctgcac

SEQ ID NO: 556844 - DNA, 33 bp, Homo sapien
ctgaactgtaaaattagatgtgcacagctgcac

SEQ ID NO: 556845 - DNA, 33 bp, Homo sapien
actgaattagttacaaagtaggtgaaataaatt

SEQ ID NO: 556846 - DNA, 33 bp, Homo sapien
actgaattagttacaaggtaggtgaaataaatt

SEQ ID NO: 556847 - DNA, 33 bp, Homo sapien
agagccagagtggatcccaagttttataaacac

SEQ ID NO: 556848 - DNA, 33 bp, Homo sapien
agagccagagtggatctcaagttttataaacac

SEQ ID NO: 556849 - DNA, 33 bp, Homo sapien
attgaccttaaacagaatactgtaactttgtct

SEQ ID NO: 556850 - DNA, 33 bp, Homo sapien
attgaccttaaacagagtactgtaactttgtct

SEQ ID NO: 556851 - DNA, 33 bp, Homo sapien
tatcataacataatcaatttagatgcagacatg

SEQ ID NO: 556852 - DNA, 33 bp, Homo sapien
tatcataacataatcagtttagatgcagacatg

SEQ ID NO: 556853 - DNA, 33 bp, Homo sapien
gttctatctttttaccaaggtgaggaatgcaag

SEQ ID NO: 556854 - DNA, 33 bp, Homo sapien
gttctatctttttaccgaggtgaggaatgcaag

SEQ ID NO: 556855 - DNA, 33 bp, Homo sapien
ctgtatgctgtgtggggagaacaactgtataca

SEQ ID NO: 556856 - DNA, 33 bp, Homo sapien
ctgtatgctgtgtgggtagaacaactgtataca

SEQ ID NO: 556857 - DNA, 33 bp, Homo sapien
aattagtgtttattgaagacttactaggtacca

SEQ ID NO: 556858 - DNA, 33 bp, Homo sapien
aattagtgtttattgaggacttactaggtacca

SEQ ID NO: 556859 - DNA, 33 bp, Homo sapien
cattaatcacagttccaaaagatgctctgtatc

SEQ ID NO: 556860 - DNA, 33 bp, Homo sapien
cattaatcacagttccgaaagatgctctgtatc

SEQ ID NO: 556861 - DNA, 33 bp, Homo sapien
tctcaattgctcattaaaactccgggggtattt

SEQ ID NO: 556862 - DNA, 33 bp, Homo sapien
tctcaattgctcattagaactccgggggtattt

SEQ ID NO: 556863 - DNA, 33 bp, Homo sapien
gaattctgccatggaaaatgaaactttgaaaag

SEQ ID NO: 556864 - DNA, 33 bp, Homo sapien
gaattctgccatggaagatgaaactttgaaaag

SEQ ID NO: 556865 - DNA, 33 bp, Homo sapien
gtactgacactaagaagaatggcaaaaatgtag

SEQ ID NO: 556866 - DNA, 33 bp, Homo sapien
gtactgacactaagaataatggcaaaaatgtag

SEQ ID NO: 556867 - DNA, 33 bp, Homo sapien
ttcatgagtatcaagagtatcaaggggaaaatt

SEQ ID NO: 556868 - DNA, 33 bp, Homo sapien
ttcatgagtatcaagattatcaaggggaaaatt

SEQ ID NO: 556869 - DNA, 33 bp, Homo sapien
ctagttgctgggactacgatgaacaaaacctga

SEQ ID NO: 556870 - DNA, 33 bp, Homo sapien
ctagttgctgggactatgatgaacaaaacctga

SEQ ID NO: 556871 - DNA, 33 bp, Homo sapien
gcctactatatgctaaatgtaacactagttgct

SEQ ID NO: 556872 - DNA, 33 bp, Homo sapien
gcctactatatgctaagtgtaacactagttgct

SEQ ID NO: 556873 - DNA, 33 bp, Homo sapien
gtgagttcttggagagaaaattcaacagcgttc

SEQ ID NO: 556874 - DNA, 33 bp, Homo sapien
gtgagttcttggagaggaaattcaacagcgttc

SEQ ID NO: 556875 - DNA, 33 bp, Homo sapien
ttcagggatcatacttgaagcattactgccttt

SEQ ID NO: 556876 - DNA, 33 bp, Homo sapien
ttcagggatcatactttaagcattactgccttt

SEQ ID NO: 556877 - DNA, 33 bp, Homo sapien
acggtatgttaaaaatcatggaaccattataga

SEQ ID NO: 556878 - DNA, 33 bp, Homo sapien
acggtatgttaaaaattatggaaccattataga

SEQ ID NO: 556879 - DNA, 33 bp, Homo sapien
acgaaaaaaagaaagaacccattcacaaaagga

SEQ ID NO: 556880 - DNA, 33 bp, Homo sapien
acgaaaaaaagaaagaccccattcacaaaagga

SEQ ID NO: 556881 - DNA, 33 bp, Homo sapien
ggactacctctgatgacgtttatgttctttatc

SEQ ID NO: 556882 - DNA, 33 bp, Homo sapien
ggactacctctgatgatgtttatgttctttatc

SEQ ID NO: 556883 - DNA, 33 bp, Homo sapien
tgggagtaggttgttacagcggccgtggtgcga

SEQ ID NO: 556884 - DNA, 33 bp, Homo sapien
tgggagtaggttgttatagcggccgtggtgcga

SEQ ID NO: 556885 - DNA, 33 bp, Homo sapien
ctttgctctgttagacacgttcagcaggaaatg

SEQ ID NO: 556886 - DNA, 33 bp, Homo sapien
ctttgctctgttagacccgttcagcaggaaatg

SEQ ID NO: 556887 - DNA, 33 bp, Homo sapien
gctgaataaactgtgcacacttgcattttgact

SEQ ID NO: 556888 - DNA, 33 bp, Homo sapien
gctgaataaactgtgcgcacttgcattttgact

SEQ ID NO: 556889 - DNA, 33 bp, Homo sapien
caagtagaaaactccacacctgaccccatgtga

SEQ ID NO: 556890 - DNA, 33 bp, Homo sapien
caagtagaaaactccatacctgaccccatgtga

SEQ ID NO: 556891 - DNA, 33 bp, Homo sapien
ttaccagcctctaggaaatgattaatcaagaag

SEQ ID NO: 556892 - DNA, 33 bp, Homo sapien
ttaccagcctctaggagatgattaatcaagaag

SEQ ID NO: 556893 - DNA, 33 bp, Homo sapien
cacagcacattccaacacaaatcccggagccca

SEQ ID NO: 556894 - DNA, 33 bp, Homo sapien
cacagcacattccaacgcaaatcccggagccca

SEQ ID NO: 556895 - DNA, 33 bp, Homo sapien
tgcattttccaaattacagaatgtgctacagac

SEQ ID NO: 556896 - DNA, 33 bp, Homo sapien
tgcattttccaaattatagaatgtgctacagac

SEQ ID NO: 556897 - DNA, 33 bp, Homo sapien
gctttagtcttctttgcacaagccagaatagta

SEQ ID NO: 556898 - DNA, 33 bp, Homo sapien
gctttagtcttctttgtacaagccagaatagta

SEQ ID NO: 556899 - DNA, 33 bp, Homo sapien
ttgtctctttatgctacagtcaattgaaaggaa

SEQ ID NO: 556900 - DNA, 33 bp, Homo sapien
ttgtctctttatgctatagtcaattgaaaggaa

SEQ ID NO: 556901 - DNA, 33 bp, Homo sapien
atcaggatcacctggacggcttgtttaaccaca

SEQ ID NO: 556902 - DNA, 33 bp, Homo sapien
atcaggatcacctggatggcttgtttaaccaca

SEQ ID NO: 556903 - DNA, 33 bp, Homo sapien
catccacctggaagaaataaccaaaaggcagcc

SEQ ID NO: 556904 - DNA, 33 bp, Homo sapien
catccacctggaagaagtaaccaaaaggcagcc

SEQ ID NO: 556905 - DNA, 33 bp, Homo sapien
aggtttagataacaaacgtgcacatgtatatac

SEQ ID NO: 556906 - DNA, 33 bp, Homo sapien
aggtttagataacaaaggtgcacatgtatatac

SEQ ID NO: 556907 - DNA, 33 bp, Homo sapien
gagcaattttcttttcccgtagttgttgtaatc

SEQ ID NO: 556908 - DNA, 33 bp, Homo sapien
gagcaattttcttttctcgtagttgttgtaatc

SEQ ID NO: 556909 - DNA, 33 bp, Homo sapien
tgttactataattgtactgaggaatcattgcag

SEQ ID NO: 556910 - DNA, 33 bp, Homo sapien
tgttactataattgtagtgaggaatcattgcag

SEQ ID NO: 556911 - DNA, 33 bp, Homo sapien
gtctgcaaaacattgacgagatttaatgaaatg

SEQ ID NO: 556912 - DNA, 33 bp, Homo sapien
gtctgcaaaacattgatgagatttaatgaaatg

SEQ ID NO: 556913 - DNA, 33 bp, Homo sapien
aatattttaaatggtaacagaggcatgaggtct

SEQ ID NO: 556914 - DNA, 33 bp, Homo sapien
aatattttaaatggtagcagaggcatgaggtct

SEQ ID NO: 556915 - DNA, 33 bp, Homo sapien
ttatgaattactatgaacctgtcttttttcctc

SEQ ID NO: 556916 - DNA, 33 bp, Homo sapien
ttatgaattactatgagcctgtcttttttcctc

SEQ ID NO: 556917 - DNA, 33 bp, Homo sapien
caacaataaatattctcacctttccaccaccaa

SEQ ID NO: 556918 - DNA, 33 bp, Homo sapien
caacaataaatattctgacctttccaccaccaa

SEQ ID NO: 556919 - DNA, 33 bp, Homo sapien
tacaaacagttcagctgaagccagcagtattca

SEQ ID NO: 556920 - DNA, 33 bp, Homo sapien
tacaaacagttcagcttaagccagcagtattca

SEQ ID NO: 556921 - DNA, 33 bp, Homo sapien
acaagtaaccaagaaaatgcttctgagaatgta

SEQ ID NO: 556922 - DNA, 33 bp, Homo sapien
acaagtaaccaagaaactgcttctgagaatgta

SEQ ID NO: 556923 - DNA, 33 bp, Homo sapien
gatactatgagtaaggacaacacaatgttcctg

SEQ ID NO: 556924 - DNA, 33 bp, Homo sapien
gatactatgagtaaggtcaacacaatgttcctg

SEQ ID NO: 556925 - DNA, 33 bp, Homo sapien
cccaggcttggctcaaacaaatacacaaaccaa

SEQ ID NO: 556926 - DNA, 33 bp, Homo sapien
cccaggcttggctcaatcaaatacacaaaccaa

SEQ ID NO: 556927 - DNA, 33 bp, Homo sapien
aaacggcaagatatgtaacaaagaagagagaca

SEQ ID NO: 556928 - DNA, 33 bp, Homo sapien
aaacggcaagatatgttacaaagaagagagaca

SEQ ID NO: 556929 - DNA, 33 bp, Homo sapien
gtcagtagaagactgaaattttatggctataat

SEQ ID NO: 556930 - DNA, 33 bp, Homo sapien
gtcagtagaagactgatattttatggctataat

SEQ ID NO: 556931 - DNA, 33 bp, Homo sapien
aggtttctgtaatatcaaaaatgtgggaatatc

SEQ ID NO: 556932 - DNA, 33 bp, Homo sapien
aggtttctgtaatatcgaaaatgtgggaatatc

SEQ ID NO: 556933 - DNA, 33 bp, Homo sapien
atcacttggcatccaaaatttacttcaccatcc

SEQ ID NO: 556934 - DNA, 33 bp, Homo sapien
atcacttggcatccaacatttacttcaccatcc

SEQ ID NO: 556935 - DNA, 33 bp, Homo sapien
aaatttcattttagtcacaaatcttctctggct

SEQ ID NO: 556936 - DNA, 33 bp, Homo sapien
aaatttcattttagtcgcaaatcttctctggct

SEQ ID NO: 556937 - DNA, 33 bp, Homo sapien
ggactttggcagacctaaaatgtttcggaaagg

SEQ ID NO: 556938 - DNA, 33 bp, Homo sapien
ggactttggcagacctgaaatgtttcggaaagg

SEQ ID NO: 556939 - DNA, 33 bp, Homo sapien
gctctttaatattataactgctaatcacatgca

SEQ ID NO: 556940 - DNA, 33 bp, Homo sapien
gctctttaatattatacctgctaatcacatgca

SEQ ID NO: 556941 - DNA, 33 bp, Homo sapien
ggaattaggttattgccaaatttctattgtgtt

SEQ ID NO: 556942 - DNA, 33 bp, Homo sapien
ggaattaggttattgctaaatttctattgtgtt

SEQ ID NO: 556943 - DNA, 33 bp, Homo sapien
atagataatacgtaaaacctgaacagcatactg

SEQ ID NO: 556944 - DNA, 33 bp, Homo sapien
atagataatacgtaaaccctgaacagcatactg

SEQ ID NO: 556945 - DNA, 33 bp, Homo sapien
gctccaacagatcaaaacgtgcttgaagtgata

SEQ ID NO: 556946 - DNA, 33 bp, Homo sapien
gctccaacagatcaaaccgtgcttgaagtgata

SEQ ID NO: 556947 - DNA, 33 bp, Homo sapien
agagattggaatattaaagtgggtttgtcgctt

SEQ ID NO: 556948 - DNA, 33 bp, Homo sapien
agagattggaatattagagtgggtttgtcgctt

SEQ ID NO: 556949 - DNA, 33 bp, Homo sapien
aaaggtgacctacagtaaacaagttagaaatac

SEQ ID NO: 556950 - DNA, 33 bp, Homo sapien
aaaggtgacctacagtgaacaagttagaaatac

SEQ ID NO: 556951 - DNA, 33 bp, Homo sapien
ccaggcaaagagatgcaaggattaatatttgtt

SEQ ID NO: 556952 - DNA, 33 bp, Homo sapien
ccaggcaaagagatgcgaggattaatatttgtt

SEQ ID NO: 556953 - DNA, 33 bp, Homo sapien
cctgggtctgccagtccaaatacaatgagatcc

SEQ ID NO: 556954 - DNA, 33 bp, Homo sapien
cctgggtctgccagtctaaatacaatgagatcc

SEQ ID NO: 556955 - DNA, 33 bp, Homo sapien
aatgtttgagatcaaaatatcttcctcaacata

SEQ ID NO: 556956 - DNA, 33 bp, Homo sapien
aatgtttgagatcaaagtatcttcctcaacata

SEQ ID NO: 556957 - DNA, 33 bp, Homo sapien
aagtcatatggtaatacctaatagccaaaggta

SEQ ID NO: 556958 - DNA, 33 bp, Homo sapien
aagtcatatggtaatatctaatagccaaaggta

SEQ ID NO: 556959 - DNA, 33 bp, Homo sapien
caaactgtcaccattacaagtaatacccactat

SEQ ID NO: 556960 - DNA, 33 bp, Homo sapien
caaactgtcaccattagaagtaatacccactat

SEQ ID NO: 556961 - DNA, 33 bp, Homo sapien
tagctagatgggacataaagcagtggagagacg

SEQ ID NO: 556962 - DNA, 33 bp, Homo sapien
tagctagatgggacatgaagcagtggagagacg

SEQ ID NO: 556963 - DNA, 33 bp, Homo sapien
ctaatgctaaacaagaagacttcaatactggga

SEQ ID NO: 556964 - DNA, 33 bp, Homo sapien
ctaatgctaaacaagatgacttcaatactggga

SEQ ID NO: 556965 - DNA, 33 bp, Homo sapien
agggtgcacagtttaactgttcttggatgaaag

SEQ ID NO: 556966 - DNA, 33 bp, Homo sapien
agggtgcacagtttaattgttcttggatgaaag

SEQ ID NO: 556967 - DNA, 33 bp, Homo sapien
tcatccctacagcttcaactataaaagacggcc

SEQ ID NO: 556968 - DNA, 33 bp, Homo sapien
tcatccctacagcttcgactataaaagacggcc

SEQ ID NO: 556969 - DNA, 33 bp, Homo sapien
caaagaacatgggcaccgtagcaagaaggctca

SEQ ID NO: 556970 - DNA, 33 bp, Homo sapien
caaagaacatgggcactgtagcaagaaggctca

SEQ ID NO: 556971 - DNA, 33 bp, Homo sapien
tctcttaaatatcaaaatatccacatctacact

SEQ ID NO: 556972 - DNA, 33 bp, Homo sapien
tctcttaaatatcaaactatccacatctacact

SEQ ID NO: 556973 - DNA, 33 bp, Homo sapien
tcctgtataatattcacctaatttcctgcaaag

SEQ ID NO: 556974 - DNA, 33 bp, Homo sapien
tcctgtataatattcatctaatttcctgcaaag

SEQ ID NO: 556975 - DNA, 33 bp, Homo sapien
gagttgagtggcctcaaataggagcaggatata

SEQ ID NO: 556976 - DNA, 33 bp, Homo sapien
gagttgagtggcctcagataggagcaggatata

SEQ ID NO: 556977 - DNA, 33 bp, Homo sapien
ttatccctctggaagaaaattgtttcggaatgt

SEQ ID NO: 556978 - DNA, 33 bp, Homo sapien
ttatccctctggaagagaattgtttcggaatgt

SEQ ID NO: 556979 - DNA, 33 bp, Homo sapien
ccccactagaaaggacaccacaaaattataggg

SEQ ID NO: 556980 - DNA, 33 bp, Homo sapien
ccccactagaaaggacgccacaaaattataggg

SEQ ID NO: 556981 - DNA, 33 bp, Homo sapien
cctagtggctgatagaagatttagccctataat

SEQ ID NO: 556982 - DNA, 33 bp, Homo sapien
cctagtggctgatagatgatttagccctataat

SEQ ID NO: 556983 - DNA, 33 bp, Homo sapien
gccacttgttggttgaacatgcttctgaagtca

SEQ ID NO: 556984 - DNA, 33 bp, Homo sapien
gccacttgttggttgagcatgcttctgaagtca

SEQ ID NO: 556985 - DNA, 33 bp, Homo sapien
gaaagttatcttgaaaaccccaaaggtctcaag

SEQ ID NO: 556986 - DNA, 33 bp, Homo sapien
gaaagttatcttgaaatccccaaaggtctcaag

SEQ ID NO: 556987 - DNA, 33 bp, Homo sapien
aatcatgtgctccaaaacaattcatcctttaaa

SEQ ID NO: 556988 - DNA, 33 bp, Homo sapien
aatcatgtgctccaaagcaattcatcctttaaa

SEQ ID NO: 556989 - DNA, 33 bp, Homo sapien
aattttcctaactgataagactctccttgaagt

SEQ ID NO: 556990 - DNA, 33 bp, Homo sapien
aattttcctaactgatgagactctccttgaagt

SEQ ID NO: 556991 - DNA, 33 bp, Homo sapien
aggaaatggctacaaactatgattctagaacag

SEQ ID NO: 556992 - DNA, 33 bp, Homo sapien
aggaaatggctacaaattatgattctagaacag

SEQ ID NO: 556993 - DNA, 33 bp, Homo sapien
tgttttgcagttaccaatataaatcacagatat

SEQ ID NO: 556994 - DNA, 33 bp, Homo sapien
tgttttgcagttaccagtataaatcacagatat

SEQ ID NO: 556995 - DNA, 33 bp, Homo sapien
gacttgtgcagggtccaaaaaagacactgtagt

SEQ ID NO: 556996 - DNA, 33 bp, Homo sapien
gacttgtgcagggtccgaaaaagacactgtagt

SEQ ID NO: 556997 - DNA, 33 bp, Homo sapien
ttatgcctctacctcaaattcctcaactaggga

SEQ ID NO: 556998 - DNA, 33 bp, Homo sapien
ttatgcctctacctcagattcctcaactaggga

SEQ ID NO: 556999 - DNA, 33 bp, Homo sapien
gatttgtatagttaaaagtatgctaaaggacat

SEQ ID NO: 557000 - DNA, 33 bp, Homo sapien
gatttgtatagttaaaggtatgctaaaggacat

SEQ ID NO: 557001 - DNA, 33 bp, Homo sapien
taatatcaaccatcacacaaatgttctcctcat

SEQ ID NO: 557002 - DNA, 33 bp, Homo sapien
taatatcaaccatcacgcaaatgttctcctcat

SEQ ID NO: 557003 - DNA, 33 bp, Homo sapien
actatttggattatgaagcaaatattggatggg

SEQ ID NO: 557004 - DNA, 33 bp, Homo sapien
actatttggattatgatgcaaatattggatggg

SEQ ID NO: 557005 - DNA, 33 bp, Homo sapien
tagttaagctcagcaggaatcatgaaatctaac

SEQ ID NO: 557006 - DNA, 33 bp, Homo sapien
tagttaagctcagcagtaatcatgaaatctaac

SEQ ID NO: 557007 - DNA, 33 bp, Homo sapien
agaagtaaataaaagacgtgataagccagaatg

SEQ ID NO: 557008 - DNA, 33 bp, Homo sapien
agaagtaaataaaagatgtgataagccagaatg

SEQ ID NO: 557009 - DNA, 33 bp, Homo sapien
ataagccagaatgtaacagtagcttaaaataat

SEQ ID NO: 557010 - DNA, 33 bp, Homo sapien
ataagccagaatgtaatagtagcttaaaataat

SEQ ID NO: 557011 - DNA, 33 bp, Homo sapien
tctgggctttggagaaacaacttagacacttat

SEQ ID NO: 557012 - DNA, 33 bp, Homo sapien
tctgggctttggagaagcaacttagacacttat

SEQ ID NO: 557013 - DNA, 33 bp, Homo sapien
tctgatttagaacacacgactgtctacttatct

SEQ ID NO: 557014 - DNA, 33 bp, Homo sapien
tctgatttagaacacatgactgtctacttatct

SEQ ID NO: 557015 - DNA, 33 bp, Homo sapien
ctcgaaccagtcagaacggattattaaaatgtc

SEQ ID NO: 557016 - DNA, 33 bp, Homo sapien
ctcgaaccagtcagaatggattattaaaatgtc

SEQ ID NO: 557017 - DNA, 33 bp, Homo sapien
tggttcatacctgactcaatttcatttttaatt

SEQ ID NO: 557018 - DNA, 33 bp, Homo sapien
tggttcatacctgactgaatttcatttttaatt

SEQ ID NO: 557019 - DNA, 33 bp, Homo sapien
gaattgaggaagagtacggttgtatgacttggg

SEQ ID NO: 557020 - DNA, 33 bp, Homo sapien
gaattgaggaagagtatggttgtatgacttggg

SEQ ID NO: 557021 - DNA, 33 bp, Homo sapien
tccagtgcaatcgtgaagagacagagaggaaaa

SEQ ID NO: 557022 - DNA, 33 bp, Homo sapien
tccagtgcaatcgtgaggagacagagaggaaaa

SEQ ID NO: 557023 - DNA, 33 bp, Homo sapien
ccactttcataaaatacctacacataggcaaat

SEQ ID NO: 557024 - DNA, 33 bp, Homo sapien
ccactttcataaaatatctacacataggcaaat

SEQ ID NO: 557025 - DNA, 33 bp, Homo sapien
atagtcctgaagggaaaaaccaatgcctggcag

SEQ ID NO: 557026 - DNA, 33 bp, Homo sapien
atagtcctgaagggaagaaccaatgcctggcag

SEQ ID NO: 557027 - DNA, 33 bp, Homo sapien
ggatcagaggttttagcaatctgcttggtgctt

SEQ ID NO: 557028 - DNA, 33 bp, Homo sapien
ggatcagaggttttaggaatctgcttggtgctt

SEQ ID NO: 557029 - DNA, 33 bp, Homo sapien
agggtcagcaagtgggaattggaaacttaataa

SEQ ID NO: 557030 - DNA, 33 bp, Homo sapien
agggtcagcaagtggggattggaaacttaataa

SEQ ID NO: 557031 - DNA, 33 bp, Homo sapien
aataggtgtacacttcaatgtacaaaaacactt

SEQ ID NO: 557032 - DNA, 33 bp, Homo sapien
aataggtgtacacttcgatgtacaaaaacactt

SEQ ID NO: 557033 - DNA, 33 bp, Homo sapien
cccctttccctctgaaactcagggtcaggcaat

SEQ ID NO: 557034 - DNA, 33 bp, Homo sapien
cccctttccctctgaatctcagggtcaggcaat

SEQ ID NO: 557035 - DNA, 33 bp, Homo sapien
agtgctgggcagaaaacctagccataggtactg

SEQ ID NO: 557036 - DNA, 33 bp, Homo sapien
agtgctgggcagaaaatctagccataggtactg

SEQ ID NO: 557037 - DNA, 33 bp, Homo sapien
acatagattaagtttgcaatgcatccactgtct

SEQ ID NO: 557038 - DNA, 33 bp, Homo sapien
acatagattaagtttgtaatgcatccactgtct

SEQ ID NO: 557039 - DNA, 33 bp, Homo sapien
atgcatccactgtctccaaaggaaaaatcaaat

SEQ ID NO: 557040 - DNA, 33 bp, Homo sapien
atgcatccactgtctctaaaggaaaaatcaaat

SEQ ID NO: 557041 - DNA, 33 bp, Homo sapien
actccaagtgatggaaaacacaaacaccctgac

SEQ ID NO: 557042 - DNA, 33 bp, Homo sapien
actccaagtgatggaagacacaaacaccctgac

SEQ ID NO: 557043 - DNA, 33 bp, Homo sapien
cttcatttgcagtgaagtgggtgtattgattag

SEQ ID NO: 557044 - DNA, 33 bp, Homo sapien
cttcatttgcagtgaattgggtgtattgattag

SEQ ID NO: 557045 - DNA, 33 bp, Homo sapien
gggagattagaatgtcacagtgagtttgtcatt

SEQ ID NO: 557046 - DNA, 33 bp, Homo sapien
gggagattagaatgtcgcagtgagtttgtcatt

SEQ ID NO: 557047 - DNA, 33 bp, Homo sapien
gaggatgaagaaaaggaaaacaaatcagagaga

SEQ ID NO: 557048 - DNA, 33 bp, Homo sapien
gaggatgaagaaaagggaaacaaatcagagaga

SEQ ID NO: 557049 - DNA, 33 bp, Homo sapien
ggagaacacacttaacacttgaattagtaaatc

SEQ ID NO: 557050 - DNA, 33 bp, Homo sapien
ggagaacacacttaactcttgaattagtaaatc

SEQ ID NO: 557051 - DNA, 33 bp, Homo sapien
agactttgtttcttacagagtatcattccatgg

SEQ ID NO: 557052 - DNA, 33 bp, Homo sapien
agactttgtttcttacggagtatcattccatgg

SEQ ID NO: 557053 - DNA, 33 bp, Homo sapien
tccctagtgatcaataaggttgaatatttttca

SEQ ID NO: 557054 - DNA, 33 bp, Homo sapien
tccctagtgatcaatagggttgaatatttttca

SEQ ID NO: 557055 - DNA, 33 bp, Homo sapien
aacagagttctcaacacggcaaaatttttttat

SEQ ID NO: 557056 - DNA, 33 bp, Homo sapien
aacagagttctcaacatggcaaaatttttttat

SEQ ID NO: 557057 - DNA, 33 bp, Homo sapien
ctgttctgtctgttgaaaacattcagattcatt

SEQ ID NO: 557058 - DNA, 33 bp, Homo sapien
ctgttctgtctgttgataacattcagattcatt

SEQ ID NO: 557059 - DNA, 33 bp, Homo sapien
cagtatttctttgggaagcatatagttatttac

SEQ ID NO: 557060 - DNA, 33 bp, Homo sapien
cagtatttctttgggaggcatatagttatttac

SEQ ID NO: 557061 - DNA, 33 bp, Homo sapien
tagatgggtaaataaaactttgggaagattcac

SEQ ID NO: 557062 - DNA, 33 bp, Homo sapien
tagatgggtaaataaacctttgggaagattcac

SEQ ID NO: 557063 - DNA, 33 bp, Homo sapien
tttctttatggccctcagagaactctccattca

SEQ ID NO: 557064 - DNA, 33 bp, Homo sapien
tttctttatggccctccgagaactctccattca

SEQ ID NO: 557065 - DNA, 33 bp, Homo sapien
taaaaattctgttcaccactggagccaaaacca

SEQ ID NO: 557066 - DNA, 33 bp, Homo sapien
taaaaattctgttcactactggagccaaaacca

SEQ ID NO: 557067 - DNA, 33 bp, Homo sapien
aaatgacacaaagaaacaatttattgcgaggga

SEQ ID NO: 557068 - DNA, 33 bp, Homo sapien
aaatgacacaaagaaagaatttattgcgaggga

SEQ ID NO: 557069 - DNA, 33 bp, Homo sapien
agtgttttgtgtagaaatctcgtgtactctgtg

SEQ ID NO: 557070 - DNA, 33 bp, Homo sapien
agtgttttgtgtagaactctcgtgtactctgtg

SEQ ID NO: 557071 - DNA, 33 bp, Homo sapien
ccacactgtttttcatcagtatggtgacctccc

SEQ ID NO: 557072 - DNA, 33 bp, Homo sapien
ccacactgtttttcattagtatggtgacctccc

SEQ ID NO: 557073 - DNA, 33 bp, Homo sapien
gagcttcctttcagatcaggttgaagctcagtt

SEQ ID NO: 557074 - DNA, 33 bp, Homo sapien
gagcttcctttcagattaggttgaagctcagtt

SEQ ID NO: 557075 - DNA, 33 bp, Homo sapien
tttattcttgtctcaacagtggcatggatggtc

SEQ ID NO: 557076 - DNA, 33 bp, Homo sapien
tttattcttgtctcaatagtggcatggatggtc

SEQ ID NO: 557077 - DNA, 33 bp, Homo sapien
aagccccccttccctgacagcttggaagtgcct

SEQ ID NO: 557078 - DNA, 33 bp, Homo sapien
aagccccccttccctgccagcttggaagtgcct

SEQ ID NO: 557079 - DNA, 33 bp, Homo sapien
agagctttcttgtggaatagaatactttctcca

SEQ ID NO: 557080 - DNA, 33 bp, Homo sapien
agagctttcttgtggagtagaatactttctcca

SEQ ID NO: 557081 - DNA, 33 bp, Homo sapien
ttaattgtgtcctgaaaacttaaaattgataaa

SEQ ID NO: 557082 - DNA, 33 bp, Homo sapien
ttaattgtgtcctgaatacttaaaattgataaa

SEQ ID NO: 557083 - DNA, 33 bp, Homo sapien
tggactcagagaaaagaaaaggtcatgtctctt

SEQ ID NO: 557084 - DNA, 33 bp, Homo sapien
tggactcagagaaaaggaaaggtcatgtctctt

SEQ ID NO: 557085 - DNA, 33 bp, Homo sapien
gtgattatttacactgaaaattatggtctgtta

SEQ ID NO: 557086 - DNA, 33 bp, Homo sapien
gtgattatttacactgcaaattatggtctgtta

SEQ ID NO: 557087 - DNA, 33 bp, Homo sapien
gatcccagaacttgcaatgatccaaccccagga

SEQ ID NO: 557088 - DNA, 33 bp, Homo sapien
gatcccagaacttgcactgatccaaccccagga

SEQ ID NO: 557089 - DNA, 33 bp, Homo sapien
tagagattgaagattacgcgaagttcagaacac

SEQ ID NO: 557090 - DNA, 33 bp, Homo sapien
tagagattgaagattatgcgaagttcagaacac

SEQ ID NO: 557091 - DNA, 33 bp, Homo sapien
actcaccaataggtaaatgattgttatgagtca

SEQ ID NO: 557092 - DNA, 33 bp, Homo sapien
actcaccaataggtaagtgattgttatgagtca

SEQ ID NO: 557093 - DNA, 33 bp, Homo sapien
tgacagttctggacagaataatatggttctcaa

SEQ ID NO: 557094 - DNA, 33 bp, Homo sapien
tgacagttctggacaggataatatggttctcaa

SEQ ID NO: 557095 - DNA, 33 bp, Homo sapien
aattgcaggtggattacgtggtgaactagcaga

SEQ ID NO: 557096 - DNA, 33 bp, Homo sapien
aattgcaggtggattatgtggtgaactagcaga

SEQ ID NO: 557097 - DNA, 33 bp, Homo sapien
cctggagaacagtaggcagatgcttggaagacc

SEQ ID NO: 557098 - DNA, 33 bp, Homo sapien
cctggagaacagtaggtagatgcttggaagacc

SEQ ID NO: 557099 - DNA, 33 bp, Homo sapien
ggaacagagtgtgcaacaccagagcagcgagca

SEQ ID NO: 557100 - DNA, 33 bp, Homo sapien
ggaacagagtgtgcaataccagagcagcgagca

SEQ ID NO: 557101 - DNA, 33 bp, Homo sapien
cacaacctggcacacaatcttcccaatcaactg

SEQ ID NO: 557102 - DNA, 33 bp, Homo sapien
cacaacctggcacacagtcttcccaatcaactg

SEQ ID NO: 557103 - DNA, 33 bp, Homo sapien
tatcacaacagacctacggcaattttagagcca

SEQ ID NO: 557104 - DNA, 33 bp, Homo sapien
tatcacaacagacctatggcaattttagagcca

SEQ ID NO: 557105 - DNA, 33 bp, Homo sapien
ttcttcattcaataaacagtcatcactctgcca

SEQ ID NO: 557106 - DNA, 33 bp, Homo sapien
ttcttcattcaataaatagtcatcactctgcca

SEQ ID NO: 557107 - DNA, 33 bp, Homo sapien
tgatcccaggaaacacaagagagatgtgataga

SEQ ID NO: 557108 - DNA, 33 bp, Homo sapien
tgatcccaggaaacaccagagagatgtgataga

SEQ ID NO: 557109 - DNA, 33 bp, Homo sapien
gtgacttgcttggtcacccattcttgatcttcc

SEQ ID NO: 557110 - DNA, 33 bp, Homo sapien
gtgacttgcttggtcatccattcttgatcttcc

SEQ ID NO: 557111 - DNA, 33 bp, Homo sapien
aatagattttaagtgacgagtaagcatattaat

SEQ ID NO: 557112 - DNA, 33 bp, Homo sapien
aatagattttaagtgatgagtaagcatattaat

SEQ ID NO: 557113 - DNA, 33 bp, Homo sapien
atgtgtcacgaatgtacatattacagatagaaa

SEQ ID NO: 557114 - DNA, 33 bp, Homo sapien
atgtgtcacgaatgtagatattacagatagaaa

SEQ ID NO: 557115 - DNA, 33 bp, Homo sapien
tgacctgcacagctaacagtcaagtgttcttgt

SEQ ID NO: 557116 - DNA, 33 bp, Homo sapien
tgacctgcacagctaatagtcaagtgttcttgt

SEQ ID NO: 557117 - DNA, 33 bp, Homo sapien
cttgtaaaatcaatcactgaggctattttgact

SEQ ID NO: 557118 - DNA, 33 bp, Homo sapien
cttgtaaaatcaatcattgaggctattttgact

SEQ ID NO: 557119 - DNA, 33 bp, Homo sapien
gaaatacagtggaaaaactcttgaagttcagtg

SEQ ID NO: 557120 - DNA, 33 bp, Homo sapien
gaaatacagtggaaaagctcttgaagttcagtg

SEQ ID NO: 557121 - DNA, 33 bp, Homo sapien
gatatgttcacgcaacagaaaactatacagcag

SEQ ID NO: 557122 - DNA, 33 bp, Homo sapien
gatatgttcacgcaacggaaaactatacagcag

SEQ ID NO: 557123 - DNA, 33 bp, Homo sapien
attattacagtaacgcacatttaccgagcactt

SEQ ID NO: 557124 - DNA, 33 bp, Homo sapien
attattacagtaacgcgcatttaccgagcactt

SEQ ID NO: 557125 - DNA, 33 bp, Homo sapien
tgaggtttgttagtcaaagtgccacaaattctt

SEQ ID NO: 557126 - DNA, 33 bp, Homo sapien
tgaggtttgttagtcagagtgccacaaattctt

SEQ ID NO: 557127 - DNA, 33 bp, Homo sapien
cagtgttctggacttcactgattgtttctctaa

SEQ ID NO: 557128 - DNA, 33 bp, Homo sapien
cagtgttctggacttcgctgattgtttctctaa

SEQ ID NO: 557129 - DNA, 33 bp, Homo sapien
agtactaattctttccaaaccttgtcagcatag

SEQ ID NO: 557130 - DNA, 33 bp, Homo sapien
agtactaattctttcccaaccttgtcagcatag

SEQ ID NO: 557131 - DNA, 33 bp, Homo sapien
gcttctcttatcctcaaattcctcatttaaacc

SEQ ID NO: 557132 - DNA, 33 bp, Homo sapien
gcttctcttatcctcacattcctcatttaaacc

SEQ ID NO: 557133 - DNA, 33 bp, Homo sapien
aaccttggccacacaccagaatcatctcaggat

SEQ ID NO: 557134 - DNA, 33 bp, Homo sapien
aaccttggccacacactagaatcatctcaggat

SEQ ID NO: 557135 - DNA, 33 bp, Homo sapien
tgcatgggagctagaaatctggtttccatcatc

SEQ ID NO: 557136 - DNA, 33 bp, Homo sapien
tgcatgggagctagaagtctggtttccatcatc

SEQ ID NO: 557137 - DNA, 33 bp, Homo sapien
acttcaaatattgcaaataagccaccagaaaat

SEQ ID NO: 557138 - DNA, 33 bp, Homo sapien
acttcaaatattgcaagtaagccaccagaaaat

SEQ ID NO: 557139 - DNA, 33 bp, Homo sapien
agagctcaagttacacaaccaggcccaaagtca

SEQ ID NO: 557140 - DNA, 33 bp, Homo sapien
agagctcaagttacacgaccaggcccaaagtca

SEQ ID NO: 557141 - DNA, 33 bp, Homo sapien
taagcctgtgggttcaaagaaatcaataattga

SEQ ID NO: 557142 - DNA, 33 bp, Homo sapien
taagcctgtgggttcacagaaatcaataattga

SEQ ID NO: 557143 - DNA, 33 bp, Homo sapien
ctgcaacatgcctttgaatcttaaagactatga

SEQ ID NO: 557144 - DNA, 33 bp, Homo sapien
ctgcaacatgcctttgtatcttaaagactatga

SEQ ID NO: 557145 - DNA, 33 bp, Homo sapien
gttgttaaaaatgcaaatgttcactcagattac

SEQ ID NO: 557146 - DNA, 33 bp, Homo sapien
gttgttaaaaatgcaagtgttcactcagattac

SEQ ID NO: 557147 - DNA, 33 bp, Homo sapien
attcagtccattgcagccatttttcctttttgc

SEQ ID NO: 557148 - DNA, 33 bp, Homo sapien
attcagtccattgcaggcatttttcctttttgc

SEQ ID NO: 557149 - DNA, 33 bp, Homo sapien
ggtaaattgcaatgaccgaatgatgaatgatga

SEQ ID NO: 557150 - DNA, 33 bp, Homo sapien
ggtaaattgcaatgactgaatgatgaatgatga

SEQ ID NO: 557151 - DNA, 33 bp, Homo sapien
aaggagttgtaatcataaatggtgtggtcagga

SEQ ID NO: 557152 - DNA, 33 bp, Homo sapien
aaggagttgtaatcattaatggtgtggtcagga

SEQ ID NO: 557153 - DNA, 33 bp, Homo sapien
agagaccagtcaaacactccaaatttatcaagc

SEQ ID NO: 557154 - DNA, 33 bp, Homo sapien
agagaccagtcaaacattccaaatttatcaagc

SEQ ID NO: 557155 - DNA, 33 bp, Homo sapien
ttctctgatttttcaagaaaacatttgacgcaa

SEQ ID NO: 557156 - DNA, 33 bp, Homo sapien
ttctctgatttttcaataaaacatttgacgcaa

SEQ ID NO: 557157 - DNA, 33 bp, Homo sapien
ggccaatgtctgcaaaatctggctaaatagatt

SEQ ID NO: 557158 - DNA, 33 bp, Homo sapien
ggccaatgtctgcaaagtctggctaaatagatt

SEQ ID NO: 557159 - DNA, 33 bp, Homo sapien
cctgcttgagaggtacaagtaaagcggcagcca

SEQ ID NO: 557160 - DNA, 33 bp, Homo sapien
cctgcttgagaggtacgagtaaagcggcagcca

SEQ ID NO: 557161 - DNA, 33 bp, Homo sapien
ggagacctaacttttcacagaatctcaattcca

SEQ ID NO: 557162 - DNA, 33 bp, Homo sapien
ggagacctaacttttcgcagaatctcaattcca

SEQ ID NO: 557163 - DNA, 33 bp, Homo sapien
ttaacttgtctccatgaagtgagtacattatgc

SEQ ID NO: 557164 - DNA, 33 bp, Homo sapien
ttaacttgtctccatgcagtgagtacattatgc

SEQ ID NO: 557165 - DNA, 33 bp, Homo sapien
agactaattcacaataagagttccattttcttt

SEQ ID NO: 557166 - DNA, 33 bp, Homo sapien
agactaattcacaataggagttccattttcttt

SEQ ID NO: 557167 - DNA, 33 bp, Homo sapien
attcagatagacctcaagaggttggtggtgtga

SEQ ID NO: 557168 - DNA, 33 bp, Homo sapien
attcagatagacctcaggaggttggtggtgtga

SEQ ID NO: 557169 - DNA, 33 bp, Homo sapien
atgggcaaagtaataaactacaatctgaaggaa

SEQ ID NO: 557170 - DNA, 33 bp, Homo sapien
atgggcaaagtaataagctacaatctgaaggaa

SEQ ID NO: 557171 - DNA, 33 bp, Homo sapien
agtgaaaatgctatacaacctgcatgcttttta

SEQ ID NO: 557172 - DNA, 33 bp, Homo sapien
agtgaaaatgctatacgacctgcatgcttttta

SEQ ID NO: 557173 - DNA, 33 bp, Homo sapien
agtgtgttcagagtcccggactaatgaatccag

SEQ ID NO: 557174 - DNA, 33 bp, Homo sapien
agtgtgttcagagtcctggactaatgaatccag

SEQ ID NO: 557175 - DNA, 33 bp, Homo sapien
acgtcacttaggaataacgttgtagttctctcc

SEQ ID NO: 557176 - DNA, 33 bp, Homo sapien
acgtcacttaggaataccgttgtagttctctcc

SEQ ID NO: 557177 - DNA, 33 bp, Homo sapien
gatggaaaaaggaagtcacaaatgaaaggaggg

SEQ ID NO: 557178 - DNA, 33 bp, Homo sapien
gatggaaaaaggaagtgacaaatgaaaggaggg

SEQ ID NO: 557179 - DNA, 33 bp, Homo sapien
gtaactaggtcagctaactcaagggaagcattt

SEQ ID NO: 557180 - DNA, 33 bp, Homo sapien
gtaactaggtcagctagctcaagggaagcattt

SEQ ID NO: 557181 - DNA, 33 bp, Homo sapien
gaactctagacaaagacggtctaggtcccaaag

SEQ ID NO: 557182 - DNA, 33 bp, Homo sapien
gaactctagacaaagatggtctaggtcccaaag

SEQ ID NO: 557183 - DNA, 33 bp, Homo sapien
ctcccatgtgcgaaagcctgggctagccaggtg

SEQ ID NO: 557184 - DNA, 33 bp, Homo sapien
ctcccatgtgcgaaagtctgggctagccaggtg

SEQ ID NO: 557185 - DNA, 33 bp, Homo sapien
gtttaaagagaatgtgcagcatgcaagcctcca

SEQ ID NO: 557186 - DNA, 33 bp, Homo sapien
gtttaaagagaatgtggagcatgcaagcctcca

SEQ ID NO: 557187 - DNA, 33 bp, Homo sapien
tacataggatctttcacgaccactttcagcaaa

SEQ ID NO: 557188 - DNA, 33 bp, Homo sapien
tacataggatctttcatgaccactttcagcaaa

SEQ ID NO: 557189 - DNA, 33 bp, Homo sapien
ttcttctaccaaaaagacacctacacttgtatg

SEQ ID NO: 557190 - DNA, 33 bp, Homo sapien
ttcttctaccaaaaaggcacctacacttgtatg

SEQ ID NO: 557191 - DNA, 33 bp, Homo sapien
ataaataattgaaataccacaaagtcatagaat

SEQ ID NO: 557192 - DNA, 33 bp, Homo sapien
ataaataattgaaatatcacaaagtcatagaat

SEQ ID NO: 557193 - DNA, 33 bp, Homo sapien
taagagctgccatccaagtctttggactcctga

SEQ ID NO: 557194 - DNA, 33 bp, Homo sapien
taagagctgccatccaggtctttggactcctga

SEQ ID NO: 557195 - DNA, 33 bp, Homo sapien
gtttaagttgaccaacactgctatgtgattatc

SEQ ID NO: 557196 - DNA, 33 bp, Homo sapien
gtttaagttgaccaaccctgctatgtgattatc

SEQ ID NO: 557197 - DNA, 33 bp, Homo sapien
gaggtataggataaccaataaggtatgcagaaa

SEQ ID NO: 557198 - DNA, 33 bp, Homo sapien
gaggtataggataaccgataaggtatgcagaaa

SEQ ID NO: 557199 - DNA, 33 bp, Homo sapien
ggccaaagatgagggggaaacaatacctggtgg

SEQ ID NO: 557200 - DNA, 33 bp, Homo sapien
ggccaaagatgaggggtaaacaatacctggtgg

SEQ ID NO: 557201 - DNA, 33 bp, Homo sapien
aagcatttggtgtaccacaaagtacaaagttcc

SEQ ID NO: 557202 - DNA, 33 bp, Homo sapien
aagcatttggtgtaccgcaaagtacaaagttcc

SEQ ID NO: 557203 - DNA, 33 bp, Homo sapien
aacatatttagtaaaccgtgttgtaaacagatg

SEQ ID NO: 557204 - DNA, 33 bp, Homo sapien
aacatatttagtaaactgtgttgtaaacagatg

SEQ ID NO: 557205 - DNA, 33 bp, Homo sapien
tctccaccatagtcttcaactcctcaaagtcat

SEQ ID NO: 557206 - DNA, 33 bp, Homo sapien
tctccaccatagtcttgaactcctcaaagtcat

SEQ ID NO: 557207 - DNA, 33 bp, Homo sapien
taattttatgtgtgaaaaaatgagcttataaaa

SEQ ID NO: 557208 - DNA, 33 bp, Homo sapien
taattttatgtgtgaagaaatgagcttataaaa

SEQ ID NO: 557209 - DNA, 33 bp, Homo sapien
cccatggtaagcataagcaataaattacaaagt

SEQ ID NO: 557210 - DNA, 33 bp, Homo sapien
cccatggtaagcataatcaataaattacaaagt

SEQ ID NO: 557211 - DNA, 33 bp, Homo sapien
gttacaacagcaataaaaataacatgaaggtat

SEQ ID NO: 557212 - DNA, 33 bp, Homo sapien
gttacaacagcaataagaataacatgaaggtat

SEQ ID NO: 557213 - DNA, 33 bp, Homo sapien
ttcaattcctctcaataaatatccagaagtaga

SEQ ID NO: 557214 - DNA, 33 bp, Homo sapien
ttcaattcctctcaattaatatccagaagtaga

SEQ ID NO: 557215 - DNA, 33 bp, Homo sapien
acccattgatgtcaggaatgtaagttagtacag

SEQ ID NO: 557216 - DNA, 33 bp, Homo sapien
acccattgatgtcaggcatgtaagttagtacag

SEQ ID NO: 557217 - DNA, 33 bp, Homo sapien
ttttcccttgcaaatacagtgtccaatgctcaa

SEQ ID NO: 557218 - DNA, 33 bp, Homo sapien
ttttcccttgcaaatatagtgtccaatgctcaa

SEQ ID NO: 557219 - DNA, 33 bp, Homo sapien
ctgagatttaaaagaactcatcaagtatgaatg

SEQ ID NO: 557220 - DNA, 33 bp, Homo sapien
ctgagatttaaaagaagtcatcaagtatgaatg

SEQ ID NO: 557221 - DNA, 33 bp, Homo sapien
tcagcccacttctttccactgcactatgtcagc

SEQ ID NO: 557222 - DNA, 33 bp, Homo sapien
tcagcccacttctttcgactgcactatgtcagc

SEQ ID NO: 557223 - DNA, 33 bp, Homo sapien
tttttttgtctttccaacagaactatttaaaga

SEQ ID NO: 557224 - DNA, 33 bp, Homo sapien
tttttttgtctttccagcagaactatttaaaga

SEQ ID NO: 557225 - DNA, 33 bp, Homo sapien
atgttgcaacagataacgtcaggcaaaaagtgg

SEQ ID NO: 557226 - DNA, 33 bp, Homo sapien
atgttgcaacagataatgtcaggcaaaaagtgg

SEQ ID NO: 557227 - DNA, 33 bp, Homo sapien
gccctgataggaacccaatggaggaccctatgt

SEQ ID NO: 557228 - DNA, 33 bp, Homo sapien
gccctgataggaacccgatggaggaccctatgt

SEQ ID NO: 557229 - DNA, 33 bp, Homo sapien
agagatgggattcagacagaggtattctgtctc

SEQ ID NO: 557230 - DNA, 33 bp, Homo sapien
agagatgggattcagatagaggtattctgtctc

SEQ ID NO: 557231 - DNA, 33 bp, Homo sapien
ggctcagagcggcccaaataaatcgatcatatt

SEQ ID NO: 557232 - DNA, 33 bp, Homo sapien
ggctcagagcggcccatataaatcgatcatatt

SEQ ID NO: 557233 - DNA, 33 bp, Homo sapien
tttaaagatactcttcaagactgggtaatttat

SEQ ID NO: 557234 - DNA, 33 bp, Homo sapien
tttaaagatactcttcgagactgggtaatttat

SEQ ID NO: 557235 - DNA, 33 bp, Homo sapien
aagagtatctttaaatcagtgtgagaaggaact

SEQ ID NO: 557236 - DNA, 33 bp, Homo sapien
aagagtatctttaaatgagtgtgagaaggaact

SEQ ID NO: 557237 - DNA, 33 bp, Homo sapien
tttggctcaaccttataaactcttctttgaatt

SEQ ID NO: 557238 - DNA, 33 bp, Homo sapien
tttggctcaaccttatcaactcttctttgaatt

SEQ ID NO: 557239 - DNA, 33 bp, Homo sapien
atatatacactcctcacaaagtagctgccctgt

SEQ ID NO: 557240 - DNA, 33 bp, Homo sapien
atatatacactcctcagaaagtagctgccctgt

SEQ ID NO: 557241 - DNA, 33 bp, Homo sapien
tcactatctacattccaaccacctacacctgta

SEQ ID NO: 557242 - DNA, 33 bp, Homo sapien
tcactatctacattccgaccacctacacctgta

SEQ ID NO: 557243 - DNA, 33 bp, Homo sapien
atctgttgtccttcacaagacccattgcacatg

SEQ ID NO: 557244 - DNA, 33 bp, Homo sapien
atctgttgtccttcacgagacccattgcacatg

SEQ ID NO: 557245 - DNA, 33 bp, Homo sapien
aagggcaacacatttaaagcatgaaccagaaaa

SEQ ID NO: 557246 - DNA, 33 bp, Homo sapien
aagggcaacacatttagagcatgaaccagaaaa

SEQ ID NO: 557247 - DNA, 33 bp, Homo sapien
ggtcctggatttaagccaggctgaataggtatg

SEQ ID NO: 557248 - DNA, 33 bp, Homo sapien
ggtcctggatttaagctaggctgaataggtatg

SEQ ID NO: 557249 - DNA, 33 bp, Homo sapien
agacaggatgtaacaaagttaacaacaagatat

SEQ ID NO: 557250 - DNA, 33 bp, Homo sapien
agacaggatgtaacaaggttaacaacaagatat

SEQ ID NO: 557251 - DNA, 33 bp, Homo sapien
tgtctctgtaaagccccagcaatgggtaactca

SEQ ID NO: 557252 - DNA, 33 bp, Homo sapien
tgtctctgtaaagccctagcaatgggtaactca

SEQ ID NO: 557253 - DNA, 33 bp, Homo sapien
caattttcacttttgagagctagattacagtcc

SEQ ID NO: 557254 - DNA, 33 bp, Homo sapien
caattttcacttttgatagctagattacagtcc

SEQ ID NO: 557255 - DNA, 33 bp, Homo sapien
gtcaataaatatgaccggatattggaactgcca

SEQ ID NO: 557256 - DNA, 33 bp, Homo sapien
gtcaataaatatgacctgatattggaactgcca

SEQ ID NO: 557257 - DNA, 33 bp, Homo sapien
agacaagaccaatccacagtgtcttgggggatt

SEQ ID NO: 557258 - DNA, 33 bp, Homo sapien
agacaagaccaatccatagtgtcttgggggatt

SEQ ID NO: 557259 - DNA, 33 bp, Homo sapien
acactcaattgattaccgaattaccattgttta

SEQ ID NO: 557260 - DNA, 33 bp, Homo sapien
acactcaattgattactgaattaccattgttta

SEQ ID NO: 557261 - DNA, 33 bp, Homo sapien
gaggctttgagacttccattgataatttgaaaa

SEQ ID NO: 557262 - DNA, 33 bp, Homo sapien
gaggctttgagacttctattgataatttgaaaa

SEQ ID NO: 557263 - DNA, 33 bp, Homo sapien
atggagttatagggaacgtaggttgtgtgtgac

SEQ ID NO: 557264 - DNA, 33 bp, Homo sapien
atggagttatagggaatgtaggttgtgtgtgac

SEQ ID NO: 557265 - DNA, 33 bp, Homo sapien
ctcgatttgacttttccatgaacatgcttaata

SEQ ID NO: 557266 - DNA, 33 bp, Homo sapien
ctcgatttgacttttctatgaacatgcttaata

SEQ ID NO: 557267 - DNA, 33 bp, Homo sapien
cgtatttgttttttaaatcatgtctagatcata

SEQ ID NO: 557268 - DNA, 33 bp, Homo sapien
cgtatttgttttttaactcatgtctagatcata

SEQ ID NO: 557269 - DNA, 33 bp, Homo sapien
ggtactgtgaatgttgaacataaaatgcaaaag

SEQ ID NO: 557270 - DNA, 33 bp, Homo sapien
ggtactgtgaatgttgcacataaaatgcaaaag

SEQ ID NO: 557271 - DNA, 33 bp, Homo sapien
cagaactcttatccaacatcatggaacgcttgt

SEQ ID NO: 557272 - DNA, 33 bp, Homo sapien
cagaactcttatccaatatcatggaacgcttgt

SEQ ID NO: 557273 - DNA, 33 bp, Homo sapien
tcagggttctatttacgatgggctatcctaagc

SEQ ID NO: 557274 - DNA, 33 bp, Homo sapien
tcagggttctatttactatgggctatcctaagc

SEQ ID NO: 557275 - DNA, 33 bp, Homo sapien
gcactgtccttctgtaagttctcttcatatttt

SEQ ID NO: 557276 - DNA, 33 bp, Homo sapien
gcactgtccttctgtaggttctcttcatatttt

SEQ ID NO: 557277 - DNA, 33 bp, Homo sapien
taattgataaggaggaaagggcttataaagtct

SEQ ID NO: 557278 - DNA, 33 bp, Homo sapien
taattgataaggaggacagggcttataaagtct

SEQ ID NO: 557279 - DNA, 33 bp, Homo sapien
cctacctcactctcgacgacgcttctcaagacc

SEQ ID NO: 557280 - DNA, 33 bp, Homo sapien
cctacctcactctcgatgacgcttctcaagacc

SEQ ID NO: 557281 - DNA, 33 bp, Homo sapien
gctaagttgaagaagacaaaggtagtcagagaa

SEQ ID NO: 557282 - DNA, 33 bp, Homo sapien
gctaagttgaagaagagaaaggtagtcagagaa

SEQ ID NO: 557283 - DNA, 33 bp, Homo sapien
aagaaagccatcaaataattctgtaactaaaga

SEQ ID NO: 557284 - DNA, 33 bp, Homo sapien
aagaaagccatcaaatgattctgtaactaaaga

SEQ ID NO: 557285 - DNA, 33 bp, Homo sapien
tgtcaacccatgtgtccctaaccccaatgtccg

SEQ ID NO: 557286 - DNA, 33 bp, Homo sapien
tgtcaacccatgtgtctctaaccccaatgtccg

SEQ ID NO: 557287 - DNA, 33 bp, Homo sapien
agctttaaagagcaaaatcaggatgtcaaccca

SEQ ID NO: 557288 - DNA, 33 bp, Homo sapien
agctttaaagagcaaattcaggatgtcaaccca

SEQ ID NO: 557289 - DNA, 33 bp, Homo sapien
atcattggaggtcccaaattaagaggtcatgta

SEQ ID NO: 557290 - DNA, 33 bp, Homo sapien
atcattggaggtcccagattaagaggtcatgta

SEQ ID NO: 557291 - DNA, 33 bp, Homo sapien
gaaaacttttcagcagaagaacatggtcaatgt

SEQ ID NO: 557292 - DNA, 33 bp, Homo sapien
gaaaacttttcagcagtagaacatggtcaatgt

SEQ ID NO: 557293 - DNA, 33 bp, Homo sapien
attgcaacagtccaagaccatgacatttggggt

SEQ ID NO: 557294 - DNA, 33 bp, Homo sapien
attgcaacagtccaaggccatgacatttggggt

SEQ ID NO: 557295 - DNA, 33 bp, Homo sapien
attacagttctgtaggaaattgtcatgctatat

SEQ ID NO: 557296 - DNA, 33 bp, Homo sapien
attacagttctgtaggcaattgtcatgctatat

SEQ ID NO: 557297 - DNA, 33 bp, Homo sapien
ttacaaagttggcttcaatccccagactgaatt

SEQ ID NO: 557298 - DNA, 33 bp, Homo sapien
ttacaaagttggcttcgatccccagactgaatt

SEQ ID NO: 557299 - DNA, 33 bp, Homo sapien
ttagggctcattgatcaagagtttttcaatgat

SEQ ID NO: 557300 - DNA, 33 bp, Homo sapien
ttagggctcattgatctagagtttttcaatgat

SEQ ID NO: 557301 - DNA, 33 bp, Homo sapien
gaccaattggctctaacatacatctacagaaca

SEQ ID NO: 557302 - DNA, 33 bp, Homo sapien
gaccaattggctctaatatacatctacagaaca

SEQ ID NO: 557303 - DNA, 33 bp, Homo sapien
actgtgaggccaaaaaatcaattctctcaacat

SEQ ID NO: 557304 - DNA, 33 bp, Homo sapien
actgtgaggccaaaaagtcaattctctcaacat

SEQ ID NO: 557305 - DNA, 33 bp, Homo sapien
tgtggtatgtactccagtctcttgtcagctcat

SEQ ID NO: 557306 - DNA, 33 bp, Homo sapien
tgtggtatgtactccattctcttgtcagctcat

SEQ ID NO: 557307 - DNA, 33 bp, Homo sapien
ctacagcatttaataactggcacgagctttcaa

SEQ ID NO: 557308 - DNA, 33 bp, Homo sapien
ctacagcatttaataattggcacgagctttcaa

SEQ ID NO: 557309 - DNA, 33 bp, Homo sapien
ttttgaaggaggggaaagaataagctagaaatg

SEQ ID NO: 557310 - DNA, 33 bp, Homo sapien
ttttgaaggaggggaaggaataagctagaaatg

SEQ ID NO: 557311 - DNA, 33 bp, Homo sapien
tggatgaatggataaaaaagacatggcatatac

SEQ ID NO: 557312 - DNA, 33 bp, Homo sapien
tggatgaatggataaacaagacatggcatatac

SEQ ID NO: 557313 - DNA, 33 bp, Homo sapien
aataagctagatgatacgacacactatggttat

SEQ ID NO: 557314 - DNA, 33 bp, Homo sapien
aataagctagatgatatgacacactatggttat

SEQ ID NO: 557315 - DNA, 33 bp, Homo sapien
agtgttcacatggcacggatccaaagaaaagtt

SEQ ID NO: 557316 - DNA, 33 bp, Homo sapien
agtgttcacatggcactgatccaaagaaaagtt

SEQ ID NO: 557317 - DNA, 33 bp, Homo sapien
gtaactatctttaaaccgcactctcccattgac

SEQ ID NO: 557318 - DNA, 33 bp, Homo sapien
gtaactatctttaaactgcactctcccattgac

SEQ ID NO: 557319 - DNA, 33 bp, Homo sapien
actgaatatctttaacagtacccaagccacctc

SEQ ID NO: 557320 - DNA, 33 bp, Homo sapien
actgaatatctttaacggtacccaagccacctc

SEQ ID NO: 557321 - DNA, 33 bp, Homo sapien
ttaccagaaattaaagccaccagagtggttgct

SEQ ID NO: 557322 - DNA, 33 bp, Homo sapien
ttaccagaaattaaagtcaccagagtggttgct

SEQ ID NO: 557323 - DNA, 33 bp, Homo sapien
gacctggatatgctgaccttcagccatttttcc

SEQ ID NO: 557324 - DNA, 33 bp, Homo sapien
gacctggatatgctgatcttcagccatttttcc

SEQ ID NO: 557325 - DNA, 33 bp, Homo sapien
tcttctctgtgatgtacggatctaaagtgtagg

SEQ ID NO: 557326 - DNA, 33 bp, Homo sapien
tcttctctgtgatgtatggatctaaagtgtagg

SEQ ID NO: 557327 - DNA, 33 bp, Homo sapien
ctgctttttgaccgagaagaagcatattatatt

SEQ ID NO: 557328 - DNA, 33 bp, Homo sapien
ctgctttttgaccgaggagaagcatattatatt

SEQ ID NO: 557329 - DNA, 33 bp, Homo sapien
attgtccaagttgaaacggatatacatttgttg

SEQ ID NO: 557330 - DNA, 33 bp, Homo sapien
attgtccaagttgaaatggatatacatttgttg

SEQ ID NO: 557331 - DNA, 33 bp, Homo sapien
ccttgagtgaactgcaccagtaacaaaaccagg

SEQ ID NO: 557332 - DNA, 33 bp, Homo sapien
ccttgagtgaactgcagcagtaacaaaaccagg

SEQ ID NO: 557333 - DNA, 33 bp, Homo sapien
cttgattagcttactacgtactggctgactaca

SEQ ID NO: 557334 - DNA, 33 bp, Homo sapien
cttgattagcttactatgtactggctgactaca

SEQ ID NO: 557335 - DNA, 33 bp, Homo sapien
tccatcagttgccaaacgggtaatgtttgaatt

SEQ ID NO: 557336 - DNA, 33 bp, Homo sapien
tccatcagttgccaaatgggtaatgtttgaatt

SEQ ID NO: 557337 - DNA, 33 bp, Homo sapien
gcatgactataaaacagacttccattaccaccc

SEQ ID NO: 557338 - DNA, 33 bp, Homo sapien
gcatgactataaaacatacttccattaccaccc

SEQ ID NO: 557339 - DNA, 33 bp, Homo sapien
gaaaaagtaactgatacagagaatgatcctttg

SEQ ID NO: 557340 - DNA, 33 bp, Homo sapien
gaaaaagtaactgatatagagaatgatcctttg

SEQ ID NO: 557341 - DNA, 33 bp, Homo sapien
tgaaacatctctacaacttcagaccttggccaa

SEQ ID NO: 557342 - DNA, 33 bp, Homo sapien
tgaaacatctctacaatttcagaccttggccaa

SEQ ID NO: 557343 - DNA, 33 bp, Homo sapien
tagctttcatggtaacaaaggtgaaaatttaaa

SEQ ID NO: 557344 - DNA, 33 bp, Homo sapien
tagctttcatggtaacgaaggtgaaaatttaaa

SEQ ID NO: 557345 - DNA, 33 bp, Homo sapien
gttttcttctctgtgaagttatcaatcagcaga

SEQ ID NO: 557346 - DNA, 33 bp, Homo sapien
gttttcttctctgtgaggttatcaatcagcaga

SEQ ID NO: 557347 - DNA, 33 bp, Homo sapien
tggcccatttaaacaacgtgagggtttcataag

SEQ ID NO: 557348 - DNA, 33 bp, Homo sapien
tggcccatttaaacaatgtgagggtttcataag

SEQ ID NO: 557349 - DNA, 33 bp, Homo sapien
agaaggctgatgtaatcaaggttgagaaagcca

SEQ ID NO: 557350 - DNA, 33 bp, Homo sapien
agaaggctgatgtaattaaggttgagaaagcca

SEQ ID NO: 557351 - DNA, 33 bp, Homo sapien
cacctcagaagctcacaatttgttttgttggga

SEQ ID NO: 557352 - DNA, 33 bp, Homo sapien
cacctcagaagctcaccatttgttttgttggga

SEQ ID NO: 557353 - DNA, 33 bp, Homo sapien
gagttctagtgttcgacagcaatgtaggatgac

SEQ ID NO: 557354 - DNA, 33 bp, Homo sapien
gagttctagtgttcgatagcaatgtaggatgac

SEQ ID NO: 557355 - DNA, 33 bp, Homo sapien
tgcttgtgctcattcacatacggaagctacaaa

SEQ ID NO: 557356 - DNA, 33 bp, Homo sapien
tgcttgtgctcattcatatacggaagctacaaa

SEQ ID NO: 557357 - DNA, 33 bp, Homo sapien
cttgcaagctatggaaagattagtggtgggtac

SEQ ID NO: 557358 - DNA, 33 bp, Homo sapien
cttgcaagctatggaatgattagtggtgggtac

SEQ ID NO: 557359 - DNA, 33 bp, Homo sapien
taaatggagagaataaatcaacagcaaaagcat

SEQ ID NO: 557360 - DNA, 33 bp, Homo sapien
taaatggagagaataagtcaacagcaaaagcat

SEQ ID NO: 557361 - DNA, 33 bp, Homo sapien
tttttcagggtagacaatcatctcatacgcaag

SEQ ID NO: 557362 - DNA, 33 bp, Homo sapien
tttttcagggtagacagtcatctcatacgcaag

SEQ ID NO: 557363 - DNA, 33 bp, Homo sapien
ctgactcctatatgagcatcacctcactgacat

SEQ ID NO: 557364 - DNA, 33 bp, Homo sapien
ctgactcctatatgagtatcacctcactgacat

SEQ ID NO: 557365 - DNA, 33 bp, Homo sapien
aagactatggacttaacagtgtagcatcattgg

SEQ ID NO: 557366 - DNA, 33 bp, Homo sapien
aagactatggacttaagagtgtagcatcattgg

SEQ ID NO: 557367 - DNA, 33 bp, Homo sapien
accatccggtgtaaggaataggcaccagcttag

SEQ ID NO: 557368 - DNA, 33 bp, Homo sapien
accatccggtgtaaggcataggcaccagcttag

SEQ ID NO: 557369 - DNA, 33 bp, Homo sapien
tgttgaggattagagacgaccagggtagaggag

SEQ ID NO: 557370 - DNA, 33 bp, Homo sapien
tgttgaggattagagaggaccagggtagaggag

SEQ ID NO: 557371 - DNA, 33 bp, Homo sapien
gtgattgtgagaattcagaaagtcagtatgtgt

SEQ ID NO: 557372 - DNA, 33 bp, Homo sapien
gtgattgtgagaattccgaaagtcagtatgtgt

SEQ ID NO: 557373 - DNA, 33 bp, Homo sapien
cccttctagccaaaaacgtgttcagttagacat

SEQ ID NO: 557374 - DNA, 33 bp, Homo sapien
cccttctagccaaaaatgtgttcagttagacat

SEQ ID NO: 557375 - DNA, 33 bp, Homo sapien
ataactcagagctttaaaaacccgatgcaacta

SEQ ID NO: 557376 - DNA, 33 bp, Homo sapien
ataactcagagctttagaaacccgatgcaacta

SEQ ID NO: 557377 - DNA, 33 bp, Homo sapien
aattctaccctttggaaataatcatcattaaag

SEQ ID NO: 557378 - DNA, 33 bp, Homo sapien
aattctaccctttggagataatcatcattaaag

SEQ ID NO: 557379 - DNA, 33 bp, Homo sapien
tgaggaatgcagggggaataatccctagaggtt

SEQ ID NO: 557380 - DNA, 33 bp, Homo sapien
tgaggaatgcagggggtataatccctagaggtt

SEQ ID NO: 557381 - DNA, 33 bp, Homo sapien
aaaaaagccatgaaagactgatatttcctagaa

SEQ ID NO: 557382 - DNA, 33 bp, Homo sapien
aaaaaagccatgaaagtctgatatttcctagaa

SEQ ID NO: 557383 - DNA, 33 bp, Homo sapien
gatgatacaacactgacgtgctctggagcttat

SEQ ID NO: 557384 - DNA, 33 bp, Homo sapien
gatgatacaacactgatgtgctctggagcttat

SEQ ID NO: 557385 - DNA, 33 bp, Homo sapien
catagaaggttacctacatcattgccttgacct

SEQ ID NO: 557386 - DNA, 33 bp, Homo sapien
catagaaggttacctatatcattgccttgacct

SEQ ID NO: 557387 - DNA, 33 bp, Homo sapien
gatggacctagtatgccactataccacttgtgt

SEQ ID NO: 557388 - DNA, 33 bp, Homo sapien
gatggacctagtatgcgactataccacttgtgt

SEQ ID NO: 557389 - DNA, 33 bp, Homo sapien
agtcacaagcactcttaaaaggataacacaaac

SEQ ID NO: 557390 - DNA, 33 bp, Homo sapien
agtcacaagcactctttaaaggataacacaaac

SEQ ID NO: 557391 - DNA, 33 bp, Homo sapien
gctctccgtaatgcagaattgtagaactgactc

SEQ ID NO: 557392 - DNA, 33 bp, Homo sapien
gctctccgtaatgcagcattgtagaactgactc

SEQ ID NO: 557393 - DNA, 33 bp, Homo sapien
tgcatatacagataacagtgagttgcagatgat

SEQ ID NO: 557394 - DNA, 33 bp, Homo sapien
tgcatatacagataacggtgagttgcagatgat

SEQ ID NO: 557395 - DNA, 33 bp, Homo sapien
tattttaccggtaccccatagtcctcaaaatca

SEQ ID NO: 557396 - DNA, 33 bp, Homo sapien
tattttaccggtaccctatagtcctcaaaatca

SEQ ID NO: 557397 - DNA, 33 bp, Homo sapien
gttctcattcattttaaggccccatggttttgt

SEQ ID NO: 557398 - DNA, 33 bp, Homo sapien
gttctcattcattttagggccccatggttttgt

SEQ ID NO: 557399 - DNA, 33 bp, Homo sapien
tttatgccctgagagaatatgatgtcatacttc

SEQ ID NO: 557400 - DNA, 33 bp, Homo sapien
tttatgccctgagagactatgatgtcatacttc

SEQ ID NO: 557401 - DNA, 33 bp, Homo sapien
tcaaatcgggagaaggacattatccaaagctga

SEQ ID NO: 557402 - DNA, 33 bp, Homo sapien
tcaaatcgggagaagggcattatccaaagctga

SEQ ID NO: 557403 - DNA, 33 bp, Homo sapien
gtatttttagtgatcagctagccatctgtgcca

SEQ ID NO: 557404 - DNA, 33 bp, Homo sapien
gtatttttagtgatcatctagccatctgtgcca

SEQ ID NO: 557405 - DNA, 33 bp, Homo sapien
gctgacttgttgaggaactctattctagactgc

SEQ ID NO: 557406 - DNA, 33 bp, Homo sapien
gctgacttgttgaggagctctattctagactgc

SEQ ID NO: 557407 - DNA, 33 bp, Homo sapien
cttaaactgggaatcaaatttggatttcatata

SEQ ID NO: 557408 - DNA, 33 bp, Homo sapien
cttaaactgggaatcacatttggatttcatata

SEQ ID NO: 557409 - DNA, 33 bp, Homo sapien
ctaggattctcagtggaatagtattaccagtgg

SEQ ID NO: 557410 - DNA, 33 bp, Homo sapien
ctaggattctcagtgggatagtattaccagtgg

SEQ ID NO: 557411 - DNA, 33 bp, Homo sapien
cccacatgcttggtacacacattaagtttgaaa

SEQ ID NO: 557412 - DNA, 33 bp, Homo sapien
cccacatgcttggtacgcacattaagtttgaaa

SEQ ID NO: 557413 - DNA, 33 bp, Homo sapien
taccggaatcattaaacgaggcatgtactaaaa

SEQ ID NO: 557414 - DNA, 33 bp, Homo sapien
taccggaatcattaaaggaggcatgtactaaaa

SEQ ID NO: 557415 - DNA, 33 bp, Homo sapien
tctagggaataaggcagagaagatatgattgct

SEQ ID NO: 557416 - DNA, 33 bp, Homo sapien
tctagggaataaggcatagaagatatgattgct

SEQ ID NO: 557417 - DNA, 33 bp, Homo sapien
acgattgaatggagtaagtgacagggacaagga

SEQ ID NO: 557418 - DNA, 33 bp, Homo sapien
acgattgaatggagtacgtgacagggacaagga

SEQ ID NO: 557419 - DNA, 33 bp, Homo sapien
tctgctaccaaatctccgactagttatataaag

SEQ ID NO: 557420 - DNA, 33 bp, Homo sapien
tctgctaccaaatctctgactagttatataaag

SEQ ID NO: 557421 - DNA, 33 bp, Homo sapien
tctggtgtaatttcaacgtaaatccaatttgtt

SEQ ID NO: 557422 - DNA, 33 bp, Homo sapien
tctggtgtaatttcaatgtaaatccaatttgtt

SEQ ID NO: 557423 - DNA, 33 bp, Homo sapien
tgtttggctgcaaagagaaatatgcctcaagtt

SEQ ID NO: 557424 - DNA, 33 bp, Homo sapien
tgtttggctgcaaagataaatatgcctcaagtt

SEQ ID NO: 557425 - DNA, 33 bp, Homo sapien
agaaggaaaatatgtgcatagagtaattgaaga

SEQ ID NO: 557426 - DNA, 33 bp, Homo sapien
agaaggaaaatatgtggatagagtaattgaaga

SEQ ID NO: 557427 - DNA, 33 bp, Homo sapien
ggagatcaaaagtccaaaattaaagtgtcatca

SEQ ID NO: 557428 - DNA, 33 bp, Homo sapien
ggagatcaaaagtccacaattaaagtgtcatca

SEQ ID NO: 557429 - DNA, 33 bp, Homo sapien
ttacacaaatggaatgaaggatctctatattta

SEQ ID NO: 557430 - DNA, 33 bp, Homo sapien
ttacacaaatggaatgcaggatctctatattta

SEQ ID NO: 557431 - DNA, 33 bp, Homo sapien
agagaaataaggtacacatccagctgcaactag

SEQ ID NO: 557432 - DNA, 33 bp, Homo sapien
agagaaataaggtacatatccagctgcaactag

SEQ ID NO: 557433 - DNA, 33 bp, Homo sapien
tgttttggagattcctcaacctacaggctattt

SEQ ID NO: 557434 - DNA, 33 bp, Homo sapien
tgttttggagattccttaacctacaggctattt

SEQ ID NO: 557435 - DNA, 33 bp, Homo sapien
aatgttaatgattatagatggttccagaattta

SEQ ID NO: 557436 - DNA, 33 bp, Homo sapien
aatgttaatgattatatatggttccagaattta

SEQ ID NO: 557437 - DNA, 33 bp, Homo sapien
agtggctggaaagtgaaacacattcaataaaaa

SEQ ID NO: 557438 - DNA, 33 bp, Homo sapien
agtggctggaaagtgatacacattcaataaaaa

SEQ ID NO: 557439 - DNA, 33 bp, Homo sapien
caactaggaaatctgaagcctatgtcttatttc

SEQ ID NO: 557440 - DNA, 33 bp, Homo sapien
caactaggaaatctgaggcctatgtcttatttc

SEQ ID NO: 557441 - DNA, 33 bp, Homo sapien
tgaagtttatagagccagatgtatttagtagaa

SEQ ID NO: 557442 - DNA, 33 bp, Homo sapien
tgaagtttatagagccggatgtatttagtagaa

SEQ ID NO: 557443 - DNA, 33 bp, Homo sapien
cctttcaatttagttccaggaaattggcatgaa

SEQ ID NO: 557444 - DNA, 33 bp, Homo sapien
cctttcaatttagttctaggaaattggcatgaa

SEQ ID NO: 557445 - DNA, 33 bp, Homo sapien
atcccaagagaacgaccatttcactgcaaaggc

SEQ ID NO: 557446 - DNA, 33 bp, Homo sapien
atcccaagagaacgacgatttcactgcaaaggc

SEQ ID NO: 557447 - DNA, 33 bp, Homo sapien
gtagaggaattgtggcagattgaataggaagtt

SEQ ID NO: 557448 - DNA, 33 bp, Homo sapien
gtagaggaattgtggccgattgaataggaagtt

SEQ ID NO: 557449 - DNA, 33 bp, Homo sapien
tccccgagagatgtgaactcatttgaaccaggt

SEQ ID NO: 557450 - DNA, 33 bp, Homo sapien
tccccgagagatgtgagctcatttgaaccaggt

SEQ ID NO: 557451 - DNA, 33 bp, Homo sapien
gaggtatcccaactaacaagggtgaatgatggt

SEQ ID NO: 557452 - DNA, 33 bp, Homo sapien
gaggtatcccaactaataagggtgaatgatggt

SEQ ID NO: 557453 - DNA, 33 bp, Homo sapien
tttaaacatttttgaaaatacggtctctgttct

SEQ ID NO: 557454 - DNA, 33 bp, Homo sapien
tttaaacatttttgaagatacggtctctgttct

SEQ ID NO: 557455 - DNA, 33 bp, Homo sapien
ggcaatttgcactccaccgactgttaaatcatt

SEQ ID NO: 557456 - DNA, 33 bp, Homo sapien
ggcaatttgcactccatcgactgttaaatcatt

SEQ ID NO: 557457 - DNA, 33 bp, Homo sapien
agtagagtgtgcaagacggaaagtacgttggca

SEQ ID NO: 557458 - DNA, 33 bp, Homo sapien
agtagagtgtgcaagatggaaagtacgttggca

SEQ ID NO: 557459 - DNA, 33 bp, Homo sapien
atgttaggaaggatgcaatgccagaaacaaagt

SEQ ID NO: 557460 - DNA, 33 bp, Homo sapien
atgttaggaaggatgcgatgccagaaacaaagt

SEQ ID NO: 557461 - DNA, 33 bp, Homo sapien
aggatagagatgataacagatggaccatgtatt

SEQ ID NO: 557462 - DNA, 33 bp, Homo sapien
aggatagagatgataatagatggaccatgtatt

SEQ ID NO: 557463 - DNA, 33 bp, Homo sapien
tgcctcccagttagcaacatctctcaaaattga

SEQ ID NO: 557464 - DNA, 33 bp, Homo sapien
tgcctcccagttagcagcatctctcaaaattga

SEQ ID NO: 557465 - DNA, 33 bp, Homo sapien
ccatcatttccttacccctaaataactatccca

SEQ ID NO: 557466 - DNA, 33 bp, Homo sapien
ccatcatttccttacctctaaataactatccca

SEQ ID NO: 557467 - DNA, 33 bp, Homo sapien
ctgtagcattctgcaacattttttttaatctag

SEQ ID NO: 557468 - DNA, 33 bp, Homo sapien
ctgtagcattctgcaagattttttttaatctag

SEQ ID NO: 557469 - DNA, 33 bp, Homo sapien
aagttttaaatgattccaatgagtctaggaatg

SEQ ID NO: 557470 - DNA, 33 bp, Homo sapien
aagttttaaatgattcgaatgagtctaggaatg

SEQ ID NO: 557471 - DNA, 33 bp, Homo sapien
caggtcaggttttgacagctaatgaattataga

SEQ ID NO: 557472 - DNA, 33 bp, Homo sapien
caggtcaggttttgacggctaatgaattataga

SEQ ID NO: 557473 - DNA, 33 bp, Homo sapien
acatacattcaggtgccatacaaggtcattcta

SEQ ID NO: 557474 - DNA, 33 bp, Homo sapien
acatacattcaggtgctatacaaggtcattcta

SEQ ID NO: 557475 - DNA, 33 bp, Homo sapien
ttatcaacctggtgtaagataaacatacctgac

SEQ ID NO: 557476 - DNA, 33 bp, Homo sapien
ttatcaacctggtgtaggataaacatacctgac

SEQ ID NO: 557477 - DNA, 33 bp, Homo sapien
agtcagagccacataaacttgacagccattaaa

SEQ ID NO: 557478 - DNA, 33 bp, Homo sapien
agtcagagccacataagcttgacagccattaaa

SEQ ID NO: 557479 - DNA, 33 bp, Homo sapien
caagccagcacagattaaaggggatgcaagggt

SEQ ID NO: 557480 - DNA, 33 bp, Homo sapien
caagccagcacagattgaaggggatgcaagggt

SEQ ID NO: 557481 - DNA, 33 bp, Homo sapien
aaagaaagatatcatcggaggctattatatgaa

SEQ ID NO: 557482 - DNA, 33 bp, Homo sapien
aaagaaagatatcatctgaggctattatatgaa

SEQ ID NO: 557483 - DNA, 33 bp, Homo sapien
cggcctttgtctaagcagaaagggtagaacttc

SEQ ID NO: 557484 - DNA, 33 bp, Homo sapien
cggcctttgtctaagccgaaagggtagaacttc

SEQ ID NO: 557485 - DNA, 33 bp, Homo sapien
tgaatatggcctgggagctttctttccttttaa

SEQ ID NO: 557486 - DNA, 33 bp, Homo sapien
tgaatatggcctgggatctttctttccttttaa

SEQ ID NO: 557487 - DNA, 33 bp, Homo sapien
agccttaaatgttagacaggtagaaaacagatc

SEQ ID NO: 557488 - DNA, 33 bp, Homo sapien
agccttaaatgttagagaggtagaaaacagatc

SEQ ID NO: 557489 - DNA, 33 bp, Homo sapien
aatgatctaattgtccaccacagatttggatca

SEQ ID NO: 557490 - DNA, 33 bp, Homo sapien
aatgatctaattgtccgccacagatttggatca

SEQ ID NO: 557491 - DNA, 33 bp, Homo sapien
ttaggagccttaataaaactgctgtttagcttg

SEQ ID NO: 557492 - DNA, 33 bp, Homo sapien
ttaggagccttaataacactgctgtttagcttg

SEQ ID NO: 557493 - DNA, 33 bp, Homo sapien
taaatgcaaaagtacacgtcccagtaatttcac

SEQ ID NO: 557494 - DNA, 33 bp, Homo sapien
taaatgcaaaagtacatgtcccagtaatttcac

SEQ ID NO: 557495 - DNA, 33 bp, Homo sapien
gcattctccattgttccatcagacttcagttac

SEQ ID NO: 557496 - DNA, 33 bp, Homo sapien
gcattctccattgttcgatcagacttcagttac

SEQ ID NO: 557497 - DNA, 33 bp, Homo sapien
gccaggtaccagacaacagagagagctcctaca

SEQ ID NO: 557498 - DNA, 33 bp, Homo sapien
gccaggtaccagacaatagagagagctcctaca

SEQ ID NO: 557499 - DNA, 33 bp, Homo sapien
ggcagctaggcaaggacgtagttacagctggag

SEQ ID NO: 557500 - DNA, 33 bp, Homo sapien
ggcagctaggcaaggatgtagttacagctggag

SEQ ID NO: 557501 - DNA, 33 bp, Homo sapien
gtatggtgcctcacacaaagtaggaattctgta

SEQ ID NO: 557502 - DNA, 33 bp, Homo sapien
gtatggtgcctcacaccaagtaggaattctgta

SEQ ID NO: 557503 - DNA, 33 bp, Homo sapien
aattacgtcaaactcaaacataggtttcaaaac

SEQ ID NO: 557504 - DNA, 33 bp, Homo sapien
aattacgtcaaactcagacataggtttcaaaac

SEQ ID NO: 557505 - DNA, 33 bp, Homo sapien
gaggggtattaatgaactgtcaaatatacatag

SEQ ID NO: 557506 - DNA, 33 bp, Homo sapien
gaggggtattaatgaagtgtcaaatatacatag

SEQ ID NO: 557507 - DNA, 33 bp, Homo sapien
aaatatcattgttatacagcttatgccaccagc

SEQ ID NO: 557508 - DNA, 33 bp, Homo sapien
aaatatcattgttatatagcttatgccaccagc

SEQ ID NO: 557509 - DNA, 33 bp, Homo sapien
tgtttcagctaccaagcatggtgttatggtgtg

SEQ ID NO: 557510 - DNA, 33 bp, Homo sapien
tgtttcagctaccaagtatggtgttatggtgtg

SEQ ID NO: 557511 - DNA, 33 bp, Homo sapien
gtccgatatgtgtttgaagatttttgtgctggg

SEQ ID NO: 557512 - DNA, 33 bp, Homo sapien
gtccgatatgtgtttgtagatttttgtgctggg

SEQ ID NO: 557513 - DNA, 33 bp, Homo sapien
acacctttgctccgtacccacagctggacattc

SEQ ID NO: 557514 - DNA, 33 bp, Homo sapien
acacctttgctccgtatccacagctggacattc

SEQ ID NO: 557515 - DNA, 33 bp, Homo sapien
atttcagagaagaagtcaatgatgaaaataaaa

SEQ ID NO: 557516 - DNA, 33 bp, Homo sapien
atttcagagaagaagttaatgatgaaaataaaa

SEQ ID NO: 557517 - DNA, 33 bp, Homo sapien
ggatgtgtaaaatgtaaagatcatcaagttgtg

SEQ ID NO: 557518 - DNA, 33 bp, Homo sapien
ggatgtgtaaaatgtagagatcatcaagttgtg

SEQ ID NO: 557519 - DNA, 33 bp, Homo sapien
ggaaaacagtttgcaactccttaagatgttaaa

SEQ ID NO: 557520 - DNA, 33 bp, Homo sapien
ggaaaacagtttgcaattccttaagatgttaaa

SEQ ID NO: 557521 - DNA, 33 bp, Homo sapien
ttccttcctagctctcaaaactgcattaaacca

SEQ ID NO: 557522 - DNA, 33 bp, Homo sapien
ttccttcctagctctcgaaactgcattaaacca

SEQ ID NO: 557523 - DNA, 33 bp, Homo sapien
tcaggtaattggccaccgaagaaagtaaagact

SEQ ID NO: 557524 - DNA, 33 bp, Homo sapien
tcaggtaattggccactgaagaaagtaaagact

SEQ ID NO: 557525 - DNA, 33 bp, Homo sapien
cctagatgtatctccacagctgaaattaaccag

SEQ ID NO: 557526 - DNA, 33 bp, Homo sapien
cctagatgtatctccatagctgaaattaaccag

SEQ ID NO: 557527 - DNA, 33 bp, Homo sapien
tttaaaatatgtttccacaaatgaactatattc

SEQ ID NO: 557528 - DNA, 33 bp, Homo sapien
tttaaaatatgtttccccaaatgaactatattc

SEQ ID NO: 557529 - DNA, 33 bp, Homo sapien
gaaagcagttcgacaaacttaaaactgcattac

SEQ ID NO: 557530 - DNA, 33 bp, Homo sapien
gaaagcagttcgacaatcttaaaactgcattac

SEQ ID NO: 557531 - DNA, 33 bp, Homo sapien
cagaggaatgtcaagaagactgggacatactag

SEQ ID NO: 557532 - DNA, 33 bp, Homo sapien
cagaggaatgtcaagaggactgggacatactag

SEQ ID NO: 557533 - DNA, 33 bp, Homo sapien
aggataccatttagaacaatattgcttcactta

SEQ ID NO: 557534 - DNA, 33 bp, Homo sapien
aggataccatttagaagaatattgcttcactta

SEQ ID NO: 557535 - DNA, 33 bp, Homo sapien
cgcatttccacactcccacttaggctgctggag

SEQ ID NO: 557536 - DNA, 33 bp, Homo sapien
cgcatttccacactcctacttaggctgctggag

SEQ ID NO: 557537 - DNA, 33 bp, Homo sapien
ctgataacaaatatctcaaaatgtagaagcagc

SEQ ID NO: 557538 - DNA, 33 bp, Homo sapien
ctgataacaaatatctgaaaatgtagaagcagc

SEQ ID NO: 557539 - DNA, 33 bp, Homo sapien
acagaggctgaaaaaaatttatagagctagcta

SEQ ID NO: 557540 - DNA, 33 bp, Homo sapien
acagaggctgaaaaaagtttatagagctagcta

SEQ ID NO: 557541 - DNA, 33 bp, Homo sapien
tttttatctacaaaaagcaagggtcattctaga

SEQ ID NO: 557542 - DNA, 33 bp, Homo sapien
tttttatctacaaaaatcaagggtcattctaga

SEQ ID NO: 557543 - DNA, 33 bp, Homo sapien
acatggacatatcttagggaaagctgcttccgc

SEQ ID NO: 557544 - DNA, 33 bp, Homo sapien
acatggacatatcttatggaaagctgcttccgc

SEQ ID NO: 557545 - DNA, 33 bp, Homo sapien
attagggcatgtttgaactttcaaggatggaga

SEQ ID NO: 557546 - DNA, 33 bp, Homo sapien
attagggcatgtttgatctttcaaggatggaga

SEQ ID NO: 557547 - DNA, 33 bp, Homo sapien
cttctttccttcatcacacctttcagaggtgcc

SEQ ID NO: 557548 - DNA, 33 bp, Homo sapien
cttctttccttcatcatacctttcagaggtgcc

SEQ ID NO: 557549 - DNA, 33 bp, Homo sapien
taaagaaatgcgttcaataagcatcaggtactt

SEQ ID NO: 557550 - DNA, 33 bp, Homo sapien
taaagaaatgcgttcagtaagcatcaggtactt

SEQ ID NO: 557551 - DNA, 33 bp, Homo sapien
tttaagttcttgaaagacaatgctctgatggac

SEQ ID NO: 557552 - DNA, 33 bp, Homo sapien
tttaagttcttgaaaggcaatgctctgatggac

SEQ ID NO: 557553 - DNA, 33 bp, Homo sapien
gaaggaatttacctaaacttgaataagaacaaa

SEQ ID NO: 557554 - DNA, 33 bp, Homo sapien
gaaggaatttacctaaccttgaataagaacaaa

SEQ ID NO: 557555 - DNA, 33 bp, Homo sapien
gccttttgcataggtgaaaaacagcaaatatta

SEQ ID NO: 557556 - DNA, 33 bp, Homo sapien
gccttttgcataggtggaaaacagcaaatatta

SEQ ID NO: 557557 - DNA, 33 bp, Homo sapien
ggtgagactggctaaactaacaaagaactagaa

SEQ ID NO: 557558 - DNA, 33 bp, Homo sapien
ggtgagactggctaaagtaacaaagaactagaa

SEQ ID NO: 557559 - DNA, 33 bp, Homo sapien
cttcagcttccgaacaacagaaagtagaggttg

SEQ ID NO: 557560 - DNA, 33 bp, Homo sapien
cttcagcttccgaacagcagaaagtagaggttg

SEQ ID NO: 557561 - DNA, 33 bp, Homo sapien
tgtagcagatgactggcaagggtacagctaggt

SEQ ID NO: 557562 - DNA, 33 bp, Homo sapien
tgtagcagatgactgggaagggtacagctaggt

SEQ ID NO: 557563 - DNA, 33 bp, Homo sapien
atatcacattctggaaacttcttaccctggagg

SEQ ID NO: 557564 - DNA, 33 bp, Homo sapien
atatcacattctggaaccttcttaccctggagg

SEQ ID NO: 557565 - DNA, 33 bp, Homo sapien
ctgttaatcatctttgcaatttcagaggctaaa

SEQ ID NO: 557566 - DNA, 33 bp, Homo sapien
ctgttaatcatctttgtaatttcagaggctaaa

SEQ ID NO: 557567 - DNA, 33 bp, Homo sapien
cacctctgagggtaaacgggacattctgatggg

SEQ ID NO: 557568 - DNA, 33 bp, Homo sapien
cacctctgagggtaaatgggacattctgatggg

SEQ ID NO: 557569 - DNA, 33 bp, Homo sapien
cacattttatcaaccaaaggaagatacgagaga

SEQ ID NO: 557570 - DNA, 33 bp, Homo sapien
cacattttatcaaccagaggaagatacgagaga

SEQ ID NO: 557571 - DNA, 33 bp, Homo sapien
taggcaaatctatgaagacataaagtgatgaat

SEQ ID NO: 557572 - DNA, 33 bp, Homo sapien
taggcaaatctatgaatacataaagtgatgaat

SEQ ID NO: 557573 - DNA, 33 bp, Homo sapien
gagtctttttcccgaacagggcatactgagtaa

SEQ ID NO: 557574 - DNA, 33 bp, Homo sapien
gagtctttttcccgaatagggcatactgagtaa

SEQ ID NO: 557575 - DNA, 33 bp, Homo sapien
gcttgaaaaccactgcaattgattaaggtaagt

SEQ ID NO: 557576 - DNA, 33 bp, Homo sapien
gcttgaaaaccactgcgattgattaaggtaagt

SEQ ID NO: 557577 - DNA, 33 bp, Homo sapien
tgtgctttgggtggaaagtgagttctctggcat

SEQ ID NO: 557578 - DNA, 33 bp, Homo sapien
tgtgctttgggtggaaggtgagttctctggcat

SEQ ID NO: 557579 - DNA, 33 bp, Homo sapien
tgaaaatccttcttgacgaaaattcaaattgat

SEQ ID NO: 557580 - DNA, 33 bp, Homo sapien
tgaaaatccttcttgatgaaaattcaaattgat

SEQ ID NO: 557581 - DNA, 33 bp, Homo sapien
tgtgactgtactaagaataagtaacagcgatga

SEQ ID NO: 557582 - DNA, 33 bp, Homo sapien
tgtgactgtactaagagtaagtaacagcgatga

SEQ ID NO: 557583 - DNA, 33 bp, Homo sapien
ttgctgctttgggctaagggagaacaagaacag

SEQ ID NO: 557584 - DNA, 33 bp, Homo sapien
ttgctgctttgggctacgggagaacaagaacag

SEQ ID NO: 557585 - DNA, 33 bp, Homo sapien
acaattacaatcagcccatagagacagtccaag

SEQ ID NO: 557586 - DNA, 33 bp, Homo sapien
acaattacaatcagccgatagagacagtccaag

SEQ ID NO: 557587 - DNA, 33 bp, Homo sapien
ataatgggaaatattaactatagaactgagcac

SEQ ID NO: 557588 - DNA, 33 bp, Homo sapien
ataatgggaaatattagctatagaactgagcac

SEQ ID NO: 557589 - DNA, 33 bp, Homo sapien
aaattgatgtcctttgaaaaccttatctttgca

SEQ ID NO: 557590 - DNA, 33 bp, Homo sapien
aaattgatgtcctttggaaaccttatctttgca

SEQ ID NO: 557591 - DNA, 33 bp, Homo sapien
gcacttctgcatgttaagtgtgaagaccagggc

SEQ ID NO: 557592 - DNA, 33 bp, Homo sapien
gcacttctgcatgttacgtgtgaagaccagggc

SEQ ID NO: 557593 - DNA, 33 bp, Homo sapien
aaatttttatggaggacattcgtaaaagcagct

SEQ ID NO: 557594 - DNA, 33 bp, Homo sapien
aaatttttatggaggatattcgtaaaagcagct

SEQ ID NO: 557595 - DNA, 33 bp, Homo sapien
ctgctgtaatagaaaaatttagtctttagcata

SEQ ID NO: 557596 - DNA, 33 bp, Homo sapien
ctgctgtaatagaaaattttagtctttagcata

SEQ ID NO: 557597 - DNA, 33 bp, Homo sapien
ccattcggtaaatggaatcaattaaaatgtgta

SEQ ID NO: 557598 - DNA, 33 bp, Homo sapien
ccattcggtaaatggagtcaattaaaatgtgta

SEQ ID NO: 557599 - DNA, 33 bp, Homo sapien
gttcaagcgtgtctgaaacaaattaaatataat

SEQ ID NO: 557600 - DNA, 33 bp, Homo sapien
gttcaagcgtgtctgatacaaattaaatataat

SEQ ID NO: 557601 - DNA, 33 bp, Homo sapien
gaggttatttttgcaacgtattctgtgccattt

SEQ ID NO: 557602 - DNA, 33 bp, Homo sapien
gaggttatttttgcaatgtattctgtgccattt

SEQ ID NO: 557603 - DNA, 33 bp, Homo sapien
ggttagtccaaataaagtgtgcagtttaggtca

SEQ ID NO: 557604 - DNA, 33 bp, Homo sapien
ggttagtccaaataaattgtgcagtttaggtca

SEQ ID NO: 557605 - DNA, 33 bp, Homo sapien
ggaaacatgtgaactaggacttgatctaggtcc

SEQ ID NO: 557606 - DNA, 33 bp, Homo sapien
ggaaacatgtgaactatgacttgatctaggtcc

SEQ ID NO: 557607 - DNA, 33 bp, Homo sapien
tctagaatgtgcatttaaaaaatatgttaacat

SEQ ID NO: 557608 - DNA, 33 bp, Homo sapien
tctagaatgtgcattttaaaaatatgttaacat

SEQ ID NO: 557609 - DNA, 33 bp, Homo sapien
tttattctttctgtgccaccttattgcagatca

SEQ ID NO: 557610 - DNA, 33 bp, Homo sapien
tttattctttctgtgctaccttattgcagatca

SEQ ID NO: 557611 - DNA, 33 bp, Homo sapien
gaactgttgcttgctccagctctaaagaaccta

SEQ ID NO: 557612 - DNA, 33 bp, Homo sapien
gaactgttgcttgctctagctctaaagaaccta

SEQ ID NO: 557613 - DNA, 33 bp, Homo sapien
tggagcagaacctgcaactaacaagatccccag

SEQ ID NO: 557614 - DNA, 33 bp, Homo sapien
tggagcagaacctgcacctaacaagatccccag

SEQ ID NO: 557615 - DNA, 33 bp, Homo sapien
tgaaatccacacggcaacctcacatttggaagc

SEQ ID NO: 557616 - DNA, 33 bp, Homo sapien
tgaaatccacacggcatcctcacatttggaagc

SEQ ID NO: 557617 - DNA, 33 bp, Homo sapien
aggcctaaagaccccaaaagatctgtctcccac

SEQ ID NO: 557618 - DNA, 33 bp, Homo sapien
aggcctaaagaccccagaagatctgtctcccac

SEQ ID NO: 557619 - DNA, 33 bp, Homo sapien
gtgatggtagagctgaatacccagagtgattgg

SEQ ID NO: 557620 - DNA, 33 bp, Homo sapien
gtgatggtagagctgagtacccagagtgattgg

SEQ ID NO: 557621 - DNA, 33 bp, Homo sapien
attgcagtctcaggaactatccctactgtcagt

SEQ ID NO: 557622 - DNA, 33 bp, Homo sapien
attgcagtctcaggaagtatccctactgtcagt

SEQ ID NO: 557623 - DNA, 33 bp, Homo sapien
ttgttgacatttttgtcaattttcctgattatt

SEQ ID NO: 557624 - DNA, 33 bp, Homo sapien
ttgttgacatttttgttaattttcctgattatt

SEQ ID NO: 557625 - DNA, 33 bp, Homo sapien
atgcaataaagtaatacgaagccatgaaaaagc

SEQ ID NO: 557626 - DNA, 33 bp, Homo sapien
atgcaataaagtaatatgaagccatgaaaaagc

SEQ ID NO: 557627 - DNA, 33 bp, Homo sapien
acttcacgcttgttctcaactctgctaaatttc

SEQ ID NO: 557628 - DNA, 33 bp, Homo sapien
acttcacgcttgttcttaactctgctaaatttc

SEQ ID NO: 557629 - DNA, 33 bp, Homo sapien
atagtatgccactaccacccaactcacattaaa

SEQ ID NO: 557630 - DNA, 33 bp, Homo sapien
atagtatgccactaccgcccaactcacattaaa

SEQ ID NO: 557631 - DNA, 33 bp, Homo sapien
aattttgtctactgaacctccaggagacagaat

SEQ ID NO: 557632 - DNA, 33 bp, Homo sapien
aattttgtctactgaagctccaggagacagaat

SEQ ID NO: 557633 - DNA, 33 bp, Homo sapien
ttattattgctcccacaaagggatgtcaccatt

SEQ ID NO: 557634 - DNA, 33 bp, Homo sapien
ttattattgctcccactaagggatgtcaccatt

SEQ ID NO: 557635 - DNA, 33 bp, Homo sapien
tgtctgtaaatgataccctgtaggaaaaaccaa

SEQ ID NO: 557636 - DNA, 33 bp, Homo sapien
tgtctgtaaatgatactctgtaggaaaaaccaa

SEQ ID NO: 557637 - DNA, 33 bp, Homo sapien
agtggcaagagcatcaccagggagcacattaga

SEQ ID NO: 557638 - DNA, 33 bp, Homo sapien
agtggcaagagcatcatcagggagcacattaga

SEQ ID NO: 557639 - DNA, 33 bp, Homo sapien
agaaactctgagctgacgacctggctttctaga

SEQ ID NO: 557640 - DNA, 33 bp, Homo sapien
agaaactctgagctgatgacctggctttctaga

SEQ ID NO: 557641 - DNA, 33 bp, Homo sapien
ttgagactaagctggagaactcacagaccttct

SEQ ID NO: 557642 - DNA, 33 bp, Homo sapien
ttgagactaagctggataactcacagaccttct

SEQ ID NO: 557643 - DNA, 33 bp, Homo sapien
gtgctgtttcccttccacctactgcctttatcc

SEQ ID NO: 557644 - DNA, 33 bp, Homo sapien
gtgctgtttcccttccgcctactgcctttatcc

SEQ ID NO: 557645 - DNA, 33 bp, Homo sapien
tttcagctaaatagagacgttgcaggagacccc

SEQ ID NO: 557646 - DNA, 33 bp, Homo sapien
tttcagctaaatagaggcgttgcaggagacccc

SEQ ID NO: 557647 - DNA, 33 bp, Homo sapien
catctagacagcttgacaaatggcatgactaca

SEQ ID NO: 557648 - DNA, 33 bp, Homo sapien
catctagacagcttgataaatggcatgactaca

SEQ ID NO: 557649 - DNA, 33 bp, Homo sapien
cagaattgacaaatgggaatctcagacttctag

SEQ ID NO: 557650 - DNA, 33 bp, Homo sapien
cagaattgacaaatggtaatctcagacttctag

SEQ ID NO: 557651 - DNA, 33 bp, Homo sapien
tgtagtttgctctaaactgagccagaataaata

SEQ ID NO: 557652 - DNA, 33 bp, Homo sapien
tgtagtttgctctaaattgagccagaataaata

SEQ ID NO: 557653 - DNA, 33 bp, Homo sapien
catctagagttcccaacatttttaccatcctgc

SEQ ID NO: 557654 - DNA, 33 bp, Homo sapien
catctagagttcccaagatttttaccatcctgc

SEQ ID NO: 557655 - DNA, 33 bp, Homo sapien
tgtttctccagaattcagaactctactggaaag

SEQ ID NO: 557656 - DNA, 33 bp, Homo sapien
tgtttctccagaattcggaactctactggaaag

SEQ ID NO: 557657 - DNA, 33 bp, Homo sapien
tagcaatgagatattcaattcagtccttgagtg

SEQ ID NO: 557658 - DNA, 33 bp, Homo sapien
tagcaatgagatattcgattcagtccttgagtg

SEQ ID NO: 557659 - DNA, 33 bp, Homo sapien
tcaaggcaacttgtgactaaccgtgttttcttt

SEQ ID NO: 557660 - DNA, 33 bp, Homo sapien
tcaaggcaacttgtgattaaccgtgttttcttt

SEQ ID NO: 557661 - DNA, 33 bp, Homo sapien
ggccaatagacaatagaaatctttgaaacagcc

SEQ ID NO: 557662 - DNA, 33 bp, Homo sapien
ggccaatagacaatagcaatctttgaaacagcc

SEQ ID NO: 557663 - DNA, 33 bp, Homo sapien
aacacacacatccaaaacactttaaagcaacta

SEQ ID NO: 557664 - DNA, 33 bp, Homo sapien
aacacacacatccaaaccactttaaagcaacta

SEQ ID NO: 557665 - DNA, 33 bp, Homo sapien
tgtgtgtgtgactcttcaaaatctgaaaatatt

SEQ ID NO: 557666 - DNA, 33 bp, Homo sapien
tgtgtgtgtgactctttaaaatctgaaaatatt

SEQ ID NO: 557667 - DNA, 33 bp, Homo sapien
tcatgtgtttgccaaaagataatgttttctatt

SEQ ID NO: 557668 - DNA, 33 bp, Homo sapien
tcatgtgtttgccaaaggataatgttttctatt

SEQ ID NO: 557669 - DNA, 33 bp, Homo sapien
tatattttttcaccaaagaagatttgcactcac

SEQ ID NO: 557670 - DNA, 33 bp, Homo sapien
tatattttttcaccaatgaagatttgcactcac

SEQ ID NO: 557671 - DNA, 33 bp, Homo sapien
actgagggactgtagaaatacgaatgatcatga

SEQ ID NO: 557672 - DNA, 33 bp, Homo sapien
actgagggactgtagatatacgaatgatcatga

SEQ ID NO: 557673 - DNA, 33 bp, Homo sapien
gaacagagaatttctgcacatctacataccaaa

SEQ ID NO: 557674 - DNA, 33 bp, Homo sapien
gaacagagaatttctggacatctacataccaaa

SEQ ID NO: 557675 - DNA, 33 bp, Homo sapien
tctcacatcagtgtgcacttattcatagatcac

SEQ ID NO: 557676 - DNA, 33 bp, Homo sapien
tctcacatcagtgtgcgcttattcatagatcac

SEQ ID NO: 557677 - DNA, 33 bp, Homo sapien
agttttataccatattcaactattgatatttga

SEQ ID NO: 557678 - DNA, 33 bp, Homo sapien
agttttataccatattgaactattgatatttga

SEQ ID NO: 557679 - DNA, 33 bp, Homo sapien
tgtactgctaagcctcaaaaatccaagctgaaa

SEQ ID NO: 557680 - DNA, 33 bp, Homo sapien
tgtactgctaagcctcgaaaatccaagctgaaa

SEQ ID NO: 557681 - DNA, 33 bp, Homo sapien
taaaggctattgccaacgtttccagagctttca

SEQ ID NO: 557682 - DNA, 33 bp, Homo sapien
taaaggctattgccaatgtttccagagctttca

SEQ ID NO: 557683 - DNA, 33 bp, Homo sapien
tctggagtgttttgtaaatggatttgaagactt

SEQ ID NO: 557684 - DNA, 33 bp, Homo sapien
tctggagtgttttgtagatggatttgaagactt

SEQ ID NO: 557685 - DNA, 33 bp, Homo sapien
caaggagtccagaatcccttgattttcagacat

SEQ ID NO: 557686 - DNA, 33 bp, Homo sapien
caaggagtccagaatctcttgattttcagacat

SEQ ID NO: 557687 - DNA, 33 bp, Homo sapien
cttctcctcttgtccacggtgctgtgaatttaa

SEQ ID NO: 557688 - DNA, 33 bp, Homo sapien
cttctcctcttgtccagggtgctgtgaatttaa

SEQ ID NO: 557689 - DNA, 33 bp, Homo sapien
ttttaatgccagaatccgacttatgaattcact

SEQ ID NO: 557690 - DNA, 33 bp, Homo sapien
ttttaatgccagaatctgacttatgaattcact

SEQ ID NO: 557691 - DNA, 33 bp, Homo sapien
atattttattggcctaggaatggtaaggtcaga

SEQ ID NO: 557692 - DNA, 33 bp, Homo sapien
atattttattggcctatgaatggtaaggtcaga

SEQ ID NO: 557693 - DNA, 33 bp, Homo sapien
ttatacttactcagggaactggagggttatatg

SEQ ID NO: 557694 - DNA, 33 bp, Homo sapien
ttatacttactcagggtactggagggttatatg

SEQ ID NO: 557695 - DNA, 33 bp, Homo sapien
gggagtcacctgtgggccaggctttcgattctg

SEQ ID NO: 557696 - DNA, 33 bp, Homo sapien
gggagtcacctgtgggtcaggctttcgattctg

SEQ ID NO: 557697 - DNA, 33 bp, Homo sapien
agttgtcttgattacaaaggcccacatccctca

SEQ ID NO: 557698 - DNA, 33 bp, Homo sapien
agttgtcttgattacagaggcccacatccctca

SEQ ID NO: 557699 - DNA, 33 bp, Homo sapien
aagtaccctcatgtcgccagctggacaacctta

SEQ ID NO: 557700 - DNA, 33 bp, Homo sapien
aagtaccctcatgtcggcagctggacaacctta

SEQ ID NO: 557701 - DNA, 33 bp, Homo sapien
ctgtaaaaaactaatacgctaacaacgaattct

SEQ ID NO: 557702 - DNA, 33 bp, Homo sapien
ctgtaaaaaactaatatgctaacaacgaattct

SEQ ID NO: 557703 - DNA, 33 bp, Homo sapien
gaaggtctgaatagaaaaaaggttaacattccc

SEQ ID NO: 557704 - DNA, 33 bp, Homo sapien
gaaggtctgaatagaacaaaggttaacattccc

SEQ ID NO: 557705 - DNA, 33 bp, Homo sapien
ggaaagaatgtgacaacggtggagaccctgaaa

SEQ ID NO: 557706 - DNA, 33 bp, Homo sapien
ggaaagaatgtgacaatggtggagaccctgaaa

SEQ ID NO: 557707 - DNA, 33 bp, Homo sapien
caggacaggctagtaaaacaagatatgcctgga

SEQ ID NO: 557708 - DNA, 33 bp, Homo sapien
caggacaggctagtaacacaagatatgcctgga

SEQ ID NO: 557709 - DNA, 33 bp, Homo sapien
tttgctctctgtaagcagaaaatttctatgtca

SEQ ID NO: 557710 - DNA, 33 bp, Homo sapien
tttgctctctgtaagctgaaaatttctatgtca

SEQ ID NO: 557711 - DNA, 33 bp, Homo sapien
aggaaagactcctgtacattactgaaaatttat

SEQ ID NO: 557712 - DNA, 33 bp, Homo sapien
aggaaagactcctgtatattactgaaaatttat

SEQ ID NO: 557713 - DNA, 33 bp, Homo sapien
tttagagactcatgaacttcactgtgagatgga

SEQ ID NO: 557714 - DNA, 33 bp, Homo sapien
tttagagactcatgaagttcactgtgagatgga

SEQ ID NO: 557715 - DNA, 33 bp, Homo sapien
atggagagtaacatggaaagtttaaccaggtgg

SEQ ID NO: 557716 - DNA, 33 bp, Homo sapien
atggagagtaacatgggaagtttaaccaggtgg

SEQ ID NO: 557717 - DNA, 33 bp, Homo sapien
ggtaagtgactggtcacaaaaatcacaggtaat

SEQ ID NO: 557718 - DNA, 33 bp, Homo sapien
ggtaagtgactggtcagaaaaatcacaggtaat

SEQ ID NO: 557719 - DNA, 33 bp, Homo sapien
tcaacagaacaaagaactaagagagctgttgat

SEQ ID NO: 557720 - DNA, 33 bp, Homo sapien
tcaacagaacaaagaattaagagagctgttgat

SEQ ID NO: 557721 - DNA, 33 bp, Homo sapien
aagatcaattagcacaagtgtaagagtggagat

SEQ ID NO: 557722 - DNA, 33 bp, Homo sapien
aagatcaattagcacacgtgtaagagtggagat

SEQ ID NO: 557723 - DNA, 33 bp, Homo sapien
ttgagaacttaaatttcaaactgcagagtctga

SEQ ID NO: 557724 - DNA, 33 bp, Homo sapien
ttgagaacttaaatttgaaactgcagagtctga

SEQ ID NO: 557725 - DNA, 33 bp, Homo sapien
tattcagataaaacaaagaaatgatgacatcag

SEQ ID NO: 557726 - DNA, 33 bp, Homo sapien
tattcagataaaacaaggaaatgatgacatcag

SEQ ID NO: 557727 - DNA, 33 bp, Homo sapien
atttgataaaaggtagacaatagccactaaaat

SEQ ID NO: 557728 - DNA, 33 bp, Homo sapien
atttgataaaaggtaggcaatagccactaaaat

SEQ ID NO: 557729 - DNA, 33 bp, Homo sapien
ataaagtgcttcatggcaatgcaaaatcttcta

SEQ ID NO: 557730 - DNA, 33 bp, Homo sapien
ataaagtgcttcatggtaatgcaaaatcttcta

SEQ ID NO: 557731 - DNA, 33 bp, Homo sapien
aaatttgccaaagccaagagatcctaactttga

SEQ ID NO: 557732 - DNA, 33 bp, Homo sapien
aaatttgccaaagccaggagatcctaactttga

SEQ ID NO: 557733 - DNA, 33 bp, Homo sapien
taggccagtaatttgacgcagtggtatccaaac

SEQ ID NO: 557734 - DNA, 33 bp, Homo sapien
taggccagtaatttgatgcagtggtatccaaac

SEQ ID NO: 557735 - DNA, 33 bp, Homo sapien
ttttcattctaacatccgaaaaaataggaataa

SEQ ID NO: 557736 - DNA, 33 bp, Homo sapien
ttttcattctaacatctgaaaaaataggaataa

SEQ ID NO: 557737 - DNA, 33 bp, Homo sapien
tctttgaatatttcaaataaagcaaggaaacat

SEQ ID NO: 557738 - DNA, 33 bp, Homo sapien
tctttgaatatttcaattaaagcaaggaaacat

SEQ ID NO: 557739 - DNA, 33 bp, Homo sapien
aggtagaggtcttatgaagtgctggtattgatc

SEQ ID NO: 557740 - DNA, 33 bp, Homo sapien
aggtagaggtcttatggagtgctggtattgatc

SEQ ID NO: 557741 - DNA, 33 bp, Homo sapien
gcaagtgtcagggtaacacagtctttcatatat

SEQ ID NO: 557742 - DNA, 33 bp, Homo sapien
gcaagtgtcagggtaatacagtctttcatatat

SEQ ID NO: 557743 - DNA, 33 bp, Homo sapien
caatagttgatattaacgtcagacttcctaata

SEQ ID NO: 557744 - DNA, 33 bp, Homo sapien
caatagttgatattaatgtcagacttcctaata

SEQ ID NO: 557745 - DNA, 33 bp, Homo sapien
tcatccaatttgaagccaatgattgttagtgcc

SEQ ID NO: 557746 - DNA, 33 bp, Homo sapien
tcatccaatttgaagctaatgattgttagtgcc

SEQ ID NO: 557747 - DNA, 33 bp, Homo sapien
tacatatctcagcataacaccttattattttat

SEQ ID NO: 557748 - DNA, 33 bp, Homo sapien
tacatatctcagcatagcaccttattattttat

SEQ ID NO: 557749 - DNA, 33 bp, Homo sapien
catgtcaaccaagaaccagaacaggcttgttag

SEQ ID NO: 557750 - DNA, 33 bp, Homo sapien
catgtcaaccaagaactagaacaggcttgttag

SEQ ID NO: 557751 - DNA, 33 bp, Homo sapien
agatttttcctgtcaccggtaagattagctgta

SEQ ID NO: 557752 - DNA, 33 bp, Homo sapien
agatttttcctgtcactggtaagattagctgta

SEQ ID NO: 557753 - DNA, 33 bp, Homo sapien
aatgtttatgccataaggatggcctcttaaatt

SEQ ID NO: 557754 - DNA, 33 bp, Homo sapien
aatgtttatgccataatgatggcctcttaaatt

SEQ ID NO: 557755 - DNA, 33 bp, Homo sapien
ttcatcaactggaaacacttatgttggactatt

SEQ ID NO: 557756 - DNA, 33 bp, Homo sapien
ttcatcaactggaaactcttatgttggactatt

SEQ ID NO: 557757 - DNA, 33 bp, Homo sapien
aaaactggaataaggaaaaatcatagcttaaaa

SEQ ID NO: 557758 - DNA, 33 bp, Homo sapien
aaaactggaataaggagaaatcatagcttaaaa

SEQ ID NO: 557759 - DNA, 33 bp, Homo sapien
tttatgtcagcactggaatactttctccttatg

SEQ ID NO: 557760 - DNA, 33 bp, Homo sapien
tttatgtcagcactgggatactttctccttatg

SEQ ID NO: 557761 - DNA, 33 bp, Homo sapien
atggggaaatgcaacaataataccaaataacag

SEQ ID NO: 557762 - DNA, 33 bp, Homo sapien
atggggaaatgcaacagtaataccaaataacag

SEQ ID NO: 557763 - DNA, 33 bp, Homo sapien
atttggatctacttagcattttgcctacctcgt

SEQ ID NO: 557764 - DNA, 33 bp, Homo sapien
atttggatctacttagtattttgcctacctcgt

SEQ ID NO: 557765 - DNA, 33 bp, Homo sapien
agagtgttcaaaataccatttattgacaaatgc

SEQ ID NO: 557766 - DNA, 33 bp, Homo sapien
agagtgttcaaaatactatttattgacaaatgc

SEQ ID NO: 557767 - DNA, 33 bp, Homo sapien
tacccagtcccaataaattaaagcaaaaactgt

SEQ ID NO: 557768 - DNA, 33 bp, Homo sapien
tacccagtcccaataatttaaagcaaaaactgt

SEQ ID NO: 557769 - DNA, 33 bp, Homo sapien
cagttcatagactcatcaacttagcaaatgctt

SEQ ID NO: 557770 - DNA, 33 bp, Homo sapien
cagttcatagactcattaacttagcaaatgctt

SEQ ID NO: 557771 - DNA, 33 bp, Homo sapien
ctgtgcaagtgaaacaaggtgttaggtgggaat

SEQ ID NO: 557772 - DNA, 33 bp, Homo sapien
ctgtgcaagtgaaacagggtgttaggtgggaat

SEQ ID NO: 557773 - DNA, 33 bp, Homo sapien
tctggctccgttccaaaaaagccccatccatca

SEQ ID NO: 557774 - DNA, 33 bp, Homo sapien
tctggctccgttccaacaaagccccatccatca

SEQ ID NO: 557775 - DNA, 33 bp, Homo sapien
ctcgtatgtgccaacacggagagtagggccctg

SEQ ID NO: 557776 - DNA, 33 bp, Homo sapien
ctcgtatgtgccaacatggagagtagggccctg

SEQ ID NO: 557777 - DNA, 33 bp, Homo sapien
ggacataaatatggcaatgattgacactgggga

SEQ ID NO: 557778 - DNA, 33 bp, Homo sapien
ggacataaatatggcagtgattgacactgggga

SEQ ID NO: 557779 - DNA, 33 bp, Homo sapien
tttgagtgcaaatagtcaattcaaacagcacac

SEQ ID NO: 557780 - DNA, 33 bp, Homo sapien
tttgagtgcaaatagtgaattcaaacagcacac

SEQ ID NO: 557781 - DNA, 33 bp, Homo sapien
ggagatgaatttgtaccgaaatctctattaaaa

SEQ ID NO: 557782 - DNA, 33 bp, Homo sapien
ggagatgaatttgtactgaaatctctattaaaa

SEQ ID NO: 557783 - DNA, 33 bp, Homo sapien
gagattcccatgttgaccactgatttttcttct

SEQ ID NO: 557784 - DNA, 33 bp, Homo sapien
gagattcccatgttgatcactgatttttcttct

SEQ ID NO: 557785 - DNA, 33 bp, Homo sapien
gacctactgaattagaatccacattttaataag

SEQ ID NO: 557786 - DNA, 33 bp, Homo sapien
gacctactgaattagagtccacattttaataag

SEQ ID NO: 557787 - DNA, 33 bp, Homo sapien
caaattttggtttaaccatgttcttctaaccca

SEQ ID NO: 557788 - DNA, 33 bp, Homo sapien
caaattttggtttaactatgttcttctaaccca

SEQ ID NO: 557789 - DNA, 33 bp, Homo sapien
taaatgttcataagcactctgttcaaggttgag

SEQ ID NO: 557790 - DNA, 33 bp, Homo sapien
taaatgttcataagcagtctgttcaaggttgag

SEQ ID NO: 557791 - DNA, 33 bp, Homo sapien
acctggaacacacaaccaagaaatgtcatggga

SEQ ID NO: 557792 - DNA, 33 bp, Homo sapien
acctggaacacacaactaagaaatgtcatggga

SEQ ID NO: 557793 - DNA, 33 bp, Homo sapien
agaaatatgacaggataaaaagaagagtctgag

SEQ ID NO: 557794 - DNA, 33 bp, Homo sapien
agaaatatgacaggatgaaaagaagagtctgag

SEQ ID NO: 557795 - DNA, 33 bp, Homo sapien
aaaagaccttgataacggagtggttaatatgct

SEQ ID NO: 557796 - DNA, 33 bp, Homo sapien
aaaagaccttgataactgagtggttaatatgct

SEQ ID NO: 557797 - DNA, 33 bp, Homo sapien
cccagtcctaccaccagaatagcctttttacac

SEQ ID NO: 557798 - DNA, 33 bp, Homo sapien
cccagtcctaccaccataatagcctttttacac

SEQ ID NO: 557799 - DNA, 33 bp, Homo sapien
gcaattccctcactcactattgtcttacacatg

SEQ ID NO: 557800 - DNA, 33 bp, Homo sapien
gcaattccctcactcattattgtcttacacatg

SEQ ID NO: 557801 - DNA, 33 bp, Homo sapien
aaatttgtccatttcacccagctgaggactcag

SEQ ID NO: 557802 - DNA, 33 bp, Homo sapien
aaatttgtccatttcatccagctgaggactcag

SEQ ID NO: 557803 - DNA, 33 bp, Homo sapien
aggagagtagttgcagccatttttacaaataat

SEQ ID NO: 557804 - DNA, 33 bp, Homo sapien
aggagagtagttgcaggcatttttacaaataat

SEQ ID NO: 557805 - DNA, 33 bp, Homo sapien
ttttctctctaattcccctcaaggacagttcca

SEQ ID NO: 557806 - DNA, 33 bp, Homo sapien
ttttctctctaattccgctcaaggacagttcca

SEQ ID NO: 557807 - DNA, 33 bp, Homo sapien
tatcagatttctctcactgacttaattctgcaa

SEQ ID NO: 557808 - DNA, 33 bp, Homo sapien
tatcagatttctctcattgacttaattctgcaa

SEQ ID NO: 557809 - DNA, 33 bp, Homo sapien
ctgccttttcatgtccagcttctgttcccacca

SEQ ID NO: 557810 - DNA, 33 bp, Homo sapien
ctgccttttcatgtccggcttctgttcccacca

SEQ ID NO: 557811 - DNA, 33 bp, Homo sapien
caataaaaatttgtcacgtaactgaatgataaa

SEQ ID NO: 557812 - DNA, 33 bp, Homo sapien
caataaaaatttgtcatgtaactgaatgataaa

SEQ ID NO: 557813 - DNA, 33 bp, Homo sapien
cagattgaaggcccacaatgtcaatgtgtcact

SEQ ID NO: 557814 - DNA, 33 bp, Homo sapien
cagattgaaggcccacgatgtcaatgtgtcact

SEQ ID NO: 557815 - DNA, 33 bp, Homo sapien
tagcttggaatggccaaatacagatcaggaaag

SEQ ID NO: 557816 - DNA, 33 bp, Homo sapien
tagcttggaatggccagatacagatcaggaaag

SEQ ID NO: 557817 - DNA, 33 bp, Homo sapien
aaaatagtaccttgcaatcctaacacgatctat

SEQ ID NO: 557818 - DNA, 33 bp, Homo sapien
aaaatagtaccttgcattcctaacacgatctat

SEQ ID NO: 557819 - DNA, 33 bp, Homo sapien
tggcccaagacctggccgaggaatagaagtaag

SEQ ID NO: 557820 - DNA, 33 bp, Homo sapien
tggcccaagacctggctgaggaatagaagtaag

SEQ ID NO: 557821 - DNA, 33 bp, Homo sapien
ttccttgccataaactcaccctcagagggaacc

SEQ ID NO: 557822 - DNA, 33 bp, Homo sapien
ttccttgccataaacttaccctcagagggaacc

SEQ ID NO: 557823 - DNA, 33 bp, Homo sapien
atttcatacagcttaacggaaaatgtgaagctc

SEQ ID NO: 557824 - DNA, 33 bp, Homo sapien
atttcatacagcttaatggaaaatgtgaagctc

SEQ ID NO: 557825 - DNA, 33 bp, Homo sapien
gggaaacagaatccaaccataaatacatctttc

SEQ ID NO: 557826 - DNA, 33 bp, Homo sapien
gggaaacagaatccaatcataaatacatctttc

SEQ ID NO: 557827 - DNA, 33 bp, Homo sapien
ctagtgcttggcaaacaatggcccactaaccaa

SEQ ID NO: 557828 - DNA, 33 bp, Homo sapien
ctagtgcttggcaaacgatggcccactaaccaa

SEQ ID NO: 557829 - DNA, 33 bp, Homo sapien
catgcccatgagttgacaaaaccccaaggatga

SEQ ID NO: 557830 - DNA, 33 bp, Homo sapien
catgcccatgagttgataaaaccccaaggatga

SEQ ID NO: 557831 - DNA, 33 bp, Homo sapien
ctgtactaggaaattcaaccctgaaggaaataa

SEQ ID NO: 557832 - DNA, 33 bp, Homo sapien
ctgtactaggaaattcgaccctgaaggaaataa

SEQ ID NO: 557833 - DNA, 33 bp, Homo sapien
aacataacacaaatctaaaacagtgtcttactt

SEQ ID NO: 557834 - DNA, 33 bp, Homo sapien
aacataacacaaatctcaaacagtgtcttactt

SEQ ID NO: 557835 - DNA, 33 bp, Homo sapien
actggaaaatcatgtacaagggggtctagctag

SEQ ID NO: 557836 - DNA, 33 bp, Homo sapien
actggaaaatcatgtataagggggtctagctag

SEQ ID NO: 557837 - DNA, 33 bp, Homo sapien
ttgccctttgaaactccaagagaagttcaaaga

SEQ ID NO: 557838 - DNA, 33 bp, Homo sapien
ttgccctttgaaactcgaagagaagttcaaaga

SEQ ID NO: 557839 - DNA, 33 bp, Homo sapien
aaaatcttaggctttagagtctaccacccacaa

SEQ ID NO: 557840 - DNA, 33 bp, Homo sapien
aaaatcttaggctttatagtctaccacccacaa

SEQ ID NO: 557841 - DNA, 33 bp, Homo sapien
agcattatcactagacaaacctaactaatacac

SEQ ID NO: 557842 - DNA, 33 bp, Homo sapien
agcattatcactagaccaacctaactaatacac

SEQ ID NO: 557843 - DNA, 33 bp, Homo sapien
tcttcctttctgatctgatcttgtgctgctcct

SEQ ID NO: 557844 - DNA, 33 bp, Homo sapien
tcttcctttctgatcttatcttgtgctgctcct

SEQ ID NO: 557845 - DNA, 33 bp, Homo sapien
ggcctttgcattcccaccagagatggagtttga

SEQ ID NO: 557846 - DNA, 33 bp, Homo sapien
ggcctttgcattcccatcagagatggagtttga

SEQ ID NO: 557847 - DNA, 33 bp, Homo sapien
tttaatttaagataaaagaccgtatttctaagc

SEQ ID NO: 557848 - DNA, 33 bp, Homo sapien
tttaatttaagataaaggaccgtatttctaagc

SEQ ID NO: 557849 - DNA, 33 bp, Homo sapien
gttcctacttggactgaagtttgtttattctgc

SEQ ID NO: 557850 - DNA, 33 bp, Homo sapien
gttcctacttggactgcagtttgtttattctgc

SEQ ID NO: 557851 - DNA, 33 bp, Homo sapien
aaggaagagctgcataacccttacattaaacca

SEQ ID NO: 557852 - DNA, 33 bp, Homo sapien
aaggaagagctgcatatcccttacattaaacca

SEQ ID NO: 557853 - DNA, 33 bp, Homo sapien
catgccaacatataaaacttcaaatcaaaaggt

SEQ ID NO: 557854 - DNA, 33 bp, Homo sapien
catgccaacatataaagcttcaaatcaaaaggt

SEQ ID NO: 557855 - DNA, 33 bp, Homo sapien
cctgtagcgttcatgaagtgagagtcaaggact

SEQ ID NO: 557856 - DNA, 33 bp, Homo sapien
cctgtagcgttcatgatgtgagagtcaaggact

SEQ ID NO: 557857 - DNA, 33 bp, Homo sapien
tggaatccagccattccacagtctaatggagag

SEQ ID NO: 557858 - DNA, 33 bp, Homo sapien
tggaatccagccattctacagtctaatggagag

SEQ ID NO: 557859 - DNA, 33 bp, Homo sapien
aggttgaactggaaaaggttatttcaactttag

SEQ ID NO: 557860 - DNA, 33 bp, Homo sapien
aggttgaactggaaaatgttatttcaactttag

SEQ ID NO: 557861 - DNA, 33 bp, Homo sapien
gtcacgtttatatggaacttcaccatttcaaat

SEQ ID NO: 557862 - DNA, 33 bp, Homo sapien
gtcacgtttatatggagcttcaccatttcaaat

SEQ ID NO: 557863 - DNA, 33 bp, Homo sapien
agctttgaatgaagcccaacaagaatttgtaaa

SEQ ID NO: 557864 - DNA, 33 bp, Homo sapien
agctttgaatgaagcctaacaagaatttgtaaa

SEQ ID NO: 557865 - DNA, 33 bp, Homo sapien
aactttaaaccacaaactaccatctcagagtac

SEQ ID NO: 557866 - DNA, 33 bp, Homo sapien
aactttaaaccacaaagtaccatctcagagtac

SEQ ID NO: 557867 - DNA, 33 bp, Homo sapien
atatgcattgagtagaaaccacctgtgtgcaaa

SEQ ID NO: 557868 - DNA, 33 bp, Homo sapien
atatgcattgagtagataccacctgtgtgcaaa

SEQ ID NO: 557869 - DNA, 33 bp, Homo sapien
taaaatgtaagccctcccttgcaatcctctttg

SEQ ID NO: 557870 - DNA, 33 bp, Homo sapien
taaaatgtaagccctctcttgcaatcctctttg

SEQ ID NO: 557871 - DNA, 33 bp, Homo sapien
gaactcaccaatagaacgtctttgagctagtgt

SEQ ID NO: 557872 - DNA, 33 bp, Homo sapien
gaactcaccaatagaatgtctttgagctagtgt

SEQ ID NO: 557873 - DNA, 33 bp, Homo sapien
aatcagccatctcatacattaggtccaaactca

SEQ ID NO: 557874 - DNA, 33 bp, Homo sapien
aatcagccatctcatagattaggtccaaactca

SEQ ID NO: 557875 - DNA, 33 bp, Homo sapien
atagttcatagatgtacccttctctggagagct

SEQ ID NO: 557876 - DNA, 33 bp, Homo sapien
atagttcatagatgtatccttctctggagagct

SEQ ID NO: 557877 - DNA, 33 bp, Homo sapien
tcctgagcgcttgaaacatgactagtatgacta

SEQ ID NO: 557878 - DNA, 33 bp, Homo sapien
tcctgagcgcttgaaatatgactagtatgacta

SEQ ID NO: 557879 - DNA, 33 bp, Homo sapien
atcagtgctctcatctcaaaagtggggacaata

SEQ ID NO: 557880 - DNA, 33 bp, Homo sapien
atcagtgctctcatctgaaaagtggggacaata

SEQ ID NO: 557881 - DNA, 33 bp, Homo sapien
tatacaaaatgaaaaccgaatgataataataaa

SEQ ID NO: 557882 - DNA, 33 bp, Homo sapien
tatacaaaatgaaaactgaatgataataataaa

SEQ ID NO: 557883 - DNA, 33 bp, Homo sapien
caaggcaaatgcataactgatgatacctccacc

SEQ ID NO: 557884 - DNA, 33 bp, Homo sapien
caaggcaaatgcataattgatgatacctccacc

SEQ ID NO: 557885 - DNA, 33 bp, Homo sapien
gagtcagtgaagcaaacagggcttcagaataat

SEQ ID NO: 557886 - DNA, 33 bp, Homo sapien
gagtcagtgaagcaaatagggcttcagaataat

SEQ ID NO: 557887 - DNA, 33 bp, Homo sapien
agaattgctaaaatgtaacaacgagacacagag

SEQ ID NO: 557888 - DNA, 33 bp, Homo sapien
agaattgctaaaatgtgacaacgagacacagag

SEQ ID NO: 557889 - DNA, 33 bp, Homo sapien
gtactggttaccaacacagtaaatagtacaaga

SEQ ID NO: 557890 - DNA, 33 bp, Homo sapien
gtactggttaccaacatagtaaatagtacaaga

SEQ ID NO: 557891 - DNA, 33 bp, Homo sapien
aggttgcgcactgcataaggatactcagtcaat

SEQ ID NO: 557892 - DNA, 33 bp, Homo sapien
aggttgcgcactgcatgaggatactcagtcaat

SEQ ID NO: 557893 - DNA, 33 bp, Homo sapien
taaaatttaagcaggactaccacatacagtagg

SEQ ID NO: 557894 - DNA, 33 bp, Homo sapien
taaaatttaagcaggattaccacatacagtagg

SEQ ID NO: 557895 - DNA, 33 bp, Homo sapien
cttctagagtatctaccggaagcccagagaaaa

SEQ ID NO: 557896 - DNA, 33 bp, Homo sapien
cttctagagtatctactggaagcccagagaaaa

SEQ ID NO: 557897 - DNA, 33 bp, Homo sapien
cacttcaagaattaagacatctaatagggcttg

SEQ ID NO: 557898 - DNA, 33 bp, Homo sapien
cacttcaagaattaaggcatctaatagggcttg

SEQ ID NO: 557899 - DNA, 33 bp, Homo sapien
taccacacacatcagagtccataaaactagccc

SEQ ID NO: 557900 - DNA, 33 bp, Homo sapien
taccacacacatcagattccataaaactagccc

SEQ ID NO: 557901 - DNA, 33 bp, Homo sapien
aaacatggagaaatcaacttcaattttaataaa

SEQ ID NO: 557902 - DNA, 33 bp, Homo sapien
aaacatggagaaatcagcttcaattttaataaa

SEQ ID NO: 557903 - DNA, 33 bp, Homo sapien
tatcttaggaaaatacaatgtttactgaaattg

SEQ ID NO: 557904 - DNA, 33 bp, Homo sapien
tatcttaggaaaataccatgtttactgaaattg

SEQ ID NO: 557905 - DNA, 33 bp, Homo sapien
ttctttagctaaccaaatataaaaatgagttta

SEQ ID NO: 557906 - DNA, 33 bp, Homo sapien
ttctttagctaaccaagtataaaaatgagttta

SEQ ID NO: 557907 - DNA, 33 bp, Homo sapien
ttcagagaaaaaccttcgatttatgtccatttc

SEQ ID NO: 557908 - DNA, 33 bp, Homo sapien
ttcagagaaaaaccttggatttatgtccatttc

SEQ ID NO: 557909 - DNA, 33 bp, Homo sapien
gcagcagtaacagtaccctgtatcattcacagt

SEQ ID NO: 557910 - DNA, 33 bp, Homo sapien
gcagcagtaacagtacgctgtatcattcacagt

SEQ ID NO: 557911 - DNA, 33 bp, Homo sapien
ttaggtccctctgtccaaatgcagtcactgggc

SEQ ID NO: 557912 - DNA, 33 bp, Homo sapien
ttaggtccctctgtccgaatgcagtcactgggc

SEQ ID NO: 557913 - DNA, 33 bp, Homo sapien
gatgttaaagttagaactgagactgaaactcag

SEQ ID NO: 557914 - DNA, 33 bp, Homo sapien
gatgttaaagttagaattgagactgaaactcag

SEQ ID NO: 557915 - DNA, 33 bp, Homo sapien
cttcccaatataccgacgctgtagttgcaagta

SEQ ID NO: 557916 - DNA, 33 bp, Homo sapien
cttcccaatataccgatgctgtagttgcaagta

SEQ ID NO: 557917 - DNA, 33 bp, Homo sapien
catcttaacaccatcaaaccccgagggcacagc

SEQ ID NO: 557918 - DNA, 33 bp, Homo sapien
catcttaacaccatcagaccccgagggcacagc

SEQ ID NO: 557919 - DNA, 33 bp, Homo sapien
cctttcccatgaggacaagttcagagggagctt

SEQ ID NO: 557920 - DNA, 33 bp, Homo sapien
cctttcccatgaggacgagttcagagggagctt

SEQ ID NO: 557921 - DNA, 33 bp, Homo sapien
aaaaaaaaatctgtaagcatcacttctagaaat

SEQ ID NO: 557922 - DNA, 33 bp, Homo sapien
aaaaaaaaatctgtaatcatcacttctagaaat

SEQ ID NO: 557923 - DNA, 33 bp, Homo sapien
gaatcatcttcttgcactgagtagtagcatggc

SEQ ID NO: 557924 - DNA, 33 bp, Homo sapien
gaatcatcttcttgcattgagtagtagcatggc

SEQ ID NO: 557925 - DNA, 33 bp, Homo sapien
ggaggtggtttgaagacgtgagattctcgatct

SEQ ID NO: 557926 - DNA, 33 bp, Homo sapien
ggaggtggtttgaagaggtgagattctcgatct

SEQ ID NO: 557927 - DNA, 33 bp, Homo sapien
acagcattccaggtgcgatttccatcattcaaa

SEQ ID NO: 557928 - DNA, 33 bp, Homo sapien
acagcattccaggtgctatttccatcattcaaa

SEQ ID NO: 557929 - DNA, 33 bp, Homo sapien
atgtaaagaaaggaccaattttacttgcctcag

SEQ ID NO: 557930 - DNA, 33 bp, Homo sapien
atgtaaagaaaggaccgattttacttgcctcag

SEQ ID NO: 557931 - DNA, 33 bp, Homo sapien
aaggatttccaacctccagtatatgaaatcaga

SEQ ID NO: 557932 - DNA, 33 bp, Homo sapien
aaggatttccaacctctagtatatgaaatcaga

SEQ ID NO: 557933 - DNA, 33 bp, Homo sapien
atctcattccttcaacaagtaaagttattacca

SEQ ID NO: 557934 - DNA, 33 bp, Homo sapien
atctcattccttcaactagtaaagttattacca

SEQ ID NO: 557935 - DNA, 33 bp, Homo sapien
tctgcctaaaagtgccagaggtatattgtgttt

SEQ ID NO: 557936 - DNA, 33 bp, Homo sapien
tctgcctaaaagtgccggaggtatattgtgttt

SEQ ID NO: 557937 - DNA, 33 bp, Homo sapien
tgaggaaggaattggcaaggtcagcattatgct

SEQ ID NO: 557938 - DNA, 33 bp, Homo sapien
tgaggaaggaattggcgaggtcagcattatgct

SEQ ID NO: 557939 - DNA, 33 bp, Homo sapien
acaatctaaacaaatacagtaggccctccatat

SEQ ID NO: 557940 - DNA, 33 bp, Homo sapien
acaatctaaacaaatagagtaggccctccatat

SEQ ID NO: 557941 - DNA, 33 bp, Homo sapien
gtgttgagtaaatgaacgcacagagttaaattg

SEQ ID NO: 557942 - DNA, 33 bp, Homo sapien
gtgttgagtaaatgaatgcacagagttaaattg

SEQ ID NO: 557943 - DNA, 33 bp, Homo sapien
gcaactgccaaggttcaaaacaaaaagtccagc

SEQ ID NO: 557944 - DNA, 33 bp, Homo sapien
gcaactgccaaggttcgaaacaaaaagtccagc

SEQ ID NO: 557945 - DNA, 33 bp, Homo sapien
cccaagttgtgccaaactaaatacaaatgttat

SEQ ID NO: 557946 - DNA, 33 bp, Homo sapien
cccaagttgtgccaaattaaatacaaatgttat

SEQ ID NO: 557947 - DNA, 33 bp, Homo sapien
agggttgtaacaccagccatgctaaactgagtt

SEQ ID NO: 557948 - DNA, 33 bp, Homo sapien
agggttgtaacaccagtcatgctaaactgagtt

SEQ ID NO: 557949 - DNA, 33 bp, Homo sapien
gctcagaagttctcctaaatcagcataagattt

SEQ ID NO: 557950 - DNA, 33 bp, Homo sapien
gctcagaagttctcctgaatcagcataagattt

SEQ ID NO: 557951 - DNA, 33 bp, Homo sapien
gatgacaaatgcatgccaagttaggtgttaaca

SEQ ID NO: 557952 - DNA, 33 bp, Homo sapien
gatgacaaatgcatgctaagttaggtgttaaca

SEQ ID NO: 557953 - DNA, 33 bp, Homo sapien
aataaatattgtagcacgaacttgaggaaacat

SEQ ID NO: 557954 - DNA, 33 bp, Homo sapien
aataaatattgtagcatgaacttgaggaaacat

SEQ ID NO: 557955 - DNA, 33 bp, Homo sapien
gataatacaactcttaaacagagaaagtggata

SEQ ID NO: 557956 - DNA, 33 bp, Homo sapien
gataatacaactcttatacagagaaagtggata

SEQ ID NO: 557957 - DNA, 33 bp, Homo sapien
caggtgttatataaaaaatgatgtatatagcag

SEQ ID NO: 557958 - DNA, 33 bp, Homo sapien
caggtgttatataaaacatgatgtatatagcag

SEQ ID NO: 557959 - DNA, 33 bp, Homo sapien
ttgtgggatagtgcaccgaatttctatggagat

SEQ ID NO: 557960 - DNA, 33 bp, Homo sapien
ttgtgggatagtgcactgaatttctatggagat

SEQ ID NO: 557961 - DNA, 33 bp, Homo sapien
atgaacatacgtttacaagtctttgtgtggatg

SEQ ID NO: 557962 - DNA, 33 bp, Homo sapien
atgaacatacgtttacgagtctttgtgtggatg

SEQ ID NO: 557963 - DNA, 33 bp, Homo sapien
agcccccaactgacccactagctgaccacagat

SEQ ID NO: 557964 - DNA, 33 bp, Homo sapien
agcccccaactgacccgctagctgaccacagat

SEQ ID NO: 557965 - DNA, 33 bp, Homo sapien
cttattggagagtatcaaagtgcacagccagtc

SEQ ID NO: 557966 - DNA, 33 bp, Homo sapien
cttattggagagtatcgaagtgcacagccagtc

SEQ ID NO: 557967 - DNA, 33 bp, Homo sapien
tgtggtaggtcatagcccaagtcacaatctttc

SEQ ID NO: 557968 - DNA, 33 bp, Homo sapien
tgtggtaggtcatagcgcaagtcacaatctttc

SEQ ID NO: 557969 - DNA, 33 bp, Homo sapien
ctagcagtgttggatacatagaaggtactttct

SEQ ID NO: 557970 - DNA, 33 bp, Homo sapien
ctagcagtgttggatatatagaaggtactttct

SEQ ID NO: 557971 - DNA, 33 bp, Homo sapien
aatgctgtttcataaacgatatggtttggctgt

SEQ ID NO: 557972 - DNA, 33 bp, Homo sapien
aatgctgtttcataaatgatatggtttggctgt

SEQ ID NO: 557973 - DNA, 33 bp, Homo sapien
acagttcctggatgtcccatctaagcaatgtac

SEQ ID NO: 557974 - DNA, 33 bp, Homo sapien
acagttcctggatgtctcatctaagcaatgtac

SEQ ID NO: 557975 - DNA, 33 bp, Homo sapien
tcatgacaactcatggaatgctttactagatgc

SEQ ID NO: 557976 - DNA, 33 bp, Homo sapien
tcatgacaactcatggcatgctttactagatgc

SEQ ID NO: 557977 - DNA, 33 bp, Homo sapien
caaaggaggatgacaaataaataaagccctcta

SEQ ID NO: 557978 - DNA, 33 bp, Homo sapien
caaaggaggatgacaagtaaataaagccctcta

SEQ ID NO: 557979 - DNA, 33 bp, Homo sapien
gttcaccccaaccgaacggatagaaggccatat

SEQ ID NO: 557980 - DNA, 33 bp, Homo sapien
gttcaccccaaccgaatggatagaaggccatat

SEQ ID NO: 557981 - DNA, 33 bp, Homo sapien
ttcattagccagcccaaccaggagtgtctctct

SEQ ID NO: 557982 - DNA, 33 bp, Homo sapien
ttcattagccagcccagccaggagtgtctctct

SEQ ID NO: 557983 - DNA, 33 bp, Homo sapien
aaaggaaacaggaacaggaatcttgatggagga

SEQ ID NO: 557984 - DNA, 33 bp, Homo sapien
aaaggaaacaggaacatgaatcttgatggagga

SEQ ID NO: 557985 - DNA, 33 bp, Homo sapien
gtcttattcatggaaaaatgtgagatgcatcca

SEQ ID NO: 557986 - DNA, 33 bp, Homo sapien
gtcttattcatggaaagatgtgagatgcatcca

SEQ ID NO: 557987 - DNA, 33 bp, Homo sapien
ccagccagctagaataaccatctgcataataaa

SEQ ID NO: 557988 - DNA, 33 bp, Homo sapien
ccagccagctagaatacccatctgcataataaa

SEQ ID NO: 557989 - DNA, 33 bp, Homo sapien
ccctgggacttaattcaatgtatggtacagtgt

SEQ ID NO: 557990 - DNA, 33 bp, Homo sapien
ccctgggacttaattcgatgtatggtacagtgt

SEQ ID NO: 557991 - DNA, 33 bp, Homo sapien
aagctacagagtaaaactgatgaaagtgaaaga

SEQ ID NO: 557992 - DNA, 33 bp, Homo sapien
aagctacagagtaaaattgatgaaagtgaaaga

SEQ ID NO: 557993 - DNA, 33 bp, Homo sapien
tcttccctcagaaaaccgttaggtgtgaccagg

SEQ ID NO: 557994 - DNA, 33 bp, Homo sapien
tcttccctcagaaaactgttaggtgtgaccagg

SEQ ID NO: 557995 - DNA, 33 bp, Homo sapien
ctttgtcattgttacccgcatcagggcaaaggt

SEQ ID NO: 557996 - DNA, 33 bp, Homo sapien
ctttgtcattgttacctgcatcagggcaaaggt

SEQ ID NO: 557997 - DNA, 33 bp, Homo sapien
gttcacatggtcttgcaaaaattcacaaaataa

SEQ ID NO: 557998 - DNA, 33 bp, Homo sapien
gttcacatggtcttgcgaaaattcacaaaataa

SEQ ID NO: 557999 - DNA, 33 bp, Homo sapien
tggagcccactactcaaggaaacaaggagctcc

SEQ ID NO: 558000 - DNA, 33 bp, Homo sapien
tggagcccactactcagggaaacaaggagctcc

SEQ ID NO: 558001 - DNA, 33 bp, Homo sapien
gtcttttggatgactgaagatttttccgaaaga

SEQ ID NO: 558002 - DNA, 33 bp, Homo sapien
gtcttttggatgactgcagatttttccgaaaga

SEQ ID NO: 558003 - DNA, 33 bp, Homo sapien
aaattagcaggtttaaaatgaagttcaaaaatg

SEQ ID NO: 558004 - DNA, 33 bp, Homo sapien
aaattagcaggtttaacatgaagttcaaaaatg

SEQ ID NO: 558005 - DNA, 33 bp, Homo sapien
gtgtctatgggaactgaaaaaaaatatgagaga

SEQ ID NO: 558006 - DNA, 33 bp, Homo sapien
gtgtctatgggaactgcaaaaaaatatgagaga

SEQ ID NO: 558007 - DNA, 33 bp, Homo sapien
taattttatacactctaaagtcctcataagttt

SEQ ID NO: 558008 - DNA, 33 bp, Homo sapien
taattttatacactctgaagtcctcataagttt

SEQ ID NO: 558009 - DNA, 33 bp, Homo sapien
ctggacatgcaactgaatcacttataaagtctg

SEQ ID NO: 558010 - DNA, 33 bp, Homo sapien
ctggacatgcaactgagtcacttataaagtctg

SEQ ID NO: 558011 - DNA, 33 bp, Homo sapien
tcttgaattcttaacacagttcttccaggacta

SEQ ID NO: 558012 - DNA, 33 bp, Homo sapien
tcttgaattcttaacatagttcttccaggacta

SEQ ID NO: 558013 - DNA, 33 bp, Homo sapien
cttgagtcttaatagacgttcaatattctcaga

SEQ ID NO: 558014 - DNA, 33 bp, Homo sapien
cttgagtcttaatagatgttcaatattctcaga

SEQ ID NO: 558015 - DNA, 33 bp, Homo sapien
aaatgcacatatttaaggcctacatctccagtt

SEQ ID NO: 558016 - DNA, 33 bp, Homo sapien
aaatgcacatatttaatgcctacatctccagtt

SEQ ID NO: 558017 - DNA, 33 bp, Homo sapien
tacacctcaccagaaaagctgaaaaatagcctg

SEQ ID NO: 558018 - DNA, 33 bp, Homo sapien
tacacctcaccagaaaggctgaaaaatagcctg

SEQ ID NO: 558019 - DNA, 33 bp, Homo sapien
ggcactgcatggttctcaccgtgtcacccttgt

SEQ ID NO: 558020 - DNA, 33 bp, Homo sapien
ggcactgcatggttcttaccgtgtcacccttgt

SEQ ID NO: 558021 - DNA, 33 bp, Homo sapien
agtgatgtgttccagtaaagtatagaaattata

SEQ ID NO: 558022 - DNA, 33 bp, Homo sapien
agtgatgtgttccagtgaagtatagaaattata

SEQ ID NO: 558023 - DNA, 33 bp, Homo sapien
ctactttatgccaagaactttatgtaaagagat

SEQ ID NO: 558024 - DNA, 33 bp, Homo sapien
ctactttatgccaagagctttatgtaaagagat

SEQ ID NO: 558025 - DNA, 33 bp, Homo sapien
ttcttagagacacctaaattgatgctttcaact

SEQ ID NO: 558026 - DNA, 33 bp, Homo sapien
ttcttagagacacctacattgatgctttcaact

SEQ ID NO: 558027 - DNA, 33 bp, Homo sapien
actcttcgtatctacccatccatatgtctcaca

SEQ ID NO: 558028 - DNA, 33 bp, Homo sapien
actcttcgtatctacctatccatatgtctcaca

SEQ ID NO: 558029 - DNA, 33 bp, Homo sapien
acagctagttgcagaaaacaagaaaggagttaa

SEQ ID NO: 558030 - DNA, 33 bp, Homo sapien
acagctagttgcagaagacaagaaaggagttaa

SEQ ID NO: 558031 - DNA, 33 bp, Homo sapien
tggtctcatctgcaataacctctttctctggtt

SEQ ID NO: 558032 - DNA, 33 bp, Homo sapien
tggtctcatctgcaatgacctctttctctggtt

SEQ ID NO: 558033 - DNA, 33 bp, Homo sapien
tagcatcactcagataccaggatgacttagtgt

SEQ ID NO: 558034 - DNA, 33 bp, Homo sapien
tagcatcactcagatagcaggatgacttagtgt

SEQ ID NO: 558035 - DNA, 33 bp, Homo sapien
ggagagcttatttccaaacttgcaggttagcta

SEQ ID NO: 558036 - DNA, 33 bp, Homo sapien
ggagagcttatttccagacttgcaggttagcta

SEQ ID NO: 558037 - DNA, 33 bp, Homo sapien
gcttttcaattgtccaatgaggtcaattcctta

SEQ ID NO: 558038 - DNA, 33 bp, Homo sapien
gcttttcaattgtccagtgaggtcaattcctta

SEQ ID NO: 558039 - DNA, 33 bp, Homo sapien
gaattttgaaaagataagcctgattaaaaaaca

SEQ ID NO: 558040 - DNA, 33 bp, Homo sapien
gaattttgaaaagataggcctgattaaaaaaca

SEQ ID NO: 558041 - DNA, 33 bp, Homo sapien
aagaataacatttgaactgagagagtctgaaat

SEQ ID NO: 558042 - DNA, 33 bp, Homo sapien
aagaataacatttgaattgagagagtctgaaat

SEQ ID NO: 558043 - DNA, 33 bp, Homo sapien
ggtcacccaactcatacaagaacttagctgttg

SEQ ID NO: 558044 - DNA, 33 bp, Homo sapien
ggtcacccaactcatataagaacttagctgttg

SEQ ID NO: 558045 - DNA, 33 bp, Homo sapien
aaatgaactttgctaaccaattattaaaagtat

SEQ ID NO: 558046 - DNA, 33 bp, Homo sapien
aaatgaactttgctaatcaattattaaaagtat

SEQ ID NO: 558047 - DNA, 33 bp, Homo sapien
attaaggatcagggaaatgaaagtcgaaaccat

SEQ ID NO: 558048 - DNA, 33 bp, Homo sapien
attaaggatcagggaagtgaaagtcgaaaccat

SEQ ID NO: 558049 - DNA, 33 bp, Homo sapien
ggaagagacaagaagacgtttgaggattagcat

SEQ ID NO: 558050 - DNA, 33 bp, Homo sapien
ggaagagacaagaagatgtttgaggattagcat

SEQ ID NO: 558051 - DNA, 33 bp, Homo sapien
tcccatttcttaagaacgtccgacgtgtgacct

SEQ ID NO: 558052 - DNA, 33 bp, Homo sapien
tcccatttcttaagaatgtccgacgtgtgacct

SEQ ID NO: 558053 - DNA, 33 bp, Homo sapien
agcgaggcgcccaacaatagaatgcatcttcct

SEQ ID NO: 558054 - DNA, 33 bp, Homo sapien
agcgaggcgcccaacagtagaatgcatcttcct

SEQ ID NO: 558055 - DNA, 33 bp, Homo sapien
ttttgaggaatgattacctggcccctcaccatt

SEQ ID NO: 558056 - DNA, 33 bp, Homo sapien
ttttgaggaatgattatctggcccctcaccatt

SEQ ID NO: 558057 - DNA, 33 bp, Homo sapien
tttctactcaccaaaacttttcttgtgttcagc

SEQ ID NO: 558058 - DNA, 33 bp, Homo sapien
tttctactcaccaaaagttttcttgtgttcagc

SEQ ID NO: 558059 - DNA, 33 bp, Homo sapien
cccttgcagttttagcacataagaaacaaaacc

SEQ ID NO: 558060 - DNA, 33 bp, Homo sapien
cccttgcagttttagcgcataagaaacaaaacc

SEQ ID NO: 558061 - DNA, 33 bp, Homo sapien
gctattttacaaataactggatgtgtaaagatt

SEQ ID NO: 558062 - DNA, 33 bp, Homo sapien
gctattttacaaataattggatgtgtaaagatt

SEQ ID NO: 558063 - DNA, 33 bp, Homo sapien
taccttgttcttccacaattaatttctgagggc

SEQ ID NO: 558064 - DNA, 33 bp, Homo sapien
taccttgttcttccacgattaatttctgagggc

SEQ ID NO: 558065 - DNA, 33 bp, Homo sapien
ctgagtaagcagccaaaggtaaataatctgtta

SEQ ID NO: 558066 - DNA, 33 bp, Homo sapien
ctgagtaagcagccaacggtaaataatctgtta

SEQ ID NO: 558067 - DNA, 33 bp, Homo sapien
ctggcattaaaaggccacagaatcccaaggtgg

SEQ ID NO: 558068 - DNA, 33 bp, Homo sapien
ctggcattaaaaggccgcagaatcccaaggtgg

SEQ ID NO: 558069 - DNA, 33 bp, Homo sapien
ggtaatcaagtcataacgataataagtggtttg

SEQ ID NO: 558070 - DNA, 33 bp, Homo sapien
ggtaatcaagtcataatgataataagtggtttg

SEQ ID NO: 558071 - DNA, 33 bp, Homo sapien
ttccctactcccactcagacattctgggaaaaa

SEQ ID NO: 558072 - DNA, 33 bp, Homo sapien
ttccctactcccactcggacattctgggaaaaa

SEQ ID NO: 558073 - DNA, 33 bp, Homo sapien
gcctgtattgtctcataagggggacgatgcaag

SEQ ID NO: 558074 - DNA, 33 bp, Homo sapien
gcctgtattgtctcatgagggggacgatgcaag

SEQ ID NO: 558075 - DNA, 33 bp, Homo sapien
tctgggtattgccatcactagggtaggatgaga

SEQ ID NO: 558076 - DNA, 33 bp, Homo sapien
tctgggtattgccatcgctagggtaggatgaga

SEQ ID NO: 558077 - DNA, 33 bp, Homo sapien
cttacctggtttcatccccctgttgtgtcctag

SEQ ID NO: 558078 - DNA, 33 bp, Homo sapien
cttacctggtttcatctccctgttgtgtcctag

SEQ ID NO: 558079 - DNA, 33 bp, Homo sapien
gctaatttcaaagacactggattaggaagtatt

SEQ ID NO: 558080 - DNA, 33 bp, Homo sapien
gctaatttcaaagacattggattaggaagtatt

SEQ ID NO: 558081 - DNA, 33 bp, Homo sapien
atgtcttattgctacaacatcaagagtctgcca

SEQ ID NO: 558082 - DNA, 33 bp, Homo sapien
atgtcttattgctacaccatcaagagtctgcca

SEQ ID NO: 558083 - DNA, 33 bp, Homo sapien
tacttgccttcttagtaaactcctattcgctct

SEQ ID NO: 558084 - DNA, 33 bp, Homo sapien
tacttgccttcttagtgaactcctattcgctct

SEQ ID NO: 558085 - DNA, 33 bp, Homo sapien
gcatcaagggtagctaatagaaataaaaggaat

SEQ ID NO: 558086 - DNA, 33 bp, Homo sapien
gcatcaagggtagctagtagaaataaaaggaat

SEQ ID NO: 558087 - DNA, 33 bp, Homo sapien
caggtggattacgatccagcacagatggtcctc

SEQ ID NO: 558088 - DNA, 33 bp, Homo sapien
caggtggattacgatcgagcacagatggtcctc

SEQ ID NO: 558089 - DNA, 33 bp, Homo sapien
atatgacacacgtgaaataacctcctgctgtgg

SEQ ID NO: 558090 - DNA, 33 bp, Homo sapien
atatgacacacgtgaagtaacctcctgctgtgg

SEQ ID NO: 558091 - DNA, 33 bp, Homo sapien
ccttcctgattctttccaggaagtgactgctgg

SEQ ID NO: 558092 - DNA, 33 bp, Homo sapien
ccttcctgattctttctaggaagtgactgctgg

SEQ ID NO: 558093 - DNA, 33 bp, Homo sapien
cagtgaaaacacattgaactgttgaccccagaa

SEQ ID NO: 558094 - DNA, 33 bp, Homo sapien
cagtgaaaacacattgcactgttgaccccagaa

SEQ ID NO: 558095 - DNA, 33 bp, Homo sapien
cactttagagatgatgaaactgatgcacagaga

SEQ ID NO: 558096 - DNA, 33 bp, Homo sapien
cactttagagatgatggaactgatgcacagaga

SEQ ID NO: 558097 - DNA, 33 bp, Homo sapien
ttaaaaaatcaaacaagactaccacttaaggtc

SEQ ID NO: 558098 - DNA, 33 bp, Homo sapien
ttaaaaaatcaaacaatactaccacttaaggtc

SEQ ID NO: 558099 - DNA, 33 bp, Homo sapien
gatgccaagaaaagagaatgccttatgcaaaaa

SEQ ID NO: 558100 - DNA, 33 bp, Homo sapien
gatgccaagaaaagagtatgccttatgcaaaaa

SEQ ID NO: 558101 - DNA, 33 bp, Homo sapien
ccagccatgcacattgaaatcatcagggtggag

SEQ ID NO: 558102 - DNA, 33 bp, Homo sapien
ccagccatgcacattggaatcatcagggtggag

SEQ ID NO: 558103 - DNA, 33 bp, Homo sapien
gaatcctgcctggttaccatgtgtacaagtctg

SEQ ID NO: 558104 - DNA, 33 bp, Homo sapien
gaatcctgcctggttagcatgtgtacaagtctg

SEQ ID NO: 558105 - DNA, 33 bp, Homo sapien
tatgcttacacatgaaattaaggcaatgtgaat

SEQ ID NO: 558106 - DNA, 33 bp, Homo sapien
tatgcttacacatgaagttaaggcaatgtgaat

SEQ ID NO: 558107 - DNA, 33 bp, Homo sapien
caagagacagatgataacacataaagattaata

SEQ ID NO: 558108 - DNA, 33 bp, Homo sapien
caagagacagatgatagcacataaagattaata

SEQ ID NO: 558109 - DNA, 33 bp, Homo sapien
tgcttctgaataaagccgcatcccagataacgc

SEQ ID NO: 558110 - DNA, 33 bp, Homo sapien
tgcttctgaataaagctgcatcccagataacgc

SEQ ID NO: 558111 - DNA, 33 bp, Homo sapien
gcaatgaatgcccccaaaggtaatccttaacca

SEQ ID NO: 558112 - DNA, 33 bp, Homo sapien
gcaatgaatgcccccagaggtaatccttaacca

SEQ ID NO: 558113 - DNA, 33 bp, Homo sapien
acgtgcagcttgcatacacacgggagaactccg

SEQ ID NO: 558114 - DNA, 33 bp, Homo sapien
acgtgcagcttgcatatacacgggagaactccg

SEQ ID NO: 558115 - DNA, 33 bp, Homo sapien
ttcacctatctttcataactctaatttgcaggg

SEQ ID NO: 558116 - DNA, 33 bp, Homo sapien
ttcacctatctttcatcactctaatttgcaggg

SEQ ID NO: 558117 - DNA, 33 bp, Homo sapien
tagttcctgcacaaagaatttatggaggaagtg

SEQ ID NO: 558118 - DNA, 33 bp, Homo sapien
tagttcctgcacaaaggatttatggaggaagtg

SEQ ID NO: 558119 - DNA, 33 bp, Homo sapien
ttgtgcaggaactaccactgtgatgtctcttct

SEQ ID NO: 558120 - DNA, 33 bp, Homo sapien
ttgtgcaggaactaccgctgtgatgtctcttct

SEQ ID NO: 558121 - DNA, 33 bp, Homo sapien
tctgtagtttgaaaacaatgtggctaggcttaa

SEQ ID NO: 558122 - DNA, 33 bp, Homo sapien
tctgtagtttgaaaacgatgtggctaggcttaa

SEQ ID NO: 558123 - DNA, 33 bp, Homo sapien
atgaaaaaaactcttacatacttccaagaaaga

SEQ ID NO: 558124 - DNA, 33 bp, Homo sapien
atgaaaaaaactcttatatacttccaagaaaga

SEQ ID NO: 558125 - DNA, 33 bp, Homo sapien
ttggaagggtctgaaagcctcctttatttcata

SEQ ID NO: 558126 - DNA, 33 bp, Homo sapien
ttggaagggtctgaaatcctcctttatttcata

SEQ ID NO: 558127 - DNA, 33 bp, Homo sapien
atgtaatggtgggacagcacaggataaccggtg

SEQ ID NO: 558128 - DNA, 33 bp, Homo sapien
atgtaatggtgggacatcacaggataaccggtg

SEQ ID NO: 558129 - DNA, 33 bp, Homo sapien
gcatatattttattccacacaaatgttttggat

SEQ ID NO: 558130 - DNA, 33 bp, Homo sapien
gcatatattttattccccacaaatgttttggat

SEQ ID NO: 558131 - DNA, 33 bp, Homo sapien
tggtaataaatcacagccacgagtatgactgta

SEQ ID NO: 558132 - DNA, 33 bp, Homo sapien
tggtaataaatcacaggcacgagtatgactgta

SEQ ID NO: 558133 - DNA, 33 bp, Homo sapien
gaaccagcaaagtctcccttgcaagcagatatt

SEQ ID NO: 558134 - DNA, 33 bp, Homo sapien
gaaccagcaaagtctctcttgcaagcagatatt

SEQ ID NO: 558135 - DNA, 33 bp, Homo sapien
aggactctaactggcacgtagcatacttgtggg

SEQ ID NO: 558136 - DNA, 33 bp, Homo sapien
aggactctaactggcatgtagcatacttgtggg

SEQ ID NO: 558137 - DNA, 33 bp, Homo sapien
ctccatatggctaatgaagactttggccccttt

SEQ ID NO: 558138 - DNA, 33 bp, Homo sapien
ctccatatggctaatggagactttggccccttt

SEQ ID NO: 558139 - DNA, 33 bp, Homo sapien
tgcattcttgggcaaccggctttgcctcctttt

SEQ ID NO: 558140 - DNA, 33 bp, Homo sapien
tgcattcttgggcaactggctttgcctcctttt

SEQ ID NO: 558141 - DNA, 33 bp, Homo sapien
ataagccaggtccaatcagtggctgaagtgcca

SEQ ID NO: 558142 - DNA, 33 bp, Homo sapien
ataagccaggtccaattagtggctgaagtgcca

SEQ ID NO: 558143 - DNA, 33 bp, Homo sapien
ctcatgttatacttccaacctccagaaccgtaa

SEQ ID NO: 558144 - DNA, 33 bp, Homo sapien
ctcatgttatacttccgacctccagaaccgtaa

SEQ ID NO: 558145 - DNA, 33 bp, Homo sapien
tttctgtagcccaatacacaaggaactgtggga

SEQ ID NO: 558146 - DNA, 33 bp, Homo sapien
tttctgtagcccaatagacaaggaactgtggga

SEQ ID NO: 558147 - DNA, 33 bp, Homo sapien
gctgtaatttctggaactcaccactcaagatat

SEQ ID NO: 558148 - DNA, 33 bp, Homo sapien
gctgtaatttctggaattcaccactcaagatat

SEQ ID NO: 558149 - DNA, 33 bp, Homo sapien
acaattttcaatcacccgagaagtttgataatt

SEQ ID NO: 558150 - DNA, 33 bp, Homo sapien
acaattttcaatcacctgagaagtttgataatt

SEQ ID NO: 558151 - DNA, 33 bp, Homo sapien
agctctgaggttttcaaacaagtggtagcagta

SEQ ID NO: 558152 - DNA, 33 bp, Homo sapien
agctctgaggttttcagacaagtggtagcagta

SEQ ID NO: 558153 - DNA, 33 bp, Homo sapien
ttgtctccaatgactacgtaaattctagagaag

SEQ ID NO: 558154 - DNA, 33 bp, Homo sapien
ttgtctccaatgactatgtaaattctagagaag

SEQ ID NO: 558155 - DNA, 33 bp, Homo sapien
gtgcctggccaacttgcaaggcttgaaaggaca

SEQ ID NO: 558156 - DNA, 33 bp, Homo sapien
gtgcctggccaacttgtaaggcttgaaaggaca

SEQ ID NO: 558157 - DNA, 33 bp, Homo sapien
acactgagaacgagaacgacacttttgcatatt

SEQ ID NO: 558158 - DNA, 33 bp, Homo sapien
acactgagaacgagaatgacacttttgcatatt

SEQ ID NO: 558159 - DNA, 33 bp, Homo sapien
atgttagaagttgtatcagctgttcctggatac

SEQ ID NO: 558160 - DNA, 33 bp, Homo sapien
atgttagaagttgtattagctgttcctggatac

SEQ ID NO: 558161 - DNA, 33 bp, Homo sapien
gcataatttggagtaaaaaattttcatggaaat

SEQ ID NO: 558162 - DNA, 33 bp, Homo sapien
gcataatttggagtaagaaattttcatggaaat

SEQ ID NO: 558163 - DNA, 33 bp, Homo sapien
gtttctaaagaagaaaagcaaactatatagtca

SEQ ID NO: 558164 - DNA, 33 bp, Homo sapien
gtttctaaagaagaaaggcaaactatatagtca

SEQ ID NO: 558165 - DNA, 33 bp, Homo sapien
cacccatttggactcactattctctaattttat

SEQ ID NO: 558166 - DNA, 33 bp, Homo sapien
cacccatttggactcagtattctctaattttat

SEQ ID NO: 558167 - DNA, 33 bp, Homo sapien
acagcctcaacatagacgcaaaaattgatagaa

SEQ ID NO: 558168 - DNA, 33 bp, Homo sapien
acagcctcaacatagatgcaaaaattgatagaa

SEQ ID NO: 558169 - DNA, 33 bp, Homo sapien
gaggccagtgaaatatgaatgtagtgcatttac

SEQ ID NO: 558170 - DNA, 33 bp, Homo sapien
gaggccagtgaaatattaatgtagtgcatttac

SEQ ID NO: 558171 - DNA, 33 bp, Homo sapien
ttttctggaccattccaagaagtcaagtaaatg

SEQ ID NO: 558172 - DNA, 33 bp, Homo sapien
ttttctggaccattcccagaagtcaagtaaatg

SEQ ID NO: 558173 - DNA, 33 bp, Homo sapien
ctgtagttgttaggagaacactgactctctgga

SEQ ID NO: 558174 - DNA, 33 bp, Homo sapien
ctgtagttgttaggagcacactgactctctgga

SEQ ID NO: 558175 - DNA, 33 bp, Homo sapien
tagtgtaagtggcagaaccataatctgagccca

SEQ ID NO: 558176 - DNA, 33 bp, Homo sapien
tagtgtaagtggcagagccataatctgagccca

SEQ ID NO: 558177 - DNA, 33 bp, Homo sapien
tatacacagggagaacaacaaataatcatgaag

SEQ ID NO: 558178 - DNA, 33 bp, Homo sapien
tatacacagggagaaccacaaataatcatgaag

SEQ ID NO: 558179 - DNA, 33 bp, Homo sapien
cacaggacaaggagagcaaaagattgccagaaa

SEQ ID NO: 558180 - DNA, 33 bp, Homo sapien
cacaggacaaggagagtaaaagattgccagaaa

SEQ ID NO: 558181 - DNA, 33 bp, Homo sapien
aataagattttttgcacctatcagtccaattta

SEQ ID NO: 558182 - DNA, 33 bp, Homo sapien
aataagattttttgcagctatcagtccaattta

SEQ ID NO: 558183 - DNA, 33 bp, Homo sapien
tcatgcctatggcaaacggggatacttaagaac

SEQ ID NO: 558184 - DNA, 33 bp, Homo sapien
tcatgcctatggcaaatggggatacttaagaac

SEQ ID NO: 558185 - DNA, 33 bp, Homo sapien
caaaaataccttaagacagaaaagtcattttcc

SEQ ID NO: 558186 - DNA, 33 bp, Homo sapien
caaaaataccttaagatagaaaagtcattttcc

SEQ ID NO: 558187 - DNA, 33 bp, Homo sapien
agatagcagttccaaaaatgaaagtgttctgaa

SEQ ID NO: 558188 - DNA, 33 bp, Homo sapien
agatagcagttccaaagatgaaagtgttctgaa

SEQ ID NO: 558189 - DNA, 33 bp, Homo sapien
cctgcatgcttgcatcaatactcaaatattacc

SEQ ID NO: 558190 - DNA, 33 bp, Homo sapien
cctgcatgcttgcatcgatactcaaatattacc

SEQ ID NO: 558191 - DNA, 33 bp, Homo sapien
ggcctacagcaaatgaagaaatgccacaagttc

SEQ ID NO: 558192 - DNA, 33 bp, Homo sapien
ggcctacagcaaatgaggaaatgccacaagttc

SEQ ID NO: 558193 - DNA, 33 bp, Homo sapien
acttgcaaaaagcatacagtttatgtagcattt

SEQ ID NO: 558194 - DNA, 33 bp, Homo sapien
acttgcaaaaagcatatagtttatgtagcattt

SEQ ID NO: 558195 - DNA, 33 bp, Homo sapien
tggtggtgagctagacaggagaaccacaacact

SEQ ID NO: 558196 - DNA, 33 bp, Homo sapien
tggtggtgagctagaccggagaaccacaacact

SEQ ID NO: 558197 - DNA, 33 bp, Homo sapien
ccacgtctccttattccgaacatggccctgagt

SEQ ID NO: 558198 - DNA, 33 bp, Homo sapien
ccacgtctccttattctgaacatggccctgagt

SEQ ID NO: 558199 - DNA, 33 bp, Homo sapien
acagagacatgctgtacaggccttgagagagag

SEQ ID NO: 558200 - DNA, 33 bp, Homo sapien
acagagacatgctgtataggccttgagagagag

SEQ ID NO: 558201 - DNA, 33 bp, Homo sapien
aacatgaaaagatgccaaacctcattagtaacc

SEQ ID NO: 558202 - DNA, 33 bp, Homo sapien
aacatgaaaagatgccgaacctcattagtaacc

SEQ ID NO: 558203 - DNA, 33 bp, Homo sapien
ctactcactatgcttagcacgcttataaaagtt

SEQ ID NO: 558204 - DNA, 33 bp, Homo sapien
ctactcactatgcttatcacgcttataaaagtt

SEQ ID NO: 558205 - DNA, 33 bp, Homo sapien
cctcaggcagagtcccagatgtttgcttttgaa

SEQ ID NO: 558206 - DNA, 33 bp, Homo sapien
cctcaggcagagtcccggatgtttgcttttgaa

SEQ ID NO: 558207 - DNA, 33 bp, Homo sapien
gcacaataggctgtcacgtgccttatggagaaa

SEQ ID NO: 558208 - DNA, 33 bp, Homo sapien
gcacaataggctgtcatgtgccttatggagaaa

SEQ ID NO: 558209 - DNA, 33 bp, Homo sapien
aatatatgcacgcttacgagtgtctcaggctct

SEQ ID NO: 558210 - DNA, 33 bp, Homo sapien
aatatatgcacgcttatgagtgtctcaggctct

SEQ ID NO: 558211 - DNA, 33 bp, Homo sapien
accaaggggatatgctcaaccaaaatgtgttgg

SEQ ID NO: 558212 - DNA, 33 bp, Homo sapien
accaaggggatatgctgaaccaaaatgtgttgg

SEQ ID NO: 558213 - DNA, 33 bp, Homo sapien
tccagctgcgtaaaatcatctctgtatttaatc

SEQ ID NO: 558214 - DNA, 33 bp, Homo sapien
tccagctgcgtaaaatgatctctgtatttaatc

SEQ ID NO: 558215 - DNA, 33 bp, Homo sapien
tggtggaacttttgagaccttaccatttggaga

SEQ ID NO: 558216 - DNA, 33 bp, Homo sapien
tggtggaacttttgaggccttaccatttggaga

SEQ ID NO: 558217 - DNA, 33 bp, Homo sapien
cctaaaacataattcacgtgtaggaaaaagaat

SEQ ID NO: 558218 - DNA, 33 bp, Homo sapien
cctaaaacataattcatgtgtaggaaaaagaat

SEQ ID NO: 558219 - DNA, 33 bp, Homo sapien
ctgtgatgggatttaccaacaggacgataaccc

SEQ ID NO: 558220 - DNA, 33 bp, Homo sapien
ctgtgatgggatttactaacaggacgataaccc

SEQ ID NO: 558221 - DNA, 33 bp, Homo sapien
catgagaccagatgaactaatttactgatttgg

SEQ ID NO: 558222 - DNA, 33 bp, Homo sapien
catgagaccagatgaagtaatttactgatttgg

SEQ ID NO: 558223 - DNA, 33 bp, Homo sapien
aaagtctcctgtaaatcagttcaaagcaagaat

SEQ ID NO: 558224 - DNA, 33 bp, Homo sapien
aaagtctcctgtaaatgagttcaaagcaagaat

SEQ ID NO: 558225 - DNA, 33 bp, Homo sapien
ccatatggaaaagcaaataagatggatagtggt

SEQ ID NO: 558226 - DNA, 33 bp, Homo sapien
ccatatggaaaagcaagtaagatggatagtggt

SEQ ID NO: 558227 - DNA, 33 bp, Homo sapien
catcttactttaatcaaatgccatatggaaaag

SEQ ID NO: 558228 - DNA, 33 bp, Homo sapien
catcttactttaatcagatgccatatggaaaag

SEQ ID NO: 558229 - DNA, 33 bp, Homo sapien
actctttattatctcacaccacgtaacctgtca

SEQ ID NO: 558230 - DNA, 33 bp, Homo sapien
actctttattatctcataccacgtaacctgtca

SEQ ID NO: 558231 - DNA, 33 bp, Homo sapien
gtgtttggattgcacactcagttaatacagcat

SEQ ID NO: 558232 - DNA, 33 bp, Homo sapien
gtgtttggattgcacattcagttaatacagcat

SEQ ID NO: 558233 - DNA, 33 bp, Homo sapien
ataaactattgccatcaaggaacagtggctcat

SEQ ID NO: 558234 - DNA, 33 bp, Homo sapien
ataaactattgccatccaggaacagtggctcat

SEQ ID NO: 558235 - DNA, 33 bp, Homo sapien
atctctgttcactgtaacttcggcctctcgggt

SEQ ID NO: 558236 - DNA, 33 bp, Homo sapien
atctctgttcactgtatcttcggcctctcgggt

SEQ ID NO: 558237 - DNA, 33 bp, Homo sapien
gttctgagggtcaccactaatctcttggtcata

SEQ ID NO: 558238 - DNA, 33 bp, Homo sapien
gttctgagggtcaccagtaatctcttggtcata

SEQ ID NO: 558239 - DNA, 33 bp, Homo sapien
tattgggccaagaagaatagggatgccttgaaa

SEQ ID NO: 558240 - DNA, 33 bp, Homo sapien
tattgggccaagaagactagggatgccttgaaa

SEQ ID NO: 558241 - DNA, 33 bp, Homo sapien
ccatctccacttgaataatcacagaaagagaag

SEQ ID NO: 558242 - DNA, 33 bp, Homo sapien
ccatctccacttgaattatcacagaaagagaag

SEQ ID NO: 558243 - DNA, 33 bp, Homo sapien
tctactctgatgcctacggacttgactttttac

SEQ ID NO: 558244 - DNA, 33 bp, Homo sapien
tctactctgatgcctatggacttgactttttac

SEQ ID NO: 558245 - DNA, 33 bp, Homo sapien
agggaacagttactgcaaagcatgaactcagga

SEQ ID NO: 558246 - DNA, 33 bp, Homo sapien
agggaacagttactgcgaagcatgaactcagga

SEQ ID NO: 558247 - DNA, 33 bp, Homo sapien
ttagtatagcctcttccagaaagtacatactgc

SEQ ID NO: 558248 - DNA, 33 bp, Homo sapien
ttagtatagcctcttctagaaagtacatactgc

SEQ ID NO: 558249 - DNA, 33 bp, Homo sapien
ggtatcatgtagtaaaaaaatagtgattcttga

SEQ ID NO: 558250 - DNA, 33 bp, Homo sapien
ggtatcatgtagtaaagaaatagtgattcttga

SEQ ID NO: 558251 - DNA, 33 bp, Homo sapien
tgaaattctgactctaccttttactagttctga

SEQ ID NO: 558252 - DNA, 33 bp, Homo sapien
tgaaattctgactctatcttttactagttctga

SEQ ID NO: 558253 - DNA, 33 bp, Homo sapien
agaaaggagaacaaaactagtggggaatctagc

SEQ ID NO: 558254 - DNA, 33 bp, Homo sapien
agaaaggagaacaaaagtagtggggaatctagc

SEQ ID NO: 558255 - DNA, 33 bp, Homo sapien
tggaggaagtgagaagcagttggaatctggata

SEQ ID NO: 558256 - DNA, 33 bp, Homo sapien
tggaggaagtgagaagtagttggaatctggata

SEQ ID NO: 558257 - DNA, 33 bp, Homo sapien
tagtctttcttgaatcacatgtccttaataatg

SEQ ID NO: 558258 - DNA, 33 bp, Homo sapien
tagtctttcttgaatctcatgtccttaataatg

SEQ ID NO: 558259 - DNA, 33 bp, Homo sapien
aatgcctgatgcaaagcaagttcccagaaaaga

SEQ ID NO: 558260 - DNA, 33 bp, Homo sapien
aatgcctgatgcaaagtaagttcccagaaaaga

SEQ ID NO: 558261 - DNA, 33 bp, Homo sapien
ctctttagctttgaaaatgtttgacgatggtgg

SEQ ID NO: 558262 - DNA, 33 bp, Homo sapien
ctctttagctttgaaagtgtttgacgatggtgg

SEQ ID NO: 558263 - DNA, 33 bp, Homo sapien
ctcttatctttgaagccactgtcattcccaatc

SEQ ID NO: 558264 - DNA, 33 bp, Homo sapien
ctcttatctttgaagctactgtcattcccaatc

SEQ ID NO: 558265 - DNA, 33 bp, Homo sapien
tttccaactttcgctggatgcttctatctgggt

SEQ ID NO: 558266 - DNA, 33 bp, Homo sapien
tttccaactttcgctgtatgcttctatctgggt

SEQ ID NO: 558267 - DNA, 33 bp, Homo sapien
ggggacattacacaaaggtagaatgatctctta

SEQ ID NO: 558268 - DNA, 33 bp, Homo sapien
ggggacattacacaaatgtagaatgatctctta

SEQ ID NO: 558269 - DNA, 33 bp, Homo sapien
tttctttagtgagagacggttacttggaatgat

SEQ ID NO: 558270 - DNA, 33 bp, Homo sapien
tttctttagtgagagatggttacttggaatgat

SEQ ID NO: 558271 - DNA, 33 bp, Homo sapien
gtgctaacttcctggaaatatgaactatattat

SEQ ID NO: 558272 - DNA, 33 bp, Homo sapien
gtgctaacttcctggagatatgaactatattat

SEQ ID NO: 558273 - DNA, 33 bp, Homo sapien
ttattcagtcccccaacaaataccatttgccat

SEQ ID NO: 558274 - DNA, 33 bp, Homo sapien
ttattcagtcccccaagaaataccatttgccat

SEQ ID NO: 558275 - DNA, 33 bp, Homo sapien
ctttggactcccaacccctcagtctaacagagt

SEQ ID NO: 558276 - DNA, 33 bp, Homo sapien
ctttggactcccaacctctcagtctaacagagt

SEQ ID NO: 558277 - DNA, 33 bp, Homo sapien
attgctacgtgtgtaaggtaaagatgggaaatc

SEQ ID NO: 558278 - DNA, 33 bp, Homo sapien
attgctacgtgtgtaatgtaaagatgggaaatc

SEQ ID NO: 558279 - DNA, 33 bp, Homo sapien
gacagcagtgaaaaaaattgttgggtaagcata

SEQ ID NO: 558280 - DNA, 33 bp, Homo sapien
gacagcagtgaaaaaagttgttgggtaagcata

SEQ ID NO: 558281 - DNA, 33 bp, Homo sapien
actttgagattcatgacgctttgaggattctaa

SEQ ID NO: 558282 - DNA, 33 bp, Homo sapien
actttgagattcatgatgctttgaggattctaa

SEQ ID NO: 558283 - DNA, 33 bp, Homo sapien
gtgagacagtatacaacgtcacgatgataagta

SEQ ID NO: 558284 - DNA, 33 bp, Homo sapien
gtgagacagtatacaatgtcacgatgataagta

SEQ ID NO: 558285 - DNA, 33 bp, Homo sapien
gcatcatttctaatagacaaaagttagaatcaa

SEQ ID NO: 558286 - DNA, 33 bp, Homo sapien
gcatcatttctaataggcaaaagttagaatcaa

SEQ ID NO: 558287 - DNA, 33 bp, Homo sapien
attggaatgttcctaacgtaaagaaataataaa

SEQ ID NO: 558288 - DNA, 33 bp, Homo sapien
attggaatgttcctaatgtaaagaaataataaa

SEQ ID NO: 558289 - DNA, 33 bp, Homo sapien
gatatccgtcacatcaagcatttattatttctt

SEQ ID NO: 558290 - DNA, 33 bp, Homo sapien
gatatccgtcacatcaggcatttattatttctt

SEQ ID NO: 558291 - DNA, 33 bp, Homo sapien
atgattagtggtctaccatagcaattctttttg

SEQ ID NO: 558292 - DNA, 33 bp, Homo sapien
atgattagtggtctactatagcaattctttttg

SEQ ID NO: 558293 - DNA, 33 bp, Homo sapien
atttctcagggaaatgaacttatagtgagttag

SEQ ID NO: 558294 - DNA, 33 bp, Homo sapien
atttctcagggaaatgtacttatagtgagttag

SEQ ID NO: 558295 - DNA, 33 bp, Homo sapien
atagagcagtaggtgtcaagctgcatctagcaa

SEQ ID NO: 558296 - DNA, 33 bp, Homo sapien
atagagcagtaggtgttaagctgcatctagcaa

SEQ ID NO: 558297 - DNA, 33 bp, Homo sapien
gggtataaggtagagactctaaacacatggaaa

SEQ ID NO: 558298 - DNA, 33 bp, Homo sapien
gggtataaggtagagattctaaacacatggaaa

SEQ ID NO: 558299 - DNA, 33 bp, Homo sapien
gttcttcacttgtgctaaaaacaggacagagaa

SEQ ID NO: 558300 - DNA, 33 bp, Homo sapien
gttcttcacttgtgcttaaaacaggacagagaa

SEQ ID NO: 558301 - DNA, 33 bp, Homo sapien
atatttgccatgctacacccttggaagacaatg

SEQ ID NO: 558302 - DNA, 33 bp, Homo sapien
atatttgccatgctacgcccttggaagacaatg

SEQ ID NO: 558303 - DNA, 33 bp, Homo sapien
gccaggcaaggaaccacgggtcttgttaggaag

SEQ ID NO: 558304 - DNA, 33 bp, Homo sapien
gccaggcaaggaaccaggggtcttgttaggaag

SEQ ID NO: 558305 - DNA, 33 bp, Homo sapien
gttgtcttggctcccacgtaagtgacatgcata

SEQ ID NO: 558306 - DNA, 33 bp, Homo sapien
gttgtcttggctcccaggtaagtgacatgcata

SEQ ID NO: 558307 - DNA, 33 bp, Homo sapien
tagatgagtagatgtacggattaatcataattt

SEQ ID NO: 558308 - DNA, 33 bp, Homo sapien
tagatgagtagatgtatggattaatcataattt

SEQ ID NO: 558309 - DNA, 33 bp, Homo sapien
tctactcatctagataagtcttactattccgag

SEQ ID NO: 558310 - DNA, 33 bp, Homo sapien
tctactcatctagataggtcttactattccgag

SEQ ID NO: 558311 - DNA, 33 bp, Homo sapien
ggtttctgttttgatacggccagtacaatatta

SEQ ID NO: 558312 - DNA, 33 bp, Homo sapien
ggtttctgttttgatatggccagtacaatatta

SEQ ID NO: 558313 - DNA, 33 bp, Homo sapien
ggggcaagtttgagacagagtaatatttagcag

SEQ ID NO: 558314 - DNA, 33 bp, Homo sapien
ggggcaagtttgagacggagtaatatttagcag

SEQ ID NO: 558315 - DNA, 33 bp, Homo sapien
catggctgattacatgaaaggaatgtgaccaac

SEQ ID NO: 558316 - DNA, 33 bp, Homo sapien
catggctgattacatggaaggaatgtgaccaac

SEQ ID NO: 558317 - DNA, 33 bp, Homo sapien
atgttagggcagaacagcaaagctatcctatac

SEQ ID NO: 558318 - DNA, 33 bp, Homo sapien
atgttagggcagaacatcaaagctatcctatac

SEQ ID NO: 558319 - DNA, 33 bp, Homo sapien
agataagccaatgaacacaagcctgtgaatttt

SEQ ID NO: 558320 - DNA, 33 bp, Homo sapien
agataagccaatgaacgcaagcctgtgaatttt

SEQ ID NO: 558321 - DNA, 33 bp, Homo sapien
ctcttcttctctgataagctccactatgactgc

SEQ ID NO: 558322 - DNA, 33 bp, Homo sapien
ctcttcttctctgataggctccactatgactgc

SEQ ID NO: 558323 - DNA, 33 bp, Homo sapien
cttccactgataagacagaggctcttgttgggg

SEQ ID NO: 558324 - DNA, 33 bp, Homo sapien
cttccactgataagacggaggctcttgttgggg

SEQ ID NO: 558325 - DNA, 33 bp, Homo sapien
caataaagtgtatatcacagcaaaatgagtcat

SEQ ID NO: 558326 - DNA, 33 bp, Homo sapien
caataaagtgtatatcccagcaaaatgagtcat

SEQ ID NO: 558327 - DNA, 33 bp, Homo sapien
ttactgaatcttctaaaccaactattgagacct

SEQ ID NO: 558328 - DNA, 33 bp, Homo sapien
ttactgaatcttctaagccaactattgagacct

SEQ ID NO: 558329 - DNA, 33 bp, Homo sapien
ttgactggctctggaggatatgcctttgtgctt

SEQ ID NO: 558330 - DNA, 33 bp, Homo sapien
ttgactggctctggagtatatgcctttgtgctt

SEQ ID NO: 558331 - DNA, 33 bp, Homo sapien
cacatagtactgcttccactacccttaatctta

SEQ ID NO: 558332 - DNA, 33 bp, Homo sapien
cacatagtactgcttctactacccttaatctta

SEQ ID NO: 558333 - DNA, 33 bp, Homo sapien
agagaaacaagtttcaaaaatgaacagtagtca

SEQ ID NO: 558334 - DNA, 33 bp, Homo sapien
agagaaacaagtttcagaaatgaacagtagtca

SEQ ID NO: 558335 - DNA, 33 bp, Homo sapien
ggacatacttacaaacagaagcacgagggaact

SEQ ID NO: 558336 - DNA, 33 bp, Homo sapien
ggacatacttacaaacggaagcacgagggaact

SEQ ID NO: 558337 - DNA, 33 bp, Homo sapien
ttgttcatatttgagcggagaaaattaattttg

SEQ ID NO: 558338 - DNA, 33 bp, Homo sapien
ttgttcatatttgagctgagaaaattaattttg

SEQ ID NO: 558339 - DNA, 33 bp, Homo sapien
tccttcctagtttcaaatatgggctttttcaaa

SEQ ID NO: 558340 - DNA, 33 bp, Homo sapien
tccttcctagtttcaagtatgggctttttcaaa

SEQ ID NO: 558341 - DNA, 33 bp, Homo sapien
agaaagtcctcaggtaaagggtataattgctag

SEQ ID NO: 558342 - DNA, 33 bp, Homo sapien
agaaagtcctcaggtagagggtataattgctag

SEQ ID NO: 558343 - DNA, 33 bp, Homo sapien
gaatgacacaagctgaacagcaattgtctgagc

SEQ ID NO: 558344 - DNA, 33 bp, Homo sapien
gaatgacacaagctgagcagcaattgtctgagc

SEQ ID NO: 558345 - DNA, 33 bp, Homo sapien
ctgcacctaacttctcaccgtgtagcagtccag

SEQ ID NO: 558346 - DNA, 33 bp, Homo sapien
ctgcacctaacttctcgccgtgtagcagtccag

SEQ ID NO: 558347 - DNA, 33 bp, Homo sapien
gaaacagagagaaatacggtgctattaatccat

SEQ ID NO: 558348 - DNA, 33 bp, Homo sapien
gaaacagagagaaatatggtgctattaatccat

SEQ ID NO: 558349 - DNA, 33 bp, Homo sapien
ggccctagccatgaaccgaagataagtgagaaa

SEQ ID NO: 558350 - DNA, 33 bp, Homo sapien
ggccctagccatgaactgaagataagtgagaaa

SEQ ID NO: 558351 - DNA, 33 bp, Homo sapien
catttctcttttgcataacaagaatgatgtggg

SEQ ID NO: 558352 - DNA, 33 bp, Homo sapien
catttctcttttgcatgacaagaatgatgtggg

SEQ ID NO: 558353 - DNA, 33 bp, Homo sapien
tatttcttcctagtgaagctgactataaatgtt

SEQ ID NO: 558354 - DNA, 33 bp, Homo sapien
tatttcttcctagtgatgctgactataaatgtt

SEQ ID NO: 558355 - DNA, 33 bp, Homo sapien
cttcttccttttattaactatagcatgggttta

SEQ ID NO: 558356 - DNA, 33 bp, Homo sapien
cttcttccttttattagctatagcatgggttta

SEQ ID NO: 558357 - DNA, 33 bp, Homo sapien
cgggtattattcttcacctctgggaaaaacact

SEQ ID NO: 558358 - DNA, 33 bp, Homo sapien
cgggtattattcttcatctctgggaaaaacact

SEQ ID NO: 558359 - DNA, 33 bp, Homo sapien
ttattgctttatataaactgcctgatttctttg

SEQ ID NO: 558360 - DNA, 33 bp, Homo sapien
ttattgctttatataagctgcctgatttctttg

SEQ ID NO: 558361 - DNA, 33 bp, Homo sapien
ctgacatagctactaacagaggatatttattgt

SEQ ID NO: 558362 - DNA, 33 bp, Homo sapien
ctgacatagctactaatagaggatatttattgt

SEQ ID NO: 558363 - DNA, 33 bp, Homo sapien
tcaaaacagtgtacaacatttccctttctaata

SEQ ID NO: 558364 - DNA, 33 bp, Homo sapien
tcaaaacagtgtacaatatttccctttctaata

SEQ ID NO: 558365 - DNA, 33 bp, Homo sapien
ttgttattttgaagaacagagagtttaggagct

SEQ ID NO: 558366 - DNA, 33 bp, Homo sapien
ttgttattttgaagaagagagagtttaggagct

SEQ ID NO: 558367 - DNA, 33 bp, Homo sapien
tttggcctagaacacaaaaattgagcacttcag

SEQ ID NO: 558368 - DNA, 33 bp, Homo sapien
tttggcctagaacacagaaattgagcacttcag

SEQ ID NO: 558369 - DNA, 33 bp, Homo sapien
ctgactctattctgaaacctacagagatgggtg

SEQ ID NO: 558370 - DNA, 33 bp, Homo sapien
ctgactctattctgaagcctacagagatgggtg

SEQ ID NO: 558371 - DNA, 33 bp, Homo sapien
atgcaaggtgtggaaactaatattccctcactt

SEQ ID NO: 558372 - DNA, 33 bp, Homo sapien
atgcaaggtgtggaaagtaatattccctcactt

SEQ ID NO: 558373 - DNA, 33 bp, Homo sapien
ctctcccaagtactgactagacaaagggcaaaa

SEQ ID NO: 558374 - DNA, 33 bp, Homo sapien
ctctcccaagtactgattagacaaagggcaaaa

SEQ ID NO: 558375 - DNA, 33 bp, Homo sapien
cattcgggttcccaataagtaatgagagaaaca

SEQ ID NO: 558376 - DNA, 33 bp, Homo sapien
cattcgggttcccaatgagtaatgagagaaaca

SEQ ID NO: 558377 - DNA, 33 bp, Homo sapien
tatatagagctctcaaatatgtctttcaaaaga

SEQ ID NO: 558378 - DNA, 33 bp, Homo sapien
tatatagagctctcaagtatgtctttcaaaaga

SEQ ID NO: 558379 - DNA, 33 bp, Homo sapien
tttctccttgtaattacgccaatgagattgata

SEQ ID NO: 558380 - DNA, 33 bp, Homo sapien
tttctccttgtaattatgccaatgagattgata

SEQ ID NO: 558381 - DNA, 33 bp, Homo sapien
cgagagcgagccatcaaaatgttctcaagaatt

SEQ ID NO: 558382 - DNA, 33 bp, Homo sapien
cgagagcgagccatcagaatgttctcaagaatt

SEQ ID NO: 558383 - DNA, 33 bp, Homo sapien
cagcaattttcaaccaatgagaaactggaactg

SEQ ID NO: 558384 - DNA, 33 bp, Homo sapien
cagcaattttcaaccagtgagaaactggaactg

SEQ ID NO: 558385 - DNA, 33 bp, Homo sapien
gctgtgtgacctttgacaggctatttaacttcc

SEQ ID NO: 558386 - DNA, 33 bp, Homo sapien
gctgtgtgacctttgataggctatttaacttcc

SEQ ID NO: 558387 - DNA, 33 bp, Homo sapien
gttgacatccgtcatacgcaaagttcccatcaa

SEQ ID NO: 558388 - DNA, 33 bp, Homo sapien
gttgacatccgtcatatgcaaagttcccatcaa

SEQ ID NO: 558389 - DNA, 33 bp, Homo sapien
tccagtgttcaatgagcaagtaggaaaatagct

SEQ ID NO: 558390 - DNA, 33 bp, Homo sapien
tccagtgttcaatgaggaagtaggaaaatagct

SEQ ID NO: 558391 - DNA, 33 bp, Homo sapien
ctgctatgaacactcacatagaagtttctgtgt

SEQ ID NO: 558392 - DNA, 33 bp, Homo sapien
ctgctatgaacactcatatagaagtttctgtgt

SEQ ID NO: 558393 - DNA, 33 bp, Homo sapien
acttctgtctgcattagagacaaaattgagttc

SEQ ID NO: 558394 - DNA, 33 bp, Homo sapien
acttctgtctgcattatagacaaaattgagttc

SEQ ID NO: 558395 - DNA, 33 bp, Homo sapien
tgtaagcatttaaggccatacattctcccctga

SEQ ID NO: 558396 - DNA, 33 bp, Homo sapien
tgtaagcatttaaggctatacattctcccctga

SEQ ID NO: 558397 - DNA, 33 bp, Homo sapien
cttgccaatgacttacaatacaaactgatacac

SEQ ID NO: 558398 - DNA, 33 bp, Homo sapien
cttgccaatgacttacgatacaaactgatacac

SEQ ID NO: 558399 - DNA, 33 bp, Homo sapien
atgcatacttcttttacggcttgtgagggcagt

SEQ ID NO: 558400 - DNA, 33 bp, Homo sapien
atgcatacttcttttatggcttgtgagggcagt

SEQ ID NO: 558401 - DNA, 33 bp, Homo sapien
aggagtggagggggtacagatgtaacgtcaaag

SEQ ID NO: 558402 - DNA, 33 bp, Homo sapien
aggagtggagggggtagagatgtaacgtcaaag

SEQ ID NO: 558403 - DNA, 33 bp, Homo sapien
tgtgaaaaggaaatgacatatgatccttgtaaa

SEQ ID NO: 558404 - DNA, 33 bp, Homo sapien
tgtgaaaaggaaatgagatatgatccttgtaaa

SEQ ID NO: 558405 - DNA, 33 bp, Homo sapien
catggtttcacaccagcaaaatagagagatcat

SEQ ID NO: 558406 - DNA, 33 bp, Homo sapien
catggtttcacaccagtaaaatagagagatcat

SEQ ID NO: 558407 - DNA, 33 bp, Homo sapien
tcaatttgaattttcaatagtcatacgtggcta

SEQ ID NO: 558408 - DNA, 33 bp, Homo sapien
tcaatttgaattttcagtagtcatacgtggcta

SEQ ID NO: 558409 - DNA, 33 bp, Homo sapien
tacaattaagtacagaagagactaagcccaggg

SEQ ID NO: 558410 - DNA, 33 bp, Homo sapien
tacaattaagtacagaggagactaagcccaggg

SEQ ID NO: 558411 - DNA, 33 bp, Homo sapien
tagcgtagtaattccacagtgcaattccatact

SEQ ID NO: 558412 - DNA, 33 bp, Homo sapien
tagcgtagtaattccatagtgcaattccatact

SEQ ID NO: 558413 - DNA, 33 bp, Homo sapien
ttccttgttcctgaacgaagccaaaggtaggca

SEQ ID NO: 558414 - DNA, 33 bp, Homo sapien
ttccttgttcctgaactaagccaaaggtaggca

SEQ ID NO: 558415 - DNA, 33 bp, Homo sapien
tcttacccagttcaccaaagtgtaaatttaaag

SEQ ID NO: 558416 - DNA, 33 bp, Homo sapien
tcttacccagttcaccgaagtgtaaatttaaag

SEQ ID NO: 558417 - DNA, 33 bp, Homo sapien
taaagaacaaagcatgaatttaacaagttttta

SEQ ID NO: 558418 - DNA, 33 bp, Homo sapien
taaagaacaaagcatggatttaacaagttttta

SEQ ID NO: 558419 - DNA, 33 bp, Homo sapien
tcctaccgtgtgtccaaagtggagagagcagga

SEQ ID NO: 558420 - DNA, 33 bp, Homo sapien
tcctaccgtgtgtccagagtggagagagcagga

SEQ ID NO: 558421 - DNA, 33 bp, Homo sapien
ctgagcacgtagccagaaaaacatagctgcttc

SEQ ID NO: 558422 - DNA, 33 bp, Homo sapien
ctgagcacgtagccagcaaaacatagctgcttc

SEQ ID NO: 558423 - DNA, 33 bp, Homo sapien
gggcagtagtacaaaaagtttcttatccagcct

SEQ ID NO: 558424 - DNA, 33 bp, Homo sapien
gggcagtagtacaaaacgtttcttatccagcct

SEQ ID NO: 558425 - DNA, 33 bp, Homo sapien
tttcccatcatcctccaagcatttgtatggttt

SEQ ID NO: 558426 - DNA, 33 bp, Homo sapien
tttcccatcatcctccgagcatttgtatggttt

SEQ ID NO: 558427 - DNA, 33 bp, Homo sapien
ccagttggcaggtccactgaggcttgggtacat

SEQ ID NO: 558428 - DNA, 33 bp, Homo sapien
ccagttggcaggtccattgaggcttgggtacat

SEQ ID NO: 558429 - DNA, 33 bp, Homo sapien
aggactattataagcaagcctctcacttagggc

SEQ ID NO: 558430 - DNA, 33 bp, Homo sapien
aggactattataagcaggcctctcacttagggc

SEQ ID NO: 558431 - DNA, 33 bp, Homo sapien
cgagaaagaccatcagaaattctctgaaacaaa

SEQ ID NO: 558432 - DNA, 33 bp, Homo sapien
cgagaaagaccatcaggaattctctgaaacaaa

SEQ ID NO: 558433 - DNA, 33 bp, Homo sapien
gcatcctgaaagagaaaaagtggaattgtagtg

SEQ ID NO: 558434 - DNA, 33 bp, Homo sapien
gcatcctgaaagagaagaagtggaattgtagtg

SEQ ID NO: 558435 - DNA, 33 bp, Homo sapien
agtgtcaaggtctggaagagaatatgggactgc

SEQ ID NO: 558436 - DNA, 33 bp, Homo sapien
agtgtcaaggtctggatgagaatatgggactgc

SEQ ID NO: 558437 - DNA, 33 bp, Homo sapien
ggcttttggaaattggaaactcttggctcagat

SEQ ID NO: 558438 - DNA, 33 bp, Homo sapien
ggcttttggaaattggcaactcttggctcagat

SEQ ID NO: 558439 - DNA, 33 bp, Homo sapien
acaactgctgtactaaactactccatttttagg

SEQ ID NO: 558440 - DNA, 33 bp, Homo sapien
acaactgctgtactaagctactccatttttagg

SEQ ID NO: 558441 - DNA, 33 bp, Homo sapien
catttctttgctttccaagtctggatttagagg

SEQ ID NO: 558442 - DNA, 33 bp, Homo sapien
catttctttgctttccgagtctggatttagagg

SEQ ID NO: 558443 - DNA, 33 bp, Homo sapien
ggctagtgccatcttgaagcttttgtcgctccc

SEQ ID NO: 558444 - DNA, 33 bp, Homo sapien
ggctagtgccatcttgtagcttttgtcgctccc

SEQ ID NO: 558445 - DNA, 33 bp, Homo sapien
ggaagtacagtgaaagcaagccttctacagaca

SEQ ID NO: 558446 - DNA, 33 bp, Homo sapien
ggaagtacagtgaaagtaagccttctacagaca

SEQ ID NO: 558447 - DNA, 33 bp, Homo sapien
aaaagttgatcctaacagctttcaacctgatat

SEQ ID NO: 558448 - DNA, 33 bp, Homo sapien
aaaagttgatcctaacggctttcaacctgatat

SEQ ID NO: 558449 - DNA, 33 bp, Homo sapien
aaccatggtcacctgacatagacacaagtgatg

SEQ ID NO: 558450 - DNA, 33 bp, Homo sapien
aaccatggtcacctgatatagacacaagtgatg

SEQ ID NO: 558451 - DNA, 33 bp, Homo sapien
cactgaattttgtcaaatgtttatcctgtgttt

SEQ ID NO: 558452 - DNA, 33 bp, Homo sapien
cactgaattttgtcaagtgtttatcctgtgttt

SEQ ID NO: 558453 - DNA, 33 bp, Homo sapien
gcttatcaacctattaactctgtattaagccct

SEQ ID NO: 558454 - DNA, 33 bp, Homo sapien
gcttatcaacctattacctctgtattaagccct

SEQ ID NO: 558455 - DNA, 33 bp, Homo sapien
gtttatttttttgtcacaagaagaatggagttc

SEQ ID NO: 558456 - DNA, 33 bp, Homo sapien
gtttatttttttgtcataagaagaatggagttc

SEQ ID NO: 558457 - DNA, 33 bp, Homo sapien
atatgagcccagctgaaaacaacagagaagggc

SEQ ID NO: 558458 - DNA, 33 bp, Homo sapien
atatgagcccagctgagaacaacagagaagggc

SEQ ID NO: 558459 - DNA, 33 bp, Homo sapien
gtgaggaaatggaccacggagaaggcagaggca

SEQ ID NO: 558460 - DNA, 33 bp, Homo sapien
gtgaggaaatggaccatggagaaggcagaggca

SEQ ID NO: 558461 - DNA, 33 bp, Homo sapien
acactgatacccactggcactcctaacgcttta

SEQ ID NO: 558462 - DNA, 33 bp, Homo sapien
acactgatacccactgtcactcctaacgcttta

SEQ ID NO: 558463 - DNA, 33 bp, Homo sapien
ctttgggaaacttgagacaaacaatttccttgc

SEQ ID NO: 558464 - DNA, 33 bp, Homo sapien
ctttgggaaacttgaggcaaacaatttccttgc

SEQ ID NO: 558465 - DNA, 33 bp, Homo sapien
cttcctcaactcaatccgaaaatattcatttag

SEQ ID NO: 558466 - DNA, 33 bp, Homo sapien
cttcctcaactcaatctgaaaatattcatttag

SEQ ID NO: 558467 - DNA, 33 bp, Homo sapien
ccaagagcagattgaaccttgtaaaactcctga

SEQ ID NO: 558468 - DNA, 33 bp, Homo sapien
ccaagagcagattgaagcttgtaaaactcctga

SEQ ID NO: 558469 - DNA, 33 bp, Homo sapien
tcagtcaagaagatcaacttccacaagcttcca

SEQ ID NO: 558470 - DNA, 33 bp, Homo sapien
tcagtcaagaagatcagcttccacaagcttcca

SEQ ID NO: 558471 - DNA, 33 bp, Homo sapien
tgtggttaacaagttaaagaaaacacattgcca

SEQ ID NO: 558472 - DNA, 33 bp, Homo sapien
tgtggttaacaagttagagaaaacacattgcca

SEQ ID NO: 558473 - DNA, 33 bp, Homo sapien
tatgtataagcaataaccgaggaatacaaaatt

SEQ ID NO: 558474 - DNA, 33 bp, Homo sapien
tatgtataagcaataatcgaggaatacaaaatt

SEQ ID NO: 558475 - DNA, 33 bp, Homo sapien
ttgagttcttgtctgaaatatactggtcaccta

SEQ ID NO: 558476 - DNA, 33 bp, Homo sapien
ttgagttcttgtctgagatatactggtcaccta

SEQ ID NO: 558477 - DNA, 33 bp, Homo sapien
tgatggccaccattagaaacgaggaacaggcaa

SEQ ID NO: 558478 - DNA, 33 bp, Homo sapien
tgatggccaccattaggaacgaggaacaggcaa

SEQ ID NO: 558479 - DNA, 33 bp, Homo sapien
tcacatagtgattacaagttccagctctgccat

SEQ ID NO: 558480 - DNA, 33 bp, Homo sapien
tcacatagtgattacacgttccagctctgccat

SEQ ID NO: 558481 - DNA, 33 bp, Homo sapien
gttactatgtaacgaaacatcccaaaacgtagt

SEQ ID NO: 558482 - DNA, 33 bp, Homo sapien
gttactatgtaacgaaccatcccaaaacgtagt

SEQ ID NO: 558483 - DNA, 33 bp, Homo sapien
catgcctccatttacccacagctttggttagtg

SEQ ID NO: 558484 - DNA, 33 bp, Homo sapien
catgcctccatttacctacagctttggttagtg

SEQ ID NO: 558485 - DNA, 33 bp, Homo sapien
attaagcaggaaagagaaaactctcctggaaga

SEQ ID NO: 558486 - DNA, 33 bp, Homo sapien
attaagcaggaaagaggaaactctcctggaaga

SEQ ID NO: 558487 - DNA, 33 bp, Homo sapien
actctcagctttctacccggtcctcccgacatc

SEQ ID NO: 558488 - DNA, 33 bp, Homo sapien
actctcagctttctacgcggtcctcccgacatc

SEQ ID NO: 558489 - DNA, 33 bp, Homo sapien
gcatgtcaatttgaccagatactttgcccagaa

SEQ ID NO: 558490 - DNA, 33 bp, Homo sapien
gcatgtcaatttgaccggatactttgcccagaa

SEQ ID NO: 558491 - DNA, 33 bp, Homo sapien
ctcacaggctacgttaaccagactcattttttg

SEQ ID NO: 558492 - DNA, 33 bp, Homo sapien
ctcacaggctacgttacccagactcattttttg

SEQ ID NO: 558493 - DNA, 33 bp, Homo sapien
tctctctacattgacaatcatggaatcccaagt

SEQ ID NO: 558494 - DNA, 33 bp, Homo sapien
tctctctacattgacagtcatggaatcccaagt

SEQ ID NO: 558495 - DNA, 33 bp, Homo sapien
agcttctagacagaaccgagcacttcaggccta

SEQ ID NO: 558496 - DNA, 33 bp, Homo sapien
agcttctagacagaactgagcacttcaggccta

SEQ ID NO: 558497 - DNA, 33 bp, Homo sapien
aggatcccttggacataatgagccatttttctc

SEQ ID NO: 558498 - DNA, 33 bp, Homo sapien
aggatcccttggacatcatgagccatttttctc

SEQ ID NO: 558499 - DNA, 33 bp, Homo sapien
ccctaaaaactaccacgcttgaagcttatcttt

SEQ ID NO: 558500 - DNA, 33 bp, Homo sapien
ccctaaaaactaccactcttgaagcttatcttt

SEQ ID NO: 558501 - DNA, 33 bp, Homo sapien
tagtatcaataaaatcacacgagatattcttgc

SEQ ID NO: 558502 - DNA, 33 bp, Homo sapien
tagtatcaataaaatcgcacgagatattcttgc

SEQ ID NO: 558503 - DNA, 33 bp, Homo sapien
taccatggaccctacaagattagctggtggtgg

SEQ ID NO: 558504 - DNA, 33 bp, Homo sapien
taccatggaccctacaggattagctggtggtgg

SEQ ID NO: 558505 - DNA, 33 bp, Homo sapien
ctgaatttctctggaaccattgttaagcattta

SEQ ID NO: 558506 - DNA, 33 bp, Homo sapien
ctgaatttctctggaatcattgttaagcattta

SEQ ID NO: 558507 - DNA, 33 bp, Homo sapien
ttgttgatatggttcacattactcaaagatgtc

SEQ ID NO: 558508 - DNA, 33 bp, Homo sapien
ttgttgatatggttcatattactcaaagatgtc

SEQ ID NO: 558509 - DNA, 33 bp, Homo sapien
aaaattcaatgctcaactggtgaaggttttttt

SEQ ID NO: 558510 - DNA, 33 bp, Homo sapien
aaaattcaatgctcaattggtgaaggttttttt

SEQ ID NO: 558511 - DNA, 33 bp, Homo sapien
tgtggtttgctattcaacccaaccttttggaga

SEQ ID NO: 558512 - DNA, 33 bp, Homo sapien
tgtggtttgctattcagcccaaccttttggaga

SEQ ID NO: 558513 - DNA, 33 bp, Homo sapien
agtggtaagtctaataactaccataatttcaaa

SEQ ID NO: 558514 - DNA, 33 bp, Homo sapien
agtggtaagtctaatagctaccataatttcaaa

SEQ ID NO: 558515 - DNA, 33 bp, Homo sapien
tggcagggtggagcagaaggggatcagcatctt

SEQ ID NO: 558516 - DNA, 33 bp, Homo sapien
tggcagggtggagcaggaggggatcagcatctt

SEQ ID NO: 558517 - DNA, 33 bp, Homo sapien
gcttgttttccatgacacggcaacacagctgaa

SEQ ID NO: 558518 - DNA, 33 bp, Homo sapien
gcttgttttccatgacgcggcaacacagctgaa

SEQ ID NO: 558519 - DNA, 33 bp, Homo sapien
ggctgtacatttgctcgactcacttcagatatc

SEQ ID NO: 558520 - DNA, 33 bp, Homo sapien
ggctgtacatttgctctactcacttcagatatc

SEQ ID NO: 558521 - DNA, 33 bp, Homo sapien
catgcctggattgcctaacctgaaaggcaagga

SEQ ID NO: 558522 - DNA, 33 bp, Homo sapien
catgcctggattgcctgacctgaaaggcaagga

SEQ ID NO: 558523 - DNA, 33 bp, Homo sapien
catgttgtcctgagaactggatgtgatgatgta

SEQ ID NO: 558524 - DNA, 33 bp, Homo sapien
catgttgtcctgagaattggatgtgatgatgta

SEQ ID NO: 558525 - DNA, 33 bp, Homo sapien
tatagctgagaaaaccaaggtacaatgaggtta

SEQ ID NO: 558526 - DNA, 33 bp, Homo sapien
tatagctgagaaaaccgaggtacaatgaggtta

SEQ ID NO: 558527 - DNA, 33 bp, Homo sapien
cttatgtacaaatcaaacagttcaatttgcttg

SEQ ID NO: 558528 - DNA, 33 bp, Homo sapien
cttatgtacaaatcaagcagttcaatttgcttg

SEQ ID NO: 558529 - DNA, 33 bp, Homo sapien
gagccttaattatacacgcaggatccatttacg

SEQ ID NO: 558530 - DNA, 33 bp, Homo sapien
gagccttaattatacatgcaggatccatttacg

SEQ ID NO: 558531 - DNA, 33 bp, Homo sapien
attccagtggcttcacagagagcatattgattc

SEQ ID NO: 558532 - DNA, 33 bp, Homo sapien
attccagtggcttcacggagagcatattgattc

SEQ ID NO: 558533 - DNA, 33 bp, Homo sapien
atggagccatgtttgcacttgtgattaaagcag

SEQ ID NO: 558534 - DNA, 33 bp, Homo sapien
atggagccatgtttgcccttgtgattaaagcag

SEQ ID NO: 558535 - DNA, 33 bp, Homo sapien
attatcttttctaccacagatatatcatttgct

SEQ ID NO: 558536 - DNA, 33 bp, Homo sapien
attatcttttctaccagagatatatcatttgct

SEQ ID NO: 558537 - DNA, 33 bp, Homo sapien
acccttggctgcccgaccactcattcacaggtg

SEQ ID NO: 558538 - DNA, 33 bp, Homo sapien
acccttggctgcccgatcactcattcacaggtg

SEQ ID NO: 558539 - DNA, 33 bp, Homo sapien
caggagatttaaatgcacccctccagatttgag

SEQ ID NO: 558540 - DNA, 33 bp, Homo sapien
caggagatttaaatgcgcccctccagatttgag

SEQ ID NO: 558541 - DNA, 33 bp, Homo sapien
tagaggaatcaacaaaccactgaatcaggaaaa

SEQ ID NO: 558542 - DNA, 33 bp, Homo sapien
tagaggaatcaacaaatcactgaatcaggaaaa

SEQ ID NO: 558543 - DNA, 33 bp, Homo sapien
aaaaaaaaatagctcacaaacaagtggaagttg

SEQ ID NO: 558544 - DNA, 33 bp, Homo sapien
aaaaaaaaatagctcataaacaagtggaagttg

SEQ ID NO: 558545 - DNA, 33 bp, Homo sapien
tagaaccaggtagtaactattttcagcttttgg

SEQ ID NO: 558546 - DNA, 33 bp, Homo sapien
tagaaccaggtagtaattattttcagcttttgg

SEQ ID NO: 558547 - DNA, 33 bp, Homo sapien
aacacaggaaacttgactatgtgtgagagagag

SEQ ID NO: 558548 - DNA, 33 bp, Homo sapien
aacacaggaaacttgagtatgtgtgagagagag

SEQ ID NO: 558549 - DNA, 33 bp, Homo sapien
agtggtagtagaacaaagtgtgtccctgtcagt

SEQ ID NO: 558550 - DNA, 33 bp, Homo sapien
agtggtagtagaacaatgtgtgtccctgtcagt

SEQ ID NO: 558551 - DNA, 33 bp, Homo sapien
ttctctgtgagtagcacatttgaagaaggcatg

SEQ ID NO: 558552 - DNA, 33 bp, Homo sapien
ttctctgtgagtagcatatttgaagaaggcatg

SEQ ID NO: 558553 - DNA, 33 bp, Homo sapien
cttagataagaaaaaacgagacggaaaggctga

SEQ ID NO: 558554 - DNA, 33 bp, Homo sapien
cttagataagaaaaaatgagacggaaaggctga

SEQ ID NO: 558555 - DNA, 33 bp, Homo sapien
cttgctgggaaacagagatgtaagtagctctgc

SEQ ID NO: 558556 - DNA, 33 bp, Homo sapien
cttgctgggaaacagatatgtaagtagctctgc

SEQ ID NO: 558557 - DNA, 33 bp, Homo sapien
tatacaaacctggaatcaaaaagagaaaacatg

SEQ ID NO: 558558 - DNA, 33 bp, Homo sapien
tatacaaacctggaatgaaaaagagaaaacatg

SEQ ID NO: 558559 - DNA, 33 bp, Homo sapien
tttgtaattagccagcaaagacatccattgctg

SEQ ID NO: 558560 - DNA, 33 bp, Homo sapien
tttgtaattagccagcgaagacatccattgctg

SEQ ID NO: 558561 - DNA, 33 bp, Homo sapien
aaccctagagacaaacaggaaaattgtaccaat

SEQ ID NO: 558562 - DNA, 33 bp, Homo sapien
aaccctagagacaaactggaaaattgtaccaat

SEQ ID NO: 558563 - DNA, 33 bp, Homo sapien
agccagttttaatagaaggctgtggtcctctgg

SEQ ID NO: 558564 - DNA, 33 bp, Homo sapien
agccagttttaatagatggctgtggtcctctgg

SEQ ID NO: 558565 - DNA, 33 bp, Homo sapien
ttttgtactggatggaaattaaagatagataaa

SEQ ID NO: 558566 - DNA, 33 bp, Homo sapien
ttttgtactggatggagattaaagatagataaa

SEQ ID NO: 558567 - DNA, 33 bp, Homo sapien
acgtggcagtcagcaaatccctactgcgagtca

SEQ ID NO: 558568 - DNA, 33 bp, Homo sapien
acgtggcagtcagcaagtccctactgcgagtca

SEQ ID NO: 558569 - DNA, 33 bp, Homo sapien
ggttctaaaagtcacccggcatggtctgaagtt

SEQ ID NO: 558570 - DNA, 33 bp, Homo sapien
ggttctaaaagtcacctggcatggtctgaagtt

SEQ ID NO: 558571 - DNA, 33 bp, Homo sapien
ctgcttttgatggctacgttttggagagagcaa

SEQ ID NO: 558572 - DNA, 33 bp, Homo sapien
ctgcttttgatggctatgttttggagagagcaa

SEQ ID NO: 558573 - DNA, 33 bp, Homo sapien
cacccaccattacacaatccttggctcctctag

SEQ ID NO: 558574 - DNA, 33 bp, Homo sapien
cacccaccattacacagtccttggctcctctag

SEQ ID NO: 558575 - DNA, 33 bp, Homo sapien
acccccactgctacaactgggaacatggagata

SEQ ID NO: 558576 - DNA, 33 bp, Homo sapien
acccccactgctacaattgggaacatggagata

SEQ ID NO: 558577 - DNA, 33 bp, Homo sapien
gctagagcttttataccactccactaaaaattc

SEQ ID NO: 558578 - DNA, 33 bp, Homo sapien
gctagagcttttatacgactccactaaaaattc

SEQ ID NO: 558579 - DNA, 33 bp, Homo sapien
caacattatgaggtagccaaactggtgagaata

SEQ ID NO: 558580 - DNA, 33 bp, Homo sapien
caacattatgaggtagtcaaactggtgagaata

SEQ ID NO: 558581 - DNA, 33 bp, Homo sapien
tttaagtgagagtgaaagggccagcctctcttg

SEQ ID NO: 558582 - DNA, 33 bp, Homo sapien
tttaagtgagagtgaaggggccagcctctcttg

SEQ ID NO: 558583 - DNA, 33 bp, Homo sapien
acttaccaattcacaacggctaaataaattatg

SEQ ID NO: 558584 - DNA, 33 bp, Homo sapien
acttaccaattcacaatggctaaataaattatg

SEQ ID NO: 558585 - DNA, 33 bp, Homo sapien
atctttttgtaacagcagatataagcttactta

SEQ ID NO: 558586 - DNA, 33 bp, Homo sapien
atctttttgtaacagcggatataagcttactta

SEQ ID NO: 558587 - DNA, 33 bp, Homo sapien
cagatggtgtcagtccgctggataaaccctttg

SEQ ID NO: 558588 - DNA, 33 bp, Homo sapien
cagatggtgtcagtcctctggataaaccctttg

SEQ ID NO: 558589 - DNA, 33 bp, Homo sapien
atgggcgataaagccaaatttttttatttgaga

SEQ ID NO: 558590 - DNA, 33 bp, Homo sapien
atgggcgataaagccagatttttttatttgaga

SEQ ID NO: 558591 - DNA, 33 bp, Homo sapien
aaaccaaatagagtggaaacacatcatcaccag

SEQ ID NO: 558592 - DNA, 33 bp, Homo sapien
aaaccaaatagagtgggaacacatcatcaccag

SEQ ID NO: 558593 - DNA, 33 bp, Homo sapien
gtttgctaagaaattgaaatgtaggaagtggat

SEQ ID NO: 558594 - DNA, 33 bp, Homo sapien
gtttgctaagaaattggaatgtaggaagtggat

SEQ ID NO: 558595 - DNA, 33 bp, Homo sapien
gccagtcagtctagacccttcaatttgccttct

SEQ ID NO: 558596 - DNA, 33 bp, Homo sapien
gccagtcagtctagactcttcaatttgccttct

SEQ ID NO: 558597 - DNA, 33 bp, Homo sapien
ttgaagaatcttctgacagcgagaaaaactctt

SEQ ID NO: 558598 - DNA, 33 bp, Homo sapien
ttgaagaatcttctgagagcgagaaaaactctt

SEQ ID NO: 558599 - DNA, 33 bp, Homo sapien
tggtatttatttcagaatcgcaattatttcttt

SEQ ID NO: 558600 - DNA, 33 bp, Homo sapien
tggtatttatttcagattcgcaattatttcttt

SEQ ID NO: 558601 - DNA, 33 bp, Homo sapien
tccttcaaaagttcagcctctcctaaaagcaga

SEQ ID NO: 558602 - DNA, 33 bp, Homo sapien
tccttcaaaagttcagtctctcctaaaagcaga

SEQ ID NO: 558603 - DNA, 33 bp, Homo sapien
acaagtaaaaactatccgaatgtgataaagaag

SEQ ID NO: 558604 - DNA, 33 bp, Homo sapien
acaagtaaaaactatctgaatgtgataaagaag

SEQ ID NO: 558605 - DNA, 33 bp, Homo sapien
tttgtgtgtatcaccaccaggcaaaaataatcc

SEQ ID NO: 558606 - DNA, 33 bp, Homo sapien
tttgtgtgtatcaccatcaggcaaaaataatcc

SEQ ID NO: 558607 - DNA, 33 bp, Homo sapien
aaagcagctatttaaaacatgtaaacaaatgtg

SEQ ID NO: 558608 - DNA, 33 bp, Homo sapien
aaagcagctatttaaaccatgtaaacaaatgtg

SEQ ID NO: 558609 - DNA, 33 bp, Homo sapien
cttccaacactggacaatacacatcaacataag

SEQ ID NO: 558610 - DNA, 33 bp, Homo sapien
cttccaacactggacattacacatcaacataag

SEQ ID NO: 558611 - DNA, 33 bp, Homo sapien
atgaaactagcttaacagcgctagagatcctca

SEQ ID NO: 558612 - DNA, 33 bp, Homo sapien
atgaaactagcttaaccgcgctagagatcctca

SEQ ID NO: 558613 - DNA, 33 bp, Homo sapien
tttttaacaaggataacagaagaaagacattca

SEQ ID NO: 558614 - DNA, 33 bp, Homo sapien
tttttaacaaggataatagaagaaagacattca

SEQ ID NO: 558615 - DNA, 33 bp, Homo sapien
tgtaggtacagacataaacacgcctcggttaag

SEQ ID NO: 558616 - DNA, 33 bp, Homo sapien
tgtaggtacagacatacacacgcctcggttaag

SEQ ID NO: 558617 - DNA, 33 bp, Homo sapien
aaacgagcaacacaaaactagtaatagcaatat

SEQ ID NO: 558618 - DNA, 33 bp, Homo sapien
aaacgagcaacacaaagctagtaatagcaatat

SEQ ID NO: 558619 - DNA, 33 bp, Homo sapien
ctgtgttgatctgttaacgagtttattgtttca

SEQ ID NO: 558620 - DNA, 33 bp, Homo sapien
ctgtgttgatctgttagcgagtttattgtttca

SEQ ID NO: 558621 - DNA, 33 bp, Homo sapien
ggaaaaagtatttgtcacaattttactccagaa

SEQ ID NO: 558622 - DNA, 33 bp, Homo sapien
ggaaaaagtatttgtctcaattttactccagaa

SEQ ID NO: 558623 - DNA, 33 bp, Homo sapien
ggcaaccacagaggccacacattacagagcata

SEQ ID NO: 558624 - DNA, 33 bp, Homo sapien
ggcaaccacagaggccgcacattacagagcata

SEQ ID NO: 558625 - DNA, 33 bp, Homo sapien
aatacagcaagttgaaaaaaatttcatacaata

SEQ ID NO: 558626 - DNA, 33 bp, Homo sapien
aatacagcaagttgaagaaaatttcatacaata

SEQ ID NO: 558627 - DNA, 33 bp, Homo sapien
tctcatgaatatgttaagcataagaagcaaaac

SEQ ID NO: 558628 - DNA, 33 bp, Homo sapien
tctcatgaatatgttaggcataagaagcaaaac

SEQ ID NO: 558629 - DNA, 33 bp, Homo sapien
ggaaaggagacggaaagtggaaggctgtggccc

SEQ ID NO: 558630 - DNA, 33 bp, Homo sapien
ggaaaggagacggaaattggaaggctgtggccc

SEQ ID NO: 558631 - DNA, 33 bp, Homo sapien
tcacagagaaagagaccgaacattaaacaccat

SEQ ID NO: 558632 - DNA, 33 bp, Homo sapien
tcacagagaaagagactgaacattaaacaccat

SEQ ID NO: 558633 - DNA, 33 bp, Homo sapien
catggtatagcagatcacattttccaaaatgat

SEQ ID NO: 558634 - DNA, 33 bp, Homo sapien
catggtatagcagatcgcattttccaaaatgat

SEQ ID NO: 558635 - DNA, 33 bp, Homo sapien
acaatgctatcttctaccccacgtgctcttctt

SEQ ID NO: 558636 - DNA, 33 bp, Homo sapien
acaatgctatcttctatcccacgtgctcttctt

SEQ ID NO: 558637 - DNA, 33 bp, Homo sapien
tgaaacctgtcagccaaaacacctacatatggc

SEQ ID NO: 558638 - DNA, 33 bp, Homo sapien
tgaaacctgtcagccagaacacctacatatggc

SEQ ID NO: 558639 - DNA, 33 bp, Homo sapien
taggcttgagttaaaaacacctggcaacaacaa

SEQ ID NO: 558640 - DNA, 33 bp, Homo sapien
taggcttgagttaaaatcacctggcaacaacaa

SEQ ID NO: 558641 - DNA, 33 bp, Homo sapien
aaccatttacaaattaaaatccaccagaatgac

SEQ ID NO: 558642 - DNA, 33 bp, Homo sapien
aaccatttacaaattagaatccaccagaatgac

SEQ ID NO: 558643 - DNA, 33 bp, Homo sapien
tttccttttccacagcgatcacggtttcccatt

SEQ ID NO: 558644 - DNA, 33 bp, Homo sapien
tttccttttccacagctatcacggtttcccatt

SEQ ID NO: 558645 - DNA, 33 bp, Homo sapien
acccagagagtgaaccaccaggaagtgagatta

SEQ ID NO: 558646 - DNA, 33 bp, Homo sapien
acccagagagtgaaccgccaggaagtgagatta

SEQ ID NO: 558647 - DNA, 33 bp, Homo sapien
aacattttgcagagataaataagtactccattt

SEQ ID NO: 558648 - DNA, 33 bp, Homo sapien
aacattttgcagagattaataagtactccattt

SEQ ID NO: 558649 - DNA, 33 bp, Homo sapien
gctaagaagtggatgacgggtattgactgggga

SEQ ID NO: 558650 - DNA, 33 bp, Homo sapien
gctaagaagtggatgatgggtattgactgggga

SEQ ID NO: 558651 - DNA, 33 bp, Homo sapien
cttaccataccaacaacgagttccaaggaatta

SEQ ID NO: 558652 - DNA, 33 bp, Homo sapien
cttaccataccaacaatgagttccaaggaatta

SEQ ID NO: 558653 - DNA, 33 bp, Homo sapien
tttcggtcaattcaacaaacactttagaacacc

SEQ ID NO: 558654 - DNA, 33 bp, Homo sapien
tttcggtcaattcaacgaacactttagaacacc

SEQ ID NO: 558655 - DNA, 33 bp, Homo sapien
tttgctggaattatgacaaagtgaagaaaaagg

SEQ ID NO: 558656 - DNA, 33 bp, Homo sapien
tttgctggaattatgataaagtgaagaaaaagg

SEQ ID NO: 558657 - DNA, 33 bp, Homo sapien
aagtgtgatttattaactgtaagaggcaaaagc

SEQ ID NO: 558658 - DNA, 33 bp, Homo sapien
aagtgtgatttattaagtgtaagaggcaaaagc

SEQ ID NO: 558659 - DNA, 33 bp, Homo sapien
tgtaagaggcaaaagcaaagagtgatttttacc

SEQ ID NO: 558660 - DNA, 33 bp, Homo sapien
tgtaagaggcaaaagccaagagtgatttttacc

SEQ ID NO: 558661 - DNA, 33 bp, Homo sapien
tagcataaatgaaacaaatctatttagcctaaa

SEQ ID NO: 558662 - DNA, 33 bp, Homo sapien
tagcataaatgaaacagatctatttagcctaaa

SEQ ID NO: 558663 - DNA, 33 bp, Homo sapien
gtagggcccagaaagacgctatgtttgatgatc

SEQ ID NO: 558664 - DNA, 33 bp, Homo sapien
gtagggcccagaaagatgctatgtttgatgatc

SEQ ID NO: 558665 - DNA, 33 bp, Homo sapien
aagagcccatttctacccttcatcattttcaag

SEQ ID NO: 558666 - DNA, 33 bp, Homo sapien
aagagcccatttctactcttcatcattttcaag

SEQ ID NO: 558667 - DNA, 33 bp, Homo sapien
gaacgtgtgagagccaaagtggatgcatgatca

SEQ ID NO: 558668 - DNA, 33 bp, Homo sapien
gaacgtgtgagagccagagtggatgcatgatca

SEQ ID NO: 558669 - DNA, 33 bp, Homo sapien
gtgctgagtgagttgacgaggagcatgaggaaa

SEQ ID NO: 558670 - DNA, 33 bp, Homo sapien
gtgctgagtgagttgatgaggagcatgaggaaa

SEQ ID NO: 558671 - DNA, 33 bp, Homo sapien
atgacctccttgcttcaattccagtagttctca

SEQ ID NO: 558672 - DNA, 33 bp, Homo sapien
atgacctccttgcttcgattccagtagttctca

SEQ ID NO: 558673 - DNA, 33 bp, Homo sapien
ataatttgcatttctaataaattcccaagtgtt

SEQ ID NO: 558674 - DNA, 33 bp, Homo sapien
ataatttgcatttctagtaaattcccaagtgtt

SEQ ID NO: 558675 - DNA, 33 bp, Homo sapien
catgtttgtattaaaaattcacctttgctgtta

SEQ ID NO: 558676 - DNA, 33 bp, Homo sapien
catgtttgtattaaaacttcacctttgctgtta

SEQ ID NO: 558677 - DNA, 33 bp, Homo sapien
cacgtcagattcaacaatggaaagaggataatg

SEQ ID NO: 558678 - DNA, 33 bp, Homo sapien
cacgtcagattcaacactggaaagaggataatg

SEQ ID NO: 558679 - DNA, 33 bp, Homo sapien
acatgcaccaatcttaccaccaaaacaaccaat

SEQ ID NO: 558680 - DNA, 33 bp, Homo sapien
acatgcaccaatcttatcaccaaaacaaccaat

SEQ ID NO: 558681 - DNA, 33 bp, Homo sapien
tagaagcaataatctaaaagcaattttaatcta

SEQ ID NO: 558682 - DNA, 33 bp, Homo sapien
tagaagcaataatctagaagcaattttaatcta

SEQ ID NO: 558683 - DNA, 33 bp, Homo sapien
ctagagggtactcaagaaaagcctgctgggtga

SEQ ID NO: 558684 - DNA, 33 bp, Homo sapien
ctagagggtactcaaggaaagcctgctgggtga

SEQ ID NO: 558685 - DNA, 33 bp, Homo sapien
ctgtccttcaggaaaaaaagtacatatgggaaa

SEQ ID NO: 558686 - DNA, 33 bp, Homo sapien
ctgtccttcaggaaaagaagtacatatgggaaa

SEQ ID NO: 558687 - DNA, 33 bp, Homo sapien
ttctaaaaatttcaacaggcaaatagttccatg

SEQ ID NO: 558688 - DNA, 33 bp, Homo sapien
ttctaaaaatttcaacgggcaaatagttccatg

SEQ ID NO: 558689 - DNA, 33 bp, Homo sapien
tagacacatattaaaacgacatatcaaagtgag

SEQ ID NO: 558690 - DNA, 33 bp, Homo sapien
tagacacatattaaaatgacatatcaaagtgag

SEQ ID NO: 558691 - DNA, 33 bp, Homo sapien
agatctgtgttggccaatacagccgatactagc

SEQ ID NO: 558692 - DNA, 33 bp, Homo sapien
agatctgtgttggccagtacagccgatactagc

SEQ ID NO: 558693 - DNA, 33 bp, Homo sapien
ggaagacagtcccaacaacgaaaactatccaaa

SEQ ID NO: 558694 - DNA, 33 bp, Homo sapien
ggaagacagtcccaacgacgaaaactatccaaa

SEQ ID NO: 558695 - DNA, 33 bp, Homo sapien
ttcttgggagtgaggaatagtctaattcttttc

SEQ ID NO: 558696 - DNA, 33 bp, Homo sapien
ttcttgggagtgaggagtagtctaattcttttc

SEQ ID NO: 558697 - DNA, 33 bp, Homo sapien
attgagccctcacatacgaaaagaattagacta

SEQ ID NO: 558698 - DNA, 33 bp, Homo sapien
attgagccctcacatatgaaaagaattagacta

SEQ ID NO: 558699 - DNA, 33 bp, Homo sapien
ctgaatagaggtaatacgcctttttctccaaga

SEQ ID NO: 558700 - DNA, 33 bp, Homo sapien
ctgaatagaggtaatatgcctttttctccaaga

SEQ ID NO: 558701 - DNA, 33 bp, Homo sapien
catcagtgcttcggctaagagcttcatcccggc

SEQ ID NO: 558702 - DNA, 33 bp, Homo sapien
catcagtgcttcggctgagagcttcatcccggc

SEQ ID NO: 558703 - DNA, 33 bp, Homo sapien
tgctgcccaagttacacatcaagtggctgacta

SEQ ID NO: 558704 - DNA, 33 bp, Homo sapien
tgctgcccaagttacatatcaagtggctgacta

SEQ ID NO: 558705 - DNA, 33 bp, Homo sapien
atgaactacacttcacaattccaggctgctgct

SEQ ID NO: 558706 - DNA, 33 bp, Homo sapien
atgaactacacttcacgattccaggctgctgct

SEQ ID NO: 558707 - DNA, 33 bp, Homo sapien
acagcaccaagtacaacgtcttgatttgtctac

SEQ ID NO: 558708 - DNA, 33 bp, Homo sapien
acagcaccaagtacaatgtcttgatttgtctac

SEQ ID NO: 558709 - DNA, 33 bp, Homo sapien
accttcagaagataacacggtaattcttaaaga

SEQ ID NO: 558710 - DNA, 33 bp, Homo sapien
accttcagaagataactcggtaattcttaaaga

SEQ ID NO: 558711 - DNA, 33 bp, Homo sapien
cttctggggtaagtgaagagtttataggttgag

SEQ ID NO: 558712 - DNA, 33 bp, Homo sapien
cttctggggtaagtgaggagtttataggttgag

SEQ ID NO: 558713 - DNA, 33 bp, Homo sapien
agtcttgtctttgaacaaggtccatagaggcct

SEQ ID NO: 558714 - DNA, 33 bp, Homo sapien
agtcttgtctttgaactaggtccatagaggcct

SEQ ID NO: 558715 - DNA, 33 bp, Homo sapien
tagggcactggcatgacaggaagctgtaaacac

SEQ ID NO: 558716 - DNA, 33 bp, Homo sapien
tagggcactggcatgataggaagctgtaaacac

SEQ ID NO: 558717 - DNA, 33 bp, Homo sapien
agttcccatatgaagcacaagtttagccatatg

SEQ ID NO: 558718 - DNA, 33 bp, Homo sapien
agttcccatatgaagctcaagtttagccatatg

SEQ ID NO: 558719 - DNA, 33 bp, Homo sapien
ctgggtggggccgaaacggcggcttattcattt

SEQ ID NO: 558720 - DNA, 33 bp, Homo sapien
ctgggtggggccgaaatggcggcttattcattt

SEQ ID NO: 558721 - DNA, 33 bp, Homo sapien
tgcctcccacttcctacacagaaatgccacaga

SEQ ID NO: 558722 - DNA, 33 bp, Homo sapien
tgcctcccacttcctatacagaaatgccacaga

SEQ ID NO: 558723 - DNA, 33 bp, Homo sapien
aaatggttaccaaacacggatcttcagtacaaa

SEQ ID NO: 558724 - DNA, 33 bp, Homo sapien
aaatggttaccaaacatggatcttcagtacaaa

SEQ ID NO: 558725 - DNA, 33 bp, Homo sapien
tgcctttgaagtgatacagttgctttccaaagc

SEQ ID NO: 558726 - DNA, 33 bp, Homo sapien
tgcctttgaagtgatatagttgctttccaaagc

SEQ ID NO: 558727 - DNA, 33 bp, Homo sapien
ttgacgctctggatgaacattctccacccagca

SEQ ID NO: 558728 - DNA, 33 bp, Homo sapien
ttgacgctctggatgaccattctccacccagca

SEQ ID NO: 558729 - DNA, 33 bp, Homo sapien
gtttttatagcttttacagagccagcgcctagc

SEQ ID NO: 558730 - DNA, 33 bp, Homo sapien
gtttttatagcttttatagagccagcgcctagc

SEQ ID NO: 558731 - DNA, 33 bp, Homo sapien
tgtagaatccagctacaaagttggttttttgga

SEQ ID NO: 558732 - DNA, 33 bp, Homo sapien
tgtagaatccagctacgaagttggttttttgga

SEQ ID NO: 558733 - DNA, 33 bp, Homo sapien
tatggggctactatggaagtttatgcaggaact

SEQ ID NO: 558734 - DNA, 33 bp, Homo sapien
tatggggctactatggcagtttatgcaggaact

SEQ ID NO: 558735 - DNA, 33 bp, Homo sapien
tgaatcttgggcaaaacggactcaatattaaca

SEQ ID NO: 558736 - DNA, 33 bp, Homo sapien
tgaatcttgggcaaaatggactcaatattaaca

SEQ ID NO: 558737 - DNA, 33 bp, Homo sapien
cgaatgcaaggtagaccaagtgcagtgtgatag

SEQ ID NO: 558738 - DNA, 33 bp, Homo sapien
cgaatgcaaggtagacgaagtgcagtgtgatag

SEQ ID NO: 558739 - DNA, 33 bp, Homo sapien
gttccggttcgattatcactatttgaggggcac

SEQ ID NO: 558740 - DNA, 33 bp, Homo sapien
gttccggttcgattattactatttgaggggcac

SEQ ID NO: 558741 - DNA, 33 bp, Homo sapien
aatggctggcattttaaaagagcatacaggttg

SEQ ID NO: 558742 - DNA, 33 bp, Homo sapien
aatggctggcattttagaagagcatacaggttg

SEQ ID NO: 558743 - DNA, 33 bp, Homo sapien
aggaatcatttctaaacagcatcttgttattag

SEQ ID NO: 558744 - DNA, 33 bp, Homo sapien
aggaatcatttctaaatagcatcttgttattag

SEQ ID NO: 558745 - DNA, 33 bp, Homo sapien
ccacagcaagcctctacatgttaattttttaaa

SEQ ID NO: 558746 - DNA, 33 bp, Homo sapien
ccacagcaagcctctatatgttaattttttaaa

SEQ ID NO: 558747 - DNA, 33 bp, Homo sapien
gtaactaggaaaaacactgataggtcacatttt

SEQ ID NO: 558748 - DNA, 33 bp, Homo sapien
gtaactaggaaaaacattgataggtcacatttt

SEQ ID NO: 558749 - DNA, 33 bp, Homo sapien
gcctgggggtttcctgcaatgtaatggtcccgg

SEQ ID NO: 558750 - DNA, 33 bp, Homo sapien
gcctgggggtttcctgtaatgtaatggtcccgg

SEQ ID NO: 558751 - DNA, 33 bp, Homo sapien
ttatttcatttaaacactatcataagcaccatc

SEQ ID NO: 558752 - DNA, 33 bp, Homo sapien
ttatttcatttaaacattatcataagcaccatc

SEQ ID NO: 558753 - DNA, 33 bp, Homo sapien
ctgcatcagaggcacagagggagccttttgaaa

SEQ ID NO: 558754 - DNA, 33 bp, Homo sapien
ctgcatcagaggcacatagggagccttttgaaa

SEQ ID NO: 558755 - DNA, 33 bp, Homo sapien
gcttccaacctcctcacgaagtctgtaaagcac

SEQ ID NO: 558756 - DNA, 33 bp, Homo sapien
gcttccaacctcctcatgaagtctgtaaagcac

SEQ ID NO: 558757 - DNA, 33 bp, Homo sapien
attctatgaagcaaaaactaaaagggaaatcag

SEQ ID NO: 558758 - DNA, 33 bp, Homo sapien
attctatgaagcaaaagctaaaagggaaatcag

SEQ ID NO: 558759 - DNA, 33 bp, Homo sapien
tttacctgcagtcacccgggagtttgcaagacc

SEQ ID NO: 558760 - DNA, 33 bp, Homo sapien
tttacctgcagtcacctgggagtttgcaagacc

SEQ ID NO: 558761 - DNA, 33 bp, Homo sapien
gtgatgtccttttccaatcacaaggctggactg

SEQ ID NO: 558762 - DNA, 33 bp, Homo sapien
gtgatgtccttttccagtcacaaggctggactg

SEQ ID NO: 558763 - DNA, 33 bp, Homo sapien
ggttatgctcagactcacccttcatcacctcct

SEQ ID NO: 558764 - DNA, 33 bp, Homo sapien
ggttatgctcagactcgcccttcatcacctcct

SEQ ID NO: 558765 - DNA, 33 bp, Homo sapien
ctggaaaacttgatgcgcactgaaatctcttgg

SEQ ID NO: 558766 - DNA, 33 bp, Homo sapien
ctggaaaacttgatgctcactgaaatctcttgg

SEQ ID NO: 558767 - DNA, 33 bp, Homo sapien
aagctgtgcttgctttaaaagagctgtgctaag

SEQ ID NO: 558768 - DNA, 33 bp, Homo sapien
aagctgtgcttgctttgaaagagctgtgctaag

SEQ ID NO: 558769 - DNA, 33 bp, Homo sapien
gtttcagtgatttataagtggtaattcctaaat

SEQ ID NO: 558770 - DNA, 33 bp, Homo sapien
gtttcagtgatttataggtggtaattcctaaat

SEQ ID NO: 558771 - DNA, 33 bp, Homo sapien
tcatcctagaatgcccacataatcctgttgttc

SEQ ID NO: 558772 - DNA, 33 bp, Homo sapien
tcatcctagaatgcccccataatcctgttgttc

SEQ ID NO: 558773 - DNA, 33 bp, Homo sapien
ttccagaagtatctgggagtttacatagccaat

SEQ ID NO: 558774 - DNA, 33 bp, Homo sapien
ttccagaagtatctggtagtttacatagccaat

SEQ ID NO: 558775 - DNA, 33 bp, Homo sapien
gataatttgataatgaaaaacaggcctgggaat

SEQ ID NO: 558776 - DNA, 33 bp, Homo sapien
gataatttgataatgacaaacaggcctgggaat

SEQ ID NO: 558777 - DNA, 33 bp, Homo sapien
gtgtattttcagttgcaatccaaagtcacaatt

SEQ ID NO: 558778 - DNA, 33 bp, Homo sapien
gtgtattttcagttgcgatccaaagtcacaatt

SEQ ID NO: 558779 - DNA, 33 bp, Homo sapien
gcctgataggagaaaagtgttaaagtagctggt

SEQ ID NO: 558780 - DNA, 33 bp, Homo sapien
gcctgataggagaaaattgttaaagtagctggt

SEQ ID NO: 558781 - DNA, 33 bp, Homo sapien
agtcactaagctactagtaaaacagccagacgt

SEQ ID NO: 558782 - DNA, 33 bp, Homo sapien
agtcactaagctactattaaaacagccagacgt

SEQ ID NO: 558783 - DNA, 33 bp, Homo sapien
taaaatggcgagaaaaccttcttctgaaaatat

SEQ ID NO: 558784 - DNA, 33 bp, Homo sapien
taaaatggcgagaaaagcttcttctgaaaatat

SEQ ID NO: 558785 - DNA, 33 bp, Homo sapien
ggcatctcaaatcccacaggcgaatctgatgca

SEQ ID NO: 558786 - DNA, 33 bp, Homo sapien
ggcatctcaaatcccataggcgaatctgatgca

SEQ ID NO: 558787 - DNA, 33 bp, Homo sapien
aggacctgtctggggaagaagctggaggtttca

SEQ ID NO: 558788 - DNA, 33 bp, Homo sapien
aggacctgtctggggaggaagctggaggtttca

SEQ ID NO: 558789 - DNA, 33 bp, Homo sapien
catagtaagtactccacgaatgctagcttttat

SEQ ID NO: 558790 - DNA, 33 bp, Homo sapien
catagtaagtactccatgaatgctagcttttat

SEQ ID NO: 558791 - DNA, 33 bp, Homo sapien
agctgcaaagcaaaacaaaatgcctgccagctt

SEQ ID NO: 558792 - DNA, 33 bp, Homo sapien
agctgcaaagcaaaacgaaatgcctgccagctt

SEQ ID NO: 558793 - DNA, 33 bp, Homo sapien
gaattcgaagctccccagacatttcacatagaa

SEQ ID NO: 558794 - DNA, 33 bp, Homo sapien
gaattcgaagctccccggacatttcacatagaa

SEQ ID NO: 558795 - DNA, 33 bp, Homo sapien
aatataaagcagggcccaagaactttgctttag

SEQ ID NO: 558796 - DNA, 33 bp, Homo sapien
aatataaagcagggcctaagaactttgctttag

SEQ ID NO: 558797 - DNA, 33 bp, Homo sapien
tcacatcccatgagtacagaagagcatagttat

SEQ ID NO: 558798 - DNA, 33 bp, Homo sapien
tcacatcccatgagtagagaagagcatagttat

SEQ ID NO: 558799 - DNA, 33 bp, Homo sapien
acattcaatctataaacttgttcatcctatata

SEQ ID NO: 558800 - DNA, 33 bp, Homo sapien
acattcaatctataaatttgttcatcctatata

SEQ ID NO: 558801 - DNA, 33 bp, Homo sapien
tctcaatgataccccaatggactgtaaggaccc

SEQ ID NO: 558802 - DNA, 33 bp, Homo sapien
tctcaatgataccccagtggactgtaaggaccc

SEQ ID NO: 558803 - DNA, 33 bp, Homo sapien
gaaaatgcaattctgaagtgcaaaggtgggatg

SEQ ID NO: 558804 - DNA, 33 bp, Homo sapien
gaaaatgcaattctgacgtgcaaaggtgggatg

SEQ ID NO: 558805 - DNA, 33 bp, Homo sapien
atgcatttgataatgaaggtttctagtcggtaa

SEQ ID NO: 558806 - DNA, 33 bp, Homo sapien
atgcatttgataatgatggtttctagtcggtaa

SEQ ID NO: 558807 - DNA, 33 bp, Homo sapien
tcttagattttgaaaacggaaaagtcaatatca

SEQ ID NO: 558808 - DNA, 33 bp, Homo sapien
tcttagattttgaaaatggaaaagtcaatatca

SEQ ID NO: 558809 - DNA, 33 bp, Homo sapien
gtcttgaattcaggccaaattttcaggtgttga

SEQ ID NO: 558810 - DNA, 33 bp, Homo sapien
gtcttgaattcaggccgaattttcaggtgttga

SEQ ID NO: 558811 - DNA, 33 bp, Homo sapien
tgtgttcttccaggacggataaggatcttagcg

SEQ ID NO: 558812 - DNA, 33 bp, Homo sapien
tgtgttcttccaggactgataaggatcttagcg

SEQ ID NO: 558813 - DNA, 33 bp, Homo sapien
atgaatgcacttgagcaaaatggccccgggagc

SEQ ID NO: 558814 - DNA, 33 bp, Homo sapien
atgaatgcacttgagcgaaatggccccgggagc

SEQ ID NO: 558815 - DNA, 33 bp, Homo sapien
tcttcattctgtccaactacattcacgtgaggg

SEQ ID NO: 558816 - DNA, 33 bp, Homo sapien
tcttcattctgtccaagtacattcacgtgaggg

SEQ ID NO: 558817 - DNA, 33 bp, Homo sapien
catatcattggctaggaatagatcttcaggaac

SEQ ID NO: 558818 - DNA, 33 bp, Homo sapien
catatcattggctaggcatagatcttcaggaac

SEQ ID NO: 558819 - DNA, 33 bp, Homo sapien
gggaggaaggaattcaaaatacacgtctataca

SEQ ID NO: 558820 - DNA, 33 bp, Homo sapien
gggaggaaggaattcagaatacacgtctataca

SEQ ID NO: 558821 - DNA, 33 bp, Homo sapien
cagacagagtgcttcaataggccaagaactggg

SEQ ID NO: 558822 - DNA, 33 bp, Homo sapien
cagacagagtgcttcagtaggccaagaactggg

SEQ ID NO: 558823 - DNA, 33 bp, Homo sapien
ctcaaaacactgattccgaaactctaataaaag

SEQ ID NO: 558824 - DNA, 33 bp, Homo sapien
ctcaaaacactgattctgaaactctaataaaag

SEQ ID NO: 558825 - DNA, 33 bp, Homo sapien
ctgctaaatcacattgcatggaagagaaataat

SEQ ID NO: 558826 - DNA, 33 bp, Homo sapien
ctgctaaatcacattgtatggaagagaaataat

SEQ ID NO: 558827 - DNA, 33 bp, Homo sapien
aaatggatggatctcaaaaacagtatgtcgagt

SEQ ID NO: 558828 - DNA, 33 bp, Homo sapien
aaatggatggatctcagaaacagtatgtcgagt

SEQ ID NO: 558829 - DNA, 33 bp, Homo sapien
tgtgggctttcgtccacaccacgttgctggctt

SEQ ID NO: 558830 - DNA, 33 bp, Homo sapien
tgtgggctttcgtccataccacgttgctggctt

SEQ ID NO: 558831 - DNA, 33 bp, Homo sapien
tttaaaaatgataccaggtgcaattaggagttc

SEQ ID NO: 558832 - DNA, 33 bp, Homo sapien
tttaaaaatgataccatgtgcaattaggagttc

SEQ ID NO: 558833 - DNA, 33 bp, Homo sapien
tctctggagggaagaaagtcatgctaacacatt

SEQ ID NO: 558834 - DNA, 33 bp, Homo sapien
tctctggagggaagaaggtcatgctaacacatt

SEQ ID NO: 558835 - DNA, 33 bp, Homo sapien
tttagctttaacctgtaaaaatggactgggttt

SEQ ID NO: 558836 - DNA, 33 bp, Homo sapien
tttagctttaacctgtgaaaatggactgggttt

SEQ ID NO: 558837 - DNA, 33 bp, Homo sapien
cacttatggctctcggaaagtaaagcatctcca

SEQ ID NO: 558838 - DNA, 33 bp, Homo sapien
cacttatggctctcggcaagtaaagcatctcca

SEQ ID NO: 558839 - DNA, 33 bp, Homo sapien
ctcagagcttgaaaaaaaaatgaataaagcagg

SEQ ID NO: 558840 - DNA, 33 bp, Homo sapien
ctcagagcttgaaaaacaaatgaataaagcagg

SEQ ID NO: 558841 - DNA, 33 bp, Homo sapien
atggagctgagatccaaagaaaaaccaggtcct

SEQ ID NO: 558842 - DNA, 33 bp, Homo sapien
atggagctgagatccagagaaaaaccaggtcct

SEQ ID NO: 558843 - DNA, 33 bp, Homo sapien
gaaccagtagctctcaaatatagctgcacaata

SEQ ID NO: 558844 - DNA, 33 bp, Homo sapien
gaaccagtagctctcacatatagctgcacaata

SEQ ID NO: 558845 - DNA, 33 bp, Homo sapien
ctggggtgcttatacaacaatccaatttatttt

SEQ ID NO: 558846 - DNA, 33 bp, Homo sapien
ctggggtgcttatacaccaatccaatttatttt

SEQ ID NO: 558847 - DNA, 33 bp, Homo sapien
gttgtcttggtaaccaacacttttgcctggtgg

SEQ ID NO: 558848 - DNA, 33 bp, Homo sapien
gttgtcttggtaaccatcacttttgcctggtgg

SEQ ID NO: 558849 - DNA, 33 bp, Homo sapien
gactttttttctggaacaaaagtgttaggaagt

SEQ ID NO: 558850 - DNA, 33 bp, Homo sapien
gactttttttctggaataaaagtgttaggaagt

SEQ ID NO: 558851 - DNA, 33 bp, Homo sapien
ataatccaactggcataaagtgttgctgcagat

SEQ ID NO: 558852 - DNA, 33 bp, Homo sapien
ataatccaactggcatgaagtgttgctgcagat

SEQ ID NO: 558853 - DNA, 33 bp, Homo sapien
aattggctcttatagcacttaacataaaagaat

SEQ ID NO: 558854 - DNA, 33 bp, Homo sapien
aattggctcttatagcgcttaacataaaagaat

SEQ ID NO: 558855 - DNA, 33 bp, Homo sapien
ttaccaggtcatgagacgaacagtgactagaag

SEQ ID NO: 558856 - DNA, 33 bp, Homo sapien
ttaccaggtcatgagatgaacagtgactagaag

SEQ ID NO: 558857 - DNA, 33 bp, Homo sapien
atagtttcactttggaagaaccaatgtcaaata

SEQ ID NO: 558858 - DNA, 33 bp, Homo sapien
atagtttcactttggaggaaccaatgtcaaata

SEQ ID NO: 558859 - DNA, 33 bp, Homo sapien
caaggtggaaaatgtaactaagctagcaccttt

SEQ ID NO: 558860 - DNA, 33 bp, Homo sapien
caaggtggaaaatgtatctaagctagcaccttt

SEQ ID NO: 558861 - DNA, 33 bp, Homo sapien
cttgccactatacttcaacccgagaaacagagc

SEQ ID NO: 558862 - DNA, 33 bp, Homo sapien
cttgccactatacttctacccgagaaacagagc

SEQ ID NO: 558863 - DNA, 33 bp, Homo sapien
acaggctgtgctgacactgaaaagctggtgagt

SEQ ID NO: 558864 - DNA, 33 bp, Homo sapien
acaggctgtgctgacattgaaaagctggtgagt

SEQ ID NO: 558865 - DNA, 33 bp, Homo sapien
tcctgaggagaaaggagctggtctggtatgtga

SEQ ID NO: 558866 - DNA, 33 bp, Homo sapien
tcctgaggagaaaggatctggtctggtatgtga

SEQ ID NO: 558867 - DNA, 33 bp, Homo sapien
cctggtggtaatgaaacacactgtttatctgaa

SEQ ID NO: 558868 - DNA, 33 bp, Homo sapien
cctggtggtaatgaaatacactgtttatctgaa

SEQ ID NO: 558869 - DNA, 33 bp, Homo sapien
actatcattccagaaacagtatgcttgcagttt

SEQ ID NO: 558870 - DNA, 33 bp, Homo sapien
actatcattccagaaatagtatgcttgcagttt

SEQ ID NO: 558871 - DNA, 33 bp, Homo sapien
atccagaaatgccgcagtagccagcaaaaatac

SEQ ID NO: 558872 - DNA, 33 bp, Homo sapien
atccagaaatgccgcattagccagcaaaaatac

SEQ ID NO: 558873 - DNA, 33 bp, Homo sapien
tagctcttcttatcaaacctggtcaggatgtca

SEQ ID NO: 558874 - DNA, 33 bp, Homo sapien
tagctcttcttatcaaccctggtcaggatgtca

SEQ ID NO: 558875 - DNA, 33 bp, Homo sapien
agtagcttaaaacaataatcaccatgaaaaaag

SEQ ID NO: 558876 - DNA, 33 bp, Homo sapien
agtagcttaaaacaatgatcaccatgaaaaaag

SEQ ID NO: 558877 - DNA, 33 bp, Homo sapien
ttgcacttctctttgaacgacaagttcgatcac

SEQ ID NO: 558878 - DNA, 33 bp, Homo sapien
ttgcacttctctttgagcgacaagttcgatcac

SEQ ID NO: 558879 - DNA, 33 bp, Homo sapien
ctagttagagttatagaaaaaaatcacacggga

SEQ ID NO: 558880 - DNA, 33 bp, Homo sapien
ctagttagagttataggaaaaaatcacacggga

SEQ ID NO: 558881 - DNA, 33 bp, Homo sapien
tcatttatattgaacaactctcggttagagact

SEQ ID NO: 558882 - DNA, 33 bp, Homo sapien
tcatttatattgaacagctctcggttagagact

SEQ ID NO: 558883 - DNA, 33 bp, Homo sapien
aacaaatttagccttaaacatttacaaaaccac

SEQ ID NO: 558884 - DNA, 33 bp, Homo sapien
aacaaatttagccttacacatttacaaaaccac

SEQ ID NO: 558885 - DNA, 33 bp, Homo sapien
tcaaagcatcagcaccccaaaaataaaagacgt

SEQ ID NO: 558886 - DNA, 33 bp, Homo sapien
tcaaagcatcagcacctcaaaaataaaagacgt

SEQ ID NO: 558887 - DNA, 33 bp, Homo sapien
atatatctaggcctcaatctcctcttctgtaac

SEQ ID NO: 558888 - DNA, 33 bp, Homo sapien
atatatctaggcctcagtctcctcttctgtaac

SEQ ID NO: 558889 - DNA, 33 bp, Homo sapien
aacttggcaataacagcaatacctatcttaatc

SEQ ID NO: 558890 - DNA, 33 bp, Homo sapien
aacttggcaataacagtaatacctatcttaatc

SEQ ID NO: 558891 - DNA, 33 bp, Homo sapien
ttatgctgctccaacaaaaataccttaaatggg

SEQ ID NO: 558892 - DNA, 33 bp, Homo sapien
ttatgctgctccaacagaaataccttaaatggg

SEQ ID NO: 558893 - DNA, 33 bp, Homo sapien
atctaaaaataagatccgactacatttgttatt

SEQ ID NO: 558894 - DNA, 33 bp, Homo sapien
atctaaaaataagatctgactacatttgttatt

SEQ ID NO: 558895 - DNA, 33 bp, Homo sapien
actgctttggtcctcacaaataaataggatact

SEQ ID NO: 558896 - DNA, 33 bp, Homo sapien
actgctttggtcctcataaataaataggatact

SEQ ID NO: 558897 - DNA, 33 bp, Homo sapien
agaaaaacaaataggaaagaacaagaaacatca

SEQ ID NO: 558898 - DNA, 33 bp, Homo sapien
agaaaaacaaataggatagaacaagaaacatca

SEQ ID NO: 558899 - DNA, 33 bp, Homo sapien
tgttccaggaaagacaactaatgcctgagttaa

SEQ ID NO: 558900 - DNA, 33 bp, Homo sapien
tgttccaggaaagacagctaatgcctgagttaa

SEQ ID NO: 558901 - DNA, 33 bp, Homo sapien
aggcccatgtaattcaacgtcaaacaattctga

SEQ ID NO: 558902 - DNA, 33 bp, Homo sapien
aggcccatgtaattcagcgtcaaacaattctga

SEQ ID NO: 558903 - DNA, 33 bp, Homo sapien
cattttcatcatagcaatcatcaccataatcat

SEQ ID NO: 558904 - DNA, 33 bp, Homo sapien
cattttcatcatagcagtcatcaccataatcat

SEQ ID NO: 558905 - DNA, 33 bp, Homo sapien
ctccagtgaaatcccacgtatgccaccagaaca

SEQ ID NO: 558906 - DNA, 33 bp, Homo sapien
ctccagtgaaatcccatgtatgccaccagaaca

SEQ ID NO: 558907 - DNA, 33 bp, Homo sapien
caccaagttacaaaaactccaacccatatttga

SEQ ID NO: 558908 - DNA, 33 bp, Homo sapien
caccaagttacaaaaattccaacccatatttga

SEQ ID NO: 558909 - DNA, 33 bp, Homo sapien
ggcaccgttgcttaccaccctacttgctgtttt

SEQ ID NO: 558910 - DNA, 33 bp, Homo sapien
ggcaccgttgcttaccgccctacttgctgtttt

SEQ ID NO: 558911 - DNA, 33 bp, Homo sapien
agctttttctctaccgacgcatctctccttcat

SEQ ID NO: 558912 - DNA, 33 bp, Homo sapien
agctttttctctaccgtcgcatctctccttcat

SEQ ID NO: 558913 - DNA, 33 bp, Homo sapien
tagcagaaagagaggacagcccaagagagaagg

SEQ ID NO: 558914 - DNA, 33 bp, Homo sapien
tagcagaaagagaggagagcccaagagagaagg

SEQ ID NO: 558915 - DNA, 33 bp, Homo sapien
cttttcaggcgtgttaccaagatgtatccatta

SEQ ID NO: 558916 - DNA, 33 bp, Homo sapien
cttttcaggcgtgttatcaagatgtatccatta

SEQ ID NO: 558917 - DNA, 33 bp, Homo sapien
ggcagaactcagaatacagaatcatggagcagt

SEQ ID NO: 558918 - DNA, 33 bp, Homo sapien
ggcagaactcagaatatagaatcatggagcagt

SEQ ID NO: 558919 - DNA, 33 bp, Homo sapien
acagctttcaggaaaagaacccagacactagag

SEQ ID NO: 558920 - DNA, 33 bp, Homo sapien
acagctttcaggaaaataacccagacactagag

SEQ ID NO: 558921 - DNA, 33 bp, Homo sapien
acatcaacagtggaacagataaatgattagtgt

SEQ ID NO: 558922 - DNA, 33 bp, Homo sapien
acatcaacagtggaacggataaatgattagtgt

SEQ ID NO: 558923 - DNA, 33 bp, Homo sapien
ttcttacataggagggaaaaataacgatcaata

SEQ ID NO: 558924 - DNA, 33 bp, Homo sapien
ttcttacataggagggtaaaataacgatcaata

SEQ ID NO: 558925 - DNA, 33 bp, Homo sapien
agctcccagaccatcaaacgatcctagccaaaa

SEQ ID NO: 558926 - DNA, 33 bp, Homo sapien
agctcccagaccatcagacgatcctagccaaaa

SEQ ID NO: 558927 - DNA, 33 bp, Homo sapien
gcataaccttccaaccccctgactctgagcaca

SEQ ID NO: 558928 - DNA, 33 bp, Homo sapien
gcataaccttccaacctcctgactctgagcaca

SEQ ID NO: 558929 - DNA, 33 bp, Homo sapien
gggcttcagttgacaccgggttaacaaataata

SEQ ID NO: 558930 - DNA, 33 bp, Homo sapien
gggcttcagttgacactgggttaacaaataata

SEQ ID NO: 558931 - DNA, 33 bp, Homo sapien
agaggttaagatccacaaggtcatgggattcac

SEQ ID NO: 558932 - DNA, 33 bp, Homo sapien
agaggttaagatccacgaggtcatgggattcac

SEQ ID NO: 558933 - DNA, 33 bp, Homo sapien
agatactgattggaacacttgtcactacagggc

SEQ ID NO: 558934 - DNA, 33 bp, Homo sapien
agatactgattggaacgcttgtcactacagggc

SEQ ID NO: 558935 - DNA, 33 bp, Homo sapien
agcaccaagacagttaaccaaccagctgtggga

SEQ ID NO: 558936 - DNA, 33 bp, Homo sapien
agcaccaagacagttagccaaccagctgtggga

SEQ ID NO: 558937 - DNA, 33 bp, Homo sapien
acatggacaattactaaaatgggtaaaagtgct

SEQ ID NO: 558938 - DNA, 33 bp, Homo sapien
acatggacaattactagaatgggtaaaagtgct

SEQ ID NO: 558939 - DNA, 33 bp, Homo sapien
aagaaaatagataatgccagggtcactatctcc

SEQ ID NO: 558940 - DNA, 33 bp, Homo sapien
aagaaaatagataatgtcagggtcactatctcc

SEQ ID NO: 558941 - DNA, 33 bp, Homo sapien
ttttattatggcaggagaattcacctctccacc

SEQ ID NO: 558942 - DNA, 33 bp, Homo sapien
ttttattatggcaggataattcacctctccacc

SEQ ID NO: 558943 - DNA, 33 bp, Homo sapien
acagattccaacctccacaagtgttctaagaaa

SEQ ID NO: 558944 - DNA, 33 bp, Homo sapien
acagattccaacctccgcaagtgttctaagaaa

SEQ ID NO: 558945 - DNA, 33 bp, Homo sapien
ggctatactggctatacggactattttaaatga

SEQ ID NO: 558946 - DNA, 33 bp, Homo sapien
ggctatactggctatatggactattttaaatga

SEQ ID NO: 558947 - DNA, 33 bp, Homo sapien
tctcagagttcacgtaaaatcatgcttttcatt

SEQ ID NO: 558948 - DNA, 33 bp, Homo sapien
tctcagagttcacgtacaatcatgcttttcatt

SEQ ID NO: 558949 - DNA, 33 bp, Homo sapien
cttggatttaatttcacgttcagctctgctata

SEQ ID NO: 558950 - DNA, 33 bp, Homo sapien
cttggatttaatttcatgttcagctctgctata

SEQ ID NO: 558951 - DNA, 33 bp, Homo sapien
ttttgaatggaggctcgaaaggaaaaaatgcat

SEQ ID NO: 558952 - DNA, 33 bp, Homo sapien
ttttgaatggaggctctaaaggaaaaaatgcat

SEQ ID NO: 558953 - DNA, 33 bp, Homo sapien
gctttaggatagagaaacattatgatgtaacca

SEQ ID NO: 558954 - DNA, 33 bp, Homo sapien
gctttaggatagagaagcattatgatgtaacca

SEQ ID NO: 558955 - DNA, 33 bp, Homo sapien
gatacttttagtggacaatttccctgcatatgg

SEQ ID NO: 558956 - DNA, 33 bp, Homo sapien
gatacttttagtggaccatttccctgcatatgg

SEQ ID NO: 558957 - DNA, 33 bp, Homo sapien
cagaggactgccttggcaaaaattttataagac

SEQ ID NO: 558958 - DNA, 33 bp, Homo sapien
cagaggactgccttgggaaaaattttataagac

SEQ ID NO: 558959 - DNA, 33 bp, Homo sapien
tcacatcatcaggttacgcatttaacaggttat

SEQ ID NO: 558960 - DNA, 33 bp, Homo sapien
tcacatcatcaggttatgcatttaacaggttat

SEQ ID NO: 558961 - DNA, 33 bp, Homo sapien
cctgaacctgaatagaccatcaagccaagtagt

SEQ ID NO: 558962 - DNA, 33 bp, Homo sapien
cctgaacctgaatagatcatcaagccaagtagt

SEQ ID NO: 558963 - DNA, 33 bp, Homo sapien
gcatttacaaaggctcaatgacatgaaagagca

SEQ ID NO: 558964 - DNA, 33 bp, Homo sapien
gcatttacaaaggctcgatgacatgaaagagca

SEQ ID NO: 558965 - DNA, 33 bp, Homo sapien
aagcgaaagtgataaaagctatggctatgtaat

SEQ ID NO: 558966 - DNA, 33 bp, Homo sapien
aagcgaaagtgataaacgctatggctatgtaat

SEQ ID NO: 558967 - DNA, 33 bp, Homo sapien
aataagtaaaatgaaaattggaattggaccaca

SEQ ID NO: 558968 - DNA, 33 bp, Homo sapien
aataagtaaaatgaaacttggaattggaccaca

SEQ ID NO: 558969 - DNA, 33 bp, Homo sapien
gcaatgaaaaataaccacaaaaactcagaagac

SEQ ID NO: 558970 - DNA, 33 bp, Homo sapien
gcaatgaaaaataaccgcaaaaactcagaagac

SEQ ID NO: 558971 - DNA, 33 bp, Homo sapien
aggctaccataatcaaagtagtcaatcttgaag

SEQ ID NO: 558972 - DNA, 33 bp, Homo sapien
aggctaccataatcaacgtagtcaatcttgaag

SEQ ID NO: 558973 - DNA, 33 bp, Homo sapien
tgtttaagacaggaaaacacctattattggttc

SEQ ID NO: 558974 - DNA, 33 bp, Homo sapien
tgtttaagacaggaaagcacctattattggttc

SEQ ID NO: 558975 - DNA, 33 bp, Homo sapien
tggcattcttaattaaacactgtagctgaggta

SEQ ID NO: 558976 - DNA, 33 bp, Homo sapien
tggcattcttaattaagcactgtagctgaggta

SEQ ID NO: 558977 - DNA, 33 bp, Homo sapien
agcacagttgtttgaactggactgaggcaacag

SEQ ID NO: 558978 - DNA, 33 bp, Homo sapien
agcacagttgtttgaattggactgaggcaacag

SEQ ID NO: 558979 - DNA, 33 bp, Homo sapien
ttgcatattaacttaaaaaggctcaaaagttaa

SEQ ID NO: 558980 - DNA, 33 bp, Homo sapien
ttgcatattaacttaagaaggctcaaaagttaa

SEQ ID NO: 558981 - DNA, 33 bp, Homo sapien
ataagccagttctttcaatagtaaccaaaagag

SEQ ID NO: 558982 - DNA, 33 bp, Homo sapien
ataagccagttctttcgatagtaaccaaaagag

SEQ ID NO: 558983 - DNA, 33 bp, Homo sapien
agaaagagatgatgacaatcttgagtttgaaat

SEQ ID NO: 558984 - DNA, 33 bp, Homo sapien
agaaagagatgatgactatcttgagtttgaaat

SEQ ID NO: 558985 - DNA, 33 bp, Homo sapien
cactgcttagactgtacagacttggaaatttcc

SEQ ID NO: 558986 - DNA, 33 bp, Homo sapien
cactgcttagactgtatagacttggaaatttcc

SEQ ID NO: 558987 - DNA, 33 bp, Homo sapien
cacaactttctacctcaccttttctgctccact

SEQ ID NO: 558988 - DNA, 33 bp, Homo sapien
cacaactttctacctcgccttttctgctccact

SEQ ID NO: 558989 - DNA, 33 bp, Homo sapien
tgaacaaatattcccaagaatagcgcacatcag

SEQ ID NO: 558990 - DNA, 33 bp, Homo sapien
tgaacaaatattcccatgaatagcgcacatcag

SEQ ID NO: 558991 - DNA, 33 bp, Homo sapien
atgactttgagactcaacttaacaattttgggt

SEQ ID NO: 558992 - DNA, 33 bp, Homo sapien
atgactttgagactcagcttaacaattttgggt

SEQ ID NO: 558993 - DNA, 33 bp, Homo sapien
aacctattgtttgttccacattatctcaaacat

SEQ ID NO: 558994 - DNA, 33 bp, Homo sapien
aacctattgtttgttctacattatctcaaacat

SEQ ID NO: 558995 - DNA, 33 bp, Homo sapien
agttcaaatgattttacagtgatgtgcatcata

SEQ ID NO: 558996 - DNA, 33 bp, Homo sapien
agttcaaatgattttatagtgatgtgcatcata

SEQ ID NO: 558997 - DNA, 33 bp, Homo sapien
catatgtcttttgataacatatatctgcatttc

SEQ ID NO: 558998 - DNA, 33 bp, Homo sapien
catatgtcttttgatagcatatatctgcatttc

SEQ ID NO: 558999 - DNA, 33 bp, Homo sapien
tagaagcagggggatgaatacatgagtcaggaa

SEQ ID NO: 559000 - DNA, 33 bp, Homo sapien
tagaagcagggggatggatacatgagtcaggaa

SEQ ID NO: 559001 - DNA, 33 bp, Homo sapien
gacttgctttgttcaacggaatataaaccgtct

SEQ ID NO: 559002 - DNA, 33 bp, Homo sapien
gacttgctttgttcaatggaatataaaccgtct

SEQ ID NO: 559003 - DNA, 33 bp, Homo sapien
tattcaagctcacatgaaatcttccactcttgt

SEQ ID NO: 559004 - DNA, 33 bp, Homo sapien
tattcaagctcacatggaatcttccactcttgt

SEQ ID NO: 559005 - DNA, 33 bp, Homo sapien
agtaggaagagggttgaataggtgaaaatgtgt

SEQ ID NO: 559006 - DNA, 33 bp, Homo sapien
agtaggaagagggttgcataggtgaaaatgtgt

SEQ ID NO: 559007 - DNA, 33 bp, Homo sapien
ttcaaatcaactggataaaatacctaggagcac

SEQ ID NO: 559008 - DNA, 33 bp, Homo sapien
ttcaaatcaactggatgaaatacctaggagcac

SEQ ID NO: 559009 - DNA, 33 bp, Homo sapien
cgtggcctaattcaacagcattatccacacaag

SEQ ID NO: 559010 - DNA, 33 bp, Homo sapien
cgtggcctaattcaacggcattatccacacaag

SEQ ID NO: 559011 - DNA, 33 bp, Homo sapien
tttcctctgagacagtcaatttgtgatatttta

SEQ ID NO: 559012 - DNA, 33 bp, Homo sapien
tttcctctgagacagttaatttgtgatatttta

SEQ ID NO: 559013 - DNA, 33 bp, Homo sapien
tcagcatgattacaccaaaccctgggctaaagc

SEQ ID NO: 559014 - DNA, 33 bp, Homo sapien
tcagcatgattacaccgaaccctgggctaaagc

SEQ ID NO: 559015 - DNA, 33 bp, Homo sapien
caacttgctgccatgcaaattacagtgacttcc

SEQ ID NO: 559016 - DNA, 33 bp, Homo sapien
caacttgctgccatgcgaattacagtgacttcc

SEQ ID NO: 559017 - DNA, 33 bp, Homo sapien
gggcgtaattttctcaccttaaaatgtggataa

SEQ ID NO: 559018 - DNA, 33 bp, Homo sapien
gggcgtaattttctcatcttaaaatgtggataa

SEQ ID NO: 559019 - DNA, 33 bp, Homo sapien
cattaacttttatgaaacctgacttggctgtaa

SEQ ID NO: 559020 - DNA, 33 bp, Homo sapien
cattaacttttatgaagcctgacttggctgtaa

SEQ ID NO: 559021 - DNA, 33 bp, Homo sapien
accagctctgtatcaacctgaaggctactgagg

SEQ ID NO: 559022 - DNA, 33 bp, Homo sapien
accagctctgtatcaatctgaaggctactgagg

SEQ ID NO: 559023 - DNA, 33 bp, Homo sapien
atctcagatgtcctctcaaacttgagacagcag

SEQ ID NO: 559024 - DNA, 33 bp, Homo sapien
atctcagatgtcctcttaaacttgagacagcag

SEQ ID NO: 559025 - DNA, 33 bp, Homo sapien
gttgtaggttggggaaaggaaagctaaagtgga

SEQ ID NO: 559026 - DNA, 33 bp, Homo sapien
gttgtaggttggggaagggaaagctaaagtgga

SEQ ID NO: 559027 - DNA, 33 bp, Homo sapien
atggagtgctcttcacacatgtacacttcagcc

SEQ ID NO: 559028 - DNA, 33 bp, Homo sapien
atggagtgctcttcacccatgtacacttcagcc

SEQ ID NO: 559029 - DNA, 33 bp, Homo sapien
gggtacattgaaacgaactgtttgtaagacagt

SEQ ID NO: 559030 - DNA, 33 bp, Homo sapien
gggtacattgaaacgagctgtttgtaagacagt

SEQ ID NO: 559031 - DNA, 33 bp, Homo sapien
cataaagaatcaccataacttgcccaataaagt

SEQ ID NO: 559032 - DNA, 33 bp, Homo sapien
cataaagaatcaccatgacttgcccaataaagt

SEQ ID NO: 559033 - DNA, 33 bp, Homo sapien
gagttttggagctgtaaattgttaatcaaaggt

SEQ ID NO: 559034 - DNA, 33 bp, Homo sapien
gagttttggagctgtagattgttaatcaaaggt

SEQ ID NO: 559035 - DNA, 33 bp, Homo sapien
agctctgcgccactaaaagaacacaaaggaaca

SEQ ID NO: 559036 - DNA, 33 bp, Homo sapien
agctctgcgccactaagagaacacaaaggaaca

SEQ ID NO: 559037 - DNA, 33 bp, Homo sapien
aatagttttttctataagcacttctcatgccag

SEQ ID NO: 559038 - DNA, 33 bp, Homo sapien
aatagttttttctataggcacttctcatgccag

SEQ ID NO: 559039 - DNA, 33 bp, Homo sapien
gcagacatcacaatggaccacaataggttaaga

SEQ ID NO: 559040 - DNA, 33 bp, Homo sapien
gcagacatcacaatgggccacaataggttaaga

SEQ ID NO: 559041 - DNA, 33 bp, Homo sapien
ttttgcagttcatccaatcaagagaggtaatgt

SEQ ID NO: 559042 - DNA, 33 bp, Homo sapien
ttttgcagttcatccagtcaagagaggtaatgt

SEQ ID NO: 559043 - DNA, 33 bp, Homo sapien
tgtagatttgttcttaaaaagaggatctgactc

SEQ ID NO: 559044 - DNA, 33 bp, Homo sapien
tgtagatttgttcttagaaagaggatctgactc

SEQ ID NO: 559045 - DNA, 33 bp, Homo sapien
ccttgatctttctaaactgctcatattgcaaat

SEQ ID NO: 559046 - DNA, 33 bp, Homo sapien
ccttgatctttctaaattgctcatattgcaaat

SEQ ID NO: 559047 - DNA, 33 bp, Homo sapien
aagcaggtgaattccaatcagcactgttagctc

SEQ ID NO: 559048 - DNA, 33 bp, Homo sapien
aagcaggtgaattccagtcagcactgttagctc

SEQ ID NO: 559049 - DNA, 33 bp, Homo sapien
gggtgtatttcaaacaacttgttatgagcctgc

SEQ ID NO: 559050 - DNA, 33 bp, Homo sapien
gggtgtatttcaaacatcttgttatgagcctgc

SEQ ID NO: 559051 - DNA, 33 bp, Homo sapien
ttaaactgaaccaaaaagagtctctgaatagat

SEQ ID NO: 559052 - DNA, 33 bp, Homo sapien
ttaaactgaaccaaaaggagtctctgaatagat

SEQ ID NO: 559053 - DNA, 33 bp, Homo sapien
cgtgttgaagacagggaaatgaatgggtaaaat

SEQ ID NO: 559054 - DNA, 33 bp, Homo sapien
cgtgttgaagacagggcaatgaatgggtaaaat

SEQ ID NO: 559055 - DNA, 33 bp, Homo sapien
tgttcctcagatttcaacttaatgcctacgttc

SEQ ID NO: 559056 - DNA, 33 bp, Homo sapien
tgttcctcagatttcaccttaatgcctacgttc

SEQ ID NO: 559057 - DNA, 33 bp, Homo sapien
gtctgctgcttacaagcctcttaggaagaggaa

SEQ ID NO: 559058 - DNA, 33 bp, Homo sapien
gtctgctgcttacaaggctcttaggaagaggaa

SEQ ID NO: 559059 - DNA, 33 bp, Homo sapien
aaatatgtagacctgaaaattatagtaagaata

SEQ ID NO: 559060 - DNA, 33 bp, Homo sapien
aaatatgtagacctgacaattatagtaagaata

SEQ ID NO: 559061 - DNA, 33 bp, Homo sapien
ctatctagtttccatacgttacgtcctcaatct

SEQ ID NO: 559062 - DNA, 33 bp, Homo sapien
ctatctagtttccatatgttacgtcctcaatct

SEQ ID NO: 559063 - DNA, 33 bp, Homo sapien
ctcaatgtggaactcaagagagcatatacattt

SEQ ID NO: 559064 - DNA, 33 bp, Homo sapien
ctcaatgtggaactcacgagagcatatacattt

SEQ ID NO: 559065 - DNA, 33 bp, Homo sapien
gctagatactcatgctaagaaggtgaggaaatg

SEQ ID NO: 559066 - DNA, 33 bp, Homo sapien
gctagatactcatgctgagaaggtgaggaaatg

SEQ ID NO: 559067 - DNA, 33 bp, Homo sapien
tggcttacagctgggactactaaaaggaaagac

SEQ ID NO: 559068 - DNA, 33 bp, Homo sapien
tggcttacagctgggattactaaaaggaaagac

SEQ ID NO: 559069 - DNA, 33 bp, Homo sapien
actttgagtcctggcgaagatcaaccactcatt

SEQ ID NO: 559070 - DNA, 33 bp, Homo sapien
actttgagtcctggcgcagatcaaccactcatt

SEQ ID NO: 559071 - DNA, 33 bp, Homo sapien
tggagtgatcaccttcaagtagttatacacagt

SEQ ID NO: 559072 - DNA, 33 bp, Homo sapien
tggagtgatcaccttcgagtagttatacacagt

SEQ ID NO: 559073 - DNA, 33 bp, Homo sapien
tgggagcagtgaagaacgtggagtgatcacctt

SEQ ID NO: 559074 - DNA, 33 bp, Homo sapien
tgggagcagtgaagaatgtggagtgatcacctt

SEQ ID NO: 559075 - DNA, 33 bp, Homo sapien
ggatttgagcagagaaagaagcagttttagcca

SEQ ID NO: 559076 - DNA, 33 bp, Homo sapien
ggatttgagcagagaaggaagcagttttagcca

SEQ ID NO: 559077 - DNA, 33 bp, Homo sapien
aacacttcaggtcccaataaaatctcagcatat

SEQ ID NO: 559078 - DNA, 33 bp, Homo sapien
aacacttcaggtcccagtaaaatctcagcatat

SEQ ID NO: 559079 - DNA, 33 bp, Homo sapien
tatctggtgtagaaaccggtgtatctcttttgc

SEQ ID NO: 559080 - DNA, 33 bp, Homo sapien
tatctggtgtagaaactggtgtatctcttttgc

SEQ ID NO: 559081 - DNA, 33 bp, Homo sapien
atctaaattctaaggcagagtgtaaatgaatgt

SEQ ID NO: 559082 - DNA, 33 bp, Homo sapien
atctaaattctaaggcggagtgtaaatgaatgt

SEQ ID NO: 559083 - DNA, 33 bp, Homo sapien
tcaaaacctcaaaggaaagacattgagaaacca

SEQ ID NO: 559084 - DNA, 33 bp, Homo sapien
tcaaaacctcaaaggagagacattgagaaacca

SEQ ID NO: 559085 - DNA, 33 bp, Homo sapien
tgaggaactaagataaaaacatagaatgcaacc

SEQ ID NO: 559086 - DNA, 33 bp, Homo sapien
tgaggaactaagataagaacatagaatgcaacc

SEQ ID NO: 559087 - DNA, 33 bp, Homo sapien
tcaaagatgaaattgacggcatcatgaactttg

SEQ ID NO: 559088 - DNA, 33 bp, Homo sapien
tcaaagatgaaattgagggcatcatgaactttg

SEQ ID NO: 559089 - DNA, 33 bp, Homo sapien
gttttctgatcacccaacttctatgtcttattc

SEQ ID NO: 559090 - DNA, 33 bp, Homo sapien
gttttctgatcacccaccttctatgtcttattc

SEQ ID NO: 559091 - DNA, 33 bp, Homo sapien
atgaggcgaaatctacagagaactgattggctg

SEQ ID NO: 559092 - DNA, 33 bp, Homo sapien
atgaggcgaaatctaccgagaactgattggctg

SEQ ID NO: 559093 - DNA, 33 bp, Homo sapien
caagtttcacatttccccttcgcaaaataccca

SEQ ID NO: 559094 - DNA, 33 bp, Homo sapien
caagtttcacatttcctcttcgcaaaataccca

SEQ ID NO: 559095 - DNA, 33 bp, Homo sapien
ggacaaaatgttttgcaatcttgacggcttttg

SEQ ID NO: 559096 - DNA, 33 bp, Homo sapien
ggacaaaatgttttgcgatcttgacggcttttg

SEQ ID NO: 559097 - DNA, 33 bp, Homo sapien
gccattagttttagagaatacctgagcccaatt

SEQ ID NO: 559098 - DNA, 33 bp, Homo sapien
gccattagttttagaggatacctgagcccaatt

SEQ ID NO: 559099 - DNA, 33 bp, Homo sapien
actgactagaaaagccacgatcaagatagaggt

SEQ ID NO: 559100 - DNA, 33 bp, Homo sapien
actgactagaaaagccgcgatcaagatagaggt

SEQ ID NO: 559101 - DNA, 33 bp, Homo sapien
agaggaagcttgagccaataatatcctttctat

SEQ ID NO: 559102 - DNA, 33 bp, Homo sapien
agaggaagcttgagccgataatatcctttctat

SEQ ID NO: 559103 - DNA, 33 bp, Homo sapien
gagaacatactgaccaatcacgtatctgattaa

SEQ ID NO: 559104 - DNA, 33 bp, Homo sapien
gagaacatactgaccagtcacgtatctgattaa

SEQ ID NO: 559105 - DNA, 33 bp, Homo sapien
aatacagggacggctacctgtcctactttttgc

SEQ ID NO: 559106 - DNA, 33 bp, Homo sapien
aatacagggacggctatctgtcctactttttgc

SEQ ID NO: 559107 - DNA, 33 bp, Homo sapien
aaacatgaataccttcccgccaattgtacatat

SEQ ID NO: 559108 - DNA, 33 bp, Homo sapien
aaacatgaataccttctcgccaattgtacatat

SEQ ID NO: 559109 - DNA, 33 bp, Homo sapien
gtggtttcaaaaataacgatcaactgtcaaata

SEQ ID NO: 559110 - DNA, 33 bp, Homo sapien
gtggtttcaaaaataatgatcaactgtcaaata

SEQ ID NO: 559111 - DNA, 33 bp, Homo sapien
ctacagaatgaatagaaggtggaaaagtagtgg

SEQ ID NO: 559112 - DNA, 33 bp, Homo sapien
ctacagaatgaatagagggtggaaaagtagtgg

SEQ ID NO: 559113 - DNA, 33 bp, Homo sapien
aaaataagtctccctacatcaacaaagctattg

SEQ ID NO: 559114 - DNA, 33 bp, Homo sapien
aaaataagtctccctatatcaacaaagctattg

SEQ ID NO: 559115 - DNA, 33 bp, Homo sapien
catggttactatgccaccaaatgctattccaag

SEQ ID NO: 559116 - DNA, 33 bp, Homo sapien
catggttactatgccatcaaatgctattccaag

SEQ ID NO: 559117 - DNA, 33 bp, Homo sapien
gacctaactaactggacggctgttttctgaagt

SEQ ID NO: 559118 - DNA, 33 bp, Homo sapien
gacctaactaactggatggctgttttctgaagt

SEQ ID NO: 559119 - DNA, 33 bp, Homo sapien
taattttatcataaaggctcccaagggctctat

SEQ ID NO: 559120 - DNA, 33 bp, Homo sapien
taattttatcataaagtctcccaagggctctat

SEQ ID NO: 559121 - DNA, 33 bp, Homo sapien
ccaaatctcagaattgaatccttcttaaacttc

SEQ ID NO: 559122 - DNA, 33 bp, Homo sapien
ccaaatctcagaattgcatccttcttaaacttc

SEQ ID NO: 559123 - DNA, 33 bp, Homo sapien
gtaagttaagttctgtgaacacttctcaaggga

SEQ ID NO: 559124 - DNA, 33 bp, Homo sapien
gtaagttaagttctgttaacacttctcaaggga

SEQ ID NO: 559125 - DNA, 33 bp, Homo sapien
ccccactaaacagagaaaatgtcctacacaaag

SEQ ID NO: 559126 - DNA, 33 bp, Homo sapien
ccccactaaacagagacaatgtcctacacaaag

SEQ ID NO: 559127 - DNA, 33 bp, Homo sapien
ctctcaatgattctagccagcttttgagaacag

SEQ ID NO: 559128 - DNA, 33 bp, Homo sapien
ctctcaatgattctaggcagcttttgagaacag

SEQ ID NO: 559129 - DNA, 33 bp, Homo sapien
taactgcaggccattaagcaagaattaaggctt

SEQ ID NO: 559130 - DNA, 33 bp, Homo sapien
taactgcaggccattaggcaagaattaaggctt

SEQ ID NO: 559131 - DNA, 33 bp, Homo sapien
tgactctctgacctaaccctttgctactcaaag

SEQ ID NO: 559132 - DNA, 33 bp, Homo sapien
tgactctctgacctaagcctttgctactcaaag

SEQ ID NO: 559133 - DNA, 33 bp, Homo sapien
atcacaggcaccacataagaataggttagaaat

SEQ ID NO: 559134 - DNA, 33 bp, Homo sapien
atcacaggcaccacatgagaataggttagaaat

SEQ ID NO: 559135 - DNA, 33 bp, Homo sapien
tcctcagaacaaacacaagaacagggacattac

SEQ ID NO: 559136 - DNA, 33 bp, Homo sapien
tcctcagaacaaacacgagaacagggacattac

SEQ ID NO: 559137 - DNA, 33 bp, Homo sapien
ttgaagctactctccacgaataactgagcatgg

SEQ ID NO: 559138 - DNA, 33 bp, Homo sapien
ttgaagctactctccatgaataactgagcatgg

SEQ ID NO: 559139 - DNA, 33 bp, Homo sapien
ggaaaaaagggaaagccaagtagtgctgctttt

SEQ ID NO: 559140 - DNA, 33 bp, Homo sapien
ggaaaaaagggaaagcgaagtagtgctgctttt

SEQ ID NO: 559141 - DNA, 33 bp, Homo sapien
ttattatttcttcacaaatctacaggtgaccag

SEQ ID NO: 559142 - DNA, 33 bp, Homo sapien
ttattatttcttcacacatctacaggtgaccag

SEQ ID NO: 559143 - DNA, 33 bp, Homo sapien
tcatataagaatcccaaagagtcaagtttcaag

SEQ ID NO: 559144 - DNA, 33 bp, Homo sapien
tcatataagaatcccagagagtcaagtttcaag

SEQ ID NO: 559145 - DNA, 33 bp, Homo sapien
tgatgattttagcgtacgctcttgcttgaggtg

SEQ ID NO: 559146 - DNA, 33 bp, Homo sapien
tgatgattttagcgtatgctcttgcttgaggtg

SEQ ID NO: 559147 - DNA, 33 bp, Homo sapien
atctgtgctatggacacaaagcaagaggaagca

SEQ ID NO: 559148 - DNA, 33 bp, Homo sapien
atctgtgctatggacagaaagcaagaggaagca

SEQ ID NO: 559149 - DNA, 33 bp, Homo sapien
acaggtgtttttcaggcaaggtagaaggcacag

SEQ ID NO: 559150 - DNA, 33 bp, Homo sapien
acaggtgtttttcaggtaaggtagaaggcacag

SEQ ID NO: 559151 - DNA, 33 bp, Homo sapien
tttgtcacaacttttcaattcagcccttttagg

SEQ ID NO: 559152 - DNA, 33 bp, Homo sapien
tttgtcacaacttttcgattcagcccttttagg

SEQ ID NO: 559153 - DNA, 33 bp, Homo sapien
tgaggcagggtagagaagcaaatcttcctctga

SEQ ID NO: 559154 - DNA, 33 bp, Homo sapien
tgaggcagggtagagaggcaaatcttcctctga

SEQ ID NO: 559155 - DNA, 33 bp, Homo sapien
tggaactgcataggaaaaactagaggaaggata

SEQ ID NO: 559156 - DNA, 33 bp, Homo sapien
tggaactgcataggaagaactagaggaaggata

SEQ ID NO: 559157 - DNA, 33 bp, Homo sapien
tttctgattgagtagacattcactacagttgag

SEQ ID NO: 559158 - DNA, 33 bp, Homo sapien
tttctgattgagtagatattcactacagttgag

SEQ ID NO: 559159 - DNA, 33 bp, Homo sapien
tctgcagaaggcctcaaaaggctgccatccaga

SEQ ID NO: 559160 - DNA, 33 bp, Homo sapien
tctgcagaaggcctcacaaggctgccatccaga

SEQ ID NO: 559161 - DNA, 33 bp, Homo sapien
ggaaagaggtaagggggattgattcaagtagac

SEQ ID NO: 559162 - DNA, 33 bp, Homo sapien
ggaaagaggtaaggggtattgattcaagtagac

SEQ ID NO: 559163 - DNA, 33 bp, Homo sapien
agatgctgaaccatgaacaaaaggaaatgattg

SEQ ID NO: 559164 - DNA, 33 bp, Homo sapien
agatgctgaaccatgagcaaaaggaaatgattg

SEQ ID NO: 559165 - DNA, 33 bp, Homo sapien
acacacacaaatgaaaaccaaagatgtaaagag

SEQ ID NO: 559166 - DNA, 33 bp, Homo sapien
acacacacaaatgaaagccaaagatgtaaagag

SEQ ID NO: 559167 - DNA, 33 bp, Homo sapien
tctcacagtcccttcaccagttcccctaaacca

SEQ ID NO: 559168 - DNA, 33 bp, Homo sapien
tctcacagtcccttcatcagttcccctaaacca

SEQ ID NO: 559169 - DNA, 33 bp, Homo sapien
taataatggtaataaacgagggaaaacttagca

SEQ ID NO: 559170 - DNA, 33 bp, Homo sapien
taataatggtaataaatgagggaaaacttagca

SEQ ID NO: 559171 - DNA, 33 bp, Homo sapien
aggtgaaagagcctaacacatttaaggcactca

SEQ ID NO: 559172 - DNA, 33 bp, Homo sapien
aggtgaaagagcctaatacatttaaggcactca

SEQ ID NO: 559173 - DNA, 33 bp, Homo sapien
taacatttgagcaacaatactcaaagtgtggac

SEQ ID NO: 559174 - DNA, 33 bp, Homo sapien
taacatttgagcaacagtactcaaagtgtggac

SEQ ID NO: 559175 - DNA, 33 bp, Homo sapien
ttttttaagctaatacgcactaagtttcacttt

SEQ ID NO: 559176 - DNA, 33 bp, Homo sapien
ttttttaagctaatactcactaagtttcacttt

SEQ ID NO: 559177 - DNA, 33 bp, Homo sapien
gcaaaatgatagagacagtcaagagatctaggg

SEQ ID NO: 559178 - DNA, 33 bp, Homo sapien
gcaaaatgatagagacggtcaagagatctaggg

SEQ ID NO: 559179 - DNA, 33 bp, Homo sapien
ttagaatgccaaagaaatggaatcatataccac

SEQ ID NO: 559180 - DNA, 33 bp, Homo sapien
ttagaatgccaaagaagtggaatcatataccac

SEQ ID NO: 559181 - DNA, 33 bp, Homo sapien
tgcatatagtgttctcaaggatgaaatcttgca

SEQ ID NO: 559182 - DNA, 33 bp, Homo sapien
tgcatatagtgttctctaggatgaaatcttgca

SEQ ID NO: 559183 - DNA, 33 bp, Homo sapien
agcagtctctgaagaacggtctagcacaatttt

SEQ ID NO: 559184 - DNA, 33 bp, Homo sapien
agcagtctctgaagaatggtctagcacaatttt

SEQ ID NO: 559185 - DNA, 33 bp, Homo sapien
gtaaatggatacttaccatgacaggatctaacc

SEQ ID NO: 559186 - DNA, 33 bp, Homo sapien
gtaaatggatacttactatgacaggatctaacc

SEQ ID NO: 559187 - DNA, 33 bp, Homo sapien
atattgcaagtggaaaatcagaagctattgatt

SEQ ID NO: 559188 - DNA, 33 bp, Homo sapien
atattgcaagtggaaagtcagaagctattgatt

SEQ ID NO: 559189 - DNA, 33 bp, Homo sapien
gtgtcattactttgcactatggaaaatgatcag

SEQ ID NO: 559190 - DNA, 33 bp, Homo sapien
gtgtcattactttgcattatggaaaatgatcag

SEQ ID NO: 559191 - DNA, 33 bp, Homo sapien
atcctcaccttctaaaactgggctaactccctc

SEQ ID NO: 559192 - DNA, 33 bp, Homo sapien
atcctcaccttctaaatctgggctaactccctc

SEQ ID NO: 559193 - DNA, 33 bp, Homo sapien
ttgttgtggcatttccaaacctagacctcaaaa

SEQ ID NO: 559194 - DNA, 33 bp, Homo sapien
ttgttgtggcatttccgaacctagacctcaaaa

SEQ ID NO: 559195 - DNA, 33 bp, Homo sapien
gcctgcagtgtctaaaatagttataaaatgtct

SEQ ID NO: 559196 - DNA, 33 bp, Homo sapien
gcctgcagtgtctaaactagttataaaatgtct

SEQ ID NO: 559197 - DNA, 33 bp, Homo sapien
tcaggcttgtcagaaccagagttagagcttcct

SEQ ID NO: 559198 - DNA, 33 bp, Homo sapien
tcaggcttgtcagaactagagttagagcttcct

SEQ ID NO: 559199 - DNA, 33 bp, Homo sapien
agagctaatggctcccaaagatgctttgatcat

SEQ ID NO: 559200 - DNA, 33 bp, Homo sapien
agagctaatggctcccgaagatgctttgatcat

SEQ ID NO: 559201 - DNA, 33 bp, Homo sapien
gctgttgaaatctgcaaaagagttggatcaaat

SEQ ID NO: 559202 - DNA, 33 bp, Homo sapien
gctgttgaaatctgcacaagagttggatcaaat

SEQ ID NO: 559203 - DNA, 33 bp, Homo sapien
attcgtaaaatgacaacgggataagagcatgca

SEQ ID NO: 559204 - DNA, 33 bp, Homo sapien
attcgtaaaatgacaatgggataagagcatgca

SEQ ID NO: 559205 - DNA, 33 bp, Homo sapien
atcatggagaagtatacgtatgatttgtttatg

SEQ ID NO: 559206 - DNA, 33 bp, Homo sapien
atcatggagaagtatatgtatgatttgtttatg

SEQ ID NO: 559207 - DNA, 33 bp, Homo sapien
caaaaaacaagtctaaatcatggtgtatatatg

SEQ ID NO: 559208 - DNA, 33 bp, Homo sapien
caaaaaacaagtctaagtcatggtgtatatatg

SEQ ID NO: 559209 - DNA, 33 bp, Homo sapien
gtgtgattactaggacacaaagattattggagg

SEQ ID NO: 559210 - DNA, 33 bp, Homo sapien
gtgtgattactaggacgcaaagattattggagg

SEQ ID NO: 559211 - DNA, 33 bp, Homo sapien
caggttagaggtattcaaaacatttccaattta

SEQ ID NO: 559212 - DNA, 33 bp, Homo sapien
caggttagaggtattcgaaacatttccaattta

SEQ ID NO: 559213 - DNA, 33 bp, Homo sapien
tcttcaattctaaaacaagaaagttgcattaca

SEQ ID NO: 559214 - DNA, 33 bp, Homo sapien
tcttcaattctaaaaccagaaagttgcattaca

SEQ ID NO: 559215 - DNA, 33 bp, Homo sapien
acaattactgtatgaacggtttgttggaaaatt

SEQ ID NO: 559216 - DNA, 33 bp, Homo sapien
acaattactgtatgaatggtttgttggaaaatt

SEQ ID NO: 559217 - DNA, 33 bp, Homo sapien
agtcccttagccaggaccagttcagttggagca

SEQ ID NO: 559218 - DNA, 33 bp, Homo sapien
agtcccttagccaggatcagttcagttggagca

SEQ ID NO: 559219 - DNA, 33 bp, Homo sapien
ttagtaaaaaggcacactgtccaaaccttacac

SEQ ID NO: 559220 - DNA, 33 bp, Homo sapien
ttagtaaaaaggcacattgtccaaaccttacac

SEQ ID NO: 559221 - DNA, 33 bp, Homo sapien
acaaggccaatattacactgatacgaaaaccaa

SEQ ID NO: 559222 - DNA, 33 bp, Homo sapien
acaaggccaatattaccctgatacgaaaaccaa

SEQ ID NO: 559223 - DNA, 33 bp, Homo sapien
attgtggagtgattcacaggagatcaaactaat

SEQ ID NO: 559224 - DNA, 33 bp, Homo sapien
attgtggagtgattcagaggagatcaaactaat

SEQ ID NO: 559225 - DNA, 33 bp, Homo sapien
catagatgaaagcgccccatactacatccttcc

SEQ ID NO: 559226 - DNA, 33 bp, Homo sapien
catagatgaaagcgcctcatactacatccttcc

SEQ ID NO: 559227 - DNA, 33 bp, Homo sapien
aaaggtatataggatacgtgatttatggtccat

SEQ ID NO: 559228 - DNA, 33 bp, Homo sapien
aaaggtatataggatatgtgatttatggtccat

SEQ ID NO: 559229 - DNA, 33 bp, Homo sapien
ctgttgttctttctggacataatgcatatctat

SEQ ID NO: 559230 - DNA, 33 bp, Homo sapien
ctgttgttctttctgggcataatgcatatctat

SEQ ID NO: 559231 - DNA, 33 bp, Homo sapien
agaacagagtctcaagaatgtcaaggtgggaat

SEQ ID NO: 559232 - DNA, 33 bp, Homo sapien
agaacagagtctcaaggatgtcaaggtgggaat

SEQ ID NO: 559233 - DNA, 33 bp, Homo sapien
tgggagaaaattcatccataactccatagcaga

SEQ ID NO: 559234 - DNA, 33 bp, Homo sapien
tgggagaaaattcatcgataactccatagcaga

SEQ ID NO: 559235 - DNA, 33 bp, Homo sapien
atggttaaaagcataacgcaaatgttttacacc

SEQ ID NO: 559236 - DNA, 33 bp, Homo sapien
atggttaaaagcataatgcaaatgttttacacc

SEQ ID NO: 559237 - DNA, 33 bp, Homo sapien
gctataatcctttttcaccaggtctgctcctcc

SEQ ID NO: 559238 - DNA, 33 bp, Homo sapien
gctataatcctttttcgccaggtctgctcctcc

SEQ ID NO: 559239 - DNA, 33 bp, Homo sapien
aggcgtacacacacaagttacataggtaaggca

SEQ ID NO: 559240 - DNA, 33 bp, Homo sapien
aggcgtacacacacaatttacataggtaaggca

SEQ ID NO: 559241 - DNA, 33 bp, Homo sapien
gcttaaatcaataaaactcagagagagtgatga

SEQ ID NO: 559242 - DNA, 33 bp, Homo sapien
gcttaaatcaataaaagtcagagagagtgatga

SEQ ID NO: 559243 - DNA, 33 bp, Homo sapien
aattaaactctagccagtgatacaggaccaaca

SEQ ID NO: 559244 - DNA, 33 bp, Homo sapien
aattaaactctagccattgatacaggaccaaca

SEQ ID NO: 559245 - DNA, 33 bp, Homo sapien
gaacttacaggtagaaagttattgttatccact

SEQ ID NO: 559246 - DNA, 33 bp, Homo sapien
gaacttacaggtagaaggttattgttatccact

SEQ ID NO: 559247 - DNA, 33 bp, Homo sapien
atgagaccaagttggtaaagtccctagcacagt

SEQ ID NO: 559248 - DNA, 33 bp, Homo sapien
atgagaccaagttggtgaagtccctagcacagt

SEQ ID NO: 559249 - DNA, 33 bp, Homo sapien
ttaccatagtgaccaaccatttccatccctatt

SEQ ID NO: 559250 - DNA, 33 bp, Homo sapien
ttaccatagtgaccaatcatttccatccctatt

SEQ ID NO: 559251 - DNA, 33 bp, Homo sapien
ggaacagaagaaaagacgtaagtcaaaaatatg

SEQ ID NO: 559252 - DNA, 33 bp, Homo sapien
ggaacagaagaaaagatgtaagtcaaaaatatg

SEQ ID NO: 559253 - DNA, 33 bp, Homo sapien
ctttccattgactcaaaaaaagctgcaacaagt

SEQ ID NO: 559254 - DNA, 33 bp, Homo sapien
ctttccattgactcaagaaaagctgcaacaagt

SEQ ID NO: 559255 - DNA, 33 bp, Homo sapien
aaatctctgtgctgagcaccagcgagaggaaaa

SEQ ID NO: 559256 - DNA, 33 bp, Homo sapien
aaatctctgtgctgagtaccagcgagaggaaaa

SEQ ID NO: 559257 - DNA, 33 bp, Homo sapien
ctttaatctcttgaaagtgttataagagcatac

SEQ ID NO: 559258 - DNA, 33 bp, Homo sapien
ctttaatctcttgaaattgttataagagcatac

SEQ ID NO: 559259 - DNA, 33 bp, Homo sapien
cttgtgaggcttcacactagaagattccatacc

SEQ ID NO: 559260 - DNA, 33 bp, Homo sapien
cttgtgaggcttcacagtagaagattccatacc

SEQ ID NO: 559261 - DNA, 33 bp, Homo sapien
catttgcctagaaagacagtgatcagatctcta

SEQ ID NO: 559262 - DNA, 33 bp, Homo sapien
catttgcctagaaagagagtgatcagatctcta

SEQ ID NO: 559263 - DNA, 33 bp, Homo sapien
ctacagctcaccaaaactgttaaaacatatccc

SEQ ID NO: 559264 - DNA, 33 bp, Homo sapien
ctacagctcaccaaaattgttaaaacatatccc

SEQ ID NO: 559265 - DNA, 33 bp, Homo sapien
ttttcaggttctccaacgattatatacacatat

SEQ ID NO: 559266 - DNA, 33 bp, Homo sapien
ttttcaggttctccaatgattatatacacatat

SEQ ID NO: 559267 - DNA, 33 bp, Homo sapien
ttactgacatagagctcaagactacatttttag

SEQ ID NO: 559268 - DNA, 33 bp, Homo sapien
ttactgacatagagcttaagactacatttttag

SEQ ID NO: 559269 - DNA, 33 bp, Homo sapien
tgactacaaagagtaccggactggctctggaga

SEQ ID NO: 559270 - DNA, 33 bp, Homo sapien
tgactacaaagagtactggactggctctggaga

SEQ ID NO: 559271 - DNA, 33 bp, Homo sapien
cctcacactcatatggaataagcatcttgacct

SEQ ID NO: 559272 - DNA, 33 bp, Homo sapien
cctcacactcatatgggataagcatcttgacct

SEQ ID NO: 559273 - DNA, 33 bp, Homo sapien
aagacacacgtggacaagatcaagaggcatttc

SEQ ID NO: 559274 - DNA, 33 bp, Homo sapien
aagacacacgtggacatgatcaagaggcatttc

SEQ ID NO: 559275 - DNA, 33 bp, Homo sapien
tgtaccagtagtgataaagtctcccaagaagca

SEQ ID NO: 559276 - DNA, 33 bp, Homo sapien
tgtaccagtagtgatagagtctcccaagaagca

SEQ ID NO: 559277 - DNA, 33 bp, Homo sapien
aggaaatgcaattaaaagtgcagtgtaccagta

SEQ ID NO: 559278 - DNA, 33 bp, Homo sapien
aggaaatgcaattaaatgtgcagtgtaccagta

SEQ ID NO: 559279 - DNA, 33 bp, Homo sapien
ctatgtgactctggcaaatcccagaatttttct

SEQ ID NO: 559280 - DNA, 33 bp, Homo sapien
ctatgtgactctggcacatcccagaatttttct

SEQ ID NO: 559281 - DNA, 33 bp, Homo sapien
aaatctcaaagttcgccgcatgatttctataag

SEQ ID NO: 559282 - DNA, 33 bp, Homo sapien
aaatctcaaagttcgctgcatgatttctataag

SEQ ID NO: 559283 - DNA, 33 bp, Homo sapien
tactttcaaatgccgcccttatggttcattaca

SEQ ID NO: 559284 - DNA, 33 bp, Homo sapien
tactttcaaatgccgcgcttatggttcattaca

SEQ ID NO: 559285 - DNA, 33 bp, Homo sapien
tcctaggtaccaaacaaattaattgctattgta

SEQ ID NO: 559286 - DNA, 33 bp, Homo sapien
tcctaggtaccaaacacattaattgctattgta

SEQ ID NO: 559287 - DNA, 33 bp, Homo sapien
acatgagtgatgaaataaaatatgcaacaaacc

SEQ ID NO: 559288 - DNA, 33 bp, Homo sapien
acatgagtgatgaaatgaaatatgcaacaaacc

SEQ ID NO: 559289 - DNA, 33 bp, Homo sapien
tgacacagcagagggaatagaaggtgctaggag

SEQ ID NO: 559290 - DNA, 33 bp, Homo sapien
tgacacagcagagggagtagaaggtgctaggag

SEQ ID NO: 559291 - DNA, 33 bp, Homo sapien
tcctgtaacttaaatacagtgatgtagagttgg

SEQ ID NO: 559292 - DNA, 33 bp, Homo sapien
tcctgtaacttaaatatagtgatgtagagttgg

SEQ ID NO: 559293 - DNA, 33 bp, Homo sapien
cagtgattctctaccccacgttgttatccaaga

SEQ ID NO: 559294 - DNA, 33 bp, Homo sapien
cagtgattctctacccgacgttgttatccaaga

SEQ ID NO: 559295 - DNA, 33 bp, Homo sapien
acacaatgagtgaaagcaactgagagtatttca

SEQ ID NO: 559296 - DNA, 33 bp, Homo sapien
acacaatgagtgaaaggaactgagagtatttca

SEQ ID NO: 559297 - DNA, 33 bp, Homo sapien
tcattcctccgaacaacgaaacatgatattaaa

SEQ ID NO: 559298 - DNA, 33 bp, Homo sapien
tcattcctccgaacaatgaaacatgatattaaa

SEQ ID NO: 559299 - DNA, 33 bp, Homo sapien
gagagattgaatggaactgacaataggtgcaga

SEQ ID NO: 559300 - DNA, 33 bp, Homo sapien
gagagattgaatggaattgacaataggtgcaga

SEQ ID NO: 559301 - DNA, 33 bp, Homo sapien
actcatgtttgactatgaatttcatggagttgc

SEQ ID NO: 559302 - DNA, 33 bp, Homo sapien
actcatgtttgactattaatttcatggagttgc

SEQ ID NO: 559303 - DNA, 33 bp, Homo sapien
tattcaggatataggacatacaaagcacattgc

SEQ ID NO: 559304 - DNA, 33 bp, Homo sapien
tattcaggatataggagatacaaagcacattgc

SEQ ID NO: 559305 - DNA, 33 bp, Homo sapien
taatggaccatagtgacacatcctcaattcttg

SEQ ID NO: 559306 - DNA, 33 bp, Homo sapien
taatggaccatagtgatacatcctcaattcttg

SEQ ID NO: 559307 - DNA, 33 bp, Homo sapien
cacaacatttgtgtccaaaacattctacaagaa

SEQ ID NO: 559308 - DNA, 33 bp, Homo sapien
cacaacatttgtgtcccaaacattctacaagaa

SEQ ID NO: 559309 - DNA, 33 bp, Homo sapien
aacatctactacagaccgcatctctgtgagttt

SEQ ID NO: 559310 - DNA, 33 bp, Homo sapien
aacatctactacagactgcatctctgtgagttt

SEQ ID NO: 559311 - DNA, 33 bp, Homo sapien
cattagatccccagaacatataccgaggataat

SEQ ID NO: 559312 - DNA, 33 bp, Homo sapien
cattagatccccagaatatataccgaggataat

SEQ ID NO: 559313 - DNA, 33 bp, Homo sapien
tcttccttagctaaaacttcatttctcctgaat

SEQ ID NO: 559314 - DNA, 33 bp, Homo sapien
tcttccttagctaaaagttcatttctcctgaat

SEQ ID NO: 559315 - DNA, 33 bp, Homo sapien
agaactgcatcacataccaatcaaggacattgg

SEQ ID NO: 559316 - DNA, 33 bp, Homo sapien
agaactgcatcacatatcaatcaaggacattgg

SEQ ID NO: 559317 - DNA, 33 bp, Homo sapien
tcgttcaacttcaaaacattattctgtacagct

SEQ ID NO: 559318 - DNA, 33 bp, Homo sapien
tcgttcaacttcaaaatattattctgtacagct

SEQ ID NO: 559319 - DNA, 33 bp, Homo sapien
tactcaaactgaaacaaggaaagttcattcaac

SEQ ID NO: 559320 - DNA, 33 bp, Homo sapien
tactcaaactgaaacagggaaagttcattcaac

SEQ ID NO: 559321 - DNA, 33 bp, Homo sapien
tagtgggtttggagcaagtcctgttttgtaggg

SEQ ID NO: 559322 - DNA, 33 bp, Homo sapien
tagtgggtttggagcaggtcctgttttgtaggg

SEQ ID NO: 559323 - DNA, 33 bp, Homo sapien
atggcaactcagaccaaagtgatgacagtgcag

SEQ ID NO: 559324 - DNA, 33 bp, Homo sapien
atggcaactcagaccagagtgatgacagtgcag

SEQ ID NO: 559325 - DNA, 33 bp, Homo sapien
ccactggtcacaaaacccacatcactatttcac

SEQ ID NO: 559326 - DNA, 33 bp, Homo sapien
ccactggtcacaaaactcacatcactatttcac

SEQ ID NO: 559327 - DNA, 33 bp, Homo sapien
tgatgtctgtaccgtaagagtggattatataaa

SEQ ID NO: 559328 - DNA, 33 bp, Homo sapien
tgatgtctgtaccgtacgagtggattatataaa

SEQ ID NO: 559329 - DNA, 33 bp, Homo sapien
ctagccaggaagtcaactcatttaacatatcta

SEQ ID NO: 559330 - DNA, 33 bp, Homo sapien
ctagccaggaagtcaattcatttaacatatcta

SEQ ID NO: 559331 - DNA, 33 bp, Homo sapien
cacttccctcccaagcactaccagaatctagtg

SEQ ID NO: 559332 - DNA, 33 bp, Homo sapien
cacttccctcccaagcgctaccagaatctagtg

SEQ ID NO: 559333 - DNA, 33 bp, Homo sapien
tggttagtgttgaaacaatttgggtgaaacttg

SEQ ID NO: 559334 - DNA, 33 bp, Homo sapien
tggttagtgttgaaacgatttgggtgaaacttg

SEQ ID NO: 559335 - DNA, 33 bp, Homo sapien
ggagaaaattcagagacgaaagagctgaagaaa

SEQ ID NO: 559336 - DNA, 33 bp, Homo sapien
ggagaaaattcagagatgaaagagctgaagaaa

SEQ ID NO: 559337 - DNA, 33 bp, Homo sapien
tctctacttcaaaggacctatactctagtacag

SEQ ID NO: 559338 - DNA, 33 bp, Homo sapien
tctctacttcaaaggatctatactctagtacag

SEQ ID NO: 559339 - DNA, 33 bp, Homo sapien
ttttctaaagatgaccacaccattgtatatcat

SEQ ID NO: 559340 - DNA, 33 bp, Homo sapien
ttttctaaagatgacctcaccattgtatatcat

SEQ ID NO: 559341 - DNA, 33 bp, Homo sapien
taattattattactgcacctggaaatcgaaaac

SEQ ID NO: 559342 - DNA, 33 bp, Homo sapien
taattattattactgcgcctggaaatcgaaaac

SEQ ID NO: 559343 - DNA, 33 bp, Homo sapien
caatattgaaaagcagattccaaagttatcttg

SEQ ID NO: 559344 - DNA, 33 bp, Homo sapien
caatattgaaaagcaggttccaaagttatcttg

SEQ ID NO: 559345 - DNA, 33 bp, Homo sapien
ggcataatttctgcaacgtgttcgcagtggttc

SEQ ID NO: 559346 - DNA, 33 bp, Homo sapien
ggcataatttctgcaatgtgttcgcagtggttc

SEQ ID NO: 559347 - DNA, 33 bp, Homo sapien
ctcgtttggacttctacaacaaaatgtcataaa

SEQ ID NO: 559348 - DNA, 33 bp, Homo sapien
ctcgtttggacttctataacaaaatgtcataaa

SEQ ID NO: 559349 - DNA, 33 bp, Homo sapien
agaggagaagacaggaatcaacaggaagtagaa

SEQ ID NO: 559350 - DNA, 33 bp, Homo sapien
agaggagaagacaggattcaacaggaagtagaa

SEQ ID NO: 559351 - DNA, 33 bp, Homo sapien
ccccttccatctagtgcactgtcagacaacctc

SEQ ID NO: 559352 - DNA, 33 bp, Homo sapien
ccccttccatctagtgtactgtcagacaacctc

SEQ ID NO: 559353 - DNA, 33 bp, Homo sapien
acatctccaatcaaaacccagcaatggttcctc

SEQ ID NO: 559354 - DNA, 33 bp, Homo sapien
acatctccaatcaaaatccagcaatggttcctc

SEQ ID NO: 559355 - DNA, 33 bp, Homo sapien
tttgaggtggattccacaggctctggcaactat

SEQ ID NO: 559356 - DNA, 33 bp, Homo sapien
tttgaggtggattccataggctctggcaactat

SEQ ID NO: 559357 - DNA, 33 bp, Homo sapien
cacatgattgcattagaaggtactgtcagcttt

SEQ ID NO: 559358 - DNA, 33 bp, Homo sapien
cacatgattgcattagcaggtactgtcagcttt

SEQ ID NO: 559359 - DNA, 33 bp, Homo sapien
agtgccttctttgaaaccttcttacttctctag

SEQ ID NO: 559360 - DNA, 33 bp, Homo sapien
agtgccttctttgaaatcttcttacttctctag

SEQ ID NO: 559361 - DNA, 33 bp, Homo sapien
tctgctgtcaatacaacgggggtgattataacc

SEQ ID NO: 559362 - DNA, 33 bp, Homo sapien
tctgctgtcaatacaatgggggtgattataacc

SEQ ID NO: 559363 - DNA, 33 bp, Homo sapien
gctggtctctgctgtaagtagttttctttcttc

SEQ ID NO: 559364 - DNA, 33 bp, Homo sapien
gctggtctctgctgtaggtagttttctttcttc

SEQ ID NO: 559365 - DNA, 33 bp, Homo sapien
ccagatatatgagtgaaccagccaagactagaa

SEQ ID NO: 559366 - DNA, 33 bp, Homo sapien
ccagatatatgagtgacccagccaagactagaa

SEQ ID NO: 559367 - DNA, 33 bp, Homo sapien
gagagagaagaagatcacaaggcatgagctgaa

SEQ ID NO: 559368 - DNA, 33 bp, Homo sapien
gagagagaagaagatcgcaaggcatgagctgaa

SEQ ID NO: 559369 - DNA, 33 bp, Homo sapien
cagttgctctcattccaaaacattcttagttat

SEQ ID NO: 559370 - DNA, 33 bp, Homo sapien
cagttgctctcattccgaaacattcttagttat

SEQ ID NO: 559371 - DNA, 33 bp, Homo sapien
gtttattaatgtgtcccgagtgcctagcacata

SEQ ID NO: 559372 - DNA, 33 bp, Homo sapien
gtttattaatgtgtcctgagtgcctagcacata

SEQ ID NO: 559373 - DNA, 33 bp, Homo sapien
agagatggtttatgcaactgaagaatacacaat

SEQ ID NO: 559374 - DNA, 33 bp, Homo sapien
agagatggtttatgcagctgaagaatacacaat

SEQ ID NO: 559375 - DNA, 33 bp, Homo sapien
cctgaatacctattaaatgtgtcctggggctct

SEQ ID NO: 559376 - DNA, 33 bp, Homo sapien
cctgaatacctattaactgtgtcctggggctct

SEQ ID NO: 559377 - DNA, 33 bp, Homo sapien
gagtcaaaagatctaactgggaattgagccagg

SEQ ID NO: 559378 - DNA, 33 bp, Homo sapien
gagtcaaaagatctaattgggaattgagccagg

SEQ ID NO: 559379 - DNA, 33 bp, Homo sapien
atggatctctcagcccaaactgcgcctctttcc

SEQ ID NO: 559380 - DNA, 33 bp, Homo sapien
atggatctctcagcccgaactgcgcctctttcc

SEQ ID NO: 559381 - DNA, 33 bp, Homo sapien
gttttattactgttcacagcaacaccccaaagg

SEQ ID NO: 559382 - DNA, 33 bp, Homo sapien
gttttattactgttcatagcaacaccccaaagg

SEQ ID NO: 559383 - DNA, 33 bp, Homo sapien
atggagatttatagtacggtagagtagctcaca

SEQ ID NO: 559384 - DNA, 33 bp, Homo sapien
atggagatttatagtatggtagagtagctcaca

SEQ ID NO: 559385 - DNA, 33 bp, Homo sapien
gcatggacctttccagaacctgctgtttgcatt

SEQ ID NO: 559386 - DNA, 33 bp, Homo sapien
gcatggacctttccaggacctgctgtttgcatt

SEQ ID NO: 559387 - DNA, 33 bp, Homo sapien
gtcccataaacatgaaataattgaacactaaaa

SEQ ID NO: 559388 - DNA, 33 bp, Homo sapien
gtcccataaacatgaagtaattgaacactaaaa

SEQ ID NO: 559389 - DNA, 33 bp, Homo sapien
cacttattctctctgacgtcactgatgttgctg

SEQ ID NO: 559390 - DNA, 33 bp, Homo sapien
cacttattctctctgatgtcactgatgttgctg

SEQ ID NO: 559391 - DNA, 33 bp, Homo sapien
tcatgaaaaataataaacagctattaagccata

SEQ ID NO: 559392 - DNA, 33 bp, Homo sapien
tcatgaaaaataataagcagctattaagccata

SEQ ID NO: 559393 - DNA, 33 bp, Homo sapien
tcagtcacactagatgcatttcgagtgtttact

SEQ ID NO: 559394 - DNA, 33 bp, Homo sapien
tcagtcacactagatgtatttcgagtgtttact

SEQ ID NO: 559395 - DNA, 33 bp, Homo sapien
agatatgtgtctcatccctttgttgtacagatg

SEQ ID NO: 559396 - DNA, 33 bp, Homo sapien
agatatgtgtctcatctctttgttgtacagatg

SEQ ID NO: 559397 - DNA, 33 bp, Homo sapien
tgcatgtacagagtgacacagtaattttggctt

SEQ ID NO: 559398 - DNA, 33 bp, Homo sapien
tgcatgtacagagtgatacagtaattttggctt

SEQ ID NO: 559399 - DNA, 33 bp, Homo sapien
tttaatctctacaccaatggagtggcattatga

SEQ ID NO: 559400 - DNA, 33 bp, Homo sapien
tttaatctctacaccattggagtggcattatga

SEQ ID NO: 559401 - DNA, 33 bp, Homo sapien
atacctgtatctcttcacagtcatgatgtctca

SEQ ID NO: 559402 - DNA, 33 bp, Homo sapien
atacctgtatctcttcgcagtcatgatgtctca

SEQ ID NO: 559403 - DNA, 33 bp, Homo sapien
atattcaatcttagacagggaagtctactatta

SEQ ID NO: 559404 - DNA, 33 bp, Homo sapien
atattcaatcttagaccgggaagtctactatta

SEQ ID NO: 559405 - DNA, 33 bp, Homo sapien
agtcattaatggtggaaattctggcacctggct

SEQ ID NO: 559406 - DNA, 33 bp, Homo sapien
agtcattaatggtggagattctggcacctggct

SEQ ID NO: 559407 - DNA, 33 bp, Homo sapien
aggaaaaataattccactcttcatacaccaaag

SEQ ID NO: 559408 - DNA, 33 bp, Homo sapien
aggaaaaataattccagtcttcatacaccaaag

SEQ ID NO: 559409 - DNA, 33 bp, Homo sapien
ttggatcaaaaatgaacgagcaactttttattc

SEQ ID NO: 559410 - DNA, 33 bp, Homo sapien
ttggatcaaaaatgaatgagcaactttttattc

SEQ ID NO: 559411 - DNA, 33 bp, Homo sapien
cccctttgacctttctcaagagcccttcatgtc

SEQ ID NO: 559412 - DNA, 33 bp, Homo sapien
cccctttgacctttctgaagagcccttcatgtc

SEQ ID NO: 559413 - DNA, 33 bp, Homo sapien
ctaactatgacagtaaccgacagtgccttaatc

SEQ ID NO: 559414 - DNA, 33 bp, Homo sapien
ctaactatgacagtaatcgacagtgccttaatc

SEQ ID NO: 559415 - DNA, 33 bp, Homo sapien
gtgatatggccctgaccctgatgttacccctgc

SEQ ID NO: 559416 - DNA, 33 bp, Homo sapien
gtgatatggccctgactctgatgttacccctgc

SEQ ID NO: 559417 - DNA, 33 bp, Homo sapien
tttgcagtttttagccaagtgttcctagattca

SEQ ID NO: 559418 - DNA, 33 bp, Homo sapien
tttgcagtttttagccgagtgttcctagattca

SEQ ID NO: 559419 - DNA, 33 bp, Homo sapien
ttattgggagtatatagccattagctttcccat

SEQ ID NO: 559420 - DNA, 33 bp, Homo sapien
ttattgggagtatatatccattagctttcccat

SEQ ID NO: 559421 - DNA, 33 bp, Homo sapien
gtccagagctctttgcactcctattaatactac

SEQ ID NO: 559422 - DNA, 33 bp, Homo sapien
gtccagagctctttgctctcctattaatactac

SEQ ID NO: 559423 - DNA, 33 bp, Homo sapien
ctcctattaatactaccgctttgagaaagctaa

SEQ ID NO: 559424 - DNA, 33 bp, Homo sapien
ctcctattaatactactgctttgagaaagctaa

SEQ ID NO: 559425 - DNA, 33 bp, Homo sapien
tattgttcagcaactcaaagtgtatgttatttg

SEQ ID NO: 559426 - DNA, 33 bp, Homo sapien
tattgttcagcaactcgaagtgtatgttatttg

SEQ ID NO: 559427 - DNA, 33 bp, Homo sapien
tgtgcttggggccgaaaagggtaccatgcccct

SEQ ID NO: 559428 - DNA, 33 bp, Homo sapien
tgtgcttggggccgaatagggtaccatgcccct

SEQ ID NO: 559429 - DNA, 33 bp, Homo sapien
gagcttagaatgaccacgaataaagatctcttt

SEQ ID NO: 559430 - DNA, 33 bp, Homo sapien
gagcttagaatgaccatgaataaagatctcttt

SEQ ID NO: 559431 - DNA, 33 bp, Homo sapien
tcccgagaaaaggatgaaagaatggataaacag

SEQ ID NO: 559432 - DNA, 33 bp, Homo sapien
tcccgagaaaaggatgcaagaatggataaacag

SEQ ID NO: 559433 - DNA, 33 bp, Homo sapien
ctgcatttccaggtaaataattgaaaagcacga

SEQ ID NO: 559434 - DNA, 33 bp, Homo sapien
ctgcatttccaggtaagtaattgaaaagcacga

SEQ ID NO: 559435 - DNA, 33 bp, Homo sapien
atttacaagcctttcaaacacaggcgaaaacac

SEQ ID NO: 559436 - DNA, 33 bp, Homo sapien
atttacaagcctttcacacacaggcgaaaacac

SEQ ID NO: 559437 - DNA, 33 bp, Homo sapien
atcctcaccaaaaccacaggaagatgttaggga

SEQ ID NO: 559438 - DNA, 33 bp, Homo sapien
atcctcaccaaaaccagaggaagatgttaggga

SEQ ID NO: 559439 - DNA, 33 bp, Homo sapien
tttgatgagaagcaaaacctctatgttaaccgt

SEQ ID NO: 559440 - DNA, 33 bp, Homo sapien
tttgatgagaagcaaagcctctatgttaaccgt

SEQ ID NO: 559441 - DNA, 33 bp, Homo sapien
aagatgtcaataggctcagagtggtgaactgag

SEQ ID NO: 559442 - DNA, 33 bp, Homo sapien
aagatgtcaataggctgagagtggtgaactgag

SEQ ID NO: 559443 - DNA, 33 bp, Homo sapien
agtagagcttgtgtgcaaatctctttcttggaa

SEQ ID NO: 559444 - DNA, 33 bp, Homo sapien
agtagagcttgtgtgcgaatctctttcttggaa

SEQ ID NO: 559445 - DNA, 33 bp, Homo sapien
aacatgtctgaggtaaaagctgcagccacaggt

SEQ ID NO: 559446 - DNA, 33 bp, Homo sapien
aacatgtctgaggtaagagctgcagccacaggt

SEQ ID NO: 559447 - DNA, 33 bp, Homo sapien
ttgactccagttgtaacaggggaggttggtgca

SEQ ID NO: 559448 - DNA, 33 bp, Homo sapien
ttgactccagttgtaataggggaggttggtgca

SEQ ID NO: 559449 - DNA, 33 bp, Homo sapien
cctgatttatcacttgcattaaggcaaaagcca

SEQ ID NO: 559450 - DNA, 33 bp, Homo sapien
cctgatttatcacttgtattaaggcaaaagcca

SEQ ID NO: 559451 - DNA, 33 bp, Homo sapien
ccctgactaataccgaagcttaaaataactatt

SEQ ID NO: 559452 - DNA, 33 bp, Homo sapien
ccctgactaataccgatgcttaaaataactatt

SEQ ID NO: 559453 - DNA, 33 bp, Homo sapien
ctcaatggaagttaaaggaagaacagcacacgt

SEQ ID NO: 559454 - DNA, 33 bp, Homo sapien
ctcaatggaagttaaatgaagaacagcacacgt

SEQ ID NO: 559455 - DNA, 33 bp, Homo sapien
aagtcaaaatagacaaagaaagttctgctacag

SEQ ID NO: 559456 - DNA, 33 bp, Homo sapien
aagtcaaaatagacaaggaaagttctgctacag

SEQ ID NO: 559457 - DNA, 33 bp, Homo sapien
tttcctagggctgatacagcaaactaccacaaa

SEQ ID NO: 559458 - DNA, 33 bp, Homo sapien
tttcctagggctgatatagcaaactaccacaaa

SEQ ID NO: 559459 - DNA, 33 bp, Homo sapien
tatcctttctttttcacacctaagggcactgtc

SEQ ID NO: 559460 - DNA, 33 bp, Homo sapien
tatcctttctttttcatacctaagggcactgtc

SEQ ID NO: 559461 - DNA, 33 bp, Homo sapien
ctaagtaactttgacaaattggagaactgtaac

SEQ ID NO: 559462 - DNA, 33 bp, Homo sapien
ctaagtaactttgacagattggagaactgtaac

SEQ ID NO: 559463 - DNA, 33 bp, Homo sapien
tggaggctgaacatctcaagttaaggtgttggc

SEQ ID NO: 559464 - DNA, 33 bp, Homo sapien
tggaggctgaacatctgaagttaaggtgttggc

SEQ ID NO: 559465 - DNA, 33 bp, Homo sapien
atatctaccttgtgaacgtcctgcttaaatggg

SEQ ID NO: 559466 - DNA, 33 bp, Homo sapien
atatctaccttgtgaatgtcctgcttaaatggg

SEQ ID NO: 559467 - DNA, 33 bp, Homo sapien
caggtgcatctaaaagaaacgaagaggcacact

SEQ ID NO: 559468 - DNA, 33 bp, Homo sapien
caggtgcatctaaaagcaacgaagaggcacact

SEQ ID NO: 559469 - DNA, 33 bp, Homo sapien
gcctctgctgtccacactggtgatctgttcaca

SEQ ID NO: 559470 - DNA, 33 bp, Homo sapien
gcctctgctgtccacattggtgatctgttcaca

SEQ ID NO: 559471 - DNA, 33 bp, Homo sapien
ccacttttggaagtgacatgtggcaggatacca

SEQ ID NO: 559472 - DNA, 33 bp, Homo sapien
ccacttttggaagtgatatgtggcaggatacca

SEQ ID NO: 559473 - DNA, 33 bp, Homo sapien
agagacgttcatgaagacgcagctttctgagtg

SEQ ID NO: 559474 - DNA, 33 bp, Homo sapien
agagacgttcatgaaggcgcagctttctgagtg

SEQ ID NO: 559475 - DNA, 33 bp, Homo sapien
aaaaaaggccgatcacaatgttaatgagtccct

SEQ ID NO: 559476 - DNA, 33 bp, Homo sapien
aaaaaaggccgatcacgatgttaatgagtccct

SEQ ID NO: 559477 - DNA, 33 bp, Homo sapien
aagaagaaggaccaagcaaggatatgatttcag

SEQ ID NO: 559478 - DNA, 33 bp, Homo sapien
aagaagaaggaccaaggaaggatatgatttcag

SEQ ID NO: 559479 - DNA, 33 bp, Homo sapien
cacagacacgttgtgaaatggacttgccctctg

SEQ ID NO: 559480 - DNA, 33 bp, Homo sapien
cacagacacgttgtgacatggacttgccctctg

SEQ ID NO: 559481 - DNA, 33 bp, Homo sapien
gaatctttcttcctaccggtagtgctaagaaaa

SEQ ID NO: 559482 - DNA, 33 bp, Homo sapien
gaatctttcttcctactggtagtgctaagaaaa

SEQ ID NO: 559483 - DNA, 33 bp, Homo sapien
gacagggaatgattacagggacccacaggagtg

SEQ ID NO: 559484 - DNA, 33 bp, Homo sapien
gacagggaatgattacggggacccacaggagtg

SEQ ID NO: 559485 - DNA, 33 bp, Homo sapien
ttttcctagaaactcccctataaaacattgctg

SEQ ID NO: 559486 - DNA, 33 bp, Homo sapien
ttttcctagaaactccgctataaaacattgctg

SEQ ID NO: 559487 - DNA, 33 bp, Homo sapien
atttgccacatgtgtaccttcttgtataagtac

SEQ ID NO: 559488 - DNA, 33 bp, Homo sapien
atttgccacatgtgtatcttcttgtataagtac

SEQ ID NO: 559489 - DNA, 33 bp, Homo sapien
tgtatcactctctcagaactgtatcgatccccc

SEQ ID NO: 559490 - DNA, 33 bp, Homo sapien
tgtatcactctctcaggactgtatcgatccccc

SEQ ID NO: 559491 - DNA, 33 bp, Homo sapien
cagttagcctttgatgcattataattgtcacaa

SEQ ID NO: 559492 - DNA, 33 bp, Homo sapien
cagttagcctttgatgtattataattgtcacaa

SEQ ID NO: 559493 - DNA, 33 bp, Homo sapien
tcaaaatctggaaagacgcccagcagccctgga

SEQ ID NO: 559494 - DNA, 33 bp, Homo sapien
tcaaaatctggaaagatgcccagcagccctgga

SEQ ID NO: 559495 - DNA, 33 bp, Homo sapien
aacgaagctgttaaaaacattgctgtagtatca

SEQ ID NO: 559496 - DNA, 33 bp, Homo sapien
aacgaagctgttaaaagcattgctgtagtatca

SEQ ID NO: 559497 - DNA, 33 bp, Homo sapien
ttttttacttcgtcctcaggaaactgtggcttc

SEQ ID NO: 559498 - DNA, 33 bp, Homo sapien
ttttttacttcgtccttaggaaactgtggcttc

SEQ ID NO: 559499 - DNA, 33 bp, Homo sapien
gttttactcttgcagcaaaataatatctaaatg

SEQ ID NO: 559500 - DNA, 33 bp, Homo sapien
gttttactcttgcagcgaaataatatctaaatg

SEQ ID NO: 559501 - DNA, 33 bp, Homo sapien
actccacatatcctgaatacctttaacttggcc

SEQ ID NO: 559502 - DNA, 33 bp, Homo sapien
actccacatatcctgagtacctttaacttggcc

SEQ ID NO: 559503 - DNA, 33 bp, Homo sapien
acatgagtgatggaaaagcactgcctgatttga

SEQ ID NO: 559504 - DNA, 33 bp, Homo sapien
acatgagtgatggaaaggcactgcctgatttga

SEQ ID NO: 559505 - DNA, 33 bp, Homo sapien
agtgatgtccgttagaaattttctgcactgtcc

SEQ ID NO: 559506 - DNA, 33 bp, Homo sapien
agtgatgtccgttagagattttctgcactgtcc

SEQ ID NO: 559507 - DNA, 33 bp, Homo sapien
gtctatggtttgcccaatagagtttttctgcta

SEQ ID NO: 559508 - DNA, 33 bp, Homo sapien
gtctatggtttgcccagtagagtttttctgcta

SEQ ID NO: 559509 - DNA, 33 bp, Homo sapien
actctgtctcgaagtacgctgctgaagattaaa

SEQ ID NO: 559510 - DNA, 33 bp, Homo sapien
actctgtctcgaagtatgctgctgaagattaaa

SEQ ID NO: 559511 - DNA, 33 bp, Homo sapien
taaatgaaatcaattaggtaaaaagcattgtaa

SEQ ID NO: 559512 - DNA, 33 bp, Homo sapien
taaatgaaatcaattatgtaaaaagcattgtaa

SEQ ID NO: 559513 - DNA, 33 bp, Homo sapien
tcacttgaggtcagaaattccagaacagcctga

SEQ ID NO: 559514 - DNA, 33 bp, Homo sapien
tcacttgaggtcagaagttccagaacagcctga

SEQ ID NO: 559515 - DNA, 33 bp, Homo sapien
aaataagtaacagagcagaaagagaccagaaag

SEQ ID NO: 559516 - DNA, 33 bp, Homo sapien
aaataagtaacagagcggaaagagaccagaaag

SEQ ID NO: 559517 - DNA, 33 bp, Homo sapien
caatcaagagaagcaacgtatcaggagagtcat

SEQ ID NO: 559518 - DNA, 33 bp, Homo sapien
caatcaagagaagcaatgtatcaggagagtcat

SEQ ID NO: 559519 - DNA, 33 bp, Homo sapien
aaaatctgacattcctcaaaatttgctcggagg

SEQ ID NO: 559520 - DNA, 33 bp, Homo sapien
aaaatctgacattccttaaaatttgctcggagg

SEQ ID NO: 559521 - DNA, 33 bp, Homo sapien
atttctgtttggccaaaaaatgttcatatgtcc

SEQ ID NO: 559522 - DNA, 33 bp, Homo sapien
atttctgtttggccaagaaatgttcatatgtcc

SEQ ID NO: 559523 - DNA, 33 bp, Homo sapien
agtaccagaaactagacggcttaaacaactgat

SEQ ID NO: 559524 - DNA, 33 bp, Homo sapien
agtaccagaaactagatggcttaaacaactgat

SEQ ID NO: 559525 - DNA, 33 bp, Homo sapien
aagtgctcagtaaccacgtgcggcttgttcccc

SEQ ID NO: 559526 - DNA, 33 bp, Homo sapien
aagtgctcagtaaccatgtgcggcttgttcccc

SEQ ID NO: 559527 - DNA, 33 bp, Homo sapien
ttatccaggtagattccagtaggggagagaaaa

SEQ ID NO: 559528 - DNA, 33 bp, Homo sapien
ttatccaggtagattctagtaggggagagaaaa

SEQ ID NO: 559529 - DNA, 33 bp, Homo sapien
ccatttatcacctgaacgctaaggatcacacgt

SEQ ID NO: 559530 - DNA, 33 bp, Homo sapien
ccatttatcacctgaaggctaaggatcacacgt

SEQ ID NO: 559531 - DNA, 33 bp, Homo sapien
atgcctagctttgtcacgggtcatccttgagtc

SEQ ID NO: 559532 - DNA, 33 bp, Homo sapien
atgcctagctttgtcatgggtcatccttgagtc

SEQ ID NO: 559533 - DNA, 33 bp, Homo sapien
aggagcagaggattcaagtaaaatgtagcagtg

SEQ ID NO: 559534 - DNA, 33 bp, Homo sapien
aggagcagaggattcaggtaaaatgtagcagtg

SEQ ID NO: 559535 - DNA, 33 bp, Homo sapien
tctcgttttccagggcaagttagaggtgttaag

SEQ ID NO: 559536 - DNA, 33 bp, Homo sapien
tctcgttttccagggcgagttagaggtgttaag

SEQ ID NO: 559537 - DNA, 33 bp, Homo sapien
aaatgaagaatttaacagcccatgggaggacca

SEQ ID NO: 559538 - DNA, 33 bp, Homo sapien
aaatgaagaatttaacggcccatgggaggacca

SEQ ID NO: 559539 - DNA, 33 bp, Homo sapien
tgcttaagagtctaggacaatttggtgatacta

SEQ ID NO: 559540 - DNA, 33 bp, Homo sapien
tgcttaagagtctagggcaatttggtgatacta

SEQ ID NO: 559541 - DNA, 33 bp, Homo sapien
tgtcccatcagtgtacaggatcacccacacaac

SEQ ID NO: 559542 - DNA, 33 bp, Homo sapien
tgtcccatcagtgtacgggatcacccacacaac

SEQ ID NO: 559543 - DNA, 33 bp, Homo sapien
aatgggtttatttagagaagcatagctcagctc

SEQ ID NO: 559544 - DNA, 33 bp, Homo sapien
aatgggtttatttagataagcatagctcagctc

SEQ ID NO: 559545 - DNA, 33 bp, Homo sapien
ttgaaattaggtaccacgtagctcttttaaata

SEQ ID NO: 559546 - DNA, 33 bp, Homo sapien
ttgaaattaggtaccatgtagctcttttaaata

SEQ ID NO: 559547 - DNA, 33 bp, Homo sapien
aaggtggcatatcagaaagattcttggttcata

SEQ ID NO: 559548 - DNA, 33 bp, Homo sapien
aaggtggcatatcagacagattcttggttcata

SEQ ID NO: 559549 - DNA, 33 bp, Homo sapien
ggtcctggcacatactaaatttgtaggggagtt

SEQ ID NO: 559550 - DNA, 33 bp, Homo sapien
ggtcctggcacatactgaatttgtaggggagtt

SEQ ID NO: 559551 - DNA, 33 bp, Homo sapien
gtatttcaataagtgaacttgtgaatggcaaca

SEQ ID NO: 559552 - DNA, 33 bp, Homo sapien
gtatttcaataagtgaccttgtgaatggcaaca

SEQ ID NO: 559553 - DNA, 33 bp, Homo sapien
agcccctattcaaaataaagtggctctggtttg

SEQ ID NO: 559554 - DNA, 33 bp, Homo sapien
agcccctattcaaaatgaagtggctctggtttg

SEQ ID NO: 559555 - DNA, 33 bp, Homo sapien
gatccaggacttaacaaacccaggaaatgccct

SEQ ID NO: 559556 - DNA, 33 bp, Homo sapien
gatccaggacttaacagacccaggaaatgccct

SEQ ID NO: 559557 - DNA, 33 bp, Homo sapien
ttctggttcatcctacaagatctgactaacgta

SEQ ID NO: 559558 - DNA, 33 bp, Homo sapien
ttctggttcatcctacgagatctgactaacgta

SEQ ID NO: 559559 - DNA, 33 bp, Homo sapien
ggcagccagtttcctacggtgtcctcacatggt

SEQ ID NO: 559560 - DNA, 33 bp, Homo sapien
ggcagccagtttcctatggtgtcctcacatggt

SEQ ID NO: 559561 - DNA, 33 bp, Homo sapien
ctagccagagtcaggcaagaccaggccagatgt

SEQ ID NO: 559562 - DNA, 33 bp, Homo sapien
ctagccagagtcaggcgagaccaggccagatgt

SEQ ID NO: 559563 - DNA, 33 bp, Homo sapien
aatatggaagcagaaaggttaaacgatttggcc

SEQ ID NO: 559564 - DNA, 33 bp, Homo sapien
aatatggaagcagaaatgttaaacgatttggcc

SEQ ID NO: 559565 - DNA, 33 bp, Homo sapien
cctttccctagagatgaaattttgtgcattaag

SEQ ID NO: 559566 - DNA, 33 bp, Homo sapien
cctttccctagagatgtaattttgtgcattaag

SEQ ID NO: 559567 - DNA, 33 bp, Homo sapien
ctgatgcaggttcttacatggtctgaagttatt

SEQ ID NO: 559568 - DNA, 33 bp, Homo sapien
ctgatgcaggttcttatatggtctgaagttatt

SEQ ID NO: 559569 - DNA, 33 bp, Homo sapien
atataaatggacatgagaataagccaaccttta

SEQ ID NO: 559570 - DNA, 33 bp, Homo sapien
atataaatggacatgataataagccaaccttta

SEQ ID NO: 559571 - DNA, 33 bp, Homo sapien
ggtatgcttcctatacacagtcttccttacctt

SEQ ID NO: 559572 - DNA, 33 bp, Homo sapien
ggtatgcttcctatacgcagtcttccttacctt

SEQ ID NO: 559573 - DNA, 33 bp, Homo sapien
cagatctattctgataccctgatgaaagctaca

SEQ ID NO: 559574 - DNA, 33 bp, Homo sapien
cagatctattctgatatcctgatgaaagctaca

SEQ ID NO: 559575 - DNA, 33 bp, Homo sapien
cataccaccaacattcacataaactgcttggaa

SEQ ID NO: 559576 - DNA, 33 bp, Homo sapien
cataccaccaacattcgcataaactgcttggaa

SEQ ID NO: 559577 - DNA, 33 bp, Homo sapien
ggtccctgtttttccacgagatgtgattaagtg

SEQ ID NO: 559578 - DNA, 33 bp, Homo sapien
ggtccctgtttttccatgagatgtgattaagtg

SEQ ID NO: 559579 - DNA, 33 bp, Homo sapien
ggcttacatcttcttacgcattttgtgactatg

SEQ ID NO: 559580 - DNA, 33 bp, Homo sapien
ggcttacatcttcttatgcattttgtgactatg

SEQ ID NO: 559581 - DNA, 33 bp, Homo sapien
aagcatttgagaaaaaacactgagatttgggga

SEQ ID NO: 559582 - DNA, 33 bp, Homo sapien
aagcatttgagaaaaagcactgagatttgggga

SEQ ID NO: 559583 - DNA, 33 bp, Homo sapien
ctcactcttttgactacattctgatgccctaag

SEQ ID NO: 559584 - DNA, 33 bp, Homo sapien
ctcactcttttgactatattctgatgccctaag

SEQ ID NO: 559585 - DNA, 33 bp, Homo sapien
ttttgcccttgagtgaccgcaggtttttaacaa

SEQ ID NO: 559586 - DNA, 33 bp, Homo sapien
ttttgcccttgagtgatcgcaggtttttaacaa

SEQ ID NO: 559587 - DNA, 33 bp, Homo sapien
attgtttcttgattgaatataggactgaaatta

SEQ ID NO: 559588 - DNA, 33 bp, Homo sapien
attgtttcttgattgactataggactgaaatta

SEQ ID NO: 559589 - DNA, 33 bp, Homo sapien
tacttgttagcacctccaattattttttgaaag

SEQ ID NO: 559590 - DNA, 33 bp, Homo sapien
tacttgttagcacctctaattattttttgaaag

SEQ ID NO: 559591 - DNA, 33 bp, Homo sapien
tctcattaaatacacaatgcagtccgacagctc

SEQ ID NO: 559592 - DNA, 33 bp, Homo sapien
tctcattaaatacacactgcagtccgacagctc

SEQ ID NO: 559593 - DNA, 33 bp, Homo sapien
aggcacacctctaggcacttggtggctgcccag

SEQ ID NO: 559594 - DNA, 33 bp, Homo sapien
aggcacacctctaggcgcttggtggctgcccag

SEQ ID NO: 559595 - DNA, 33 bp, Homo sapien
ccgacacaagtacataacactggagaaagttaa

SEQ ID NO: 559596 - DNA, 33 bp, Homo sapien
ccgacacaagtacatagcactggagaaagttaa

SEQ ID NO: 559597 - DNA, 33 bp, Homo sapien
aggcagaattcaatagaaaaagggtaggcttca

SEQ ID NO: 559598 - DNA, 33 bp, Homo sapien
aggcagaattcaataggaaaagggtaggcttca

SEQ ID NO: 559599 - DNA, 33 bp, Homo sapien
gaaagacacacagattaaataattgtaaaagag

SEQ ID NO: 559600 - DNA, 33 bp, Homo sapien
gaaagacacacagattgaataattgtaaaagag

SEQ ID NO: 559601 - DNA, 33 bp, Homo sapien
tggggctggctacaagaaagaccaagtgattag

SEQ ID NO: 559602 - DNA, 33 bp, Homo sapien
tggggctggctacaaggaagaccaagtgattag

SEQ ID NO: 559603 - DNA, 33 bp, Homo sapien
agggcactgaacttctcaaagacactgaaaaaa

SEQ ID NO: 559604 - DNA, 33 bp, Homo sapien
agggcactgaacttctgaaagacactgaaaaaa

SEQ ID NO: 559605 - DNA, 33 bp, Homo sapien
gaatattgataatggaaaaaaagcattcagtcc

SEQ ID NO: 559606 - DNA, 33 bp, Homo sapien
gaatattgataatggataaaaagcattcagtcc

SEQ ID NO: 559607 - DNA, 33 bp, Homo sapien
atctaaagctcagagacgttaagcaatttgttc

SEQ ID NO: 559608 - DNA, 33 bp, Homo sapien
atctaaagctcagagatgttaagcaatttgttc

SEQ ID NO: 559609 - DNA, 33 bp, Homo sapien
taggttgtgcttttcacgtcaatttatttggca

SEQ ID NO: 559610 - DNA, 33 bp, Homo sapien
taggttgtgcttttcatgtcaatttatttggca

SEQ ID NO: 559611 - DNA, 33 bp, Homo sapien
gcctggaagtgacacagtgctgcttcagctcat

SEQ ID NO: 559612 - DNA, 33 bp, Homo sapien
gcctggaagtgacacattgctgcttcagctcat

SEQ ID NO: 559613 - DNA, 33 bp, Homo sapien
atattgccctgttttgaatctccgtattttgtc

SEQ ID NO: 559614 - DNA, 33 bp, Homo sapien
atattgccctgttttggatctccgtattttgtc

SEQ ID NO: 559615 - DNA, 33 bp, Homo sapien
taccccatcagtctccagaaaacaaacaaaaaa

SEQ ID NO: 559616 - DNA, 33 bp, Homo sapien
taccccatcagtctccggaaaacaaacaaaaaa

SEQ ID NO: 559617 - DNA, 33 bp, Homo sapien
atcactgttttttctcactctagtgggtcttat

SEQ ID NO: 559618 - DNA, 33 bp, Homo sapien
atcactgttttttctcgctctagtgggtcttat

SEQ ID NO: 559619 - DNA, 33 bp, Homo sapien
acattggtcattaatacgtggctcagaataaat

SEQ ID NO: 559620 - DNA, 33 bp, Homo sapien
acattggtcattaatatgtggctcagaataaat

SEQ ID NO: 559621 - DNA, 33 bp, Homo sapien
gtattcagatacattcaccttcaagtaactgag

SEQ ID NO: 559622 - DNA, 33 bp, Homo sapien
gtattcagatacattccccttcaagtaactgag

SEQ ID NO: 559623 - DNA, 33 bp, Homo sapien
tcttttaatgtaagtgaatgagaagcagtggtg

SEQ ID NO: 559624 - DNA, 33 bp, Homo sapien
tcttttaatgtaagtgcatgagaagcagtggtg

SEQ ID NO: 559625 - DNA, 33 bp, Homo sapien
ctgaaccctcaactaaagatttaacctcggtac

SEQ ID NO: 559626 - DNA, 33 bp, Homo sapien
ctgaaccctcaactaatgatttaacctcggtac

SEQ ID NO: 559627 - DNA, 33 bp, Homo sapien
tagtttgctgagtttcaattatcctggggcata

SEQ ID NO: 559628 - DNA, 33 bp, Homo sapien
tagtttgctgagtttcgattatcctggggcata

SEQ ID NO: 559629 - DNA, 33 bp, Homo sapien
gtactacatcttggacaatgctgagctagaagc

SEQ ID NO: 559630 - DNA, 33 bp, Homo sapien
gtactacatcttggacgatgctgagctagaagc

SEQ ID NO: 559631 - DNA, 33 bp, Homo sapien
tgagagggctgatctaataagttgagctcttct

SEQ ID NO: 559632 - DNA, 33 bp, Homo sapien
tgagagggctgatctagtaagttgagctcttct

SEQ ID NO: 559633 - DNA, 33 bp, Homo sapien
aaatctctccacatgaagccagaggagctggct

SEQ ID NO: 559634 - DNA, 33 bp, Homo sapien
aaatctctccacatgaggccagaggagctggct

SEQ ID NO: 559635 - DNA, 33 bp, Homo sapien
caagctccatgggagacgtggagtaaagtgagg

SEQ ID NO: 559636 - DNA, 33 bp, Homo sapien
caagctccatgggagatgtggagtaaagtgagg

SEQ ID NO: 559637 - DNA, 33 bp, Homo sapien
cccacatagaacaatacgttactggtcaaagtt

SEQ ID NO: 559638 - DNA, 33 bp, Homo sapien
cccacatagaacaatatgttactggtcaaagtt

SEQ ID NO: 559639 - DNA, 33 bp, Homo sapien
gccaaaagattgatacagcctgaaaggagagtg

SEQ ID NO: 559640 - DNA, 33 bp, Homo sapien
gccaaaagattgataccgcctgaaaggagagtg

SEQ ID NO: 559641 - DNA, 33 bp, Homo sapien
acaggccttttgaatcaactactcatatcaatg

SEQ ID NO: 559642 - DNA, 33 bp, Homo sapien
acaggccttttgaatccactactcatatcaatg

SEQ ID NO: 559643 - DNA, 33 bp, Homo sapien
gctaatgctgaagttacgcatcttctgacatga

SEQ ID NO: 559644 - DNA, 33 bp, Homo sapien
gctaatgctgaagttatgcatcttctgacatga

SEQ ID NO: 559645 - DNA, 33 bp, Homo sapien
gctgcaacagctcccaatcttccccagtgagac

SEQ ID NO: 559646 - DNA, 33 bp, Homo sapien
gctgcaacagctcccagtcttccccagtgagac

SEQ ID NO: 559647 - DNA, 33 bp, Homo sapien
ctcccattcaattatcaaattggcaggacccca

SEQ ID NO: 559648 - DNA, 33 bp, Homo sapien
ctcccattcaattatcgaattggcaggacccca

SEQ ID NO: 559649 - DNA, 33 bp, Homo sapien
caattcagatttgaaactgtggtggcagttcta

SEQ ID NO: 559650 - DNA, 33 bp, Homo sapien
caattcagatttgaaattgtggtggcagttcta

SEQ ID NO: 559651 - DNA, 33 bp, Homo sapien
tattattatctggcaccgctattcaaaactggc

SEQ ID NO: 559652 - DNA, 33 bp, Homo sapien
tattattatctggcactgctattcaaaactggc

SEQ ID NO: 559653 - DNA, 33 bp, Homo sapien
gctctcaagtgtgctcaataaaatgacatcctc

SEQ ID NO: 559654 - DNA, 33 bp, Homo sapien
gctctcaagtgtgctcgataaaatgacatcctc

SEQ ID NO: 559655 - DNA, 33 bp, Homo sapien
cacgctttgcatcataccacctggaaggaaatt

SEQ ID NO: 559656 - DNA, 33 bp, Homo sapien
cacgctttgcatcatagcacctggaaggaaatt

SEQ ID NO: 559657 - DNA, 33 bp, Homo sapien
ttgtttcacagttgggacatctagcaacagttg

SEQ ID NO: 559658 - DNA, 33 bp, Homo sapien
ttgtttcacagttggggcatctagcaacagttg

SEQ ID NO: 559659 - DNA, 33 bp, Homo sapien
gcttgataattgttgacagtggatactaattag

SEQ ID NO: 559660 - DNA, 33 bp, Homo sapien
gcttgataattgttgatagtggatactaattag

SEQ ID NO: 559661 - DNA, 33 bp, Homo sapien
acacctctaccattgcccattcatactcatact

SEQ ID NO: 559662 - DNA, 33 bp, Homo sapien
acacctctaccattgcgcattcatactcatact

SEQ ID NO: 559663 - DNA, 33 bp, Homo sapien
tcctgtgccaaaaaaaaatctcatttctcaatc

SEQ ID NO: 559664 - DNA, 33 bp, Homo sapien
tcctgtgccaaaaaaatatctcatttctcaatc

SEQ ID NO: 559665 - DNA, 33 bp, Homo sapien
gagtagtaatgccatcactactaccaaaaccat

SEQ ID NO: 559666 - DNA, 33 bp, Homo sapien
gagtagtaatgccatcgctactaccaaaaccat

SEQ ID NO: 559667 - DNA, 33 bp, Homo sapien
cacactagtaagaacaaagactatttaacaaat

SEQ ID NO: 559668 - DNA, 33 bp, Homo sapien
cacactagtaagaacagagactatttaacaaat

SEQ ID NO: 559669 - DNA, 33 bp, Homo sapien
agcaaatttggacggacgtcatttgagagagag

SEQ ID NO: 559670 - DNA, 33 bp, Homo sapien
agcaaatttggacggatgtcatttgagagagag

SEQ ID NO: 559671 - DNA, 33 bp, Homo sapien
tttatagctaatctggccaaataagttaattga

SEQ ID NO: 559672 - DNA, 33 bp, Homo sapien
tttatagctaatctgggcaaataagttaattga

SEQ ID NO: 559673 - DNA, 33 bp, Homo sapien
ggcatacatttaaaaaaaaatccaagagcaata

SEQ ID NO: 559674 - DNA, 33 bp, Homo sapien
ggcatacatttaaaaacaaatccaagagcaata

SEQ ID NO: 559675 - DNA, 33 bp, Homo sapien
ctccataggtgatgaaaggccatcagggtagga

SEQ ID NO: 559676 - DNA, 33 bp, Homo sapien
ctccataggtgatgaagggccatcagggtagga

SEQ ID NO: 559677 - DNA, 33 bp, Homo sapien
caattacatggaactacctacaatgtatattaa

SEQ ID NO: 559678 - DNA, 33 bp, Homo sapien
caattacatggaactatctacaatgtatattaa

SEQ ID NO: 559679 - DNA, 33 bp, Homo sapien
tctttcttagaaaggacattctgtctcatgccc

SEQ ID NO: 559680 - DNA, 33 bp, Homo sapien
tctttcttagaaaggatattctgtctcatgccc

SEQ ID NO: 559681 - DNA, 33 bp, Homo sapien
ataataaataacaatcccatctgtgagacacat

SEQ ID NO: 559682 - DNA, 33 bp, Homo sapien
ataataaataacaatcgcatctgtgagacacat

SEQ ID NO: 559683 - DNA, 33 bp, Homo sapien
tcttagtctatatgagacccaaaataaggctaa

SEQ ID NO: 559684 - DNA, 33 bp, Homo sapien
tcttagtctatatgagccccaaaataaggctaa

SEQ ID NO: 559685 - DNA, 33 bp, Homo sapien
atgaatacattaaaaaggctagtgcaggttact

SEQ ID NO: 559686 - DNA, 33 bp, Homo sapien
atgaatacattaaaaatgctagtgcaggttact

SEQ ID NO: 559687 - DNA, 33 bp, Homo sapien
aatagtgatgccttcaaggactcacagagcaat

SEQ ID NO: 559688 - DNA, 33 bp, Homo sapien
aatagtgatgccttcagggactcacagagcaat

SEQ ID NO: 559689 - DNA, 33 bp, Homo sapien
caagaagaaaatgggtcacacagtgccaaatat

SEQ ID NO: 559690 - DNA, 33 bp, Homo sapien
caagaagaaaatgggttacacagtgccaaatat

SEQ ID NO: 559691 - DNA, 33 bp, Homo sapien
atgggccaccaaaagaacgcactgggatgtttg

SEQ ID NO: 559692 - DNA, 33 bp, Homo sapien
atgggccaccaaaagagcgcactgggatgtttg

SEQ ID NO: 559693 - DNA, 33 bp, Homo sapien
aaaggttgattcgtaacatttcagaaaaggaaa

SEQ ID NO: 559694 - DNA, 33 bp, Homo sapien
aaaggttgattcgtaagatttcagaaaaggaaa

SEQ ID NO: 559695 - DNA, 33 bp, Homo sapien
aatagttagcaactgaacatttgggtacctacc

SEQ ID NO: 559696 - DNA, 33 bp, Homo sapien
aatagttagcaactgagcatttgggtacctacc

SEQ ID NO: 559697 - DNA, 33 bp, Homo sapien
tcttccttgattgccacgtaaaggatttgaaaa

SEQ ID NO: 559698 - DNA, 33 bp, Homo sapien
tcttccttgattgccatgtaaaggatttgaaaa

SEQ ID NO: 559699 - DNA, 33 bp, Homo sapien
agattggaagttaggtcaactgtggcccttaga

SEQ ID NO: 559700 - DNA, 33 bp, Homo sapien
agattggaagttaggtgaactgtggcccttaga

SEQ ID NO: 559701 - DNA, 33 bp, Homo sapien
taaaaacagattttgcacttccaaaaaataaaa

SEQ ID NO: 559702 - DNA, 33 bp, Homo sapien
taaaaacagattttgctcttccaaaaaataaaa

SEQ ID NO: 559703 - DNA, 33 bp, Homo sapien
aatgcacttgaaagaacattaaagtcagcaaca

SEQ ID NO: 559704 - DNA, 33 bp, Homo sapien
aatgcacttgaaagaatattaaagtcagcaaca

SEQ ID NO: 559705 - DNA, 33 bp, Homo sapien
cctacttccactgctacagtgagtctgttcagc

SEQ ID NO: 559706 - DNA, 33 bp, Homo sapien
cctacttccactgctatagtgagtctgttcagc

SEQ ID NO: 559707 - DNA, 33 bp, Homo sapien
ggagggacaggagatacgtataaaataccaaat

SEQ ID NO: 559708 - DNA, 33 bp, Homo sapien
ggagggacaggagatatgtataaaataccaaat

SEQ ID NO: 559709 - DNA, 33 bp, Homo sapien
taaacaataatttgacactgcctctatttcatt

SEQ ID NO: 559710 - DNA, 33 bp, Homo sapien
taaacaataatttgacgctgcctctatttcatt

SEQ ID NO: 559711 - DNA, 33 bp, Homo sapien
agagaacctggaaatacccatgcattgctagtg

SEQ ID NO: 559712 - DNA, 33 bp, Homo sapien
agagaacctggaaatatccatgcattgctagtg

SEQ ID NO: 559713 - DNA, 33 bp, Homo sapien
aacaaagaatttctacaaatcaatgctaacata

SEQ ID NO: 559714 - DNA, 33 bp, Homo sapien
aacaaagaatttctaccaatcaatgctaacata

SEQ ID NO: 559715 - DNA, 33 bp, Homo sapien
ctcacagtaatgctacacttatttagacatagt

SEQ ID NO: 559716 - DNA, 33 bp, Homo sapien
ctcacagtaatgctacgcttatttagacatagt

SEQ ID NO: 559717 - DNA, 33 bp, Homo sapien
gatgaaattgtacttacgcttaccttcccgcaa

SEQ ID NO: 559718 - DNA, 33 bp, Homo sapien
gatgaaattgtacttatgcttaccttcccgcaa

SEQ ID NO: 559719 - DNA, 33 bp, Homo sapien
tgctcctaagatttgcacatcctactgcattca

SEQ ID NO: 559720 - DNA, 33 bp, Homo sapien
tgctcctaagatttgcgcatcctactgcattca

SEQ ID NO: 559721 - DNA, 33 bp, Homo sapien
ctgaggagctgatcaccgtagttctacttagtt

SEQ ID NO: 559722 - DNA, 33 bp, Homo sapien
ctgaggagctgatcactgtagttctacttagtt

SEQ ID NO: 559723 - DNA, 33 bp, Homo sapien
caccagattattgtgacgggaaaatgagcctta

SEQ ID NO: 559724 - DNA, 33 bp, Homo sapien
caccagattattgtgatgggaaaatgagcctta

SEQ ID NO: 559725 - DNA, 33 bp, Homo sapien
tcagtagtctattgccaaagtaacgctgcatag

SEQ ID NO: 559726 - DNA, 33 bp, Homo sapien
tcagtagtctattgccgaagtaacgctgcatag

SEQ ID NO: 559727 - DNA, 33 bp, Homo sapien
cttacattctcaggtaactcagtaatggattgt

SEQ ID NO: 559728 - DNA, 33 bp, Homo sapien
cttacattctcaggtagctcagtaatggattgt

SEQ ID NO: 559729 - DNA, 33 bp, Homo sapien
tagtctttgttatagcacttgggttgggctaaa

SEQ ID NO: 559730 - DNA, 33 bp, Homo sapien
tagtctttgttatagcgcttgggttgggctaaa

SEQ ID NO: 559731 - DNA, 33 bp, Homo sapien
gagtgcagccaatgaaaccaatgcaatttcatt

SEQ ID NO: 559732 - DNA, 33 bp, Homo sapien
gagtgcagccaatgaacccaatgcaatttcatt

SEQ ID NO: 559733 - DNA, 33 bp, Homo sapien
tgaacacagcctaagaatatggaaacagaaagg

SEQ ID NO: 559734 - DNA, 33 bp, Homo sapien
tgaacacagcctaagagtatggaaacagaaagg

SEQ ID NO: 559735 - DNA, 33 bp, Homo sapien
accccacgaaccattcaaaagacttgtgatttt

SEQ ID NO: 559736 - DNA, 33 bp, Homo sapien
accccacgaaccattcgaaagacttgtgatttt

SEQ ID NO: 559737 - DNA, 33 bp, Homo sapien
tttatttaatggttcaaggaggacttaatggat

SEQ ID NO: 559738 - DNA, 33 bp, Homo sapien
tttatttaatggttcagggaggacttaatggat

SEQ ID NO: 559739 - DNA, 33 bp, Homo sapien
taccttatgtgtgcgacaggtttttgtgcatat

SEQ ID NO: 559740 - DNA, 33 bp, Homo sapien
taccttatgtgtgcgataggtttttgtgcatat

SEQ ID NO: 559741 - DNA, 33 bp, Homo sapien
agaaaggactaatacaatgacacaataaattat

SEQ ID NO: 559742 - DNA, 33 bp, Homo sapien
agaaaggactaatacagtgacacaataaattat

SEQ ID NO: 559743 - DNA, 33 bp, Homo sapien
tcattgttttgacacacagtgtttgattatatt

SEQ ID NO: 559744 - DNA, 33 bp, Homo sapien
tcattgttttgacacagagtgtttgattatatt

SEQ ID NO: 559745 - DNA, 33 bp, Homo sapien
accctttaaacactaacgcaaactaaatgtact

SEQ ID NO: 559746 - DNA, 33 bp, Homo sapien
accctttaaacactaatgcaaactaaatgtact

SEQ ID NO: 559747 - DNA, 33 bp, Homo sapien
ggtgcttacttgttccgcattaacagtggaagc

SEQ ID NO: 559748 - DNA, 33 bp, Homo sapien
ggtgcttacttgttcctcattaacagtggaagc

SEQ ID NO: 559749 - DNA, 33 bp, Homo sapien
tctggtggtgtgcatacggacaggaagtggtgt

SEQ ID NO: 559750 - DNA, 33 bp, Homo sapien
tctggtggtgtgcatagggacaggaagtggtgt

SEQ ID NO: 559751 - DNA, 33 bp, Homo sapien
taaaagtttagtaatgaaccactgagattttat

SEQ ID NO: 559752 - DNA, 33 bp, Homo sapien
taaaagtttagtaatggaccactgagattttat

SEQ ID NO: 559753 - DNA, 33 bp, Homo sapien
aagattatttgattgccgaggtaccaaaaggtt

SEQ ID NO: 559754 - DNA, 33 bp, Homo sapien
aagattatttgattgcggaggtaccaaaaggtt

SEQ ID NO: 559755 - DNA, 33 bp, Homo sapien
attatatcactctgtacgcttttttatatttgt

SEQ ID NO: 559756 - DNA, 33 bp, Homo sapien
attatatcactctgtatgcttttttatatttgt

SEQ ID NO: 559757 - DNA, 33 bp, Homo sapien
agtacacaaggcacaaaataattgaaaagtaca

SEQ ID NO: 559758 - DNA, 33 bp, Homo sapien
agtacacaaggcacaagataattgaaaagtaca

SEQ ID NO: 559759 - DNA, 33 bp, Homo sapien
tgacaagcagtaccatgagcagtacacaaggca

SEQ ID NO: 559760 - DNA, 33 bp, Homo sapien
tgacaagcagtaccattagcagtacacaaggca

SEQ ID NO: 559761 - DNA, 33 bp, Homo sapien
gtggatatttgcccaaactcatatacatttctc

SEQ ID NO: 559762 - DNA, 33 bp, Homo sapien
gtggatatttgcccaagctcatatacatttctc

SEQ ID NO: 559763 - DNA, 33 bp, Homo sapien
tgctgaggttcgaacactgctggttagagaact

SEQ ID NO: 559764 - DNA, 33 bp, Homo sapien
tgctgaggttcgaacagtgctggttagagaact

SEQ ID NO: 559765 - DNA, 33 bp, Homo sapien
gctcacaaatgagttcaaatttagtatttcata

SEQ ID NO: 559766 - DNA, 33 bp, Homo sapien
gctcacaaatgagttcgaatttagtatttcata

SEQ ID NO: 559767 - DNA, 33 bp, Homo sapien
tcaagctaatattgtcgcaattccataaactaa

SEQ ID NO: 559768 - DNA, 33 bp, Homo sapien
tcaagctaatattgtctcaattccataaactaa

SEQ ID NO: 559769 - DNA, 33 bp, Homo sapien
gtagtttctgatttcacaggtctatcttagggt

SEQ ID NO: 559770 - DNA, 33 bp, Homo sapien
gtagtttctgatttcataggtctatcttagggt

SEQ ID NO: 559771 - DNA, 33 bp, Homo sapien
cctgaagtcttttccactcttttaaattcagag

SEQ ID NO: 559772 - DNA, 33 bp, Homo sapien
cctgaagtcttttccagtcttttaaattcagag

SEQ ID NO: 559773 - DNA, 33 bp, Homo sapien
cataagaacatcaataacaaagattgggctgtg

SEQ ID NO: 559774 - DNA, 33 bp, Homo sapien
cataagaacatcaatagcaaagattgggctgtg

SEQ ID NO: 559775 - DNA, 33 bp, Homo sapien
ccaccggcaagaaaaaagtaatcaatttgtgag

SEQ ID NO: 559776 - DNA, 33 bp, Homo sapien
ccaccggcaagaaaaaggtaatcaatttgtgag

SEQ ID NO: 559777 - DNA, 33 bp, Homo sapien
aattcactttattttacgcacttgaagctgctt

SEQ ID NO: 559778 - DNA, 33 bp, Homo sapien
aattcactttattttatgcacttgaagctgctt

SEQ ID NO: 559779 - DNA, 33 bp, Homo sapien
cttgagaaaatcactcaatctttttgaacttta

SEQ ID NO: 559780 - DNA, 33 bp, Homo sapien
cttgagaaaatcactcgatctttttgaacttta

SEQ ID NO: 559781 - DNA, 33 bp, Homo sapien
tatttactaatgccaaataccctccttgaggcc

SEQ ID NO: 559782 - DNA, 33 bp, Homo sapien
tatttactaatgccaagtaccctccttgaggcc

SEQ ID NO: 559783 - DNA, 33 bp, Homo sapien
ataaattccagagatactaaagtcagattttct

SEQ ID NO: 559784 - DNA, 33 bp, Homo sapien
ataaattccagagatattaaagtcagattttct

SEQ ID NO: 559785 - DNA, 33 bp, Homo sapien
gaatgactccatggaagaagtgaaaaagaggaa

SEQ ID NO: 559786 - DNA, 33 bp, Homo sapien
gaatgactccatggaataagtgaaaaagaggaa

SEQ ID NO: 559787 - DNA, 33 bp, Homo sapien
tatgaatataatgtccaatgaagtattcccagg

SEQ ID NO: 559788 - DNA, 33 bp, Homo sapien
tatgaatataatgtccgatgaagtattcccagg

SEQ ID NO: 559789 - DNA, 33 bp, Homo sapien
cagtaattaggtttcaactgactcagatcccat

SEQ ID NO: 559790 - DNA, 33 bp, Homo sapien
cagtaattaggtttcagctgactcagatcccat

SEQ ID NO: 559791 - DNA, 33 bp, Homo sapien
gaactgagttggcataaagtgactgtctttcca

SEQ ID NO: 559792 - DNA, 33 bp, Homo sapien
gaactgagttggcatacagtgactgtctttcca

SEQ ID NO: 559793 - DNA, 33 bp, Homo sapien
tgtgtgtcctcagagacagaatgaagatggcag

SEQ ID NO: 559794 - DNA, 33 bp, Homo sapien
tgtgtgtcctcagagagagaatgaagatggcag

SEQ ID NO: 559795 - DNA, 33 bp, Homo sapien
gaccttcattttcccaaagtaatgtactatgtg

SEQ ID NO: 559796 - DNA, 33 bp, Homo sapien
gaccttcattttcccagagtaatgtactatgtg

SEQ ID NO: 559797 - DNA, 33 bp, Homo sapien
ccagaaaacacaggctcagagaccaattaaagg

SEQ ID NO: 559798 - DNA, 33 bp, Homo sapien
ccagaaaacacaggctgagagaccaattaaagg

SEQ ID NO: 559799 - DNA, 33 bp, Homo sapien
ggaagaggaggcatgacggatcttgaaaacagt

SEQ ID NO: 559800 - DNA, 33 bp, Homo sapien
ggaagaggaggcatgatggatcttgaaaacagt

SEQ ID NO: 559801 - DNA, 33 bp, Homo sapien
aacccacaaggataaactggaaactatgtcagt

SEQ ID NO: 559802 - DNA, 33 bp, Homo sapien
aacccacaaggataaagtggaaactatgtcagt

SEQ ID NO: 559803 - DNA, 33 bp, Homo sapien
gacaaacattatgccaagcatctattatttcct

SEQ ID NO: 559804 - DNA, 33 bp, Homo sapien
gacaaacattatgccacgcatctattatttcct

SEQ ID NO: 559805 - DNA, 33 bp, Homo sapien
gtggaatgattagggcaagaaaacacatgaagg

SEQ ID NO: 559806 - DNA, 33 bp, Homo sapien
gtggaatgattagggcgagaaaacacatgaagg

SEQ ID NO: 559807 - DNA, 33 bp, Homo sapien
atttcaacattaccaactgagtttcttctagtt

SEQ ID NO: 559808 - DNA, 33 bp, Homo sapien
atttcaacattaccaattgagtttcttctagtt

SEQ ID NO: 559809 - DNA, 33 bp, Homo sapien
tacaatatgccattacagaatttcaaattaaaa

SEQ ID NO: 559810 - DNA, 33 bp, Homo sapien
tacaatatgccattacggaatttcaaattaaaa

SEQ ID NO: 559811 - DNA, 33 bp, Homo sapien
accccaaactatgaccaggatttaggaacttgg

SEQ ID NO: 559812 - DNA, 33 bp, Homo sapien
accccaaactatgacccggatttaggaacttgg

SEQ ID NO: 559813 - DNA, 33 bp, Homo sapien
aaaaatgtatacaacaaggagaatgctctatca

SEQ ID NO: 559814 - DNA, 33 bp, Homo sapien
aaaaatgtatacaacagggagaatgctctatca

SEQ ID NO: 559815 - DNA, 33 bp, Homo sapien
tggagatataattcacacaccatacagttaaac

SEQ ID NO: 559816 - DNA, 33 bp, Homo sapien
tggagatataattcacgcaccatacagttaaac

SEQ ID NO: 559817 - DNA, 33 bp, Homo sapien
ttattcttgaaagttgcataagcaaagaatgtt

SEQ ID NO: 559818 - DNA, 33 bp, Homo sapien
ttattcttgaaagttggataagcaaagaatgtt

SEQ ID NO: 559819 - DNA, 33 bp, Homo sapien
aatgggatggtaccaccgaggattttataaaat

SEQ ID NO: 559820 - DNA, 33 bp, Homo sapien
aatgggatggtaccactgaggattttataaaat

SEQ ID NO: 559821 - DNA, 33 bp, Homo sapien
taaagcttctcacttcaccaactgatagaaccc

SEQ ID NO: 559822 - DNA, 33 bp, Homo sapien
taaagcttctcacttcgccaactgatagaaccc

SEQ ID NO: 559823 - DNA, 33 bp, Homo sapien
aaatattaataaaggcccttgctgttagtaggc

SEQ ID NO: 559824 - DNA, 33 bp, Homo sapien
aaatattaataaaggctcttgctgttagtaggc

SEQ ID NO: 559825 - DNA, 33 bp, Homo sapien
aaataattgttacttgaatctttggagttcatc

SEQ ID NO: 559826 - DNA, 33 bp, Homo sapien
aaataattgttacttgtatctttggagttcatc

SEQ ID NO: 559827 - DNA, 33 bp, Homo sapien
acaaggctgtggttgcgcttagttcacgggcat

SEQ ID NO: 559828 - DNA, 33 bp, Homo sapien
acaaggctgtggttgctcttagttcacgggcat

SEQ ID NO: 559829 - DNA, 33 bp, Homo sapien
aaaacagtttatgatgcatcttattcaaatatt

SEQ ID NO: 559830 - DNA, 33 bp, Homo sapien
aaaacagtttatgatggatcttattcaaatatt

SEQ ID NO: 559831 - DNA, 33 bp, Homo sapien
gcctgacagtttcttaaggatggtgggctgatg

SEQ ID NO: 559832 - DNA, 33 bp, Homo sapien
gcctgacagtttcttatggatggtgggctgatg

SEQ ID NO: 559833 - DNA, 33 bp, Homo sapien
cacagaattgctaaaacaagcatagggaagtgt

SEQ ID NO: 559834 - DNA, 33 bp, Homo sapien
cacagaattgctaaaagaagcatagggaagtgt

SEQ ID NO: 559835 - DNA, 33 bp, Homo sapien
atcaccacctgcaataacaaccttgggggagct

SEQ ID NO: 559836 - DNA, 33 bp, Homo sapien
atcaccacctgcaataccaaccttgggggagct

SEQ ID NO: 559837 - DNA, 33 bp, Homo sapien
aaattcaatcatgtacccagtttcgttgtgtga

SEQ ID NO: 559838 - DNA, 33 bp, Homo sapien
aaattcaatcatgtactcagtttcgttgtgtga

SEQ ID NO: 559839 - DNA, 33 bp, Homo sapien
gccgagaagaatgtcaatgaaatgcaatgtaca

SEQ ID NO: 559840 - DNA, 33 bp, Homo sapien
gccgagaagaatgtcagtgaaatgcaatgtaca

SEQ ID NO: 559841 - DNA, 33 bp, Homo sapien
aggtgttatcaacctaccacctgcaatgaagag

SEQ ID NO: 559842 - DNA, 33 bp, Homo sapien
aggtgttatcaacctagcacctgcaatgaagag

SEQ ID NO: 559843 - DNA, 33 bp, Homo sapien
tttagttaactgtaaccggcagcatttattgct

SEQ ID NO: 559844 - DNA, 33 bp, Homo sapien
tttagttaactgtaacgggcagcatttattgct

SEQ ID NO: 559845 - DNA, 33 bp, Homo sapien
tccaggctttctcctcccaattcaaccagagcc

SEQ ID NO: 559846 - DNA, 33 bp, Homo sapien
tccaggctttctcctctcaattcaaccagagcc

SEQ ID NO: 559847 - DNA, 33 bp, Homo sapien
agcggcagttcattaccaacatcacaagcaaaa

SEQ ID NO: 559848 - DNA, 33 bp, Homo sapien
agcggcagttcattacgaacatcacaagcaaaa

SEQ ID NO: 559849 - DNA, 33 bp, Homo sapien
agatgatatttcagtcagactctagcaaagaaa

SEQ ID NO: 559850 - DNA, 33 bp, Homo sapien
agatgatatttcagtccgactctagcaaagaaa

SEQ ID NO: 559851 - DNA, 33 bp, Homo sapien
aaggctaaatcttctacgatgttgtagagaggc

SEQ ID NO: 559852 - DNA, 33 bp, Homo sapien
aaggctaaatcttctatgatgttgtagagaggc

SEQ ID NO: 559853 - DNA, 33 bp, Homo sapien
tcataatgaatattaaaggggtggcttttcctg

SEQ ID NO: 559854 - DNA, 33 bp, Homo sapien
tcataatgaatattaagggggtggcttttcctg

SEQ ID NO: 559855 - DNA, 33 bp, Homo sapien
actgtggctttgtttacggttttctccacatca

SEQ ID NO: 559856 - DNA, 33 bp, Homo sapien
actgtggctttgtttatggttttctccacatca

SEQ ID NO: 559857 - DNA, 33 bp, Homo sapien
ttacactcctgtgaaccgcatattagtctgtcc

SEQ ID NO: 559858 - DNA, 33 bp, Homo sapien
ttacactcctgtgaactgcatattagtctgtcc

SEQ ID NO: 559859 - DNA, 33 bp, Homo sapien
tcattactgtggaaaactctgtagtcattgaaa

SEQ ID NO: 559860 - DNA, 33 bp, Homo sapien
tcattactgtggaaaattctgtagtcattgaaa

SEQ ID NO: 559861 - DNA, 33 bp, Homo sapien
ttaacaaagatgccccacattttccccacattc

SEQ ID NO: 559862 - DNA, 33 bp, Homo sapien
ttaacaaagatgcccctcattttccccacattc

SEQ ID NO: 559863 - DNA, 33 bp, Homo sapien
gaattaggacaggctacaatactctgaatgtac

SEQ ID NO: 559864 - DNA, 33 bp, Homo sapien
gaattaggacaggctataatactctgaatgtac

SEQ ID NO: 559865 - DNA, 33 bp, Homo sapien
aacagaatagattaaaagtaattgcagtgtgtt

SEQ ID NO: 559866 - DNA, 33 bp, Homo sapien
aacagaatagattaaaggtaattgcagtgtgtt

SEQ ID NO: 559867 - DNA, 33 bp, Homo sapien
tagctctttatgggtaagaattgtcccttgttc

SEQ ID NO: 559868 - DNA, 33 bp, Homo sapien
tagctctttatgggtaggaattgtcccttgttc

SEQ ID NO: 559869 - DNA, 33 bp, Homo sapien
atcaaaaccaaaacaccctactcaactgacact

SEQ ID NO: 559870 - DNA, 33 bp, Homo sapien
atcaaaaccaaaacactctactcaactgacact

SEQ ID NO: 559871 - DNA, 33 bp, Homo sapien
caatggcttatgtgacctatgagacagcataga

SEQ ID NO: 559872 - DNA, 33 bp, Homo sapien
caatggcttatgtgacttatgagacagcataga

SEQ ID NO: 559873 - DNA, 33 bp, Homo sapien
gaagtgcaaagattcccgaatagattcaacctg

SEQ ID NO: 559874 - DNA, 33 bp, Homo sapien
gaagtgcaaagattcctgaatagattcaacctg

SEQ ID NO: 559875 - DNA, 33 bp, Homo sapien
cagggttatagtctgaagctaattatttatttt

SEQ ID NO: 559876 - DNA, 33 bp, Homo sapien
cagggttatagtctgaggctaattatttatttt

SEQ ID NO: 559877 - DNA, 33 bp, Homo sapien
atgttaaagaaattgaggactttgcagaaataa

SEQ ID NO: 559878 - DNA, 33 bp, Homo sapien
atgttaaagaaattgatgactttgcagaaataa

SEQ ID NO: 559879 - DNA, 33 bp, Homo sapien
ttgaatccatctgaagaagtctggctcccgtgt

SEQ ID NO: 559880 - DNA, 33 bp, Homo sapien
ttgaatccatctgaagcagtctggctcccgtgt

SEQ ID NO: 559881 - DNA, 33 bp, Homo sapien
ccatgtattatttccacagagccacatagccac

SEQ ID NO: 559882 - DNA, 33 bp, Homo sapien
ccatgtattatttccatagagccacatagccac

SEQ ID NO: 559883 - DNA, 33 bp, Homo sapien
ctcccagctcgactgggcaagtaactctaactc

SEQ ID NO: 559884 - DNA, 33 bp, Homo sapien
ctcccagctcgactggtcaagtaactctaactc

SEQ ID NO: 559885 - DNA, 33 bp, Homo sapien
tactgtcatgagaagacgccaagattttacaga

SEQ ID NO: 559886 - DNA, 33 bp, Homo sapien
tactgtcatgagaagatgccaagattttacaga

SEQ ID NO: 559887 - DNA, 33 bp, Homo sapien
tgtataaattttttcaccatcattcttgacaga

SEQ ID NO: 559888 - DNA, 33 bp, Homo sapien
tgtataaattttttcatcatcattcttgacaga

SEQ ID NO: 559889 - DNA, 33 bp, Homo sapien
attaaaatgtttctgacggtagcaacaataaaa

SEQ ID NO: 559890 - DNA, 33 bp, Homo sapien
attaaaatgtttctgatggtagcaacaataaaa

SEQ ID NO: 559891 - DNA, 33 bp, Homo sapien
accgatagcctagagaaaaatcctgctgaatcc

SEQ ID NO: 559892 - DNA, 33 bp, Homo sapien
accgatagcctagagacaaatcctgctgaatcc

SEQ ID NO: 559893 - DNA, 33 bp, Homo sapien
ataatataagcaagaaaagcagttgaaggctat

SEQ ID NO: 559894 - DNA, 33 bp, Homo sapien
ataatataagcaagaagagcagttgaaggctat

SEQ ID NO: 559895 - DNA, 33 bp, Homo sapien
ccatggtaactttgtacaacataactattgtga

SEQ ID NO: 559896 - DNA, 33 bp, Homo sapien
ccatggtaactttgtagaacataactattgtga

SEQ ID NO: 559897 - DNA, 33 bp, Homo sapien
ggcatttggaaggcaaagactgacatgataaga

SEQ ID NO: 559898 - DNA, 33 bp, Homo sapien
ggcatttggaaggcaaggactgacatgataaga

SEQ ID NO: 559899 - DNA, 33 bp, Homo sapien
aagagccttatctcacactataggaaattcaaa

SEQ ID NO: 559900 - DNA, 33 bp, Homo sapien
aagagccttatctcactctataggaaattcaaa

SEQ ID NO: 559901 - DNA, 33 bp, Homo sapien
tttaatgagagcttaccatatgctttcgctgtg

SEQ ID NO: 559902 - DNA, 33 bp, Homo sapien
tttaatgagagcttactatatgctttcgctgtg

SEQ ID NO: 559903 - DNA, 33 bp, Homo sapien
cttctgcaaaatgagtaaagcagagttgtgaag

SEQ ID NO: 559904 - DNA, 33 bp, Homo sapien
cttctgcaaaatgagtgaagcagagttgtgaag

SEQ ID NO: 559905 - DNA, 33 bp, Homo sapien
atcaaagtctgtctgaatatggagcttaagtta

SEQ ID NO: 559906 - DNA, 33 bp, Homo sapien
atcaaagtctgtctgattatggagcttaagtta

SEQ ID NO: 559907 - DNA, 33 bp, Homo sapien
tatttccatcactaaaagctccctcctgtgtgc

SEQ ID NO: 559908 - DNA, 33 bp, Homo sapien
tatttccatcactaaaggctccctcctgtgtgc

SEQ ID NO: 559909 - DNA, 33 bp, Homo sapien
ctgcttaggttcaccaatgaggaaaagggccac

SEQ ID NO: 559910 - DNA, 33 bp, Homo sapien
ctgcttaggttcaccagtgaggaaaagggccac

SEQ ID NO: 559911 - DNA, 33 bp, Homo sapien
cttctctggaaagaaaatgttcaaatgtcaggt

SEQ ID NO: 559912 - DNA, 33 bp, Homo sapien
cttctctggaaagaaagtgttcaaatgtcaggt

SEQ ID NO: 559913 - DNA, 33 bp, Homo sapien
aagatggatacacttaaagatccataagtctcc

SEQ ID NO: 559914 - DNA, 33 bp, Homo sapien
aagatggatacacttagagatccataagtctcc

SEQ ID NO: 559915 - DNA, 33 bp, Homo sapien
atatctgacccgggcaatcctgttcatacttag

SEQ ID NO: 559916 - DNA, 33 bp, Homo sapien
atatctgacccgggcattcctgttcatacttag

SEQ ID NO: 559917 - DNA, 33 bp, Homo sapien
ggggaaatgattcttacaatttgttcccagagt

SEQ ID NO: 559918 - DNA, 33 bp, Homo sapien
ggggaaatgattcttataatttgttcccagagt

SEQ ID NO: 559919 - DNA, 33 bp, Homo sapien
tgataagaaactaagacactatgttactataag

SEQ ID NO: 559920 - DNA, 33 bp, Homo sapien
tgataagaaactaagatactatgttactataag

SEQ ID NO: 559921 - DNA, 33 bp, Homo sapien
agatttgagtcaatctcaccaaagccttaagga

SEQ ID NO: 559922 - DNA, 33 bp, Homo sapien
agatttgagtcaatcttaccaaagccttaagga

SEQ ID NO: 559923 - DNA, 33 bp, Homo sapien
agcaaaatagctaagaaatcaggctttggaacc

SEQ ID NO: 559924 - DNA, 33 bp, Homo sapien
agcaaaatagctaagatatcaggctttggaacc

SEQ ID NO: 559925 - DNA, 33 bp, Homo sapien
tttacatctatctctacgtacacatttgaagac

SEQ ID NO: 559926 - DNA, 33 bp, Homo sapien
tttacatctatctctatgtacacatttgaagac

SEQ ID NO: 559927 - DNA, 33 bp, Homo sapien
gatcgatgggcaaacaatcccaaactatgaaca

SEQ ID NO: 559928 - DNA, 33 bp, Homo sapien
gatcgatgggcaaacattcccaaactatgaaca

SEQ ID NO: 559929 - DNA, 33 bp, Homo sapien
tgtcttctgagaaaaaattcaactactactaat

SEQ ID NO: 559930 - DNA, 33 bp, Homo sapien
tgtcttctgagaaaaagttcaactactactaat

SEQ ID NO: 559931 - DNA, 33 bp, Homo sapien
tcctatctcaagacaaagagctgcttccaagaa

SEQ ID NO: 559932 - DNA, 33 bp, Homo sapien
tcctatctcaagacaaggagctgcttccaagaa

SEQ ID NO: 559933 - DNA, 33 bp, Homo sapien
gaaggcaaagtgggagaagatattttacatggc

SEQ ID NO: 559934 - DNA, 33 bp, Homo sapien
gaaggcaaagtgggagcagatattttacatggc

SEQ ID NO: 559935 - DNA, 33 bp, Homo sapien
acaatttcttggaagcccagatgtaggagaggt

SEQ ID NO: 559936 - DNA, 33 bp, Homo sapien
acaatttcttggaagctcagatgtaggagaggt

SEQ ID NO: 559937 - DNA, 33 bp, Homo sapien
ccattttaaactcataccagcaatgtgtgggga

SEQ ID NO: 559938 - DNA, 33 bp, Homo sapien
ccattttaaactcatatcagcaatgtgtgggga

SEQ ID NO: 559939 - DNA, 33 bp, Homo sapien
tgtttgtggcagcctcacatactgatcctagag

SEQ ID NO: 559940 - DNA, 33 bp, Homo sapien
tgtttgtggcagcctcgcatactgatcctagag

SEQ ID NO: 559941 - DNA, 33 bp, Homo sapien
acctaagtgttcgtcaataaaccaatggataaa

SEQ ID NO: 559942 - DNA, 33 bp, Homo sapien
acctaagtgttcgtcagtaaaccaatggataaa

SEQ ID NO: 559943 - DNA, 33 bp, Homo sapien
gaaaataaaagccttacactgaaattcaacaac

SEQ ID NO: 559944 - DNA, 33 bp, Homo sapien
gaaaataaaagccttatactgaaattcaacaac

SEQ ID NO: 559945 - DNA, 33 bp, Homo sapien
gatgttttgtacaccagcctgggggccagggta

SEQ ID NO: 559946 - DNA, 33 bp, Homo sapien
gatgttttgtacaccatcctgggggccagggta

SEQ ID NO: 559947 - DNA, 33 bp, Homo sapien
agaagcctgaaaaacacggctgatgtcttggca

SEQ ID NO: 559948 - DNA, 33 bp, Homo sapien
agaagcctgaaaaacatggctgatgtcttggca

SEQ ID NO: 559949 - DNA, 33 bp, Homo sapien
ccacaaaaaaagacccagagaataatatactgt

SEQ ID NO: 559950 - DNA, 33 bp, Homo sapien
ccacaaaaaaagacccggagaataatatactgt

SEQ ID NO: 559951 - DNA, 33 bp, Homo sapien
gttatgagccaacaaccatggataaaaaagtat

SEQ ID NO: 559952 - DNA, 33 bp, Homo sapien
gttatgagccaacaactatggataaaaaagtat

SEQ ID NO: 559953 - DNA, 33 bp, Homo sapien
aggataggcacagttgcatgaaaagagccctgg

SEQ ID NO: 559954 - DNA, 33 bp, Homo sapien
aggataggcacagttgtatgaaaagagccctgg

SEQ ID NO: 559955 - DNA, 33 bp, Homo sapien
agagctggggttagaaatggtttctcctgaccc

SEQ ID NO: 559956 - DNA, 33 bp, Homo sapien
agagctggggttagaactggtttctcctgaccc

SEQ ID NO: 559957 - DNA, 33 bp, Homo sapien
gggtccttgtaacgggccaatctcattagaagg

SEQ ID NO: 559958 - DNA, 33 bp, Homo sapien
gggtccttgtaacgggtcaatctcattagaagg

SEQ ID NO: 559959 - DNA, 33 bp, Homo sapien
tccttcaagcaattgacgtccatgtccaatacc

SEQ ID NO: 559960 - DNA, 33 bp, Homo sapien
tccttcaagcaattgatgtccatgtccaatacc

SEQ ID NO: 559961 - DNA, 33 bp, Homo sapien
aaatactggatcaaataaaaatgtgagaaacag

SEQ ID NO: 559962 - DNA, 33 bp, Homo sapien
aaatactggatcaaatgaaaatgtgagaaacag

SEQ ID NO: 559963 - DNA, 33 bp, Homo sapien
atccaatcgcatttagaagtccagataaatttc

SEQ ID NO: 559964 - DNA, 33 bp, Homo sapien
atccaatcgcatttaggagtccagataaatttc

SEQ ID NO: 559965 - DNA, 33 bp, Homo sapien
ctgttgacccttcttacgggagactttctatca

SEQ ID NO: 559966 - DNA, 33 bp, Homo sapien
ctgttgacccttcttatgggagactttctatca

SEQ ID NO: 559967 - DNA, 33 bp, Homo sapien
atggattttccaatcacaacagtgtgcaaaacc

SEQ ID NO: 559968 - DNA, 33 bp, Homo sapien
atggattttccaatcataacagtgtgcaaaacc

SEQ ID NO: 559969 - DNA, 33 bp, Homo sapien
catggtgtaaggaaaacggcactcacttagacc

SEQ ID NO: 559970 - DNA, 33 bp, Homo sapien
catggtgtaaggaaaatggcactcacttagacc

SEQ ID NO: 559971 - DNA, 33 bp, Homo sapien
gaagagttctgttgaaatcagtggtaggtttag

SEQ ID NO: 559972 - DNA, 33 bp, Homo sapien
gaagagttctgttgaagtcagtggtaggtttag

SEQ ID NO: 559973 - DNA, 33 bp, Homo sapien
tgcacacattccaatacggtaagtaaaatagaa

SEQ ID NO: 559974 - DNA, 33 bp, Homo sapien
tgcacacattccaatatggtaagtaaaatagaa

SEQ ID NO: 559975 - DNA, 33 bp, Homo sapien
ggtcccagtcctgaaacacatctggtttactca

SEQ ID NO: 559976 - DNA, 33 bp, Homo sapien
ggtcccagtcctgaaatacatctggtttactca

SEQ ID NO: 559977 - DNA, 33 bp, Homo sapien
caacaaacctgcttccaaaactgtaaaggagat

SEQ ID NO: 559978 - DNA, 33 bp, Homo sapien
caacaaacctgcttccgaaactgtaaaggagat

SEQ ID NO: 559979 - DNA, 33 bp, Homo sapien
atgggtgtgaagtgacagagcccgggacaggtt

SEQ ID NO: 559980 - DNA, 33 bp, Homo sapien
atgggtgtgaagtgacggagcccgggacaggtt

SEQ ID NO: 559981 - DNA, 33 bp, Homo sapien
tttaggtgtggattaaagagaaaatgtcttctg

SEQ ID NO: 559982 - DNA, 33 bp, Homo sapien
tttaggtgtggattaaggagaaaatgtcttctg

SEQ ID NO: 559983 - DNA, 33 bp, Homo sapien
agcaggtctcttggacaaaaatatatgcaaaga

SEQ ID NO: 559984 - DNA, 33 bp, Homo sapien
agcaggtctcttggacgaaaatatatgcaaaga

SEQ ID NO: 559985 - DNA, 33 bp, Homo sapien
ccatgagaaatgcatcactgtttgaaaggcgag

SEQ ID NO: 559986 - DNA, 33 bp, Homo sapien
ccatgagaaatgcatctctgtttgaaaggcgag

SEQ ID NO: 559987 - DNA, 33 bp, Homo sapien
gaggcttccctaagaacggtcgaaaacatcagg

SEQ ID NO: 559988 - DNA, 33 bp, Homo sapien
gaggcttccctaagaatggtcgaaaacatcagg

SEQ ID NO: 559989 - DNA, 33 bp, Homo sapien
agtgtaatagggcaaacgagggcttattgtccc

SEQ ID NO: 559990 - DNA, 33 bp, Homo sapien
agtgtaatagggcaaatgagggcttattgtccc

SEQ ID NO: 559991 - DNA, 33 bp, Homo sapien
tttcaatatctttagtcacagtgaaagcataag

SEQ ID NO: 559992 - DNA, 33 bp, Homo sapien
tttcaatatctttagttacagtgaaagcataag

SEQ ID NO: 559993 - DNA, 33 bp, Homo sapien
gactctgagaatgcagaattttattagaagctg

SEQ ID NO: 559994 - DNA, 33 bp, Homo sapien
gactctgagaatgcagtattttattagaagctg

SEQ ID NO: 559995 - DNA, 33 bp, Homo sapien
agatgcataaaacataaggatggatagatagat

SEQ ID NO: 559996 - DNA, 33 bp, Homo sapien
agatgcataaaacatatggatggatagatagat

SEQ ID NO: 559997 - DNA, 33 bp, Homo sapien
agggagtacagtgttacaggcaaagggcacagg

SEQ ID NO: 559998 - DNA, 33 bp, Homo sapien
agggagtacagtgttagaggcaaagggcacagg

SEQ ID NO: 559999 - DNA, 33 bp, Homo sapien
ccattgaatcattttcacaggtcaccatgtgga

SEQ ID NO: 560000 - DNA, 33 bp, Homo sapien
ccattgaatcattttcgcaggtcaccatgtgga

SEQ ID NO: 560001 - DNA, 33 bp, Homo sapien
tatacttaacaaaagcaaactgatgtctgtgac

SEQ ID NO: 560002 - DNA, 33 bp, Homo sapien
tatacttaacaaaagcgaactgatgtctgtgac

SEQ ID NO: 560003 - DNA, 33 bp, Homo sapien
aggctaatcttgactaccaatactcctgaatca

SEQ ID NO: 560004 - DNA, 33 bp, Homo sapien
aggctaatcttgactagcaatactcctgaatca

SEQ ID NO: 560005 - DNA, 33 bp, Homo sapien
atgtaacaggggtccaataaatatttaatgaat

SEQ ID NO: 560006 - DNA, 33 bp, Homo sapien
atgtaacaggggtccagtaaatatttaatgaat

SEQ ID NO: 560007 - DNA, 33 bp, Homo sapien
gtaaggtagccaccaactacatgagaatattga

SEQ ID NO: 560008 - DNA, 33 bp, Homo sapien
gtaaggtagccaccaattacatgagaatattga

SEQ ID NO: 560009 - DNA, 33 bp, Homo sapien
tcttgaccaattataaaatgccatgtgagaaca

SEQ ID NO: 560010 - DNA, 33 bp, Homo sapien
tcttgaccaattataatatgccatgtgagaaca

SEQ ID NO: 560011 - DNA, 33 bp, Homo sapien
ccctgcatttcttctgcagttctgataggggaa

SEQ ID NO: 560012 - DNA, 33 bp, Homo sapien
ccctgcatttcttctgtagttctgataggggaa

SEQ ID NO: 560013 - DNA, 33 bp, Homo sapien
tcatgaatgagggaagaattgatcaaaggtttg

SEQ ID NO: 560014 - DNA, 33 bp, Homo sapien
tcatgaatgagggaagtattgatcaaaggtttg

SEQ ID NO: 560015 - DNA, 33 bp, Homo sapien
tctaccaatatgtaggacaacttatagtaaaat

SEQ ID NO: 560016 - DNA, 33 bp, Homo sapien
tctaccaatatgtaggccaacttatagtaaaat

SEQ ID NO: 560017 - DNA, 33 bp, Homo sapien
aactgaattttaccaaacattaggtgatgattt

SEQ ID NO: 560018 - DNA, 33 bp, Homo sapien
aactgaattttaccaaccattaggtgatgattt

SEQ ID NO: 560019 - DNA, 33 bp, Homo sapien
caatcaaaaagagaaaacagcaaaattactaaa

SEQ ID NO: 560020 - DNA, 33 bp, Homo sapien
caatcaaaaagagaaaccagcaaaattactaaa

SEQ ID NO: 560021 - DNA, 33 bp, Homo sapien
tcttaagaccatggaaaaagtaaaacaaactaa

SEQ ID NO: 560022 - DNA, 33 bp, Homo sapien
tcttaagaccatggaagaagtaaaacaaactaa

SEQ ID NO: 560023 - DNA, 33 bp, Homo sapien
gttcagccagagagaaccagggaaattgatagc

SEQ ID NO: 560024 - DNA, 33 bp, Homo sapien
gttcagccagagagaatcagggaaattgatagc

SEQ ID NO: 560025 - DNA, 33 bp, Homo sapien
agagtctctaccctaccagtgggtgttcattag

SEQ ID NO: 560026 - DNA, 33 bp, Homo sapien
agagtctctaccctacgagtgggtgttcattag

SEQ ID NO: 560027 - DNA, 33 bp, Homo sapien
tggttctgtttccctacgcaaaacctaactgct

SEQ ID NO: 560028 - DNA, 33 bp, Homo sapien
tggttctgtttccctatgcaaaacctaactgct

SEQ ID NO: 560029 - DNA, 33 bp, Homo sapien
tatgatttgtaccttagcgcattcaccttcaac

SEQ ID NO: 560030 - DNA, 33 bp, Homo sapien
tatgatttgtaccttatcgcattcaccttcaac

SEQ ID NO: 560031 - DNA, 33 bp, Homo sapien
caacgcagctgtggaaagaaaagaacaaaaagt

SEQ ID NO: 560032 - DNA, 33 bp, Homo sapien
caacgcagctgtggaacgaaaagaacaaaaagt

SEQ ID NO: 560033 - DNA, 33 bp, Homo sapien
acctcatgctttctagaatctgcacctgcatca

SEQ ID NO: 560034 - DNA, 33 bp, Homo sapien
acctcatgctttctaggatctgcacctgcatca

SEQ ID NO: 560035 - DNA, 33 bp, Homo sapien
taaattgggatctagacgctgatgaataaatag

SEQ ID NO: 560036 - DNA, 33 bp, Homo sapien
taaattgggatctagatgctgatgaataaatag

SEQ ID NO: 560037 - DNA, 33 bp, Homo sapien
cgtggttccttgaatgcacaatgctttctctaa

SEQ ID NO: 560038 - DNA, 33 bp, Homo sapien
cgtggttccttgaatgtacaatgctttctctaa

SEQ ID NO: 560039 - DNA, 33 bp, Homo sapien
gagtcccaattcaagacgaaaagcaaagtgaca

SEQ ID NO: 560040 - DNA, 33 bp, Homo sapien
gagtcccaattcaagatgaaaagcaaagtgaca

SEQ ID NO: 560041 - DNA, 33 bp, Homo sapien
gtgatgttgctatccacgtatctgcccaaacta

SEQ ID NO: 560042 - DNA, 33 bp, Homo sapien
gtgatgttgctatccatgtatctgcccaaacta

SEQ ID NO: 560043 - DNA, 33 bp, Homo sapien
acacccaataagttgacagacatggagttggag

SEQ ID NO: 560044 - DNA, 33 bp, Homo sapien
acacccaataagttgagagacatggagttggag

SEQ ID NO: 560045 - DNA, 33 bp, Homo sapien
caggcgatactagcgacgtaacagtgaaacagc

SEQ ID NO: 560046 - DNA, 33 bp, Homo sapien
caggcgatactagcgatgtaacagtgaaacagc

SEQ ID NO: 560047 - DNA, 33 bp, Homo sapien
agcttgctagaactctcagacccagcccagcat

SEQ ID NO: 560048 - DNA, 33 bp, Homo sapien
agcttgctagaactcttagacccagcccagcat

SEQ ID NO: 560049 - DNA, 33 bp, Homo sapien
gctgttgatctgtaacagttaattgccaaagtc

SEQ ID NO: 560050 - DNA, 33 bp, Homo sapien
gctgttgatctgtaaccgttaattgccaaagtc

SEQ ID NO: 560051 - DNA, 33 bp, Homo sapien
caaaataccaaaggccaagaaatattttgctaa

SEQ ID NO: 560052 - DNA, 33 bp, Homo sapien
caaaataccaaaggccgagaaatattttgctaa

SEQ ID NO: 560053 - DNA, 33 bp, Homo sapien
ttttgctaaataagataactggtaaaatcagat

SEQ ID NO: 560054 - DNA, 33 bp, Homo sapien
ttttgctaaataagatcactggtaaaatcagat

SEQ ID NO: 560055 - DNA, 33 bp, Homo sapien
aagtgtttctgtgtaactatcagatacataaaa

SEQ ID NO: 560056 - DNA, 33 bp, Homo sapien
aagtgtttctgtgtaagtatcagatacataaaa

SEQ ID NO: 560057 - DNA, 33 bp, Homo sapien
ctagttttccatatcacgggccagggtttttgt

SEQ ID NO: 560058 - DNA, 33 bp, Homo sapien
ctagttttccatatcatgggccagggtttttgt

SEQ ID NO: 560059 - DNA, 33 bp, Homo sapien
ttcaaaaaagttgaaaacacatgatcatctcaa

SEQ ID NO: 560060 - DNA, 33 bp, Homo sapien
ttcaaaaaagttgaaatcacatgatcatctcaa

SEQ ID NO: 560061 - DNA, 33 bp, Homo sapien
agatgtcagtgcaatacaagcccgaaagcaagt

SEQ ID NO: 560062 - DNA, 33 bp, Homo sapien
agatgtcagtgcaatataagcccgaaagcaagt

SEQ ID NO: 560063 - DNA, 33 bp, Homo sapien
gataccctctccatcaaatcaaacagaggccct

SEQ ID NO: 560064 - DNA, 33 bp, Homo sapien
gataccctctccatcacatcaaacagaggccct

SEQ ID NO: 560065 - DNA, 33 bp, Homo sapien
tgatggagagggtatcagacgactataactgga

SEQ ID NO: 560066 - DNA, 33 bp, Homo sapien
tgatggagagggtatcggacgactataactgga

SEQ ID NO: 560067 - DNA, 33 bp, Homo sapien
tcctgcaccttctgacacaggtcttaggttaat

SEQ ID NO: 560068 - DNA, 33 bp, Homo sapien
tcctgcaccttctgacccaggtcttaggttaat

SEQ ID NO: 560069 - DNA, 33 bp, Homo sapien
gcctttttagctcccacgttataggtaaaaaga

SEQ ID NO: 560070 - DNA, 33 bp, Homo sapien
gcctttttagctcccatgttataggtaaaaaga

SEQ ID NO: 560071 - DNA, 33 bp, Homo sapien
gtctgtttcctaagaaagacaatgataatgaac

SEQ ID NO: 560072 - DNA, 33 bp, Homo sapien
gtctgtttcctaagaaggacaatgataatgaac

SEQ ID NO: 560073 - DNA, 33 bp, Homo sapien
tgcaggctggctgccccctttggaccgtgtctg

SEQ ID NO: 560074 - DNA, 33 bp, Homo sapien
tgcaggctggctgccctctttggaccgtgtctg

SEQ ID NO: 560075 - DNA, 33 bp, Homo sapien
gtaggtaaattacacccagataaattgcaaata

SEQ ID NO: 560076 - DNA, 33 bp, Homo sapien
gtaggtaaattacacctagataaattgcaaata

SEQ ID NO: 560077 - DNA, 33 bp, Homo sapien
acactttcaaaataaacgagtgaatgaataaat

SEQ ID NO: 560078 - DNA, 33 bp, Homo sapien
acactttcaaaataaatgagtgaatgaataaat

SEQ ID NO: 560079 - DNA, 33 bp, Homo sapien
atcaaatgagtaaaataaaactactgagacaat

SEQ ID NO: 560080 - DNA, 33 bp, Homo sapien
atcaaatgagtaaaatgaaactactgagacaat

SEQ ID NO: 560081 - DNA, 33 bp, Homo sapien
gtcataagcaacaaaccagaaaagaagcattgc

SEQ ID NO: 560082 - DNA, 33 bp, Homo sapien
gtcataagcaacaaactagaaaagaagcattgc

SEQ ID NO: 560083 - DNA, 33 bp, Homo sapien
atattcttaacacttaaagactctcacaaacca

SEQ ID NO: 560084 - DNA, 33 bp, Homo sapien
atattcttaacacttagagactctcacaaacca

SEQ ID NO: 560085 - DNA, 33 bp, Homo sapien
aaaggtacaatatagaacctctcatcttatcat

SEQ ID NO: 560086 - DNA, 33 bp, Homo sapien
aaaggtacaatatagagcctctcatcttatcat

SEQ ID NO: 560087 - DNA, 33 bp, Homo sapien
ccctgtggtccagcaacctagtgtctctgtcct

SEQ ID NO: 560088 - DNA, 33 bp, Homo sapien
ccctgtggtccagcaatctagtgtctctgtcct

SEQ ID NO: 560089 - DNA, 33 bp, Homo sapien
atgaacatggcttgaacgctagatactggagtt

SEQ ID NO: 560090 - DNA, 33 bp, Homo sapien
atgaacatggcttgaatgctagatactggagtt

SEQ ID NO: 560091 - DNA, 33 bp, Homo sapien
ttctgaagccatagtacgatgacaaaaagaatg

SEQ ID NO: 560092 - DNA, 33 bp, Homo sapien
ttctgaagccatagtatgatgacaaaaagaatg

SEQ ID NO: 560093 - DNA, 33 bp, Homo sapien
aagtgcaccagtcataagtatacagctcaatgg

SEQ ID NO: 560094 - DNA, 33 bp, Homo sapien
aagtgcaccagtcataggtatacagctcaatgg

SEQ ID NO: 560095 - DNA, 33 bp, Homo sapien
cttatagataactcctaaatgttccgccagaaa

SEQ ID NO: 560096 - DNA, 33 bp, Homo sapien
cttatagataactcctcaatgttccgccagaaa

SEQ ID NO: 560097 - DNA, 33 bp, Homo sapien
aggggcacttccatgaaagattatttggaacag

SEQ ID NO: 560098 - DNA, 33 bp, Homo sapien
aggggcacttccatgagagattatttggaacag

SEQ ID NO: 560099 - DNA, 33 bp, Homo sapien
catcagctaactgctacacatgattttgtccac

SEQ ID NO: 560100 - DNA, 33 bp, Homo sapien
catcagctaactgctatacatgattttgtccac

SEQ ID NO: 560101 - DNA, 33 bp, Homo sapien
acataattgtgtttcaggaggctacgttgtcac

SEQ ID NO: 560102 - DNA, 33 bp, Homo sapien
acataattgtgtttcatgaggctacgttgtcac

SEQ ID NO: 560103 - DNA, 33 bp, Homo sapien
tcaatgaagtcgaataaatggttttgttgggtg

SEQ ID NO: 560104 - DNA, 33 bp, Homo sapien
tcaatgaagtcgaatagatggttttgttgggtg

SEQ ID NO: 560105 - DNA, 33 bp, Homo sapien
atcagtgaggggcagacggaccctgtgtgtctc

SEQ ID NO: 560106 - DNA, 33 bp, Homo sapien
atcagtgaggggcagatggaccctgtgtgtctc

SEQ ID NO: 560107 - DNA, 33 bp, Homo sapien
attgccctgatcctcactcttttgccactcttt

SEQ ID NO: 560108 - DNA, 33 bp, Homo sapien
attgccctgatcctcattcttttgccactcttt

SEQ ID NO: 560109 - DNA, 33 bp, Homo sapien
cattcacaggtgcacaaaacccttgttcccaca

SEQ ID NO: 560110 - DNA, 33 bp, Homo sapien
cattcacaggtgcacagaacccttgttcccaca

SEQ ID NO: 560111 - DNA, 33 bp, Homo sapien
tacaccttaacaatacccttctgcctgttggag

SEQ ID NO: 560112 - DNA, 33 bp, Homo sapien
tacaccttaacaatactcttctgcctgttggag

SEQ ID NO: 560113 - DNA, 33 bp, Homo sapien
tttataaaacttaaagacaccagattttcagtc

SEQ ID NO: 560114 - DNA, 33 bp, Homo sapien
tttataaaacttaaaggcaccagattttcagtc

SEQ ID NO: 560115 - DNA, 33 bp, Homo sapien
gcttgctgaaacggtaaaatcccataaggccta

SEQ ID NO: 560116 - DNA, 33 bp, Homo sapien
gcttgctgaaacggtagaatcccataaggccta

SEQ ID NO: 560117 - DNA, 33 bp, Homo sapien
aaaacacagcgcggccaccgaaagtcttgtttt

SEQ ID NO: 560118 - DNA, 33 bp, Homo sapien
aaaacacagcgcggccgccgaaagtcttgtttt

SEQ ID NO: 560119 - DNA, 33 bp, Homo sapien
tcattatccactcatgcagcagaaaaaatgtgc

SEQ ID NO: 560120 - DNA, 33 bp, Homo sapien
tcattatccactcatgtagcagaaaaaatgtgc

SEQ ID NO: 560121 - DNA, 33 bp, Homo sapien
tcacctctgccatatactactgaacaaagaaaa

SEQ ID NO: 560122 - DNA, 33 bp, Homo sapien
tcacctctgccatatattactgaacaaagaaaa

SEQ ID NO: 560123 - DNA, 33 bp, Homo sapien
agtcctttggtctatacgtcatccgaatcagtt

SEQ ID NO: 560124 - DNA, 33 bp, Homo sapien
agtcctttggtctatatgtcatccgaatcagtt

SEQ ID NO: 560125 - DNA, 33 bp, Homo sapien
atcttttgaagcagtgaaagtcatacagtgaat

SEQ ID NO: 560126 - DNA, 33 bp, Homo sapien
atcttttgaagcagtggaagtcatacagtgaat

SEQ ID NO: 560127 - DNA, 33 bp, Homo sapien
attgtgctggtacaagaagttcctcttcaatct

SEQ ID NO: 560128 - DNA, 33 bp, Homo sapien
attgtgctggtacaagtagttcctcttcaatct

SEQ ID NO: 560129 - DNA, 33 bp, Homo sapien
catgttggctgaataaatgacccattcagcatc

SEQ ID NO: 560130 - DNA, 33 bp, Homo sapien
catgttggctgaataactgacccattcagcatc

SEQ ID NO: 560131 - DNA, 33 bp, Homo sapien
cagtcttgcccctgtggaatgcacgcaggagca

SEQ ID NO: 560132 - DNA, 33 bp, Homo sapien
cagtcttgcccctgtgtaatgcacgcaggagca

SEQ ID NO: 560133 - DNA, 33 bp, Homo sapien
tttctgcagactttgcaatctcgttttctaaca

SEQ ID NO: 560134 - DNA, 33 bp, Homo sapien
tttctgcagactttgccatctcgttttctaaca

SEQ ID NO: 560135 - DNA, 33 bp, Homo sapien
tgagtagcgttttataggtacaaattccacctc

SEQ ID NO: 560136 - DNA, 33 bp, Homo sapien
tgagtagcgttttatatgtacaaattccacctc

SEQ ID NO: 560137 - DNA, 33 bp, Homo sapien
tcacattgcagatttagaattggggattttgaa

SEQ ID NO: 560138 - DNA, 33 bp, Homo sapien
tcacattgcagatttataattggggattttgaa

SEQ ID NO: 560139 - DNA, 33 bp, Homo sapien
gaaaggaatatgaactaagaaaccatacttgga

SEQ ID NO: 560140 - DNA, 33 bp, Homo sapien
gaaaggaatatgaactgagaaaccatacttgga

SEQ ID NO: 560141 - DNA, 33 bp, Homo sapien
tacttgaagtattgaaaagtaccaataaaagag

SEQ ID NO: 560142 - DNA, 33 bp, Homo sapien
tacttgaagtattgaatagtaccaataaaagag

SEQ ID NO: 560143 - DNA, 33 bp, Homo sapien
agctctggaaaagaaagagactagaaggataaa

SEQ ID NO: 560144 - DNA, 33 bp, Homo sapien
agctctggaaaagaaatagactagaaggataaa

SEQ ID NO: 560145 - DNA, 33 bp, Homo sapien
cacacacacaccatcacgagtggcaccaagtga

SEQ ID NO: 560146 - DNA, 33 bp, Homo sapien
cacacacacaccatcatgagtggcaccaagtga

SEQ ID NO: 560147 - DNA, 33 bp, Homo sapien
ttcccacatatgcaccacatccaatcatttgtc

SEQ ID NO: 560148 - DNA, 33 bp, Homo sapien
ttcccacatatgcaccgcatccaatcatttgtc

SEQ ID NO: 560149 - DNA, 33 bp, Homo sapien
ggtttctttagcttgcggagatgggagagggag

SEQ ID NO: 560150 - DNA, 33 bp, Homo sapien
ggtttctttagcttgctgagatgggagagggag

SEQ ID NO: 560151 - DNA, 33 bp, Homo sapien
tttacggagtaagcaactatgaaaatctggttg

SEQ ID NO: 560152 - DNA, 33 bp, Homo sapien
tttacggagtaagcaagtatgaaaatctggttg

SEQ ID NO: 560153 - DNA, 33 bp, Homo sapien
tttcacaatcacaagcacaagtagtagacttaa

SEQ ID NO: 560154 - DNA, 33 bp, Homo sapien
tttcacaatcacaagctcaagtagtagacttaa

SEQ ID NO: 560155 - DNA, 33 bp, Homo sapien
catgtcttttgcacaacgtattcacctaaatta

SEQ ID NO: 560156 - DNA, 33 bp, Homo sapien
catgtcttttgcacaatgtattcacctaaatta

SEQ ID NO: 560157 - DNA, 33 bp, Homo sapien
tttacaaacttgcaaacagtcatctccttgtct

SEQ ID NO: 560158 - DNA, 33 bp, Homo sapien
tttacaaacttgcaaatagtcatctccttgtct

SEQ ID NO: 560159 - DNA, 33 bp, Homo sapien
ctttttaaaaaatgcaacataaagctaaggtat

SEQ ID NO: 560160 - DNA, 33 bp, Homo sapien
ctttttaaaaaatgcatcataaagctaaggtat

SEQ ID NO: 560161 - DNA, 33 bp, Homo sapien
tcaacatgagcaaaaaaccatatcatgcaatgc

SEQ ID NO: 560162 - DNA, 33 bp, Homo sapien
tcaacatgagcaaaaagccatatcatgcaatgc

SEQ ID NO: 560163 - DNA, 33 bp, Homo sapien
ctgccagagcaacccacaggatgacatgtgaga

SEQ ID NO: 560164 - DNA, 33 bp, Homo sapien
ctgccagagcaacccataggatgacatgtgaga

SEQ ID NO: 560165 - DNA, 33 bp, Homo sapien
caacccttatcagggaatacatttccaagtcat

SEQ ID NO: 560166 - DNA, 33 bp, Homo sapien
caacccttatcagggagtacatttccaagtcat

SEQ ID NO: 560167 - DNA, 33 bp, Homo sapien
ctttctaccaaaaatacgtgtctttgtgccaag

SEQ ID NO: 560168 - DNA, 33 bp, Homo sapien
ctttctaccaaaaataggtgtctttgtgccaag

SEQ ID NO: 560169 - DNA, 33 bp, Homo sapien
actggagatgtggtaacagacaaacactccctt

SEQ ID NO: 560170 - DNA, 33 bp, Homo sapien
actggagatgtggtaatagacaaacactccctt

SEQ ID NO: 560171 - DNA, 33 bp, Homo sapien
tggccaggttttgaccacattttctattgagaa

SEQ ID NO: 560172 - DNA, 33 bp, Homo sapien
tggccaggttttgaccgcattttctattgagaa

SEQ ID NO: 560173 - DNA, 33 bp, Homo sapien
gcaaactacctatgcaaaagtcaaaagtgagta

SEQ ID NO: 560174 - DNA, 33 bp, Homo sapien
gcaaactacctatgcacaagtcaaaagtgagta

SEQ ID NO: 560175 - DNA, 33 bp, Homo sapien
ccaaattagactctcactattccttgtacccgc

SEQ ID NO: 560176 - DNA, 33 bp, Homo sapien
ccaaattagactctcagtattccttgtacccgc

SEQ ID NO: 560177 - DNA, 33 bp, Homo sapien
ttcgtctccttcatccaaaacccagtgttagag

SEQ ID NO: 560178 - DNA, 33 bp, Homo sapien
ttcgtctccttcatccgaaacccagtgttagag

SEQ ID NO: 560179 - DNA, 33 bp, Homo sapien
tttctcctgtacaagcagcttaagaagttacag

SEQ ID NO: 560180 - DNA, 33 bp, Homo sapien
tttctcctgtacaagccgcttaagaagttacag

SEQ ID NO: 560181 - DNA, 33 bp, Homo sapien
ttaggacagcaccgtacagtgaaaggagcaagg

SEQ ID NO: 560182 - DNA, 33 bp, Homo sapien
ttaggacagcaccgtatagtgaaaggagcaagg

SEQ ID NO: 560183 - DNA, 33 bp, Homo sapien
ggtagactggttggcaaaaatgtccacaaattc

SEQ ID NO: 560184 - DNA, 33 bp, Homo sapien
ggtagactggttggcagaaatgtccacaaattc

SEQ ID NO: 560185 - DNA, 33 bp, Homo sapien
gattttatggtctaaaactcactttattcattc

SEQ ID NO: 560186 - DNA, 33 bp, Homo sapien
gattttatggtctaaatctcactttattcattc

SEQ ID NO: 560187 - DNA, 33 bp, Homo sapien
gtttggagactgaagacagggcctgttctttgc

SEQ ID NO: 560188 - DNA, 33 bp, Homo sapien
gtttggagactgaagatagggcctgttctttgc

SEQ ID NO: 560189 - DNA, 33 bp, Homo sapien
caaaagaggatgcatcactcatttccatagctt

SEQ ID NO: 560190 - DNA, 33 bp, Homo sapien
caaaagaggatgcatcgctcatttccatagctt

SEQ ID NO: 560191 - DNA, 33 bp, Homo sapien
ttcctaccaggaaaaactcaagagtcacatcaa

SEQ ID NO: 560192 - DNA, 33 bp, Homo sapien
ttcctaccaggaaaaattcaagagtcacatcaa

SEQ ID NO: 560193 - DNA, 33 bp, Homo sapien
aaaacataacatttatgaacacaaactctgtac

SEQ ID NO: 560194 - DNA, 33 bp, Homo sapien
aaaacataacatttattaacacaaactctgtac

SEQ ID NO: 560195 - DNA, 33 bp, Homo sapien
gccatgttccatctagccgtggaattcttgtgg

SEQ ID NO: 560196 - DNA, 33 bp, Homo sapien
gccatgttccatctagtcgtggaattcttgtgg

SEQ ID NO: 560197 - DNA, 33 bp, Homo sapien
tgtgtatcgccatgcaatctcagctttccttca

SEQ ID NO: 560198 - DNA, 33 bp, Homo sapien
tgtgtatcgccatgcagtctcagctttccttca

SEQ ID NO: 560199 - DNA, 33 bp, Homo sapien
caggaaaccagatctcccaacttggagttttga

SEQ ID NO: 560200 - DNA, 33 bp, Homo sapien
caggaaaccagatctctcaacttggagttttga

SEQ ID NO: 560201 - DNA, 33 bp, Homo sapien
cacacatcagatctaccgaaattctgttgggaa

SEQ ID NO: 560202 - DNA, 33 bp, Homo sapien
cacacatcagatctactgaaattctgttgggaa

SEQ ID NO: 560203 - DNA, 33 bp, Homo sapien
ttaaccaacagagcaaaatagtgccatggtaga

SEQ ID NO: 560204 - DNA, 33 bp, Homo sapien
ttaaccaacagagcaagatagtgccatggtaga

SEQ ID NO: 560205 - DNA, 33 bp, Homo sapien
cagaacgttgtttctacgagtagagctcagaca

SEQ ID NO: 560206 - DNA, 33 bp, Homo sapien
cagaacgttgtttctatgagtagagctcagaca

SEQ ID NO: 560207 - DNA, 33 bp, Homo sapien
taggaggtactttgaaataatacaggatggagc

SEQ ID NO: 560208 - DNA, 33 bp, Homo sapien
taggaggtactttgaactaatacaggatggagc

SEQ ID NO: 560209 - DNA, 33 bp, Homo sapien
ggcacaattcttggtacatgagatacactatta

SEQ ID NO: 560210 - DNA, 33 bp, Homo sapien
ggcacaattcttggtatatgagatacactatta

SEQ ID NO: 560211 - DNA, 33 bp, Homo sapien
tgcctgacatacaaaaagggttcaataggtatt

SEQ ID NO: 560212 - DNA, 33 bp, Homo sapien
tgcctgacatacaaaacgggttcaataggtatt

SEQ ID NO: 560213 - DNA, 33 bp, Homo sapien
caaatgtgcctgaataagtcctaggaactcact

SEQ ID NO: 560214 - DNA, 33 bp, Homo sapien
caaatgtgcctgaatatgtcctaggaactcact

SEQ ID NO: 560215 - DNA, 33 bp, Homo sapien
aaatgaaagatgggtccaatgtctttatgtttt

SEQ ID NO: 560216 - DNA, 33 bp, Homo sapien
aaatgaaagatgggtctaatgtctttatgtttt

SEQ ID NO: 560217 - DNA, 33 bp, Homo sapien
gagttctctgtcttaacgccggggattaaagaa

SEQ ID NO: 560218 - DNA, 33 bp, Homo sapien
gagttctctgtcttaatgccggggattaaagaa

SEQ ID NO: 560219 - DNA, 33 bp, Homo sapien
tatgtggcagattcaacttactagatataggca

SEQ ID NO: 560220 - DNA, 33 bp, Homo sapien
tatgtggcagattcaatttactagatataggca

SEQ ID NO: 560221 - DNA, 33 bp, Homo sapien
acattatatctggacaacaacatacataataaa

SEQ ID NO: 560222 - DNA, 33 bp, Homo sapien
acattatatctggacaccaacatacataataaa

SEQ ID NO: 560223 - DNA, 33 bp, Homo sapien
aagtagttaatgatctcaaaatgtcacacttga

SEQ ID NO: 560224 - DNA, 33 bp, Homo sapien
aagtagttaatgatctgaaaatgtcacacttga

SEQ ID NO: 560225 - DNA, 33 bp, Homo sapien
ttctgcttggtttagacgatgagaggagggaca

SEQ ID NO: 560226 - DNA, 33 bp, Homo sapien
ttctgcttggtttagatgatgagaggagggaca

SEQ ID NO: 560227 - DNA, 33 bp, Homo sapien
actctcttgtgaccacaaagtgaaccaccagcc

SEQ ID NO: 560228 - DNA, 33 bp, Homo sapien
actctcttgtgaccacgaagtgaaccaccagcc

SEQ ID NO: 560229 - DNA, 33 bp, Homo sapien
ctctgacgtgcaaaacacccatgtcctgccacc

SEQ ID NO: 560230 - DNA, 33 bp, Homo sapien
ctctgacgtgcaaaacgcccatgtcctgccacc

SEQ ID NO: 560231 - DNA, 33 bp, Homo sapien
gtatctacacctccagcaagtgggtgatttgcc

SEQ ID NO: 560232 - DNA, 33 bp, Homo sapien
gtatctacacctccaggaagtgggtgatttgcc

SEQ ID NO: 560233 - DNA, 33 bp, Homo sapien
agatgctctagataacacttaacttttctgggt

SEQ ID NO: 560234 - DNA, 33 bp, Homo sapien
agatgctctagataacgcttaacttttctgggt

SEQ ID NO: 560235 - DNA, 33 bp, Homo sapien
ggtgtctattgaccaaattgataccaagttggg

SEQ ID NO: 560236 - DNA, 33 bp, Homo sapien
ggtgtctattgaccaagttgataccaagttggg

SEQ ID NO: 560237 - DNA, 33 bp, Homo sapien
catttcccaaggccaaattagaatgcccctttc

SEQ ID NO: 560238 - DNA, 33 bp, Homo sapien
catttcccaaggccaagttagaatgcccctttc

SEQ ID NO: 560239 - DNA, 33 bp, Homo sapien
tagtagtcaactctcaataatttttcatgaaat

SEQ ID NO: 560240 - DNA, 33 bp, Homo sapien
tagtagtcaactctcagtaatttttcatgaaat

SEQ ID NO: 560241 - DNA, 33 bp, Homo sapien
atggtcattgctcttgaacctcactgttttagt

SEQ ID NO: 560242 - DNA, 33 bp, Homo sapien
atggtcattgctcttggacctcactgttttagt

SEQ ID NO: 560243 - DNA, 33 bp, Homo sapien
ggatggtgcgtagatacaacattttgttcccac

SEQ ID NO: 560244 - DNA, 33 bp, Homo sapien
ggatggtgcgtagatataacattttgttcccac

SEQ ID NO: 560245 - DNA, 33 bp, Homo sapien
ccacacaagggacttaataacataatcataccc

SEQ ID NO: 560246 - DNA, 33 bp, Homo sapien
ccacacaagggacttagtaacataatcataccc

SEQ ID NO: 560247 - DNA, 33 bp, Homo sapien
ggctggctggataatacacaaaggatagtcagg

SEQ ID NO: 560248 - DNA, 33 bp, Homo sapien
ggctggctggataatatacaaaggatagtcagg

SEQ ID NO: 560249 - DNA, 33 bp, Homo sapien
tatgattcaatctgtaacagactgctcatatca

SEQ ID NO: 560250 - DNA, 33 bp, Homo sapien
tatgattcaatctgtatcagactgctcatatca

SEQ ID NO: 560251 - DNA, 33 bp, Homo sapien
gctttgcttccctggactcatgatggttgagcc

SEQ ID NO: 560252 - DNA, 33 bp, Homo sapien
gctttgcttccctggagtcatgatggttgagcc

SEQ ID NO: 560253 - DNA, 33 bp, Homo sapien
aacacttcttgcagaaacatccatctatgtcag

SEQ ID NO: 560254 - DNA, 33 bp, Homo sapien
aacacttcttgcagaatcatccatctatgtcag

SEQ ID NO: 560255 - DNA, 33 bp, Homo sapien
actcgtacatacggtacacagtgattttgtaaa

SEQ ID NO: 560256 - DNA, 33 bp, Homo sapien
actcgtacatacggtatacagtgattttgtaaa

SEQ ID NO: 560257 - DNA, 33 bp, Homo sapien
gggtctcaactcaaacacttgtctccaggctta

SEQ ID NO: 560258 - DNA, 33 bp, Homo sapien
gggtctcaactcaaacgcttgtctccaggctta

SEQ ID NO: 560259 - DNA, 33 bp, Homo sapien
ttgttaatgaatcaacaatatgatacacccaga

SEQ ID NO: 560260 - DNA, 33 bp, Homo sapien
ttgttaatgaatcaaccatatgatacacccaga

SEQ ID NO: 560261 - DNA, 33 bp, Homo sapien
gccatttaaaattgcgccaagcatagtactgaa

SEQ ID NO: 560262 - DNA, 33 bp, Homo sapien
gccatttaaaattgcgtcaagcatagtactgaa

SEQ ID NO: 560263 - DNA, 33 bp, Homo sapien
agcatactttggtaacagcaacaaaacaaagta

SEQ ID NO: 560264 - DNA, 33 bp, Homo sapien
agcatactttggtaacggcaacaaaacaaagta

SEQ ID NO: 560265 - DNA, 33 bp, Homo sapien
cctagtctcagaaatcagacactttcacttctg

SEQ ID NO: 560266 - DNA, 33 bp, Homo sapien
cctagtctcagaaatcggacactttcacttctg

SEQ ID NO: 560267 - DNA, 33 bp, Homo sapien
caacctgtcatctacactaagtatttctcctaa

SEQ ID NO: 560268 - DNA, 33 bp, Homo sapien
caacctgtcatctacattaagtatttctcctaa

SEQ ID NO: 560269 - DNA, 33 bp, Homo sapien
gacaatttatataacacagatactaggcctaat

SEQ ID NO: 560270 - DNA, 33 bp, Homo sapien
gacaatttatataacagagatactaggcctaat

SEQ ID NO: 560271 - DNA, 33 bp, Homo sapien
aggaactaatgattaacgaaaggagccaagaag

SEQ ID NO: 560272 - DNA, 33 bp, Homo sapien
aggaactaatgattaatgaaaggagccaagaag

SEQ ID NO: 560273 - DNA, 33 bp, Homo sapien
agtagaagtgggacaaaaagaaacatgactgag

SEQ ID NO: 560274 - DNA, 33 bp, Homo sapien
agtagaagtgggacaagaagaaacatgactgag

SEQ ID NO: 560275 - DNA, 33 bp, Homo sapien
ggtactaatttgtaggcagtggcaattagagaa

SEQ ID NO: 560276 - DNA, 33 bp, Homo sapien
ggtactaatttgtagggagtggcaattagagaa

SEQ ID NO: 560277 - DNA, 33 bp, Homo sapien
gccatcttggaacggacctatactcagtaaata

SEQ ID NO: 560278 - DNA, 33 bp, Homo sapien
gccatcttggaacggagctatactcagtaaata

SEQ ID NO: 560279 - DNA, 33 bp, Homo sapien
atataaattaagcgtacctctttgggcaatatt

SEQ ID NO: 560280 - DNA, 33 bp, Homo sapien
atataaattaagcgtatctctttgggcaatatt

SEQ ID NO: 560281 - DNA, 33 bp, Homo sapien
gaaaagcagcaccgaaaaccctgcttatttcaa

SEQ ID NO: 560282 - DNA, 33 bp, Homo sapien
gaaaagcagcaccgaacaccctgcttatttcaa

SEQ ID NO: 560283 - DNA, 33 bp, Homo sapien
attttttacttctaggaatcttgtcaggtcttt

SEQ ID NO: 560284 - DNA, 33 bp, Homo sapien
attttttacttctaggcatcttgtcaggtcttt

SEQ ID NO: 560285 - DNA, 33 bp, Homo sapien
tttgatgaagtgagagaagcagggaggtttttg

SEQ ID NO: 560286 - DNA, 33 bp, Homo sapien
tttgatgaagtgagagcagcagggaggtttttg

SEQ ID NO: 560287 - DNA, 33 bp, Homo sapien
ctaagagaaatctttaccatactatttgttttg

SEQ ID NO: 560288 - DNA, 33 bp, Homo sapien
ctaagagaaatctttatcatactatttgttttg

SEQ ID NO: 560289 - DNA, 33 bp, Homo sapien
taatccaccattaataggcacctcggttgattc

SEQ ID NO: 560290 - DNA, 33 bp, Homo sapien
taatccaccattaatatgcacctcggttgattc

SEQ ID NO: 560291 - DNA, 33 bp, Homo sapien
ctgtgatcagtaataaagatgaaccaaaaacta

SEQ ID NO: 560292 - DNA, 33 bp, Homo sapien
ctgtgatcagtaataaggatgaaccaaaaacta

SEQ ID NO: 560293 - DNA, 33 bp, Homo sapien
ccttgtgttttaaaatcagaagtctgttctttc

SEQ ID NO: 560294 - DNA, 33 bp, Homo sapien
ccttgtgttttaaaattagaagtctgttctttc

SEQ ID NO: 560295 - DNA, 33 bp, Homo sapien
catttctaagaactgaagtaattatctgggatg

SEQ ID NO: 560296 - DNA, 33 bp, Homo sapien
catttctaagaactgaggtaattatctgggatg

SEQ ID NO: 560297 - DNA, 33 bp, Homo sapien
ttcccactggttaaaaaattgtgagctaaaaat

SEQ ID NO: 560298 - DNA, 33 bp, Homo sapien
ttcccactggttaaaacattgtgagctaaaaat

SEQ ID NO: 560299 - DNA, 33 bp, Homo sapien
cacaccgccaagaaaaagaatggaccctcatca

SEQ ID NO: 560300 - DNA, 33 bp, Homo sapien
cacaccgccaagaaaaggaatggaccctcatca

SEQ ID NO: 560301 - DNA, 33 bp, Homo sapien
atacatattcattgtcaacatggagtatgtcca

SEQ ID NO: 560302 - DNA, 33 bp, Homo sapien
atacatattcattgtccacatggagtatgtcca

SEQ ID NO: 560303 - DNA, 33 bp, Homo sapien
aatagttcctgggacccgactatgtatttaaaa

SEQ ID NO: 560304 - DNA, 33 bp, Homo sapien
aatagttcctgggacctgactatgtatttaaaa

SEQ ID NO: 560305 - DNA, 33 bp, Homo sapien
tcttttctttctctgaccataaacgtgtgttat

SEQ ID NO: 560306 - DNA, 33 bp, Homo sapien
tcttttctttctctgagcataaacgtgtgttat

SEQ ID NO: 560307 - DNA, 33 bp, Homo sapien
tttcctgataactctgaaagtgagaaaagccgg

SEQ ID NO: 560308 - DNA, 33 bp, Homo sapien
tttcctgataactctggaagtgagaaaagccgg

SEQ ID NO: 560309 - DNA, 33 bp, Homo sapien
gtattattaaattgatcaacaggttcaacacaa

SEQ ID NO: 560310 - DNA, 33 bp, Homo sapien
gtattattaaattgattaacaggttcaacacaa

SEQ ID NO: 560311 - DNA, 33 bp, Homo sapien
caacacaatcccaatagaaattccggcagtctt

SEQ ID NO: 560312 - DNA, 33 bp, Homo sapien
caacacaatcccaatataaattccggcagtctt

SEQ ID NO: 560313 - DNA, 33 bp, Homo sapien
aaacattattctaagcaaaaaaagccagacagc

SEQ ID NO: 560314 - DNA, 33 bp, Homo sapien
aaacattattctaagcgaaaaaagccagacagc

SEQ ID NO: 560315 - DNA, 33 bp, Homo sapien
gtgcaaatgtaagcaacgttttctagtgggttg

SEQ ID NO: 560316 - DNA, 33 bp, Homo sapien
gtgcaaatgtaagcaatgttttctagtgggttg

SEQ ID NO: 560317 - DNA, 33 bp, Homo sapien
tcccgatctcccataccacgtctgcatttctct

SEQ ID NO: 560318 - DNA, 33 bp, Homo sapien
tcccgatctcccatactacgtctgcatttctct

SEQ ID NO: 560319 - DNA, 33 bp, Homo sapien
atgttaaatgaaagaacgtatagaagccataaa

SEQ ID NO: 560320 - DNA, 33 bp, Homo sapien
atgttaaatgaaagaatgtatagaagccataaa

SEQ ID NO: 560321 - DNA, 33 bp, Homo sapien
ttaccagtcacaagtacgtgaattacctcatgc

SEQ ID NO: 560322 - DNA, 33 bp, Homo sapien
ttaccagtcacaagtaggtgaattacctcatgc

SEQ ID NO: 560323 - DNA, 33 bp, Homo sapien
tagccagatttcttaaatggtaactcaaggctc

SEQ ID NO: 560324 - DNA, 33 bp, Homo sapien
tagccagatttcttaagtggtaactcaaggctc

SEQ ID NO: 560325 - DNA, 33 bp, Homo sapien
tctttcctcctacctcaataactgtgttagtcc

SEQ ID NO: 560326 - DNA, 33 bp, Homo sapien
tctttcctcctacctcgataactgtgttagtcc

SEQ ID NO: 560327 - DNA, 33 bp, Homo sapien
cttttttggtgccatacgagctttaaagcagtt

SEQ ID NO: 560328 - DNA, 33 bp, Homo sapien
cttttttggtgccatatgagctttaaagcagtt

SEQ ID NO: 560329 - DNA, 33 bp, Homo sapien
caaaaacccagtagccaaaaatgagcatcaaca

SEQ ID NO: 560330 - DNA, 33 bp, Homo sapien
caaaaacccagtagcccaaaatgagcatcaaca

SEQ ID NO: 560331 - DNA, 33 bp, Homo sapien
aatcagagtacaaatacagagttaaggatcagt

SEQ ID NO: 560332 - DNA, 33 bp, Homo sapien
aatcagagtacaaatatagagttaaggatcagt

SEQ ID NO: 560333 - DNA, 33 bp, Homo sapien
atttggtccagataagcaaacgggatctttgcc

SEQ ID NO: 560334 - DNA, 33 bp, Homo sapien
atttggtccagataagtaaacgggatctttgcc

SEQ ID NO: 560335 - DNA, 33 bp, Homo sapien
tcacaaaccaggaagaaacacctgtaaaacaca

SEQ ID NO: 560336 - DNA, 33 bp, Homo sapien
tcacaaaccaggaagagacacctgtaaaacaca

SEQ ID NO: 560337 - DNA, 33 bp, Homo sapien
actatgaaagctttaaaacgatcaaaactaatc

SEQ ID NO: 560338 - DNA, 33 bp, Homo sapien
actatgaaagctttaagacgatcaaaactaatc

SEQ ID NO: 560339 - DNA, 33 bp, Homo sapien
aatagatattagtgaaatggatagctggtcttt

SEQ ID NO: 560340 - DNA, 33 bp, Homo sapien
aatagatattagtgaagtggatagctggtcttt

SEQ ID NO: 560341 - DNA, 33 bp, Homo sapien
gttgtatttcctatctcaatgcgttgctaaagg

SEQ ID NO: 560342 - DNA, 33 bp, Homo sapien
gttgtatttcctatcttaatgcgttgctaaagg

SEQ ID NO: 560343 - DNA, 33 bp, Homo sapien
accctgacctaaccaaacatggccttctagact

SEQ ID NO: 560344 - DNA, 33 bp, Homo sapien
accctgacctaaccaagcatggccttctagact

SEQ ID NO: 560345 - DNA, 33 bp, Homo sapien
tttgctgccggtcccactccaatcttattcttc

SEQ ID NO: 560346 - DNA, 33 bp, Homo sapien
tttgctgccggtcccattccaatcttattcttc

SEQ ID NO: 560347 - DNA, 33 bp, Homo sapien
aaaaatttaagtttgaagaccagagtgtgctac

SEQ ID NO: 560348 - DNA, 33 bp, Homo sapien
aaaaatttaagtttgaggaccagagtgtgctac

SEQ ID NO: 560349 - DNA, 33 bp, Homo sapien
ctaggaaataatatgcagaaattaaggagtgca

SEQ ID NO: 560350 - DNA, 33 bp, Homo sapien
ctaggaaataatatgcggaaattaaggagtgca

SEQ ID NO: 560351 - DNA, 33 bp, Homo sapien
taggaaaaaaatctccaagacatgttattgact

SEQ ID NO: 560352 - DNA, 33 bp, Homo sapien
taggaaaaaaatctccgagacatgttattgact

SEQ ID NO: 560353 - DNA, 33 bp, Homo sapien
gggtttattcttattgaaaactagcctaaaata

SEQ ID NO: 560354 - DNA, 33 bp, Homo sapien
gggtttattcttattggaaactagcctaaaata

SEQ ID NO: 560355 - DNA, 33 bp, Homo sapien
tggcacagctacaagacggagatgggctgtccc

SEQ ID NO: 560356 - DNA, 33 bp, Homo sapien
tggcacagctacaagatggagatgggctgtccc

SEQ ID NO: 560357 - DNA, 33 bp, Homo sapien
ttaagaaaaagcagcactacgaaagcatctgaa

SEQ ID NO: 560358 - DNA, 33 bp, Homo sapien
ttaagaaaaagcagcattacgaaagcatctgaa

SEQ ID NO: 560359 - DNA, 33 bp, Homo sapien
tgtgaaacttggaagacggctttgaaactcatt

SEQ ID NO: 560360 - DNA, 33 bp, Homo sapien
tgtgaaacttggaagatggctttgaaactcatt

SEQ ID NO: 560361 - DNA, 33 bp, Homo sapien
gttgtcgaggagggttcaaaatcatttggagat

SEQ ID NO: 560362 - DNA, 33 bp, Homo sapien
gttgtcgaggagggtttaaaatcatttggagat

SEQ ID NO: 560363 - DNA, 33 bp, Homo sapien
aaatggaaaagacagcaaacagctaactggaaa

SEQ ID NO: 560364 - DNA, 33 bp, Homo sapien
aaatggaaaagacagcgaacagctaactggaaa

SEQ ID NO: 560365 - DNA, 33 bp, Homo sapien
acagtttccgcctctaaaagaaacgcagatgcg

SEQ ID NO: 560366 - DNA, 33 bp, Homo sapien
acagtttccgcctctagaagaaacgcagatgcg

SEQ ID NO: 560367 - DNA, 33 bp, Homo sapien
caattactagcacaaccggaagaaagaagagcg

SEQ ID NO: 560368 - DNA, 33 bp, Homo sapien
caattactagcacaactggaagaaagaagagcg

SEQ ID NO: 560369 - DNA, 33 bp, Homo sapien
ctctcaggaacaaggagaaagtgaaaagagacc

SEQ ID NO: 560370 - DNA, 33 bp, Homo sapien
ctctcaggaacaaggataaagtgaaaagagacc

SEQ ID NO: 560371 - DNA, 33 bp, Homo sapien
agacaggcaatggaacaaaacaaggtcacccag

SEQ ID NO: 560372 - DNA, 33 bp, Homo sapien
agacaggcaatggaacgaaacaaggtcacccag

SEQ ID NO: 560373 - DNA, 33 bp, Homo sapien
agggcaggtgaggcataacttgtaggtcgtaag

SEQ ID NO: 560374 - DNA, 33 bp, Homo sapien
agggcaggtgaggcatgacttgtaggtcgtaag

SEQ ID NO: 560375 - DNA, 33 bp, Homo sapien
tacagaataaaaaaatcaaaggctgagcacaga

SEQ ID NO: 560376 - DNA, 33 bp, Homo sapien
tacagaataaaaaaatgaaaggctgagcacaga

SEQ ID NO: 560377 - DNA, 33 bp, Homo sapien
tttgatttttaatttgaatgaatacacattttc

SEQ ID NO: 560378 - DNA, 33 bp, Homo sapien
tttgatttttaatttggatgaatacacattttc

SEQ ID NO: 560379 - DNA, 33 bp, Homo sapien
ggagctaaatgtgaggaaaaaaatacgcttaaa

SEQ ID NO: 560380 - DNA, 33 bp, Homo sapien
ggagctaaatgtgagggaaaaaatacgcttaaa

SEQ ID NO: 560381 - DNA, 33 bp, Homo sapien
tgtcttaagtgtaatgcaatacataccgtgagg

SEQ ID NO: 560382 - DNA, 33 bp, Homo sapien
tgtcttaagtgtaatggaatacataccgtgagg

SEQ ID NO: 560383 - DNA, 33 bp, Homo sapien
acctctgcgtgatgagcatcctgtttatttcca

SEQ ID NO: 560384 - DNA, 33 bp, Homo sapien
acctctgcgtgatgagtatcctgtttatttcca

SEQ ID NO: 560385 - DNA, 33 bp, Homo sapien
aagtcaaacaggcctacattctagtcttgattt

SEQ ID NO: 560386 - DNA, 33 bp, Homo sapien
aagtcaaacaggcctatattctagtcttgattt

SEQ ID NO: 560387 - DNA, 33 bp, Homo sapien
ataaacattgcctgtccctgtagtagaggaatc

SEQ ID NO: 560388 - DNA, 33 bp, Homo sapien
ataaacattgcctgtctctgtagtagaggaatc

SEQ ID NO: 560389 - DNA, 33 bp, Homo sapien
ggaaagacagcaaaaccatattagacactgctg

SEQ ID NO: 560390 - DNA, 33 bp, Homo sapien
ggaaagacagcaaaactatattagacactgctg

SEQ ID NO: 560391 - DNA, 33 bp, Homo sapien
agtgaaaagccacccaatcaacacacagaatta

SEQ ID NO: 560392 - DNA, 33 bp, Homo sapien
agtgaaaagccacccagtcaacacacagaatta

SEQ ID NO: 560393 - DNA, 33 bp, Homo sapien
ttagtgagttcaaacaacaatgatttattactc

SEQ ID NO: 560394 - DNA, 33 bp, Homo sapien
ttagtgagttcaaacagcaatgatttattactc

SEQ ID NO: 560395 - DNA, 33 bp, Homo sapien
gtatctgtgccttttaaatattttttcttcttt

SEQ ID NO: 560396 - DNA, 33 bp, Homo sapien
gtatctgtgccttttatatattttttcttcttt

SEQ ID NO: 560397 - DNA, 33 bp, Homo sapien
agaaaggaagctaggaactaatcacataggatt

SEQ ID NO: 560398 - DNA, 33 bp, Homo sapien
agaaaggaagctaggatctaatcacataggatt

SEQ ID NO: 560399 - DNA, 33 bp, Homo sapien
agagtgaagagagaaaaaaacacatgattagtt

SEQ ID NO: 560400 - DNA, 33 bp, Homo sapien
agagtgaagagagaaacaaacacatgattagtt

SEQ ID NO: 560401 - DNA, 33 bp, Homo sapien
aaggtgtatctgaatgaaaaagggcagacctgt

SEQ ID NO: 560402 - DNA, 33 bp, Homo sapien
aaggtgtatctgaatgtaaaagggcagacctgt

SEQ ID NO: 560403 - DNA, 33 bp, Homo sapien
ctgagggagacaatgacgcattatgtgccctgt

SEQ ID NO: 560404 - DNA, 33 bp, Homo sapien
ctgagggagacaatgatgcattatgtgccctgt

SEQ ID NO: 560405 - DNA, 33 bp, Homo sapien
ttagtgacaatattcaactgacaatacatgaac

SEQ ID NO: 560406 - DNA, 33 bp, Homo sapien
ttagtgacaatattcagctgacaatacatgaac

SEQ ID NO: 560407 - DNA, 33 bp, Homo sapien
gatgccaaaactagtaaattctacaaaattgca

SEQ ID NO: 560408 - DNA, 33 bp, Homo sapien
gatgccaaaactagtatattctacaaaattgca

SEQ ID NO: 560409 - DNA, 33 bp, Homo sapien
ccttggccaaatttgtgaatagtgttccagaac

SEQ ID NO: 560410 - DNA, 33 bp, Homo sapien
ccttggccaaatttgttaatagtgttccagaac

SEQ ID NO: 560411 - DNA, 33 bp, Homo sapien
ccattgtgaaagaagcaataggtgaagttctca

SEQ ID NO: 560412 - DNA, 33 bp, Homo sapien
ccattgtgaaagaagcgataggtgaagttctca

SEQ ID NO: 560413 - DNA, 33 bp, Homo sapien
tatattaagtgaagaaagaagttgtgagaacag

SEQ ID NO: 560414 - DNA, 33 bp, Homo sapien
tatattaagtgaagaaggaagttgtgagaacag

SEQ ID NO: 560415 - DNA, 33 bp, Homo sapien
atatgtgcatagtttacaaaagtctgttgggct

SEQ ID NO: 560416 - DNA, 33 bp, Homo sapien
atatgtgcatagtttataaaagtctgttgggct

SEQ ID NO: 560417 - DNA, 33 bp, Homo sapien
ccctccacaatgacgactcacgtattttgcatg

SEQ ID NO: 560418 - DNA, 33 bp, Homo sapien
ccctccacaatgacgattcacgtattttgcatg

SEQ ID NO: 560419 - DNA, 33 bp, Homo sapien
taagtgagctgttgaactggaagggcgagcact

SEQ ID NO: 560420 - DNA, 33 bp, Homo sapien
taagtgagctgttgaattggaagggcgagcact

SEQ ID NO: 560421 - DNA, 33 bp, Homo sapien
cctggaatacaactgaatattatcttgaggaca

SEQ ID NO: 560422 - DNA, 33 bp, Homo sapien
cctggaatacaactgagtattatcttgaggaca

SEQ ID NO: 560423 - DNA, 33 bp, Homo sapien
taggtaaactcaagaggcagtctagctcacaac

SEQ ID NO: 560424 - DNA, 33 bp, Homo sapien
taggtaaactcaagagtcagtctagctcacaac

SEQ ID NO: 560425 - DNA, 33 bp, Homo sapien
tatttttataatgtaaatgtgtgataatttgtt

SEQ ID NO: 560426 - DNA, 33 bp, Homo sapien
tatttttataatgtaagtgtgtgataatttgtt

SEQ ID NO: 560427 - DNA, 33 bp, Homo sapien
catgtcaagtttctaccgaattattaagtacca

SEQ ID NO: 560428 - DNA, 33 bp, Homo sapien
catgtcaagtttctactgaattattaagtacca

SEQ ID NO: 560429 - DNA, 33 bp, Homo sapien
aaagtacaataaatgacgtatgcctacatggac

SEQ ID NO: 560430 - DNA, 33 bp, Homo sapien
aaagtacaataaatgaggtatgcctacatggac

SEQ ID NO: 560431 - DNA, 33 bp, Homo sapien
aattttcctatgctaacggtagatattttcttt

SEQ ID NO: 560432 - DNA, 33 bp, Homo sapien
aattttcctatgctaatggtagatattttcttt

SEQ ID NO: 560433 - DNA, 33 bp, Homo sapien
cattttagtgtgaagcaagattaatggaagatg

SEQ ID NO: 560434 - DNA, 33 bp, Homo sapien
cattttagtgtgaagcgagattaatggaagatg

SEQ ID NO: 560435 - DNA, 33 bp, Homo sapien
ctattgtctgttcttacagcacttatggtctaa

SEQ ID NO: 560436 - DNA, 33 bp, Homo sapien
ctattgtctgttcttatagcacttatggtctaa

SEQ ID NO: 560437 - DNA, 33 bp, Homo sapien
agggagaaggcactcacggttacagggaagatg

SEQ ID NO: 560438 - DNA, 33 bp, Homo sapien
agggagaaggcactcatggttacagggaagatg

SEQ ID NO: 560439 - DNA, 33 bp, Homo sapien
caactttgtcacatcccatttcccctcctccag

SEQ ID NO: 560440 - DNA, 33 bp, Homo sapien
caactttgtcacatcctatttcccctcctccag

SEQ ID NO: 560441 - DNA, 33 bp, Homo sapien
tttacaaggacatagacggagctaaaggccatt

SEQ ID NO: 560442 - DNA, 33 bp, Homo sapien
tttacaaggacatagatggagctaaaggccatt

SEQ ID NO: 560443 - DNA, 33 bp, Homo sapien
attctgccaaaaaaagacattcactcatatgtt

SEQ ID NO: 560444 - DNA, 33 bp, Homo sapien
attctgccaaaaaaaggcattcactcatatgtt

SEQ ID NO: 560445 - DNA, 33 bp, Homo sapien; identical to SEQ ID NO: 560443

SEQ ID NO: 560446 - DNA, 33 bp, Homo sapien; identical to SEQ ID NO: 560444

SEQ ID NO: 560447 - DNA, 33 bp, Homo sapien
atgcacacgaatgtaaagtgcctctgagattta

SEQ ID NO: 560448 - DNA, 33 bp, Homo sapien
atgcacacgaatgtaatgtgcctctgagattta

SEQ ID NO: 560449 - DNA, 33 bp, Homo sapien
aagcccagctcctcagcccttgatattttccct

SEQ ID NO: 560450 - DNA, 33 bp, Homo sapien
aagcccagctcctcagtccttgatattttccct

SEQ ID NO: 560451 - DNA, 33 bp, Homo sapien
ctccacttcctgcaaaaacaatcaaatggtagt

SEQ ID NO: 560452 - DNA, 33 bp, Homo sapien
ctccacttcctgcaaagacaatcaaatggtagt

SEQ ID NO: 560453 - DNA, 33 bp, Homo sapien
actgaacattatacaacatttctcaagctttcc

SEQ ID NO: 560454 - DNA, 33 bp, Homo sapien
actgaacattatacaatatttctcaagctttcc

SEQ ID NO: 560455 - DNA, 33 bp, Homo sapien
tatcaacagtgacagcaaagaacattaaataag

SEQ ID NO: 560456 - DNA, 33 bp, Homo sapien
tatcaacagtgacagcgaagaacattaaataag

SEQ ID NO: 560457 - DNA, 33 bp, Homo sapien
ttctggacttgaagaagagtaggtccatgatgt

SEQ ID NO: 560458 - DNA, 33 bp, Homo sapien
ttctggacttgaagaatagtaggtccatgatgt

SEQ ID NO: 560459 - DNA, 33 bp, Homo sapien
aatgatcccttctcatgataacctcagtaaaga

SEQ ID NO: 560460 - DNA, 33 bp, Homo sapien
aatgatcccttctcattataacctcagtaaaga

SEQ ID NO: 560461 - DNA, 33 bp, Homo sapien
ttgttgatactgtgtaagggtgtcaatcattgg

SEQ ID NO: 560462 - DNA, 33 bp, Homo sapien
ttgttgatactgtgtaggggtgtcaatcattgg

SEQ ID NO: 560463 - DNA, 33 bp, Homo sapien
cctcaattgctaaccactcttctttgcccaatt

SEQ ID NO: 560464 - DNA, 33 bp, Homo sapien
cctcaattgctaaccattcttctttgcccaatt

SEQ ID NO: 560465 - DNA, 33 bp, Homo sapien
ttagcttcagtcttgtcaacatttttatctgtt

SEQ ID NO: 560466 - DNA, 33 bp, Homo sapien
ttagcttcagtcttgttaacatttttatctgtt

SEQ ID NO: 560467 - DNA, 33 bp, Homo sapien
tattatgttttcaaaggcaaatatgggtcaaag

SEQ ID NO: 560468 - DNA, 33 bp, Homo sapien
tattatgttttcaaagtcaaatatgggtcaaag

SEQ ID NO: 560469 - DNA, 33 bp, Homo sapien
atagaactgactgctacgacttgataaaacaac

SEQ ID NO: 560470 - DNA, 33 bp, Homo sapien
atagaactgactgctatgacttgataaaacaac

SEQ ID NO: 560471 - DNA, 33 bp, Homo sapien
aaaactagaatacggaaagatttaggcataaaa

SEQ ID NO: 560472 - DNA, 33 bp, Homo sapien
aaaactagaatacggacagatttaggcataaaa

SEQ ID NO: 560473 - DNA, 33 bp, Homo sapien
ctggacgtaccaggaagacatgtccacaggacc

SEQ ID NO: 560474 - DNA, 33 bp, Homo sapien
ctggacgtaccaggaatacatgtccacaggacc

SEQ ID NO: 560475 - DNA, 33 bp, Homo sapien
cttccaaaatcttaaacgacaacatactagtct

SEQ ID NO: 560476 - DNA, 33 bp, Homo sapien
cttccaaaatcttaaatgacaacatactagtct

SEQ ID NO: 560477 - DNA, 33 bp, Homo sapien
gagagtccatgtcatcactttccaagacatcag

SEQ ID NO: 560478 - DNA, 33 bp, Homo sapien
gagagtccatgtcatcgctttccaagacatcag

SEQ ID NO: 560479 - DNA, 33 bp, Homo sapien
tctggctttaagctaaaattcttgcccatgaat

SEQ ID NO: 560480 - DNA, 33 bp, Homo sapien
tctggctttaagctaagattcttgcccatgaat

SEQ ID NO: 560481 - DNA, 33 bp, Homo sapien
agaaattctcgccataggcacatatatagttag

SEQ ID NO: 560482 - DNA, 33 bp, Homo sapien
agaaattctcgccatatgcacatatatagttag

SEQ ID NO: 560483 - DNA, 33 bp, Homo sapien
gagtatgtgaaaggaacactgaagggcagaaga

SEQ ID NO: 560484 - DNA, 33 bp, Homo sapien
gagtatgtgaaaggaatactgaagggcagaaga

SEQ ID NO: 560485 - DNA, 33 bp, Homo sapien
cgtttagttcagggtcacaaaagaaacaaagct

SEQ ID NO: 560486 - DNA, 33 bp, Homo sapien
cgtttagttcagggtcgcaaaagaaacaaagct

SEQ ID NO: 560487 - DNA, 33 bp, Homo sapien
agagtttcacaagactaaaatctagatatcatc

SEQ ID NO: 560488 - DNA, 33 bp, Homo sapien
agagtttcacaagactgaaatctagatatcatc

SEQ ID NO: 560489 - DNA, 33 bp, Homo sapien
cttcacttgaacattaaatattccacatttgtt

SEQ ID NO: 560490 - DNA, 33 bp, Homo sapien
cttcacttgaacattagatattccacatttgtt

SEQ ID NO: 560491 - DNA, 33 bp, Homo sapien
gcaggtatataaatgaacagtgcacttcaggca

SEQ ID NO: 560492 - DNA, 33 bp, Homo sapien
gcaggtatataaatgatcagtgcacttcaggca

SEQ ID NO: 560493 - DNA, 33 bp, Homo sapien
agctcactaaggatcaacaaaccacagggagtc

SEQ ID NO: 560494 - DNA, 33 bp, Homo sapien
agctcactaaggatcaccaaaccacagggagtc

SEQ ID NO: 560495 - DNA, 33 bp, Homo sapien
ggttaacttcttttcaatacagatggtttaaaa

SEQ ID NO: 560496 - DNA, 33 bp, Homo sapien
ggttaacttcttttcagtacagatggtttaaaa

SEQ ID NO: 560497 - DNA, 33 bp, Homo sapien
tcatttagttatgggaagggcaataggaatgcc

SEQ ID NO: 560498 - DNA, 33 bp, Homo sapien
tcatttagttatgggaggggcaataggaatgcc

SEQ ID NO: 560499 - DNA, 33 bp, Homo sapien
ttatgtacttctgctacgtgtttatattattta

SEQ ID NO: 560500 - DNA, 33 bp, Homo sapien
ttatgtacttctgctatgtgtttatattattta

SEQ ID NO: 560501 - DNA, 33 bp, Homo sapien
atgtttgctgccaaaaatcctagtttgacagtg

SEQ ID NO: 560502 - DNA, 33 bp, Homo sapien
atgtttgctgccaaaagtcctagtttgacagtg

SEQ ID NO: 560503 - DNA, 33 bp, Homo sapien
aaatgagactgaaagcagctagaggaaaagttt

SEQ ID NO: 560504 - DNA, 33 bp, Homo sapien
aaatgagactgaaagcggctagaggaaaagttt

SEQ ID NO: 560505 - DNA, 33 bp, Homo sapien
ctgtcttccttgcttgcacttaccaccatagta

SEQ ID NO: 560506 - DNA, 33 bp, Homo sapien
ctgtcttccttgcttgtacttaccaccatagta

SEQ ID NO: 560507 - DNA, 33 bp, Homo sapien
ggcataaagccaatagccatgaacaaaataaaa

SEQ ID NO: 560508 - DNA, 33 bp, Homo sapien
ggcataaagccaatagtcatgaacaaaataaaa

SEQ ID NO: 560509 - DNA, 33 bp, Homo sapien
gatttctttggcctaacagttggttaatattgt

SEQ ID NO: 560510 - DNA, 33 bp, Homo sapien
gatttctttggcctaatagttggttaatattgt

SEQ ID NO: 560511 - DNA, 33 bp, Homo sapien
cattcataatagtttccagtttgacttctttgt

SEQ ID NO: 560512 - DNA, 33 bp, Homo sapien
cattcataatagtttctagtttgacttctttgt

SEQ ID NO: 560513 - DNA, 33 bp, Homo sapien
acaggaatgtgttatcagaagtctggaagtcta

SEQ ID NO: 560514 - DNA, 33 bp, Homo sapien
acaggaatgtgttatcggaagtctggaagtcta

SEQ ID NO: 560515 - DNA, 33 bp, Homo sapien
gagaatatcactcaagaccagtaatatcaatat

SEQ ID NO: 560516 - DNA, 33 bp, Homo sapien
gagaatatcactcaaggccagtaatatcaatat

SEQ ID NO: 560517 - DNA, 33 bp, Homo sapien
agtcttgttaacaacccaaggtgagtcaagcac

SEQ ID NO: 560518 - DNA, 33 bp, Homo sapien
agtcttgttaacaacctaaggtgagtcaagcac

SEQ ID NO: 560519 - DNA, 33 bp, Homo sapien
tgttcactagggagtaagcatatggaagacgct

SEQ ID NO: 560520 - DNA, 33 bp, Homo sapien
tgttcactagggagtacgcatatggaagacgct

SEQ ID NO: 560521 - DNA, 33 bp, Homo sapien
cttcacttgaatatccaactccacatatccaaa

SEQ ID NO: 560522 - DNA, 33 bp, Homo sapien
cttcacttgaatatccgactccacatatccaaa

SEQ ID NO: 560523 - DNA, 33 bp, Homo sapien
agatgtaaacatctgcaaggccaagagagtgtg

SEQ ID NO: 560524 - DNA, 33 bp, Homo sapien
agatgtaaacatctgcgaggccaagagagtgtg

SEQ ID NO: 560525 - DNA, 33 bp, Homo sapien
cttcacttttaggctacgtatttacttacaggt

SEQ ID NO: 560526 - DNA, 33 bp, Homo sapien
cttcacttttaggctatgtatttacttacaggt

SEQ ID NO: 560527 - DNA, 33 bp, Homo sapien
ctcacattccttcagaagctaactctcttagtg

SEQ ID NO: 560528 - DNA, 33 bp, Homo sapien
ctcacattccttcagaggctaactctcttagtg

SEQ ID NO: 560529 - DNA, 33 bp, Homo sapien
ggctagtggaaatccagacgatgaatcccctga

SEQ ID NO: 560530 - DNA, 33 bp, Homo sapien
ggctagtggaaatccatacgatgaatcccctga

SEQ ID NO: 560531 - DNA, 33 bp, Homo sapien
gagactaaatttgacactcttaatattgacatc

SEQ ID NO: 560532 - DNA, 33 bp, Homo sapien
gagactaaatttgacagtcttaatattgacatc

SEQ ID NO: 560533 - DNA, 33 bp, Homo sapien
tttctgttatagtggccaaagtgattttaacta

SEQ ID NO: 560534 - DNA, 33 bp, Homo sapien
tttctgttatagtggctaaagtgattttaacta

SEQ ID NO: 560535 - DNA, 33 bp, Homo sapien
ttgacgtaatagttaacacaaaactagaacctg

SEQ ID NO: 560536 - DNA, 33 bp, Homo sapien
ttgacgtaatagttaatacaaaactagaacctg

SEQ ID NO: 560537 - DNA, 33 bp, Homo sapien
ctgtcttttgtacacacagctttatgactgcca

SEQ ID NO: 560538 - DNA, 33 bp, Homo sapien
ctgtcttttgtacacatagctttatgactgcca

SEQ ID NO: 560539 - DNA, 33 bp, Homo sapien
acttgcttattagacaacagtacttatctatta

SEQ ID NO: 560540 - DNA, 33 bp, Homo sapien
acttgcttattagacagcagtacttatctatta

SEQ ID NO: 560541 - DNA, 33 bp, Homo sapien
gaagacatccaatgcccattctattaatgttaa

SEQ ID NO: 560542 - DNA, 33 bp, Homo sapien
gaagacatccaatgcctattctattaatgttaa

SEQ ID NO: 560543 - DNA, 33 bp, Homo sapien
tcctaatgtgaagagcaatgtgtttaaagggct

SEQ ID NO: 560544 - DNA, 33 bp, Homo sapien
tcctaatgtgaagagcgatgtgtttaaagggct

SEQ ID NO: 560545 - DNA, 33 bp, Homo sapien
ttgtgaatgcttaagacaaaatttatgaaatca

SEQ ID NO: 560546 - DNA, 33 bp, Homo sapien
ttgtgaatgcttaagataaaatttatgaaatca

SEQ ID NO: 560547 - DNA, 33 bp, Homo sapien
ccttggaatatttaaacgctatgtctgttgtgt

SEQ ID NO: 560548 - DNA, 33 bp, Homo sapien
ccttggaatatttaaatgctatgtctgttgtgt

SEQ ID NO: 560549 - DNA, 33 bp, Homo sapien
gaggttagaggttccacgaaaagctctgcacag

SEQ ID NO: 560550 - DNA, 33 bp, Homo sapien
gaggttagaggttccatgaaaagctctgcacag

SEQ ID NO: 560551 - DNA, 33 bp, Homo sapien
aatgatgaaaagcttaaagtcaacaaataagag

SEQ ID NO: 560552 - DNA, 33 bp, Homo sapien
aatgatgaaaagcttacagtcaacaaataagag

SEQ ID NO: 560553 - DNA, 33 bp, Homo sapien
atggtaaaggtacaaacgtagcaaaagagggaa

SEQ ID NO: 560554 - DNA, 33 bp, Homo sapien
atggtaaaggtacaaaggtagcaaaagagggaa

SEQ ID NO: 560555 - DNA, 33 bp, Homo sapien
tatgatccgtacaacaccaaggcaagagtccca

SEQ ID NO: 560556 - DNA, 33 bp, Homo sapien
tatgatccgtacaacagcaaggcaagagtccca

SEQ ID NO: 560557 - DNA, 33 bp, Homo sapien
attcatgattccataacgcacagcgtgagacat

SEQ ID NO: 560558 - DNA, 33 bp, Homo sapien
attcatgattccataatgcacagcgtgagacat

SEQ ID NO: 560559 - DNA, 33 bp, Homo sapien
agtaatagaataaccaacacttacagagtaatg

SEQ ID NO: 560560 - DNA, 33 bp, Homo sapien
agtaatagaataaccagcacttacagagtaatg

SEQ ID NO: 560561 - DNA, 33 bp, Homo sapien
agctaaaagtcccaggaaactgataaggctcag

SEQ ID NO: 560562 - DNA, 33 bp, Homo sapien
agctaaaagtcccagggaactgataaggctcag

SEQ ID NO: 560563 - DNA, 33 bp, Homo sapien
ttctgccagaatataacatgaatgtaagcagtg

SEQ ID NO: 560564 - DNA, 33 bp, Homo sapien
ttctgccagaatataatatgaatgtaagcagtg

SEQ ID NO: 560565 - DNA, 33 bp, Homo sapien
aaaataaggtacaaaaaggacaatacagaaaaa

SEQ ID NO: 560566 - DNA, 33 bp, Homo sapien
aaaataaggtacaaaagggacaatacagaaaaa

SEQ ID NO: 560567 - DNA, 33 bp, Homo sapien
acatctgatattgtaacgtaagtggtgttttga

SEQ ID NO: 560568 - DNA, 33 bp, Homo sapien
acatctgatattgtaatgtaagtggtgttttga

SEQ ID NO: 560569 - DNA, 33 bp, Homo sapien
tctctcatctgacttccagtgaaccacattttt

SEQ ID NO: 560570 - DNA, 33 bp, Homo sapien
tctctcatctgacttcgagtgaaccacattttt

SEQ ID NO: 560571 - DNA, 33 bp, Homo sapien
cacaaaagattaagaaatggtaattgtgtatag

SEQ ID NO: 560572 - DNA, 33 bp, Homo sapien
cacaaaagattaagaagtggtaattgtgtatag

SEQ ID NO: 560573 - DNA, 33 bp, Homo sapien
ctcttcattcctcaaaatcagtagttctccttt

SEQ ID NO: 560574 - DNA, 33 bp, Homo sapien
ctcttcattcctcaaagtcagtagttctccttt

SEQ ID NO: 560575 - DNA, 33 bp, Homo sapien
tttagaataatgtgtacaaaatgtaaagattct

SEQ ID NO: 560576 - DNA, 33 bp, Homo sapien
tttagaataatgtgtagaaaatgtaaagattct

SEQ ID NO: 560577 - DNA, 33 bp, Homo sapien
catgccgttgtatatacgtacagttgtctcatc

SEQ ID NO: 560578 - DNA, 33 bp, Homo sapien
catgccgttgtatatatgtacagttgtctcatc

SEQ ID NO: 560579 - DNA, 33 bp, Homo sapien
tcatattatgataaggaacactttactcacaaa

SEQ ID NO: 560580 - DNA, 33 bp, Homo sapien
tcatattatgataagggacactttactcacaaa

SEQ ID NO: 560581 - DNA, 33 bp, Homo sapien
ctcttttccagcattcaagatttgtgagtaaag

SEQ ID NO: 560582 - DNA, 33 bp, Homo sapien
ctcttttccagcattcgagatttgtgagtaaag

SEQ ID NO: 560583 - DNA, 33 bp, Homo sapien
agatcaagagtgcagaggatttttgccacaatt

SEQ ID NO: 560584 - DNA, 33 bp, Homo sapien
agatcaagagtgcagatgatttttgccacaatt

SEQ ID NO: 560585 - DNA, 33 bp, Homo sapien
gtacatatggtttgacccatttttatgcaaatg

SEQ ID NO: 560586 - DNA, 33 bp, Homo sapien
gtacatatggtttgactcatttttatgcaaatg

SEQ ID NO: 560587 - DNA, 33 bp, Homo sapien
tcactcctgtcctcaacgctttaacagtactta

SEQ ID NO: 560588 - DNA, 33 bp, Homo sapien
tcactcctgtcctcaatgctttaacagtactta

SEQ ID NO: 560589 - DNA, 33 bp, Homo sapien
tgctacttgactacccagatatcctttactcca

SEQ ID NO: 560590 - DNA, 33 bp, Homo sapien
tgctacttgactacccggatatcctttactcca

SEQ ID NO: 560591 - DNA, 33 bp, Homo sapien
gcacatttacaaacacaaattagcctatggctg

SEQ ID NO: 560592 - DNA, 33 bp, Homo sapien
gcacatttacaaacacgaattagcctatggctg

SEQ ID NO: 560593 - DNA, 33 bp, Homo sapien
tttttaagttaataaagtggcacttgaaaataa

SEQ ID NO: 560594 - DNA, 33 bp, Homo sapien
tttttaagttaataaattggcacttgaaaataa

SEQ ID NO: 560595 - DNA, 33 bp, Homo sapien
tggactcacactgctcaataacgaggatgcaaa

SEQ ID NO: 560596 - DNA, 33 bp, Homo sapien
tggactcacactgctcgataacgaggatgcaaa

SEQ ID NO: 560597 - DNA, 33 bp, Homo sapien
tatacattcatgtatcacaaacatacttcaact

SEQ ID NO: 560598 - DNA, 33 bp, Homo sapien
tatacattcatgtatcgcaaacatacttcaact

SEQ ID NO: 560599 - DNA, 33 bp, Homo sapien
atatgatttgaaaatgcaatccctgttccaaag

SEQ ID NO: 560600 - DNA, 33 bp, Homo sapien
atatgatttgaaaatgtaatccctgttccaaag

SEQ ID NO: 560601 - DNA, 33 bp, Homo sapien
ttttcttgtattactaactgggactttcttggc

SEQ ID NO: 560602 - DNA, 33 bp, Homo sapien
ttttcttgtattactatctgggactttcttggc

SEQ ID NO: 560603 - DNA, 33 bp, Homo sapien
tcttttctattctaaaacccaatcaaagttgac

SEQ ID NO: 560604 - DNA, 33 bp, Homo sapien
tcttttctattctaaaccccaatcaaagttgac

SEQ ID NO: 560605 - DNA, 33 bp, Homo sapien
ccactagactacagtaataaatccaaaatgaaa

SEQ ID NO: 560606 - DNA, 33 bp, Homo sapien
ccactagactacagtactaaatccaaaatgaaa

SEQ ID NO: 560607 - DNA, 33 bp, Homo sapien
cagagaatagcatttccacctcctaatccaaac

SEQ ID NO: 560608 - DNA, 33 bp, Homo sapien
cagagaatagcatttctacctcctaatccaaac

SEQ ID NO: 560609 - DNA, 33 bp, Homo sapien
aatctgatttatttaacggagaagtagaaatat

SEQ ID NO: 560610 - DNA, 33 bp, Homo sapien
aatctgatttatttaatggagaagtagaaatat

SEQ ID NO: 560611 - DNA, 33 bp, Homo sapien
gtgaaagcattgggaaaaagtcaagcaataatt

SEQ ID NO: 560612 - DNA, 33 bp, Homo sapien
gtgaaagcattgggaagaagtcaagcaataatt

SEQ ID NO: 560613 - DNA, 33 bp, Homo sapien
aaaaataaacaatgcaaacataatgatgcaaag

SEQ ID NO: 560614 - DNA, 33 bp, Homo sapien
aaaaataaacaatgcagacataatgatgcaaag

SEQ ID NO: 560615 - DNA, 33 bp, Homo sapien
gataaaaacattaacaaacggatcatcaagaag

SEQ ID NO: 560616 - DNA, 33 bp, Homo sapien
gataaaaacattaacagacggatcatcaagaag

SEQ ID NO: 560617 - DNA, 33 bp, Homo sapien
caatgataaggatataaaatgtgaggcaatcat

SEQ ID NO: 560618 - DNA, 33 bp, Homo sapien
caatgataaggatatacaatgtgaggcaatcat

SEQ ID NO: 560619 - DNA, 33 bp, Homo sapien
attgttctcccaaaagcatacctgcacttgtat

SEQ ID NO: 560620 - DNA, 33 bp, Homo sapien
attgttctcccaaaaggatacctgcacttgtat

SEQ ID NO: 560621 - DNA, 33 bp, Homo sapien
aaataaattatgtaaaaggatcataccatatgt

SEQ ID NO: 560622 - DNA, 33 bp, Homo sapien
aaataaattatgtaaagggatcataccatatgt

SEQ ID NO: 560623 - DNA, 33 bp, Homo sapien
ctaacagaagattaaaacagagacttattaaag

SEQ ID NO: 560624 - DNA, 33 bp, Homo sapien
ctaacagaagattaaagcagagacttattaaag

SEQ ID NO: 560625 - DNA, 33 bp, Homo sapien
ggtgtaaataactgagaaaataattcagcagct

SEQ ID NO: 560626 - DNA, 33 bp, Homo sapien
ggtgtaaataactgagtaaataattcagcagct

SEQ ID NO: 560627 - DNA, 33 bp, Homo sapien
catgcttcacttaccaacaggaatatggtctga

SEQ ID NO: 560628 - DNA, 33 bp, Homo sapien
catgcttcacttaccatcaggaatatggtctga

SEQ ID NO: 560629 - DNA, 33 bp, Homo sapien
tcctctctgtttgaaaggtgtaactttgcagaa

SEQ ID NO: 560630 - DNA, 33 bp, Homo sapien
tcctctctgtttgaaatgtgtaactttgcagaa

SEQ ID NO: 560631 - DNA, 33 bp, Homo sapien
aaaataatactcataaggtttggattaatagaa

SEQ ID NO: 560632 - DNA, 33 bp, Homo sapien
aaaataatactcataatgtttggattaatagaa

SEQ ID NO: 560633 - DNA, 33 bp, Homo sapien
ggttcagaaatttgacaccagacctattaaatt

SEQ ID NO: 560634 - DNA, 33 bp, Homo sapien
ggttcagaaatttgacgccagacctattaaatt

SEQ ID NO: 560635 - DNA, 33 bp, Homo sapien
tgctatgccaaattgtcaattgataatagtaat

SEQ ID NO: 560636 - DNA, 33 bp, Homo sapien
tgctatgccaaattgttaattgataatagtaat

SEQ ID NO: 560637 - DNA, 33 bp, Homo sapien
tcctacttatccttcacatcaacacactctaat

SEQ ID NO: 560638 - DNA, 33 bp, Homo sapien
tcctacttatccttcagatcaacacactctaat

SEQ ID NO: 560639 - DNA, 33 bp, Homo sapien
gactatatttccccaccctgatgatgtgacttt

SEQ ID NO: 560640 - DNA, 33 bp, Homo sapien
gactatatttccccactctgatgatgtgacttt

SEQ ID NO: 560641 - DNA, 33 bp, Homo sapien
ttcaagtgctacttaacaccctgaagtagctgt

SEQ ID NO: 560642 - DNA, 33 bp, Homo sapien
ttcaagtgctacttaataccctgaagtagctgt

SEQ ID NO: 560643 - DNA, 33 bp, Homo sapien
ccatgccctaccttaacataccatgaatgcatt

SEQ ID NO: 560644 - DNA, 33 bp, Homo sapien
ccatgccctaccttaatataccatgaatgcatt

SEQ ID NO: 560645 - DNA, 33 bp, Homo sapien
tctgtagaaagttatcactaggcagttgcttta

SEQ ID NO: 560646 - DNA, 33 bp, Homo sapien
tctgtagaaagttatcgctaggcagttgcttta

SEQ ID NO: 560647 - DNA, 33 bp, Homo sapien
catagatagacataggacagagaagggatataa

SEQ ID NO: 560648 - DNA, 33 bp, Homo sapien
catagatagacataggccagagaagggatataa

SEQ ID NO: 560649 - DNA, 33 bp, Homo sapien
acaacacaaaagaaaaaagagatcttgccttct

SEQ ID NO: 560650 - DNA, 33 bp, Homo sapien
acaacacaaaagaaaagagagatcttgccttct

SEQ ID NO: 560651 - DNA, 33 bp, Homo sapien
atcaaataatgaaatacagagttatgctcccta

SEQ ID NO: 560652 - DNA, 33 bp, Homo sapien
atcaaataatgaaatagagagttatgctcccta

SEQ ID NO: 560653 - DNA, 33 bp, Homo sapien
tagaaaattatgtgctaaaaagtccctttgtat

SEQ ID NO: 560654 - DNA, 33 bp, Homo sapien
tagaaaattatgtgctgaaaagtccctttgtat

SEQ ID NO: 560655 - DNA, 33 bp, Homo sapien
agaaggcaaaatggaacgttttttgagagttta

SEQ ID NO: 560656 - DNA, 33 bp, Homo sapien
agaaggcaaaatggaatgttttttgagagttta

SEQ ID NO: 560657 - DNA, 33 bp, Homo sapien
gaccttgaaccatgtacgctatttgtctagatg

SEQ ID NO: 560658 - DNA, 33 bp, Homo sapien
gaccttgaaccatgtatgctatttgtctagatg

SEQ ID NO: 560659 - DNA, 33 bp, Homo sapien
taagtaaaaaggataacagccaaatcattgcca

SEQ ID NO: 560660 - DNA, 33 bp, Homo sapien
taagtaaaaaggataagagccaaatcattgcca

SEQ ID NO: 560661 - DNA, 33 bp, Homo sapien
aaagatgccatcactaagaaacttgccagtttt

SEQ ID NO: 560662 - DNA, 33 bp, Homo sapien
aaagatgccatcactatgaaacttgccagtttt

SEQ ID NO: 560663 - DNA, 33 bp, Homo sapien
accattctcttagaaaatggaccttaagaaact

SEQ ID NO: 560664 - DNA, 33 bp, Homo sapien
accattctcttagaaactggaccttaagaaact

SEQ ID NO: 560665 - DNA, 33 bp, Homo sapien
ctcctagtgatggataaaactggagcattggaa

SEQ ID NO: 560666 - DNA, 33 bp, Homo sapien
ctcctagtgatggatacaactggagcattggaa

SEQ ID NO: 560667 - DNA, 33 bp, Homo sapien
ctgccaaactgattcagtcaggtaagtattctg

SEQ ID NO: 560668 - DNA, 33 bp, Homo sapien
ctgccaaactgattcattcaggtaagtattctg

SEQ ID NO: 560669 - DNA, 33 bp, Homo sapien
tcaggagatttcaagacacagttagctcaaagg

SEQ ID NO: 560670 - DNA, 33 bp, Homo sapien
tcaggagatttcaagatacagttagctcaaagg

SEQ ID NO: 560671 - DNA, 33 bp, Homo sapien
gtcttcagtgaaacaacagagtccaatattcaa

SEQ ID NO: 560672 - DNA, 33 bp, Homo sapien
gtcttcagtgaaacaatagagtccaatattcaa

SEQ ID NO: 560673 - DNA, 33 bp, Homo sapien
acagattcagattcagaaggttttggacaaagc

SEQ ID NO: 560674 - DNA, 33 bp, Homo sapien
acagattcagattcagcaggttttggacaaagc

SEQ ID NO: 560675 - DNA, 33 bp, Homo sapien
gggccaggcccctcaaagcctgtgtgtgcagga

SEQ ID NO: 560676 - DNA, 33 bp, Homo sapien
gggccaggcccctcaacgcctgtgtgtgcagga

SEQ ID NO: 560677 - DNA, 33 bp, Homo sapien
agggcaggggtgaggaataaaggaacgattctt

SEQ ID NO: 560678 - DNA, 33 bp, Homo sapien
agggcaggggtgaggagtaaaggaacgattctt

SEQ ID NO: 560679 - DNA, 33 bp, Homo sapien
atagaactggcaaaagaagctttatttcaggtg

SEQ ID NO: 560680 - DNA, 33 bp, Homo sapien
atagaactggcaaaagcagctttatttcaggtg

SEQ ID NO: 560681 - DNA, 33 bp, Homo sapien
atttgttgctgtcatccaaatataaaacaggaa

SEQ ID NO: 560682 - DNA, 33 bp, Homo sapien
atttgttgctgtcatctaaatataaaacaggaa

SEQ ID NO: 560683 - DNA, 33 bp, Homo sapien
ggaaagtgtaggaaacccacaaaatcattagtg

SEQ ID NO: 560684 - DNA, 33 bp, Homo sapien
ggaaagtgtaggaaactcacaaaatcattagtg

SEQ ID NO: 560685 - DNA, 33 bp, Homo sapien
gaaagagatcaggaaaaatcaccaatgggcact

SEQ ID NO: 560686 - DNA, 33 bp, Homo sapien
gaaagagatcaggaaacatcaccaatgggcact

SEQ ID NO: 560687 - DNA, 33 bp, Homo sapien
cacactgtggcatatcagagggtagagtgtgag

SEQ ID NO: 560688 - DNA, 33 bp, Homo sapien
cacactgtggcatatcggagggtagagtgtgag

SEQ ID NO: 560689 - DNA, 33 bp, Homo sapien
tgccagtcagctgagaaaaccaagcagtgagaa

SEQ ID NO: 560690 - DNA, 33 bp, Homo sapien
tgccagtcagctgagagaaccaagcagtgagaa

SEQ ID NO: 560691 - DNA, 33 bp, Homo sapien
aattttcaaacactgcaatgataaaaaggggaa

SEQ ID NO: 560692 - DNA, 33 bp, Homo sapien
aattttcaaacactgcgatgataaaaaggggaa

SEQ ID NO: 560693 - DNA, 33 bp, Homo sapien
tgtaagaaacaattccaccaatgctgatattat

SEQ ID NO: 560694 - DNA, 33 bp, Homo sapien
tgtaagaaacaattccgccaatgctgatattat

SEQ ID NO: 560695 - DNA, 33 bp, Homo sapien
agtgatgctgtaccagactgaaaaagagtggca

SEQ ID NO: 560696 - DNA, 33 bp, Homo sapien
agtgatgctgtaccaggctgaaaaagagtggca

SEQ ID NO: 560697 - DNA, 33 bp, Homo sapien
tcaattccaaagggagaatggtataatgaggca

SEQ ID NO: 560698 - DNA, 33 bp, Homo sapien
tcaattccaaagggaggatggtataatgaggca

SEQ ID NO: 560699 - DNA, 33 bp, Homo sapien
tttgtttaccgatataccctcagtgcctacaac

SEQ ID NO: 560700 - DNA, 33 bp, Homo sapien
tttgtttaccgatatatcctcagtgcctacaac

SEQ ID NO: 560701 - DNA, 33 bp, Homo sapien
ttcagtcacagactcaggttttatggcattctc

SEQ ID NO: 560702 - DNA, 33 bp, Homo sapien
ttcagtcacagactcatgttttatggcattctc

SEQ ID NO: 560703 - DNA, 33 bp, Homo sapien
gccccatcagtgaataactttctaaaacattct

SEQ ID NO: 560704 - DNA, 33 bp, Homo sapien
gccccatcagtgaatatctttctaaaacattct

SEQ ID NO: 560705 - DNA, 33 bp, Homo sapien
cttctctttttgtgaacaggatttagcacagat

SEQ ID NO: 560706 - DNA, 33 bp, Homo sapien
cttctctttttgtgaataggatttagcacagat

SEQ ID NO: 560707 - DNA, 33 bp, Homo sapien
agatcatctgcaacaaatcacttgaaggtgtct

SEQ ID NO: 560708 - DNA, 33 bp, Homo sapien
agatcatctgcaacaagtcacttgaaggtgtct

SEQ ID NO: 560709 - DNA, 33 bp, Homo sapien
aagttggatcaagatcaatatgagagctttggg

SEQ ID NO: 560710 - DNA, 33 bp, Homo sapien
aagttggatcaagatctatatgagagctttggg

SEQ ID NO: 560711 - DNA, 33 bp, Homo sapien
gtggcgatcttttgaaaacaccagaatgccatt

SEQ ID NO: 560712 - DNA, 33 bp, Homo sapien
gtggcgatcttttgaagacaccagaatgccatt

SEQ ID NO: 560713 - DNA, 33 bp, Homo sapien
tattagatttagatcacgtttccaatttgtcaa

SEQ ID NO: 560714 - DNA, 33 bp, Homo sapien
tattagatttagatcatgtttccaatttgtcaa

SEQ ID NO: 560715 - DNA, 33 bp, Homo sapien
tttgtgagaatgaacaaagagagagtgagagtt

SEQ ID NO: 560716 - DNA, 33 bp, Homo sapien
tttgtgagaatgaacacagagagagtgagagtt

SEQ ID NO: 560717 - DNA, 33 bp, Homo sapien
cattccagatggacaagccttgaaaagtgacgg

SEQ ID NO: 560718 - DNA, 33 bp, Homo sapien
cattccagatggacaatccttgaaaagtgacgg

SEQ ID NO: 560719 - DNA, 33 bp, Homo sapien
ttggatttcctgtgaacgtacaatcattgtgtg

SEQ ID NO: 560720 - DNA, 33 bp, Homo sapien
ttggatttcctgtgaatgtacaatcattgtgtg

SEQ ID NO: 560721 - DNA, 33 bp, Homo sapien
gcaactctattcttccacagttcaagccaaaat

SEQ ID NO: 560722 - DNA, 33 bp, Homo sapien
gcaactctattcttccgcagttcaagccaaaat

SEQ ID NO: 560723 - DNA, 33 bp, Homo sapien
ccacattcactggaatcacaggaaacccaatat

SEQ ID NO: 560724 - DNA, 33 bp, Homo sapien
ccacattcactggaattacaggaaacccaatat

SEQ ID NO: 560725 - DNA, 33 bp, Homo sapien
aagtttttctcccacaataatgcaaggatgaac

SEQ ID NO: 560726 - DNA, 33 bp, Homo sapien
aagtttttctcccacagtaatgcaaggatgaac

SEQ ID NO: 560727 - DNA, 33 bp, Homo sapien
agtagtgtttctgctacgacagtctagtgttga

SEQ ID NO: 560728 - DNA, 33 bp, Homo sapien
agtagtgtttctgctaggacagtctagtgttga

SEQ ID NO: 560729 - DNA, 33 bp, Homo sapien
taagcagaaacatggacgccatactaaactctg

SEQ ID NO: 560730 - DNA, 33 bp, Homo sapien
taagcagaaacatggatgccatactaaactctg

SEQ ID NO: 560731 - DNA, 33 bp, Homo sapien
atggagtacctaccaaatcccaggcactactgt

SEQ ID NO: 560732 - DNA, 33 bp, Homo sapien
atggagtacctaccaagtcccaggcactactgt

SEQ ID NO: 560733 - DNA, 33 bp, Homo sapien
ttacaacgtttaccaaaatgcatcacaaagctt

SEQ ID NO: 560734 - DNA, 33 bp, Homo sapien
ttacaacgtttaccaatatgcatcacaaagctt

SEQ ID NO: 560735 - DNA, 33 bp, Homo sapien
tcttacaatcatagaaacagataacacactatc

SEQ ID NO: 560736 - DNA, 33 bp, Homo sapien
tcttacaatcatagaatcagataacacactatc

SEQ ID NO: 560737 - DNA, 33 bp, Homo sapien
gggccagatggcctggaattaagtcccggttct

SEQ ID NO: 560738 - DNA, 33 bp, Homo sapien
gggccagatggcctggtattaagtcccggttct

SEQ ID NO: 560739 - DNA, 33 bp, Homo sapien
tgaagctgtaatcctacgcaccttcaacccgtc

SEQ ID NO: 560740 - DNA, 33 bp, Homo sapien
tgaagctgtaatcctatgcaccttcaacccgtc

SEQ ID NO: 560741 - DNA, 33 bp, Homo sapien
gattttttgttcctcagcttcactagtgttatg

SEQ ID NO: 560742 - DNA, 33 bp, Homo sapien
gattttttgttcctcatcttcactagtgttatg

SEQ ID NO: 560743 - DNA, 33 bp, Homo sapien
cacacagggctgagaactgttgtatattctgcc

SEQ ID NO: 560744 - DNA, 33 bp, Homo sapien
cacacagggctgagaattgttgtatattctgcc

SEQ ID NO: 560745 - DNA, 33 bp, Homo sapien
aaccatcttccaaaaaattaccttcaattactg

SEQ ID NO: 560746 - DNA, 33 bp, Homo sapien
aaccatcttccaaaaatttaccttcaattactg

SEQ ID NO: 560747 - DNA, 33 bp, Homo sapien
catatacagtgtcatacgctgtcagtggaatta

SEQ ID NO: 560748 - DNA, 33 bp, Homo sapien
catatacagtgtcatatgctgtcagtggaatta

SEQ ID NO: 560749 - DNA, 33 bp, Homo sapien
ggcataatcctatgaacctcagctttccaatgt

SEQ ID NO: 560750 - DNA, 33 bp, Homo sapien
ggcataatcctatgaatctcagctttccaatgt

SEQ ID NO: 560751 - DNA, 33 bp, Homo sapien
gactctagtaacaagacgatagtgtaaatattt

SEQ ID NO: 560752 - DNA, 33 bp, Homo sapien
gactctagtaacaagatgatagtgtaaatattt

SEQ ID NO: 560753 - DNA, 33 bp, Homo sapien
caaagctccttcagcaatccgcagagttccctg

SEQ ID NO: 560754 - DNA, 33 bp, Homo sapien
caaagctccttcagcagtccgcagagttccctg

SEQ ID NO: 560755 - DNA, 33 bp, Homo sapien
tgaatctgtgacacaacataaatcactgtgtaa

SEQ ID NO: 560756 - DNA, 33 bp, Homo sapien
tgaatctgtgacacaatataaatcactgtgtaa

SEQ ID NO: 560757 - DNA, 33 bp, Homo sapien
aatctactgaattagcaaagtccaagcaaagta

SEQ ID NO: 560758 - DNA, 33 bp, Homo sapien
aatctactgaattagcgaagtccaagcaaagta

SEQ ID NO: 560759 - DNA, 33 bp, Homo sapien
caagcagcagcaggacaaaattacaccttttat

SEQ ID NO: 560760 - DNA, 33 bp, Homo sapien
caagcagcagcaggactaaattacaccttttat

SEQ ID NO: 560761 - DNA, 33 bp, Homo sapien
ttgcaaacgaaatctggcacaaaatatacagga

SEQ ID NO: 560762 - DNA, 33 bp, Homo sapien
ttgcaaacgaaatctgtcacaaaatatacagga

SEQ ID NO: 560763 - DNA, 33 bp, Homo sapien
atactttgatgctaacaaaacatttttataata

SEQ ID NO: 560764 - DNA, 33 bp, Homo sapien
atactttgatgctaacgaaacatttttataata

SEQ ID NO: 560765 - DNA, 33 bp, Homo sapien
ggaggtaggtcagagaataaccttttctaggtt

SEQ ID NO: 560766 - DNA, 33 bp, Homo sapien
ggaggtaggtcagagagtaaccttttctaggtt

SEQ ID NO: 560767 - DNA, 33 bp, Homo sapien
tgaggaagaattgtcaataacaagttcatcatg

SEQ ID NO: 560768 - DNA, 33 bp, Homo sapien
tgaggaagaattgtcagtaacaagttcatcatg

SEQ ID NO: 560769 - DNA, 33 bp, Homo sapien
gtaaaggatttggcagaacatttgaggcccggg

SEQ ID NO: 560770 - DNA, 33 bp, Homo sapien
gtaaaggatttggcagcacatttgaggcccggg

SEQ ID NO: 560771 - DNA, 33 bp, Homo sapien
aagcatttagtcaaaaaactcatcagtctagtt

SEQ ID NO: 560772 - DNA, 33 bp, Homo sapien
aagcatttagtcaaaacactcatcagtctagtt

SEQ ID NO: 560773 - DNA, 33 bp, Homo sapien
gcctaagttcatcacaaagagttatgtggttac

SEQ ID NO: 560774 - DNA, 33 bp, Homo sapien
gcctaagttcatcacagagagttatgtggttac

SEQ ID NO: 560775 - DNA, 33 bp, Homo sapien
aaaatggagggaattaaattgacatactacatg

SEQ ID NO: 560776 - DNA, 33 bp, Homo sapien
aaaatggagggaattagattgacatactacatg

SEQ ID NO: 560777 - DNA, 33 bp, Homo sapien
aaatgttcattaagcacctactgtctgccagtt

SEQ ID NO: 560778 - DNA, 33 bp, Homo sapien
aaatgttcattaagcatctactgtctgccagtt

SEQ ID NO: 560779 - DNA, 33 bp, Homo sapien
ttctctggacatcaaaattctcatttagaacaa

SEQ ID NO: 560780 - DNA, 33 bp, Homo sapien
ttctctggacatcaaagttctcatttagaacaa

SEQ ID NO: 560781 - DNA, 33 bp, Homo sapien
cacggcattgtaatgaggctaagcttcctgagc

SEQ ID NO: 560782 - DNA, 33 bp, Homo sapien
cacggcattgtaatgatgctaagcttcctgagc

SEQ ID NO: 560783 - DNA, 33 bp, Homo sapien
ggcaagaattgcaagaactaaggcaggaaccat

SEQ ID NO: 560784 - DNA, 33 bp, Homo sapien
ggcaagaattgcaagagctaaggcaggaaccat

SEQ ID NO: 560785 - DNA, 33 bp, Homo sapien
tgcagtcatattgtccccaaatcccatctgcag

SEQ ID NO: 560786 - DNA, 33 bp, Homo sapien
tgcagtcatattgtcctcaaatcccatctgcag

SEQ ID NO: 560787 - DNA, 33 bp, Homo sapien
agcacatgtaataaaacaagcctgcctatcatg

SEQ ID NO: 560788 - DNA, 33 bp, Homo sapien
agcacatgtaataaaagaagcctgcctatcatg

SEQ ID NO: 560789 - DNA, 33 bp, Homo sapien
attgtcaacccatgcacgtagcattttctatac

SEQ ID NO: 560790 - DNA, 33 bp, Homo sapien
attgtcaacccatgcaggtagcattttctatac

SEQ ID NO: 560791 - DNA, 33 bp, Homo sapien
gaaatttagacttaacaaaaacatgtggggact

SEQ ID NO: 560792 - DNA, 33 bp, Homo sapien
gaaatttagacttaacgaaaacatgtggggact

SEQ ID NO: 560793 - DNA, 33 bp, Homo sapien
tgatgatctttggagacgattttagaggcaaag

SEQ ID NO: 560794 - DNA, 33 bp, Homo sapien
tgatgatctttggagatgattttagaggcaaag

SEQ ID NO: 560795 - DNA, 33 bp, Homo sapien
tcaggtaagtaacttcccatttttcatttgtac

SEQ ID NO: 560796 - DNA, 33 bp, Homo sapien
tcaggtaagtaacttcgcatttttcatttgtac

SEQ ID NO: 560797 - DNA, 33 bp, Homo sapien
ttgcggagtgtaatggaatctataaggcttggg

SEQ ID NO: 560798 - DNA, 33 bp, Homo sapien
ttgcggagtgtaatggcatctataaggcttggg

SEQ ID NO: 560799 - DNA, 33 bp, Homo sapien
caaaaatatgttactacaaagcagccaaccaca

SEQ ID NO: 560800 - DNA, 33 bp, Homo sapien
caaaaatatgttactataaagcagccaaccaca

SEQ ID NO: 560801 - DNA, 33 bp, Homo sapien
cctataattgatgatgacaagaataagaatatt

SEQ ID NO: 560802 - DNA, 33 bp, Homo sapien
cctataattgatgatggcaagaataagaatatt

SEQ ID NO: 560803 - DNA, 33 bp, Homo sapien
gaaatcaaagagtaaacgaatgaattagtgaat

SEQ ID NO: 560804 - DNA, 33 bp, Homo sapien
gaaatcaaagagtaaatgaatgaattagtgaat

SEQ ID NO: 560805 - DNA, 33 bp, Homo sapien
tgcatggtgtacaggaaaaatgaacagaactgg

SEQ ID NO: 560806 - DNA, 33 bp, Homo sapien
tgcatggtgtacaggacaaatgaacagaactgg

SEQ ID NO: 560807 - DNA, 33 bp, Homo sapien
ttctatgatttccaaaacagttctatcttcagc

SEQ ID NO: 560808 - DNA, 33 bp, Homo sapien
ttctatgatttccaaagcagttctatcttcagc

SEQ ID NO: 560809 - DNA, 33 bp, Homo sapien
gattggttttagtgaaagaagaaaatagggtgt

SEQ ID NO: 560810 - DNA, 33 bp, Homo sapien
gattggttttagtgaacgaagaaaatagggtgt

SEQ ID NO: 560811 - DNA, 33 bp, Homo sapien
atctgtttctgctccaatgactcccatagacag

SEQ ID NO: 560812 - DNA, 33 bp, Homo sapien
atctgtttctgctccagtgactcccatagacag

SEQ ID NO: 560813 - DNA, 33 bp, Homo sapien
agcttccccttgcaccccctataatgacattga

SEQ ID NO: 560814 - DNA, 33 bp, Homo sapien
agcttccccttgcacctcctataatgacattga

SEQ ID NO: 560815 - DNA, 33 bp, Homo sapien
atcgactcaatacataagagtttgttttgaatc

SEQ ID NO: 560816 - DNA, 33 bp, Homo sapien
atcgactcaatacataggagtttgttttgaatc

SEQ ID NO: 560817 - DNA, 33 bp, Homo sapien
tattgagtcgataatacattcaaagcattatat

SEQ ID NO: 560818 - DNA, 33 bp, Homo sapien
tattgagtcgataatatattcaaagcattatat

SEQ ID NO: 560819 - DNA, 33 bp, Homo sapien
gttgccttgccaagtagaattaagaaaattcag

SEQ ID NO: 560820 - DNA, 33 bp, Homo sapien
gttgccttgccaagtataattaagaaaattcag

SEQ ID NO: 560821 - DNA, 33 bp, Homo sapien
tgtgatttttattctccctcaaacatctcagca

SEQ ID NO: 560822 - DNA, 33 bp, Homo sapien
tgtgatttttattctctctcaaacatctcagca

SEQ ID NO: 560823 - DNA, 33 bp, Homo sapien
tcataagtgaacaatacaattcaatggagaaat

SEQ ID NO: 560824 - DNA, 33 bp, Homo sapien
tcataagtgaacaatataattcaatggagaaat

SEQ ID NO: 560825 - DNA, 33 bp, Homo sapien
ctacttgatctttcaacaaagcatggccttgca

SEQ ID NO: 560826 - DNA, 33 bp, Homo sapien
ctacttgatctttcaataaagcatggccttgca

SEQ ID NO: 560827 - DNA, 33 bp, Homo sapien
ggtgccaggggcataccggttctgctgtagaac

SEQ ID NO: 560828 - DNA, 33 bp, Homo sapien
ggtgccaggggcatactggttctgctgtagaac

SEQ ID NO: 560829 - DNA, 33 bp, Homo sapien
agttgcttaagggagaaagcgaataaataaatg

SEQ ID NO: 560830 - DNA, 33 bp, Homo sapien
agttgcttaagggagagagcgaataaataaatg

SEQ ID NO: 560831 - DNA, 33 bp, Homo sapien
ctgctgaagtatcaaaagcacttattcaaacac

SEQ ID NO: 560832 - DNA, 33 bp, Homo sapien
ctgctgaagtatcaaacgcacttattcaaacac

SEQ ID NO: 560833 - DNA, 33 bp, Homo sapien
cttttcctgctattacactctaatctcctgtag

SEQ ID NO: 560834 - DNA, 33 bp, Homo sapien
cttttcctgctattacgctctaatctcctgtag

SEQ ID NO: 560835 - DNA, 33 bp, Homo sapien
tctcattgactactcacaaatattttattagta

SEQ ID NO: 560836 - DNA, 33 bp, Homo sapien
tctcattgactactcagaaatattttattagta

SEQ ID NO: 560837 - DNA, 33 bp, Homo sapien
tttgaaactgaggacaaatgctttaaggagaat

SEQ ID NO: 560838 - DNA, 33 bp, Homo sapien
tttgaaactgaggacacatgctttaaggagaat

SEQ ID NO: 560839 - DNA, 33 bp, Homo sapien
tgtttgataagtgcaacgccaaattctctctgg

SEQ ID NO: 560840 - DNA, 33 bp, Homo sapien
tgtttgataagtgcaatgccaaattctctctgg

SEQ ID NO: 560841 - DNA, 33 bp, Homo sapien
ggtcttccgattgttacaggcaacagaagagat

SEQ ID NO: 560842 - DNA, 33 bp, Homo sapien
ggtcttccgattgttataggcaacagaagagat

SEQ ID NO: 560843 - DNA, 33 bp, Homo sapien
ccagggtcacaaagaagcttattacattgaaag

SEQ ID NO: 560844 - DNA, 33 bp, Homo sapien
ccagggtcacaaagaatcttattacattgaaag

SEQ ID NO: 560845 - DNA, 33 bp, Homo sapien
cataaacatgatattacctactcacacttgtta

SEQ ID NO: 560846 - DNA, 33 bp, Homo sapien
cataaacatgatattatctactcacacttgtta

SEQ ID NO: 560847 - DNA, 33 bp, Homo sapien
gcagaaaatttgattcaaactgacttgagcaat

SEQ ID NO: 560848 - DNA, 33 bp, Homo sapien
gcagaaaatttgattccaactgacttgagcaat

SEQ ID NO: 560849 - DNA, 33 bp, Homo sapien
gttggcaaccatgcggacaaattggaacttgca

SEQ ID NO: 560850 - DNA, 33 bp, Homo sapien
gttggcaaccatgcgggcaaattggaacttgca

SEQ ID NO: 560851 - DNA, 33 bp, Homo sapien
cttctctcagcctgccccattagcttctccaca

SEQ ID NO: 560852 - DNA, 33 bp, Homo sapien
cttctctcagcctgcctcattagcttctccaca

SEQ ID NO: 560853 - DNA, 33 bp, Homo sapien
atagtgcctgcctttgaaaaaagatggggttag

SEQ ID NO: 560854 - DNA, 33 bp, Homo sapien
atagtgcctgcctttggaaaaagatggggttag

SEQ ID NO: 560855 - DNA, 33 bp, Homo sapien; identical to SEQ ID NO: 560853

SEQ ID NO: 560856 - DNA, 33 bp, Homo sapien; identical to SEQ ID NO: 560854

SEQ ID NO: 560857 - DNA, 33 bp, Homo sapien
tgaggttgagaaaggcaatattccacaagggtc

SEQ ID NO: 560858 - DNA, 33 bp, Homo sapien
tgaggttgagaaaggctatattccacaagggtc

SEQ ID NO: 560859 - DNA, 33 bp, Homo sapien
atttcatttttataagcatggatgagcagatga

SEQ ID NO: 560860 - DNA, 33 bp, Homo sapien
atttcatttttataaggatggatgagcagatga

SEQ ID NO: 560861 - DNA, 33 bp, Homo sapien
aaaatacaatttacacaacttacaaccatttca

SEQ ID NO: 560862 - DNA, 33 bp, Homo sapien
aaaatacaatttacacgacttacaaccatttca

SEQ ID NO: 560863 - DNA, 33 bp, Homo sapien
aataatttcagggtaactgtttttacgagcacc

SEQ ID NO: 560864 - DNA, 33 bp, Homo sapien
aataatttcagggtaattgtttttacgagcacc

SEQ ID NO: 560865 - DNA, 33 bp, Homo sapien
tagctgtaattttctgaagattttacccatgtc

SEQ ID NO: 560866 - DNA, 33 bp, Homo sapien
tagctgtaattttctgtagattttacccatgtc

SEQ ID NO: 560867 - DNA, 33 bp, Homo sapien
tctggcagcattgaaaaaaaagtggcaaagaat

SEQ ID NO: 560868 - DNA, 33 bp, Homo sapien
tctggcagcattgaaacaaaagtggcaaagaat

SEQ ID NO: 560869 - DNA, 33 bp, Homo sapien
gaagaccatggagaagcatcaagacttgggaag

SEQ ID NO: 560870 - DNA, 33 bp, Homo sapien
gaagaccatggagaaggatcaagacttgggaag

SEQ ID NO: 560871 - DNA, 33 bp, Homo sapien
tgaaccttaaagaagcggagaacacaagaagac

SEQ ID NO: 560872 - DNA, 33 bp, Homo sapien
tgaaccttaaagaagctgagaacacaagaagac

SEQ ID NO: 560873 - DNA, 33 bp, Homo sapien
cttttggcttattttaccaccatctcagtcata

SEQ ID NO: 560874 - DNA, 33 bp, Homo sapien
cttttggcttattttatcaccatctcagtcata

SEQ ID NO: 560875 - DNA, 33 bp, Homo sapien
tttctgcttttccaaactgaagttcatcaggga

SEQ ID NO: 560876 - DNA, 33 bp, Homo sapien
tttctgcttttccaaattgaagttcatcaggga

SEQ ID NO: 560877 - DNA, 33 bp, Homo sapien
acaaggaattgtcatacaacaataagatgattc

SEQ ID NO: 560878 - DNA, 33 bp, Homo sapien
acaaggaattgtcatagaacaataagatgattc

SEQ ID NO: 560879 - DNA, 33 bp, Homo sapien
atggcagacaggattgcagcctaaagtctatgt

SEQ ID NO: 560880 - DNA, 33 bp, Homo sapien
atggcagacaggattgtagcctaaagtctatgt

SEQ ID NO: 560881 - DNA, 33 bp, Homo sapien
tacacaggtgcaataaagtccaagttgttaacc

SEQ ID NO: 560882 - DNA, 33 bp, Homo sapien
tacacaggtgcaataaggtccaagttgttaacc

SEQ ID NO: 560883 - DNA, 33 bp, Homo sapien
tattataagtaaatgacagataagtcaacagtg

SEQ ID NO: 560884 - DNA, 33 bp, Homo sapien
tattataagtaaatgagagataagtcaacagtg

SEQ ID NO: 560885 - DNA, 33 bp, Homo sapien
tcttaaattggggtgactcaaggggatacatga

SEQ ID NO: 560886 - DNA, 33 bp, Homo sapien
tcttaaattggggtgagtcaaggggatacatga

SEQ ID NO: 560887 - DNA, 33 bp, Homo sapien
tccccacaaaatcctcaagtgatagttaacatt

SEQ ID NO: 560888 - DNA, 33 bp, Homo sapien
tccccacaaaatcctccagtgatagttaacatt

SEQ ID NO: 560889 - DNA, 33 bp, Homo sapien
tctcatactcagttccggcaatattagtcattt

SEQ ID NO: 560890 - DNA, 33 bp, Homo sapien
tctcatactcagttcctgcaatattagtcattt

SEQ ID NO: 560891 - DNA, 33 bp, Homo sapien
aatacacatttatcacaaggaaatctgaagatg

SEQ ID NO: 560892 - DNA, 33 bp, Homo sapien
aatacacatttatcaccaggaaatctgaagatg

SEQ ID NO: 560893 - DNA, 33 bp, Homo sapien
ttacttcattgctaaaacccaaacatatacacc

SEQ ID NO: 560894 - DNA, 33 bp, Homo sapien
ttacttcattgctaaagcccaaacatatacacc

SEQ ID NO: 560895 - DNA, 33 bp, Homo sapien
tcaaatagtattgtcacgggatctatggagtgt

SEQ ID NO: 560896 - DNA, 33 bp, Homo sapien
tcaaatagtattgtcatgggatctatggagtgt

SEQ ID NO: 560897 - DNA, 33 bp, Homo sapien
cacagtatagcaggggaaaattgaacagctgaa

SEQ ID NO: 560898 - DNA, 33 bp, Homo sapien
cacagtatagcaggggcaaattgaacagctgaa

SEQ ID NO: 560899 - DNA, 33 bp, Homo sapien
atgaaaaacagcccaaatgcacaataaaaacat

SEQ ID NO: 560900 - DNA, 33 bp, Homo sapien
atgaaaaacagcccaagtgcacaataaaaacat

SEQ ID NO: 560901 - DNA, 33 bp, Homo sapien
agacaaagttcagggcactccagaaaaaaaagg

SEQ ID NO: 560902 - DNA, 33 bp, Homo sapien
agacaaagttcagggcgctccagaaaaaaaagg

SEQ ID NO: 560903 - DNA, 33 bp, Homo sapien
aaacaaacacagctacaagtgaaatttttcatg

SEQ ID NO: 560904 - DNA, 33 bp, Homo sapien
aaacaaacacagctacgagtgaaatttttcatg

SEQ ID NO: 560905 - DNA, 33 bp, Homo sapien
ataagcataatacttagcacaattcctggcagt

SEQ ID NO: 560906 - DNA, 33 bp, Homo sapien
ataagcataatacttatcacaattcctggcagt

SEQ ID NO: 560907 - DNA, 33 bp, Homo sapien
gtgctagaaagttataaaatggcacaaggcatg

SEQ ID NO: 560908 - DNA, 33 bp, Homo sapien
gtgctagaaagttatagaatggcacaaggcatg

SEQ ID NO: 560909 - DNA, 33 bp, Homo sapien
actgggagtacataaagaattcactaggaagct

SEQ ID NO: 560910 - DNA, 33 bp, Homo sapien
actgggagtacataaataattcactaggaagct

SEQ ID NO: 560911 - DNA, 33 bp, Homo sapien
cactagggataacaaactgaagacaagtaagga

SEQ ID NO: 560912 - DNA, 33 bp, Homo sapien
cactagggataacaaattgaagacaagtaagga

SEQ ID NO: 560913 - DNA, 33 bp, Homo sapien
aacatggagtaagtcacgtccataaaggtgaag

SEQ ID NO: 560914 - DNA, 33 bp, Homo sapien
aacatggagtaagtcaggtccataaaggtgaag

SEQ ID NO: 560915 - DNA, 33 bp, Homo sapien
atttaccacgtgcataaatgggataggaataca

SEQ ID NO: 560916 - DNA, 33 bp, Homo sapien
atttaccacgtgcatacatgggataggaataca

SEQ ID NO: 560917 - DNA, 33 bp, Homo sapien
ccacacaacaaacttgacaagcagatattatcc

SEQ ID NO: 560918 - DNA, 33 bp, Homo sapien
ccacacaacaaacttggcaagcagatattatcc

SEQ ID NO: 560919 - DNA, 33 bp, Homo sapien
atgcagaattccaaaactgcttgattgccacaa

SEQ ID NO: 560920 - DNA, 33 bp, Homo sapien
atgcagaattccaaaattgcttgattgccacaa

SEQ ID NO: 560921 - DNA, 33 bp, Homo sapien
tctgaggagatcttacaaaacgtgaatgtaggg

SEQ ID NO: 560922 - DNA, 33 bp, Homo sapien
tctgaggagatcttacgaaacgtgaatgtaggg

SEQ ID NO: 560923 - DNA, 33 bp, Homo sapien
agttaaagttttttcaagatctcataatcctaa

SEQ ID NO: 560924 - DNA, 33 bp, Homo sapien
agttaaagttttttcaggatctcataatcctaa

SEQ ID NO: 560925 - DNA, 33 bp, Homo sapien
attctcaggaaaatcactattggtttctacaac

SEQ ID NO: 560926 - DNA, 33 bp, Homo sapien
attctcaggaaaatcattattggtttctacaac

SEQ ID NO: 560927 - DNA, 33 bp, Homo sapien
tataatggatcaagaaagacactacatcactgc

SEQ ID NO: 560928 - DNA, 33 bp, Homo sapien
tataatggatcaagaaggacactacatcactgc

SEQ ID NO: 560929 - DNA, 33 bp, Homo sapien
agctttagagctcccaatagggtcaccagatgc

SEQ ID NO: 560930 - DNA, 33 bp, Homo sapien
agctttagagctcccagtagggtcaccagatgc

SEQ ID NO: 560931 - DNA, 33 bp, Homo sapien
gctgagatgattgtttaaaaatggttccaagtt

SEQ ID NO: 560932 - DNA, 33 bp, Homo sapien
gctgagatgattgtttcaaaatggttccaagtt

SEQ ID NO: 560933 - DNA, 33 bp, Homo sapien
aggctgcacccaggaacgaatgtgatcttggaa

SEQ ID NO: 560934 - DNA, 33 bp, Homo sapien
aggctgcacccaggaaggaatgtgatcttggaa

SEQ ID NO: 560935 - DNA, 33 bp, Homo sapien
tggaagctcaccccagaactctaggcaaagcca

SEQ ID NO: 560936 - DNA, 33 bp, Homo sapien
tggaagctcaccccaggactctaggcaaagcca

SEQ ID NO: 560937 - DNA, 33 bp, Homo sapien
ggtgctagctatgcaaaagggagatctcgaaca

SEQ ID NO: 560938 - DNA, 33 bp, Homo sapien
ggtgctagctatgcaagagggagatctcgaaca

SEQ ID NO: 560939 - DNA, 33 bp, Homo sapien
agtagagaagacagtaacacagaagctcttggg

SEQ ID NO: 560940 - DNA, 33 bp, Homo sapien
agtagagaagacagtaccacagaagctcttggg

SEQ ID NO: 560941 - DNA, 33 bp, Homo sapien
cacagccttttgtacacagcttttatgtggcaa

SEQ ID NO: 560942 - DNA, 33 bp, Homo sapien
cacagccttttgtacatagcttttatgtggcaa

SEQ ID NO: 560943 - DNA, 33 bp, Homo sapien
ggctcccagtattaaacgatttgataaaagggc

SEQ ID NO: 560944 - DNA, 33 bp, Homo sapien
ggctcccagtattaaatgatttgataaaagggc

SEQ ID NO: 560945 - DNA, 33 bp, Homo sapien
agctatcattgttccaaaggttgatttctgatt

SEQ ID NO: 560946 - DNA, 33 bp, Homo sapien
agctatcattgttccacaggttgatttctgatt

SEQ ID NO: 560947 - DNA, 33 bp, Homo sapien
aggcttatcttagtgacggatagtgcaggaagg

SEQ ID NO: 560948 - DNA, 33 bp, Homo sapien
aggcttatcttagtgatggatagtgcaggaagg

SEQ ID NO: 560949 - DNA, 33 bp, Homo sapien
taaggaatgggtggacagaaggccaagagagga

SEQ ID NO: 560950 - DNA, 33 bp, Homo sapien
taaggaatgggtggactgaaggccaagagagga

SEQ ID NO: 560951 - DNA, 33 bp, Homo sapien
tacagttgaatggaagaattaaaccaagaaaaa

SEQ ID NO: 560952 - DNA, 33 bp, Homo sapien
tacagttgaatggaagcattaaaccaagaaaaa

SEQ ID NO: 560953 - DNA, 33 bp, Homo sapien
ctctttttcaaagccacatcaacacattctctt

SEQ ID NO: 560954 - DNA, 33 bp, Homo sapien
ctctttttcaaagccagatcaacacattctctt

SEQ ID NO: 560955 - DNA, 33 bp, Homo sapien
tctaaaaatacaagcccgctgtaacaattggat

SEQ ID NO: 560956 - DNA, 33 bp, Homo sapien
tctaaaaatacaagcctgctgtaacaattggat

SEQ ID NO: 560957 - DNA, 33 bp, Homo sapien
agagaatttactagcaaagagggccatactgga

SEQ ID NO: 560958 - DNA, 33 bp, Homo sapien
agagaatttactagcatagagggccatactgga

SEQ ID NO: 560959 - DNA, 33 bp, Homo sapien
aataactgcctattgccctttctctcctggcgc

SEQ ID NO: 560960 - DNA, 33 bp, Homo sapien
aataactgcctattgctctttctctcctggcgc

SEQ ID NO: 560961 - DNA, 33 bp, Homo sapien
ccagcacacagggaagccctttcttctcttcct

SEQ ID NO: 560962 - DNA, 33 bp, Homo sapien
ccagcacacagggaagtcctttcttctcttcct

SEQ ID NO: 560963 - DNA, 33 bp, Homo sapien
tgtgtagagatatggacgagttttaatgggtac

SEQ ID NO: 560964 - DNA, 33 bp, Homo sapien
tgtgtagagatatggatgagttttaatgggtac

SEQ ID NO: 560965 - DNA, 33 bp, Homo sapien
gtttatgtgatcaaagacattcaggggaaatat

SEQ ID NO: 560966 - DNA, 33 bp, Homo sapien
gtttatgtgatcaaaggcattcaggggaaatat

SEQ ID NO: 560967 - DNA, 33 bp, Homo sapien
aatcatcaggttttcaaaaatgtcctttaacat

SEQ ID NO: 560968 - DNA, 33 bp, Homo sapien
aatcatcaggttttcataaatgtcctttaacat

SEQ ID NO: 560969 - DNA, 33 bp, Homo sapien
aagtcattctctataacattgtggaatcgctag

SEQ ID NO: 560970 - DNA, 33 bp, Homo sapien
aagtcattctctataatattgtggaatcgctag

SEQ ID NO: 560971 - DNA, 33 bp, Homo sapien
tgaaaataagagaaaactctgacacaatctgat

SEQ ID NO: 560972 - DNA, 33 bp, Homo sapien
tgaaaataagagaaaattctgacacaatctgat

SEQ ID NO: 560973 - DNA, 33 bp, Homo sapien
atgacaatcatcacagaaggctgtgttagaaat

SEQ ID NO: 560974 - DNA, 33 bp, Homo sapien
atgacaatcatcacagtaggctgtgttagaaat

SEQ ID NO: 560975 - DNA, 33 bp, Homo sapien
ggcaaaagatgggtcaaagagatagcacaaaat

SEQ ID NO: 560976 - DNA, 33 bp, Homo sapien
ggcaaaagatgggtcagagagatagcacaaaat

SEQ ID NO: 560977 - DNA, 33 bp, Homo sapien
atacataaacacattgaaaaggaagagagcaac

SEQ ID NO: 560978 - DNA, 33 bp, Homo sapien
atacataaacacattgtaaaggaagagagcaac

SEQ ID NO: 560979 - DNA, 33 bp, Homo sapien
gagtctagggcaaaagactagtagggcctgatc

SEQ ID NO: 560980 - DNA, 33 bp, Homo sapien
gagtctagggcaaaaggctagtagggcctgatc

SEQ ID NO: 560981 - DNA, 33 bp, Homo sapien
gtatccttggtcgtaacctaacagaagctaata

SEQ ID NO: 560982 - DNA, 33 bp, Homo sapien
gtatccttggtcgtaatctaacagaagctaata

SEQ ID NO: 560983 - DNA, 33 bp, Homo sapien
tgtgagctctgaggcccagtttttttcgtatag

SEQ ID NO: 560984 - DNA, 33 bp, Homo sapien
tgtgagctctgaggccgagtttttttcgtatag

SEQ ID NO: 560985 - DNA, 33 bp, Homo sapien
agttagtgagttattcaatctgacctgtaatag

SEQ ID NO: 560986 - DNA, 33 bp, Homo sapien
agttagtgagttattccatctgacctgtaatag

SEQ ID NO: 560987 - DNA, 33 bp, Homo sapien
tttttatttgactttcaattgtgattttctttt

SEQ ID NO: 560988 - DNA, 33 bp, Homo sapien
tttttatttgactttcgattgtgattttctttt

SEQ ID NO: 560989 - DNA, 33 bp, Homo sapien
cataatggtccatgtgaagcagagtgtagaaac

SEQ ID NO: 560990 - DNA, 33 bp, Homo sapien
cataatggtccatgtgcagcagagtgtagaaac

SEQ ID NO: 560991 - DNA, 33 bp, Homo sapien
tatagatattttgatacgtgttttagcaatttg

SEQ ID NO: 560992 - DNA, 33 bp, Homo sapien
tatagatattttgatatgtgttttagcaatttg

SEQ ID NO: 560993 - DNA, 33 bp, Homo sapien
tatttgcttgactgtaagctataaatacaatta

SEQ ID NO: 560994 - DNA, 33 bp, Homo sapien
tatttgcttgactgtatgctataaatacaatta

SEQ ID NO: 560995 - DNA, 33 bp, Homo sapien
cttaatcagagtaaaacgtgattctttccaaca

SEQ ID NO: 560996 - DNA, 33 bp, Homo sapien
cttaatcagagtaaaatgtgattctttccaaca

SEQ ID NO: 560997 - DNA, 33 bp, Homo sapien
cttcctttaactgcaaccaggttaaatttttaa

SEQ ID NO: 560998 - DNA, 33 bp, Homo sapien
cttcctttaactgcaatcaggttaaatttttaa

SEQ ID NO: 560999 - DNA, 33 bp, Homo sapien
aaaatagaatctctcccatcaggaaccattata

SEQ ID NO: 561000 - DNA, 33 bp, Homo sapien
aaaatagaatctctcctatcaggaaccattata

SEQ ID NO: 561001 - DNA, 33 bp, Homo sapien
aattgttctgggtaaactggcttcccacttact

SEQ ID NO: 561002 - DNA, 33 bp, Homo sapien
aattgttctgggtaaattggcttcccacttact

SEQ ID NO: 561003 - DNA, 33 bp, Homo sapien
aaactatacgtgttcacacaaaaaataaaataa

SEQ ID NO: 561004 - DNA, 33 bp, Homo sapien
aaactatacgtgttcatacaaaaaataaaataa

SEQ ID NO: 561005 - DNA, 33 bp, Homo sapien
actacagtcactgaaaatttaaatctggagtag

SEQ ID NO: 561006 - DNA, 33 bp, Homo sapien
actacagtcactgaaagtttaaatctggagtag

SEQ ID NO: 561007 - DNA, 33 bp, Homo sapien
gtcctccaatccacaaacattgtatatttatgt

SEQ ID NO: 561008 - DNA, 33 bp, Homo sapien
gtcctccaatccacaagcattgtatatttatgt

SEQ ID NO: 561009 - DNA, 33 bp, Homo sapien
actattgagttagagccgaacaaaatagtttga

SEQ ID NO: 561010 - DNA, 33 bp, Homo sapien
actattgagttagagctgaacaaaatagtttga

SEQ ID NO: 561011 - DNA, 33 bp, Homo sapien
gttctgctctatgctaacattaacttctcacct

SEQ ID NO: 561012 - DNA, 33 bp, Homo sapien
gttctgctctatgctaccattaacttctcacct

SEQ ID NO: 561013 - DNA, 33 bp, Homo sapien
agcaatgaccaggaacaacgctggctgactcac

SEQ ID NO: 561014 - DNA, 33 bp, Homo sapien
agcaatgaccaggaaccacgctggctgactcac

SEQ ID NO: 561015 - DNA, 33 bp, Homo sapien
ttacctgagttgccgacggtgaatgtaatctca

SEQ ID NO: 561016 - DNA, 33 bp, Homo sapien
ttacctgagttgccgatggtgaatgtaatctca

SEQ ID NO: 561017 - DNA, 33 bp, Homo sapien
tatacatgtttgttaacaaattaccgagcctga

SEQ ID NO: 561018 - DNA, 33 bp, Homo sapien
tatacatgtttgttaataaattaccgagcctga

SEQ ID NO: 561019 - DNA, 33 bp, Homo sapien
ttgaaggttctccagaagcaagaggaagttaaa

SEQ ID NO: 561020 - DNA, 33 bp, Homo sapien
ttgaaggttctccagaggcaagaggaagttaaa

SEQ ID NO: 561021 - DNA, 33 bp, Homo sapien
ggcattattattttcacgtatacggatacctga

SEQ ID NO: 561022 - DNA, 33 bp, Homo sapien
ggcattattattttcatgtatacggatacctga

SEQ ID NO: 561023 - DNA, 33 bp, Homo sapien
atcatctaaacttctcaaggtacagggagttcc

SEQ ID NO: 561024 - DNA, 33 bp, Homo sapien
atcatctaaacttctccaggtacagggagttcc

SEQ ID NO: 561025 - DNA, 33 bp, Homo sapien
gatgaatacttttagccgccactagttctgcta

SEQ ID NO: 561026 - DNA, 33 bp, Homo sapien
gatgaatacttttagctgccactagttctgcta

SEQ ID NO: 561027 - DNA, 33 bp, Homo sapien
ttataagaagagacaccaggaagattatctctt

SEQ ID NO: 561028 - DNA, 33 bp, Homo sapien
ttataagaagagacacgaggaagattatctctt

SEQ ID NO: 561029 - DNA, 33 bp, Homo sapien
aatttgttatgcatcccgaaccgagtaagacac

SEQ ID NO: 561030 - DNA, 33 bp, Homo sapien
aatttgttatgcatcctgaaccgagtaagacac

SEQ ID NO: 561031 - DNA, 33 bp, Homo sapien
gctcttctttccaccacgtgagaatacaaggat

SEQ ID NO: 561032 - DNA, 33 bp, Homo sapien
gctcttctttccaccatgtgagaatacaaggat

SEQ ID NO: 561033 - DNA, 33 bp, Homo sapien
tcaacatgttgggctacaaaagtatttcccact

SEQ ID NO: 561034 - DNA, 33 bp, Homo sapien
tcaacatgttgggctataaaagtatttcccact

SEQ ID NO: 561035 - DNA, 33 bp, Homo sapien
tgctggtaaatgtttaaagactggctgtcaaaa

SEQ ID NO: 561036 - DNA, 33 bp, Homo sapien
tgctggtaaatgtttagagactggctgtcaaaa

SEQ ID NO: 561037 - DNA, 33 bp, Homo sapien
tggctctctaactgaacaagttcttgagtttcc

SEQ ID NO: 561038 - DNA, 33 bp, Homo sapien
tggctctctaactgaataagttcttgagtttcc

SEQ ID NO: 561039 - DNA, 33 bp, Homo sapien
cacagagttgcacaacaaccatcataatctatg

SEQ ID NO: 561040 - DNA, 33 bp, Homo sapien
cacagagttgcacaaccaccatcataatctatg

SEQ ID NO: 561041 - DNA, 33 bp, Homo sapien
atcatgcccaaaagaaatcccacattagctgtc

SEQ ID NO: 561042 - DNA, 33 bp, Homo sapien
atcatgcccaaaagaattcccacattagctgtc

SEQ ID NO: 561043 - DNA, 33 bp, Homo sapien
agccaggcattcaaccaaacttgcgaacgccag

SEQ ID NO: 561044 - DNA, 33 bp, Homo sapien
agccaggcattcaaccgaacttgcgaacgccag

SEQ ID NO: 561045 - DNA, 33 bp, Homo sapien
ctccctacaggcctcaatcccaactacctgtcc

SEQ ID NO: 561046 - DNA, 33 bp, Homo sapien
ctccctacaggcctcactcccaactacctgtcc

SEQ ID NO: 561047 - DNA, 33 bp, Homo sapien
aggggccacagtgttaaagctgctaaaagcaac

SEQ ID NO: 561048 - DNA, 33 bp, Homo sapien
aggggccacagtgttagagctgctaaaagcaac

SEQ ID NO: 561049 - DNA, 33 bp, Homo sapien
ccacgtagccaacagcaagaattacatcctacc

SEQ ID NO: 561050 - DNA, 33 bp, Homo sapien
ccacgtagccaacagcgagaattacatcctacc

SEQ ID NO: 561051 - DNA, 33 bp, Homo sapien
cagtctctaaagtaaccggataagctgccacta

SEQ ID NO: 561052 - DNA, 33 bp, Homo sapien
cagtctctaaagtaactggataagctgccacta

SEQ ID NO: 561053 - DNA, 33 bp, Homo sapien
ccctataatagtgagaacacagcctcattttta

SEQ ID NO: 561054 - DNA, 33 bp, Homo sapien
ccctataatagtgagatcacagcctcattttta

SEQ ID NO: 561055 - DNA, 33 bp, Homo sapien
gctggtaaaagaacacaagatggtgtgattcat

SEQ ID NO: 561056 - DNA, 33 bp, Homo sapien
gctggtaaaagaacacgagatggtgtgattcat

SEQ ID NO: 561057 - DNA, 33 bp, Homo sapien
atctaacaaaatgcccagaattgttaagctcct

SEQ ID NO: 561058 - DNA, 33 bp, Homo sapien
atctaacaaaatgcccggaattgttaagctcct

SEQ ID NO: 561059 - DNA, 33 bp, Homo sapien
cattgcatacattatcgcagttaatctttccta

SEQ ID NO: 561060 - DNA, 33 bp, Homo sapien
cattgcatacattatctcagttaatctttccta

SEQ ID NO: 561061 - DNA, 33 bp, Homo sapien
gattgcaccattatacgccaatctgggtgacag

SEQ ID NO: 561062 - DNA, 33 bp, Homo sapien
gattgcaccattatactccaatctgggtgacag

SEQ ID NO: 561063 - DNA, 33 bp, Homo sapien
acctgcggagtacggaagaagagccagggcatc

SEQ ID NO: 561064 - DNA, 33 bp, Homo sapien
acctgcggagtacggaggaagagccagggcatc

SEQ ID NO: 561065 - DNA, 33 bp, Homo sapien
ttaatcttgtagaaaactcagcagaacctaatg

SEQ ID NO: 561066 - DNA, 33 bp, Homo sapien
ttaatcttgtagaaaagtcagcagaacctaatg

SEQ ID NO: 561067 - DNA, 33 bp, Homo sapien
ataaagggaccacttacgaagacacaggcatgg

SEQ ID NO: 561068 - DNA, 33 bp, Homo sapien
ataaagggaccacttatgaagacacaggcatgg

SEQ ID NO: 561069 - DNA, 33 bp, Homo sapien
tccatagatgttttaaatgcagaaatttgataa

SEQ ID NO: 561070 - DNA, 33 bp, Homo sapien
tccatagatgttttaactgcagaaatttgataa

SEQ ID NO: 561071 - DNA, 33 bp, Homo sapien
attcacaaaccccccaatgctgttctaacaatc

SEQ ID NO: 561072 - DNA, 33 bp, Homo sapien
attcacaaaccccccagtgctgttctaacaatc

SEQ ID NO: 561073 - DNA, 33 bp, Homo sapien
agtactcgttcctgcgaaggcttctgctaaggg

SEQ ID NO: 561074 - DNA, 33 bp, Homo sapien
agtactcgttcctgcggaggcttctgctaaggg

SEQ ID NO: 561075 - DNA, 33 bp, Homo sapien
ccacatcctagtaatacggatacgtttctttaa

SEQ ID NO: 561076 - DNA, 33 bp, Homo sapien
ccacatcctagtaatatggatacgtttctttaa

SEQ ID NO: 561077 - DNA, 33 bp, Homo sapien
tttggatttatattgaaaactcccaaggccagg

SEQ ID NO: 561078 - DNA, 33 bp, Homo sapien
tttggatttatattgacaactcccaaggccagg

SEQ ID NO: 561079 - DNA, 33 bp, Homo sapien
actattctgacttctacgatcaaaggttagttt

SEQ ID NO: 561080 - DNA, 33 bp, Homo sapien
actattctgacttctatgatcaaaggttagttt

SEQ ID NO: 561081 - DNA, 33 bp, Homo sapien
ggtcaatgaggctgaaaaagccatgaataattt

SEQ ID NO: 561082 - DNA, 33 bp, Homo sapien
ggtcaatgaggctgaacaagccatgaataattt

SEQ ID NO: 561083 - DNA, 33 bp, Homo sapien
ccttttcctgttgtcaatatgtacaaagatcca

SEQ ID NO: 561084 - DNA, 33 bp, Homo sapien
ccttttcctgttgtcagtatgtacaaagatcca

SEQ ID NO: 561085 - DNA, 33 bp, Homo sapien
ttggttaccaacagggaagtccgtcaaacatgg

SEQ ID NO: 561086 - DNA, 33 bp, Homo sapien
ttggttaccaacaggggagtccgtcaaacatgg

SEQ ID NO: 561087 - DNA, 33 bp, Homo sapien
gttatttttttcaaaactgtatgctttaaatag

SEQ ID NO: 561088 - DNA, 33 bp, Homo sapien
gttatttttttcaaaagtgtatgctttaaatag

SEQ ID NO: 561089 - DNA, 33 bp, Homo sapien
ggtcctccagtatgaaaggaatattgaaagact

SEQ ID NO: 561090 - DNA, 33 bp, Homo sapien
ggtcctccagtatgaagggaatattgaaagact

SEQ ID NO: 561091 - DNA, 33 bp, Homo sapien
aaccaccatataatccagatcatttacagaaaa

SEQ ID NO: 561092 - DNA, 33 bp, Homo sapien
aaccaccatataatccggatcatttacagaaaa

SEQ ID NO: 561093 - DNA, 33 bp, Homo sapien
actggaaaaaacatccaaagactgtgggtctct

SEQ ID NO: 561094 - DNA, 33 bp, Homo sapien
actggaaaaaacatccgaagactgtgggtctct

SEQ ID NO: 561095 - DNA, 33 bp, Homo sapien
gctatgcacgcatatagcctctgttgtgtgcac

SEQ ID NO: 561096 - DNA, 33 bp, Homo sapien
gctatgcacgcatatatcctctgttgtgtgcac

SEQ ID NO: 561097 - DNA, 33 bp, Homo sapien
gcactaactcatcaaacgttcttttctttgtaa

SEQ ID NO: 561098 - DNA, 33 bp, Homo sapien
gcactaactcatcaaatgttcttttctttgtaa

SEQ ID NO: 561099 - DNA, 33 bp, Homo sapien
tatgactataacatagcatctttgtgataatta

SEQ ID NO: 561100 - DNA, 33 bp, Homo sapien
tatgactataacataggatctttgtgataatta

SEQ ID NO: 561101 - DNA, 33 bp, Homo sapien
aaggagatctctgatacggtagtttacttttat

SEQ ID NO: 561102 - DNA, 33 bp, Homo sapien
aaggagatctctgatatggtagtttacttttat

SEQ ID NO: 561103 - DNA, 33 bp, Homo sapien
aaatgcattgaatgaacgaatgttttgaattgt

SEQ ID NO: 561104 - DNA, 33 bp, Homo sapien
aaatgcattgaatgaatgaatgttttgaattgt

SEQ ID NO: 561105 - DNA, 33 bp, Homo sapien
ggtagagggcagcctgaatgtttttcctggggc

SEQ ID NO: 561106 - DNA, 33 bp, Homo sapien
ggtagagggcagcctggatgtttttcctggggc

SEQ ID NO: 561107 - DNA, 33 bp, Homo sapien
ggttggtcttgtgttacacagttcatgaataca

SEQ ID NO: 561108 - DNA, 33 bp, Homo sapien
ggttggtcttgtgttatacagttcatgaataca

SEQ ID NO: 561109 - DNA, 33 bp, Homo sapien
aactacacttaaagtaacccgtaatacaaatgg

SEQ ID NO: 561110 - DNA, 33 bp, Homo sapien
aactacacttaaagtaccccgtaatacaaatgg

SEQ ID NO: 561111 - DNA, 33 bp, Homo sapien
gagacagaaagttggacagatgatctctaaggg

SEQ ID NO: 561112 - DNA, 33 bp, Homo sapien
gagacagaaagttggatagatgatctctaaggg

SEQ ID NO: 561113 - DNA, 33 bp, Homo sapien
ttaatttgaattactacgttcagaaggatgtgt

SEQ ID NO: 561114 - DNA, 33 bp, Homo sapien
ttaatttgaattactatgttcagaaggatgtgt

SEQ ID NO: 561115 - DNA, 33 bp, Homo sapien
tttagagttggcaagacgcttaaagcctaagca

SEQ ID NO: 561116 - DNA, 33 bp, Homo sapien
tttagagttggcaagatgcttaaagcctaagca

SEQ ID NO: 561117 - DNA, 33 bp, Homo sapien
ctatttggtcattgagcaagaaatcttagattc

SEQ ID NO: 561118 - DNA, 33 bp, Homo sapien
ctatttggtcattgaggaagaaatcttagattc

SEQ ID NO: 561119 - DNA, 33 bp, Homo sapien
tatgggcatacctaataaataatatgtctatat

SEQ ID NO: 561120 - DNA, 33 bp, Homo sapien
tatgggcatacctaatgaataatatgtctatat

SEQ ID NO: 561121 - DNA, 33 bp, Homo sapien
taagctgactgtaggaagacacaggtgtgcttc

SEQ ID NO: 561122 - DNA, 33 bp, Homo sapien
taagctgactgtaggaggacacaggtgtgcttc

SEQ ID NO: 561123 - DNA, 33 bp, Homo sapien
tggcattggtgtttcaatatcactgcattcttg

SEQ ID NO: 561124 - DNA, 33 bp, Homo sapien
tggcattggtgtttcagtatcactgcattcttg

SEQ ID NO: 561125 - DNA, 33 bp, Homo sapien
gtgcccggctcaagaaccttctaagtagttatt

SEQ ID NO: 561126 - DNA, 33 bp, Homo sapien
gtgcccggctcaagaatcttctaagtagttatt

SEQ ID NO: 561127 - DNA, 33 bp, Homo sapien
atggttgctcagataacgacaaacagctgagca

SEQ ID NO: 561128 - DNA, 33 bp, Homo sapien
atggttgctcagataatgacaaacagctgagca

SEQ ID NO: 561129 - DNA, 33 bp, Homo sapien
aagaaggaaccctgccaataccttgagtttaga

SEQ ID NO: 561130 - DNA, 33 bp, Homo sapien
aagaaggaaccctgccgataccttgagtttaga

SEQ ID NO: 561131 - DNA, 33 bp, Homo sapien
tttcagagaagtcaaaaatcagtcaagtgtttg

SEQ ID NO: 561132 - DNA, 33 bp, Homo sapien
tttcagagaagtcaaagatcagtcaagtgtttg

SEQ ID NO: 561133 - DNA, 33 bp, Homo sapien
tccctgagggaaaggaagtggatacagagtcgg

SEQ ID NO: 561134 - DNA, 33 bp, Homo sapien
tccctgagggaaaggatgtggatacagagtcgg

SEQ ID NO: 561135 - DNA, 33 bp, Homo sapien
tgtcactattttaccacgtgacgcttgacatct

SEQ ID NO: 561136 - DNA, 33 bp, Homo sapien
tgtcactattttaccatgtgacgcttgacatct

SEQ ID NO: 561137 - DNA, 33 bp, Homo sapien
catcattttttcccctaacaatctgtccatgat

SEQ ID NO: 561138 - DNA, 33 bp, Homo sapien
catcattttttcccctgacaatctgtccatgat

SEQ ID NO: 561139 - DNA, 33 bp, Homo sapien
gatcgcttgatcttagcagttcaggactggcct

SEQ ID NO: 561140 - DNA, 33 bp, Homo sapien
gatcgcttgatcttaggagttcaggactggcct

SEQ ID NO: 561141 - DNA, 33 bp, Homo sapien
agaagaaggcactcaaatgaaaatgtcaagttc

SEQ ID NO: 561142 - DNA, 33 bp, Homo sapien
agaagaaggcactcaagtgaaaatgtcaagttc

SEQ ID NO: 561143 - DNA, 33 bp, Homo sapien
agaaagtagtatataagtgctagttaccaacaa

SEQ ID NO: 561144 - DNA, 33 bp, Homo sapien
agaaagtagtatataattgctagttaccaacaa

SEQ ID NO: 561145 - DNA, 33 bp, Homo sapien
tacactgaagtctggactcaagttcactgtagc

SEQ ID NO: 561146 - DNA, 33 bp, Homo sapien
tacactgaagtctggattcaagttcactgtagc

SEQ ID NO: 561147 - DNA, 33 bp, Homo sapien
ccaatagaaactttagcccaagtaatggtcaca

SEQ ID NO: 561148 - DNA, 33 bp, Homo sapien
ccaatagaaactttagtccaagtaatggtcaca

SEQ ID NO: 561149 - DNA, 33 bp, Homo sapien
gtgtgtgacatttccaatagttacacaccttag

SEQ ID NO: 561150 - DNA, 33 bp, Homo sapien
gtgtgtgacatttccagtagttacacaccttag

SEQ ID NO: 561151 - DNA, 33 bp, Homo sapien
aaacatgatataggtacgtacatataaagagaa

SEQ ID NO: 561152 - DNA, 33 bp, Homo sapien
aaacatgatataggtatgtacatataaagagaa

SEQ ID NO: 561153 - DNA, 33 bp, Homo sapien
cagatatacaaccaaactgatgtttttttctag

SEQ ID NO: 561154 - DNA, 33 bp, Homo sapien
cagatatacaaccaaattgatgtttttttctag

SEQ ID NO: 561155 - DNA, 33 bp, Homo sapien
ataatcctaaattctcactttggttaatagtaa

SEQ ID NO: 561156 - DNA, 33 bp, Homo sapien
ataatcctaaattctcgctttggttaatagtaa

SEQ ID NO: 561157 - DNA, 33 bp, Homo sapien
ttcactgctgtgcaaccgtaagaaagataccta

SEQ ID NO: 561158 - DNA, 33 bp, Homo sapien
ttcactgctgtgcaactgtaagaaagataccta

SEQ ID NO: 561159 - DNA, 33 bp, Homo sapien
gacttagccattactcaatgacagccacttcaa

SEQ ID NO: 561160 - DNA, 33 bp, Homo sapien
gacttagccattactccatgacagccacttcaa

SEQ ID NO: 561161 - DNA, 33 bp, Homo sapien
ctttgagcttatcttccctctgaatgccctgac

SEQ ID NO: 561162 - DNA, 33 bp, Homo sapien
ctttgagcttatcttctctctgaatgccctgac

SEQ ID NO: 561163 - DNA, 33 bp, Homo sapien
gaataccaacagcaaaaaatttaaaatatagac

SEQ ID NO: 561164 - DNA, 33 bp, Homo sapien
gaataccaacagcaaacaatttaaaatatagac

SEQ ID NO: 561165 - DNA, 33 bp, Homo sapien
aggaaataacagctacccagagaaaggtctttc

SEQ ID NO: 561166 - DNA, 33 bp, Homo sapien
aggaaataacagctacgcagagaaaggtctttc

SEQ ID NO: 561167 - DNA, 33 bp, Homo sapien
gggctggtaagcgaccaagggccattatataca

SEQ ID NO: 561168 - DNA, 33 bp, Homo sapien
gggctggtaagcgaccgagggccattatataca

SEQ ID NO: 561169 - DNA, 33 bp, Homo sapien
tgttcttgtggaaatacggctctgtaattgctt

SEQ ID NO: 561170 - DNA, 33 bp, Homo sapien
tgttcttgtggaaatatggctctgtaattgctt

SEQ ID NO: 561171 - DNA, 33 bp, Homo sapien
tatatcttaaagaaccaggactcagatactctt

SEQ ID NO: 561172 - DNA, 33 bp, Homo sapien
tatatcttaaagaaccgggactcagatactctt

SEQ ID NO: 561173 - DNA, 33 bp, Homo sapien
cttcttccccgagtcccatttctaattttgcaa

SEQ ID NO: 561174 - DNA, 33 bp, Homo sapien
cttcttccccgagtccgatttctaattttgcaa

SEQ ID NO: 561175 - DNA, 33 bp, Homo sapien
tcctggaatgcttgggcaaaactgatttgaata

SEQ ID NO: 561176 - DNA, 33 bp, Homo sapien
tcctggaatgcttgggtaaaactgatttgaata

SEQ ID NO: 561177 - DNA, 33 bp, Homo sapien
tgttagtcattcaggacctgtcttggttatcag

SEQ ID NO: 561178 - DNA, 33 bp, Homo sapien
tgttagtcattcaggagctgtcttggttatcag

SEQ ID NO: 561179 - DNA, 33 bp, Homo sapien
gaaagagaatccagacagaatctaggaacgttg

SEQ ID NO: 561180 - DNA, 33 bp, Homo sapien
gaaagagaatccagacggaatctaggaacgttg

SEQ ID NO: 561181 - DNA, 33 bp, Homo sapien
gaagtctattatacaacacatggacaaaggaca

SEQ ID NO: 561182 - DNA, 33 bp, Homo sapien
gaagtctattatacaagacatggacaaaggaca

SEQ ID NO: 561183 - DNA, 33 bp, Homo sapien
gttcaaatggaccttacattcaaataacctctc

SEQ ID NO: 561184 - DNA, 33 bp, Homo sapien
gttcaaatggaccttagattcaaataacctctc

SEQ ID NO: 561185 - DNA, 33 bp, Homo sapien
acatatacagcaaaggcaagtgaatgttatttg

SEQ ID NO: 561186 - DNA, 33 bp, Homo sapien
acatatacagcaaagggaagtgaatgttatttg

SEQ ID NO: 561187 - DNA, 33 bp, Homo sapien
ctcaagttcagatgcacaacatttttgcagaaa

SEQ ID NO: 561188 - DNA, 33 bp, Homo sapien
ctcaagttcagatgcagaacatttttgcagaaa

SEQ ID NO: 561189 - DNA, 33 bp, Homo sapien
tgagtttaatgttcacaaaaatcatcaacagca

SEQ ID NO: 561190 - DNA, 33 bp, Homo sapien
tgagtttaatgttcacgaaaatcatcaacagca

SEQ ID NO: 561191 - DNA, 33 bp, Homo sapien
aaagatctgactatataaacactgtgatataca

SEQ ID NO: 561192 - DNA, 33 bp, Homo sapien
aaagatctgactatattaacactgtgatataca

SEQ ID NO: 561193 - DNA, 33 bp, Homo sapien
ccaggatgtaagtctaagctagttccctccaga

SEQ ID NO: 561194 - DNA, 33 bp, Homo sapien
ccaggatgtaagtctaggctagttccctccaga

SEQ ID NO: 561195 - DNA, 33 bp, Homo sapien
tgtggtgattgacatcagagctcccaaacagtt

SEQ ID NO: 561196 - DNA, 33 bp, Homo sapien
tgtggtgattgacatcggagctcccaaacagtt

SEQ ID NO: 561197 - DNA, 33 bp, Homo sapien
cagatgctcactcaaacgtcttgagaactagga

SEQ ID NO: 561198 - DNA, 33 bp, Homo sapien
cagatgctcactcaaatgtcttgagaactagga

SEQ ID NO: 561199 - DNA, 33 bp, Homo sapien
tgtacctgggtctcaccgtctttgtctcagtct

SEQ ID NO: 561200 - DNA, 33 bp, Homo sapien
tgtacctgggtctcactgtctttgtctcagtct

SEQ ID NO: 561201 - DNA, 33 bp, Homo sapien
ttttcatacattagaacgagttttactgtttca

SEQ ID NO: 561202 - DNA, 33 bp, Homo sapien
ttttcatacattagaatgagttttactgtttca

SEQ ID NO: 561203 - DNA, 33 bp, Homo sapien
gatgacaaacgtgcaacgacataagtcaatctg

SEQ ID NO: 561204 - DNA, 33 bp, Homo sapien
gatgacaaacgtgcaatgacataagtcaatctg

SEQ ID NO: 561205 - DNA, 33 bp, Homo sapien
actctatgcaggcccagctgacaattactagga

SEQ ID NO: 561206 - DNA, 33 bp, Homo sapien
actctatgcaggcccatctgacaattactagga

SEQ ID NO: 561207 - DNA, 33 bp, Homo sapien
gagttaaatccaccacagagttactagatcact

SEQ ID NO: 561208 - DNA, 33 bp, Homo sapien
gagttaaatccaccacggagttactagatcact

SEQ ID NO: 561209 - DNA, 33 bp, Homo sapien
tcatgtgtataagccaaaaacaataggggagtt

SEQ ID NO: 561210 - DNA, 33 bp, Homo sapien
tcatgtgtataagccagaaacaataggggagtt

SEQ ID NO: 561211 - DNA, 33 bp, Homo sapien
cactccataagtcaaactgcatagcgagcttga

SEQ ID NO: 561212 - DNA, 33 bp, Homo sapien
cactccataagtcaaattgcatagcgagcttga

SEQ ID NO: 561213 - DNA, 33 bp, Homo sapien
tgcagactgtgagttacatcttacagggtcaca

SEQ ID NO: 561214 - DNA, 33 bp, Homo sapien
tgcagactgtgagttatatcttacagggtcaca

SEQ ID NO: 561215 - DNA, 33 bp, Homo sapien
tttggctcctcactgcaagttgtgctcaggtct

SEQ ID NO: 561216 - DNA, 33 bp, Homo sapien
tttggctcctcactgcgagttgtgctcaggtct

SEQ ID NO: 561217 - DNA, 33 bp, Homo sapien
tggtacctcagttcctaaaacagcaagatggca

SEQ ID NO: 561218 - DNA, 33 bp, Homo sapien
tggtacctcagttcctgaaacagcaagatggca

SEQ ID NO: 561219 - DNA, 33 bp, Homo sapien
ggtgtggtccatggatcagccacttctgagatt

SEQ ID NO: 561220 - DNA, 33 bp, Homo sapien
ggtgtggtccatggattagccacttctgagatt

SEQ ID NO: 561221 - DNA, 33 bp, Homo sapien
catgggaggctgtcagcaatgtagggagggtga

SEQ ID NO: 561222 - DNA, 33 bp, Homo sapien
catgggaggctgtcagtaatgtagggagggtga

SEQ ID NO: 561223 - DNA, 33 bp, Homo sapien
tagattgcatccccatcaaggagatgaacccaa

SEQ ID NO: 561224 - DNA, 33 bp, Homo sapien
tagattgcatccccattaaggagatgaacccaa

SEQ ID NO: 561225 - DNA, 33 bp, Homo sapien
aagcaaacagcataataagctctgatttggagt

SEQ ID NO: 561226 - DNA, 33 bp, Homo sapien
aagcaaacagcataatgagctctgatttggagt

SEQ ID NO: 561227 - DNA, 33 bp, Homo sapien
aaaatcctcaccaaaccgtcaccaaggtaagaa

SEQ ID NO: 561228 - DNA, 33 bp, Homo sapien
aaaatcctcaccaaactgtcaccaaggtaagaa

SEQ ID NO: 561229 - DNA, 33 bp, Homo sapien
tacatagaagtcgtcacgatgaaactctgatta

SEQ ID NO: 561230 - DNA, 33 bp, Homo sapien
tacatagaagtcgtcatgatgaaactctgatta

SEQ ID NO: 561231 - DNA, 33 bp, Homo sapien
tctcttttttttgacaacatcctagaaattatt

SEQ ID NO: 561232 - DNA, 33 bp, Homo sapien
tctcttttttttgacatcatcctagaaattatt

SEQ ID NO: 561233 - DNA, 33 bp, Homo sapien
aaggatttttcaagataaaggattatagatagg

SEQ ID NO: 561234 - DNA, 33 bp, Homo sapien
aaggatttttcaagattaaggattatagatagg

SEQ ID NO: 561235 - DNA, 33 bp, Homo sapien
gcccttccattttggaacttatgatgatgatgt

SEQ ID NO: 561236 - DNA, 33 bp, Homo sapien
gcccttccattttggatcttatgatgatgatgt

SEQ ID NO: 561237 - DNA, 33 bp, Homo sapien
ttttaacaagcaaaaaataatgaattatcaggc

SEQ ID NO: 561238 - DNA, 33 bp, Homo sapien
ttttaacaagcaaaaagtaatgaattatcaggc

SEQ ID NO: 561239 - DNA, 33 bp, Homo sapien
gcagctgcttaacgtacaatgagcaaaagctgt

SEQ ID NO: 561240 - DNA, 33 bp, Homo sapien
gcagctgcttaacgtataatgagcaaaagctgt

SEQ ID NO: 561241 - DNA, 33 bp, Homo sapien
gagctagacttaataaccacacgtataattttg

SEQ ID NO: 561242 - DNA, 33 bp, Homo sapien
gagctagacttaataagcacacgtataattttg

SEQ ID NO: 561243 - DNA, 33 bp, Homo sapien
cgtgagaattagcagcagagtaatcaagcagta

SEQ ID NO: 561244 - DNA, 33 bp, Homo sapien
cgtgagaattagcagccgagtaatcaagcagta

SEQ ID NO: 561245 - DNA, 33 bp, Homo sapien
tggttctcagtacttacaaagcagcggaatctc

SEQ ID NO: 561246 - DNA, 33 bp, Homo sapien
tggttctcagtacttataaagcagcggaatctc

SEQ ID NO: 561247 - DNA, 33 bp, Homo sapien
cttcctccttaaaaccaactctcagtcttgaac

SEQ ID NO: 561248 - DNA, 33 bp, Homo sapien
cttcctccttaaaaccgactctcagtcttgaac

SEQ ID NO: 561249 - DNA, 33 bp, Homo sapien
aatgtgcttttaaggacagtgatatgctcatgg

SEQ ID NO: 561250 - DNA, 33 bp, Homo sapien
aatgtgcttttaaggatagtgatatgctcatgg

SEQ ID NO: 561251 - DNA, 33 bp, Homo sapien
tatgccctgggaattccactcataagcatctac

SEQ ID NO: 561252 - DNA, 33 bp, Homo sapien
tatgccctgggaattctactcataagcatctac

SEQ ID NO: 561253 - DNA, 33 bp, Homo sapien
gtgtaatggtatttcaagattttatttcatatt

SEQ ID NO: 561254 - DNA, 33 bp, Homo sapien
gtgtaatggtatttcaggattttatttcatatt

SEQ ID NO: 561255 - DNA, 33 bp, Homo sapien
gtaccttaggtcttgacgtcataaacccaagga

SEQ ID NO: 561256 - DNA, 33 bp, Homo sapien
gtaccttaggtcttgatgtcataaacccaagga

SEQ ID NO: 561257 - DNA, 33 bp, Homo sapien
gagttttaataatccaaaccagcatgaattagg

SEQ ID NO: 561258 - DNA, 33 bp, Homo sapien
gagttttaataatccagaccagcatgaattagg

SEQ ID NO: 561259 - DNA, 33 bp, Homo sapien
tcttcctgatatatgaacatttcagcgggcaaa

SEQ ID NO: 561260 - DNA, 33 bp, Homo sapien
tcttcctgatatatgagcatttcagcgggcaaa

SEQ ID NO: 561261 - DNA, 33 bp, Homo sapien
gacttcaggacataagcatctttgttaccttaa

SEQ ID NO: 561262 - DNA, 33 bp, Homo sapien
gacttcaggacataagtatctttgttaccttaa

SEQ ID NO: 561263 - DNA, 33 bp, Homo sapien
tgggcaaatttattcacatcagacttcttaata

SEQ ID NO: 561264 - DNA, 33 bp, Homo sapien
tgggcaaatttattcagatcagacttcttaata

SEQ ID NO: 561265 - DNA, 33 bp, Homo sapien
tatgaatgttaatgaaccaattttgctgattta

SEQ ID NO: 561266 - DNA, 33 bp, Homo sapien
tatgaatgttaatgaatcaattttgctgattta

SEQ ID NO: 561267 - DNA, 33 bp, Homo sapien
ttttcctggtacctaacacaggaagaggttaga

SEQ ID NO: 561268 - DNA, 33 bp, Homo sapien
ttttcctggtacctaatacaggaagaggttaga

SEQ ID NO: 561269 - DNA, 33 bp, Homo sapien
aatgggcagataaaaccatctgctcttggtcca

SEQ ID NO: 561270 - DNA, 33 bp, Homo sapien
aatgggcagataaaacgatctgctcttggtcca

SEQ ID NO: 561271 - DNA, 33 bp, Homo sapien
taccatctattctacactggaccaagagcagat

SEQ ID NO: 561272 - DNA, 33 bp, Homo sapien
taccatctattctacattggaccaagagcagat

SEQ ID NO: 561273 - DNA, 33 bp, Homo sapien
tgaattttgcctataacaaaatgtggatatacg

SEQ ID NO: 561274 - DNA, 33 bp, Homo sapien
tgaattttgcctataagaaaatgtggatatacg

SEQ ID NO: 561275 - DNA, 33 bp, Homo sapien
gaaagtaaggacaaggcaggtgacattgattac

SEQ ID NO: 561276 - DNA, 33 bp, Homo sapien
gaaagtaaggacaagggaggtgacattgattac

SEQ ID NO: 561277 - DNA, 33 bp, Homo sapien
tccagttaggtagaccgctctgaagtttgaagt

SEQ ID NO: 561278 - DNA, 33 bp, Homo sapien
tccagttaggtagacctctctgaagtttgaagt

SEQ ID NO: 561279 - DNA, 33 bp, Homo sapien
ttgaatcacaatgagccgaatttcaactttcat

SEQ ID NO: 561280 - DNA, 33 bp, Homo sapien
ttgaatcacaatgagctgaatttcaactttcat

SEQ ID NO: 561281 - DNA, 33 bp, Homo sapien
gcaactttgcattttaagctgaatgaaaaagat

SEQ ID NO: 561282 - DNA, 33 bp, Homo sapien
gcaactttgcattttaggctgaatgaaaaagat

SEQ ID NO: 561283 - DNA, 33 bp, Homo sapien
aaataggacaaacttacaacagtcttatgtaat

SEQ ID NO: 561284 - DNA, 33 bp, Homo sapien
aaataggacaaacttataacagtcttatgtaat

SEQ ID NO: 561285 - DNA, 33 bp, Homo sapien
ctttataaaactcatccaaatacattgacatct

SEQ ID NO: 561286 - DNA, 33 bp, Homo sapien
ctttataaaactcatctaaatacattgacatct

SEQ ID NO: 561287 - DNA, 33 bp, Homo sapien
ctggggaaatccaactcaggacatactgagact

SEQ ID NO: 561288 - DNA, 33 bp, Homo sapien
ctggggaaatccaacttaggacatactgagact

SEQ ID NO: 561289 - DNA, 33 bp, Homo sapien
tcctccattaccaactcagtcaacatcaatcct

SEQ ID NO: 561290 - DNA, 33 bp, Homo sapien
tcctccattaccaactgagtcaacatcaatcct

SEQ ID NO: 561291 - DNA, 33 bp, Homo sapien
gaaacttccctgatggcccacataatgatccac

SEQ ID NO: 561292 - DNA, 33 bp, Homo sapien
gaaacttccctgatggtccacataatgatccac

SEQ ID NO: 561293 - DNA, 33 bp, Homo sapien
tgggaactgaattagacagtgcaggcttatatc

SEQ ID NO: 561294 - DNA, 33 bp, Homo sapien
tgggaactgaattagatagtgcaggcttatatc

SEQ ID NO: 561295 - DNA, 33 bp, Homo sapien
aacacaatgccttatacaaggtgggcttccagc

SEQ ID NO: 561296 - DNA, 33 bp, Homo sapien
aacacaatgccttatagaaggtgggcttccagc

SEQ ID NO: 561297 - DNA, 33 bp, Homo sapien
gacaattttgtgaaaacagatagaaactctggt

SEQ ID NO: 561298 - DNA, 33 bp, Homo sapien
gacaattttgtgaaaatagatagaaactctggt

SEQ ID NO: 561299 - DNA, 33 bp, Homo sapien
actgaggatgcacctaagctttattctgaaact

SEQ ID NO: 561300 - DNA, 33 bp, Homo sapien
actgaggatgcacctacgctttattctgaaact

SEQ ID NO: 561301 - DNA, 33 bp, Homo sapien
gttaggacactcaatccagagccctggaaagta

SEQ ID NO: 561302 - DNA, 33 bp, Homo sapien
gttaggacactcaatctagagccctggaaagta

SEQ ID NO: 561303 - DNA, 33 bp, Homo sapien
atgcagatctggtcaactggccattataatgat

SEQ ID NO: 561304 - DNA, 33 bp, Homo sapien
atgcagatctggtcaattggccattataatgat

SEQ ID NO: 561305 - DNA, 33 bp, Homo sapien
acccccagcttggtaacagtaacttgtacaatt

SEQ ID NO: 561306 - DNA, 33 bp, Homo sapien
acccccagcttggtaagagtaacttgtacaatt

SEQ ID NO: 561307 - DNA, 33 bp, Homo sapien
acatctaccacaatgccctatgcaaatggctag

SEQ ID NO: 561308 - DNA, 33 bp, Homo sapien
acatctaccacaatgctctatgcaaatggctag

SEQ ID NO: 561309 - DNA, 33 bp, Homo sapien
tgtgcatctccacagcaatggagcaagttcacc

SEQ ID NO: 561310 - DNA, 33 bp, Homo sapien
tgtgcatctccacagcgatggagcaagttcacc

SEQ ID NO: 561311 - DNA, 33 bp, Homo sapien
ttcctgagaagtctccagaagccatgcattctg

SEQ ID NO: 561312 - DNA, 33 bp, Homo sapien
ttcctgagaagtctccggaagccatgcattctg

SEQ ID NO: 561313 - DNA, 33 bp, Homo sapien
gtgtgtatgaacagaacggaggacgggtttgag

SEQ ID NO: 561314 - DNA, 33 bp, Homo sapien
gtgtgtatgaacagaatggaggacgggtttgag

SEQ ID NO: 561315 - DNA, 33 bp, Homo sapien
acatgatctccacctacgttgtccactgtggca

SEQ ID NO: 561316 - DNA, 33 bp, Homo sapien
acatgatctccacctatgttgtccactgtggca

SEQ ID NO: 561317 - DNA, 33 bp, Homo sapien
atttgggaagcaatcacgttaaagaaaaataaa

SEQ ID NO: 561318 - DNA, 33 bp, Homo sapien
atttgggaagcaatcatgttaaagaaaaataaa

SEQ ID NO: 561319 - DNA, 33 bp, Homo sapien
ttgggaataggtcacccgaagatggattttatt

SEQ ID NO: 561320 - DNA, 33 bp, Homo sapien
ttgggaataggtcacctgaagatggattttatt

SEQ ID NO: 561321 - DNA, 33 bp, Homo sapien
ttacactgagactagaactgagaatccagatta

SEQ ID NO: 561322 - DNA, 33 bp, Homo sapien
ttacactgagactagagctgagaatccagatta

SEQ ID NO: 561323 - DNA, 33 bp, Homo sapien
gcacctgctcagtcaaatctctgagagtgcagc

SEQ ID NO: 561324 - DNA, 33 bp, Homo sapien
gcacctgctcagtcaagtctctgagagtgcagc

SEQ ID NO: 561325 - DNA, 33 bp, Homo sapien
taacctgtggaatatacgacaaaatgtccctta

SEQ ID NO: 561326 - DNA, 33 bp, Homo sapien
taacctgtggaatatatgacaaaatgtccctta

SEQ ID NO: 561327 - DNA, 33 bp, Homo sapien
aattatctggaaaaaagtctcctttttgcacag

SEQ ID NO: 561328 - DNA, 33 bp, Homo sapien
aattatctggaaaaaattctcctttttgcacag

SEQ ID NO: 561329 - DNA, 33 bp, Homo sapien
aagtaaggttacaactcagtcttttgcctttct

SEQ ID NO: 561330 - DNA, 33 bp, Homo sapien
aagtaaggttacaacttagtcttttgcctttct

SEQ ID NO: 561331 - DNA, 33 bp, Homo sapien
cttttttgagaaatgacggataaaaaattaggc

SEQ ID NO: 561332 - DNA, 33 bp, Homo sapien
cttttttgagaaatgatggataaaaaattaggc

SEQ ID NO: 561333 - DNA, 33 bp, Homo sapien
ctgaccagcccatgagcatttgacaagcagcag

SEQ ID NO: 561334 - DNA, 33 bp, Homo sapien
ctgaccagcccatgaggatttgacaagcagcag

SEQ ID NO: 561335 - DNA, 33 bp, Homo sapien
cctaaaataatgctgccgaaagtccactctaaa

SEQ ID NO: 561336 - DNA, 33 bp, Homo sapien
cctaaaataatgctgcggaaagtccactctaaa

SEQ ID NO: 561337 - DNA, 33 bp, Homo sapien
agatactgggggttagaacttttatgactgaat

SEQ ID NO: 561338 - DNA, 33 bp, Homo sapien
agatactgggggttaggacttttatgactgaat

SEQ ID NO: 561339 - DNA, 33 bp, Homo sapien
aagtgtgtctcctccaaattcagtcataaaagt

SEQ ID NO: 561340 - DNA, 33 bp, Homo sapien
aagtgtgtctcctccatattcagtcataaaagt

SEQ ID NO: 561341 - DNA, 33 bp, Homo sapien
tttgtcaaatgtcaccaaatatcattgttcttc

SEQ ID NO: 561342 - DNA, 33 bp, Homo sapien
tttgtcaaatgtcaccgaatatcattgttcttc

SEQ ID NO: 561343 - DNA, 33 bp, Homo sapien
tattacaagaacagtaccttcaatgtagcagcc

SEQ ID NO: 561344 - DNA, 33 bp, Homo sapien
tattacaagaacagtatcttcaatgtagcagcc

SEQ ID NO: 561345 - DNA, 33 bp, Homo sapien
ctcaggcgtcttcaaccgaacatatccaaaatt

SEQ ID NO: 561346 - DNA, 33 bp, Homo sapien
ctcaggcgtcttcaactgaacatatccaaaatt

SEQ ID NO: 561347 - DNA, 33 bp, Homo sapien
caagtcctacaagaagccatgaggataacgacc

SEQ ID NO: 561348 - DNA, 33 bp, Homo sapien
caagtcctacaagaagtcatgaggataacgacc

SEQ ID NO: 561349 - DNA, 33 bp, Homo sapien
ttcataatcatatgggccatttgctatgataaa

SEQ ID NO: 561350 - DNA, 33 bp, Homo sapien
ttcataatcatatgggtcatttgctatgataaa

SEQ ID NO: 561351 - DNA, 33 bp, Homo sapien
agtggtaactggcttacagcttaacctcactgc

SEQ ID NO: 561352 - DNA, 33 bp, Homo sapien
agtggtaactggcttagagcttaacctcactgc

SEQ ID NO: 561353 - DNA, 33 bp, Homo sapien
tgtcagtttcttcatccgaaaaatagggataat

SEQ ID NO: 561354 - DNA, 33 bp, Homo sapien
tgtcagtttcttcatctgaaaaatagggataat

SEQ ID NO: 561355 - DNA, 33 bp, Homo sapien
tatgtagttcaaatatcagcttcagtgttatgt

SEQ ID NO: 561356 - DNA, 33 bp, Homo sapien
tatgtagttcaaatattagcttcagtgttatgt

SEQ ID NO: 561357 - DNA, 33 bp, Homo sapien
cttaactagaagtatcaatccttcctctgacac

SEQ ID NO: 561358 - DNA, 33 bp, Homo sapien
cttaactagaagtatcgatccttcctctgacac

SEQ ID NO: 561359 - DNA, 33 bp, Homo sapien
tttatgatctggagaccgatgtttgaaagagag

SEQ ID NO: 561360 - DNA, 33 bp, Homo sapien
tttatgatctggagactgatgtttgaaagagag

SEQ ID NO: 561361 - DNA, 33 bp, Homo sapien
cccagaattgtaaactcagcttatagaaaatga

SEQ ID NO: 561362 - DNA, 33 bp, Homo sapien
cccagaattgtaaactgagcttatagaaaatga

SEQ ID NO: 561363 - DNA, 33 bp, Homo sapien
agaaatggtgatccaactaatgccgctgaacct

SEQ ID NO: 561364 - DNA, 33 bp, Homo sapien
agaaatggtgatccaattaatgccgctgaacct

SEQ ID NO: 561365 - DNA, 33 bp, Homo sapien
tttttacaaatgcaaccgacactaatgaagggc

SEQ ID NO: 561366 - DNA, 33 bp, Homo sapien
tttttacaaatgcaactgacactaatgaagggc

SEQ ID NO: 561367 - DNA, 33 bp, Homo sapien
caaatgaaataaactcagagatgctttcctgac

SEQ ID NO: 561368 - DNA, 33 bp, Homo sapien
caaatgaaataaactcggagatgctttcctgac

SEQ ID NO: 561369 - DNA, 33 bp, Homo sapien
tttatgaataaatgacacggtctctcttttaca

SEQ ID NO: 561370 - DNA, 33 bp, Homo sapien
tttatgaataaatgactcggtctctcttttaca

SEQ ID NO: 561371 - DNA, 33 bp, Homo sapien
caagatggaagcagaaatgcaggataaaggtga

SEQ ID NO: 561372 - DNA, 33 bp, Homo sapien
caagatggaagcagaagtgcaggataaaggtga

SEQ ID NO: 561373 - DNA, 33 bp, Homo sapien
catcacatccataacccatgtcaaaagttgttt

SEQ ID NO: 561374 - DNA, 33 bp, Homo sapien
catcacatccataacctatgtcaaaagttgttt

SEQ ID NO: 561375 - DNA, 33 bp, Homo sapien
attatattcataagcacgatttttaatttaatt

SEQ ID NO: 561376 - DNA, 33 bp, Homo sapien
attatattcataagcatgatttttaatttaatt

SEQ ID NO: 561377 - DNA, 33 bp, Homo sapien
tttattagggtaagtcagacgcctcgatcattg

SEQ ID NO: 561378 - DNA, 33 bp, Homo sapien
tttattagggtaagtcggacgcctcgatcattg

SEQ ID NO: 561379 - DNA, 33 bp, Homo sapien
ttagttctataaacccagggactgagttttcaa

SEQ ID NO: 561380 - DNA, 33 bp, Homo sapien
ttagttctataaacccggggactgagttttcaa

SEQ ID NO: 561381 - DNA, 33 bp, Homo sapien
gtgagaaccacaagcaacctaccacatggtttg

SEQ ID NO: 561382 - DNA, 33 bp, Homo sapien
gtgagaaccacaagcaccctaccacatggtttg

SEQ ID NO: 561383 - DNA, 33 bp, Homo sapien
tgtcgtgtccttggaaatattttagatatgctt

SEQ ID NO: 561384 - DNA, 33 bp, Homo sapien
tgtcgtgtccttggaagtattttagatatgctt

SEQ ID NO: 561385 - DNA, 33 bp, Homo sapien
ttatggtctcagaaaactcatattgcgtttcta

SEQ ID NO: 561386 - DNA, 33 bp, Homo sapien
ttatggtctcagaaaattcatattgcgtttcta

SEQ ID NO: 561387 - DNA, 33 bp, Homo sapien
ggtcctacatgaaaaccgtgcagagacttgaaa

SEQ ID NO: 561388 - DNA, 33 bp, Homo sapien
ggtcctacatgaaaactgtgcagagacttgaaa

SEQ ID NO: 561389 - DNA, 33 bp, Homo sapien
ctgcagtctgccttacaggtagtgtgctctatc

SEQ ID NO: 561390 - DNA, 33 bp, Homo sapien
ctgcagtctgccttacgggtagtgtgctctatc

SEQ ID NO: 561391 - DNA, 33 bp, Homo sapien
tcatgatacgtgctaacgaagggaaatgtaggt

SEQ ID NO: 561392 - DNA, 33 bp, Homo sapien
tcatgatacgtgctaatgaagggaaatgtaggt

SEQ ID NO: 561393 - DNA, 33 bp, Homo sapien
ccaatgacggacaggaaggggcgaacaaatacc

SEQ ID NO: 561394 - DNA, 33 bp, Homo sapien
ccaatgacggacaggagggggcgaacaaatacc

SEQ ID NO: 561395 - DNA, 33 bp, Homo sapien
tttatatattccacaccgtagattataaattga

SEQ ID NO: 561396 - DNA, 33 bp, Homo sapien
tttatatattccacactgtagattataaattga

SEQ ID NO: 561397 - DNA, 33 bp, Homo sapien
aatgctccccttcttccaggcctctgtgctgac

SEQ ID NO: 561398 - DNA, 33 bp, Homo sapien
aatgctccccttcttctaggcctctgtgctgac

SEQ ID NO: 561399 - DNA, 33 bp, Homo sapien
ccacactagtatgcaagcttctttcaattaaaa

SEQ ID NO: 561400 - DNA, 33 bp, Homo sapien
ccacactagtatgcaatcttctttcaattaaaa

SEQ ID NO: 561401 - DNA, 33 bp, Homo sapien
tttgaaatgaatcctcaacgcatatgactgcct

SEQ ID NO: 561402 - DNA, 33 bp, Homo sapien
tttgaaatgaatcctccacgcatatgactgcct

SEQ ID NO: 561403 - DNA, 33 bp, Homo sapien
ccaaaccatatcacataacacgtttaggataga

SEQ ID NO: 561404 - DNA, 33 bp, Homo sapien
ccaaaccatatcacattacacgtttaggataga

SEQ ID NO: 561405 - DNA, 33 bp, Homo sapien
attagatgataaatcaagtggttggatatccaa

SEQ ID NO: 561406 - DNA, 33 bp, Homo sapien
attagatgataaatcaggtggttggatatccaa

SEQ ID NO: 561407 - DNA, 33 bp, Homo sapien
tgtccaccattttatccctgtgattagtacaca

SEQ ID NO: 561408 - DNA, 33 bp, Homo sapien
tgtccaccattttatctctgtgattagtacaca

SEQ ID NO: 561409 - DNA, 33 bp, Homo sapien
ccactctaactctcaaaagcatctataagttgt

SEQ ID NO: 561410 - DNA, 33 bp, Homo sapien
ccactctaactctcaacagcatctataagttgt

SEQ ID NO: 561411 - DNA, 33 bp, Homo sapien
agtgtccggcaaacaaagattaatgcctctcct

SEQ ID NO: 561412 - DNA, 33 bp, Homo sapien
agtgtccggcaaacaatgattaatgcctctcct

SEQ ID NO: 561413 - DNA, 33 bp, Homo sapien
aagtgttttgaatatcgctttggattccctcat

SEQ ID NO: 561414 - DNA, 33 bp, Homo sapien
aagtgttttgaatatctctttggattccctcat

SEQ ID NO: 561415 - DNA, 33 bp, Homo sapien
tcaggtaggcggatgacgaaggaagagtgggaa

SEQ ID NO: 561416 - DNA, 33 bp, Homo sapien
tcaggtaggcggatgatgaaggaagagtgggaa

SEQ ID NO: 561417 - DNA, 33 bp, Homo sapien
aaagattttgaaagtcagaagctacatataaat

SEQ ID NO: 561418 - DNA, 33 bp, Homo sapien
aaagattttgaaagtcggaagctacatataaat

SEQ ID NO: 561419 - DNA, 33 bp, Homo sapien
gaaaacatacagaatcaaatctaggcctgctaa

SEQ ID NO: 561420 - DNA, 33 bp, Homo sapien
gaaaacatacagaatcgaatctaggcctgctaa

SEQ ID NO: 561421 - DNA, 33 bp, Homo sapien
ataattttattgcttgcagattattagatgctc

SEQ ID NO: 561422 - DNA, 33 bp, Homo sapien
ataattttattgcttgtagattattagatgctc

SEQ ID NO: 561423 - DNA, 33 bp, Homo sapien
ataatccaaaaatccagtcgcttttctttagaa

SEQ ID NO: 561424 - DNA, 33 bp, Homo sapien
ataatccaaaaatccattcgcttttctttagaa

SEQ ID NO: 561425 - DNA, 33 bp, Homo sapien
ccttcatgatatagacaaagccagatcacaaat

SEQ ID NO: 561426 - DNA, 33 bp, Homo sapien
ccttcatgatatagacgaagccagatcacaaat

SEQ ID NO: 561427 - DNA, 33 bp, Homo sapien
agggaactggccattgaacctaatcatcgcacc

SEQ ID NO: 561428 - DNA, 33 bp, Homo sapien
agggaactggccattgcacctaatcatcgcacc

SEQ ID NO: 561429 - DNA, 33 bp, Homo sapien
cttccatcactcctgaagtttaatgaaatgcca

SEQ ID NO: 561430 - DNA, 33 bp, Homo sapien
cttccatcactcctgacgtttaatgaaatgcca

SEQ ID NO: 561431 - DNA, 33 bp, Homo sapien
gaacatggtttattagaagcaaaagagctgcag

SEQ ID NO: 561432 - DNA, 33 bp, Homo sapien
gaacatggtttattaggagcaaaagagctgcag

SEQ ID NO: 561433 - DNA, 33 bp, Homo sapien
taatcctcttttaggaagaagtagagacaagtt

SEQ ID NO: 561434 - DNA, 33 bp, Homo sapien
taatcctcttttaggacgaagtagagacaagtt

SEQ ID NO: 561435 - DNA, 33 bp, Homo sapien
tttaaactacaattgaagagagcaataccatat

SEQ ID NO: 561436 - DNA, 33 bp, Homo sapien
tttaaactacaattgaggagagcaataccatat

SEQ ID NO: 561437 - DNA, 33 bp, Homo sapien
gcatttcttgaaatgcaataaacagagccaaca

SEQ ID NO: 561438 - DNA, 33 bp, Homo sapien
gcatttcttgaaatgccataaacagagccaaca

SEQ ID NO: 561439 - DNA, 33 bp, Homo sapien
gatactgacaaacaagaaagtgtttatgaatgg

SEQ ID NO: 561440 - DNA, 33 bp, Homo sapien
gatactgacaaacaaggaagtgtttatgaatgg

SEQ ID NO: 561441 - DNA, 33 bp, Homo sapien
gccatatgtgaaacctcactttctgcctgttga

SEQ ID NO: 561442 - DNA, 33 bp, Homo sapien
gccatatgtgaaaccttactttctgcctgttga

SEQ ID NO: 561443 - DNA, 33 bp, Homo sapien
taactatatcaacatcaagttattatttcacaa

SEQ ID NO: 561444 - DNA, 33 bp, Homo sapien
taactatatcaacatcgagttattatttcacaa

SEQ ID NO: 561445 - DNA, 33 bp, Homo sapien
catgttttgaaccaagcatggtctgaccagcat

SEQ ID NO: 561446 - DNA, 33 bp, Homo sapien
catgttttgaaccaagtatggtctgaccagcat

SEQ ID NO: 561447 - DNA, 33 bp, Homo sapien
aggggaatgccttttacctcaaggtgggtttac

SEQ ID NO: 561448 - DNA, 33 bp, Homo sapien
aggggaatgccttttagctcaaggtgggtttac

SEQ ID NO: 561449 - DNA, 33 bp, Homo sapien
agcttggttctgagcacagtttctgtgtaaacc

SEQ ID NO: 561450 - DNA, 33 bp, Homo sapien
agcttggttctgagcagagtttctgtgtaaacc

SEQ ID NO: 561451 - DNA, 33 bp, Homo sapien
aatcaaagtgcaagacaaagtgcagtgaatata

SEQ ID NO: 561452 - DNA, 33 bp, Homo sapien
aatcaaagtgcaagacgaagtgcagtgaatata

SEQ ID NO: 561453 - DNA, 33 bp, Homo sapien
cttacacaaacctcgacggtatagcctactaca

SEQ ID NO: 561454 - DNA, 33 bp, Homo sapien
cttacacaaacctcgatggtatagcctactaca

SEQ ID NO: 561455 - DNA, 33 bp, Homo sapien
acttgtagtaatgaaaatgagatttgttcatat

SEQ ID NO: 561456 - DNA, 33 bp, Homo sapien
acttgtagtaatgaaagtgagatttgttcatat

SEQ ID NO: 561457 - DNA, 33 bp, Homo sapien
ttggggggcttgaaaagagaagaatgtcctgga

SEQ ID NO: 561458 - DNA, 33 bp, Homo sapien
ttggggggcttgaaaatagaagaatgtcctgga

SEQ ID NO: 561459 - DNA, 33 bp, Homo sapien
gtgcaatctatatccacggtttgagagagaagt

SEQ ID NO: 561460 - DNA, 33 bp, Homo sapien
gtgcaatctatatccatggtttgagagagaagt

SEQ ID NO: 561461 - DNA, 33 bp, Homo sapien
ctggcatttaaaatcaagtacagtaagagaaaa

SEQ ID NO: 561462 - DNA, 33 bp, Homo sapien
ctggcatttaaaatcaggtacagtaagagaaaa

SEQ ID NO: 561463 - DNA, 33 bp, Homo sapien
tctgtgtgctagggaaaactctgatcaccatct

SEQ ID NO: 561464 - DNA, 33 bp, Homo sapien
tctgtgtgctagggaagactctgatcaccatct

SEQ ID NO: 561465 - DNA, 33 bp, Homo sapien
gtttcaatacacctgaccttccttccatgcatg

SEQ ID NO: 561466 - DNA, 33 bp, Homo sapien
gtttcaatacacctgatcttccttccatgcatg

SEQ ID NO: 561467 - DNA, 33 bp, Homo sapien
agagttacaagatgcacaagaaggaataatcct

SEQ ID NO: 561468 - DNA, 33 bp, Homo sapien
agagttacaagatgcagaagaaggaataatcct

SEQ ID NO: 561469 - DNA, 33 bp, Homo sapien
atcttaccagctgtacagaataagaacctgtga

SEQ ID NO: 561470 - DNA, 33 bp, Homo sapien
atcttaccagctgtacggaataagaacctgtga

SEQ ID NO: 561471 - DNA, 33 bp, Homo sapien
tgggaccttaatctgacaggactgtggccttat

SEQ ID NO: 561472 - DNA, 33 bp, Homo sapien
tgggaccttaatctgataggactgtggccttat

SEQ ID NO: 561473 - DNA, 33 bp, Homo sapien
tggtcaaaccatgtttaaaaaaatcaatacaga

SEQ ID NO: 561474 - DNA, 33 bp, Homo sapien
tggtcaaaccatgttttaaaaaatcaatacaga

SEQ ID NO: 561475 - DNA, 33 bp, Homo sapien
gattttaggtgatgtaaagattaacacattatg

SEQ ID NO: 561476 - DNA, 33 bp, Homo sapien
gattttaggtgatgtagagattaacacattatg

SEQ ID NO: 561477 - DNA, 33 bp, Homo sapien
gatgcagaaatagaaaaagtctgggacattcag

SEQ ID NO: 561478 - DNA, 33 bp, Homo sapien
gatgcagaaatagaaagagtctgggacattcag

SEQ ID NO: 561479 - DNA, 33 bp, Homo sapien
atagatactttcaagactaaactgaactgaagt

SEQ ID NO: 561480 - DNA, 33 bp, Homo sapien
atagatactttcaagattaaactgaactgaagt

SEQ ID NO: 561481 - DNA, 33 bp, Homo sapien
ctgcaaaaggtacttaacctacttagcctcctg

SEQ ID NO: 561482 - DNA, 33 bp, Homo sapien
ctgcaaaaggtacttagcctacttagcctcctg

SEQ ID NO: 561483 - DNA, 33 bp, Homo sapien
agtaaatgtgaaatacggagttttagtcctcac

SEQ ID NO: 561484 - DNA, 33 bp, Homo sapien
agtaaatgtgaaatactgagttttagtcctcac

SEQ ID NO: 561485 - DNA, 33 bp, Homo sapien
atgtccagcttctctaggccaacaacctccaat

SEQ ID NO: 561486 - DNA, 33 bp, Homo sapien
atgtccagcttctctatgccaacaacctccaat

SEQ ID NO: 561487 - DNA, 33 bp, Homo sapien
taagctgagaaaatcaatatacaaatagacaat

SEQ ID NO: 561488 - DNA, 33 bp, Homo sapien
taagctgagaaaatcagtatacaaatagacaat

SEQ ID NO: 561489 - DNA, 33 bp, Homo sapien
taagctgcagaaatgacacggttgaggagtttc

SEQ ID NO: 561490 - DNA, 33 bp, Homo sapien
taagctgcagaaatgatacggttgaggagtttc

SEQ ID NO: 561491 - DNA, 33 bp, Homo sapien
tagctcaagaaattaacagaaagacttggatct

SEQ ID NO: 561492 - DNA, 33 bp, Homo sapien
tagctcaagaaattaatagaaagacttggatct

SEQ ID NO: 561493 - DNA, 33 bp, Homo sapien
atatgctcacaaaagccccaaacttgacacaac

SEQ ID NO: 561494 - DNA, 33 bp, Homo sapien
atatgctcacaaaagcgccaaacttgacacaac

SEQ ID NO: 561495 - DNA, 33 bp, Homo sapien
tgaagacctcatgaaccaagtaagctctgctga

SEQ ID NO: 561496 - DNA, 33 bp, Homo sapien
tgaagacctcatgaactaagtaagctctgctga

SEQ ID NO: 561497 - DNA, 33 bp, Homo sapien
ttttatggaaaactcacagcaatttcaggagga

SEQ ID NO: 561498 - DNA, 33 bp, Homo sapien
ttttatggaaaactcagagcaatttcaggagga

SEQ ID NO: 561499 - DNA, 33 bp, Homo sapien
ctctcaacttggtttaagatgctgccagcatat

SEQ ID NO: 561500 - DNA, 33 bp, Homo sapien
ctctcaacttggtttatgatgctgccagcatat

SEQ ID NO: 561501 - DNA, 33 bp, Homo sapien
cactctactattaagccctttgcccagtgtgag

SEQ ID NO: 561502 - DNA, 33 bp, Homo sapien
cactctactattaagctctttgcccagtgtgag

SEQ ID NO: 561503 - DNA, 33 bp, Homo sapien
actgaaataaattcaaagtgccttaaagatata

SEQ ID NO: 561504 - DNA, 33 bp, Homo sapien
actgaaataaattcaaggtgccttaaagatata

SEQ ID NO: 561505 - DNA, 33 bp, Homo sapien
taaatacatggaccacccggagtactaaggata

SEQ ID NO: 561506 - DNA, 33 bp, Homo sapien
taaatacatggaccactcggagtactaaggata

SEQ ID NO: 561507 - DNA, 33 bp, Homo sapien
taaaaagctcactgtcaatttggaggaagataa

SEQ ID NO: 561508 - DNA, 33 bp, Homo sapien
taaaaagctcactgtctatttggaggaagataa

SEQ ID NO: 561509 - DNA, 33 bp, Homo sapien
aataggaatgaatttaacaggtattttgtcaca

SEQ ID NO: 561510 - DNA, 33 bp, Homo sapien
aataggaatgaatttagcaggtattttgtcaca

SEQ ID NO: 561511 - DNA, 33 bp, Homo sapien
aaaacaacaagaaaaacgtgtcaagtcacatat

SEQ ID NO: 561512 - DNA, 33 bp, Homo sapien
aaaacaacaagaaaaatgtgtcaagtcacatat

SEQ ID NO: 561513 - DNA, 33 bp, Homo sapien
ccagatatgtcaacctaaataacaggcagagag

SEQ ID NO: 561514 - DNA, 33 bp, Homo sapien
ccagatatgtcaacctcaataacaggcagagag

SEQ ID NO: 561515 - DNA, 33 bp, Homo sapien
gcagctcagtccaagcacagctttaattaatga

SEQ ID NO: 561516 - DNA, 33 bp, Homo sapien
gcagctcagtccaagcgcagctttaattaatga

SEQ ID NO: 561517 - DNA, 33 bp, Homo sapien
gcagagagattaggacccccctagcctgtagtt

SEQ ID NO: 561518 - DNA, 33 bp, Homo sapien
gcagagagattaggactcccctagcctgtagtt

SEQ ID NO: 561519 - DNA, 33 bp, Homo sapien
ataagcatcattttgacaaaaagagaaagggat

SEQ ID NO: 561520 - DNA, 33 bp, Homo sapien
ataagcatcattttgataaaaagagaaagggat

SEQ ID NO: 561521 - DNA, 33 bp, Homo sapien
cttgtaagtaggggccacacagttaatatgtga

SEQ ID NO: 561522 - DNA, 33 bp, Homo sapien
cttgtaagtaggggccgcacagttaatatgtga

SEQ ID NO: 561523 - DNA, 33 bp, Homo sapien
tgcaggactgataaaaactagctcaaaaggctg

SEQ ID NO: 561524 - DNA, 33 bp, Homo sapien
tgcaggactgataaaagctagctcaaaaggctg

SEQ ID NO: 561525 - DNA, 33 bp, Homo sapien
ggtgatacatggatggacaaatattgtgaccct

SEQ ID NO: 561526 - DNA, 33 bp, Homo sapien
ggtgatacatggatgggcaaatattgtgaccct

SEQ ID NO: 561527 - DNA, 33 bp, Homo sapien
gaaaaggagtagatgcaaaaaaaatcaaatcat

SEQ ID NO: 561528 - DNA, 33 bp, Homo sapien
gaaaaggagtagatgcgaaaaaaatcaaatcat

SEQ ID NO: 561529 - DNA, 33 bp, Homo sapien
aggctgttaatgccagcctgaggttatcagatg

SEQ ID NO: 561530 - DNA, 33 bp, Homo sapien
aggctgttaatgccaggctgaggttatcagatg

SEQ ID NO: 561531 - DNA, 33 bp, Homo sapien
agtgagcctaaacacaagagataagtgtttgac

SEQ ID NO: 561532 - DNA, 33 bp, Homo sapien
agtgagcctaaacacaggagataagtgtttgac

SEQ ID NO: 561533 - DNA, 33 bp, Homo sapien
ccagccatcccagaggaaagagccaacctgtta

SEQ ID NO: 561534 - DNA, 33 bp, Homo sapien
ccagccatcccagaggcaagagccaacctgtta

SEQ ID NO: 561535 - DNA, 33 bp, Homo sapien
ctggaatagaagacacagagcagttgaggcacc

SEQ ID NO: 561536 - DNA, 33 bp, Homo sapien
ctggaatagaagacacggagcagttgaggcacc

SEQ ID NO: 561537 - DNA, 33 bp, Homo sapien
caaagatccaagattcccaattacacattttta

SEQ ID NO: 561538 - DNA, 33 bp, Homo sapien
caaagatccaagattctcaattacacattttta

SEQ ID NO: 561539 - DNA, 33 bp, Homo sapien
gtcccacaattcatgaagctctctcttctgttt

SEQ ID NO: 561540 - DNA, 33 bp, Homo sapien
gtcccacaattcatgaggctctctcttctgttt

SEQ ID NO: 561541 - DNA, 33 bp, Homo sapien
ttccatctttggagaacgtttttaacctctctg

SEQ ID NO: 561542 - DNA, 33 bp, Homo sapien
ttccatctttggagaatgtttttaacctctctg

SEQ ID NO: 561543 - DNA, 33 bp, Homo sapien
acactcagagcaaaataaaacataaaccataat

SEQ ID NO: 561544 - DNA, 33 bp, Homo sapien
acactcagagcaaaatgaaacataaaccataat

SEQ ID NO: 561545 - DNA, 33 bp, Homo sapien
taatgttactttccaaatgggcttattgaaaca

SEQ ID NO: 561546 - DNA, 33 bp, Homo sapien
taatgttactttccaagtgggcttattgaaaca

SEQ ID NO: 561547 - DNA, 33 bp, Homo sapien
aactcagattgcaccacaagagtctgctatcca

SEQ ID NO: 561548 - DNA, 33 bp, Homo sapien
aactcagattgcaccataagagtctgctatcca

SEQ ID NO: 561549 - DNA, 33 bp, Homo sapien
agaacagtacctggaaaaaaactcagtaactgt

SEQ ID NO: 561550 - DNA, 33 bp, Homo sapien
agaacagtacctggaagaaaactcagtaactgt

SEQ ID NO: 561551 - DNA, 33 bp, Homo sapien
ggagtatatgttggaaacagtggcaattgctta

SEQ ID NO: 561552 - DNA, 33 bp, Homo sapien
ggagtatatgttggaatcagtggcaattgctta

SEQ ID NO: 561553 - DNA, 33 bp, Homo sapien
taaactctcgcctctaagtgacctcgagtctcc

SEQ ID NO: 561554 - DNA, 33 bp, Homo sapien
taaactctcgcctctaggtgacctcgagtctcc

SEQ ID NO: 561555 - DNA, 33 bp, Homo sapien
cctaacacggatttacaattcctgctttatgca

SEQ ID NO: 561556 - DNA, 33 bp, Homo sapien
cctaacacggatttacgattcctgctttatgca

SEQ ID NO: 561557 - DNA, 33 bp, Homo sapien
atgatatgtcctagaaaagatgcacatttgtgt

SEQ ID NO: 561558 - DNA, 33 bp, Homo sapien
atgatatgtcctagaagagatgcacatttgtgt

SEQ ID NO: 561559 - DNA, 33 bp, Homo sapien
acatcaatttaaacaaactgcaagatataagaa

SEQ ID NO: 561560 - DNA, 33 bp, Homo sapien
acatcaatttaaacaacctgcaagatataagaa

SEQ ID NO: 561561 - DNA, 33 bp, Homo sapien
tctaattttatccaaacagccattagaagttct

SEQ ID NO: 561562 - DNA, 33 bp, Homo sapien
tctaattttatccaaagagccattagaagttct

SEQ ID NO: 561563 - DNA, 33 bp, Homo sapien
ttaatcacttgggtaccggagaaatcattttga

SEQ ID NO: 561564 - DNA, 33 bp, Homo sapien
ttaatcacttgggtactggagaaatcattttga

SEQ ID NO: 561565 - DNA, 33 bp, Homo sapien
aatgaatgttataggaacattgaggcagcaaga

SEQ ID NO: 561566 - DNA, 33 bp, Homo sapien
aatgaatgttataggaccattgaggcagcaaga

SEQ ID NO: 561567 - DNA, 33 bp, Homo sapien
ctgaggttctctctacagaaaggaatctcttct

SEQ ID NO: 561568 - DNA, 33 bp, Homo sapien
ctgaggttctctctaccgaaaggaatctcttct

SEQ ID NO: 561569 - DNA, 33 bp, Homo sapien
tgattcttcttaataaaggtggtgcaacctatg

SEQ ID NO: 561570 - DNA, 33 bp, Homo sapien
tgattcttcttaataagggtggtgcaacctatg

SEQ ID NO: 561571 - DNA, 33 bp, Homo sapien
gctaagagtgcacagaatagcagcacagttcac

SEQ ID NO: 561572 - DNA, 33 bp, Homo sapien
gctaagagtgcacagagtagcagcacagttcac

SEQ ID NO: 561573 - DNA, 33 bp, Homo sapien
aatctgtattatgcaaaatgaaagagaagagct

SEQ ID NO: 561574 - DNA, 33 bp, Homo sapien
aatctgtattatgcaacatgaaagagaagagct

SEQ ID NO: 561575 - DNA, 33 bp, Homo sapien
cccagataaaagtcaacaccaatatcccaacat

SEQ ID NO: 561576 - DNA, 33 bp, Homo sapien
cccagataaaagtcaataccaatatcccaacat

SEQ ID NO: 561577 - DNA, 33 bp, Homo sapien
atatttctaccttcataacaatctagacttttc

SEQ ID NO: 561578 - DNA, 33 bp, Homo sapien
atatttctaccttcatgacaatctagacttttc

SEQ ID NO: 561579 - DNA, 33 bp, Homo sapien
gtccaaccctgggtgacgaagcaatgtctcaat

SEQ ID NO: 561580 - DNA, 33 bp, Homo sapien
gtccaaccctgggtgatgaagcaatgtctcaat

SEQ ID NO: 561581 - DNA, 33 bp, Homo sapien
gggtatacctctgcaacaaagtttctattggat

SEQ ID NO: 561582 - DNA, 33 bp, Homo sapien
gggtatacctctgcaagaaagtttctattggat

SEQ ID NO: 561583 - DNA, 33 bp, Homo sapien
agccatcagagtaatactaaacatcagttctaa

SEQ ID NO: 561584 - DNA, 33 bp, Homo sapien
agccatcagagtaatattaaacatcagttctaa

SEQ ID NO: 561585 - DNA, 33 bp, Homo sapien
tactccactgtccctacaccgtgctaatccact

SEQ ID NO: 561586 - DNA, 33 bp, Homo sapien
tactccactgtccctataccgtgctaatccact

SEQ ID NO: 561587 - DNA, 33 bp, Homo sapien
tagactgtggacaaatcaatgaaatccctagtt

SEQ ID NO: 561588 - DNA, 33 bp, Homo sapien
tagactgtggacaaattaatgaaatccctagtt

SEQ ID NO: 561589 - DNA, 33 bp, Homo sapien
agcagcaagcagtgagcaactagggatttcatt

SEQ ID NO: 561590 - DNA, 33 bp, Homo sapien
agcagcaagcagtgagtaactagggatttcatt

SEQ ID NO: 561591 - DNA, 33 bp, Homo sapien
ttatctttagtgaactcactccaaaaccttggc

SEQ ID NO: 561592 - DNA, 33 bp, Homo sapien
ttatctttagtgaacttactccaaaaccttggc

SEQ ID NO: 561593 - DNA, 33 bp, Homo sapien
tgacattgttcactgaagtcctcaagaatttcc

SEQ ID NO: 561594 - DNA, 33 bp, Homo sapien
tgacattgttcactgaggtcctcaagaatttcc

SEQ ID NO: 561595 - DNA, 33 bp, Homo sapien
cctggacttcagcccaataaaacttggagcaga

SEQ ID NO: 561596 - DNA, 33 bp, Homo sapien
cctggacttcagcccagtaaaacttggagcaga

SEQ ID NO: 561597 - DNA, 33 bp, Homo sapien
gagtcattgtaaagacaattcatgatcttagaa

SEQ ID NO: 561598 - DNA, 33 bp, Homo sapien
gagtcattgtaaagacgattcatgatcttagaa

SEQ ID NO: 561599 - DNA, 33 bp, Homo sapien
gaatgggtccaaagagaagagaggcaagaacag

SEQ ID NO: 561600 - DNA, 33 bp, Homo sapien
gaatgggtccaaagaggagagaggcaagaacag

SEQ ID NO: 561601 - DNA, 33 bp, Homo sapien
tcatcattggttaaagactgcccccaggtgaac

SEQ ID NO: 561602 - DNA, 33 bp, Homo sapien
tcatcattggttaaaggctgcccccaggtgaac

SEQ ID NO: 561603 - DNA, 33 bp, Homo sapien
gactatttagattttcacagtttctacattttt

SEQ ID NO: 561604 - DNA, 33 bp, Homo sapien
gactatttagattttctcagtttctacattttt

SEQ ID NO: 561605 - DNA, 33 bp, Homo sapien
gttattcattctttcacatatagagcagtttta

SEQ ID NO: 561606 - DNA, 33 bp, Homo sapien
gttattcattctttcatatatagagcagtttta

SEQ ID NO: 561607 - DNA, 33 bp, Homo sapien
gctgtatcagattctaaatctcaaaccagtctg

SEQ ID NO: 561608 - DNA, 33 bp, Homo sapien
gctgtatcagattctatatctcaaaccagtctg

SEQ ID NO: 561609 - DNA, 33 bp, Homo sapien
gaaaagtcatcctgtcacttgctctgctaggcc

SEQ ID NO: 561610 - DNA, 33 bp, Homo sapien
gaaaagtcatcctgtcgcttgctctgctaggcc

SEQ ID NO: 561611 - DNA, 33 bp, Homo sapien
aatagcctataaaaaccaggtctcggttgaaac

SEQ ID NO: 561612 - DNA, 33 bp, Homo sapien
aatagcctataaaaactaggtctcggttgaaac

SEQ ID NO: 561613 - DNA, 33 bp, Homo sapien
attgcagcacaaaataccttgaccataaactct

SEQ ID NO: 561614 - DNA, 33 bp, Homo sapien
attgcagcacaaaatatcttgaccataaactct

SEQ ID NO: 561615 - DNA, 33 bp, Homo sapien
ggaactgagaccctaacggcatagccattggta

SEQ ID NO: 561616 - DNA, 33 bp, Homo sapien
ggaactgagaccctaagggcatagccattggta

SEQ ID NO: 561617 - DNA, 33 bp, Homo sapien
tccccttgtataatgcaacacatccccattgtt

SEQ ID NO: 561618 - DNA, 33 bp, Homo sapien
tccccttgtataatgcgacacatccccattgtt

SEQ ID NO: 561619 - DNA, 33 bp, Homo sapien
aatccacttactggtcaccaagttatgcagata

SEQ ID NO: 561620 - DNA, 33 bp, Homo sapien
aatccacttactggtcgccaagttatgcagata

SEQ ID NO: 561621 - DNA, 33 bp, Homo sapien
tggctgcagagatcaaaatttctggaataccat

SEQ ID NO: 561622 - DNA, 33 bp, Homo sapien
tggctgcagagatcaagatttctggaataccat

SEQ ID NO: 561623 - DNA, 33 bp, Homo sapien
ttgtcagatgacagaaaggtaaaggttagcagc

SEQ ID NO: 561624 - DNA, 33 bp, Homo sapien
ttgtcagatgacagaagggtaaaggttagcagc

SEQ ID NO: 561625 - DNA, 33 bp, Homo sapien
ggtcaataaagtttcacgatgaggagtaaaaac

SEQ ID NO: 561626 - DNA, 33 bp, Homo sapien
ggtcaataaagtttcatgatgaggagtaaaaac

SEQ ID NO: 561627 - DNA, 33 bp, Homo sapien
ggccaacaaagatctccagtttagctggtaaga

SEQ ID NO: 561628 - DNA, 33 bp, Homo sapien
ggccaacaaagatctctagtttagctggtaaga

SEQ ID NO: 561629 - DNA, 33 bp, Homo sapien
aggagctgtgcgttaactgtggtgtttctgggc

SEQ ID NO: 561630 - DNA, 33 bp, Homo sapien
aggagctgtgcgttaattgtggtgtttctgggc

SEQ ID NO: 561631 - DNA, 33 bp, Homo sapien
ttcttctaagcccaaactatcttccacatcaac

SEQ ID NO: 561632 - DNA, 33 bp, Homo sapien
ttcttctaagcccaaagtatcttccacatcaac

SEQ ID NO: 561633 - DNA, 33 bp, Homo sapien
ccaaatgaaatgcacccactgagaaatcctgac

SEQ ID NO: 561634 - DNA, 33 bp, Homo sapien
ccaaatgaaatgcacctactgagaaatcctgac

SEQ ID NO: 561635 - DNA, 33 bp, Homo sapien
gatctcttccaaaaccagatccacctctgttct

SEQ ID NO: 561636 - DNA, 33 bp, Homo sapien
gatctcttccaaaaccggatccacctctgttct

SEQ ID NO: 561637 - DNA, 33 bp, Homo sapien
agtttgatatttctaccagcaagacattgagga

SEQ ID NO: 561638 - DNA, 33 bp, Homo sapien
agtttgatatttctactagcaagacattgagga

SEQ ID NO: 561639 - DNA, 33 bp, Homo sapien
aaaattatcccagttcaaatgataaattacatg

SEQ ID NO: 561640 - DNA, 33 bp, Homo sapien
aaaattatcccagttcgaatgataaattacatg

SEQ ID NO: 561641 - DNA, 33 bp, Homo sapien
tagcagagttgggtaacagagtttcggcagtgc

SEQ ID NO: 561642 - DNA, 33 bp, Homo sapien
tagcagagttgggtaagagagtttcggcagtgc

SEQ ID NO: 561643 - DNA, 33 bp, Homo sapien
ttctggaggcctaataaacagcaaggtgactat

SEQ ID NO: 561644 - DNA, 33 bp, Homo sapien
ttctggaggcctaatatacagcaaggtgactat

SEQ ID NO: 561645 - DNA, 33 bp, Homo sapien
gtggaggatatgttaaatgtccttgagaatggt

SEQ ID NO: 561646 - DNA, 33 bp, Homo sapien
gtggaggatatgttaattgtccttgagaatggt

SEQ ID NO: 561647 - DNA, 33 bp, Homo sapien
ccatgcagttacaacaacagactcaactcaccc

SEQ ID NO: 561648 - DNA, 33 bp, Homo sapien
ccatgcagttacaacagcagactcaactcaccc

SEQ ID NO: 561649 - DNA, 33 bp, Homo sapien
tctaatggtacagggaaggcatctttcacatgg

SEQ ID NO: 561650 - DNA, 33 bp, Homo sapien
tctaatggtacagggagggcatctttcacatgg

SEQ ID NO: 561651 - DNA, 33 bp, Homo sapien
ttccttgagcttccccacgtactttacttttcc

SEQ ID NO: 561652 - DNA, 33 bp, Homo sapien
ttccttgagcttccccgcgtactttacttttcc

SEQ ID NO: 561653 - DNA, 33 bp, Homo sapien
tattaggttgaacaaaaagagataattgtggaa

SEQ ID NO: 561654 - DNA, 33 bp, Homo sapien
tattaggttgaacaaagagagataattgtggaa

SEQ ID NO: 561655 - DNA, 33 bp, Homo sapien
gatgacagtgagctaaagcagaagccaagagta

SEQ ID NO: 561656 - DNA, 33 bp, Homo sapien
gatgacagtgagctaaggcagaagccaagagta

SEQ ID NO: 561657 - DNA, 33 bp, Homo sapien
aaaagtatatctctaccgcaataagtatacaaa

SEQ ID NO: 561658 - DNA, 33 bp, Homo sapien
aaaagtatatctctactgcaataagtatacaaa

SEQ ID NO: 561659 - DNA, 33 bp, Homo sapien
tcccatattttaggaaacttttactgctaacat

SEQ ID NO: 561660 - DNA, 33 bp, Homo sapien
tcccatattttaggaatcttttactgctaacat

SEQ ID NO: 561661 - DNA, 33 bp, Homo sapien
ggtatgtggcatttccaaaagagatttatcacc

SEQ ID NO: 561662 - DNA, 33 bp, Homo sapien
ggtatgtggcatttccgaaagagatttatcacc

SEQ ID NO: 561663 - DNA, 33 bp, Homo sapien
actagagaatgcatggaacagatagactcactc

SEQ ID NO: 561664 - DNA, 33 bp, Homo sapien
actagagaatgcatgggacagatagactcactc

SEQ ID NO: 561665 - DNA, 33 bp, Homo sapien
agggggagattcattaagtgagttggctcccac

SEQ ID NO: 561666 - DNA, 33 bp, Homo sapien
agggggagattcattaggtgagttggctcccac

SEQ ID NO: 561667 - DNA, 33 bp, Homo sapien
gccatctctcgtcccccacacctctggctcaga

SEQ ID NO: 561668 - DNA, 33 bp, Homo sapien
gccatctctcgtcccctacacctctggctcaga

SEQ ID NO: 561669 - DNA, 33 bp, Homo sapien
ggcagaggcccagagaagggattctgagccaga

SEQ ID NO: 561670 - DNA, 33 bp, Homo sapien
ggcagaggcccagagaggggattctgagccaga

SEQ ID NO: 561671 - DNA, 33 bp, Homo sapien
aacaccctggtcaacactaacatcacccctcta

SEQ ID NO: 561672 - DNA, 33 bp, Homo sapien
aacaccctggtcaacattaacatcacccctcta

SEQ ID NO: 561673 - DNA, 33 bp, Homo sapien
ggtaccactacgggatcaatttgaaacaggatg

SEQ ID NO: 561674 - DNA, 33 bp, Homo sapien
ggtaccactacgggattaatttgaaacaggatg

SEQ ID NO: 561675 - DNA, 33 bp, Homo sapien
gcatgtcaggcctgaagcgctatgcacattctc

SEQ ID NO: 561676 - DNA, 33 bp, Homo sapien
gcatgtcaggcctgaatcgctatgcacattctc

SEQ ID NO: 561677 - DNA, 33 bp, Homo sapien
agctttcacggctagaacatgccatagactcag

SEQ ID NO: 561678 - DNA, 33 bp, Homo sapien
agctttcacggctagagcatgccatagactcag

SEQ ID NO: 561679 - DNA, 33 bp, Homo sapien
actccattgatttggactaatttaaaagagtga

SEQ ID NO: 561680 - DNA, 33 bp, Homo sapien
actccattgatttggagtaatttaaaagagtga

SEQ ID NO: 561681 - DNA, 33 bp, Homo sapien
gaaagttgaaaagcaaatgaaaagtcacatcta

SEQ ID NO: 561682 - DNA, 33 bp, Homo sapien
gaaagttgaaaagcaagtgaaaagtcacatcta

SEQ ID NO: 561683 - DNA, 33 bp, Homo sapien
aagagcagtggctccacgcacaagtcagcaagc

SEQ ID NO: 561684 - DNA, 33 bp, Homo sapien
aagagcagtggctccatgcacaagtcagcaagc

SEQ ID NO: 561685 - DNA, 33 bp, Homo sapien
aggaaacgtgctgagaagaaaccttgctgattt

SEQ ID NO: 561686 - DNA, 33 bp, Homo sapien
aggaaacgtgctgagaggaaaccttgctgattt

SEQ ID NO: 561687 - DNA, 33 bp, Homo sapien
agcaggcgtatttaaacctctagcacgtcaggg

SEQ ID NO: 561688 - DNA, 33 bp, Homo sapien
agcaggcgtatttaaatctctagcacgtcaggg

SEQ ID NO: 561689 - DNA, 33 bp, Homo sapien
tataccgtaaagattaaccatctaaatttgatt

SEQ ID NO: 561690 - DNA, 33 bp, Homo sapien
tataccgtaaagattagccatctaaatttgatt

SEQ ID NO: 561691 - DNA, 33 bp, Homo sapien
tcagcagaggggacctaactgagaagcagggga

SEQ ID NO: 561692 - DNA, 33 bp, Homo sapien
tcagcagaggggacctgactgagaagcagggga

SEQ ID NO: 561693 - DNA, 33 bp, Homo sapien
gcaagtctgtctacaccgggcatcttagctgct

SEQ ID NO: 561694 - DNA, 33 bp, Homo sapien
gcaagtctgtctacactgggcatcttagctgct

SEQ ID NO: 561695 - DNA, 33 bp, Homo sapien
acacagcacaccttgaaccagtccttggaagat

SEQ ID NO: 561696 - DNA, 33 bp, Homo sapien
acacagcacaccttgagccagtccttggaagat

SEQ ID NO: 561697 - DNA, 33 bp, Homo sapien
ccaggacagccactggcacaagaacagctagct

SEQ ID NO: 561698 - DNA, 33 bp, Homo sapien
ccaggacagccactgggacaagaacagctagct

SEQ ID NO: 561699 - DNA, 33 bp, Homo sapien
gggtggcctctggcaacgtccaggaaaaaaagt

SEQ ID NO: 561700 - DNA, 33 bp, Homo sapien
gggtggcctctggcaatgtccaggaaaaaaagt

SEQ ID NO: 561701 - DNA, 33 bp, Homo sapien
gctctgggatgcttcgcactgggcacagcacaa

SEQ ID NO: 561702 - DNA, 33 bp, Homo sapien
gctctgggatgcttcgtactgggcacagcacaa

SEQ ID NO: 561703 - DNA, 33 bp, Homo sapien
taccttgattttacctgaatcttcatcttactt

SEQ ID NO: 561704 - DNA, 33 bp, Homo sapien
taccttgattttaccttaatcttcatcttactt

SEQ ID NO: 561705 - DNA, 33 bp, Homo sapien
ctggtccacaggtgcaagataaactcaattctt

SEQ ID NO: 561706 - DNA, 33 bp, Homo sapien
ctggtccacaggtgcaggataaactcaattctt

SEQ ID NO: 561707 - DNA, 33 bp, Homo sapien
agccagtgagtgggtaaatgaaggcattttcag

SEQ ID NO: 561708 - DNA, 33 bp, Homo sapien
agccagtgagtgggtacatgaaggcattttcag

SEQ ID NO: 561709 - DNA, 33 bp, Homo sapien
gctgtgaatcaaaaagccctcatcagaaaattg

SEQ ID NO: 561710 - DNA, 33 bp, Homo sapien
gctgtgaatcaaaaagtcctcatcagaaaattg

SEQ ID NO: 561711 - DNA, 33 bp, Homo sapien
taattcttatccagaaagcaggaagaacagagt

SEQ ID NO: 561712 - DNA, 33 bp, Homo sapien
taattcttatccagaacgcaggaagaacagagt

SEQ ID NO: 561713 - DNA, 33 bp, Homo sapien
ggatgtattttaaagcaatgttagatttattga

SEQ ID NO: 561714 - DNA, 33 bp, Homo sapien
ggatgtattttaaagcgatgttagatttattga

SEQ ID NO: 561715 - DNA, 33 bp, Homo sapien
ttcttaaatgccattccagttattcagcaatta

SEQ ID NO: 561716 - DNA, 33 bp, Homo sapien
ttcttaaatgccattctagttattcagcaatta

SEQ ID NO: 561717 - DNA, 33 bp, Homo sapien
gaaatttctgttcctaaccatcatttctaaaaa

SEQ ID NO: 561718 - DNA, 33 bp, Homo sapien
gaaatttctgttcctatccatcatttctaaaaa

SEQ ID NO: 561719 - DNA, 33 bp, Homo sapien
aaatagctgatgacgacctagtgttagcaagct

SEQ ID NO: 561720 - DNA, 33 bp, Homo sapien
aaatagctgatgacgatctagtgttagcaagct

SEQ ID NO: 561721 - DNA, 33 bp, Homo sapien
ttagatataagataagactgtgaataaaataga

SEQ ID NO: 561722 - DNA, 33 bp, Homo sapien
ttagatataagataagtctgtgaataaaataga

SEQ ID NO: 561723 - DNA, 33 bp, Homo sapien
tgatttttgcctcttaacttacttgatatttta

SEQ ID NO: 561724 - DNA, 33 bp, Homo sapien
tgatttttgcctcttaccttacttgatatttta

SEQ ID NO: 561725 - DNA, 33 bp, Homo sapien
cttatctcctttctctcggatcaattacagagg

SEQ ID NO: 561726 - DNA, 33 bp, Homo sapien
cttatctcctttctcttggatcaattacagagg

SEQ ID NO: 561727 - DNA, 33 bp, Homo sapien
agacaattaagtgtgggaagagaaacacgtgag

SEQ ID NO: 561728 - DNA, 33 bp, Homo sapien
agacaattaagtgtggtaagagaaacacgtgag

SEQ ID NO: 561729 - DNA, 33 bp, Homo sapien
gtaagtcagaaaaggactataatgcaggtcaca

SEQ ID NO: 561730 - DNA, 33 bp, Homo sapien
gtaagtcagaaaaggattataatgcaggtcaca

SEQ ID NO: 561731 - DNA, 33 bp, Homo sapien
cctttttaagaacggaatcacagtgccaggagt

SEQ ID NO: 561732 - DNA, 33 bp, Homo sapien
cctttttaagaacggagtcacagtgccaggagt

SEQ ID NO: 561733 - DNA, 33 bp, Homo sapien
catggagaggggatccaacggcatttatcttct

SEQ ID NO: 561734 - DNA, 33 bp, Homo sapien
catggagaggggatccgacggcatttatcttct

SEQ ID NO: 561735 - DNA, 33 bp, Homo sapien
taagggcagacattagaaaagtcttgggcaacc

SEQ ID NO: 561736 - DNA, 33 bp, Homo sapien
taagggcagacattaggaaagtcttgggcaacc

SEQ ID NO: 561737 - DNA, 33 bp, Homo sapien
acacctgtgagggagacgatctgaaaggcaaac

SEQ ID NO: 561738 - DNA, 33 bp, Homo sapien
acacctgtgagggagatgatctgaaaggcaaac

SEQ ID NO: 561739 - DNA, 33 bp, Homo sapien
actgcctggactaatacatggcccttggctgga

SEQ ID NO: 561740 - DNA, 33 bp, Homo sapien
actgcctggactaatatatggcccttggctgga

SEQ ID NO: 561741 - DNA, 33 bp, Homo sapien
tttttacactgtaccccgagaattccacatttc

SEQ ID NO: 561742 - DNA, 33 bp, Homo sapien
tttttacactgtaccctgagaattccacatttc

SEQ ID NO: 561743 - DNA, 33 bp, Homo sapien
tctagagttctcagaaagaaggagacgtgcttc

SEQ ID NO: 561744 - DNA, 33 bp, Homo sapien
tctagagttctcagaaggaaggagacgtgcttc

SEQ ID NO: 561745 - DNA, 33 bp, Homo sapien
tcacttaaatttgaaactaaccctgtgagatat

SEQ ID NO: 561746 - DNA, 33 bp, Homo sapien
tcacttaaatttgaaagtaaccctgtgagatat

SEQ ID NO: 561747 - DNA, 33 bp, Homo sapien
tgacggagggcatgccaactgtcaaacacaaaa

SEQ ID NO: 561748 - DNA, 33 bp, Homo sapien
tgacggagggcatgccgactgtcaaacacaaaa

SEQ ID NO: 561749 - DNA, 33 bp, Homo sapien
attcaagtttggtaataaaatctctgctgccaa

SEQ ID NO: 561750 - DNA, 33 bp, Homo sapien
attcaagtttggtaatgaaatctctgctgccaa

SEQ ID NO: 561751 - DNA, 33 bp, Homo sapien
ttcacaaccttctagaataaattgcattgtgag

SEQ ID NO: 561752 - DNA, 33 bp, Homo sapien
ttcacaaccttctagattaaattgcattgtgag

SEQ ID NO: 561753 - DNA, 33 bp, Homo sapien
ctcttctctgtgagtgcatctgtatggccggaa

SEQ ID NO: 561754 - DNA, 33 bp, Homo sapien
ctcttctctgtgagtgtatctgtatggccggaa

SEQ ID NO: 561755 - DNA, 33 bp, Homo sapien
ttgattacgtgtcaccagctctgtaatttgtta

SEQ ID NO: 561756 - DNA, 33 bp, Homo sapien
ttgattacgtgtcaccggctctgtaatttgtta

SEQ ID NO: 561757 - DNA, 33 bp, Homo sapien
cattcaacactctaagaaggcccattttcagct

SEQ ID NO: 561758 - DNA, 33 bp, Homo sapien
cattcaacactctaaggaggcccattttcagct

SEQ ID NO: 561759 - DNA, 33 bp, Homo sapien
aaataataagtgcaaaaaactctaaagtccaat

SEQ ID NO: 561760 - DNA, 33 bp, Homo sapien
aaataataagtgcaaagaactctaaagtccaat

SEQ ID NO: 561761 - DNA, 33 bp, Homo sapien
agtaatgtggagatagaaaacagcacacaggga

SEQ ID NO: 561762 - DNA, 33 bp, Homo sapien
agtaatgtggagataggaaacagcacacaggga

SEQ ID NO: 561763 - DNA, 33 bp, Homo sapien
acctcctactcaaacaaacttgtttcagagctt

SEQ ID NO: 561764 - DNA, 33 bp, Homo sapien
acctcctactcaaacagacttgtttcagagctt

SEQ ID NO: 561765 - DNA, 33 bp, Homo sapien
acaagtgaagtaacaaaaacaacattttctaga

SEQ ID NO: 561766 - DNA, 33 bp, Homo sapien
acaagtgaagtaacaagaacaacattttctaga

SEQ ID NO: 561767 - DNA, 33 bp, Homo sapien
ggctggaaaggaactcagaaaatgacggtggct

SEQ ID NO: 561768 - DNA, 33 bp, Homo sapien
ggctggaaaggaactcggaaaatgacggtggct

SEQ ID NO: 561769 - DNA, 33 bp, Homo sapien
gctttaccttctgtgccacagatcaacataaat

SEQ ID NO: 561770 - DNA, 33 bp, Homo sapien
gctttaccttctgtgctacagatcaacataaat

SEQ ID NO: 561771 - DNA, 33 bp, Homo sapien
ggacaacagtgataagaaacacaggaaccattt

SEQ ID NO: 561772 - DNA, 33 bp, Homo sapien
ggacaacagtgataagcaacacaggaaccattt

SEQ ID NO: 561773 - DNA, 33 bp, Homo sapien
tagtttcttggtgcaccagacttctggacatga

SEQ ID NO: 561774 - DNA, 33 bp, Homo sapien
tagtttcttggtgcactagacttctggacatga

SEQ ID NO: 561775 - DNA, 33 bp, Homo sapien
atgggctgattcaacaactatttttcaatgtca

SEQ ID NO: 561776 - DNA, 33 bp, Homo sapien
atgggctgattcaacagctatttttcaatgtca

SEQ ID NO: 561777 - DNA, 33 bp, Homo sapien
gattcaggttaggaaccaaattttttatcttca

SEQ ID NO: 561778 - DNA, 33 bp, Homo sapien
gattcaggttaggaactaaattttttatcttca

SEQ ID NO: 561779 - DNA, 33 bp, Homo sapien
aataagcatggttgccaaaatctttgtttcaat

SEQ ID NO: 561780 - DNA, 33 bp, Homo sapien
aataagcatggttgccgaaatctttgtttcaat

SEQ ID NO: 561781 - DNA, 33 bp, Homo sapien
ccttgcgcattgagccaagtcctcctgtggtct

SEQ ID NO: 561782 - DNA, 33 bp, Homo sapien
ccttgcgcattgagccgagtcctcctgtggtct

SEQ ID NO: 561783 - DNA, 33 bp, Homo sapien
atgaaaaatgtatatgcactgtgattatgtttc

SEQ ID NO: 561784 - DNA, 33 bp, Homo sapien
atgaaaaatgtatatggactgtgattatgtttc

SEQ ID NO: 561785 - DNA, 33 bp, Homo sapien
caataaagctttatggacattgaaattggaatt

SEQ ID NO: 561786 - DNA, 33 bp, Homo sapien
caataaagctttatgggcattgaaattggaatt

SEQ ID NO: 561787 - DNA, 33 bp, Homo sapien
ccagggtccaggagtacagaatgttagttatca

SEQ ID NO: 561788 - DNA, 33 bp, Homo sapien
ccagggtccaggagtatagaatgttagttatca

SEQ ID NO: 561789 - DNA, 33 bp, Homo sapien
attccaactttggcagacctgtggtcattatca

SEQ ID NO: 561790 - DNA, 33 bp, Homo sapien
attccaactttggcagccctgtggtcattatca

SEQ ID NO: 561791 - DNA, 33 bp, Homo sapien
gggagatggtctaaacagagtggaagcaagcat

SEQ ID NO: 561792 - DNA, 33 bp, Homo sapien
gggagatggtctaaaccgagtggaagcaagcat

SEQ ID NO: 561793 - DNA, 33 bp, Homo sapien
acccagacctgtctgtaaacgcgcaggtatgac

SEQ ID NO: 561794 - DNA, 33 bp, Homo sapien
acccagacctgtctgtgaacgcgcaggtatgac

SEQ ID NO: 561795 - DNA, 33 bp, Homo sapien
gtgtccacctgtattaaagtgttttcatgtgct

SEQ ID NO: 561796 - DNA, 33 bp, Homo sapien
gtgtccacctgtattagagtgttttcatgtgct

SEQ ID NO: 561797 - DNA, 33 bp, Homo sapien
ttaactgatattctccaccacttctcaaccact

SEQ ID NO: 561798 - DNA, 33 bp, Homo sapien
ttaactgatattctccgccacttctcaaccact

SEQ ID NO: 561799 - DNA, 33 bp, Homo sapien
taatatggaacaaatacggtacacatacaccat

SEQ ID NO: 561800 - DNA, 33 bp, Homo sapien
taatatggaacaaatatggtacacatacaccat

SEQ ID NO: 561801 - DNA, 33 bp, Homo sapien
ccaatcttttcctctccgaccgtagcaataaat

SEQ ID NO: 561802 - DNA, 33 bp, Homo sapien
ccaatcttttcctctctgaccgtagcaataaat

SEQ ID NO: 561803 - DNA, 33 bp, Homo sapien
tgtctccagaacattacggcaacctataaaaga

SEQ ID NO: 561804 - DNA, 33 bp, Homo sapien
tgtctccagaacattatggcaacctataaaaga

SEQ ID NO: 561805 - DNA, 33 bp, Homo sapien
agaatccattgatgtcaaggctggatttatcac

SEQ ID NO: 561806 - DNA, 33 bp, Homo sapien
agaatccattgatgtctaggctggatttatcac

SEQ ID NO: 561807 - DNA, 33 bp, Homo sapien
gaatctgctccattcacataggaagctctcttc

SEQ ID NO: 561808 - DNA, 33 bp, Homo sapien
gaatctgctccattcatataggaagctctcttc

SEQ ID NO: 561809 - DNA, 33 bp, Homo sapien
ttgtttcttgatactaacctaatcccatacatt

SEQ ID NO: 561810 - DNA, 33 bp, Homo sapien
ttgtttcttgatactatcctaatcccatacatt

SEQ ID NO: 561811 - DNA, 33 bp, Homo sapien
tgctgttagcgttttacatcagtcagtcattgt

SEQ ID NO: 561812 - DNA, 33 bp, Homo sapien
tgctgttagcgttttatatcagtcagtcattgt

SEQ ID NO: 561813 - DNA, 33 bp, Homo sapien
caagtctttactccacaggatacatctctcata

SEQ ID NO: 561814 - DNA, 33 bp, Homo sapien
caagtctttactccacgggatacatctctcata

SEQ ID NO: 561815 - DNA, 33 bp, Homo sapien
acaatggattctgtaaaattacccacgttataa

SEQ ID NO: 561816 - DNA, 33 bp, Homo sapien
acaatggattctgtaagattacccacgttataa

SEQ ID NO: 561817 - DNA, 33 bp, Homo sapien
ttgataatcaaagctgaaacagttctgccacat

SEQ ID NO: 561818 - DNA, 33 bp, Homo sapien
ttgataatcaaagctggaacagttctgccacat

SEQ ID NO: 561819 - DNA, 33 bp, Homo sapien
tcagattaagttcatacgttgttaaatcaaaag

SEQ ID NO: 561820 - DNA, 33 bp, Homo sapien
tcagattaagttcatatgttgttaaatcaaaag

SEQ ID NO: 561821 - DNA, 33 bp, Homo sapien
ggtaatatgctaatcaagcactaaccagaaagc

SEQ ID NO: 561822 - DNA, 33 bp, Homo sapien
ggtaatatgctaatcaggcactaaccagaaagc

SEQ ID NO: 561823 - DNA, 33 bp, Homo sapien
gtgttcaaatatttacactcaataatttccaca

SEQ ID NO: 561824 - DNA, 33 bp, Homo sapien
gtgttcaaatatttaccctcaataatttccaca

SEQ ID NO: 561825 - DNA, 33 bp, Homo sapien
tccccacggtagttaacaattgccttaaaaact

SEQ ID NO: 561826 - DNA, 33 bp, Homo sapien
tccccacggtagttaataattgccttaaaaact

SEQ ID NO: 561827 - DNA, 33 bp, Homo sapien
gaaatgtgaaactctcaaaattagctgtttgtt

SEQ ID NO: 561828 - DNA, 33 bp, Homo sapien
gaaatgtgaaactctcgaaattagctgtttgtt

SEQ ID NO: 561829 - DNA, 33 bp, Homo sapien
ggtgtcactcatagaccgaatgctcctgtaggg

SEQ ID NO: 561830 - DNA, 33 bp, Homo sapien
ggtgtcactcatagactgaatgctcctgtaggg

SEQ ID NO: 561831 - DNA, 33 bp, Homo sapien
agtgcttagaaagaccagagtaagtgtgagttg

SEQ ID NO: 561832 - DNA, 33 bp, Homo sapien
agtgcttagaaagaccggagtaagtgtgagttg

SEQ ID NO: 561833 - DNA, 33 bp, Homo sapien
ttctagaatccactctaaaacctgtaatgatcc

SEQ ID NO: 561834 - DNA, 33 bp, Homo sapien
ttctagaatccactctgaaacctgtaatgatcc

SEQ ID NO: 561835 - DNA, 33 bp, Homo sapien
gtaatgatccacacaacctgggaacacatgact

SEQ ID NO: 561836 - DNA, 33 bp, Homo sapien
gtaatgatccacacaatctgggaacacatgact

SEQ ID NO: 561837 - DNA, 33 bp, Homo sapien
tcattgaagttattcaccatatgtccaataagc

SEQ ID NO: 561838 - DNA, 33 bp, Homo sapien
tcattgaagttattcagcatatgtccaataagc

SEQ ID NO: 561839 - DNA, 33 bp, Homo sapien
ccaatcctttgagccacaaattaatagaaatct

SEQ ID NO: 561840 - DNA, 33 bp, Homo sapien
ccaatcctttgagccataaattaatagaaatct

SEQ ID NO: 561841 - DNA, 33 bp, Homo sapien
tctcactttgtggtacacagctagattcattcg

SEQ ID NO: 561842 - DNA, 33 bp, Homo sapien
tctcactttgtggtacgcagctagattcattcg

SEQ ID NO: 561843 - DNA, 33 bp, Homo sapien
gacctacatccaaatgccaacctcgagcggcag

SEQ ID NO: 561844 - DNA, 33 bp, Homo sapien
gacctacatccaaatggcaacctcgagcggcag

SEQ ID NO: 561845 - DNA, 33 bp, Homo sapien
gataagtcacttggatgagataggtacattcca

SEQ ID NO: 561846 - DNA, 33 bp, Homo sapien
gataagtcacttggattagataggtacattcca

SEQ ID NO: 561847 - DNA, 33 bp, Homo sapien
gtggttattgagctgcactgatgtacaattttt

SEQ ID NO: 561848 - DNA, 33 bp, Homo sapien
gtggttattgagctgcgctgatgtacaattttt

SEQ ID NO: 561849 - DNA, 33 bp, Homo sapien
gctgctcagacacagaaaatgctattccccacc

SEQ ID NO: 561850 - DNA, 33 bp, Homo sapien
gctgctcagacacagagaatgctattccccacc

SEQ ID NO: 561851 - DNA, 33 bp, Homo sapien
aggagattcctgtgagcagcagagctggagaac

SEQ ID NO: 561852 - DNA, 33 bp, Homo sapien
aggagattcctgtgagtagcagagctggagaac

SEQ ID NO: 561853 - DNA, 33 bp, Homo sapien
tctgaatccatcctccaaaccttgtagctccct

SEQ ID NO: 561854 - DNA, 33 bp, Homo sapien
tctgaatccatcctccgaaccttgtagctccct

SEQ ID NO: 561855 - DNA, 33 bp, Homo sapien
gttgcacctggtgggacagttacacctctaatt

SEQ ID NO: 561856 - DNA, 33 bp, Homo sapien
gttgcacctggtgggatagttacacctctaatt

SEQ ID NO: 561857 - DNA, 33 bp, Homo sapien
cttttgtgattaatcacgccttttaattcagcc

SEQ ID NO: 561858 - DNA, 33 bp, Homo sapien
cttttgtgattaatcatgccttttaattcagcc

SEQ ID NO: 561859 - DNA, 33 bp, Homo sapien
ttgaaataggaagctccctaacacaaggaagcc

SEQ ID NO: 561860 - DNA, 33 bp, Homo sapien
ttgaaataggaagctctctaacacaaggaagcc

SEQ ID NO: 561861 - DNA, 33 bp, Homo sapien
tatgcaatattaacacacagccattatgagctt

SEQ ID NO: 561862 - DNA, 33 bp, Homo sapien
tatgcaatattaacacgcagccattatgagctt

SEQ ID NO: 561863 - DNA, 33 bp, Homo sapien
attcagccagactcgaaaagacaatgacctgcc

SEQ ID NO: 561864 - DNA, 33 bp, Homo sapien
attcagccagactcgagaagacaatgacctgcc

SEQ ID NO: 561865 - DNA, 33 bp, Homo sapien
ttgaagaatgagaaaactttgtggttgtttttg

SEQ ID NO: 561866 - DNA, 33 bp, Homo sapien
ttgaagaatgagaaaattttgtggttgtttttg

SEQ ID NO: 561867 - DNA, 33 bp, Homo sapien
aactggctacccggagactccagagagcaagga

SEQ ID NO: 561868 - DNA, 33 bp, Homo sapien
aactggctacccggagcctccagagagcaagga

SEQ ID NO: 561869 - DNA, 33 bp, Homo sapien
tgttttatcacaaatacgttgaagttaagcaat

SEQ ID NO: 561870 - DNA, 33 bp, Homo sapien
tgttttatcacaaatatgttgaagttaagcaat

SEQ ID NO: 561871 - DNA, 33 bp, Homo sapien
atctagagatcaaaaacccaaatgcccaggctt

SEQ ID NO: 561872 - DNA, 33 bp, Homo sapien
atctagagatcaaaaatccaaatgcccaggctt

SEQ ID NO: 561873 - DNA, 33 bp, Homo sapien
ggaagtgattctgttacgtaggcaaaatggtag

SEQ ID NO: 561874 - DNA, 33 bp, Homo sapien
ggaagtgattctgttaggtaggcaaaatggtag

SEQ ID NO: 561875 - DNA, 33 bp, Homo sapien
catatcaacttgtggaggttaatgtttggtagt

SEQ ID NO: 561876 - DNA, 33 bp, Homo sapien
catatcaacttgtggatgttaatgtttggtagt

SEQ ID NO: 561877 - DNA, 33 bp, Homo sapien
ctaagccttaagataccagttgtcggcctggcg

SEQ ID NO: 561878 - DNA, 33 bp, Homo sapien
ctaagccttaagatactagttgtcggcctggcg

SEQ ID NO: 561879 - DNA, 33 bp, Homo sapien
acgcttaaattgggacaaaggatataactgaca

SEQ ID NO: 561880 - DNA, 33 bp, Homo sapien
acgcttaaattgggacgaaggatataactgaca

SEQ ID NO: 561881 - DNA, 33 bp, Homo sapien
ttcattgatttaagtgccacagaggggtaagga

SEQ ID NO: 561882 - DNA, 33 bp, Homo sapien
ttcattgatttaagtgtcacagaggggtaagga

SEQ ID NO: 561883 - DNA, 33 bp, Homo sapien
ggggctgaaggaaaagccctgagctataaggac

SEQ ID NO: 561884 - DNA, 33 bp, Homo sapien
ggggctgaaggaaaaggcctgagctataaggac

SEQ ID NO: 561885 - DNA, 33 bp, Homo sapien
agcagaattgaatgaactgataggggaaaaaca

SEQ ID NO: 561886 - DNA, 33 bp, Homo sapien
agcagaattgaatgaagtgataggggaaaaaca

SEQ ID NO: 561887 - DNA, 33 bp, Homo sapien
tagtatttaatttaccacggtctgtatgtccat

SEQ ID NO: 561888 - DNA, 33 bp, Homo sapien
tagtatttaatttaccgcggtctgtatgtccat

SEQ ID NO: 561889 - DNA, 33 bp, Homo sapien
ggctcatactaattagacagttcatattaacat

SEQ ID NO: 561890 - DNA, 33 bp, Homo sapien
ggctcatactaattaggcagttcatattaacat

SEQ ID NO: 561891 - DNA, 33 bp, Homo sapien
tcctactcagtcctcaatatgcacatgaccaca

SEQ ID NO: 561892 - DNA, 33 bp, Homo sapien
tcctactcagtcctcactatgcacatgaccaca

SEQ ID NO: 561893 - DNA, 33 bp, Homo sapien
catcatgataaacatccctctcgaaaataagca

SEQ ID NO: 561894 - DNA, 33 bp, Homo sapien
catcatgataaacatctctctcgaaaataagca

SEQ ID NO: 561895 - DNA, 33 bp, Homo sapien
caacaggcttcaagcacgaaagagctcaggaaa

SEQ ID NO: 561896 - DNA, 33 bp, Homo sapien
caacaggcttcaagcatgaaagagctcaggaaa

SEQ ID NO: 561897 - DNA, 33 bp, Homo sapien
tctttctactgtatcagctatatttccattaat

SEQ ID NO: 561898 - DNA, 33 bp, Homo sapien
tctttctactgtatcatctatatttccattaat

SEQ ID NO: 561899 - DNA, 33 bp, Homo sapien
tctggatctttacccccgagagccttctaggat

SEQ ID NO: 561900 - DNA, 33 bp, Homo sapien
tctggatctttacccctgagagccttctaggat

SEQ ID NO: 561901 - DNA, 33 bp, Homo sapien
cttaatggtttaaaagcatttcacatagggtat

SEQ ID NO: 561902 - DNA, 33 bp, Homo sapien
cttaatggtttaaaagtatttcacatagggtat

SEQ ID NO: 561903 - DNA, 33 bp, Homo sapien
gaaagtgtctctttccccttctcctcttcttta

SEQ ID NO: 561904 - DNA, 33 bp, Homo sapien
gaaagtgtctctttcctcttctcctcttcttta

SEQ ID NO: 561905 - DNA, 33 bp, Homo sapien
gaatgctggagcacaacaacgtggcgcatggcc

SEQ ID NO: 561906 - DNA, 33 bp, Homo sapien
gaatgctggagcacaagaacgtggcgcatggcc

SEQ ID NO: 561907 - DNA, 33 bp, Homo sapien
gaaaggcttaatagcacgagttaataagggcct

SEQ ID NO: 561908 - DNA, 33 bp, Homo sapien
gaaaggcttaatagcatgagttaataagggcct

SEQ ID NO: 561909 - DNA, 33 bp, Homo sapien
ctgctgagcataaatcactatctcatttttccc

SEQ ID NO: 561910 - DNA, 33 bp, Homo sapien
ctgctgagcataaatcgctatctcatttttccc

SEQ ID NO: 561911 - DNA, 33 bp, Homo sapien
catcctcactggaaataaattgtcatccaattg

SEQ ID NO: 561912 - DNA, 33 bp, Homo sapien
catcctcactggaaatgaattgtcatccaattg

SEQ ID NO: 561913 - DNA, 33 bp, Homo sapien
aaggcatgagagaacacatggctgccacaccta

SEQ ID NO: 561914 - DNA, 33 bp, Homo sapien
aaggcatgagagaacatatggctgccacaccta

SEQ ID NO: 561915 - DNA, 33 bp, Homo sapien
acactgcttgcaggcccagactagcgagcactg

SEQ ID NO: 561916 - DNA, 33 bp, Homo sapien
acactgcttgcaggcctagactagcgagcactg

SEQ ID NO: 561917 - DNA, 33 bp, Homo sapien
attctccttgcttggcaccttgccaataaatgc

SEQ ID NO: 561918 - DNA, 33 bp, Homo sapien
attctccttgcttggcgccttgccaataaatgc

SEQ ID NO: 561919 - DNA, 33 bp, Homo sapien
gcttactttatctcaccacaattttgttcatgg

SEQ ID NO: 561920 - DNA, 33 bp, Homo sapien
gcttactttatctcactacaattttgttcatgg

SEQ ID NO: 561921 - DNA, 33 bp, Homo sapien
gtatttcagtatttacagacatgttcagttgac

SEQ ID NO: 561922 - DNA, 33 bp, Homo sapien
gtatttcagtatttaccgacatgttcagttgac

SEQ ID NO: 561923 - DNA, 33 bp, Homo sapien
caaggttccaatccaggatcacaagttaatata

SEQ ID NO: 561924 - DNA, 33 bp, Homo sapien
caaggttccaatccagtatcacaagttaatata

SEQ ID NO: 561925 - DNA, 33 bp, Homo sapien
agtggtttcagaatacaaactttagagggagcc

SEQ ID NO: 561926 - DNA, 33 bp, Homo sapien
agtggtttcagaataccaactttagagggagcc

SEQ ID NO: 561927 - DNA, 33 bp, Homo sapien
aatgtgttgaaaaaccaggtgcattaggtgcct

SEQ ID NO: 561928 - DNA, 33 bp, Homo sapien
aatgtgttgaaaaaccgggtgcattaggtgcct

SEQ ID NO: 561929 - DNA, 33 bp, Homo sapien
atgttcttcaacagtaaaatggacaattgtggt

SEQ ID NO: 561930 - DNA, 33 bp, Homo sapien
atgttcttcaacagtagaatggacaattgtggt

SEQ ID NO: 561931 - DNA, 33 bp, Homo sapien
aaatcactgtcccttcactttacccacaaacgt

SEQ ID NO: 561932 - DNA, 33 bp, Homo sapien
aaatcactgtcccttctctttacccacaaacgt

SEQ ID NO: 561933 - DNA, 33 bp, Homo sapien
tcagagcttggctgaaatctgaaccccagctgc

SEQ ID NO: 561934 - DNA, 33 bp, Homo sapien
tcagagcttggctgaagtctgaaccccagctgc

SEQ ID NO: 561935 - DNA, 33 bp, Homo sapien
atggggcaaacaaggtaaaactgaggagtggag

SEQ ID NO: 561936 - DNA, 33 bp, Homo sapien
atggggcaaacaaggtgaaactgaggagtggag

SEQ ID NO: 561937 - DNA, 33 bp, Homo sapien
gtttaattctcagaccaaacaccagaacctagg

SEQ ID NO: 561938 - DNA, 33 bp, Homo sapien
gtttaattctcagaccgaacaccagaacctagg

SEQ ID NO: 561939 - DNA, 33 bp, Homo sapien
aggataaatttgtggacaagtgacaggacaaat

SEQ ID NO: 561940 - DNA, 33 bp, Homo sapien
aggataaatttgtggagaagtgacaggacaaat

SEQ ID NO: 561941 - DNA, 33 bp, Homo sapien
tgtaaaagcaagtcataaagtttcccataagaa

SEQ ID NO: 561942 - DNA, 33 bp, Homo sapien
tgtaaaagcaagtcatgaagtttcccataagaa

SEQ ID NO: 561943 - DNA, 33 bp, Homo sapien
ccaaggtcaatttgaaactatcatacttaaaag

SEQ ID NO: 561944 - DNA, 33 bp, Homo sapien
ccaaggtcaatttgaagctatcatacttaaaag

SEQ ID NO: 561945 - DNA, 33 bp, Homo sapien
atcttttcacttcaaccctacatatattataga

SEQ ID NO: 561946 - DNA, 33 bp, Homo sapien
atcttttcacttcaacgctacatatattataga

SEQ ID NO: 561947 - DNA, 33 bp, Homo sapien
tgctattctgtttaaaaaggaagacattaaagt

SEQ ID NO: 561948 - DNA, 33 bp, Homo sapien
tgctattctgtttaaagaggaagacattaaagt

SEQ ID NO: 561949 - DNA, 33 bp, Homo sapien
gagtgggatcttctcaatacatttgtttggtgg

SEQ ID NO: 561950 - DNA, 33 bp, Homo sapien
gagtgggatcttctcagtacatttgtttggtgg

SEQ ID NO: 561951 - DNA, 33 bp, Homo sapien
tccagttcttgtcacaagtctctgtcaatacat

SEQ ID NO: 561952 - DNA, 33 bp, Homo sapien
tccagttcttgtcacaggtctctgtcaatacat

SEQ ID NO: 561953 - DNA, 33 bp, Homo sapien
ttcaacatatcaaagaactattcactttaatct

SEQ ID NO: 561954 - DNA, 33 bp, Homo sapien
ttcaacatatcaaagagctattcactttaatct

SEQ ID NO: 561955 - DNA, 33 bp, Homo sapien
gcatcaggaaacagagaagcataagacggtaga

SEQ ID NO: 561956 - DNA, 33 bp, Homo sapien
gcatcaggaaacagaggagcataagacggtaga

SEQ ID NO: 561957 - DNA, 33 bp, Homo sapien
ctctctggacttgcagaattttcaaagctgact

SEQ ID NO: 561958 - DNA, 33 bp, Homo sapien
ctctctggacttgcaggattttcaaagctgact

SEQ ID NO: 561959 - DNA, 33 bp, Homo sapien
ggtggtcagctccccacattcttgctcctcatg

SEQ ID NO: 561960 - DNA, 33 bp, Homo sapien
ggtggtcagctccccagattcttgctcctcatg

SEQ ID NO: 561961 - DNA, 33 bp, Homo sapien
ttaaaacaacagcaaacatttatttagctcatg

SEQ ID NO: 561962 - DNA, 33 bp, Homo sapien
ttaaaacaacagcaaatatttatttagctcatg

SEQ ID NO: 561963 - DNA, 33 bp, Homo sapien
tatacatttgaaccaactgagaatcttaaagca

SEQ ID NO: 561964 - DNA, 33 bp, Homo sapien
tatacatttgaaccaattgagaatcttaaagca

SEQ ID NO: 561965 - DNA, 33 bp, Homo sapien
atctgtcactctcatacattagaaaagcaaaat

SEQ ID NO: 561966 - DNA, 33 bp, Homo sapien
atctgtcactctcatatattagaaaagcaaaat

SEQ ID NO: 561967 - DNA, 33 bp, Homo sapien
atcactgatgaggaaacttctgtaggacacttg

SEQ ID NO: 561968 - DNA, 33 bp, Homo sapien
atcactgatgaggaaatttctgtaggacacttg

SEQ ID NO: 561969 - DNA, 33 bp, Homo sapien
ctcccatcgcccctgggaagaaatatctgggaa

SEQ ID NO: 561970 - DNA, 33 bp, Homo sapien
ctcccatcgcccctggtaagaaatatctgggaa

SEQ ID NO: 561971 - DNA, 33 bp, Homo sapien
aaataagcaacacaaacggcttccaggacacac

SEQ ID NO: 561972 - DNA, 33 bp, Homo sapien
aaataagcaacacaaatggcttccaggacacac

SEQ ID NO: 561973 - DNA, 33 bp, Homo sapien
aactgcagaggctggccactctgtctctttgga

SEQ ID NO: 561974 - DNA, 33 bp, Homo sapien
aactgcagaggctggctactctgtctctttgga

SEQ ID NO: 561975 - DNA, 33 bp, Homo sapien
ccttctcggaacagtcccctctgcctgaaaact

SEQ ID NO: 561976 - DNA, 33 bp, Homo sapien
ccttctcggaacagtctcctctgcctgaaaact

SEQ ID NO: 561977 - DNA, 33 bp, Homo sapien
gcagctacattaaataacttcctagcaatgttt

SEQ ID NO: 561978 - DNA, 33 bp, Homo sapien
gcagctacattaaataccttcctagcaatgttt

SEQ ID NO: 561979 - DNA, 33 bp, Homo sapien
ctactattcatccacaatgcttcacccagtgtc

SEQ ID NO: 561980 - DNA, 33 bp, Homo sapien
ctactattcatccacattgcttcacccagtgtc

SEQ ID NO: 561981 - DNA, 33 bp, Homo sapien
ctctttctggaatatcaaggttccggttacaac

SEQ ID NO: 561982 - DNA, 33 bp, Homo sapien
ctctttctggaatatccaggttccggttacaac

SEQ ID NO: 561983 - DNA, 33 bp, Homo sapien
actgtaccacagagtacgctggccttttctcca

SEQ ID NO: 561984 - DNA, 33 bp, Homo sapien
actgtaccacagagtatgctggccttttctcca

SEQ ID NO: 561985 - DNA, 33 bp, Homo sapien
ggacctaatgtgaataactatctcatgccattg

SEQ ID NO: 561986 - DNA, 33 bp, Homo sapien
ggacctaatgtgaatatctatctcatgccattg

SEQ ID NO: 561987 - DNA, 33 bp, Homo sapien
agctttagagattgaaatcttaatcctctgtgc

SEQ ID NO: 561988 - DNA, 33 bp, Homo sapien
agctttagagattgaactcttaatcctctgtgc

SEQ ID NO: 561989 - DNA, 33 bp, Homo sapien
ctcaagcatgcctttacggatgttgtgtatgga

SEQ ID NO: 561990 - DNA, 33 bp, Homo sapien
ctcaagcatgcctttatggatgttgtgtatgga

SEQ ID NO: 561991 - DNA, 33 bp, Homo sapien
cgtaataattcccataaagagaagacggcttct

SEQ ID NO: 561992 - DNA, 33 bp, Homo sapien
cgtaataattcccatagagagaagacggcttct

SEQ ID NO: 561993 - DNA, 33 bp, Homo sapien
caccaaatgcataggccccttttaatctgattc

SEQ ID NO: 561994 - DNA, 33 bp, Homo sapien
caccaaatgcataggctccttttaatctgattc

SEQ ID NO: 561995 - DNA, 33 bp, Homo sapien
attcagcaacttcggcactgcgcactcgtgctc

SEQ ID NO: 561996 - DNA, 33 bp, Homo sapien
attcagcaacttcggcgctgcgcactcgtgctc

SEQ ID NO: 561997 - DNA, 33 bp, Homo sapien
attactggaggcatcaaagcaaaagaaagcagc

SEQ ID NO: 561998 - DNA, 33 bp, Homo sapien
attactggaggcatcagagcaaaagaaagcagc

SEQ ID NO: 561999 - DNA, 33 bp, Homo sapien
ctgctggtcccataccacattttgggtagcaag

SEQ ID NO: 562000 - DNA, 33 bp, Homo sapien
ctgctggtcccataccgcattttgggtagcaag

SEQ ID NO: 562001 - DNA, 33 bp, Homo sapien
ttatgtttctcattaaatgtttttggtatcttg

SEQ ID NO: 562002 - DNA, 33 bp, Homo sapien
ttatgtttctcattaattgtttttggtatcttg

SEQ ID NO: 562003 - DNA, 33 bp, Homo sapien
tgtctcttagtgactccgaatacacatacattt

SEQ ID NO: 562004 - DNA, 33 bp, Homo sapien
tgtctcttagtgactctgaatacacatacattt

SEQ ID NO: 562005 - DNA, 33 bp, Homo sapien
aagggcttcgtcatgaaaactttggcataagtg

SEQ ID NO: 562006 - DNA, 33 bp, Homo sapien
aagggcttcgtcatgagaactttggcataagtg

SEQ ID NO: 562007 - DNA, 33 bp, Homo sapien
aaccgttatctaggtaggactatctgcaatctc

SEQ ID NO: 562008 - DNA, 33 bp, Homo sapien
aaccgttatctaggtatgactatctgcaatctc

SEQ ID NO: 562009 - DNA, 33 bp, Homo sapien
gactaactgtgacaaaattataggaaacatttt

SEQ ID NO: 562010 - DNA, 33 bp, Homo sapien
gactaactgtgacaaagttataggaaacatttt

SEQ ID NO: 562011 - DNA, 33 bp, Homo sapien
gagagtaagcagttagaaaatttatcagcaatt

SEQ ID NO: 562012 - DNA, 33 bp, Homo sapien
gagagtaagcagttaggaaatttatcagcaatt

SEQ ID NO: 562013 - DNA, 33 bp, Homo sapien
tgttaatgtgcatacaagtgacttgagtatctc

SEQ ID NO: 562014 - DNA, 33 bp, Homo sapien
tgttaatgtgcatacaggtgacttgagtatctc

SEQ ID NO: 562015 - DNA, 33 bp, Homo sapien
tgtcttccaaccaacactataatgaaagctcca

SEQ ID NO: 562016 - DNA, 33 bp, Homo sapien
tgtcttccaaccaacagtataatgaaagctcca

SEQ ID NO: 562017 - DNA, 33 bp, Homo sapien
gtgctccgaacttaccacctaggatgcttttcc

SEQ ID NO: 562018 - DNA, 33 bp, Homo sapien
gtgctccgaacttaccgcctaggatgcttttcc

SEQ ID NO: 562019 - DNA, 33 bp, Homo sapien
cccctgttcttatccactgcttctagaatagag

SEQ ID NO: 562020 - DNA, 33 bp, Homo sapien
cccctgttcttatccattgcttctagaatagag

SEQ ID NO: 562021 - DNA, 33 bp, Homo sapien
ttttaacttgaactctcactggaagcggggact

SEQ ID NO: 562022 - DNA, 33 bp, Homo sapien
ttttaacttgaactctgactggaagcggggact

SEQ ID NO: 562023 - DNA, 33 bp, Homo sapien
acttcatggaaacaaaccttcaggaaatagcag

SEQ ID NO: 562024 - DNA, 33 bp, Homo sapien
acttcatggaaacaaagcttcaggaaatagcag

SEQ ID NO: 562025 - DNA, 33 bp, Homo sapien
caaggggcatgtggttcaaactgctacttttgc

SEQ ID NO: 562026 - DNA, 33 bp, Homo sapien
caaggggcatgtggttgaaactgctacttttgc

SEQ ID NO: 562027 - DNA, 33 bp, Homo sapien
ccatggtgttctaaaactttactgcacaaaaac

SEQ ID NO: 562028 - DNA, 33 bp, Homo sapien
ccatggtgttctaaaagtttactgcacaaaaac

SEQ ID NO: 562029 - DNA, 33 bp, Homo sapien
ctaataatcttccttacgataccactgaaacac

SEQ ID NO: 562030 - DNA, 33 bp, Homo sapien
ctaataatcttccttatgataccactgaaacac

SEQ ID NO: 562031 - DNA, 33 bp, Homo sapien
aaattacttttctgtcacacgtgagcaattgtt

SEQ ID NO: 562032 - DNA, 33 bp, Homo sapien
aaattacttttctgtctcacgtgagcaattgtt

SEQ ID NO: 562033 - DNA, 33 bp, Homo sapien
tctgaaaatacacatactaggggaaagctgaca

SEQ ID NO: 562034 - DNA, 33 bp, Homo sapien
tctgaaaatacacatattaggggaaagctgaca

SEQ ID NO: 562035 - DNA, 33 bp, Homo sapien
tgatgaatgctggaggacctaaacaattatctg

SEQ ID NO: 562036 - DNA, 33 bp, Homo sapien
tgatgaatgctggagggcctaaacaattatctg

SEQ ID NO: 562037 - DNA, 33 bp, Homo sapien
ttttctttatttccccacctttgctattgtcat

SEQ ID NO: 562038 - DNA, 33 bp, Homo sapien
ttttctttatttcccctcctttgctattgtcat

SEQ ID NO: 562039 - DNA, 33 bp, Homo sapien
gctactgaaagttgtacggctccgaggactttt

SEQ ID NO: 562040 - DNA, 33 bp, Homo sapien
gctactgaaagttgtatggctccgaggactttt

SEQ ID NO: 562041 - DNA, 33 bp, Homo sapien
cttatgatgtgatgcaactcttcctcctttacc

SEQ ID NO: 562042 - DNA, 33 bp, Homo sapien
cttatgatgtgatgcacctcttcctcctttacc

SEQ ID NO: 562043 - DNA, 33 bp, Homo sapien
gctattgcactggacagtacaaacgtagcatta

SEQ ID NO: 562044 - DNA, 33 bp, Homo sapien
gctattgcactggacattacaaacgtagcatta

SEQ ID NO: 562045 - DNA, 33 bp, Homo sapien
tgctgacaccacaaatcaccagagaaactttaa

SEQ ID NO: 562046 - DNA, 33 bp, Homo sapien
tgctgacaccacaaattaccagagaaactttaa

SEQ ID NO: 562047 - DNA, 33 bp, Homo sapien
atattgacactgcttaaatattcaagcgtacct

SEQ ID NO: 562048 - DNA, 33 bp, Homo sapien
atattgacactgcttagatattcaagcgtacct

SEQ ID NO: 562049 - DNA, 33 bp, Homo sapien
tgtgcaagtaggtactaaacatggacacataca

SEQ ID NO: 562050 - DNA, 33 bp, Homo sapien
tgtgcaagtaggtactgaacatggacacataca

SEQ ID NO: 562051 - DNA, 33 bp, Homo sapien
gaaatttgcacttaaagatagcaacttagaaac

SEQ ID NO: 562052 - DNA, 33 bp, Homo sapien
gaaatttgcacttaaatatagcaacttagaaac

SEQ ID NO: 562053 - DNA, 33 bp, Homo sapien
tctctgcaaaataagaaagccacttttgggcag

SEQ ID NO: 562054 - DNA, 33 bp, Homo sapien
tctctgcaaaataagagagccacttttgggcag

SEQ ID NO: 562055 - DNA, 33 bp, Homo sapien
cagaaggcagacctaaatgtgatatatgaaaca

SEQ ID NO: 562056 - DNA, 33 bp, Homo sapien
cagaaggcagacctaagtgtgatatatgaaaca

SEQ ID NO: 562057 - DNA, 33 bp, Homo sapien
gctctcagaaggagtacgggggcctcttggaat

SEQ ID NO: 562058 - DNA, 33 bp, Homo sapien
gctctcagaaggagtatgggggcctcttggaat

SEQ ID NO: 562059 - DNA, 33 bp, Homo sapien
gtgactcatttaatagaaaaataggaagagata

SEQ ID NO: 562060 - DNA, 33 bp, Homo sapien
gtgactcatttaataggaaaataggaagagata

SEQ ID NO: 562061 - DNA, 33 bp, Homo sapien
aaaaattgaactacaacctctccttattctcag

SEQ ID NO: 562062 - DNA, 33 bp, Homo sapien
aaaaattgaactacaagctctccttattctcag

SEQ ID NO: 562063 - DNA, 33 bp, Homo sapien
acttagaaagccacacaataataatgggagact

SEQ ID NO: 562064 - DNA, 33 bp, Homo sapien
acttagaaagccacacgataataatgggagact

SEQ ID NO: 562065 - DNA, 33 bp, Homo sapien
actgggacttgctttacggtcaatcttggaata

SEQ ID NO: 562066 - DNA, 33 bp, Homo sapien
actgggacttgctttatggtcaatcttggaata

SEQ ID NO: 562067 - DNA, 33 bp, Homo sapien
ttctaagttctaaacaatcattgcagtaattgt

SEQ ID NO: 562068 - DNA, 33 bp, Homo sapien
ttctaagttctaaacagtcattgcagtaattgt

SEQ ID NO: 562069 - DNA, 33 bp, Homo sapien
cattggcgattgagtgaaatcttggaaatgaac

SEQ ID NO: 562070 - DNA, 33 bp, Homo sapien
cattggcgattgagtgcaatcttggaaatgaac

SEQ ID NO: 562071 - DNA, 33 bp, Homo sapien
cagcagaagggtggataaattcgggcccaggaa

SEQ ID NO: 562072 - DNA, 33 bp, Homo sapien
cagcagaagggtggatgaattcgggcccaggaa

SEQ ID NO: 562073 - DNA, 33 bp, Homo sapien
gatagtaaagaagctacattttattccaagtgc

SEQ ID NO: 562074 - DNA, 33 bp, Homo sapien
gatagtaaagaagctagattttattccaagtgc

SEQ ID NO: 562075 - DNA, 33 bp, Homo sapien
tggggttcagagaagaagtccaaacagaggttt

SEQ ID NO: 562076 - DNA, 33 bp, Homo sapien
tggggttcagagaagaggtccaaacagaggttt

SEQ ID NO: 562077 - DNA, 33 bp, Homo sapien
aaaccaaggcagattcgccctactcgacacaga

SEQ ID NO: 562078 - DNA, 33 bp, Homo sapien
aaaccaaggcagattctccctactcgacacaga

SEQ ID NO: 562079 - DNA, 33 bp, Homo sapien
gttgaattcatcaagaacaattcatcaagaatt

SEQ ID NO: 562080 - DNA, 33 bp, Homo sapien
gttgaattcatcaagagcaattcatcaagaatt

SEQ ID NO: 562081 - DNA, 33 bp, Homo sapien
aatgtatgcagaagacaaacaggtgaactgctg

SEQ ID NO: 562082 - DNA, 33 bp, Homo sapien
aatgtatgcagaagaccaacaggtgaactgctg

SEQ ID NO: 562083 - DNA, 33 bp, Homo sapien
ttgttcagtcgcaaaaggtatatgaaactgatg

SEQ ID NO: 562084 - DNA, 33 bp, Homo sapien
ttgttcagtcgcaaaatgtatatgaaactgatg

SEQ ID NO: 562085 - DNA, 33 bp, Homo sapien
tatccagaatgaaaatcagaacgtacaaatatt

SEQ ID NO: 562086 - DNA, 33 bp, Homo sapien
tatccagaatgaaaatgagaacgtacaaatatt

SEQ ID NO: 562087 - DNA, 33 bp, Homo sapien
ttgcgtatcttcctttcaaaattgtctattcat

SEQ ID NO: 562088 - DNA, 33 bp, Homo sapien
ttgcgtatcttcctttgaaaattgtctattcat

SEQ ID NO: 562089 - DNA, 33 bp, Homo sapien
gagaagtcacaaaatcactccccttttatgtct

SEQ ID NO: 562090 - DNA, 33 bp, Homo sapien
gagaagtcacaaaatcgctccccttttatgtct

SEQ ID NO: 562091 - DNA, 33 bp, Homo sapien
taatgtttcttaatgactagtttaagagtatac

SEQ ID NO: 562092 - DNA, 33 bp, Homo sapien
taatgtttcttaatgattagtttaagagtatac

SEQ ID NO: 562093 - DNA, 33 bp, Homo sapien
ccatatgacggcagcacctgaaaatttaatggt

SEQ ID NO: 562094 - DNA, 33 bp, Homo sapien
ccatatgacggcagcatctgaaaatttaatggt

SEQ ID NO: 562095 - DNA, 33 bp, Homo sapien
accgattcagtcttcacggtgctcggctgaccc

SEQ ID NO: 562096 - DNA, 33 bp, Homo sapien
accgattcagtcttcatggtgctcggctgaccc

SEQ ID NO: 562097 - DNA, 33 bp, Homo sapien
tccctttcataaaccaaaggatgacacctccta

SEQ ID NO: 562098 - DNA, 33 bp, Homo sapien
tccctttcataaaccagaggatgacacctccta

SEQ ID NO: 562099 - DNA, 33 bp, Homo sapien
tcaaatggattaaaaacaagggctgcttgctaa

SEQ ID NO: 562100 - DNA, 33 bp, Homo sapien
tcaaatggattaaaaataagggctgcttgctaa

SEQ ID NO: 562101 - DNA, 33 bp, Homo sapien
ttgttctgcattgacaacttcacatgattaaaa

SEQ ID NO: 562102 - DNA, 33 bp, Homo sapien
ttgttctgcattgacagcttcacatgattaaaa

SEQ ID NO: 562103 - DNA, 33 bp, Homo sapien
aaaaaagtgactgttacatcagatgcacaaata

SEQ ID NO: 562104 - DNA, 33 bp, Homo sapien
aaaaaagtgactgttatatcagatgcacaaata

SEQ ID NO: 562105 - DNA, 33 bp, Homo sapien
cctcccaacgtgcagggattacagatatgagcc

SEQ ID NO: 562106 - DNA, 33 bp, Homo sapien
cctcccaacgtgcaggtattacagatatgagcc

SEQ ID NO: 562107 - DNA, 33 bp, Homo sapien
ggatgcagtaccatgacgctgtgctaccaaaag

SEQ ID NO: 562108 - DNA, 33 bp, Homo sapien
ggatgcagtaccatgatgctgtgctaccaaaag

SEQ ID NO: 562109 - DNA, 33 bp, Homo sapien
tgaacagctgctgtacagagccttttggtagca

SEQ ID NO: 562110 - DNA, 33 bp, Homo sapien
tgaacagctgctgtacggagccttttggtagca

SEQ ID NO: 562111 - DNA, 33 bp, Homo sapien
aactgaatttctgttacctgttaccccgaactg

SEQ ID NO: 562112 - DNA, 33 bp, Homo sapien
aactgaatttctgttatctgttaccccgaactg

SEQ ID NO: 562113 - DNA, 33 bp, Homo sapien
tgcagatgacagtggacaactcaggagtactaa

SEQ ID NO: 562114 - DNA, 33 bp, Homo sapien
tgcagatgacagtggagaactcaggagtactaa

SEQ ID NO: 562115 - DNA, 33 bp, Homo sapien
gattggatgttacctacccagaaaggccttctt

SEQ ID NO: 562116 - DNA, 33 bp, Homo sapien
gattggatgttacctatccagaaaggccttctt

SEQ ID NO: 562117 - DNA, 33 bp, Homo sapien
agccatgaggactgtacatccattcactgagca

SEQ ID NO: 562118 - DNA, 33 bp, Homo sapien
agccatgaggactgtatatccattcactgagca

SEQ ID NO: 562119 - DNA, 33 bp, Homo sapien
agcaaaatagaaaaaaatgtaccatggtttgaa

SEQ ID NO: 562120 - DNA, 33 bp, Homo sapien
agcaaaatagaaaaaagtgtaccatggtttgaa

SEQ ID NO: 562121 - DNA, 33 bp, Homo sapien
cccagccataagaaaccgtacgtcaattaaacc

SEQ ID NO: 562122 - DNA, 33 bp, Homo sapien
cccagccataagaaactgtacgtcaattaaacc

SEQ ID NO: 562123 - DNA, 33 bp, Homo sapien
tgccctgtctactttaaggtgggcccaatccta

SEQ ID NO: 562124 - DNA, 33 bp, Homo sapien
tgccctgtctactttagggtgggcccaatccta

SEQ ID NO: 562125 - DNA, 33 bp, Homo sapien
agaggccatgatggaaacagattctccagccac

SEQ ID NO: 562126 - DNA, 33 bp, Homo sapien
agaggccatgatggaagcagattctccagccac

SEQ ID NO: 562127 - DNA, 33 bp, Homo sapien
atgagaagacccttaaatggctcccaactcaaa

SEQ ID NO: 562128 - DNA, 33 bp, Homo sapien
atgagaagacccttaagtggctcccaactcaaa

SEQ ID NO: 562129 - DNA, 33 bp, Homo sapien
tctaacaccacttgccaatataaggggttgtca

SEQ ID NO: 562130 - DNA, 33 bp, Homo sapien
tctaacaccacttgcctatataaggggttgtca

SEQ ID NO: 562131 - DNA, 33 bp, Homo sapien
tgttgctcctagttacagaaactcttaactgca

SEQ ID NO: 562132 - DNA, 33 bp, Homo sapien
tgttgctcctagttacggaaactcttaactgca

SEQ ID NO: 562133 - DNA, 33 bp, Homo sapien
caaggaagtttcttaaatggcaggactgggctt

SEQ ID NO: 562134 - DNA, 33 bp, Homo sapien
caaggaagtttcttaagtggcaggactgggctt

SEQ ID NO: 562135 - DNA, 33 bp, Homo sapien
gtcatgagtgtgtgggacataatctctttgtga

SEQ ID NO: 562136 - DNA, 33 bp, Homo sapien
gtcatgagtgtgtgggtcataatctctttgtga

SEQ ID NO: 562137 - DNA, 33 bp, Homo sapien
aatcccgcccatggacaaatcctcacacacgtc

SEQ ID NO: 562138 - DNA, 33 bp, Homo sapien
aatcccgcccatggaccaatcctcacacacgtc

SEQ ID NO: 562139 - DNA, 33 bp, Homo sapien
tttttactttttagcaataaccattctgactga

SEQ ID NO: 562140 - DNA, 33 bp, Homo sapien
tttttactttttagcagtaaccattctgactga

SEQ ID NO: 562141 - DNA, 33 bp, Homo sapien
cttctggatagccgagcacatggagattcttgg

SEQ ID NO: 562142 - DNA, 33 bp, Homo sapien
cttctggatagccgagtacatggagattcttgg

SEQ ID NO: 562143 - DNA, 33 bp, Homo sapien
ttttttctaagcagaaattctcaacagtgggct

SEQ ID NO: 562144 - DNA, 33 bp, Homo sapien
ttttttctaagcagaagttctcaacagtgggct

SEQ ID NO: 562145 - DNA, 33 bp, Homo sapien
tggctcattcaactcagtcccagagtgaaaata

SEQ ID NO: 562146 - DNA, 33 bp, Homo sapien
tggctcattcaactcattcccagagtgaaaata

SEQ ID NO: 562147 - DNA, 33 bp, Homo sapien
tgttcatttgtttataagtccatggatcagccg

SEQ ID NO: 562148 - DNA, 33 bp, Homo sapien
tgttcatttgtttataggtccatggatcagccg

SEQ ID NO: 562149 - DNA, 33 bp, Homo sapien
gcgatctgcaaaatgaccagagttataccaaag

SEQ ID NO: 562150 - DNA, 33 bp, Homo sapien
gcgatctgcaaaatgatcagagttataccaaag

SEQ ID NO: 562151 - DNA, 33 bp, Homo sapien
aattggacttgctatgaataaggaccgcaggaa

SEQ ID NO: 562152 - DNA, 33 bp, Homo sapien
aattggacttgctatggataaggaccgcaggaa

SEQ ID NO: 562153 - DNA, 33 bp, Homo sapien
tagctaggacagtagacacaggtgtgcaccagc

SEQ ID NO: 562154 - DNA, 33 bp, Homo sapien
tagctaggacagtagatacaggtgtgcaccagc

SEQ ID NO: 562155 - DNA, 33 bp, Homo sapien
gtcatacggagatatcaaatctattgacattat

SEQ ID NO: 562156 - DNA, 33 bp, Homo sapien
gtcatacggagatatcgaatctattgacattat

SEQ ID NO: 562157 - DNA, 33 bp, Homo sapien
ttttacaaacagctagccatttggttcagagca

SEQ ID NO: 562158 - DNA, 33 bp, Homo sapien
ttttacaaacagctagtcatttggttcagagca

SEQ ID NO: 562159 - DNA, 33 bp, Homo sapien
atggcaaagtcttacaaacataatattgagaaa

SEQ ID NO: 562160 - DNA, 33 bp, Homo sapien
atggcaaagtcttacacacataatattgagaaa

SEQ ID NO: 562161 - DNA, 33 bp, Homo sapien
gactgcttattcttaactgtgctgtggcatgat

SEQ ID NO: 562162 - DNA, 33 bp, Homo sapien
gactgcttattcttaagtgtgctgtggcatgat

SEQ ID NO: 562163 - DNA, 33 bp, Homo sapien
ggaagcatttgtcatccgatccgcaagttcccc

SEQ ID NO: 562164 - DNA, 33 bp, Homo sapien
ggaagcatttgtcatctgatccgcaagttcccc

SEQ ID NO: 562165 - DNA, 33 bp, Homo sapien
tatttcattgtgtagaagtaccattttgtttat

SEQ ID NO: 562166 - DNA, 33 bp, Homo sapien
tatttcattgtgtagacgtaccattttgtttat

SEQ ID NO: 562167 - DNA, 33 bp, Homo sapien
tgaatccaacttcacaagatcataagaaattgg

SEQ ID NO: 562168 - DNA, 33 bp, Homo sapien
tgaatccaacttcacaggatcataagaaattgg

SEQ ID NO: 562169 - DNA, 33 bp, Homo sapien
agtctagtgtttattacagcctgcattatactg

SEQ ID NO: 562170 - DNA, 33 bp, Homo sapien
agtctagtgtttattagagcctgcattatactg

SEQ ID NO: 562171 - DNA, 33 bp, Homo sapien
atatctggaactaaaacactggagatgaacctc

SEQ ID NO: 562172 - DNA, 33 bp, Homo sapien
atatctggaactaaaatactggagatgaacctc

SEQ ID NO: 562173 - DNA, 33 bp, Homo sapien
ttaaattttagagttcacattcaaaataaatat

SEQ ID NO: 562174 - DNA, 33 bp, Homo sapien
ttaaattttagagttcgcattcaaaataaatat

SEQ ID NO: 562175 - DNA, 33 bp, Homo sapien
atattctagttatttgcaagaatgttggtcaaa

SEQ ID NO: 562176 - DNA, 33 bp, Homo sapien
atattctagttatttggaagaatgttggtcaaa

SEQ ID NO: 562177 - DNA, 33 bp, Homo sapien
gatctcaactgtcattaaagattatcatgtgag

SEQ ID NO: 562178 - DNA, 33 bp, Homo sapien
gatctcaactgtcattgaagattatcatgtgag

SEQ ID NO: 562179 - DNA, 33 bp, Homo sapien
tggaaatgcaaagatacggagaaggagtttcaa

SEQ ID NO: 562180 - DNA, 33 bp, Homo sapien
tggaaatgcaaagatatggagaaggagtttcaa

SEQ ID NO: 562181 - DNA, 33 bp, Homo sapien
gactctcagatgaagaatccttgtaatcaaatg

SEQ ID NO: 562182 - DNA, 33 bp, Homo sapien
gactctcagatgaagagtccttgtaatcaaatg

SEQ ID NO: 562183 - DNA, 33 bp, Homo sapien
gaggtcataaatgccacagatcaaaccagcccc

SEQ ID NO: 562184 - DNA, 33 bp, Homo sapien
gaggtcataaatgccatagatcaaaccagcccc

SEQ ID NO: 562185 - DNA, 33 bp, Homo sapien
tgcctgtcttgtgggactattgtgaaggcagaa

SEQ ID NO: 562186 - DNA, 33 bp, Homo sapien
tgcctgtcttgtgggattattgtgaaggcagaa

SEQ ID NO: 562187 - DNA, 33 bp, Homo sapien
tgtttctctgtttctacgctgtcctaactcatt

SEQ ID NO: 562188 - DNA, 33 bp, Homo sapien
tgtttctctgtttctatgctgtcctaactcatt

SEQ ID NO: 562189 - DNA, 33 bp, Homo sapien
aagaaaacagaagcgaagaaataatgaaaatag

SEQ ID NO: 562190 - DNA, 33 bp, Homo sapien
aagaaaacagaagcgaggaaataatgaaaatag

SEQ ID NO: 562191 - DNA, 33 bp, Homo sapien
ccacccacttaaacaccgtctgaatctgcctct

SEQ ID NO: 562192 - DNA, 33 bp, Homo sapien
ccacccacttaaacactgtctgaatctgcctct

SEQ ID NO: 562193 - DNA, 33 bp, Homo sapien
tccagttactttactacgagccaaataaagtgc

SEQ ID NO: 562194 - DNA, 33 bp, Homo sapien
tccagttactttactatgagccaaataaagtgc

SEQ ID NO: 562195 - DNA, 33 bp, Homo sapien
tctatggttccattgacgtaaaggaagattttc

SEQ ID NO: 562196 - DNA, 33 bp, Homo sapien
tctatggttccattgatgtaaaggaagattttc

SEQ ID NO: 562197 - DNA, 33 bp, Homo sapien
actaacgactcagttgaacaaggtctccagaat

SEQ ID NO: 562198 - DNA, 33 bp, Homo sapien
actaacgactcagttggacaaggtctccagaat

SEQ ID NO: 562199 - DNA, 33 bp, Homo sapien
tttagaaactgagtgacagtctcctatatttat

SEQ ID NO: 562200 - DNA, 33 bp, Homo sapien
tttagaaactgagtgatagtctcctatatttat

SEQ ID NO: 562201 - DNA, 33 bp, Homo sapien
gtttagaccttatatacgtgtctgacccttctg

SEQ ID NO: 562202 - DNA, 33 bp, Homo sapien
gtttagaccttatatatgtgtctgacccttctg

SEQ ID NO: 562203 - DNA, 33 bp, Homo sapien
gcaatggatatttatccgaattgctgtatgata

SEQ ID NO: 562204 - DNA, 33 bp, Homo sapien
gcaatggatatttatctgaattgctgtatgata

SEQ ID NO: 562205 - DNA, 33 bp, Homo sapien
cttgctatattcttaaaagttgagtactactgg

SEQ ID NO: 562206 - DNA, 33 bp, Homo sapien
cttgctatattcttaagagttgagtactactgg

SEQ ID NO: 562207 - DNA, 33 bp, Homo sapien
tcacaaatgtaaaataagaccagtagtactcaa

SEQ ID NO: 562208 - DNA, 33 bp, Homo sapien
tcacaaatgtaaaataggaccagtagtactcaa

SEQ ID NO: 562209 - DNA, 33 bp, Homo sapien
gtatttccaagccagacaggaagattctaattt

SEQ ID NO: 562210 - DNA, 33 bp, Homo sapien
gtatttccaagccagataggaagattctaattt

SEQ ID NO: 562211 - DNA, 33 bp, Homo sapien
tgctttgtgcagacatcaaagaaagaagagcaa

SEQ ID NO: 562212 - DNA, 33 bp, Homo sapien
tgctttgtgcagacattaaagaaagaagagcaa

SEQ ID NO: 562213 - DNA, 33 bp, Homo sapien
tccagtgaactgtgaaaagccaagatactgagg

SEQ ID NO: 562214 - DNA, 33 bp, Homo sapien
tccagtgaactgtgaagagccaagatactgagg

SEQ ID NO: 562215 - DNA, 33 bp, Homo sapien
cagaaaaagcctccaggaggtaagctcagtatg

SEQ ID NO: 562216 - DNA, 33 bp, Homo sapien
cagaaaaagcctccagtaggtaagctcagtatg

SEQ ID NO: 562217 - DNA, 33 bp, Homo sapien
acttcctgcttataccacctaattagcaccttt

SEQ ID NO: 562218 - DNA, 33 bp, Homo sapien
acttcctgcttatacctcctaattagcaccttt

SEQ ID NO: 562219 - DNA, 33 bp, Homo sapien
atgaatgccatgtccaatcagttttagtatcat

SEQ ID NO: 562220 - DNA, 33 bp, Homo sapien
atgaatgccatgtccagtcagttttagtatcat

SEQ ID NO: 562221 - DNA, 33 bp, Homo sapien
agcaagatagaaaggacataatcaagaatgtga

SEQ ID NO: 562222 - DNA, 33 bp, Homo sapien
agcaagatagaaaggagataatcaagaatgtga

SEQ ID NO: 562223 - DNA, 33 bp, Homo sapien
ggccacgtggtcaagaagaagtgactatttcag

SEQ ID NO: 562224 - DNA, 33 bp, Homo sapien
ggccacgtggtcaagatgaagtgactatttcag

SEQ ID NO: 562225 - DNA, 33 bp, Homo sapien
taatgtgggtgtcaagacataaatacgagaaga

SEQ ID NO: 562226 - DNA, 33 bp, Homo sapien
taatgtgggtgtcaaggcataaatacgagaaga

SEQ ID NO: 562227 - DNA, 33 bp, Homo sapien
ttaaaacaaagaaaatcagactgtgtactttca

SEQ ID NO: 562228 - DNA, 33 bp, Homo sapien
ttaaaacaaagaaaatgagactgtgtactttca

SEQ ID NO: 562229 - DNA, 33 bp, Homo sapien
gaccagccagagaccaaattgtgaggtaggctt

SEQ ID NO: 562230 - DNA, 33 bp, Homo sapien
gaccagccagagaccagattgtgaggtaggctt

SEQ ID NO: 562231 - DNA, 33 bp, Homo sapien
tggctctaccttgtatcgttctatggaaatttt

SEQ ID NO: 562232 - DNA, 33 bp, Homo sapien
tggctctaccttgtattgttctatggaaatttt

SEQ ID NO: 562233 - DNA, 33 bp, Homo sapien
ataacctgaatgataaagccatttctttttaag

SEQ ID NO: 562234 - DNA, 33 bp, Homo sapien
ataacctgaatgataaggccatttctttttaag

SEQ ID NO: 562235 - DNA, 33 bp, Homo sapien
taggggctgaaagagaaagcaataggcttaaag

SEQ ID NO: 562236 - DNA, 33 bp, Homo sapien
taggggctgaaagagagagcaataggcttaaag

SEQ ID NO: 562237 - DNA, 33 bp, Homo sapien
gaaatgctatcttgtacatggtaagcctcaggc

SEQ ID NO: 562238 - DNA, 33 bp, Homo sapien
gaaatgctatcttgtagatggtaagcctcaggc

SEQ ID NO: 562239 - DNA, 33 bp, Homo sapien
actgcttatttgtgcaactaatgaccacaaaca

SEQ ID NO: 562240 - DNA, 33 bp, Homo sapien
actgcttatttgtgcatctaatgaccacaaaca

SEQ ID NO: 562241 - DNA, 33 bp, Homo sapien
tccagaagttagcagcaatgattaatgtcagca

SEQ ID NO: 562242 - DNA, 33 bp, Homo sapien
tccagaagttagcagcgatgattaatgtcagca

SEQ ID NO: 562243 - DNA, 33 bp, Homo sapien
agaggtttgtaaaacaccattgggactgttggt

SEQ ID NO: 562244 - DNA, 33 bp, Homo sapien
agaggtttgtaaaacagcattgggactgttggt

SEQ ID NO: 562245 - DNA, 33 bp, Homo sapien
tggcaactgttttcagaacaccaatgcagttgc

SEQ ID NO: 562246 - DNA, 33 bp, Homo sapien
tggcaactgttttcaggacaccaatgcagttgc

SEQ ID NO: 562247 - DNA, 33 bp, Homo sapien
attcttacagaaggtgaaaactgtgagttgaat

SEQ ID NO: 562248 - DNA, 33 bp, Homo sapien
attcttacagaaggtgcaaactgtgagttgaat

SEQ ID NO: 562249 - DNA, 33 bp, Homo sapien
ccaaagaaccagatccaaaataattattctaaa

SEQ ID NO: 562250 - DNA, 33 bp, Homo sapien
ccaaagaaccagatccgaaataattattctaaa

SEQ ID NO: 562251 - DNA, 33 bp, Homo sapien
tttcttatagcagtctcaactaagacactacct

SEQ ID NO: 562252 - DNA, 33 bp, Homo sapien
tttcttatagcagtctgaactaagacactacct

SEQ ID NO: 562253 - DNA, 33 bp, Homo sapien
tttgtaaatgtgttcacggtagagactgcggcc

SEQ ID NO: 562254 - DNA, 33 bp, Homo sapien
tttgtaaatgtgttcatggtagagactgcggcc

SEQ ID NO: 562255 - DNA, 33 bp, Homo sapien
ctctaacattcaatggaaggagtgtcaaaatta

SEQ ID NO: 562256 - DNA, 33 bp, Homo sapien
ctctaacattcaatgggaggagtgtcaaaatta

SEQ ID NO: 562257 - DNA, 33 bp, Homo sapien
tgagagatattctacgacccacaaaacctctca

SEQ ID NO: 562258 - DNA, 33 bp, Homo sapien
tgagagatattctacggcccacaaaacctctca

SEQ ID NO: 562259 - DNA, 33 bp, Homo sapien
cctttgaggcaccaaacgattgaaaaattgctt

SEQ ID NO: 562260 - DNA, 33 bp, Homo sapien
cctttgaggcaccaaaggattgaaaaattgctt

SEQ ID NO: 562261 - DNA, 33 bp, Homo sapien
acctttcaaatttgtacaaggcaaggaggacat

SEQ ID NO: 562262 - DNA, 33 bp, Homo sapien
acctttcaaatttgtataaggcaaggaggacat

SEQ ID NO: 562263 - DNA, 33 bp, Homo sapien
ttacagtctacaacagaaaagttactttttcca

SEQ ID NO: 562264 - DNA, 33 bp, Homo sapien
ttacagtctacaacaggaaagttactttttcca

SEQ ID NO: 562265 - DNA, 33 bp, Homo sapien
acagcagcactattcagtatagctcactggtga

SEQ ID NO: 562266 - DNA, 33 bp, Homo sapien
acagcagcactattcattatagctcactggtga

SEQ ID NO: 562267 - DNA, 33 bp, Homo sapien
catgaagtgaatggaaccaccagaatctagaag

SEQ ID NO: 562268 - DNA, 33 bp, Homo sapien
catgaagtgaatggaatcaccagaatctagaag

SEQ ID NO: 562269 - DNA, 33 bp, Homo sapien
aacgaaacaaaacaaacagcatggatgaagctt

SEQ ID NO: 562270 - DNA, 33 bp, Homo sapien
aacgaaacaaaacaaagagcatggatgaagctt

SEQ ID NO: 562271 - DNA, 33 bp, Homo sapien
taacagtcaccgaacacatgaatttagctacat

SEQ ID NO: 562272 - DNA, 33 bp, Homo sapien
taacagtcaccgaacatatgaatttagctacat

SEQ ID NO: 562273 - DNA, 33 bp, Homo sapien
ccagtgactattaagaagcataaccactttgct

SEQ ID NO: 562274 - DNA, 33 bp, Homo sapien
ccagtgactattaagaggcataaccactttgct

SEQ ID NO: 562275 - DNA, 33 bp, Homo sapien
atatgatgagcaaataccttttggatccttgat

SEQ ID NO: 562276 - DNA, 33 bp, Homo sapien
atatgatgagcaaatatcttttggatccttgat

SEQ ID NO: 562277 - DNA, 33 bp, Homo sapien
tttggaggtatgtggaagactttttaatccttc

SEQ ID NO: 562278 - DNA, 33 bp, Homo sapien
tttggaggtatgtggatgactttttaatccttc

SEQ ID NO: 562279 - DNA, 33 bp, Homo sapien
atttataggggagtcaaactattctgtatgata

SEQ ID NO: 562280 - DNA, 33 bp, Homo sapien
atttataggggagtcacactattctgtatgata

SEQ ID NO: 562281 - DNA, 33 bp, Homo sapien
aggcaaactgtagagacagcaaacagatcagta

SEQ ID NO: 562282 - DNA, 33 bp, Homo sapien
aggcaaactgtagagatagcaaacagatcagta

SEQ ID NO: 562283 - DNA, 33 bp, Homo sapien
ttaaagaaatggacaacggagaaagagaaacca

SEQ ID NO: 562284 - DNA, 33 bp, Homo sapien
ttaaagaaatggacaatggagaaagagaaacca

SEQ ID NO: 562285 - DNA, 33 bp, Homo sapien
cccttggaatgagtagcctaaatataccagcta

SEQ ID NO: 562286 - DNA, 33 bp, Homo sapien
cccttggaatgagtagtctaaatataccagcta

SEQ ID NO: 562287 - DNA, 33 bp, Homo sapien
tacctgcaccactcataaagcagaagcatgtaa

SEQ ID NO: 562288 - DNA, 33 bp, Homo sapien
tacctgcaccactcatgaagcagaagcatgtaa

SEQ ID NO: 562289 - DNA, 33 bp, Homo sapien
atatgtaggtctaaaacgtaagagtgtttttgg

SEQ ID NO: 562290 - DNA, 33 bp, Homo sapien
atatgtaggtctaaaatgtaagagtgtttttgg

SEQ ID NO: 562291 - DNA, 33 bp, Homo sapien
tcactatcaaaccaaggcttcacaggagatgaa

SEQ ID NO: 562292 - DNA, 33 bp, Homo sapien
tcactatcaaaccaagtcttcacaggagatgaa

SEQ ID NO: 562293 - DNA, 33 bp, Homo sapien
acacctttctgtgaaacacagtagatgttcacc

SEQ ID NO: 562294 - DNA, 33 bp, Homo sapien
acacctttctgtgaaatacagtagatgttcacc

SEQ ID NO: 562295 - DNA, 33 bp, Homo sapien
tttcttatacttctagaacaagatatgaaagtg

SEQ ID NO: 562296 - DNA, 33 bp, Homo sapien
tttcttatacttctagcacaagatatgaaagtg

SEQ ID NO: 562297 - DNA, 33 bp, Homo sapien
ttgaaaagatccagaccgtaaatttgtgtcatt

SEQ ID NO: 562298 - DNA, 33 bp, Homo sapien
ttgaaaagatccagactgtaaatttgtgtcatt

SEQ ID NO: 562299 - DNA, 33 bp, Homo sapien
atataagccactccatgagcagttatttgttat

SEQ ID NO: 562300 - DNA, 33 bp, Homo sapien
atataagccactccattagcagttatttgttat

SEQ ID NO: 562301 - DNA, 33 bp, Homo sapien
gttcccctcatgcttcaacacccttctccttct

SEQ ID NO: 562302 - DNA, 33 bp, Homo sapien
gttcccctcatgcttcgacacccttctccttct

SEQ ID NO: 562303 - DNA, 33 bp, Homo sapien
cagactgtgatagaaccgcctctctatcccact

SEQ ID NO: 562304 - DNA, 33 bp, Homo sapien
cagactgtgatagaactgcctctctatcccact

SEQ ID NO: 562305 - DNA, 33 bp, Homo sapien
gaacttgatacgcagcccccccaaactttggag

SEQ ID NO: 562306 - DNA, 33 bp, Homo sapien
gaacttgatacgcagctcccccaaactttggag

SEQ ID NO: 562307 - DNA, 33 bp, Homo sapien
attaagtgaaataagccagcaacagaaagacaa

SEQ ID NO: 562308 - DNA, 33 bp, Homo sapien
attaagtgaaataagctagcaacagaaagacaa

SEQ ID NO: 562309 - DNA, 33 bp, Homo sapien
tttataatagccactccaactgggctgaaataa

SEQ ID NO: 562310 - DNA, 33 bp, Homo sapien
tttataatagccactctaactgggctgaaataa

SEQ ID NO: 562311 - DNA, 33 bp, Homo sapien
gataacaaataaagaagatgcctgaacatcagg

SEQ ID NO: 562312 - DNA, 33 bp, Homo sapien
gataacaaataaagaatatgcctgaacatcagg

SEQ ID NO: 562313 - DNA, 33 bp, Homo sapien
caacaaagcagacagcacaattcagcaaagagc

SEQ ID NO: 562314 - DNA, 33 bp, Homo sapien
caacaaagcagacagcgcaattcagcaaagagc

SEQ ID NO: 562315 - DNA, 33 bp, Homo sapien
tcctcaagcctacttgcaaaatcttgggcattg

SEQ ID NO: 562316 - DNA, 33 bp, Homo sapien
tcctcaagcctacttgtaaaatcttgggcattg

SEQ ID NO: 562317 - DNA, 33 bp, Homo sapien
tttctctacttcagtaaggcagtgtttacataa

SEQ ID NO: 562318 - DNA, 33 bp, Homo sapien
tttctctacttcagtagggcagtgtttacataa

SEQ ID NO: 562319 - DNA, 33 bp, Homo sapien
tgaagtatagaggaaaacacttcaactttttca

SEQ ID NO: 562320 - DNA, 33 bp, Homo sapien
tgaagtatagaggaaagcacttcaactttttca

SEQ ID NO: 562321 - DNA, 33 bp, Homo sapien
gtaaccatggttagtacctttcctttgtccagc

SEQ ID NO: 562322 - DNA, 33 bp, Homo sapien
gtaaccatggttagtatctttcctttgtccagc

SEQ ID NO: 562323 - DNA, 33 bp, Homo sapien
gctagcgttgctggtccaaccgtcccacttcta

SEQ ID NO: 562324 - DNA, 33 bp, Homo sapien
gctagcgttgctggtctaaccgtcccacttcta

SEQ ID NO: 562325 - DNA, 33 bp, Homo sapien
ctcaaaaaacactaccaaatcaaatccagcaac

SEQ ID NO: 562326 - DNA, 33 bp, Homo sapien
ctcaaaaaacactaccgaatcaaatccagcaac

SEQ ID NO: 562327 - DNA, 33 bp, Homo sapien
gttgtgagcattcttacgtgaagtattcccaga

SEQ ID NO: 562328 - DNA, 33 bp, Homo sapien
gttgtgagcattcttatgtgaagtattcccaga

SEQ ID NO: 562329 - DNA, 33 bp, Homo sapien
gaaggtatctagtaaaactacagtcatggaata

SEQ ID NO: 562330 - DNA, 33 bp, Homo sapien
gaaggtatctagtaaacctacagtcatggaata

SEQ ID NO: 562331 - DNA, 33 bp, Homo sapien
tgaatcacatacccaccagtgcggtaaagatac

SEQ ID NO: 562332 - DNA, 33 bp, Homo sapien
tgaatcacatacccacgagtgcggtaaagatac

SEQ ID NO: 562333 - DNA, 33 bp, Homo sapien
taatattcttgtcatcaaacccagagacttttc

SEQ ID NO: 562334 - DNA, 33 bp, Homo sapien
taatattcttgtcatcgaacccagagacttttc

SEQ ID NO: 562335 - DNA, 33 bp, Homo sapien
tctccaagtttttaaacgcacttcctgttggct

SEQ ID NO: 562336 - DNA, 33 bp, Homo sapien
tctccaagtttttaaatgcacttcctgttggct

SEQ ID NO: 562337 - DNA, 33 bp, Homo sapien
tggccacttcatttctaaaatagtttccaaata

SEQ ID NO: 562338 - DNA, 33 bp, Homo sapien
tggccacttcatttcttaaatagtttccaaata

SEQ ID NO: 562339 - DNA, 33 bp, Homo sapien
taataaatttctggtcacttcacttttattaaa

SEQ ID NO: 562340 - DNA, 33 bp, Homo sapien
taataaatttctggtcgcttcacttttattaaa

SEQ ID NO: 562341 - DNA, 33 bp, Homo sapien
attctagggctgagctcactgtccatagtggga

SEQ ID NO: 562342 - DNA, 33 bp, Homo sapien
attctagggctgagcttactgtccatagtggga

SEQ ID NO: 562343 - DNA, 33 bp, Homo sapien
cactcattggatcacaaattgagtttggccagc

SEQ ID NO: 562344 - DNA, 33 bp, Homo sapien
cactcattggatcacagattgagtttggccagc

SEQ ID NO: 562345 - DNA, 33 bp, Homo sapien
acacaatccagggaaaccagtaatcatctctgg

SEQ ID NO: 562346 - DNA, 33 bp, Homo sapien
acacaatccagggaaatcagtaatcatctctgg

SEQ ID NO: 562347 - DNA, 33 bp, Homo sapien
ctgaaatattgcaatcaccttgcatggatctct

SEQ ID NO: 562348 - DNA, 33 bp, Homo sapien
ctgaaatattgcaatcgccttgcatggatctct

SEQ ID NO: 562349 - DNA, 33 bp, Homo sapien
tctgttcatttcacatcatctccacttggttac

SEQ ID NO: 562350 - DNA, 33 bp, Homo sapien
tctgttcatttcacattatctccacttggttac

SEQ ID NO: 562351 - DNA, 33 bp, Homo sapien
tggtttggctttaagaccgtgaaacctgtttat

SEQ ID NO: 562352 - DNA, 33 bp, Homo sapien
tggtttggctttaagagcgtgaaacctgtttat

SEQ ID NO: 562353 - DNA, 33 bp, Homo sapien
agatctatgacttccaaaaaatgctaaaatgat

SEQ ID NO: 562354 - DNA, 33 bp, Homo sapien
agatctatgacttccacaaaatgctaaaatgat

SEQ ID NO: 562355 - DNA, 33 bp, Homo sapien
tccttaaactgtgttacgctggagtccttgggt

SEQ ID NO: 562356 - DNA, 33 bp, Homo sapien
tccttaaactgtgttatgctggagtccttgggt

SEQ ID NO: 562357 - DNA, 33 bp, Homo sapien
caagcttatatcctccacagaagaaaacactat

SEQ ID NO: 562358 - DNA, 33 bp, Homo sapien
caagcttatatcctccgcagaagaaaacactat

SEQ ID NO: 562359 - DNA, 33 bp, Homo sapien
aaagaccttccagacaagtgaaaatgcagtgga

SEQ ID NO: 562360 - DNA, 33 bp, Homo sapien
aaagaccttccagacaggtgaaaatgcagtgga

SEQ ID NO: 562361 - DNA, 33 bp, Homo sapien
catacaccatgagaaactcctgaaaggtggagt

SEQ ID NO: 562362 - DNA, 33 bp, Homo sapien
catacaccatgagaaattcctgaaaggtggagt

SEQ ID NO: 562363 - DNA, 33 bp, Homo sapien
tctctttatgagtacaaataaggaaaacaagcc

SEQ ID NO: 562364 - DNA, 33 bp, Homo sapien
tctctttatgagtacagataaggaaaacaagcc

SEQ ID NO: 562365 - DNA, 33 bp, Homo sapien
gcaggagccatggccaaaatccacatttcccat

SEQ ID NO: 562366 - DNA, 33 bp, Homo sapien
gcaggagccatggccagaatccacatttcccat

SEQ ID NO: 562367 - DNA, 33 bp, Homo sapien
acttatcttatggaagaaggtcctcaattctcc

SEQ ID NO: 562368 - DNA, 33 bp, Homo sapien
acttatcttatggaaggaggtcctcaattctcc

SEQ ID NO: 562369 - DNA, 33 bp, Homo sapien
gacaattggtagcatccatcaaaattacaaata

SEQ ID NO: 562370 - DNA, 33 bp, Homo sapien
gacaattggtagcatctatcaaaattacaaata

SEQ ID NO: 562371 - DNA, 33 bp, Homo sapien
ggagaagcataaaatacgcaggccttaaaatga

SEQ ID NO: 562372 - DNA, 33 bp, Homo sapien
ggagaagcataaaataggcaggccttaaaatga

SEQ ID NO: 562373 - DNA, 33 bp, Homo sapien
attcagtgagagttaacaatctgaacactaaaa

SEQ ID NO: 562374 - DNA, 33 bp, Homo sapien
attcagtgagagttaataatctgaacactaaaa

SEQ ID NO: 562375 - DNA, 33 bp, Homo sapien
tgttgtctgatttacaacccaagtataggtttc

SEQ ID NO: 562376 - DNA, 33 bp, Homo sapien
tgttgtctgatttacagcccaagtataggtttc

SEQ ID NO: 562377 - DNA, 33 bp, Homo sapien
agaaagcaagacactaagattgcagaccatcat

SEQ ID NO: 562378 - DNA, 33 bp, Homo sapien
agaaagcaagacactaggattgcagaccatcat

SEQ ID NO: 562379 - DNA, 33 bp, Homo sapien
ctgaataacaacatcacagtgcgttcctcaaag

SEQ ID NO: 562380 - DNA, 33 bp, Homo sapien
ctgaataacaacatcatagtgcgttcctcaaag

SEQ ID NO: 562381 - DNA, 33 bp, Homo sapien
tcttgttctggccctaaccatctctcaggctgc

SEQ ID NO: 562382 - DNA, 33 bp, Homo sapien
tcttgttctggccctagccatctctcaggctgc

SEQ ID NO: 562383 - DNA, 33 bp, Homo sapien
atggaagaggattcaacacaatcttggtgaagg

SEQ ID NO: 562384 - DNA, 33 bp, Homo sapien
atggaagaggattcaatacaatcttggtgaagg

SEQ ID NO: 562385 - DNA, 33 bp, Homo sapien
tcaagtcttagcccaaatgtaggctctttggag

SEQ ID NO: 562386 - DNA, 33 bp, Homo sapien
tcaagtcttagcccaagtgtaggctctttggag

SEQ ID NO: 562387 - DNA, 33 bp, Homo sapien
ttatggtggactgtgcaaaaatggccacaatac

SEQ ID NO: 562388 - DNA, 33 bp, Homo sapien
ttatggtggactgtgcgaaaatggccacaatac

SEQ ID NO: 562389 - DNA, 33 bp, Homo sapien
agaattacttatgtcacgggaaatctcctggtg

SEQ ID NO: 562390 - DNA, 33 bp, Homo sapien
agaattacttatgtcatgggaaatctcctggtg

SEQ ID NO: 562391 - DNA, 33 bp, Homo sapien
attacaaagctattaacgtggagccagggttct

SEQ ID NO: 562392 - DNA, 33 bp, Homo sapien
attacaaagctattaatgtggagccagggttct

SEQ ID NO: 562393 - DNA, 33 bp, Homo sapien
tttgatttgtttgtataaagcactatccagtcc

SEQ ID NO: 562394 - DNA, 33 bp, Homo sapien
tttgatttgtttgtatgaagcactatccagtcc

SEQ ID NO: 562395 - DNA, 33 bp, Homo sapien
aactggatcatgaatcaacaaaatgaaggaggc

SEQ ID NO: 562396 - DNA, 33 bp, Homo sapien
aactggatcatgaatcgacaaaatgaaggaggc

SEQ ID NO: 562397 - DNA, 33 bp, Homo sapien
ttgaggagggaggatagggctgcatgcctctga

SEQ ID NO: 562398 - DNA, 33 bp, Homo sapien
ttgaggagggaggatatggctgcatgcctctga

SEQ ID NO: 562399 - DNA, 33 bp, Homo sapien
atctcctgctcaaggaagcaattaagccggcac

SEQ ID NO: 562400 - DNA, 33 bp, Homo sapien
atctcctgctcaaggaggcaattaagccggcac

SEQ ID NO: 562401 - DNA, 33 bp, Homo sapien
ggattagggctgaagacagaagttacctctggg

SEQ ID NO: 562402 - DNA, 33 bp, Homo sapien
ggattagggctgaagatagaagttacctctggg

SEQ ID NO: 562403 - DNA, 33 bp, Homo sapien
ttgttactgggtatcactattatttctatgaga

SEQ ID NO: 562404 - DNA, 33 bp, Homo sapien
ttgttactgggtatcattattatttctatgaga

SEQ ID NO: 562405 - DNA, 33 bp, Homo sapien
aaacgtgtaagccaacagtcctatttgaggaag

SEQ ID NO: 562406 - DNA, 33 bp, Homo sapien
aaacgtgtaagccaacggtcctatttgaggaag

SEQ ID NO: 562407 - DNA, 33 bp, Homo sapien
atgggaatatgctgcaaaaatctctgacttcag

SEQ ID NO: 562408 - DNA, 33 bp, Homo sapien
atgggaatatgctgcacaaatctctgacttcag

SEQ ID NO: 562409 - DNA, 33 bp, Homo sapien
ctttgtccaagtgaaaacaagtttcctgattaa

SEQ ID NO: 562410 - DNA, 33 bp, Homo sapien
ctttgtccaagtgaaagcaagtttcctgattaa

SEQ ID NO: 562411 - DNA, 33 bp, Homo sapien
caagtttcctgattaaaacaaagcctagccatt

SEQ ID NO: 562412 - DNA, 33 bp, Homo sapien
caagtttcctgattaagacaaagcctagccatt

SEQ ID NO: 562413 - DNA, 33 bp, Homo sapien
aggaagcattaatagaagctctttttgctactt

SEQ ID NO: 562414 - DNA, 33 bp, Homo sapien
aggaagcattaatagatgctctttttgctactt

SEQ ID NO: 562415 - DNA, 33 bp, Homo sapien
ttgagcctttcccatccgaagatcctcaaagaa

SEQ ID NO: 562416 - DNA, 33 bp, Homo sapien
ttgagcctttcccatctgaagatcctcaaagaa

SEQ ID NO: 562417 - DNA, 33 bp, Homo sapien
atttggggaaaacctaactaggagatattgtca

SEQ ID NO: 562418 - DNA, 33 bp, Homo sapien
atttggggaaaacctacctaggagatattgtca

SEQ ID NO: 562419 - DNA, 33 bp, Homo sapien
gggttgctggagttcagctgggcagttctgcaa

SEQ ID NO: 562420 - DNA, 33 bp, Homo sapien
gggttgctggagttcatctgggcagttctgcaa

SEQ ID NO: 562421 - DNA, 33 bp, Homo sapien
aatgggagcctcattcaaaatagcattaggaga

SEQ ID NO: 562422 - DNA, 33 bp, Homo sapien
aatgggagcctcattcgaaatagcattaggaga

SEQ ID NO: 562423 - DNA, 33 bp, Homo sapien
tcaaaaaggaaaattagcacagagtccaagcaa

SEQ ID NO: 562424 - DNA, 33 bp, Homo sapien
tcaaaaaggaaaattatcacagagtccaagcaa

SEQ ID NO: 562425 - DNA, 33 bp, Homo sapien
agagacagctgcccaagacagctttgtgacagt

SEQ ID NO: 562426 - DNA, 33 bp, Homo sapien
agagacagctgcccaatacagctttgtgacagt

SEQ ID NO: 562427 - DNA, 33 bp, Homo sapien
atgaccctctatcgacaatgatcagaaactgca

SEQ ID NO: 562428 - DNA, 33 bp, Homo sapien
atgaccctctatcgacgatgatcagaaactgca

SEQ ID NO: 562429 - DNA, 33 bp, Homo sapien
tttaatgtctagaatccctcaagttgctggaaa

SEQ ID NO: 562430 - DNA, 33 bp, Homo sapien
tttaatgtctagaatctctcaagttgctggaaa

SEQ ID NO: 562431 - DNA, 33 bp, Homo sapien
tctagtacatgagttgcattaagtgatagtcat

SEQ ID NO: 562432 - DNA, 33 bp, Homo sapien
tctagtacatgagttgtattaagtgatagtcat

SEQ ID NO: 562433 - DNA, 33 bp, Homo sapien
cccacctgtcatagacgggaaactgaagatcag

SEQ ID NO: 562434 - DNA, 33 bp, Homo sapien
cccacctgtcatagactggaaactgaagatcag

SEQ ID NO: 562435 - DNA, 33 bp, Homo sapien
aattaacaataggccaactgatttctcaaagca

SEQ ID NO: 562436 - DNA, 33 bp, Homo sapien
aattaacaataggccatctgatttctcaaagca

SEQ ID NO: 562437 - DNA, 33 bp, Homo sapien
caccgagtactcttccactgtagcaaagcacct

SEQ ID NO: 562438 - DNA, 33 bp, Homo sapien
caccgagtactcttccgctgtagcaaagcacct

SEQ ID NO: 562439 - DNA, 33 bp, Homo sapien
tgacctgacaggaaagaactcagcatcttgctg

SEQ ID NO: 562440 - DNA, 33 bp, Homo sapien
tgacctgacaggaaagcactcagcatcttgctg

SEQ ID NO: 562441 - DNA, 33 bp, Homo sapien
gatgatttctaatcacagctttggaatgtacta

SEQ ID NO: 562442 - DNA, 33 bp, Homo sapien
gatgatttctaatcactgctttggaatgtacta

SEQ ID NO: 562443 - DNA, 33 bp, Homo sapien
tcaatcccaagacagaagacatctaaattctat

SEQ ID NO: 562444 - DNA, 33 bp, Homo sapien
tcaatcccaagacagaggacatctaaattctat

SEQ ID NO: 562445 - DNA, 33 bp, Homo sapien
agacaaataacactgacgactgaattcctcaga

SEQ ID NO: 562446 - DNA, 33 bp, Homo sapien
agacaaataacactgatgactgaattcctcaga

SEQ ID NO: 562447 - DNA, 33 bp, Homo sapien
attctcctgatttcaacggcagggttcaacctg

SEQ ID NO: 562448 - DNA, 33 bp, Homo sapien
attctcctgatttcaatggcagggttcaacctg

SEQ ID NO: 562449 - DNA, 33 bp, Homo sapien
gagcccaagaggcctcagacattggtcagggat

SEQ ID NO: 562450 - DNA, 33 bp, Homo sapien
gagcccaagaggcctcggacattggtcagggat

SEQ ID NO: 562451 - DNA, 33 bp, Homo sapien
tgcgcctctggctgtacggacctaatgagatgc

SEQ ID NO: 562452 - DNA, 33 bp, Homo sapien
tgcgcctctggctgtatggacctaatgagatgc

SEQ ID NO: 562453 - DNA, 33 bp, Homo sapien
tccccatgcttcattaaattatattgtgatttt

SEQ ID NO: 562454 - DNA, 33 bp, Homo sapien
tccccatgcttcattatattatattgtgatttt

SEQ ID NO: 562455 - DNA, 33 bp, Homo sapien
tacctattgccttagacaaaatcctagaccaat

SEQ ID NO: 562456 - DNA, 33 bp, Homo sapien
tacctattgccttagataaaatcctagaccaat

SEQ ID NO: 562457 - DNA, 33 bp, Homo sapien
cttatccatcttctaccattaacccataagtgt

SEQ ID NO: 562458 - DNA, 33 bp, Homo sapien
cttatccatcttctactattaacccataagtgt

SEQ ID NO: 562459 - DNA, 33 bp, Homo sapien
ctgcattaattccatacctgccccctgaacagc

SEQ ID NO: 562460 - DNA, 33 bp, Homo sapien
ctgcattaattccatatctgccccctgaacagc

SEQ ID NO: 562461 - DNA, 33 bp, Homo sapien
taggatctcagggttagatgatttggatcctca

SEQ ID NO: 562462 - DNA, 33 bp, Homo sapien
taggatctcagggttatatgatttggatcctca

SEQ ID NO: 562463 - DNA, 33 bp, Homo sapien
ttgccagggctgctacagaaggaccacaaccaa

SEQ ID NO: 562464 - DNA, 33 bp, Homo sapien
ttgccagggctgctaccgaaggaccacaaccaa

SEQ ID NO: 562465 - DNA, 33 bp, Homo sapien
cttcgctaatgcacaacgaaccctcacttccaa

SEQ ID NO: 562466 - DNA, 33 bp, Homo sapien
cttcgctaatgcacaatgaaccctcacttccaa

SEQ ID NO: 562467 - DNA, 33 bp, Homo sapien
tcacagcaagcatttccatagcacttactacat

SEQ ID NO: 562468 - DNA, 33 bp, Homo sapien
tcacagcaagcatttctatagcacttactacat

SEQ ID NO: 562469 - DNA, 33 bp, Homo sapien
tgtgacattttcaatcacttctaacagcactgg

SEQ ID NO: 562470 - DNA, 33 bp, Homo sapien
tgtgacattttcaatcgcttctaacagcactgg

SEQ ID NO: 562471 - DNA, 33 bp, Homo sapien
ttcttcagcagttgaacctaaagactgggtgca

SEQ ID NO: 562472 - DNA, 33 bp, Homo sapien
ttcttcagcagttgaagctaaagactgggtgca

SEQ ID NO: 562473 - DNA, 33 bp, Homo sapien
tattatgctttacagacgatgtatttcccaggg

SEQ ID NO: 562474 - DNA, 33 bp, Homo sapien
tattatgctttacagatgatgtatttcccaggg

SEQ ID NO: 562475 - DNA, 33 bp, Homo sapien
gctttgttcccaagaaaattaagatgaaactaa

SEQ ID NO: 562476 - DNA, 33 bp, Homo sapien
gctttgttcccaagaagattaagatgaaactaa

SEQ ID NO: 562477 - DNA, 33 bp, Homo sapien
acaaatcaaattgccaagctggtgtttcagaac

SEQ ID NO: 562478 - DNA, 33 bp, Homo sapien
acaaatcaaattgccaggctggtgtttcagaac

SEQ ID NO: 562479 - DNA, 33 bp, Homo sapien
aaacattaaacaaaaaatcagtctgctggtcag

SEQ ID NO: 562480 - DNA, 33 bp, Homo sapien
aaacattaaacaaaaagtcagtctgctggtcag

SEQ ID NO: 562481 - DNA, 33 bp, Homo sapien
gaatcaaaacctctgaacctggacatcattttt

SEQ ID NO: 562482 - DNA, 33 bp, Homo sapien
gaatcaaaacctctgagcctggacatcattttt

SEQ ID NO: 562483 - DNA, 33 bp, Homo sapien
tgtacacatttggtcaagtatatgcctaggaaa

SEQ ID NO: 562484 - DNA, 33 bp, Homo sapien
tgtacacatttggtcaggtatatgcctaggaaa

SEQ ID NO: 562485 - DNA, 33 bp, Homo sapien
gtttaatgtgtacttacagcttttctcattgct

SEQ ID NO: 562486 - DNA, 33 bp, Homo sapien
gtttaatgtgtacttatagcttttctcattgct

SEQ ID NO: 562487 - DNA, 33 bp, Homo sapien
aagtcactgggatagcactttattccactatct

SEQ ID NO: 562488 - DNA, 33 bp, Homo sapien
aagtcactgggatagcgctttattccactatct

SEQ ID NO: 562489 - DNA, 33 bp, Homo sapien
gcacagccttaaaggaactcagtgaacagtccc

SEQ ID NO: 562490 - DNA, 33 bp, Homo sapien
gcacagccttaaaggagctcagtgaacagtccc

SEQ ID NO: 562491 - DNA, 33 bp, Homo sapien
actgccacaaaagcagacatcttgggcacttga

SEQ ID NO: 562492 - DNA, 33 bp, Homo sapien
actgccacaaaagcaggcatcttgggcacttga

SEQ ID NO: 562493 - DNA, 33 bp, Homo sapien
taagactggaacactacgattttgcatgttatc

SEQ ID NO: 562494 - DNA, 33 bp, Homo sapien
taagactggaacactaggattttgcatgttatc

SEQ ID NO: 562495 - DNA, 33 bp, Homo sapien
tgaaggggacctgaacaagaggcactgtcacca

SEQ ID NO: 562496 - DNA, 33 bp, Homo sapien
tgaaggggacctgaacgagaggcactgtcacca

SEQ ID NO: 562497 - DNA, 33 bp, Homo sapien
gacttaaacggtttcacggagtactgctgtatt

SEQ ID NO: 562498 - DNA, 33 bp, Homo sapien
gacttaaacggtttcatggagtactgctgtatt

SEQ ID NO: 562499 - DNA, 33 bp, Homo sapien
caacaataaaacattacgctccagaaattatgt

SEQ ID NO: 562500 - DNA, 33 bp, Homo sapien
caacaataaaacattatgctccagaaattatgt

SEQ ID NO: 562501 - DNA, 33 bp, Homo sapien
ccaactctaactagcgaaaacaagtaagcagta

SEQ ID NO: 562502 - DNA, 33 bp, Homo sapien
ccaactctaactagcggaaacaagtaagcagta

SEQ ID NO: 562503 - DNA, 33 bp, Homo sapien
ttccctgtgtagcttcaccaaagtacattaagg

SEQ ID NO: 562504 - DNA, 33 bp, Homo sapien
ttccctgtgtagcttctccaaagtacattaagg

SEQ ID NO: 562505 - DNA, 33 bp, Homo sapien
agacatatgaagaaaccgctgtgatcgtggaga

SEQ ID NO: 562506 - DNA, 33 bp, Homo sapien
agacatatgaagaaactgctgtgatcgtggaga

SEQ ID NO: 562507 - DNA, 33 bp, Homo sapien
gttctctggaaatcaccgtagctatgaatacca

SEQ ID NO: 562508 - DNA, 33 bp, Homo sapien
gttctctggaaatcacggtagctatgaatacca

SEQ ID NO: 562509 - DNA, 33 bp, Homo sapien
agattcagctttataacgagcagattgagacac

SEQ ID NO: 562510 - DNA, 33 bp, Homo sapien
agattcagctttataatgagcagattgagacac

SEQ ID NO: 562511 - DNA, 33 bp, Homo sapien
accaggaaaaggaacccggactcggtgaatgtt

SEQ ID NO: 562512 - DNA, 33 bp, Homo sapien
accaggaaaaggaacctggactcggtgaatgtt

SEQ ID NO: 562513 - DNA, 33 bp, Homo sapien
caccctctgcaattagcccataaggaggcccac

SEQ ID NO: 562514 - DNA, 33 bp, Homo sapien
caccctctgcaattagtccataaggaggcccac

SEQ ID NO: 562515 - DNA, 33 bp, Homo sapien
tcagactttaatgaacaagcataaatctgatag

SEQ ID NO: 562516 - DNA, 33 bp, Homo sapien
tcagactttaatgaactagcataaatctgatag

SEQ ID NO: 562517 - DNA, 33 bp, Homo sapien
gggccgtggagccatacgttcactcacatgtct

SEQ ID NO: 562518 - DNA, 33 bp, Homo sapien
gggccgtggagccatatgttcactcacatgtct

SEQ ID NO: 562519 - DNA, 33 bp, Homo sapien
tgagtcagactcttaacaccctcaggtggttcc

SEQ ID NO: 562520 - DNA, 33 bp, Homo sapien
tgagtcagactcttaataccctcaggtggttcc

SEQ ID NO: 562521 - DNA, 33 bp, Homo sapien
gccatgtaacatattcaagggtgtagcaccaag

SEQ ID NO: 562522 - DNA, 33 bp, Homo sapien
gccatgtaacatattcgagggtgtagcaccaag

SEQ ID NO: 562523 - DNA, 33 bp, Homo sapien
gaaatcaataaaaagcactacatctagttgtgg

SEQ ID NO: 562524 - DNA, 33 bp, Homo sapien
gaaatcaataaaaagcgctacatctagttgtgg

SEQ ID NO: 562525 - DNA, 33 bp, Homo sapien
cttgacctgggcaaaacgaatgcatgatgtaga

SEQ ID NO: 562526 - DNA, 33 bp, Homo sapien
cttgacctgggcaaaatgaatgcatgatgtaga

SEQ ID NO: 562527 - DNA, 33 bp, Homo sapien
aaaaccccgtttctgcaaggaacataggatatg

SEQ ID NO: 562528 - DNA, 33 bp, Homo sapien
aaaaccccgtttctgccaggaacataggatatg

SEQ ID NO: 562529 - DNA, 33 bp, Homo sapien
actcaaaggtgttttacatccgagcataccttt

SEQ ID NO: 562530 - DNA, 33 bp, Homo sapien
actcaaaggtgttttatatccgagcataccttt

SEQ ID NO: 562531 - DNA, 33 bp, Homo sapien
agtatcatctaagcgacaggaaagttacttttt

SEQ ID NO: 562532 - DNA, 33 bp, Homo sapien
agtatcatctaagcgataggaaagttacttttt

SEQ ID NO: 562533 - DNA, 33 bp, Homo sapien
agaaggaaaaaccagcacagctcaacttataat

SEQ ID NO: 562534 - DNA, 33 bp, Homo sapien
agaaggaaaaaccagcgcagctcaacttataat

SEQ ID NO: 562535 - DNA, 33 bp, Homo sapien
atatgaaatctaactacgggacttagcttctga

SEQ ID NO: 562536 - DNA, 33 bp, Homo sapien
atatgaaatctaactatgggacttagcttctga

SEQ ID NO: 562537 - DNA, 33 bp, Homo sapien
acctgccggcgttacaatgacaagctgctgttt

SEQ ID NO: 562538 - DNA, 33 bp, Homo sapien
acctgccggcgttacagtgacaagctgctgttt

SEQ ID NO: 562539 - DNA, 33 bp, Homo sapien
tggagttgcctcttaggagatcatgagagccaa

SEQ ID NO: 562540 - DNA, 33 bp, Homo sapien
tggagttgcctcttagtagatcatgagagccaa

SEQ ID NO: 562541 - DNA, 33 bp, Homo sapien
tgataaacactacaaaggaagacatttctctcc

SEQ ID NO: 562542 - DNA, 33 bp, Homo sapien
tgataaacactacaaatgaagacatttctctcc

SEQ ID NO: 562543 - DNA, 33 bp, Homo sapien
tttctacatgggaatgaaatagatggtaaaaat

SEQ ID NO: 562544 - DNA, 33 bp, Homo sapien
tttctacatgggaatggaatagatggtaaaaat

SEQ ID NO: 562545 - DNA, 33 bp, Homo sapien
gtgtgtaaataagcaaaacctggaaggacagac

SEQ ID NO: 562546 - DNA, 33 bp, Homo sapien
gtgtgtaaataagcaacacctggaaggacagac

SEQ ID NO: 562547 - DNA, 33 bp, Homo sapien
cggaagtacaacaaccagatcagaagtgtaaaa

SEQ ID NO: 562548 - DNA, 33 bp, Homo sapien
cggaagtacaacaaccggatcagaagtgtaaaa

SEQ ID NO: 562549 - DNA, 33 bp, Homo sapien
gtttaataagtattgaataagtgaaccagtatc

SEQ ID NO: 562550 - DNA, 33 bp, Homo sapien
gtttaataagtattgagtaagtgaaccagtatc

SEQ ID NO: 562551 - DNA, 33 bp, Homo sapien
ttgagtgactttgatactagaggcattagtctg

SEQ ID NO: 562552 - DNA, 33 bp, Homo sapien
ttgagtgactttgatattagaggcattagtctg

SEQ ID NO: 562553 - DNA, 33 bp, Homo sapien
aggtgaattctgtaaaccaaaagtacctgaggt

SEQ ID NO: 562554 - DNA, 33 bp, Homo sapien
aggtgaattctgtaaagcaaaagtacctgaggt

SEQ ID NO: 562555 - DNA, 33 bp, Homo sapien
gctcttggaaactacaactttaagcaaaacaac

SEQ ID NO: 562556 - DNA, 33 bp, Homo sapien
gctcttggaaactacagctttaagcaaaacaac

SEQ ID NO: 562557 - DNA, 33 bp, Homo sapien
ttttaaactagtttgaagtgctaccagttttct

SEQ ID NO: 562558 - DNA, 33 bp, Homo sapien
ttttaaactagtttgaggtgctaccagttttct

SEQ ID NO: 562559 - DNA, 33 bp, Homo sapien
actcacaggacaagaaagatgcctccgagccct

SEQ ID NO: 562560 - DNA, 33 bp, Homo sapien
actcacaggacaagaacgatgcctccgagccct

SEQ ID NO: 562561 - DNA, 33 bp, Homo sapien
gatgcatttccttcccacatggaccagagactg

SEQ ID NO: 562562 - DNA, 33 bp, Homo sapien
gatgcatttccttcccgcatggaccagagactg

SEQ ID NO: 562563 - DNA, 33 bp, Homo sapien
gttctccaaaaagcccaaccactgattattcat

SEQ ID NO: 562564 - DNA, 33 bp, Homo sapien
gttctccaaaaagcccgaccactgattattcat

SEQ ID NO: 562565 - DNA, 33 bp, Homo sapien
gtctgtcgtcgttcccactgcagctggcttgag

SEQ ID NO: 562566 - DNA, 33 bp, Homo sapien
gtctgtcgtcgttcccgctgcagctggcttgag

SEQ ID NO: 562567 - DNA, 33 bp, Homo sapien
ctctgctccctaagccagaagaggtcctgttgg

SEQ ID NO: 562568 - DNA, 33 bp, Homo sapien
ctctgctccctaagccggaagaggtcctgttgg

SEQ ID NO: 562569 - DNA, 33 bp, Homo sapien
gcctatggaaaaagtacgccttgcttaattttg

SEQ ID NO: 562570 - DNA, 33 bp, Homo sapien
gcctatggaaaaagtatgccttgcttaattttg

SEQ ID NO: 562571 - DNA, 33 bp, Homo sapien
cctgaaatctttttctcaaattcaaacgctcct

SEQ ID NO: 562572 - DNA, 33 bp, Homo sapien
cctgaaatctttttctgaaattcaaacgctcct

SEQ ID NO: 562573 - DNA, 33 bp, Homo sapien
tgaccccaaatgccacaaacggtcacatccgca

SEQ ID NO: 562574 - DNA, 33 bp, Homo sapien
tgaccccaaatgccacgaacggtcacatccgca

SEQ ID NO: 562575 - DNA, 33 bp, Homo sapien
gtcgttcttttaaaaacattgtgatgtgggttt

SEQ ID NO: 562576 - DNA, 33 bp, Homo sapien
gtcgttcttttaaaaatattgtgatgtgggttt

SEQ ID NO: 562577 - DNA, 33 bp, Homo sapien
gccacctcctttcagaaggtcctgtttagagca

SEQ ID NO: 562578 - DNA, 33 bp, Homo sapien
gccacctcctttcagatggtcctgtttagagca

SEQ ID NO: 562579 - DNA, 33 bp, Homo sapien
atagaaactgttgaaggccttgatttctataaa

SEQ ID NO: 562580 - DNA, 33 bp, Homo sapien
atagaaactgttgaagtccttgatttctataaa

SEQ ID NO: 562581 - DNA, 33 bp, Homo sapien
tcactcggcgttgagcaagactgagtcacactt

SEQ ID NO: 562582 - DNA, 33 bp, Homo sapien
tcactcggcgttgagcgagactgagtcacactt

SEQ ID NO: 562583 - DNA, 33 bp, Homo sapien
tgttgggggcgacaacactgggtttctggtgat

SEQ ID NO: 562584 - DNA, 33 bp, Homo sapien
tgttgggggcgacaactctgggtttctggtgat

SEQ ID NO: 562585 - DNA, 33 bp, Homo sapien
ttccctgtcttacttccccacttctctactggt

SEQ ID NO: 562586 - DNA, 33 bp, Homo sapien
ttccctgtcttacttctccacttctctactggt

SEQ ID NO: 562587 - DNA, 33 bp, Homo sapien
accaaaattttacctaagcgactctactttttt

SEQ ID NO: 562588 - DNA, 33 bp, Homo sapien
accaaaattttacctatgcgactctactttttt

SEQ ID NO: 562589 - DNA, 33 bp, Homo sapien
cctttccttttgggacagtaagagagctttagg

SEQ ID NO: 562590 - DNA, 33 bp, Homo sapien
cctttccttttgggacggtaagagagctttagg

SEQ ID NO: 562591 - DNA, 33 bp, Homo sapien
ccttatttcccgtcaccatcctaaagctctctt

SEQ ID NO: 562592 - DNA, 33 bp, Homo sapien
ccttatttcccgtcacgatcctaaagctctctt

SEQ ID NO: 562593 - DNA, 33 bp, Homo sapien
gtgggcaaagtactaacacccagaaacctacaa

SEQ ID NO: 562594 - DNA, 33 bp, Homo sapien
gtgggcaaagtactaagacccagaaacctacaa

SEQ ID NO: 562595 - DNA, 33 bp, Homo sapien
tcattctcatcttgaaccttggacatggtttcc

SEQ ID NO: 562596 - DNA, 33 bp, Homo sapien
tcattctcatcttgaatcttggacatggtttcc

SEQ ID NO: 562597 - DNA, 33 bp, Homo sapien
gaaatcactttctaataaccactaatgctcgtt

SEQ ID NO: 562598 - DNA, 33 bp, Homo sapien
gaaatcactttctaatgaccactaatgctcgtt

SEQ ID NO: 562599 - DNA, 33 bp, Homo sapien
gtcttcacattctttacgacacctttggctgca

SEQ ID NO: 562600 - DNA, 33 bp, Homo sapien
gtcttcacattctttatgacacctttggctgca

SEQ ID NO: 562601 - DNA, 33 bp, Homo sapien
aatattcaggatgttaactacctctggcagtct

SEQ ID NO: 562602 - DNA, 33 bp, Homo sapien
aatattcaggatgttagctacctctggcagtct

SEQ ID NO: 562603 - DNA, 33 bp, Homo sapien
tagtgtaaactctctaaaaactcttcaaactgg

SEQ ID NO: 562604 - DNA, 33 bp, Homo sapien
tagtgtaaactctctagaaactcttcaaactgg

SEQ ID NO: 562605 - DNA, 33 bp, Homo sapien
tcaccaaaggtatcaacaaggtaattcatattt

SEQ ID NO: 562606 - DNA, 33 bp, Homo sapien
tcaccaaaggtatcaataaggtaattcatattt

SEQ ID NO: 562607 - DNA, 33 bp, Homo sapien
ccttacggctctttcgcccttacatctagacca

SEQ ID NO: 562608 - DNA, 33 bp, Homo sapien
ccttacggctctttcgtccttacatctagacca

SEQ ID NO: 562609 - DNA, 33 bp, Homo sapien
gggtctggacaccaagccattgtgccgtctgcc

SEQ ID NO: 562610 - DNA, 33 bp, Homo sapien
gggtctggacaccaagtcattgtgccgtctgcc

SEQ ID NO: 562611 - DNA, 33 bp, Homo sapien
aatgggaggatactgacaaagtaaaatgagatc

SEQ ID NO: 562612 - DNA, 33 bp, Homo sapien
aatgggaggatactgataaagtaaaatgagatc

SEQ ID NO: 562613 - DNA, 33 bp, Homo sapien
ctcttcttaaaaagtacgctctctttggttaag

SEQ ID NO: 562614 - DNA, 33 bp, Homo sapien
ctcttcttaaaaagtatgctctctttggttaag

SEQ ID NO: 562615 - DNA, 33 bp, Homo sapien
acaaacaatgatgctacctcacagggtttctga

SEQ ID NO: 562616 - DNA, 33 bp, Homo sapien
acaaacaatgatgctatctcacagggtttctga

SEQ ID NO: 562617 - DNA, 33 bp, Homo sapien
tttcccaaataatcgacggccctgagaagcaga

SEQ ID NO: 562618 - DNA, 33 bp, Homo sapien
tttcccaaataatcgatggccctgagaagcaga

SEQ ID NO: 562619 - DNA, 33 bp, Homo sapien
gaaggcctcactgcaaagactaattacagtcaa

SEQ ID NO: 562620 - DNA, 33 bp, Homo sapien
gaaggcctcactgcaaggactaattacagtcaa

SEQ ID NO: 562621 - DNA, 33 bp, Homo sapien
aagagacaacatttgaactttatgcagatacca

SEQ ID NO: 562622 - DNA, 33 bp, Homo sapien
aagagacaacatttgagctttatgcagatacca

SEQ ID NO: 562623 - DNA, 33 bp, Homo sapien
gtcagcgctgtgaggaaaggggtgtattgcagc

SEQ ID NO: 562624 - DNA, 33 bp, Homo sapien
gtcagcgctgtgaggagaggggtgtattgcagc

SEQ ID NO: 562625 - DNA, 33 bp, Homo sapien
tgcatccctttctctggcaatcttacctttgcc

SEQ ID NO: 562626 - DNA, 33 bp, Homo sapien
tgcatccctttctctgtcaatcttacctttgcc

SEQ ID NO: 562627 - DNA, 33 bp, Homo sapien
cacgtttaaaatggcaactgtctctgtaccctc

SEQ ID NO: 562628 - DNA, 33 bp, Homo sapien
cacgtttaaaatggcagctgtctctgtaccctc

SEQ ID NO: 562629 - DNA, 33 bp, Homo sapien
ttagtggtgccccgagccagagagtaaatagct

SEQ ID NO: 562630 - DNA, 33 bp, Homo sapien
ttagtggtgccccgagtcagagagtaaatagct

SEQ ID NO: 562631 - DNA, 33 bp, Homo sapien
gttatgagtttgtcatcatatatttagagcgag

SEQ ID NO: 562632 - DNA, 33 bp, Homo sapien
gttatgagtttgtcatgatatatttagagcgag

SEQ ID NO: 562633 - DNA, 33 bp, Homo sapien
cattttatgaatcaaaaacagaagtctttgctt

SEQ ID NO: 562634 - DNA, 33 bp, Homo sapien
cattttatgaatcaaatacagaagtctttgctt

SEQ ID NO: 562635 - DNA, 33 bp, Homo sapien
gccagctttggacagacgagaaagtgtcctcct

SEQ ID NO: 562636 - DNA, 33 bp, Homo sapien
gccagctttggacagatgagaaagtgtcctcct

SEQ ID NO: 562637 - DNA, 33 bp, Homo sapien
tgagtgcttctcaaacacttttgctaatgtttc

SEQ ID NO: 562638 - DNA, 33 bp, Homo sapien
tgagtgcttctcaaacgcttttgctaatgtttc

SEQ ID NO: 562639 - DNA, 33 bp, Homo sapien
aaagcaagtgggcttacatcatcacactggggc

SEQ ID NO: 562640 - DNA, 33 bp, Homo sapien
aaagcaagtgggcttagatcatcacactggggc

SEQ ID NO: 562641 - DNA, 33 bp, Homo sapien
cccagcgatatacaaagggtccaatttctccac

SEQ ID NO: 562642 - DNA, 33 bp, Homo sapien
cccagcgatatacaaatggtccaatttctccac

SEQ ID NO: 562643 - DNA, 33 bp, Homo sapien
tacccaagtccttttcaaaatcaggctgtttgt

SEQ ID NO: 562644 - DNA, 33 bp, Homo sapien
tacccaagtccttttcgaaatcaggctgtttgt

SEQ ID NO: 562645 - DNA, 33 bp, Homo sapien
gtgccctggagatctcacgtgtatccaaatagg

SEQ ID NO: 562646 - DNA, 33 bp, Homo sapien
gtgccctggagatctcgcgtgtatccaaatagg

SEQ ID NO: 562647 - DNA, 33 bp, Homo sapien
attggctgtgggtcaaaccttcgcctccgtggc

SEQ ID NO: 562648 - DNA, 33 bp, Homo sapien
attggctgtgggtcaagccttcgcctccgtggc

SEQ ID NO: 562649 - DNA, 33 bp, Homo sapien
ccaaacaagagaggccaagtgactgtcatgtga

SEQ ID NO: 562650 - DNA, 33 bp, Homo sapien
ccaaacaagagaggccgagtgactgtcatgtga

SEQ ID NO: 562651 - DNA, 33 bp, Homo sapien
ccagggttccctgcaggattaggcactgggact

SEQ ID NO: 562652 - DNA, 33 bp, Homo sapien
ccagggttccctgcagtattaggcactgggact

SEQ ID NO: 562653 - DNA, 33 bp, Homo sapien
ctgctaggaggtagtgaaaaggactcttgtgtc

SEQ ID NO: 562654 - DNA, 33 bp, Homo sapien
ctgctaggaggtagtggaaaggactcttgtgtc

SEQ ID NO: 562655 - DNA, 33 bp, Homo sapien
ccctgtcaatgagcagaaagctgacagggctaa

SEQ ID NO: 562656 - DNA, 33 bp, Homo sapien
ccctgtcaatgagcaggaagctgacagggctaa

SEQ ID NO: 562657 - DNA, 33 bp, Homo sapien
atgcaagctctgttcacgtggcagacaaaatgc

SEQ ID NO: 562658 - DNA, 33 bp, Homo sapien
atgcaagctctgttcatgtggcagacaaaatgc

SEQ ID NO: 562659 - DNA, 33 bp, Homo sapien
atatgaatttggagggacacagatatttagtac

SEQ ID NO: 562660 - DNA, 33 bp, Homo sapien
atatgaatttggaggggcacagatatttagtac

SEQ ID NO: 562661 - DNA, 33 bp, Homo sapien
tgcaatgatacttggacgtaaggcctttgggag

SEQ ID NO: 562662 - DNA, 33 bp, Homo sapien
tgcaatgatacttggatgtaaggcctttgggag

SEQ ID NO: 562663 - DNA, 33 bp, Homo sapien
agagtcccaaatgaacgaagacaataggttaat

SEQ ID NO: 562664 - DNA, 33 bp, Homo sapien
agagtcccaaatgaactaagacaataggttaat

SEQ ID NO: 562665 - DNA, 33 bp, Homo sapien
acaagcagtagccaaacgaagtgggctcagaag

SEQ ID NO: 562666 - DNA, 33 bp, Homo sapien
acaagcagtagccaaatgaagtgggctcagaag

SEQ ID NO: 562667 - DNA, 33 bp, Homo sapien
ctcaatacttttgtaaacagttccctacattca

SEQ ID NO: 562668 - DNA, 33 bp, Homo sapien
ctcaatacttttgtaaccagttccctacattca

SEQ ID NO: 562669 - DNA, 33 bp, Homo sapien
tcagggaatagaacaacgtggaagccaaggtgg

SEQ ID NO: 562670 - DNA, 33 bp, Homo sapien
tcagggaatagaacaatgtggaagccaaggtgg

SEQ ID NO: 562671 - DNA, 33 bp, Homo sapien
tggcagctggaatcaacgcctaagtttaaagct

SEQ ID NO: 562672 - DNA, 33 bp, Homo sapien
tggcagctggaatcaaggcctaagtttaaagct

SEQ ID NO: 562673 - DNA, 33 bp, Homo sapien
cacacaacccccaagccgagtgtcccagaggcg

SEQ ID NO: 562674 - DNA, 33 bp, Homo sapien
cacacaacccccaagctgagtgtcccagaggcg

SEQ ID NO: 562675 - DNA, 33 bp, Homo sapien
cagaggttgacaactcaaaagccctacagcagt

SEQ ID NO: 562676 - DNA, 33 bp, Homo sapien
cagaggttgacaactcgaaagccctacagcagt

SEQ ID NO: 562677 - DNA, 33 bp, Homo sapien
gtgatccaagacaacccccattctactatctct

SEQ ID NO: 562678 - DNA, 33 bp, Homo sapien
gtgatccaagacaacctccattctactatctct

SEQ ID NO: 562679 - DNA, 33 bp, Homo sapien
cacaaatgtttactgaaagccaattatgcacca

SEQ ID NO: 562680 - DNA, 33 bp, Homo sapien
cacaaatgtttactgacagccaattatgcacca

SEQ ID NO: 562681 - DNA, 33 bp, Homo sapien
aagtgatgcattgtacaacatgatgacagctat

SEQ ID NO: 562682 - DNA, 33 bp, Homo sapien
aagtgatgcattgtacgacatgatgacagctat

SEQ ID NO: 562683 - DNA, 33 bp, Homo sapien
taattagtagaaggtacatgctctaaaataatg

SEQ ID NO: 562684 - DNA, 33 bp, Homo sapien
taattagtagaaggtatatgctctaaaataatg

SEQ ID NO: 562685 - DNA, 33 bp, Homo sapien
gtggtcatctgggaaaaattaaagctaaatccc

SEQ ID NO: 562686 - DNA, 33 bp, Homo sapien
gtggtcatctgggaaagattaaagctaaatccc

SEQ ID NO: 562687 - DNA, 33 bp, Homo sapien
gtgcgttttccagagacattttatgcaagcaag

SEQ ID NO: 562688 - DNA, 33 bp, Homo sapien
gtgcgttttccagagatattttatgcaagcaag

SEQ ID NO: 562689 - DNA, 33 bp, Homo sapien
gctccgaagggctttcacttcctgcagtatgca

SEQ ID NO: 562690 - DNA, 33 bp, Homo sapien
gctccgaagggctttcgcttcctgcagtatgca

SEQ ID NO: 562691 - DNA, 33 bp, Homo sapien
ggtctcgtgtgcctgcaatttattaaggaagtg

SEQ ID NO: 562692 - DNA, 33 bp, Homo sapien
ggtctcgtgtgcctgcgatttattaaggaagtg

SEQ ID NO: 562693 - DNA, 33 bp, Homo sapien
atagcctatgtcctccaaggctctcaaacaatt

SEQ ID NO: 562694 - DNA, 33 bp, Homo sapien
atagcctatgtcctccgaggctctcaaacaatt

SEQ ID NO: 562695 - DNA, 33 bp, Homo sapien
aagggccctcggatgacgatggtgctcgtgttt

SEQ ID NO: 562696 - DNA, 33 bp, Homo sapien
aagggccctcggatgatgatggtgctcgtgttt

SEQ ID NO: 562697 - DNA, 33 bp, Homo sapien
tcgtacacacaggctcactgcttcactttgaaa

SEQ ID NO: 562698 - DNA, 33 bp, Homo sapien
tcgtacacacaggctccctgcttcactttgaaa

SEQ ID NO: 562699 - DNA, 33 bp, Homo sapien
gaagtcttccctcagccgacagaacttgaaatg

SEQ ID NO: 562700 - DNA, 33 bp, Homo sapien
gaagtcttccctcagctgacagaacttgaaatg

SEQ ID NO: 562701 - DNA, 33 bp, Homo sapien
aggaaatgttgcccacagattactgatcataga

SEQ ID NO: 562702 - DNA, 33 bp, Homo sapien
aggaaatgttgcccactgattactgatcataga

SEQ ID NO: 562703 - DNA, 33 bp, Homo sapien
cagggctggaaaactacgaaatatctgatcgtt

SEQ ID NO: 562704 - DNA, 33 bp, Homo sapien
cagggctggaaaactatgaaatatctgatcgtt

SEQ ID NO: 562705 - DNA, 33 bp, Homo sapien
catatgataaaggacaacgattgttatgatcac

SEQ ID NO: 562706 - DNA, 33 bp, Homo sapien
catatgataaaggacaccgattgttatgatcac

SEQ ID NO: 562707 - DNA, 33 bp, Homo sapien
aaggcaggagaatcaaccacttgaaaccagaag

SEQ ID NO: 562708 - DNA, 33 bp, Homo sapien
aaggcaggagaatcaatcacttgaaaccagaag

SEQ ID NO: 562709 - DNA, 33 bp, Homo sapien
acttgtggcctcgttaagtcatattatctcaat

SEQ ID NO: 562710 - DNA, 33 bp, Homo sapien
acttgtggcctcgttatgtcatattatctcaat

SEQ ID NO: 562711 - DNA, 33 bp, Homo sapien
aaatgagtttatgtcacgctctgctctataatt

SEQ ID NO: 562712 - DNA, 33 bp, Homo sapien
aaatgagtttatgtcatgctctgctctataatt

SEQ ID NO: 562713 - DNA, 33 bp, Homo sapien
tccagtcccttagaaacgtcaagaattctcaga

SEQ ID NO: 562714 - DNA, 33 bp, Homo sapien
tccagtcccttagaaatgtcaagaattctcaga

SEQ ID NO: 562715 - DNA, 33 bp, Homo sapien
aagacaataaaatgctcaatggtagagttctga

SEQ ID NO: 562716 - DNA, 33 bp, Homo sapien
aagacaataaaatgcttaatggtagagttctga

SEQ ID NO: 562717 - DNA, 33 bp, Homo sapien
tccttgatcatcgaacacttctgtgtcagctaa

SEQ ID NO: 562718 - DNA, 33 bp, Homo sapien
tccttgatcatcgaacgcttctgtgtcagctaa

SEQ ID NO: 562719 - DNA, 33 bp, Homo sapien
gtaaagcataaaaagaagttcctggctaggcac

SEQ ID NO: 562720 - DNA, 33 bp, Homo sapien
gtaaagcataaaaagatgttcctggctaggcac

SEQ ID NO: 562721 - DNA, 33 bp, Homo sapien
ccaaattgcagtgttacagaaatgaagagacca

SEQ ID NO: 562722 - DNA, 33 bp, Homo sapien
ccaaattgcagtgttatagaaatgaagagacca

SEQ ID NO: 562723 - DNA, 33 bp, Homo sapien
tttggggttcctggtacggcagaatttaggttc

SEQ ID NO: 562724 - DNA, 33 bp, Homo sapien
tttggggttcctggtatggcagaatttaggttc

SEQ ID NO: 562725 - DNA, 33 bp, Homo sapien
gggatttatgcaagaccgggtgcaagagctggg

SEQ ID NO: 562726 - DNA, 33 bp, Homo sapien
gggatttatgcaagactgggtgcaagagctggg

SEQ ID NO: 562727 - DNA, 33 bp, Homo sapien
ggatggggcccgagtgcagaagtgactcctgag

SEQ ID NO: 562728 - DNA, 33 bp, Homo sapien
ggatggggcccgagtggagaagtgactcctgag

SEQ ID NO: 562729 - DNA, 33 bp, Homo sapien
aattggatactaaacacggcctgcctaacttct

SEQ ID NO: 562730 - DNA, 33 bp, Homo sapien
aattggatactaaacatggcctgcctaacttct

SEQ ID NO: 562731 - DNA, 33 bp, Homo sapien
ctctgcctaaaatcacgagggaaggtggtgaaa

SEQ ID NO: 562732 - DNA, 33 bp, Homo sapien
ctctgcctaaaatcactagggaaggtggtgaaa

SEQ ID NO: 562733 - DNA, 33 bp, Homo sapien
gggaggcggcgaggccaactgctgggtgtggaa

SEQ ID NO: 562734 - DNA, 33 bp, Homo sapien
gggaggcggcgaggccgactgctgggtgtggaa

SEQ ID NO: 562735 - DNA, 33 bp, Homo sapien
gaaacggtgcacaaaacgagtgaatttaaactt

SEQ ID NO: 562736 - DNA, 33 bp, Homo sapien
gaaacggtgcacaaaatgagtgaatttaaactt

SEQ ID NO: 562737 - DNA, 33 bp, Homo sapien
tacccaccacatttagcatctgttacagccaac

SEQ ID NO: 562738 - DNA, 33 bp, Homo sapien
tacccaccacatttagtatctgttacagccaac

SEQ ID NO: 562739 - DNA, 33 bp, Homo sapien
gtactgtgtgtaggtccagaggaaggcagggag

SEQ ID NO: 562740 - DNA, 33 bp, Homo sapien
gtactgtgtgtaggtctagaggaaggcagggag

SEQ ID NO: 562741 - DNA, 33 bp, Homo sapien
aatggcagaaccatgacgaattaaatagcatat

SEQ ID NO: 562742 - DNA, 33 bp, Homo sapien
aatggcagaaccatgatgaattaaatagcatat

SEQ ID NO: 562743 - DNA, 33 bp, Homo sapien
tggctaaacccaaacacaggtaggtcatctcat

SEQ ID NO: 562744 - DNA, 33 bp, Homo sapien
tggctaaacccaaacataggtaggtcatctcat

SEQ ID NO: 562745 - DNA, 33 bp, Homo sapien
ggtgtctagttagataataaggcagttgccatt

SEQ ID NO: 562746 - DNA, 33 bp, Homo sapien
ggtgtctagttagatactaaggcagttgccatt

SEQ ID NO: 562747 - DNA, 33 bp, Homo sapien
ataatgtaagcctgtacgcaccacctcaaagct

SEQ ID NO: 562748 - DNA, 33 bp, Homo sapien
ataatgtaagcctgtatgcaccacctcaaagct

SEQ ID NO: 562749 - DNA, 33 bp, Homo sapien
ctacctccggaataaccgaagtgtgctattcaa

SEQ ID NO: 562750 - DNA, 33 bp, Homo sapien
ctacctccggaataactgaagtgtgctattcaa

SEQ ID NO: 562751 - DNA, 33 bp, Homo sapien
ttgaggctatgtagccagaaaatgccctgcagt

SEQ ID NO: 562752 - DNA, 33 bp, Homo sapien
ttgaggctatgtagcctgaaaatgccctgcagt

SEQ ID NO: 562753 - DNA, 33 bp, Homo sapien
ttggaaagttagatcacgcagagaaacttaatt

SEQ ID NO: 562754 - DNA, 33 bp, Homo sapien
ttggaaagttagatcatgcagagaaacttaatt

SEQ ID NO: 562755 - DNA, 33 bp, Homo sapien
tcttgtaggtctttcacgtgttaataattccaa

SEQ ID NO: 562756 - DNA, 33 bp, Homo sapien
tcttgtaggtctttcatgtgttaataattccaa

SEQ ID NO: 562757 - DNA, 33 bp, Homo sapien
aaaatgtgtatgaggaaggggcttactatgcaa

SEQ ID NO: 562758 - DNA, 33 bp, Homo sapien
aaaatgtgtatgaggagggggcttactatgcaa

SEQ ID NO: 562759 - DNA, 33 bp, Homo sapien
cgtccccaggtttctccgaaagaactgtagtgt

SEQ ID NO: 562760 - DNA, 33 bp, Homo sapien
cgtccccaggtttctctgaaagaactgtagtgt

SEQ ID NO: 562761 - DNA, 33 bp, Homo sapien
tgggagacggagacagccagcttgcttgagttc

SEQ ID NO: 562762 - DNA, 33 bp, Homo sapien
tgggagacggagacaggcagcttgcttgagttc

SEQ ID NO: 562763 - DNA, 33 bp, Homo sapien
ctctttgccgaagtgaaatactgcatatgaaac

SEQ ID NO: 562764 - DNA, 33 bp, Homo sapien
ctctttgccgaagtgatatactgcatatgaaac

SEQ ID NO: 562765 - DNA, 33 bp, Homo sapien
tcctgttttattgtcacgctaatggactgttcg

SEQ ID NO: 562766 - DNA, 33 bp, Homo sapien
tcctgttttattgtcatgctaatggactgttcg

SEQ ID NO: 562767 - DNA, 33 bp, Homo sapien
ttgccttttaagaagagcggggccaagtgcagt

SEQ ID NO: 562768 - DNA, 33 bp, Homo sapien
ttgccttttaagaagatcggggccaagtgcagt

SEQ ID NO: 562769 - DNA, 33 bp, Homo sapien
tcacaataatatgaaaacattaaggtatgtgag

SEQ ID NO: 562770 - DNA, 33 bp, Homo sapien
tcacaataatatgaaatcattaaggtatgtgag

SEQ ID NO: 562771 - DNA, 33 bp, Homo sapien
caaaatttccagtatcaagggactgtacttttc

SEQ ID NO: 562772 - DNA, 33 bp, Homo sapien
caaaatttccagtatcgagggactgtacttttc

SEQ ID NO: 562773 - DNA, 33 bp, Homo sapien
tatagtatttataggacattctttcggatttat

SEQ ID NO: 562774 - DNA, 33 bp, Homo sapien
tatagtatttataggatattctttcggatttat

SEQ ID NO: 562775 - DNA, 33 bp, Homo sapien
ggaagacagccaataaaagctcaataataatga

SEQ ID NO: 562776 - DNA, 33 bp, Homo sapien
ggaagacagccaataagagctcaataataatga

SEQ ID NO: 562777 - DNA, 33 bp, Homo sapien
ttcaacgcccagctgaaagactaccttttctaa

SEQ ID NO: 562778 - DNA, 33 bp, Homo sapien
ttcaacgcccagctgagagactaccttttctaa

SEQ ID NO: 562779 - DNA, 33 bp, Homo sapien
cgtgttcctcctgagacacaaaaaggagctcat

SEQ ID NO: 562780 - DNA, 33 bp, Homo sapien
cgtgttcctcctgagagacaaaaaggagctcat

SEQ ID NO: 562781 - DNA, 33 bp, Homo sapien
aacagtaataaacgtaacattctctccagacgc

SEQ ID NO: 562782 - DNA, 33 bp, Homo sapien
aacagtaataaacgtatcattctctccagacgc

SEQ ID NO: 562783 - DNA, 33 bp, Homo sapien
cttgcccacggccacacgacttgtagtggccaa

SEQ ID NO: 562784 - DNA, 33 bp, Homo sapien
cttgcccacggccacatgacttgtagtggccaa

SEQ ID NO: 562785 - DNA, 33 bp, Homo sapien
tggaggggaaaagtatgaatttatgagacaatt

SEQ ID NO: 562786 - DNA, 33 bp, Homo sapien
tggaggggaaaagtattaatttatgagacaatt

SEQ ID NO: 562787 - DNA, 33 bp, Homo sapien
caaaggcatagtcatacgtatctgccacccagc

SEQ ID NO: 562788 - DNA, 33 bp, Homo sapien
caaaggcatagtcatatgtatctgccacccagc

SEQ ID NO: 562789 - DNA, 33 bp, Homo sapien
gggttttccgtagacaatgatgctgactacaaa

SEQ ID NO: 562790 - DNA, 33 bp, Homo sapien
gggttttccgtagacagtgatgctgactacaaa

SEQ ID NO: 562791 - DNA, 33 bp, Homo sapien
agccaagatatggaaacgactgaagtgttcatc

SEQ ID NO: 562792 - DNA, 33 bp, Homo sapien
agccaagatatggaaatgactgaagtgttcatc

SEQ ID NO: 562793 - DNA, 33 bp, Homo sapien
cagcttgaagtttacccgaggaagatatctggt

SEQ ID NO: 562794 - DNA, 33 bp, Homo sapien
cagcttgaagtttacctgaggaagatatctggt

SEQ ID NO: 562795 - DNA, 33 bp, Homo sapien
gaaagttgaagaaaggacataatgaagacaaga

SEQ ID NO: 562796 - DNA, 33 bp, Homo sapien
gaaagttgaagaaaggtcataatgaagacaaga

SEQ ID NO: 562797 - DNA, 33 bp, Homo sapien
tagaacttcacgcaccaaatctgatccagctgg

SEQ ID NO: 562798 - DNA, 33 bp, Homo sapien
tagaacttcacgcaccgaatctgatccagctgg

SEQ ID NO: 562799 - DNA, 33 bp, Homo sapien
gagcaattcttaatacaaagaaaaggttgtact

SEQ ID NO: 562800 - DNA, 33 bp, Homo sapien
gagcaattcttaatacgaagaaaaggttgtact

SEQ ID NO: 562801 - DNA, 33 bp, Homo sapien
tctctgccttcttcaccatttaggaagtattct

SEQ ID NO: 562802 - DNA, 33 bp, Homo sapien
tctctgccttcttcactatttaggaagtattct

SEQ ID NO: 562803 - DNA, 33 bp, Homo sapien
taatggactagagttgcagacatcagcaatatc

SEQ ID NO: 562804 - DNA, 33 bp, Homo sapien
taatggactagagttggagacatcagcaatatc

SEQ ID NO: 562805 - DNA, 33 bp, Homo sapien
aaatatgaactgagagaacagaatagtcactgc

SEQ ID NO: 562806 - DNA, 33 bp, Homo sapien
aaatatgaactgagaggacagaatagtcactgc

SEQ ID NO: 562807 - DNA, 33 bp, Homo sapien
agggctgcatagaaaacaggtgatcacaacaac

SEQ ID NO: 562808 - DNA, 33 bp, Homo sapien
agggctgcatagaaaataggtgatcacaacaac

SEQ ID NO: 562809 - DNA, 33 bp, Homo sapien
caatccccggaaatccgagaagacagtctttca

SEQ ID NO: 562810 - DNA, 33 bp, Homo sapien
caatccccggaaatcctagaagacagtctttca

SEQ ID NO: 562811 - DNA, 33 bp, Homo sapien
gctagaagttggtagcaccagggtttgaagcag

SEQ ID NO: 562812 - DNA, 33 bp, Homo sapien
gctagaagttggtagcgccagggtttgaagcag

SEQ ID NO: 562813 - DNA, 33 bp, Homo sapien
tggaattaaaagagaaaaggtctcgaactcagg

SEQ ID NO: 562814 - DNA, 33 bp, Homo sapien
tggaattaaaagagaagaggtctcgaactcagg

SEQ ID NO: 562815 - DNA, 33 bp, Homo sapien; identical to SEQ ID NO: 562813

SEQ ID NO: 562816 - DNA, 33 bp, Homo sapien; identical to SEQ ID NO: 562814

SEQ ID NO: 562817 - DNA, 33 bp, Homo sapien
gtgttagaaataccaaaattgttagaaatagat

SEQ ID NO: 562818 - DNA, 33 bp, Homo sapien
gtgttagaaataccaagattgttagaaatagat

SEQ ID NO: 562819 - DNA, 33 bp, Homo sapien
ttcagagtgcagaagacgaaaagataaaggagg

SEQ ID NO: 562820 - DNA, 33 bp, Homo sapien
ttcagagtgcagaagaggaaaagataaaggagg

SEQ ID NO: 562821 - DNA, 33 bp, Homo sapien
cttccatgtgtatccacaggcatttttaggaca

SEQ ID NO: 562822 - DNA, 33 bp, Homo sapien
cttccatgtgtatccataggcatttttaggaca

SEQ ID NO: 562823 - DNA, 33 bp, Homo sapien
cacagttatttatgaacgatgtcgtgattctcc

SEQ ID NO: 562824 - DNA, 33 bp, Homo sapien
cacagttatttatgaatgatgtcgtgattctcc

SEQ ID NO: 562825 - DNA, 33 bp, Homo sapien
gcgatagactgtcaatcaggttgtttgtgatcc

SEQ ID NO: 562826 - DNA, 33 bp, Homo sapien
gcgatagactgtcaattaggttgtttgtgatcc

SEQ ID NO: 562827 - DNA, 33 bp, Homo sapien
acaattcctaatcacaagtttttaacaattctc

SEQ ID NO: 562828 - DNA, 33 bp, Homo sapien
acaattcctaatcacacgtttttaacaattctc

SEQ ID NO: 562829 - DNA, 33 bp, Homo sapien
aagtcaagtttcttaacctgaggtggttgtatg

SEQ ID NO: 562830 - DNA, 33 bp, Homo sapien
aagtcaagtttcttaatctgaggtggttgtatg

SEQ ID NO: 562831 - DNA, 33 bp, Homo sapien
ttttcagaccaatggaacttatctcttaagctc

SEQ ID NO: 562832 - DNA, 33 bp, Homo sapien
ttttcagaccaatggatcttatctcttaagctc

SEQ ID NO: 562833 - DNA, 33 bp, Homo sapien
atcatgcatgggtatcaaagtttgtcaaatgct

SEQ ID NO: 562834 - DNA, 33 bp, Homo sapien
atcatgcatgggtatcgaagtttgtcaaatgct

SEQ ID NO: 562835 - DNA, 33 bp, Homo sapien
caaatctaacaaaatgaaaggtatacagactgt

SEQ ID NO: 562836 - DNA, 33 bp, Homo sapien
caaatctaacaaaatggaaggtatacagactgt

SEQ ID NO: 562837 - DNA, 33 bp, Homo sapien
tgcaaaaaacccagaagagctagtttgaagaag

SEQ ID NO: 562838 - DNA, 33 bp, Homo sapien
tgcaaaaaacccagaatagctagtttgaagaag

SEQ ID NO: 562839 - DNA, 33 bp, Homo sapien
aggcaacagaaaggccaaggcttgtggaggtct

SEQ ID NO: 562840 - DNA, 33 bp, Homo sapien
aggcaacagaaaggccgaggcttgtggaggtct

SEQ ID NO: 562841 - DNA, 33 bp, Homo sapien
aatttgctgtgggagacatgaacagaagtgatc

SEQ ID NO: 562842 - DNA, 33 bp, Homo sapien
aatttgctgtgggagagatgaacagaagtgatc

SEQ ID NO: 562843 - DNA, 33 bp, Homo sapien
ctttggagaccagcaaaatttacattcgatgtg

SEQ ID NO: 562844 - DNA, 33 bp, Homo sapien
ctttggagaccagcaagatttacattcgatgtg

SEQ ID NO: 562845 - DNA, 33 bp, Homo sapien
gtattggacacatgaacgagaggttactagtat

SEQ ID NO: 562846 - DNA, 33 bp, Homo sapien
gtattggacacatgaatgagaggttactagtat

SEQ ID NO: 562847 - DNA, 33 bp, Homo sapien
actgggtggccgaaaacgatggaaatttgtttt

SEQ ID NO: 562848 - DNA, 33 bp, Homo sapien
actgggtggccgaaaatgatggaaatttgtttt

SEQ ID NO: 562849 - DNA, 33 bp, Homo sapien
gaattagcacacaaccacttcaccacagcacac

SEQ ID NO: 562850 - DNA, 33 bp, Homo sapien
gaattagcacacaaccgcttcaccacagcacac

SEQ ID NO: 562851 - DNA, 33 bp, Homo sapien
cagcccacacactggccagaaccatctatttaa

SEQ ID NO: 562852 - DNA, 33 bp, Homo sapien
cagcccacacactggctagaaccatctatttaa

SEQ ID NO: 562853 - DNA, 33 bp, Homo sapien
gcaaaaccatgtctcacctctactaaaaatcaa

SEQ ID NO: 562854 - DNA, 33 bp, Homo sapien
gcaaaaccatgtctcatctctactaaaaatcaa

SEQ ID NO: 562855 - DNA, 33 bp, Homo sapien
cctcacgcagttgtcacgtggtccctttaaaga

SEQ ID NO: 562856 - DNA, 33 bp, Homo sapien
cctcacgcagttgtcatgtggtccctttaaaga

SEQ ID NO: 562857 - DNA, 33 bp, Homo sapien
agtaaatgtgggccacagaaaccacgttgtttg

SEQ ID NO: 562858 - DNA, 33 bp, Homo sapien
agtaaatgtgggccacggaaaccacgttgtttg

SEQ ID NO: 562859 - DNA, 33 bp, Homo sapien
aagtgaatttgcttgagtagactagacatcata

SEQ ID NO: 562860 - DNA, 33 bp, Homo sapien
aagtgaatttgcttgattagactagacatcata

SEQ ID NO: 562861 - DNA, 33 bp, Homo sapien
ttttcttcttttgtacacatgacattctgtgct

SEQ ID NO: 562862 - DNA, 33 bp, Homo sapien
ttttcttcttttgtactcatgacattctgtgct

SEQ ID NO: 562863 - DNA, 33 bp, Homo sapien
tccttcaggtccagcacaagttgtcgctgcttc

SEQ ID NO: 562864 - DNA, 33 bp, Homo sapien
tccttcaggtccagcataagttgtcgctgcttc

SEQ ID NO: 562865 - DNA, 33 bp, Homo sapien
agagggatgacagaaaatataacaaaagatata

SEQ ID NO: 562866 - DNA, 33 bp, Homo sapien
agagggatgacagaaagtataacaaaagatata

SEQ ID NO: 562867 - DNA, 33 bp, Homo sapien
ataactaaaatttgcaacgactccttaaaccaa

SEQ ID NO: 562868 - DNA, 33 bp, Homo sapien
ataactaaaatttgcagcgactccttaaaccaa

SEQ ID NO: 562869 - DNA, 33 bp, Homo sapien
accttccatatcaaaccaattatcaaggcaaat

SEQ ID NO: 562870 - DNA, 33 bp, Homo sapien
accttccatatcaaacgaattatcaaggcaaat

SEQ ID NO: 562871 - DNA, 33 bp, Homo sapien
tggtatgaacatgagcacacaagtatctgttcg

SEQ ID NO: 562872 - DNA, 33 bp, Homo sapien
tggtatgaacatgagcgcacaagtatctgttcg

SEQ ID NO: 562873 - DNA, 33 bp, Homo sapien
gtgtggccccccaggaccttgactgtatgggtt

SEQ ID NO: 562874 - DNA, 33 bp, Homo sapien
gtgtggccccccaggatcttgactgtatgggtt

SEQ ID NO: 562875 - DNA, 33 bp, Homo sapien
tctcttagttccatgacctattgtttcctttaa

SEQ ID NO: 562876 - DNA, 33 bp, Homo sapien
tctcttagttccatgagctattgtttcctttaa

SEQ ID NO: 562877 - DNA, 33 bp, Homo sapien
agatccaatggacttacatatccaactgacctt

SEQ ID NO: 562878 - DNA, 33 bp, Homo sapien
agatccaatggacttatatatccaactgacctt

SEQ ID NO: 562879 - DNA, 33 bp, Homo sapien
tgtaaattataagatactagttggacacatata

SEQ ID NO: 562880 - DNA, 33 bp, Homo sapien
tgtaaattataagatattagttggacacatata

SEQ ID NO: 562881 - DNA, 33 bp, Homo sapien
atgcttaggaccataagtgtttcagattttggg

SEQ ID NO: 562882 - DNA, 33 bp, Homo sapien
atgcttaggaccataattgtttcagattttggg

SEQ ID NO: 562883 - DNA, 33 bp, Homo sapien
tttgaggatgctgaataaactgaattttatgtg

SEQ ID NO: 562884 - DNA, 33 bp, Homo sapien
tttgaggatgctgaatcaactgaattttatgtg

SEQ ID NO: 562885 - DNA, 33 bp, Homo sapien
caggggaaaagccttacgtgtgccgggaatgtg

SEQ ID NO: 562886 - DNA, 33 bp, Homo sapien
caggggaaaagccttatgtgtgccgggaatgtg

SEQ ID NO: 562887 - DNA, 33 bp, Homo sapien
aagagcaagtatgaacaaaaaagtatctgataa

SEQ ID NO: 562888 - DNA, 33 bp, Homo sapien
aagagcaagtatgaacgaaaaagtatctgataa

SEQ ID NO: 562889 - DNA, 33 bp, Homo sapien
acaacctggccaagcactgaaggagttcctcat

SEQ ID NO: 562890 - DNA, 33 bp, Homo sapien
acaacctggccaagcattgaaggagttcctcat

SEQ ID NO: 562891 - DNA, 33 bp, Homo sapien
tcattaccctgttgtacattgaaactccaggaa

SEQ ID NO: 562892 - DNA, 33 bp, Homo sapien
tcattaccctgttgtagattgaaactccaggaa

SEQ ID NO: 562893 - DNA, 33 bp, Homo sapien
tactgcatttcaaagacagcgaaaatgaaagac

SEQ ID NO: 562894 - DNA, 33 bp, Homo sapien
tactgcatttcaaagagagcgaaaatgaaagac

SEQ ID NO: 562895 - DNA, 33 bp, Homo sapien
ctatccttggagtttacataaagactgagtatt

SEQ ID NO: 562896 - DNA, 33 bp, Homo sapien
ctatccttggagtttatataaagactgagtatt

SEQ ID NO: 562897 - DNA, 33 bp, Homo sapien; identical to SEQ ID NO: 562895

SEQ ID NO: 562898 - DNA, 33 bp, Homo sapien; identical to SEQ ID NO: 562896

SEQ ID NO: 562899 - DNA, 33 bp, Homo sapien
gaaaaataatgttggaagtgctatcacctaagc

SEQ ID NO: 562900 - DNA, 33 bp, Homo sapien
gaaaaataatgttggatgtgctatcacctaagc

SEQ ID NO: 562901 - DNA, 33 bp, Homo sapien
ctgaaagaagagcacacgataactttgcattta

SEQ ID NO: 562902 - DNA, 33 bp, Homo sapien
ctgaaagaagagcacatgataactttgcattta

SEQ ID NO: 562903 - DNA, 33 bp, Homo sapien
ttaaattccttaatatcaggaccagcattaaat

SEQ ID NO: 562904 - DNA, 33 bp, Homo sapien
ttaaattccttaatatgaggaccagcattaaat

SEQ ID NO: 562905 - DNA, 33 bp, Homo sapien
tagtccactacctgaaacggaaagttattatgt

SEQ ID NO: 562906 - DNA, 33 bp, Homo sapien
tagtccactacctgaagcggaaagttattatgt

SEQ ID NO: 562907 - DNA, 33 bp, Homo sapien
tgagccatttatcaccacccattaaatcagggg

SEQ ID NO: 562908 - DNA, 33 bp, Homo sapien
tgagccatttatcaccgcccattaaatcagggg

SEQ ID NO: 562909 - DNA, 33 bp, Homo sapien
agaggtttacagacacaactttttacatctctt

SEQ ID NO: 562910 - DNA, 33 bp, Homo sapien
agaggtttacagacacgactttttacatctctt

SEQ ID NO: 562911 - DNA, 33 bp, Homo sapien
aagagagggttgttaacggcatttcacagctgt

SEQ ID NO: 562912 - DNA, 33 bp, Homo sapien
aagagagggttgttaatggcatttcacagctgt

SEQ ID NO: 562913 - DNA, 33 bp, Homo sapien
cctggggcaaatttcacgggaaagggcgcatct

SEQ ID NO: 562914 - DNA, 33 bp, Homo sapien
cctggggcaaatttcatgggaaagggcgcatct

SEQ ID NO: 562915 - DNA, 33 bp, Homo sapien
caaaagggaatggccaagagaaattcacatcct

SEQ ID NO: 562916 - DNA, 33 bp, Homo sapien
caaaagggaatggccaggagaaattcacatcct

SEQ ID NO: 562917 - DNA, 33 bp, Homo sapien
atgggcgtctacataacgaggccagacacagaa

SEQ ID NO: 562918 - DNA, 33 bp, Homo sapien
atgggcgtctacataatgaggccagacacagaa

SEQ ID NO: 562919 - DNA, 33 bp, Homo sapien
cagcccccagcattcacagacacccgagaacag

SEQ ID NO: 562920 - DNA, 33 bp, Homo sapien
cagcccccagcattcatagacacccgagaacag

SEQ ID NO: 562921 - DNA, 33 bp, Homo sapien
gatgcacaaaatgcccactatctcattcatctt

SEQ ID NO: 562922 - DNA, 33 bp, Homo sapien
gatgcacaaaatgcccgctatctcattcatctt

SEQ ID NO: 562923 - DNA, 33 bp, Homo sapien
tccagtttctctgcatcatctccaacacttgat

SEQ ID NO: 562924 - DNA, 33 bp, Homo sapien
tccagtttctctgcattatctccaacacttgat

SEQ ID NO: 562925 - DNA, 33 bp, Homo sapien
ttctcattcttctttccagttgagccacttccc

SEQ ID NO: 562926 - DNA, 33 bp, Homo sapien
ttctcattcttctttctagttgagccacttccc

SEQ ID NO: 562927 - DNA, 33 bp, Homo sapien
acagcaacccaaaagaagcaagttggctagtaa

SEQ ID NO: 562928 - DNA, 33 bp, Homo sapien
acagcaacccaaaagacgcaagttggctagtaa

SEQ ID NO: 562929 - DNA, 33 bp, Homo sapien
taaaatagatcatcaccgtatttaaagtgcata

SEQ ID NO: 562930 - DNA, 33 bp, Homo sapien
taaaatagatcatcactgtatttaaagtgcata

SEQ ID NO: 562931 - DNA, 33 bp, Homo sapien
ctaggcactgagccaacgcaccacagttgccaa

SEQ ID NO: 562932 - DNA, 33 bp, Homo sapien
ctaggcactgagccaatgcaccacagttgccaa

SEQ ID NO: 562933 - DNA, 33 bp, Homo sapien
aaaccctggcctgacaatcttcattccagtgcc

SEQ ID NO: 562934 - DNA, 33 bp, Homo sapien
aaaccctggcctgacagtcttcattccagtgcc

SEQ ID NO: 562935 - DNA, 33 bp, Homo sapien
ttcttaacattgcttaagtatcgtcctcctttc

SEQ ID NO: 562936 - DNA, 33 bp, Homo sapien
ttcttaacattgcttaggtatcgtcctcctttc

SEQ ID NO: 562937 - DNA, 33 bp, Homo sapien
aaaatggactgtgatacaccccatcttccatga

SEQ ID NO: 562938 - DNA, 33 bp, Homo sapien
aaaatggactgtgatataccccatcttccatga

SEQ ID NO: 562939 - DNA, 33 bp, Homo sapien
tgcacttgactctatgacagtgacaatgactac

SEQ ID NO: 562940 - DNA, 33 bp, Homo sapien
tgcacttgactctatggcagtgacaatgactac

SEQ ID NO: 562941 - DNA, 33 bp, Homo sapien
cagcaaggaaaaagccacccactgggatccaat

SEQ ID NO: 562942 - DNA, 33 bp, Homo sapien
cagcaaggaaaaagccgcccactgggatccaat

SEQ ID NO: 562943 - DNA, 33 bp, Homo sapien
tagtgtgggcaacgagacaatccggtgcacagt

SEQ ID NO: 562944 - DNA, 33 bp, Homo sapien
tagtgtgggcaacgaggcaatccggtgcacagt

SEQ ID NO: 562945 - DNA, 33 bp, Homo sapien
ttactactataacacaagaaagatgctcttaca

SEQ ID NO: 562946 - DNA, 33 bp, Homo sapien
ttactactataacacaggaaagatgctcttaca

SEQ ID NO: 562947 - DNA, 33 bp, Homo sapien
gactctcaaccataccagaccgttagaatcatt

SEQ ID NO: 562948 - DNA, 33 bp, Homo sapien
gactctcaaccatacctgaccgttagaatcatt

SEQ ID NO: 562949 - DNA, 33 bp, Homo sapien
aattctcagtaagaacaaaacattcaactcttg

SEQ ID NO: 562950 - DNA, 33 bp, Homo sapien
aattctcagtaagaacgaaacattcaactcttg

SEQ ID NO: 562951 - DNA, 33 bp, Homo sapien
ctgcttctctatgtcaaagtggcctagattccc

SEQ ID NO: 562952 - DNA, 33 bp, Homo sapien
ctgcttctctatgtcagagtggcctagattccc

SEQ ID NO: 562953 - DNA, 33 bp, Homo sapien
taatgacgtccttgctaacagcttaagatcatg

SEQ ID NO: 562954 - DNA, 33 bp, Homo sapien
taatgacgtccttgcttacagcttaagatcatg

SEQ ID NO: 562955 - DNA, 33 bp, Homo sapien
ccaacctcctctctagcatcaggttcatggtca

SEQ ID NO: 562956 - DNA, 33 bp, Homo sapien
ccaacctcctctctagtatcaggttcatggtca

SEQ ID NO: 562957 - DNA, 33 bp, Homo sapien
actgggtgtgagcatcaataagaaagattcaag

SEQ ID NO: 562958 - DNA, 33 bp, Homo sapien
actgggtgtgagcatcgataagaaagattcaag

SEQ ID NO: 562959 - DNA, 33 bp, Homo sapien
tttggggtatgattgaagccataacccaggtag

SEQ ID NO: 562960 - DNA, 33 bp, Homo sapien
tttggggtatgattgaggccataacccaggtag

SEQ ID NO: 562961 - DNA, 33 bp, Homo sapien
gaataaagtttgcttcaatacacatttcataag

SEQ ID NO: 562962 - DNA, 33 bp, Homo sapien
gaataaagtttgcttcgatacacatttcataag

SEQ ID NO: 562963 - DNA, 33 bp, Homo sapien
actaaacagagtcttaccacattgtccaaaggt

SEQ ID NO: 562964 - DNA, 33 bp, Homo sapien
actaaacagagtcttatcacattgtccaaaggt

SEQ ID NO: 562965 - DNA, 33 bp, Homo sapien
cttaaactgttccaaaatataggtgtttttgtt

SEQ ID NO: 562966 - DNA, 33 bp, Homo sapien
cttaaactgttccaaattataggtgtttttgtt

SEQ ID NO: 562967 - DNA, 33 bp, Homo sapien
gtgccacattaagaaacagagcaagcacagccc

SEQ ID NO: 562968 - DNA, 33 bp, Homo sapien
gtgccacattaagaaagagagcaagcacagccc

SEQ ID NO: 562969 - DNA, 33 bp, Homo sapien
cctacactcttaaacaatgttaatgtcatttaa

SEQ ID NO: 562970 - DNA, 33 bp, Homo sapien
cctacactcttaaacagtgttaatgtcatttaa

SEQ ID NO: 562971 - DNA, 33 bp, Homo sapien
aaccccattgcctagaagagagcctggcatatg

SEQ ID NO: 562972 - DNA, 33 bp, Homo sapien
aaccccattgcctagacgagagcctggcatatg

SEQ ID NO: 562973 - DNA, 33 bp, Homo sapien
gctgtaaagttttataactatgcctcaagtata

SEQ ID NO: 562974 - DNA, 33 bp, Homo sapien
gctgtaaagttttatacctatgcctcaagtata

SEQ ID NO: 562975 - DNA, 33 bp, Homo sapien
agcaacccagggagccaacttaccgcctggtta

SEQ ID NO: 562976 - DNA, 33 bp, Homo sapien
agcaacccagggagccgacttaccgcctggtta

SEQ ID NO: 562977 - DNA, 33 bp, Homo sapien
ggcgtctaatcccctccagcaaagccctgtgtg

SEQ ID NO: 562978 - DNA, 33 bp, Homo sapien
ggcgtctaatcccctctagcaaagccctgtgtg

SEQ ID NO: 562979 - DNA, 33 bp, Homo sapien
atgcctctacaaacaacagaagtggaaaagggg

SEQ ID NO: 562980 - DNA, 33 bp, Homo sapien
atgcctctacaaacaatagaagtggaaaagggg

SEQ ID NO: 562981 - DNA, 33 bp, Homo sapien
gaatccaatcagaggacgagtgcctgaactaag

SEQ ID NO: 562982 - DNA, 33 bp, Homo sapien
gaatccaatcagaggatgagtgcctgaactaag

SEQ ID NO: 562983 - DNA, 33 bp, Homo sapien
tgctagtacagaaagaatccaggttcaaataat

SEQ ID NO: 562984 - DNA, 33 bp, Homo sapien
tgctagtacagaaagattccaggttcaaataat

SEQ ID NO: 562985 - DNA, 33 bp, Homo sapien
tcagcgtgtgtaaaaacggttgtggtggcttta

SEQ ID NO: 562986 - DNA, 33 bp, Homo sapien
tcagcgtgtgtaaaaatggttgtggtggcttta

SEQ ID NO: 562987 - DNA, 33 bp, Homo sapien
ctgcgtatttgttacccggctatgaggtttcga

SEQ ID NO: 562988 - DNA, 33 bp, Homo sapien
ctgcgtatttgttacctggctatgaggtttcga

SEQ ID NO: 562989 - DNA, 33 bp, Homo sapien
ctaacaagctcgataaaatgcattgcccgacat

SEQ ID NO: 562990 - DNA, 33 bp, Homo sapien
ctaacaagctcgataagatgcattgcccgacat

SEQ ID NO: 562991 - DNA, 33 bp, Homo sapien
aaggacatgcctaacacgagttcagtctatgtg

SEQ ID NO: 562992 - DNA, 33 bp, Homo sapien
aaggacatgcctaacatgagttcagtctatgtg

SEQ ID NO: 562993 - DNA, 33 bp, Homo sapien
tgtgatctaagtcaaccgtctgtgttaatgtat

SEQ ID NO: 562994 - DNA, 33 bp, Homo sapien
tgtgatctaagtcaactgtctgtgttaatgtat

SEQ ID NO: 562995 - DNA, 33 bp, Homo sapien
cagcgaattaataaaactgtgcaaacccataag

SEQ ID NO: 562996 - DNA, 33 bp, Homo sapien
cagcgaattaataaaagtgtgcaaacccataag

SEQ ID NO: 562997 - DNA, 33 bp, Homo sapien
aaggccaactcagagaagctttcaggtagctct

SEQ ID NO: 562998 - DNA, 33 bp, Homo sapien
aaggccaactcagagacgctttcaggtagctct

SEQ ID NO: 562999 - DNA, 33 bp, Homo sapien
gaagatacgattggaagtattacttggagaatt

SEQ ID NO: 563000 - DNA, 33 bp, Homo sapien
gaagatacgattggaattattacttggagaatt

SEQ ID NO: 563001 - DNA, 33 bp, Homo sapien
attttctgacacacacagtcctttcacattcag

SEQ ID NO: 563002 - DNA, 33 bp, Homo sapien
attttctgacacacacggtcctttcacattcag

SEQ ID NO: 563003 - DNA, 33 bp, Homo sapien
aacaccacctctccgaatatagtcatcagtgag

SEQ ID NO: 563004 - DNA, 33 bp, Homo sapien
aacaccacctctccgagtatagtcatcagtgag

SEQ ID NO: 563005 - DNA, 33 bp, Homo sapien
ccctgagcaagatactaaacctttctgggcctc

SEQ ID NO: 563006 - DNA, 33 bp, Homo sapien
ccctgagcaagatactgaacctttctgggcctc

SEQ ID NO: 563007 - DNA, 33 bp, Homo sapien
acagcacatctgtgtacagcaattactaaatat

SEQ ID NO: 563008 - DNA, 33 bp, Homo sapien
acagcacatctgtgtatagcaattactaaatat

SEQ ID NO: 563009 - DNA, 33 bp, Homo sapien
gtgctacaaactgcaccgatataagatggcaaa

SEQ ID NO: 563010 - DNA, 33 bp, Homo sapien
gtgctacaaactgcactgatataagatggcaaa

SEQ ID NO: 563011 - DNA, 33 bp, Homo sapien
gggtgttgtgctgtagaatgagaggccataacc

SEQ ID NO: 563012 - DNA, 33 bp, Homo sapien
gggtgttgtgctgtaggatgagaggccataacc

SEQ ID NO: 563013 - DNA, 33 bp, Homo sapien
atgattcagatttaggaaacaatatttacaagg

SEQ ID NO: 563014 - DNA, 33 bp, Homo sapien
atgattcagatttaggtaacaatatttacaagg

SEQ ID NO: 563015 - DNA, 33 bp, Homo sapien
tccccatctactgtcgcacactgcttctcattc

SEQ ID NO: 563016 - DNA, 33 bp, Homo sapien
tccccatctactgtcgtacactgcttctcattc

SEQ ID NO: 563017 - DNA, 33 bp, Homo sapien
atctgtcaatcagttcccaggagaagggtcctc

SEQ ID NO: 563018 - DNA, 33 bp, Homo sapien
atctgtcaatcagttctcaggagaagggtcctc

SEQ ID NO: 563019 - DNA, 33 bp, Homo sapien
caatatagttgtgccaataaagacagaaaagac

SEQ ID NO: 563020 - DNA, 33 bp, Homo sapien
caatatagttgtgccagtaaagacagaaaagac

SEQ ID NO: 563021 - DNA, 33 bp, Homo sapien
ttggttaaagtcagtacgtattcgaaaatgaaa

SEQ ID NO: 563022 - DNA, 33 bp, Homo sapien
ttggttaaagtcagtatgtattcgaaaatgaaa

SEQ ID NO: 563023 - DNA, 33 bp, Homo sapien
attttagtagctgtcccctggatactcaaagaa

SEQ ID NO: 563024 - DNA, 33 bp, Homo sapien
attttagtagctgtcctctggatactcaaagaa

SEQ ID NO: 563025 - DNA, 33 bp, Homo sapien
attacaccactctaccacttctttgagtatcca

SEQ ID NO: 563026 - DNA, 33 bp, Homo sapien
attacaccactctaccgcttctttgagtatcca

SEQ ID NO: 563027 - DNA, 33 bp, Homo sapien
tgacatatttggctcacatttgaggcttgcact

SEQ ID NO: 563028 - DNA, 33 bp, Homo sapien
tgacatatttggctcatatttgaggcttgcact

SEQ ID NO: 563029 - DNA, 33 bp, Homo sapien
gagtgaaccctagtgcaaacaggagactgtggg

SEQ ID NO: 563030 - DNA, 33 bp, Homo sapien
gagtgaaccctagtgccaacaggagactgtggg

SEQ ID NO: 563031 - DNA, 33 bp, Homo sapien
acagatactgcagttcaacattgaaaaacacat

SEQ ID NO: 563032 - DNA, 33 bp, Homo sapien
acagatactgcagttcgacattgaaaaacacat

SEQ ID NO: 563033 - DNA, 33 bp, Homo sapien
ataaaacaacaggaaccaagagagccggcctgc

SEQ ID NO: 563034 - DNA, 33 bp, Homo sapien
ataaaacaacaggaacgaagagagccggcctgc

SEQ ID NO: 563035 - DNA, 33 bp, Homo sapien
ccaccttagcaactaaacctgttattcatccct

SEQ ID NO: 563036 - DNA, 33 bp, Homo sapien
ccaccttagcaactaaccctgttattcatccct

SEQ ID NO: 563037 - DNA, 33 bp, Homo sapien
caaatcaatgaaatcacgaaaagacagggttta

SEQ ID NO: 563038 - DNA, 33 bp, Homo sapien
caaatcaatgaaatcatgaaaagacagggttta

SEQ ID NO: 563039 - DNA, 33 bp, Homo sapien
atctgttgtagacaccaccctcagatgtagata

SEQ ID NO: 563040 - DNA, 33 bp, Homo sapien
atctgttgtagacaccgccctcagatgtagata

SEQ ID NO: 563041 - DNA, 33 bp, Homo sapien
ttttccagtccagatcaaagggtaaagcgccca

SEQ ID NO: 563042 - DNA, 33 bp, Homo sapien
ttttccagtccagatcgaagggtaaagcgccca

SEQ ID NO: 563043 - DNA, 33 bp, Homo sapien
cctttagtccctggaacagtcctcggtctgagg

SEQ ID NO: 563044 - DNA, 33 bp, Homo sapien
cctttagtccctggaagagtcctcggtctgagg

SEQ ID NO: 563045 - DNA, 33 bp, Homo sapien
tgcaccgtaaacatgcactcttgggaaggcagg

SEQ ID NO: 563046 - DNA, 33 bp, Homo sapien
tgcaccgtaaacatgcgctcttgggaaggcagg

SEQ ID NO: 563047 - DNA, 33 bp, Homo sapien
caaatccaggtcagacactgctttagaaaaatg

SEQ ID NO: 563048 - DNA, 33 bp, Homo sapien
caaatccaggtcagacgctgctttagaaaaatg

SEQ ID NO: 563049 - DNA, 33 bp, Homo sapien
gacagcgtgatagaaacgtgaagctgggcaacc

SEQ ID NO: 563050 - DNA, 33 bp, Homo sapien
gacagcgtgatagaaatgtgaagctgggcaacc

SEQ ID NO: 563051 - DNA, 33 bp, Homo sapien
ctagaggcagttgggtaaaaaagtatatggaaa

SEQ ID NO: 563052 - DNA, 33 bp, Homo sapien
ctagaggcagttgggttaaaaagtatatggaaa

SEQ ID NO: 563053 - DNA, 33 bp, Homo sapien
tatgtcctggcagtgagaagttggaaggagagc

SEQ ID NO: 563054 - DNA, 33 bp, Homo sapien
tatgtcctggcagtgataagttggaaggagagc

SEQ ID NO: 563055 - DNA, 33 bp, Homo sapien
gcaatcatgcactaggcaataataagcaggatg

SEQ ID NO: 563056 - DNA, 33 bp, Homo sapien
gcaatcatgcactaggtaataataagcaggatg

SEQ ID NO: 563057 - DNA, 33 bp, Homo sapien
atttaatgagggcttcaatggcactaaataaat

SEQ ID NO: 563058 - DNA, 33 bp, Homo sapien
atttaatgagggcttcgatggcactaaataaat

SEQ ID NO: 563059 - DNA, 33 bp, Homo sapien
ggaaaagccgatgcagcaacaacagctcaatat

SEQ ID NO: 563060 - DNA, 33 bp, Homo sapien
ggaaaagccgatgcaggaacaacagctcaatat

SEQ ID NO: 563061 - DNA, 33 bp, Homo sapien
ttatgatgtattattacctattcagttcatggt

SEQ ID NO: 563062 - DNA, 33 bp, Homo sapien
ttatgatgtattattatctattcagttcatggt

SEQ ID NO: 563063 - DNA, 33 bp, Homo sapien
gggcctccaaagtgtacccagaatctttccaca

SEQ ID NO: 563064 - DNA, 33 bp, Homo sapien
gggcctccaaagtgtatccagaatctttccaca

SEQ ID NO: 563065 - DNA, 33 bp, Homo sapien
tattgttaacgataaaattgcctcaaaactatg

SEQ ID NO: 563066 - DNA, 33 bp, Homo sapien
tattgttaacgataaagttgcctcaaaactatg

SEQ ID NO: 563067 - DNA, 33 bp, Homo sapien
cctcatcattagaacaccctagaagactctatg

SEQ ID NO: 563068 - DNA, 33 bp, Homo sapien
cctcatcattagaacatcctagaagactctatg

SEQ ID NO: 563069 - DNA, 33 bp, Homo sapien
cagacctggctcgcctaaagtttgatctttacc

SEQ ID NO: 563070 - DNA, 33 bp, Homo sapien
cagacctggctcgcctgaagtttgatctttacc

SEQ ID NO: 563071 - DNA, 33 bp, Homo sapien
ctgggttgctcttgaacgttctggtgactgtaa

SEQ ID NO: 563072 - DNA, 33 bp, Homo sapien
ctgggttgctcttgaatgttctggtgactgtaa

SEQ ID NO: 563073 - DNA, 33 bp, Homo sapien
ctgactccagacttgggcatgatgcttgtttca

SEQ ID NO: 563074 - DNA, 33 bp, Homo sapien
ctgactccagacttggtcatgatgcttgtttca

SEQ ID NO: 563075 - DNA, 33 bp, Homo sapien
ggttcaaacatacaaccgtcaattttccaattt

SEQ ID NO: 563076 - DNA, 33 bp, Homo sapien
ggttcaaacatacaacggtcaattttccaattt

SEQ ID NO: 563077 - DNA, 33 bp, Homo sapien
aacaagagaaacgcacagcaagtaggagctagg

SEQ ID NO: 563078 - DNA, 33 bp, Homo sapien
aacaagagaaacgcacggcaagtaggagctagg

SEQ ID NO: 563079 - DNA, 33 bp, Homo sapien
gagaaggcctgtgtccagcagggtctactgatt

SEQ ID NO: 563080 - DNA, 33 bp, Homo sapien
gagaaggcctgtgtccggcagggtctactgatt

SEQ ID NO: 563081 - DNA, 33 bp, Homo sapien
caccttcaaataacaccgtactgttaacgcctg

SEQ ID NO: 563082 - DNA, 33 bp, Homo sapien
caccttcaaataacactgtactgttaacgcctg

SEQ ID NO: 563083 - DNA, 33 bp, Homo sapien
ccagaccctactgtcacatgcgcagtgccctat

SEQ ID NO: 563084 - DNA, 33 bp, Homo sapien
ccagaccctactgtcatatgcgcagtgccctat

SEQ ID NO: 563085 - DNA, 33 bp, Homo sapien
ttgcttattagcttccaaaccagttttatagta

SEQ ID NO: 563086 - DNA, 33 bp, Homo sapien
ttgcttattagcttccgaaccagttttatagta

SEQ ID NO: 563087 - DNA, 33 bp, Homo sapien
ccaatctagaatcccacgttcatttaggtgtgt

SEQ ID NO: 563088 - DNA, 33 bp, Homo sapien
ccaatctagaatcccatgttcatttaggtgtgt

SEQ ID NO: 563089 - DNA, 33 bp, Homo sapien
tttggaatatttttcacaatggtcagtacatac

SEQ ID NO: 563090 - DNA, 33 bp, Homo sapien
tttggaatatttttcataatggtcagtacatac

SEQ ID NO: 563091 - DNA, 33 bp, Homo sapien
accacaagtgctaaaccgaaataaaattacaaa

SEQ ID NO: 563092 - DNA, 33 bp, Homo sapien
accacaagtgctaaactgaaataaaattacaaa

SEQ ID NO: 563093 - DNA, 33 bp, Homo sapien
tgccctccaacacaaaaaccacttgcatcccca

SEQ ID NO: 563094 - DNA, 33 bp, Homo sapien
tgccctccaacacaaataccacttgcatcccca

SEQ ID NO: 563095 - DNA, 33 bp, Homo sapien
gtaaagatttttcaacaccttccagaaagaaat

SEQ ID NO: 563096 - DNA, 33 bp, Homo sapien
gtaaagatttttcaacgccttccagaaagaaat

SEQ ID NO: 563097 - DNA, 33 bp, Homo sapien
tgtgctcctctgccaactgttctttctgtctag

SEQ ID NO: 563098 - DNA, 33 bp, Homo sapien
tgtgctcctctgccaattgttctttctgtctag

SEQ ID NO: 563099 - DNA, 33 bp, Homo sapien
ggtaacatcaatagtcaattaacacatattttg

SEQ ID NO: 563100 - DNA, 33 bp, Homo sapien
ggtaacatcaatagtcgattaacacatattttg

SEQ ID NO: 563101 - DNA, 33 bp, Homo sapien
agcagagtaaagttacaacattccaaggaaaag

SEQ ID NO: 563102 - DNA, 33 bp, Homo sapien
agcagagtaaagttacgacattccaaggaaaag

SEQ ID NO: 563103 - DNA, 33 bp, Homo sapien
gtgagtccttaaaatacggcatctgaggaatta

SEQ ID NO: 563104 - DNA, 33 bp, Homo sapien
gtgagtccttaaaatatggcatctgaggaatta

SEQ ID NO: 563105 - DNA, 33 bp, Homo sapien
cgacaaaaaacctcccaatatcatcagtgtttt

SEQ ID NO: 563106 - DNA, 33 bp, Homo sapien
cgacaaaaaacctcccgatatcatcagtgtttt

SEQ ID NO: 563107 - DNA, 33 bp, Homo sapien
taatccaatgctttggcaccaactggcttccct

SEQ ID NO: 563108 - DNA, 33 bp, Homo sapien
taatccaatgctttgggaccaactggcttccct

SEQ ID NO: 563109 - DNA, 33 bp, Homo sapien
cattggattatcctcaagttcacttgtctagat

SEQ ID NO: 563110 - DNA, 33 bp, Homo sapien
cattggattatcctcaggttcacttgtctagat

SEQ ID NO: 563111 - DNA, 33 bp, Homo sapien
aaagaatgcacttgacaaagcctgaaaagaaaa

SEQ ID NO: 563112 - DNA, 33 bp, Homo sapien
aaagaatgcacttgacgaagcctgaaaagaaaa

SEQ ID NO: 563113 - DNA, 33 bp, Homo sapien
gttagattacttgtacaatgcaattttcatgat

SEQ ID NO: 563114 - DNA, 33 bp, Homo sapien
gttagattacttgtacgatgcaattttcatgat

SEQ ID NO: 563115 - DNA, 33 bp, Homo sapien
atgacacttctgcaaaattaattgaaatctcag

SEQ ID NO: 563116 - DNA, 33 bp, Homo sapien
atgacacttctgcaaatttaattgaaatctcag

SEQ ID NO: 563117 - DNA, 33 bp, Homo sapien
ccacttgaggtgttgacagggaaaataaatggc

SEQ ID NO: 563118 - DNA, 33 bp, Homo sapien
ccacttgaggtgttgatagggaaaataaatggc

SEQ ID NO: 563119 - DNA, 33 bp, Homo sapien
gtaggtcgtaagctatcagaaggcaaaagtaat

SEQ ID NO: 563120 - DNA, 33 bp, Homo sapien
gtaggtcgtaagctattagaaggcaaaagtaat

SEQ ID NO: 563121 - DNA, 33 bp, Homo sapien
gtgtccagaagttaaggattctagaagtggtcc

SEQ ID NO: 563122 - DNA, 33 bp, Homo sapien
gtgtccagaagttaagtattctagaagtggtcc

SEQ ID NO: 563123 - DNA, 33 bp, Homo sapien
gacatcttcgggaatgaattatcatgagaatga

SEQ ID NO: 563124 - DNA, 33 bp, Homo sapien
gacatcttcgggaatggattatcatgagaatga

SEQ ID NO: 563125 - DNA, 33 bp, Homo sapien
ggcgcacctttgtgaacaaattggagagctgag

SEQ ID NO: 563126 - DNA, 33 bp, Homo sapien
ggcgcacctttgtgaataaattggagagctgag

SEQ ID NO: 563127 - DNA, 33 bp, Homo sapien
agggatctgtctttcaaggtgcttcatgagtga

SEQ ID NO: 563128 - DNA, 33 bp, Homo sapien
agggatctgtctttcacggtgcttcatgagtga

SEQ ID NO: 563129 - DNA, 33 bp, Homo sapien
tctgccactcccgacaataatgcttcagttctg

SEQ ID NO: 563130 - DNA, 33 bp, Homo sapien
tctgccactcccgacagtaatgcttcagttctg

SEQ ID NO: 563131 - DNA, 33 bp, Homo sapien
tcatgtaggtttgtggcacttgaagttgaaagc

SEQ ID NO: 563132 - DNA, 33 bp, Homo sapien
tcatgtaggtttgtggtacttgaagttgaaagc

SEQ ID NO: 563133 - DNA, 33 bp, Homo sapien
tgcagaggacaagcgccacctaagaacattcgc

SEQ ID NO: 563134 - DNA, 33 bp, Homo sapien
tgcagaggacaagcgctacctaagaacattcgc

SEQ ID NO: 563135 - DNA, 33 bp, Homo sapien
aacttaaatgccttgaaagaccagccaggaagc

SEQ ID NO: 563136 - DNA, 33 bp, Homo sapien
aacttaaatgccttgagagaccagccaggaagc

SEQ ID NO: 563137 - DNA, 33 bp, Homo sapien
ggaatttacatctcaaagcaagaaagcagctgg

SEQ ID NO: 563138 - DNA, 33 bp, Homo sapien
ggaatttacatctcaaggcaagaaagcagctgg

SEQ ID NO: 563139 - DNA, 33 bp, Homo sapien
tgagatgtaaattccacattttggctgcattgg

SEQ ID NO: 563140 - DNA, 33 bp, Homo sapien
tgagatgtaaattccagattttggctgcattgg

SEQ ID NO: 563141 - DNA, 33 bp, Homo sapien
aacatacaggagaacacgctcatagaaggagaa

SEQ ID NO: 563142 - DNA, 33 bp, Homo sapien
aacatacaggagaacatgctcatagaaggagaa

SEQ ID NO: 563143 - DNA, 33 bp, Homo sapien
gttgtgtttttccttccccttccctataagtca

SEQ ID NO: 563144 - DNA, 33 bp, Homo sapien
gttgtgtttttccttctccttccctataagtca

SEQ ID NO: 563145 - DNA, 33 bp, Homo sapien
acatggctaaattctcagaagcaggagcaccca

SEQ ID NO: 563146 - DNA, 33 bp, Homo sapien
acatggctaaattctcggaagcaggagcaccca

SEQ ID NO: 563147 - DNA, 33 bp, Homo sapien
taaagatgtctcttcccattttcttgaactata

SEQ ID NO: 563148 - DNA, 33 bp, Homo sapien
taaagatgtctcttcctattttcttgaactata

SEQ ID NO: 563149 - DNA, 33 bp, Homo sapien
agtttctattccctcaaatctagattctaattg

SEQ ID NO: 563150 - DNA, 33 bp, Homo sapien
agtttctattccctcagatctagattctaattg

SEQ ID NO: 563151 - DNA, 33 bp, Homo sapien
aaaagagatataaaagcatgatttccaaatcat

SEQ ID NO: 563152 - DNA, 33 bp, Homo sapien
aaaagagatataaaaggatgatttccaaatcat

SEQ ID NO: 563153 - DNA, 33 bp, Homo sapien
agcacgtagaggaagaaggacgtaaacaagact

SEQ ID NO: 563154 - DNA, 33 bp, Homo sapien
agcacgtagaggaagagggacgtaaacaagact

SEQ ID NO: 563155 - DNA, 33 bp, Homo sapien
aagtggggcatgatagaacctaaacgcattatc

SEQ ID NO: 563156 - DNA, 33 bp, Homo sapien
aagtggggcatgataggacctaaacgcattatc

SEQ ID NO: 563157 - DNA, 33 bp, Homo sapien
gatgcagccacaggaacggggactgttcacact

SEQ ID NO: 563158 - DNA, 33 bp, Homo sapien
gatgcagccacaggaatggggactgttcacact

SEQ ID NO: 563159 - DNA, 33 bp, Homo sapien
attctgattaattcaacgatcctgtcaaaaaat

SEQ ID NO: 563160 - DNA, 33 bp, Homo sapien
attctgattaattcaatgatcctgtcaaaaaat

SEQ ID NO: 563161 - DNA, 33 bp, Homo sapien
agatagccttacgagggactctgaatgaactca

SEQ ID NO: 563162 - DNA, 33 bp, Homo sapien
agatagccttacgaggtactctgaatgaactca

SEQ ID NO: 563163 - DNA, 33 bp, Homo sapien
gtttctatagtcagccaccctggaagagagaga

SEQ ID NO: 563164 - DNA, 33 bp, Homo sapien
gtttctatagtcagccgccctggaagagagaga

SEQ ID NO: 563165 - DNA, 33 bp, Homo sapien
gtcttattgtccattaacaggttattcagttac

SEQ ID NO: 563166 - DNA, 33 bp, Homo sapien
gtcttattgtccattatcaggttattcagttac

SEQ ID NO: 563167 - DNA, 33 bp, Homo sapien
accagatcatggggtacggtagatcattataat

SEQ ID NO: 563168 - DNA, 33 bp, Homo sapien
accagatcatggggtatggtagatcattataat

SEQ ID NO: 563169 - DNA, 33 bp, Homo sapien
ttaaatgtccacttgaaacaaacagttctgaga

SEQ ID NO: 563170 - DNA, 33 bp, Homo sapien
ttaaatgtccacttgacacaaacagttctgaga

SEQ ID NO: 563171 - DNA, 33 bp, Homo sapien
tgttgatgatgtgatacagacagttgctgtgga

SEQ ID NO: 563172 - DNA, 33 bp, Homo sapien
tgttgatgatgtgatatagacagttgctgtgga

SEQ ID NO: 563173 - DNA, 33 bp, Homo sapien; identical to SEQ ID NO: 563171

SEQ ID NO: 563174 - DNA, 33 bp, Homo sapien; identical to SEQ ID NO: 563172

SEQ ID NO: 563175 - DNA, 33 bp, Homo sapien
gctcaggtgattacccagaaccatcaaggccaa

SEQ ID NO: 563176 - DNA, 33 bp, Homo sapien
gctcaggtgattaccctgaaccatcaaggccaa

SEQ ID NO: 563177 - DNA, 33 bp, Homo sapien
ctagtttaagcagatcaacaaagaggcatttag

SEQ ID NO: 563178 - DNA, 33 bp, Homo sapien
ctagtttaagcagatcgacaaagaggcatttag

SEQ ID NO: 563179 - DNA, 33 bp, Homo sapien
tgaaaatgaccttaaactacagactgatcctga

SEQ ID NO: 563180 - DNA, 33 bp, Homo sapien
tgaaaatgaccttaaattacagactgatcctga

SEQ ID NO: 563181 - DNA, 33 bp, Homo sapien
gttggattaggaagcacattcaaagacaagagg

SEQ ID NO: 563182 - DNA, 33 bp, Homo sapien
gttggattaggaagcatattcaaagacaagagg

SEQ ID NO: 563183 - DNA, 33 bp, Homo sapien
ttgggaccactgaattcaaccattatcagtttt

SEQ ID NO: 563184 - DNA, 33 bp, Homo sapien
ttgggaccactgaattgaaccattatcagtttt

SEQ ID NO: 563185 - DNA, 33 bp, Homo sapien
ccattttgcggtggaccattgatctgaagaatg

SEQ ID NO: 563186 - DNA, 33 bp, Homo sapien
ccattttgcggtggactattgatctgaagaatg

SEQ ID NO: 563187 - DNA, 33 bp, Homo sapien
aattgatgcactacaacgctttttactgcttca

SEQ ID NO: 563188 - DNA, 33 bp, Homo sapien
aattgatgcactacaatgctttttactgcttca

SEQ ID NO: 563189 - DNA, 33 bp, Homo sapien
tcccaggggatgctgacggcaccacccttagag

SEQ ID NO: 563190 - DNA, 33 bp, Homo sapien
tcccaggggatgctgatggcaccacccttagag

SEQ ID NO: 563191 - DNA, 33 bp, Homo sapien
aaggggtttgcggtcacgtttccgaggcctggg

SEQ ID NO: 563192 - DNA, 33 bp, Homo sapien
aaggggtttgcggtcatgtttccgaggcctggg

SEQ ID NO: 563193 - DNA, 33 bp, Homo sapien
aaaacgttcaatgctgaatgccacgtgaagctg

SEQ ID NO: 563194 - DNA, 33 bp, Homo sapien
aaaacgttcaatgctggatgccacgtgaagctg

SEQ ID NO: 563195 - DNA, 33 bp, Homo sapien
actcttagggacctcacgattttgcaggtgatt

SEQ ID NO: 563196 - DNA, 33 bp, Homo sapien
actcttagggacctcatgattttgcaggtgatt

SEQ ID NO: 563197 - DNA, 33 bp, Homo sapien
aaaaacccatcagaacaggtcactgaaaaccag

SEQ ID NO: 563198 - DNA, 33 bp, Homo sapien
aaaaacccatcagaacgggtcactgaaaaccag

SEQ ID NO: 563199 - DNA, 33 bp, Homo sapien
cagctgagaatcctcactgacttttctttgaag

SEQ ID NO: 563200 - DNA, 33 bp, Homo sapien
cagctgagaatcctcattgacttttctttgaag

SEQ ID NO: 563201 - DNA, 33 bp, Homo sapien
accttttattgttatcactgagctaactttcct

SEQ ID NO: 563202 - DNA, 33 bp, Homo sapien
accttttattgttatcgctgagctaactttcct

SEQ ID NO: 563203 - DNA, 33 bp, Homo sapien
ggaacatttgcttggaccatgaaggaaggaagg

SEQ ID NO: 563204 - DNA, 33 bp, Homo sapien
ggaacatttgcttggatcatgaaggaaggaagg

SEQ ID NO: 563205 - DNA, 33 bp, Homo sapien
acggccttacagttcacacacaatccctcactg

SEQ ID NO: 563206 - DNA, 33 bp, Homo sapien
acggccttacagttcatacacaatccctcactg

SEQ ID NO: 563207 - DNA, 33 bp, Homo sapien
ggtgagggttgagggaaacttgctgcttcttgc

SEQ ID NO: 563208 - DNA, 33 bp, Homo sapien
ggtgagggttgagggagacttgctgcttcttgc

SEQ ID NO: 563209 - DNA, 33 bp, Homo sapien
tttgatcattcaggtgaacctatagtcattatt

SEQ ID NO: 563210 - DNA, 33 bp, Homo sapien
tttgatcattcaggtggacctatagtcattatt

SEQ ID NO: 563211 - DNA, 33 bp, Homo sapien
tgtctctgctttcaagaaaactcaaacaaaaac

SEQ ID NO: 563212 - DNA, 33 bp, Homo sapien
tgtctctgctttcaaggaaactcaaacaaaaac

SEQ ID NO: 563213 - DNA, 33 bp, Homo sapien
aggcagaataaatgtcaaaaagactacacctag

SEQ ID NO: 563214 - DNA, 33 bp, Homo sapien
aggcagaataaatgtcgaaaagactacacctag

SEQ ID NO: 563215 - DNA, 33 bp, Homo sapien
gtgtagtaatcagaaaaaaactgcaatggaaaa

SEQ ID NO: 563216 - DNA, 33 bp, Homo sapien
gtgtagtaatcagaaagaaactgcaatggaaaa

SEQ ID NO: 563217 - DNA, 33 bp, Homo sapien
aagaaggtttcgtgaggccttagcttaaagtgt

SEQ ID NO: 563218 - DNA, 33 bp, Homo sapien
aagaaggtttcgtgagtccttagcttaaagtgt

SEQ ID NO: 563219 - DNA, 33 bp, Homo sapien
gtataggtataggctgaagacagctctggtgtt

SEQ ID NO: 563220 - DNA, 33 bp, Homo sapien
gtataggtataggctggagacagctctggtgtt

SEQ ID NO: 563221 - DNA, 33 bp, Homo sapien
ttaaccctgagaaaaaggttgcacccctggcag

SEQ ID NO: 563222 - DNA, 33 bp, Homo sapien
ttaaccctgagaaaaatgttgcacccctggcag

SEQ ID NO: 563223 - DNA, 33 bp, Homo sapien
ttccttttattggaatcatccccttgctggctt

SEQ ID NO: 563224 - DNA, 33 bp, Homo sapien
ttccttttattggaattatccccttgctggctt

SEQ ID NO: 563225 - DNA, 33 bp, Homo sapien
ctgaagaggacttttacgtcttagaaatgcact

SEQ ID NO: 563226 - DNA, 33 bp, Homo sapien
ctgaagaggacttttatgtcttagaaatgcact

SEQ ID NO: 563227 - DNA, 33 bp, Homo sapien
aacagttggtgatggacaccttctctgattcct

SEQ ID NO: 563228 - DNA, 33 bp, Homo sapien
aacagttggtgatggataccttctctgattcct

SEQ ID NO: 563229 - DNA, 33 bp, Homo sapien
agcttacataatttcacatccaagaaaagcaag

SEQ ID NO: 563230 - DNA, 33 bp, Homo sapien
agcttacataatttcatatccaagaaaagcaag

SEQ ID NO: 563231 - DNA, 33 bp, Homo sapien
ctgcaatatttggaacacacgtatactaaaata

SEQ ID NO: 563232 - DNA, 33 bp, Homo sapien
ctgcaatatttggaacgcacgtatactaaaata

SEQ ID NO: 563233 - DNA, 33 bp, Homo sapien
gcagggggaagtcccaatagcctgtgtaaagag

SEQ ID NO: 563234 - DNA, 33 bp, Homo sapien
gcagggggaagtcccagtagcctgtgtaaagag

SEQ ID NO: 563235 - DNA, 33 bp, Homo sapien
tgttccccgaatcccgaaaggttgctatgtaga

SEQ ID NO: 563236 - DNA, 33 bp, Homo sapien
tgttccccgaatcccgcaaggttgctatgtaga

SEQ ID NO: 563237 - DNA, 33 bp, Homo sapien
gacttttgtctcaaatcattgtctactctgcag

SEQ ID NO: 563238 - DNA, 33 bp, Homo sapien
gacttttgtctcaaattattgtctactctgcag

SEQ ID NO: 563239 - DNA, 33 bp, Homo sapien
aggtgtgaactttctaagcagccacttgcttta

SEQ ID NO: 563240 - DNA, 33 bp, Homo sapien
aggtgtgaactttctaggcagccacttgcttta

SEQ ID NO: 563241 - DNA, 33 bp, Homo sapien
ggtacttctctgtccccactcctggcccacatt

SEQ ID NO: 563242 - DNA, 33 bp, Homo sapien
ggtacttctctgtcccgactcctggcccacatt

SEQ ID NO: 563243 - DNA, 33 bp, Homo sapien
ttctgacctactaaatcacaaactctgaggtag

SEQ ID NO: 563244 - DNA, 33 bp, Homo sapien
ttctgacctactaaattacaaactctgaggtag

SEQ ID NO: 563245 - DNA, 33 bp, Homo sapien
aaatttgtacagccaacagactcacagaagtca

SEQ ID NO: 563246 - DNA, 33 bp, Homo sapien
aaatttgtacagccaatagactcacagaagtca

SEQ ID NO: 563247 - DNA, 33 bp, Homo sapien
aaagaaaagctcatcaaaataacagtggatctc

SEQ ID NO: 563248 - DNA, 33 bp, Homo sapien
aaagaaaagctcatcagaataacagtggatctc

SEQ ID NO: 563249 - DNA, 33 bp, Homo sapien
agccagggaaaaggaaagctacacttatgtgca

SEQ ID NO: 563250 - DNA, 33 bp, Homo sapien
agccagggaaaaggaatgctacacttatgtgca

SEQ ID NO: 563251 - DNA, 33 bp, Homo sapien
ggccagtgggagttaaagaaggcttcctgggag

SEQ ID NO: 563252 - DNA, 33 bp, Homo sapien
ggccagtgggagttaacgaaggcttcctgggag

SEQ ID NO: 563253 - DNA, 33 bp, Homo sapien
gattctagaggtgttaagaaagacatttccaaa

SEQ ID NO: 563254 - DNA, 33 bp, Homo sapien
gattctagaggtgttatgaaagacatttccaaa

SEQ ID NO: 563255 - DNA, 33 bp, Homo sapien
taaagtggtaattgacaatcataatgatgaaca

SEQ ID NO: 563256 - DNA, 33 bp, Homo sapien
taaagtggtaattgaccatcataatgatgaaca

SEQ ID NO: 563257 - DNA, 33 bp, Homo sapien
tgtctgtgtcacatcaaactgaaactgcttcgg

SEQ ID NO: 563258 - DNA, 33 bp, Homo sapien
tgtctgtgtcacatcacactgaaactgcttcgg

SEQ ID NO: 563259 - DNA, 33 bp, Homo sapien
caatgcctattctcaaatcaactctattgtgca

SEQ ID NO: 563260 - DNA, 33 bp, Homo sapien
caatgcctattctcaagtcaactctattgtgca

SEQ ID NO: 563261 - DNA, 33 bp, Homo sapien
ataagggtaagttgggaacagtgccagggctgc

SEQ ID NO: 563262 - DNA, 33 bp, Homo sapien
ataagggtaagttggggacagtgccagggctgc

SEQ ID NO: 563263 - DNA, 33 bp, Homo sapien
tcagccaatctttctacgcttctacaaggagag

SEQ ID NO: 563264 - DNA, 33 bp, Homo sapien
tcagccaatctttctatgcttctacaaggagag

SEQ ID NO: 563265 - DNA, 33 bp, Homo sapien
atcaaatcgtgacaaacttatgacattttggac

SEQ ID NO: 563266 - DNA, 33 bp, Homo sapien
atcaaatcgtgacaaatttatgacattttggac

SEQ ID NO: 563267 - DNA, 33 bp, Homo sapien
ccttgatgggggctcaagaacaacaggaatgac

SEQ ID NO: 563268 - DNA, 33 bp, Homo sapien
ccttgatgggggctcaggaacaacaggaatgac

SEQ ID NO: 563269 - DNA, 33 bp, Homo sapien
ggtaatgcagacggaaagagagaatgtatgtga

SEQ ID NO: 563270 - DNA, 33 bp, Homo sapien
ggtaatgcagacggaatgagagaatgtatgtga

SEQ ID NO: 563271 - DNA, 33 bp, Homo sapien
acgtgcagctgctttcaaagaagaagttcaaga

SEQ ID NO: 563272 - DNA, 33 bp, Homo sapien
acgtgcagctgctttccaagaagaagttcaaga

SEQ ID NO: 563273 - DNA, 33 bp, Homo sapien
aagtatctagtctgcactgaaaaagcccatgca

SEQ ID NO: 563274 - DNA, 33 bp, Homo sapien
aagtatctagtctgcagtgaaaaagcccatgca

SEQ ID NO: 563275 - DNA, 33 bp, Homo sapien
aatggaaaaatgtggtcaagcatccaaatgttt

SEQ ID NO: 563276 - DNA, 33 bp, Homo sapien
aatggaaaaatgtggttaagcatccaaatgttt

SEQ ID NO: 563277 - DNA, 33 bp, Homo sapien
gcattgttcaaacttacatgtcacacatcacat

SEQ ID NO: 563278 - DNA, 33 bp, Homo sapien
gcattgttcaaacttatatgtcacacatcacat

SEQ ID NO: 563279 - DNA, 33 bp, Homo sapien
tgctctgtaacaaaacaccctaaaagtcaggag

SEQ ID NO: 563280 - DNA, 33 bp, Homo sapien
tgctctgtaacaaaactccctaaaagtcaggag

SEQ ID NO: 563281 - DNA, 33 bp, Homo sapien
ctagcttcgtaacatactacaaggagcatgccg

SEQ ID NO: 563282 - DNA, 33 bp, Homo sapien
ctagcttcgtaacatattacaaggagcatgccg

SEQ ID NO: 563283 - DNA, 33 bp, Homo sapien
gaggacagccagagccaaagatgcagccagcag

SEQ ID NO: 563284 - DNA, 33 bp, Homo sapien
gaggacagccagagcccaagatgcagccagcag

SEQ ID NO: 563285 - DNA, 33 bp, Homo sapien
aggacatctccttaaaaatcatatgcttattat

SEQ ID NO: 563286 - DNA, 33 bp, Homo sapien
aggacatctccttaaatatcatatgcttattat

SEQ ID NO: 563287 - DNA, 33 bp, Homo sapien
gagagtgttgcttacaacctttgttgaaaagtg

SEQ ID NO: 563288 - DNA, 33 bp, Homo sapien
gagagtgttgcttacatcctttgttgaaaagtg

SEQ ID NO: 563289 - DNA, 33 bp, Homo sapien
ctatgtgtcctgttaccggcagctttctatgga

SEQ ID NO: 563290 - DNA, 33 bp, Homo sapien
ctatgtgtcctgttactggcagctttctatgga

SEQ ID NO: 563291 - DNA, 33 bp, Homo sapien
ttcagtttcagttccgactctaacttgtgatct

SEQ ID NO: 563292 - DNA, 33 bp, Homo sapien
ttcagtttcagttccgcctctaacttgtgatct

SEQ ID NO: 563293 - DNA, 33 bp, Homo sapien
gttctgacctacaaaaacacatcagagagacct

SEQ ID NO: 563294 - DNA, 33 bp, Homo sapien
gttctgacctacaaaaccacatcagagagacct

SEQ ID NO: 563295 - DNA, 33 bp, Homo sapien
tatgaggtcatttcaccgaagtaactctagagg

SEQ ID NO: 563296 - DNA, 33 bp, Homo sapien
tatgaggtcatttcactgaagtaactctagagg

SEQ ID NO: 563297 - DNA, 33 bp, Homo sapien
ttgctaacccagctacaacacaaccccactagg

SEQ ID NO: 563298 - DNA, 33 bp, Homo sapien
ttgctaacccagctacgacacaaccccactagg

SEQ ID NO: 563299 - DNA, 33 bp, Homo sapien
cggggaaacaggctgacggatacatgtacaatt

SEQ ID NO: 563300 - DNA, 33 bp, Homo sapien
cggggaaacaggctgatggatacatgtacaatt

SEQ ID NO: 563301 - DNA, 33 bp, Homo sapien
ttctttaaggatagaacgggttactggtgctat

SEQ ID NO: 563302 - DNA, 33 bp, Homo sapien
ttctttaaggatagaatgggttactggtgctat

SEQ ID NO: 563303 - DNA, 33 bp, Homo sapien
gtcctctagggcctgcaagtccttcgtggggac

SEQ ID NO: 563304 - DNA, 33 bp, Homo sapien
gtcctctagggcctgcgagtccttcgtggggac

SEQ ID NO: 563305 - DNA, 33 bp, Homo sapien
ctcgcccaggctgagacaggggctgaataaacc

SEQ ID NO: 563306 - DNA, 33 bp, Homo sapien
ctcgcccaggctgagataggggctgaataaacc

SEQ ID NO: 563307 - DNA, 33 bp, Homo sapien
cacacaaagcaatttcacttatctttgctgagc

SEQ ID NO: 563308 - DNA, 33 bp, Homo sapien
cacacaaagcaatttcgcttatctttgctgagc

SEQ ID NO: 563309 - DNA, 33 bp, Homo sapien
cctgaaggactccgaaataaagtctgtgccaca

SEQ ID NO: 563310 - DNA, 33 bp, Homo sapien
cctgaaggactccgaagtaaagtctgtgccaca

SEQ ID NO: 563311 - DNA, 33 bp, Homo sapien
agagctccaggtctcaaataaaaatctctgggt

SEQ ID NO: 563312 - DNA, 33 bp, Homo sapien
agagctccaggtctcacataaaaatctctgggt

SEQ ID NO: 563313 - DNA, 33 bp, Homo sapien
ttttaggagatcagtacagtaaagacgtgcaaa

SEQ ID NO: 563314 - DNA, 33 bp, Homo sapien
ttttaggagatcagtatagtaaagacgtgcaaa

SEQ ID NO: 563315 - DNA, 33 bp, Homo sapien
ttgccagattggttccaataatccacaaagaag

SEQ ID NO: 563316 - DNA, 33 bp, Homo sapien
ttgccagattggttccgataatccacaaagaag

SEQ ID NO: 563317 - DNA, 33 bp, Homo sapien
tctataatagaaaaaggctggatgcacatagga

SEQ ID NO: 563318 - DNA, 33 bp, Homo sapien
tctataatagaaaaagtctggatgcacatagga

SEQ ID NO: 563319 - DNA, 33 bp, Homo sapien
cacagtaaaataatggaacatgacaaacttttg

SEQ ID NO: 563320 - DNA, 33 bp, Homo sapien
cacagtaaaataatgggacatgacaaacttttg

SEQ ID NO: 563321 - DNA, 33 bp, Homo sapien
tttgaaaagaccatacaattccaactatatgat

SEQ ID NO: 563322 - DNA, 33 bp, Homo sapien
tttgaaaagaccatacgattccaactatatgat

SEQ ID NO: 563323 - DNA, 33 bp, Homo sapien
tgagagcacccagtcagtgaactcttgcctatt

SEQ ID NO: 563324 - DNA, 33 bp, Homo sapien
tgagagcacccagtcattgaactcttgcctatt

SEQ ID NO: 563325 - DNA, 33 bp, Homo sapien
gcaacacatgtattaaagccttccaccttcagt

SEQ ID NO: 563326 - DNA, 33 bp, Homo sapien
gcaacacatgtattaaggccttccaccttcagt

SEQ ID NO: 563327 - DNA, 33 bp, Homo sapien
ttgaaaatcaacacctgagatgtcacctagtcc

SEQ ID NO: 563328 - DNA, 33 bp, Homo sapien
ttgaaaatcaacaccttagatgtcacctagtcc

SEQ ID NO: 563329 - DNA, 33 bp, Homo sapien
cacacatcgaattcacgagtctttccatgcatc

SEQ ID NO: 563330 - DNA, 33 bp, Homo sapien
cacacatcgaattcactagtctttccatgcatc

SEQ ID NO: 563331 - DNA, 33 bp, Homo sapien
tcaatttgtcaccagacagctgactgctgccat

SEQ ID NO: 563332 - DNA, 33 bp, Homo sapien
tcaatttgtcaccagatagctgactgctgccat

SEQ ID NO: 563333 - DNA, 33 bp, Homo sapien
gcctatcatatctttacagagcaagcgggaatt

SEQ ID NO: 563334 - DNA, 33 bp, Homo sapien
gcctatcatatctttagagagcaagcgggaatt

SEQ ID NO: 563335 - DNA, 33 bp, Homo sapien
cacaaaaggctggatacggctacttttggaaag

SEQ ID NO: 563336 - DNA, 33 bp, Homo sapien
cacaaaaggctggatatggctacttttggaaag

SEQ ID NO: 563337 - DNA, 33 bp, Homo sapien
ctcatcatctccattaactaaggaaaatccaat

SEQ ID NO: 563338 - DNA, 33 bp, Homo sapien
ctcatcatctccattatctaaggaaaatccaat

SEQ ID NO: 563339 - DNA, 33 bp, Homo sapien
tatggctatttctcaaagcccaaagctgttcaa

SEQ ID NO: 563340 - DNA, 33 bp, Homo sapien
tatggctatttctcaatgcccaaagctgttcaa

SEQ ID NO: 563341 - DNA, 33 bp, Homo sapien
ggaacaaccatgcttacaggttaataaacataa

SEQ ID NO: 563342 - DNA, 33 bp, Homo sapien
ggaacaaccatgcttagaggttaataaacataa

SEQ ID NO: 563343 - DNA, 33 bp, Homo sapien
ataaatccataatccaatcatttctcaagaccc

SEQ ID NO: 563344 - DNA, 33 bp, Homo sapien
ataaatccataatccagtcatttctcaagaccc

SEQ ID NO: 563345 - DNA, 33 bp, Homo sapien
gtgagttgatatacttcaaatgtacagttgcat

SEQ ID NO: 563346 - DNA, 33 bp, Homo sapien
gtgagttgatatacttgaaatgtacagttgcat

SEQ ID NO: 563347 - DNA, 33 bp, Homo sapien
ctcaaaacaattcagaaaaatgcacaatacacg

SEQ ID NO: 563348 - DNA, 33 bp, Homo sapien
ctcaaaacaattcagagaaatgcacaatacacg

SEQ ID NO: 563349 - DNA, 33 bp, Homo sapien
tgacaaatcctctgaagttaagcatttattaaa

SEQ ID NO: 563350 - DNA, 33 bp, Homo sapien
tgacaaatcctctgaatttaagcatttattaaa

SEQ ID NO: 563351 - DNA, 33 bp, Homo sapien
cattggtgtccctagcaatctcctatcaaggat

SEQ ID NO: 563352 - DNA, 33 bp, Homo sapien
cattggtgtccctagcgatctcctatcaaggat

SEQ ID NO: 563353 - DNA, 33 bp, Homo sapien
ccaccacagcctttacaactggctcaagttcag

SEQ ID NO: 563354 - DNA, 33 bp, Homo sapien
ccaccacagcctttacgactggctcaagttcag

SEQ ID NO: 563355 - DNA, 33 bp, Homo sapien
atcaaataactgcacaaggctctcaagtgggga

SEQ ID NO: 563356 - DNA, 33 bp, Homo sapien
atcaaataactgcacagggctctcaagtgggga

SEQ ID NO: 563357 - DNA, 33 bp, Homo sapien
tcaaaggggcagggaaatgattgcctctttact

SEQ ID NO: 563358 - DNA, 33 bp, Homo sapien
tcaaaggggcagggaattgattgcctctttact

SEQ ID NO: 563359 - DNA, 33 bp, Homo sapien
ggaacaagtacacaaactcaagataacctcatt

SEQ ID NO: 563360 - DNA, 33 bp, Homo sapien
ggaacaagtacacaaattcaagataacctcatt

SEQ ID NO: 563361 - DNA, 33 bp, Homo sapien
ggctttaaaggaaataccatagcttgtcgaatc

SEQ ID NO: 563362 - DNA, 33 bp, Homo sapien
ggctttaaaggaaatatcatagcttgtcgaatc

SEQ ID NO: 563363 - DNA, 33 bp, Homo sapien
agcttaaagtctgccacgtaggagtgcttatac

SEQ ID NO: 563364 - DNA, 33 bp, Homo sapien
agcttaaagtctgccatgtaggagtgcttatac

SEQ ID NO: 563365 - DNA, 33 bp, Homo sapien
tgatgactggcatatacaggcattatataagca

SEQ ID NO: 563366 - DNA, 33 bp, Homo sapien
tgatgactggcatatagaggcattatataagca

SEQ ID NO: 563367 - DNA, 33 bp, Homo sapien
ggaaaataacactgaggagagaaaatacaatct

SEQ ID NO: 563368 - DNA, 33 bp, Homo sapien
ggaaaataacactgagtagagaaaatacaatct

SEQ ID NO: 563369 - DNA, 33 bp, Homo sapien
tcacttactgaaaccaatattctcatctcatga

SEQ ID NO: 563370 - DNA, 33 bp, Homo sapien
tcacttactgaaaccactattctcatctcatga

SEQ ID NO: 563371 - DNA, 33 bp, Homo sapien
gaggccttgcttgaaagtgactgccaggtatct

SEQ ID NO: 563372 - DNA, 33 bp, Homo sapien
gaggccttgcttgaaattgactgccaggtatct

SEQ ID NO: 563373 - DNA, 33 bp, Homo sapien
acagattacctccaaacgtagaggcctagacaa

SEQ ID NO: 563374 - DNA, 33 bp, Homo sapien
acagattacctccaaatgtagaggcctagacaa

SEQ ID NO: 563375 - DNA, 33 bp, Homo sapien
ctgccaatcaatcaatcatacattagactttgt

SEQ ID NO: 563376 - DNA, 33 bp, Homo sapien
ctgccaatcaatcaattatacattagactttgt

SEQ ID NO: 563377 - DNA, 33 bp, Homo sapien
gagggcttggtataagccaaaatcgtcagagga

SEQ ID NO: 563378 - DNA, 33 bp, Homo sapien
gagggcttggtataaggcaaaatcgtcagagga

SEQ ID NO: 563379 - DNA, 33 bp, Homo sapien
aaaaagtgaattccaaacagtatacacattatg

SEQ ID NO: 563380 - DNA, 33 bp, Homo sapien
aaaaagtgaattccaagcagtatacacattatg

SEQ ID NO: 563381 - DNA, 33 bp, Homo sapien
atactcagcattctgaatagaagtgacctttgc

SEQ ID NO: 563382 - DNA, 33 bp, Homo sapien
atactcagcattctgagtagaagtgacctttgc

SEQ ID NO: 563383 - DNA, 33 bp, Homo sapien
ctatttctattattgaactattttgagttattt

SEQ ID NO: 563384 - DNA, 33 bp, Homo sapien
ctatttctattattgatctattttgagttattt

SEQ ID NO: 563385 - DNA, 33 bp, Homo sapien
ggtacagtaatcaaaacgatatggtcctagcat

SEQ ID NO: 563386 - DNA, 33 bp, Homo sapien
ggtacagtaatcaaaatgatatggtcctagcat

SEQ ID NO: 563387 - DNA, 33 bp, Homo sapien
ggctggaactacctctgaaatgcccagttatat

SEQ ID NO: 563388 - DNA, 33 bp, Homo sapien
ggctggaactacctcttaaatgcccagttatat

SEQ ID NO: 563389 - DNA, 33 bp, Homo sapien
agtcatatttgtacccactcataattacatgca

SEQ ID NO: 563390 - DNA, 33 bp, Homo sapien
agtcatatttgtaccccctcataattacatgca

SEQ ID NO: 563391 - DNA, 33 bp, Homo sapien
cagggtatacaatcaaagtacaaaaattagtag

SEQ ID NO: 563392 - DNA, 33 bp, Homo sapien
cagggtatacaatcaaggtacaaaaattagtag

SEQ ID NO: 563393 - DNA, 33 bp, Homo sapien
ttgatatttttggacacggtattttaatgagaa

SEQ ID NO: 563394 - DNA, 33 bp, Homo sapien
ttgatatttttggacatggtattttaatgagaa

SEQ ID NO: 563395 - DNA, 33 bp, Homo sapien
ccgtattcatagctaactatatgttacagcact

SEQ ID NO: 563396 - DNA, 33 bp, Homo sapien
ccgtattcatagctaattatatgttacagcact

SEQ ID NO: 563397 - DNA, 33 bp, Homo sapien
aagtggctgttttacaccactaacttttggggt

SEQ ID NO: 563398 - DNA, 33 bp, Homo sapien
aagtggctgttttacatcactaacttttggggt

SEQ ID NO: 563399 - DNA, 33 bp, Homo sapien
ttcctcctatggcaaacgaccacagctgttgaa

SEQ ID NO: 563400 - DNA, 33 bp, Homo sapien
ttcctcctatggcaaatgaccacagctgttgaa

SEQ ID NO: 563401 - DNA, 33 bp, Homo sapien
ccacaaatgcttatcaccttgactttcaaatgt

SEQ ID NO: 563402 - DNA, 33 bp, Homo sapien
ccacaaatgcttatcatcttgactttcaaatgt

SEQ ID NO: 563403 - DNA, 33 bp, Homo sapien
tctgcattgtaaactcacacacactgagttaaa

SEQ ID NO: 563404 - DNA, 33 bp, Homo sapien
tctgcattgtaaactcgcacacactgagttaaa

SEQ ID NO: 563405 - DNA, 33 bp, Homo sapien
ggtggtgtggatcaaactggttacctgctaata

SEQ ID NO: 563406 - DNA, 33 bp, Homo sapien
ggtggtgtggatcaaattggttacctgctaata

SEQ ID NO: 563407 - DNA, 33 bp, Homo sapien
ctgcaatggctcacaagaacatcacgagcctct

SEQ ID NO: 563408 - DNA, 33 bp, Homo sapien
ctgcaatggctcacaataacatcacgagcctct

SEQ ID NO: 563409 - DNA, 33 bp, Homo sapien
attctgaccgccaactcaaattgatcacactta

SEQ ID NO: 563410 - DNA, 33 bp, Homo sapien
attctgaccgccaacttaaattgatcacactta

SEQ ID NO: 563411 - DNA, 33 bp, Homo sapien
aaaacactgaagaaagaagatgctgagaaatgg

SEQ ID NO: 563412 - DNA, 33 bp, Homo sapien
aaaacactgaagaaaggagatgctgagaaatgg

SEQ ID NO: 563413 - DNA, 33 bp, Homo sapien
aatatagtgtttgcaaagttgaaaggtgtcctg

SEQ ID NO: 563414 - DNA, 33 bp, Homo sapien
aatatagtgtttgcaacgttgaaaggtgtcctg

SEQ ID NO: 563415 - DNA, 33 bp, Homo sapien
cacagacctagattgagcatcatggtatttggg

SEQ ID NO: 563416 - DNA, 33 bp, Homo sapien
cacagacctagattgatcatcatggtatttggg

SEQ ID NO: 563417 - DNA, 33 bp, Homo sapien
agggaccttcttaaaacgtacactttgagtaag

SEQ ID NO: 563418 - DNA, 33 bp, Homo sapien
agggaccttcttaaaatgtacactttgagtaag

SEQ ID NO: 563419 - DNA, 33 bp, Homo sapien
aaagcagaagtcctgacggagaaagggagaggg

SEQ ID NO: 563420 - DNA, 33 bp, Homo sapien
aaagcagaagtcctgatggagaaagggagaggg

SEQ ID NO: 563421 - DNA, 33 bp, Homo sapien
aggatttctgacaccaagaatggatctccctgc

SEQ ID NO: 563422 - DNA, 33 bp, Homo sapien
aggatttctgacaccaggaatggatctccctgc

SEQ ID NO: 563423 - DNA, 33 bp, Homo sapien
tcacactctatcaggaacctcagaagcgtccgt

SEQ ID NO: 563424 - DNA, 33 bp, Homo sapien
tcacactctatcaggagcctcagaagcgtccgt

SEQ ID NO: 563425 - DNA, 33 bp, Homo sapien
caaattaacatttacccggaaagtctgtcatgg

SEQ ID NO: 563426 - DNA, 33 bp, Homo sapien
caaattaacatttacctggaaagtctgtcatgg

SEQ ID NO: 563427 - DNA, 33 bp, Homo sapien
attttttccaacaaacgctgtcccagcagaaca

SEQ ID NO: 563428 - DNA, 33 bp, Homo sapien
attttttccaacaaactctgtcccagcagaaca

SEQ ID NO: 563429 - DNA, 33 bp, Homo sapien
catgcctaatggtgacaacaaaaatgggagata

SEQ ID NO: 563430 - DNA, 33 bp, Homo sapien
catgcctaatggtgaccacaaaaatgggagata

SEQ ID NO: 563431 - DNA, 33 bp, Homo sapien
gttttcagggtgtagaatatttaagaagccagg

SEQ ID NO: 563432 - DNA, 33 bp, Homo sapien
gttttcagggtgtagattatttaagaagccagg

SEQ ID NO: 563433 - DNA, 33 bp, Homo sapien
cctaagtataaacactaaagcaaggcaagaatg

SEQ ID NO: 563434 - DNA, 33 bp, Homo sapien
cctaagtataaacactcaagcaaggcaagaatg

SEQ ID NO: 563435 - DNA, 33 bp, Homo sapien
tcacccaggtagtgaacagagtaactgattagg

SEQ ID NO: 563436 - DNA, 33 bp, Homo sapien
tcacccaggtagtgaatagagtaactgattagg

SEQ ID NO: 563437 - DNA, 33 bp, Homo sapien
ctgaccatgaatttcaaaagttcccaggtggtc

SEQ ID NO: 563438 - DNA, 33 bp, Homo sapien
ctgaccatgaatttcagaagttcccaggtggtc

SEQ ID NO: 563439 - DNA, 33 bp, Homo sapien
ttctcatttctcaagccctcattcagagcctta

SEQ ID NO: 563440 - DNA, 33 bp, Homo sapien
ttctcatttctcaagctctcattcagagcctta

SEQ ID NO: 563441 - DNA, 33 bp, Homo sapien
aaactgtgcttctccactaaaggaagaaaggaa

SEQ ID NO: 563442 - DNA, 33 bp, Homo sapien
aaactgtgcttctccattaaaggaagaaaggaa

SEQ ID NO: 563443 - DNA, 33 bp, Homo sapien
cgccttgggctacccaccgatgaagtctggcac

SEQ ID NO: 563444 - DNA, 33 bp, Homo sapien
cgccttgggctacccatcgatgaagtctggcac

SEQ ID NO: 563445 - DNA, 33 bp, Homo sapien
ctttgcaaaaatagcaaaaacagagcagatggg

SEQ ID NO: 563446 - DNA, 33 bp, Homo sapien
ctttgcaaaaatagcagaaacagagcagatggg

SEQ ID NO: 563447 - DNA, 33 bp, Homo sapien
ggtaggttttccagaacatgatgctgttaggac

SEQ ID NO: 563448 - DNA, 33 bp, Homo sapien
ggtaggttttccagaatatgatgctgttaggac

SEQ ID NO: 563449 - DNA, 33 bp, Homo sapien
agcagccctcaaccaacggctgatgggaggtgg

SEQ ID NO: 563450 - DNA, 33 bp, Homo sapien
agcagccctcaaccaatggctgatgggaggtgg

SEQ ID NO: 563451 - DNA, 33 bp, Homo sapien
gccctgaagagcatcccacgtgtccttgtgctg

SEQ ID NO: 563452 - DNA, 33 bp, Homo sapien
gccctgaagagcatcctacgtgtccttgtgctg

SEQ ID NO: 563453 - DNA, 33 bp, Homo sapien
cagtctatcttgtaatgatcgagcactggtctt

SEQ ID NO: 563454 - DNA, 33 bp, Homo sapien
cagtctatcttgtaattatcgagcactggtctt

SEQ ID NO: 563455 - DNA, 33 bp, Homo sapien
gtgaacatgagggagcactatgtgtttaagacc

SEQ ID NO: 563456 - DNA, 33 bp, Homo sapien
gtgaacatgagggagcgctatgtgtttaagacc

SEQ ID NO: 563457 - DNA, 33 bp, Homo sapien
acacaggtttcaactagagtgggtgtttctggc

SEQ ID NO: 563458 - DNA, 33 bp, Homo sapien
acacaggtttcaactatagtgggtgtttctggc

SEQ ID NO: 563459 - DNA, 33 bp, Homo sapien
attcaaaccatgtccaatcaatcctgcaagaag

SEQ ID NO: 563460 - DNA, 33 bp, Homo sapien
attcaaaccatgtccagtcaatcctgcaagaag

SEQ ID NO: 563461 - DNA, 33 bp, Homo sapien
cctataggaaacacaacgagatgctctcaagtc

SEQ ID NO: 563462 - DNA, 33 bp, Homo sapien
cctataggaaacacaatgagatgctctcaagtc

SEQ ID NO: 563463 - DNA, 33 bp, Homo sapien
tcaaatgcctctcataagtgtacagtgggtaaa

SEQ ID NO: 563464 - DNA, 33 bp, Homo sapien
tcaaatgcctctcataggtgtacagtgggtaaa

SEQ ID NO: 563465 - DNA, 33 bp, Homo sapien
ggcattgagtgacttcactaaagacatgtgttg

SEQ ID NO: 563466 - DNA, 33 bp, Homo sapien
ggcattgagtgacttctctaaagacatgtgttg

SEQ ID NO: 563467 - DNA, 33 bp, Homo sapien
gagcttgactttgccacgcgaaacttcctaatg

SEQ ID NO: 563468 - DNA, 33 bp, Homo sapien
gagcttgactttgccatgcgaaacttcctaatg

SEQ ID NO: 563469 - DNA, 33 bp, Homo sapien
aggttttacatcaataaaataggagtaataaca

SEQ ID NO: 563470 - DNA, 33 bp, Homo sapien
aggttttacatcaatagaataggagtaataaca

SEQ ID NO: 563471 - DNA, 33 bp, Homo sapien
ggagttcatcgggccgaagctgcagttcagatc

SEQ ID NO: 563472 - DNA, 33 bp, Homo sapien
ggagttcatcgggccggagctgcagttcagatc

SEQ ID NO: 563473 - DNA, 33 bp, Homo sapien
gaattctagaaggaaaatgagtgagttccatat

SEQ ID NO: 563474 - DNA, 33 bp, Homo sapien
gaattctagaaggaaattgagtgagttccatat

SEQ ID NO: 563475 - DNA, 33 bp, Homo sapien
aaacaaactgctctcaatctcagtggtacattg

SEQ ID NO: 563476 - DNA, 33 bp, Homo sapien
aaacaaactgctctcagtctcagtggtacattg

SEQ ID NO: 563477 - DNA, 33 bp, Homo sapien
aaaaaatggtgagttgaaagtaatacttcatgg

SEQ ID NO: 563478 - DNA, 33 bp, Homo sapien
aaaaaatggtgagttggaagtaatacttcatgg

SEQ ID NO: 563479 - DNA, 33 bp, Homo sapien
aggcttgtctcccaaaataggtgagaatactgt

SEQ ID NO: 563480 - DNA, 33 bp, Homo sapien
aggcttgtctcccaaagtaggtgagaatactgt

SEQ ID NO: 563481 - DNA, 33 bp, Homo sapien
tcaaccatatattagagcctggttgctacacat

SEQ ID NO: 563482 - DNA, 33 bp, Homo sapien
tcaaccatatattagatcctggttgctacacat

SEQ ID NO: 563483 - DNA, 33 bp, Homo sapien
aggctacttcctgacaaaagcaattgtgttctc

SEQ ID NO: 563484 - DNA, 33 bp, Homo sapien
aggctacttcctgacagaagcaattgtgttctc

SEQ ID NO: 563485 - DNA, 33 bp, Homo sapien
tatctacaaaaactcaatatcaaaatcattagc

SEQ ID NO: 563486 - DNA, 33 bp, Homo sapien
tatctacaaaaactcagtatcaaaatcattagc

SEQ ID NO: 563487 - DNA, 33 bp, Homo sapien
tttaggtatattcccaggagtggaactgtgggg

SEQ ID NO: 563488 - DNA, 33 bp, Homo sapien
tttaggtatattcccatgagtggaactgtgggg

SEQ ID NO: 563489 - DNA, 33 bp, Homo sapien
caggaagccataggcacgaatggaaactgggga

SEQ ID NO: 563490 - DNA, 33 bp, Homo sapien
caggaagccataggcatgaatggaaactgggga

SEQ ID NO: 563491 - DNA, 33 bp, Homo sapien
ataagatggtatcagcaaaacccaagatataga

SEQ ID NO: 563492 - DNA, 33 bp, Homo sapien
ataagatggtatcagccaaacccaagatataga

SEQ ID NO: 563493 - DNA, 33 bp, Homo sapien
ttctggttcatgtgtaataaagacagcaaaaat

SEQ ID NO: 563494 - DNA, 33 bp, Homo sapien
ttctggttcatgtgtagtaaagacagcaaaaat

SEQ ID NO: 563495 - DNA, 33 bp, Homo sapien
gaggcagtgatctggccgataaggggcactagg

SEQ ID NO: 563496 - DNA, 33 bp, Homo sapien
gaggcagtgatctggctgataaggggcactagg

SEQ ID NO: 563497 - DNA, 33 bp, Homo sapien
aattaacacttgaataactacctttactaccat

SEQ ID NO: 563498 - DNA, 33 bp, Homo sapien
aattaacacttgaatatctacctttactaccat

SEQ ID NO: 563499 - DNA, 33 bp, Homo sapien
ttgccttctgatgccacctgattaaatctgtaa

SEQ ID NO: 563500 - DNA, 33 bp, Homo sapien
ttgccttctgatgccatctgattaaatctgtaa

SEQ ID NO: 563501 - DNA, 33 bp, Homo sapien
aaaccttgttctcttccctcacatttgtgcagt

SEQ ID NO: 563502 - DNA, 33 bp, Homo sapien
aaaccttgttctcttctctcacatttgtgcagt

SEQ ID NO: 563503 - DNA, 33 bp, Homo sapien
ccgccccatgtctctacggcaaagcctgcaaaa

SEQ ID NO: 563504 - DNA, 33 bp, Homo sapien
ccgccccatgtctctatggcaaagcctgcaaaa

SEQ ID NO: 563505 - DNA, 33 bp, Homo sapien
tctgattctcgaagtgcaagtggtaaagtcacc

SEQ ID NO: 563506 - DNA, 33 bp, Homo sapien
tctgattctcgaagtgtaagtggtaaagtcacc

SEQ ID NO: 563507 - DNA, 33 bp, Homo sapien
tgtgccctggctcccacggtaatgatattgtaa

SEQ ID NO: 563508 - DNA, 33 bp, Homo sapien
tgtgccctggctcccatggtaatgatattgtaa

SEQ ID NO: 563509 - DNA, 33 bp, Homo sapien
gagaaatattgcaccccatttatgaggtactaa

SEQ ID NO: 563510 - DNA, 33 bp, Homo sapien
gagaaatattgcacccgatttatgaggtactaa

SEQ ID NO: 563511 - DNA, 33 bp, Homo sapien
caacagtttgcaaaacacttctaagaatagaaa

SEQ ID NO: 563512 - DNA, 33 bp, Homo sapien
caacagtttgcaaaacgcttctaagaatagaaa

SEQ ID NO: 563513 - DNA, 33 bp, Homo sapien
gaaaataagtgaatgaaagaatccaatgaacca

SEQ ID NO: 563514 - DNA, 33 bp, Homo sapien
gaaaataagtgaatgagagaatccaatgaacca

SEQ ID NO: 563515 - DNA, 33 bp, Homo sapien
tctgtgcaatctaaaacccagataaataaaagt

SEQ ID NO: 563516 - DNA, 33 bp, Homo sapien
tctgtgcaatctaaaatccagataaataaaagt

SEQ ID NO: 563517 - DNA, 33 bp, Homo sapien
aaactcaaaactcaaaacttggctgtcatttct

SEQ ID NO: 563518 - DNA, 33 bp, Homo sapien
aaactcaaaactcaaatcttggctgtcatttct

SEQ ID NO: 563519 - DNA, 33 bp, Homo sapien
tatagaatgagtgtcaaataatacgttcaatat

SEQ ID NO: 563520 - DNA, 33 bp, Homo sapien
tatagaatgagtgtcagataatacgttcaatat

SEQ ID NO: 563521 - DNA, 33 bp, Homo sapien
gggacatgttctaagaaagaaaatagctccaag

SEQ ID NO: 563522 - DNA, 33 bp, Homo sapien
gggacatgttctaagacagaaaatagctccaag

SEQ ID NO: 563523 - DNA, 33 bp, Homo sapien
gaaccaatacaaactcaaatggtacagccggta

SEQ ID NO: 563524 - DNA, 33 bp, Homo sapien
gaaccaatacaaactccaatggtacagccggta

SEQ ID NO: 563525 - DNA, 33 bp, Homo sapien
cacacatacatgcataacttcttcacccttgta

SEQ ID NO: 563526 - DNA, 33 bp, Homo sapien
cacacatacatgcatatcttcttcacccttgta

SEQ ID NO: 563527 - DNA, 33 bp, Homo sapien
caggttaaatagctacaattttagagaaaagga

SEQ ID NO: 563528 - DNA, 33 bp, Homo sapien
caggttaaatagctaccattttagagaaaagga

SEQ ID NO: 563529 - DNA, 33 bp, Homo sapien
tgtctttatcagtatcaatatccttacttgcaa

SEQ ID NO: 563530 - DNA, 33 bp, Homo sapien
tgtctttatcagtatcgatatccttacttgcaa

SEQ ID NO: 563531 - DNA, 33 bp, Homo sapien
gacttagtgctgtaaactgtgaaaagtagaaat

SEQ ID NO: 563532 - DNA, 33 bp, Homo sapien
gacttagtgctgtaaattgtgaaaagtagaaat

SEQ ID NO: 563533 - DNA, 33 bp, Homo sapien
tggcgctatggactcaccttttgaaattgcttg

SEQ ID NO: 563534 - DNA, 33 bp, Homo sapien
tggcgctatggactcatcttttgaaattgcttg

SEQ ID NO: 563535 - DNA, 33 bp, Homo sapien
tcggtcttaaactgagaaagctgttggctttgc

SEQ ID NO: 563536 - DNA, 33 bp, Homo sapien
tcggtcttaaactgaggaagctgttggctttgc

SEQ ID NO: 563537 - DNA, 33 bp, Homo sapien
gattacgaactctcagaatccggcctgcttccc

SEQ ID NO: 563538 - DNA, 33 bp, Homo sapien
gattacgaactctcaggatccggcctgcttccc

SEQ ID NO: 563539 - DNA, 33 bp, Homo sapien
ttgtacatggctgtaactgaacctgtgagcaat

SEQ ID NO: 563540 - DNA, 33 bp, Homo sapien
ttgtacatggctgtaagtgaacctgtgagcaat

SEQ ID NO: 563541 - DNA, 33 bp, Homo sapien
atctgaggctcaaggagatcaaatgaatttggt

SEQ ID NO: 563542 - DNA, 33 bp, Homo sapien
atctgaggctcaaggatatcaaatgaatttggt

SEQ ID NO: 563543 - DNA, 33 bp, Homo sapien
caatgttgactagggaaaccactcaagactact

SEQ ID NO: 563544 - DNA, 33 bp, Homo sapien
caatgttgactagggataccactcaagactact

SEQ ID NO: 563545 - DNA, 33 bp, Homo sapien
tctgagaggcatttcacccagttctaccgccat

SEQ ID NO: 563546 - DNA, 33 bp, Homo sapien
tctgagaggcatttcatccagttctaccgccat

SEQ ID NO: 563547 - DNA, 33 bp, Homo sapien
ctgtagccctttgagcagagccaatctttatct

SEQ ID NO: 563548 - DNA, 33 bp, Homo sapien
ctgtagccctttgagcggagccaatctttatct

SEQ ID NO: 563549 - DNA, 33 bp, Homo sapien
gccataaagaacttcactgaagacataaaaggt

SEQ ID NO: 563550 - DNA, 33 bp, Homo sapien
gccataaagaacttcagtgaagacataaaaggt

SEQ ID NO: 563551 - DNA, 33 bp, Homo sapien
tatttcatgcccattcccaagctaagcatttgc

SEQ ID NO: 563552 - DNA, 33 bp, Homo sapien
tatttcatgcccattctcaagctaagcatttgc

SEQ ID NO: 563553 - DNA, 33 bp, Homo sapien
cttaggactggttaacacacttgttttagccca

SEQ ID NO: 563554 - DNA, 33 bp, Homo sapien
cttaggactggttaacccacttgttttagccca

SEQ ID NO: 563555 - DNA, 33 bp, Homo sapien
tccctccgctggctaagaaaactgcttagcttt

SEQ ID NO: 563556 - DNA, 33 bp, Homo sapien
tccctccgctggctaataaaactgcttagcttt

SEQ ID NO: 563557 - DNA, 33 bp, Homo sapien
ggaatttgttataaggaaagatgaatgtacaag

SEQ ID NO: 563558 - DNA, 33 bp, Homo sapien
ggaatttgttataaggcaagatgaatgtacaag

SEQ ID NO: 563559 - DNA, 33 bp, Homo sapien
agtcttggtgaaataaagtcacaggctcccaga

SEQ ID NO: 563560 - DNA, 33 bp, Homo sapien
agtcttggtgaaataatgtcacaggctcccaga

SEQ ID NO: 563561 - DNA, 33 bp, Homo sapien
acaaggagaatgactaactaaagaggactggct

SEQ ID NO: 563562 - DNA, 33 bp, Homo sapien
acaaggagaatgactacctaaagaggactggct

SEQ ID NO: 563563 - DNA, 33 bp, Homo sapien
tactccatcatttccaacagcaaacaaatatgc

SEQ ID NO: 563564 - DNA, 33 bp, Homo sapien
tactccatcatttccatcagcaaacaaatatgc

SEQ ID NO: 563565 - DNA, 33 bp, Homo sapien
gctccccactgctgccaccaaaccatttctcca

SEQ ID NO: 563566 - DNA, 33 bp, Homo sapien
gctccccactgctgccgccaaaccatttctcca

SEQ ID NO: 563567 - DNA, 33 bp, Homo sapien
cagagggagacggcacaaggttgagcatctaag

SEQ ID NO: 563568 - DNA, 33 bp, Homo sapien
cagagggagacggcacgaggttgagcatctaag

SEQ ID NO: 563569 - DNA, 33 bp, Homo sapien
tttgttgctctccatcagaatattttcaggtct

SEQ ID NO: 563570 - DNA, 33 bp, Homo sapien
tttgttgctctccatccgaatattttcaggtct

SEQ ID NO: 563571 - DNA, 33 bp, Homo sapien
tctgtcagacccacgcaatccactcccaggccg

SEQ ID NO: 563572 - DNA, 33 bp, Homo sapien
tctgtcagacccacgcgatccactcccaggccg

SEQ ID NO: 563573 - DNA, 33 bp, Homo sapien
gaggcactgctgaagcaagcaggagatgggcct

SEQ ID NO: 563574 - DNA, 33 bp, Homo sapien
gaggcactgctgaagcgagcaggagatgggcct

SEQ ID NO: 563575 - DNA, 33 bp, Homo sapien
cttcaaggagatgtcaagaaagccagtctagag

SEQ ID NO: 563576 - DNA, 33 bp, Homo sapien
cttcaaggagatgtcaggaaagccagtctagag

SEQ ID NO: 563577 - DNA, 33 bp, Homo sapien
gacctcgacacttgcaagaggaccatgaatgct

SEQ ID NO: 563578 - DNA, 33 bp, Homo sapien
gacctcgacacttgcatgaggaccatgaatgct

SEQ ID NO: 563579 - DNA, 33 bp, Homo sapien
tttctcctttggactacaggagaggttctaatc

SEQ ID NO: 563580 - DNA, 33 bp, Homo sapien
tttctcctttggactagaggagaggttctaatc

SEQ ID NO: 563581 - DNA, 33 bp, Homo sapien
gtgggaccaccgtttcgccaggcacccagctga

SEQ ID NO: 563582 - DNA, 33 bp, Homo sapien
gtgggaccaccgtttctccaggcacccagctga

SEQ ID NO: 563583 - DNA, 33 bp, Homo sapien
tagagcaatgggaagccatttgcatttctaaaa

SEQ ID NO: 563584 - DNA, 33 bp, Homo sapien
tagagcaatgggaagctatttgcatttctaaaa

SEQ ID NO: 563585 - DNA, 33 bp, Homo sapien
ggttctgtcctcacagaagaaagaacaatcctc

SEQ ID NO: 563586 - DNA, 33 bp, Homo sapien
ggttctgtcctcacaggagaaagaacaatcctc

SEQ ID NO: 563587 - DNA, 33 bp, Homo sapien
ggacaccacaagcacacggttcagtcaatagga

SEQ ID NO: 563588 - DNA, 33 bp, Homo sapien
ggacaccacaagcacatggttcagtcaatagga

SEQ ID NO: 563589 - DNA, 33 bp, Homo sapien
aaaaaagcaaagaagacgtatgcgggtttctgc

SEQ ID NO: 563590 - DNA, 33 bp, Homo sapien
aaaaaagcaaagaagatgtatgcgggtttctgc

SEQ ID NO: 563591 - DNA, 33 bp, Homo sapien
tcctctgcttcttgaacgggaaaaatgaatgac

SEQ ID NO: 563592 - DNA, 33 bp, Homo sapien
tcctctgcttcttgaatgggaaaaatgaatgac

SEQ ID NO: 563593 - DNA, 33 bp, Homo sapien
tttggaaatggtcacaaaaaagtacaatctttt

SEQ ID NO: 563594 - DNA, 33 bp, Homo sapien
tttggaaatggtcacagaaaagtacaatctttt

SEQ ID NO: 563595 - DNA, 33 bp, Homo sapien
agagaggaacttcagcacaaccgagccctgggt

SEQ ID NO: 563596 - DNA, 33 bp, Homo sapien
agagaggaacttcagcgcaaccgagccctgggt

SEQ ID NO: 563597 - DNA, 33 bp, Homo sapien
aacgtgaactaaaccacgtctaatgttgatcct

SEQ ID NO: 563598 - DNA, 33 bp, Homo sapien
aacgtgaactaaaccatgtctaatgttgatcct

SEQ ID NO: 563599 - DNA, 33 bp, Homo sapien
ggaagtaggaggaaaaagtttcacttcattctt

SEQ ID NO: 563600 - DNA, 33 bp, Homo sapien
ggaagtaggaggaaaaggtttcacttcattctt

SEQ ID NO: 563601 - DNA, 33 bp, Homo sapien
gaatttcatgaaaagcacaaaagtttccctctg

SEQ ID NO: 563602 - DNA, 33 bp, Homo sapien
gaatttcatgaaaagcgcaaaagtttccctctg

SEQ ID NO: 563603 - DNA, 33 bp, Homo sapien
ggctacagagaagaataaatatcctacaacctt

SEQ ID NO: 563604 - DNA, 33 bp, Homo sapien
ggctacagagaagaatcaatatcctacaacctt

SEQ ID NO: 563605 - DNA, 33 bp, Homo sapien
taggatatgctgggtaacaaacagcccccgaag

SEQ ID NO: 563606 - DNA, 33 bp, Homo sapien
taggatatgctgggtagcaaacagcccccgaag

SEQ ID NO: 563607 - DNA, 33 bp, Homo sapien
attgcatcctgatgtacctttcaagaaatgctg

SEQ ID NO: 563608 - DNA, 33 bp, Homo sapien
attgcatcctgatgtatctttcaagaaatgctg

SEQ ID NO: 563609 - DNA, 33 bp, Homo sapien
caggaattgcaccgaaagatggcagtctggatg

SEQ ID NO: 563610 - DNA, 33 bp, Homo sapien
caggaattgcaccgaaggatggcagtctggatg

SEQ ID NO: 563611 - DNA, 33 bp, Homo sapien
catgacaaaatacccacgcaacttgagggattg

SEQ ID NO: 563612 - DNA, 33 bp, Homo sapien
catgacaaaatacccatgcaacttgagggattg

SEQ ID NO: 563613 - DNA, 33 bp, Homo sapien
cagctgtccaagaaaaaagtgtatgcggacagt

SEQ ID NO: 563614 - DNA, 33 bp, Homo sapien
cagctgtccaagaaaagagtgtatgcggacagt

SEQ ID NO: 563615 - DNA, 33 bp, Homo sapien
agcccagaattctccacccaaatagccatgagc

SEQ ID NO: 563616 - DNA, 33 bp, Homo sapien
agcccagaattctccatccaaatagccatgagc

SEQ ID NO: 563617 - DNA, 33 bp, Homo sapien
tggctggacacagtacaaaggggcttctttatt

SEQ ID NO: 563618 - DNA, 33 bp, Homo sapien
tggctggacacagtacgaaggggcttctttatt

SEQ ID NO: 563619 - DNA, 33 bp, Homo sapien
tgcaggggctcaaaaaatgctttctagatgtcc

SEQ ID NO: 563620 - DNA, 33 bp, Homo sapien
tgcaggggctcaaaaagtgctttctagatgtcc

SEQ ID NO: 563621 - DNA, 33 bp, Homo sapien
caccactccaacgcagaagctaaatcacctgtg

SEQ ID NO: 563622 - DNA, 33 bp, Homo sapien
caccactccaacgcagcagctaaatcacctgtg

SEQ ID NO: 563623 - DNA, 33 bp, Homo sapien
aggctgcaagccttagaagcaaagcaaactcgt

SEQ ID NO: 563624 - DNA, 33 bp, Homo sapien
aggctgcaagccttaggagcaaagcaaactcgt

SEQ ID NO: 563625 - DNA, 33 bp, Homo sapien
cagaaccatctgtgtccccagacttctacccag

SEQ ID NO: 563626 - DNA, 33 bp, Homo sapien
cagaaccatctgtgtctccagacttctacccag

SEQ ID NO: 563627 - DNA, 33 bp, Homo sapien
aagggaacattcaagccgcgatgttcagaaagt

SEQ ID NO: 563628 - DNA, 33 bp, Homo sapien
aagggaacattcaagctgcgatgttcagaaagt

SEQ ID NO: 563629 - DNA, 33 bp, Homo sapien
aattcccagaccagataaaattccctgggtcca

SEQ ID NO: 563630 - DNA, 33 bp, Homo sapien
aattcccagaccagatgaaattccctgggtcca

SEQ ID NO: 563631 - DNA, 33 bp, Homo sapien
ggggactataaattagcaaactgaccagtgccg

SEQ ID NO: 563632 - DNA, 33 bp, Homo sapien
ggggactataaattaggaaactgaccagtgccg

SEQ ID NO: 563633 - DNA, 33 bp, Homo sapien
ctcgtttatgtcatcaacttgaaatcaagaagc

SEQ ID NO: 563634 - DNA, 33 bp, Homo sapien
ctcgtttatgtcatcagcttgaaatcaagaagc

SEQ ID NO: 563635 - DNA, 33 bp, Homo sapien
ttaccaaaacaagggaaggatgagatgttctgg

SEQ ID NO: 563636 - DNA, 33 bp, Homo sapien
ttaccaaaacaagggacggatgagatgttctgg

SEQ ID NO: 563637 - DNA, 33 bp, Homo sapien
ggcatttatccaccaccaatcccctgtctgtct

SEQ ID NO: 563638 - DNA, 33 bp, Homo sapien
ggcatttatccaccactaatcccctgtctgtct

SEQ ID NO: 563639 - DNA, 33 bp, Homo sapien
agccctggctatgccacgtactgcctatgtgac

SEQ ID NO: 563640 - DNA, 33 bp, Homo sapien
agccctggctatgccatgtactgcctatgtgac

SEQ ID NO: 563641 - DNA, 33 bp, Homo sapien
ctgaaataaaaataacaacaatggccaacaatt

SEQ ID NO: 563642 - DNA, 33 bp, Homo sapien
ctgaaataaaaataacgacaatggccaacaatt

SEQ ID NO: 563643 - DNA, 33 bp, Homo sapien
gatacatggggtttataagaagagaaaagcaag

SEQ ID NO: 563644 - DNA, 33 bp, Homo sapien
gatacatggggtttatgagaagagaaaagcaag

SEQ ID NO: 563645 - DNA, 33 bp, Homo sapien
caggacagcaacaaagaaaagtgggaatttaga

SEQ ID NO: 563646 - DNA, 33 bp, Homo sapien
caggacagcaacaaagtaaagtgggaatttaga

SEQ ID NO: 563647 - DNA, 33 bp, Homo sapien
gaaactcaagggccccaaagataacttgtcctt

SEQ ID NO: 563648 - DNA, 33 bp, Homo sapien
gaaactcaagggccccgaagataacttgtcctt

SEQ ID NO: 563649 - DNA, 33 bp, Homo sapien
tgcatggtggtgacaagtattgacatggcaaag

SEQ ID NO: 563650 - DNA, 33 bp, Homo sapien
tgcatggtggtgacaattattgacatggcaaag

SEQ ID NO: 563651 - DNA, 33 bp, Homo sapien
agccaaagagaaattaacttgagaaataggggc

SEQ ID NO: 563652 - DNA, 33 bp, Homo sapien
agccaaagagaaattagcttgagaaataggggc

SEQ ID NO: 563653 - DNA, 33 bp, Homo sapien
ggtggtaaattgactgaaaaccacgcctaggac

SEQ ID NO: 563654 - DNA, 33 bp, Homo sapien
ggtggtaaattgactggaaaccacgcctaggac

SEQ ID NO: 563655 - DNA, 33 bp, Homo sapien
gcttatgactgcaagaagaacattagagtatca

SEQ ID NO: 563656 - DNA, 33 bp, Homo sapien
gcttatgactgcaagatgaacattagagtatca

SEQ ID NO: 563657 - DNA, 33 bp, Homo sapien
gtagcaactaaatcacaattagagaaagataca

SEQ ID NO: 563658 - DNA, 33 bp, Homo sapien
gtagcaactaaatcacgattagagaaagataca

SEQ ID NO: 563659 - DNA, 33 bp, Homo sapien
tgttgttaagcctaaacaggaaaccatgcaaag

SEQ ID NO: 563660 - DNA, 33 bp, Homo sapien
tgttgttaagcctaaataggaaaccatgcaaag

SEQ ID NO: 563661 - DNA, 33 bp, Homo sapien
aagaaaaatagatgcacggctatcctagaatgg

SEQ ID NO: 563662 - DNA, 33 bp, Homo sapien
aagaaaaatagatgcatggctatcctagaatgg

SEQ ID NO: 563663 - DNA, 33 bp, Homo sapien
tgtcaatagatggacacaggggttagcttgcaa

SEQ ID NO: 563664 - DNA, 33 bp, Homo sapien
tgtcaatagatggacataggggttagcttgcaa

SEQ ID NO: 563665 - DNA, 33 bp, Homo sapien
agaaactaaaaggaaaatataccaggagctgtt

SEQ ID NO: 563666 - DNA, 33 bp, Homo sapien
agaaactaaaaggaaagtataccaggagctgtt

SEQ ID NO: 563667 - DNA, 33 bp, Homo sapien
agtgaaaaaacaataacgagtaacttccaagaa

SEQ ID NO: 563668 - DNA, 33 bp, Homo sapien
agtgaaaaaacaataatgagtaacttccaagaa

SEQ ID NO: 563669 - DNA, 33 bp, Homo sapien
ccgcatgtttcctctccaactaatgaaatctta

SEQ ID NO: 563670 - DNA, 33 bp, Homo sapien
ccgcatgtttcctctctaactaatgaaatctta

SEQ ID NO: 563671 - DNA, 33 bp, Homo sapien
aataatcagacgaaaacccacaggaccaacctc

SEQ ID NO: 563672 - DNA, 33 bp, Homo sapien
aataatcagacgaaaatccacaggaccaacctc

SEQ ID NO: 563673 - DNA, 33 bp, Homo sapien
tgtcacctacctatgaccgatgtgaacagctct

SEQ ID NO: 563674 - DNA, 33 bp, Homo sapien
tgtcacctacctatgatcgatgtgaacagctct

SEQ ID NO: 563675 - DNA, 33 bp, Homo sapien
caagctgggatgaaccacgttactaatgagtga

SEQ ID NO: 563676 - DNA, 33 bp, Homo sapien
caagctgggatgaaccgcgttactaatgagtga

SEQ ID NO: 563677 - DNA, 33 bp, Homo sapien
tttcctgtcatgtgccaaactggagattttcaa

SEQ ID NO: 563678 - DNA, 33 bp, Homo sapien
tttcctgtcatgtgcccaactggagattttcaa

SEQ ID NO: 563679 - DNA, 33 bp, Homo sapien
gaaggtcttctaaatggaaatcaaagtaaggag

SEQ ID NO: 563680 - DNA, 33 bp, Homo sapien
gaaggtcttctaaatgtaaatcaaagtaaggag

SEQ ID NO: 563681 - DNA, 33 bp, Homo sapien
tctctgaaaaatgcaaaggaaagtggacatcag

SEQ ID NO: 563682 - DNA, 33 bp, Homo sapien
tctctgaaaaatgcaagggaaagtggacatcag

SEQ ID NO: 563683 - DNA, 33 bp, Homo sapien
ttctccaggagttattgaaaggatcaaaatgag

SEQ ID NO: 563684 - DNA, 33 bp, Homo sapien
ttctccaggagttatttaaaggatcaaaatgag

SEQ ID NO: 563685 - DNA, 33 bp, Homo sapien
ttgtgccagctgaaggaccctgtgaactctgat

SEQ ID NO: 563686 - DNA, 33 bp, Homo sapien
ttgtgccagctgaagggccctgtgaactctgat

SEQ ID NO: 563687 - DNA, 33 bp, Homo sapien
tggatctgactcataacggtcaacctcagaatg

SEQ ID NO: 563688 - DNA, 33 bp, Homo sapien
tggatctgactcataatggtcaacctcagaatg

SEQ ID NO: 563689 - DNA, 33 bp, Homo sapien
gcagggatttcatgtacgtgatgagagactcct

SEQ ID NO: 563690 - DNA, 33 bp, Homo sapien
gcagggatttcatgtatgtgatgagagactcct

SEQ ID NO: 563691 - DNA, 33 bp, Homo sapien
gatcagatttacttaaagctccatcatcacaca

SEQ ID NO: 563692 - DNA, 33 bp, Homo sapien
gatcagatttacttaaggctccatcatcacaca

SEQ ID NO: 563693 - DNA, 33 bp, Homo sapien
aggatgtcagaaagcaagaggtccaatccctca

SEQ ID NO: 563694 - DNA, 33 bp, Homo sapien
aggatgtcagaaagcaggaggtccaatccctca

SEQ ID NO: 563695 - DNA, 33 bp, Homo sapien
tatgagacataagtgaccttgcatggctcccag

SEQ ID NO: 563696 - DNA, 33 bp, Homo sapien
tatgagacataagtgatcttgcatggctcccag

SEQ ID NO: 563697 - DNA, 33 bp, Homo sapien
tgaaggcaccgtgctgaagagaccatacatgga

SEQ ID NO: 563698 - DNA, 33 bp, Homo sapien
tgaaggcaccgtgctggagagaccatacatgga

SEQ ID NO: 563699 - DNA, 33 bp, Homo sapien
atcatagatctacaacccaatgcaccaaaggga

SEQ ID NO: 563700 - DNA, 33 bp, Homo sapien
atcatagatctacaactcaatgcaccaaaggga

SEQ ID NO: 563701 - DNA, 33 bp, Homo sapien
aagtagatttgtagaaaggttgttggttggttt

SEQ ID NO: 563702 - DNA, 33 bp, Homo sapien
aagtagatttgtagaagggttgttggttggttt

SEQ ID NO: 563703 - DNA, 33 bp, Homo sapien
gtgttgtttcttagaaatggtacaaccgcacat

SEQ ID NO: 563704 - DNA, 33 bp, Homo sapien
gtgttgtttcttagaagtggtacaaccgcacat

SEQ ID NO: 563705 - DNA, 33 bp, Homo sapien
gtggcccccaggtatcaaaagtgtgctgtttcc

SEQ ID NO: 563706 - DNA, 33 bp, Homo sapien
gtggcccccaggtatccaaagtgtgctgtttcc

SEQ ID NO: 563707 - DNA, 33 bp, Homo sapien
acagaggcttaggacaacagaaagacttaccca

SEQ ID NO: 563708 - DNA, 33 bp, Homo sapien
acagaggcttaggacagcagaaagacttaccca

SEQ ID NO: 563709 - DNA, 33 bp, Homo sapien
atcaggctgttatttcaacgagcttgtagtcag

SEQ ID NO: 563710 - DNA, 33 bp, Homo sapien
atcaggctgttatttcgacgagcttgtagtcag

SEQ ID NO: 563711 - DNA, 33 bp, Homo sapien
tcaacaagggactaaccatgtgcactctgcagt

SEQ ID NO: 563712 - DNA, 33 bp, Homo sapien
tcaacaagggactaacgatgtgcactctgcagt

SEQ ID NO: 563713 - DNA, 33 bp, Homo sapien
tttattgtccaacacaaatcaaacctagatgtg

SEQ ID NO: 563714 - DNA, 33 bp, Homo sapien
tttattgtccaacacagatcaaacctagatgtg

SEQ ID NO: 563715 - DNA, 33 bp, Homo sapien
taacaacgaagaagaaaagttgattgtgctttt

SEQ ID NO: 563716 - DNA, 33 bp, Homo sapien
taacaacgaagaagaatagttgattgtgctttt

SEQ ID NO: 563717 - DNA, 33 bp, Homo sapien
tgctgagctaaatgttaaacaggaatgaatttg

SEQ ID NO: 563718 - DNA, 33 bp, Homo sapien
tgctgagctaaatgttcaacaggaatgaatttg

SEQ ID NO: 563719 - DNA, 33 bp, Homo sapien
gccttagcaaacagtaagtgcttcaacgttgct

SEQ ID NO: 563720 - DNA, 33 bp, Homo sapien
gccttagcaaacagtaggtgcttcaacgttgct

SEQ ID NO: 563721 - DNA, 33 bp, Homo sapien
tctcaagtatttcatcaatcactgacttctttc

SEQ ID NO: 563722 - DNA, 33 bp, Homo sapien
tctcaagtatttcatccatcactgacttctttc

SEQ ID NO: 563723 - DNA, 33 bp, Homo sapien
agagaacaggataataatactatacagtgaggg

SEQ ID NO: 563724 - DNA, 33 bp, Homo sapien
agagaacaggataatactactatacagtgaggg

SEQ ID NO: 563725 - DNA, 33 bp, Homo sapien
agtctgcagaatagtacgatgaaccccatgcat

SEQ ID NO: 563726 - DNA, 33 bp, Homo sapien
agtctgcagaatagtatgatgaaccccatgcat

SEQ ID NO: 563727 - DNA, 33 bp, Homo sapien
tggtgttctaattctacgcttcgtgtcttatga

SEQ ID NO: 563728 - DNA, 33 bp, Homo sapien
tggtgttctaattctatgcttcgtgtcttatga

SEQ ID NO: 563729 - DNA, 33 bp, Homo sapien
ctccaccctttgctcacgaagcatttatctcat

SEQ ID NO: 563730 - DNA, 33 bp, Homo sapien
ctccaccctttgctcatgaagcatttatctcat

SEQ ID NO: 563731 - DNA, 33 bp, Homo sapien
gagcaaagggtggagacgggagattactggttc

SEQ ID NO: 563732 - DNA, 33 bp, Homo sapien
gagcaaagggtggagatgggagattactggttc

SEQ ID NO: 563733 - DNA, 33 bp, Homo sapien
ctgaaacaactatatagctatgtgccaaataat

SEQ ID NO: 563734 - DNA, 33 bp, Homo sapien
ctgaaacaactatatatctatgtgccaaataat

SEQ ID NO: 563735 - DNA, 33 bp, Homo sapien
ctgaatcggggagtgaaggtcataaaatcagcc

SEQ ID NO: 563736 - DNA, 33 bp, Homo sapien
ctgaatcggggagtgagggtcataaaatcagcc

SEQ ID NO: 563737 - DNA, 33 bp, Homo sapien
tgcagtgtgagtggcaaacattaagtggatgag

SEQ ID NO: 563738 - DNA, 33 bp, Homo sapien
tgcagtgtgagtggcagacattaagtggatgag

SEQ ID NO: 563739 - DNA, 33 bp, Homo sapien
ctaaaacatcacttcaactcatcatctgcataa

SEQ ID NO: 563740 - DNA, 33 bp, Homo sapien
ctaaaacatcacttcatctcatcatctgcataa

SEQ ID NO: 563741 - DNA, 33 bp, Homo sapien
ggagtgcagcccccatgatgcctgttggtactt

SEQ ID NO: 563742 - DNA, 33 bp, Homo sapien
ggagtgcagcccccattatgcctgttggtactt

SEQ ID NO: 563743 - DNA, 33 bp, Homo sapien
acctatactcatgtaacccacacttcaacaaaa

SEQ ID NO: 563744 - DNA, 33 bp, Homo sapien
acctatactcatgtaatccacacttcaacaaaa

SEQ ID NO: 563745 - DNA, 33 bp, Homo sapien
accatggcctgtctcccaatcaactctccactc

SEQ ID NO: 563746 - DNA, 33 bp, Homo sapien
accatggcctgtctccgaatcaactctccactc

SEQ ID NO: 563747 - DNA, 33 bp, Homo sapien
atccgcatcatttttaaagactccttcaatgtt

SEQ ID NO: 563748 - DNA, 33 bp, Homo sapien
atccgcatcatttttacagactccttcaatgtt

SEQ ID NO: 563749 - DNA, 33 bp, Homo sapien
ataaaagacccatgaactgtgaatgaactctac

SEQ ID NO: 563750 - DNA, 33 bp, Homo sapien
ataaaagacccatgaattgtgaatgaactctac

SEQ ID NO: 563751 - DNA, 33 bp, Homo sapien
aatctcagtcactgttcaaaaatggagctggaa

SEQ ID NO: 563752 - DNA, 33 bp, Homo sapien
aatctcagtcactgtttaaaaatggagctggaa

SEQ ID NO: 563753 - DNA, 33 bp, Homo sapien
ttcctgggttggcaatcattatgcatggaagca

SEQ ID NO: 563754 - DNA, 33 bp, Homo sapien
ttcctgggttggcaattattatgcatggaagca

SEQ ID NO: 563755 - DNA, 33 bp, Homo sapien
tcttcatataacttccaacttaccctatttatc

SEQ ID NO: 563756 - DNA, 33 bp, Homo sapien
tcttcatataacttcccacttaccctatttatc

SEQ ID NO: 563757 - DNA, 33 bp, Homo sapien
tgtagttttctggaatcagttactggattgatt

SEQ ID NO: 563758 - DNA, 33 bp, Homo sapien
tgtagttttctggaattagttactggattgatt

SEQ ID NO: 563759 - DNA, 33 bp, Homo sapien
cattggtggttagagccatgatgaccaaacaca

SEQ ID NO: 563760 - DNA, 33 bp, Homo sapien
cattggtggttagagctatgatgaccaaacaca

SEQ ID NO: 563761 - DNA, 33 bp, Homo sapien
atatcttgcattccatcatacagtggcaaagcg

SEQ ID NO: 563762 - DNA, 33 bp, Homo sapien
atatcttgcattccatgatacagtggcaaagcg

SEQ ID NO: 563763 - DNA, 33 bp, Homo sapien
gccctgcaactgttatgaacaaatatttataac

SEQ ID NO: 563764 - DNA, 33 bp, Homo sapien
gccctgcaactgttattaacaaatatttataac

SEQ ID NO: 563765 - DNA, 33 bp, Homo sapien
tacaaaggtgaaaaaccgtacccaacatataaa

SEQ ID NO: 563766 - DNA, 33 bp, Homo sapien
tacaaaggtgaaaaactgtacccaacatataaa

SEQ ID NO: 563767 - DNA, 33 bp, Homo sapien
aaaggcaaatcatttgaatcaggtaatgaagac

SEQ ID NO: 563768 - DNA, 33 bp, Homo sapien
aaaggcaaatcatttgtatcaggtaatgaagac

SEQ ID NO: 563769 - DNA, 33 bp, Homo sapien
ggacaaaggcttttaacgaaatttccaggaaac

SEQ ID NO: 563770 - DNA, 33 bp, Homo sapien
ggacaaaggcttttaatgaaatttccaggaaac

SEQ ID NO: 563771 - DNA, 33 bp, Homo sapien
agttatgactatcgataaaggtgagaatatttt

SEQ ID NO: 563772 - DNA, 33 bp, Homo sapien
agttatgactatcgatgaaggtgagaatatttt

SEQ ID NO: 563773 - DNA, 33 bp, Homo sapien
tgtagagtttaggtagcaagctgcctgtagagt

SEQ ID NO: 563774 - DNA, 33 bp, Homo sapien
tgtagagtttaggtagtaagctgcctgtagagt

SEQ ID NO: 563775 - DNA, 33 bp, Homo sapien
ttttcacctagagtatcagagagctagagaacc

SEQ ID NO: 563776 - DNA, 33 bp, Homo sapien
ttttcacctagagtattagagagctagagaacc

SEQ ID NO: 563777 - DNA, 33 bp, Homo sapien
gggacaggagatcatcagacattttgcctacta

SEQ ID NO: 563778 - DNA, 33 bp, Homo sapien
gggacaggagatcatcggacattttgcctacta

SEQ ID NO: 563779 - DNA, 33 bp, Homo sapien
gatatgaaagacggggaagtagatatttaaaca

SEQ ID NO: 563780 - DNA, 33 bp, Homo sapien
gatatgaaagacgggggagtagatatttaaaca

SEQ ID NO: 563781 - DNA, 33 bp, Homo sapien
gctctatttccttataaattctccagtcatttg

SEQ ID NO: 563782 - DNA, 33 bp, Homo sapien
gctctatttccttatatattctccagtcatttg

SEQ ID NO: 563783 - DNA, 33 bp, Homo sapien
agagtacatttaaagcaacatataccacgattg

SEQ ID NO: 563784 - DNA, 33 bp, Homo sapien
agagtacatttaaagcgacatataccacgattg

SEQ ID NO: 563785 - DNA, 33 bp, Homo sapien
aaagagcctggcataagaactaagacttcatat

SEQ ID NO: 563786 - DNA, 33 bp, Homo sapien
aaagagcctggcataataactaagacttcatat

SEQ ID NO: 563787 - DNA, 33 bp, Homo sapien
aggacctacacttgtaacaatgactctgtaata

SEQ ID NO: 563788 - DNA, 33 bp, Homo sapien
aggacctacacttgtagcaatgactctgtaata

SEQ ID NO: 563789 - DNA, 33 bp, Homo sapien
cctcagtgagaccagacaggagaagactgtgat

SEQ ID NO: 563790 - DNA, 33 bp, Homo sapien
cctcagtgagaccagataggagaagactgtgat

SEQ ID NO: 563791 - DNA, 33 bp, Homo sapien
gagatgatcaatctgggaggaaaagaagccaga

SEQ ID NO: 563792 - DNA, 33 bp, Homo sapien
gagatgatcaatctggtaggaaaagaagccaga

SEQ ID NO: 563793 - DNA, 33 bp, Homo sapien
ccctccattgcttagcggagtatgggactcagc

SEQ ID NO: 563794 - DNA, 33 bp, Homo sapien
ccctccattgcttagctgagtatgggactcagc

SEQ ID NO: 563795 - DNA, 33 bp, Homo sapien
acacgctgacctccagaaataggctgattttgc

SEQ ID NO: 563796 - DNA, 33 bp, Homo sapien
acacgctgacctccaggaataggctgattttgc

SEQ ID NO: 563797 - DNA, 33 bp, Homo sapien
tttgccctaaagaagcaatattatggcttctgt

SEQ ID NO: 563798 - DNA, 33 bp, Homo sapien
tttgccctaaagaagcgatattatggcttctgt

SEQ ID NO: 563799 - DNA, 33 bp, Homo sapien
catctgctgtcctgaagaaaactacaggttgca

SEQ ID NO: 563800 - DNA, 33 bp, Homo sapien
catctgctgtcctgaataaaactacaggttgca

SEQ ID NO: 563801 - DNA, 33 bp, Homo sapien
gtaagagatttggatgcaggcaaccaccattat

SEQ ID NO: 563802 - DNA, 33 bp, Homo sapien
gtaagagatttggatgtaggcaaccaccattat

SEQ ID NO: 563803 - DNA, 33 bp, Homo sapien
tgtcctatcaacttccactataaaaattatcca

SEQ ID NO: 563804 - DNA, 33 bp, Homo sapien
tgtcctatcaacttccgctataaaaattatcca

SEQ ID NO: 563805 - DNA, 33 bp, Homo sapien
ttcagctcatactgtccacttggccttgtcaac

SEQ ID NO: 563806 - DNA, 33 bp, Homo sapien
ttcagctcatactgtcgacttggccttgtcaac

SEQ ID NO: 563807 - DNA, 33 bp, Homo sapien
cttcctgttagataaaacatccctgtgtttgac

SEQ ID NO: 563808 - DNA, 33 bp, Homo sapien
cttcctgttagataaaccatccctgtgtttgac

SEQ ID NO: 563809 - DNA, 33 bp, Homo sapien
caggactctgagatacaatatttcattaggtta

SEQ ID NO: 563810 - DNA, 33 bp, Homo sapien
caggactctgagatacgatatttcattaggtta

SEQ ID NO: 563811 - DNA, 33 bp, Homo sapien
caccaaccagggtagaacatccattggactggg

SEQ ID NO: 563812 - DNA, 33 bp, Homo sapien
caccaaccagggtagaccatccattggactggg

SEQ ID NO: 563813 - DNA, 33 bp, Homo sapien
ccagaaattgaagaaacacacttccagttttca

SEQ ID NO: 563814 - DNA, 33 bp, Homo sapien
ccagaaattgaagaaagacacttccagttttca

SEQ ID NO: 563815 - DNA, 33 bp, Homo sapien
gctagatggccgctgcaaccactgagatagaac

SEQ ID NO: 563816 - DNA, 33 bp, Homo sapien
gctagatggccgctgcgaccactgagatagaac

SEQ ID NO: 563817 - DNA, 33 bp, Homo sapien
ctgtagctaaactaacaagagagcaatcaaaag

SEQ ID NO: 563818 - DNA, 33 bp, Homo sapien
ctgtagctaaactaacgagagagcaatcaaaag

SEQ ID NO: 563819 - DNA, 33 bp, Homo sapien
ctcaccaatgatggaaagaagttgtggataaac

SEQ ID NO: 563820 - DNA, 33 bp, Homo sapien
ctcaccaatgatggaaggaagttgtggataaac

SEQ ID NO: 563821 - DNA, 33 bp, Homo sapien
aaaaatagtcgtatcacgtgcaagaaacagaga

SEQ ID NO: 563822 - DNA, 33 bp, Homo sapien
aaaaatagtcgtatcatgtgcaagaaacagaga

SEQ ID NO: 563823 - DNA, 33 bp, Homo sapien
ggaatctttgaaattaggtctaaagcaatacat

SEQ ID NO: 563824 - DNA, 33 bp, Homo sapien
ggaatctttgaaattatgtctaaagcaatacat

SEQ ID NO: 563825 - DNA, 33 bp, Homo sapien
acttcctctggagcccactacaccacagagtcc

SEQ ID NO: 563826 - DNA, 33 bp, Homo sapien
acttcctctggagcccgctacaccacagagtcc

SEQ ID NO: 563827 - DNA, 33 bp, Homo sapien
gtgataatgagaactcgaattttcctgttcaga

SEQ ID NO: 563828 - DNA, 33 bp, Homo sapien
gtgataatgagaactctaattttcctgttcaga

SEQ ID NO: 563829 - DNA, 33 bp, Homo sapien
tctgttagcatggagaacttgaggtggaaatgc

SEQ ID NO: 563830 - DNA, 33 bp, Homo sapien
tctgttagcatggagagcttgaggtggaaatgc

SEQ ID NO: 563831 - DNA, 33 bp, Homo sapien
gaaggaagcttcccacacagtttgctaccacgc

SEQ ID NO: 563832 - DNA, 33 bp, Homo sapien
gaaggaagcttcccacgcagtttgctaccacgc

SEQ ID NO: 563833 - DNA, 33 bp, Homo sapien
cccaccataggtgctcacttaagctgagccctt

SEQ ID NO: 563834 - DNA, 33 bp, Homo sapien
cccaccataggtgctcgcttaagctgagccctt

SEQ ID NO: 563835 - DNA, 33 bp, Homo sapien
gcagaacaagcaaaaacggacctaggatggtgg

SEQ ID NO: 563836 - DNA, 33 bp, Homo sapien
gcagaacaagcaaaaatggacctaggatggtgg

SEQ ID NO: 563837 - DNA, 33 bp, Homo sapien
agggagcctcagacgacgtagccggttggacca

SEQ ID NO: 563838 - DNA, 33 bp, Homo sapien
agggagcctcagacgatgtagccggttggacca

SEQ ID NO: 563839 - DNA, 33 bp, Homo sapien
gaggtggcaagattataaatgtttttgatattc

SEQ ID NO: 563840 - DNA, 33 bp, Homo sapien
gaggtggcaagattatcaatgtttttgatattc

SEQ ID NO: 563841 - DNA, 33 bp, Homo sapien
atgacctgcattgcccaatagaataaatgccat

SEQ ID NO: 563842 - DNA, 33 bp, Homo sapien
atgacctgcattgcccgatagaataaatgccat

SEQ ID NO: 563843 - DNA, 33 bp, Homo sapien
ttctagctgcagatcaataaggtgactttctgg

SEQ ID NO: 563844 - DNA, 33 bp, Homo sapien
ttctagctgcagatcagtaaggtgactttctgg

SEQ ID NO: 563845 - DNA, 33 bp, Homo sapien
tcattcattaactcaaatatggggatgtaaagg

SEQ ID NO: 563846 - DNA, 33 bp, Homo sapien
tcattcattaactcaactatggggatgtaaagg

SEQ ID NO: 563847 - DNA, 33 bp, Homo sapien
tagtgtgacatctgcccggagactgatcaaagc

SEQ ID NO: 563848 - DNA, 33 bp, Homo sapien
tagtgtgacatctgcctggagactgatcaaagc

SEQ ID NO: 563849 - DNA, 33 bp, Homo sapien
gtttacgactcccccagatttagtacttgccaa

SEQ ID NO: 563850 - DNA, 33 bp, Homo sapien
gtttacgactcccccatatttagtacttgccaa

SEQ ID NO: 563851 - DNA, 33 bp, Homo sapien
atagtcacaacattcaagttcctttctgaggag

SEQ ID NO: 563852 - DNA, 33 bp, Homo sapien
atagtcacaacattcaggttcctttctgaggag

SEQ ID NO: 563853 - DNA, 33 bp, Homo sapien
tggaaaaactgaaatacgggcaacagattaaag

SEQ ID NO: 563854 - DNA, 33 bp, Homo sapien
tggaaaaactgaaatatgggcaacagattaaag

SEQ ID NO: 563855 - DNA, 33 bp, Homo sapien
attcttcagaggaggccatctgttctccggccc

SEQ ID NO: 563856 - DNA, 33 bp, Homo sapien
attcttcagaggaggctatctgttctccggccc

SEQ ID NO: 563857 - DNA, 33 bp, Homo sapien
gtttattgaaaaaaacccgtgtatacatggact

SEQ ID NO: 563858 - DNA, 33 bp, Homo sapien
gtttattgaaaaaaactcgtgtatacatggact

SEQ ID NO: 563859 - DNA, 33 bp, Homo sapien
agttctgaattctaaccgtagctttttgggctt

SEQ ID NO: 563860 - DNA, 33 bp, Homo sapien
agttctgaattctaactgtagctttttgggctt

SEQ ID NO: 563861 - DNA, 33 bp, Homo sapien
cgacctcagctctcaaatcgaagtccgcttcct

SEQ ID NO: 563862 - DNA, 33 bp, Homo sapien
cgacctcagctctcaagtcgaagtccgcttcct

SEQ ID NO: 563863 - DNA, 33 bp, Homo sapien
actcagataggctggaagacatgaggtgcgtgg

SEQ ID NO: 563864 - DNA, 33 bp, Homo sapien
actcagataggctggaggacatgaggtgcgtgg

SEQ ID NO: 563865 - DNA, 33 bp, Homo sapien
tgctgaaatctggctacaccgaatagatgaacc

SEQ ID NO: 563866 - DNA, 33 bp, Homo sapien
tgctgaaatctggctataccgaatagatgaacc

SEQ ID NO: 563867 - DNA, 33 bp, Homo sapien
ttcaatgagtgaacggcactatacaaaaagcat

SEQ ID NO: 563868 - DNA, 33 bp, Homo sapien
ttcaatgagtgaacgggactatacaaaaagcat

SEQ ID NO: 563869 - DNA, 33 bp, Homo sapien
gaaaaagacaccagtaataacaccaaggcttgc

SEQ ID NO: 563870 - DNA, 33 bp, Homo sapien
gaaaaagacaccagtagtaacaccaaggcttgc

SEQ ID NO: 563871 - DNA, 33 bp, Homo sapien
attcctcccaagtttacatacagtgtccacgga

SEQ ID NO: 563872 - DNA, 33 bp, Homo sapien
attcctcccaagtttatatacagtgtccacgga

SEQ ID NO: 563873 - DNA, 33 bp, Homo sapien
aaagtcaggagacttaaacaaaaaaattcaggt

SEQ ID NO: 563874 - DNA, 33 bp, Homo sapien
aaagtcaggagacttacacaaaaaaattcaggt

SEQ ID NO: 563875 - DNA, 33 bp, Homo sapien
cccatgtgaagcaaaccgggcagagcatggatg

SEQ ID NO: 563876 - DNA, 33 bp, Homo sapien
cccatgtgaagcaaactgggcagagcatggatg

SEQ ID NO: 563877 - DNA, 33 bp, Homo sapien
tatgttgaagacttgaaacttagggtgtgggaa

SEQ ID NO: 563878 - DNA, 33 bp, Homo sapien
tatgttgaagacttgagacttagggtgtgggaa

SEQ ID NO: 563879 - DNA, 33 bp, Homo sapien
attcagaatgaggctacggaaagtgaagatgtc

SEQ ID NO: 563880 - DNA, 33 bp, Homo sapien
attcagaatgaggctatggaaagtgaagatgtc

SEQ ID NO: 563881 - DNA, 33 bp, Homo sapien
gacaggaagcaagtgaatatatgtcctgtgtgt

SEQ ID NO: 563882 - DNA, 33 bp, Homo sapien
gacaggaagcaagtgagtatatgtcctgtgtgt

SEQ ID NO: 563883 - DNA, 33 bp, Homo sapien
ttatttttacaggaacaaatgaaagcctctgcc

SEQ ID NO: 563884 - DNA, 33 bp, Homo sapien
ttatttttacaggaacgaatgaaagcctctgcc

SEQ ID NO: 563885 - DNA, 33 bp, Homo sapien
ataaaatctgtaaccccaaatatgctagtgatt

SEQ ID NO: 563886 - DNA, 33 bp, Homo sapien
ataaaatctgtaaccctaaatatgctagtgatt

SEQ ID NO: 563887 - DNA, 33 bp, Homo sapien
acttcaaaaatacatacaagttgatatccaatg

SEQ ID NO: 563888 - DNA, 33 bp, Homo sapien
acttcaaaaatacatagaagttgatatccaatg

SEQ ID NO: 563889 - DNA, 33 bp, Homo sapien
gcatgccagactaaaacctttttccaggctgtt

SEQ ID NO: 563890 - DNA, 33 bp, Homo sapien
gcatgccagactaaaatctttttccaggctgtt

SEQ ID NO: 563891 - DNA, 33 bp, Homo sapien
caatttatccggaatcaaagccacccacctcct

SEQ ID NO: 563892 - DNA, 33 bp, Homo sapien
caatttatccggaatcgaagccacccacctcct

SEQ ID NO: 563893 - DNA, 33 bp, Homo sapien
cgaggccatttctgtgacaaaacttactgactg

SEQ ID NO: 563894 - DNA, 33 bp, Homo sapien
cgaggccatttctgtggcaaaacttactgactg

SEQ ID NO: 563895 - DNA, 33 bp, Homo sapien
atgccttttcttgtccaaattcagaattccaga

SEQ ID NO: 563896 - DNA, 33 bp, Homo sapien
atgccttttcttgtcctaattcagaattccaga

SEQ ID NO: 563897 - DNA, 33 bp, Homo sapien
ccacccatctgcttcaaagccatgaggcccagg

SEQ ID NO: 563898 - DNA, 33 bp, Homo sapien
ccacccatctgcttcacagccatgaggcccagg

SEQ ID NO: 563899 - DNA, 33 bp, Homo sapien
ccttatactttgcgggccattctatggtttgcc

SEQ ID NO: 563900 - DNA, 33 bp, Homo sapien
ccttatactttgcggggcattctatggtttgcc

SEQ ID NO: 563901 - DNA, 33 bp, Homo sapien
agcgtgaatagcccccaagagttgtctcaactc

SEQ ID NO: 563902 - DNA, 33 bp, Homo sapien
agcgtgaatagccccccagagttgtctcaactc

SEQ ID NO: 563903 - DNA, 33 bp, Homo sapien
agttgtctcaactcaacgctagaaggccactct

SEQ ID NO: 563904 - DNA, 33 bp, Homo sapien
agttgtctcaactcaaggctagaaggccactct

SEQ ID NO: 563905 - DNA, 33 bp, Homo sapien
tcagaaacagatggcaagatggatttcgtctgc

SEQ ID NO: 563906 - DNA, 33 bp, Homo sapien
tcagaaacagatggcaggatggatttcgtctgc

SEQ ID NO: 563907 - DNA, 33 bp, Homo sapien
ccaacccctgatataacgtaaggctgcagtcct

SEQ ID NO: 563908 - DNA, 33 bp, Homo sapien
ccaacccctgatataatgtaaggctgcagtcct

SEQ ID NO: 563909 - DNA, 33 bp, Homo sapien
ggcttaaggtcaaaacgactatcccaacccctc

SEQ ID NO: 563910 - DNA, 33 bp, Homo sapien
ggcttaaggtcaaaactactatcccaacccctc

SEQ ID NO: 563911 - DNA, 33 bp, Homo sapien
ttatcatgaagctttcaaagtcacaggtttgca

SEQ ID NO: 563912 - DNA, 33 bp, Homo sapien
ttatcatgaagctttcgaagtcacaggtttgca

SEQ ID NO: 563913 - DNA, 33 bp, Homo sapien
gtaatgatttttcccaacaactccacaattacc

SEQ ID NO: 563914 - DNA, 33 bp, Homo sapien
gtaatgatttttcccagcaactccacaattacc

SEQ ID NO: 563915 - DNA, 33 bp, Homo sapien
ctatttgtattctcaacgacacttttcagcgag

SEQ ID NO: 563916 - DNA, 33 bp, Homo sapien
ctatttgtattctcaatgacacttttcagcgag

SEQ ID NO: 563917 - DNA, 33 bp, Homo sapien
ctataaattaggatgacgaaaacactgagacag

SEQ ID NO: 563918 - DNA, 33 bp, Homo sapien
ctataaattaggatgatgaaaacactgagacag

SEQ ID NO: 563919 - DNA, 33 bp, Homo sapien
caaaccagtcatgtgacgtttaagctccaggta

SEQ ID NO: 563920 - DNA, 33 bp, Homo sapien
caaaccagtcatgtgatgtttaagctccaggta

SEQ ID NO: 563921 - DNA, 33 bp, Homo sapien
tgaaatcttcccattacagcccacacattggcc

SEQ ID NO: 563922 - DNA, 33 bp, Homo sapien
tgaaatcttcccattagagcccacacattggcc

SEQ ID NO: 563923 - DNA, 33 bp, Homo sapien
catagtttcagtatcaaagtagggacccaattg

SEQ ID NO: 563924 - DNA, 33 bp, Homo sapien
catagtttcagtatcagagtagggacccaattg

SEQ ID NO: 563925 - DNA, 33 bp, Homo sapien
catttcaacagccaagacggaggctcagcttga

SEQ ID NO: 563926 - DNA, 33 bp, Homo sapien
catttcaacagccaagtcggaggctcagcttga

SEQ ID NO: 563927 - DNA, 33 bp, Homo sapien
agctggagagattgacagagcaatgtagcctca

SEQ ID NO: 563928 - DNA, 33 bp, Homo sapien
agctggagagattgacggagcaatgtagcctca

SEQ ID NO: 563929 - DNA, 33 bp, Homo sapien
ggcacacgggcattgacggcacttctgtgcttt

SEQ ID NO: 563930 - DNA, 33 bp, Homo sapien
ggcacacgggcattgatggcacttctgtgcttt

SEQ ID NO: 563931 - DNA, 33 bp, Homo sapien
cagaacagcaggacaacaattgaacgacaagag

SEQ ID NO: 563932 - DNA, 33 bp, Homo sapien
cagaacagcaggacaagaattgaacgacaagag

SEQ ID NO: 563933 - DNA, 33 bp, Homo sapien
accatgtatttctgacaaacattcagggcctga

SEQ ID NO: 563934 - DNA, 33 bp, Homo sapien
accatgtatttctgaccaacattcagggcctga

SEQ ID NO: 563935 - DNA, 33 bp, Homo sapien
accatgctcataaatacgcaatgctctgcgaag

SEQ ID NO: 563936 - DNA, 33 bp, Homo sapien
accatgctcataaatatgcaatgctctgcgaag

SEQ ID NO: 563937 - DNA, 33 bp, Homo sapien
cgtgggcttctgatccaatggaagttcaaatac

SEQ ID NO: 563938 - DNA, 33 bp, Homo sapien
cgtgggcttctgatccgatggaagttcaaatac

SEQ ID NO: 563939 - DNA, 33 bp, Homo sapien
tacaattcccctgaaccactgatgagaaaatag

SEQ ID NO: 563940 - DNA, 33 bp, Homo sapien
tacaattcccctgaactactgatgagaaaatag

SEQ ID NO: 563941 - DNA, 33 bp, Homo sapien
cagaatgctagaactaaaataagctaagaggtc

SEQ ID NO: 563942 - DNA, 33 bp, Homo sapien
cagaatgctagaactagaataagctaagaggtc

SEQ ID NO: 563943 - DNA, 33 bp, Homo sapien
aatagaattattgcaaagattagatgatagtga

SEQ ID NO: 563944 - DNA, 33 bp, Homo sapien
aatagaattattgcaaggattagatgatagtga

SEQ ID NO: 563945 - DNA, 33 bp, Homo sapien
aagtcaaagatgctataaagttgcacgagctta

SEQ ID NO: 563946 - DNA, 33 bp, Homo sapien
aagtcaaagatgctatgaagttgcacgagctta

SEQ ID NO: 563947 - DNA, 33 bp, Homo sapien
tctttctcctcttccaacttatccaggagatct

SEQ ID NO: 563948 - DNA, 33 bp, Homo sapien
tctttctcctcttccatcttatccaggagatct

SEQ ID NO: 563949 - DNA, 33 bp, Homo sapien
tgattctctgatatccagcacattagtcacatg

SEQ ID NO: 563950 - DNA, 33 bp, Homo sapien
tgattctctgatatccggcacattagtcacatg

SEQ ID NO: 563951 - DNA, 33 bp, Homo sapien
gacacagaggtcttctcacatgggaagaggtag

SEQ ID NO: 563952 - DNA, 33 bp, Homo sapien
gacacagaggtcttctgacatgggaagaggtag

SEQ ID NO: 563953 - DNA, 33 bp, Homo sapien
agtccccactggaagcagatatgaaacatatct

SEQ ID NO: 563954 - DNA, 33 bp, Homo sapien
agtccccactggaagcggatatgaaacatatct

SEQ ID NO: 563955 - DNA, 33 bp, Homo sapien
ttcatctgataactccactgttaaggaaacaga

SEQ ID NO: 563956 - DNA, 33 bp, Homo sapien
ttcatctgataactccgctgttaaggaaacaga

SEQ ID NO: 563957 - DNA, 33 bp, Homo sapien
atttcaagtctcttaaagaagatgaaggtaaca

SEQ ID NO: 563958 - DNA, 33 bp, Homo sapien
atttcaagtctcttaaggaagatgaaggtaaca

SEQ ID NO: 563959 - DNA, 33 bp, Homo sapien
gcaatggagctaattacgtgtagtgatatttcc

SEQ ID NO: 563960 - DNA, 33 bp, Homo sapien
gcaatggagctaattatgtgtagtgatatttcc

SEQ ID NO: 563961 - DNA, 33 bp, Homo sapien
tggttacctggagaaacgaaagagttctgcgaa

SEQ ID NO: 563962 - DNA, 33 bp, Homo sapien
tggttacctggagaaatgaaagagttctgcgaa

SEQ ID NO: 563963 - DNA, 33 bp, Homo sapien
tcccctctaaacacctaaatgtatcataaagta

SEQ ID NO: 563964 - DNA, 33 bp, Homo sapien
tcccctctaaacaccttaatgtatcataaagta

SEQ ID NO: 563965 - DNA, 33 bp, Homo sapien
ttctctttcctaccacacttttaggaaattaca

SEQ ID NO: 563966 - DNA, 33 bp, Homo sapien
ttctctttcctaccacgcttttaggaaattaca

SEQ ID NO: 563967 - DNA, 33 bp, Homo sapien
tctgtaatatgtgaaaatatccagttagttagt

SEQ ID NO: 563968 - DNA, 33 bp, Homo sapien
tctgtaatatgtgaaactatccagttagttagt

SEQ ID NO: 563969 - DNA, 33 bp, Homo sapien
tttagtcactggacgaccatcagctactgcggt

SEQ ID NO: 563970 - DNA, 33 bp, Homo sapien
tttagtcactggacgagcatcagctactgcggt

SEQ ID NO: 563971 - DNA, 33 bp, Homo sapien
catgccatgcagtacaatatagtatctggatca

SEQ ID NO: 563972 - DNA, 33 bp, Homo sapien
catgccatgcagtacagtatagtatctggatca

SEQ ID NO: 563973 - DNA, 33 bp, Homo sapien
ccatgtgatcttggataagtcactgaacttaga

SEQ ID NO: 563974 - DNA, 33 bp, Homo sapien
ccatgtgatcttggattagtcactgaacttaga

SEQ ID NO: 563975 - DNA, 33 bp, Homo sapien
cgtagcaagtgctataaaagctttcgtcaaact

SEQ ID NO: 563976 - DNA, 33 bp, Homo sapien
cgtagcaagtgctatacaagctttcgtcaaact

SEQ ID NO: 563977 - DNA, 33 bp, Homo sapien
attttattgtaatgctaaaagctaatgtttcct

SEQ ID NO: 563978 - DNA, 33 bp, Homo sapien
attttattgtaatgctgaaagctaatgtttcct

SEQ ID NO: 563979 - DNA, 33 bp, Homo sapien
tagctatagaacattacgattatgacttaatag

SEQ ID NO: 563980 - DNA, 33 bp, Homo sapien
tagctatagaacattatgattatgacttaatag

SEQ ID NO: 563981 - DNA, 33 bp, Homo sapien
aacccagttatacaccagggcattaaataagtt

SEQ ID NO: 563982 - DNA, 33 bp, Homo sapien
aacccagttatacaccggggcattaaataagtt

SEQ ID NO: 563983 - DNA, 33 bp, Homo sapien
aaggcttggaattaaaaataacagaaggtactt

SEQ ID NO: 563984 - DNA, 33 bp, Homo sapien
aaggcttggaattaaacataacagaaggtactt

SEQ ID NO: 563985 - DNA, 33 bp, Homo sapien
agtttggttataatacacacaaaactgaacact

SEQ ID NO: 563986 - DNA, 33 bp, Homo sapien
agtttggttataatacgcacaaaactgaacact

SEQ ID NO: 563987 - DNA, 33 bp, Homo sapien
agataaagttgcaaggaatatgagctcacagtc

SEQ ID NO: 563988 - DNA, 33 bp, Homo sapien
agataaagttgcaaggtatatgagctcacagtc

SEQ ID NO: 563989 - DNA, 33 bp, Homo sapien
gttgtttactgggtgacaaattaggaaactttt

SEQ ID NO: 563990 - DNA, 33 bp, Homo sapien
gttgtttactgggtgataaattaggaaactttt

SEQ ID NO: 563991 - DNA, 33 bp, Homo sapien
aaaccagatgagaaaaggcacaagacgctgtac

SEQ ID NO: 563992 - DNA, 33 bp, Homo sapien
aaaccagatgagaaaatgcacaagacgctgtac

SEQ ID NO: 563993 - DNA, 33 bp, Homo sapien
acaggtagacggaagtgaagggttcagtgagaa

SEQ ID NO: 563994 - DNA, 33 bp, Homo sapien
acaggtagacggaagttaagggttcagtgagaa

SEQ ID NO: 563995 - DNA, 33 bp, Homo sapien
tagaatacagtatccacacagggctctttagca

SEQ ID NO: 563996 - DNA, 33 bp, Homo sapien
tagaatacagtatccagacagggctctttagca

SEQ ID NO: 563997 - DNA, 33 bp, Homo sapien
agtatctctcggtataaatagaaggtaaaggcc

SEQ ID NO: 563998 - DNA, 33 bp, Homo sapien
agtatctctcggtatatatagaaggtaaaggcc

SEQ ID NO: 563999 - DNA, 33 bp, Homo sapien
tcagtgcagacaagaacgagaaaatctaagcaa

SEQ ID NO: 564000 - DNA, 33 bp, Homo sapien
tcagtgcagacaagaatgagaaaatctaagcaa

SEQ ID NO: 564001 - DNA, 33 bp, Homo sapien
cgtgcttcactaatgacggcgggggaggaatta

SEQ ID NO: 564002 - DNA, 33 bp, Homo sapien
cgtgcttcactaatgatggcgggggaggaatta

SEQ ID NO: 564003 - DNA, 33 bp, Homo sapien
tttgttctgacatcccaaatttatttcttgata

SEQ ID NO: 564004 - DNA, 33 bp, Homo sapien
tttgttctgacatccccaatttatttcttgata

SEQ ID NO: 564005 - DNA, 33 bp, Homo sapien
cccacaccagtaagataactttcaaataaaaca

SEQ ID NO: 564006 - DNA, 33 bp, Homo sapien
cccacaccagtaagatcactttcaaataaaaca

SEQ ID NO: 564007 - DNA, 33 bp, Homo sapien
tgggttttaccgagaaaactgaataggcaggtt

SEQ ID NO: 564008 - DNA, 33 bp, Homo sapien
tgggttttaccgagaacactgaataggcaggtt

SEQ ID NO: 564009 - DNA, 33 bp, Homo sapien
gctggcatcggatagaactggattctgatcttg

SEQ ID NO: 564010 - DNA, 33 bp, Homo sapien
gctggcatcggatagatctggattctgatcttg

SEQ ID NO: 564011 - DNA, 33 bp, Homo sapien
cttacacccccgcagaggtcacgttccttttgt

SEQ ID NO: 564012 - DNA, 33 bp, Homo sapien
cttacacccccgcagatgtcacgttccttttgt

SEQ ID NO: 564013 - DNA, 33 bp, Homo sapien
ggtagggaaaggatcaagtcaggtgcatagata

SEQ ID NO: 564014 - DNA, 33 bp, Homo sapien
ggtagggaaaggatcaggtcaggtgcatagata

SEQ ID NO: 564015 - DNA, 33 bp, Homo sapien
cccactgtagattttaaaggtgtgtccagaagt

SEQ ID NO: 564016 - DNA, 33 bp, Homo sapien
cccactgtagattttagaggtgtgtccagaagt

SEQ ID NO: 564017 - DNA, 33 bp, Homo sapien
tgcagaaatagatggacaagtggtcaaggccct

SEQ ID NO: 564018 - DNA, 33 bp, Homo sapien
tgcagaaatagatggagaagtggtcaaggccct

SEQ ID NO: 564019 - DNA, 33 bp, Homo sapien
ccagccaacaagaccacggtacaaggaggaaaa

SEQ ID NO: 564020 - DNA, 33 bp, Homo sapien
ccagccaacaagaccatggtacaaggaggaaaa

SEQ ID NO: 564021 - DNA, 33 bp, Homo sapien
cttgatggaagaactacacagttgaaaagccag

SEQ ID NO: 564022 - DNA, 33 bp, Homo sapien
cttgatggaagaactatacagttgaaaagccag

SEQ ID NO: 564023 - DNA, 33 bp, Homo sapien
ggtttctcaaagacccactttcacgtattcttg

SEQ ID NO: 564024 - DNA, 33 bp, Homo sapien
ggtttctcaaagacccgctttcacgtattcttg

SEQ ID NO: 564025 - DNA, 33 bp, Homo sapien
caatgtgtataaagcacagatttaatttcccag

SEQ ID NO: 564026 - DNA, 33 bp, Homo sapien
caatgtgtataaagcatagatttaatttcccag

SEQ ID NO: 564027 - DNA, 33 bp, Homo sapien
aggtggttccaggatgcaccagtaggagagtga

SEQ ID NO: 564028 - DNA, 33 bp, Homo sapien
aggtggttccaggatgtaccagtaggagagtga

SEQ ID NO: 564029 - DNA, 33 bp, Homo sapien
aaatgggtagctatgaaaacatacacaaattat

SEQ ID NO: 564030 - DNA, 33 bp, Homo sapien
aaatgggtagctatgagaacatacacaaattat

SEQ ID NO: 564031 - DNA, 33 bp, Homo sapien
acttactttgtagccaaaatagacttcagcaag

SEQ ID NO: 564032 - DNA, 33 bp, Homo sapien
acttactttgtagccagaatagacttcagcaag

SEQ ID NO: 564033 - DNA, 33 bp, Homo sapien
gtagatagcaaatcaccataaccacggtcatgg

SEQ ID NO: 564034 - DNA, 33 bp, Homo sapien
gtagatagcaaatcactataaccacggtcatgg

SEQ ID NO: 564035 - DNA, 33 bp, Homo sapien
gtcctttcatgcaacccgcctagtatctttctt

SEQ ID NO: 564036 - DNA, 33 bp, Homo sapien
gtcctttcatgcaacctgcctagtatctttctt

SEQ ID NO: 564037 - DNA, 33 bp, Homo sapien
agtccagtaccagccaatgacaagataaacatg

SEQ ID NO: 564038 - DNA, 33 bp, Homo sapien
agtccagtaccagccagtgacaagataaacatg

SEQ ID NO: 564039 - DNA, 33 bp, Homo sapien
gtgaactagaaactgaccatgtaatgcattcta

SEQ ID NO: 564040 - DNA, 33 bp, Homo sapien
gtgaactagaaactgagcatgtaatgcattcta

SEQ ID NO: 564041 - DNA, 33 bp, Homo sapien
cccactagagtaaaccaatagttcatgacttct

SEQ ID NO: 564042 - DNA, 33 bp, Homo sapien
cccactagagtaaaccgatagttcatgacttct

SEQ ID NO: 564043 - DNA, 33 bp, Homo sapien
tctttgtagttggtaactgtctcatgaacatta

SEQ ID NO: 564044 - DNA, 33 bp, Homo sapien
tctttgtagttggtaattgtctcatgaacatta

SEQ ID NO: 564045 - DNA, 33 bp, Homo sapien
tacttttgatcagcagaaaacttgtgaattaaa

SEQ ID NO: 564046 - DNA, 33 bp, Homo sapien
tacttttgatcagcagcaaacttgtgaattaaa

SEQ ID NO: 564047 - DNA, 33 bp, Homo sapien
gtctgttcctgaacaaacaacgcctataaaaat

SEQ ID NO: 564048 - DNA, 33 bp, Homo sapien
gtctgttcctgaacaaccaacgcctataaaaat

SEQ ID NO: 564049 - DNA, 33 bp, Homo sapien
ttcctaactttgtacaagcatgggcactattaa

SEQ ID NO: 564050 - DNA, 33 bp, Homo sapien
ttcctaactttgtacaggcatgggcactattaa

SEQ ID NO: 564051 - DNA, 33 bp, Homo sapien
gctgagcaaagtagtgcaatatgacaatgtttt

SEQ ID NO: 564052 - DNA, 33 bp, Homo sapien
gctgagcaaagtagtgtaatatgacaatgtttt

SEQ ID NO: 564053 - DNA, 33 bp, Homo sapien
gagggatctcaaagggaatcatcttctgagtta

SEQ ID NO: 564054 - DNA, 33 bp, Homo sapien
gagggatctcaaaggggatcatcttctgagtta

SEQ ID NO: 564055 - DNA, 33 bp, Homo sapien
agagtctttggttgcaagtaacaggaaatccaa

SEQ ID NO: 564056 - DNA, 33 bp, Homo sapien
agagtctttggttgcaggtaacaggaaatccaa

SEQ ID NO: 564057 - DNA, 33 bp, Homo sapien
gtgtcttttagatgagcaagaatagctggacag

SEQ ID NO: 564058 - DNA, 33 bp, Homo sapien
gtgtcttttagatgaggaagaatagctggacag

SEQ ID NO: 564059 - DNA, 33 bp, Homo sapien
gtaataaagtattctgcagaactgaaggcactt

SEQ ID NO: 564060 - DNA, 33 bp, Homo sapien
gtaataaagtattctgtagaactgaaggcactt

SEQ ID NO: 564061 - DNA, 33 bp, Homo sapien
ggcagcgattagccaaccactagtcagaatgtg

SEQ ID NO: 564062 - DNA, 33 bp, Homo sapien
ggcagcgattagccaatcactagtcagaatgtg

SEQ ID NO: 564063 - DNA, 33 bp, Homo sapien
ccagtccttattttcaacttgagtatttcagca

SEQ ID NO: 564064 - DNA, 33 bp, Homo sapien
ccagtccttattttcagcttgagtatttcagca

SEQ ID NO: 564065 - DNA, 33 bp, Homo sapien
aaggaaggtaaggtcaaacaatggttcactcct

SEQ ID NO: 564066 - DNA, 33 bp, Homo sapien
aaggaaggtaaggtcagacaatggttcactcct

SEQ ID NO: 564067 - DNA, 33 bp, Homo sapien
tttcaaagactcagtacgagaaaaagattgtaa

SEQ ID NO: 564068 - DNA, 33 bp, Homo sapien
tttcaaagactcagtatgagaaaaagattgtaa

SEQ ID NO: 564069 - DNA, 33 bp, Homo sapien
ggaagtagtttttaaaccaagacaattcataca

SEQ ID NO: 564070 - DNA, 33 bp, Homo sapien
ggaagtagtttttaaatcaagacaattcataca

SEQ ID NO: 564071 - DNA, 33 bp, Homo sapien
tcttcctcatccagaacttcgtgaaaatggtcc

SEQ ID NO: 564072 - DNA, 33 bp, Homo sapien
tcttcctcatccagaatttcgtgaaaatggtcc

SEQ ID NO: 564073 - DNA, 33 bp, Homo sapien
aatcaaacataacagacagacataatgcaaagt

SEQ ID NO: 564074 - DNA, 33 bp, Homo sapien
aatcaaacataacagatagacataatgcaaagt

SEQ ID NO: 564075 - DNA, 33 bp, Homo sapien
aagtagtgcatggacacagtaaaagagtgtgaa

SEQ ID NO: 564076 - DNA, 33 bp, Homo sapien
aagtagtgcatggacatagtaaaagagtgtgaa

SEQ ID NO: 564077 - DNA, 33 bp, Homo sapien
agtcttctttaaggtcactcccactctcacatt

SEQ ID NO: 564078 - DNA, 33 bp, Homo sapien
agtcttctttaaggtcgctcccactctcacatt

SEQ ID NO: 564079 - DNA, 33 bp, Homo sapien
tttggttagatttgtaagaatatgtggactata

SEQ ID NO: 564080 - DNA, 33 bp, Homo sapien
tttggttagatttgtacgaatatgtggactata

SEQ ID NO: 564081 - DNA, 33 bp, Homo sapien
aggaaagaaaccaagaccctggagatacaaacc

SEQ ID NO: 564082 - DNA, 33 bp, Homo sapien
aggaaagaaaccaagatcctggagatacaaacc

SEQ ID NO: 564083 - DNA, 33 bp, Homo sapien
acagggagaagaaaaagtgatctgagtctttct

SEQ ID NO: 564084 - DNA, 33 bp, Homo sapien
acagggagaagaaaaattgatctgagtctttct

SEQ ID NO: 564085 - DNA, 33 bp, Homo sapien
ctctcacttcgcacaacgtttttaaagttcatg

SEQ ID NO: 564086 - DNA, 33 bp, Homo sapien
ctctcacttcgcacaatgtttttaaagttcatg

SEQ ID NO: 564087 - DNA, 33 bp, Homo sapien
ggataaggcccaattacgcagttttatagcagg

SEQ ID NO: 564088 - DNA, 33 bp, Homo sapien
ggataaggcccaattatgcagttttatagcagg

SEQ ID NO: 564089 - DNA, 33 bp, Homo sapien
aattctgctataaatccccagttgactacagta

SEQ ID NO: 564090 - DNA, 33 bp, Homo sapien
aattctgctataaatctccagttgactacagta

SEQ ID NO: 564091 - DNA, 33 bp, Homo sapien
agaccgtaattgacatcatagacctgaaagatt

SEQ ID NO: 564092 - DNA, 33 bp, Homo sapien
agaccgtaattgacatgatagacctgaaagatt

SEQ ID NO: 564093 - DNA, 33 bp, Homo sapien
acaattctatgaacacaataaaccaagatgaag

SEQ ID NO: 564094 - DNA, 33 bp, Homo sapien
acaattctatgaacactataaaccaagatgaag

SEQ ID NO: 564095 - DNA, 33 bp, Homo sapien
tttaagcaagagctcaagaagtaacagtaatgc

SEQ ID NO: 564096 - DNA, 33 bp, Homo sapien
tttaagcaagagctcaggaagtaacagtaatgc

SEQ ID NO: 564097 - DNA, 33 bp, Homo sapien
gccaggagagcaggtaaataacttgtccaaagg

SEQ ID NO: 564098 - DNA, 33 bp, Homo sapien
gccaggagagcaggtagataacttgtccaaagg

SEQ ID NO: 564099 - DNA, 33 bp, Homo sapien
atgaaactggagttgacggttgatttaaaaaat

SEQ ID NO: 564100 - DNA, 33 bp, Homo sapien
atgaaactggagttgatggttgatttaaaaaat

SEQ ID NO: 564101 - DNA, 33 bp, Homo sapien
tatttcaccttttccaaaatttggattcctgaa

SEQ ID NO: 564102 - DNA, 33 bp, Homo sapien
tatttcaccttttccataatttggattcctgaa

SEQ ID NO: 564103 - DNA, 33 bp, Homo sapien
agtagtttgttaaagacatatatctgtaaggta

SEQ ID NO: 564104 - DNA, 33 bp, Homo sapien
agtagtttgttaaagagatatatctgtaaggta

SEQ ID NO: 564105 - DNA, 33 bp, Homo sapien
gttttccttactggcccgatcacaaaaaccacc

SEQ ID NO: 564106 - DNA, 33 bp, Homo sapien
gttttccttactggccggatcacaaaaaccacc

SEQ ID NO: 564107 - DNA, 33 bp, Homo sapien
aatgatgaattattaaagtggagctgtgaaatt

SEQ ID NO: 564108 - DNA, 33 bp, Homo sapien
aatgatgaattattaaggtggagctgtgaaatt

SEQ ID NO: 564109 - DNA, 33 bp, Homo sapien
tgcccatgtggtgttagtaaagccttgctaata

SEQ ID NO: 564110 - DNA, 33 bp, Homo sapien
tgcccatgtggtgttattaaagccttgctaata

SEQ ID NO: 564111 - DNA, 33 bp, Homo sapien
taggtaagaaaatcaaagttggaaatggtaagt

SEQ ID NO: 564112 - DNA, 33 bp, Homo sapien
taggtaagaaaatcaaggttggaaatggtaagt

SEQ ID NO: 564113 - DNA, 33 bp, Homo sapien
atactcaatacctgggacagtccttggcacata

SEQ ID NO: 564114 - DNA, 33 bp, Homo sapien
atactcaatacctgggtcagtccttggcacata

SEQ ID NO: 564115 - DNA, 33 bp, Homo sapien
tgctgccacaatccagaaggcactgtatggcct

SEQ ID NO: 564116 - DNA, 33 bp, Homo sapien
tgctgccacaatccaggaggcactgtatggcct

SEQ ID NO: 564117 - DNA, 33 bp, Homo sapien
agaggacatgggaatgaattggatgtggtggcc

SEQ ID NO: 564118 - DNA, 33 bp, Homo sapien
agaggacatgggaatgcattggatgtggtggcc

SEQ ID NO: 564119 - DNA, 33 bp, Homo sapien
atccagtgatgctgcaagaataataatggcaag

SEQ ID NO: 564120 - DNA, 33 bp, Homo sapien
atccagtgatgctgcaggaataataatggcaag

SEQ ID NO: 564121 - DNA, 33 bp, Homo sapien
caagcaagaaggagcccgaagtcattctcgcac

SEQ ID NO: 564122 - DNA, 33 bp, Homo sapien
caagcaagaaggagcctgaagtcattctcgcac

SEQ ID NO: 564123 - DNA, 33 bp, Homo sapien
tatggatgagctggaaccagtgcttctgaagag

SEQ ID NO: 564124 - DNA, 33 bp, Homo sapien
tatggatgagctggaatcagtgcttctgaagag

SEQ ID NO: 564125 - DNA, 33 bp, Homo sapien
gaattgctagcaaccgccaggaagtaggaagag

SEQ ID NO: 564126 - DNA, 33 bp, Homo sapien
gaattgctagcaaccgtcaggaagtaggaagag

SEQ ID NO: 564127 - DNA, 33 bp, Homo sapien
tgcatagcaggcaaataaataaacaaaatgaga

SEQ ID NO: 564128 - DNA, 33 bp, Homo sapien
tgcatagcaggcaaatgaataaacaaaatgaga

SEQ ID NO: 564129 - DNA, 33 bp, Homo sapien
ccagttgatcactgcaagtttacaaaatgcaat

SEQ ID NO: 564130 - DNA, 33 bp, Homo sapien
ccagttgatcactgcaggtttacaaaatgcaat

SEQ ID NO: 564131 - DNA, 33 bp, Homo sapien
gagtgaaaactgaataagcaaatccaacattgt

SEQ ID NO: 564132 - DNA, 33 bp, Homo sapien
gagtgaaaactgaatacgcaaatccaacattgt

SEQ ID NO: 564133 - DNA, 33 bp, Homo sapien
tgcttctttatatccccgcaattcagtaggctg

SEQ ID NO: 564134 - DNA, 33 bp, Homo sapien
tgcttctttatatccctgcaattcagtaggctg

SEQ ID NO: 564135 - DNA, 33 bp, Homo sapien
ctgagggcagaatagaacccagcgcagtcacgc

SEQ ID NO: 564136 - DNA, 33 bp, Homo sapien
ctgagggcagaatagagcccagcgcagtcacgc

SEQ ID NO: 564137 - DNA, 33 bp, Homo sapien
caagtgaaataggaaaatgtacaccacgctgga

SEQ ID NO: 564138 - DNA, 33 bp, Homo sapien
caagtgaaataggaaagtgtacaccacgctgga

SEQ ID NO: 564139 - DNA, 33 bp, Homo sapien
acaaggtagggagagaccatgcagtggctgctt

SEQ ID NO: 564140 - DNA, 33 bp, Homo sapien
acaaggtagggagagatcatgcagtggctgctt

SEQ ID NO: 564141 - DNA, 33 bp, Homo sapien
ccttctgtggcctctcaagaacagaagagatca

SEQ ID NO: 564142 - DNA, 33 bp, Homo sapien
ccttctgtggcctctcgagaacagaagagatca

SEQ ID NO: 564143 - DNA, 33 bp, Homo sapien
gaatccatgcggaagcgccagctgtggttgtgc

SEQ ID NO: 564144 - DNA, 33 bp, Homo sapien
gaatccatgcggaagctccagctgtggttgtgc

SEQ ID NO: 564145 - DNA, 33 bp, Homo sapien
tagaaaggtgaagaaactgagtctgttgaccgc

SEQ ID NO: 564146 - DNA, 33 bp, Homo sapien
tagaaaggtgaagaaagtgagtctgttgaccgc

SEQ ID NO: 564147 - DNA, 33 bp, Homo sapien
tgaaaattgtactgaaatgcatgaatttacatt

SEQ ID NO: 564148 - DNA, 33 bp, Homo sapien
tgaaaattgtactgaactgcatgaatttacatt

SEQ ID NO: 564149 - DNA, 33 bp, Homo sapien
gagtcctctttttcccatacttcatcccagaac

SEQ ID NO: 564150 - DNA, 33 bp, Homo sapien
gagtcctctttttcccgtacttcatcccagaac

SEQ ID NO: 564151 - DNA, 33 bp, Homo sapien
cccaaagcccctgtgccccatgacctcttccat

SEQ ID NO: 564152 - DNA, 33 bp, Homo sapien
cccaaagcccctgtgctccatgacctcttccat

SEQ ID NO: 564153 - DNA, 33 bp, Homo sapien
ctggcaactgagctgacagctgccacacgaaaa

SEQ ID NO: 564154 - DNA, 33 bp, Homo sapien
ctggcaactgagctgatagctgccacacgaaaa

SEQ ID NO: 564155 - DNA, 33 bp, Homo sapien
ctgggtggctgaatgcccaagtcagaggctgct

SEQ ID NO: 564156 - DNA, 33 bp, Homo sapien
ctgggtggctgaatgctcaagtcagaggctgct

SEQ ID NO: 564157 - DNA, 33 bp, Homo sapien
gatgacattctgcaagaaaggaaggtgtctgag

SEQ ID NO: 564158 - DNA, 33 bp, Homo sapien
gatgacattctgcaaggaaggaaggtgtctgag

SEQ ID NO: 564159 - DNA, 33 bp, Homo sapien
tgggatcacttggaaacgaagggccctttactg

SEQ ID NO: 564160 - DNA, 33 bp, Homo sapien
tgggatcacttggaaatgaagggccctttactg

SEQ ID NO: 564161 - DNA, 33 bp, Homo sapien
ataggttttagattagaacgtggtaacgtggta

SEQ ID NO: 564162 - DNA, 33 bp, Homo sapien
ataggttttagattagtacgtggtaacgtggta

SEQ ID NO: 564163 - DNA, 33 bp, Homo sapien
aagtgggtaatttacaagctatttagcatagat

SEQ ID NO: 564164 - DNA, 33 bp, Homo sapien
aagtgggtaatttacaggctatttagcatagat

SEQ ID NO: 564165 - DNA, 33 bp, Homo sapien
atgctaaataatttcccgaatctaagaatctta

SEQ ID NO: 564166 - DNA, 33 bp, Homo sapien
atgctaaataatttcctgaatctaagaatctta

SEQ ID NO: 564167 - DNA, 33 bp, Homo sapien
cacacaagcatcagcactaacgttttttctcta

SEQ ID NO: 564168 - DNA, 33 bp, Homo sapien
cacacaagcatcagcagtaacgttttttctcta

SEQ ID NO: 564169 - DNA, 33 bp, Homo sapien
ccactttggttctaaaagcacttgtttgtagaa

SEQ ID NO: 564170 - DNA, 33 bp, Homo sapien
ccactttggttctaaaggcacttgtttgtagaa

SEQ ID NO: 564171 - DNA, 33 bp, Homo sapien
aaacaactccagtccacgtgatcacgagaaacg

SEQ ID NO: 564172 - DNA, 33 bp, Homo sapien
aaacaactccagtccatgtgatcacgagaaacg

SEQ ID NO: 564173 - DNA, 33 bp, Homo sapien
gagtttctagagcctgaagatgaaacgttctcc

SEQ ID NO: 564174 - DNA, 33 bp, Homo sapien
gagtttctagagcctggagatgaaacgttctcc

SEQ ID NO: 564175 - DNA, 33 bp, Homo sapien
gagaaccacctgaacacaagagaatgagggtgc

SEQ ID NO: 564176 - DNA, 33 bp, Homo sapien
gagaaccacctgaacagaagagaatgagggtgc

SEQ ID NO: 564177 - DNA, 33 bp, Homo sapien
ctgctttcttggtttcgaccaatcgggtgcctg

SEQ ID NO: 564178 - DNA, 33 bp, Homo sapien
ctgctttcttggtttctaccaatcgggtgcctg

SEQ ID NO: 564179 - DNA, 33 bp, Homo sapien
atcaagatatatgtaaccacaagtcggatggca

SEQ ID NO: 564180 - DNA, 33 bp, Homo sapien
atcaagatatatgtaatcacaagtcggatggca

SEQ ID NO: 564181 - DNA, 33 bp, Homo sapien
ctgacaaaggcacttgcaaattcttaaaattag

SEQ ID NO: 564182 - DNA, 33 bp, Homo sapien
ctgacaaaggcacttggaaattcttaaaattag

SEQ ID NO: 564183 - DNA, 33 bp, Homo sapien
taagaagcgtctgcacggtcgtatcaccaagtt

SEQ ID NO: 564184 - DNA, 33 bp, Homo sapien
taagaagcgtctgcactgtcgtatcaccaagtt

SEQ ID NO: 564185 - DNA, 33 bp, Homo sapien
atctgacattttcttacctaatatccttagggc

SEQ ID NO: 564186 - DNA, 33 bp, Homo sapien
atctgacattttcttatctaatatccttagggc

SEQ ID NO: 564187 - DNA, 33 bp, Homo sapien
tacgcactcaggtttacgttgcgggttggttat

SEQ ID NO: 564188 - DNA, 33 bp, Homo sapien
tacgcactcaggtttatgttgcgggttggttat

SEQ ID NO: 564189 - DNA, 33 bp, Homo sapien
cctacatatgtgtgtaaccctaagcaatatgtt

SEQ ID NO: 564190 - DNA, 33 bp, Homo sapien
cctacatatgtgtgtagccctaagcaatatgtt

SEQ ID NO: 564191 - DNA, 33 bp, Homo sapien
tgctggtggcaggagcaacatctatcttgttcc

SEQ ID NO: 564192 - DNA, 33 bp, Homo sapien
tgctggtggcaggagcgacatctatcttgttcc

SEQ ID NO: 564193 - DNA, 33 bp, Homo sapien
tcactgtcagaattcacgagaggaagctatgtt

SEQ ID NO: 564194 - DNA, 33 bp, Homo sapien
tcactgtcagaattcatgagaggaagctatgtt

SEQ ID NO: 564195 - DNA, 33 bp, Homo sapien
acattttctacagagacggatccaagactgtga

SEQ ID NO: 564196 - DNA, 33 bp, Homo sapien
acattttctacagagatggatccaagactgtga

SEQ ID NO: 564197 - DNA, 33 bp, Homo sapien
gtgatttttagcaaagaaggaggcaggctgatg

SEQ ID NO: 564198 - DNA, 33 bp, Homo sapien
gtgatttttagcaaaggaggaggcaggctgatg

SEQ ID NO: 564199 - DNA, 33 bp, Homo sapien
tcccaggcatggaaacggagactaggagacgtg

SEQ ID NO: 564200 - DNA, 33 bp, Homo sapien
tcccaggcatggaaactgagactaggagacgtg

SEQ ID NO: 564201 - DNA, 33 bp, Homo sapien
ttgaattaggctaagacgacagagagcggagtg

SEQ ID NO: 564202 - DNA, 33 bp, Homo sapien
ttgaattaggctaagatgacagagagcggagtg

SEQ ID NO: 564203 - DNA, 33 bp, Homo sapien
gagtaatttgcaacacactcaagtaaatttttt

SEQ ID NO: 564204 - DNA, 33 bp, Homo sapien
gagtaatttgcaacacgctcaagtaaatttttt

SEQ ID NO: 564205 - DNA, 33 bp, Homo sapien
tataaatgtgcttcaacaacttaggggtgataa

SEQ ID NO: 564206 - DNA, 33 bp, Homo sapien
tataaatgtgcttcaataacttaggggtgataa

SEQ ID NO: 564207 - DNA, 33 bp, Homo sapien
catacatttcagaaaagaagtcaaatggtacca

SEQ ID NO: 564208 - DNA, 33 bp, Homo sapien
catacatttcagaaaataagtcaaatggtacca

SEQ ID NO: 564209 - DNA, 33 bp, Homo sapien
atgtcaattctgctaaaattaagctatagattc

SEQ ID NO: 564210 - DNA, 33 bp, Homo sapien
atgtcaattctgctaacattaagctatagattc

SEQ ID NO: 564211 - DNA, 33 bp, Homo sapien
ggggttttatgtttaactggctaacaggccgtg

SEQ ID NO: 564212 - DNA, 33 bp, Homo sapien
ggggttttatgtttaattggctaacaggccgtg

SEQ ID NO: 564213 - DNA, 33 bp, Homo sapien
tatgtaaaaaagcctacaaataacatgggtgat

SEQ ID NO: 564214 - DNA, 33 bp, Homo sapien
tatgtaaaaaagcctagaaataacatgggtgat

SEQ ID NO: 564215 - DNA, 33 bp, Homo sapien
atgagctttccctctacgacagtactggtagaa

SEQ ID NO: 564216 - DNA, 33 bp, Homo sapien
atgagctttccctctatgacagtactggtagaa

SEQ ID NO: 564217 - DNA, 33 bp, Homo sapien
cattcctcttgagggacggcttaatatgctaat

SEQ ID NO: 564218 - DNA, 33 bp, Homo sapien
cattcctcttgagggatggcttaatatgctaat

SEQ ID NO: 564219 - DNA, 33 bp, Homo sapien
tggtgccaactcaccacagaaaggtgataaaaa

SEQ ID NO: 564220 - DNA, 33 bp, Homo sapien
tggtgccaactcaccagagaaaggtgataaaaa

SEQ ID NO: 564221 - DNA, 33 bp, Homo sapien
tagttaccagaagaccagatttgaagagacctc

SEQ ID NO: 564222 - DNA, 33 bp, Homo sapien
tagttaccagaagaccggatttgaagagacctc

SEQ ID NO: 564223 - DNA, 33 bp, Homo sapien
catttgcacagcatcaagatttcaggagtgaca

SEQ ID NO: 564224 - DNA, 33 bp, Homo sapien
catttgcacagcatcaggatttcaggagtgaca

SEQ ID NO: 564225 - DNA, 33 bp, Homo sapien
gagagaacaatcccaaaggaagccagctctatc

SEQ ID NO: 564226 - DNA, 33 bp, Homo sapien
gagagaacaatcccaacggaagccagctctatc

SEQ ID NO: 564227 - DNA, 33 bp, Homo sapien
ttaagtacagagaaaacgtccctggaaatcttt

SEQ ID NO: 564228 - DNA, 33 bp, Homo sapien
ttaagtacagagaaaatgtccctggaaatcttt

SEQ ID NO: 564229 - DNA, 33 bp, Homo sapien
aattacataagttctgaaacaaccactatgatc

SEQ ID NO: 564230 - DNA, 33 bp, Homo sapien
aattacataagttctggaacaaccactatgatc

SEQ ID NO: 564231 - DNA, 33 bp, Homo sapien
ctatgatctatttagacgtgtggatcaaaagtt

SEQ ID NO: 564232 - DNA, 33 bp, Homo sapien
ctatgatctatttagatgtgtggatcaaaagtt

SEQ ID NO: 564233 - DNA, 33 bp, Homo sapien
aaaagtaacatagcagaacttacctttgctagt

SEQ ID NO: 564234 - DNA, 33 bp, Homo sapien
aaaagtaacatagcaggacttacctttgctagt

SEQ ID NO: 564235 - DNA, 33 bp, Homo sapien
cttttcaacctgccaacgaatatgcccttactt

SEQ ID NO: 564236 - DNA, 33 bp, Homo sapien
cttttcaacctgccaatgaatatgcccttactt

SEQ ID NO: 564237 - DNA, 33 bp, Homo sapien
tgtgactgtaattttacatagaaagcaagcaaa

SEQ ID NO: 564238 - DNA, 33 bp, Homo sapien
tgtgactgtaattttatatagaaagcaagcaaa

SEQ ID NO: 564239 - DNA, 33 bp, Homo sapien
aatattagatcaataaatataatctgagccaag

SEQ ID NO: 564240 - DNA, 33 bp, Homo sapien
aatattagatcaataagtataatctgagccaag

SEQ ID NO: 564241 - DNA, 33 bp, Homo sapien
caagaagtcattctgcacttgtttcataattag

SEQ ID NO: 564242 - DNA, 33 bp, Homo sapien
caagaagtcattctgcgcttgtttcataattag

SEQ ID NO: 564243 - DNA, 33 bp, Homo sapien
aactgtaggccaccaaatccaattcttgttctt

SEQ ID NO: 564244 - DNA, 33 bp, Homo sapien
aactgtaggccaccaagtccaattcttgttctt

SEQ ID NO: 564245 - DNA, 33 bp, Homo sapien
acaccaaaatagatgacgaatgcagattaggaa

SEQ ID NO: 564246 - DNA, 33 bp, Homo sapien
acaccaaaatagatgatgaatgcagattaggaa

SEQ ID NO: 564247 - DNA, 33 bp, Homo sapien
gattttccaggataaactgaatgtccaaacact

SEQ ID NO: 564248 - DNA, 33 bp, Homo sapien
gattttccaggataaattgaatgtccaaacact

SEQ ID NO: 564249 - DNA, 33 bp, Homo sapien
ttttctttctcaagaccgatgctacattgtaat

SEQ ID NO: 564250 - DNA, 33 bp, Homo sapien
ttttctttctcaagactgatgctacattgtaat

SEQ ID NO: 564251 - DNA, 33 bp, Homo sapien
ttgatgtcacataacaaaatgacttcaatatta

SEQ ID NO: 564252 - DNA, 33 bp, Homo sapien
ttgatgtcacataacagaatgacttcaatatta

SEQ ID NO: 564253 - DNA, 33 bp, Homo sapien
ggctacctttactgggacaaatacaatctggca

SEQ ID NO: 564254 - DNA, 33 bp, Homo sapien
ggctacctttactggggcaaatacaatctggca

SEQ ID NO: 564255 - DNA, 33 bp, Homo sapien
aaatggctttgccacacatatttgtacccttaa

SEQ ID NO: 564256 - DNA, 33 bp, Homo sapien
aaatggctttgccacatatatttgtacccttaa

SEQ ID NO: 564257 - DNA, 33 bp, Homo sapien
aaagcactactttggaacagtctaacagacact

SEQ ID NO: 564258 - DNA, 33 bp, Homo sapien
aaagcactactttggagcagtctaacagacact

SEQ ID NO: 564259 - DNA, 33 bp, Homo sapien
ccacatctagctggaaagcaacagcaaaggttg

SEQ ID NO: 564260 - DNA, 33 bp, Homo sapien
ccacatctagctggaaggcaacagcaaaggttg

SEQ ID NO: 564261 - DNA, 33 bp, Homo sapien
tccctaacacaagaaaacgaaggcccttctggt

SEQ ID NO: 564262 - DNA, 33 bp, Homo sapien
tccctaacacaagaaaccgaaggcccttctggt

SEQ ID NO: 564263 - DNA, 33 bp, Homo sapien
aatcaaagacctgttacagctagtgaggaaatt

SEQ ID NO: 564264 - DNA, 33 bp, Homo sapien
aatcaaagacctgttatagctagtgaggaaatt

SEQ ID NO: 564265 - DNA, 33 bp, Homo sapien
cgtaacccctgtagtacgtggaatacagccaca

SEQ ID NO: 564266 - DNA, 33 bp, Homo sapien
cgtaacccctgtagtatgtggaatacagccaca

SEQ ID NO: 564267 - DNA, 33 bp, Homo sapien
ttggccagctttcttcacatttatggtccagaa

SEQ ID NO: 564268 - DNA, 33 bp, Homo sapien
ttggccagctttcttcgcatttatggtccagaa

SEQ ID NO: 564269 - DNA, 33 bp, Homo sapien
actttagggaaacttcactttgctggcactcag

SEQ ID NO: 564270 - DNA, 33 bp, Homo sapien
actttagggaaacttccctttgctggcactcag

SEQ ID NO: 564271 - DNA, 33 bp, Homo sapien
tatgatacagattttacaacttcatcagcacat

SEQ ID NO: 564272 - DNA, 33 bp, Homo sapien
tatgatacagattttataacttcatcagcacat

SEQ ID NO: 564273 - DNA, 33 bp, Homo sapien
atatgattgaaacagaccttcaataaatgtctt

SEQ ID NO: 564274 - DNA, 33 bp, Homo sapien
atatgattgaaacagatcttcaataaatgtctt

SEQ ID NO: 564275 - DNA, 33 bp, Homo sapien
gctcatgtgaccaaacaataacatccattgtca

SEQ ID NO: 564276 - DNA, 33 bp, Homo sapien
gctcatgtgaccaaacgataacatccattgtca

SEQ ID NO: 564277 - DNA, 33 bp, Homo sapien
tgctcacccagaacacaacctttgcacctaccc

SEQ ID NO: 564278 - DNA, 33 bp, Homo sapien
tgctcacccagaacacgacctttgcacctaccc

SEQ ID NO: 564279 - DNA, 33 bp, Homo sapien
caaaacaacgtgtgaccaaaacactacctaagg

SEQ ID NO: 564280 - DNA, 33 bp, Homo sapien
caaaacaacgtgtgacgaaaacactacctaagg

SEQ ID NO: 564281 - DNA, 33 bp, Homo sapien
tggaagtttgacagtacaaggaggggttatgag

SEQ ID NO: 564282 - DNA, 33 bp, Homo sapien
tggaagtttgacagtataaggaggggttatgag

SEQ ID NO: 564283 - DNA, 33 bp, Homo sapien
agaaaatacaaatcaccgatgagcagctttgaa

SEQ ID NO: 564284 - DNA, 33 bp, Homo sapien
agaaaatacaaatcactgatgagcagctttgaa

SEQ ID NO: 564285 - DNA, 33 bp, Homo sapien
ctgaagagaatgtcaacggttatttttgtccag

SEQ ID NO: 564286 - DNA, 33 bp, Homo sapien
ctgaagagaatgtcaatggttatttttgtccag

SEQ ID NO: 564287 - DNA, 33 bp, Homo sapien
ttactgtacattgctaaaaacaccaaagacatt

SEQ ID NO: 564288 - DNA, 33 bp, Homo sapien
ttactgtacattgctataaacaccaaagacatt

SEQ ID NO: 564289 - DNA, 33 bp, Homo sapien
taaatacttgtactgacggggatatcaaagctt

SEQ ID NO: 564290 - DNA, 33 bp, Homo sapien
taaatacttgtactgatggggatatcaaagctt

SEQ ID NO: 564291 - DNA, 33 bp, Homo sapien
aatcaaaatcatggacacaatcgaatcacaaag

SEQ ID NO: 564292 - DNA, 33 bp, Homo sapien
aatcaaaatcatggacgcaatcgaatcacaaag

SEQ ID NO: 564293 - DNA, 33 bp, Homo sapien
aaggtgctactacacaataaatcctctgcactc

SEQ ID NO: 564294 - DNA, 33 bp, Homo sapien
aaggtgctactacacagtaaatcctctgcactc

SEQ ID NO: 564295 - DNA, 33 bp, Homo sapien
aaaatgggaaacaagaactttcgagaaagaatt

SEQ ID NO: 564296 - DNA, 33 bp, Homo sapien
aaaatgggaaacaagacctttcgagaaagaatt

SEQ ID NO: 564297 - DNA, 33 bp, Homo sapien
tttcaatatgaatgcccgagctgtacaatggcc

SEQ ID NO: 564298 - DNA, 33 bp, Homo sapien
tttcaatatgaatgcctgagctgtacaatggcc

SEQ ID NO: 564299 - DNA, 33 bp, Homo sapien
gagtgctggattgagaccattttctctgaagtt

SEQ ID NO: 564300 - DNA, 33 bp, Homo sapien
gagtgctggattgagatcattttctctgaagtt

SEQ ID NO: 564301 - DNA, 33 bp, Homo sapien
aaataaggcaaacgccaagttgtaaccaatcca

SEQ ID NO: 564302 - DNA, 33 bp, Homo sapien
aaataaggcaaacgccgagttgtaaccaatcca

SEQ ID NO: 564303 - DNA, 33 bp, Homo sapien
ataaaattctggtctcccaaacagccggctctg

SEQ ID NO: 564304 - DNA, 33 bp, Homo sapien
ataaaattctggtctctcaaacagccggctctg

SEQ ID NO: 564305 - DNA, 33 bp, Homo sapien
aaaaagaaattactacaaggaattggttcacca

SEQ ID NO: 564306 - DNA, 33 bp, Homo sapien
aaaaagaaattactacgaggaattggttcacca

SEQ ID NO: 564307 - DNA, 33 bp, Homo sapien
ctccagagaaacagaaccgataggaaaactgat

SEQ ID NO: 564308 - DNA, 33 bp, Homo sapien
ctccagagaaacagaatcgataggaaaactgat

SEQ ID NO: 564309 - DNA, 33 bp, Homo sapien
ggtaatttagagaacacaaaagaactcgaaaac

SEQ ID NO: 564310 - DNA, 33 bp, Homo sapien
ggtaatttagagaacagaaaagaactcgaaaac

SEQ ID NO: 564311 - DNA, 33 bp, Homo sapien
ttatagaagaaaatgccccagggctgagtatct

SEQ ID NO: 564312 - DNA, 33 bp, Homo sapien
ttatagaagaaaatgctccagggctgagtatct

SEQ ID NO: 564313 - DNA, 33 bp, Homo sapien
aataaatcaacaaatacgtaaagtgaattttaa

SEQ ID NO: 564314 - DNA, 33 bp, Homo sapien
aataaatcaacaaatatgtaaagtgaattttaa

SEQ ID NO: 564315 - DNA, 33 bp, Homo sapien
atggtgagtagggccacgccttaatatccatgc

SEQ ID NO: 564316 - DNA, 33 bp, Homo sapien
atggtgagtagggccatgccttaatatccatgc

SEQ ID NO: 564317 - DNA, 33 bp, Homo sapien
gaatgccaccctataccggaagggcatcatctc

SEQ ID NO: 564318 - DNA, 33 bp, Homo sapien
gaatgccaccctatactggaagggcatcatctc

SEQ ID NO: 564319 - DNA, 33 bp, Homo sapien
tcaagcaacccacttcacagcagaggagggata

SEQ ID NO: 564320 - DNA, 33 bp, Homo sapien
tcaagcaacccacttcgcagcagaggagggata

SEQ ID NO: 564321 - DNA, 33 bp, Homo sapien
agtgggttgcttgatccgaggtggtggtgagta

SEQ ID NO: 564322 - DNA, 33 bp, Homo sapien
agtgggttgcttgatctgaggtggtggtgagta

SEQ ID NO: 564323 - DNA, 33 bp, Homo sapien
tgtagagtgttggccagcaccacaatccatctt

SEQ ID NO: 564324 - DNA, 33 bp, Homo sapien
tgtagagtgttggccatcaccacaatccatctt

SEQ ID NO: 564325 - DNA, 33 bp, Homo sapien
gaatgaggcggccagaatacatctgcagccagt

SEQ ID NO: 564326 - DNA, 33 bp, Homo sapien
gaatgaggcggccagagtacatctgcagccagt

SEQ ID NO: 564327 - DNA, 33 bp, Homo sapien
ttgaaaacatttcctgaatgcacagatagagct

SEQ ID NO: 564328 - DNA, 33 bp, Homo sapien
ttgaaaacatttcctggatgcacagatagagct

SEQ ID NO: 564329 - DNA, 33 bp, Homo sapien
gtgtggcattgggggaaaaggcctccaggcagt

SEQ ID NO: 564330 - DNA, 33 bp, Homo sapien
gtgtggcattgggggacaaggcctccaggcagt

SEQ ID NO: 564331 - DNA, 33 bp, Homo sapien
gccaacaggataacacaccactttctggtattt

SEQ ID NO: 564332 - DNA, 33 bp, Homo sapien
gccaacaggataacacgccactttctggtattt

SEQ ID NO: 564333 - DNA, 33 bp, Homo sapien
ttcgtcaacagtggtaagtttttgtttttgttt

SEQ ID NO: 564334 - DNA, 33 bp, Homo sapien
ttcgtcaacagtggtaggtttttgtttttgttt

SEQ ID NO: 564335 - DNA, 33 bp, Homo sapien
ctattttatgacggacagcatcattcccctttc

SEQ ID NO: 564336 - DNA, 33 bp, Homo sapien
ctattttatgacggaccgcatcattcccctttc

SEQ ID NO: 564337 - DNA, 33 bp, Homo sapien
aagcatactctatcaaaatgaatgttgcaattt

SEQ ID NO: 564338 - DNA, 33 bp, Homo sapien
aagcatactctatcaatatgaatgttgcaattt

SEQ ID NO: 564339 - DNA, 33 bp, Homo sapien
gatctgtgtgttgttgcaggatgctctaatgtg

SEQ ID NO: 564340 - DNA, 33 bp, Homo sapien
gatctgtgtgttgttgtaggatgctctaatgtg

SEQ ID NO: 564341 - DNA, 33 bp, Homo sapien
tgctagggtaaccggacgctagtacttaggcca

SEQ ID NO: 564342 - DNA, 33 bp, Homo sapien
tgctagggtaaccggatgctagtacttaggcca

SEQ ID NO: 564343 - DNA, 33 bp, Homo sapien
catctccatccgtgtaagaagtgctcctgcagg

SEQ ID NO: 564344 - DNA, 33 bp, Homo sapien
catctccatccgtgtaggaagtgctcctgcagg

SEQ ID NO: 564345 - DNA, 33 bp, Homo sapien
gggaccattaaatgaacgcttcctgtgcatggc

SEQ ID NO: 564346 - DNA, 33 bp, Homo sapien
gggaccattaaatgaatgcttcctgtgcatggc

SEQ ID NO: 564347 - DNA, 33 bp, Homo sapien
ataagtttaacaacgggaactgctgggagaggt

SEQ ID NO: 564348 - DNA, 33 bp, Homo sapien
ataagtttaacaacggtaactgctgggagaggt

SEQ ID NO: 564349 - DNA, 33 bp, Homo sapien
ccacactcaaggataccgaggacacattttgga

SEQ ID NO: 564350 - DNA, 33 bp, Homo sapien
ccacactcaaggatactgaggacacattttgga

SEQ ID NO: 564351 - DNA, 33 bp, Homo sapien
gcaatttggaatttcaagtggtcgttccagcag

SEQ ID NO: 564352 - DNA, 33 bp, Homo sapien
gcaatttggaatttcaggtggtcgttccagcag

SEQ ID NO: 564353 - DNA, 33 bp, Homo sapien
aaataatttttggacaaatagatgtttttggta

SEQ ID NO: 564354 - DNA, 33 bp, Homo sapien
aaataatttttggacagatagatgtttttggta

SEQ ID NO: 564355 - DNA, 33 bp, Homo sapien
attttcataccttctcgaataagtctgcctttc

SEQ ID NO: 564356 - DNA, 33 bp, Homo sapien
attttcataccttctctaataagtctgcctttc

SEQ ID NO: 564357 - DNA, 33 bp, Homo sapien
aggcttctatgaaagcaatgaaaaaattggcaa

SEQ ID NO: 564358 - DNA, 33 bp, Homo sapien
aggcttctatgaaagcgatgaaaaaattggcaa

SEQ ID NO: 564359 - DNA, 33 bp, Homo sapien
aacagcctaaaggggggaagatggagctacata

SEQ ID NO: 564360 - DNA, 33 bp, Homo sapien
aacagcctaaagggggtaagatggagctacata

SEQ ID NO: 564361 - DNA, 33 bp, Homo sapien
ctaaatattttattcacgtcagtgctattttaa

SEQ ID NO: 564362 - DNA, 33 bp, Homo sapien
ctaaatattttattcatgtcagtgctattttaa

SEQ ID NO: 564363 - DNA, 33 bp, Homo sapien
gatctattgattaaacacaatctctaccaaaat

SEQ ID NO: 564364 - DNA, 33 bp, Homo sapien
gatctattgattaaacgcaatctctaccaaaat

SEQ ID NO: 564365 - DNA, 33 bp, Homo sapien
ctgtaggtttgtagtaagttttaaaatcaggat

SEQ ID NO: 564366 - DNA, 33 bp, Homo sapien
ctgtaggtttgtagtaggttttaaaatcaggat

SEQ ID NO: 564367 - DNA, 33 bp, Homo sapien
aatctgaaaaccaaaaaggtgcacaaatgaaag

SEQ ID NO: 564368 - DNA, 33 bp, Homo sapien
aatctgaaaaccaaaagggtgcacaaatgaaag

SEQ ID NO: 564369 - DNA, 33 bp, Homo sapien
ataatagctaaatcacagaatttcagctcttct

SEQ ID NO: 564370 - DNA, 33 bp, Homo sapien
ataatagctaaatcacggaatttcagctcttct

SEQ ID NO: 564371 - DNA, 33 bp, Homo sapien
agaacagagaggtacaaggtcagatttgcattt

SEQ ID NO: 564372 - DNA, 33 bp, Homo sapien
agaacagagaggtacagggtcagatttgcattt

SEQ ID NO: 564373 - DNA, 33 bp, Homo sapien
tctttatcgtgtaccacggtgtacaaatcccca

SEQ ID NO: 564374 - DNA, 33 bp, Homo sapien
tctttatcgtgtaccatggtgtacaaatcccca

SEQ ID NO: 564375 - DNA, 33 bp, Homo sapien
aagcaatagaagctaaaccttccagagccgtga

SEQ ID NO: 564376 - DNA, 33 bp, Homo sapien
aagcaatagaagctaagccttccagagccgtga

SEQ ID NO: 564377 - DNA, 33 bp, Homo sapien
acttaaagttcaaaaacggccaagctgtctatg

SEQ ID NO: 564378 - DNA, 33 bp, Homo sapien
acttaaagttcaaaaatggccaagctgtctatg

SEQ ID NO: 564379 - DNA, 33 bp, Homo sapien
aggcacggatcttgcccgcgcaatgtggagcca

SEQ ID NO: 564380 - DNA, 33 bp, Homo sapien
aggcacggatcttgccggcgcaatgtggagcca

SEQ ID NO: 564381 - DNA, 33 bp, Homo sapien
gtgtttggctctgagcagccatttgggtctacc

SEQ ID NO: 564382 - DNA, 33 bp, Homo sapien
gtgtttggctctgagcggccatttgggtctacc

SEQ ID NO: 564383 - DNA, 33 bp, Homo sapien
agaagttcaaggttgcccagagtagttagaatg

SEQ ID NO: 564384 - DNA, 33 bp, Homo sapien
agaagttcaaggttgcgcagagtagttagaatg

SEQ ID NO: 564385 - DNA, 33 bp, Homo sapien
gaaactatgagattgacaaaaatatagagagaa

SEQ ID NO: 564386 - DNA, 33 bp, Homo sapien
gaaactatgagattgagaaaaatatagagagaa

SEQ ID NO: 564387 - DNA, 33 bp, Homo sapien
tatttggttatgtatacatgtgatgctgctgct

SEQ ID NO: 564388 - DNA, 33 bp, Homo sapien
tatttggttatgtatatatgtgatgctgctgct

SEQ ID NO: 564389 - DNA, 33 bp, Homo sapien
ccccagcgaagagagcagccctaaaaaagaaat

SEQ ID NO: 564390 - DNA, 33 bp, Homo sapien
ccccagcgaagagagcggccctaaaaaagaaat

SEQ ID NO: 564391 - DNA, 33 bp, Homo sapien
tccatgctgagaaaccccactaatttcttgtta

SEQ ID NO: 564392 - DNA, 33 bp, Homo sapien
tccatgctgagaaacctcactaatttcttgtta

SEQ ID NO: 564393 - DNA, 33 bp, Homo sapien
tcccacagagaactgagctggacattttccttt

SEQ ID NO: 564394 - DNA, 33 bp, Homo sapien
tcccacagagaactgatctggacattttccttt

SEQ ID NO: 564395 - DNA, 33 bp, Homo sapien
gcccgaccagatcacaacaacttttatctcctg

SEQ ID NO: 564396 - DNA, 33 bp, Homo sapien
gcccgaccagatcacagcaacttttatctcctg

SEQ ID NO: 564397 - DNA, 33 bp, Homo sapien
tataaaaacttcatcactcttatccatttttag

SEQ ID NO: 564398 - DNA, 33 bp, Homo sapien
tataaaaacttcatcattcttatccatttttag

SEQ ID NO: 564399 - DNA, 33 bp, Homo sapien
agcgttgtctacattacggaacgattgtcagga

SEQ ID NO: 564400 - DNA, 33 bp, Homo sapien
agcgttgtctacattatggaacgattgtcagga

SEQ ID NO: 564401 - DNA, 33 bp, Homo sapien
aaaacataaaacaaaccatgaaatacaatctac

SEQ ID NO: 564402 - DNA, 33 bp, Homo sapien
aaaacataaaacaaacgatgaaatacaatctac

SEQ ID NO: 564403 - DNA, 33 bp, Homo sapien
tggatcttccccaccacgaagttattactgtgt

SEQ ID NO: 564404 - DNA, 33 bp, Homo sapien
tggatcttccccaccatgaagttattactgtgt

SEQ ID NO: 564405 - DNA, 33 bp, Homo sapien
tgtataaatggaatgacgatcaggcccgccttg

SEQ ID NO: 564406 - DNA, 33 bp, Homo sapien
tgtataaatggaatgatgatcaggcccgccttg

SEQ ID NO: 564407 - DNA, 33 bp, Homo sapien
ttaatgagctaacccaataagaaaagaatggcc

SEQ ID NO: 564408 - DNA, 33 bp, Homo sapien
ttaatgagctaacccagtaagaaaagaatggcc

SEQ ID NO: 564409 - DNA, 33 bp, Homo sapien
ggcccattttacagatcagtcactgaggccctg

SEQ ID NO: 564410 - DNA, 33 bp, Homo sapien
ggcccattttacagatgagtcactgaggccctg

SEQ ID NO: 564411 - DNA, 33 bp, Homo sapien
ttaagcagatgatttaagagaattaagagagaa

SEQ ID NO: 564412 - DNA, 33 bp, Homo sapien
ttaagcagatgatttatgagaattaagagagaa

SEQ ID NO: 564413 - DNA, 33 bp, Homo sapien
aagaaaaagagacccacgttaacagatgtggct

SEQ ID NO: 564414 - DNA, 33 bp, Homo sapien
aagaaaaagagacccatgttaacagatgtggct

SEQ ID NO: 564415 - DNA, 33 bp, Homo sapien
tcttattctctccagaactctaatcaaccaact

SEQ ID NO: 564416 - DNA, 33 bp, Homo sapien
tcttattctctccagacctctaatcaaccaact

SEQ ID NO: 564417 - DNA, 33 bp, Homo sapien
agtccatgactgtagtgaatggtttagttggtt

SEQ ID NO: 564418 - DNA, 33 bp, Homo sapien
agtccatgactgtagttaatggtttagttggtt

SEQ ID NO: 564419 - DNA, 33 bp, Homo sapien
aaatagcatgtaaaacgaaaacagtatggtcct

SEQ ID NO: 564420 - DNA, 33 bp, Homo sapien
aaatagcatgtaaaactaaaacagtatggtcct

SEQ ID NO: 564421 - DNA, 33 bp, Homo sapien
taagtgatcctgaatgacatcatatttttacgt

SEQ ID NO: 564422 - DNA, 33 bp, Homo sapien
taagtgatcctgaatgtcatcatatttttacgt

SEQ ID NO: 564423 - DNA, 33 bp, Homo sapien
cattgaggattggatccattctgcattaatttt

SEQ ID NO: 564424 - DNA, 33 bp, Homo sapien
cattgaggattggatctattctgcattaatttt

SEQ ID NO: 564425 - DNA, 33 bp, Homo sapien
gtatttttttgttctgcagcagtgttattctca

SEQ ID NO: 564426 - DNA, 33 bp, Homo sapien
gtatttttttgttctgtagcagtgttattctca

SEQ ID NO: 564427 - DNA, 33 bp, Homo sapien
tcttccaatttaaaaccaatgatttcttcaagg

SEQ ID NO: 564428 - DNA, 33 bp, Homo sapien
tcttccaatttaaaacgaatgatttcttcaagg

SEQ ID NO: 564429 - DNA, 33 bp, Homo sapien
aaatttccagatatcactaaaacaatcaaaaca

SEQ ID NO: 564430 - DNA, 33 bp, Homo sapien
aaatttccagatatcattaaaacaatcaaaaca

SEQ ID NO: 564431 - DNA, 33 bp, Homo sapien
ggtaacacaaaccacaatggccaattagatttc

SEQ ID NO: 564432 - DNA, 33 bp, Homo sapien
ggtaacacaaaccacagtggccaattagatttc

SEQ ID NO: 564433 - DNA, 33 bp, Homo sapien
cctccttattgcaatacgctacagctgggatgg

SEQ ID NO: 564434 - DNA, 33 bp, Homo sapien
cctccttattgcaatatgctacagctgggatgg

SEQ ID NO: 564435 - DNA, 33 bp, Homo sapien
ttgttatgaaaaggacacttctctcaccccact

SEQ ID NO: 564436 - DNA, 33 bp, Homo sapien
ttgttatgaaaaggactcttctctcaccccact

SEQ ID NO: 564437 - DNA, 33 bp, Homo sapien
ctcaggaagttacaaaagtttccgaagctctgt

SEQ ID NO: 564438 - DNA, 33 bp, Homo sapien
ctcaggaagttacaaaggtttccgaagctctgt

SEQ ID NO: 564439 - DNA, 33 bp, Homo sapien
gccaagtctttataccaaccaacagtagcattg

SEQ ID NO: 564440 - DNA, 33 bp, Homo sapien
gccaagtctttatacctaccaacagtagcattg

SEQ ID NO: 564441 - DNA, 33 bp, Homo sapien
ttaagcagtgttcttcaccatggacatggctgg

SEQ ID NO: 564442 - DNA, 33 bp, Homo sapien
ttaagcagtgttcttcgccatggacatggctgg

SEQ ID NO: 564443 - DNA, 33 bp, Homo sapien
ggccaagtacccatgaacttttatgcttcttga

SEQ ID NO: 564444 - DNA, 33 bp, Homo sapien
ggccaagtacccatgagcttttatgcttcttga

SEQ ID NO: 564445 - DNA, 33 bp, Homo sapien
gttttacacattgaagaaaaggtgatgggaagc

SEQ ID NO: 564446 - DNA, 33 bp, Homo sapien
gttttacacattgaaggaaaggtgatgggaagc

SEQ ID NO: 564447 - DNA, 33 bp, Homo sapien
ttcagcagtcagctacaataaaatagatttctt

SEQ ID NO: 564448 - DNA, 33 bp, Homo sapien
ttcagcagtcagctacgataaaatagatttctt

SEQ ID NO: 564449 - DNA, 33 bp, Homo sapien
agacgggtgagttatcagagtggctttgatctc

SEQ ID NO: 564450 - DNA, 33 bp, Homo sapien
agacgggtgagttatcggagtggctttgatctc

SEQ ID NO: 564451 - DNA, 33 bp, Homo sapien
tttttaccatgtgagacggagcaaacaattttg

SEQ ID NO: 564452 - DNA, 33 bp, Homo sapien
tttttaccatgtgagatggagcaaacaattttg

SEQ ID NO: 564453 - DNA, 33 bp, Homo sapien
atactgtgagcgcgccaaagattcaatgccaga

SEQ ID NO: 564454 - DNA, 33 bp, Homo sapien
atactgtgagcgcgccgaagattcaatgccaga

SEQ ID NO: 564455 - DNA, 33 bp, Homo sapien
attcatatgaatgatccaatgttgtccaattcc

SEQ ID NO: 564456 - DNA, 33 bp, Homo sapien
attcatatgaatgatctaatgttgtccaattcc

SEQ ID NO: 564457 - DNA, 33 bp, Homo sapien
cagcctgcttgcaaacagatattgagtaggtat

SEQ ID NO: 564458 - DNA, 33 bp, Homo sapien
cagcctgcttgcaaacggatattgagtaggtat

SEQ ID NO: 564459 - DNA, 33 bp, Homo sapien
agaacatcagatcaacaggaagataatttctgc

SEQ ID NO: 564460 - DNA, 33 bp, Homo sapien
agaacatcagatcaacgggaagataatttctgc

SEQ ID NO: 564461 - DNA, 33 bp, Homo sapien
ccactgtaggccactaacaaaactatttttaga

SEQ ID NO: 564462 - DNA, 33 bp, Homo sapien
ccactgtaggccactagcaaaactatttttaga

SEQ ID NO: 564463 - DNA, 33 bp, Homo sapien
gcatacaatccaaaaactgtagacaagcaaagt

SEQ ID NO: 564464 - DNA, 33 bp, Homo sapien
gcatacaatccaaaaattgtagacaagcaaagt

SEQ ID NO: 564465 - DNA, 33 bp, Homo sapien
tgtggtcaagaaaggtaaaaagaaggtacatgc

SEQ ID NO: 564466 - DNA, 33 bp, Homo sapien
tgtggtcaagaaaggtgaaaagaaggtacatgc

SEQ ID NO: 564467 - DNA, 33 bp, Homo sapien
gtgcagccataagatgcaaggaaactagagtcc

SEQ ID NO: 564468 - DNA, 33 bp, Homo sapien
gtgcagccataagatgtaaggaaactagagtcc

SEQ ID NO: 564469 - DNA, 33 bp, Homo sapien
atgtttgcacaatggcaaaattacccagtgaca

SEQ ID NO: 564470 - DNA, 33 bp, Homo sapien
atgtttgcacaatggcgaaattacccagtgaca

SEQ ID NO: 564471 - DNA, 33 bp, Homo sapien
gagataatgtttgcgaaaggcttagtatagtgc

SEQ ID NO: 564472 - DNA, 33 bp, Homo sapien
gagataatgtttgcgagaggcttagtatagtgc

SEQ ID NO: 564473 - DNA, 33 bp, Homo sapien
aaatcatccaatattaaacttcattgccctcag

SEQ ID NO: 564474 - DNA, 33 bp, Homo sapien
aaatcatccaatattagacttcattgccctcag

SEQ ID NO: 564475 - DNA, 33 bp, Homo sapien
ggtttactcaatggtaagtagcttttttatttt

SEQ ID NO: 564476 - DNA, 33 bp, Homo sapien
ggtttactcaatggtaggtagcttttttatttt

SEQ ID NO: 564477 - DNA, 33 bp, Homo sapien
caagggtctagaagcaaattcataaacattcag

SEQ ID NO: 564478 - DNA, 33 bp, Homo sapien
caagggtctagaagcagattcataaacattcag

SEQ ID NO: 564479 - DNA, 33 bp, Homo sapien
ccatactgtcttcttacaaagcaccagtaatta

SEQ ID NO: 564480 - DNA, 33 bp, Homo sapien
ccatactgtcttcttataaagcaccagtaatta

SEQ ID NO: 564481 - DNA, 33 bp, Homo sapien
gttttagaagtaataacgttccaaggtattctg

SEQ ID NO: 564482 - DNA, 33 bp, Homo sapien
gttttagaagtaataatgttccaaggtattctg

SEQ ID NO: 564483 - DNA, 33 bp, Homo sapien
cttgaaaactatgctccatctaataggtctctg

SEQ ID NO: 564484 - DNA, 33 bp, Homo sapien
cttgaaaactatgctctatctaataggtctctg

SEQ ID NO: 564485 - DNA, 33 bp, Homo sapien
acccttgccatccaccaaagtctgaattgcata

SEQ ID NO: 564486 - DNA, 33 bp, Homo sapien
acccttgccatccaccgaagtctgaattgcata

SEQ ID NO: 564487 - DNA, 33 bp, Homo sapien
gacgttcttgctggaaaactgacaacgggcttg

SEQ ID NO: 564488 - DNA, 33 bp, Homo sapien
gacgttcttgctggaagactgacaacgggcttg

SEQ ID NO: 564489 - DNA, 33 bp, Homo sapien
ttaaagccacgctccacggaactttgcctgaga

SEQ ID NO: 564490 - DNA, 33 bp, Homo sapien
ttaaagccacgctccatggaactttgcctgaga

SEQ ID NO: 564491 - DNA, 33 bp, Homo sapien
tcctgtcctgcttcacacacccccatgctagtc

SEQ ID NO: 564492 - DNA, 33 bp, Homo sapien
tcctgtcctgcttcacgcacccccatgctagtc

SEQ ID NO: 564493 - DNA, 33 bp, Homo sapien
aaagaaatctgggaaactgctggaaatgaatgt

SEQ ID NO: 564494 - DNA, 33 bp, Homo sapien
aaagaaatctgggaaattgctggaaatgaatgt

SEQ ID NO: 564495 - DNA, 33 bp, Homo sapien
gtgggagaactggctacgatggccgcaggaggt

SEQ ID NO: 564496 - DNA, 33 bp, Homo sapien
gtgggagaactggctatgatggccgcaggaggt

SEQ ID NO: 564497 - DNA, 33 bp, Homo sapien
gcctcccttgcagcgacacgaggaccatgtgac

SEQ ID NO: 564498 - DNA, 33 bp, Homo sapien
gcctcccttgcagcgatacgaggaccatgtgac

SEQ ID NO: 564499 - DNA, 33 bp, Homo sapien
attggaagctacagaaacaagttcaggttcttc

SEQ ID NO: 564500 - DNA, 33 bp, Homo sapien
attggaagctacagaagcaagttcaggttcttc

SEQ ID NO: 564501 - DNA, 33 bp, Homo sapien
aaatagaagaaaatgaaaggtgacaggtttatc

SEQ ID NO: 564502 - DNA, 33 bp, Homo sapien
aaatagaagaaaatgagaggtgacaggtttatc

SEQ ID NO: 564503 - DNA, 33 bp, Homo sapien
acagtgcagagccattaaacaaatttttccaat

SEQ ID NO: 564504 - DNA, 33 bp, Homo sapien
acagtgcagagccatttaacaaatttttccaat

SEQ ID NO: 564505 - DNA, 33 bp, Homo sapien
agacggcttttctggaaagggctcattagttta

SEQ ID NO: 564506 - DNA, 33 bp, Homo sapien
agacggcttttctggagagggctcattagttta

SEQ ID NO: 564507 - DNA, 33 bp, Homo sapien
aaatgtagtaccagagacctaattctcaaccac

SEQ ID NO: 564508 - DNA, 33 bp, Homo sapien
aaatgtagtaccagagccctaattctcaaccac

SEQ ID NO: 564509 - DNA, 33 bp, Homo sapien
gccacatggctcgtcaaaggaggggtggagtta

SEQ ID NO: 564510 - DNA, 33 bp, Homo sapien
gccacatggctcgtcagaggaggggtggagtta

SEQ ID NO: 564511 - DNA, 33 bp, Homo sapien
gcttgactaatatgcaaagtaaggccacagatt

SEQ ID NO: 564512 - DNA, 33 bp, Homo sapien
gcttgactaatatgcagagtaaggccacagatt

SEQ ID NO: 564513 - DNA, 33 bp, Homo sapien
tgatttggtcttttacactactagaagaatttt

SEQ ID NO: 564514 - DNA, 33 bp, Homo sapien
tgatttggtcttttacgctactagaagaatttt

SEQ ID NO: 564515 - DNA, 33 bp, Homo sapien
aactgaaaaagtcactcaactgtagatactctt

SEQ ID NO: 564516 - DNA, 33 bp, Homo sapien
aactgaaaaagtcactgaactgtagatactctt

SEQ ID NO: 564517 - DNA, 33 bp, Homo sapien
aaattgggcttttaaagatacttctttctgttc

SEQ ID NO: 564518 - DNA, 33 bp, Homo sapien
aaattgggcttttaaatatacttctttctgttc

SEQ ID NO: 564519 - DNA, 33 bp, Homo sapien
taatgaggaaatcaggcacaatgctcattgatc

SEQ ID NO: 564520 - DNA, 33 bp, Homo sapien
taatgaggaaatcaggtacaatgctcattgatc

SEQ ID NO: 564521 - DNA, 33 bp, Homo sapien
tactgctttttgctcactcattatgtaggaagc

SEQ ID NO: 564522 - DNA, 33 bp, Homo sapien
tactgctttttgctcattcattatgtaggaagc

SEQ ID NO: 564523 - DNA, 33 bp, Homo sapien
tatgatccagaatgtaaaatctgcgcaacatcc

SEQ ID NO: 564524 - DNA, 33 bp, Homo sapien
tatgatccagaatgtagaatctgcgcaacatcc

SEQ ID NO: 564525 - DNA, 33 bp, Homo sapien
atatttacaaataaaacgcctcatggacaaaaa

SEQ ID NO: 564526 - DNA, 33 bp, Homo sapien
atatttacaaataaaatgcctcatggacaaaaa

SEQ ID NO: 564527 - DNA, 33 bp, Homo sapien
gccactctttccccaacttgattttccataagt

SEQ ID NO: 564528 - DNA, 33 bp, Homo sapien
gccactctttccccaagttgattttccataagt

SEQ ID NO: 564529 - DNA, 33 bp, Homo sapien
ttcatccatgtcaagacgtgtgtcaaaatttcc

SEQ ID NO: 564530 - DNA, 33 bp, Homo sapien
ttcatccatgtcaagatgtgtgtcaaaatttcc

SEQ ID NO: 564531 - DNA, 33 bp, Homo sapien
agcttcacggctttcacggatggccttggaaat

SEQ ID NO: 564532 - DNA, 33 bp, Homo sapien
agcttcacggctttcatggatggccttggaaat

SEQ ID NO: 564533 - DNA, 33 bp, Homo sapien
aatgatactacatgtcaaatgacaagctgaaac

SEQ ID NO: 564534 - DNA, 33 bp, Homo sapien
aatgatactacatgtcgaatgacaagctgaaac

SEQ ID NO: 564535 - DNA, 33 bp, Homo sapien
tgtgtttagttttgtaccttttgaaaagccact

SEQ ID NO: 564536 - DNA, 33 bp, Homo sapien
tgtgtttagttttgtagcttttgaaaagccact

SEQ ID NO: 564537 - DNA, 33 bp, Homo sapien
agaattactttcaactaagaaaaagatccggaa

SEQ ID NO: 564538 - DNA, 33 bp, Homo sapien
agaattactttcaactgagaaaaagatccggaa

SEQ ID NO: 564539 - DNA, 33 bp, Homo sapien
cccaaatttaataaccaattttgagcacccaga

SEQ ID NO: 564540 - DNA, 33 bp, Homo sapien
cccaaatttaataacccattttgagcacccaga

SEQ ID NO: 564541 - DNA, 33 bp, Homo sapien
aaaatgccttgtgccaaaatattagacattaaa

SEQ ID NO: 564542 - DNA, 33 bp, Homo sapien
aaaatgccttgtgccagaatattagacattaaa

SEQ ID NO: 564543 - DNA, 33 bp, Homo sapien
accttttatcctttaacgaccatgttaaataaa

SEQ ID NO: 564544 - DNA, 33 bp, Homo sapien
accttttatcctttaatgaccatgttaaataaa

SEQ ID NO: 564545 - DNA, 33 bp, Homo sapien
tctcacttcacattgggaatttcctcccttgct

SEQ ID NO: 564546 - DNA, 33 bp, Homo sapien
tctcacttcacattggtaatttcctcccttgct

SEQ ID NO: 564547 - DNA, 33 bp, Homo sapien
accttagcctcttaaacagctggtagtatagga

SEQ ID NO: 564548 - DNA, 33 bp, Homo sapien
accttagcctcttaaatagctggtagtatagga

SEQ ID NO: 564549 - DNA, 33 bp, Homo sapien
acagacaattaagaaccattacacaattaattc

SEQ ID NO: 564550 - DNA, 33 bp, Homo sapien
acagacaattaagaacgattacacaattaattc

SEQ ID NO: 564551 - DNA, 33 bp, Homo sapien
tgtggtagtcaataaacgggagtctgttgacag

SEQ ID NO: 564552 - DNA, 33 bp, Homo sapien
tgtggtagtcaataaatgggagtctgttgacag

SEQ ID NO: 564553 - DNA, 33 bp, Homo sapien
caaatacccagggaaacgctccagatgctgtgc

SEQ ID NO: 564554 - DNA, 33 bp, Homo sapien
caaatacccagggaaatgctccagatgctgtgc

SEQ ID NO: 564555 - DNA, 33 bp, Homo sapien
aagcaacaagatttaccgcgaagggcgaaagaa

SEQ ID NO: 564556 - DNA, 33 bp, Homo sapien
aagcaacaagatttactgcgaagggcgaaagaa

SEQ ID NO: 564557 - DNA, 33 bp, Homo sapien
ttccccgagctccagacggttctggcctctctc

SEQ ID NO: 564558 - DNA, 33 bp, Homo sapien
ttccccgagctccagatggttctggcctctctc

SEQ ID NO: 564559 - DNA, 33 bp, Homo sapien
cttctcaagtgtattccaggactagtactgtag

SEQ ID NO: 564560 - DNA, 33 bp, Homo sapien
cttctcaagtgtattctaggactagtactgtag

SEQ ID NO: 564561 - DNA, 33 bp, Homo sapien
gcctgctgagcagacacgcaggagtagaagcag

SEQ ID NO: 564562 - DNA, 33 bp, Homo sapien
gcctgctgagcagacaggcaggagtagaagcag

SEQ ID NO: 564563 - DNA, 33 bp, Homo sapien
tttgttgtctgtggaacctgttttctctctgga

SEQ ID NO: 564564 - DNA, 33 bp, Homo sapien
tttgttgtctgtggaatctgttttctctctgga

SEQ ID NO: 564565 - DNA, 33 bp, Homo sapien
tttcatggtttgttacaaaggtgctacaaatta

SEQ ID NO: 564566 - DNA, 33 bp, Homo sapien
tttcatggtttgttaccaaggtgctacaaatta

SEQ ID NO: 564567 - DNA, 33 bp, Homo sapien
gctgatgcctaacctagatcctgttgatcctaa

SEQ ID NO: 564568 - DNA, 33 bp, Homo sapien
gctgatgcctaacctatatcctgttgatcctaa

SEQ ID NO: 564569 - DNA, 33 bp, Homo sapien
cgtgttagaacaaggacggattaaaaatgacct

SEQ ID NO: 564570 - DNA, 33 bp, Homo sapien
cgtgttagaacaaggatggattaaaaatgacct

SEQ ID NO: 564571 - DNA, 33 bp, Homo sapien
tatgtacctgtgagtgcaatcattggatcatgt

SEQ ID NO: 564572 - DNA, 33 bp, Homo sapien
tatgtacctgtgagtggaatcattggatcatgt

SEQ ID NO: 564573 - DNA, 33 bp, Homo sapien
cagaaactaattcctgaaaagatctacaattta

SEQ ID NO: 564574 - DNA, 33 bp, Homo sapien
cagaaactaattcctggaaagatctacaattta

SEQ ID NO: 564575 - DNA, 33 bp, Homo sapien
tctgtctcggtgtcccaaattgctctgattata

SEQ ID NO: 564576 - DNA, 33 bp, Homo sapien
tctgtctcggtgtcccgaattgctctgattata

SEQ ID NO: 564577 - DNA, 33 bp, Homo sapien
ggtgacaaaatgagaccctacacacacacacac

SEQ ID NO: 564578 - DNA, 33 bp, Homo sapien
ggtgacaaaatgagactctacacacacacacac

SEQ ID NO: 564579 - DNA, 33 bp, Homo sapien
gatcttcatttttatacgacgttagtgaatgag

SEQ ID NO: 564580 - DNA, 33 bp, Homo sapien
gatcttcatttttatatgacgttagtgaatgag

SEQ ID NO: 564581 - DNA, 33 bp, Homo sapien
tagccatggtttcaacgagacagaattttgtgt

SEQ ID NO: 564582 - DNA, 33 bp, Homo sapien
tagccatggtttcaactagacagaattttgtgt

SEQ ID NO: 564583 - DNA, 33 bp, Homo sapien
actaagcaataaattacccctactggccagcat

SEQ ID NO: 564584 - DNA, 33 bp, Homo sapien
actaagcaataaattagccctactggccagcat

SEQ ID NO: 564585 - DNA, 33 bp, Homo sapien
tcaacagcaagaaaatcactaagcaataaatta

SEQ ID NO: 564586 - DNA, 33 bp, Homo sapien
tcaacagcaagaaaattactaagcaataaatta

SEQ ID NO: 564587 - DNA, 33 bp, Homo sapien
aaaatgtttccattaactctgtaactctcctct

SEQ ID NO: 564588 - DNA, 33 bp, Homo sapien
aaaatgtttccattaattctgtaactctcctct

SEQ ID NO: 564589 - DNA, 33 bp, Homo sapien
gacagacccttagagaatatagtcaactctaac

SEQ ID NO: 564590 - DNA, 33 bp, Homo sapien
gacagacccttagagagtatagtcaactctaac

SEQ ID NO: 564591 - DNA, 33 bp, Homo sapien
tcagattcagtagaaaagtgtcagtcctcagaa

SEQ ID NO: 564592 - DNA, 33 bp, Homo sapien
tcagattcagtagaaacgtgtcagtcctcagaa

SEQ ID NO: 564593 - DNA, 33 bp, Homo sapien
ccattaaagggaaccactatcctgactgcagta

SEQ ID NO: 564594 - DNA, 33 bp, Homo sapien
ccattaaagggaaccagtatcctgactgcagta

SEQ ID NO: 564595 - DNA, 33 bp, Homo sapien
catttctggagaagacactgatagagtagctta

SEQ ID NO: 564596 - DNA, 33 bp, Homo sapien
catttctggagaagacgctgatagagtagctta

SEQ ID NO: 564597 - DNA, 33 bp, Homo sapien
aaccttgatatatggacagtatgtggattgttg

SEQ ID NO: 564598 - DNA, 33 bp, Homo sapien
aaccttgatatatggatagtatgtggattgttg

SEQ ID NO: 564599 - DNA, 33 bp, Homo sapien
ctgtgccttgatgtaaatagcaaaattattttc

SEQ ID NO: 564600 - DNA, 33 bp, Homo sapien
ctgtgccttgatgtaagtagcaaaattattttc

SEQ ID NO: 564601 - DNA, 33 bp, Homo sapien
ttaatactgtcttcccaaagatcatgtaaatgt

SEQ ID NO: 564602 - DNA, 33 bp, Homo sapien
ttaatactgtcttcccgaagatcatgtaaatgt

SEQ ID NO: 564603 - DNA, 33 bp, Homo sapien
agtgagaagccgagtgcaactggagtggaggga

SEQ ID NO: 564604 - DNA, 33 bp, Homo sapien
agtgagaagccgagtgtaactggagtggaggga

SEQ ID NO: 564605 - DNA, 33 bp, Homo sapien
atggatctcttcctaaataataaaaacgctaca

SEQ ID NO: 564606 - DNA, 33 bp, Homo sapien
atggatctcttcctaagtaataaaaacgctaca

SEQ ID NO: 564607 - DNA, 33 bp, Homo sapien
ttttttaaatatatgccaaaatatacattttac

SEQ ID NO: 564608 - DNA, 33 bp, Homo sapien
ttttttaaatatatgcgaaaatatacattttac

SEQ ID NO: 564609 - DNA, 33 bp, Homo sapien
aaattatagtggagccacagaatcctgaagacc

SEQ ID NO: 564610 - DNA, 33 bp, Homo sapien
aaattatagtggagccgcagaatcctgaagacc

SEQ ID NO: 564611 - DNA, 33 bp, Homo sapien
ttggattttaggctccaatgtacaaattttggg

SEQ ID NO: 564612 - DNA, 33 bp, Homo sapien
ttggattttaggctcccatgtacaaattttggg

SEQ ID NO: 564613 - DNA, 33 bp, Homo sapien
gcaatggcccataatacgttttagacacagact

SEQ ID NO: 564614 - DNA, 33 bp, Homo sapien
gcaatggcccataatatgttttagacacagact

SEQ ID NO: 564615 - DNA, 33 bp, Homo sapien
ggcccaccaagtctccactagaacctctttcat

SEQ ID NO: 564616 - DNA, 33 bp, Homo sapien
ggcccaccaagtctccgctagaacctctttcat

SEQ ID NO: 564617 - DNA, 33 bp, Homo sapien
agctttcaacatcatcaaagggtgttccaaggg

SEQ ID NO: 564618 - DNA, 33 bp, Homo sapien
agctttcaacatcatccaagggtgttccaaggg

SEQ ID NO: 564619 - DNA, 33 bp, Homo sapien
ccaaattgatttccagaaagagcttactctttc

SEQ ID NO: 564620 - DNA, 33 bp, Homo sapien
ccaaattgatttccaggaagagcttactctttc

SEQ ID NO: 564621 - DNA, 33 bp, Homo sapien
tgaaccttgaacacatgagtgaaataagcccat

SEQ ID NO: 564622 - DNA, 33 bp, Homo sapien
tgaaccttgaacacattagtgaaataagcccat

SEQ ID NO: 564623 - DNA, 33 bp, Homo sapien
aaagttaacaataatactaatcctgataaaact

SEQ ID NO: 564624 - DNA, 33 bp, Homo sapien
aaagttaacaataatagtaatcctgataaaact

SEQ ID NO: 564625 - DNA, 33 bp, Homo sapien
tctccactataattgaacaatcacaaacggccc

SEQ ID NO: 564626 - DNA, 33 bp, Homo sapien
tctccactataattgagcaatcacaaacggccc

SEQ ID NO: 564627 - DNA, 33 bp, Homo sapien
ggaagaaaaatgaaagccatctaaatgtccatc

SEQ ID NO: 564628 - DNA, 33 bp, Homo sapien
ggaagaaaaatgaaaggcatctaaatgtccatc

SEQ ID NO: 564629 - DNA, 33 bp, Homo sapien
gacaacagtgccacaacgagtagccttgtacaa

SEQ ID NO: 564630 - DNA, 33 bp, Homo sapien
gacaacagtgccacaatgagtagccttgtacaa

SEQ ID NO: 564631 - DNA, 33 bp, Homo sapien
tctgcatcgccttagccgaccccagtgcacttt

SEQ ID NO: 564632 - DNA, 33 bp, Homo sapien
tctgcatcgccttagctgaccccagtgcacttt

SEQ ID NO: 564633 - DNA, 33 bp, Homo sapien
cagaaaatgaggcaaacgagaggaaaagattct

SEQ ID NO: 564634 - DNA, 33 bp, Homo sapien
cagaaaatgaggcaaatgagaggaaaagattct

SEQ ID NO: 564635 - DNA, 33 bp, Homo sapien
atattctacacaaatactaaacattcctcttta

SEQ ID NO: 564636 - DNA, 33 bp, Homo sapien
atattctacacaaatagtaaacattcctcttta

SEQ ID NO: 564637 - DNA, 33 bp, Homo sapien
gtggtgagctcgcaaaaaagaggccaggaagct

SEQ ID NO: 564638 - DNA, 33 bp, Homo sapien
gtggtgagctcgcaaagaagaggccaggaagct

SEQ ID NO: 564639 - DNA, 33 bp, Homo sapien
agcagaacaattctaaacagatgtagttgaaac

SEQ ID NO: 564640 - DNA, 33 bp, Homo sapien
agcagaacaattctaagcagatgtagttgaaac

SEQ ID NO: 564641 - DNA, 33 bp, Homo sapien
tagtttggatgtttgccaatctaaagatgagga

SEQ ID NO: 564642 - DNA, 33 bp, Homo sapien
tagtttggatgtttgctaatctaaagatgagga

SEQ ID NO: 564643 - DNA, 33 bp, Homo sapien
taatgaaatgaaagtgacaatcctggcatattt

SEQ ID NO: 564644 - DNA, 33 bp, Homo sapien
taatgaaatgaaagtggcaatcctggcatattt

SEQ ID NO: 564645 - DNA, 33 bp, Homo sapien
aaatacaatttcccaacgtcacatgctcaccca

SEQ ID NO: 564646 - DNA, 33 bp, Homo sapien
aaatacaatttcccaatgtcacatgctcaccca

SEQ ID NO: 564647 - DNA, 33 bp, Homo sapien
atgagattatgcaagaccatgtatgtgcctggc

SEQ ID NO: 564648 - DNA, 33 bp, Homo sapien
atgagattatgcaagatcatgtatgtgcctggc

SEQ ID NO: 564649 - DNA, 33 bp, Homo sapien
tcttcctttccagcaccggctttcccaacctga

SEQ ID NO: 564650 - DNA, 33 bp, Homo sapien
tcttcctttccagcactggctttcccaacctga

SEQ ID NO: 564651 - DNA, 33 bp, Homo sapien
cctgcattatctcagcaagacctaaacttaatt

SEQ ID NO: 564652 - DNA, 33 bp, Homo sapien
cctgcattatctcagcgagacctaaacttaatt

SEQ ID NO: 564653 - DNA, 33 bp, Homo sapien
ccagtgtcttcccaacacacctcaaatgaacat

SEQ ID NO: 564654 - DNA, 33 bp, Homo sapien
ccagtgtcttcccaacgcacctcaaatgaacat

SEQ ID NO: 564655 - DNA, 33 bp, Homo sapien
tcagcgattcctcatgaaagataatctcagtct

SEQ ID NO: 564656 - DNA, 33 bp, Homo sapien
tcagcgattcctcatggaagataatctcagtct

SEQ ID NO: 564657 - DNA, 33 bp, Homo sapien
gcagactggaacaccaaatagccaagttttgat

SEQ ID NO: 564658 - DNA, 33 bp, Homo sapien
gcagactggaacaccagatagccaagttttgat

SEQ ID NO: 564659 - DNA, 33 bp, Homo sapien
gcagacaacgaattggaaccaggaaaagcccaa

SEQ ID NO: 564660 - DNA, 33 bp, Homo sapien
gcagacaacgaattgggaccaggaaaagcccaa

SEQ ID NO: 564661 - DNA, 33 bp, Homo sapien
gatatagactgtagcaatgattggacgactctg

SEQ ID NO: 564662 - DNA, 33 bp, Homo sapien
gatatagactgtagcactgattggacgactctg

SEQ ID NO: 564663 - DNA, 33 bp, Homo sapien; identical to SEQ ID NO: 564661

SEQ ID NO: 564664 - DNA, 33 bp, Homo sapien; identical to SEQ ID NO: 564662

SEQ ID NO: 564665 - DNA, 33 bp, Homo sapien
gctgccacatttggaagtgatttgggactcaaa

SEQ ID NO: 564666 - DNA, 33 bp, Homo sapien
gctgccacatttggaattgatttgggactcaaa

SEQ ID NO: 564667 - DNA, 33 bp, Homo sapien
ctccactgcgtcaggaacctttagatactgcaa

SEQ ID NO: 564668 - DNA, 33 bp, Homo sapien
ctccactgcgtcaggagcctttagatactgcaa

SEQ ID NO: 564669 - DNA, 33 bp, Homo sapien
ttgaagagaaatgatccgaagccaaatttggcc

SEQ ID NO: 564670 - DNA, 33 bp, Homo sapien
ttgaagagaaatgatctgaagccaaatttggcc

SEQ ID NO: 564671 - DNA, 33 bp, Homo sapien
tatagaacagcgcatccgaagaggaagcaggcc

SEQ ID NO: 564672 - DNA, 33 bp, Homo sapien
tatagaacagcgcatctgaagaggaagcaggcc

SEQ ID NO: 564673 - DNA, 33 bp, Homo sapien
cttttctcagattctcagaaatcttcacatact

SEQ ID NO: 564674 - DNA, 33 bp, Homo sapien
cttttctcagattctcggaaatcttcacatact

SEQ ID NO: 564675 - DNA, 33 bp, Homo sapien
atggaaaacctcacagcctctgttaatagctgc

SEQ ID NO: 564676 - DNA, 33 bp, Homo sapien
atggaaaacctcacagtctctgttaatagctgc

SEQ ID NO: 564677 - DNA, 33 bp, Homo sapien
ggattcaaagagactcaaaaccctttaatggca

SEQ ID NO: 564678 - DNA, 33 bp, Homo sapien
ggattcaaagagactcgaaaccctttaatggca

SEQ ID NO: 564679 - DNA, 33 bp, Homo sapien
tacaacattttcataacagaagatgtcacttca

SEQ ID NO: 564680 - DNA, 33 bp, Homo sapien
tacaacattttcataatagaagatgtcacttca

SEQ ID NO: 564681 - DNA, 33 bp, Homo sapien
gcacctcagggattgcagagaagttatagatgg

SEQ ID NO: 564682 - DNA, 33 bp, Homo sapien
gcacctcagggattgcggagaagttatagatgg

SEQ ID NO: 564683 - DNA, 33 bp, Homo sapien
ggcaacagacgctgctaaccctgtttccctagt

SEQ ID NO: 564684 - DNA, 33 bp, Homo sapien
ggcaacagacgctgctgaccctgtttccctagt

SEQ ID NO: 564685 - DNA, 33 bp, Homo sapien
atgttattttacgttcgcgacagaatccattcc

SEQ ID NO: 564686 - DNA, 33 bp, Homo sapien
atgttattttacgttctcgacagaatccattcc

SEQ ID NO: 564687 - DNA, 33 bp, Homo sapien
gcctttgaatcttcacagcttatctcctacttg

SEQ ID NO: 564688 - DNA, 33 bp, Homo sapien
gcctttgaatcttcacggcttatctcctacttg

SEQ ID NO: 564689 - DNA, 33 bp, Homo sapien
tgagcaaccaagcaaacaggcatgaacagaaga

SEQ ID NO: 564690 - DNA, 33 bp, Homo sapien
tgagcaaccaagcaaagaggcatgaacagaaga

SEQ ID NO: 564691 - DNA, 33 bp, Homo sapien
gctctccctcattttcaatgtataggtcaaaga

SEQ ID NO: 564692 - DNA, 33 bp, Homo sapien
gctctccctcattttctatgtataggtcaaaga

SEQ ID NO: 564693 - DNA, 33 bp, Homo sapien
taacaacttttgtataaactcttgcagtgattg

SEQ ID NO: 564694 - DNA, 33 bp, Homo sapien
taacaacttttgtatacactcttgcagtgattg

SEQ ID NO: 564695 - DNA, 33 bp, Homo sapien
gattaataactgccagaagcagggttcatcaat

SEQ ID NO: 564696 - DNA, 33 bp, Homo sapien
gattaataactgccagcagcagggttcatcaat

SEQ ID NO: 564697 - DNA, 33 bp, Homo sapien
gcaaactggcctcgaacgttggggaagagaatc

SEQ ID NO: 564698 - DNA, 33 bp, Homo sapien
gcaaactggcctcgaatgttggggaagagaatc

SEQ ID NO: 564699 - DNA, 33 bp, Homo sapien
gctgcacagcttcttgcaaagtttgtccccagg

SEQ ID NO: 564700 - DNA, 33 bp, Homo sapien
gctgcacagcttcttgtaaagtttgtccccagg

SEQ ID NO: 564701 - DNA, 33 bp, Homo sapien
tccgaaagacctctacacccaaggaccctgggg

SEQ ID NO: 564702 - DNA, 33 bp, Homo sapien
tccgaaagacctctactcccaaggaccctgggg

SEQ ID NO: 564703 - DNA, 33 bp, Homo sapien
aaaattgtggttccccggaatcctataacagca

SEQ ID NO: 564704 - DNA, 33 bp, Homo sapien
aaaattgtggttcccctgaatcctataacagca

SEQ ID NO: 564705 - DNA, 33 bp, Homo sapien
agcatcacttatgccccgcaacaaatatggaat

SEQ ID NO: 564706 - DNA, 33 bp, Homo sapien
agcatcacttatgcccggcaacaaatatggaat

SEQ ID NO: 564707 - DNA, 33 bp, Homo sapien
caaaatgccacaaggaaacgatggatcctgtct

SEQ ID NO: 564708 - DNA, 33 bp, Homo sapien
caaaatgccacaaggacacgatggatcctgtct

SEQ ID NO: 564709 - DNA, 33 bp, Homo sapien
ttaccaaaaagtgtaccgagatatagttttaag

SEQ ID NO: 564710 - DNA, 33 bp, Homo sapien
ttaccaaaaagtgtactgagatatagttttaag

SEQ ID NO: 564711 - DNA, 33 bp, Homo sapien
tctgaaggggttggctcaaaaatacagggcagg

SEQ ID NO: 564712 - DNA, 33 bp, Homo sapien
tctgaaggggttggctgaaaaatacagggcagg

SEQ ID NO: 564713 - DNA, 33 bp, Homo sapien
ctttactggacatatcacctttcctgaaacccc

SEQ ID NO: 564714 - DNA, 33 bp, Homo sapien
ctttactggacatatcgcctttcctgaaacccc

SEQ ID NO: 564715 - DNA, 33 bp, Homo sapien
atgctccccttcctaccgctgcattaactgaaa

SEQ ID NO: 564716 - DNA, 33 bp, Homo sapien
atgctccccttcctactgctgcattaactgaaa

SEQ ID NO: 564717 - DNA, 33 bp, Homo sapien
aatgaatgccatatgggaatacatcatttctgc

SEQ ID NO: 564718 - DNA, 33 bp, Homo sapien
aatgaatgccatatggtaatacatcatttctgc

SEQ ID NO: 564719 - DNA, 33 bp, Homo sapien
ttgccaaaactgtctacgcctccctgtgcttgc

SEQ ID NO: 564720 - DNA, 33 bp, Homo sapien
ttgccaaaactgtctatgcctccctgtgcttgc

SEQ ID NO: 564721 - DNA, 33 bp, Homo sapien
ttccctgaaaagtagaacttgggacaaggaaat

SEQ ID NO: 564722 - DNA, 33 bp, Homo sapien
ttccctgaaaagtagaccttgggacaaggaaat

SEQ ID NO: 564723 - DNA, 33 bp, Homo sapien
aaattgtatgagagcaagaaacttggtttgcct

SEQ ID NO: 564724 - DNA, 33 bp, Homo sapien
aaattgtatgagagcaggaaacttggtttgcct

SEQ ID NO: 564725 - DNA, 33 bp, Homo sapien
cgtttttaatgtttgtcaagttgcctgttcaac

SEQ ID NO: 564726 - DNA, 33 bp, Homo sapien
cgtttttaatgtttgttaagttgcctgttcaac

SEQ ID NO: 564727 - DNA, 33 bp, Homo sapien
attttttagcctactccagttggtatcagttag

SEQ ID NO: 564728 - DNA, 33 bp, Homo sapien
attttttagcctactctagttggtatcagttag

SEQ ID NO: 564729 - DNA, 33 bp, Homo sapien
tggaggcagggtgggcaaaaggatcctgccctc

SEQ ID NO: 564730 - DNA, 33 bp, Homo sapien
tggaggcagggtgggcgaaaggatcctgccctc

SEQ ID NO: 564731 - DNA, 33 bp, Homo sapien
tttgctgtaatggaaccgattggaaaatgatct

SEQ ID NO: 564732 - DNA, 33 bp, Homo sapien
tttgctgtaatggaactgattggaaaatgatct

SEQ ID NO: 564733 - DNA, 33 bp, Homo sapien
aatgtggatctgagaactgtggtttttagtaag

SEQ ID NO: 564734 - DNA, 33 bp, Homo sapien
aatgtggatctgagaattgtggtttttagtaag

SEQ ID NO: 564735 - DNA, 33 bp, Homo sapien
cttaattacttttttaaatagcctatctccaaa

SEQ ID NO: 564736 - DNA, 33 bp, Homo sapien
cttaattacttttttatatagcctatctccaaa

SEQ ID NO: 564737 - DNA, 33 bp, Homo sapien
gtattagtctgtaacaaataacacaaaacggca

SEQ ID NO: 564738 - DNA, 33 bp, Homo sapien
gtattagtctgtaacagataacacaaaacggca

SEQ ID NO: 564739 - DNA, 33 bp, Homo sapien
gcttacattaggattcactcttagttttgtatg

SEQ ID NO: 564740 - DNA, 33 bp, Homo sapien
gcttacattaggattccctcttagttttgtatg

SEQ ID NO: 564741 - DNA, 33 bp, Homo sapien
ccagtggaatagcataacctcaaaaagaaagac

SEQ ID NO: 564742 - DNA, 33 bp, Homo sapien
ccagtggaatagcataccctcaaaaagaaagac

SEQ ID NO: 564743 - DNA, 33 bp, Homo sapien
ctgctatgggacactaagctggaaccagtgcct

SEQ ID NO: 564744 - DNA, 33 bp, Homo sapien
ctgctatgggacactacgctggaaccagtgcct

SEQ ID NO: 564745 - DNA, 33 bp, Homo sapien
tcttcttagtactgtacggatatgaagaaggga

SEQ ID NO: 564746 - DNA, 33 bp, Homo sapien
tcttcttagtactgtatggatatgaagaaggga

SEQ ID NO: 564747 - DNA, 33 bp, Homo sapien
actggccaaaactgtcgaattactgagagctcc

SEQ ID NO: 564748 - DNA, 33 bp, Homo sapien
actggccaaaactgtctaattactgagagctcc

SEQ ID NO: 564749 - DNA, 33 bp, Homo sapien
atcattcatttttatgccaacttccaaagtggc

SEQ ID NO: 564750 - DNA, 33 bp, Homo sapien
atcattcatttttatgtcaacttccaaagtggc

SEQ ID NO: 564751 - DNA, 33 bp, Homo sapien
atctggagcaaattagcattaacaataaggtta

SEQ ID NO: 564752 - DNA, 33 bp, Homo sapien
atctggagcaaattagtattaacaataaggtta

SEQ ID NO: 564753 - DNA, 33 bp, Homo sapien
acttctctccatttgaataaactgtgctaactt

SEQ ID NO: 564754 - DNA, 33 bp, Homo sapien
acttctctccatttgagtaaactgtgctaactt

SEQ ID NO: 564755 - DNA, 33 bp, Homo sapien
tctgtggttgccaataaggttggcattggggcc

SEQ ID NO: 564756 - DNA, 33 bp, Homo sapien
tctgtggttgccaatacggttggcattggggcc

SEQ ID NO: 564757 - DNA, 33 bp, Homo sapien
catgtgctagacagtcacttctcaacatttatt

SEQ ID NO: 564758 - DNA, 33 bp, Homo sapien
catgtgctagacagtcgcttctcaacatttatt

SEQ ID NO: 564759 - DNA, 33 bp, Homo sapien
gcaagtacttgggaaaaagcacatgagcaaaga

SEQ ID NO: 564760 - DNA, 33 bp, Homo sapien
gcaagtacttgggaaacagcacatgagcaaaga

SEQ ID NO: 564761 - DNA, 33 bp, Homo sapien
agtacttgcttattaaaatataactctgctaat

SEQ ID NO: 564762 - DNA, 33 bp, Homo sapien
agtacttgcttattaacatataactctgctaat

SEQ ID NO: 564763 - DNA, 33 bp, Homo sapien
ttacattgtactagctaactttacattgtataa

SEQ ID NO: 564764 - DNA, 33 bp, Homo sapien
ttacattgtactagctgactttacattgtataa

SEQ ID NO: 564765 - DNA, 33 bp, Homo sapien
ggaactacagattcaacttctaagtgtatgact

SEQ ID NO: 564766 - DNA, 33 bp, Homo sapien
ggaactacagattcaatttctaagtgtatgact

SEQ ID NO: 564767 - DNA, 33 bp, Homo sapien
aaactttgtctatctcaaaatcatgaggatatc

SEQ ID NO: 564768 - DNA, 33 bp, Homo sapien
aaactttgtctatctcgaaatcatgaggatatc

SEQ ID NO: 564769 - DNA, 33 bp, Homo sapien
gggattcttgccatacactcttcagtcttaaac

SEQ ID NO: 564770 - DNA, 33 bp, Homo sapien
gggattcttgccatacgctcttcagtcttaaac

SEQ ID NO: 564771 - DNA, 33 bp, Homo sapien
gaacatcgaatgaaccaacattattcaggaact

SEQ ID NO: 564772 - DNA, 33 bp, Homo sapien
gaacatcgaatgaaccgacattattcaggaact

SEQ ID NO: 564773 - DNA, 33 bp, Homo sapien
tgtgtgctctcaacagactaatgagcaaaccaa

SEQ ID NO: 564774 - DNA, 33 bp, Homo sapien
tgtgtgctctcaacaggctaatgagcaaaccaa

SEQ ID NO: 564775 - DNA, 33 bp, Homo sapien
aatatgccaaaggacccacaagctgcaaagacc

SEQ ID NO: 564776 - DNA, 33 bp, Homo sapien
aatatgccaaaggacctacaagctgcaaagacc

SEQ ID NO: 564777 - DNA, 33 bp, Homo sapien
ctcctgacagctgttcaccaaagaggcatttca

SEQ ID NO: 564778 - DNA, 33 bp, Homo sapien
ctcctgacagctgttcgccaaagaggcatttca

SEQ ID NO: 564779 - DNA, 33 bp, Homo sapien
gtcccaatttctgtgacattaacctgaagatga

SEQ ID NO: 564780 - DNA, 33 bp, Homo sapien
gtcccaatttctgtgatattaacctgaagatga

SEQ ID NO: 564781 - DNA, 33 bp, Homo sapien
tgtccacctctatgaaacttacttggctgagaa

SEQ ID NO: 564782 - DNA, 33 bp, Homo sapien
tgtccacctctatgaaccttacttggctgagaa

SEQ ID NO: 564783 - DNA, 33 bp, Homo sapien
ggcagcctaagcgaaagagaaagttattgaagc

SEQ ID NO: 564784 - DNA, 33 bp, Homo sapien
ggcagcctaagcgaaatagaaagttattgaagc

SEQ ID NO: 564785 - DNA, 33 bp, Homo sapien
tttaacattgctccaccaagacagccatcctca

SEQ ID NO: 564786 - DNA, 33 bp, Homo sapien
tttaacattgctccactaagacagccatcctca

SEQ ID NO: 564787 - DNA, 33 bp, Homo sapien
taataaactagctaagaaaggaatcaagaaggc

SEQ ID NO: 564788 - DNA, 33 bp, Homo sapien
taataaactagctaaggaaggaatcaagaaggc

SEQ ID NO: 564789 - DNA, 33 bp, Homo sapien
cttagttcacattccccggatggctcttggccc

SEQ ID NO: 564790 - DNA, 33 bp, Homo sapien
cttagttcacattccctggatggctcttggccc

SEQ ID NO: 564791 - DNA, 33 bp, Homo sapien
agagaacatctacgtacaggacataaagttctt

SEQ ID NO: 564792 - DNA, 33 bp, Homo sapien
agagaacatctacgtagaggacataaagttctt

SEQ ID NO: 564793 - DNA, 33 bp, Homo sapien
aagattcacgccatccactgagttctggtcagg

SEQ ID NO: 564794 - DNA, 33 bp, Homo sapien
aagattcacgccatccgctgagttctggtcagg

SEQ ID NO: 564795 - DNA, 33 bp, Homo sapien
agttaaataactgcagaaagagtcgagagaaaa

SEQ ID NO: 564796 - DNA, 33 bp, Homo sapien
agttaaataactgcaggaagagtcgagagaaaa

SEQ ID NO: 564797 - DNA, 33 bp, Homo sapien
tcaaaggaactcttccgaatgggctttgtccca

SEQ ID NO: 564798 - DNA, 33 bp, Homo sapien
tcaaaggaactcttcctaatgggctttgtccca

SEQ ID NO: 564799 - DNA, 33 bp, Homo sapien
atttggacccttaaagactcaatccagaggaag

SEQ ID NO: 564800 - DNA, 33 bp, Homo sapien
atttggacccttaaagcctcaatccagaggaag

SEQ ID NO: 564801 - DNA, 33 bp, Homo sapien
ccacaccaatacaagaagataataataatggaa

SEQ ID NO: 564802 - DNA, 33 bp, Homo sapien
ccacaccaatacaagatgataataataatggaa

SEQ ID NO: 564803 - DNA, 33 bp, Homo sapien
tgcagaattcttacaccgctctaaaaatccctc

SEQ ID NO: 564804 - DNA, 33 bp, Homo sapien
tgcagaattcttacactgctctaaaaatccctc

SEQ ID NO: 564805 - DNA, 33 bp, Homo sapien
tccaaaaccatgctctaactgggctttcacctg

SEQ ID NO: 564806 - DNA, 33 bp, Homo sapien
tccaaaaccatgctctgactgggctttcacctg

SEQ ID NO: 564807 - DNA, 33 bp, Homo sapien
aaggcaagggtgctccaaacagttgttcttaaa

SEQ ID NO: 564808 - DNA, 33 bp, Homo sapien
aaggcaagggtgctccgaacagttgttcttaaa

SEQ ID NO: 564809 - DNA, 33 bp, Homo sapien
ttcagcaaggactgaccggacaacagtgtccct

SEQ ID NO: 564810 - DNA, 33 bp, Homo sapien
ttcagcaaggactgactggacaacagtgtccct

SEQ ID NO: 564811 - DNA, 33 bp, Homo sapien
attgtaacacttaccaactgaccaagaaccctg

SEQ ID NO: 564812 - DNA, 33 bp, Homo sapien
attgtaacacttaccagctgaccaagaaccctg

SEQ ID NO: 564813 - DNA, 33 bp, Homo sapien
ctctcttctgtttgccgaccttcttcaacagag

SEQ ID NO: 564814 - DNA, 33 bp, Homo sapien
ctctcttctgtttgcctaccttcttcaacagag

SEQ ID NO: 564815 - DNA, 33 bp, Homo sapien
tgtggggtcaggactcaagtaggttggatgctg

SEQ ID NO: 564816 - DNA, 33 bp, Homo sapien
tgtggggtcaggactcgagtaggttggatgctg

SEQ ID NO: 564817 - DNA, 33 bp, Homo sapien
cgtggaaacctggacaaagttggagaccattat

SEQ ID NO: 564818 - DNA, 33 bp, Homo sapien
cgtggaaacctggacagagttggagaccattat

SEQ ID NO: 564819 - DNA, 33 bp, Homo sapien
tgtttggagaaaaatcaaagcatgtcaggaggg

SEQ ID NO: 564820 - DNA, 33 bp, Homo sapien
tgtttggagaaaaatcgaagcatgtcaggaggg

SEQ ID NO: 564821 - DNA, 33 bp, Homo sapien
attactgtaatacagcccacactaaaattttat

SEQ ID NO: 564822 - DNA, 33 bp, Homo sapien
attactgtaatacagcgcacactaaaattttat

SEQ ID NO: 564823 - DNA, 33 bp, Homo sapien
aagtctaaagaagctcagaaaccctgtatgctg

SEQ ID NO: 564824 - DNA, 33 bp, Homo sapien
aagtctaaagaagctctgaaaccctgtatgctg

SEQ ID NO: 564825 - DNA, 33 bp, Homo sapien
tgtgttacctactcacagaaccaactggaaagc

SEQ ID NO: 564826 - DNA, 33 bp, Homo sapien
tgtgttacctactcacggaaccaactggaaagc

SEQ ID NO: 564827 - DNA, 33 bp, Homo sapien
atacaaaatagactgaaacagtgtgtgaatgtg

SEQ ID NO: 564828 - DNA, 33 bp, Homo sapien
atacaaaatagactgagacagtgtgtgaatgtg

SEQ ID NO: 564829 - DNA, 33 bp, Homo sapien
aaaacatataacatcacacataaaccagtgtta

SEQ ID NO: 564830 - DNA, 33 bp, Homo sapien
aaaacatataacatcagacataaaccagtgtta

SEQ ID NO: 564831 - DNA, 33 bp, Homo sapien
aagtaaatgaacatacactgcttattggaaatg

SEQ ID NO: 564832 - DNA, 33 bp, Homo sapien
aagtaaatgaacatacgctgcttattggaaatg

SEQ ID NO: 564833 - DNA, 33 bp, Homo sapien
gcttcaccttcatttcaacaagaccggccctga

SEQ ID NO: 564834 - DNA, 33 bp, Homo sapien
gcttcaccttcatttcgacaagaccggccctga

SEQ ID NO: 564835 - DNA, 33 bp, Homo sapien
aacaggaataaccaggacatttgaacaggatcg

SEQ ID NO: 564836 - DNA, 33 bp, Homo sapien
aacaggaataaccaggtcatttgaacaggatcg

SEQ ID NO: 564837 - DNA, 33 bp, Homo sapien
gagtgagaacaagcgacgtttgattttttgtct

SEQ ID NO: 564838 - DNA, 33 bp, Homo sapien
gagtgagaacaagcgatgtttgattttttgtct

SEQ ID NO: 564839 - DNA, 33 bp, Homo sapien; identical to SEQ ID NO: 564837

SEQ ID NO: 564840 - DNA, 33 bp, Homo sapien; identical to SEQ ID NO: 564838

SEQ ID NO: 564841 - DNA, 33 bp, Homo sapien
aagagctcaagtccaaaaaggtctgaataataa

SEQ ID NO: 564842 - DNA, 33 bp, Homo sapien
aagagctcaagtccaagaaggtctgaataataa

SEQ ID NO: 564843 - DNA, 33 bp, Homo sapien
gcctgctcaaagctccaacaacagaaagatcat

SEQ ID NO: 564844 - DNA, 33 bp, Homo sapien
gcctgctcaaagctccgacaacagaaagatcat

SEQ ID NO: 564845 - DNA, 33 bp, Homo sapien
atcttcttaaatccacactcatttccttgtcac

SEQ ID NO: 564846 - DNA, 33 bp, Homo sapien
atcttcttaaatccacgctcatttccttgtcac

SEQ ID NO: 564847 - DNA, 33 bp, Homo sapien
ttccattaaaacttcacagaacggtcattatct

SEQ ID NO: 564848 - DNA, 33 bp, Homo sapien
ttccattaaaacttcagagaacggtcattatct

SEQ ID NO: 564849 - DNA, 33 bp, Homo sapien
ttattacttcgtacccaataaagtgactcacta

SEQ ID NO: 564850 - DNA, 33 bp, Homo sapien
ttattacttcgtacccgataaagtgactcacta

SEQ ID NO: 564851 - DNA, 33 bp, Homo sapien
ttactcttgatcaaatcagcattttggcaatga

SEQ ID NO: 564852 - DNA, 33 bp, Homo sapien
ttactcttgatcaaattagcattttggcaatga

SEQ ID NO: 564853 - DNA, 33 bp, Homo sapien
ataactgatatttccagccacaatcaatccaga

SEQ ID NO: 564854 - DNA, 33 bp, Homo sapien
ataactgatatttccatccacaatcaatccaga

SEQ ID NO: 564855 - DNA, 33 bp, Homo sapien
aggaaattaagtctcgaagaacatacatgaatt

SEQ ID NO: 564856 - DNA, 33 bp, Homo sapien
aggaaattaagtctcggagaacatacatgaatt

SEQ ID NO: 564857 - DNA, 33 bp, Homo sapien
ctccatttagaaatataagcccacttttaatca

SEQ ID NO: 564858 - DNA, 33 bp, Homo sapien
ctccatttagaaatatgagcccacttttaatca

SEQ ID NO: 564859 - DNA, 33 bp, Homo sapien
gttgccatctccttaaccttttgctcactcgga

SEQ ID NO: 564860 - DNA, 33 bp, Homo sapien
gttgccatctccttaatcttttgctcactcgga

SEQ ID NO: 564861 - DNA, 33 bp, Homo sapien
ttacaggaattctagaaaaacatggtctgtctt

SEQ ID NO: 564862 - DNA, 33 bp, Homo sapien
ttacaggaattctagagaaacatggtctgtctt

SEQ ID NO: 564863 - DNA, 33 bp, Homo sapien
ctcctataaccatcaacgaaggtttagtgctca

SEQ ID NO: 564864 - DNA, 33 bp, Homo sapien
ctcctataaccatcaatgaaggtttagtgctca

SEQ ID NO: 564865 - DNA, 33 bp, Homo sapien
ggagtaagtgagcgtcactagaagcatccagat

SEQ ID NO: 564866 - DNA, 33 bp, Homo sapien
ggagtaagtgagcgtcgctagaagcatccagat

SEQ ID NO: 564867 - DNA, 33 bp, Homo sapien
agttttcctcgtttgcaagatgggatcacctga

SEQ ID NO: 564868 - DNA, 33 bp, Homo sapien
agttttcctcgtttgcgagatgggatcacctga

SEQ ID NO: 564869 - DNA, 33 bp, Homo sapien
attgaaataaattgataacaaatcaggtgacta

SEQ ID NO: 564870 - DNA, 33 bp, Homo sapien
attgaaataaattgattacaaatcaggtgacta

SEQ ID NO: 564871 - DNA, 33 bp, Homo sapien
gaagatctgtcacaaaccttgcttccaacacat

SEQ ID NO: 564872 - DNA, 33 bp, Homo sapien
gaagatctgtcacaaatcttgcttccaacacat

SEQ ID NO: 564873 - DNA, 33 bp, Homo sapien
tgttaatgtgattcgactccaaatatatttatt

SEQ ID NO: 564874 - DNA, 33 bp, Homo sapien
tgttaatgtgattcgagtccaaatatatttatt

SEQ ID NO: 564875 - DNA, 33 bp, Homo sapien
gccctctaaatcatgcacctcataaaggatgag

SEQ ID NO: 564876 - DNA, 33 bp, Homo sapien
gccctctaaatcatgcgcctcataaaggatgag

SEQ ID NO: 564877 - DNA, 33 bp, Homo sapien
gactgaaattggtccacatcagaaacattcaat

SEQ ID NO: 564878 - DNA, 33 bp, Homo sapien
gactgaaattggtccatatcagaaacattcaat

SEQ ID NO: 564879 - DNA, 33 bp, Homo sapien
atattctggattcaaaactggctaacattatat

SEQ ID NO: 564880 - DNA, 33 bp, Homo sapien
atattctggattcaaagctggctaacattatat

SEQ ID NO: 564881 - DNA, 33 bp, Homo sapien
tgcttgttaggtaaaaaaaacgaagtgctgcgg

SEQ ID NO: 564882 - DNA, 33 bp, Homo sapien
tgcttgttaggtaaaagaaacgaagtgctgcgg

SEQ ID NO: 564883 - DNA, 33 bp, Homo sapien
cattcaataagaacacagtgagtgagttgtttt

SEQ ID NO: 564884 - DNA, 33 bp, Homo sapien
cattcaataagaacacggtgagtgagttgtttt

SEQ ID NO: 564885 - DNA, 33 bp, Homo sapien
gatatgaaaaaagccacgtgggtcagagtctca

SEQ ID NO: 564886 - DNA, 33 bp, Homo sapien
gatatgaaaaaagccatgtgggtcagagtctca

SEQ ID NO: 564887 - DNA, 33 bp, Homo sapien
acgacgtatacagtaaaattgtccaagatacaa

SEQ ID NO: 564888 - DNA, 33 bp, Homo sapien
acgacgtatacagtaacattgtccaagatacaa

SEQ ID NO: 564889 - DNA, 33 bp, Homo sapien
ggtcagagaaagagaaataaaaaggctctctgc

SEQ ID NO: 564890 - DNA, 33 bp, Homo sapien
ggtcagagaaagagaagtaaaaaggctctctgc

SEQ ID NO: 564891 - DNA, 33 bp, Homo sapien
tatttggacaagtggcaaacagagcattactct

SEQ ID NO: 564892 - DNA, 33 bp, Homo sapien
tatttggacaagtggcgaacagagcattactct

SEQ ID NO: 564893 - DNA, 33 bp, Homo sapien
ggcgcctttacagtaccgcctcaaacagaagtt

SEQ ID NO: 564894 - DNA, 33 bp, Homo sapien
ggcgcctttacagtactgcctcaaacagaagtt

SEQ ID NO: 564895 - DNA, 33 bp, Homo sapien
ctaattataatggagggacagcatatcccagta

SEQ ID NO: 564896 - DNA, 33 bp, Homo sapien
ctaattataatggaggtacagcatatcccagta

SEQ ID NO: 564897 - DNA, 33 bp, Homo sapien
ggatatgctgttcctacattacaattagaaaaa

SEQ ID NO: 564898 - DNA, 33 bp, Homo sapien
ggatatgctgttcctatattacaattagaaaaa

SEQ ID NO: 564899 - DNA, 33 bp, Homo sapien
agcttatcattattacaccaatacagtaagagg

SEQ ID NO: 564900 - DNA, 33 bp, Homo sapien
agcttatcattattacgccaatacagtaagagg

SEQ ID NO: 564901 - DNA, 33 bp, Homo sapien
agagtcattaaaattaacacatctagatccgag

SEQ ID NO: 564902 - DNA, 33 bp, Homo sapien
agagtcattaaaattagcacatctagatccgag

SEQ ID NO: 564903 - DNA, 33 bp, Homo sapien
ctttcctagaaacaacccatctcaagcggaagt

SEQ ID NO: 564904 - DNA, 33 bp, Homo sapien
ctttcctagaaacaacgcatctcaagcggaagt

SEQ ID NO: 564905 - DNA, 33 bp, Homo sapien
cccatctcccctaaagacattcagccattgctt

SEQ ID NO: 564906 - DNA, 33 bp, Homo sapien
cccatctcccctaaagccattcagccattgctt

SEQ ID NO: 564907 - DNA, 33 bp, Homo sapien
ggctctcaggagagaaaaagcaaggtggactcc

SEQ ID NO: 564908 - DNA, 33 bp, Homo sapien
ggctctcaggagagaacaagcaaggtggactcc

SEQ ID NO: 564909 - DNA, 33 bp, Homo sapien
aactagttgaaagatgaaacctctaatattcta

SEQ ID NO: 564910 - DNA, 33 bp, Homo sapien
aactagttgaaagatggaacctctaatattcta

SEQ ID NO: 564911 - DNA, 33 bp, Homo sapien
tattagtagtggtacacgaaaaaagtttgtgta

SEQ ID NO: 564912 - DNA, 33 bp, Homo sapien
tattagtagtggtacatgaaaaaagtttgtgta

SEQ ID NO: 564913 - DNA, 33 bp, Homo sapien
gtccttgatcacataaagaaggcagaggatggc

SEQ ID NO: 564914 - DNA, 33 bp, Homo sapien
gtccttgatcacataaggaaggcagaggatggc

SEQ ID NO: 564915 - DNA, 33 bp, Homo sapien
agagggaaaaggaccacgtgttccgagaagaga

SEQ ID NO: 564916 - DNA, 33 bp, Homo sapien
agagggaaaaggaccatgtgttccgagaagaga

SEQ ID NO: 564917 - DNA, 33 bp, Homo sapien
gcctcactcaggacccacatcttcaaaggtgca

SEQ ID NO: 564918 - DNA, 33 bp, Homo sapien
gcctcactcaggacccgcatcttcaaaggtgca

SEQ ID NO: 564919 - DNA, 33 bp, Homo sapien
atttttcaggttatacaagggtcttttggtatc

SEQ ID NO: 564920 - DNA, 33 bp, Homo sapien
atttttcaggttatacgagggtcttttggtatc

SEQ ID NO: 564921 - DNA, 33 bp, Homo sapien
ggatgctcaagtcctaaagtctaccctgcggag

SEQ ID NO: 564922 - DNA, 33 bp, Homo sapien
ggatgctcaagtcctacagtctaccctgcggag

SEQ ID NO: 564923 - DNA, 33 bp, Homo sapien
tggtagaaagcagggaaagagggagacagggta

SEQ ID NO: 564924 - DNA, 33 bp, Homo sapien
tggtagaaagcagggagagagggagacagggta

SEQ ID NO: 564925 - DNA, 33 bp, Homo sapien
ggtagagctatctgcaatatttccaagctctca

SEQ ID NO: 564926 - DNA, 33 bp, Homo sapien
ggtagagctatctgcagtatttccaagctctca

SEQ ID NO: 564927 - DNA, 33 bp, Homo sapien
acagagatcggttgtaacatttgcttaatttct

SEQ ID NO: 564928 - DNA, 33 bp, Homo sapien
acagagatcggttgtagcatttgcttaatttct

SEQ ID NO: 564929 - DNA, 33 bp, Homo sapien
acaacttaatatttctcaactagacaagattcc

SEQ ID NO: 564930 - DNA, 33 bp, Homo sapien
acaacttaatatttctgaactagacaagattcc

SEQ ID NO: 564931 - DNA, 33 bp, Homo sapien
gggtgctgttggtttgcaagagcactccttagg

SEQ ID NO: 564932 - DNA, 33 bp, Homo sapien
gggtgctgttggtttgtaagagcactccttagg

SEQ ID NO: 564933 - DNA, 33 bp, Homo sapien
aggtgagggatttgcaataaactgaaagatgga

SEQ ID NO: 564934 - DNA, 33 bp, Homo sapien
aggtgagggatttgcagtaaactgaaagatgga

SEQ ID NO: 564935 - DNA, 33 bp, Homo sapien
ctcaagaaatttagaaagatgaggatctgggtc

SEQ ID NO: 564936 - DNA, 33 bp, Homo sapien
ctcaagaaatttagaaggatgaggatctgggtc

SEQ ID NO: 564937 - DNA, 33 bp, Homo sapien
taaactttatttttggcagaggatcacgagggt

SEQ ID NO: 564938 - DNA, 33 bp, Homo sapien
taaactttatttttggtagaggatcacgagggt

SEQ ID NO: 564939 - DNA, 33 bp, Homo sapien
cttgaaaagtcagcaaaattgaataggtggatt

SEQ ID NO: 564940 - DNA, 33 bp, Homo sapien
cttgaaaagtcagcaatattgaataggtggatt

SEQ ID NO: 564941 - DNA, 33 bp, Homo sapien
atgtgtatccactgaaattacttgggagcttta

SEQ ID NO: 564942 - DNA, 33 bp, Homo sapien
atgtgtatccactgaagttacttgggagcttta

SEQ ID NO: 564943 - DNA, 33 bp, Homo sapien
cactgacgggtgaaaaaaaatgggctgaaccta

SEQ ID NO: 564944 - DNA, 33 bp, Homo sapien
cactgacgggtgaaaacaaatgggctgaaccta

SEQ ID NO: 564945 - DNA, 33 bp, Homo sapien
aaaacttcgtggataactatgaaagtcaaagat

SEQ ID NO: 564946 - DNA, 33 bp, Homo sapien
aaaacttcgtggataattatgaaagtcaaagat

SEQ ID NO: 564947 - DNA, 33 bp, Homo sapien
tgtcctataaaggccactcatttgcaggaaagg

SEQ ID NO: 564948 - DNA, 33 bp, Homo sapien
tgtcctataaaggccattcatttgcaggaaagg

SEQ ID NO: 564949 - DNA, 33 bp, Homo sapien
catctgcatcgagtgccgagggataaaagtaac

SEQ ID NO: 564950 - DNA, 33 bp, Homo sapien
catctgcatcgagtgctgagggataaaagtaac

SEQ ID NO: 564951 - DNA, 33 bp, Homo sapien
ccactcatcttgctcaccggatgtcgctataaa

SEQ ID NO: 564952 - DNA, 33 bp, Homo sapien
ccactcatcttgctcagcggatgtcgctataaa

SEQ ID NO: 564953 - DNA, 33 bp, Homo sapien
tgccaaggtcaaatcaaacaaaaactactgagg

SEQ ID NO: 564954 - DNA, 33 bp, Homo sapien
tgccaaggtcaaatcagacaaaaactactgagg

SEQ ID NO: 564955 - DNA, 33 bp, Homo sapien
ctctctcacatacatacgcatgcacacgcgcac

SEQ ID NO: 564956 - DNA, 33 bp, Homo sapien
ctctctcacatacatatgcatgcacacgcgcac

SEQ ID NO: 564957 - DNA, 33 bp, Homo sapien
gtgtccatgtccagtcagaaggttgaatgctgg

SEQ ID NO: 564958 - DNA, 33 bp, Homo sapien
gtgtccatgtccagtcggaaggttgaatgctgg

SEQ ID NO: 564959 - DNA, 33 bp, Homo sapien
tgcctgagtcaggtcccatgcggaacgtgggcg

SEQ ID NO: 564960 - DNA, 33 bp, Homo sapien
tgcctgagtcaggtcctatgcggaacgtgggcg

SEQ ID NO: 564961 - DNA, 33 bp, Homo sapien
caatgtattatattgcaagttggtaatatgtac

SEQ ID NO: 564962 - DNA, 33 bp, Homo sapien
caatgtattatattgcgagttggtaatatgtac

SEQ ID NO: 564963 - DNA, 33 bp, Homo sapien
cataaatccagaactcagaagcatcttcttatt

SEQ ID NO: 564964 - DNA, 33 bp, Homo sapien
cataaatccagaactcggaagcatcttcttatt

SEQ ID NO: 564965 - DNA, 33 bp, Homo sapien
gttaagttcattcaaaagaggcaggaaaatttt

SEQ ID NO: 564966 - DNA, 33 bp, Homo sapien
gttaagttcattcaaaggaggcaggaaaatttt

SEQ ID NO: 564967 - DNA, 33 bp, Homo sapien
cctccatttccatatgcatcttcaatttacatc

SEQ ID NO: 564968 - DNA, 33 bp, Homo sapien
cctccatttccatatgtatcttcaatttacatc

SEQ ID NO: 564969 - DNA, 33 bp, Homo sapien
atgctatttgttttcacatagtcgttaatgtta

SEQ ID NO: 564970 - DNA, 33 bp, Homo sapien
atgctatttgttttcatatagtcgttaatgtta

SEQ ID NO: 564971 - DNA, 33 bp, Homo sapien
tggtggccagaaaaagcacttggcatttctaaa

SEQ ID NO: 564972 - DNA, 33 bp, Homo sapien
tggtggccagaaaaagtacttggcatttctaaa

SEQ ID NO: 564973 - DNA, 33 bp, Homo sapien
ccaagtctaactcccaggtgaaacactttctat

SEQ ID NO: 564974 - DNA, 33 bp, Homo sapien
ccaagtctaactcccatgtgaaacactttctat

SEQ ID NO: 564975 - DNA, 33 bp, Homo sapien
ctactacatttcatttaaaacagaattcacatg

SEQ ID NO: 564976 - DNA, 33 bp, Homo sapien
ctactacatttcattttaaacagaattcacatg

SEQ ID NO: 564977 - DNA, 33 bp, Homo sapien
ttcataatttagaagaatcaccattagaacttg

SEQ ID NO: 564978 - DNA, 33 bp, Homo sapien
ttcataatttagaagagtcaccattagaacttg

SEQ ID NO: 564979 - DNA, 33 bp, Homo sapien
ttctgcaacagtggaacgacattggccacagaa

SEQ ID NO: 564980 - DNA, 33 bp, Homo sapien
ttctgcaacagtggaatgacattggccacagaa

SEQ ID NO: 564981 - DNA, 33 bp, Homo sapien
gaaaatgcctaaattaaaacttgatgctcactt

SEQ ID NO: 564982 - DNA, 33 bp, Homo sapien
gaaaatgcctaaattagaacttgatgctcactt

SEQ ID NO: 564983 - DNA, 33 bp, Homo sapien
taaagattactgctggacaaagctgatatatca

SEQ ID NO: 564984 - DNA, 33 bp, Homo sapien
taaagattactgctgggcaaagctgatatatca

SEQ ID NO: 564985 - DNA, 33 bp, Homo sapien
gatgacacaaatcaagcagtagacaaacacact

SEQ ID NO: 564986 - DNA, 33 bp, Homo sapien
gatgacacaaatcaagtagtagacaaacacact

SEQ ID NO: 564987 - DNA, 33 bp, Homo sapien; identical to SEQ ID NO: 564985

SEQ ID NO: 564988 - DNA, 33 bp, Homo sapien; identical to SEQ ID NO: 564986

SEQ ID NO: 564989 - DNA, 33 bp, Homo sapien
ctatcttctcatattcacgactcctaaatttgt

SEQ ID NO: 564990 - DNA, 33 bp, Homo sapien
ctatcttctcatattcgcgactcctaaatttgt

SEQ ID NO: 564991 - DNA, 33 bp, Homo sapien
acttagttttgttccagtaacatgtttttctgg

SEQ ID NO: 564992 - DNA, 33 bp, Homo sapien
acttagttttgttccattaacatgtttttctgg

SEQ ID NO: 564993 - DNA, 33 bp, Homo sapien
agcttcccacatccaacgactggtggccgtgaa

SEQ ID NO: 564994 - DNA, 33 bp, Homo sapien
agcttcccacatccaaggactggtggccgtgaa

SEQ ID NO: 564995 - DNA, 33 bp, Homo sapien
tgggaatagacagcaaatgcataccctgctctg

SEQ ID NO: 564996 - DNA, 33 bp, Homo sapien
tgggaatagacagcaagtgcataccctgctctg

SEQ ID NO: 564997 - DNA, 33 bp, Homo sapien
gctgtttcctggaatcactcccaaaataaacag

SEQ ID NO: 564998 - DNA, 33 bp, Homo sapien
gctgtttcctggaatcgctcccaaaataaacag

SEQ ID NO: 564999 - DNA, 33 bp, Homo sapien
tctaaacagaaggagaaaataaatcaccaactg

SEQ ID NO: 565000 - DNA, 33 bp, Homo sapien
tctaaacagaaggagagaataaatcaccaactg

SEQ ID NO: 565001 - DNA, 33 bp, Homo sapien
ttagtagaagggtgtcgaatgttgactttttga

SEQ ID NO: 565002 - DNA, 33 bp, Homo sapien
ttagtagaagggtgtctaatgttgactttttga

SEQ ID NO: 565003 - DNA, 33 bp, Homo sapien
ccagagacattctggaataggatcctggtacat

SEQ ID NO: 565004 - DNA, 33 bp, Homo sapien
ccagagacattctggagtaggatcctggtacat

SEQ ID NO: 565005 - DNA, 33 bp, Homo sapien
cttaatagcactgccaagactaatggagatgca

SEQ ID NO: 565006 - DNA, 33 bp, Homo sapien
cttaatagcactgccaggactaatggagatgca

SEQ ID NO: 565007 - DNA, 33 bp, Homo sapien
tgtgatgaaatcttccagcaaggcctcttgagg

SEQ ID NO: 565008 - DNA, 33 bp, Homo sapien
tgtgatgaaatcttccggcaaggcctcttgagg

SEQ ID NO: 565009 - DNA, 33 bp, Homo sapien
gttgtggaatacatgacgatttttcctctgatg

SEQ ID NO: 565010 - DNA, 33 bp, Homo sapien
gttgtggaatacatgatgatttttcctctgatg

SEQ ID NO: 565011 - DNA, 33 bp, Homo sapien
atggaatttccgatgaaccagacaacgcatacc

SEQ ID NO: 565012 - DNA, 33 bp, Homo sapien
atggaatttccgatgagccagacaacgcatacc

SEQ ID NO: 565013 - DNA, 33 bp, Homo sapien
atgtttaaaaaaattaaaagttgcagtatgtgc

SEQ ID NO: 565014 - DNA, 33 bp, Homo sapien
atgtttaaaaaaattacaagttgcagtatgtgc

SEQ ID NO: 565015 - DNA, 33 bp, Homo sapien
gttcatttttcagcataagaatggcttactcca

SEQ ID NO: 565016 - DNA, 33 bp, Homo sapien
gttcatttttcagcatgagaatggcttactcca

SEQ ID NO: 565017 - DNA, 33 bp, Homo sapien
ctggccaggctgcaggcaataaagggctcgcta

SEQ ID NO: 565018 - DNA, 33 bp, Homo sapien
ctggccaggctgcaggtaataaagggctcgcta

SEQ ID NO: 565019 - DNA, 33 bp, Homo sapien
gcaaacagaaggcaccagaaataactgtggttt

SEQ ID NO: 565020 - DNA, 33 bp, Homo sapien
gcaaacagaaggcaccggaaataactgtggttt

SEQ ID NO: 565021 - DNA, 33 bp, Homo sapien
ctgctgctcaagttcaactgagtagccatttat

SEQ ID NO: 565022 - DNA, 33 bp, Homo sapien
ctgctgctcaagttcagctgagtagccatttat

SEQ ID NO: 565023 - DNA, 33 bp, Homo sapien
catagaaatgtcggcacgcatcagagttctaga

SEQ ID NO: 565024 - DNA, 33 bp, Homo sapien
catagaaatgtcggcatgcatcagagttctaga

SEQ ID NO: 565025 - DNA, 33 bp, Homo sapien
gcatcaactgtcattacactgggtttctttggc

SEQ ID NO: 565026 - DNA, 33 bp, Homo sapien
gcatcaactgtcattatactgggtttctttggc

SEQ ID NO: 565027 - DNA, 33 bp, Homo sapien
agttgaggctcttagaaatttggaaatcatatc

SEQ ID NO: 565028 - DNA, 33 bp, Homo sapien
agttgaggctcttagacatttggaaatcatatc

SEQ ID NO: 565029 - DNA, 33 bp, Homo sapien
aaatgaagtaagttgacaagctgagagctcctt

SEQ ID NO: 565030 - DNA, 33 bp, Homo sapien
aaatgaagtaagttgataagctgagagctcctt

SEQ ID NO: 565031 - DNA, 33 bp, Homo sapien
tatgcaggaactacagaaatccacacagtaaga

SEQ ID NO: 565032 - DNA, 33 bp, Homo sapien
tatgcaggaactacaggaatccacacagtaaga

SEQ ID NO: 565033 - DNA, 33 bp, Homo sapien
ttaagccacaagttacaaagttccaaattatga

SEQ ID NO: 565034 - DNA, 33 bp, Homo sapien
ttaagccacaagttacgaagttccaaattatga

SEQ ID NO: 565035 - DNA, 33 bp, Homo sapien
ctgtggaatttcagcaaatgttcaacgtgttat

SEQ ID NO: 565036 - DNA, 33 bp, Homo sapien
ctgtggaatttcagcatatgttcaacgtgttat

SEQ ID NO: 565037 - DNA, 33 bp, Homo sapien
gggggatggtttaaacaaggatggaactgacta

SEQ ID NO: 565038 - DNA, 33 bp, Homo sapien
gggggatggtttaaacgaggatggaactgacta

SEQ ID NO: 565039 - DNA, 33 bp, Homo sapien
gtaagagtcagtttctcaaggcctcagtccctt

SEQ ID NO: 565040 - DNA, 33 bp, Homo sapien
gtaagagtcagtttctgaaggcctcagtccctt

SEQ ID NO: 565041 - DNA, 33 bp, Homo sapien
attaaatgggttaataagtgtcaaatgcttaaa

SEQ ID NO: 565042 - DNA, 33 bp, Homo sapien
attaaatgggttaatatgtgtcaaatgcttaaa

SEQ ID NO: 565043 - DNA, 33 bp, Homo sapien
ttgagggaccagagacaatgcattccaaatctt

SEQ ID NO: 565044 - DNA, 33 bp, Homo sapien
ttgagggaccagagacgatgcattccaaatctt

SEQ ID NO: 565045 - DNA, 33 bp, Homo sapien
ctggctgtgagctgcaagtacacacgccctcag

SEQ ID NO: 565046 - DNA, 33 bp, Homo sapien
ctggctgtgagctgcacgtacacacgccctcag

SEQ ID NO: 565047 - DNA, 33 bp, Homo sapien
tggtcacaactcatagactatgaaagctgtccc

SEQ ID NO: 565048 - DNA, 33 bp, Homo sapien
tggtcacaactcataggctatgaaagctgtccc

SEQ ID NO: 565049 - DNA, 33 bp, Homo sapien
ccgttaacgaagaccaacatcactgtcttcaga

SEQ ID NO: 565050 - DNA, 33 bp, Homo sapien
ccgttaacgaagaccatcatcactgtcttcaga

SEQ ID NO: 565051 - DNA, 33 bp, Homo sapien
ggcctctcctctgccacgaagtgggtaatctgg

SEQ ID NO: 565052 - DNA, 33 bp, Homo sapien
ggcctctcctctgccatgaagtgggtaatctgg

SEQ ID NO: 565053 - DNA, 33 bp, Homo sapien
gcctttgttcttggcacagctaattaggcttag

SEQ ID NO: 565054 - DNA, 33 bp, Homo sapien
gcctttgttcttggcagagctaattaggcttag

SEQ ID NO: 565055 - DNA, 33 bp, Homo sapien
tatgtgtattgagcaacatttaaggctgctgtg

SEQ ID NO: 565056 - DNA, 33 bp, Homo sapien
tatgtgtattgagcaatatttaaggctgctgtg

SEQ ID NO: 565057 - DNA, 33 bp, Homo sapien
tctatctgtttctagacaaaggttcaactaatt

SEQ ID NO: 565058 - DNA, 33 bp, Homo sapien
tctatctgtttctagataaaggttcaactaatt

SEQ ID NO: 565059 - DNA, 33 bp, Homo sapien
ggtaggttagaaaaaaatattgtcattgttcag

SEQ ID NO: 565060 - DNA, 33 bp, Homo sapien
ggtaggttagaaaaaattattgtcattgttcag

SEQ ID NO: 565061 - DNA, 33 bp, Homo sapien
acttttaacactgtgagcattgtttaattacag

SEQ ID NO: 565062 - DNA, 33 bp, Homo sapien
acttttaacactgtgatcattgtttaattacag

SEQ ID NO: 565063 - DNA, 33 bp, Homo sapien
cttcccttttcacatacgcccgatagcctgcag

SEQ ID NO: 565064 - DNA, 33 bp, Homo sapien
cttcccttttcacatatgcccgatagcctgcag

SEQ ID NO: 565065 - DNA, 33 bp, Homo sapien
agggaaaattccagacacgcccacagccggtgg

SEQ ID NO: 565066 - DNA, 33 bp, Homo sapien
agggaaaattccagacgcgcccacagccggtgg

SEQ ID NO: 565067 - DNA, 33 bp, Homo sapien
gacttctggtgttctaggtcttgtaacctaagc

SEQ ID NO: 565068 - DNA, 33 bp, Homo sapien
gacttctggtgttctatgtcttgtaacctaagc

SEQ ID NO: 565069 - DNA, 33 bp, Homo sapien
tttttagatgtagtaacgctatgtggctatact

SEQ ID NO: 565070 - DNA, 33 bp, Homo sapien
tttttagatgtagtaatgctatgtggctatact

SEQ ID NO: 565071 - DNA, 33 bp, Homo sapien
gcccagagttacatggaaaaagatatcggttct

SEQ ID NO: 565072 - DNA, 33 bp, Homo sapien
gcccagagttacatgggaaaagatatcggttct

SEQ ID NO: 565073 - DNA, 33 bp, Homo sapien
tttatgtattaaaggaagaaatctacctgcttc

SEQ ID NO: 565074 - DNA, 33 bp, Homo sapien
tttatgtattaaaggaggaaatctacctgcttc

SEQ ID NO: 565075 - DNA, 33 bp, Homo sapien
cagatttgctaatcaaaaggcaatggtcccagt

SEQ ID NO: 565076 - DNA, 33 bp, Homo sapien
cagatttgctaatcaagaggcaatggtcccagt

SEQ ID NO: 565077 - DNA, 33 bp, Homo sapien
tctgtgactaaaagcacatgagcttctccccag

SEQ ID NO: 565078 - DNA, 33 bp, Homo sapien
tctgtgactaaaagcatatgagcttctccccag

SEQ ID NO: 565079 - DNA, 33 bp, Homo sapien
tgttggtaatctggaacaccatggggagggatt

SEQ ID NO: 565080 - DNA, 33 bp, Homo sapien
tgttggtaatctggaataccatggggagggatt

SEQ ID NO: 565081 - DNA, 33 bp, Homo sapien
ctctaccctaaagacaacgagatctccacagta

SEQ ID NO: 565082 - DNA, 33 bp, Homo sapien
ctctaccctaaagacaccgagatctccacagta

SEQ ID NO: 565083 - DNA, 33 bp, Homo sapien
gaaatggacttcaccaatggtctttggcttcat

SEQ ID NO: 565084 - DNA, 33 bp, Homo sapien
gaaatggacttcaccagtggtctttggcttcat

SEQ ID NO: 565085 - DNA, 33 bp, Homo sapien
tcttactgataggatcaccttgttttgccattt

SEQ ID NO: 565086 - DNA, 33 bp, Homo sapien
tcttactgataggatcgccttgttttgccattt

SEQ ID NO: 565087 - DNA, 33 bp, Homo sapien
ctatgcaccttcaccccgcaagagagcgcagga

SEQ ID NO: 565088 - DNA, 33 bp, Homo sapien
ctatgcaccttcaccctgcaagagagcgcagga

SEQ ID NO: 565089 - DNA, 33 bp, Homo sapien
gccagaactctggataaccctttagaaatcaga

SEQ ID NO: 565090 - DNA, 33 bp, Homo sapien
gccagaactctggatagccctttagaaatcaga

SEQ ID NO: 565091 - DNA, 33 bp, Homo sapien
ccaattctctcctgtcaccattggcaattcctg

SEQ ID NO: 565092 - DNA, 33 bp, Homo sapien
ccaattctctcctgtcgccattggcaattcctg

SEQ ID NO: 565093 - DNA, 33 bp, Homo sapien
aacaaaacctgggctcaaaagttctgtgtctta

SEQ ID NO: 565094 - DNA, 33 bp, Homo sapien
aacaaaacctgggctccaaagttctgtgtctta

SEQ ID NO: 565095 - DNA, 33 bp, Homo sapien
tgaaacggtataaataaggtgatgctatgttct

SEQ ID NO: 565096 - DNA, 33 bp, Homo sapien
tgaaacggtataaatacggtgatgctatgttct

SEQ ID NO: 565097 - DNA, 33 bp, Homo sapien
atagaaccagcattcaaaatagtgattgttcct

SEQ ID NO: 565098 - DNA, 33 bp, Homo sapien
atagaaccagcattcagaatagtgattgttcct

SEQ ID NO: 565099 - DNA, 33 bp, Homo sapien
agcttggagtgtagaagacttccatggagggtg

SEQ ID NO: 565100 - DNA, 33 bp, Homo sapien
agcttggagtgtagaatacttccatggagggtg

SEQ ID NO: 565101 - DNA, 33 bp, Homo sapien
atgttggctttatttgaagaaaactatttccag

SEQ ID NO: 565102 - DNA, 33 bp, Homo sapien
atgttggctttatttggagaaaactatttccag

SEQ ID NO: 565103 - DNA, 33 bp, Homo sapien
ttaccaactgaaatgaacgtctcttctgcaaac

SEQ ID NO: 565104 - DNA, 33 bp, Homo sapien
ttaccaactgaaatgagcgtctcttctgcaaac

SEQ ID NO: 565105 - DNA, 33 bp, Homo sapien
atttaggaagcaaactaaggagctcagtgtccc

SEQ ID NO: 565106 - DNA, 33 bp, Homo sapien
atttaggaagcaaactgaggagctcagtgtccc

SEQ ID NO: 565107 - DNA, 33 bp, Homo sapien
aagctcttacatatacccgtgaatctagaaggc

SEQ ID NO: 565108 - DNA, 33 bp, Homo sapien
aagctcttacatatactcgtgaatctagaaggc

SEQ ID NO: 565109 - DNA, 33 bp, Homo sapien
catgtccaggccctgcagaaaaaagaggaggat

SEQ ID NO: 565110 - DNA, 33 bp, Homo sapien
catgtccaggccctgcggaaaaaagaggaggat

SEQ ID NO: 565111 - DNA, 33 bp, Homo sapien
gcccttttctcctaacaagagatgctaaaatga

SEQ ID NO: 565112 - DNA, 33 bp, Homo sapien
gcccttttctcctaacgagagatgctaaaatga

SEQ ID NO: 565113 - DNA, 33 bp, Homo sapien
tccctcggtgcctgtcacagtgctggggctcca

SEQ ID NO: 565114 - DNA, 33 bp, Homo sapien
tccctcggtgcctgtcgcagtgctggggctcca

SEQ ID NO: 565115 - DNA, 33 bp, Homo sapien
gccagaaagacataagacatgtggtaaaaactc

SEQ ID NO: 565116 - DNA, 33 bp, Homo sapien
gccagaaagacataaggcatgtggtaaaaactc

SEQ ID NO: 565117 - DNA, 33 bp, Homo sapien
tgagaatttttttacaaggtatgtaatgcatag

SEQ ID NO: 565118 - DNA, 33 bp, Homo sapien
tgagaatttttttacagggtatgtaatgcatag

SEQ ID NO: 565119 - DNA, 33 bp, Homo sapien
tgtgacgctctgaaaactctccagccaggtctg

SEQ ID NO: 565120 - DNA, 33 bp, Homo sapien
tgtgacgctctgaaaagtctccagccaggtctg

SEQ ID NO: 565121 - DNA, 33 bp, Homo sapien
acatacaagcagtgcaagaagacactgactttg

SEQ ID NO: 565122 - DNA, 33 bp, Homo sapien
acatacaagcagtgcaggaagacactgactttg

SEQ ID NO: 565123 - DNA, 33 bp, Homo sapien
ctgcattatttacaaaactttcagtgaatatgt

SEQ ID NO: 565124 - DNA, 33 bp, Homo sapien
ctgcattatttacaaatctttcagtgaatatgt

SEQ ID NO: 565125 - DNA, 33 bp, Homo sapien
acattattctggaaggcaaaatgttgaaagctg

SEQ ID NO: 565126 - DNA, 33 bp, Homo sapien
acattattctggaaggtaaaatgttgaaagctg

SEQ ID NO: 565127 - DNA, 33 bp, Homo sapien
agtagtagcagagacaatcacacgtgctgtaaa

SEQ ID NO: 565128 - DNA, 33 bp, Homo sapien
agtagtagcagagacagtcacacgtgctgtaaa

SEQ ID NO: 565129 - DNA, 33 bp, Homo sapien
tgtccatgttgaataggagaaagatgtcttggc

SEQ ID NO: 565130 - DNA, 33 bp, Homo sapien
tgtccatgttgaatagtagaaagatgtcttggc

SEQ ID NO: 565131 - DNA, 33 bp, Homo sapien
ctaccaggaagcgagaacgcaaggcctcccggg

SEQ ID NO: 565132 - DNA, 33 bp, Homo sapien
ctaccaggaagcgagagcgcaaggcctcccggg

SEQ ID NO: 565133 - DNA, 33 bp, Homo sapien
aacttaattggaagcacagaggtcatcagattg

SEQ ID NO: 565134 - DNA, 33 bp, Homo sapien
aacttaattggaagcatagaggtcatcagattg

SEQ ID NO: 565135 - DNA, 33 bp, Homo sapien
ttctctctattccatcactgcttctcttgtgga

SEQ ID NO: 565136 - DNA, 33 bp, Homo sapien
ttctctctattccatctctgcttctcttgtgga

SEQ ID NO: 565137 - DNA, 33 bp, Homo sapien
ctccgggaatgtgagacaatacctttctcttgt

SEQ ID NO: 565138 - DNA, 33 bp, Homo sapien
ctccgggaatgtgagataatacctttctcttgt

SEQ ID NO: 565139 - DNA, 33 bp, Homo sapien
agttggcaacaaggagaccataaatgactgcaa

SEQ ID NO: 565140 - DNA, 33 bp, Homo sapien
agttggcaacaaggaggccataaatgactgcaa

SEQ ID NO: 565141 - DNA, 33 bp, Homo sapien
gccagactcttaaatgacattaatatgtgtaca

SEQ ID NO: 565142 - DNA, 33 bp, Homo sapien
gccagactcttaaatggcattaatatgtgtaca

SEQ ID NO: 565143 - DNA, 33 bp, Homo sapien
ctgacttttgcaaatacatactcttctgcctgg

SEQ ID NO: 565144 - DNA, 33 bp, Homo sapien
ctgacttttgcaaatatatactcttctgcctgg

SEQ ID NO: 565145 - DNA, 33 bp, Homo sapien
gttctggagcacagtccgaccctcttccagtgg

SEQ ID NO: 565146 - DNA, 33 bp, Homo sapien
gttctggagcacagtctgaccctcttccagtgg

SEQ ID NO: 565147 - DNA, 33 bp, Homo sapien
taaccatcccagtgtcaaataaaaatggccact

SEQ ID NO: 565148 - DNA, 33 bp, Homo sapien
taaccatcccagtgtccaataaaaatggccact

SEQ ID NO: 565149 - DNA, 33 bp, Homo sapien
ctggtattcgcattacacatatataacctcttt

SEQ ID NO: 565150 - DNA, 33 bp, Homo sapien
ctggtattcgcattacccatatataacctcttt

SEQ ID NO: 565151 - DNA, 33 bp, Homo sapien
catgcttcacaacaaaaatgggagaaaaatttc

SEQ ID NO: 565152 - DNA, 33 bp, Homo sapien
catgcttcacaacaaagatgggagaaaaatttc

SEQ ID NO: 565153 - DNA, 33 bp, Homo sapien
tccagcaggaatatcacatacacgatgctgtgt

SEQ ID NO: 565154 - DNA, 33 bp, Homo sapien
tccagcaggaatatcatatacacgatgctgtgt

SEQ ID NO: 565155 - DNA, 33 bp, Homo sapien
tgttctctcatgattaaatgcaggatatgcatc

SEQ ID NO: 565156 - DNA, 33 bp, Homo sapien
tgttctctcatgattacatgcaggatatgcatc

SEQ ID NO: 565157 - DNA, 33 bp, Homo sapien
tcaaggttgttaccacaaaagcaggtatcgtac

SEQ ID NO: 565158 - DNA, 33 bp, Homo sapien
tcaaggttgttaccaccaaagcaggtatcgtac

SEQ ID NO: 565159 - DNA, 33 bp, Homo sapien
ttcagacaagttgagaggtatagtgtagatctc

SEQ ID NO: 565160 - DNA, 33 bp, Homo sapien
ttcagacaagttgagatgtatagtgtagatctc

SEQ ID NO: 565161 - DNA, 33 bp, Homo sapien
caggttggccacatgcacgtgaagggtagacca

SEQ ID NO: 565162 - DNA, 33 bp, Homo sapien
caggttggccacatgcgcgtgaagggtagacca

SEQ ID NO: 565163 - DNA, 33 bp, Homo sapien
aaatttgaatgcataacatcatctcttcataca

SEQ ID NO: 565164 - DNA, 33 bp, Homo sapien
aaatttgaatgcataatatcatctcttcataca

SEQ ID NO: 565165 - DNA, 33 bp, Homo sapien
agcttatgttgtcaccgggcagataagcatggt

SEQ ID NO: 565166 - DNA, 33 bp, Homo sapien
agcttatgttgtcacctggcagataagcatggt

SEQ ID NO: 565167 - DNA, 33 bp, Homo sapien
atccatatcaatacagacagcaaaataaaacca

SEQ ID NO: 565168 - DNA, 33 bp, Homo sapien
atccatatcaatacaggcagcaaaataaaacca

SEQ ID NO: 565169 - DNA, 33 bp, Homo sapien
atcattcatataagtcacgaagtcatttgtgtt

SEQ ID NO: 565170 - DNA, 33 bp, Homo sapien
atcattcatataagtcgcgaagtcatttgtgtt

SEQ ID NO: 565171 - DNA, 33 bp, Homo sapien
tatgaatgatggaaaaagatgattattggaaag

SEQ ID NO: 565172 - DNA, 33 bp, Homo sapien
tatgaatgatggaaaacgatgattattggaaag

SEQ ID NO: 565173 - DNA, 33 bp, Homo sapien
actgagttgcaactggaactgccctgggatggc

SEQ ID NO: 565174 - DNA, 33 bp, Homo sapien
actgagttgcaactggcactgccctgggatggc

SEQ ID NO: 565175 - DNA, 33 bp, Homo sapien
gagcaatcaggactcaactcacagggaaattct

SEQ ID NO: 565176 - DNA, 33 bp, Homo sapien
gagcaatcaggactcagctcacagggaaattct

SEQ ID NO: 565177 - DNA, 33 bp, Homo sapien
cacaagacattctaaacccagaccagtgtaccc

SEQ ID NO: 565178 - DNA, 33 bp, Homo sapien
cacaagacattctaaatccagaccagtgtaccc

SEQ ID NO: 565179 - DNA, 33 bp, Homo sapien
cattggtgatgtcggcgaagaacctgtgatgca

SEQ ID NO: 565180 - DNA, 33 bp, Homo sapien
cattggtgatgtcggctaagaacctgtgatgca

SEQ ID NO: 565181 - DNA, 33 bp, Homo sapien
aggttcttccttggccaaattctgcttcctccc

SEQ ID NO: 565182 - DNA, 33 bp, Homo sapien
aggttcttccttggccgaattctgcttcctccc

SEQ ID NO: 565183 - DNA, 33 bp, Homo sapien
tgaggagaaaacaaagaagagactagccatggt

SEQ ID NO: 565184 - DNA, 33 bp, Homo sapien
tgaggagaaaacaaagtagagactagccatggt

SEQ ID NO: 565185 - DNA, 33 bp, Homo sapien
ctttaccattgaccccaagctacagtctaaatt

SEQ ID NO: 565186 - DNA, 33 bp, Homo sapien
ctttaccattgaccccgagctacagtctaaatt

SEQ ID NO: 565187 - DNA, 33 bp, Homo sapien
tcaataaacttcttgaatataaacaagcagaac

SEQ ID NO: 565188 - DNA, 33 bp, Homo sapien
tcaataaacttcttgagtataaacaagcagaac

SEQ ID NO: 565189 - DNA, 33 bp, Homo sapien
tgaaaactcgactacaaggaatttctagagacc

SEQ ID NO: 565190 - DNA, 33 bp, Homo sapien
tgaaaactcgactacagggaatttctagagacc

SEQ ID NO: 565191 - DNA, 33 bp, Homo sapien
atttcaaagatgctaacccaaaagcccaggaag

SEQ ID NO: 565192 - DNA, 33 bp, Homo sapien
atttcaaagatgctaatccaaaagcccaggaag

SEQ ID NO: 565193 - DNA, 33 bp, Homo sapien
gtgcttgcctcaccaactctgaaaatcatgacc

SEQ ID NO: 565194 - DNA, 33 bp, Homo sapien
gtgcttgcctcaccaattctgaaaatcatgacc

SEQ ID NO: 565195 - DNA, 33 bp, Homo sapien
tgtcttcaatctgggagagagctgagaaaatat

SEQ ID NO: 565196 - DNA, 33 bp, Homo sapien
tgtcttcaatctgggatagagctgagaaaatat

SEQ ID NO: 565197 - DNA, 33 bp, Homo sapien
agaaactgagggggaacgggacaggcaaagagg

SEQ ID NO: 565198 - DNA, 33 bp, Homo sapien
agaaactgagggggaatgggacaggcaaagagg

SEQ ID NO: 565199 - DNA, 33 bp, Homo sapien
cccccagcgacctacacgcagctcatcgggacc

SEQ ID NO: 565200 - DNA, 33 bp, Homo sapien
cccccagcgacctacatgcagctcatcgggacc

SEQ ID NO: 565201 - DNA, 33 bp, Homo sapien
aagcttattttcagaaagtagagactcatttgt

SEQ ID NO: 565202 - DNA, 33 bp, Homo sapien
aagcttattttcagaaggtagagactcatttgt

SEQ ID NO: 565203 - DNA, 33 bp, Homo sapien
catagtaatcttgtaaaactcaaccaagcaaaa

SEQ ID NO: 565204 - DNA, 33 bp, Homo sapien
catagtaatcttgtaatactcaaccaagcaaaa

SEQ ID NO: 565205 - DNA, 33 bp, Homo sapien
tacacaaagcatagaaactgcatctgcctctgg

SEQ ID NO: 565206 - DNA, 33 bp, Homo sapien
tacacaaagcatagaacctgcatctgcctctgg

SEQ ID NO: 565207 - DNA, 33 bp, Homo sapien
gttgatatggtttggaagattggccccttcaaa

SEQ ID NO: 565208 - DNA, 33 bp, Homo sapien
gttgatatggtttggatgattggccccttcaaa

SEQ ID NO: 565209 - DNA, 33 bp, Homo sapien
attttcattcccttgcaaactaaagagatggag

SEQ ID NO: 565210 - DNA, 33 bp, Homo sapien
attttcattcccttgcgaactaaagagatggag

SEQ ID NO: 565211 - DNA, 33 bp, Homo sapien
tcctggtggcatcaaaattcatggttctggggt

SEQ ID NO: 565212 - DNA, 33 bp, Homo sapien
tcctggtggcatcaaagttcatggttctggggt

SEQ ID NO: 565213 - DNA, 33 bp, Homo sapien
taattgagcttagtgaagaaggtatgttgaaag

SEQ ID NO: 565214 - DNA, 33 bp, Homo sapien
taattgagcttagtgaggaaggtatgttgaaag

SEQ ID NO: 565215 - DNA, 33 bp, Homo sapien
agggtagtcaacttcaacaatagcttagctaga

SEQ ID NO: 565216 - DNA, 33 bp, Homo sapien
agggtagtcaacttcatcaatagcttagctaga

SEQ ID NO: 565217 - DNA, 33 bp, Homo sapien
gaacatacactcttcacgccatttctcatcttt

SEQ ID NO: 565218 - DNA, 33 bp, Homo sapien
gaacatacactcttcatgccatttctcatcttt

SEQ ID NO: 565219 - DNA, 33 bp, Homo sapien
gagtaggagttcatgactatattcacttgagag

SEQ ID NO: 565220 - DNA, 33 bp, Homo sapien
gagtaggagttcatgagtatattcacttgagag

SEQ ID NO: 565221 - DNA, 33 bp, Homo sapien
aaggtggtagggacaaatcttaggagccccaga

SEQ ID NO: 565222 - DNA, 33 bp, Homo sapien
aaggtggtagggacaagtcttaggagccccaga

SEQ ID NO: 565223 - DNA, 33 bp, Homo sapien
ctcacctctatatgaacgttccccagtactcaa

SEQ ID NO: 565224 - DNA, 33 bp, Homo sapien
ctcacctctatatgaatgttccccagtactcaa

SEQ ID NO: 565225 - DNA, 33 bp, Homo sapien
aggtgcatccagtccactgacagttttatgtga

SEQ ID NO: 565226 - DNA, 33 bp, Homo sapien
aggtgcatccagtccagtgacagttttatgtga

SEQ ID NO: 565227 - DNA, 33 bp, Homo sapien
ggagtcagataacttcaaatgctacagagacac

SEQ ID NO: 565228 - DNA, 33 bp, Homo sapien
ggagtcagataacttcgaatgctacagagacac

SEQ ID NO: 565229 - DNA, 33 bp, Homo sapien
accagtgaaggcagaactgagatggggccatga

SEQ ID NO: 565230 - DNA, 33 bp, Homo sapien
accagtgaaggcagaattgagatggggccatga

SEQ ID NO: 565231 - DNA, 33 bp, Homo sapien
gatggttaagttcaccaaggagtctccctgtta

SEQ ID NO: 565232 - DNA, 33 bp, Homo sapien
gatggttaagttcacctaggagtctccctgtta

SEQ ID NO: 565233 - DNA, 33 bp, Homo sapien
gaacccacgacgacgaagaatttgcctccttcc

SEQ ID NO: 565234 - DNA, 33 bp, Homo sapien
gaacccacgacgacgacgaatttgcctccttcc

SEQ ID NO: 565235 - DNA, 33 bp, Homo sapien
acgaaaagaactgagaagagaatcaatccttat

SEQ ID NO: 565236 - DNA, 33 bp, Homo sapien
acgaaaagaactgagaggagaatcaatccttat

SEQ ID NO: 565237 - DNA, 33 bp, Homo sapien
acccaaatcttcaccacgaaaactggctgatgt

SEQ ID NO: 565238 - DNA, 33 bp, Homo sapien
acccaaatcttcaccatgaaaactggctgatgt

SEQ ID NO: 565239 - DNA, 33 bp, Homo sapien
gtcaagcctccagccaaaagtctcctgaccaca

SEQ ID NO: 565240 - DNA, 33 bp, Homo sapien
gtcaagcctccagccagaagtctcctgaccaca

SEQ ID NO: 565241 - DNA, 33 bp, Homo sapien
ttttctgtaaggattacgtgacagggctcatgt

SEQ ID NO: 565242 - DNA, 33 bp, Homo sapien
ttttctgtaaggattatgtgacagggctcatgt

SEQ ID NO: 565243 - DNA, 33 bp, Homo sapien
gcctacagaggggaaacaatgaacaccgcacag

SEQ ID NO: 565244 - DNA, 33 bp, Homo sapien
gcctacagaggggaaagaatgaacaccgcacag

SEQ ID NO: 565245 - DNA, 33 bp, Homo sapien
gccacttttgccagtacagttgtcatggaccct

SEQ ID NO: 565246 - DNA, 33 bp, Homo sapien
gccacttttgccagtagagttgtcatggaccct

SEQ ID NO: 565247 - DNA, 33 bp, Homo sapien
gaagttggttatgctcaaagaacaggggtagga

SEQ ID NO: 565248 - DNA, 33 bp, Homo sapien
gaagttggttatgctcgaagaacaggggtagga

SEQ ID NO: 565249 - DNA, 33 bp, Homo sapien
tcagacaaggcccctacattttgtgctggtcac

SEQ ID NO: 565250 - DNA, 33 bp, Homo sapien
tcagacaaggcccctatattttgtgctggtcac

SEQ ID NO: 565251 - DNA, 33 bp, Homo sapien
tttcttcttttaaacacagaaagcgaatggtaa

SEQ ID NO: 565252 - DNA, 33 bp, Homo sapien
tttcttcttttaaacagagaaagcgaatggtaa

SEQ ID NO: 565253 - DNA, 33 bp, Homo sapien
actagatttgggttaacagtgcagataaaagag

SEQ ID NO: 565254 - DNA, 33 bp, Homo sapien
actagatttgggttaatagtgcagataaaagag

SEQ ID NO: 565255 - DNA, 33 bp, Homo sapien
catcttgaaccatgaacatggaggcacaccatg

SEQ ID NO: 565256 - DNA, 33 bp, Homo sapien
catcttgaaccatgaagatggaggcacaccatg

SEQ ID NO: 565257 - DNA, 33 bp, Homo sapien
gtggaaagggccaggaaggctaaaagagaagca

SEQ ID NO: 565258 - DNA, 33 bp, Homo sapien
gtggaaagggccaggagggctaaaagagaagca

SEQ ID NO: 565259 - DNA, 33 bp, Homo sapien
gaaaggggcagtgcaactccagaacagggtttc

SEQ ID NO: 565260 - DNA, 33 bp, Homo sapien
gaaaggggcagtgcaattccagaacagggtttc

SEQ ID NO: 565261 - DNA, 33 bp, Homo sapien
ttacagcgaactctgacgcacacaatttaatgg

SEQ ID NO: 565262 - DNA, 33 bp, Homo sapien
ttacagcgaactctgatgcacacaatttaatgg

SEQ ID NO: 565263 - DNA, 33 bp, Homo sapien
cagctcttcttgattaacttcagggtgttctta

SEQ ID NO: 565264 - DNA, 33 bp, Homo sapien
cagctcttcttgattagcttcagggtgttctta

SEQ ID NO: 565265 - DNA, 33 bp, Homo sapien
ggctggtgattcagaccaatatttttacccatt

SEQ ID NO: 565266 - DNA, 33 bp, Homo sapien
ggctggtgattcagactaatatttttacccatt

SEQ ID NO: 565267 - DNA, 33 bp, Homo sapien
ggcttggtggaagaaagcgaagggattgattca

SEQ ID NO: 565268 - DNA, 33 bp, Homo sapien
ggcttggtggaagaaatcgaagggattgattca

SEQ ID NO: 565269 - DNA, 33 bp, Homo sapien
ttctctgaaggaccccaaggtgtaaagcatcac

SEQ ID NO: 565270 - DNA, 33 bp, Homo sapien
ttctctgaaggaccccgaggtgtaaagcatcac

SEQ ID NO: 565271 - DNA, 33 bp, Homo sapien
ccattcctggagaaaagcagaagtttagttctt

SEQ ID NO: 565272 - DNA, 33 bp, Homo sapien
ccattcctggagaaaatcagaagtttagttctt

SEQ ID NO: 565273 - DNA, 33 bp, Homo sapien
ctacatacattccacaacattccctgtgcacac

SEQ ID NO: 565274 - DNA, 33 bp, Homo sapien
ctacatacattccacagcattccctgtgcacac

SEQ ID NO: 565275 - DNA, 33 bp, Homo sapien
tttgtaaatggtgtaaagtctgtatctagattc

SEQ ID NO: 565276 - DNA, 33 bp, Homo sapien
tttgtaaatggtgtaaggtctgtatctagattc

SEQ ID NO: 565277 - DNA, 33 bp, Homo sapien
tacatacttattggaaaggctcaaattcagaac

SEQ ID NO: 565278 - DNA, 33 bp, Homo sapien
tacatacttattggaatggctcaaattcagaac

SEQ ID NO: 565279 - DNA, 33 bp, Homo sapien
ggtcagaacttgaatgcatttgtcaccaagtaa

SEQ ID NO: 565280 - DNA, 33 bp, Homo sapien
ggtcagaacttgaatgtatttgtcaccaagtaa

SEQ ID NO: 565281 - DNA, 33 bp, Homo sapien
tgtatcctgggttgaacctaccaggtcccgtgt

SEQ ID NO: 565282 - DNA, 33 bp, Homo sapien
tgtatcctgggttgaagctaccaggtcccgtgt

SEQ ID NO: 565283 - DNA, 33 bp, Homo sapien
aatattttggagctaaaggatgaggacaaaatg

SEQ ID NO: 565284 - DNA, 33 bp, Homo sapien
aatattttggagctaatggatgaggacaaaatg

SEQ ID NO: 565285 - DNA, 33 bp, Homo sapien
gaaggtcaatgtactacggcctgaaggggagat

SEQ ID NO: 565286 - DNA, 33 bp, Homo sapien
gaaggtcaatgtactatggcctgaaggggagat

SEQ ID NO: 565287 - DNA, 33 bp, Homo sapien
cagatgtaatgcaatcccaaatgtcaggcaatc

SEQ ID NO: 565288 - DNA, 33 bp, Homo sapien
cagatgtaatgcaatctcaaatgtcaggcaatc

SEQ ID NO: 565289 - DNA, 33 bp, Homo sapien
ttgatggagtgacaaaaactgacaaagatgggt

SEQ ID NO: 565290 - DNA, 33 bp, Homo sapien
ttgatggagtgacaaagactgacaaagatgggt

SEQ ID NO: 565291 - DNA, 33 bp, Homo sapien
gaagtccgaggataaaagagcctgctgagtagt

SEQ ID NO: 565292 - DNA, 33 bp, Homo sapien
gaagtccgaggataaaggagcctgctgagtagt

SEQ ID NO: 565293 - DNA, 33 bp, Homo sapien
gttttcagactgtgagcaatacaggacagaaga

SEQ ID NO: 565294 - DNA, 33 bp, Homo sapien
gttttcagactgtgagtaatacaggacagaaga

SEQ ID NO: 565295 - DNA, 33 bp, Homo sapien
ggctatcattgcatcaaaagaatttcccacagc

SEQ ID NO: 565296 - DNA, 33 bp, Homo sapien
ggctatcattgcatcagaagaatttcccacagc

SEQ ID NO: 565297 - DNA, 33 bp, Homo sapien
tatgtgtttctgttctcacctcagtcttgagtt

SEQ ID NO: 565298 - DNA, 33 bp, Homo sapien
tatgtgtttctgttcttacctcagtcttgagtt

SEQ ID NO: 565299 - DNA, 33 bp, Homo sapien
gagccaacgcttgtccaagtgaaatatgttagt

SEQ ID NO: 565300 - DNA, 33 bp, Homo sapien
gagccaacgcttgtcccagtgaaatatgttagt

SEQ ID NO: 565301 - DNA, 33 bp, Homo sapien
ggcagtcatggtttacaaggggctgtagtgatg

SEQ ID NO: 565302 - DNA, 33 bp, Homo sapien
ggcagtcatggtttaccaggggctgtagtgatg

SEQ ID NO: 565303 - DNA, 33 bp, Homo sapien
agtggtcttaggtggaactcaagcgtctgtatt

SEQ ID NO: 565304 - DNA, 33 bp, Homo sapien
agtggtcttaggtggagctcaagcgtctgtatt

SEQ ID NO: 565305 - DNA, 33 bp, Homo sapien
cccaagtgtgctcatcaaagtacaaatctggcc

SEQ ID NO: 565306 - DNA, 33 bp, Homo sapien
cccaagtgtgctcatcgaagtacaaatctggcc

SEQ ID NO: 565307 - DNA, 33 bp, Homo sapien
aaaagtagtgtaaatagcaggtttttccatcag

SEQ ID NO: 565308 - DNA, 33 bp, Homo sapien
aaaagtagtgtaaatatcaggtttttccatcag

SEQ ID NO: 565309 - DNA, 33 bp, Homo sapien
aattgttgtgtttctgcagtcccctgcaagttg

SEQ ID NO: 565310 - DNA, 33 bp, Homo sapien
aattgttgtgtttctgtagtcccctgcaagttg

SEQ ID NO: 565311 - DNA, 33 bp, Homo sapien
taggtctctctggaaacgtgtccacagaattgg

SEQ ID NO: 565312 - DNA, 33 bp, Homo sapien
taggtctctctggaaatgtgtccacagaattgg

SEQ ID NO: 565313 - DNA, 33 bp, Homo sapien
aaattcttcagaaacaaattttcgattcactgt

SEQ ID NO: 565314 - DNA, 33 bp, Homo sapien
aaattcttcagaaacacattttcgattcactgt

SEQ ID NO: 565315 - DNA, 33 bp, Homo sapien
tctttccaaatataacagcagacttattctaat

SEQ ID NO: 565316 - DNA, 33 bp, Homo sapien
tctttccaaatataacggcagacttattctaat

SEQ ID NO: 565317 - DNA, 33 bp, Homo sapien
gagccatctgggaaagcagatagaatactcctc

SEQ ID NO: 565318 - DNA, 33 bp, Homo sapien
gagccatctgggaaagtagatagaatactcctc

SEQ ID NO: 565319 - DNA, 33 bp, Homo sapien
tctttccaattccttacccctgactctatgcca

SEQ ID NO: 565320 - DNA, 33 bp, Homo sapien
tctttccaattccttatccctgactctatgcca

SEQ ID NO: 565321 - DNA, 33 bp, Homo sapien
tcctgcttaacacacacagaagcagaggcaata

SEQ ID NO: 565322 - DNA, 33 bp, Homo sapien
tcctgcttaacacacagagaagcagaggcaata

SEQ ID NO: 565323 - DNA, 33 bp, Homo sapien
ccccacagaagacatcaccaactgatctgggct

SEQ ID NO: 565324 - DNA, 33 bp, Homo sapien
ccccacagaagacatcgccaactgatctgggct

SEQ ID NO: 565325 - DNA, 33 bp, Homo sapien
ctgacctgtctgcctccatgacttgttctttcc

SEQ ID NO: 565326 - DNA, 33 bp, Homo sapien
ctgacctgtctgcctctatgacttgttctttcc

SEQ ID NO: 565327 - DNA, 33 bp, Homo sapien
ttggctgaaggaaataaggattctgttgggtgg

SEQ ID NO: 565328 - DNA, 33 bp, Homo sapien
ttggctgaaggaaatagggattctgttgggtgg

SEQ ID NO: 565329 - DNA, 33 bp, Homo sapien
actgttctcatgccacaagttgattgttaccat

SEQ ID NO: 565330 - DNA, 33 bp, Homo sapien
actgttctcatgccacgagttgattgttaccat

SEQ ID NO: 565331 - DNA, 33 bp, Homo sapien
gggacacaggagtgacagagactgcaagggtga

SEQ ID NO: 565332 - DNA, 33 bp, Homo sapien
gggacacaggagtgacggagactgcaagggtga

SEQ ID NO: 565333 - DNA, 33 bp, Homo sapien
taaaattagctgaaaaaataggtgcccagattg

SEQ ID NO: 565334 - DNA, 33 bp, Homo sapien
taaaattagctgaaaacataggtgcccagattg

SEQ ID NO: 565335 - DNA, 33 bp, Homo sapien
taatccaccatatcaacaggctgagaaaaatgg

SEQ ID NO: 565336 - DNA, 33 bp, Homo sapien
taatccaccatatcaataggctgagaaaaatgg

SEQ ID NO: 565337 - DNA, 33 bp, Homo sapien
cctcctctcctgaacacacacccccagtggaga

SEQ ID NO: 565338 - DNA, 33 bp, Homo sapien
cctcctctcctgaacatacacccccagtggaga

SEQ ID NO: 565339 - DNA, 33 bp, Homo sapien
ttatttagtccgttaaaatggtggattatattc

SEQ ID NO: 565340 - DNA, 33 bp, Homo sapien
ttatttagtccgttaacatggtggattatattc

SEQ ID NO: 565341 - DNA, 33 bp, Homo sapien
acaccgaagaaccatcacatgaagacacaggga

SEQ ID NO: 565342 - DNA, 33 bp, Homo sapien
acaccgaagaaccatcgcatgaagacacaggga

SEQ ID NO: 565343 - DNA, 33 bp, Homo sapien
tgttttcacaaacatacagagaagtatctacgc

SEQ ID NO: 565344 - DNA, 33 bp, Homo sapien
tgttttcacaaacatagagagaagtatctacgc

SEQ ID NO: 565345 - DNA, 33 bp, Homo sapien
ggtcgaaagggccaaacgtgtacttagatgtgg

SEQ ID NO: 565346 - DNA, 33 bp, Homo sapien
ggtcgaaagggccaaatgtgtacttagatgtgg

SEQ ID NO: 565347 - DNA, 33 bp, Homo sapien
aaattatcaaagtcataaatgttttcaaagttt

SEQ ID NO: 565348 - DNA, 33 bp, Homo sapien
aaattatcaaagtcattaatgttttcaaagttt

SEQ ID NO: 565349 - DNA, 33 bp, Homo sapien
ctagcattggcttatgaaacttcagtcaaacat

SEQ ID NO: 565350 - DNA, 33 bp, Homo sapien
ctagcattggcttatggaacttcagtcaaacat

SEQ ID NO: 565351 - DNA, 33 bp, Homo sapien
atcagaccagcccctcagaactattgaagtgaa

SEQ ID NO: 565352 - DNA, 33 bp, Homo sapien
atcagaccagcccctcggaactattgaagtgaa

SEQ ID NO: 565353 - DNA, 33 bp, Homo sapien
ttatgcttgctttggaaagtattctgacagaaa

SEQ ID NO: 565354 - DNA, 33 bp, Homo sapien
ttatgcttgctttggatagtattctgacagaaa

SEQ ID NO: 565355 - DNA, 33 bp, Homo sapien
gcactgtgatattacacaaacctcctcaaagtt

SEQ ID NO: 565356 - DNA, 33 bp, Homo sapien
gcactgtgatattacataaacctcctcaaagtt

SEQ ID NO: 565357 - DNA, 33 bp, Homo sapien
gatgtggagtcagtgaaaggatagattgagcac

SEQ ID NO: 565358 - DNA, 33 bp, Homo sapien
gatgtggagtcagtgagaggatagattgagcac

SEQ ID NO: 565359 - DNA, 33 bp, Homo sapien
ttttcctggttattgaagacatcttaggaaaca

SEQ ID NO: 565360 - DNA, 33 bp, Homo sapien
ttttcctggttattgaggacatcttaggaaaca

SEQ ID NO: 565361 - DNA, 33 bp, Homo sapien
gctcaacagccgctcaaacatttacttggtgtg

SEQ ID NO: 565362 - DNA, 33 bp, Homo sapien
gctcaacagccgctcagacatttacttggtgtg

SEQ ID NO: 565363 - DNA, 33 bp, Homo sapien
tataccagatataaagcatgtggcaataaagtc

SEQ ID NO: 565364 - DNA, 33 bp, Homo sapien
tataccagatataaagtatgtggcaataaagtc

SEQ ID NO: 565365 - DNA, 33 bp, Homo sapien
tatgagatgcctatacaatgcagtcatgaagaa

SEQ ID NO: 565366 - DNA, 33 bp, Homo sapien
tatgagatgcctatactatgcagtcatgaagaa

SEQ ID NO: 565367 - DNA, 33 bp, Homo sapien
ttgacaatccagattacgttcatccctggggac

SEQ ID NO: 565368 - DNA, 33 bp, Homo sapien
ttgacaatccagattatgttcatccctggggac

SEQ ID NO: 565369 - DNA, 33 bp, Homo sapien
aaaagatctgcttttccccaaatattctgtaac

SEQ ID NO: 565370 - DNA, 33 bp, Homo sapien
aaaagatctgcttttctccaaatattctgtaac

SEQ ID NO: 565371 - DNA, 33 bp, Homo sapien
tacaacgtagcaattacgtcagactaggacact

SEQ ID NO: 565372 - DNA, 33 bp, Homo sapien
tacaacgtagcaattatgtcagactaggacact

SEQ ID NO: 565373 - DNA, 33 bp, Homo sapien
tcaaggctggtcacgaagaggttcagcagctgc

SEQ ID NO: 565374 - DNA, 33 bp, Homo sapien
tcaaggctggtcacgacgaggttcagcagctgc

SEQ ID NO: 565375 - DNA, 33 bp, Homo sapien
acgtgtcccttatcctcagctatgccaacagct

SEQ ID NO: 565376 - DNA, 33 bp, Homo sapien
acgtgtcccttatccttagctatgccaacagct

SEQ ID NO: 565377 - DNA, 33 bp, Homo sapien
acagctgcgccaaccccattctctatggcttcc

SEQ ID NO: 565378 - DNA, 33 bp, Homo sapien
acagctgcgccaaccctattctctatggcttcc

SEQ ID NO: 565379 - DNA, 33 bp, Homo sapien
gagaacccgctggaagaatcggcggaagttgtc

SEQ ID NO: 565380 - DNA, 33 bp, Homo sapien
gagaacccgctggaaggatcggcggaagttgtc

SEQ ID NO: 565381 - DNA, 33 bp, Homo sapien
taagcaagacagggcacctaccaggagtcttgg

SEQ ID NO: 565382 - DNA, 33 bp, Homo sapien
taagcaagacagggcatctaccaggagtcttgg

SEQ ID NO: 565383 - DNA, 33 bp, Homo sapien
actagtgtgtggctgcccagattagcatggaat

SEQ ID NO: 565384 - DNA, 33 bp, Homo sapien
actagtgtgtggctgctcagattagcatggaat

SEQ ID NO: 565385 - DNA, 33 bp, Homo sapien
atggaactaaagctggcagcactgttgatgggc

SEQ ID NO: 565386 - DNA, 33 bp, Homo sapien
atggaactaaagctggtagcactgttgatgggc

SEQ ID NO: 565387 - DNA, 33 bp, Homo sapien
gacagcctgtcatgtccaaataccatcttccct

SEQ ID NO: 565388 - DNA, 33 bp, Homo sapien
gacagcctgtcatgtctaaataccatcttccct

SEQ ID NO: 565389 - DNA, 33 bp, Homo sapien
tagaactgtacaactaaaaagagaacactctac

SEQ ID NO: 565390 - DNA, 33 bp, Homo sapien
tagaactgtacaactagaaagagaacactctac

SEQ ID NO: 565391 - DNA, 33 bp, Homo sapien
gatttgcaggcatctacatcatagcttaaacag

SEQ ID NO: 565392 - DNA, 33 bp, Homo sapien
gatttgcaggcatctatatcatagcttaaacag

SEQ ID NO: 565393 - DNA, 33 bp, Homo sapien
tccaaccccagaaggaagactctgtgctcctac

SEQ ID NO: 565394 - DNA, 33 bp, Homo sapien
tccaaccccagaaggaggactctgtgctcctac

SEQ ID NO: 565395 - DNA, 33 bp, Homo sapien
ttgccacatactggccgacttggctaagttatt

SEQ ID NO: 565396 - DNA, 33 bp, Homo sapien
ttgccacatactggcctacttggctaagttatt

SEQ ID NO: 565397 - DNA, 33 bp, Homo sapien
gatttgctgctggtaacatcattatctctgagt

SEQ ID NO: 565398 - DNA, 33 bp, Homo sapien
gatttgctgctggtaatatcattatctctgagt

SEQ ID NO: 565399 - DNA, 33 bp, Homo sapien
gaatgaagtggcctcccaggctctgctcacatc

SEQ ID NO: 565400 - DNA, 33 bp, Homo sapien
gaatgaagtggcctccgaggctctgctcacatc

SEQ ID NO: 565401 - DNA, 33 bp, Homo sapien
tgccagtcagtgattcacccttgtcacagttgg

SEQ ID NO: 565402 - DNA, 33 bp, Homo sapien
tgccagtcagtgattcgcccttgtcacagttgg

SEQ ID NO: 565403 - DNA, 33 bp, Homo sapien
tgggaattacccgccaactccacccagggcagc

SEQ ID NO: 565404 - DNA, 33 bp, Homo sapien
tgggaattacccgccacctccacccagggcagc

SEQ ID NO: 565405 - DNA, 33 bp, Homo sapien
accagctggatatggcagccacaattcagagca

SEQ ID NO: 565406 - DNA, 33 bp, Homo sapien
accagctggatatggcggccacaattcagagca

SEQ ID NO: 565407 - DNA, 33 bp, Homo sapien
caggcttggcttcagaccttacaatatgaacta

SEQ ID NO: 565408 - DNA, 33 bp, Homo sapien
caggcttggcttcagatcttacaatatgaacta

SEQ ID NO: 565409 - DNA, 33 bp, Homo sapien
caacatacacttggaaattattcctcgatatga

SEQ ID NO: 565410 - DNA, 33 bp, Homo sapien
caacatacacttggaagttattcctcgatatga

SEQ ID NO: 565411 - DNA, 33 bp, Homo sapien
tgtatgttgttaatgaatagacttctaacagga

SEQ ID NO: 565412 - DNA, 33 bp, Homo sapien
tgtatgttgttaatgactagacttctaacagga

SEQ ID NO: 565413 - DNA, 33 bp, Homo sapien
gtaatcacttcatgaacgctaaatgagaatgta

SEQ ID NO: 565414 - DNA, 33 bp, Homo sapien
gtaatcacttcatgaatgctaaatgagaatgta

SEQ ID NO: 565415 - DNA, 33 bp, Homo sapien
taggggacgctccttaaaggctgttcaggggat

SEQ ID NO: 565416 - DNA, 33 bp, Homo sapien
taggggacgctccttagaggctgttcaggggat

SEQ ID NO: 565417 - DNA, 33 bp, Homo sapien
tgtcacatccacagagccatgaggattaaatga

SEQ ID NO: 565418 - DNA, 33 bp, Homo sapien
tgtcacatccacagaggcatgaggattaaatga

SEQ ID NO: 565419 - DNA, 33 bp, Homo sapien
ccctgagccctacacacgttgcctggattcttg

SEQ ID NO: 565420 - DNA, 33 bp, Homo sapien
ccctgagccctacacatgttgcctggattcttg

SEQ ID NO: 565421 - DNA, 33 bp, Homo sapien
ttcagccgagtaattcaactctccagggctctt

SEQ ID NO: 565422 - DNA, 33 bp, Homo sapien
ttcagccgagtaattccactctccagggctctt

SEQ ID NO: 565423 - DNA, 33 bp, Homo sapien
cttatgcaatgtataaataaacttctgccctga

SEQ ID NO: 565424 - DNA, 33 bp, Homo sapien
cttatgcaatgtataagtaaacttctgccctga

SEQ ID NO: 565425 - DNA, 33 bp, Homo sapien
ttcttaggatggtagaagctatagtgcccactg

SEQ ID NO: 565426 - DNA, 33 bp, Homo sapien
ttcttaggatggtagaggctatagtgcccactg

SEQ ID NO: 565427 - DNA, 33 bp, Homo sapien
gcagcacttcctgtaacagcctatacactaaat

SEQ ID NO: 565428 - DNA, 33 bp, Homo sapien
gcagcacttcctgtaagagcctatacactaaat

SEQ ID NO: 565429 - DNA, 33 bp, Homo sapien
tgtgacagtgagctctcaccactagacaatggg

SEQ ID NO: 565430 - DNA, 33 bp, Homo sapien
tgtgacagtgagctcttaccactagacaatggg

SEQ ID NO: 565431 - DNA, 33 bp, Homo sapien
gaaagaaaagttcctaaccctggattaatgtcc

SEQ ID NO: 565432 - DNA, 33 bp, Homo sapien
gaaagaaaagttcctacccctggattaatgtcc

SEQ ID NO: 565433 - DNA, 33 bp, Homo sapien
acattgatgtagcttcaaggctgatagggccag

SEQ ID NO: 565434 - DNA, 33 bp, Homo sapien
acattgatgtagcttcgaggctgatagggccag

SEQ ID NO: 565435 - DNA, 33 bp, Homo sapien
aggtttggagtgaccacgggctggatgtcctca

SEQ ID NO: 565436 - DNA, 33 bp, Homo sapien
aggtttggagtgaccatgggctggatgtcctca

SEQ ID NO: 565437 - DNA, 33 bp, Homo sapien
gagagaagggctaacacatacaggtaggatttg

SEQ ID NO: 565438 - DNA, 33 bp, Homo sapien
gagagaagggctaacatatacaggtaggatttg

SEQ ID NO: 565439 - DNA, 33 bp, Homo sapien
aatgactttctgggtaaagagtaaaatgccgca

SEQ ID NO: 565440 - DNA, 33 bp, Homo sapien
aatgactttctgggtagagagtaaaatgccgca

SEQ ID NO: 565441 - DNA, 33 bp, Homo sapien
tgagtgggtttgtaacacctcttcccaaagcca

SEQ ID NO: 565442 - DNA, 33 bp, Homo sapien
tgagtgggtttgtaactcctcttcccaaagcca

SEQ ID NO: 565443 - DNA, 33 bp, Homo sapien
caaggcggtggcagacggtattactcaacgctg

SEQ ID NO: 565444 - DNA, 33 bp, Homo sapien
caaggcggtggcagactgtattactcaacgctg

SEQ ID NO: 565445 - DNA, 33 bp, Homo sapien
gaacaaaataaggaagcatgtgagccaaacagt

SEQ ID NO: 565446 - DNA, 33 bp, Homo sapien
gaacaaaataaggaagtatgtgagccaaacagt

SEQ ID NO: 565447 - DNA, 33 bp, Homo sapien
ggcacggggaactttaagagggagcagagatac

SEQ ID NO: 565448 - DNA, 33 bp, Homo sapien
ggcacggggaactttaggagggagcagagatac

SEQ ID NO: 565449 - DNA, 33 bp, Homo sapien
actgctgttgctactaacacaaatattaggccc

SEQ ID NO: 565450 - DNA, 33 bp, Homo sapien
actgctgttgctactatcacaaatattaggccc

SEQ ID NO: 565451 - DNA, 33 bp, Homo sapien
ccagaggtttgtgctgacaaaaaggccaatgac

SEQ ID NO: 565452 - DNA, 33 bp, Homo sapien
ccagaggtttgtgctggcaaaaaggccaatgac

SEQ ID NO: 565453 - DNA, 33 bp, Homo sapien
ggcaaaggcccagctcaagattagcccaggcca

SEQ ID NO: 565454 - DNA, 33 bp, Homo sapien
ggcaaaggcccagctcgagattagcccaggcca

SEQ ID NO: 565455 - DNA, 33 bp, Homo sapien
taagccattgcctcgacaataacctgcttgcta

SEQ ID NO: 565456 - DNA, 33 bp, Homo sapien
taagccattgcctcgataataacctgcttgcta

SEQ ID NO: 565457 - DNA, 33 bp, Homo sapien
gtcacaggggggcttaaatggggtgagacacca

SEQ ID NO: 565458 - DNA, 33 bp, Homo sapien
gtcacaggggggcttacatggggtgagacacca

SEQ ID NO: 565459 - DNA, 33 bp, Homo sapien
caggctgagccttgcaaaagtcatagcggggtg

SEQ ID NO: 565460 - DNA, 33 bp, Homo sapien
caggctgagccttgcagaagtcatagcggggtg

SEQ ID NO: 565461 - DNA, 33 bp, Homo sapien
ggccaaagtcctgaaacgtggtctccatacacc

SEQ ID NO: 565462 - DNA, 33 bp, Homo sapien
ggccaaagtcctgaaatgtggtctccatacacc

SEQ ID NO: 565463 - DNA, 33 bp, Homo sapien
tgggagctaaagctacaactgctaaacagagcc

SEQ ID NO: 565464 - DNA, 33 bp, Homo sapien
tgggagctaaagctacgactgctaaacagagcc

SEQ ID NO: 565465 - DNA, 33 bp, Homo sapien
cattttgaacccgtcccgatgcccacagggctc

SEQ ID NO: 565466 - DNA, 33 bp, Homo sapien
cattttgaacccgtcctgatgcccacagggctc

SEQ ID NO: 565467 - DNA, 33 bp, Homo sapien
gaatggatgtcctgaaaattgcaccttgatggc

SEQ ID NO: 565468 - DNA, 33 bp, Homo sapien
gaatggatgtcctgaacattgcaccttgatggc

SEQ ID NO: 565469 - DNA, 33 bp, Homo sapien
ggcctctatcagctgcaagaaaaagaacacaca

SEQ ID NO: 565470 - DNA, 33 bp, Homo sapien
ggcctctatcagctgcgagaaaaagaacacaca

SEQ ID NO: 565471 - DNA, 33 bp, Homo sapien
cactgggatatggtcccgatcttcacaaattcc

SEQ ID NO: 565472 - DNA, 33 bp, Homo sapien
cactgggatatggtcctgatcttcacaaattcc

SEQ ID NO: 565473 - DNA, 33 bp, Homo sapien
catgtggcctcacatcaagggacgccgtgtgat

SEQ ID NO: 565474 - DNA, 33 bp, Homo sapien
catgtggcctcacatcgagggacgccgtgtgat

SEQ ID NO: 565475 - DNA, 33 bp, Homo sapien
catggtagttgtttccaaattttcatgattcta

SEQ ID NO: 565476 - DNA, 33 bp, Homo sapien
catggtagttgtttcccaattttcatgattcta

SEQ ID NO: 565477 - DNA, 33 bp, Homo sapien
aaagtattgtgtgccacgagaaaatactgtatg

SEQ ID NO: 565478 - DNA, 33 bp, Homo sapien
aaagtattgtgtgccatgagaaaatactgtatg

SEQ ID NO: 565479 - DNA, 33 bp, Homo sapien
tgacttcatgcagcgacaattagctcctaaact

SEQ ID NO: 565480 - DNA, 33 bp, Homo sapien
tgacttcatgcagcgataattagctcctaaact

SEQ ID NO: 565481 - DNA, 33 bp, Homo sapien
tgccacctcttgctgactaaaggctttatcttc

SEQ ID NO: 565482 - DNA, 33 bp, Homo sapien
tgccacctcttgctgattaaaggctttatcttc

SEQ ID NO: 565483 - DNA, 33 bp, Homo sapien
gcatgaaggccaagtaacagcagcgtggaactt

SEQ ID NO: 565484 - DNA, 33 bp, Homo sapien
gcatgaaggccaagtatcagcagcgtggaactt

SEQ ID NO: 565485 - DNA, 33 bp, Homo sapien
acgggtaaacgaggaggcatccatgcgtcttat

SEQ ID NO: 565486 - DNA, 33 bp, Homo sapien
acgggtaaacgaggagtcatccatgcgtcttat

SEQ ID NO: 565487 - DNA, 33 bp, Homo sapien
gcagtgatcttttccaataaagtctctatagct

SEQ ID NO: 565488 - DNA, 33 bp, Homo sapien
gcagtgatcttttccagtaaagtctctatagct

SEQ ID NO: 565489 - DNA, 33 bp, Homo sapien
ttctcctgcaaggaggaaaggaagttgcagaga

SEQ ID NO: 565490 - DNA, 33 bp, Homo sapien
ttctcctgcaaggaggcaaggaagttgcagaga

SEQ ID NO: 565491 - DNA, 33 bp, Homo sapien
atggggaaatattctaaagaagtggctcaaaac

SEQ ID NO: 565492 - DNA, 33 bp, Homo sapien
atggggaaatattctagagaagtggctcaaaac

SEQ ID NO: 565493 - DNA, 33 bp, Homo sapien
ggggcaattctgaggacagtgggttttggaagc

SEQ ID NO: 565494 - DNA, 33 bp, Homo sapien
ggggcaattctgaggatagtgggttttggaagc

SEQ ID NO: 565495 - DNA, 33 bp, Homo sapien
ttgcggaaaaagagaacgagagctccctgagtt

SEQ ID NO: 565496 - DNA, 33 bp, Homo sapien
ttgcggaaaaagagaatgagagctccctgagtt

SEQ ID NO: 565497 - DNA, 33 bp, Homo sapien
acacactctaagatacacttttgaaccagaatc

SEQ ID NO: 565498 - DNA, 33 bp, Homo sapien
acacactctaagatacgcttttgaaccagaatc

SEQ ID NO: 565499 - DNA, 33 bp, Homo sapien
ttcttatctctcatctcacacaaaaatcaaatc

SEQ ID NO: 565500 - DNA, 33 bp, Homo sapien
ttcttatctctcatcttacacaaaaatcaaatc

SEQ ID NO: 565501 - DNA, 33 bp, Homo sapien
agcctctcaaggactacggggctccaggttggt

SEQ ID NO: 565502 - DNA, 33 bp, Homo sapien
agcctctcaaggactatggggctccaggttggt

SEQ ID NO: 565503 - DNA, 33 bp, Homo sapien
aaaatggtggtcataaaagatagtagaaaaaca

SEQ ID NO: 565504 - DNA, 33 bp, Homo sapien
aaaatggtggtcataacagatagtagaaaaaca

SEQ ID NO: 565505 - DNA, 33 bp, Homo sapien
ttcccattttacagacaatgagactgagcctgg

SEQ ID NO: 565506 - DNA, 33 bp, Homo sapien
ttcccattttacagacgatgagactgagcctgg

SEQ ID NO: 565507 - DNA, 33 bp, Homo sapien
ttcttgttcttccaaacactaaggctgcgctac

SEQ ID NO: 565508 - DNA, 33 bp, Homo sapien
ttcttgttcttccaaatactaaggctgcgctac

SEQ ID NO: 565509 - DNA, 33 bp, Homo sapien
tcctgtgggggctagacgagtgcttccgcctaa

SEQ ID NO: 565510 - DNA, 33 bp, Homo sapien
tcctgtgggggctagatgagtgcttccgcctaa

SEQ ID NO: 565511 - DNA, 33 bp, Homo sapien
ataaggtgtgtgtataaccaggatggcctgctc

SEQ ID NO: 565512 - DNA, 33 bp, Homo sapien
ataaggtgtgtgtatatccaggatggcctgctc

SEQ ID NO: 565513 - DNA, 33 bp, Homo sapien
atcaaaacaaagctcacctatggcatataaggc

SEQ ID NO: 565514 - DNA, 33 bp, Homo sapien
atcaaaacaaagctcagctatggcatataaggc

SEQ ID NO: 565515 - DNA, 33 bp, Homo sapien
atataacccggtattaacaccattcctagccaa

SEQ ID NO: 565516 - DNA, 33 bp, Homo sapien
atataacccggtattagcaccattcctagccaa

SEQ ID NO: 565517 - DNA, 33 bp, Homo sapien
cacagagctttttttaactgagcacatggttct

SEQ ID NO: 565518 - DNA, 33 bp, Homo sapien
cacagagctttttttacctgagcacatggttct

SEQ ID NO: 565519 - DNA, 33 bp, Homo sapien
ttattttatttacaaccagagtagtgggtcagg

SEQ ID NO: 565520 - DNA, 33 bp, Homo sapien
ttattttatttacaacgagagtagtgggtcagg

SEQ ID NO: 565521 - DNA, 33 bp, Homo sapien
agtctgtcttcacacaatgtggtttccttggag

SEQ ID NO: 565522 - DNA, 33 bp, Homo sapien
agtctgtcttcacacagtgtggtttccttggag

SEQ ID NO: 565523 - DNA, 33 bp, Homo sapien
gcttcttgttcaaaaacgagaaatgtgtaaaac

SEQ ID NO: 565524 - DNA, 33 bp, Homo sapien
gcttcttgttcaaaaatgagaaatgtgtaaaac

SEQ ID NO: 565525 - DNA, 33 bp, Homo sapien
tgtacaagacgacttacatgggttcaaaagctg

SEQ ID NO: 565526 - DNA, 33 bp, Homo sapien
tgtacaagacgacttagatgggttcaaaagctg

SEQ ID NO: 565527 - DNA, 33 bp, Homo sapien
tcacagctgtggacaccgacaggcgaagatatt

SEQ ID NO: 565528 - DNA, 33 bp, Homo sapien
tcacagctgtggacactgacaggcgaagatatt

SEQ ID NO: 565529 - DNA, 33 bp, Homo sapien
taatgtgtatatttaccgcaggtttcttacaaa

SEQ ID NO: 565530 - DNA, 33 bp, Homo sapien
taatgtgtatatttactgcaggtttcttacaaa

SEQ ID NO: 565531 - DNA, 33 bp, Homo sapien
caccttgcaattgaaaccagtctatatcaggct

SEQ ID NO: 565532 - DNA, 33 bp, Homo sapien
caccttgcaattgaaatcagtctatatcaggct

SEQ ID NO: 565533 - DNA, 33 bp, Homo sapien
ctgcatctgtaacaaccgcgggtcgagcaacag

SEQ ID NO: 565534 - DNA, 33 bp, Homo sapien
ctgcatctgtaacaactgcgggtcgagcaacag

SEQ ID NO: 565535 - DNA, 33 bp, Homo sapien
acagccaatgttagtccattattagtttgcaca

SEQ ID NO: 565536 - DNA, 33 bp, Homo sapien
acagccaatgttagtctattattagtttgcaca

SEQ ID NO: 565537 - DNA, 33 bp, Homo sapien
gggagtggtaacgacaatggaactttgcaggaa

SEQ ID NO: 565538 - DNA, 33 bp, Homo sapien
gggagtggtaacgacagtggaactttgcaggaa

SEQ ID NO: 565539 - DNA, 33 bp, Homo sapien
gcatctgtctctgaaacgggacttttcttaaat

SEQ ID NO: 565540 - DNA, 33 bp, Homo sapien
gcatctgtctctgaaatgggacttttcttaaat

SEQ ID NO: 565541 - DNA, 33 bp, Homo sapien
aagtctttcattcagaacagtgggctttgtgtc

SEQ ID NO: 565542 - DNA, 33 bp, Homo sapien
aagtctttcattcagagcagtgggctttgtgtc

SEQ ID NO: 565543 - DNA, 33 bp, Homo sapien
ggagcaaggtctacacaaagccatgtgctgcct

SEQ ID NO: 565544 - DNA, 33 bp, Homo sapien
ggagcaaggtctacacgaagccatgtgctgcct

SEQ ID NO: 565545 - DNA, 33 bp, Homo sapien
aggatctgtagcctaactctgctgtctttatta

SEQ ID NO: 565546 - DNA, 33 bp, Homo sapien
aggatctgtagcctaattctgctgtctttatta

SEQ ID NO: 565547 - DNA, 33 bp, Homo sapien
ctagggctgccctaaacgctacctgttctgggt

SEQ ID NO: 565548 - DNA, 33 bp, Homo sapien
ctagggctgccctaaatgctacctgttctgggt

SEQ ID NO: 565549 - DNA, 33 bp, Homo sapien
gcaagggagtggacgaaaaatagcaatgctgaa

SEQ ID NO: 565550 - DNA, 33 bp, Homo sapien
gcaagggagtggacgacaaatagcaatgctgaa

SEQ ID NO: 565551 - DNA, 33 bp, Homo sapien
gttctcgagaccagaactagaatgtcattcctc

SEQ ID NO: 565552 - DNA, 33 bp, Homo sapien
gttctcgagaccagaattagaatgtcattcctc

SEQ ID NO: 565553 - DNA, 33 bp, Homo sapien
aaatgaacgagacaacagctcttcatgacttgc

SEQ ID NO: 565554 - DNA, 33 bp, Homo sapien
aaatgaacgagacaacggctcttcatgacttgc

SEQ ID NO: 565555 - DNA, 33 bp, Homo sapien
ctttgggagtcaggaaatcgaaatattttttcc

SEQ ID NO: 565556 - DNA, 33 bp, Homo sapien
ctttgggagtcaggaagtcgaaatattttttcc

SEQ ID NO: 565557 - DNA, 33 bp, Homo sapien
cccttagagaagatggaaggacatttgaacgca

SEQ ID NO: 565558 - DNA, 33 bp, Homo sapien
cccttagagaagatggcaggacatttgaacgca

SEQ ID NO: 565559 - DNA, 33 bp, Homo sapien
ggaagagtggaaacaaagaagaaggagccagga

SEQ ID NO: 565560 - DNA, 33 bp, Homo sapien
ggaagagtggaaacaatgaagaaggagccagga

SEQ ID NO: 565561 - DNA, 33 bp, Homo sapien
caaaatattttgagaaagtcactcaagagggtg

SEQ ID NO: 565562 - DNA, 33 bp, Homo sapien
caaaatattttgagaaggtcactcaagagggtg

SEQ ID NO: 565563 - DNA, 33 bp, Homo sapien
ttgtttatttagaggaatagggcagacaaaaaa

SEQ ID NO: 565564 - DNA, 33 bp, Homo sapien
ttgtttatttagaggattagggcagacaaaaaa

SEQ ID NO: 565565 - DNA, 33 bp, Homo sapien
tgagcacatggccactcagcataaaagccacat

SEQ ID NO: 565566 - DNA, 33 bp, Homo sapien
tgagcacatggccacttagcataaaagccacat

SEQ ID NO: 565567 - DNA, 33 bp, Homo sapien
caatacacaccccttcaaatttactgacaggcc

SEQ ID NO: 565568 - DNA, 33 bp, Homo sapien
caatacacaccccttcgaatttactgacaggcc

SEQ ID NO: 565569 - DNA, 33 bp, Homo sapien
cccaggaagaaagaacaatttcactcaccaaca

SEQ ID NO: 565570 - DNA, 33 bp, Homo sapien
cccaggaagaaagaaccatttcactcaccaaca

SEQ ID NO: 565571 - DNA, 33 bp, Homo sapien
tctgtgactagtggagacaactcagatcccaga

SEQ ID NO: 565572 - DNA, 33 bp, Homo sapien
tctgtgactagtggagtcaactcagatcccaga

SEQ ID NO: 565573 - DNA, 33 bp, Homo sapien
tggcccatgagatgaaaggattaaggcacatta

SEQ ID NO: 565574 - DNA, 33 bp, Homo sapien
tggcccatgagatgaagggattaaggcacatta

SEQ ID NO: 565575 - DNA, 33 bp, Homo sapien
aggcactgaaggtgtcaatcatagcaggcattt

SEQ ID NO: 565576 - DNA, 33 bp, Homo sapien
aggcactgaaggtgtcgatcatagcaggcattt

SEQ ID NO: 565577 - DNA, 33 bp, Homo sapien
agccccatgcacactaaaatcccttgggacact

SEQ ID NO: 565578 - DNA, 33 bp, Homo sapien
agccccatgcacactagaatcccttgggacact

SEQ ID NO: 565579 - DNA, 33 bp, Homo sapien
ccctaccttagcacctgagctgagaattaaatg

SEQ ID NO: 565580 - DNA, 33 bp, Homo sapien
ccctaccttagcaccttagctgagaattaaatg

SEQ ID NO: 565581 - DNA, 33 bp, Homo sapien
ctgatgtcctccatcccagtttcagtgcttctt

SEQ ID NO: 565582 - DNA, 33 bp, Homo sapien
ctgatgtcctccatcctagtttcagtgcttctt

SEQ ID NO: 565583 - DNA, 33 bp, Homo sapien
accaaagacaacttaactggggaagctgcagca

SEQ ID NO: 565584 - DNA, 33 bp, Homo sapien
accaaagacaacttaattggggaagctgcagca

SEQ ID NO: 565585 - DNA, 33 bp, Homo sapien
ccagtgttttgagagagaagggacccaccttaa

SEQ ID NO: 565586 - DNA, 33 bp, Homo sapien
ccagtgttttgagagataagggacccaccttaa

SEQ ID NO: 565587 - DNA, 33 bp, Homo sapien
ggccagaagcccggaacggacgcgaaagtgacc

SEQ ID NO: 565588 - DNA, 33 bp, Homo sapien
ggccagaagcccggaatggacgcgaaagtgacc

SEQ ID NO: 565589 - DNA, 33 bp, Homo sapien
atttcagtagagtaacaataattcaaattctga

SEQ ID NO: 565590 - DNA, 33 bp, Homo sapien
atttcagtagagtaacgataattcaaattctga

SEQ ID NO: 565591 - DNA, 33 bp, Homo sapien
aaatagtgtattctaacgtttcctccagtgata

SEQ ID NO: 565592 - DNA, 33 bp, Homo sapien
aaatagtgtattctaaggtttcctccagtgata

SEQ ID NO: 565593 - DNA, 33 bp, Homo sapien
tgcatctcatgcagtaagttaaatggggaggat

SEQ ID NO: 565594 - DNA, 33 bp, Homo sapien
tgcatctcatgcagtaggttaaatggggaggat

SEQ ID NO: 565595 - DNA, 33 bp, Homo sapien
ggtctcttggagtaaacgatttttgcaggatag

SEQ ID NO: 565596 - DNA, 33 bp, Homo sapien
ggtctcttggagtaaatgatttttgcaggatag

SEQ ID NO: 565597 - DNA, 33 bp, Homo sapien
gggatctaggttgtacactttttatgagaatct

SEQ ID NO: 565598 - DNA, 33 bp, Homo sapien
gggatctaggttgtacgctttttatgagaatct

SEQ ID NO: 565599 - DNA, 33 bp, Homo sapien
ccccaagaaagtaccactcaactatctggtcag

SEQ ID NO: 565600 - DNA, 33 bp, Homo sapien
ccccaagaaagtaccattcaactatctggtcag

SEQ ID NO: 565601 - DNA, 33 bp, Homo sapien
gcatataaattaatagaatcaagttcatgaatc

SEQ ID NO: 565602 - DNA, 33 bp, Homo sapien
gcatataaattaataggatcaagttcatgaatc

SEQ ID NO: 565603 - DNA, 33 bp, Homo sapien
attggtatttgtggagcctatgtttaatgttgc

SEQ ID NO: 565604 - DNA, 33 bp, Homo sapien
attggtatttgtggagtctatgtttaatgttgc

SEQ ID NO: 565605 - DNA, 33 bp, Homo sapien
tttcttacacgtttgaaaacagagaaatgtcaa

SEQ ID NO: 565606 - DNA, 33 bp, Homo sapien
tttcttacacgtttgagaacagagaaatgtcaa

SEQ ID NO: 565607 - DNA, 33 bp, Homo sapien
gaaatgtgttaattccacttccatacatattct

SEQ ID NO: 565608 - DNA, 33 bp, Homo sapien
gaaatgtgttaattccgcttccatacatattct

SEQ ID NO: 565609 - DNA, 33 bp, Homo sapien
aaagaaaaaaattatgaaagtgtctagagaata

SEQ ID NO: 565610 - DNA, 33 bp, Homo sapien
aaagaaaaaaattatggaagtgtctagagaata

SEQ ID NO: 565611 - DNA, 33 bp, Homo sapien
ttgtaaataggcatcacgctaggctcagggctg

SEQ ID NO: 565612 - DNA, 33 bp, Homo sapien
ttgtaaataggcatcatgctaggctcagggctg

SEQ ID NO: 565613 - DNA, 33 bp, Homo sapien
ccaacactgaccttaacgttgagggaagtactg

SEQ ID NO: 565614 - DNA, 33 bp, Homo sapien
ccaacactgaccttaatgttgagggaagtactg

SEQ ID NO: 565615 - DNA, 33 bp, Homo sapien
acagcagaaatggagaagaaagaatctgatcta

SEQ ID NO: 565616 - DNA, 33 bp, Homo sapien
acagcagaaatggagaggaaagaatctgatcta

SEQ ID NO: 565617 - DNA, 33 bp, Homo sapien
atgatcatcaccaatgaaacatggatagaactt

SEQ ID NO: 565618 - DNA, 33 bp, Homo sapien
atgatcatcaccaatgcaacatggatagaactt

SEQ ID NO: 565619 - DNA, 33 bp, Homo sapien
tccaacactgttatcaccatctagcaaaaataa

SEQ ID NO: 565620 - DNA, 33 bp, Homo sapien
tccaacactgttatcatcatctagcaaaaataa

SEQ ID NO: 565621 - DNA, 33 bp, Homo sapien
cagagggaacagtacaggcaaaggctctgaagt

SEQ ID NO: 565622 - DNA, 33 bp, Homo sapien
cagagggaacagtacatgcaaaggctctgaagt

SEQ ID NO: 565623 - DNA, 33 bp, Homo sapien
tgtgttaatgaagtaacgtaacacaagttaagt

SEQ ID NO: 565624 - DNA, 33 bp, Homo sapien
tgtgttaatgaagtaatgtaacacaagttaagt

SEQ ID NO: 565625 - DNA, 33 bp, Homo sapien
accgagttccttgttacgtatactgtacagagt

SEQ ID NO: 565626 - DNA, 33 bp, Homo sapien
accgagttccttgttatgtatactgtacagagt

SEQ ID NO: 565627 - DNA, 33 bp, Homo sapien
tttgcattcaaagtaacaactgttatccagagg

SEQ ID NO: 565628 - DNA, 33 bp, Homo sapien
tttgcattcaaagtaagaactgttatccagagg

SEQ ID NO: 565629 - DNA, 33 bp, Homo sapien
tcaaaatctgtctgaacgtgcctctgccataca

SEQ ID NO: 565630 - DNA, 33 bp, Homo sapien
tcaaaatctgtctgaaggtgcctctgccataca

SEQ ID NO: 565631 - DNA, 33 bp, Homo sapien
aatactttggtcacaggccttaaatgtctctga

SEQ ID NO: 565632 - DNA, 33 bp, Homo sapien
aatactttggtcacagtccttaaatgtctctga

SEQ ID NO: 565633 - DNA, 33 bp, Homo sapien
taaatcaggttgtatgcaacagtcatttctgaa

SEQ ID NO: 565634 - DNA, 33 bp, Homo sapien
taaatcaggttgtatgtaacagtcatttctgaa

SEQ ID NO: 565635 - DNA, 33 bp, Homo sapien
ctccaaaaaccttatacatcaacaaaaagcata

SEQ ID NO: 565636 - DNA, 33 bp, Homo sapien
ctccaaaaaccttatagatcaacaaaaagcata

SEQ ID NO: 565637 - DNA, 33 bp, Homo sapien
attcattaaagaaaccacacttaactgtaccta

SEQ ID NO: 565638 - DNA, 33 bp, Homo sapien
attcattaaagaaaccgcacttaactgtaccta

SEQ ID NO: 565639 - DNA, 33 bp, Homo sapien
tagttgacatcccgccactgcaatccagcccgg

SEQ ID NO: 565640 - DNA, 33 bp, Homo sapien
tagttgacatcccgcctctgcaatccagcccgg

SEQ ID NO: 565641 - DNA, 33 bp, Homo sapien
cagcaccaatgccatacctactggtgaaggagt

SEQ ID NO: 565642 - DNA, 33 bp, Homo sapien
cagcaccaatgccatatctactggtgaaggagt

SEQ ID NO: 565643 - DNA, 33 bp, Homo sapien
actcctcacagaacaacgctttatttagttttg

SEQ ID NO: 565644 - DNA, 33 bp, Homo sapien
actcctcacagaacaatgctttatttagttttg

SEQ ID NO: 565645 - DNA, 33 bp, Homo sapien
tggtcaagtggtacaacaggcacactgtcagcc

SEQ ID NO: 565646 - DNA, 33 bp, Homo sapien
tggtcaagtggtacaataggcacactgtcagcc

SEQ ID NO: 565647 - DNA, 33 bp, Homo sapien
tggagtatcacctgaacgtggaaatgcagtgga

SEQ ID NO: 565648 - DNA, 33 bp, Homo sapien
tggagtatcacctgaatgtggaaatgcagtgga

SEQ ID NO: 565649 - DNA, 33 bp, Homo sapien
agacccctatccagaaccactagcgtcacttgc

SEQ ID NO: 565650 - DNA, 33 bp, Homo sapien
agacccctatccagaatcactagcgtcacttgc

SEQ ID NO: 565651 - DNA, 33 bp, Homo sapien
ccgaactgagtagttacagagaccacatggcca

SEQ ID NO: 565652 - DNA, 33 bp, Homo sapien
ccgaactgagtagttagagagaccacatggcca

SEQ ID NO: 565653 - DNA, 33 bp, Homo sapien
aatcgaacataaccgcactaagcctgcattctg

SEQ ID NO: 565654 - DNA, 33 bp, Homo sapien
aatcgaacataaccgcgctaagcctgcattctg

SEQ ID NO: 565655 - DNA, 33 bp, Homo sapien
gcctatgatttgaaggcaagttgctccctataa

SEQ ID NO: 565656 - DNA, 33 bp, Homo sapien
gcctatgatttgaaggtaagttgctccctataa

SEQ ID NO: 565657 - DNA, 33 bp, Homo sapien
aaaaagctaaatgatacaccaacaagatccaat

SEQ ID NO: 565658 - DNA, 33 bp, Homo sapien
aaaaagctaaatgatataccaacaagatccaat

SEQ ID NO: 565659 - DNA, 33 bp, Homo sapien
ctgaaaatggataaaaacacttggaagctctgt

SEQ ID NO: 565660 - DNA, 33 bp, Homo sapien
ctgaaaatggataaaagcacttggaagctctgt

SEQ ID NO: 565661 - DNA, 33 bp, Homo sapien
aatggactcttatagacatctcccttgcaccct

SEQ ID NO: 565662 - DNA, 33 bp, Homo sapien
aatggactcttatagatatctcccttgcaccct

SEQ ID NO: 565663 - DNA, 33 bp, Homo sapien
ctggatcattcaaaaagaattcgtagacatcag

SEQ ID NO: 565664 - DNA, 33 bp, Homo sapien
ctggatcattcaaaaataattcgtagacatcag

SEQ ID NO: 565665 - DNA, 33 bp, Homo sapien
agcagttgacagcaagactgcaggtggaagggc

SEQ ID NO: 565666 - DNA, 33 bp, Homo sapien
agcagttgacagcaagcctgcaggtggaagggc

SEQ ID NO: 565667 - DNA, 33 bp, Homo sapien
ggctgcatgaatcacaatgatgtcttctccaga

SEQ ID NO: 565668 - DNA, 33 bp, Homo sapien
ggctgcatgaatcacagtgatgtcttctccaga

SEQ ID NO: 565669 - DNA, 33 bp, Homo sapien
gtggctgtgcttgtccagaacagtaggcatggg

SEQ ID NO: 565670 - DNA, 33 bp, Homo sapien
gtggctgtgcttgtccggaacagtaggcatggg

SEQ ID NO: 565671 - DNA, 33 bp, Homo sapien
atttatgatttaggccaaaattttctgttgcaa

SEQ ID NO: 565672 - DNA, 33 bp, Homo sapien
atttatgatttaggcccaaattttctgttgcaa

SEQ ID NO: 565673 - DNA, 33 bp, Homo sapien
acacctgaggactccaagtatttatgatttagg

SEQ ID NO: 565674 - DNA, 33 bp, Homo sapien
acacctgaggactccatgtatttatgatttagg

SEQ ID NO: 565675 - DNA, 33 bp, Homo sapien
cacataatcaccaaaaacctgtcctcttgggtc

SEQ ID NO: 565676 - DNA, 33 bp, Homo sapien
cacataatcaccaaaagcctgtcctcttgggtc

SEQ ID NO: 565677 - DNA, 33 bp, Homo sapien
taaactgacacctagcaacaggacaattgtttt

SEQ ID NO: 565678 - DNA, 33 bp, Homo sapien
taaactgacacctagcgacaggacaattgtttt

SEQ ID NO: 565679 - DNA, 33 bp, Homo sapien
aaacagatgtgtctaacagagaattatttaatg

SEQ ID NO: 565680 - DNA, 33 bp, Homo sapien
aaacagatgtgtctaatagagaattatttaatg

SEQ ID NO: 565681 - DNA, 33 bp, Homo sapien
cagtatttctgcccccaacaggatgaggccatg

SEQ ID NO: 565682 - DNA, 33 bp, Homo sapien
cagtatttctgcccccgacaggatgaggccatg

SEQ ID NO: 565683 - DNA, 33 bp, Homo sapien
ctgctctttaggaactgaaccagttatgtaact

SEQ ID NO: 565684 - DNA, 33 bp, Homo sapien
ctgctctttaggaacttaaccagttatgtaact

SEQ ID NO: 565685 - DNA, 33 bp, Homo sapien
gaagacaataaaatgaacatcatgtccctggag

SEQ ID NO: 565686 - DNA, 33 bp, Homo sapien
gaagacaataaaatgagcatcatgtccctggag

SEQ ID NO: 565687 - DNA, 33 bp, Homo sapien
aaaaccagtttcccacagcaggtgtctaacagg

SEQ ID NO: 565688 - DNA, 33 bp, Homo sapien
aaaaccagtttcccacggcaggtgtctaacagg

SEQ ID NO: 565689 - DNA, 33 bp, Homo sapien
aggagaacttctcttcaccaatgagacagttcc

SEQ ID NO: 565690 - DNA, 33 bp, Homo sapien
aggagaacttctcttcgccaatgagacagttcc

SEQ ID NO: 565691 - DNA, 33 bp, Homo sapien
aaccacagccagataagtcttttttttttgtca

SEQ ID NO: 565692 - DNA, 33 bp, Homo sapien
aaccacagccagataattcttttttttttgtca

SEQ ID NO: 565693 - DNA, 33 bp, Homo sapien
ctctgtcctcttttccacatggcttccttaggc

SEQ ID NO: 565694 - DNA, 33 bp, Homo sapien
ctctgtcctcttttccgcatggcttccttaggc

SEQ ID NO: 565695 - DNA, 33 bp, Homo sapien
gtcatgatcaaaggagccatgtggtctgagtaa

SEQ ID NO: 565696 - DNA, 33 bp, Homo sapien
gtcatgatcaaaggagtcatgtggtctgagtaa

SEQ ID NO: 565697 - DNA, 33 bp, Homo sapien
aaacacattctgtctaaggtggggtcatcagga

SEQ ID NO: 565698 - DNA, 33 bp, Homo sapien
aaacacattctgtctagggtggggtcatcagga

SEQ ID NO: 565699 - DNA, 33 bp, Homo sapien
tcttgtgtccaaagcaaaacacaagtgtccatg

SEQ ID NO: 565700 - DNA, 33 bp, Homo sapien
tcttgtgtccaaagcagaacacaagtgtccatg

SEQ ID NO: 565701 - DNA, 33 bp, Homo sapien
ccacacatcagttgtccgaaaacagttggcctg

SEQ ID NO: 565702 - DNA, 33 bp, Homo sapien
ccacacatcagttgtctgaaaacagttggcctg

SEQ ID NO: 565703 - DNA, 33 bp, Homo sapien
ttcaacttagatatacactacctccacatatct

SEQ ID NO: 565704 - DNA, 33 bp, Homo sapien
ttcaacttagatatacgctacctccacatatct

SEQ ID NO: 565705 - DNA, 33 bp, Homo sapien
acataagacacaggaaatgcctatggaactctc

SEQ ID NO: 565706 - DNA, 33 bp, Homo sapien
acataagacacaggaagtgcctatggaactctc

SEQ ID NO: 565707 - DNA, 33 bp, Homo sapien
ctactacaatatcaccactgtgttaacagaagt

SEQ ID NO: 565708 - DNA, 33 bp, Homo sapien
ctactacaatatcaccgctgtgttaacagaagt

SEQ ID NO: 565709 - DNA, 33 bp, Homo sapien
cctctttgcattttgacgtgacagctcaccagc

SEQ ID NO: 565710 - DNA, 33 bp, Homo sapien
cctctttgcattttgatgtgacagctcaccagc

SEQ ID NO: 565711 - DNA, 33 bp, Homo sapien
taaatctccaatggaccaaacagaccccctcta

SEQ ID NO: 565712 - DNA, 33 bp, Homo sapien
taaatctccaatggactaaacagaccccctcta

SEQ ID NO: 565713 - DNA, 33 bp, Homo sapien
ggagcatggcaagacgaataaggggcctaatgt

SEQ ID NO: 565714 - DNA, 33 bp, Homo sapien
ggagcatggcaagacgcataaggggcctaatgt

SEQ ID NO: 565715 - DNA, 33 bp, Homo sapien
acttaggcagtgttcacggtaaaggcttcttct

SEQ ID NO: 565716 - DNA, 33 bp, Homo sapien
acttaggcagtgttcatggtaaaggcttcttct

SEQ ID NO: 565717 - DNA, 33 bp, Homo sapien
gtatgtacttgagagaaagagtcatgtgcaaga

SEQ ID NO: 565718 - DNA, 33 bp, Homo sapien
gtatgtacttgagagagagagtcatgtgcaaga

SEQ ID NO: 565719 - DNA, 33 bp, Homo sapien
taatctgctgcaataaatggaagtggtttctac

SEQ ID NO: 565720 - DNA, 33 bp, Homo sapien
taatctgctgcaataagtggaagtggtttctac

SEQ ID NO: 565721 - DNA, 33 bp, Homo sapien
tcacctggtcacttaacggctcaagcaattgat

SEQ ID NO: 565722 - DNA, 33 bp, Homo sapien
tcacctggtcacttaatggctcaagcaattgat

SEQ ID NO: 565723 - DNA, 33 bp, Homo sapien
ataccaagctgacgtacagtcttgtggagaagc

SEQ ID NO: 565724 - DNA, 33 bp, Homo sapien
ataccaagctgacgtatagtcttgtggagaagc

SEQ ID NO: 565725 - DNA, 33 bp, Homo sapien
gaacactgtgtctggaacaagtcatccaggata

SEQ ID NO: 565726 - DNA, 33 bp, Homo sapien
gaacactgtgtctggagcaagtcatccaggata

SEQ ID NO: 565727 - DNA, 33 bp, Homo sapien
caaaagtgcctctttacggtcatggtatcacct

SEQ ID NO: 565728 - DNA, 33 bp, Homo sapien
caaaagtgcctctttatggtcatggtatcacct

SEQ ID NO: 565729 - DNA, 33 bp, Homo sapien
tgagcatgaaaggaaacggaatgtgtggacata

SEQ ID NO: 565730 - DNA, 33 bp, Homo sapien
tgagcatgaaaggaaatggaatgtgtggacata

SEQ ID NO: 565731 - DNA, 33 bp, Homo sapien
gggtgcagggttaaataagaactcacatttctg

SEQ ID NO: 565732 - DNA, 33 bp, Homo sapien
gggtgcagggttaaatgagaactcacatttctg

SEQ ID NO: 565733 - DNA, 33 bp, Homo sapien
gctgagaaagtgactaaatggcctacaagatca

SEQ ID NO: 565734 - DNA, 33 bp, Homo sapien
gctgagaaagtgactatatggcctacaagatca

SEQ ID NO: 565735 - DNA, 33 bp, Homo sapien
gagctaacaccttcccaagcatgcagcacatgt

SEQ ID NO: 565736 - DNA, 33 bp, Homo sapien
gagctaacaccttcccgagcatgcagcacatgt

SEQ ID NO: 565737 - DNA, 33 bp, Homo sapien
tcaggttgctgatactcaggcaggtgctgtgga

SEQ ID NO: 565738 - DNA, 33 bp, Homo sapien
tcaggttgctgatacttaggcaggtgctgtgga

SEQ ID NO: 565739 - DNA, 33 bp, Homo sapien
agttcaatactccctcaccttccttcaagtagg

SEQ ID NO: 565740 - DNA, 33 bp, Homo sapien
agttcaatactccctctccttccttcaagtagg

SEQ ID NO: 565741 - DNA, 33 bp, Homo sapien
atattttgatgtcccccgccttgttatttttgc

SEQ ID NO: 565742 - DNA, 33 bp, Homo sapien
atattttgatgtcccctgccttgttatttttgc

SEQ ID NO: 565743 - DNA, 33 bp, Homo sapien
cttttgtggtattatacatattttcggatattt

SEQ ID NO: 565744 - DNA, 33 bp, Homo sapien
cttttgtggtattatagatattttcggatattt

SEQ ID NO: 565745 - DNA, 33 bp, Homo sapien
caaaaaacacaagaacaatgtagaccaaatact

SEQ ID NO: 565746 - DNA, 33 bp, Homo sapien
caaaaaacacaagaacgatgtagaccaaatact

SEQ ID NO: 565747 - DNA, 33 bp, Homo sapien
actataagcctacaaagaccaaaatagttactc

SEQ ID NO: 565748 - DNA, 33 bp, Homo sapien
actataagcctacaaataccaaaatagttactc

SEQ ID NO: 565749 - DNA, 33 bp, Homo sapien
gaagacacttgttggaatcactgtggataaagc

SEQ ID NO: 565750 - DNA, 33 bp, Homo sapien
gaagacacttgttggagtcactgtggataaagc

SEQ ID NO: 565751 - DNA, 33 bp, Homo sapien
aaatagttcttgaatgaaatgagtggggtggat

SEQ ID NO: 565752 - DNA, 33 bp, Homo sapien
aaatagttcttgaatggaatgagtggggtggat

SEQ ID NO: 565753 - DNA, 33 bp, Homo sapien
tctcacacttaccatcaattcctactcctgaag

SEQ ID NO: 565754 - DNA, 33 bp, Homo sapien
tctcacacttaccatccattcctactcctgaag

SEQ ID NO: 565755 - DNA, 33 bp, Homo sapien
ctaagtccattataatcatgacagagagcagag

SEQ ID NO: 565756 - DNA, 33 bp, Homo sapien
ctaagtccattataatgatgacagagagcagag

SEQ ID NO: 565757 - DNA, 33 bp, Homo sapien
aacatgaagaacaacaaaaagaattattcagtt

SEQ ID NO: 565758 - DNA, 33 bp, Homo sapien
aacatgaagaacaacagaaagaattattcagtt

SEQ ID NO: 565759 - DNA, 33 bp, Homo sapien
tcaccccagttagagtaacaaaaacatgaagaa

SEQ ID NO: 565760 - DNA, 33 bp, Homo sapien
tcaccccagttagagtgacaaaaacatgaagaa

SEQ ID NO: 565761 - DNA, 33 bp, Homo sapien
ggagggaaatactgagactaaagtatgctctat

SEQ ID NO: 565762 - DNA, 33 bp, Homo sapien
ggagggaaatactgaggctaaagtatgctctat

SEQ ID NO: 565763 - DNA, 33 bp, Homo sapien
aataatgataaacgaaataggcttatttgatat

SEQ ID NO: 565764 - DNA, 33 bp, Homo sapien
aataatgataaacgaattaggcttatttgatat

SEQ ID NO: 565765 - DNA, 33 bp, Homo sapien
atatcctatttaatcaagtattcaagccttaat

SEQ ID NO: 565766 - DNA, 33 bp, Homo sapien
atatcctatttaatcaggtattcaagccttaat

SEQ ID NO: 565767 - DNA, 33 bp, Homo sapien
agtgacagaatgtgaccctcagatgtgaccttt

SEQ ID NO: 565768 - DNA, 33 bp, Homo sapien
agtgacagaatgtgactctcagatgtgaccttt

SEQ ID NO: 565769 - DNA, 33 bp, Homo sapien
aaaaacatcacccaaggagtctgtatcctttct

SEQ ID NO: 565770 - DNA, 33 bp, Homo sapien
aaaaacatcacccaagtagtctgtatcctttct

SEQ ID NO: 565771 - DNA, 33 bp, Homo sapien
cttcccctcgtccaccacctcatgttcagcttc

SEQ ID NO: 565772 - DNA, 33 bp, Homo sapien
cttcccctcgtccaccgcctcatgttcagcttc

SEQ ID NO: 565773 - DNA, 33 bp, Homo sapien
ctggtctgccgggtgcgaagaccataggagaag

SEQ ID NO: 565774 - DNA, 33 bp, Homo sapien
ctggtctgccgggtgctaagaccataggagaag

SEQ ID NO: 565775 - DNA, 33 bp, Homo sapien
tgagtgatgtcgagtagcttttcatgtgtgtac

SEQ ID NO: 565776 - DNA, 33 bp, Homo sapien
tgagtgatgtcgagtatcttttcatgtgtgtac

SEQ ID NO: 565777 - DNA, 33 bp, Homo sapien
gatactgggcaaaatcacagctcagtagtgcta

SEQ ID NO: 565778 - DNA, 33 bp, Homo sapien
gatactgggcaaaatcgcagctcagtagtgcta

SEQ ID NO: 565779 - DNA, 33 bp, Homo sapien
tatcaggaacttaagactctggcggttggctgg

SEQ ID NO: 565780 - DNA, 33 bp, Homo sapien
tatcaggaacttaagattctggcggttggctgg

SEQ ID NO: 565781 - DNA, 33 bp, Homo sapien
cccactcagggtgagaaaataaacaagacctgt

SEQ ID NO: 565782 - DNA, 33 bp, Homo sapien
cccactcagggtgagagaataaacaagacctgt

SEQ ID NO: 565783 - DNA, 33 bp, Homo sapien
actcggtgtctatagaaggagcttggactgagc

SEQ ID NO: 565784 - DNA, 33 bp, Homo sapien
actcggtgtctatagagggagcttggactgagc

SEQ ID NO: 565785 - DNA, 33 bp, Homo sapien
atgcatttggctccaagagagatgaagccacat

SEQ ID NO: 565786 - DNA, 33 bp, Homo sapien
atgcatttggctccaatagagatgaagccacat

SEQ ID NO: 565787 - DNA, 33 bp, Homo sapien
ttctagattctgcttgaagcaaaaagtgaaagt

SEQ ID NO: 565788 - DNA, 33 bp, Homo sapien
ttctagattctgcttggagcaaaaagtgaaagt

SEQ ID NO: 565789 - DNA, 33 bp, Homo sapien
cttgttcttactgatcatttataaaaggtgtta

SEQ ID NO: 565790 - DNA, 33 bp, Homo sapien
cttgttcttactgatcgtttataaaaggtgtta

SEQ ID NO: 565791 - DNA, 33 bp, Homo sapien
ggcactagcgtctgcaccttttagtgtcgtgtg

SEQ ID NO: 565792 - DNA, 33 bp, Homo sapien
ggcactagcgtctgcatcttttagtgtcgtgtg

SEQ ID NO: 565793 - DNA, 33 bp, Homo sapien
cctcaaaacaaggaaacgtagagccagtggaag

SEQ ID NO: 565794 - DNA, 33 bp, Homo sapien
cctcaaaacaaggaaatgtagagccagtggaag

SEQ ID NO: 565795 - DNA, 33 bp, Homo sapien
aaccatgaatcttctaaatctgtggataaatag

SEQ ID NO: 565796 - DNA, 33 bp, Homo sapien
aaccatgaatcttctagatctgtggataaatag

SEQ ID NO: 565797 - DNA, 33 bp, Homo sapien
accaaacacatccctacacattaccaaatgtgc

SEQ ID NO: 565798 - DNA, 33 bp, Homo sapien
accaaacacatccctagacattaccaaatgtgc

SEQ ID NO: 565799 - DNA, 33 bp, Homo sapien
ggcttctctgtgccgaccaatttggcaagaacc

SEQ ID NO: 565800 - DNA, 33 bp, Homo sapien
ggcttctctgtgccgagcaatttggcaagaacc

SEQ ID NO: 565801 - DNA, 33 bp, Homo sapien; identical to SEQ ID NO: 565799

SEQ ID NO: 565802 - DNA, 33 bp, Homo sapien; identical to SEQ ID NO: 565800

SEQ ID NO: 565803 - DNA, 33 bp, Homo sapien
ttactttgggtattcacgatcttttcttggttt

SEQ ID NO: 565804 - DNA, 33 bp, Homo sapien
ttactttgggtattcatgatcttttcttggttt

SEQ ID NO: 565805 - DNA, 33 bp, Homo sapien
cccaagagcattccaaccaaatcaacactgaca

SEQ ID NO: 565806 - DNA, 33 bp, Homo sapien
cccaagagcattccaagcaaatcaacactgaca

SEQ ID NO: 565807 - DNA, 33 bp, Homo sapien
agcacttccaagataccgcaggtggaactcagg

SEQ ID NO: 565808 - DNA, 33 bp, Homo sapien
agcacttccaagatactgcaggtggaactcagg

SEQ ID NO: 565809 - DNA, 33 bp, Homo sapien
acctgaatctaatccactgacgaccccaacaga

SEQ ID NO: 565810 - DNA, 33 bp, Homo sapien
acctgaatctaatccattgacgaccccaacaga

SEQ ID NO: 565811 - DNA, 33 bp, Homo sapien
gctgtcccttgtgaggaaacacgtctggtggaa

SEQ ID NO: 565812 - DNA, 33 bp, Homo sapien
gctgtcccttgtgaggcaacacgtctggtggaa

SEQ ID NO: 565813 - DNA, 33 bp, Homo sapien
ggcagaggttgaggaacaagcgccctctgcttc

SEQ ID NO: 565814 - DNA, 33 bp, Homo sapien
ggcagaggttgaggaagaagcgccctctgcttc

SEQ ID NO: 565815 - DNA, 33 bp, Homo sapien
gtccatgctaggctggaaagcatgagccgggac

SEQ ID NO: 565816 - DNA, 33 bp, Homo sapien
gtccatgctaggctgggaagcatgagccgggac

SEQ ID NO: 565817 - DNA, 33 bp, Homo sapien
catttttgaagataaccggcgatttcatagaat

SEQ ID NO: 565818 - DNA, 33 bp, Homo sapien
catttttgaagataactggcgatttcatagaat

SEQ ID NO: 565819 - DNA, 33 bp, Homo sapien
tccatctatctgttagacatcaatttttccata

SEQ ID NO: 565820 - DNA, 33 bp, Homo sapien
tccatctatctgttagtcatcaatttttccata

SEQ ID NO: 565821 - DNA, 33 bp, Homo sapien
cagtgaatgtagaaagcaattcccgcgtgctgc

SEQ ID NO: 565822 - DNA, 33 bp, Homo sapien
cagtgaatgtagaaaggaattcccgcgtgctgc

SEQ ID NO: 565823 - DNA, 33 bp, Homo sapien
agtggcaatcatccaaactcacaataaagaaga

SEQ ID NO: 565824 - DNA, 33 bp, Homo sapien
agtggcaatcatccaacctcacaataaagaaga

SEQ ID NO: 565825 - DNA, 33 bp, Homo sapien
taatgtgaaaggaagaagatatgtaaggaggaa

SEQ ID NO: 565826 - DNA, 33 bp, Homo sapien
taatgtgaaaggaagaggatatgtaaggaggaa

SEQ ID NO: 565827 - DNA, 33 bp, Homo sapien
actaggtgccaaacgacgtttatggttatcaga

SEQ ID NO: 565828 - DNA, 33 bp, Homo sapien
actaggtgccaaacgatgtttatggttatcaga

SEQ ID NO: 565829 - DNA, 33 bp, Homo sapien
gttatagatgccacccaggattatcctatcctc

SEQ ID NO: 565830 - DNA, 33 bp, Homo sapien
gttatagatgccacccgggattatcctatcctc

SEQ ID NO: 565831 - DNA, 33 bp, Homo sapien
agtcttccaagcagtgaacagaggaaaggagcc

SEQ ID NO: 565832 - DNA, 33 bp, Homo sapien
agtcttccaagcagtgcacagaggaaaggagcc

SEQ ID NO: 565833 - DNA, 33 bp, Homo sapien
gacatcacatcatcagcaccaacatccagaggc

SEQ ID NO: 565834 - DNA, 33 bp, Homo sapien
gacatcacatcatcagtaccaacatccagaggc

SEQ ID NO: 565835 - DNA, 33 bp, Homo sapien; identical to SEQ ID NO: 565833

SEQ ID NO: 565836 - DNA, 33 bp, Homo sapien; identical to SEQ ID NO: 565834

SEQ ID NO: 565837 - DNA, 33 bp, Homo sapien
catgaacagagaggtaagaatgagagaatccca

SEQ ID NO: 565838 - DNA, 33 bp, Homo sapien
catgaacagagaggtacgaatgagagaatccca

SEQ ID NO: 565839 - DNA, 33 bp, Homo sapien; identical to SEQ ID NO: 565837

SEQ ID NO: 565840 - DNA, 33 bp, Homo sapien; identical to SEQ ID NO: 565838

SEQ ID NO: 565841 - DNA, 33 bp, Homo sapien
gttttgtacaataaaaaatgtgtgatattttca

SEQ ID NO: 565842 - DNA, 33 bp, Homo sapien
gttttgtacaataaaagatgtgtgatattttca

SEQ ID NO: 565843 - DNA, 33 bp, Homo sapien; identical to SEQ ID NO: 565841

SEQ ID NO: 565844 - DNA, 33 bp, Homo sapien; identical to SEQ ID NO: 565842

SEQ ID NO: 565845 - DNA, 33 bp, Homo sapien
aaagagagagggactaacagtgtcggctgcagt

SEQ ID NO: 565846 - DNA, 33 bp, Homo sapien
aaagagagagggactatcagtgtcggctgcagt

SEQ ID NO: 565847 - DNA, 33 bp, Homo sapien
tatggagagtatccaacgggaactaagtgggaa

SEQ ID NO: 565848 - DNA, 33 bp, Homo sapien
tatggagagtatccaatgggaactaagtgggaa

SEQ ID NO: 565849 - DNA, 33 bp, Homo sapien
ctgtgccatctactggccatcgctctgatcaat

SEQ ID NO: 565850 - DNA, 33 bp, Homo sapien
ctgtgccatctactggtcatcgctctgatcaat

SEQ ID NO: 565851 - DNA, 33 bp, Homo sapien
attactgtgttactccagatgaagaatttaccc

SEQ ID NO: 565852 - DNA, 33 bp, Homo sapien
attactgtgttactccggatgaagaatttaccc

SEQ ID NO: 565853 - DNA, 33 bp, Homo sapien
gtaaggcaggtgctaccggcatttagggagaga

SEQ ID NO: 565854 - DNA, 33 bp, Homo sapien
gtaaggcaggtgctactggcatttagggagaga

SEQ ID NO: 565855 - DNA, 33 bp, Homo sapien
acacaaaaaaacttacccacgtgtagatagcta

SEQ ID NO: 565856 - DNA, 33 bp, Homo sapien
acacaaaaaaacttacgcacgtgtagatagcta

SEQ ID NO: 565857 - DNA, 33 bp, Homo sapien
gcaaggagtttttctacatttttccatgaacat

SEQ ID NO: 565858 - DNA, 33 bp, Homo sapien
gcaaggagtttttctagatttttccatgaacat

SEQ ID NO: 565859 - DNA, 33 bp, Homo sapien
tcataatggaaaaccacgtggcattgccccaaa

SEQ ID NO: 565860 - DNA, 33 bp, Homo sapien
tcataatggaaaaccatgtggcattgccccaaa

SEQ ID NO: 565861 - DNA, 33 bp, Homo sapien; identical to SEQ ID NO: 565859

SEQ ID NO: 565862 - DNA, 33 bp, Homo sapien; identical to SEQ ID NO: 565860

SEQ ID NO: 565863 - DNA, 33 bp, Homo sapien
tcagtggcatacttaagtaaggaagttgatgtg

SEQ ID NO: 565864 - DNA, 33 bp, Homo sapien
tcagtggcatacttaattaaggaagttgatgtg

SEQ ID NO: 565865 - DNA, 33 bp, Homo sapien
cccattctccacagataaacttccatcagtata

SEQ ID NO: 565866 - DNA, 33 bp, Homo sapien
cccattctccacagatgaacttccatcagtata

SEQ ID NO: 565867 - DNA, 33 bp, Homo sapien
gagttgttccttcagacgttcatatatgtctgg

SEQ ID NO: 565868 - DNA, 33 bp, Homo sapien
gagttgttccttcagatgttcatatatgtctgg

SEQ ID NO: 565869 - DNA, 33 bp, Homo sapien
ctaaaagactaaaaccactgaagttagaaactc

SEQ ID NO: 565870 - DNA, 33 bp, Homo sapien
ctaaaagactaaaaccgctgaagttagaaactc

SEQ ID NO: 565871 - DNA, 33 bp, Homo sapien
taaatagatagcgatcaatgtgtggttctttcc

SEQ ID NO: 565872 - DNA, 33 bp, Homo sapien
taaatagatagcgatcgatgtgtggttctttcc

SEQ ID NO: 565873 - DNA, 33 bp, Homo sapien
ggatcgggcaacaaacaaggctgggactcagga

SEQ ID NO: 565874 - DNA, 33 bp, Homo sapien
ggatcgggcaacaaaccaggctgggactcagga

SEQ ID NO: 565875 - DNA, 33 bp, Homo sapien
gtttaccgctgggtgacggagggaaggtcttca

SEQ ID NO: 565876 - DNA, 33 bp, Homo sapien
gtttaccgctgggtgatggagggaaggtcttca

SEQ ID NO: 565877 - DNA, 33 bp, Homo sapien
tgagactagagaatgacgacggcctttatcaag

SEQ ID NO: 565878 - DNA, 33 bp, Homo sapien
tgagactagagaatgaggacggcctttatcaag

SEQ ID NO: 565879 - DNA, 33 bp, Homo sapien; identical to SEQ ID NO: 565877

SEQ ID NO: 565880 - DNA, 33 bp, Homo sapien; identical to SEQ ID NO: 565878

SEQ ID NO: 565881 - DNA, 33 bp, Homo sapien
ctcctcaaacatggtgaacacgtggatgcttct

SEQ ID NO: 565882 - DNA, 33 bp, Homo sapien
ctcctcaaacatggtggacacgtggatgcttct

SEQ ID NO: 565883 - DNA, 33 bp, Homo sapien
cttggctataaatccgcacttcaccttgtattt

SEQ ID NO: 565884 - DNA, 33 bp, Homo sapien
cttggctataaatccggacttcaccttgtattt

SEQ ID NO: 565885 - DNA, 33 bp, Homo sapien
ctattgtttcactaaacactattcctgtaaatt

SEQ ID NO: 565886 - DNA, 33 bp, Homo sapien
ctattgtttcactaaatactattcctgtaaatt

SEQ ID NO: 565887 - DNA, 33 bp, Homo sapien
gggaggatcccagttcaccctgtcaaacagcac

SEQ ID NO: 565888 - DNA, 33 bp, Homo sapien
gggaggatcccagttccccctgtcaaacagcac

SEQ ID NO: 565889 - DNA, 33 bp, Homo sapien
tcttttcctgaatgaaatctttactgcccccat

SEQ ID NO: 565890 - DNA, 33 bp, Homo sapien
tcttttcctgaatgaactctttactgcccccat

SEQ ID NO: 565891 - DNA, 33 bp, Homo sapien
aacttttgctaacaagcctgacttttttcagtc

SEQ ID NO: 565892 - DNA, 33 bp, Homo sapien
aacttttgctaacaaggctgacttttttcagtc

SEQ ID NO: 565893 - DNA, 33 bp, Homo sapien
ggaagttttccttacactggaatgaacaccatt

SEQ ID NO: 565894 - DNA, 33 bp, Homo sapien
ggaagttttccttacagtggaatgaacaccatt

SEQ ID NO: 565895 - DNA, 33 bp, Homo sapien
tgtggtattttcactgcagtcagttaagaacat

SEQ ID NO: 565896 - DNA, 33 bp, Homo sapien
tgtggtattttcactgtagtcagttaagaacat

SEQ ID NO: 565897 - DNA, 33 bp, Homo sapien
ttagggtatggaggataagaaagcgataatcaa

SEQ ID NO: 565898 - DNA, 33 bp, Homo sapien
ttagggtatggaggatgagaaagcgataatcaa

SEQ ID NO: 565899 - DNA, 33 bp, Homo sapien
ggaagtgaaagagtatgaggtagagacagatgg

SEQ ID NO: 565900 - DNA, 33 bp, Homo sapien
ggaagtgaaagagtattaggtagagacagatgg

SEQ ID NO: 565901 - DNA, 33 bp, Homo sapien
gccttgaatgaggtagaatttacatacaataag

SEQ ID NO: 565902 - DNA, 33 bp, Homo sapien
gccttgaatgaggtagcatttacatacaataag

SEQ ID NO: 565903 - DNA, 33 bp, Homo sapien
tgtcttactaaccaataattacataacataatg

SEQ ID NO: 565904 - DNA, 33 bp, Homo sapien
tgtcttactaaccaatgattacataacataatg

SEQ ID NO: 565905 - DNA, 33 bp, Homo sapien
aaattattaccattaccgcacattgtaacttaa

SEQ ID NO: 565906 - DNA, 33 bp, Homo sapien
aaattattaccattactgcacattgtaacttaa

SEQ ID NO: 565907 - DNA, 33 bp, Homo sapien
agttactaggaaggaccgggacacactaccact

SEQ ID NO: 565908 - DNA, 33 bp, Homo sapien
agttactaggaaggactgggacacactaccact

SEQ ID NO: 565909 - DNA, 33 bp, Homo sapien
atgagatccaggccacaaggttcatcttcctcc

SEQ ID NO: 565910 - DNA, 33 bp, Homo sapien
atgagatccaggccacgaggttcatcttcctcc

SEQ ID NO: 565911 - DNA, 33 bp, Homo sapien; identical to SEQ ID NO: 565909

SEQ ID NO: 565912 - DNA, 33 bp, Homo sapien; identical to SEQ ID NO: 565910

SEQ ID NO: 565913 - DNA, 33 bp, Homo sapien
ggatgtgttgtgcagaaggtaagctgaaataca

SEQ ID NO: 565914 - DNA, 33 bp, Homo sapien
ggatgtgttgtgcagagggtaagctgaaataca

SEQ ID NO: 565915 - DNA, 33 bp, Homo sapien
aaagtgcaagtggttaaatcaagttggccaaga

SEQ ID NO: 565916 - DNA, 33 bp, Homo sapien
aaagtgcaagtggttagatcaagttggccaaga

SEQ ID NO: 565917 - DNA, 33 bp, Homo sapien
tacaaaggtggattaccatgaaggaaacctgct

SEQ ID NO: 565918 - DNA, 33 bp, Homo sapien
tacaaaggtggattactatgaaggaaacctgct

SEQ ID NO: 565919 - DNA, 33 bp, Homo sapien
gagactttctcagtggcaatgagataatgtcat

SEQ ID NO: 565920 - DNA, 33 bp, Homo sapien
gagactttctcagtgggaatgagataatgtcat

SEQ ID NO: 565921 - DNA, 33 bp, Homo sapien
ccacctggaagcaatacagaaccaggggatccc

SEQ ID NO: 565922 - DNA, 33 bp, Homo sapien
ccacctggaagcaatagagaaccaggggatccc

SEQ ID NO: 565923 - DNA, 33 bp, Homo sapien
ttctgtttctgcccataagagccatgcacacta

SEQ ID NO: 565924 - DNA, 33 bp, Homo sapien
ttctgtttctgcccatgagagccatgcacacta

SEQ ID NO: 565925 - DNA, 33 bp, Homo sapien
gagcaagggtatatccagagacattcagtgcct

SEQ ID NO: 565926 - DNA, 33 bp, Homo sapien
gagcaagggtatatccggagacattcagtgcct

SEQ ID NO: 565927 - DNA, 33 bp, Homo sapien
aaatgctatggctgaaagtcctattggcatggt

SEQ ID NO: 565928 - DNA, 33 bp, Homo sapien
aaatgctatggctgaatgtcctattggcatggt

SEQ ID NO: 565929 - DNA, 33 bp, Homo sapien
agagatcttttttcacacaagcaaccaccacct

SEQ ID NO: 565930 - DNA, 33 bp, Homo sapien
agagatcttttttcacgcaagcaaccaccacct

SEQ ID NO: 565931 - DNA, 33 bp, Homo sapien
gtaagtctgggcctcaacctttcggtggagggt

SEQ ID NO: 565932 - DNA, 33 bp, Homo sapien
gtaagtctgggcctcaccctttcggtggagggt

SEQ ID NO: 565933 - DNA, 33 bp, Homo sapien
ccatcgcggtggagagcaaatggaagcagatgc

SEQ ID NO: 565934 - DNA, 33 bp, Homo sapien
ccatcgcggtggagaggaaatggaagcagatgc

SEQ ID NO: 565935 - DNA, 33 bp, Homo sapien
tgtgcaggacgggctacatcttagtggattttt

SEQ ID NO: 565936 - DNA, 33 bp, Homo sapien
tgtgcaggacgggctatatcttagtggattttt

SEQ ID NO: 565937 - DNA, 33 bp, Homo sapien
gtgcaccaccacatcacgctactgagtcatttt

SEQ ID NO: 565938 - DNA, 33 bp, Homo sapien
gtgcaccaccacatcatgctactgagtcatttt

SEQ ID NO: 565939 - DNA, 33 bp, Homo sapien
caaggtaatagggaccaagagagaaacaatgga

SEQ ID NO: 565940 - DNA, 33 bp, Homo sapien
caaggtaatagggacccagagagaaacaatgga

SEQ ID NO: 565941 - DNA, 33 bp, Homo sapien
ttgagatgactcaagacaattgcaatagggtca

SEQ ID NO: 565942 - DNA, 33 bp, Homo sapien
ttgagatgactcaagataattgcaatagggtca

SEQ ID NO: 565943 - DNA, 33 bp, Homo sapien
tctatgggcaaaatgaaggtcaatggacataca

SEQ ID NO: 565944 - DNA, 33 bp, Homo sapien
tctatgggcaaaatgatggtcaatggacataca

SEQ ID NO: 565945 - DNA, 33 bp, Homo sapien
ttgagatgaggtgtccagaggaaggcactgaag

SEQ ID NO: 565946 - DNA, 33 bp, Homo sapien
ttgagatgaggtgtccggaggaaggcactgaag

SEQ ID NO: 565947 - DNA, 33 bp, Homo sapien
ccacactttcattgtcacctgccttgtgaaggt

SEQ ID NO: 565948 - DNA, 33 bp, Homo sapien
ccacactttcattgtctcctgccttgtgaaggt

SEQ ID NO: 565949 - DNA, 33 bp, Homo sapien
gtcagttctgggtggaagccgtggtccagagtg

SEQ ID NO: 565950 - DNA, 33 bp, Homo sapien
gtcagttctgggtggaggccgtggtccagagtg

SEQ ID NO: 565951 - DNA, 33 bp, Homo sapien
tttctacacaccaataacaatgtagctgagaac

SEQ ID NO: 565952 - DNA, 33 bp, Homo sapien
tttctacacaccaatagcaatgtagctgagaac

SEQ ID NO: 565953 - DNA, 33 bp, Homo sapien
agacaagtagaaatcaaaggagagaatatggca

SEQ ID NO: 565954 - DNA, 33 bp, Homo sapien
agacaagtagaaatcagaggagagaatatggca

SEQ ID NO: 565955 - DNA, 33 bp, Homo sapien
atgtcattgattggaactggcaaccaatgacat

SEQ ID NO: 565956 - DNA, 33 bp, Homo sapien
atgtcattgattggaagtggcaaccaatgacat

SEQ ID NO: 565957 - DNA, 33 bp, Homo sapien
ttctgcatctgttgaacgtaagggggaggtagc

SEQ ID NO: 565958 - DNA, 33 bp, Homo sapien
ttctgcatctgttgaatgtaagggggaggtagc

SEQ ID NO: 565959 - DNA, 33 bp, Homo sapien
gaagctgagctgggacacatttaacctggggtg

SEQ ID NO: 565960 - DNA, 33 bp, Homo sapien
gaagctgagctgggacgcatttaacctggggtg

SEQ ID NO: 565961 - DNA, 33 bp, Homo sapien
attctgacttccccccaattctacagaacaaga

SEQ ID NO: 565962 - DNA, 33 bp, Homo sapien
attctgacttccccccgattctacagaacaaga

SEQ ID NO: 565963 - DNA, 33 bp, Homo sapien
tgtgttctgaagccacaaggtctttggagttgt

SEQ ID NO: 565964 - DNA, 33 bp, Homo sapien
tgtgttctgaagccacgaggtctttggagttgt

SEQ ID NO: 565965 - DNA, 33 bp, Homo sapien
tctgacacttaaataacggaaagttttgaatac

SEQ ID NO: 565966 - DNA, 33 bp, Homo sapien
tctgacacttaaataatggaaagttttgaatac

SEQ ID NO: 565967 - DNA, 33 bp, Homo sapien
ggttctgtatccatcacctcgtctactcttact

SEQ ID NO: 565968 - DNA, 33 bp, Homo sapien
ggttctgtatccatcatctcgtctactcttact

SEQ ID NO: 565969 - DNA, 33 bp, Homo sapien
gtgatgttgtcctggcaagtctctctattaact

SEQ ID NO: 565970 - DNA, 33 bp, Homo sapien
gtgatgttgtcctggcgagtctctctattaact

SEQ ID NO: 565971 - DNA, 33 bp, Homo sapien
taactagttgttgtgacggctgcaattactctt

SEQ ID NO: 565972 - DNA, 33 bp, Homo sapien
taactagttgttgtgatggctgcaattactctt

SEQ ID NO: 565973 - DNA, 33 bp, Homo sapien
ttcccacagtgtaggaaaaccaagaattttagt

SEQ ID NO: 565974 - DNA, 33 bp, Homo sapien
ttcccacagtgtaggacaaccaagaattttagt

SEQ ID NO: 565975 - DNA, 33 bp, Homo sapien
aggacttagggcagcacctgacacagaacagaa

SEQ ID NO: 565976 - DNA, 33 bp, Homo sapien
aggacttagggcagcatctgacacagaacagaa

SEQ ID NO: 565977 - DNA, 33 bp, Homo sapien
ctgcccctacgttagcaatgttaaccttcatcc

SEQ ID NO: 565978 - DNA, 33 bp, Homo sapien
ctgcccctacgttagcgatgttaaccttcatcc

SEQ ID NO: 565979 - DNA, 33 bp, Homo sapien
cacccaactgtgggcacaggttctagaatggac

SEQ ID NO: 565980 - DNA, 33 bp, Homo sapien
cacccaactgtgggcataggttctagaatggac

SEQ ID NO: 565981 - DNA, 33 bp, Homo sapien
cattcttgctctcccaatccctgtgtgtactta

SEQ ID NO: 565982 - DNA, 33 bp, Homo sapien
cattcttgctctcccagtccctgtgtgtactta

SEQ ID NO: 565983 - DNA, 33 bp, Homo sapien
cacgggagtcgggatccgagcaagcagcgctca

SEQ ID NO: 565984 - DNA, 33 bp, Homo sapien
cacgggagtcgggatctgagcaagcagcgctca

SEQ ID NO: 565985 - DNA, 33 bp, Homo sapien
ccatcctctgaactgaaaatgtcaaggcatgag

SEQ ID NO: 565986 - DNA, 33 bp, Homo sapien
ccatcctctgaactgagaatgtcaaggcatgag

SEQ ID NO: 565987 - DNA, 33 bp, Homo sapien
tggagcagaaagctgcagaaagatgaacggaga

SEQ ID NO: 565988 - DNA, 33 bp, Homo sapien
tggagcagaaagctgcggaaagatgaacggaga

SEQ ID NO: 565989 - DNA, 33 bp, Homo sapien
gaagctgcacacaatccaacccaacatcaattt

SEQ ID NO: 565990 - DNA, 33 bp, Homo sapien
gaagctgcacacaatctaacccaacatcaattt

SEQ ID NO: 565991 - DNA, 33 bp, Homo sapien
atgccaagccttttgcgctgtcagggtgcagat

SEQ ID NO: 565992 - DNA, 33 bp, Homo sapien
atgccaagccttttgctctgtcagggtgcagat

SEQ ID NO: 565993 - DNA, 33 bp, Homo sapien
gagatcaacagaggccaagagagttttccctta

SEQ ID NO: 565994 - DNA, 33 bp, Homo sapien
gagatcaacagaggccgagagagttttccctta

SEQ ID NO: 565995 - DNA, 33 bp, Homo sapien
tcacattcccctgttacgagctgagccctggag

SEQ ID NO: 565996 - DNA, 33 bp, Homo sapien
tcacattcccctgttatgagctgagccctggag

SEQ ID NO: 565997 - DNA, 33 bp, Homo sapien
aatatcagaaccaacaagttggaattgaaatgg

SEQ ID NO: 565998 - DNA, 33 bp, Homo sapien
aatatcagaaccaacaggttggaattgaaatgg

SEQ ID NO: 565999 - DNA, 33 bp, Homo sapien
taaccccagctaacgcactggaaatttgctttt

SEQ ID NO: 566000 - DNA, 33 bp, Homo sapien
taaccccagctaacgccctggaaatttgctttt

SEQ ID NO: 566001 - DNA, 33 bp, Homo sapien
aagtctctgttttcacacgtcggatttgggctt

SEQ ID NO: 566002 - DNA, 33 bp, Homo sapien
aagtctctgttttcacgcgtcggatttgggctt

SEQ ID NO: 566003 - DNA, 33 bp, Homo sapien
atttaaatgcatgttcaaatgtgggcagccttc

SEQ ID NO: 566004 - DNA, 33 bp, Homo sapien
atttaaatgcatgttcgaatgtgggcagccttc

SEQ ID NO: 566005 - DNA, 33 bp, Homo sapien
catgttcaaacacaaacagaaggctcacaagga

SEQ ID NO: 566006 - DNA, 33 bp, Homo sapien
catgttcaaacacaaagagaaggctcacaagga

SEQ ID NO: 566007 - DNA, 33 bp, Homo sapien
aaaatccaacctctggccatgttttcttctact

SEQ ID NO: 566008 - DNA, 33 bp, Homo sapien
aaaatccaacctctggtcatgttttcttctact

SEQ ID NO: 566009 - DNA, 33 bp, Homo sapien
atgccctggtgatagccactgccatggagaaag

SEQ ID NO: 566010 - DNA, 33 bp, Homo sapien
atgccctggtgatagcgactgccatggagaaag

SEQ ID NO: 566011 - DNA, 33 bp, Homo sapien
gcaccatctccctcaccggcaccctatcaagag

SEQ ID NO: 566012 - DNA, 33 bp, Homo sapien
gcaccatctccctcactggcaccctatcaagag

SEQ ID NO: 566013 - DNA, 33 bp, Homo sapien
tgactttgtccagatcaagagacctgtgatgga

SEQ ID NO: 566014 - DNA, 33 bp, Homo sapien
tgactttgtccagatcgagagacctgtgatgga

SEQ ID NO: 566015 - DNA, 33 bp, Homo sapien
gtcatcccacacaaagcacttgattccagagat

SEQ ID NO: 566016 - DNA, 33 bp, Homo sapien
gtcatcccacacaaagtacttgattccagagat

SEQ ID NO: 566017 - DNA, 33 bp, Homo sapien
aaggaccacagatttaaattcatgacaaactaa

SEQ ID NO: 566018 - DNA, 33 bp, Homo sapien
aaggaccacagatttagattcatgacaaactaa

SEQ ID NO: 566019 - DNA, 33 bp, Homo sapien
gcattttctgttatgacagctattggttatttt

SEQ ID NO: 566020 - DNA, 33 bp, Homo sapien
gcattttctgttatgatagctattggttatttt

SEQ ID NO: 566021 - DNA, 33 bp, Homo sapien
tcatggtccttagaacacaagctggaggctgca

SEQ ID NO: 566022 - DNA, 33 bp, Homo sapien
tcatggtccttagaacccaagctggaggctgca

SEQ ID NO: 566023 - DNA, 33 bp, Homo sapien
ctcagggcagatatgaataatccacgacagcac

SEQ ID NO: 566024 - DNA, 33 bp, Homo sapien
ctcagggcagatatgactaatccacgacagcac

SEQ ID NO: 566025 - DNA, 33 bp, Homo sapien
cttcattaccatatgccgaaactttgatgtgaa

SEQ ID NO: 566026 - DNA, 33 bp, Homo sapien
cttcattaccatatgctgaaactttgatgtgaa

SEQ ID NO: 566027 - DNA, 33 bp, Homo sapien
ctataaccaccatgatcaagacacggaacattt

SEQ ID NO: 566028 - DNA, 33 bp, Homo sapien
ctataaccaccatgatgaagacacggaacattt

SEQ ID NO: 566029 - DNA, 33 bp, Homo sapien
cactatttattaggcaccttggctgttaaaatg

SEQ ID NO: 566030 - DNA, 33 bp, Homo sapien
cactatttattaggcatcttggctgttaaaatg

SEQ ID NO: 566031 - DNA, 33 bp, Homo sapien
atcaaaagtgtggaaagacaaatcttttttacg

SEQ ID NO: 566032 - DNA, 33 bp, Homo sapien
atcaaaagtgtggaaatacaaatcttttttacg

SEQ ID NO: 566033 - DNA, 33 bp, Homo sapien
ttctgcaccatcctataaggtatgcagacacag

SEQ ID NO: 566034 - DNA, 33 bp, Homo sapien
ttctgcaccatcctatgaggtatgcagacacag

SEQ ID NO: 566035 - DNA, 33 bp, Homo sapien
ccagacctactaaatcagaagtactaggcattc

SEQ ID NO: 566036 - DNA, 33 bp, Homo sapien
ccagacctactaaatcggaagtactaggcattc

SEQ ID NO: 566037 - DNA, 33 bp, Homo sapien
gcatccaagacctcaaagtcagtgtagaagaag

SEQ ID NO: 566038 - DNA, 33 bp, Homo sapien
gcatccaagacctcaacgtcagtgtagaagaag

SEQ ID NO: 566039 - DNA, 33 bp, Homo sapien
caggcatggcatgacccaaaactcctgctgagg

SEQ ID NO: 566040 - DNA, 33 bp, Homo sapien
caggcatggcatgacctaaaactcctgctgagg

SEQ ID NO: 566041 - DNA, 33 bp, Homo sapien
cattaacttgtaccaaattataagtctgactct

SEQ ID NO: 566042 - DNA, 33 bp, Homo sapien
cattaacttgtaccaatttataagtctgactct

SEQ ID NO: 566043 - DNA, 33 bp, Homo sapien
gcaggatgaatcagaggagactccaagatcact

SEQ ID NO: 566044 - DNA, 33 bp, Homo sapien
gcaggatgaatcagagtagactccaagatcact

SEQ ID NO: 566045 - DNA, 33 bp, Homo sapien
tgccctgatactctcacagtaagggggtgtact

SEQ ID NO: 566046 - DNA, 33 bp, Homo sapien
tgccctgatactctcatagtaagggggtgtact

SEQ ID NO: 566047 - DNA, 33 bp, Homo sapien
tctctaatactacgtaagagtggcttccaggtc

SEQ ID NO: 566048 - DNA, 33 bp, Homo sapien
tctctaatactacgtaggagtggcttccaggtc

SEQ ID NO: 566049 - DNA, 33 bp, Homo sapien
tgttcagtagttagaacaggcaaagaacaactt

SEQ ID NO: 566050 - DNA, 33 bp, Homo sapien
tgttcagtagttagaataggcaaagaacaactt

SEQ ID NO: 566051 - DNA, 33 bp, Homo sapien
agactatctgaagaaacagattaactgagtagt

SEQ ID NO: 566052 - DNA, 33 bp, Homo sapien
agactatctgaagaaatagattaactgagtagt

SEQ ID NO: 566053 - DNA, 33 bp, Homo sapien
aaataggtcaaacgaaacatatatatatatata

SEQ ID NO: 566054 - DNA, 33 bp, Homo sapien
aaataggtcaaacgaagcatatatatatatata

SEQ ID NO: 566055 - DNA, 33 bp, Homo sapien
ggcagcctaattcaaaccgtgggtgaagatgga

SEQ ID NO: 566056 - DNA, 33 bp, Homo sapien
ggcagcctaattcaaatcgtgggtgaagatgga

SEQ ID NO: 566057 - DNA, 33 bp, Homo sapien
ctcacaaaaggttggaactgaacaaaatctgat

SEQ ID NO: 566058 - DNA, 33 bp, Homo sapien
ctcacaaaaggttggatctgaacaaaatctgat

SEQ ID NO: 566059 - DNA, 33 bp, Homo sapien
agcttctggagatcacagcttggacaaggagct

SEQ ID NO: 566060 - DNA, 33 bp, Homo sapien
agcttctggagatcacggcttggacaaggagct

SEQ ID NO: 566061 - DNA, 33 bp, Homo sapien
gtgcagacttacagtacgtatgcggtggcttgt

SEQ ID NO: 566062 - DNA, 33 bp, Homo sapien
gtgcagacttacagtatgtatgcggtggcttgt

SEQ ID NO: 566063 - DNA, 33 bp, Homo sapien
gagaagttgggttacacggcctgaaagcagcag

SEQ ID NO: 566064 - DNA, 33 bp, Homo sapien
gagaagttgggttacatggcctgaaagcagcag

SEQ ID NO: 566065 - DNA, 33 bp, Homo sapien
gagcctcacttaagaagttaacaaggcccaggg

SEQ ID NO: 566066 - DNA, 33 bp, Homo sapien
gagcctcacttaagaatttaacaaggcccaggg

SEQ ID NO: 566067 - DNA, 33 bp, Homo sapien
ggccagggctgttcccacagaaagaagggtgct

SEQ ID NO: 566068 - DNA, 33 bp, Homo sapien
ggccagggctgttcccgcagaaagaagggtgct

SEQ ID NO: 566069 - DNA, 33 bp, Homo sapien
tgatcatggagtcttgaagttagacaggaaatt

SEQ ID NO: 566070 - DNA, 33 bp, Homo sapien
tgatcatggagtcttggagttagacaggaaatt

SEQ ID NO: 566071 - DNA, 33 bp, Homo sapien
ccagtccatggatgaggactgcatattgacaag

SEQ ID NO: 566072 - DNA, 33 bp, Homo sapien
ccagtccatggatgagtactgcatattgacaag

SEQ ID NO: 566073 - DNA, 33 bp, Homo sapien
gtgttgggacagctcactgaatctcaggcacca

SEQ ID NO: 566074 - DNA, 33 bp, Homo sapien
gtgttgggacagctcattgaatctcaggcacca

SEQ ID NO: 566075 - DNA, 33 bp, Homo sapien
cagaagtttcaaaggaactaactctgctgacag

SEQ ID NO: 566076 - DNA, 33 bp, Homo sapien
cagaagtttcaaaggagctaactctgctgacag

SEQ ID NO: 566077 - DNA, 33 bp, Homo sapien
agcagagaactggtgacgttgctagcagagatt

SEQ ID NO: 566078 - DNA, 33 bp, Homo sapien
agcagagaactggtgatgttgctagcagagatt

SEQ ID NO: 566079 - DNA, 33 bp, Homo sapien
caacatcctactctcacgccattaaaccccaag

SEQ ID NO: 566080 - DNA, 33 bp, Homo sapien
caacatcctactctcatgccattaaaccccaag

SEQ ID NO: 566081 - DNA, 33 bp, Homo sapien
gtcccaagtgtaaagaatatatctgtatttgta

SEQ ID NO: 566082 - DNA, 33 bp, Homo sapien
gtcccaagtgtaaagagtatatctgtatttgta

SEQ ID NO: 566083 - DNA, 33 bp, Homo sapien
gtaagtgaaaaatgaacaaggccacagaacagg

SEQ ID NO: 566084 - DNA, 33 bp, Homo sapien
gtaagtgaaaaatgaagaaggccacagaacagg

SEQ ID NO: 566085 - DNA, 33 bp, Homo sapien
agacctctttttggatcagactgattcatgcag

SEQ ID NO: 566086 - DNA, 33 bp, Homo sapien
agacctctttttggattagactgattcatgcag

SEQ ID NO: 566087 - DNA, 33 bp, Homo sapien
tgaaagcagaacttgacggataagcagaggacc

SEQ ID NO: 566088 - DNA, 33 bp, Homo sapien
tgaaagcagaacttgatggataagcagaggacc

SEQ ID NO: 566089 - DNA, 33 bp, Homo sapien
tgtaatggattgtgacaggcatggcagaggatt

SEQ ID NO: 566090 - DNA, 33 bp, Homo sapien
tgtaatggattgtgacgggcatggcagaggatt

SEQ ID NO: 566091 - DNA, 33 bp, Homo sapien
gatggaaaaggttagaagcttcaggctgagaag

SEQ ID NO: 566092 - DNA, 33 bp, Homo sapien
gatggaaaaggttagaggcttcaggctgagaag

SEQ ID NO: 566093 - DNA, 33 bp, Homo sapien
caaaaatgtggagtaacggcattcttatgcagt

SEQ ID NO: 566094 - DNA, 33 bp, Homo sapien
caaaaatgtggagtaatggcattcttatgcagt

SEQ ID NO: 566095 - DNA, 33 bp, Homo sapien
tctctctagccaaagaactagaaaaggaacaac

SEQ ID NO: 566096 - DNA, 33 bp, Homo sapien
tctctctagccaaagatctagaaaaggaacaac

SEQ ID NO: 566097 - DNA, 33 bp, Homo sapien
agcctttctgaggtccccattcactctgccact

SEQ ID NO: 566098 - DNA, 33 bp, Homo sapien
agcctttctgaggtccgcattcactctgccact

SEQ ID NO: 566099 - DNA, 33 bp, Homo sapien
cagtattgactgacaacattagcagagcctggc

SEQ ID NO: 566100 - DNA, 33 bp, Homo sapien
cagtattgactgacaatattagcagagcctggc

SEQ ID NO: 566101 - DNA, 33 bp, Homo sapien
tgggcataggctccgcaaggtaacataagggat

SEQ ID NO: 566102 - DNA, 33 bp, Homo sapien
tgggcataggctccgcgaggtaacataagggat

SEQ ID NO: 566103 - DNA, 33 bp, Homo sapien
ttaatgtaatttagccaggatactctaactcta

SEQ ID NO: 566104 - DNA, 33 bp, Homo sapien
ttaatgtaatttagccgggatactctaactcta

SEQ ID NO: 566105 - DNA, 33 bp, Homo sapien
taggaatccttatgacaactgtttaactttgga

SEQ ID NO: 566106 - DNA, 33 bp, Homo sapien
taggaatccttatgacgactgtttaactttgga

SEQ ID NO: 566107 - DNA, 33 bp, Homo sapien
cctatttactgaatcaccttaaaagctactagt

SEQ ID NO: 566108 - DNA, 33 bp, Homo sapien
cctatttactgaatcatcttaaaagctactagt

SEQ ID NO: 566109 - DNA, 33 bp, Homo sapien
aatagggattagagcacgaatcaataaaattaa

SEQ ID NO: 566110 - DNA, 33 bp, Homo sapien
aatagggattagagcatgaatcaataaaattaa

SEQ ID NO: 566111 - DNA, 33 bp, Homo sapien
gtgttctcaccagttcaaggcctgctctgcata

SEQ ID NO: 566112 - DNA, 33 bp, Homo sapien
gtgttctcaccagttcgaggcctgctctgcata

SEQ ID NO: 566113 - DNA, 33 bp, Homo sapien
aaggttacatctcagaaaaccaggaaatttgag

SEQ ID NO: 566114 - DNA, 33 bp, Homo sapien
aaggttacatctcagacaaccaggaaatttgag

SEQ ID NO: 566115 - DNA, 33 bp, Homo sapien
cagcagcaatgagccccatcagtcagagaaaat

SEQ ID NO: 566116 - DNA, 33 bp, Homo sapien
cagcagcaatgagccctatcagtcagagaaaat

SEQ ID NO: 566117 - DNA, 33 bp, Homo sapien
ccaaagacagttggtcaccaaagccataaacac

SEQ ID NO: 566118 - DNA, 33 bp, Homo sapien
ccaaagacagttggtcgccaaagccataaacac

SEQ ID NO: 566119 - DNA, 33 bp, Homo sapien
ctaattattcttgtcaacaaggcatcccagagt

SEQ ID NO: 566120 - DNA, 33 bp, Homo sapien
ctaattattcttgtcatcaaggcatcccagagt

SEQ ID NO: 566121 - DNA, 33 bp, Homo sapien
gtcctatttctccacccctccttgtatctgagc

SEQ ID NO: 566122 - DNA, 33 bp, Homo sapien
gtcctatttctccacctctccttgtatctgagc

SEQ ID NO: 566123 - DNA, 33 bp, Homo sapien
tctcatgtgacgagaaattagaaatcagtcgtg

SEQ ID NO: 566124 - DNA, 33 bp, Homo sapien
tctcatgtgacgagaagttagaaatcagtcgtg

SEQ ID NO: 566125 - DNA, 33 bp, Homo sapien
cggaagggcagcgatgaaaatttcagctctact

SEQ ID NO: 566126 - DNA, 33 bp, Homo sapien
cggaagggcagcgatggaaatttcagctctact

SEQ ID NO: 566127 - DNA, 33 bp, Homo sapien
aggttagactctgctcactaacattagagggaa

SEQ ID NO: 566128 - DNA, 33 bp, Homo sapien
aggttagactctgctcgctaacattagagggaa

SEQ ID NO: 566129 - DNA, 33 bp, Homo sapien
gaagcagtcaggtacgcatttgtctcagttgag

SEQ ID NO: 566130 - DNA, 33 bp, Homo sapien
gaagcagtcaggtacggatttgtctcagttgag

SEQ ID NO: 566131 - DNA, 33 bp, Homo sapien
tgggactcccatgaccccctccttgtgttaggc

SEQ ID NO: 566132 - DNA, 33 bp, Homo sapien
tgggactcccatgacctcctccttgtgttaggc

SEQ ID NO: 566133 - DNA, 33 bp, Homo sapien
gaatggaatggaactacaaataagttacagaag

SEQ ID NO: 566134 - DNA, 33 bp, Homo sapien
gaatggaatggaactagaaataagttacagaag

SEQ ID NO: 566135 - DNA, 33 bp, Homo sapien
aagggagcagccctcacggtctaatcacctttc

SEQ ID NO: 566136 - DNA, 33 bp, Homo sapien
aagggagcagccctcatggtctaatcacctttc

SEQ ID NO: 566137 - DNA, 33 bp, Homo sapien
atggtgcctcaaataacacatcctccagagagg

SEQ ID NO: 566138 - DNA, 33 bp, Homo sapien
atggtgcctcaaataagacatcctccagagagg

SEQ ID NO: 566139 - DNA, 33 bp, Homo sapien
atgctggccttccttcgcatatgaccaccacat

SEQ ID NO: 566140 - DNA, 33 bp, Homo sapien
atgctggccttccttctcatatgaccaccacat

SEQ ID NO: 566141 - DNA, 33 bp, Homo sapien
tccattacagctcttaacatattcattctagtt

SEQ ID NO: 566142 - DNA, 33 bp, Homo sapien
tccattacagctcttagcatattcattctagtt

SEQ ID NO: 566143 - DNA, 33 bp, Homo sapien
ttacaaatcttttacaacttgctcaagtgttta

SEQ ID NO: 566144 - DNA, 33 bp, Homo sapien
ttacaaatcttttacagcttgctcaagtgttta

SEQ ID NO: 566145 - DNA, 33 bp, Homo sapien
ggaacaatgggaaggacgtggatagtttagtaa

SEQ ID NO: 566146 - DNA, 33 bp, Homo sapien
ggaacaatgggaaggatgtggatagtttagtaa

SEQ ID NO: 566147 - DNA, 33 bp, Homo sapien
acagaaattctcaggaacatcactgcaggcagc

SEQ ID NO: 566148 - DNA, 33 bp, Homo sapien
acagaaattctcaggaccatcactgcaggcagc

SEQ ID NO: 566149 - DNA, 33 bp, Homo sapien
caactgcttagaaaaacaaggtggttagttggc

SEQ ID NO: 566150 - DNA, 33 bp, Homo sapien
caactgcttagaaaaataaggtggttagttggc

SEQ ID NO: 566151 - DNA, 33 bp, Homo sapien
tggactttgtccaatgaattctgaaaaatcaca

SEQ ID NO: 566152 - DNA, 33 bp, Homo sapien
tggactttgtccaatgtattctgaaaaatcaca

SEQ ID NO: 566153 - DNA, 33 bp, Homo sapien
gcttgtttcttctgacaatttaatgtcttagaa

SEQ ID NO: 566154 - DNA, 33 bp, Homo sapien
gcttgtttcttctgactatttaatgtcttagaa

SEQ ID NO: 566155 - DNA, 33 bp, Homo sapien
ttaaatatactctacaagaaacaattctttcct

SEQ ID NO: 566156 - DNA, 33 bp, Homo sapien
ttaaatatactctacaggaaacaattctttcct

SEQ ID NO: 566157 - DNA, 33 bp, Homo sapien
gaaggatggattctgaaatatcgaggaggtgaa

SEQ ID NO: 566158 - DNA, 33 bp, Homo sapien
gaaggatggattctgacatatcgaggaggtgaa

SEQ ID NO: 566159 - DNA, 33 bp, Homo sapien
acatgctacccacaccaacataccatgtatcac

SEQ ID NO: 566160 - DNA, 33 bp, Homo sapien
acatgctacccacaccgacataccatgtatcac

SEQ ID NO: 566161 - DNA, 33 bp, Homo sapien
ctgaaaggtcttacccaagatcagggcacttgt

SEQ ID NO: 566162 - DNA, 33 bp, Homo sapien
ctgaaaggtcttacccgagatcagggcacttgt

SEQ ID NO: 566163 - DNA, 33 bp, Homo sapien
tcttgaggttaggtcccgataacaagattcagt

SEQ ID NO: 566164 - DNA, 33 bp, Homo sapien
tcttgaggttaggtcctgataacaagattcagt

SEQ ID NO: 566165 - DNA, 33 bp, Homo sapien
gatagcatttgatttaccctttcagtgtttatt

SEQ ID NO: 566166 - DNA, 33 bp, Homo sapien
gatagcatttgatttatcctttcagtgtttatt

SEQ ID NO: 566167 - DNA, 33 bp, Homo sapien
tattttgatctagagacgctgtaaacttgagtt

SEQ ID NO: 566168 - DNA, 33 bp, Homo sapien
tattttgatctagagatgctgtaaacttgagtt

SEQ ID NO: 566169 - DNA, 33 bp, Homo sapien
agtcaccgctgtccaacgtcagacctaaggtgc

SEQ ID NO: 566170 - DNA, 33 bp, Homo sapien
agtcaccgctgtccaatgtcagacctaaggtgc

SEQ ID NO: 566171 - DNA, 33 bp, Homo sapien
atggattggaaaacacagtattgttaagatatc

SEQ ID NO: 566172 - DNA, 33 bp, Homo sapien
atggattggaaaacacggtattgttaagatatc

SEQ ID NO: 566173 - DNA, 33 bp, Homo sapien
ctctactggcactttcccatcagtttagaaact

SEQ ID NO: 566174 - DNA, 33 bp, Homo sapien
ctctactggcactttctcatcagtttagaaact

SEQ ID NO: 566175 - DNA, 33 bp, Homo sapien
agaaaaataacaaaggcccaatttcctaccctc

SEQ ID NO: 566176 - DNA, 33 bp, Homo sapien
agaaaaataacaaagggccaatttcctaccctc

SEQ ID NO: 566177 - DNA, 33 bp, Homo sapien
aattcctattagaatacctggtgaattatggct

SEQ ID NO: 566178 - DNA, 33 bp, Homo sapien
aattcctattagaatatctggtgaattatggct

SEQ ID NO: 566179 - DNA, 33 bp, Homo sapien
ggatgtcttaccttgaagatcttatcatgtgac

SEQ ID NO: 566180 - DNA, 33 bp, Homo sapien
ggatgtcttaccttgaggatcttatcatgtgac

SEQ ID NO: 566181 - DNA, 33 bp, Homo sapien
atgtcccagaatctcacggaattttatggagaa

SEQ ID NO: 566182 - DNA, 33 bp, Homo sapien
atgtcccagaatctcatggaattttatggagaa

SEQ ID NO: 566183 - DNA, 33 bp, Homo sapien
aggtggcatatacgatcagcaagtgtgcacccc

SEQ ID NO: 566184 - DNA, 33 bp, Homo sapien
aggtggcatatacgattagcaagtgtgcacccc

SEQ ID NO: 566185 - DNA, 33 bp, Homo sapien
aagaagatccttctcaaatgttgtgtcattcat

SEQ ID NO: 566186 - DNA, 33 bp, Homo sapien
aagaagatccttctcatatgttgtgtcattcat

SEQ ID NO: 566187 - DNA, 33 bp, Homo sapien
gatagacatgttgcaaatatgattcaggctgac

SEQ ID NO: 566188 - DNA, 33 bp, Homo sapien
gatagacatgttgcaagtatgattcaggctgac

SEQ ID NO: 566189 - DNA, 33 bp, Homo sapien
ctgtgctcctcatcccaaaatcccgaaacactt

SEQ ID NO: 566190 - DNA, 33 bp, Homo sapien
ctgtgctcctcatccccaaatcccgaaacactt

SEQ ID NO: 566191 - DNA, 33 bp, Homo sapien
cactctatatgcagaaaaaggaaactctgttaa

SEQ ID NO: 566192 - DNA, 33 bp, Homo sapien
cactctatatgcagaagaaggaaactctgttaa

SEQ ID NO: 566193 - DNA, 33 bp, Homo sapien
agcaaaagctccataaatgtcaatgttattatt

SEQ ID NO: 566194 - DNA, 33 bp, Homo sapien
agcaaaagctccataagtgtcaatgttattatt

SEQ ID NO: 566195 - DNA, 33 bp, Homo sapien
gaggaagaggacaagaagaattctgagtgcggc

SEQ ID NO: 566196 - DNA, 33 bp, Homo sapien
gaggaagaggacaagatgaattctgagtgcggc

SEQ ID NO: 566197 - DNA, 33 bp, Homo sapien
tcctatgacagttagaacccatctctgtgccct

SEQ ID NO: 566198 - DNA, 33 bp, Homo sapien
tcctatgacagttagatcccatctctgtgccct

SEQ ID NO: 566199 - DNA, 33 bp, Homo sapien
caactggaccacccagaaatctgataggtatcc

SEQ ID NO: 566200 - DNA, 33 bp, Homo sapien
caactggaccacccaggaatctgataggtatcc

SEQ ID NO: 566201 - DNA, 33 bp, Homo sapien
ttttgtgtgcaacgaaaaatctgtcccttattc

SEQ ID NO: 566202 - DNA, 33 bp, Homo sapien
ttttgtgtgcaacgaagaatctgtcccttattc

SEQ ID NO: 566203 - DNA, 33 bp, Homo sapien
tctgtatctcaagacaacattgagaacttacat

SEQ ID NO: 566204 - DNA, 33 bp, Homo sapien
tctgtatctcaagacaccattgagaacttacat

SEQ ID NO: 566205 - DNA, 33 bp, Homo sapien
actagaactgcctctagctgggaaaataataaa

SEQ ID NO: 566206 - DNA, 33 bp, Homo sapien
actagaactgcctctatctgggaaaataataaa

SEQ ID NO: 566207 - DNA, 33 bp, Homo sapien
gcttatacctcctaaaatatgataactacaaga

SEQ ID NO: 566208 - DNA, 33 bp, Homo sapien
gcttatacctcctaaattatgataactacaaga

SEQ ID NO: 566209 - DNA, 33 bp, Homo sapien
agtgggattcacttacaaagagcagcaatgaat

SEQ ID NO: 566210 - DNA, 33 bp, Homo sapien
agtgggattcacttacgaagagcagcaatgaat

SEQ ID NO: 566211 - DNA, 33 bp, Homo sapien
gagacttcctcacataccgtcactctgaaatgg

SEQ ID NO: 566212 - DNA, 33 bp, Homo sapien
gagacttcctcacatagcgtcactctgaaatgg

SEQ ID NO: 566213 - DNA, 33 bp, Homo sapien
atgtcaaccctgtgaacctattactcaatataa

SEQ ID NO: 566214 - DNA, 33 bp, Homo sapien
atgtcaaccctgtgaatctattactcaatataa

SEQ ID NO: 566215 - DNA, 33 bp, Homo sapien
cagatattggtttcgcgcaatgtaacagaacca

SEQ ID NO: 566216 - DNA, 33 bp, Homo sapien
cagatattggtttcgctcaatgtaacagaacca

SEQ ID NO: 566217 - DNA, 33 bp, Homo sapien
cttcaagcatgatacacgaagattttagaaaat

SEQ ID NO: 566218 - DNA, 33 bp, Homo sapien
cttcaagcatgatacatgaagattttagaaaat

SEQ ID NO: 566219 - DNA, 33 bp, Homo sapien
gggtaattgagctgtcaagaccagagaccaggt

SEQ ID NO: 566220 - DNA, 33 bp, Homo sapien
gggtaattgagctgtcgagaccagagaccaggt

SEQ ID NO: 566221 - DNA, 33 bp, Homo sapien
catcattaaaaagtgggacataacagcaactat

SEQ ID NO: 566222 - DNA, 33 bp, Homo sapien
catcattaaaaagtggtacataacagcaactat

SEQ ID NO: 566223 - DNA, 33 bp, Homo sapien
aagaatgcctgagaacaaatagtttataaagaa

SEQ ID NO: 566224 - DNA, 33 bp, Homo sapien
aagaatgcctgagaacgaatagtttataaagaa

SEQ ID NO: 566225 - DNA, 33 bp, Homo sapien
caataagagcaaatgggatgaaatcatctatta

SEQ ID NO: 566226 - DNA, 33 bp, Homo sapien
caataagagcaaatggtatgaaatcatctatta

SEQ ID NO: 566227 - DNA, 33 bp, Homo sapien
ggccctaggaaagtccccttgactaattatgaa

SEQ ID NO: 566228 - DNA, 33 bp, Homo sapien
ggccctaggaaagtcctcttgactaattatgaa

SEQ ID NO: 566229 - DNA, 33 bp, Homo sapien
tggttaagagggcaacactttgtttaaaatctg

SEQ ID NO: 566230 - DNA, 33 bp, Homo sapien
tggttaagagggcaacgctttgtttaaaatctg

SEQ ID NO: 566231 - DNA, 33 bp, Homo sapien
gcagggccctcctttacgatgtggaagcgtcag

SEQ ID NO: 566232 - DNA, 33 bp, Homo sapien
gcagggccctcctttaggatgtggaagcgtcag

SEQ ID NO: 566233 - DNA, 33 bp, Homo sapien
ttcctcctgaggtagaacctgaggtgaggattt

SEQ ID NO: 566234 - DNA, 33 bp, Homo sapien
ttcctcctgaggtagaccctgaggtgaggattt

SEQ ID NO: 566235 - DNA, 33 bp, Homo sapien
ccacacacagctgtaccggcaagtttcaaaaac

SEQ ID NO: 566236 - DNA, 33 bp, Homo sapien
ccacacacagctgtactggcaagtttcaaaaac

SEQ ID NO: 566237 - DNA, 33 bp, Homo sapien
acgccataaatacctgaatataagttgttgtgt

SEQ ID NO: 566238 - DNA, 33 bp, Homo sapien
acgccataaatacctgcatataagttgttgtgt

SEQ ID NO: 566239 - DNA, 33 bp, Homo sapien
aaacaccaatctatggaacaggaagtcagaata

SEQ ID NO: 566240 - DNA, 33 bp, Homo sapien
aaacaccaatctatgggacaggaagtcagaata

SEQ ID NO: 566241 - DNA, 33 bp, Homo sapien
atatatctgtttcatacggactggcgagcgtca

SEQ ID NO: 566242 - DNA, 33 bp, Homo sapien
atatatctgtttcatatggactggcgagcgtca

SEQ ID NO: 566243 - DNA, 33 bp, Homo sapien
aagaacccatggcaaactctcctatcactttct

SEQ ID NO: 566244 - DNA, 33 bp, Homo sapien
aagaacccatggcaaattctcctatcactttct

SEQ ID NO: 566245 - DNA, 33 bp, Homo sapien
ctgattttcttccataacgctgttccttacctc

SEQ ID NO: 566246 - DNA, 33 bp, Homo sapien
ctgattttcttccatagcgctgttccttacctc

SEQ ID NO: 566247 - DNA, 33 bp, Homo sapien
acgagccctgttactcaccacaatttaagcctc

SEQ ID NO: 566248 - DNA, 33 bp, Homo sapien
acgagccctgttactcgccacaatttaagcctc

SEQ ID NO: 566249 - DNA, 33 bp, Homo sapien
agaaggcggccagggcaagcaatgccagaggct

SEQ ID NO: 566250 - DNA, 33 bp, Homo sapien
agaaggcggccagggcgagcaatgccagaggct

SEQ ID NO: 566251 - DNA, 33 bp, Homo sapien
attatggcttctctgaaaccgctttaagaccat

SEQ ID NO: 566252 - DNA, 33 bp, Homo sapien
attatggcttctctgagaccgctttaagaccat

SEQ ID NO: 566253 - DNA, 33 bp, Homo sapien
ccctccctgaactcataacaatcatgtccagca

SEQ ID NO: 566254 - DNA, 33 bp, Homo sapien
ccctccctgaactcatcacaatcatgtccagca

SEQ ID NO: 566255 - DNA, 33 bp, Homo sapien
aacatatttgagaatccaaaactaaatccctac

SEQ ID NO: 566256 - DNA, 33 bp, Homo sapien
aacatatttgagaatctaaaactaaatccctac

SEQ ID NO: 566257 - DNA, 33 bp, Homo sapien
atgtggccttttggataacttttctcacattgt

SEQ ID NO: 566258 - DNA, 33 bp, Homo sapien
atgtggccttttggatgacttttctcacattgt

SEQ ID NO: 566259 - DNA, 33 bp, Homo sapien
aatagattctgagttgcagaaattccagagtct

SEQ ID NO: 566260 - DNA, 33 bp, Homo sapien
aatagattctgagttggagaaattccagagtct

SEQ ID NO: 566261 - DNA, 33 bp, Homo sapien
tgttcttggtagctccaacgaccaattcagaag

SEQ ID NO: 566262 - DNA, 33 bp, Homo sapien
tgttcttggtagctccgacgaccaattcagaag

SEQ ID NO: 566263 - DNA, 33 bp, Homo sapien
caatcctcagtgttgacagaagtgctagaaggc

SEQ ID NO: 566264 - DNA, 33 bp, Homo sapien
caatcctcagtgttgatagaagtgctagaaggc

SEQ ID NO: 566265 - DNA, 33 bp, Homo sapien
taggggtccggctcaaaggcaggttgatatgca

SEQ ID NO: 566266 - DNA, 33 bp, Homo sapien
taggggtccggctcaagggcaggttgatatgca

SEQ ID NO: 566267 - DNA, 33 bp, Homo sapien
ggggccccaaatccaaagctggtgagcccttat

SEQ ID NO: 566268 - DNA, 33 bp, Homo sapien
ggggccccaaatccaatgctggtgagcccttat

SEQ ID NO: 566269 - DNA, 33 bp, Homo sapien
atacggagactcaggcaagatggttaaactcag

SEQ ID NO: 566270 - DNA, 33 bp, Homo sapien
atacggagactcaggcgagatggttaaactcag

SEQ ID NO: 566271 - DNA, 33 bp, Homo sapien
tattcatcagcaggtcactcaaattgaaatgca

SEQ ID NO: 566272 - DNA, 33 bp, Homo sapien
tattcatcagcaggtcgctcaaattgaaatgca

SEQ ID NO: 566273 - DNA, 33 bp, Homo sapien
cctgcctttgtaccaccgactgttttagcagat

SEQ ID NO: 566274 - DNA, 33 bp, Homo sapien
cctgcctttgtaccactgactgttttagcagat

SEQ ID NO: 566275 - DNA, 33 bp, Homo sapien
tcaagtcctagctgtaagaatttgggcaaattg

SEQ ID NO: 566276 - DNA, 33 bp, Homo sapien
tcaagtcctagctgtaggaatttgggcaaattg

SEQ ID NO: 566277 - DNA, 33 bp, Homo sapien
ggtcagccttaaactcacaaaagaaccacttgg

SEQ ID NO: 566278 - DNA, 33 bp, Homo sapien
ggtcagccttaaactcgcaaaagaaccacttgg

SEQ ID NO: 566279 - DNA, 33 bp, Homo sapien
acgcagaattaccagagaggctgtcatcaatag

SEQ ID NO: 566280 - DNA, 33 bp, Homo sapien
acgcagaattaccagataggctgtcatcaatag

SEQ ID NO: 566281 - DNA, 33 bp, Homo sapien
tcacagcgacaaacaacgaagaacctgccactc

SEQ ID NO: 566282 - DNA, 33 bp, Homo sapien
tcacagcgacaaacaatgaagaacctgccactc

SEQ ID NO: 566283 - DNA, 33 bp, Homo sapien
tcaaaacatcatgggaaacacgataaatatata

SEQ ID NO: 566284 - DNA, 33 bp, Homo sapien
tcaaaacatcatgggatacacgataaatatata

SEQ ID NO: 566285 - DNA, 33 bp, Homo sapien
gttatttttaaaagacagatatgatgtgctgga

SEQ ID NO: 566286 - DNA, 33 bp, Homo sapien
gttatttttaaaagacggatatgatgtgctgga

SEQ ID NO: 566287 - DNA, 33 bp, Homo sapien
gcctccatcactggtgaatcctccttgctgctg

SEQ ID NO: 566288 - DNA, 33 bp, Homo sapien
gcctccatcactggtgtatcctccttgctgctg

SEQ ID NO: 566289 - DNA, 33 bp, Homo sapien
aacaaaaatgacaacacgcaaacaaagtaagaa

SEQ ID NO: 566290 - DNA, 33 bp, Homo sapien
aacaaaaatgacaacaggcaaacaaagtaagaa

SEQ ID NO: 566291 - DNA, 33 bp, Homo sapien
ttttaacattctgatacaggatgtactcaccat

SEQ ID NO: 566292 - DNA, 33 bp, Homo sapien
ttttaacattctgatataggatgtactcaccat

SEQ ID NO: 566293 - DNA, 33 bp, Homo sapien
caggcacaaaggacaagttgccctaactgttat

SEQ ID NO: 566294 - DNA, 33 bp, Homo sapien
caggcacaaaggacaatttgccctaactgttat

SEQ ID NO: 566295 - DNA, 33 bp, Homo sapien
ctcagtcacttaatgaaacatgaattgaggttg

SEQ ID NO: 566296 - DNA, 33 bp, Homo sapien
ctcagtcacttaatgagacatgaattgaggttg

SEQ ID NO: 566297 - DNA, 33 bp, Homo sapien
cagagacaggcgggtacacaaatgacagaggct

SEQ ID NO: 566298 - DNA, 33 bp, Homo sapien
cagagacaggcgggtatacaaatgacagaggct

SEQ ID NO: 566299 - DNA, 33 bp, Homo sapien
acatcactctcttctccagataattggctcctt

SEQ ID NO: 566300 - DNA, 33 bp, Homo sapien
acatcactctcttctctagataattggctcctt

SEQ ID NO: 566301 - DNA, 33 bp, Homo sapien
ttaggctgtggcatcacgtccgatgagccgcaa

SEQ ID NO: 566302 - DNA, 33 bp, Homo sapien
ttaggctgtggcatcaggtccgatgagccgcaa

SEQ ID NO: 566303 - DNA, 33 bp, Homo sapien
tcttcattgatgataaacaaatggccaatacgt

SEQ ID NO: 566304 - DNA, 33 bp, Homo sapien
tcttcattgatgataaccaaatggccaatacgt

SEQ ID NO: 566305 - DNA, 33 bp, Homo sapien
aagaggaataccagataactaggaaatgctaac

SEQ ID NO: 566306 - DNA, 33 bp, Homo sapien
aagaggaataccagatgactaggaaatgctaac

SEQ ID NO: 566307 - DNA, 33 bp, Homo sapien
tatgtttttaattggacaaatcagaccttttat

SEQ ID NO: 566308 - DNA, 33 bp, Homo sapien
tatgtttttaattggataaatcagaccttttat

SEQ ID NO: 566309 - DNA, 33 bp, Homo sapien
cctcccgaccggcaccaggcactgctctgcagg

SEQ ID NO: 566310 - DNA, 33 bp, Homo sapien
cctcccgaccggcaccgggcactgctctgcagg

SEQ ID NO: 566311 - DNA, 33 bp, Homo sapien
ctctctttactcctaaaccaagcaatgtcatca

SEQ ID NO: 566312 - DNA, 33 bp, Homo sapien
ctctctttactcctaacccaagcaatgtcatca

SEQ ID NO: 566313 - DNA, 33 bp, Homo sapien
aactattccaacaaagaatgggcataagaacac

SEQ ID NO: 566314 - DNA, 33 bp, Homo sapien
aactattccaacaaaggatgggcataagaacac

SEQ ID NO: 566315 - DNA, 33 bp, Homo sapien
agtttctcttctgagaatatgaaaatgtgggct

SEQ ID NO: 566316 - DNA, 33 bp, Homo sapien
agtttctcttctgagagtatgaaaatgtgggct

SEQ ID NO: 566317 - DNA, 33 bp, Homo sapien
gaccaccagcttcaaccattggtgccttattgc

SEQ ID NO: 566318 - DNA, 33 bp, Homo sapien
gaccaccagcttcaactattggtgccttattgc

SEQ ID NO: 566319 - DNA, 33 bp, Homo sapien
gagtgctgttatctcaagaatgtgaggtaatgc

SEQ ID NO: 566320 - DNA, 33 bp, Homo sapien
gagtgctgttatctcaggaatgtgaggtaatgc

SEQ ID NO: 566321 - DNA, 33 bp, Homo sapien
ctggaggaaattaaaaatatggttatgcttgaa

SEQ ID NO: 566322 - DNA, 33 bp, Homo sapien
ctggaggaaattaaaagtatggttatgcttgaa

SEQ ID NO: 566323 - DNA, 33 bp, Homo sapien
agtttcactgtggacacggacgcgacaagatgg

SEQ ID NO: 566324 - DNA, 33 bp, Homo sapien
agtttcactgtggacatggacgcgacaagatgg

SEQ ID NO: 566325 - DNA, 33 bp, Homo sapien
caacgccctggccaaacgctgggcaaagagaac

SEQ ID NO: 566326 - DNA, 33 bp, Homo sapien
caacgccctggccaaatgctgggcaaagagaac

SEQ ID NO: 566327 - DNA, 33 bp, Homo sapien
ttcctgacaactcagacgtggcatcacagtcac

SEQ ID NO: 566328 - DNA, 33 bp, Homo sapien
ttcctgacaactcagatgtggcatcacagtcac

SEQ ID NO: 566329 - DNA, 33 bp, Homo sapien
aagtgatgccagaaagcactggaagtggagtgg

SEQ ID NO: 566330 - DNA, 33 bp, Homo sapien
aagtgatgccagaaagtactggaagtggagtgg

SEQ ID NO: 566331 - DNA, 33 bp, Homo sapien
cctttctgattcatcaactatattctcacgtgg

SEQ ID NO: 566332 - DNA, 33 bp, Homo sapien
cctttctgattcatcatctatattctcacgtgg

SEQ ID NO: 566333 - DNA, 33 bp, Homo sapien
atgccttgctcacacccgatactgctcagtttc

SEQ ID NO: 566334 - DNA, 33 bp, Homo sapien
atgccttgctcacacctgatactgctcagtttc

SEQ ID NO: 566335 - DNA, 33 bp, Homo sapien
agctcagagaataacgcatccagtgaaaactca

SEQ ID NO: 566336 - DNA, 33 bp, Homo sapien
agctcagagaataacgtatccagtgaaaactca

SEQ ID NO: 566337 - DNA, 33 bp, Homo sapien
tatgtgagccgtgataacaccatcaatccctgg

SEQ ID NO: 566338 - DNA, 33 bp, Homo sapien
tatgtgagccgtgatagcaccatcaatccctgg

SEQ ID NO: 566339 - DNA, 33 bp, Homo sapien
ggttgacacctagagacatgtgtaatttaaaag

SEQ ID NO: 566340 - DNA, 33 bp, Homo sapien
ggttgacacctagagagatgtgtaatttaaaag

SEQ ID NO: 566341 - DNA, 33 bp, Homo sapien
acccaggggcgcttcaccggtgattctggtatg

SEQ ID NO: 566342 - DNA, 33 bp, Homo sapien
acccaggggcgcttcagcggtgattctggtatg

SEQ ID NO: 566343 - DNA, 33 bp, Homo sapien
aagcgtaaatgctgcccgactcgcatggagtgg

SEQ ID NO: 566344 - DNA, 33 bp, Homo sapien
aagcgtaaatgctgcctgactcgcatggagtgg

SEQ ID NO: 566345 - DNA, 33 bp, Homo sapien
tgcggctcaggatgccaaggaggatttcagagc

SEQ ID NO: 566346 - DNA, 33 bp, Homo sapien
tgcggctcaggatgccgaggaggatttcagagc

SEQ ID NO: 566347 - DNA, 33 bp, Homo sapien
ggtcacgtaaaaaccacagacatctcctgagaa

SEQ ID NO: 566348 - DNA, 33 bp, Homo sapien
ggtcacgtaaaaaccatagacatctcctgagaa

SEQ ID NO: 566349 - DNA, 33 bp, Homo sapien
tacgtgacctgacttcaagtaaaggagagaaca

SEQ ID NO: 566350 - DNA, 33 bp, Homo sapien
tacgtgacctgacttcgagtaaaggagagaaca

SEQ ID NO: 566351 - DNA, 33 bp, Homo sapien
tcacccacgtggctcacgaagactcattccctt

SEQ ID NO: 566352 - DNA, 33 bp, Homo sapien
tcacccacgtggctcatgaagactcattccctt

SEQ ID NO: 566353 - DNA, 33 bp, Homo sapien
ctggggatcaagcaccggcgcggtgatgagggg

SEQ ID NO: 566354 - DNA, 33 bp, Homo sapien
ctggggatcaagcacctgcgcggtgatgagggg

SEQ ID NO: 566355 - DNA, 33 bp, Homo sapien
gaagtgtgtgatgtcaactatgtgcgaggtgct

SEQ ID NO: 566356 - DNA, 33 bp, Homo sapien
gaagtgtgtgatgtcatctatgtgcgaggtgct

SEQ ID NO: 566357 - DNA, 33 bp, Homo sapien
gactggacacctgccacgttcgcgtgtttagtc

SEQ ID NO: 566358 - DNA, 33 bp, Homo sapien
gactggacacctgccatgttcgcgtgtttagtc

SEQ ID NO: 566359 - DNA, 33 bp, Homo sapien
ggatgattatgaacaaaaccatcgagtgtgtgg

SEQ ID NO: 566360 - DNA, 33 bp, Homo sapien
ggatgattatgaacaacaccatcgagtgtgtgg

SEQ ID NO: 566361 - DNA, 33 bp, Homo sapien
cagacaaataatcacaaaatcaagatgctaatt

SEQ ID NO: 566362 - DNA, 33 bp, Homo sapien
cagacaaataatcacacaatcaagatgctaatt

SEQ ID NO: 566363 - DNA, 33 bp, Homo sapien
aggagccatgcttcacgactctggaggtggcag

SEQ ID NO: 566364 - DNA, 33 bp, Homo sapien
aggagccatgcttcactactctggaggtggcag

SEQ ID NO: 566365 - DNA, 33 bp, Homo sapien
actagagtataggaaactggaaggatgagttta

SEQ ID NO: 566366 - DNA, 33 bp, Homo sapien
actagagtataggaaattggaaggatgagttta

SEQ ID NO: 566367 - DNA, 33 bp, Homo sapien
ttacttttgctacttaagtaaataacttatcac

SEQ ID NO: 566368 - DNA, 33 bp, Homo sapien
ttacttttgctacttacgtaaataacttatcac

SEQ ID NO: 566369 - DNA, 33 bp, Homo sapien
ggcagggaggagtttgaaagtcagcctatcttt

SEQ ID NO: 566370 - DNA, 33 bp, Homo sapien
ggcagggaggagtttggaagtcagcctatcttt

SEQ ID NO: 566371 - DNA, 33 bp, Homo sapien
caaacttcacataatccatggcagtaccctcca

SEQ ID NO: 566372 - DNA, 33 bp, Homo sapien
caaacttcacataatctatggcagtaccctcca

SEQ ID NO: 566373 - DNA, 33 bp, Homo sapien
tcttccagggtgatcaactagaatcaaaagggg

SEQ ID NO: 566374 - DNA, 33 bp, Homo sapien
tcttccagggtgatcagctagaatcaaaagggg

SEQ ID NO: 566375 - DNA, 33 bp, Homo sapien
tcagctttatagtaaccaatgaaacacaaactg

SEQ ID NO: 566376 - DNA, 33 bp, Homo sapien
tcagctttatagtaactaatgaaacacaaactg

SEQ ID NO: 566377 - DNA, 33 bp, Homo sapien
ataagaaagatgagaaatggaggcaagacccaa

SEQ ID NO: 566378 - DNA, 33 bp, Homo sapien
ataagaaagatgagaactggaggcaagacccaa

SEQ ID NO: 566379 - DNA, 33 bp, Homo sapien
tgaaaaacaagaggcacgtgtgaataactgcac

SEQ ID NO: 566380 - DNA, 33 bp, Homo sapien
tgaaaaacaagaggcatgtgtgaataactgcac

SEQ ID NO: 566381 - DNA, 33 bp, Homo sapien
gactgcgtgaggctaaatgatgcagtgtttgga

SEQ ID NO: 566382 - DNA, 33 bp, Homo sapien
gactgcgtgaggctaagtgatgcagtgtttgga

SEQ ID NO: 566383 - DNA, 33 bp, Homo sapien
gggtgaccagctttggcatgagttgacagtgca

SEQ ID NO: 566384 - DNA, 33 bp, Homo sapien
gggtgaccagctttggtatgagttgacagtgca

SEQ ID NO: 566385 - DNA, 33 bp, Homo sapien
ttgaaacctgtttccccggagctgacacagggc

SEQ ID NO: 566386 - DNA, 33 bp, Homo sapien
ttgaaacctgtttccctggagctgacacagggc

SEQ ID NO: 566387 - DNA, 33 bp, Homo sapien
ccagtgtgtccactctaactactgaatcttcat

SEQ ID NO: 566388 - DNA, 33 bp, Homo sapien
ccagtgtgtccactctgactactgaatcttcat

SEQ ID NO: 566389 - DNA, 33 bp, Homo sapien
atgtctcctgatctcacacaagcatccagtccc

SEQ ID NO: 566390 - DNA, 33 bp, Homo sapien
atgtctcctgatctcatacaagcatccagtccc

SEQ ID NO: 566391 - DNA, 33 bp, Homo sapien
ttttctttccagtaccaatacctgtctggctgg

SEQ ID NO: 566392 - DNA, 33 bp, Homo sapien
ttttctttccagtaccgatacctgtctggctgg

SEQ ID NO: 566393 - DNA, 33 bp, Homo sapien
ggcaggccccaaatcacggccggtagtcactgg

SEQ ID NO: 566394 - DNA, 33 bp, Homo sapien
ggcaggccccaaatcatggccggtagtcactgg

SEQ ID NO: 566395 - DNA, 33 bp, Homo sapien
ccactcccttcagatagaaccattccccaaaat

SEQ ID NO: 566396 - DNA, 33 bp, Homo sapien
ccactcccttcagatataaccattccccaaaat

SEQ ID NO: 566397 - DNA, 33 bp, Homo sapien
agccacctcgtaccaccgctgggtcacacctcc

SEQ ID NO: 566398 - DNA, 33 bp, Homo sapien
agccacctcgtaccactgctgggtcacacctcc

SEQ ID NO: 566399 - DNA, 33 bp, Homo sapien
gtcattgctatggcgcaagtttacttttactct

SEQ ID NO: 566400 - DNA, 33 bp, Homo sapien
gtcattgctatggcgcgagtttacttttactct

SEQ ID NO: 566401 - DNA, 33 bp, Homo sapien
ttttaattccagaaccacagtgcacaaatcatg

SEQ ID NO: 566402 - DNA, 33 bp, Homo sapien
ttttaattccagaaccgcagtgcacaaatcatg

SEQ ID NO: 566403 - DNA, 33 bp, Homo sapien
tcctgcacagcccacactggaacatgatttgtg

SEQ ID NO: 566404 - DNA, 33 bp, Homo sapien
tcctgcacagcccacattggaacatgatttgtg

SEQ ID NO: 566405 - DNA, 33 bp, Homo sapien
agggatgggctagataagactcctctagtgctg

SEQ ID NO: 566406 - DNA, 33 bp, Homo sapien
agggatgggctagataggactcctctagtgctg

SEQ ID NO: 566407 - DNA, 33 bp, Homo sapien
tctactaaatatgcaaaaaattagccaggcatg

SEQ ID NO: 566408 - DNA, 33 bp, Homo sapien
tctactaaatatgcaacaaattagccaggcatg

SEQ ID NO: 566409 - DNA, 33 bp, Homo sapien
tgagcttcgtctcttgaagaggctaatcaataa

SEQ ID NO: 566410 - DNA, 33 bp, Homo sapien
tgagcttcgtctcttggagaggctaatcaataa

SEQ ID NO: 566411 - DNA, 33 bp, Homo sapien
aatgacttgtgataaacgaaccctgagagatgg

SEQ ID NO: 566412 - DNA, 33 bp, Homo sapien
aatgacttgtgataaatgaaccctgagagatgg

SEQ ID NO: 566413 - DNA, 33 bp, Homo sapien
tttcttgagctgaaaactgggaaaccagcctct

SEQ ID NO: 566414 - DNA, 33 bp, Homo sapien
tttcttgagctgaaaagtgggaaaccagcctct

SEQ ID NO: 566415 - DNA, 33 bp, Homo sapien
gtgagaatgggcatgacgggtctgaaaagggag

SEQ ID NO: 566416 - DNA, 33 bp, Homo sapien
gtgagaatgggcatgatgggtctgaaaagggag

SEQ ID NO: 566417 - DNA, 33 bp, Homo sapien
gccaactcagttgccactgacacaaaagccctg

SEQ ID NO: 566418 - DNA, 33 bp, Homo sapien
gccaactcagttgccattgacacaaaagccctg

SEQ ID NO: 566419 - DNA, 33 bp, Homo sapien
ttgtaacaccgagatacgatcttcttcctcacc

SEQ ID NO: 566420 - DNA, 33 bp, Homo sapien
ttgtaacaccgagatatgatcttcttcctcacc

SEQ ID NO: 566421 - DNA, 33 bp, Homo sapien
tttgcattcagggagcacaggtcagttagatat

SEQ ID NO: 566422 - DNA, 33 bp, Homo sapien
tttgcattcagggagcgcaggtcagttagatat

SEQ ID NO: 566423 - DNA, 33 bp, Homo sapien
ttatagtggcttaaaacggtggccacggaagtt

SEQ ID NO: 566424 - DNA, 33 bp, Homo sapien
ttatagtggcttaaaagggtggccacggaagtt

SEQ ID NO: 566425 - DNA, 33 bp, Homo sapien
taattcacaaaggccacagaggtacttcacagt

SEQ ID NO: 566426 - DNA, 33 bp, Homo sapien
taattcacaaaggccagagaggtacttcacagt

SEQ ID NO: 566427 - DNA, 33 bp, Homo sapien
tccatttacaagtcacaatttaaagatgaagtt

SEQ ID NO: 566428 - DNA, 33 bp, Homo sapien
tccatttacaagtcaccatttaaagatgaagtt

SEQ ID NO: 566429 - DNA, 33 bp, Homo sapien
aggcacacagaccccaccaagtcagacctggaa

SEQ ID NO: 566430 - DNA, 33 bp, Homo sapien
aggcacacagaccccagcaagtcagacctggaa

SEQ ID NO: 566431 - DNA, 33 bp, Homo sapien
tttcatccaatgcccaaaacctcctgctgtccc

SEQ ID NO: 566432 - DNA, 33 bp, Homo sapien
tttcatccaatgcccagaacctcctgctgtccc

SEQ ID NO: 566433 - DNA, 33 bp, Homo sapien
tacaacttattgtaacagtacatgtccaggaag

SEQ ID NO: 566434 - DNA, 33 bp, Homo sapien
tacaacttattgtaacggtacatgtccaggaag

SEQ ID NO: 566435 - DNA, 33 bp, Homo sapien
ttacaagactctcagaagactgtacaccagcgt

SEQ ID NO: 566436 - DNA, 33 bp, Homo sapien
ttacaagactctcagaggactgtacaccagcgt

SEQ ID NO: 566437 - DNA, 33 bp, Homo sapien
taatcgaaatcatctactaaagtcaaaaacaac

SEQ ID NO: 566438 - DNA, 33 bp, Homo sapien
taatcgaaatcatctattaaagtcaaaaacaac

SEQ ID NO: 566439 - DNA, 33 bp, Homo sapien
catcacttgatgtcaaagatttttaggttttgc

SEQ ID NO: 566440 - DNA, 33 bp, Homo sapien
catcacttgatgtcaaggatttttaggttttgc

SEQ ID NO: 566441 - DNA, 33 bp, Homo sapien
ataaaaaatgacattacctatgcacacagaaag

SEQ ID NO: 566442 - DNA, 33 bp, Homo sapien
ataaaaaatgacattagctatgcacacagaaag

SEQ ID NO: 566443 - DNA, 33 bp, Homo sapien
aaatggtgcggcaaaacgtacacaattggtgaa

SEQ ID NO: 566444 - DNA, 33 bp, Homo sapien
aaatggtgcggcaaaatgtacacaattggtgaa

SEQ ID NO: 566445 - DNA, 33 bp, Homo sapien
tgctgcaaatagaaataatcatgtatataggcc

SEQ ID NO: 566446 - DNA, 33 bp, Homo sapien
tgctgcaaatagaaatcatcatgtatataggcc

SEQ ID NO: 566447 - DNA, 33 bp, Homo sapien
tgtctgtgtccctccaaatccagatgctgaaac

SEQ ID NO: 566448 - DNA, 33 bp, Homo sapien
tgtctgtgtccctccatatccagatgctgaaac

SEQ ID NO: 566449 - DNA, 33 bp, Homo sapien
cggagttcaacggtgacgtgttcagagccgtgg

SEQ ID NO: 566450 - DNA, 33 bp, Homo sapien
cggagttcaacggtgaggtgttcagagccgtgg

SEQ ID NO: 566451 - DNA, 33 bp, Homo sapien
tgccctcacatctccaactgtgaaatttatcca

SEQ ID NO: 566452 - DNA, 33 bp, Homo sapien
tgccctcacatctccatctgtgaaatttatcca

SEQ ID NO: 566453 - DNA, 33 bp, Homo sapien
agcccttatcacagccaaggcctcttttccagt

SEQ ID NO: 566454 - DNA, 33 bp, Homo sapien
agcccttatcacagccgaggcctcttttccagt

SEQ ID NO: 566455 - DNA, 33 bp, Homo sapien
ttagggtttcaacttacgaattctgggagacac

SEQ ID NO: 566456 - DNA, 33 bp, Homo sapien
ttagggtttcaacttatgaattctgggagacac

SEQ ID NO: 566457 - DNA, 33 bp, Homo sapien
gccctggtaccaaatgcatcaagattacctaag

SEQ ID NO: 566458 - DNA, 33 bp, Homo sapien
gccctggtaccaaatgtatcaagattacctaag

SEQ ID NO: 566459 - DNA, 33 bp, Homo sapien
agcacagatattgtacactgaacaatgtttttc

SEQ ID NO: 566460 - DNA, 33 bp, Homo sapien
agcacagatattgtaccctgaacaatgtttttc

SEQ ID NO: 566461 - DNA, 33 bp, Homo sapien
ttaacaaccacaaaacagacagagctgctggcc

SEQ ID NO: 566462 - DNA, 33 bp, Homo sapien
ttaacaaccacaaaacggacagagctgctggcc

SEQ ID NO: 566463 - DNA, 33 bp, Homo sapien
aatttcttagggtacaaaattgttggttgttgc

SEQ ID NO: 566464 - DNA, 33 bp, Homo sapien
aatttcttagggtacagaattgttggttgttgc

SEQ ID NO: 566465 - DNA, 33 bp, Homo sapien
ggaaatttgttgccagcaatcctgacttgcaaa

SEQ ID NO: 566466 - DNA, 33 bp, Homo sapien
ggaaatttgttgccagtaatcctgacttgcaaa

SEQ ID NO: 566467 - DNA, 33 bp, Homo sapien
gaggactgaccctacacggagctttgggagctg

SEQ ID NO: 566468 - DNA, 33 bp, Homo sapien
gaggactgaccctacatggagctttgggagctg

SEQ ID NO: 566469 - DNA, 33 bp, Homo sapien
tgatttgagaaggccaccaggtgtaaagacgat

SEQ ID NO: 566470 - DNA, 33 bp, Homo sapien
tgatttgagaaggccatcaggtgtaaagacgat

SEQ ID NO: 566471 - DNA, 33 bp, Homo sapien
cacaaccgatcctttcactcatctgccgagggc

SEQ ID NO: 566472 - DNA, 33 bp, Homo sapien
cacaaccgatcctttcgctcatctgccgagggc

SEQ ID NO: 566473 - DNA, 33 bp, Homo sapien
gcaaggagtgcaatagcaatcagcaaacagcag

SEQ ID NO: 566474 - DNA, 33 bp, Homo sapien
gcaaggagtgcaatagtaatcagcaaacagcag

SEQ ID NO: 566475 - DNA, 33 bp, Homo sapien
ttccgggtgccagctccatgctgaagctctttg

SEQ ID NO: 566476 - DNA, 33 bp, Homo sapien
ttccgggtgccagctctatgctgaagctctttg

SEQ ID NO: 566477 - DNA, 33 bp, Homo sapien
ctgctggaagtgtccactaggaaggcccggggt

SEQ ID NO: 566478 - DNA, 33 bp, Homo sapien
ctgctggaagtgtccattaggaaggcccggggt

SEQ ID NO: 566479 - DNA, 33 bp, Homo sapien
acgccacacccaagaacctttcctcgggtccac

SEQ ID NO: 566480 - DNA, 33 bp, Homo sapien
acgccacacccaagaatctttcctcgggtccac

SEQ ID NO: 566481 - DNA, 33 bp, Homo sapien
actctttttcctctacccagaacatcctgctcc

SEQ ID NO: 566482 - DNA, 33 bp, Homo sapien
actctttttcctctactcagaacatcctgctcc

SEQ ID NO: 566483 - DNA, 33 bp, Homo sapien
ctggcctgcaaacctacgtttttaatgcacagg

SEQ ID NO: 566484 - DNA, 33 bp, Homo sapien
ctggcctgcaaacctatgtttttaatgcacagg

SEQ ID NO: 566485 - DNA, 33 bp, Homo sapien
ttatatacattttcctcacttcaccctcaaaat

SEQ ID NO: 566486 - DNA, 33 bp, Homo sapien
ttatatacattttccttacttcaccctcaaaat

SEQ ID NO: 566487 - DNA, 33 bp, Homo sapien
aaatatgaggccaaaccaggttattcacttttc

SEQ ID NO: 566488 - DNA, 33 bp, Homo sapien
aaatatgaggccaaactaggttattcacttttc

SEQ ID NO: 566489 - DNA, 33 bp, Homo sapien
tttttattcttacgacactttccagaaaaccac

SEQ ID NO: 566490 - DNA, 33 bp, Homo sapien
tttttattcttacgacgctttccagaaaaccac

SEQ ID NO: 566491 - DNA, 33 bp, Homo sapien
gggaacacttgaggaccggaactcatcggatca

SEQ ID NO: 566492 - DNA, 33 bp, Homo sapien
gggaacacttgaggactggaactcatcggatca

SEQ ID NO: 566493 - DNA, 33 bp, Homo sapien
tatctagggtagggcccaggaattagctgtata

SEQ ID NO: 566494 - DNA, 33 bp, Homo sapien
tatctagggtagggcctaggaattagctgtata

SEQ ID NO: 566495 - DNA, 33 bp, Homo sapien
tgtcttgaatttctggaaaacagagacctgaag

SEQ ID NO: 566496 - DNA, 33 bp, Homo sapien
tgtcttgaatttctgggaaacagagacctgaag

SEQ ID NO: 566497 - DNA, 33 bp, Homo sapien
aaagggggaacagcaacgtgagaacgtgggtgg

SEQ ID NO: 566498 - DNA, 33 bp, Homo sapien
aaagggggaacagcaatgtgagaacgtgggtgg

SEQ ID NO: 566499 - DNA, 33 bp, Homo sapien
tgagactggggattcaaaaagaagagaattcat

SEQ ID NO: 566500 - DNA, 33 bp, Homo sapien
tgagactggggattcataaagaagagaattcat

SEQ ID NO: 566501 - DNA, 33 bp, Homo sapien
atctgtaaaatgggcacgataaaaagatcccta

SEQ ID NO: 566502 - DNA, 33 bp, Homo sapien
atctgtaaaatgggcatgataaaaagatcccta

SEQ ID NO: 566503 - DNA, 33 bp, Homo sapien
ctttagcttctctgggaaaccaaacatttcctg

SEQ ID NO: 566504 - DNA, 33 bp, Homo sapien
ctttagcttctctggggaaccaaacatttcctg

SEQ ID NO: 566505 - DNA, 33 bp, Homo sapien
tgaaagacatttgttaagatgctatctttagct

SEQ ID NO: 566506 - DNA, 33 bp, Homo sapien
tgaaagacatttgttacgatgctatctttagct

SEQ ID NO: 566507 - DNA, 33 bp, Homo sapien
ctaggtgccgaccaccaggatctccccttctcc

SEQ ID NO: 566508 - DNA, 33 bp, Homo sapien
ctaggtgccgaccaccgggatctccccttctcc

SEQ ID NO: 566509 - DNA, 33 bp, Homo sapien
aatgatggggaattgcgagtggacgatgacaga

SEQ ID NO: 566510 - DNA, 33 bp, Homo sapien
aatgatggggaattgctagtggacgatgacaga

SEQ ID NO: 566511 - DNA, 33 bp, Homo sapien
gttgaaaagctgtaaacgggcacaaaccatgta

SEQ ID NO: 566512 - DNA, 33 bp, Homo sapien
gttgaaaagctgtaaatgggcacaaaccatgta

SEQ ID NO: 566513 - DNA, 33 bp, Homo sapien
tgtggaaacccaaatcacaaggtcatctctttg

SEQ ID NO: 566514 - DNA, 33 bp, Homo sapien
tgtggaaacccaaatcgcaaggtcatctctttg

SEQ ID NO: 566515 - DNA, 33 bp, Homo sapien
cgagagtgtggaggaacgggaaagtcccccctc

SEQ ID NO: 566516 - DNA, 33 bp, Homo sapien
cgagagtgtggaggaatgggaaagtcccccctc

SEQ ID NO: 566517 - DNA, 33 bp, Homo sapien
caccacttaccataggacatcctctgctgacca

SEQ ID NO: 566518 - DNA, 33 bp, Homo sapien
caccacttaccatagggcatcctctgctgacca

SEQ ID NO: 566519 - DNA, 33 bp, Homo sapien
caattgttatcacaccccttctccacattcctc

SEQ ID NO: 566520 - DNA, 33 bp, Homo sapien
caattgttatcacacctcttctccacattcctc

SEQ ID NO: 566521 - DNA, 33 bp, Homo sapien
ttggaaagataagtcaaacactaggagaatatt

SEQ ID NO: 566522 - DNA, 33 bp, Homo sapien
ttggaaagataagtcacacactaggagaatatt

SEQ ID NO: 566523 - DNA, 33 bp, Homo sapien
tcttaatccgattacacatgatcagcctctgcg

SEQ ID NO: 566524 - DNA, 33 bp, Homo sapien
tcttaatccgattacatatgatcagcctctgcg

SEQ ID NO: 566525 - DNA, 33 bp, Homo sapien
aaaactctaggcagaacacaaagtcaaccacct

SEQ ID NO: 566526 - DNA, 33 bp, Homo sapien
aaaactctaggcagaatacaaagtcaaccacct

SEQ ID NO: 566527 - DNA, 33 bp, Homo sapien
gaagcaaactgcaggacgaaaaaatgctgagaa

SEQ ID NO: 566528 - DNA, 33 bp, Homo sapien
gaagcaaactgcaggatgaaaaaatgctgagaa

SEQ ID NO: 566529 - DNA, 33 bp, Homo sapien
cagtgagcatggggtgcagatcagccttcagtg

SEQ ID NO: 566530 - DNA, 33 bp, Homo sapien
cagtgagcatggggtgtagatcagccttcagtg

SEQ ID NO: 566531 - DNA, 33 bp, Homo sapien
ttgactaactggccagaaatgccttcccaaaac

SEQ ID NO: 566532 - DNA, 33 bp, Homo sapien
ttgactaactggccaggaatgccttcccaaaac

SEQ ID NO: 566533 - DNA, 33 bp, Homo sapien
taatgctgacatgcaaaaacacgatacacacac

SEQ ID NO: 566534 - DNA, 33 bp, Homo sapien
taatgctgacatgcaacaacacgatacacacac

SEQ ID NO: 566535 - DNA, 33 bp, Homo sapien
gaggccagttgcctggaacacatttccaagttg

SEQ ID NO: 566536 - DNA, 33 bp, Homo sapien
gaggccagttgcctgggacacatttccaagttg

SEQ ID NO: 566537 - DNA, 33 bp, Homo sapien
agaagttaatgatagaacaaaagccggtgaaat

SEQ ID NO: 566538 - DNA, 33 bp, Homo sapien
agaagttaatgatagagcaaaagccggtgaaat

SEQ ID NO: 566539 - DNA, 33 bp, Homo sapien
caaaatagggcaagaccctgtagcaatgagaca

SEQ ID NO: 566540 - DNA, 33 bp, Homo sapien
caaaatagggcaagactctgtagcaatgagaca

SEQ ID NO: 566541 - DNA, 33 bp, Homo sapien
cctcatccttcttcaactgaggatcagccagag

SEQ ID NO: 566542 - DNA, 33 bp, Homo sapien
cctcatccttcttcaattgaggatcagccagag

SEQ ID NO: 566543 - DNA, 33 bp, Homo sapien
cacttaagatcctatgcagcaatgttcaagcag

SEQ ID NO: 566544 - DNA, 33 bp, Homo sapien
cacttaagatcctatgtagcaatgttcaagcag

SEQ ID NO: 566545 - DNA, 33 bp, Homo sapien
aacattctggaactgcaagcctagggcaccgct

SEQ ID NO: 566546 - DNA, 33 bp, Homo sapien
aacattctggaactgccagcctagggcaccgct

SEQ ID NO: 566547 - DNA, 33 bp, Homo sapien
tcagaaagggcagggagtaaatgagcctcactg

SEQ ID NO: 566548 - DNA, 33 bp, Homo sapien
tcagaaagggcagggattaaatgagcctcactg

SEQ ID NO: 566549 - DNA, 33 bp, Homo sapien
acagcattcctgggcccagtcaagacaggattc

SEQ ID NO: 566550 - DNA, 33 bp, Homo sapien
acagcattcctgggcctagtcaagacaggattc

SEQ ID NO: 566551 - DNA, 33 bp, Homo sapien
ggcttccaaactctcaaatgtcaggtgtgtgta

SEQ ID NO: 566552 - DNA, 33 bp, Homo sapien
ggcttccaaactctcagatgtcaggtgtgtgta

SEQ ID NO: 566553 - DNA, 33 bp, Homo sapien
tgttttgtaacagacaaggaaactagagtatgg

SEQ ID NO: 566554 - DNA, 33 bp, Homo sapien
tgttttgtaacagacagggaaactagagtatgg

SEQ ID NO: 566555 - DNA, 33 bp, Homo sapien
gggaagggacaagttaacatcaataagaataat

SEQ ID NO: 566556 - DNA, 33 bp, Homo sapien
gggaagggacaagttagcatcaataagaataat

SEQ ID NO: 566557 - DNA, 33 bp, Homo sapien
aataccaataacagcccacttcattagattctc

SEQ ID NO: 566558 - DNA, 33 bp, Homo sapien
aataccaataacagcctacttcattagattctc

SEQ ID NO: 566559 - DNA, 33 bp, Homo sapien
aaagttgagttctctgcaaggttagatgactgg

SEQ ID NO: 566560 - DNA, 33 bp, Homo sapien
aaagttgagttctctgtaaggttagatgactgg

SEQ ID NO: 566561 - DNA, 33 bp, Homo sapien
gactgacactcagcacagagcccatcacccctg

SEQ ID NO: 566562 - DNA, 33 bp, Homo sapien
gactgacactcagcacggagcccatcacccctg

SEQ ID NO: 566563 - DNA, 33 bp, Homo sapien
ttaatggatagatgagacccactcacactgggg

SEQ ID NO: 566564 - DNA, 33 bp, Homo sapien
ttaatggatagatgaggcccactcacactgggg

SEQ ID NO: 566565 - DNA, 33 bp, Homo sapien
agtcataaaatgccacagtagtgagcggctact

SEQ ID NO: 566566 - DNA, 33 bp, Homo sapien
agtcataaaatgccacggtagtgagcggctact

SEQ ID NO: 566567 - DNA, 33 bp, Homo sapien
ctgtaaggaccgagccaagtcccacatccactc

SEQ ID NO: 566568 - DNA, 33 bp, Homo sapien
ctgtaaggaccgagccgagtcccacatccactc

SEQ ID NO: 566569 - DNA, 33 bp, Homo sapien
ccttttcctggtaacaatcctcacaacaaatct

SEQ ID NO: 566570 - DNA, 33 bp, Homo sapien
ccttttcctggtaacagtcctcacaacaaatct

SEQ ID NO: 566571 - DNA, 33 bp, Homo sapien
gctccagggaccctaacgatcagactctttcac

SEQ ID NO: 566572 - DNA, 33 bp, Homo sapien
gctccagggaccctaatgatcagactctttcac

SEQ ID NO: 566573 - DNA, 33 bp, Homo sapien
gaaaaacaaatcttgcaacgtagacggtggctc

SEQ ID NO: 566574 - DNA, 33 bp, Homo sapien
gaaaaacaaatcttgccacgtagacggtggctc

SEQ ID NO: 566575 - DNA, 33 bp, Homo sapien
gcatctcctggtttcaatcagtggtaatgaagg

SEQ ID NO: 566576 - DNA, 33 bp, Homo sapien
gcatctcctggtttcactcagtggtaatgaagg

SEQ ID NO: 566577 - DNA, 33 bp, Homo sapien
gcttcatggaagccaccgggaaaatggcaagat

SEQ ID NO: 566578 - DNA, 33 bp, Homo sapien
gcttcatggaagccactgggaaaatggcaagat

SEQ ID NO: 566579 - DNA, 33 bp, Homo sapien
gctgatgtgtgggaagaacagagctttggcctg

SEQ ID NO: 566580 - DNA, 33 bp, Homo sapien
gctgatgtgtgggaaggacagagctttggcctg

SEQ ID NO: 566581 - DNA, 33 bp, Homo sapien
tttggggaggggatggaatataacaaacttata

SEQ ID NO: 566582 - DNA, 33 bp, Homo sapien
tttggggaggggatgggatataacaaacttata

SEQ ID NO: 566583 - DNA, 33 bp, Homo sapien
ttagaacactggcccacgtggaggacgtttatc

SEQ ID NO: 566584 - DNA, 33 bp, Homo sapien
ttagaacactggcccatgtggaggacgtttatc

SEQ ID NO: 566585 - DNA, 33 bp, Homo sapien
tagaaaggtcccattcaagatggaaaagaagta

SEQ ID NO: 566586 - DNA, 33 bp, Homo sapien
tagaaaggtcccattcgagatggaaaagaagta

SEQ ID NO: 566587 - DNA, 33 bp, Homo sapien
caggtctgcagaggtaactgctcttttgggggt

SEQ ID NO: 566588 - DNA, 33 bp, Homo sapien
caggtctgcagaggtacctgctcttttgggggt

SEQ ID NO: 566589 - DNA, 33 bp, Homo sapien
gtttagacagaggtacaaacatctccaattcag

SEQ ID NO: 566590 - DNA, 33 bp, Homo sapien
gtttagacagaggtacgaacatctccaattcag

SEQ ID NO: 566591 - DNA, 33 bp, Homo sapien
gaagcagttctttttccccgtcttcatgtgcaa

SEQ ID NO: 566592 - DNA, 33 bp, Homo sapien
gaagcagttctttttctccgtcttcatgtgcaa

SEQ ID NO: 566593 - DNA, 33 bp, Homo sapien
aacttgatatgacctcgcctcaaactgtgcaaa

SEQ ID NO: 566594 - DNA, 33 bp, Homo sapien
aacttgatatgacctctcctcaaactgtgcaaa

SEQ ID NO: 566595 - DNA, 33 bp, Homo sapien
ttgctggcttcagtgcagagtccttggctggga

SEQ ID NO: 566596 - DNA, 33 bp, Homo sapien
ttgctggcttcagtgcggagtccttggctggga

SEQ ID NO: 566597 - DNA, 33 bp, Homo sapien
ctgcgggtaggctgacaaagtgacatttattac

SEQ ID NO: 566598 - DNA, 33 bp, Homo sapien
ctgcgggtaggctgacgaagtgacatttattac

SEQ ID NO: 566599 - DNA, 33 bp, Homo sapien
tccaccacgttgcctacgtctatggtgtgcgca

SEQ ID NO: 566600 - DNA, 33 bp, Homo sapien
tccaccacgttgcctatgtctatggtgtgcgca

SEQ ID NO: 566601 - DNA, 33 bp, Homo sapien
tctaaaatgacaaaaaccagctaactcacttca

SEQ ID NO: 566602 - DNA, 33 bp, Homo sapien
tctaaaatgacaaaaatcagctaactcacttca

SEQ ID NO: 566603 - DNA, 33 bp, Homo sapien
ttacaggcatgagctaccaccacgccaggccga

SEQ ID NO: 566604 - DNA, 33 bp, Homo sapien
ttacaggcatgagctatcaccacgccaggccga

SEQ ID NO: 566605 - DNA, 33 bp, Homo sapien
aacttgcaggttcagcactttccacagagtcta

SEQ ID NO: 566606 - DNA, 33 bp, Homo sapien
aacttgcaggttcagcgctttccacagagtcta

SEQ ID NO: 566607 - DNA, 33 bp, Homo sapien
ggccataatgactgcaaaaaatacaagacatgg

SEQ ID NO: 566608 - DNA, 33 bp, Homo sapien
ggccataatgactgcagaaaatacaagacatgg

SEQ ID NO: 566609 - DNA, 33 bp, Homo sapien
gccaagtgctgaggtcaaagggaaaaccaggcg

SEQ ID NO: 566610 - DNA, 33 bp, Homo sapien
gccaagtgctgaggtcgaagggaaaaccaggcg

SEQ ID NO: 566611 - DNA, 33 bp, Homo sapien
gggccaccgcttttccaaaagagaggaacttgc

SEQ ID NO: 566612 - DNA, 33 bp, Homo sapien
gggccaccgcttttccgaaagagaggaacttgc

SEQ ID NO: 566613 - DNA, 33 bp, Homo sapien
cgactctggtccccaccgtgaccttaggcacag

SEQ ID NO: 566614 - DNA, 33 bp, Homo sapien
cgactctggtccccactgtgaccttaggcacag

SEQ ID NO: 566615 - DNA, 33 bp, Homo sapien
ttactaatactagtaacagacacaggaaagttc

SEQ ID NO: 566616 - DNA, 33 bp, Homo sapien
ttactaatactagtaagagacacaggaaagttc

SEQ ID NO: 566617 - DNA, 33 bp, Homo sapien
ttgtggcttcatccctcaagtagaagacattct

SEQ ID NO: 566618 - DNA, 33 bp, Homo sapien
ttgtggcttcatcccttaagtagaagacattct

SEQ ID NO: 566619 - DNA, 33 bp, Homo sapien
tcccagacaagaatgacgccaatgtggaggctc

SEQ ID NO: 566620 - DNA, 33 bp, Homo sapien
tcccagacaagaatgatgccaatgtggaggctc

SEQ ID NO: 566621 - DNA, 33 bp, Homo sapien
ccatcctaaccatacccatctcttttaggatta

SEQ ID NO: 566622 - DNA, 33 bp, Homo sapien
ccatcctaaccatacctatctcttttaggatta

SEQ ID NO: 566623 - DNA, 33 bp, Homo sapien
agagggtcagtaagaggaatcagggcagaaaag

SEQ ID NO: 566624 - DNA, 33 bp, Homo sapien
agagggtcagtaagagtaatcagggcagaaaag

SEQ ID NO: 566625 - DNA, 33 bp, Homo sapien
cagtctctgtgaaaaacgaggcaaccatccagt

SEQ ID NO: 566626 - DNA, 33 bp, Homo sapien
cagtctctgtgaaaaatgaggcaaccatccagt

SEQ ID NO: 566627 - DNA, 33 bp, Homo sapien
ggggtcccttttctccactccaaagataccaca

SEQ ID NO: 566628 - DNA, 33 bp, Homo sapien
ggggtcccttttctccgctccaaagataccaca

SEQ ID NO: 566629 - DNA, 33 bp, Homo sapien
agtgggcctcgctgaacgccttctccaactctt

SEQ ID NO: 566630 - DNA, 33 bp, Homo sapien
agtgggcctcgctgaatgccttctccaactctt

SEQ ID NO: 566631 - DNA, 33 bp, Homo sapien
tacaaaaccaaaggcaactaaatccaactctgc

SEQ ID NO: 566632 - DNA, 33 bp, Homo sapien
tacaaaaccaaaggcagctaaatccaactctgc

SEQ ID NO: 566633 - DNA, 33 bp, Homo sapien
cttcatgaaccatataacctgactggttttaca

SEQ ID NO: 566634 - DNA, 33 bp, Homo sapien
cttcatgaaccatatatcctgactggttttaca

SEQ ID NO: 566635 - DNA, 33 bp, Homo sapien
tccctccaaggcatccaccacaattgcaaccgt

SEQ ID NO: 566636 - DNA, 33 bp, Homo sapien
tccctccaaggcatccgccacaattgcaaccgt

SEQ ID NO: 566637 - DNA, 33 bp, Homo sapien
aaaacatcactgtgacccacaactcagaggtca

SEQ ID NO: 566638 - DNA, 33 bp, Homo sapien
aaaacatcactgtgactcacaactcagaggtca

SEQ ID NO: 566639 - DNA, 33 bp, Homo sapien
ttcactaaggtagaagcctcctgaatttttgtt

SEQ ID NO: 566640 - DNA, 33 bp, Homo sapien
ttcactaaggtagaaggctcctgaatttttgtt

SEQ ID NO: 566641 - DNA, 33 bp, Homo sapien
gaggtcatcctttgataagcattcatatggaat

SEQ ID NO: 566642 - DNA, 33 bp, Homo sapien
gaggtcatcctttgatgagcattcatatggaat

SEQ ID NO: 566643 - DNA, 33 bp, Homo sapien
cagaacacggtaacaccaagagatttcctaagg

SEQ ID NO: 566644 - DNA, 33 bp, Homo sapien
cagaacacggtaacactaagagatttcctaagg

SEQ ID NO: 566645 - DNA, 33 bp, Homo sapien
tttcctggaacagcccaactttcataacatttt

SEQ ID NO: 566646 - DNA, 33 bp, Homo sapien
tttcctggaacagcccgactttcataacatttt

SEQ ID NO: 566647 - DNA, 33 bp, Homo sapien
aagaataaagttgaaacacgcaatacataaatc

SEQ ID NO: 566648 - DNA, 33 bp, Homo sapien
aagaataaagttgaaatacgcaatacataaatc

SEQ ID NO: 566649 - DNA, 33 bp, Homo sapien
cttaccagaaccaaagaagtttagtctaagatg

SEQ ID NO: 566650 - DNA, 33 bp, Homo sapien
cttaccagaaccaaaggagtttagtctaagatg

SEQ ID NO: 566651 - DNA, 33 bp, Homo sapien
gaaatgaaccaccgtaaacattatttccttcaa

SEQ ID NO: 566652 - DNA, 33 bp, Homo sapien
gaaatgaaccaccgtacacattatttccttcaa

SEQ ID NO: 566653 - DNA, 33 bp, Homo sapien
tcaagagattttaaacagaaggcagagtaacag

SEQ ID NO: 566654 - DNA, 33 bp, Homo sapien
tcaagagattttaaacggaaggcagagtaacag

SEQ ID NO: 566655 - DNA, 33 bp, Homo sapien
acctggaagtaacagaccttttagtttacatca

SEQ ID NO: 566656 - DNA, 33 bp, Homo sapien
acctggaagtaacagatcttttagtttacatca

SEQ ID NO: 566657 - DNA, 33 bp, Homo sapien
ccctgacattaacacacggcattacaggagcat

SEQ ID NO: 566658 - DNA, 33 bp, Homo sapien
ccctgacattaacacatggcattacaggagcat

SEQ ID NO: 566659 - DNA, 33 bp, Homo sapien
aggtagaagagggcccagattcccgagtcacct

SEQ ID NO: 566660 - DNA, 33 bp, Homo sapien
aggtagaagagggcccggattcccgagtcacct

SEQ ID NO: 566661 - DNA, 33 bp, Homo sapien
gataattgcataactacgaatatgctaaaacca

SEQ ID NO: 566662 - DNA, 33 bp, Homo sapien
gataattgcataactatgaatatgctaaaacca

SEQ ID NO: 566663 - DNA, 33 bp, Homo sapien
agatacagacatcacaagaaaagaaaaatatag

SEQ ID NO: 566664 - DNA, 33 bp, Homo sapien
agatacagacatcacaggaaaagaaaaatatag

SEQ ID NO: 566665 - DNA, 33 bp, Homo sapien
gtggtatggcatgaaaactggagatatcatcga

SEQ ID NO: 566666 - DNA, 33 bp, Homo sapien
gtggtatggcatgaaagctggagatatcatcga

SEQ ID NO: 566667 - DNA, 33 bp, Homo sapien
tattacatgacattccaaaatacagatcatccc

SEQ ID NO: 566668 - DNA, 33 bp, Homo sapien
tattacatgacattccgaaatacagatcatccc

SEQ ID NO: 566669 - DNA, 33 bp, Homo sapien
cagttactttgtagaagtcctctcagtttgagt

SEQ ID NO: 566670 - DNA, 33 bp, Homo sapien
cagttactttgtagaattcctctcagtttgagt

SEQ ID NO: 566671 - DNA, 33 bp, Homo sapien
tttctgtatatgtcacagccttgccatttttga

SEQ ID NO: 566672 - DNA, 33 bp, Homo sapien
tttctgtatatgtcacggccttgccatttttga

SEQ ID NO: 566673 - DNA, 33 bp, Homo sapien
aacttgctaatctctaggacatacaagttccat

SEQ ID NO: 566674 - DNA, 33 bp, Homo sapien
aacttgctaatctctatgacatacaagttccat

SEQ ID NO: 566675 - DNA, 33 bp, Homo sapien
tgtgaacagattgtcccatttagagtagctgtt

SEQ ID NO: 566676 - DNA, 33 bp, Homo sapien
tgtgaacagattgtcctatttagagtagctgtt

SEQ ID NO: 566677 - DNA, 33 bp, Homo sapien
gaaaacctgaagaaaccggccaacagattaggc

SEQ ID NO: 566678 - DNA, 33 bp, Homo sapien
gaaaacctgaagaaactggccaacagattaggc

SEQ ID NO: 566679 - DNA, 33 bp, Homo sapien
ggtagctcctaccaccaacaacactgctctacc

SEQ ID NO: 566680 - DNA, 33 bp, Homo sapien
ggtagctcctaccaccgacaacactgctctacc

SEQ ID NO: 566681 - DNA, 33 bp, Homo sapien
cactgtgggcaaggacaaaagaggagtgcgatg

SEQ ID NO: 566682 - DNA, 33 bp, Homo sapien
cactgtgggcaaggacgaaagaggagtgcgatg

SEQ ID NO: 566683 - DNA, 33 bp, Homo sapien
aaccaaatggaagttaaaactctctccatagcc

SEQ ID NO: 566684 - DNA, 33 bp, Homo sapien
aaccaaatggaagttacaactctctccatagcc

SEQ ID NO: 566685 - DNA, 33 bp, Homo sapien
agggacatctgtgctactaccctggggagcgtg

SEQ ID NO: 566686 - DNA, 33 bp, Homo sapien
agggacatctgtgctattaccctggggagcgtg

SEQ ID NO: 566687 - DNA, 33 bp, Homo sapien
tagaattaacaacgcaacaacattctaaatgtg

SEQ ID NO: 566688 - DNA, 33 bp, Homo sapien
tagaattaacaacgcagcaacattctaaatgtg

SEQ ID NO: 566689 - DNA, 33 bp, Homo sapien
ttctaagagaagtaacaaatcaaaccagtcata

SEQ ID NO: 566690 - DNA, 33 bp, Homo sapien
ttctaagagaagtaacgaatcaaaccagtcata

SEQ ID NO: 566691 - DNA, 33 bp, Homo sapien
aggtccttccaagtcaatcacccactggtgcgt

SEQ ID NO: 566692 - DNA, 33 bp, Homo sapien
aggtccttccaagtcagtcacccactggtgcgt

SEQ ID NO: 566693 - DNA, 33 bp, Homo sapien
ctggctaggcgggaacagctcacagtagcgata

SEQ ID NO: 566694 - DNA, 33 bp, Homo sapien
ctggctaggcgggaacggctcacagtagcgata

SEQ ID NO: 566695 - DNA, 33 bp, Homo sapien
tccctcaggatgtgtgcattgacaagctcagac

SEQ ID NO: 566696 - DNA, 33 bp, Homo sapien
tccctcaggatgtgtgtattgacaagctcagac

SEQ ID NO: 566697 - DNA, 33 bp, Homo sapien
catattcacaccaacacaaggatgagtcaccta

SEQ ID NO: 566698 - DNA, 33 bp, Homo sapien
catattcacaccaacagaaggatgagtcaccta

SEQ ID NO: 566699 - DNA, 33 bp, Homo sapien
gtgggaacacagacccaaaccgtatcagaggtc

SEQ ID NO: 566700 - DNA, 33 bp, Homo sapien
gtgggaacacagacccgaaccgtatcagaggtc

SEQ ID NO: 566701 - DNA, 33 bp, Homo sapien
acatagctctgccttcacattcaagggcatttc

SEQ ID NO: 566702 - DNA, 33 bp, Homo sapien
acatagctctgccttcgcattcaagggcatttc

SEQ ID NO: 566703 - DNA, 33 bp, Homo sapien
cttgactctttatccaatcaagtcaaaatggag

SEQ ID NO: 566704 - DNA, 33 bp, Homo sapien
cttgactctttatccagtcaagtcaaaatggag

SEQ ID NO: 566705 - DNA, 33 bp, Homo sapien
accacaatgagacgccactgtattcccacaaga

SEQ ID NO: 566706 - DNA, 33 bp, Homo sapien
accacaatgagacgccgctgtattcccacaaga

SEQ ID NO: 566707 - DNA, 33 bp, Homo sapien
ggcagacagcccaaagaatggaaagatgatttc

SEQ ID NO: 566708 - DNA, 33 bp, Homo sapien
ggcagacagcccaaaggatggaaagatgatttc

SEQ ID NO: 566709 - DNA, 33 bp, Homo sapien
tcattggggttgtacactctgatgctacaaatc

SEQ ID NO: 566710 - DNA, 33 bp, Homo sapien
tcattggggttgtacattctgatgctacaaatc

SEQ ID NO: 566711 - DNA, 33 bp, Homo sapien
acacaaataagacacaatcgcctgctacctgga

SEQ ID NO: 566712 - DNA, 33 bp, Homo sapien
acacaaataagacacactcgcctgctacctgga

SEQ ID NO: 566713 - DNA, 33 bp, Homo sapien
tctcactgccgctcataaataggaccaagcgtt

SEQ ID NO: 566714 - DNA, 33 bp, Homo sapien
tctcactgccgctcatcaataggaccaagcgtt

SEQ ID NO: 566715 - DNA, 33 bp, Homo sapien
agaaaagcaggaagaactgtagcaaaaccataa

SEQ ID NO: 566716 - DNA, 33 bp, Homo sapien
agaaaagcaggaagaattgtagcaaaaccataa

SEQ ID NO: 566717 - DNA, 33 bp, Homo sapien
aggaggaatgtagaccagaatagagccagaagg

SEQ ID NO: 566718 - DNA, 33 bp, Homo sapien
aggaggaatgtagaccggaatagagccagaagg

SEQ ID NO: 566719 - DNA, 33 bp, Homo sapien
ccagttagacttaagacggcaaatggagatgcc

SEQ ID NO: 566720 - DNA, 33 bp, Homo sapien
ccagttagacttaagatggcaaatggagatgcc

SEQ ID NO: 566721 - DNA, 33 bp, Homo sapien
caaggcaagcagttagcagctttcattccttcc

SEQ ID NO: 566722 - DNA, 33 bp, Homo sapien
caaggcaagcagttagtagctttcattccttcc

SEQ ID NO: 566723 - DNA, 33 bp, Homo sapien
gtcattaagaaatctcccccaaagtgctaagac

SEQ ID NO: 566724 - DNA, 33 bp, Homo sapien
gtcattaagaaatctctcccaaagtgctaagac

SEQ ID NO: 566725 - DNA, 33 bp, Homo sapien
gggcagaagtcgcccacacgggtcctgttggag

SEQ ID NO: 566726 - DNA, 33 bp, Homo sapien
gggcagaagtcgcccatacgggtcctgttggag

SEQ ID NO: 566727 - DNA, 33 bp, Homo sapien
tgattaagtaacaccacgtgcagtcgccaggat

SEQ ID NO: 566728 - DNA, 33 bp, Homo sapien
tgattaagtaacaccatgtgcagtcgccaggat

SEQ ID NO: 566729 - DNA, 33 bp, Homo sapien
tggacatgggagtcacacaacccctgtcttcac

SEQ ID NO: 566730 - DNA, 33 bp, Homo sapien
tggacatgggagtcacgcaacccctgtcttcac

SEQ ID NO: 566731 - DNA, 33 bp, Homo sapien
ttatagtacactgttcccttaaatgcagtgcta

SEQ ID NO: 566732 - DNA, 33 bp, Homo sapien
ttatagtacactgttctcttaaatgcagtgcta

SEQ ID NO: 566733 - DNA, 33 bp, Homo sapien
ctgggagtataaaaacaaatcaggtaggaatat

SEQ ID NO: 566734 - DNA, 33 bp, Homo sapien
ctgggagtataaaaacgaatcaggtaggaatat

SEQ ID NO: 566735 - DNA, 33 bp, Homo sapien
ttttcagccatcttaacagaatttggactcttg

SEQ ID NO: 566736 - DNA, 33 bp, Homo sapien
ttttcagccatcttaatagaatttggactcttg

SEQ ID NO: 566737 - DNA, 33 bp, Homo sapien
tgccatgagcctctggaaaaagaagagaggtgt

SEQ ID NO: 566738 - DNA, 33 bp, Homo sapien
tgccatgagcctctggcaaaagaagagaggtgt

SEQ ID NO: 566739 - DNA, 33 bp, Homo sapien
actcatgaattaagcaatcctgccgcagcctcc

SEQ ID NO: 566740 - DNA, 33 bp, Homo sapien
actcatgaattaagcagtcctgccgcagcctcc

SEQ ID NO: 566741 - DNA, 33 bp, Homo sapien
ccacttctgcctaccgaagtgacacgtcacttc

SEQ ID NO: 566742 - DNA, 33 bp, Homo sapien
ccacttctgcctaccggagtgacacgtcacttc

SEQ ID NO: 566743 - DNA, 33 bp, Homo sapien
tgatgttgtgtccacaagtttaaatagctacac

SEQ ID NO: 566744 - DNA, 33 bp, Homo sapien
tgatgttgtgtccacaggtttaaatagctacac

SEQ ID NO: 566745 - DNA, 33 bp, Homo sapien
ggccatagctacagagcagaaaaggtgaattaa

SEQ ID NO: 566746 - DNA, 33 bp, Homo sapien
ggccatagctacagaggagaaaaggtgaattaa

SEQ ID NO: 566747 - DNA, 33 bp, Homo sapien
tggagctatttggagactccatttagtcaaagc

SEQ ID NO: 566748 - DNA, 33 bp, Homo sapien
tggagctatttggagattccatttagtcaaagc

SEQ ID NO: 566749 - DNA, 33 bp, Homo sapien
aaatcataaatcaacacatggaaggtgtacttt

SEQ ID NO: 566750 - DNA, 33 bp, Homo sapien
aaatcataaatcaacatatggaaggtgtacttt

SEQ ID NO: 566751 - DNA, 33 bp, Homo sapien
atgaatgaatcaaaagaaaaatgacaaggaagc

SEQ ID NO: 566752 - DNA, 33 bp, Homo sapien
atgaatgaatcaaaaggaaaatgacaaggaagc

SEQ ID NO: 566753 - DNA, 33 bp, Homo sapien
tatttggagatcaacacatatttgtaagatgag

SEQ ID NO: 566754 - DNA, 33 bp, Homo sapien
tatttggagatcaacagatatttgtaagatgag

SEQ ID NO: 566755 - DNA, 33 bp, Homo sapien
catcatggggcaatgaaaaagagaaaataatgc

SEQ ID NO: 566756 - DNA, 33 bp, Homo sapien
catcatggggcaatgacaaagagaaaataatgc

SEQ ID NO: 566757 - DNA, 33 bp, Homo sapien
ctgtccttgcattccaaaaataaatctcaattg

SEQ ID NO: 566758 - DNA, 33 bp, Homo sapien
ctgtccttgcattccataaataaatctcaattg

SEQ ID NO: 566759 - DNA, 33 bp, Homo sapien
aatagaaataaggatgaagcttttgatttgagg

SEQ ID NO: 566760 - DNA, 33 bp, Homo sapien
aatagaaataaggatggagcttttgatttgagg

SEQ ID NO: 566761 - DNA, 33 bp, Homo sapien
acagcaaaaatatgacacattaatactatctgt

SEQ ID NO: 566762 - DNA, 33 bp, Homo sapien
acagcaaaaatatgacgcattaatactatctgt

SEQ ID NO: 566763 - DNA, 33 bp, Homo sapien
gagatttgttggcccaagatatggtctgtcttg

SEQ ID NO: 566764 - DNA, 33 bp, Homo sapien
gagatttgttggcccaggatatggtctgtcttg

SEQ ID NO: 566765 - DNA, 33 bp, Homo sapien
cccagttttgccactcgctggagccagatcctg

SEQ ID NO: 566766 - DNA, 33 bp, Homo sapien
cccagttttgccactctctggagccagatcctg

SEQ ID NO: 566767 - DNA, 33 bp, Homo sapien
tttctaggattcattcaaaagcacatcttttaa

SEQ ID NO: 566768 - DNA, 33 bp, Homo sapien
tttctaggattcattcgaaagcacatcttttaa

SEQ ID NO: 566769 - DNA, 33 bp, Homo sapien
gcttctgggtaactgaagaccggtgggcccgcc

SEQ ID NO: 566770 - DNA, 33 bp, Homo sapien
gcttctgggtaactgaggaccggtgggcccgcc

SEQ ID NO: 566771 - DNA, 33 bp, Homo sapien
tgagattcacctagcaaaggtttcccatatatc

SEQ ID NO: 566772 - DNA, 33 bp, Homo sapien
tgagattcacctagcagaggtttcccatatatc

SEQ ID NO: 566773 - DNA, 33 bp, Homo sapien
tcctggcaacctccacactgtgcttgtgacacc

SEQ ID NO: 566774 - DNA, 33 bp, Homo sapien
tcctggcaacctccacgctgtgcttgtgacacc

SEQ ID NO: 566775 - DNA, 33 bp, Homo sapien
acatacgacgtggcccacactgcagtgggttct

SEQ ID NO: 566776 - DNA, 33 bp, Homo sapien
acatacgacgtggcccgcactgcagtgggttct

SEQ ID NO: 566777 - DNA, 33 bp, Homo sapien
gtgaacagataagtcacatgcatccacaaataa

SEQ ID NO: 566778 - DNA, 33 bp, Homo sapien
gtgaacagataagtcatatgcatccacaaataa

SEQ ID NO: 566779 - DNA, 33 bp, Homo sapien
ctaaaatctccagacaactttgaaagcccgtct

SEQ ID NO: 566780 - DNA, 33 bp, Homo sapien
ctaaaatctccagacacctttgaaagcccgtct

SEQ ID NO: 566781 - DNA, 33 bp, Homo sapien
tgacctcacaccatcaagaagttgaaaaatcgt

SEQ ID NO: 566782 - DNA, 33 bp, Homo sapien
tgacctcacaccatcacgaagttgaaaaatcgt

SEQ ID NO: 566783 - DNA, 33 bp, Homo sapien
tgggatttctgccaaaataaacagcaccccttg

SEQ ID NO: 566784 - DNA, 33 bp, Homo sapien
tgggatttctgccaaagtaaacagcaccccttg

SEQ ID NO: 566785 - DNA, 33 bp, Homo sapien
tcagagctgtcacaagcctaccagattcaagga

SEQ ID NO: 566786 - DNA, 33 bp, Homo sapien
tcagagctgtcacaaggctaccagattcaagga

SEQ ID NO: 566787 - DNA, 33 bp, Homo sapien
gagttggtgataaatacgcaaccccattttttt

SEQ ID NO: 566788 - DNA, 33 bp, Homo sapien
gagttggtgataaatatgcaaccccattttttt

SEQ ID NO: 566789 - DNA, 33 bp, Homo sapien
gacatctaggcgatgccagtaaatccagaacat

SEQ ID NO: 566790 - DNA, 33 bp, Homo sapien
gacatctaggcgatgctagtaaatccagaacat

SEQ ID NO: 566791 - DNA, 33 bp, Homo sapien
tactcaactttggtaaactaagaatggatgttg

SEQ ID NO: 566792 - DNA, 33 bp, Homo sapien
tactcaactttggtaagctaagaatggatgttg

SEQ ID NO: 566793 - DNA, 33 bp, Homo sapien
cagacagggcgaagacaagtgaactgtgaacat

SEQ ID NO: 566794 - DNA, 33 bp, Homo sapien
cagacagggcgaagacgagtgaactgtgaacat

SEQ ID NO: 566795 - DNA, 33 bp, Homo sapien
accctggatttgcccaacgtctctctctgagaa

SEQ ID NO: 566796 - DNA, 33 bp, Homo sapien
accctggatttgcccagcgtctctctctgagaa

SEQ ID NO: 566797 - DNA, 33 bp, Homo sapien
aagcgtctttccgtaacctctcaaataccccat

SEQ ID NO: 566798 - DNA, 33 bp, Homo sapien
aagcgtctttccgtaatctctcaaataccccat

SEQ ID NO: 566799 - DNA, 33 bp, Homo sapien
atcagaagtaaattcaacactgagaggacagtg

SEQ ID NO: 566800 - DNA, 33 bp, Homo sapien
atcagaagtaaattcaccactgagaggacagtg

SEQ ID NO: 566801 - DNA, 33 bp, Homo sapien
taacctctaccatgcaaactgtaaacaagaatg

SEQ ID NO: 566802 - DNA, 33 bp, Homo sapien
taacctctaccatgcatactgtaaacaagaatg

SEQ ID NO: 566803 - DNA, 33 bp, Homo sapien
agtaaaaagcggagacagcctgtcccattccat

SEQ ID NO: 566804 - DNA, 33 bp, Homo sapien
agtaaaaagcggagacggcctgtcccattccat

SEQ ID NO: 566805 - DNA, 33 bp, Homo sapien
tggtgaaagtctacaacgataagagtcttactt

SEQ ID NO: 566806 - DNA, 33 bp, Homo sapien
tggtgaaagtctacaatgataagagtcttactt

SEQ ID NO: 566807 - DNA, 33 bp, Homo sapien
gacctcacaggagctccattcacaaagaggacc

SEQ ID NO: 566808 - DNA, 33 bp, Homo sapien
gacctcacaggagctctattcacaaagaggacc

SEQ ID NO: 566809 - DNA, 33 bp, Homo sapien
ctgctctaaggtgggtaaattgatatggtcatt

SEQ ID NO: 566810 - DNA, 33 bp, Homo sapien
ctgctctaaggtgggtgaattgatatggtcatt

SEQ ID NO: 566811 - DNA, 33 bp, Homo sapien
acatctgaaaagtgaacagtgctggttctcaca

SEQ ID NO: 566812 - DNA, 33 bp, Homo sapien
acatctgaaaagtgaatagtgctggttctcaca

SEQ ID NO: 566813 - DNA, 33 bp, Homo sapien
cttgattttgagtgctcacacctcgatcttgaa

SEQ ID NO: 566814 - DNA, 33 bp, Homo sapien
cttgattttgagtgcttacacctcgatcttgaa

SEQ ID NO: 566815 - DNA, 33 bp, Homo sapien
ctggaggctatggagccaactcaagacaaaacc

SEQ ID NO: 566816 - DNA, 33 bp, Homo sapien
ctggaggctatggagctaactcaagacaaaacc

SEQ ID NO: 566817 - DNA, 33 bp, Homo sapien
acctacccacacaaaaaaacccgtggacggatg

SEQ ID NO: 566818 - DNA, 33 bp, Homo sapien
acctacccacacaaaacaacccgtggacggatg

SEQ ID NO: 566819 - DNA, 33 bp, Homo sapien
ttggaaatctttaaaacgtatgatagtagaggg

SEQ ID NO: 566820 - DNA, 33 bp, Homo sapien
ttggaaatctttaaaaggtatgatagtagaggg

SEQ ID NO: 566821 - DNA, 33 bp, Homo sapien
ttctttgcaaccttcagtaagaaacattttcta

SEQ ID NO: 566822 - DNA, 33 bp, Homo sapien
ttctttgcaaccttcattaagaaacattttcta

SEQ ID NO: 566823 - DNA, 33 bp, Homo sapien
aaataatggaaaataactccattaacacattgc

SEQ ID NO: 566824 - DNA, 33 bp, Homo sapien
aaataatggaaaataagtccattaacacattgc

SEQ ID NO: 566825 - DNA, 33 bp, Homo sapien
tgggactagggaataaacagtatgccactcaca

SEQ ID NO: 566826 - DNA, 33 bp, Homo sapien
tgggactagggaataagcagtatgccactcaca

SEQ ID NO: 566827 - DNA, 33 bp, Homo sapien
ccagccacgtggtctcacttacaattactcaac

SEQ ID NO: 566828 - DNA, 33 bp, Homo sapien
ccagccacgtggtctcgcttacaattactcaac

SEQ ID NO: 566829 - DNA, 33 bp, Homo sapien
tagccctatacgtcaacgaggtaagcacagaaa

SEQ ID NO: 566830 - DNA, 33 bp, Homo sapien
tagccctatacgtcaatgaggtaagcacagaaa

SEQ ID NO: 566831 - DNA, 33 bp, Homo sapien
actagagttaggcaaaatcaatttcaggttcag

SEQ ID NO: 566832 - DNA, 33 bp, Homo sapien
actagagttaggcaaagtcaatttcaggttcag

SEQ ID NO: 566833 - DNA, 33 bp, Homo sapien; identical to SEQ ID NO: 566831

SEQ ID NO: 566834 - DNA, 33 bp, Homo sapien; identical to SEQ ID NO: 566832

SEQ ID NO: 566835 - DNA, 33 bp, Homo sapien
tgtaggggttttctgaagcatctcaaaactgtc

SEQ ID NO: 566836 - DNA, 33 bp, Homo sapien
tgtaggggttttctgaggcatctcaaaactgtc

SEQ ID NO: 566837 - DNA, 33 bp, Homo sapien
aacttttaaaggaaacgattatgctaagcaaag

SEQ ID NO: 566838 - DNA, 33 bp, Homo sapien
aacttttaaaggaaactattatgctaagcaaag

SEQ ID NO: 566839 - DNA, 33 bp, Homo sapien
gacagtgttgcactcacgcagttggaggattcc

SEQ ID NO: 566840 - DNA, 33 bp, Homo sapien
gacagtgttgcactcaggcagttggaggattcc

SEQ ID NO: 566841 - DNA, 33 bp, Homo sapien
acttcaaagtatactacaatgctgcggtaacaa

SEQ ID NO: 566842 - DNA, 33 bp, Homo sapien
acttcaaagtatactataatgctgcggtaacaa

SEQ ID NO: 566843 - DNA, 33 bp, Homo sapien
tatcaagagagtcagacatccagatacaggagg

SEQ ID NO: 566844 - DNA, 33 bp, Homo sapien
tatcaagagagtcagatatccagatacaggagg

SEQ ID NO: 566845 - DNA, 33 bp, Homo sapien
gttctttggatatttaaccataggtaggattcc

SEQ ID NO: 566846 - DNA, 33 bp, Homo sapien
gttctttggatatttagccataggtaggattcc

SEQ ID NO: 566847 - DNA, 33 bp, Homo sapien
aaaagcaaactgataaacctgttaatttcccat

SEQ ID NO: 566848 - DNA, 33 bp, Homo sapien
aaaagcaaactgataagcctgttaatttcccat

SEQ ID NO: 566849 - DNA, 33 bp, Homo sapien
taaagaaaatccaaccagatccatttctactgt

SEQ ID NO: 566850 - DNA, 33 bp, Homo sapien
taaagaaaatccaaccggatccatttctactgt

SEQ ID NO: 566851 - DNA, 33 bp, Homo sapien
aaggcaaactattttacagtgacagattggtga

SEQ ID NO: 566852 - DNA, 33 bp, Homo sapien
aaggcaaactattttatagtgacagattggtga

SEQ ID NO: 566853 - DNA, 33 bp, Homo sapien
ccctgcggtgctccctcacccgagtgtcgatct

SEQ ID NO: 566854 - DNA, 33 bp, Homo sapien
ccctgcggtgctcccttacccgagtgtcgatct

SEQ ID NO: 566855 - DNA, 33 bp, Homo sapien
atgagacaggaattgcagaggaaatgggacact

SEQ ID NO: 566856 - DNA, 33 bp, Homo sapien
atgagacaggaattgccgaggaaatgggacact

SEQ ID NO: 566857 - DNA, 33 bp, Homo sapien
ggagaagccgctcgcaactcacgcatgcgcatt

SEQ ID NO: 566858 - DNA, 33 bp, Homo sapien
ggagaagccgctcgcacctcacgcatgcgcatt

SEQ ID NO: 566859 - DNA, 33 bp, Homo sapien
taactatactgtccgaaggccaaacccgcagga

SEQ ID NO: 566860 - DNA, 33 bp, Homo sapien
taactatactgtccgatggccaaacccgcagga

SEQ ID NO: 566861 - DNA, 33 bp, Homo sapien
aatgatggtgattgaaagacagtccaaactgtg

SEQ ID NO: 566862 - DNA, 33 bp, Homo sapien
aatgatggtgattgaatgacagtccaaactgtg

SEQ ID NO: 566863 - DNA, 33 bp, Homo sapien
atacaacctcatttctaacgtgggtccactcct

SEQ ID NO: 566864 - DNA, 33 bp, Homo sapien
atacaacctcatttctgacgtgggtccactcct

SEQ ID NO: 566865 - DNA, 33 bp, Homo sapien
atagctgtctcagataagcaagctaccttggtc

SEQ ID NO: 566866 - DNA, 33 bp, Homo sapien
atagctgtctcagataggcaagctaccttggtc

SEQ ID NO: 566867 - DNA, 33 bp, Homo sapien; identical to SEQ ID NO: 566865

SEQ ID NO: 566868 - DNA, 33 bp, Homo sapien; identical to SEQ ID NO: 566866

SEQ ID NO: 566869 - DNA, 33 bp, Homo sapien
cgtcctatcaatgctacgggaaagatccctcaa

SEQ ID NO: 566870 - DNA, 33 bp, Homo sapien
cgtcctatcaatgctatgggaaagatccctcaa

SEQ ID NO: 566871 - DNA, 33 bp, Homo sapien; identical to SEQ ID NO: 566869

SEQ ID NO: 566872 - DNA, 33 bp, Homo sapien; identical to SEQ ID NO: 566870

SEQ ID NO: 566873 - DNA, 33 bp, Homo sapien
acataaggcattttccaatccatcatctcatgg

SEQ ID NO: 566874 - DNA, 33 bp, Homo sapien
acataaggcattttccgatccatcatctcatgg

SEQ ID NO: 566875 - DNA, 33 bp, Homo sapien; identical to SEQ ID NO: 566873

SEQ ID NO: 566876 - DNA, 33 bp, Homo sapien; identical to SEQ ID NO: 566874

SEQ ID NO: 566877 - DNA, 33 bp, Homo sapien
tttagtcaaagatgaacacacaacattattatt

SEQ ID NO: 566878 - DNA, 33 bp, Homo sapien
tttagtcaaagatgaagacacaacattattatt

SEQ ID NO: 566879 - DNA, 33 bp, Homo sapien
actgtaatcttaatgaaataaactgatctctaa

SEQ ID NO: 566880 - DNA, 33 bp, Homo sapien
actgtaatcttaatgatataaactgatctctaa

SEQ ID NO: 566881 - DNA, 33 bp, Homo sapien
gaagactactttaccaaaactgttaacttctag

SEQ ID NO: 566882 - DNA, 33 bp, Homo sapien
gaagactactttaccagaactgttaacttctag

SEQ ID NO: 566883 - DNA, 33 bp, Homo sapien
aaatagtatcaacagaagaatggaattataact

SEQ ID NO: 566884 - DNA, 33 bp, Homo sapien
aaatagtatcaacagaggaatggaattataact

SEQ ID NO: 566885 - DNA, 33 bp, Homo sapien
gaacatgttgctaaaacgtgggaagatgtgcca

SEQ ID NO: 566886 - DNA, 33 bp, Homo sapien
gaacatgttgctaaaatgtgggaagatgtgcca

SEQ ID NO: 566887 - DNA, 33 bp, Homo sapien
atttttaataaatgcaaactttggctcagctaa

SEQ ID NO: 566888 - DNA, 33 bp, Homo sapien
atttttaataaatgcagactttggctcagctaa

SEQ ID NO: 566889 - DNA, 33 bp, Homo sapien; identical to SEQ ID NO: 566887

SEQ ID NO: 566890 - DNA, 33 bp, Homo sapien; identical to SEQ ID NO: 566888

SEQ ID NO: 566891 - DNA, 33 bp, Homo sapien
aagagttaagcttctacggcttttggtaacaaa

SEQ ID NO: 566892 - DNA, 33 bp, Homo sapien
aagagttaagcttctatggcttttggtaacaaa

SEQ ID NO: 566893 - DNA, 33 bp, Homo sapien
tgtttaggacgaaaaaccaccctgcttctctgg

SEQ ID NO: 566894 - DNA, 33 bp, Homo sapien
tgtttaggacgaaaaatcaccctgcttctctgg

SEQ ID NO: 566895 - DNA, 33 bp, Homo sapien; identical to SEQ ID NO: 566893

SEQ ID NO: 566896 - DNA, 33 bp, Homo sapien; identical to SEQ ID NO: 566894

SEQ ID NO: 566897 - DNA, 33 bp, Homo sapien
ctttttgcaaaaagcaagtatacacctatccat

SEQ ID NO: 566898 - DNA, 33 bp, Homo sapien
ctttttgcaaaaagcaggtatacacctatccat

SEQ ID NO: 566899 - DNA, 33 bp, Homo sapien; identical to SEQ ID NO: 566897

SEQ ID NO: 566900 - DNA, 33 bp, Homo sapien; identical to SEQ ID NO: 566898

SEQ ID NO: 566901 - DNA, 33 bp, Homo sapien
acatgacactaattgaatagattcctcagagac

SEQ ID NO: 566902 - DNA, 33 bp, Homo sapien
acatgacactaattgagtagattcctcagagac

SEQ ID NO: 566903 - DNA, 33 bp, Homo sapien; identical to SEQ ID NO: 566901

SEQ ID NO: 566904 - DNA, 33 bp, Homo sapien; identical to SEQ ID NO: 566902

SEQ ID NO: 566905 - DNA, 33 bp, Homo sapien
ccccgccacgtgttgccgaacctgtttaaagcg

SEQ ID NO: 566906 - DNA, 33 bp, Homo sapien
ccccgccacgtgttgctgaacctgtttaaagcg

SEQ ID NO: 566907 - DNA, 33 bp, Homo sapien
gtggaataggatagcacagaaaagacatgggga

SEQ ID NO: 566908 - DNA, 33 bp, Homo sapien
gtggaataggatagcatagaaaagacatgggga

SEQ ID NO: 566909 - DNA, 33 bp, Homo sapien
tccaatgatcagccacaaaaacaggctacctgt

SEQ ID NO: 566910 - DNA, 33 bp, Homo sapien
tccaatgatcagccacgaaaacaggctacctgt

SEQ ID NO: 566911 - DNA, 33 bp, Homo sapien
cctttttcaccataggcccaaacgagctccaat

SEQ ID NO: 566912 - DNA, 33 bp, Homo sapien
cctttttcaccataggtccaaacgagctccaat

SEQ ID NO: 566913 - DNA, 33 bp, Homo sapien
cccagctagtgggataaggcaattaaaagaagt

SEQ ID NO: 566914 - DNA, 33 bp, Homo sapien
cccagctagtgggatacggcaattaaaagaagt

SEQ ID NO: 566915 - DNA, 33 bp, Homo sapien
caggtgtgatagttcacgatggtaatcccaaaa

SEQ ID NO: 566916 - DNA, 33 bp, Homo sapien
caggtgtgatagttcatgatggtaatcccaaaa

SEQ ID NO: 566917 - DNA, 33 bp, Homo sapien
attcatcaggttgaaaacagtctttttgtagta

SEQ ID NO: 566918 - DNA, 33 bp, Homo sapien
attcatcaggttgaaagcagtctttttgtagta

SEQ ID NO: 566919 - DNA, 33 bp, Homo sapien
taaatccctgctgtaaactcacctcccccagca

SEQ ID NO: 566920 - DNA, 33 bp, Homo sapien
taaatccctgctgtaagctcacctcccccagca

SEQ ID NO: 566921 - DNA, 33 bp, Homo sapien
agggagactgagggtacgagatgcagctcccaa

SEQ ID NO: 566922 - DNA, 33 bp, Homo sapien
agggagactgagggtaggagatgcagctcccaa

SEQ ID NO: 566923 - DNA, 33 bp, Homo sapien
gagataaaccttgtggaaaataacaggtttaag

SEQ ID NO: 566924 - DNA, 33 bp, Homo sapien
gagataaaccttgtgggaaataacaggtttaag

SEQ ID NO: 566925 - DNA, 33 bp, Homo sapien
gtccagactaaggaggcacttctggttgtcagg

SEQ ID NO: 566926 - DNA, 33 bp, Homo sapien
gtccagactaaggaggtacttctggttgtcagg

SEQ ID NO: 566927 - DNA, 33 bp, Homo sapien
cgctcaaacacacgcaaaagctttggtctcaat

SEQ ID NO: 566928 - DNA, 33 bp, Homo sapien
cgctcaaacacacgcacaagctttggtctcaat

SEQ ID NO: 566929 - DNA, 33 bp, Homo sapien
tcgtaccatttaattgaaagctctcctaatctc

SEQ ID NO: 566930 - DNA, 33 bp, Homo sapien
tcgtaccatttaattgcaagctctcctaatctc

SEQ ID NO: 566931 - DNA, 33 bp, Homo sapien
ttttcacatggaaatgaaacttacagtacacac

SEQ ID NO: 566932 - DNA, 33 bp, Homo sapien
ttttcacatggaaatggaacttacagtacacac

SEQ ID NO: 566933 - DNA, 33 bp, Homo sapien
catcctctcttggagcagctattcaagctgaaa

SEQ ID NO: 566934 - DNA, 33 bp, Homo sapien
catcctctcttggagcggctattcaagctgaaa

SEQ ID NO: 566935 - DNA, 33 bp, Homo sapien
ttattagtcatatccaaggacagcttagagcat

SEQ ID NO: 566936 - DNA, 33 bp, Homo sapien
ttattagtcatatccagggacagcttagagcat

SEQ ID NO: 566937 - DNA, 33 bp, Homo sapien
acttccacttcaggccagagatctagttttcta

SEQ ID NO: 566938 - DNA, 33 bp, Homo sapien
acttccacttcaggccggagatctagttttcta

SEQ ID NO: 566939 - DNA, 33 bp, Homo sapien
aattgtattagaaagggaagcaatgtgaccgac

SEQ ID NO: 566940 - DNA, 33 bp, Homo sapien
aattgtattagaaaggtaagcaatgtgaccgac

SEQ ID NO: 566941 - DNA, 33 bp, Homo sapien
ctcaactattcccaatcatgaccttctaactct

SEQ ID NO: 566942 - DNA, 33 bp, Homo sapien
ctcaactattcccaattatgaccttctaactct

SEQ ID NO: 566943 - DNA, 33 bp, Homo sapien
tcattcaggagtcagagattagagtaaaaagcc

SEQ ID NO: 566944 - DNA, 33 bp, Homo sapien
tcattcaggagtcagatattagagtaaaaagcc

SEQ ID NO: 566945 - DNA, 33 bp, Homo sapien
tgtgggtgctaattaccgaggataggaagatga

SEQ ID NO: 566946 - DNA, 33 bp, Homo sapien
tgtgggtgctaattactgaggataggaagatga

SEQ ID NO: 566947 - DNA, 33 bp, Homo sapien
acatttaactttcataccaggcttttaagcttc

SEQ ID NO: 566948 - DNA, 33 bp, Homo sapien
acatttaactttcatatcaggcttttaagcttc

SEQ ID NO: 566949 - DNA, 33 bp, Homo sapien
ttagtcatttagtgcacggccttggatccattg

SEQ ID NO: 566950 - DNA, 33 bp, Homo sapien
ttagtcatttagtgcatggccttggatccattg

SEQ ID NO: 566951 - DNA, 33 bp, Homo sapien
gcaggaagaatgcccaatgacaaggctgtttat

SEQ ID NO: 566952 - DNA, 33 bp, Homo sapien
gcaggaagaatgcccagtgacaaggctgtttat

SEQ ID NO: 566953 - DNA, 33 bp, Homo sapien
gaacattttatcactacgcagttatacttttta

SEQ ID NO: 566954 - DNA, 33 bp, Homo sapien
gaacattttatcactatgcagttatacttttta

SEQ ID NO: 566955 - DNA, 33 bp, Homo sapien
ggaatttgggaagttacggagaaaggcctctgg

SEQ ID NO: 566956 - DNA, 33 bp, Homo sapien
ggaatttgggaagttatggagaaaggcctctgg

SEQ ID NO: 566957 - DNA, 33 bp, Homo sapien
cactttttctggttaacacagaatgtcccataa

SEQ ID NO: 566958 - DNA, 33 bp, Homo sapien
cactttttctggttaatacagaatgtcccataa

SEQ ID NO: 566959 - DNA, 33 bp, Homo sapien
gcaaaagttgaaacacaatgaaaatgcaactaa

SEQ ID NO: 566960 - DNA, 33 bp, Homo sapien
gcaaaagttgaaacacgatgaaaatgcaactaa

SEQ ID NO: 566961 - DNA, 33 bp, Homo sapien
agtcctatggtcgtgacaataagtacatacctt

SEQ ID NO: 566962 - DNA, 33 bp, Homo sapien
agtcctatggtcgtgataataagtacatacctt

SEQ ID NO: 566963 - DNA, 33 bp, Homo sapien
gtatacacatatattgaaccaatatcagtttcc

SEQ ID NO: 566964 - DNA, 33 bp, Homo sapien
gtatacacatatattggaccaatatcagtttcc

SEQ ID NO: 566965 - DNA, 33 bp, Homo sapien
ctgattcaaaaaataggatggagtcatctgatt

SEQ ID NO: 566966 - DNA, 33 bp, Homo sapien
ctgattcaaaaaatagtatggagtcatctgatt

SEQ ID NO: 566967 - DNA, 33 bp, Homo sapien
agataaggtaaaaatacctggcctgtgtgaact

SEQ ID NO: 566968 - DNA, 33 bp, Homo sapien
agataaggtaaaaatatctggcctgtgtgaact

SEQ ID NO: 566969 - DNA, 33 bp, Homo sapien
aaagttgaagtaaagccctataccctaccattt

SEQ ID NO: 566970 - DNA, 33 bp, Homo sapien
aaagttgaagtaaagctctataccctaccattt

SEQ ID NO: 566971 - DNA, 33 bp, Homo sapien
tttaaagctcgattgaatcaaattaaaacttcg

SEQ ID NO: 566972 - DNA, 33 bp, Homo sapien
tttaaagctcgattgattcaaattaaaacttcg

SEQ ID NO: 566973 - DNA, 33 bp, Homo sapien
tcagtggcttaaaacagcaatcctttatatttg

SEQ ID NO: 566974 - DNA, 33 bp, Homo sapien
tcagtggcttaaaacatcaatcctttatatttg

SEQ ID NO: 566975 - DNA, 33 bp, Homo sapien
cttatacacaaggccaacagatagatcaggaaa

SEQ ID NO: 566976 - DNA, 33 bp, Homo sapien
cttatacacaaggccagcagatagatcaggaaa

SEQ ID NO: 566977 - DNA, 33 bp, Homo sapien
tcatacaaccaaacaactcctctctttggtatt

SEQ ID NO: 566978 - DNA, 33 bp, Homo sapien
tcatacaaccaaacaattcctctctttggtatt

SEQ ID NO: 566979 - DNA, 33 bp, Homo sapien
aaaactgtgaaacaaaatgccttgattgcttcg

SEQ ID NO: 566980 - DNA, 33 bp, Homo sapien
aaaactgtgaaacaaattgccttgattgcttcg

SEQ ID NO: 566981 - DNA, 33 bp, Homo sapien
gcttttagaatgctacagaggaaaataataggg

SEQ ID NO: 566982 - DNA, 33 bp, Homo sapien
gcttttagaatgctacggaggaaaataataggg

SEQ ID NO: 566983 - DNA, 33 bp, Homo sapien
ggtcctagcttccagcgcagagtctggcacaga

SEQ ID NO: 566984 - DNA, 33 bp, Homo sapien
ggtcctagcttccagctcagagtctggcacaga

SEQ ID NO: 566985 - DNA, 33 bp, Homo sapien
ctcagaaaattctacccccccttccgagctcaa

SEQ ID NO: 566986 - DNA, 33 bp, Homo sapien
ctcagaaaattctacctccccttccgagctcaa

SEQ ID NO: 566987 - DNA, 33 bp, Homo sapien
tttttttttcagccatcagtaatagaaacagta

SEQ ID NO: 566988 - DNA, 33 bp, Homo sapien
tttttttttcagccatgagtaatagaaacagta

SEQ ID NO: 566989 - DNA, 33 bp, Homo sapien
ggcttagttagaagccagacatttctgatttaa

SEQ ID NO: 566990 - DNA, 33 bp, Homo sapien
ggcttagttagaagccggacatttctgatttaa

SEQ ID NO: 566991 - DNA, 33 bp, Homo sapien
gaggcctttgagagtacaactggacacccttca

SEQ ID NO: 566992 - DNA, 33 bp, Homo sapien
gaggcctttgagagtagaactggacacccttca

SEQ ID NO: 566993 - DNA, 33 bp, Homo sapien
ctgcactaaaatgcaaacttcacgaaggcaagg

SEQ ID NO: 566994 - DNA, 33 bp, Homo sapien
ctgcactaaaatgcaagcttcacgaaggcaagg

SEQ ID NO: 566995 - DNA, 33 bp, Homo sapien
aggagagagccctggacgaggactaggcatacc

SEQ ID NO: 566996 - DNA, 33 bp, Homo sapien
aggagagagccctggatgaggactaggcatacc

SEQ ID NO: 566997 - DNA, 33 bp, Homo sapien
tatttataagtcacccacaaaggagaccagagt

SEQ ID NO: 566998 - DNA, 33 bp, Homo sapien
tatttataagtcacccgcaaaggagaccagagt

SEQ ID NO: 566999 - DNA, 33 bp, Homo sapien
tccttcttgcctctaacgtgcccatgctgccta

SEQ ID NO: 567000 - DNA, 33 bp, Homo sapien
tccttcttgcctctaatgtgcccatgctgccta

SEQ ID NO: 567001 - DNA, 33 bp, Homo sapien
ccccttgcctttttcaccagtacatgggtacct

SEQ ID NO: 567002 - DNA, 33 bp, Homo sapien
ccccttgcctttttcagcagtacatgggtacct

SEQ ID NO: 567003 - DNA, 33 bp, Homo sapien
tctttcctcaccagataaaccccgtgaggcagg

SEQ ID NO: 567004 - DNA, 33 bp, Homo sapien
tctttcctcaccagatcaaccccgtgaggcagg

SEQ ID NO: 567005 - DNA, 33 bp, Homo sapien
cctgtcaagaagaaagaatcccggtcaggcaga

SEQ ID NO: 567006 - DNA, 33 bp, Homo sapien
cctgtcaagaagaaaggatcccggtcaggcaga

SEQ ID NO: 567007 - DNA, 33 bp, Homo sapien
cacatttgcagggccactgaacaggctgaaagg

SEQ ID NO: 567008 - DNA, 33 bp, Homo sapien
cacatttgcagggccattgaacaggctgaaagg

SEQ ID NO: 567009 - DNA, 33 bp, Homo sapien
ttctgatggtaatgaactcagtgaataagagca

SEQ ID NO: 567010 - DNA, 33 bp, Homo sapien
ttctgatggtaatgaattcagtgaataagagca

SEQ ID NO: 567011 - DNA, 33 bp, Homo sapien
ccttcacaactcagtcacctcacctacctctgt

SEQ ID NO: 567012 - DNA, 33 bp, Homo sapien
ccttcacaactcagtcgcctcacctacctctgt

SEQ ID NO: 567013 - DNA, 33 bp, Homo sapien
tgcaagatacttcaaccctggagtatcttgtac

SEQ ID NO: 567014 - DNA, 33 bp, Homo sapien
tgcaagatacttcaactctggagtatcttgtac

SEQ ID NO: 567015 - DNA, 33 bp, Homo sapien
gatgagttcataggtaaaacaaaccaccgtggc

SEQ ID NO: 567016 - DNA, 33 bp, Homo sapien
gatgagttcataggtacaacaaaccaccgtggc

SEQ ID NO: 567017 - DNA, 33 bp, Homo sapien; identical to SEQ ID NO: 567015

SEQ ID NO: 567018 - DNA, 33 bp, Homo sapien; identical to SEQ ID NO: 567016

SEQ ID NO: 567019 - DNA, 33 bp, Homo sapien
caaggtccttcttccaatacttcaagaggcttc

SEQ ID NO: 567020 - DNA, 33 bp, Homo sapien
caaggtccttcttccagtacttcaagaggcttc

SEQ ID NO: 567021 - DNA, 33 bp, Homo sapien
ggagtgaccagttaaaggacagtgttggcaaag

SEQ ID NO: 567022 - DNA, 33 bp, Homo sapien
ggagtgaccagttaaatgacagtgttggcaaag

SEQ ID NO: 567023 - DNA, 33 bp, Homo sapien
aaatgatactggcttgcaccaaataatagcagt

SEQ ID NO: 567024 - DNA, 33 bp, Homo sapien
aaatgatactggcttggaccaaataatagcagt

SEQ ID NO: 567025 - DNA, 33 bp, Homo sapien
tttcacttgatacatgaaagtgtttatcttata

SEQ ID NO: 567026 - DNA, 33 bp, Homo sapien
tttcacttgatacatggaagtgtttatcttata

SEQ ID NO: 567027 - DNA, 33 bp, Homo sapien
tcagggttggggccctcagaatttgcacttcta

SEQ ID NO: 567028 - DNA, 33 bp, Homo sapien
tcagggttggggcccttagaatttgcacttcta

SEQ ID NO: 567029 - DNA, 33 bp, Homo sapien
agatgagcccttcccaagaaacctaatctcatt

SEQ ID NO: 567030 - DNA, 33 bp, Homo sapien
agatgagcccttcccaggaaacctaatctcatt

SEQ ID NO: 567031 - DNA, 33 bp, Homo sapien
gcccaatctaggtccaaatccaggattcaccac

SEQ ID NO: 567032 - DNA, 33 bp, Homo sapien
gcccaatctaggtccagatccaggattcaccac

SEQ ID NO: 567033 - DNA, 33 bp, Homo sapien
gtcaaccattatcccactggatctctgcagagg

SEQ ID NO: 567034 - DNA, 33 bp, Homo sapien
gtcaaccattatcccattggatctctgcagagg

SEQ ID NO: 567035 - DNA, 33 bp, Homo sapien
tgtccttacctgcctacgctggacttcagtgcg

SEQ ID NO: 567036 - DNA, 33 bp, Homo sapien
tgtccttacctgcctatgctggacttcagtgcg

SEQ ID NO: 567037 - DNA, 33 bp, Homo sapien
gtccagggagtaataaagtgacctagacatgct

SEQ ID NO: 567038 - DNA, 33 bp, Homo sapien
gtccagggagtaataaggtgacctagacatgct

SEQ ID NO: 567039 - DNA, 33 bp, Homo sapien
ttacccgatgccaccaaagtagccagtcggtgc

SEQ ID NO: 567040 - DNA, 33 bp, Homo sapien
ttacccgatgccaccacagtagccagtcggtgc

SEQ ID NO: 567041 - DNA, 33 bp, Homo sapien
ttcaaaatttcaacgaaactgaatgagtcccgc

SEQ ID NO: 567042 - DNA, 33 bp, Homo sapien
ttcaaaatttcaacgatactgaatgagtcccgc

SEQ ID NO: 567043 - DNA, 33 bp, Homo sapien
ttttttactacagagaacttggaacctgtttca

SEQ ID NO: 567044 - DNA, 33 bp, Homo sapien
ttttttactacagagagcttggaacctgtttca

SEQ ID NO: 567045 - DNA, 33 bp, Homo sapien
cataatcaaataagaacctacttcaagtgctat

SEQ ID NO: 567046 - DNA, 33 bp, Homo sapien
cataatcaaataagaagctacttcaagtgctat

SEQ ID NO: 567047 - DNA, 33 bp, Homo sapien
taaactccaatgctacaaatcacactaagtttc

SEQ ID NO: 567048 - DNA, 33 bp, Homo sapien
taaactccaatgctacgaatcacactaagtttc

SEQ ID NO: 567049 - DNA, 33 bp, Homo sapien
accccaaggcctagaaagatatctgatgtgttt

SEQ ID NO: 567050 - DNA, 33 bp, Homo sapien
accccaaggcctagaaggatatctgatgtgttt

SEQ ID NO: 567051 - DNA, 33 bp, Homo sapien
gtgcctttgaaagccactccaagaaagacattc

SEQ ID NO: 567052 - DNA, 33 bp, Homo sapien
gtgcctttgaaagccagtccaagaaagacattc

SEQ ID NO: 567053 - DNA, 33 bp, Homo sapien
catatctgtatctctaataatttgtgaacaagt

SEQ ID NO: 567054 - DNA, 33 bp, Homo sapien
catatctgtatctctattaatttgtgaacaagt

SEQ ID NO: 567055 - DNA, 33 bp, Homo sapien
ttgaccaattcctaccgggatccacaccaccaa

SEQ ID NO: 567056 - DNA, 33 bp, Homo sapien
ttgaccaattcctacctggatccacaccaccaa

SEQ ID NO: 567057 - DNA, 33 bp, Homo sapien
tttggccagctgttaactagaagctgctgaccc

SEQ ID NO: 567058 - DNA, 33 bp, Homo sapien
tttggccagctgttaagtagaagctgctgaccc

SEQ ID NO: 567059 - DNA, 33 bp, Homo sapien
aattactactccgtaccacaaagcaatgcccat

SEQ ID NO: 567060 - DNA, 33 bp, Homo sapien
aattactactccgtactacaaagcaatgcccat

SEQ ID NO: 567061 - DNA, 33 bp, Homo sapien
aaaccagtcacttcaccccatggcctcggctcc

SEQ ID NO: 567062 - DNA, 33 bp, Homo sapien
aaaccagtcacttcactccatggcctcggctcc

SEQ ID NO: 567063 - DNA, 33 bp, Homo sapien
cccagttaattgagccacaggtaggtactgaac

SEQ ID NO: 567064 - DNA, 33 bp, Homo sapien
cccagttaattgagccgcaggtaggtactgaac

SEQ ID NO: 567065 - DNA, 33 bp, Homo sapien
atgtgtgagggttaggaaaagaaaggatcaagg

SEQ ID NO: 567066 - DNA, 33 bp, Homo sapien
atgtgtgagggttaggtaaagaaaggatcaagg

SEQ ID NO: 567067 - DNA, 33 bp, Homo sapien
gctgacggatattgctaaagtgtccggtacaca

SEQ ID NO: 567068 - DNA, 33 bp, Homo sapien
gctgacggatattgctgaagtgtccggtacaca

SEQ ID NO: 567069 - DNA, 33 bp, Homo sapien
tgctgcaatgtagaatcacgcatgtgcacatgt

SEQ ID NO: 567070 - DNA, 33 bp, Homo sapien
tgctgcaatgtagaattacgcatgtgcacatgt

SEQ ID NO: 567071 - DNA, 33 bp, Homo sapien
tttctcctgcttcctcgcgaagggatagtcaga

SEQ ID NO: 567072 - DNA, 33 bp, Homo sapien
tttctcctgcttcctctcgaagggatagtcaga

SEQ ID NO: 567073 - DNA, 33 bp, Homo sapien
ctgacaatttgtgacactgatcctgtcccgggc

SEQ ID NO: 567074 - DNA, 33 bp, Homo sapien
ctgacaatttgtgacattgatcctgtcccgggc

SEQ ID NO: 567075 - DNA, 33 bp, Homo sapien
caggggtatcagcgaccgggatgcgaaggtagg

SEQ ID NO: 567076 - DNA, 33 bp, Homo sapien
caggggtatcagcgactgggatgcgaaggtagg

SEQ ID NO: 567077 - DNA, 33 bp, Homo sapien
aacatatataacaaaggattggtgctcaaggaa

SEQ ID NO: 567078 - DNA, 33 bp, Homo sapien
aacatatataacaaagtattggtgctcaaggaa

SEQ ID NO: 567079 - DNA, 33 bp, Homo sapien
gagatagatccacgtacgcatggtcaattgaat

SEQ ID NO: 567080 - DNA, 33 bp, Homo sapien
gagatagatccacgtatgcatggtcaattgaat

SEQ ID NO: 567081 - DNA, 33 bp, Homo sapien
atatttgttggataaacgcatgaataagttggt

SEQ ID NO: 567082 - DNA, 33 bp, Homo sapien
atatttgttggataaatgcatgaataagttggt

SEQ ID NO: 567083 - DNA, 33 bp, Homo sapien
tcttgctatagtgacacataatgctgcaaagga

SEQ ID NO: 567084 - DNA, 33 bp, Homo sapien
tcttgctatagtgacatataatgctgcaaagga

SEQ ID NO: 567085 - DNA, 33 bp, Homo sapien
tcagtaagggcacgccactccatttagaataca

SEQ ID NO: 567086 - DNA, 33 bp, Homo sapien
tcagtaagggcacgccgctccatttagaataca

SEQ ID NO: 567087 - DNA, 33 bp, Homo sapien
ccaagagcctgcaaacgcgtaactctgctgccc

SEQ ID NO: 567088 - DNA, 33 bp, Homo sapien
ccaagagcctgcaaactcgtaactctgctgccc

SEQ ID NO: 567089 - DNA, 33 bp, Homo sapien
tgaaattcttgataaacgcaagcactctagatt

SEQ ID NO: 567090 - DNA, 33 bp, Homo sapien
tgaaattcttgataaatgcaagcactctagatt

SEQ ID NO: 567091 - DNA, 33 bp, Homo sapien
tggcagggatgctgtagcagggactcttgcttc

SEQ ID NO: 567092 - DNA, 33 bp, Homo sapien
tggcagggatgctgtatcagggactcttgcttc

SEQ ID NO: 567093 - DNA, 33 bp, Homo sapien
gttccatgggctccagaaatgctccaaacagag

SEQ ID NO: 567094 - DNA, 33 bp, Homo sapien
gttccatgggctccagcaatgctccaaacagag

SEQ ID NO: 567095 - DNA, 33 bp, Homo sapien
gtttacctggaaagaacgtgagctccttgcagg

SEQ ID NO: 567096 - DNA, 33 bp, Homo sapien
gtttacctggaaagaatgtgagctccttgcagg

SEQ ID NO: 567097 - DNA, 33 bp, Homo sapien
actgcattttgtgtaacggttacaaacacagct

SEQ ID NO: 567098 - DNA, 33 bp, Homo sapien
actgcattttgtgtaatggttacaaacacagct

SEQ ID NO: 567099 - DNA, 33 bp, Homo sapien
aatgcaaggtcgactcaatggggcctggtccac

SEQ ID NO: 567100 - DNA, 33 bp, Homo sapien
aatgcaaggtcgactcgatggggcctggtccac

SEQ ID NO: 567101 - DNA, 33 bp, Homo sapien
ggtagggatccttacaacagttcctgctgtgca

SEQ ID NO: 567102 - DNA, 33 bp, Homo sapien
ggtagggatccttacaccagttcctgctgtgca

SEQ ID NO: 567103 - DNA, 33 bp, Homo sapien
tctttggttggttacaagtgcattctctgcctg

SEQ ID NO: 567104 - DNA, 33 bp, Homo sapien
tctttggttggttacacgtgcattctctgcctg

SEQ ID NO: 567105 - DNA, 33 bp, Homo sapien
gaaaacgcagggtgtaaacaacatgaatggggg

SEQ ID NO: 567106 - DNA, 33 bp, Homo sapien
gaaaacgcagggtgtagacaacatgaatggggg

SEQ ID NO: 567107 - DNA, 33 bp, Homo sapien
gaacttaagaacaacactgcctgctttgcaggg

SEQ ID NO: 567108 - DNA, 33 bp, Homo sapien
gaacttaagaacaacattgcctgctttgcaggg

SEQ ID NO: 567109 - DNA, 33 bp, Homo sapien
aaaatatcatataagacgctagactcctactac

SEQ ID NO: 567110 - DNA, 33 bp, Homo sapien
aaaatatcatataagatgctagactcctactac

SEQ ID NO: 567111 - DNA, 33 bp, Homo sapien
gggttcatcttcaaccgcttttgtccaaaccct

SEQ ID NO: 567112 - DNA, 33 bp, Homo sapien
gggttcatcttcaacctcttttgtccaaaccct

SEQ ID NO: 567113 - DNA, 33 bp, Homo sapien
gtgcacaaatcagtgaaatcaactacattcaca

SEQ ID NO: 567114 - DNA, 33 bp, Homo sapien
gtgcacaaatcagtgacatcaactacattcaca

SEQ ID NO: 567115 - DNA, 33 bp, Homo sapien
aagacatcacaagaaaaggaaactacggacaac

SEQ ID NO: 567116 - DNA, 33 bp, Homo sapien
aagacatcacaagaaatggaaactacggacaac

SEQ ID NO: 567117 - DNA, 33 bp, Homo sapien
aacaaaacaaggcaaacttccattccaagttgg

SEQ ID NO: 567118 - DNA, 33 bp, Homo sapien
aacaaaacaaggcaaagttccattccaagttgg

SEQ ID NO: 567119 - DNA, 33 bp, Homo sapien
tgtgtgtgtgtgtttacgggaaagagggctgtg

SEQ ID NO: 567120 - DNA, 33 bp, Homo sapien
tgtgtgtgtgtgtttaggggaaagagggctgtg

SEQ ID NO: 567121 - DNA, 33 bp, Homo sapien
tttgtctcatctgatacgtgatttgaaaccagt

SEQ ID NO: 567122 - DNA, 33 bp, Homo sapien
tttgtctcatctgataggtgatttgaaaccagt

SEQ ID NO: 567123 - DNA, 33 bp, Homo sapien
gctcatattgttcatacattgtgaacgtctctt

SEQ ID NO: 567124 - DNA, 33 bp, Homo sapien
gctcatattgttcatatattgtgaacgtctctt

SEQ ID NO: 567125 - DNA, 33 bp, Homo sapien
agtaagagaatctacacgctattgtgagaatta

SEQ ID NO: 567126 - DNA, 33 bp, Homo sapien
agtaagagaatctacatgctattgtgagaatta

SEQ ID NO: 567127 - DNA, 33 bp, Homo sapien
aagagagatgttaactaagcaaagaaataggag

SEQ ID NO: 567128 - DNA, 33 bp, Homo sapien
aagagagatgttaactgagcaaagaaataggag

SEQ ID NO: 567129 - DNA, 33 bp, Homo sapien
cacagcgggagaggaacgaagaaacctgctgcc

SEQ ID NO: 567130 - DNA, 33 bp, Homo sapien
cacagcgggagaggaatgaagaaacctgctgcc

SEQ ID NO: 567131 - DNA, 33 bp, Homo sapien
taattaaaaagcacacggtgatgatcaagggcc

SEQ ID NO: 567132 - DNA, 33 bp, Homo sapien
taattaaaaagcacactgtgatgatcaagggcc

SEQ ID NO: 567133 - DNA, 33 bp, Homo sapien
tggaacttagtgttcaaacaaaattagacacag

SEQ ID NO: 567134 - DNA, 33 bp, Homo sapien
tggaacttagtgttcagacaaaattagacacag

SEQ ID NO: 567135 - DNA, 33 bp, Homo sapien
ggaagggtaggggaggaacttaccgctcctgat

SEQ ID NO: 567136 - DNA, 33 bp, Homo sapien
ggaagggtaggggaggcacttaccgctcctgat

SEQ ID NO: 567137 - DNA, 33 bp, Homo sapien
cccaatcttgtcagaacaaaactacatgatata

SEQ ID NO: 567138 - DNA, 33 bp, Homo sapien
cccaatcttgtcagaataaaactacatgatata

SEQ ID NO: 567139 - DNA, 33 bp, Homo sapien
ttcccttcttttcttcacataatgtgccacatg

SEQ ID NO: 567140 - DNA, 33 bp, Homo sapien
ttcccttcttttcttcgcataatgtgccacatg

SEQ ID NO: 567141 - DNA, 33 bp, Homo sapien
ttaggttaaacatacacctgacttcctctcaag

SEQ ID NO: 567142 - DNA, 33 bp, Homo sapien
ttaggttaaacatacatctgacttcctctcaag

SEQ ID NO: 567143 - DNA, 33 bp, Homo sapien
ttgcaagcctttaccaaggtttttatatctagt

SEQ ID NO: 567144 - DNA, 33 bp, Homo sapien
ttgcaagcctttaccatggtttttatatctagt

SEQ ID NO: 567145 - DNA, 33 bp, Homo sapien
ggctttcattgtttaactcccctcctcctttgc

SEQ ID NO: 567146 - DNA, 33 bp, Homo sapien
ggctttcattgtttaagtcccctcctcctttgc

SEQ ID NO: 567147 - DNA, 33 bp, Homo sapien
tcccaggctcggggaactgaacctttcccacac

SEQ ID NO: 567148 - DNA, 33 bp, Homo sapien
tcccaggctcggggaattgaacctttcccacac

SEQ ID NO: 567149 - DNA, 33 bp, Homo sapien
acttaataattttccaatagacatcagaaataa

SEQ ID NO: 567150 - DNA, 33 bp, Homo sapien
acttaataattttccagtagacatcagaaataa

SEQ ID NO: 567151 - DNA, 33 bp, Homo sapien
ggcccatgaggtgatacaaaagctaatactgga

SEQ ID NO: 567152 - DNA, 33 bp, Homo sapien
ggcccatgaggtgatagaaaagctaatactgga

SEQ ID NO: 567153 - DNA, 33 bp, Homo sapien
tctgttacaccttgaacctcttgccattttcta

SEQ ID NO: 567154 - DNA, 33 bp, Homo sapien
tctgttacaccttgaatctcttgccattttcta

SEQ ID NO: 567155 - DNA, 33 bp, Homo sapien
ataaatttgggctgaccgtaaaacaatgagatt

SEQ ID NO: 567156 - DNA, 33 bp, Homo sapien
ataaatttgggctgactgtaaaacaatgagatt

SEQ ID NO: 567157 - DNA, 33 bp, Homo sapien
cactgtacccagcctcacctttggttttttgtt

SEQ ID NO: 567158 - DNA, 33 bp, Homo sapien
cactgtacccagcctcgcctttggttttttgtt

SEQ ID NO: 567159 - DNA, 33 bp, Homo sapien
gtcaatagtagttgctcaacaaatatgttttgc

SEQ ID NO: 567160 - DNA, 33 bp, Homo sapien
gtcaatagtagttgctgaacaaatatgttttgc

SEQ ID NO: 567161 - DNA, 33 bp, Homo sapien
gctctgtatttaccgaaggaatgaactccaagg

SEQ ID NO: 567162 - DNA, 33 bp, Homo sapien
gctctgtatttaccgagggaatgaactccaagg

SEQ ID NO: 567163 - DNA, 33 bp, Homo sapien
ttgctgggtttccttaaagatggctactttctc

SEQ ID NO: 567164 - DNA, 33 bp, Homo sapien
ttgctgggtttccttagagatggctactttctc

SEQ ID NO: 567165 - DNA, 33 bp, Homo sapien
gagagaagagactagcaaaaagctgcagagagg

SEQ ID NO: 567166 - DNA, 33 bp, Homo sapien
gagagaagagactagcgaaaagctgcagagagg

SEQ ID NO: 567167 - DNA, 33 bp, Homo sapien
aggtcaagatcagtaacaacttcaaggagccat

SEQ ID NO: 567168 - DNA, 33 bp, Homo sapien
aggtcaagatcagtaataacttcaaggagccat

SEQ ID NO: 567169 - DNA, 33 bp, Homo sapien
tttatctcaaaaacaaaaggtaatatgtccatg

SEQ ID NO: 567170 - DNA, 33 bp, Homo sapien
tttatctcaaaaacaacaggtaatatgtccatg

SEQ ID NO: 567171 - DNA, 33 bp, Homo sapien
cgttctcctcctcgacaatgagttttgtgtgtt

SEQ ID NO: 567172 - DNA, 33 bp, Homo sapien
cgttctcctcctcgacgatgagttttgtgtgtt

SEQ ID NO: 567173 - DNA, 33 bp, Homo sapien
acagcaggttacaaaacgtgacaattcagtgca

SEQ ID NO: 567174 - DNA, 33 bp, Homo sapien
acagcaggttacaaaatgtgacaattcagtgca

SEQ ID NO: 567175 - DNA, 33 bp, Homo sapien
taaaggtcacagaatacagatcaacacactaac

SEQ ID NO: 567176 - DNA, 33 bp, Homo sapien
taaaggtcacagaatatagatcaacacactaac

SEQ ID NO: 567177 - DNA, 33 bp, Homo sapien
cttggtaaagcatttaacacctaatttttcttt

SEQ ID NO: 567178 - DNA, 33 bp, Homo sapien
cttggtaaagcatttagcacctaatttttcttt

SEQ ID NO: 567179 - DNA, 33 bp, Homo sapien
tatagttttaatgataaaaaggagatgatgaat

SEQ ID NO: 567180 - DNA, 33 bp, Homo sapien
tatagttttaatgatagaaaggagatgatgaat

SEQ ID NO: 567181 - DNA, 33 bp, Homo sapien
gagggtgactagctctaaccttggaaaacctta

SEQ ID NO: 567182 - DNA, 33 bp, Homo sapien
gagggtgactagctctgaccttggaaaacctta

SEQ ID NO: 567183 - DNA, 33 bp, Homo sapien
ccatgttatttaaccaagctgccaactctcata

SEQ ID NO: 567184 - DNA, 33 bp, Homo sapien
ccatgttatttaaccaggctgccaactctcata

SEQ ID NO: 567185 - DNA, 33 bp, Homo sapien
atcctcaccttagaaccgtgttttacggctgtg

SEQ ID NO: 567186 - DNA, 33 bp, Homo sapien
atcctcaccttagaactgtgttttacggctgtg

SEQ ID NO: 567187 - DNA, 33 bp, Homo sapien
ggctccctctacagccacgagtgcgaagtacaa

SEQ ID NO: 567188 - DNA, 33 bp, Homo sapien
ggctccctctacagccgcgagtgcgaagtacaa

SEQ ID NO: 567189 - DNA, 33 bp, Homo sapien
tcctaataatggcaaaccagagtcccatggcca

SEQ ID NO: 567190 - DNA, 33 bp, Homo sapien
tcctaataatggcaaatcagagtcccatggcca

SEQ ID NO: 567191 - DNA, 33 bp, Homo sapien
gtttaggtatggtgcccaaagtcatccatctag

SEQ ID NO: 567192 - DNA, 33 bp, Homo sapien
gtttaggtatggtgccgaaagtcatccatctag

SEQ ID NO: 567193 - DNA, 33 bp, Homo sapien
cagaaagtaccacaaacgcgtcagttcagagcc

SEQ ID NO: 567194 - DNA, 33 bp, Homo sapien
cagaaagtaccacaaatgcgtcagttcagagcc

SEQ ID NO: 567195 - DNA, 33 bp, Homo sapien
ggtgaaagaggcacccaaaagctggagtgagga

SEQ ID NO: 567196 - DNA, 33 bp, Homo sapien
ggtgaaagaggcacccgaaagctggagtgagga

SEQ ID NO: 567197 - DNA, 33 bp, Homo sapien
cactgtgggccaaacacggaccgagggctttcc

SEQ ID NO: 567198 - DNA, 33 bp, Homo sapien
cactgtgggccaaacatggaccgagggctttcc

SEQ ID NO: 567199 - DNA, 33 bp, Homo sapien
tctttttaacagtctacgggtacttgattaatt

SEQ ID NO: 567200 - DNA, 33 bp, Homo sapien
tctttttaacagtctatgggtacttgattaatt

SEQ ID NO: 567201 - DNA, 33 bp, Homo sapien
ctccaggcatatcagcaaaggcatctggtgaca

SEQ ID NO: 567202 - DNA, 33 bp, Homo sapien
ctccaggcatatcagcgaaggcatctggtgaca

SEQ ID NO: 567203 - DNA, 33 bp, Homo sapien
actagttcctcctagcactaaaaatgaattttg

SEQ ID NO: 567204 - DNA, 33 bp, Homo sapien
actagttcctcctagcgctaaaaatgaattttg

SEQ ID NO: 567205 - DNA, 33 bp, Homo sapien
cagaaatctggtcacaatcacggtggttggggc

SEQ ID NO: 567206 - DNA, 33 bp, Homo sapien
cagaaatctggtcacactcacggtggttggggc

SEQ ID NO: 567207 - DNA, 33 bp, Homo sapien
atgtatgtggaggagacgcaaggctgcctgtag

SEQ ID NO: 567208 - DNA, 33 bp, Homo sapien
atgtatgtggaggagatgcaaggctgcctgtag

SEQ ID NO: 567209 - DNA, 33 bp, Homo sapien
aaggaattcaatagaaccttgtcaattaggatg

SEQ ID NO: 567210 - DNA, 33 bp, Homo sapien
aaggaattcaatagaagcttgtcaattaggatg

SEQ ID NO: 567211 - DNA, 33 bp, Homo sapien
gaggaagactgtctcaaaaacaaccctgtcctc

SEQ ID NO: 567212 - DNA, 33 bp, Homo sapien
gaggaagactgtctcagaaacaaccctgtcctc

SEQ ID NO: 567213 - DNA, 33 bp, Homo sapien
gaagtgggaagctcgcagcctactgagaaggtg

SEQ ID NO: 567214 - DNA, 33 bp, Homo sapien
gaagtgggaagctcgcggcctactgagaaggtg

SEQ ID NO: 567215 - DNA, 33 bp, Homo sapien
cagctgaaacctcaagaagattctgggcaccgg

SEQ ID NO: 567216 - DNA, 33 bp, Homo sapien
cagctgaaacctcaaggagattctgggcaccgg

SEQ ID NO: 567217 - DNA, 33 bp, Homo sapien
aggtcacgttggttggcaaaggtgtctgagcct

SEQ ID NO: 567218 - DNA, 33 bp, Homo sapien
aggtcacgttggttggtaaaggtgtctgagcct

SEQ ID NO: 567219 - DNA, 33 bp, Homo sapien
taccagctgtaggaacactcttcttagaactcc

SEQ ID NO: 567220 - DNA, 33 bp, Homo sapien
taccagctgtaggaacgctcttcttagaactcc

SEQ ID NO: 567221 - DNA, 33 bp, Homo sapien
gccactgctcccaaccaagattttctatatata

SEQ ID NO: 567222 - DNA, 33 bp, Homo sapien
gccactgctcccaacctagattttctatatata

SEQ ID NO: 567223 - DNA, 33 bp, Homo sapien
tcgagggtgagatgaactaaaagactggaatgt

SEQ ID NO: 567224 - DNA, 33 bp, Homo sapien
tcgagggtgagatgaagtaaaagactggaatgt

SEQ ID NO: 567225 - DNA, 33 bp, Homo sapien
tggaccgtgggcttcaagtgtgttattaacccc

SEQ ID NO: 567226 - DNA, 33 bp, Homo sapien
tggaccgtgggcttcaggtgtgttattaacccc

SEQ ID NO: 567227 - DNA, 33 bp, Homo sapien
ttcaattcgctctgcacgtactgagcacctgct

SEQ ID NO: 567228 - DNA, 33 bp, Homo sapien
ttcaattcgctctgcatgtactgagcacctgct

SEQ ID NO: 567229 - DNA, 33 bp, Homo sapien
acatactacacatacaactttgggggttttaag

SEQ ID NO: 567230 - DNA, 33 bp, Homo sapien
acatactacacatacagctttgggggttttaag

SEQ ID NO: 567231 - DNA, 33 bp, Homo sapien
gagtgacagaacaagaacctagctcaaaaaata

SEQ ID NO: 567232 - DNA, 33 bp, Homo sapien
gagtgacagaacaagatcctagctcaaaaaata

SEQ ID NO: 567233 - DNA, 33 bp, Homo sapien
ttcctgcatgactgataataggatacactgggg

SEQ ID NO: 567234 - DNA, 33 bp, Homo sapien
ttcctgcatgactgatgataggatacactgggg

SEQ ID NO: 567235 - DNA, 33 bp, Homo sapien
tggtaggacttaggaagatttgatggtcaaggc

SEQ ID NO: 567236 - DNA, 33 bp, Homo sapien
tggtaggacttaggaatatttgatggtcaaggc

SEQ ID NO: 567237 - DNA, 33 bp, Homo sapien
agagaaatgggccaaacgactcaggtaagttgc

SEQ ID NO: 567238 - DNA, 33 bp, Homo sapien
agagaaatgggccaaatgactcaggtaagttgc

SEQ ID NO: 567239 - DNA, 33 bp, Homo sapien
aattgacctgtttaaactcatgtagacaggagt

SEQ ID NO: 567240 - DNA, 33 bp, Homo sapien
aattgacctgtttaaagtcatgtagacaggagt

SEQ ID NO: 567241 - DNA, 33 bp, Homo sapien
gatgcttgcataagataaactcagggctgggca

SEQ ID NO: 567242 - DNA, 33 bp, Homo sapien
gatgcttgcataagatgaactcagggctgggca

SEQ ID NO: 567243 - DNA, 33 bp, Homo sapien
acttagaacttgtaacaacaggaaggttctaag

SEQ ID NO: 567244 - DNA, 33 bp, Homo sapien
acttagaacttgtaacgacaggaaggttctaag

SEQ ID NO: 567245 - DNA, 33 bp, Homo sapien
agcacagcaactggaccatggtaagagctcagt

SEQ ID NO: 567246 - DNA, 33 bp, Homo sapien
agcacagcaactggactatggtaagagctcagt

SEQ ID NO: 567247 - DNA, 33 bp, Homo sapien
cctgcaagccttattgaaaagttcattttctcc

SEQ ID NO: 567248 - DNA, 33 bp, Homo sapien
cctgcaagccttattggaaagttcattttctcc

SEQ ID NO: 567249 - DNA, 33 bp, Homo sapien
tcaataattgatgttgcattatgcaggtttctt

SEQ ID NO: 567250 - DNA, 33 bp, Homo sapien
tcaataattgatgttgtattatgcaggtttctt

SEQ ID NO: 567251 - DNA, 33 bp, Homo sapien
taaaactggggtttgaaagaaatattgggcttt

SEQ ID NO: 567252 - DNA, 33 bp, Homo sapien
taaaactggggtttgagagaaatattgggcttt

SEQ ID NO: 567253 - DNA, 33 bp, Homo sapien
tctccagccagctcccacttccaacagttcttc

SEQ ID NO: 567254 - DNA, 33 bp, Homo sapien
tctccagccagctcccgcttccaacagttcttc

SEQ ID NO: 567255 - DNA, 33 bp, Homo sapien
gtagcaagtcttagaaaatataattgtttgaaa

SEQ ID NO: 567256 - DNA, 33 bp, Homo sapien
gtagcaagtcttagaagatataattgtttgaaa

SEQ ID NO: 567257 - DNA, 33 bp, Homo sapien
ccttctatacaaagtaaaatgtaataatggaca

SEQ ID NO: 567258 - DNA, 33 bp, Homo sapien
ccttctatacaaagtacaatgtaataatggaca

SEQ ID NO: 567259 - DNA, 33 bp, Homo sapien
ataacatgatggccaccggattgggcctcccaa

SEQ ID NO: 567260 - DNA, 33 bp, Homo sapien
ataacatgatggccactggattgggcctcccaa

SEQ ID NO: 567261 - DNA, 33 bp, Homo sapien
ctgatcagagtatccaatccagtggcaatcccc

SEQ ID NO: 567262 - DNA, 33 bp, Homo sapien
ctgatcagagtatccagtccagtggcaatcccc

SEQ ID NO: 567263 - DNA, 33 bp, Homo sapien
tccttttaaaggacacaaagccaccagcagtgt

SEQ ID NO: 567264 - DNA, 33 bp, Homo sapien
tccttttaaaggacaccaagccaccagcagtgt

SEQ ID NO: 567265 - DNA, 33 bp, Homo sapien
taaaaagtgtaataaacgctgcctcggctggtc

SEQ ID NO: 567266 - DNA, 33 bp, Homo sapien
taaaaagtgtaataaatgctgcctcggctggtc

SEQ ID NO: 567267 - DNA, 33 bp, Homo sapien
aatgtcctaccctccacatatgttgaatctgat

SEQ ID NO: 567268 - DNA, 33 bp, Homo sapien
aatgtcctaccctccagatatgttgaatctgat

SEQ ID NO: 567269 - DNA, 33 bp, Homo sapien
tctattccaagctcctcactttaaaatagacag

SEQ ID NO: 567270 - DNA, 33 bp, Homo sapien
tctattccaagctccttactttaaaatagacag

SEQ ID NO: 567271 - DNA, 33 bp, Homo sapien
cgtctgtaaacacagaacagtagccagttttca

SEQ ID NO: 567272 - DNA, 33 bp, Homo sapien
cgtctgtaaacacagagcagtagccagttttca

SEQ ID NO: 567273 - DNA, 33 bp, Homo sapien
ccagtgtattacactgaaagtaagctccagtca

SEQ ID NO: 567274 - DNA, 33 bp, Homo sapien
ccagtgtattacactgtaagtaagctccagtca

SEQ ID NO: 567275 - DNA, 33 bp, Homo sapien
ttgatcagttccccaagatctgtatgtctggaa

SEQ ID NO: 567276 - DNA, 33 bp, Homo sapien
ttgatcagttccccaatatctgtatgtctggaa

SEQ ID NO: 567277 - DNA, 33 bp, Homo sapien
ggcttagaagggcaaccgacatcgtgagtgctc

SEQ ID NO: 567278 - DNA, 33 bp, Homo sapien
ggcttagaagggcaactgacatcgtgagtgctc

SEQ ID NO: 567279 - DNA, 33 bp, Homo sapien
agccatcttgtgtacaatgctgcaccaaatacc

SEQ ID NO: 567280 - DNA, 33 bp, Homo sapien
agccatcttgtgtacagtgctgcaccaaatacc

SEQ ID NO: 567281 - DNA, 33 bp, Homo sapien
attatttagttcaataaagttgtcatacatttg

SEQ ID NO: 567282 - DNA, 33 bp, Homo sapien
attatttagttcaatagagttgtcatacatttg

SEQ ID NO: 567283 - DNA, 33 bp, Homo sapien
tgaactccttgaaggaagtgtgtaggtctctca

SEQ ID NO: 567284 - DNA, 33 bp, Homo sapien
tgaactccttgaaggaggtgtgtaggtctctca

SEQ ID NO: 567285 - DNA, 33 bp, Homo sapien
acatgcaacagagttacaagcctcttcaagacc

SEQ ID NO: 567286 - DNA, 33 bp, Homo sapien
acatgcaacagagttataagcctcttcaagacc

SEQ ID NO: 567287 - DNA, 33 bp, Homo sapien
ggctgcagtaagctataaatggaccattacact

SEQ ID NO: 567288 - DNA, 33 bp, Homo sapien
ggctgcagtaagctatcaatggaccattacact

SEQ ID NO: 567289 - DNA, 33 bp, Homo sapien
tattcctttaccagccacagaaataaaaaataa

SEQ ID NO: 567290 - DNA, 33 bp, Homo sapien
tattcctttaccagccgcagaaataaaaaataa

SEQ ID NO: 567291 - DNA, 33 bp, Homo sapien
ctacacatactaccagaagtttgtagtttgatc

SEQ ID NO: 567292 - DNA, 33 bp, Homo sapien
ctacacatactaccagcagtttgtagtttgatc

SEQ ID NO: 567293 - DNA, 33 bp, Homo sapien
cagagcagtattaacacctagttggttcacctg

SEQ ID NO: 567294 - DNA, 33 bp, Homo sapien
cagagcagtattaacatctagttggttcacctg

SEQ ID NO: 567295 - DNA, 33 bp, Homo sapien; identical to SEQ ID NO: 567293

SEQ ID NO: 567296 - DNA, 33 bp, Homo sapien; identical to SEQ ID NO: 567294

SEQ ID NO: 567297 - DNA, 33 bp, Homo sapien
ctgaaagtatgtttcaaagtcagttaacatgat

SEQ ID NO: 567298 - DNA, 33 bp, Homo sapien
ctgaaagtatgtttcagagtcagttaacatgat

SEQ ID NO: 567299 - DNA, 33 bp, Homo sapien
atcctacaacacactacctctgcccatttaact

SEQ ID NO: 567300 - DNA, 33 bp, Homo sapien
atcctacaacacactatctctgcccatttaact

SEQ ID NO: 567301 - DNA, 33 bp, Homo sapien
caagaggcattatttacggcacaagttcttcag

SEQ ID NO: 567302 - DNA, 33 bp, Homo sapien
caagaggcattatttatggcacaagttcttcag

SEQ ID NO: 567303 - DNA, 33 bp, Homo sapien
tgtatcctcagaattcagaagggcattccttca

SEQ ID NO: 567304 - DNA, 33 bp, Homo sapien
tgtatcctcagaattcggaagggcattccttca

SEQ ID NO: 567305 - DNA, 33 bp, Homo sapien
tattttgtaagataaacgtctttcaccaggaga

SEQ ID NO: 567306 - DNA, 33 bp, Homo sapien
tattttgtaagataaatgtctttcaccaggaga

SEQ ID NO: 567307 - DNA, 33 bp, Homo sapien
tggggtgcctaagacacggtatggagcccgcac

SEQ ID NO: 567308 - DNA, 33 bp, Homo sapien
tggggtgcctaagacatggtatggagcccgcac

SEQ ID NO: 567309 - DNA, 33 bp, Homo sapien
tttccctggaactcacacatcatgtaatccaca

SEQ ID NO: 567310 - DNA, 33 bp, Homo sapien
tttccctggaactcacgcatcatgtaatccaca

SEQ ID NO: 567311 - DNA, 33 bp, Homo sapien
gtcatgcagatggagacacctcaagtttgaggc

SEQ ID NO: 567312 - DNA, 33 bp, Homo sapien
gtcatgcagatggagagacctcaagtttgaggc

SEQ ID NO: 567313 - DNA, 33 bp, Homo sapien
cattgtcttcaccgccagaaccacctggggagc

SEQ ID NO: 567314 - DNA, 33 bp, Homo sapien
cattgtcttcaccgccggaaccacctggggagc

SEQ ID NO: 567315 - DNA, 33 bp, Homo sapien
tgtttagattgcagcacctaggaagcgtgaggt

SEQ ID NO: 567316 - DNA, 33 bp, Homo sapien
tgtttagattgcagcatctaggaagcgtgaggt

SEQ ID NO: 567317 - DNA, 33 bp, Homo sapien
actgaacccagggagtaaatccactttttgcat

SEQ ID NO: 567318 - DNA, 33 bp, Homo sapien
actgaacccagggagttaatccactttttgcat

SEQ ID NO: 567319 - DNA, 33 bp, Homo sapien
ctggataatttatgacaaaaaagggtttaattg

SEQ ID NO: 567320 - DNA, 33 bp, Homo sapien
ctggataatttatgaccaaaaagggtttaattg

SEQ ID NO: 567321 - DNA, 33 bp, Homo sapien
gaggattctgggagccaactcagaggaggatac

SEQ ID NO: 567322 - DNA, 33 bp, Homo sapien
gaggattctgggagccgactcagaggaggatac

SEQ ID NO: 567323 - DNA, 33 bp, Homo sapien
agagatccaaaatttaggtacaagggtattcat

SEQ ID NO: 567324 - DNA, 33 bp, Homo sapien
agagatccaaaatttatgtacaagggtattcat

SEQ ID NO: 567325 - DNA, 33 bp, Homo sapien
ctgaaacataatgcaacatagcaaaagctttcc

SEQ ID NO: 567326 - DNA, 33 bp, Homo sapien
ctgaaacataatgcaagatagcaaaagctttcc

SEQ ID NO: 567327 - DNA, 33 bp, Homo sapien
agaatgtatgtgaaaaaaatgtttaatacatct

SEQ ID NO: 567328 - DNA, 33 bp, Homo sapien
agaatgtatgtgaaaagaatgtttaatacatct

SEQ ID NO: 567329 - DNA, 33 bp, Homo sapien
aatgacattctcttcacactaaaacgaactagc

SEQ ID NO: 567330 - DNA, 33 bp, Homo sapien
aatgacattctcttcatactaaaacgaactagc

SEQ ID NO: 567331 - DNA, 33 bp, Homo sapien
gtagacatttctgaggcacagtgtgctgttttg

SEQ ID NO: 567332 - DNA, 33 bp, Homo sapien
gtagacatttctgaggtacagtgtgctgttttg

SEQ ID NO: 567333 - DNA, 33 bp, Homo sapien
aaaatcacctctcctacgaagccttccttactt

SEQ ID NO: 567334 - DNA, 33 bp, Homo sapien
aaaatcacctctcctatgaagccttccttactt

SEQ ID NO: 567335 - DNA, 33 bp, Homo sapien
cagctttgtcctcagaaagaagccacccttgac

SEQ ID NO: 567336 - DNA, 33 bp, Homo sapien
cagctttgtcctcagagagaagccacccttgac

SEQ ID NO: 567337 - DNA, 33 bp, Homo sapien
ggcagctagctgggagcccactggagacatagc

SEQ ID NO: 567338 - DNA, 33 bp, Homo sapien
ggcagctagctgggagtccactggagacatagc

SEQ ID NO: 567339 - DNA, 33 bp, Homo sapien
aaaccactgtgctggccgactttacactttcta

SEQ ID NO: 567340 - DNA, 33 bp, Homo sapien
aaaccactgtgctggctgactttacactttcta

SEQ ID NO: 567341 - DNA, 33 bp, Homo sapien
caagcttttcagagccaagataatcttcagaga

SEQ ID NO: 567342 - DNA, 33 bp, Homo sapien
caagcttttcagagccgagataatcttcagaga

SEQ ID NO: 567343 - DNA, 33 bp, Homo sapien
ttgcagactggaaaaaactatctgtgctgggca

SEQ ID NO: 567344 - DNA, 33 bp, Homo sapien
ttgcagactggaaaaagctatctgtgctgggca

SEQ ID NO: 567345 - DNA, 33 bp, Homo sapien
gcaaacagcatgcctacggagaaagagagtgac

SEQ ID NO: 567346 - DNA, 33 bp, Homo sapien
gcaaacagcatgcctatggagaaagagagtgac

SEQ ID NO: 567347 - DNA, 33 bp, Homo sapien
ttgtgctcctgagtcacgattaagtgtttattg

SEQ ID NO: 567348 - DNA, 33 bp, Homo sapien
ttgtgctcctgagtcatgattaagtgtttattg

SEQ ID NO: 567349 - DNA, 33 bp, Homo sapien
gggatgataagattcacagtcgcattttacaat

SEQ ID NO: 567350 - DNA, 33 bp, Homo sapien
gggatgataagattcatagtcgcattttacaat

SEQ ID NO: 567351 - DNA, 33 bp, Homo sapien
catcccagatctcaaccggctcctgacagcaat

SEQ ID NO: 567352 - DNA, 33 bp, Homo sapien
catcccagatctcaactggctcctgacagcaat

SEQ ID NO: 567353 - DNA, 33 bp, Homo sapien
ggctgcaatgacccctcaagcctggtacctcca

SEQ ID NO: 567354 - DNA, 33 bp, Homo sapien
ggctgcaatgaccccttaagcctggtacctcca

SEQ ID NO: 567355 - DNA, 33 bp, Homo sapien
tttgagttcacagctacgcacacacacttagga

SEQ ID NO: 567356 - DNA, 33 bp, Homo sapien
tttgagttcacagctatgcacacacacttagga

SEQ ID NO: 567357 - DNA, 33 bp, Homo sapien
ggagggtgcaagcccacgatgctgcctggatgt

SEQ ID NO: 567358 - DNA, 33 bp, Homo sapien
ggagggtgcaagcccatgatgctgcctggatgt

SEQ ID NO: 567359 - DNA, 33 bp, Homo sapien
ttggttaattaattcactcatcctacttttatt

SEQ ID NO: 567360 - DNA, 33 bp, Homo sapien
ttggttaattaattcattcatcctacttttatt

SEQ ID NO: 567361 - DNA, 33 bp, Homo sapien
ggagcctgtctaccccaacgcagcagctcagat

SEQ ID NO: 567362 - DNA, 33 bp, Homo sapien
ggagcctgtctacccccacgcagcagctcagat

SEQ ID NO: 567363 - DNA, 33 bp, Homo sapien
ctgagccaagcctccccaagaagctcatgatgg

SEQ ID NO: 567364 - DNA, 33 bp, Homo sapien
ctgagccaagcctccctaagaagctcatgatgg

SEQ ID NO: 567365 - DNA, 33 bp, Homo sapien
cctttggcctccaagaactctctcagggcagga

SEQ ID NO: 567366 - DNA, 33 bp, Homo sapien
cctttggcctccaagatctctctcagggcagga

SEQ ID NO: 567367 - DNA, 33 bp, Homo sapien
catcggaaaattgcaaggcctagtgatcacctg

SEQ ID NO: 567368 - DNA, 33 bp, Homo sapien
catcggaaaattgcaatgcctagtgatcacctg

SEQ ID NO: 567369 - DNA, 33 bp, Homo sapien
aaagatatcagtctggacagagggcacagcaag

SEQ ID NO: 567370 - DNA, 33 bp, Homo sapien
aaagatatcagtctgggcagagggcacagcaag

SEQ ID NO: 567371 - DNA, 33 bp, Homo sapien
cccctttcaagtaccaactgatctgtcacctcc

SEQ ID NO: 567372 - DNA, 33 bp, Homo sapien
cccctttcaagtaccagctgatctgtcacctcc

SEQ ID NO: 567373 - DNA, 33 bp, Homo sapien
cacctcttgccagtgacggtcatgcctgtggac

SEQ ID NO: 567374 - DNA, 33 bp, Homo sapien
cacctcttgccagtgatggtcatgcctgtggac

SEQ ID NO: 567375 - DNA, 33 bp, Homo sapien
cctgtgcctaaattcccgcactggtgcacctgc

SEQ ID NO: 567376 - DNA, 33 bp, Homo sapien
cctgtgcctaaattcctgcactggtgcacctgc

SEQ ID NO: 567377 - DNA, 33 bp, Homo sapien
tccagatctgttgaccaaatcaaagtctgcaaa

SEQ ID NO: 567378 - DNA, 33 bp, Homo sapien
tccagatctgttgaccgaatcaaagtctgcaaa

SEQ ID NO: 567379 - DNA, 33 bp, Homo sapien
cagtgactggaactgaagaaaactcattcatgt

SEQ ID NO: 567380 - DNA, 33 bp, Homo sapien
cagtgactggaactgaggaaaactcattcatgt

SEQ ID NO: 567381 - DNA, 33 bp, Homo sapien
gacattggagccttgccccgccaccgagctgcg

SEQ ID NO: 567382 - DNA, 33 bp, Homo sapien
gacattggagccttgctccgccaccgagctgcg

SEQ ID NO: 567383 - DNA, 33 bp, Homo sapien
gccctgaggctacagacactaataaaaataaca

SEQ ID NO: 567384 - DNA, 33 bp, Homo sapien
gccctgaggctacagagactaataaaaataaca

SEQ ID NO: 567385 - DNA, 33 bp, Homo sapien
gtccctcacttaccaccgctctatagctgagtt

SEQ ID NO: 567386 - DNA, 33 bp, Homo sapien
gtccctcacttaccactgctctatagctgagtt

SEQ ID NO: 567387 - DNA, 33 bp, Homo sapien
caagtcaggaatatggaagggtcgggcttgctg

SEQ ID NO: 567388 - DNA, 33 bp, Homo sapien
caagtcaggaatatggcagggtcgggcttgctg

SEQ ID NO: 567389 - DNA, 33 bp, Homo sapien
acatcatgctgggagacgacccgaagtgaagag

SEQ ID NO: 567390 - DNA, 33 bp, Homo sapien
acatcatgctgggagatgacccgaagtgaagag

SEQ ID NO: 567391 - DNA, 33 bp, Homo sapien
aaaaaatgtccacaaacaagagtgttcatagta

SEQ ID NO: 567392 - DNA, 33 bp, Homo sapien
aaaaaatgtccacaaataagagtgttcatagta

SEQ ID NO: 567393 - DNA, 33 bp, Homo sapien
gctgtgcaggagtgaaagtttcccttgcaggct

SEQ ID NO: 567394 - DNA, 33 bp, Homo sapien
gctgtgcaggagtgaaggtttcccttgcaggct

SEQ ID NO: 567395 - DNA, 33 bp, Homo sapien
ttcctgtagggcatgcagcaggtgggactcacc

SEQ ID NO: 567396 - DNA, 33 bp, Homo sapien
ttcctgtagggcatgcggcaggtgggactcacc

SEQ ID NO: 567397 - DNA, 33 bp, Homo sapien
cttcattttccccaaccgtacaatgcccacctt

SEQ ID NO: 567398 - DNA, 33 bp, Homo sapien
cttcattttccccaactgtacaatgcccacctt

SEQ ID NO: 567399 - DNA, 33 bp, Homo sapien
aaagaggttttgaaaacgagcattcattgccaa

SEQ ID NO: 567400 - DNA, 33 bp, Homo sapien
aaagaggttttgaaaatgagcattcattgccaa

SEQ ID NO: 567401 - DNA, 33 bp, Homo sapien
cgtgtaagaacgtgcaagtctgagcggcctgcg

SEQ ID NO: 567402 - DNA, 33 bp, Homo sapien
cgtgtaagaacgtgcatgtctgagcggcctgcg

SEQ ID NO: 567403 - DNA, 33 bp, Homo sapien
ataaatcaggaagtcacatgtaaatttttcagt

SEQ ID NO: 567404 - DNA, 33 bp, Homo sapien
ataaatcaggaagtcatatgtaaatttttcagt

SEQ ID NO: 567405 - DNA, 33 bp, Homo sapien
gtcagtttagggactcagagaatgttctagaac

SEQ ID NO: 567406 - DNA, 33 bp, Homo sapien
gtcagtttagggactctgagaatgttctagaac

SEQ ID NO: 567407 - DNA, 33 bp, Homo sapien
aagagctccccaccaacgtacctttgttttcaa

SEQ ID NO: 567408 - DNA, 33 bp, Homo sapien
aagagctccccaccaatgtacctttgttttcaa

SEQ ID NO: 567409 - DNA, 33 bp, Homo sapien
ccatatcaatattccacaagaaaaagggtcatg

SEQ ID NO: 567410 - DNA, 33 bp, Homo sapien
ccatatcaatattccataagaaaaagggtcatg

SEQ ID NO: 567411 - DNA, 33 bp, Homo sapien
tcatctttcccagggacgttgggtaccgagggc

SEQ ID NO: 567412 - DNA, 33 bp, Homo sapien
tcatctttcccagggatgttgggtaccgagggc

SEQ ID NO: 567413 - DNA, 33 bp, Homo sapien
caacttgaaccccaaactttctgattcccgtgg

SEQ ID NO: 567414 - DNA, 33 bp, Homo sapien
caacttgaaccccaaattttctgattcccgtgg

SEQ ID NO: 567415 - DNA, 33 bp, Homo sapien
taagggaggtaacataagaaaaggctcaaggcc

SEQ ID NO: 567416 - DNA, 33 bp, Homo sapien
taagggaggtaacatatgaaaaggctcaaggcc

SEQ ID NO: 567417 - DNA, 33 bp, Homo sapien
tatgagtcaggaaagaactcaatcatatgggaa

SEQ ID NO: 567418 - DNA, 33 bp, Homo sapien
tatgagtcaggaaagatctcaatcatatgggaa

SEQ ID NO: 567419 - DNA, 33 bp, Homo sapien
gtcacctggacttagaagtgggcatcaaatacc

SEQ ID NO: 567420 - DNA, 33 bp, Homo sapien
gtcacctggacttagaggtgggcatcaaatacc

SEQ ID NO: 567421 - DNA, 33 bp, Homo sapien
gctgcctaaatttggaggacaatagggaaggga

SEQ ID NO: 567422 - DNA, 33 bp, Homo sapien
gctgcctaaatttggatgacaatagggaaggga

SEQ ID NO: 567423 - DNA, 33 bp, Homo sapien
gagaacacaggaatgacgacactgcagaaatgg

SEQ ID NO: 567424 - DNA, 33 bp, Homo sapien
gagaacacaggaatgatgacactgcagaaatgg

SEQ ID NO: 567425 - DNA, 33 bp, Homo sapien
ttatgcttgaaagtccaatgttgattaaactca

SEQ ID NO: 567426 - DNA, 33 bp, Homo sapien
ttatgcttgaaagtccgatgttgattaaactca

SEQ ID NO: 567427 - DNA, 33 bp, Homo sapien
acccatcaacagtagacggaaaaacgacattgc

SEQ ID NO: 567428 - DNA, 33 bp, Homo sapien
acccatcaacagtagatggaaaaacgacattgc

SEQ ID NO: 567429 - DNA, 33 bp, Homo sapien
aacactgaagcgtcatcagaattccttcagaaa

SEQ ID NO: 567430 - DNA, 33 bp, Homo sapien
aacactgaagcgtcattagaattccttcagaaa

SEQ ID NO: 567431 - DNA, 33 bp, Homo sapien
ctttgtatgctaacaccgtaatttccaactgat

SEQ ID NO: 567432 - DNA, 33 bp, Homo sapien
ctttgtatgctaacactgtaatttccaactgat

SEQ ID NO: 567433 - DNA, 33 bp, Homo sapien
cataaagaaatattacggattattgcaagttga

SEQ ID NO: 567434 - DNA, 33 bp, Homo sapien
cataaagaaatattactgattattgcaagttga

SEQ ID NO: 567435 - DNA, 33 bp, Homo sapien
aagaattgtcagcaaacgctaagaataaccaaa

SEQ ID NO: 567436 - DNA, 33 bp, Homo sapien
aagaattgtcagcaaatgctaagaataaccaaa

SEQ ID NO: 567437 - DNA, 33 bp, Homo sapien
aaaagtgagttgtgccaatggcttgagaccaaa

SEQ ID NO: 567438 - DNA, 33 bp, Homo sapien
aaaagtgagttgtgccgatggcttgagaccaaa

SEQ ID NO: 567439 - DNA, 33 bp, Homo sapien
gagattattcccaaacggttacattgcagctat

SEQ ID NO: 567440 - DNA, 33 bp, Homo sapien
gagattattcccaaactgttacattgcagctat

SEQ ID NO: 567441 - DNA, 33 bp, Homo sapien
ggagatttgggaaatgaaatgaaagcacagtga

SEQ ID NO: 567442 - DNA, 33 bp, Homo sapien
ggagatttgggaaatgtaatgaaagcacagtga

SEQ ID NO: 567443 - DNA, 33 bp, Homo sapien
caatggagatgaatcgaaaggacccacacagcc

SEQ ID NO: 567444 - DNA, 33 bp, Homo sapien
caatggagatgaatcggaaggacccacacagcc

SEQ ID NO: 567445 - DNA, 33 bp, Homo sapien
ctgggcatgaatactcgctctctgctggttgct

SEQ ID NO: 567446 - DNA, 33 bp, Homo sapien
ctgggcatgaatactctctctctgctggttgct

SEQ ID NO: 567447 - DNA, 33 bp, Homo sapien
gagtggatgaagatgcagatcagtggacatatc

SEQ ID NO: 567448 - DNA, 33 bp, Homo sapien
gagtggatgaagatgcggatcagtggacatatc

SEQ ID NO: 567449 - DNA, 33 bp, Homo sapien
cccattgacttaccgacgacctgctgaatgaca

SEQ ID NO: 567450 - DNA, 33 bp, Homo sapien
cccattgacttaccgaggacctgctgaatgaca

SEQ ID NO: 567451 - DNA, 33 bp, Homo sapien
agactaaggctcagtcaataactggcatcaaag

SEQ ID NO: 567452 - DNA, 33 bp, Homo sapien
agactaaggctcagtcgataactggcatcaaag

SEQ ID NO: 567453 - DNA, 33 bp, Homo sapien
ttgccgattttgccaaacagccatctcattact

SEQ ID NO: 567454 - DNA, 33 bp, Homo sapien
ttgccgattttgccaagcagccatctcattact

SEQ ID NO: 567455 - DNA, 33 bp, Homo sapien
acagctctagtgcctaacaaaggtgcaagcaaa

SEQ ID NO: 567456 - DNA, 33 bp, Homo sapien
acagctctagtgcctagcaaaggtgcaagcaaa

SEQ ID NO: 567457 - DNA, 33 bp, Homo sapien
agcaaataacccatgacgaatgaatgactggat

SEQ ID NO: 567458 - DNA, 33 bp, Homo sapien
agcaaataacccatgatgaatgaatgactggat

SEQ ID NO: 567459 - DNA, 33 bp, Homo sapien
cttggtgaaaaagaagccagagctggtcccagg

SEQ ID NO: 567460 - DNA, 33 bp, Homo sapien
cttggtgaaaaagaagtcagagctggtcccagg

SEQ ID NO: 567461 - DNA, 33 bp, Homo sapien
tttattggatgctgaacatggtggtgaaatgac

SEQ ID NO: 567462 - DNA, 33 bp, Homo sapien
tttattggatgctgaatatggtggtgaaatgac

SEQ ID NO: 567463 - DNA, 33 bp, Homo sapien
gagagtcccacactgcaagggtgcagcttaaaa

SEQ ID NO: 567464 - DNA, 33 bp, Homo sapien
gagagtcccacactgctagggtgcagcttaaaa

SEQ ID NO: 567465 - DNA, 33 bp, Homo sapien
attgagtagtgccttcaatggtgtatcaggcct

SEQ ID NO: 567466 - DNA, 33 bp, Homo sapien
attgagtagtgccttcgatggtgtatcaggcct

SEQ ID NO: 567467 - DNA, 33 bp, Homo sapien
agcccatgatctgggacgaaaagtaagtatgca

SEQ ID NO: 567468 - DNA, 33 bp, Homo sapien
agcccatgatctgggatgaaaagtaagtatgca

SEQ ID NO: 567469 - DNA, 33 bp, Homo sapien
cattaagaagatccaaactcccccatgctttga

SEQ ID NO: 567470 - DNA, 33 bp, Homo sapien
cattaagaagatccaacctcccccatgctttga

SEQ ID NO: 567471 - DNA, 33 bp, Homo sapien
atgctgactttgacctaaataattaaataatgt

SEQ ID NO: 567472 - DNA, 33 bp, Homo sapien
atgctgactttgacctgaataattaaataatgt

SEQ ID NO: 567473 - DNA, 33 bp, Homo sapien
ccaactccctgataaaggctccctcctgggagc

SEQ ID NO: 567474 - DNA, 33 bp, Homo sapien
ccaactccctgataaatgctccctcctgggagc

SEQ ID NO: 567475 - DNA, 33 bp, Homo sapien
catgaactctgagaaacgacctcaaacagggaa

SEQ ID NO: 567476 - DNA, 33 bp, Homo sapien
catgaactctgagaaaggacctcaaacagggaa

SEQ ID NO: 567477 - DNA, 33 bp, Homo sapien
tgctgacacttccagaacatgaccacatataac

SEQ ID NO: 567478 - DNA, 33 bp, Homo sapien
tgctgacacttccagagcatgaccacatataac

SEQ ID NO: 567479 - DNA, 33 bp, Homo sapien
ttggctctatcagaccaaacaagaggggaaaat

SEQ ID NO: 567480 - DNA, 33 bp, Homo sapien
ttggctctatcagaccgaacaagaggggaaaat

SEQ ID NO: 567481 - DNA, 33 bp, Homo sapien
tctagagacaaaatagaaaggacttaagcatct

SEQ ID NO: 567482 - DNA, 33 bp, Homo sapien
tctagagacaaaataggaaggacttaagcatct

SEQ ID NO: 567483 - DNA, 33 bp, Homo sapien
tagtcctcactcagccccatgccagaagtatca

SEQ ID NO: 567484 - DNA, 33 bp, Homo sapien
tagtcctcactcagcctcatgccagaagtatca

SEQ ID NO: 567485 - DNA, 33 bp, Homo sapien
ttgagtccgagggttaaggcatatatccactgg

SEQ ID NO: 567486 - DNA, 33 bp, Homo sapien
ttgagtccgagggttagggcatatatccactgg

SEQ ID NO: 567487 - DNA, 33 bp, Homo sapien
atgcacaacacttcgaagctttgtctccacaaa

SEQ ID NO: 567488 - DNA, 33 bp, Homo sapien
atgcacaacacttcgacgctttgtctccacaaa

SEQ ID NO: 567489 - DNA, 33 bp, Homo sapien
aagcacttgttatataaagagattcttggtgct

SEQ ID NO: 567490 - DNA, 33 bp, Homo sapien
aagcacttgttatatacagagattcttggtgct

SEQ ID NO: 567491 - DNA, 33 bp, Homo sapien
ccggcctcaaaccagacggtgtaagctttcatt

SEQ ID NO: 567492 - DNA, 33 bp, Homo sapien
ccggcctcaaaccagagggtgtaagctttcatt

SEQ ID NO: 567493 - DNA, 33 bp, Homo sapien
cccagtggtggggataaataaatgcctgattac

SEQ ID NO: 567494 - DNA, 33 bp, Homo sapien
cccagtggtggggatacataaatgcctgattac

SEQ ID NO: 567495 - DNA, 33 bp, Homo sapien
aggctgagtgtgaggcaagttgtccagagatgc

SEQ ID NO: 567496 - DNA, 33 bp, Homo sapien
aggctgagtgtgaggcgagttgtccagagatgc

SEQ ID NO: 567497 - DNA, 33 bp, Homo sapien
ggtctcctggttcttcgcatgcaatgaagactt

SEQ ID NO: 567498 - DNA, 33 bp, Homo sapien
ggtctcctggttcttctcatgcaatgaagactt

SEQ ID NO: 567499 - DNA, 33 bp, Homo sapien
ttcttcagcacttgcacgtttaacccttctcat

SEQ ID NO: 567500 - DNA, 33 bp, Homo sapien
ttcttcagcacttgcatgtttaacccttctcat

SEQ ID NO: 567501 - DNA, 33 bp, Homo sapien
cactagtaatagctaacactgctgaacaatttc

SEQ ID NO: 567502 - DNA, 33 bp, Homo sapien
cactagtaatagctaatactgctgaacaatttc

SEQ ID NO: 567503 - DNA, 33 bp, Homo sapien
cacatccttccagatccacctcctgaacatctc

SEQ ID NO: 567504 - DNA, 33 bp, Homo sapien
cacatccttccagatctacctcctgaacatctc

SEQ ID NO: 567505 - DNA, 33 bp, Homo sapien
aataaaaaatacatacactctcattgttgaggt

SEQ ID NO: 567506 - DNA, 33 bp, Homo sapien
aataaaaaatacatacgctctcattgttgaggt

SEQ ID NO: 567507 - DNA, 33 bp, Homo sapien
gcatagctcagacttcaagatttgttgtgtgac

SEQ ID NO: 567508 - DNA, 33 bp, Homo sapien
gcatagctcagacttcgagatttgttgtgtgac

SEQ ID NO: 567509 - DNA, 33 bp, Homo sapien
aatatattttactgcccaagcaacacaacaatg

SEQ ID NO: 567510 - DNA, 33 bp, Homo sapien
aatatattttactgcctaagcaacacaacaatg

SEQ ID NO: 567511 - DNA, 33 bp, Homo sapien
aaatgcatacgattgaagctgattttgctttgt

SEQ ID NO: 567512 - DNA, 33 bp, Homo sapien
aaatgcatacgattgacgctgattttgctttgt

SEQ ID NO: 567513 - DNA, 33 bp, Homo sapien
aaaggattcagatcagcagtgttttcatattgc

SEQ ID NO: 567514 - DNA, 33 bp, Homo sapien
aaaggattcagatcagtagtgttttcatattgc

SEQ ID NO: 567515 - DNA, 33 bp, Homo sapien
aacgcactgtgttaaacttctggaggtccaccc

SEQ ID NO: 567516 - DNA, 33 bp, Homo sapien
aacgcactgtgttaaatttctggaggtccaccc

SEQ ID NO: 567517 - DNA, 33 bp, Homo sapien
attttagcaggattcacgtggctttgatagggt

SEQ ID NO: 567518 - DNA, 33 bp, Homo sapien
attttagcaggattcatgtggctttgatagggt

SEQ ID NO: 567519 - DNA, 33 bp, Homo sapien
ggccaccagaatatccacactgggctgcttgag

SEQ ID NO: 567520 - DNA, 33 bp, Homo sapien
ggccaccagaatatccgcactgggctgcttgag

SEQ ID NO: 567521 - DNA, 33 bp, Homo sapien
aagagagagaaagaagaaagctgcagtacctct

SEQ ID NO: 567522 - DNA, 33 bp, Homo sapien
aagagagagaaagaaggaagctgcagtacctct

SEQ ID NO: 567523 - DNA, 33 bp, Homo sapien
cagtcttataacctaaatctcagaaatgacata

SEQ ID NO: 567524 - DNA, 33 bp, Homo sapien
cagtcttataacctaagtctcagaaatgacata

SEQ ID NO: 567525 - DNA, 33 bp, Homo sapien
tgtcttgcttcactcactatccttctgcactgg

SEQ ID NO: 567526 - DNA, 33 bp, Homo sapien
tgtcttgcttcactcattatccttctgcactgg

SEQ ID NO: 567527 - DNA, 33 bp, Homo sapien
taggaagccagcagaccgaaattaaaaagactc

SEQ ID NO: 567528 - DNA, 33 bp, Homo sapien
taggaagccagcagactgaaattaaaaagactc

SEQ ID NO: 567529 - DNA, 33 bp, Homo sapien
aactgacctgctagccaactgcatctgtttgtg

SEQ ID NO: 567530 - DNA, 33 bp, Homo sapien
aactgacctgctagccgactgcatctgtttgtg

SEQ ID NO: 567531 - DNA, 33 bp, Homo sapien
acccctaaaatcatacaagccctgcaacatagc

SEQ ID NO: 567532 - DNA, 33 bp, Homo sapien
acccctaaaatcatacgagccctgcaacatagc

SEQ ID NO: 567533 - DNA, 33 bp, Homo sapien
ttgtcggcaccttcaaagaggtagtcttacctc

SEQ ID NO: 567534 - DNA, 33 bp, Homo sapien
ttgtcggcaccttcaaggaggtagtcttacctc

SEQ ID NO: 567535 - DNA, 33 bp, Homo sapien
ttcctaaatacatcaaagatacacatctccatc

SEQ ID NO: 567536 - DNA, 33 bp, Homo sapien
ttcctaaatacatcaaggatacacatctccatc

SEQ ID NO: 567537 - DNA, 33 bp, Homo sapien
ctttccggtgagaaacaggctcccctggcagtg

SEQ ID NO: 567538 - DNA, 33 bp, Homo sapien
ctttccggtgagaaaccggctcccctggcagtg

SEQ ID NO: 567539 - DNA, 33 bp, Homo sapien
tagaactatttgatgcagcagttttctaaagta

SEQ ID NO: 567540 - DNA, 33 bp, Homo sapien
tagaactatttgatgctgcagttttctaaagta

SEQ ID NO: 567541 - DNA, 33 bp, Homo sapien
tttgaaactgcaacgacatggatagaactattt

SEQ ID NO: 567542 - DNA, 33 bp, Homo sapien
tttgaaactgcaacgagatggatagaactattt

SEQ ID NO: 567543 - DNA, 33 bp, Homo sapien
ttaacagggcacagccaataaccaccaccagtc

SEQ ID NO: 567544 - DNA, 33 bp, Homo sapien
ttaacagggcacagccgataaccaccaccagtc

SEQ ID NO: 567545 - DNA, 33 bp, Homo sapien
cttcagccgatgggcaatctcaggaagctgagg

SEQ ID NO: 567546 - DNA, 33 bp, Homo sapien
cttcagccgatgggcactctcaggaagctgagg

SEQ ID NO: 567547 - DNA, 33 bp, Homo sapien
cagagcagcagcattcgcttggccaggacctgc

SEQ ID NO: 567548 - DNA, 33 bp, Homo sapien
cagagcagcagcattctcttggccaggacctgc

SEQ ID NO: 567549 - DNA, 33 bp, Homo sapien
gtgagcgtcagaggcacgaactcaggaaaggcc

SEQ ID NO: 567550 - DNA, 33 bp, Homo sapien
gtgagcgtcagaggcatgaactcaggaaaggcc

SEQ ID NO: 567551 - DNA, 33 bp, Homo sapien
gccacgctgcagcctcacttatctttctgtttc

SEQ ID NO: 567552 - DNA, 33 bp, Homo sapien
gccacgctgcagcctcgcttatctttctgtttc

SEQ ID NO: 567553 - DNA, 33 bp, Homo sapien
tttagtcaatgcctgcaccttttctgctgtaat

SEQ ID NO: 567554 - DNA, 33 bp, Homo sapien
tttagtcaatgcctgcgccttttctgctgtaat

SEQ ID NO: 567555 - DNA, 33 bp, Homo sapien
tatcagttagtgagacgcaaaggtctttgttcc

SEQ ID NO: 567556 - DNA, 33 bp, Homo sapien
tatcagttagtgagactcaaaggtctttgttcc

SEQ ID NO: 567557 - DNA, 33 bp, Homo sapien
gttggcatgatggaaaccggaatggaaaaggcc

SEQ ID NO: 567558 - DNA, 33 bp, Homo sapien
gttggcatgatggaaatcggaatggaaaaggcc

SEQ ID NO: 567559 - DNA, 33 bp, Homo sapien
gagaactaacgctgcccaggatggagagacagg

SEQ ID NO: 567560 - DNA, 33 bp, Homo sapien
gagaactaacgctgccgaggatggagagacagg

SEQ ID NO: 567561 - DNA, 33 bp, Homo sapien
ggcatcctgaacacacaaaacaatgtgtaccca

SEQ ID NO: 567562 - DNA, 33 bp, Homo sapien
ggcatcctgaacacacgaaacaatgtgtaccca

SEQ ID NO: 567563 - DNA, 33 bp, Homo sapien
gttcagagaatcattcaaggcaccaaactcaag

SEQ ID NO: 567564 - DNA, 33 bp, Homo sapien
gttcagagaatcattcgaggcaccaaactcaag

SEQ ID NO: 567565 - DNA, 33 bp, Homo sapien
ctggagttcagcggcgaaatcttggttcactgc

SEQ ID NO: 567566 - DNA, 33 bp, Homo sapien
ctggagttcagcggcgcaatcttggttcactgc

SEQ ID NO: 567567 - DNA, 33 bp, Homo sapien
aagacatcctgtagcaaagaggaggaagaactg

SEQ ID NO: 567568 - DNA, 33 bp, Homo sapien
aagacatcctgtagcagagaggaggaagaactg

SEQ ID NO: 567569 - DNA, 33 bp, Homo sapien
ggcaatgttgcagcaacgagaaggggatgattt

SEQ ID NO: 567570 - DNA, 33 bp, Homo sapien
ggcaatgttgcagcaatgagaaggggatgattt

SEQ ID NO: 567571 - DNA, 33 bp, Homo sapien
aagcacatgttcttcccgagtcaaagcagtccg

SEQ ID NO: 567572 - DNA, 33 bp, Homo sapien
aagcacatgttcttcctgagtcaaagcagtccg

SEQ ID NO: 567573 - DNA, 33 bp, Homo sapien
cctaattctgtcctacacgatgctgaaggtcat

SEQ ID NO: 567574 - DNA, 33 bp, Homo sapien
cctaattctgtcctacgcgatgctgaaggtcat

SEQ ID NO: 567575 - DNA, 33 bp, Homo sapien
tttacatgacaatgaaaggaaaaggtgcatccc

SEQ ID NO: 567576 - DNA, 33 bp, Homo sapien
tttacatgacaatgaagggaaaaggtgcatccc

SEQ ID NO: 567577 - DNA, 33 bp, Homo sapien
actgatcacagacatcaaacttctgaggtactg

SEQ ID NO: 567578 - DNA, 33 bp, Homo sapien
actgatcacagacatcgaacttctgaggtactg

SEQ ID NO: 567579 - DNA, 33 bp, Homo sapien
tggcagaagcatcttacggtcagtgaatatgaa

SEQ ID NO: 567580 - DNA, 33 bp, Homo sapien
tggcagaagcatcttatggtcagtgaatatgaa

SEQ ID NO: 567581 - DNA, 33 bp, Homo sapien
aaattgtttcttaacacgcagaactcctttttg

SEQ ID NO: 567582 - DNA, 33 bp, Homo sapien
aaattgtttcttaacatgcagaactcctttttg

SEQ ID NO: 567583 - DNA, 33 bp, Homo sapien
gtactagaaaaatgaacggaagtgaatcgtaag

SEQ ID NO: 567584 - DNA, 33 bp, Homo sapien
gtactagaaaaatgaatggaagtgaatcgtaag

SEQ ID NO: 567585 - DNA, 33 bp, Homo sapien
gctttttagattaacaatatgtcacaacttaca

SEQ ID NO: 567586 - DNA, 33 bp, Homo sapien
gctttttagattaacagtatgtcacaacttaca

SEQ ID NO: 567587 - DNA, 33 bp, Homo sapien
cgcacctgatagagcacgtgacaaggagaatca

SEQ ID NO: 567588 - DNA, 33 bp, Homo sapien
cgcacctgatagagcatgtgacaaggagaatca

SEQ ID NO: 567589 - DNA, 33 bp, Homo sapien
acccccaagttaatgacagaccttcagaacaaa

SEQ ID NO: 567590 - DNA, 33 bp, Homo sapien
acccccaagttaatgatagaccttcagaacaaa

SEQ ID NO: 567591 - DNA, 33 bp, Homo sapien
aggctcttttttagagcatcggcaagtgacctg

SEQ ID NO: 567592 - DNA, 33 bp, Homo sapien
aggctcttttttagagtatcggcaagtgacctg

SEQ ID NO: 567593 - DNA, 33 bp, Homo sapien
tgcccccatgaggcaaaaactggtgattcacag

SEQ ID NO: 567594 - DNA, 33 bp, Homo sapien
tgcccccatgaggcaagaactggtgattcacag

SEQ ID NO: 567595 - DNA, 33 bp, Homo sapien
gtcctgtccttggtaccggtaacatagagtggc

SEQ ID NO: 567596 - DNA, 33 bp, Homo sapien
gtcctgtccttggtactggtaacatagagtggc

SEQ ID NO: 567597 - DNA, 33 bp, Homo sapien
tggtgatggagggaagaatgcacaagctctgtg

SEQ ID NO: 567598 - DNA, 33 bp, Homo sapien
tggtgatggagggaaggatgcacaagctctgtg

SEQ ID NO: 567599 - DNA, 33 bp, Homo sapien
gaagcaatttaatacaagagctgaatagcaaaa

SEQ ID NO: 567600 - DNA, 33 bp, Homo sapien
gaagcaatttaatacaggagctgaatagcaaaa

SEQ ID NO: 567601 - DNA, 33 bp, Homo sapien
tgatgaagagaaaatacagaagtttgataagcc

SEQ ID NO: 567602 - DNA, 33 bp, Homo sapien
tgatgaagagaaaatatagaagtttgataagcc

SEQ ID NO: 567603 - DNA, 33 bp, Homo sapien
gaattgtaaggggaaaccagtgtctcttgaaat

SEQ ID NO: 567604 - DNA, 33 bp, Homo sapien
gaattgtaaggggaaatcagtgtctcttgaaat

SEQ ID NO: 567605 - DNA, 33 bp, Homo sapien
atgttagataatcttgcaaactcctgtgacaac

SEQ ID NO: 567606 - DNA, 33 bp, Homo sapien
atgttagataatcttgtaaactcctgtgacaac

SEQ ID NO: 567607 - DNA, 33 bp, Homo sapien
gcagtctaatgtgagactcattttcttttcatc

SEQ ID NO: 567608 - DNA, 33 bp, Homo sapien
gcagtctaatgtgagagtcattttcttttcatc

SEQ ID NO: 567609 - DNA, 33 bp, Homo sapien
tagttctctcagtctacagttctacataaagtt

SEQ ID NO: 567610 - DNA, 33 bp, Homo sapien
tagttctctcagtctatagttctacataaagtt

SEQ ID NO: 567611 - DNA, 33 bp, Homo sapien
accttaagccaggaaacagttaatataaaattt

SEQ ID NO: 567612 - DNA, 33 bp, Homo sapien
accttaagccaggaaagagttaatataaaattt

SEQ ID NO: 567613 - DNA, 33 bp, Homo sapien
gtatttatttaggccacgtaacttgtaatttta

SEQ ID NO: 567614 - DNA, 33 bp, Homo sapien
gtatttatttaggccatgtaacttgtaatttta

SEQ ID NO: 567615 - DNA, 33 bp, Homo sapien
agtcttttagagactaatagctgccttcaatgg

SEQ ID NO: 567616 - DNA, 33 bp, Homo sapien
agtcttttagagactactagctgccttcaatgg

SEQ ID NO: 567617 - DNA, 33 bp, Homo sapien
aaattttacttgcaaaattagatggctgaccag

SEQ ID NO: 567618 - DNA, 33 bp, Homo sapien
aaattttacttgcaaagttagatggctgaccag

SEQ ID NO: 567619 - DNA, 33 bp, Homo sapien
aaagtcttgcatgccaaactaagaaatttgacc

SEQ ID NO: 567620 - DNA, 33 bp, Homo sapien
aaagtcttgcatgccagactaagaaatttgacc

SEQ ID NO: 567621 - DNA, 33 bp, Homo sapien
ctggacacaaagatcaatcctcaaagaaaccac

SEQ ID NO: 567622 - DNA, 33 bp, Homo sapien
ctggacacaaagatcagtcctcaaagaaaccac

SEQ ID NO: 567623 - DNA, 33 bp, Homo sapien
cctgcctcttgcccatcagagcagcggtggcag

SEQ ID NO: 567624 - DNA, 33 bp, Homo sapien
cctgcctcttgcccattagagcagcggtggcag

SEQ ID NO: 567625 - DNA, 33 bp, Homo sapien
aaccagaggaagaaaacaccaagcagaggacac

SEQ ID NO: 567626 - DNA, 33 bp, Homo sapien
aaccagaggaagaaaataccaagcagaggacac

SEQ ID NO: 567627 - DNA, 33 bp, Homo sapien
agataaaactgaggccaagaggttaagcaattt

SEQ ID NO: 567628 - DNA, 33 bp, Homo sapien
agataaaactgaggccgagaggttaagcaattt

SEQ ID NO: 567629 - DNA, 33 bp, Homo sapien
gagttagaggtgggaaaaaagaccgacattagg

SEQ ID NO: 567630 - DNA, 33 bp, Homo sapien
gagttagaggtgggaagaaagaccgacattagg

SEQ ID NO: 567631 - DNA, 33 bp, Homo sapien
tgcagaacaaaaaagacagacacacattgagaa

SEQ ID NO: 567632 - DNA, 33 bp, Homo sapien
tgcagaacaaaaaagatagacacacattgagaa

SEQ ID NO: 567633 - DNA, 33 bp, Homo sapien
ctattgtaccagattacgtagactgcttggaca

SEQ ID NO: 567634 - DNA, 33 bp, Homo sapien
ctattgtaccagattatgtagactgcttggaca

SEQ ID NO: 567635 - DNA, 33 bp, Homo sapien
ccccgggttagattccaagcaggggattgatga

SEQ ID NO: 567636 - DNA, 33 bp, Homo sapien
ccccgggttagattccgagcaggggattgatga

SEQ ID NO: 567637 - DNA, 33 bp, Homo sapien
tatatagagcaggtcaaatatgtcaccatagac

SEQ ID NO: 567638 - DNA, 33 bp, Homo sapien
tatatagagcaggtcagatatgtcaccatagac

SEQ ID NO: 567639 - DNA, 33 bp, Homo sapien
attcaaagcaaaaaccaaaaggcaggctgtgta

SEQ ID NO: 567640 - DNA, 33 bp, Homo sapien
attcaaagcaaaaaccgaaaggcaggctgtgta

SEQ ID NO: 567641 - DNA, 33 bp, Homo sapien
gctgttccaggcagagaagaatggcaagtacaa

SEQ ID NO: 567642 - DNA, 33 bp, Homo sapien
gctgttccaggcagaggagaatggcaagtacaa

SEQ ID NO: 567643 - DNA, 33 bp, Homo sapien
tttgaccagagtaaccacaatgaagatggtaag

SEQ ID NO: 567644 - DNA, 33 bp, Homo sapien
tttgaccagagtaaccgcaatgaagatggtaag

SEQ ID NO: 567645 - DNA, 33 bp, Homo sapien
agggattttgacatcaagcataatctcaagaag

SEQ ID NO: 567646 - DNA, 33 bp, Homo sapien
agggattttgacatcacgcataatctcaagaag

SEQ ID NO: 567647 - DNA, 33 bp, Homo sapien
acacccttagtcatcacgggagtaaacaacaca

SEQ ID NO: 567648 - DNA, 33 bp, Homo sapien
acacccttagtcatcatgggagtaaacaacaca

SEQ ID NO: 567649 - DNA, 33 bp, Homo sapien
aaccaaagaagtctgaacaacaataactttatc

SEQ ID NO: 567650 - DNA, 33 bp, Homo sapien
aaccaaagaagtctgatcaacaataactttatc

SEQ ID NO: 567651 - DNA, 33 bp, Homo sapien
actgtaccaggaattacactttgctcatgatac

SEQ ID NO: 567652 - DNA, 33 bp, Homo sapien
actgtaccaggaattatactttgctcatgatac

SEQ ID NO: 567653 - DNA, 33 bp, Homo sapien
aaggtaactatagttaaaatgtgaacacagaca

SEQ ID NO: 567654 - DNA, 33 bp, Homo sapien
aaggtaactatagttagaatgtgaacacagaca

SEQ ID NO: 567655 - DNA, 33 bp, Homo sapien
gctgagactcaacatacgactctggcccagccc

SEQ ID NO: 567656 - DNA, 33 bp, Homo sapien
gctgagactcaacatatgactctggcccagccc

SEQ ID NO: 567657 - DNA, 33 bp, Homo sapien
ttttctcacagttcaaaggatcagaagtccaaa

SEQ ID NO: 567658 - DNA, 33 bp, Homo sapien
ttttctcacagttcaagggatcagaagtccaaa

SEQ ID NO: 567659 - DNA, 33 bp, Homo sapien
aaaatctaggtatcagaagagcgtctggtggag

SEQ ID NO: 567660 - DNA, 33 bp, Homo sapien
aaaatctaggtatcagcagagcgtctggtggag

SEQ ID NO: 567661 - DNA, 33 bp, Homo sapien
atgagcttgacaatgaaccctacagccacagat

SEQ ID NO: 567662 - DNA, 33 bp, Homo sapien
atgagcttgacaatgatccctacagccacagat

SEQ ID NO: 567663 - DNA, 33 bp, Homo sapien
agctgttcaacgaagaatcatgtccttcatctt

SEQ ID NO: 567664 - DNA, 33 bp, Homo sapien
agctgttcaacgaagagtcatgtccttcatctt

SEQ ID NO: 567665 - DNA, 33 bp, Homo sapien
ctacaatcaattgactcaaagtaaaggagatca

SEQ ID NO: 567666 - DNA, 33 bp, Homo sapien
ctacaatcaattgacttaaagtaaaggagatca

SEQ ID NO: 567667 - DNA, 33 bp, Homo sapien
acagacatcaatgacacgggccagatacactta

SEQ ID NO: 567668 - DNA, 33 bp, Homo sapien
acagacatcaatgacatgggccagatacactta

SEQ ID NO: 567669 - DNA, 33 bp, Homo sapien
aatcagcccctaatcaaattggattctgtattt

SEQ ID NO: 567670 - DNA, 33 bp, Homo sapien
aatcagcccctaatcatattggattctgtattt

SEQ ID NO: 567671 - DNA, 33 bp, Homo sapien
gccaggacagttaaacaaaaccatcatcacctc

SEQ ID NO: 567672 - DNA, 33 bp, Homo sapien
gccaggacagttaaacgaaaccatcatcacctc

SEQ ID NO: 567673 - DNA, 33 bp, Homo sapien
aggtgtgaaccagccactgatgcagccaacact

SEQ ID NO: 567674 - DNA, 33 bp, Homo sapien
aggtgtgaaccagccattgatgcagccaacact

SEQ ID NO: 567675 - DNA, 33 bp, Homo sapien
agacgttagaaggaacactttctcctctccttt

SEQ ID NO: 567676 - DNA, 33 bp, Homo sapien
agacgttagaaggaacgctttctcctctccttt

SEQ ID NO: 567677 - DNA, 33 bp, Homo sapien
tacaatgtctgtcacaaaagcggtggatggact

SEQ ID NO: 567678 - DNA, 33 bp, Homo sapien
tacaatgtctgtcacagaagcggtggatggact

SEQ ID NO: 567679 - DNA, 33 bp, Homo sapien
tgctcatctcccagtagcaaagtcaggtggttc

SEQ ID NO: 567680 - DNA, 33 bp, Homo sapien
tgctcatctcccagtatcaaagtcaggtggttc

SEQ ID NO: 567681 - DNA, 33 bp, Homo sapien
caattatccgtcgcaaagaaggctgtcctttac

SEQ ID NO: 567682 - DNA, 33 bp, Homo sapien
caattatccgtcgcaaggaaggctgtcctttac

SEQ ID NO: 567683 - DNA, 33 bp, Homo sapien
caactgtggctcatccaccggacgtttactccc

SEQ ID NO: 567684 - DNA, 33 bp, Homo sapien
caactgtggctcatccgccggacgtttactccc

SEQ ID NO: 567685 - DNA, 33 bp, Homo sapien
atatcgccaatgatcaaataccaccaattctac

SEQ ID NO: 567686 - DNA, 33 bp, Homo sapien
atatcgccaatgatcatataccaccaattctac

SEQ ID NO: 567687 - DNA, 33 bp, Homo sapien
tcccacaaaatgagcacctgctttgtgccaggc

SEQ ID NO: 567688 - DNA, 33 bp, Homo sapien
tcccacaaaatgagcatctgctttgtgccaggc

SEQ ID NO: 567689 - DNA, 33 bp, Homo sapien
tctctctctcttacacccattaatggacacacc

SEQ ID NO: 567690 - DNA, 33 bp, Homo sapien
tctctctctcttacactcattaatggacacacc

SEQ ID NO: 567691 - DNA, 33 bp, Homo sapien
cacttgcaaacaagaaatctaacagttacatgg

SEQ ID NO: 567692 - DNA, 33 bp, Homo sapien
cacttgcaaacaagaattctaacagttacatgg

SEQ ID NO: 567693 - DNA, 33 bp, Homo sapien
acggttctggacactaaaagtgtgagatcacag

SEQ ID NO: 567694 - DNA, 33 bp, Homo sapien
acggttctggacactagaagtgtgagatcacag

SEQ ID NO: 567695 - DNA, 33 bp, Homo sapien
ccctgaaggtataatcacaaacacctgccacct

SEQ ID NO: 567696 - DNA, 33 bp, Homo sapien
ccctgaaggtataatcgcaaacacctgccacct

SEQ ID NO: 567697 - DNA, 33 bp, Homo sapien
ggtttgtagagtgaaaattgagcaaatctgcat

SEQ ID NO: 567698 - DNA, 33 bp, Homo sapien
ggtttgtagagtgaaagttgagcaaatctgcat

SEQ ID NO: 567699 - DNA, 33 bp, Homo sapien
cttgaagtcataaccaaaagcagctacggaaga

SEQ ID NO: 567700 - DNA, 33 bp, Homo sapien
cttgaagtcataaccagaagcagctacggaaga

SEQ ID NO: 567701 - DNA, 33 bp, Homo sapien
aggttaagatctagaacaattttgtccaacctg

SEQ ID NO: 567702 - DNA, 33 bp, Homo sapien
aggttaagatctagaagaattttgtccaacctg

SEQ ID NO: 567703 - DNA, 33 bp, Homo sapien
gcgggtgaggtcagcactgaaatagatcacgtt

SEQ ID NO: 567704 - DNA, 33 bp, Homo sapien
gcgggtgaggtcagcattgaaatagatcacgtt

SEQ ID NO: 567705 - DNA, 33 bp, Homo sapien
ggaaaattgaaataaaagtggctatatttgtac

SEQ ID NO: 567706 - DNA, 33 bp, Homo sapien
ggaaaattgaaataaaggtggctatatttgtac

SEQ ID NO: 567707 - DNA, 33 bp, Homo sapien
gtcaagcattcgcagaacccagattcaagggca

SEQ ID NO: 567708 - DNA, 33 bp, Homo sapien
gtcaagcattcgcagagcccagattcaagggca

SEQ ID NO: 567709 - DNA, 33 bp, Homo sapien
taatgtcagaaagagaaaaggaagcaagttgtt

SEQ ID NO: 567710 - DNA, 33 bp, Homo sapien
taatgtcagaaagagagaaggaagcaagttgtt

SEQ ID NO: 567711 - DNA, 33 bp, Homo sapien
acaatcagtaattttcactttacggtgttgaag

SEQ ID NO: 567712 - DNA, 33 bp, Homo sapien
acaatcagtaattttcgctttacggtgttgaag

SEQ ID NO: 567713 - DNA, 33 bp, Homo sapien
cgcttctaatagagcaagagagtaaaagtgaac

SEQ ID NO: 567714 - DNA, 33 bp, Homo sapien
cgcttctaatagagcaggagagtaaaagtgaac

SEQ ID NO: 567715 - DNA, 33 bp, Homo sapien
tttgtagctgaaacaactacccacataagtgtg

SEQ ID NO: 567716 - DNA, 33 bp, Homo sapien
tttgtagctgaaacaagtacccacataagtgtg

SEQ ID NO: 567717 - DNA, 33 bp, Homo sapien
agaggtcccacatgtgaaaaagaggggaaatta

SEQ ID NO: 567718 - DNA, 33 bp, Homo sapien
agaggtcccacatgtggaaaagaggggaaatta

SEQ ID NO: 567719 - DNA, 33 bp, Homo sapien
caagccatttacatgacgaaaacttcaaatatc

SEQ ID NO: 567720 - DNA, 33 bp, Homo sapien
caagccatttacatgaggaaaacttcaaatatc

SEQ ID NO: 567721 - DNA, 33 bp, Homo sapien
tctcttacagccctcaaataataagaaatcatg

SEQ ID NO: 567722 - DNA, 33 bp, Homo sapien
tctcttacagccctcagataataagaaatcatg

SEQ ID NO: 567723 - DNA, 33 bp, Homo sapien
atcagggaaaactatccatagcaagcctgatta

SEQ ID NO: 567724 - DNA, 33 bp, Homo sapien
atcagggaaaactatcgatagcaagcctgatta

SEQ ID NO: 567725 - DNA, 33 bp, Homo sapien
acaagcgttttatcataagcattagcattctta

SEQ ID NO: 567726 - DNA, 33 bp, Homo sapien
acaagcgttttatcatgagcattagcattctta

SEQ ID NO: 567727 - DNA, 33 bp, Homo sapien
ctatatgctggtacacacatagaaaaagagatc

SEQ ID NO: 567728 - DNA, 33 bp, Homo sapien
ctatatgctggtacacgcatagaaaaagagatc

SEQ ID NO: 567729 - DNA, 33 bp, Homo sapien
gagtgtagttatcccccccattatttgttgaag

SEQ ID NO: 567730 - DNA, 33 bp, Homo sapien
gagtgtagttatcccctccattatttgttgaag

SEQ ID NO: 567731 - DNA, 33 bp, Homo sapien
acatgggctgctactacgcctcaggcacacggc

SEQ ID NO: 567732 - DNA, 33 bp, Homo sapien
acatgggctgctactatgcctcaggcacacggc

SEQ ID NO: 567733 - DNA, 33 bp, Homo sapien
gcgttgggcgtacccagtctccacttgcaaaag

SEQ ID NO: 567734 - DNA, 33 bp, Homo sapien
gcgttgggcgtacccattctccacttgcaaaag

SEQ ID NO: 567735 - DNA, 33 bp, Homo sapien
ctttgcagaacctcaaatatcattctaagaaga

SEQ ID NO: 567736 - DNA, 33 bp, Homo sapien
ctttgcagaacctcaagtatcattctaagaaga

SEQ ID NO: 567737 - DNA, 33 bp, Homo sapien
atagggccccgaggtccattgggctgatgagga

SEQ ID NO: 567738 - DNA, 33 bp, Homo sapien
atagggccccgaggtctattgggctgatgagga

SEQ ID NO: 567739 - DNA, 33 bp, Homo sapien
tggcaacctcgcagcaccatgtattaccatatt

SEQ ID NO: 567740 - DNA, 33 bp, Homo sapien
tggcaacctcgcagcatcatgtattaccatatt

SEQ ID NO: 567741 - DNA, 33 bp, Homo sapien
aatattgctgtggtgacagtagaggattattta

SEQ ID NO: 567742 - DNA, 33 bp, Homo sapien
aatattgctgtggtgatagtagaggattattta

SEQ ID NO: 567743 - DNA, 33 bp, Homo sapien
tttgcctttggttccactcatctacacttatca

SEQ ID NO: 567744 - DNA, 33 bp, Homo sapien
tttgcctttggttccattcatctacacttatca

SEQ ID NO: 567745 - DNA, 33 bp, Homo sapien
ttggaagggaaccagaccatcatttccaaagtg

SEQ ID NO: 567746 - DNA, 33 bp, Homo sapien
ttggaagggaaccagatcatcatttccaaagtg

SEQ ID NO: 567747 - DNA, 33 bp, Homo sapien
agacttatgaattgaaaaaaatgacaggcttga

SEQ ID NO: 567748 - DNA, 33 bp, Homo sapien
agacttatgaattgaagaaaatgacaggcttga

SEQ ID NO: 567749 - DNA, 33 bp, Homo sapien
atactcttagtattgaatagggagatagataag

SEQ ID NO: 567750 - DNA, 33 bp, Homo sapien
atactcttagtattgagtagggagatagataag

SEQ ID NO: 567751 - DNA, 33 bp, Homo sapien
tattttacaggaaaccagggccgagggagatta

SEQ ID NO: 567752 - DNA, 33 bp, Homo sapien
tattttacaggaaaccggggccgagggagatta

SEQ ID NO: 567753 - DNA, 33 bp, Homo sapien
ggaccggcacccctaaatggccaaactaatact

SEQ ID NO: 567754 - DNA, 33 bp, Homo sapien
ggaccggcacccctaagtggccaaactaatact

SEQ ID NO: 567755 - DNA, 33 bp, Homo sapien
cacagaaataagcttaagggtgtttgaaacatt

SEQ ID NO: 567756 - DNA, 33 bp, Homo sapien
cacagaaataagcttaggggtgtttgaaacatt

SEQ ID NO: 567757 - DNA, 33 bp, Homo sapien
ttggagattggtagcaaatggagttctagttca

SEQ ID NO: 567758 - DNA, 33 bp, Homo sapien
ttggagattggtagcagatggagttctagttca

SEQ ID NO: 567759 - DNA, 33 bp, Homo sapien
ataaataaataaaattaaaatacgccacttata

SEQ ID NO: 567760 - DNA, 33 bp, Homo sapien
ataaataaataaaatttaaatacgccacttata

SEQ ID NO: 567761 - DNA, 33 bp, Homo sapien
gggtagggcccaataaatgcaagctgactgagt

SEQ ID NO: 567762 - DNA, 33 bp, Homo sapien
gggtagggcccaataagtgcaagctgactgagt

SEQ ID NO: 567763 - DNA, 33 bp, Homo sapien
gctatttccaggactacatcttgagcatgggtg

SEQ ID NO: 567764 - DNA, 33 bp, Homo sapien
gctatttccaggactatatcttgagcatgggtg

SEQ ID NO: 567765 - DNA, 33 bp, Homo sapien
acgggttttgttgccaaatgtcttcaggtaagt

SEQ ID NO: 567766 - DNA, 33 bp, Homo sapien
acgggttttgttgccacatgtcttcaggtaagt

SEQ ID NO: 567767 - DNA, 33 bp, Homo sapien
gatactatttttctaacgttcacaaagttctga

SEQ ID NO: 567768 - DNA, 33 bp, Homo sapien
gatactatttttctaatgttcacaaagttctga

SEQ ID NO: 567769 - DNA, 33 bp, Homo sapien
gtagacgagttaccctgtcttcttccatgtacc

SEQ ID NO: 567770 - DNA, 33 bp, Homo sapien
gtagacgagttaccctttcttcttccatgtacc

SEQ ID NO: 567771 - DNA, 33 bp, Homo sapien
ggaccaaacattttacccataaggacctcaagg

SEQ ID NO: 567772 - DNA, 33 bp, Homo sapien
ggaccaaacattttactcataaggacctcaagg

SEQ ID NO: 567773 - DNA, 33 bp, Homo sapien
ttccccttgctctgcaaatcaggtcaaacactt

SEQ ID NO: 567774 - DNA, 33 bp, Homo sapien
ttccccttgctctgcatatcaggtcaaacactt

SEQ ID NO: 567775 - DNA, 33 bp, Homo sapien
cacttgggccactctaaatgaaattccagaata

SEQ ID NO: 567776 - DNA, 33 bp, Homo sapien
cacttgggccactctacatgaaattccagaata

SEQ ID NO: 567777 - DNA, 33 bp, Homo sapien
acaagattacaaacccacatgccctttgaccaa

SEQ ID NO: 567778 - DNA, 33 bp, Homo sapien
acaagattacaaacccgcatgccctttgaccaa

SEQ ID NO: 567779 - DNA, 33 bp, Homo sapien
tgctgtctcctcgggcaatttcacatcccatga

SEQ ID NO: 567780 - DNA, 33 bp, Homo sapien
tgctgtctcctcgggcgatttcacatcccatga

SEQ ID NO: 567781 - DNA, 33 bp, Homo sapien
caactgctttgtccataagaagcgtttctttct

SEQ ID NO: 567782 - DNA, 33 bp, Homo sapien
caactgctttgtccatgagaagcgtttctttct

SEQ ID NO: 567783 - DNA, 33 bp, Homo sapien
tccacaggagacatcactgatcaaccataatac

SEQ ID NO: 567784 - DNA, 33 bp, Homo sapien
tccacaggagacatcattgatcaaccataatac

SEQ ID NO: 567785 - DNA, 33 bp, Homo sapien
ttccagattggtcttcaactactgagcttaggc

SEQ ID NO: 567786 - DNA, 33 bp, Homo sapien
ttccagattggtcttcgactactgagcttaggc

SEQ ID NO: 567787 - DNA, 33 bp, Homo sapien
cttttaaatcactaagaagttcatgacattaac

SEQ ID NO: 567788 - DNA, 33 bp, Homo sapien
cttttaaatcactaaggagttcatgacattaac

SEQ ID NO: 567789 - DNA, 33 bp, Homo sapien
aagaacgcacatctaacgacaaaatcttgaaaa

SEQ ID NO: 567790 - DNA, 33 bp, Homo sapien
aagaacgcacatctaatgacaaaatcttgaaaa

SEQ ID NO: 567791 - DNA, 33 bp, Homo sapien
tctgaaggcttatttgaaatatgaaccagcata

SEQ ID NO: 567792 - DNA, 33 bp, Homo sapien
tctgaaggcttatttggaatatgaaccagcata

SEQ ID NO: 567793 - DNA, 33 bp, Homo sapien
ataatatatgacaacaacaccacaaagagctgg

SEQ ID NO: 567794 - DNA, 33 bp, Homo sapien
ataatatatgacaacaccaccacaaagagctgg

SEQ ID NO: 567795 - DNA, 33 bp, Homo sapien
tggtttagaatcataacggtatctctctaaaaa

SEQ ID NO: 567796 - DNA, 33 bp, Homo sapien
tggtttagaatcataatggtatctctctaaaaa

SEQ ID NO: 567797 - DNA, 33 bp, Homo sapien
cgggcgtgttgacgcaaacttgtagccctggct

SEQ ID NO: 567798 - DNA, 33 bp, Homo sapien
cgggcgtgttgacgcacacttgtagccctggct

SEQ ID NO: 567799 - DNA, 33 bp, Homo sapien
tttgcccaagaacacactgcaggtcaacagaag

SEQ ID NO: 567800 - DNA, 33 bp, Homo sapien
tttgcccaagaacacattgcaggtcaacagaag

SEQ ID NO: 567801 - DNA, 33 bp, Homo sapien
cctagggacagcgggaaaacaagccctagagag

SEQ ID NO: 567802 - DNA, 33 bp, Homo sapien
cctagggacagcgggagaacaagccctagagag

SEQ ID NO: 567803 - DNA, 33 bp, Homo sapien
caaataaaataaggccaaggccaaacataagct

SEQ ID NO: 567804 - DNA, 33 bp, Homo sapien
caaataaaataaggccgaggccaaacataagct

SEQ ID NO: 567805 - DNA, 33 bp, Homo sapien
agaagggactctaaagcagcacagggggttgtc

SEQ ID NO: 567806 - DNA, 33 bp, Homo sapien
agaagggactctaaagtagcacagggggttgtc

SEQ ID NO: 567807 - DNA, 33 bp, Homo sapien
gctggaaaaggcaagcaaggggttctcctctag

SEQ ID NO: 567808 - DNA, 33 bp, Homo sapien
gctggaaaaggcaagcgaggggttctcctctag

SEQ ID NO: 567809 - DNA, 33 bp, Homo sapien
ttcccattctgtaaaacctcaaaagctgatgct

SEQ ID NO: 567810 - DNA, 33 bp, Homo sapien
ttcccattctgtaaaatctcaaaagctgatgct

SEQ ID NO: 567811 - DNA, 33 bp, Homo sapien
ttatcgtcagagattgaagtctgtatgataaag

SEQ ID NO: 567812 - DNA, 33 bp, Homo sapien
ttatcgtcagagattggagtctgtatgataaag

SEQ ID NO: 567813 - DNA, 33 bp, Homo sapien
agtctgttcaaaatgtcaatgttatgaaaaaga

SEQ ID NO: 567814 - DNA, 33 bp, Homo sapien
agtctgttcaaaatgttaatgttatgaaaaaga

SEQ ID NO: 567815 - DNA, 33 bp, Homo sapien
cgttatcaactctgaactattcttacccaaaaa

SEQ ID NO: 567816 - DNA, 33 bp, Homo sapien
cgttatcaactctgaagtattcttacccaaaaa

SEQ ID NO: 567817 - DNA, 33 bp, Homo sapien
agaattttagactcgaataacttttcctttaga

SEQ ID NO: 567818 - DNA, 33 bp, Homo sapien
agaattttagactcgagtaacttttcctttaga

SEQ ID NO: 567819 - DNA, 33 bp, Homo sapien
agaatagctacatttacctctgagaaccaggaa

SEQ ID NO: 567820 - DNA, 33 bp, Homo sapien
agaatagctacatttatctctgagaaccaggaa

SEQ ID NO: 567821 - DNA, 33 bp, Homo sapien
cttagggagagacttacagcaccaaatgcttat

SEQ ID NO: 567822 - DNA, 33 bp, Homo sapien
cttagggagagacttatagcaccaaatgcttat

SEQ ID NO: 567823 - DNA, 33 bp, Homo sapien
acaaattaagccacgacgttatgatggctacaa

SEQ ID NO: 567824 - DNA, 33 bp, Homo sapien
acaaattaagccacgatgttatgatggctacaa

SEQ ID NO: 567825 - DNA, 33 bp, Homo sapien
taccggcatagccatactacatctacaaaatgt

SEQ ID NO: 567826 - DNA, 33 bp, Homo sapien
taccggcatagccatattacatctacaaaatgt

SEQ ID NO: 567827 - DNA, 33 bp, Homo sapien
gaatcacagggaactgaaattggttacctccag

SEQ ID NO: 567828 - DNA, 33 bp, Homo sapien
gaatcacagggaactggaattggttacctccag

SEQ ID NO: 567829 - DNA, 33 bp, Homo sapien
aaggaaatagttcaaaattacaaagcttcaata

SEQ ID NO: 567830 - DNA, 33 bp, Homo sapien
aaggaaatagttcaaacttacaaagcttcaata

SEQ ID NO: 567831 - DNA, 33 bp, Homo sapien
cttgcttagaatcatacagcagcaaagctatct

SEQ ID NO: 567832 - DNA, 33 bp, Homo sapien
cttgcttagaatcatagagcagcaaagctatct

SEQ ID NO: 567833 - DNA, 33 bp, Homo sapien
cacccagcacaattcacgtatcccaacccatat

SEQ ID NO: 567834 - DNA, 33 bp, Homo sapien
cacccagcacaattcatgtatcccaacccatat

SEQ ID NO: 567835 - DNA, 33 bp, Homo sapien
ttatgtctgattttgcgaactactgtatctctg

SEQ ID NO: 567836 - DNA, 33 bp, Homo sapien
ttatgtctgattttgctaactactgtatctctg

SEQ ID NO: 567837 - DNA, 33 bp, Homo sapien
tctcagtctaaaatccgagataaactctgcaac

SEQ ID NO: 567838 - DNA, 33 bp, Homo sapien
tctcagtctaaaatcctagataaactctgcaac

SEQ ID NO: 567839 - DNA, 33 bp, Homo sapien
tcatggctcattcagaccctacacaccgaggag

SEQ ID NO: 567840 - DNA, 33 bp, Homo sapien
tcatggctcattcagatcctacacaccgaggag

SEQ ID NO: 567841 - DNA, 33 bp, Homo sapien
ctggcaagagacacaactaacaaacagacaagt

SEQ ID NO: 567842 - DNA, 33 bp, Homo sapien
ctggcaagagacacaattaacaaacagacaagt

SEQ ID NO: 567843 - DNA, 33 bp, Homo sapien
agtatacagataagtaataagtcttggtctctc

SEQ ID NO: 567844 - DNA, 33 bp, Homo sapien
agtatacagataagtagtaagtcttggtctctc

SEQ ID NO: 567845 - DNA, 33 bp, Homo sapien
tgtctatcaagtctacaacacaatgctcaataa

SEQ ID NO: 567846 - DNA, 33 bp, Homo sapien
tgtctatcaagtctacgacacaatgctcaataa

SEQ ID NO: 567847 - DNA, 33 bp, Homo sapien
aggcaccaaaggaatacgctaaattctctcatt

SEQ ID NO: 567848 - DNA, 33 bp, Homo sapien
aggcaccaaaggaatatgctaaattctctcatt

SEQ ID NO: 567849 - DNA, 33 bp, Homo sapien
ttgagggaaactgatgacaatctcctttgcaga

SEQ ID NO: 567850 - DNA, 33 bp, Homo sapien
ttgagggaaactgatggcaatctcctttgcaga

SEQ ID NO: 567851 - DNA, 33 bp, Homo sapien
tgtatctgtaggtaaactgcactttttctgtag

SEQ ID NO: 567852 - DNA, 33 bp, Homo sapien
tgtatctgtaggtaaattgcactttttctgtag

SEQ ID NO: 567853 - DNA, 33 bp, Homo sapien
ttaactcagctaaactgaaacttctgtatcctt

SEQ ID NO: 567854 - DNA, 33 bp, Homo sapien
ttaactcagctaaacttaaacttctgtatcctt

SEQ ID NO: 567855 - DNA, 33 bp, Homo sapien
taaacgcttagtatcaatatttctactcttacc

SEQ ID NO: 567856 - DNA, 33 bp, Homo sapien
taaacgcttagtatcagtatttctactcttacc

SEQ ID NO: 567857 - DNA, 33 bp, Homo sapien
tataatatgtttataaaatgtgttgggatgagt

SEQ ID NO: 567858 - DNA, 33 bp, Homo sapien
tataatatgtttataatatgtgttgggatgagt

SEQ ID NO: 567859 - DNA, 33 bp, Homo sapien
aactggtagttgttctaaagaataatctgacaa

SEQ ID NO: 567860 - DNA, 33 bp, Homo sapien
aactggtagttgttctgaagaataatctgacaa

SEQ ID NO: 567861 - DNA, 33 bp, Homo sapien
ccagtaacttttgccagcacaataaagaaatct

SEQ ID NO: 567862 - DNA, 33 bp, Homo sapien
ccagtaacttttgccatcacaataaagaaatct

SEQ ID NO: 567863 - DNA, 33 bp, Homo sapien
acacaattcatcacaaagtaaaggtatggtcct

SEQ ID NO: 567864 - DNA, 33 bp, Homo sapien
acacaattcatcacaaggtaaaggtatggtcct

SEQ ID NO: 567865 - DNA, 33 bp, Homo sapien
tttatttgatatacaaactctataaagcagaag

SEQ ID NO: 567866 - DNA, 33 bp, Homo sapien
tttatttgatatacaatctctataaagcagaag

SEQ ID NO: 567867 - DNA, 33 bp, Homo sapien
aggcttcctttcctaacgtacagctttcatcac

SEQ ID NO: 567868 - DNA, 33 bp, Homo sapien
aggcttcctttcctaatgtacagctttcatcac

SEQ ID NO: 567869 - DNA, 33 bp, Homo sapien
cactttgcttggagaacaggattgttataaggg

SEQ ID NO: 567870 - DNA, 33 bp, Homo sapien
cactttgcttggagaagaggattgttataaggg

SEQ ID NO: 567871 - DNA, 33 bp, Homo sapien
aaccaggaaataccaaataactggctgcctata

SEQ ID NO: 567872 - DNA, 33 bp, Homo sapien
aaccaggaaataccaagtaactggctgcctata

SEQ ID NO: 567873 - DNA, 33 bp, Homo sapien
aaggggagacacatgaactgatttgtcttattt

SEQ ID NO: 567874 - DNA, 33 bp, Homo sapien
aaggggagacacatgacctgatttgtcttattt

SEQ ID NO: 567875 - DNA, 33 bp, Homo sapien
ccttagggtgaggagacggactttcctctaaga

SEQ ID NO: 567876 - DNA, 33 bp, Homo sapien
ccttagggtgaggagatggactttcctctaaga

SEQ ID NO: 567877 - DNA, 33 bp, Homo sapien
ggcagggccaggacttcaactcagaacactggt

SEQ ID NO: 567878 - DNA, 33 bp, Homo sapien
ggcagggccaggacttgaactcagaacactggt

SEQ ID NO: 567879 - DNA, 33 bp, Homo sapien
ataacaacttgggcccacattctcacatggctg

SEQ ID NO: 567880 - DNA, 33 bp, Homo sapien
ataacaacttgggcccgcattctcacatggctg

SEQ ID NO: 567881 - DNA, 33 bp, Homo sapien
gagaagcaattagaaccgtaacaatggaagtaa

SEQ ID NO: 567882 - DNA, 33 bp, Homo sapien
gagaagcaattagaactgtaacaatggaagtaa

SEQ ID NO: 567883 - DNA, 33 bp, Homo sapien
ctttcatccactcaataaagattttccctttag

SEQ ID NO: 567884 - DNA, 33 bp, Homo sapien
ctttcatccactcaatgaagattttccctttag

SEQ ID NO: 567885 - DNA, 33 bp, Homo sapien
actctctctccctgaaggactatcccaatacct

SEQ ID NO: 567886 - DNA, 33 bp, Homo sapien
actctctctccctgaatgactatcccaatacct

SEQ ID NO: 567887 - DNA, 33 bp, Homo sapien
tagctagtataaatgaccagaatatcagccatc

SEQ ID NO: 567888 - DNA, 33 bp, Homo sapien
tagctagtataaatgatcagaatatcagccatc

SEQ ID NO: 567889 - DNA, 33 bp, Homo sapien
acagccacactctccactcagtttataatctct

SEQ ID NO: 567890 - DNA, 33 bp, Homo sapien
acagccacactctccagtcagtttataatctct

SEQ ID NO: 567891 - DNA, 33 bp, Homo sapien
catttagactcaagaactgtgctatccaacatg

SEQ ID NO: 567892 - DNA, 33 bp, Homo sapien
catttagactcaagaattgtgctatccaacatg

SEQ ID NO: 567893 - DNA, 33 bp, Homo sapien
ggttcacgtccggatacgtgggaatcccctcaa

SEQ ID NO: 567894 - DNA, 33 bp, Homo sapien
ggttcacgtccggatatgtgggaatcccctcaa

SEQ ID NO: 567895 - DNA, 33 bp, Homo sapien
agagacagtgagtgaaaggtacagaaggctggg

SEQ ID NO: 567896 - DNA, 33 bp, Homo sapien
agagacagtgagtgaagggtacagaaggctggg

SEQ ID NO: 567897 - DNA, 33 bp, Homo sapien
ggtggcatttaaactccagcaggctcattctac

SEQ ID NO: 567898 - DNA, 33 bp, Homo sapien
ggtggcatttaaactctagcaggctcattctac

SEQ ID NO: 567899 - DNA, 33 bp, Homo sapien
ttgctcttctgaacaactgtatcagcctcttcc

SEQ ID NO: 567900 - DNA, 33 bp, Homo sapien
ttgctcttctgaacaattgtatcagcctcttcc

SEQ ID NO: 567901 - DNA, 33 bp, Homo sapien
attaaaaattttttcagtctggtttcagctgct

SEQ ID NO: 567902 - DNA, 33 bp, Homo sapien
attaaaaattttttcattctggtttcagctgct

SEQ ID NO: 567903 - DNA, 33 bp, Homo sapien
tcccatcacattcctggaagatccacttcaggt

SEQ ID NO: 567904 - DNA, 33 bp, Homo sapien
tcccatcacattcctgtaagatccacttcaggt

SEQ ID NO: 567905 - DNA, 33 bp, Homo sapien
cgaaatcgcgagcccaaatcaggagtggtggcg

SEQ ID NO: 567906 - DNA, 33 bp, Homo sapien
cgaaatcgcgagcccagatcaggagtggtggcg

SEQ ID NO: 567907 - DNA, 33 bp, Homo sapien
acaaggaaatcggtcgcactttatcgccaggac

SEQ ID NO: 567908 - DNA, 33 bp, Homo sapien
acaaggaaatcggtcggactttatcgccaggac

SEQ ID NO: 567909 - DNA, 33 bp, Homo sapien
acttagcgaccagatcaataaagggtagttatt

SEQ ID NO: 567910 - DNA, 33 bp, Homo sapien
acttagcgaccagatccataaagggtagttatt

SEQ ID NO: 567911 - DNA, 33 bp, Homo sapien
acagttctaacaataaaaaggtgttgcccttat

SEQ ID NO: 567912 - DNA, 33 bp, Homo sapien
acagttctaacaataagaaggtgttgcccttat

SEQ ID NO: 567913 - DNA, 33 bp, Homo sapien
agaccagatactaggcaactccctctggctccc

SEQ ID NO: 567914 - DNA, 33 bp, Homo sapien
agaccagatactaggcgactccctctggctccc

SEQ ID NO: 567915 - DNA, 33 bp, Homo sapien
ctggccagctgtccccagagctttgaggagccc

SEQ ID NO: 567916 - DNA, 33 bp, Homo sapien
ctggccagctgtcccccgagctttgaggagccc

SEQ ID NO: 567917 - DNA, 33 bp, Homo sapien
cggagtcacctggggacaatggtcagaggtcag

SEQ ID NO: 567918 - DNA, 33 bp, Homo sapien
cggagtcacctggggataatggtcagaggtcag

SEQ ID NO: 567919 - DNA, 33 bp, Homo sapien
ctgcaccagatgcccacgtggccggcctcaagg

SEQ ID NO: 567920 - DNA, 33 bp, Homo sapien
ctgcaccagatgcccatgtggccggcctcaagg

SEQ ID NO: 567921 - DNA, 33 bp, Homo sapien
ctgatgccagcattctcaccctgcatgacttgc

SEQ ID NO: 567922 - DNA, 33 bp, Homo sapien
ctgatgccagcattcttaccctgcatgacttgc

SEQ ID NO: 567923 - DNA, 33 bp, Homo sapien
gcacagcgggtatccacgacagggagtttggac

SEQ ID NO: 567924 - DNA, 33 bp, Homo sapien
gcacagcgggtatccatgacagggagtttggac

SEQ ID NO: 567925 - DNA, 33 bp, Homo sapien
ggcccaggagctatagcagcaaaggaaagcctc

SEQ ID NO: 567926 - DNA, 33 bp, Homo sapien
ggcccaggagctataggagcaaaggaaagcctc

SEQ ID NO: 567927 - DNA, 33 bp, Homo sapien
attggcagagtctttccccatctggcagactgg

SEQ ID NO: 567928 - DNA, 33 bp, Homo sapien
attggcagagtctttctccatctggcagactgg

SEQ ID NO: 567929 - DNA, 33 bp, Homo sapien
gcctggattttatatacagatggtccacttaga

SEQ ID NO: 567930 - DNA, 33 bp, Homo sapien
gcctggattttatatagagatggtccacttaga

SEQ ID NO: 567931 - DNA, 33 bp, Homo sapien
tatcactaatgctcaaaggtggaatccttggat

SEQ ID NO: 567932 - DNA, 33 bp, Homo sapien
tatcactaatgctcaacggtggaatccttggat

SEQ ID NO: 567933 - DNA, 33 bp, Homo sapien
aagtaatagcactcaacgcacagaagctgtccc

SEQ ID NO: 567934 - DNA, 33 bp, Homo sapien
aagtaatagcactcaatgcacagaagctgtccc

SEQ ID NO: 567935 - DNA, 33 bp, Homo sapien
ttatttcacatataagcaactgcgaaagtgcct

SEQ ID NO: 567936 - DNA, 33 bp, Homo sapien
ttatttcacatataagtaactgcgaaagtgcct

SEQ ID NO: 567937 - DNA, 33 bp, Homo sapien
tcccttccttcaatacagaacatgtttttaata

SEQ ID NO: 567938 - DNA, 33 bp, Homo sapien
tcccttccttcaatacggaacatgtttttaata

SEQ ID NO: 567939 - DNA, 33 bp, Homo sapien
cttgaaaatatttatcacagaaagtcttgtcag

SEQ ID NO: 567940 - DNA, 33 bp, Homo sapien
cttgaaaatatttatcgcagaaagtcttgtcag

SEQ ID NO: 567941 - DNA, 33 bp, Homo sapien
gcttcttcaaaatacaaaaggaatgaaagcata

SEQ ID NO: 567942 - DNA, 33 bp, Homo sapien
gcttcttcaaaatacacaaggaatgaaagcata

SEQ ID NO: 567943 - DNA, 33 bp, Homo sapien
atttgtcaacacttaccaatttccattaatggg

SEQ ID NO: 567944 - DNA, 33 bp, Homo sapien
atttgtcaacacttacgaatttccattaatggg

SEQ ID NO: 567945 - DNA, 33 bp, Homo sapien
ggtatgaaggaagttaaggaaactagctggtaa

SEQ ID NO: 567946 - DNA, 33 bp, Homo sapien
ggtatgaaggaagttagggaaactagctggtaa

SEQ ID NO: 567947 - DNA, 33 bp, Homo sapien
tttttttaccccaatacgacatactgtataagg

SEQ ID NO: 567948 - DNA, 33 bp, Homo sapien
tttttttaccccaataggacatactgtataagg

SEQ ID NO: 567949 - DNA, 33 bp, Homo sapien
aatctctgggatctaacgcggctttaatttctg

SEQ ID NO: 567950 - DNA, 33 bp, Homo sapien
aatctctgggatctaatgcggctttaatttctg

SEQ ID NO: 567951 - DNA, 33 bp, Homo sapien
ttagtttattttctccccacatagagtgatata

SEQ ID NO: 567952 - DNA, 33 bp, Homo sapien
ttagtttattttctccgcacatagagtgatata

SEQ ID NO: 567953 - DNA, 33 bp, Homo sapien
ctaggcatttaagtcaaacaaatcttacctggc

SEQ ID NO: 567954 - DNA, 33 bp, Homo sapien
ctaggcatttaagtcagacaaatcttacctggc

SEQ ID NO: 567955 - DNA, 33 bp, Homo sapien
acaggaattaatttgaaaggactaccaatggtc

SEQ ID NO: 567956 - DNA, 33 bp, Homo sapien
acaggaattaatttgagaggactaccaatggtc

SEQ ID NO: 567957 - DNA, 33 bp, Homo sapien
aagattgtcccaaagacgacacaggaattaatt

SEQ ID NO: 567958 - DNA, 33 bp, Homo sapien
aagattgtcccaaagatgacacaggaattaatt

SEQ ID NO: 567959 - DNA, 33 bp, Homo sapien
aaagatgaggctggcaaataaagccagacaaat

SEQ ID NO: 567960 - DNA, 33 bp, Homo sapien
aaagatgaggctggcagataaagccagacaaat

SEQ ID NO: 567961 - DNA, 33 bp, Homo sapien
gaatgaaatctcatgaaacagcccaatatgtaa

SEQ ID NO: 567962 - DNA, 33 bp, Homo sapien
gaatgaaatctcatgagacagcccaatatgtaa

SEQ ID NO: 567963 - DNA, 33 bp, Homo sapien
tgggtccaccttcgacacggtgatcacccccta

SEQ ID NO: 567964 - DNA, 33 bp, Homo sapien
tgggtccaccttcgacgcggtgatcacccccta

SEQ ID NO: 567965 - DNA, 33 bp, Homo sapien
aaataaatgtttgtagcaagtaatcttagtcat

SEQ ID NO: 567966 - DNA, 33 bp, Homo sapien
aaataaatgtttgtagtaagtaatcttagtcat

SEQ ID NO: 567967 - DNA, 33 bp, Homo sapien
ctacttggaatgtgaacccttggtaggatttac

SEQ ID NO: 567968 - DNA, 33 bp, Homo sapien
ctacttggaatgtgaagccttggtaggatttac

SEQ ID NO: 567969 - DNA, 33 bp, Homo sapien
ggtagaggtacattgcactttcaataagttctg

SEQ ID NO: 567970 - DNA, 33 bp, Homo sapien
ggtagaggtacattgcgctttcaataagttctg

SEQ ID NO: 567971 - DNA, 33 bp, Homo sapien
cccaatatctgttccccgcttcctccttagtag

SEQ ID NO: 567972 - DNA, 33 bp, Homo sapien
cccaatatctgttccctgcttcctccttagtag

SEQ ID NO: 567973 - DNA, 33 bp, Homo sapien
attagataagctctaaaatccttccagctgcaa

SEQ ID NO: 567974 - DNA, 33 bp, Homo sapien
attagataagctctaagatccttccagctgcaa

SEQ ID NO: 567975 - DNA, 33 bp, Homo sapien
aaaagtactcaagcaactaacaaagtacattat

SEQ ID NO: 567976 - DNA, 33 bp, Homo sapien
aaaagtactcaagcaattaacaaagtacattat

SEQ ID NO: 567977 - DNA, 33 bp, Homo sapien
taaatacatcttacccaccaggcccttagacac

SEQ ID NO: 567978 - DNA, 33 bp, Homo sapien
taaatacatcttacccgccaggcccttagacac

SEQ ID NO: 567979 - DNA, 33 bp, Homo sapien
ggggaacataagatgaataaggcatggattctg

SEQ ID NO: 567980 - DNA, 33 bp, Homo sapien
ggggaacataagatgagtaaggcatggattctg

SEQ ID NO: 567981 - DNA, 33 bp, Homo sapien
ttttgcaagaaggcatcaagtgctgtagtgggc

SEQ ID NO: 567982 - DNA, 33 bp, Homo sapien
ttttgcaagaaggcatgaagtgctgtagtgggc

SEQ ID NO: 567983 - DNA, 33 bp, Homo sapien
ctaattccacttaagacctccagtttctgtcct

SEQ ID NO: 567984 - DNA, 33 bp, Homo sapien
ctaattccacttaagatctccagtttctgtcct

SEQ ID NO: 567985 - DNA, 33 bp, Homo sapien
gcatgcaaagttcaagcatttctacaaagcaac

SEQ ID NO: 567986 - DNA, 33 bp, Homo sapien
gcatgcaaagttcaagtatttctacaaagcaac

SEQ ID NO: 567987 - DNA, 33 bp, Homo sapien
agaacaaagaggaaagacttgatctacaagata

SEQ ID NO: 567988 - DNA, 33 bp, Homo sapien
agaacaaagaggaaaggcttgatctacaagata

SEQ ID NO: 567989 - DNA, 33 bp, Homo sapien
gtttagaatgagaaaaggctcaagttgcccccc

SEQ ID NO: 567990 - DNA, 33 bp, Homo sapien
gtttagaatgagaaaatgctcaagttgcccccc

SEQ ID NO: 567991 - DNA, 33 bp, Homo sapien
agattgctttaggtaaccaatcatcttctgaga

SEQ ID NO: 567992 - DNA, 33 bp, Homo sapien
agattgctttaggtaagcaatcatcttctgaga

SEQ ID NO: 567993 - DNA, 33 bp, Homo sapien
ccagcaatgatgaaaccgcccaccaggacgccc

SEQ ID NO: 567994 - DNA, 33 bp, Homo sapien
ccagcaatgatgaaactgcccaccaggacgccc

SEQ ID NO: 567995 - DNA, 33 bp, Homo sapien
ataccatgtagggtgacggtttgacaattagag

SEQ ID NO: 567996 - DNA, 33 bp, Homo sapien
ataccatgtagggtgatggtttgacaattagag

SEQ ID NO: 567997 - DNA, 33 bp, Homo sapien
aagccacttacagctacccaacattatttcacc

SEQ ID NO: 567998 - DNA, 33 bp, Homo sapien
aagccacttacagctatccaacattatttcacc

SEQ ID NO: 567999 - DNA, 33 bp, Homo sapien
gtagccaccaaaaaatcacatgttacatatggg

SEQ ID NO: 568000 - DNA, 33 bp, Homo sapien
gtagccaccaaaaaatgacatgttacatatggg

SEQ ID NO: 568001 - DNA, 33 bp, Homo sapien
caggcgcgcactatcacgcccaagagttcgtct

SEQ ID NO: 568002 - DNA, 33 bp, Homo sapien
caggcgcgcactatcatgcccaagagttcgtct

SEQ ID NO: 568003 - DNA, 33 bp, Homo sapien
cacatgataatcctaaatgatgaagaaaatgca

SEQ ID NO: 568004 - DNA, 33 bp, Homo sapien
cacatgataatcctaactgatgaagaaaatgca

SEQ ID NO: 568005 - DNA, 33 bp, Homo sapien
caggacaaacaggagacaatgtgattagagtca

SEQ ID NO: 568006 - DNA, 33 bp, Homo sapien
caggacaaacaggagagaatgtgattagagtca

SEQ ID NO: 568007 - DNA, 33 bp, Homo sapien
gtgtcacacagatcaaataatatgaagatgaat

SEQ ID NO: 568008 - DNA, 33 bp, Homo sapien
gtgtcacacagatcaagtaatatgaagatgaat

SEQ ID NO: 568009 - DNA, 33 bp, Homo sapien
cgcctagaaatacacacatttgcacttacaaat

SEQ ID NO: 568010 - DNA, 33 bp, Homo sapien
cgcctagaaatacacatatttgcacttacaaat

SEQ ID NO: 568011 - DNA, 33 bp, Homo sapien
cctggctcttggcctacgttgtaagcctgatcc

SEQ ID NO: 568012 - DNA, 33 bp, Homo sapien
cctggctcttggcctatgttgtaagcctgatcc

SEQ ID NO: 568013 - DNA, 33 bp, Homo sapien
aatccatgcgatgatagaaagtgttctcaagga

SEQ ID NO: 568014 - DNA, 33 bp, Homo sapien
aatccatgcgatgatataaagtgttctcaagga

SEQ ID NO: 568015 - DNA, 33 bp, Homo sapien
ggttgaataagatacacgtgaagtgcgtggtat

SEQ ID NO: 568016 - DNA, 33 bp, Homo sapien
ggttgaataagatacatgtgaagtgcgtggtat

SEQ ID NO: 568017 - DNA, 33 bp, Homo sapien
catgatttgtaaaagaaggtacaaaagctagta

SEQ ID NO: 568018 - DNA, 33 bp, Homo sapien
catgatttgtaaaagatggtacaaaagctagta

SEQ ID NO: 568019 - DNA, 33 bp, Homo sapien
ggtaggggtgtccttccaagagcagtgtgggaa

SEQ ID NO: 568020 - DNA, 33 bp, Homo sapien
ggtaggggtgtccttctaagagcagtgtgggaa

SEQ ID NO: 568021 - DNA, 33 bp, Homo sapien
ctcccaaacactaggcaaaaggatctgcctcgg

SEQ ID NO: 568022 - DNA, 33 bp, Homo sapien
ctcccaaacactaggcgaaaggatctgcctcgg

SEQ ID NO: 568023 - DNA, 33 bp, Homo sapien
caatatctttgattgacaggagacagaagaaat

SEQ ID NO: 568024 - DNA, 33 bp, Homo sapien
caatatctttgattgataggagacagaagaaat

SEQ ID NO: 568025 - DNA, 33 bp, Homo sapien
ggctccaggcctgctgccaacaagggccatgtc

SEQ ID NO: 568026 - DNA, 33 bp, Homo sapien
ggctccaggcctgctgtcaacaagggccatgtc

SEQ ID NO: 568027 - DNA, 33 bp, Homo sapien
tgtagccctggttgaaagtgtgtgggataggtc

SEQ ID NO: 568028 - DNA, 33 bp, Homo sapien
tgtagccctggttgaaggtgtgtgggataggtc

SEQ ID NO: 568029 - DNA, 33 bp, Homo sapien
tgctgctcatttagccaagcctcctattgagtg

SEQ ID NO: 568030 - DNA, 33 bp, Homo sapien
tgctgctcatttagccgagcctcctattgagtg

SEQ ID NO: 568031 - DNA, 33 bp, Homo sapien
ggataaagaagagaagaattcctggcagcagta

SEQ ID NO: 568032 - DNA, 33 bp, Homo sapien
ggataaagaagagaaggattcctggcagcagta

SEQ ID NO: 568033 - DNA, 33 bp, Homo sapien
ttctcatgttttctcaactggacaaatgactag

SEQ ID NO: 568034 - DNA, 33 bp, Homo sapien
ttctcatgttttctcagctggacaaatgactag

SEQ ID NO: 568035 - DNA, 33 bp, Homo sapien
tttgaagatgattgtgaacttaatattatgtgt

SEQ ID NO: 568036 - DNA, 33 bp, Homo sapien
tttgaagatgattgtggacttaatattatgtgt

SEQ ID NO: 568037 - DNA, 33 bp, Homo sapien
gtgattgctaaaatcacacaagactggttgtct

SEQ ID NO: 568038 - DNA, 33 bp, Homo sapien
gtgattgctaaaatcatacaagactggttgtct

SEQ ID NO: 568039 - DNA, 33 bp, Homo sapien
cccttcatgtctcctaggttgtggtaatggaaa

SEQ ID NO: 568040 - DNA, 33 bp, Homo sapien
cccttcatgtctcctatgttgtggtaatggaaa

SEQ ID NO: 568041 - DNA, 33 bp, Homo sapien
tgggcttgtgacttaccatggcggccacagcca

SEQ ID NO: 568042 - DNA, 33 bp, Homo sapien
tgggcttgtgacttactatggcggccacagcca

SEQ ID NO: 568043 - DNA, 33 bp, Homo sapien
gggtacataatgctgcaaatttactaaaaagca

SEQ ID NO: 568044 - DNA, 33 bp, Homo sapien
gggtacataatgctgcgaatttactaaaaagca

SEQ ID NO: 568045 - DNA, 33 bp, Homo sapien
ggaatgcctttagattcaagaaaagctgtcctc

SEQ ID NO: 568046 - DNA, 33 bp, Homo sapien
ggaatgcctttagattgaagaaaagctgtcctc

SEQ ID NO: 568047 - DNA, 33 bp, Homo sapien
aataaaatatataatccctgtgaccacatccca

SEQ ID NO: 568048 - DNA, 33 bp, Homo sapien
aataaaatatataatctctgtgaccacatccca

SEQ ID NO: 568049 - DNA, 33 bp, Homo sapien
atcttctgcatccagaaggtatattccagattt

SEQ ID NO: 568050 - DNA, 33 bp, Homo sapien
atcttctgcatccagatggtatattccagattt

SEQ ID NO: 568051 - DNA, 33 bp, Homo sapien
gacagtttggattatacgctttgtgcaggaaaa

SEQ ID NO: 568052 - DNA, 33 bp, Homo sapien
gacagtttggattatatgctttgtgcaggaaaa

SEQ ID NO: 568053 - DNA, 33 bp, Homo sapien
ctggtgagctgatcacagggaagtgggctaagt

SEQ ID NO: 568054 - DNA, 33 bp, Homo sapien
ctggtgagctgatcacggggaagtgggctaagt

SEQ ID NO: 568055 - DNA, 33 bp, Homo sapien
ctttgttgtttgtggccactgaagtctctgctt

SEQ ID NO: 568056 - DNA, 33 bp, Homo sapien
ctttgttgtttgtggctactgaagtctctgctt

SEQ ID NO: 568057 - DNA, 33 bp, Homo sapien
gacttattgcatgccacgtacttgtgctttaca

SEQ ID NO: 568058 - DNA, 33 bp, Homo sapien
gacttattgcatgccatgtacttgtgctttaca

SEQ ID NO: 568059 - DNA, 33 bp, Homo sapien
ttctgacctgaatacacatgtaagaaagtatag

SEQ ID NO: 568060 - DNA, 33 bp, Homo sapien
ttctgacctgaatacagatgtaagaaagtatag

SEQ ID NO: 568061 - DNA, 33 bp, Homo sapien
gtagtgaagcaggtaaagcaagaactctccacc

SEQ ID NO: 568062 - DNA, 33 bp, Homo sapien
gtagtgaagcaggtaaggcaagaactctccacc

SEQ ID NO: 568063 - DNA, 33 bp, Homo sapien
cgcctacaaacctgtgaagcttggaaagttcgg

SEQ ID NO: 568064 - DNA, 33 bp, Homo sapien
cgcctacaaacctgtggagcttggaaagttcgg

SEQ ID NO: 568065 - DNA, 33 bp, Homo sapien
atgtaaattagtaagccgagttttcctctttaa

SEQ ID NO: 568066 - DNA, 33 bp, Homo sapien
atgtaaattagtaagctgagttttcctctttaa

SEQ ID NO: 568067 - DNA, 33 bp, Homo sapien
gcagagctaagccataagccagagatgacaaat

SEQ ID NO: 568068 - DNA, 33 bp, Homo sapien
gcagagctaagccataggccagagatgacaaat

SEQ ID NO: 568069 - DNA, 33 bp, Homo sapien
gggagggaggcattccagactaaattcagcagg

SEQ ID NO: 568070 - DNA, 33 bp, Homo sapien
gggagggaggcattccggactaaattcagcagg

SEQ ID NO: 568071 - DNA, 33 bp, Homo sapien
atttgtgttagtgaagacctaaagacacagact

SEQ ID NO: 568072 - DNA, 33 bp, Homo sapien
atttgtgttagtgaaggcctaaagacacagact

SEQ ID NO: 568073 - DNA, 33 bp, Homo sapien
gggaagatgagagcaacgttttggaaaacgcca

SEQ ID NO: 568074 - DNA, 33 bp, Homo sapien
gggaagatgagagcaatgttttggaaaacgcca

SEQ ID NO: 568075 - DNA, 33 bp, Homo sapien
gttgtatctgaacaaacattgactgtataaaac

SEQ ID NO: 568076 - DNA, 33 bp, Homo sapien
gttgtatctgaacaaatattgactgtataaaac

SEQ ID NO: 568077 - DNA, 33 bp, Homo sapien
agaagtgcccaagaacccttcatggtcgaatgg

SEQ ID NO: 568078 - DNA, 33 bp, Homo sapien
agaagtgcccaagaactcttcatggtcgaatgg

SEQ ID NO: 568079 - DNA, 33 bp, Homo sapien
ctcacagtgaacctatcagtcaatacaaattga

SEQ ID NO: 568080 - DNA, 33 bp, Homo sapien
ctcacagtgaacctatgagtcaatacaaattga

SEQ ID NO: 568081 - DNA, 33 bp, Homo sapien
tttcatgtagttccataagctcagattctaggg

SEQ ID NO: 568082 - DNA, 33 bp, Homo sapien
tttcatgtagttccatcagctcagattctaggg

SEQ ID NO: 568083 - DNA, 33 bp, Homo sapien
gatgtgatcagacatacagctcacaaagattgc

SEQ ID NO: 568084 - DNA, 33 bp, Homo sapien
gatgtgatcagacatatagctcacaaagattgc

SEQ ID NO: 568085 - DNA, 33 bp, Homo sapien
ttgtggatgatcttccactccggctttctaaag

SEQ ID NO: 568086 - DNA, 33 bp, Homo sapien
ttgtggatgatcttccgctccggctttctaaag

SEQ ID NO: 568087 - DNA, 33 bp, Homo sapien
aaaaaagttttctgcaagaagataatctctgtg

SEQ ID NO: 568088 - DNA, 33 bp, Homo sapien
aaaaaagttttctgcaggaagataatctctgtg

SEQ ID NO: 568089 - DNA, 33 bp, Homo sapien
ctcacgccttctcacaacttgctccctctgcct

SEQ ID NO: 568090 - DNA, 33 bp, Homo sapien
ctcacgccttctcacaccttgctccctctgcct

SEQ ID NO: 568091 - DNA, 33 bp, Homo sapien
tgtatctaaattcaaaccgttttgtcagaaata

SEQ ID NO: 568092 - DNA, 33 bp, Homo sapien
tgtatctaaattcaaagcgttttgtcagaaata

SEQ ID NO: 568093 - DNA, 33 bp, Homo sapien
agtgcaggagcagaaaacgaagtcatccatcag

SEQ ID NO: 568094 - DNA, 33 bp, Homo sapien
agtgcaggagcagaaatcgaagtcatccatcag

SEQ ID NO: 568095 - DNA, 33 bp, Homo sapien
ttccttgttttattgcccacataggaccaaaac

SEQ ID NO: 568096 - DNA, 33 bp, Homo sapien
ttccttgttttattgctcacataggaccaaaac

SEQ ID NO: 568097 - DNA, 33 bp, Homo sapien
ctgggtgactgtaaaaagtctgggatgtatctt

SEQ ID NO: 568098 - DNA, 33 bp, Homo sapien
ctgggtgactgtaaaaggtctgggatgtatctt

SEQ ID NO: 568099 - DNA, 33 bp, Homo sapien
tacagcttagactacacgctgtatctattttac

SEQ ID NO: 568100 - DNA, 33 bp, Homo sapien
tacagcttagactacaggctgtatctattttac

SEQ ID NO: 568101 - DNA, 33 bp, Homo sapien
tgatgcaacgttatcaccataccttcctttact

SEQ ID NO: 568102 - DNA, 33 bp, Homo sapien
tgatgcaacgttatcatcataccttcctttact

SEQ ID NO: 568103 - DNA, 33 bp, Homo sapien
gagatgtgaggaagacaaaagcatcttcagttg

SEQ ID NO: 568104 - DNA, 33 bp, Homo sapien
gagatgtgaggaagacgaaagcatcttcagttg

SEQ ID NO: 568105 - DNA, 33 bp, Homo sapien
tgctgtgaatggattcaagagaaaatttggaat

SEQ ID NO: 568106 - DNA, 33 bp, Homo sapien
tgctgtgaatggattccagagaaaatttggaat

SEQ ID NO: 568107 - DNA, 33 bp, Homo sapien
cagcttctgggcgaaccgaggatgccaggagtt

SEQ ID NO: 568108 - DNA, 33 bp, Homo sapien
cagcttctgggcgaactgaggatgccaggagtt

SEQ ID NO: 568109 - DNA, 33 bp, Homo sapien
ctcacccgctccgggaatagttctcacatcaac

SEQ ID NO: 568110 - DNA, 33 bp, Homo sapien
ctcacccgctccgggagtagttctcacatcaac

SEQ ID NO: 568111 - DNA, 33 bp, Homo sapien
cctatgagcaagtgaccggagaatccacccttc

SEQ ID NO: 568112 - DNA, 33 bp, Homo sapien
cctatgagcaagtgactggagaatccacccttc

SEQ ID NO: 568113 - DNA, 33 bp, Homo sapien
gtggatgagaatcttcaagtgtccccggtgagc

SEQ ID NO: 568114 - DNA, 33 bp, Homo sapien
gtggatgagaatcttcgagtgtccccggtgagc

SEQ ID NO: 568115 - DNA, 33 bp, Homo sapien
ttccactgatgctcaaataagtacctgttagct

SEQ ID NO: 568116 - DNA, 33 bp, Homo sapien
ttccactgatgctcaagtaagtacctgttagct

SEQ ID NO: 568117 - DNA, 33 bp, Homo sapien
caggaacaaacaaccactatgccatccctctgt

SEQ ID NO: 568118 - DNA, 33 bp, Homo sapien
caggaacaaacaaccattatgccatccctctgt

SEQ ID NO: 568119 - DNA, 33 bp, Homo sapien
tggtaagattacaggcaacaactggagctgctg

SEQ ID NO: 568120 - DNA, 33 bp, Homo sapien
tggtaagattacaggccacaactggagctgctg

SEQ ID NO: 568121 - DNA, 33 bp, Homo sapien
aatttaacagatatcaatagagcacctgctgtg

SEQ ID NO: 568122 - DNA, 33 bp, Homo sapien
aatttaacagatatcagtagagcacctgctgtg

SEQ ID NO: 568123 - DNA, 33 bp, Homo sapien
ttataacttaaaattcacaaaatgtcagaaata

SEQ ID NO: 568124 - DNA, 33 bp, Homo sapien
ttataacttaaaattctcaaaatgtcagaaata

SEQ ID NO: 568125 - DNA, 33 bp, Homo sapien
tcactctggaccactacattcaattcatgccac

SEQ ID NO: 568126 - DNA, 33 bp, Homo sapien
tcactctggaccactatattcaattcatgccac

SEQ ID NO: 568127 - DNA, 33 bp, Homo sapien
agaacctaacttgacgacaaaactggatatgga

SEQ ID NO: 568128 - DNA, 33 bp, Homo sapien
agaacctaacttgacggcaaaactggatatgga

SEQ ID NO: 568129 - DNA, 33 bp, Homo sapien
ctgttgtgggttacacgagcagttctgttacag

SEQ ID NO: 568130 - DNA, 33 bp, Homo sapien
ctgttgtgggttacactagcagttctgttacag

SEQ ID NO: 568131 - DNA, 33 bp, Homo sapien
caggaaatatgggaaccaatcaaatgcctgcag

SEQ ID NO: 568132 - DNA, 33 bp, Homo sapien
caggaaatatgggaactaatcaaatgcctgcag

SEQ ID NO: 568133 - DNA, 33 bp, Homo sapien
cccacaaaactacccaccaaatatcaacctaat

SEQ ID NO: 568134 - DNA, 33 bp, Homo sapien
cccacaaaactacccagcaaatatcaacctaat

SEQ ID NO: 568135 - DNA, 33 bp, Homo sapien
tgtgaaagagatactaaccctagtcattacgtt

SEQ ID NO: 568136 - DNA, 33 bp, Homo sapien
tgtgaaagagatactagccctagtcattacgtt

SEQ ID NO: 568137 - DNA, 33 bp, Homo sapien
cctctcataccctgataaaattgttactgattt

SEQ ID NO: 568138 - DNA, 33 bp, Homo sapien
cctctcataccctgatcaaattgttactgattt

SEQ ID NO: 568139 - DNA, 33 bp, Homo sapien
tgttccatcacagtcaagaattaaattttttca

SEQ ID NO: 568140 - DNA, 33 bp, Homo sapien
tgttccatcacagtcaggaattaaattttttca

SEQ ID NO: 568141 - DNA, 33 bp, Homo sapien
acctactgaagattcactgaagaacctggactt

SEQ ID NO: 568142 - DNA, 33 bp, Homo sapien
acctactgaagattcattgaagaacctggactt

SEQ ID NO: 568143 - DNA, 33 bp, Homo sapien
ccttcatccttcaacaatgtctcttgaaataat

SEQ ID NO: 568144 - DNA, 33 bp, Homo sapien
ccttcatccttcaacagtgtctcttgaaataat

SEQ ID NO: 568145 - DNA, 33 bp, Homo sapien
atcaactccaatactacaagaggcaaaatggaa

SEQ ID NO: 568146 - DNA, 33 bp, Homo sapien
atcaactccaatactataagaggcaaaatggaa

SEQ ID NO: 568147 - DNA, 33 bp, Homo sapien
ctggtttctaaagatgaaaatattgttgtggag

SEQ ID NO: 568148 - DNA, 33 bp, Homo sapien
ctggtttctaaagatggaaatattgttgtggag

SEQ ID NO: 568149 - DNA, 33 bp, Homo sapien
gaggaaaccagcatcaaggagtttaattctttt

SEQ ID NO: 568150 - DNA, 33 bp, Homo sapien
gaggaaaccagcatcacggagtttaattctttt

SEQ ID NO: 568151 - DNA, 33 bp, Homo sapien
gagaagaaaatgtaaaatgctcagaggacttaa

SEQ ID NO: 568152 - DNA, 33 bp, Homo sapien
gagaagaaaatgtaaagtgctcagaggacttaa

SEQ ID NO: 568153 - DNA, 33 bp, Homo sapien
ttcctgaatattactgaacgatttggtgaaaaa

SEQ ID NO: 568154 - DNA, 33 bp, Homo sapien
ttcctgaatattactggacgatttggtgaaaaa

SEQ ID NO: 568155 - DNA, 33 bp, Homo sapien
aagcaaaatgatgaaaggggaattaatttacat

SEQ ID NO: 568156 - DNA, 33 bp, Homo sapien
aagcaaaatgatgaaatgggaattaatttacat

SEQ ID NO: 568157 - DNA, 33 bp, Homo sapien
ttacatatggcaaaacacacaaatcttaaatgt

SEQ ID NO: 568158 - DNA, 33 bp, Homo sapien
ttacatatggcaaaacgcacaaatcttaaatgt

SEQ ID NO: 568159 - DNA, 33 bp, Homo sapien
gaattaagcaaatctaacaatagagaggaagat

SEQ ID NO: 568160 - DNA, 33 bp, Homo sapien
gaattaagcaaatctagcaatagagaggaagat

SEQ ID NO: 568161 - DNA, 33 bp, Homo sapien
ctattgttgtaaaggaacaagggatgccgggcg

SEQ ID NO: 568162 - DNA, 33 bp, Homo sapien
ctattgttgtaaaggagcaagggatgccgggcg

SEQ ID NO: 568163 - DNA, 33 bp, Homo sapien
aaaaagtaagatttgaggagcagcgtataacag

SEQ ID NO: 568164 - DNA, 33 bp, Homo sapien
aaaaagtaagatttgatgagcagcgtataacag

SEQ ID NO: 568165 - DNA, 33 bp, Homo sapien
gtcctgtaaggaggtagaaatcacatggcattt

SEQ ID NO: 568166 - DNA, 33 bp, Homo sapien
gtcctgtaaggaggtataaatcacatggcattt

SEQ ID NO: 568167 - DNA, 33 bp, Homo sapien
aaaagcacgttagctacagagagagggatgtaa

SEQ ID NO: 568168 - DNA, 33 bp, Homo sapien
aaaagcacgttagctagagagagagggatgtaa

SEQ ID NO: 568169 - DNA, 33 bp, Homo sapien
ataccacttgtatgtactaagcctcatatttac

SEQ ID NO: 568170 - DNA, 33 bp, Homo sapien
ataccacttgtatgtattaagcctcatatttac

SEQ ID NO: 568171 - DNA, 33 bp, Homo sapien
gacttccctaaacactcacttcagagatcatgg

SEQ ID NO: 568172 - DNA, 33 bp, Homo sapien
gacttccctaaacactgacttcagagatcatgg

SEQ ID NO: 568173 - DNA, 33 bp, Homo sapien
ggaaataaacacttgccatcataaacaaatgta

SEQ ID NO: 568174 - DNA, 33 bp, Homo sapien
ggaaataaacacttgctatcataaacaaatgta

SEQ ID NO: 568175 - DNA, 33 bp, Homo sapien
aaccatatttccagtaccaaaactgaggcccca

SEQ ID NO: 568176 - DNA, 33 bp, Homo sapien
aaccatatttccagtatcaaaactgaggcccca

SEQ ID NO: 568177 - DNA, 33 bp, Homo sapien
ttaaccactactttagcaaactcagttatgaac

SEQ ID NO: 568178 - DNA, 33 bp, Homo sapien
ttaaccactactttaggaaactcagttatgaac

SEQ ID NO: 568179 - DNA, 33 bp, Homo sapien
tacctccaggccaacactgaacggtagataagc

SEQ ID NO: 568180 - DNA, 33 bp, Homo sapien
tacctccaggccaacattgaacggtagataagc

SEQ ID NO: 568181 - DNA, 33 bp, Homo sapien
caatacagctgcataacggtagtatttattaaa

SEQ ID NO: 568182 - DNA, 33 bp, Homo sapien
caatacagctgcataatggtagtatttattaaa

SEQ ID NO: 568183 - DNA, 33 bp, Homo sapien; identical to SEQ ID NO: 568181

SEQ ID NO: 568184 - DNA, 33 bp, Homo sapien; identical to SEQ ID NO: 568182

SEQ ID NO: 568185 - DNA, 33 bp, Homo sapien
aggctcaaaatctcaacagtcaccctttgctct

SEQ ID NO: 568186 - DNA, 33 bp, Homo sapien
aggctcaaaatctcaagagtcaccctttgctct

SEQ ID NO: 568187 - DNA, 33 bp, Homo sapien
agctctacttctggaagaatctactttttgatt

SEQ ID NO: 568188 - DNA, 33 bp, Homo sapien
agctctacttctggaataatctactttttgatt

SEQ ID NO: 568189 - DNA, 33 bp, Homo sapien
tcaggaggacgtagacaaaatgaagtgctttca

SEQ ID NO: 568190 - DNA, 33 bp, Homo sapien
tcaggaggacgtagacgaaatgaagtgctttca

SEQ ID NO: 568191 - DNA, 33 bp, Homo sapien
tagacctgggattaaacgttgtgctttttgtac

SEQ ID NO: 568192 - DNA, 33 bp, Homo sapien
tagacctgggattaaatgttgtgctttttgtac

SEQ ID NO: 568193 - DNA, 33 bp, Homo sapien
ccacaacaaccagggcaagagaagaaacctaga

SEQ ID NO: 568194 - DNA, 33 bp, Homo sapien
ccacaacaaccagggcgagagaagaaacctaga

SEQ ID NO: 568195 - DNA, 33 bp, Homo sapien
gatctttaagagtacaaacctgattatatcact

SEQ ID NO: 568196 - DNA, 33 bp, Homo sapien
gatctttaagagtacagacctgattatatcact

SEQ ID NO: 568197 - DNA, 33 bp, Homo sapien
aacatggcgattacccaaatgtatctcccatgc

SEQ ID NO: 568198 - DNA, 33 bp, Homo sapien
aacatggcgattacccgaatgtatctcccatgc

SEQ ID NO: 568199 - DNA, 33 bp, Homo sapien
ctatgttctctagccactagatcaactctgcct

SEQ ID NO: 568200 - DNA, 33 bp, Homo sapien
ctatgttctctagccagtagatcaactctgcct

SEQ ID NO: 568201 - DNA, 33 bp, Homo sapien
agttttagttgtaatcaccccaaactgaaaact

SEQ ID NO: 568202 - DNA, 33 bp, Homo sapien
agttttagttgtaatcgccccaaactgaaaact

SEQ ID NO: 568203 - DNA, 33 bp, Homo sapien
ttctcctaagcaagcacgtccgatgggtctggc

SEQ ID NO: 568204 - DNA, 33 bp, Homo sapien
ttctcctaagcaagcatgtccgatgggtctggc

SEQ ID NO: 568205 - DNA, 33 bp, Homo sapien
aaatgttaaaatgccaacatttgtgtttaattc

SEQ ID NO: 568206 - DNA, 33 bp, Homo sapien
aaatgttaaaatgccagcatttgtgtttaattc

SEQ ID NO: 568207 - DNA, 33 bp, Homo sapien
cctctcccagaactgcaatttacagacaaggga

SEQ ID NO: 568208 - DNA, 33 bp, Homo sapien
cctctcccagaactgcgatttacagacaaggga

SEQ ID NO: 568209 - DNA, 33 bp, Homo sapien
tggtagtagagcttacagattatcgacaggggc

SEQ ID NO: 568210 - DNA, 33 bp, Homo sapien
tggtagtagagcttaccgattatcgacaggggc

SEQ ID NO: 568211 - DNA, 33 bp, Homo sapien
ggcatttctcccttcacgatggcagtgatgtga

SEQ ID NO: 568212 - DNA, 33 bp, Homo sapien
ggcatttctcccttcaggatggcagtgatgtga

SEQ ID NO: 568213 - DNA, 33 bp, Homo sapien
ttcctcataaagcaaactggaattagaactggt

SEQ ID NO: 568214 - DNA, 33 bp, Homo sapien
ttcctcataaagcaaattggaattagaactggt

SEQ ID NO: 568215 - DNA, 33 bp, Homo sapien
ccagggaaaagctttcaaccagactgttgttcg

SEQ ID NO: 568216 - DNA, 33 bp, Homo sapien
ccagggaaaagctttctaccagactgttgttcg

SEQ ID NO: 568217 - DNA, 33 bp, Homo sapien
atcttgaatggacttaccaaatgaatggaaaga

SEQ ID NO: 568218 - DNA, 33 bp, Homo sapien
atcttgaatggacttatcaaatgaatggaaaga

SEQ ID NO: 568219 - DNA, 33 bp, Homo sapien
atacaagtgatgccataaggtgtggccgggaca

SEQ ID NO: 568220 - DNA, 33 bp, Homo sapien
atacaagtgatgccatgaggtgtggccgggaca

SEQ ID NO: 568221 - DNA, 33 bp, Homo sapien
cttttttgtctaacatcatatcctccttcagct

SEQ ID NO: 568222 - DNA, 33 bp, Homo sapien
cttttttgtctaacattatatcctccttcagct

SEQ ID NO: 568223 - DNA, 33 bp, Homo sapien
agatgagacctagtgaactcccaacacttgatt

SEQ ID NO: 568224 - DNA, 33 bp, Homo sapien
agatgagacctagtgagctcccaacacttgatt

SEQ ID NO: 568225 - DNA, 33 bp, Homo sapien
ctgtggaggttgggaaagagcagagtcttggct

SEQ ID NO: 568226 - DNA, 33 bp, Homo sapien
ctgtggaggttgggaaggagcagagtcttggct

SEQ ID NO: 568227 - DNA, 33 bp, Homo sapien
tgtgcatttcttcccacgccagaaacaccaacg

SEQ ID NO: 568228 - DNA, 33 bp, Homo sapien
tgtgcatttcttcccatgccagaaacaccaacg

SEQ ID NO: 568229 - DNA, 33 bp, Homo sapien
ccttcagtagtctccccgagaagcaccacatgg

SEQ ID NO: 568230 - DNA, 33 bp, Homo sapien
ccttcagtagtctccctgagaagcaccacatgg

SEQ ID NO: 568231 - DNA, 33 bp, Homo sapien
agagaggggatatccactgctcagtgtcacaca

SEQ ID NO: 568232 - DNA, 33 bp, Homo sapien
agagaggggatatccattgctcagtgtcacaca

SEQ ID NO: 568233 - DNA, 33 bp, Homo sapien
ccaaagcaaaggtaggaccagaaccgctaagtt

SEQ ID NO: 568234 - DNA, 33 bp, Homo sapien
ccaaagcaaaggtagggccagaaccgctaagtt

SEQ ID NO: 568235 - DNA, 33 bp, Homo sapien
gtctatagctgctacactgcaaagagaatgaaa

SEQ ID NO: 568236 - DNA, 33 bp, Homo sapien
gtctatagctgctacattgcaaagagaatgaaa

SEQ ID NO: 568237 - DNA, 33 bp, Homo sapien
tagtcaggacagacaaaaaacagataactagta

SEQ ID NO: 568238 - DNA, 33 bp, Homo sapien
tagtcaggacagacaacaaacagataactagta

SEQ ID NO: 568239 - DNA, 33 bp, Homo sapien
ttgggacagttttataccacttgaaatgtaatg

SEQ ID NO: 568240 - DNA, 33 bp, Homo sapien
ttgggacagttttatagcacttgaaatgtaatg

SEQ ID NO: 568241 - DNA, 33 bp, Homo sapien
taaggggtgaaatgggacactttgctcatctgc

SEQ ID NO: 568242 - DNA, 33 bp, Homo sapien
taaggggtgaaatgggtcactttgctcatctgc

SEQ ID NO: 568243 - DNA, 33 bp, Homo sapien
tttaaaagtgtacaacagcctgtcgcagtggcg

SEQ ID NO: 568244 - DNA, 33 bp, Homo sapien
tttaaaagtgtacaacggcctgtcgcagtggcg

SEQ ID NO: 568245 - DNA, 33 bp, Homo sapien
ataagtccctatcatagctcacctgcttgattg

SEQ ID NO: 568246 - DNA, 33 bp, Homo sapien
ataagtccctatcatatctcacctgcttgattg

SEQ ID NO: 568247 - DNA, 33 bp, Homo sapien
ctccacaaaggaaaaccctgtagcatagcctaa

SEQ ID NO: 568248 - DNA, 33 bp, Homo sapien
ctccacaaaggaaaactctgtagcatagcctaa

SEQ ID NO: 568249 - DNA, 33 bp, Homo sapien
gttgattagacctaaacgaaaggaaacaaagca

SEQ ID NO: 568250 - DNA, 33 bp, Homo sapien
gttgattagacctaaatgaaaggaaacaaagca

SEQ ID NO: 568251 - DNA, 33 bp, Homo sapien
atgcagcggatatgacaatggccaagggttatt

SEQ ID NO: 568252 - DNA, 33 bp, Homo sapien
atgcagcggatatgactatggccaagggttatt

SEQ ID NO: 568253 - DNA, 33 bp, Homo sapien
gctctgcatatgttccagaggtgaggatgcaac

SEQ ID NO: 568254 - DNA, 33 bp, Homo sapien
gctctgcatatgttccggaggtgaggatgcaac

SEQ ID NO: 568255 - DNA, 33 bp, Homo sapien
taataataggacctacacaaagactgtcatgac

SEQ ID NO: 568256 - DNA, 33 bp, Homo sapien
taataataggacctacccaaagactgtcatgac

SEQ ID NO: 568257 - DNA, 33 bp, Homo sapien
aactgaggtgcagcgaaagtacacaattttccc

SEQ ID NO: 568258 - DNA, 33 bp, Homo sapien
aactgaggtgcagcgagagtacacaattttccc

SEQ ID NO: 568259 - DNA, 33 bp, Homo sapien
gccagcaggtagacaaattaggcctggaaccca

SEQ ID NO: 568260 - DNA, 33 bp, Homo sapien
gccagcaggtagacaagttaggcctggaaccca

SEQ ID NO: 568261 - DNA, 33 bp, Homo sapien
cgggatgctctaggaacctttgcaggattttag

SEQ ID NO: 568262 - DNA, 33 bp, Homo sapien
cgggatgctctaggaatctttgcaggattttag

SEQ ID NO: 568263 - DNA, 33 bp, Homo sapien
gggtggtcggttttcacagtaattatcacaaac

SEQ ID NO: 568264 - DNA, 33 bp, Homo sapien
gggtggtcggttttcatagtaattatcacaaac

SEQ ID NO: 568265 - DNA, 33 bp, Homo sapien
tttccgtctgttcttcaactgtgcgaggctttg

SEQ ID NO: 568266 - DNA, 33 bp, Homo sapien
tttccgtctgttcttcgactgtgcgaggctttg

SEQ ID NO: 568267 - DNA, 33 bp, Homo sapien
ttggtgctcacctttacaggcttctcactctga

SEQ ID NO: 568268 - DNA, 33 bp, Homo sapien
ttggtgctcacctttataggcttctcactctga

SEQ ID NO: 568269 - DNA, 33 bp, Homo sapien
gcacagatacagaaaactcagcaaagtattaac

SEQ ID NO: 568270 - DNA, 33 bp, Homo sapien
gcacagatacagaaaattcagcaaagtattaac

SEQ ID NO: 568271 - DNA, 33 bp, Homo sapien
gtgccctggacagggacattcactaggaaggga

SEQ ID NO: 568272 - DNA, 33 bp, Homo sapien
gtgccctggacagggatattcactaggaaggga

SEQ ID NO: 568273 - DNA, 33 bp, Homo sapien
gtttgtagacattggcacttcatatattgacaa

SEQ ID NO: 568274 - DNA, 33 bp, Homo sapien
gtttgtagacattggcgcttcatatattgacaa

SEQ ID NO: 568275 - DNA, 33 bp, Homo sapien
caagttggaggtaacaaagggtctggcacacca

SEQ ID NO: 568276 - DNA, 33 bp, Homo sapien
caagttggaggtaacacagggtctggcacacca

SEQ ID NO: 568277 - DNA, 33 bp, Homo sapien
cggtcagcgagaaccacgatgcagggcctgacg

SEQ ID NO: 568278 - DNA, 33 bp, Homo sapien
cggtcagcgagaaccatgatgcagggcctgacg

SEQ ID NO: 568279 - DNA, 33 bp, Homo sapien
aatgagcttttattaaacactcgcgatgtggta

SEQ ID NO: 568280 - DNA, 33 bp, Homo sapien
aatgagcttttattaagcactcgcgatgtggta

SEQ ID NO: 568281 - DNA, 33 bp, Homo sapien
tggtggtggagaattacgatctgactttctcag

SEQ ID NO: 568282 - DNA, 33 bp, Homo sapien
tggtggtggagaattatgatctgactttctcag

SEQ ID NO: 568283 - DNA, 33 bp, Homo sapien
aaaggagacctataggaaaaattcagagaagga

SEQ ID NO: 568284 - DNA, 33 bp, Homo sapien
aaaggagacctatagggaaaattcagagaagga

SEQ ID NO: 568285 - DNA, 33 bp, Homo sapien
gatgtactccctattccaaaacacctctgctaa

SEQ ID NO: 568286 - DNA, 33 bp, Homo sapien
gatgtactccctattctaaaacacctctgctaa

SEQ ID NO: 568287 - DNA, 33 bp, Homo sapien
atcggagctgtgaatgaagcggcagagtgggct

SEQ ID NO: 568288 - DNA, 33 bp, Homo sapien
atcggagctgtgaatgcagcggcagagtgggct

SEQ ID NO: 568289 - DNA, 33 bp, Homo sapien
aagaaccattagtaccaacagagaattcacatg

SEQ ID NO: 568290 - DNA, 33 bp, Homo sapien
aagaaccattagtaccgacagagaattcacatg

SEQ ID NO: 568291 - DNA, 33 bp, Homo sapien
agcccacagcctcatcaccagaggagactcatg

SEQ ID NO: 568292 - DNA, 33 bp, Homo sapien
agcccacagcctcatcgccagaggagactcatg

SEQ ID NO: 568293 - DNA, 33 bp, Homo sapien
agatgtcctttttctcagaaggaaacttcgagg

SEQ ID NO: 568294 - DNA, 33 bp, Homo sapien
agatgtcctttttctcggaaggaaacttcgagg

SEQ ID NO: 568295 - DNA, 33 bp, Homo sapien
gtgtgtttggcttacaccttatctccattccct

SEQ ID NO: 568296 - DNA, 33 bp, Homo sapien
gtgtgtttggcttacatcttatctccattccct

SEQ ID NO: 568297 - DNA, 33 bp, Homo sapien
aacagagccccaagtacgagtgcggtaggaggg

SEQ ID NO: 568298 - DNA, 33 bp, Homo sapien
aacagagccccaagtatgagtgcggtaggaggg

SEQ ID NO: 568299 - DNA, 33 bp, Homo sapien
ctcctctgggtagtgaacaattttaatgtctca

SEQ ID NO: 568300 - DNA, 33 bp, Homo sapien
ctcctctgggtagtgaccaattttaatgtctca

SEQ ID NO: 568301 - DNA, 33 bp, Homo sapien
aactttatgatgtgctcaaggtcacccaacttg

SEQ ID NO: 568302 - DNA, 33 bp, Homo sapien
aactttatgatgtgcttaaggtcacccaacttg

SEQ ID NO: 568303 - DNA, 33 bp, Homo sapien
aataataataataacaacagtagcttagatagg

SEQ ID NO: 568304 - DNA, 33 bp, Homo sapien
aataataataataacagcagtagcttagatagg

SEQ ID NO: 568305 - DNA, 33 bp, Homo sapien
aatcaaaatagagctcacctatatctcaccatc

SEQ ID NO: 568306 - DNA, 33 bp, Homo sapien
aatcaaaatagagctcgcctatatctcaccatc

SEQ ID NO: 568307 - DNA, 33 bp, Homo sapien
ttcggttctacactaaacactgtatctcatcat

SEQ ID NO: 568308 - DNA, 33 bp, Homo sapien
ttcggttctacactaatcactgtatctcatcat

SEQ ID NO: 568309 - DNA, 33 bp, Homo sapien
ccacatggtgtccccccatatttaactcccacg

SEQ ID NO: 568310 - DNA, 33 bp, Homo sapien
ccacatggtgtccccctatatttaactcccacg

SEQ ID NO: 568311 - DNA, 33 bp, Homo sapien
ctttcctgaccctatcacactgcattcttcttt

SEQ ID NO: 568312 - DNA, 33 bp, Homo sapien
ctttcctgaccctatcgcactgcattcttcttt

SEQ ID NO: 568313 - DNA, 33 bp, Homo sapien
agaggacgaacagtcaaaccatagcagaatgca

SEQ ID NO: 568314 - DNA, 33 bp, Homo sapien
agaggacgaacagtcagaccatagcagaatgca

SEQ ID NO: 568315 - DNA, 33 bp, Homo sapien
agtactttgcagttacaaagctgtgttctagcg

SEQ ID NO: 568316 - DNA, 33 bp, Homo sapien
agtactttgcagttacgaagctgtgttctagcg

SEQ ID NO: 568317 - DNA, 33 bp, Homo sapien
tttgtgtggtagacaccgaaaagataagaaaac

SEQ ID NO: 568318 - DNA, 33 bp, Homo sapien
tttgtgtggtagacactgaaaagataagaaaac

SEQ ID NO: 568319 - DNA, 33 bp, Homo sapien
ttcaacacaatcttcacgaacacctactatatc

SEQ ID NO: 568320 - DNA, 33 bp, Homo sapien
ttcaacacaatcttcatgaacacctactatatc

SEQ ID NO: 568321 - DNA, 33 bp, Homo sapien
ccttgactcctctttcactaccccagcatccca

SEQ ID NO: 568322 - DNA, 33 bp, Homo sapien
ccttgactcctctttcgctaccccagcatccca

SEQ ID NO: 568323 - DNA, 33 bp, Homo sapien
gtggtgtttaaggccacgcgtcaggatgagatc

SEQ ID NO: 568324 - DNA, 33 bp, Homo sapien
gtggtgtttaaggccatgcgtcaggatgagatc

SEQ ID NO: 568325 - DNA, 33 bp, Homo sapien
tggcagcaccagcttgcatttgactgtttaaaa

SEQ ID NO: 568326 - DNA, 33 bp, Homo sapien
tggcagcaccagcttgtatttgactgtttaaaa

SEQ ID NO: 568327 - DNA, 33 bp, Homo sapien
gagaacccagggcttcaaagtcaggcacaccca

SEQ ID NO: 568328 - DNA, 33 bp, Homo sapien
gagaacccagggcttcgaagtcaggcacaccca

SEQ ID NO: 568329 - DNA, 33 bp, Homo sapien
attctcattttatagacgggagaaattcagacc

SEQ ID NO: 568330 - DNA, 33 bp, Homo sapien
attctcattttatagatgggagaaattcagacc

SEQ ID NO: 568331 - DNA, 33 bp, Homo sapien
ccaaacacaaaaggacaaggaaaattcgcagac

SEQ ID NO: 568332 - DNA, 33 bp, Homo sapien
ccaaacacaaaaggacgaggaaaattcgcagac

SEQ ID NO: 568333 - DNA, 33 bp, Homo sapien
ccaagactaaaacttccctcatctgctcagcgg

SEQ ID NO: 568334 - DNA, 33 bp, Homo sapien
ccaagactaaaacttctctcatctgctcagcgg

SEQ ID NO: 568335 - DNA, 33 bp, Homo sapien
ctcatatagatacagaaacttggaagcttcagt

SEQ ID NO: 568336 - DNA, 33 bp, Homo sapien
ctcatatagatacagagacttggaagcttcagt

SEQ ID NO: 568337 - DNA, 33 bp, Homo sapien
tcctgaattccagataaacctcaatcagttctt

SEQ ID NO: 568338 - DNA, 33 bp, Homo sapien
tcctgaattccagatagacctcaatcagttctt

SEQ ID NO: 568339 - DNA, 33 bp, Homo sapien
ctgtaaggtcccccaaactgcaagatgctagaa

SEQ ID NO: 568340 - DNA, 33 bp, Homo sapien
ctgtaaggtcccccaagctgcaagatgctagaa

SEQ ID NO: 568341 - DNA, 33 bp, Homo sapien
ctgtcccctttgaatcacgcctattgctgaccc

SEQ ID NO: 568342 - DNA, 33 bp, Homo sapien
ctgtcccctttgaatcgcgcctattgctgaccc

SEQ ID NO: 568343 - DNA, 33 bp, Homo sapien
ccttgttcctggcacaatgcttaatgtcctaaa

SEQ ID NO: 568344 - DNA, 33 bp, Homo sapien
ccttgttcctggcacagtgcttaatgtcctaaa

SEQ ID NO: 568345 - DNA, 33 bp, Homo sapien
tacgggatgcaaacgtaaagatgactgttcctg

SEQ ID NO: 568346 - DNA, 33 bp, Homo sapien
tacgggatgcaaacgtgaagatgactgttcctg

SEQ ID NO: 568347 - DNA, 33 bp, Homo sapien
caggacacaccttataaaaaatctgaaacaaaa

SEQ ID NO: 568348 - DNA, 33 bp, Homo sapien
caggacacaccttatacaaaatctgaaacaaaa

SEQ ID NO: 568349 - DNA, 33 bp, Homo sapien
aggtgggactgaaagccccaagctcataatgat

SEQ ID NO: 568350 - DNA, 33 bp, Homo sapien
aggtgggactgaaagctccaagctcataatgat

SEQ ID NO: 568351 - DNA, 33 bp, Homo sapien
ctccctgggacccctcaagaccttgctctatgt

SEQ ID NO: 568352 - DNA, 33 bp, Homo sapien
ctccctgggacccctccagaccttgctctatgt

SEQ ID NO: 568353 - DNA, 33 bp, Homo sapien
acaggttgccagggacagagaagcaggtgttta

SEQ ID NO: 568354 - DNA, 33 bp, Homo sapien
acaggttgccagggacggagaagcaggtgttta

SEQ ID NO: 568355 - DNA, 33 bp, Homo sapien
tatgttcttctatcacagcttcagcaggtccct

SEQ ID NO: 568356 - DNA, 33 bp, Homo sapien
tatgttcttctatcacggcttcagcaggtccct

SEQ ID NO: 568357 - DNA, 33 bp, Homo sapien
aaagaatattcatgaagtgctacatctagtgtg

SEQ ID NO: 568358 - DNA, 33 bp, Homo sapien
aaagaatattcatgaattgctacatctagtgtg

SEQ ID NO: 568359 - DNA, 33 bp, Homo sapien
tgtggtattttggtcaatccatgtcacctcttt

SEQ ID NO: 568360 - DNA, 33 bp, Homo sapien
tgtggtattttggtcagtccatgtcacctcttt

SEQ ID NO: 568361 - DNA, 33 bp, Homo sapien
tcctgacagtcactagcaatacaaatacagcct

SEQ ID NO: 568362 - DNA, 33 bp, Homo sapien
tcctgacagtcactaggaatacaaatacagcct

SEQ ID NO: 568363 - DNA, 33 bp, Homo sapien
gccgcatcctgcagtaccggctgcgcaaagccg

SEQ ID NO: 568364 - DNA, 33 bp, Homo sapien
gccgcatcctgcagtatcggctgcgcaaagccg

SEQ ID NO: 568365 - DNA, 33 bp, Homo sapien
tctaatgattgttgcacattcgtatgtcttttt

SEQ ID NO: 568366 - DNA, 33 bp, Homo sapien
tctaatgattgttgcatattcgtatgtcttttt

SEQ ID NO: 568367 - DNA, 33 bp, Homo sapien
ccctcagctggtgaatcataaactgtggtacgt

SEQ ID NO: 568368 - DNA, 33 bp, Homo sapien
ccctcagctggtgaatgataaactgtggtacgt

SEQ ID NO: 568369 - DNA, 33 bp, Homo sapien
cctgattcctgatgacaatcgtatgaggttgtc

SEQ ID NO: 568370 - DNA, 33 bp, Homo sapien
cctgattcctgatgaccatcgtatgaggttgtc

SEQ ID NO: 568371 - DNA, 33 bp, Homo sapien
cccacgtttgggccaacatggaaccgtaatttc

SEQ ID NO: 568372 - DNA, 33 bp, Homo sapien
cccacgtttgggccaagatggaaccgtaatttc

SEQ ID NO: 568373 - DNA, 33 bp, Homo sapien
tcaaggagccactgaacagttagggccttgcct

SEQ ID NO: 568374 - DNA, 33 bp, Homo sapien
tcaaggagccactgaatagttagggccttgcct

SEQ ID NO: 568375 - DNA, 33 bp, Homo sapien
tagtgtttgtagatcacagattttattttcttt

SEQ ID NO: 568376 - DNA, 33 bp, Homo sapien
tagtgtttgtagatcagagattttattttcttt

SEQ ID NO: 568377 - DNA, 33 bp, Homo sapien
atgcttgccaggcacaggctgggaagacaagat

SEQ ID NO: 568378 - DNA, 33 bp, Homo sapien
atgcttgccaggcacatgctgggaagacaagat

SEQ ID NO: 568379 - DNA, 33 bp, Homo sapien
ctcattcccagttctacagcaattcaccaagaa

SEQ ID NO: 568380 - DNA, 33 bp, Homo sapien
ctcattcccagttctatagcaattcaccaagaa

SEQ ID NO: 568381 - DNA, 33 bp, Homo sapien
agatactattattccactcaacaggcaagcaaa

SEQ ID NO: 568382 - DNA, 33 bp, Homo sapien
agatactattattccattcaacaggcaagcaaa

SEQ ID NO: 568383 - DNA, 33 bp, Homo sapien
atcagatttatgtaaaacctggtgactggagac

SEQ ID NO: 568384 - DNA, 33 bp, Homo sapien
atcagatttatgtaaaccctggtgactggagac

SEQ ID NO: 568385 - DNA, 33 bp, Homo sapien
tgggaattaaatttgaacagctcgaagtcctgt

SEQ ID NO: 568386 - DNA, 33 bp, Homo sapien
tgggaattaaatttgagcagctcgaagtcctgt

SEQ ID NO: 568387 - DNA, 33 bp, Homo sapien
tacacactgggaaatacataagaaccaataggg

SEQ ID NO: 568388 - DNA, 33 bp, Homo sapien
tacacactgggaaatagataagaaccaataggg

SEQ ID NO: 568389 - DNA, 33 bp, Homo sapien
ggggcttattttcgaaaacagagaagacagcac

SEQ ID NO: 568390 - DNA, 33 bp, Homo sapien
ggggcttattttcgaacacagagaagacagcac

SEQ ID NO: 568391 - DNA, 33 bp, Homo sapien
atccatctaaaataacacaaaagtcagattttt

SEQ ID NO: 568392 - DNA, 33 bp, Homo sapien
atccatctaaaataacccaaaagtcagattttt

SEQ ID NO: 568393 - DNA, 33 bp, Homo sapien
cacagaattatggttcaaagatgactttggttc

SEQ ID NO: 568394 - DNA, 33 bp, Homo sapien
cacagaattatggttcgaagatgactttggttc

SEQ ID NO: 568395 - DNA, 33 bp, Homo sapien
gcctatatatgaaggaatagtacctgaaaaaag

SEQ ID NO: 568396 - DNA, 33 bp, Homo sapien
gcctatatatgaaggagtagtacctgaaaaaag

SEQ ID NO: 568397 - DNA, 33 bp, Homo sapien
gagtgtatgtaagaggcattacacagattgagc

SEQ ID NO: 568398 - DNA, 33 bp, Homo sapien
gagtgtatgtaagaggtattacacagattgagc

SEQ ID NO: 568399 - DNA, 33 bp, Homo sapien
aaaatcttctttccacacatgcataattcagta

SEQ ID NO: 568400 - DNA, 33 bp, Homo sapien
aaaatcttctttccactcatgcataattcagta

SEQ ID NO: 568401 - DNA, 33 bp, Homo sapien
gaatccagcttctaaacaatgagtcttacctcc

SEQ ID NO: 568402 - DNA, 33 bp, Homo sapien
gaatccagcttctaaagaatgagtcttacctcc

SEQ ID NO: 568403 - DNA, 33 bp, Homo sapien
gtaaagggccttacaacttattagagcattaag

SEQ ID NO: 568404 - DNA, 33 bp, Homo sapien
gtaaagggccttacaagttattagagcattaag

SEQ ID NO: 568405 - DNA, 33 bp, Homo sapien
tgatgatctagttgggaaaacacaaagtaaaca

SEQ ID NO: 568406 - DNA, 33 bp, Homo sapien
tgatgatctagttggggaaacacaaagtaaaca

SEQ ID NO: 568407 - DNA, 33 bp, Homo sapien
atggctcaagttctgaagtgcctatccaaacat

SEQ ID NO: 568408 - DNA, 33 bp, Homo sapien
atggctcaagttctgaggtgcctatccaaacat

SEQ ID NO: 568409 - DNA, 33 bp, Homo sapien
gataaaggtcatacaaatagtaagtggtagagc

SEQ ID NO: 568410 - DNA, 33 bp, Homo sapien
gataaaggtcatacaagtagtaagtggtagagc

SEQ ID NO: 568411 - DNA, 33 bp, Homo sapien
ctcctttagatttaaacagcactcatggtctca

SEQ ID NO: 568412 - DNA, 33 bp, Homo sapien
ctcctttagatttaaatagcactcatggtctca

SEQ ID NO: 568413 - DNA, 33 bp, Homo sapien
gtcttttgtcactagaatagaagctctttgagg

SEQ ID NO: 568414 - DNA, 33 bp, Homo sapien
gtcttttgtcactagactagaagctctttgagg

SEQ ID NO: 568415 - DNA, 33 bp, Homo sapien
ctctaaatgtgcctgcgaatcagaaaataaata

SEQ ID NO: 568416 - DNA, 33 bp, Homo sapien
ctctaaatgtgcctgctaatcagaaaataaata

SEQ ID NO: 568417 - DNA, 33 bp, Homo sapien
atgaggcaatccttcacgcagtaatcatttatg

SEQ ID NO: 568418 - DNA, 33 bp, Homo sapien
atgaggcaatccttcatgcagtaatcatttatg

SEQ ID NO: 568419 - DNA, 33 bp, Homo sapien
tacttaactaaattcaggtagctcattccttaa

SEQ ID NO: 568420 - DNA, 33 bp, Homo sapien
tacttaactaaattcatgtagctcattccttaa

SEQ ID NO: 568421 - DNA, 33 bp, Homo sapien
gtcattgtcagcgtagaaacccggactcacctc

SEQ ID NO: 568422 - DNA, 33 bp, Homo sapien
gtcattgtcagcgtaggaacccggactcacctc

SEQ ID NO: 568423 - DNA, 33 bp, Homo sapien
gtctcgggtcctatccgaagagggctcattcat

SEQ ID NO: 568424 - DNA, 33 bp, Homo sapien
gtctcgggtcctatcctaagagggctcattcat

SEQ ID NO: 568425 - DNA, 33 bp, Homo sapien
cagagcttgcaacctaaagataaagcaccccag

SEQ ID NO: 568426 - DNA, 33 bp, Homo sapien
cagagcttgcaacctatagataaagcaccccag

SEQ ID NO: 568427 - DNA, 33 bp, Homo sapien
aaaacactggattgcacagttttgttttttttg

SEQ ID NO: 568428 - DNA, 33 bp, Homo sapien
aaaacactggattgcatagttttgttttttttg

SEQ ID NO: 568429 - DNA, 33 bp, Homo sapien
ctggagagcaatgctaaatcttttagtgggcac

SEQ ID NO: 568430 - DNA, 33 bp, Homo sapien
ctggagagcaatgctatatcttttagtgggcac

SEQ ID NO: 568431 - DNA, 33 bp, Homo sapien
tttcagaaaactgccaaagctatccttcaatta

SEQ ID NO: 568432 - DNA, 33 bp, Homo sapien
tttcagaaaactgccagagctatccttcaatta

SEQ ID NO: 568433 - DNA, 33 bp, Homo sapien
agctatcattagaacccaattcttgctgatttg

SEQ ID NO: 568434 - DNA, 33 bp, Homo sapien
agctatcattagaaccgaattcttgctgatttg

SEQ ID NO: 568435 - DNA, 33 bp, Homo sapien
tctttaatttaggatgcaagctggatggctgct

SEQ ID NO: 568436 - DNA, 33 bp, Homo sapien
tctttaatttaggatgtaagctggatggctgct

SEQ ID NO: 568437 - DNA, 33 bp, Homo sapien
acgtgtgaggcttccaactaatttcagacccat

SEQ ID NO: 568438 - DNA, 33 bp, Homo sapien
acgtgtgaggcttccacctaatttcagacccat

SEQ ID NO: 568439 - DNA, 33 bp, Homo sapien
atcactgaaatgtaagaacaggtgcccataccc

SEQ ID NO: 568440 - DNA, 33 bp, Homo sapien
atcactgaaatgtaaggacaggtgcccataccc

SEQ ID NO: 568441 - DNA, 33 bp, Homo sapien
tgatgagaatttcaaaagacatggaacccacgg

SEQ ID NO: 568442 - DNA, 33 bp, Homo sapien
tgatgagaatttcaaatgacatggaacccacgg

SEQ ID NO: 568443 - DNA, 33 bp, Homo sapien
tctctaagaattggtaagataaacccaccggca

SEQ ID NO: 568444 - DNA, 33 bp, Homo sapien
tctctaagaattggtaggataaacccaccggca

SEQ ID NO: 568445 - DNA, 33 bp, Homo sapien
agtggcacagtacaacaaagcccaatataatga

SEQ ID NO: 568446 - DNA, 33 bp, Homo sapien
agtggcacagtacaacgaagcccaatataatga

SEQ ID NO: 568447 - DNA, 33 bp, Homo sapien
gagagttctttagtcacgaagggtggaaagtgt

SEQ ID NO: 568448 - DNA, 33 bp, Homo sapien
gagagttctttagtcatgaagggtggaaagtgt

SEQ ID NO: 568449 - DNA, 33 bp, Homo sapien
ttttatcatcatcgaaatgttgtattaaaattt

SEQ ID NO: 568450 - DNA, 33 bp, Homo sapien
ttttatcatcatcgaagtgttgtattaaaattt

SEQ ID NO: 568451 - DNA, 33 bp, Homo sapien
ggtacctggaataggcaaattcagagacagaaa

SEQ ID NO: 568452 - DNA, 33 bp, Homo sapien
ggtacctggaataggccaattcagagacagaaa

SEQ ID NO: 568453 - DNA, 33 bp, Homo sapien
ctgggaggtgccagaagggttgaggctctagag

SEQ ID NO: 568454 - DNA, 33 bp, Homo sapien
ctgggaggtgccagaatggttgaggctctagag

SEQ ID NO: 568455 - DNA, 33 bp, Homo sapien
actggaggagcccccaaccttgagctcagaagg

SEQ ID NO: 568456 - DNA, 33 bp, Homo sapien
actggaggagcccccagccttgagctcagaagg

SEQ ID NO: 568457 - DNA, 33 bp, Homo sapien
attagacaatgactccaaaatgtagtgtaaacc

SEQ ID NO: 568458 - DNA, 33 bp, Homo sapien
attagacaatgactcccaaatgtagtgtaaacc

SEQ ID NO: 568459 - DNA, 33 bp, Homo sapien; identical to SEQ ID NO: 568457

SEQ ID NO: 568460 - DNA, 33 bp, Homo sapien; identical to SEQ ID NO: 568458

SEQ ID NO: 568461 - DNA, 33 bp, Homo sapien
aaaggtgactgatcagcaggagatctgtagtgc

SEQ ID NO: 568462 - DNA, 33 bp, Homo sapien
aaaggtgactgatcaggaggagatctgtagtgc

SEQ ID NO: 568463 - DNA, 33 bp, Homo sapien; identical to SEQ ID NO: 568461

SEQ ID NO: 568464 - DNA, 33 bp, Homo sapien; identical to SEQ ID NO: 568462

SEQ ID NO: 568465 - DNA, 33 bp, Homo sapien; identical to SEQ ID NO: 568461

SEQ ID NO: 568466 - DNA, 33 bp, Homo sapien; identical to SEQ ID NO: 568462

SEQ ID NO: 568467 - DNA, 33 bp, Homo sapien
aaacaggtctgcactacaggcctggcccctgct

SEQ ID NO: 568468 - DNA, 33 bp, Homo sapien
aaacaggtctgcactataggcctggcccctgct

SEQ ID NO: 568469 - DNA, 33 bp, Homo sapien
tgagaggcctagctggaaagacatttgaggccc

SEQ ID NO: 568470 - DNA, 33 bp, Homo sapien
tgagaggcctagctgggaagacatttgaggccc

SEQ ID NO: 568471 - DNA, 33 bp, Homo sapien
agggatttgtcagagacggacacttcagaataa

SEQ ID NO: 568472 - DNA, 33 bp, Homo sapien
agggatttgtcagagatggacacttcagaataa

SEQ ID NO: 568473 - DNA, 33 bp, Homo sapien
gaggtcattaacccccaactctcacttctctca

SEQ ID NO: 568474 - DNA, 33 bp, Homo sapien
gaggtcattaacccccgactctcacttctctca

SEQ ID NO: 568475 - DNA, 33 bp, Homo sapien
atggcacagatgagaaaattgagtcctggaagt

SEQ ID NO: 568476 - DNA, 33 bp, Homo sapien
atggcacagatgagaagattgagtcctggaagt

SEQ ID NO: 568477 - DNA, 33 bp, Homo sapien
aaagtaattgagcctccgaggccggtctgatcc

SEQ ID NO: 568478 - DNA, 33 bp, Homo sapien
aaagtaattgagcctctgaggccggtctgatcc

SEQ ID NO: 568479 - DNA, 33 bp, Homo sapien
agtaaggattttgatcactgttgtttttgtggg

SEQ ID NO: 568480 - DNA, 33 bp, Homo sapien
agtaaggattttgatcgctgttgtttttgtggg

SEQ ID NO: 568481 - DNA, 33 bp, Homo sapien
ttcattactccagaaacaaacttcacccattac

SEQ ID NO: 568482 - DNA, 33 bp, Homo sapien
ttcattactccagaaagaaacttcacccattac

SEQ ID NO: 568483 - DNA, 33 bp, Homo sapien
taaaggtcaagaaccaggtaataattctaatac

SEQ ID NO: 568484 - DNA, 33 bp, Homo sapien
taaaggtcaagaaccatgtaataattctaatac

SEQ ID NO: 568485 - DNA, 33 bp, Homo sapien
caaacctttagctacactgaacaagaaaaaaag

SEQ ID NO: 568486 - DNA, 33 bp, Homo sapien
caaacctttagctacattgaacaagaaaaaaag

SEQ ID NO: 568487 - DNA, 33 bp, Homo sapien
cttcgttaacggacacagggacttaggaaggta

SEQ ID NO: 568488 - DNA, 33 bp, Homo sapien
cttcgttaacggacacggggacttaggaaggta

SEQ ID NO: 568489 - DNA, 33 bp, Homo sapien
cttctgattctcattcacttggtgacttctcac

SEQ ID NO: 568490 - DNA, 33 bp, Homo sapien
cttctgattctcattcgcttggtgacttctcac

SEQ ID NO: 568491 - DNA, 33 bp, Homo sapien
atggagatcaagttacactctaaaaggtacata

SEQ ID NO: 568492 - DNA, 33 bp, Homo sapien
atggagatcaagttactctctaaaaggtacata

SEQ ID NO: 568493 - DNA, 33 bp, Homo sapien
tagagaggtcctccacgcagatacttaaagatt

SEQ ID NO: 568494 - DNA, 33 bp, Homo sapien
tagagaggtcctccactcagatacttaaagatt

SEQ ID NO: 568495 - DNA, 33 bp, Homo sapien
gcagtaccagcaagacaaccaagaagaggcagt

SEQ ID NO: 568496 - DNA, 33 bp, Homo sapien
gcagtaccagcaagacgaccaagaagaggcagt

SEQ ID NO: 568497 - DNA, 33 bp, Homo sapien
gagacagtggttgaaaaaaagtatattaagaca

SEQ ID NO: 568498 - DNA, 33 bp, Homo sapien
gagacagtggttgaaagaaagtatattaagaca

SEQ ID NO: 568499 - DNA, 33 bp, Homo sapien
tgctgctggcactgtacagaacctgacctctgg

SEQ ID NO: 568500 - DNA, 33 bp, Homo sapien
tgctgctggcactgtatagaacctgacctctgg

SEQ ID NO: 568501 - DNA, 33 bp, Homo sapien
ggtgatgagaggaggaaggagggggatctcaag

SEQ ID NO: 568502 - DNA, 33 bp, Homo sapien
ggtgatgagaggaggacggagggggatctcaag

SEQ ID NO: 568503 - DNA, 33 bp, Homo sapien
tcactttttctgaaaagtcagtttctctgatta

SEQ ID NO: 568504 - DNA, 33 bp, Homo sapien
tcactttttctgaaaattcagtttctctgatta

SEQ ID NO: 568505 - DNA, 33 bp, Homo sapien
ctgcttgtcttgactacagcagagcaaggctag

SEQ ID NO: 568506 - DNA, 33 bp, Homo sapien
ctgcttgtcttgactatagcagagcaaggctag

SEQ ID NO: 568507 - DNA, 33 bp, Homo sapien
atgtaatatcttaccaagccatcagtgctatgg

SEQ ID NO: 568508 - DNA, 33 bp, Homo sapien
atgtaatatcttaccaggccatcagtgctatgg

SEQ ID NO: 568509 - DNA, 33 bp, Homo sapien
gtgaggacccacatcaactggaaaaatgacgcc

SEQ ID NO: 568510 - DNA, 33 bp, Homo sapien
gtgaggacccacatcagctggaaaaatgacgcc

SEQ ID NO: 568511 - DNA, 33 bp, Homo sapien
ctgcgttggatcactacagcttagctttacttt

SEQ ID NO: 568512 - DNA, 33 bp, Homo sapien
ctgcgttggatcactatagcttagctttacttt

SEQ ID NO: 568513 - DNA, 33 bp, Homo sapien
gaacactcgcatgcaaatctttgtgcaaacata

SEQ ID NO: 568514 - DNA, 33 bp, Homo sapien
gaacactcgcatgcaagtctttgtgcaaacata

SEQ ID NO: 568515 - DNA, 33 bp, Homo sapien
cctggacgttagcatcacccaacctcaaccatc

SEQ ID NO: 568516 - DNA, 33 bp, Homo sapien
cctggacgttagcatcgcccaacctcaaccatc

SEQ ID NO: 568517 - DNA, 33 bp, Homo sapien
aatcctgcagaatggacaggctgtgagctctga

SEQ ID NO: 568518 - DNA, 33 bp, Homo sapien
aatcctgcagaatggagaggctgtgagctctga

SEQ ID NO: 568519 - DNA, 33 bp, Homo sapien
ttctccatctgtgaaactgactggagatcagca

SEQ ID NO: 568520 - DNA, 33 bp, Homo sapien
ttctccatctgtgaaattgactggagatcagca

SEQ ID NO: 568521 - DNA, 33 bp, Homo sapien
gatgattcccggatgactaaagcacattacatt

SEQ ID NO: 568522 - DNA, 33 bp, Homo sapien
gatgattcccggatgattaaagcacattacatt

SEQ ID NO: 568523 - DNA, 33 bp, Homo sapien
ctcactgatccacgtcactggatggtctccaag

SEQ ID NO: 568524 - DNA, 33 bp, Homo sapien
ctcactgatccacgtcgctggatggtctccaag

SEQ ID NO: 568525 - DNA, 33 bp, Homo sapien
ccatgaatggaccagaaattgaatgcaaaatca

SEQ ID NO: 568526 - DNA, 33 bp, Homo sapien
ccatgaatggaccagagattgaatgcaaaatca

SEQ ID NO: 568527 - DNA, 33 bp, Homo sapien
gtgtgggagcatcagaaagactcaaaagaccag

SEQ ID NO: 568528 - DNA, 33 bp, Homo sapien
gtgtgggagcatcagagagactcaaaagaccag

SEQ ID NO: 568529 - DNA, 33 bp, Homo sapien
aagatacataagaaaaatccatgtcccagtggc

SEQ ID NO: 568530 - DNA, 33 bp, Homo sapien
aagatacataagaaaagtccatgtcccagtggc

SEQ ID NO: 568531 - DNA, 33 bp, Homo sapien
aaattaaaagcttacaataatctgaggagtgtt

SEQ ID NO: 568532 - DNA, 33 bp, Homo sapien
aaattaaaagcttacattaatctgaggagtgtt

SEQ ID NO: 568533 - DNA, 33 bp, Homo sapien
ggagttggcgaggggaagtgttccaaaggcacc

SEQ ID NO: 568534 - DNA, 33 bp, Homo sapien
ggagttggcgaggggaggtgttccaaaggcacc

SEQ ID NO: 568535 - DNA, 33 bp, Homo sapien
actgagtaatgacgcaaacaggctaataccatt

SEQ ID NO: 568536 - DNA, 33 bp, Homo sapien
actgagtaatgacgcagacaggctaataccatt

SEQ ID NO: 568537 - DNA, 33 bp, Homo sapien
gcaaaactctttccccagaagtgacagctatat

SEQ ID NO: 568538 - DNA, 33 bp, Homo sapien
gcaaaactctttccccggaagtgacagctatat

SEQ ID NO: 568539 - DNA, 33 bp, Homo sapien
cagtaggttctgctaacgggaggttctagcaag

SEQ ID NO: 568540 - DNA, 33 bp, Homo sapien
cagtaggttctgctaatgggaggttctagcaag

SEQ ID NO: 568541 - DNA, 33 bp, Homo sapien
tagaaggcccttaagacatttcaagcagagagg

SEQ ID NO: 568542 - DNA, 33 bp, Homo sapien
tagaaggcccttaagatatttcaagcagagagg

SEQ ID NO: 568543 - DNA, 33 bp, Homo sapien
aggattatctggatggccatcttaaataacagc

SEQ ID NO: 568544 - DNA, 33 bp, Homo sapien
aggattatctggatggtcatcttaaataacagc

SEQ ID NO: 568545 - DNA, 33 bp, Homo sapien
aggataatgggagccaaaggaaacaaggaccct

SEQ ID NO: 568546 - DNA, 33 bp, Homo sapien
aggataatgggagccagaggaaacaaggaccct

SEQ ID NO: 568547 - DNA, 33 bp, Homo sapien
tagatcgcgaagcaccagatgctgagggtgagg

SEQ ID NO: 568548 - DNA, 33 bp, Homo sapien
tagatcgcgaagcaccggatgctgagggtgagg

SEQ ID NO: 568549 - DNA, 33 bp, Homo sapien
accattctgtgggaaaattgtcttctgtgaaac

SEQ ID NO: 568550 - DNA, 33 bp, Homo sapien
accattctgtgggaaacttgtcttctgtgaaac

SEQ ID NO: 568551 - DNA, 33 bp, Homo sapien
atcttaaccatacaaaacatagtcaatcagccg

SEQ ID NO: 568552 - DNA, 33 bp, Homo sapien
atcttaaccatacaaagcatagtcaatcagccg

SEQ ID NO: 568553 - DNA, 33 bp, Homo sapien
cgtggtctagaggggcaaatagaggggagagta

SEQ ID NO: 568554 - DNA, 33 bp, Homo sapien
cgtggtctagaggggcgaatagaggggagagta

SEQ ID NO: 568555 - DNA, 33 bp, Homo sapien
ctatggtagctatgacaatgaatccaactcctt

SEQ ID NO: 568556 - DNA, 33 bp, Homo sapien
ctatggtagctatgacgatgaatccaactcctt

SEQ ID NO: 568557 - DNA, 33 bp, Homo sapien
ccactggagcaaagaaatgagtgctacacacag

SEQ ID NO: 568558 - DNA, 33 bp, Homo sapien
ccactggagcaaagaactgagtgctacacacag

SEQ ID NO: 568559 - DNA, 33 bp, Homo sapien
aggcttcagcaggtcccaggtcagaatcctggg

SEQ ID NO: 568560 - DNA, 33 bp, Homo sapien
aggcttcagcaggtccgaggtcagaatcctggg

SEQ ID NO: 568561 - DNA, 33 bp, Homo sapien
accatctggtcaccaacttatgccaatgaacca

SEQ ID NO: 568562 - DNA, 33 bp, Homo sapien
accatctggtcaccaagttatgccaatgaacca

SEQ ID NO: 568563 - DNA, 33 bp, Homo sapien
ggcctctttactgtccacctgattcaaactaaa

SEQ ID NO: 568564 - DNA, 33 bp, Homo sapien
ggcctctttactgtccgcctgattcaaactaaa

SEQ ID NO: 568565 - DNA, 33 bp, Homo sapien
aggaagatctccttgaaaactgagggggaataa

SEQ ID NO: 568566 - DNA, 33 bp, Homo sapien
aggaagatctccttgacaactgagggggaataa

SEQ ID NO: 568567 - DNA, 33 bp, Homo sapien
ggagataatggtaaccaagaaagatgtgatctc

SEQ ID NO: 568568 - DNA, 33 bp, Homo sapien
ggagataatggtaaccgagaaagatgtgatctc

SEQ ID NO: 568569 - DNA, 33 bp, Homo sapien
ctccaggaatagaaaccctcactcatttagtca

SEQ ID NO: 568570 - DNA, 33 bp, Homo sapien
ctccaggaatagaaactctcactcatttagtca

SEQ ID NO: 568571 - DNA, 33 bp, Homo sapien
ggcagagtattggactaaaaaacttctgacagc

SEQ ID NO: 568572 - DNA, 33 bp, Homo sapien
ggcagagtattggactgaaaaacttctgacagc

SEQ ID NO: 568573 - DNA, 33 bp, Homo sapien
ttgcctcagctgaagacagttgcttgattcaag

SEQ ID NO: 568574 - DNA, 33 bp, Homo sapien
ttgcctcagctgaagagagttgcttgattcaag

SEQ ID NO: 568575 - DNA, 33 bp, Homo sapien
gggagttgaggtcctgaatcaaaaactctgatt

SEQ ID NO: 568576 - DNA, 33 bp, Homo sapien
gggagttgaggtcctgtatcaaaaactctgatt

SEQ ID NO: 568577 - DNA, 33 bp, Homo sapien
tgctatttttatctcccaaaccactctctctta

SEQ ID NO: 568578 - DNA, 33 bp, Homo sapien
tgctatttttatctcctaaaccactctctctta

SEQ ID NO: 568579 - DNA, 33 bp, Homo sapien
cctctgctatacacgcacacagaactgagttcc

SEQ ID NO: 568580 - DNA, 33 bp, Homo sapien
cctctgctatacacgcgcacagaactgagttcc

SEQ ID NO: 568581 - DNA, 33 bp, Homo sapien
ccatccaccagagcaacgagtggaaaatgaatg

SEQ ID NO: 568582 - DNA, 33 bp, Homo sapien
ccatccaccagagcaatgagtggaaaatgaatg

SEQ ID NO: 568583 - DNA, 33 bp, Homo sapien
tgcctcatgggaggtgaaagtcccactttgcca

SEQ ID NO: 568584 - DNA, 33 bp, Homo sapien
tgcctcatgggaggtgcaagtcccactttgcca

SEQ ID NO: 568585 - DNA, 33 bp, Homo sapien
gggataagcattaccccaggtaggtcattaact

SEQ ID NO: 568586 - DNA, 33 bp, Homo sapien
gggataagcattacccgaggtaggtcattaact

SEQ ID NO: 568587 - DNA, 33 bp, Homo sapien
gaaataaataaacgtaagtgcaaattagtaaga

SEQ ID NO: 568588 - DNA, 33 bp, Homo sapien
gaaataaataaacgtaggtgcaaattagtaaga

SEQ ID NO: 568589 - DNA, 33 bp, Homo sapien
atttaaaacactcccaaagtaggaagaacatga

SEQ ID NO: 568590 - DNA, 33 bp, Homo sapien
atttaaaacactcccagagtaggaagaacatga

SEQ ID NO: 568591 - DNA, 33 bp, Homo sapien
cagaactggaagggaacatttgttcattgattc

SEQ ID NO: 568592 - DNA, 33 bp, Homo sapien
cagaactggaagggaatatttgttcattgattc

SEQ ID NO: 568593 - DNA, 33 bp, Homo sapien
aaatgcaggcttccccagatgatggcagctacg

SEQ ID NO: 568594 - DNA, 33 bp, Homo sapien
aaatgcaggcttccccggatgatggcagctacg

SEQ ID NO: 568595 - DNA, 33 bp, Homo sapien
tttcctctatgtccaacgttactcagtccaagt

SEQ ID NO: 568596 - DNA, 33 bp, Homo sapien
tttcctctatgtccaatgttactcagtccaagt

SEQ ID NO: 568597 - DNA, 33 bp, Homo sapien
ggaggatggggtagaacaactgtcgaggcagga

SEQ ID NO: 568598 - DNA, 33 bp, Homo sapien
ggaggatggggtagaataactgtcgaggcagga

SEQ ID NO: 568599 - DNA, 33 bp, Homo sapien
agaatttgtttcaaaactgtcagaggtgggaga

SEQ ID NO: 568600 - DNA, 33 bp, Homo sapien
agaatttgtttcaaaattgtcagaggtgggaga

SEQ ID NO: 568601 - DNA, 33 bp, Homo sapien
agccaagtaaaaactcaatagtcatggatatgc

SEQ ID NO: 568602 - DNA, 33 bp, Homo sapien
agccaagtaaaaactcgatagtcatggatatgc

SEQ ID NO: 568603 - DNA, 33 bp, Homo sapien
agtgacatttgagacccgaaagatgagagaatt

SEQ ID NO: 568604 - DNA, 33 bp, Homo sapien
agtgacatttgagacctgaaagatgagagaatt

SEQ ID NO: 568605 - DNA, 33 bp, Homo sapien
tgtatctgagggttcaatctaagagttttaaaa

SEQ ID NO: 568606 - DNA, 33 bp, Homo sapien
tgtatctgagggttcagtctaagagttttaaaa

SEQ ID NO: 568607 - DNA, 33 bp, Homo sapien
tatgttggttgcacaagaaggaactacaatact

SEQ ID NO: 568608 - DNA, 33 bp, Homo sapien
tatgttggttgcacaataaggaactacaatact

SEQ ID NO: 568609 - DNA, 33 bp, Homo sapien; identical to SEQ ID NO: 568607

SEQ ID NO: 568610 - DNA, 33 bp, Homo sapien; identical to SEQ ID NO: 568608

SEQ ID NO: 568611 - DNA, 33 bp, Homo sapien
caccgtccctgattaacgtttcgtgtgtgtact

SEQ ID NO: 568612 - DNA, 33 bp, Homo sapien
caccgtccctgattaatgtttcgtgtgtgtact

SEQ ID NO: 568613 - DNA, 33 bp, Homo sapien
gttcaagatttcagtgaaagaactaactgcaga

SEQ ID NO: 568614 - DNA, 33 bp, Homo sapien
gttcaagatttcagtggaagaactaactgcaga

SEQ ID NO: 568615 - DNA, 33 bp, Homo sapien
ggagaggagacgaaagcagaggtagggtatgac

SEQ ID NO: 568616 - DNA, 33 bp, Homo sapien
ggagaggagacgaaaggagaggtagggtatgac

SEQ ID NO: 568617 - DNA, 33 bp, Homo sapien
agtctcgctcacatttaaaaaaaaaattacatt

SEQ ID NO: 568618 - DNA, 33 bp, Homo sapien
agtctcgctcacattttaaaaaaaaattacatt

SEQ ID NO: 568619 - DNA, 33 bp, Homo sapien
ggctataactagaaaccaccatcaacaggaaaa

SEQ ID NO: 568620 - DNA, 33 bp, Homo sapien
ggctataactagaaacgaccatcaacaggaaaa

SEQ ID NO: 568621 - DNA, 33 bp, Homo sapien
agtagtacaggctttgcactcaagtttttaggt

SEQ ID NO: 568622 - DNA, 33 bp, Homo sapien
agtagtacaggctttggactcaagtttttaggt

SEQ ID NO: 568623 - DNA, 33 bp, Homo sapien
aaggtttgttctgagacggaaatgagctaatct

SEQ ID NO: 568624 - DNA, 33 bp, Homo sapien
aaggtttgttctgagatggaaatgagctaatct

SEQ ID NO: 568625 - DNA, 33 bp, Homo sapien
aaagagagacaggagaaagagtaacagcacttc

SEQ ID NO: 568626 - DNA, 33 bp, Homo sapien
aaagagagacaggagagagagtaacagcacttc

SEQ ID NO: 568627 - DNA, 33 bp, Homo sapien
tgatgattattaaacaatagcctcaaaaagaca

SEQ ID NO: 568628 - DNA, 33 bp, Homo sapien
tgatgattattaaacagtagcctcaaaaagaca

SEQ ID NO: 568629 - DNA, 33 bp, Homo sapien
ggaattggagaatgtcaaaaataagaacaaact

SEQ ID NO: 568630 - DNA, 33 bp, Homo sapien
ggaattggagaatgtcgaaaataagaacaaact

SEQ ID NO: 568631 - DNA, 33 bp, Homo sapien
tagcctctgctcgtgcaattctaggcctcagat

SEQ ID NO: 568632 - DNA, 33 bp, Homo sapien
tagcctctgctcgtgcgattctaggcctcagat

SEQ ID NO: 568633 - DNA, 33 bp, Homo sapien
ttttaaattgtaaagaggttatagcagtgggtt

SEQ ID NO: 568634 - DNA, 33 bp, Homo sapien
ttttaaattgtaaagatgttatagcagtgggtt

SEQ ID NO: 568635 - DNA, 33 bp, Homo sapien
attatagagtcatgcacaggtttgtactcagca

SEQ ID NO: 568636 - DNA, 33 bp, Homo sapien
attatagagtcatgcataggtttgtactcagca

SEQ ID NO: 568637 - DNA, 33 bp, Homo sapien
cacagaaaactgaaataatactgaatattgctt

SEQ ID NO: 568638 - DNA, 33 bp, Homo sapien
cacagaaaactgaaatgatactgaatattgctt

SEQ ID NO: 568639 - DNA, 33 bp, Homo sapien
cctctttaagtataaaaccaatatctaaacaga

SEQ ID NO: 568640 - DNA, 33 bp, Homo sapien
cctctttaagtataaatccaatatctaaacaga

SEQ ID NO: 568641 - DNA, 33 bp, Homo sapien
tttttcacgagtactacgatctgagttagagag

SEQ ID NO: 568642 - DNA, 33 bp, Homo sapien
tttttcacgagtactatgatctgagttagagag

SEQ ID NO: 568643 - DNA, 33 bp, Homo sapien
tgagctgtatatgactaaaaaaatatttgcctt

SEQ ID NO: 568644 - DNA, 33 bp, Homo sapien
tgagctgtatatgactgaaaaaatatttgcctt

SEQ ID NO: 568645 - DNA, 33 bp, Homo sapien
ggtgtgtttgaggtacaccaaggagcagagtgt

SEQ ID NO: 568646 - DNA, 33 bp, Homo sapien
ggtgtgtttgaggtacgccaaggagcagagtgt

SEQ ID NO: 568647 - DNA, 33 bp, Homo sapien
agtctgtggcgtgtaccaaaggtgatctgtctt

SEQ ID NO: 568648 - DNA, 33 bp, Homo sapien
agtctgtggcgtgtactaaaggtgatctgtctt

SEQ ID NO: 568649 - DNA, 33 bp, Homo sapien
agtctttacacatccaatcatgtttgagcctta

SEQ ID NO: 568650 - DNA, 33 bp, Homo sapien
agtctttacacatccagtcatgtttgagcctta

SEQ ID NO: 568651 - DNA, 33 bp, Homo sapien
ggttcagagaacaaacaacactcaagtcacaga

SEQ ID NO: 568652 - DNA, 33 bp, Homo sapien
ggttcagagaacaaacgacactcaagtcacaga

SEQ ID NO: 568653 - DNA, 33 bp, Homo sapien
gattctggggttctgactatggaaacaatagcc

SEQ ID NO: 568654 - DNA, 33 bp, Homo sapien
gattctggggttctgagtatggaaacaatagcc

SEQ ID NO: 568655 - DNA, 33 bp, Homo sapien
attcccaagaatgtcacctgactactgaggcca

SEQ ID NO: 568656 - DNA, 33 bp, Homo sapien
attcccaagaatgtcatctgactactgaggcca

SEQ ID NO: 568657 - DNA, 33 bp, Homo sapien
aaatcaagaataatgaccttgaaaagcaggtga

SEQ ID NO: 568658 - DNA, 33 bp, Homo sapien
aaatcaagaataatgatcttgaaaagcaggtga

SEQ ID NO: 568659 - DNA, 33 bp, Homo sapien
aggcgtcattttataaggtgactgaagacttga

SEQ ID NO: 568660 - DNA, 33 bp, Homo sapien
aggcgtcattttataatgtgactgaagacttga

SEQ ID NO: 568661 - DNA, 33 bp, Homo sapien
aaggatggagtgatgcagcaaaacaagatcaca

SEQ ID NO: 568662 - DNA, 33 bp, Homo sapien
aaggatggagtgatgcggcaaaacaagatcaca

SEQ ID NO: 568663 - DNA, 33 bp, Homo sapien
ccttcccgtgttgggaccatccagctaaggcta

SEQ ID NO: 568664 - DNA, 33 bp, Homo sapien
ccttcccgtgttgggatcatccagctaaggcta

SEQ ID NO: 568665 - DNA, 33 bp, Homo sapien
ccatcgtccaaaaatggcagagttaccaaaggt

SEQ ID NO: 568666 - DNA, 33 bp, Homo sapien
ccatcgtccaaaaatgtcagagttaccaaaggt

SEQ ID NO: 568667 - DNA, 33 bp, Homo sapien
tatacagtaacttggacgtgaaggacactcagt

SEQ ID NO: 568668 - DNA, 33 bp, Homo sapien
tatacagtaacttggatgtgaaggacactcagt

SEQ ID NO: 568669 - DNA, 33 bp, Homo sapien
aatttgtaagtcattacggtgcaaactatgtgg

SEQ ID NO: 568670 - DNA, 33 bp, Homo sapien
aatttgtaagtcattatggtgcaaactatgtgg

SEQ ID NO: 568671 - DNA, 33 bp, Homo sapien
gagcaaatggttgaaactgggtattagagaggt

SEQ ID NO: 568672 - DNA, 33 bp, Homo sapien
gagcaaatggttgaaattgggtattagagaggt

SEQ ID NO: 568673 - DNA, 33 bp, Homo sapien
gctggtaggagtcagaaccaggatttatgtcta

SEQ ID NO: 568674 - DNA, 33 bp, Homo sapien
gctggtaggagtcagagccaggatttatgtcta

SEQ ID NO: 568675 - DNA, 33 bp, Homo sapien
agctgggtgattacaagcaagttacttaaactc

SEQ ID NO: 568676 - DNA, 33 bp, Homo sapien
agctgggtgattacaatcaagttacttaaactc

SEQ ID NO: 568677 - DNA, 33 bp, Homo sapien
aaaggatgagaataacagtacctatcatgtagg

SEQ ID NO: 568678 - DNA, 33 bp, Homo sapien
aaaggatgagaataaccgtacctatcatgtagg

SEQ ID NO: 568679 - DNA, 33 bp, Homo sapien
cagattaacatttaaaatgagtaagtggctgga

SEQ ID NO: 568680 - DNA, 33 bp, Homo sapien
cagattaacatttaaagtgagtaagtggctgga

SEQ ID NO: 568681 - DNA, 33 bp, Homo sapien
ttgcagtctgttctaccgaatgcaccattcgct

SEQ ID NO: 568682 - DNA, 33 bp, Homo sapien
ttgcagtctgttctactgaatgcaccattcgct

SEQ ID NO: 568683 - DNA, 33 bp, Homo sapien
ctattagttctttcacactggcaagagatgaca

SEQ ID NO: 568684 - DNA, 33 bp, Homo sapien
ctattagttctttcacgctggcaagagatgaca

SEQ ID NO: 568685 - DNA, 33 bp, Homo sapien
gtctagccagctgtaacggatttctacctgcgt

SEQ ID NO: 568686 - DNA, 33 bp, Homo sapien
gtctagccagctgtaatggatttctacctgcgt

SEQ ID NO: 568687 - DNA, 33 bp, Homo sapien
accttcaagagcaccgaatcagggaaacagggg

SEQ ID NO: 568688 - DNA, 33 bp, Homo sapien
accttcaagagcaccggatcagggaaacagggg

SEQ ID NO: 568689 - DNA, 33 bp, Homo sapien
aaatcactagcaatgcccaccctgactgcagga

SEQ ID NO: 568690 - DNA, 33 bp, Homo sapien
aaatcactagcaatgctcaccctgactgcagga

SEQ ID NO: 568691 - DNA, 33 bp, Homo sapien
tggagattgatgaccacagtggtgagttctttg

SEQ ID NO: 568692 - DNA, 33 bp, Homo sapien
tggagattgatgaccatagtggtgagttctttg

SEQ ID NO: 568693 - DNA, 33 bp, Homo sapien
atggatacggtgtcccacagggtatttggaggc

SEQ ID NO: 568694 - DNA, 33 bp, Homo sapien
atggatacggtgtcccgcagggtatttggaggc

SEQ ID NO: 568695 - DNA, 33 bp, Homo sapien
agggcggagacctggacgagtattcacaagcct

SEQ ID NO: 568696 - DNA, 33 bp, Homo sapien
agggcggagacctggatgagtattcacaagcct

SEQ ID NO: 568697 - DNA, 33 bp, Homo sapien
gctccgtggccggctcactgtgggaccctggcc

SEQ ID NO: 568698 - DNA, 33 bp, Homo sapien
gctccgtggccggctcgctgtgggaccctggcc

SEQ ID NO: 568699 - DNA, 33 bp, Homo sapien
tcagcctcccatgtagacgagatcataggtatg

SEQ ID NO: 568700 - DNA, 33 bp, Homo sapien
tcagcctcccatgtagccgagatcataggtatg

SEQ ID NO: 568701 - DNA, 33 bp, Homo sapien
agccaggcctgtccgacggcgcagttcacaccc

SEQ ID NO: 568702 - DNA, 33 bp, Homo sapien
agccaggcctgtccgatggcgcagttcacaccc

SEQ ID NO: 568703 - DNA, 33 bp, Homo sapien
tcctcagttgtcaagaaaagagttccaacttgc

SEQ ID NO: 568704 - DNA, 33 bp, Homo sapien
tcctcagttgtcaagagaagagttccaacttgc

SEQ ID NO: 568705 - DNA, 33 bp, Homo sapien
ctaaccctccgcacacaaaactaatggaaaagg

SEQ ID NO: 568706 - DNA, 33 bp, Homo sapien
ctaaccctccgcacacgaaactaatggaaaagg

SEQ ID NO: 568707 - DNA, 33 bp, Homo sapien
cgggtgcagcaggggaatacggttccagggccc

SEQ ID NO: 568708 - DNA, 33 bp, Homo sapien
cgggtgcagcaggggagtacggttccagggccc

SEQ ID NO: 568709 - DNA, 33 bp, Homo sapien
ccttggcctgtggctccgaacctgacttctttg

SEQ ID NO: 568710 - DNA, 33 bp, Homo sapien
ccttggcctgtggctctgaacctgacttctttg

SEQ ID NO: 568711 - DNA, 33 bp, Homo sapien
ctttttcattgtgatacatattgccacactgcc

SEQ ID NO: 568712 - DNA, 33 bp, Homo sapien
ctttttcattgtgatatatattgccacactgcc

SEQ ID NO: 568713 - DNA, 33 bp, Homo sapien
gttcttcttcactcaaggacagcgagtgtccag

SEQ ID NO: 568714 - DNA, 33 bp, Homo sapien
gttcttcttcactcaatgacagcgagtgtccag

SEQ ID NO: 568715 - DNA, 33 bp, Homo sapien
gatattcctgaaataccgtaagatgagactaga

SEQ ID NO: 568716 - DNA, 33 bp, Homo sapien
gatattcctgaaatactgtaagatgagactaga

SEQ ID NO: 568717 - DNA, 33 bp, Homo sapien
ttaatcccactgcaccacttgctggacatgtga

SEQ ID NO: 568718 - DNA, 33 bp, Homo sapien
ttaatcccactgcaccgcttgctggacatgtga

SEQ ID NO: 568719 - DNA, 33 bp, Homo sapien
cggaaaatggctgaacaactctaagcttttgtt

SEQ ID NO: 568720 - DNA, 33 bp, Homo sapien
cggaaaatggctgaacgactctaagcttttgtt

SEQ ID NO: 568721 - DNA, 33 bp, Homo sapien
tttgcccaaagccaccaggtacgtaaacggcag

SEQ ID NO: 568722 - DNA, 33 bp, Homo sapien
tttgcccaaagccaccgggtacgtaaacggcag

SEQ ID NO: 568723 - DNA, 33 bp, Homo sapien
aaggaagccatttagacggtgctatatagggct

SEQ ID NO: 568724 - DNA, 33 bp, Homo sapien
aaggaagccatttagatggtgctatatagggct

SEQ ID NO: 568725 - DNA, 33 bp, Homo sapien
aaatatattgacttggaatgagcaaagctttaa

SEQ ID NO: 568726 - DNA, 33 bp, Homo sapien
aaatatattgacttggtatgagcaaagctttaa

SEQ ID NO: 568727 - DNA, 33 bp, Homo sapien
tacagaggaggacactaaggggcgtggtgcgac

SEQ ID NO: 568728 - DNA, 33 bp, Homo sapien
tacagaggaggacactgaggggcgtggtgcgac

SEQ ID NO: 568729 - DNA, 33 bp, Homo sapien
ccttcaggtccaagcaagtccccttctcctggt

SEQ ID NO: 568730 - DNA, 33 bp, Homo sapien
ccttcaggtccaagcatgtccccttctcctggt

SEQ ID NO: 568731 - DNA, 33 bp, Homo sapien
tgcatccttacacataagtatacactaatgaac

SEQ ID NO: 568732 - DNA, 33 bp, Homo sapien
tgcatccttacacatatgtatacactaatgaac

SEQ ID NO: 568733 - DNA, 33 bp, Homo sapien
tgagacactctttcataaacatggggagtgtat

SEQ ID NO: 568734 - DNA, 33 bp, Homo sapien
tgagacactctttcatgaacatggggagtgtat

SEQ ID NO: 568735 - DNA, 33 bp, Homo sapien
cattccatccacagacgccttggttgaggtagt

SEQ ID NO: 568736 - DNA, 33 bp, Homo sapien
cattccatccacagactccttggttgaggtagt

SEQ ID NO: 568737 - DNA, 33 bp, Homo sapien
tgttgagaaagcaagcagactcacaggtttttg

SEQ ID NO: 568738 - DNA, 33 bp, Homo sapien
tgttgagaaagcaagcggactcacaggtttttg

SEQ ID NO: 568739 - DNA, 33 bp, Homo sapien
ctaggcagttcactgcaacattgttccgaattt

SEQ ID NO: 568740 - DNA, 33 bp, Homo sapien
ctaggcagttcactgcgacattgttccgaattt

SEQ ID NO: 568741 - DNA, 33 bp, Homo sapien
gagacaatgagaaggaaggctaacaagaggtgg

SEQ ID NO: 568742 - DNA, 33 bp, Homo sapien
gagacaatgagaaggagggctaacaagaggtgg

SEQ ID NO: 568743 - DNA, 33 bp, Homo sapien
agatccctggtagctcaaacagaccacgagagt

SEQ ID NO: 568744 - DNA, 33 bp, Homo sapien
agatccctggtagctccaacagaccacgagagt

SEQ ID NO: 568745 - DNA, 33 bp, Homo sapien
gtctgcctgatcacccgcatccctttacgtttg

SEQ ID NO: 568746 - DNA, 33 bp, Homo sapien
gtctgcctgatcaccctcatccctttacgtttg

SEQ ID NO: 568747 - DNA, 33 bp, Homo sapien
gtcctaatcctgaagagactttattgtaactgt

SEQ ID NO: 568748 - DNA, 33 bp, Homo sapien
gtcctaatcctgaagatactttattgtaactgt

SEQ ID NO: 568749 - DNA, 33 bp, Homo sapien
gccttctaggttgttgaaattattttgtatctt

SEQ ID NO: 568750 - DNA, 33 bp, Homo sapien
gccttctaggttgttggaattattttgtatctt

SEQ ID NO: 568751 - DNA, 33 bp, Homo sapien
aacaccattaaaaacactcatttaggagcactt

SEQ ID NO: 568752 - DNA, 33 bp, Homo sapien
aacaccattaaaaacattcatttaggagcactt

SEQ ID NO: 568753 - DNA, 33 bp, Homo sapien
ggagaagaacgcttgcaagtggccagagtagca

SEQ ID NO: 568754 - DNA, 33 bp, Homo sapien
ggagaagaacgcttgccagtggccagagtagca

SEQ ID NO: 568755 - DNA, 33 bp, Homo sapien
ggcagattgctgataaaaggctgtgtaggtgaa

SEQ ID NO: 568756 - DNA, 33 bp, Homo sapien
ggcagattgctgataagaggctgtgtaggtgaa

SEQ ID NO: 568757 - DNA, 33 bp, Homo sapien
gggatttgcaaacataactcacatggtgaacaa

SEQ ID NO: 568758 - DNA, 33 bp, Homo sapien
gggatttgcaaacatagctcacatggtgaacaa

SEQ ID NO: 568759 - DNA, 33 bp, Homo sapien
gggcagtgggagcggaaaatgattgcaggcggt

SEQ ID NO: 568760 - DNA, 33 bp, Homo sapien
gggcagtgggagcggagaatgattgcaggcggt

SEQ ID NO: 568761 - DNA, 33 bp, Homo sapien
ccctactttgatgtgggagttttctttcttttt

SEQ ID NO: 568762 - DNA, 33 bp, Homo sapien
ccctactttgatgtggtagttttctttcttttt

SEQ ID NO: 568763 - DNA, 33 bp, Homo sapien
gagagctgtcattgctcaagaacccaaagtagg

SEQ ID NO: 568764 - DNA, 33 bp, Homo sapien
gagagctgtcattgcttaagaacccaaagtagg

SEQ ID NO: 568765 - DNA, 33 bp, Homo sapien
gtctagacatcacagtaaaggagaaaaacatca

SEQ ID NO: 568766 - DNA, 33 bp, Homo sapien
gtctagacatcacagtgaaggagaaaaacatca

SEQ ID NO: 568767 - DNA, 33 bp, Homo sapien
ggggaatgagatgaatcaccaagtctgcacatc

SEQ ID NO: 568768 - DNA, 33 bp, Homo sapien
ggggaatgagatgaatgaccaagtctgcacatc

SEQ ID NO: 568769 - DNA, 33 bp, Homo sapien
cacctcccaggtcctcaatgtttggatctgcgt

SEQ ID NO: 568770 - DNA, 33 bp, Homo sapien
cacctcccaggtcctcgatgtttggatctgcgt

SEQ ID NO: 568771 - DNA, 33 bp, Homo sapien
ggacagaagcttgatacgtgaaagttccattta

SEQ ID NO: 568772 - DNA, 33 bp, Homo sapien
ggacagaagcttgatatgtgaaagttccattta

SEQ ID NO: 568773 - DNA, 33 bp, Homo sapien
gtatgtgaattatctcaacttaaatcccaaaac

SEQ ID NO: 568774 - DNA, 33 bp, Homo sapien
gtatgtgaattatctcgacttaaatcccaaaac

SEQ ID NO: 568775 - DNA, 33 bp, Homo sapien
tgctggcctggcctcaaaacacttaggtttggg

SEQ ID NO: 568776 - DNA, 33 bp, Homo sapien
tgctggcctggcctcagaacacttaggtttggg

SEQ ID NO: 568777 - DNA, 33 bp, Homo sapien
ttatacaaaacacccacaataggcaaatgcata

SEQ ID NO: 568778 - DNA, 33 bp, Homo sapien
ttatacaaaacacccagaataggcaaatgcata

SEQ ID NO: 568779 - DNA, 33 bp, Homo sapien
tgtttggaccaagtaaagaatttctgatgcccc

SEQ ID NO: 568780 - DNA, 33 bp, Homo sapien
tgtttggaccaagtaatgaatttctgatgcccc

SEQ ID NO: 568781 - DNA, 33 bp, Homo sapien
ttcagacattcctttacagcaacgtaagaacag

SEQ ID NO: 568782 - DNA, 33 bp, Homo sapien
ttcagacattcctttatagcaacgtaagaacag

SEQ ID NO: 568783 - DNA, 33 bp, Homo sapien
gaaagggaaatggcacacaccgttcatcaggga

SEQ ID NO: 568784 - DNA, 33 bp, Homo sapien
gaaagggaaatggcacccaccgttcatcaggga

SEQ ID NO: 568785 - DNA, 33 bp, Homo sapien
tgttcatcaaaagatacgtggccaggtgcaggg

SEQ ID NO: 568786 - DNA, 33 bp, Homo sapien
tgttcatcaaaagatatgtggccaggtgcaggg

SEQ ID NO: 568787 - DNA, 33 bp, Homo sapien
ttgcttttctgaacccacgtttcccatttgagg

SEQ ID NO: 568788 - DNA, 33 bp, Homo sapien
ttgcttttctgaacccgcgtttcccatttgagg

SEQ ID NO: 568789 - DNA, 33 bp, Homo sapien
ggccagtcctggttaacgctaacaatcaccaca

SEQ ID NO: 568790 - DNA, 33 bp, Homo sapien
ggccagtcctggttaatgctaacaatcaccaca

SEQ ID NO: 568791 - DNA, 33 bp, Homo sapien
tattctgcatgggtgaagatcgggtcttccagg

SEQ ID NO: 568792 - DNA, 33 bp, Homo sapien
tattctgcatgggtgaggatcgggtcttccagg

SEQ ID NO: 568793 - DNA, 33 bp, Homo sapien
gagccaggggcaggtcaacagttctcatcctcc

SEQ ID NO: 568794 - DNA, 33 bp, Homo sapien
gagccaggggcaggtcgacagttctcatcctcc

SEQ ID NO: 568795 - DNA, 33 bp, Homo sapien
agcctccactagactcactgggcatggaccatt

SEQ ID NO: 568796 - DNA, 33 bp, Homo sapien
agcctccactagactcgctgggcatggaccatt

SEQ ID NO: 568797 - DNA, 33 bp, Homo sapien
agccatttatctaaagacaagttcccttaatcc

SEQ ID NO: 568798 - DNA, 33 bp, Homo sapien
agccatttatctaaagtcaagttcccttaatcc

SEQ ID NO: 568799 - DNA, 33 bp, Homo sapien
tcttcctgtatttctcaccctaattaatacaga

SEQ ID NO: 568800 - DNA, 33 bp, Homo sapien
tcttcctgtatttctcgccctaattaatacaga

SEQ ID NO: 568801 - DNA, 33 bp, Homo sapien
gtctggggactacctacatcagcgtgaccttgg

SEQ ID NO: 568802 - DNA, 33 bp, Homo sapien
gtctggggactacctatatcagcgtgaccttgg

SEQ ID NO: 568803 - DNA, 33 bp, Homo sapien
aagatgaccaggaaaaggacagataaggtctcc

SEQ ID NO: 568804 - DNA, 33 bp, Homo sapien
aagatgaccaggaaaatgacagataaggtctcc

SEQ ID NO: 568805 - DNA, 33 bp, Homo sapien
ggaaaaataaagacgcagaaatgttgttacctt

SEQ ID NO: 568806 - DNA, 33 bp, Homo sapien
ggaaaaataaagacgcggaaatgttgttacctt

SEQ ID NO: 568807 - DNA, 33 bp, Homo sapien
ttgaacgtggcagctaaaagtccagggttagga

SEQ ID NO: 568808 - DNA, 33 bp, Homo sapien
ttgaacgtggcagctagaagtccagggttagga

SEQ ID NO: 568809 - DNA, 33 bp, Homo sapien
catcctggattagacaaatgggcccagtgtaat

SEQ ID NO: 568810 - DNA, 33 bp, Homo sapien
catcctggattagacagatgggcccagtgtaat

SEQ ID NO: 568811 - DNA, 33 bp, Homo sapien
gaggatgcagaagaggaaagggtaagaggaaat

SEQ ID NO: 568812 - DNA, 33 bp, Homo sapien
gaggatgcagaagagggaagggtaagaggaaat

SEQ ID NO: 568813 - DNA, 33 bp, Homo sapien
ctctctctctctggcaaatgaataactgaatca

SEQ ID NO: 568814 - DNA, 33 bp, Homo sapien
ctctctctctctggcagatgaataactgaatca

SEQ ID NO: 568815 - DNA, 33 bp, Homo sapien
ctccagcggggacacactgtgggaaacgtcgtg

SEQ ID NO: 568816 - DNA, 33 bp, Homo sapien
ctccagcggggacacattgtgggaaacgtcgtg

SEQ ID NO: 568817 - DNA, 33 bp, Homo sapien
acgctgttggctgaataaaggaggtctggagaa

SEQ ID NO: 568818 - DNA, 33 bp, Homo sapien
acgctgttggctgaatgaaggaggtctggagaa

SEQ ID NO: 568819 - DNA, 33 bp, Homo sapien
ctttgctctggggagaagtctagaatctacttg

SEQ ID NO: 568820 - DNA, 33 bp, Homo sapien
ctttgctctggggagacgtctagaatctacttg

SEQ ID NO: 568821 - DNA, 33 bp, Homo sapien
catcccccacatatacacagaaactcacgggcg

SEQ ID NO: 568822 - DNA, 33 bp, Homo sapien
catcccccacatatacgcagaaactcacgggcg

SEQ ID NO: 568823 - DNA, 33 bp, Homo sapien
tggctagagggacctcagagcagaatgccccaa

SEQ ID NO: 568824 - DNA, 33 bp, Homo sapien
tggctagagggacctcggagcagaatgccccaa

SEQ ID NO: 568825 - DNA, 33 bp, Homo sapien
gcccagcaggacatcactgaatcctagagctgc

SEQ ID NO: 568826 - DNA, 33 bp, Homo sapien
gcccagcaggacatcagtgaatcctagagctgc

SEQ ID NO: 568827 - DNA, 33 bp, Homo sapien
atgctgttagccacatcataactggtggtagaa

SEQ ID NO: 568828 - DNA, 33 bp, Homo sapien
atgctgttagccacattataactggtggtagaa

SEQ ID NO: 568829 - DNA, 33 bp, Homo sapien
ctggggagaaaaccaaagcatggagagataggc

SEQ ID NO: 568830 - DNA, 33 bp, Homo sapien
ctggggagaaaaccaaggcatggagagataggc

SEQ ID NO: 568831 - DNA, 33 bp, Homo sapien
tctggggtgaaatagaactggacttgaacactc

SEQ ID NO: 568832 - DNA, 33 bp, Homo sapien
tctggggtgaaatagacctggacttgaacactc

SEQ ID NO: 568833 - DNA, 33 bp, Homo sapien
gaggagagggtgccaaaacctgtttctaggagg

SEQ ID NO: 568834 - DNA, 33 bp, Homo sapien
gaggagagggtgccaagacctgtttctaggagg

SEQ ID NO: 568835 - DNA, 33 bp, Homo sapien
ctcagagatgagcctcgctcttaaccataagat

SEQ ID NO: 568836 - DNA, 33 bp, Homo sapien
ctcagagatgagcctctctcttaaccataagat

SEQ ID NO: 568837 - DNA, 33 bp, Homo sapien
gctggattactgagggaaaggtcattcgagagc

SEQ ID NO: 568838 - DNA, 33 bp, Homo sapien
gctggattactgaggggaaggtcattcgagagc

SEQ ID NO: 568839 - DNA, 33 bp, Homo sapien
gaagcctgtggtttaaatcctatattctagcta

SEQ ID NO: 568840 - DNA, 33 bp, Homo sapien
gaagcctgtggtttaactcctatattctagcta

SEQ ID NO: 568841 - DNA, 33 bp, Homo sapien
tatgtattaaagataaatcctagtcagtacata

SEQ ID NO: 568842 - DNA, 33 bp, Homo sapien
tatgtattaaagataattcctagtcagtacata

SEQ ID NO: 568843 - DNA, 33 bp, Homo sapien
ctgtcactgctagaaccgggacatttatgggta

SEQ ID NO: 568844 - DNA, 33 bp, Homo sapien
ctgtcactgctagaactgggacatttatgggta

SEQ ID NO: 568845 - DNA, 33 bp, Homo sapien
caccttggcaagcaccaaaacgctgccaacttc

SEQ ID NO: 568846 - DNA, 33 bp, Homo sapien
caccttggcaagcaccgaaacgctgccaacttc

SEQ ID NO: 568847 - DNA, 33 bp, Homo sapien
gagcgctggattggccaggagctgcaaccagga

SEQ ID NO: 568848 - DNA, 33 bp, Homo sapien
gagcgctggattggccgggagctgcaaccagga

SEQ ID NO: 568849 - DNA, 33 bp, Homo sapien
ttaagtctgttcatctcaacagggttccccaga

SEQ ID NO: 568850 - DNA, 33 bp, Homo sapien
ttaagtctgttcatcttaacagggttccccaga

SEQ ID NO: 568851 - DNA, 33 bp, Homo sapien
gaggctgaggggtggagtagctttcccagtgtc

SEQ ID NO: 568852 - DNA, 33 bp, Homo sapien
gaggctgaggggtggattagctttcccagtgtc

SEQ ID NO: 568853 - DNA, 33 bp, Homo sapien
ttctggaagataattcaaagatctctaaggatc

SEQ ID NO: 568854 - DNA, 33 bp, Homo sapien
ttctggaagataattcgaagatctctaaggatc

SEQ ID NO: 568855 - DNA, 33 bp, Homo sapien
tgaggactttctcatcacacatcaacaaagaaa

SEQ ID NO: 568856 - DNA, 33 bp, Homo sapien
tgaggactttctcatcgcacatcaacaaagaaa

SEQ ID NO: 568857 - DNA, 33 bp, Homo sapien
taaatttggaacagacaacagaaaatcttagga

SEQ ID NO: 568858 - DNA, 33 bp, Homo sapien
taaatttggaacagacgacagaaaatcttagga

SEQ ID NO: 568859 - DNA, 33 bp, Homo sapien
gtagatcggaggacaccgatttctggatcattt

SEQ ID NO: 568860 - DNA, 33 bp, Homo sapien
gtagatcggaggacactgatttctggatcattt

SEQ ID NO: 568861 - DNA, 33 bp, Homo sapien
gcttcttcaagaaagacactacatggattccct

SEQ ID NO: 568862 - DNA, 33 bp, Homo sapien
gcttcttcaagaaagagactacatggattccct

SEQ ID NO: 568863 - DNA, 33 bp, Homo sapien
tttgccattataatgaacacctcctgtgagcac

SEQ ID NO: 568864 - DNA, 33 bp, Homo sapien
tttgccattataatgaccacctcctgtgagcac

SEQ ID NO: 568865 - DNA, 33 bp, Homo sapien
gcctggctaactgggaacagaattaggagatta

SEQ ID NO: 568866 - DNA, 33 bp, Homo sapien
gcctggctaactgggagcagaattaggagatta

SEQ ID NO: 568867 - DNA, 33 bp, Homo sapien
ttagccaggctctaccccaacatgaacctggaa

SEQ ID NO: 568868 - DNA, 33 bp, Homo sapien
ttagccaggctctacctcaacatgaacctggaa

SEQ ID NO: 568869 - DNA, 33 bp, Homo sapien
agagcctctgccgtggcaaagaaagaggaaata

SEQ ID NO: 568870 - DNA, 33 bp, Homo sapien
agagcctctgccgtggtaaagaaagaggaaata

SEQ ID NO: 568871 - DNA, 33 bp, Homo sapien
aacactgttggggctcagaaaacaatacgccaa

SEQ ID NO: 568872 - DNA, 33 bp, Homo sapien
aacactgttggggctcggaaaacaatacgccaa

SEQ ID NO: 568873 - DNA, 33 bp, Homo sapien
ctaagagcccaagatgaagcttagaagaaaaga

SEQ ID NO: 568874 - DNA, 33 bp, Homo sapien
ctaagagcccaagatgtagcttagaagaaaaga

SEQ ID NO: 568875 - DNA, 33 bp, Homo sapien
tgtgtatgtacaaaacaacttcttcattcttat

SEQ ID NO: 568876 - DNA, 33 bp, Homo sapien
tgtgtatgtacaaaacgacttcttcattcttat

SEQ ID NO: 568877 - DNA, 33 bp, Homo sapien
ttagtacagacggagcagagaaatcccagggcc

SEQ ID NO: 568878 - DNA, 33 bp, Homo sapien
ttagtacagacggagcggagaaatcccagggcc

SEQ ID NO: 568879 - DNA, 33 bp, Homo sapien
tctactatgcaaattacaaatattctgtggact

SEQ ID NO: 568880 - DNA, 33 bp, Homo sapien
tctactatgcaaattataaatattctgtggact

SEQ ID NO: 568881 - DNA, 33 bp, Homo sapien
cctcactctagcacaacagtatgtgtgccaggt

SEQ ID NO: 568882 - DNA, 33 bp, Homo sapien
cctcactctagcacaatagtatgtgtgccaggt

SEQ ID NO: 568883 - DNA, 33 bp, Homo sapien
gaagccctagaggcaacggcatcccagtagcag

SEQ ID NO: 568884 - DNA, 33 bp, Homo sapien
gaagccctagaggcaatggcatcccagtagcag

SEQ ID NO: 568885 - DNA, 33 bp, Homo sapien
aaaacgtgccaattaaagtatctgacaaaagac

SEQ ID NO: 568886 - DNA, 33 bp, Homo sapien
aaaacgtgccaattaatgtatctgacaaaagac

SEQ ID NO: 568887 - DNA, 33 bp, Homo sapien
atgaaggcatgcagaaattaatgaatcagaaaa

SEQ ID NO: 568888 - DNA, 33 bp, Homo sapien
atgaaggcatgcagaagttaatgaatcagaaaa

SEQ ID NO: 568889 - DNA, 33 bp, Homo sapien
cagaggccagacacaaaagaccacatgctatac

SEQ ID NO: 568890 - DNA, 33 bp, Homo sapien
cagaggccagacacaagagaccacatgctatac

SEQ ID NO: 568891 - DNA, 33 bp, Homo sapien
tctgctacaaaatcgccaaaggtggggacactg

SEQ ID NO: 568892 - DNA, 33 bp, Homo sapien
tctgctacaaaatcgctaaaggtggggacactg

SEQ ID NO: 568893 - DNA, 33 bp, Homo sapien
agggtgtatgttctcacgtaagtcgttcagtaa

SEQ ID NO: 568894 - DNA, 33 bp, Homo sapien
agggtgtatgttctcatgtaagtcgttcagtaa

SEQ ID NO: 568895 - DNA, 33 bp, Homo sapien
aaaaatgtcgaggtcacgaaatacaaagaaagt

SEQ ID NO: 568896 - DNA, 33 bp, Homo sapien
aaaaatgtcgaggtcatgaaatacaaagaaagt

SEQ ID NO: 568897 - DNA, 33 bp, Homo sapien
acaaaagaatcatggccgacatttcctgagcct

SEQ ID NO: 568898 - DNA, 33 bp, Homo sapien
acaaaagaatcatggctgacatttcctgagcct

SEQ ID NO: 568899 - DNA, 33 bp, Homo sapien
ccacagcaggacagaacgtggaaccacgggata

SEQ ID NO: 568900 - DNA, 33 bp, Homo sapien
ccacagcaggacagaatgtggaaccacgggata

SEQ ID NO: 568901 - DNA, 33 bp, Homo sapien
agcctctgcacacagcagacccatctgaaacag

SEQ ID NO: 568902 - DNA, 33 bp, Homo sapien
agcctctgcacacagcggacccatctgaaacag

SEQ ID NO: 568903 - DNA, 33 bp, Homo sapien
atgggacatctgtctacagtctctgtcactgtg

SEQ ID NO: 568904 - DNA, 33 bp, Homo sapien
atgggacatctgtctatagtctctgtcactgtg

SEQ ID NO: 568905 - DNA, 33 bp, Homo sapien
gcaggactgccacatacggttgtgcaggtcgtg

SEQ ID NO: 568906 - DNA, 33 bp, Homo sapien
gcaggactgccacatatggttgtgcaggtcgtg

SEQ ID NO: 568907 - DNA, 33 bp, Homo sapien
gggtcagccattgagaatagactgttcttttaa

SEQ ID NO: 568908 - DNA, 33 bp, Homo sapien
gggtcagccattgagagtagactgttcttttaa

SEQ ID NO: 568909 - DNA, 33 bp, Homo sapien
gctgcccagggagaaaaggcagagacctcttat

SEQ ID NO: 568910 - DNA, 33 bp, Homo sapien
gctgcccagggagaaagggcagagacctcttat

SEQ ID NO: 568911 - DNA, 33 bp, Homo sapien
tgcaggctgtttaagccgccatcactgcatgga

SEQ ID NO: 568912 - DNA, 33 bp, Homo sapien
tgcaggctgtttaagctgccatcactgcatgga

SEQ ID NO: 568913 - DNA, 33 bp, Homo sapien
gctggcaaaaaaggaaggtattcacctatgtac

SEQ ID NO: 568914 - DNA, 33 bp, Homo sapien
gctggcaaaaaaggaatgtattcacctatgtac

SEQ ID NO: 568915 - DNA, 33 bp, Homo sapien
gtcttgcttgagcacaatgtacctttgcataat

SEQ ID NO: 568916 - DNA, 33 bp, Homo sapien
gtcttgcttgagcacattgtacctttgcataat

SEQ ID NO: 568917 - DNA, 33 bp, Homo sapien
acagtagtattcaatacggtaactgatgagtta

SEQ ID NO: 568918 - DNA, 33 bp, Homo sapien
acagtagtattcaatatggtaactgatgagtta

SEQ ID NO: 568919 - DNA, 33 bp, Homo sapien
atgaacgttttgccaggacaaagcagaagacaa

SEQ ID NO: 568920 - DNA, 33 bp, Homo sapien
atgaacgttttgccagtacaaagcagaagacaa

SEQ ID NO: 568921 - DNA, 33 bp, Homo sapien
ccctagatttatccccaaggactagcacaggcc

SEQ ID NO: 568922 - DNA, 33 bp, Homo sapien
ccctagatttatccccgaggactagcacaggcc

SEQ ID NO: 568923 - DNA, 33 bp, Homo sapien
agctttaaactgaagacggtatgcctagccctc

SEQ ID NO: 568924 - DNA, 33 bp, Homo sapien
agctttaaactgaagatggtatgcctagccctc

SEQ ID NO: 568925 - DNA, 33 bp, Homo sapien
ttgcatattaaaatcacgattgaaatgaaaaaa

SEQ ID NO: 568926 - DNA, 33 bp, Homo sapien
ttgcatattaaaatcaggattgaaatgaaaaaa

SEQ ID NO: 568927 - DNA, 33 bp, Homo sapien
tgttgagatttgaatcactggcccattaaatac

SEQ ID NO: 568928 - DNA, 33 bp, Homo sapien
tgttgagatttgaatcgctggcccattaaatac

SEQ ID NO: 568929 - DNA, 33 bp, Homo sapien
actcttttcttttgcaatcatttactcttatcc

SEQ ID NO: 568930 - DNA, 33 bp, Homo sapien
actcttttcttttgcagtcatttactcttatcc

SEQ ID NO: 568931 - DNA, 33 bp, Homo sapien
ggatctatgtctgtgaacattatactcgtaatt

SEQ ID NO: 568932 - DNA, 33 bp, Homo sapien
ggatctatgtctgtgagcattatactcgtaatt

SEQ ID NO: 568933 - DNA, 33 bp, Homo sapien
ttttctgccctgccaactaaaacatttgccagc

SEQ ID NO: 568934 - DNA, 33 bp, Homo sapien
ttttctgccctgccaagtaaaacatttgccagc

SEQ ID NO: 568935 - DNA, 33 bp, Homo sapien
ttttacccagaggagcaaaagcaaatcagaagg

SEQ ID NO: 568936 - DNA, 33 bp, Homo sapien
ttttacccagaggagcgaaagcaaatcagaagg

SEQ ID NO: 568937 - DNA, 33 bp, Homo sapien
ggtcttcatatgtggccgaagagttaaattttc

SEQ ID NO: 568938 - DNA, 33 bp, Homo sapien
ggtcttcatatgtggctgaagagttaaattttc

SEQ ID NO: 568939 - DNA, 33 bp, Homo sapien
ttctaacttaacagaactatctccatcttacaa

SEQ ID NO: 568940 - DNA, 33 bp, Homo sapien
ttctaacttaacagaattatctccatcttacaa

SEQ ID NO: 568941 - DNA, 33 bp, Homo sapien
tctaggactcactctcaaactctaggttcaaac

SEQ ID NO: 568942 - DNA, 33 bp, Homo sapien
tctaggactcactctcgaactctaggttcaaac

SEQ ID NO: 568943 - DNA, 33 bp, Homo sapien
agcctgtctcccaaagaagccagatcctttctg

SEQ ID NO: 568944 - DNA, 33 bp, Homo sapien
agcctgtctcccaaagcagccagatcctttctg

SEQ ID NO: 568945 - DNA, 33 bp, Homo sapien
aaaatgcagacaatgcaaggcagagcttccacc

SEQ ID NO: 568946 - DNA, 33 bp, Homo sapien
aaaatgcagacaatgccaggcagagcttccacc

SEQ ID NO: 568947 - DNA, 33 bp, Homo sapien
tagccaagactaaaaacgaacaataatgtctgg

SEQ ID NO: 568948 - DNA, 33 bp, Homo sapien
tagccaagactaaaaatgaacaataatgtctgg

SEQ ID NO: 568949 - DNA, 33 bp, Homo sapien
ccatttagaaatgggaaaatttgtgtcagatat

SEQ ID NO: 568950 - DNA, 33 bp, Homo sapien
ccatttagaaatgggacaatttgtgtcagatat

SEQ ID NO: 568951 - DNA, 33 bp, Homo sapien
actccgagtgtctgctaacagctttgtgaggca

SEQ ID NO: 568952 - DNA, 33 bp, Homo sapien
actccgagtgtctgctgacagctttgtgaggca

SEQ ID NO: 568953 - DNA, 33 bp, Homo sapien
agtcacgccactgtatcactgctgcctccatag

SEQ ID NO: 568954 - DNA, 33 bp, Homo sapien
agtcacgccactgtattactgctgcctccatag

SEQ ID NO: 568955 - DNA, 33 bp, Homo sapien
tttattgaatttaatcccaccaacagtcttgtg

SEQ ID NO: 568956 - DNA, 33 bp, Homo sapien
tttattgaatttaatctcaccaacagtcttgtg

SEQ ID NO: 568957 - DNA, 33 bp, Homo sapien
gggttgaagtaaggacaaaatggtctaacgtgc

SEQ ID NO: 568958 - DNA, 33 bp, Homo sapien
gggttgaagtaaggacgaaatggtctaacgtgc

SEQ ID NO: 568959 - DNA, 33 bp, Homo sapien
aaatgagatgtaccaactaaaggcccaggaaca

SEQ ID NO: 568960 - DNA, 33 bp, Homo sapien
aaatgagatgtaccaattaaaggcccaggaaca

SEQ ID NO: 568961 - DNA, 33 bp, Homo sapien
ctaggtggctctagagaacaaatcacatcagag

SEQ ID NO: 568962 - DNA, 33 bp, Homo sapien
ctaggtggctctagagtacaaatcacatcagag

SEQ ID NO: 568963 - DNA, 33 bp, Homo sapien
caagggtcaagggagcaagtgtgtttattcaac

SEQ ID NO: 568964 - DNA, 33 bp, Homo sapien
caagggtcaagggagccagtgtgtttattcaac

SEQ ID NO: 568965 - DNA, 33 bp, Homo sapien
gtgataaggcctttaaagaagtaatgaaggtaa

SEQ ID NO: 568966 - DNA, 33 bp, Homo sapien
gtgataaggcctttaatgaagtaatgaaggtaa

SEQ ID NO: 568967 - DNA, 33 bp, Homo sapien
acactcattttcagcacccagttcaatgagttt

SEQ ID NO: 568968 - DNA, 33 bp, Homo sapien
acactcattttcagcatccagttcaatgagttt

SEQ ID NO: 568969 - DNA, 33 bp, Homo sapien
gctgtgaattaaagacaaacctgaactcagagg

SEQ ID NO: 568970 - DNA, 33 bp, Homo sapien
gctgtgaattaaagacgaacctgaactcagagg

SEQ ID NO: 568971 - DNA, 33 bp, Homo sapien
gtgcctctcatcccaacccagctttcagttaca

SEQ ID NO: 568972 - DNA, 33 bp, Homo sapien
gtgcctctcatcccaatccagctttcagttaca

SEQ ID NO: 568973 - DNA, 33 bp, Homo sapien
gtttttaggccagtcaccatcacatggacgatg

SEQ ID NO: 568974 - DNA, 33 bp, Homo sapien
gtttttaggccagtcatcatcacatggacgatg

SEQ ID NO: 568975 - DNA, 33 bp, Homo sapien
acatttctctgaaaagccttaatactcacctgg

SEQ ID NO: 568976 - DNA, 33 bp, Homo sapien
acatttctctgaaaagtcttaatactcacctgg

SEQ ID NO: 568977 - DNA, 33 bp, Homo sapien
ggtgtagcgcttgacacattctaactctcccac

SEQ ID NO: 568978 - DNA, 33 bp, Homo sapien
ggtgtagcgcttgacatattctaactctcccac

SEQ ID NO: 568979 - DNA, 33 bp, Homo sapien
agatactccacaccaacagagaccaaagaagga

SEQ ID NO: 568980 - DNA, 33 bp, Homo sapien
agatactccacaccaatagagaccaaagaagga

SEQ ID NO: 568981 - DNA, 33 bp, Homo sapien
cccagcttcaacattcaatagctgtgttgtctt

SEQ ID NO: 568982 - DNA, 33 bp, Homo sapien
cccagcttcaacattcgatagctgtgttgtctt

SEQ ID NO: 568983 - DNA, 33 bp, Homo sapien
tcaactgttggataaaggtctaagccttaaatc

SEQ ID NO: 568984 - DNA, 33 bp, Homo sapien
tcaactgttggataaatgtctaagccttaaatc

SEQ ID NO: 568985 - DNA, 33 bp, Homo sapien
gggctggtggacacccacatcggtagcatcagg

SEQ ID NO: 568986 - DNA, 33 bp, Homo sapien
gggctggtggacacccgcatcggtagcatcagg

SEQ ID NO: 568987 - DNA, 33 bp, Homo sapien
caagggggctcaactgaagacctctggggccag

SEQ ID NO: 568988 - DNA, 33 bp, Homo sapien
caagggggctcaactgcagacctctggggccag

SEQ ID NO: 568989 - DNA, 33 bp, Homo sapien
ctgttcctagcatgagcaaaccttgttaagaaa

SEQ ID NO: 568990 - DNA, 33 bp, Homo sapien
ctgttcctagcatgaggaaaccttgttaagaaa

SEQ ID NO: 568991 - DNA, 33 bp, Homo sapien
cccaaactccctgcatcagatgtggcttctctg

SEQ ID NO: 568992 - DNA, 33 bp, Homo sapien
cccaaactccctgcatgagatgtggcttctctg

SEQ ID NO: 568993 - DNA, 33 bp, Homo sapien
tacttcaatatggaagaagttcacagcagaaga

SEQ ID NO: 568994 - DNA, 33 bp, Homo sapien
tacttcaatatggaaggagttcacagcagaaga

SEQ ID NO: 568995 - DNA, 33 bp, Homo sapien
agctcactaccagcaaaggaagtcatcctgttg

SEQ ID NO: 568996 - DNA, 33 bp, Homo sapien
agctcactaccagcaagggaagtcatcctgttg

SEQ ID NO: 568997 - DNA, 33 bp, Homo sapien
ggacccaggtggggacagcttacagggtctgca

SEQ ID NO: 568998 - DNA, 33 bp, Homo sapien
ggacccaggtggggacggcttacagggtctgca

SEQ ID NO: 568999 - DNA, 33 bp, Homo sapien
gaaacagggtgaaaagactgaggatgctataga

SEQ ID NO: 569000 - DNA, 33 bp, Homo sapien
gaaacagggtgaaaaggctgaggatgctataga

SEQ ID NO: 569001 - DNA, 33 bp, Homo sapien
aagttgtacaggaaagaaattgtaatcatagtt

SEQ ID NO: 569002 - DNA, 33 bp, Homo sapien
aagttgtacaggaaaggaattgtaatcatagtt

SEQ ID NO: 569003 - DNA, 33 bp, Homo sapien
gaggcaatagagactacgtgaaaaagagaaacc

SEQ ID NO: 569004 - DNA, 33 bp, Homo sapien
gaggcaatagagactatgtgaaaaagagaaacc

SEQ ID NO: 569005 - DNA, 33 bp, Homo sapien
tctttaaaatgaggtacgcttctaacatgaaag

SEQ ID NO: 569006 - DNA, 33 bp, Homo sapien
tctttaaaatgaggtatgcttctaacatgaaag

SEQ ID NO: 569007 - DNA, 33 bp, Homo sapien
ggagaacatccaagaccaattcacttagagttt

SEQ ID NO: 569008 - DNA, 33 bp, Homo sapien
ggagaacatccaagacgaattcacttagagttt

SEQ ID NO: 569009 - DNA, 33 bp, Homo sapien
ccctacatcgtttgcccctagaatcctcattaa

SEQ ID NO: 569010 - DNA, 33 bp, Homo sapien
ccctacatcgtttgcctctagaatcctcattaa

SEQ ID NO: 569011 - DNA, 33 bp, Homo sapien
atgacattccctgctacctgcctcatctaagcc

SEQ ID NO: 569012 - DNA, 33 bp, Homo sapien
atgacattccctgctatctgcctcatctaagcc

SEQ ID NO: 569013 - DNA, 33 bp, Homo sapien
gctcttatcagacagtgaaagctcaacgataaa

SEQ ID NO: 569014 - DNA, 33 bp, Homo sapien
gctcttatcagacagttaaagctcaacgataaa

SEQ ID NO: 569015 - DNA, 33 bp, Homo sapien
gcgtgtggttacttaacgtgtttgcttcagtag

SEQ ID NO: 569016 - DNA, 33 bp, Homo sapien
gcgtgtggttacttaatgtgtttgcttcagtag

SEQ ID NO: 569017 - DNA, 33 bp, Homo sapien
acatcccacatttttaccctattcttcatcttc

SEQ ID NO: 569018 - DNA, 33 bp, Homo sapien
acatcccacatttttatcctattcttcatcttc

SEQ ID NO: 569019 - DNA, 33 bp, Homo sapien
tcagaggacttaaatacacttctctagaaccta

SEQ ID NO: 569020 - DNA, 33 bp, Homo sapien
tcagaggacttaaatatacttctctagaaccta

SEQ ID NO: 569021 - DNA, 33 bp, Homo sapien
gggtctaagagaaggaacaaaatgaaacagaac

SEQ ID NO: 569022 - DNA, 33 bp, Homo sapien
gggtctaagagaaggagcaaaatgaaacagaac

SEQ ID NO: 569023 - DNA, 33 bp, Homo sapien
accagcatttcctgaacgtcctttgggtaccta

SEQ ID NO: 569024 - DNA, 33 bp, Homo sapien
accagcatttcctgaatgtcctttgggtaccta

SEQ ID NO: 569025 - DNA, 33 bp, Homo sapien
gctattttcaaaataactgactactcgaacaat

SEQ ID NO: 569026 - DNA, 33 bp, Homo sapien
gctattttcaaaataattgactactcgaacaat

SEQ ID NO: 569027 - DNA, 33 bp, Homo sapien
tgcttagactccttcacggttcatcactatggc

SEQ ID NO: 569028 - DNA, 33 bp, Homo sapien
tgcttagactccttcatggttcatcactatggc

SEQ ID NO: 569029 - DNA, 33 bp, Homo sapien
gatcttgtaaggaacacagggaaagacagggaa

SEQ ID NO: 569030 - DNA, 33 bp, Homo sapien
gatcttgtaaggaacatagggaaagacagggaa

SEQ ID NO: 569031 - DNA, 33 bp, Homo sapien
ataactctgtttccccccggttggtcttttgtg

SEQ ID NO: 569032 - DNA, 33 bp, Homo sapien
ataactctgtttcccctcggttggtcttttgtg

SEQ ID NO: 569033 - DNA, 33 bp, Homo sapien
ttattcatatcttagaatatactgtagcatttg

SEQ ID NO: 569034 - DNA, 33 bp, Homo sapien
ttattcatatcttagagtatactgtagcatttg

SEQ ID NO: 569035 - DNA, 33 bp, Homo sapien
gatatcgcctatatatcacatgatcgtctgaca

SEQ ID NO: 569036 - DNA, 33 bp, Homo sapien
gatatcgcctatatatgacatgatcgtctgaca

SEQ ID NO: 569037 - DNA, 33 bp, Homo sapien
tgagttatttataacccatcaggcactgcgcca

SEQ ID NO: 569038 - DNA, 33 bp, Homo sapien
tgagttatttataacctatcaggcactgcgcca

SEQ ID NO: 569039 - DNA, 33 bp, Homo sapien
tgtgaagattacatgaaatagtatgagtagcta

SEQ ID NO: 569040 - DNA, 33 bp, Homo sapien
tgtgaagattacatgagatagtatgagtagcta

SEQ ID NO: 569041 - DNA, 33 bp, Homo sapien
gttaggaagtagttgggatagaattttttttgg

SEQ ID NO: 569042 - DNA, 33 bp, Homo sapien
gttaggaagtagttggtatagaattttttttgg

SEQ ID NO: 569043 - DNA, 33 bp, Homo sapien
aactaaccaacaaacacgatgtggatcacagga

SEQ ID NO: 569044 - DNA, 33 bp, Homo sapien
aactaaccaacaaacatgatgtggatcacagga

SEQ ID NO: 569045 - DNA, 33 bp, Homo sapien
agaatatagctagtagccagaggtaaagtgaag

SEQ ID NO: 569046 - DNA, 33 bp, Homo sapien
agaatatagctagtagtcagaggtaaagtgaag

SEQ ID NO: 569047 - DNA, 33 bp, Homo sapien
aagcagtggtggtttacaactgaaccgccaccg

SEQ ID NO: 569048 - DNA, 33 bp, Homo sapien
aagcagtggtggtttagaactgaaccgccaccg

SEQ ID NO: 569049 - DNA, 33 bp, Homo sapien
agccagaaggaggccacgctaattaagtggaaa

SEQ ID NO: 569050 - DNA, 33 bp, Homo sapien
agccagaaggaggccatgctaattaagtggaaa

SEQ ID NO: 569051 - DNA, 33 bp, Homo sapien
attctacccacgtccaagcccaagtgttagatg

SEQ ID NO: 569052 - DNA, 33 bp, Homo sapien
attctacccacgtccaggcccaagtgttagatg

SEQ ID NO: 569053 - DNA, 33 bp, Homo sapien
tggtgaaccgtatcaacgtcaatttactggttg

SEQ ID NO: 569054 - DNA, 33 bp, Homo sapien
tggtgaaccgtatcaatgtcaatttactggttg

SEQ ID NO: 569055 - DNA, 33 bp, Homo sapien
gcgcttccaaaaatcaacccactgagcaattga

SEQ ID NO: 569056 - DNA, 33 bp, Homo sapien
gcgcttccaaaaatcaccccactgagcaattga

SEQ ID NO: 569057 - DNA, 33 bp, Homo sapien
ccttccctgattgccccaatctccattgagctt

SEQ ID NO: 569058 - DNA, 33 bp, Homo sapien
ccttccctgattgccctaatctccattgagctt

SEQ ID NO: 569059 - DNA, 33 bp, Homo sapien
attttggctaaaacctaaaggatgaagaagagt

SEQ ID NO: 569060 - DNA, 33 bp, Homo sapien
attttggctaaaacctgaaggatgaagaagagt

SEQ ID NO: 569061 - DNA, 33 bp, Homo sapien
ctacatctggctattacggctgcttaaacgaat

SEQ ID NO: 569062 - DNA, 33 bp, Homo sapien
ctacatctggctattatggctgcttaaacgaat

SEQ ID NO: 569063 - DNA, 33 bp, Homo sapien
gcactgagctaagcaagttatatttgttgtcca

SEQ ID NO: 569064 - DNA, 33 bp, Homo sapien
gcactgagctaagcaatttatatttgttgtcca

SEQ ID NO: 569065 - DNA, 33 bp, Homo sapien
tttggcttaagcatccccatggctgctgcgtgg

SEQ ID NO: 569066 - DNA, 33 bp, Homo sapien
tttggcttaagcatcctcatggctgctgcgtgg

SEQ ID NO: 569067 - DNA, 33 bp, Homo sapien
gaaagatgctaggacacactcataagcaagagg

SEQ ID NO: 569068 - DNA, 33 bp, Homo sapien
gaaagatgctaggacatactcataagcaagagg

SEQ ID NO: 569069 - DNA, 33 bp, Homo sapien
atctgacaccaacaaccacaatggtcttatgtt

SEQ ID NO: 569070 - DNA, 33 bp, Homo sapien
atctgacaccaacaactacaatggtcttatgtt

SEQ ID NO: 569071 - DNA, 33 bp, Homo sapien
cctctactgacgaacacctgaactctttcctgt

SEQ ID NO: 569072 - DNA, 33 bp, Homo sapien
cctctactgacgaacatctgaactctttcctgt

SEQ ID NO: 569073 - DNA, 33 bp, Homo sapien
gaaggggtgatcggtacgaacttcctccttcac

SEQ ID NO: 569074 - DNA, 33 bp, Homo sapien
gaaggggtgatcggtatgaacttcctccttcac

SEQ ID NO: 569075 - DNA, 33 bp, Homo sapien
gttttaagcctgcaaaaggtgtgattagaggca

SEQ ID NO: 569076 - DNA, 33 bp, Homo sapien
gttttaagcctgcaaagggtgtgattagaggca

SEQ ID NO: 569077 - DNA, 33 bp, Homo sapien
agctaccttttagccaagcattcctgggcaaat

SEQ ID NO: 569078 - DNA, 33 bp, Homo sapien
agctaccttttagccatgcattcctgggcaaat

SEQ ID NO: 569079 - DNA, 33 bp, Homo sapien
aagtcaagatttctaggacacggggcccaagtg

SEQ ID NO: 569080 - DNA, 33 bp, Homo sapien
aagtcaagatttctagtacacggggcccaagtg

SEQ ID NO: 569081 - DNA, 33 bp, Homo sapien
tccatgcacatatccaaaaattgagagaggaga

SEQ ID NO: 569082 - DNA, 33 bp, Homo sapien
tccatgcacatatccagaaattgagagaggaga

SEQ ID NO: 569083 - DNA, 33 bp, Homo sapien
atggacagtgagtaaaacaaaattgctcatcct

SEQ ID NO: 569084 - DNA, 33 bp, Homo sapien
atggacagtgagtaaaccaaaattgctcatcct

SEQ ID NO: 569085 - DNA, 33 bp, Homo sapien
taatgatgttttggtcaatgacagaccacgtat

SEQ ID NO: 569086 - DNA, 33 bp, Homo sapien
taatgatgttttggtcgatgacagaccacgtat

SEQ ID NO: 569087 - DNA, 33 bp, Homo sapien
aaaagataaccgtatacgcagatggaattgaga

SEQ ID NO: 569088 - DNA, 33 bp, Homo sapien
aaaagataaccgtatatgcagatggaattgaga

SEQ ID NO: 569089 - DNA, 33 bp, Homo sapien
atcatgtaggctttcaaaacgtcttatgaaacc

SEQ ID NO: 569090 - DNA, 33 bp, Homo sapien
atcatgtaggctttcagaacgtcttatgaaacc

SEQ ID NO: 569091 - DNA, 33 bp, Homo sapien
aaatattcccttcaccgagcaaaatgaatataa

SEQ ID NO: 569092 - DNA, 33 bp, Homo sapien
aaatattcccttcacctagcaaaatgaatataa

SEQ ID NO: 569093 - DNA, 33 bp, Homo sapien
tacaatcactttgcatcaaaagtaaacctaagt

SEQ ID NO: 569094 - DNA, 33 bp, Homo sapien
tacaatcactttgcatgaaaagtaaacctaagt

SEQ ID NO: 569095 - DNA, 33 bp, Homo sapien
tcccagtcagtcaaaagtcattcaacccaagtg

SEQ ID NO: 569096 - DNA, 33 bp, Homo sapien
tcccagtcagtcaaaattcattcaacccaagtg

SEQ ID NO: 569097 - DNA, 33 bp, Homo sapien
gaaggtaaatgtccaacgtgtcccgagactggt

SEQ ID NO: 569098 - DNA, 33 bp, Homo sapien
gaaggtaaatgtccaatgtgtcccgagactggt

SEQ ID NO: 569099 - DNA, 33 bp, Homo sapien
acccactggagtggccaataagcagctatgtct

SEQ ID NO: 569100 - DNA, 33 bp, Homo sapien
acccactggagtggccgataagcagctatgtct

SEQ ID NO: 569101 - DNA, 33 bp, Homo sapien
tcaaacctgactcaaactcttcttttctgggtg

SEQ ID NO: 569102 - DNA, 33 bp, Homo sapien
tcaaacctgactcaaattcttcttttctgggtg

SEQ ID NO: 569103 - DNA, 33 bp, Homo sapien
taggtcaaaggtgtgactcaagttcagtacagg

SEQ ID NO: 569104 - DNA, 33 bp, Homo sapien
taggtcaaaggtgtgattcaagttcagtacagg

SEQ ID NO: 569105 - DNA, 33 bp, Homo sapien
cagaccagtgaaaatcagaagctgtggtcccag

SEQ ID NO: 569106 - DNA, 33 bp, Homo sapien
cagaccagtgaaaatcggaagctgtggtcccag

SEQ ID NO: 569107 - DNA, 33 bp, Homo sapien
acgatgactattttacccagcatacatatacgg

SEQ ID NO: 569108 - DNA, 33 bp, Homo sapien
acgatgactattttactcagcatacatatacgg

SEQ ID NO: 569109 - DNA, 33 bp, Homo sapien
ctcacagtctttctagaatattaaactgcctct

SEQ ID NO: 569110 - DNA, 33 bp, Homo sapien
ctcacagtctttctagtatattaaactgcctct

SEQ ID NO: 569111 - DNA, 33 bp, Homo sapien
tctgcaatgttggaaacgttaaatcttttagga

SEQ ID NO: 569112 - DNA, 33 bp, Homo sapien
tctgcaatgttggaaatgttaaatcttttagga

SEQ ID NO: 569113 - DNA, 33 bp, Homo sapien
atgcagatggatactgaataaagaagagaatta

SEQ ID NO: 569114 - DNA, 33 bp, Homo sapien
atgcagatggatactggataaagaagagaatta

SEQ ID NO: 569115 - DNA, 33 bp, Homo sapien
catgcacacaaaaccaatacgattgcaaaaata

SEQ ID NO: 569116 - DNA, 33 bp, Homo sapien
catgcacacaaaaccagtacgattgcaaaaata

SEQ ID NO: 569117 - DNA, 33 bp, Homo sapien
ccaggctctgactttacggtgtgtagaccttaa

SEQ ID NO: 569118 - DNA, 33 bp, Homo sapien
ccaggctctgactttatggtgtgtagaccttaa

SEQ ID NO: 569119 - DNA, 33 bp, Homo sapien
aggggatctgtaccccagcatctttggagccca

SEQ ID NO: 569120 - DNA, 33 bp, Homo sapien
aggggatctgtaccccggcatctttggagccca

SEQ ID NO: 569121 - DNA, 33 bp, Homo sapien
agattcactgggtacacaaatgaagctgctctg

SEQ ID NO: 569122 - DNA, 33 bp, Homo sapien
agattcactgggtacataaatgaagctgctctg

SEQ ID NO: 569123 - DNA, 33 bp, Homo sapien
catcgcatcagtaccaatgggaatagagcagcc

SEQ ID NO: 569124 - DNA, 33 bp, Homo sapien
catcgcatcagtaccagtgggaatagagcagcc

SEQ ID NO: 569125 - DNA, 33 bp, Homo sapien
agattgacactggtccaacactatttaccgaac

SEQ ID NO: 569126 - DNA, 33 bp, Homo sapien
agattgacactggtccgacactatttaccgaac

SEQ ID NO: 569127 - DNA, 33 bp, Homo sapien
tatttaccgaactacgaacttcatggatgtcgc

SEQ ID NO: 569128 - DNA, 33 bp, Homo sapien
tatttaccgaactacggacttcatggatgtcgc

SEQ ID NO: 569129 - DNA, 33 bp, Homo sapien
tacacatgtgctcaggacctacacacagagccc

SEQ ID NO: 569130 - DNA, 33 bp, Homo sapien
tacacatgtgctcaggccctacacacagagccc

SEQ ID NO: 569131 - DNA, 33 bp, Homo sapien
tcagttggctctaagacggtgtaggatggctgc

SEQ ID NO: 569132 - DNA, 33 bp, Homo sapien
tcagttggctctaagatggtgtaggatggctgc

SEQ ID NO: 569133 - DNA, 33 bp, Homo sapien
acttgtgtaatgagacacttagagatacatccg

SEQ ID NO: 569134 - DNA, 33 bp, Homo sapien
acttgtgtaatgagacgcttagagatacatccg

SEQ ID NO: 569135 - DNA, 33 bp, Homo sapien
ttttcaaccattgccaataatggccagataaaa

SEQ ID NO: 569136 - DNA, 33 bp, Homo sapien
ttttcaaccattgccagtaatggccagataaaa

SEQ ID NO: 569137 - DNA, 33 bp, Homo sapien
taaaatgctggaagaaagtattaaaaaagtatt

SEQ ID NO: 569138 - DNA, 33 bp, Homo sapien
taaaatgctggaagaaggtattaaaaaagtatt

SEQ ID NO: 569139 - DNA, 33 bp, Homo sapien
ttccaaattagctcaaaatctcagggtaggaca

SEQ ID NO: 569140 - DNA, 33 bp, Homo sapien
ttccaaattagctcaagatctcagggtaggaca

SEQ ID NO: 569141 - DNA, 33 bp, Homo sapien
actccagactaagctcaatcaatttctctaagc

SEQ ID NO: 569142 - DNA, 33 bp, Homo sapien
actccagactaagctccatcaatttctctaagc

SEQ ID NO: 569143 - DNA, 33 bp, Homo sapien
cgcagtcatgtcttcacacctatgtgggctgcg

SEQ ID NO: 569144 - DNA, 33 bp, Homo sapien
cgcagtcatgtcttcagacctatgtgggctgcg

SEQ ID NO: 569145 - DNA, 33 bp, Homo sapien
caaaataagcttaaaaacatggccacaatattt

SEQ ID NO: 569146 - DNA, 33 bp, Homo sapien
caaaataagcttaaaatcatggccacaatattt

SEQ ID NO: 569147 - DNA, 33 bp, Homo sapien
tatcaaggacctagtacgggctgggcatcatgc

SEQ ID NO: 569148 - DNA, 33 bp, Homo sapien
tatcaaggacctagtatgggctgggcatcatgc

SEQ ID NO: 569149 - DNA, 33 bp, Homo sapien
gtaagctcagagccaccgaaaagacttggaggg

SEQ ID NO: 569150 - DNA, 33 bp, Homo sapien
gtaagctcagagccactgaaaagacttggaggg

SEQ ID NO: 569151 - DNA, 33 bp, Homo sapien
agactatataaatggagctaaattgccaaagaa

SEQ ID NO: 569152 - DNA, 33 bp, Homo sapien
agactatataaatggatctaaattgccaaagaa

SEQ ID NO: 569153 - DNA, 33 bp, Homo sapien
ttgactgcagagtggcagataaaccctgggtta

SEQ ID NO: 569154 - DNA, 33 bp, Homo sapien
ttgactgcagagtggctgataaaccctgggtta

SEQ ID NO: 569155 - DNA, 33 bp, Homo sapien
ctcctcgaatggaaacagaggctttgtagggct

SEQ ID NO: 569156 - DNA, 33 bp, Homo sapien
ctcctcgaatggaaacggaggctttgtagggct

SEQ ID NO: 569157 - DNA, 33 bp, Homo sapien
ttaaatgacttatccaatactataatcaaaacc

SEQ ID NO: 569158 - DNA, 33 bp, Homo sapien
ttaaatgacttatccagtactataatcaaaacc

SEQ ID NO: 569159 - DNA, 33 bp, Homo sapien
atcttagtatggtggaataagaattgagactga

SEQ ID NO: 569160 - DNA, 33 bp, Homo sapien
atcttagtatggtggagtaagaattgagactga

SEQ ID NO: 569161 - DNA, 33 bp, Homo sapien
gggcagactgtcttgaaagaaatgcctcaataa

SEQ ID NO: 569162 - DNA, 33 bp, Homo sapien
gggcagactgtcttgatagaaatgcctcaataa

SEQ ID NO: 569163 - DNA, 33 bp, Homo sapien
aaagtcagcaggtcaaaatcatcaaacaccttt

SEQ ID NO: 569164 - DNA, 33 bp, Homo sapien
aaagtcagcaggtcaagatcatcaaacaccttt

SEQ ID NO: 569165 - DNA, 33 bp, Homo sapien
gacttggtagttcctaaaataatcaaagctgga

SEQ ID NO: 569166 - DNA, 33 bp, Homo sapien
gacttggtagttcctacaataatcaaagctgga

SEQ ID NO: 569167 - DNA, 33 bp, Homo sapien
tgggataataatagtaccgacctcataggatcg

SEQ ID NO: 569168 - DNA, 33 bp, Homo sapien
tgggataataatagtatcgacctcataggatcg

SEQ ID NO: 569169 - DNA, 33 bp, Homo sapien
ttcttatgtttgtgccagaaggaatcaggacta

SEQ ID NO: 569170 - DNA, 33 bp, Homo sapien
ttcttatgtttgtgccggaaggaatcaggacta

SEQ ID NO: 569171 - DNA, 33 bp, Homo sapien
caacaatgtttccagactcagaaattagctgaa

SEQ ID NO: 569172 - DNA, 33 bp, Homo sapien
caacaatgtttccagattcagaaattagctgaa

SEQ ID NO: 569173 - DNA, 33 bp, Homo sapien
ggctctccaaattcacactctttgactcataca

SEQ ID NO: 569174 - DNA, 33 bp, Homo sapien
ggctctccaaattcacgctctttgactcataca

SEQ ID NO: 569175 - DNA, 33 bp, Homo sapien
aggagttaaatccacacgtgcaaattcaaagca

SEQ ID NO: 569176 - DNA, 33 bp, Homo sapien
aggagttaaatccacaggtgcaaattcaaagca

SEQ ID NO: 569177 - DNA, 33 bp, Homo sapien
cagaaggtacctcacaaaaaaatgccaaaagac

SEQ ID NO: 569178 - DNA, 33 bp, Homo sapien
cagaaggtacctcacagaaaaatgccaaaagac

SEQ ID NO: 569179 - DNA, 33 bp, Homo sapien
tgttgtcatatgttcaggggggcaaaatagacc

SEQ ID NO: 569180 - DNA, 33 bp, Homo sapien
tgttgtcatatgttcatgggggcaaaatagacc

SEQ ID NO: 569181 - DNA, 33 bp, Homo sapien
gacaacgaagggtttccaaacctggatgcatag

SEQ ID NO: 569182 - DNA, 33 bp, Homo sapien
gacaacgaagggtttctaaacctggatgcatag

SEQ ID NO: 569183 - DNA, 33 bp, Homo sapien
tccaaactggtttacacagaactttagtgttca

SEQ ID NO: 569184 - DNA, 33 bp, Homo sapien
tccaaactggtttacatagaactttagtgttca

SEQ ID NO: 569185 - DNA, 33 bp, Homo sapien
tctatctgactttctaagttaaataagctattg

SEQ ID NO: 569186 - DNA, 33 bp, Homo sapien
tctatctgactttctatgttaaataagctattg

SEQ ID NO: 569187 - DNA, 33 bp, Homo sapien
atatcatagccagtaactgatgggtcatgatcc

SEQ ID NO: 569188 - DNA, 33 bp, Homo sapien
atatcatagccagtaagtgatgggtcatgatcc

SEQ ID NO: 569189 - DNA, 33 bp, Homo sapien
cttggctgttgtcagacaaggagatcaatcaca

SEQ ID NO: 569190 - DNA, 33 bp, Homo sapien
cttggctgttgtcagataaggagatcaatcaca

SEQ ID NO: 569191 - DNA, 33 bp, Homo sapien
gtgccctgtgctgaataaagacacagagagaga

SEQ ID NO: 569192 - DNA, 33 bp, Homo sapien
gtgccctgtgctgaatgaagacacagagagaga

SEQ ID NO: 569193 - DNA, 33 bp, Homo sapien
ctcggcacttgacatacatcagcttatcccctc

SEQ ID NO: 569194 - DNA, 33 bp, Homo sapien
ctcggcacttgacatatatcagcttatcccctc

SEQ ID NO: 569195 - DNA, 33 bp, Homo sapien
atttctggctttgagaaccacacaattcctgct

SEQ ID NO: 569196 - DNA, 33 bp, Homo sapien
atttctggctttgagagccacacaattcctgct

SEQ ID NO: 569197 - DNA, 33 bp, Homo sapien
aattacctgtgtaaagcccctatttcagaatac

SEQ ID NO: 569198 - DNA, 33 bp, Homo sapien
aattacctgtgtaaaggccctatttcagaatac

SEQ ID NO: 569199 - DNA, 33 bp, Homo sapien
tgtggtatgctacaatcaagccgggaatagccc

SEQ ID NO: 569200 - DNA, 33 bp, Homo sapien
tgtggtatgctacaatgaagccgggaatagccc

SEQ ID NO: 569201 - DNA, 33 bp, Homo sapien
aagggtccacacagtacggggactcaccatggt

SEQ ID NO: 569202 - DNA, 33 bp, Homo sapien
aagggtccacacagtagggggactcaccatggt

SEQ ID NO: 569203 - DNA, 33 bp, Homo sapien
tgatgagttttagtgaactcccatgctgtgtgg

SEQ ID NO: 569204 - DNA, 33 bp, Homo sapien
tgatgagttttagtgacctcccatgctgtgtgg

SEQ ID NO: 569205 - DNA, 33 bp, Homo sapien
tatccaggtggagtcaatgaaatcgcatgcgcc

SEQ ID NO: 569206 - DNA, 33 bp, Homo sapien
tatccaggtggagtcagtgaaatcgcatgcgcc

SEQ ID NO: 569207 - DNA, 33 bp, Homo sapien
actttgggtactttcacccaaagatggggaagc

SEQ ID NO: 569208 - DNA, 33 bp, Homo sapien
actttgggtactttcatccaaagatggggaagc

SEQ ID NO: 569209 - DNA, 33 bp, Homo sapien
aaccacaagacttaaagaaatggcttgagggca

SEQ ID NO: 569210 - DNA, 33 bp, Homo sapien
aaccacaagacttaaataaatggcttgagggca

SEQ ID NO: 569211 - DNA, 33 bp, Homo sapien
catataaaactttgaaaggtaatgagaatgtgg

SEQ ID NO: 569212 - DNA, 33 bp, Homo sapien
catataaaactttgaagggtaatgagaatgtgg

SEQ ID NO: 569213 - DNA, 33 bp, Homo sapien
atgtgctggacacttcaacatacattatctcct

SEQ ID NO: 569214 - DNA, 33 bp, Homo sapien
atgtgctggacacttcgacatacattatctcct

SEQ ID NO: 569215 - DNA, 33 bp, Homo sapien
tacttaacagagacctaacgtggcaatatttaa

SEQ ID NO: 569216 - DNA, 33 bp, Homo sapien
tacttaacagagacctgacgtggcaatatttaa

SEQ ID NO: 569217 - DNA, 33 bp, Homo sapien
atacattcattcatcaaatagtcactgaaaata

SEQ ID NO: 569218 - DNA, 33 bp, Homo sapien
atacattcattcatcagatagtcactgaaaata

SEQ ID NO: 569219 - DNA, 33 bp, Homo sapien
tcatttagaaagaaccagaatagttactgtgca

SEQ ID NO: 569220 - DNA, 33 bp, Homo sapien
tcatttagaaagaaccggaatagttactgtgca

SEQ ID NO: 569221 - DNA, 33 bp, Homo sapien
ctctcttgagtctgtacgtagagagattttaag

SEQ ID NO: 569222 - DNA, 33 bp, Homo sapien
ctctcttgagtctgtatgtagagagattttaag

SEQ ID NO: 569223 - DNA, 33 bp, Homo sapien
cctcgacagcctgtgcaagcaggttccagggtg

SEQ ID NO: 569224 - DNA, 33 bp, Homo sapien
cctcgacagcctgtgcgagcaggttccagggtg

SEQ ID NO: 569225 - DNA, 33 bp, Homo sapien
ccagtcacaccttggccgatgctagcgcaatgc

SEQ ID NO: 569226 - DNA, 33 bp, Homo sapien
ccagtcacaccttggctgatgctagcgcaatgc

SEQ ID NO: 569227 - DNA, 33 bp, Homo sapien
aagaggcaaatagttaaataaatgttggtacaa

SEQ ID NO: 569228 - DNA, 33 bp, Homo sapien
aagaggcaaatagttagataaatgttggtacaa

SEQ ID NO: 569229 - DNA, 33 bp, Homo sapien
aaacacatagaatcaacattttccttatcaaca

SEQ ID NO: 569230 - DNA, 33 bp, Homo sapien
aaacacatagaatcaatattttccttatcaaca

SEQ ID NO: 569231 - DNA, 33 bp, Homo sapien
ataaatgcgggtttgaaaatacagaatctcata

SEQ ID NO: 569232 - DNA, 33 bp, Homo sapien
ataaatgcgggtttgagaatacagaatctcata

SEQ ID NO: 569233 - DNA, 33 bp, Homo sapien
ctaaagttcacccttacaaacatgtcactgagc

SEQ ID NO: 569234 - DNA, 33 bp, Homo sapien
ctaaagttcacccttataaacatgtcactgagc

SEQ ID NO: 569235 - DNA, 33 bp, Homo sapien
ggctccattcattttccccactggcaactgtaa

SEQ ID NO: 569236 - DNA, 33 bp, Homo sapien
ggctccattcattttctccactggcaactgtaa

SEQ ID NO: 569237 - DNA, 33 bp, Homo sapien
aagacagactgactaaatagacaaggaaactcc

SEQ ID NO: 569238 - DNA, 33 bp, Homo sapien
aagacagactgactaagtagacaaggaaactcc

SEQ ID NO: 569239 - DNA, 33 bp, Homo sapien
gatgaaaggaaaatagaagaagcttgtaaagct

SEQ ID NO: 569240 - DNA, 33 bp, Homo sapien
gatgaaaggaaaatagtagaagcttgtaaagct

SEQ ID NO: 569241 - DNA, 33 bp, Homo sapien
ataccatttttgcttgcaagtataatctcctca

SEQ ID NO: 569242 - DNA, 33 bp, Homo sapien
ataccatttttgcttgtaagtataatctcctca

SEQ ID NO: 569243 - DNA, 33 bp, Homo sapien
gaagatgcctcaaaaacctgcagagtcctcaca

SEQ ID NO: 569244 - DNA, 33 bp, Homo sapien
gaagatgcctcaaaaatctgcagagtcctcaca

SEQ ID NO: 569245 - DNA, 33 bp, Homo sapien
ggcaggttctaagagacgaaagcagaggcccag

SEQ ID NO: 569246 - DNA, 33 bp, Homo sapien
ggcaggttctaagagatgaaagcagaggcccag

SEQ ID NO: 569247 - DNA, 33 bp, Homo sapien
ctagatcctgggcatagagtagtgatgagaaca

SEQ ID NO: 569248 - DNA, 33 bp, Homo sapien
ctagatcctgggcatatagtagtgatgagaaca

SEQ ID NO: 569249 - DNA, 33 bp, Homo sapien
caaccttcagagaaagacattcttcctatctta

SEQ ID NO: 569250 - DNA, 33 bp, Homo sapien
caaccttcagagaaaggcattcttcctatctta

SEQ ID NO: 569251 - DNA, 33 bp, Homo sapien
tgtaatctagatgtacgccaagaaagatgtaat

SEQ ID NO: 569252 - DNA, 33 bp, Homo sapien
tgtaatctagatgtactccaagaaagatgtaat

SEQ ID NO: 569253 - DNA, 33 bp, Homo sapien
attggaagtaacagacacaaatcacctatggcc

SEQ ID NO: 569254 - DNA, 33 bp, Homo sapien
attggaagtaacagacgcaaatcacctatggcc

SEQ ID NO: 569255 - DNA, 33 bp, Homo sapien
aatgcttactaaacccagatgtgaatataagat

SEQ ID NO: 569256 - DNA, 33 bp, Homo sapien
aatgcttactaaacccggatgtgaatataagat

SEQ ID NO: 569257 - DNA, 33 bp, Homo sapien
aactggccataatcccaaagcaaacctaaacat

SEQ ID NO: 569258 - DNA, 33 bp, Homo sapien
aactggccataatcccgaagcaaacctaaacat

SEQ ID NO: 569259 - DNA, 33 bp, Homo sapien
attcacctatacaataccataatacaaatatat

SEQ ID NO: 569260 - DNA, 33 bp, Homo sapien
attcacctatacaatagcataatacaaatatat

SEQ ID NO: 569261 - DNA, 33 bp, Homo sapien
ctcctgaaacctgacccaaattaaatcctagct

SEQ ID NO: 569262 - DNA, 33 bp, Homo sapien
ctcctgaaacctgacctaaattaaatcctagct

SEQ ID NO: 569263 - DNA, 33 bp, Homo sapien
ttctcaaagtgtttagaccatagtgagttactt

SEQ ID NO: 569264 - DNA, 33 bp, Homo sapien
ttctcaaagtgtttagtccatagtgagttactt

SEQ ID NO: 569265 - DNA, 33 bp, Homo sapien
tatggattgcaaacaagtgaaagaaaaaacaca

SEQ ID NO: 569266 - DNA, 33 bp, Homo sapien
tatggattgcaaacaattgaaagaaaaaacaca

SEQ ID NO: 569267 - DNA, 33 bp, Homo sapien
ggttttctggtactgaggagggagctggaaaaa

SEQ ID NO: 569268 - DNA, 33 bp, Homo sapien
ggttttctggtactgatgagggagctggaaaaa

SEQ ID NO: 569269 - DNA, 33 bp, Homo sapien
gggttgggatccttgaatatcgctaacgaactg

SEQ ID NO: 569270 - DNA, 33 bp, Homo sapien
gggttgggatccttgagtatcgctaacgaactg

SEQ ID NO: 569271 - DNA, 33 bp, Homo sapien
taacacatatttactgaatgtccctatgtgctt

SEQ ID NO: 569272 - DNA, 33 bp, Homo sapien
taacacatatttactgcatgtccctatgtgctt

SEQ ID NO: 569273 - DNA, 33 bp, Homo sapien
gacttaggtcacaggacggtaaatagacaaact

SEQ ID NO: 569274 - DNA, 33 bp, Homo sapien
gacttaggtcacaggatggtaaatagacaaact

SEQ ID NO: 569275 - DNA, 33 bp, Homo sapien
aggcagcactcctgtggacgctgttttagataa

SEQ ID NO: 569276 - DNA, 33 bp, Homo sapien
aggcagcactcctgtgtacgctgttttagataa

SEQ ID NO: 569277 - DNA, 33 bp, Homo sapien
agaaactctgccaataggaagactatgttggtg

SEQ ID NO: 569278 - DNA, 33 bp, Homo sapien
agaaactctgccaatatgaagactatgttggtg

SEQ ID NO: 569279 - DNA, 33 bp, Homo sapien
gaaaatttgaggaggcaaagaaatattgaagaa

SEQ ID NO: 569280 - DNA, 33 bp, Homo sapien
gaaaatttgaggaggcgaagaaatattgaagaa

SEQ ID NO: 569281 - DNA, 33 bp, Homo sapien
cctttgtcatgcaaaagacttttaatttaattt

SEQ ID NO: 569282 - DNA, 33 bp, Homo sapien
cctttgtcatgcaaaatacttttaatttaattt

SEQ ID NO: 569283 - DNA, 33 bp, Homo sapien
ttctgcacatctcagaaataaactgttaaaaca

SEQ ID NO: 569284 - DNA, 33 bp, Homo sapien
ttctgcacatctcagatataaactgttaaaaca

SEQ ID NO: 569285 - DNA, 33 bp, Homo sapien
gggcccatatcacaccaggaaaaggaaataaag

SEQ ID NO: 569286 - DNA, 33 bp, Homo sapien
gggcccatatcacaccgggaaaaggaaataaag

SEQ ID NO: 569287 - DNA, 33 bp, Homo sapien
aattttccaggcagaaaaggaccagatgaaggt

SEQ ID NO: 569288 - DNA, 33 bp, Homo sapien
aattttccaggcagaagaggaccagatgaaggt

SEQ ID NO: 569289 - DNA, 33 bp, Homo sapien
agctaatcattcttgacaggttgggatatattt

SEQ ID NO: 569290 - DNA, 33 bp, Homo sapien
agctaatcattcttgagaggttgggatatattt

SEQ ID NO: 569291 - DNA, 33 bp, Homo sapien
gttaattgggattatgaactctgatagtgattg

SEQ ID NO: 569292 - DNA, 33 bp, Homo sapien
gttaattgggattatgcactctgatagtgattg

SEQ ID NO: 569293 - DNA, 33 bp, Homo sapien
aaaatctctccatccaatctatggttagtgatg

SEQ ID NO: 569294 - DNA, 33 bp, Homo sapien
aaaatctctccatccagtctatggttagtgatg

SEQ ID NO: 569295 - DNA, 33 bp, Homo sapien
tggaataaaagtaacaagctttcaggtacaaat

SEQ ID NO: 569296 - DNA, 33 bp, Homo sapien
tggaataaaagtaacatgctttcaggtacaaat

SEQ ID NO: 569297 - DNA, 33 bp, Homo sapien
gctatttgcaatctcaagagtgtctcctcctcc

SEQ ID NO: 569298 - DNA, 33 bp, Homo sapien
gctatttgcaatctcaggagtgtctcctcctcc

SEQ ID NO: 569299 - DNA, 33 bp, Homo sapien
taacagccaatccctaacaatatcatggaattg

SEQ ID NO: 569300 - DNA, 33 bp, Homo sapien
taacagccaatccctaccaatatcatggaattg

SEQ ID NO: 569301 - DNA, 33 bp, Homo sapien
catgcgataccagtaacggggaaacagatgatc

SEQ ID NO: 569302 - DNA, 33 bp, Homo sapien
catgcgataccagtaatggggaaacagatgatc

SEQ ID NO: 569303 - DNA, 33 bp, Homo sapien
cactggattaagagtcaaaacaccaatgtcaaa

SEQ ID NO: 569304 - DNA, 33 bp, Homo sapien
cactggattaagagtcgaaacaccaatgtcaaa

SEQ ID NO: 569305 - DNA, 33 bp, Homo sapien
attaatttatccaaaaatgccagtctctcttcc

SEQ ID NO: 569306 - DNA, 33 bp, Homo sapien
attaatttatccaaaagtgccagtctctcttcc

SEQ ID NO: 569307 - DNA, 33 bp, Homo sapien
agttggtgttctcttacatgtaatgcataattt

SEQ ID NO: 569308 - DNA, 33 bp, Homo sapien
agttggtgttctcttatatgtaatgcataattt

SEQ ID NO: 569309 - DNA, 33 bp, Homo sapien
tcacacacttccgtaacgtttgaaatatcaata

SEQ ID NO: 569310 - DNA, 33 bp, Homo sapien
tcacacacttccgtaatgtttgaaatatcaata

SEQ ID NO: 569311 - DNA, 33 bp, Homo sapien
ttaataatctgcaataaatttcttgaggcatga

SEQ ID NO: 569312 - DNA, 33 bp, Homo sapien
ttaataatctgcaatacatttcttgaggcatga

SEQ ID NO: 569313 - DNA, 33 bp, Homo sapien
catctaattgacttaacagcaagtttatctttt

SEQ ID NO: 569314 - DNA, 33 bp, Homo sapien
catctaattgacttaatagcaagtttatctttt

SEQ ID NO: 569315 - DNA, 33 bp, Homo sapien
tagtgtctattgttgccaccttgatacattttt

SEQ ID NO: 569316 - DNA, 33 bp, Homo sapien
tagtgtctattgttgctaccttgatacattttt

SEQ ID NO: 569317 - DNA, 33 bp, Homo sapien
tgggctcatcagcaaactggagattacagaaaa

SEQ ID NO: 569318 - DNA, 33 bp, Homo sapien
tgggctcatcagcaaattggagattacagaaaa

SEQ ID NO: 569319 - DNA, 33 bp, Homo sapien
acaaatggggaacatcagagaaagaaaaatgaa

SEQ ID NO: 569320 - DNA, 33 bp, Homo sapien
acaaatggggaacatcggagaaagaaaaatgaa

SEQ ID NO: 569321 - DNA, 33 bp, Homo sapien
aagacctcatttaagacgctaacattagcagga

SEQ ID NO: 569322 - DNA, 33 bp, Homo sapien
aagacctcatttaagatgctaacattagcagga

SEQ ID NO: 569323 - DNA, 33 bp, Homo sapien
cctgctttccccagcagagtttagaaataggca

SEQ ID NO: 569324 - DNA, 33 bp, Homo sapien
cctgctttccccagcatagtttagaaataggca

SEQ ID NO: 569325 - DNA, 33 bp, Homo sapien
cctttagggaaaatcacaatatgttggattgtc

SEQ ID NO: 569326 - DNA, 33 bp, Homo sapien
cctttagggaaaatcataatatgttggattgtc

SEQ ID NO: 569327 - DNA, 33 bp, Homo sapien
ctaaatcaaatgacaaagagaaaagttagcttt

SEQ ID NO: 569328 - DNA, 33 bp, Homo sapien
ctaaatcaaatgacaaggagaaaagttagcttt

SEQ ID NO: 569329 - DNA, 33 bp, Homo sapien
gcaaacttttagtagcaaaaataacattaatat

SEQ ID NO: 569330 - DNA, 33 bp, Homo sapien
gcaaacttttagtagcgaaaataacattaatat

SEQ ID NO: 569331 - DNA, 33 bp, Homo sapien
tggctccagaaagacaaataatcttcatttcac

SEQ ID NO: 569332 - DNA, 33 bp, Homo sapien
tggctccagaaagacagataatcttcatttcac

SEQ ID NO: 569333 - DNA, 33 bp, Homo sapien
taaaggaaaatacgtcaatcaatcaattaactt

SEQ ID NO: 569334 - DNA, 33 bp, Homo sapien
taaaggaaaatacgtctatcaatcaattaactt

SEQ ID NO: 569335 - DNA, 33 bp, Homo sapien
ccttttaacaaagggaacagtgaaactagattt

SEQ ID NO: 569336 - DNA, 33 bp, Homo sapien
ccttttaacaaagggaccagtgaaactagattt

SEQ ID NO: 569337 - DNA, 33 bp, Homo sapien
gctggtggtgcacttgaatgaattagggctcct

SEQ ID NO: 569338 - DNA, 33 bp, Homo sapien
gctggtggtgcacttggatgaattagggctcct

SEQ ID NO: 569339 - DNA, 33 bp, Homo sapien
cattcctgtgaagtacaatgcactcccagggct

SEQ ID NO: 569340 - DNA, 33 bp, Homo sapien
cattcctgtgaagtacgatgcactcccagggct

SEQ ID NO: 569341 - DNA, 33 bp, Homo sapien
tattattacaaggtccaatttactgtccagaaa

SEQ ID NO: 569342 - DNA, 33 bp, Homo sapien
tattattacaaggtccgatttactgtccagaaa

SEQ ID NO: 569343 - DNA, 33 bp, Homo sapien
acagctgtattgaagacggattgaatagtttag

SEQ ID NO: 569344 - DNA, 33 bp, Homo sapien
acagctgtattgaagagggattgaatagtttag

SEQ ID NO: 569345 - DNA, 33 bp, Homo sapien
gcagttccatagaaaccagggcacagtcctggt

SEQ ID NO: 569346 - DNA, 33 bp, Homo sapien
gcagttccatagaaacgagggcacagtcctggt

SEQ ID NO: 569347 - DNA, 33 bp, Homo sapien
ttgtaaatactttccacatgtcatcaccttgca

SEQ ID NO: 569348 - DNA, 33 bp, Homo sapien
ttgtaaatactttccatatgtcatcaccttgca

SEQ ID NO: 569349 - DNA, 33 bp, Homo sapien
gttcatccttgacacacgtatctgcttttgact

SEQ ID NO: 569350 - DNA, 33 bp, Homo sapien
gttcatccttgacacatgtatctgcttttgact

SEQ ID NO: 569351 - DNA, 33 bp, Homo sapien
gcatcttgagaaagccacttcagatttccctga

SEQ ID NO: 569352 - DNA, 33 bp, Homo sapien
gcatcttgagaaagccgcttcagatttccctga

SEQ ID NO: 569353 - DNA, 33 bp, Homo sapien
gagtttatcttattcaccacagacactgccttt

SEQ ID NO: 569354 - DNA, 33 bp, Homo sapien
gagtttatcttattcatcacagacactgccttt

SEQ ID NO: 569355 - DNA, 33 bp, Homo sapien
aatgctccaggataggaaaaaaggatcttgtga

SEQ ID NO: 569356 - DNA, 33 bp, Homo sapien
aatgctccaggatagggaaaaaggatcttgtga

SEQ ID NO: 569357 - DNA, 33 bp, Homo sapien
cttcccagtgcatatacaatcccttcatgatct

SEQ ID NO: 569358 - DNA, 33 bp, Homo sapien
cttcccagtgcatatataatcccttcatgatct

SEQ ID NO: 569359 - DNA, 33 bp, Homo sapien
acaagcccataagatcaatactgttattatcac

SEQ ID NO: 569360 - DNA, 33 bp, Homo sapien
acaagcccataagatcgatactgttattatcac

SEQ ID NO: 569361 - DNA, 33 bp, Homo sapien
atgttcccaggagagaggtagcagtcaccttcc

SEQ ID NO: 569362 - DNA, 33 bp, Homo sapien
atgttcccaggagagatgtagcagtcaccttcc

SEQ ID NO: 569363 - DNA, 33 bp, Homo sapien
tggtgctaggcaccgaataccttacccaggagg

SEQ ID NO: 569364 - DNA, 33 bp, Homo sapien
tggtgctaggcaccgagtaccttacccaggagg

SEQ ID NO: 569365 - DNA, 33 bp, Homo sapien
attgatgtccatttgacggtttgaaaatttaag

SEQ ID NO: 569366 - DNA, 33 bp, Homo sapien
attgatgtccatttgatggtttgaaaatttaag

SEQ ID NO: 569367 - DNA, 33 bp, Homo sapien
gctccttcacagatgaaacattcagattcctag

SEQ ID NO: 569368 - DNA, 33 bp, Homo sapien
gctccttcacagatgagacattcagattcctag

SEQ ID NO: 569369 - DNA, 33 bp, Homo sapien
agtgccatcagtggaaaagtaaagaggcccgca

SEQ ID NO: 569370 - DNA, 33 bp, Homo sapien
agtgccatcagtggaatagtaaagaggcccgca

SEQ ID NO: 569371 - DNA, 33 bp, Homo sapien
tacttgaactctttgaagtgggcattattctgt

SEQ ID NO: 569372 - DNA, 33 bp, Homo sapien
tacttgaactctttgaggtgggcattattctgt

SEQ ID NO: 569373 - DNA, 33 bp, Homo sapien
tatgtggaccattcaggatgaccttttgttaag

SEQ ID NO: 569374 - DNA, 33 bp, Homo sapien
tatgtggaccattcagtatgaccttttgttaag

SEQ ID NO: 569375 - DNA, 33 bp, Homo sapien
agattcaattaagaccaatccagttcctgatta

SEQ ID NO: 569376 - DNA, 33 bp, Homo sapien
agattcaattaagaccgatccagttcctgatta

SEQ ID NO: 569377 - DNA, 33 bp, Homo sapien
gttttcaagtgatcaacagtacatggagcaaga

SEQ ID NO: 569378 - DNA, 33 bp, Homo sapien
gttttcaagtgatcaatagtacatggagcaaga

SEQ ID NO: 569379 - DNA, 33 bp, Homo sapien
ataaattctcttaaaactcagaggaaagataca

SEQ ID NO: 569380 - DNA, 33 bp, Homo sapien
ataaattctcttaaaattcagaggaaagataca

SEQ ID NO: 569381 - DNA, 33 bp, Homo sapien
tagggtcgttacccaagaaatctctagaactca

SEQ ID NO: 569382 - DNA, 33 bp, Homo sapien
tagggtcgttacccaataaatctctagaactca

SEQ ID NO: 569383 - DNA, 33 bp, Homo sapien
tccagttctgttcctccctgtgcaatatttaac

SEQ ID NO: 569384 - DNA, 33 bp, Homo sapien
tccagttctgttcctcgctgtgcaatatttaac

SEQ ID NO: 569385 - DNA, 33 bp, Homo sapien
gagatgaattgaaaaacgcaaaaggcttggctg

SEQ ID NO: 569386 - DNA, 33 bp, Homo sapien
gagatgaattgaaaaatgcaaaaggcttggctg

SEQ ID NO: 569387 - DNA, 33 bp, Homo sapien
tattaacattcataaaacattcagacaattgct

SEQ ID NO: 569388 - DNA, 33 bp, Homo sapien
tattaacattcataaaccattcagacaattgct

SEQ ID NO: 569389 - DNA, 33 bp, Homo sapien
tgtgctatttggtaagcattgtattgcatgctt

SEQ ID NO: 569390 - DNA, 33 bp, Homo sapien
tgtgctatttggtaagtattgtattgcatgctt

SEQ ID NO: 569391 - DNA, 33 bp, Homo sapien
tgttacagcagtaataagaaatcagtaaagtgt

SEQ ID NO: 569392 - DNA, 33 bp, Homo sapien
tgttacagcagtaataggaaatcagtaaagtgt

SEQ ID NO: 569393 - DNA, 33 bp, Homo sapien
tctgtttaatacaaaccaaaaattcaatactcc

SEQ ID NO: 569394 - DNA, 33 bp, Homo sapien
tctgtttaatacaaacgaaaaattcaatactcc

SEQ ID NO: 569395 - DNA, 33 bp, Homo sapien
tacagaaaatttaaagacccaagatagaaaaga

SEQ ID NO: 569396 - DNA, 33 bp, Homo sapien
tacagaaaatttaaaggcccaagatagaaaaga

SEQ ID NO: 569397 - DNA, 33 bp, Homo sapien
tagactgggttaggaaagaagattctaggcatt

SEQ ID NO: 569398 - DNA, 33 bp, Homo sapien
tagactgggttaggaaggaagattctaggcatt

SEQ ID NO: 569399 - DNA, 33 bp, Homo sapien
agtcagtgaaccctcaaccaagtcttagcgcag

SEQ ID NO: 569400 - DNA, 33 bp, Homo sapien
agtcagtgaaccctcagccaagtcttagcgcag

SEQ ID NO: 569401 - DNA, 33 bp, Homo sapien
aatggaaacagctaaaagggcatgaccctgtct

SEQ ID NO: 569402 - DNA, 33 bp, Homo sapien
aatggaaacagctaaatgggcatgaccctgtct

SEQ ID NO: 569403 - DNA, 33 bp, Homo sapien
gtaggctttgcccaggaaacctaactaaaataa

SEQ ID NO: 569404 - DNA, 33 bp, Homo sapien
gtaggctttgcccagggaacctaactaaaataa

SEQ ID NO: 569405 - DNA, 33 bp, Homo sapien
tcttgaaataattacaatccaaactacaaatgt

SEQ ID NO: 569406 - DNA, 33 bp, Homo sapien
tcttgaaataattacagtccaaactacaaatgt

SEQ ID NO: 569407 - DNA, 33 bp, Homo sapien
cacagttactcaagtcaagaggcaaaaaaaaaa

SEQ ID NO: 569408 - DNA, 33 bp, Homo sapien
cacagttactcaagtcgagaggcaaaaaaaaaa

SEQ ID NO: 569409 - DNA, 33 bp, Homo sapien
gcaatgacttattagacacgtactgttattgtc

SEQ ID NO: 569410 - DNA, 33 bp, Homo sapien
gcaatgacttattagatacgtactgttattgtc

SEQ ID NO: 569411 - DNA, 33 bp, Homo sapien
ctctagacaacgaagacgtatgatttttaaagg

SEQ ID NO: 569412 - DNA, 33 bp, Homo sapien
ctctagacaacgaagatgtatgatttttaaagg

SEQ ID NO: 569413 - DNA, 33 bp, Homo sapien
aaccaggtgttcagaacagactcaactatccat

SEQ ID NO: 569414 - DNA, 33 bp, Homo sapien
aaccaggtgttcagaatagactcaactatccat

SEQ ID NO: 569415 - DNA, 33 bp, Homo sapien
attcagatccttgtgactacacggtacaaataa

SEQ ID NO: 569416 - DNA, 33 bp, Homo sapien
attcagatccttgtgagtacacggtacaaataa

SEQ ID NO: 569417 - DNA, 33 bp, Homo sapien
tagaaaatagcctagggatgcatcaacagagga

SEQ ID NO: 569418 - DNA, 33 bp, Homo sapien
tagaaaatagcctaggtatgcatcaacagagga

SEQ ID NO: 569419 - DNA, 33 bp, Homo sapien
agagaaggaagggcacacttgtattaaatgaat

SEQ ID NO: 569420 - DNA, 33 bp, Homo sapien
agagaaggaagggcacgcttgtattaaatgaat

SEQ ID NO: 569421 - DNA, 33 bp, Homo sapien
aactgggttatttgaacgtcaaactttcgataa

SEQ ID NO: 569422 - DNA, 33 bp, Homo sapien
aactgggttatttgaatgtcaaactttcgataa

SEQ ID NO: 569423 - DNA, 33 bp, Homo sapien
tgctgtgcctaatgaaggcatttggtattcatg

SEQ ID NO: 569424 - DNA, 33 bp, Homo sapien
tgctgtgcctaatgaatgcatttggtattcatg

SEQ ID NO: 569425 - DNA, 33 bp, Homo sapien
ttttcatggttttatcgatagcacttgatacag

SEQ ID NO: 569426 - DNA, 33 bp, Homo sapien
ttttcatggttttatctatagcacttgatacag

SEQ ID NO: 569427 - DNA, 33 bp, Homo sapien
ggctgaggatctcctaggtgtccaatgctgtat

SEQ ID NO: 569428 - DNA, 33 bp, Homo sapien
ggctgaggatctcctatgtgtccaatgctgtat

SEQ ID NO: 569429 - DNA, 33 bp, Homo sapien
aatataggactagaaaggcaacagctttatcag

SEQ ID NO: 569430 - DNA, 33 bp, Homo sapien
aatataggactagaaatgcaacagctttatcag

SEQ ID NO: 569431 - DNA, 33 bp, Homo sapien
ttgtgtataaaatgcaaagaaaagtgcctggat

SEQ ID NO: 569432 - DNA, 33 bp, Homo sapien
ttgtgtataaaatgcacagaaaagtgcctggat

SEQ ID NO: 569433 - DNA, 33 bp, Homo sapien
acagcccatctgggaaaatcactgcttcagaga

SEQ ID NO: 569434 - DNA, 33 bp, Homo sapien
acagcccatctgggaagatcactgcttcagaga

SEQ ID NO: 569435 - DNA, 33 bp, Homo sapien
tttttgttactatagaccaagtatttcattcac

SEQ ID NO: 569436 - DNA, 33 bp, Homo sapien
tttttgttactatagatcaagtatttcattcac

SEQ ID NO: 569437 - DNA, 33 bp, Homo sapien
ttgtgttcagggttagcatccacagtacaagtg

SEQ ID NO: 569438 - DNA, 33 bp, Homo sapien
ttgtgttcagggttagtatccacagtacaagtg

SEQ ID NO: 569439 - DNA, 33 bp, Homo sapien
cttgggaaaacaaatgccatcctaacaaagtcc

SEQ ID NO: 569440 - DNA, 33 bp, Homo sapien
cttgggaaaacaaatgtcatcctaacaaagtcc

SEQ ID NO: 569441 - DNA, 33 bp, Homo sapien
tagagataagaaaggcactagcatattatctgt

SEQ ID NO: 569442 - DNA, 33 bp, Homo sapien
tagagataagaaaggcgctagcatattatctgt

SEQ ID NO: 569443 - DNA, 33 bp, Homo sapien
caaaaaaggatttgcccccaaatgtagaattag

SEQ ID NO: 569444 - DNA, 33 bp, Homo sapien
caaaaaaggatttgcctccaaatgtagaattag

SEQ ID NO: 569445 - DNA, 33 bp, Homo sapien
gccccacctgggcctcacttggtcacactggca

SEQ ID NO: 569446 - DNA, 33 bp, Homo sapien
gccccacctgggcctcgcttggtcacactggca

SEQ ID NO: 569447 - DNA, 33 bp, Homo sapien
ctgcacagctaaaggaaatagggccaggattca

SEQ ID NO: 569448 - DNA, 33 bp, Homo sapien
ctgcacagctaaaggagatagggccaggattca

SEQ ID NO: 569449 - DNA, 33 bp, Homo sapien
tactgctgtatcactcaccagtagcatggctag

SEQ ID NO: 569450 - DNA, 33 bp, Homo sapien
tactgctgtatcactccccagtagcatggctag

SEQ ID NO: 569451 - DNA, 33 bp, Homo sapien
ttcaaattttggagaactctgataccagattcc

SEQ ID NO: 569452 - DNA, 33 bp, Homo sapien
ttcaaattttggagaattctgataccagattcc

SEQ ID NO: 569453 - DNA, 33 bp, Homo sapien
tgactgtggtggttgacgggaaataaccgaaag

SEQ ID NO: 569454 - DNA, 33 bp, Homo sapien
tgactgtggtggttgatgggaaataaccgaaag

SEQ ID NO: 569455 - DNA, 33 bp, Homo sapien
acaacattgaacaaaacgacgttatctgaggac

SEQ ID NO: 569456 - DNA, 33 bp, Homo sapien
acaacattgaacaaaaggacgttatctgaggac

SEQ ID NO: 569457 - DNA, 33 bp, Homo sapien
gaattggcgttgtctacgtgatctcagtctgag

SEQ ID NO: 569458 - DNA, 33 bp, Homo sapien
gaattggcgttgtctatgtgatctcagtctgag

SEQ ID NO: 569459 - DNA, 33 bp, Homo sapien
tagctgaatccatagaccctggccttgatatgt

SEQ ID NO: 569460 - DNA, 33 bp, Homo sapien
tagctgaatccatagatcctggccttgatatgt

SEQ ID NO: 569461 - DNA, 33 bp, Homo sapien
agaatgccatccactacatttcaagctaagttg

SEQ ID NO: 569462 - DNA, 33 bp, Homo sapien
agaatgccatccactatatttcaagctaagttg

SEQ ID NO: 569463 - DNA, 33 bp, Homo sapien
aatggtgagggtgaagaatttatagcatgatgg

SEQ ID NO: 569464 - DNA, 33 bp, Homo sapien
aatggtgagggtgaaggatttatagcatgatgg

SEQ ID NO: 569465 - DNA, 33 bp, Homo sapien
attgcctggtgcatgagaaggactcaataaact

SEQ ID NO: 569466 - DNA, 33 bp, Homo sapien
attgcctggtgcatgataaggactcaataaact

SEQ ID NO: 569467 - DNA, 33 bp, Homo sapien
cttaaacccacagaacagtacacaccccacagc

SEQ ID NO: 569468 - DNA, 33 bp, Homo sapien
cttaaacccacagaacggtacacaccccacagc

SEQ ID NO: 569469 - DNA, 33 bp, Homo sapien
gtcactagggcaagatcagagccaaagaccagg

SEQ ID NO: 569470 - DNA, 33 bp, Homo sapien
gtcactagggcaagatgagagccaaagaccagg

SEQ ID NO: 569471 - DNA, 33 bp, Homo sapien
cagctttaccatctgcagacagctttgagtgtt

SEQ ID NO: 569472 - DNA, 33 bp, Homo sapien
cagctttaccatctgcggacagctttgagtgtt

SEQ ID NO: 569473 - DNA, 33 bp, Homo sapien
cagaaggctgtcataccggccctcttcctttgc

SEQ ID NO: 569474 - DNA, 33 bp, Homo sapien
cagaaggctgtcatactggccctcttcctttgc

SEQ ID NO: 569475 - DNA, 33 bp, Homo sapien
tgattcagtgaggccagggagtttgtactttta

SEQ ID NO: 569476 - DNA, 33 bp, Homo sapien
tgattcagtgaggccatggagtttgtactttta

SEQ ID NO: 569477 - DNA, 33 bp, Homo sapien
gtctgtccactcacaagtgcatggtgtccccta

SEQ ID NO: 569478 - DNA, 33 bp, Homo sapien
gtctgtccactcacaattgcatggtgtccccta

SEQ ID NO: 569479 - DNA, 33 bp, Homo sapien
atgcgatacaggacttcaaagaatgctgacatc

SEQ ID NO: 569480 - DNA, 33 bp, Homo sapien
atgcgatacaggactttaaagaatgctgacatc

SEQ ID NO: 569481 - DNA, 33 bp, Homo sapien
taaacacttgcatagacggaagatgtacagagg

SEQ ID NO: 569482 - DNA, 33 bp, Homo sapien
taaacacttgcatagatggaagatgtacagagg

SEQ ID NO: 569483 - DNA, 33 bp, Homo sapien
gatctaacaaagaaccccagcactcaaaaagtt

SEQ ID NO: 569484 - DNA, 33 bp, Homo sapien
gatctaacaaagaacctcagcactcaaaaagtt

SEQ ID NO: 569485 - DNA, 33 bp, Homo sapien
aaaaagctggttcgtcccggctactgagaaata

SEQ ID NO: 569486 - DNA, 33 bp, Homo sapien
aaaaagctggttcgtctcggctactgagaaata

SEQ ID NO: 569487 - DNA, 33 bp, Homo sapien
gagagagagaaatagacgtagatagatagatag

SEQ ID NO: 569488 - DNA, 33 bp, Homo sapien
gagagagagaaatagaggtagatagatagatag

SEQ ID NO: 569489 - DNA, 33 bp, Homo sapien
cttttttatgaaggacaagaacatgagctccat

SEQ ID NO: 569490 - DNA, 33 bp, Homo sapien
cttttttatgaaggacgagaacatgagctccat

SEQ ID NO: 569491 - DNA, 33 bp, Homo sapien
taagcattgaactaggaaatatctgcaaaatca

SEQ ID NO: 569492 - DNA, 33 bp, Homo sapien
taagcattgaactaggcaatatctgcaaaatca

SEQ ID NO: 569493 - DNA, 33 bp, Homo sapien
acacaacaattgataactaatacaaaggtccat

SEQ ID NO: 569494 - DNA, 33 bp, Homo sapien
acacaacaattgataagtaatacaaaggtccat

SEQ ID NO: 569495 - DNA, 33 bp, Homo sapien
aactcaggcttagagacgctgaggtacatgatt

SEQ ID NO: 569496 - DNA, 33 bp, Homo sapien
aactcaggcttagagatgctgaggtacatgatt

SEQ ID NO: 569497 - DNA, 33 bp, Homo sapien
gtcaggcatggtcatacactaccttcccccagc

SEQ ID NO: 569498 - DNA, 33 bp, Homo sapien
gtcaggcatggtcatatactaccttcccccagc

SEQ ID NO: 569499 - DNA, 33 bp, Homo sapien
aacttgcagatacatgccaagtgaggaatacag

SEQ ID NO: 569500 - DNA, 33 bp, Homo sapien
aacttgcagatacatgtcaagtgaggaatacag

SEQ ID NO: 569501 - DNA, 33 bp, Homo sapien
attttgtgagcatacaggtaacaatatatttat

SEQ ID NO: 569502 - DNA, 33 bp, Homo sapien
attttgtgagcatacatgtaacaatatatttat

SEQ ID NO: 569503 - DNA, 33 bp, Homo sapien
agttgaaggtggagcccagcaaatattaagagt

SEQ ID NO: 569504 - DNA, 33 bp, Homo sapien
agttgaaggtggagcctagcaaatattaagagt

SEQ ID NO: 569505 - DNA, 33 bp, Homo sapien
gataagggtctctaaaataagaaggtgaacaat

SEQ ID NO: 569506 - DNA, 33 bp, Homo sapien
gataagggtctctaaagtaagaaggtgaacaat

SEQ ID NO: 569507 - DNA, 33 bp, Homo sapien
ggtctgacttcaccacgcctgaaccataaaatg

SEQ ID NO: 569508 - DNA, 33 bp, Homo sapien
ggtctgacttcaccactcctgaaccataaaatg

SEQ ID NO: 569509 - DNA, 33 bp, Homo sapien
gtacattaaatcgacgcatttctgaaacaaacc

SEQ ID NO: 569510 - DNA, 33 bp, Homo sapien
gtacattaaatcgacgtatttctgaaacaaacc

SEQ ID NO: 569511 - DNA, 33 bp, Homo sapien
tattccttttgttcctcactctcagccaatccg

SEQ ID NO: 569512 - DNA, 33 bp, Homo sapien
tattccttttgttccttactctcagccaatccg

SEQ ID NO: 569513 - DNA, 33 bp, Homo sapien
agacaaagaacttctaaagttaacaggcaaaag

SEQ ID NO: 569514 - DNA, 33 bp, Homo sapien
agacaaagaacttctagagttaacaggcaaaag

SEQ ID NO: 569515 - DNA, 33 bp, Homo sapien
aatcttgcagctgggaaaaggatagatctatct

SEQ ID NO: 569516 - DNA, 33 bp, Homo sapien
aatcttgcagctgggagaaggatagatctatct

SEQ ID NO: 569517 - DNA, 33 bp, Homo sapien
ttaggaacacttatcacgtggtagtctcttaca

SEQ ID NO: 569518 - DNA, 33 bp, Homo sapien
ttaggaacacttatcatgtggtagtctcttaca

SEQ ID NO: 569519 - DNA, 33 bp, Homo sapien
ctaaatcaaggagtgaagaaagaaatagacttg

SEQ ID NO: 569520 - DNA, 33 bp, Homo sapien
ctaaatcaaggagtgaggaaagaaatagacttg

SEQ ID NO: 569521 - DNA, 33 bp, Homo sapien
aaagtaatccacctgacagcagagacaccttct

SEQ ID NO: 569522 - DNA, 33 bp, Homo sapien
aaagtaatccacctgatagcagagacaccttct

SEQ ID NO: 569523 - DNA, 33 bp, Homo sapien
atagttggatcttcaaacctagcatataaacct

SEQ ID NO: 569524 - DNA, 33 bp, Homo sapien
atagttggatcttcaagcctagcatataaacct

SEQ ID NO: 569525 - DNA, 33 bp, Homo sapien
cagggaagaaaatgaaagttaagagaggtcaag

SEQ ID NO: 569526 - DNA, 33 bp, Homo sapien
cagggaagaaaatgaaggttaagagaggtcaag

SEQ ID NO: 569527 - DNA, 33 bp, Homo sapien
tgcgtgatgctgattccagagaacattttgagg

SEQ ID NO: 569528 - DNA, 33 bp, Homo sapien
tgcgtgatgctgattcgagagaacattttgagg

SEQ ID NO: 569529 - DNA, 33 bp, Homo sapien
tttctgctttgtttgcaaggttctaactattca

SEQ ID NO: 569530 - DNA, 33 bp, Homo sapien
tttctgctttgtttgcgaggttctaactattca

SEQ ID NO: 569531 - DNA, 33 bp, Homo sapien
ctgagcagcattgcccacctaatatcctccaac

SEQ ID NO: 569532 - DNA, 33 bp, Homo sapien
ctgagcagcattgcccccctaatatcctccaac

SEQ ID NO: 569533 - DNA, 33 bp, Homo sapien
ccttgcttcatgaaacactctcctatgggacaa

SEQ ID NO: 569534 - DNA, 33 bp, Homo sapien
ccttgcttcatgaaaccctctcctatgggacaa

SEQ ID NO: 569535 - DNA, 33 bp, Homo sapien
cctcaccacttatacacaccatttaaaactgag

SEQ ID NO: 569536 - DNA, 33 bp, Homo sapien
cctcaccacttatacataccatttaaaactgag

SEQ ID NO: 569537 - DNA, 33 bp, Homo sapien
cattaaactcagaagcaatgtcgcttggattcc

SEQ ID NO: 569538 - DNA, 33 bp, Homo sapien
cattaaactcagaagcgatgtcgcttggattcc

SEQ ID NO: 569539 - DNA, 33 bp, Homo sapien
tggggataggccacaacgtgtagagcaatgatt

SEQ ID NO: 569540 - DNA, 33 bp, Homo sapien
tggggataggccacaatgtgtagagcaatgatt

SEQ ID NO: 569541 - DNA, 33 bp, Homo sapien
tgtacttctttggcgaatacaatccctcagtgg

SEQ ID NO: 569542 - DNA, 33 bp, Homo sapien
tgtacttctttggcgagtacaatccctcagtgg

SEQ ID NO: 569543 - DNA, 33 bp, Homo sapien
atcgatcacaatttcaacccatgcgagaaacac

SEQ ID NO: 569544 - DNA, 33 bp, Homo sapien
atcgatcacaatttcagcccatgcgagaaacac

SEQ ID NO: 569545 - DNA, 33 bp, Homo sapien
acccaacatatggacaactcaaagaagagtgaa

SEQ ID NO: 569546 - DNA, 33 bp, Homo sapien
acccaacatatggacagctcaaagaagagtgaa

SEQ ID NO: 569547 - DNA, 33 bp, Homo sapien
cagttagtagagtactaaaaattctacctatgc

SEQ ID NO: 569548 - DNA, 33 bp, Homo sapien
cagttagtagagtactgaaaattctacctatgc

SEQ ID NO: 569549 - DNA, 33 bp, Homo sapien
ccttctgattcaatgacggaaagtcccagaaag

SEQ ID NO: 569550 - DNA, 33 bp, Homo sapien
ccttctgattcaatgagggaaagtcccagaaag

SEQ ID NO: 569551 - DNA, 33 bp, Homo sapien
tggacactggacatcaaaacaggctgccactga

SEQ ID NO: 569552 - DNA, 33 bp, Homo sapien
tggacactggacatcagaacaggctgccactga

SEQ ID NO: 569553 - DNA, 33 bp, Homo sapien
gttcagataatctgaacaaaacggtcagatggt

SEQ ID NO: 569554 - DNA, 33 bp, Homo sapien
gttcagataatctgaataaaacggtcagatggt

SEQ ID NO: 569555 - DNA, 33 bp, Homo sapien
aagagatctgcattaaaggcctaaattttatta

SEQ ID NO: 569556 - DNA, 33 bp, Homo sapien
aagagatctgcattaatggcctaaattttatta

SEQ ID NO: 569557 - DNA, 33 bp, Homo sapien
ttagaactgaatcccaagcatcctcattcccag

SEQ ID NO: 569558 - DNA, 33 bp, Homo sapien
ttagaactgaatcccaggcatcctcattcccag

SEQ ID NO: 569559 - DNA, 33 bp, Homo sapien
agggcaatgttctgataagagttaaaacctaaa

SEQ ID NO: 569560 - DNA, 33 bp, Homo sapien
agggcaatgttctgatcagagttaaaacctaaa

SEQ ID NO: 569561 - DNA, 33 bp, Homo sapien
cctctgaatttccaaaaccacacatattctaca

SEQ ID NO: 569562 - DNA, 33 bp, Homo sapien
cctctgaatttccaaagccacacatattctaca

SEQ ID NO: 569563 - DNA, 33 bp, Homo sapien
cgatgtcctaagcaacagctaacagtactcacc

SEQ ID NO: 569564 - DNA, 33 bp, Homo sapien
cgatgtcctaagcaacggctaacagtactcacc

SEQ ID NO: 569565 - DNA, 33 bp, Homo sapien
taacaagacttaaactaactaaaactgcaattt

SEQ ID NO: 569566 - DNA, 33 bp, Homo sapien
taacaagacttaaactgactaaaactgcaattt

SEQ ID NO: 569567 - DNA, 33 bp, Homo sapien
atcatcagagcggagaaatgaggaagttcatct

SEQ ID NO: 569568 - DNA, 33 bp, Homo sapien
atcatcagagcggagagatgaggaagttcatct

SEQ ID NO: 569569 - DNA, 33 bp, Homo sapien
agtttaattactggtacatacaggacggaagag

SEQ ID NO: 569570 - DNA, 33 bp, Homo sapien
agtttaattactggtatatacaggacggaagag

SEQ ID NO: 569571 - DNA, 33 bp, Homo sapien
tcttaaaatcgtcctacagatcactaatgcttt

SEQ ID NO: 569572 - DNA, 33 bp, Homo sapien
tcttaaaatcgtcctatagatcactaatgcttt

SEQ ID NO: 569573 - DNA, 33 bp, Homo sapien
ctgatagctgtgttggaactaatggaagataga

SEQ ID NO: 569574 - DNA, 33 bp, Homo sapien
ctgatagctgtgttgggactaatggaagataga

SEQ ID NO: 569575 - DNA, 33 bp, Homo sapien
tcctcctgaatctaaacccatcatgttttctac

SEQ ID NO: 569576 - DNA, 33 bp, Homo sapien
tcctcctgaatctaaatccatcatgttttctac

SEQ ID NO: 569577 - DNA, 33 bp, Homo sapien
aagggactgagcaaagcaacatacaaagttatt

SEQ ID NO: 569578 - DNA, 33 bp, Homo sapien
aagggactgagcaaaggaacatacaaagttatt

SEQ ID NO: 569579 - DNA, 33 bp, Homo sapien
catatcaaagacattacggttgataaaatgagg

SEQ ID NO: 569580 - DNA, 33 bp, Homo sapien
catatcaaagacattatggttgataaaatgagg

SEQ ID NO: 569581 - DNA, 33 bp, Homo sapien
ggacacatgaataaaacacaccatgagagagtc

SEQ ID NO: 569582 - DNA, 33 bp, Homo sapien
ggacacatgaataaaatacaccatgagagagtc

SEQ ID NO: 569583 - DNA, 33 bp, Homo sapien
cagtatctattcactcaataagaactgactgaa

SEQ ID NO: 569584 - DNA, 33 bp, Homo sapien
cagtatctattcactccataagaactgactgaa

SEQ ID NO: 569585 - DNA, 33 bp, Homo sapien
ttcctatctcacacaacggtcatctctctaccc

SEQ ID NO: 569586 - DNA, 33 bp, Homo sapien
ttcctatctcacacaatggtcatctctctaccc

SEQ ID NO: 569587 - DNA, 33 bp, Homo sapien
gaagagtgtcattttcacaatggagcacgaaga

SEQ ID NO: 569588 - DNA, 33 bp, Homo sapien
gaagagtgtcattttcgcaatggagcacgaaga

SEQ ID NO: 569589 - DNA, 33 bp, Homo sapien
taatagggctgaccataagccaatacgatgttg

SEQ ID NO: 569590 - DNA, 33 bp, Homo sapien
taatagggctgaccatgagccaatacgatgttg

SEQ ID NO: 569591 - DNA, 33 bp, Homo sapien
ccctttgtgtggaagcgccaagaaaaaaaggca

SEQ ID NO: 569592 - DNA, 33 bp, Homo sapien
ccctttgtgtggaagctccaagaaaaaaaggca

SEQ ID NO: 569593 - DNA, 33 bp, Homo sapien
aggagatgaagcaagaaattagcaactgtagaa

SEQ ID NO: 569594 - DNA, 33 bp, Homo sapien
aggagatgaagcaagagattagcaactgtagaa

SEQ ID NO: 569595 - DNA, 33 bp, Homo sapien
tcaattactgaaaaaccgatacgcttttcagtg

SEQ ID NO: 569596 - DNA, 33 bp, Homo sapien
tcaattactgaaaaactgatacgcttttcagtg

SEQ ID NO: 569597 - DNA, 33 bp, Homo sapien
ctccgtagctgggtgacggaaggaagaagggga

SEQ ID NO: 569598 - DNA, 33 bp, Homo sapien
ctccgtagctgggtgatggaaggaagaagggga

SEQ ID NO: 569599 - DNA, 33 bp, Homo sapien
tttcatctgcctttacccctagactgtggctcc

SEQ ID NO: 569600 - DNA, 33 bp, Homo sapien
tttcatctgcctttactcctagactgtggctcc

SEQ ID NO: 569601 - DNA, 33 bp, Homo sapien
caaaatctgaggatggaaggattacctacaatg

SEQ ID NO: 569602 - DNA, 33 bp, Homo sapien
caaaatctgaggatgggaggattacctacaatg

SEQ ID NO: 569603 - DNA, 33 bp, Homo sapien
ctcagagctcatcatacataggccaacaggtca

SEQ ID NO: 569604 - DNA, 33 bp, Homo sapien
ctcagagctcatcatatataggccaacaggtca

SEQ ID NO: 569605 - DNA, 33 bp, Homo sapien
ctaagatccacaagccaatgaagatgtggtctg

SEQ ID NO: 569606 - DNA, 33 bp, Homo sapien
ctaagatccacaagccgatgaagatgtggtctg

SEQ ID NO: 569607 - DNA, 33 bp, Homo sapien
cattacaaggtttgagaaaaactcacattatga

SEQ ID NO: 569608 - DNA, 33 bp, Homo sapien
cattacaaggtttgaggaaaactcacattatga

SEQ ID NO: 569609 - DNA, 33 bp, Homo sapien
attagggatctagccacgctgcagtaaaaatcc

SEQ ID NO: 569610 - DNA, 33 bp, Homo sapien
attagggatctagccatgctgcagtaaaaatcc

SEQ ID NO: 569611 - DNA, 33 bp, Homo sapien
atggtgagaaaaataccgacagttcagggcaaa

SEQ ID NO: 569612 - DNA, 33 bp, Homo sapien
atggtgagaaaaatacggacagttcagggcaaa

SEQ ID NO: 569613 - DNA, 33 bp, Homo sapien
ttgccattgtataatgaatgagaacttggatta

SEQ ID NO: 569614 - DNA, 33 bp, Homo sapien
ttgccattgtataatggatgagaacttggatta

SEQ ID NO: 569615 - DNA, 33 bp, Homo sapien
gccccaaggtggccacacaaagggtacttgata

SEQ ID NO: 569616 - DNA, 33 bp, Homo sapien
gccccaaggtggccacgcaaagggtacttgata

SEQ ID NO: 569617 - DNA, 33 bp, Homo sapien
aggagacccacaaaaaataaagagaaggctgtc

SEQ ID NO: 569618 - DNA, 33 bp, Homo sapien
aggagacccacaaaaagtaaagagaaggctgtc

SEQ ID NO: 569619 - DNA, 33 bp, Homo sapien
gtcaggaagtagtaaaaccatttcttgaatcta

SEQ ID NO: 569620 - DNA, 33 bp, Homo sapien
gtcaggaagtagtaaagccatttcttgaatcta

SEQ ID NO: 569621 - DNA, 33 bp, Homo sapien
aagagatgaatcttgacactctgagctctggtt

SEQ ID NO: 569622 - DNA, 33 bp, Homo sapien
aagagatgaatcttgagactctgagctctggtt

SEQ ID NO: 569623 - DNA, 33 bp, Homo sapien
tccttcttcctgctaaatggtcccatctttgag

SEQ ID NO: 569624 - DNA, 33 bp, Homo sapien
tccttcttcctgctaagtggtcccatctttgag

SEQ ID NO: 569625 - DNA, 33 bp, Homo sapien
tcatgtaattaaccagaaggaattgtgatataa

SEQ ID NO: 569626 - DNA, 33 bp, Homo sapien
tcatgtaattaaccaggaggaattgtgatataa

SEQ ID NO: 569627 - DNA, 33 bp, Homo sapien
acagttaacctagaaacggaactgtctattgcc

SEQ ID NO: 569628 - DNA, 33 bp, Homo sapien
acagttaacctagaaatggaactgtctattgcc

SEQ ID NO: 569629 - DNA, 33 bp, Homo sapien
gtgttcacaacaaatgcagcaaatatgaaataa

SEQ ID NO: 569630 - DNA, 33 bp, Homo sapien
gtgttcacaacaaatgtagcaaatatgaaataa

SEQ ID NO: 569631 - DNA, 33 bp, Homo sapien
ttgatgatttcaatgacgtgctatcttaggttg

SEQ ID NO: 569632 - DNA, 33 bp, Homo sapien
ttgatgatttcaatgatgtgctatcttaggttg

SEQ ID NO: 569633 - DNA, 33 bp, Homo sapien
ctgcaattggccaggaaaccaagtccactctgc

SEQ ID NO: 569634 - DNA, 33 bp, Homo sapien
ctgcaattggccaggagaccaagtccactctgc

SEQ ID NO: 569635 - DNA, 33 bp, Homo sapien
ttacttaccaaacaaccgtctgaatcatcagcc

SEQ ID NO: 569636 - DNA, 33 bp, Homo sapien
ttacttaccaaacaactgtctgaatcatcagcc

SEQ ID NO: 569637 - DNA, 33 bp, Homo sapien
cattttcccttgtctacacttggcccccatatg

SEQ ID NO: 569638 - DNA, 33 bp, Homo sapien
cattttcccttgtctatacttggcccccatatg

SEQ ID NO: 569639 - DNA, 33 bp, Homo sapien
ttagcttgtctctcccactcttgactgtcttgt

SEQ ID NO: 569640 - DNA, 33 bp, Homo sapien
ttagcttgtctctccccctcttgactgtcttgt

SEQ ID NO: 569641 - DNA, 33 bp, Homo sapien
tgaacttggaaaagtacgtctgactcagagtca

SEQ ID NO: 569642 - DNA, 33 bp, Homo sapien
tgaacttggaaaagtaggtctgactcagagtca

SEQ ID NO: 569643 - DNA, 33 bp, Homo sapien
atctccaaatttcagactaattggttgtatctc

SEQ ID NO: 569644 - DNA, 33 bp, Homo sapien
atctccaaatttcagattaattggttgtatctc

SEQ ID NO: 569645 - DNA, 33 bp, Homo sapien
cactttgcttcagtacccaaacgaatccaccct

SEQ ID NO: 569646 - DNA, 33 bp, Homo sapien
cactttgcttcagtactcaaacgaatccaccct

SEQ ID NO: 569647 - DNA, 33 bp, Homo sapien
catacaatatctaccagtaaagaaattaccttg

SEQ ID NO: 569648 - DNA, 33 bp, Homo sapien
catacaatatctaccattaaagaaattaccttg

SEQ ID NO: 569649 - DNA, 33 bp, Homo sapien
cttaagggctccatcacattgcatattaatgca

SEQ ID NO: 569650 - DNA, 33 bp, Homo sapien
cttaagggctccatcatattgcatattaatgca

SEQ ID NO: 569651 - DNA, 33 bp, Homo sapien
tcagacagcctgagtgaaaatcctgcctctgcc

SEQ ID NO: 569652 - DNA, 33 bp, Homo sapien
tcagacagcctgagtgcaaatcctgcctctgcc

SEQ ID NO: 569653 - DNA, 33 bp, Homo sapien
tttgattacaagagaacggctggaatggtggaa

SEQ ID NO: 569654 - DNA, 33 bp, Homo sapien
tttgattacaagagaatggctggaatggtggaa

SEQ ID NO: 569655 - DNA, 33 bp, Homo sapien
atctttattagccaaccgtgaacttagcaccag

SEQ ID NO: 569656 - DNA, 33 bp, Homo sapien
atctttattagccaactgtgaacttagcaccag

SEQ ID NO: 569657 - DNA, 33 bp, Homo sapien
ctgaggcttcatgcccaaagaatcaaatccaat

SEQ ID NO: 569658 - DNA, 33 bp, Homo sapien
ctgaggcttcatgcccgaagaatcaaatccaat

SEQ ID NO: 569659 - DNA, 33 bp, Homo sapien
caatttatgggaaataccaacataaaactaatt

SEQ ID NO: 569660 - DNA, 33 bp, Homo sapien
caatttatgggaaatagcaacataaaactaatt

SEQ ID NO: 569661 - DNA, 33 bp, Homo sapien
taattggaatcagttcaccaataaatgttataa

SEQ ID NO: 569662 - DNA, 33 bp, Homo sapien
taattggaatcagttcgccaataaatgttataa

SEQ ID NO: 569663 - DNA, 33 bp, Homo sapien
tagttgctcaaggtggcataaagaaaagagatg

SEQ ID NO: 569664 - DNA, 33 bp, Homo sapien
tagttgctcaaggtggtataaagaaaagagatg

SEQ ID NO: 569665 - DNA, 33 bp, Homo sapien
gcctggtgttgacttcaaacctcctggttgaag

SEQ ID NO: 569666 - DNA, 33 bp, Homo sapien
gcctggtgttgacttcgaacctcctggttgaag

SEQ ID NO: 569667 - DNA, 33 bp, Homo sapien
ttgttttctggaagtcaaagtctccaaaagttg

SEQ ID NO: 569668 - DNA, 33 bp, Homo sapien
ttgttttctggaagtcgaagtctccaaaagttg

SEQ ID NO: 569669 - DNA, 33 bp, Homo sapien
accaaaaaaaaggtcaactcaatcagctattta

SEQ ID NO: 569670 - DNA, 33 bp, Homo sapien
accaaaaaaaaggtcagctcaatcagctattta

SEQ ID NO: 569671 - DNA, 33 bp, Homo sapien
ccaaatcaaaatctacaaagaattggacagtgg

SEQ ID NO: 569672 - DNA, 33 bp, Homo sapien
ccaaatcaaaatctacgaagaattggacagtgg

SEQ ID NO: 569673 - DNA, 33 bp, Homo sapien
tgtggcaagtcctcaacgatcaagaaccagaaa

SEQ ID NO: 569674 - DNA, 33 bp, Homo sapien
tgtggcaagtcctcaatgatcaagaaccagaaa

SEQ ID NO: 569675 - DNA, 33 bp, Homo sapien
tggtgtgttggttactaaaaagtctgtttattt

SEQ ID NO: 569676 - DNA, 33 bp, Homo sapien
tggtgtgttggttactgaaaagtctgtttattt

SEQ ID NO: 569677 - DNA, 33 bp, Homo sapien
ggacttctattcaggagtaaaagaaaataagtc

SEQ ID NO: 569678 - DNA, 33 bp, Homo sapien
ggacttctattcaggattaaaagaaaataagtc

SEQ ID NO: 569679 - DNA, 33 bp, Homo sapien
atcttcagagttgttacgaagagctgtaaagaa

SEQ ID NO: 569680 - DNA, 33 bp, Homo sapien
atcttcagagttgttatgaagagctgtaaagaa

SEQ ID NO: 569681 - DNA, 33 bp, Homo sapien
tcagataattgtggaaagtttcttacttagatt

SEQ ID NO: 569682 - DNA, 33 bp, Homo sapien
tcagataattgtggaaggtttcttacttagatt

SEQ ID NO: 569683 - DNA, 33 bp, Homo sapien
cttcctatcatgaaaaaatctcagcttaggtga

SEQ ID NO: 569684 - DNA, 33 bp, Homo sapien
cttcctatcatgaaaacatctcagcttaggtga

SEQ ID NO: 569685 - DNA, 33 bp, Homo sapien
cacaagaacctgcccccgaagtcatgtcactct

SEQ ID NO: 569686 - DNA, 33 bp, Homo sapien
cacaagaacctgcccctgaagtcatgtcactct

SEQ ID NO: 569687 - DNA, 33 bp, Homo sapien
caaccaatcctcagacacataaatccaagaatg

SEQ ID NO: 569688 - DNA, 33 bp, Homo sapien
caaccaatcctcagacgcataaatccaagaatg

SEQ ID NO: 569689 - DNA, 33 bp, Homo sapien
tttacatttgaggacactgaatcttagagaagt

SEQ ID NO: 569690 - DNA, 33 bp, Homo sapien
tttacatttgaggacattgaatcttagagaagt

SEQ ID NO: 569691 - DNA, 33 bp, Homo sapien
ccagaagaggataaaactgtgagccatgagcag

SEQ ID NO: 569692 - DNA, 33 bp, Homo sapien
ccagaagaggataaaagtgtgagccatgagcag

SEQ ID NO: 569693 - DNA, 33 bp, Homo sapien
aagggagtgacatgagaacacttatttcaaaat

SEQ ID NO: 569694 - DNA, 33 bp, Homo sapien
aagggagtgacatgagtacacttatttcaaaat

SEQ ID NO: 569695 - DNA, 33 bp, Homo sapien
atcctgggggaagaaacagatgatgcagaccat

SEQ ID NO: 569696 - DNA, 33 bp, Homo sapien
atcctgggggaagaaagagatgatgcagaccat

SEQ ID NO: 569697 - DNA, 33 bp, Homo sapien
catatgagtgtgtatacattggaatagaatgaa

SEQ ID NO: 569698 - DNA, 33 bp, Homo sapien
catatgagtgtgtatatattggaatagaatgaa

SEQ ID NO: 569699 - DNA, 33 bp, Homo sapien
gtcagttcacaggctacggaactgtcaagacca

SEQ ID NO: 569700 - DNA, 33 bp, Homo sapien
gtcagttcacaggctatggaactgtcaagacca

SEQ ID NO: 569701 - DNA, 33 bp, Homo sapien
tatcagaaatttagacaaactcctaactgctcc

SEQ ID NO: 569702 - DNA, 33 bp, Homo sapien
tatcagaaatttagaccaactcctaactgctcc

SEQ ID NO: 569703 - DNA, 33 bp, Homo sapien
tataggtcaatcagaagtatgaacgttcatgga

SEQ ID NO: 569704 - DNA, 33 bp, Homo sapien
tataggtcaatcagaattatgaacgttcatgga

SEQ ID NO: 569705 - DNA, 33 bp, Homo sapien
aaatcctcccaatctacgaagtttgagaatctt

SEQ ID NO: 569706 - DNA, 33 bp, Homo sapien
aaatcctcccaatctatgaagtttgagaatctt

SEQ ID NO: 569707 - DNA, 33 bp, Homo sapien
atgtctgaatatgtcaaatagcctaagaatata

SEQ ID NO: 569708 - DNA, 33 bp, Homo sapien
atgtctgaatatgtcagatagcctaagaatata

SEQ ID NO: 569709 - DNA, 33 bp, Homo sapien
ttatcaggcaacgtcacatcaatgtatggtttt

SEQ ID NO: 569710 - DNA, 33 bp, Homo sapien
ttatcaggcaacgtcatatcaatgtatggtttt

SEQ ID NO: 569711 - DNA, 33 bp, Homo sapien
atataattttacccaaagttttcagtgactatg

SEQ ID NO: 569712 - DNA, 33 bp, Homo sapien
atataattttacccaacgttttcagtgactatg

SEQ ID NO: 569713 - DNA, 33 bp, Homo sapien
gctgagcttgtaagctaacataccttgtgggag

SEQ ID NO: 569714 - DNA, 33 bp, Homo sapien
gctgagcttgtaagctgacataccttgtgggag

SEQ ID NO: 569715 - DNA, 33 bp, Homo sapien
gagtactcaaaatcacagagccaagaactgatg

SEQ ID NO: 569716 - DNA, 33 bp, Homo sapien
gagtactcaaaatcacggagccaagaactgatg

SEQ ID NO: 569717 - DNA, 33 bp, Homo sapien
aacagtcagaggacgaaactgcatggaaatatt

SEQ ID NO: 569718 - DNA, 33 bp, Homo sapien
aacagtcagaggacgagactgcatggaaatatt

SEQ ID NO: 569719 - DNA, 33 bp, Homo sapien
cagtggagaccactaacgcttcaactgggcagg

SEQ ID NO: 569720 - DNA, 33 bp, Homo sapien
cagtggagaccactaatgcttcaactgggcagg

SEQ ID NO: 569721 - DNA, 33 bp, Homo sapien
tgatgtgtttctgtctcacgggactgaaacctt

SEQ ID NO: 569722 - DNA, 33 bp, Homo sapien
tgatgtgtttctgtcttacgggactgaaacctt

SEQ ID NO: 569723 - DNA, 33 bp, Homo sapien
tttgaacggtagaataaccagctggtgttcaga

SEQ ID NO: 569724 - DNA, 33 bp, Homo sapien
tttgaacggtagaatacccagctggtgttcaga

SEQ ID NO: 569725 - DNA, 33 bp, Homo sapien
ttccagaggcactctacggtctttccactttta

SEQ ID NO: 569726 - DNA, 33 bp, Homo sapien
ttccagaggcactctatggtctttccactttta

SEQ ID NO: 569727 - DNA, 33 bp, Homo sapien
cttcaagctgatatggcaataaatgtagagcaa

SEQ ID NO: 569728 - DNA, 33 bp, Homo sapien
cttcaagctgatatggtaataaatgtagagcaa

SEQ ID NO: 569729 - DNA, 33 bp, Homo sapien
ctttgatttgggtctcaaatggtaacagaaagt

SEQ ID NO: 569730 - DNA, 33 bp, Homo sapien
ctttgatttgggtctcgaatggtaacagaaagt

SEQ ID NO: 569731 - DNA, 33 bp, Homo sapien
ggaggcaagtgtcacaaatttcctgagaaggtg

SEQ ID NO: 569732 - DNA, 33 bp, Homo sapien
ggaggcaagtgtcacagatttcctgagaaggtg

SEQ ID NO: 569733 - DNA, 33 bp, Homo sapien
actgctaccaaaaacaacaacagagaaaagcat

SEQ ID NO: 569734 - DNA, 33 bp, Homo sapien
actgctaccaaaaacagcaacagagaaaagcat

SEQ ID NO: 569735 - DNA, 33 bp, Homo sapien
tgctctacatccaaacagagcctcccacagagc

SEQ ID NO: 569736 - DNA, 33 bp, Homo sapien
tgctctacatccaaacggagcctcccacagagc

SEQ ID NO: 569737 - DNA, 33 bp, Homo sapien
taaaaaatagtgtctactactgtcaagccaaag

SEQ ID NO: 569738 - DNA, 33 bp, Homo sapien
taaaaaatagtgtctattactgtcaagccaaag

SEQ ID NO: 569739 - DNA, 33 bp, Homo sapien
attttacctttcaaaactggtactcattgaagt

SEQ ID NO: 569740 - DNA, 33 bp, Homo sapien
attttacctttcaaaattggtactcattgaagt

SEQ ID NO: 569741 - DNA, 33 bp, Homo sapien
cacaaaagattcattcacccccaatctatgacc

SEQ ID NO: 569742 - DNA, 33 bp, Homo sapien
cacaaaagattcattcgcccccaatctatgacc

SEQ ID NO: 569743 - DNA, 33 bp, Homo sapien
aagaaaacaatcaaaagcttgggcaagaaatat

SEQ ID NO: 569744 - DNA, 33 bp, Homo sapien
aagaaaacaatcaaaatcttgggcaagaaatat

SEQ ID NO: 569745 - DNA, 33 bp, Homo sapien
gtgctgaaccttataacaataatgcattctcac

SEQ ID NO: 569746 - DNA, 33 bp, Homo sapien
gtgctgaaccttataataataatgcattctcac

SEQ ID NO: 569747 - DNA, 33 bp, Homo sapien
accatagattttcaaacgatgtcataagagtga

SEQ ID NO: 569748 - DNA, 33 bp, Homo sapien
accatagattttcaaatgatgtcataagagtga

SEQ ID NO: 569749 - DNA, 33 bp, Homo sapien
tgatctgatccccctaaaacaaactgcagggcc

SEQ ID NO: 569750 - DNA, 33 bp, Homo sapien
tgatctgatccccctacaacaaactgcagggcc

SEQ ID NO: 569751 - DNA, 33 bp, Homo sapien
aggtcatgaaaactcagtaaggagatgaaatga

SEQ ID NO: 569752 - DNA, 33 bp, Homo sapien
aggtcatgaaaactcattaaggagatgaaatga

SEQ ID NO: 569753 - DNA, 33 bp, Homo sapien
caacaatacctacctcacaaggctattgtgcag

SEQ ID NO: 569754 - DNA, 33 bp, Homo sapien
caacaatacctacctcgcaaggctattgtgcag

SEQ ID NO: 569755 - DNA, 33 bp, Homo sapien
atactttggtttcagcagagttagttgcatttt

SEQ ID NO: 569756 - DNA, 33 bp, Homo sapien
atactttggtttcagccgagttagttgcatttt

SEQ ID NO: 569757 - DNA, 33 bp, Homo sapien
cagcaaaatcaatgaacttcaaaacctcatgga

SEQ ID NO: 569758 - DNA, 33 bp, Homo sapien
cagcaaaatcaatgaatttcaaaacctcatgga

SEQ ID NO: 569759 - DNA, 33 bp, Homo sapien
gttccgaatgtagttaagttagcatttttccca

SEQ ID NO: 569760 - DNA, 33 bp, Homo sapien
gttccgaatgtagttaggttagcatttttccca

SEQ ID NO: 569761 - DNA, 33 bp, Homo sapien
acatctctctggatgacaccaatttagagccca

SEQ ID NO: 569762 - DNA, 33 bp, Homo sapien
acatctctctggatgataccaatttagagccca

SEQ ID NO: 569763 - DNA, 33 bp, Homo sapien
acctggggagatttcaaacaacctcctccaaat

SEQ ID NO: 569764 - DNA, 33 bp, Homo sapien
acctggggagatttcagacaacctcctccaaat

SEQ ID NO: 569765 - DNA, 33 bp, Homo sapien
agaaatcctgggtctaacacttctcccctttga

SEQ ID NO: 569766 - DNA, 33 bp, Homo sapien
agaaatcctgggtctatcacttctcccctttga

SEQ ID NO: 569767 - DNA, 33 bp, Homo sapien
ttagaatatggacccgaagaaacttgtaagcac

SEQ ID NO: 569768 - DNA, 33 bp, Homo sapien
ttagaatatggacccggagaaacttgtaagcac

SEQ ID NO: 569769 - DNA, 33 bp, Homo sapien
ctaaactagattcacaaatgagaaaacctctgc

SEQ ID NO: 569770 - DNA, 33 bp, Homo sapien
ctaaactagattcacagatgagaaaacctctgc

SEQ ID NO: 569771 - DNA, 33 bp, Homo sapien
acagataggtgtcaaaataaatatgtatcgtga

SEQ ID NO: 569772 - DNA, 33 bp, Homo sapien
acagataggtgtcaaagtaaatatgtatcgtga

SEQ ID NO: 569773 - DNA, 33 bp, Homo sapien
gctgatgatgttggaaaagcttatcgtgttatt

SEQ ID NO: 569774 - DNA, 33 bp, Homo sapien
gctgatgatgttggaagagcttatcgtgttatt

SEQ ID NO: 569775 - DNA, 33 bp, Homo sapien
ttctatattctcatgacgatgtgatgaccagag

SEQ ID NO: 569776 - DNA, 33 bp, Homo sapien
ttctatattctcatgatgatgtgatgaccagag

SEQ ID NO: 569777 - DNA, 33 bp, Homo sapien
ggtaatggtgccataactcttgaatctacccaa

SEQ ID NO: 569778 - DNA, 33 bp, Homo sapien
ggtaatggtgccataattcttgaatctacccaa

SEQ ID NO: 569779 - DNA, 33 bp, Homo sapien
tttgaactttgtataacgtagctgctagaaaag

SEQ ID NO: 569780 - DNA, 33 bp, Homo sapien
tttgaactttgtataatgtagctgctagaaaag

SEQ ID NO: 569781 - DNA, 33 bp, Homo sapien
cttgtgttagtttaaacaagaatctactcaaac

SEQ ID NO: 569782 - DNA, 33 bp, Homo sapien
cttgtgttagtttaaataagaatctactcaaac

SEQ ID NO: 569783 - DNA, 33 bp, Homo sapien
tttaaaaaatgtcaacacagccatggagttacc

SEQ ID NO: 569784 - DNA, 33 bp, Homo sapien
tttaaaaaatgtcaacgcagccatggagttacc

SEQ ID NO: 569785 - DNA, 33 bp, Homo sapien
tattcctctaggtatagggataagtagatgcag

SEQ ID NO: 569786 - DNA, 33 bp, Homo sapien
tattcctctaggtatatggataagtagatgcag

SEQ ID NO: 569787 - DNA, 33 bp, Homo sapien
ttttcttgctgtcttacaaatctttatgattca

SEQ ID NO: 569788 - DNA, 33 bp, Homo sapien
ttttcttgctgtcttagaaatctttatgattca

SEQ ID NO: 569789 - DNA, 33 bp, Homo sapien
gggggctgagagtgataaaggaggtagactaat

SEQ ID NO: 569790 - DNA, 33 bp, Homo sapien
gggggctgagagtgatgaaggaggtagactaat

SEQ ID NO: 569791 - DNA, 33 bp, Homo sapien
aatcctcatggcaaaacctgagtcacccaaaag

SEQ ID NO: 569792 - DNA, 33 bp, Homo sapien
aatcctcatggcaaaatctgagtcacccaaaag

SEQ ID NO: 569793 - DNA, 33 bp, Homo sapien
ggcaatgaagggtgaacgtgaagctaagaggca

SEQ ID NO: 569794 - DNA, 33 bp, Homo sapien
ggcaatgaagggtgaatgtgaagctaagaggca

SEQ ID NO: 569795 - DNA, 33 bp, Homo sapien
taggctttggagatgcaaggatagactggaggg

SEQ ID NO: 569796 - DNA, 33 bp, Homo sapien
taggctttggagatgctaggatagactggaggg

SEQ ID NO: 569797 - DNA, 33 bp, Homo sapien
ttaggttatcaggaaaagttttctacaagtgtt

SEQ ID NO: 569798 - DNA, 33 bp, Homo sapien
ttaggttatcaggaaaggttttctacaagtgtt

SEQ ID NO: 569799 - DNA, 33 bp, Homo sapien
tcttacctagcaaaaacgaggcatcatggaagt

SEQ ID NO: 569800 - DNA, 33 bp, Homo sapien
tcttacctagcaaaaatgaggcatcatggaagt

SEQ ID NO: 569801 - DNA, 33 bp, Homo sapien
taaatgaataaatgaacgtccatgtttgcttca

SEQ ID NO: 569802 - DNA, 33 bp, Homo sapien
taaatgaataaatgaatgtccatgtttgcttca

SEQ ID NO: 569803 - DNA, 33 bp, Homo sapien
cctacattgctagcaacaatagtctcttaaagc

SEQ ID NO: 569804 - DNA, 33 bp, Homo sapien
cctacattgctagcaagaatagtctcttaaagc

SEQ ID NO: 569805 - DNA, 33 bp, Homo sapien
aacagacctggttgaaaaaccccaactcctaca

SEQ ID NO: 569806 - DNA, 33 bp, Homo sapien
aacagacctggttgaataaccccaactcctaca

SEQ ID NO: 569807 - DNA, 33 bp, Homo sapien
agctcttgtgttttaacatttgggcacccaaca

SEQ ID NO: 569808 - DNA, 33 bp, Homo sapien
agctcttgtgttttaatatttgggcacccaaca

SEQ ID NO: 569809 - DNA, 33 bp, Homo sapien
ccaaagatgtgtcaaacttacctatctggtatt

SEQ ID NO: 569810 - DNA, 33 bp, Homo sapien
ccaaagatgtgtcaaatttacctatctggtatt

SEQ ID NO: 569811 - DNA, 33 bp, Homo sapien
acacattggacagagcaagaatgtcacactgtc

SEQ ID NO: 569812 - DNA, 33 bp, Homo sapien
acacattggacagagcgagaatgtcacactgtc

SEQ ID NO: 569813 - DNA, 33 bp, Homo sapien
tccaggtacacttccaactcttggtacactgca

SEQ ID NO: 569814 - DNA, 33 bp, Homo sapien
tccaggtacacttccagctcttggtacactgca

SEQ ID NO: 569815 - DNA, 33 bp, Homo sapien
gcatcagaaaggtttaactaacttgccaagatt

SEQ ID NO: 569816 - DNA, 33 bp, Homo sapien
gcatcagaaaggtttatctaacttgccaagatt

SEQ ID NO: 569817 - DNA, 33 bp, Homo sapien
tcacagagctcagcagaacaaaatcaggtgttt

SEQ ID NO: 569818 - DNA, 33 bp, Homo sapien
tcacagagctcagcaggacaaaatcaggtgttt

SEQ ID NO: 569819 - DNA, 33 bp, Homo sapien
atgaatttaaagaacccgaaggaccatcagcct

SEQ ID NO: 569820 - DNA, 33 bp, Homo sapien
atgaatttaaagaacctgaaggaccatcagcct

SEQ ID NO: 569821 - DNA, 33 bp, Homo sapien
tgttacctatctctgaacaacaattttcccatc

SEQ ID NO: 569822 - DNA, 33 bp, Homo sapien
tgttacctatctctgagcaacaattttcccatc

SEQ ID NO: 569823 - DNA, 33 bp, Homo sapien
gtgggatcaggctgaagtcaacttccacaggtc

SEQ ID NO: 569824 - DNA, 33 bp, Homo sapien
gtgggatcaggctgaattcaacttccacaggtc

SEQ ID NO: 569825 - DNA, 33 bp, Homo sapien
tcttgccagtgtgaataagaattaaaatgatat

SEQ ID NO: 569826 - DNA, 33 bp, Homo sapien
tcttgccagtgtgaatgagaattaaaatgatat

SEQ ID NO: 569827 - DNA, 33 bp, Homo sapien
gtgatctgaggaaacactgtgggggctctgaga

SEQ ID NO: 569828 - DNA, 33 bp, Homo sapien
gtgatctgaggaaacagtgtgggggctctgaga

SEQ ID NO: 569829 - DNA, 33 bp, Homo sapien
ccctgggattcttagaccctacttaaacctgtt

SEQ ID NO: 569830 - DNA, 33 bp, Homo sapien
ccctgggattcttagatcctacttaaacctgtt

SEQ ID NO: 569831 - DNA, 33 bp, Homo sapien
ttctattgctcagcacagtatttttgaagttta

SEQ ID NO: 569832 - DNA, 33 bp, Homo sapien
ttctattgctcagcacggtatttttgaagttta

SEQ ID NO: 569833 - DNA, 33 bp, Homo sapien
tagtgtgcagccttcgcatagttatgtgaacca

SEQ ID NO: 569834 - DNA, 33 bp, Homo sapien
tagtgtgcagccttcggatagttatgtgaacca

SEQ ID NO: 569835 - DNA, 33 bp, Homo sapien
ggcatcttagggaagacagagggctgaagagtt

SEQ ID NO: 569836 - DNA, 33 bp, Homo sapien
ggcatcttagggaagagagagggctgaagagtt

SEQ ID NO: 569837 - DNA, 33 bp, Homo sapien
caaaatatatctcaaaatgaaattacaagtata

SEQ ID NO: 569838 - DNA, 33 bp, Homo sapien
caaaatatatctcaaagtgaaattacaagtata

SEQ ID NO: 569839 - DNA, 33 bp, Homo sapien
tttccaaagatagccaatatgctgacttacagc

SEQ ID NO: 569840 - DNA, 33 bp, Homo sapien
tttccaaagatagccattatgctgacttacagc

SEQ ID NO: 569841 - DNA, 33 bp, Homo sapien
tacattcatatagtaaccacacaggatgaattg

SEQ ID NO: 569842 - DNA, 33 bp, Homo sapien
tacattcatatagtaatcacacaggatgaattg

SEQ ID NO: 569843 - DNA, 33 bp, Homo sapien
tttattgggcgaaggacctgtaaaggataaaag

SEQ ID NO: 569844 - DNA, 33 bp, Homo sapien
tttattgggcgaaggatctgtaaaggataaaag

SEQ ID NO: 569845 - DNA, 33 bp, Homo sapien
ctttacggagtgatggccagttaatccttgtca

SEQ ID NO: 569846 - DNA, 33 bp, Homo sapien
ctttacggagtgatggtcagttaatccttgtca

SEQ ID NO: 569847 - DNA, 33 bp, Homo sapien
aggagccactggggaacgattctggggaggcat

SEQ ID NO: 569848 - DNA, 33 bp, Homo sapien
aggagccactggggaatgattctggggaggcat

SEQ ID NO: 569849 - DNA, 33 bp, Homo sapien
gtgtgcttgtatggaaatgtgagtgggagaatt

SEQ ID NO: 569850 - DNA, 33 bp, Homo sapien
gtgtgcttgtatggaagtgtgagtgggagaatt

SEQ ID NO: 569851 - DNA, 33 bp, Homo sapien
ttgtgccggtaaggaaaacaagctcgaggagat

SEQ ID NO: 569852 - DNA, 33 bp, Homo sapien
ttgtgccggtaaggaagacaagctcgaggagat

SEQ ID NO: 569853 - DNA, 33 bp, Homo sapien
ggagtataacatttaccggatactctggaagat

SEQ ID NO: 569854 - DNA, 33 bp, Homo sapien
ggagtataacatttactggatactctggaagat

SEQ ID NO: 569855 - DNA, 33 bp, Homo sapien
tgtaaagaagatcaccaccctcaatgctcaatg

SEQ ID NO: 569856 - DNA, 33 bp, Homo sapien
tgtaaagaagatcaccgccctcaatgctcaatg

SEQ ID NO: 569857 - DNA, 33 bp, Homo sapien
atttgttaccgtaaaccaaactgtcttgtccac

SEQ ID NO: 569858 - DNA, 33 bp, Homo sapien
atttgttaccgtaaactaaactgtcttgtccac

SEQ ID NO: 569859 - DNA, 33 bp, Homo sapien
ggagagacatttttaactgaatcccagatgggc

SEQ ID NO: 569860 - DNA, 33 bp, Homo sapien
ggagagacatttttaattgaatcccagatgggc

SEQ ID NO: 569861 - DNA, 33 bp, Homo sapien
ctgggagaccatgttacaagaactgactgagat

SEQ ID NO: 569862 - DNA, 33 bp, Homo sapien
ctgggagaccatgttataagaactgactgagat

SEQ ID NO: 569863 - DNA, 33 bp, Homo sapien
gtgcctccctcactaaaccatcggctcagaact

SEQ ID NO: 569864 - DNA, 33 bp, Homo sapien
gtgcctccctcactaagccatcggctcagaact

SEQ ID NO: 569865 - DNA, 33 bp, Homo sapien
gaaatactaagcaattgaaagcaggtttccttc

SEQ ID NO: 569866 - DNA, 33 bp, Homo sapien
gaaatactaagcaatttaaagcaggtttccttc

SEQ ID NO: 569867 - DNA, 33 bp, Homo sapien
catgtatatgtattcactatacgccagggactc

SEQ ID NO: 569868 - DNA, 33 bp, Homo sapien
catgtatatgtattcattatacgccagggactc

SEQ ID NO: 569869 - DNA, 33 bp, Homo sapien
gtctcctcgagcctgtcaaagagacgaaggaga

SEQ ID NO: 569870 - DNA, 33 bp, Homo sapien
gtctcctcgagcctgtgaaagagacgaaggaga

SEQ ID NO: 569871 - DNA, 33 bp, Homo sapien
taaagcctttaacccactgatgatggaggttgc

SEQ ID NO: 569872 - DNA, 33 bp, Homo sapien
taaagcctttaacccattgatgatggaggttgc

SEQ ID NO: 569873 - DNA, 33 bp, Homo sapien
acattacttgtttccaagaggtgataataacag

SEQ ID NO: 569874 - DNA, 33 bp, Homo sapien
acattacttgtttccaggaggtgataataacag

SEQ ID NO: 569875 - DNA, 33 bp, Homo sapien
ataaataccatattgcactaaagaagacagaca

SEQ ID NO: 569876 - DNA, 33 bp, Homo sapien
ataaataccatattgcgctaaagaagacagaca

SEQ ID NO: 569877 - DNA, 33 bp, Homo sapien
gaaggatgaacttggacattttctaagtgcaat

SEQ ID NO: 569878 - DNA, 33 bp, Homo sapien
gaaggatgaacttggatattttctaagtgcaat

SEQ ID NO: 569879 - DNA, 33 bp, Homo sapien
ttttgattgaaaacacactgaaggattgtggac

SEQ ID NO: 569880 - DNA, 33 bp, Homo sapien
ttttgattgaaaacacgctgaaggattgtggac

SEQ ID NO: 569881 - DNA, 33 bp, Homo sapien
tacagaaaaataactggaagacctatatgagca

SEQ ID NO: 569882 - DNA, 33 bp, Homo sapien
tacagaaaaataactgtaagacctatatgagca

SEQ ID NO: 569883 - DNA, 33 bp, Homo sapien
agaaatttacctgagacgaggaaggtggaaagg

SEQ ID NO: 569884 - DNA, 33 bp, Homo sapien
agaaatttacctgagatgaggaaggtggaaagg

SEQ ID NO: 569885 - DNA, 33 bp, Homo sapien
atgggagaaagttcaagaaaatgcatagaaggt

SEQ ID NO: 569886 - DNA, 33 bp, Homo sapien
atgggagaaagttcaataaaatgcatagaaggt

SEQ ID NO: 569887 - DNA, 33 bp, Homo sapien
cctttcccttctacaaataagccactttgttca

SEQ ID NO: 569888 - DNA, 33 bp, Homo sapien
cctttcccttctacaagtaagccactttgttca

SEQ ID NO: 569889 - DNA, 33 bp, Homo sapien
ataaatattatgacccactggcttagtcctgtg

SEQ ID NO: 569890 - DNA, 33 bp, Homo sapien
ataaatattatgaccctctggcttagtcctgtg

SEQ ID NO: 569891 - DNA, 33 bp, Homo sapien
tattcattgattcaataactacctattgagttt

SEQ ID NO: 569892 - DNA, 33 bp, Homo sapien
tattcattgattcaattactacctattgagttt

SEQ ID NO: 569893 - DNA, 33 bp, Homo sapien
tgcatcctggctgatagagcagataggaaattt

SEQ ID NO: 569894 - DNA, 33 bp, Homo sapien
tgcatcctggctgatatagcagataggaaattt

SEQ ID NO: 569895 - DNA, 33 bp, Homo sapien
tccagcaaggtgagggacatatttagagaacca

SEQ ID NO: 569896 - DNA, 33 bp, Homo sapien
tccagcaaggtgagggtcatatttagagaacca

SEQ ID NO: 569897 - DNA, 33 bp, Homo sapien
ggctgactatcagccaactcacaggagggaaag

SEQ ID NO: 569898 - DNA, 33 bp, Homo sapien
ggctgactatcagccagctcacaggagggaaag

SEQ ID NO: 569899 - DNA, 33 bp, Homo sapien
atcatggtgaagaatacgtgaaattatgactat

SEQ ID NO: 569900 - DNA, 33 bp, Homo sapien
atcatggtgaagaatatgtgaaattatgactat

SEQ ID NO: 569901 - DNA, 33 bp, Homo sapien
gagcctcctagagaaaaagatgcccaggaagtt

SEQ ID NO: 569902 - DNA, 33 bp, Homo sapien
gagcctcctagagaaatagatgcccaggaagtt

SEQ ID NO: 569903 - DNA, 33 bp, Homo sapien
cttggcacttgatatcaccagactaagtcagat

SEQ ID NO: 569904 - DNA, 33 bp, Homo sapien
cttggcacttgatatctccagactaagtcagat

SEQ ID NO: 569905 - DNA, 33 bp, Homo sapien
caaactcacttctgcaccagtgctctggaggat

SEQ ID NO: 569906 - DNA, 33 bp, Homo sapien
caaactcacttctgcatcagtgctctggaggat

SEQ ID NO: 569907 - DNA, 33 bp, Homo sapien
ccccatcacagctccaaacatggtaccacaatt

SEQ ID NO: 569908 - DNA, 33 bp, Homo sapien
ccccatcacagctccagacatggtaccacaatt

SEQ ID NO: 569909 - DNA, 33 bp, Homo sapien
tggttgtccatatcccagcagagtctcccacat

SEQ ID NO: 569910 - DNA, 33 bp, Homo sapien
tggttgtccatatcccggcagagtctcccacat

SEQ ID NO: 569911 - DNA, 33 bp, Homo sapien
gaagcttgcaaggagcagacaactttgcatcta

SEQ ID NO: 569912 - DNA, 33 bp, Homo sapien
gaagcttgcaaggagctgacaactttgcatcta

SEQ ID NO: 569913 - DNA, 33 bp, Homo sapien
aatcagatcacagttcactcttcatttaaaacc

SEQ ID NO: 569914 - DNA, 33 bp, Homo sapien
aatcagatcacagttcgctcttcatttaaaacc

SEQ ID NO: 569915 - DNA, 33 bp, Homo sapien
aactctcaaatcttcaatagcctggccgctgcc

SEQ ID NO: 569916 - DNA, 33 bp, Homo sapien
aactctcaaatcttcagtagcctggccgctgcc

SEQ ID NO: 569917 - DNA, 33 bp, Homo sapien
aatgtgctgcccattaagacattttaaccaaca

SEQ ID NO: 569918 - DNA, 33 bp, Homo sapien
aatgtgctgcccattaggacattttaaccaaca

SEQ ID NO: 569919 - DNA, 33 bp, Homo sapien
tataagctgccatttcactgtccctatgggtga

SEQ ID NO: 569920 - DNA, 33 bp, Homo sapien
tataagctgccatttcgctgtccctatgggtga

SEQ ID NO: 569921 - DNA, 33 bp, Homo sapien
taagtaacgactttcaaatgtttccactggacc

SEQ ID NO: 569922 - DNA, 33 bp, Homo sapien
taagtaacgactttcagatgtttccactggacc

SEQ ID NO: 569923 - DNA, 33 bp, Homo sapien
agttttaatttgctgacggatgaggtgcatgag

SEQ ID NO: 569924 - DNA, 33 bp, Homo sapien
agttttaatttgctgatggatgaggtgcatgag

SEQ ID NO: 569925 - DNA, 33 bp, Homo sapien
ttctgcagatcaatttaaaaaaatccttgttct

SEQ ID NO: 569926 - DNA, 33 bp, Homo sapien
ttctgcagatcaattttaaaaaatccttgttct

SEQ ID NO: 569927 - DNA, 33 bp, Homo sapien
aaactctatggaattgaaagtttgaatgaagaa

SEQ ID NO: 569928 - DNA, 33 bp, Homo sapien
aaactctatggaattgcaagtttgaatgaagaa

SEQ ID NO: 569929 - DNA, 33 bp, Homo sapien
cacacgcagtgccctacaagttttgtcacccta

SEQ ID NO: 569930 - DNA, 33 bp, Homo sapien
cacacgcagtgccctagaagttttgtcacccta

SEQ ID NO: 569931 - DNA, 33 bp, Homo sapien
aataaagccagggtaggattccagactctacgc

SEQ ID NO: 569932 - DNA, 33 bp, Homo sapien
aataaagccagggtagtattccagactctacgc

SEQ ID NO: 569933 - DNA, 33 bp, Homo sapien
gtgggtgctgggcaccactaattacactgaatc

SEQ ID NO: 569934 - DNA, 33 bp, Homo sapien
gtgggtgctgggcaccgctaattacactgaatc

SEQ ID NO: 569935 - DNA, 33 bp, Homo sapien
aggcctggaggcctgacggaaggaagtgtgggt

SEQ ID NO: 569936 - DNA, 33 bp, Homo sapien
aggcctggaggcctgatggaaggaagtgtgggt

SEQ ID NO: 569937 - DNA, 33 bp, Homo sapien
agcaggccaaagagaaatgtgcatggaagaaca

SEQ ID NO: 569938 - DNA, 33 bp, Homo sapien
agcaggccaaagagaagtgtgcatggaagaaca

SEQ ID NO: 569939 - DNA, 33 bp, Homo sapien
cattttacgtgcattcgctcattcaaccctcac

SEQ ID NO: 569940 - DNA, 33 bp, Homo sapien
cattttacgtgcattctctcattcaaccctcac

SEQ ID NO: 569941 - DNA, 33 bp, Homo sapien
ctcactggcacattccaacatcacatgtccgca

SEQ ID NO: 569942 - DNA, 33 bp, Homo sapien
ctcactggcacattccgacatcacatgtccgca

SEQ ID NO: 569943 - DNA, 33 bp, Homo sapien
acaaccctcacagtcaaaggcactcacacgaat

SEQ ID NO: 569944 - DNA, 33 bp, Homo sapien
acaaccctcacagtcacaggcactcacacgaat

SEQ ID NO: 569945 - DNA, 33 bp, Homo sapien
aatattgcttcaatgaactcttctccttttcca

SEQ ID NO: 569946 - DNA, 33 bp, Homo sapien
aatattgcttcaatgagctcttctccttttcca

SEQ ID NO: 569947 - DNA, 33 bp, Homo sapien
ggtctgtctgctccaacggccaagatgtctctt

SEQ ID NO: 569948 - DNA, 33 bp, Homo sapien
ggtctgtctgctccaatggccaagatgtctctt

SEQ ID NO: 569949 - DNA, 33 bp, Homo sapien
ccccatgaggcgataagagcacctacttcctgg

SEQ ID NO: 569950 - DNA, 33 bp, Homo sapien
ccccatgaggcgataatagcacctacttcctgg

SEQ ID NO: 569951 - DNA, 33 bp, Homo sapien
gcctcttaggcctccaatgctttcaggttaaac

SEQ ID NO: 569952 - DNA, 33 bp, Homo sapien
gcctcttaggcctccagtgctttcaggttaaac

SEQ ID NO: 569953 - DNA, 33 bp, Homo sapien
gctttgggcgctaaaacaggctgaagacagctg

SEQ ID NO: 569954 - DNA, 33 bp, Homo sapien
gctttgggcgctaaaagaggctgaagacagctg

SEQ ID NO: 569955 - DNA, 33 bp, Homo sapien
tggaaattggtgtttgaattctgggtactggtc

SEQ ID NO: 569956 - DNA, 33 bp, Homo sapien
tggaaattggtgtttggattctgggtactggtc

SEQ ID NO: 569957 - DNA, 33 bp, Homo sapien
actttgctgattctcgcacaacccaaccataac

SEQ ID NO: 569958 - DNA, 33 bp, Homo sapien
actttgctgattctcgtacaacccaaccataac

SEQ ID NO: 569959 - DNA, 33 bp, Homo sapien
ttttacatcctgtgaagggaactatactactgc

SEQ ID NO: 569960 - DNA, 33 bp, Homo sapien
ttttacatcctgtgaatggaactatactactgc

SEQ ID NO: 569961 - DNA, 33 bp, Homo sapien
gcaaaattttgggtccaaggagcctactgaatc

SEQ ID NO: 569962 - DNA, 33 bp, Homo sapien
gcaaaattttgggtcccaggagcctactgaatc

SEQ ID NO: 569963 - DNA, 33 bp, Homo sapien
ggataacaacagcataacatctgtctttaccag

SEQ ID NO: 569964 - DNA, 33 bp, Homo sapien
ggataacaacagcatagcatctgtctttaccag

SEQ ID NO: 569965 - DNA, 33 bp, Homo sapien
tacagctgtaccttccagatgggaaagtgaggc

SEQ ID NO: 569966 - DNA, 33 bp, Homo sapien
tacagctgtaccttccggatgggaaagtgaggc

SEQ ID NO: 569967 - DNA, 33 bp, Homo sapien
ccagaggaggaattacacattttgttctgcagg

SEQ ID NO: 569968 - DNA, 33 bp, Homo sapien
ccagaggaggaattacgcattttgttctgcagg

SEQ ID NO: 569969 - DNA, 33 bp, Homo sapien
gactatttctttactgacacagcctcaaaacca

SEQ ID NO: 569970 - DNA, 33 bp, Homo sapien
gactatttctttactgtcacagcctcaaaacca

SEQ ID NO: 569971 - DNA, 33 bp, Homo sapien
taaatgggataatatacgtgaaaatgatcagtg

SEQ ID NO: 569972 - DNA, 33 bp, Homo sapien
taaatgggataatatatgtgaaaatgatcagtg

SEQ ID NO: 569973 - DNA, 33 bp, Homo sapien
gacttggggctcttgaatactgcctggtgggtg

SEQ ID NO: 569974 - DNA, 33 bp, Homo sapien
gacttggggctcttgagtactgcctggtgggtg

SEQ ID NO: 569975 - DNA, 33 bp, Homo sapien
tggactcacctgatgacggcttcttttattgtc

SEQ ID NO: 569976 - DNA, 33 bp, Homo sapien
tggactcacctgatgatggcttcttttattgtc

SEQ ID NO: 569977 - DNA, 33 bp, Homo sapien
acagagagatatggacaatcagcagtgctcaag

SEQ ID NO: 569978 - DNA, 33 bp, Homo sapien
acagagagatatggaccatcagcagtgctcaag

SEQ ID NO: 569979 - DNA, 33 bp, Homo sapien
agcgacttttataaaacgagaatgccttcattg

SEQ ID NO: 569980 - DNA, 33 bp, Homo sapien
agcgacttttataaaatgagaatgccttcattg

SEQ ID NO: 569981 - DNA, 33 bp, Homo sapien
tggacacctggagacacgtttgtggttcagtac

SEQ ID NO: 569982 - DNA, 33 bp, Homo sapien
tggacacctggagacaggtttgtggttcagtac

SEQ ID NO: 569983 - DNA, 33 bp, Homo sapien
acagactgccaggccacacaaccagatgagtct

SEQ ID NO: 569984 - DNA, 33 bp, Homo sapien
acagactgccaggccatacaaccagatgagtct

SEQ ID NO: 569985 - DNA, 33 bp, Homo sapien
tttttatgccaccaaactgaaacattgattatt

SEQ ID NO: 569986 - DNA, 33 bp, Homo sapien
tttttatgccaccaaattgaaacattgattatt

SEQ ID NO: 569987 - DNA, 33 bp, Homo sapien
tggactcaaaatccaaatcatatgttttcagag

SEQ ID NO: 569988 - DNA, 33 bp, Homo sapien
tggactcaaaatccaagtcatatgttttcagag

SEQ ID NO: 569989 - DNA, 33 bp, Homo sapien
tatgtaaaaaatgcagcatttcccacctttcag

SEQ ID NO: 569990 - DNA, 33 bp, Homo sapien
tatgtaaaaaatgcagtatttcccacctttcag

SEQ ID NO: 569991 - DNA, 33 bp, Homo sapien
tggctctgggagagaaacccacctgaatccagc

SEQ ID NO: 569992 - DNA, 33 bp, Homo sapien
tggctctgggagagaagcccacctgaatccagc

SEQ ID NO: 569993 - DNA, 33 bp, Homo sapien
atcaaagttgaggacacagaaatgggtaaatca

SEQ ID NO: 569994 - DNA, 33 bp, Homo sapien
atcaaagttgaggacagagaaatgggtaaatca

SEQ ID NO: 569995 - DNA, 33 bp, Homo sapien
atgggacgatgtctacagaattttgagaggaaa

SEQ ID NO: 569996 - DNA, 33 bp, Homo sapien
atgggacgatgtctacggaattttgagaggaaa

SEQ ID NO: 569997 - DNA, 33 bp, Homo sapien
ttcagtactttgcctgaataaatcttttaactc

SEQ ID NO: 569998 - DNA, 33 bp, Homo sapien
ttcagtactttgcctgcataaatcttttaactc

SEQ ID NO: 569999 - DNA, 33 bp, Homo sapien
cagagaaactgcagacagatgtactgttttcac

SEQ ID NO: 570000 - DNA, 33 bp, Homo sapien
cagagaaactgcagacggatgtactgttttcac

SEQ ID NO: 570001 - DNA, 33 bp, Homo sapien
atttgttctataacacagtaaagattgcaacat

SEQ ID NO: 570002 - DNA, 33 bp, Homo sapien
atttgttctataacacggtaaagattgcaacat

SEQ ID NO: 570003 - DNA, 33 bp, Homo sapien
agactagtttgacccactgaagaggcgctcaga

SEQ ID NO: 570004 - DNA, 33 bp, Homo sapien
agactagtttgacccagtgaagaggcgctcaga

SEQ ID NO: 570005 - DNA, 33 bp, Homo sapien
attctcttttttcctaactccaacttgaaatgg

SEQ ID NO: 570006 - DNA, 33 bp, Homo sapien
attctcttttttcctagctccaacttgaaatgg

SEQ ID NO: 570007 - DNA, 33 bp, Homo sapien
catttatcaataacacaaatgcagtatttccct

SEQ ID NO: 570008 - DNA, 33 bp, Homo sapien
catttatcaataacacgaatgcagtatttccct

SEQ ID NO: 570009 - DNA, 33 bp, Homo sapien
ctccatgccattcttcaagtgacactaatatag

SEQ ID NO: 570010 - DNA, 33 bp, Homo sapien
ctccatgccattcttcgagtgacactaatatag

SEQ ID NO: 570011 - DNA, 33 bp, Homo sapien
gcacacaaaatacgtacgaaatgcacatcatgg

SEQ ID NO: 570012 - DNA, 33 bp, Homo sapien
gcacacaaaatacgtatgaaatgcacatcatgg

SEQ ID NO: 570013 - DNA, 33 bp, Homo sapien
attgcaggcatttaacagccttcctaattaggc

SEQ ID NO: 570014 - DNA, 33 bp, Homo sapien
attgcaggcatttaacggccttcctaattaggc

SEQ ID NO: 570015 - DNA, 33 bp, Homo sapien
atctcgctcttttttacgataatgtaggctgat

SEQ ID NO: 570016 - DNA, 33 bp, Homo sapien
atctcgctcttttttatgataatgtaggctgat

SEQ ID NO: 570017 - DNA, 33 bp, Homo sapien
ggaggatcaggtaggaacatcaagctgacgagg

SEQ ID NO: 570018 - DNA, 33 bp, Homo sapien
ggaggatcaggtaggagcatcaagctgacgagg

SEQ ID NO: 570019 - DNA, 33 bp, Homo sapien
gtggtgacaaaggagacgggtaacagagcttgg

SEQ ID NO: 570020 - DNA, 33 bp, Homo sapien
gtggtgacaaaggagaggggtaacagagcttgg

SEQ ID NO: 570021 - DNA, 33 bp, Homo sapien
aataaagtgtcacagactcactcccagagagtc

SEQ ID NO: 570022 - DNA, 33 bp, Homo sapien
aataaagtgtcacagattcactcccagagagtc

SEQ ID NO: 570023 - DNA, 33 bp, Homo sapien
aggtggtaactttctcaaccatgcatccttgac

SEQ ID NO: 570024 - DNA, 33 bp, Homo sapien
aggtggtaactttctcgaccatgcatccttgac

SEQ ID NO: 570025 - DNA, 33 bp, Homo sapien
gtcgcttttggcaagaaagagctttgtcagtca

SEQ ID NO: 570026 - DNA, 33 bp, Homo sapien
gtcgcttttggcaagacagagctttgtcagtca

SEQ ID NO: 570027 - DNA, 33 bp, Homo sapien
ctctctctctcctttcacaagattaagctacga

SEQ ID NO: 570028 - DNA, 33 bp, Homo sapien
ctctctctctcctttcccaagattaagctacga

SEQ ID NO: 570029 - DNA, 33 bp, Homo sapien
gttttgctgtgggaaaccatttggactttatcc

SEQ ID NO: 570030 - DNA, 33 bp, Homo sapien
gttttgctgtgggaaagcatttggactttatcc

SEQ ID NO: 570031 - DNA, 33 bp, Homo sapien
tgtctcaactgagtcccgaagacaagtgagaga

SEQ ID NO: 570032 - DNA, 33 bp, Homo sapien
tgtctcaactgagtcctgaagacaagtgagaga

SEQ ID NO: 570033 - DNA, 33 bp, Homo sapien
ccaagttttcaaggcaataagagcttgatgtgg

SEQ ID NO: 570034 - DNA, 33 bp, Homo sapien
ccaagttttcaaggcagtaagagcttgatgtgg

SEQ ID NO: 570035 - DNA, 33 bp, Homo sapien
ttggattgcatcctagcagaacacagtagttaa

SEQ ID NO: 570036 - DNA, 33 bp, Homo sapien
ttggattgcatcctagtagaacacagtagttaa

SEQ ID NO: 570037 - DNA, 33 bp, Homo sapien
tccagaatatgttagccctgttacagtcctctc

SEQ ID NO: 570038 - DNA, 33 bp, Homo sapien
tccagaatatgttagctctgttacagtcctctc

SEQ ID NO: 570039 - DNA, 33 bp, Homo sapien
catcctggtctccacccacatggttctctgccc

SEQ ID NO: 570040 - DNA, 33 bp, Homo sapien
catcctggtctccacctacatggttctctgccc

SEQ ID NO: 570041 - DNA, 33 bp, Homo sapien
gggagatgaggcggaacaagaggagtcagggat

SEQ ID NO: 570042 - DNA, 33 bp, Homo sapien
gggagatgaggcggaagaagaggagtcagggat

SEQ ID NO: 570043 - DNA, 33 bp, Homo sapien
acagtaaatctataaaaaggaagaggttttcct

SEQ ID NO: 570044 - DNA, 33 bp, Homo sapien
acagtaaatctataaagaggaagaggttttcct

SEQ ID NO: 570045 - DNA, 33 bp, Homo sapien
gccagcccccaaaccaaccactcaatggaaagg

SEQ ID NO: 570046 - DNA, 33 bp, Homo sapien
gccagcccccaaaccacccactcaatggaaagg

SEQ ID NO: 570047 - DNA, 33 bp, Homo sapien
ttgcttgttaaagagaccatttgcctaaggtca

SEQ ID NO: 570048 - DNA, 33 bp, Homo sapien
ttgcttgttaaagagagcatttgcctaaggtca

SEQ ID NO: 570049 - DNA, 33 bp, Homo sapien
ttcttgaaagcatccactgaagaacaagaagga

SEQ ID NO: 570050 - DNA, 33 bp, Homo sapien
ttcttgaaagcatccattgaagaacaagaagga

SEQ ID NO: 570051 - DNA, 33 bp, Homo sapien
ggcttatgccctttaaaaaaatccctttgctgt

SEQ ID NO: 570052 - DNA, 33 bp, Homo sapien
ggcttatgccctttaagaaaatccctttgctgt

SEQ ID NO: 570053 - DNA, 33 bp, Homo sapien
accatcattgcctctacaaaaaaggaaatccta

SEQ ID NO: 570054 - DNA, 33 bp, Homo sapien
accatcattgcctctataaaaaaggaaatccta

SEQ ID NO: 570055 - DNA, 33 bp, Homo sapien
aattatctaggctttaaagatggaagagatgat

SEQ ID NO: 570056 - DNA, 33 bp, Homo sapien
aattatctaggctttagagatggaagagatgat

SEQ ID NO: 570057 - DNA, 33 bp, Homo sapien
gcctgggtctttttcacatttgtgtggactcct

SEQ ID NO: 570058 - DNA, 33 bp, Homo sapien
gcctgggtctttttcatatttgtgtggactcct

SEQ ID NO: 570059 - DNA, 33 bp, Homo sapien
ttccttcctcacttgaagccactggacattaag

SEQ ID NO: 570060 - DNA, 33 bp, Homo sapien
ttccttcctcacttgaggccactggacattaag

SEQ ID NO: 570061 - DNA, 33 bp, Homo sapien
tctttcctgtttaatccgaggactttgaataaa

SEQ ID NO: 570062 - DNA, 33 bp, Homo sapien
tctttcctgtttaatctgaggactttgaataaa

SEQ ID NO: 570063 - DNA, 33 bp, Homo sapien
gtataagggaacctaggaaggcatccttgagga

SEQ ID NO: 570064 - DNA, 33 bp, Homo sapien
gtataagggaacctagtaaggcatccttgagga

SEQ ID NO: 570065 - DNA, 33 bp, Homo sapien
atgctctggagagatgaaaacagaaccccaagt

SEQ ID NO: 570066 - DNA, 33 bp, Homo sapien
atgctctggagagatggaaacagaaccccaagt

SEQ ID NO: 570067 - DNA, 33 bp, Homo sapien
ttggaatttctgccaacgccgtggccactgttg

SEQ ID NO: 570068 - DNA, 33 bp, Homo sapien
ttggaatttctgccaatgccgtggccactgttg

SEQ ID NO: 570069 - DNA, 33 bp, Homo sapien
agtccgtttggccaaaaatcctgcaattcaata

SEQ ID NO: 570070 - DNA, 33 bp, Homo sapien
agtccgtttggccaaacatcctgcaattcaata

SEQ ID NO: 570071 - DNA, 33 bp, Homo sapien
caattttctccaattaactcaaaaaatgtctct

SEQ ID NO: 570072 - DNA, 33 bp, Homo sapien
caattttctccaattatctcaaaaaatgtctct

SEQ ID NO: 570073 - DNA, 33 bp, Homo sapien
ttgtccagcctctgtgccaagtcatatcctaag

SEQ ID NO: 570074 - DNA, 33 bp, Homo sapien
ttgtccagcctctgtgtcaagtcatatcctaag

SEQ ID NO: 570075 - DNA, 33 bp, Homo sapien
gaagaactaaaagacaacttgtgaggtgagagt

SEQ ID NO: 570076 - DNA, 33 bp, Homo sapien
gaagaactaaaagacagcttgtgaggtgagagt

SEQ ID NO: 570077 - DNA, 33 bp, Homo sapien
ctgtctcaatactgccaaccaacaacaaaatgg

SEQ ID NO: 570078 - DNA, 33 bp, Homo sapien
ctgtctcaatactgccgaccaacaacaaaatgg

SEQ ID NO: 570079 - DNA, 33 bp, Homo sapien
atatccccaggcaaggacaatgttaaaaacatt

SEQ ID NO: 570080 - DNA, 33 bp, Homo sapien
atatccccaggcaagggcaatgttaaaaacatt

SEQ ID NO: 570081 - DNA, 33 bp, Homo sapien
acaaaatttagaggaaatgttaagcatacacaa

SEQ ID NO: 570082 - DNA, 33 bp, Homo sapien
acaaaatttagaggaagtgttaagcatacacaa

SEQ ID NO: 570083 - DNA, 33 bp, Homo sapien
aaagtaaatgaccccaatgcttactggcttaaa

SEQ ID NO: 570084 - DNA, 33 bp, Homo sapien
aaagtaaatgaccccagtgcttactggcttaaa

SEQ ID NO: 570085 - DNA, 33 bp, Homo sapien
ctggtgaatagatcaacgaaatatggtatagcc

SEQ ID NO: 570086 - DNA, 33 bp, Homo sapien
ctggtgaatagatcaatgaaatatggtatagcc

SEQ ID NO: 570087 - DNA, 33 bp, Homo sapien
gacccttgctggcagacgctggcgcccagtggg

SEQ ID NO: 570088 - DNA, 33 bp, Homo sapien
gacccttgctggcagatgctggcgcccagtggg

SEQ ID NO: 570089 - DNA, 33 bp, Homo sapien
tgattctagtggacgacaaccaccagtctatgt

SEQ ID NO: 570090 - DNA, 33 bp, Homo sapien
tgattctagtggacgagaaccaccagtctatgt

SEQ ID NO: 570091 - DNA, 33 bp, Homo sapien
ttgaaagtatgatcagccaattgtgttttttgt

SEQ ID NO: 570092 - DNA, 33 bp, Homo sapien
ttgaaagtatgatcagtcaattgtgttttttgt

SEQ ID NO: 570093 - DNA, 33 bp, Homo sapien
acaggtgattctgatgaactctcaactatgaga

SEQ ID NO: 570094 - DNA, 33 bp, Homo sapien
acaggtgattctgatgtactctcaactatgaga

SEQ ID NO: 570095 - DNA, 33 bp, Homo sapien
acccttcgatttttcacgaggcaaaactccccg

SEQ ID NO: 570096 - DNA, 33 bp, Homo sapien
acccttcgatttttcatgaggcaaaactccccg

SEQ ID NO: 570097 - DNA, 33 bp, Homo sapien
catgctccataatcaccgattgaaggcaactcc

SEQ ID NO: 570098 - DNA, 33 bp, Homo sapien
catgctccataatcactgattgaaggcaactcc

SEQ ID NO: 570099 - DNA, 33 bp, Homo sapien
ccctgtgcctgctgcacgaaaagaggatgggct

SEQ ID NO: 570100 - DNA, 33 bp, Homo sapien
ccctgtgcctgctgcatgaaaagaggatgggct

SEQ ID NO: 570101 - DNA, 33 bp, Homo sapien
gcctgaaggcgtgggcagagttggagatgagag

SEQ ID NO: 570102 - DNA, 33 bp, Homo sapien
gcctgaaggcgtgggcggagttggagatgagag

SEQ ID NO: 570103 - DNA, 33 bp, Homo sapien
gcaatcagcacatagactaagtccttactgggg

SEQ ID NO: 570104 - DNA, 33 bp, Homo sapien
gcaatcagcacatagattaagtccttactgggg

SEQ ID NO: 570105 - DNA, 33 bp, Homo sapien
gagcccagttgaggtgacaatgggtagttactc

SEQ ID NO: 570106 - DNA, 33 bp, Homo sapien
gagcccagttgaggtggcaatgggtagttactc

SEQ ID NO: 570107 - DNA, 33 bp, Homo sapien
ccaggacttacccaggaaaagacgcacttattc

SEQ ID NO: 570108 - DNA, 33 bp, Homo sapien
ccaggacttacccaggcaaagacgcacttattc

SEQ ID NO: 570109 - DNA, 33 bp, Homo sapien
tgagacaagcagaggaacctcaaggccaagcct

SEQ ID NO: 570110 - DNA, 33 bp, Homo sapien
tgagacaagcagaggaccctcaaggccaagcct

SEQ ID NO: 570111 - DNA, 33 bp, Homo sapien
tcggtataactacttcagaaaactatttattag

SEQ ID NO: 570112 - DNA, 33 bp, Homo sapien
tcggtataactacttcggaaaactatttattag

SEQ ID NO: 570113 - DNA, 33 bp, Homo sapien
aaatctgaccaatgtgaatccctggctcactcc

SEQ ID NO: 570114 - DNA, 33 bp, Homo sapien
aaatctgaccaatgtggatccctggctcactcc

SEQ ID NO: 570115 - DNA, 33 bp, Homo sapien
tagcagatggtggaaccgacatttgattccaga

SEQ ID NO: 570116 - DNA, 33 bp, Homo sapien
tagcagatggtggaactgacatttgattccaga

SEQ ID NO: 570117 - DNA, 33 bp, Homo sapien
cagtggagaggactctaacctgggaggaaggaa

SEQ ID NO: 570118 - DNA, 33 bp, Homo sapien
cagtggagaggactctgacctgggaggaaggaa

SEQ ID NO: 570119 - DNA, 33 bp, Homo sapien
tctccccatcactacactagggactttgtaagc

SEQ ID NO: 570120 - DNA, 33 bp, Homo sapien
tctccccatcactacattagggactttgtaagc

SEQ ID NO: 570121 - DNA, 33 bp, Homo sapien
ctcagaaccccagatactaatgttgactccacc

SEQ ID NO: 570122 - DNA, 33 bp, Homo sapien
ctcagaaccccagatattaatgttgactccacc

SEQ ID NO: 570123 - DNA, 33 bp, Homo sapien
aacagcagttaagaataataggcaatacaccat

SEQ ID NO: 570124 - DNA, 33 bp, Homo sapien
aacagcagttaagaatcataggcaatacaccat

SEQ ID NO: 570125 - DNA, 33 bp, Homo sapien
ggtgccaaaaggatgacaaaagccttgtgagtg

SEQ ID NO: 570126 - DNA, 33 bp, Homo sapien
ggtgccaaaaggatgagaaaagccttgtgagtg

SEQ ID NO: 570127 - DNA, 33 bp, Homo sapien
gccttgtgagtgcccaagaatcaagtagagatt

SEQ ID NO: 570128 - DNA, 33 bp, Homo sapien
gccttgtgagtgcccaggaatcaagtagagatt

SEQ ID NO: 570129 - DNA, 33 bp, Homo sapien
tcctagatatttttcacactgggagagaagtga

SEQ ID NO: 570130 - DNA, 33 bp, Homo sapien
tcctagatatttttcatactgggagagaagtga

SEQ ID NO: 570131 - DNA, 33 bp, Homo sapien
aaaaatgtggtgcctaataagttttcaaaatta

SEQ ID NO: 570132 - DNA, 33 bp, Homo sapien
aaaaatgtggtgcctagtaagttttcaaaatta

SEQ ID NO: 570133 - DNA, 33 bp, Homo sapien
tggggacctggcttaaaatcaattttgaaattt

SEQ ID NO: 570134 - DNA, 33 bp, Homo sapien
tggggacctggcttaacatcaattttgaaattt

SEQ ID NO: 570135 - DNA, 33 bp, Homo sapien
attcaactactgagatcaaatttaccagaataa

SEQ ID NO: 570136 - DNA, 33 bp, Homo sapien
attcaactactgagattaaatttaccagaataa

SEQ ID NO: 570137 - DNA, 33 bp, Homo sapien
tcgaggcttacatgtacctctttccccagattc

SEQ ID NO: 570138 - DNA, 33 bp, Homo sapien
tcgaggcttacatgtatctctttccccagattc

SEQ ID NO: 570139 - DNA, 33 bp, Homo sapien
tgatgaaaaaactcaaatgattgacagatttaa

SEQ ID NO: 570140 - DNA, 33 bp, Homo sapien
tgatgaaaaaactcaagtgattgacagatttaa

SEQ ID NO: 570141 - DNA, 33 bp, Homo sapien
taagatatagttaaatcatatgctgagtttgct

SEQ ID NO: 570142 - DNA, 33 bp, Homo sapien
taagatatagttaaattatatgctgagtttgct

SEQ ID NO: 570143 - DNA, 33 bp, Homo sapien
cttgcttttagggaaacgaaaacaggcaatgac

SEQ ID NO: 570144 - DNA, 33 bp, Homo sapien
cttgcttttagggaaatgaaaacaggcaatgac

SEQ ID NO: 570145 - DNA, 33 bp, Homo sapien
gacgagctgaccttcaccaagagcgccatcatc

SEQ ID NO: 570146 - DNA, 33 bp, Homo sapien
gacgagctgaccttcatcaagagcgccatcatc

SEQ ID NO: 570147 - DNA, 33 bp, Homo sapien
aaggataaggtccagaccatactcactcactct

SEQ ID NO: 570148 - DNA, 33 bp, Homo sapien
aaggataaggtccagagcatactcactcactct

SEQ ID NO: 570149 - DNA, 33 bp, Homo sapien
ggcacataggtcagcacattaggcttaacaaca

SEQ ID NO: 570150 - DNA, 33 bp, Homo sapien
ggcacataggtcagcatattaggcttaacaaca

SEQ ID NO: 570151 - DNA, 33 bp, Homo sapien
caaagaaacttaccaactcttgtatttcatgtc

SEQ ID NO: 570152 - DNA, 33 bp, Homo sapien
caaagaaacttaccaattcttgtatttcatgtc

SEQ ID NO: 570153 - DNA, 33 bp, Homo sapien
aaagaagaaacaagaaagcactcccagggtctc

SEQ ID NO: 570154 - DNA, 33 bp, Homo sapien
aaagaagaaacaagaaggcactcccagggtctc

SEQ ID NO: 570155 - DNA, 33 bp, Homo sapien
tgtttgcccagttcaacttcatgcaacgtacct

SEQ ID NO: 570156 - DNA, 33 bp, Homo sapien
tgtttgcccagttcaatttcatgcaacgtacct

SEQ ID NO: 570157 - DNA, 33 bp, Homo sapien
accagtaagagtgtaccaagtcaagggatggga

SEQ ID NO: 570158 - DNA, 33 bp, Homo sapien
accagtaagagtgtacgaagtcaagggatggga

SEQ ID NO: 570159 - DNA, 33 bp, Homo sapien
ttccatgagagggataaaacagaatggcaagca

SEQ ID NO: 570160 - DNA, 33 bp, Homo sapien
ttccatgagagggatacaacagaatggcaagca

SEQ ID NO: 570161 - DNA, 33 bp, Homo sapien
ttcctctggaatctgaatatttagccttaaaaa

SEQ ID NO: 570162 - DNA, 33 bp, Homo sapien
ttcctctggaatctgagtatttagccttaaaaa

SEQ ID NO: 570163 - DNA, 33 bp, Homo sapien
gagggagttctctcacaatacctgattatttaa

SEQ ID NO: 570164 - DNA, 33 bp, Homo sapien
gagggagttctctcacgatacctgattatttaa

SEQ ID NO: 570165 - DNA, 33 bp, Homo sapien
ccttagaatagaatctgaatgccttgctatgcc

SEQ ID NO: 570166 - DNA, 33 bp, Homo sapien
ccttagaatagaatcttaatgccttgctatgcc

SEQ ID NO: 570167 - DNA, 33 bp, Homo sapien
ttaacatacatcctcacatgattttcatgaaca

SEQ ID NO: 570168 - DNA, 33 bp, Homo sapien
ttaacatacatcctcatatgattttcatgaaca

SEQ ID NO: 570169 - DNA, 33 bp, Homo sapien
atgtgcagacctagtaaattactgtatgccact

SEQ ID NO: 570170 - DNA, 33 bp, Homo sapien
atgtgcagacctagtatattactgtatgccact

SEQ ID NO: 570171 - DNA, 33 bp, Homo sapien
agtcaatttcaaattgaatcggggcaccaggaa

SEQ ID NO: 570172 - DNA, 33 bp, Homo sapien
agtcaatttcaaattggatcggggcaccaggaa

SEQ ID NO: 570173 - DNA, 33 bp, Homo sapien
attttgtgctcagttacgtttaggaccttcaca

SEQ ID NO: 570174 - DNA, 33 bp, Homo sapien
attttgtgctcagttatgtttaggaccttcaca

SEQ ID NO: 570175 - DNA, 33 bp, Homo sapien
cgttttgtctaatgcaatcaagactagtggttc

SEQ ID NO: 570176 - DNA, 33 bp, Homo sapien
cgttttgtctaatgcagtcaagactagtggttc

SEQ ID NO: 570177 - DNA, 33 bp, Homo sapien
gccttgctgcacagaacttccaaatgtggctct

SEQ ID NO: 570178 - DNA, 33 bp, Homo sapien
gccttgctgcacagaatttccaaatgtggctct

SEQ ID NO: 570179 - DNA, 33 bp, Homo sapien
acctccacagaccactcagagaaaagcctccta

SEQ ID NO: 570180 - DNA, 33 bp, Homo sapien
acctccacagaccactgagagaaaagcctccta

SEQ ID NO: 570181 - DNA, 33 bp, Homo sapien
catgctagatacatcaacatagacctagtaaat

SEQ ID NO: 570182 - DNA, 33 bp, Homo sapien
catgctagatacatcatcatagacctagtaaat

SEQ ID NO: 570183 - DNA, 33 bp, Homo sapien
agggaggtgggtgccactgccagacttcagagt

SEQ ID NO: 570184 - DNA, 33 bp, Homo sapien
agggaggtgggtgccattgccagacttcagagt

SEQ ID NO: 570185 - DNA, 33 bp, Homo sapien
atgaatattcgacaagccctcagtagggtgccc

SEQ ID NO: 570186 - DNA, 33 bp, Homo sapien
atgaatattcgacaagtcctcagtagggtgccc

SEQ ID NO: 570187 - DNA, 33 bp, Homo sapien
aggaactgagaaagaaactgcctaagcagcact

SEQ ID NO: 570188 - DNA, 33 bp, Homo sapien
aggaactgagaaagaacctgcctaagcagcact

SEQ ID NO: 570189 - DNA, 33 bp, Homo sapien
acaagttcaatcacaccctggctgagcctattc

SEQ ID NO: 570190 - DNA, 33 bp, Homo sapien
acaagttcaatcacactctggctgagcctattc

SEQ ID NO: 570191 - DNA, 33 bp, Homo sapien
tctccagctgcacgaaaggttcccagtacaagg

SEQ ID NO: 570192 - DNA, 33 bp, Homo sapien
tctccagctgcacgaagggttcccagtacaagg

SEQ ID NO: 570193 - DNA, 33 bp, Homo sapien
caggtacagtcaggccagagagctgcacaagta

SEQ ID NO: 570194 - DNA, 33 bp, Homo sapien
caggtacagtcaggccggagagctgcacaagta

SEQ ID NO: 570195 - DNA, 33 bp, Homo sapien
ttattctgctttaggacattcccttcaagtcat

SEQ ID NO: 570196 - DNA, 33 bp, Homo sapien
ttattctgctttaggatattcccttcaagtcat

SEQ ID NO: 570197 - DNA, 33 bp, Homo sapien
agggaaagaaacaagacgccatgatagggaaca

SEQ ID NO: 570198 - DNA, 33 bp, Homo sapien
agggaaagaaacaagatgccatgatagggaaca

SEQ ID NO: 570199 - DNA, 33 bp, Homo sapien
tccttgcaatgctaagactctaccaatctacta

SEQ ID NO: 570200 - DNA, 33 bp, Homo sapien
tccttgcaatgctaaggctctaccaatctacta

SEQ ID NO: 570201 - DNA, 33 bp, Homo sapien
ttttctgttattcacactgggtactttccattt

SEQ ID NO: 570202 - DNA, 33 bp, Homo sapien
ttttctgttattcacattgggtactttccattt

SEQ ID NO: 570203 - DNA, 33 bp, Homo sapien
cattatatagtcagtacctagcaaagggcctga

SEQ ID NO: 570204 - DNA, 33 bp, Homo sapien
cattatatagtcagtatctagcaaagggcctga

SEQ ID NO: 570205 - DNA, 33 bp, Homo sapien
taccttcagatgtccaatatatcaatggccttt

SEQ ID NO: 570206 - DNA, 33 bp, Homo sapien
taccttcagatgtccagtatatcaatggccttt

SEQ ID NO: 570207 - DNA, 33 bp, Homo sapien
acatgggcctctttaaacacaggcaagtttggc

SEQ ID NO: 570208 - DNA, 33 bp, Homo sapien
acatgggcctctttaagcacaggcaagtttggc

SEQ ID NO: 570209 - DNA, 33 bp, Homo sapien
ccaggtaaagcaaatgaaacttaacatatcaac

SEQ ID NO: 570210 - DNA, 33 bp, Homo sapien
ccaggtaaagcaaatggaacttaacatatcaac

SEQ ID NO: 570211 - DNA, 33 bp, Homo sapien
ggacacatttgggatacaaccatgccccgtctc

SEQ ID NO: 570212 - DNA, 33 bp, Homo sapien
ggacacatttgggatagaaccatgccccgtctc

SEQ ID NO: 570213 - DNA, 33 bp, Homo sapien
atatacacctaaccataagttcatactgatacc

SEQ ID NO: 570214 - DNA, 33 bp, Homo sapien
atatacacctaaccatgagttcatactgatacc

SEQ ID NO: 570215 - DNA, 33 bp, Homo sapien
tctaggtagagatgaaagaattgagaaatgtag

SEQ ID NO: 570216 - DNA, 33 bp, Homo sapien
tctaggtagagatgaaggaattgagaaatgtag

SEQ ID NO: 570217 - DNA, 33 bp, Homo sapien
ctgactcaacacactaataaagttcacactatc

SEQ ID NO: 570218 - DNA, 33 bp, Homo sapien
ctgactcaacacactagtaaagttcacactatc

SEQ ID NO: 570219 - DNA, 33 bp, Homo sapien
tataaatcagtcacctcagatgactttgccttc

SEQ ID NO: 570220 - DNA, 33 bp, Homo sapien
tataaatcagtcaccttagatgactttgccttc

SEQ ID NO: 570221 - DNA, 33 bp, Homo sapien
caaagaaaaccagtgaactcaaagaaaaccagt

SEQ ID NO: 570222 - DNA, 33 bp, Homo sapien
caaagaaaaccagtgatctcaaagaaaaccagt

SEQ ID NO: 570223 - DNA, 33 bp, Homo sapien
catgtgtcatgtacaggaaacgagttaacccag

SEQ ID NO: 570224 - DNA, 33 bp, Homo sapien
catgtgtcatgtacagtaaacgagttaacccag

SEQ ID NO: 570225 - DNA, 33 bp, Homo sapien
aatcgtctacatatcaagaattagagcattagt

SEQ ID NO: 570226 - DNA, 33 bp, Homo sapien
aatcgtctacatatcaggaattagagcattagt

SEQ ID NO: 570227 - DNA, 33 bp, Homo sapien
cagaagtaataggaaacgtgtgagaaaagaacc

SEQ ID NO: 570228 - DNA, 33 bp, Homo sapien
cagaagtaataggaaatgtgtgagaaaagaacc

SEQ ID NO: 570229 - DNA, 33 bp, Homo sapien
taccacaatcaggcccaagcaagtgtgagtcag

SEQ ID NO: 570230 - DNA, 33 bp, Homo sapien
taccacaatcaggcccgagcaagtgtgagtcag

SEQ ID NO: 570231 - DNA, 33 bp, Homo sapien
gtcaaaatgacaaataagttagcttgaagagct

SEQ ID NO: 570232 - DNA, 33 bp, Homo sapien
gtcaaaatgacaaatacgttagcttgaagagct

SEQ ID NO: 570233 - DNA, 33 bp, Homo sapien
agtaattgaggacagtaaagaattataagtcac

SEQ ID NO: 570234 - DNA, 33 bp, Homo sapien
agtaattgaggacagtgaagaattataagtcac

SEQ ID NO: 570235 - DNA, 33 bp, Homo sapien
gaaaacaataggaatccataccaatgagacata

SEQ ID NO: 570236 - DNA, 33 bp, Homo sapien
gaaaacaataggaatctataccaatgagacata

SEQ ID NO: 570237 - DNA, 33 bp, Homo sapien
tgacaagtgttcaagaaacaggcaaaaatataa

SEQ ID NO: 570238 - DNA, 33 bp, Homo sapien
tgacaagtgttcaagacacaggcaaaaatataa

SEQ ID NO: 570239 - DNA, 33 bp, Homo sapien
cacctgactgtaaaaccgacttttctctccata

SEQ ID NO: 570240 - DNA, 33 bp, Homo sapien
cacctgactgtaaaactgacttttctctccata

SEQ ID NO: 570241 - DNA, 33 bp, Homo sapien
ttacaacttcacaacaaagctaaggttggtgat

SEQ ID NO: 570242 - DNA, 33 bp, Homo sapien
ttacaacttcacaacacagctaaggttggtgat

SEQ ID NO: 570243 - DNA, 33 bp, Homo sapien
acacccacattgttaccgactatcaccaacctt

SEQ ID NO: 570244 - DNA, 33 bp, Homo sapien
acacccacattgttactgactatcaccaacctt

SEQ ID NO: 570245 - DNA, 33 bp, Homo sapien
tggcagtgttaggtgccctgcttgtttttattc

SEQ ID NO: 570246 - DNA, 33 bp, Homo sapien
tggcagtgttaggtgcgctgcttgtttttattc

SEQ ID NO: 570247 - DNA, 33 bp, Homo sapien
ctgccacacataggccagacctgatggcgcatc

SEQ ID NO: 570248 - DNA, 33 bp, Homo sapien
ctgccacacataggccggacctgatggcgcatc

SEQ ID NO: 570249 - DNA, 33 bp, Homo sapien
gtggtctccctttccaaaaacttaacagctgtc

SEQ ID NO: 570250 - DNA, 33 bp, Homo sapien
gtggtctccctttccagaaacttaacagctgtc

SEQ ID NO: 570251 - DNA, 33 bp, Homo sapien
aagttgctgcttaaagacttggtaagaagaatg

SEQ ID NO: 570252 - DNA, 33 bp, Homo sapien
aagttgctgcttaaagtcttggtaagaagaatg

SEQ ID NO: 570253 - DNA, 33 bp, Homo sapien
ttcagcagtagttgacagggagcgaaagctcag

SEQ ID NO: 570254 - DNA, 33 bp, Homo sapien
ttcagcagtagttgacggggagcgaaagctcag

SEQ ID NO: 570255 - DNA, 33 bp, Homo sapien
caaacaccaggtattcaatcaatgctagttctt

SEQ ID NO: 570256 - DNA, 33 bp, Homo sapien
caaacaccaggtattccatcaatgctagttctt

SEQ ID NO: 570257 - DNA, 33 bp, Homo sapien
ttctagtatgtaaaacagtgttgcttattttta

SEQ ID NO: 570258 - DNA, 33 bp, Homo sapien
ttctagtatgtaaaactgtgttgcttattttta

SEQ ID NO: 570259 - DNA, 33 bp, Homo sapien
ggcaaacaaccctggccaagacagctccaagtt

SEQ ID NO: 570260 - DNA, 33 bp, Homo sapien
ggcaaacaaccctggcgaagacagctccaagtt

SEQ ID NO: 570261 - DNA, 33 bp, Homo sapien
acttgatcccagtaaaacattcgtaatcccttt

SEQ ID NO: 570262 - DNA, 33 bp, Homo sapien
acttgatcccagtaaagcattcgtaatcccttt

SEQ ID NO: 570263 - DNA, 33 bp, Homo sapien
actctctgccagggcccagttgatttgataggc

SEQ ID NO: 570264 - DNA, 33 bp, Homo sapien
actctctgccagggcctagttgatttgataggc

SEQ ID NO: 570265 - DNA, 33 bp, Homo sapien
ttggagaatacctggccatagactttgtcccct

SEQ ID NO: 570266 - DNA, 33 bp, Homo sapien
ttggagaatacctggctatagactttgtcccct

SEQ ID NO: 570267 - DNA, 33 bp, Homo sapien
cagagaggagataaaacttgttcaagatttcgt

SEQ ID NO: 570268 - DNA, 33 bp, Homo sapien
cagagaggagataaaatttgttcaagatttcgt

SEQ ID NO: 570269 - DNA, 33 bp, Homo sapien
acgtgttttaagcagaaaaattgtattattaga

SEQ ID NO: 570270 - DNA, 33 bp, Homo sapien
acgtgttttaagcagagaaattgtattattaga

SEQ ID NO: 570271 - DNA, 33 bp, Homo sapien
tggcccctctttattacccaaagacaacatgaa

SEQ ID NO: 570272 - DNA, 33 bp, Homo sapien
tggcccctctttattatccaaagacaacatgaa

SEQ ID NO: 570273 - DNA, 33 bp, Homo sapien
ctgtctgggtaaagaacaaatgggtggtggaat

SEQ ID NO: 570274 - DNA, 33 bp, Homo sapien
ctgtctgggtaaagaataaatgggtggtggaat

SEQ ID NO: 570275 - DNA, 33 bp, Homo sapien
atatacctgcaataagccttaaaaatgtctgta

SEQ ID NO: 570276 - DNA, 33 bp, Homo sapien
atatacctgcaataagtcttaaaaatgtctgta

SEQ ID NO: 570277 - DNA, 33 bp, Homo sapien
aagtaatgttgattacacggttatttataatag

SEQ ID NO: 570278 - DNA, 33 bp, Homo sapien
aagtaatgttgattacgcggttatttataatag

SEQ ID NO: 570279 - DNA, 33 bp, Homo sapien
ttcagtgtactgagacaagatttacagttttgt

SEQ ID NO: 570280 - DNA, 33 bp, Homo sapien
ttcagtgtactgagacgagatttacagttttgt

SEQ ID NO: 570281 - DNA, 33 bp, Homo sapien
accctccttgagttcactccttcctgccaaaag

SEQ ID NO: 570282 - DNA, 33 bp, Homo sapien
accctccttgagttcattccttcctgccaaaag

SEQ ID NO: 570283 - DNA, 33 bp, Homo sapien
ggtccatttgtcatcagtgaaatacctcaagcc

SEQ ID NO: 570284 - DNA, 33 bp, Homo sapien
ggtccatttgtcatcattgaaatacctcaagcc

SEQ ID NO: 570285 - DNA, 33 bp, Homo sapien
cagagcgctcttgcagacaaatagagccgggct

SEQ ID NO: 570286 - DNA, 33 bp, Homo sapien
cagagcgctcttgcagccaaatagagccgggct

SEQ ID NO: 570287 - DNA, 33 bp, Homo sapien
caagtgttatgtgcatcactaaatctgggcggg

SEQ ID NO: 570288 - DNA, 33 bp, Homo sapien
caagtgttatgtgcattactaaatctgggcggg

SEQ ID NO: 570289 - DNA, 33 bp, Homo sapien
ttatctaatatgtttcaattttccctattgtcc

SEQ ID NO: 570290 - DNA, 33 bp, Homo sapien
ttatctaatatgtttctattttccctattgtcc

SEQ ID NO: 570291 - DNA, 33 bp, Homo sapien
atcatgtctggagtcacagctgaagaaaaaaaa

SEQ ID NO: 570292 - DNA, 33 bp, Homo sapien
atcatgtctggagtcatagctgaagaaaaaaaa

SEQ ID NO: 570293 - DNA, 33 bp, Homo sapien
tcagaggtgcggaaggccattgtgtgttgaagg

SEQ ID NO: 570294 - DNA, 33 bp, Homo sapien
tcagaggtgcggaaggtcattgtgtgttgaagg

SEQ ID NO: 570295 - DNA, 33 bp, Homo sapien
atactagtgccctggaaaaagtgctaggaagga

SEQ ID NO: 570296 - DNA, 33 bp, Homo sapien
atactagtgccctggagaaagtgctaggaagga

SEQ ID NO: 570297 - DNA, 33 bp, Homo sapien
cagcaacacatctagcaaatctagcatctatct

SEQ ID NO: 570298 - DNA, 33 bp, Homo sapien
cagcaacacatctagccaatctagcatctatct

SEQ ID NO: 570299 - DNA, 33 bp, Homo sapien
tattataaagagacacacaagtgtatgttcact

SEQ ID NO: 570300 - DNA, 33 bp, Homo sapien
tattataaagagacacgcaagtgtatgttcact

SEQ ID NO: 570301 - DNA, 33 bp, Homo sapien
gactcatgttctttcaactccatcatctgccca

SEQ ID NO: 570302 - DNA, 33 bp, Homo sapien
gactcatgttctttcagctccatcatctgccca

SEQ ID NO: 570303 - DNA, 33 bp, Homo sapien
cctagctcttaatctcagaactgccaactcagt

SEQ ID NO: 570304 - DNA, 33 bp, Homo sapien
cctagctcttaatctccgaactgccaactcagt

SEQ ID NO: 570305 - DNA, 33 bp, Homo sapien
gacccagtcggtctgcagcaagcctagctctta

SEQ ID NO: 570306 - DNA, 33 bp, Homo sapien
gacccagtcggtctgcggcaagcctagctctta

SEQ ID NO: 570307 - DNA, 33 bp, Homo sapien
ggaaatcagtgcataaaaaagcaaacagactac

SEQ ID NO: 570308 - DNA, 33 bp, Homo sapien
ggaaatcagtgcataagaaagcaaacagactac

SEQ ID NO: 570309 - DNA, 33 bp, Homo sapien
gctgctttcaaaacaacgcagtccgggcatagt

SEQ ID NO: 570310 - DNA, 33 bp, Homo sapien
gctgctttcaaaacaatgcagtccgggcatagt

SEQ ID NO: 570311 - DNA, 33 bp, Homo sapien
gttaaaataacctctcactgcaaccagtggatt

SEQ ID NO: 570312 - DNA, 33 bp, Homo sapien
gttaaaataacctctcgctgcaaccagtggatt

SEQ ID NO: 570313 - DNA, 33 bp, Homo sapien
agcccaagtatcccaactccaaattcagcaaag

SEQ ID NO: 570314 - DNA, 33 bp, Homo sapien
agcccaagtatcccaattccaaattcagcaaag

SEQ ID NO: 570315 - DNA, 33 bp, Homo sapien
tattccccaccacagcaaagattagaaagcaaa

SEQ ID NO: 570316 - DNA, 33 bp, Homo sapien
tattccccaccacagcgaagattagaaagcaaa

SEQ ID NO: 570317 - DNA, 33 bp, Homo sapien
caaaatggactaccacaagcctggaaggataaa

SEQ ID NO: 570318 - DNA, 33 bp, Homo sapien
caaaatggactaccacgagcctggaaggataaa

SEQ ID NO: 570319 - DNA, 33 bp, Homo sapien
agtacttaacaaatgccgagcgtgacaccgcgt

SEQ ID NO: 570320 - DNA, 33 bp, Homo sapien
agtacttaacaaatgcggagcgtgacaccgcgt

SEQ ID NO: 570321 - DNA, 33 bp, Homo sapien
agccagctgtgccactcaaattaacttgctcag

SEQ ID NO: 570322 - DNA, 33 bp, Homo sapien
agccagctgtgccactgaaattaacttgctcag

SEQ ID NO: 570323 - DNA, 33 bp, Homo sapien
gataaatgtgtataggaaaggacatatgcaaaa

SEQ ID NO: 570324 - DNA, 33 bp, Homo sapien
gataaatgtgtatagggaaggacatatgcaaaa

SEQ ID NO: 570325 - DNA, 33 bp, Homo sapien
ttaaaagacatctcacaatgagaaaaaagtcag

SEQ ID NO: 570326 - DNA, 33 bp, Homo sapien
ttaaaagacatctcaccatgagaaaaaagtcag

SEQ ID NO: 570327 - DNA, 33 bp, Homo sapien
tatagatgtcagcctcacaggacacagagaaag

SEQ ID NO: 570328 - DNA, 33 bp, Homo sapien
tatagatgtcagcctcgcaggacacagagaaag

SEQ ID NO: 570329 - DNA, 33 bp, Homo sapien
cttttacattttaagccactgtaccatgaggag

SEQ ID NO: 570330 - DNA, 33 bp, Homo sapien
cttttacattttaagctactgtaccatgaggag

SEQ ID NO: 570331 - DNA, 33 bp, Homo sapien
catcaaagaaaaagcactgccttcaattaccaa

SEQ ID NO: 570332 - DNA, 33 bp, Homo sapien
catcaaagaaaaagcattgccttcaattaccaa

SEQ ID NO: 570333 - DNA, 33 bp, Homo sapien
gagaaaagcacagctgaattttatcgcttctcc

SEQ ID NO: 570334 - DNA, 33 bp, Homo sapien
gagaaaagcacagctggattttatcgcttctcc

SEQ ID NO: 570335 - DNA, 33 bp, Homo sapien
ggctcgggcagggcaacgtcctcctattggaca

SEQ ID NO: 570336 - DNA, 33 bp, Homo sapien
ggctcgggcagggcaatgtcctcctattggaca

SEQ ID NO: 570337 - DNA, 33 bp, Homo sapien
gattagtactgcaaaaactacaagcctgtgatg

SEQ ID NO: 570338 - DNA, 33 bp, Homo sapien
gattagtactgcaaaacctacaagcctgtgatg

SEQ ID NO: 570339 - DNA, 33 bp, Homo sapien
tcccacattcttttggacagtgcaagttacaaa

SEQ ID NO: 570340 - DNA, 33 bp, Homo sapien
tcccacattcttttggccagtgcaagttacaaa

SEQ ID NO: 570341 - DNA, 33 bp, Homo sapien
aaatggagaagtatgcaatctgttataggagca

SEQ ID NO: 570342 - DNA, 33 bp, Homo sapien
aaatggagaagtatgctatctgttataggagca

SEQ ID NO: 570343 - DNA, 33 bp, Homo sapien
tgaatacttttggatgaatgggtgcatggacga

SEQ ID NO: 570344 - DNA, 33 bp, Homo sapien
tgaatacttttggatggatgggtgcatggacga

SEQ ID NO: 570345 - DNA, 33 bp, Homo sapien
aaatatatacaccctcactttttcatgagatag

SEQ ID NO: 570346 - DNA, 33 bp, Homo sapien
aaatatatacaccctcgctttttcatgagatag

SEQ ID NO: 570347 - DNA, 33 bp, Homo sapien
ttcaaggaggaataagcaaacaattgttcaaat

SEQ ID NO: 570348 - DNA, 33 bp, Homo sapien
ttcaaggaggaataagtaaacaattgttcaaat

SEQ ID NO: 570349 - DNA, 33 bp, Homo sapien
tgtgatgtgagttgtaaaatttaaaaataaaat

SEQ ID NO: 570350 - DNA, 33 bp, Homo sapien
tgtgatgtgagttgtacaatttaaaaataaaat

SEQ ID NO: 570351 - DNA, 33 bp, Homo sapien
ttgcagctgacatcctcagcacgttgcctggtt

SEQ ID NO: 570352 - DNA, 33 bp, Homo sapien
ttgcagctgacatccttagcacgttgcctggtt

SEQ ID NO: 570353 - DNA, 33 bp, Homo sapien
tgtgcatattttgtcggcccaatgagagtgtta

SEQ ID NO: 570354 - DNA, 33 bp, Homo sapien
tgtgcatattttgtcgtcccaatgagagtgtta

SEQ ID NO: 570355 - DNA, 33 bp, Homo sapien
atctgacctttaactccgactgcaaatgtcata

SEQ ID NO: 570356 - DNA, 33 bp, Homo sapien
atctgacctttaactctgactgcaaatgtcata

SEQ ID NO: 570357 - DNA, 33 bp, Homo sapien
gttttgagaaataagcactgtagcaggtgacag

SEQ ID NO: 570358 - DNA, 33 bp, Homo sapien
gttttgagaaataagcgctgtagcaggtgacag

SEQ ID NO: 570359 - DNA, 33 bp, Homo sapien
tcaacaaatttcaactaaacacagtgtacctgt

SEQ ID NO: 570360 - DNA, 33 bp, Homo sapien
tcaacaaatttcaactcaacacagtgtacctgt

SEQ ID NO: 570361 - DNA, 33 bp, Homo sapien
tcttatccttccttccacaagacaacagttttc

SEQ ID NO: 570362 - DNA, 33 bp, Homo sapien
tcttatccttccttccgcaagacaacagttttc

SEQ ID NO: 570363 - DNA, 33 bp, Homo sapien
cactggactaggattacaaaagaaggccaaaag

SEQ ID NO: 570364 - DNA, 33 bp, Homo sapien
cactggactaggattataaaagaaggccaaaag

SEQ ID NO: 570365 - DNA, 33 bp, Homo sapien
cttttagatttgtcctcaactgaaaatgtttca

SEQ ID NO: 570366 - DNA, 33 bp, Homo sapien
cttttagatttgtcctgaactgaaaatgtttca

SEQ ID NO: 570367 - DNA, 33 bp, Homo sapien
caatcaaataaaacacagtcaattgtgacagac

SEQ ID NO: 570368 - DNA, 33 bp, Homo sapien
caatcaaataaaacacggtcaattgtgacagac

SEQ ID NO: 570369 - DNA, 33 bp, Homo sapien
tctagtttgacctatcaagacccctaaactgct

SEQ ID NO: 570370 - DNA, 33 bp, Homo sapien
tctagtttgacctatcgagacccctaaactgct

SEQ ID NO: 570371 - DNA, 33 bp, Homo sapien
aaagtgcatggctacaatgaggggtgagatttt

SEQ ID NO: 570372 - DNA, 33 bp, Homo sapien
aaagtgcatggctacagtgaggggtgagatttt

SEQ ID NO: 570373 - DNA, 33 bp, Homo sapien
ttgcattgtgaactacagtaacacaattcatat

SEQ ID NO: 570374 - DNA, 33 bp, Homo sapien
ttgcattgtgaactacggtaacacaattcatat

SEQ ID NO: 570375 - DNA, 33 bp, Homo sapien
aaaccaccttgaaggacagaccatgtggaaaga

SEQ ID NO: 570376 - DNA, 33 bp, Homo sapien
aaaccaccttgaaggagagaccatgtggaaaga

SEQ ID NO: 570377 - DNA, 33 bp, Homo sapien
gcctatttatcacctacgctaaagaacagggct

SEQ ID NO: 570378 - DNA, 33 bp, Homo sapien
gcctatttatcacctatgctaaagaacagggct

SEQ ID NO: 570379 - DNA, 33 bp, Homo sapien
ccatctggcactgagacactaggctgattccat

SEQ ID NO: 570380 - DNA, 33 bp, Homo sapien
ccatctggcactgagagactaggctgattccat

SEQ ID NO: 570381 - DNA, 33 bp, Homo sapien
gtcaattacaggtcacaaatggtttccaaagtg

SEQ ID NO: 570382 - DNA, 33 bp, Homo sapien
gtcaattacaggtcactaatggtttccaaagtg

SEQ ID NO: 570383 - DNA, 33 bp, Homo sapien
tgactcagatcagatgcacagcttcaaagggat

SEQ ID NO: 570384 - DNA, 33 bp, Homo sapien
tgactcagatcagatgtacagcttcaaagggat

SEQ ID NO: 570385 - DNA, 33 bp, Homo sapien
agtcacctccactcaggccattggtcagaattg

SEQ ID NO: 570386 - DNA, 33 bp, Homo sapien
agtcacctccactcagtccattggtcagaattg

SEQ ID NO: 570387 - DNA, 33 bp, Homo sapien
ctgagctaagaggtaacttaaaatggcaaaagg

SEQ ID NO: 570388 - DNA, 33 bp, Homo sapien
ctgagctaagaggtaatttaaaatggcaaaagg

SEQ ID NO: 570389 - DNA, 33 bp, Homo sapien
aactagattcacatggaaatgtactggaaatgt

SEQ ID NO: 570390 - DNA, 33 bp, Homo sapien
aactagattcacatgggaatgtactggaaatgt

SEQ ID NO: 570391 - DNA, 33 bp, Homo sapien
ctcacaaaatgctcaccgaataagctgttatca

SEQ ID NO: 570392 - DNA, 33 bp, Homo sapien
ctcacaaaatgctcactgaataagctgttatca

SEQ ID NO: 570393 - DNA, 33 bp, Homo sapien
cagcagaatcatgaaccgaataaaccttttttc

SEQ ID NO: 570394 - DNA, 33 bp, Homo sapien
cagcagaatcatgaacggaataaaccttttttc

SEQ ID NO: 570395 - DNA, 33 bp, Homo sapien
ataggttgtcaatatccccaccaggcaagcaag

SEQ ID NO: 570396 - DNA, 33 bp, Homo sapien
ataggttgtcaatatctccaccaggcaagcaag

SEQ ID NO: 570397 - DNA, 33 bp, Homo sapien
gggcctcctatacaaggcaggggattctggttt

SEQ ID NO: 570398 - DNA, 33 bp, Homo sapien
gggcctcctatacaagtcaggggattctggttt

SEQ ID NO: 570399 - DNA, 33 bp, Homo sapien
aggtctgccacttacacgggcaaaagtgagctt

SEQ ID NO: 570400 - DNA, 33 bp, Homo sapien
aggtctgccacttacatgggcaaaagtgagctt

SEQ ID NO: 570401 - DNA, 33 bp, Homo sapien
tcaaaaacaattgtgcgcccctgctaacagatc

SEQ ID NO: 570402 - DNA, 33 bp, Homo sapien
tcaaaaacaattgtgctcccctgctaacagatc

SEQ ID NO: 570403 - DNA, 33 bp, Homo sapien
aatcaagagagcccaacaaatcttagggaagtg

SEQ ID NO: 570404 - DNA, 33 bp, Homo sapien
aatcaagagagcccaagaaatcttagggaagtg

SEQ ID NO: 570405 - DNA, 33 bp, Homo sapien
tctcaagagcataatgcaatatcaaccattttg

SEQ ID NO: 570406 - DNA, 33 bp, Homo sapien
tctcaagagcataatgtaatatcaaccattttg

SEQ ID NO: 570407 - DNA, 33 bp, Homo sapien
gagcttggtgctaaagactgaaatttggaggtc

SEQ ID NO: 570408 - DNA, 33 bp, Homo sapien
gagcttggtgctaaaggctgaaatttggaggtc

SEQ ID NO: 570409 - DNA, 33 bp, Homo sapien
aatatttttaaaagcaatgctgtcaagactgct

SEQ ID NO: 570410 - DNA, 33 bp, Homo sapien
aatatttttaaaagcagtgctgtcaagactgct

SEQ ID NO: 570411 - DNA, 33 bp, Homo sapien
gtgtaccctgcccttcaaggctttgtgatctaa

SEQ ID NO: 570412 - DNA, 33 bp, Homo sapien
gtgtaccctgcccttccaggctttgtgatctaa

SEQ ID NO: 570413 - DNA, 33 bp, Homo sapien
agaggtattgactaaaaaagggcagcacaaagg

SEQ ID NO: 570414 - DNA, 33 bp, Homo sapien
agaggtattgactaaagaagggcagcacaaagg

SEQ ID NO: 570415 - DNA, 33 bp, Homo sapien
tggcatacggttctacaagtttcaacacataca

SEQ ID NO: 570416 - DNA, 33 bp, Homo sapien
tggcatacggttctacgagtttcaacacataca

SEQ ID NO: 570417 - DNA, 33 bp, Homo sapien
aaagtactttccattacgtcatcctgaatctga

SEQ ID NO: 570418 - DNA, 33 bp, Homo sapien
aaagtactttccattatgtcatcctgaatctga

SEQ ID NO: 570419 - DNA, 33 bp, Homo sapien
actcatattataaagacgtcatttttcttcaaa

SEQ ID NO: 570420 - DNA, 33 bp, Homo sapien
actcatattataaagatgtcatttttcttcaaa

SEQ ID NO: 570421 - DNA, 33 bp, Homo sapien
taacccaacttggcaaggacccaataagtttcc

SEQ ID NO: 570422 - DNA, 33 bp, Homo sapien
taacccaacttggcaatgacccaataagtttcc

SEQ ID NO: 570423 - DNA, 33 bp, Homo sapien
ctctcatgattttagcccctgatttattgtatg

SEQ ID NO: 570424 - DNA, 33 bp, Homo sapien
ctctcatgattttagctcctgatttattgtatg

SEQ ID NO: 570425 - DNA, 33 bp, Homo sapien
agagtgttgtgttctgaagacagctgaaaccaa

SEQ ID NO: 570426 - DNA, 33 bp, Homo sapien
agagtgttgtgttctggagacagctgaaaccaa

SEQ ID NO: 570427 - DNA, 33 bp, Homo sapien
gtccaaatgctacgacaacaacttcttgagaaa

SEQ ID NO: 570428 - DNA, 33 bp, Homo sapien
gtccaaatgctacgacgacaacttcttgagaaa

SEQ ID NO: 570429 - DNA, 33 bp, Homo sapien; identical to SEQ ID NO: 570427

SEQ ID NO: 570430 - DNA, 33 bp, Homo sapien; identical to SEQ ID NO: 570428

SEQ ID NO: 570431 - DNA, 33 bp, Homo sapien
ctcttctttccttagacgatctcgaaggtcatg

SEQ ID NO: 570432 - DNA, 33 bp, Homo sapien
ctcttctttccttagatgatctcgaaggtcatg

SEQ ID NO: 570433 - DNA, 33 bp, Homo sapien
gttctgatgttttctgaatgataaaaagaggaa

SEQ ID NO: 570434 - DNA, 33 bp, Homo sapien
gttctgatgttttctggatgataaaaagaggaa

SEQ ID NO: 570435 - DNA, 33 bp, Homo sapien
gtatgtgtgatcagccaggaagaaaatgagcat

SEQ ID NO: 570436 - DNA, 33 bp, Homo sapien
gtatgtgtgatcagccgggaagaaaatgagcat

SEQ ID NO: 570437 - DNA, 33 bp, Homo sapien
atgaagtaatcaacataatatcagatttgtgtt

SEQ ID NO: 570438 - DNA, 33 bp, Homo sapien
atgaagtaatcaacatgatatcagatttgtgtt

SEQ ID NO: 570439 - DNA, 33 bp, Homo sapien
aggaagaagagaaaaacgtggatcttggtaaaa

SEQ ID NO: 570440 - DNA, 33 bp, Homo sapien
aggaagaagagaaaaatgtggatcttggtaaaa

SEQ ID NO: 570441 - DNA, 33 bp, Homo sapien
caacaagtcaagctccagccaatccagaaacat

SEQ ID NO: 570442 - DNA, 33 bp, Homo sapien
caacaagtcaagctccggccaatccagaaacat

SEQ ID NO: 570443 - DNA, 33 bp, Homo sapien
gataaataattcagaactccctagtcctgtaac

SEQ ID NO: 570444 - DNA, 33 bp, Homo sapien
gataaataattcagaagtccctagtcctgtaac

SEQ ID NO: 570445 - DNA, 33 bp, Homo sapien
ggcagtaatttgtctaaccctgctgtagtgaag

SEQ ID NO: 570446 - DNA, 33 bp, Homo sapien
ggcagtaatttgtctatccctgctgtagtgaag

SEQ ID NO: 570447 - DNA, 33 bp, Homo sapien
gatgatctcaccacgaagcacagttaagggaaa

SEQ ID NO: 570448 - DNA, 33 bp, Homo sapien
gatgatctcaccacgatgcacagttaagggaaa

SEQ ID NO: 570449 - DNA, 33 bp, Homo sapien
aacatccagactgtaaacacatggttcatcaaa

SEQ ID NO: 570450 - DNA, 33 bp, Homo sapien
aacatccagactgtaaccacatggttcatcaaa

SEQ ID NO: 570451 - DNA, 33 bp, Homo sapien
aagcaagaataggaaggatcggggagaagtttg

SEQ ID NO: 570452 - DNA, 33 bp, Homo sapien
aagcaagaataggaagtatcggggagaagtttg

SEQ ID NO: 570453 - DNA, 33 bp, Homo sapien
accatactgttttccacgattattgtgctaatt

SEQ ID NO: 570454 - DNA, 33 bp, Homo sapien
accatactgttttccatgattattgtgctaatt

SEQ ID NO: 570455 - DNA, 33 bp, Homo sapien
cacagtgcttcattctcaaaggggatgatgcca

SEQ ID NO: 570456 - DNA, 33 bp, Homo sapien
cacagtgcttcattcttaaaggggatgatgcca

SEQ ID NO: 570457 - DNA, 33 bp, Homo sapien
ccaggtgactccaggcccaaagatcagagcagc

SEQ ID NO: 570458 - DNA, 33 bp, Homo sapien
ccaggtgactccaggctcaaagatcagagcagc

SEQ ID NO: 570459 - DNA, 33 bp, Homo sapien
ggtcacaaaaagatgcaaacagaactaaggttc

SEQ ID NO: 570460 - DNA, 33 bp, Homo sapien
ggtcacaaaaagatgcgaacagaactaaggttc

SEQ ID NO: 570461 - DNA, 33 bp, Homo sapien
ggagattaggcccaaaagatggttttattgcat

SEQ ID NO: 570462 - DNA, 33 bp, Homo sapien
ggagattaggcccaaacgatggttttattgcat

SEQ ID NO: 570463 - DNA, 33 bp, Homo sapien
actggcaatactaaccaactgaagcagataaac

SEQ ID NO: 570464 - DNA, 33 bp, Homo sapien
actggcaatactaaccgactgaagcagataaac

SEQ ID NO: 570465 - DNA, 33 bp, Homo sapien
tcagccactttatctcgaagtttcccttgagct

SEQ ID NO: 570466 - DNA, 33 bp, Homo sapien
tcagccactttatctctaagtttcccttgagct

SEQ ID NO: 570467 - DNA, 33 bp, Homo sapien
acttaatatttctggccctcagttcttaaatct

SEQ ID NO: 570468 - DNA, 33 bp, Homo sapien
acttaatatttctggctctcagttcttaaatct

SEQ ID NO: 570469 - DNA, 33 bp, Homo sapien
ttgtgggagacagcccaacacacagcatgcagg

SEQ ID NO: 570470 - DNA, 33 bp, Homo sapien
ttgtgggagacagcccgacacacagcatgcagg

SEQ ID NO: 570471 - DNA, 33 bp, Homo sapien
tatccctaatagtaaagagagtgcctgacacat

SEQ ID NO: 570472 - DNA, 33 bp, Homo sapien
tatccctaatagtaaatagagtgcctgacacat

SEQ ID NO: 570473 - DNA, 33 bp, Homo sapien
atcctcagtggaaccacaaagggtagaagagta

SEQ ID NO: 570474 - DNA, 33 bp, Homo sapien
atcctcagtggaaccagaaagggtagaagagta

SEQ ID NO: 570475 - DNA, 33 bp, Homo sapien
aatgtactgaagagtaggtcaatccttgtgagc

SEQ ID NO: 570476 - DNA, 33 bp, Homo sapien
aatgtactgaagagtatgtcaatccttgtgagc

SEQ ID NO: 570477 - DNA, 33 bp, Homo sapien
aggtggatgagatgcaagaaggcggctcaacaa

SEQ ID NO: 570478 - DNA, 33 bp, Homo sapien
aggtggatgagatgcatgaaggcggctcaacaa

SEQ ID NO: 570479 - DNA, 33 bp, Homo sapien
ccttttttataggtcaaaaatggcagatatcac

SEQ ID NO: 570480 - DNA, 33 bp, Homo sapien
ccttttttataggtcagaaatggcagatatcac

SEQ ID NO: 570481 - DNA, 33 bp, Homo sapien
ccgaagtggaatgtgaataactcaggaagaaca

SEQ ID NO: 570482 - DNA, 33 bp, Homo sapien
ccgaagtggaatgtgagtaactcaggaagaaca

SEQ ID NO: 570483 - DNA, 33 bp, Homo sapien
ttgtgactgtctactgaatctcttagtttattc

SEQ ID NO: 570484 - DNA, 33 bp, Homo sapien
ttgtgactgtctactgcatctcttagtttattc

SEQ ID NO: 570485 - DNA, 33 bp, Homo sapien
ccagctgttaatctgaaatgggattctgccaac

SEQ ID NO: 570486 - DNA, 33 bp, Homo sapien
ccagctgttaatctgagatgggattctgccaac

SEQ ID NO: 570487 - DNA, 33 bp, Homo sapien
ggcccctatcagtcaaagatttcattgttaact

SEQ ID NO: 570488 - DNA, 33 bp, Homo sapien
ggcccctatcagtcaacgatttcattgttaact

SEQ ID NO: 570489 - DNA, 33 bp, Homo sapien
ccacttacgtagaataagtttatgcatagaaag

SEQ ID NO: 570490 - DNA, 33 bp, Homo sapien
ccacttacgtagaatatgtttatgcatagaaag

SEQ ID NO: 570491 - DNA, 33 bp, Homo sapien
tactggaaaattgagaagaggggtctatgtcaa

SEQ ID NO: 570492 - DNA, 33 bp, Homo sapien
tactggaaaattgagaggaggggtctatgtcaa

SEQ ID NO: 570493 - DNA, 33 bp, Homo sapien
ccagacactcattctccgaacattccaattaag

SEQ ID NO: 570494 - DNA, 33 bp, Homo sapien
ccagacactcattctctgaacattccaattaag

SEQ ID NO: 570495 - DNA, 33 bp, Homo sapien
aaggagctcagactgtcaagtaatggggaagcc

SEQ ID NO: 570496 - DNA, 33 bp, Homo sapien
aaggagctcagactgttaagtaatggggaagcc

SEQ ID NO: 570497 - DNA, 33 bp, Homo sapien
agtggtcttagtcaaaatgaggccatattaacg

SEQ ID NO: 570498 - DNA, 33 bp, Homo sapien
agtggtcttagtcaaagtgaggccatattaacg

SEQ ID NO: 570499 - DNA, 33 bp, Homo sapien
gagtactatggaggaaagtgtgataaagagagt

SEQ ID NO: 570500 - DNA, 33 bp, Homo sapien
gagtactatggaggaaggtgtgataaagagagt

SEQ ID NO: 570501 - DNA, 33 bp, Homo sapien
aaatcatcttcatggaaacacccttcaaactct

SEQ ID NO: 570502 - DNA, 33 bp, Homo sapien
aaatcatcttcatggacacacccttcaaactct

SEQ ID NO: 570503 - DNA, 33 bp, Homo sapien
aaggattcttcttatcacccctcataaatagca

SEQ ID NO: 570504 - DNA, 33 bp, Homo sapien
aaggattcttcttatcgcccctcataaatagca

SEQ ID NO: 570505 - DNA, 33 bp, Homo sapien
ataaccctgctcctaaactctgaaatatgccat

SEQ ID NO: 570506 - DNA, 33 bp, Homo sapien
ataaccctgctcctaacctctgaaatatgccat

SEQ ID NO: 570507 - DNA, 33 bp, Homo sapien
tgcagaggtagcctcacgcattaaacgtctttt

SEQ ID NO: 570508 - DNA, 33 bp, Homo sapien
tgcagaggtagcctcatgcattaaacgtctttt

SEQ ID NO: 570509 - DNA, 33 bp, Homo sapien
gcttctcaaagtgctaagtaagattacaggcat

SEQ ID NO: 570510 - DNA, 33 bp, Homo sapien
gcttctcaaagtgctaggtaagattacaggcat

SEQ ID NO: 570511 - DNA, 33 bp, Homo sapien
tcttattccatagtcaatctctctggatgtgtt

SEQ ID NO: 570512 - DNA, 33 bp, Homo sapien
tcttattccatagtcagtctctctggatgtgtt

SEQ ID NO: 570513 - DNA, 33 bp, Homo sapien
ctttgtccaactccccacccgggaccagactct

SEQ ID NO: 570514 - DNA, 33 bp, Homo sapien
ctttgtccaactccccgcccgggaccagactct

SEQ ID NO: 570515 - DNA, 33 bp, Homo sapien
gctgtcaagggatctccctccaggtttagagca

SEQ ID NO: 570516 - DNA, 33 bp, Homo sapien
gctgtcaagggatctctctccaggtttagagca

SEQ ID NO: 570517 - DNA, 33 bp, Homo sapien
tttgctggccttttcacacgtaaatctcattca

SEQ ID NO: 570518 - DNA, 33 bp, Homo sapien
tttgctggccttttcatacgtaaatctcattca

SEQ ID NO: 570519 - DNA, 33 bp, Homo sapien
caaacaagagccggaacgtaagcctactggcag

SEQ ID NO: 570520 - DNA, 33 bp, Homo sapien
caaacaagagccggaatgtaagcctactggcag

SEQ ID NO: 570521 - DNA, 33 bp, Homo sapien
ggttgggactttggaaaacgtttcgatcatgag

SEQ ID NO: 570522 - DNA, 33 bp, Homo sapien
ggttgggactttggaagacgtttcgatcatgag

SEQ ID NO: 570523 - DNA, 33 bp, Homo sapien
catattgtgctattaacgctgtgaggtggatct

SEQ ID NO: 570524 - DNA, 33 bp, Homo sapien
catattgtgctattaatgctgtgaggtggatct

SEQ ID NO: 570525 - DNA, 33 bp, Homo sapien
tctgctgggtctgtcacgtgcattttacccaca

SEQ ID NO: 570526 - DNA, 33 bp, Homo sapien
tctgctgggtctgtcatgtgcattttacccaca

SEQ ID NO: 570527 - DNA, 33 bp, Homo sapien
tgcctccctggtgactgacttcttcactgtttt

SEQ ID NO: 570528 - DNA, 33 bp, Homo sapien
tgcctccctggtgacttacttcttcactgtttt

SEQ ID NO: 570529 - DNA, 33 bp, Homo sapien
tttatatcaggattaaataagttagcatgttga

SEQ ID NO: 570530 - DNA, 33 bp, Homo sapien
tttatatcaggattaagtaagttagcatgttga

SEQ ID NO: 570531 - DNA, 33 bp, Homo sapien
aatcagatgcccagatgaaggcagtgatgaatg

SEQ ID NO: 570532 - DNA, 33 bp, Homo sapien
aatcagatgcccagattaaggcagtgatgaatg

SEQ ID NO: 570533 - DNA, 33 bp, Homo sapien
gcctccttttaatgtccagaccagcatttctca

SEQ ID NO: 570534 - DNA, 33 bp, Homo sapien
gcctccttttaatgtctagaccagcatttctca

SEQ ID NO: 570535 - DNA, 33 bp, Homo sapien
gataatgcattggaaaattacaaggagctttgc

SEQ ID NO: 570536 - DNA, 33 bp, Homo sapien
gataatgcattggaaagttacaaggagctttgc

SEQ ID NO: 570537 - DNA, 33 bp, Homo sapien
attctggcctctgcgacgatgggaaggagacaa

SEQ ID NO: 570538 - DNA, 33 bp, Homo sapien
attctggcctctgcgatgatgggaaggagacaa

SEQ ID NO: 570539 - DNA, 33 bp, Homo sapien
aaatatagaaaaatggcattcaaacttttatat

SEQ ID NO: 570540 - DNA, 33 bp, Homo sapien
aaatatagaaaaatggtattcaaacttttatat

SEQ ID NO: 570541 - DNA, 33 bp, Homo sapien
attcactgtcaatcaacaggtattaagcaccta

SEQ ID NO: 570542 - DNA, 33 bp, Homo sapien
attcactgtcaatcaataggtattaagcaccta

SEQ ID NO: 570543 - DNA, 33 bp, Homo sapien
agaaaccagtagggtaaggtgcagtatcactag

SEQ ID NO: 570544 - DNA, 33 bp, Homo sapien
agaaaccagtagggtagggtgcagtatcactag

SEQ ID NO: 570545 - DNA, 33 bp, Homo sapien
tgagggcaagcagtcaaatgatcaatacaaggc

SEQ ID NO: 570546 - DNA, 33 bp, Homo sapien
tgagggcaagcagtcagatgatcaatacaaggc

SEQ ID NO: 570547 - DNA, 33 bp, Homo sapien
atagtgtttgaaaaggcatcctctataacacaa

SEQ ID NO: 570548 - DNA, 33 bp, Homo sapien
atagtgtttgaaaaggtatcctctataacacaa

SEQ ID NO: 570549 - DNA, 33 bp, Homo sapien
tgaagtaagcatgctaccaaataaagcctgcaa

SEQ ID NO: 570550 - DNA, 33 bp, Homo sapien
tgaagtaagcatgctatcaaataaagcctgcaa

SEQ ID NO: 570551 - DNA, 33 bp, Homo sapien
cacagtgaccctgtggaagagaagtaggatggg

SEQ ID NO: 570552 - DNA, 33 bp, Homo sapien
cacagtgaccctgtgggagagaagtaggatggg

SEQ ID NO: 570553 - DNA, 33 bp, Homo sapien
ctgattagttctaccactcatagcccattccta

SEQ ID NO: 570554 - DNA, 33 bp, Homo sapien
ctgattagttctaccattcatagcccattccta

SEQ ID NO: 570555 - DNA, 33 bp, Homo sapien
catgcttagcattttgcacgagataactttgtc

SEQ ID NO: 570556 - DNA, 33 bp, Homo sapien
catgcttagcattttgtacgagataactttgtc

SEQ ID NO: 570557 - DNA, 33 bp, Homo sapien
agtcagcggtgcagagcagttagcgccctcggg

SEQ ID NO: 570558 - DNA, 33 bp, Homo sapien
agtcagcggtgcagagtagttagcgccctcggg

SEQ ID NO: 570559 - DNA, 33 bp, Homo sapien
aaggcactttattacccgaatctaaaacctaag

SEQ ID NO: 570560 - DNA, 33 bp, Homo sapien
aaggcactttattacctgaatctaaaacctaag

SEQ ID NO: 570561 - DNA, 33 bp, Homo sapien
agcaagaagagaaatacgaaaaggagaagaagg

SEQ ID NO: 570562 - DNA, 33 bp, Homo sapien
agcaagaagagaaatatgaaaaggagaagaagg

SEQ ID NO: 570563 - DNA, 33 bp, Homo sapien
ctaagtgggacattgaagtaggtttcatagtcc

SEQ ID NO: 570564 - DNA, 33 bp, Homo sapien
ctaagtgggacattgaggtaggtttcatagtcc

SEQ ID NO: 570565 - DNA, 33 bp, Homo sapien
agttctagcagaaaatgaacgtactaagtggga

SEQ ID NO: 570566 - DNA, 33 bp, Homo sapien
agttctagcagaaaattaacgtactaagtggga

SEQ ID NO: 570567 - DNA, 33 bp, Homo sapien
tttctgaaaagagtcaataatacatcctgaagg

SEQ ID NO: 570568 - DNA, 33 bp, Homo sapien
tttctgaaaagagtcagtaatacatcctgaagg

SEQ ID NO: 570569 - DNA, 33 bp, Homo sapien
ttctggaaggtgacagccaaatatcttgagaca

SEQ ID NO: 570570 - DNA, 33 bp, Homo sapien
ttctggaaggtgacagtcaaatatcttgagaca

SEQ ID NO: 570571 - DNA, 33 bp, Homo sapien
gagctttgagaagacaagtgctaatgatctgac

SEQ ID NO: 570572 - DNA, 33 bp, Homo sapien
gagctttgagaagacaggtgctaatgatctgac

SEQ ID NO: 570573 - DNA, 33 bp, Homo sapien
tgcccattaggcctcacgttttacaaacaaaaa

SEQ ID NO: 570574 - DNA, 33 bp, Homo sapien
tgcccattaggcctcatgttttacaaacaaaaa

SEQ ID NO: 570575 - DNA, 33 bp, Homo sapien
agctatggcaagagccacagaggtatggatgct

SEQ ID NO: 570576 - DNA, 33 bp, Homo sapien
agctatggcaagagccgcagaggtatggatgct

SEQ ID NO: 570577 - DNA, 33 bp, Homo sapien
tactctatgatttctacgaaaggatgagctgag

SEQ ID NO: 570578 - DNA, 33 bp, Homo sapien
tactctatgatttctatgaaaggatgagctgag

SEQ ID NO: 570579 - DNA, 33 bp, Homo sapien
ttcctgtagttccttaacagtatcaatgtattt

SEQ ID NO: 570580 - DNA, 33 bp, Homo sapien
ttcctgtagttccttaccagtatcaatgtattt

SEQ ID NO: 570581 - DNA, 33 bp, Homo sapien
agaaagaagaaactcaacgctagtgttccattg

SEQ ID NO: 570582 - DNA, 33 bp, Homo sapien
agaaagaagaaactcagcgctagtgttccattg

SEQ ID NO: 570583 - DNA, 33 bp, Homo sapien
gatatattgaggaaaacggcaagtccaatagga

SEQ ID NO: 570584 - DNA, 33 bp, Homo sapien
gatatattgaggaaaatggcaagtccaatagga

SEQ ID NO: 570585 - DNA, 33 bp, Homo sapien
ctcatttgttaggtacaccttgctctctgaaat

SEQ ID NO: 570586 - DNA, 33 bp, Homo sapien
ctcatttgttaggtactccttgctctctgaaat

SEQ ID NO: 570587 - DNA, 33 bp, Homo sapien
ccatcaggagaagatacgcattttgagtaaatg

SEQ ID NO: 570588 - DNA, 33 bp, Homo sapien
ccatcaggagaagatatgcattttgagtaaatg

SEQ ID NO: 570589 - DNA, 33 bp, Homo sapien
taatgtactccctcccaaatagtgagaaatatg

SEQ ID NO: 570590 - DNA, 33 bp, Homo sapien
taatgtactccctcccgaatagtgagaaatatg

SEQ ID NO: 570591 - DNA, 33 bp, Homo sapien
actaggacaaagatacaaggattaggactttct

SEQ ID NO: 570592 - DNA, 33 bp, Homo sapien
actaggacaaagataccaggattaggactttct

SEQ ID NO: 570593 - DNA, 33 bp, Homo sapien
ccattgcttcattacaaagagttggccataccc

SEQ ID NO: 570594 - DNA, 33 bp, Homo sapien
ccattgcttcattacagagagttggccataccc

SEQ ID NO: 570595 - DNA, 33 bp, Homo sapien
agcattttgtgctgtcactttccttgaagtctg

SEQ ID NO: 570596 - DNA, 33 bp, Homo sapien
agcattttgtgctgtcgctttccttgaagtctg

SEQ ID NO: 570597 - DNA, 33 bp, Homo sapien
ctatgttagctccttgaagaaacataatacatt

SEQ ID NO: 570598 - DNA, 33 bp, Homo sapien
ctatgttagctccttgcagaaacataatacatt

SEQ ID NO: 570599 - DNA, 33 bp, Homo sapien
gcctttcatagtttacaaagtctttctgcaaaa

SEQ ID NO: 570600 - DNA, 33 bp, Homo sapien
gcctttcatagtttacgaagtctttctgcaaaa

SEQ ID NO: 570601 - DNA, 33 bp, Homo sapien
agtctgctcttcccataatggcatttgacagat

SEQ ID NO: 570602 - DNA, 33 bp, Homo sapien
agtctgctcttcccatgatggcatttgacagat

SEQ ID NO: 570603 - DNA, 33 bp, Homo sapien
gagttttgaaggctctgagaattccatgaatta

SEQ ID NO: 570604 - DNA, 33 bp, Homo sapien
gagttttgaaggctcttagaattccatgaatta

SEQ ID NO: 570605 - DNA, 33 bp, Homo sapien
tccacctgaattagaacgaagacttctctaaac

SEQ ID NO: 570606 - DNA, 33 bp, Homo sapien
tccacctgaattagaatgaagacttctctaaac

SEQ ID NO: 570607 - DNA, 33 bp, Homo sapien
gtttcacaattggtatgaaatttatcatctaca

SEQ ID NO: 570608 - DNA, 33 bp, Homo sapien
gtttcacaattggtattaaatttatcatctaca

SEQ ID NO: 570609 - DNA, 33 bp, Homo sapien
gtttatccctgcagtgaattcttcctggaattc

SEQ ID NO: 570610 - DNA, 33 bp, Homo sapien
gtttatccctgcagtgcattcttcctggaattc

SEQ ID NO: 570611 - DNA, 33 bp, Homo sapien
gaacaattggtaaacaccttcgcgctttctcaa

SEQ ID NO: 570612 - DNA, 33 bp, Homo sapien
gaacaattggtaaacatcttcgcgctttctcaa

SEQ ID NO: 570613 - DNA, 33 bp, Homo sapien
aaacaattactgtgcccatcacacaccttgagg

SEQ ID NO: 570614 - DNA, 33 bp, Homo sapien
aaacaattactgtgcctatcacacaccttgagg

SEQ ID NO: 570615 - DNA, 33 bp, Homo sapien
ttctgagctgacaaaaatgcctctctgggatcc

SEQ ID NO: 570616 - DNA, 33 bp, Homo sapien
ttctgagctgacaaaagtgcctctctgggatcc

SEQ ID NO: 570617 - DNA, 33 bp, Homo sapien
tctgcagcatctgctacggccaaccaactcctc

SEQ ID NO: 570618 - DNA, 33 bp, Homo sapien
tctgcagcatctgctatggccaaccaactcctc

SEQ ID NO: 570619 - DNA, 33 bp, Homo sapien
atttctcaccccaagacgtctccatttccagga

SEQ ID NO: 570620 - DNA, 33 bp, Homo sapien
atttctcaccccaagatgtctccatttccagga

SEQ ID NO: 570621 - DNA, 33 bp, Homo sapien
tctgaatacactgataactatcccctgccacac

SEQ ID NO: 570622 - DNA, 33 bp, Homo sapien
tctgaatacactgatacctatcccctgccacac

SEQ ID NO: 570623 - DNA, 33 bp, Homo sapien
acagattgcctgaaaccaaaaatcctgagcagg

SEQ ID NO: 570624 - DNA, 33 bp, Homo sapien
acagattgcctgaaactaaaaatcctgagcagg

SEQ ID NO: 570625 - DNA, 33 bp, Homo sapien
aaggtagacgagataccgattttcccattttat

SEQ ID NO: 570626 - DNA, 33 bp, Homo sapien
aaggtagacgagatactgattttcccattttat

SEQ ID NO: 570627 - DNA, 33 bp, Homo sapien
tagcttttgggtagtaacattccttcaactcaa

SEQ ID NO: 570628 - DNA, 33 bp, Homo sapien
tagcttttgggtagtagcattccttcaactcaa

SEQ ID NO: 570629 - DNA, 33 bp, Homo sapien
aagccattcagtagacaggggtaaactgccagc

SEQ ID NO: 570630 - DNA, 33 bp, Homo sapien
aagccattcagtagactggggtaaactgccagc

SEQ ID NO: 570631 - DNA, 33 bp, Homo sapien
actgggtgccagatacatacaaagccagagaaa

SEQ ID NO: 570632 - DNA, 33 bp, Homo sapien
actgggtgccagatacgtacaaagccagagaaa

SEQ ID NO: 570633 - DNA, 33 bp, Homo sapien
caaggtctatctggaaacatagattcaggagac

SEQ ID NO: 570634 - DNA, 33 bp, Homo sapien
caaggtctatctggaagcatagattcaggagac

SEQ ID NO: 570635 - DNA, 33 bp, Homo sapien
ctgttctcagtgtcccagaattacatgacctgc

SEQ ID NO: 570636 - DNA, 33 bp, Homo sapien
ctgttctcagtgtcccggaattacatgacctgc

SEQ ID NO: 570637 - DNA, 33 bp, Homo sapien
atgaagcattttccccacatggtggctgttcag

SEQ ID NO: 570638 - DNA, 33 bp, Homo sapien
atgaagcattttcccctcatggtggctgttcag

SEQ ID NO: 570639 - DNA, 33 bp, Homo sapien
aaaatgaagccatggaagaataatgacctgtta

SEQ ID NO: 570640 - DNA, 33 bp, Homo sapien
aaaatgaagccatggaggaataatgacctgtta

SEQ ID NO: 570641 - DNA, 33 bp, Homo sapien
ggaagaatcttttctacgtgtgtctcttagctt

SEQ ID NO: 570642 - DNA, 33 bp, Homo sapien
ggaagaatcttttctatgtgtgtctcttagctt

SEQ ID NO: 570643 - DNA, 33 bp, Homo sapien
aagactgagtactgaaagtaaaggagtactgcc

SEQ ID NO: 570644 - DNA, 33 bp, Homo sapien
aagactgagtactgaaggtaaaggagtactgcc

SEQ ID NO: 570645 - DNA, 33 bp, Homo sapien
ctggagctacaaatacaaccaaagtagacatgg

SEQ ID NO: 570646 - DNA, 33 bp, Homo sapien
ctggagctacaaatacgaccaaagtagacatgg

SEQ ID NO: 570647 - DNA, 33 bp, Homo sapien
taatgtataaatttaacgcaatcccagaattac

SEQ ID NO: 570648 - DNA, 33 bp, Homo sapien
taatgtataaatttaatgcaatcccagaattac

SEQ ID NO: 570649 - DNA, 33 bp, Homo sapien
ggaatacagataaataagttacagttcctgccc

SEQ ID NO: 570650 - DNA, 33 bp, Homo sapien
ggaatacagataaataggttacagttcctgccc

SEQ ID NO: 570651 - DNA, 33 bp, Homo sapien
agtcactgaactaacacgagaaataagaaatgg

SEQ ID NO: 570652 - DNA, 33 bp, Homo sapien
agtcactgaactaacatgagaaataagaaatgg

SEQ ID NO: 570653 - DNA, 33 bp, Homo sapien
acccacccgctgtttacaactgagacagctacc

SEQ ID NO: 570654 - DNA, 33 bp, Homo sapien
acccacccgctgtttagaactgagacagctacc

SEQ ID NO: 570655 - DNA, 33 bp, Homo sapien
ggaccctcaactggtcaagctactattagcatt

SEQ ID NO: 570656 - DNA, 33 bp, Homo sapien
ggaccctcaactggtcgagctactattagcatt

SEQ ID NO: 570657 - DNA, 33 bp, Homo sapien
ttagatccttgcaataagagatccttggcataa

SEQ ID NO: 570658 - DNA, 33 bp, Homo sapien
ttagatccttgcaataggagatccttggcataa

SEQ ID NO: 570659 - DNA, 33 bp, Homo sapien
atttgagtcattccaaattcaccaaagcattaa

SEQ ID NO: 570660 - DNA, 33 bp, Homo sapien
atttgagtcattccaatttcaccaaagcattaa

SEQ ID NO: 570661 - DNA, 33 bp, Homo sapien
tgttatctgcaaatgacgatgaattgctttcct

SEQ ID NO: 570662 - DNA, 33 bp, Homo sapien
tgttatctgcaaatgatgatgaattgctttcct

SEQ ID NO: 570663 - DNA, 33 bp, Homo sapien
acaggcacaaaataccagcttggaaaatggttg

SEQ ID NO: 570664 - DNA, 33 bp, Homo sapien
acaggcacaaaataccggcttggaaaatggttg

SEQ ID NO: 570665 - DNA, 33 bp, Homo sapien
caacatccggttcacactggccacatccaggac

SEQ ID NO: 570666 - DNA, 33 bp, Homo sapien
caacatccggttcacattggccacatccaggac

SEQ ID NO: 570667 - DNA, 33 bp, Homo sapien
gaaattacacagttgtaaagtggcaaacacaag

SEQ ID NO: 570668 - DNA, 33 bp, Homo sapien
gaaattacacagttgtgaagtggcaaacacaag

SEQ ID NO: 570669 - DNA, 33 bp, Homo sapien
cactgggaagttgctccccttaagtctcagttt

SEQ ID NO: 570670 - DNA, 33 bp, Homo sapien
cactgggaagttgctctccttaagtctcagttt

SEQ ID NO: 570671 - DNA, 33 bp, Homo sapien
gactggccactcttcacgatgacaaaagagctc

SEQ ID NO: 570672 - DNA, 33 bp, Homo sapien
gactggccactcttcatgatgacaaaagagctc

SEQ ID NO: 570673 - DNA, 33 bp, Homo sapien
atagcgtccatatacaactatacaccacatctg

SEQ ID NO: 570674 - DNA, 33 bp, Homo sapien
atagcgtccatatacagctatacaccacatctg

SEQ ID NO: 570675 - DNA, 33 bp, Homo sapien
ttctggcacttgcttcccttcccatctcgtggc

SEQ ID NO: 570676 - DNA, 33 bp, Homo sapien
ttctggcacttgcttcgcttcccatctcgtggc

SEQ ID NO: 570677 - DNA, 33 bp, Homo sapien
cacctgtggctcccaaaaagctctaccttgtca

SEQ ID NO: 570678 - DNA, 33 bp, Homo sapien
cacctgtggctcccaagaagctctaccttgtca

SEQ ID NO: 570679 - DNA, 33 bp, Homo sapien
catatatggcagagaaagtcaatattttcaaat

SEQ ID NO: 570680 - DNA, 33 bp, Homo sapien
catatatggcagagaacgtcaatattttcaaat

SEQ ID NO: 570681 - DNA, 33 bp, Homo sapien
cccaactgtttaatcacaacagaagaggaaaac

SEQ ID NO: 570682 - DNA, 33 bp, Homo sapien
cccaactgtttaatcataacagaagaggaaaac

SEQ ID NO: 570683 - DNA, 33 bp, Homo sapien
tttcctattatagctgcaatggtaaccaactct

SEQ ID NO: 570684 - DNA, 33 bp, Homo sapien
tttcctattatagctgtaatggtaaccaactct

SEQ ID NO: 570685 - DNA, 33 bp, Homo sapien
atataatatgcttgcagtattcctgtattttcc

SEQ ID NO: 570686 - DNA, 33 bp, Homo sapien
atataatatgcttgcattattcctgtattttcc

SEQ ID NO: 570687 - DNA, 33 bp, Homo sapien
ctctcctgtgaaatgaggcataatcaaacattt

SEQ ID NO: 570688 - DNA, 33 bp, Homo sapien
ctctcctgtgaaatgatgcataatcaaacattt

SEQ ID NO: 570689 - DNA, 33 bp, Homo sapien
ttccatacaccatttcgcaataacacacaagtt

SEQ ID NO: 570690 - DNA, 33 bp, Homo sapien
ttccatacaccatttctcaataacacacaagtt

SEQ ID NO: 570691 - DNA, 33 bp, Homo sapien
cttagctcagttttagacatgttaaatagctaa

SEQ ID NO: 570692 - DNA, 33 bp, Homo sapien
cttagctcagttttaggcatgttaaatagctaa

SEQ ID NO: 570693 - DNA, 33 bp, Homo sapien
tcttagtcatgtggatcaataatgtttcacccc

SEQ ID NO: 570694 - DNA, 33 bp, Homo sapien
tcttagtcatgtggattaataatgtttcacccc

SEQ ID NO: 570695 - DNA, 33 bp, Homo sapien
acttggttaccaacagacacaatttcaatgaga

SEQ ID NO: 570696 - DNA, 33 bp, Homo sapien
acttggttaccaacaggcacaatttcaatgaga

SEQ ID NO: 570697 - DNA, 33 bp, Homo sapien
agacagataattcaagcagagttgactaaaggc

SEQ ID NO: 570698 - DNA, 33 bp, Homo sapien
agacagataattcaaggagagttgactaaaggc

SEQ ID NO: 570699 - DNA, 33 bp, Homo sapien
gtcttcctagataatcacagtctaagcctcact

SEQ ID NO: 570700 - DNA, 33 bp, Homo sapien
gtcttcctagataatcgcagtctaagcctcact

SEQ ID NO: 570701 - DNA, 33 bp, Homo sapien
gtggtcctttcaataaactgtgcccagaggcag

SEQ ID NO: 570702 - DNA, 33 bp, Homo sapien
gtggtcctttcaataatctgtgcccagaggcag

SEQ ID NO: 570703 - DNA, 33 bp, Homo sapien
taccaccctcttgtgcagatcacaattgtgaga

SEQ ID NO: 570704 - DNA, 33 bp, Homo sapien
taccaccctcttgtgctgatcacaattgtgaga

SEQ ID NO: 570705 - DNA, 33 bp, Homo sapien
ctagcatcattaacataacttgcaggcatgtta

SEQ ID NO: 570706 - DNA, 33 bp, Homo sapien
ctagcatcattaacatcacttgcaggcatgtta

SEQ ID NO: 570707 - DNA, 33 bp, Homo sapien
ttatcagaaaaatcaacgtaataataaaatggc

SEQ ID NO: 570708 - DNA, 33 bp, Homo sapien
ttatcagaaaaatcaaggtaataataaaatggc

SEQ ID NO: 570709 - DNA, 33 bp, Homo sapien
gctaggcaaggtgtatcagtatgagtacctgcc

SEQ ID NO: 570710 - DNA, 33 bp, Homo sapien
gctaggcaaggtgtattagtatgagtacctgcc

SEQ ID NO: 570711 - DNA, 33 bp, Homo sapien
aaccttttggtatgtcacatcttactcaccttt

SEQ ID NO: 570712 - DNA, 33 bp, Homo sapien
aaccttttggtatgtctcatcttactcaccttt

SEQ ID NO: 570713 - DNA, 33 bp, Homo sapien
atttaacgatggagaaagaaaaaggagacaata

SEQ ID NO: 570714 - DNA, 33 bp, Homo sapien
atttaacgatggagaaggaaaaaggagacaata

SEQ ID NO: 570715 - DNA, 33 bp, Homo sapien
atttcatttcttcttccatttaacagcatggaa

SEQ ID NO: 570716 - DNA, 33 bp, Homo sapien
atttcatttcttcttctatttaacagcatggaa

SEQ ID NO: 570717 - DNA, 33 bp, Homo sapien
aaggagcatctatccccggcagttgagaaactt

SEQ ID NO: 570718 - DNA, 33 bp, Homo sapien
aaggagcatctatccctggcagttgagaaactt

SEQ ID NO: 570719 - DNA, 33 bp, Homo sapien
tacaggaaagtcagtagagaattggagattagt

SEQ ID NO: 570720 - DNA, 33 bp, Homo sapien
tacaggaaagtcagtatagaattggagattagt

SEQ ID NO: 570721 - DNA, 33 bp, Homo sapien
ggtacatgttctgctaaaacagggaacacagct

SEQ ID NO: 570722 - DNA, 33 bp, Homo sapien
ggtacatgttctgctacaacagggaacacagct

SEQ ID NO: 570723 - DNA, 33 bp, Homo sapien
tatgttttctattagacgcatgtatttaaataa

SEQ ID NO: 570724 - DNA, 33 bp, Homo sapien
tatgttttctattagatgcatgtatttaaataa

SEQ ID NO: 570725 - DNA, 33 bp, Homo sapien
gtcacagcctcaacccacaacacccagtttatc

SEQ ID NO: 570726 - DNA, 33 bp, Homo sapien
gtcacagcctcaacccgcaacacccagtttatc

SEQ ID NO: 570727 - DNA, 33 bp, Homo sapien
tgctttgcccaaaggacctgtgagcatgaataa

SEQ ID NO: 570728 - DNA, 33 bp, Homo sapien
tgctttgcccaaaggatctgtgagcatgaataa

SEQ ID NO: 570729 - DNA, 33 bp, Homo sapien
aacaattggagtgtaaagagatcctgattcaac

SEQ ID NO: 570730 - DNA, 33 bp, Homo sapien
aacaattggagtgtaaggagatcctgattcaac

SEQ ID NO: 570731 - DNA, 33 bp, Homo sapien
ttccatgcagaaagtgcaaattaatggtcacat

SEQ ID NO: 570732 - DNA, 33 bp, Homo sapien
ttccatgcagaaagtgtaaattaatggtcacat

SEQ ID NO: 570733 - DNA, 33 bp, Homo sapien
gcatggaaatgatacacgaagggaataaaaagg

SEQ ID NO: 570734 - DNA, 33 bp, Homo sapien
gcatggaaatgatacatgaagggaataaaaagg

SEQ ID NO: 570735 - DNA, 33 bp, Homo sapien
ccagatagtaaatattcaaggttttgcaccttt

SEQ ID NO: 570736 - DNA, 33 bp, Homo sapien
ccagatagtaaatatttaaggttttgcaccttt

SEQ ID NO: 570737 - DNA, 33 bp, Homo sapien
cactttaggcagccggcaatcctcctaatctca

SEQ ID NO: 570738 - DNA, 33 bp, Homo sapien
cactttaggcagccggtaatcctcctaatctca

SEQ ID NO: 570739 - DNA, 33 bp, Homo sapien
agaggcaagtatctcactatttgcccaagcggg

SEQ ID NO: 570740 - DNA, 33 bp, Homo sapien
agaggcaagtatctcagtatttgcccaagcggg

SEQ ID NO: 570741 - DNA, 33 bp, Homo sapien
atgctgtgttttccacaatactggtactaccgg

SEQ ID NO: 570742 - DNA, 33 bp, Homo sapien
atgctgtgttttccacgatactggtactaccgg

SEQ ID NO: 570743 - DNA, 33 bp, Homo sapien
tctgttgcgggttaagccatcagattttggggt

SEQ ID NO: 570744 - DNA, 33 bp, Homo sapien
tctgttgcgggttaagtcatcagattttggggt

SEQ ID NO: 570745 - DNA, 33 bp, Homo sapien
taggctaggtatgctcaaggaacaaatgacccc

SEQ ID NO: 570746 - DNA, 33 bp, Homo sapien
taggctaggtatgctcgaggaacaaatgacccc

SEQ ID NO: 570747 - DNA, 33 bp, Homo sapien
aatatatagaactccaaatgcaaacagagaaag

SEQ ID NO: 570748 - DNA, 33 bp, Homo sapien
aatatatagaactccagatgcaaacagagaaag

SEQ ID NO: 570749 - DNA, 33 bp, Homo sapien
atcaagtagacaaaaaataactagagacattga

SEQ ID NO: 570750 - DNA, 33 bp, Homo sapien
atcaagtagacaaaaagtaactagagacattga

SEQ ID NO: 570751 - DNA, 33 bp, Homo sapien
tcaggcccatttcaaaatatgtcagggaagtat

SEQ ID NO: 570752 - DNA, 33 bp, Homo sapien
tcaggcccatttcaaactatgtcagggaagtat

SEQ ID NO: 570753 - DNA, 33 bp, Homo sapien
ggggtagtgagtagaccggcataaagaggctta

SEQ ID NO: 570754 - DNA, 33 bp, Homo sapien
ggggtagtgagtagactggcataaagaggctta

SEQ ID NO: 570755 - DNA, 33 bp, Homo sapien
ttaagcaatcatattacggtaaaaaagaacaat

SEQ ID NO: 570756 - DNA, 33 bp, Homo sapien
ttaagcaatcatattatggtaaaaaagaacaat

SEQ ID NO: 570757 - DNA, 33 bp, Homo sapien
cttgggcttcataaaaccaaattagaagtagac

SEQ ID NO: 570758 - DNA, 33 bp, Homo sapien
cttgggcttcataaaatcaaattagaagtagac

SEQ ID NO: 570759 - DNA, 33 bp, Homo sapien
aagaattggcttgtataaccacagcagtcccag

SEQ ID NO: 570760 - DNA, 33 bp, Homo sapien
aagaattggcttgtatgaccacagcagtcccag

SEQ ID NO: 570761 - DNA, 33 bp, Homo sapien
ctaatttattctgcacaatgaatagagagaaat

SEQ ID NO: 570762 - DNA, 33 bp, Homo sapien
ctaatttattctgcacgatgaatagagagaaat

SEQ ID NO: 570763 - DNA, 33 bp, Homo sapien
tttgatcaattttatgcatccatgtgtacttgg

SEQ ID NO: 570764 - DNA, 33 bp, Homo sapien
tttgatcaattttatgtatccatgtgtacttgg

SEQ ID NO: 570765 - DNA, 33 bp, Homo sapien
ctcagctcttacagaaatacataacagtgcttg

SEQ ID NO: 570766 - DNA, 33 bp, Homo sapien
ctcagctcttacagaattacataacagtgcttg

SEQ ID NO: 570767 - DNA, 33 bp, Homo sapien
ctgggactcttaaacactacgctaaatctaccc

SEQ ID NO: 570768 - DNA, 33 bp, Homo sapien
ctgggactcttaaacattacgctaaatctaccc

SEQ ID NO: 570769 - DNA, 33 bp, Homo sapien
aaaaagaatctcgccagagtgggtgtgcattga

SEQ ID NO: 570770 - DNA, 33 bp, Homo sapien
aaaaagaatctcgccatagtgggtgtgcattga

SEQ ID NO: 570771 - DNA, 33 bp, Homo sapien
cacacaaatacaccagaaatgtttacctatgta

SEQ ID NO: 570772 - DNA, 33 bp, Homo sapien
cacacaaatacaccaggaatgtttacctatgta

SEQ ID NO: 570773 - DNA, 33 bp, Homo sapien
caacatttacccactacgtttgctcattgctag

SEQ ID NO: 570774 - DNA, 33 bp, Homo sapien
caacatttacccactatgtttgctcattgctag

SEQ ID NO: 570775 - DNA, 33 bp, Homo sapien
ttaagagaattactgaaacgtaacacagagaca

SEQ ID NO: 570776 - DNA, 33 bp, Homo sapien
ttaagagaattactgatacgtaacacagagaca

SEQ ID NO: 570777 - DNA, 33 bp, Homo sapien
tctcactgtccttcctaaagtcacatacgtacc

SEQ ID NO: 570778 - DNA, 33 bp, Homo sapien
tctcactgtccttcctgaagtcacatacgtacc

SEQ ID NO: 570779 - DNA, 33 bp, Homo sapien
ttctattggattcaacggatagaaactcaacta

SEQ ID NO: 570780 - DNA, 33 bp, Homo sapien
ttctattggattcaactgatagaaactcaacta

SEQ ID NO: 570781 - DNA, 33 bp, Homo sapien
ttaagtgtgtgaaaaacatccaatcttatccca

SEQ ID NO: 570782 - DNA, 33 bp, Homo sapien
ttaagtgtgtgaaaaatatccaatcttatccca

SEQ ID NO: 570783 - DNA, 33 bp, Homo sapien
gtggaactgttgttcacgcttcctggctacttg

SEQ ID NO: 570784 - DNA, 33 bp, Homo sapien
gtggaactgttgttcatgcttcctggctacttg

SEQ ID NO: 570785 - DNA, 33 bp, Homo sapien
gggccaggctgacctccaaaattgactgtaccg

SEQ ID NO: 570786 - DNA, 33 bp, Homo sapien
gggccaggctgacctctaaaattgactgtaccg

SEQ ID NO: 570787 - DNA, 33 bp, Homo sapien
gagatagaaggtaaaaatgagagagagtgaaaa

SEQ ID NO: 570788 - DNA, 33 bp, Homo sapien
gagatagaaggtaaaagtgagagagagtgaaaa

SEQ ID NO: 570789 - DNA, 33 bp, Homo sapien
ttacctggataagcccaatagcccagctccaat

SEQ ID NO: 570790 - DNA, 33 bp, Homo sapien
ttacctggataagccccatagcccagctccaat

SEQ ID NO: 570791 - DNA, 33 bp, Homo sapien
aaattacatgcaaatacgacctcattttatatg

SEQ ID NO: 570792 - DNA, 33 bp, Homo sapien
aaattacatgcaaatatgacctcattttatatg

SEQ ID NO: 570793 - DNA, 33 bp, Homo sapien
taattccacttctagaaatctgttgtaatagaa

SEQ ID NO: 570794 - DNA, 33 bp, Homo sapien
taattccacttctagagatctgttgtaatagaa

SEQ ID NO: 570795 - DNA, 33 bp, Homo sapien
aggcgattgcagatccaagatagggcagatggt

SEQ ID NO: 570796 - DNA, 33 bp, Homo sapien
aggcgattgcagatccgagatagggcagatggt

SEQ ID NO: 570797 - DNA, 33 bp, Homo sapien
ttgccattgtcagttcccctaccaagtatgcgt

SEQ ID NO: 570798 - DNA, 33 bp, Homo sapien
ttgccattgtcagttctcctaccaagtatgcgt

SEQ ID NO: 570799 - DNA, 33 bp, Homo sapien
cctcactgttcttcatcaactgtcaggggttaa

SEQ ID NO: 570800 - DNA, 33 bp, Homo sapien
cctcactgttcttcattaactgtcaggggttaa

SEQ ID NO: 570801 - DNA, 33 bp, Homo sapien
tgccagtcataaacacagcaacttccatttgag

SEQ ID NO: 570802 - DNA, 33 bp, Homo sapien
tgccagtcataaacacggcaacttccatttgag

SEQ ID NO: 570803 - DNA, 33 bp, Homo sapien
tatttacactttgtaaggttcgttctctttctc

SEQ ID NO: 570804 - DNA, 33 bp, Homo sapien
tatttacactttgtaatgttcgttctctttctc

SEQ ID NO: 570805 - DNA, 33 bp, Homo sapien
ctctgactctcaggtacagaatgtccagctcaa

SEQ ID NO: 570806 - DNA, 33 bp, Homo sapien
ctctgactctcaggtatagaatgtccagctcaa

SEQ ID NO: 570807 - DNA, 33 bp, Homo sapien
aagaagatactggcagactagaaccttgtaagc

SEQ ID NO: 570808 - DNA, 33 bp, Homo sapien
aagaagatactggcaggctagaaccttgtaagc

SEQ ID NO: 570809 - DNA, 33 bp, Homo sapien
agtaagatattgaggacctggtggcaagggagc

SEQ ID NO: 570810 - DNA, 33 bp, Homo sapien
agtaagatattgaggatctggtggcaagggagc

SEQ ID NO: 570811 - DNA, 33 bp, Homo sapien
ctggagctccttagcccatgcagtgcctgacac

SEQ ID NO: 570812 - DNA, 33 bp, Homo sapien
ctggagctccttagcctatgcagtgcctgacac

SEQ ID NO: 570813 - DNA, 33 bp, Homo sapien
aagagtgatgtagtaaacttaggaaactggatg

SEQ ID NO: 570814 - DNA, 33 bp, Homo sapien
aagagtgatgtagtaagcttaggaaactggatg

SEQ ID NO: 570815 - DNA, 33 bp, Homo sapien
tgattgcccttccagacgtaacctaactagttc

SEQ ID NO: 570816 - DNA, 33 bp, Homo sapien
tgattgcccttccagatgtaacctaactagttc

SEQ ID NO: 570817 - DNA, 33 bp, Homo sapien
aatactacctatcggcacaatgtacactatccg

SEQ ID NO: 570818 - DNA, 33 bp, Homo sapien
aatactacctatcggcgcaatgtacactatccg

SEQ ID NO: 570819 - DNA, 33 bp, Homo sapien
gacagtcagtctgctaaccagaaattgatagct

SEQ ID NO: 570820 - DNA, 33 bp, Homo sapien
gacagtcagtctgctagccagaaattgatagct

SEQ ID NO: 570821 - DNA, 33 bp, Homo sapien
ctccatgccttgttaccggctctgcttctcaat

SEQ ID NO: 570822 - DNA, 33 bp, Homo sapien
ctccatgccttgttactggctctgcttctcaat

SEQ ID NO: 570823 - DNA, 33 bp, Homo sapien
gactggagcatttccaataagaccctcatgcta

SEQ ID NO: 570824 - DNA, 33 bp, Homo sapien
gactggagcatttccattaagaccctcatgcta

SEQ ID NO: 570825 - DNA, 33 bp, Homo sapien
catttaactctcctgacaactctgtgagggaaa

SEQ ID NO: 570826 - DNA, 33 bp, Homo sapien
catttaactctcctgataactctgtgagggaaa

SEQ ID NO: 570827 - DNA, 33 bp, Homo sapien
gacctttctgcggagacgtctaagaagtgagta

SEQ ID NO: 570828 - DNA, 33 bp, Homo sapien
gacctttctgcggagatgtctaagaagtgagta

SEQ ID NO: 570829 - DNA, 33 bp, Homo sapien
tcagccatcgattctcaacctcaattttcacaa

SEQ ID NO: 570830 - DNA, 33 bp, Homo sapien
tcagccatcgattctcgacctcaattttcacaa

SEQ ID NO: 570831 - DNA, 33 bp, Homo sapien
acagccgccattcatacaataccttttggttga

SEQ ID NO: 570832 - DNA, 33 bp, Homo sapien
acagccgccattcatataataccttttggttga

SEQ ID NO: 570833 - DNA, 33 bp, Homo sapien
attgagtacttattccagagacatgagaccatg

SEQ ID NO: 570834 - DNA, 33 bp, Homo sapien
attgagtacttattccggagacatgagaccatg

SEQ ID NO: 570835 - DNA, 33 bp, Homo sapien
gcacctcagctgtggccattgagtacttattcc

SEQ ID NO: 570836 - DNA, 33 bp, Homo sapien
gcacctcagctgtggctattgagtacttattcc

SEQ ID NO: 570837 - DNA, 33 bp, Homo sapien
cattcacaccaggtgacgccatactgaacagca

SEQ ID NO: 570838 - DNA, 33 bp, Homo sapien
cattcacaccaggtgatgccatactgaacagca

SEQ ID NO: 570839 - DNA, 33 bp, Homo sapien
atggacctgaattatacgttgaagtcctaaccc

SEQ ID NO: 570840 - DNA, 33 bp, Homo sapien
atggacctgaattatatgttgaagtcctaaccc

SEQ ID NO: 570841 - DNA, 33 bp, Homo sapien
ttcctgaagttgagggaatagaggagcatggtg

SEQ ID NO: 570842 - DNA, 33 bp, Homo sapien
ttcctgaagttgaggggatagaggagcatggtg

SEQ ID NO: 570843 - DNA, 33 bp, Homo sapien
tcctggtgactctcaaatgtctacttccagtct

SEQ ID NO: 570844 - DNA, 33 bp, Homo sapien
tcctggtgactctcaagtgtctacttccagtct

SEQ ID NO: 570845 - DNA, 33 bp, Homo sapien
gaaacagaaaagttcacggcttcaaaatgcatg

SEQ ID NO: 570846 - DNA, 33 bp, Homo sapien
gaaacagaaaagttcatggcttcaaaatgcatg

SEQ ID NO: 570847 - DNA, 33 bp, Homo sapien
atattcacttcatccacgtgcttcttctgggac

SEQ ID NO: 570848 - DNA, 33 bp, Homo sapien
atattcacttcatccatgtgcttcttctgggac

SEQ ID NO: 570849 - DNA, 33 bp, Homo sapien
gcaacaacatgatggaactgtatgctattcaca

SEQ ID NO: 570850 - DNA, 33 bp, Homo sapien
gcaacaacatgatggacctgtatgctattcaca

SEQ ID NO: 570851 - DNA, 33 bp, Homo sapien
tgagttattaacattgaaagtagcccaatgcat

SEQ ID NO: 570852 - DNA, 33 bp, Homo sapien
tgagttattaacattgcaagtagcccaatgcat

SEQ ID NO: 570853 - DNA, 33 bp, Homo sapien
agtcctgactttttacacttgtttgcattttgc

SEQ ID NO: 570854 - DNA, 33 bp, Homo sapien
agtcctgactttttacgcttgtttgcattttgc

SEQ ID NO: 570855 - DNA, 33 bp, Homo sapien
tttcttcatgcttaaactctcataaaattctgg

SEQ ID NO: 570856 - DNA, 33 bp, Homo sapien
tttcttcatgcttaaagtctcataaaattctgg

SEQ ID NO: 570857 - DNA, 33 bp, Homo sapien
ttgagctcacatctacagaggcttcaacagaac

SEQ ID NO: 570858 - DNA, 33 bp, Homo sapien
ttgagctcacatctacggaggcttcaacagaac

SEQ ID NO: 570859 - DNA, 33 bp, Homo sapien
agtttgtttctaaggacgatcagtaacgaatgg

SEQ ID NO: 570860 - DNA, 33 bp, Homo sapien
agtttgtttctaaggatgatcagtaacgaatgg

SEQ ID NO: 570861 - DNA, 33 bp, Homo sapien
ctattgctctattccacgtgacaaaacatgagt

SEQ ID NO: 570862 - DNA, 33 bp, Homo sapien
ctattgctctattccatgtgacaaaacatgagt

SEQ ID NO: 570863 - DNA, 33 bp, Homo sapien
attaagagctaacttccagggtattgttaaaat

SEQ ID NO: 570864 - DNA, 33 bp, Homo sapien
attaagagctaacttctagggtattgttaaaat

SEQ ID NO: 570865 - DNA, 33 bp, Homo sapien
ctgaaattgtgtcataagtaaacaaatgggcat

SEQ ID NO: 570866 - DNA, 33 bp, Homo sapien
ctgaaattgtgtcatacgtaaacaaatgggcat

SEQ ID NO: 570867 - DNA, 33 bp, Homo sapien
aacccagatctatttaactcaaaaggccataat

SEQ ID NO: 570868 - DNA, 33 bp, Homo sapien
aacccagatctatttacctcaaaaggccataat

SEQ ID NO: 570869 - DNA, 33 bp, Homo sapien
ccgacagattctgtcccagaacctctagaacca

SEQ ID NO: 570870 - DNA, 33 bp, Homo sapien
ccgacagattctgtcctagaacctctagaacca

SEQ ID NO: 570871 - DNA, 33 bp, Homo sapien
atacttgtgttgattaaagaagattctcgctgg

SEQ ID NO: 570872 - DNA, 33 bp, Homo sapien
atacttgtgttgattagagaagattctcgctgg

SEQ ID NO: 570873 - DNA, 33 bp, Homo sapien
ctcaagaagaacagacacctccatcacttcaat

SEQ ID NO: 570874 - DNA, 33 bp, Homo sapien
ctcaagaagaacagactcctccatcacttcaat

SEQ ID NO: 570875 - DNA, 33 bp, Homo sapien
cactacacagataatcagaaggcagctgctaag

SEQ ID NO: 570876 - DNA, 33 bp, Homo sapien
cactacacagataatcggaaggcagctgctaag

SEQ ID NO: 570877 - DNA, 33 bp, Homo sapien
gtaactttccagcctgcatctggttatgattgc

SEQ ID NO: 570878 - DNA, 33 bp, Homo sapien
gtaactttccagcctgtatctggttatgattgc

SEQ ID NO: 570879 - DNA, 33 bp, Homo sapien
ttttcctcgcagatcaagaattcccaaaggaac

SEQ ID NO: 570880 - DNA, 33 bp, Homo sapien
ttttcctcgcagatcatgaattcccaaaggaac

SEQ ID NO: 570881 - DNA, 33 bp, Homo sapien
tgatctgggcaaacaggatgatgtttaccaaat

SEQ ID NO: 570882 - DNA, 33 bp, Homo sapien
tgatctgggcaaacagtatgatgtttaccaaat

SEQ ID NO: 570883 - DNA, 33 bp, Homo sapien
tctgaaggattgagtaagaggtgctccaaaggg

SEQ ID NO: 570884 - DNA, 33 bp, Homo sapien
tctgaaggattgagtaggaggtgctccaaaggg

SEQ ID NO: 570885 - DNA, 33 bp, Homo sapien
ttgacctgagggcatcacaacttccttgttttc

SEQ ID NO: 570886 - DNA, 33 bp, Homo sapien
ttgacctgagggcatcgcaacttccttgttttc

SEQ ID NO: 570887 - DNA, 33 bp, Homo sapien
gtgttaaagtaccaaaagctccaatttactaag

SEQ ID NO: 570888 - DNA, 33 bp, Homo sapien
gtgttaaagtaccaaaggctccaatttactaag

SEQ ID NO: 570889 - DNA, 33 bp, Homo sapien
aatttgcgttttcaaaacaagagttgtagtgga

SEQ ID NO: 570890 - DNA, 33 bp, Homo sapien
aatttgcgttttcaaagcaagagttgtagtgga

SEQ ID NO: 570891 - DNA, 33 bp, Homo sapien
tggaaagaacttcactaacaatctgtgtgttct

SEQ ID NO: 570892 - DNA, 33 bp, Homo sapien
tggaaagaacttcactcacaatctgtgtgttct

SEQ ID NO: 570893 - DNA, 33 bp, Homo sapien
ctcgcagttggttctaagaaaacatgagataag

SEQ ID NO: 570894 - DNA, 33 bp, Homo sapien
ctcgcagttggttctaggaaaacatgagataag

SEQ ID NO: 570895 - DNA, 33 bp, Homo sapien
ttctggtggtcagcaactgaatactgctgtctg

SEQ ID NO: 570896 - DNA, 33 bp, Homo sapien
ttctggtggtcagcaattgaatactgctgtctg

SEQ ID NO: 570897 - DNA, 33 bp, Homo sapien
tgattaaactttctacaatttatgcgcaacact

SEQ ID NO: 570898 - DNA, 33 bp, Homo sapien
tgattaaactttctacgatttatgcgcaacact

SEQ ID NO: 570899 - DNA, 33 bp, Homo sapien
agtatgtacttaagctcaagtctcatcattgat

SEQ ID NO: 570900 - DNA, 33 bp, Homo sapien
agtatgtacttaagctgaagtctcatcattgat

SEQ ID NO: 570901 - DNA, 33 bp, Homo sapien
atggattcccttcaataaaaaccctctgtttga

SEQ ID NO: 570902 - DNA, 33 bp, Homo sapien
atggattcccttcaattaaaaccctctgtttga

SEQ ID NO: 570903 - DNA, 33 bp, Homo sapien
cgctgggctccaagaacagaattagtggcttca

SEQ ID NO: 570904 - DNA, 33 bp, Homo sapien
cgctgggctccaagaatagaattagtggcttca

SEQ ID NO: 570905 - DNA, 33 bp, Homo sapien
ctgaccatttccttaccggttatcttcctttcg

SEQ ID NO: 570906 - DNA, 33 bp, Homo sapien
ctgaccatttccttactggttatcttcctttcg

SEQ ID NO: 570907 - DNA, 33 bp, Homo sapien
aacatttgaattaacaatccttgctgtgtgtgt

SEQ ID NO: 570908 - DNA, 33 bp, Homo sapien
aacatttgaattaacagtccttgctgtgtgtgt

SEQ ID NO: 570909 - DNA, 33 bp, Homo sapien
gaagcatcacttaataataaagctcgtcctaaa

SEQ ID NO: 570910 - DNA, 33 bp, Homo sapien
gaagcatcacttaatagtaaagctcgtcctaaa

SEQ ID NO: 570911 - DNA, 33 bp, Homo sapien
aaatcatattccaaataagcatcaaaaataata

SEQ ID NO: 570912 - DNA, 33 bp, Homo sapien
aaatcatattccaaatgagcatcaaaaataata

SEQ ID NO: 570913 - DNA, 33 bp, Homo sapien
acttgttcaagccactcaggaggtagctatgga

SEQ ID NO: 570914 - DNA, 33 bp, Homo sapien
acttgttcaagccacttaggaggtagctatgga

SEQ ID NO: 570915 - DNA, 33 bp, Homo sapien
ggtccaggtgccaagacagtccctttccccaag

SEQ ID NO: 570916 - DNA, 33 bp, Homo sapien
ggtccaggtgccaagatagtccctttccccaag

SEQ ID NO: 570917 - DNA, 33 bp, Homo sapien
cctttggtaggaatgaaccctttcgttgcttca

SEQ ID NO: 570918 - DNA, 33 bp, Homo sapien
cctttggtaggaatgacccctttcgttgcttca

SEQ ID NO: 570919 - DNA, 33 bp, Homo sapien
ggtgactcatagacccaatatggtgagaagaat

SEQ ID NO: 570920 - DNA, 33 bp, Homo sapien
ggtgactcatagacccgatatggtgagaagaat

SEQ ID NO: 570921 - DNA, 33 bp, Homo sapien
ctatgtgactaaatcccctggacattagcaact

SEQ ID NO: 570922 - DNA, 33 bp, Homo sapien
ctatgtgactaaatcctctggacattagcaact

SEQ ID NO: 570923 - DNA, 33 bp, Homo sapien
ttttgggaggactaggaattgtatgctgggctc

SEQ ID NO: 570924 - DNA, 33 bp, Homo sapien
ttttgggaggactaggtattgtatgctgggctc

SEQ ID NO: 570925 - DNA, 33 bp, Homo sapien
aaatctacctgcatcagagagcttttgggagga

SEQ ID NO: 570926 - DNA, 33 bp, Homo sapien
aaatctacctgcatcatagagcttttgggagga

SEQ ID NO: 570927 - DNA, 33 bp, Homo sapien
gtcattcttctagaaaatggcagaacatagaac

SEQ ID NO: 570928 - DNA, 33 bp, Homo sapien
gtcattcttctagaaagtggcagaacatagaac

SEQ ID NO: 570929 - DNA, 33 bp, Homo sapien
atctaggtaattctcacagcagattttctgagg

SEQ ID NO: 570930 - DNA, 33 bp, Homo sapien
atctaggtaattctcatagcagattttctgagg

SEQ ID NO: 570931 - DNA, 33 bp, Homo sapien
aaggcgagaagggccacggtaacagacagagcc

SEQ ID NO: 570932 - DNA, 33 bp, Homo sapien
aaggcgagaagggccagggtaacagacagagcc

SEQ ID NO: 570933 - DNA, 33 bp, Homo sapien
cacatctgcccctggacagacatataaagcaac

SEQ ID NO: 570934 - DNA, 33 bp, Homo sapien
cacatctgcccctggatagacatataaagcaac

SEQ ID NO: 570935 - DNA, 33 bp, Homo sapien
ttctcttttaaaatgaaatgtgcttgcaccagc

SEQ ID NO: 570936 - DNA, 33 bp, Homo sapien
ttctcttttaaaatgagatgtgcttgcaccagc

SEQ ID NO: 570937 - DNA, 33 bp, Homo sapien
ataagaaccaaagcaccagcatattttcctaca

SEQ ID NO: 570938 - DNA, 33 bp, Homo sapien
ataagaaccaaagcactagcatattttcctaca

SEQ ID NO: 570939 - DNA, 33 bp, Homo sapien
ttgtaccagaataggaacctgggcttcatcctg

SEQ ID NO: 570940 - DNA, 33 bp, Homo sapien
ttgtaccagaataggagcctgggcttcatcctg

SEQ ID NO: 570941 - DNA, 33 bp, Homo sapien
cttgcaaaatccagtacggtagaccctgcattc

SEQ ID NO: 570942 - DNA, 33 bp, Homo sapien
cttgcaaaatccagtatggtagaccctgcattc

SEQ ID NO: 570943 - DNA, 33 bp, Homo sapien
accccccactgttcaaagtgaaggagactgggt

SEQ ID NO: 570944 - DNA, 33 bp, Homo sapien
accccccactgttcaatgtgaaggagactgggt

SEQ ID NO: 570945 - DNA, 33 bp, Homo sapien
gaatttcagagtgctaaactaactcccatagcc

SEQ ID NO: 570946 - DNA, 33 bp, Homo sapien
gaatttcagagtgctacactaactcccatagcc

SEQ ID NO: 570947 - DNA, 33 bp, Homo sapien
catttcgataattccacgtgtcttgtttttttc

SEQ ID NO: 570948 - DNA, 33 bp, Homo sapien
catttcgataattccaggtgtcttgtttttttc

SEQ ID NO: 570949 - DNA, 33 bp, Homo sapien
tggtctccctggggacactccgtcttccgtaaa

SEQ ID NO: 570950 - DNA, 33 bp, Homo sapien
tggtctccctggggacgctccgtcttccgtaaa

SEQ ID NO: 570951 - DNA, 33 bp, Homo sapien
caaggctgtgaagacaaaatgaagatttataca

SEQ ID NO: 570952 - DNA, 33 bp, Homo sapien
caaggctgtgaagacacaatgaagatttataca

SEQ ID NO: 570953 - DNA, 33 bp, Homo sapien
ttttattcgggcaagcaaatggaaactttccag

SEQ ID NO: 570954 - DNA, 33 bp, Homo sapien
ttttattcgggcaagcgaatggaaactttccag

SEQ ID NO: 570955 - DNA, 33 bp, Homo sapien
taaacatcagctgttaaacatagtatcattaca

SEQ ID NO: 570956 - DNA, 33 bp, Homo sapien
taaacatcagctgttatacatagtatcattaca

SEQ ID NO: 570957 - DNA, 33 bp, Homo sapien
cagaaagaagggccaccgacatacctgctatgc

SEQ ID NO: 570958 - DNA, 33 bp, Homo sapien
cagaaagaagggccactgacatacctgctatgc

SEQ ID NO: 570959 - DNA, 33 bp, Homo sapien
ggaaagtgggatgaacaagcagaaataacagga

SEQ ID NO: 570960 - DNA, 33 bp, Homo sapien
ggaaagtgggatgaacgagcagaaataacagga

SEQ ID NO: 570961 - DNA, 33 bp, Homo sapien
caagagaatgagattcaacagcctgcaccactt

SEQ ID NO: 570962 - DNA, 33 bp, Homo sapien
caagagaatgagattcgacagcctgcaccactt

SEQ ID NO: 570963 - DNA, 33 bp, Homo sapien
ctcagcactgaggagaaaataaggagtggtgag

SEQ ID NO: 570964 - DNA, 33 bp, Homo sapien
ctcagcactgaggagacaataaggagtggtgag

SEQ ID NO: 570965 - DNA, 33 bp, Homo sapien
gagaacttatattccacgagcttcaaatcactc

SEQ ID NO: 570966 - DNA, 33 bp, Homo sapien
gagaacttatattccatgagcttcaaatcactc

SEQ ID NO: 570967 - DNA, 33 bp, Homo sapien
ctaaatgtcactaacgacaaggcatttttgccc

SEQ ID NO: 570968 - DNA, 33 bp, Homo sapien
ctaaatgtcactaacgtcaaggcatttttgccc

SEQ ID NO: 570969 - DNA, 33 bp, Homo sapien
ccagtatttgtccatacagttaagtgaaatttt

SEQ ID NO: 570970 - DNA, 33 bp, Homo sapien
ccagtatttgtccatatagttaagtgaaatttt

SEQ ID NO: 570971 - DNA, 33 bp, Homo sapien
cataaacttcccagaaagcatgatgtgaagacc

SEQ ID NO: 570972 - DNA, 33 bp, Homo sapien
cataaacttcccagaaggcatgatgtgaagacc

SEQ ID NO: 570973 - DNA, 33 bp, Homo sapien
aggctgggcaaagttgaaataaaggtgcaaagg

SEQ ID NO: 570974 - DNA, 33 bp, Homo sapien
aggctgggcaaagttgcaataaaggtgcaaagg

SEQ ID NO: 570975 - DNA, 33 bp, Homo sapien
gtggtgtctgtccctaaaaactggagctggcta

SEQ ID NO: 570976 - DNA, 33 bp, Homo sapien
gtggtgtctgtccctagaaactggagctggcta

SEQ ID NO: 570977 - DNA, 33 bp, Homo sapien
tcagtaaatggaggccaagaccctgagtacagg

SEQ ID NO: 570978 - DNA, 33 bp, Homo sapien
tcagtaaatggaggccgagaccctgagtacagg

SEQ ID NO: 570979 - DNA, 33 bp, Homo sapien
cctttccctggaaaaccgtgctatgtggcactc

SEQ ID NO: 570980 - DNA, 33 bp, Homo sapien
cctttccctggaaaacggtgctatgtggcactc

SEQ ID NO: 570981 - DNA, 33 bp, Homo sapien
acaggcttaacaacaccggctatttcttttaaa

SEQ ID NO: 570982 - DNA, 33 bp, Homo sapien
acaggcttaacaacactggctatttcttttaaa

SEQ ID NO: 570983 - DNA, 33 bp, Homo sapien
gaaattgtatggcttgcaaagacaaaaatgttt

SEQ ID NO: 570984 - DNA, 33 bp, Homo sapien
gaaattgtatggcttgtaaagacaaaaatgttt

SEQ ID NO: 570985 - DNA, 33 bp, Homo sapien
atctggaagaactgtaccatggatattaacttg

SEQ ID NO: 570986 - DNA, 33 bp, Homo sapien
atctggaagaactgtatcatggatattaacttg

SEQ ID NO: 570987 - DNA, 33 bp, Homo sapien
gatctgactgcctcaccctctaacctaaaacct

SEQ ID NO: 570988 - DNA, 33 bp, Homo sapien
gatctgactgcctcactctctaacctaaaacct

SEQ ID NO: 570989 - DNA, 33 bp, Homo sapien
attcaataggttttctaaagtcatgggattgca

SEQ ID NO: 570990 - DNA, 33 bp, Homo sapien
attcaataggttttcttaagtcatgggattgca

SEQ ID NO: 570991 - DNA, 33 bp, Homo sapien
ggctaggaggagaagcacagtaaacacgagtga

SEQ ID NO: 570992 - DNA, 33 bp, Homo sapien
ggctaggaggagaagcgcagtaaacacgagtga

SEQ ID NO: 570993 - DNA, 33 bp, Homo sapien
gtaagaaaatccttctaaaaatcagtcacaccc

SEQ ID NO: 570994 - DNA, 33 bp, Homo sapien
gtaagaaaatccttctgaaaatcagtcacaccc

SEQ ID NO: 570995 - DNA, 33 bp, Homo sapien
acaaggtaagtggagcaatgtctctatgtcaga

SEQ ID NO: 570996 - DNA, 33 bp, Homo sapien
acaaggtaagtggagcgatgtctctatgtcaga

SEQ ID NO: 570997 - DNA, 33 bp, Homo sapien
aaccctgtggcatgtaagccagtggacagatat

SEQ ID NO: 570998 - DNA, 33 bp, Homo sapien
aaccctgtggcatgtaggccagtggacagatat

SEQ ID NO: 570999 - DNA, 33 bp, Homo sapien
gaaagaagtgggatcaagaactggtggaaggaa

SEQ ID NO: 571000 - DNA, 33 bp, Homo sapien
gaaagaagtgggatcatgaactggtggaaggaa

SEQ ID NO: 571001 - DNA, 33 bp, Homo sapien
ccaagaccttacactaccattgctggatgcttc

SEQ ID NO: 571002 - DNA, 33 bp, Homo sapien
ccaagaccttacactagcattgctggatgcttc

SEQ ID NO: 571003 - DNA, 33 bp, Homo sapien
cgcttgagctcaactcacagataggctcccttc

SEQ ID NO: 571004 - DNA, 33 bp, Homo sapien
cgcttgagctcaactcgcagataggctcccttc

SEQ ID NO: 571005 - DNA, 33 bp, Homo sapien
agaaagatggtgctgactactgttttattggat

SEQ ID NO: 571006 - DNA, 33 bp, Homo sapien
agaaagatggtgctgagtactgttttattggat

SEQ ID NO: 571007 - DNA, 33 bp, Homo sapien
attatcctgaaccctcactttattgacctggtg

SEQ ID NO: 571008 - DNA, 33 bp, Homo sapien
attatcctgaaccctcgctttattgacctggtg

SEQ ID NO: 571009 - DNA, 33 bp, Homo sapien
atttagaagacagtcccgaagattttgctacca

SEQ ID NO: 571010 - DNA, 33 bp, Homo sapien
atttagaagacagtcctgaagattttgctacca

SEQ ID NO: 571011 - DNA, 33 bp, Homo sapien
aagaattctccttgcaaataaacttcatgtgtt

SEQ ID NO: 571012 - DNA, 33 bp, Homo sapien
aagaattctccttgcagataaacttcatgtgtt

SEQ ID NO: 571013 - DNA, 33 bp, Homo sapien
aagaagagagagtagaaccaaataaatccaatt

SEQ ID NO: 571014 - DNA, 33 bp, Homo sapien
aagaagagagagtagatccaaataaatccaatt

SEQ ID NO: 571015 - DNA, 33 bp, Homo sapien
acagatctatagaccaatgaaacgtaatagaaa

SEQ ID NO: 571016 - DNA, 33 bp, Homo sapien
acagatctatagaccagtgaaacgtaatagaaa

SEQ ID NO: 571017 - DNA, 33 bp, Homo sapien
tagaagatgaagttgaagatattgtccagaata

SEQ ID NO: 571018 - DNA, 33 bp, Homo sapien
tagaagatgaagttgaggatattgtccagaata

SEQ ID NO: 571019 - DNA, 33 bp, Homo sapien
tacatacacatggctaaatttttaatatttttg

SEQ ID NO: 571020 - DNA, 33 bp, Homo sapien
tacatacacatggctacatttttaatatttttg

SEQ ID NO: 571021 - DNA, 33 bp, Homo sapien
tcttaagttttggcataaatcattgttacaaga

SEQ ID NO: 571022 - DNA, 33 bp, Homo sapien
tcttaagttttggcatgaatcattgttacaaga

SEQ ID NO: 571023 - DNA, 33 bp, Homo sapien
ctgcactgcgaacatccccaaagctccaggaga

SEQ ID NO: 571024 - DNA, 33 bp, Homo sapien
ctgcactgcgaacatctccaaagctccaggaga

SEQ ID NO: 571025 - DNA, 33 bp, Homo sapien
catgcaaaacgaagaacagtgcagtgtctacaa

SEQ ID NO: 571026 - DNA, 33 bp, Homo sapien
catgcaaaacgaagaagagtgcagtgtctacaa

SEQ ID NO: 571027 - DNA, 33 bp, Homo sapien
tcagcagccagtgctacaagggagctgagtagc

SEQ ID NO: 571028 - DNA, 33 bp, Homo sapien
tcagcagccagtgctataagggagctgagtagc

SEQ ID NO: 571029 - DNA, 33 bp, Homo sapien
cctgaaattgtctatcagaagctattaatagct

SEQ ID NO: 571030 - DNA, 33 bp, Homo sapien
cctgaaattgtctatcggaagctattaatagct

SEQ ID NO: 571031 - DNA, 33 bp, Homo sapien
gaatccatcagcatacaaaggccgggtgtggca

SEQ ID NO: 571032 - DNA, 33 bp, Homo sapien
gaatccatcagcatacgaaggccgggtgtggca

SEQ ID NO: 571033 - DNA, 33 bp, Homo sapien
tagagttgagcaatagcaagaatatggcaggtg

SEQ ID NO: 571034 - DNA, 33 bp, Homo sapien
tagagttgagcaatagtaagaatatggcaggtg

SEQ ID NO: 571035 - DNA, 33 bp, Homo sapien
ggcggtcattgcagtcacagtaataataggaaa

SEQ ID NO: 571036 - DNA, 33 bp, Homo sapien
ggcggtcattgcagtcgcagtaataataggaaa

SEQ ID NO: 571037 - DNA, 33 bp, Homo sapien
actggggaaagctaaacggctgtcttgtgtggt

SEQ ID NO: 571038 - DNA, 33 bp, Homo sapien
actggggaaagctaaagggctgtcttgtgtggt

SEQ ID NO: 571039 - DNA, 33 bp, Homo sapien
tgttcgaatgaggagaatccaaggcaagttaac

SEQ ID NO: 571040 - DNA, 33 bp, Homo sapien
tgttcgaatgaggagactccaaggcaagttaac

SEQ ID NO: 571041 - DNA, 33 bp, Homo sapien
ctgaatttgtgaaggactacctcttcctccatt

SEQ ID NO: 571042 - DNA, 33 bp, Homo sapien
ctgaatttgtgaaggattacctcttcctccatt

SEQ ID NO: 571043 - DNA, 33 bp, Homo sapien
gccacagtccatctcacgttaacaaatgccttt

SEQ ID NO: 571044 - DNA, 33 bp, Homo sapien
gccacagtccatctcatgttaacaaatgccttt

SEQ ID NO: 571045 - DNA, 33 bp, Homo sapien
aagagaatatgacaaacgcaggttccacccagg

SEQ ID NO: 571046 - DNA, 33 bp, Homo sapien
aagagaatatgacaaatgcaggttccacccagg

SEQ ID NO: 571047 - DNA, 33 bp, Homo sapien
aatcattggagtagaaatggggagacctgcagt

SEQ ID NO: 571048 - DNA, 33 bp, Homo sapien
aatcattggagtagaactggggagacctgcagt

SEQ ID NO: 571049 - DNA, 33 bp, Homo sapien
ggtctcagtagtgagcaccttcaaactgggcaa

SEQ ID NO: 571050 - DNA, 33 bp, Homo sapien
ggtctcagtagtgagcgccttcaaactgggcaa

SEQ ID NO: 571051 - DNA, 33 bp, Homo sapien
ccagggtcaagatttcacaggagaaagggaaga

SEQ ID NO: 571052 - DNA, 33 bp, Homo sapien
ccagggtcaagatttcgcaggagaaagggaaga

SEQ ID NO: 571053 - DNA, 33 bp, Homo sapien
ttcctgggtcctatcccaacatgtggcactggg

SEQ ID NO: 571054 - DNA, 33 bp, Homo sapien
ttcctgggtcctatcctaacatgtggcactggg

SEQ ID NO: 571055 - DNA, 33 bp, Homo sapien
ttataagtatagtcacaaacagaatgatggtag

SEQ ID NO: 571056 - DNA, 33 bp, Homo sapien
ttataagtatagtcacgaacagaatgatggtag

SEQ ID NO: 571057 - DNA, 33 bp, Homo sapien
aagttgtttcattgacgacaaggctttgaatcc

SEQ ID NO: 571058 - DNA, 33 bp, Homo sapien
aagttgtttcattgactacaaggctttgaatcc

SEQ ID NO: 571059 - DNA, 33 bp, Homo sapien
acaaggaattcagcaacgagaggcagtccatac

SEQ ID NO: 571060 - DNA, 33 bp, Homo sapien
acaaggaattcagcaatgagaggcagtccatac

SEQ ID NO: 571061 - DNA, 33 bp, Homo sapien
tctccattcaaatccactccttcacttattcta

SEQ ID NO: 571062 - DNA, 33 bp, Homo sapien
tctccattcaaatccattccttcacttattcta

SEQ ID NO: 571063 - DNA, 33 bp, Homo sapien
acagtgctgggcactgaacatggttatcttgac

SEQ ID NO: 571064 - DNA, 33 bp, Homo sapien
acagtgctgggcactggacatggttatcttgac

SEQ ID NO: 571065 - DNA, 33 bp, Homo sapien
tgagtaaagaacactaactctttagatttaatt

SEQ ID NO: 571066 - DNA, 33 bp, Homo sapien
tgagtaaagaacactagctctttagatttaatt

SEQ ID NO: 571067 - DNA, 33 bp, Homo sapien
attattctagctatcagggataaagcagtgatt

SEQ ID NO: 571068 - DNA, 33 bp, Homo sapien
attattctagctatcatggataaagcagtgatt

SEQ ID NO: 571069 - DNA, 33 bp, Homo sapien
aacggccaaggtacacagagtccaactggcaac

SEQ ID NO: 571070 - DNA, 33 bp, Homo sapien
aacggccaaggtacacggagtccaactggcaac

SEQ ID NO: 571071 - DNA, 33 bp, Homo sapien
aggaagtgtacacaaacgagaagcaggcactct

SEQ ID NO: 571072 - DNA, 33 bp, Homo sapien
aggaagtgtacacaaaggagaagcaggcactct

SEQ ID NO: 571073 - DNA, 33 bp, Homo sapien
tttcctcatttgtaaactgcctggttatgccct

SEQ ID NO: 571074 - DNA, 33 bp, Homo sapien
tttcctcatttgtaaattgcctggttatgccct

SEQ ID NO: 571075 - DNA, 33 bp, Homo sapien
ttgctgtgcctcagaacgagacaaaaggggaag

SEQ ID NO: 571076 - DNA, 33 bp, Homo sapien
ttgctgtgcctcagaaggagacaaaaggggaag

SEQ ID NO: 571077 - DNA, 33 bp, Homo sapien
ttcttggccctcatcaaacttgcttcatcaaca

SEQ ID NO: 571078 - DNA, 33 bp, Homo sapien
ttcttggccctcatcatacttgcttcatcaaca

SEQ ID NO: 571079 - DNA, 33 bp, Homo sapien
tgaattttaattatcaaagtcctgatgacaatc

SEQ ID NO: 571080 - DNA, 33 bp, Homo sapien
tgaattttaattatcacagtcctgatgacaatc

SEQ ID NO: 571081 - DNA, 33 bp, Homo sapien
gtcagagggatggtcaaccaactaagaggtggc

SEQ ID NO: 571082 - DNA, 33 bp, Homo sapien
gtcagagggatggtcacccaactaagaggtggc

SEQ ID NO: 571083 - DNA, 33 bp, Homo sapien
tttggattcaaagaaacggtatcttggactcag

SEQ ID NO: 571084 - DNA, 33 bp, Homo sapien
tttggattcaaagaaatggtatcttggactcag

SEQ ID NO: 571085 - DNA, 33 bp, Homo sapien
caacttacagatatacaatagacatgaataacc

SEQ ID NO: 571086 - DNA, 33 bp, Homo sapien
caacttacagatatacgatagacatgaataacc

SEQ ID NO: 571087 - DNA, 33 bp, Homo sapien
ggcacacaaagctcacagatggaaaaacttaac

SEQ ID NO: 571088 - DNA, 33 bp, Homo sapien
ggcacacaaagctcacggatggaaaaacttaac

SEQ ID NO: 571089 - DNA, 33 bp, Homo sapien
aatgttcacaacaccactcatttctctctaagt

SEQ ID NO: 571090 - DNA, 33 bp, Homo sapien
aatgttcacaacaccattcatttctctctaagt

SEQ ID NO: 571091 - DNA, 33 bp, Homo sapien
gacttgcgcttttacaatgagaagcaaacaaag

SEQ ID NO: 571092 - DNA, 33 bp, Homo sapien
gacttgcgcttttacactgagaagcaaacaaag

SEQ ID NO: 571093 - DNA, 33 bp, Homo sapien
acaaatacagctctccactttctgtagaaggat

SEQ ID NO: 571094 - DNA, 33 bp, Homo sapien
acaaatacagctctccgctttctgtagaaggat

SEQ ID NO: 571095 - DNA, 33 bp, Homo sapien
aaaatttgctgcatgacggtggagtgagctgag

SEQ ID NO: 571096 - DNA, 33 bp, Homo sapien
aaaatttgctgcatgatggtggagtgagctgag

SEQ ID NO: 571097 - DNA, 33 bp, Homo sapien
ctagacactaagcccaagtttatcctttatcat

SEQ ID NO: 571098 - DNA, 33 bp, Homo sapien
ctagacactaagcccatgtttatcctttatcat

SEQ ID NO: 571099 - DNA, 33 bp, Homo sapien
tatacaatctgccataagaactaaaactcattt

SEQ ID NO: 571100 - DNA, 33 bp, Homo sapien
tatacaatctgccataggaactaaaactcattt

SEQ ID NO: 571101 - DNA, 33 bp, Homo sapien
gccagtctggaaggaaacaatcacggatacatc

SEQ ID NO: 571102 - DNA, 33 bp, Homo sapien
gccagtctggaaggaagcaatcacggatacatc

SEQ ID NO: 571103 - DNA, 33 bp, Homo sapien
tagtcagtgatacgacagaagaaaatattcata

SEQ ID NO: 571104 - DNA, 33 bp, Homo sapien
tagtcagtgatacgacggaagaaaatattcata

SEQ ID NO: 571105 - DNA, 33 bp, Homo sapien
gaaacctcatcacttaagtagaaaataaagtac

SEQ ID NO: 571106 - DNA, 33 bp, Homo sapien
gaaacctcatcacttatgtagaaaataaagtac

SEQ ID NO: 571107 - DNA, 33 bp, Homo sapien
ggatgttgaaagacgggagagacacaggcaaaa

SEQ ID NO: 571108 - DNA, 33 bp, Homo sapien
ggatgttgaaagacggtagagacacaggcaaaa

SEQ ID NO: 571109 - DNA, 33 bp, Homo sapien
ctctcagcctccataactgagtgagtgaattcc

SEQ ID NO: 571110 - DNA, 33 bp, Homo sapien
ctctcagcctccataattgagtgagtgaattcc

SEQ ID NO: 571111 - DNA, 33 bp, Homo sapien
attatcatgtgtatcccccctaaaaaatcaaca

SEQ ID NO: 571112 - DNA, 33 bp, Homo sapien
attatcatgtgtatcctccctaaaaaatcaaca

SEQ ID NO: 571113 - DNA, 33 bp, Homo sapien
tgggcaggcccaatggaatagtggccaagccag

SEQ ID NO: 571114 - DNA, 33 bp, Homo sapien
tgggcaggcccaatggtatagtggccaagccag

SEQ ID NO: 571115 - DNA, 33 bp, Homo sapien
ggtgatgcataaagaactgactctgagaagcct

SEQ ID NO: 571116 - DNA, 33 bp, Homo sapien
ggtgatgcataaagaattgactctgagaagcct

SEQ ID NO: 571117 - DNA, 33 bp, Homo sapien
atacctacaaatgtcacaatagaggactttttt

SEQ ID NO: 571118 - DNA, 33 bp, Homo sapien
atacctacaaatgtcataatagaggactttttt

SEQ ID NO: 571119 - DNA, 33 bp, Homo sapien
ggtaacagcagtagcaatcgtgaatagggctca

SEQ ID NO: 571120 - DNA, 33 bp, Homo sapien
ggtaacagcagtagcattcgtgaatagggctca

SEQ ID NO: 571121 - DNA, 33 bp, Homo sapien
atacgaattacaaacacatttcgcccaaagggt

SEQ ID NO: 571122 - DNA, 33 bp, Homo sapien
atacgaattacaaacatatttcgcccaaagggt

SEQ ID NO: 571123 - DNA, 33 bp, Homo sapien
tcttatctaagtacaacatacctcctggcattt

SEQ ID NO: 571124 - DNA, 33 bp, Homo sapien
tcttatctaagtacaagatacctcctggcattt

SEQ ID NO: 571125 - DNA, 33 bp, Homo sapien
gtctccaatcacttaccagtgaagaaaactaag

SEQ ID NO: 571126 - DNA, 33 bp, Homo sapien
gtctccaatcacttacgagtgaagaaaactaag

SEQ ID NO: 571127 - DNA, 33 bp, Homo sapien
cctacttcccttagatcatcgtacaagggctac

SEQ ID NO: 571128 - DNA, 33 bp, Homo sapien
cctacttcccttagattatcgtacaagggctac

SEQ ID NO: 571129 - DNA, 33 bp, Homo sapien
ctacctcttccaagaaccattttcggctggaaa

SEQ ID NO: 571130 - DNA, 33 bp, Homo sapien
ctacctcttccaagaatcattttcggctggaaa

SEQ ID NO: 571131 - DNA, 33 bp, Homo sapien
aaagggaattggccctcaataaacaatgtacct

SEQ ID NO: 571132 - DNA, 33 bp, Homo sapien
aaagggaattggccctgaataaacaatgtacct

SEQ ID NO: 571133 - DNA, 33 bp, Homo sapien
tgcaatcagcacttcaacttgcaggggaccagg

SEQ ID NO: 571134 - DNA, 33 bp, Homo sapien
tgcaatcagcacttcaccttgcaggggaccagg

SEQ ID NO: 571135 - DNA, 33 bp, Homo sapien
catccaaggcctaaaaaggctactgaggccagg

SEQ ID NO: 571136 - DNA, 33 bp, Homo sapien
catccaaggcctaaaacggctactgaggccagg

SEQ ID NO: 571137 - DNA, 33 bp, Homo sapien
gcccgacctcagtcccactgtccaagccatctt

SEQ ID NO: 571138 - DNA, 33 bp, Homo sapien
gcccgacctcagtcccgctgtccaagccatctt

SEQ ID NO: 571139 - DNA, 33 bp, Homo sapien
acacagataacctgacagctaaacaagagaacg

SEQ ID NO: 571140 - DNA, 33 bp, Homo sapien
acacagataacctgacggctaaacaagagaacg

SEQ ID NO: 571141 - DNA, 33 bp, Homo sapien
gcagggcagggatgaacaggcctcatgctgtta

SEQ ID NO: 571142 - DNA, 33 bp, Homo sapien
gcagggcagggatgaataggcctcatgctgtta

SEQ ID NO: 571143 - DNA, 33 bp, Homo sapien
acccattgttgtatcaatcaattgttccttcaa

SEQ ID NO: 571144 - DNA, 33 bp, Homo sapien
acccattgttgtatcagtcaattgttccttcaa

SEQ ID NO: 571145 - DNA, 33 bp, Homo sapien
catgcaatcacgttaacgctatgctagaagaat

SEQ ID NO: 571146 - DNA, 33 bp, Homo sapien
catgcaatcacgttaatgctatgctagaagaat

SEQ ID NO: 571147 - DNA, 33 bp, Homo sapien
ttttccactgtctcccaaagaaaaggttaatgg

SEQ ID NO: 571148 - DNA, 33 bp, Homo sapien
ttttccactgtctcccgaagaaaaggttaatgg

SEQ ID NO: 571149 - DNA, 33 bp, Homo sapien
gcattacttatagacagtactaggcacataaat

SEQ ID NO: 571150 - DNA, 33 bp, Homo sapien
gcattacttatagacattactaggcacataaat

SEQ ID NO: 571151 - DNA, 33 bp, Homo sapien
tccatcagctggcaaacggataagcaaaacatg

SEQ ID NO: 571152 - DNA, 33 bp, Homo sapien
tccatcagctggcaaatggataagcaaaacatg

SEQ ID NO: 571153 - DNA, 33 bp, Homo sapien
tttccaaactcctacaagcccttctgtgtgttt

SEQ ID NO: 571154 - DNA, 33 bp, Homo sapien
tttccaaactcctacaggcccttctgtgtgttt

SEQ ID NO: 571155 - DNA, 33 bp, Homo sapien
atgggggatggaagccaatgagtacacattctc

SEQ ID NO: 571156 - DNA, 33 bp, Homo sapien
atgggggatggaagccgatgagtacacattctc

SEQ ID NO: 571157 - DNA, 33 bp, Homo sapien
agtgctaataaatggacgaaggattacagacag

SEQ ID NO: 571158 - DNA, 33 bp, Homo sapien
agtgctaataaatggatgaaggattacagacag

SEQ ID NO: 571159 - DNA, 33 bp, Homo sapien
ccaaatgggcatgacactcaatatccaaaatgc

SEQ ID NO: 571160 - DNA, 33 bp, Homo sapien
ccaaatgggcatgacagtcaatatccaaaatgc

SEQ ID NO: 571161 - DNA, 33 bp, Homo sapien
cccactacttgtaacacctgagcatctgtggat

SEQ ID NO: 571162 - DNA, 33 bp, Homo sapien
cccactacttgtaacatctgagcatctgtggat

SEQ ID NO: 571163 - DNA, 33 bp, Homo sapien
ctgaagagggcaaaaacaatcaagggtgtcagc

SEQ ID NO: 571164 - DNA, 33 bp, Homo sapien
ctgaagagggcaaaaataatcaagggtgtcagc

SEQ ID NO: 571165 - DNA, 33 bp, Homo sapien
agtccatatatatagaccaatggtgcaaactta

SEQ ID NO: 571166 - DNA, 33 bp, Homo sapien
agtccatatatatagatcaatggtgcaaactta

SEQ ID NO: 571167 - DNA, 33 bp, Homo sapien
acaccattccttgacagtggaaactagcacctg

SEQ ID NO: 571168 - DNA, 33 bp, Homo sapien
acaccattccttgacattggaaactagcacctg

SEQ ID NO: 571169 - DNA, 33 bp, Homo sapien
attggcttatcaattacgtaacatctaacagct

SEQ ID NO: 571170 - DNA, 33 bp, Homo sapien
attggcttatcaattaggtaacatctaacagct

SEQ ID NO: 571171 - DNA, 33 bp, Homo sapien
tagggagtgcaaggaacttcctctggtttgaat

SEQ ID NO: 571172 - DNA, 33 bp, Homo sapien
tagggagtgcaaggaagttcctctggtttgaat

SEQ ID NO: 571173 - DNA, 33 bp, Homo sapien
tacagaagaattttgccgatccctgtttcaaat

SEQ ID NO: 571174 - DNA, 33 bp, Homo sapien
tacagaagaattttgctgatccctgtttcaaat

SEQ ID NO: 571175 - DNA, 33 bp, Homo sapien
tggggactccaaaacccaggctcttgatcacct

SEQ ID NO: 571176 - DNA, 33 bp, Homo sapien
tggggactccaaaacctaggctcttgatcacct

SEQ ID NO: 571177 - DNA, 33 bp, Homo sapien
tgttgatttatccaccccttgtttaaaagaaag

SEQ ID NO: 571178 - DNA, 33 bp, Homo sapien
tgttgatttatccacctcttgtttaaaagaaag

SEQ ID NO: 571179 - DNA, 33 bp, Homo sapien
aaaacctcacaatccaactcaaagagacgctgt

SEQ ID NO: 571180 - DNA, 33 bp, Homo sapien
aaaacctcacaatccagctcaaagagacgctgt

SEQ ID NO: 571181 - DNA, 33 bp, Homo sapien
gtcttttcacactccacgtttgctcatgaactt

SEQ ID NO: 571182 - DNA, 33 bp, Homo sapien
gtcttttcacactccatgtttgctcatgaactt

SEQ ID NO: 571183 - DNA, 33 bp, Homo sapien
gtgcagatcagtcaacaattggtcatttattca

SEQ ID NO: 571184 - DNA, 33 bp, Homo sapien
gtgcagatcagtcaacgattggtcatttattca

SEQ ID NO: 571185 - DNA, 33 bp, Homo sapien
gaataaagctcagaaacaagccaaagtataaca

SEQ ID NO: 571186 - DNA, 33 bp, Homo sapien
gaataaagctcagaaagaagccaaagtataaca

SEQ ID NO: 571187 - DNA, 33 bp, Homo sapien
gggggacctgagtagtcacaggtagaagaccag

SEQ ID NO: 571188 - DNA, 33 bp, Homo sapien
gggggacctgagtagttacaggtagaagaccag

SEQ ID NO: 571189 - DNA, 33 bp, Homo sapien
agtgaatcatgcccaacgttctaaacggacttg

SEQ ID NO: 571190 - DNA, 33 bp, Homo sapien
agtgaatcatgcccaatgttctaaacggacttg

SEQ ID NO: 571191 - DNA, 33 bp, Homo sapien
cctcagctgtcaatacaatggaactatattcac

SEQ ID NO: 571192 - DNA, 33 bp, Homo sapien
cctcagctgtcaatacgatggaactatattcac

SEQ ID NO: 571193 - DNA, 33 bp, Homo sapien
cccagtaagatgtaaacccaagagggcagggat

SEQ ID NO: 571194 - DNA, 33 bp, Homo sapien
cccagtaagatgtaaatccaagagggcagggat

SEQ ID NO: 571195 - DNA, 33 bp, Homo sapien
tccaatgtgttgtcttcaaactacatccagagt

SEQ ID NO: 571196 - DNA, 33 bp, Homo sapien
tccaatgtgttgtcttgaaactacatccagagt

SEQ ID NO: 571197 - DNA, 33 bp, Homo sapien
catagttataagatccacgttataaggttgttc

SEQ ID NO: 571198 - DNA, 33 bp, Homo sapien
catagttataagatccgcgttataaggttgttc

SEQ ID NO: 571199 - DNA, 33 bp, Homo sapien
caggatgggaccgcacagagtagcctttgcttt

SEQ ID NO: 571200 - DNA, 33 bp, Homo sapien
caggatgggaccgcacggagtagcctttgcttt

SEQ ID NO: 571201 - DNA, 33 bp, Homo sapien
gatggaccatggagaccgaccttccattctttg

SEQ ID NO: 571202 - DNA, 33 bp, Homo sapien
gatggaccatggagactgaccttccattctttg

SEQ ID NO: 571203 - DNA, 33 bp, Homo sapien
tcctctagtggctgtaccattattttctattaa

SEQ ID NO: 571204 - DNA, 33 bp, Homo sapien
tcctctagtggctgtatcattattttctattaa

SEQ ID NO: 571205 - DNA, 33 bp, Homo sapien
gggtttaaatagggaacgttgacttttaggcat

SEQ ID NO: 571206 - DNA, 33 bp, Homo sapien
gggtttaaatagggaatgttgacttttaggcat

SEQ ID NO: 571207 - DNA, 33 bp, Homo sapien
gctgattcagctccacacataattaacaaacag

SEQ ID NO: 571208 - DNA, 33 bp, Homo sapien
gctgattcagctccacgcataattaacaaacag

SEQ ID NO: 571209 - DNA, 33 bp, Homo sapien
gggtagtcaaagaaaccggccaatgacagctcc

SEQ ID NO: 571210 - DNA, 33 bp, Homo sapien
gggtagtcaaagaaactggccaatgacagctcc

SEQ ID NO: 571211 - DNA, 33 bp, Homo sapien
cgtcctctccatctgacgcttgttctaaccccc

SEQ ID NO: 571212 - DNA, 33 bp, Homo sapien
cgtcctctccatctgatgcttgttctaaccccc

SEQ ID NO: 571213 - DNA, 33 bp, Homo sapien
agcttgaaaaatgctaataactcaagacaaggt

SEQ ID NO: 571214 - DNA, 33 bp, Homo sapien
agcttgaaaaatgctactaactcaagacaaggt

SEQ ID NO: 571215 - DNA, 33 bp, Homo sapien
ggcatattactgcttaaaaggcttccacctaga

SEQ ID NO: 571216 - DNA, 33 bp, Homo sapien
ggcatattactgcttataaggcttccacctaga

SEQ ID NO: 571217 - DNA, 33 bp, Homo sapien
caggcctggctccaccaccgatctgctacatcc

SEQ ID NO: 571218 - DNA, 33 bp, Homo sapien
caggcctggctccaccgccgatctgctacatcc

SEQ ID NO: 571219 - DNA, 33 bp, Homo sapien
accacactaaataaaacgaggtctttgtctttg

SEQ ID NO: 571220 - DNA, 33 bp, Homo sapien
accacactaaataaaatgaggtctttgtctttg

SEQ ID NO: 571221 - DNA, 33 bp, Homo sapien
tattgcaggagcctaacgggcagagtagacagt

SEQ ID NO: 571222 - DNA, 33 bp, Homo sapien
tattgcaggagcctaatgggcagagtagacagt

SEQ ID NO: 571223 - DNA, 33 bp, Homo sapien
ggtgggatgttgccaaagcttgtgctctagtct

SEQ ID NO: 571224 - DNA, 33 bp, Homo sapien
ggtgggatgttgccaatgcttgtgctctagtct

SEQ ID NO: 571225 - DNA, 33 bp, Homo sapien
gccggcatgagggggacctatccacggagggcc

SEQ ID NO: 571226 - DNA, 33 bp, Homo sapien
gccggcatgagggggatctatccacggagggcc

SEQ ID NO: 571227 - DNA, 33 bp, Homo sapien
gatggagggttttgaaccttttcagggtcacag

SEQ ID NO: 571228 - DNA, 33 bp, Homo sapien
gatggagggttttgaatcttttcagggtcacag

SEQ ID NO: 571229 - DNA, 33 bp, Homo sapien
cacctgctactcgagagtcacacagttgccagt

SEQ ID NO: 571230 - DNA, 33 bp, Homo sapien
cacctgctactcgagattcacacagttgccagt

SEQ ID NO: 571231 - DNA, 33 bp, Homo sapien
cctgttgtacccacacccataagaggataagat

SEQ ID NO: 571232 - DNA, 33 bp, Homo sapien
cctgttgtacccacactcataagaggataagat

SEQ ID NO: 571233 - DNA, 33 bp, Homo sapien
ggagacgattcacccaagttaggggcatccctt

SEQ ID NO: 571234 - DNA, 33 bp, Homo sapien
ggagacgattcacccaggttaggggcatccctt

SEQ ID NO: 571235 - DNA, 33 bp, Homo sapien
gaggaagctgcaggaacctaaaaactccacgta

SEQ ID NO: 571236 - DNA, 33 bp, Homo sapien
gaggaagctgcaggaagctaaaaactccacgta

SEQ ID NO: 571237 - DNA, 33 bp, Homo sapien
ctgggcctcttgcttacgcccacgtcacctgcc

SEQ ID NO: 571238 - DNA, 33 bp, Homo sapien
ctgggcctcttgcttatgcccacgtcacctgcc

SEQ ID NO: 571239 - DNA, 33 bp, Homo sapien
tagtttgacaagtggacgagcaaggtttgtacc

SEQ ID NO: 571240 - DNA, 33 bp, Homo sapien
tagtttgacaagtggatgagcaaggtttgtacc

SEQ ID NO: 571241 - DNA, 33 bp, Homo sapien
ttgcactctgcaagtaaaattttcttttctaaa

SEQ ID NO: 571242 - DNA, 33 bp, Homo sapien
ttgcactctgcaagtacaattttcttttctaaa

SEQ ID NO: 571243 - DNA, 33 bp, Homo sapien
agctctcataagctctaactgttacaatcatgg

SEQ ID NO: 571244 - DNA, 33 bp, Homo sapien
agctctcataagctctgactgttacaatcatgg

SEQ ID NO: 571245 - DNA, 33 bp, Homo sapien
agggaggggtggaagacaagcactaatgtttat

SEQ ID NO: 571246 - DNA, 33 bp, Homo sapien
agggaggggtggaagataagcactaatgtttat

SEQ ID NO: 571247 - DNA, 33 bp, Homo sapien
tctttgacttactcatcaccaactccaactgta

SEQ ID NO: 571248 - DNA, 33 bp, Homo sapien
tctttgacttactcattaccaactccaactgta

SEQ ID NO: 571249 - DNA, 33 bp, Homo sapien
acgtggtggcagggaacagagaatgagaaccca

SEQ ID NO: 571250 - DNA, 33 bp, Homo sapien
acgtggtggcagggaagagagaatgagaaccca

SEQ ID NO: 571251 - DNA, 33 bp, Homo sapien
aaaatgcataacttaccgaacatctcagcttag

SEQ ID NO: 571252 - DNA, 33 bp, Homo sapien
aaaatgcataacttactgaacatctcagcttag

SEQ ID NO: 571253 - DNA, 33 bp, Homo sapien
aaaaaataaatggctacatgactgagcaaactc

SEQ ID NO: 571254 - DNA, 33 bp, Homo sapien
aaaaaataaatggctatatgactgagcaaactc

SEQ ID NO: 571255 - DNA, 33 bp, Homo sapien
tcctttcctcatgaaagcttcacaggaaaatca

SEQ ID NO: 571256 - DNA, 33 bp, Homo sapien
tcctttcctcatgaaatcttcacaggaaaatca

SEQ ID NO: 571257 - DNA, 33 bp, Homo sapien
aatagtgaagccagaaacttagctgtgatcttc

SEQ ID NO: 571258 - DNA, 33 bp, Homo sapien
aatagtgaagccagaatcttagctgtgatcttc

SEQ ID NO: 571259 - DNA, 33 bp, Homo sapien
actgataccaaggtggaagccctaggcacatct

SEQ ID NO: 571260 - DNA, 33 bp, Homo sapien
actgataccaaggtgggagccctaggcacatct

SEQ ID NO: 571261 - DNA, 33 bp, Homo sapien
aagtcacatggagttaaggtcagagctgagatt

SEQ ID NO: 571262 - DNA, 33 bp, Homo sapien
aagtcacatggagttagggtcagagctgagatt

SEQ ID NO: 571263 - DNA, 33 bp, Homo sapien
tgactttgagtgtgccacttctcctctctgggg

SEQ ID NO: 571264 - DNA, 33 bp, Homo sapien
tgactttgagtgtgcctcttctcctctctgggg

SEQ ID NO: 571265 - DNA, 33 bp, Homo sapien
cacaagacctaggagacagtagctgcacaataa

SEQ ID NO: 571266 - DNA, 33 bp, Homo sapien
cacaagacctaggagatagtagctgcacaataa

SEQ ID NO: 571267 - DNA, 33 bp, Homo sapien
gcaacagaagccaacaagggatgtgttaatgaa

SEQ ID NO: 571268 - DNA, 33 bp, Homo sapien
gcaacagaagccaacatgggatgtgttaatgaa

SEQ ID NO: 571269 - DNA, 33 bp, Homo sapien
gtcactgtcctttttacagggtgctggttgaga

SEQ ID NO: 571270 - DNA, 33 bp, Homo sapien
gtcactgtcctttttatagggtgctggttgaga

SEQ ID NO: 571271 - DNA, 33 bp, Homo sapien
agtggaggaataaaagaagtcagacaagcatta

SEQ ID NO: 571272 - DNA, 33 bp, Homo sapien
agtggaggaataaaaggagtcagacaagcatta

SEQ ID NO: 571273 - DNA, 33 bp, Homo sapien
gcaaagttgagcttacacggcatgtcattgatc

SEQ ID NO: 571274 - DNA, 33 bp, Homo sapien
gcaaagttgagcttacgcggcatgtcattgatc

SEQ ID NO: 571275 - DNA, 33 bp, Homo sapien
cacataggtagcaagaagggaagccaggacttg

SEQ ID NO: 571276 - DNA, 33 bp, Homo sapien
cacataggtagcaagaggggaagccaggacttg

SEQ ID NO: 571277 - DNA, 33 bp, Homo sapien
agctcctcttactccacagtagctgtgattggg

SEQ ID NO: 571278 - DNA, 33 bp, Homo sapien
agctcctcttactccatagtagctgtgattggg

SEQ ID NO: 571279 - DNA, 33 bp, Homo sapien
attattattatcacaaatgtatagagtcagaga

SEQ ID NO: 571280 - DNA, 33 bp, Homo sapien
attattattatcacaactgtatagagtcagaga

SEQ ID NO: 571281 - DNA, 33 bp, Homo sapien
attctgccttgagacaacttcgagggacaaaca

SEQ ID NO: 571282 - DNA, 33 bp, Homo sapien
attctgccttgagacagcttcgagggacaaaca

SEQ ID NO: 571283 - DNA, 33 bp, Homo sapien
ctgactacttcagcaaatgcctttcaattgccc

SEQ ID NO: 571284 - DNA, 33 bp, Homo sapien
ctgactacttcagcaagtgcctttcaattgccc

SEQ ID NO: 571285 - DNA, 33 bp, Homo sapien
actaatttactttctacctctgtgaatctgcct

SEQ ID NO: 571286 - DNA, 33 bp, Homo sapien
actaatttactttctagctctgtgaatctgcct

SEQ ID NO: 571287 - DNA, 33 bp, Homo sapien
tattgaattaaagagccagtggagtgtccagtg

SEQ ID NO: 571288 - DNA, 33 bp, Homo sapien
tattgaattaaagagctagtggagtgtccagtg

SEQ ID NO: 571289 - DNA, 33 bp, Homo sapien
tcatagaggtgtcatcaagcaggaaacaccatg

SEQ ID NO: 571290 - DNA, 33 bp, Homo sapien
tcatagaggtgtcatcgagcaggaaacaccatg

SEQ ID NO: 571291 - DNA, 33 bp, Homo sapien
ctccagaagatgaaaaggcaagagaaagcattc

SEQ ID NO: 571292 - DNA, 33 bp, Homo sapien
ctccagaagatgaaaatgcaagagaaagcattc

SEQ ID NO: 571293 - DNA, 33 bp, Homo sapien
gactgcctgcacccaactccttatctctcaatc

SEQ ID NO: 571294 - DNA, 33 bp, Homo sapien
gactgcctgcacccaagtccttatctctcaatc

SEQ ID NO: 571295 - DNA, 33 bp, Homo sapien
tcactcaatataagaaataactgaagattggcc

SEQ ID NO: 571296 - DNA, 33 bp, Homo sapien
tcactcaatataagaagtaactgaagattggcc

SEQ ID NO: 571297 - DNA, 33 bp, Homo sapien
ttatttgtaggataataaagcagaaagaccaag

SEQ ID NO: 571298 - DNA, 33 bp, Homo sapien
ttatttgtaggataatgaagcagaaagaccaag

SEQ ID NO: 571299 - DNA, 33 bp, Homo sapien
cctgggaggcaatgaaaaagctgggtctgttaa

SEQ ID NO: 571300 - DNA, 33 bp, Homo sapien
cctgggaggcaatgaagaagctgggtctgttaa

SEQ ID NO: 571301 - DNA, 33 bp, Homo sapien
gtcagtttctggaatacgtgcgagatcattgac

SEQ ID NO: 571302 - DNA, 33 bp, Homo sapien
gtcagtttctggaatatgtgcgagatcattgac

SEQ ID NO: 571303 - DNA, 33 bp, Homo sapien
atgtttgctggttttacatggaggccttgctgg

SEQ ID NO: 571304 - DNA, 33 bp, Homo sapien
atgtttgctggttttatatggaggccttgctgg

SEQ ID NO: 571305 - DNA, 33 bp, Homo sapien
ataattacataatcaagttcatactatgccagc

SEQ ID NO: 571306 - DNA, 33 bp, Homo sapien
ataattacataatcaatttcatactatgccagc

SEQ ID NO: 571307 - DNA, 33 bp, Homo sapien
atgtcagagttaaaaactgaggccatctgattt

SEQ ID NO: 571308 - DNA, 33 bp, Homo sapien
atgtcagagttaaaaattgaggccatctgattt

SEQ ID NO: 571309 - DNA, 33 bp, Homo sapien
cctcggattttgacaaaggatcttccagtggtc

SEQ ID NO: 571310 - DNA, 33 bp, Homo sapien
cctcggattttgacaatggatcttccagtggtc

SEQ ID NO: 571311 - DNA, 33 bp, Homo sapien
ctgtagtataccttcactaatgcctcctgaggt

SEQ ID NO: 571312 - DNA, 33 bp, Homo sapien
ctgtagtataccttcattaatgcctcctgaggt

SEQ ID NO: 571313 - DNA, 33 bp, Homo sapien
ttcaaggagactagcactatcttcagaggccac

SEQ ID NO: 571314 - DNA, 33 bp, Homo sapien
ttcaaggagactagcattatcttcagaggccac

SEQ ID NO: 571315 - DNA, 33 bp, Homo sapien
tcaccactgaatccacaacaatgaaaagtgcct

SEQ ID NO: 571316 - DNA, 33 bp, Homo sapien
tcaccactgaatccacgacaatgaaaagtgcct

SEQ ID NO: 571317 - DNA, 33 bp, Homo sapien
gcctggaaactgaccaactatgtaattctgagc

SEQ ID NO: 571318 - DNA, 33 bp, Homo sapien
gcctggaaactgaccagctatgtaattctgagc

SEQ ID NO: 571319 - DNA, 33 bp, Homo sapien
agtggttagggcacaaaggatttgcgtttgcaa

SEQ ID NO: 571320 - DNA, 33 bp, Homo sapien
agtggttagggcacaagggatttgcgtttgcaa

SEQ ID NO: 571321 - DNA, 33 bp, Homo sapien
gggagtcctctctaaagggctgcatcaagaaag

SEQ ID NO: 571322 - DNA, 33 bp, Homo sapien
gggagtcctctctaaatggctgcatcaagaaag

SEQ ID NO: 571323 - DNA, 33 bp, Homo sapien
ccatagaagcttaggagctagactactgggttc

SEQ ID NO: 571324 - DNA, 33 bp, Homo sapien
ccatagaagcttaggatctagactactgggttc

SEQ ID NO: 571325 - DNA, 33 bp, Homo sapien
gttattttttcaaacaatgactcagctgttagg

SEQ ID NO: 571326 - DNA, 33 bp, Homo sapien
gttattttttcaaacagtgactcagctgttagg

SEQ ID NO: 571327 - DNA, 33 bp, Homo sapien
aggtcactgaaggaatcagtttctcggcttcct

SEQ ID NO: 571328 - DNA, 33 bp, Homo sapien
aggtcactgaaggaatgagtttctcggcttcct

SEQ ID NO: 571329 - DNA, 33 bp, Homo sapien
ggtattagccagagaaaatttacgcaaaacata

SEQ ID NO: 571330 - DNA, 33 bp, Homo sapien
ggtattagccagagaacatttacgcaaaacata

SEQ ID NO: 571331 - DNA, 33 bp, Homo sapien
aatctaattaatgacaacttcaaaaagcctaca

SEQ ID NO: 571332 - DNA, 33 bp, Homo sapien
aatctaattaatgacatcttcaaaaagcctaca

SEQ ID NO: 571333 - DNA, 33 bp, Homo sapien
actcagccataataaggagcaaaataatgcatt

SEQ ID NO: 571334 - DNA, 33 bp, Homo sapien
actcagccataataagtagcaaaataatgcatt

SEQ ID NO: 571335 - DNA, 33 bp, Homo sapien
aacaaactatgcaaaacgactcaaacacaaaaa

SEQ ID NO: 571336 - DNA, 33 bp, Homo sapien
aacaaactatgcaaaatgactcaaacacaaaaa

SEQ ID NO: 571337 - DNA, 33 bp, Homo sapien
gtagactccactgataaagattaaaataaagag

SEQ ID NO: 571338 - DNA, 33 bp, Homo sapien
gtagactccactgatatagattaaaataaagag

SEQ ID NO: 571339 - DNA, 33 bp, Homo sapien
ctttatcttagccccacgttctaatgagctgga

SEQ ID NO: 571340 - DNA, 33 bp, Homo sapien
ctttatcttagccccaggttctaatgagctgga

SEQ ID NO: 571341 - DNA, 33 bp, Homo sapien
cctgtctgatcctaaaagcccaggttaatttac

SEQ ID NO: 571342 - DNA, 33 bp, Homo sapien
cctgtctgatcctaaaggcccaggttaatttac

SEQ ID NO: 571343 - DNA, 33 bp, Homo sapien
gtacctctgtggctgacgtacgctgcttcaata

SEQ ID NO: 571344 - DNA, 33 bp, Homo sapien
gtacctctgtggctgatgtacgctgcttcaata

SEQ ID NO: 571345 - DNA, 33 bp, Homo sapien
gagcaccactgaaacacggatatgtgggtccca

SEQ ID NO: 571346 - DNA, 33 bp, Homo sapien
gagcaccactgaaacatggatatgtgggtccca

SEQ ID NO: 571347 - DNA, 33 bp, Homo sapien
acattctcgttggggacgggagaggcagaaata

SEQ ID NO: 571348 - DNA, 33 bp, Homo sapien
acattctcgttggggatgggagaggcagaaata

SEQ ID NO: 571349 - DNA, 33 bp, Homo sapien
acctcagctattgacactggggaccagataatc

SEQ ID NO: 571350 - DNA, 33 bp, Homo sapien
acctcagctattgacattggggaccagataatc

SEQ ID NO: 571351 - DNA, 33 bp, Homo sapien
aggtacaaattagaaaacagttctgcggctgga

SEQ ID NO: 571352 - DNA, 33 bp, Homo sapien
aggtacaaattagaaagcagttctgcggctgga

SEQ ID NO: 571353 - DNA, 33 bp, Homo sapien
ttgctttaatacatggcaatacagagatcggct

SEQ ID NO: 571354 - DNA, 33 bp, Homo sapien
ttgctttaatacatggtaatacagagatcggct

SEQ ID NO: 571355 - DNA, 33 bp, Homo sapien
cacatatatttagcaaacctagagccaggaaat

SEQ ID NO: 571356 - DNA, 33 bp, Homo sapien
cacatatatttagcaatcctagagccaggaaat

SEQ ID NO: 571357 - DNA, 33 bp, Homo sapien
ttatttttgaactgtagagcaggaggacgtgct

SEQ ID NO: 571358 - DNA, 33 bp, Homo sapien
ttatttttgaactgtatagcaggaggacgtgct

SEQ ID NO: 571359 - DNA, 33 bp, Homo sapien
tcattacagtcttttacccatttcattacagtc

SEQ ID NO: 571360 - DNA, 33 bp, Homo sapien
tcattacagtcttttatccatttcattacagtc

SEQ ID NO: 571361 - DNA, 33 bp, Homo sapien
gcttgcagatagcctacggtaggacttgtcttg

SEQ ID NO: 571362 - DNA, 33 bp, Homo sapien
gcttgcagatagcctatggtaggacttgtcttg

SEQ ID NO: 571363 - DNA, 33 bp, Homo sapien
agcctggtatggaataagttctcaatcagtgtt

SEQ ID NO: 571364 - DNA, 33 bp, Homo sapien
agcctggtatggaataggttctcaatcagtgtt

SEQ ID NO: 571365 - DNA, 33 bp, Homo sapien
agaaaccatcaacataaaaatcatccattcaat

SEQ ID NO: 571366 - DNA, 33 bp, Homo sapien
agaaaccatcaacatacaaatcatccattcaat

SEQ ID NO: 571367 - DNA, 33 bp, Homo sapien
cagagctggttgggtgcagccataccttagaag

SEQ ID NO: 571368 - DNA, 33 bp, Homo sapien
cagagctggttgggtgtagccataccttagaag

SEQ ID NO: 571369 - DNA, 33 bp, Homo sapien
atcaagggccatgtatcaggtttctgtatatgt

SEQ ID NO: 571370 - DNA, 33 bp, Homo sapien
atcaagggccatgtattaggtttctgtatatgt

SEQ ID NO: 571371 - DNA, 33 bp, Homo sapien
ttttgaggcttctccacgttgttatctgtatct

SEQ ID NO: 571372 - DNA, 33 bp, Homo sapien
ttttgaggcttctccatgttgttatctgtatct

SEQ ID NO: 571373 - DNA, 33 bp, Homo sapien
ctgtatgaggttggaaagccttattaacatcgt

SEQ ID NO: 571374 - DNA, 33 bp, Homo sapien
ctgtatgaggttggaaggccttattaacatcgt

SEQ ID NO: 571375 - DNA, 33 bp, Homo sapien
aaatccagttaccccaaacccatttgttgaaga

SEQ ID NO: 571376 - DNA, 33 bp, Homo sapien
aaatccagttaccccagacccatttgttgaaga

SEQ ID NO: 571377 - DNA, 33 bp, Homo sapien
atatttctccaaaaaaatacatacaaatggcca

SEQ ID NO: 571378 - DNA, 33 bp, Homo sapien
atatttctccaaaaaattacatacaaatggcca

SEQ ID NO: 571379 - DNA, 33 bp, Homo sapien
ctgctaacagtcaaaacgtccatcagaaggaac

SEQ ID NO: 571380 - DNA, 33 bp, Homo sapien
ctgctaacagtcaaaatgtccatcagaaggaac

SEQ ID NO: 571381 - DNA, 33 bp, Homo sapien
agatgttagctaggtaactagtcaatctggaga

SEQ ID NO: 571382 - DNA, 33 bp, Homo sapien
agatgttagctaggtagctagtcaatctggaga

SEQ ID NO: 571383 - DNA, 33 bp, Homo sapien
cattgtgggtgtttgagcaggggcatgagaaag

SEQ ID NO: 571384 - DNA, 33 bp, Homo sapien
cattgtgggtgtttgatcaggggcatgagaaag

SEQ ID NO: 571385 - DNA, 33 bp, Homo sapien
atccactcaccaagccacaacactagttcaaag

SEQ ID NO: 571386 - DNA, 33 bp, Homo sapien
atccactcaccaagccgcaacactagttcaaag

SEQ ID NO: 571387 - DNA, 33 bp, Homo sapien
ccatcttaatagtgccagataattgacaaattt

SEQ ID NO: 571388 - DNA, 33 bp, Homo sapien
ccatcttaatagtgccggataattgacaaattt

SEQ ID NO: 571389 - DNA, 33 bp, Homo sapien
gtgttttaatatcctaaattcgaagacaaacat

SEQ ID NO: 571390 - DNA, 33 bp, Homo sapien
gtgttttaatatcctagattcgaagacaaacat

SEQ ID NO: 571391 - DNA, 33 bp, Homo sapien
agcagttctttctgcccggaacgcccttcccca

SEQ ID NO: 571392 - DNA, 33 bp, Homo sapien
agcagttctttctgccgggaacgcccttcccca

SEQ ID NO: 571393 - DNA, 33 bp, Homo sapien
ctagaagactataccccgcgcttaacagtagtt

SEQ ID NO: 571394 - DNA, 33 bp, Homo sapien
ctagaagactataccctgcgcttaacagtagtt

SEQ ID NO: 571395 - DNA, 33 bp, Homo sapien
cacactgttaggcaatcaatctgcagaactgtt

SEQ ID NO: 571396 - DNA, 33 bp, Homo sapien
cacactgttaggcaattaatctgcagaactgtt

SEQ ID NO: 571397 - DNA, 33 bp, Homo sapien
tctccactcaaggaaccgatagtctaggggaaa

SEQ ID NO: 571398 - DNA, 33 bp, Homo sapien
tctccactcaaggaactgatagtctaggggaaa

SEQ ID NO: 571399 - DNA, 33 bp, Homo sapien
taccaataatgatcaacgttctaagttccacat

SEQ ID NO: 571400 - DNA, 33 bp, Homo sapien
taccaataatgatcaatgttctaagttccacat

SEQ ID NO: 571401 - DNA, 33 bp, Homo sapien
agtgagaaaacatataaaagccttctggaaatg

SEQ ID NO: 571402 - DNA, 33 bp, Homo sapien
agtgagaaaacatatagaagccttctggaaatg

SEQ ID NO: 571403 - DNA, 33 bp, Homo sapien
ggtaaattcagcaaaacgtgaattaaaacgcag

SEQ ID NO: 571404 - DNA, 33 bp, Homo sapien
ggtaaattcagcaaaatgtgaattaaaacgcag

SEQ ID NO: 571405 - DNA, 33 bp, Homo sapien
cagcacgtctaactgaccacactgtgttgttct

SEQ ID NO: 571406 - DNA, 33 bp, Homo sapien
cagcacgtctaactgatcacactgtgttgttct

SEQ ID NO: 571407 - DNA, 33 bp, Homo sapien
attcagaatctctaaagtccaaagcactgaaga

SEQ ID NO: 571408 - DNA, 33 bp, Homo sapien
attcagaatctctaaattccaaagcactgaaga

SEQ ID NO: 571409 - DNA, 33 bp, Homo sapien
cactgtacctaaagaaaaagataaaagagtaga

SEQ ID NO: 571410 - DNA, 33 bp, Homo sapien
cactgtacctaaagaagaagataaaagagtaga

SEQ ID NO: 571411 - DNA, 33 bp, Homo sapien
gagatctaaattatccccctttgcaattgcata

SEQ ID NO: 571412 - DNA, 33 bp, Homo sapien
gagatctaaattatcctcctttgcaattgcata

SEQ ID NO: 571413 - DNA, 33 bp, Homo sapien
tcagatcagaaaataacaacagcttggctgggc

SEQ ID NO: 571414 - DNA, 33 bp, Homo sapien
tcagatcagaaaataataacagcttggctgggc

SEQ ID NO: 571415 - DNA, 33 bp, Homo sapien
cctggactctggactaataacatacagaattta

SEQ ID NO: 571416 - DNA, 33 bp, Homo sapien
cctggactctggactagtaacatacagaattta

SEQ ID NO: 571417 - DNA, 33 bp, Homo sapien
aattccttactccacaatcacatttatctgatc

SEQ ID NO: 571418 - DNA, 33 bp, Homo sapien
aattccttactccacagtcacatttatctgatc

SEQ ID NO: 571419 - DNA, 33 bp, Homo sapien
tggaaagggatgaacaacaaaggggggcaagga

SEQ ID NO: 571420 - DNA, 33 bp, Homo sapien
tggaaagggatgaacagcaaaggggggcaagga

SEQ ID NO: 571421 - DNA, 33 bp, Homo sapien
tgttcggtttctcaacagtgagactgaaactga

SEQ ID NO: 571422 - DNA, 33 bp, Homo sapien
tgttcggtttctcaactgtgagactgaaactga

SEQ ID NO: 571423 - DNA, 33 bp, Homo sapien
gagagcaaatgtacagaacctgcaagcccccta

SEQ ID NO: 571424 - DNA, 33 bp, Homo sapien
gagagcaaatgtacaggacctgcaagcccccta

SEQ ID NO: 571425 - DNA, 33 bp, Homo sapien
aatattgacagagaagcaagctattgaaaccac

SEQ ID NO: 571426 - DNA, 33 bp, Homo sapien
aatattgacagagaagtaagctattgaaaccac

SEQ ID NO: 571427 - DNA, 33 bp, Homo sapien
taaagcacagagtagagtagcagagaaacatgt

SEQ ID NO: 571428 - DNA, 33 bp, Homo sapien
taaagcacagagtagattagcagagaaacatgt

SEQ ID NO: 571429 - DNA, 33 bp, Homo sapien
aatgtcaacatcatgacactaagaaaggctgac

SEQ ID NO: 571430 - DNA, 33 bp, Homo sapien
aatgtcaacatcatgagactaagaaaggctgac

SEQ ID NO: 571431 - DNA, 33 bp, Homo sapien
tgctagaagtgagaatcaaatctagatctaagc

SEQ ID NO: 571432 - DNA, 33 bp, Homo sapien
tgctagaagtgagaatgaaatctagatctaagc

SEQ ID NO: 571433 - DNA, 33 bp, Homo sapien
cctgtccattcacatgcaggcatgccgtgcttg

SEQ ID NO: 571434 - DNA, 33 bp, Homo sapien
cctgtccattcacatgtaggcatgccgtgcttg

SEQ ID NO: 571435 - DNA, 33 bp, Homo sapien
caacatacatccatgaacaattttagatggcag

SEQ ID NO: 571436 - DNA, 33 bp, Homo sapien
caacatacatccatgagcaattttagatggcag

SEQ ID NO: 571437 - DNA, 33 bp, Homo sapien
atgtggatttcaatgacggatacagtgctttca

SEQ ID NO: 571438 - DNA, 33 bp, Homo sapien
atgtggatttcaatgatggatacagtgctttca

SEQ ID NO: 571439 - DNA, 33 bp, Homo sapien
tggccacccatactaacgccacatacacacagc

SEQ ID NO: 571440 - DNA, 33 bp, Homo sapien
tggccacccatactaatgccacatacacacagc

SEQ ID NO: 571441 - DNA, 33 bp, Homo sapien
atttctcaaactataaagtggccaggaatcgct

SEQ ID NO: 571442 - DNA, 33 bp, Homo sapien
atttctcaaactataatgtggccaggaatcgct

SEQ ID NO: 571443 - DNA, 33 bp, Homo sapien
gagatttcagatataaatagttcattcgggaag

SEQ ID NO: 571444 - DNA, 33 bp, Homo sapien
gagatttcagatataagtagttcattcgggaag

SEQ ID NO: 571445 - DNA, 33 bp, Homo sapien
aagggttgagcaagaacgtttacttgtgtcaag

SEQ ID NO: 571446 - DNA, 33 bp, Homo sapien
aagggttgagcaagaatgtttacttgtgtcaag

SEQ ID NO: 571447 - DNA, 33 bp, Homo sapien
tggggcaagagctctccaggtagagggaaaagc

SEQ ID NO: 571448 - DNA, 33 bp, Homo sapien
tggggcaagagctctcgaggtagagggaaaagc

SEQ ID NO: 571449 - DNA, 33 bp, Homo sapien
ttaagcacctctgtaaaccttgtcatacgagta

SEQ ID NO: 571450 - DNA, 33 bp, Homo sapien
ttaagcacctctgtaagccttgtcatacgagta

SEQ ID NO: 571451 - DNA, 33 bp, Homo sapien
gaaactactcagaaacagtacatggagtttgga

SEQ ID NO: 571452 - DNA, 33 bp, Homo sapien
gaaactactcagaaacggtacatggagtttgga

SEQ ID NO: 571453 - DNA, 33 bp, Homo sapien
gagtgtggccaagttaaacaagcgcagggttgg

SEQ ID NO: 571454 - DNA, 33 bp, Homo sapien
gagtgtggccaagttacacaagcgcagggttgg

SEQ ID NO: 571455 - DNA, 33 bp, Homo sapien
taaaaggactttcaaagtatcaccatgtgatat

SEQ ID NO: 571456 - DNA, 33 bp, Homo sapien
taaaaggactttcaaattatcaccatgtgatat

SEQ ID NO: 571457 - DNA, 33 bp, Homo sapien
tttttttagagctatacggtttacaaagtgctg

SEQ ID NO: 571458 - DNA, 33 bp, Homo sapien
tttttttagagctatatggtttacaaagtgctg

SEQ ID NO: 571459 - DNA, 33 bp, Homo sapien
catcaaagcctgacaacatactctacgtccatc

SEQ ID NO: 571460 - DNA, 33 bp, Homo sapien
catcaaagcctgacaatatactctacgtccatc

SEQ ID NO: 571461 - DNA, 33 bp, Homo sapien
gttctgtcttgtgcaaataagtagatgaaagag

SEQ ID NO: 571462 - DNA, 33 bp, Homo sapien
gttctgtcttgtgcaagtaagtagatgaaagag

SEQ ID NO: 571463 - DNA, 33 bp, Homo sapien
aagtagatgaaagagcccttcatggaattaggg

SEQ ID NO: 571464 - DNA, 33 bp, Homo sapien
aagtagatgaaagagcgcttcatggaattaggg

SEQ ID NO: 571465 - DNA, 33 bp, Homo sapien
tagtgggttagaggaaagggctgctatgtctga

SEQ ID NO: 571466 - DNA, 33 bp, Homo sapien
tagtgggttagaggaaggggctgctatgtctga

SEQ ID NO: 571467 - DNA, 33 bp, Homo sapien
atgattttacattcccaccaacaacgcacaagt

SEQ ID NO: 571468 - DNA, 33 bp, Homo sapien
atgattttacattcccgccaacaacgcacaagt

SEQ ID NO: 571469 - DNA, 33 bp, Homo sapien
acgtgtaagacaccatcaagtgtaccaacacac

SEQ ID NO: 571470 - DNA, 33 bp, Homo sapien
acgtgtaagacaccattaagtgtaccaacacac

SEQ ID NO: 571471 - DNA, 33 bp, Homo sapien
ataagccaagaaagtacaagaatcttgagagga

SEQ ID NO: 571472 - DNA, 33 bp, Homo sapien
ataagccaagaaagtagaagaatcttgagagga

SEQ ID NO: 571473 - DNA, 33 bp, Homo sapien
gttttaacgtctaatacggttaatatcaataga

SEQ ID NO: 571474 - DNA, 33 bp, Homo sapien
gttttaacgtctaatatggttaatatcaataga

SEQ ID NO: 571475 - DNA, 33 bp, Homo sapien
ccagtgaggtccagaacagggaagggacttgcc

SEQ ID NO: 571476 - DNA, 33 bp, Homo sapien
ccagtgaggtccagaatagggaagggacttgcc

SEQ ID NO: 571477 - DNA, 33 bp, Homo sapien
cccctctctcgaaagggccaatcccccagctct

SEQ ID NO: 571478 - DNA, 33 bp, Homo sapien
cccctctctcgaaaggtccaatcccccagctct

SEQ ID NO: 571479 - DNA, 33 bp, Homo sapien
tagattgctcagacacaggatctcctgccaggc

SEQ ID NO: 571480 - DNA, 33 bp, Homo sapien
tagattgctcagacacgggatctcctgccaggc

SEQ ID NO: 571481 - DNA, 33 bp, Homo sapien
ctacaggaaacaaacaagccccttctggcatca

SEQ ID NO: 571482 - DNA, 33 bp, Homo sapien
ctacaggaaacaaacacgccccttctggcatca

SEQ ID NO: 571483 - DNA, 33 bp, Homo sapien
gactcagaaggagaggccagtgatataggagaa

SEQ ID NO: 571484 - DNA, 33 bp, Homo sapien
gactcagaaggagaggtcagtgatataggagaa

SEQ ID NO: 571485 - DNA, 33 bp, Homo sapien
tctgagatttttatcacaggccattgtaggtat

SEQ ID NO: 571486 - DNA, 33 bp, Homo sapien
tctgagatttttatcataggccattgtaggtat

SEQ ID NO: 571487 - DNA, 33 bp, Homo sapien
gagagactgtatgggaagaaatatctcagaaca

SEQ ID NO: 571488 - DNA, 33 bp, Homo sapien
gagagactgtatgggacgaaatatctcagaaca

SEQ ID NO: 571489 - DNA, 33 bp, Homo sapien
cagtcatggaaagggccgagggtcattttcacc

SEQ ID NO: 571490 - DNA, 33 bp, Homo sapien
cagtcatggaaagggctgagggtcattttcacc

SEQ ID NO: 571491 - DNA, 33 bp, Homo sapien
ctcactcagacctaacaaagcataacttacagg

SEQ ID NO: 571492 - DNA, 33 bp, Homo sapien
ctcactcagacctaacgaagcataacttacagg

SEQ ID NO: 571493 - DNA, 33 bp, Homo sapien
tctgctgcagggtcacacgtactcccactgaga

SEQ ID NO: 571494 - DNA, 33 bp, Homo sapien
tctgctgcagggtcactcgtactcccactgaga

SEQ ID NO: 571495 - DNA, 33 bp, Homo sapien
cttatctcaaaggcaaacggacaacattaaata

SEQ ID NO: 571496 - DNA, 33 bp, Homo sapien
cttatctcaaaggcaatcggacaacattaaata

SEQ ID NO: 571497 - DNA, 33 bp, Homo sapien
gaaagcaacacaagaacgttatttttgctctaa

SEQ ID NO: 571498 - DNA, 33 bp, Homo sapien
gaaagcaacacaagaatgttatttttgctctaa

SEQ ID NO: 571499 - DNA, 33 bp, Homo sapien
tctactgggctttggacgatcgttctgtagaag

SEQ ID NO: 571500 - DNA, 33 bp, Homo sapien
tctactgggctttggatgatcgttctgtagaag

SEQ ID NO: 571501 - DNA, 33 bp, Homo sapien
ataaaagatgtactaccctctggtcactccctt

SEQ ID NO: 571502 - DNA, 33 bp, Homo sapien
ataaaagatgtactactctctggtcactccctt

SEQ ID NO: 571503 - DNA, 33 bp, Homo sapien
ctcttgtgaaaatgaaagagccagggtccgggc

SEQ ID NO: 571504 - DNA, 33 bp, Homo sapien
ctcttgtgaaaatgaaggagccagggtccgggc

SEQ ID NO: 571505 - DNA, 33 bp, Homo sapien
tgcctctctttgcttaagggctttctctggttg

SEQ ID NO: 571506 - DNA, 33 bp, Homo sapien
tgcctctctttgcttatgggctttctctggttg

SEQ ID NO: 571507 - DNA, 33 bp, Homo sapien
cagttgcccacagtaggaatttgttagataata

SEQ ID NO: 571508 - DNA, 33 bp, Homo sapien
cagttgcccacagtagtaatttgttagataata

SEQ ID NO: 571509 - DNA, 33 bp, Homo sapien
taattgttcagattccagctcacagatgggcca

SEQ ID NO: 571510 - DNA, 33 bp, Homo sapien
taattgttcagattcctgctcacagatgggcca

SEQ ID NO: 571511 - DNA, 33 bp, Homo sapien
caagaatctgtttttaaaatctcgccagacaaa

SEQ ID NO: 571512 - DNA, 33 bp, Homo sapien
caagaatctgtttttacaatctcgccagacaaa

SEQ ID NO: 571513 - DNA, 33 bp, Homo sapien
gcagcaccacagcaggcaccgtgctttctggcc

SEQ ID NO: 571514 - DNA, 33 bp, Homo sapien
gcagcaccacagcagggaccgtgctttctggcc

SEQ ID NO: 571515 - DNA, 33 bp, Homo sapien
tctgtgtgtcttacaaagagcaaaatcaatttt

SEQ ID NO: 571516 - DNA, 33 bp, Homo sapien
tctgtgtgtcttacaaggagcaaaatcaatttt

SEQ ID NO: 571517 - DNA, 33 bp, Homo sapien
tgttgagtagaaacgccctgtgtgtggtgtgtg

SEQ ID NO: 571518 - DNA, 33 bp, Homo sapien
tgttgagtagaaacgctctgtgtgtggtgtgtg

SEQ ID NO: 571519 - DNA, 33 bp, Homo sapien
agagacagaaataaacaatttcaaatgtgtgtg

SEQ ID NO: 571520 - DNA, 33 bp, Homo sapien
agagacagaaataaaccatttcaaatgtgtgtg

SEQ ID NO: 571521 - DNA, 33 bp, Homo sapien
ccccacaaaacacttacagcaaaaatagatgac

SEQ ID NO: 571522 - DNA, 33 bp, Homo sapien
ccccacaaaacacttatagcaaaaatagatgac

SEQ ID NO: 571523 - DNA, 33 bp, Homo sapien
gacacccagctgtcaccaagattcctggacaga

SEQ ID NO: 571524 - DNA, 33 bp, Homo sapien
gacacccagctgtcactaagattcctggacaga

SEQ ID NO: 571525 - DNA, 33 bp, Homo sapien
agccctagtttaactgcatttgtgcgaaagcta

SEQ ID NO: 571526 - DNA, 33 bp, Homo sapien
agccctagtttaactgtatttgtgcgaaagcta

SEQ ID NO: 571527 - DNA, 33 bp, Homo sapien
gtccttacttcacaaaaggaaaaggtggcattc

SEQ ID NO: 571528 - DNA, 33 bp, Homo sapien
gtccttacttcacaaacggaaaaggtggcattc

SEQ ID NO: 571529 - DNA, 33 bp, Homo sapien
tctcccagttcacccacgatgttccaaatgacg

SEQ ID NO: 571530 - DNA, 33 bp, Homo sapien
tctcccagttcacccaggatgttccaaatgacg

SEQ ID NO: 571531 - DNA, 33 bp, Homo sapien
agattgtatttatggccgagctgagatatgtaa

SEQ ID NO: 571532 - DNA, 33 bp, Homo sapien
agattgtatttatggctgagctgagatatgtaa

SEQ ID NO: 571533 - DNA, 33 bp, Homo sapien
acttagcacaatgcaacgtgtgaccacctttgt

SEQ ID NO: 571534 - DNA, 33 bp, Homo sapien
acttagcacaatgcaatgtgtgaccacctttgt

SEQ ID NO: 571535 - DNA, 33 bp, Homo sapien
ccctctgcacacaggaaccatccttcatctttc

SEQ ID NO: 571536 - DNA, 33 bp, Homo sapien
ccctctgcacacaggacccatccttcatctttc

SEQ ID NO: 571537 - DNA, 33 bp, Homo sapien
agggctttttggattgcagataaggcagtttca

SEQ ID NO: 571538 - DNA, 33 bp, Homo sapien
agggctttttggattgtagataaggcagtttca

SEQ ID NO: 571539 - DNA, 33 bp, Homo sapien
atgaatattcacacaaatggggtgagtaaagat

SEQ ID NO: 571540 - DNA, 33 bp, Homo sapien
atgaatattcacacaagtggggtgagtaaagat

SEQ ID NO: 571541 - DNA, 33 bp, Homo sapien
tggcagtgattcaaaaatagaaatttatactga

SEQ ID NO: 571542 - DNA, 33 bp, Homo sapien
tggcagtgattcaaaactagaaatttatactga

SEQ ID NO: 571543 - DNA, 33 bp, Homo sapien
caactaggtatggaaacgtatcaagattaagga

SEQ ID NO: 571544 - DNA, 33 bp, Homo sapien
caactaggtatggaaatgtatcaagattaagga

SEQ ID NO: 571545 - DNA, 33 bp, Homo sapien
tttcagtcaataaaagacatcgaggggtagtgt

SEQ ID NO: 571546 - DNA, 33 bp, Homo sapien
tttcagtcaataaaaggcatcgaggggtagtgt

SEQ ID NO: 571547 - DNA, 33 bp, Homo sapien
agtaaagtcagtagacaaaagttgggcaagaat

SEQ ID NO: 571548 - DNA, 33 bp, Homo sapien
agtaaagtcagtagacgaaagttgggcaagaat

SEQ ID NO: 571549 - DNA, 33 bp, Homo sapien
agacttatctgatcgacggctgggatggtcaag

SEQ ID NO: 571550 - DNA, 33 bp, Homo sapien
agacttatctgatcgatggctgggatggtcaag

SEQ ID NO: 571551 - DNA, 33 bp, Homo sapien
ttatggacacagacaaacctgacaaaattgcat

SEQ ID NO: 571552 - DNA, 33 bp, Homo sapien
ttatggacacagacaagcctgacaaaattgcat

SEQ ID NO: 571553 - DNA, 33 bp, Homo sapien
ctgtaacttcttatcacgggtatagtgatttta

SEQ ID NO: 571554 - DNA, 33 bp, Homo sapien
ctgtaacttcttatcatgggtatagtgatttta

SEQ ID NO: 571555 - DNA, 33 bp, Homo sapien
aaaactccaaaccccaacaactggagctgagct

SEQ ID NO: 571556 - DNA, 33 bp, Homo sapien
aaaactccaaaccccatcaactggagctgagct

SEQ ID NO: 571557 - DNA, 33 bp, Homo sapien
ttactaatatttttaactggcaaagctcttacg

SEQ ID NO: 571558 - DNA, 33 bp, Homo sapien
ttactaatatttttaattggcaaagctcttacg

SEQ ID NO: 571559 - DNA, 33 bp, Homo sapien
gccctacattgcctccacaggtggacctcaacc

SEQ ID NO: 571560 - DNA, 33 bp, Homo sapien
gccctacattgcctccccaggtggacctcaacc

SEQ ID NO: 571561 - DNA, 33 bp, Homo sapien
gggaaagaatttgataaaattgaaaagccatgc

SEQ ID NO: 571562 - DNA, 33 bp, Homo sapien
gggaaagaatttgatacaattgaaaagccatgc

SEQ ID NO: 571563 - DNA, 33 bp, Homo sapien
aatcgtacccacctgaagattgtgatgaagtgt

SEQ ID NO: 571564 - DNA, 33 bp, Homo sapien
aatcgtacccacctgaggattgtgatgaagtgt

SEQ ID NO: 571565 - DNA, 33 bp, Homo sapien
tgtgatgaagtgtatcagagataatgtatgtaa

SEQ ID NO: 571566 - DNA, 33 bp, Homo sapien
tgtgatgaagtgtatcggagataatgtatgtaa

SEQ ID NO: 571567 - DNA, 33 bp, Homo sapien
atgcttaaggcttctccctcaacttcagcgtct

SEQ ID NO: 571568 - DNA, 33 bp, Homo sapien
atgcttaaggcttctctctcaacttcagcgtct

SEQ ID NO: 571569 - DNA, 33 bp, Homo sapien
aaactgcagagcaaacagttctcaaaagagaca

SEQ ID NO: 571570 - DNA, 33 bp, Homo sapien
aaactgcagagcaaacggttctcaaaagagaca

SEQ ID NO: 571571 - DNA, 33 bp, Homo sapien
agaggcacagaggggtaaatgacttggctacac

SEQ ID NO: 571572 - DNA, 33 bp, Homo sapien
agaggcacagaggggtgaatgacttggctacac

SEQ ID NO: 571573 - DNA, 33 bp, Homo sapien
ttggcacgtttgattcccacactctgtggagta

SEQ ID NO: 571574 - DNA, 33 bp, Homo sapien
ttggcacgtttgattctcacactctgtggagta

SEQ ID NO: 571575 - DNA, 33 bp, Homo sapien
tgtgtaagacagaagacgctatagggtccccat

SEQ ID NO: 571576 - DNA, 33 bp, Homo sapien
tgtgtaagacagaagatgctatagggtccccat

SEQ ID NO: 571577 - DNA, 33 bp, Homo sapien
aggatttcatcacactcaggatggttgcagact

SEQ ID NO: 571578 - DNA, 33 bp, Homo sapien
aggatttcatcacactgaggatggttgcagact

SEQ ID NO: 571579 - DNA, 33 bp, Homo sapien
taagatggataaaccccgggtaaaggtgaacag

SEQ ID NO: 571580 - DNA, 33 bp, Homo sapien
taagatggataaaccctgggtaaaggtgaacag

SEQ ID NO: 571581 - DNA, 33 bp, Homo sapien
gagggaaccactggtcaaaaacaatgacaaacc

SEQ ID NO: 571582 - DNA, 33 bp, Homo sapien
gagggaaccactggtcgaaaacaatgacaaacc

SEQ ID NO: 571583 - DNA, 33 bp, Homo sapien
agtggttccctctcaactcttcacaaagataca

SEQ ID NO: 571584 - DNA, 33 bp, Homo sapien
agtggttccctctcaattcttcacaaagataca

SEQ ID NO: 571585 - DNA, 33 bp, Homo sapien
tggcctgtgggagttaaccaaaagcacttgctg

SEQ ID NO: 571586 - DNA, 33 bp, Homo sapien
tggcctgtgggagttacccaaaagcacttgctg

SEQ ID NO: 571587 - DNA, 33 bp, Homo sapien
atgcctgagtaagaagaaactggtcaacaggtc

SEQ ID NO: 571588 - DNA, 33 bp, Homo sapien
atgcctgagtaagaagtaactggtcaacaggtc

SEQ ID NO: 571589 - DNA, 33 bp, Homo sapien
tgtggtaagtagaagcaatggtagaaatgttat

SEQ ID NO: 571590 - DNA, 33 bp, Homo sapien
tgtggtaagtagaagcgatggtagaaatgttat

SEQ ID NO: 571591 - DNA, 33 bp, Homo sapien
agtgggacgattctgacttgcgtcctggaagac

SEQ ID NO: 571592 - DNA, 33 bp, Homo sapien
agtgggacgattctgatttgcgtcctggaagac

SEQ ID NO: 571593 - DNA, 33 bp, Homo sapien
aatggaattctgtagacggttaacctgaccaac

SEQ ID NO: 571594 - DNA, 33 bp, Homo sapien
aatggaattctgtagagggttaacctgaccaac

SEQ ID NO: 571595 - DNA, 33 bp, Homo sapien
aatagcttaatttgaaaacctatgtaaaaaaca

SEQ ID NO: 571596 - DNA, 33 bp, Homo sapien
aatagcttaatttgaagacctatgtaaaaaaca

SEQ ID NO: 571597 - DNA, 33 bp, Homo sapien
aaacacgcattgaggacaggactttggacctaa

SEQ ID NO: 571598 - DNA, 33 bp, Homo sapien
aaacacgcattgaggataggactttggacctaa

SEQ ID NO: 571599 - DNA, 33 bp, Homo sapien
ttggtgactatggccacatagtttgaagtcggg

SEQ ID NO: 571600 - DNA, 33 bp, Homo sapien
ttggtgactatggccatatagtttgaagtcggg

SEQ ID NO: 571601 - DNA, 33 bp, Homo sapien
aggtggttcggcattaagaaatctgcactgtgc

SEQ ID NO: 571602 - DNA, 33 bp, Homo sapien
aggtggttcggcattaggaaatctgcactgtgc

SEQ ID NO: 571603 - DNA, 33 bp, Homo sapien
ttcaaagtcaagggaaaaacatctacaaaggca

SEQ ID NO: 571604 - DNA, 33 bp, Homo sapien
ttcaaagtcaagggaacaacatctacaaaggca

SEQ ID NO: 571605 - DNA, 33 bp, Homo sapien
gagcgtgtaacctactcacaaggagcatgtaac

SEQ ID NO: 571606 - DNA, 33 bp, Homo sapien
gagcgtgtaacctacttacaaggagcatgtaac

SEQ ID NO: 571607 - DNA, 33 bp, Homo sapien
cacaagctgcaaattccagtgacgtcagggtca

SEQ ID NO: 571608 - DNA, 33 bp, Homo sapien
cacaagctgcaaattctagtgacgtcagggtca

SEQ ID NO: 571609 - DNA, 33 bp, Homo sapien
aattggcactagtgccagagtttcaactagatc

SEQ ID NO: 571610 - DNA, 33 bp, Homo sapien
aattggcactagtgccggagtttcaactagatc

SEQ ID NO: 571611 - DNA, 33 bp, Homo sapien
taaaggttccatttcaactttttgagtgacact

SEQ ID NO: 571612 - DNA, 33 bp, Homo sapien
taaaggttccatttcacctttttgagtgacact

SEQ ID NO: 571613 - DNA, 33 bp, Homo sapien
gaataaatgggaatcacggtatagtaagtgata

SEQ ID NO: 571614 - DNA, 33 bp, Homo sapien
gaataaatgggaatcatggtatagtaagtgata

SEQ ID NO: 571615 - DNA, 33 bp, Homo sapien
tcaccaacacttgtcactcatctgtttggtaat

SEQ ID NO: 571616 - DNA, 33 bp, Homo sapien
tcaccaacacttgtcattcatctgtttggtaat

SEQ ID NO: 571617 - DNA, 33 bp, Homo sapien
ccttgactacagaggaaggacctcacaatgaca

SEQ ID NO: 571618 - DNA, 33 bp, Homo sapien
ccttgactacagaggatggacctcacaatgaca

SEQ ID NO: 571619 - DNA, 33 bp, Homo sapien
ctggaccatctgctaaagtattactggacaaac

SEQ ID NO: 571620 - DNA, 33 bp, Homo sapien
ctggaccatctgctaaggtattactggacaaac

SEQ ID NO: 571621 - DNA, 33 bp, Homo sapien
agttcaaccatgtgggaaatgattcaatcaatc

SEQ ID NO: 571622 - DNA, 33 bp, Homo sapien
agttcaaccatgtgggcaatgattcaatcaatc

SEQ ID NO: 571623 - DNA, 33 bp, Homo sapien
gaccttcttctccaaccccctcgctgggaacca

SEQ ID NO: 571624 - DNA, 33 bp, Homo sapien
gaccttcttctccaactccctcgctgggaacca

SEQ ID NO: 571625 - DNA, 33 bp, Homo sapien
catgaagttactctcaaagccggtggttcccag

SEQ ID NO: 571626 - DNA, 33 bp, Homo sapien
catgaagttactctcacagccggtggttcccag

SEQ ID NO: 571627 - DNA, 33 bp, Homo sapien
acccagttggagccccagacttgcccctctctt

SEQ ID NO: 571628 - DNA, 33 bp, Homo sapien
acccagttggagcccccgacttgcccctctctt

SEQ ID NO: 571629 - DNA, 33 bp, Homo sapien
gttgaaacatggaaccggcagagctcaagtgtt

SEQ ID NO: 571630 - DNA, 33 bp, Homo sapien
gttgaaacatggaacctgcagagctcaagtgtt

SEQ ID NO: 571631 - DNA, 33 bp, Homo sapien
aggtcaggaggtgaacaaagaggatggccaggc

SEQ ID NO: 571632 - DNA, 33 bp, Homo sapien
aggtcaggaggtgaacgaagaggatggccaggc

SEQ ID NO: 571633 - DNA, 33 bp, Homo sapien
tgagctgaatcttgcacgctgaacaagagtcta

SEQ ID NO: 571634 - DNA, 33 bp, Homo sapien
tgagctgaatcttgcaggctgaacaagagtcta

SEQ ID NO: 571635 - DNA, 33 bp, Homo sapien
ggagacatccaaggcaaaggagtattctaaaga

SEQ ID NO: 571636 - DNA, 33 bp, Homo sapien
ggagacatccaaggcacaggagtattctaaaga

SEQ ID NO: 571637 - DNA, 33 bp, Homo sapien
aaaaagaattcacccaagcttacatagctagta

SEQ ID NO: 571638 - DNA, 33 bp, Homo sapien
aaaaagaattcacccacgcttacatagctagta

SEQ ID NO: 571639 - DNA, 33 bp, Homo sapien
gttttagaattaacagccctggattccaatttg

SEQ ID NO: 571640 - DNA, 33 bp, Homo sapien
gttttagaattaacaggcctggattccaatttg

SEQ ID NO: 571641 - DNA, 33 bp, Homo sapien
ccatgtctctagcacccagttctgggctccaca

SEQ ID NO: 571642 - DNA, 33 bp, Homo sapien
ccatgtctctagcacctagttctgggctccaca

SEQ ID NO: 571643 - DNA, 33 bp, Homo sapien
gaggcatggtggttaacagcatggaatctgaag

SEQ ID NO: 571644 - DNA, 33 bp, Homo sapien
gaggcatggtggttaatagcatggaatctgaag

SEQ ID NO: 571645 - DNA, 33 bp, Homo sapien
caggtccccattgttgaacatggatgtttgggt

SEQ ID NO: 571646 - DNA, 33 bp, Homo sapien
caggtccccattgttgtacatggatgtttgggt

SEQ ID NO: 571647 - DNA, 33 bp, Homo sapien
ctaatataaacaaatgcatagattcctgttctt

SEQ ID NO: 571648 - DNA, 33 bp, Homo sapien
ctaatataaacaaatgtatagattcctgttctt

SEQ ID NO: 571649 - DNA, 33 bp, Homo sapien
ggggcagccactagcaatctcatttttaccgtt

SEQ ID NO: 571650 - DNA, 33 bp, Homo sapien
ggggcagccactagcattctcatttttaccgtt

SEQ ID NO: 571651 - DNA, 33 bp, Homo sapien
gagtcctgcgtgcccacggagatgttgccatgg

SEQ ID NO: 571652 - DNA, 33 bp, Homo sapien
gagtcctgcgtgcccatggagatgttgccatgg

SEQ ID NO: 571653 - DNA, 33 bp, Homo sapien
ctgccccagacacacaaggaatccaatcccaca

SEQ ID NO: 571654 - DNA, 33 bp, Homo sapien
ctgccccagacacacagggaatccaatcccaca

SEQ ID NO: 571655 - DNA, 33 bp, Homo sapien
ctaacataaggcatctcaatcccaggagctcat

SEQ ID NO: 571656 - DNA, 33 bp, Homo sapien
ctaacataaggcatcttaatcccaggagctcat

SEQ ID NO: 571657 - DNA, 33 bp, Homo sapien
agccatccaagtcttacgtgtgtggagaggcag

SEQ ID NO: 571658 - DNA, 33 bp, Homo sapien
agccatccaagtcttatgtgtgtggagaggcag

SEQ ID NO: 571659 - DNA, 33 bp, Homo sapien
cttctctgaacatcaacctacctatgaaataga

SEQ ID NO: 571660 - DNA, 33 bp, Homo sapien
cttctctgaacatcaatctacctatgaaataga

SEQ ID NO: 571661 - DNA, 33 bp, Homo sapien
cagctataccacattcccatttctctgttcatt

SEQ ID NO: 571662 - DNA, 33 bp, Homo sapien
cagctataccacattctcatttctctgttcatt

SEQ ID NO: 571663 - DNA, 33 bp, Homo sapien
gggaaggggaaaaaccaactcctgaggccaccc

SEQ ID NO: 571664 - DNA, 33 bp, Homo sapien
gggaaggggaaaaaccgactcctgaggccaccc

SEQ ID NO: 571665 - DNA, 33 bp, Homo sapien
catgataattattcaacggcacctgtggaaagt

SEQ ID NO: 571666 - DNA, 33 bp, Homo sapien
catgataattattcaatggcacctgtggaaagt

SEQ ID NO: 571667 - DNA, 33 bp, Homo sapien
gtctgaaatttgttgacgacacttctatgggcc

SEQ ID NO: 571668 - DNA, 33 bp, Homo sapien
gtctgaaatttgttgatgacacttctatgggcc

SEQ ID NO: 571669 - DNA, 33 bp, Homo sapien
atgaggctgagtagcactatagcctacagtccc

SEQ ID NO: 571670 - DNA, 33 bp, Homo sapien
atgaggctgagtagcattatagcctacagtccc

SEQ ID NO: 571671 - DNA, 33 bp, Homo sapien
ccacttccgcaggtagccacacccaattagcca

SEQ ID NO: 571672 - DNA, 33 bp, Homo sapien
ccacttccgcaggtagtcacacccaattagcca

SEQ ID NO: 571673 - DNA, 33 bp, Homo sapien
aagcagattttctcacacacaacactggctaat

SEQ ID NO: 571674 - DNA, 33 bp, Homo sapien
aagcagattttctcacgcacaacactggctaat

SEQ ID NO: 571675 - DNA, 33 bp, Homo sapien
atgatttagatccttccaggccttttcctgcca

SEQ ID NO: 571676 - DNA, 33 bp, Homo sapien
atgatttagatccttctaggccttttcctgcca

SEQ ID NO: 571677 - DNA, 33 bp, Homo sapien
taaaattgaaacaaaccgtcatggaacaagatt

SEQ ID NO: 571678 - DNA, 33 bp, Homo sapien
taaaattgaaacaaactgtcatggaacaagatt

SEQ ID NO: 571679 - DNA, 33 bp, Homo sapien
tttctctttggtctgaagataagctctccagct

SEQ ID NO: 571680 - DNA, 33 bp, Homo sapien
tttctctttggtctgaggataagctctccagct

SEQ ID NO: 571681 - DNA, 33 bp, Homo sapien
gagggcctgccctcgacaccgtgtttggaagtt

SEQ ID NO: 571682 - DNA, 33 bp, Homo sapien
gagggcctgccctcgagaccgtgtttggaagtt

SEQ ID NO: 571683 - DNA, 33 bp, Homo sapien
cttggtctcgacaggaaagttacgtttgtgagg

SEQ ID NO: 571684 - DNA, 33 bp, Homo sapien
cttggtctcgacaggacagttacgtttgtgagg

SEQ ID NO: 571685 - DNA, 33 bp, Homo sapien
tctgggtgaaaagaaacaactttgtgctttggc

SEQ ID NO: 571686 - DNA, 33 bp, Homo sapien
tctgggtgaaaagaaagaactttgtgctttggc

SEQ ID NO: 571687 - DNA, 33 bp, Homo sapien
cattcacaagaggttcccaccttccaagtactc

SEQ ID NO: 571688 - DNA, 33 bp, Homo sapien
cattcacaagaggttctcaccttccaagtactc

SEQ ID NO: 571689 - DNA, 33 bp, Homo sapien
gctggtataggacaccaatctggctttttgttc

SEQ ID NO: 571690 - DNA, 33 bp, Homo sapien
gctggtataggacaccgatctggctttttgttc

SEQ ID NO: 571691 - DNA, 33 bp, Homo sapien
aattaaatggcattaccatgtgcattaatacaa

SEQ ID NO: 571692 - DNA, 33 bp, Homo sapien
aattaaatggcattactatgtgcattaatacaa

SEQ ID NO: 571693 - DNA, 33 bp, Homo sapien
ggttgcaaacagacaaggtgtgggcttggatcc

SEQ ID NO: 571694 - DNA, 33 bp, Homo sapien
ggttgcaaacagacaatgtgtgggcttggatcc

SEQ ID NO: 571695 - DNA, 33 bp, Homo sapien
cctgaaaatcacccacagtgccgcattgtcatg

SEQ ID NO: 571696 - DNA, 33 bp, Homo sapien
cctgaaaatcacccacggtgccgcattgtcatg

SEQ ID NO: 571697 - DNA, 33 bp, Homo sapien
ctcctctgttaaacaggatcctcatctgttaaa

SEQ ID NO: 571698 - DNA, 33 bp, Homo sapien
ctcctctgttaaacagtatcctcatctgttaaa

SEQ ID NO: 571699 - DNA, 33 bp, Homo sapien
tccatcttgagcaaccccacttatctcaccatg

SEQ ID NO: 571700 - DNA, 33 bp, Homo sapien
tccatcttgagcaacctcacttatctcaccatg

SEQ ID NO: 571701 - DNA, 33 bp, Homo sapien
agggctttgaggaggggattgtatcagttagtt

SEQ ID NO: 571702 - DNA, 33 bp, Homo sapien
agggctttgaggagggtattgtatcagttagtt

SEQ ID NO: 571703 - DNA, 33 bp, Homo sapien
tcttggtgtcactgcccctcatgcatagaaacc

SEQ ID NO: 571704 - DNA, 33 bp, Homo sapien
tcttggtgtcactgccgctcatgcatagaaacc

SEQ ID NO: 571705 - DNA, 33 bp, Homo sapien
gtcctgtgtaggctccactagctgttaaatttg

SEQ ID NO: 571706 - DNA, 33 bp, Homo sapien
gtcctgtgtaggctccgctagctgttaaatttg

SEQ ID NO: 571707 - DNA, 33 bp, Homo sapien
ccgaccaagtattggacgattcatacgtaatgg

SEQ ID NO: 571708 - DNA, 33 bp, Homo sapien
ccgaccaagtattggatgattcatacgtaatgg

SEQ ID NO: 571709 - DNA, 33 bp, Homo sapien
aacaggtgacgactaaacagaaaacagaaaaat

SEQ ID NO: 571710 - DNA, 33 bp, Homo sapien
aacaggtgacgactaagcagaaaacagaaaaat

SEQ ID NO: 571711 - DNA, 33 bp, Homo sapien
cacaatggttgagtaacgtgcccaacacctagt

SEQ ID NO: 571712 - DNA, 33 bp, Homo sapien
cacaatggttgagtaatgtgcccaacacctagt

SEQ ID NO: 571713 - DNA, 33 bp, Homo sapien
ttatgtgacctcatgacgccacttcatgcaggg

SEQ ID NO: 571714 - DNA, 33 bp, Homo sapien
ttatgtgacctcatgatgccacttcatgcaggg

SEQ ID NO: 571715 - DNA, 33 bp, Homo sapien
acatagctaggaaaaaataggctcacctggcac

SEQ ID NO: 571716 - DNA, 33 bp, Homo sapien
acatagctaggaaaaattaggctcacctggcac

SEQ ID NO: 571717 - DNA, 33 bp, Homo sapien
aggtcagaaagttgtcaaaacaggcatgacgaa

SEQ ID NO: 571718 - DNA, 33 bp, Homo sapien
aggtcagaaagttgtccaaacaggcatgacgaa

SEQ ID NO: 571719 - DNA, 33 bp, Homo sapien
gaatagtggggactacagcaaattagaggaagc

SEQ ID NO: 571720 - DNA, 33 bp, Homo sapien
gaatagtggggactacggcaaattagaggaagc

SEQ ID NO: 571721 - DNA, 33 bp, Homo sapien
attaaaaattcagatgccagctgggcgaggtgg

SEQ ID NO: 571722 - DNA, 33 bp, Homo sapien
attaaaaattcagatggcagctgggcgaggtgg

SEQ ID NO: 571723 - DNA, 33 bp, Homo sapien
cctcaaggtgtgataaccaaaactatctccaga

SEQ ID NO: 571724 - DNA, 33 bp, Homo sapien
cctcaaggtgtgataatcaaaactatctccaga

SEQ ID NO: 571725 - DNA, 33 bp, Homo sapien
aaatgttgactgtttcaatggacgatttccatc

SEQ ID NO: 571726 - DNA, 33 bp, Homo sapien
aaatgttgactgtttcgatggacgatttccatc

SEQ ID NO: 571727 - DNA, 33 bp, Homo sapien
ctactctctcatttaaccttcacgacaaacgac

SEQ ID NO: 571728 - DNA, 33 bp, Homo sapien
ctactctctcatttaatcttcacgacaaacgac

SEQ ID NO: 571729 - DNA, 33 bp, Homo sapien
gttatttttgttgccaatgaaattctgacatga

SEQ ID NO: 571730 - DNA, 33 bp, Homo sapien
gttatttttgttgccagtgaaattctgacatga

SEQ ID NO: 571731 - DNA, 33 bp, Homo sapien
cttacatacataagcaagatcaacacgggcaac

SEQ ID NO: 571732 - DNA, 33 bp, Homo sapien
cttacatacataagcaggatcaacacgggcaac

SEQ ID NO: 571733 - DNA, 33 bp, Homo sapien
agcccctgaactgggagtcccaaagacaagacc

SEQ ID NO: 571734 - DNA, 33 bp, Homo sapien
agcccctgaactgggattcccaaagacaagacc

SEQ ID NO: 571735 - DNA, 33 bp, Homo sapien
catggaatgggaaaaacaacaatgggctcaagg

SEQ ID NO: 571736 - DNA, 33 bp, Homo sapien
catggaatgggaaaaagaacaatgggctcaagg

SEQ ID NO: 571737 - DNA, 33 bp, Homo sapien
aacaattttaaatgtccctggtatctggagagc

SEQ ID NO: 571738 - DNA, 33 bp, Homo sapien
aacaattttaaatgtctctggtatctggagagc

SEQ ID NO: 571739 - DNA, 33 bp, Homo sapien
caactgaccacacgcaagaccaggccacacgca

SEQ ID NO: 571740 - DNA, 33 bp, Homo sapien
caactgaccacacgcaggaccaggccacacgca

SEQ ID NO: 571741 - DNA, 33 bp, Homo sapien
ccaggagaatcttgccaaaggagtttgagaagc

SEQ ID NO: 571742 - DNA, 33 bp, Homo sapien
ccaggagaatcttgccgaaggagtttgagaagc

SEQ ID NO: 571743 - DNA, 33 bp, Homo sapien
gtgaaatgggcatcataaaactactacccataa

SEQ ID NO: 571744 - DNA, 33 bp, Homo sapien
gtgaaatgggcatcatgaaactactacccataa

SEQ ID NO: 571745 - DNA, 33 bp, Homo sapien
attgacaggtggtctgaagttcaaatccaagct

SEQ ID NO: 571746 - DNA, 33 bp, Homo sapien
attgacaggtggtctgcagttcaaatccaagct

SEQ ID NO: 571747 - DNA, 33 bp, Homo sapien
cttctcccaggaaagaatatccctgtcacccat

SEQ ID NO: 571748 - DNA, 33 bp, Homo sapien
cttctcccaggaaagactatccctgtcacccat

SEQ ID NO: 571749 - DNA, 33 bp, Homo sapien
ctcattactctcacccacattatatcatccacc

SEQ ID NO: 571750 - DNA, 33 bp, Homo sapien
ctcattactctcacccgcattatatcatccacc

SEQ ID NO: 571751 - DNA, 33 bp, Homo sapien
acacagctggtcaccaatccatacctggtgtgg

SEQ ID NO: 571752 - DNA, 33 bp, Homo sapien
acacagctggtcaccactccatacctggtgtgg

SEQ ID NO: 571753 - DNA, 33 bp, Homo sapien
actaaggtatgtgaagaaaagtaactgtggcca

SEQ ID NO: 571754 - DNA, 33 bp, Homo sapien
actaaggtatgtgaaggaaagtaactgtggcca

SEQ ID NO: 571755 - DNA, 33 bp, Homo sapien
gactcatatatccaacaagtccctggatgttta

SEQ ID NO: 571756 - DNA, 33 bp, Homo sapien
gactcatatatccaacgagtccctggatgttta

SEQ ID NO: 571757 - DNA, 33 bp, Homo sapien
tccagtgatagccagccatttcctcaatgtgcg

SEQ ID NO: 571758 - DNA, 33 bp, Homo sapien
tccagtgatagccagcgatttcctcaatgtgcg

SEQ ID NO: 571759 - DNA, 33 bp, Homo sapien
cattatgtgaatactcactttagcctgaatgtg

SEQ ID NO: 571760 - DNA, 33 bp, Homo sapien
cattatgtgaatactcgctttagcctgaatgtg

SEQ ID NO: 571761 - DNA, 33 bp, Homo sapien
tgctcactagtcagaccgtaatttttagaagga

SEQ ID NO: 571762 - DNA, 33 bp, Homo sapien
tgctcactagtcagactgtaatttttagaagga

SEQ ID NO: 571763 - DNA, 33 bp, Homo sapien
ttcatcagaatggctacattaactgctgaaggg

SEQ ID NO: 571764 - DNA, 33 bp, Homo sapien
ttcatcagaatggctatattaactgctgaaggg

SEQ ID NO: 571765 - DNA, 33 bp, Homo sapien
ggttccattcaaactaaaaaagtggtttatctg

SEQ ID NO: 571766 - DNA, 33 bp, Homo sapien
ggttccattcaaactagaaaagtggtttatctg

SEQ ID NO: 571767 - DNA, 33 bp, Homo sapien
cttaaaccagctggagcagacacttattgttag

SEQ ID NO: 571768 - DNA, 33 bp, Homo sapien
cttaaaccagctggagtagacacttattgttag

SEQ ID NO: 571769 - DNA, 33 bp, Homo sapien
aaaatggctaccagcacagatgaaacaaaactg

SEQ ID NO: 571770 - DNA, 33 bp, Homo sapien
aaaatggctaccagcatagatgaaacaaaactg

SEQ ID NO: 571771 - DNA, 33 bp, Homo sapien
atgaatctgaactttaccctgatggctctgaat

SEQ ID NO: 571772 - DNA, 33 bp, Homo sapien
atgaatctgaactttatcctgatggctctgaat

SEQ ID NO: 571773 - DNA, 33 bp, Homo sapien
gaatgcttcccttccaagacaatattcagaggc

SEQ ID NO: 571774 - DNA, 33 bp, Homo sapien
gaatgcttcccttccatgacaatattcagaggc

SEQ ID NO: 571775 - DNA, 33 bp, Homo sapien
ggatgtatgatctaaacttgccgaggctcagct

SEQ ID NO: 571776 - DNA, 33 bp, Homo sapien
ggatgtatgatctaaatttgccgaggctcagct

SEQ ID NO: 571777 - DNA, 33 bp, Homo sapien
tttcaatttccccgaacgagctggccttaatga

SEQ ID NO: 571778 - DNA, 33 bp, Homo sapien
tttcaatttccccgaatgagctggccttaatga

SEQ ID NO: 571779 - DNA, 33 bp, Homo sapien
catttaattcctgaccacaaagcctttactaga

SEQ ID NO: 571780 - DNA, 33 bp, Homo sapien
catttaattcctgacctcaaagcctttactaga

SEQ ID NO: 571781 - DNA, 33 bp, Homo sapien
ttgtcatcagaacatcagagccgaagcccctcc

SEQ ID NO: 571782 - DNA, 33 bp, Homo sapien
ttgtcatcagaacatcggagccgaagcccctcc

SEQ ID NO: 571783 - DNA, 33 bp, Homo sapien
tggaactagatgtccccggatacaaatccaggg

SEQ ID NO: 571784 - DNA, 33 bp, Homo sapien
tggaactagatgtccctggatacaaatccaggg

SEQ ID NO: 571785 - DNA, 33 bp, Homo sapien
ctggagaagaagaatcaaagaggagaaatagaa

SEQ ID NO: 571786 - DNA, 33 bp, Homo sapien
ctggagaagaagaatcgaagaggagaaatagaa

SEQ ID NO: 571787 - DNA, 33 bp, Homo sapien
atgagtgcctgggttccatctcatcttggtgcc

SEQ ID NO: 571788 - DNA, 33 bp, Homo sapien
atgagtgcctgggttcgatctcatcttggtgcc

SEQ ID NO: 571789 - DNA, 33 bp, Homo sapien
tattctccatcttttcacacttccagggacctt

SEQ ID NO: 571790 - DNA, 33 bp, Homo sapien
tattctccatcttttcgcacttccagggacctt

SEQ ID NO: 571791 - DNA, 33 bp, Homo sapien
agtgagggtagaatccacatgggaataaggtaa

SEQ ID NO: 571792 - DNA, 33 bp, Homo sapien
agtgagggtagaatccgcatgggaataaggtaa

SEQ ID NO: 571793 - DNA, 33 bp, Homo sapien
agggttttccacccaaatgtgttaaatcggaga

SEQ ID NO: 571794 - DNA, 33 bp, Homo sapien
agggttttccacccaagtgtgttaaatcggaga

SEQ ID NO: 571795 - DNA, 33 bp, Homo sapien
agactggcaagtgaacaggtacaggctgggaca

SEQ ID NO: 571796 - DNA, 33 bp, Homo sapien
agactggcaagtgaaccggtacaggctgggaca

SEQ ID NO: 571797 - DNA, 33 bp, Homo sapien
gtgagattctggcaaaaaagaaaaagtcactga

SEQ ID NO: 571798 - DNA, 33 bp, Homo sapien
gtgagattctggcaaagaagaaaaagtcactga

SEQ ID NO: 571799 - DNA, 33 bp, Homo sapien
gctagtgtgtgccatacagacatctgtgcatgc

SEQ ID NO: 571800 - DNA, 33 bp, Homo sapien
gctagtgtgtgccatagagacatctgtgcatgc

SEQ ID NO: 571801 - DNA, 33 bp, Homo sapien
cacctgccaaacttccaaatgggctacagcgac

SEQ ID NO: 571802 - DNA, 33 bp, Homo sapien
cacctgccaaacttcccaatgggctacagcgac

SEQ ID NO: 571803 - DNA, 33 bp, Homo sapien
cctgctacctgcttccagatggatccagaggtt

SEQ ID NO: 571804 - DNA, 33 bp, Homo sapien
cctgctacctgcttccggatggatccagaggtt

SEQ ID NO: 571805 - DNA, 33 bp, Homo sapien
tatttaaggaggctcacaaagggtcatgcactt

SEQ ID NO: 571806 - DNA, 33 bp, Homo sapien
tatttaaggaggctcagaaagggtcatgcactt

SEQ ID NO: 571807 - DNA, 33 bp, Homo sapien
gaatttcagtaggtcaatcagtattacagaaac

SEQ ID NO: 571808 - DNA, 33 bp, Homo sapien
gaatttcagtaggtcagtcagtattacagaaac

SEQ ID NO: 571809 - DNA, 33 bp, Homo sapien
aacagtagcagtaataactagcattcttgcctt

SEQ ID NO: 571810 - DNA, 33 bp, Homo sapien
aacagtagcagtaatagctagcattcttgcctt

SEQ ID NO: 571811 - DNA, 33 bp, Homo sapien
cacacacacattattacgtttctaatcacatga

SEQ ID NO: 571812 - DNA, 33 bp, Homo sapien
cacacacacattattatgtttctaatcacatga

SEQ ID NO: 571813 - DNA, 33 bp, Homo sapien
ggataggttccagcacagagatacaagcaggag

SEQ ID NO: 571814 - DNA, 33 bp, Homo sapien
ggataggttccagcacggagatacaagcaggag

SEQ ID NO: 571815 - DNA, 33 bp, Homo sapien
ataaaataggtctgaaagtacttcccatcatag

SEQ ID NO: 571816 - DNA, 33 bp, Homo sapien
ataaaataggtctgaaggtacttcccatcatag

SEQ ID NO: 571817 - DNA, 33 bp, Homo sapien
ttcttggatcacttgaaggcctgtcttctggct

SEQ ID NO: 571818 - DNA, 33 bp, Homo sapien
ttcttggatcacttgacggcctgtcttctggct

SEQ ID NO: 571819 - DNA, 33 bp, Homo sapien
gggaaattatgtattcaattatgtattcgtctc

SEQ ID NO: 571820 - DNA, 33 bp, Homo sapien
gggaaattatgtattcgattatgtattcgtctc

SEQ ID NO: 571821 - DNA, 33 bp, Homo sapien
caaagcacaaagtctaagtgtgttacgtaacat

SEQ ID NO: 571822 - DNA, 33 bp, Homo sapien
caaagcacaaagtctatgtgtgttacgtaacat

SEQ ID NO: 571823 - DNA, 33 bp, Homo sapien
agagtcatctgcctgacggagccagacagctcc

SEQ ID NO: 571824 - DNA, 33 bp, Homo sapien
agagtcatctgcctgatggagccagacagctcc

SEQ ID NO: 571825 - DNA, 33 bp, Homo sapien
gcagggattacaattgaagatgcaatttgggtg

SEQ ID NO: 571826 - DNA, 33 bp, Homo sapien
gcagggattacaattggagatgcaatttgggtg

SEQ ID NO: 571827 - DNA, 33 bp, Homo sapien
tcaaaggagcctgtaccccaggaagagtcagga

SEQ ID NO: 571828 - DNA, 33 bp, Homo sapien
tcaaaggagcctgtacgccaggaagagtcagga

SEQ ID NO: 571829 - DNA, 33 bp, Homo sapien
gcagggtgggtagacaagatgaccattgacctc

SEQ ID NO: 571830 - DNA, 33 bp, Homo sapien
gcagggtgggtagacaggatgaccattgacctc

SEQ ID NO: 571831 - DNA, 33 bp, Homo sapien
gagttctgttaaacgacagattcatttacatgt

SEQ ID NO: 571832 - DNA, 33 bp, Homo sapien
gagttctgttaaacgatagattcatttacatgt

SEQ ID NO: 571833 - DNA, 33 bp, Homo sapien
tgacagacgtttcccacagtgcgggcacaaagt

SEQ ID NO: 571834 - DNA, 33 bp, Homo sapien
tgacagacgtttcccatagtgcgggcacaaagt

SEQ ID NO: 571835 - DNA, 33 bp, Homo sapien
tgtgaatgctcacgggcatagggttgacgataa

SEQ ID NO: 571836 - DNA, 33 bp, Homo sapien
tgtgaatgctcacgggtatagggttgacgataa

SEQ ID NO: 571837 - DNA, 33 bp, Homo sapien
gctcatccacgtcccaaaactgcttaaaatccg

SEQ ID NO: 571838 - DNA, 33 bp, Homo sapien
gctcatccacgtcccacaactgcttaaaatccg

SEQ ID NO: 571839 - DNA, 33 bp, Homo sapien
ttctgtcccttgcctcaactctcacttggccaa

SEQ ID NO: 571840 - DNA, 33 bp, Homo sapien
ttctgtcccttgcctcgactctcacttggccaa

SEQ ID NO: 571841 - DNA, 33 bp, Homo sapien
cagacagcaaacaggacggcagcataattctgt

SEQ ID NO: 571842 - DNA, 33 bp, Homo sapien
cagacagcaaacaggatggcagcataattctgt

SEQ ID NO: 571843 - DNA, 33 bp, Homo sapien
gggaatgaagccttgaacttgggcaatctgact

SEQ ID NO: 571844 - DNA, 33 bp, Homo sapien
gggaatgaagccttgagcttgggcaatctgact

SEQ ID NO: 571845 - DNA, 33 bp, Homo sapien
actttcatttccggaaaaataatgaatgtctgg

SEQ ID NO: 571846 - DNA, 33 bp, Homo sapien
actttcatttccggaagaataatgaatgtctgg

SEQ ID NO: 571847 - DNA, 33 bp, Homo sapien
cctgtaagataacacaagtgtttgttttctatt

SEQ ID NO: 571848 - DNA, 33 bp, Homo sapien
cctgtaagataacacaggtgtttgttttctatt

SEQ ID NO: 571849 - DNA, 33 bp, Homo sapien
accctatccaaaatagcagctctcatgccccaa

SEQ ID NO: 571850 - DNA, 33 bp, Homo sapien
accctatccaaaatagtagctctcatgccccaa

SEQ ID NO: 571851 - DNA, 33 bp, Homo sapien
tgttcatttttcctcaagttcagcaatatttaa

SEQ ID NO: 571852 - DNA, 33 bp, Homo sapien
tgttcatttttcctcatgttcagcaatatttaa

SEQ ID NO: 571853 - DNA, 33 bp, Homo sapien
tctctgtgggacctcaacgcaatttacttattc

SEQ ID NO: 571854 - DNA, 33 bp, Homo sapien
tctctgtgggacctcagcgcaatttacttattc

SEQ ID NO: 571855 - DNA, 33 bp, Homo sapien
atcttctcttatgtaactgctaacatcaaagtt

SEQ ID NO: 571856 - DNA, 33 bp, Homo sapien
atcttctcttatgtaattgctaacatcaaagtt

SEQ ID NO: 571857 - DNA, 33 bp, Homo sapien
atgtccacctcgaacaatcatagggactcagct

SEQ ID NO: 571858 - DNA, 33 bp, Homo sapien
atgtccacctcgaacagtcatagggactcagct

SEQ ID NO: 571859 - DNA, 33 bp, Homo sapien
cacagtataaaaatacactaatatcctgagcta

SEQ ID NO: 571860 - DNA, 33 bp, Homo sapien
cacagtataaaaatacgctaatatcctgagcta

SEQ ID NO: 571861 - DNA, 33 bp, Homo sapien
tcagttatggtttcaaattatgttgctgtacat

SEQ ID NO: 571862 - DNA, 33 bp, Homo sapien
tcagttatggtttcaagttatgttgctgtacat

SEQ ID NO: 571863 - DNA, 33 bp, Homo sapien
tttaaaggcctacaaaacatttcattatatggc

SEQ ID NO: 571864 - DNA, 33 bp, Homo sapien
tttaaaggcctacaaagcatttcattatatggc

SEQ ID NO: 571865 - DNA, 33 bp, Homo sapien
tcttctgttaaaaatcactttgaccatccatag

SEQ ID NO: 571866 - DNA, 33 bp, Homo sapien
tcttctgttaaaaatcgctttgaccatccatag

SEQ ID NO: 571867 - DNA, 33 bp, Homo sapien
cctgtgtcactgcagacagggatgattgcaaag

SEQ ID NO: 571868 - DNA, 33 bp, Homo sapien
cctgtgtcactgcagatagggatgattgcaaag

SEQ ID NO: 571869 - DNA, 33 bp, Homo sapien
ggttaagaaatgactgaaaggattctcttatga

SEQ ID NO: 571870 - DNA, 33 bp, Homo sapien
ggttaagaaatgactggaaggattctcttatga

SEQ ID NO: 571871 - DNA, 33 bp, Homo sapien
atttaagagggagaacaaaatgaacacaggttt

SEQ ID NO: 571872 - DNA, 33 bp, Homo sapien
atttaagagggagaacgaaatgaacacaggttt

SEQ ID NO: 571873 - DNA, 33 bp, Homo sapien
tgcacccccgtttagcaagctgtgatggaggga

SEQ ID NO: 571874 - DNA, 33 bp, Homo sapien
tgcacccccgtttagcgagctgtgatggaggga

SEQ ID NO: 571875 - DNA, 33 bp, Homo sapien
ggagagtctcagtagacattggcatcttagggt

SEQ ID NO: 571876 - DNA, 33 bp, Homo sapien
ggagagtctcagtagatattggcatcttagggt

SEQ ID NO: 571877 - DNA, 33 bp, Homo sapien
ggctttcctttatcaacgttcatcagggacctt

SEQ ID NO: 571878 - DNA, 33 bp, Homo sapien
ggctttcctttatcaatgttcatcagggacctt

SEQ ID NO: 571879 - DNA, 33 bp, Homo sapien
tatcttgtcttaaaaccctggtcagactggatg

SEQ ID NO: 571880 - DNA, 33 bp, Homo sapien
tatcttgtcttaaaacgctggtcagactggatg

SEQ ID NO: 571881 - DNA, 33 bp, Homo sapien
acatctggactgtctcccaacctcaaagtcaca

SEQ ID NO: 571882 - DNA, 33 bp, Homo sapien
acatctggactgtctctcaacctcaaagtcaca

SEQ ID NO: 571883 - DNA, 33 bp, Homo sapien
gagatgggctgaccaccaataccaggcccagtc

SEQ ID NO: 571884 - DNA, 33 bp, Homo sapien
gagatgggctgaccactaataccaggcccagtc

SEQ ID NO: 571885 - DNA, 33 bp, Homo sapien
ggaaatctctgggagacaggattgtagtcagtt

SEQ ID NO: 571886 - DNA, 33 bp, Homo sapien
ggaaatctctgggagagaggattgtagtcagtt

SEQ ID NO: 571887 - DNA, 33 bp, Homo sapien
tatacaacagtacccacagatcatttgctgttt

SEQ ID NO: 571888 - DNA, 33 bp, Homo sapien
tatacaacagtacccatagatcatttgctgttt

SEQ ID NO: 571889 - DNA, 33 bp, Homo sapien
ttgtttttaatagccccggatcaaaaacaaaca

SEQ ID NO: 571890 - DNA, 33 bp, Homo sapien
ttgtttttaatagccctggatcaaaaacaaaca

SEQ ID NO: 571891 - DNA, 33 bp, Homo sapien
caatagctcacatgaaattaagattcctgattc

SEQ ID NO: 571892 - DNA, 33 bp, Homo sapien
caatagctcacatgaagttaagattcctgattc

SEQ ID NO: 571893 - DNA, 33 bp, Homo sapien
caattaacggcttctcaaatctcacacccccag

SEQ ID NO: 571894 - DNA, 33 bp, Homo sapien
caattaacggcttctcgaatctcacacccccag

SEQ ID NO: 571895 - DNA, 33 bp, Homo sapien
aaagtacaatactctaactgccaaatagatgct

SEQ ID NO: 571896 - DNA, 33 bp, Homo sapien
aaagtacaatactctagctgccaaatagatgct

SEQ ID NO: 571897 - DNA, 33 bp, Homo sapien
atttaatttgtgaacacgctaggtagaagcaga

SEQ ID NO: 571898 - DNA, 33 bp, Homo sapien
atttaatttgtgaacatgctaggtagaagcaga

SEQ ID NO: 571899 - DNA, 33 bp, Homo sapien
aactgaaccagaactaaaacccatgactcctag

SEQ ID NO: 571900 - DNA, 33 bp, Homo sapien
aactgaaccagaactagaacccatgactcctag

SEQ ID NO: 571901 - DNA, 33 bp, Homo sapien
agtcatttatgccaaaagtcagagagaaatgat

SEQ ID NO: 571902 - DNA, 33 bp, Homo sapien
agtcatttatgccaaacgtcagagagaaatgat

SEQ ID NO: 571903 - DNA, 33 bp, Homo sapien
ccaaattgaaaaaatacaccctctgatggtcta

SEQ ID NO: 571904 - DNA, 33 bp, Homo sapien
ccaaattgaaaaaatataccctctgatggtcta

SEQ ID NO: 571905 - DNA, 33 bp, Homo sapien
gaatcatggagactgacaaagtagagagttcat

SEQ ID NO: 571906 - DNA, 33 bp, Homo sapien
gaatcatggagactgataaagtagagagttcat

SEQ ID NO: 571907 - DNA, 33 bp, Homo sapien
caggggtaccatcaagcctacccgagtctgaca

SEQ ID NO: 571908 - DNA, 33 bp, Homo sapien
caggggtaccatcaagtctacccgagtctgaca

SEQ ID NO: 571909 - DNA, 33 bp, Homo sapien
atcccagcagcgggaaatggaccaggacgatga

SEQ ID NO: 571910 - DNA, 33 bp, Homo sapien
atcccagcagcgggaagtggaccaggacgatga

SEQ ID NO: 571911 - DNA, 33 bp, Homo sapien
tgctgtgggcctcagacattgatgcttgttatt

SEQ ID NO: 571912 - DNA, 33 bp, Homo sapien
tgctgtgggcctcagatattgatgcttgttatt

SEQ ID NO: 571913 - DNA, 33 bp, Homo sapien
aatctcagggttgtgaagaagtctataaatgta

SEQ ID NO: 571914 - DNA, 33 bp, Homo sapien
aatctcagggttgtgaggaagtctataaatgta

SEQ ID NO: 571915 - DNA, 33 bp, Homo sapien
cttaatcttgagtttaagggatgaaacataaag

SEQ ID NO: 571916 - DNA, 33 bp, Homo sapien
cttaatcttgagtttaggggatgaaacataaag

SEQ ID NO: 571917 - DNA, 33 bp, Homo sapien
cattattcaggttggccgaagcagatgtgggtg

SEQ ID NO: 571918 - DNA, 33 bp, Homo sapien
cattattcaggttggctgaagcagatgtgggtg

SEQ ID NO: 571919 - DNA, 33 bp, Homo sapien
aaataggccagtcttagcataggaattcatgca

SEQ ID NO: 571920 - DNA, 33 bp, Homo sapien
aaataggccagtcttatcataggaattcatgca

SEQ ID NO: 571921 - DNA, 33 bp, Homo sapien
tgttttagaagttagcaattttggctaggcgca

SEQ ID NO: 571922 - DNA, 33 bp, Homo sapien
tgttttagaagttagcgattttggctaggcgca

SEQ ID NO: 571923 - DNA, 33 bp, Homo sapien
gagtatcccaaacctgaaatcctgaaatgctct

SEQ ID NO: 571924 - DNA, 33 bp, Homo sapien
gagtatcccaaacctggaatcctgaaatgctct

SEQ ID NO: 571925 - DNA, 33 bp, Homo sapien
ttaggaagttctaaaactgatacctatgatcac

SEQ ID NO: 571926 - DNA, 33 bp, Homo sapien
ttaggaagttctaaaattgatacctatgatcac

SEQ ID NO: 571927 - DNA, 33 bp, Homo sapien
tctttgtttgccaattaaaaaaatgcagctaat

SEQ ID NO: 571928 - DNA, 33 bp, Homo sapien
tctttgtttgccaatttaaaaaatgcagctaat

SEQ ID NO: 571929 - DNA, 33 bp, Homo sapien
gaggcctggaccatcaaaggctagagaaaagaa

SEQ ID NO: 571930 - DNA, 33 bp, Homo sapien
gaggcctggaccatcagaggctagagaaaagaa

SEQ ID NO: 571931 - DNA, 33 bp, Homo sapien
caccagaaactgctcgacaggactacttcagta

SEQ ID NO: 571932 - DNA, 33 bp, Homo sapien
caccagaaactgctcggcaggactacttcagta

SEQ ID NO: 571933 - DNA, 33 bp, Homo sapien
cttgaggtcaaaaaccacaggcatttaagtcct

SEQ ID NO: 571934 - DNA, 33 bp, Homo sapien
cttgaggtcaaaaaccgcaggcatttaagtcct

SEQ ID NO: 571935 - DNA, 33 bp, Homo sapien
ccttttcaattctgaaagtttatcattctctga

SEQ ID NO: 571936 - DNA, 33 bp, Homo sapien
ccttttcaattctgaaggtttatcattctctga

SEQ ID NO: 571937 - DNA, 33 bp, Homo sapien
catagcaagtcgtaaaagctcatgccagaatag

SEQ ID NO: 571938 - DNA, 33 bp, Homo sapien
catagcaagtcgtaaaggctcatgccagaatag

SEQ ID NO: 571939 - DNA, 33 bp, Homo sapien
acaaaagggttaaacacaagcactgtaatacca

SEQ ID NO: 571940 - DNA, 33 bp, Homo sapien
acaaaagggttaaacagaagcactgtaatacca

SEQ ID NO: 571941 - DNA, 33 bp, Homo sapien
cttgtacggatgatcgcaaaactgaggtgtaga

SEQ ID NO: 571942 - DNA, 33 bp, Homo sapien
cttgtacggatgatcggaaaactgaggtgtaga

SEQ ID NO: 571943 - DNA, 33 bp, Homo sapien
cttcagggcttggcaactgaaatagctatgtgg

SEQ ID NO: 571944 - DNA, 33 bp, Homo sapien
cttcagggcttggcaagtgaaatagctatgtgg

SEQ ID NO: 571945 - DNA, 33 bp, Homo sapien
acaaattgacttctggccaaaaggcttcatcaa

SEQ ID NO: 571946 - DNA, 33 bp, Homo sapien
acaaattgacttctggtcaaaaggcttcatcaa

SEQ ID NO: 571947 - DNA, 33 bp, Homo sapien
tacttctcacaacaaccccacaagacaacagca

SEQ ID NO: 571948 - DNA, 33 bp, Homo sapien
tacttctcacaacaactccacaagacaacagca

SEQ ID NO: 571949 - DNA, 33 bp, Homo sapien
gtaagtactcaataaacgttggtaattatcatt

SEQ ID NO: 571950 - DNA, 33 bp, Homo sapien
gtaagtactcaataaatgttggtaattatcatt

SEQ ID NO: 571951 - DNA, 33 bp, Homo sapien
gtaaaaaacaggcgaaattacagttacccctta

SEQ ID NO: 571952 - DNA, 33 bp, Homo sapien
gtaaaaaacaggcgaagttacagttacccctta

SEQ ID NO: 571953 - DNA, 33 bp, Homo sapien
gatactatttatgtgtcaatcgactgtttatat

SEQ ID NO: 571954 - DNA, 33 bp, Homo sapien
gatactatttatgtgttaatcgactgtttatat

SEQ ID NO: 571955 - DNA, 33 bp, Homo sapien
cttgaggactaatgaactgaataccgcagctcc

SEQ ID NO: 571956 - DNA, 33 bp, Homo sapien
cttgaggactaatgaagtgaataccgcagctcc

SEQ ID NO: 571957 - DNA, 33 bp, Homo sapien
tataaacatatataaacaggcagtcatgtatgt

SEQ ID NO: 571958 - DNA, 33 bp, Homo sapien
tataaacatatataaataggcagtcatgtatgt

SEQ ID NO: 571959 - DNA, 33 bp, Homo sapien
tgctgtttatcagggactatgccaggctctttg

SEQ ID NO: 571960 - DNA, 33 bp, Homo sapien
tgctgtttatcagggattatgccaggctctttg

SEQ ID NO: 571961 - DNA, 33 bp, Homo sapien
aaaagacacacagctaagaggtaaccacagatt

SEQ ID NO: 571962 - DNA, 33 bp, Homo sapien
aaaagacacacagctaggaggtaaccacagatt

SEQ ID NO: 571963 - DNA, 33 bp, Homo sapien
tatttagtagcccataacactttagcctgcagt

SEQ ID NO: 571964 - DNA, 33 bp, Homo sapien
tatttagtagcccatagcactttagcctgcagt

SEQ ID NO: 571965 - DNA, 33 bp, Homo sapien
aagagagtagattttacgtggtcttcccaaaac

SEQ ID NO: 571966 - DNA, 33 bp, Homo sapien
aagagagtagattttatgtggtcttcccaaaac

SEQ ID NO: 571967 - DNA, 33 bp, Homo sapien
gtaagcttgatggctcccctggactccagtttt

SEQ ID NO: 571968 - DNA, 33 bp, Homo sapien
gtaagcttgatggctctcctggactccagtttt

SEQ ID NO: 571969 - DNA, 33 bp, Homo sapien
ctgtttacccacattcacttatccagcttcatc

SEQ ID NO: 571970 - DNA, 33 bp, Homo sapien
ctgtttacccacattcgcttatccagcttcatc

SEQ ID NO: 571971 - DNA, 33 bp, Homo sapien
ttgaagaaccaaaataactttgaggtcttaagc

SEQ ID NO: 571972 - DNA, 33 bp, Homo sapien
ttgaagaaccaaaatagctttgaggtcttaagc

SEQ ID NO: 571973 - DNA, 33 bp, Homo sapien
tggctaactctggaaacgagagaagaaaacatt

SEQ ID NO: 571974 - DNA, 33 bp, Homo sapien
tggctaactctggaaatgagagaagaaaacatt

SEQ ID NO: 571975 - DNA, 33 bp, Homo sapien
attttatggtaattagcccttgctttcctttat

SEQ ID NO: 571976 - DNA, 33 bp, Homo sapien
attttatggtaattagtccttgctttcctttat

SEQ ID NO: 571977 - DNA, 33 bp, Homo sapien
tttcctactccaatgcacttcctaacaaatgac

SEQ ID NO: 571978 - DNA, 33 bp, Homo sapien
tttcctactccaatgcgcttcctaacaaatgac

SEQ ID NO: 571979 - DNA, 33 bp, Homo sapien
ttttggggtggtctacaggaccagagttccctt

SEQ ID NO: 571980 - DNA, 33 bp, Homo sapien
ttttggggtggtctactggaccagagttccctt

SEQ ID NO: 571981 - DNA, 33 bp, Homo sapien
tgttaaaggtcaagacactgtcaaaggccgtgt

SEQ ID NO: 571982 - DNA, 33 bp, Homo sapien
tgttaaaggtcaagaccctgtcaaaggccgtgt

SEQ ID NO: 571983 - DNA, 33 bp, Homo sapien
tgcaatcgcagtgggacgagtgggtcaacagga

SEQ ID NO: 571984 - DNA, 33 bp, Homo sapien
tgcaatcgcagtgggatgagtgggtcaacagga

SEQ ID NO: 571985 - DNA, 33 bp, Homo sapien
gctgtggaacagagaccgtaattcctttcatgt

SEQ ID NO: 571986 - DNA, 33 bp, Homo sapien
gctgtggaacagagactgtaattcctttcatgt

SEQ ID NO: 571987 - DNA, 33 bp, Homo sapien
ggtctgggaggtgacacagtactacctgttcct

SEQ ID NO: 571988 - DNA, 33 bp, Homo sapien
ggtctgggaggtgacatagtactacctgttcct

SEQ ID NO: 571989 - DNA, 33 bp, Homo sapien
ctctattagaggggctcaaaaactccacgtgct

SEQ ID NO: 571990 - DNA, 33 bp, Homo sapien
ctctattagaggggcttaaaaactccacgtgct

SEQ ID NO: 571991 - DNA, 33 bp, Homo sapien
tagttctaggcccagcaaggctacggagcactc

SEQ ID NO: 571992 - DNA, 33 bp, Homo sapien
tagttctaggcccagctaggctacggagcactc

SEQ ID NO: 571993 - DNA, 33 bp, Homo sapien
atatgtgtgtaaagaagaggagagcctatgatt

SEQ ID NO: 571994 - DNA, 33 bp, Homo sapien
atatgtgtgtaaagaataggagagcctatgatt

SEQ ID NO: 571995 - DNA, 33 bp, Homo sapien
ggttcacacagtcagaagtatacactgcaatgg

SEQ ID NO: 571996 - DNA, 33 bp, Homo sapien
ggttcacacagtcagaggtatacactgcaatgg

SEQ ID NO: 571997 - DNA, 33 bp, Homo sapien
gtttagactgattaccagcaattcaaggagtaa

SEQ ID NO: 571998 - DNA, 33 bp, Homo sapien
gtttagactgattaccggcaattcaaggagtaa

SEQ ID NO: 571999 - DNA, 33 bp, Homo sapien
tctcctcttgtaaggacagtacatgtttgcagt

SEQ ID NO: 572000 - DNA, 33 bp, Homo sapien
tctcctcttgtaaggatagtacatgtttgcagt

SEQ ID NO: 572001 - DNA, 33 bp, Homo sapien
cagacaaaaaatctcaatcaagatcaagagcat

SEQ ID NO: 572002 - DNA, 33 bp, Homo sapien
cagacaaaaaatctcagtcaagatcaagagcat

SEQ ID NO: 572003 - DNA, 33 bp, Homo sapien
atgtgtaaatgcatagaacccagaatagcaacc

SEQ ID NO: 572004 - DNA, 33 bp, Homo sapien
atgtgtaaatgcataggacccagaatagcaacc

SEQ ID NO: 572005 - DNA, 33 bp, Homo sapien
aggaagggtatctaaactgatatgccaacaagc

SEQ ID NO: 572006 - DNA, 33 bp, Homo sapien
aggaagggtatctaaattgatatgccaacaagc

SEQ ID NO: 572007 - DNA, 33 bp, Homo sapien
cattactcattattgaactgctcatggtttcta

SEQ ID NO: 572008 - DNA, 33 bp, Homo sapien
cattactcattattgatctgctcatggtttcta

SEQ ID NO: 572009 - DNA, 33 bp, Homo sapien
ctaagtactccaactaagagtgaatgcacctgg

SEQ ID NO: 572010 - DNA, 33 bp, Homo sapien
ctaagtactccaactaggagtgaatgcacctgg

SEQ ID NO: 572011 - DNA, 33 bp, Homo sapien
gcccttactagacatgaatttgggaagatggga

SEQ ID NO: 572012 - DNA, 33 bp, Homo sapien
gcccttactagacatgtatttgggaagatggga

SEQ ID NO: 572013 - DNA, 33 bp, Homo sapien
tggagagactgagaaaagtggttgccctcagaa

SEQ ID NO: 572014 - DNA, 33 bp, Homo sapien
tggagagactgagaaaggtggttgccctcagaa

SEQ ID NO: 572015 - DNA, 33 bp, Homo sapien
ttttaatgaatgtcaccgagatcaagcgaaagg

SEQ ID NO: 572016 - DNA, 33 bp, Homo sapien
ttttaatgaatgtcactgagatcaagcgaaagg

SEQ ID NO: 572017 - DNA, 33 bp, Homo sapien
gtcagtctgattccaaagtctgtgatcttttaa

SEQ ID NO: 572018 - DNA, 33 bp, Homo sapien
gtcagtctgattccaaggtctgtgatcttttaa

SEQ ID NO: 572019 - DNA, 33 bp, Homo sapien
cagtaattattagccacaagtatcagaattatc

SEQ ID NO: 572020 - DNA, 33 bp, Homo sapien
cagtaattattagccataagtatcagaattatc

SEQ ID NO: 572021 - DNA, 33 bp, Homo sapien
tcccaagtgcaatctccctgtggccctgggtgg

SEQ ID NO: 572022 - DNA, 33 bp, Homo sapien
tcccaagtgcaatctctctgtggccctgggtgg

SEQ ID NO: 572023 - DNA, 33 bp, Homo sapien
acctggaatttactaacctcaagtttccctctt

SEQ ID NO: 572024 - DNA, 33 bp, Homo sapien
acctggaatttactaatctcaagtttccctctt

SEQ ID NO: 572025 - DNA, 33 bp, Homo sapien
aattttggaccacatccccttgaacaaaattgt

SEQ ID NO: 572026 - DNA, 33 bp, Homo sapien
aattttggaccacatctccttgaacaaaattgt

SEQ ID NO: 572027 - DNA, 33 bp, Homo sapien
ctcaatctggcttctcaaatccaactgagcctt

SEQ ID NO: 572028 - DNA, 33 bp, Homo sapien
ctcaatctggcttctcgaatccaactgagcctt

SEQ ID NO: 572029 - DNA, 33 bp, Homo sapien
tagccttcctgaagcaaatcatggagagccaca

SEQ ID NO: 572030 - DNA, 33 bp, Homo sapien
tagccttcctgaagcagatcatggagagccaca

SEQ ID NO: 572031 - DNA, 33 bp, Homo sapien
gagattcttgtaggagacaatggaaatgggaga

SEQ ID NO: 572032 - DNA, 33 bp, Homo sapien
gagattcttgtaggagccaatggaaatgggaga

SEQ ID NO: 572033 - DNA, 33 bp, Homo sapien
gaaattattacagtccagaagagcttaactagc

SEQ ID NO: 572034 - DNA, 33 bp, Homo sapien
gaaattattacagtccggaagagcttaactagc

SEQ ID NO: 572035 - DNA, 33 bp, Homo sapien
atacatacacagaaacacatatacacaacacac

SEQ ID NO: 572036 - DNA, 33 bp, Homo sapien
atacatacacagaaacccatatacacaacacac

SEQ ID NO: 572037 - DNA, 33 bp, Homo sapien
gaccaaagcaaagcccaagatacagtgcaggtg

SEQ ID NO: 572038 - DNA, 33 bp, Homo sapien
gaccaaagcaaagcccgagatacagtgcaggtg

SEQ ID NO: 572039 - DNA, 33 bp, Homo sapien
agattgcaagagaaaaaagcatgagaaaagaaa

SEQ ID NO: 572040 - DNA, 33 bp, Homo sapien
agattgcaagagaaaagagcatgagaaaagaaa

SEQ ID NO: 572041 - DNA, 33 bp, Homo sapien
aagaaaaaggattacacgtggtgaaataataag

SEQ ID NO: 572042 - DNA, 33 bp, Homo sapien
aagaaaaaggattacaggtggtgaaataataag

SEQ ID NO: 572043 - DNA, 33 bp, Homo sapien
cagatatggtgtctaaagaaggcctgttttctg

SEQ ID NO: 572044 - DNA, 33 bp, Homo sapien
cagatatggtgtctaatgaaggcctgttttctg

SEQ ID NO: 572045 - DNA, 33 bp, Homo sapien
aagtcaaggacactccaaatgtgggcaatgggg

SEQ ID NO: 572046 - DNA, 33 bp, Homo sapien
aagtcaaggacactccgaatgtgggcaatgggg

SEQ ID NO: 572047 - DNA, 33 bp, Homo sapien
actgaattgaataagcaaggtattctatgccat

SEQ ID NO: 572048 - DNA, 33 bp, Homo sapien
actgaattgaataagcgaggtattctatgccat

SEQ ID NO: 572049 - DNA, 33 bp, Homo sapien
atctaagaagagaaaccgtaaggatgtgcctgt

SEQ ID NO: 572050 - DNA, 33 bp, Homo sapien
atctaagaagagaaactgtaaggatgtgcctgt

SEQ ID NO: 572051 - DNA, 33 bp, Homo sapien
ggcaaggaagcgtcgcaaactcaaagcctgcag

SEQ ID NO: 572052 - DNA, 33 bp, Homo sapien
ggcaaggaagcgtcgccaactcaaagcctgcag

SEQ ID NO: 572053 - DNA, 33 bp, Homo sapien
ctcagaaacacaaaaagacttgactacagtccc

SEQ ID NO: 572054 - DNA, 33 bp, Homo sapien
ctcagaaacacaaaaatacttgactacagtccc

SEQ ID NO: 572055 - DNA, 33 bp, Homo sapien
tcacctacacacagcagcgtggtagaatgagaa

SEQ ID NO: 572056 - DNA, 33 bp, Homo sapien
tcacctacacacagcatcgtggtagaatgagaa

SEQ ID NO: 572057 - DNA, 33 bp, Homo sapien
agccaccccataaggaaggtgtagtctttcaat

SEQ ID NO: 572058 - DNA, 33 bp, Homo sapien
agccaccccataaggacggtgtagtctttcaat

SEQ ID NO: 572059 - DNA, 33 bp, Homo sapien
cctattcaggttgccccagaacattgaaagact

SEQ ID NO: 572060 - DNA, 33 bp, Homo sapien
cctattcaggttgccctagaacattgaaagact

SEQ ID NO: 572061 - DNA, 33 bp, Homo sapien
attggtttttggatccacactttgcagagcaag

SEQ ID NO: 572062 - DNA, 33 bp, Homo sapien
attggtttttggatccgcactttgcagagcaag

SEQ ID NO: 572063 - DNA, 33 bp, Homo sapien
aaccaatagcaacaccggagagctggttagaaa

SEQ ID NO: 572064 - DNA, 33 bp, Homo sapien
aaccaatagcaacacctgagagctggttagaaa

SEQ ID NO: 572065 - DNA, 33 bp, Homo sapien
actacagtggagttaagtaatatatccatcatc

SEQ ID NO: 572066 - DNA, 33 bp, Homo sapien
actacagtggagttaattaatatatccatcatc

SEQ ID NO: 572067 - DNA, 33 bp, Homo sapien
ttggtaggtgccaaaacctttaagtcagttcag

SEQ ID NO: 572068 - DNA, 33 bp, Homo sapien
ttggtaggtgccaaaagctttaagtcagttcag

SEQ ID NO: 572069 - DNA, 33 bp, Homo sapien
ggatgaccttggcaaaatcccttgtcttgtctg

SEQ ID NO: 572070 - DNA, 33 bp, Homo sapien
ggatgaccttggcaaagtcccttgtcttgtctg

SEQ ID NO: 572071 - DNA, 33 bp, Homo sapien
ataggttgagattttaggctggaaggcaaagga

SEQ ID NO: 572072 - DNA, 33 bp, Homo sapien
ataggttgagattttatgctggaaggcaaagga

SEQ ID NO: 572073 - DNA, 33 bp, Homo sapien
ttctaatgggtatatcaaggagcttaattccaa

SEQ ID NO: 572074 - DNA, 33 bp, Homo sapien
ttctaatgggtatatccaggagcttaattccaa

SEQ ID NO: 572075 - DNA, 33 bp, Homo sapien
aggaatggtttagactcaacacttagccaggag

SEQ ID NO: 572076 - DNA, 33 bp, Homo sapien
aggaatggtttagactgaacacttagccaggag

SEQ ID NO: 572077 - DNA, 33 bp, Homo sapien
ttcaccaggatttatcaaaaagcttctcacata

SEQ ID NO: 572078 - DNA, 33 bp, Homo sapien
ttcaccaggatttatcgaaaagcttctcacata

SEQ ID NO: 572079 - DNA, 33 bp, Homo sapien
aaaatgtgggtgtccagtggaaaaaggcacagg

SEQ ID NO: 572080 - DNA, 33 bp, Homo sapien
aaaatgtgggtgtccattggaaaaaggcacagg

SEQ ID NO: 572081 - DNA, 33 bp, Homo sapien
agtggtcagaagtgacaagataagtgtgaagca

SEQ ID NO: 572082 - DNA, 33 bp, Homo sapien
agtggtcagaagtgacgagataagtgtgaagca

SEQ ID NO: 572083 - DNA, 33 bp, Homo sapien
tcccttgcctggctgcactgatctctctcaatc

SEQ ID NO: 572084 - DNA, 33 bp, Homo sapien
tcccttgcctggctgcgctgatctctctcaatc

SEQ ID NO: 572085 - DNA, 33 bp, Homo sapien
catatttattcctaaaccttcatcctgtcagca

SEQ ID NO: 572086 - DNA, 33 bp, Homo sapien
catatttattcctaaatcttcatcctgtcagca

SEQ ID NO: 572087 - DNA, 33 bp, Homo sapien
agaaatggccaaaagtaacgtgatccaaacttt

SEQ ID NO: 572088 - DNA, 33 bp, Homo sapien
agaaatggccaaaagtcacgtgatccaaacttt

SEQ ID NO: 572089 - DNA, 33 bp, Homo sapien
cattttacatttgttcaagtgtgtttcgtggcc

SEQ ID NO: 572090 - DNA, 33 bp, Homo sapien
cattttacatttgttccagtgtgtttcgtggcc

SEQ ID NO: 572091 - DNA, 33 bp, Homo sapien
agtaaataatttggtacaagagcactcagccag

SEQ ID NO: 572092 - DNA, 33 bp, Homo sapien
agtaaataatttggtataagagcactcagccag

SEQ ID NO: 572093 - DNA, 33 bp, Homo sapien
gagtgtccaccagccactccctgtctctaggaa

SEQ ID NO: 572094 - DNA, 33 bp, Homo sapien
gagtgtccaccagccattccctgtctctaggaa

SEQ ID NO: 572095 - DNA, 33 bp, Homo sapien
aaaccacaatgagcaaacactacatacataccc

SEQ ID NO: 572096 - DNA, 33 bp, Homo sapien
aaaccacaatgagcaaccactacatacataccc

SEQ ID NO: 572097 - DNA, 33 bp, Homo sapien
gaggagcagggattgactaggaaagggtattgc

SEQ ID NO: 572098 - DNA, 33 bp, Homo sapien
gaggagcagggattgattaggaaagggtattgc

SEQ ID NO: 572099 - DNA, 33 bp, Homo sapien
acacacctatgtaacccgaactcctatcatgat

SEQ ID NO: 572100 - DNA, 33 bp, Homo sapien
acacacctatgtaacctgaactcctatcatgat

SEQ ID NO: 572101 - DNA, 33 bp, Homo sapien
gggccacacaggtaagaaatgaataaaggtatt

SEQ ID NO: 572102 - DNA, 33 bp, Homo sapien
gggccacacaggtaaggaatgaataaaggtatt

SEQ ID NO: 572103 - DNA, 33 bp, Homo sapien
ctattccaagctctacaattttgggtaggttcc

SEQ ID NO: 572104 - DNA, 33 bp, Homo sapien
ctattccaagctctacgattttgggtaggttcc

SEQ ID NO: 572105 - DNA, 33 bp, Homo sapien
aaaagctacacaggcacaaagagtaaggaatag

SEQ ID NO: 572106 - DNA, 33 bp, Homo sapien
aaaagctacacaggcataaagagtaaggaatag

SEQ ID NO: 572107 - DNA, 33 bp, Homo sapien
tttctcaaaactggaacgggagcctcactgtgc

SEQ ID NO: 572108 - DNA, 33 bp, Homo sapien
tttctcaaaactggaatgggagcctcactgtgc

SEQ ID NO: 572109 - DNA, 33 bp, Homo sapien
aatgggacaagtgccaaaaaaattgcagacatg

SEQ ID NO: 572110 - DNA, 33 bp, Homo sapien
aatgggacaagtgccagaaaaattgcagacatg

SEQ ID NO: 572111 - DNA, 33 bp, Homo sapien
gtaagtgctggagccaagacaagctaccattaa

SEQ ID NO: 572112 - DNA, 33 bp, Homo sapien
gtaagtgctggagccaggacaagctaccattaa

SEQ ID NO: 572113 - DNA, 33 bp, Homo sapien
ataagtaacttactcaagatcacacagctagta

SEQ ID NO: 572114 - DNA, 33 bp, Homo sapien
ataagtaacttactcacgatcacacagctagta

SEQ ID NO: 572115 - DNA, 33 bp, Homo sapien
tcatcttcaacagagcaaagcattcttactatt

SEQ ID NO: 572116 - DNA, 33 bp, Homo sapien
tcatcttcaacagagcgaagcattcttactatt

SEQ ID NO: 572117 - DNA, 33 bp, Homo sapien
cccattggagaaagtacgaaagctaaggctgac

SEQ ID NO: 572118 - DNA, 33 bp, Homo sapien
cccattggagaaagtatgaaagctaaggctgac

SEQ ID NO: 572119 - DNA, 33 bp, Homo sapien
gtaactctgttgggtaagccatttggtaggagg

SEQ ID NO: 572120 - DNA, 33 bp, Homo sapien
gtaactctgttgggtaggccatttggtaggagg

SEQ ID NO: 572121 - DNA, 33 bp, Homo sapien
agttgtcttagcaaagcattgatagtagtggtt

SEQ ID NO: 572122 - DNA, 33 bp, Homo sapien
agttgtcttagcaaaggattgatagtagtggtt

SEQ ID NO: 572123 - DNA, 33 bp, Homo sapien
actgaaggaaaggctaaaagaacacagcttgga

SEQ ID NO: 572124 - DNA, 33 bp, Homo sapien
actgaaggaaaggctacaagaacacagcttgga

SEQ ID NO: 572125 - DNA, 33 bp, Homo sapien
ctgtaaacaagttaacagtgaagatttaagaag

SEQ ID NO: 572126 - DNA, 33 bp, Homo sapien
ctgtaaacaagttaacggtgaagatttaagaag

SEQ ID NO: 572127 - DNA, 33 bp, Homo sapien
caattggccaactctggatatgtggtggggtac

SEQ ID NO: 572128 - DNA, 33 bp, Homo sapien
caattggccaactctgtatatgtggtggggtac

SEQ ID NO: 572129 - DNA, 33 bp, Homo sapien
tttcacatagcttctgcaggaagatggtactaa

SEQ ID NO: 572130 - DNA, 33 bp, Homo sapien
tttcacatagcttctgtaggaagatggtactaa

SEQ ID NO: 572131 - DNA, 33 bp, Homo sapien
ttttgggttggtgcaagcctactagatagagga

SEQ ID NO: 572132 - DNA, 33 bp, Homo sapien
ttttgggttggtgcaatcctactagatagagga

SEQ ID NO: 572133 - DNA, 33 bp, Homo sapien
ggaaactggaaggttacagaagcaacactcatt

SEQ ID NO: 572134 - DNA, 33 bp, Homo sapien
ggaaactggaaggttagagaagcaacactcatt

SEQ ID NO: 572135 - DNA, 33 bp, Homo sapien
catttaatagcgtaaccgaggagcttggcttca

SEQ ID NO: 572136 - DNA, 33 bp, Homo sapien
catttaatagcgtaactgaggagcttggcttca

SEQ ID NO: 572137 - DNA, 33 bp, Homo sapien
ctgaactttaatgataacaaactgattaaaaag

SEQ ID NO: 572138 - DNA, 33 bp, Homo sapien
ctgaactttaatgatagcaaactgattaaaaag

SEQ ID NO: 572139 - DNA, 33 bp, Homo sapien
catcatctggttatgacggattgtaagcttgga

SEQ ID NO: 572140 - DNA, 33 bp, Homo sapien
catcatctggttatgatggattgtaagcttgga

SEQ ID NO: 572141 - DNA, 33 bp, Homo sapien
ccattatgccaggctccatgctaagctcttcat

SEQ ID NO: 572142 - DNA, 33 bp, Homo sapien
ccattatgccaggctctatgctaagctcttcat

SEQ ID NO: 572143 - DNA, 33 bp, Homo sapien
cttttattctaaagacccatccttcttaatttg

SEQ ID NO: 572144 - DNA, 33 bp, Homo sapien
cttttattctaaagacgcatccttcttaatttg

SEQ ID NO: 572145 - DNA, 33 bp, Homo sapien
tcatttggcagttttgcaaagtgtctgtccagc

SEQ ID NO: 572146 - DNA, 33 bp, Homo sapien
tcatttggcagttttggaaagtgtctgtccagc

SEQ ID NO: 572147 - DNA, 33 bp, Homo sapien
gaggcttggctccatcaacctcatggtaagtcc

SEQ ID NO: 572148 - DNA, 33 bp, Homo sapien
gaggcttggctccatcgacctcatggtaagtcc

SEQ ID NO: 572149 - DNA, 33 bp, Homo sapien
gggcctattcccttgacgttatgacactaagtt

SEQ ID NO: 572150 - DNA, 33 bp, Homo sapien
gggcctattcccttgatgttatgacactaagtt

SEQ ID NO: 572151 - DNA, 33 bp, Homo sapien
taggaaccaaatcttgcacctaatgggaaaaag

SEQ ID NO: 572152 - DNA, 33 bp, Homo sapien
taggaaccaaatcttggacctaatgggaaaaag

SEQ ID NO: 572153 - DNA, 33 bp, Homo sapien
gtctaccagggaaagaaggcacatgttgtcttg

SEQ ID NO: 572154 - DNA, 33 bp, Homo sapien
gtctaccagggaaagagggcacatgttgtcttg

SEQ ID NO: 572155 - DNA, 33 bp, Homo sapien
tatggccgaataatagccaatgcacattgacag

SEQ ID NO: 572156 - DNA, 33 bp, Homo sapien
tatggccgaataatagtcaatgcacattgacag

SEQ ID NO: 572157 - DNA, 33 bp, Homo sapien
gtccactgattcccaacgcccactggatgccag

SEQ ID NO: 572158 - DNA, 33 bp, Homo sapien
gtccactgattcccaatgcccactggatgccag

SEQ ID NO: 572159 - DNA, 33 bp, Homo sapien
tgctttgttatagcaactctaccaaacaaatgc

SEQ ID NO: 572160 - DNA, 33 bp, Homo sapien
tgctttgttatagcaattctaccaaacaaatgc

SEQ ID NO: 572161 - DNA, 33 bp, Homo sapien
aagcctcagtgtctcacgcctggactgttgagg

SEQ ID NO: 572162 - DNA, 33 bp, Homo sapien
aagcctcagtgtctcatgcctggactgttgagg

SEQ ID NO: 572163 - DNA, 33 bp, Homo sapien
ctctttctttcaagcacgtcctactcttcttca

SEQ ID NO: 572164 - DNA, 33 bp, Homo sapien
ctctttctttcaagcaggtcctactcttcttca

SEQ ID NO: 572165 - DNA, 33 bp, Homo sapien
agcaatttatatttcccaacttttttgctatgg

SEQ ID NO: 572166 - DNA, 33 bp, Homo sapien
agcaatttatatttcctaacttttttgctatgg

SEQ ID NO: 572167 - DNA, 33 bp, Homo sapien
tttgctaagtatttaccataagccgagcactct

SEQ ID NO: 572168 - DNA, 33 bp, Homo sapien
tttgctaagtatttactataagccgagcactct

SEQ ID NO: 572169 - DNA, 33 bp, Homo sapien
gagggtctttatcaagcaggtggaggagagtca

SEQ ID NO: 572170 - DNA, 33 bp, Homo sapien
gagggtctttatcaaggaggtggaggagagtca

SEQ ID NO: 572171 - DNA, 33 bp, Homo sapien
ggaatgcagtaaccccaacttaggcaatcccca

SEQ ID NO: 572172 - DNA, 33 bp, Homo sapien
ggaatgcagtaaccccgacttaggcaatcccca

SEQ ID NO: 572173 - DNA, 33 bp, Homo sapien
ctttggccttagtcaacgaatatgagtgaacca

SEQ ID NO: 572174 - DNA, 33 bp, Homo sapien
ctttggccttagtcaatgaatatgagtgaacca

SEQ ID NO: 572175 - DNA, 33 bp, Homo sapien
gctgtctgtgatcctaaattttgtgaccatata

SEQ ID NO: 572176 - DNA, 33 bp, Homo sapien
gctgtctgtgatcctagattttgtgaccatata

SEQ ID NO: 572177 - DNA, 33 bp, Homo sapien
aagagactaccgaatcaaatttttcttttcttt

SEQ ID NO: 572178 - DNA, 33 bp, Homo sapien
aagagactaccgaatcgaatttttcttttcttt

SEQ ID NO: 572179 - DNA, 33 bp, Homo sapien
tatttagtagagatgacgtatcgcccttggcca

SEQ ID NO: 572180 - DNA, 33 bp, Homo sapien
tatttagtagagatgaggtatcgcccttggcca

SEQ ID NO: 572181 - DNA, 33 bp, Homo sapien
tagaatttctaatgaacgagtaagacgtcgtaa

SEQ ID NO: 572182 - DNA, 33 bp, Homo sapien
tagaatttctaatgaatgagtaagacgtcgtaa

SEQ ID NO: 572183 - DNA, 33 bp, Homo sapien
ttttcaataaaatttacgaaaaaatgcagcctt

SEQ ID NO: 572184 - DNA, 33 bp, Homo sapien
ttttcaataaaatttatgaaaaaatgcagcctt

SEQ ID NO: 572185 - DNA, 33 bp, Homo sapien
gacagaatggaatgaaacaaccagaaagatagt

SEQ ID NO: 572186 - DNA, 33 bp, Homo sapien
gacagaatggaatgaagcaaccagaaagatagt

SEQ ID NO: 572187 - DNA, 33 bp, Homo sapien
ccatcttcccacttatcacactctaccagccac

SEQ ID NO: 572188 - DNA, 33 bp, Homo sapien
ccatcttcccacttatgacactctaccagccac

SEQ ID NO: 572189 - DNA, 33 bp, Homo sapien
ccacctatttactaaccattcaatccctttact

SEQ ID NO: 572190 - DNA, 33 bp, Homo sapien
ccacctatttactaactattcaatccctttact

SEQ ID NO: 572191 - DNA, 33 bp, Homo sapien
cagatgctccttgggcccatctttgaggatctt

SEQ ID NO: 572192 - DNA, 33 bp, Homo sapien
cagatgctccttgggctcatctttgaggatctt

SEQ ID NO: 572193 - DNA, 33 bp, Homo sapien
tttgaagagaaggaaaggctctttgaagggtgg

SEQ ID NO: 572194 - DNA, 33 bp, Homo sapien
tttgaagagaaggaaatgctctttgaagggtgg

SEQ ID NO: 572195 - DNA, 33 bp, Homo sapien
taaacataaaccagtacctcttaccatcactcc

SEQ ID NO: 572196 - DNA, 33 bp, Homo sapien
taaacataaaccagtatctcttaccatcactcc

SEQ ID NO: 572197 - DNA, 33 bp, Homo sapien
taatctgactcctaaaatccactatctgctcta

SEQ ID NO: 572198 - DNA, 33 bp, Homo sapien
taatctgactcctaaactccactatctgctcta

SEQ ID NO: 572199 - DNA, 33 bp, Homo sapien
cactaaacggtaacaaatgagatggtgaccagt

SEQ ID NO: 572200 - DNA, 33 bp, Homo sapien
cactaaacggtaacaattgagatggtgaccagt

SEQ ID NO: 572201 - DNA, 33 bp, Homo sapien
actagaaatagtataccaatgaggttataggct

SEQ ID NO: 572202 - DNA, 33 bp, Homo sapien
actagaaatagtatactaatgaggttataggct

SEQ ID NO: 572203 - DNA, 33 bp, Homo sapien
gccaacaacttcttaaatgaggatgcctgcaga

SEQ ID NO: 572204 - DNA, 33 bp, Homo sapien
gccaacaacttcttaagtgaggatgcctgcaga

SEQ ID NO: 572205 - DNA, 33 bp, Homo sapien
gcccaatacattgagtcaccagaaaacctcctt

SEQ ID NO: 572206 - DNA, 33 bp, Homo sapien
gcccaatacattgagttaccagaaaacctcctt

SEQ ID NO: 572207 - DNA, 33 bp, Homo sapien
ggcactgtgacaaaataaaacctcagtcagctt

SEQ ID NO: 572208 - DNA, 33 bp, Homo sapien
ggcactgtgacaaaatgaaacctcagtcagctt

SEQ ID NO: 572209 - DNA, 33 bp, Homo sapien
acatcaaaatcatctacgcatctttcagaaaat

SEQ ID NO: 572210 - DNA, 33 bp, Homo sapien
acatcaaaatcatctatgcatctttcagaaaat

SEQ ID NO: 572211 - DNA, 33 bp, Homo sapien
agatggagaagacatacactcagcaaatacaga

SEQ ID NO: 572212 - DNA, 33 bp, Homo sapien
agatggagaagacatatactcagcaaatacaga

SEQ ID NO: 572213 - DNA, 33 bp, Homo sapien
aggctagatattgtccgcactgaattcaggaat

SEQ ID NO: 572214 - DNA, 33 bp, Homo sapien
aggctagatattgtcctcactgaattcaggaat

SEQ ID NO: 572215 - DNA, 33 bp, Homo sapien; identical to SEQ ID NO: 572213

SEQ ID NO: 572216 - DNA, 33 bp, Homo sapien; identical to SEQ ID NO: 572214

SEQ ID NO: 572217 - DNA, 33 bp, Homo sapien
ggtgaaccacaaaagtcaccactgccatgctga

SEQ ID NO: 572218 - DNA, 33 bp, Homo sapien
ggtgaaccacaaaagtgaccactgccatgctga

SEQ ID NO: 572219 - DNA, 33 bp, Homo sapien
tacagcactgaagaggaccagactgaaacagta

SEQ ID NO: 572220 - DNA, 33 bp, Homo sapien
tacagcactgaagaggtccagactgaaacagta

SEQ ID NO: 572221 - DNA, 33 bp, Homo sapien
gtgatacatacacacaatggaatactatgcagc

SEQ ID NO: 572222 - DNA, 33 bp, Homo sapien
gtgatacatacacacagtggaatactatgcagc

SEQ ID NO: 572223 - DNA, 33 bp, Homo sapien
tacagaacactccgtacatatctccatattgtg

SEQ ID NO: 572224 - DNA, 33 bp, Homo sapien
tacagaacactccgtatatatctccatattgtg

SEQ ID NO: 572225 - DNA, 33 bp, Homo sapien
ggctactgaattcctaccccttctctcttctag

SEQ ID NO: 572226 - DNA, 33 bp, Homo sapien
ggctactgaattcctatcccttctctcttctag

SEQ ID NO: 572227 - DNA, 33 bp, Homo sapien
gcatgcttcttgaagacggtaagatctaagaag

SEQ ID NO: 572228 - DNA, 33 bp, Homo sapien
gcatgcttcttgaagatggtaagatctaagaag

SEQ ID NO: 572229 - DNA, 33 bp, Homo sapien
aggcagaggttgatccaagtgagggtaggaata

SEQ ID NO: 572230 - DNA, 33 bp, Homo sapien
aggcagaggttgatccgagtgagggtaggaata

SEQ ID NO: 572231 - DNA, 33 bp, Homo sapien
aggccaagaatccagaacatcactccatgccct

SEQ ID NO: 572232 - DNA, 33 bp, Homo sapien
aggccaagaatccagagcatcactccatgccct

SEQ ID NO: 572233 - DNA, 33 bp, Homo sapien
ttaaggacaactagagaaaacagaggaatggtc

SEQ ID NO: 572234 - DNA, 33 bp, Homo sapien
ttaaggacaactagaggaaacagaggaatggtc

SEQ ID NO: 572235 - DNA, 33 bp, Homo sapien
tgaagaaaagggagaaaatggtgaagtctggat

SEQ ID NO: 572236 - DNA, 33 bp, Homo sapien
tgaagaaaagggagaagatggtgaagtctggat

SEQ ID NO: 572237 - DNA, 33 bp, Homo sapien
cagctctgaaagcaacactaggtatgtgaaaag

SEQ ID NO: 572238 - DNA, 33 bp, Homo sapien
cagctctgaaagcaacgctaggtatgtgaaaag

SEQ ID NO: 572239 - DNA, 33 bp, Homo sapien
cacacaagaagtcaaaagttgatgtagactatt

SEQ ID NO: 572240 - DNA, 33 bp, Homo sapien
cacacaagaagtcaaaggttgatgtagactatt

SEQ ID NO: 572241 - DNA, 33 bp, Homo sapien
atgctcatggatggaaagagttaatattgttaa

SEQ ID NO: 572242 - DNA, 33 bp, Homo sapien
atgctcatggatggaaggagttaatattgttaa

SEQ ID NO: 572243 - DNA, 33 bp, Homo sapien
gggtacacagagccaaattaaggttatcatcaa

SEQ ID NO: 572244 - DNA, 33 bp, Homo sapien
gggtacacagagccaagttaaggttatcatcaa

SEQ ID NO: 572245 - DNA, 33 bp, Homo sapien
ggagagacaagaggcaagttgatcctcatctct

SEQ ID NO: 572246 - DNA, 33 bp, Homo sapien
ggagagacaagaggcatgttgatcctcatctct

SEQ ID NO: 572247 - DNA, 33 bp, Homo sapien
aagagggcttgggaaaaataaggactattcagt

SEQ ID NO: 572248 - DNA, 33 bp, Homo sapien
aagagggcttgggaaagataaggactattcagt

SEQ ID NO: 572249 - DNA, 33 bp, Homo sapien
ccaactcacagtaggacgacagggaagacccat

SEQ ID NO: 572250 - DNA, 33 bp, Homo sapien
ccaactcacagtaggatgacagggaagacccat

SEQ ID NO: 572251 - DNA, 33 bp, Homo sapien
gcctagaccaatgtaacggagcttcccttctat

SEQ ID NO: 572252 - DNA, 33 bp, Homo sapien
gcctagaccaatgtaatggagcttcccttctat

SEQ ID NO: 572253 - DNA, 33 bp, Homo sapien
aaagaggcttgagatcccttcttagtggggcaa

SEQ ID NO: 572254 - DNA, 33 bp, Homo sapien
aaagaggcttgagatcgcttcttagtggggcaa

SEQ ID NO: 572255 - DNA, 33 bp, Homo sapien
ctgatgggtgatactacgaaggtgggtcctgag

SEQ ID NO: 572256 - DNA, 33 bp, Homo sapien
ctgatgggtgatactatgaaggtgggtcctgag

SEQ ID NO: 572257 - DNA, 33 bp, Homo sapien
actttcctgttagcaccgcctttgctttatccc

SEQ ID NO: 572258 - DNA, 33 bp, Homo sapien
actttcctgttagcactgcctttgctttatccc

SEQ ID NO: 572259 - DNA, 33 bp, Homo sapien; identical to SEQ ID NO: 572257

SEQ ID NO: 572260 - DNA, 33 bp, Homo sapien; identical to SEQ ID NO: 572258

SEQ ID NO: 572261 - DNA, 33 bp, Homo sapien
gataaaccccaattgaagactattcagttcaaa

SEQ ID NO: 572262 - DNA, 33 bp, Homo sapien
gataaaccccaattgaggactattcagttcaaa

SEQ ID NO: 572263 - DNA, 33 bp, Homo sapien
cctagagtaagtgggaggtaggatttgagtata

SEQ ID NO: 572264 - DNA, 33 bp, Homo sapien
cctagagtaagtgggatgtaggatttgagtata

SEQ ID NO: 572265 - DNA, 33 bp, Homo sapien
ggccttacactcatccaatgtaaacttaaaacc

SEQ ID NO: 572266 - DNA, 33 bp, Homo sapien
ggccttacactcatccgatgtaaacttaaaacc

SEQ ID NO: 572267 - DNA, 33 bp, Homo sapien
gtggtatatataaacaatggactactatttagc

SEQ ID NO: 572268 - DNA, 33 bp, Homo sapien
gtggtatatataaacagtggactactatttagc

SEQ ID NO: 572269 - DNA, 33 bp, Homo sapien
caagtcttcccagatcacatacaaaaaggtttt

SEQ ID NO: 572270 - DNA, 33 bp, Homo sapien
caagtcttcccagatctcatacaaaaaggtttt

SEQ ID NO: 572271 - DNA, 33 bp, Homo sapien
gaaaggaatccctaacacacaacttctctctgt

SEQ ID NO: 572272 - DNA, 33 bp, Homo sapien
gaaaggaatccctaacgcacaacttctctctgt

SEQ ID NO: 572273 - DNA, 33 bp, Homo sapien
agtgaatgtaaatgggaagactctagaaggata

SEQ ID NO: 572274 - DNA, 33 bp, Homo sapien
agtgaatgtaaatggggagactctagaaggata

SEQ ID NO: 572275 - DNA, 33 bp, Homo sapien
gtgctctcatattatgcagagtaaggtagtgag

SEQ ID NO: 572276 - DNA, 33 bp, Homo sapien
gtgctctcatattatgtagagtaaggtagtgag

SEQ ID NO: 572277 - DNA, 33 bp, Homo sapien
attttttgatcaagaacagagtttggtagaacc

SEQ ID NO: 572278 - DNA, 33 bp, Homo sapien
attttttgatcaagaatagagtttggtagaacc

SEQ ID NO: 572279 - DNA, 33 bp, Homo sapien
gaggaatcagaaaccccactttggcatagagac

SEQ ID NO: 572280 - DNA, 33 bp, Homo sapien
gaggaatcagaaaccctactttggcatagagac

SEQ ID NO: 572281 - DNA, 33 bp, Homo sapien
gcactcatcaggctaactgatcccatatttaac

SEQ ID NO: 572282 - DNA, 33 bp, Homo sapien
gcactcatcaggctaattgatcccatatttaac

SEQ ID NO: 572283 - DNA, 33 bp, Homo sapien
ttggggtaggtgagctcaaccgtctcaagtatc

SEQ ID NO: 572284 - DNA, 33 bp, Homo sapien
ttggggtaggtgagctgaaccgtctcaagtatc

SEQ ID NO: 572285 - DNA, 33 bp, Homo sapien
tatggacatatacagaactcttggacagatgat

SEQ ID NO: 572286 - DNA, 33 bp, Homo sapien
tatggacatatacagacctcttggacagatgat

SEQ ID NO: 572287 - DNA, 33 bp, Homo sapien
atactacctatacttcaaaatttaagtaaccat

SEQ ID NO: 572288 - DNA, 33 bp, Homo sapien
atactacctatacttcgaaatttaagtaaccat

SEQ ID NO: 572289 - DNA, 33 bp, Homo sapien
tccaatacactgctcacgacaacaacctggaat

SEQ ID NO: 572290 - DNA, 33 bp, Homo sapien
tccaatacactgctcatgacaacaacctggaat

SEQ ID NO: 572291 - DNA, 33 bp, Homo sapien
accaatttgcattgtgcaagggcaacatttcca

SEQ ID NO: 572292 - DNA, 33 bp, Homo sapien
accaatttgcattgtgtaagggcaacatttcca

SEQ ID NO: 572293 - DNA, 33 bp, Homo sapien
aacttttgtcttctccagctgtaatggcaacct

SEQ ID NO: 572294 - DNA, 33 bp, Homo sapien
aacttttgtcttctccggctgtaatggcaacct

SEQ ID NO: 572295 - DNA, 33 bp, Homo sapien
agcagttcatgtaagaccagtctagtagtaatg

SEQ ID NO: 572296 - DNA, 33 bp, Homo sapien
agcagttcatgtaagatcagtctagtagtaatg

SEQ ID NO: 572297 - DNA, 33 bp, Homo sapien
catttctgaaggataacgttgctgggtatgata

SEQ ID NO: 572298 - DNA, 33 bp, Homo sapien
catttctgaaggataatgttgctgggtatgata

SEQ ID NO: 572299 - DNA, 33 bp, Homo sapien
aggccaatgaactccactgagtcaatacctatg

SEQ ID NO: 572300 - DNA, 33 bp, Homo sapien
aggccaatgaactccattgagtcaatacctatg

SEQ ID NO: 572301 - DNA, 33 bp, Homo sapien
ggatgcagtagtatagcatccatttagtttctt

SEQ ID NO: 572302 - DNA, 33 bp, Homo sapien
ggatgcagtagtatagtatccatttagtttctt

SEQ ID NO: 572303 - DNA, 33 bp, Homo sapien
acactattagtgtggactaaggtagaagaaact

SEQ ID NO: 572304 - DNA, 33 bp, Homo sapien
acactattagtgtggattaaggtagaagaaact

SEQ ID NO: 572305 - DNA, 33 bp, Homo sapien
aagttctccagtgaaacgtgttttaggactaat

SEQ ID NO: 572306 - DNA, 33 bp, Homo sapien
aagttctccagtgaaatgtgttttaggactaat

SEQ ID NO: 572307 - DNA, 33 bp, Homo sapien
acacatgatcatacaggcacttcaggaacccaa

SEQ ID NO: 572308 - DNA, 33 bp, Homo sapien
acacatgatcatacagtcacttcaggaacccaa

SEQ ID NO: 572309 - DNA, 33 bp, Homo sapien
cacttcaggaacccaacatttaaataatactgt

SEQ ID NO: 572310 - DNA, 33 bp, Homo sapien
cacttcaggaacccaagatttaaataatactgt

SEQ ID NO: 572311 - DNA, 33 bp, Homo sapien
tacaatggcgggataaatatgttcccaagtgcc

SEQ ID NO: 572312 - DNA, 33 bp, Homo sapien
tacaatggcgggataagtatgttcccaagtgcc

SEQ ID NO: 572313 - DNA, 33 bp, Homo sapien
ccaaaatttccagaaccacttcgaactctttgg

SEQ ID NO: 572314 - DNA, 33 bp, Homo sapien
ccaaaatttccagaactacttcgaactctttgg

SEQ ID NO: 572315 - DNA, 33 bp, Homo sapien
cacagcttagaagttacgaaagcccagtcgaag

SEQ ID NO: 572316 - DNA, 33 bp, Homo sapien
cacagcttagaagttaggaaagcccagtcgaag

SEQ ID NO: 572317 - DNA, 33 bp, Homo sapien
gcccttttcttagaaacatgcttgactgggtgc

SEQ ID NO: 572318 - DNA, 33 bp, Homo sapien
gcccttttcttagaaatatgcttgactgggtgc

SEQ ID NO: 572319 - DNA, 33 bp, Homo sapien
tggataggagaggaaacagactgatggaggaaa

SEQ ID NO: 572320 - DNA, 33 bp, Homo sapien
tggataggagaggaaatagactgatggaggaaa

SEQ ID NO: 572321 - DNA, 33 bp, Homo sapien
agcttcctcaaggacacagttcagagcccttac

SEQ ID NO: 572322 - DNA, 33 bp, Homo sapien
agcttcctcaaggacatagttcagagcccttac

SEQ ID NO: 572323 - DNA, 33 bp, Homo sapien
ccaaatggcttcaaacacttttacattctttct

SEQ ID NO: 572324 - DNA, 33 bp, Homo sapien
ccaaatggcttcaaacgcttttacattctttct

SEQ ID NO: 572325 - DNA, 33 bp, Homo sapien
tctcaccttgcaccccaaaattagcctctgacc

SEQ ID NO: 572326 - DNA, 33 bp, Homo sapien
tctcaccttgcaccccgaaattagcctctgacc

SEQ ID NO: 572327 - DNA, 33 bp, Homo sapien
ggtgcttctctttcccaataaaggctggtgctg

SEQ ID NO: 572328 - DNA, 33 bp, Homo sapien
ggtgcttctctttcccgataaaggctggtgctg

SEQ ID NO: 572329 - DNA, 33 bp, Homo sapien
tcccggtagagtcacaagatgcacttaattctt

SEQ ID NO: 572330 - DNA, 33 bp, Homo sapien
tcccggtagagtcacaggatgcacttaattctt

SEQ ID NO: 572331 - DNA, 33 bp, Homo sapien
gttcacccagtcccatcaattctaccttcacaa

SEQ ID NO: 572332 - DNA, 33 bp, Homo sapien
gttcacccagtcccattaattctaccttcacaa

SEQ ID NO: 572333 - DNA, 33 bp, Homo sapien
tggttgctatacccaactctacaggaagctctc

SEQ ID NO: 572334 - DNA, 33 bp, Homo sapien
tggttgctatacccaattctacaggaagctctc

SEQ ID NO: 572335 - DNA, 33 bp, Homo sapien
tgtacttctgacccagcccacttaggaggcaag

SEQ ID NO: 572336 - DNA, 33 bp, Homo sapien
tgtacttctgacccaggccacttaggaggcaag

SEQ ID NO: 572337 - DNA, 33 bp, Homo sapien
ggcagatgaggatgtaaacccgtgagactaggg

SEQ ID NO: 572338 - DNA, 33 bp, Homo sapien
ggcagatgaggatgtagacccgtgagactaggg

SEQ ID NO: 572339 - DNA, 33 bp, Homo sapien
aataatatgcacttcacagagttattatgagaa

SEQ ID NO: 572340 - DNA, 33 bp, Homo sapien
aataatatgcacttcatagagttattatgagaa

SEQ ID NO: 572341 - DNA, 33 bp, Homo sapien
agatttacctctacttaaagagttctcagatca

SEQ ID NO: 572342 - DNA, 33 bp, Homo sapien
agatttacctctacttgaagagttctcagatca

SEQ ID NO: 572343 - DNA, 33 bp, Homo sapien
taggcattggtacccacagcaaagatttctagg

SEQ ID NO: 572344 - DNA, 33 bp, Homo sapien
taggcattggtacccagagcaaagatttctagg

SEQ ID NO: 572345 - DNA, 33 bp, Homo sapien
agctgcagaaaactggaaaatagtgctggaatg

SEQ ID NO: 572346 - DNA, 33 bp, Homo sapien
agctgcagaaaactggcaaatagtgctggaatg

SEQ ID NO: 572347 - DNA, 33 bp, Homo sapien
agtccaaggtggtctccagtagtttcctcaatc

SEQ ID NO: 572348 - DNA, 33 bp, Homo sapien
agtccaaggtggtctctagtagtttcctcaatc

SEQ ID NO: 572349 - DNA, 33 bp, Homo sapien
cttatgctgggtcataaaaacagtcagaactag

SEQ ID NO: 572350 - DNA, 33 bp, Homo sapien
cttatgctgggtcatataaacagtcagaactag

SEQ ID NO: 572351 - DNA, 33 bp, Homo sapien
tgggcccaaagccagcaagggagaaagagtctc

SEQ ID NO: 572352 - DNA, 33 bp, Homo sapien
tgggcccaaagccagcgagggagaaagagtctc

SEQ ID NO: 572353 - DNA, 33 bp, Homo sapien
gatgattgctggtttcccttacacatagcagag

SEQ ID NO: 572354 - DNA, 33 bp, Homo sapien
gatgattgctggtttctcttacacatagcagag

SEQ ID NO: 572355 - DNA, 33 bp, Homo sapien
tcctggtctggaaaacaggacaacacataactg

SEQ ID NO: 572356 - DNA, 33 bp, Homo sapien
tcctggtctggaaaactggacaacacataactg

SEQ ID NO: 572357 - DNA, 33 bp, Homo sapien
gctcaatcaacagcaacaaacatcactgtctga

SEQ ID NO: 572358 - DNA, 33 bp, Homo sapien
gctcaatcaacagcaataaacatcactgtctga

SEQ ID NO: 572359 - DNA, 33 bp, Homo sapien
atccacataaagtgtgcatttctgacaactctt

SEQ ID NO: 572360 - DNA, 33 bp, Homo sapien
atccacataaagtgtggatttctgacaactctt

SEQ ID NO: 572361 - DNA, 33 bp, Homo sapien
tggtactcagtaattaaccacagatctactcta

SEQ ID NO: 572362 - DNA, 33 bp, Homo sapien
tggtactcagtaattagccacagatctactcta

SEQ ID NO: 572363 - DNA, 33 bp, Homo sapien
ccttgtgctagccaccggagatggtcttcctga

SEQ ID NO: 572364 - DNA, 33 bp, Homo sapien
ccttgtgctagccacctgagatggtcttcctga

SEQ ID NO: 572365 - DNA, 33 bp, Homo sapien
ggcacatctcccaaaacttgtaggactaggcga

SEQ ID NO: 572366 - DNA, 33 bp, Homo sapien
ggcacatctcccaaaagttgtaggactaggcga

SEQ ID NO: 572367 - DNA, 33 bp, Homo sapien
gcagcgactgctgttcccgaaagaggcttgaca

SEQ ID NO: 572368 - DNA, 33 bp, Homo sapien
gcagcgactgctgttctcgaaagaggcttgaca

SEQ ID NO: 572369 - DNA, 33 bp, Homo sapien
ggctcagtgtggggacaggaatctactagggct

SEQ ID NO: 572370 - DNA, 33 bp, Homo sapien
ggctcagtgtggggactggaatctactagggct

SEQ ID NO: 572371 - DNA, 33 bp, Homo sapien
agtcacaggtggccacagaacctcacttgcaca

SEQ ID NO: 572372 - DNA, 33 bp, Homo sapien
agtcacaggtggccacggaacctcacttgcaca

SEQ ID NO: 572373 - DNA, 33 bp, Homo sapien
agcaaagatcagaacacgggttttgacaaaaac

SEQ ID NO: 572374 - DNA, 33 bp, Homo sapien
agcaaagatcagaacatgggttttgacaaaaac

SEQ ID NO: 572375 - DNA, 33 bp, Homo sapien
ctctacaaagagaaaaagaatgcctgaagttca

SEQ ID NO: 572376 - DNA, 33 bp, Homo sapien
ctctacaaagagaaaaggaatgcctgaagttca

SEQ ID NO: 572377 - DNA, 33 bp, Homo sapien
aggcttggctttgtccggagttgaggcaggggt

SEQ ID NO: 572378 - DNA, 33 bp, Homo sapien
aggcttggctttgtcctgagttgaggcaggggt

SEQ ID NO: 572379 - DNA, 33 bp, Homo sapien
ctgaactgggccagagcatactgatctgtggaa

SEQ ID NO: 572380 - DNA, 33 bp, Homo sapien
ctgaactgggccagagtatactgatctgtggaa

SEQ ID NO: 572381 - DNA, 33 bp, Homo sapien
tgcacatggagaacaacgtggtctgcatccggt

SEQ ID NO: 572382 - DNA, 33 bp, Homo sapien
tgcacatggagaacaatgtggtctgcatccggt

SEQ ID NO: 572383 - DNA, 33 bp, Homo sapien
aactggatttgaattccagcttggtgaacatgg

SEQ ID NO: 572384 - DNA, 33 bp, Homo sapien
aactggatttgaattctagcttggtgaacatgg

SEQ ID NO: 572385 - DNA, 33 bp, Homo sapien
tgacatatgaagattacggttctgccagggctc

SEQ ID NO: 572386 - DNA, 33 bp, Homo sapien
tgacatatgaagattatggttctgccagggctc

SEQ ID NO: 572387 - DNA, 33 bp, Homo sapien
gagatcttaggagaataagggtaactgcaggtg

SEQ ID NO: 572388 - DNA, 33 bp, Homo sapien
gagatcttaggagaatgagggtaactgcaggtg

SEQ ID NO: 572389 - DNA, 33 bp, Homo sapien
cacagacggaatccgcagcagaacctgtcctca

SEQ ID NO: 572390 - DNA, 33 bp, Homo sapien
cacagacggaatccgcggcagaacctgtcctca

SEQ ID NO: 572391 - DNA, 33 bp, Homo sapien
tcctgacaccaggcagaaggcgacatgtatgga

SEQ ID NO: 572392 - DNA, 33 bp, Homo sapien
tcctgacaccaggcagcaggcgacatgtatgga

SEQ ID NO: 572393 - DNA, 33 bp, Homo sapien
gttcaaatcatgttccaccaccttaagttgctt

SEQ ID NO: 572394 - DNA, 33 bp, Homo sapien
gttcaaatcatgttcccccaccttaagttgctt

SEQ ID NO: 572395 - DNA, 33 bp, Homo sapien
gccctcactgcaatgacgactttaaaagcaggt

SEQ ID NO: 572396 - DNA, 33 bp, Homo sapien
gccctcactgcaatgatgactttaaaagcaggt

SEQ ID NO: 572397 - DNA, 33 bp, Homo sapien
ttgcctccagaataaacgctgaactccttagcc

SEQ ID NO: 572398 - DNA, 33 bp, Homo sapien
ttgcctccagaataaatgctgaactccttagcc

SEQ ID NO: 572399 - DNA, 33 bp, Homo sapien
gaatgggagtaaaacaccttggactttccagtc

SEQ ID NO: 572400 - DNA, 33 bp, Homo sapien
gaatgggagtaaaacatcttggactttccagtc

SEQ ID NO: 572401 - DNA, 33 bp, Homo sapien
gcaacccagtgtcaaaagaaccggtcccaggcc

SEQ ID NO: 572402 - DNA, 33 bp, Homo sapien
gcaacccagtgtcaaaggaaccggtcccaggcc

SEQ ID NO: 572403 - DNA, 33 bp, Homo sapien
agagcagggtcttctaaggattggcaaccttga

SEQ ID NO: 572404 - DNA, 33 bp, Homo sapien
agagcagggtcttctagggattggcaaccttga

SEQ ID NO: 572405 - DNA, 33 bp, Homo sapien
aaaatacagatgtgcacaaagaatagattatcc

SEQ ID NO: 572406 - DNA, 33 bp, Homo sapien
aaaatacagatgtgcataaagaatagattatcc

SEQ ID NO: 572407 - DNA, 33 bp, Homo sapien
ttatccacattttttacgattcagggaaaacta

SEQ ID NO: 572408 - DNA, 33 bp, Homo sapien
ttatccacattttttatgattcagggaaaacta

SEQ ID NO: 572409 - DNA, 33 bp, Homo sapien
tggtccatgtcgatagcagtgccatcggccagg

SEQ ID NO: 572410 - DNA, 33 bp, Homo sapien
tggtccatgtcgataggagtgccatcggccagg

SEQ ID NO: 572411 - DNA, 33 bp, Homo sapien
gaggtctgccagttacaccaagtcccctctgag

SEQ ID NO: 572412 - DNA, 33 bp, Homo sapien
gaggtctgccagttacgccaagtcccctctgag

SEQ ID NO: 572413 - DNA, 33 bp, Homo sapien
taagatccaggtgagcaaccaactccaaatctg

SEQ ID NO: 572414 - DNA, 33 bp, Homo sapien
taagatccaggtgagcgaccaactccaaatctg

SEQ ID NO: 572415 - DNA, 33 bp, Homo sapien
acgtgtgtaaccatgggagacgacaaaagtatg

SEQ ID NO: 572416 - DNA, 33 bp, Homo sapien
acgtgtgtaaccatggtagacgacaaaagtatg

SEQ ID NO: 572417 - DNA, 33 bp, Homo sapien
atgatgtaataaggaaagttgaagtaagaatct

SEQ ID NO: 572418 - DNA, 33 bp, Homo sapien
atgatgtaataaggaaggttgaagtaagaatct

SEQ ID NO: 572419 - DNA, 33 bp, Homo sapien
taatcttcctaacatgcaacatctgatgtagca

SEQ ID NO: 572420 - DNA, 33 bp, Homo sapien
taatcttcctaacatgtaacatctgatgtagca

SEQ ID NO: 572421 - DNA, 33 bp, Homo sapien
acactcaagatccaaagagaaaggacaactgca

SEQ ID NO: 572422 - DNA, 33 bp, Homo sapien
acactcaagatccaaatagaaaggacaactgca

SEQ ID NO: 572423 - DNA, 33 bp, Homo sapien
tctactttgcaaatgacaaaatttgaagtttag

SEQ ID NO: 572424 - DNA, 33 bp, Homo sapien
tctactttgcaaatgagaaaatttgaagtttag

SEQ ID NO: 572425 - DNA, 33 bp, Homo sapien
gtatcactcgtggttaaaatagcattttgggca

SEQ ID NO: 572426 - DNA, 33 bp, Homo sapien
gtatcactcgtggttacaatagcattttgggca

SEQ ID NO: 572427 - DNA, 33 bp, Homo sapien
ctatagctaatgtttacaaagatccctgaatga

SEQ ID NO: 572428 - DNA, 33 bp, Homo sapien
ctatagctaatgtttataaagatccctgaatga

SEQ ID NO: 572429 - DNA, 33 bp, Homo sapien
tatgagctaatgagcccacacgatgagccaggc

SEQ ID NO: 572430 - DNA, 33 bp, Homo sapien
tatgagctaatgagcctacacgatgagccaggc

SEQ ID NO: 572431 - DNA, 33 bp, Homo sapien
atgagccaacacagaacttcctacccatgtatt

SEQ ID NO: 572432 - DNA, 33 bp, Homo sapien
atgagccaacacagaatttcctacccatgtatt

SEQ ID NO: 572433 - DNA, 33 bp, Homo sapien
cggctgatctgatccccgcacaatgaggcctgg

SEQ ID NO: 572434 - DNA, 33 bp, Homo sapien
cggctgatctgatccctgcacaatgaggcctgg

SEQ ID NO: 572435 - DNA, 33 bp, Homo sapien
taaccagataaggatcaagacattctctgcttt

SEQ ID NO: 572436 - DNA, 33 bp, Homo sapien
taaccagataaggatcgagacattctctgcttt

SEQ ID NO: 572437 - DNA, 33 bp, Homo sapien
ctttacacccacagccaaaaattccaatttcct

SEQ ID NO: 572438 - DNA, 33 bp, Homo sapien
ctttacacccacagcccaaaattccaatttcct

SEQ ID NO: 572439 - DNA, 33 bp, Homo sapien
ccaggcaactctttacactgctgcgattctctt

SEQ ID NO: 572440 - DNA, 33 bp, Homo sapien
ccaggcaactctttacgctgctgcgattctctt

SEQ ID NO: 572441 - DNA, 33 bp, Homo sapien
gagggctgtagattccggcctgaagcctgggca

SEQ ID NO: 572442 - DNA, 33 bp, Homo sapien
gagggctgtagattcctgcctgaagcctgggca

SEQ ID NO: 572443 - DNA, 33 bp, Homo sapien
ctggttattataggaaagacacagactcttctt

SEQ ID NO: 572444 - DNA, 33 bp, Homo sapien
ctggttattataggaacgacacagactcttctt

SEQ ID NO: 572445 - DNA, 33 bp, Homo sapien
acgctagtctccgccccgccttttggtctttct

SEQ ID NO: 572446 - DNA, 33 bp, Homo sapien
acgctagtctccgccctgccttttggtctttct

SEQ ID NO: 572447 - DNA, 33 bp, Homo sapien
tggcaaacaggatcccaaagatgatggggatca

SEQ ID NO: 572448 - DNA, 33 bp, Homo sapien
tggcaaacaggatcccgaagatgatggggatca

SEQ ID NO: 572449 - DNA, 33 bp, Homo sapien
aggacttctctcccaccgactgattctggcaca

SEQ ID NO: 572450 - DNA, 33 bp, Homo sapien
aggacttctctcccactgactgattctggcaca

SEQ ID NO: 572451 - DNA, 33 bp, Homo sapien
gacaacagtcctttgaaggtgtatggtcatcct

SEQ ID NO: 572452 - DNA, 33 bp, Homo sapien
gacaacagtcctttgagggtgtatggtcatcct

SEQ ID NO: 572453 - DNA, 33 bp, Homo sapien
tctggctccagaaagacggattggccagcgagg

SEQ ID NO: 572454 - DNA, 33 bp, Homo sapien
tctggctccagaaagatggattggccagcgagg

SEQ ID NO: 572455 - DNA, 33 bp, Homo sapien
cctgctccaagatcggaactcagctggaatatg

SEQ ID NO: 572456 - DNA, 33 bp, Homo sapien
cctgctccaagatcggtactcagctggaatatg

SEQ ID NO: 572457 - DNA, 33 bp, Homo sapien
gacacagcctaatggacagagccaggtgggcag

SEQ ID NO: 572458 - DNA, 33 bp, Homo sapien
gacacagcctaatggatagagccaggtgggcag

SEQ ID NO: 572459 - DNA, 33 bp, Homo sapien
caggggtgatccgtgaggtgaagaaaaaatagt

SEQ ID NO: 572460 - DNA, 33 bp, Homo sapien
caggggtgatccgtgatgtgaagaaaaaatagt

SEQ ID NO: 572461 - DNA, 33 bp, Homo sapien
ataaccgttttaagtgaatatcagtactttaat

SEQ ID NO: 572462 - DNA, 33 bp, Homo sapien
ataaccgttttaagtggatatcagtactttaat

SEQ ID NO: 572463 - DNA, 33 bp, Homo sapien
aatgatgatcaagaaagataaggttcctctact

SEQ ID NO: 572464 - DNA, 33 bp, Homo sapien
aatgatgatcaagaaatataaggttcctctact

SEQ ID NO: 572465 - DNA, 33 bp, Homo sapien
ccagaaacttcactcacaatcagagtcatctag

SEQ ID NO: 572466 - DNA, 33 bp, Homo sapien
ccagaaacttcactcagaatcagagtcatctag

SEQ ID NO: 572467 - DNA, 33 bp, Homo sapien
caaaggctcagaaggcaaatctggataaataat

SEQ ID NO: 572468 - DNA, 33 bp, Homo sapien
caaaggctcagaaggcgaatctggataaataat

SEQ ID NO: 572469 - DNA, 33 bp, Homo sapien
acttgctcaacttgaacatgccttctaaagtcc

SEQ ID NO: 572470 - DNA, 33 bp, Homo sapien
acttgctcaacttgaatatgccttctaaagtcc

SEQ ID NO: 572471 - DNA, 33 bp, Homo sapien
aagttaagtaatcatcactgtaatcaccaccac

SEQ ID NO: 572472 - DNA, 33 bp, Homo sapien
aagttaagtaatcatcgctgtaatcaccaccac

SEQ ID NO: 572473 - DNA, 33 bp, Homo sapien
tgtgggatatggtacaggtaaattctaatatat

SEQ ID NO: 572474 - DNA, 33 bp, Homo sapien
tgtgggatatggtacatgtaaattctaatatat

SEQ ID NO: 572475 - DNA, 33 bp, Homo sapien
tgggtagttctgattccagctctgctgttttat

SEQ ID NO: 572476 - DNA, 33 bp, Homo sapien
tgggtagttctgattctagctctgctgttttat

SEQ ID NO: 572477 - DNA, 33 bp, Homo sapien
ttctgctgagtcctgccgagtcctgactgggaa

SEQ ID NO: 572478 - DNA, 33 bp, Homo sapien
ttctgctgagtcctgctgagtcctgactgggaa

SEQ ID NO: 572479 - DNA, 33 bp, Homo sapien
gtgacccagatggggaagcttctggcgagtctg

SEQ ID NO: 572480 - DNA, 33 bp, Homo sapien
gtgacccagatggggacgcttctggcgagtctg

SEQ ID NO: 572481 - DNA, 33 bp, Homo sapien
ccttgattaggcagaacacccattccatatctg

SEQ ID NO: 572482 - DNA, 33 bp, Homo sapien
ccttgattaggcagaatacccattccatatctg

SEQ ID NO: 572483 - DNA, 33 bp, Homo sapien
tgatctctttcctcaacttctggattgagtacc

SEQ ID NO: 572484 - DNA, 33 bp, Homo sapien
tgatctctttcctcaagttctggattgagtacc

SEQ ID NO: 572485 - DNA, 33 bp, Homo sapien
gggatcttgttaaaatgaaaaccagagcatgtc

SEQ ID NO: 572486 - DNA, 33 bp, Homo sapien
gggatcttgttaaaattaaaaccagagcatgtc

SEQ ID NO: 572487 - DNA, 33 bp, Homo sapien
acttcctcactctgcaacctcagtcagatcttt

SEQ ID NO: 572488 - DNA, 33 bp, Homo sapien
acttcctcactctgcaccctcagtcagatcttt

SEQ ID NO: 572489 - DNA, 33 bp, Homo sapien
actgagattgaaggaacagatttgggggatgag

SEQ ID NO: 572490 - DNA, 33 bp, Homo sapien
actgagattgaaggaagagatttgggggatgag

SEQ ID NO: 572491 - DNA, 33 bp, Homo sapien
gctccattgctgactcactgtggccaaaagttg

SEQ ID NO: 572492 - DNA, 33 bp, Homo sapien
gctccattgctgactcgctgtggccaaaagttg

SEQ ID NO: 572493 - DNA, 33 bp, Homo sapien
tcatgattttaacaacaagtacaactgtaccag

SEQ ID NO: 572494 - DNA, 33 bp, Homo sapien
tcatgattttaacaaccagtacaactgtaccag

SEQ ID NO: 572495 - DNA, 33 bp, Homo sapien
taataagtgcccaacaaatggtagctatcgtta

SEQ ID NO: 572496 - DNA, 33 bp, Homo sapien
taataagtgcccaacagatggtagctatcgtta

SEQ ID NO: 572497 - DNA, 33 bp, Homo sapien
tttgggcattggaagacaaggacttaggtgttt

SEQ ID NO: 572498 - DNA, 33 bp, Homo sapien
tttgggcattggaagataaggacttaggtgttt

SEQ ID NO: 572499 - DNA, 33 bp, Homo sapien
tgcctcccggttcccacactcatttaagcacac

SEQ ID NO: 572500 - DNA, 33 bp, Homo sapien
tgcctcccggttcccagactcatttaagcacac

SEQ ID NO: 572501 - DNA, 33 bp, Homo sapien
gatttcgcggcgagcaaaacaaacatggtctaa

SEQ ID NO: 572502 - DNA, 33 bp, Homo sapien
gatttcgcggcgagcataacaaacatggtctaa

SEQ ID NO: 572503 - DNA, 33 bp, Homo sapien
ctattggtaaatagccactgtcccaaaccccct

SEQ ID NO: 572504 - DNA, 33 bp, Homo sapien
ctattggtaaatagccgctgtcccaaaccccct

SEQ ID NO: 572505 - DNA, 33 bp, Homo sapien
tctgcaaattaaatgcacatgctcgcagatgag

SEQ ID NO: 572506 - DNA, 33 bp, Homo sapien
tctgcaaattaaatgcccatgctcgcagatgag

SEQ ID NO: 572507 - DNA, 33 bp, Homo sapien
tcaccaaggcagagaaagacctgcaggctggtg

SEQ ID NO: 572508 - DNA, 33 bp, Homo sapien
tcaccaaggcagagaaggacctgcaggctggtg

SEQ ID NO: 572509 - DNA, 33 bp, Homo sapien
tgtccctttgtggtacaggagaaagctctctag

SEQ ID NO: 572510 - DNA, 33 bp, Homo sapien
tgtccctttgtggtacgggagaaagctctctag

SEQ ID NO: 572511 - DNA, 33 bp, Homo sapien
gaagggttattttgacactgactgccctctgtg

SEQ ID NO: 572512 - DNA, 33 bp, Homo sapien
gaagggttattttgacgctgactgccctctgtg

SEQ ID NO: 572513 - DNA, 33 bp, Homo sapien
gagacagggctggtaactggagcaggatgggaa

SEQ ID NO: 572514 - DNA, 33 bp, Homo sapien
gagacagggctggtaattggagcaggatgggaa

SEQ ID NO: 572515 - DNA, 33 bp, Homo sapien
gttccagcccgagaccagagattaaggaagaag

SEQ ID NO: 572516 - DNA, 33 bp, Homo sapien
gttccagcccgagaccggagattaaggaagaag

SEQ ID NO: 572517 - DNA, 33 bp, Homo sapien
gtgagatcatcagaaaacaaattcagattttca

SEQ ID NO: 572518 - DNA, 33 bp, Homo sapien
gtgagatcatcagaaagcaaattcagattttca

SEQ ID NO: 572519 - DNA, 33 bp, Homo sapien
agatatgcctgcaagaccaaatccttaaaaggg

SEQ ID NO: 572520 - DNA, 33 bp, Homo sapien
agatatgcctgcaagatcaaatccttaaaaggg

SEQ ID NO: 572521 - DNA, 33 bp, Homo sapien
ccaaagtgaagaagaacggaatgaacagtggcc

SEQ ID NO: 572522 - DNA, 33 bp, Homo sapien
ccaaagtgaagaagaatggaatgaacagtggcc

SEQ ID NO: 572523 - DNA, 33 bp, Homo sapien
gggtagggaggaataacagcagagaaggcagcc

SEQ ID NO: 572524 - DNA, 33 bp, Homo sapien
gggtagggaggaataagagcagagaaggcagcc

SEQ ID NO: 572525 - DNA, 33 bp, Homo sapien
ggggcatggagggaaacgtgggggaagaaggga

SEQ ID NO: 572526 - DNA, 33 bp, Homo sapien
ggggcatggagggaaatgtgggggaagaaggga

SEQ ID NO: 572527 - DNA, 33 bp, Homo sapien
ggaggagtggtgtctcccttatttgtagactca

SEQ ID NO: 572528 - DNA, 33 bp, Homo sapien
ggaggagtggtgtctctcttatttgtagactca

SEQ ID NO: 572529 - DNA, 33 bp, Homo sapien
tctaggagcttaagaactgagtctgttttgttc

SEQ ID NO: 572530 - DNA, 33 bp, Homo sapien
tctaggagcttaagaattgagtctgttttgttc

SEQ ID NO: 572531 - DNA, 33 bp, Homo sapien
aaagagtttggcactaccagaatataaggtgca

SEQ ID NO: 572532 - DNA, 33 bp, Homo sapien
aaagagtttggcactatcagaatataaggtgca

SEQ ID NO: 572533 - DNA, 33 bp, Homo sapien
gttttccagcaaaacaaaggaagagagggagct

SEQ ID NO: 572534 - DNA, 33 bp, Homo sapien
gttttccagcaaaacagaggaagagagggagct

SEQ ID NO: 572535 - DNA, 33 bp, Homo sapien
ggtcctttgagtctggaaactgcagggaaacct

SEQ ID NO: 572536 - DNA, 33 bp, Homo sapien
ggtcctttgagtctggcaactgcagggaaacct

SEQ ID NO: 572537 - DNA, 33 bp, Homo sapien
aagaaggtttcccaacacaggaggtccgtgctc

SEQ ID NO: 572538 - DNA, 33 bp, Homo sapien
aagaaggtttcccaacgcaggaggtccgtgctc

SEQ ID NO: 572539 - DNA, 33 bp, Homo sapien
agacacaccctgcagaagtcctggcaactgtta

SEQ ID NO: 572540 - DNA, 33 bp, Homo sapien
agacacaccctgcagaggtcctggcaactgtta

SEQ ID NO: 572541 - DNA, 33 bp, Homo sapien
acgtgtattgattgcccacgacatggcaggaat

SEQ ID NO: 572542 - DNA, 33 bp, Homo sapien
acgtgtattgattgcctacgacatggcaggaat

SEQ ID NO: 572543 - DNA, 33 bp, Homo sapien
aactgtacatggccacccttattagccctttcc

SEQ ID NO: 572544 - DNA, 33 bp, Homo sapien
aactgtacatggccacgcttattagccctttcc

SEQ ID NO: 572545 - DNA, 33 bp, Homo sapien
agtgaggctcagatgcaaagacggttgtgagtg

SEQ ID NO: 572546 - DNA, 33 bp, Homo sapien
agtgaggctcagatgccaagacggttgtgagtg

SEQ ID NO: 572547 - DNA, 33 bp, Homo sapien
agggcacattgtagacggtccagaaacactgat

SEQ ID NO: 572548 - DNA, 33 bp, Homo sapien
agggcacattgtagactgtccagaaacactgat

SEQ ID NO: 572549 - DNA, 33 bp, Homo sapien
ttttgcctatactgatcagttccaaaaggaact

SEQ ID NO: 572550 - DNA, 33 bp, Homo sapien
ttttgcctatactgattagttccaaaaggaact

SEQ ID NO: 572551 - DNA, 33 bp, Homo sapien
aacctaaaaatgcaataaacgaatacagcaaaa

SEQ ID NO: 572552 - DNA, 33 bp, Homo sapien
aacctaaaaatgcaatgaacgaatacagcaaaa

SEQ ID NO: 572553 - DNA, 33 bp, Homo sapien
gactcggcatcatcaccaaacatgctgattcag

SEQ ID NO: 572554 - DNA, 33 bp, Homo sapien
gactcggcatcatcactaaacatgctgattcag

SEQ ID NO: 572555 - DNA, 33 bp, Homo sapien
tcctgacaagtccagcaaccatgacacatcaac

SEQ ID NO: 572556 - DNA, 33 bp, Homo sapien
tcctgacaagtccagcgaccatgacacatcaac

SEQ ID NO: 572557 - DNA, 33 bp, Homo sapien
ccactatgtccttcaacttccctactcagtagc

SEQ ID NO: 572558 - DNA, 33 bp, Homo sapien
ccactatgtccttcaatttccctactcagtagc

SEQ ID NO: 572559 - DNA, 33 bp, Homo sapien
caactctgctcacagaagatcgcgggaaaaagc

SEQ ID NO: 572560 - DNA, 33 bp, Homo sapien
caactctgctcacagaggatcgcgggaaaaagc

SEQ ID NO: 572561 - DNA, 33 bp, Homo sapien
ttctcacagcctggtaagtataaacctcttaga

SEQ ID NO: 572562 - DNA, 33 bp, Homo sapien
ttctcacagcctggtaggtataaacctcttaga

SEQ ID NO: 572563 - DNA, 33 bp, Homo sapien
gcaactgaagttcagacggattgacaaacttgt

SEQ ID NO: 572564 - DNA, 33 bp, Homo sapien
gcaactgaagttcagatggattgacaaacttgt

SEQ ID NO: 572565 - DNA, 33 bp, Homo sapien; identical to SEQ ID NO: 572563

SEQ ID NO: 572566 - DNA, 33 bp, Homo sapien; identical to SEQ ID NO: 572564

SEQ ID NO: 572567 - DNA, 33 bp, Homo sapien
attttgaagtttaaaagttcttgtcagcctatc

SEQ ID NO: 572568 - DNA, 33 bp, Homo sapien
attttgaagtttaaaatttcttgtcagcctatc

SEQ ID NO: 572569 - DNA, 33 bp, Homo sapien
ttggccttgagttccacagcttcacggcagccc

SEQ ID NO: 572570 - DNA, 33 bp, Homo sapien
ttggccttgagttccagagcttcacggcagccc

SEQ ID NO: 572571 - DNA, 33 bp, Homo sapien
cagccaagatattgacaatgatacagtcaggat

SEQ ID NO: 572572 - DNA, 33 bp, Homo sapien
cagccaagatattgacgatgatacagtcaggat

SEQ ID NO: 572573 - DNA, 33 bp, Homo sapien
cttcctagttgctctcaaggaacttacctctta

SEQ ID NO: 572574 - DNA, 33 bp, Homo sapien
cttcctagttgctctcgaggaacttacctctta

SEQ ID NO: 572575 - DNA, 33 bp, Homo sapien
ctcaactggacttcctaaagtgtgtttggaaat

SEQ ID NO: 572576 - DNA, 33 bp, Homo sapien
ctcaactggacttcctgaagtgtgtttggaaat

SEQ ID NO: 572577 - DNA, 33 bp, Homo sapien
ctttctatgtgaaatccaaccttgtcgtgcatc

SEQ ID NO: 572578 - DNA, 33 bp, Homo sapien
ctttctatgtgaaatctaaccttgtcgtgcatc

SEQ ID NO: 572579 - DNA, 33 bp, Homo sapien
gtgggaaaggcaggccgcatttccagagtgctt

SEQ ID NO: 572580 - DNA, 33 bp, Homo sapien
gtgggaaaggcaggcctcatttccagagtgctt

SEQ ID NO: 572581 - DNA, 33 bp, Homo sapien
cagaggcaggtcttctaactaagaaatggatat

SEQ ID NO: 572582 - DNA, 33 bp, Homo sapien
cagaggcaggtcttctgactaagaaatggatat

SEQ ID NO: 572583 - DNA, 33 bp, Homo sapien
tgcagcaaggatacgacgtgtgggatctgcatg

SEQ ID NO: 572584 - DNA, 33 bp, Homo sapien
tgcagcaaggatacgatgtgtgggatctgcatg

SEQ ID NO: 572585 - DNA, 33 bp, Homo sapien
ccaaagtgagattgtacgtgattgtatattggg

SEQ ID NO: 572586 - DNA, 33 bp, Homo sapien
ccaaagtgagattgtatgtgattgtatattggg

SEQ ID NO: 572587 - DNA, 33 bp, Homo sapien
tggccaccatgtagaccgatgaggagtcaatag

SEQ ID NO: 572588 - DNA, 33 bp, Homo sapien
tggccaccatgtagactgatgaggagtcaatag

SEQ ID NO: 572589 - DNA, 33 bp, Homo sapien
ctatggaaaggcagaaaccatgataaatgctta

SEQ ID NO: 572590 - DNA, 33 bp, Homo sapien
ctatggaaaggcagaagccatgataaatgctta

SEQ ID NO: 572591 - DNA, 33 bp, Homo sapien
cactctttccacttcaatctctgagataagggg

SEQ ID NO: 572592 - DNA, 33 bp, Homo sapien
cactctttccacttcagtctctgagataagggg

SEQ ID NO: 572593 - DNA, 33 bp, Homo sapien
actcagttcttctaaacattgggccctaaatat

SEQ ID NO: 572594 - DNA, 33 bp, Homo sapien
actcagttcttctaaatattgggccctaaatat

SEQ ID NO: 572595 - DNA, 33 bp, Homo sapien
agaactgagtaaatgacggagatcacgtttcca

SEQ ID NO: 572596 - DNA, 33 bp, Homo sapien
agaactgagtaaatgatggagatcacgtttcca

SEQ ID NO: 572597 - DNA, 33 bp, Homo sapien
atctttttaacaatgcagatgaataatttttta

SEQ ID NO: 572598 - DNA, 33 bp, Homo sapien
atctttttaacaatgcggatgaataatttttta

SEQ ID NO: 572599 - DNA, 33 bp, Homo sapien
agattgacaggagtaaccgtacattttaaacca

SEQ ID NO: 572600 - DNA, 33 bp, Homo sapien
agattgacaggagtaatcgtacattttaaacca

SEQ ID NO: 572601 - DNA, 33 bp, Homo sapien
tctcctatcagcattacgggtttaaaattcaca

SEQ ID NO: 572602 - DNA, 33 bp, Homo sapien
tctcctatcagcattatgggtttaaaattcaca

SEQ ID NO: 572603 - DNA, 33 bp, Homo sapien
gaacagacaaatacacaaatggaataaaagaaa

SEQ ID NO: 572604 - DNA, 33 bp, Homo sapien
gaacagacaaatacacgaatggaataaaagaaa

SEQ ID NO: 572605 - DNA, 33 bp, Homo sapien
atggtatgtattttccaaacgtctactttctaa

SEQ ID NO: 572606 - DNA, 33 bp, Homo sapien
atggtatgtattttcctaacgtctactttctaa

SEQ ID NO: 572607 - DNA, 33 bp, Homo sapien
cctaaaccacaaaaacaatgagatagtaaatgt

SEQ ID NO: 572608 - DNA, 33 bp, Homo sapien
cctaaaccacaaaaacgatgagatagtaaatgt

SEQ ID NO: 572609 - DNA, 33 bp, Homo sapien
tctctgaagaaaatgaactattagccgtaaccc

SEQ ID NO: 572610 - DNA, 33 bp, Homo sapien
tctctgaagaaaatgatctattagccgtaaccc

SEQ ID NO: 572611 - DNA, 33 bp, Homo sapien
gatttgattcttccaagaactctgagaagcata

SEQ ID NO: 572612 - DNA, 33 bp, Homo sapien
gatttgattcttccaataactctgagaagcata

SEQ ID NO: 572613 - DNA, 33 bp, Homo sapien
tagtatttctgtttcaaccggaagaggaagcaa

SEQ ID NO: 572614 - DNA, 33 bp, Homo sapien
tagtatttctgtttcagccggaagaggaagcaa

SEQ ID NO: 572615 - DNA, 33 bp, Homo sapien
aatgagtgctatgagggagataagaacaagtac

SEQ ID NO: 572616 - DNA, 33 bp, Homo sapien
aatgagtgctatgaggtagataagaacaagtac

SEQ ID NO: 572617 - DNA, 33 bp, Homo sapien
tcacaatggtcaaaaaaggaaatttgcacaggg

SEQ ID NO: 572618 - DNA, 33 bp, Homo sapien
tcacaatggtcaaaaacggaaatttgcacaggg

SEQ ID NO: 572619 - DNA, 33 bp, Homo sapien
agctcaggaattaagcaaagcaatgaaggaaga

SEQ ID NO: 572620 - DNA, 33 bp, Homo sapien
agctcaggaattaagcgaagcaatgaaggaaga

SEQ ID NO: 572621 - DNA, 33 bp, Homo sapien
aacttctctgaaaacaactgctgtgcctttctc

SEQ ID NO: 572622 - DNA, 33 bp, Homo sapien
aacttctctgaaaacagctgctgtgcctttctc

SEQ ID NO: 572623 - DNA, 33 bp, Homo sapien
taatggggagaactcacgtgtggtatacactga

SEQ ID NO: 572624 - DNA, 33 bp, Homo sapien
taatggggagaactcatgtgtggtatacactga

SEQ ID NO: 572625 - DNA, 33 bp, Homo sapien
ctagaagtgacataagaagccagaagttgccac

SEQ ID NO: 572626 - DNA, 33 bp, Homo sapien
ctagaagtgacataaggagccagaagttgccac

SEQ ID NO: 572627 - DNA, 33 bp, Homo sapien
ggcagcttttgctccccactgtcagagtcccaa

SEQ ID NO: 572628 - DNA, 33 bp, Homo sapien
ggcagcttttgctcccgactgtcagagtcccaa

SEQ ID NO: 572629 - DNA, 33 bp, Homo sapien
ggaagaaaagcctatacaggttgcattatcaaa

SEQ ID NO: 572630 - DNA, 33 bp, Homo sapien
ggaagaaaagcctatagaggttgcattatcaaa

SEQ ID NO: 572631 - DNA, 33 bp, Homo sapien
cttgccagctatgtgaacttgggtacatatcac

SEQ ID NO: 572632 - DNA, 33 bp, Homo sapien
cttgccagctatgtgaccttgggtacatatcac

SEQ ID NO: 572633 - DNA, 33 bp, Homo sapien
ctgtattctcaaactacctggacagtggcaacg

SEQ ID NO: 572634 - DNA, 33 bp, Homo sapien
ctgtattctcaaactatctggacagtggcaacg

SEQ ID NO: 572635 - DNA, 33 bp, Homo sapien
ctaaacaaggagttcaataagcctcattggaat

SEQ ID NO: 572636 - DNA, 33 bp, Homo sapien
ctaaacaaggagttcagtaagcctcattggaat

SEQ ID NO: 572637 - DNA, 33 bp, Homo sapien
tcaacactgagtgctcacttggaaaggaggtgg

SEQ ID NO: 572638 - DNA, 33 bp, Homo sapien
tcaacactgagtgctcgcttggaaaggaggtgg

SEQ ID NO: 572639 - DNA, 33 bp, Homo sapien
cagatctgctgcctgagaaataagctcctttat

SEQ ID NO: 572640 - DNA, 33 bp, Homo sapien
cagatctgctgcctgataaataagctcctttat

SEQ ID NO: 572641 - DNA, 33 bp, Homo sapien
aatgtttccatctgtacggtgggtcaggtgctg

SEQ ID NO: 572642 - DNA, 33 bp, Homo sapien
aatgtttccatctgtatggtgggtcaggtgctg

SEQ ID NO: 572643 - DNA, 33 bp, Homo sapien
gctttgggttgcaaaaattccctagaaggccca

SEQ ID NO: 572644 - DNA, 33 bp, Homo sapien
gctttgggttgcaaaacttccctagaaggccca

SEQ ID NO: 572645 - DNA, 33 bp, Homo sapien
tttcctcatctctaacaacattttaaacgtaca

SEQ ID NO: 572646 - DNA, 33 bp, Homo sapien
tttcctcatctctaacgacattttaaacgtaca

SEQ ID NO: 572647 - DNA, 33 bp, Homo sapien
aaacaccttagtttcacgaggactcttctgggg

SEQ ID NO: 572648 - DNA, 33 bp, Homo sapien
aaacaccttagtttcatgaggactcttctgggg

SEQ ID NO: 572649 - DNA, 33 bp, Homo sapien
gttattattgcattaactcattgaggaaaggtt

SEQ ID NO: 572650 - DNA, 33 bp, Homo sapien
gttattattgcattaattcattgaggaaaggtt

SEQ ID NO: 572651 - DNA, 33 bp, Homo sapien
cgatggaaccagaccacctggattggaatcaca

SEQ ID NO: 572652 - DNA, 33 bp, Homo sapien
cgatggaaccagaccatctggattggaatcaca

SEQ ID NO: 572653 - DNA, 33 bp, Homo sapien
aagtgcttcgtgaatcaaatatgactcagtcga

SEQ ID NO: 572654 - DNA, 33 bp, Homo sapien
aagtgcttcgtgaatcgaatatgactcagtcga

SEQ ID NO: 572655 - DNA, 33 bp, Homo sapien
atctcactgaatcgccacaccagccctaagagt

SEQ ID NO: 572656 - DNA, 33 bp, Homo sapien
atctcactgaatcgccgcaccagccctaagagt

SEQ ID NO: 572657 - DNA, 33 bp, Homo sapien
gatttttatttcctcgaaagtggcagcgctgca

SEQ ID NO: 572658 - DNA, 33 bp, Homo sapien
gatttttatttcctcgcaagtggcagcgctgca

SEQ ID NO: 572659 - DNA, 33 bp, Homo sapien
tcgtgttcacagggaccccccggttctgtaact

SEQ ID NO: 572660 - DNA, 33 bp, Homo sapien
tcgtgttcacagggactccccggttctgtaact

SEQ ID NO: 572661 - DNA, 33 bp, Homo sapien
aatcttgttttaggtaaaccactgtgtaacgtt

SEQ ID NO: 572662 - DNA, 33 bp, Homo sapien
aatcttgttttaggtagaccactgtgtaacgtt

SEQ ID NO: 572663 - DNA, 33 bp, Homo sapien
ttctttaatgaaacgacattttatcatctgaag

SEQ ID NO: 572664 - DNA, 33 bp, Homo sapien
ttctttaatgaaacgatattttatcatctgaag

SEQ ID NO: 572665 - DNA, 33 bp, Homo sapien
aagaagaaatggtcccactgtgcaaaggactca

SEQ ID NO: 572666 - DNA, 33 bp, Homo sapien
aagaagaaatggtccctctgtgcaaaggactca

SEQ ID NO: 572667 - DNA, 33 bp, Homo sapien
gaaggccacagtctacaacattttggttagagg

SEQ ID NO: 572668 - DNA, 33 bp, Homo sapien
gaaggccacagtctacgacattttggttagagg

SEQ ID NO: 572669 - DNA, 33 bp, Homo sapien
catgctgagcgcactgaaggacagaatccagtg

SEQ ID NO: 572670 - DNA, 33 bp, Homo sapien
catgctgagcgcactgcaggacagaatccagtg

SEQ ID NO: 572671 - DNA, 33 bp, Homo sapien
tctctgcttttcggaccctgtctctgtttctca

SEQ ID NO: 572672 - DNA, 33 bp, Homo sapien
tctctgcttttcggactctgtctctgtttctca

SEQ ID NO: 572673 - DNA, 33 bp, Homo sapien
caggtattctgcgtaccgggagggaaacggtgc

SEQ ID NO: 572674 - DNA, 33 bp, Homo sapien
caggtattctgcgtactgggagggaaacggtgc

SEQ ID NO: 572675 - DNA, 33 bp, Homo sapien
tgtggcctgttctccacgtattctgaatggctt

SEQ ID NO: 572676 - DNA, 33 bp, Homo sapien
tgtggcctgttctccatgtattctgaatggctt

SEQ ID NO: 572677 - DNA, 33 bp, Homo sapien
tttaggtcttagaagcagatcattaaccaattc

SEQ ID NO: 572678 - DNA, 33 bp, Homo sapien
tttaggtcttagaagctgatcattaaccaattc

SEQ ID NO: 572679 - DNA, 33 bp, Homo sapien
ttcaactcactgctcactatacagtatgtgctt

SEQ ID NO: 572680 - DNA, 33 bp, Homo sapien
ttcaactcactgctcagtatacagtatgtgctt

SEQ ID NO: 572681 - DNA, 33 bp, Homo sapien
agaggagagacctaaacactcaggctctaatga

SEQ ID NO: 572682 - DNA, 33 bp, Homo sapien
agaggagagacctaaagactcaggctctaatga

SEQ ID NO: 572683 - DNA, 33 bp, Homo sapien
tgaagacaagtgcaaaagttgagaaatagtctc

SEQ ID NO: 572684 - DNA, 33 bp, Homo sapien
tgaagacaagtgcaaaggttgagaaatagtctc

SEQ ID NO: 572685 - DNA, 33 bp, Homo sapien
tgctgaatttttgcagaaaatcactgaacacac

SEQ ID NO: 572686 - DNA, 33 bp, Homo sapien
tgctgaatttttgcaggaaatcactgaacacac

SEQ ID NO: 572687 - DNA, 33 bp, Homo sapien
tccatgagtgaactgacgctcggagtgaggaag

SEQ ID NO: 572688 - DNA, 33 bp, Homo sapien
tccatgagtgaactgatgctcggagtgaggaag

SEQ ID NO: 572689 - DNA, 33 bp, Homo sapien
ttctgtgaggccgtcagtcccatgttatccatg

SEQ ID NO: 572690 - DNA, 33 bp, Homo sapien
ttctgtgaggccgtcattcccatgttatccatg

SEQ ID NO: 572691 - DNA, 33 bp, Homo sapien
cctgggcattctctgaagatggcctaatatgca

SEQ ID NO: 572692 - DNA, 33 bp, Homo sapien
cctgggcattctctgaggatggcctaatatgca

SEQ ID NO: 572693 - DNA, 33 bp, Homo sapien
ggattggttaataaaaagagctggaagaatgtt

SEQ ID NO: 572694 - DNA, 33 bp, Homo sapien
ggattggttaataaaaggagctggaagaatgtt

SEQ ID NO: 572695 - DNA, 33 bp, Homo sapien
catgtgaagtacccagaataacacctggcgctt

SEQ ID NO: 572696 - DNA, 33 bp, Homo sapien
catgtgaagtacccagcataacacctggcgctt

SEQ ID NO: 572697 - DNA, 33 bp, Homo sapien
gtggctattgctctaactataaactcccactat

SEQ ID NO: 572698 - DNA, 33 bp, Homo sapien
gtggctattgctctaattataaactcccactat

SEQ ID NO: 572699 - DNA, 33 bp, Homo sapien
taccatcccccccaaagatctctatcccagagt

SEQ ID NO: 572700 - DNA, 33 bp, Homo sapien
taccatcccccccaaatatctctatcccagagt

SEQ ID NO: 572701 - DNA, 33 bp, Homo sapien
agatcttacaagtagccagaataaaaatggggc

SEQ ID NO: 572702 - DNA, 33 bp, Homo sapien
agatcttacaagtagcgagaataaaaatggggc

SEQ ID NO: 572703 - DNA, 33 bp, Homo sapien
atctaaaggttgcaaactcaatgctctcaggga

SEQ ID NO: 572704 - DNA, 33 bp, Homo sapien
atctaaaggttgcaaattcaatgctctcaggga

SEQ ID NO: 572705 - DNA, 33 bp, Homo sapien
gaggctctaacctgacagtaaaaggcagcaaga

SEQ ID NO: 572706 - DNA, 33 bp, Homo sapien
gaggctctaacctgacggtaaaaggcagcaaga

SEQ ID NO: 572707 - DNA, 33 bp, Homo sapien
gaaactgagggaaatccagcttcggagcgcagg

SEQ ID NO: 572708 - DNA, 33 bp, Homo sapien
gaaactgagggaaatcgagcttcggagcgcagg

SEQ ID NO: 572709 - DNA, 33 bp, Homo sapien
tcagttctgattcacagggaagaggagtggttt

SEQ ID NO: 572710 - DNA, 33 bp, Homo sapien
tcagttctgattcacatggaagaggagtggttt

SEQ ID NO: 572711 - DNA, 33 bp, Homo sapien
aaatattctttgagtcagacaaaacacatctca

SEQ ID NO: 572712 - DNA, 33 bp, Homo sapien
aaatattctttgagtcggacaaaacacatctca

SEQ ID NO: 572713 - DNA, 33 bp, Homo sapien
attttctcctaattacccatcaccaactaaaac

SEQ ID NO: 572714 - DNA, 33 bp, Homo sapien
attttctcctaattactcatcaccaactaaaac

SEQ ID NO: 572715 - DNA, 33 bp, Homo sapien
aaataaaagaagagtgaaatgggagcttcagaa

SEQ ID NO: 572716 - DNA, 33 bp, Homo sapien
aaataaaagaagagtggaatgggagcttcagaa

SEQ ID NO: 572717 - DNA, 33 bp, Homo sapien
tttgtctgacaggttcaccctgagctttggcca

SEQ ID NO: 572718 - DNA, 33 bp, Homo sapien
tttgtctgacaggttcgccctgagctttggcca

SEQ ID NO: 572719 - DNA, 33 bp, Homo sapien
gaaagcaacagattcactaaaccctcaccagcc

SEQ ID NO: 572720 - DNA, 33 bp, Homo sapien
gaaagcaacagattcagtaaaccctcaccagcc

SEQ ID NO: 572721 - DNA, 33 bp, Homo sapien
ataaaaatcactcctacgcagaaaaatcgattc

SEQ ID NO: 572722 - DNA, 33 bp, Homo sapien
ataaaaatcactcctatgcagaaaaatcgattc

SEQ ID NO: 572723 - DNA, 33 bp, Homo sapien
atgcagacgggcttaactcgagctgctggaggt

SEQ ID NO: 572724 - DNA, 33 bp, Homo sapien
atgcagacgggcttaattcgagctgctggaggt

SEQ ID NO: 572725 - DNA, 33 bp, Homo sapien
tattacataaagtcataaaggccactggtagga

SEQ ID NO: 572726 - DNA, 33 bp, Homo sapien
tattacataaagtcattaaggccactggtagga

SEQ ID NO: 572727 - DNA, 33 bp, Homo sapien
caacaatagattcggaatacgttcaaatcagaa

SEQ ID NO: 572728 - DNA, 33 bp, Homo sapien
caacaatagattcggagtacgttcaaatcagaa

SEQ ID NO: 572729 - DNA, 33 bp, Homo sapien
tgatctatataacggcaaccttgctgccccagc

SEQ ID NO: 572730 - DNA, 33 bp, Homo sapien
tgatctatataacggcgaccttgctgccccagc

SEQ ID NO: 572731 - DNA, 33 bp, Homo sapien
aacaaaggcaaaaacagaattttgagagcaaag

SEQ ID NO: 572732 - DNA, 33 bp, Homo sapien
aacaaaggcaaaaacataattttgagagcaaag

SEQ ID NO: 572733 - DNA, 33 bp, Homo sapien
ttttcctggaatgagacggaagccactggaggg

SEQ ID NO: 572734 - DNA, 33 bp, Homo sapien
ttttcctggaatgagatggaagccactggaggg

SEQ ID NO: 572735 - DNA, 33 bp, Homo sapien
cactgtgtccagagcacggggagagccgtgaag

SEQ ID NO: 572736 - DNA, 33 bp, Homo sapien
cactgtgtccagagcatggggagagccgtgaag

SEQ ID NO: 572737 - DNA, 33 bp, Homo sapien
ggtgtttagaaaataactgttgagtgtctttgg

SEQ ID NO: 572738 - DNA, 33 bp, Homo sapien
ggtgtttagaaaataattgttgagtgtctttgg

SEQ ID NO: 572739 - DNA, 33 bp, Homo sapien
cttggtgcattctaccacctagaagcaggttgc

SEQ ID NO: 572740 - DNA, 33 bp, Homo sapien
cttggtgcattctaccgcctagaagcaggttgc

SEQ ID NO: 572741 - DNA, 33 bp, Homo sapien
tgggaagactacggcaagtgtagccattccctt

SEQ ID NO: 572742 - DNA, 33 bp, Homo sapien
tgggaagactacggcacgtgtagccattccctt

SEQ ID NO: 572743 - DNA, 33 bp, Homo sapien
gccttctgtggagacacggtgaagcctcggtgc

SEQ ID NO: 572744 - DNA, 33 bp, Homo sapien
gccttctgtggagacatggtgaagcctcggtgc

SEQ ID NO: 572745 - DNA, 33 bp, Homo sapien
gggtagccagtgggaaggctgtaagaatggtgc

SEQ ID NO: 572746 - DNA, 33 bp, Homo sapien
gggtagccagtgggaatgctgtaagaatggtgc

SEQ ID NO: 572747 - DNA, 33 bp, Homo sapien
catcacacctgatgtcaaggcagaaagaaagca

SEQ ID NO: 572748 - DNA, 33 bp, Homo sapien
catcacacctgatgtcgaggcagaaagaaagca

SEQ ID NO: 572749 - DNA, 33 bp, Homo sapien
actcctcgggtcctggaacatcatcattggtcc

SEQ ID NO: 572750 - DNA, 33 bp, Homo sapien
actcctcgggtcctggcacatcatcattggtcc

SEQ ID NO: 572751 - DNA, 33 bp, Homo sapien
tgcagagtatagcctgaaactccctgaaatggg

SEQ ID NO: 572752 - DNA, 33 bp, Homo sapien
tgcagagtatagcctggaactccctgaaatggg

SEQ ID NO: 572753 - DNA, 33 bp, Homo sapien
caaaagggaaaatgacaatcaagttttttccta

SEQ ID NO: 572754 - DNA, 33 bp, Homo sapien
caaaagggaaaatgaccatcaagttttttccta

SEQ ID NO: 572755 - DNA, 33 bp, Homo sapien
tggaagaagtgcccacaatttaacactgcacac

SEQ ID NO: 572756 - DNA, 33 bp, Homo sapien
tggaagaagtgcccacgatttaacactgcacac

SEQ ID NO: 572757 - DNA, 33 bp, Homo sapien
atgtgcgtcagtatgacagaggatatataatta

SEQ ID NO: 572758 - DNA, 33 bp, Homo sapien
atgtgcgtcagtatgagagaggatatataatta

SEQ ID NO: 572759 - DNA, 33 bp, Homo sapien
gttagttttactctgaaggatactgtcatcaag

SEQ ID NO: 572760 - DNA, 33 bp, Homo sapien
gttagttttactctgagggatactgtcatcaag

SEQ ID NO: 572761 - DNA, 33 bp, Homo sapien
ccaaacttagtgacataaaacaaccattccatt

SEQ ID NO: 572762 - DNA, 33 bp, Homo sapien
ccaaacttagtgacatgaaacaaccattccatt

SEQ ID NO: 572763 - DNA, 33 bp, Homo sapien
aatggcacatcatatcaaattcaatacatattg

SEQ ID NO: 572764 - DNA, 33 bp, Homo sapien
aatggcacatcatatcgaattcaatacatattg

SEQ ID NO: 572765 - DNA, 33 bp, Homo sapien
cgccttccctaaaaataacctattgcattcatg

SEQ ID NO: 572766 - DNA, 33 bp, Homo sapien
cgccttccctaaaaatgacctattgcattcatg

SEQ ID NO: 572767 - DNA, 33 bp, Homo sapien
agatagtaagttatcaaaaaagggagagaaaga

SEQ ID NO: 572768 - DNA, 33 bp, Homo sapien
agatagtaagttatcagaaaagggagagaaaga

SEQ ID NO: 572769 - DNA, 33 bp, Homo sapien
gctaaacattgtcttaccctgagaaatctccat

SEQ ID NO: 572770 - DNA, 33 bp, Homo sapien
gctaaacattgtcttatcctgagaaatctccat

SEQ ID NO: 572771 - DNA, 33 bp, Homo sapien
tgtaatcagagtagctaaaagacaactgaacag

SEQ ID NO: 572772 - DNA, 33 bp, Homo sapien
tgtaatcagagtagctgaaagacaactgaacag

SEQ ID NO: 572773 - DNA, 33 bp, Homo sapien
tagggtctctttaacactctctaatatttgcta

SEQ ID NO: 572774 - DNA, 33 bp, Homo sapien
tagggtctctttaacattctctaatatttgcta

SEQ ID NO: 572775 - DNA, 33 bp, Homo sapien
gtagcaatgcaagaaccgtctaatacacaggta

SEQ ID NO: 572776 - DNA, 33 bp, Homo sapien
gtagcaatgcaagaactgtctaatacacaggta

SEQ ID NO: 572777 - DNA, 33 bp, Homo sapien
ctactatgcaccattcacagacataggcacagt

SEQ ID NO: 572778 - DNA, 33 bp, Homo sapien
ctactatgcaccattcgcagacataggcacagt

SEQ ID NO: 572779 - DNA, 33 bp, Homo sapien
ttctctgtttgtttaaagcaacttgagctaggt

SEQ ID NO: 572780 - DNA, 33 bp, Homo sapien
ttctctgtttgtttaaggcaacttgagctaggt

SEQ ID NO: 572781 - DNA, 33 bp, Homo sapien
gaagctgtgatgcatccgaggagaagttcagga

SEQ ID NO: 572782 - DNA, 33 bp, Homo sapien
gaagctgtgatgcatctgaggagaagttcagga

SEQ ID NO: 572783 - DNA, 33 bp, Homo sapien
aactcatcaaaagtgaaggcgatttagaatctt

SEQ ID NO: 572784 - DNA, 33 bp, Homo sapien
aactcatcaaaagtgagggcgatttagaatctt

SEQ ID NO: 572785 - DNA, 33 bp, Homo sapien
taattttcaagatcagaccttaaagtaaccccg

SEQ ID NO: 572786 - DNA, 33 bp, Homo sapien
taattttcaagatcagtccttaaagtaaccccg

SEQ ID NO: 572787 - DNA, 33 bp, Homo sapien
aataattgcaaaagtaaggtctatttcttcttt

SEQ ID NO: 572788 - DNA, 33 bp, Homo sapien
aataattgcaaaagtacggtctatttcttcttt

SEQ ID NO: 572789 - DNA, 33 bp, Homo sapien
agaaacaggcagcaccaaggaatgagctcacct

SEQ ID NO: 572790 - DNA, 33 bp, Homo sapien
agaaacaggcagcaccgaggaatgagctcacct

SEQ ID NO: 572791 - DNA, 33 bp, Homo sapien
tgtatgagtctcaaaaacatcctgaactgaaaa

SEQ ID NO: 572792 - DNA, 33 bp, Homo sapien
tgtatgagtctcaaaagcatcctgaactgaaaa

SEQ ID NO: 572793 - DNA, 33 bp, Homo sapien
agttacagttcgatgaagtttgtttgtttgttt

SEQ ID NO: 572794 - DNA, 33 bp, Homo sapien
agttacagttcgatgaggtttgtttgtttgttt

SEQ ID NO: 572795 - DNA, 33 bp, Homo sapien
atacaagataatgacaagctgatcttctaccag

SEQ ID NO: 572796 - DNA, 33 bp, Homo sapien
atacaagataatgacaggctgatcttctaccag

SEQ ID NO: 572797 - DNA, 33 bp, Homo sapien
ccccctcatctaagtacgtgtgaatgcgtattg

SEQ ID NO: 572798 - DNA, 33 bp, Homo sapien
ccccctcatctaagtatgtgtgaatgcgtattg

SEQ ID NO: 572799 - DNA, 33 bp, Homo sapien
gtgtttgttctataaacgtcagttaggtcaaat

SEQ ID NO: 572800 - DNA, 33 bp, Homo sapien
gtgtttgttctataaatgtcagttaggtcaaat

SEQ ID NO: 572801 - DNA, 33 bp, Homo sapien
ggccatgtgaagactgacaaatactatgacgtt

SEQ ID NO: 572802 - DNA, 33 bp, Homo sapien
ggccatgtgaagactggcaaatactatgacgtt

SEQ ID NO: 572803 - DNA, 33 bp, Homo sapien
tattgaaatgtaagaacagatcataaataactg

SEQ ID NO: 572804 - DNA, 33 bp, Homo sapien
tattgaaatgtaagaatagatcataaataactg

SEQ ID NO: 572805 - DNA, 33 bp, Homo sapien
aaatgaatagatcacaaggaaagcttcacatca

SEQ ID NO: 572806 - DNA, 33 bp, Homo sapien
aaatgaatagatcacagggaaagcttcacatca

SEQ ID NO: 572807 - DNA, 33 bp, Homo sapien
ttggtatttacaaaaaagagaaagcatctgtct

SEQ ID NO: 572808 - DNA, 33 bp, Homo sapien
ttggtatttacaaaaaggagaaagcatctgtct

SEQ ID NO: 572809 - DNA, 33 bp, Homo sapien
gaaggagatgatcatacattcaaacacctggct

SEQ ID NO: 572810 - DNA, 33 bp, Homo sapien
gaaggagatgatcatatattcaaacacctggct

SEQ ID NO: 572811 - DNA, 33 bp, Homo sapien
gagttctactgtggaacattcatcttcatgagg

SEQ ID NO: 572812 - DNA, 33 bp, Homo sapien
gagttctactgtggaatattcatcttcatgagg

SEQ ID NO: 572813 - DNA, 33 bp, Homo sapien
aaacacttttgtccaactctacttggtgcaaag

SEQ ID NO: 572814 - DNA, 33 bp, Homo sapien
aaacacttttgtccaattctacttggtgcaaag

SEQ ID NO: 572815 - DNA, 33 bp, Homo sapien
cacacttagtggcctacgtacagtaatagtgta

SEQ ID NO: 572816 - DNA, 33 bp, Homo sapien
cacacttagtggcctatgtacagtaatagtgta

SEQ ID NO: 572817 - DNA, 33 bp, Homo sapien
agaataacataaagccgggatgacagcatgtct

SEQ ID NO: 572818 - DNA, 33 bp, Homo sapien
agaataacataaagcctggatgacagcatgtct

SEQ ID NO: 572819 - DNA, 33 bp, Homo sapien; identical to SEQ ID NO: 572817

SEQ ID NO: 572820 - DNA, 33 bp, Homo sapien; identical to SEQ ID NO: 572818

SEQ ID NO: 572821 - DNA, 33 bp, Homo sapien
tgccctccaaaaggaccgtagtgacacacactc

SEQ ID NO: 572822 - DNA, 33 bp, Homo sapien
tgccctccaaaaggactgtagtgacacacactc

SEQ ID NO: 572823 - DNA, 33 bp, Homo sapien
aacagaagcaaatgtgaatgtatattcttattc

SEQ ID NO: 572824 - DNA, 33 bp, Homo sapien
aacagaagcaaatgtggatgtatattcttattc

SEQ ID NO: 572825 - DNA, 33 bp, Homo sapien
tccaggcttttacagacgggtcattttataaag

SEQ ID NO: 572826 - DNA, 33 bp, Homo sapien
tccaggcttttacagaggggtcattttataaag

SEQ ID NO: 572827 - DNA, 33 bp, Homo sapien
gcatctctaactggtaggctgacatggccattt

SEQ ID NO: 572828 - DNA, 33 bp, Homo sapien
gcatctctaactggtatgctgacatggccattt

SEQ ID NO: 572829 - DNA, 33 bp, Homo sapien
gcagaattgatacttacgcaaaatctcacctcc

SEQ ID NO: 572830 - DNA, 33 bp, Homo sapien
gcagaattgatacttatgcaaaatctcacctcc

SEQ ID NO: 572831 - DNA, 33 bp, Homo sapien
ctggtttggattctcaagtcaaaaaaacctgaa

SEQ ID NO: 572832 - DNA, 33 bp, Homo sapien
ctggtttggattctcacgtcaaaaaaacctgaa

SEQ ID NO: 572833 - DNA, 33 bp, Homo sapien
cacacttgcacattaaaagagaaataattaaac

SEQ ID NO: 572834 - DNA, 33 bp, Homo sapien
cacacttgcacattaagagagaaataattaaac

SEQ ID NO: 572835 - DNA, 33 bp, Homo sapien
tgccagtgtgataaccaaaaacgtctccacaca

SEQ ID NO: 572836 - DNA, 33 bp, Homo sapien
tgccagtgtgataaccgaaaacgtctccacaca

SEQ ID NO: 572837 - DNA, 33 bp, Homo sapien
ttgttgtttttaagtaagctggcgacatggcac

SEQ ID NO: 572838 - DNA, 33 bp, Homo sapien
ttgttgtttttaagtacgctggcgacatggcac

SEQ ID NO: 572839 - DNA, 33 bp, Homo sapien
gggtttcagagataataagtgaaggtgcttggt

SEQ ID NO: 572840 - DNA, 33 bp, Homo sapien
gggtttcagagataatgagtgaaggtgcttggt

SEQ ID NO: 572841 - DNA, 33 bp, Homo sapien
ccgtctagactggtgcacaacctcctccctctc

SEQ ID NO: 572842 - DNA, 33 bp, Homo sapien
ccgtctagactggtgcgcaacctcctccctctc

SEQ ID NO: 572843 - DNA, 33 bp, Homo sapien
cttcctctcttggaaactgggcaccatgatagc

SEQ ID NO: 572844 - DNA, 33 bp, Homo sapien
cttcctctcttggaaattgggcaccatgatagc

SEQ ID NO: 572845 - DNA, 33 bp, Homo sapien
attatattaatataacaaactattgcaacataa

SEQ ID NO: 572846 - DNA, 33 bp, Homo sapien
attatattaatataacgaactattgcaacataa

SEQ ID NO: 572847 - DNA, 33 bp, Homo sapien
tcatcattcagagaaacacactgtggtcaccag

SEQ ID NO: 572848 - DNA, 33 bp, Homo sapien
tcatcattcagagaaatacactgtggtcaccag

SEQ ID NO: 572849 - DNA, 33 bp, Homo sapien
agtgtttcccaaaaggacaatcaacctgttctt

SEQ ID NO: 572850 - DNA, 33 bp, Homo sapien
agtgtttcccaaaagggcaatcaacctgttctt

SEQ ID NO: 572851 - DNA, 33 bp, Homo sapien
ctcctaccttccataacgggtttgctcatccat

SEQ ID NO: 572852 - DNA, 33 bp, Homo sapien
ctcctaccttccataatgggtttgctcatccat

SEQ ID NO: 572853 - DNA, 33 bp, Homo sapien
aatggggaggcaactacgaaatcaacagtggga

SEQ ID NO: 572854 - DNA, 33 bp, Homo sapien
aatggggaggcaactatgaaatcaacagtggga

SEQ ID NO: 572855 - DNA, 33 bp, Homo sapien
gttgaatcctctcaacaacactatggagcgggt

SEQ ID NO: 572856 - DNA, 33 bp, Homo sapien
gttgaatcctctcaacgacactatggagcgggt

SEQ ID NO: 572857 - DNA, 33 bp, Homo sapien
taccactcttgtcagacacttggagatcagtgt

SEQ ID NO: 572858 - DNA, 33 bp, Homo sapien
taccactcttgtcagagacttggagatcagtgt

SEQ ID NO: 572859 - DNA, 33 bp, Homo sapien
actacatttatggagcgatcatctcaagcttga

SEQ ID NO: 572860 - DNA, 33 bp, Homo sapien
actacatttatggagctatcatctcaagcttga

SEQ ID NO: 572861 - DNA, 33 bp, Homo sapien
gcataccaacctaacacctacataaaagtatca

SEQ ID NO: 572862 - DNA, 33 bp, Homo sapien
gcataccaacctaacagctacataaaagtatca

SEQ ID NO: 572863 - DNA, 33 bp, Homo sapien
acgacctccgccttctcaatttcaaggaagcgc

SEQ ID NO: 572864 - DNA, 33 bp, Homo sapien
acgacctccgccttctgaatttcaaggaagcgc

SEQ ID NO: 572865 - DNA, 33 bp, Homo sapien
ccatccaacttccaaacggcagcaagtgcaatg

SEQ ID NO: 572866 - DNA, 33 bp, Homo sapien
ccatccaacttccaaatggcagcaagtgcaatg

SEQ ID NO: 572867 - DNA, 33 bp, Homo sapien
cttgaagttcagatgacgaaaattacctgtata

SEQ ID NO: 572868 - DNA, 33 bp, Homo sapien
cttgaagttcagatgatgaaaattacctgtata

SEQ ID NO: 572869 - DNA, 33 bp, Homo sapien
ggtatgtaggaagcacacaataaatgcacctct

SEQ ID NO: 572870 - DNA, 33 bp, Homo sapien
ggtatgtaggaagcactcaataaatgcacctct

SEQ ID NO: 572871 - DNA, 33 bp, Homo sapien
gtcaggttcttatcacgggaaactgtacatgtc

SEQ ID NO: 572872 - DNA, 33 bp, Homo sapien
gtcaggttcttatcactggaaactgtacatgtc

SEQ ID NO: 572873 - DNA, 33 bp, Homo sapien
ttatcaccatggctccaaaatagctcttgatcc

SEQ ID NO: 572874 - DNA, 33 bp, Homo sapien
ttatcaccatggctccgaaatagctcttgatcc

SEQ ID NO: 572875 - DNA, 33 bp, Homo sapien
aaccttcatttgttggaaaccacccaacacaga

SEQ ID NO: 572876 - DNA, 33 bp, Homo sapien
aaccttcatttgttgggaaccacccaacacaga

SEQ ID NO: 572877 - DNA, 33 bp, Homo sapien
agagtttcagagagaaaagatgagccctggctg

SEQ ID NO: 572878 - DNA, 33 bp, Homo sapien
agagtttcagagagaagagatgagccctggctg

SEQ ID NO: 572879 - DNA, 33 bp, Homo sapien
catcctaccacgtaacagcaaagtctgattttc

SEQ ID NO: 572880 - DNA, 33 bp, Homo sapien
catcctaccacgtaacggcaaagtctgattttc

SEQ ID NO: 572881 - DNA, 33 bp, Homo sapien
cccgtgggatgacggcaagtggcgttttctaca

SEQ ID NO: 572882 - DNA, 33 bp, Homo sapien
cccgtgggatgacggcgagtggcgttttctaca

SEQ ID NO: 572883 - DNA, 33 bp, Homo sapien
tgtgcaccaggagccacgtgagctgcttcacat

SEQ ID NO: 572884 - DNA, 33 bp, Homo sapien
tgtgcaccaggagccatgtgagctgcttcacat

SEQ ID NO: 572885 - DNA, 33 bp, Homo sapien
cctgcttcttcttcaacgtctgcatagtattcc

SEQ ID NO: 572886 - DNA, 33 bp, Homo sapien
cctgcttcttcttcaatgtctgcatagtattcc

SEQ ID NO: 572887 - DNA, 33 bp, Homo sapien
aatattgacaaatgaaatgatattatggggttt

SEQ ID NO: 572888 - DNA, 33 bp, Homo sapien
aatattgacaaatgaagtgatattatggggttt

SEQ ID NO: 572889 - DNA, 33 bp, Homo sapien
gcccagattcctttcaacttgtttcctcatcct

SEQ ID NO: 572890 - DNA, 33 bp, Homo sapien
gcccagattcctttcatcttgtttcctcatcct

SEQ ID NO: 572891 - DNA, 33 bp, Homo sapien
tgttaggtgatccccaatattctttctcttctc

SEQ ID NO: 572892 - DNA, 33 bp, Homo sapien
tgttaggtgatccccagtattctttctcttctc

SEQ ID NO: 572893 - DNA, 33 bp, Homo sapien
cacagtttgagtacaccgtggtagagattgtta

SEQ ID NO: 572894 - DNA, 33 bp, Homo sapien
cacagtttgagtacactgtggtagagattgtta

SEQ ID NO: 572895 - DNA, 33 bp, Homo sapien
tctgtcctctgcatctaacagacagggccacca

SEQ ID NO: 572896 - DNA, 33 bp, Homo sapien
tctgtcctctgcatctgacagacagggccacca

SEQ ID NO: 572897 - DNA, 33 bp, Homo sapien
gaattgatggaaaccacaaaacaatggaatttc

SEQ ID NO: 572898 - DNA, 33 bp, Homo sapien
gaattgatggaaaccagaaaacaatggaatttc

SEQ ID NO: 572899 - DNA, 33 bp, Homo sapien
ctttctttctcatgggacaggtggtgagctcca

SEQ ID NO: 572900 - DNA, 33 bp, Homo sapien
ctttctttctcatggggcaggtggtgagctcca

SEQ ID NO: 572901 - DNA, 33 bp, Homo sapien
tccaatatgaatccatcacggcaagttcaaggg

SEQ ID NO: 572902 - DNA, 33 bp, Homo sapien
tccaatatgaatccattacggcaagttcaaggg

SEQ ID NO: 572903 - DNA, 33 bp, Homo sapien
attctgaagcagccacaatctcattcctcgtaa

SEQ ID NO: 572904 - DNA, 33 bp, Homo sapien
attctgaagcagccacgatctcattcctcgtaa

SEQ ID NO: 572905 - DNA, 33 bp, Homo sapien
tcaacatttacctgtacgcttaacccagttgtg

SEQ ID NO: 572906 - DNA, 33 bp, Homo sapien
tcaacatttacctgtatgcttaacccagttgtg

SEQ ID NO: 572907 - DNA, 33 bp, Homo sapien
agcttccttatctccaacaccctgttctccttg

SEQ ID NO: 572908 - DNA, 33 bp, Homo sapien
agcttccttatctccatcaccctgttctccttg

SEQ ID NO: 572909 - DNA, 33 bp, Homo sapien
tccatttagagtcttaaggtgctaaaaagaaga

SEQ ID NO: 572910 - DNA, 33 bp, Homo sapien
tccatttagagtcttatggtgctaaaaagaaga

SEQ ID NO: 572911 - DNA, 33 bp, Homo sapien
aagtaaaaacacacagcagaggagaagcataca

SEQ ID NO: 572912 - DNA, 33 bp, Homo sapien
aagtaaaaacacacagtagaggagaagcataca

SEQ ID NO: 572913 - DNA, 33 bp, Homo sapien
cttaactgtaagacaccctccaatctcacgggg

SEQ ID NO: 572914 - DNA, 33 bp, Homo sapien
cttaactgtaagacactctccaatctcacgggg

SEQ ID NO: 572915 - DNA, 33 bp, Homo sapien
ctgcaatgagaaaataacacgttaaaaccagcc

SEQ ID NO: 572916 - DNA, 33 bp, Homo sapien
ctgcaatgagaaaatagcacgttaaaaccagcc

SEQ ID NO: 572917 - DNA, 33 bp, Homo sapien
gtgtttcccaggtcatcatagattccattccat

SEQ ID NO: 572918 - DNA, 33 bp, Homo sapien
gtgtttcccaggtcatgatagattccattccat

SEQ ID NO: 572919 - DNA, 33 bp, Homo sapien
ctgctgtttccctttacataagctgctaaaaat

SEQ ID NO: 572920 - DNA, 33 bp, Homo sapien
ctgctgtttccctttatataagctgctaaaaat

SEQ ID NO: 572921 - DNA, 33 bp, Homo sapien
aaaaaagtacaatcacacatcagcccaccatct

SEQ ID NO: 572922 - DNA, 33 bp, Homo sapien
aaaaaagtacaatcactcatcagcccaccatct

SEQ ID NO: 572923 - DNA, 33 bp, Homo sapien
ggggacacagacgtgacagcagaagcagaggag

SEQ ID NO: 572924 - DNA, 33 bp, Homo sapien
ggggacacagacgtgagagcagaagcagaggag

SEQ ID NO: 572925 - DNA, 33 bp, Homo sapien
gagcacatgggtgtaacgaaactacccagggct

SEQ ID NO: 572926 - DNA, 33 bp, Homo sapien
gagcacatgggtgtaaggaaactacccagggct

SEQ ID NO: 572927 - DNA, 33 bp, Homo sapien
gacatcaccttctccacgtactaaatgtgtggg

SEQ ID NO: 572928 - DNA, 33 bp, Homo sapien
gacatcaccttctccatgtactaaatgtgtggg

SEQ ID NO: 572929 - DNA, 33 bp, Homo sapien
ttataacacttcttccaagtttcattcacccca

SEQ ID NO: 572930 - DNA, 33 bp, Homo sapien
ttataacacttcttccgagtttcattcacccca

SEQ ID NO: 572931 - DNA, 33 bp, Homo sapien
aaaacagccatagtcaatacgacaacgaatggg

SEQ ID NO: 572932 - DNA, 33 bp, Homo sapien
aaaacagccatagtcagtacgacaacgaatggg

SEQ ID NO: 572933 - DNA, 33 bp, Homo sapien
aactagactcatgcaccgcctgtatcctccctg

SEQ ID NO: 572934 - DNA, 33 bp, Homo sapien
aactagactcatgcactgcctgtatcctccctg

SEQ ID NO: 572935 - DNA, 33 bp, Homo sapien
gtaacaaacatccccaatatcccactggcttga

SEQ ID NO: 572936 - DNA, 33 bp, Homo sapien
gtaacaaacatccccagtatcccactggcttga

SEQ ID NO: 572937 - DNA, 33 bp, Homo sapien
atcttgttaaaaagaaatatttgcagggattag

SEQ ID NO: 572938 - DNA, 33 bp, Homo sapien
atcttgttaaaaagaagtatttgcagggattag

SEQ ID NO: 572939 - DNA, 33 bp, Homo sapien
ccagggttctggtgcacacgggcattatggtcc

SEQ ID NO: 572940 - DNA, 33 bp, Homo sapien
ccagggttctggtgcatacgggcattatggtcc

SEQ ID NO: 572941 - DNA, 33 bp, Homo sapien
aaaacactattatcaaaaagcatgactttataa

SEQ ID NO: 572942 - DNA, 33 bp, Homo sapien
aaaacactattatcaagaagcatgactttataa

SEQ ID NO: 572943 - DNA, 33 bp, Homo sapien
atttatgacctggcctaactttgcactttttcc

SEQ ID NO: 572944 - DNA, 33 bp, Homo sapien
atttatgacctggcctgactttgcactttttcc

SEQ ID NO: 572945 - DNA, 33 bp, Homo sapien
tgtctactttgtccacagatgcatctctagtgc

SEQ ID NO: 572946 - DNA, 33 bp, Homo sapien
tgtctactttgtccacggatgcatctctagtgc

SEQ ID NO: 572947 - DNA, 33 bp, Homo sapien
attgtagggtgagaaacgctatgaatgaggaac

SEQ ID NO: 572948 - DNA, 33 bp, Homo sapien
attgtagggtgagaaatgctatgaatgaggaac

SEQ ID NO: 572949 - DNA, 33 bp, Homo sapien
gtggtcaggctgggtcgcactaagaagttggcg

SEQ ID NO: 572950 - DNA, 33 bp, Homo sapien
gtggtcaggctgggtctcactaagaagttggcg

SEQ ID NO: 572951 - DNA, 33 bp, Homo sapien
tcaaggtcatacaatcagagaacagcagaacct

SEQ ID NO: 572952 - DNA, 33 bp, Homo sapien
tcaaggtcatacaatcggagaacagcagaacct

SEQ ID NO: 572953 - DNA, 33 bp, Homo sapien
gtttagtattgttttccctctctagatgagtac

SEQ ID NO: 572954 - DNA, 33 bp, Homo sapien
gtttagtattgttttctctctctagatgagtac

SEQ ID NO: 572955 - DNA, 33 bp, Homo sapien
atcatgtacctaattacatcattgcaattgtgg

SEQ ID NO: 572956 - DNA, 33 bp, Homo sapien
atcatgtacctaattatatcattgcaattgtgg

SEQ ID NO: 572957 - DNA, 33 bp, Homo sapien
aggcagaacgtcttcaaggtaacaaatccatgg

SEQ ID NO: 572958 - DNA, 33 bp, Homo sapien
aggcagaacgtcttcacggtaacaaatccatgg

SEQ ID NO: 572959 - DNA, 33 bp, Homo sapien
tctgcgatgccagccacgtgcaccgtgcataca

SEQ ID NO: 572960 - DNA, 33 bp, Homo sapien
tctgcgatgccagccatgtgcaccgtgcataca

SEQ ID NO: 572961 - DNA, 33 bp, Homo sapien
tgttttcctttttggcagaggataagctaggat

SEQ ID NO: 572962 - DNA, 33 bp, Homo sapien
tgttttcctttttggcggaggataagctaggat

SEQ ID NO: 572963 - DNA, 33 bp, Homo sapien
tcctgatgatggagaaccggatgagccttcagc

SEQ ID NO: 572964 - DNA, 33 bp, Homo sapien
tcctgatgatggagaatcggatgagccttcagc

SEQ ID NO: 572965 - DNA, 33 bp, Homo sapien
atgcaggtaacaaatacgagttagttggaccaa

SEQ ID NO: 572966 - DNA, 33 bp, Homo sapien
atgcaggtaacaaatatgagttagttggaccaa

SEQ ID NO: 572967 - DNA, 33 bp, Homo sapien
ggcctgttcaactccacatcccattttacatgg

SEQ ID NO: 572968 - DNA, 33 bp, Homo sapien
ggcctgttcaactccagatcccattttacatgg

SEQ ID NO: 572969 - DNA, 33 bp, Homo sapien
ctaatcagccatgtgcccagcttagaaacagat

SEQ ID NO: 572970 - DNA, 33 bp, Homo sapien
ctaatcagccatgtgctcagcttagaaacagat

SEQ ID NO: 572971 - DNA, 33 bp, Homo sapien
cagccagaaggaagaaagaggtcagtgtttcac

SEQ ID NO: 572972 - DNA, 33 bp, Homo sapien
cagccagaaggaagaaggaggtcagtgtttcac

SEQ ID NO: 572973 - DNA, 33 bp, Homo sapien
tctcagtgtgtactagaatctcccagaaaggtt

SEQ ID NO: 572974 - DNA, 33 bp, Homo sapien
tctcagtgtgtactaggatctcccagaaaggtt

SEQ ID NO: 572975 - DNA, 33 bp, Homo sapien
cctgggtgcagctctcaaagaccaacaagttga

SEQ ID NO: 572976 - DNA, 33 bp, Homo sapien
cctgggtgcagctctcgaagaccaacaagttga

SEQ ID NO: 572977 - DNA, 33 bp, Homo sapien
gaagacagaagagacaatgggtgagcaaaaaca

SEQ ID NO: 572978 - DNA, 33 bp, Homo sapien
gaagacagaagagacactgggtgagcaaaaaca

SEQ ID NO: 572979 - DNA, 33 bp, Homo sapien
tagggatgttacataccaagttctgtgaccaca

SEQ ID NO: 572980 - DNA, 33 bp, Homo sapien
tagggatgttacatactaagttctgtgaccaca

SEQ ID NO: 572981 - DNA, 33 bp, Homo sapien
tctactgacattctaacgtattgctgccatgtt

SEQ ID NO: 572982 - DNA, 33 bp, Homo sapien
tctactgacattctaatgtattgctgccatgtt

SEQ ID NO: 572983 - DNA, 33 bp, Homo sapien
cagtacctggccaataatactacacttgcataa

SEQ ID NO: 572984 - DNA, 33 bp, Homo sapien
cagtacctggccaatactactacacttgcataa

SEQ ID NO: 572985 - DNA, 33 bp, Homo sapien
actgtgctgggcccggaactggtttctgttgct

SEQ ID NO: 572986 - DNA, 33 bp, Homo sapien
actgtgctgggcccggtactggtttctgttgct

SEQ ID NO: 572987 - DNA, 33 bp, Homo sapien
caccaggtctctagcacggatcaaggctactgg

SEQ ID NO: 572988 - DNA, 33 bp, Homo sapien
caccaggtctctagcatggatcaaggctactgg

SEQ ID NO: 572989 - DNA, 33 bp, Homo sapien
cagaattccctggactaagaatggccccaggaa

SEQ ID NO: 572990 - DNA, 33 bp, Homo sapien
cagaattccctggactgagaatggccccaggaa

SEQ ID NO: 572991 - DNA, 33 bp, Homo sapien
ttatcctagtgtctccagcagatgaatttaatt

SEQ ID NO: 572992 - DNA, 33 bp, Homo sapien
ttatcctagtgtctccggcagatgaatttaatt

SEQ ID NO: 572993 - DNA, 33 bp, Homo sapien
gatacatttgcaaaaccattgctaagatccaca

SEQ ID NO: 572994 - DNA, 33 bp, Homo sapien
gatacatttgcaaaacgattgctaagatccaca

SEQ ID NO: 572995 - DNA, 33 bp, Homo sapien
actatatattaaagcccctcgttggccaatctg

SEQ ID NO: 572996 - DNA, 33 bp, Homo sapien
actatatattaaagcctctcgttggccaatctg

SEQ ID NO: 572997 - DNA, 33 bp, Homo sapien
taacaactcacatctcacccatgttcttgttgg

SEQ ID NO: 572998 - DNA, 33 bp, Homo sapien
taacaactcacatctcgcccatgttcttgttgg

SEQ ID NO: 572999 - DNA, 33 bp, Homo sapien
cagtccctgtgctccacgagctaagaggcagca

SEQ ID NO: 573000 - DNA, 33 bp, Homo sapien
cagtccctgtgctccatgagctaagaggcagca

SEQ ID NO: 573001 - DNA, 33 bp, Homo sapien
gctgtatttgccatcacacaagtgaaaactccc

SEQ ID NO: 573002 - DNA, 33 bp, Homo sapien
gctgtatttgccatcatacaagtgaaaactccc

SEQ ID NO: 573003 - DNA, 33 bp, Homo sapien
tgtaccaggtattttaccaatttcacttcttca

SEQ ID NO: 573004 - DNA, 33 bp, Homo sapien
tgtaccaggtattttatcaatttcacttcttca

SEQ ID NO: 573005 - DNA, 33 bp, Homo sapien
acacactttgtattcacccactgcaaaggtcat

SEQ ID NO: 573006 - DNA, 33 bp, Homo sapien
acacactttgtattcatccactgcaaaggtcat

SEQ ID NO: 573007 - DNA, 33 bp, Homo sapien
agcctattgggcagccaaacaactgcttcaaga

SEQ ID NO: 573008 - DNA, 33 bp, Homo sapien
agcctattgggcagccgaacaactgcttcaaga

SEQ ID NO: 573009 - DNA, 33 bp, Homo sapien
gaggcaagggactttcaatatctgagagcaagg

SEQ ID NO: 573010 - DNA, 33 bp, Homo sapien
gaggcaagggactttcgatatctgagagcaagg

SEQ ID NO: 573011 - DNA, 33 bp, Homo sapien
acggcccttgctctaacaagcttgaattctgac

SEQ ID NO: 573012 - DNA, 33 bp, Homo sapien
acggcccttgctctaagaagcttgaattctgac

SEQ ID NO: 573013 - DNA, 33 bp, Homo sapien
ctctttttaaaacaacaatcagagctgtgcttt

SEQ ID NO: 573014 - DNA, 33 bp, Homo sapien
ctctttttaaaacaactatcagagctgtgcttt

SEQ ID NO: 573015 - DNA, 33 bp, Homo sapien
attggggtataaggaccaggtgaagtgctagag

SEQ ID NO: 573016 - DNA, 33 bp, Homo sapien
attggggtataaggacgaggtgaagtgctagag

SEQ ID NO: 573017 - DNA, 33 bp, Homo sapien
tcctgatgaacactcacgttgtgaaaaacctgt

SEQ ID NO: 573018 - DNA, 33 bp, Homo sapien
tcctgatgaacactcatgttgtgaaaaacctgt

SEQ ID NO: 573019 - DNA, 33 bp, Homo sapien
tgctgtggtgggcagaaaaatggcaccccaaag

SEQ ID NO: 573020 - DNA, 33 bp, Homo sapien
tgctgtggtgggcagacaaatggcaccccaaag

SEQ ID NO: 573021 - DNA, 33 bp, Homo sapien
gtgttatggcagccacaggaaactatattacat

SEQ ID NO: 573022 - DNA, 33 bp, Homo sapien
gtgttatggcagccacgggaaactatattacat

SEQ ID NO: 573023 - DNA, 33 bp, Homo sapien
ttttggcctaagctgacgtgcattgaatttctg

SEQ ID NO: 573024 - DNA, 33 bp, Homo sapien
ttttggcctaagctgatgtgcattgaatttctg

SEQ ID NO: 573025 - DNA, 33 bp, Homo sapien
tgggagaggactcccgaaagattgtgcctggtc

SEQ ID NO: 573026 - DNA, 33 bp, Homo sapien
tgggagaggactcccggaagattgtgcctggtc

SEQ ID NO: 573027 - DNA, 33 bp, Homo sapien
aaatggctcttcccaagtaaagaccaccagata

SEQ ID NO: 573028 - DNA, 33 bp, Homo sapien
aaatggctcttcccaattaaagaccaccagata

SEQ ID NO: 573029 - DNA, 33 bp, Homo sapien
gagcaatggagaataaataccattggcttcaag

SEQ ID NO: 573030 - DNA, 33 bp, Homo sapien
gagcaatggagaataagtaccattggcttcaag

SEQ ID NO: 573031 - DNA, 33 bp, Homo sapien
ctgccaggcctccccaatctcttcttctcacag

SEQ ID NO: 573032 - DNA, 33 bp, Homo sapien
ctgccaggcctccccattctcttcttctcacag

SEQ ID NO: 573033 - DNA, 33 bp, Homo sapien
tgtcgcacaagtgaacagctctgtgcctcagtt

SEQ ID NO: 573034 - DNA, 33 bp, Homo sapien
tgtcgcacaagtgaaccgctctgtgcctcagtt

SEQ ID NO: 573035 - DNA, 33 bp, Homo sapien
ggagaaacaaggtaaccctaaagatctttggca

SEQ ID NO: 573036 - DNA, 33 bp, Homo sapien
ggagaaacaaggtaacgctaaagatctttggca

SEQ ID NO: 573037 - DNA, 33 bp, Homo sapien
ccagctgtcaccagctcaatcagaacaggtttt

SEQ ID NO: 573038 - DNA, 33 bp, Homo sapien
ccagctgtcaccagcttaatcagaacaggtttt

SEQ ID NO: 573039 - DNA, 33 bp, Homo sapien
gcacttaacacccagaccgacataccattatag

SEQ ID NO: 573040 - DNA, 33 bp, Homo sapien
gcacttaacacccagatcgacataccattatag

SEQ ID NO: 573041 - DNA, 33 bp, Homo sapien
ggaaactaggagaaaacgaggcagagaggagtg

SEQ ID NO: 573042 - DNA, 33 bp, Homo sapien
ggaaactaggagaaaatgaggcagagaggagtg

SEQ ID NO: 573043 - DNA, 33 bp, Homo sapien
ctggcctggagacatacctacttagctcattgc

SEQ ID NO: 573044 - DNA, 33 bp, Homo sapien
ctggcctggagacatatctacttagctcattgc

SEQ ID NO: 573045 - DNA, 33 bp, Homo sapien
aaagaaaggaaattcgaaatactgagcagtaaa

SEQ ID NO: 573046 - DNA, 33 bp, Homo sapien
aaagaaaggaaattcgtaatactgagcagtaaa

SEQ ID NO: 573047 - DNA, 33 bp, Homo sapien
ctagtctggatttggacactcaaggttagaggt

SEQ ID NO: 573048 - DNA, 33 bp, Homo sapien
ctagtctggatttggatactcaaggttagaggt

SEQ ID NO: 573049 - DNA, 33 bp, Homo sapien
ggctggaggcaggcacaccttgtccttataagc

SEQ ID NO: 573050 - DNA, 33 bp, Homo sapien
ggctggaggcaggcactccttgtccttataagc

SEQ ID NO: 573051 - DNA, 33 bp, Homo sapien
aattaccacaattcaacggctttaggctcatca

SEQ ID NO: 573052 - DNA, 33 bp, Homo sapien
aattaccacaattcaatggctttaggctcatca

SEQ ID NO: 573053 - DNA, 33 bp, Homo sapien
cttctcacctgatggaataaataaaccccagat

SEQ ID NO: 573054 - DNA, 33 bp, Homo sapien
cttctcacctgatggagtaaataaaccccagat

SEQ ID NO: 573055 - DNA, 33 bp, Homo sapien
cctccgaggaagggaaactcattgggatggatg

SEQ ID NO: 573056 - DNA, 33 bp, Homo sapien
cctccgaggaagggaagctcattgggatggatg

SEQ ID NO: 573057 - DNA, 33 bp, Homo sapien
caagatccttcaggccacaaatggcgcggggtg

SEQ ID NO: 573058 - DNA, 33 bp, Homo sapien
caagatccttcaggcctcaaatggcgcggggtg

SEQ ID NO: 573059 - DNA, 33 bp, Homo sapien
ctaggaggcaggggttaaaatcaggggccttag

SEQ ID NO: 573060 - DNA, 33 bp, Homo sapien
ctaggaggcaggggttgaaatcaggggccttag

SEQ ID NO: 573061 - DNA, 33 bp, Homo sapien
acacttgttccatatcactcatttacattaccc

SEQ ID NO: 573062 - DNA, 33 bp, Homo sapien
acacttgttccatatcgctcatttacattaccc

SEQ ID NO: 573063 - DNA, 33 bp, Homo sapien
tggggttaggtcagcaactcaagatgccagcca

SEQ ID NO: 573064 - DNA, 33 bp, Homo sapien
tggggttaggtcagcacctcaagatgccagcca

SEQ ID NO: 573065 - DNA, 33 bp, Homo sapien
agcccaggccaccggaaatctgagcggtgtaaa

SEQ ID NO: 573066 - DNA, 33 bp, Homo sapien
agcccaggccaccggacatctgagcggtgtaaa

SEQ ID NO: 573067 - DNA, 33 bp, Homo sapien
ggattcatcactcgtgaagaggtggagacaaat

SEQ ID NO: 573068 - DNA, 33 bp, Homo sapien
ggattcatcactcgtggagaggtggagacaaat

SEQ ID NO: 573069 - DNA, 33 bp, Homo sapien
caccagtatggccaaccatttctattcagagcc

SEQ ID NO: 573070 - DNA, 33 bp, Homo sapien
caccagtatggccaactatttctattcagagcc

SEQ ID NO: 573071 - DNA, 33 bp, Homo sapien
ctcctcttttggtcaactctaactgggaaccac

SEQ ID NO: 573072 - DNA, 33 bp, Homo sapien
ctcctcttttggtcaattctaactgggaaccac

SEQ ID NO: 573073 - DNA, 33 bp, Homo sapien
cctttatgaaaagagcaaggacgatctccatca

SEQ ID NO: 573074 - DNA, 33 bp, Homo sapien
cctttatgaaaagagcgaggacgatctccatca

SEQ ID NO: 573075 - DNA, 33 bp, Homo sapien
tcaaggaaggcacttggagatagatgaggatat

SEQ ID NO: 573076 - DNA, 33 bp, Homo sapien
tcaaggaaggcacttgtagatagatgaggatat

SEQ ID NO: 573077 - DNA, 33 bp, Homo sapien
tgcccagtgacgcttaagtgtgaattccacgcc

SEQ ID NO: 573078 - DNA, 33 bp, Homo sapien
tgcccagtgacgcttatgtgtgaattccacgcc

SEQ ID NO: 573079 - DNA, 33 bp, Homo sapien
ggtgtggctactccaccccttgcttctcctcct

SEQ ID NO: 573080 - DNA, 33 bp, Homo sapien
ggtgtggctactccacgccttgcttctcctcct

SEQ ID NO: 573081 - DNA, 33 bp, Homo sapien
ccctcaaagtcatttcaagaactaccactctaa

SEQ ID NO: 573082 - DNA, 33 bp, Homo sapien
ccctcaaagtcatttccagaactaccactctaa

SEQ ID NO: 573083 - DNA, 33 bp, Homo sapien
tgagcacttgctcggcaccaattgacatagatc

SEQ ID NO: 573084 - DNA, 33 bp, Homo sapien
tgagcacttgctcggcgccaattgacatagatc

SEQ ID NO: 573085 - DNA, 33 bp, Homo sapien
gtcaacacaaattatgccaattccaaaacaaag

SEQ ID NO: 573086 - DNA, 33 bp, Homo sapien
gtcaacacaaattatgtcaattccaaaacaaag

SEQ ID NO: 573087 - DNA, 33 bp, Homo sapien
ctcagcttcccaagtaaccagaactgcaggtgt

SEQ ID NO: 573088 - DNA, 33 bp, Homo sapien
ctcagcttcccaagtagccagaactgcaggtgt

SEQ ID NO: 573089 - DNA, 33 bp, Homo sapien
ttaaaatattggaaaacgtggcagtgttgggtc

SEQ ID NO: 573090 - DNA, 33 bp, Homo sapien
ttaaaatattggaaaatgtggcagtgttgggtc

SEQ ID NO: 573091 - DNA, 33 bp, Homo sapien
taatctactaaggctacggaacagtgtgatcca

SEQ ID NO: 573092 - DNA, 33 bp, Homo sapien
taatctactaaggctatggaacagtgtgatcca

SEQ ID NO: 573093 - DNA, 33 bp, Homo sapien
gtggctgtaacatgacacagtcagctccgggct

SEQ ID NO: 573094 - DNA, 33 bp, Homo sapien
gtggctgtaacatgacgcagtcagctccgggct

SEQ ID NO: 573095 - DNA, 33 bp, Homo sapien
ctattttttgtcttgcaaagtatagctattttt

SEQ ID NO: 573096 - DNA, 33 bp, Homo sapien
ctattttttgtcttgccaagtatagctattttt

SEQ ID NO: 573097 - DNA, 33 bp, Homo sapien
ccaaactggtaattgccatagaagagtgggctt

SEQ ID NO: 573098 - DNA, 33 bp, Homo sapien
ccaaactggtaattgcgatagaagagtgggctt

SEQ ID NO: 573099 - DNA, 33 bp, Homo sapien
atgagctatcagaaaaagggcagaataatacaa

SEQ ID NO: 573100 - DNA, 33 bp, Homo sapien
atgagctatcagaaaacgggcagaataatacaa

SEQ ID NO: 573101 - DNA, 33 bp, Homo sapien
gacacaaaaatcctagcagctggtgcccctcgc

SEQ ID NO: 573102 - DNA, 33 bp, Homo sapien
gacacaaaaatcctagtagctggtgcccctcgc

SEQ ID NO: 573103 - DNA, 33 bp, Homo sapien
tctgaagcacaagcaaagttattctctacattc

SEQ ID NO: 573104 - DNA, 33 bp, Homo sapien
tctgaagcacaagcaaggttattctctacattc

SEQ ID NO: 573105 - DNA, 33 bp, Homo sapien
tttgcttctctactgacgaacaggatctgatca

SEQ ID NO: 573106 - DNA, 33 bp, Homo sapien
tttgcttctctactgatgaacaggatctgatca

SEQ ID NO: 573107 - DNA, 33 bp, Homo sapien
atagcacaagaccctcactagaagctcaatttt

SEQ ID NO: 573108 - DNA, 33 bp, Homo sapien
atagcacaagaccctcgctagaagctcaatttt

SEQ ID NO: 573109 - DNA, 33 bp, Homo sapien
ttgggacaaagtcacgacataaatttgagtggg

SEQ ID NO: 573110 - DNA, 33 bp, Homo sapien
ttgggacaaagtcacggcataaatttgagtggg

SEQ ID NO: 573111 - DNA, 33 bp, Homo sapien
tcagtatttccacaaactccatctcttttatca

SEQ ID NO: 573112 - DNA, 33 bp, Homo sapien
tcagtatttccacaaattccatctcttttatca

SEQ ID NO: 573113 - DNA, 33 bp, Homo sapien
agaagcaggtgaattaaagctatccagtcatga

SEQ ID NO: 573114 - DNA, 33 bp, Homo sapien
agaagcaggtgaattagagctatccagtcatga

SEQ ID NO: 573115 - DNA, 33 bp, Homo sapien
tttaaaaatcattccccaaggcctttctctttc

SEQ ID NO: 573116 - DNA, 33 bp, Homo sapien
tttaaaaatcattccctaaggcctttctctttc

SEQ ID NO: 573117 - DNA, 33 bp, Homo sapien
acaaggcctgaactgccattgtttgcttcaaac

SEQ ID NO: 573118 - DNA, 33 bp, Homo sapien
acaaggcctgaactgcgattgtttgcttcaaac

SEQ ID NO: 573119 - DNA, 33 bp, Homo sapien
atgctattatctgaaactacgcctttgcttgct

SEQ ID NO: 573120 - DNA, 33 bp, Homo sapien
atgctattatctgaaagtacgcctttgcttgct

SEQ ID NO: 573121 - DNA, 33 bp, Homo sapien
tgtacaagattttgcacggacatatgttttcaa

SEQ ID NO: 573122 - DNA, 33 bp, Homo sapien
tgtacaagattttgcatggacatatgttttcaa

SEQ ID NO: 573123 - DNA, 33 bp, Homo sapien
agtgatttactatgcaacaatggattattgaaa

SEQ ID NO: 573124 - DNA, 33 bp, Homo sapien
agtgatttactatgcagcaatggattattgaaa

SEQ ID NO: 573125 - DNA, 33 bp, Homo sapien
agtgccctgtagaggacgaaagggagagaagca

SEQ ID NO: 573126 - DNA, 33 bp, Homo sapien
agtgccctgtagaggatgaaagggagagaagca

SEQ ID NO: 573127 - DNA, 33 bp, Homo sapien
tgttattaagcctgtacggtaaagaaacaggaa

SEQ ID NO: 573128 - DNA, 33 bp, Homo sapien
tgttattaagcctgtagggtaaagaaacaggaa

SEQ ID NO: 573129 - DNA, 33 bp, Homo sapien
attttaaaaactggccaagagagattgatttgt

SEQ ID NO: 573130 - DNA, 33 bp, Homo sapien
attttaaaaactggcctagagagattgatttgt

SEQ ID NO: 573131 - DNA, 33 bp, Homo sapien
aaagacacaccttctacacaaaacttaaaaaca

SEQ ID NO: 573132 - DNA, 33 bp, Homo sapien
aaagacacaccttctatacaaaacttaaaaaca

SEQ ID NO: 573133 - DNA, 33 bp, Homo sapien
gcctcaagacttagaacagtggtatgaaaacta

SEQ ID NO: 573134 - DNA, 33 bp, Homo sapien
gcctcaagacttagaagagtggtatgaaaacta

SEQ ID NO: 573135 - DNA, 33 bp, Homo sapien
tattaattttcatttcaaccaccatctttctaa

SEQ ID NO: 573136 - DNA, 33 bp, Homo sapien
tattaattttcatttcgaccaccatctttctaa

SEQ ID NO: 573137 - DNA, 33 bp, Homo sapien
aatttaaaggcaaacaaggtgttattatccaac

SEQ ID NO: 573138 - DNA, 33 bp, Homo sapien
aatttaaaggcaaacatggtgttattatccaac

SEQ ID NO: 573139 - DNA, 33 bp, Homo sapien
gtttaaggttataggaaaatggagaggagggta

SEQ ID NO: 573140 - DNA, 33 bp, Homo sapien
gtttaaggttataggagaatggagaggagggta

SEQ ID NO: 573141 - DNA, 33 bp, Homo sapien
tggtattttgaatgtaaaacggcctaggaatgt

SEQ ID NO: 573142 - DNA, 33 bp, Homo sapien
tggtattttgaatgtagaacggcctaggaatgt

SEQ ID NO: 573143 - DNA, 33 bp, Homo sapien
tcaaatctgcctctctgaactagagtttgggtg

SEQ ID NO: 573144 - DNA, 33 bp, Homo sapien
tcaaatctgcctctcttaactagagtttgggtg

SEQ ID NO: 573145 - DNA, 33 bp, Homo sapien
attcgtgtaagatgaacggagaaaaggtaggca

SEQ ID NO: 573146 - DNA, 33 bp, Homo sapien
attcgtgtaagatgaagggagaaaaggtaggca

SEQ ID NO: 573147 - DNA, 33 bp, Homo sapien
atgaagaacatctccactgaacagagtaaaggg

SEQ ID NO: 573148 - DNA, 33 bp, Homo sapien
atgaagaacatctccattgaacagagtaaaggg

SEQ ID NO: 573149 - DNA, 33 bp, Homo sapien
gaactggtcattatgaagaaaatgatgccaaga

SEQ ID NO: 573150 - DNA, 33 bp, Homo sapien
gaactggtcattatgaggaaaatgatgccaaga

SEQ ID NO: 573151 - DNA, 33 bp, Homo sapien
tttaacatttacttctcaatactgtcttttcct

SEQ ID NO: 573152 - DNA, 33 bp, Homo sapien
tttaacatttacttctgaatactgtcttttcct

SEQ ID NO: 573153 - DNA, 33 bp, Homo sapien
cagagcatggtgctgaaatgaggaggttggtta

SEQ ID NO: 573154 - DNA, 33 bp, Homo sapien
cagagcatggtgctgacatgaggaggttggtta

SEQ ID NO: 573155 - DNA, 33 bp, Homo sapien
cttagacttatgtgcccacagaggaaaaataca

SEQ ID NO: 573156 - DNA, 33 bp, Homo sapien
cttagacttatgtgcctacagaggaaaaataca

SEQ ID NO: 573157 - DNA, 33 bp, Homo sapien
ttaggtgctctcatccactggtgataatgatca

SEQ ID NO: 573158 - DNA, 33 bp, Homo sapien
ttaggtgctctcatccgctggtgataatgatca

SEQ ID NO: 573159 - DNA, 33 bp, Homo sapien
aaattttgtagtttaactattgtcatacagtgt

SEQ ID NO: 573160 - DNA, 33 bp, Homo sapien
aaattttgtagtttaagtattgtcatacagtgt

SEQ ID NO: 573161 - DNA, 33 bp, Homo sapien
gcatcatgggattgtgacaaaaaagcataagat

SEQ ID NO: 573162 - DNA, 33 bp, Homo sapien
gcatcatgggattgtgccaaaaaagcataagat

SEQ ID NO: 573163 - DNA, 33 bp, Homo sapien
gtgtttgttgaatgcacgagtggacaaaaggga

SEQ ID NO: 573164 - DNA, 33 bp, Homo sapien
gtgtttgttgaatgcatgagtggacaaaaggga

SEQ ID NO: 573165 - DNA, 33 bp, Homo sapien
cagcaactcccccggcactagacgagctctatc

SEQ ID NO: 573166 - DNA, 33 bp, Homo sapien
cagcaactcccccggcgctagacgagctctatc

SEQ ID NO: 573167 - DNA, 33 bp, Homo sapien
cgtgcagttagcaccaactcctaccatcactgc

SEQ ID NO: 573168 - DNA, 33 bp, Homo sapien
cgtgcagttagcaccatctcctaccatcactgc

SEQ ID NO: 573169 - DNA, 33 bp, Homo sapien
gaaacttcaaaccatccctgtgaacagaaagaa

SEQ ID NO: 573170 - DNA, 33 bp, Homo sapien
gaaacttcaaaccatctctgtgaacagaaagaa

SEQ ID NO: 573171 - DNA, 33 bp, Homo sapien
aaggattatcatcatacgtactttctatagtta

SEQ ID NO: 573172 - DNA, 33 bp, Homo sapien
aaggattatcatcatatgtactttctatagtta

SEQ ID NO: 573173 - DNA, 33 bp, Homo sapien
taaaacagagagatgtaacaaagagtaactggg

SEQ ID NO: 573174 - DNA, 33 bp, Homo sapien
taaaacagagagatgtgacaaagagtaactggg

SEQ ID NO: 573175 - DNA, 33 bp, Homo sapien
ttgaagttgtttgtgaacagaaatttaactccc

SEQ ID NO: 573176 - DNA, 33 bp, Homo sapien
ttgaagttgtttgtgagcagaaatttaactccc

SEQ ID NO: 573177 - DNA, 33 bp, Homo sapien
tcccactgactccaaaagtgaaactcaccgtac

SEQ ID NO: 573178 - DNA, 33 bp, Homo sapien
tcccactgactccaaatgtgaaactcaccgtac

SEQ ID NO: 573179 - DNA, 33 bp, Homo sapien
gctttcacactataacagcagacttctgcagtg

SEQ ID NO: 573180 - DNA, 33 bp, Homo sapien
gctttcacactataacggcagacttctgcagtg

SEQ ID NO: 573181 - DNA, 33 bp, Homo sapien
aaaacagaaaaaactacgactgaggatcaacca

SEQ ID NO: 573182 - DNA, 33 bp, Homo sapien
aaaacagaaaaaactatgactgaggatcaacca

SEQ ID NO: 573183 - DNA, 33 bp, Homo sapien
acctcattggcctggacatttgggagccatgca

SEQ ID NO: 573184 - DNA, 33 bp, Homo sapien
acctcattggcctggagatttgggagccatgca

SEQ ID NO: 573185 - DNA, 33 bp, Homo sapien
tctaatcacgtgcttacaggctctggagcggaa

SEQ ID NO: 573186 - DNA, 33 bp, Homo sapien
tctaatcacgtgcttagaggctctggagcggaa

SEQ ID NO: 573187 - DNA, 33 bp, Homo sapien
gcacagagaggcaaagaccccttttcaccgaac

SEQ ID NO: 573188 - DNA, 33 bp, Homo sapien
gcacagagaggcaaagtccccttttcaccgaac

SEQ ID NO: 573189 - DNA, 33 bp, Homo sapien
tgcctcggactggcctcaattctaggacagaag

SEQ ID NO: 573190 - DNA, 33 bp, Homo sapien
tgcctcggactggccttaattctaggacagaag

SEQ ID NO: 573191 - DNA, 33 bp, Homo sapien
tgtgcattatccagtacagaacccatgtgcgcc

SEQ ID NO: 573192 - DNA, 33 bp, Homo sapien
tgtgcattatccagtatagaacccatgtgcgcc

SEQ ID NO: 573193 - DNA, 33 bp, Homo sapien
agtggagattgacaaaagacaaaatgagagaag

SEQ ID NO: 573194 - DNA, 33 bp, Homo sapien
agtggagattgacaaaggacaaaatgagagaag

SEQ ID NO: 573195 - DNA, 33 bp, Homo sapien
aagcaagtgaattgacaaagtgtagggaggaat

SEQ ID NO: 573196 - DNA, 33 bp, Homo sapien
aagcaagtgaattgacgaagtgtagggaggaat

SEQ ID NO: 573197 - DNA, 33 bp, Homo sapien
caccactgcggtacccaagttgattctggatag

SEQ ID NO: 573198 - DNA, 33 bp, Homo sapien
caccactgcggtacccgagttgattctggatag

SEQ ID NO: 573199 - DNA, 33 bp, Homo sapien
atgccacagggaacacactgagtaggaggaggg

SEQ ID NO: 573200 - DNA, 33 bp, Homo sapien
atgccacagggaacacgctgagtaggaggaggg

SEQ ID NO: 573201 - DNA, 33 bp, Homo sapien
accttgatccagtcaacgggacctggttggtgg

SEQ ID NO: 573202 - DNA, 33 bp, Homo sapien
accttgatccagtcaatgggacctggttggtgg

SEQ ID NO: 573203 - DNA, 33 bp, Homo sapien
caggtcggcttcccaacgtggcttgctgtgcaa

SEQ ID NO: 573204 - DNA, 33 bp, Homo sapien
caggtcggcttcccaatgtggcttgctgtgcaa

SEQ ID NO: 573205 - DNA, 33 bp, Homo sapien
aggaacttcttggaaacgtcagagaggtgagca

SEQ ID NO: 573206 - DNA, 33 bp, Homo sapien
aggaacttcttggaaatgtcagagaggtgagca

SEQ ID NO: 573207 - DNA, 33 bp, Homo sapien
ttctcttgcaagcaacagaaaaagagaagaaaa

SEQ ID NO: 573208 - DNA, 33 bp, Homo sapien
ttctcttgcaagcaacggaaaaagagaagaaaa

SEQ ID NO: 573209 - DNA, 33 bp, Homo sapien
ccagtgggatttcaacccttttgatgctgtccc

SEQ ID NO: 573210 - DNA, 33 bp, Homo sapien
ccagtgggatttcaacgcttttgatgctgtccc

SEQ ID NO: 573211 - DNA, 33 bp, Homo sapien
ccagctaggatggtcaagatcataccaagagat

SEQ ID NO: 573212 - DNA, 33 bp, Homo sapien
ccagctaggatggtcaggatcataccaagagat

SEQ ID NO: 573213 - DNA, 33 bp, Homo sapien
gggagatagaaccggacggctgttctgcacaaa

SEQ ID NO: 573214 - DNA, 33 bp, Homo sapien
gggagatagaaccggatggctgttctgcacaaa

SEQ ID NO: 573215 - DNA, 33 bp, Homo sapien
gtcaagatgtctgttggataaatgagaccggaa

SEQ ID NO: 573216 - DNA, 33 bp, Homo sapien
gtcaagatgtctgttgtataaatgagaccggaa

SEQ ID NO: 573217 - DNA, 33 bp, Homo sapien
gggatgttcatcgcagaaaggaaattactgagt

SEQ ID NO: 573218 - DNA, 33 bp, Homo sapien
gggatgttcatcgcaggaaggaaattactgagt

SEQ ID NO: 573219 - DNA, 33 bp, Homo sapien
ctgcgacctttctcaccgcaccaacccactgca

SEQ ID NO: 573220 - DNA, 33 bp, Homo sapien
ctgcgacctttctcactgcaccaacccactgca

SEQ ID NO: 573221 - DNA, 33 bp, Homo sapien
ggcatgaaaatattcgccaattataggagagtt

SEQ ID NO: 573222 - DNA, 33 bp, Homo sapien
ggcatgaaaatattcgtcaattataggagagtt

SEQ ID NO: 573223 - DNA, 33 bp, Homo sapien
ctgcattttgtgttcaccgcctggccctggtgg

SEQ ID NO: 573224 - DNA, 33 bp, Homo sapien
ctgcattttgtgttcatcgcctggccctggtgg

SEQ ID NO: 573225 - DNA, 33 bp, Homo sapien
tcaggatctgcttcaacggtacctgacataaaa

SEQ ID NO: 573226 - DNA, 33 bp, Homo sapien
tcaggatctgcttcaatggtacctgacataaaa

SEQ ID NO: 573227 - DNA, 33 bp, Homo sapien
tcgctcagagcaattgcagaggatggcaaggaa

SEQ ID NO: 573228 - DNA, 33 bp, Homo sapien
tcgctcagagcaattgtagaggatggcaaggaa

SEQ ID NO: 573229 - DNA, 33 bp, Homo sapien
ctatggtataattccacagggtatagccatagg

SEQ ID NO: 573230 - DNA, 33 bp, Homo sapien
ctatggtataattccatagggtatagccatagg

SEQ ID NO: 573231 - DNA, 33 bp, Homo sapien
aatcatgctgtttttagcactggtataagcaga

SEQ ID NO: 573232 - DNA, 33 bp, Homo sapien
aatcatgctgtttttatcactggtataagcaga

SEQ ID NO: 573233 - DNA, 33 bp, Homo sapien
aaacagcatgatttcccccaactcagctgcacc

SEQ ID NO: 573234 - DNA, 33 bp, Homo sapien
aaacagcatgatttcctccaactcagctgcacc

SEQ ID NO: 573235 - DNA, 33 bp, Homo sapien
aggtctccagcttcacaatccttaaactagaac

SEQ ID NO: 573236 - DNA, 33 bp, Homo sapien
aggtctccagcttcacgatccttaaactagaac

SEQ ID NO: 573237 - DNA, 33 bp, Homo sapien
tttaatgaatggcagcgccggctcctcccgctt

SEQ ID NO: 573238 - DNA, 33 bp, Homo sapien
tttaatgaatggcagctccggctcctcccgctt

SEQ ID NO: 573239 - DNA, 33 bp, Homo sapien
gctccagcgacgtctcaatggggataaggtaag

SEQ ID NO: 573240 - DNA, 33 bp, Homo sapien
gctccagcgacgtctcgatggggataaggtaag

SEQ ID NO: 573241 - DNA, 33 bp, Homo sapien; identical to SEQ ID NO: 573239

SEQ ID NO: 573242 - DNA, 33 bp, Homo sapien; identical to SEQ ID NO: 573240

SEQ ID NO: 573243 - DNA, 33 bp, Homo sapien
gtagactgattatttgcagtcgcttttagcaaa

SEQ ID NO: 573244 - DNA, 33 bp, Homo sapien
gtagactgattatttgtagtcgcttttagcaaa

SEQ ID NO: 573245 - DNA, 33 bp, Homo sapien
tgagccaacattcaagactcaaattattttaca

SEQ ID NO: 573246 - DNA, 33 bp, Homo sapien
tgagccaacattcaagtctcaaattattttaca

SEQ ID NO: 573247 - DNA, 33 bp, Homo sapien
tctgatcctgaaactcactgactcacttctggg

SEQ ID NO: 573248 - DNA, 33 bp, Homo sapien
tctgatcctgaaactcgctgactcacttctggg

SEQ ID NO: 573249 - DNA, 33 bp, Homo sapien
aattctgcctacaacactggctctcaatacatt

SEQ ID NO: 573250 - DNA, 33 bp, Homo sapien
aattctgcctacaacattggctctcaatacatt

SEQ ID NO: 573251 - DNA, 33 bp, Homo sapien
gatgaaaaccagtgccaaatggaaatgcaaatc

SEQ ID NO: 573252 - DNA, 33 bp, Homo sapien
gatgaaaaccagtgccgaatggaaatgcaaatc

SEQ ID NO: 573253 - DNA, 33 bp, Homo sapien
tgtgttttggagagtacatgatttaatacacat

SEQ ID NO: 573254 - DNA, 33 bp, Homo sapien
tgtgttttggagagtatatgatttaatacacat

SEQ ID NO: 573255 - DNA, 33 bp, Homo sapien
caccaggtcacgtggaacatttccagacaagct

SEQ ID NO: 573256 - DNA, 33 bp, Homo sapien
caccaggtcacgtggagcatttccagacaagct

SEQ ID NO: 573257 - DNA, 33 bp, Homo sapien
ttccaccatctcagaaatgacaaggaagagtca

SEQ ID NO: 573258 - DNA, 33 bp, Homo sapien
ttccaccatctcagaagtgacaaggaagagtca

SEQ ID NO: 573259 - DNA, 33 bp, Homo sapien
aaaagttgatgtaacaataaaggaaacggcaca

SEQ ID NO: 573260 - DNA, 33 bp, Homo sapien
aaaagttgatgtaacagtaaaggaaacggcaca

SEQ ID NO: 573261 - DNA, 33 bp, Homo sapien
ccactgctgacgagaaagtgtctccgtcacttg

SEQ ID NO: 573262 - DNA, 33 bp, Homo sapien
ccactgctgacgagaaggtgtctccgtcacttg

SEQ ID NO: 573263 - DNA, 33 bp, Homo sapien; identical to SEQ ID NO: 573261

SEQ ID NO: 573264 - DNA, 33 bp, Homo sapien; identical to SEQ ID NO: 573262

SEQ ID NO: 573265 - DNA, 33 bp, Homo sapien
tttcacacgatctgtcagacaacaaaccacata

SEQ ID NO: 573266 - DNA, 33 bp, Homo sapien
tttcacacgatctgtcggacaacaaaccacata

SEQ ID NO: 573267 - DNA, 33 bp, Homo sapien
tcaatatttgttaactcactggacagatatgga

SEQ ID NO: 573268 - DNA, 33 bp, Homo sapien
tcaatatttgttaactgactggacagatatgga

SEQ ID NO: 573269 - DNA, 33 bp, Homo sapien; identical to SEQ ID NO: 573267

SEQ ID NO: 573270 - DNA, 33 bp, Homo sapien; identical to SEQ ID NO: 573268

SEQ ID NO: 573271 - DNA, 33 bp, Homo sapien
aaaagaaaaataaaacgcctgcaggtcctcagt

SEQ ID NO: 573272 - DNA, 33 bp, Homo sapien
aaaagaaaaataaaactcctgcaggtcctcagt

SEQ ID NO: 573273 - DNA, 33 bp, Homo sapien
cccaaaccaactttccaaaatcacggtgtgatg

SEQ ID NO: 573274 - DNA, 33 bp, Homo sapien
cccaaaccaactttccgaaatcacggtgtgatg

SEQ ID NO: 573275 - DNA, 33 bp, Homo sapien
cctagaaaccacaagcaaacccatttttgaatc

SEQ ID NO: 573276 - DNA, 33 bp, Homo sapien
cctagaaaccacaagcgaacccatttttgaatc

SEQ ID NO: 573277 - DNA, 33 bp, Homo sapien
atcccagggattcaagaaagttcatcctgctcc

SEQ ID NO: 573278 - DNA, 33 bp, Homo sapien
atcccagggattcaaggaagttcatcctgctcc

SEQ ID NO: 573279 - DNA, 33 bp, Homo sapien
ttcagctgaccccttacccccaactccatgtag

SEQ ID NO: 573280 - DNA, 33 bp, Homo sapien
ttcagctgaccccttatccccaactccatgtag

SEQ ID NO: 573281 - DNA, 33 bp, Homo sapien
aatgtaaacttaatgaaagcagcagtcatgttt

SEQ ID NO: 573282 - DNA, 33 bp, Homo sapien
aatgtaaacttaatgagagcagcagtcatgttt

SEQ ID NO: 573283 - DNA, 33 bp, Homo sapien
gagaacacttgtaaggcacataacctatcgcat

SEQ ID NO: 573284 - DNA, 33 bp, Homo sapien
gagaacacttgtaaggtacataacctatcgcat

SEQ ID NO: 573285 - DNA, 33 bp, Homo sapien
ttgtcattccagttgccataggcgggagagaaa

SEQ ID NO: 573286 - DNA, 33 bp, Homo sapien
ttgtcattccagttgcgataggcgggagagaaa

SEQ ID NO: 573287 - DNA, 33 bp, Homo sapien
agaaaggtgtctgacaagtacatagttgagatg

SEQ ID NO: 573288 - DNA, 33 bp, Homo sapien
agaaaggtgtctgacacgtacatagttgagatg

SEQ ID NO: 573289 - DNA, 33 bp, Homo sapien
tcttaggcggagagccacaggtgctcacagtag

SEQ ID NO: 573290 - DNA, 33 bp, Homo sapien
tcttaggcggagagccgcaggtgctcacagtag

SEQ ID NO: 573291 - DNA, 33 bp, Homo sapien
cttcctactcaagggacgaaaatctcagctcaa

SEQ ID NO: 573292 - DNA, 33 bp, Homo sapien
cttcctactcaagggatgaaaatctcagctcaa

SEQ ID NO: 573293 - DNA, 33 bp, Homo sapien
ctgtggggagaaatcaataatgagctaggaaag

SEQ ID NO: 573294 - DNA, 33 bp, Homo sapien
ctgtggggagaaatcagtaatgagctaggaaag

SEQ ID NO: 573295 - DNA, 33 bp, Homo sapien
ggaacggttgttttacacttccagcctttctgc

SEQ ID NO: 573296 - DNA, 33 bp, Homo sapien
ggaacggttgttttactcttccagcctttctgc

SEQ ID NO: 573297 - DNA, 33 bp, Homo sapien
tgagaagcacctgcaacgtcaaatgaaaagtgc

SEQ ID NO: 573298 - DNA, 33 bp, Homo sapien
tgagaagcacctgcaatgtcaaatgaaaagtgc

SEQ ID NO: 573299 - DNA, 33 bp, Homo sapien
ttgcaggtgcttctcaagatacaatgaggccac

SEQ ID NO: 573300 - DNA, 33 bp, Homo sapien
ttgcaggtgcttctcacgatacaatgaggccac

SEQ ID NO: 573301 - DNA, 33 bp, Homo sapien
gccctcgacacacagccagtccttgctgggcag

SEQ ID NO: 573302 - DNA, 33 bp, Homo sapien
gccctcgacacacagcgagtccttgctgggcag

SEQ ID NO: 573303 - DNA, 33 bp, Homo sapien
agaagcaggacatacacagatacatacagaagc

SEQ ID NO: 573304 - DNA, 33 bp, Homo sapien
agaagcaggacatacagagatacatacagaagc

SEQ ID NO: 573305 - DNA, 33 bp, Homo sapien
ctaaagtgcttaatgaaggtgctggattctccc

SEQ ID NO: 573306 - DNA, 33 bp, Homo sapien
ctaaagtgcttaatgatggtgctggattctccc

SEQ ID NO: 573307 - DNA, 33 bp, Homo sapien
gcatgtgacttattgaaaagctactcctgagag

SEQ ID NO: 573308 - DNA, 33 bp, Homo sapien
gcatgtgacttattgagaagctactcctgagag

SEQ ID NO: 573309 - DNA, 33 bp, Homo sapien
acaggtgagcaacattcaataaatcctgaaaag

SEQ ID NO: 573310 - DNA, 33 bp, Homo sapien
acaggtgagcaacattgaataaatcctgaaaag

SEQ ID NO: 573311 - DNA, 33 bp, Homo sapien
agaatcacacatctacaaagaattagcaacatc

SEQ ID NO: 573312 - DNA, 33 bp, Homo sapien
agaatcacacatctacgaagaattagcaacatc

SEQ ID NO: 573313 - DNA, 33 bp, Homo sapien
agttgtgcaaagagaaatgaccacgttaagttg

SEQ ID NO: 573314 - DNA, 33 bp, Homo sapien
agttgtgcaaagagaagtgaccacgttaagttg

SEQ ID NO: 573315 - DNA, 33 bp, Homo sapien
cggcctgttgtccacaatggcatcaagagggtc

SEQ ID NO: 573316 - DNA, 33 bp, Homo sapien
cggcctgttgtccacagtggcatcaagagggtc

SEQ ID NO: 573317 - DNA, 33 bp, Homo sapien
caggagaacctgccaactgatggtctgtgccgg

SEQ ID NO: 573318 - DNA, 33 bp, Homo sapien
caggagaacctgccaattgatggtctgtgccgg

SEQ ID NO: 573319 - DNA, 33 bp, Homo sapien
taaatgagcaagaaaccgagcgtgtgcaagggt

SEQ ID NO: 573320 - DNA, 33 bp, Homo sapien
taaatgagcaagaaactgagcgtgtgcaagggt

SEQ ID NO: 573321 - DNA, 33 bp, Homo sapien
aggagaaggggattcacggcggtcctgggggaa

SEQ ID NO: 573322 - DNA, 33 bp, Homo sapien
aggagaaggggattcatggcggtcctgggggaa

SEQ ID NO: 573323 - DNA, 33 bp, Homo sapien
catgtttagccctttaagagccctgggatagtg

SEQ ID NO: 573324 - DNA, 33 bp, Homo sapien
catgtttagccctttaggagccctgggatagtg

SEQ ID NO: 573325 - DNA, 33 bp, Homo sapien
gagcaccagagaagaacgtgcctgcagcttttg

SEQ ID NO: 573326 - DNA, 33 bp, Homo sapien
gagcaccagagaagaatgtgcctgcagcttttg

SEQ ID NO: 573327 - DNA, 33 bp, Homo sapien
ttcactccaacctcaccctttgtgtccatgctc

SEQ ID NO: 573328 - DNA, 33 bp, Homo sapien
ttcactccaacctcacgctttgtgtccatgctc

SEQ ID NO: 573329 - DNA, 33 bp, Homo sapien
tagaatgtgagtaagacgtatagtcagctgttt

SEQ ID NO: 573330 - DNA, 33 bp, Homo sapien
tagaatgtgagtaagatgtatagtcagctgttt

SEQ ID NO: 573331 - DNA, 33 bp, Homo sapien
agcagagtggtttgtcactacaccacaatgtcc

SEQ ID NO: 573332 - DNA, 33 bp, Homo sapien
agcagagtggtttgtcgctacaccacaatgtcc

SEQ ID NO: 573333 - DNA, 33 bp, Homo sapien
tgggtcccgtgggtccagaattcagacagagca

SEQ ID NO: 573334 - DNA, 33 bp, Homo sapien
tgggtcccgtgggtccggaattcagacagagca

SEQ ID NO: 573335 - DNA, 33 bp, Homo sapien
agcacccaaattacagactctaactgaagaagg

SEQ ID NO: 573336 - DNA, 33 bp, Homo sapien
agcacccaaattacaggctctaactgaagaagg

SEQ ID NO: 573337 - DNA, 33 bp, Homo sapien
gtagaggcttttgagaggatcctgaccacatgc

SEQ ID NO: 573338 - DNA, 33 bp, Homo sapien
gtagaggcttttgagatgatcctgaccacatgc

SEQ ID NO: 573339 - DNA, 33 bp, Homo sapien
cccctctgcacttacaaattggctactagctca

SEQ ID NO: 573340 - DNA, 33 bp, Homo sapien
cccctctgcacttacagattggctactagctca

SEQ ID NO: 573341 - DNA, 33 bp, Homo sapien
agcatccacaactgagccatgaggtataaaatt

SEQ ID NO: 573342 - DNA, 33 bp, Homo sapien
agcatccacaactgagtcatgaggtataaaatt

SEQ ID NO: 573343 - DNA, 33 bp, Homo sapien
catgatttttgcttcacagccagtagacagtag

SEQ ID NO: 573344 - DNA, 33 bp, Homo sapien
catgatttttgcttcatagccagtagacagtag

SEQ ID NO: 573345 - DNA, 33 bp, Homo sapien
aaagaatcagaaccacaccaagccttgaaatca

SEQ ID NO: 573346 - DNA, 33 bp, Homo sapien
aaagaatcagaaccacgccaagccttgaaatca

SEQ ID NO: 573347 - DNA, 33 bp, Homo sapien
tataggcacacaaataggtagaactggggaatc

SEQ ID NO: 573348 - DNA, 33 bp, Homo sapien
tataggcacacaaatatgtagaactggggaatc

SEQ ID NO: 573349 - DNA, 33 bp, Homo sapien
aacctacctgtggcatcaccagactcggaaagt

SEQ ID NO: 573350 - DNA, 33 bp, Homo sapien
aacctacctgtggcatgaccagactcggaaagt

SEQ ID NO: 573351 - DNA, 33 bp, Homo sapien
agtttaggcacctttacggccccttgtgacatt

SEQ ID NO: 573352 - DNA, 33 bp, Homo sapien
agtttaggcacctttatggccccttgtgacatt

SEQ ID NO: 573353 - DNA, 33 bp, Homo sapien
actaaggttgtcaaacaatgagttagggtcggc

SEQ ID NO: 573354 - DNA, 33 bp, Homo sapien
actaaggttgtcaaacgatgagttagggtcggc

SEQ ID NO: 573355 - DNA, 33 bp, Homo sapien
cagcttccattgcttgcagccaaaggatcctgg

SEQ ID NO: 573356 - DNA, 33 bp, Homo sapien
cagcttccattgcttgtagccaaaggatcctgg

SEQ ID NO: 573357 - DNA, 33 bp, Homo sapien
gtgatgctatttgggaatacctgagctcaataa

SEQ ID NO: 573358 - DNA, 33 bp, Homo sapien
gtgatgctatttgggattacctgagctcaataa

SEQ ID NO: 573359 - DNA, 33 bp, Homo sapien
agtctgctggaggctgcaccgtctcaatgcatg

SEQ ID NO: 573360 - DNA, 33 bp, Homo sapien
agtctgctggaggctgtaccgtctcaatgcatg

SEQ ID NO: 573361 - DNA, 33 bp, Homo sapien
tgtgttaatatgcagacagtgattagcatagtg

SEQ ID NO: 573362 - DNA, 33 bp, Homo sapien
tgtgttaatatgcagagagtgattagcatagtg

SEQ ID NO: 573363 - DNA, 33 bp, Homo sapien
ctttgtggcaacaagaggttgaggtgcccctgg

SEQ ID NO: 573364 - DNA, 33 bp, Homo sapien
ctttgtggcaacaagatgttgaggtgcccctgg

SEQ ID NO: 573365 - DNA, 33 bp, Homo sapien
gatacatcaggagatacggcaattctggcctct

SEQ ID NO: 573366 - DNA, 33 bp, Homo sapien
gatacatcaggagatatggcaattctggcctct

SEQ ID NO: 573367 - DNA, 33 bp, Homo sapien
gtgcagctgcaatggaaaacactatagcagatc

SEQ ID NO: 573368 - DNA, 33 bp, Homo sapien
gtgcagctgcaatggacaacactatagcagatc

SEQ ID NO: 573369 - DNA, 33 bp, Homo sapien
acattggcttgagttacagcttcaagacggtct

SEQ ID NO: 573370 - DNA, 33 bp, Homo sapien
acattggcttgagttagagcttcaagacggtct

SEQ ID NO: 573371 - DNA, 33 bp, Homo sapien
cacacaactggtaagcagagaagcttggatctg

SEQ ID NO: 573372 - DNA, 33 bp, Homo sapien
cacacaactggtaagcggagaagcttggatctg

SEQ ID NO: 573373 - DNA, 33 bp, Homo sapien
cctggaatgtggtaagaactgtgtaagagttag

SEQ ID NO: 573374 - DNA, 33 bp, Homo sapien
cctggaatgtggtaagtactgtgtaagagttag

SEQ ID NO: 573375 - DNA, 33 bp, Homo sapien
gtgcagtgcatcctacaaagtgcttgttcaggc

SEQ ID NO: 573376 - DNA, 33 bp, Homo sapien
gtgcagtgcatcctacgaagtgcttgttcaggc

SEQ ID NO: 573377 - DNA, 33 bp, Homo sapien
acttaatttaccaacacatccggagtgtatttt

SEQ ID NO: 573378 - DNA, 33 bp, Homo sapien
acttaatttaccaacatatccggagtgtatttt

SEQ ID NO: 573379 - DNA, 33 bp, Homo sapien
cgcctgtgacacatccagactcagaacgctctc

SEQ ID NO: 573380 - DNA, 33 bp, Homo sapien
cgcctgtgacacatccggactcagaacgctctc

SEQ ID NO: 573381 - DNA, 33 bp, Homo sapien
aggatttttataagacaaagtaggaagtatgaa

SEQ ID NO: 573382 - DNA, 33 bp, Homo sapien
aggatttttataagacgaagtaggaagtatgaa

SEQ ID NO: 573383 - DNA, 33 bp, Homo sapien
ccctcaaactagaacaagacctctcctccctag

SEQ ID NO: 573384 - DNA, 33 bp, Homo sapien
ccctcaaactagaacaggacctctcctccctag

SEQ ID NO: 573385 - DNA, 33 bp, Homo sapien
tctcattgctaaaaagcagacgttcataagaca

SEQ ID NO: 573386 - DNA, 33 bp, Homo sapien
tctcattgctaaaaagtagacgttcataagaca

SEQ ID NO: 573387 - DNA, 33 bp, Homo sapien
aaaaagagcacaagacagagctagtcaggtgtt

SEQ ID NO: 573388 - DNA, 33 bp, Homo sapien
aaaaagagcacaagacggagctagtcaggtgtt

SEQ ID NO: 573389 - DNA, 33 bp, Homo sapien
agtaaaataaaggccaggttttgcacttgactt

SEQ ID NO: 573390 - DNA, 33 bp, Homo sapien
agtaaaataaaggccatgttttgcacttgactt

SEQ ID NO: 573391 - DNA, 33 bp, Homo sapien
ttgttggtgagttaaacgcagtgtggcacagat

SEQ ID NO: 573392 - DNA, 33 bp, Homo sapien
ttgttggtgagttaaatgcagtgtggcacagat

SEQ ID NO: 573393 - DNA, 33 bp, Homo sapien
gtgcaagggtcttcaccgctttctagatgaaga

SEQ ID NO: 573394 - DNA, 33 bp, Homo sapien
gtgcaagggtcttcactgctttctagatgaaga

SEQ ID NO: 573395 - DNA, 33 bp, Homo sapien
atgcccggccctgacacgatcataatatgccat

SEQ ID NO: 573396 - DNA, 33 bp, Homo sapien
atgcccggccctgacatgatcataatatgccat

SEQ ID NO: 573397 - DNA, 33 bp, Homo sapien
aatagagagtatgagacaacagagaggttaagt

SEQ ID NO: 573398 - DNA, 33 bp, Homo sapien
aatagagagtatgagagaacagagaggttaagt

SEQ ID NO: 573399 - DNA, 33 bp, Homo sapien
aagtaagcaaacctacaacatagatgcatggtt

SEQ ID NO: 573400 - DNA, 33 bp, Homo sapien
aagtaagcaaacctacgacatagatgcatggtt

SEQ ID NO: 573401 - DNA, 33 bp, Homo sapien
tgaggccaccacaagccgagaacacctggggct

SEQ ID NO: 573402 - DNA, 33 bp, Homo sapien
tgaggccaccacaagctgagaacacctggggct

SEQ ID NO: 573403 - DNA, 33 bp, Homo sapien
gactcttgagggagaccatcctggattaatcgg

SEQ ID NO: 573404 - DNA, 33 bp, Homo sapien
gactcttgagggagactatcctggattaatcgg

SEQ ID NO: 573405 - DNA, 33 bp, Homo sapien
gctctgacctgtcctcactggatgtcttgaagc

SEQ ID NO: 573406 - DNA, 33 bp, Homo sapien
gctctgacctgtcctcgctggatgtcttgaagc

SEQ ID NO: 573407 - DNA, 33 bp, Homo sapien
ctcagactctatagacagaagacttactggctt

SEQ ID NO: 573408 - DNA, 33 bp, Homo sapien
ctcagactctatagacggaagacttactggctt

SEQ ID NO: 573409 - DNA, 33 bp, Homo sapien
agggagagttgaaaccactgcatttgggtggtg

SEQ ID NO: 573410 - DNA, 33 bp, Homo sapien
agggagagttgaaaccgctgcatttgggtggtg

SEQ ID NO: 573411 - DNA, 33 bp, Homo sapien
tatcaatcaccaaatccgatcgttgggaatttc

SEQ ID NO: 573412 - DNA, 33 bp, Homo sapien
tatcaatcaccaaatctgatcgttgggaatttc

SEQ ID NO: 573413 - DNA, 33 bp, Homo sapien
atctggaaattcaaaacgagactccctaatgct

SEQ ID NO: 573414 - DNA, 33 bp, Homo sapien
atctggaaattcaaaatgagactccctaatgct

SEQ ID NO: 573415 - DNA, 33 bp, Homo sapien
gggcaccctgcagttgaatttgtttgctagggc

SEQ ID NO: 573416 - DNA, 33 bp, Homo sapien
gggcaccctgcagttggatttgtttgctagggc

SEQ ID NO: 573417 - DNA, 33 bp, Homo sapien
tgagctctggagatgaaagcaagtgttgtcctg

SEQ ID NO: 573418 - DNA, 33 bp, Homo sapien
tgagctctggagatgagagcaagtgttgtcctg

SEQ ID NO: 573419 - DNA, 33 bp, Homo sapien
gaaacaaaaatatttccagcggaaggactgtca

SEQ ID NO: 573420 - DNA, 33 bp, Homo sapien
gaaacaaaaatatttctagcggaaggactgtca

SEQ ID NO: 573421 - DNA, 33 bp, Homo sapien
tggattccaagagctacagaaagtcggggtcgg

SEQ ID NO: 573422 - DNA, 33 bp, Homo sapien
tggattccaagagctatagaaagtcggggtcgg

SEQ ID NO: 573423 - DNA, 33 bp, Homo sapien
gggtgctcactgcctacaccctagtccattgcc

SEQ ID NO: 573424 - DNA, 33 bp, Homo sapien
gggtgctcactgcctataccctagtccattgcc

SEQ ID NO: 573425 - DNA, 33 bp, Homo sapien
ccccacccactctcatcactctctagccctcga

SEQ ID NO: 573426 - DNA, 33 bp, Homo sapien
ccccacccactctcattactctctagccctcga

SEQ ID NO: 573427 - DNA, 33 bp, Homo sapien
gccactcttcctcatcacattcaggtctctgct

SEQ ID NO: 573428 - DNA, 33 bp, Homo sapien
gccactcttcctcatcgcattcaggtctctgct

SEQ ID NO: 573429 - DNA, 33 bp, Homo sapien
ggttttcaggaatgcaaaagtctgagaagacac

SEQ ID NO: 573430 - DNA, 33 bp, Homo sapien
ggttttcaggaatgcagaagtctgagaagacac

SEQ ID NO: 573431 - DNA, 33 bp, Homo sapien
atatgttaaatgcacacactcttgtgaaccaca

SEQ ID NO: 573432 - DNA, 33 bp, Homo sapien
atatgttaaatgcacatactcttgtgaaccaca

SEQ ID NO: 573433 - DNA, 33 bp, Homo sapien
atgccctgaacaaacgccattctcggtgtcatt

SEQ ID NO: 573434 - DNA, 33 bp, Homo sapien
atgccctgaacaaacgtcattctcggtgtcatt

SEQ ID NO: 573435 - DNA, 33 bp, Homo sapien
aaggacattaatcacaagtttctgcacttgcat

SEQ ID NO: 573436 - DNA, 33 bp, Homo sapien
aaggacattaatcacaggtttctgcacttgcat

SEQ ID NO: 573437 - DNA, 33 bp, Homo sapien
tgcagatggcttctggacacaaaatattgatga

SEQ ID NO: 573438 - DNA, 33 bp, Homo sapien
tgcagatggcttctgggcacaaaatattgatga

SEQ ID NO: 573439 - DNA, 33 bp, Homo sapien
ctccctcctggtcaaacaaaacgaccacatttc

SEQ ID NO: 573440 - DNA, 33 bp, Homo sapien
ctccctcctggtcaaagaaaacgaccacatttc

SEQ ID NO: 573441 - DNA, 33 bp, Homo sapien
ggagccaggaattaacaaggaagtctgtccctg

SEQ ID NO: 573442 - DNA, 33 bp, Homo sapien
ggagccaggaattaacgaggaagtctgtccctg

SEQ ID NO: 573443 - DNA, 33 bp, Homo sapien
gttatttctcgcataaagaactggactgtatat

SEQ ID NO: 573444 - DNA, 33 bp, Homo sapien
gttatttctcgcataatgaactggactgtatat

SEQ ID NO: 573445 - DNA, 33 bp, Homo sapien
gattttatgttgtgataatagaagctgagaaat

SEQ ID NO: 573446 - DNA, 33 bp, Homo sapien
gattttatgttgtgatgatagaagctgagaaat

SEQ ID NO: 573447 - DNA, 33 bp, Homo sapien
agttgctgagaagttacgatgctgagctggagc

SEQ ID NO: 573448 - DNA, 33 bp, Homo sapien
agttgctgagaagttatgatgctgagctggagc

SEQ ID NO: 573449 - DNA, 33 bp, Homo sapien
taaaaccctgtctacaatatccctgcaaactca

SEQ ID NO: 573450 - DNA, 33 bp, Homo sapien
taaaaccctgtctacagtatccctgcaaactca

SEQ ID NO: 573451 - DNA, 33 bp, Homo sapien
catcacccttctgcccacacatgcagaggctgt

SEQ ID NO: 573452 - DNA, 33 bp, Homo sapien
catcacccttctgcccgcacatgcagaggctgt

SEQ ID NO: 573453 - DNA, 33 bp, Homo sapien
gtggtgtcttgcccaacgtcccggagcaggtct

SEQ ID NO: 573454 - DNA, 33 bp, Homo sapien
gtggtgtcttgcccaatgtcccggagcaggtct

SEQ ID NO: 573455 - DNA, 33 bp, Homo sapien
tgacagtttccccatcacagcatcaatgtgtca

SEQ ID NO: 573456 - DNA, 33 bp, Homo sapien
tgacagtttccccatcgcagcatcaatgtgtca

SEQ ID NO: 573457 - DNA, 33 bp, Homo sapien
agtcgtcgtctagggaactcaagcttggatgct

SEQ ID NO: 573458 - DNA, 33 bp, Homo sapien
agtcgtcgtctagggagctcaagcttggatgct

SEQ ID NO: 573459 - DNA, 33 bp, Homo sapien
ttttcccaggacacagaaaggtctgcttggtat

SEQ ID NO: 573460 - DNA, 33 bp, Homo sapien
ttttcccaggacacagcaaggtctgcttggtat

SEQ ID NO: 573461 - DNA, 33 bp, Homo sapien
acccaacactcagtaaatcaggacagacaccag

SEQ ID NO: 573462 - DNA, 33 bp, Homo sapien
acccaacactcagtaagtcaggacagacaccag

SEQ ID NO: 573463 - DNA, 33 bp, Homo sapien
ctaaattgtctgaggtcaaacttccactaccca

SEQ ID NO: 573464 - DNA, 33 bp, Homo sapien
ctaaattgtctgaggttaaacttccactaccca

SEQ ID NO: 573465 - DNA, 33 bp, Homo sapien
cacaatatcttggtggcattagtgcaaactggt

SEQ ID NO: 573466 - DNA, 33 bp, Homo sapien
cacaatatcttggtggtattagtgcaaactggt

SEQ ID NO: 573467 - DNA, 33 bp, Homo sapien
tgaggttacggcaccaagcgtgtcagtctgcct

SEQ ID NO: 573468 - DNA, 33 bp, Homo sapien
tgaggttacggcaccacgcgtgtcagtctgcct

SEQ ID NO: 573469 - DNA, 33 bp, Homo sapien
agcaatacaggtcagacaatcttaggattatgg

SEQ ID NO: 573470 - DNA, 33 bp, Homo sapien
agcaatacaggtcagagaatcttaggattatgg

SEQ ID NO: 573471 - DNA, 33 bp, Homo sapien
tgacaggagggaaggactaggacacacattcca

SEQ ID NO: 573472 - DNA, 33 bp, Homo sapien
tgacaggagggaaggattaggacacacattcca

SEQ ID NO: 573473 - DNA, 33 bp, Homo sapien
ggggtcccttccctgcactctcataagctcccc

SEQ ID NO: 573474 - DNA, 33 bp, Homo sapien
ggggtcccttccctgcgctctcataagctcccc

SEQ ID NO: 573475 - DNA, 33 bp, Homo sapien
tccccaagctctaagtcactcaggtctcattat

SEQ ID NO: 573476 - DNA, 33 bp, Homo sapien
tccccaagctctaagttactcaggtctcattat

SEQ ID NO: 573477 - DNA, 33 bp, Homo sapien
acttagagcttggggacgtcgaccacagcatct

SEQ ID NO: 573478 - DNA, 33 bp, Homo sapien
acttagagcttggggaggtcgaccacagcatct

SEQ ID NO: 573479 - DNA, 33 bp, Homo sapien
agcttttggcacagtcaaaatagataaattatc

SEQ ID NO: 573480 - DNA, 33 bp, Homo sapien
agcttttggcacagtcgaaatagataaattatc

SEQ ID NO: 573481 - DNA, 33 bp, Homo sapien
cctacaagtggtgaaccaactagatactgatca

SEQ ID NO: 573482 - DNA, 33 bp, Homo sapien
cctacaagtggtgaactaactagatactgatca

SEQ ID NO: 573483 - DNA, 33 bp, Homo sapien
caatcagagtccagtaagatggagcgttctgta

SEQ ID NO: 573484 - DNA, 33 bp, Homo sapien
caatcagagtccagtaggatggagcgttctgta

SEQ ID NO: 573485 - DNA, 33 bp, Homo sapien
aacaggcatgagacaaatatgagccccaagcac

SEQ ID NO: 573486 - DNA, 33 bp, Homo sapien
aacaggcatgagacaagtatgagccccaagcac

SEQ ID NO: 573487 - DNA, 33 bp, Homo sapien
gtcaagtgaaacttaacgggttgatgattggag

SEQ ID NO: 573488 - DNA, 33 bp, Homo sapien
gtcaagtgaaacttaatgggttgatgattggag

SEQ ID NO: 573489 - DNA, 33 bp, Homo sapien
tgataagtggaaaacactatctgcaagatctga

SEQ ID NO: 573490 - DNA, 33 bp, Homo sapien
tgataagtggaaaacattatctgcaagatctga

SEQ ID NO: 573491 - DNA, 33 bp, Homo sapien
agatgttggacaaaaaaggtcttaaccaagact

SEQ ID NO: 573492 - DNA, 33 bp, Homo sapien
agatgttggacaaaaagggtcttaaccaagact

SEQ ID NO: 573493 - DNA, 33 bp, Homo sapien
gcccccatgattcaccaagagcaagtaggttgc

SEQ ID NO: 573494 - DNA, 33 bp, Homo sapien
gcccccatgattcaccgagagcaagtaggttgc

SEQ ID NO: 573495 - DNA, 33 bp, Homo sapien
ttacaagtcaagtaaaacatttcttaggcaaat

SEQ ID NO: 573496 - DNA, 33 bp, Homo sapien
ttacaagtcaagtaaagcatttcttaggcaaat

SEQ ID NO: 573497 - DNA, 33 bp, Homo sapien
tggtgcagtgagatgaaccaaaacaacattcat

SEQ ID NO: 573498 - DNA, 33 bp, Homo sapien
tggtgcagtgagatgacccaaaacaacattcat

SEQ ID NO: 573499 - DNA, 33 bp, Homo sapien
ttgtggacaagcatcactgacctgggttgaacc

SEQ ID NO: 573500 - DNA, 33 bp, Homo sapien
ttgtggacaagcatcattgacctgggttgaacc

SEQ ID NO: 573501 - DNA, 33 bp, Homo sapien
ctataagaactcagtccaatagggatgtgtgtg

SEQ ID NO: 573502 - DNA, 33 bp, Homo sapien
ctataagaactcagtctaatagggatgtgtgtg

SEQ ID NO: 573503 - DNA, 33 bp, Homo sapien
ttcttccttatccctgcaatagtttttccccag

SEQ ID NO: 573504 - DNA, 33 bp, Homo sapien
ttcttccttatccctggaatagtttttccccag

SEQ ID NO: 573505 - DNA, 33 bp, Homo sapien
ccttcttctgtactaaatcttagcacaaatgtc

SEQ ID NO: 573506 - DNA, 33 bp, Homo sapien
ccttcttctgtactaagtcttagcacaaatgtc

SEQ ID NO: 573507 - DNA, 33 bp, Homo sapien
tacctaagatgatgcccctaacccaggcactct

SEQ ID NO: 573508 - DNA, 33 bp, Homo sapien
tacctaagatgatgcctctaacccaggcactct

SEQ ID NO: 573509 - DNA, 33 bp, Homo sapien
ggctgcagtaaggactaagagagaaatgaaaca

SEQ ID NO: 573510 - DNA, 33 bp, Homo sapien
ggctgcagtaaggactgagagagaaatgaaaca

SEQ ID NO: 573511 - DNA, 33 bp, Homo sapien
gacaaggtgctggggacagagctgtgcacaacc

SEQ ID NO: 573512 - DNA, 33 bp, Homo sapien
gacaaggtgctggggagagagctgtgcacaacc

SEQ ID NO: 573513 - DNA, 33 bp, Homo sapien
ccctcactgcagaactcaaaggaccttaacaga

SEQ ID NO: 573514 - DNA, 33 bp, Homo sapien
ccctcactgcagaactgaaaggaccttaacaga

SEQ ID NO: 573515 - DNA, 33 bp, Homo sapien
gagaactgcagctgtaagagaggattgcccatg

SEQ ID NO: 573516 - DNA, 33 bp, Homo sapien
gagaactgcagctgtacgagaggattgcccatg

SEQ ID NO: 573517 - DNA, 33 bp, Homo sapien
tgaagtaaactatacaggtcaattagatccagt

SEQ ID NO: 573518 - DNA, 33 bp, Homo sapien
tgaagtaaactatacatgtcaattagatccagt

SEQ ID NO: 573519 - DNA, 33 bp, Homo sapien
cagacctgcctgtgacaaccctctcttcctcct

SEQ ID NO: 573520 - DNA, 33 bp, Homo sapien
cagacctgcctgtgacgaccctctcttcctcct

SEQ ID NO: 573521 - DNA, 33 bp, Homo sapien
ggagcacaggtggccccgaaatttggctgaaaa

SEQ ID NO: 573522 - DNA, 33 bp, Homo sapien
ggagcacaggtggccctgaaatttggctgaaaa

SEQ ID NO: 573523 - DNA, 33 bp, Homo sapien
ctagaaagttcacttacgagctgattaatggca

SEQ ID NO: 573524 - DNA, 33 bp, Homo sapien
ctagaaagttcacttatgagctgattaatggca

SEQ ID NO: 573525 - DNA, 33 bp, Homo sapien
gtcagccaaggatttaccagccagtgggaacag

SEQ ID NO: 573526 - DNA, 33 bp, Homo sapien
gtcagccaaggatttagcagccagtgggaacag

SEQ ID NO: 573527 - DNA, 33 bp, Homo sapien
cctccaaaggaaaaaaccagacaagcaacaagt

SEQ ID NO: 573528 - DNA, 33 bp, Homo sapien
cctccaaaggaaaaaatcagacaagcaacaagt

SEQ ID NO: 573529 - DNA, 33 bp, Homo sapien
ttattagaaacctggaagagagcagaaaaggga

SEQ ID NO: 573530 - DNA, 33 bp, Homo sapien
ttattagaaacctggatgagagcagaaaaggga

SEQ ID NO: 573531 - DNA, 33 bp, Homo sapien
ttaatctcgcaagcacagggagtttctgccatc

SEQ ID NO: 573532 - DNA, 33 bp, Homo sapien
ttaatctcgcaagcacggggagtttctgccatc

SEQ ID NO: 573533 - DNA, 33 bp, Homo sapien
ggggaggagtgttttaccactgaattgtagcca

SEQ ID NO: 573534 - DNA, 33 bp, Homo sapien
ggggaggagtgttttatcactgaattgtagcca

SEQ ID NO: 573535 - DNA, 33 bp, Homo sapien
cctagaattttgccagaaatgctctctcaaagg

SEQ ID NO: 573536 - DNA, 33 bp, Homo sapien
cctagaattttgccaggaatgctctctcaaagg

SEQ ID NO: 573537 - DNA, 33 bp, Homo sapien
accacagaactgttcacagagagttcccagtgg

SEQ ID NO: 573538 - DNA, 33 bp, Homo sapien
accacagaactgttcatagagagttcccagtgg

SEQ ID NO: 573539 - DNA, 33 bp, Homo sapien
gaaccagctgaatctaaggactgagtagtaacc

SEQ ID NO: 573540 - DNA, 33 bp, Homo sapien
gaaccagctgaatctagggactgagtagtaacc

SEQ ID NO: 573541 - DNA, 33 bp, Homo sapien
tgcctgcaacgaacaaagcattcctggcacatt

SEQ ID NO: 573542 - DNA, 33 bp, Homo sapien
tgcctgcaacgaacaaggcattcctggcacatt

SEQ ID NO: 573543 - DNA, 33 bp, Homo sapien
ggcgagaaagcaaaataaaaatgtcagattcct

SEQ ID NO: 573544 - DNA, 33 bp, Homo sapien
ggcgagaaagcaaaattaaaatgtcagattcct

SEQ ID NO: 573545 - DNA, 33 bp, Homo sapien
ctcccttattatgggaacaaaagcaatctgagc

SEQ ID NO: 573546 - DNA, 33 bp, Homo sapien
ctcccttattatgggagcaaaagcaatctgagc

SEQ ID NO: 573547 - DNA, 33 bp, Homo sapien
agttgtatggttattgcagtcagacatcaagtc

SEQ ID NO: 573548 - DNA, 33 bp, Homo sapien
agttgtatggttattgtagtcagacatcaagtc

SEQ ID NO: 573549 - DNA, 33 bp, Homo sapien
aatctccgtcttgataaagccattcagattctt

SEQ ID NO: 573550 - DNA, 33 bp, Homo sapien
aatctccgtcttgatacagccattcagattctt

SEQ ID NO: 573551 - DNA, 33 bp, Homo sapien
ttcaactctagacataccgtgggtcggagccga

SEQ ID NO: 573552 - DNA, 33 bp, Homo sapien
ttcaactctagacatatcgtgggtcggagccga

SEQ ID NO: 573553 - DNA, 33 bp, Homo sapien
tagagttgaacgtttacagctcctgaagtgcca

SEQ ID NO: 573554 - DNA, 33 bp, Homo sapien
tagagttgaacgtttatagctcctgaagtgcca

SEQ ID NO: 573555 - DNA, 33 bp, Homo sapien
ggctcagccttgagcaatcaaaccagctgtgaa

SEQ ID NO: 573556 - DNA, 33 bp, Homo sapien
ggctcagccttgagcagtcaaaccagctgtgaa

SEQ ID NO: 573557 - DNA, 33 bp, Homo sapien
aacttgatgttgttgacaaacttcaggttttct

SEQ ID NO: 573558 - DNA, 33 bp, Homo sapien
aacttgatgttgttgataaacttcaggttttct

SEQ ID NO: 573559 - DNA, 33 bp, Homo sapien
atacagtacatatacaagaagactgtctaggca

SEQ ID NO: 573560 - DNA, 33 bp, Homo sapien
atacagtacatatacaggaagactgtctaggca

SEQ ID NO: 573561 - DNA, 33 bp, Homo sapien
cagttttccagatttccatcccagaatgttttt

SEQ ID NO: 573562 - DNA, 33 bp, Homo sapien
cagttttccagatttcgatcccagaatgttttt

SEQ ID NO: 573563 - DNA, 33 bp, Homo sapien
agaatctgcaagaaacccgaacaaatcagcaag

SEQ ID NO: 573564 - DNA, 33 bp, Homo sapien
agaatctgcaagaaactcgaacaaatcagcaag

SEQ ID NO: 573565 - DNA, 33 bp, Homo sapien
tctagcagattctttcacacctagtcccggtgg

SEQ ID NO: 573566 - DNA, 33 bp, Homo sapien
tctagcagattctttcgcacctagtcccggtgg

SEQ ID NO: 573567 - DNA, 33 bp, Homo sapien
tagtagatggcctgacagcgtcatattgattag

SEQ ID NO: 573568 - DNA, 33 bp, Homo sapien
tagtagatggcctgacggcgtcatattgattag

SEQ ID NO: 573569 - DNA, 33 bp, Homo sapien
ccatgttgtcagtttacgccaacattgaggcct

SEQ ID NO: 573570 - DNA, 33 bp, Homo sapien
ccatgttgtcagtttatgccaacattgaggcct

SEQ ID NO: 573571 - DNA, 33 bp, Homo sapien
tgtgacccacagtcaaccatttagagtggatag

SEQ ID NO: 573572 - DNA, 33 bp, Homo sapien
tgtgacccacagtcaatcatttagagtggatag

SEQ ID NO: 573573 - DNA, 33 bp, Homo sapien
tgagttcaccaaacacacttaagtcctagaggt

SEQ ID NO: 573574 - DNA, 33 bp, Homo sapien
tgagttcaccaaacacccttaagtcctagaggt

SEQ ID NO: 573575 - DNA, 33 bp, Homo sapien
atgtcctatgcacatccagagtgagtaagggta

SEQ ID NO: 573576 - DNA, 33 bp, Homo sapien
atgtcctatgcacatcgagagtgagtaagggta

SEQ ID NO: 573577 - DNA, 33 bp, Homo sapien
aaatatgggcttagacacgtggaactcagggtc

SEQ ID NO: 573578 - DNA, 33 bp, Homo sapien
aaatatgggcttagacgcgtggaactcagggtc

SEQ ID NO: 573579 - DNA, 33 bp, Homo sapien
cagcttagtttccatacccttaacacaggggca

SEQ ID NO: 573580 - DNA, 33 bp, Homo sapien
cagcttagtttccatatccttaacacaggggca

SEQ ID NO: 573581 - DNA, 33 bp, Homo sapien
ttataagatatgattcaatgcgacgtcattgcc

SEQ ID NO: 573582 - DNA, 33 bp, Homo sapien
ttataagatatgattcgatgcgacgtcattgcc

SEQ ID NO: 573583 - DNA, 33 bp, Homo sapien
ctactttagctaaaaaggtgtttgccaggctag

SEQ ID NO: 573584 - DNA, 33 bp, Homo sapien
ctactttagctaaaaatgtgtttgccaggctag

SEQ ID NO: 573585 - DNA, 33 bp, Homo sapien
ttatataagtgttccaatccatctcatgtatta

SEQ ID NO: 573586 - DNA, 33 bp, Homo sapien
ttatataagtgttccagtccatctcatgtatta

SEQ ID NO: 573587 - DNA, 33 bp, Homo sapien
ctttggtttgtgctgaactacagacagtaagag

SEQ ID NO: 573588 - DNA, 33 bp, Homo sapien
ctttggtttgtgctgagctacagacagtaagag

SEQ ID NO: 573589 - DNA, 33 bp, Homo sapien
ttatggagactgagaaatcctatgatctctcat

SEQ ID NO: 573590 - DNA, 33 bp, Homo sapien
ttatggagactgagaagtcctatgatctctcat

SEQ ID NO: 573591 - DNA, 33 bp, Homo sapien
aggtcacctggagagagaattccagaccccaag

SEQ ID NO: 573592 - DNA, 33 bp, Homo sapien
aggtcacctggagagataattccagaccccaag

SEQ ID NO: 573593 - DNA, 33 bp, Homo sapien
caaatcatagcattaaacactttagagttcaga

SEQ ID NO: 573594 - DNA, 33 bp, Homo sapien
caaatcatagcattaatcactttagagttcaga

SEQ ID NO: 573595 - DNA, 33 bp, Homo sapien
ttttccttttacaaacagactttgactgctgag

SEQ ID NO: 573596 - DNA, 33 bp, Homo sapien
ttttccttttacaaactgactttgactgctgag

SEQ ID NO: 573597 - DNA, 33 bp, Homo sapien
gtgctttggtttcctcacccagaaaatgaggac

SEQ ID NO: 573598 - DNA, 33 bp, Homo sapien
gtgctttggtttcctcgcccagaaaatgaggac

SEQ ID NO: 573599 - DNA, 33 bp, Homo sapien
gccgagaatgagagaacagtggagttgtcgtgg

SEQ ID NO: 573600 - DNA, 33 bp, Homo sapien
gccgagaatgagagaagagtggagttgtcgtgg

SEQ ID NO: 573601 - DNA, 33 bp, Homo sapien
gtgaccaagatgttcactcatccatttgttcat

SEQ ID NO: 573602 - DNA, 33 bp, Homo sapien
gtgaccaagatgttcattcatccatttgttcat

SEQ ID NO: 573603 - DNA, 33 bp, Homo sapien
tggtcaaccctaggcacggactgaaggtgaaaa

SEQ ID NO: 573604 - DNA, 33 bp, Homo sapien
tggtcaaccctaggcatggactgaaggtgaaaa

SEQ ID NO: 573605 - DNA, 33 bp, Homo sapien
gctctagacttgtcaacttcagagagtggctat

SEQ ID NO: 573606 - DNA, 33 bp, Homo sapien
gctctagacttgtcaatttcagagagtggctat

SEQ ID NO: 573607 - DNA, 33 bp, Homo sapien
tgggatgattacattacctcccttcttagtccc

SEQ ID NO: 573608 - DNA, 33 bp, Homo sapien
tgggatgattacattagctcccttcttagtccc

SEQ ID NO: 573609 - DNA, 33 bp, Homo sapien
gctcctatttaagatggagctgctccggtttac

SEQ ID NO: 573610 - DNA, 33 bp, Homo sapien
gctcctatttaagatgtagctgctccggtttac

SEQ ID NO: 573611 - DNA, 33 bp, Homo sapien
ctcaactgcaaaaggacgaggtgtaatgaggcc

SEQ ID NO: 573612 - DNA, 33 bp, Homo sapien
ctcaactgcaaaaggaggaggtgtaatgaggcc

SEQ ID NO: 573613 - DNA, 33 bp, Homo sapien
taggaggtgtctgctgcatccttgcaagcaatg

SEQ ID NO: 573614 - DNA, 33 bp, Homo sapien
taggaggtgtctgctggatccttgcaagcaatg

SEQ ID NO: 573615 - DNA, 33 bp, Homo sapien
gaggaccgctgtactacgggaaagaagacaatg

SEQ ID NO: 573616 - DNA, 33 bp, Homo sapien
gaggaccgctgtactatgggaaagaagacaatg

SEQ ID NO: 573617 - DNA, 33 bp, Homo sapien
ggagttgccaacctataaaggaagctgccatga

SEQ ID NO: 573618 - DNA, 33 bp, Homo sapien
ggagttgccaacctatgaaggaagctgccatga

SEQ ID NO: 573619 - DNA, 33 bp, Homo sapien
atgcgtcacagcctgcaatttgataaactccac

SEQ ID NO: 573620 - DNA, 33 bp, Homo sapien
atgcgtcacagcctgcgatttgataaactccac

SEQ ID NO: 573621 - DNA, 33 bp, Homo sapien
taaataaataaataaaatgctctaggtgtagaa

SEQ ID NO: 573622 - DNA, 33 bp, Homo sapien
taaataaataaataaagtgctctaggtgtagaa

SEQ ID NO: 573623 - DNA, 33 bp, Homo sapien
cattattgttttttagcactggcatttatggat

SEQ ID NO: 573624 - DNA, 33 bp, Homo sapien
cattattgttttttaggactggcatttatggat

SEQ ID NO: 573625 - DNA, 33 bp, Homo sapien
acacagctcactcatgacaagcaggaagcagag

SEQ ID NO: 573626 - DNA, 33 bp, Homo sapien
acacagctcactcatgccaagcaggaagcagag

SEQ ID NO: 573627 - DNA, 33 bp, Homo sapien
cactgaacatggatgcactctttgctggtgtgg

SEQ ID NO: 573628 - DNA, 33 bp, Homo sapien
cactgaacatggatgctctctttgctggtgtgg

SEQ ID NO: 573629 - DNA, 33 bp, Homo sapien
catgagtacaagatcaaaatgaatactttgaat

SEQ ID NO: 573630 - DNA, 33 bp, Homo sapien
catgagtacaagatcataatgaatactttgaat

SEQ ID NO: 573631 - DNA, 33 bp, Homo sapien
aggcccacgttatatacgagaacaatggaacaa

SEQ ID NO: 573632 - DNA, 33 bp, Homo sapien
aggcccacgttatatatgagaacaatggaacaa

SEQ ID NO: 573633 - DNA, 33 bp, Homo sapien
caatgagagtataccaaggtgtctaaactgaca

SEQ ID NO: 573634 - DNA, 33 bp, Homo sapien
caatgagagtataccagggtgtctaaactgaca

SEQ ID NO: 573635 - DNA, 33 bp, Homo sapien; identical to SEQ ID NO: 573633

SEQ ID NO: 573636 - DNA, 33 bp, Homo sapien; identical to SEQ ID NO: 573634

SEQ ID NO: 573637 - DNA, 33 bp, Homo sapien
ttgaactagttgccaacatttgcattttaattc

SEQ ID NO: 573638 - DNA, 33 bp, Homo sapien
ttgaactagttgccaatatttgcattttaattc

SEQ ID NO: 573639 - DNA, 33 bp, Homo sapien
tcctgttctttctaacaattatgttacagcctc

SEQ ID NO: 573640 - DNA, 33 bp, Homo sapien
tcctgttctttctaacgattatgttacagcctc

SEQ ID NO: 573641 - DNA, 33 bp, Homo sapien
taccactttcctatgacgatttggaaatgtcct

SEQ ID NO: 573642 - DNA, 33 bp, Homo sapien
taccactttcctatgatgatttggaaatgtcct

SEQ ID NO: 573643 - DNA, 33 bp, Homo sapien
gaaagttaaccagcaacagcgttggggctaggg

SEQ ID NO: 573644 - DNA, 33 bp, Homo sapien
gaaagttaaccagcaatagcgttggggctaggg

SEQ ID NO: 573645 - DNA, 33 bp, Homo sapien
acaaagcccctgttaaatgtaaggccctgggct

SEQ ID NO: 573646 - DNA, 33 bp, Homo sapien
acaaagcccctgttaagtgtaaggccctgggct

SEQ ID NO: 573647 - DNA, 33 bp, Homo sapien
gagtgcatagtgcagacagtgaaacgccgtcag

SEQ ID NO: 573648 - DNA, 33 bp, Homo sapien
gagtgcatagtgcagatagtgaaacgccgtcag

SEQ ID NO: 573649 - DNA, 33 bp, Homo sapien
gagttagttggcacccccaggaatgggctcaca

SEQ ID NO: 573650 - DNA, 33 bp, Homo sapien
gagttagttggcaccctcaggaatgggctcaca

SEQ ID NO: 573651 - DNA, 33 bp, Homo sapien
cttggggacagtaacccgcttcattaaaacagc

SEQ ID NO: 573652 - DNA, 33 bp, Homo sapien
cttggggacagtaacctgcttcattaaaacagc

SEQ ID NO: 573653 - DNA, 33 bp, Homo sapien
gtgaaccaagtcactcaaaaagcagctggacca

SEQ ID NO: 573654 - DNA, 33 bp, Homo sapien
gtgaaccaagtcactccaaaagcagctggacca

SEQ ID NO: 573655 - DNA, 33 bp, Homo sapien
ctgtgtttgagcttccagacaaacttcatatct

SEQ ID NO: 573656 - DNA, 33 bp, Homo sapien
ctgtgtttgagcttccggacaaacttcatatct

SEQ ID NO: 573657 - DNA, 33 bp, Homo sapien
ccctctgcagatctgccatctgcctcctgctgg

SEQ ID NO: 573658 - DNA, 33 bp, Homo sapien
ccctctgcagatctgctatctgcctcctgctgg

SEQ ID NO: 573659 - DNA, 33 bp, Homo sapien
ggaaatgagtaacgtgcatgtcttagggtagag

SEQ ID NO: 573660 - DNA, 33 bp, Homo sapien
ggaaatgagtaacgtggatgtcttagggtagag

SEQ ID NO: 573661 - DNA, 33 bp, Homo sapien
acagagactacaacaccctgaaacaaattgcaa

SEQ ID NO: 573662 - DNA, 33 bp, Homo sapien
acagagactacaacactctgaaacaaattgcaa

SEQ ID NO: 573663 - DNA, 33 bp, Homo sapien
ccactcacacctggagaaaacgcctcatggaga

SEQ ID NO: 573664 - DNA, 33 bp, Homo sapien
ccactcacacctggaggaaacgcctcatggaga

SEQ ID NO: 573665 - DNA, 33 bp, Homo sapien
ggttatttcacacaaacgactctggcttcttta

SEQ ID NO: 573666 - DNA, 33 bp, Homo sapien
ggttatttcacacaaatgactctggcttcttta

SEQ ID NO: 573667 - DNA, 33 bp, Homo sapien
attcatacatagatcaatgaaggagaatgaaga

SEQ ID NO: 573668 - DNA, 33 bp, Homo sapien
attcatacatagatcagtgaaggagaatgaaga

SEQ ID NO: 573669 - DNA, 33 bp, Homo sapien
aatgtcacaaagcaacaaaggtgcatagccagg

SEQ ID NO: 573670 - DNA, 33 bp, Homo sapien
aatgtcacaaagcaacgaaggtgcatagccagg

SEQ ID NO: 573671 - DNA, 33 bp, Homo sapien
agtctgaggttacccaatcaacagctttcttcc

SEQ ID NO: 573672 - DNA, 33 bp, Homo sapien
agtctgaggttacccagtcaacagctttcttcc

SEQ ID NO: 573673 - DNA, 33 bp, Homo sapien
tttcttctggaaaacacggcaaatatgcccatc

SEQ ID NO: 573674 - DNA, 33 bp, Homo sapien
tttcttctggaaaacatggcaaatatgcccatc

SEQ ID NO: 573675 - DNA, 33 bp, Homo sapien
tggaggagaaatgtgacctaagacccagaggat

SEQ ID NO: 573676 - DNA, 33 bp, Homo sapien
tggaggagaaatgtgagctaagacccagaggat

SEQ ID NO: 573677 - DNA, 33 bp, Homo sapien
ccattcttccagccacaagagcgagcattataa

SEQ ID NO: 573678 - DNA, 33 bp, Homo sapien
ccattcttccagccaccagagcgagcattataa

SEQ ID NO: 573679 - DNA, 33 bp, Homo sapien
gtattgaaaggaaccacgtgccactcgtgagac

SEQ ID NO: 573680 - DNA, 33 bp, Homo sapien
gtattgaaaggaaccatgtgccactcgtgagac

SEQ ID NO: 573681 - DNA, 33 bp, Homo sapien
cacacacactcactacagcgttagagaagcagg

SEQ ID NO: 573682 - DNA, 33 bp, Homo sapien
cacacacactcactacggcgttagagaagcagg

SEQ ID NO: 573683 - DNA, 33 bp, Homo sapien
accttctgtgtgacagcactcttgcctgcgtga

SEQ ID NO: 573684 - DNA, 33 bp, Homo sapien
accttctgtgtgacaggactcttgcctgcgtga

SEQ ID NO: 573685 - DNA, 33 bp, Homo sapien
tcctagttccgctgctgaattcttgaacctgat

SEQ ID NO: 573686 - DNA, 33 bp, Homo sapien
tcctagttccgctgcttaattcttgaacctgat

SEQ ID NO: 573687 - DNA, 33 bp, Homo sapien
gtgaaccagtgaatcaatcaatgagggaatctc

SEQ ID NO: 573688 - DNA, 33 bp, Homo sapien
gtgaaccagtgaatcagtcaatgagggaatctc

SEQ ID NO: 573689 - DNA, 33 bp, Homo sapien
gatgggcagcatctcaatcaatgtctgttgact

SEQ ID NO: 573690 - DNA, 33 bp, Homo sapien
gatgggcagcatctcagtcaatgtctgttgact

SEQ ID NO: 573691 - DNA, 33 bp, Homo sapien
aagaaagaaatgcccccggctgctttccactga

SEQ ID NO: 573692 - DNA, 33 bp, Homo sapien
aagaaagaaatgccccgggctgctttccactga

SEQ ID NO: 573693 - DNA, 33 bp, Homo sapien
gttacccaaaagctgacaaggagcggactctgc

SEQ ID NO: 573694 - DNA, 33 bp, Homo sapien
gttacccaaaagctgagaaggagcggactctgc

SEQ ID NO: 573695 - DNA, 33 bp, Homo sapien
aatggtgcctgacatacagtaattgctcaataa

SEQ ID NO: 573696 - DNA, 33 bp, Homo sapien
aatggtgcctgacatagagtaattgctcaataa

SEQ ID NO: 573697 - DNA, 33 bp, Homo sapien
ctgcatgtgattctcacgagggctggggagtgt

SEQ ID NO: 573698 - DNA, 33 bp, Homo sapien
ctgcatgtgattctcatgagggctggggagtgt

SEQ ID NO: 573699 - DNA, 33 bp, Homo sapien
ttgcacaaattcctgacacgtgctgataaatca

SEQ ID NO: 573700 - DNA, 33 bp, Homo sapien
ttgcacaaattcctgatacgtgctgataaatca

SEQ ID NO: 573701 - DNA, 33 bp, Homo sapien
agaaaattaaaatgaacaaagggagctgatatc

SEQ ID NO: 573702 - DNA, 33 bp, Homo sapien
agaaaattaaaatgaagaaagggagctgatatc

SEQ ID NO: 573703 - DNA, 33 bp, Homo sapien
gcctccaaatccaggccgatgggagagatggct

SEQ ID NO: 573704 - DNA, 33 bp, Homo sapien
gcctccaaatccaggctgatgggagagatggct

SEQ ID NO: 573705 - DNA, 33 bp, Homo sapien
tctgaacctcagtgaacgatcagttaaagggag

SEQ ID NO: 573706 - DNA, 33 bp, Homo sapien
tctgaacctcagtgaatgatcagttaaagggag

SEQ ID NO: 573707 - DNA, 33 bp, Homo sapien
agttgtggacgggttacgtcaggctggtagaca

SEQ ID NO: 573708 - DNA, 33 bp, Homo sapien
agttgtggacgggttatgtcaggctggtagaca

SEQ ID NO: 573709 - DNA, 33 bp, Homo sapien
tggggcacgggagaggcagaagaaatccagtcc

SEQ ID NO: 573710 - DNA, 33 bp, Homo sapien
tggggcacgggagaggtagaagaaatccagtcc

SEQ ID NO: 573711 - DNA, 33 bp, Homo sapien
tgaggaaacaaaatcaatacaaaagctctcata

SEQ ID NO: 573712 - DNA, 33 bp, Homo sapien
tgaggaaacaaaatcagtacaaaagctctcata

SEQ ID NO: 573713 - DNA, 33 bp, Homo sapien
agccagagccagaaaacggagtgccttccttcc

SEQ ID NO: 573714 - DNA, 33 bp, Homo sapien
agccagagccagaaaatggagtgccttccttcc

SEQ ID NO: 573715 - DNA, 33 bp, Homo sapien
ttcctattgcatccagaaacactggccactgag

SEQ ID NO: 573716 - DNA, 33 bp, Homo sapien
ttcctattgcatccagcaacactggccactgag

SEQ ID NO: 573717 - DNA, 33 bp, Homo sapien
aacagaaaccaagccacgtacttttaagcaaaa

SEQ ID NO: 573718 - DNA, 33 bp, Homo sapien
aacagaaaccaagccatgtacttttaagcaaaa

SEQ ID NO: 573719 - DNA, 33 bp, Homo sapien
aacacggaaagacgcaaaagcatcaaaaaaaga

SEQ ID NO: 573720 - DNA, 33 bp, Homo sapien
aacacggaaagacgcagaagcatcaaaaaaaga

SEQ ID NO: 573721 - DNA, 33 bp, Homo sapien
tcttcctagtgtcctccgagagacagccacggt

SEQ ID NO: 573722 - DNA, 33 bp, Homo sapien
tcttcctagtgtcctctgagagacagccacggt

SEQ ID NO: 573723 - DNA, 33 bp, Homo sapien
gtgtttaacaagttctcaatcaagctgatactt

SEQ ID NO: 573724 - DNA, 33 bp, Homo sapien
gtgtttaacaagttctgaatcaagctgatactt

SEQ ID NO: 573725 - DNA, 33 bp, Homo sapien
ttagcgacccgtagaagtgaaaacgtgcatcat

SEQ ID NO: 573726 - DNA, 33 bp, Homo sapien
ttagcgacccgtagaattgaaaacgtgcatcat

SEQ ID NO: 573727 - DNA, 33 bp, Homo sapien
gcccccttctacgacaaggtctgcaatgttttc

SEQ ID NO: 573728 - DNA, 33 bp, Homo sapien
gcccccttctacgacacggtctgcaatgttttc

SEQ ID NO: 573729 - DNA, 33 bp, Homo sapien
ctggatgaaaggacacaggcgtgattgaactgg

SEQ ID NO: 573730 - DNA, 33 bp, Homo sapien
ctggatgaaaggacacgggcgtgattgaactgg

SEQ ID NO: 573731 - DNA, 33 bp, Homo sapien
acatctaagaggttaccccaccaagtgagatga

SEQ ID NO: 573732 - DNA, 33 bp, Homo sapien
acatctaagaggttactccaccaagtgagatga

SEQ ID NO: 573733 - DNA, 33 bp, Homo sapien
atgtgaataggaagataacgtcgacatttattg

SEQ ID NO: 573734 - DNA, 33 bp, Homo sapien
atgtgaataggaagattacgtcgacatttattg

SEQ ID NO: 573735 - DNA, 33 bp, Homo sapien
atgcagtgcgtgtctacgtacgaatgcaccagt

SEQ ID NO: 573736 - DNA, 33 bp, Homo sapien
atgcagtgcgtgtctatgtacgaatgcaccagt

SEQ ID NO: 573737 - DNA, 33 bp, Homo sapien
ctgcattcagcactaaagtttgcaccctttact

SEQ ID NO: 573738 - DNA, 33 bp, Homo sapien
ctgcattcagcactaaggtttgcaccctttact

SEQ ID NO: 573739 - DNA, 33 bp, Homo sapien
cccaaactcacaccgaactcttccccacttaat

SEQ ID NO: 573740 - DNA, 33 bp, Homo sapien
cccaaactcacaccgagctcttccccacttaat

SEQ ID NO: 573741 - DNA, 33 bp, Homo sapien
ttgtttacagtaaggacgtttgaaacaagtgtc

SEQ ID NO: 573742 - DNA, 33 bp, Homo sapien
ttgtttacagtaaggatgtttgaaacaagtgtc

SEQ ID NO: 573743 - DNA, 33 bp, Homo sapien
ttaggagatacagtgcccttctagcaaggagta

SEQ ID NO: 573744 - DNA, 33 bp, Homo sapien
ttaggagatacagtgctcttctagcaaggagta

SEQ ID NO: 573745 - DNA, 33 bp, Homo sapien
gctgcttacaagctctaagacctgaagtaaatt

SEQ ID NO: 573746 - DNA, 33 bp, Homo sapien
gctgcttacaagctcttagacctgaagtaaatt

SEQ ID NO: 573747 - DNA, 33 bp, Homo sapien
atacgactgctagctcaaaacatgtacacgaaa

SEQ ID NO: 573748 - DNA, 33 bp, Homo sapien
atacgactgctagctcgaaacatgtacacgaaa

SEQ ID NO: 573749 - DNA, 33 bp, Homo sapien
cagtaagcacttaatacgtgttgcagctggttg

SEQ ID NO: 573750 - DNA, 33 bp, Homo sapien
cagtaagcacttaatatgtgttgcagctggttg

SEQ ID NO: 573751 - DNA, 33 bp, Homo sapien
acagacaaaagctctccccctcaccgtgtgtgc

SEQ ID NO: 573752 - DNA, 33 bp, Homo sapien
acagacaaaagctctctccctcaccgtgtgtgc

SEQ ID NO: 573753 - DNA, 33 bp, Homo sapien
ctgggatttgaagctagctctgtctgaccccag

SEQ ID NO: 573754 - DNA, 33 bp, Homo sapien
ctgggatttgaagctatctctgtctgaccccag

SEQ ID NO: 573755 - DNA, 33 bp, Homo sapien
aggctaaaagagtgaacctagagtccgggtcat

SEQ ID NO: 573756 - DNA, 33 bp, Homo sapien
aggctaaaagagtgaagctagagtccgggtcat

SEQ ID NO: 573757 - DNA, 33 bp, Homo sapien
ggacctttcgcacatcacagggtgttggagtgg

SEQ ID NO: 573758 - DNA, 33 bp, Homo sapien
ggacctttcgcacatcgcagggtgttggagtgg

SEQ ID NO: 573759 - DNA, 33 bp, Homo sapien
caaacaccaatgccaaaagaagccatgcaagga

SEQ ID NO: 573760 - DNA, 33 bp, Homo sapien
caaacaccaatgccaacagaagccatgcaagga

SEQ ID NO: 573761 - DNA, 33 bp, Homo sapien
taaagacattttccaacggcaggaaatgtggag

SEQ ID NO: 573762 - DNA, 33 bp, Homo sapien
taaagacattttccaatggcaggaaatgtggag

SEQ ID NO: 573763 - DNA, 33 bp, Homo sapien
aggaaatacgtgacaacgactggatagctcgtc

SEQ ID NO: 573764 - DNA, 33 bp, Homo sapien
aggaaatacgtgacaatgactggatagctcgtc

SEQ ID NO: 573765 - DNA, 33 bp, Homo sapien
gcacagccttatcacacagtattacctggcccc

SEQ ID NO: 573766 - DNA, 33 bp, Homo sapien
gcacagccttatcacatagtattacctggcccc

SEQ ID NO: 573767 - DNA, 33 bp, Homo sapien
cctccatcttcagctacgttctgttgagatgtc

SEQ ID NO: 573768 - DNA, 33 bp, Homo sapien
cctccatcttcagctatgttctgttgagatgtc

SEQ ID NO: 573769 - DNA, 33 bp, Homo sapien
agcaaatgtaaagtgtcaaggagataatgtgaa

SEQ ID NO: 573770 - DNA, 33 bp, Homo sapien
agcaaatgtaaagtgttaaggagataatgtgaa

SEQ ID NO: 573771 - DNA, 33 bp, Homo sapien
gttttcatcagtataacgggaacgatcatggta

SEQ ID NO: 573772 - DNA, 33 bp, Homo sapien
gttttcatcagtataatgggaacgatcatggta

SEQ ID NO: 573773 - DNA, 33 bp, Homo sapien
aggcttttggaacaggaataaataagcaatgtt

SEQ ID NO: 573774 - DNA, 33 bp, Homo sapien
aggcttttggaacagggataaataagcaatgtt

SEQ ID NO: 573775 - DNA, 33 bp, Homo sapien
ccttgtgccaggggacgaagcaggtcttttcta

SEQ ID NO: 573776 - DNA, 33 bp, Homo sapien
ccttgtgccaggggactaagcaggtcttttcta

SEQ ID NO: 573777 - DNA, 33 bp, Homo sapien
catctataagtgtcggccacaagcatctactac

SEQ ID NO: 573778 - DNA, 33 bp, Homo sapien
catctataagtgtcggtcacaagcatctactac

SEQ ID NO: 573779 - DNA, 33 bp, Homo sapien
agagcagctggacaacccaaatcaacgctggac

SEQ ID NO: 573780 - DNA, 33 bp, Homo sapien
agagcagctggacaactcaaatcaacgctggac

SEQ ID NO: 573781 - DNA, 33 bp, Homo sapien
atgtgaaactgaagcagaggaaaatacttacat

SEQ ID NO: 573782 - DNA, 33 bp, Homo sapien
atgtgaaactgaagcataggaaaatacttacat

SEQ ID NO: 573783 - DNA, 33 bp, Homo sapien
tagataacctgaaaacccttgctcacagatgca

SEQ ID NO: 573784 - DNA, 33 bp, Homo sapien
tagataacctgaaaacgcttgctcacagatgca

SEQ ID NO: 573785 - DNA, 33 bp, Homo sapien
catgcccgaagttagacaggcttagatgaccca

SEQ ID NO: 573786 - DNA, 33 bp, Homo sapien
catgcccgaagttagataggcttagatgaccca

SEQ ID NO: 573787 - DNA, 33 bp, Homo sapien
tcaaatgactcaagcaatatataaaacacagat

SEQ ID NO: 573788 - DNA, 33 bp, Homo sapien
tcaaatgactcaagcagtatataaaacacagat

SEQ ID NO: 573789 - DNA, 33 bp, Homo sapien
gtgtaccaaggcagaaagtatcctactgatatg

SEQ ID NO: 573790 - DNA, 33 bp, Homo sapien
gtgtaccaaggcagaaggtatcctactgatatg

SEQ ID NO: 573791 - DNA, 33 bp, Homo sapien
tccaactgaggtttgcagagtttaagctcagca

SEQ ID NO: 573792 - DNA, 33 bp, Homo sapien
tccaactgaggtttgcggagtttaagctcagca

SEQ ID NO: 573793 - DNA, 33 bp, Homo sapien
aatttgcatctgcccccaatcctcaacagcagc

SEQ ID NO: 573794 - DNA, 33 bp, Homo sapien
aatttgcatctgcccctaatcctcaacagcagc

SEQ ID NO: 573795 - DNA, 33 bp, Homo sapien
cagatatttgtgcaacagtgttcatagcagcat

SEQ ID NO: 573796 - DNA, 33 bp, Homo sapien
cagatatttgtgcaacggtgttcatagcagcat

SEQ ID NO: 573797 - DNA, 33 bp, Homo sapien
gatttctttgcaagcacggacctggtttcttta

SEQ ID NO: 573798 - DNA, 33 bp, Homo sapien
gatttctttgcaagcatggacctggtttcttta

SEQ ID NO: 573799 - DNA, 33 bp, Homo sapien
aaaatagggtagcagggccaaatcaaaatgaga

SEQ ID NO: 573800 - DNA, 33 bp, Homo sapien
aaaatagggtagcaggtccaaatcaaaatgaga

SEQ ID NO: 573801 - DNA, 33 bp, Homo sapien
tccttctaataatatcaacatacagaaagcttt

SEQ ID NO: 573802 - DNA, 33 bp, Homo sapien
tccttctaataatatcgacatacagaaagcttt

SEQ ID NO: 573803 - DNA, 33 bp, Homo sapien
tacaacccaagtcacaatggcttgagcaaagaa

SEQ ID NO: 573804 - DNA, 33 bp, Homo sapien
tacaacccaagtcacattggcttgagcaaagaa

SEQ ID NO: 573805 - DNA, 33 bp, Homo sapien
atgactttttcttttgcagcacgtattgtacta

SEQ ID NO: 573806 - DNA, 33 bp, Homo sapien
atgactttttcttttggagcacgtattgtacta

SEQ ID NO: 573807 - DNA, 33 bp, Homo sapien
ttattatcactgggaaaatgcaaattaaagcca

SEQ ID NO: 573808 - DNA, 33 bp, Homo sapien
ttattatcactgggaagatgcaaattaaagcca

SEQ ID NO: 573809 - DNA, 33 bp, Homo sapien
gcctgcttggattcaccacccagctctgacatg

SEQ ID NO: 573810 - DNA, 33 bp, Homo sapien
gcctgcttggattcacgacccagctctgacatg

SEQ ID NO: 573811 - DNA, 33 bp, Homo sapien
tttcttgcggccaccacgtaagaagtgcttttc

SEQ ID NO: 573812 - DNA, 33 bp, Homo sapien
tttcttgcggccaccatgtaagaagtgcttttc

SEQ ID NO: 573813 - DNA, 33 bp, Homo sapien
gagctagagatggagacatactgacaacagcat

SEQ ID NO: 573814 - DNA, 33 bp, Homo sapien
gagctagagatggagatatactgacaacagcat

SEQ ID NO: 573815 - DNA, 33 bp, Homo sapien
atttttctttccttcacgtctgtatttctggag

SEQ ID NO: 573816 - DNA, 33 bp, Homo sapien
atttttctttccttcatgtctgtatttctggag

SEQ ID NO: 573817 - DNA, 33 bp, Homo sapien
cacctgacatccccaccggtccagagtggagac

SEQ ID NO: 573818 - DNA, 33 bp, Homo sapien
cacctgacatccccactggtccagagtggagac

SEQ ID NO: 573819 - DNA, 33 bp, Homo sapien
ctgggatcatgcccacaaatctgttcctcccac

SEQ ID NO: 573820 - DNA, 33 bp, Homo sapien
ctgggatcatgcccacgaatctgttcctcccac

SEQ ID NO: 573821 - DNA, 33 bp, Homo sapien
ttaatcagtgcttctcaatgaaggcagtaccac

SEQ ID NO: 573822 - DNA, 33 bp, Homo sapien
ttaatcagtgcttctccatgaaggcagtaccac

SEQ ID NO: 573823 - DNA, 33 bp, Homo sapien
gacagaaaaatgtaagacaagcccttgatggga

SEQ ID NO: 573824 - DNA, 33 bp, Homo sapien
gacagaaaaatgtaagccaagcccttgatggga

SEQ ID NO: 573825 - DNA, 33 bp, Homo sapien
atcatactgtggccaacaaggtgtgatagaggc

SEQ ID NO: 573826 - DNA, 33 bp, Homo sapien
atcatactgtggccaagaaggtgtgatagaggc

SEQ ID NO: 573827 - DNA, 33 bp, Homo sapien
ttggtttgtagatgcaataaataagaatgtaat

SEQ ID NO: 573828 - DNA, 33 bp, Homo sapien
ttggtttgtagatgcagtaaataagaatgtaat

SEQ ID NO: 573829 - DNA, 33 bp, Homo sapien
cccaaactcaaatgtaagttttccttccaatca

SEQ ID NO: 573830 - DNA, 33 bp, Homo sapien
cccaaactcaaatgtaggttttccttccaatca

SEQ ID NO: 573831 - DNA, 33 bp, Homo sapien
agtgcagtgccttgataatagctcactagagcc

SEQ ID NO: 573832 - DNA, 33 bp, Homo sapien
agtgcagtgccttgatcatagctcactagagcc

SEQ ID NO: 573833 - DNA, 33 bp, Homo sapien
gctggacatggattacgactttcgcactttaac

SEQ ID NO: 573834 - DNA, 33 bp, Homo sapien
gctggacatggattactactttcgcactttaac

SEQ ID NO: 573835 - DNA, 33 bp, Homo sapien
cattttaggtttttcaatcagtatgaaaattca

SEQ ID NO: 573836 - DNA, 33 bp, Homo sapien
cattttaggtttttcagtcagtatgaaaattca

SEQ ID NO: 573837 - DNA, 33 bp, Homo sapien
cttccgttctgacccactatttgcaggtctggg

SEQ ID NO: 573838 - DNA, 33 bp, Homo sapien
cttccgttctgacccattatttgcaggtctggg

SEQ ID NO: 573839 - DNA, 33 bp, Homo sapien
tttcagactctgccccaaagcaaaataagaggg

SEQ ID NO: 573840 - DNA, 33 bp, Homo sapien
tttcagactctgccccgaagcaaaataagaggg

SEQ ID NO: 573841 - DNA, 33 bp, Homo sapien
ttccctgggatatcacaaccactactgattagg

SEQ ID NO: 573842 - DNA, 33 bp, Homo sapien
ttccctgggatatcaccaccactactgattagg

SEQ ID NO: 573843 - DNA, 33 bp, Homo sapien
atcatttagattagtcaccaaattgagaaatcc

SEQ ID NO: 573844 - DNA, 33 bp, Homo sapien
atcatttagattagtcgccaaattgagaaatcc

SEQ ID NO: 573845 - DNA, 33 bp, Homo sapien
ctccttttttagaggacgaccaacttaggctgg

SEQ ID NO: 573846 - DNA, 33 bp, Homo sapien
ctccttttttagaggatgaccaacttaggctgg

SEQ ID NO: 573847 - DNA, 33 bp, Homo sapien
ggtagccatcatgagaacttaactgaatctctt

SEQ ID NO: 573848 - DNA, 33 bp, Homo sapien
ggtagccatcatgagaccttaactgaatctctt

SEQ ID NO: 573849 - DNA, 33 bp, Homo sapien
ctttttgtctgtagaacagggacataaacaggt

SEQ ID NO: 573850 - DNA, 33 bp, Homo sapien
ctttttgtctgtagaatagggacataaacaggt

SEQ ID NO: 573851 - DNA, 33 bp, Homo sapien
tgaatattgatgtctcaaatttttttctccagg

SEQ ID NO: 573852 - DNA, 33 bp, Homo sapien
tgaatattgatgtctcgaatttttttctccagg

SEQ ID NO: 573853 - DNA, 33 bp, Homo sapien
agttttagcgtggaaacagtacttctcgctggc

SEQ ID NO: 573854 - DNA, 33 bp, Homo sapien
agttttagcgtggaaagagtacttctcgctggc

SEQ ID NO: 573855 - DNA, 33 bp, Homo sapien
accatctaggtttcaaaaccccactctgccacc

SEQ ID NO: 573856 - DNA, 33 bp, Homo sapien
accatctaggtttcaagaccccactctgccacc

SEQ ID NO: 573857 - DNA, 33 bp, Homo sapien
gtgtaataatgaccgacgtgggtctctcaacag

SEQ ID NO: 573858 - DNA, 33 bp, Homo sapien
gtgtaataatgaccgatgtgggtctctcaacag

SEQ ID NO: 573859 - DNA, 33 bp, Homo sapien
ttacgaaaacaataaacagccttgtggtttaag

SEQ ID NO: 573860 - DNA, 33 bp, Homo sapien
ttacgaaaacaataaatagccttgtggtttaag

SEQ ID NO: 573861 - DNA, 33 bp, Homo sapien
acggccatatcgtctgaactttggagaatggga

SEQ ID NO: 573862 - DNA, 33 bp, Homo sapien
acggccatatcgtctgtactttggagaatggga

SEQ ID NO: 573863 - DNA, 33 bp, Homo sapien
caaagatgttcttccaacctgagcggatgttgg

SEQ ID NO: 573864 - DNA, 33 bp, Homo sapien
caaagatgttcttccagcctgagcggatgttgg

SEQ ID NO: 573865 - DNA, 33 bp, Homo sapien
gtttaaaatgccccccaaagcatagtgctgaat

SEQ ID NO: 573866 - DNA, 33 bp, Homo sapien
gtttaaaatgcccccccaagcatagtgctgaat

SEQ ID NO: 573867 - DNA, 33 bp, Homo sapien
gctgggtagtattctacgtgcagaaaggctgtg

SEQ ID NO: 573868 - DNA, 33 bp, Homo sapien
gctgggtagtattctatgtgcagaaaggctgtg

SEQ ID NO: 573869 - DNA, 33 bp, Homo sapien
aactatgtgcaaagataactcgatgcctaaaaa

SEQ ID NO: 573870 - DNA, 33 bp, Homo sapien
aactatgtgcaaagatgactcgatgcctaaaaa

SEQ ID NO: 573871 - DNA, 33 bp, Homo sapien
agttggcgttcaataaatgaatgaattgatatt

SEQ ID NO: 573872 - DNA, 33 bp, Homo sapien
agttggcgttcaataagtgaatgaattgatatt

SEQ ID NO: 573873 - DNA, 33 bp, Homo sapien
ggtgttatactaagaaaagcttaaaggtcaaat

SEQ ID NO: 573874 - DNA, 33 bp, Homo sapien
ggtgttatactaagaagagcttaaaggtcaaat

SEQ ID NO: 573875 - DNA, 33 bp, Homo sapien
caaaaatccgaaacacaattctgaacaggtcct

SEQ ID NO: 573876 - DNA, 33 bp, Homo sapien
caaaaatccgaaacacgattctgaacaggtcct

SEQ ID NO: 573877 - DNA, 33 bp, Homo sapien
gtgtgaatgtatatgtcaatgtatatggaatgt

SEQ ID NO: 573878 - DNA, 33 bp, Homo sapien
gtgtgaatgtatatgtgaatgtatatggaatgt

SEQ ID NO: 573879 - DNA, 33 bp, Homo sapien
ccattcctcaggctgccaaaaatgtgtctgaat

SEQ ID NO: 573880 - DNA, 33 bp, Homo sapien
ccattcctcaggctgcgaaaaatgtgtctgaat

SEQ ID NO: 573881 - DNA, 33 bp, Homo sapien
taagagatatgcaaaccactctcacaaacaaaa

SEQ ID NO: 573882 - DNA, 33 bp, Homo sapien
taagagatatgcaaacgactctcacaaacaaaa

SEQ ID NO: 573883 - DNA, 33 bp, Homo sapien
gctagggctgaactcaatcaatgtctgtagcac

SEQ ID NO: 573884 - DNA, 33 bp, Homo sapien
gctagggctgaactcagtcaatgtctgtagcac

SEQ ID NO: 573885 - DNA, 33 bp, Homo sapien
ttttaaatcggaataaccctggaatatggaaga

SEQ ID NO: 573886 - DNA, 33 bp, Homo sapien
ttttaaatcggaataagcctggaatatggaaga

SEQ ID NO: 573887 - DNA, 33 bp, Homo sapien
actaacatttcccaaacagttcacttaaaatgg

SEQ ID NO: 573888 - DNA, 33 bp, Homo sapien
actaacatttcccaaagagttcacttaaaatgg

SEQ ID NO: 573889 - DNA, 33 bp, Homo sapien
atttttcagtttaacaatcttcatccttcaaga

SEQ ID NO: 573890 - DNA, 33 bp, Homo sapien
atttttcagtttaacagtcttcatccttcaaga

SEQ ID NO: 573891 - DNA, 33 bp, Homo sapien
ccagtacctggacttaccttcacaacatgaata

SEQ ID NO: 573892 - DNA, 33 bp, Homo sapien
ccagtacctggacttatcttcacaacatgaata

SEQ ID NO: 573893 - DNA, 33 bp, Homo sapien
ggagaccaaggaaagaagcataatctaccctca

SEQ ID NO: 573894 - DNA, 33 bp, Homo sapien
ggagaccaaggaaagaggcataatctaccctca

SEQ ID NO: 573895 - DNA, 33 bp, Homo sapien
gtgctggtcaaagatacctgaatgttttcataa

SEQ ID NO: 573896 - DNA, 33 bp, Homo sapien
gtgctggtcaaagatatctgaatgttttcataa

SEQ ID NO: 573897 - DNA, 33 bp, Homo sapien
aaagccagctaaacccaacaacatctgaagttg

SEQ ID NO: 573898 - DNA, 33 bp, Homo sapien
aaagccagctaaacccgacaacatctgaagttg

SEQ ID NO: 573899 - DNA, 33 bp, Homo sapien
ttgagcttgtcactgcagattacccttggcaac

SEQ ID NO: 573900 - DNA, 33 bp, Homo sapien
ttgagcttgtcactgcggattacccttggcaac

SEQ ID NO: 573901 - DNA, 33 bp, Homo sapien
gtgattattattcaaccgagttagggctaaggg

SEQ ID NO: 573902 - DNA, 33 bp, Homo sapien
gtgattattattcaactgagttagggctaaggg

SEQ ID NO: 573903 - DNA, 33 bp, Homo sapien
gtggcagaaaaaagatcagctgtggtaattagg

SEQ ID NO: 573904 - DNA, 33 bp, Homo sapien
gtggcagaaaaaagatgagctgtggtaattagg

SEQ ID NO: 573905 - DNA, 33 bp, Homo sapien
agcaacatgattcaaaaaaaatgggcaagactt

SEQ ID NO: 573906 - DNA, 33 bp, Homo sapien
agcaacatgattcaaacaaaatgggcaagactt

SEQ ID NO: 573907 - DNA, 33 bp, Homo sapien
cagggattccaggtaactgtctggcctgagctg

SEQ ID NO: 573908 - DNA, 33 bp, Homo sapien
cagggattccaggtaattgtctggcctgagctg

SEQ ID NO: 573909 - DNA, 33 bp, Homo sapien
tactgacacaatcaacaatctaacccagagcct

SEQ ID NO: 573910 - DNA, 33 bp, Homo sapien
tactgacacaatcaacgatctaacccagagcct

SEQ ID NO: 573911 - DNA, 33 bp, Homo sapien
ctgtaatgttattcaccgcatgaacttggtcaa

SEQ ID NO: 573912 - DNA, 33 bp, Homo sapien
ctgtaatgttattcactgcatgaacttggtcaa

SEQ ID NO: 573913 - DNA, 33 bp, Homo sapien
ggagccctggcaactaaaatcccacctctggcc

SEQ ID NO: 573914 - DNA, 33 bp, Homo sapien
ggagccctggcaactacaatcccacctctggcc

SEQ ID NO: 573915 - DNA, 33 bp, Homo sapien
ccccgcccattatttcactaaactcaacatgcc

SEQ ID NO: 573916 - DNA, 33 bp, Homo sapien
ccccgcccattatttcgctaaactcaacatgcc

SEQ ID NO: 573917 - DNA, 33 bp, Homo sapien
agctttacgctgcaaaaatgtttatgagtatta

SEQ ID NO: 573918 - DNA, 33 bp, Homo sapien
agctttacgctgcaaagatgtttatgagtatta

SEQ ID NO: 573919 - DNA, 33 bp, Homo sapien
aagttgctctcttttaggtttcagccagaaagt

SEQ ID NO: 573920 - DNA, 33 bp, Homo sapien
aagttgctctcttttatgtttcagccagaaagt

SEQ ID NO: 573921 - DNA, 33 bp, Homo sapien
ctttcttgtgtctaaaagatctctcttacaatg

SEQ ID NO: 573922 - DNA, 33 bp, Homo sapien
ctttcttgtgtctaaaggatctctcttacaatg

SEQ ID NO: 573923 - DNA, 33 bp, Homo sapien
tatcacctggttctgagacctaccaaccttctg

SEQ ID NO: 573924 - DNA, 33 bp, Homo sapien
tatcacctggttctgatacctaccaaccttctg

SEQ ID NO: 573925 - DNA, 33 bp, Homo sapien
aagatgtaggcagataggaagatcttgaaagcc

SEQ ID NO: 573926 - DNA, 33 bp, Homo sapien
aagatgtaggcagatatgaagatcttgaaagcc

SEQ ID NO: 573927 - DNA, 33 bp, Homo sapien
taggttgacttaccaaaggctggtttgctaaat

SEQ ID NO: 573928 - DNA, 33 bp, Homo sapien
taggttgacttaccaatggctggtttgctaaat

SEQ ID NO: 573929 - DNA, 33 bp, Homo sapien
tctcagaaagcttccaagaagagaccatgtgtt

SEQ ID NO: 573930 - DNA, 33 bp, Homo sapien
tctcagaaagcttccaggaagagaccatgtgtt

SEQ ID NO: 573931 - DNA, 33 bp, Homo sapien
accccaggctgcataccggttccagtccatggc

SEQ ID NO: 573932 - DNA, 33 bp, Homo sapien
accccaggctgcatactggttccagtccatggc

SEQ ID NO: 573933 - DNA, 33 bp, Homo sapien
aacagtaattcaaagaacactggcatctaagta

SEQ ID NO: 573934 - DNA, 33 bp, Homo sapien
aacagtaattcaaagagcactggcatctaagta

SEQ ID NO: 573935 - DNA, 33 bp, Homo sapien
caaatcctagttctcaacaaccacaaggtcact

SEQ ID NO: 573936 - DNA, 33 bp, Homo sapien
caaatcctagttctcaccaaccacaaggtcact

SEQ ID NO: 573937 - DNA, 33 bp, Homo sapien
gtgaggacagaatgaaaatagtctttggatgcc

SEQ ID NO: 573938 - DNA, 33 bp, Homo sapien
gtgaggacagaatgaagatagtctttggatgcc

SEQ ID NO: 573939 - DNA, 33 bp, Homo sapien
aaagccaattaaaaacaatgattgagaaaatca

SEQ ID NO: 573940 - DNA, 33 bp, Homo sapien
aaagccaattaaaaacgatgattgagaaaatca

SEQ ID NO: 573941 - DNA, 33 bp, Homo sapien
gagacctcttttgctgacaactggcagcttccc

SEQ ID NO: 573942 - DNA, 33 bp, Homo sapien
gagacctcttttgctggcaactggcagcttccc

SEQ ID NO: 573943 - DNA, 33 bp, Homo sapien
tccagaacattaaaaccgtgttggtcactgttg

SEQ ID NO: 573944 - DNA, 33 bp, Homo sapien
tccagaacattaaaactgtgttggtcactgttg

SEQ ID NO: 573945 - DNA, 33 bp, Homo sapien
ctgtcccagtgccacaatggtctagcctcatgg

SEQ ID NO: 573946 - DNA, 33 bp, Homo sapien
ctgtcccagtgccacagtggtctagcctcatgg

SEQ ID NO: 573947 - DNA, 33 bp, Homo sapien
cttacgggcaggacaacagcgtatgaagcctga

SEQ ID NO: 573948 - DNA, 33 bp, Homo sapien
cttacgggcaggacaatagcgtatgaagcctga

SEQ ID NO: 573949 - DNA, 33 bp, Homo sapien
agaagcttaactgaataatgcgagggaggattg

SEQ ID NO: 573950 - DNA, 33 bp, Homo sapien
agaagcttaactgaatgatgcgagggaggattg

SEQ ID NO: 573951 - DNA, 33 bp, Homo sapien
caaaccccatgcatcaagccggtacacaggatc

SEQ ID NO: 573952 - DNA, 33 bp, Homo sapien
caaaccccatgcatcaggccggtacacaggatc

SEQ ID NO: 573953 - DNA, 33 bp, Homo sapien
tattttgcataatgaaagtttggtgtgaggccc

SEQ ID NO: 573954 - DNA, 33 bp, Homo sapien
tattttgcataatgaaggtttggtgtgaggccc

SEQ ID NO: 573955 - DNA, 33 bp, Homo sapien
ccaaaattgtctgggagaaattgaggtttgtgg

SEQ ID NO: 573956 - DNA, 33 bp, Homo sapien
ccaaaattgtctgggataaattgaggtttgtgg

SEQ ID NO: 573957 - DNA, 33 bp, Homo sapien
tagtcacaacccactgaatagagaatagttcaa

SEQ ID NO: 573958 - DNA, 33 bp, Homo sapien
tagtcacaacccactggatagagaatagttcaa

SEQ ID NO: 573959 - DNA, 33 bp, Homo sapien
ttctgtgtagtgttgccgagttcattctcatct

SEQ ID NO: 573960 - DNA, 33 bp, Homo sapien
ttctgtgtagtgttgcggagttcattctcatct

SEQ ID NO: 573961 - DNA, 33 bp, Homo sapien
actggctcaggccagaagtctcaaagtgaggtg

SEQ ID NO: 573962 - DNA, 33 bp, Homo sapien
actggctcaggccagatgtctcaaagtgaggtg

SEQ ID NO: 573963 - DNA, 33 bp, Homo sapien
ctaaagttgaatcccactggatccatctgagtt

SEQ ID NO: 573964 - DNA, 33 bp, Homo sapien
ctaaagttgaatcccattggatccatctgagtt

SEQ ID NO: 573965 - DNA, 33 bp, Homo sapien
aacttgggagcaaccacgatttccttcaggagg

SEQ ID NO: 573966 - DNA, 33 bp, Homo sapien
aacttgggagcaaccatgatttccttcaggagg

SEQ ID NO: 573967 - DNA, 33 bp, Homo sapien
gatgtgccactgaacaatgagtgagcaaatctt

SEQ ID NO: 573968 - DNA, 33 bp, Homo sapien
gatgtgccactgaacactgagtgagcaaatctt

SEQ ID NO: 573969 - DNA, 33 bp, Homo sapien
aggtgagagattttgcagaaaattaggcaggca

SEQ ID NO: 573970 - DNA, 33 bp, Homo sapien
aggtgagagattttgcggaaaattaggcaggca

SEQ ID NO: 573971 - DNA, 33 bp, Homo sapien
ggctcatgataggtacccagtaaatatcagttg

SEQ ID NO: 573972 - DNA, 33 bp, Homo sapien
ggctcatgataggtactcagtaaatatcagttg

SEQ ID NO: 573973 - DNA, 33 bp, Homo sapien
gtgatatttggacggacacccaaaggaaatgag

SEQ ID NO: 573974 - DNA, 33 bp, Homo sapien
gtgatatttggacggatacccaaaggaaatgag

SEQ ID NO: 573975 - DNA, 33 bp, Homo sapien
acggtgcctggtaccacgtgggaggcgcttaat

SEQ ID NO: 573976 - DNA, 33 bp, Homo sapien
acggtgcctggtaccatgtgggaggcgcttaat

SEQ ID NO: 573977 - DNA, 33 bp, Homo sapien
cacgtggttgcacttgcagcattagctggttca

SEQ ID NO: 573978 - DNA, 33 bp, Homo sapien
cacgtggttgcacttgtagcattagctggttca

SEQ ID NO: 573979 - DNA, 33 bp, Homo sapien
tcaacaagacactaggaacagcggttgcctctg

SEQ ID NO: 573980 - DNA, 33 bp, Homo sapien
tcaacaagacactagggacagcggttgcctctg

SEQ ID NO: 573981 - DNA, 33 bp, Homo sapien
gcaggctttgccctaaatcagtttttagaacac

SEQ ID NO: 573982 - DNA, 33 bp, Homo sapien
gcaggctttgccctaagtcagtttttagaacac

SEQ ID NO: 573983 - DNA, 33 bp, Homo sapien
cttctatatgccagagaattttagctagaacag

SEQ ID NO: 573984 - DNA, 33 bp, Homo sapien
cttctatatgccagaggattttagctagaacag

SEQ ID NO: 573985 - DNA, 33 bp, Homo sapien
cagtcccctttcctgcactgaccctatctggta

SEQ ID NO: 573986 - DNA, 33 bp, Homo sapien
cagtcccctttcctgcgctgaccctatctggta

SEQ ID NO: 573987 - DNA, 33 bp, Homo sapien
accactcagatgtctcaaaaatgctcccgttga

SEQ ID NO: 573988 - DNA, 33 bp, Homo sapien
accactcagatgtctcgaaaatgctcccgttga

SEQ ID NO: 573989 - DNA, 33 bp, Homo sapien
tgcctaagtactttaactgtagctttcaagcct

SEQ ID NO: 573990 - DNA, 33 bp, Homo sapien
tgcctaagtactttaattgtagctttcaagcct

SEQ ID NO: 573991 - DNA, 33 bp, Homo sapien
cctctcagaccggagcaagattcaacaggtaaa

SEQ ID NO: 573992 - DNA, 33 bp, Homo sapien
cctctcagaccggagcgagattcaacaggtaaa

SEQ ID NO: 573993 - DNA, 33 bp, Homo sapien
ctgtttccagaggagacagcttaaaaaccacag

SEQ ID NO: 573994 - DNA, 33 bp, Homo sapien
ctgtttccagaggagagagcttaaaaaccacag

SEQ ID NO: 573995 - DNA, 33 bp, Homo sapien
tggcctgatctgaatcaacgttaaagtttccca

SEQ ID NO: 573996 - DNA, 33 bp, Homo sapien
tggcctgatctgaatcgacgttaaagtttccca

SEQ ID NO: 573997 - DNA, 33 bp, Homo sapien
acagaatgtggaattacctggtggctatcgtcc

SEQ ID NO: 573998 - DNA, 33 bp, Homo sapien
acagaatgtggaattatctggtggctatcgtcc

SEQ ID NO: 573999 - DNA, 33 bp, Homo sapien
ttgcttgcttttcatcaaagtgggtttgtcatg

SEQ ID NO: 574000 - DNA, 33 bp, Homo sapien
ttgcttgcttttcatcgaagtgggtttgtcatg

SEQ ID NO: 574001 - DNA, 33 bp, Homo sapien
ccgttaaatatatcacagtcgtcccaaattggc

SEQ ID NO: 574002 - DNA, 33 bp, Homo sapien
ccgttaaatatatcacggtcgtcccaaattggc

SEQ ID NO: 574003 - DNA, 33 bp, Homo sapien
ttgtgttggcatcctcgcaggcagctccccaag

SEQ ID NO: 574004 - DNA, 33 bp, Homo sapien
ttgtgttggcatcctctcaggcagctccccaag

SEQ ID NO: 574005 - DNA, 33 bp, Homo sapien
attattctggatattaagtctggttcagggttc

SEQ ID NO: 574006 - DNA, 33 bp, Homo sapien
attattctggatattaggtctggttcagggttc

SEQ ID NO: 574007 - DNA, 33 bp, Homo sapien
aattaaacaaacatggaccaaacaaaacgtgtc

SEQ ID NO: 574008 - DNA, 33 bp, Homo sapien
aattaaacaaacatgggccaaacaaaacgtgtc

SEQ ID NO: 574009 - DNA, 33 bp, Homo sapien
cacaccttcctccatcactaatcaaaaatgttc

SEQ ID NO: 574010 - DNA, 33 bp, Homo sapien
cacaccttcctccatcgctaatcaaaaatgttc

SEQ ID NO: 574011 - DNA, 33 bp, Homo sapien
catagtatttcttgacagagtggattgaatgac

SEQ ID NO: 574012 - DNA, 33 bp, Homo sapien
catagtatttcttgacggagtggattgaatgac

SEQ ID NO: 574013 - DNA, 33 bp, Homo sapien
acagacgatggcttgaacaaacacagtaagtcc

SEQ ID NO: 574014 - DNA, 33 bp, Homo sapien
acagacgatggcttgagcaaacacagtaagtcc

SEQ ID NO: 574015 - DNA, 33 bp, Homo sapien
cacagtaggtgctcaaaagacagttaataaatg

SEQ ID NO: 574016 - DNA, 33 bp, Homo sapien
cacagtaggtgctcaagagacagttaataaatg

SEQ ID NO: 574017 - DNA, 33 bp, Homo sapien
tccagatttcaatgtaactaatactggtggtgt

SEQ ID NO: 574018 - DNA, 33 bp, Homo sapien
tccagatttcaatgtatctaatactggtggtgt

SEQ ID NO: 574019 - DNA, 33 bp, Homo sapien
aattccactgctcttacgatttttgcaatttga

SEQ ID NO: 574020 - DNA, 33 bp, Homo sapien
aattccactgctcttatgatttttgcaatttga

SEQ ID NO: 574021 - DNA, 33 bp, Homo sapien
tgccctttgaagcttacatcaaagtgggagaga

SEQ ID NO: 574022 - DNA, 33 bp, Homo sapien
tgccctttgaagcttatatcaaagtgggagaga

SEQ ID NO: 574023 - DNA, 33 bp, Homo sapien
attcagtgatgtttaacccgtgaagagaaacat

SEQ ID NO: 574024 - DNA, 33 bp, Homo sapien
attcagtgatgtttaatccgtgaagagaaacat

SEQ ID NO: 574025 - DNA, 33 bp, Homo sapien
aatagaaaactcaaagcagcttcaataaggagg

SEQ ID NO: 574026 - DNA, 33 bp, Homo sapien
aatagaaaactcaaagtagcttcaataaggagg

SEQ ID NO: 574027 - DNA, 33 bp, Homo sapien
acaaaacagtgtgtgcaaggctataaaagaggt

SEQ ID NO: 574028 - DNA, 33 bp, Homo sapien
acaaaacagtgtgtgcgaggctataaaagaggt

SEQ ID NO: 574029 - DNA, 33 bp, Homo sapien
gcgactgcaacacgcacgactcgctgctcgagg

SEQ ID NO: 574030 - DNA, 33 bp, Homo sapien
gcgactgcaacacgcatgactcgctgctcgagg

SEQ ID NO: 574031 - DNA, 33 bp, Homo sapien
tcaataaatgaactgaaggagaaaggactttgc

SEQ ID NO: 574032 - DNA, 33 bp, Homo sapien
tcaataaatgaactgatggagaaaggactttgc

SEQ ID NO: 574033 - DNA, 33 bp, Homo sapien
cagatgttctttatctaaatctggagccacact

SEQ ID NO: 574034 - DNA, 33 bp, Homo sapien
cagatgttctttatctgaatctggagccacact

SEQ ID NO: 574035 - DNA, 33 bp, Homo sapien
agccctctaggcaatccctattccaaatagcag

SEQ ID NO: 574036 - DNA, 33 bp, Homo sapien
agccctctaggcaatctctattccaaatagcag

SEQ ID NO: 574037 - DNA, 33 bp, Homo sapien
caacagtgaaacatcagaagagtttacataaaa

SEQ ID NO: 574038 - DNA, 33 bp, Homo sapien
caacagtgaaacatcataagagtttacataaaa

SEQ ID NO: 574039 - DNA, 33 bp, Homo sapien
ttctttacaaagctgcgatctctcatcttgatc

SEQ ID NO: 574040 - DNA, 33 bp, Homo sapien
ttctttacaaagctgctatctctcatcttgatc

SEQ ID NO: 574041 - DNA, 33 bp, Homo sapien
cagccctcagcatgcaaggtgagatggatcctc

SEQ ID NO: 574042 - DNA, 33 bp, Homo sapien
cagccctcagcatgcacggtgagatggatcctc

SEQ ID NO: 574043 - DNA, 33 bp, Homo sapien
atgctgtccatccttcaccagaatgcatgcatt

SEQ ID NO: 574044 - DNA, 33 bp, Homo sapien
atgctgtccatccttcgccagaatgcatgcatt

SEQ ID NO: 574045 - DNA, 33 bp, Homo sapien
cttctctgttacaaaacgagataagcaagtgtt

SEQ ID NO: 574046 - DNA, 33 bp, Homo sapien
cttctctgttacaaaatgagataagcaagtgtt

SEQ ID NO: 574047 - DNA, 33 bp, Homo sapien
cgcaggttgaattctcgcccgtctgccatgggc

SEQ ID NO: 574048 - DNA, 33 bp, Homo sapien
cgcaggttgaattctctcccgtctgccatgggc

SEQ ID NO: 574049 - DNA, 33 bp, Homo sapien
taccctcatgttcaaacgtctctgagggaccac

SEQ ID NO: 574050 - DNA, 33 bp, Homo sapien
taccctcatgttcaaaggtctctgagggaccac

SEQ ID NO: 574051 - DNA, 33 bp, Homo sapien
actcttggtgggaacactgtaagagattcagag

SEQ ID NO: 574052 - DNA, 33 bp, Homo sapien
actcttggtgggaacattgtaagagattcagag

SEQ ID NO: 574053 - DNA, 33 bp, Homo sapien
gcagcaggtaactctccagccatttgctccggt

SEQ ID NO: 574054 - DNA, 33 bp, Homo sapien
gcagcaggtaactctctagccatttgctccggt

SEQ ID NO: 574055 - DNA, 33 bp, Homo sapien
agcagcttccacaggcaacttttgacactgcac

SEQ ID NO: 574056 - DNA, 33 bp, Homo sapien
agcagcttccacaggcgacttttgacactgcac

SEQ ID NO: 574057 - DNA, 33 bp, Homo sapien
ttattggtgtgataaccggatgccatgaatgag

SEQ ID NO: 574058 - DNA, 33 bp, Homo sapien
ttattggtgtgataactggatgccatgaatgag

SEQ ID NO: 574059 - DNA, 33 bp, Homo sapien
cagaaaaaacttgagaagtattcaagtctgggt

SEQ ID NO: 574060 - DNA, 33 bp, Homo sapien
cagaaaaaacttgagaggtattcaagtctgggt

SEQ ID NO: 574061 - DNA, 33 bp, Homo sapien
tctgtcaaatggaataggtaaagtcctagcctc

SEQ ID NO: 574062 - DNA, 33 bp, Homo sapien
tctgtcaaatggaatatgtaaagtcctagcctc

SEQ ID NO: 574063 - DNA, 33 bp, Homo sapien
tggtatcttagatgaaagagaatgcgctgtgaa

SEQ ID NO: 574064 - DNA, 33 bp, Homo sapien
tggtatcttagatgaaggagaatgcgctgtgaa

SEQ ID NO: 574065 - DNA, 33 bp, Homo sapien
taaattcttccacttacagaagctaaacgaggt

SEQ ID NO: 574066 - DNA, 33 bp, Homo sapien
taaattcttccacttatagaagctaaacgaggt

SEQ ID NO: 574067 - DNA, 33 bp, Homo sapien
aaggagagacccaaaccgcaacgtttctggtgt

SEQ ID NO: 574068 - DNA, 33 bp, Homo sapien
aaggagagacccaaactgcaacgtttctggtgt

SEQ ID NO: 574069 - DNA, 33 bp, Homo sapien
tccttccttaattctacagagcaattttgttca

SEQ ID NO: 574070 - DNA, 33 bp, Homo sapien
tccttccttaattctatagagcaattttgttca

SEQ ID NO: 574071 - DNA, 33 bp, Homo sapien
gcagattgtttctgaacgtttgggggtaactgg

SEQ ID NO: 574072 - DNA, 33 bp, Homo sapien
gcagattgtttctgaatgtttgggggtaactgg

SEQ ID NO: 574073 - DNA, 33 bp, Homo sapien
atgtctaattctgatacagggagtgggtaaaaa

SEQ ID NO: 574074 - DNA, 33 bp, Homo sapien
atgtctaattctgatatagggagtgggtaaaaa

SEQ ID NO: 574075 - DNA, 33 bp, Homo sapien
agagaagtgacttaaaatgtccttgctctgtaa

SEQ ID NO: 574076 - DNA, 33 bp, Homo sapien
agagaagtgacttaaagtgtccttgctctgtaa

SEQ ID NO: 574077 - DNA, 33 bp, Homo sapien
gagaaaccatcttaagaagtgcctggtccccca

SEQ ID NO: 574078 - DNA, 33 bp, Homo sapien
gagaaaccatcttaaggagtgcctggtccccca

SEQ ID NO: 574079 - DNA, 33 bp, Homo sapien
ggccatgccaggattcaaaccctagcagccttc

SEQ ID NO: 574080 - DNA, 33 bp, Homo sapien
ggccatgccaggattcgaaccctagcagccttc

SEQ ID NO: 574081 - DNA, 33 bp, Homo sapien
agatttgactgtgactaaaattcgcacaagaac

SEQ ID NO: 574082 - DNA, 33 bp, Homo sapien
agatttgactgtgactgaaattcgcacaagaac

SEQ ID NO: 574083 - DNA, 33 bp, Homo sapien
gtgcttaataaatatgcatgaaatggatgaatg

SEQ ID NO: 574084 - DNA, 33 bp, Homo sapien
gtgcttaataaatatgtatgaaatggatgaatg

SEQ ID NO: 574085 - DNA, 33 bp, Homo sapien
cttttaatacattaaaacatcatatgtgaggct

SEQ ID NO: 574086 - DNA, 33 bp, Homo sapien
cttttaatacattaaaccatcatatgtgaggct

SEQ ID NO: 574087 - DNA, 33 bp, Homo sapien
caagtagaggtctacaataagccatctgcataa

SEQ ID NO: 574088 - DNA, 33 bp, Homo sapien
caagtagaggtctacagtaagccatctgcataa

SEQ ID NO: 574089 - DNA, 33 bp, Homo sapien
tgagaagctggaggaacggattctccctgtgag

SEQ ID NO: 574090 - DNA, 33 bp, Homo sapien
tgagaagctggaggaatggattctccctgtgag

SEQ ID NO: 574091 - DNA, 33 bp, Homo sapien
cagggtcgtctcccccagctcaaggagactgct

SEQ ID NO: 574092 - DNA, 33 bp, Homo sapien
cagggtcgtctcccccggctcaaggagactgct

SEQ ID NO: 574093 - DNA, 33 bp, Homo sapien
aacagacgggaagtgaaccaagccaggcatatg

SEQ ID NO: 574094 - DNA, 33 bp, Homo sapien
aacagacgggaagtgacccaagccaggcatatg

SEQ ID NO: 574095 - DNA, 33 bp, Homo sapien
cttcccgtctgttaccaattgctgtggccacca

SEQ ID NO: 574096 - DNA, 33 bp, Homo sapien
cttcccgtctgttaccgattgctgtggccacca

SEQ ID NO: 574097 - DNA, 33 bp, Homo sapien
aaaaagtgggcaagataaagtatagtgtctggg

SEQ ID NO: 574098 - DNA, 33 bp, Homo sapien
aaaaagtgggcaagattaagtatagtgtctggg

SEQ ID NO: 574099 - DNA, 33 bp, Homo sapien
atctctgcaggttaaacggcccaggtactgcgc

SEQ ID NO: 574100 - DNA, 33 bp, Homo sapien
atctctgcaggttaaatggcccaggtactgcgc

SEQ ID NO: 574101 - DNA, 33 bp, Homo sapien
ctacctcctgcgggaacttcaaagggctatcaa

SEQ ID NO: 574102 - DNA, 33 bp, Homo sapien
ctacctcctgcgggaatttcaaagggctatcaa

SEQ ID NO: 574103 - DNA, 33 bp, Homo sapien
ttttaaaccacttctcactgtctgaaactatct

SEQ ID NO: 574104 - DNA, 33 bp, Homo sapien
ttttaaaccacttctcgctgtctgaaactatct

SEQ ID NO: 574105 - DNA, 33 bp, Homo sapien
gagacagaatcatgaaatcattattaagccatt

SEQ ID NO: 574106 - DNA, 33 bp, Homo sapien
gagacagaatcatgaagtcattattaagccatt

SEQ ID NO: 574107 - DNA, 33 bp, Homo sapien
aattcaaataataagacaggttcagtcattcat

SEQ ID NO: 574108 - DNA, 33 bp, Homo sapien
aattcaaataataagataggttcagtcattcat

SEQ ID NO: 574109 - DNA, 33 bp, Homo sapien
ctgtccaagaccaagagaacaggcttttagata

SEQ ID NO: 574110 - DNA, 33 bp, Homo sapien
ctgtccaagaccaagataacaggcttttagata

SEQ ID NO: 574111 - DNA, 33 bp, Homo sapien
atcgccacctggagtgaattacagcaaaagaag

SEQ ID NO: 574112 - DNA, 33 bp, Homo sapien
atcgccacctggagtggattacagcaaaagaag

SEQ ID NO: 574113 - DNA, 33 bp, Homo sapien
agtaagcctggtagcaactagcatgaaacaaaa

SEQ ID NO: 574114 - DNA, 33 bp, Homo sapien
agtaagcctggtagcacctagcatgaaacaaaa

SEQ ID NO: 574115 - DNA, 33 bp, Homo sapien
tggtcccgaggttagccaagcggttagatgaat

SEQ ID NO: 574116 - DNA, 33 bp, Homo sapien
tggtcccgaggttagctaagcggttagatgaat

SEQ ID NO: 574117 - DNA, 33 bp, Homo sapien
ggagccaagatttcacagcaggctttgtctcca

SEQ ID NO: 574118 - DNA, 33 bp, Homo sapien
ggagccaagatttcacggcaggctttgtctcca

SEQ ID NO: 574119 - DNA, 33 bp, Homo sapien
attacgcaaccattaccactattcgtttccaga

SEQ ID NO: 574120 - DNA, 33 bp, Homo sapien
attacgcaaccattactactattcgtttccaga

SEQ ID NO: 574121 - DNA, 33 bp, Homo sapien
gaggccacatatcaagaacataagcacgcaaaa

SEQ ID NO: 574122 - DNA, 33 bp, Homo sapien
gaggccacatatcaaggacataagcacgcaaaa

SEQ ID NO: 574123 - DNA, 33 bp, Homo sapien
tgttcccctttctcacaaacaaaatttccatcc

SEQ ID NO: 574124 - DNA, 33 bp, Homo sapien
tgttcccctttctcacgaacaaaatttccatcc

SEQ ID NO: 574125 - DNA, 33 bp, Homo sapien
tcagcctgggtaaaaaagcaagactccctctca

SEQ ID NO: 574126 - DNA, 33 bp, Homo sapien
tcagcctgggtaaaaatgcaagactccctctca

SEQ ID NO: 574127 - DNA, 33 bp, Homo sapien
gctgagccttctatggcataaaatcatggaatg

SEQ ID NO: 574128 - DNA, 33 bp, Homo sapien
gctgagccttctatggtataaaatcatggaatg

SEQ ID NO: 574129 - DNA, 33 bp, Homo sapien
gtatggggcttcttaaaggggtgatgaaaatgt

SEQ ID NO: 574130 - DNA, 33 bp, Homo sapien
gtatggggcttcttaagggggtgatgaaaatgt

SEQ ID NO: 574131 - DNA, 33 bp, Homo sapien
tcctctgccattttccactcagtttctttctta

SEQ ID NO: 574132 - DNA, 33 bp, Homo sapien
tcctctgccattttccgctcagtttctttctta

SEQ ID NO: 574133 - DNA, 33 bp, Homo sapien
caacaaaaaaccaaataactatgcccacgtgcc

SEQ ID NO: 574134 - DNA, 33 bp, Homo sapien
caacaaaaaaccaaatgactatgcccacgtgcc

SEQ ID NO: 574135 - DNA, 33 bp, Homo sapien
actaaaactggctccaactataataaaaggggg

SEQ ID NO: 574136 - DNA, 33 bp, Homo sapien
actaaaactggctccagctataataaaaggggg

SEQ ID NO: 574137 - DNA, 33 bp, Homo sapien
tcactgttatgctctacatcacatacagggtca

SEQ ID NO: 574138 - DNA, 33 bp, Homo sapien
tcactgttatgctctatatcacatacagggtca

SEQ ID NO: 574139 - DNA, 33 bp, Homo sapien
ttaggttctgttggcaggggagaaggggaatga

SEQ ID NO: 574140 - DNA, 33 bp, Homo sapien
ttaggttctgttggcatgggagaaggggaatga

SEQ ID NO: 574141 - DNA, 33 bp, Homo sapien
tgaaacaaactagaaaaaacaaaatgagaagaa

SEQ ID NO: 574142 - DNA, 33 bp, Homo sapien
tgaaacaaactagaaagaacaaaatgagaagaa

SEQ ID NO: 574143 - DNA, 33 bp, Homo sapien
actcaaggtgactctaatacatatattcctgtt

SEQ ID NO: 574144 - DNA, 33 bp, Homo sapien
actcaaggtgactctactacatatattcctgtt

SEQ ID NO: 574145 - DNA, 33 bp, Homo sapien
gttgagtgagaaaaggaacttgcagaagttaac

SEQ ID NO: 574146 - DNA, 33 bp, Homo sapien
gttgagtgagaaaagggacttgcagaagttaac

SEQ ID NO: 574147 - DNA, 33 bp, Homo sapien
aagaatgacataaaaaattgtgaggtgttcgat

SEQ ID NO: 574148 - DNA, 33 bp, Homo sapien
aagaatgacataaaaatttgtgaggtgttcgat

SEQ ID NO: 574149 - DNA, 33 bp, Homo sapien
tactgtggacatagcacatagtaggtgcttaat

SEQ ID NO: 574150 - DNA, 33 bp, Homo sapien
tactgtggacatagcatatagtaggtgcttaat

SEQ ID NO: 574151 - DNA, 33 bp, Homo sapien
ggaccagcaattagcacgtggccatctttggag

SEQ ID NO: 574152 - DNA, 33 bp, Homo sapien
ggaccagcaattagcatgtggccatctttggag

SEQ ID NO: 574153 - DNA, 33 bp, Homo sapien
tctttggctcttctcacctattcctgagaatga

SEQ ID NO: 574154 - DNA, 33 bp, Homo sapien
tctttggctcttctcatctattcctgagaatga

SEQ ID NO: 574155 - DNA, 33 bp, Homo sapien
gtatgagtaaaacatacggtaggttaggtgtca

SEQ ID NO: 574156 - DNA, 33 bp, Homo sapien
gtatgagtaaaacatatggtaggttaggtgtca

SEQ ID NO: 574157 - DNA, 33 bp, Homo sapien
acttgaatgaccagaaggagggataggagaaat

SEQ ID NO: 574158 - DNA, 33 bp, Homo sapien
acttgaatgaccagaatgagggataggagaaat

SEQ ID NO: 574159 - DNA, 33 bp, Homo sapien
ggatagtgttgacctcaagtacaggtttcaaaa

SEQ ID NO: 574160 - DNA, 33 bp, Homo sapien
ggatagtgttgacctcgagtacaggtttcaaaa

SEQ ID NO: 574161 - DNA, 33 bp, Homo sapien
aagctgcagttacccaaacattcaagaaacatg

SEQ ID NO: 574162 - DNA, 33 bp, Homo sapien
aagctgcagttacccagacattcaagaaacatg

SEQ ID NO: 574163 - DNA, 33 bp, Homo sapien
cacaattctgctgatgacaagaatcggcttaat

SEQ ID NO: 574164 - DNA, 33 bp, Homo sapien
cacaattctgctgatggcaagaatcggcttaat

SEQ ID NO: 574165 - DNA, 33 bp, Homo sapien
aatcacaaagaagttgaaaatatgtgaagagga

SEQ ID NO: 574166 - DNA, 33 bp, Homo sapien
aatcacaaagaagttggaaatatgtgaagagga

SEQ ID NO: 574167 - DNA, 33 bp, Homo sapien
gcagctttctaatcacagaatgttggtgatctt

SEQ ID NO: 574168 - DNA, 33 bp, Homo sapien
gcagctttctaatcacggaatgttggtgatctt

SEQ ID NO: 574169 - DNA, 33 bp, Homo sapien
gaaggaggaggtcttccctatcgcctggaagca

SEQ ID NO: 574170 - DNA, 33 bp, Homo sapien
gaaggaggaggtcttctctatcgcctggaagca

SEQ ID NO: 574171 - DNA, 33 bp, Homo sapien
taggtgcacactggacacttagacatgaacatc

SEQ ID NO: 574172 - DNA, 33 bp, Homo sapien
taggtgcacactggacgcttagacatgaacatc

SEQ ID NO: 574173 - DNA, 33 bp, Homo sapien
cagaagtgagaagtcaaggtatcaacaggacca

SEQ ID NO: 574174 - DNA, 33 bp, Homo sapien
cagaagtgagaagtcagggtatcaacaggacca

SEQ ID NO: 574175 - DNA, 33 bp, Homo sapien
gagttgctctttgcaaatcgctgttttcttttg

SEQ ID NO: 574176 - DNA, 33 bp, Homo sapien
gagttgctctttgcaattcgctgttttcttttg

SEQ ID NO: 574177 - DNA, 33 bp, Homo sapien
gagcaactcatagattgaaagccctttgttttg

SEQ ID NO: 574178 - DNA, 33 bp, Homo sapien
gagcaactcatagatttaaagccctttgttttg

SEQ ID NO: 574179 - DNA, 33 bp, Homo sapien
ctttattgtcagttgcagaaagtttgcctgtct

SEQ ID NO: 574180 - DNA, 33 bp, Homo sapien
ctttattgtcagttgcggaaagtttgcctgtct

SEQ ID NO: 574181 - DNA, 33 bp, Homo sapien
acaagacttttcagtcaccgtaacaaaaagtct

SEQ ID NO: 574182 - DNA, 33 bp, Homo sapien
acaagacttttcagtcgccgtaacaaaaagtct

SEQ ID NO: 574183 - DNA, 33 bp, Homo sapien
taaactgagttgttaggaatggcctggttttct

SEQ ID NO: 574184 - DNA, 33 bp, Homo sapien
taaactgagttgttagtaatggcctggttttct

SEQ ID NO: 574185 - DNA, 33 bp, Homo sapien
gtaattaattcagctccagcgtgtagtattgct

SEQ ID NO: 574186 - DNA, 33 bp, Homo sapien
gtaattaattcagctctagcgtgtagtattgct

SEQ ID NO: 574187 - DNA, 33 bp, Homo sapien
tagtgtttttcgaagtaactgtatcattttaca

SEQ ID NO: 574188 - DNA, 33 bp, Homo sapien
tagtgtttttcgaagtgactgtatcattttaca

SEQ ID NO: 574189 - DNA, 33 bp, Homo sapien
cggctagccaggccaccgggcaattcaaagtag

SEQ ID NO: 574190 - DNA, 33 bp, Homo sapien
cggctagccaggccacggggcaattcaaagtag

SEQ ID NO: 574191 - DNA, 33 bp, Homo sapien
gatggagggcgtgaaacggagggcgttagacag

SEQ ID NO: 574192 - DNA, 33 bp, Homo sapien
gatggagggcgtgaaatggagggcgttagacag

SEQ ID NO: 574193 - DNA, 33 bp, Homo sapien
cttgctcaagagctgaataactttctcccagaa

SEQ ID NO: 574194 - DNA, 33 bp, Homo sapien
cttgctcaagagctgagtaactttctcccagaa

SEQ ID NO: 574195 - DNA, 33 bp, Homo sapien
ggctgatccagttctacgaggtggtggagagct

SEQ ID NO: 574196 - DNA, 33 bp, Homo sapien
ggctgatccagttctatgaggtggtggagagct

SEQ ID NO: 574197 - DNA, 33 bp, Homo sapien
caccacaacgctgggaacgaatccggattaatg

SEQ ID NO: 574198 - DNA, 33 bp, Homo sapien
caccacaacgctgggagcgaatccggattaatg

SEQ ID NO: 574199 - DNA, 33 bp, Homo sapien
ctcagccttatttgtcactgtagcactgggctc

SEQ ID NO: 574200 - DNA, 33 bp, Homo sapien
ctcagccttatttgtcgctgtagcactgggctc

SEQ ID NO: 574201 - DNA, 33 bp, Homo sapien
gagcctgttttccttacagagttgtgaggatta

SEQ ID NO: 574202 - DNA, 33 bp, Homo sapien
gagcctgttttccttatagagttgtgaggatta

SEQ ID NO: 574203 - DNA, 33 bp, Homo sapien
catccagtctccttaaccgaaagagaatattca

SEQ ID NO: 574204 - DNA, 33 bp, Homo sapien
catccagtctccttaagcgaaagagaatattca

SEQ ID NO: 574205 - DNA, 33 bp, Homo sapien
atgctgctcaaaagaggaggattttggctaggg

SEQ ID NO: 574206 - DNA, 33 bp, Homo sapien
atgctgctcaaaagagtaggattttggctaggg

SEQ ID NO: 574207 - DNA, 33 bp, Homo sapien
cccgactttagtgcacagtagaataactcgcca

SEQ ID NO: 574208 - DNA, 33 bp, Homo sapien
cccgactttagtgcacggtagaataactcgcca

SEQ ID NO: 574209 - DNA, 33 bp, Homo sapien
aaccactctattcacaatattcaggtcatgaag

SEQ ID NO: 574210 - DNA, 33 bp, Homo sapien
aaccactctattcacagtattcaggtcatgaag

SEQ ID NO: 574211 - DNA, 33 bp, Homo sapien
tcaactaggcacaggacaaagcagtcggttgga

SEQ ID NO: 574212 - DNA, 33 bp, Homo sapien
tcaactaggcacaggagaaagcagtcggttgga

SEQ ID NO: 574213 - DNA, 33 bp, Homo sapien
aaagtgatttaatttcaaaagctgcataacatt

SEQ ID NO: 574214 - DNA, 33 bp, Homo sapien
aaagtgatttaatttcgaaagctgcataacatt

SEQ ID NO: 574215 - DNA, 33 bp, Homo sapien
ggagcaggttgccaggaaccggatccccagtgc

SEQ ID NO: 574216 - DNA, 33 bp, Homo sapien
ggagcaggttgccagggaccggatccccagtgc

SEQ ID NO: 574217 - DNA, 33 bp, Homo sapien
agctccaggaagtagcagagaaccaatacgaac

SEQ ID NO: 574218 - DNA, 33 bp, Homo sapien
agctccaggaagtagccgagaaccaatacgaac

SEQ ID NO: 574219 - DNA, 33 bp, Homo sapien
aaccagtgaactctaaatatgtagtagtagaaa

SEQ ID NO: 574220 - DNA, 33 bp, Homo sapien
aaccagtgaactctaagtatgtagtagtagaaa

SEQ ID NO: 574221 - DNA, 33 bp, Homo sapien
tgtaagaccagagttacgacagcacctcccttc

SEQ ID NO: 574222 - DNA, 33 bp, Homo sapien
tgtaagaccagagttaggacagcacctcccttc

SEQ ID NO: 574223 - DNA, 33 bp, Homo sapien
aggtcataacagtaacccattaaacaaaaatct

SEQ ID NO: 574224 - DNA, 33 bp, Homo sapien
aggtcataacagtaactcattaaacaaaaatct

SEQ ID NO: 574225 - DNA, 33 bp, Homo sapien
tgactggtgtccttaccatcagtcctggagtca

SEQ ID NO: 574226 - DNA, 33 bp, Homo sapien
tgactggtgtccttacgatcagtcctggagtca

SEQ ID NO: 574227 - DNA, 33 bp, Homo sapien
catcctggtcattccccaccagctacacccccc

SEQ ID NO: 574228 - DNA, 33 bp, Homo sapien
catcctggtcattccctaccagctacacccccc

SEQ ID NO: 574229 - DNA, 33 bp, Homo sapien
ttggtaactaccatcgcaaaatgtaattgattt

SEQ ID NO: 574230 - DNA, 33 bp, Homo sapien
ttggtaactaccatcgtaaaatgtaattgattt

SEQ ID NO: 574231 - DNA, 33 bp, Homo sapien
agcaccttctcaaggcaatgtgtgacaatcgag

SEQ ID NO: 574232 - DNA, 33 bp, Homo sapien
agcaccttctcaaggcgatgtgtgacaatcgag

SEQ ID NO: 574233 - DNA, 33 bp, Homo sapien
cacccaaatgtcactccatggccctcaagattg

SEQ ID NO: 574234 - DNA, 33 bp, Homo sapien
cacccaaatgtcactctatggccctcaagattg

SEQ ID NO: 574235 - DNA, 33 bp, Homo sapien
acacatggtctgagaaagcttctttaaagaggc

SEQ ID NO: 574236 - DNA, 33 bp, Homo sapien
acacatggtctgagaaggcttctttaaagaggc

SEQ ID NO: 574237 - DNA, 33 bp, Homo sapien
gtaggtgcttaatatagcttagctgttgttatc

SEQ ID NO: 574238 - DNA, 33 bp, Homo sapien
gtaggtgcttaatatatcttagctgttgttatc

SEQ ID NO: 574239 - DNA, 33 bp, Homo sapien
tcatatattcatgcacactcgcattcaacaact

SEQ ID NO: 574240 - DNA, 33 bp, Homo sapien
tcatatattcatgcacgctcgcattcaacaact

SEQ ID NO: 574241 - DNA, 33 bp, Homo sapien
acagatcaacctcaaagacttccttgtgagacc

SEQ ID NO: 574242 - DNA, 33 bp, Homo sapien
acagatcaacctcaaatacttccttgtgagacc

SEQ ID NO: 574243 - DNA, 33 bp, Homo sapien
gacccagaatcactaacgtaaggatacctggtc

SEQ ID NO: 574244 - DNA, 33 bp, Homo sapien
gacccagaatcactaatgtaaggatacctggtc

SEQ ID NO: 574245 - DNA, 33 bp, Homo sapien
atattttatactgaataactcacacctcttggg

SEQ ID NO: 574246 - DNA, 33 bp, Homo sapien
atattttatactgaatgactcacacctcttggg

SEQ ID NO: 574247 - DNA, 33 bp, Homo sapien
ccggttgagctggaaacccatgtttgccctgca

SEQ ID NO: 574248 - DNA, 33 bp, Homo sapien
ccggttgagctggaaatccatgtttgccctgca

SEQ ID NO: 574249 - DNA, 33 bp, Homo sapien
agcaccacattgacccaacagctatcacacggc

SEQ ID NO: 574250 - DNA, 33 bp, Homo sapien
agcaccacattgacccgacagctatcacacggc

SEQ ID NO: 574251 - DNA, 33 bp, Homo sapien
gactttacagcgtttccccatagacatgtgttc

SEQ ID NO: 574252 - DNA, 33 bp, Homo sapien
gactttacagcgtttctccatagacatgtgttc

SEQ ID NO: 574253 - DNA, 33 bp, Homo sapien
tcagttccttccttgacgggctgatacttgaat

SEQ ID NO: 574254 - DNA, 33 bp, Homo sapien
tcagttccttccttgaggggctgatacttgaat

SEQ ID NO: 574255 - DNA, 33 bp, Homo sapien
aattctcatccataaaaaatgcatacacaatgg

SEQ ID NO: 574256 - DNA, 33 bp, Homo sapien
aattctcatccataaagaatgcatacacaatgg

SEQ ID NO: 574257 - DNA, 33 bp, Homo sapien
cctgatgtggccataacacaaagatagcttcaa

SEQ ID NO: 574258 - DNA, 33 bp, Homo sapien
cctgatgtggccataatacaaagatagcttcaa

SEQ ID NO: 574259 - DNA, 33 bp, Homo sapien
ttgagcacgtactgcacgccaggccatgttata

SEQ ID NO: 574260 - DNA, 33 bp, Homo sapien
ttgagcacgtactgcatgccaggccatgttata

SEQ ID NO: 574261 - DNA, 33 bp, Homo sapien
aaatggactttaattacaggcgtgccagcactg

SEQ ID NO: 574262 - DNA, 33 bp, Homo sapien
aaatggactttaattataggcgtgccagcactg

SEQ ID NO: 574263 - DNA, 33 bp, Homo sapien
ttgaagaaatatctgcacttgcacatatcctat

SEQ ID NO: 574264 - DNA, 33 bp, Homo sapien
ttgaagaaatatctgcgcttgcacatatcctat

SEQ ID NO: 574265 - DNA, 33 bp, Homo sapien
gcctggtgattttagcaaggagataagtggatg

SEQ ID NO: 574266 - DNA, 33 bp, Homo sapien
gcctggtgattttagcgaggagataagtggatg

SEQ ID NO: 574267 - DNA, 33 bp, Homo sapien
gacatcactttatccccaaaccctccaggcatg

SEQ ID NO: 574268 - DNA, 33 bp, Homo sapien
gacatcactttatccctaaaccctccaggcatg

SEQ ID NO: 574269 - DNA, 33 bp, Homo sapien
tcctatgttcaatgtgcagcatgagttcattga

SEQ ID NO: 574270 - DNA, 33 bp, Homo sapien
tcctatgttcaatgtgtagcatgagttcattga

SEQ ID NO: 574271 - DNA, 33 bp, Homo sapien
gggggacagagcgagaacttatctaaacaaaca

SEQ ID NO: 574272 - DNA, 33 bp, Homo sapien
gggggacagagcgagaccttatctaaacaaaca

SEQ ID NO: 574273 - DNA, 33 bp, Homo sapien
tggcagcacctcatccaatccccatgtcaccct

SEQ ID NO: 574274 - DNA, 33 bp, Homo sapien
tggcagcacctcatccgatccccatgtcaccct

SEQ ID NO: 574275 - DNA, 33 bp, Homo sapien
gacataaaagtgaaacaggcaggagacaactgt

SEQ ID NO: 574276 - DNA, 33 bp, Homo sapien
gacataaaagtgaaactggcaggagacaactgt

SEQ ID NO: 574277 - DNA, 33 bp, Homo sapien
aaggggtgaggtcagacagatccacgggacttg

SEQ ID NO: 574278 - DNA, 33 bp, Homo sapien
aaggggtgaggtcagatagatccacgggacttg

SEQ ID NO: 574279 - DNA, 33 bp, Homo sapien
acagggagatgcagaaaactgaaatgtacaccc

SEQ ID NO: 574280 - DNA, 33 bp, Homo sapien
acagggagatgcagaacactgaaatgtacaccc

SEQ ID NO: 574281 - DNA, 33 bp, Homo sapien
gaggagcttgctcaagaacagggagatgcagaa

SEQ ID NO: 574282 - DNA, 33 bp, Homo sapien
gaggagcttgctcaaggacagggagatgcagaa

SEQ ID NO: 574283 - DNA, 33 bp, Homo sapien
ttccccttttggaaagacaagctctacggacaa

SEQ ID NO: 574284 - DNA, 33 bp, Homo sapien
ttccccttttggaaagccaagctctacggacaa

SEQ ID NO: 574285 - DNA, 33 bp, Homo sapien
ttcttccagcaaggaaatcattcagtgcatctc

SEQ ID NO: 574286 - DNA, 33 bp, Homo sapien
ttcttccagcaaggaagtcattcagtgcatctc

SEQ ID NO: 574287 - DNA, 33 bp, Homo sapien
agttatgaatgactacaagacacaaaatgcaaa

SEQ ID NO: 574288 - DNA, 33 bp, Homo sapien
agttatgaatgactacgagacacaaaatgcaaa

SEQ ID NO: 574289 - DNA, 33 bp, Homo sapien
gatgaaagagctcttaggctgttcccagtccgt

SEQ ID NO: 574290 - DNA, 33 bp, Homo sapien
gatgaaagagctcttatgctgttcccagtccgt

SEQ ID NO: 574291 - DNA, 33 bp, Homo sapien
atacaggcctaaaaagcacatctgagggctgct

SEQ ID NO: 574292 - DNA, 33 bp, Homo sapien
atacaggcctaaaaagtacatctgagggctgct

SEQ ID NO: 574293 - DNA, 33 bp, Homo sapien
tcaaggaaacagcactaaacgaaacagacaaaa

SEQ ID NO: 574294 - DNA, 33 bp, Homo sapien
tcaaggaaacagcactgaacgaaacagacaaaa

SEQ ID NO: 574295 - DNA, 33 bp, Homo sapien
ctctgccacttccaccagcatgaactgtagcaa

SEQ ID NO: 574296 - DNA, 33 bp, Homo sapien
ctctgccacttccaccggcatgaactgtagcaa

SEQ ID NO: 574297 - DNA, 33 bp, Homo sapien
gccctgcctacaaggggaatctctcggacccat

SEQ ID NO: 574298 - DNA, 33 bp, Homo sapien
gccctgcctacaagggtaatctctcggacccat

SEQ ID NO: 574299 - DNA, 33 bp, Homo sapien
gcaagctgaagttcacagcgggagcatgatgca

SEQ ID NO: 574300 - DNA, 33 bp, Homo sapien
gcaagctgaagttcacggcgggagcatgatgca

SEQ ID NO: 574301 - DNA, 33 bp, Homo sapien
agggtgttctcccaccaatggctcgaggccatc

SEQ ID NO: 574302 - DNA, 33 bp, Homo sapien
agggtgttctcccaccgatggctcgaggccatc

SEQ ID NO: 574303 - DNA, 33 bp, Homo sapien
taatttcccccactacaaaggcggtctcaaaca

SEQ ID NO: 574304 - DNA, 33 bp, Homo sapien
taatttcccccactacgaaggcggtctcaaaca

SEQ ID NO: 574305 - DNA, 33 bp, Homo sapien
cagacttggtgggagcgcgtgagtgtcatgata

SEQ ID NO: 574306 - DNA, 33 bp, Homo sapien
cagacttggtgggagctcgtgagtgtcatgata

SEQ ID NO: 574307 - DNA, 33 bp, Homo sapien
agaacgcaaactaatccacagccgcagaaagca

SEQ ID NO: 574308 - DNA, 33 bp, Homo sapien
agaacgcaaactaatcgacagccgcagaaagca

SEQ ID NO: 574309 - DNA, 33 bp, Homo sapien
cacttcctttgaaaataatggggagcttctgat

SEQ ID NO: 574310 - DNA, 33 bp, Homo sapien
cacttcctttgaaaatgatggggagcttctgat

SEQ ID NO: 574311 - DNA, 33 bp, Homo sapien
ctgaaaaacatccacagctgtgtcccatgtgag

SEQ ID NO: 574312 - DNA, 33 bp, Homo sapien
ctgaaaaacatccacatctgtgtcccatgtgag

SEQ ID NO: 574313 - DNA, 33 bp, Homo sapien
agcaattgtttcttacgcacctagtgtgtgcct

SEQ ID NO: 574314 - DNA, 33 bp, Homo sapien
agcaattgtttcttactcacctagtgtgtgcct

SEQ ID NO: 574315 - DNA, 33 bp, Homo sapien
aagcctttaataggcaaacagtgttcttcacga

SEQ ID NO: 574316 - DNA, 33 bp, Homo sapien
aagcctttaataggcagacagtgttcttcacga

SEQ ID NO: 574317 - DNA, 33 bp, Homo sapien
ctactgggtggtgacaaagcatctcagtgaaga

SEQ ID NO: 574318 - DNA, 33 bp, Homo sapien
ctactgggtggtgacacagcatctcagtgaaga

SEQ ID NO: 574319 - DNA, 33 bp, Homo sapien
acttcatattattatgaaagttgaacccagtga

SEQ ID NO: 574320 - DNA, 33 bp, Homo sapien
acttcatattattatggaagttgaacccagtga

SEQ ID NO: 574321 - DNA, 33 bp, Homo sapien
aagtgcctactcccaacttaatgacaacagcag

SEQ ID NO: 574322 - DNA, 33 bp, Homo sapien
aagtgcctactcccaagttaatgacaacagcag

SEQ ID NO: 574323 - DNA, 33 bp, Homo sapien
gttacgctgagcaaagcccccacaccacagtgg

SEQ ID NO: 574324 - DNA, 33 bp, Homo sapien
gttacgctgagcaaagtccccacaccacagtgg

SEQ ID NO: 574325 - DNA, 33 bp, Homo sapien
tggttcaggggtaagcacacgatccaatcaggg

SEQ ID NO: 574326 - DNA, 33 bp, Homo sapien
tggttcaggggtaagcgcacgatccaatcaggg

SEQ ID NO: 574327 - DNA, 33 bp, Homo sapien
tctcgggctgcccaccacagtgtgaggatgtga

SEQ ID NO: 574328 - DNA, 33 bp, Homo sapien
tctcgggctgcccaccgcagtgtgaggatgtga

SEQ ID NO: 574329 - DNA, 33 bp, Homo sapien
acaaatagaatgcaaacaagtaggtattctata

SEQ ID NO: 574330 - DNA, 33 bp, Homo sapien
acaaatagaatgcaaataagtaggtattctata

SEQ ID NO: 574331 - DNA, 33 bp, Homo sapien; identical to SEQ ID NO: 574329

SEQ ID NO: 574332 - DNA, 33 bp, Homo sapien; identical to SEQ ID NO: 574330

SEQ ID NO: 574333 - DNA, 33 bp, Homo sapien; identical to SEQ ID NO: 574329

SEQ ID NO: 574334 - DNA, 33 bp, Homo sapien; identical to SEQ ID NO: 574330

SEQ ID NO: 574335 - DNA, 33 bp, Homo sapien
tctccatttgtttaacaagtacttattgagaac

SEQ ID NO: 574336 - DNA, 33 bp, Homo sapien
tctccatttgtttaacgagtacttattgagaac

SEQ ID NO: 574337 - DNA, 33 bp, Homo sapien
gggacctggcagctccaaagaggcatctgatcc

SEQ ID NO: 574338 - DNA, 33 bp, Homo sapien
gggacctggcagctccgaagaggcatctgatcc

SEQ ID NO: 574339 - DNA, 33 bp, Homo sapien
gagagcaaggttccccaacccagaatcagagcc

SEQ ID NO: 574340 - DNA, 33 bp, Homo sapien
gagagcaaggttcccccacccagaatcagagcc

SEQ ID NO: 574341 - DNA, 33 bp, Homo sapien
gtcaaagcatccactcgaggagtttaattatat

SEQ ID NO: 574342 - DNA, 33 bp, Homo sapien
gtcaaagcatccactctaggagtttaattatat

SEQ ID NO: 574343 - DNA, 33 bp, Homo sapien
ggtagcaagacaatgacggaatgggggaggtag

SEQ ID NO: 574344 - DNA, 33 bp, Homo sapien
ggtagcaagacaatgatggaatgggggaggtag

SEQ ID NO: 574345 - DNA, 33 bp, Homo sapien
ggcatcacagtgcttcccttaaccacatggctg

SEQ ID NO: 574346 - DNA, 33 bp, Homo sapien
ggcatcacagtgcttctcttaaccacatggctg

SEQ ID NO: 574347 - DNA, 33 bp, Homo sapien
ggatggaagcccacacactgaggatggtagaat

SEQ ID NO: 574348 - DNA, 33 bp, Homo sapien
ggatggaagcccacacgctgaggatggtagaat

SEQ ID NO: 574349 - DNA, 33 bp, Homo sapien; identical to SEQ ID NO: 574347

SEQ ID NO: 574350 - DNA, 33 bp, Homo sapien; identical to SEQ ID NO: 574348

SEQ ID NO: 574351 - DNA, 33 bp, Homo sapien
gctctggacccgactcccttatgacaacagagg

SEQ ID NO: 574352 - DNA, 33 bp, Homo sapien
gctctggacccgactctcttatgacaacagagg

SEQ ID NO: 574353 - DNA, 33 bp, Homo sapien
ggaataacgcatggcacgtaataaatgctccac

SEQ ID NO: 574354 - DNA, 33 bp, Homo sapien
ggaataacgcatggcatgtaataaatgctccac

SEQ ID NO: 574355 - DNA, 33 bp, Homo sapien; identical to SEQ ID NO: 574353

SEQ ID NO: 574356 - DNA, 33 bp, Homo sapien; identical to SEQ ID NO: 574354

SEQ ID NO: 574357 - DNA, 33 bp, Homo sapien
aggccacgcagaccctaaatcaaataatcacac

SEQ ID NO: 574358 - DNA, 33 bp, Homo sapien
aggccacgcagaccctgaatcaaataatcacac

SEQ ID NO: 574359 - DNA, 33 bp, Homo sapien; identical to SEQ ID NO: 574357

SEQ ID NO: 574360 - DNA, 33 bp, Homo sapien; identical to SEQ ID NO: 574358

SEQ ID NO: 574361 - DNA, 33 bp, Homo sapien
agtggggacatgagacacagatgagaagacaca

SEQ ID NO: 574362 - DNA, 33 bp, Homo sapien
agtggggacatgagacgcagatgagaagacaca

SEQ ID NO: 574363 - DNA, 33 bp, Homo sapien
gcccgaatgaaaggaacggaccacgaggttgtc

SEQ ID NO: 574364 - DNA, 33 bp, Homo sapien
gcccgaatgaaaggaatggaccacgaggttgtc

SEQ ID NO: 574365 - DNA, 33 bp, Homo sapien; identical to SEQ ID NO: 574363

SEQ ID NO: 574366 - DNA, 33 bp, Homo sapien; identical to SEQ ID NO: 574364

SEQ ID NO: 574367 - DNA, 33 bp, Homo sapien
tgtgagtcatgcatcacggaacagaaggttcac

SEQ ID NO: 574368 - DNA, 33 bp, Homo sapien
tgtgagtcatgcatcatggaacagaaggttcac

SEQ ID NO: 574369 - DNA, 33 bp, Homo sapien
atatatattcaaagaaaaaatgtgtctgtacta

SEQ ID NO: 574370 - DNA, 33 bp, Homo sapien
atatatattcaaagaagaaatgtgtctgtacta

SEQ ID NO: 574371 - DNA, 33 bp, Homo sapien
ttgaccaatgtcattacgtgatgcatgactgtg

SEQ ID NO: 574372 - DNA, 33 bp, Homo sapien
ttgaccaatgtcattatgtgatgcatgactgtg

SEQ ID NO: 574373 - DNA, 33 bp, Homo sapien
ctggactgttctttccacagatatcctgaaggc

SEQ ID NO: 574374 - DNA, 33 bp, Homo sapien
ctggactgttctttccgcagatatcctgaaggc

SEQ ID NO: 574375 - DNA, 33 bp, Homo sapien
ctagtctggattaaacacccggaaggtacgtcc

SEQ ID NO: 574376 - DNA, 33 bp, Homo sapien
ctagtctggattaaactcccggaaggtacgtcc

SEQ ID NO: 574377 - DNA, 33 bp, Homo sapien; identical to SEQ ID NO: 574375

SEQ ID NO: 574378 - DNA, 33 bp, Homo sapien; identical to SEQ ID NO: 574376

SEQ ID NO: 574379 - DNA, 33 bp, Homo sapien
gggatgatgttatttacgtcacagtttcgttgg

SEQ ID NO: 574380 - DNA, 33 bp, Homo sapien
gggatgatgttatttatgtcacagtttcgttgg

SEQ ID NO: 574381 - DNA, 33 bp, Homo sapien
agggattgtattcatacgcaaaaattcaaaaga

SEQ ID NO: 574382 - DNA, 33 bp, Homo sapien
agggattgtattcatatgcaaaaattcaaaaga

SEQ ID NO: 574383 - DNA, 33 bp, Homo sapien; identical to SEQ ID NO: 574381

SEQ ID NO: 574384 - DNA, 33 bp, Homo sapien; identical to SEQ ID NO: 574382

SEQ ID NO: 574385 - DNA, 33 bp, Homo sapien
aagaaaagaccaacaaatcagtgggaaaatggt

SEQ ID NO: 574386 - DNA, 33 bp, Homo sapien
aagaaaagaccaacaactcagtgggaaaatggt

SEQ ID NO: 574387 - DNA, 33 bp, Homo sapien
taggagttcatcctacagatttattcacacaca

SEQ ID NO: 574388 - DNA, 33 bp, Homo sapien
taggagttcatcctacggatttattcacacaca

SEQ ID NO: 574389 - DNA, 33 bp, Homo sapien
tacactattggcaatgaattttgaaataacatt

SEQ ID NO: 574390 - DNA, 33 bp, Homo sapien
tacactattggcaatgcattttgaaataacatt

SEQ ID NO: 574391 - DNA, 33 bp, Homo sapien
agctgcataaagccacagagctagtaattggtg

SEQ ID NO: 574392 - DNA, 33 bp, Homo sapien
agctgcataaagccacggagctagtaattggtg

SEQ ID NO: 574393 - DNA, 33 bp, Homo sapien
agctctacagagaggccacctgacagaagctgt

SEQ ID NO: 574394 - DNA, 33 bp, Homo sapien
agctctacagagaggctacctgacagaagctgt

SEQ ID NO: 574395 - DNA, 33 bp, Homo sapien
taacgtgaatataatgaatgtttgctgatttgg

SEQ ID NO: 574396 - DNA, 33 bp, Homo sapien
taacgtgaatataatggatgtttgctgatttgg

SEQ ID NO: 574397 - DNA, 33 bp, Homo sapien
ttgttgtattttgcagaaagttacccttactga

SEQ ID NO: 574398 - DNA, 33 bp, Homo sapien
ttgttgtattttgcaggaagttacccttactga

SEQ ID NO: 574399 - DNA, 33 bp, Homo sapien
aactcttaatacacacaatgatgtagatgaacc

SEQ ID NO: 574400 - DNA, 33 bp, Homo sapien
aactcttaatacacacgatgatgtagatgaacc

SEQ ID NO: 574401 - DNA, 33 bp, Homo sapien
tttgaatcagatctgacaatgaagttttttcca

SEQ ID NO: 574402 - DNA, 33 bp, Homo sapien
tttgaatcagatctgagaatgaagttttttcca

SEQ ID NO: 574403 - DNA, 33 bp, Homo sapien
gggctgttgggaaacacaaaattcaaagtaatg

SEQ ID NO: 574404 - DNA, 33 bp, Homo sapien
gggctgttgggaaacagaaaattcaaagtaatg

SEQ ID NO: 574405 - DNA, 33 bp, Homo sapien
gcttctgtgaaacaaaacagtggtatcagcttc

SEQ ID NO: 574406 - DNA, 33 bp, Homo sapien
gcttctgtgaaacaaatcagtggtatcagcttc

SEQ ID NO: 574407 - DNA, 33 bp, Homo sapien
acaaataacagaataaacttcagggctgaacta

SEQ ID NO: 574408 - DNA, 33 bp, Homo sapien
acaaataacagaataatcttcagggctgaacta

SEQ ID NO: 574409 - DNA, 33 bp, Homo sapien
ccagaactcttaatacccaggaagaagcaaaaa

SEQ ID NO: 574410 - DNA, 33 bp, Homo sapien
ccagaactcttaatactcaggaagaagcaaaaa

SEQ ID NO: 574411 - DNA, 33 bp, Homo sapien
ggttgtggcctttgaacgattcattctgcctta

SEQ ID NO: 574412 - DNA, 33 bp, Homo sapien
ggttgtggcctttgaaggattcattctgcctta

SEQ ID NO: 574413 - DNA, 33 bp, Homo sapien
aattgtgcaccaaagtatcatcctagttttgtg

SEQ ID NO: 574414 - DNA, 33 bp, Homo sapien
aattgtgcaccaaagtgtcatcctagttttgtg

SEQ ID NO: 574415 - DNA, 33 bp, Homo sapien
agaagcaaaacgtggaaatgtcatttaataaag

SEQ ID NO: 574416 - DNA, 33 bp, Homo sapien
agaagcaaaacgtggagatgtcatttaataaag

SEQ ID NO: 574417 - DNA, 33 bp, Homo sapien
tatcataaaccgattacggtactatttgactcc

SEQ ID NO: 574418 - DNA, 33 bp, Homo sapien
tatcataaaccgattatggtactatttgactcc

SEQ ID NO: 574419 - DNA, 33 bp, Homo sapien
ccaaccaataccattacgtaatttttgaggtct

SEQ ID NO: 574420 - DNA, 33 bp, Homo sapien
ccaaccaataccattatgtaatttttgaggtct

SEQ ID NO: 574421 - DNA, 33 bp, Homo sapien
ccattattgagtacctattgatatgtgtggtgt

SEQ ID NO: 574422 - DNA, 33 bp, Homo sapien
ccattattgagtacctgttgatatgtgtggtgt

SEQ ID NO: 574423 - DNA, 33 bp, Homo sapien
gggtctgcctttttccaagcaagatggtctaga

SEQ ID NO: 574424 - DNA, 33 bp, Homo sapien
gggtctgcctttttcccagcaagatggtctaga

SEQ ID NO: 574425 - DNA, 33 bp, Homo sapien
ggcaggaaacctcaggccaattcatgctaaatc

SEQ ID NO: 574426 - DNA, 33 bp, Homo sapien
ggcaggaaacctcaggtcaattcatgctaaatc

SEQ ID NO: 574427 - DNA, 33 bp, Homo sapien
gaaatgagtagtattgaagacactatggtattt

SEQ ID NO: 574428 - DNA, 33 bp, Homo sapien
gaaatgagtagtattggagacactatggtattt

SEQ ID NO: 574429 - DNA, 33 bp, Homo sapien
tgcacctatgaagtccaccacctgggctccaag

SEQ ID NO: 574430 - DNA, 33 bp, Homo sapien
tgcacctatgaagtccgccacctgggctccaag

SEQ ID NO: 574431 - DNA, 33 bp, Homo sapien
acgtgattctgcctccaaggccacattttctcc

SEQ ID NO: 574432 - DNA, 33 bp, Homo sapien
acgtgattctgcctccgaggccacattttctcc

SEQ ID NO: 574433 - DNA, 33 bp, Homo sapien
aatactcctcttactacggaatttgctcagtgc

SEQ ID NO: 574434 - DNA, 33 bp, Homo sapien
aatactcctcttactatggaatttgctcagtgc

SEQ ID NO: 574435 - DNA, 33 bp, Homo sapien
tcccaagacacaaaaacgtcaaaaatgtgcaag

SEQ ID NO: 574436 - DNA, 33 bp, Homo sapien
tcccaagacacaaaaatgtcaaaaatgtgcaag

SEQ ID NO: 574437 - DNA, 33 bp, Homo sapien
cattattatctgtttaaaatgcctgtaatccca

SEQ ID NO: 574438 - DNA, 33 bp, Homo sapien
cattattatctgtttataatgcctgtaatccca

SEQ ID NO: 574439 - DNA, 33 bp, Homo sapien
tatacctctgagcagtcacatcacgtctttgaa

SEQ ID NO: 574440 - DNA, 33 bp, Homo sapien
tatacctctgagcagttacatcacgtctttgaa

SEQ ID NO: 574441 - DNA, 33 bp, Homo sapien
tgacaaatggaaacaaaccacatggtcatagac

SEQ ID NO: 574442 - DNA, 33 bp, Homo sapien
tgacaaatggaaacaacccacatggtcatagac

SEQ ID NO: 574443 - DNA, 33 bp, Homo sapien
agctccaccagcgacaaaggccctggtatgcac

SEQ ID NO: 574444 - DNA, 33 bp, Homo sapien
agctccaccagcgacacaggccctggtatgcac

SEQ ID NO: 574445 - DNA, 33 bp, Homo sapien
gttacaattgatgaagcagtgtaattcttcaga

SEQ ID NO: 574446 - DNA, 33 bp, Homo sapien
gttacaattgatgaaggagtgtaattcttcaga

SEQ ID NO: 574447 - DNA, 33 bp, Homo sapien
gcagaaaatctgtttcaaatcactctgggcccg

SEQ ID NO: 574448 - DNA, 33 bp, Homo sapien
gcagaaaatctgtttcgaatcactctgggcccg

SEQ ID NO: 574449 - DNA, 33 bp, Homo sapien
aagtagctggaactacacctaagtttttgtatt

SEQ ID NO: 574450 - DNA, 33 bp, Homo sapien
aagtagctggaactacgcctaagtttttgtatt

SEQ ID NO: 574451 - DNA, 33 bp, Homo sapien
ctgaccattctcatcaaggcagaaggtagatgg

SEQ ID NO: 574452 - DNA, 33 bp, Homo sapien
ctgaccattctcatcagggcagaaggtagatgg

SEQ ID NO: 574453 - DNA, 33 bp, Homo sapien
agctcttatcttatcaaccctgtatgtgattgc

SEQ ID NO: 574454 - DNA, 33 bp, Homo sapien
agctcttatcttatcagccctgtatgtgattgc

SEQ ID NO: 574455 - DNA, 33 bp, Homo sapien
ccctatgctgacctgcaaagttctgcttaaatg

SEQ ID NO: 574456 - DNA, 33 bp, Homo sapien
ccctatgctgacctgcgaagttctgcttaaatg

SEQ ID NO: 574457 - DNA, 33 bp, Homo sapien
gccacttgaatatggacagtgacggagaaagag

SEQ ID NO: 574458 - DNA, 33 bp, Homo sapien
gccacttgaatatggagagtgacggagaaagag

SEQ ID NO: 574459 - DNA, 33 bp, Homo sapien
tgtgcctggccctgcacctaattttagagagcc

SEQ ID NO: 574460 - DNA, 33 bp, Homo sapien
tgtgcctggccctgcatctaattttagagagcc

SEQ ID NO: 574461 - DNA, 33 bp, Homo sapien
ggacagccattaagagaatttattaagtgccag

SEQ ID NO: 574462 - DNA, 33 bp, Homo sapien
ggacagccattaagagcatttattaagtgccag

SEQ ID NO: 574463 - DNA, 33 bp, Homo sapien
ttagacaactttaaaccctgattcataaaaatg

SEQ ID NO: 574464 - DNA, 33 bp, Homo sapien
ttagacaactttaaactctgattcataaaaatg

SEQ ID NO: 574465 - DNA, 33 bp, Homo sapien
tatggattcttggtgacgcccaggcaaaggggg

SEQ ID NO: 574466 - DNA, 33 bp, Homo sapien
tatggattcttggtgatgcccaggcaaaggggg

SEQ ID NO: 574467 - DNA, 33 bp, Homo sapien
cacagcctgacacctacggagcggccctgggtc

SEQ ID NO: 574468 - DNA, 33 bp, Homo sapien
cacagcctgacacctatggagcggccctgggtc

SEQ ID NO: 574469 - DNA, 33 bp, Homo sapien
gcaaaatgacttctcaatacaaccagtgattgc

SEQ ID NO: 574470 - DNA, 33 bp, Homo sapien
gcaaaatgacttctcagtacaaccagtgattgc

SEQ ID NO: 574471 - DNA, 33 bp, Homo sapien
cggcctctccattctacgcagctttcaaaagag

SEQ ID NO: 574472 - DNA, 33 bp, Homo sapien
cggcctctccattctatgcagctttcaaaagag

SEQ ID NO: 574473 - DNA, 33 bp, Homo sapien
tggggctacatgactacagagagaggtgtccgg

SEQ ID NO: 574474 - DNA, 33 bp, Homo sapien
tggggctacatgactagagagagaggtgtccgg

SEQ ID NO: 574475 - DNA, 33 bp, Homo sapien
ccagggcaaggtcagaacaccggggaacaaact

SEQ ID NO: 574476 - DNA, 33 bp, Homo sapien
ccagggcaaggtcagagcaccggggaacaaact

SEQ ID NO: 574477 - DNA, 33 bp, Homo sapien
ttactaggtgatacaacaataagcactatctca

SEQ ID NO: 574478 - DNA, 33 bp, Homo sapien
ttactaggtgatacaataataagcactatctca

SEQ ID NO: 574479 - DNA, 33 bp, Homo sapien
agttattccccatcagaagtcccccatttctgg

SEQ ID NO: 574480 - DNA, 33 bp, Homo sapien
agttattccccatcagcagtcccccatttctgg

SEQ ID NO: 574481 - DNA, 33 bp, Homo sapien
gagggcagaatccagacagcggaaacagatgga

SEQ ID NO: 574482 - DNA, 33 bp, Homo sapien
gagggcagaatccagagagcggaaacagatgga

SEQ ID NO: 574483 - DNA, 33 bp, Homo sapien
acaatggattattgaacagctgcttcccgtgca

SEQ ID NO: 574484 - DNA, 33 bp, Homo sapien
acaatggattattgaatagctgcttcccgtgca

SEQ ID NO: 574485 - DNA, 33 bp, Homo sapien
ttcagatcacagaacactctttggcccctagtc

SEQ ID NO: 574486 - DNA, 33 bp, Homo sapien
ttcagatcacagaacagtctttggcccctagtc

SEQ ID NO: 574487 - DNA, 33 bp, Homo sapien
tagatatcatgacagccagatctcaggccatca

SEQ ID NO: 574488 - DNA, 33 bp, Homo sapien
tagatatcatgacagctagatctcaggccatca

SEQ ID NO: 574489 - DNA, 33 bp, Homo sapien
aaggtgaaattccacacctgtgggttacccacc

SEQ ID NO: 574490 - DNA, 33 bp, Homo sapien
aaggtgaaattccacatctgtgggttacccacc

SEQ ID NO: 574491 - DNA, 33 bp, Homo sapien
agtggccaggtaatcacgtctgggctccagggc

SEQ ID NO: 574492 - DNA, 33 bp, Homo sapien
agtggccaggtaatcatgtctgggctccagggc

SEQ ID NO: 574493 - DNA, 33 bp, Homo sapien
gaggacactcatttccagaagggtgagtatctg

SEQ ID NO: 574494 - DNA, 33 bp, Homo sapien
gaggacactcatttccggaagggtgagtatctg

SEQ ID NO: 574495 - DNA, 33 bp, Homo sapien
ttgcactgccaaacaacgagctttaagggacgc

SEQ ID NO: 574496 - DNA, 33 bp, Homo sapien
ttgcactgccaaacaatgagctttaagggacgc

SEQ ID NO: 574497 - DNA, 33 bp, Homo sapien
tagataatagcataccacatatatttttctgca

SEQ ID NO: 574498 - DNA, 33 bp, Homo sapien
tagataatagcataccgcatatatttttctgca

SEQ ID NO: 574499 - DNA, 33 bp, Homo sapien
agaaggattccagagtcaatgctagtaagactg

SEQ ID NO: 574500 - DNA, 33 bp, Homo sapien
agaaggattccagagttaatgctagtaagactg

SEQ ID NO: 574501 - DNA, 33 bp, Homo sapien
gcacgacggtattatacgctgtaaataactgta

SEQ ID NO: 574502 - DNA, 33 bp, Homo sapien
gcacgacggtattatatgctgtaaataactgta

SEQ ID NO: 574503 - DNA, 33 bp, Homo sapien
acctatatattgttcacctgttagacaatcatt

SEQ ID NO: 574504 - DNA, 33 bp, Homo sapien
acctatatattgttcatctgttagacaatcatt

SEQ ID NO: 574505 - DNA, 33 bp, Homo sapien
gaaaaagcagcactctcaatcactgaaagaacc

SEQ ID NO: 574506 - DNA, 33 bp, Homo sapien
gaaaaagcagcactctgaatcactgaaagaacc

SEQ ID NO: 574507 - DNA, 33 bp, Homo sapien
gatagtcacatttgaacaatctctttctatgca

SEQ ID NO: 574508 - DNA, 33 bp, Homo sapien
gatagtcacatttgaagaatctctttctatgca

SEQ ID NO: 574509 - DNA, 33 bp, Homo sapien
agggacatgattctaacggcactttaagaggat

SEQ ID NO: 574510 - DNA, 33 bp, Homo sapien
agggacatgattctaatggcactttaagaggat

SEQ ID NO: 574511 - DNA, 33 bp, Homo sapien
gcacttcttgcatttgcatactcccagtctcag

SEQ ID NO: 574512 - DNA, 33 bp, Homo sapien
gcacttcttgcatttggatactcccagtctcag

SEQ ID NO: 574513 - DNA, 33 bp, Homo sapien
ccctcctacctctgaccgggaatttcccacagt

SEQ ID NO: 574514 - DNA, 33 bp, Homo sapien
ccctcctacctctgactgggaatttcccacagt

SEQ ID NO: 574515 - DNA, 33 bp, Homo sapien
ataagttaatagaggaagagtgatattagtatt

SEQ ID NO: 574516 - DNA, 33 bp, Homo sapien
ataagttaatagaggacgagtgatattagtatt

SEQ ID NO: 574517 - DNA, 33 bp, Homo sapien
ctcctggcgacagcagacacagtttctggacag

SEQ ID NO: 574518 - DNA, 33 bp, Homo sapien
ctcctggcgacagcaggcacagtttctggacag

SEQ ID NO: 574519 - DNA, 33 bp, Homo sapien
atttattaaaaggcaccggttaatctggttaca

SEQ ID NO: 574520 - DNA, 33 bp, Homo sapien
atttattaaaaggcactggttaatctggttaca

SEQ ID NO: 574521 - DNA, 33 bp, Homo sapien
gagttccttttaagcgccattcctttacagtga

SEQ ID NO: 574522 - DNA, 33 bp, Homo sapien
gagttccttttaagcgtcattcctttacagtga

SEQ ID NO: 574523 - DNA, 33 bp, Homo sapien
cacaggacagtccccaaaacagacacttgtctg

SEQ ID NO: 574524 - DNA, 33 bp, Homo sapien
cacaggacagtccccacaacagacacttgtctg

SEQ ID NO: 574525 - DNA, 33 bp, Homo sapien
ccttagattatagccacagagctctctggaatt

SEQ ID NO: 574526 - DNA, 33 bp, Homo sapien
ccttagattatagccatagagctctctggaatt

SEQ ID NO: 574527 - DNA, 33 bp, Homo sapien
ttaatttcctcctttcacatacttgcacacatt

SEQ ID NO: 574528 - DNA, 33 bp, Homo sapien
ttaatttcctcctttcgcatacttgcacacatt

SEQ ID NO: 574529 - DNA, 33 bp, Homo sapien
gctgttccagctatgaagatccaggggcatttg

SEQ ID NO: 574530 - DNA, 33 bp, Homo sapien
gctgttccagctatgacgatccaggggcatttg

SEQ ID NO: 574531 - DNA, 33 bp, Homo sapien
aaaaaaagaaaatttacatgtcttcaatcacag

SEQ ID NO: 574532 - DNA, 33 bp, Homo sapien
aaaaaaagaaaatttatatgtcttcaatcacag

SEQ ID NO: 574533 - DNA, 33 bp, Homo sapien
tttacagacagaagaccccagtacaagcaggta

SEQ ID NO: 574534 - DNA, 33 bp, Homo sapien
tttacagacagaagactccagtacaagcaggta

SEQ ID NO: 574535 - DNA, 33 bp, Homo sapien
aggtgggtaggagtaacatttgaagaaatagac

SEQ ID NO: 574536 - DNA, 33 bp, Homo sapien
aggtgggtaggagtaagatttgaagaaatagac

SEQ ID NO: 574537 - DNA, 33 bp, Homo sapien
ggagatgaaatgcagcgatgagaaagtgtgatt

SEQ ID NO: 574538 - DNA, 33 bp, Homo sapien
ggagatgaaatgcagctatgagaaagtgtgatt

SEQ ID NO: 574539 - DNA, 33 bp, Homo sapien
tccctcatgacattgaaattcttctggtttgtt

SEQ ID NO: 574540 - DNA, 33 bp, Homo sapien
tccctcatgacattgacattcttctggtttgtt

SEQ ID NO: 574541 - DNA, 33 bp, Homo sapien
cctaaatctaatcacaagaagtaatcagacaaa

SEQ ID NO: 574542 - DNA, 33 bp, Homo sapien
cctaaatctaatcacaggaagtaatcagacaaa

SEQ ID NO: 574543 - DNA, 33 bp, Homo sapien
gctcaaatgtagcatcaccaataatggatcatt

SEQ ID NO: 574544 - DNA, 33 bp, Homo sapien
gctcaaatgtagcatcgccaataatggatcatt

SEQ ID NO: 574545 - DNA, 33 bp, Homo sapien
gcctatagtcaactaagtaccaagatctgatgt

SEQ ID NO: 574546 - DNA, 33 bp, Homo sapien
gcctatagtcaactaattaccaagatctgatgt

SEQ ID NO: 574547 - DNA, 33 bp, Homo sapien
cagcaccaggggtgaagcaacaacaatctaagc

SEQ ID NO: 574548 - DNA, 33 bp, Homo sapien
cagcaccaggggtgaatcaacaacaatctaagc

SEQ ID NO: 574549 - DNA, 33 bp, Homo sapien
ccatggagattacttccaacgaggctcttgtat

SEQ ID NO: 574550 - DNA, 33 bp, Homo sapien
ccatggagattacttctaacgaggctcttgtat

SEQ ID NO: 574551 - DNA, 33 bp, Homo sapien
agaagaaaaagtacaccgaacactcgcgggctt

SEQ ID NO: 574552 - DNA, 33 bp, Homo sapien
agaagaaaaagtacactgaacactcgcgggctt

SEQ ID NO: 574553 - DNA, 33 bp, Homo sapien
tctccaataaatgttaagtgtggttataatgac

SEQ ID NO: 574554 - DNA, 33 bp, Homo sapien
tctccaataaatgttaggtgtggttataatgac

SEQ ID NO: 574555 - DNA, 33 bp, Homo sapien
taccctggacccaccacgatggagtaatgtgga

SEQ ID NO: 574556 - DNA, 33 bp, Homo sapien
taccctggacccaccatgatggagtaatgtgga

SEQ ID NO: 574557 - DNA, 33 bp, Homo sapien
tttactttccactagacgttttcaagaggaaat

SEQ ID NO: 574558 - DNA, 33 bp, Homo sapien
tttactttccactagatgttttcaagaggaaat

SEQ ID NO: 574559 - DNA, 33 bp, Homo sapien
tacacctgacactgtacaggcaccaataagtgt

SEQ ID NO: 574560 - DNA, 33 bp, Homo sapien
tacacctgacactgtataggcaccaataagtgt

SEQ ID NO: 574561 - DNA, 33 bp, Homo sapien
gtgaacagggttgtccagatttgccttacccag

SEQ ID NO: 574562 - DNA, 33 bp, Homo sapien
gtgaacagggttgtccggatttgccttacccag

SEQ ID NO: 574563 - DNA, 33 bp, Homo sapien
aaatcccaggccccaaatctctagtgagcttcc

SEQ ID NO: 574564 - DNA, 33 bp, Homo sapien
aaatcccaggccccaagtctctagtgagcttcc

SEQ ID NO: 574565 - DNA, 33 bp, Homo sapien
ttagtcagagaaagaagaaatgaatggatgact

SEQ ID NO: 574566 - DNA, 33 bp, Homo sapien
ttagtcagagaaagaataaatgaatggatgact

SEQ ID NO: 574567 - DNA, 33 bp, Homo sapien
ggatgataaacagctcaacaacagtgccctttt

SEQ ID NO: 574568 - DNA, 33 bp, Homo sapien
ggatgataaacagctcgacaacagtgccctttt

SEQ ID NO: 574569 - DNA, 33 bp, Homo sapien
ggaagcgggtcgtggacggacttgggcaagaag

SEQ ID NO: 574570 - DNA, 33 bp, Homo sapien
ggaagcgggtcgtggatggacttgggcaagaag

SEQ ID NO: 574571 - DNA, 33 bp, Homo sapien
aaagctaggagttaagcaagattcagcttggtg

SEQ ID NO: 574572 - DNA, 33 bp, Homo sapien
aaagctaggagttaagtaagattcagcttggtg

SEQ ID NO: 574573 - DNA, 33 bp, Homo sapien
tattaccagtgaggctaaatttattccaatatc

SEQ ID NO: 574574 - DNA, 33 bp, Homo sapien
tattaccagtgaggctgaatttattccaatatc

SEQ ID NO: 574575 - DNA, 33 bp, Homo sapien
cttctctggccaccaccctactctacaacaaag

SEQ ID NO: 574576 - DNA, 33 bp, Homo sapien
cttctctggccaccactctactctacaacaaag

SEQ ID NO: 574577 - DNA, 33 bp, Homo sapien
ttacttgccgaatacactgggagaaacacgccc

SEQ ID NO: 574578 - DNA, 33 bp, Homo sapien
ttacttgccgaatacattgggagaaacacgccc

SEQ ID NO: 574579 - DNA, 33 bp, Homo sapien
cacctggctccttttacaaacttctttccactt

SEQ ID NO: 574580 - DNA, 33 bp, Homo sapien
cacctggctccttttataaacttctttccactt

SEQ ID NO: 574581 - DNA, 33 bp, Homo sapien
caagtaaagagaaatacagtgaatcatgttatt

SEQ ID NO: 574582 - DNA, 33 bp, Homo sapien
caagtaaagagaaatatagtgaatcatgttatt

SEQ ID NO: 574583 - DNA, 33 bp, Homo sapien
tatgcactaagcaacaatggctccagcactaat

SEQ ID NO: 574584 - DNA, 33 bp, Homo sapien
tatgcactaagcaacagtggctccagcactaat

SEQ ID NO: 574585 - DNA, 33 bp, Homo sapien
ttgcttgctgtgtccacggaggatgctgtgggg

SEQ ID NO: 574586 - DNA, 33 bp, Homo sapien
ttgcttgctgtgtccatggaggatgctgtgggg

SEQ ID NO: 574587 - DNA, 33 bp, Homo sapien
ccagaacacatagtccaaggaaggtgaaaatgt

SEQ ID NO: 574588 - DNA, 33 bp, Homo sapien
ccagaacacatagtccgaggaaggtgaaaatgt

SEQ ID NO: 574589 - DNA, 33 bp, Homo sapien
tcaagcactgagccacaggcttgccatacagcc

SEQ ID NO: 574590 - DNA, 33 bp, Homo sapien
tcaagcactgagccacgggcttgccatacagcc

SEQ ID NO: 574591 - DNA, 33 bp, Homo sapien
agtcatagtgtgaacacgggccaacaccacttc

SEQ ID NO: 574592 - DNA, 33 bp, Homo sapien
agtcatagtgtgaacatgggccaacaccacttc

SEQ ID NO: 574593 - DNA, 33 bp, Homo sapien
tctagtcaggctagacaacactgctgtcaacaa

SEQ ID NO: 574594 - DNA, 33 bp, Homo sapien
tctagtcaggctagacgacactgctgtcaacaa

SEQ ID NO: 574595 - DNA, 33 bp, Homo sapien
aaggagcgaagcttgcagaaagcctgctgtgag

SEQ ID NO: 574596 - DNA, 33 bp, Homo sapien
aaggagcgaagcttgcggaaagcctgctgtgag

SEQ ID NO: 574597 - DNA, 33 bp, Homo sapien
ggacagagggacagcacgtgtgaaggcaaggag

SEQ ID NO: 574598 - DNA, 33 bp, Homo sapien
ggacagagggacagcatgtgtgaaggcaaggag

SEQ ID NO: 574599 - DNA, 33 bp, Homo sapien
catagactgtgtaaagaagaccaccctgcccaa

SEQ ID NO: 574600 - DNA, 33 bp, Homo sapien
catagactgtgtaaaggagaccaccctgcccaa

SEQ ID NO: 574601 - DNA, 33 bp, Homo sapien
gcctggggtctagaaacaagagaggcatagcca

SEQ ID NO: 574602 - DNA, 33 bp, Homo sapien
gcctggggtctagaaagaagagaggcatagcca

SEQ ID NO: 574603 - DNA, 33 bp, Homo sapien
atatggagtactgaaaatagtcaaattcataga

SEQ ID NO: 574604 - DNA, 33 bp, Homo sapien
atatggagtactgaaagtagtcaaattcataga

SEQ ID NO: 574605 - DNA, 33 bp, Homo sapien
ctcgagccttttcctagagcaagcaggttgcca

SEQ ID NO: 574606 - DNA, 33 bp, Homo sapien
ctcgagccttttcctatagcaagcaggttgcca

SEQ ID NO: 574607 - DNA, 33 bp, Homo sapien
tacaagcaggtcgaaaatctcggctgggcgcag

SEQ ID NO: 574608 - DNA, 33 bp, Homo sapien
tacaagcaggtcgaaagtctcggctgggcgcag

SEQ ID NO: 574609 - DNA, 33 bp, Homo sapien
tgaatactgatatccaatagattgcttttcttt

SEQ ID NO: 574610 - DNA, 33 bp, Homo sapien
tgaatactgatatccagtagattgcttttcttt

SEQ ID NO: 574611 - DNA, 33 bp, Homo sapien
aggttgtacctacctacaatggacctacaataa

SEQ ID NO: 574612 - DNA, 33 bp, Homo sapien
aggttgtacctacctataatggacctacaataa

SEQ ID NO: 574613 - DNA, 33 bp, Homo sapien
gctgaccttcattcctcagatggagcacctgat

SEQ ID NO: 574614 - DNA, 33 bp, Homo sapien
gctgaccttcattcctgagatggagcacctgat

SEQ ID NO: 574615 - DNA, 33 bp, Homo sapien
aacaatgtatcaagcacctgttacaaggatagc

SEQ ID NO: 574616 - DNA, 33 bp, Homo sapien
aacaatgtatcaagcagctgttacaaggatagc

SEQ ID NO: 574617 - DNA, 33 bp, Homo sapien
ttcaccaaagatcccacgaccaaaagctaaaaa

SEQ ID NO: 574618 - DNA, 33 bp, Homo sapien
ttcaccaaagatcccatgaccaaaagctaaaaa

SEQ ID NO: 574619 - DNA, 33 bp, Homo sapien
cattttgagtaggaagaacacaagggagctaac

SEQ ID NO: 574620 - DNA, 33 bp, Homo sapien
cattttgagtaggaaggacacaagggagctaac

SEQ ID NO: 574621 - DNA, 33 bp, Homo sapien
ttcatacatctgttaacatttgtgaataaatag

SEQ ID NO: 574622 - DNA, 33 bp, Homo sapien
ttcatacatctgttaatatttgtgaataaatag

SEQ ID NO: 574623 - DNA, 33 bp, Homo sapien
aacaggatttggcccaaagacatgttctgtttg

SEQ ID NO: 574624 - DNA, 33 bp, Homo sapien
aacaggatttggcccagagacatgttctgtttg

SEQ ID NO: 574625 - DNA, 33 bp, Homo sapien
cccacgtcacagccaacgtcacacgaatgcaag

SEQ ID NO: 574626 - DNA, 33 bp, Homo sapien
cccacgtcacagccaatgtcacacgaatgcaag

SEQ ID NO: 574627 - DNA, 33 bp, Homo sapien
cagctctacaaaagaacgagttaatgtctttgc

SEQ ID NO: 574628 - DNA, 33 bp, Homo sapien
cagctctacaaaagaatgagttaatgtctttgc

SEQ ID NO: 574629 - DNA, 33 bp, Homo sapien
atgagtgttttcaggacagggctactgtagctt

SEQ ID NO: 574630 - DNA, 33 bp, Homo sapien
atgagtgttttcaggatagggctactgtagctt

SEQ ID NO: 574631 - DNA, 33 bp, Homo sapien
aaagcaacttcttagaaattatcaaacacagag

SEQ ID NO: 574632 - DNA, 33 bp, Homo sapien
aaagcaacttcttagagattatcaaacacagag

SEQ ID NO: 574633 - DNA, 33 bp, Homo sapien
acatacataccctgacgacagtaccaatgcaga

SEQ ID NO: 574634 - DNA, 33 bp, Homo sapien
acatacataccctgactacagtaccaatgcaga

SEQ ID NO: 574635 - DNA, 33 bp, Homo sapien
gggagtcaaaatgcacaccctttagtggcagag

SEQ ID NO: 574636 - DNA, 33 bp, Homo sapien
gggagtcaaaatgcacgccctttagtggcagag

SEQ ID NO: 574637 - DNA, 33 bp, Homo sapien
gaccctcctctgatagccatcaaggcagacgct

SEQ ID NO: 574638 - DNA, 33 bp, Homo sapien
gaccctcctctgatagtcatcaaggcagacgct

SEQ ID NO: 574639 - DNA, 33 bp, Homo sapien
tggcttaatctttctcagacacgatttcttcct

SEQ ID NO: 574640 - DNA, 33 bp, Homo sapien
tggcttaatctttctccgacacgatttcttcct

SEQ ID NO: 574641 - DNA, 33 bp, Homo sapien
aaggtgccacctctaactggctgcagaaaagtg

SEQ ID NO: 574642 - DNA, 33 bp, Homo sapien
aaggtgccacctctaattggctgcagaaaagtg

SEQ ID NO: 574643 - DNA, 33 bp, Homo sapien
tcaggatttgcagcgacagaaagtgaggcattg

SEQ ID NO: 574644 - DNA, 33 bp, Homo sapien
tcaggatttgcagcgagagaaagtgaggcattg

SEQ ID NO: 574645 - DNA, 33 bp, Homo sapien
aatgagcaacctgataagtgagaaggtaataat

SEQ ID NO: 574646 - DNA, 33 bp, Homo sapien
aatgagcaacctgatacgtgagaaggtaataat

SEQ ID NO: 574647 - DNA, 33 bp, Homo sapien
ctaatctgcaaaacggaaggtaaccatgctccc

SEQ ID NO: 574648 - DNA, 33 bp, Homo sapien
ctaatctgcaaaacgggaggtaaccatgctccc

SEQ ID NO: 574649 - DNA, 33 bp, Homo sapien
tttaccaagcaagttcacgcctgactgtcataa

SEQ ID NO: 574650 - DNA, 33 bp, Homo sapien
tttaccaagcaagttcgcgcctgactgtcataa

SEQ ID NO: 574651 - DNA, 33 bp, Homo sapien
cctctgaaaggcaagcagagctgcggaggtact

SEQ ID NO: 574652 - DNA, 33 bp, Homo sapien
cctctgaaaggcaagccgagctgcggaggtact

SEQ ID NO: 574653 - DNA, 33 bp, Homo sapien
acactgagctcccaaccaatggctctacaactc

SEQ ID NO: 574654 - DNA, 33 bp, Homo sapien
acactgagctcccaacgaatggctctacaactc

SEQ ID NO: 574655 - DNA, 33 bp, Homo sapien
aaaaagtgagagtaatcaatgtctgatgccaca

SEQ ID NO: 574656 - DNA, 33 bp, Homo sapien
aaaaagtgagagtaattaatgtctgatgccaca

SEQ ID NO: 574657 - DNA, 33 bp, Homo sapien
gcttaattgggggtcaaagttagtgttctctat

SEQ ID NO: 574658 - DNA, 33 bp, Homo sapien
gcttaattgggggtcagagttagtgttctctat

SEQ ID NO: 574659 - DNA, 33 bp, Homo sapien
gagcaagggagatagcaccttactatgccaaca

SEQ ID NO: 574660 - DNA, 33 bp, Homo sapien
gagcaagggagatagcgccttactatgccaaca

SEQ ID NO: 574661 - DNA, 33 bp, Homo sapien
tcctgaaagaagagcactgaagcctgttcatag

SEQ ID NO: 574662 - DNA, 33 bp, Homo sapien
tcctgaaagaagagcattgaagcctgttcatag

SEQ ID NO: 574663 - DNA, 33 bp, Homo sapien
gggccgctgactcaaaaccacctcgcacaagac

SEQ ID NO: 574664 - DNA, 33 bp, Homo sapien
gggccgctgactcaaagccacctcgcacaagac

SEQ ID NO: 574665 - DNA, 33 bp, Homo sapien
agcttcaatctctgcccggatgatattgggcaa

SEQ ID NO: 574666 - DNA, 33 bp, Homo sapien
agcttcaatctctgcctggatgatattgggcaa

SEQ ID NO: 574667 - DNA, 33 bp, Homo sapien
tacagctatcttggtaaattcttttcaccacct

SEQ ID NO: 574668 - DNA, 33 bp, Homo sapien
tacagctatcttggtacattcttttcaccacct

SEQ ID NO: 574669 - DNA, 33 bp, Homo sapien
ttattatttaaagaccgggaatcacagacggaa

SEQ ID NO: 574670 - DNA, 33 bp, Homo sapien
ttattatttaaagacctggaatcacagacggaa

SEQ ID NO: 574671 - DNA, 33 bp, Homo sapien
tagcccaagacacagaaatggcaagcagcactt

SEQ ID NO: 574672 - DNA, 33 bp, Homo sapien
tagcccaagacacagagatggcaagcagcactt

SEQ ID NO: 574673 - DNA, 33 bp, Homo sapien
gttaggaaggcaaggcgcagagtcaatgtgtgt

SEQ ID NO: 574674 - DNA, 33 bp, Homo sapien
gttaggaaggcaaggctcagagtcaatgtgtgt

SEQ ID NO: 574675 - DNA, 33 bp, Homo sapien
tctcttccaaggctgccatcaaggtcttaacca

SEQ ID NO: 574676 - DNA, 33 bp, Homo sapien
tctcttccaaggctgcgatcaaggtcttaacca

SEQ ID NO: 574677 - DNA, 33 bp, Homo sapien
gtggcaatgaactgacagagttctccatccaac

SEQ ID NO: 574678 - DNA, 33 bp, Homo sapien
gtggcaatgaactgacggagttctccatccaac

SEQ ID NO: 574679 - DNA, 33 bp, Homo sapien
tggaaaacatgaggaacagtggacactttgagc

SEQ ID NO: 574680 - DNA, 33 bp, Homo sapien
tggaaaacatgaggaatagtggacactttgagc

SEQ ID NO: 574681 - DNA, 33 bp, Homo sapien
agttaagaagaattgacatcagaaggaaagaaa

SEQ ID NO: 574682 - DNA, 33 bp, Homo sapien
agttaagaagaattgatatcagaaggaaagaaa

SEQ ID NO: 574683 - DNA, 33 bp, Homo sapien
cactcagggaatggcacggagtccagaattgct

SEQ ID NO: 574684 - DNA, 33 bp, Homo sapien
cactcagggaatggcatggagtccagaattgct

SEQ ID NO: 574685 - DNA, 33 bp, Homo sapien
ctgaggcagcagttgaagtggctttgccagggc

SEQ ID NO: 574686 - DNA, 33 bp, Homo sapien
ctgaggcagcagttgacgtggctttgccagggc

SEQ ID NO: 574687 - DNA, 33 bp, Homo sapien
aagagcttgtggatgacgatcccaggcatgggg

SEQ ID NO: 574688 - DNA, 33 bp, Homo sapien
aagagcttgtggatgaggatcccaggcatgggg

SEQ ID NO: 574689 - DNA, 33 bp, Homo sapien
agtgctgagggggagacgagtaaggccagaagg

SEQ ID NO: 574690 - DNA, 33 bp, Homo sapien
agtgctgagggggagatgagtaaggccagaagg

SEQ ID NO: 574691 - DNA, 33 bp, Homo sapien
ctgaatcatagggtcactcattgttgatcaaga

SEQ ID NO: 574692 - DNA, 33 bp, Homo sapien
ctgaatcatagggtcattcattgttgatcaaga

SEQ ID NO: 574693 - DNA, 33 bp, Homo sapien
ctacagaaagccaaagaccataattccctagaa

SEQ ID NO: 574694 - DNA, 33 bp, Homo sapien
ctacagaaagccaaaggccataattccctagaa

SEQ ID NO: 574695 - DNA, 33 bp, Homo sapien
tcccagttctttgaagaaatcaattcatccttg

SEQ ID NO: 574696 - DNA, 33 bp, Homo sapien
tcccagttctttgaaggaatcaattcatccttg

SEQ ID NO: 574697 - DNA, 33 bp, Homo sapien
tagccatcaacataaacatagtttccatttcag

SEQ ID NO: 574698 - DNA, 33 bp, Homo sapien
tagccatcaacataaatatagtttccatttcag

SEQ ID NO: 574699 - DNA, 33 bp, Homo sapien
agctctttgcattccccgactctgttatggagg

SEQ ID NO: 574700 - DNA, 33 bp, Homo sapien
agctctttgcattccctgactctgttatggagg

SEQ ID NO: 574701 - DNA, 33 bp, Homo sapien
atttaattaacttgtacggtattgatcctttaa

SEQ ID NO: 574702 - DNA, 33 bp, Homo sapien
atttaattaacttgtatggtattgatcctttaa

SEQ ID NO: 574703 - DNA, 33 bp, Homo sapien
gccaggattgacccaaaagctgtagtttgtcag

SEQ ID NO: 574704 - DNA, 33 bp, Homo sapien
gccaggattgacccaagagctgtagtttgtcag

SEQ ID NO: 574705 - DNA, 33 bp, Homo sapien
agtctaaaagaggccactccaataaccaaggat

SEQ ID NO: 574706 - DNA, 33 bp, Homo sapien
agtctaaaagaggccattccaataaccaaggat

SEQ ID NO: 574707 - DNA, 33 bp, Homo sapien
acatcttaaattatcacctagtccataggatca

SEQ ID NO: 574708 - DNA, 33 bp, Homo sapien
acatcttaaattatcatctagtccataggatca

SEQ ID NO: 574709 - DNA, 33 bp, Homo sapien
ggtgttaaaatgtcacaggtttcaagatacggg

SEQ ID NO: 574710 - DNA, 33 bp, Homo sapien
ggtgttaaaatgtcacgggtttcaagatacggg

SEQ ID NO: 574711 - DNA, 33 bp, Homo sapien
gtgaatagcgtatactaaggaagactgtggact

SEQ ID NO: 574712 - DNA, 33 bp, Homo sapien
gtgaatagcgtatactgaggaagactgtggact

SEQ ID NO: 574713 - DNA, 33 bp, Homo sapien
acagcacccgatgtccacaagatgaagtcagca

SEQ ID NO: 574714 - DNA, 33 bp, Homo sapien
acagcacccgatgtccgcaagatgaagtcagca

SEQ ID NO: 574715 - DNA, 33 bp, Homo sapien
cattgaggccaggaacactggtacacatccttt

SEQ ID NO: 574716 - DNA, 33 bp, Homo sapien
cattgaggccaggaacgctggtacacatccttt

SEQ ID NO: 574717 - DNA, 33 bp, Homo sapien
tctcattatgatcatacctatcctgcacaaaga

SEQ ID NO: 574718 - DNA, 33 bp, Homo sapien
tctcattatgatcatatctatcctgcacaaaga

SEQ ID NO: 574719 - DNA, 33 bp, Homo sapien
cccctgccttgcaagcactaactgctttggaat

SEQ ID NO: 574720 - DNA, 33 bp, Homo sapien
cccctgccttgcaagctctaactgctttggaat

SEQ ID NO: 574721 - DNA, 33 bp, Homo sapien
gtccaaatctcatatccctagagctgatggtgg

SEQ ID NO: 574722 - DNA, 33 bp, Homo sapien
gtccaaatctcatatctctagagctgatggtgg

SEQ ID NO: 574723 - DNA, 33 bp, Homo sapien
ctttgtgctacacccccgcattttagagactta

SEQ ID NO: 574724 - DNA, 33 bp, Homo sapien
ctttgtgctacacccctgcattttagagactta

SEQ ID NO: 574725 - DNA, 33 bp, Homo sapien
ggatgtctcagagaaccgagcgaggtgaaattt

SEQ ID NO: 574726 - DNA, 33 bp, Homo sapien
ggatgtctcagagaactgagcgaggtgaaattt

SEQ ID NO: 574727 - DNA, 33 bp, Homo sapien
ccctttctcaacgcagacaggttcaaagtcgtg

SEQ ID NO: 574728 - DNA, 33 bp, Homo sapien
ccctttctcaacgcaggcaggttcaaagtcgtg

SEQ ID NO: 574729 - DNA, 33 bp, Homo sapien
cactcatttatttataaagcacctcttctccaa

SEQ ID NO: 574730 - DNA, 33 bp, Homo sapien
cactcatttatttatagagcacctcttctccaa

SEQ ID NO: 574731 - DNA, 33 bp, Homo sapien
catgcttcattgatccaccacgttctgccttag

SEQ ID NO: 574732 - DNA, 33 bp, Homo sapien
catgcttcattgatcctccacgttctgccttag

SEQ ID NO: 574733 - DNA, 33 bp, Homo sapien
ttgatatgttggattacgattggggctgtagaa

SEQ ID NO: 574734 - DNA, 33 bp, Homo sapien
ttgatatgttggattatgattggggctgtagaa

SEQ ID NO: 574735 - DNA, 33 bp, Homo sapien
aacacgcaatgaacacactagagccctttgtaa

SEQ ID NO: 574736 - DNA, 33 bp, Homo sapien
aacacgcaatgaacacgctagagccctttgtaa

SEQ ID NO: 574737 - DNA, 33 bp, Homo sapien
ttcctcataagcaaaaatgataaagtttggcca

SEQ ID NO: 574738 - DNA, 33 bp, Homo sapien
ttcctcataagcaaaagtgataaagtttggcca

SEQ ID NO: 574739 - DNA, 33 bp, Homo sapien
agcattcccagtgccactgaccagaagttccgt

SEQ ID NO: 574740 - DNA, 33 bp, Homo sapien
agcattcccagtgccattgaccagaagttccgt

SEQ ID NO: 574741 - DNA, 33 bp, Homo sapien
ctaactagcagaaaaacgtgtcctccctggaag

SEQ ID NO: 574742 - DNA, 33 bp, Homo sapien
ctaactagcagaaaaatgtgtcctccctggaag

SEQ ID NO: 574743 - DNA, 33 bp, Homo sapien
gagaagtcactgtgataaggggagatgtctgtt

SEQ ID NO: 574744 - DNA, 33 bp, Homo sapien
gagaagtcactgtgatgaggggagatgtctgtt

SEQ ID NO: 574745 - DNA, 33 bp, Homo sapien
cccctttgtgctctgaaagcccaatttacttgt

SEQ ID NO: 574746 - DNA, 33 bp, Homo sapien
cccctttgtgctctgacagcccaatttacttgt

SEQ ID NO: 574747 - DNA, 33 bp, Homo sapien
gactttgaggatcatcacttaaccacatgtacc

SEQ ID NO: 574748 - DNA, 33 bp, Homo sapien
gactttgaggatcatcgcttaaccacatgtacc

SEQ ID NO: 574749 - DNA, 33 bp, Homo sapien
aatagtaaggtagaagcctatgaaccgacccag

SEQ ID NO: 574750 - DNA, 33 bp, Homo sapien
aatagtaaggtagaagtctatgaaccgacccag

SEQ ID NO: 574751 - DNA, 33 bp, Homo sapien
gagtcgttttcagagacgtgccacttgcaaggg

SEQ ID NO: 574752 - DNA, 33 bp, Homo sapien
gagtcgttttcagagatgtgccacttgcaaggg

SEQ ID NO: 574753 - DNA, 33 bp, Homo sapien
cctcccatgatgtcacagactcttccttctagc

SEQ ID NO: 574754 - DNA, 33 bp, Homo sapien
cctcccatgatgtcacggactcttccttctagc

SEQ ID NO: 574755 - DNA, 33 bp, Homo sapien
ttccaattaccatgtcaacatttgaaaccctga

SEQ ID NO: 574756 - DNA, 33 bp, Homo sapien
ttccaattaccatgtccacatttgaaaccctga

SEQ ID NO: 574757 - DNA, 33 bp, Homo sapien
ctatattcctcttgcgcagaaccagtgtaacac

SEQ ID NO: 574758 - DNA, 33 bp, Homo sapien
ctatattcctcttgcgtagaaccagtgtaacac

SEQ ID NO: 574759 - DNA, 33 bp, Homo sapien
aaagcatgtcacaagcaatcaatattaactttc

SEQ ID NO: 574760 - DNA, 33 bp, Homo sapien
aaagcatgtcacaagcgatcaatattaactttc

SEQ ID NO: 574761 - DNA, 33 bp, Homo sapien
gcctcagcacctccgacggtatttggcatacag

SEQ ID NO: 574762 - DNA, 33 bp, Homo sapien
gcctcagcacctccgatggtatttggcatacag

SEQ ID NO: 574763 - DNA, 33 bp, Homo sapien
gcagaggaatgtcttaacaatgtgttctgaagc

SEQ ID NO: 574764 - DNA, 33 bp, Homo sapien
gcagaggaatgtcttatcaatgtgttctgaagc

SEQ ID NO: 574765 - DNA, 33 bp, Homo sapien
actgcagttcagctttaaaaaaatgttccacca

SEQ ID NO: 574766 - DNA, 33 bp, Homo sapien
actgcagttcagctttgaaaaaatgttccacca

SEQ ID NO: 574767 - DNA, 33 bp, Homo sapien
ctttgaaatgaaagaaactggatcttaaaatcc

SEQ ID NO: 574768 - DNA, 33 bp, Homo sapien
ctttgaaatgaaagaagctggatcttaaaatcc

SEQ ID NO: 574769 - DNA, 33 bp, Homo sapien
ccacaagctaggagaacgtcctgtattcagaga

SEQ ID NO: 574770 - DNA, 33 bp, Homo sapien
ccacaagctaggagaatgtcctgtattcagaga

SEQ ID NO: 574771 - DNA, 33 bp, Homo sapien
ttcagcgaaaggatgacggatgacgtttagcgc

SEQ ID NO: 574772 - DNA, 33 bp, Homo sapien
ttcagcgaaaggatgatggatgacgtttagcgc

SEQ ID NO: 574773 - DNA, 33 bp, Homo sapien
taaaacctgattagtaaatagtttagcaagggc

SEQ ID NO: 574774 - DNA, 33 bp, Homo sapien
taaaacctgattagtagatagtttagcaagggc

SEQ ID NO: 574775 - DNA, 33 bp, Homo sapien
ataaatgatgtcaagaagatcaattcagcttca

SEQ ID NO: 574776 - DNA, 33 bp, Homo sapien
ataaatgatgtcaagaggatcaattcagcttca

SEQ ID NO: 574777 - DNA, 33 bp, Homo sapien
gcctgcgatgagagctcaagatatgctcattgt

SEQ ID NO: 574778 - DNA, 33 bp, Homo sapien
gcctgcgatgagagcttaagatatgctcattgt

SEQ ID NO: 574779 - DNA, 33 bp, Homo sapien
tgatgaagcacgaaagaaagttcagaatgtcta

SEQ ID NO: 574780 - DNA, 33 bp, Homo sapien
tgatgaagcacgaaaggaagttcagaatgtcta

SEQ ID NO: 574781 - DNA, 33 bp, Homo sapien
ttttggttcttgaccacgagtcccattttcctg

SEQ ID NO: 574782 - DNA, 33 bp, Homo sapien
ttttggttcttgaccatgagtcccattttcctg

SEQ ID NO: 574783 - DNA, 33 bp, Homo sapien
acttttcacttgtgtacatgatatgggtaaaag

SEQ ID NO: 574784 - DNA, 33 bp, Homo sapien
acttttcacttgtgtatatgatatgggtaaaag

SEQ ID NO: 574785 - DNA, 33 bp, Homo sapien
atcaaatacctacttcagaaccaaacaaaagta

SEQ ID NO: 574786 - DNA, 33 bp, Homo sapien
atcaaatacctacttcggaaccaaacaaaagta

SEQ ID NO: 574787 - DNA, 33 bp, Homo sapien
ggagctgcttaagtaccgcgaagaggttggagg

SEQ ID NO: 574788 - DNA, 33 bp, Homo sapien
ggagctgcttaagtacggcgaagaggttggagg

SEQ ID NO: 574789 - DNA, 33 bp, Homo sapien
cagtgaggacgttgtacgtgctaagaactattt

SEQ ID NO: 574790 - DNA, 33 bp, Homo sapien
cagtgaggacgttgtatgtgctaagaactattt

SEQ ID NO: 574791 - DNA, 33 bp, Homo sapien
aggcatgtggcacacacaaggactcatctccat

SEQ ID NO: 574792 - DNA, 33 bp, Homo sapien
aggcatgtggcacacataaggactcatctccat

SEQ ID NO: 574793 - DNA, 33 bp, Homo sapien
ttctgtgttgagttaaagacaggccttaataag

SEQ ID NO: 574794 - DNA, 33 bp, Homo sapien
ttctgtgttgagttaaggacaggccttaataag

SEQ ID NO: 574795 - DNA, 33 bp, Homo sapien
cagatgtccagagagacgagatgacttgctcaa

SEQ ID NO: 574796 - DNA, 33 bp, Homo sapien
cagatgtccagagagatgagatgacttgctcaa

SEQ ID NO: 574797 - DNA, 33 bp, Homo sapien
cttgtatatccaatgacgacccaacatctccac

SEQ ID NO: 574798 - DNA, 33 bp, Homo sapien
cttgtatatccaatgatgacccaacatctccac

SEQ ID NO: 574799 - DNA, 33 bp, Homo sapien
gcccatgagtctgagacggcaatgtgtgacaat

SEQ ID NO: 574800 - DNA, 33 bp, Homo sapien
gcccatgagtctgagagggcaatgtgtgacaat

SEQ ID NO: 574801 - DNA, 33 bp, Homo sapien
gtaccagtcttgttgtaaagaactcaaattagc

SEQ ID NO: 574802 - DNA, 33 bp, Homo sapien
gtaccagtcttgttgttaagaactcaaattagc

SEQ ID NO: 574803 - DNA, 33 bp, Homo sapien
ccttttaaccgtaacaatggcctttagacttcc

SEQ ID NO: 574804 - DNA, 33 bp, Homo sapien
ccttttaaccgtaacagtggcctttagacttcc

SEQ ID NO: 574805 - DNA, 33 bp, Homo sapien
atgtgataatatctgtaaagtggctggccttag

SEQ ID NO: 574806 - DNA, 33 bp, Homo sapien
atgtgataatatctgtgaagtggctggccttag

SEQ ID NO: 574807 - DNA, 33 bp, Homo sapien
aataaataagcccccaataacagcaacaagcca

SEQ ID NO: 574808 - DNA, 33 bp, Homo sapien
aataaataagcccccagtaacagcaacaagcca

SEQ ID NO: 574809 - DNA, 33 bp, Homo sapien
aactgtctgcagaagacaatggttagcaggctt

SEQ ID NO: 574810 - DNA, 33 bp, Homo sapien
aactgtctgcagaagataatggttagcaggctt

SEQ ID NO: 574811 - DNA, 33 bp, Homo sapien
caatgagtttctttaactgaagtgctaagaaca

SEQ ID NO: 574812 - DNA, 33 bp, Homo sapien
caatgagtttctttaattgaagtgctaagaaca

SEQ ID NO: 574813 - DNA, 33 bp, Homo sapien
caaactgaggctctacaagttgatgtgcacaca

SEQ ID NO: 574814 - DNA, 33 bp, Homo sapien
caaactgaggctctacgagttgatgtgcacaca

SEQ ID NO: 574815 - DNA, 33 bp, Homo sapien
aggcattaactcattaaatcctgatgacaactt

SEQ ID NO: 574816 - DNA, 33 bp, Homo sapien
aggcattaactcattacatcctgatgacaactt

SEQ ID NO: 574817 - DNA, 33 bp, Homo sapien
cttgtcaaccaagtagaaggcaaggactatgac

SEQ ID NO: 574818 - DNA, 33 bp, Homo sapien
cttgtcaaccaagtaggaggcaaggactatgac

SEQ ID NO: 574819 - DNA, 33 bp, Homo sapien
caatagggtggaagacagtatcttttctgtgtg

SEQ ID NO: 574820 - DNA, 33 bp, Homo sapien
caatagggtggaagactgtatcttttctgtgtg

SEQ ID NO: 574821 - DNA, 33 bp, Homo sapien
gcacggaacagaaactcaggaaaagcatctttg

SEQ ID NO: 574822 - DNA, 33 bp, Homo sapien
gcacggaacagaaactgaggaaaagcatctttg

SEQ ID NO: 574823 - DNA, 33 bp, Homo sapien
ggacctggttgcacggcatattagctcctgcta

SEQ ID NO: 574824 - DNA, 33 bp, Homo sapien
ggacctggttgcacggtatattagctcctgcta

SEQ ID NO: 574825 - DNA, 33 bp, Homo sapien
tgcaaggttagagtgaagatacaagaaaataca

SEQ ID NO: 574826 - DNA, 33 bp, Homo sapien
tgcaaggttagagtgaggatacaagaaaataca

SEQ ID NO: 574827 - DNA, 33 bp, Homo sapien
aatactgacaaaaagcaaggttttgtttctgag

SEQ ID NO: 574828 - DNA, 33 bp, Homo sapien
aatactgacaaaaagcgaggttttgtttctgag

SEQ ID NO: 574829 - DNA, 33 bp, Homo sapien
taggagcgttataataaaaagtcctcattttga

SEQ ID NO: 574830 - DNA, 33 bp, Homo sapien
taggagcgttataatagaaagtcctcattttga

SEQ ID NO: 574831 - DNA, 33 bp, Homo sapien
tgctgactgtgtacctcaaggccctctgacctc

SEQ ID NO: 574832 - DNA, 33 bp, Homo sapien
tgctgactgtgtaccttaaggccctctgacctc

SEQ ID NO: 574833 - DNA, 33 bp, Homo sapien
acaagaagagaagaaaagaatctgaaatagcag

SEQ ID NO: 574834 - DNA, 33 bp, Homo sapien
acaagaagagaagaaacgaatctgaaatagcag

SEQ ID NO: 574835 - DNA, 33 bp, Homo sapien
gctgcgtgagccccccacgaaaccggctctaac

SEQ ID NO: 574836 - DNA, 33 bp, Homo sapien
gctgcgtgagccccccgcgaaaccggctctaac

SEQ ID NO: 574837 - DNA, 33 bp, Homo sapien
tgttgtttattttccaaaccagtatcaggagcc

SEQ ID NO: 574838 - DNA, 33 bp, Homo sapien
tgttgtttattttccagaccagtatcaggagcc

SEQ ID NO: 574839 - DNA, 33 bp, Homo sapien
tgtgctgaaaatggccaagagcaagtcccagtt

SEQ ID NO: 574840 - DNA, 33 bp, Homo sapien
tgtgctgaaaatggccgagagcaagtcccagtt

SEQ ID NO: 574841 - DNA, 33 bp, Homo sapien
gcaagacattgtaggaaatctttgaagaacttc

SEQ ID NO: 574842 - DNA, 33 bp, Homo sapien
gcaagacattgtaggagatctttgaagaacttc

SEQ ID NO: 574843 - DNA, 33 bp, Homo sapien
tagtgctcttactggacgctttccatgcagcgt

SEQ ID NO: 574844 - DNA, 33 bp, Homo sapien
tagtgctcttactggatgctttccatgcagcgt

SEQ ID NO: 574845 - DNA, 33 bp, Homo sapien
caaaccgaggctcagacgggtgaaagaagccac

SEQ ID NO: 574846 - DNA, 33 bp, Homo sapien
caaaccgaggctcagatgggtgaaagaagccac

SEQ ID NO: 574847 - DNA, 33 bp, Homo sapien
tgactctgcaggaatcaagagagcccatgtgcc

SEQ ID NO: 574848 - DNA, 33 bp, Homo sapien
tgactctgcaggaatcgagagagcccatgtgcc

SEQ ID NO: 574849 - DNA, 33 bp, Homo sapien
attaaaaggcaggtagcattgatcggggctaaa

SEQ ID NO: 574850 - DNA, 33 bp, Homo sapien
attaaaaggcaggtagtattgatcggggctaaa

SEQ ID NO: 574851 - DNA, 33 bp, Homo sapien
cactttccatccatcacaccatttcactttgtt

SEQ ID NO: 574852 - DNA, 33 bp, Homo sapien
cactttccatccatcataccatttcactttgtt

SEQ ID NO: 574853 - DNA, 33 bp, Homo sapien
tttcatcttcagccaactgaaaaaacattggtg

SEQ ID NO: 574854 - DNA, 33 bp, Homo sapien
tttcatcttcagccaagtgaaaaaacattggtg

SEQ ID NO: 574855 - DNA, 33 bp, Homo sapien
tgggaggcagtaaagacaagcaagaaaactgag

SEQ ID NO: 574856 - DNA, 33 bp, Homo sapien
tgggaggcagtaaagataagcaagaaaactgag

SEQ ID NO: 574857 - DNA, 33 bp, Homo sapien
ggatatttctgttccacgaaagggctgcataga

SEQ ID NO: 574858 - DNA, 33 bp, Homo sapien
ggatatttctgttccatgaaagggctgcataga

SEQ ID NO: 574859 - DNA, 33 bp, Homo sapien
aaggcctcttttagtccagcaatgacagcgcta

SEQ ID NO: 574860 - DNA, 33 bp, Homo sapien
aaggcctcttttagtctagcaatgacagcgcta

SEQ ID NO: 574861 - DNA, 33 bp, Homo sapien
ctggaacaaaattaaaataattcgataggagat

SEQ ID NO: 574862 - DNA, 33 bp, Homo sapien
ctggaacaaaattaaagtaattcgataggagat

SEQ ID NO: 574863 - DNA, 33 bp, Homo sapien
ctgcctgctggcggagaattttcagctaaggct

SEQ ID NO: 574864 - DNA, 33 bp, Homo sapien
ctgcctgctggcggagtattttcagctaaggct

SEQ ID NO: 574865 - DNA, 33 bp, Homo sapien
ataacagtggtactgacggcagtgagaaatgat

SEQ ID NO: 574866 - DNA, 33 bp, Homo sapien
ataacagtggtactgatggcagtgagaaatgat

SEQ ID NO: 574867 - DNA, 33 bp, Homo sapien
gacttggaaacagtacagctttctgaaagattt

SEQ ID NO: 574868 - DNA, 33 bp, Homo sapien
gacttggaaacagtacggctttctgaaagattt

SEQ ID NO: 574869 - DNA, 33 bp, Homo sapien
acatgaatgcattgatcagaaaagtaaaaagta

SEQ ID NO: 574870 - DNA, 33 bp, Homo sapien
acatgaatgcattgattagaaaagtaaaaagta

SEQ ID NO: 574871 - DNA, 33 bp, Homo sapien
cagaatccaaacaactaacagtaacaaggattg

SEQ ID NO: 574872 - DNA, 33 bp, Homo sapien
cagaatccaaacaactgacagtaacaaggattg

SEQ ID NO: 574873 - DNA, 33 bp, Homo sapien
agatcttaattaagataaactccacattccata

SEQ ID NO: 574874 - DNA, 33 bp, Homo sapien
agatcttaattaagatgaactccacattccata

SEQ ID NO: 574875 - DNA, 33 bp, Homo sapien
ggttgttacttgcatacggtaccagatgaggtt

SEQ ID NO: 574876 - DNA, 33 bp, Homo sapien
ggttgttacttgcatatggtaccagatgaggtt

SEQ ID NO: 574877 - DNA, 33 bp, Homo sapien
gaggagtctaatgctaatactaaaaatagtatt

SEQ ID NO: 574878 - DNA, 33 bp, Homo sapien
gaggagtctaatgctactactaaaaatagtatt

SEQ ID NO: 574879 - DNA, 33 bp, Homo sapien
cttgatacggtcataactgacatttaattttct

SEQ ID NO: 574880 - DNA, 33 bp, Homo sapien
cttgatacggtcataattgacatttaattttct

SEQ ID NO: 574881 - DNA, 33 bp, Homo sapien
agcctgcatctgggctcaaagggaaatggtgtt

SEQ ID NO: 574882 - DNA, 33 bp, Homo sapien
agcctgcatctgggcttaaagggaaatggtgtt

SEQ ID NO: 574883 - DNA, 33 bp, Homo sapien
tattcagaaccttgaaagcaccgtgcagaccaa

SEQ ID NO: 574884 - DNA, 33 bp, Homo sapien
tattcagaaccttgaaggcaccgtgcagaccaa

SEQ ID NO: 574885 - DNA, 33 bp, Homo sapien
aaaaattggttcaggtgacatgggtggaaagtg

SEQ ID NO: 574886 - DNA, 33 bp, Homo sapien
aaaaattggttcaggttacatgggtggaaagtg

SEQ ID NO: 574887 - DNA, 33 bp, Homo sapien
caaaatgcctaggttcaagttccaactctgcct

SEQ ID NO: 574888 - DNA, 33 bp, Homo sapien
caaaatgcctaggttcgagttccaactctgcct

SEQ ID NO: 574889 - DNA, 33 bp, Homo sapien
ctggcagtcccagcgcaacataccctacaaaca

SEQ ID NO: 574890 - DNA, 33 bp, Homo sapien
ctggcagtcccagcgcgacataccctacaaaca

SEQ ID NO: 574891 - DNA, 33 bp, Homo sapien
tcgcatcaggtgaggcaccgttttgaggaatgt

SEQ ID NO: 574892 - DNA, 33 bp, Homo sapien
tcgcatcaggtgaggcgccgttttgaggaatgt

SEQ ID NO: 574893 - DNA, 33 bp, Homo sapien
cctgggcagcatagtgacacctgtatctaataa

SEQ ID NO: 574894 - DNA, 33 bp, Homo sapien
cctgggcagcatagtggcacctgtatctaataa

SEQ ID NO: 574895 - DNA, 33 bp, Homo sapien
tcctcattgtcagatgaacaaactgttgaaaac

SEQ ID NO: 574896 - DNA, 33 bp, Homo sapien
tcctcattgtcagatggacaaactgttgaaaac

SEQ ID NO: 574897 - DNA, 33 bp, Homo sapien
aatagcacctaccttaaagggttgctgtaagtg

SEQ ID NO: 574898 - DNA, 33 bp, Homo sapien
aatagcacctaccttagagggttgctgtaagtg

SEQ ID NO: 574899 - DNA, 33 bp, Homo sapien
gcgtgtattttagagacggagtctggctctgtc

SEQ ID NO: 574900 - DNA, 33 bp, Homo sapien
gcgtgtattttagagatggagtctggctctgtc

SEQ ID NO: 574901 - DNA, 33 bp, Homo sapien
aggagggtcgaagcccagatggatgaatgaatg

SEQ ID NO: 574902 - DNA, 33 bp, Homo sapien
aggagggtcgaagcccggatggatgaatgaatg

SEQ ID NO: 574903 - DNA, 33 bp, Homo sapien
gataacatggcacgtacggcgtatgcacgccca

SEQ ID NO: 574904 - DNA, 33 bp, Homo sapien
gataacatggcacgtatggcgtatgcacgccca

SEQ ID NO: 574905 - DNA, 33 bp, Homo sapien
tagctggtggttcacacgcgtccctccagagtg

SEQ ID NO: 574906 - DNA, 33 bp, Homo sapien
tagctggtggttcacatgcgtccctccagagtg

SEQ ID NO: 574907 - DNA, 33 bp, Homo sapien
attccatcatggctgaaagttctactgggcaac

SEQ ID NO: 574908 - DNA, 33 bp, Homo sapien
attccatcatggctgagagttctactgggcaac

SEQ ID NO: 574909 - DNA, 33 bp, Homo sapien
gtctctactacaaataccaaacttagctgggca

SEQ ID NO: 574910 - DNA, 33 bp, Homo sapien
gtctctactacaaatagcaaacttagctgggca

SEQ ID NO: 574911 - DNA, 33 bp, Homo sapien
tctcagattctacaacaagatgagattgccaga

SEQ ID NO: 574912 - DNA, 33 bp, Homo sapien
tctcagattctacaacgagatgagattgccaga

SEQ ID NO: 574913 - DNA, 33 bp, Homo sapien
actaaagagcctgaaaatgtaataataccatat

SEQ ID NO: 574914 - DNA, 33 bp, Homo sapien
actaaagagcctgaaattgtaataataccatat

SEQ ID NO: 574915 - DNA, 33 bp, Homo sapien
gctgtgctatgcattacaggaaatttagcagca

SEQ ID NO: 574916 - DNA, 33 bp, Homo sapien
gctgtgctatgcattataggaaatttagcagca

SEQ ID NO: 574917 - DNA, 33 bp, Homo sapien
ctagacatcattgttacgtaattgcagttattt

SEQ ID NO: 574918 - DNA, 33 bp, Homo sapien
ctagacatcattgttatgtaattgcagttattt

SEQ ID NO: 574919 - DNA, 33 bp, Homo sapien
atctgctggtacaaaacctgaattataggaaga

SEQ ID NO: 574920 - DNA, 33 bp, Homo sapien
atctgctggtacaaaatctgaattataggaaga

SEQ ID NO: 574921 - DNA, 33 bp, Homo sapien
tttttgactgctaaaagtaagctgctaaagagg

SEQ ID NO: 574922 - DNA, 33 bp, Homo sapien
tttttgactgctaaaattaagctgctaaagagg

SEQ ID NO: 574923 - DNA, 33 bp, Homo sapien
aagtaactaccaaataaagccgttccaaaactt

SEQ ID NO: 574924 - DNA, 33 bp, Homo sapien
aagtaactaccaaatacagccgttccaaaactt

SEQ ID NO: 574925 - DNA, 33 bp, Homo sapien
cgatacaccttttctgcaataatgtgtgtattg

SEQ ID NO: 574926 - DNA, 33 bp, Homo sapien
cgatacaccttttctgtaataatgtgtgtattg

SEQ ID NO: 574927 - DNA, 33 bp, Homo sapien
ttctaaactgcttctaggtattattaaaccaaa

SEQ ID NO: 574928 - DNA, 33 bp, Homo sapien
ttctaaactgcttctatgtattattaaaccaaa

SEQ ID NO: 574929 - DNA, 33 bp, Homo sapien
gtcctgcttttcttgacatgacatttgtggaag

SEQ ID NO: 574930 - DNA, 33 bp, Homo sapien
gtcctgcttttcttgatatgacatttgtggaag

SEQ ID NO: 574931 - DNA, 33 bp, Homo sapien
aaacaacttttgattacggacttgcctgttgct

SEQ ID NO: 574932 - DNA, 33 bp, Homo sapien
aaacaacttttgattatggacttgcctgttgct

SEQ ID NO: 574933 - DNA, 33 bp, Homo sapien
ctgccttccactgagacctgtgcaaagttactg

SEQ ID NO: 574934 - DNA, 33 bp, Homo sapien
ctgccttccactgagatctgtgcaaagttactg

SEQ ID NO: 574935 - DNA, 33 bp, Homo sapien
tcttccaaactaggtcccatttattagttctct

SEQ ID NO: 574936 - DNA, 33 bp, Homo sapien
tcttccaaactaggtctcatttattagttctct

SEQ ID NO: 574937 - DNA, 33 bp, Homo sapien
agcagttcttaatgggaacaatgtgccttttcc

SEQ ID NO: 574938 - DNA, 33 bp, Homo sapien
agcagttcttaatggggacaatgtgccttttcc

SEQ ID NO: 574939 - DNA, 33 bp, Homo sapien
gcaaagtggttcggacagcgtctggtcctacgt

SEQ ID NO: 574940 - DNA, 33 bp, Homo sapien
gcaaagtggttcggacggcgtctggtcctacgt

SEQ ID NO: 574941 - DNA, 33 bp, Homo sapien
ggaggtgagttgactagctccacataaaccctg

SEQ ID NO: 574942 - DNA, 33 bp, Homo sapien
ggaggtgagttgactatctccacataaaccctg

SEQ ID NO: 574943 - DNA, 33 bp, Homo sapien
cctcatggagctcacagtccagggagaaagaca

SEQ ID NO: 574944 - DNA, 33 bp, Homo sapien
cctcatggagctcacattccagggagaaagaca

SEQ ID NO: 574945 - DNA, 33 bp, Homo sapien
agctctgaaaaatggacaggagagcagagaccc

SEQ ID NO: 574946 - DNA, 33 bp, Homo sapien
agctctgaaaaatggataggagagcagagaccc

SEQ ID NO: 574947 - DNA, 33 bp, Homo sapien
tttcagagctcttccccgactaccacataggta

SEQ ID NO: 574948 - DNA, 33 bp, Homo sapien
tttcagagctcttccctgactaccacataggta

SEQ ID NO: 574949 - DNA, 33 bp, Homo sapien
ataataatcaggcaagacacagtatttcaggca

SEQ ID NO: 574950 - DNA, 33 bp, Homo sapien
ataataatcaggcaaggcacagtatttcaggca

SEQ ID NO: 574951 - DNA, 33 bp, Homo sapien
aagatcttattgcacactatgataatggatatg

SEQ ID NO: 574952 - DNA, 33 bp, Homo sapien
aagatcttattgcacagtatgataatggatatg

SEQ ID NO: 574953 - DNA, 33 bp, Homo sapien
ggaggaattggtaggtcaaagagaggagggact

SEQ ID NO: 574954 - DNA, 33 bp, Homo sapien
ggaggaattggtaggtgaaagagaggagggact

SEQ ID NO: 574955 - DNA, 33 bp, Homo sapien
tagcaacctggacataaaatttcagaaaggatg

SEQ ID NO: 574956 - DNA, 33 bp, Homo sapien
tagcaacctggacatacaatttcagaaaggatg

SEQ ID NO: 574957 - DNA, 33 bp, Homo sapien
cgtccaccacaaaaccaagcatgactttgccta

SEQ ID NO: 574958 - DNA, 33 bp, Homo sapien
cgtccaccacaaaaccgagcatgactttgccta

SEQ ID NO: 574959 - DNA, 33 bp, Homo sapien
tctggaggtaatgtcacgtgttacagccactct

SEQ ID NO: 574960 - DNA, 33 bp, Homo sapien
tctggaggtaatgtcatgtgttacagccactct

SEQ ID NO: 574961 - DNA, 33 bp, Homo sapien
tacctattctggttaaagtgaacagattcagat

SEQ ID NO: 574962 - DNA, 33 bp, Homo sapien
tacctattctggttaacgtgaacagattcagat

SEQ ID NO: 574963 - DNA, 33 bp, Homo sapien
gacccagaaacagtgacgttcagaggcaacccc

SEQ ID NO: 574964 - DNA, 33 bp, Homo sapien
gacccagaaacagtgaggttcagaggcaacccc

SEQ ID NO: 574965 - DNA, 33 bp, Homo sapien
gtatcgtagaggctcaatgacctttaaaatgag

SEQ ID NO: 574966 - DNA, 33 bp, Homo sapien
gtatcgtagaggctcattgacctttaaaatgag

SEQ ID NO: 574967 - DNA, 33 bp, Homo sapien
tactcagagacatccacgaaaggtaaccgagtg

SEQ ID NO: 574968 - DNA, 33 bp, Homo sapien
tactcagagacatccaggaaaggtaaccgagtg

SEQ ID NO: 574969 - DNA, 33 bp, Homo sapien
aattggatatctacacaaaaagaactaaagaca

SEQ ID NO: 574970 - DNA, 33 bp, Homo sapien
aattggatatctacacgaaaagaactaaagaca

SEQ ID NO: 574971 - DNA, 33 bp, Homo sapien
caagcctgcccgtgaaaagaatggcttttatat

SEQ ID NO: 574972 - DNA, 33 bp, Homo sapien
caagcctgcccgtgaacagaatggcttttatat

SEQ ID NO: 574973 - DNA, 33 bp, Homo sapien
attgcttcaagttaaacgaaccgagagcgtggt

SEQ ID NO: 574974 - DNA, 33 bp, Homo sapien
attgcttcaagttaaatgaaccgagagcgtggt

SEQ ID NO: 574975 - DNA, 33 bp, Homo sapien
gtagacaatcagccccaacactaacaacactct

SEQ ID NO: 574976 - DNA, 33 bp, Homo sapien
gtagacaatcagccccgacactaacaacactct

SEQ ID NO: 574977 - DNA, 33 bp, Homo sapien
aacaggattttgacacactaagatctcccagaa

SEQ ID NO: 574978 - DNA, 33 bp, Homo sapien
aacaggattttgacacgctaagatctcccagaa

SEQ ID NO: 574979 - DNA, 33 bp, Homo sapien
atcctatagaatctgacgccaaaatatttccct

SEQ ID NO: 574980 - DNA, 33 bp, Homo sapien
atcctatagaatctgatgccaaaatatttccct

SEQ ID NO: 574981 - DNA, 33 bp, Homo sapien
attttcccgagaaaaactgtagctcagcatgtt

SEQ ID NO: 574982 - DNA, 33 bp, Homo sapien
attttcccgagaaaaattgtagctcagcatgtt

SEQ ID NO: 574983 - DNA, 33 bp, Homo sapien
tacattagtttgtcaactgctttcttaatgcaa

SEQ ID NO: 574984 - DNA, 33 bp, Homo sapien
tacattagtttgtcaattgctttcttaatgcaa

SEQ ID NO: 574985 - DNA, 33 bp, Homo sapien
taccactaaaataaaacgaaggagcagatattc

SEQ ID NO: 574986 - DNA, 33 bp, Homo sapien
taccactaaaataaaatgaaggagcagatattc

SEQ ID NO: 574987 - DNA, 33 bp, Homo sapien
agtagaaaaaatagaaatgcctaaatagtcacc

SEQ ID NO: 574988 - DNA, 33 bp, Homo sapien
agtagaaaaaatagaagtgcctaaatagtcacc

SEQ ID NO: 574989 - DNA, 33 bp, Homo sapien
atttcagaaaacggtcacatgtaaattcattct

SEQ ID NO: 574990 - DNA, 33 bp, Homo sapien
atttcagaaaacggtcgcatgtaaattcattct

SEQ ID NO: 574991 - DNA, 33 bp, Homo sapien
tttactgcccttcgtgaaaatgtccggggtcaa

SEQ ID NO: 574992 - DNA, 33 bp, Homo sapien
tttactgcccttcgtggaaatgtccggggtcaa

SEQ ID NO: 574993 - DNA, 33 bp, Homo sapien
atccactctatgctatcaaaagggctagaattt

SEQ ID NO: 574994 - DNA, 33 bp, Homo sapien
atccactctatgctattaaaagggctagaattt

SEQ ID NO: 574995 - DNA, 33 bp, Homo sapien
ggccttgggtgactcaactcagaatgagacatg

SEQ ID NO: 574996 - DNA, 33 bp, Homo sapien
ggccttgggtgactcacctcagaatgagacatg

SEQ ID NO: 574997 - DNA, 33 bp, Homo sapien
cagctgaaatgtgccacatccggattgaggtgt

SEQ ID NO: 574998 - DNA, 33 bp, Homo sapien
cagctgaaatgtgccatatccggattgaggtgt

SEQ ID NO: 574999 - DNA, 33 bp, Homo sapien
gttgtgaaacacagaaatccaggttatacctca

SEQ ID NO: 575000 - DNA, 33 bp, Homo sapien
gttgtgaaacacagaactccaggttatacctca

SEQ ID NO: 575001 - DNA, 33 bp, Homo sapien
acagttgtggagaacaaaaatccgaaatcaagg

SEQ ID NO: 575002 - DNA, 33 bp, Homo sapien
acagttgtggagaacagaaatccgaaatcaagg

SEQ ID NO: 575003 - DNA, 33 bp, Homo sapien
caaggctacagaactaagaggtggtagagctgg

SEQ ID NO: 575004 - DNA, 33 bp, Homo sapien
caaggctacagaactaggaggtggtagagctgg

SEQ ID NO: 575005 - DNA, 33 bp, Homo sapien
gtattcattattaaacagcaggtaatggcacaa

SEQ ID NO: 575006 - DNA, 33 bp, Homo sapien
gtattcattattaaacggcaggtaatggcacaa

SEQ ID NO: 575007 - DNA, 33 bp, Homo sapien
ttggtttatgggatacaccaagcctctgaatca

SEQ ID NO: 575008 - DNA, 33 bp, Homo sapien
ttggtttatgggataccccaagcctctgaatca

SEQ ID NO: 575009 - DNA, 33 bp, Homo sapien
tctccccaccaaatcacccactgcaagtgtcaa

SEQ ID NO: 575010 - DNA, 33 bp, Homo sapien
tctccccaccaaatcatccactgcaagtgtcaa

SEQ ID NO: 575011 - DNA, 33 bp, Homo sapien
ttcaatcgctcaaccactatttcttgagtaact

SEQ ID NO: 575012 - DNA, 33 bp, Homo sapien
ttcaatcgctcaaccattatttcttgagtaact

SEQ ID NO: 575013 - DNA, 33 bp, Homo sapien
tgcactttttatcatgaaacaagttgggtttta

SEQ ID NO: 575014 - DNA, 33 bp, Homo sapien
tgcactttttatcatggaacaagttgggtttta

SEQ ID NO: 575015 - DNA, 33 bp, Homo sapien
ttaccttcagattccaaaggacaatggccttca

SEQ ID NO: 575016 - DNA, 33 bp, Homo sapien
ttaccttcagattccagaggacaatggccttca

SEQ ID NO: 575017 - DNA, 33 bp, Homo sapien
agtgacaagcttcaaactggaggccaagccata

SEQ ID NO: 575018 - DNA, 33 bp, Homo sapien
agtgacaagcttcaaattggaggccaagccata

SEQ ID NO: 575019 - DNA, 33 bp, Homo sapien
tctggggaaggacatcagaggcccaagaacaac

SEQ ID NO: 575020 - DNA, 33 bp, Homo sapien
tctggggaaggacatcggaggcccaagaacaac

SEQ ID NO: 575021 - DNA, 33 bp, Homo sapien
tgctgtccatcaggtcaccacatggcccaggtg

SEQ ID NO: 575022 - DNA, 33 bp, Homo sapien
tgctgtccatcaggtcgccacatggcccaggtg

SEQ ID NO: 575023 - DNA, 33 bp, Homo sapien
tctcttcaagaaggccccaattttcacgttttc

SEQ ID NO: 575024 - DNA, 33 bp, Homo sapien
tctcttcaagaaggcctcaattttcacgttttc

SEQ ID NO: 575025 - DNA, 33 bp, Homo sapien
tactcttttttctataacaataatgccttggcc

SEQ ID NO: 575026 - DNA, 33 bp, Homo sapien
tactcttttttctataccaataatgccttggcc

SEQ ID NO: 575027 - DNA, 33 bp, Homo sapien
ctattcacacgattcaacactcaaaaggtacaa

SEQ ID NO: 575028 - DNA, 33 bp, Homo sapien
ctattcacacgattcagcactcaaaaggtacaa

SEQ ID NO: 575029 - DNA, 33 bp, Homo sapien
gatatagaatgatgtgcatactgtaacaaaaag

SEQ ID NO: 575030 - DNA, 33 bp, Homo sapien
gatatagaatgatgtgtatactgtaacaaaaag

SEQ ID NO: 575031 - DNA, 33 bp, Homo sapien
tatatttgatgtagcaagtactcctagagaaaa

SEQ ID NO: 575032 - DNA, 33 bp, Homo sapien
tatatttgatgtagcacgtactcctagagaaaa

SEQ ID NO: 575033 - DNA, 33 bp, Homo sapien
gtgctttattaggcaaagtttttagcccagaaa

SEQ ID NO: 575034 - DNA, 33 bp, Homo sapien
gtgctttattaggcaacgtttttagcccagaaa

SEQ ID NO: 575035 - DNA, 33 bp, Homo sapien
cactgagaagcaagaacgaggatgctcaggtgt

SEQ ID NO: 575036 - DNA, 33 bp, Homo sapien
cactgagaagcaagaatgaggatgctcaggtgt

SEQ ID NO: 575037 - DNA, 33 bp, Homo sapien
tgatcagggaaaacaccgtggaaagagaaaaga

SEQ ID NO: 575038 - DNA, 33 bp, Homo sapien
tgatcagggaaaacactgtggaaagagaaaaga

SEQ ID NO: 575039 - DNA, 33 bp, Homo sapien
tagtttaaatggatgacgatgaatacaaattta

SEQ ID NO: 575040 - DNA, 33 bp, Homo sapien
tagtttaaatggatgatgatgaatacaaattta

SEQ ID NO: 575041 - DNA, 33 bp, Homo sapien
ttgctgagaagtccgacagaatgatcaattaac

SEQ ID NO: 575042 - DNA, 33 bp, Homo sapien
ttgctgagaagtccgatagaatgatcaattaac

SEQ ID NO: 575043 - DNA, 33 bp, Homo sapien
gaaaactgaggttctgaaaggttaagtcacttg

SEQ ID NO: 575044 - DNA, 33 bp, Homo sapien
gaaaactgaggttctgcaaggttaagtcacttg

SEQ ID NO: 575045 - DNA, 33 bp, Homo sapien
cttggcctttttagtgcatcatatcaggagtta

SEQ ID NO: 575046 - DNA, 33 bp, Homo sapien
cttggcctttttagtgtatcatatcaggagtta

SEQ ID NO: 575047 - DNA, 33 bp, Homo sapien
aggatgctgagcttccaagaaattgatggacct

SEQ ID NO: 575048 - DNA, 33 bp, Homo sapien
aggatgctgagcttccgagaaattgatggacct

SEQ ID NO: 575049 - DNA, 33 bp, Homo sapien
ccgtgagggaacagtagcggaggcatttgggag

SEQ ID NO: 575050 - DNA, 33 bp, Homo sapien
ccgtgagggaacagtatcggaggcatttgggag

SEQ ID NO: 575051 - DNA, 33 bp, Homo sapien
ttctatgtgacatctgaaccattaattctctta

SEQ ID NO: 575052 - DNA, 33 bp, Homo sapien
ttctatgtgacatctgcaccattaattctctta

SEQ ID NO: 575053 - DNA, 33 bp, Homo sapien
acatttgttttctgtaggcctaagtccctcaaa

SEQ ID NO: 575054 - DNA, 33 bp, Homo sapien
acatttgttttctgtatgcctaagtccctcaaa

SEQ ID NO: 575055 - DNA, 33 bp, Homo sapien
gaagggccttcgaccactgaaatcaagactcct

SEQ ID NO: 575056 - DNA, 33 bp, Homo sapien
gaagggccttcgaccattgaaatcaagactcct

SEQ ID NO: 575057 - DNA, 33 bp, Homo sapien
gaatttttgagactggcaagaattccaagattc

SEQ ID NO: 575058 - DNA, 33 bp, Homo sapien
gaatttttgagactggtaagaattccaagattc

SEQ ID NO: 575059 - DNA, 33 bp, Homo sapien
ttggttttaacttgaaagtgataagtgatctca

SEQ ID NO: 575060 - DNA, 33 bp, Homo sapien
ttggttttaacttgaatgtgataagtgatctca

SEQ ID NO: 575061 - DNA, 33 bp, Homo sapien
cttaaaattcacaacacaaccttcacaagaatg

SEQ ID NO: 575062 - DNA, 33 bp, Homo sapien
cttaaaattcacaacataaccttcacaagaatg

SEQ ID NO: 575063 - DNA, 33 bp, Homo sapien
actggcatgttgtcagcaaacaagagtaacatg

SEQ ID NO: 575064 - DNA, 33 bp, Homo sapien
actggcatgttgtcagtaaacaagagtaacatg

SEQ ID NO: 575065 - DNA, 33 bp, Homo sapien
cattcattcttaaagcaactttgaaaccaggac

SEQ ID NO: 575066 - DNA, 33 bp, Homo sapien
cattcattcttaaagcgactttgaaaccaggac

SEQ ID NO: 575067 - DNA, 33 bp, Homo sapien
tttttaccctttcggcaattggatagactacat

SEQ ID NO: 575068 - DNA, 33 bp, Homo sapien
tttttaccctttcggcgattggatagactacat

SEQ ID NO: 575069 - DNA, 33 bp, Homo sapien
catgactgaatcattacctaactgatacaccga

SEQ ID NO: 575070 - DNA, 33 bp, Homo sapien
catgactgaatcattatctaactgatacaccga

SEQ ID NO: 575071 - DNA, 33 bp, Homo sapien
ttaaactcaatacatacagttccaaaattgcac

SEQ ID NO: 575072 - DNA, 33 bp, Homo sapien
ttaaactcaatacatatagttccaaaattgcac

SEQ ID NO: 575073 - DNA, 33 bp, Homo sapien
cagactgaccttggacaaatttgggtgttttat

SEQ ID NO: 575074 - DNA, 33 bp, Homo sapien
cagactgaccttggaccaatttgggtgttttat

SEQ ID NO: 575075 - DNA, 33 bp, Homo sapien
gaaatatcctaaaataccagttggcatatgctg

SEQ ID NO: 575076 - DNA, 33 bp, Homo sapien
gaaatatcctaaaatagcagttggcatatgctg

SEQ ID NO: 575077 - DNA, 33 bp, Homo sapien
ataccaacatttgtcaaagaaagaaaagaagat

SEQ ID NO: 575078 - DNA, 33 bp, Homo sapien
ataccaacatttgtcagagaaagaaaagaagat

SEQ ID NO: 575079 - DNA, 33 bp, Homo sapien
ttctataaagtcatcacgaacactgaatttgtg

SEQ ID NO: 575080 - DNA, 33 bp, Homo sapien
ttctataaagtcatcatgaacactgaatttgtg

SEQ ID NO: 575081 - DNA, 33 bp, Homo sapien
ccatatccctaatgtcactacttcaatcataag

SEQ ID NO: 575082 - DNA, 33 bp, Homo sapien
ccatatccctaatgtcgctacttcaatcataag

SEQ ID NO: 575083 - DNA, 33 bp, Homo sapien
aaaatctggccagttcaaagagatgttgagaaa

SEQ ID NO: 575084 - DNA, 33 bp, Homo sapien
aaaatctggccagttcgaagagatgttgagaaa

SEQ ID NO: 575085 - DNA, 33 bp, Homo sapien
gcagtgatgtacattacggaactttctggcaaa

SEQ ID NO: 575086 - DNA, 33 bp, Homo sapien
gcagtgatgtacattatggaactttctggcaaa

SEQ ID NO: 575087 - DNA, 33 bp, Homo sapien
tgctgctacacccacacagttcaccttaagcac

SEQ ID NO: 575088 - DNA, 33 bp, Homo sapien
tgctgctacacccacagagttcaccttaagcac

SEQ ID NO: 575089 - DNA, 33 bp, Homo sapien
tgagtgctgtgcttgtaaatccatcatattttt

SEQ ID NO: 575090 - DNA, 33 bp, Homo sapien
tgagtgctgtgcttgtgaatccatcatattttt

SEQ ID NO: 575091 - DNA, 33 bp, Homo sapien
tttaagtgtattataacgcctaaacaatgtcca

SEQ ID NO: 575092 - DNA, 33 bp, Homo sapien
tttaagtgtattataatgcctaaacaatgtcca

SEQ ID NO: 575093 - DNA, 33 bp, Homo sapien
tgatgtaagttgacacggaacaaatgcctctat

SEQ ID NO: 575094 - DNA, 33 bp, Homo sapien
tgatgtaagttgacactgaacaaatgcctctat

SEQ ID NO: 575095 - DNA, 33 bp, Homo sapien
ctatgggcattggctagggtaacaaaatttaat

SEQ ID NO: 575096 - DNA, 33 bp, Homo sapien
ctatgggcattggctatggtaacaaaatttaat

SEQ ID NO: 575097 - DNA, 33 bp, Homo sapien
ctctacctacgatggaatataaatgagccttaa

SEQ ID NO: 575098 - DNA, 33 bp, Homo sapien
ctctacctacgatggagtataaatgagccttaa

SEQ ID NO: 575099 - DNA, 33 bp, Homo sapien
ggcttaagtcagaaaaatttgggttttttgtca

SEQ ID NO: 575100 - DNA, 33 bp, Homo sapien
ggcttaagtcagaaaagtttgggttttttgtca

SEQ ID NO: 575101 - DNA, 33 bp, Homo sapien
gcagaacactggaaacaatctaaatgatcatta

SEQ ID NO: 575102 - DNA, 33 bp, Homo sapien
gcagaacactggaaacgatctaaatgatcatta

SEQ ID NO: 575103 - DNA, 33 bp, Homo sapien
cttaacagtcaccatactaaattgtcttttttt

SEQ ID NO: 575104 - DNA, 33 bp, Homo sapien
cttaacagtcaccatattaaattgtcttttttt

SEQ ID NO: 575105 - DNA, 33 bp, Homo sapien
tcatcagcattcctaaactgtacccatggatgg

SEQ ID NO: 575106 - DNA, 33 bp, Homo sapien
tcatcagcattcctaacctgtacccatggatgg

SEQ ID NO: 575107 - DNA, 33 bp, Homo sapien
gactggaggataagaaaggaaccatgtaggaat

SEQ ID NO: 575108 - DNA, 33 bp, Homo sapien
gactggaggataagaagggaaccatgtaggaat

SEQ ID NO: 575109 - DNA, 33 bp, Homo sapien
ctattcaagtggactccagcagggaacaatgtg

SEQ ID NO: 575110 - DNA, 33 bp, Homo sapien
ctattcaagtggactctagcagggaacaatgtg

SEQ ID NO: 575111 - DNA, 33 bp, Homo sapien
agctctggattagacaataaacaagacagacat

SEQ ID NO: 575112 - DNA, 33 bp, Homo sapien
agctctggattagacagtaaacaagacagacat

SEQ ID NO: 575113 - DNA, 33 bp, Homo sapien
ttcgcattgaaaggaacatctctgtgcccagaa

SEQ ID NO: 575114 - DNA, 33 bp, Homo sapien
ttcgcattgaaaggaagatctctgtgcccagaa

SEQ ID NO: 575115 - DNA, 33 bp, Homo sapien
ttaataatgtttgttcaaaagaggacagcaagc

SEQ ID NO: 575116 - DNA, 33 bp, Homo sapien
ttaataatgtttgttcgaaagaggacagcaagc

SEQ ID NO: 575117 - DNA, 33 bp, Homo sapien
gcagctgcagcatcgcaaaaacacaacctctcc

SEQ ID NO: 575118 - DNA, 33 bp, Homo sapien
gcagctgcagcatcgcgaaaacacaacctctcc

SEQ ID NO: 575119 - DNA, 33 bp, Homo sapien
cctgtggttagggatgaaaagccatcttttgtg

SEQ ID NO: 575120 - DNA, 33 bp, Homo sapien
cctgtggttagggatggaaagccatcttttgtg

SEQ ID NO: 575121 - DNA, 33 bp, Homo sapien
actatgttaaccaaaaatctgaacatctcacct

SEQ ID NO: 575122 - DNA, 33 bp, Homo sapien
actatgttaaccaaaagtctgaacatctcacct

SEQ ID NO: 575123 - DNA, 33 bp, Homo sapien
acttcaacctgcttaaatatgtgtatttcaaaa

SEQ ID NO: 575124 - DNA, 33 bp, Homo sapien
acttcaacctgcttaagtatgtgtatttcaaaa

SEQ ID NO: 575125 - DNA, 33 bp, Homo sapien
tatattttaatctaaacggtcagtcttctattg

SEQ ID NO: 575126 - DNA, 33 bp, Homo sapien
tatattttaatctaaatggtcagtcttctattg

SEQ ID NO: 575127 - DNA, 33 bp, Homo sapien
tctgcataagtataacacgtgccaatagatttg

SEQ ID NO: 575128 - DNA, 33 bp, Homo sapien
tctgcataagtataacgcgtgccaatagatttg

SEQ ID NO: 575129 - DNA, 33 bp, Homo sapien
tgaagatgaactacaaatgatgggttttggaaa

SEQ ID NO: 575130 - DNA, 33 bp, Homo sapien
tgaagatgaactacaagtgatgggttttggaaa

SEQ ID NO: 575131 - DNA, 33 bp, Homo sapien
gatgggtgaggtcaaacatccttaccaacaacg

SEQ ID NO: 575132 - DNA, 33 bp, Homo sapien
gatgggtgaggtcaaatatccttaccaacaacg

SEQ ID NO: 575133 - DNA, 33 bp, Homo sapien
tttttgtggtgaatgcagacttagagttacaat

SEQ ID NO: 575134 - DNA, 33 bp, Homo sapien
tttttgtggtgaatgcggacttagagttacaat

SEQ ID NO: 575135 - DNA, 33 bp, Homo sapien
agcccctgatcccaaaaagcaatcctatcaatg

SEQ ID NO: 575136 - DNA, 33 bp, Homo sapien
agcccctgatcccaaagagcaatcctatcaatg

SEQ ID NO: 575137 - DNA, 33 bp, Homo sapien
ttgagccaatcttacggagctcccaagggccac

SEQ ID NO: 575138 - DNA, 33 bp, Homo sapien
ttgagccaatcttacgtagctcccaagggccac

SEQ ID NO: 575139 - DNA, 33 bp, Homo sapien
ccctgaatgctctcctcaaattgcgaaaattct

SEQ ID NO: 575140 - DNA, 33 bp, Homo sapien
ccctgaatgctctccttaaattgcgaaaattct

SEQ ID NO: 575141 - DNA, 33 bp, Homo sapien
ttacctatcatccttggatctgagtgctatgtt

SEQ ID NO: 575142 - DNA, 33 bp, Homo sapien
ttacctatcatccttgtatctgagtgctatgtt

SEQ ID NO: 575143 - DNA, 33 bp, Homo sapien
tggaaatcatttcaagaaagcacgtattttttg

SEQ ID NO: 575144 - DNA, 33 bp, Homo sapien
tggaaatcatttcaagtaagcacgtattttttg

SEQ ID NO: 575145 - DNA, 33 bp, Homo sapien
ctttctagtgcttagaaaatgcctaaataaata

SEQ ID NO: 575146 - DNA, 33 bp, Homo sapien
ctttctagtgcttagacaatgcctaaataaata

SEQ ID NO: 575147 - DNA, 33 bp, Homo sapien
aatgtgtcttgttgcccgccatctttctagtgc

SEQ ID NO: 575148 - DNA, 33 bp, Homo sapien
aatgtgtcttgttgcctgccatctttctagtgc

SEQ ID NO: 575149 - DNA, 33 bp, Homo sapien
tgcccctgaattcatacactccaaaatgttagt

SEQ ID NO: 575150 - DNA, 33 bp, Homo sapien
tgcccctgaattcatagactccaaaatgttagt

SEQ ID NO: 575151 - DNA, 33 bp, Homo sapien
tactgaagcctagagaatctacggtttttgatc

SEQ ID NO: 575152 - DNA, 33 bp, Homo sapien
tactgaagcctagagagtctacggtttttgatc

SEQ ID NO: 575153 - DNA, 33 bp, Homo sapien
aactagggataaaggggaactgctgtttaagag

SEQ ID NO: 575154 - DNA, 33 bp, Homo sapien
aactagggataaagggtaactgctgtttaagag

SEQ ID NO: 575155 - DNA, 33 bp, Homo sapien
aggacttacaggtgaactgctcgtatgatcagc

SEQ ID NO: 575156 - DNA, 33 bp, Homo sapien
aggacttacaggtgaattgctcgtatgatcagc

SEQ ID NO: 575157 - DNA, 33 bp, Homo sapien
taagtcctaataaccccagcttcaaaggctcat

SEQ ID NO: 575158 - DNA, 33 bp, Homo sapien
taagtcctaataacccgagcttcaaaggctcat

SEQ ID NO: 575159 - DNA, 33 bp, Homo sapien
tgccttagacaaaaatcaaacaaatcatgaatt

SEQ ID NO: 575160 - DNA, 33 bp, Homo sapien
tgccttagacaaaaatgaaacaaatcatgaatt

SEQ ID NO: 575161 - DNA, 33 bp, Homo sapien
tgtcaaatagcaacataaaaacaaggatattat

SEQ ID NO: 575162 - DNA, 33 bp, Homo sapien
tgtcaaatagcaacattaaaacaaggatattat

SEQ ID NO: 575163 - DNA, 33 bp, Homo sapien
cttgcaggtggatgcaacgccacatacaagaat

SEQ ID NO: 575164 - DNA, 33 bp, Homo sapien
cttgcaggtggatgcagcgccacatacaagaat

SEQ ID NO: 575165 - DNA, 33 bp, Homo sapien
cacctcagtgatcgaaaccttttagtgtctctc

SEQ ID NO: 575166 - DNA, 33 bp, Homo sapien
cacctcagtgatcgaacccttttagtgtctctc

SEQ ID NO: 575167 - DNA, 33 bp, Homo sapien
aaaagctggatgtaaaatggggaagaacagaga

SEQ ID NO: 575168 - DNA, 33 bp, Homo sapien
aaaagctggatgtaaagtggggaagaacagaga

SEQ ID NO: 575169 - DNA, 33 bp, Homo sapien
tgggcaattaccgtgaggcaatagaaacctcca

SEQ ID NO: 575170 - DNA, 33 bp, Homo sapien
tgggcaattaccgtgatgcaatagaaacctcca

SEQ ID NO: 575171 - DNA, 33 bp, Homo sapien
cattgagtcacttgccaaaagttataatttaaa

SEQ ID NO: 575172 - DNA, 33 bp, Homo sapien
cattgagtcacttgccgaaagttataatttaaa

SEQ ID NO: 575173 - DNA, 33 bp, Homo sapien
ttccagaacgtgcaccaggtaaaatggagtaga

SEQ ID NO: 575174 - DNA, 33 bp, Homo sapien
ttccagaacgtgcaccgggtaaaatggagtaga

SEQ ID NO: 575175 - DNA, 33 bp, Homo sapien
ccggcacaaagcaaagcatgctagataagtgtt

SEQ ID NO: 575176 - DNA, 33 bp, Homo sapien
ccggcacaaagcaaaggatgctagataagtgtt

SEQ ID NO: 575177 - DNA, 33 bp, Homo sapien
catgatggaaatgctacaattctggaaatctaa

SEQ ID NO: 575178 - DNA, 33 bp, Homo sapien
catgatggaaatgctataattctggaaatctaa

SEQ ID NO: 575179 - DNA, 33 bp, Homo sapien
accataaaccaaagaacagctaagcgaatgtct

SEQ ID NO: 575180 - DNA, 33 bp, Homo sapien
accataaaccaaagaatagctaagcgaatgtct

SEQ ID NO: 575181 - DNA, 33 bp, Homo sapien
caaacaggagtgaaacaaatcatcatttgcacc

SEQ ID NO: 575182 - DNA, 33 bp, Homo sapien
caaacaggagtgaaacgaatcatcatttgcacc

SEQ ID NO: 575183 - DNA, 33 bp, Homo sapien
aatatataggtcaagaatctactcccaattgtc

SEQ ID NO: 575184 - DNA, 33 bp, Homo sapien
aatatataggtcaagagtctactcccaattgtc

SEQ ID NO: 575185 - DNA, 33 bp, Homo sapien
aggttgagggcaaagaaaatactgccaggataa

SEQ ID NO: 575186 - DNA, 33 bp, Homo sapien
aggttgagggcaaagacaatactgccaggataa

SEQ ID NO: 575187 - DNA, 33 bp, Homo sapien
ccctcaacctgataaaatcactggtgaaaggat

SEQ ID NO: 575188 - DNA, 33 bp, Homo sapien
ccctcaacctgataaagtcactggtgaaaggat

SEQ ID NO: 575189 - DNA, 33 bp, Homo sapien
cagttcacatcctttcacttctcaaactcttgg

SEQ ID NO: 575190 - DNA, 33 bp, Homo sapien
cagttcacatcctttctcttctcaaactcttgg

SEQ ID NO: 575191 - DNA, 33 bp, Homo sapien
atagacgataatacaaatcatctgctttattat

SEQ ID NO: 575192 - DNA, 33 bp, Homo sapien
atagacgataatacaagtcatctgctttattat

SEQ ID NO: 575193 - DNA, 33 bp, Homo sapien
aatacacatccctggacatagttgccaaaaacc

SEQ ID NO: 575194 - DNA, 33 bp, Homo sapien
aatacacatccctggatatagttgccaaaaacc

SEQ ID NO: 575195 - DNA, 33 bp, Homo sapien
ttctctcttcactaagactagttcattatggag

SEQ ID NO: 575196 - DNA, 33 bp, Homo sapien
ttctctcttcactaagtctagttcattatggag

SEQ ID NO: 575197 - DNA, 33 bp, Homo sapien
gggtcaaggcataacacggaccaagctgtcctt

SEQ ID NO: 575198 - DNA, 33 bp, Homo sapien
gggtcaaggcataacagggaccaagctgtcctt

SEQ ID NO: 575199 - DNA, 33 bp, Homo sapien
agcccaaaagactggcagacactcagaaaagcc

SEQ ID NO: 575200 - DNA, 33 bp, Homo sapien
agcccaaaagactggcggacactcagaaaagcc

SEQ ID NO: 575201 - DNA, 33 bp, Homo sapien
gcaaaatgttgggaagccactttacacatttaa

SEQ ID NO: 575202 - DNA, 33 bp, Homo sapien
gcaaaatgttgggaaggcactttacacatttaa

SEQ ID NO: 575203 - DNA, 33 bp, Homo sapien
actgcaatgttcaaacagtctcctatgtgaggt

SEQ ID NO: 575204 - DNA, 33 bp, Homo sapien
actgcaatgttcaaaccgtctcctatgtgaggt

SEQ ID NO: 575205 - DNA, 33 bp, Homo sapien
gcatttaaagagagcaatattttctagggacaa

SEQ ID NO: 575206 - DNA, 33 bp, Homo sapien
gcatttaaagagagcagtattttctagggacaa

SEQ ID NO: 575207 - DNA, 33 bp, Homo sapien
actgacttaatttcaaacaacttcaggccttag

SEQ ID NO: 575208 - DNA, 33 bp, Homo sapien
actgacttaatttcaagcaacttcaggccttag

SEQ ID NO: 575209 - DNA, 33 bp, Homo sapien
tgaaccctctactcgacggcttcttggtcttgg

SEQ ID NO: 575210 - DNA, 33 bp, Homo sapien
tgaaccctctactcgatggcttcttggtcttgg

SEQ ID NO: 575211 - DNA, 33 bp, Homo sapien
aaaccaagtgctcagaaactgatattgtttggc

SEQ ID NO: 575212 - DNA, 33 bp, Homo sapien
aaaccaagtgctcagagactgatattgtttggc

SEQ ID NO: 575213 - DNA, 33 bp, Homo sapien
agaaggtcttccgttgaagtgagttccagacat

SEQ ID NO: 575214 - DNA, 33 bp, Homo sapien
agaaggtcttccgttggagtgagttccagacat

SEQ ID NO: 575215 - DNA, 33 bp, Homo sapien
tccttcagctttcctaaaatatccacagagact

SEQ ID NO: 575216 - DNA, 33 bp, Homo sapien
tccttcagctttcctacaatatccacagagact

SEQ ID NO: 575217 - DNA, 33 bp, Homo sapien
aggaacacaactatcaagtccatagccacattc

SEQ ID NO: 575218 - DNA, 33 bp, Homo sapien
aggaacacaactatcacgtccatagccacattc

SEQ ID NO: 575219 - DNA, 33 bp, Homo sapien
cacgatccagtttagacgtggagatataacctg

SEQ ID NO: 575220 - DNA, 33 bp, Homo sapien
cacgatccagtttagatgtggagatataacctg

SEQ ID NO: 575221 - DNA, 33 bp, Homo sapien
gtgaatgctcttggtacaacatatttcacagaa

SEQ ID NO: 575222 - DNA, 33 bp, Homo sapien
gtgaatgctcttggtataacatatttcacagaa

SEQ ID NO: 575223 - DNA, 33 bp, Homo sapien
atgtgcttgtgttaccggaggtattcgagttta

SEQ ID NO: 575224 - DNA, 33 bp, Homo sapien
atgtgcttgtgttacctgaggtattcgagttta

SEQ ID NO: 575225 - DNA, 33 bp, Homo sapien
ggtaaactgtaggagtcaatttgctcatttact

SEQ ID NO: 575226 - DNA, 33 bp, Homo sapien
ggtaaactgtaggagtgaatttgctcatttact

SEQ ID NO: 575227 - DNA, 33 bp, Homo sapien
tgcaactgtgcgcctacatcctgagctgcaaaa

SEQ ID NO: 575228 - DNA, 33 bp, Homo sapien
tgcaactgtgcgcctatatcctgagctgcaaaa

SEQ ID NO: 575229 - DNA, 33 bp, Homo sapien
aactttctcatctataaatttgtgggagataat

SEQ ID NO: 575230 - DNA, 33 bp, Homo sapien
aactttctcatctatacatttgtgggagataat

SEQ ID NO: 575231 - DNA, 33 bp, Homo sapien
atgaaacgtatggaaaaggcaaacctttagaga

SEQ ID NO: 575232 - DNA, 33 bp, Homo sapien
atgaaacgtatggaaagggcaaacctttagaga

SEQ ID NO: 575233 - DNA, 33 bp, Homo sapien
tttgaaaattgttttaaagttaaatgcagaaat

SEQ ID NO: 575234 - DNA, 33 bp, Homo sapien
tttgaaaattgttttacagttaaatgcagaaat

SEQ ID NO: 575235 - DNA, 33 bp, Homo sapien
gacttgaagccttatacacagtacccgtaagtg

SEQ ID NO: 575236 - DNA, 33 bp, Homo sapien
gacttgaagccttatatacagtacccgtaagtg

SEQ ID NO: 575237 - DNA, 33 bp, Homo sapien
agggcatacatcctacaatttcttatcctcaat

SEQ ID NO: 575238 - DNA, 33 bp, Homo sapien
agggcatacatcctacgatttcttatcctcaat

SEQ ID NO: 575239 - DNA, 33 bp, Homo sapien
agtggcaagaaacgcacatcacaaaacagcaat

SEQ ID NO: 575240 - DNA, 33 bp, Homo sapien
agtggcaagaaacgcatatcacaaaacagcaat

SEQ ID NO: 575241 - DNA, 33 bp, Homo sapien
tttgtaattttggccaatagtaacctgaagatg

SEQ ID NO: 575242 - DNA, 33 bp, Homo sapien
tttgtaattttggccagtagtaacctgaagatg

SEQ ID NO: 575243 - DNA, 33 bp, Homo sapien
tttgtagtttatcagtcacccaatctatgatag

SEQ ID NO: 575244 - DNA, 33 bp, Homo sapien
tttgtagtttatcagttacccaatctatgatag

SEQ ID NO: 575245 - DNA, 33 bp, Homo sapien
gaggtccttgcttccaataggcacaaatttcag

SEQ ID NO: 575246 - DNA, 33 bp, Homo sapien
gaggtccttgcttccagtaggcacaaatttcag

SEQ ID NO: 575247 - DNA, 33 bp, Homo sapien
aactgtgctatataacaagcatagtcttaatat

SEQ ID NO: 575248 - DNA, 33 bp, Homo sapien
aactgtgctatataaccagcatagtcttaatat

SEQ ID NO: 575249 - DNA, 33 bp, Homo sapien
gctcttgcatcttttcaaaagcaatgcaaggga

SEQ ID NO: 575250 - DNA, 33 bp, Homo sapien
gctcttgcatcttttcgaaagcaatgcaaggga

SEQ ID NO: 575251 - DNA, 33 bp, Homo sapien
cagactcaactcagtcaatggtcctttcttcca

SEQ ID NO: 575252 - DNA, 33 bp, Homo sapien
cagactcaactcagtcgatggtcctttcttcca

SEQ ID NO: 575253 - DNA, 33 bp, Homo sapien
tgacccagcaatcctaactttggaaatatatac

SEQ ID NO: 575254 - DNA, 33 bp, Homo sapien
tgacccagcaatcctacctttggaaatatatac

SEQ ID NO: 575255 - DNA, 33 bp, Homo sapien
gaatccgagaggtctggcaactgcagcatagac

SEQ ID NO: 575256 - DNA, 33 bp, Homo sapien
gaatccgagaggtctgtcaactgcagcatagac

SEQ ID NO: 575257 - DNA, 33 bp, Homo sapien
gggtgagggtcagtgaaagtcatcttagaattc

SEQ ID NO: 575258 - DNA, 33 bp, Homo sapien
gggtgagggtcagtgacagtcatcttagaattc

SEQ ID NO: 575259 - DNA, 33 bp, Homo sapien
ctgctcaggatttcgacgagtgtataagcaaca

SEQ ID NO: 575260 - DNA, 33 bp, Homo sapien
ctgctcaggatttcgatgagtgtataagcaaca

SEQ ID NO: 575261 - DNA, 33 bp, Homo sapien
ccaaccagattggtcaccttgaatttgagtcaa

SEQ ID NO: 575262 - DNA, 33 bp, Homo sapien
ccaaccagattggtcagcttgaatttgagtcaa

SEQ ID NO: 575263 - DNA, 33 bp, Homo sapien
gagacccatgttctaccgcaccaagaccaacac

SEQ ID NO: 575264 - DNA, 33 bp, Homo sapien
gagacccatgttctactgcaccaagaccaacac

SEQ ID NO: 575265 - DNA, 33 bp, Homo sapien
aattttgagcctgtgaagttagtagtctacgaa

SEQ ID NO: 575266 - DNA, 33 bp, Homo sapien
aattttgagcctgtgaggttagtagtctacgaa

SEQ ID NO: 575267 - DNA, 33 bp, Homo sapien
tgtgcatcgtttgtgacatgcatattatttgtc

SEQ ID NO: 575268 - DNA, 33 bp, Homo sapien
tgtgcatcgtttgtgatatgcatattatttgtc

SEQ ID NO: 575269 - DNA, 33 bp, Homo sapien
gtacataattaggccccataaatgtatcaccat

SEQ ID NO: 575270 - DNA, 33 bp, Homo sapien
gtacataattaggccctataaatgtatcaccat

SEQ ID NO: 575271 - DNA, 33 bp, Homo sapien
actcttcttaggaaacagcctgattaaccagaa

SEQ ID NO: 575272 - DNA, 33 bp, Homo sapien
actcttcttaggaaacggcctgattaaccagaa

SEQ ID NO: 575273 - DNA, 33 bp, Homo sapien
gtcaagaatattaaaacgcactcactccctggg

SEQ ID NO: 575274 - DNA, 33 bp, Homo sapien
gtcaagaatattaaaatgcactcactccctggg

SEQ ID NO: 575275 - DNA, 33 bp, Homo sapien
cagacctgcaatgctacgtgaccaaagtgagaa

SEQ ID NO: 575276 - DNA, 33 bp, Homo sapien
cagacctgcaatgctaggtgaccaaagtgagaa

SEQ ID NO: 575277 - DNA, 33 bp, Homo sapien
ctgtgccagctacatcacctgctgtaaatgaat

SEQ ID NO: 575278 - DNA, 33 bp, Homo sapien
ctgtgccagctacatcgcctgctgtaaatgaat

SEQ ID NO: 575279 - DNA, 33 bp, Homo sapien
gaattagaaagaaaggaaattggatggtcttaa

SEQ ID NO: 575280 - DNA, 33 bp, Homo sapien
gaattagaaagaaaggtaattggatggtcttaa

SEQ ID NO: 575281 - DNA, 33 bp, Homo sapien
gctaagcaatgttctaaatcagtgacactcaag

SEQ ID NO: 575282 - DNA, 33 bp, Homo sapien
gctaagcaatgttctatatcagtgacactcaag

SEQ ID NO: 575283 - DNA, 33 bp, Homo sapien
aacttccaaaaaataactctctcatggagccac

SEQ ID NO: 575284 - DNA, 33 bp, Homo sapien
aacttccaaaaaataagtctctcatggagccac

SEQ ID NO: 575285 - DNA, 33 bp, Homo sapien
ggacaccttacctagagggaggcaggctttaag

SEQ ID NO: 575286 - DNA, 33 bp, Homo sapien
ggacaccttacctagatggaggcaggctttaag

SEQ ID NO: 575287 - DNA, 33 bp, Homo sapien
gcataaggctccatcaaaagcccaactatctgt

SEQ ID NO: 575288 - DNA, 33 bp, Homo sapien
gcataaggctccatcagaagcccaactatctgt

SEQ ID NO: 575289 - DNA, 33 bp, Homo sapien
tctttggtgcccctaacagcaaagcccagcagg

SEQ ID NO: 575290 - DNA, 33 bp, Homo sapien
tctttggtgcccctaatagcaaagcccagcagg

SEQ ID NO: 575291 - DNA, 33 bp, Homo sapien
acagaaaaaggtgcagccagaggattgctggca

SEQ ID NO: 575292 - DNA, 33 bp, Homo sapien
acagaaaaaggtgcagtcagaggattgctggca

SEQ ID NO: 575293 - DNA, 33 bp, Homo sapien
gagaaggagggagccaagtgaaattctgggatg

SEQ ID NO: 575294 - DNA, 33 bp, Homo sapien
gagaaggagggagccaggtgaaattctgggatg

SEQ ID NO: 575295 - DNA, 33 bp, Homo sapien
tcccctgggatgtccaagaaccagacaatgtga

SEQ ID NO: 575296 - DNA, 33 bp, Homo sapien
tcccctgggatgtccaggaaccagacaatgtga

SEQ ID NO: 575297 - DNA, 33 bp, Homo sapien
ctctgagtgtttattaaggtctaggccaggatt

SEQ ID NO: 575298 - DNA, 33 bp, Homo sapien
ctctgagtgtttattagggtctaggccaggatt

SEQ ID NO: 575299 - DNA, 33 bp, Homo sapien
agtagtttctcaataaatatgtgttaaatgaat

SEQ ID NO: 575300 - DNA, 33 bp, Homo sapien
agtagtttctcaataagtatgtgttaaatgaat

SEQ ID NO: 575301 - DNA, 33 bp, Homo sapien
cactccaaaaagatcacgcagttaattttttca

SEQ ID NO: 575302 - DNA, 33 bp, Homo sapien
cactccaaaaagatcatgcagttaattttttca

SEQ ID NO: 575303 - DNA, 33 bp, Homo sapien
ggacaacccaatttcaagacatcttctttgtgt

SEQ ID NO: 575304 - DNA, 33 bp, Homo sapien
ggacaacccaatttcaggacatcttctttgtgt

SEQ ID NO: 575305 - DNA, 33 bp, Homo sapien
gagttttaccaggctaacaaaataaagcttgac

SEQ ID NO: 575306 - DNA, 33 bp, Homo sapien
gagttttaccaggctagcaaaataaagcttgac

SEQ ID NO: 575307 - DNA, 33 bp, Homo sapien
agagtcaagcataagactatagacagaataatg

SEQ ID NO: 575308 - DNA, 33 bp, Homo sapien
agagtcaagcataagattatagacagaataatg

SEQ ID NO: 575309 - DNA, 33 bp, Homo sapien
taaatagatgtgtaaaggtctaaatgcacattc

SEQ ID NO: 575310 - DNA, 33 bp, Homo sapien
taaatagatgtgtaaatgtctaaatgcacattc

SEQ ID NO: 575311 - DNA, 33 bp, Homo sapien
gatcatttattgatagacagtaatgattttaat

SEQ ID NO: 575312 - DNA, 33 bp, Homo sapien
gatcatttattgataggcagtaatgattttaat

SEQ ID NO: 575313 - DNA, 33 bp, Homo sapien
catccttgagtagccaatagatccctgtagcac

SEQ ID NO: 575314 - DNA, 33 bp, Homo sapien
catccttgagtagccattagatccctgtagcac

SEQ ID NO: 575315 - DNA, 33 bp, Homo sapien
aagacttctgaacaaaccaagtcataacaaact

SEQ ID NO: 575316 - DNA, 33 bp, Homo sapien
aagacttctgaacaaatcaagtcataacaaact

SEQ ID NO: 575317 - DNA, 33 bp, Homo sapien
gtaaaacatttctgagaatggctatgaaggtgt

SEQ ID NO: 575318 - DNA, 33 bp, Homo sapien
gtaaaacatttctgagtatggctatgaaggtgt

SEQ ID NO: 575319 - DNA, 33 bp, Homo sapien
ttttgagtgctttttacgtatcaggctcagttt

SEQ ID NO: 575320 - DNA, 33 bp, Homo sapien
ttttgagtgctttttatgtatcaggctcagttt

SEQ ID NO: 575321 - DNA, 33 bp, Homo sapien
agaaacaagatttacgcaagaggcaggaaatgt

SEQ ID NO: 575322 - DNA, 33 bp, Homo sapien
agaaacaagatttacgtaagaggcaggaaatgt

SEQ ID NO: 575323 - DNA, 33 bp, Homo sapien
cattgcttcacatttcaattagaataacatcca

SEQ ID NO: 575324 - DNA, 33 bp, Homo sapien
cattgcttcacatttcgattagaataacatcca

SEQ ID NO: 575325 - DNA, 33 bp, Homo sapien
ctttcctgaccgatcaatctaaagtcttcccct

SEQ ID NO: 575326 - DNA, 33 bp, Homo sapien
ctttcctgaccgatcagtctaaagtcttcccct

SEQ ID NO: 575327 - DNA, 33 bp, Homo sapien
ggttcattattcaggagtattggaagacccaat

SEQ ID NO: 575328 - DNA, 33 bp, Homo sapien
ggttcattattcaggattattggaagacccaat

SEQ ID NO: 575329 - DNA, 33 bp, Homo sapien
agacatgactagaaaacaaagatacatatgtcc

SEQ ID NO: 575330 - DNA, 33 bp, Homo sapien
agacatgactagaaaagaaagatacatatgtcc

SEQ ID NO: 575331 - DNA, 33 bp, Homo sapien
tagcctttagctgggcgcctttgtgccaaacaa

SEQ ID NO: 575332 - DNA, 33 bp, Homo sapien
tagcctttagctgggctcctttgtgccaaacaa

SEQ ID NO: 575333 - DNA, 33 bp, Homo sapien
gagctgtgctataaaacgattgaagaaatacag

SEQ ID NO: 575334 - DNA, 33 bp, Homo sapien
gagctgtgctataaaatgattgaagaaatacag

SEQ ID NO: 575335 - DNA, 33 bp, Homo sapien
tgggttatggctagctgctgaaaccagtttcaa

SEQ ID NO: 575336 - DNA, 33 bp, Homo sapien
tgggttatggctagcttctgaaaccagtttcaa

SEQ ID NO: 575337 - DNA, 33 bp, Homo sapien
gcctttttagattttcaccagtctatcaaactt

SEQ ID NO: 575338 - DNA, 33 bp, Homo sapien
gcctttttagattttctccagtctatcaaactt

SEQ ID NO: 575339 - DNA, 33 bp, Homo sapien
ccgtatggccatgaacaaactatttcatctctt

SEQ ID NO: 575340 - DNA, 33 bp, Homo sapien
ccgtatggccatgaaccaactatttcatctctt

SEQ ID NO: 575341 - DNA, 33 bp, Homo sapien
tctagcaaaaatgtcaaagtgtctaaattgaaa

SEQ ID NO: 575342 - DNA, 33 bp, Homo sapien
tctagcaaaaatgtcagagtgtctaaattgaaa

SEQ ID NO: 575343 - DNA, 33 bp, Homo sapien
gccaggggagcattcaaacttcaccattgtccc

SEQ ID NO: 575344 - DNA, 33 bp, Homo sapien
gccaggggagcattcagacttcaccattgtccc

SEQ ID NO: 575345 - DNA, 33 bp, Homo sapien
ctccccgaaactgggcaattttctcctgttaca

SEQ ID NO: 575346 - DNA, 33 bp, Homo sapien
ctccccgaaactgggccattttctcctgttaca

SEQ ID NO: 575347 - DNA, 33 bp, Homo sapien
agtgtctggaatacagaagatgctcatgaaatc

SEQ ID NO: 575348 - DNA, 33 bp, Homo sapien
agtgtctggaatacagcagatgctcatgaaatc

SEQ ID NO: 575349 - DNA, 33 bp, Homo sapien
aggtcaagctgcaaaagaactacagacaatacc

SEQ ID NO: 575350 - DNA, 33 bp, Homo sapien
aggtcaagctgcaaaataactacagacaatacc

SEQ ID NO: 575351 - DNA, 33 bp, Homo sapien
gctcttatacactgaaccaattccttctgcaat

SEQ ID NO: 575352 - DNA, 33 bp, Homo sapien
gctcttatacactgaatcaattccttctgcaat

SEQ ID NO: 575353 - DNA, 33 bp, Homo sapien
caaaaatacttttcacccaacaatagcgcttcc

SEQ ID NO: 575354 - DNA, 33 bp, Homo sapien
caaaaatacttttcacgcaacaatagcgcttcc

SEQ ID NO: 575355 - DNA, 33 bp, Homo sapien
ctgtttcatgcttctcagaaagacctactatgt

SEQ ID NO: 575356 - DNA, 33 bp, Homo sapien
ctgtttcatgcttctcggaaagacctactatgt

SEQ ID NO: 575357 - DNA, 33 bp, Homo sapien
gggccaagagactcaccgggaaaagctttgaag

SEQ ID NO: 575358 - DNA, 33 bp, Homo sapien
gggccaagagactcactgggaaaagctttgaag

SEQ ID NO: 575359 - DNA, 33 bp, Homo sapien
cctttccttccacatacgttaggtgttaaaaac

SEQ ID NO: 575360 - DNA, 33 bp, Homo sapien
cctttccttccacatatgttaggtgttaaaaac

SEQ ID NO: 575361 - DNA, 33 bp, Homo sapien
ctcacagggttaggaccatttaagctccaagag

SEQ ID NO: 575362 - DNA, 33 bp, Homo sapien
ctcacagggttaggactatttaagctccaagag

SEQ ID NO: 575363 - DNA, 33 bp, Homo sapien
ttcgtgagaccattcacgcaaatcctttaaaac

SEQ ID NO: 575364 - DNA, 33 bp, Homo sapien
ttcgtgagaccattcatgcaaatcctttaaaac

SEQ ID NO: 575365 - DNA, 33 bp, Homo sapien
gtgagattctggacaaagtgcacgtgccttcaa

SEQ ID NO: 575366 - DNA, 33 bp, Homo sapien
gtgagattctggacaacgtgcacgtgccttcaa

SEQ ID NO: 575367 - DNA, 33 bp, Homo sapien
ttattggacatttccagagatttttcccaggat

SEQ ID NO: 575368 - DNA, 33 bp, Homo sapien
ttattggacatttccatagatttttcccaggat

SEQ ID NO: 575369 - DNA, 33 bp, Homo sapien
aagggcagtttgagaaagactgggttagaccgc

SEQ ID NO: 575370 - DNA, 33 bp, Homo sapien
aagggcagtttgagaacgactgggttagaccgc

SEQ ID NO: 575371 - DNA, 33 bp, Homo sapien
gtgtagatggtatgcaaaggccgaagatcatca

SEQ ID NO: 575372 - DNA, 33 bp, Homo sapien
gtgtagatggtatgcagaggccgaagatcatca

SEQ ID NO: 575373 - DNA, 33 bp, Homo sapien
cagagaccttatgagccacaaagcttaaaatat

SEQ ID NO: 575374 - DNA, 33 bp, Homo sapien
cagagaccttatgagctacaaagcttaaaatat

SEQ ID NO: 575375 - DNA, 33 bp, Homo sapien
tcatgcaaaggctttcaaacctaaactgcatcc

SEQ ID NO: 575376 - DNA, 33 bp, Homo sapien
tcatgcaaaggctttcgaacctaaactgcatcc

SEQ ID NO: 575377 - DNA, 33 bp, Homo sapien
gtttgtaaggctgagcaactggttgttaaagag

SEQ ID NO: 575378 - DNA, 33 bp, Homo sapien
gtttgtaaggctgagcgactggttgttaaagag

SEQ ID NO: 575379 - DNA, 33 bp, Homo sapien
aagaaacatcatgggaacctctaaccgcttgta

SEQ ID NO: 575380 - DNA, 33 bp, Homo sapien
aagaaacatcatgggagcctctaaccgcttgta

SEQ ID NO: 575381 - DNA, 33 bp, Homo sapien
gtttcagttacttaatcagtgcagggtttctta

SEQ ID NO: 575382 - DNA, 33 bp, Homo sapien
gtttcagttacttaattagtgcagggtttctta

SEQ ID NO: 575383 - DNA, 33 bp, Homo sapien
tggcaagaggtgggtacaagctgaaagcaagag

SEQ ID NO: 575384 - DNA, 33 bp, Homo sapien
tggcaagaggtgggtataagctgaaagcaagag

SEQ ID NO: 575385 - DNA, 33 bp, Homo sapien
gcactgaccctatttacgtctttggaatgtctg

SEQ ID NO: 575386 - DNA, 33 bp, Homo sapien
gcactgaccctatttatgtctttggaatgtctg

SEQ ID NO: 575387 - DNA, 33 bp, Homo sapien
tatttggaatgtatgaagttactgtccttttca

SEQ ID NO: 575388 - DNA, 33 bp, Homo sapien
tatttggaatgtatgacgttactgtccttttca

SEQ ID NO: 575389 - DNA, 33 bp, Homo sapien
tgcccagctttggtataaatgtctgccacaata

SEQ ID NO: 575390 - DNA, 33 bp, Homo sapien
tgcccagctttggtatgaatgtctgccacaata

SEQ ID NO: 575391 - DNA, 33 bp, Homo sapien
actgggaaaccaccaacaaagaattgcccaaat

SEQ ID NO: 575392 - DNA, 33 bp, Homo sapien
actgggaaaccaccaagaaagaattgcccaaat

SEQ ID NO: 575393 - DNA, 33 bp, Homo sapien
catgggagcagttttcgccatactattctcgtg

SEQ ID NO: 575394 - DNA, 33 bp, Homo sapien
catgggagcagttttctccatactattctcgtg

SEQ ID NO: 575395 - DNA, 33 bp, Homo sapien
ttaactgtcagctacacgaaaggagacattcca

SEQ ID NO: 575396 - DNA, 33 bp, Homo sapien
ttaactgtcagctacatgaaaggagacattcca

SEQ ID NO: 575397 - DNA, 33 bp, Homo sapien
atgactggttcaataacctgctcctcagtagtt

SEQ ID NO: 575398 - DNA, 33 bp, Homo sapien
atgactggttcaataatctgctcctcagtagtt

SEQ ID NO: 575399 - DNA, 33 bp, Homo sapien
ctccatctccattttagccttcatggaacctgg

SEQ ID NO: 575400 - DNA, 33 bp, Homo sapien
ctccatctccattttatccttcatggaacctgg

SEQ ID NO: 575401 - DNA, 33 bp, Homo sapien
taagtcacagaggggaaaacctatgaatgaaag

SEQ ID NO: 575402 - DNA, 33 bp, Homo sapien
taagtcacagaggggagaacctatgaatgaaag

SEQ ID NO: 575403 - DNA, 33 bp, Homo sapien
caccctcatgacttaaccaaatcccaaaagtct

SEQ ID NO: 575404 - DNA, 33 bp, Homo sapien
caccctcatgacttaatcaaatcccaaaagtct

SEQ ID NO: 575405 - DNA, 33 bp, Homo sapien
agcagtgcgtttacagaaagatattttcccatc

SEQ ID NO: 575406 - DNA, 33 bp, Homo sapien
agcagtgcgtttacaggaagatattttcccatc

SEQ ID NO: 575407 - DNA, 33 bp, Homo sapien
tgacaccaccctcttgaacaagccagagataga

SEQ ID NO: 575408 - DNA, 33 bp, Homo sapien
tgacaccaccctcttggacaagccagagataga

SEQ ID NO: 575409 - DNA, 33 bp, Homo sapien
tgtgttaatgacattacaataatactaagaaga

SEQ ID NO: 575410 - DNA, 33 bp, Homo sapien
tgtgttaatgacattagaataatactaagaaga

SEQ ID NO: 575411 - DNA, 33 bp, Homo sapien
atccctgtggattgcaacccattttcagagtta

SEQ ID NO: 575412 - DNA, 33 bp, Homo sapien
atccctgtggattgcagcccattttcagagtta

SEQ ID NO: 575413 - DNA, 33 bp, Homo sapien
gagaattgcaaatgtcacgagtgtcctgaagag

SEQ ID NO: 575414 - DNA, 33 bp, Homo sapien
gagaattgcaaatgtcgcgagtgtcctgaagag

SEQ ID NO: 575415 - DNA, 33 bp, Homo sapien
ggccttctgtgttgaacctagacttattcatcc

SEQ ID NO: 575416 - DNA, 33 bp, Homo sapien
ggccttctgtgttgaatctagacttattcatcc

SEQ ID NO: 575417 - DNA, 33 bp, Homo sapien
atggtgggtaaaaaaacggctacctctgtcatg

SEQ ID NO: 575418 - DNA, 33 bp, Homo sapien
atggtgggtaaaaaaatggctacctctgtcatg

SEQ ID NO: 575419 - DNA, 33 bp, Homo sapien
gcccagtaatggttaacgaaaaaagacaagctg

SEQ ID NO: 575420 - DNA, 33 bp, Homo sapien
gcccagtaatggttaaggaaaaaagacaagctg

SEQ ID NO: 575421 - DNA, 33 bp, Homo sapien
aaaatataccagaactaaaaggctgcttatcac

SEQ ID NO: 575422 - DNA, 33 bp, Homo sapien
aaaatataccagaacttaaaggctgcttatcac

SEQ ID NO: 575423 - DNA, 33 bp, Homo sapien
tctgtgctcaggtatcacaaggctaccccaaag

SEQ ID NO: 575424 - DNA, 33 bp, Homo sapien
tctgtgctcaggtatctcaaggctaccccaaag

SEQ ID NO: 575425 - DNA, 33 bp, Homo sapien
ccgtttgttatatgtaagactcagctttgactt

SEQ ID NO: 575426 - DNA, 33 bp, Homo sapien
ccgtttgttatatgtaggactcagctttgactt

SEQ ID NO: 575427 - DNA, 33 bp, Homo sapien
ttgtgtggattatgtacgttgtgggtattagtg

SEQ ID NO: 575428 - DNA, 33 bp, Homo sapien
ttgtgtggattatgtatgttgtgggtattagtg

SEQ ID NO: 575429 - DNA, 33 bp, Homo sapien
tccactatgtgtcttccatctgaactaattact

SEQ ID NO: 575430 - DNA, 33 bp, Homo sapien
tccactatgtgtcttctatctgaactaattact

SEQ ID NO: 575431 - DNA, 33 bp, Homo sapien
ttcctgtatactcaagaaataatcccaagagaa

SEQ ID NO: 575432 - DNA, 33 bp, Homo sapien
ttcctgtatactcaaggaataatcccaagagaa

SEQ ID NO: 575433 - DNA, 33 bp, Homo sapien
taaaactccaatcacactgagatgaaacaagaa

SEQ ID NO: 575434 - DNA, 33 bp, Homo sapien
taaaactccaatcacattgagatgaaacaagaa

SEQ ID NO: 575435 - DNA, 33 bp, Homo sapien
gatggtattaggatgacgggccctgaagaagta

SEQ ID NO: 575436 - DNA, 33 bp, Homo sapien
gatggtattaggatgaggggccctgaagaagta

SEQ ID NO: 575437 - DNA, 33 bp, Homo sapien
caatcttagtaaatatcaggctgtttgatggat

SEQ ID NO: 575438 - DNA, 33 bp, Homo sapien
caatcttagtaaatattaggctgtttgatggat

SEQ ID NO: 575439 - DNA, 33 bp, Homo sapien
aatcccatgaaagttacatagtctattgtgaaa

SEQ ID NO: 575440 - DNA, 33 bp, Homo sapien
aatcccatgaaagttatatagtctattgtgaaa

SEQ ID NO: 575441 - DNA, 33 bp, Homo sapien
agcagagtcctggaaaaccagtttagacaagaa

SEQ ID NO: 575442 - DNA, 33 bp, Homo sapien
agcagagtcctggaaacccagtttagacaagaa

SEQ ID NO: 575443 - DNA, 33 bp, Homo sapien
ttcagtctagaagtcacaatttccagggcaaag

SEQ ID NO: 575444 - DNA, 33 bp, Homo sapien
ttcagtctagaagtcataatttccagggcaaag

SEQ ID NO: 575445 - DNA, 33 bp, Homo sapien
ctatgtcctgtgctacactctccagatatctga

SEQ ID NO: 575446 - DNA, 33 bp, Homo sapien
ctatgtcctgtgctacgctctccagatatctga

SEQ ID NO: 575447 - DNA, 33 bp, Homo sapien
gcaagacactgtgatccgaataagcaagtcatg

SEQ ID NO: 575448 - DNA, 33 bp, Homo sapien
gcaagacactgtgatctgaataagcaagtcatg

SEQ ID NO: 575449 - DNA, 33 bp, Homo sapien
gccctctccttagagcaatacacagggatggtt

SEQ ID NO: 575450 - DNA, 33 bp, Homo sapien
gccctctccttagagcgatacacagggatggtt

SEQ ID NO: 575451 - DNA, 33 bp, Homo sapien
tctctatcccaggggcagataaactatggctca

SEQ ID NO: 575452 - DNA, 33 bp, Homo sapien
tctctatcccaggggcggataaactatggctca

SEQ ID NO: 575453 - DNA, 33 bp, Homo sapien
cccttgataacgacaacggtattgggcgaaatg

SEQ ID NO: 575454 - DNA, 33 bp, Homo sapien
cccttgataacgacaatggtattgggcgaaatg

SEQ ID NO: 575455 - DNA, 33 bp, Homo sapien
cttttgtcttggagataacttgggtattaatac

SEQ ID NO: 575456 - DNA, 33 bp, Homo sapien
cttttgtcttggagatgacttgggtattaatac

SEQ ID NO: 575457 - DNA, 33 bp, Homo sapien
gccttaaaagtctcacaaatttgttcaaatgct

SEQ ID NO: 575458 - DNA, 33 bp, Homo sapien
gccttaaaagtctcactaatttgttcaaatgct

SEQ ID NO: 575459 - DNA, 33 bp, Homo sapien
tccttttcatctcttaggatcctctgttagaat

SEQ ID NO: 575460 - DNA, 33 bp, Homo sapien
tccttttcatctcttatgatcctctgttagaat

SEQ ID NO: 575461 - DNA, 33 bp, Homo sapien
gccccttgctcagttgcagcacgcaagcatctc

SEQ ID NO: 575462 - DNA, 33 bp, Homo sapien
gccccttgctcagttgtagcacgcaagcatctc

SEQ ID NO: 575463 - DNA, 33 bp, Homo sapien
agtgttaacatgatcccaaatatgccagagtcc

SEQ ID NO: 575464 - DNA, 33 bp, Homo sapien
agtgttaacatgatcctaaatatgccagagtcc

SEQ ID NO: 575465 - DNA, 33 bp, Homo sapien
tcctgggtgaacttagcaaaagcattcacagta

SEQ ID NO: 575466 - DNA, 33 bp, Homo sapien
tcctgggtgaacttagtaaaagcattcacagta

SEQ ID NO: 575467 - DNA, 33 bp, Homo sapien
taacaacaaaaatgtccaaggagggcgctggca

SEQ ID NO: 575468 - DNA, 33 bp, Homo sapien
taacaacaaaaatgtctaaggagggcgctggca

SEQ ID NO: 575469 - DNA, 33 bp, Homo sapien
ttagggcttgaggagcaagtagttcttgtggaa

SEQ ID NO: 575470 - DNA, 33 bp, Homo sapien
ttagggcttgaggagcgagtagttcttgtggaa

SEQ ID NO: 575471 - DNA, 33 bp, Homo sapien
aaataaatggacttacaaagaccagctttccaa

SEQ ID NO: 575472 - DNA, 33 bp, Homo sapien
aaataaatggacttacgaagaccagctttccaa

SEQ ID NO: 575473 - DNA, 33 bp, Homo sapien
aataggatggggcaacggtaattgcttcgatgc

SEQ ID NO: 575474 - DNA, 33 bp, Homo sapien
aataggatggggcaactgtaattgcttcgatgc

SEQ ID NO: 575475 - DNA, 33 bp, Homo sapien
ctgaacaataacaaaacttggcagtccttaagc

SEQ ID NO: 575476 - DNA, 33 bp, Homo sapien
ctgaacaataacaaaatttggcagtccttaagc

SEQ ID NO: 575477 - DNA, 33 bp, Homo sapien
atatgtgtttcatggacgagtatacacaaagca

SEQ ID NO: 575478 - DNA, 33 bp, Homo sapien
atatgtgtttcatggatgagtatacacaaagca

SEQ ID NO: 575479 - DNA, 33 bp, Homo sapien
gtgacctctttccgccactctggatcttcccca

SEQ ID NO: 575480 - DNA, 33 bp, Homo sapien
gtgacctctttccgccgctctggatcttcccca

SEQ ID NO: 575481 - DNA, 33 bp, Homo sapien
ttctcagctcaatctaaaactgcttccttctcc

SEQ ID NO: 575482 - DNA, 33 bp, Homo sapien
ttctcagctcaatctagaactgcttccttctcc

SEQ ID NO: 575483 - DNA, 33 bp, Homo sapien
gtgcattcaaggcaccacttgggttctaagtag

SEQ ID NO: 575484 - DNA, 33 bp, Homo sapien
gtgcattcaaggcaccgcttgggttctaagtag

SEQ ID NO: 575485 - DNA, 33 bp, Homo sapien
gtaatgcaactgtgacaagtctttatgaaaata

SEQ ID NO: 575486 - DNA, 33 bp, Homo sapien
gtaatgcaactgtgactagtctttatgaaaata

SEQ ID NO: 575487 - DNA, 33 bp, Homo sapien
gtttctcggggaagtcaaggtcattaaacaaga

SEQ ID NO: 575488 - DNA, 33 bp, Homo sapien
gtttctcggggaagtcgaggtcattaaacaaga

SEQ ID NO: 575489 - DNA, 33 bp, Homo sapien
tctacattagctgcaaatattccacttttctta

SEQ ID NO: 575490 - DNA, 33 bp, Homo sapien
tctacattagctgcaactattccacttttctta

SEQ ID NO: 575491 - DNA, 33 bp, Homo sapien
tttaggggattgactagcggttggctgatctag

SEQ ID NO: 575492 - DNA, 33 bp, Homo sapien
tttaggggattgactatcggttggctgatctag

SEQ ID NO: 575493 - DNA, 33 bp, Homo sapien
aggcttgactgtgccacgttgtctactgggatg

SEQ ID NO: 575494 - DNA, 33 bp, Homo sapien
aggcttgactgtgccatgttgtctactgggatg

SEQ ID NO: 575495 - DNA, 33 bp, Homo sapien
atttttctcccctcatgagcatgaacaggaata

SEQ ID NO: 575496 - DNA, 33 bp, Homo sapien
atttttctcccctcattagcatgaacaggaata

SEQ ID NO: 575497 - DNA, 33 bp, Homo sapien
tttagttatgagaaaacgtgtcccatatggggt

SEQ ID NO: 575498 - DNA, 33 bp, Homo sapien
tttagttatgagaaaatgtgtcccatatggggt

SEQ ID NO: 575499 - DNA, 33 bp, Homo sapien
taatcctagcactttacggggaccaaggtgtgc

SEQ ID NO: 575500 - DNA, 33 bp, Homo sapien
taatcctagcactttagggggaccaaggtgtgc

SEQ ID NO: 575501 - DNA, 33 bp, Homo sapien
aagatgaccaacaaaaatataaaagcagcaaat

SEQ ID NO: 575502 - DNA, 33 bp, Homo sapien
aagatgaccaacaaaagtataaaagcagcaaat

SEQ ID NO: 575503 - DNA, 33 bp, Homo sapien
ccagtgaggcaaaaaaacggccagataaaaagt

SEQ ID NO: 575504 - DNA, 33 bp, Homo sapien
ccagtgaggcaaaaaagcggccagataaaaagt

SEQ ID NO: 575505 - DNA, 33 bp, Homo sapien
agatcagaaccaccaacggcagaaggtctggga

SEQ ID NO: 575506 - DNA, 33 bp, Homo sapien
agatcagaaccaccaatggcagaaggtctggga

SEQ ID NO: 575507 - DNA, 33 bp, Homo sapien
cttcataaatcttcccagataaaaggcctcaag

SEQ ID NO: 575508 - DNA, 33 bp, Homo sapien
cttcataaatcttcccggataaaaggcctcaag

SEQ ID NO: 575509 - DNA, 33 bp, Homo sapien
tagaattccccagcacaaggaagctcctgctgc

SEQ ID NO: 575510 - DNA, 33 bp, Homo sapien
tagaattccccagcacgaggaagctcctgctgc

SEQ ID NO: 575511 - DNA, 33 bp, Homo sapien
tcactaaaagagatcaaagttaatttagaagag

SEQ ID NO: 575512 - DNA, 33 bp, Homo sapien
tcactaaaagagatcagagttaatttagaagag

SEQ ID NO: 575513 - DNA, 33 bp, Homo sapien
gaagagatactttgcacgactagggattagact

SEQ ID NO: 575514 - DNA, 33 bp, Homo sapien
gaagagatactttgcatgactagggattagact

SEQ ID NO: 575515 - DNA, 33 bp, Homo sapien
ggggaaatctaacaagaactctaagctcccagc

SEQ ID NO: 575516 - DNA, 33 bp, Homo sapien
ggggaaatctaacaaggactctaagctcccagc

SEQ ID NO: 575517 - DNA, 33 bp, Homo sapien
taaattgagcactttacatacattttctcttct

SEQ ID NO: 575518 - DNA, 33 bp, Homo sapien
taaattgagcactttatatacattttctcttct

SEQ ID NO: 575519 - DNA, 33 bp, Homo sapien
gagtcatgtgaagttaagacaaatgtgacatta

SEQ ID NO: 575520 - DNA, 33 bp, Homo sapien
gagtcatgtgaagttatgacaaatgtgacatta

SEQ ID NO: 575521 - DNA, 33 bp, Homo sapien
gtgccattggacaaacactgaacaaatcaaatt

SEQ ID NO: 575522 - DNA, 33 bp, Homo sapien
gtgccattggacaaaccctgaacaaatcaaatt

SEQ ID NO: 575523 - DNA, 33 bp, Homo sapien
attaagttagatgtgccgataacaatgtctgtt

SEQ ID NO: 575524 - DNA, 33 bp, Homo sapien
attaagttagatgtgctgataacaatgtctgtt

SEQ ID NO: 575525 - DNA, 33 bp, Homo sapien
tctccttagatctgaaactcaaggcaaggaatc

SEQ ID NO: 575526 - DNA, 33 bp, Homo sapien
tctccttagatctgaagctcaaggcaaggaatc

SEQ ID NO: 575527 - DNA, 33 bp, Homo sapien
aagggttgcttttgacaaacagcaagacttatg

SEQ ID NO: 575528 - DNA, 33 bp, Homo sapien
aagggttgcttttgaccaacagcaagacttatg

SEQ ID NO: 575529 - DNA, 33 bp, Homo sapien
gtggtaccccgacctacagacttggttagcatg

SEQ ID NO: 575530 - DNA, 33 bp, Homo sapien
gtggtaccccgacctatagacttggttagcatg

SEQ ID NO: 575531 - DNA, 33 bp, Homo sapien
tactggagttggtgaccggtactggtgcaaaac

SEQ ID NO: 575532 - DNA, 33 bp, Homo sapien
tactggagttggtgactggtactggtgcaaaac

SEQ ID NO: 575533 - DNA, 33 bp, Homo sapien
atttggaagtatcaaaaatattacaaaggaaaa

SEQ ID NO: 575534 - DNA, 33 bp, Homo sapien
atttggaagtatcaaagatattacaaaggaaaa

SEQ ID NO: 575535 - DNA, 33 bp, Homo sapien
gatcacttgttaacacaaagcaaaaagggacaa

SEQ ID NO: 575536 - DNA, 33 bp, Homo sapien
gatcacttgttaacacgaagcaaaaagggacaa

SEQ ID NO: 575537 - DNA, 33 bp, Homo sapien
ataaatgcatttgactgactttttctgaatttt

SEQ ID NO: 575538 - DNA, 33 bp, Homo sapien
ataaatgcatttgacttactttttctgaatttt

SEQ ID NO: 575539 - DNA, 33 bp, Homo sapien
ctaaatgacagtaaaaagctcccagacaaattc

SEQ ID NO: 575540 - DNA, 33 bp, Homo sapien
ctaaatgacagtaaaacgctcccagacaaattc

SEQ ID NO: 575541 - DNA, 33 bp, Homo sapien
aggcttccaaaggacaaggacaacctcctttgt

SEQ ID NO: 575542 - DNA, 33 bp, Homo sapien
aggcttccaaaggacagggacaacctcctttgt

SEQ ID NO: 575543 - DNA, 33 bp, Homo sapien
aaatgcccacaagggagtcaccaccttaccact

SEQ ID NO: 575544 - DNA, 33 bp, Homo sapien
aaatgcccacaagggattcaccaccttaccact

SEQ ID NO: 575545 - DNA, 33 bp, Homo sapien
aggaagtaggtataagacttaatcccattttgc

SEQ ID NO: 575546 - DNA, 33 bp, Homo sapien
aggaagtaggtataagtcttaatcccattttgc

SEQ ID NO: 575547 - DNA, 33 bp, Homo sapien
tgcttatgtttcaaataaggaggagattggata

SEQ ID NO: 575548 - DNA, 33 bp, Homo sapien
tgcttatgtttcaaattaggaggagattggata

SEQ ID NO: 575549 - DNA, 33 bp, Homo sapien
gtttgagcagtggcaacgacccaacaggcaagc

SEQ ID NO: 575550 - DNA, 33 bp, Homo sapien
gtttgagcagtggcaatgacccaacaggcaagc

SEQ ID NO: 575551 - DNA, 33 bp, Homo sapien
gttaacaaactttcaaccagtaatctccagtga

SEQ ID NO: 575552 - DNA, 33 bp, Homo sapien
gttaacaaactttcaagcagtaatctccagtga

SEQ ID NO: 575553 - DNA, 33 bp, Homo sapien
cagtggatcaaatgtaacccttagccatatttt

SEQ ID NO: 575554 - DNA, 33 bp, Homo sapien
cagtggatcaaatgtagcccttagccatatttt

SEQ ID NO: 575555 - DNA, 33 bp, Homo sapien
gcctttcatgcccttcacaaagtctggaatacc

SEQ ID NO: 575556 - DNA, 33 bp, Homo sapien
gcctttcatgcccttcgcaaagtctggaatacc

SEQ ID NO: 575557 - DNA, 33 bp, Homo sapien
tatatgtatgagatccagagaaacccatgcatt

SEQ ID NO: 575558 - DNA, 33 bp, Homo sapien
tatatgtatgagatccggagaaacccatgcatt

SEQ ID NO: 575559 - DNA, 33 bp, Homo sapien
taaatgcaaaaataaacgtgtgaattagatgag

SEQ ID NO: 575560 - DNA, 33 bp, Homo sapien
taaatgcaaaaataaatgtgtgaattagatgag

SEQ ID NO: 575561 - DNA, 33 bp, Homo sapien
gattgcatcttgtgtaagtcttaggataagtgg

SEQ ID NO: 575562 - DNA, 33 bp, Homo sapien
gattgcatcttgtgtatgtcttaggataagtgg

SEQ ID NO: 575563 - DNA, 33 bp, Homo sapien
cagcaaacgcctcccccacaatacagataaaat

SEQ ID NO: 575564 - DNA, 33 bp, Homo sapien
cagcaaacgcctccccgacaatacagataaaat

SEQ ID NO: 575565 - DNA, 33 bp, Homo sapien
tgctcattcataggacacttaatgtagaaaata

SEQ ID NO: 575566 - DNA, 33 bp, Homo sapien
tgctcattcataggacgcttaatgtagaaaata

SEQ ID NO: 575567 - DNA, 33 bp, Homo sapien
tgatttgttcagctcacggaattgaaagaaaag

SEQ ID NO: 575568 - DNA, 33 bp, Homo sapien
tgatttgttcagctcatggaattgaaagaaaag

SEQ ID NO: 575569 - DNA, 33 bp, Homo sapien
tgtgtttttatcaagccgcccacaacagaagtg

SEQ ID NO: 575570 - DNA, 33 bp, Homo sapien
tgtgtttttatcaagcggcccacaacagaagtg

SEQ ID NO: 575571 - DNA, 33 bp, Homo sapien
gctcactgctagcacaacagaagtacggagcca

SEQ ID NO: 575572 - DNA, 33 bp, Homo sapien
gctcactgctagcacagcagaagtacggagcca

SEQ ID NO: 575573 - DNA, 33 bp, Homo sapien
gctcagtatgattgcagagagcccagttttggg

SEQ ID NO: 575574 - DNA, 33 bp, Homo sapien
gctcagtatgattgcatagagcccagttttggg

SEQ ID NO: 575575 - DNA, 33 bp, Homo sapien
gatggttgaaccaatacgagcaccaaattatct

SEQ ID NO: 575576 - DNA, 33 bp, Homo sapien
gatggttgaaccaatatgagcaccaaattatct

SEQ ID NO: 575577 - DNA, 33 bp, Homo sapien
agagcagagtattcaacgtgcccatctctaggg

SEQ ID NO: 575578 - DNA, 33 bp, Homo sapien
agagcagagtattcaatgtgcccatctctaggg

SEQ ID NO: 575579 - DNA, 33 bp, Homo sapien
gagatgagttattaagcaaatgcctctgttaca

SEQ ID NO: 575580 - DNA, 33 bp, Homo sapien
gagatgagttattaagtaaatgcctctgttaca

SEQ ID NO: 575581 - DNA, 33 bp, Homo sapien
taattgagaatcctaactgaacccacaattttg

SEQ ID NO: 575582 - DNA, 33 bp, Homo sapien
taattgagaatcctaattgaacccacaattttg

SEQ ID NO: 575583 - DNA, 33 bp, Homo sapien
tttgactttcctattacgagttctgaaacagct

SEQ ID NO: 575584 - DNA, 33 bp, Homo sapien
tttgactttcctattaggagttctgaaacagct

SEQ ID NO: 575585 - DNA, 33 bp, Homo sapien
tgagaggatttttgaccgcttgtctggaacatt

SEQ ID NO: 575586 - DNA, 33 bp, Homo sapien
tgagaggatttttgactgcttgtctggaacatt

SEQ ID NO: 575587 - DNA, 33 bp, Homo sapien
tgatgatataagggtcaccattgaaaacaagag

SEQ ID NO: 575588 - DNA, 33 bp, Homo sapien
tgatgatataagggtcgccattgaaaacaagag

SEQ ID NO: 575589 - DNA, 33 bp, Homo sapien
tctaaatacttaaaaactgcacgtgctctttaa

SEQ ID NO: 575590 - DNA, 33 bp, Homo sapien
tctaaatacttaaaaattgcacgtgctctttaa

SEQ ID NO: 575591 - DNA, 33 bp, Homo sapien
acagtttatcctcacaagaattctaagaagtag

SEQ ID NO: 575592 - DNA, 33 bp, Homo sapien
acagtttatcctcacaggaattctaagaagtag

SEQ ID NO: 575593 - DNA, 33 bp, Homo sapien
gtggtgaagggtcgaaacagctgctatgatgca

SEQ ID NO: 575594 - DNA, 33 bp, Homo sapien
gtggtgaagggtcgaaccagctgctatgatgca

SEQ ID NO: 575595 - DNA, 33 bp, Homo sapien
gtcaggctctcggaaaaatgcagtttctgcctt

SEQ ID NO: 575596 - DNA, 33 bp, Homo sapien
gtcaggctctcggaaagatgcagtttctgcctt

SEQ ID NO: 575597 - DNA, 33 bp, Homo sapien
atatttattgcactccaccgcatcttcccttac

SEQ ID NO: 575598 - DNA, 33 bp, Homo sapien
atatttattgcactccgccgcatcttcccttac

SEQ ID NO: 575599 - DNA, 33 bp, Homo sapien
aactcttttacaaataccaagagacgtggagac

SEQ ID NO: 575600 - DNA, 33 bp, Homo sapien
aactcttttacaaatatcaagagacgtggagac

SEQ ID NO: 575601 - DNA, 33 bp, Homo sapien
attgccgatcaaaaaccctctttttgcacacac

SEQ ID NO: 575602 - DNA, 33 bp, Homo sapien
attgccgatcaaaaacgctctttttgcacacac

SEQ ID NO: 575603 - DNA, 33 bp, Homo sapien
cagttgtaaaaaagccaagtataagtgctgctc

SEQ ID NO: 575604 - DNA, 33 bp, Homo sapien
cagttgtaaaaaagccgagtataagtgctgctc

SEQ ID NO: 575605 - DNA, 33 bp, Homo sapien
gtccccattttttagacgactaaactgagactc

SEQ ID NO: 575606 - DNA, 33 bp, Homo sapien
gtccccattttttagatgactaaactgagactc

SEQ ID NO: 575607 - DNA, 33 bp, Homo sapien
ggccttgtgtttctagacctggctcctcttgag

SEQ ID NO: 575608 - DNA, 33 bp, Homo sapien
ggccttgtgtttctaggcctggctcctcttgag

SEQ ID NO: 575609 - DNA, 33 bp, Homo sapien
aaggcaattttcctaacagaagtttgtgggatt

SEQ ID NO: 575610 - DNA, 33 bp, Homo sapien
aaggcaattttcctaatagaagtttgtgggatt

SEQ ID NO: 575611 - DNA, 33 bp, Homo sapien
taaaaaagatggacaacatctcagccttatgta

SEQ ID NO: 575612 - DNA, 33 bp, Homo sapien
taaaaaagatggacaagatctcagccttatgta

SEQ ID NO: 575613 - DNA, 33 bp, Homo sapien
ctactgaggatgtaaccatgaaaagacaggcaa

SEQ ID NO: 575614 - DNA, 33 bp, Homo sapien
ctactgaggatgtaacgatgaaaagacaggcaa

SEQ ID NO: 575615 - DNA, 33 bp, Homo sapien
ctgacttctggaactgaaagataatgaatttgt

SEQ ID NO: 575616 - DNA, 33 bp, Homo sapien
ctgacttctggaactgcaagataatgaatttgt

SEQ ID NO: 575617 - DNA, 33 bp, Homo sapien
aggacaacaggaagctcaatagtaagtctactt

SEQ ID NO: 575618 - DNA, 33 bp, Homo sapien
aggacaacaggaagctgaatagtaagtctactt

SEQ ID NO: 575619 - DNA, 33 bp, Homo sapien
atatcactcattttcccctagtttgcataaatt

SEQ ID NO: 575620 - DNA, 33 bp, Homo sapien
atatcactcattttccgctagtttgcataaatt

SEQ ID NO: 575621 - DNA, 33 bp, Homo sapien
tttaaagctgctctctcaattttagagactaga

SEQ ID NO: 575622 - DNA, 33 bp, Homo sapien
tttaaagctgctctctgaattttagagactaga

SEQ ID NO: 575623 - DNA, 33 bp, Homo sapien
ctttaaagaatcctgaaccgacgagggcatgaa

SEQ ID NO: 575624 - DNA, 33 bp, Homo sapien
ctttaaagaatcctgagccgacgagggcatgaa

SEQ ID NO: 575625 - DNA, 33 bp, Homo sapien
aattcttcctagaccactgattaccattacagt

SEQ ID NO: 575626 - DNA, 33 bp, Homo sapien
aattcttcctagaccattgattaccattacagt

SEQ ID NO: 575627 - DNA, 33 bp, Homo sapien
gggtcagtgtgcctcacagaatcgtggtgtact

SEQ ID NO: 575628 - DNA, 33 bp, Homo sapien
gggtcagtgtgcctcatagaatcgtggtgtact

SEQ ID NO: 575629 - DNA, 33 bp, Homo sapien
cttgtgctctgcattaagttctattattattat

SEQ ID NO: 575630 - DNA, 33 bp, Homo sapien
cttgtgctctgcattaggttctattattattat

SEQ ID NO: 575631 - DNA, 33 bp, Homo sapien
acctgcttgtaaggtgaagtattggcagtgaag

SEQ ID NO: 575632 - DNA, 33 bp, Homo sapien
acctgcttgtaaggtgtagtattggcagtgaag

SEQ ID NO: 575633 - DNA, 33 bp, Homo sapien
aactgcagactttcatgaccaaagagacaacct

SEQ ID NO: 575634 - DNA, 33 bp, Homo sapien
aactgcagactttcattaccaaagagacaacct

SEQ ID NO: 575635 - DNA, 33 bp, Homo sapien
gaacttctagggtacacctcaagattagggcta

SEQ ID NO: 575636 - DNA, 33 bp, Homo sapien
gaacttctagggtacatctcaagattagggcta

SEQ ID NO: 575637 - DNA, 33 bp, Homo sapien
ttgtttggtggggagaacatcatatagtctgta

SEQ ID NO: 575638 - DNA, 33 bp, Homo sapien
ttgtttggtggggagagcatcatatagtctgta

SEQ ID NO: 575639 - DNA, 33 bp, Homo sapien
aggcagcagagagagcgactttagggagaaata

SEQ ID NO: 575640 - DNA, 33 bp, Homo sapien
aggcagcagagagagctactttagggagaaata

SEQ ID NO: 575641 - DNA, 33 bp, Homo sapien
attttatactgattacaagttgtagcctgtcac

SEQ ID NO: 575642 - DNA, 33 bp, Homo sapien
attttatactgattacgagttgtagcctgtcac

SEQ ID NO: 575643 - DNA, 33 bp, Homo sapien
taatcaccaccgaaaccaagatacagactgctt

SEQ ID NO: 575644 - DNA, 33 bp, Homo sapien
taatcaccaccgaaactaagatacagactgctt

SEQ ID NO: 575645 - DNA, 33 bp, Homo sapien
ccttgcaaaaactcaaatcactaactcaccaaa

SEQ ID NO: 575646 - DNA, 33 bp, Homo sapien
ccttgcaaaaactcaagtcactaactcaccaaa

SEQ ID NO: 575647 - DNA, 33 bp, Homo sapien
cactcccaggtatcaagcaatcccctgagcatt

SEQ ID NO: 575648 - DNA, 33 bp, Homo sapien
cactcccaggtatcaatcaatcccctgagcatt

SEQ ID NO: 575649 - DNA, 33 bp, Homo sapien
aaacactgagcatgtacggtggtaacatgggaa

SEQ ID NO: 575650 - DNA, 33 bp, Homo sapien
aaacactgagcatgtatggtggtaacatgggaa

SEQ ID NO: 575651 - DNA, 33 bp, Homo sapien
acctgaagtttttctacagctaggaccatggcc

SEQ ID NO: 575652 - DNA, 33 bp, Homo sapien
acctgaagtttttctatagctaggaccatggcc

SEQ ID NO: 575653 - DNA, 33 bp, Homo sapien
actaccaccaccacaaaaataacctgttgagta

SEQ ID NO: 575654 - DNA, 33 bp, Homo sapien
actaccaccaccacaagaataacctgttgagta

SEQ ID NO: 575655 - DNA, 33 bp, Homo sapien
agaaagctgctaaaaacactgatgcccaaacct

SEQ ID NO: 575656 - DNA, 33 bp, Homo sapien
agaaagctgctaaaaatactgatgcccaaacct

SEQ ID NO: 575657 - DNA, 33 bp, Homo sapien
tctagggtatgtcaaaatgtccacaagccctgt

SEQ ID NO: 575658 - DNA, 33 bp, Homo sapien
tctagggtatgtcaaagtgtccacaagccctgt

SEQ ID NO: 575659 - DNA, 33 bp, Homo sapien
tacttgctattcactacgctgaaaacttttatt

SEQ ID NO: 575660 - DNA, 33 bp, Homo sapien
tacttgctattcactatgctgaaaacttttatt

SEQ ID NO: 575661 - DNA, 33 bp, Homo sapien
aactctctcgatctcaaagttgactgattaaaa

SEQ ID NO: 575662 - DNA, 33 bp, Homo sapien
aactctctcgatctcagagttgactgattaaaa

SEQ ID NO: 575663 - DNA, 33 bp, Homo sapien
ataagaagagtttttaaggcaggatctgaagtg

SEQ ID NO: 575664 - DNA, 33 bp, Homo sapien
ataagaagagtttttacggcaggatctgaagtg

SEQ ID NO: 575665 - DNA, 33 bp, Homo sapien
atttagcattttggtgcatgtgtgtatatgaag

SEQ ID NO: 575666 - DNA, 33 bp, Homo sapien
atttagcattttggtgtatgtgtgtatatgaag

SEQ ID NO: 575667 - DNA, 33 bp, Homo sapien
tctcctccctctggaacgcaaacttaccagagg

SEQ ID NO: 575668 - DNA, 33 bp, Homo sapien
tctcctccctctggaatgcaaacttaccagagg

SEQ ID NO: 575669 - DNA, 33 bp, Homo sapien
gccctccaagtatggaaataaacaaggtagact

SEQ ID NO: 575670 - DNA, 33 bp, Homo sapien
gccctccaagtatggacataaacaaggtagact

SEQ ID NO: 575671 - DNA, 33 bp, Homo sapien
ttagaaaatcaagtcaactttgtattactgttc

SEQ ID NO: 575672 - DNA, 33 bp, Homo sapien
ttagaaaatcaagtcacctttgtattactgttc

SEQ ID NO: 575673 - DNA, 33 bp, Homo sapien
ttccaaataaagcaaaatacaggttctctttgt

SEQ ID NO: 575674 - DNA, 33 bp, Homo sapien
ttccaaataaagcaaagtacaggttctctttgt

SEQ ID NO: 575675 - DNA, 33 bp, Homo sapien
aaattctgtagatggacattgttatgtttgtac

SEQ ID NO: 575676 - DNA, 33 bp, Homo sapien
aaattctgtagatggatattgttatgtttgtac

SEQ ID NO: 575677 - DNA, 33 bp, Homo sapien
ttctctgcaacaaggacagtaagatgtagatga

SEQ ID NO: 575678 - DNA, 33 bp, Homo sapien
ttctctgcaacaaggatagtaagatgtagatga

SEQ ID NO: 575679 - DNA, 33 bp, Homo sapien
tggaagtaaagatgaacgacatgcaaagaaata

SEQ ID NO: 575680 - DNA, 33 bp, Homo sapien
tggaagtaaagatgaatgacatgcaaagaaata

SEQ ID NO: 575681 - DNA, 33 bp, Homo sapien
gtgaagcatttgctacagaaacttacatggatc

SEQ ID NO: 575682 - DNA, 33 bp, Homo sapien
gtgaagcatttgctacggaaacttacatggatc

SEQ ID NO: 575683 - DNA, 33 bp, Homo sapien
ggtaaacgactagatagtagatatttttggcct

SEQ ID NO: 575684 - DNA, 33 bp, Homo sapien
ggtaaacgactagatattagatatttttggcct

SEQ ID NO: 575685 - DNA, 33 bp, Homo sapien
tgctgagtcctttggaacatatctggggccaca

SEQ ID NO: 575686 - DNA, 33 bp, Homo sapien
tgctgagtcctttggagcatatctggggccaca

SEQ ID NO: 575687 - DNA, 33 bp, Homo sapien
gtcatgccccaaatcacggaaacaatcttccct

SEQ ID NO: 575688 - DNA, 33 bp, Homo sapien
gtcatgccccaaatcatggaaacaatcttccct

SEQ ID NO: 575689 - DNA, 33 bp, Homo sapien
atgatgactgaatgcaaggtaggatcctgggac

SEQ ID NO: 575690 - DNA, 33 bp, Homo sapien
atgatgactgaatgcacggtaggatcctgggac

SEQ ID NO: 575691 - DNA, 33 bp, Homo sapien
gaagaacatgaatagccaaacctaccctactgt

SEQ ID NO: 575692 - DNA, 33 bp, Homo sapien
gaagaacatgaatagctaaacctaccctactgt

SEQ ID NO: 575693 - DNA, 33 bp, Homo sapien
ttccacagtatgtaccaaatttgcaataatgtg

SEQ ID NO: 575694 - DNA, 33 bp, Homo sapien
ttccacagtatgtaccgaatttgcaataatgtg

SEQ ID NO: 575695 - DNA, 33 bp, Homo sapien
tagtcataagtcgtaaacagcccaatggcctcc

SEQ ID NO: 575696 - DNA, 33 bp, Homo sapien
tagtcataagtcgtaaccagcccaatggcctcc

SEQ ID NO: 575697 - DNA, 33 bp, Homo sapien
attctgcgactttgcactcttcattgtcttttt

SEQ ID NO: 575698 - DNA, 33 bp, Homo sapien
attctgcgactttgcattcttcattgtcttttt

SEQ ID NO: 575699 - DNA, 33 bp, Homo sapien
tgctatttccaactcacgttttagagttttctt

SEQ ID NO: 575700 - DNA, 33 bp, Homo sapien
tgctatttccaactcaggttttagagttttctt

SEQ ID NO: 575701 - DNA, 33 bp, Homo sapien
taatagatgaagaacacgagggagtaaagcttt

SEQ ID NO: 575702 - DNA, 33 bp, Homo sapien
taatagatgaagaacatgagggagtaaagcttt

SEQ ID NO: 575703 - DNA, 33 bp, Homo sapien
gtttgtgctccccaaagaaacagattcagtttt

SEQ ID NO: 575704 - DNA, 33 bp, Homo sapien
gtttgtgctccccaaataaacagattcagtttt

SEQ ID NO: 575705 - DNA, 33 bp, Homo sapien
cgacagtttttatgaacgtcaggattgtattta

SEQ ID NO: 575706 - DNA, 33 bp, Homo sapien
cgacagtttttatgaatgtcaggattgtattta

SEQ ID NO: 575707 - DNA, 33 bp, Homo sapien
ctgctgaagtcaagaacgatggtaaaaatcagg

SEQ ID NO: 575708 - DNA, 33 bp, Homo sapien
ctgctgaagtcaagaatgatggtaaaaatcagg

SEQ ID NO: 575709 - DNA, 33 bp, Homo sapien
aacttctcctgatgcacgtgagacacattgtcc

SEQ ID NO: 575710 - DNA, 33 bp, Homo sapien
aacttctcctgatgcaggtgagacacattgtcc

SEQ ID NO: 575711 - DNA, 33 bp, Homo sapien
ctctaaatgtctgcccacatacctcacagctaa

SEQ ID NO: 575712 - DNA, 33 bp, Homo sapien
ctctaaatgtctgcccgcatacctcacagctaa

SEQ ID NO: 575713 - DNA, 33 bp, Homo sapien
attctccttttacctcacagttaccaaaataca

SEQ ID NO: 575714 - DNA, 33 bp, Homo sapien
attctccttttacctcgcagttaccaaaataca

SEQ ID NO: 575715 - DNA, 33 bp, Homo sapien
accctgcatctaatcaagcctccaggtctaact

SEQ ID NO: 575716 - DNA, 33 bp, Homo sapien
accctgcatctaatcaggcctccaggtctaact

SEQ ID NO: 575717 - DNA, 33 bp, Homo sapien
agagtcagacagctgacagataaaatccacctc

SEQ ID NO: 575718 - DNA, 33 bp, Homo sapien
agagtcagacagctgagagataaaatccacctc

SEQ ID NO: 575719 - DNA, 33 bp, Homo sapien
ttgcgcaactcttaacaattttctgctctgaag

SEQ ID NO: 575720 - DNA, 33 bp, Homo sapien
ttgcgcaactcttaaccattttctgctctgaag

SEQ ID NO: 575721 - DNA, 33 bp, Homo sapien
tgtaattcaagtcctgcataaattaaacctaca

SEQ ID NO: 575722 - DNA, 33 bp, Homo sapien
tgtaattcaagtcctgtataaattaaacctaca

SEQ ID NO: 575723 - DNA, 33 bp, Homo sapien
gcatctgggaatatccaagagctggtggctcct

SEQ ID NO: 575724 - DNA, 33 bp, Homo sapien
gcatctgggaatatccgagagctggtggctcct

SEQ ID NO: 575725 - DNA, 33 bp, Homo sapien
ttctgttttcttaccacagtactaaggagggac

SEQ ID NO: 575726 - DNA, 33 bp, Homo sapien
ttctgttttcttaccatagtactaaggagggac

SEQ ID NO: 575727 - DNA, 33 bp, Homo sapien
gacacaaagggccacaaactgcataatttcact

SEQ ID NO: 575728 - DNA, 33 bp, Homo sapien
gacacaaagggccacatactgcataatttcact

SEQ ID NO: 575729 - DNA, 33 bp, Homo sapien
atttcctcatgaaccacgttagattattactat

SEQ ID NO: 575730 - DNA, 33 bp, Homo sapien
atttcctcatgaaccatgttagattattactat

SEQ ID NO: 575731 - DNA, 33 bp, Homo sapien
ggaataattactgaagaagatgtcatctgcaca

SEQ ID NO: 575732 - DNA, 33 bp, Homo sapien
ggaataattactgaaggagatgtcatctgcaca

SEQ ID NO: 575733 - DNA, 33 bp, Homo sapien
ccgtaaagcagtggccaattccaaggctggtca

SEQ ID NO: 575734 - DNA, 33 bp, Homo sapien
ccgtaaagcagtggccgattccaaggctggtca

SEQ ID NO: 575735 - DNA, 33 bp, Homo sapien
gtttcaaggaggttaaatgcttcaactaaggtt

SEQ ID NO: 575736 - DNA, 33 bp, Homo sapien
gtttcaaggaggttaagtgcttcaactaaggtt

SEQ ID NO: 575737 - DNA, 33 bp, Homo sapien
taggacctatttcacgcaatcattataactata

SEQ ID NO: 575738 - DNA, 33 bp, Homo sapien
taggacctatttcacggaatcattataactata

SEQ ID NO: 575739 - DNA, 33 bp, Homo sapien
gactttgttggggggcagagtcatttaagaaag

SEQ ID NO: 575740 - DNA, 33 bp, Homo sapien
gactttgttggggggcggagtcatttaagaaag

SEQ ID NO: 575741 - DNA, 33 bp, Homo sapien
cacagccctgtttcaaatggtccaggttgcctc

SEQ ID NO: 575742 - DNA, 33 bp, Homo sapien
cacagccctgtttcaagtggtccaggttgcctc

SEQ ID NO: 575743 - DNA, 33 bp, Homo sapien
attggaatccatttgcccgttcctattattccc

SEQ ID NO: 575744 - DNA, 33 bp, Homo sapien
attggaatccatttgctcgttcctattattccc

SEQ ID NO: 575745 - DNA, 33 bp, Homo sapien
cactaacatttttaaaacctggatatgttatgt

SEQ ID NO: 575746 - DNA, 33 bp, Homo sapien
cactaacatttttaaaccctggatatgttatgt

SEQ ID NO: 575747 - DNA, 33 bp, Homo sapien
agtgtaattaatcagccagctaaactatccata

SEQ ID NO: 575748 - DNA, 33 bp, Homo sapien
agtgtaattaatcagcgagctaaactatccata

SEQ ID NO: 575749 - DNA, 33 bp, Homo sapien
agagaacttgtcagaaataaagtaataccagtc

SEQ ID NO: 575750 - DNA, 33 bp, Homo sapien
agagaacttgtcagaagtaaagtaataccagtc

SEQ ID NO: 575751 - DNA, 33 bp, Homo sapien
ttgtctgttggatactcagaccagaataaggca

SEQ ID NO: 575752 - DNA, 33 bp, Homo sapien
ttgtctgttggatacttagaccagaataaggca

SEQ ID NO: 575753 - DNA, 33 bp, Homo sapien
ctaatcatttaattaccatgctttccccacaaa

SEQ ID NO: 575754 - DNA, 33 bp, Homo sapien
ctaatcatttaattactatgctttccccacaaa

SEQ ID NO: 575755 - DNA, 33 bp, Homo sapien
tttggttgcagttaatcaccattttcaatttgc

SEQ ID NO: 575756 - DNA, 33 bp, Homo sapien
tttggttgcagttaattaccattttcaatttgc

SEQ ID NO: 575757 - DNA, 33 bp, Homo sapien
tctatgtatatgaccaagaaatcatcaccacaa

SEQ ID NO: 575758 - DNA, 33 bp, Homo sapien
tctatgtatatgaccatgaaatcatcaccacaa

SEQ ID NO: 575759 - DNA, 33 bp, Homo sapien
acagcaacacaaaacaaagaattatccacccaa

SEQ ID NO: 575760 - DNA, 33 bp, Homo sapien
acagcaacacaaaacagagaattatccacccaa

SEQ ID NO: 575761 - DNA, 33 bp, Homo sapien
cagacaaaaaaatacacacacatatgcatattc

SEQ ID NO: 575762 - DNA, 33 bp, Homo sapien
cagacaaaaaaatacagacacatatgcatattc

SEQ ID NO: 575763 - DNA, 33 bp, Homo sapien
acatacttcttatataactcataaatctgaacc

SEQ ID NO: 575764 - DNA, 33 bp, Homo sapien
acatacttcttatatatctcataaatctgaacc

SEQ ID NO: 575765 - DNA, 33 bp, Homo sapien
ccctgcttctacagaaaggagtagcatccattt

SEQ ID NO: 575766 - DNA, 33 bp, Homo sapien
ccctgcttctacagaagggagtagcatccattt

SEQ ID NO: 575767 - DNA, 33 bp, Homo sapien
tgttttttaaagcaagcatcatgatcctatcat

SEQ ID NO: 575768 - DNA, 33 bp, Homo sapien
tgttttttaaagcaagtatcatgatcctatcat

SEQ ID NO: 575769 - DNA, 33 bp, Homo sapien
ccctcttcttctagaaactagcatagcactcgg

SEQ ID NO: 575770 - DNA, 33 bp, Homo sapien
ccctcttcttctagaacctagcatagcactcgg

SEQ ID NO: 575771 - DNA, 33 bp, Homo sapien
tactgcaaagagttgacgaatgggccagttagt

SEQ ID NO: 575772 - DNA, 33 bp, Homo sapien
tactgcaaagagttgatgaatgggccagttagt

SEQ ID NO: 575773 - DNA, 33 bp, Homo sapien
ggtgggttcctgattaccatactttaaatactg

SEQ ID NO: 575774 - DNA, 33 bp, Homo sapien
ggtgggttcctgattatcatactttaaatactg

SEQ ID NO: 575775 - DNA, 33 bp, Homo sapien
tagcaaatatagccaacatcaagagctgtgacc

SEQ ID NO: 575776 - DNA, 33 bp, Homo sapien
tagcaaatatagccaatatcaagagctgtgacc

SEQ ID NO: 575777 - DNA, 33 bp, Homo sapien
tgaatggcacttctaaaaattggctacacaacc

SEQ ID NO: 575778 - DNA, 33 bp, Homo sapien
tgaatggcacttctaacaattggctacacaacc

SEQ ID NO: 575779 - DNA, 33 bp, Homo sapien
taaataagggattatcagaatcactacttattt

SEQ ID NO: 575780 - DNA, 33 bp, Homo sapien
taaataagggattatccgaatcactacttattt

SEQ ID NO: 575781 - DNA, 33 bp, Homo sapien
aataatgcggctcataagtcacaagtaaaatct

SEQ ID NO: 575782 - DNA, 33 bp, Homo sapien
aataatgcggctcataggtcacaagtaaaatct

SEQ ID NO: 575783 - DNA, 33 bp, Homo sapien
tgctgacattgatgaaagataggcttttcaaaa

SEQ ID NO: 575784 - DNA, 33 bp, Homo sapien
tgctgacattgatgaatgataggcttttcaaaa

SEQ ID NO: 575785 - DNA, 33 bp, Homo sapien
aacaaatccccctacaaaaatgaaatttagagg

SEQ ID NO: 575786 - DNA, 33 bp, Homo sapien
aacaaatccccctacagaaatgaaatttagagg

SEQ ID NO: 575787 - DNA, 33 bp, Homo sapien
tatttagagatcaaaactttaaggctgacgtaa

SEQ ID NO: 575788 - DNA, 33 bp, Homo sapien
tatttagagatcaaaattttaaggctgacgtaa

SEQ ID NO: 575789 - DNA, 33 bp, Homo sapien
ctcccagaaacctcacggctaggattggccctg

SEQ ID NO: 575790 - DNA, 33 bp, Homo sapien
ctcccagaaacctcactgctaggattggccctg

SEQ ID NO: 575791 - DNA, 33 bp, Homo sapien
ttgttacacagcaagacataattaatatactta

SEQ ID NO: 575792 - DNA, 33 bp, Homo sapien
ttgttacacagcaagagataattaatatactta

SEQ ID NO: 575793 - DNA, 33 bp, Homo sapien
aaaacatgtactccgaagtcagatggcctggat

SEQ ID NO: 575794 - DNA, 33 bp, Homo sapien
aaaacatgtactccgatgtcagatggcctggat

SEQ ID NO: 575795 - DNA, 33 bp, Homo sapien
catgcttcaaggaccaaaaaagcagagagaaca

SEQ ID NO: 575796 - DNA, 33 bp, Homo sapien
catgcttcaaggaccagaaaagcagagagaaca

SEQ ID NO: 575797 - DNA, 33 bp, Homo sapien; identical to SEQ ID NO: 575795

SEQ ID NO: 575798 - DNA, 33 bp, Homo sapien; identical to SEQ ID NO: 575796

SEQ ID NO: 575799 - DNA, 33 bp, Homo sapien
ttcctgcttcctcatcaatttcaaacttaacat

SEQ ID NO: 575800 - DNA, 33 bp, Homo sapien
ttcctgcttcctcatcgatttcaaacttaacat

SEQ ID NO: 575801 - DNA, 33 bp, Homo sapien
tgacttcataagatcaacatgcgtgctaatggt

SEQ ID NO: 575802 - DNA, 33 bp, Homo sapien
tgacttcataagatcatcatgcgtgctaatggt

SEQ ID NO: 575803 - DNA, 33 bp, Homo sapien
gacatttccaccgtgacctcaaaagtgacatga

SEQ ID NO: 575804 - DNA, 33 bp, Homo sapien
gacatttccaccgtgatctcaaaagtgacatga

SEQ ID NO: 575805 - DNA, 33 bp, Homo sapien
aggccttcacaaattccgaagtggtagtggccc

SEQ ID NO: 575806 - DNA, 33 bp, Homo sapien
aggccttcacaaattctgaagtggtagtggccc

SEQ ID NO: 575807 - DNA, 33 bp, Homo sapien
ttacagtttgcaaggccatctgagaggtcttcg

SEQ ID NO: 575808 - DNA, 33 bp, Homo sapien
ttacagtttgcaaggctatctgagaggtcttcg

SEQ ID NO: 575809 - DNA, 33 bp, Homo sapien
cagcccttgcaaaacacgaaatccattgtgcta

SEQ ID NO: 575810 - DNA, 33 bp, Homo sapien
cagcccttgcaaaacatgaaatccattgtgcta

SEQ ID NO: 575811 - DNA, 33 bp, Homo sapien
aaatcagcatctgcaacgtttattatgacgctg

SEQ ID NO: 575812 - DNA, 33 bp, Homo sapien
aaatcagcatctgcaatgtttattatgacgctg

SEQ ID NO: 575813 - DNA, 33 bp, Homo sapien
tttctcggtattactccactttttcatttacta

SEQ ID NO: 575814 - DNA, 33 bp, Homo sapien
tttctcggtattactctactttttcatttacta

SEQ ID NO: 575815 - DNA, 33 bp, Homo sapien
ccaacttcaatgtctaaaatctaccccttgtct

SEQ ID NO: 575816 - DNA, 33 bp, Homo sapien
ccaacttcaatgtctagaatctaccccttgtct

SEQ ID NO: 575817 - DNA, 33 bp, Homo sapien
tattccatgcaaagcacaaaatgagtgtctaag

SEQ ID NO: 575818 - DNA, 33 bp, Homo sapien
tattccatgcaaagcagaaaatgagtgtctaag

SEQ ID NO: 575819 - DNA, 33 bp, Homo sapien
agttttaaaggtactgaaagagttgaaaagaca

SEQ ID NO: 575820 - DNA, 33 bp, Homo sapien
agttttaaaggtactggaagagttgaaaagaca

SEQ ID NO: 575821 - DNA, 33 bp, Homo sapien
tttcttacaatcttcaaagaagtttaacacctt

SEQ ID NO: 575822 - DNA, 33 bp, Homo sapien
tttcttacaatcttcagagaagtttaacacctt

SEQ ID NO: 575823 - DNA, 33 bp, Homo sapien
atggggagccatggaacatatttgagctggagg

SEQ ID NO: 575824 - DNA, 33 bp, Homo sapien
atggggagccatggaagatatttgagctggagg

SEQ ID NO: 575825 - DNA, 33 bp, Homo sapien
ttaaattgtctcttgacggcaatggggagccat

SEQ ID NO: 575826 - DNA, 33 bp, Homo sapien
ttaaattgtctcttgatggcaatggggagccat

SEQ ID NO: 575827 - DNA, 33 bp, Homo sapien
tccctgattgcctaaccgggaaactgggccaaa

SEQ ID NO: 575828 - DNA, 33 bp, Homo sapien
tccctgattgcctaactgggaaactgggccaaa

SEQ ID NO: 575829 - DNA, 33 bp, Homo sapien
ggaagagaaacagactcagtagcccaggccagt

SEQ ID NO: 575830 - DNA, 33 bp, Homo sapien
ggaagagaaacagactgagtagcccaggccagt

SEQ ID NO: 575831 - DNA, 33 bp, Homo sapien
atagtactcaggctagacatagtggcttacacc

SEQ ID NO: 575832 - DNA, 33 bp, Homo sapien
atagtactcaggctaggcatagtggcttacacc

SEQ ID NO: 575833 - DNA, 33 bp, Homo sapien
aagccacttcagtcaaattcctgccagtaagtg

SEQ ID NO: 575834 - DNA, 33 bp, Homo sapien
aagccacttcagtcaagttcctgccagtaagtg

SEQ ID NO: 575835 - DNA, 33 bp, Homo sapien
gcctttacccagctcaaggttcagagatcgggg

SEQ ID NO: 575836 - DNA, 33 bp, Homo sapien
gcctttacccagctcagggttcagagatcgggg

SEQ ID NO: 575837 - DNA, 33 bp, Homo sapien
tgccctgggttgtaaaagtgcagagatgagtcg

SEQ ID NO: 575838 - DNA, 33 bp, Homo sapien
tgccctgggttgtaaaggtgcagagatgagtcg

SEQ ID NO: 575839 - DNA, 33 bp, Homo sapien
taaaaacgtgtaaactaagaccaggcatggtgg

SEQ ID NO: 575840 - DNA, 33 bp, Homo sapien
taaaaacgtgtaaactgagaccaggcatggtgg

SEQ ID NO: 575841 - DNA, 33 bp, Homo sapien
gtggtactcaaactcaaacaatcctcagcacca

SEQ ID NO: 575842 - DNA, 33 bp, Homo sapien
gtggtactcaaactcagacaatcctcagcacca

SEQ ID NO: 575843 - DNA, 33 bp, Homo sapien
cctctttaatctgccacgtaggtgaattacatt

SEQ ID NO: 575844 - DNA, 33 bp, Homo sapien
cctctttaatctgccatgtaggtgaattacatt

SEQ ID NO: 575845 - DNA, 33 bp, Homo sapien
ggcattacaataaggacggcattttctgcggca

SEQ ID NO: 575846 - DNA, 33 bp, Homo sapien
ggcattacaataaggatggcattttctgcggca

SEQ ID NO: 575847 - DNA, 33 bp, Homo sapien
gtcctgtgttcttgcacgctgccagtgtgattc

SEQ ID NO: 575848 - DNA, 33 bp, Homo sapien
gtcctgtgttcttgcatgctgccagtgtgattc

SEQ ID NO: 575849 - DNA, 33 bp, Homo sapien
attcagtgtccccgaacgcaccccaagactgtg

SEQ ID NO: 575850 - DNA, 33 bp, Homo sapien
attcagtgtccccgaatgcaccccaagactgtg

SEQ ID NO: 575851 - DNA, 33 bp, Homo sapien
tgggaacaaaatcagacagtggtttgacttttc

SEQ ID NO: 575852 - DNA, 33 bp, Homo sapien
tgggaacaaaatcagatagtggtttgacttttc

SEQ ID NO: 575853 - DNA, 33 bp, Homo sapien
aatgccactcaaggcaaaaccctgaagtccttg

SEQ ID NO: 575854 - DNA, 33 bp, Homo sapien
aatgccactcaaggcacaaccctgaagtccttg

SEQ ID NO: 575855 - DNA, 33 bp, Homo sapien
caggcggaaaaaagcaatgaatgaaggcagagc

SEQ ID NO: 575856 - DNA, 33 bp, Homo sapien
caggcggaaaaaagcagtgaatgaaggcagagc

SEQ ID NO: 575857 - DNA, 33 bp, Homo sapien
agtttgcaaaacaatgccacaccttcattcaac

SEQ ID NO: 575858 - DNA, 33 bp, Homo sapien
agtttgcaaaacaatggcacaccttcattcaac

SEQ ID NO: 575859 - DNA, 33 bp, Homo sapien
gaaggacaagaacttgaaactgcggattgctct

SEQ ID NO: 575860 - DNA, 33 bp, Homo sapien
gaaggacaagaacttggaactgcggattgctct

SEQ ID NO: 575861 - DNA, 33 bp, Homo sapien
agtctaaatgcagtgccaccatatcccactctc

SEQ ID NO: 575862 - DNA, 33 bp, Homo sapien
agtctaaatgcagtgctaccatatcccactctc

SEQ ID NO: 575863 - DNA, 33 bp, Homo sapien
tggtacaatctcaaaaattactagtgaatgaat

SEQ ID NO: 575864 - DNA, 33 bp, Homo sapien
tggtacaatctcaaaagttactagtgaatgaat

SEQ ID NO: 575865 - DNA, 33 bp, Homo sapien
cttctatgtctctactcaactttccaaacatat

SEQ ID NO: 575866 - DNA, 33 bp, Homo sapien
cttctatgtctctacttaactttccaaacatat

SEQ ID NO: 575867 - DNA, 33 bp, Homo sapien
gtcctttagtcagagacagtaggctttcggaaa

SEQ ID NO: 575868 - DNA, 33 bp, Homo sapien
gtcctttagtcagagagagtaggctttcggaaa

SEQ ID NO: 575869 - DNA, 33 bp, Homo sapien
tcttttttacacaaacagtaacataatatgcac

SEQ ID NO: 575870 - DNA, 33 bp, Homo sapien
tcttttttacacaaacggtaacataatatgcac

SEQ ID NO: 575871 - DNA, 33 bp, Homo sapien
taaaacgaaatgcatccattattctattactga

SEQ ID NO: 575872 - DNA, 33 bp, Homo sapien
taaaacgaaatgcatcgattattctattactga

SEQ ID NO: 575873 - DNA, 33 bp, Homo sapien
agctgctacagtatccacctatggtaattcatc

SEQ ID NO: 575874 - DNA, 33 bp, Homo sapien
agctgctacagtatccgcctatggtaattcatc

SEQ ID NO: 575875 - DNA, 33 bp, Homo sapien
tctggtcattctgaaaagcagaagttagctctc

SEQ ID NO: 575876 - DNA, 33 bp, Homo sapien
tctggtcattctgaaaggcagaagttagctctc

SEQ ID NO: 575877 - DNA, 33 bp, Homo sapien
gaagtgccaaatgaacagggaagagctccttat

SEQ ID NO: 575878 - DNA, 33 bp, Homo sapien
gaagtgccaaatgaacggggaagagctccttat

SEQ ID NO: 575879 - DNA, 33 bp, Homo sapien
tgtggtaaccaaagcaagaacagaagagaaaga

SEQ ID NO: 575880 - DNA, 33 bp, Homo sapien
tgtggtaaccaaagcaggaacagaagagaaaga

SEQ ID NO: 575881 - DNA, 33 bp, Homo sapien
tggatggttttatgcaaatgaatgacataacct

SEQ ID NO: 575882 - DNA, 33 bp, Homo sapien
tggatggttttatgcagatgaatgacataacct

SEQ ID NO: 575883 - DNA, 33 bp, Homo sapien
ccagtggctgggaatacggaaaaaactcagcgc

SEQ ID NO: 575884 - DNA, 33 bp, Homo sapien
ccagtggctgggaatagggaaaaaactcagcgc

SEQ ID NO: 575885 - DNA, 33 bp, Homo sapien
atacttaaaatttcacaaacactgtaagtctaa

SEQ ID NO: 575886 - DNA, 33 bp, Homo sapien
atacttaaaatttcaccaacactgtaagtctaa

SEQ ID NO: 575887 - DNA, 33 bp, Homo sapien
acttccacttctaaaacgttatcctagaaataa

SEQ ID NO: 575888 - DNA, 33 bp, Homo sapien
acttccacttctaaaatgttatcctagaaataa

SEQ ID NO: 575889 - DNA, 33 bp, Homo sapien
tcttttgcttcctctgaattcatcactgggggc

SEQ ID NO: 575890 - DNA, 33 bp, Homo sapien
tcttttgcttcctctggattcatcactgggggc

SEQ ID NO: 575891 - DNA, 33 bp, Homo sapien
acatcttcaacctgtgaaacttgctttagagtg

SEQ ID NO: 575892 - DNA, 33 bp, Homo sapien
acatcttcaacctgtgcaacttgctttagagtg

SEQ ID NO: 575893 - DNA, 33 bp, Homo sapien
tgtaaagagtcccagtcaatcccgaggtagcaa

SEQ ID NO: 575894 - DNA, 33 bp, Homo sapien
tgtaaagagtcccagttaatcccgaggtagcaa

SEQ ID NO: 575895 - DNA, 33 bp, Homo sapien
ggtacaaataacccataactcagaaatgtgtgt

SEQ ID NO: 575896 - DNA, 33 bp, Homo sapien
ggtacaaataacccatgactcagaaatgtgtgt

SEQ ID NO: 575897 - DNA, 33 bp, Homo sapien
tgaaggaggtatattacagcattggttccaaag

SEQ ID NO: 575898 - DNA, 33 bp, Homo sapien
tgaaggaggtatattatagcattggttccaaag

SEQ ID NO: 575899 - DNA, 33 bp, Homo sapien
agaagcagagacttacaaggtagtgtagtaacc

SEQ ID NO: 575900 - DNA, 33 bp, Homo sapien
agaagcagagacttaccaggtagtgtagtaacc

SEQ ID NO: 575901 - DNA, 33 bp, Homo sapien
tacaagccctgctaaacgctatgaaaaaaaaaa

SEQ ID NO: 575902 - DNA, 33 bp, Homo sapien
tacaagccctgctaaatgctatgaaaaaaaaaa

SEQ ID NO: 575903 - DNA, 33 bp, Homo sapien
tgaacactctgggaaactgtgacacactgggaa

SEQ ID NO: 575904 - DNA, 33 bp, Homo sapien
tgaacactctgggaaattgtgacacactgggaa

SEQ ID NO: 575905 - DNA, 33 bp, Homo sapien
acaggtgaagcactccaaaattagagcttggaa

SEQ ID NO: 575906 - DNA, 33 bp, Homo sapien
acaggtgaagcactccgaaattagagcttggaa

SEQ ID NO: 575907 - DNA, 33 bp, Homo sapien
aaattcaatcctaacaaagctactttgaatcaa

SEQ ID NO: 575908 - DNA, 33 bp, Homo sapien
aaattcaatcctaacagagctactttgaatcaa

SEQ ID NO: 575909 - DNA, 33 bp, Homo sapien
gctactttgaatcaacacttgaggttatgaaaa

SEQ ID NO: 575910 - DNA, 33 bp, Homo sapien
gctactttgaatcaacgcttgaggttatgaaaa

SEQ ID NO: 575911 - DNA, 33 bp, Homo sapien
tagctactaggtgctcaccctgccaggcacttt

SEQ ID NO: 575912 - DNA, 33 bp, Homo sapien
tagctactaggtgctcgccctgccaggcacttt

SEQ ID NO: 575913 - DNA, 33 bp, Homo sapien
caggcagagggcttgcactatttcaccaccaca

SEQ ID NO: 575914 - DNA, 33 bp, Homo sapien
caggcagagggcttgcgctatttcaccaccaca

SEQ ID NO: 575915 - DNA, 33 bp, Homo sapien
gcagtaaataaaatggaccatacattagcagta

SEQ ID NO: 575916 - DNA, 33 bp, Homo sapien
gcagtaaataaaatgggccatacattagcagta

SEQ ID NO: 575917 - DNA, 33 bp, Homo sapien
taaggtaggcgctacaaaaatattaggtattac

SEQ ID NO: 575918 - DNA, 33 bp, Homo sapien
taaggtaggcgctacagaaatattaggtattac

SEQ ID NO: 575919 - DNA, 33 bp, Homo sapien
actcttgggcaagtagaactagtaaggtgccta

SEQ ID NO: 575920 - DNA, 33 bp, Homo sapien
actcttgggcaagtaggactagtaaggtgccta

SEQ ID NO: 575921 - DNA, 33 bp, Homo sapien
agcagtcagaaagctacggggaggcacacctgg

SEQ ID NO: 575922 - DNA, 33 bp, Homo sapien
agcagtcagaaagctatggggaggcacacctgg

SEQ ID NO: 575923 - DNA, 33 bp, Homo sapien
tgaacatgttacagaaagataagatcaggaaca

SEQ ID NO: 575924 - DNA, 33 bp, Homo sapien
tgaacatgttacagaaggataagatcaggaaca

SEQ ID NO: 575925 - DNA, 33 bp, Homo sapien
aacaagaaccacagctaagagttactaagtgca

SEQ ID NO: 575926 - DNA, 33 bp, Homo sapien
aacaagaaccacagcttagagttactaagtgca

SEQ ID NO: 575927 - DNA, 33 bp, Homo sapien
aatgtggtcagtgttaagcgcatagccacataa

SEQ ID NO: 575928 - DNA, 33 bp, Homo sapien
aatgtggtcagtgttaggcgcatagccacataa

SEQ ID NO: 575929 - DNA, 33 bp, Homo sapien
ttttcaatatggcaaccgtagagcaataaacca

SEQ ID NO: 575930 - DNA, 33 bp, Homo sapien
ttttcaatatggcaactgtagagcaataaacca

SEQ ID NO: 575931 - DNA, 33 bp, Homo sapien
aaagagagaagattaagaggcaaaccaagttgg

SEQ ID NO: 575932 - DNA, 33 bp, Homo sapien
aaagagagaagattaataggcaaaccaagttgg

SEQ ID NO: 575933 - DNA, 33 bp, Homo sapien
cccctgcctctctgcaaatattccgtcctccac

SEQ ID NO: 575934 - DNA, 33 bp, Homo sapien
cccctgcctctctgcatatattccgtcctccac

SEQ ID NO: 575935 - DNA, 33 bp, Homo sapien
agatttgaaacagagacgcatggtcaagtaatc

SEQ ID NO: 575936 - DNA, 33 bp, Homo sapien
agatttgaaacagagatgcatggtcaagtaatc

SEQ ID NO: 575937 - DNA, 33 bp, Homo sapien
tttcgcaataaaagaaaggtgccccgaggtcaa

SEQ ID NO: 575938 - DNA, 33 bp, Homo sapien
tttcgcaataaaagaagggtgccccgaggtcaa

SEQ ID NO: 575939 - DNA, 33 bp, Homo sapien
ttaaacgtcccatcccgatttggcagtgagaaa

SEQ ID NO: 575940 - DNA, 33 bp, Homo sapien
ttaaacgtcccatccctatttggcagtgagaaa

SEQ ID NO: 575941 - DNA, 33 bp, Homo sapien
ggcctcagttttctccacctgtaatagtaggca

SEQ ID NO: 575942 - DNA, 33 bp, Homo sapien
ggcctcagttttctccccctgtaatagtaggca

SEQ ID NO: 575943 - DNA, 33 bp, Homo sapien
ggatttcactactctacacctctttcctatttt

SEQ ID NO: 575944 - DNA, 33 bp, Homo sapien
ggatttcactactctagacctctttcctatttt

SEQ ID NO: 575945 - DNA, 33 bp, Homo sapien
tcagaacctaaatctacctggctcctgcacctt

SEQ ID NO: 575946 - DNA, 33 bp, Homo sapien
tcagaacctaaatctatctggctcctgcacctt

SEQ ID NO: 575947 - DNA, 33 bp, Homo sapien
taaaagatcaatgaagaaagtttccaaggtgtc

SEQ ID NO: 575948 - DNA, 33 bp, Homo sapien
taaaagatcaatgaaggaagtttccaaggtgtc

SEQ ID NO: 575949 - DNA, 33 bp, Homo sapien
cacattactggccttcaataaatggtagttgtt

SEQ ID NO: 575950 - DNA, 33 bp, Homo sapien
cacattactggccttcgataaatggtagttgtt

SEQ ID NO: 575951 - DNA, 33 bp, Homo sapien
tgccaagcattgtgccaagtgctctttttgcag

SEQ ID NO: 575952 - DNA, 33 bp, Homo sapien
tgccaagcattgtgccgagtgctctttttgcag

SEQ ID NO: 575953 - DNA, 33 bp, Homo sapien
attcgttattttgccaagcaaagagaatatcat

SEQ ID NO: 575954 - DNA, 33 bp, Homo sapien
attcgttattttgccaggcaaagagaatatcat

SEQ ID NO: 575955 - DNA, 33 bp, Homo sapien
tttttagataaggtgaagtctgcagggtatttg

SEQ ID NO: 575956 - DNA, 33 bp, Homo sapien
tttttagataaggtgaggtctgcagggtatttg

SEQ ID NO: 575957 - DNA, 33 bp, Homo sapien
atgtgatttttatgaacgtgttggggcatgaat

SEQ ID NO: 575958 - DNA, 33 bp, Homo sapien
atgtgatttttatgaatgtgttggggcatgaat

SEQ ID NO: 575959 - DNA, 33 bp, Homo sapien
aggctgtaacctggaacagaaagtaaggcgggc

SEQ ID NO: 575960 - DNA, 33 bp, Homo sapien
aggctgtaacctggaatagaaagtaaggcgggc

SEQ ID NO: 575961 - DNA, 33 bp, Homo sapien
acgtttttacttttcacctagatccttcaaatt

SEQ ID NO: 575962 - DNA, 33 bp, Homo sapien
acgtttttacttttcatctagatccttcaaatt

SEQ ID NO: 575963 - DNA, 33 bp, Homo sapien
caagatgacaccactacactcaacctgggcgac

SEQ ID NO: 575964 - DNA, 33 bp, Homo sapien
caagatgacaccactatactcaacctgggcgac

SEQ ID NO: 575965 - DNA, 33 bp, Homo sapien
ctcccacaacaatagcaaaaatctgatccataa

SEQ ID NO: 575966 - DNA, 33 bp, Homo sapien
ctcccacaacaatagcgaaaatctgatccataa

SEQ ID NO: 575967 - DNA, 33 bp, Homo sapien
gtgccttggtaagaaaagacatcatgttccctt

SEQ ID NO: 575968 - DNA, 33 bp, Homo sapien
gtgccttggtaagaaatgacatcatgttccctt

SEQ ID NO: 575969 - DNA, 33 bp, Homo sapien
gatttagagaaacgaaatctgttgcccaaggta

SEQ ID NO: 575970 - DNA, 33 bp, Homo sapien
gatttagagaaacgaagtctgttgcccaaggta

SEQ ID NO: 575971 - DNA, 33 bp, Homo sapien
ggaagtgtaatcatccactgaagtaggtacttt

SEQ ID NO: 575972 - DNA, 33 bp, Homo sapien
ggaagtgtaatcatcctctgaagtaggtacttt

SEQ ID NO: 575973 - DNA, 33 bp, Homo sapien
tctaactccaaaagcacgaagagtgtaatgcat

SEQ ID NO: 575974 - DNA, 33 bp, Homo sapien
tctaactccaaaagcatgaagagtgtaatgcat

SEQ ID NO: 575975 - DNA, 33 bp, Homo sapien
agaggctctcattagacggtgcgctgaagtcag

SEQ ID NO: 575976 - DNA, 33 bp, Homo sapien
agaggctctcattagatggtgcgctgaagtcag

SEQ ID NO: 575977 - DNA, 33 bp, Homo sapien
ccctctgcatttctaactctgtaggatgataga

SEQ ID NO: 575978 - DNA, 33 bp, Homo sapien
ccctctgcatttctaattctgtaggatgataga

SEQ ID NO: 575979 - DNA, 33 bp, Homo sapien
agggcaccagatggtaagtccttgcttcctgta

SEQ ID NO: 575980 - DNA, 33 bp, Homo sapien
agggcaccagatggtaggtccttgcttcctgta

SEQ ID NO: 575981 - DNA, 33 bp, Homo sapien
aaaaggaaagaaaaaaatctctggtcaaacatc

SEQ ID NO: 575982 - DNA, 33 bp, Homo sapien
aaaaggaaagaaaaaagtctctggtcaaacatc

SEQ ID NO: 575983 - DNA, 33 bp, Homo sapien
tccatcctaattgggcactctgaacccaacatc

SEQ ID NO: 575984 - DNA, 33 bp, Homo sapien
tccatcctaattgggccctctgaacccaacatc

SEQ ID NO: 575985 - DNA, 33 bp, Homo sapien
tggctgcccggataacactgacatcaccatgtg

SEQ ID NO: 575986 - DNA, 33 bp, Homo sapien
tggctgcccggataacgctgacatcaccatgtg

SEQ ID NO: 575987 - DNA, 33 bp, Homo sapien
tgggttagatgttagcaccatgctttagatttc

SEQ ID NO: 575988 - DNA, 33 bp, Homo sapien
tgggttagatgttagcgccatgctttagatttc

SEQ ID NO: 575989 - DNA, 33 bp, Homo sapien
atctgaaagctcaaccaaggctggaaaatgccc

SEQ ID NO: 575990 - DNA, 33 bp, Homo sapien
atctgaaagctcaaccgaggctggaaaatgccc

SEQ ID NO: 575991 - DNA, 33 bp, Homo sapien
ggatatttgtgggaaaccagtacacaataatat

SEQ ID NO: 575992 - DNA, 33 bp, Homo sapien
ggatatttgtgggaaagcagtacacaataatat

SEQ ID NO: 575993 - DNA, 33 bp, Homo sapien
atttctcatgcacatcacaaaatgtgagctcct

SEQ ID NO: 575994 - DNA, 33 bp, Homo sapien
atttctcatgcacatctcaaaatgtgagctcct

SEQ ID NO: 575995 - DNA, 33 bp, Homo sapien
attctaaggagattaccgagcacctctgtgcct

SEQ ID NO: 575996 - DNA, 33 bp, Homo sapien
attctaaggagattactgagcacctctgtgcct

SEQ ID NO: 575997 - DNA, 33 bp, Homo sapien
catatgtagcaagtgcacagaggagagactggg

SEQ ID NO: 575998 - DNA, 33 bp, Homo sapien
catatgtagcaagtgcgcagaggagagactggg

SEQ ID NO: 575999 - DNA, 33 bp, Homo sapien
ttataaaatgatttcccatgccataatttttct

SEQ ID NO: 576000 - DNA, 33 bp, Homo sapien
ttataaaatgatttcctatgccataatttttct

SEQ ID NO: 576001 - DNA, 33 bp, Homo sapien
taggcagaataacagacctcctaaaatgtgaat

SEQ ID NO: 576002 - DNA, 33 bp, Homo sapien
taggcagaataacagatctcctaaaatgtgaat

SEQ ID NO: 576003 - DNA, 33 bp, Homo sapien
ccaaagagagtgtatcacaaaaatttaatatga

SEQ ID NO: 576004 - DNA, 33 bp, Homo sapien
ccaaagagagtgtatcgcaaaaatttaatatga

SEQ ID NO: 576005 - DNA, 33 bp, Homo sapien
cctgcattcagtttcaccttttatctgtgttgt

SEQ ID NO: 576006 - DNA, 33 bp, Homo sapien
cctgcattcagtttcatcttttatctgtgttgt

SEQ ID NO: 576007 - DNA, 33 bp, Homo sapien
accaaagccacgtaagacagtctgagcctgtag

SEQ ID NO: 576008 - DNA, 33 bp, Homo sapien
accaaagccacgtaaggcagtctgagcctgtag

SEQ ID NO: 576009 - DNA, 33 bp, Homo sapien
ccatatgtgatcagcaggattattaccatataa

SEQ ID NO: 576010 - DNA, 33 bp, Homo sapien
ccatatgtgatcagcatgattattaccatataa

SEQ ID NO: 576011 - DNA, 33 bp, Homo sapien
gttgtcaaaagagccacgttttatccgcaaaat

SEQ ID NO: 576012 - DNA, 33 bp, Homo sapien
gttgtcaaaagagccatgttttatccgcaaaat

SEQ ID NO: 576013 - DNA, 33 bp, Homo sapien
ctttgaaggtcttggccgattttatgggcagaa

SEQ ID NO: 576014 - DNA, 33 bp, Homo sapien
ctttgaaggtcttggctgattttatgggcagaa

SEQ ID NO: 576015 - DNA, 33 bp, Homo sapien
ccaccttatcccctaacgacctcgtcctgggtt

SEQ ID NO: 576016 - DNA, 33 bp, Homo sapien
ccaccttatcccctaatgacctcgtcctgggtt

SEQ ID NO: 576017 - DNA, 33 bp, Homo sapien
ctcatctaaccacagacgtactttccaccaggt

SEQ ID NO: 576018 - DNA, 33 bp, Homo sapien
ctcatctaaccacagaggtactttccaccaggt

SEQ ID NO: 576019 - DNA, 33 bp, Homo sapien
acagtggtgtttacagaattgaggaggaagttt

SEQ ID NO: 576020 - DNA, 33 bp, Homo sapien
acagtggtgtttacagtattgaggaggaagttt

SEQ ID NO: 576021 - DNA, 33 bp, Homo sapien
tgaaagttggttgacaaaatagtagaggataga

SEQ ID NO: 576022 - DNA, 33 bp, Homo sapien
tgaaagttggttgacagaatagtagaggataga

SEQ ID NO: 576023 - DNA, 33 bp, Homo sapien
gacttgagtgaggaagacttaaggtgaatctag

SEQ ID NO: 576024 - DNA, 33 bp, Homo sapien
gacttgagtgaggaagccttaaggtgaatctag

SEQ ID NO: 576025 - DNA, 33 bp, Homo sapien
tttgataaaactggacaagaacagggttgaatc

SEQ ID NO: 576026 - DNA, 33 bp, Homo sapien
tttgataaaactggacgagaacagggttgaatc

SEQ ID NO: 576027 - DNA, 33 bp, Homo sapien
tgtgtgactaccatcaggaacactccgtgagga

SEQ ID NO: 576028 - DNA, 33 bp, Homo sapien
tgtgtgactaccatcatgaacactccgtgagga

SEQ ID NO: 576029 - DNA, 33 bp, Homo sapien
tgaccaaagtcacagcaccagaagctgcaaccc

SEQ ID NO: 576030 - DNA, 33 bp, Homo sapien
tgaccaaagtcacagcgccagaagctgcaaccc

SEQ ID NO: 576031 - DNA, 33 bp, Homo sapien
tttgcttgagctggtacaatcagcatcctggtg

SEQ ID NO: 576032 - DNA, 33 bp, Homo sapien
tttgcttgagctggtataatcagcatcctggtg

SEQ ID NO: 576033 - DNA, 33 bp, Homo sapien
aggagagggacaagaacgatgagaaatagaatg

SEQ ID NO: 576034 - DNA, 33 bp, Homo sapien
aggagagggacaagaatgatgagaaatagaatg

SEQ ID NO: 576035 - DNA, 33 bp, Homo sapien
aactaaaagagtgtaaccgagttgtttgtaaca

SEQ ID NO: 576036 - DNA, 33 bp, Homo sapien
aactaaaagagtgtaagcgagttgtttgtaaca

SEQ ID NO: 576037 - DNA, 33 bp, Homo sapien
atctgtaaaatggagaagctagttcctacctta

SEQ ID NO: 576038 - DNA, 33 bp, Homo sapien
atctgtaaaatggagaggctagttcctacctta

SEQ ID NO: 576039 - DNA, 33 bp, Homo sapien
ctgtttgcttggattggattgcagcctgactct

SEQ ID NO: 576040 - DNA, 33 bp, Homo sapien
ctgtttgcttggattgtattgcagcctgactct

SEQ ID NO: 576041 - DNA, 33 bp, Homo sapien
acaggtcgatatacccagagactgtatgcaaaa

SEQ ID NO: 576042 - DNA, 33 bp, Homo sapien
acaggtcgatatacccggagactgtatgcaaaa

SEQ ID NO: 576043 - DNA, 33 bp, Homo sapien
tcagttggctgaagaaaagatacaccaggactt

SEQ ID NO: 576044 - DNA, 33 bp, Homo sapien
tcagttggctgaagaagagatacaccaggactt

SEQ ID NO: 576045 - DNA, 33 bp, Homo sapien
aaagattatctggctacaaaaatggattgaagg

SEQ ID NO: 576046 - DNA, 33 bp, Homo sapien
aaagattatctggctataaaaatggattgaagg

SEQ ID NO: 576047 - DNA, 33 bp, Homo sapien
tgatcctaactaagtcacctccccagagcttac

SEQ ID NO: 576048 - DNA, 33 bp, Homo sapien
tgatcctaactaagtcgcctccccagagcttac

SEQ ID NO: 576049 - DNA, 33 bp, Homo sapien
ctgcacaaatgcaatgccacttagctatatggc

SEQ ID NO: 576050 - DNA, 33 bp, Homo sapien
ctgcacaaatgcaatgtcacttagctatatggc

SEQ ID NO: 576051 - DNA, 33 bp, Homo sapien
tcatgcctttggctaaatcatttatgtatggct

SEQ ID NO: 576052 - DNA, 33 bp, Homo sapien
tcatgcctttggctaagtcatttatgtatggct

SEQ ID NO: 576053 - DNA, 33 bp, Homo sapien
tctctatatatgtttacattggctccaactgac

SEQ ID NO: 576054 - DNA, 33 bp, Homo sapien
tctctatatatgtttagattggctccaactgac

SEQ ID NO: 576055 - DNA, 33 bp, Homo sapien
tatagaggtggacagaggggaaaggaagagtca

SEQ ID NO: 576056 - DNA, 33 bp, Homo sapien
tatagaggtggacagatgggaaaggaagagtca

SEQ ID NO: 576057 - DNA, 33 bp, Homo sapien
cccatgtgattgccaaagtctgcagggagctgc

SEQ ID NO: 576058 - DNA, 33 bp, Homo sapien
cccatgtgattgccaaggtctgcagggagctgc

SEQ ID NO: 576059 - DNA, 33 bp, Homo sapien
ttaaattacctttgcaacattatcaaaagttaa

SEQ ID NO: 576060 - DNA, 33 bp, Homo sapien
ttaaattacctttgcaccattatcaaaagttaa

SEQ ID NO: 576061 - DNA, 33 bp, Homo sapien
gcactcatttcgtccacactttgtgcatttgcc

SEQ ID NO: 576062 - DNA, 33 bp, Homo sapien
gcactcatttcgtccatactttgtgcatttgcc

SEQ ID NO: 576063 - DNA, 33 bp, Homo sapien
ggatgtttgatgccaacacgacagctaaaatgg

SEQ ID NO: 576064 - DNA, 33 bp, Homo sapien
ggatgtttgatgccaatacgacagctaaaatgg

SEQ ID NO: 576065 - DNA, 33 bp, Homo sapien
caatgatgaagaccataacaataattgccttta

SEQ ID NO: 576066 - DNA, 33 bp, Homo sapien
caatgatgaagaccatgacaataattgccttta

SEQ ID NO: 576067 - DNA, 33 bp, Homo sapien
aatggccagaccagaactgaagccaactctttc

SEQ ID NO: 576068 - DNA, 33 bp, Homo sapien
aatggccagaccagaattgaagccaactctttc

SEQ ID NO: 576069 - DNA, 33 bp, Homo sapien
agctctctaggaggaaacatctttgcattttat

SEQ ID NO: 576070 - DNA, 33 bp, Homo sapien
agctctctaggaggaaccatctttgcattttat

SEQ ID NO: 576071 - DNA, 33 bp, Homo sapien
ttaaacattcatataccacacgaaaaaatgact

SEQ ID NO: 576072 - DNA, 33 bp, Homo sapien
ttaaacattcatatactacacgaaaaaatgact

SEQ ID NO: 576073 - DNA, 33 bp, Homo sapien
gcatatctcaatgaaaaaactgcaaagaaatgt

SEQ ID NO: 576074 - DNA, 33 bp, Homo sapien
gcatatctcaatgaaagaactgcaaagaaatgt

SEQ ID NO: 576075 - DNA, 33 bp, Homo sapien
actggtacttaacacacagtatatcatttaatc

SEQ ID NO: 576076 - DNA, 33 bp, Homo sapien
actggtacttaacacatagtatatcatttaatc

SEQ ID NO: 576077 - DNA, 33 bp, Homo sapien
tgacaaattctattaccggattttgaaaggaat

SEQ ID NO: 576078 - DNA, 33 bp, Homo sapien
tgacaaattctattactggattttgaaaggaat

SEQ ID NO: 576079 - DNA, 33 bp, Homo sapien
ttctctccagatattccaataggtgatttaaaa

SEQ ID NO: 576080 - DNA, 33 bp, Homo sapien
ttctctccagatattctaataggtgatttaaaa

SEQ ID NO: 576081 - DNA, 33 bp, Homo sapien
cttggagtcaaaatagcatagcagttcagtgtt

SEQ ID NO: 576082 - DNA, 33 bp, Homo sapien
cttggagtcaaaatagtatagcagttcagtgtt

SEQ ID NO: 576083 - DNA, 33 bp, Homo sapien
tgagctctggatctggccatacctgaaactaga

SEQ ID NO: 576084 - DNA, 33 bp, Homo sapien
tgagctctggatctgggcatacctgaaactaga

SEQ ID NO: 576085 - DNA, 33 bp, Homo sapien
gagtcagatactcgacaactttactatgtatgt

SEQ ID NO: 576086 - DNA, 33 bp, Homo sapien
gagtcagatactcgacgactttactatgtatgt

SEQ ID NO: 576087 - DNA, 33 bp, Homo sapien
tacagaatcttgcacagaatagatagttacatg

SEQ ID NO: 576088 - DNA, 33 bp, Homo sapien
tacagaatcttgcacataatagatagttacatg

SEQ ID NO: 576089 - DNA, 33 bp, Homo sapien
tggtatctctccattaaattcagttggatatag

SEQ ID NO: 576090 - DNA, 33 bp, Homo sapien
tggtatctctccattagattcagttggatatag

SEQ ID NO: 576091 - DNA, 33 bp, Homo sapien
accttttcccaggcataacatcaaggttgaagt

SEQ ID NO: 576092 - DNA, 33 bp, Homo sapien
accttttcccaggcatgacatcaaggttgaagt

SEQ ID NO: 576093 - DNA, 33 bp, Homo sapien
aatacttaattgtgtgccaacagttatcctaga

SEQ ID NO: 576094 - DNA, 33 bp, Homo sapien
aatacttaattgtgtggcaacagttatcctaga

SEQ ID NO: 576095 - DNA, 33 bp, Homo sapien
acccatgatctacctgaaatggctgtcttcttg

SEQ ID NO: 576096 - DNA, 33 bp, Homo sapien
acccatgatctacctgcaatggctgtcttcttg

SEQ ID NO: 576097 - DNA, 33 bp, Homo sapien
aaacacaccagagagcaaagatgaacaccatct

SEQ ID NO: 576098 - DNA, 33 bp, Homo sapien
aaacacaccagagagcgaagatgaacaccatct

SEQ ID NO: 576099 - DNA, 33 bp, Homo sapien
agagtgcagatattaccatacagtggatttaca

SEQ ID NO: 576100 - DNA, 33 bp, Homo sapien
agagtgcagatattacgatacagtggatttaca

SEQ ID NO: 576101 - DNA, 33 bp, Homo sapien
gcaaatctgtggtgaacggataaagaggaaggg

SEQ ID NO: 576102 - DNA, 33 bp, Homo sapien
gcaaatctgtggtgaatggataaagaggaaggg

SEQ ID NO: 576103 - DNA, 33 bp, Homo sapien
caaaacatttgcatacgcattctattccaggtg

SEQ ID NO: 576104 - DNA, 33 bp, Homo sapien
caaaacatttgcatactcattctattccaggtg

SEQ ID NO: 576105 - DNA, 33 bp, Homo sapien
catgcaatacaaggcacaggttatgtagtatgt

SEQ ID NO: 576106 - DNA, 33 bp, Homo sapien
catgcaatacaaggcataggttatgtagtatgt

SEQ ID NO: 576107 - DNA, 33 bp, Homo sapien
cctctaattaaaagaacgaacttgagctaaaaa

SEQ ID NO: 576108 - DNA, 33 bp, Homo sapien
cctctaattaaaagaatgaacttgagctaaaaa

SEQ ID NO: 576109 - DNA, 33 bp, Homo sapien
gtcccaggacattcgcacacaaaatctaaatta

SEQ ID NO: 576110 - DNA, 33 bp, Homo sapien
gtcccaggacattcgcgcacaaaatctaaatta

SEQ ID NO: 576111 - DNA, 33 bp, Homo sapien
attttaatcatgtttacgtatccaggtgcatat

SEQ ID NO: 576112 - DNA, 33 bp, Homo sapien
attttaatcatgtttatgtatccaggtgcatat

SEQ ID NO: 576113 - DNA, 33 bp, Homo sapien
gtttatcttataatcaatgaaaggacaaattag

SEQ ID NO: 576114 - DNA, 33 bp, Homo sapien
gtttatcttataatcagtgaaaggacaaattag

SEQ ID NO: 576115 - DNA, 33 bp, Homo sapien
ctctaaaaaaaagttcaacaattctatgagaaa

SEQ ID NO: 576116 - DNA, 33 bp, Homo sapien
ctctaaaaaaaagttcgacaattctatgagaaa

SEQ ID NO: 576117 - DNA, 33 bp, Homo sapien
cagtgcccatcgcaataatgtcctagttgtgat

SEQ ID NO: 576118 - DNA, 33 bp, Homo sapien
cagtgcccatcgcaatgatgtcctagttgtgat

SEQ ID NO: 576119 - DNA, 33 bp, Homo sapien
tactgtcaatatggtgaatattattaaaaggaa

SEQ ID NO: 576120 - DNA, 33 bp, Homo sapien
tactgtcaatatggtggatattattaaaaggaa

SEQ ID NO: 576121 - DNA, 33 bp, Homo sapien
ttttgctttcctgagaacttgttgaaaaaaaaa

SEQ ID NO: 576122 - DNA, 33 bp, Homo sapien
ttttgctttcctgagaccttgttgaaaaaaaaa

SEQ ID NO: 576123 - DNA, 33 bp, Homo sapien
caggctcagagaacagaagacttggactcagac

SEQ ID NO: 576124 - DNA, 33 bp, Homo sapien
caggctcagagaacaggagacttggactcagac

SEQ ID NO: 576125 - DNA, 33 bp, Homo sapien
ataaaatcctgcaaaacgggctgaatctatccc

SEQ ID NO: 576126 - DNA, 33 bp, Homo sapien
ataaaatcctgcaaaatgggctgaatctatccc

SEQ ID NO: 576127 - DNA, 33 bp, Homo sapien
atgttataactggctcaaagggaaagtcaaaac

SEQ ID NO: 576128 - DNA, 33 bp, Homo sapien
atgttataactggctcgaagggaaagtcaaaac

SEQ ID NO: 576129 - DNA, 33 bp, Homo sapien
aaaatacataaatcaaaaagtgttggagtggga

SEQ ID NO: 576130 - DNA, 33 bp, Homo sapien
aaaatacataaatcaagaagtgttggagtggga

SEQ ID NO: 576131 - DNA, 33 bp, Homo sapien
taatccccaaactgaaacagtcttcttctgtct

SEQ ID NO: 576132 - DNA, 33 bp, Homo sapien
taatccccaaactgaagcagtcttcttctgtct

SEQ ID NO: 576133 - DNA, 33 bp, Homo sapien
atccaaagacaccttacgcttggcagaaatctc

SEQ ID NO: 576134 - DNA, 33 bp, Homo sapien
atccaaagacaccttaggcttggcagaaatctc

SEQ ID NO: 576135 - DNA, 33 bp, Homo sapien
gatacataagagaaaaatttagtgatgttactg

SEQ ID NO: 576136 - DNA, 33 bp, Homo sapien
gatacataagagaaaagtttagtgatgttactg

SEQ ID NO: 576137 - DNA, 33 bp, Homo sapien
aattatcataagaagcccattcctgccctaggt

SEQ ID NO: 576138 - DNA, 33 bp, Homo sapien
aattatcataagaagctcattcctgccctaggt

SEQ ID NO: 576139 - DNA, 33 bp, Homo sapien
cctgttttaagatctcaaagtaaggatttagta

SEQ ID NO: 576140 - DNA, 33 bp, Homo sapien
cctgttttaagatctccaagtaaggatttagta

SEQ ID NO: 576141 - DNA, 33 bp, Homo sapien
agaagtaaccagagccagaaagagatggatcga

SEQ ID NO: 576142 - DNA, 33 bp, Homo sapien
agaagtaaccagagccggaaagagatggatcga

SEQ ID NO: 576143 - DNA, 33 bp, Homo sapien
ttaagcaactccacaaacctcaacttctcattg

SEQ ID NO: 576144 - DNA, 33 bp, Homo sapien
ttaagcaactccacaagcctcaacttctcattg

SEQ ID NO: 576145 - DNA, 33 bp, Homo sapien
atagagaattcccgtacccattaacagtagtca

SEQ ID NO: 576146 - DNA, 33 bp, Homo sapien
atagagaattcccgtatccattaacagtagtca

SEQ ID NO: 576147 - DNA, 33 bp, Homo sapien
tgatgggtgtggatgaaagtctgagctcctgac

SEQ ID NO: 576148 - DNA, 33 bp, Homo sapien
tgatgggtgtggatgagagtctgagctcctgac

SEQ ID NO: 576149 - DNA, 33 bp, Homo sapien
attgcttggtatatagcaaacactccatagtgg

SEQ ID NO: 576150 - DNA, 33 bp, Homo sapien
attgcttggtatatagtaaacactccatagtgg

SEQ ID NO: 576151 - DNA, 33 bp, Homo sapien
tctaaaagtgcttcccaatgcgggcatctgaga

SEQ ID NO: 576152 - DNA, 33 bp, Homo sapien
tctaaaagtgcttcccgatgcgggcatctgaga

SEQ ID NO: 576153 - DNA, 33 bp, Homo sapien
ccctcttggggctgccaacaaagacttctaaaa

SEQ ID NO: 576154 - DNA, 33 bp, Homo sapien
ccctcttggggctgccgacaaagacttctaaaa

SEQ ID NO: 576155 - DNA, 33 bp, Homo sapien
tggtatctagaataggcaaagaaccctcaaatc

SEQ ID NO: 576156 - DNA, 33 bp, Homo sapien
tggtatctagaataggtaaagaaccctcaaatc

SEQ ID NO: 576157 - DNA, 33 bp, Homo sapien
tttttgtctttttccaatgcatttttagtatag

SEQ ID NO: 576158 - DNA, 33 bp, Homo sapien
tttttgtctttttccagtgcatttttagtatag

SEQ ID NO: 576159 - DNA, 33 bp, Homo sapien
aggagttgttgaattgaaaatgtattatttagg

SEQ ID NO: 576160 - DNA, 33 bp, Homo sapien
aggagttgttgaattgcaaatgtattatttagg

SEQ ID NO: 576161 - DNA, 33 bp, Homo sapien
tagcataactctgaaccctgcaaataatcttga

SEQ ID NO: 576162 - DNA, 33 bp, Homo sapien
tagcataactctgaactctgcaaataatcttga

SEQ ID NO: 576163 - DNA, 33 bp, Homo sapien
caaataatcttgagccaaactctccacttttat

SEQ ID NO: 576164 - DNA, 33 bp, Homo sapien
caaataatcttgagccgaactctccacttttat

SEQ ID NO: 576165 - DNA, 33 bp, Homo sapien
taagaaaaggctgttcgagcaaaaataaagcaa

SEQ ID NO: 576166 - DNA, 33 bp, Homo sapien
taagaaaaggctgttctagcaaaaataaagcaa

SEQ ID NO: 576167 - DNA, 33 bp, Homo sapien
atgggatggaagttaaatatatgaggaactatt

SEQ ID NO: 576168 - DNA, 33 bp, Homo sapien
atgggatggaagttaagtatatgaggaactatt

SEQ ID NO: 576169 - DNA, 33 bp, Homo sapien
catctatatcaaaagacgatgccttagattgga

SEQ ID NO: 576170 - DNA, 33 bp, Homo sapien
catctatatcaaaagatgatgccttagattgga

SEQ ID NO: 576171 - DNA, 33 bp, Homo sapien
attgggaagaggattcaagtggaattcatttct

SEQ ID NO: 576172 - DNA, 33 bp, Homo sapien
attgggaagaggattcgagtggaattcatttct

SEQ ID NO: 576173 - DNA, 33 bp, Homo sapien
aataattccaaaatctgaacagtttacagcaac

SEQ ID NO: 576174 - DNA, 33 bp, Homo sapien
aataattccaaaatcttaacagtttacagcaac

SEQ ID NO: 576175 - DNA, 33 bp, Homo sapien
cagggagcacaatgataagcagagcaaaaacaa

SEQ ID NO: 576176 - DNA, 33 bp, Homo sapien
cagggagcacaatgatgagcagagcaaaaacaa

SEQ ID NO: 576177 - DNA, 33 bp, Homo sapien
cgaaacagacataagaactattggtcaagtgga

SEQ ID NO: 576178 - DNA, 33 bp, Homo sapien
cgaaacagacataagagctattggtcaagtgga

SEQ ID NO: 576179 - DNA, 33 bp, Homo sapien
agtgtgtaggaacacgaatcaatgacatcagcc

SEQ ID NO: 576180 - DNA, 33 bp, Homo sapien
agtgtgtaggaacacggatcaatgacatcagcc

SEQ ID NO: 576181 - DNA, 33 bp, Homo sapien
cttatgttttatcatacggagacagaagcagtt

SEQ ID NO: 576182 - DNA, 33 bp, Homo sapien
cttatgttttatcatatggagacagaagcagtt

SEQ ID NO: 576183 - DNA, 33 bp, Homo sapien
tcatattgaaatctaacggaactgctaaggatt

SEQ ID NO: 576184 - DNA, 33 bp, Homo sapien
tcatattgaaatctaatggaactgctaaggatt

SEQ ID NO: 576185 - DNA, 33 bp, Homo sapien
gcaaaacgagagaacacagtttctgaagttggg

SEQ ID NO: 576186 - DNA, 33 bp, Homo sapien
gcaaaacgagagaacagagtttctgaagttggg

SEQ ID NO: 576187 - DNA, 33 bp, Homo sapien
aagttaactagaatcgaaatgttcaaagtgttc

SEQ ID NO: 576188 - DNA, 33 bp, Homo sapien
aagttaactagaatcggaatgttcaaagtgttc

SEQ ID NO: 576189 - DNA, 33 bp, Homo sapien
aaaataataaatgggcacagcctaatggagtat

SEQ ID NO: 576190 - DNA, 33 bp, Homo sapien
aaaataataaatgggcgcagcctaatggagtat

SEQ ID NO: 576191 - DNA, 33 bp, Homo sapien
tggtttgtgtaagtaaaaaggaaatcactggcc

SEQ ID NO: 576192 - DNA, 33 bp, Homo sapien
tggtttgtgtaagtaagaaggaaatcactggcc

SEQ ID NO: 576193 - DNA, 33 bp, Homo sapien
gggcgaggagaaagagactcaccttgaagcaat

SEQ ID NO: 576194 - DNA, 33 bp, Homo sapien
gggcgaggagaaagaggctcaccttgaagcaat

SEQ ID NO: 576195 - DNA, 33 bp, Homo sapien
accttggtaacatttgcatgataggagtaccca

SEQ ID NO: 576196 - DNA, 33 bp, Homo sapien
accttggtaacatttggatgataggagtaccca

SEQ ID NO: 576197 - DNA, 33 bp, Homo sapien
gtgcagtgatatgaaacgatcgtaaaaacaagg

SEQ ID NO: 576198 - DNA, 33 bp, Homo sapien
gtgcagtgatatgaaatgatcgtaaaaacaagg

SEQ ID NO: 576199 - DNA, 33 bp, Homo sapien
atattcatttaaaaaccggttatcagaacagtc

SEQ ID NO: 576200 - DNA, 33 bp, Homo sapien
atattcatttaaaaactggttatcagaacagtc

SEQ ID NO: 576201 - DNA, 33 bp, Homo sapien
actaaatgacaaaagaaaatggcatgagaatac

SEQ ID NO: 576202 - DNA, 33 bp, Homo sapien
actaaatgacaaaagagaatggcatgagaatac

SEQ ID NO: 576203 - DNA, 33 bp, Homo sapien
ccttaaaatatttttaagcaacaacgacaaaaa

SEQ ID NO: 576204 - DNA, 33 bp, Homo sapien
ccttaaaatatttttaggcaacaacgacaaaaa

SEQ ID NO: 576205 - DNA, 33 bp, Homo sapien
ccgtggaaaatttcccagaatgattgttctaaa

SEQ ID NO: 576206 - DNA, 33 bp, Homo sapien
ccgtggaaaatttcccggaatgattgttctaaa

SEQ ID NO: 576207 - DNA, 33 bp, Homo sapien
tctcatggaactaagaaacctgtgatgaaactg

SEQ ID NO: 576208 - DNA, 33 bp, Homo sapien
tctcatggaactaagagacctgtgatgaaactg

SEQ ID NO: 576209 - DNA, 33 bp, Homo sapien
cacctcctttagatacgctcctgatgtctcttc

SEQ ID NO: 576210 - DNA, 33 bp, Homo sapien
cacctcctttagatactctcctgatgtctcttc

SEQ ID NO: 576211 - DNA, 33 bp, Homo sapien
aattcactcagtaaagccaaaataataggaggc

SEQ ID NO: 576212 - DNA, 33 bp, Homo sapien
aattcactcagtaaagtcaaaataataggaggc

SEQ ID NO: 576213 - DNA, 33 bp, Homo sapien
taattagaaattgcaacgcccatgttaggattt

SEQ ID NO: 576214 - DNA, 33 bp, Homo sapien
taattagaaattgcaatgcccatgttaggattt

SEQ ID NO: 576215 - DNA, 33 bp, Homo sapien
tccatttggaaagtataagagtttgatgagatg

SEQ ID NO: 576216 - DNA, 33 bp, Homo sapien
tccatttggaaagtatgagagtttgatgagatg

SEQ ID NO: 576217 - DNA, 33 bp, Homo sapien
gctgacggctatttaactatcctcccattcaag

SEQ ID NO: 576218 - DNA, 33 bp, Homo sapien
gctgacggctatttaagtatcctcccattcaag

SEQ ID NO: 576219 - DNA, 33 bp, Homo sapien
gtgattcatcagtccactacatcatttcttgta

SEQ ID NO: 576220 - DNA, 33 bp, Homo sapien
gtgattcatcagtccattacatcatttcttgta

SEQ ID NO: 576221 - DNA, 33 bp, Homo sapien
atttggtatatggaacagtggaaaagaaagttt

SEQ ID NO: 576222 - DNA, 33 bp, Homo sapien
atttggtatatggaacggtggaaaagaaagttt

SEQ ID NO: 576223 - DNA, 33 bp, Homo sapien
ctatctcatttctcctaaataccctggatatgg

SEQ ID NO: 576224 - DNA, 33 bp, Homo sapien
ctatctcatttctcctgaataccctggatatgg

SEQ ID NO: 576225 - DNA, 33 bp, Homo sapien
tttttcatctgcatcaatccccatatccagggt

SEQ ID NO: 576226 - DNA, 33 bp, Homo sapien
tttttcatctgcatcagtccccatatccagggt

SEQ ID NO: 576227 - DNA, 33 bp, Homo sapien
caggatgatatgtaaacgagtcacagagattgc

SEQ ID NO: 576228 - DNA, 33 bp, Homo sapien
caggatgatatgtaaatgagtcacagagattgc

SEQ ID NO: 576229 - DNA, 33 bp, Homo sapien
caagggaaatgacgaccaagagaagaagcttaa

SEQ ID NO: 576230 - DNA, 33 bp, Homo sapien
caagggaaatgacgacgaagagaagaagcttaa

SEQ ID NO: 576231 - DNA, 33 bp, Homo sapien
tgagagaaactgtaaccctgtaaacaacactaa

SEQ ID NO: 576232 - DNA, 33 bp, Homo sapien
tgagagaaactgtaactctgtaaacaacactaa

SEQ ID NO: 576233 - DNA, 33 bp, Homo sapien
cccagtatttctcaaccgcttaaaaaacatatc

SEQ ID NO: 576234 - DNA, 33 bp, Homo sapien
cccagtatttctcaactgcttaaaaaacatatc

SEQ ID NO: 576235 - DNA, 33 bp, Homo sapien
ataaccactgtcacaaacaagatatcaagattt

SEQ ID NO: 576236 - DNA, 33 bp, Homo sapien
ataaccactgtcacaaccaagatatcaagattt

SEQ ID NO: 576237 - DNA, 33 bp, Homo sapien
caaaacctggcagatacgtggatttagaacagg

SEQ ID NO: 576238 - DNA, 33 bp, Homo sapien
caaaacctggcagatatgtggatttagaacagg

SEQ ID NO: 576239 - DNA, 33 bp, Homo sapien
aggttccaggcaccgcacttactgtgtctcaca

SEQ ID NO: 576240 - DNA, 33 bp, Homo sapien
aggttccaggcaccgcgcttactgtgtctcaca

SEQ ID NO: 576241 - DNA, 33 bp, Homo sapien
acagctgaatttttccaaagagtgtgttcgaga

SEQ ID NO: 576242 - DNA, 33 bp, Homo sapien
acagctgaatttttccgaagagtgtgttcgaga

SEQ ID NO: 576243 - DNA, 33 bp, Homo sapien
attttaaataaactggccaagaaagaccttcct

SEQ ID NO: 576244 - DNA, 33 bp, Homo sapien
attttaaataaactgggcaagaaagaccttcct

SEQ ID NO: 576245 - DNA, 33 bp, Homo sapien
ctagatatggtcttccagaaacacctgttctag

SEQ ID NO: 576246 - DNA, 33 bp, Homo sapien
ctagatatggtcttccggaaacacctgttctag

SEQ ID NO: 576247 - DNA, 33 bp, Homo sapien
gggggcttatagacacggactccaattattttc

SEQ ID NO: 576248 - DNA, 33 bp, Homo sapien
gggggcttatagacactgactccaattattttc

SEQ ID NO: 576249 - DNA, 33 bp, Homo sapien
gctctttccagagacacgttttctgaccagatg

SEQ ID NO: 576250 - DNA, 33 bp, Homo sapien
gctctttccagagacaggttttctgaccagatg

SEQ ID NO: 576251 - DNA, 33 bp, Homo sapien
ataaatggacaagagggattttttgggagtgaa

SEQ ID NO: 576252 - DNA, 33 bp, Homo sapien
ataaatggacaagaggtattttttgggagtgaa

SEQ ID NO: 576253 - DNA, 33 bp, Homo sapien
gaggtaagtattactacgtccactaggctccac

SEQ ID NO: 576254 - DNA, 33 bp, Homo sapien
gaggtaagtattactatgtccactaggctccac

SEQ ID NO: 576255 - DNA, 33 bp, Homo sapien
atcataagtggaacaaatacaaagtttaagtgc

SEQ ID NO: 576256 - DNA, 33 bp, Homo sapien
atcataagtggaacaattacaaagtttaagtgc

SEQ ID NO: 576257 - DNA, 33 bp, Homo sapien
gagatcagtcagatcaagttacttgcttctcat

SEQ ID NO: 576258 - DNA, 33 bp, Homo sapien
gagatcagtcagatcatgttacttgcttctcat

SEQ ID NO: 576259 - DNA, 33 bp, Homo sapien
gggtgtgtcctaccacaaggttactaggttaaa

SEQ ID NO: 576260 - DNA, 33 bp, Homo sapien
gggtgtgtcctaccaccaggttactaggttaaa

SEQ ID NO: 576261 - DNA, 33 bp, Homo sapien
tatatattacatagcacaaagcctgtagatacc

SEQ ID NO: 576262 - DNA, 33 bp, Homo sapien
tatatattacatagcataaagcctgtagatacc

SEQ ID NO: 576263 - DNA, 33 bp, Homo sapien
catgattctgtattaaataagtgtaaacaaatc

SEQ ID NO: 576264 - DNA, 33 bp, Homo sapien
catgattctgtattaagtaagtgtaaacaaatc

SEQ ID NO: 576265 - DNA, 33 bp, Homo sapien
tttattgtaagactataaggaatggatatatgt

SEQ ID NO: 576266 - DNA, 33 bp, Homo sapien
tttattgtaagactatgaggaatggatatatgt

SEQ ID NO: 576267 - DNA, 33 bp, Homo sapien
tatcactttgactttaacaggttgtcgtcaata

SEQ ID NO: 576268 - DNA, 33 bp, Homo sapien
tatcactttgactttagcaggttgtcgtcaata

SEQ ID NO: 576269 - DNA, 33 bp, Homo sapien
atggtatagcaggtgaagaaagcacacctacct

SEQ ID NO: 576270 - DNA, 33 bp, Homo sapien
atggtatagcaggtgaggaaagcacacctacct

SEQ ID NO: 576271 - DNA, 33 bp, Homo sapien
gtctttaggattcctacgtatttcagtctaggt

SEQ ID NO: 576272 - DNA, 33 bp, Homo sapien
gtctttaggattcctatgtatttcagtctaggt

SEQ ID NO: 576273 - DNA, 33 bp, Homo sapien
ttccatttctactactaacaggaatgttccttt

SEQ ID NO: 576274 - DNA, 33 bp, Homo sapien
ttccatttctactactgacaggaatgttccttt

SEQ ID NO: 576275 - DNA, 33 bp, Homo sapien
gctaaattaacagctaccggaagactaaaacaa

SEQ ID NO: 576276 - DNA, 33 bp, Homo sapien
gctaaattaacagctatcggaagactaaaacaa

SEQ ID NO: 576277 - DNA, 33 bp, Homo sapien
gaaggagagaaaagaaagattagatgagtcaca

SEQ ID NO: 576278 - DNA, 33 bp, Homo sapien
gaaggagagaaaagaaggattagatgagtcaca

SEQ ID NO: 576279 - DNA, 33 bp, Homo sapien
actccaaggaactggacgtgtaattcagaaaat

SEQ ID NO: 576280 - DNA, 33 bp, Homo sapien
actccaaggaactggatgtgtaattcagaaaat

SEQ ID NO: 576281 - DNA, 33 bp, Homo sapien
agatctggccatttggaagtcaggggcccttaa

SEQ ID NO: 576282 - DNA, 33 bp, Homo sapien
agatctggccatttgggagtcaggggcccttaa

SEQ ID NO: 576283 - DNA, 33 bp, Homo sapien
ttacagttttccagttaaaccaagagaaacaaa

SEQ ID NO: 576284 - DNA, 33 bp, Homo sapien
ttacagttttccagttcaaccaagagaaacaaa

SEQ ID NO: 576285 - DNA, 33 bp, Homo sapien
cagagtaagcgcttctcaatgtgagtcatcttc

SEQ ID NO: 576286 - DNA, 33 bp, Homo sapien
cagagtaagcgcttcttaatgtgagtcatcttc

SEQ ID NO: 576287 - DNA, 33 bp, Homo sapien
gcttactagatgttgacgctctgaattttatga

SEQ ID NO: 576288 - DNA, 33 bp, Homo sapien
gcttactagatgttgatgctctgaattttatga

SEQ ID NO: 576289 - DNA, 33 bp, Homo sapien
cgcacttgactcttgaaaaatgaaaagcatagt

SEQ ID NO: 576290 - DNA, 33 bp, Homo sapien
cgcacttgactcttgagaaatgaaaagcatagt

SEQ ID NO: 576291 - DNA, 33 bp, Homo sapien
ttcttccttgtctctgcagttaggccttttctg

SEQ ID NO: 576292 - DNA, 33 bp, Homo sapien
ttcttccttgtctctgtagttaggccttttctg

SEQ ID NO: 576293 - DNA, 33 bp, Homo sapien
ttcaggatctcacttaaaaaaggaatctacaga

SEQ ID NO: 576294 - DNA, 33 bp, Homo sapien
ttcaggatctcacttacaaaaggaatctacaga

SEQ ID NO: 576295 - DNA, 33 bp, Homo sapien
agaaaaacaagcaagacgaaaaagaggagactg

SEQ ID NO: 576296 - DNA, 33 bp, Homo sapien
agaaaaacaagcaagatgaaaaagaggagactg

SEQ ID NO: 576297 - DNA, 33 bp, Homo sapien
aagccactctcttaccacaatgagactataatt

SEQ ID NO: 576298 - DNA, 33 bp, Homo sapien
aagccactctcttaccgcaatgagactataatt

SEQ ID NO: 576299 - DNA, 33 bp, Homo sapien
caaatggaaaaagcgacgaattaagcttagact

SEQ ID NO: 576300 - DNA, 33 bp, Homo sapien
caaatggaaaaagcgatgaattaagcttagact

SEQ ID NO: 576301 - DNA, 33 bp, Homo sapien
aaatccttatatttacaactcactccatccttt

SEQ ID NO: 576302 - DNA, 33 bp, Homo sapien
aaatccttatatttactactcactccatccttt

SEQ ID NO: 576303 - DNA, 33 bp, Homo sapien
ggactcaggccaatttaaaaagccacaaagaga

SEQ ID NO: 576304 - DNA, 33 bp, Homo sapien
ggactcaggccaattttaaaagccacaaagaga

SEQ ID NO: 576305 - DNA, 33 bp, Homo sapien
ccaacaattgaaaaccaaatcatcaacaagaca

SEQ ID NO: 576306 - DNA, 33 bp, Homo sapien
ccaacaattgaaaaccgaatcatcaacaagaca

SEQ ID NO: 576307 - DNA, 33 bp, Homo sapien
tccaagattacatttcaccatcctgttatgcag

SEQ ID NO: 576308 - DNA, 33 bp, Homo sapien
tccaagattacatttcgccatcctgttatgcag

SEQ ID NO: 576309 - DNA, 33 bp, Homo sapien
taaattgattttttgtcaaggtcaaactcttag

SEQ ID NO: 576310 - DNA, 33 bp, Homo sapien
taaattgattttttgtgaaggtcaaactcttag

SEQ ID NO: 576311 - DNA, 33 bp, Homo sapien
ggatgaccaggatagacagcagaatgacaattt

SEQ ID NO: 576312 - DNA, 33 bp, Homo sapien
ggatgaccaggatagatagcagaatgacaattt

SEQ ID NO: 576313 - DNA, 33 bp, Homo sapien
aagtacttgggaaatacagaactaagccaatgt

SEQ ID NO: 576314 - DNA, 33 bp, Homo sapien
aagtacttgggaaatatagaactaagccaatgt

SEQ ID NO: 576315 - DNA, 33 bp, Homo sapien
catggtatgatacagacattcgactcttttagt

SEQ ID NO: 576316 - DNA, 33 bp, Homo sapien
catggtatgatacagatattcgactcttttagt

SEQ ID NO: 576317 - DNA, 33 bp, Homo sapien
gcaggaaaacaattccaaagtgcttcttatgga

SEQ ID NO: 576318 - DNA, 33 bp, Homo sapien
gcaggaaaacaattccgaagtgcttcttatgga

SEQ ID NO: 576319 - DNA, 33 bp, Homo sapien
ggtccctcatcctaaacttacatccataagaag

SEQ ID NO: 576320 - DNA, 33 bp, Homo sapien
ggtccctcatcctaaagttacatccataagaag

SEQ ID NO: 576321 - DNA, 33 bp, Homo sapien
caatatttagtcctgcaagactaagaaaccact

SEQ ID NO: 576322 - DNA, 33 bp, Homo sapien
caatatttagtcctgcgagactaagaaaccact

SEQ ID NO: 576323 - DNA, 33 bp, Homo sapien
cataaaagaattgcacactatcctagtactata

SEQ ID NO: 576324 - DNA, 33 bp, Homo sapien
cataaaagaattgcacgctatcctagtactata

SEQ ID NO: 576325 - DNA, 33 bp, Homo sapien
tttatgaacagtgcagaataaagtgacggatta

SEQ ID NO: 576326 - DNA, 33 bp, Homo sapien
tttatgaacagtgcaggataaagtgacggatta

SEQ ID NO: 576327 - DNA, 33 bp, Homo sapien
aggggtgatgggtaaacggaattgtgttgctgt

SEQ ID NO: 576328 - DNA, 33 bp, Homo sapien
aggggtgatgggtaaatggaattgtgttgctgt

SEQ ID NO: 576329 - DNA, 33 bp, Homo sapien
tgtacagaagtgcaaaaatatggaccatccaac

SEQ ID NO: 576330 - DNA, 33 bp, Homo sapien
tgtacagaagtgcaaacatatggaccatccaac

SEQ ID NO: 576331 - DNA, 33 bp, Homo sapien
tacagtacaaacatcaagcatgaatatgtatta

SEQ ID NO: 576332 - DNA, 33 bp, Homo sapien
tacagtacaaacatcaggcatgaatatgtatta

SEQ ID NO: 576333 - DNA, 33 bp, Homo sapien
tgcccagctgatcatgaaactttttaatagtca

SEQ ID NO: 576334 - DNA, 33 bp, Homo sapien
tgcccagctgatcatgtaactttttaatagtca

SEQ ID NO: 576335 - DNA, 33 bp, Homo sapien
gaacgcgaaaatcaagaactaaattgctgacta

SEQ ID NO: 576336 - DNA, 33 bp, Homo sapien
gaacgcgaaaatcaaggactaaattgctgacta

SEQ ID NO: 576337 - DNA, 33 bp, Homo sapien
gagttattgaaataaaatgaatagctctccata

SEQ ID NO: 576338 - DNA, 33 bp, Homo sapien
gagttattgaaataaactgaatagctctccata

SEQ ID NO: 576339 - DNA, 33 bp, Homo sapien
tactgaatgttttataagagagtgtatatgatt

SEQ ID NO: 576340 - DNA, 33 bp, Homo sapien
tactgaatgttttataggagagtgtatatgatt

SEQ ID NO: 576341 - DNA, 33 bp, Homo sapien
acagtgagtccctggacatagagatgtaaaaga

SEQ ID NO: 576342 - DNA, 33 bp, Homo sapien
acagtgagtccctggatatagagatgtaaaaga

SEQ ID NO: 576343 - DNA, 33 bp, Homo sapien
ctgtctattctagtcaccagttggagagtgggc

SEQ ID NO: 576344 - DNA, 33 bp, Homo sapien
ctgtctattctagtcatcagttggagagtgggc

SEQ ID NO: 576345 - DNA, 33 bp, Homo sapien
aaagagtatcctctgaatcaaccaagaaaaaaa

SEQ ID NO: 576346 - DNA, 33 bp, Homo sapien
aaagagtatcctctgactcaaccaagaaaaaaa

SEQ ID NO: 576347 - DNA, 33 bp, Homo sapien
tcattgtaagtctgaaaaaattgaactgtgttt

SEQ ID NO: 576348 - DNA, 33 bp, Homo sapien
tcattgtaagtctgaagaaattgaactgtgttt

SEQ ID NO: 576349 - DNA, 33 bp, Homo sapien
catgtgctctatactaccttaaatttacaaaag

SEQ ID NO: 576350 - DNA, 33 bp, Homo sapien
catgtgctctatactatcttaaatttacaaaag

SEQ ID NO: 576351 - DNA, 33 bp, Homo sapien
acagatgatttaagaaattatgcgactcagatc

SEQ ID NO: 576352 - DNA, 33 bp, Homo sapien
acagatgatttaagaacttatgcgactcagatc

SEQ ID NO: 576353 - DNA, 33 bp, Homo sapien
ctgcatcttctttcacccaaacaaacacaattg

SEQ ID NO: 576354 - DNA, 33 bp, Homo sapien
ctgcatcttctttcacgcaaacaaacacaattg

SEQ ID NO: 576355 - DNA, 33 bp, Homo sapien
ccaaaatcttgcctcaaaaataaccttgagagt

SEQ ID NO: 576356 - DNA, 33 bp, Homo sapien
ccaaaatcttgcctcagaaataaccttgagagt

SEQ ID NO: 576357 - DNA, 33 bp, Homo sapien
tgatgtcctattaaaacaattttggcaactatt

SEQ ID NO: 576358 - DNA, 33 bp, Homo sapien
tgatgtcctattaaaagaattttggcaactatt

SEQ ID NO: 576359 - DNA, 33 bp, Homo sapien
tcatgcttgtgtctgcacttgttatttttcctt

SEQ ID NO: 576360 - DNA, 33 bp, Homo sapien
tcatgcttgtgtctgcgcttgttatttttcctt

SEQ ID NO: 576361 - DNA, 33 bp, Homo sapien
atggcttagttcaagaagagcataatttttaac

SEQ ID NO: 576362 - DNA, 33 bp, Homo sapien
atggcttagttcaagatgagcataatttttaac

SEQ ID NO: 576363 - DNA, 33 bp, Homo sapien
ctgagtggtccctataagtgattgctctatgcc

SEQ ID NO: 576364 - DNA, 33 bp, Homo sapien
ctgagtggtccctataggtgattgctctatgcc

SEQ ID NO: 576365 - DNA, 33 bp, Homo sapien
tatttctattatttcaaaaatgcagaagttgag

SEQ ID NO: 576366 - DNA, 33 bp, Homo sapien
tatttctattatttcacaaatgcagaagttgag

SEQ ID NO: 576367 - DNA, 33 bp, Homo sapien
tactaccagtaatacaactacaatggtaaacca

SEQ ID NO: 576368 - DNA, 33 bp, Homo sapien
tactaccagtaatacagctacaatggtaaacca

SEQ ID NO: 576369 - DNA, 33 bp, Homo sapien
tgcttccatttttgtacccattggccacttcac

SEQ ID NO: 576370 - DNA, 33 bp, Homo sapien
tgcttccatttttgtatccattggccacttcac

SEQ ID NO: 576371 - DNA, 33 bp, Homo sapien
tttagtatctgagtcacatctaatggccttctt

SEQ ID NO: 576372 - DNA, 33 bp, Homo sapien
tttagtatctgagtcatatctaatggccttctt

SEQ ID NO: 576373 - DNA, 33 bp, Homo sapien
gataattatcagtcagcctacattattgctgat

SEQ ID NO: 576374 - DNA, 33 bp, Homo sapien
gataattatcagtcaggctacattattgctgat

SEQ ID NO: 576375 - DNA, 33 bp, Homo sapien
atgactgtctttaagaatatctggaatatggac

SEQ ID NO: 576376 - DNA, 33 bp, Homo sapien
atgactgtctttaagactatctggaatatggac

SEQ ID NO: 576377 - DNA, 33 bp, Homo sapien
gttgcaatcaaaagacacttaattagaatggcc

SEQ ID NO: 576378 - DNA, 33 bp, Homo sapien
gttgcaatcaaaagacgcttaattagaatggcc

SEQ ID NO: 576379 - DNA, 33 bp, Homo sapien
gagataagtaaatagacgcttaaacctgtcaga

SEQ ID NO: 576380 - DNA, 33 bp, Homo sapien
gagataagtaaatagatgcttaaacctgtcaga

SEQ ID NO: 576381 - DNA, 33 bp, Homo sapien
aatctagagtttagtaaataacaaggtaccaga

SEQ ID NO: 576382 - DNA, 33 bp, Homo sapien
aatctagagtttagtagataacaaggtaccaga

SEQ ID NO: 576383 - DNA, 33 bp, Homo sapien
cgtttgtctgatgtaaagttcctattttttcca

SEQ ID NO: 576384 - DNA, 33 bp, Homo sapien
cgtttgtctgatgtaaggttcctattttttcca

SEQ ID NO: 576385 - DNA, 33 bp, Homo sapien
catgtaattcattttaaaagttacagactatga

SEQ ID NO: 576386 - DNA, 33 bp, Homo sapien
catgtaattcattttagaagttacagactatga

SEQ ID NO: 576387 - DNA, 33 bp, Homo sapien
ttaaaggatgtttccaaggtataattcagggcc

SEQ ID NO: 576388 - DNA, 33 bp, Homo sapien
ttaaaggatgtttccagggtataattcagggcc

SEQ ID NO: 576389 - DNA, 33 bp, Homo sapien
cagacccaggataaaaccagcacaggacacacg

SEQ ID NO: 576390 - DNA, 33 bp, Homo sapien
cagacccaggataaaatcagcacaggacacacg

SEQ ID NO: 576391 - DNA, 33 bp, Homo sapien
taataggattctgaaactcaactctactggggt

SEQ ID NO: 576392 - DNA, 33 bp, Homo sapien
taataggattctgaaattcaactctactggggt

SEQ ID NO: 576393 - DNA, 33 bp, Homo sapien
ttcatttgtgggtagacactaacttgttttggc

SEQ ID NO: 576394 - DNA, 33 bp, Homo sapien
ttcatttgtgggtagatactaacttgttttggc

SEQ ID NO: 576395 - DNA, 33 bp, Homo sapien
tgcatcctgccttttaacctttctggataatgt

SEQ ID NO: 576396 - DNA, 33 bp, Homo sapien
tgcatcctgccttttagcctttctggataatgt

SEQ ID NO: 576397 - DNA, 33 bp, Homo sapien
aaattgagttgattgacggataaaagatgccca

SEQ ID NO: 576398 - DNA, 33 bp, Homo sapien
aaattgagttgattgatggataaaagatgccca

SEQ ID NO: 576399 - DNA, 33 bp, Homo sapien
ttttcctgttgtaagacactgcttctatttgct

SEQ ID NO: 576400 - DNA, 33 bp, Homo sapien
ttttcctgttgtaagatactgcttctatttgct

SEQ ID NO: 576401 - DNA, 33 bp, Homo sapien
aaaacaaccagttaaaatcatgacaggatcaaa

SEQ ID NO: 576402 - DNA, 33 bp, Homo sapien
aaaacaaccagttaaactcatgacaggatcaaa

SEQ ID NO: 576403 - DNA, 33 bp, Homo sapien
gctgtactttatgtcactattcctttgtgagat

SEQ ID NO: 576404 - DNA, 33 bp, Homo sapien
gctgtactttatgtcattattcctttgtgagat

SEQ ID NO: 576405 - DNA, 33 bp, Homo sapien
accactcaagaacttacgtaatcaaataccacc

SEQ ID NO: 576406 - DNA, 33 bp, Homo sapien
accactcaagaacttatgtaatcaaataccacc

SEQ ID NO: 576407 - DNA, 33 bp, Homo sapien
aagtccttggcaatatcaatacgcctactacac

SEQ ID NO: 576408 - DNA, 33 bp, Homo sapien
aagtccttggcaatattaatacgcctactacac

SEQ ID NO: 576409 - DNA, 33 bp, Homo sapien
ttctttgggaaaactacagctgtcaaattttaa

SEQ ID NO: 576410 - DNA, 33 bp, Homo sapien
ttctttgggaaaactatagctgtcaaattttaa

SEQ ID NO: 576411 - DNA, 33 bp, Homo sapien
tttgggtgtgtggaagcatcataaagtcaggga

SEQ ID NO: 576412 - DNA, 33 bp, Homo sapien
tttgggtgtgtggaagtatcataaagtcaggga

SEQ ID NO: 576413 - DNA, 33 bp, Homo sapien
gaggccctttgttatcggacctctgcatagttc

SEQ ID NO: 576414 - DNA, 33 bp, Homo sapien
gaggccctttgttatctgacctctgcatagttc

SEQ ID NO: 576415 - DNA, 33 bp, Homo sapien
ccaaacttggcctgtcaccatttaccatgctgg

SEQ ID NO: 576416 - DNA, 33 bp, Homo sapien
ccaaacttggcctgtcgccatttaccatgctgg

SEQ ID NO: 576417 - DNA, 33 bp, Homo sapien
gtgtgtgttcgctgtgcaggcaactctcctgct

SEQ ID NO: 576418 - DNA, 33 bp, Homo sapien
gtgtgtgttcgctgtgtaggcaactctcctgct

SEQ ID NO: 576419 - DNA, 33 bp, Homo sapien
tcaatttccattttcacacctttaggcattcct

SEQ ID NO: 576420 - DNA, 33 bp, Homo sapien
tcaatttccattttcatacctttaggcattcct

SEQ ID NO: 576421 - DNA, 33 bp, Homo sapien
ggctatgaccatcttaacatgtactcctccacc

SEQ ID NO: 576422 - DNA, 33 bp, Homo sapien
ggctatgaccatcttagcatgtactcctccacc

SEQ ID NO: 576423 - DNA, 33 bp, Homo sapien
catactgaggctggcactaaatcaaagcatatt

SEQ ID NO: 576424 - DNA, 33 bp, Homo sapien
catactgaggctggcattaaatcaaagcatatt

SEQ ID NO: 576425 - DNA, 33 bp, Homo sapien
gtaacacttaaattcacccttgccaatttactt

SEQ ID NO: 576426 - DNA, 33 bp, Homo sapien
gtaacacttaaattcatccttgccaatttactt

SEQ ID NO: 576427 - DNA, 33 bp, Homo sapien
tagcactgcagagttacgaggtgagaatatttt

SEQ ID NO: 576428 - DNA, 33 bp, Homo sapien
tagcactgcagagttatgaggtgagaatatttt

SEQ ID NO: 576429 - DNA, 33 bp, Homo sapien
ggttcaccttacttcacatatctgacatttaag

SEQ ID NO: 576430 - DNA, 33 bp, Homo sapien
ggttcaccttacttcatatatctgacatttaag

SEQ ID NO: 576431 - DNA, 33 bp, Homo sapien
aattgggacattgctactaaaggggagaataga

SEQ ID NO: 576432 - DNA, 33 bp, Homo sapien
aattgggacattgctattaaaggggagaataga

SEQ ID NO: 576433 - DNA, 33 bp, Homo sapien
tttggttccagaccaccgcagtaaagtgagtat

SEQ ID NO: 576434 - DNA, 33 bp, Homo sapien
tttggttccagaccactgcagtaaagtgagtat

SEQ ID NO: 576435 - DNA, 33 bp, Homo sapien
gggagtaggcacgtcaaatggtgaaagaaggag

SEQ ID NO: 576436 - DNA, 33 bp, Homo sapien
gggagtaggcacgtcacatggtgaaagaaggag

SEQ ID NO: 576437 - DNA, 33 bp, Homo sapien
tgaaacttaccatcataagcctattagcaacag

SEQ ID NO: 576438 - DNA, 33 bp, Homo sapien
tgaaacttaccatcatgagcctattagcaacag

SEQ ID NO: 576439 - DNA, 33 bp, Homo sapien
tctctgagctgggaatgaacttcggattcattt

SEQ ID NO: 576440 - DNA, 33 bp, Homo sapien
tctctgagctgggaattaacttcggattcattt

SEQ ID NO: 576441 - DNA, 33 bp, Homo sapien
ttgttttgttattagaataatgcctggcatata

SEQ ID NO: 576442 - DNA, 33 bp, Homo sapien
ttgttttgttattagagtaatgcctggcatata

SEQ ID NO: 576443 - DNA, 33 bp, Homo sapien
tgggttggataatgaacgaaacggaaatgtcat

SEQ ID NO: 576444 - DNA, 33 bp, Homo sapien
tgggttggataatgaatgaaacggaaatgtcat

SEQ ID NO: 576445 - DNA, 33 bp, Homo sapien
gtttggaatcttcttccaaacaaaatcacgatc

SEQ ID NO: 576446 - DNA, 33 bp, Homo sapien
gtttggaatcttcttctaaacaaaatcacgatc

SEQ ID NO: 576447 - DNA, 33 bp, Homo sapien
tgggttgagttgtagaaactattaatattgatt

SEQ ID NO: 576448 - DNA, 33 bp, Homo sapien
tgggttgagttgtagagactattaatattgatt

SEQ ID NO: 576449 - DNA, 33 bp, Homo sapien
aactattcttatgtgaaagacagcatgaaattg

SEQ ID NO: 576450 - DNA, 33 bp, Homo sapien
aactattcttatgtgagagacagcatgaaattg

SEQ ID NO: 576451 - DNA, 33 bp, Homo sapien
tttctttgctcacctaaaaaactctttgaacac

SEQ ID NO: 576452 - DNA, 33 bp, Homo sapien
tttctttgctcacctacaaaactctttgaacac

SEQ ID NO: 576453 - DNA, 33 bp, Homo sapien
tggagtcaggatgaaacaggacagaaaaatgtg

SEQ ID NO: 576454 - DNA, 33 bp, Homo sapien
tggagtcaggatgaaataggacagaaaaatgtg

SEQ ID NO: 576455 - DNA, 33 bp, Homo sapien
tctggccagttattcactctattctggagtcat

SEQ ID NO: 576456 - DNA, 33 bp, Homo sapien
tctggccagttattcattctattctggagtcat

SEQ ID NO: 576457 - DNA, 33 bp, Homo sapien
agggagggagtgataaaaaatgagagtatcaaa

SEQ ID NO: 576458 - DNA, 33 bp, Homo sapien
agggagggagtgataacaaatgagagtatcaaa

SEQ ID NO: 576459 - DNA, 33 bp, Homo sapien
ttaagcttctgaaaaacaactctgggacaaatg

SEQ ID NO: 576460 - DNA, 33 bp, Homo sapien
ttaagcttctgaaaaataactctgggacaaatg

SEQ ID NO: 576461 - DNA, 33 bp, Homo sapien
cccacttccacttacagacagtgtttctactta

SEQ ID NO: 576462 - DNA, 33 bp, Homo sapien
cccacttccacttacatacagtgtttctactta

SEQ ID NO: 576463 - DNA, 33 bp, Homo sapien
gagctgggtcctgagacaaaggatgcaaatcag

SEQ ID NO: 576464 - DNA, 33 bp, Homo sapien
gagctgggtcctgagagaaaggatgcaaatcag

SEQ ID NO: 576465 - DNA, 33 bp, Homo sapien
ttaccgccattagagaacttacattgtattgat

SEQ ID NO: 576466 - DNA, 33 bp, Homo sapien
ttaccgccattagagatcttacattgtattgat

SEQ ID NO: 576467 - DNA, 33 bp, Homo sapien
ttttacctatgcctaaagggtttcccaaaattt

SEQ ID NO: 576468 - DNA, 33 bp, Homo sapien
ttttacctatgcctaaggggtttcccaaaattt

SEQ ID NO: 576469 - DNA, 33 bp, Homo sapien
gtctattacgtatctacgaaatgtcaaatgcat

SEQ ID NO: 576470 - DNA, 33 bp, Homo sapien
gtctattacgtatctatgaaatgtcaaatgcat

SEQ ID NO: 576471 - DNA, 33 bp, Homo sapien
ataggatgtcttcctacgattctatatccaatg

SEQ ID NO: 576472 - DNA, 33 bp, Homo sapien
ataggatgtcttcctatgattctatatccaatg

SEQ ID NO: 576473 - DNA, 33 bp, Homo sapien
tcatatttaaatgttcaagataatgtctcaata

SEQ ID NO: 576474 - DNA, 33 bp, Homo sapien
tcatatttaaatgttcgagataatgtctcaata

SEQ ID NO: 576475 - DNA, 33 bp, Homo sapien
tttgctgtggacaggacctttatgcgtcgaagg

SEQ ID NO: 576476 - DNA, 33 bp, Homo sapien
tttgctgtggacaggatctttatgcgtcgaagg

SEQ ID NO: 576477 - DNA, 33 bp, Homo sapien
cagaagaaaggagataaacgctgggcagggctc

SEQ ID NO: 576478 - DNA, 33 bp, Homo sapien
cagaagaaaggagatagacgctgggcagggctc

SEQ ID NO: 576479 - DNA, 33 bp, Homo sapien
gtaaagctttgtgatgcacagcctaacaaaatt

SEQ ID NO: 576480 - DNA, 33 bp, Homo sapien
gtaaagctttgtgatgtacagcctaacaaaatt

SEQ ID NO: 576481 - DNA, 33 bp, Homo sapien
atgacaataatgacaacgagaaggtttgggata

SEQ ID NO: 576482 - DNA, 33 bp, Homo sapien
atgacaataatgacaatgagaaggtttgggata

SEQ ID NO: 576483 - DNA, 33 bp, Homo sapien
ttctgatgcaaagtgcaatctgagaatcataag

SEQ ID NO: 576484 - DNA, 33 bp, Homo sapien
ttctgatgcaaagtgccatctgagaatcataag

SEQ ID NO: 576485 - DNA, 33 bp, Homo sapien
agtgctcgaatgctggaaagttctatcactggg

SEQ ID NO: 576486 - DNA, 33 bp, Homo sapien
agtgctcgaatgctgggaagttctatcactggg

SEQ ID NO: 576487 - DNA, 33 bp, Homo sapien
tgggatctggctcatacagacatttcacttgca

SEQ ID NO: 576488 - DNA, 33 bp, Homo sapien
tgggatctggctcatatagacatttcacttgca

SEQ ID NO: 576489 - DNA, 33 bp, Homo sapien
tttatgttggtgctcaagatagtgcatgagtga

SEQ ID NO: 576490 - DNA, 33 bp, Homo sapien
tttatgttggtgctcaggatagtgcatgagtga

SEQ ID NO: 576491 - DNA, 33 bp, Homo sapien
acccgaacagtaagaacaacaatgcaaaagaag

SEQ ID NO: 576492 - DNA, 33 bp, Homo sapien
acccgaacagtaagaataacaatgcaaaagaag

SEQ ID NO: 576493 - DNA, 33 bp, Homo sapien
cataattttaaggagtcaatataatgtgcaatt

SEQ ID NO: 576494 - DNA, 33 bp, Homo sapien
cataattttaaggagtgaatataatgtgcaatt

SEQ ID NO: 576495 - DNA, 33 bp, Homo sapien
caaaccttagagaaacaaaatcacttgtgtgaa

SEQ ID NO: 576496 - DNA, 33 bp, Homo sapien
caaaccttagagaaacgaaatcacttgtgtgaa

SEQ ID NO: 576497 - DNA, 33 bp, Homo sapien
agcacaaggcttctgacgcatgtcttcttctga

SEQ ID NO: 576498 - DNA, 33 bp, Homo sapien
agcacaaggcttctgatgcatgtcttcttctga

SEQ ID NO: 576499 - DNA, 33 bp, Homo sapien
tagtagggctggaaatcaataggttatccacat

SEQ ID NO: 576500 - DNA, 33 bp, Homo sapien
tagtagggctggaaattaataggttatccacat

SEQ ID NO: 576501 - DNA, 33 bp, Homo sapien
tcctgaccttagagcacgtaaaattagtagcat

SEQ ID NO: 576502 - DNA, 33 bp, Homo sapien
tcctgaccttagagcatgtaaaattagtagcat

SEQ ID NO: 576503 - DNA, 33 bp, Homo sapien
ttaaccagcttctagcaagggactcagaatagg

SEQ ID NO: 576504 - DNA, 33 bp, Homo sapien
ttaaccagcttctagcgagggactcagaatagg

SEQ ID NO: 576505 - DNA, 33 bp, Homo sapien
ccacttctttagcagccgattaggtccacactc

SEQ ID NO: 576506 - DNA, 33 bp, Homo sapien
ccacttctttagcagctgattaggtccacactc

SEQ ID NO: 576507 - DNA, 33 bp, Homo sapien
ctagagacagtctctacattccaaaactcttca

SEQ ID NO: 576508 - DNA, 33 bp, Homo sapien
ctagagacagtctctatattccaaaactcttca

SEQ ID NO: 576509 - DNA, 33 bp, Homo sapien
tctcctcaatgaactacgtgtccttaattgttt

SEQ ID NO: 576510 - DNA, 33 bp, Homo sapien
tctcctcaatgaactatgtgtccttaattgttt

SEQ ID NO: 576511 - DNA, 33 bp, Homo sapien
atcgcttgccatgtcactgaaaggcttatgcaa

SEQ ID NO: 576512 - DNA, 33 bp, Homo sapien
atcgcttgccatgtcattgaaaggcttatgcaa

SEQ ID NO: 576513 - DNA, 33 bp, Homo sapien
aaacagtgataaagctaagcaatgttgatttta

SEQ ID NO: 576514 - DNA, 33 bp, Homo sapien
aaacagtgataaagctgagcaatgttgatttta

SEQ ID NO: 576515 - DNA, 33 bp, Homo sapien
acagaggttactgttacaggttcaatttctttg

SEQ ID NO: 576516 - DNA, 33 bp, Homo sapien
acagaggttactgttataggttcaatttctttg

SEQ ID NO: 576517 - DNA, 33 bp, Homo sapien
ttaggcatttatttacacattggaactacagaa

SEQ ID NO: 576518 - DNA, 33 bp, Homo sapien
ttaggcatttatttacgcattggaactacagaa

SEQ ID NO: 576519 - DNA, 33 bp, Homo sapien
acaacctgtacataagaactgtactcttgttga

SEQ ID NO: 576520 - DNA, 33 bp, Homo sapien
acaacctgtacataaggactgtactcttgttga

SEQ ID NO: 576521 - DNA, 33 bp, Homo sapien
tcatcagttgataccactgaaagatcagttcac

SEQ ID NO: 576522 - DNA, 33 bp, Homo sapien
tcatcagttgataccattgaaagatcagttcac

SEQ ID NO: 576523 - DNA, 33 bp, Homo sapien
aattcaatctcacatcccgctcattctacaacc

SEQ ID NO: 576524 - DNA, 33 bp, Homo sapien
aattcaatctcacatctcgctcattctacaacc

SEQ ID NO: 576525 - DNA, 33 bp, Homo sapien
tcattagtttccttgaaatctagtgctgcttaa

SEQ ID NO: 576526 - DNA, 33 bp, Homo sapien
tcattagtttccttgagatctagtgctgcttaa

SEQ ID NO: 576527 - DNA, 33 bp, Homo sapien
gtttctgatttatgaactctgtagtgggaccac

SEQ ID NO: 576528 - DNA, 33 bp, Homo sapien
gtttctgatttatgaagtctgtagtgggaccac

SEQ ID NO: 576529 - DNA, 33 bp, Homo sapien
gccttttagtctgttccacatagcagtagactc

SEQ ID NO: 576530 - DNA, 33 bp, Homo sapien
gccttttagtctgttctacatagcagtagactc

SEQ ID NO: 576531 - DNA, 33 bp, Homo sapien
agaccctatctcttcaaaaaagtaactaaaaat

SEQ ID NO: 576532 - DNA, 33 bp, Homo sapien
agaccctatctcttcacaaaagtaactaaaaat

SEQ ID NO: 576533 - DNA, 33 bp, Homo sapien
ttttttcccagctatcaatactaaatatcatta

SEQ ID NO: 576534 - DNA, 33 bp, Homo sapien
ttttttcccagctatcgatactaaatatcatta

SEQ ID NO: 576535 - DNA, 33 bp, Homo sapien
gctgagtacaatggctaacatatagaaaatact

SEQ ID NO: 576536 - DNA, 33 bp, Homo sapien
gctgagtacaatggctgacatatagaaaatact

SEQ ID NO: 576537 - DNA, 33 bp, Homo sapien
atgtctctctgtctcacgcaattagaatttata

SEQ ID NO: 576538 - DNA, 33 bp, Homo sapien
atgtctctctgtctcaggcaattagaatttata

SEQ ID NO: 576539 - DNA, 33 bp, Homo sapien
ttgaagtttctttggacctctcacctgtacctc

SEQ ID NO: 576540 - DNA, 33 bp, Homo sapien
ttgaagtttctttggatctctcacctgtacctc

SEQ ID NO: 576541 - DNA, 33 bp, Homo sapien
aaagtggtcagattaccacttctttagaaatgc

SEQ ID NO: 576542 - DNA, 33 bp, Homo sapien
aaagtggtcagattacgacttctttagaaatgc

SEQ ID NO: 576543 - DNA, 33 bp, Homo sapien
aaaacaggaagagggacggtttgattctgtaaa

SEQ ID NO: 576544 - DNA, 33 bp, Homo sapien
aaaacaggaagagggatggtttgattctgtaaa

SEQ ID NO: 576545 - DNA, 33 bp, Homo sapien
gatagatatttagcaaacaaatgatctctcctc

SEQ ID NO: 576546 - DNA, 33 bp, Homo sapien
gatagatatttagcaatcaaatgatctctcctc

SEQ ID NO: 576547 - DNA, 33 bp, Homo sapien
aatagtttagtgaaaaacttttgagatgacctc

SEQ ID NO: 576548 - DNA, 33 bp, Homo sapien
aatagtttagtgaaaagcttttgagatgacctc

SEQ ID NO: 576549 - DNA, 33 bp, Homo sapien
acttctacagttcacacgctataagaagtcagc

SEQ ID NO: 576550 - DNA, 33 bp, Homo sapien
acttctacagttcacatgctataagaagtcagc

SEQ ID NO: 576551 - DNA, 33 bp, Homo sapien
tatactaaggtctaggaatgtaaagataacaca

SEQ ID NO: 576552 - DNA, 33 bp, Homo sapien
tatactaaggtctagggatgtaaagataacaca

SEQ ID NO: 576553 - DNA, 33 bp, Homo sapien
tcacacaaatactgtaaaaaatgtctgtagcag

SEQ ID NO: 576554 - DNA, 33 bp, Homo sapien
tcacacaaatactgtataaaatgtctgtagcag

SEQ ID NO: 576555 - DNA, 33 bp, Homo sapien
gtttgttgtaataaaccacagctttaatagcac

SEQ ID NO: 576556 - DNA, 33 bp, Homo sapien
gtttgttgtaataaactacagctttaatagcac

SEQ ID NO: 576557 - DNA, 33 bp, Homo sapien
gtaaaggcaggaattgaactgcgggaaattatt

SEQ ID NO: 576558 - DNA, 33 bp, Homo sapien
gtaaaggcaggaattgcactgcgggaaattatt

SEQ ID NO: 576559 - DNA, 33 bp, Homo sapien
tatgcagtgtctagaagaagcaaacttttagag

SEQ ID NO: 576560 - DNA, 33 bp, Homo sapien
tatgcagtgtctagaataagcaaacttttagag

SEQ ID NO: 576561 - DNA, 33 bp, Homo sapien
aagcatttaacctgccccttctattcaaacagc

SEQ ID NO: 576562 - DNA, 33 bp, Homo sapien
aagcatttaacctgcctcttctattcaaacagc

SEQ ID NO: 576563 - DNA, 33 bp, Homo sapien
ttagaacagaaaaagaatactagtggcaatact

SEQ ID NO: 576564 - DNA, 33 bp, Homo sapien
ttagaacagaaaaagactactagtggcaatact

SEQ ID NO: 576565 - DNA, 33 bp, Homo sapien
aaatgcctctctgttacctggtctgccatcaag

SEQ ID NO: 576566 - DNA, 33 bp, Homo sapien
aaatgcctctctgttatctggtctgccatcaag

SEQ ID NO: 576567 - DNA, 33 bp, Homo sapien
gggaggtggttttctaccaaacgagaccaacat

SEQ ID NO: 576568 - DNA, 33 bp, Homo sapien
gggaggtggttttctagcaaacgagaccaacat

SEQ ID NO: 576569 - DNA, 33 bp, Homo sapien
ataaattctcaagttcgatttcattctaaaagg

SEQ ID NO: 576570 - DNA, 33 bp, Homo sapien
ataaattctcaagttctatttcattctaaaagg

SEQ ID NO: 576571 - DNA, 33 bp, Homo sapien
tgtttaaagtggctaaacataccccaagcacag

SEQ ID NO: 576572 - DNA, 33 bp, Homo sapien
tgtttaaagtggctaatcataccccaagcacag

SEQ ID NO: 576573 - DNA, 33 bp, Homo sapien
tgctgtatgcttagccacaaactccaattgctg

SEQ ID NO: 576574 - DNA, 33 bp, Homo sapien
tgctgtatgcttagccgcaaactccaattgctg

SEQ ID NO: 576575 - DNA, 33 bp, Homo sapien
ttcaagtaaaggaaaggcatagatatagagtga

SEQ ID NO: 576576 - DNA, 33 bp, Homo sapien
ttcaagtaaaggaaagtcatagatatagagtga

SEQ ID NO: 576577 - DNA, 33 bp, Homo sapien
gcaaaatgaaaatgtgaagtcttttattcaaaa

SEQ ID NO: 576578 - DNA, 33 bp, Homo sapien
gcaaaatgaaaatgtggagtcttttattcaaaa

SEQ ID NO: 576579 - DNA, 33 bp, Homo sapien
cataatttgcagattccagggcaaaatgaaaat

SEQ ID NO: 576580 - DNA, 33 bp, Homo sapien
cataatttgcagattctagggcaaaatgaaaat

SEQ ID NO: 576581 - DNA, 33 bp, Homo sapien
agtttgcttattcttacaaacttttccagatag

SEQ ID NO: 576582 - DNA, 33 bp, Homo sapien
agtttgcttattcttataaacttttccagatag

SEQ ID NO: 576583 - DNA, 33 bp, Homo sapien
aggttgagggggtttcacatttaccaaagcttt

SEQ ID NO: 576584 - DNA, 33 bp, Homo sapien
aggttgagggggtttcgcatttaccaaagcttt

SEQ ID NO: 576585 - DNA, 33 bp, Homo sapien
taaatttcaaaacttcaacttctgtggtgatat

SEQ ID NO: 576586 - DNA, 33 bp, Homo sapien
taaatttcaaaacttcgacttctgtggtgatat

SEQ ID NO: 576587 - DNA, 33 bp, Homo sapien
tggttggtgtcaaaaccgatgctcaaatcctag

SEQ ID NO: 576588 - DNA, 33 bp, Homo sapien
tggttggtgtcaaaactgatgctcaaatcctag

SEQ ID NO: 576589 - DNA, 33 bp, Homo sapien
cttacctgaaaagcatcacactatataaaggag

SEQ ID NO: 576590 - DNA, 33 bp, Homo sapien
cttacctgaaaagcattacactatataaaggag

SEQ ID NO: 576591 - DNA, 33 bp, Homo sapien
atatgtacacctggtaagatcaagtaaaccagt

SEQ ID NO: 576592 - DNA, 33 bp, Homo sapien
atatgtacacctggtatgatcaagtaaaccagt

SEQ ID NO: 576593 - DNA, 33 bp, Homo sapien
cataaactttcacaaacgtgtagttatgttttg

SEQ ID NO: 576594 - DNA, 33 bp, Homo sapien
cataaactttcacaaatgtgtagttatgttttg

SEQ ID NO: 576595 - DNA, 33 bp, Homo sapien
tttgtgtctagtgtgaccttgagatccaattct

SEQ ID NO: 576596 - DNA, 33 bp, Homo sapien
tttgtgtctagtgtgagcttgagatccaattct

SEQ ID NO: 576597 - DNA, 33 bp, Homo sapien
ttttcttggactgttacaacgccatgactcaga

SEQ ID NO: 576598 - DNA, 33 bp, Homo sapien
ttttcttggactgttataacgccatgactcaga

SEQ ID NO: 576599 - DNA, 33 bp, Homo sapien
accctgctctttggcaataacttcctactggcc

SEQ ID NO: 576600 - DNA, 33 bp, Homo sapien
accctgctctttggcagtaacttcctactggcc

SEQ ID NO: 576601 - DNA, 33 bp, Homo sapien
ctactcttatgacttacggtaatcaggtcctta

SEQ ID NO: 576602 - DNA, 33 bp, Homo sapien
ctactcttatgacttatggtaatcaggtcctta

SEQ ID NO: 576603 - DNA, 33 bp, Homo sapien
tttttctgacaatatccccaaactttatctggg

SEQ ID NO: 576604 - DNA, 33 bp, Homo sapien
tttttctgacaatatctccaaactttatctggg

SEQ ID NO: 576605 - DNA, 33 bp, Homo sapien
aacttcaggactcttacaggatcattggaaaag

SEQ ID NO: 576606 - DNA, 33 bp, Homo sapien
aacttcaggactcttataggatcattggaaaag

SEQ ID NO: 576607 - DNA, 33 bp, Homo sapien
agtggcagaacacccaatgaaaaatgacctcag

SEQ ID NO: 576608 - DNA, 33 bp, Homo sapien
agtggcagaacacccagtgaaaaatgacctcag

SEQ ID NO: 576609 - DNA, 33 bp, Homo sapien
tcagagcactaatgccaaaaagaaggatcggtt

SEQ ID NO: 576610 - DNA, 33 bp, Homo sapien
tcagagcactaatgccgaaaagaaggatcggtt

SEQ ID NO: 576611 - DNA, 33 bp, Homo sapien
tagtagtaagaacttgaacttacataacttatt

SEQ ID NO: 576612 - DNA, 33 bp, Homo sapien
tagtagtaagaacttggacttacataacttatt

SEQ ID NO: 576613 - DNA, 33 bp, Homo sapien
cctcctcaaaggtcaaatcctggtcattccttc

SEQ ID NO: 576614 - DNA, 33 bp, Homo sapien
cctcctcaaaggtcaactcctggtcattccttc

SEQ ID NO: 576615 - DNA, 33 bp, Homo sapien
ggagtcagacttgctacatgtgcttaccgttca

SEQ ID NO: 576616 - DNA, 33 bp, Homo sapien
ggagtcagacttgctatatgtgcttaccgttca

SEQ ID NO: 576617 - DNA, 33 bp, Homo sapien
actgcaaccaaacaagaagctatctaaggcaaa

SEQ ID NO: 576618 - DNA, 33 bp, Homo sapien
actgcaaccaaacaaggagctatctaaggcaaa

SEQ ID NO: 576619 - DNA, 33 bp, Homo sapien
cttgatgctttttgagaaactggtccattttat

SEQ ID NO: 576620 - DNA, 33 bp, Homo sapien
cttgatgctttttgaggaactggtccattttat

SEQ ID NO: 576621 - DNA, 33 bp, Homo sapien
aatttaatgcttgttggaactctagaaatctct

SEQ ID NO: 576622 - DNA, 33 bp, Homo sapien
aatttaatgcttgttgtaactctagaaatctct

SEQ ID NO: 576623 - DNA, 33 bp, Homo sapien
ttcttggaatttagaaatacgattttccagtga

SEQ ID NO: 576624 - DNA, 33 bp, Homo sapien
ttcttggaatttagaagtacgattttccagtga

SEQ ID NO: 576625 - DNA, 33 bp, Homo sapien
tgtgatctgctctgggaaatgaacgcattactt

SEQ ID NO: 576626 - DNA, 33 bp, Homo sapien
tgtgatctgctctggggaatgaacgcattactt

SEQ ID NO: 576627 - DNA, 33 bp, Homo sapien
gaactggtcttacctgaagaatccattaaagtt

SEQ ID NO: 576628 - DNA, 33 bp, Homo sapien
gaactggtcttacctgcagaatccattaaagtt

SEQ ID NO: 576629 - DNA, 33 bp, Homo sapien
tcctctgaactttagacgtgctgccttctttca

SEQ ID NO: 576630 - DNA, 33 bp, Homo sapien
tcctctgaactttagatgtgctgccttctttca

SEQ ID NO: 576631 - DNA, 33 bp, Homo sapien
ttttgcagacttacaacgtcgccttcattctac

SEQ ID NO: 576632 - DNA, 33 bp, Homo sapien
ttttgcagacttacaatgtcgccttcattctac

SEQ ID NO: 576633 - DNA, 33 bp, Homo sapien
gaatttgcatttttccaataactcttgaagcca

SEQ ID NO: 576634 - DNA, 33 bp, Homo sapien
gaatttgcatttttccgataactcttgaagcca

SEQ ID NO: 576635 - DNA, 33 bp, Homo sapien
tgtttgaccacttatcagaactttctatataat

SEQ ID NO: 576636 - DNA, 33 bp, Homo sapien
tgtttgaccacttatcggaactttctatataat

SEQ ID NO: 576637 - DNA, 33 bp, Homo sapien
agtatctgtattgtgaactagaccaagctactc

SEQ ID NO: 576638 - DNA, 33 bp, Homo sapien
agtatctgtattgtgagctagaccaagctactc

SEQ ID NO: 576639 - DNA, 33 bp, Homo sapien
actccgtatgactggacagaactcaaagaagag

SEQ ID NO: 576640 - DNA, 33 bp, Homo sapien
actccgtatgactggagagaactcaaagaagag

SEQ ID NO: 576641 - DNA, 33 bp, Homo sapien
gtgctcccaactttgacggttgtcatgcagaga

SEQ ID NO: 576642 - DNA, 33 bp, Homo sapien
gtgctcccaactttgatggttgtcatgcagaga

SEQ ID NO: 576643 - DNA, 33 bp, Homo sapien
tctgaggaagcaaagcacagggattatgccata

SEQ ID NO: 576644 - DNA, 33 bp, Homo sapien
tctgaggaagcaaagcgcagggattatgccata

SEQ ID NO: 576645 - DNA, 33 bp, Homo sapien
aaagatacatgcattaaatttcagcttgtgata

SEQ ID NO: 576646 - DNA, 33 bp, Homo sapien
aaagatacatgcattagatttcagcttgtgata

SEQ ID NO: 576647 - DNA, 33 bp, Homo sapien
atataattgagtatccaattgagcctactccct

SEQ ID NO: 576648 - DNA, 33 bp, Homo sapien
atataattgagtatcccattgagcctactccct

SEQ ID NO: 576649 - DNA, 33 bp, Homo sapien
acccactattttgtcacgattgaaattagaaat

SEQ ID NO: 576650 - DNA, 33 bp, Homo sapien
acccactattttgtcatgattgaaattagaaat

SEQ ID NO: 576651 - DNA, 33 bp, Homo sapien
actgacctagcagaggaatttgaggattaaatg

SEQ ID NO: 576652 - DNA, 33 bp, Homo sapien
actgacctagcagaggtatttgaggattaaatg

SEQ ID NO: 576653 - DNA, 33 bp, Homo sapien
aattgattcagaaaagacatatcaatgctgcta

SEQ ID NO: 576654 - DNA, 33 bp, Homo sapien
aattgattcagaaaaggcatatcaatgctgcta

SEQ ID NO: 576655 - DNA, 33 bp, Homo sapien
taggagacttcttgcaaattgtggttattccct

SEQ ID NO: 576656 - DNA, 33 bp, Homo sapien
taggagacttcttgcacattgtggttattccct

SEQ ID NO: 576657 - DNA, 33 bp, Homo sapien
caattcctcttggaaaactgtgcaagcaccttt

SEQ ID NO: 576658 - DNA, 33 bp, Homo sapien
caattcctcttggaaagctgtgcaagcaccttt

SEQ ID NO: 576659 - DNA, 33 bp, Homo sapien
tctatggcctatgtcactcaattttcaatcctt

SEQ ID NO: 576660 - DNA, 33 bp, Homo sapien
tctatggcctatgtcattcaattttcaatcctt

SEQ ID NO: 576661 - DNA, 33 bp, Homo sapien
tgttaaaatgacacacagctctagtttttcgtt

SEQ ID NO: 576662 - DNA, 33 bp, Homo sapien
tgttaaaatgacacacggctctagtttttcgtt

SEQ ID NO: 576663 - DNA, 33 bp, Homo sapien
aaagataaatagagcagaagtttttgggagtca

SEQ ID NO: 576664 - DNA, 33 bp, Homo sapien
aaagataaatagagcataagtttttgggagtca

SEQ ID NO: 576665 - DNA, 33 bp, Homo sapien
aataaatggttgttacaaggcactgagattcaa

SEQ ID NO: 576666 - DNA, 33 bp, Homo sapien
aataaatggttgttacgaggcactgagattcaa

SEQ ID NO: 576667 - DNA, 33 bp, Homo sapien
aggagtgatataccagaaaggagtcaaatgtct

SEQ ID NO: 576668 - DNA, 33 bp, Homo sapien
aggagtgatataccagcaaggagtcaaatgtct

SEQ ID NO: 576669 - DNA, 33 bp, Homo sapien
acttgaccatgatcacaaatccctacagatgtt

SEQ ID NO: 576670 - DNA, 33 bp, Homo sapien
acttgaccatgatcactaatccctacagatgtt

SEQ ID NO: 576671 - DNA, 33 bp, Homo sapien
ttatgatgggttggaactacttgatgggtagag

SEQ ID NO: 576672 - DNA, 33 bp, Homo sapien
ttatgatgggttggaattacttgatgggtagag

SEQ ID NO: 576673 - DNA, 33 bp, Homo sapien
attatgacataggacacgggataatttggcagt

SEQ ID NO: 576674 - DNA, 33 bp, Homo sapien
attatgacataggacatgggataatttggcagt

SEQ ID NO: 576675 - DNA, 33 bp, Homo sapien
ttggaaggtttaaacacgagagtggtatgattc

SEQ ID NO: 576676 - DNA, 33 bp, Homo sapien
ttggaaggtttaaacatgagagtggtatgattc

SEQ ID NO: 576677 - DNA, 33 bp, Homo sapien
ctctaagctttagtatcaggaatgcaactggag

SEQ ID NO: 576678 - DNA, 33 bp, Homo sapien
ctctaagctttagtatgaggaatgcaactggag

SEQ ID NO: 576679 - DNA, 33 bp, Homo sapien
acggctcaaagagaaacacagaggggactagaa

SEQ ID NO: 576680 - DNA, 33 bp, Homo sapien
acggctcaaagagaaatacagaggggactagaa

SEQ ID NO: 576681 - DNA, 33 bp, Homo sapien
agaaattagatgtgagccatagatgttacttaa

SEQ ID NO: 576682 - DNA, 33 bp, Homo sapien
agaaattagatgtgagtcatagatgttacttaa

SEQ ID NO: 576683 - DNA, 33 bp, Homo sapien
actgcgcccggctttcacatctaatttctattg

SEQ ID NO: 576684 - DNA, 33 bp, Homo sapien
actgcgcccggctttcgcatctaatttctattg

SEQ ID NO: 576685 - DNA, 33 bp, Homo sapien
aaccaaatgttgagcccgacatagcctcataaa

SEQ ID NO: 576686 - DNA, 33 bp, Homo sapien
aaccaaatgttgagcctgacatagcctcataaa

SEQ ID NO: 576687 - DNA, 33 bp, Homo sapien
agcctatttcaagccacattttattgttaatat

SEQ ID NO: 576688 - DNA, 33 bp, Homo sapien
agcctatttcaagccatattttattgttaatat

SEQ ID NO: 576689 - DNA, 33 bp, Homo sapien
atgtggcagattgcttcaactgactttatcaag

SEQ ID NO: 576690 - DNA, 33 bp, Homo sapien
atgtggcagattgctttaactgactttatcaag

SEQ ID NO: 576691 - DNA, 33 bp, Homo sapien
acgcgcataagattgcaatgagttcaatgaaag

SEQ ID NO: 576692 - DNA, 33 bp, Homo sapien
acgcgcataagattgcgatgagttcaatgaaag

SEQ ID NO: 576693 - DNA, 33 bp, Homo sapien
atgagtgagcaggaaaaacacaatgtttgcctc

SEQ ID NO: 576694 - DNA, 33 bp, Homo sapien
atgagtgagcaggaaagacacaatgtttgcctc

SEQ ID NO: 576695 - DNA, 33 bp, Homo sapien
gcactggagggctggtaaaaacaagtggatccc

SEQ ID NO: 576696 - DNA, 33 bp, Homo sapien
gcactggagggctggtcaaaacaagtggatccc

SEQ ID NO: 576697 - DNA, 33 bp, Homo sapien
acctctttgacacagaagatgtttttgagtatt

SEQ ID NO: 576698 - DNA, 33 bp, Homo sapien
acctctttgacacagaggatgtttttgagtatt

SEQ ID NO: 576699 - DNA, 33 bp, Homo sapien
taggatgcactttagacgtcccaccatatggtc

SEQ ID NO: 576700 - DNA, 33 bp, Homo sapien
taggatgcactttagaggtcccaccatatggtc

SEQ ID NO: 576701 - DNA, 33 bp, Homo sapien
catatccactatgttccaatctaatgggtctga

SEQ ID NO: 576702 - DNA, 33 bp, Homo sapien
catatccactatgttctaatctaatgggtctga

SEQ ID NO: 576703 - DNA, 33 bp, Homo sapien
tttgtgtgaagaaaaaaaaagtgtgatgtttta

SEQ ID NO: 576704 - DNA, 33 bp, Homo sapien
tttgtgtgaagaaaaacaaagtgtgatgtttta

SEQ ID NO: 576705 - DNA, 33 bp, Homo sapien
atgcattacatgttagcatcaaggaggcaaata

SEQ ID NO: 576706 - DNA, 33 bp, Homo sapien
atgcattacatgttaggatcaaggaggcaaata

SEQ ID NO: 576707 - DNA, 33 bp, Homo sapien
tcaacttcagtgctacaaccatttagaactgga

SEQ ID NO: 576708 - DNA, 33 bp, Homo sapien
tcaacttcagtgctacgaccatttagaactgga

SEQ ID NO: 576709 - DNA, 33 bp, Homo sapien
aataaagatggcagccaagggatgtaattttgg

SEQ ID NO: 576710 - DNA, 33 bp, Homo sapien
aataaagatggcagccgagggatgtaattttgg

SEQ ID NO: 576711 - DNA, 33 bp, Homo sapien
ttacataacagggagaaaagacagaaattaaaa

SEQ ID NO: 576712 - DNA, 33 bp, Homo sapien
ttacataacagggagataagacagaaattaaaa

SEQ ID NO: 576713 - DNA, 33 bp, Homo sapien
tccaaaggatacacagacgtggagctgaaggag

SEQ ID NO: 576714 - DNA, 33 bp, Homo sapien
tccaaaggatacacaggcgtggagctgaaggag

SEQ ID NO: 576715 - DNA, 33 bp, Homo sapien
gacttagtgatcatgcaattcaaggctctcact

SEQ ID NO: 576716 - DNA, 33 bp, Homo sapien
gacttagtgatcatgccattcaaggctctcact

SEQ ID NO: 576717 - DNA, 33 bp, Homo sapien
gtgtcccacagaataacgtatccttgtataacc

SEQ ID NO: 576718 - DNA, 33 bp, Homo sapien
gtgtcccacagaataatgtatccttgtataacc

SEQ ID NO: 576719 - DNA, 33 bp, Homo sapien
aacaaaaaaagttaaacctgtctgaaggtgaaa

SEQ ID NO: 576720 - DNA, 33 bp, Homo sapien
aacaaaaaaagttaaagctgtctgaaggtgaaa

SEQ ID NO: 576721 - DNA, 33 bp, Homo sapien
ttccacttgggggcaaaggagcaatatatttac

SEQ ID NO: 576722 - DNA, 33 bp, Homo sapien
ttccacttgggggcaagggagcaatatatttac

SEQ ID NO: 576723 - DNA, 33 bp, Homo sapien
attctctgtttgactccaccgtggaaactaaaa

SEQ ID NO: 576724 - DNA, 33 bp, Homo sapien
attctctgtttgactctaccgtggaaactaaaa

SEQ ID NO: 576725 - DNA, 33 bp, Homo sapien
tatgtggatgtgatacaaatatagataagacaa

SEQ ID NO: 576726 - DNA, 33 bp, Homo sapien
tatgtggatgtgatacgaatatagataagacaa

SEQ ID NO: 576727 - DNA, 33 bp, Homo sapien
gtctgttcaattattacacccacaaattcactt

SEQ ID NO: 576728 - DNA, 33 bp, Homo sapien
gtctgttcaattattatacccacaaattcactt

SEQ ID NO: 576729 - DNA, 33 bp, Homo sapien
gctgttgtatgctatcaccatttatttatatac

SEQ ID NO: 576730 - DNA, 33 bp, Homo sapien
gctgttgtatgctatcgccatttatttatatac

SEQ ID NO: 576731 - DNA, 33 bp, Homo sapien
gtattgcaagagaatcaaaagcaatgtaaaaga

SEQ ID NO: 576732 - DNA, 33 bp, Homo sapien
gtattgcaagagaatcgaaagcaatgtaaaaga

SEQ ID NO: 576733 - DNA, 33 bp, Homo sapien
acacaggattgatttccctttggccaagtacaa

SEQ ID NO: 576734 - DNA, 33 bp, Homo sapien
acacaggattgatttctctttggccaagtacaa

SEQ ID NO: 576735 - DNA, 33 bp, Homo sapien
tggtgcaggcaatgggaattttcaaaggtcaat

SEQ ID NO: 576736 - DNA, 33 bp, Homo sapien
tggtgcaggcaatggggattttcaaaggtcaat

SEQ ID NO: 576737 - DNA, 33 bp, Homo sapien
tattaagtactctggacgattttcataaaggtg

SEQ ID NO: 576738 - DNA, 33 bp, Homo sapien
tattaagtactctggatgattttcataaaggtg

SEQ ID NO: 576739 - DNA, 33 bp, Homo sapien
gataaatatttagaaacggatcagagtcattct

SEQ ID NO: 576740 - DNA, 33 bp, Homo sapien
gataaatatttagaaagggatcagagtcattct

SEQ ID NO: 576741 - DNA, 33 bp, Homo sapien
actgtagcagcttgtgcaacgtgaagaacaaag

SEQ ID NO: 576742 - DNA, 33 bp, Homo sapien
actgtagcagcttgtgtaacgtgaagaacaaag

SEQ ID NO: 576743 - DNA, 33 bp, Homo sapien
atacaagaagcgagaggagagacctgctactaa

SEQ ID NO: 576744 - DNA, 33 bp, Homo sapien
atacaagaagcgagagtagagacctgctactaa

SEQ ID NO: 576745 - DNA, 33 bp, Homo sapien
taatttagtgatttgaaaaaagctgaattttgt

SEQ ID NO: 576746 - DNA, 33 bp, Homo sapien
taatttagtgatttgataaaagctgaattttgt

SEQ ID NO: 576747 - DNA, 33 bp, Homo sapien
ggatggcctgattagggacattccaccaaggag

SEQ ID NO: 576748 - DNA, 33 bp, Homo sapien
ggatggcctgattaggtacattccaccaaggag

SEQ ID NO: 576749 - DNA, 33 bp, Homo sapien
gaccaaggtaagattcgcttctgacccgtttgt

SEQ ID NO: 576750 - DNA, 33 bp, Homo sapien
gaccaaggtaagattctcttctgacccgtttgt

SEQ ID NO: 576751 - DNA, 33 bp, Homo sapien
ggagcaaaattgcccccagcttaaagccactgg

SEQ ID NO: 576752 - DNA, 33 bp, Homo sapien
ggagcaaaattgcccctagcttaaagccactgg

SEQ ID NO: 576753 - DNA, 33 bp, Homo sapien
cacagactaacatcacagatctaaaactttact

SEQ ID NO: 576754 - DNA, 33 bp, Homo sapien
cacagactaacatcacggatctaaaactttact

SEQ ID NO: 576755 - DNA, 33 bp, Homo sapien
atgaaaggtaaatgtaagaattgcctgagtttt

SEQ ID NO: 576756 - DNA, 33 bp, Homo sapien
atgaaaggtaaatgtacgaattgcctgagtttt

SEQ ID NO: 576757 - DNA, 33 bp, Homo sapien
cttctaagggtatttgaaaggcttttgctttgt

SEQ ID NO: 576758 - DNA, 33 bp, Homo sapien
cttctaagggtatttggaaggcttttgctttgt

SEQ ID NO: 576759 - DNA, 33 bp, Homo sapien
ctagtcaagtggatcaatagttttaatcggaga

SEQ ID NO: 576760 - DNA, 33 bp, Homo sapien
ctagtcaagtggatcagtagttttaatcggaga

SEQ ID NO: 576761 - DNA, 33 bp, Homo sapien
tgattggatagttggcaatcaacttagctttca

SEQ ID NO: 576762 - DNA, 33 bp, Homo sapien
tgattggatagttggcgatcaacttagctttca

SEQ ID NO: 576763 - DNA, 33 bp, Homo sapien
tgggtctaaggtaaggcaaaagcgtacaagatt

SEQ ID NO: 576764 - DNA, 33 bp, Homo sapien
tgggtctaaggtaaggtaaaagcgtacaagatt

SEQ ID NO: 576765 - DNA, 33 bp, Homo sapien
tatgagattcaagccaaagaaattatctcagtg

SEQ ID NO: 576766 - DNA, 33 bp, Homo sapien
tatgagattcaagccagagaaattatctcagtg

SEQ ID NO: 576767 - DNA, 33 bp, Homo sapien
ctagggaattaaaataagtctgagcccagcagc

SEQ ID NO: 576768 - DNA, 33 bp, Homo sapien
ctagggaattaaaatatgtctgagcccagcagc

SEQ ID NO: 576769 - DNA, 33 bp, Homo sapien
tgaaaagtgatatagcacctgactctgactcag

SEQ ID NO: 576770 - DNA, 33 bp, Homo sapien
tgaaaagtgatatagcgcctgactctgactcag

SEQ ID NO: 576771 - DNA, 33 bp, Homo sapien
aagaggaaactctaaaagtgtaagatctttgta

SEQ ID NO: 576772 - DNA, 33 bp, Homo sapien
aagaggaaactctaaacgtgtaagatctttgta

SEQ ID NO: 576773 - DNA, 33 bp, Homo sapien
tggctgtcagctgttacctctgggagaaaggat

SEQ ID NO: 576774 - DNA, 33 bp, Homo sapien
tggctgtcagctgttatctctgggagaaaggat

SEQ ID NO: 576775 - DNA, 33 bp, Homo sapien
cagtaaaactcctttacgtcttgctcaccctcc

SEQ ID NO: 576776 - DNA, 33 bp, Homo sapien
cagtaaaactcctttatgtcttgctcaccctcc

SEQ ID NO: 576777 - DNA, 33 bp, Homo sapien
tttggacttggattggccactgaatcacccctt

SEQ ID NO: 576778 - DNA, 33 bp, Homo sapien
tttggacttggattggtcactgaatcacccctt

SEQ ID NO: 576779 - DNA, 33 bp, Homo sapien
acaattctatgtgcaactgggaatcattcattt

SEQ ID NO: 576780 - DNA, 33 bp, Homo sapien
acaattctatgtgcaattgggaatcattcattt

SEQ ID NO: 576781 - DNA, 33 bp, Homo sapien
ttgagatacagaagacaaggacactcatgtagc

SEQ ID NO: 576782 - DNA, 33 bp, Homo sapien
ttgagatacagaagacgaggacactcatgtagc

SEQ ID NO: 576783 - DNA, 33 bp, Homo sapien
gacaagcaatggcatacgggaaagcttgtttta

SEQ ID NO: 576784 - DNA, 33 bp, Homo sapien
gacaagcaatggcatatgggaaagcttgtttta

SEQ ID NO: 576785 - DNA, 33 bp, Homo sapien
gcactttgaagatggaaatagagatgccaggag

SEQ ID NO: 576786 - DNA, 33 bp, Homo sapien
gcactttgaagatggagatagagatgccaggag

SEQ ID NO: 576787 - DNA, 33 bp, Homo sapien
tggctgtttgctttcacaatatatggtggaggg

SEQ ID NO: 576788 - DNA, 33 bp, Homo sapien
tggctgtttgctttcagaatatatggtggaggg

SEQ ID NO: 576789 - DNA, 33 bp, Homo sapien
ttccagaagaattcagaacaaaaagacacgcaa

SEQ ID NO: 576790 - DNA, 33 bp, Homo sapien
ttccagaagaattcaggacaaaaagacacgcaa

SEQ ID NO: 576791 - DNA, 33 bp, Homo sapien
atgccttgcgcagatgaagctttttgtcttagg

SEQ ID NO: 576792 - DNA, 33 bp, Homo sapien
atgccttgcgcagatggagctttttgtcttagg

SEQ ID NO: 576793 - DNA, 33 bp, Homo sapien
accattctaacatagcacatctgcacttactgc

SEQ ID NO: 576794 - DNA, 33 bp, Homo sapien
accattctaacatagcgcatctgcacttactgc

SEQ ID NO: 576795 - DNA, 33 bp, Homo sapien
ctcatcaaaactcagaataacagatcctggcca

SEQ ID NO: 576796 - DNA, 33 bp, Homo sapien
ctcatcaaaactcagagtaacagatcctggcca

SEQ ID NO: 576797 - DNA, 33 bp, Homo sapien
gaaagtgctcagtcaacgtagtatctttgagca

SEQ ID NO: 576798 - DNA, 33 bp, Homo sapien
gaaagtgctcagtcaaggtagtatctttgagca

SEQ ID NO: 576799 - DNA, 33 bp, Homo sapien
gcagtgtttaattgctgacccaataaggtcatt

SEQ ID NO: 576800 - DNA, 33 bp, Homo sapien
gcagtgtttaattgcttacccaataaggtcatt

SEQ ID NO: 576801 - DNA, 33 bp, Homo sapien
aaagattactgataccgatagaccaggctggaa

SEQ ID NO: 576802 - DNA, 33 bp, Homo sapien
aaagattactgatacctatagaccaggctggaa

SEQ ID NO: 576803 - DNA, 33 bp, Homo sapien
tgtaaaactagctcacaaaaattcctcatattt

SEQ ID NO: 576804 - DNA, 33 bp, Homo sapien
tgtaaaactagctcacgaaaattcctcatattt

SEQ ID NO: 576805 - DNA, 33 bp, Homo sapien
agatatacttgcaacacggaaattggcaaatgc

SEQ ID NO: 576806 - DNA, 33 bp, Homo sapien
agatatacttgcaacatggaaattggcaaatgc

SEQ ID NO: 576807 - DNA, 33 bp, Homo sapien
catggaaaagagcaaaaatgcctggtcaaccta

SEQ ID NO: 576808 - DNA, 33 bp, Homo sapien
catggaaaagagcaaatatgcctggtcaaccta

SEQ ID NO: 576809 - DNA, 33 bp, Homo sapien
tttggtttactctcaacaggcttttgataagtc

SEQ ID NO: 576810 - DNA, 33 bp, Homo sapien
tttggtttactctcaagaggcttttgataagtc

SEQ ID NO: 576811 - DNA, 33 bp, Homo sapien
ggtcagagggacatcaccaacatcttgccagta

SEQ ID NO: 576812 - DNA, 33 bp, Homo sapien
ggtcagagggacatcagcaacatcttgccagta

SEQ ID NO: 576813 - DNA, 33 bp, Homo sapien
atcccagcagagggaaaggatgtgtatgtacac

SEQ ID NO: 576814 - DNA, 33 bp, Homo sapien
atcccagcagagggaagggatgtgtatgtacac

SEQ ID NO: 576815 - DNA, 33 bp, Homo sapien
atggtaactatgtaaaatactgcatatgttaat

SEQ ID NO: 576816 - DNA, 33 bp, Homo sapien
atggtaactatgtaaattactgcatatgttaat

SEQ ID NO: 576817 - DNA, 33 bp, Homo sapien
gatttcagtttcactaagtgcttagaaatttct

SEQ ID NO: 576818 - DNA, 33 bp, Homo sapien
gatttcagtttcactaggtgcttagaaatttct

SEQ ID NO: 576819 - DNA, 33 bp, Homo sapien
tacctactctttgcaacatgctgtagtcaatgc

SEQ ID NO: 576820 - DNA, 33 bp, Homo sapien
tacctactctttgcaagatgctgtagtcaatgc

SEQ ID NO: 576821 - DNA, 33 bp, Homo sapien
taactattcacctgacactaaatgctagaagac

SEQ ID NO: 576822 - DNA, 33 bp, Homo sapien
taactattcacctgacgctaaatgctagaagac

SEQ ID NO: 576823 - DNA, 33 bp, Homo sapien
ggacacggaattcaaaaaggctcacactctagg

SEQ ID NO: 576824 - DNA, 33 bp, Homo sapien
ggacacggaattcaaagaggctcacactctagg

SEQ ID NO: 576825 - DNA, 33 bp, Homo sapien
aaaggcaggtcaactacgagacaatgtaccttg

SEQ ID NO: 576826 - DNA, 33 bp, Homo sapien
aaaggcaggtcaactatgagacaatgtaccttg

SEQ ID NO: 576827 - DNA, 33 bp, Homo sapien
cttcactatctaattccccagagtaaccttgca

SEQ ID NO: 576828 - DNA, 33 bp, Homo sapien
cttcactatctaattcgccagagtaaccttgca

SEQ ID NO: 576829 - DNA, 33 bp, Homo sapien
tgtgctggatcttcaccaagcatttgttaaact

SEQ ID NO: 576830 - DNA, 33 bp, Homo sapien
tgtgctggatcttcactaagcatttgttaaact

SEQ ID NO: 576831 - DNA, 33 bp, Homo sapien
catgaaatatttgttacaaacattggcattgga

SEQ ID NO: 576832 - DNA, 33 bp, Homo sapien
catgaaatatttgttataaacattggcattgga

SEQ ID NO: 576833 - DNA, 33 bp, Homo sapien
caagtcattaggttaccggaaatatgattgtga

SEQ ID NO: 576834 - DNA, 33 bp, Homo sapien
caagtcattaggttactggaaatatgattgtga

SEQ ID NO: 576835 - DNA, 33 bp, Homo sapien
caataggtagtttttccctcgctcttctggtag

SEQ ID NO: 576836 - DNA, 33 bp, Homo sapien
caataggtagtttttctctcgctcttctggtag

SEQ ID NO: 576837 - DNA, 33 bp, Homo sapien
gagactttggaagacactaatccattagaaaaa

SEQ ID NO: 576838 - DNA, 33 bp, Homo sapien
gagactttggaagacattaatccattagaaaaa

SEQ ID NO: 576839 - DNA, 33 bp, Homo sapien
ttttcaggctcaccaacaaacactatatttgta

SEQ ID NO: 576840 - DNA, 33 bp, Homo sapien
ttttcaggctcaccaataaacactatatttgta

SEQ ID NO: 576841 - DNA, 33 bp, Homo sapien
ggctattgagagggagaaagtttaagggaatca

SEQ ID NO: 576842 - DNA, 33 bp, Homo sapien
ggctattgagagggaggaagtttaagggaatca

SEQ ID NO: 576843 - DNA, 33 bp, Homo sapien
ttcccatgaggactaacaaacttgtgtggggaa

SEQ ID NO: 576844 - DNA, 33 bp, Homo sapien
ttcccatgaggactaataaacttgtgtggggaa

SEQ ID NO: 576845 - DNA, 33 bp, Homo sapien
gtctgctgagctactacggagtcacaaatgaca

SEQ ID NO: 576846 - DNA, 33 bp, Homo sapien
gtctgctgagctactatggagtcacaaatgaca

SEQ ID NO: 576847 - DNA, 33 bp, Homo sapien
gaccaaattcccaccacgtgctaggaactagaa

SEQ ID NO: 576848 - DNA, 33 bp, Homo sapien
gaccaaattcccaccatgtgctaggaactagaa

SEQ ID NO: 576849 - DNA, 33 bp, Homo sapien
cagagatatgactctacgctgagatcgctaaga

SEQ ID NO: 576850 - DNA, 33 bp, Homo sapien
cagagatatgactctatgctgagatcgctaaga

SEQ ID NO: 576851 - DNA, 33 bp, Homo sapien
agacttaagttgtaacaaagccaagttcttgcc

SEQ ID NO: 576852 - DNA, 33 bp, Homo sapien
agacttaagttgtaacgaagccaagttcttgcc

SEQ ID NO: 576853 - DNA, 33 bp, Homo sapien
agccatacacttaccaaacaaccagatttgatg

SEQ ID NO: 576854 - DNA, 33 bp, Homo sapien
agccatacacttaccatacaaccagatttgatg

SEQ ID NO: 576855 - DNA, 33 bp, Homo sapien
taatgaggtgtgattacgttaagtggaaggaga

SEQ ID NO: 576856 - DNA, 33 bp, Homo sapien
taatgaggtgtgattatgttaagtggaaggaga

SEQ ID NO: 576857 - DNA, 33 bp, Homo sapien
gccaggcaaacaactcgctagcacagttggcaa

SEQ ID NO: 576858 - DNA, 33 bp, Homo sapien
gccaggcaaacaactctctagcacagttggcaa

SEQ ID NO: 576859 - DNA, 33 bp, Homo sapien
tatcaaaggcaaatacagcaaaaaattactctt

SEQ ID NO: 576860 - DNA, 33 bp, Homo sapien
tatcaaaggcaaatacggcaaaaaattactctt

SEQ ID NO: 576861 - DNA, 33 bp, Homo sapien
cagattcagcatctaacatgtgtttcttaagcc

SEQ ID NO: 576862 - DNA, 33 bp, Homo sapien
cagattcagcatctaatatgtgtttcttaagcc

SEQ ID NO: 576863 - DNA, 33 bp, Homo sapien
cattattatggacacaaaactatgacatctcta

SEQ ID NO: 576864 - DNA, 33 bp, Homo sapien
cattattatggacacagaactatgacatctcta

SEQ ID NO: 576865 - DNA, 33 bp, Homo sapien
ggcctgtggaagaaaagaaaaaagttcactcct

SEQ ID NO: 576866 - DNA, 33 bp, Homo sapien
ggcctgtggaagaaaataaaaaagttcactcct

SEQ ID NO: 576867 - DNA, 33 bp, Homo sapien
atgacacagagcctcaaaatatgtaattttaac

SEQ ID NO: 576868 - DNA, 33 bp, Homo sapien
atgacacagagcctcagaatatgtaattttaac

SEQ ID NO: 576869 - DNA, 33 bp, Homo sapien
ataggtcttttgtataacttctgtgttctgtgg

SEQ ID NO: 576870 - DNA, 33 bp, Homo sapien
ataggtcttttgtatagcttctgtgttctgtgg

SEQ ID NO: 576871 - DNA, 33 bp, Homo sapien
attctgatggccagcaatcctaattccctgtaa

SEQ ID NO: 576872 - DNA, 33 bp, Homo sapien
attctgatggccagcagtcctaattccctgtaa

SEQ ID NO: 576873 - DNA, 33 bp, Homo sapien
gctcattccttgcagaaggctaagaaagagaaa

SEQ ID NO: 576874 - DNA, 33 bp, Homo sapien
gctcattccttgcagatggctaagaaagagaaa

SEQ ID NO: 576875 - DNA, 33 bp, Homo sapien
gagccagatgttaacaaggtgccacctcctcct

SEQ ID NO: 576876 - DNA, 33 bp, Homo sapien
gagccagatgttaacatggtgccacctcctcct

SEQ ID NO: 576877 - DNA, 33 bp, Homo sapien
gataaagaagtccccaaatcagttaactgcaaa

SEQ ID NO: 576878 - DNA, 33 bp, Homo sapien
gataaagaagtccccagatcagttaactgcaaa

SEQ ID NO: 576879 - DNA, 33 bp, Homo sapien
tgtctatatcatctcaaaggatctaagaatggt

SEQ ID NO: 576880 - DNA, 33 bp, Homo sapien
tgtctatatcatctcagaggatctaagaatggt

SEQ ID NO: 576881 - DNA, 33 bp, Homo sapien
atggatacttcaaaaactatcactcataaatgc

SEQ ID NO: 576882 - DNA, 33 bp, Homo sapien
atggatacttcaaaaattatcactcataaatgc

SEQ ID NO: 576883 - DNA, 33 bp, Homo sapien
tcatgtttctgcctcaacaaaataccaactgct

SEQ ID NO: 576884 - DNA, 33 bp, Homo sapien
tcatgtttctgcctcagcaaaataccaactgct

SEQ ID NO: 576885 - DNA, 33 bp, Homo sapien
gacaacttctacattgacaaaacacttctacct

SEQ ID NO: 576886 - DNA, 33 bp, Homo sapien
gacaacttctacattggcaaaacacttctacct

SEQ ID NO: 576887 - DNA, 33 bp, Homo sapien
ccaatcataagcaaaacatcacacaggcccaga

SEQ ID NO: 576888 - DNA, 33 bp, Homo sapien
ccaatcataagcaaaagatcacacaggcccaga

SEQ ID NO: 576889 - DNA, 33 bp, Homo sapien
agatctttttattgtaagctcagtgtaaaaata

SEQ ID NO: 576890 - DNA, 33 bp, Homo sapien
agatctttttattgtaggctcagtgtaaaaata

SEQ ID NO: 576891 - DNA, 33 bp, Homo sapien
aactttcccaagatggaatgtagtaaacctgag

SEQ ID NO: 576892 - DNA, 33 bp, Homo sapien
aactttcccaagatgggatgtagtaaacctgag

SEQ ID NO: 576893 - DNA, 33 bp, Homo sapien
aaggtccattacaatccatcatgttctaacagg

SEQ ID NO: 576894 - DNA, 33 bp, Homo sapien
aaggtccattacaatctatcatgttctaacagg

SEQ ID NO: 576895 - DNA, 33 bp, Homo sapien
ttacaactgcaactaacgtgttcttttctaaaa

SEQ ID NO: 576896 - DNA, 33 bp, Homo sapien
ttacaactgcaactaatgtgttcttttctaaaa

SEQ ID NO: 576897 - DNA, 33 bp, Homo sapien
gttataaccagtggccaaatgagaacaatattt

SEQ ID NO: 576898 - DNA, 33 bp, Homo sapien
gttataaccagtggccgaatgagaacaatattt

SEQ ID NO: 576899 - DNA, 33 bp, Homo sapien
tgttttctcagtgcccaggaatctttgaagaat

SEQ ID NO: 576900 - DNA, 33 bp, Homo sapien
tgttttctcagtgcccgggaatctttgaagaat

SEQ ID NO: 576901 - DNA, 33 bp, Homo sapien
taatgcatcgtatatccgacttcaaatattttt

SEQ ID NO: 576902 - DNA, 33 bp, Homo sapien
taatgcatcgtatatctgacttcaaatattttt

SEQ ID NO: 576903 - DNA, 33 bp, Homo sapien
catttcacatcactctcaaggaaacagagaggg

SEQ ID NO: 576904 - DNA, 33 bp, Homo sapien
catttcacatcactctgaaggaaacagagaggg

SEQ ID NO: 576905 - DNA, 33 bp, Homo sapien
catatggcaatctcagaagtctaagagacagaa

SEQ ID NO: 576906 - DNA, 33 bp, Homo sapien
catatggcaatctcaggagtctaagagacagaa

SEQ ID NO: 576907 - DNA, 33 bp, Homo sapien
tagggtcagtccaaagccattttctgctttggg

SEQ ID NO: 576908 - DNA, 33 bp, Homo sapien
tagggtcagtccaaagtcattttctgctttggg

SEQ ID NO: 576909 - DNA, 33 bp, Homo sapien
ctctgcttcttttctacagtatctacttcattc

SEQ ID NO: 576910 - DNA, 33 bp, Homo sapien
ctctgcttcttttctagagtatctacttcattc

SEQ ID NO: 576911 - DNA, 33 bp, Homo sapien
aactctcaatctgttgaaaaacattaaatctga

SEQ ID NO: 576912 - DNA, 33 bp, Homo sapien
aactctcaatctgttggaaaacattaaatctga

SEQ ID NO: 576913 - DNA, 33 bp, Homo sapien
ttaatgcttaaccaacagggacttactggaaat

SEQ ID NO: 576914 - DNA, 33 bp, Homo sapien
ttaatgcttaaccaacggggacttactggaaat

SEQ ID NO: 576915 - DNA, 33 bp, Homo sapien
tcccagtcaactagcacattcttgtttcaactc

SEQ ID NO: 576916 - DNA, 33 bp, Homo sapien
tcccagtcaactagcatattcttgtttcaactc

SEQ ID NO: 576917 - DNA, 33 bp, Homo sapien
caccagtcagaatgacaggaacctccacaggca

SEQ ID NO: 576918 - DNA, 33 bp, Homo sapien
caccagtcagaatgacgggaacctccacaggca

SEQ ID NO: 576919 - DNA, 33 bp, Homo sapien
gaatacaaaaagtgttcaaaactatgcttaata

SEQ ID NO: 576920 - DNA, 33 bp, Homo sapien
gaatacaaaaagtgtttaaaactatgcttaata

SEQ ID NO: 576921 - DNA, 33 bp, Homo sapien
atttgaccacaaagaaagggagatttagagagt

SEQ ID NO: 576922 - DNA, 33 bp, Homo sapien
atttgaccacaaagaaggggagatttagagagt

SEQ ID NO: 576923 - DNA, 33 bp, Homo sapien
gctagtgataattaccacccaaactttattgat

SEQ ID NO: 576924 - DNA, 33 bp, Homo sapien
gctagtgataattacctcccaaactttattgat

SEQ ID NO: 576925 - DNA, 33 bp, Homo sapien
gcacacagatacagggaacccatgctccagaat

SEQ ID NO: 576926 - DNA, 33 bp, Homo sapien
gcacacagatacagggcacccatgctccagaat

SEQ ID NO: 576927 - DNA, 33 bp, Homo sapien
cttggtcaccaacttacaacaactgatttatga

SEQ ID NO: 576928 - DNA, 33 bp, Homo sapien
cttggtcaccaacttataacaactgatttatga

SEQ ID NO: 576929 - DNA, 33 bp, Homo sapien
agagactgcccaaaaaaattcaggacataaaag

SEQ ID NO: 576930 - DNA, 33 bp, Homo sapien
agagactgcccaaaaacattcaggacataaaag

SEQ ID NO: 576931 - DNA, 33 bp, Homo sapien
gcagagagcctgattacggtctcacacagtcct

SEQ ID NO: 576932 - DNA, 33 bp, Homo sapien
gcagagagcctgattatggtctcacacagtcct

SEQ ID NO: 576933 - DNA, 33 bp, Homo sapien
gtctatgactgcctccgcattacagtggcagag

SEQ ID NO: 576934 - DNA, 33 bp, Homo sapien
gtctatgactgcctcctcattacagtggcagag

SEQ ID NO: 576935 - DNA, 33 bp, Homo sapien
caaaaattatatgacacgcaaaaattacatgaa

SEQ ID NO: 576936 - DNA, 33 bp, Homo sapien
caaaaattatatgacatgcaaaaattacatgaa

SEQ ID NO: 576937 - DNA, 33 bp, Homo sapien
tggagagaaggtaagaatcatataacaccagaa

SEQ ID NO: 576938 - DNA, 33 bp, Homo sapien
tggagagaaggtaagactcatataacaccagaa

SEQ ID NO: 576939 - DNA, 33 bp, Homo sapien
aagtctcatttaactacgctgcttttagaaaat

SEQ ID NO: 576940 - DNA, 33 bp, Homo sapien
aagtctcatttaactatgctgcttttagaaaat

SEQ ID NO: 576941 - DNA, 33 bp, Homo sapien
ttctcagatatactgcaaaaactatgaaaagga

SEQ ID NO: 576942 - DNA, 33 bp, Homo sapien
ttctcagatatactgcgaaaactatgaaaagga

SEQ ID NO: 576943 - DNA, 33 bp, Homo sapien
caagtctctacagacaaatagattacggataga

SEQ ID NO: 576944 - DNA, 33 bp, Homo sapien
caagtctctacagacagatagattacggataga

SEQ ID NO: 576945 - DNA, 33 bp, Homo sapien
tggttggcaagtagagaaatcaacatgagatta

SEQ ID NO: 576946 - DNA, 33 bp, Homo sapien
tggttggcaagtagaggaatcaacatgagatta

SEQ ID NO: 576947 - DNA, 33 bp, Homo sapien
ctagcttttctttgtaggtctgataaaattcag

SEQ ID NO: 576948 - DNA, 33 bp, Homo sapien
ctagcttttctttgtatgtctgataaaattcag

SEQ ID NO: 576949 - DNA, 33 bp, Homo sapien
cttggcgttagggtgacgctaccttcacagaat

SEQ ID NO: 576950 - DNA, 33 bp, Homo sapien
cttggcgttagggtgatgctaccttcacagaat

SEQ ID NO: 576951 - DNA, 33 bp, Homo sapien
taattcaccacaatcaagtaggtttcatcccta

SEQ ID NO: 576952 - DNA, 33 bp, Homo sapien
taattcaccacaatcaggtaggtttcatcccta

SEQ ID NO: 576953 - DNA, 33 bp, Homo sapien
tgatggcacatcctcacaatcttgaacccctac

SEQ ID NO: 576954 - DNA, 33 bp, Homo sapien
tgatggcacatcctcataatcttgaacccctac

SEQ ID NO: 576955 - DNA, 33 bp, Homo sapien
tgtagatttcaacatgacaaaagtgccgggcca

SEQ ID NO: 576956 - DNA, 33 bp, Homo sapien
tgtagatttcaacatggcaaaagtgccgggcca

SEQ ID NO: 576957 - DNA, 33 bp, Homo sapien
tcaagatccaactcaggattacatgtctccttc

SEQ ID NO: 576958 - DNA, 33 bp, Homo sapien
tcaagatccaactcagtattacatgtctccttc

SEQ ID NO: 576959 - DNA, 33 bp, Homo sapien
ggcatattattgttcccgaatgataggtgaaga

SEQ ID NO: 576960 - DNA, 33 bp, Homo sapien
ggcatattattgttcctgaatgataggtgaaga

SEQ ID NO: 576961 - DNA, 33 bp, Homo sapien
gaagtcagatgttcaaaagtcttcaagaaagac

SEQ ID NO: 576962 - DNA, 33 bp, Homo sapien
gaagtcagatgttcaagagtcttcaagaaagac

SEQ ID NO: 576963 - DNA, 33 bp, Homo sapien
catgcctgctggaaaccctttggtacattttgg

SEQ ID NO: 576964 - DNA, 33 bp, Homo sapien
catgcctgctggaaacgctttggtacattttgg

SEQ ID NO: 576965 - DNA, 33 bp, Homo sapien
aaaatattacttcagcaccttagaaatctacaa

SEQ ID NO: 576966 - DNA, 33 bp, Homo sapien
aaaatattacttcagcgccttagaaatctacaa

SEQ ID NO: 576967 - DNA, 33 bp, Homo sapien
taagtcaagctatggcaaaaatggagaaatcta

SEQ ID NO: 576968 - DNA, 33 bp, Homo sapien
taagtcaagctatggcgaaaatggagaaatcta

SEQ ID NO: 576969 - DNA, 33 bp, Homo sapien
tatgagaattaccaaactgtgtcacaagacatg

SEQ ID NO: 576970 - DNA, 33 bp, Homo sapien
tatgagaattaccaaattgtgtcacaagacatg

SEQ ID NO: 576971 - DNA, 33 bp, Homo sapien
caatggtgtcatactaaagagtgtttcattatg

SEQ ID NO: 576972 - DNA, 33 bp, Homo sapien
caatggtgtcatactacagagtgtttcattatg

SEQ ID NO: 576973 - DNA, 33 bp, Homo sapien
ttaacaatttgcaaaacacattctacctactac

SEQ ID NO: 576974 - DNA, 33 bp, Homo sapien
ttaacaatttgcaaaatacattctacctactac

SEQ ID NO: 576975 - DNA, 33 bp, Homo sapien
ttgtgactttgccacagtaatagttatgcgtat

SEQ ID NO: 576976 - DNA, 33 bp, Homo sapien
ttgtgactttgccacattaatagttatgcgtat

SEQ ID NO: 576977 - DNA, 33 bp, Homo sapien
aagcccagtggaagacaagtggattttttttct

SEQ ID NO: 576978 - DNA, 33 bp, Homo sapien
aagcccagtggaagacgagtggattttttttct

SEQ ID NO: 576979 - DNA, 33 bp, Homo sapien
ggaaagaagcgatgaccattcttagcagaaaga

SEQ ID NO: 576980 - DNA, 33 bp, Homo sapien
ggaaagaagcgatgactattcttagcagaaaga

SEQ ID NO: 576981 - DNA, 33 bp, Homo sapien
cagacctttgctgagccatgattatcctttatc

SEQ ID NO: 576982 - DNA, 33 bp, Homo sapien
cagacctttgctgagcgatgattatcctttatc

SEQ ID NO: 576983 - DNA, 33 bp, Homo sapien
aggtgaccgggtaccacgcttttgattaattag

SEQ ID NO: 576984 - DNA, 33 bp, Homo sapien
aggtgaccgggtaccatgcttttgattaattag

SEQ ID NO: 576985 - DNA, 33 bp, Homo sapien
gagcaagaatacaatacggatggtagaaaaaac

SEQ ID NO: 576986 - DNA, 33 bp, Homo sapien
gagcaagaatacaatatggatggtagaaaaaac

SEQ ID NO: 576987 - DNA, 33 bp, Homo sapien
actgtagagccagtgacagccggtctccagcag

SEQ ID NO: 576988 - DNA, 33 bp, Homo sapien
actgtagagccagtgatagccggtctccagcag

SEQ ID NO: 576989 - DNA, 33 bp, Homo sapien
aatgatgggtttgatgaaaaagagtctgcactc

SEQ ID NO: 576990 - DNA, 33 bp, Homo sapien
aatgatgggtttgatgcaaaagagtctgcactc

SEQ ID NO: 576991 - DNA, 33 bp, Homo sapien
agcccaggttaaatgcccatctttgacgcacag

SEQ ID NO: 576992 - DNA, 33 bp, Homo sapien
agcccaggttaaatgctcatctttgacgcacag

SEQ ID NO: 576993 - DNA, 33 bp, Homo sapien
agttccagaagtcatacgtaaactatcacaagc

SEQ ID NO: 576994 - DNA, 33 bp, Homo sapien
agttccagaagtcatatgtaaactatcacaagc

SEQ ID NO: 576995 - DNA, 33 bp, Homo sapien
aaggtcacatttcaagaattttatgcagactat

SEQ ID NO: 576996 - DNA, 33 bp, Homo sapien
aaggtcacatttcaaggattttatgcagactat

SEQ ID NO: 576997 - DNA, 33 bp, Homo sapien
acttctctgacatacaagctcagcctgccaagc

SEQ ID NO: 576998 - DNA, 33 bp, Homo sapien
acttctctgacatacacgctcagcctgccaagc

SEQ ID NO: 576999 - DNA, 33 bp, Homo sapien
gtccacagtccaagctgaactggagtatttcca

SEQ ID NO: 577000 - DNA, 33 bp, Homo sapien
gtccacagtccaagcttaactggagtatttcca

SEQ ID NO: 577001 - DNA, 33 bp, Homo sapien
tgagtatcactacataactggctgtagcaacgt

SEQ ID NO: 577002 - DNA, 33 bp, Homo sapien
tgagtatcactacatatctggctgtagcaacgt

SEQ ID NO: 577003 - DNA, 33 bp, Homo sapien
actgttttttcacttacggtactactttgtaaa

SEQ ID NO: 577004 - DNA, 33 bp, Homo sapien
actgttttttcacttatggtactactttgtaaa

SEQ ID NO: 577005 - DNA, 33 bp, Homo sapien
tcagcggtaattccacaatgtcactctttcagc

SEQ ID NO: 577006 - DNA, 33 bp, Homo sapien
tcagcggtaattccacgatgtcactctttcagc

SEQ ID NO: 577007 - DNA, 33 bp, Homo sapien
ccatgcaaggacctccaaagacctaatgcccca

SEQ ID NO: 577008 - DNA, 33 bp, Homo sapien
ccatgcaaggacctccgaagacctaatgcccca

SEQ ID NO: 577009 - DNA, 33 bp, Homo sapien
gcctgacaaataggaagcatatcgttaacacta

SEQ ID NO: 577010 - DNA, 33 bp, Homo sapien
gcctgacaaataggaatcatatcgttaacacta

SEQ ID NO: 577011 - DNA, 33 bp, Homo sapien
atttttcagcctagaagagaggttatggaatcc

SEQ ID NO: 577012 - DNA, 33 bp, Homo sapien
atttttcagcctagaatagaggttatggaatcc

SEQ ID NO: 577013 - DNA, 33 bp, Homo sapien
tctaggctgaaaaatgacaagtacactggacta

SEQ ID NO: 577014 - DNA, 33 bp, Homo sapien
tctaggctgaaaaatggcaagtacactggacta

SEQ ID NO: 577015 - DNA, 33 bp, Homo sapien
catgattcccatcagacaaatgaggaaactaag

SEQ ID NO: 577016 - DNA, 33 bp, Homo sapien
catgattcccatcagataaatgaggaaactaag

SEQ ID NO: 577017 - DNA, 33 bp, Homo sapien
tccccaaggatgttgaagttcaattcccacaaa

SEQ ID NO: 577018 - DNA, 33 bp, Homo sapien
tccccaaggatgttgaggttcaattcccacaaa

SEQ ID NO: 577019 - DNA, 33 bp, Homo sapien
atacatacatcattaaccttgaagcttcacttt

SEQ ID NO: 577020 - DNA, 33 bp, Homo sapien
atacatacatcattaatcttgaagcttcacttt

SEQ ID NO: 577021 - DNA, 33 bp, Homo sapien
gagaggatcaaattaaataatgttggctgtgtg

SEQ ID NO: 577022 - DNA, 33 bp, Homo sapien
gagaggatcaaattaagtaatgttggctgtgtg

SEQ ID NO: 577023 - DNA, 33 bp, Homo sapien
actggttcagtactcacgcacaagtagtggctg

SEQ ID NO: 577024 - DNA, 33 bp, Homo sapien
actggttcagtactcatgcacaagtagtggctg

SEQ ID NO: 577025 - DNA, 33 bp, Homo sapien
aaaccttaatcgtgcaaatttcttgggggatga

SEQ ID NO: 577026 - DNA, 33 bp, Homo sapien
aaaccttaatcgtgcagatttcttgggggatga

SEQ ID NO: 577027 - DNA, 33 bp, Homo sapien
aggtgcatgtgaccaaccaggctaatttttaaa

SEQ ID NO: 577028 - DNA, 33 bp, Homo sapien
aggtgcatgtgaccaatcaggctaatttttaaa

SEQ ID NO: 577029 - DNA, 33 bp, Homo sapien
tttcagtgacagataaatagaatcaactcaaaa

SEQ ID NO: 577030 - DNA, 33 bp, Homo sapien
tttcagtgacagataattagaatcaactcaaaa

SEQ ID NO: 577031 - DNA, 33 bp, Homo sapien
aatagcctttattaaaaattttgtgatatgaag

SEQ ID NO: 577032 - DNA, 33 bp, Homo sapien
aatagcctttattaaacattttgtgatatgaag

SEQ ID NO: 577033 - DNA, 33 bp, Homo sapien
aggtccctctatggtaagttcaggaattctagg

SEQ ID NO: 577034 - DNA, 33 bp, Homo sapien
aggtccctctatggtatgttcaggaattctagg

SEQ ID NO: 577035 - DNA, 33 bp, Homo sapien
tacaacaaacccctacaacatgagtttacctat

SEQ ID NO: 577036 - DNA, 33 bp, Homo sapien
tacaacaaacccctacgacatgagtttacctat

SEQ ID NO: 577037 - DNA, 33 bp, Homo sapien
gtggcttttgtagagacggagtccctgaccatg

SEQ ID NO: 577038 - DNA, 33 bp, Homo sapien
gtggcttttgtagagatggagtccctgaccatg

SEQ ID NO: 577039 - DNA, 33 bp, Homo sapien
atgaagtagaaactgaaaaaagcatacgaaacc

SEQ ID NO: 577040 - DNA, 33 bp, Homo sapien
atgaagtagaaactgagaaaagcatacgaaacc

SEQ ID NO: 577041 - DNA, 33 bp, Homo sapien
ttttgcatttacagaccgaatttcttcaataca

SEQ ID NO: 577042 - DNA, 33 bp, Homo sapien
ttttgcatttacagactgaatttcttcaataca

SEQ ID NO: 577043 - DNA, 33 bp, Homo sapien
tctaggtttttaaccactacgttagcatagctt

SEQ ID NO: 577044 - DNA, 33 bp, Homo sapien
tctaggtttttaaccattacgttagcatagctt

SEQ ID NO: 577045 - DNA, 33 bp, Homo sapien
ctttcttctttgaaaaggtctctgaactccatt

SEQ ID NO: 577046 - DNA, 33 bp, Homo sapien
ctttcttctttgaaaatgtctctgaactccatt

SEQ ID NO: 577047 - DNA, 33 bp, Homo sapien
tttcttaatacagaccagcagtttcttgtaacg

SEQ ID NO: 577048 - DNA, 33 bp, Homo sapien
tttcttaatacagaccggcagtttcttgtaacg

SEQ ID NO: 577049 - DNA, 33 bp, Homo sapien
gaagacaccagtaagccccatgttttttgtttt

SEQ ID NO: 577050 - DNA, 33 bp, Homo sapien
gaagacaccagtaagcgccatgttttttgtttt

SEQ ID NO: 577051 - DNA, 33 bp, Homo sapien
attgtttgaaaaatatcaagtgctgttttgatg

SEQ ID NO: 577052 - DNA, 33 bp, Homo sapien
attgtttgaaaaatatgaagtgctgttttgatg

SEQ ID NO: 577053 - DNA, 33 bp, Homo sapien
ttggtcttttaaggaaagtaactgtgagcccag

SEQ ID NO: 577054 - DNA, 33 bp, Homo sapien
ttggtcttttaaggaatgtaactgtgagcccag

SEQ ID NO: 577055 - DNA, 33 bp, Homo sapien
tcatagaaatgcaaatcagaatgacaatgagat

SEQ ID NO: 577056 - DNA, 33 bp, Homo sapien
tcatagaaatgcaaatgagaatgacaatgagat

SEQ ID NO: 577057 - DNA, 33 bp, Homo sapien
ggattgctgggttttgaatggtagttctgtttt

SEQ ID NO: 577058 - DNA, 33 bp, Homo sapien
ggattgctgggttttgcatggtagttctgtttt

SEQ ID NO: 577059 - DNA, 33 bp, Homo sapien
tactgtgtaagttgaaattagtaatctggaaga

SEQ ID NO: 577060 - DNA, 33 bp, Homo sapien
tactgtgtaagttgaatttagtaatctggaaga

SEQ ID NO: 577061 - DNA, 33 bp, Homo sapien
ttggatgttttaaaaaatatcttccatgcctct

SEQ ID NO: 577062 - DNA, 33 bp, Homo sapien
ttggatgttttaaaaattatcttccatgcctct

SEQ ID NO: 577063 - DNA, 33 bp, Homo sapien
cctcaggtctttgatacaatgtcatttaatcag

SEQ ID NO: 577064 - DNA, 33 bp, Homo sapien
cctcaggtctttgatataatgtcatttaatcag

SEQ ID NO: 577065 - DNA, 33 bp, Homo sapien
ctccagtatcttagaacgcagacatgagttagt

SEQ ID NO: 577066 - DNA, 33 bp, Homo sapien
ctccagtatcttagaatgcagacatgagttagt

SEQ ID NO: 577067 - DNA, 33 bp, Homo sapien
taattgaattatggctaagaactccacaaaatt

SEQ ID NO: 577068 - DNA, 33 bp, Homo sapien
taattgaattatggctgagaactccacaaaatt

SEQ ID NO: 577069 - DNA, 33 bp, Homo sapien
cagacacatcacaagccgcatgaaatatatgtt

SEQ ID NO: 577070 - DNA, 33 bp, Homo sapien
cagacacatcacaagctgcatgaaatatatgtt

SEQ ID NO: 577071 - DNA, 33 bp, Homo sapien
ggacccaattcaaagtaactgggaggtgataat

SEQ ID NO: 577072 - DNA, 33 bp, Homo sapien
ggacccaattcaaagtcactgggaggtgataat

SEQ ID NO: 577073 - DNA, 33 bp, Homo sapien
tatagccagtacacaacgtaagccaaatcagaa

SEQ ID NO: 577074 - DNA, 33 bp, Homo sapien
tatagccagtacacaatgtaagccaaatcagaa

SEQ ID NO: 577075 - DNA, 33 bp, Homo sapien
attaaaatagacctgaaataacttggctgctaa

SEQ ID NO: 577076 - DNA, 33 bp, Homo sapien
attaaaatagacctgagataacttggctgctaa

SEQ ID NO: 577077 - DNA, 33 bp, Homo sapien
tcagtaataagagaccgcattgctgcatttcca

SEQ ID NO: 577078 - DNA, 33 bp, Homo sapien
tcagtaataagagacctcattgctgcatttcca

SEQ ID NO: 577079 - DNA, 33 bp, Homo sapien
ttttctaagctcttgaaaattattaatccattt

SEQ ID NO: 577080 - DNA, 33 bp, Homo sapien
ttttctaagctcttgacaattattaatccattt

SEQ ID NO: 577081 - DNA, 33 bp, Homo sapien
ctgaggtatagaggaaaaaaggatatctccatg

SEQ ID NO: 577082 - DNA, 33 bp, Homo sapien
ctgaggtatagaggaataaaggatatctccatg

SEQ ID NO: 577083 - DNA, 33 bp, Homo sapien
ggcaacatttgtctaaactgaacatcagctatt

SEQ ID NO: 577084 - DNA, 33 bp, Homo sapien
ggcaacatttgtctaatctgaacatcagctatt

SEQ ID NO: 577085 - DNA, 33 bp, Homo sapien
actgctcactaattagacagtcacataaactca

SEQ ID NO: 577086 - DNA, 33 bp, Homo sapien
actgctcactaattaggcagtcacataaactca

SEQ ID NO: 577087 - DNA, 33 bp, Homo sapien
ggcttcatatactctacctctcaggttacaact

SEQ ID NO: 577088 - DNA, 33 bp, Homo sapien
ggcttcatatactctatctctcaggttacaact

SEQ ID NO: 577089 - DNA, 33 bp, Homo sapien
taggtggaagatctacacacgaaagtgacgtat

SEQ ID NO: 577090 - DNA, 33 bp, Homo sapien
taggtggaagatctacgcacgaaagtgacgtat

SEQ ID NO: 577091 - DNA, 33 bp, Homo sapien
aatccttacaagaaccccaagtggtagatatga

SEQ ID NO: 577092 - DNA, 33 bp, Homo sapien
aatccttacaagaaccgcaagtggtagatatga

SEQ ID NO: 577093 - DNA, 33 bp, Homo sapien
gggctgagatctcctacagtcaagttacctctg

SEQ ID NO: 577094 - DNA, 33 bp, Homo sapien
gggctgagatctcctatagtcaagttacctctg

SEQ ID NO: 577095 - DNA, 33 bp, Homo sapien
atttactgaatccttaccatgttctagaacaat

SEQ ID NO: 577096 - DNA, 33 bp, Homo sapien
atttactgaatccttatcatgttctagaacaat

SEQ ID NO: 577097 - DNA, 33 bp, Homo sapien
ggaggtactcaagtcactctataacaacctctc

SEQ ID NO: 577098 - DNA, 33 bp, Homo sapien
ggaggtactcaagtcagtctataacaacctctc

SEQ ID NO: 577099 - DNA, 33 bp, Homo sapien
taagggcaatggggaccgccactattttataaa

SEQ ID NO: 577100 - DNA, 33 bp, Homo sapien
taagggcaatggggactgccactattttataaa

SEQ ID NO: 577101 - DNA, 33 bp, Homo sapien
aagggggataatgttaaaccattcaggagaaac

SEQ ID NO: 577102 - DNA, 33 bp, Homo sapien
aagggggataatgttagaccattcaggagaaac

SEQ ID NO: 577103 - DNA, 33 bp, Homo sapien
agggttgggggttgtacagcctcacaggtggaa

SEQ ID NO: 577104 - DNA, 33 bp, Homo sapien
agggttgggggttgtatagcctcacaggtggaa

SEQ ID NO: 577105 - DNA, 33 bp, Homo sapien
tcactgacagtaatgacatgcagggctattcaa

SEQ ID NO: 577106 - DNA, 33 bp, Homo sapien
tcactgacagtaatgatatgcagggctattcaa

SEQ ID NO: 577107 - DNA, 33 bp, Homo sapien
tggcagagtccttgcaacttacttaacccaaag

SEQ ID NO: 577108 - DNA, 33 bp, Homo sapien
tggcagagtccttgcagcttacttaacccaaag

SEQ ID NO: 577109 - DNA, 33 bp, Homo sapien
tgccgctgaatttatccagacaatccaggataa

SEQ ID NO: 577110 - DNA, 33 bp, Homo sapien
tgccgctgaatttatctagacaatccaggataa

SEQ ID NO: 577111 - DNA, 33 bp, Homo sapien
attcatcagataaggaactttgccctggatggt

SEQ ID NO: 577112 - DNA, 33 bp, Homo sapien
attcatcagataaggagctttgccctggatggt

SEQ ID NO: 577113 - DNA, 33 bp, Homo sapien
tggcttatctcaacaaacctacctggaaataga

SEQ ID NO: 577114 - DNA, 33 bp, Homo sapien
tggcttatctcaacaaccctacctggaaataga

SEQ ID NO: 577115 - DNA, 33 bp, Homo sapien
atgtctcttttcagaaattaaaggtgtgaagct

SEQ ID NO: 577116 - DNA, 33 bp, Homo sapien
atgtctcttttcagaacttaaaggtgtgaagct

SEQ ID NO: 577117 - DNA, 33 bp, Homo sapien
gtcccaaatggcaataaggctgaggttgaaaag

SEQ ID NO: 577118 - DNA, 33 bp, Homo sapien
gtcccaaatggcaatagggctgaggttgaaaag

SEQ ID NO: 577119 - DNA, 33 bp, Homo sapien
gttgagttgtagtcaacgggttagaactcagta

SEQ ID NO: 577120 - DNA, 33 bp, Homo sapien
gttgagttgtagtcaatgggttagaactcagta

SEQ ID NO: 577121 - DNA, 33 bp, Homo sapien
tgtgtttatcaaaacacacggtaggctttagtt

SEQ ID NO: 577122 - DNA, 33 bp, Homo sapien
tgtgtttatcaaaacagacggtaggctttagtt

SEQ ID NO: 577123 - DNA, 33 bp, Homo sapien
catttcccttagtagagcagggattgccaaact

SEQ ID NO: 577124 - DNA, 33 bp, Homo sapien
catttcccttagtagatcagggattgccaaact

SEQ ID NO: 577125 - DNA, 33 bp, Homo sapien
aaacctccactcttacacctggagagctcattt

SEQ ID NO: 577126 - DNA, 33 bp, Homo sapien
aaacctccactcttacgcctggagagctcattt

SEQ ID NO: 577127 - DNA, 33 bp, Homo sapien
tttaggaatactagaaagatgagctcctctcta

SEQ ID NO: 577128 - DNA, 33 bp, Homo sapien
tttaggaatactagaaggatgagctcctctcta

SEQ ID NO: 577129 - DNA, 33 bp, Homo sapien
aggtggaggggatagaagcattcctgttgtgct

SEQ ID NO: 577130 - DNA, 33 bp, Homo sapien
aggtggaggggatagaggcattcctgttgtgct

SEQ ID NO: 577131 - DNA, 33 bp, Homo sapien
tgcagggctagtacccaatcatttcaccaagga

SEQ ID NO: 577132 - DNA, 33 bp, Homo sapien
tgcagggctagtacccgatcatttcaccaagga

SEQ ID NO: 577133 - DNA, 33 bp, Homo sapien
gccatgagaggaacaaagaactctaggggacag

SEQ ID NO: 577134 - DNA, 33 bp, Homo sapien
gccatgagaggaacaaggaactctaggggacag

SEQ ID NO: 577135 - DNA, 33 bp, Homo sapien
ctccaaaaccaccatccaggtacatatcaccat

SEQ ID NO: 577136 - DNA, 33 bp, Homo sapien
ctccaaaaccaccatcgaggtacatatcaccat

SEQ ID NO: 577137 - DNA, 33 bp, Homo sapien
ctaccaggttcaatgccgacaagtgccaaaatg

SEQ ID NO: 577138 - DNA, 33 bp, Homo sapien
ctaccaggttcaatgctgacaagtgccaaaatg

SEQ ID NO: 577139 - DNA, 33 bp, Homo sapien
agggaggctgcgaaatcaggtaaaagatcatac

SEQ ID NO: 577140 - DNA, 33 bp, Homo sapien
agggaggctgcgaaattaggtaaaagatcatac

SEQ ID NO: 577141 - DNA, 33 bp, Homo sapien
gtttacttggctacaaacaaaaaaccaaagcca

SEQ ID NO: 577142 - DNA, 33 bp, Homo sapien
gtttacttggctacaagcaaaaaaccaaagcca

SEQ ID NO: 577143 - DNA, 33 bp, Homo sapien
tgaactcacctttaaacttgggatgcttccttc

SEQ ID NO: 577144 - DNA, 33 bp, Homo sapien
tgaactcacctttaaatttgggatgcttccttc

SEQ ID NO: 577145 - DNA, 33 bp, Homo sapien
tggaaaaaacaagaggccacttttgagccagga

SEQ ID NO: 577146 - DNA, 33 bp, Homo sapien
tggaaaaaacaagaggtcacttttgagccagga

SEQ ID NO: 577147 - DNA, 33 bp, Homo sapien
agacatatctcagttaagttttagcctcaccag

SEQ ID NO: 577148 - DNA, 33 bp, Homo sapien
agacatatctcagttaggttttagcctcaccag

SEQ ID NO: 577149 - DNA, 33 bp, Homo sapien
gcaagagaagccaagagaagagagtggatttag

SEQ ID NO: 577150 - DNA, 33 bp, Homo sapien
gcaagagaagccaagataagagagtggatttag

SEQ ID NO: 577151 - DNA, 33 bp, Homo sapien
atttttgaaagttgaaacctcgtagtggatatt

SEQ ID NO: 577152 - DNA, 33 bp, Homo sapien
atttttgaaagttgaagcctcgtagtggatatt

SEQ ID NO: 577153 - DNA, 33 bp, Homo sapien
ggtggaagaagtcagaaataaaagacaacatac

SEQ ID NO: 577154 - DNA, 33 bp, Homo sapien
ggtggaagaagtcagacataaaagacaacatac

SEQ ID NO: 577155 - DNA, 33 bp, Homo sapien
taggagtaagtaatcaagcaagggaaagagtat

SEQ ID NO: 577156 - DNA, 33 bp, Homo sapien
taggagtaagtaatcacgcaagggaaagagtat

SEQ ID NO: 577157 - DNA, 33 bp, Homo sapien
aagacctagtagataacgaatggtccctgcctt

SEQ ID NO: 577158 - DNA, 33 bp, Homo sapien
aagacctagtagataatgaatggtccctgcctt

SEQ ID NO: 577159 - DNA, 33 bp, Homo sapien
gtaagaaagaagtacaagtgtttctgactgctc

SEQ ID NO: 577160 - DNA, 33 bp, Homo sapien
gtaagaaagaagtacaggtgtttctgactgctc

SEQ ID NO: 577161 - DNA, 33 bp, Homo sapien
atgagcatccaaaagaagtatctggagggagat

SEQ ID NO: 577162 - DNA, 33 bp, Homo sapien
atgagcatccaaaagacgtatctggagggagat

SEQ ID NO: 577163 - DNA, 33 bp, Homo sapien
cccagagacaggaaaacctcgggcttgatgaag

SEQ ID NO: 577164 - DNA, 33 bp, Homo sapien
cccagagacaggaaaatctcgggcttgatgaag

SEQ ID NO: 577165 - DNA, 33 bp, Homo sapien
tttagaggtttgctaacgggataaaatgaaata

SEQ ID NO: 577166 - DNA, 33 bp, Homo sapien
tttagaggtttgctaatgggataaaatgaaata

SEQ ID NO: 577167 - DNA, 33 bp, Homo sapien
catgtttgaaaatgctaaattgttggaagtaaa

SEQ ID NO: 577168 - DNA, 33 bp, Homo sapien
catgtttgaaaatgcttaattgttggaagtaaa

SEQ ID NO: 577169 - DNA, 33 bp, Homo sapien
agcctctctggctgaaaacattttttaattcac

SEQ ID NO: 577170 - DNA, 33 bp, Homo sapien
agcctctctggctgaatacattttttaattcac

SEQ ID NO: 577171 - DNA, 33 bp, Homo sapien
gtcccctttccccttcacttgctggactctaga

SEQ ID NO: 577172 - DNA, 33 bp, Homo sapien
gtcccctttccccttcgcttgctggactctaga

SEQ ID NO: 577173 - DNA, 33 bp, Homo sapien
ggctgtgcaattggcacgtattctctgacccct

SEQ ID NO: 577174 - DNA, 33 bp, Homo sapien
ggctgtgcaattggcatgtattctctgacccct

SEQ ID NO: 577175 - DNA, 33 bp, Homo sapien
aggtgctattgtactacgttaaataatccacta

SEQ ID NO: 577176 - DNA, 33 bp, Homo sapien
aggtgctattgtactaggttaaataatccacta

SEQ ID NO: 577177 - DNA, 33 bp, Homo sapien
tgtatccagcacagatgataagcaaaccctgga

SEQ ID NO: 577178 - DNA, 33 bp, Homo sapien
tgtatccagcacagattataagcaaaccctgga

SEQ ID NO: 577179 - DNA, 33 bp, Homo sapien
acaaaagcttaacaaacgttcacaaatggatag

SEQ ID NO: 577180 - DNA, 33 bp, Homo sapien
acaaaagcttaacaaatgttcacaaatggatag

SEQ ID NO: 577181 - DNA, 33 bp, Homo sapien
aactgcaaaactttaaacatagtgattctaggt

SEQ ID NO: 577182 - DNA, 33 bp, Homo sapien
aactgcaaaactttaagcatagtgattctaggt

SEQ ID NO: 577183 - DNA, 33 bp, Homo sapien
gcattctgggaactgaaagcagctcgtaggact

SEQ ID NO: 577184 - DNA, 33 bp, Homo sapien
gcattctgggaactgagagcagctcgtaggact

SEQ ID NO: 577185 - DNA, 33 bp, Homo sapien
cgcccaggtctgagcccaaagcctgagctgttt

SEQ ID NO: 577186 - DNA, 33 bp, Homo sapien
cgcccaggtctgagccgaaagcctgagctgttt

SEQ ID NO: 577187 - DNA, 33 bp, Homo sapien
tgaattttatggcactcaatgagatgtgatttc

SEQ ID NO: 577188 - DNA, 33 bp, Homo sapien
tgaattttatggcacttaatgagatgtgatttc

SEQ ID NO: 577189 - DNA, 33 bp, Homo sapien
ctgcaataagtcctcacgggtgtaatcaacatg

SEQ ID NO: 577190 - DNA, 33 bp, Homo sapien
ctgcaataagtcctcatgggtgtaatcaacatg

SEQ ID NO: 577191 - DNA, 33 bp, Homo sapien
aaggccatcagaaaggaagagatgaagtagcca

SEQ ID NO: 577192 - DNA, 33 bp, Homo sapien
aaggccatcagaaagggagagatgaagtagcca

SEQ ID NO: 577193 - DNA, 33 bp, Homo sapien
gctgctttccccaaaacaatgccccctgtcagc

SEQ ID NO: 577194 - DNA, 33 bp, Homo sapien
gctgctttccccaaaataatgccccctgtcagc

SEQ ID NO: 577195 - DNA, 33 bp, Homo sapien
agcagttaagagcaacaatcatccctatcctaa

SEQ ID NO: 577196 - DNA, 33 bp, Homo sapien
agcagttaagagcaaccatcatccctatcctaa

SEQ ID NO: 577197 - DNA, 33 bp, Homo sapien
caaagagataatctacaggaaatatttgcaaac

SEQ ID NO: 577198 - DNA, 33 bp, Homo sapien
caaagagataatctacgggaaatatttgcaaac

SEQ ID NO: 577199 - DNA, 33 bp, Homo sapien
tggactttttggccaccgtaactgccttttaaa

SEQ ID NO: 577200 - DNA, 33 bp, Homo sapien
tggactttttggccactgtaactgccttttaaa

SEQ ID NO: 577201 - DNA, 33 bp, Homo sapien
cctaaagttgcaaataacatttttatccccact

SEQ ID NO: 577202 - DNA, 33 bp, Homo sapien
cctaaagttgcaaatatcatttttatccccact

SEQ ID NO: 577203 - DNA, 33 bp, Homo sapien
aagcctattaaagtgaataactttccaagattc

SEQ ID NO: 577204 - DNA, 33 bp, Homo sapien
aagcctattaaagtgagtaactttccaagattc

SEQ ID NO: 577205 - DNA, 33 bp, Homo sapien
ataagactgtttctcccaacattgtcaatcttc

SEQ ID NO: 577206 - DNA, 33 bp, Homo sapien
ataagactgtttctcctaacattgtcaatcttc

SEQ ID NO: 577207 - DNA, 33 bp, Homo sapien
ttcctcttctgtcaagacatcctttgcctctcc

SEQ ID NO: 577208 - DNA, 33 bp, Homo sapien
ttcctcttctgtcaaggcatcctttgcctctcc

SEQ ID NO: 577209 - DNA, 33 bp, Homo sapien
cacacacacttgcacaaaacagatgacaaaccc

SEQ ID NO: 577210 - DNA, 33 bp, Homo sapien
cacacacacttgcacagaacagatgacaaaccc

SEQ ID NO: 577211 - DNA, 33 bp, Homo sapien
gataagtaatttgtcccaagtcatactagtaag

SEQ ID NO: 577212 - DNA, 33 bp, Homo sapien
gataagtaatttgtccgaagtcatactagtaag

SEQ ID NO: 577213 - DNA, 33 bp, Homo sapien
gactgagtggattcaacagtcattaagcaaaat

SEQ ID NO: 577214 - DNA, 33 bp, Homo sapien
gactgagtggattcaatagtcattaagcaaaat

SEQ ID NO: 577215 - DNA, 33 bp, Homo sapien
acttaagaccaggcacagcacaataaatacaga

SEQ ID NO: 577216 - DNA, 33 bp, Homo sapien
acttaagaccaggcaccgcacaataaatacaga

SEQ ID NO: 577217 - DNA, 33 bp, Homo sapien
tgaaatgctctggaaaatctcagtaatagaatt

SEQ ID NO: 577218 - DNA, 33 bp, Homo sapien
tgaaatgctctggaaagtctcagtaatagaatt

SEQ ID NO: 577219 - DNA, 33 bp, Homo sapien
gtgtgaaaattacagagcacaaaggtatttgca

SEQ ID NO: 577220 - DNA, 33 bp, Homo sapien
gtgtgaaaattacagatcacaaaggtatttgca

SEQ ID NO: 577221 - DNA, 33 bp, Homo sapien
acagagatgtgttgtacctggaaggaggagagg

SEQ ID NO: 577222 - DNA, 33 bp, Homo sapien
acagagatgtgttgtatctggaaggaggagagg

SEQ ID NO: 577223 - DNA, 33 bp, Homo sapien
aagtgaagcatgctgaaaagcaagggtcaaagt

SEQ ID NO: 577224 - DNA, 33 bp, Homo sapien
aagtgaagcatgctgacaagcaagggtcaaagt

SEQ ID NO: 577225 - DNA, 33 bp, Homo sapien
ggaagactaaagccaacacgcccagtgcatgac

SEQ ID NO: 577226 - DNA, 33 bp, Homo sapien
ggaagactaaagccaatacgcccagtgcatgac

SEQ ID NO: 577227 - DNA, 33 bp, Homo sapien
actttttaatcagtgaaataaatgacaaggcaa

SEQ ID NO: 577228 - DNA, 33 bp, Homo sapien
actttttaatcagtgacataaatgacaaggcaa

SEQ ID NO: 577229 - DNA, 33 bp, Homo sapien
actcaatgccaggcacaatgctggggacggctg

SEQ ID NO: 577230 - DNA, 33 bp, Homo sapien
actcaatgccaggcacgatgctggggacggctg

SEQ ID NO: 577231 - DNA, 33 bp, Homo sapien
ttaagcactcttccccagcttcttgcagacact

SEQ ID NO: 577232 - DNA, 33 bp, Homo sapien
ttaagcactcttccccggcttcttgcagacact

SEQ ID NO: 577233 - DNA, 33 bp, Homo sapien
agttatagctgtgaaaataacagggtctgttgg

SEQ ID NO: 577234 - DNA, 33 bp, Homo sapien
agttatagctgtgaaagtaacagggtctgttgg

SEQ ID NO: 577235 - DNA, 33 bp, Homo sapien
tgggagtgggaaatgaaattgactgccaaggag

SEQ ID NO: 577236 - DNA, 33 bp, Homo sapien
tgggagtgggaaatgagattgactgccaaggag

SEQ ID NO: 577237 - DNA, 33 bp, Homo sapien
tgccttctccagtccgacaggtggcacacaggt

SEQ ID NO: 577238 - DNA, 33 bp, Homo sapien
tgccttctccagtccgtcaggtggcacacaggt

SEQ ID NO: 577239 - DNA, 33 bp, Homo sapien
tttactgcaattatagccatttctaaccttaat

SEQ ID NO: 577240 - DNA, 33 bp, Homo sapien
tttactgcaattatagtcatttctaaccttaat

SEQ ID NO: 577241 - DNA, 33 bp, Homo sapien
aaggaccttgccaagccgatcgcagtgtttgga

SEQ ID NO: 577242 - DNA, 33 bp, Homo sapien
aaggaccttgccaagctgatcgcagtgtttgga

SEQ ID NO: 577243 - DNA, 33 bp, Homo sapien
atgtctaaaaattttccattgcctgcaagtcac

SEQ ID NO: 577244 - DNA, 33 bp, Homo sapien
atgtctaaaaattttctattgcctgcaagtcac

SEQ ID NO: 577245 - DNA, 33 bp, Homo sapien
gggatttatgaaatgacgcctttgaagtggaag

SEQ ID NO: 577246 - DNA, 33 bp, Homo sapien
gggatttatgaaatgatgcctttgaagtggaag

SEQ ID NO: 577247 - DNA, 33 bp, Homo sapien
tagaatcttacatgacagtaaaaaacaaatatt

SEQ ID NO: 577248 - DNA, 33 bp, Homo sapien
tagaatcttacatgacggtaaaaaacaaatatt

SEQ ID NO: 577249 - DNA, 33 bp, Homo sapien
acaattattacagcaaaggattaaatgaagaaa

SEQ ID NO: 577250 - DNA, 33 bp, Homo sapien
acaattattacagcaagggattaaatgaagaaa

SEQ ID NO: 577251 - DNA, 33 bp, Homo sapien
aacttattgggttggccaagcctggtaaagctg

SEQ ID NO: 577252 - DNA, 33 bp, Homo sapien
aacttattgggttggcgaagcctggtaaagctg

SEQ ID NO: 577253 - DNA, 33 bp, Homo sapien; identical to SEQ ID NO: 577251

SEQ ID NO: 577254 - DNA, 33 bp, Homo sapien; identical to SEQ ID NO: 577252

SEQ ID NO: 577255 - DNA, 33 bp, Homo sapien
ttagtggactctttaacgattgttagcagctgt

SEQ ID NO: 577256 - DNA, 33 bp, Homo sapien
ttagtggactctttaatgattgttagcagctgt

SEQ ID NO: 577257 - DNA, 33 bp, Homo sapien
ggtatcggaaccaatgaattgaggtcctcttgc

SEQ ID NO: 577258 - DNA, 33 bp, Homo sapien
ggtatcggaaccaatgcattgaggtcctcttgc

SEQ ID NO: 577259 - DNA, 33 bp, Homo sapien
agcaacagcactttaaacaggtggctttgttca

SEQ ID NO: 577260 - DNA, 33 bp, Homo sapien
agcaacagcactttaagcaggtggctttgttca

SEQ ID NO: 577261 - DNA, 33 bp, Homo sapien
gaagtaaagcattagagcatgtgtgaaattaaa

SEQ ID NO: 577262 - DNA, 33 bp, Homo sapien
gaagtaaagcattagatcatgtgtgaaattaaa

SEQ ID NO: 577263 - DNA, 33 bp, Homo sapien
ttcaacattcttctgacagaagctacaggcatt

SEQ ID NO: 577264 - DNA, 33 bp, Homo sapien
ttcaacattcttctgagagaagctacaggcatt

SEQ ID NO: 577265 - DNA, 33 bp, Homo sapien
accagattgaagaaccagatgactttcacagga

SEQ ID NO: 577266 - DNA, 33 bp, Homo sapien
accagattgaagaacccgatgactttcacagga

SEQ ID NO: 577267 - DNA, 33 bp, Homo sapien
attggagataaagtccaaggaggtgaactaacc

SEQ ID NO: 577268 - DNA, 33 bp, Homo sapien
attggagataaagtccgaggaggtgaactaacc

SEQ ID NO: 577269 - DNA, 33 bp, Homo sapien
gggcaacttaggaaacacaaagtagaggcgcat

SEQ ID NO: 577270 - DNA, 33 bp, Homo sapien
gggcaacttaggaaacgcaaagtagaggcgcat

SEQ ID NO: 577271 - DNA, 33 bp, Homo sapien
gtgttctagcctttccaactgcgatgtatccgg

SEQ ID NO: 577272 - DNA, 33 bp, Homo sapien
gtgttctagcctttccgactgcgatgtatccgg

SEQ ID NO: 577273 - DNA, 33 bp, Homo sapien
attgagctagcatacgaaaattattcgagtcat

SEQ ID NO: 577274 - DNA, 33 bp, Homo sapien
attgagctagcatacggaaattattcgagtcat

SEQ ID NO: 577275 - DNA, 33 bp, Homo sapien
ttaatcatctgacttcaacttttagtctcgtat

SEQ ID NO: 577276 - DNA, 33 bp, Homo sapien
ttaatcatctgacttccacttttagtctcgtat

SEQ ID NO: 577277 - DNA, 33 bp, Homo sapien
agcagctctaacacaagttatgggacggtgaac

SEQ ID NO: 577278 - DNA, 33 bp, Homo sapien
agcagctctaacacaatttatgggacggtgaac

SEQ ID NO: 577279 - DNA, 33 bp, Homo sapien
agagcctgatttcttaaacactgtatgacactg

SEQ ID NO: 577280 - DNA, 33 bp, Homo sapien
agagcctgatttcttacacactgtatgacactg

SEQ ID NO: 577281 - DNA, 33 bp, Homo sapien
caggaaatgtaagaaaaggtggccagccttgct

SEQ ID NO: 577282 - DNA, 33 bp, Homo sapien
caggaaatgtaagaaacggtggccagccttgct

SEQ ID NO: 577283 - DNA, 33 bp, Homo sapien
ttgctcacataatgcacaagttaacatgaaaat

SEQ ID NO: 577284 - DNA, 33 bp, Homo sapien
ttgctcacataatgcagaagttaacatgaaaat

SEQ ID NO: 577285 - DNA, 33 bp, Homo sapien
aggattgaaatgatgcaacaataaaggtctctc

SEQ ID NO: 577286 - DNA, 33 bp, Homo sapien
aggattgaaatgatgcgacaataaaggtctctc

SEQ ID NO: 577287 - DNA, 33 bp, Homo sapien
ggctacaagacatagaaccagacagttgttaca

SEQ ID NO: 577288 - DNA, 33 bp, Homo sapien
ggctacaagacatagacccagacagttgttaca

SEQ ID NO: 577289 - DNA, 33 bp, Homo sapien
acagataaatctagcacgtacattcccagtgct

SEQ ID NO: 577290 - DNA, 33 bp, Homo sapien
acagataaatctagcatgtacattcccagtgct

SEQ ID NO: 577291 - DNA, 33 bp, Homo sapien
aggtcggggctgaaagcagcaaattatctcctt

SEQ ID NO: 577292 - DNA, 33 bp, Homo sapien
aggtcggggctgaaagtagcaaattatctcctt

SEQ ID NO: 577293 - DNA, 33 bp, Homo sapien
taaacctatcttggaacaaaggttagatgaaaa

SEQ ID NO: 577294 - DNA, 33 bp, Homo sapien
taaacctatcttggaataaaggttagatgaaaa

SEQ ID NO: 577295 - DNA, 33 bp, Homo sapien
ctgtaggggctctgcaaggttgttgtgggtggt

SEQ ID NO: 577296 - DNA, 33 bp, Homo sapien
ctgtaggggctctgcagggttgttgtgggtggt

SEQ ID NO: 577297 - DNA, 33 bp, Homo sapien
ttgtgaggcttggttccctacaactggacagag

SEQ ID NO: 577298 - DNA, 33 bp, Homo sapien
ttgtgaggcttggttctctacaactggacagag

SEQ ID NO: 577299 - DNA, 33 bp, Homo sapien
gtgtggctggaacctaataaggaaaggaacagt

SEQ ID NO: 577300 - DNA, 33 bp, Homo sapien
gtgtggctggaacctagtaaggaaaggaacagt

SEQ ID NO: 577301 - DNA, 33 bp, Homo sapien
gtctagccctggtggaacttacatttcggatca

SEQ ID NO: 577302 - DNA, 33 bp, Homo sapien
gtctagccctggtggagcttacatttcggatca

SEQ ID NO: 577303 - DNA, 33 bp, Homo sapien
acccagaaaatctccaaaccctcaacttcaggg

SEQ ID NO: 577304 - DNA, 33 bp, Homo sapien
acccagaaaatctccagaccctcaacttcaggg

SEQ ID NO: 577305 - DNA, 33 bp, Homo sapien
attggggtcaagtaagacatattctggggaacc

SEQ ID NO: 577306 - DNA, 33 bp, Homo sapien
attggggtcaagtaaggcatattctggggaacc

SEQ ID NO: 577307 - DNA, 33 bp, Homo sapien
catacacaaactaatccaatcatcaatttcaag

SEQ ID NO: 577308 - DNA, 33 bp, Homo sapien
catacacaaactaatcgaatcatcaatttcaag

SEQ ID NO: 577309 - DNA, 33 bp, Homo sapien
attaaacatcaaacaacgaataatgcctccacc

SEQ ID NO: 577310 - DNA, 33 bp, Homo sapien
attaaacatcaaacaatgaataatgcctccacc

SEQ ID NO: 577311 - DNA, 33 bp, Homo sapien
acagcagagtcatttcaatatgagactgaaccg

SEQ ID NO: 577312 - DNA, 33 bp, Homo sapien
acagcagagtcatttccatatgagactgaaccg

SEQ ID NO: 577313 - DNA, 33 bp, Homo sapien
cgagagataagctagcactcatttgcctgctaa

SEQ ID NO: 577314 - DNA, 33 bp, Homo sapien
cgagagataagctagcgctcatttgcctgctaa

SEQ ID NO: 577315 - DNA, 33 bp, Homo sapien
cttcagaaagttcttaacatcactagcttcagt

SEQ ID NO: 577316 - DNA, 33 bp, Homo sapien
cttcagaaagttcttaccatcactagcttcagt

SEQ ID NO: 577317 - DNA, 33 bp, Homo sapien
tttttctttcctattcaatttctatggtcaggt

SEQ ID NO: 577318 - DNA, 33 bp, Homo sapien
tttttctttcctattctatttctatggtcaggt

SEQ ID NO: 577319 - DNA, 33 bp, Homo sapien
gttgatgccatactggaaaaatattctactttt

SEQ ID NO: 577320 - DNA, 33 bp, Homo sapien
gttgatgccatactgggaaaatattctactttt

SEQ ID NO: 577321 - DNA, 33 bp, Homo sapien
cagcctggtgaaattccagtcagatcggttgtc

SEQ ID NO: 577322 - DNA, 33 bp, Homo sapien
cagcctggtgaaattctagtcagatcggttgtc

SEQ ID NO: 577323 - DNA, 33 bp, Homo sapien
cacccacagctctagacgacgtgagagaggcaa

SEQ ID NO: 577324 - DNA, 33 bp, Homo sapien
cacccacagctctagatgacgtgagagaggcaa

SEQ ID NO: 577325 - DNA, 33 bp, Homo sapien
ctgctgctaacaaaaaattgagcattagacagg

SEQ ID NO: 577326 - DNA, 33 bp, Homo sapien
ctgctgctaacaaaaagttgagcattagacagg

SEQ ID NO: 577327 - DNA, 33 bp, Homo sapien
ttcttttgaaataataataggttcacaggaagt

SEQ ID NO: 577328 - DNA, 33 bp, Homo sapien
ttcttttgaaataatagtaggttcacaggaagt

SEQ ID NO: 577329 - DNA, 33 bp, Homo sapien
tataactaataatttcacaatgtgaccttgaaa

SEQ ID NO: 577330 - DNA, 33 bp, Homo sapien
tataactaataatttcgcaatgtgaccttgaaa

SEQ ID NO: 577331 - DNA, 33 bp, Homo sapien
ctgtatacaaggagaacccagttggaaacacct

SEQ ID NO: 577332 - DNA, 33 bp, Homo sapien
ctgtatacaaggagaatccagttggaaacacct

SEQ ID NO: 577333 - DNA, 33 bp, Homo sapien
cagtgcctccatctgccgcaaagcttggctgtg

SEQ ID NO: 577334 - DNA, 33 bp, Homo sapien
cagtgcctccatctgctgcaaagcttggctgtg

SEQ ID NO: 577335 - DNA, 33 bp, Homo sapien
agatcccttaatgtcaagatgtcttaaggggag

SEQ ID NO: 577336 - DNA, 33 bp, Homo sapien
agatcccttaatgtcaggatgtcttaaggggag

SEQ ID NO: 577337 - DNA, 33 bp, Homo sapien
gtaactcaataagcaagacaggcagtttgctca

SEQ ID NO: 577338 - DNA, 33 bp, Homo sapien
gtaactcaataagcaatacaggcagtttgctca

SEQ ID NO: 577339 - DNA, 33 bp, Homo sapien
cacacagccccgctcacaggctctctggatgcc

SEQ ID NO: 577340 - DNA, 33 bp, Homo sapien
cacacagccccgctcataggctctctggatgcc

SEQ ID NO: 577341 - DNA, 33 bp, Homo sapien
ggcctgggtatgtgaaaaaagaggaatcctttc

SEQ ID NO: 577342 - DNA, 33 bp, Homo sapien
ggcctgggtatgtgaagaaagaggaatcctttc

SEQ ID NO: 577343 - DNA, 33 bp, Homo sapien
acaagcccagcttagacagtggagcttgacttt

SEQ ID NO: 577344 - DNA, 33 bp, Homo sapien
acaagcccagcttagagagtggagcttgacttt

SEQ ID NO: 577345 - DNA, 33 bp, Homo sapien
tgtatccttgggtggaaaaatttaggtactaga

SEQ ID NO: 577346 - DNA, 33 bp, Homo sapien
tgtatccttgggtggagaaatttaggtactaga

SEQ ID NO: 577347 - DNA, 33 bp, Homo sapien
gtcccttgcataaaatcatggagaatttgcatg

SEQ ID NO: 577348 - DNA, 33 bp, Homo sapien
gtcccttgcataaaatgatggagaatttgcatg

SEQ ID NO: 577349 - DNA, 33 bp, Homo sapien
ttatcctggtgcctaggaaagggttaagacata

SEQ ID NO: 577350 - DNA, 33 bp, Homo sapien
ttatcctggtgcctagtaaagggttaagacata

SEQ ID NO: 577351 - DNA, 33 bp, Homo sapien
tgtatacgtgtattgccatggaacacataaatg

SEQ ID NO: 577352 - DNA, 33 bp, Homo sapien
tgtatacgtgtattgctatggaacacataaatg

SEQ ID NO: 577353 - DNA, 33 bp, Homo sapien
gtgcagtggcacaaacgctgcttgctacagcct

SEQ ID NO: 577354 - DNA, 33 bp, Homo sapien
gtgcagtggcacaaactctgcttgctacagcct

SEQ ID NO: 577355 - DNA, 33 bp, Homo sapien
ctgaagaaggaatacaagtaaatacagtaaata

SEQ ID NO: 577356 - DNA, 33 bp, Homo sapien
ctgaagaaggaatacaggtaaatacagtaaata

SEQ ID NO: 577357 - DNA, 33 bp, Homo sapien
tacatatttctgcacacagcttttttaaagaag

SEQ ID NO: 577358 - DNA, 33 bp, Homo sapien
tacatatttctgcacatagcttttttaaagaag

SEQ ID NO: 577359 - DNA, 33 bp, Homo sapien
tagaaaaaggactcaagggctacagacttctta

SEQ ID NO: 577360 - DNA, 33 bp, Homo sapien
tagaaaaaggactcaatggctacagacttctta

SEQ ID NO: 577361 - DNA, 33 bp, Homo sapien
ttggttaaagatgtcccactgctgcgtaaacag

SEQ ID NO: 577362 - DNA, 33 bp, Homo sapien
ttggttaaagatgtcctactgctgcgtaaacag

SEQ ID NO: 577363 - DNA, 33 bp, Homo sapien
taaccaaaatgaaaacacattattgcctcgtag

SEQ ID NO: 577364 - DNA, 33 bp, Homo sapien
taaccaaaatgaaaacgcattattgcctcgtag

SEQ ID NO: 577365 - DNA, 33 bp, Homo sapien
tcataacacttccctaacctaatttatcctacg

SEQ ID NO: 577366 - DNA, 33 bp, Homo sapien
tcataacacttccctaccctaatttatcctacg

SEQ ID NO: 577367 - DNA, 33 bp, Homo sapien
gtccaagtcagtggaacagctaagggaggcaac

SEQ ID NO: 577368 - DNA, 33 bp, Homo sapien
gtccaagtcagtggaagagctaagggaggcaac

SEQ ID NO: 577369 - DNA, 33 bp, Homo sapien
gcacagaaccaactacactgaggctggcgcccg

SEQ ID NO: 577370 - DNA, 33 bp, Homo sapien
gcacagaaccaactaccctgaggctggcgcccg

SEQ ID NO: 577371 - DNA, 33 bp, Homo sapien
ctataaatagtttacaaccgcttgaaaagtgct

SEQ ID NO: 577372 - DNA, 33 bp, Homo sapien
ctataaatagtttacacccgcttgaaaagtgct

SEQ ID NO: 577373 - DNA, 33 bp, Homo sapien
aaaccttcaaagcggacgaaatgatacacggtg

SEQ ID NO: 577374 - DNA, 33 bp, Homo sapien
aaaccttcaaagcggatgaaatgatacacggtg

SEQ ID NO: 577375 - DNA, 33 bp, Homo sapien
tcatgtagtcattgaacacctctttaaactctg

SEQ ID NO: 577376 - DNA, 33 bp, Homo sapien
tcatgtagtcattgaatacctctttaaactctg

SEQ ID NO: 577377 - DNA, 33 bp, Homo sapien
atgcacacagttcatccgaggcagggaggcttc

SEQ ID NO: 577378 - DNA, 33 bp, Homo sapien
atgcacacagttcatctgaggcagggaggcttc

SEQ ID NO: 577379 - DNA, 33 bp, Homo sapien
agaggccagctcatagccatcaccaggtgcact

SEQ ID NO: 577380 - DNA, 33 bp, Homo sapien
agaggccagctcatagtcatcaccaggtgcact

SEQ ID NO: 577381 - DNA, 33 bp, Homo sapien
aaacatagcttgattcaacaaatacctaccgag

SEQ ID NO: 577382 - DNA, 33 bp, Homo sapien
aaacatagcttgattcgacaaatacctaccgag

SEQ ID NO: 577383 - DNA, 33 bp, Homo sapien
gcactgagaaccaggaaattaaagccaaattcg

SEQ ID NO: 577384 - DNA, 33 bp, Homo sapien
gcactgagaaccaggatattaaagccaaattcg

SEQ ID NO: 577385 - DNA, 33 bp, Homo sapien
gtaactggttgtgtgacagaagtatgataagac

SEQ ID NO: 577386 - DNA, 33 bp, Homo sapien
gtaactggttgtgtgatagaagtatgataagac

SEQ ID NO: 577387 - DNA, 33 bp, Homo sapien
tgagtgggtgcattacgggggtacacatgattg

SEQ ID NO: 577388 - DNA, 33 bp, Homo sapien
tgagtgggtgcattactggggtacacatgattg

SEQ ID NO: 577389 - DNA, 33 bp, Homo sapien
tcctcagccctccacaatgtagtcatgggctgg

SEQ ID NO: 577390 - DNA, 33 bp, Homo sapien
tcctcagccctccacagtgtagtcatgggctgg

SEQ ID NO: 577391 - DNA, 33 bp, Homo sapien
attagaatgtgatttacagccaaagacatggtt

SEQ ID NO: 577392 - DNA, 33 bp, Homo sapien
attagaatgtgatttatagccaaagacatggtt

SEQ ID NO: 577393 - DNA, 33 bp, Homo sapien
tcatcaggagaggcaacggacacccggtcatca

SEQ ID NO: 577394 - DNA, 33 bp, Homo sapien
tcatcaggagaggcaatggacacccggtcatca

SEQ ID NO: 577395 - DNA, 33 bp, Homo sapien
tagacataaggtgggaccaaaaaagccagacac

SEQ ID NO: 577396 - DNA, 33 bp, Homo sapien
tagacataaggtgggatcaaaaaagccagacac

SEQ ID NO: 577397 - DNA, 33 bp, Homo sapien
cgtcggggatgtccaccaaatgggaacattgct

SEQ ID NO: 577398 - DNA, 33 bp, Homo sapien
cgtcggggatgtccactaaatgggaacattgct

SEQ ID NO: 577399 - DNA, 33 bp, Homo sapien
gttgagtactcatgacagagattgtacagttca

SEQ ID NO: 577400 - DNA, 33 bp, Homo sapien
gttgagtactcatgacggagattgtacagttca

SEQ ID NO: 577401 - DNA, 33 bp, Homo sapien
gaagacatgatttgaacggagccacagagaatg

SEQ ID NO: 577402 - DNA, 33 bp, Homo sapien
gaagacatgatttgaatggagccacagagaatg

SEQ ID NO: 577403 - DNA, 33 bp, Homo sapien
gctctgtgactgtctgcatattccacattcctc

SEQ ID NO: 577404 - DNA, 33 bp, Homo sapien
gctctgtgactgtctgtatattccacattcctc

SEQ ID NO: 577405 - DNA, 33 bp, Homo sapien
ctttccgagtttcaaacatctgtgcatccatct

SEQ ID NO: 577406 - DNA, 33 bp, Homo sapien
ctttccgagtttcaaatatctgtgcatccatct

SEQ ID NO: 577407 - DNA, 33 bp, Homo sapien
tcggggaatgaacaacagaatgaactgtcagca

SEQ ID NO: 577408 - DNA, 33 bp, Homo sapien
tcggggaatgaacaaccgaatgaactgtcagca

SEQ ID NO: 577409 - DNA, 33 bp, Homo sapien
caccagcaggatgccacgtttgtagggcgagta

SEQ ID NO: 577410 - DNA, 33 bp, Homo sapien
caccagcaggatgccatgtttgtagggcgagta

SEQ ID NO: 577411 - DNA, 33 bp, Homo sapien
aggaggcaccacaggaaggaaggttagtgaaat

SEQ ID NO: 577412 - DNA, 33 bp, Homo sapien
aggaggcaccacaggacggaaggttagtgaaat

SEQ ID NO: 577413 - DNA, 33 bp, Homo sapien
tgtagagagcttttgcagatgatgagttgccct

SEQ ID NO: 577414 - DNA, 33 bp, Homo sapien
tgtagagagcttttgcggatgatgagttgccct

SEQ ID NO: 577415 - DNA, 33 bp, Homo sapien
tgctgatgttcacttacaagctgtaaagccttt

SEQ ID NO: 577416 - DNA, 33 bp, Homo sapien
tgctgatgttcacttagaagctgtaaagccttt

SEQ ID NO: 577417 - DNA, 33 bp, Homo sapien
ctcctctttgatctgaactttctggcactgtct

SEQ ID NO: 577418 - DNA, 33 bp, Homo sapien
ctcctctttgatctgacctttctggcactgtct

SEQ ID NO: 577419 - DNA, 33 bp, Homo sapien
ttgaatctgggcttgccaggtccagaggcattt

SEQ ID NO: 577420 - DNA, 33 bp, Homo sapien
ttgaatctgggcttgcgaggtccagaggcattt

SEQ ID NO: 577421 - DNA, 33 bp, Homo sapien
tcttggaaccagataggagatgggaaaacatgg

SEQ ID NO: 577422 - DNA, 33 bp, Homo sapien
tcttggaaccagatagtagatgggaaaacatgg

SEQ ID NO: 577423 - DNA, 33 bp, Homo sapien
acctcggggtcaccacagtattggataaaataa

SEQ ID NO: 577424 - DNA, 33 bp, Homo sapien
acctcggggtcaccacggtattggataaaataa

SEQ ID NO: 577425 - DNA, 33 bp, Homo sapien
ttactcaaaggcttgcactagcaaatgtcaagc

SEQ ID NO: 577426 - DNA, 33 bp, Homo sapien
ttactcaaaggcttgctctagcaaatgtcaagc

SEQ ID NO: 577427 - DNA, 33 bp, Homo sapien
attagagactgggccaactgagtagccacaggg

SEQ ID NO: 577428 - DNA, 33 bp, Homo sapien
attagagactgggccagctgagtagccacaggg

SEQ ID NO: 577429 - DNA, 33 bp, Homo sapien
acgtggtatttctttcaaagccggttgcaaacc

SEQ ID NO: 577430 - DNA, 33 bp, Homo sapien
acgtggtatttctttcgaagccggttgcaaacc

SEQ ID NO: 577431 - DNA, 33 bp, Homo sapien
taaccatgtccaccaaaatatttctaactgcag

SEQ ID NO: 577432 - DNA, 33 bp, Homo sapien
taaccatgtccaccaagatatttctaactgcag

SEQ ID NO: 577433 - DNA, 33 bp, Homo sapien
ttccacttcagctgtcaatcatacacttgccca

SEQ ID NO: 577434 - DNA, 33 bp, Homo sapien
ttccacttcagctgtcgatcatacacttgccca

SEQ ID NO: 577435 - DNA, 33 bp, Homo sapien
accccactgaaaaatggaagtcaacaccgatcc

SEQ ID NO: 577436 - DNA, 33 bp, Homo sapien
accccactgaaaaatgtaagtcaacaccgatcc

SEQ ID NO: 577437 - DNA, 33 bp, Homo sapien
cctgccctcatgactcacagggttttacaggga

SEQ ID NO: 577438 - DNA, 33 bp, Homo sapien
cctgccctcatgactcgcagggttttacaggga

SEQ ID NO: 577439 - DNA, 33 bp, Homo sapien
gtccggaaaatggaaacacttaaagctaccttg

SEQ ID NO: 577440 - DNA, 33 bp, Homo sapien
gtccggaaaatggaaatacttaaagctaccttg

SEQ ID NO: 577441 - DNA, 33 bp, Homo sapien
cgtggatgttgtttaaatccctagatccaccca

SEQ ID NO: 577442 - DNA, 33 bp, Homo sapien
cgtggatgttgtttaactccctagatccaccca

SEQ ID NO: 577443 - DNA, 33 bp, Homo sapien
caggtcatataagtgcaatcagtcaggaggcag

SEQ ID NO: 577444 - DNA, 33 bp, Homo sapien
caggtcatataagtgcgatcagtcaggaggcag

SEQ ID NO: 577445 - DNA, 33 bp, Homo sapien
ccgggagatccgaagccgcatttcaagtctgcc

SEQ ID NO: 577446 - DNA, 33 bp, Homo sapien
ccgggagatccgaagctgcatttcaagtctgcc

SEQ ID NO: 577447 - DNA, 33 bp, Homo sapien
ggacagaaaacacttacaactggccagatctgc

SEQ ID NO: 577448 - DNA, 33 bp, Homo sapien
ggacagaaaacacttagaactggccagatctgc

SEQ ID NO: 577449 - DNA, 33 bp, Homo sapien
aggcttgtgctgaccaatggcaggtggttaatc

SEQ ID NO: 577450 - DNA, 33 bp, Homo sapien
aggcttgtgctgaccagtggcaggtggttaatc

SEQ ID NO: 577451 - DNA, 33 bp, Homo sapien
tctttgttaagtgtgacagtgcgattatggtta

SEQ ID NO: 577452 - DNA, 33 bp, Homo sapien
tctttgttaagtgtgagagtgcgattatggtta

SEQ ID NO: 577453 - DNA, 33 bp, Homo sapien
gatgtcattacaattacaatttccacctccatt

SEQ ID NO: 577454 - DNA, 33 bp, Homo sapien
gatgtcattacaattagaatttccacctccatt

SEQ ID NO: 577455 - DNA, 33 bp, Homo sapien
gggccatgaggctggcaaaattggaagagctga

SEQ ID NO: 577456 - DNA, 33 bp, Homo sapien
gggccatgaggctggcgaaattggaagagctga

SEQ ID NO: 577457 - DNA, 33 bp, Homo sapien
tctgttggccacagcaatgataaggagaggaag

SEQ ID NO: 577458 - DNA, 33 bp, Homo sapien
tctgttggccacagcattgataaggagaggaag

SEQ ID NO: 577459 - DNA, 33 bp, Homo sapien
caacagattcaaaactaaactcaagatcttccc

SEQ ID NO: 577460 - DNA, 33 bp, Homo sapien
caacagattcaaaactgaactcaagatcttccc

SEQ ID NO: 577461 - DNA, 33 bp, Homo sapien
aaagttctgaaaacaacacctcgcacaataaat

SEQ ID NO: 577462 - DNA, 33 bp, Homo sapien
aaagttctgaaaacaatacctcgcacaataaat

SEQ ID NO: 577463 - DNA, 33 bp, Homo sapien
gaacggaacacgagagaatctgagaggggcacg

SEQ ID NO: 577464 - DNA, 33 bp, Homo sapien
gaacggaacacgagaggatctgagaggggcacg

SEQ ID NO: 577465 - DNA, 33 bp, Homo sapien
gctgcttctgccacccaaattcttgactcagaa

SEQ ID NO: 577466 - DNA, 33 bp, Homo sapien
gctgcttctgccacccgaattcttgactcagaa

SEQ ID NO: 577467 - DNA, 33 bp, Homo sapien
gaccaccctctgatgccagaacagtcttcctca

SEQ ID NO: 577468 - DNA, 33 bp, Homo sapien
gaccaccctctgatgctagaacagtcttcctca

SEQ ID NO: 577469 - DNA, 33 bp, Homo sapien
accacatggctcctgaacccttggaatgtggct

SEQ ID NO: 577470 - DNA, 33 bp, Homo sapien
accacatggctcctgaccccttggaatgtggct

SEQ ID NO: 577471 - DNA, 33 bp, Homo sapien
tactacaagaaaaaagcattattcccaatttgc

SEQ ID NO: 577472 - DNA, 33 bp, Homo sapien
tactacaagaaaaaagtattattcccaatttgc

SEQ ID NO: 577473 - DNA, 33 bp, Homo sapien
acaacctgagattcacagaagcccttaaaacac

SEQ ID NO: 577474 - DNA, 33 bp, Homo sapien
acaacctgagattcacggaagcccttaaaacac

SEQ ID NO: 577475 - DNA, 33 bp, Homo sapien
gtacatatattcagtaaagtaaacaggattcag

SEQ ID NO: 577476 - DNA, 33 bp, Homo sapien
gtacatatattcagtagagtaaacaggattcag

SEQ ID NO: 577477 - DNA, 33 bp, Homo sapien
catagcacagaaacaaccgaaatactgagcaaa

SEQ ID NO: 577478 - DNA, 33 bp, Homo sapien
catagcacagaaacaatcgaaatactgagcaaa

SEQ ID NO: 577479 - DNA, 33 bp, Homo sapien
tcagctggctgagttccaccttattttgatgca

SEQ ID NO: 577480 - DNA, 33 bp, Homo sapien
tcagctggctgagttctaccttattttgatgca

SEQ ID NO: 577481 - DNA, 33 bp, Homo sapien
cttgtcatatggcacgaagattctgcaccttga

SEQ ID NO: 577482 - DNA, 33 bp, Homo sapien
cttgtcatatggcacggagattctgcaccttga

SEQ ID NO: 577483 - DNA, 33 bp, Homo sapien
tttgcaccagatgaaactcaacaataaaaatgg

SEQ ID NO: 577484 - DNA, 33 bp, Homo sapien
tttgcaccagatgaaattcaacaataaaaatgg

SEQ ID NO: 577485 - DNA, 33 bp, Homo sapien
gagtatcagcagatccgatttatctcagcctgc

SEQ ID NO: 577486 - DNA, 33 bp, Homo sapien
gagtatcagcagatcctatttatctcagcctgc

SEQ ID NO: 577487 - DNA, 33 bp, Homo sapien
cctggatggagatctcactttgtagtaactcac

SEQ ID NO: 577488 - DNA, 33 bp, Homo sapien
cctggatggagatctcgctttgtagtaactcac

SEQ ID NO: 577489 - DNA, 33 bp, Homo sapien
cacccccttaatgacaagtctacactgtgagaa

SEQ ID NO: 577490 - DNA, 33 bp, Homo sapien
cacccccttaatgacaggtctacactgtgagaa

SEQ ID NO: 577491 - DNA, 33 bp, Homo sapien
aattgtatgtatcaaaaaagcatatcgatttta

SEQ ID NO: 577492 - DNA, 33 bp, Homo sapien
aattgtatgtatcaaagaagcatatcgatttta

SEQ ID NO: 577493 - DNA, 33 bp, Homo sapien
aagctcttaagcactgcactcaaaatttaaaat

SEQ ID NO: 577494 - DNA, 33 bp, Homo sapien
aagctcttaagcactgtactcaaaatttaaaat

SEQ ID NO: 577495 - DNA, 33 bp, Homo sapien
ttgcctctttttaaccaggactccagctgcccc

SEQ ID NO: 577496 - DNA, 33 bp, Homo sapien
ttgcctctttttaaccgggactccagctgcccc

SEQ ID NO: 577497 - DNA, 33 bp, Homo sapien
acatgctcatttcctgaaagacaaaagcatgta

SEQ ID NO: 577498 - DNA, 33 bp, Homo sapien
acatgctcatttcctggaagacaaaagcatgta

SEQ ID NO: 577499 - DNA, 33 bp, Homo sapien
ttatgatgttgccataagaattaatccacccgt

SEQ ID NO: 577500 - DNA, 33 bp, Homo sapien
ttatgatgttgccatacgaattaatccacccgt

SEQ ID NO: 577501 - DNA, 33 bp, Homo sapien
gtaaaaagctcctggacgtcaacgtattccccc

SEQ ID NO: 577502 - DNA, 33 bp, Homo sapien
gtaaaaagctcctggatgtcaacgtattccccc

SEQ ID NO: 577503 - DNA, 33 bp, Homo sapien
gtgtgattctgtgcacaaaggtgactgggtttc

SEQ ID NO: 577504 - DNA, 33 bp, Homo sapien
gtgtgattctgtgcacgaaggtgactgggtttc

SEQ ID NO: 577505 - DNA, 33 bp, Homo sapien
ggaggccaaaatgataaatattctcagtgcagc

SEQ ID NO: 577506 - DNA, 33 bp, Homo sapien
ggaggccaaaatgatacatattctcagtgcagc

SEQ ID NO: 577507 - DNA, 33 bp, Homo sapien
actcattttttttgctgaaatgtcagttccacc

SEQ ID NO: 577508 - DNA, 33 bp, Homo sapien
actcattttttttgcttaaatgtcagttccacc

SEQ ID NO: 577509 - DNA, 33 bp, Homo sapien
taaattcactggaggaacttaacaacaagattg

SEQ ID NO: 577510 - DNA, 33 bp, Homo sapien
taaattcactggaggagcttaacaacaagattg

SEQ ID NO: 577511 - DNA, 33 bp, Homo sapien
tggattctgactttcaatcttttcagggattag

SEQ ID NO: 577512 - DNA, 33 bp, Homo sapien
tggattctgactttcagtcttttcagggattag

SEQ ID NO: 577513 - DNA, 33 bp, Homo sapien
acaaagcatgagtaacaattccctgagagcact

SEQ ID NO: 577514 - DNA, 33 bp, Homo sapien
acaaagcatgagtaacgattccctgagagcact

SEQ ID NO: 577515 - DNA, 33 bp, Homo sapien
agcaatgtgagaacagactaaaacaacctcctt

SEQ ID NO: 577516 - DNA, 33 bp, Homo sapien
agcaatgtgagaacaggctaaaacaacctcctt

SEQ ID NO: 577517 - DNA, 33 bp, Homo sapien
cgtcaggcactaagaacgtatgtgtttaaaaag

SEQ ID NO: 577518 - DNA, 33 bp, Homo sapien
cgtcaggcactaagaatgtatgtgtttaaaaag

SEQ ID NO: 577519 - DNA, 33 bp, Homo sapien
ttattagcttatgatacgctgggtcttgattga

SEQ ID NO: 577520 - DNA, 33 bp, Homo sapien
ttattagcttatgatatgctgggtcttgattga

SEQ ID NO: 577521 - DNA, 33 bp, Homo sapien
gaatggaaactacctaacagctctcagtaaatg

SEQ ID NO: 577522 - DNA, 33 bp, Homo sapien
gaatggaaactacctagcagctctcagtaaatg

SEQ ID NO: 577523 - DNA, 33 bp, Homo sapien
cggccaatctctgtaactcttatctggaggaaa

SEQ ID NO: 577524 - DNA, 33 bp, Homo sapien
cggccaatctctgtaattcttatctggaggaaa

SEQ ID NO: 577525 - DNA, 33 bp, Homo sapien
gatcatgtgtagggcacaagaatatgaaatttg

SEQ ID NO: 577526 - DNA, 33 bp, Homo sapien
gatcatgtgtagggcataagaatatgaaatttg

SEQ ID NO: 577527 - DNA, 33 bp, Homo sapien
tgaaggctctctcctaaaccttttgtagcccat

SEQ ID NO: 577528 - DNA, 33 bp, Homo sapien
tgaaggctctctcctagaccttttgtagcccat

SEQ ID NO: 577529 - DNA, 33 bp, Homo sapien
taaggttgacaagaaaagcaagcatctcctatg

SEQ ID NO: 577530 - DNA, 33 bp, Homo sapien
taaggttgacaagaaacgcaagcatctcctatg

SEQ ID NO: 577531 - DNA, 33 bp, Homo sapien
atctcgtgtggtaatacatgtatacaaatgtag

SEQ ID NO: 577532 - DNA, 33 bp, Homo sapien
atctcgtgtggtaatatatgtatacaaatgtag

SEQ ID NO: 577533 - DNA, 33 bp, Homo sapien
ttataagcggtgccatgaaaggtacgggataaa

SEQ ID NO: 577534 - DNA, 33 bp, Homo sapien
ttataagcggtgccattaaaggtacgggataaa

SEQ ID NO: 577535 - DNA, 33 bp, Homo sapien
tcagtgcctgcaaagaaaagcgatttttttttc

SEQ ID NO: 577536 - DNA, 33 bp, Homo sapien
tcagtgcctgcaaagagaagcgatttttttttc

SEQ ID NO: 577537 - DNA, 33 bp, Homo sapien
tttgctgtataactaacgggcagtcaggaacag

SEQ ID NO: 577538 - DNA, 33 bp, Homo sapien
tttgctgtataactaatgggcagtcaggaacag

SEQ ID NO: 577539 - DNA, 33 bp, Homo sapien
ataagacaatagctcaaaagtaaatggtaactg

SEQ ID NO: 577540 - DNA, 33 bp, Homo sapien
ataagacaatagctcagaagtaaatggtaactg

SEQ ID NO: 577541 - DNA, 33 bp, Homo sapien
gttctgtaaggacagcaattggtctgttccgtt

SEQ ID NO: 577542 - DNA, 33 bp, Homo sapien
gttctgtaaggacagcgattggtctgttccgtt

SEQ ID NO: 577543 - DNA, 33 bp, Homo sapien
gagttggacaaagaggaagggaagacacttgct

SEQ ID NO: 577544 - DNA, 33 bp, Homo sapien
gagttggacaaagagggagggaagacacttgct

SEQ ID NO: 577545 - DNA, 33 bp, Homo sapien
tgagtgtgcaatgtcacaggtaccatgagaaag

SEQ ID NO: 577546 - DNA, 33 bp, Homo sapien
tgagtgtgcaatgtcataggtaccatgagaaag

SEQ ID NO: 577547 - DNA, 33 bp, Homo sapien
gtgggaatggagacccactgctcctgagtcttc

SEQ ID NO: 577548 - DNA, 33 bp, Homo sapien
gtgggaatggagaccctctgctcctgagtcttc

SEQ ID NO: 577549 - DNA, 33 bp, Homo sapien
cataggctggcagtcacgtgggattgggtttgt

SEQ ID NO: 577550 - DNA, 33 bp, Homo sapien
cataggctggcagtcatgtgggattgggtttgt

SEQ ID NO: 577551 - DNA, 33 bp, Homo sapien
ggataatcatggtaccacttcatgtttcattgg

SEQ ID NO: 577552 - DNA, 33 bp, Homo sapien
ggataatcatggtaccccttcatgtttcattgg

SEQ ID NO: 577553 - DNA, 33 bp, Homo sapien
gcttacaggttttaagactccaggggaaaggat

SEQ ID NO: 577554 - DNA, 33 bp, Homo sapien
gcttacaggttttaaggctccaggggaaaggat

SEQ ID NO: 577555 - DNA, 33 bp, Homo sapien
gctcctgctatatccaaagaccaaaggtttcac

SEQ ID NO: 577556 - DNA, 33 bp, Homo sapien
gctcctgctatatccagagaccaaaggtttcac

SEQ ID NO: 577557 - DNA, 33 bp, Homo sapien
tacattcgttttcctacctatgtgagaagagcc

SEQ ID NO: 577558 - DNA, 33 bp, Homo sapien
tacattcgttttcctagctatgtgagaagagcc

SEQ ID NO: 577559 - DNA, 33 bp, Homo sapien
ggggaacgatctcctccaacatgtctgggcttt

SEQ ID NO: 577560 - DNA, 33 bp, Homo sapien
ggggaacgatctcctctaacatgtctgggcttt

SEQ ID NO: 577561 - DNA, 33 bp, Homo sapien
ctctcagtttcttttgcaatagctgtactgtca

SEQ ID NO: 577562 - DNA, 33 bp, Homo sapien
ctctcagtttcttttgtaatagctgtactgtca

SEQ ID NO: 577563 - DNA, 33 bp, Homo sapien
tttggtttctccctgaccacgggccgttagcaa

SEQ ID NO: 577564 - DNA, 33 bp, Homo sapien
tttggtttctccctgatcacgggccgttagcaa

SEQ ID NO: 577565 - DNA, 33 bp, Homo sapien
tgcaccttagtctatacagcaaataaatggtct

SEQ ID NO: 577566 - DNA, 33 bp, Homo sapien
tgcaccttagtctatagagcaaataaatggtct

SEQ ID NO: 577567 - DNA, 33 bp, Homo sapien
gtatagtaaccaccaaacacttgcaatgaacta

SEQ ID NO: 577568 - DNA, 33 bp, Homo sapien
gtatagtaaccaccaagcacttgcaatgaacta

SEQ ID NO: 577569 - DNA, 33 bp, Homo sapien
tgccccctcaatcagacatagtcaggtttggct

SEQ ID NO: 577570 - DNA, 33 bp, Homo sapien
tgccccctcaatcagatatagtcaggtttggct

SEQ ID NO: 577571 - DNA, 33 bp, Homo sapien
gactgagacttggtgaggtgaaaagacctatcc

SEQ ID NO: 577572 - DNA, 33 bp, Homo sapien
gactgagacttggtgatgtgaaaagacctatcc

SEQ ID NO: 577573 - DNA, 33 bp, Homo sapien
gacctagctggaaggactattgatggattcaag

SEQ ID NO: 577574 - DNA, 33 bp, Homo sapien
gacctagctggaaggattattgatggattcaag

SEQ ID NO: 577575 - DNA, 33 bp, Homo sapien
aacagaatgagttgaacgtgtcagagaaaagag

SEQ ID NO: 577576 - DNA, 33 bp, Homo sapien
aacagaatgagttgaatgtgtcagagaaaagag

SEQ ID NO: 577577 - DNA, 33 bp, Homo sapien
aatgggcaatccaagaaggagagagccagcaga

SEQ ID NO: 577578 - DNA, 33 bp, Homo sapien
aatgggcaatccaagagggagagagccagcaga

SEQ ID NO: 577579 - DNA, 33 bp, Homo sapien
ttgcaagagaagcagaggtgaaagagaaggaaa

SEQ ID NO: 577580 - DNA, 33 bp, Homo sapien
ttgcaagagaagcagatgtgaaagagaaggaaa

SEQ ID NO: 577581 - DNA, 33 bp, Homo sapien
atgatatagcctttgaactgctagatccagctg

SEQ ID NO: 577582 - DNA, 33 bp, Homo sapien
atgatatagcctttgagctgctagatccagctg

SEQ ID NO: 577583 - DNA, 33 bp, Homo sapien
aacaatgaataacacactgaaccaaaccacagg

SEQ ID NO: 577584 - DNA, 33 bp, Homo sapien
aacaatgaataacacagtgaaccaaaccacagg

SEQ ID NO: 577585 - DNA, 33 bp, Homo sapien
tggccactatttagcccaatagagcatctgagc

SEQ ID NO: 577586 - DNA, 33 bp, Homo sapien
tggccactatttagcctaatagagcatctgagc

SEQ ID NO: 577587 - DNA, 33 bp, Homo sapien
tggcatctgaacggagaagaaagaggaggctgg

SEQ ID NO: 577588 - DNA, 33 bp, Homo sapien
tggcatctgaacggaggagaaagaggaggctgg

SEQ ID NO: 577589 - DNA, 33 bp, Homo sapien
ataaagctactttgcacattgttggggttcagg

SEQ ID NO: 577590 - DNA, 33 bp, Homo sapien
ataaagctactttgcatattgttggggttcagg

SEQ ID NO: 577591 - DNA, 33 bp, Homo sapien
agcttcctgttcagtacctgacattggaaaggt

SEQ ID NO: 577592 - DNA, 33 bp, Homo sapien
agcttcctgttcagtagctgacattggaaaggt

SEQ ID NO: 577593 - DNA, 33 bp, Homo sapien
tacacatgtgaggtacaggctgcttcgatgtag

SEQ ID NO: 577594 - DNA, 33 bp, Homo sapien
tacacatgtgaggtaccggctgcttcgatgtag

SEQ ID NO: 577595 - DNA, 33 bp, Homo sapien
agacagagtaaacagggattaggactcctccat

SEQ ID NO: 577596 - DNA, 33 bp, Homo sapien
agacagagtaaacaggtattaggactcctccat

SEQ ID NO: 577597 - DNA, 33 bp, Homo sapien
agggtggaaatggctcaactctgcccacagagt

SEQ ID NO: 577598 - DNA, 33 bp, Homo sapien
agggtggaaatggctcgactctgcccacagagt

SEQ ID NO: 577599 - DNA, 33 bp, Homo sapien
catagagtcacttaaacattaaatgagaacatg

SEQ ID NO: 577600 - DNA, 33 bp, Homo sapien
catagagtcacttaaagattaaatgagaacatg

SEQ ID NO: 577601 - DNA, 33 bp, Homo sapien
gctgaaggtaaagaagcacctcttagtagctca

SEQ ID NO: 577602 - DNA, 33 bp, Homo sapien
gctgaaggtaaagaaggacctcttagtagctca

SEQ ID NO: 577603 - DNA, 33 bp, Homo sapien
gtaaaacagatatttacgagtgagtctgatgga

SEQ ID NO: 577604 - DNA, 33 bp, Homo sapien
gtaaaacagatatttatgagtgagtctgatgga

SEQ ID NO: 577605 - DNA, 33 bp, Homo sapien
cttcccagctgtcttccacccacccagggttcc

SEQ ID NO: 577606 - DNA, 33 bp, Homo sapien
cttcccagctgtcttcgacccacccagggttcc

SEQ ID NO: 577607 - DNA, 33 bp, Homo sapien
acaaccgtgagaaaaacgccttgcaaagctcac

SEQ ID NO: 577608 - DNA, 33 bp, Homo sapien
acaaccgtgagaaaaatgccttgcaaagctcac

SEQ ID NO: 577609 - DNA, 33 bp, Homo sapien
gctgcaatggctacaacgggttccagaagcaga

SEQ ID NO: 577610 - DNA, 33 bp, Homo sapien
gctgcaatggctacaatgggttccagaagcaga

SEQ ID NO: 577611 - DNA, 33 bp, Homo sapien
agaatccacattttaacaagaccaacaggcgac

SEQ ID NO: 577612 - DNA, 33 bp, Homo sapien
agaatccacattttaagaagaccaacaggcgac

SEQ ID NO: 577613 - DNA, 33 bp, Homo sapien
atgggtggcaaaaagacagcaggtctgagcagg

SEQ ID NO: 577614 - DNA, 33 bp, Homo sapien
atgggtggcaaaaagatagcaggtctgagcagg

SEQ ID NO: 577615 - DNA, 33 bp, Homo sapien
cccttagctgagaaccgctactctagggcagtc

SEQ ID NO: 577616 - DNA, 33 bp, Homo sapien
cccttagctgagaacctctactctagggcagtc

SEQ ID NO: 577617 - DNA, 33 bp, Homo sapien
atcagttactggaggacaaaactccaagttgtt

SEQ ID NO: 577618 - DNA, 33 bp, Homo sapien
atcagttactggaggagaaaactccaagttgtt

SEQ ID NO: 577619 - DNA, 33 bp, Homo sapien
tcatgatctaaaagtgcaggtactgatgtggat

SEQ ID NO: 577620 - DNA, 33 bp, Homo sapien
tcatgatctaaaagtgtaggtactgatgtggat

SEQ ID NO: 577621 - DNA, 33 bp, Homo sapien
catcagagagctttgacaggattctccgtgtct

SEQ ID NO: 577622 - DNA, 33 bp, Homo sapien
catcagagagctttgagaggattctccgtgtct

SEQ ID NO: 577623 - DNA, 33 bp, Homo sapien
tttgagcttgtcctggcaagaagcagtgggaaa

SEQ ID NO: 577624 - DNA, 33 bp, Homo sapien
tttgagcttgtcctgggaagaagcagtgggaaa

SEQ ID NO: 577625 - DNA, 33 bp, Homo sapien
ttttgtaagccaagacaccaatcttagtgacat

SEQ ID NO: 577626 - DNA, 33 bp, Homo sapien
ttttgtaagccaagacgccaatcttagtgacat

SEQ ID NO: 577627 - DNA, 33 bp, Homo sapien
tcaatttttgtagccaacttcaaatatcacagg

SEQ ID NO: 577628 - DNA, 33 bp, Homo sapien
tcaatttttgtagccaccttcaaatatcacagg

SEQ ID NO: 577629 - DNA, 33 bp, Homo sapien
ttgaaagggagaaaccaagacctggagagatga

SEQ ID NO: 577630 - DNA, 33 bp, Homo sapien
ttgaaagggagaaaccgagacctggagagatga

SEQ ID NO: 577631 - DNA, 33 bp, Homo sapien
aaactagctatgtcacggtaagatcctgcataa

SEQ ID NO: 577632 - DNA, 33 bp, Homo sapien
aaactagctatgtcactgtaagatcctgcataa

SEQ ID NO: 577633 - DNA, 33 bp, Homo sapien
aggttgctgatttttacgggtgagaaaatcagg

SEQ ID NO: 577634 - DNA, 33 bp, Homo sapien
aggttgctgatttttatgggtgagaaaatcagg

SEQ ID NO: 577635 - DNA, 33 bp, Homo sapien
cttctgagtttgcaaaacactgctgcgggcaat

SEQ ID NO: 577636 - DNA, 33 bp, Homo sapien
cttctgagtttgcaaagcactgctgcgggcaat

SEQ ID NO: 577637 - DNA, 33 bp, Homo sapien
tttataaaggagaaaactggtgctcagagaggt

SEQ ID NO: 577638 - DNA, 33 bp, Homo sapien
tttataaaggagaaaagtggtgctcagagaggt

SEQ ID NO: 577639 - DNA, 33 bp, Homo sapien
tgaacacacaaggatcactcaccctggaccggc

SEQ ID NO: 577640 - DNA, 33 bp, Homo sapien
tgaacacacaaggatcgctcaccctggaccggc

SEQ ID NO: 577641 - DNA, 33 bp, Homo sapien
ttcccagaagtttccaggacttgagcttgaggg

SEQ ID NO: 577642 - DNA, 33 bp, Homo sapien
ttcccagaagtttccatgacttgagcttgaggg

SEQ ID NO: 577643 - DNA, 33 bp, Homo sapien
ctgggtctccaaagtcagaagtgcaatcgtgac

SEQ ID NO: 577644 - DNA, 33 bp, Homo sapien
ctgggtctccaaagtcggaagtgcaatcgtgac

SEQ ID NO: 577645 - DNA, 33 bp, Homo sapien
agatgcattctgaaaaaagaatccttaggtgat

SEQ ID NO: 577646 - DNA, 33 bp, Homo sapien
agatgcattctgaaaacagaatccttaggtgat

SEQ ID NO: 577647 - DNA, 33 bp, Homo sapien
agatattggataggtaacccacagtcacacacg

SEQ ID NO: 577648 - DNA, 33 bp, Homo sapien
agatattggataggtaccccacagtcacacacg

SEQ ID NO: 577649 - DNA, 33 bp, Homo sapien
tcatgggtgactctgacgggttcaagatttcag

SEQ ID NO: 577650 - DNA, 33 bp, Homo sapien
tcatgggtgactctgaggggttcaagatttcag

SEQ ID NO: 577651 - DNA, 33 bp, Homo sapien
ataatgtcctgagctcacctcccagcatttctg

SEQ ID NO: 577652 - DNA, 33 bp, Homo sapien
ataatgtcctgagctcgcctcccagcatttctg

SEQ ID NO: 577653 - DNA, 33 bp, Homo sapien
catcaggtgagtttcacagaattctgattctcc

SEQ ID NO: 577654 - DNA, 33 bp, Homo sapien
catcaggtgagtttcatagaattctgattctcc

SEQ ID NO: 577655 - DNA, 33 bp, Homo sapien
aggtttgagactctcacccccagtgttttgggt

SEQ ID NO: 577656 - DNA, 33 bp, Homo sapien
aggtttgagactctcatccccagtgttttgggt

SEQ ID NO: 577657 - DNA, 33 bp, Homo sapien
ggactgagagaattaaaactgatgggttgaatt

SEQ ID NO: 577658 - DNA, 33 bp, Homo sapien
ggactgagagaattaacactgatgggttgaatt

SEQ ID NO: 577659 - DNA, 33 bp, Homo sapien
catcctctttacctaaaccaatcactagcaaga

SEQ ID NO: 577660 - DNA, 33 bp, Homo sapien
catcctctttacctaagccaatcactagcaaga

SEQ ID NO: 577661 - DNA, 33 bp, Homo sapien
gcagccaccttgcaacaacaagcaaagcctgag

SEQ ID NO: 577662 - DNA, 33 bp, Homo sapien
gcagccaccttgcaaccacaagcaaagcctgag

SEQ ID NO: 577663 - DNA, 33 bp, Homo sapien
aggttcagtggtgctactaagaccacaactttc

SEQ ID NO: 577664 - DNA, 33 bp, Homo sapien
aggttcagtggtgctagtaagaccacaactttc

SEQ ID NO: 577665 - DNA, 33 bp, Homo sapien
ttctctatggtgtctcccatttctgcacatctt

SEQ ID NO: 577666 - DNA, 33 bp, Homo sapien
ttctctatggtgtctcgcatttctgcacatctt

SEQ ID NO: 577667 - DNA, 33 bp, Homo sapien
aagcagaatgtaagcaggtatttcatttttcaa

SEQ ID NO: 577668 - DNA, 33 bp, Homo sapien
aagcagaatgtaagcatgtatttcatttttcaa

SEQ ID NO: 577669 - DNA, 33 bp, Homo sapien
agagtcttgtgatagacaggtgaataaaatgtc

SEQ ID NO: 577670 - DNA, 33 bp, Homo sapien
agagtcttgtgatagataggtgaataaaatgtc

SEQ ID NO: 577671 - DNA, 33 bp, Homo sapien
aggtgacttttgggcacgcttatagaagtttac

SEQ ID NO: 577672 - DNA, 33 bp, Homo sapien
aggtgacttttgggcatgcttatagaagtttac

SEQ ID NO: 577673 - DNA, 33 bp, Homo sapien
ttattaccacctactacctatcagctgcttagc

SEQ ID NO: 577674 - DNA, 33 bp, Homo sapien
ttattaccacctactatctatcagctgcttagc

SEQ ID NO: 577675 - DNA, 33 bp, Homo sapien
tgattggagagctaacaacaacactggcccatg

SEQ ID NO: 577676 - DNA, 33 bp, Homo sapien
tgattggagagctaacgacaacactggcccatg

SEQ ID NO: 577677 - DNA, 33 bp, Homo sapien
gtgaatttttaaaagacgcaacaagcctagatt

SEQ ID NO: 577678 - DNA, 33 bp, Homo sapien
gtgaatttttaaaagatgcaacaagcctagatt

SEQ ID NO: 577679 - DNA, 33 bp, Homo sapien
agagagcccttggcagacgggtggacatcctgg

SEQ ID NO: 577680 - DNA, 33 bp, Homo sapien
agagagcccttggcaggcgggtggacatcctgg

SEQ ID NO: 577681 - DNA, 33 bp, Homo sapien
acaggtacacaccctcactcatgtacacatgca

SEQ ID NO: 577682 - DNA, 33 bp, Homo sapien
acaggtacacaccctctctcatgtacacatgca

SEQ ID NO: 577683 - DNA, 33 bp, Homo sapien
aggcagcagcacttccaaatccccactcctcac

SEQ ID NO: 577684 - DNA, 33 bp, Homo sapien
aggcagcagcacttccgaatccccactcctcac

SEQ ID NO: 577685 - DNA, 33 bp, Homo sapien
ctccgcattgagactcaaaagcgcaggctccag

SEQ ID NO: 577686 - DNA, 33 bp, Homo sapien
ctccgcattgagactcgaaagcgcaggctccag

SEQ ID NO: 577687 - DNA, 33 bp, Homo sapien
agggttttaggatccaagagtgttttgctccca

SEQ ID NO: 577688 - DNA, 33 bp, Homo sapien
agggttttaggatccaggagtgttttgctccca

SEQ ID NO: 577689 - DNA, 33 bp, Homo sapien
gccagtggagagattacgacaacacggggtgca

SEQ ID NO: 577690 - DNA, 33 bp, Homo sapien
gccagtggagagattatgacaacacggggtgca

SEQ ID NO: 577691 - DNA, 33 bp, Homo sapien
ccaagaaagtcctgaccgatacagaaccgtaag

SEQ ID NO: 577692 - DNA, 33 bp, Homo sapien
ccaagaaagtcctgactgatacagaaccgtaag

SEQ ID NO: 577693 - DNA, 33 bp, Homo sapien
agcaactcccttcgccccagagttcaggcaaaa

SEQ ID NO: 577694 - DNA, 33 bp, Homo sapien
agcaactcccttcgccgcagagttcaggcaaaa

SEQ ID NO: 577695 - DNA, 33 bp, Homo sapien
ctttgtcttgtagaacagccttacggtggatta

SEQ ID NO: 577696 - DNA, 33 bp, Homo sapien
ctttgtcttgtagaacggccttacggtggatta

SEQ ID NO: 577697 - DNA, 33 bp, Homo sapien
accaccaagtcataaaagcttccacggaaatgg

SEQ ID NO: 577698 - DNA, 33 bp, Homo sapien
accaccaagtcataaaggcttccacggaaatgg

SEQ ID NO: 577699 - DNA, 33 bp, Homo sapien
ttgtgtcgccaggctcggagcacttaggctaca

SEQ ID NO: 577700 - DNA, 33 bp, Homo sapien
ttgtgtcgccaggctctgagcacttaggctaca

SEQ ID NO: 577701 - DNA, 33 bp, Homo sapien
cctctttccagatcaacgagtacactttcctaa

SEQ ID NO: 577702 - DNA, 33 bp, Homo sapien
cctctttccagatcaatgagtacactttcctaa

SEQ ID NO: 577703 - DNA, 33 bp, Homo sapien
ctgggggcttcccataagtggttcaggaggtgc

SEQ ID NO: 577704 - DNA, 33 bp, Homo sapien
ctgggggcttcccataggtggttcaggaggtgc

SEQ ID NO: 577705 - DNA, 33 bp, Homo sapien
aagaaattattaccaacgtgatgggcttaaacc

SEQ ID NO: 577706 - DNA, 33 bp, Homo sapien
aagaaattattaccaatgtgatgggcttaaacc

SEQ ID NO: 577707 - DNA, 33 bp, Homo sapien
gcttatcggcaataaacggctgtgggtttaagc

SEQ ID NO: 577708 - DNA, 33 bp, Homo sapien
gcttatcggcaataaatggctgtgggtttaagc

SEQ ID NO: 577709 - DNA, 33 bp, Homo sapien
tccctgtattcttgaacatctccttccagctcc

SEQ ID NO: 577710 - DNA, 33 bp, Homo sapien
tccctgtattcttgaatatctccttccagctcc

SEQ ID NO: 577711 - DNA, 33 bp, Homo sapien
cttcggctgaactccaccccgcttctctctgaa

SEQ ID NO: 577712 - DNA, 33 bp, Homo sapien
cttcggctgaactccatcccgcttctctctgaa

SEQ ID NO: 577713 - DNA, 33 bp, Homo sapien
acacattacttttataaatttctgtttgttggt

SEQ ID NO: 577714 - DNA, 33 bp, Homo sapien
acacattacttttatacatttctgtttgttggt

SEQ ID NO: 577715 - DNA, 33 bp, Homo sapien
tctttttaccgccctacctttattgtcagtggt

SEQ ID NO: 577716 - DNA, 33 bp, Homo sapien
tctttttaccgccctatctttattgtcagtggt

SEQ ID NO: 577717 - DNA, 33 bp, Homo sapien
ttcacagcaaagtacacgatacacggtcatttt

SEQ ID NO: 577718 - DNA, 33 bp, Homo sapien
ttcacagcaaagtacatgatacacggtcatttt

SEQ ID NO: 577719 - DNA, 33 bp, Homo sapien
ctgcaaagcacttttaaacttacacatgtctct

SEQ ID NO: 577720 - DNA, 33 bp, Homo sapien
ctgcaaagcacttttatacttacacatgtctct

SEQ ID NO: 577721 - DNA, 33 bp, Homo sapien
gaggagtttcctgggaagtaaccagcgagtcct

SEQ ID NO: 577722 - DNA, 33 bp, Homo sapien
gaggagtttcctgggaggtaaccagcgagtcct

SEQ ID NO: 577723 - DNA, 33 bp, Homo sapien
aagcatttaaaatctgaaaacttcattatttta

SEQ ID NO: 577724 - DNA, 33 bp, Homo sapien
aagcatttaaaatctggaaacttcattatttta

SEQ ID NO: 577725 - DNA, 33 bp, Homo sapien
aaatgctgagtaaaaacggtttcgaatgctaaa

SEQ ID NO: 577726 - DNA, 33 bp, Homo sapien
aaatgctgagtaaaaatggtttcgaatgctaaa

SEQ ID NO: 577727 - DNA, 33 bp, Homo sapien
cagctacagggtttggaatgagggtcagcaggt

SEQ ID NO: 577728 - DNA, 33 bp, Homo sapien
cagctacagggtttgggatgagggtcagcaggt

SEQ ID NO: 577729 - DNA, 33 bp, Homo sapien
cttctgtaaggcattccatcgttgggtgacaat

SEQ ID NO: 577730 - DNA, 33 bp, Homo sapien
cttctgtaaggcattctatcgttgggtgacaat

SEQ ID NO: 577731 - DNA, 33 bp, Homo sapien
gggtggatgatcagtacgcaggaaaggctcaga

SEQ ID NO: 577732 - DNA, 33 bp, Homo sapien
gggtggatgatcagtaggcaggaaaggctcaga

SEQ ID NO: 577733 - DNA, 33 bp, Homo sapien
agcccatttcattccacaattgttctcagccat

SEQ ID NO: 577734 - DNA, 33 bp, Homo sapien
agcccatttcattccagaattgttctcagccat

SEQ ID NO: 577735 - DNA, 33 bp, Homo sapien
tctctcctataaggaccgatgggaccaccctgc

SEQ ID NO: 577736 - DNA, 33 bp, Homo sapien
tctctcctataaggactgatgggaccaccctgc

SEQ ID NO: 577737 - DNA, 33 bp, Homo sapien
cctgctacacagagcccgcgtattggaaggcca

SEQ ID NO: 577738 - DNA, 33 bp, Homo sapien
cctgctacacagagcctgcgtattggaaggcca

SEQ ID NO: 577739 - DNA, 33 bp, Homo sapien
atgttggtgatatcaactgtgctacctgggcag

SEQ ID NO: 577740 - DNA, 33 bp, Homo sapien
atgttggtgatatcaattgtgctacctgggcag

SEQ ID NO: 577741 - DNA, 33 bp, Homo sapien
agggcagcctgtttacaagatggtgcctgggct

SEQ ID NO: 577742 - DNA, 33 bp, Homo sapien
agggcagcctgtttacgagatggtgcctgggct

SEQ ID NO: 577743 - DNA, 33 bp, Homo sapien
acggctgacaggaccaatctccgagataagtca

SEQ ID NO: 577744 - DNA, 33 bp, Homo sapien
acggctgacaggaccagtctccgagataagtca

SEQ ID NO: 577745 - DNA, 33 bp, Homo sapien
gtgttgtaagaactaaatgacatgagactggtc

SEQ ID NO: 577746 - DNA, 33 bp, Homo sapien
gtgttgtaagaactaagtgacatgagactggtc

SEQ ID NO: 577747 - DNA, 33 bp, Homo sapien
ttcctgtggctccaacacgtgcctgggtgcctc

SEQ ID NO: 577748 - DNA, 33 bp, Homo sapien
ttcctgtggctccaacgcgtgcctgggtgcctc

SEQ ID NO: 577749 - DNA, 33 bp, Homo sapien
atcctgattcgaaacacagatgttaatacattt

SEQ ID NO: 577750 - DNA, 33 bp, Homo sapien
atcctgattcgaaacatagatgttaatacattt

SEQ ID NO: 577751 - DNA, 33 bp, Homo sapien
ctaccaaatgctccaacgtgctttctcttccag

SEQ ID NO: 577752 - DNA, 33 bp, Homo sapien
ctaccaaatgctccaatgtgctttctcttccag

SEQ ID NO: 577753 - DNA, 33 bp, Homo sapien
aggaggctccaagatcgcattgtggacccagct

SEQ ID NO: 577754 - DNA, 33 bp, Homo sapien
aggaggctccaagatctcattgtggacccagct

SEQ ID NO: 577755 - DNA, 33 bp, Homo sapien
tcttcaaatcccccacacttcctccagctcgcc

SEQ ID NO: 577756 - DNA, 33 bp, Homo sapien
tcttcaaatcccccacgcttcctccagctcgcc

SEQ ID NO: 577757 - DNA, 33 bp, Homo sapien
gctcggtggacctacacgggaaggcagtgccac

SEQ ID NO: 577758 - DNA, 33 bp, Homo sapien
gctcggtggacctacatgggaaggcagtgccac

SEQ ID NO: 577759 - DNA, 33 bp, Homo sapien
atcttggttctaggttcaaaaacaaaacaacct

SEQ ID NO: 577760 - DNA, 33 bp, Homo sapien
atcttggttctaggttgaaaaacaaaacaacct

SEQ ID NO: 577761 - DNA, 33 bp, Homo sapien
gatggcagtatttacacggtgtagtcagcaggc

SEQ ID NO: 577762 - DNA, 33 bp, Homo sapien
gatggcagtatttacatggtgtagtcagcaggc

SEQ ID NO: 577763 - DNA, 33 bp, Homo sapien
ttctcccttctcctggcagcggtattagactaa

SEQ ID NO: 577764 - DNA, 33 bp, Homo sapien
ttctcccttctcctggtagcggtattagactaa

SEQ ID NO: 577765 - DNA, 33 bp, Homo sapien
tagcagctgtggttcaaaggtcatcttcccgag

SEQ ID NO: 577766 - DNA, 33 bp, Homo sapien
tagcagctgtggttcagaggtcatcttcccgag

SEQ ID NO: 577767 - DNA, 33 bp, Homo sapien
atcgttgtattagaccacaatccatgtatccat

SEQ ID NO: 577768 - DNA, 33 bp, Homo sapien
atcgttgtattagaccgcaatccatgtatccat

SEQ ID NO: 577769 - DNA, 33 bp, Homo sapien
agagatggttggaacaagacttcatctgtgctt

SEQ ID NO: 577770 - DNA, 33 bp, Homo sapien
agagatggttggaacaggacttcatctgtgctt

SEQ ID NO: 577771 - DNA, 33 bp, Homo sapien
actactttgttgataacgtacacacagtaaggc

SEQ ID NO: 577772 - DNA, 33 bp, Homo sapien
actactttgttgataatgtacacacagtaaggc

SEQ ID NO: 577773 - DNA, 33 bp, Homo sapien
tgaaatcgctgtgtcacattgtagctctatttt

SEQ ID NO: 577774 - DNA, 33 bp, Homo sapien
tgaaatcgctgtgtcatattgtagctctatttt

SEQ ID NO: 577775 - DNA, 33 bp, Homo sapien
caggatgcccagagtcacacgcgagcttattac

SEQ ID NO: 577776 - DNA, 33 bp, Homo sapien
caggatgcccagagtcgcacgcgagcttattac

SEQ ID NO: 577777 - DNA, 33 bp, Homo sapien
tcccgtgggagactaacgtgatagggtctgggt

SEQ ID NO: 577778 - DNA, 33 bp, Homo sapien
tcccgtgggagactaatgtgatagggtctgggt

SEQ ID NO: 577779 - DNA, 33 bp, Homo sapien
gggaataagcagaaggaatataggtgcccagaa

SEQ ID NO: 577780 - DNA, 33 bp, Homo sapien
gggaataagcagaaggcatataggtgcccagaa

SEQ ID NO: 577781 - DNA, 33 bp, Homo sapien
acatgtcattatctcccctaatagcaagtcttc

SEQ ID NO: 577782 - DNA, 33 bp, Homo sapien
acatgtcattatctcctctaatagcaagtcttc

SEQ ID NO: 577783 - DNA, 33 bp, Homo sapien
caggggtgactgcatcacactttttcaaatgtc

SEQ ID NO: 577784 - DNA, 33 bp, Homo sapien
caggggtgactgcatcgcactttttcaaatgtc

SEQ ID NO: 577785 - DNA, 33 bp, Homo sapien
tgatgttttagttcagcagctgtaattcattgg

SEQ ID NO: 577786 - DNA, 33 bp, Homo sapien
tgatgttttagttcagtagctgtaattcattgg

SEQ ID NO: 577787 - DNA, 33 bp, Homo sapien
acatgaatggtgttcaaagaaataaaagaaaaa

SEQ ID NO: 577788 - DNA, 33 bp, Homo sapien
acatgaatggtgttcagagaaataaaagaaaaa

SEQ ID NO: 577789 - DNA, 33 bp, Homo sapien
cagaacacgggaccacagagtcaaggccatggg

SEQ ID NO: 577790 - DNA, 33 bp, Homo sapien
cagaacacgggaccacggagtcaaggccatggg

SEQ ID NO: 577791 - DNA, 33 bp, Homo sapien
ctccacgctcctcctcacagacgagactggcat

SEQ ID NO: 577792 - DNA, 33 bp, Homo sapien
ctccacgctcctcctcgcagacgagactggcat

SEQ ID NO: 577793 - DNA, 33 bp, Homo sapien
gatgagataaagggcacggaagattctggttct

SEQ ID NO: 577794 - DNA, 33 bp, Homo sapien
gatgagataaagggcatggaagattctggttct

SEQ ID NO: 577795 - DNA, 33 bp, Homo sapien
ggaaatgggactgacaatgcctgattcatagat

SEQ ID NO: 577796 - DNA, 33 bp, Homo sapien
ggaaatgggactgacagtgcctgattcatagat

SEQ ID NO: 577797 - DNA, 33 bp, Homo sapien
gctaaggctctgttagaaggagggttcacccta

SEQ ID NO: 577798 - DNA, 33 bp, Homo sapien
gctaaggctctgttaggaggagggttcacccta

SEQ ID NO: 577799 - DNA, 33 bp, Homo sapien
cgaggcagctgttgaaagggtgacagccagagc

SEQ ID NO: 577800 - DNA, 33 bp, Homo sapien
cgaggcagctgttgaaggggtgacagccagagc

SEQ ID NO: 577801 - DNA, 33 bp, Homo sapien
ggtgggccctgtttgaagaattaagtcatcgac

SEQ ID NO: 577802 - DNA, 33 bp, Homo sapien
ggtgggccctgtttgaggaattaagtcatcgac

SEQ ID NO: 577803 - DNA, 33 bp, Homo sapien
aatgggtctcgtaaaactcttggagatgacatg

SEQ ID NO: 577804 - DNA, 33 bp, Homo sapien
aatgggtctcgtaaaagtcttggagatgacatg

SEQ ID NO: 577805 - DNA, 33 bp, Homo sapien
ggtttgcagttgaaatcaaagtcccaagtcagt

SEQ ID NO: 577806 - DNA, 33 bp, Homo sapien
ggtttgcagttgaaatgaaagtcccaagtcagt

SEQ ID NO: 577807 - DNA, 33 bp, Homo sapien
tgtaagaagaaactaccggacaccacaattcat

SEQ ID NO: 577808 - DNA, 33 bp, Homo sapien
tgtaagaagaaactactggacaccacaattcat

SEQ ID NO: 577809 - DNA, 33 bp, Homo sapien
ataaaatcataaaactcacctctggcaaaatta

SEQ ID NO: 577810 - DNA, 33 bp, Homo sapien
ataaaatcataaaactgacctctggcaaaatta

SEQ ID NO: 577811 - DNA, 33 bp, Homo sapien
ctaatgatgtaagtgccccttaaatacgtgttc

SEQ ID NO: 577812 - DNA, 33 bp, Homo sapien
ctaatgatgtaagtgctccttaaatacgtgttc

SEQ ID NO: 577813 - DNA, 33 bp, Homo sapien
cttaacattcctcctactacgaaaggacaagag

SEQ ID NO: 577814 - DNA, 33 bp, Homo sapien
cttaacattcctcctagtacgaaaggacaagag

SEQ ID NO: 577815 - DNA, 33 bp, Homo sapien
agcatgcacaaatgcacctcaaaacactttgct

SEQ ID NO: 577816 - DNA, 33 bp, Homo sapien
agcatgcacaaatgcagctcaaaacactttgct

SEQ ID NO: 577817 - DNA, 33 bp, Homo sapien
cacacgatgccgtaaacactttgctcccatcct

SEQ ID NO: 577818 - DNA, 33 bp, Homo sapien
cacacgatgccgtaaatactttgctcccatcct

SEQ ID NO: 577819 - DNA, 33 bp, Homo sapien
catagattttaatgtcactaactccttatgact

SEQ ID NO: 577820 - DNA, 33 bp, Homo sapien
catagattttaatgtcgctaactccttatgact

SEQ ID NO: 577821 - DNA, 33 bp, Homo sapien
caccacagggctctaaacagcgctttgcattcc

SEQ ID NO: 577822 - DNA, 33 bp, Homo sapien
caccacagggctctaaccagcgctttgcattcc

SEQ ID NO: 577823 - DNA, 33 bp, Homo sapien
gttctaatatccaatcaatttgaaaacaatttg

SEQ ID NO: 577824 - DNA, 33 bp, Homo sapien
gttctaatatccaatcgatttgaaaacaatttg

SEQ ID NO: 577825 - DNA, 33 bp, Homo sapien
aaagatcctggggcaacgaacaacttttggcac

SEQ ID NO: 577826 - DNA, 33 bp, Homo sapien
aaagatcctggggcaatgaacaacttttggcac

SEQ ID NO: 577827 - DNA, 33 bp, Homo sapien
agacatctacaaaacacattccaggacgagacg

SEQ ID NO: 577828 - DNA, 33 bp, Homo sapien
agacatctacaaaacagattccaggacgagacg

SEQ ID NO: 577829 - DNA, 33 bp, Homo sapien
agtgcctgcgtggggacggaacagttccgcgtc

SEQ ID NO: 577830 - DNA, 33 bp, Homo sapien
agtgcctgcgtggggatggaacagttccgcgtc

SEQ ID NO: 577831 - DNA, 33 bp, Homo sapien
ggcagcatgtgtccccagcaccatctgtacttc

SEQ ID NO: 577832 - DNA, 33 bp, Homo sapien
ggcagcatgtgtccccggcaccatctgtacttc

SEQ ID NO: 577833 - DNA, 33 bp, Homo sapien
agcttccatagcctccaactaaggaatgttttc

SEQ ID NO: 577834 - DNA, 33 bp, Homo sapien
agcttccatagcctcctactaaggaatgttttc

SEQ ID NO: 577835 - DNA, 33 bp, Homo sapien
tgcacatgcacacggaaatacgcttgcacacaa

SEQ ID NO: 577836 - DNA, 33 bp, Homo sapien
tgcacatgcacacggagatacgcttgcacacaa

SEQ ID NO: 577837 - DNA, 33 bp, Homo sapien
catgctgccaatccaacaagacaaaccctcctg

SEQ ID NO: 577838 - DNA, 33 bp, Homo sapien
catgctgccaatccaataagacaaaccctcctg

SEQ ID NO: 577839 - DNA, 33 bp, Homo sapien
agcctgcaaggtaaccaggggcgtggggagctg

SEQ ID NO: 577840 - DNA, 33 bp, Homo sapien
agcctgcaaggtaaccgggggcgtggggagctg

SEQ ID NO: 577841 - DNA, 33 bp, Homo sapien
gaatataagtgaccaagagctgtgcattggatg

SEQ ID NO: 577842 - DNA, 33 bp, Homo sapien
gaatataagtgaccaatagctgtgcattggatg

SEQ ID NO: 577843 - DNA, 33 bp, Homo sapien
tctgacaacagcgagcaccttcggagccctggt

SEQ ID NO: 577844 - DNA, 33 bp, Homo sapien
tctgacaacagcgagcgccttcggagccctggt

SEQ ID NO: 577845 - DNA, 33 bp, Homo sapien
gttctggaatgcgggcaagccaccgtccccaga

SEQ ID NO: 577846 - DNA, 33 bp, Homo sapien
gttctggaatgcgggcgagccaccgtccccaga

SEQ ID NO: 577847 - DNA, 33 bp, Homo sapien
aagaagcctgggtagacggtcccggatcccctg

SEQ ID NO: 577848 - DNA, 33 bp, Homo sapien
aagaagcctgggtagatggtcccggatcccctg

SEQ ID NO: 577849 - DNA, 33 bp, Homo sapien
gccttattcccctaacaaaaacaacagtccaca

SEQ ID NO: 577850 - DNA, 33 bp, Homo sapien
gccttattcccctaacgaaaacaacagtccaca

SEQ ID NO: 577851 - DNA, 33 bp, Homo sapien
tggcagggattagagcaatgccaccgcaggcca

SEQ ID NO: 577852 - DNA, 33 bp, Homo sapien
tggcagggattagagcgatgccaccgcaggcca

SEQ ID NO: 577853 - DNA, 33 bp, Homo sapien
cattggatttagtgcacaacctaatcctatatg

SEQ ID NO: 577854 - DNA, 33 bp, Homo sapien
cattggatttagtgcataacctaatcctatatg

SEQ ID NO: 577855 - DNA, 33 bp, Homo sapien
ttaatatgtgatgataagcccgcctggcgctgc

SEQ ID NO: 577856 - DNA, 33 bp, Homo sapien
ttaatatgtgatgataggcccgcctggcgctgc

SEQ ID NO: 577857 - DNA, 33 bp, Homo sapien
ttggagaaagtgacaacgaagctgagaactgaa

SEQ ID NO: 577858 - DNA, 33 bp, Homo sapien
ttggagaaagtgacaatgaagctgagaactgaa

SEQ ID NO: 577859 - DNA, 33 bp, Homo sapien
catctggaagcttcacacgttttttcctttcta

SEQ ID NO: 577860 - DNA, 33 bp, Homo sapien
catctggaagcttcacgcgttttttcctttcta

SEQ ID NO: 577861 - DNA, 33 bp, Homo sapien
acctcctggcatcaccggatgggaacagccaat

SEQ ID NO: 577862 - DNA, 33 bp, Homo sapien
acctcctggcatcacctgatgggaacagccaat

SEQ ID NO: 577863 - DNA, 33 bp, Homo sapien
aaccagagggtacaaaagaatgtttcgtgtctt

SEQ ID NO: 577864 - DNA, 33 bp, Homo sapien
aaccagagggtacaaaggaatgtttcgtgtctt

SEQ ID NO: 577865 - DNA, 33 bp, Homo sapien
aattcaaatcgttcaacgacggcccgcaggctg

SEQ ID NO: 577866 - DNA, 33 bp, Homo sapien
aattcaaatcgttcaatgacggcccgcaggctg

SEQ ID NO: 577867 - DNA, 33 bp, Homo sapien
ttgggacatttgcgaaaaagcattggcaggcag

SEQ ID NO: 577868 - DNA, 33 bp, Homo sapien
ttgggacatttgcgaagaagcattggcaggcag

SEQ ID NO: 577869 - DNA, 33 bp, Homo sapien
gggttctcagcagacactgccaaacaaatgaat

SEQ ID NO: 577870 - DNA, 33 bp, Homo sapien
gggttctcagcagacattgccaaacaaatgaat

SEQ ID NO: 577871 - DNA, 33 bp, Homo sapien
gcactgttgagaggtcaccagaacatgacagaa

SEQ ID NO: 577872 - DNA, 33 bp, Homo sapien
gcactgttgagaggtcgccagaacatgacagaa

SEQ ID NO: 577873 - DNA, 33 bp, Homo sapien
catgacaaatgctcaacgttgctaattatcaga

SEQ ID NO: 577874 - DNA, 33 bp, Homo sapien
catgacaaatgctcaatgttgctaattatcaga

SEQ ID NO: 577875 - DNA, 33 bp, Homo sapien
aactggtgaatgataaagcaattgtggagcgat

SEQ ID NO: 577876 - DNA, 33 bp, Homo sapien
aactggtgaatgataaggcaattgtggagcgat

SEQ ID NO: 577877 - DNA, 33 bp, Homo sapien
attccgcgatacagaaagagaacattttttcct

SEQ ID NO: 577878 - DNA, 33 bp, Homo sapien
attccgcgatacagaacgagaacattttttcct

SEQ ID NO: 577879 - DNA, 33 bp, Homo sapien
ctattttggtatcaaaagcactaactgcacttg

SEQ ID NO: 577880 - DNA, 33 bp, Homo sapien
ctattttggtatcaaaggcactaactgcacttg

SEQ ID NO: 577881 - DNA, 33 bp, Homo sapien
gcctgttccgtatgcaagtgataagacctttca

SEQ ID NO: 577882 - DNA, 33 bp, Homo sapien
gcctgttccgtatgcacgtgataagacctttca

SEQ ID NO: 577883 - DNA, 33 bp, Homo sapien
aaacatttgccctaagaagatggctccaaagag

SEQ ID NO: 577884 - DNA, 33 bp, Homo sapien
aaacatttgccctaaggagatggctccaaagag

SEQ ID NO: 577885 - DNA, 33 bp, Homo sapien
ctttctaaaatactccccttccccagacacgat

SEQ ID NO: 577886 - DNA, 33 bp, Homo sapien
ctttctaaaatactcctcttccccagacacgat

SEQ ID NO: 577887 - DNA, 33 bp, Homo sapien
aactgcctactatttacacaaggaaactgaggc

SEQ ID NO: 577888 - DNA, 33 bp, Homo sapien
aactgcctactatttagacaaggaaactgaggc

SEQ ID NO: 577889 - DNA, 33 bp, Homo sapien
ctcctctttttaacctaaacttcattgcctgat

SEQ ID NO: 577890 - DNA, 33 bp, Homo sapien
ctcctctttttaacctgaacttcattgcctgat

SEQ ID NO: 577891 - DNA, 33 bp, Homo sapien
caagacaaaagtcaagacactcctctttttaac

SEQ ID NO: 577892 - DNA, 33 bp, Homo sapien
caagacaaaagtcaaggcactcctctttttaac

SEQ ID NO: 577893 - DNA, 33 bp, Homo sapien
agctggaggtcagtaactctggcacctggaaag

SEQ ID NO: 577894 - DNA, 33 bp, Homo sapien
agctggaggtcagtaagtctggcacctggaaag

SEQ ID NO: 577895 - DNA, 33 bp, Homo sapien
gggatgagggtggctcaaggatgcgatcaagtt

SEQ ID NO: 577896 - DNA, 33 bp, Homo sapien
gggatgagggtggctcgaggatgcgatcaagtt

SEQ ID NO: 577897 - DNA, 33 bp, Homo sapien
ccctacagataaaaaacattgagccaatctgta

SEQ ID NO: 577898 - DNA, 33 bp, Homo sapien
ccctacagataaaaaatattgagccaatctgta

SEQ ID NO: 577899 - DNA, 33 bp, Homo sapien
aggactcatcttctcaataagttggtggtgttt

SEQ ID NO: 577900 - DNA, 33 bp, Homo sapien
aggactcatcttctcagtaagttggtggtgttt

SEQ ID NO: 577901 - DNA, 33 bp, Homo sapien
gagaatcaccctcagaaacaggacaagcagatt

SEQ ID NO: 577902 - DNA, 33 bp, Homo sapien
gagaatcaccctcagagacaggacaagcagatt

SEQ ID NO: 577903 - DNA, 33 bp, Homo sapien
acatgttccagctgtgaaattccttataccaca

SEQ ID NO: 577904 - DNA, 33 bp, Homo sapien
acatgttccagctgtggaattccttataccaca

SEQ ID NO: 577905 - DNA, 33 bp, Homo sapien
aactccccatcgcccactgcttccaggacgggc

SEQ ID NO: 577906 - DNA, 33 bp, Homo sapien
aactccccatcgcccagtgcttccaggacgggc

SEQ ID NO: 577907 - DNA, 33 bp, Homo sapien
aagctacaatagatcaaggattcagaaaggttc

SEQ ID NO: 577908 - DNA, 33 bp, Homo sapien
aagctacaatagatcagggattcagaaaggttc

SEQ ID NO: 577909 - DNA, 33 bp, Homo sapien
aatttagcttggtgaacgcaaaactagctcgat

SEQ ID NO: 577910 - DNA, 33 bp, Homo sapien
aatttagcttggtgaatgcaaaactagctcgat

SEQ ID NO: 577911 - DNA, 33 bp, Homo sapien
agagaacattgaagaaagaagtcataggatcct

SEQ ID NO: 577912 - DNA, 33 bp, Homo sapien
agagaacattgaagaatgaagtcataggatcct

SEQ ID NO: 577913 - DNA, 33 bp, Homo sapien
gggagttgagtgacacaggaagtctgttctaaa

SEQ ID NO: 577914 - DNA, 33 bp, Homo sapien
gggagttgagtgacaccggaagtctgttctaaa

SEQ ID NO: 577915 - DNA, 33 bp, Homo sapien
tgctgaagctctctcccgataccacatacatta

SEQ ID NO: 577916 - DNA, 33 bp, Homo sapien
tgctgaagctctctcctgataccacatacatta

SEQ ID NO: 577917 - DNA, 33 bp, Homo sapien
cctcgggggttcactcaacaaatgttcattaga

SEQ ID NO: 577918 - DNA, 33 bp, Homo sapien
cctcgggggttcactccacaaatgttcattaga

SEQ ID NO: 577919 - DNA, 33 bp, Homo sapien
gtccaactgggaccaaccctggagcatctactg

SEQ ID NO: 577920 - DNA, 33 bp, Homo sapien
gtccaactgggaccaatcctggagcatctactg

SEQ ID NO: 577921 - DNA, 33 bp, Homo sapien
ttaacgtctctgtaccgcggtttgattttcttc

SEQ ID NO: 577922 - DNA, 33 bp, Homo sapien
ttaacgtctctgtacctcggtttgattttcttc

SEQ ID NO: 577923 - DNA, 33 bp, Homo sapien
tcagggctggcaggtacagaaggaaaacagaca

SEQ ID NO: 577924 - DNA, 33 bp, Homo sapien
tcagggctggcaggtagagaaggaaaacagaca

SEQ ID NO: 577925 - DNA, 33 bp, Homo sapien
cgagctgtttcccactaaccgctagatcgtggc

SEQ ID NO: 577926 - DNA, 33 bp, Homo sapien
cgagctgtttcccactcaccgctagatcgtggc

SEQ ID NO: 577927 - DNA, 33 bp, Homo sapien
gattcaaaagtacaaacagatctgcaacatccc

SEQ ID NO: 577928 - DNA, 33 bp, Homo sapien
gattcaaaagtacaaatagatctgcaacatccc

SEQ ID NO: 577929 - DNA, 33 bp, Homo sapien
tttgtcagcgtatttaagacaaattaattacac

SEQ ID NO: 577930 - DNA, 33 bp, Homo sapien
tttgtcagcgtatttatgacaaattaattacac

SEQ ID NO: 577931 - DNA, 33 bp, Homo sapien
ttgcagctccatgcagaaggaagacacgcccag

SEQ ID NO: 577932 - DNA, 33 bp, Homo sapien
ttgcagctccatgcagcaggaagacacgcccag

SEQ ID NO: 577933 - DNA, 33 bp, Homo sapien
acaaatatcacctgtagaagatgacgaagttaa

SEQ ID NO: 577934 - DNA, 33 bp, Homo sapien
acaaatatcacctgtataagatgacgaagttaa

SEQ ID NO: 577935 - DNA, 33 bp, Homo sapien
tttttttggccctcaacccaggatgcggaacac

SEQ ID NO: 577936 - DNA, 33 bp, Homo sapien
tttttttggccctcaatccaggatgcggaacac

SEQ ID NO: 577937 - DNA, 33 bp, Homo sapien
acctgctttcctggacacaccagttttactcag

SEQ ID NO: 577938 - DNA, 33 bp, Homo sapien
acctgctttcctggacgcaccagttttactcag

SEQ ID NO: 577939 - DNA, 33 bp, Homo sapien
tcctgttcccttgggcacattcagtcaaagaaa

SEQ ID NO: 577940 - DNA, 33 bp, Homo sapien
tcctgttcccttgggcgcattcagtcaaagaaa

SEQ ID NO: 577941 - DNA, 33 bp, Homo sapien
agtcgttggaaatggacggactggttcagacac

SEQ ID NO: 577942 - DNA, 33 bp, Homo sapien
agtcgttggaaatggatggactggttcagacac

SEQ ID NO: 577943 - DNA, 33 bp, Homo sapien
acttctaaatccactccgaagaaattagtcccc

SEQ ID NO: 577944 - DNA, 33 bp, Homo sapien
acttctaaatccactcggaagaaattagtcccc

SEQ ID NO: 577945 - DNA, 33 bp, Homo sapien
tacattgttcaaagatatacgcatgagatgttc

SEQ ID NO: 577946 - DNA, 33 bp, Homo sapien
tacattgttcaaagatgtacgcatgagatgttc

SEQ ID NO: 577947 - DNA, 33 bp, Homo sapien
actgtggtcatctgaaatactgtgacaaacaac

SEQ ID NO: 577948 - DNA, 33 bp, Homo sapien
actgtggtcatctgaactactgtgacaaacaac

SEQ ID NO: 577949 - DNA, 33 bp, Homo sapien
tgaaaaccagacatcaagtattgggtaataaga

SEQ ID NO: 577950 - DNA, 33 bp, Homo sapien
tgaaaaccagacatcaggtattgggtaataaga

SEQ ID NO: 577951 - DNA, 33 bp, Homo sapien
tctgagcagactgttacaaagacactctgttac

SEQ ID NO: 577952 - DNA, 33 bp, Homo sapien
tctgagcagactgttataaagacactctgttac

SEQ ID NO: 577953 - DNA, 33 bp, Homo sapien
ttatgatccaaatctacgttgtttacatccaga

SEQ ID NO: 577954 - DNA, 33 bp, Homo sapien
ttatgatccaaatctatgttgtttacatccaga

SEQ ID NO: 577955 - DNA, 33 bp, Homo sapien
atccagaccataccataaagcaacgagacccaa

SEQ ID NO: 577956 - DNA, 33 bp, Homo sapien
atccagaccataccatgaagcaacgagacccaa

SEQ ID NO: 577957 - DNA, 33 bp, Homo sapien
tcagtacaggttatcccgaaaggtacaaggacg

SEQ ID NO: 577958 - DNA, 33 bp, Homo sapien
tcagtacaggttatcctgaaaggtacaaggacg

SEQ ID NO: 577959 - DNA, 33 bp, Homo sapien
tactgatttctctgcaagaccttttcaaagaat

SEQ ID NO: 577960 - DNA, 33 bp, Homo sapien
tactgatttctctgcaggaccttttcaaagaat

SEQ ID NO: 577961 - DNA, 33 bp, Homo sapien
caagagcggagtctaacagagatgtaaatgaaa

SEQ ID NO: 577962 - DNA, 33 bp, Homo sapien
caagagcggagtctaagagagatgtaaatgaaa

SEQ ID NO: 577963 - DNA, 33 bp, Homo sapien
ttagccagctgaacaaccaccaaagcgccctgc

SEQ ID NO: 577964 - DNA, 33 bp, Homo sapien
ttagccagctgaacaatcaccaaagcgccctgc

SEQ ID NO: 577965 - DNA, 33 bp, Homo sapien
tcagcatttccagggaccatcaggggaacgagg

SEQ ID NO: 577966 - DNA, 33 bp, Homo sapien
tcagcatttccagggagcatcaggggaacgagg

SEQ ID NO: 577967 - DNA, 33 bp, Homo sapien
acagctgctcccataacgaggcttcccaggtgg

SEQ ID NO: 577968 - DNA, 33 bp, Homo sapien
acagctgctcccataatgaggcttcccaggtgg

SEQ ID NO: 577969 - DNA, 33 bp, Homo sapien
tcccaccttcagacccaaagagcaaatggggcc

SEQ ID NO: 577970 - DNA, 33 bp, Homo sapien
tcccaccttcagaccccaagagcaaatggggcc

SEQ ID NO: 577971 - DNA, 33 bp, Homo sapien
tgaatttacctgctcaatatcagtcactccaga

SEQ ID NO: 577972 - DNA, 33 bp, Homo sapien
tgaatttacctgctcagtatcagtcactccaga

SEQ ID NO: 577973 - DNA, 33 bp, Homo sapien
agagtatggtcaggagcatggattattctggct

SEQ ID NO: 577974 - DNA, 33 bp, Homo sapien
agagtatggtcaggagtatggattattctggct

SEQ ID NO: 577975 - DNA, 33 bp, Homo sapien
ctgacacctacagcaacgtggagacatcttcag

SEQ ID NO: 577976 - DNA, 33 bp, Homo sapien
ctgacacctacagcaatgtggagacatcttcag

SEQ ID NO: 577977 - DNA, 33 bp, Homo sapien
ggtgtggttcttctaccggagatgattttgccc

SEQ ID NO: 577978 - DNA, 33 bp, Homo sapien
ggtgtggttcttctactggagatgattttgccc

SEQ ID NO: 577979 - DNA, 33 bp, Homo sapien
cgtcctgccagcaaccagaaagtggtcccactt

SEQ ID NO: 577980 - DNA, 33 bp, Homo sapien
cgtcctgccagcaaccggaaagtggtcccactt

SEQ ID NO: 577981 - DNA, 33 bp, Homo sapien
gtcacttacaaaactcagaagaagccagatctt

SEQ ID NO: 577982 - DNA, 33 bp, Homo sapien
gtcacttacaaaactcggaagaagccagatctt

SEQ ID NO: 577983 - DNA, 33 bp, Homo sapien
gtcagtatttagggaacgaacccaacacccaac

SEQ ID NO: 577984 - DNA, 33 bp, Homo sapien
gtcagtatttagggaatgaacccaacacccaac

SEQ ID NO: 577985 - DNA, 33 bp, Homo sapien
gggcacctcccagaaccctcaggaaacgcctcc

SEQ ID NO: 577986 - DNA, 33 bp, Homo sapien
gggcacctcccagaactctcaggaaacgcctcc

SEQ ID NO: 577987 - DNA, 33 bp, Homo sapien
tcagcctggagcttgaagcggctacttttgagg

SEQ ID NO: 577988 - DNA, 33 bp, Homo sapien
tcagcctggagcttgacgcggctacttttgagg

SEQ ID NO: 577989 - DNA, 33 bp, Homo sapien
acatctagggttatcacatttcgcaaagaaaaa

SEQ ID NO: 577990 - DNA, 33 bp, Homo sapien
acatctagggttatcagatttcgcaaagaaaaa

SEQ ID NO: 577991 - DNA, 33 bp, Homo sapien
caaatggattgtgaaacgggtgactgcagagac

SEQ ID NO: 577992 - DNA, 33 bp, Homo sapien
caaatggattgtgaaatgggtgactgcagagac

SEQ ID NO: 577993 - DNA, 33 bp, Homo sapien
gaggggaggtcattaagctgcctaaggtttccc

SEQ ID NO: 577994 - DNA, 33 bp, Homo sapien
gaggggaggtcattaatctgcctaaggtttccc

SEQ ID NO: 577995 - DNA, 33 bp, Homo sapien
agccagtcatgaaggcagccaaaaatgggattt

SEQ ID NO: 577996 - DNA, 33 bp, Homo sapien
agccagtcatgaaggcggccaaaaatgggattt

SEQ ID NO: 577997 - DNA, 33 bp, Homo sapien
ggtggatgccaactccaagtaagtcagacttgg

SEQ ID NO: 577998 - DNA, 33 bp, Homo sapien
ggtggatgccaactccgagtaagtcagacttgg

SEQ ID NO: 577999 - DNA, 33 bp, Homo sapien
gtgctcgtcagtcactcagatgaagtcacagaa

SEQ ID NO: 578000 - DNA, 33 bp, Homo sapien
gtgctcgtcagtcacttagatgaagtcacagaa

SEQ ID NO: 578001 - DNA, 33 bp, Homo sapien
acagttctaggggacgaaagttcaaaatcagtt

SEQ ID NO: 578002 - DNA, 33 bp, Homo sapien
acagttctaggggacggaagttcaaaatcagtt

SEQ ID NO: 578003 - DNA, 33 bp, Homo sapien
gtggcatcccagggttcaaagtgaccaggcagc

SEQ ID NO: 578004 - DNA, 33 bp, Homo sapien
gtggcatcccagggtttaaagtgaccaggcagc

SEQ ID NO: 578005 - DNA, 33 bp, Homo sapien
gcataatgaaagctccactgagggaagtccccc

SEQ ID NO: 578006 - DNA, 33 bp, Homo sapien
gcataatgaaagctcctctgagggaagtccccc

SEQ ID NO: 578007 - DNA, 33 bp, Homo sapien
agctggcgataggcacagaatgaaacaaccaaa

SEQ ID NO: 578008 - DNA, 33 bp, Homo sapien
agctggcgataggcacggaatgaaacaaccaaa

SEQ ID NO: 578009 - DNA, 33 bp, Homo sapien
aataccagctctttgaagaaaaggactttggtt

SEQ ID NO: 578010 - DNA, 33 bp, Homo sapien
aataccagctctttgaggaaaaggactttggtt

SEQ ID NO: 578011 - DNA, 33 bp, Homo sapien
ccacacagttactcacagcagggatataatttc

SEQ ID NO: 578012 - DNA, 33 bp, Homo sapien
ccacacagttactcacggcagggatataatttc

SEQ ID NO: 578013 - DNA, 33 bp, Homo sapien
aatagccgcaatcaacaaaccatcttaggagat

SEQ ID NO: 578014 - DNA, 33 bp, Homo sapien
aatagccgcaatcaacgaaccatcttaggagat

SEQ ID NO: 578015 - DNA, 33 bp, Homo sapien
gggagttgctccgagacgcagaacctcaggccc

SEQ ID NO: 578016 - DNA, 33 bp, Homo sapien
gggagttgctccgagatgcagaacctcaggccc

SEQ ID NO: 578017 - DNA, 33 bp, Homo sapien
aatagaatcacactacaaatgctgtttagtaga

SEQ ID NO: 578018 - DNA, 33 bp, Homo sapien
aatagaatcacactacgaatgctgtttagtaga

SEQ ID NO: 578019 - DNA, 33 bp, Homo sapien
tatgaacctcattgttcaaaagcctgccatgct

SEQ ID NO: 578020 - DNA, 33 bp, Homo sapien
tatgaacctcattgtttaaaagcctgccatgct

SEQ ID NO: 578021 - DNA, 33 bp, Homo sapien
cagacagcacagatccagatagattgcaccact

SEQ ID NO: 578022 - DNA, 33 bp, Homo sapien
cagacagcacagatccggatagattgcaccact

SEQ ID NO: 578023 - DNA, 33 bp, Homo sapien
caaaggacagggcatcccgtacgcacaagtcag

SEQ ID NO: 578024 - DNA, 33 bp, Homo sapien
caaaggacagggcatcgcgtacgcacaagtcag

SEQ ID NO: 578025 - DNA, 33 bp, Homo sapien
gagagtccctcagtaacctacctaagccagttg

SEQ ID NO: 578026 - DNA, 33 bp, Homo sapien
gagagtccctcagtaatctacctaagccagttg

SEQ ID NO: 578027 - DNA, 33 bp, Homo sapien
tgtgttactctttacacgaagtctcttgttaac

SEQ ID NO: 578028 - DNA, 33 bp, Homo sapien
tgtgttactctttacatgaagtctcttgttaac

SEQ ID NO: 578029 - DNA, 33 bp, Homo sapien
tttattcaatcaaccaactgaaaacctatacta

SEQ ID NO: 578030 - DNA, 33 bp, Homo sapien
tttattcaatcaaccagctgaaaacctatacta

SEQ ID NO: 578031 - DNA, 33 bp, Homo sapien
cttttacatatttagaagttgacaataattaat

SEQ ID NO: 578032 - DNA, 33 bp, Homo sapien
cttttacatatttagaggttgacaataattaat

SEQ ID NO: 578033 - DNA, 33 bp, Homo sapien
gctaattgagcatctacaagctgacaagcaaag

SEQ ID NO: 578034 - DNA, 33 bp, Homo sapien
gctaattgagcatctataagctgacaagcaaag

SEQ ID NO: 578035 - DNA, 33 bp, Homo sapien
aaatggttggggggaaaatctaatgtcatgtga

SEQ ID NO: 578036 - DNA, 33 bp, Homo sapien
aaatggttggggggaacatctaatgtcatgtga

SEQ ID NO: 578037 - DNA, 33 bp, Homo sapien
agaacagtgtggttagcaactccccagtgtttg

SEQ ID NO: 578038 - DNA, 33 bp, Homo sapien
agaacagtgtggttaggaactccccagtgtttg

SEQ ID NO: 578039 - DNA, 33 bp, Homo sapien
tggcacaggcctgcaacagacataggaaacgct

SEQ ID NO: 578040 - DNA, 33 bp, Homo sapien
tggcacaggcctgcaatagacataggaaacgct

SEQ ID NO: 578041 - DNA, 33 bp, Homo sapien
aaagctttgcagaaaacctcaaacattcctttt

SEQ ID NO: 578042 - DNA, 33 bp, Homo sapien
aaagctttgcagaaaatctcaaacattcctttt

SEQ ID NO: 578043 - DNA, 33 bp, Homo sapien
gagaaagccaatgttggatccacccctgcctga

SEQ ID NO: 578044 - DNA, 33 bp, Homo sapien
gagaaagccaatgttgtatccacccctgcctga

SEQ ID NO: 578045 - DNA, 33 bp, Homo sapien
tgccaacagccccaaacctctatcttccaagtc

SEQ ID NO: 578046 - DNA, 33 bp, Homo sapien
tgccaacagccccaaatctctatcttccaagtc

SEQ ID NO: 578047 - DNA, 33 bp, Homo sapien
gggccaactccaagacgaaaggagaaatggacc

SEQ ID NO: 578048 - DNA, 33 bp, Homo sapien
gggccaactccaagactaaaggagaaatggacc

SEQ ID NO: 578049 - DNA, 33 bp, Homo sapien
ctcccggcgtacacagaaccggtgagtcagagg

SEQ ID NO: 578050 - DNA, 33 bp, Homo sapien
ctcccggcgtacacaggaccggtgagtcagagg

SEQ ID NO: 578051 - DNA, 33 bp, Homo sapien
gcagtccaatcaaagcaaaggtcgggactcggg

SEQ ID NO: 578052 - DNA, 33 bp, Homo sapien
gcagtccaatcaaagcgaaggtcgggactcggg

SEQ ID NO: 578053 - DNA, 33 bp, Homo sapien
agatccctgccattaaacaacatgtaactgttt

SEQ ID NO: 578054 - DNA, 33 bp, Homo sapien
agatccctgccattaagcaacatgtaactgttt

SEQ ID NO: 578055 - DNA, 33 bp, Homo sapien
ggccaagtacagttgtcaaatatctggactcac

SEQ ID NO: 578056 - DNA, 33 bp, Homo sapien
ggccaagtacagttgttaaatatctggactcac

SEQ ID NO: 578057 - DNA, 33 bp, Homo sapien
ctgcggaaccacatgaacacacgcttactggct

SEQ ID NO: 578058 - DNA, 33 bp, Homo sapien
ctgcggaaccacatgaccacacgcttactggct

SEQ ID NO: 578059 - DNA, 33 bp, Homo sapien
ttcccagccttgtccacgtggccatccctgaat

SEQ ID NO: 578060 - DNA, 33 bp, Homo sapien
ttcccagccttgtccatgtggccatccctgaat

SEQ ID NO: 578061 - DNA, 33 bp, Homo sapien
gatcctgggacagccaagaatgtatcaggtgca

SEQ ID NO: 578062 - DNA, 33 bp, Homo sapien
gatcctgggacagccaggaatgtatcaggtgca

SEQ ID NO: 578063 - DNA, 33 bp, Homo sapien
ccccaggccggcgataccaaacaccagagtgtc

SEQ ID NO: 578064 - DNA, 33 bp, Homo sapien
ccccaggccggcgatagcaaacaccagagtgtc

SEQ ID NO: 578065 - DNA, 33 bp, Homo sapien
ggctaaacatgaaaacgaggagaggaaacctgc

SEQ ID NO: 578066 - DNA, 33 bp, Homo sapien
ggctaaacatgaaaactaggagaggaaacctgc

SEQ ID NO: 578067 - DNA, 33 bp, Homo sapien
ccaagagtctctgaaacgcctggctggaaatag

SEQ ID NO: 578068 - DNA, 33 bp, Homo sapien
ccaagagtctctgaaatgcctggctggaaatag

SEQ ID NO: 578069 - DNA, 33 bp, Homo sapien
ctaagatgttgtgtaaatgaatgaatcaataag

SEQ ID NO: 578070 - DNA, 33 bp, Homo sapien
ctaagatgttgtgtaagtgaatgaatcaataag

SEQ ID NO: 578071 - DNA, 33 bp, Homo sapien
gcaatcatcaaagaaaaaaaacagccaacagca

SEQ ID NO: 578072 - DNA, 33 bp, Homo sapien
gcaatcatcaaagaaagaaaacagccaacagca

SEQ ID NO: 578073 - DNA, 33 bp, Homo sapien
caaatactcaaaattacgttaccattgcctata

SEQ ID NO: 578074 - DNA, 33 bp, Homo sapien
caaatactcaaaattatgttaccattgcctata

SEQ ID NO: 578075 - DNA, 33 bp, Homo sapien
acagtataatcttaggaaaccactgtcatatat

SEQ ID NO: 578076 - DNA, 33 bp, Homo sapien
acagtataatcttagggaaccactgtcatatat

SEQ ID NO: 578077 - DNA, 33 bp, Homo sapien
atttaaggccaacttacggagagaagatgagat

SEQ ID NO: 578078 - DNA, 33 bp, Homo sapien
atttaaggccaacttatggagagaagatgagat

SEQ ID NO: 578079 - DNA, 33 bp, Homo sapien
gtcaaatataaccttacgtgatgaaagcttttt

SEQ ID NO: 578080 - DNA, 33 bp, Homo sapien
gtcaaatataaccttatgtgatgaaagcttttt

SEQ ID NO: 578081 - DNA, 33 bp, Homo sapien
ttgatatcctgcttcacggatgaggaacaaaga

SEQ ID NO: 578082 - DNA, 33 bp, Homo sapien
ttgatatcctgcttcatggatgaggaacaaaga

SEQ ID NO: 578083 - DNA, 33 bp, Homo sapien
taatttcagctttggaacctaagtggctgaagt

SEQ ID NO: 578084 - DNA, 33 bp, Homo sapien
taatttcagctttggaccctaagtggctgaagt

SEQ ID NO: 578085 - DNA, 33 bp, Homo sapien
tgtgccccagatgaaacctgagcaacagtgtcc

SEQ ID NO: 578086 - DNA, 33 bp, Homo sapien
tgtgccccagatgaaagctgagcaacagtgtcc

SEQ ID NO: 578087 - DNA, 33 bp, Homo sapien
tgaaagaagggacatcgaatacagatcaaagaa

SEQ ID NO: 578088 - DNA, 33 bp, Homo sapien
tgaaagaagggacatctaatacagatcaaagaa

SEQ ID NO: 578089 - DNA, 33 bp, Homo sapien
tagtatatcaggtgcacggtagcagtaaataca

SEQ ID NO: 578090 - DNA, 33 bp, Homo sapien
tagtatatcaggtgcatggtagcagtaaataca

SEQ ID NO: 578091 - DNA, 33 bp, Homo sapien
tctatgaatgaatatacagtgattttccagaga

SEQ ID NO: 578092 - DNA, 33 bp, Homo sapien
tctatgaatgaatatagagtgattttccagaga

SEQ ID NO: 578093 - DNA, 33 bp, Homo sapien
gctagttccaagtgagaaatggcctggccttca

SEQ ID NO: 578094 - DNA, 33 bp, Homo sapien
gctagttccaagtgaggaatggcctggccttca

SEQ ID NO: 578095 - DNA, 33 bp, Homo sapien
gtgtgaatcagggtgaaagcagaacttcgtggg

SEQ ID NO: 578096 - DNA, 33 bp, Homo sapien
gtgtgaatcagggtgagagcagaacttcgtggg

SEQ ID NO: 578097 - DNA, 33 bp, Homo sapien
acatttgtacacaataaaaggagctccagatgc

SEQ ID NO: 578098 - DNA, 33 bp, Homo sapien
acatttgtacacaatacaaggagctccagatgc

SEQ ID NO: 578099 - DNA, 33 bp, Homo sapien
ggtcccaggaggccaccgacaatgctggacagg

SEQ ID NO: 578100 - DNA, 33 bp, Homo sapien
ggtcccaggaggccactgacaatgctggacagg

SEQ ID NO: 578101 - DNA, 33 bp, Homo sapien
gaacgttgtctaacaaacctgaataaaagttat

SEQ ID NO: 578102 - DNA, 33 bp, Homo sapien
gaacgttgtctaacaagcctgaataaaagttat

SEQ ID NO: 578103 - DNA, 33 bp, Homo sapien
ggggcactatcacccactagcaaatcagactta

SEQ ID NO: 578104 - DNA, 33 bp, Homo sapien
ggggcactatcacccattagcaaatcagactta

SEQ ID NO: 578105 - DNA, 33 bp, Homo sapien
catcccctgtttgggaaagaatgcatggaaaga

SEQ ID NO: 578106 - DNA, 33 bp, Homo sapien
catcccctgtttgggatagaatgcatggaaaga

SEQ ID NO: 578107 - DNA, 33 bp, Homo sapien
ggctatactgttaccacgctgaatgggcgaatg

SEQ ID NO: 578108 - DNA, 33 bp, Homo sapien
ggctatactgttaccatgctgaatgggcgaatg

SEQ ID NO: 578109 - DNA, 33 bp, Homo sapien
ctgcatgggagagcacaaatatctatgtaggag

SEQ ID NO: 578110 - DNA, 33 bp, Homo sapien
ctgcatgggagagcacgaatatctatgtaggag

SEQ ID NO: 578111 - DNA, 33 bp, Homo sapien
ctacccttaaaccaaccgctggcagtggttctg

SEQ ID NO: 578112 - DNA, 33 bp, Homo sapien
ctacccttaaaccaacggctggcagtggttctg

SEQ ID NO: 578113 - DNA, 33 bp, Homo sapien
acactggatctgctgacgtcttcattgtggact

SEQ ID NO: 578114 - DNA, 33 bp, Homo sapien
acactggatctgctgatgtcttcattgtggact

SEQ ID NO: 578115 - DNA, 33 bp, Homo sapien
tgtctctttttataaccccattcatgaaggctg

SEQ ID NO: 578116 - DNA, 33 bp, Homo sapien
tgtctctttttataactccattcatgaaggctg

SEQ ID NO: 578117 - DNA, 33 bp, Homo sapien
tgtgtgctcctgtgccgctgattcaagtatctt

SEQ ID NO: 578118 - DNA, 33 bp, Homo sapien
tgtgtgctcctgtgcctctgattcaagtatctt

SEQ ID NO: 578119 - DNA, 33 bp, Homo sapien
gagtcacgataaagagccatccttttccccaca

SEQ ID NO: 578120 - DNA, 33 bp, Homo sapien
gagtcacgataaagaggcatccttttccccaca

SEQ ID NO: 578121 - DNA, 33 bp, Homo sapien
ctgaatatttatattgcaaagtccaagtagagt

SEQ ID NO: 578122 - DNA, 33 bp, Homo sapien
ctgaatatttatattgtaaagtccaagtagagt

SEQ ID NO: 578123 - DNA, 33 bp, Homo sapien
tgcagcaatgatgacacgaaaacagctgtttaa

SEQ ID NO: 578124 - DNA, 33 bp, Homo sapien
tgcagcaatgatgacatgaaaacagctgtttaa

SEQ ID NO: 578125 - DNA, 33 bp, Homo sapien
aatgatgatgaaaccaagtcctgtagtagcgcc

SEQ ID NO: 578126 - DNA, 33 bp, Homo sapien
aatgatgatgaaaccatgtcctgtagtagcgcc

SEQ ID NO: 578127 - DNA, 33 bp, Homo sapien
gaagcatccttaagccagaggagtggcgcctcc

SEQ ID NO: 578128 - DNA, 33 bp, Homo sapien
gaagcatccttaagccggaggagtggcgcctcc

SEQ ID NO: 578129 - DNA, 33 bp, Homo sapien
gctgttttcccgggagaagaatggcctccctga

SEQ ID NO: 578130 - DNA, 33 bp, Homo sapien
gctgttttcccgggagtagaatggcctccctga

SEQ ID NO: 578131 - DNA, 33 bp, Homo sapien
tcccaaagatacaagacgccaagatacaaatct

SEQ ID NO: 578132 - DNA, 33 bp, Homo sapien
tcccaaagatacaagatgccaagatacaaatct

SEQ ID NO: 578133 - DNA, 33 bp, Homo sapien
cacactttataaacacagtacactttggcaacg

SEQ ID NO: 578134 - DNA, 33 bp, Homo sapien
cacactttataaacactgtacactttggcaacg

SEQ ID NO: 578135 - DNA, 33 bp, Homo sapien
tggttgtaagcaacagaaactgataccggccac

SEQ ID NO: 578136 - DNA, 33 bp, Homo sapien
tggttgtaagcaacaggaactgataccggccac

SEQ ID NO: 578137 - DNA, 33 bp, Homo sapien
ggcatgtaggccgcagcatcatgtacacacaac

SEQ ID NO: 578138 - DNA, 33 bp, Homo sapien
ggcatgtaggccgcagtatcatgtacacacaac

SEQ ID NO: 578139 - DNA, 33 bp, Homo sapien
gtggttactcaatagcaactgttctgcaatgga

SEQ ID NO: 578140 - DNA, 33 bp, Homo sapien
gtggttactcaatagccactgttctgcaatgga

SEQ ID NO: 578141 - DNA, 33 bp, Homo sapien
ggttttaatccaggggcagcacgttggatccat

SEQ ID NO: 578142 - DNA, 33 bp, Homo sapien
ggttttaatccaggggtagcacgttggatccat

SEQ ID NO: 578143 - DNA, 33 bp, Homo sapien
gaccccaggagagacactaaggagttggatttt

SEQ ID NO: 578144 - DNA, 33 bp, Homo sapien
gaccccaggagagacattaaggagttggatttt

SEQ ID NO: 578145 - DNA, 33 bp, Homo sapien
catgtgtggttggcgcaatctctgggctttgct

SEQ ID NO: 578146 - DNA, 33 bp, Homo sapien
catgtgtggttggcgcgatctctgggctttgct

SEQ ID NO: 578147 - DNA, 33 bp, Homo sapien
ataccttgaccacaaacgagcattgctaaattc

SEQ ID NO: 578148 - DNA, 33 bp, Homo sapien
ataccttgaccacaaatgagcattgctaaattc

SEQ ID NO: 578149 - DNA, 33 bp, Homo sapien
gtgaggttctgtgccaagttaggatacgattat

SEQ ID NO: 578150 - DNA, 33 bp, Homo sapien
gtgaggttctgtgccaggttaggatacgattat

SEQ ID NO: 578151 - DNA, 33 bp, Homo sapien
cgttcctttccaattacaagcattgagcaggga

SEQ ID NO: 578152 - DNA, 33 bp, Homo sapien
cgttcctttccaattagaagcattgagcaggga

SEQ ID NO: 578153 - DNA, 33 bp, Homo sapien
aatttctgagctaaaaaaggatccttgcagaaa

SEQ ID NO: 578154 - DNA, 33 bp, Homo sapien
aatttctgagctaaaagaggatccttgcagaaa

SEQ ID NO: 578155 - DNA, 33 bp, Homo sapien
agccagctgggaaacccaagttttatctgccat

SEQ ID NO: 578156 - DNA, 33 bp, Homo sapien
agccagctgggaaacctaagttttatctgccat

SEQ ID NO: 578157 - DNA, 33 bp, Homo sapien
gtttcttgacaatgcactacgggaagacttggg

SEQ ID NO: 578158 - DNA, 33 bp, Homo sapien
gtttcttgacaatgcattacgggaagacttggg

SEQ ID NO: 578159 - DNA, 33 bp, Homo sapien
catcctcaccaccacaataggagtggccacaac

SEQ ID NO: 578160 - DNA, 33 bp, Homo sapien
catcctcaccaccacactaggagtggccacaac

SEQ ID NO: 578161 - DNA, 33 bp, Homo sapien
gttggtgacgggcagcacggagcctggaactca

SEQ ID NO: 578162 - DNA, 33 bp, Homo sapien
gttggtgacgggcagcgcggagcctggaactca

SEQ ID NO: 578163 - DNA, 33 bp, Homo sapien
gcctggaactcaaaccactcccctctagaatcc

SEQ ID NO: 578164 - DNA, 33 bp, Homo sapien
gcctggaactcaaaccgctcccctctagaatcc

SEQ ID NO: 578165 - DNA, 33 bp, Homo sapien
ggttcctaaaaatcacagtagcatgcagggcct

SEQ ID NO: 578166 - DNA, 33 bp, Homo sapien
ggttcctaaaaatcacggtagcatgcagggcct

SEQ ID NO: 578167 - DNA, 33 bp, Homo sapien
acacgtggcccttcaacgtcacctcagctgtgg

SEQ ID NO: 578168 - DNA, 33 bp, Homo sapien
acacgtggcccttcaaggtcacctcagctgtgg

SEQ ID NO: 578169 - DNA, 33 bp, Homo sapien
gtgattttgtcctcagaaaatgctaggccaatg

SEQ ID NO: 578170 - DNA, 33 bp, Homo sapien
gtgattttgtcctcaggaaatgctaggccaatg

SEQ ID NO: 578171 - DNA, 33 bp, Homo sapien
tagtcctaactagtaacgccgtcatcataacgc

SEQ ID NO: 578172 - DNA, 33 bp, Homo sapien
tagtcctaactagtaatgccgtcatcataacgc

SEQ ID NO: 578173 - DNA, 33 bp, Homo sapien
tgccagagatggtcaggaacaacagctatcata

SEQ ID NO: 578174 - DNA, 33 bp, Homo sapien
tgccagagatggtcagtaacaacagctatcata

SEQ ID NO: 578175 - DNA, 33 bp, Homo sapien
tggcacatactaaggactcatcctgggtccttg

SEQ ID NO: 578176 - DNA, 33 bp, Homo sapien
tggcacatactaaggattcatcctgggtccttg

SEQ ID NO: 578177 - DNA, 33 bp, Homo sapien
agcccaaagcattccaatctaatacagaattta

SEQ ID NO: 578178 - DNA, 33 bp, Homo sapien
agcccaaagcattccagtctaatacagaattta

SEQ ID NO: 578179 - DNA, 33 bp, Homo sapien
gacagcagtgcatcaaactcccctgtagctgga

SEQ ID NO: 578180 - DNA, 33 bp, Homo sapien
gacagcagtgcatcaagctcccctgtagctgga

SEQ ID NO: 578181 - DNA, 33 bp, Homo sapien
accatctccttcaacacaattgtcagcaaccac

SEQ ID NO: 578182 - DNA, 33 bp, Homo sapien
accatctccttcaacataattgtcagcaaccac

SEQ ID NO: 578183 - DNA, 33 bp, Homo sapien
gttgggaaaatcaaaaacagaaggtggctgtaa

SEQ ID NO: 578184 - DNA, 33 bp, Homo sapien
gttgggaaaatcaaaaccagaaggtggctgtaa

SEQ ID NO: 578185 - DNA, 33 bp, Homo sapien
gatttttgactacatcaaagtatttcagaaaca

SEQ ID NO: 578186 - DNA, 33 bp, Homo sapien
gatttttgactacatcgaagtatttcagaaaca

SEQ ID NO: 578187 - DNA, 33 bp, Homo sapien
ttcttactcaggacagaactttttccactgcta

SEQ ID NO: 578188 - DNA, 33 bp, Homo sapien
ttcttactcaggacaggactttttccactgcta

SEQ ID NO: 578189 - DNA, 33 bp, Homo sapien
gatatgtgaatccttccaggccacagtcatgtt

SEQ ID NO: 578190 - DNA, 33 bp, Homo sapien
gatatgtgaatccttcgaggccacagtcatgtt

SEQ ID NO: 578191 - DNA, 33 bp, Homo sapien
tcaaattgtaaaaaaaagtagccattacagtct

SEQ ID NO: 578192 - DNA, 33 bp, Homo sapien
tcaaattgtaaaaaaaggtagccattacagtct

SEQ ID NO: 578193 - DNA, 33 bp, Homo sapien
tcagtggtacagtttgaaaaaggactgtagtaa

SEQ ID NO: 578194 - DNA, 33 bp, Homo sapien
tcagtggtacagtttggaaaaggactgtagtaa

SEQ ID NO: 578195 - DNA, 33 bp, Homo sapien
ttttaacactgggaaacattaacattggttttt

SEQ ID NO: 578196 - DNA, 33 bp, Homo sapien
ttttaacactgggaaatattaacattggttttt

SEQ ID NO: 578197 - DNA, 33 bp, Homo sapien
cttggtgtattcttcaaattggcagctggtcta

SEQ ID NO: 578198 - DNA, 33 bp, Homo sapien
cttggtgtattcttcagattggcagctggtcta

SEQ ID NO: 578199 - DNA, 33 bp, Homo sapien
taaattaaatattgcaactgaaatccctgctaa

SEQ ID NO: 578200 - DNA, 33 bp, Homo sapien
taaattaaatattgcagctgaaatccctgctaa

SEQ ID NO: 578201 - DNA, 33 bp, Homo sapien
ttctgggctctaaagacacagaggggaataaaa

SEQ ID NO: 578202 - DNA, 33 bp, Homo sapien
ttctgggctctaaagatacagaggggaataaaa

SEQ ID NO: 578203 - DNA, 33 bp, Homo sapien
ctcagcatcctaaaggacaaatactattattat

SEQ ID NO: 578204 - DNA, 33 bp, Homo sapien
ctcagcatcctaaagggcaaatactattattat

SEQ ID NO: 578205 - DNA, 33 bp, Homo sapien
gttcttttctagatcacgcacctgatgaatcca

SEQ ID NO: 578206 - DNA, 33 bp, Homo sapien
gttcttttctagatcatgcacctgatgaatcca

SEQ ID NO: 578207 - DNA, 33 bp, Homo sapien
tcactaagcttcttaaggcctgatctcttcatc

SEQ ID NO: 578208 - DNA, 33 bp, Homo sapien
tcactaagcttcttaatgcctgatctcttcatc

SEQ ID NO: 578209 - DNA, 33 bp, Homo sapien
aggtgctgcttcctacagggctcaaagcacctt

SEQ ID NO: 578210 - DNA, 33 bp, Homo sapien
aggtgctgcttcctacggggctcaaagcacctt

SEQ ID NO: 578211 - DNA, 33 bp, Homo sapien
aacctctctgaacttccatctcccagtctgtac

SEQ ID NO: 578212 - DNA, 33 bp, Homo sapien
aacctctctgaacttctatctcccagtctgtac

SEQ ID NO: 578213 - DNA, 33 bp, Homo sapien
tatttgtcgagcattacgcctctggaggataat

SEQ ID NO: 578214 - DNA, 33 bp, Homo sapien
tatttgtcgagcattaggcctctggaggataat

SEQ ID NO: 578215 - DNA, 33 bp, Homo sapien
acaaatgaacaaccaaatgcataaagaccataa

SEQ ID NO: 578216 - DNA, 33 bp, Homo sapien
acaaatgaacaaccaagtgcataaagaccataa

SEQ ID NO: 578217 - DNA, 33 bp, Homo sapien
tactgggcaagttagaaggacacggtggccctc

SEQ ID NO: 578218 - DNA, 33 bp, Homo sapien
tactgggcaagttagacggacacggtggccctc

SEQ ID NO: 578219 - DNA, 33 bp, Homo sapien
agagcttctgatccagcaggtttggatggtacc

SEQ ID NO: 578220 - DNA, 33 bp, Homo sapien
agagcttctgatccagtaggtttggatggtacc

SEQ ID NO: 578221 - DNA, 33 bp, Homo sapien
caacaaataaacaagacagactgaggctttcag

SEQ ID NO: 578222 - DNA, 33 bp, Homo sapien
caacaaataaacaagagagactgaggctttcag

SEQ ID NO: 578223 - DNA, 33 bp, Homo sapien
gcagagttgattcagacaaggcttctttaggaa

SEQ ID NO: 578224 - DNA, 33 bp, Homo sapien
gcagagttgattcagataaggcttctttaggaa

SEQ ID NO: 578225 - DNA, 33 bp, Homo sapien
cacactgggtgcttaccggcaacgtgttgcact

SEQ ID NO: 578226 - DNA, 33 bp, Homo sapien
cacactgggtgcttactggcaacgtgttgcact

SEQ ID NO: 578227 - DNA, 33 bp, Homo sapien
gggtactgaagatatgcaagggtcccaggagct

SEQ ID NO: 578228 - DNA, 33 bp, Homo sapien
gggtactgaagatatgtaagggtcccaggagct

SEQ ID NO: 578229 - DNA, 33 bp, Homo sapien
ctctttgagcactacccgaagggcacatccttt

SEQ ID NO: 578230 - DNA, 33 bp, Homo sapien
ctctttgagcactacctgaagggcacatccttt

SEQ ID NO: 578231 - DNA, 33 bp, Homo sapien
tattgatgtataaaaactccaaaaactgtgcac

SEQ ID NO: 578232 - DNA, 33 bp, Homo sapien
tattgatgtataaaaattccaaaaactgtgcac

SEQ ID NO: 578233 - DNA, 33 bp, Homo sapien
cagtatttgcagcatccaagaatccctggggcg

SEQ ID NO: 578234 - DNA, 33 bp, Homo sapien
cagtatttgcagcatctaagaatccctggggcg

SEQ ID NO: 578235 - DNA, 33 bp, Homo sapien
acccaaagagaaacttcaaaatgtgtgtcctta

SEQ ID NO: 578236 - DNA, 33 bp, Homo sapien
acccaaagagaaacttgaaaatgtgtgtcctta

SEQ ID NO: 578237 - DNA, 33 bp, Homo sapien
tgacttggttacaggaactttagagcctatact

SEQ ID NO: 578238 - DNA, 33 bp, Homo sapien
tgacttggttacaggacctttagagcctatact

SEQ ID NO: 578239 - DNA, 33 bp, Homo sapien
catctcttcttccataggaactctaagattata

SEQ ID NO: 578240 - DNA, 33 bp, Homo sapien
catctcttcttccatatgaactctaagattata

SEQ ID NO: 578241 - DNA, 33 bp, Homo sapien
ttcacaatttaacttcactgagattgagatgca

SEQ ID NO: 578242 - DNA, 33 bp, Homo sapien
ttcacaatttaacttctctgagattgagatgca

SEQ ID NO: 578243 - DNA, 33 bp, Homo sapien
agacgtttcatgtgccaagtcgctggctcctcc

SEQ ID NO: 578244 - DNA, 33 bp, Homo sapien
agacgtttcatgtgccgagtcgctggctcctcc

SEQ ID NO: 578245 - DNA, 33 bp, Homo sapien
gccaaataaagtggcacgggaaacattgtggat

SEQ ID NO: 578246 - DNA, 33 bp, Homo sapien
gccaaataaagtggcatgggaaacattgtggat

SEQ ID NO: 578247 - DNA, 33 bp, Homo sapien
tttaatccagtccaaacgttgtggtgtctgccc

SEQ ID NO: 578248 - DNA, 33 bp, Homo sapien
tttaatccagtccaaatgttgtggtgtctgccc

SEQ ID NO: 578249 - DNA, 33 bp, Homo sapien
acatgcggaggagcaacggggaggacaacaacc

SEQ ID NO: 578250 - DNA, 33 bp, Homo sapien
acatgcggaggagcaatggggaggacaacaacc

SEQ ID NO: 578251 - DNA, 33 bp, Homo sapien
atgggccaatgcagggaagcacagagtcaagaa

SEQ ID NO: 578252 - DNA, 33 bp, Homo sapien
atgggccaatgcaggggagcacagagtcaagaa

SEQ ID NO: 578253 - DNA, 33 bp, Homo sapien
gaaaaatgtcctcctacatcgtgtagatgatcc

SEQ ID NO: 578254 - DNA, 33 bp, Homo sapien
gaaaaatgtcctcctagatcgtgtagatgatcc

SEQ ID NO: 578255 - DNA, 33 bp, Homo sapien
aatatcaagaaaattacggactcagagcaaatt

SEQ ID NO: 578256 - DNA, 33 bp, Homo sapien
aatatcaagaaaattatggactcagagcaaatt

SEQ ID NO: 578257 - DNA, 33 bp, Homo sapien
gagggacattatagacactaagcagatcccatg

SEQ ID NO: 578258 - DNA, 33 bp, Homo sapien
gagggacattatagacgctaagcagatcccatg

SEQ ID NO: 578259 - DNA, 33 bp, Homo sapien
accgtggagatcacagaaatgaaaagcaactga

SEQ ID NO: 578260 - DNA, 33 bp, Homo sapien
accgtggagatcacaggaatgaaaagcaactga

SEQ ID NO: 578261 - DNA, 33 bp, Homo sapien
tttggggtccagttcacgaggcctgaggacatg

SEQ ID NO: 578262 - DNA, 33 bp, Homo sapien
tttggggtccagttcatgaggcctgaggacatg

SEQ ID NO: 578263 - DNA, 33 bp, Homo sapien
cagggctgaaaaagccactctcaggaagggcta

SEQ ID NO: 578264 - DNA, 33 bp, Homo sapien
cagggctgaaaaagccgctctcaggaagggcta

SEQ ID NO: 578265 - DNA, 33 bp, Homo sapien
acaaacgatggcccaacggccacagtcggccca

SEQ ID NO: 578266 - DNA, 33 bp, Homo sapien
acaaacgatggcccaatggccacagtcggccca

SEQ ID NO: 578267 - DNA, 33 bp, Homo sapien
tatgggacagatgctaacctgcagtatgggcat

SEQ ID NO: 578268 - DNA, 33 bp, Homo sapien
tatgggacagatgctatcctgcagtatgggcat

SEQ ID NO: 578269 - DNA, 33 bp, Homo sapien
agagacatcctttcaaaactacattaggtgaac

SEQ ID NO: 578270 - DNA, 33 bp, Homo sapien
agagacatcctttcaagactacattaggtgaac

SEQ ID NO: 578271 - DNA, 33 bp, Homo sapien
ccagattcttcccatccagtaacggccccttcc

SEQ ID NO: 578272 - DNA, 33 bp, Homo sapien
ccagattcttcccatctagtaacggccccttcc

SEQ ID NO: 578273 - DNA, 33 bp, Homo sapien
tgatacaatgacccaaagaagggagcacaacaa

SEQ ID NO: 578274 - DNA, 33 bp, Homo sapien
tgatacaatgacccaaggaagggagcacaacaa

SEQ ID NO: 578275 - DNA, 33 bp, Homo sapien
aggcacgaggctctgagtcaatatttgcatttg

SEQ ID NO: 578276 - DNA, 33 bp, Homo sapien
aggcacgaggctctgattcaatatttgcatttg

SEQ ID NO: 578277 - DNA, 33 bp, Homo sapien
ctcagtagttccactccgacatgttacccaaga

SEQ ID NO: 578278 - DNA, 33 bp, Homo sapien
ctcagtagttccactctgacatgttacccaaga

SEQ ID NO: 578279 - DNA, 33 bp, Homo sapien
gggtttagtccagggaaatccattttgagcttc

SEQ ID NO: 578280 - DNA, 33 bp, Homo sapien
gggtttagtccagggagatccattttgagcttc

SEQ ID NO: 578281 - DNA, 33 bp, Homo sapien
tacccatttgcattcaccccggacacctccctc

SEQ ID NO: 578282 - DNA, 33 bp, Homo sapien
tacccatttgcattcatcccggacacctccctc

SEQ ID NO: 578283 - DNA, 33 bp, Homo sapien
aaagtaatcaaaccgaagctcatttgactggct

SEQ ID NO: 578284 - DNA, 33 bp, Homo sapien
aaagtaatcaaaccgacgctcatttgactggct

SEQ ID NO: 578285 - DNA, 33 bp, Homo sapien
catcctaatttcatgcaaggctggaaatcacac

SEQ ID NO: 578286 - DNA, 33 bp, Homo sapien
catcctaatttcatgcgaggctggaaatcacac

SEQ ID NO: 578287 - DNA, 33 bp, Homo sapien
atttgcggttcggtagaaggaatcttcagtaag

SEQ ID NO: 578288 - DNA, 33 bp, Homo sapien
atttgcggttcggtagtaggaatcttcagtaag

SEQ ID NO: 578289 - DNA, 33 bp, Homo sapien
ttccgagcctgactgacggcgaattcgtatttc

SEQ ID NO: 578290 - DNA, 33 bp, Homo sapien
ttccgagcctgactgatggcgaattcgtatttc

SEQ ID NO: 578291 - DNA, 33 bp, Homo sapien
taatacggatatgtgaataacagtttcagagca

SEQ ID NO: 578292 - DNA, 33 bp, Homo sapien
taatacggatatgtgagtaacagtttcagagca

SEQ ID NO: 578293 - DNA, 33 bp, Homo sapien
ccaggtcccaaagccaactctgttcatgtaaga

SEQ ID NO: 578294 - DNA, 33 bp, Homo sapien
ccaggtcccaaagccacctctgttcatgtaaga

SEQ ID NO: 578295 - DNA, 33 bp, Homo sapien
cctacagattctgaaacgacttctttgggatta

SEQ ID NO: 578296 - DNA, 33 bp, Homo sapien
cctacagattctgaaatgacttctttgggatta

SEQ ID NO: 578297 - DNA, 33 bp, Homo sapien
gtagtcatacccagcaagtgcatataacttctc

SEQ ID NO: 578298 - DNA, 33 bp, Homo sapien
gtagtcatacccagcatgtgcatataacttctc

SEQ ID NO: 578299 - DNA, 33 bp, Homo sapien
catttgtcactggcaacaacttttgcatttccc

SEQ ID NO: 578300 - DNA, 33 bp, Homo sapien
catttgtcactggcaagaacttttgcatttccc

SEQ ID NO: 578301 - DNA, 33 bp, Homo sapien
cagttcttttaagtgcaaaggaaaattgatttc

SEQ ID NO: 578302 - DNA, 33 bp, Homo sapien
cagttcttttaagtgctaaggaaaattgatttc

SEQ ID NO: 578303 - DNA, 33 bp, Homo sapien
actttcctggatcatacattgagctgatttgtc

SEQ ID NO: 578304 - DNA, 33 bp, Homo sapien
actttcctggatcatatattgagctgatttgtc

SEQ ID NO: 578305 - DNA, 33 bp, Homo sapien
cagtaaaaactggcaacgctgttcagatatttt

SEQ ID NO: 578306 - DNA, 33 bp, Homo sapien
cagtaaaaactggcaatgctgttcagatatttt

SEQ ID NO: 578307 - DNA, 33 bp, Homo sapien
tgtactcttataactcaataataagcagacaaa

SEQ ID NO: 578308 - DNA, 33 bp, Homo sapien
tgtactcttataactccataataagcagacaaa

SEQ ID NO: 578309 - DNA, 33 bp, Homo sapien
ttgggtgaattctcaacgttgcgattcttagag

SEQ ID NO: 578310 - DNA, 33 bp, Homo sapien
ttgggtgaattctcaatgttgcgattcttagag

SEQ ID NO: 578311 - DNA, 33 bp, Homo sapien
gtggggccacagatacagatggataggaatgta

SEQ ID NO: 578312 - DNA, 33 bp, Homo sapien
gtggggccacagatacggatggataggaatgta

SEQ ID NO: 578313 - DNA, 33 bp, Homo sapien
tggaactaactattgaggctgttattttgccaa

SEQ ID NO: 578314 - DNA, 33 bp, Homo sapien
tggaactaactattgatgctgttattttgccaa

SEQ ID NO: 578315 - DNA, 33 bp, Homo sapien
agacactcttcaaaaaactgtgtttagtcagac

SEQ ID NO: 578316 - DNA, 33 bp, Homo sapien
agacactcttcaaaaatctgtgtttagtcagac

SEQ ID NO: 578317 - DNA, 33 bp, Homo sapien
attagctccaccaaagaatagatgttactggag

SEQ ID NO: 578318 - DNA, 33 bp, Homo sapien
attagctccaccaaagtatagatgttactggag

SEQ ID NO: 578319 - DNA, 33 bp, Homo sapien
agaggtaagcagaaggacatatagcaggtgagt

SEQ ID NO: 578320 - DNA, 33 bp, Homo sapien
agaggtaagcagaagggcatatagcaggtgagt

SEQ ID NO: 578321 - DNA, 33 bp, Homo sapien
gtatcaacggaaatgacacaactccttcaatct

SEQ ID NO: 578322 - DNA, 33 bp, Homo sapien
gtatcaacggaaatgatacaactccttcaatct

SEQ ID NO: 578323 - DNA, 33 bp, Homo sapien
gcatcttggtgaggcaagccccatcctgagtgt

SEQ ID NO: 578324 - DNA, 33 bp, Homo sapien
gcatcttggtgaggcacgccccatcctgagtgt

SEQ ID NO: 578325 - DNA, 33 bp, Homo sapien
ccctcgttcatcttctcacctccagggacactt

SEQ ID NO: 578326 - DNA, 33 bp, Homo sapien
ccctcgttcatcttcttacctccagggacactt

SEQ ID NO: 578327 - DNA, 33 bp, Homo sapien
ccctgggatctggacagacaaagggatgacaag

SEQ ID NO: 578328 - DNA, 33 bp, Homo sapien
ccctgggatctggacatacaaagggatgacaag

SEQ ID NO: 578329 - DNA, 33 bp, Homo sapien
tggttgcaactggagtcacatgacatcaagcaa

SEQ ID NO: 578330 - DNA, 33 bp, Homo sapien
tggttgcaactggagttacatgacatcaagcaa

SEQ ID NO: 578331 - DNA, 33 bp, Homo sapien
gttgctggcttgagtacctgaggacagttggtc

SEQ ID NO: 578332 - DNA, 33 bp, Homo sapien
gttgctggcttgagtatctgaggacagttggtc

SEQ ID NO: 578333 - DNA, 33 bp, Homo sapien
gctgaaagaaaaaacaactgaaatctacatcta

SEQ ID NO: 578334 - DNA, 33 bp, Homo sapien
gctgaaagaaaaaacatctgaaatctacatcta

SEQ ID NO: 578335 - DNA, 33 bp, Homo sapien
agagcaaactcttcacaggaatttctacttttg

SEQ ID NO: 578336 - DNA, 33 bp, Homo sapien
agagcaaactcttcacgggaatttctacttttg

SEQ ID NO: 578337 - DNA, 33 bp, Homo sapien
aaaacactattggcttcaaatatatatgtaaca

SEQ ID NO: 578338 - DNA, 33 bp, Homo sapien
aaaacactattggctttaaatatatatgtaaca

SEQ ID NO: 578339 - DNA, 33 bp, Homo sapien
gttctcagcaagtctacgtagcaggcttctgtc

SEQ ID NO: 578340 - DNA, 33 bp, Homo sapien
gttctcagcaagtctatgtagcaggcttctgtc

SEQ ID NO: 578341 - DNA, 33 bp, Homo sapien
gcaaccaaaaacctaacgcagctaaacataaag

SEQ ID NO: 578342 - DNA, 33 bp, Homo sapien
gcaaccaaaaacctaatgcagctaaacataaag

SEQ ID NO: 578343 - DNA, 33 bp, Homo sapien
tgggcctctatctccacgacaacaaaataaaaa

SEQ ID NO: 578344 - DNA, 33 bp, Homo sapien
tgggcctctatctccatgacaacaaaataaaaa

SEQ ID NO: 578345 - DNA, 33 bp, Homo sapien
tacacaatgggaaacaaggacttcaaacaacat

SEQ ID NO: 578346 - DNA, 33 bp, Homo sapien
tacacaatgggaaacagggacttcaaacaacat

SEQ ID NO: 578347 - DNA, 33 bp, Homo sapien
acaagacgtaaagagaagttctgaaattaaagt

SEQ ID NO: 578348 - DNA, 33 bp, Homo sapien
acaagacgtaaagagacgttctgaaattaaagt

SEQ ID NO: 578349 - DNA, 33 bp, Homo sapien
ctttatctcctagctacacagggggagatgggg

SEQ ID NO: 578350 - DNA, 33 bp, Homo sapien
ctttatctcctagctagacagggggagatgggg

SEQ ID NO: 578351 - DNA, 33 bp, Homo sapien
gggtcatgggtgcaacaaagtgtttttaacatg

SEQ ID NO: 578352 - DNA, 33 bp, Homo sapien
gggtcatgggtgcaacgaagtgtttttaacatg

SEQ ID NO: 578353 - DNA, 33 bp, Homo sapien
ctacagatattatttccccccaagagagccagt

SEQ ID NO: 578354 - DNA, 33 bp, Homo sapien
ctacagatattatttctccccaagagagccagt

SEQ ID NO: 578355 - DNA, 33 bp, Homo sapien
ctctccttttgcctgaagtaaatcctttaaatt

SEQ ID NO: 578356 - DNA, 33 bp, Homo sapien
ctctccttttgcctgaggtaaatcctttaaatt

SEQ ID NO: 578357 - DNA, 33 bp, Homo sapien
tatctatgaagatttaagtttgactcaagttta

SEQ ID NO: 578358 - DNA, 33 bp, Homo sapien
tatctatgaagatttacgtttgactcaagttta

SEQ ID NO: 578359 - DNA, 33 bp, Homo sapien
cgatcgatgtagacacagtgcattttgctcaga

SEQ ID NO: 578360 - DNA, 33 bp, Homo sapien
cgatcgatgtagacacggtgcattttgctcaga

SEQ ID NO: 578361 - DNA, 33 bp, Homo sapien
ctctgaaatagaagagaaggagaagtaaaaaca

SEQ ID NO: 578362 - DNA, 33 bp, Homo sapien
ctctgaaatagaagaggaggagaagtaaaaaca

SEQ ID NO: 578363 - DNA, 33 bp, Homo sapien
atcaaccaggtcagcaacttcttaaactcaaga

SEQ ID NO: 578364 - DNA, 33 bp, Homo sapien
atcaaccaggtcagcagcttcttaaactcaaga

SEQ ID NO: 578365 - DNA, 33 bp, Homo sapien
gacaaaagcttctgtacgaacttcaaatactag

SEQ ID NO: 578366 - DNA, 33 bp, Homo sapien
gacaaaagcttctgtatgaacttcaaatactag

SEQ ID NO: 578367 - DNA, 33 bp, Homo sapien
tcgaatcaagttattaccttgaagtcaggaggg

SEQ ID NO: 578368 - DNA, 33 bp, Homo sapien
tcgaatcaagttattatcttgaagtcaggaggg

SEQ ID NO: 578369 - DNA, 33 bp, Homo sapien
tatcctacttttaaaacgtatctgctgatacta

SEQ ID NO: 578370 - DNA, 33 bp, Homo sapien
tatcctacttttaaaatgtatctgctgatacta

SEQ ID NO: 578371 - DNA, 33 bp, Homo sapien
ttctttcagctccatacgtgcaaattgtgacag

SEQ ID NO: 578372 - DNA, 33 bp, Homo sapien
ttctttcagctccatatgtgcaaattgtgacag

SEQ ID NO: 578373 - DNA, 33 bp, Homo sapien
cctttctctttttaaactgcagattctcccaag

SEQ ID NO: 578374 - DNA, 33 bp, Homo sapien
cctttctctttttaaattgcagattctcccaag

SEQ ID NO: 578375 - DNA, 33 bp, Homo sapien
ctatttaattcctgaaaagatcatttggatatg

SEQ ID NO: 578376 - DNA, 33 bp, Homo sapien
ctatttaattcctgaagagatcatttggatatg

SEQ ID NO: 578377 - DNA, 33 bp, Homo sapien
atcatagctgaaaaaagtaacttcaattcagta

SEQ ID NO: 578378 - DNA, 33 bp, Homo sapien
atcatagctgaaaaaattaacttcaattcagta

SEQ ID NO: 578379 - DNA, 33 bp, Homo sapien
atgtcctaagaggatacgctcctgattacttct

SEQ ID NO: 578380 - DNA, 33 bp, Homo sapien
atgtcctaagaggatatgctcctgattacttct

SEQ ID NO: 578381 - DNA, 33 bp, Homo sapien
tatatcaaataaagaactgaagtctgctgagat

SEQ ID NO: 578382 - DNA, 33 bp, Homo sapien
tatatcaaataaagaattgaagtctgctgagat

SEQ ID NO: 578383 - DNA, 33 bp, Homo sapien
ttgatttgtgtcaaaactacctgagattttatt

SEQ ID NO: 578384 - DNA, 33 bp, Homo sapien
ttgatttgtgtcaaaagtacctgagattttatt

SEQ ID NO: 578385 - DNA, 33 bp, Homo sapien
caagatgctacatagtcaaacagaactgggttg

SEQ ID NO: 578386 - DNA, 33 bp, Homo sapien
caagatgctacatagtgaaacagaactgggttg

SEQ ID NO: 578387 - DNA, 33 bp, Homo sapien
actatgtagcatcttgaaaagaaaaattataat

SEQ ID NO: 578388 - DNA, 33 bp, Homo sapien
actatgtagcatcttggaaagaaaaattataat

SEQ ID NO: 578389 - DNA, 33 bp, Homo sapien
acacagtatacaaaatcaggtttcctccattcc

SEQ ID NO: 578390 - DNA, 33 bp, Homo sapien
acacagtatacaaaattaggtttcctccattcc

SEQ ID NO: 578391 - DNA, 33 bp, Homo sapien
ttaataatctttaaacaacaacctacagacatg

SEQ ID NO: 578392 - DNA, 33 bp, Homo sapien
ttaataatctttaaaccacaacctacagacatg

SEQ ID NO: 578393 - DNA, 33 bp, Homo sapien
ccaagttttaaaacgccaatttgtgatatagag

SEQ ID NO: 578394 - DNA, 33 bp, Homo sapien
ccaagttttaaaacgctaatttgtgatatagag

SEQ ID NO: 578395 - DNA, 33 bp, Homo sapien
gaccttggatctccacagggtaagacttcaggt

SEQ ID NO: 578396 - DNA, 33 bp, Homo sapien
gaccttggatctccacggggtaagacttcaggt

SEQ ID NO: 578397 - DNA, 33 bp, Homo sapien
aggatctgaggattcacgacaaaagggccatct

SEQ ID NO: 578398 - DNA, 33 bp, Homo sapien
aggatctgaggattcatgacaaaagggccatct

SEQ ID NO: 578399 - DNA, 33 bp, Homo sapien
gtttttctgtgaggaactgggatttaattatgt

SEQ ID NO: 578400 - DNA, 33 bp, Homo sapien
gtttttctgtgaggaattgggatttaattatgt

SEQ ID NO: 578401 - DNA, 33 bp, Homo sapien
tgaggagattccattacagccaaatgagagaca

SEQ ID NO: 578402 - DNA, 33 bp, Homo sapien
tgaggagattccattatagccaaatgagagaca

SEQ ID NO: 578403 - DNA, 33 bp, Homo sapien
tgggaaacacagaaatgatatgctctaaacaaa

SEQ ID NO: 578404 - DNA, 33 bp, Homo sapien
tgggaaacacagaaattatatgctctaaacaaa

SEQ ID NO: 578405 - DNA, 33 bp, Homo sapien
gggctgtcataacaaactactatgaagtggggg

SEQ ID NO: 578406 - DNA, 33 bp, Homo sapien
gggctgtcataacaaagtactatgaagtggggg

SEQ ID NO: 578407 - DNA, 33 bp, Homo sapien
actgctgttagagatacgaacttttccacaaag

SEQ ID NO: 578408 - DNA, 33 bp, Homo sapien
actgctgttagagatatgaacttttccacaaag

SEQ ID NO: 578409 - DNA, 33 bp, Homo sapien
gtcctggagacacagcacggtggttggaagcag

SEQ ID NO: 578410 - DNA, 33 bp, Homo sapien
gtcctggagacacagcgcggtggttggaagcag

SEQ ID NO: 578411 - DNA, 33 bp, Homo sapien
ctgcctggcagggcccaaagcttcactccttct

SEQ ID NO: 578412 - DNA, 33 bp, Homo sapien
ctgcctggcagggccctaagcttcactccttct

SEQ ID NO: 578413 - DNA, 33 bp, Homo sapien
gaaaggttgaaggatacgtgaaaagtggacctt

SEQ ID NO: 578414 - DNA, 33 bp, Homo sapien
gaaaggttgaaggatatgtgaaaagtggacctt

SEQ ID NO: 578415 - DNA, 33 bp, Homo sapien
aaggagatccttcatacaaatgtgcccacaaat

SEQ ID NO: 578416 - DNA, 33 bp, Homo sapien
aaggagatccttcatataaatgtgcccacaaat

SEQ ID NO: 578417 - DNA, 33 bp, Homo sapien
cagttgtcaggtgagacacaatgttggcctgga

SEQ ID NO: 578418 - DNA, 33 bp, Homo sapien
cagttgtcaggtgagagacaatgttggcctgga

SEQ ID NO: 578419 - DNA, 33 bp, Homo sapien
gaacaggcacacttcacaaaaagatgtccaaat

SEQ ID NO: 578420 - DNA, 33 bp, Homo sapien
gaacaggcacacttcataaaaagatgtccaaat

SEQ ID NO: 578421 - DNA, 33 bp, Homo sapien
tagaagaagaaaagacacacagacctgtaatcc

SEQ ID NO: 578422 - DNA, 33 bp, Homo sapien
tagaagaagaaaagacgcacagacctgtaatcc

SEQ ID NO: 578423 - DNA, 33 bp, Homo sapien
ctgcaggatgtggggccgacgacaaaaagctga

SEQ ID NO: 578424 - DNA, 33 bp, Homo sapien
ctgcaggatgtggggctgacgacaaaaagctga

SEQ ID NO: 578425 - DNA, 33 bp, Homo sapien
ttccttcaggttctcaactgtagtgcccacggt

SEQ ID NO: 578426 - DNA, 33 bp, Homo sapien
ttccttcaggttctcatctgtagtgcccacggt

SEQ ID NO: 578427 - DNA, 33 bp, Homo sapien
tcactttaaaattcgtcaagagggtagatctca

SEQ ID NO: 578428 - DNA, 33 bp, Homo sapien
tcactttaaaattcgttaagagggtagatctca

SEQ ID NO: 578429 - DNA, 33 bp, Homo sapien
cccattcttccggttacgaggcacccgcagggg

SEQ ID NO: 578430 - DNA, 33 bp, Homo sapien
cccattcttccggttatgaggcacccgcagggg

SEQ ID NO: 578431 - DNA, 33 bp, Homo sapien
atgggagaaaaacaaacgcctaagcgaaatgac

SEQ ID NO: 578432 - DNA, 33 bp, Homo sapien
atgggagaaaaacaaaggcctaagcgaaatgac

SEQ ID NO: 578433 - DNA, 33 bp, Homo sapien
cagtaaaagcagcatcaaagggagcccaattca

SEQ ID NO: 578434 - DNA, 33 bp, Homo sapien
cagtaaaagcagcatcgaagggagcccaattca

SEQ ID NO: 578435 - DNA, 33 bp, Homo sapien
tcaccttgtaagcagacaggtggttttgttcat

SEQ ID NO: 578436 - DNA, 33 bp, Homo sapien
tcaccttgtaagcagagaggtggttttgttcat

SEQ ID NO: 578437 - DNA, 33 bp, Homo sapien
aagttattctttatgcactatgactttgagggc

SEQ ID NO: 578438 - DNA, 33 bp, Homo sapien
aagttattctttatgcgctatgactttgagggc

SEQ ID NO: 578439 - DNA, 33 bp, Homo sapien
ggtggtttacgataaacgacacataaactggaa

SEQ ID NO: 578440 - DNA, 33 bp, Homo sapien
ggtggtttacgataaatgacacataaactggaa

SEQ ID NO: 578441 - DNA, 33 bp, Homo sapien
taccctgcctgcttcaaaaaaggatttgaggtg

SEQ ID NO: 578442 - DNA, 33 bp, Homo sapien
taccctgcctgcttcagaaaaggatttgaggtg

SEQ ID NO: 578443 - DNA, 33 bp, Homo sapien
tctcacagtaacactgaaagagaaatacagcaa

SEQ ID NO: 578444 - DNA, 33 bp, Homo sapien
tctcacagtaacactggaagagaaatacagcaa

SEQ ID NO: 578445 - DNA, 33 bp, Homo sapien
attcgtttcctcttgccgatgtaacaaatttcc

SEQ ID NO: 578446 - DNA, 33 bp, Homo sapien
attcgtttcctcttgctgatgtaacaaatttcc

SEQ ID NO: 578447 - DNA, 33 bp, Homo sapien
tactggagaaaacgaccgaatctacactccttt

SEQ ID NO: 578448 - DNA, 33 bp, Homo sapien
tactggagaaaacgactgaatctacactccttt

SEQ ID NO: 578449 - DNA, 33 bp, Homo sapien
tattttttcagctttcgcacccactggatccat

SEQ ID NO: 578450 - DNA, 33 bp, Homo sapien
tattttttcagctttctcacccactggatccat

SEQ ID NO: 578451 - DNA, 33 bp, Homo sapien
tgcccttagttcgaaacggatcagaaggctgtg

SEQ ID NO: 578452 - DNA, 33 bp, Homo sapien
tgcccttagttcgaaatggatcagaaggctgtg

SEQ ID NO: 578453 - DNA, 33 bp, Homo sapien
tttctgcctggacaaacggaaacatgggcttcc

SEQ ID NO: 578454 - DNA, 33 bp, Homo sapien
tttctgcctggacaaatggaaacatgggcttcc

SEQ ID NO: 578455 - DNA, 33 bp, Homo sapien
tttgtaccggtaataaatgggaggcctggttgt

SEQ ID NO: 578456 - DNA, 33 bp, Homo sapien
tttgtaccggtaataagtgggaggcctggttgt

SEQ ID NO: 578457 - DNA, 33 bp, Homo sapien
gggagccatgaacttgaaatagggtcagcgtgc

SEQ ID NO: 578458 - DNA, 33 bp, Homo sapien
gggagccatgaacttggaatagggtcagcgtgc

SEQ ID NO: 578459 - DNA, 33 bp, Homo sapien
ttggggagcagacccccacgtctgacagcatac

SEQ ID NO: 578460 - DNA, 33 bp, Homo sapien
ttggggagcagaccccgacgtctgacagcatac

SEQ ID NO: 578461 - DNA, 33 bp, Homo sapien
gctgggcacttggcagaaacccaaatggtgacc

SEQ ID NO: 578462 - DNA, 33 bp, Homo sapien
gctgggcacttggcaggaacccaaatggtgacc

SEQ ID NO: 578463 - DNA, 33 bp, Homo sapien
tgtgctttacagccgcaatcaggtaagagctgt

SEQ ID NO: 578464 - DNA, 33 bp, Homo sapien
tgtgctttacagccgcgatcaggtaagagctgt

SEQ ID NO: 578465 - DNA, 33 bp, Homo sapien
tgggaaggactgtaggaaaacaagctttttctg

SEQ ID NO: 578466 - DNA, 33 bp, Homo sapien
tgggaaggactgtagggaaacaagctttttctg

SEQ ID NO: 578467 - DNA, 33 bp, Homo sapien
gagctgtgcttccgacaaccgtctgctggatgc

SEQ ID NO: 578468 - DNA, 33 bp, Homo sapien
gagctgtgcttccgacgaccgtctgctggatgc

SEQ ID NO: 578469 - DNA, 33 bp, Homo sapien
agaaacagacaaataagaagaagcagagccgac

SEQ ID NO: 578470 - DNA, 33 bp, Homo sapien
agaaacagacaaataataagaagcagagccgac

SEQ ID NO: 578471 - DNA, 33 bp, Homo sapien
taggtttggatgagacacagctcagaattgtcc

SEQ ID NO: 578472 - DNA, 33 bp, Homo sapien
taggtttggatgagacgcagctcagaattgtcc

SEQ ID NO: 578473 - DNA, 33 bp, Homo sapien
gaggaaaagacacagcaagagagacaaagcagc

SEQ ID NO: 578474 - DNA, 33 bp, Homo sapien
gaggaaaagacacagcgagagagacaaagcagc

SEQ ID NO: 578475 - DNA, 33 bp, Homo sapien
cctggcgtatcctcagaatgtggtttgtgatat

SEQ ID NO: 578476 - DNA, 33 bp, Homo sapien
cctggcgtatcctcaggatgtggtttgtgatat

SEQ ID NO: 578477 - DNA, 33 bp, Homo sapien
ttcaatagggaagcaaaaaccacagtgagagga

SEQ ID NO: 578478 - DNA, 33 bp, Homo sapien
ttcaatagggaagcaagaaccacagtgagagga

SEQ ID NO: 578479 - DNA, 33 bp, Homo sapien
cagggccttcaatgccaagtccgtgttcctcgg

SEQ ID NO: 578480 - DNA, 33 bp, Homo sapien
cagggccttcaatgccgagtccgtgttcctcgg

SEQ ID NO: 578481 - DNA, 33 bp, Homo sapien
gctgagtaactcgtccaaagtccagtggtatag

SEQ ID NO: 578482 - DNA, 33 bp, Homo sapien
gctgagtaactcgtccgaagtccagtggtatag

SEQ ID NO: 578483 - DNA, 33 bp, Homo sapien
cagccttttctcacataatgtgaacaccaaatt

SEQ ID NO: 578484 - DNA, 33 bp, Homo sapien
cagccttttctcacatgatgtgaacaccaaatt

SEQ ID NO: 578485 - DNA, 33 bp, Homo sapien
aggcttgtcctggagaagttgaaacagtgggaa

SEQ ID NO: 578486 - DNA, 33 bp, Homo sapien
aggcttgtcctggagaggttgaaacagtgggaa

SEQ ID NO: 578487 - DNA, 33 bp, Homo sapien
gtggcaagtgggtgaccgaatactgacctagtc

SEQ ID NO: 578488 - DNA, 33 bp, Homo sapien
gtggcaagtgggtgactgaatactgacctagtc

SEQ ID NO: 578489 - DNA, 33 bp, Homo sapien
tagctctgtttcctaccgaagggagacacgtat

SEQ ID NO: 578490 - DNA, 33 bp, Homo sapien
tagctctgtttcctactgaagggagacacgtat

SEQ ID NO: 578491 - DNA, 33 bp, Homo sapien
ccagaagtctgaaatcaaggtgtgaccacgttc

SEQ ID NO: 578492 - DNA, 33 bp, Homo sapien
ccagaagtctgaaatcgaggtgtgaccacgttc

SEQ ID NO: 578493 - DNA, 33 bp, Homo sapien
atttggtggtccccaacgacctacgaggaaaga

SEQ ID NO: 578494 - DNA, 33 bp, Homo sapien
atttggtggtccccaatgacctacgaggaaaga

SEQ ID NO: 578495 - DNA, 33 bp, Homo sapien
aaagcagccttgtttcaccttcggacatgggtg

SEQ ID NO: 578496 - DNA, 33 bp, Homo sapien
aaagcagccttgtttcgccttcggacatgggtg

SEQ ID NO: 578497 - DNA, 33 bp, Homo sapien
gagctgagcttacacacggaaagggcttagccc

SEQ ID NO: 578498 - DNA, 33 bp, Homo sapien
gagctgagcttacacatggaaagggcttagccc

SEQ ID NO: 578499 - DNA, 33 bp, Homo sapien
attgtctgtttcagcactgaaggggtaagaata

SEQ ID NO: 578500 - DNA, 33 bp, Homo sapien
attgtctgtttcagcattgaaggggtaagaata

SEQ ID NO: 578501 - DNA, 33 bp, Homo sapien
tacaatgtgtgggaaacctagtaccagctgagc

SEQ ID NO: 578502 - DNA, 33 bp, Homo sapien
tacaatgtgtgggaaagctagtaccagctgagc

SEQ ID NO: 578503 - DNA, 33 bp, Homo sapien
atgggttaaaatcagacgggatgaaagaacacc

SEQ ID NO: 578504 - DNA, 33 bp, Homo sapien
atgggttaaaatcagatgggatgaaagaacacc

SEQ ID NO: 578505 - DNA, 33 bp, Homo sapien
ttatcgagaggtcctaaaaactgatgctagaag

SEQ ID NO: 578506 - DNA, 33 bp, Homo sapien
ttatcgagaggtcctagaaactgatgctagaag

SEQ ID NO: 578507 - DNA, 33 bp, Homo sapien
ggaccaggagcaatgacgcccaagtggcaggga

SEQ ID NO: 578508 - DNA, 33 bp, Homo sapien
ggaccaggagcaatgatgcccaagtggcaggga

SEQ ID NO: 578509 - DNA, 33 bp, Homo sapien
ggtagcattcttcatactatcaccttgttattc

SEQ ID NO: 578510 - DNA, 33 bp, Homo sapien
ggtagcattcttcatagtatcaccttgttattc

SEQ ID NO: 578511 - DNA, 33 bp, Homo sapien
tttccttcctctttaacgctgaatatacagaca

SEQ ID NO: 578512 - DNA, 33 bp, Homo sapien
tttccttcctctttaatgctgaatatacagaca

SEQ ID NO: 578513 - DNA, 33 bp, Homo sapien
tgaacacaaatggaaacgtatgttcatgaaaaa

SEQ ID NO: 578514 - DNA, 33 bp, Homo sapien
tgaacacaaatggaaatgtatgttcatgaaaaa

SEQ ID NO: 578515 - DNA, 33 bp, Homo sapien
aagaaacaacccagatgaacttcagtgggtaaa

SEQ ID NO: 578516 - DNA, 33 bp, Homo sapien
aagaaacaacccagattaacttcagtgggtaaa

SEQ ID NO: 578517 - DNA, 33 bp, Homo sapien
tctccactgtgtgacactaagcaagttgctctg

SEQ ID NO: 578518 - DNA, 33 bp, Homo sapien
tctccactgtgtgacattaagcaagttgctctg

SEQ ID NO: 578519 - DNA, 33 bp, Homo sapien
agtctcaaaccagctgcagaatctggcaaagtg

SEQ ID NO: 578520 - DNA, 33 bp, Homo sapien
agtctcaaaccagctgtagaatctggcaaagtg

SEQ ID NO: 578521 - DNA, 33 bp, Homo sapien
cttattccaaatctcacagaaagtcttcaccag

SEQ ID NO: 578522 - DNA, 33 bp, Homo sapien
cttattccaaatctcatagaaagtcttcaccag

SEQ ID NO: 578523 - DNA, 33 bp, Homo sapien
caaaatccatgaaccccaagagaaggaagaggg

SEQ ID NO: 578524 - DNA, 33 bp, Homo sapien
caaaatccatgaacccgaagagaaggaagaggg

SEQ ID NO: 578525 - DNA, 33 bp, Homo sapien
attctctccgacacaaacattttttaattagat

SEQ ID NO: 578526 - DNA, 33 bp, Homo sapien
attctctccgacacaagcattttttaattagat

SEQ ID NO: 578527 - DNA, 33 bp, Homo sapien
tcactccttcctttgcagagaaccactagtaca

SEQ ID NO: 578528 - DNA, 33 bp, Homo sapien
tcactccttcctttgccgagaaccactagtaca

SEQ ID NO: 578529 - DNA, 33 bp, Homo sapien
ctttcatttttccaaagtagaatctttctcaac

SEQ ID NO: 578530 - DNA, 33 bp, Homo sapien
ctttcatttttccaaattagaatctttctcaac

SEQ ID NO: 578531 - DNA, 33 bp, Homo sapien
gtcaattgtgcctgagaagatgagagaagcata

SEQ ID NO: 578532 - DNA, 33 bp, Homo sapien
gtcaattgtgcctgaggagatgagagaagcata

SEQ ID NO: 578533 - DNA, 33 bp, Homo sapien
taataacggtgagaacaaacacttgaaatgcgt

SEQ ID NO: 578534 - DNA, 33 bp, Homo sapien
taataacggtgagaaccaacacttgaaatgcgt

SEQ ID NO: 578535 - DNA, 33 bp, Homo sapien
catccctaagacaacaataggagtgagagggaa

SEQ ID NO: 578536 - DNA, 33 bp, Homo sapien
catccctaagacaacagtaggagtgagagggaa

SEQ ID NO: 578537 - DNA, 33 bp, Homo sapien
caataaacgtcatgcggaagtggtggaagtggt

SEQ ID NO: 578538 - DNA, 33 bp, Homo sapien
caataaacgtcatgcgtaagtggtggaagtggt

SEQ ID NO: 578539 - DNA, 33 bp, Homo sapien
gtacatattttcagcaaaagcagctgtagatga

SEQ ID NO: 578540 - DNA, 33 bp, Homo sapien
gtacatattttcagcagaagcagctgtagatga

SEQ ID NO: 578541 - DNA, 33 bp, Homo sapien
ctgactaaatcatcagaaaaggaccgtgccagt

SEQ ID NO: 578542 - DNA, 33 bp, Homo sapien
ctgactaaatcatcaggaaaggaccgtgccagt

SEQ ID NO: 578543 - DNA, 33 bp, Homo sapien
ttcccagaatcacctagaatatgttctgtctct

SEQ ID NO: 578544 - DNA, 33 bp, Homo sapien
ttcccagaatcacctataatatgttctgtctct

SEQ ID NO: 578545 - DNA, 33 bp, Homo sapien
gaacacacgcacaatcaccagtatgtggctgtc

SEQ ID NO: 578546 - DNA, 33 bp, Homo sapien
gaacacacgcacaatcgccagtatgtggctgtc

SEQ ID NO: 578547 - DNA, 33 bp, Homo sapien
gtgctgcaaatcctacactggtaagagaggccc

SEQ ID NO: 578548 - DNA, 33 bp, Homo sapien
gtgctgcaaatcctacgctggtaagagaggccc

SEQ ID NO: 578549 - DNA, 33 bp, Homo sapien
acgcgtctccgatcaccatacaatgagcctcct

SEQ ID NO: 578550 - DNA, 33 bp, Homo sapien
acgcgtctccgatcactatacaatgagcctcct

SEQ ID NO: 578551 - DNA, 33 bp, Homo sapien
caaatgcctggtgcacaagcacattttcttttt

SEQ ID NO: 578552 - DNA, 33 bp, Homo sapien
caaatgcctggtgcacgagcacattttcttttt

SEQ ID NO: 578553 - DNA, 33 bp, Homo sapien
ccaagaatgagtcaagccatttctaaagaatcc

SEQ ID NO: 578554 - DNA, 33 bp, Homo sapien
ccaagaatgagtcaagtcatttctaaagaatcc

SEQ ID NO: 578555 - DNA, 33 bp, Homo sapien
cttctgtaaaatctgcggacacctaaacgttgg

SEQ ID NO: 578556 - DNA, 33 bp, Homo sapien
cttctgtaaaatctgctgacacctaaacgttgg

SEQ ID NO: 578557 - DNA, 33 bp, Homo sapien
tcatataattgcatgcacagttacacattatag

SEQ ID NO: 578558 - DNA, 33 bp, Homo sapien
tcatataattgcatgcgcagttacacattatag

SEQ ID NO: 578559 - DNA, 33 bp, Homo sapien
atatgtctgaagaagcgaagaggggagtgatca

SEQ ID NO: 578560 - DNA, 33 bp, Homo sapien
atatgtctgaagaagctaagaggggagtgatca

SEQ ID NO: 578561 - DNA, 33 bp, Homo sapien
ctatggttatgtaacaactgtgtccgagggatt

SEQ ID NO: 578562 - DNA, 33 bp, Homo sapien
ctatggttatgtaacatctgtgtccgagggatt

SEQ ID NO: 578563 - DNA, 33 bp, Homo sapien
taagccagtgacacaacattttgcatttttaaa

SEQ ID NO: 578564 - DNA, 33 bp, Homo sapien
taagccagtgacacaatattttgcatttttaaa

SEQ ID NO: 578565 - DNA, 33 bp, Homo sapien
taaaataatttttcagccacatttcataaatgt

SEQ ID NO: 578566 - DNA, 33 bp, Homo sapien
taaaataatttttcaggcacatttcataaatgt

SEQ ID NO: 578567 - DNA, 33 bp, Homo sapien
tccttttctctgcgtcaaaatgtcaaggaaagt

SEQ ID NO: 578568 - DNA, 33 bp, Homo sapien
tccttttctctgcgtcgaaatgtcaaggaaagt

SEQ ID NO: 578569 - DNA, 33 bp, Homo sapien
acataacaaagaggaacggtgaagacatagcta

SEQ ID NO: 578570 - DNA, 33 bp, Homo sapien
acataacaaagaggaatggtgaagacatagcta

SEQ ID NO: 578571 - DNA, 33 bp, Homo sapien
tagactttcacccctacgcttatcccccaaggt

SEQ ID NO: 578572 - DNA, 33 bp, Homo sapien
tagactttcacccctatgcttatcccccaaggt

SEQ ID NO: 578573 - DNA, 33 bp, Homo sapien
aagccaattcaattagacaaaagaaagcaatga

SEQ ID NO: 578574 - DNA, 33 bp, Homo sapien
aagccaattcaattaggcaaaagaaagcaatga

SEQ ID NO: 578575 - DNA, 33 bp, Homo sapien
ctagaatgtaaactaccctggcatatgtactac

SEQ ID NO: 578576 - DNA, 33 bp, Homo sapien
ctagaatgtaaactactctggcatatgtactac

SEQ ID NO: 578577 - DNA, 33 bp, Homo sapien
ccacagtgtccactacagaaagaaaagcaagga

SEQ ID NO: 578578 - DNA, 33 bp, Homo sapien
ccacagtgtccactacggaaagaaaagcaagga

SEQ ID NO: 578579 - DNA, 33 bp, Homo sapien
aattacgttctctttcccaggtattgaaactgg

SEQ ID NO: 578580 - DNA, 33 bp, Homo sapien
aattacgttctctttcgcaggtattgaaactgg

SEQ ID NO: 578581 - DNA, 33 bp, Homo sapien
gacacgaaatggctaccaggaactcaccattgt

SEQ ID NO: 578582 - DNA, 33 bp, Homo sapien
gacacgaaatggctacgaggaactcaccattgt

SEQ ID NO: 578583 - DNA, 33 bp, Homo sapien
aaggtcaaggcccgaaaatcctttccatcagtt

SEQ ID NO: 578584 - DNA, 33 bp, Homo sapien
aaggtcaaggcccgaagatcctttccatcagtt

SEQ ID NO: 578585 - DNA, 33 bp, Homo sapien
ggtttggggggtaacaagtagatatatgaagga

SEQ ID NO: 578586 - DNA, 33 bp, Homo sapien
ggtttggggggtaacaggtagatatatgaagga

SEQ ID NO: 578587 - DNA, 33 bp, Homo sapien
ctcttcctaccttaacagtgaagttcagcatca

SEQ ID NO: 578588 - DNA, 33 bp, Homo sapien
ctcttcctaccttaacggtgaagttcagcatca

SEQ ID NO: 578589 - DNA, 33 bp, Homo sapien
tcctgaatacgtttaacgcagacaaagccaggc

SEQ ID NO: 578590 - DNA, 33 bp, Homo sapien
tcctgaatacgtttaatgcagacaaagccaggc

SEQ ID NO: 578591 - DNA, 33 bp, Homo sapien
gcctggtctgaaatcaccattttcaagccaaga

SEQ ID NO: 578592 - DNA, 33 bp, Homo sapien
gcctggtctgaaatcatcattttcaagccaaga

SEQ ID NO: 578593 - DNA, 33 bp, Homo sapien
aaccttgctgataaaaggatgtgataaagaagg

SEQ ID NO: 578594 - DNA, 33 bp, Homo sapien
aaccttgctgataaaatgatgtgataaagaagg

SEQ ID NO: 578595 - DNA, 33 bp, Homo sapien
tgttgagcacctagtacgtgcaggctactgttt

SEQ ID NO: 578596 - DNA, 33 bp, Homo sapien
tgttgagcacctagtatgtgcaggctactgttt

SEQ ID NO: 578597 - DNA, 33 bp, Homo sapien
aataggaggaaaatccaatttagtactttgtgt

SEQ ID NO: 578598 - DNA, 33 bp, Homo sapien
aataggaggaaaatccgatttagtactttgtgt

SEQ ID NO: 578599 - DNA, 33 bp, Homo sapien
gcagggaggcagagccaattgagtggaagaggg

SEQ ID NO: 578600 - DNA, 33 bp, Homo sapien
gcagggaggcagagccgattgagtggaagaggg

SEQ ID NO: 578601 - DNA, 33 bp, Homo sapien
caacaaggtgagaaaccgtgacgagggaagtct

SEQ ID NO: 578602 - DNA, 33 bp, Homo sapien
caacaaggtgagaaacggtgacgagggaagtct

SEQ ID NO: 578603 - DNA, 33 bp, Homo sapien
taatatataccaataacgtggagggtctgatga

SEQ ID NO: 578604 - DNA, 33 bp, Homo sapien
taatatataccaataatgtggagggtctgatga

SEQ ID NO: 578605 - DNA, 33 bp, Homo sapien
tcattttgattcatagaagagcttcactatttt

SEQ ID NO: 578606 - DNA, 33 bp, Homo sapien
tcattttgattcataggagagcttcactatttt

SEQ ID NO: 578607 - DNA, 33 bp, Homo sapien
atttaatcacactacaaagcagattacacaaag

SEQ ID NO: 578608 - DNA, 33 bp, Homo sapien
atttaatcacactacagagcagattacacaaag

SEQ ID NO: 578609 - DNA, 33 bp, Homo sapien
agtgagtaattagttcccagaggttgaaaggga

SEQ ID NO: 578610 - DNA, 33 bp, Homo sapien
agtgagtaattagttctcagaggttgaaaggga

SEQ ID NO: 578611 - DNA, 33 bp, Homo sapien
cacacaagcagttttacaagttacaaacatatg

SEQ ID NO: 578612 - DNA, 33 bp, Homo sapien
cacacaagcagttttataagttacaaacatatg

SEQ ID NO: 578613 - DNA, 33 bp, Homo sapien
gcaagtagatatttaacgctgaagtccaaaata

SEQ ID NO: 578614 - DNA, 33 bp, Homo sapien
gcaagtagatatttaatgctgaagtccaaaata

SEQ ID NO: 578615 - DNA, 33 bp, Homo sapien
agggatgatgagtagacagtgagggcttgacaa

SEQ ID NO: 578616 - DNA, 33 bp, Homo sapien
agggatgatgagtagagagtgagggcttgacaa

SEQ ID NO: 578617 - DNA, 33 bp, Homo sapien
gcctccttagtctcttaaaacaggagcagggat

SEQ ID NO: 578618 - DNA, 33 bp, Homo sapien
gcctccttagtctcttgaaacaggagcagggat

SEQ ID NO: 578619 - DNA, 33 bp, Homo sapien
aaatctcccctaaaagcctccttcagtgtttta

SEQ ID NO: 578620 - DNA, 33 bp, Homo sapien
aaatctcccctaaaaggctccttcagtgtttta

SEQ ID NO: 578621 - DNA, 33 bp, Homo sapien
gtaagcgttcgtagtggattgcatggcttgttc

SEQ ID NO: 578622 - DNA, 33 bp, Homo sapien
gtaagcgttcgtagtgtattgcatggcttgttc

SEQ ID NO: 578623 - DNA, 33 bp, Homo sapien
gtgccgacgtcactgaaatcctgatctggccac

SEQ ID NO: 578624 - DNA, 33 bp, Homo sapien
gtgccgacgtcactgagatcctgatctggccac

SEQ ID NO: 578625 - DNA, 33 bp, Homo sapien
aacaagaataccttgcactttcaaagtcagtga

SEQ ID NO: 578626 - DNA, 33 bp, Homo sapien
aacaagaataccttgcgctttcaaagtcagtga

SEQ ID NO: 578627 - DNA, 33 bp, Homo sapien
ccattttcattcaaacacactgaaattcagctt

SEQ ID NO: 578628 - DNA, 33 bp, Homo sapien
ccattttcattcaaacgcactgaaattcagctt

SEQ ID NO: 578629 - DNA, 33 bp, Homo sapien
acacctgatggttctcccttcaccctacacatt

SEQ ID NO: 578630 - DNA, 33 bp, Homo sapien
acacctgatggttctctcttcaccctacacatt

SEQ ID NO: 578631 - DNA, 33 bp, Homo sapien
cataaggaaatacagacaagagacaagaaaata

SEQ ID NO: 578632 - DNA, 33 bp, Homo sapien
cataaggaaatacagagaagagacaagaaaata

SEQ ID NO: 578633 - DNA, 33 bp, Homo sapien
aggagaacattctcaaacatttcagagagtata

SEQ ID NO: 578634 - DNA, 33 bp, Homo sapien
aggagaacattctcaagcatttcagagagtata

SEQ ID NO: 578635 - DNA, 33 bp, Homo sapien
gggccaagtgtatttgcatataatttgcatggt

SEQ ID NO: 578636 - DNA, 33 bp, Homo sapien
gggccaagtgtatttgtatataatttgcatggt

SEQ ID NO: 578637 - DNA, 33 bp, Homo sapien
tgtggaactggacccgaagagaacaggaaggag

SEQ ID NO: 578638 - DNA, 33 bp, Homo sapien
tgtggaactggacccggagagaacaggaaggag

SEQ ID NO: 578639 - DNA, 33 bp, Homo sapien
tggttcccctaacatccaccgcatgctctctcc

SEQ ID NO: 578640 - DNA, 33 bp, Homo sapien
tggttcccctaacatctaccgcatgctctctcc

SEQ ID NO: 578641 - DNA, 33 bp, Homo sapien
aaaatcaaacaaaaaaattaatggtgcaagtta

SEQ ID NO: 578642 - DNA, 33 bp, Homo sapien
aaaatcaaacaaaaaatttaatggtgcaagtta

SEQ ID NO: 578643 - DNA, 33 bp, Homo sapien
cgcccacccacttgaacgtgcatctaggccagc

SEQ ID NO: 578644 - DNA, 33 bp, Homo sapien
cgcccacccacttgaatgtgcatctaggccagc

SEQ ID NO: 578645 - DNA, 33 bp, Homo sapien
atttacattttcctaacagctgatgggatgaag

SEQ ID NO: 578646 - DNA, 33 bp, Homo sapien
atttacattttcctaatagctgatgggatgaag

SEQ ID NO: 578647 - DNA, 33 bp, Homo sapien
tttatgtgctttttggacatttggagaaaaaaa

SEQ ID NO: 578648 - DNA, 33 bp, Homo sapien
tttatgtgctttttgggcatttggagaaaaaaa

SEQ ID NO: 578649 - DNA, 33 bp, Homo sapien
ttacgggataacaacacgctctctcaaccccgg

SEQ ID NO: 578650 - DNA, 33 bp, Homo sapien
ttacgggataacaacatgctctctcaaccccgg

SEQ ID NO: 578651 - DNA, 33 bp, Homo sapien
gaggctggggataccacatagacagcaggaagg

SEQ ID NO: 578652 - DNA, 33 bp, Homo sapien
gaggctggggataccatatagacagcaggaagg

SEQ ID NO: 578653 - DNA, 33 bp, Homo sapien
gaagggttttaagcaaaggagaaagacaatcca

SEQ ID NO: 578654 - DNA, 33 bp, Homo sapien
gaagggttttaagcaacggagaaagacaatcca

SEQ ID NO: 578655 - DNA, 33 bp, Homo sapien
tcagcttgactaattcaaaaatatttaccatgt

SEQ ID NO: 578656 - DNA, 33 bp, Homo sapien
tcagcttgactaattcgaaaatatttaccatgt

SEQ ID NO: 578657 - DNA, 33 bp, Homo sapien
gaaattccatcaagaaactggctctgagctctc

SEQ ID NO: 578658 - DNA, 33 bp, Homo sapien
gaaattccatcaagaagctggctctgagctctc

SEQ ID NO: 578659 - DNA, 33 bp, Homo sapien
actcaggtcatacccacccacaggttccatgga

SEQ ID NO: 578660 - DNA, 33 bp, Homo sapien
actcaggtcatacccatccacaggttccatgga

SEQ ID NO: 578661 - DNA, 33 bp, Homo sapien
gttgtccaagtgaccacgggtagcctcgatgct

SEQ ID NO: 578662 - DNA, 33 bp, Homo sapien
gttgtccaagtgaccatgggtagcctcgatgct

SEQ ID NO: 578663 - DNA, 33 bp, Homo sapien
taaccacaacagagaaccttcggcagcttttgc

SEQ ID NO: 578664 - DNA, 33 bp, Homo sapien
taaccacaacagagaatcttcggcagcttttgc

SEQ ID NO: 578665 - DNA, 33 bp, Homo sapien
ttataatgaggaatgacgactctgctcagcctc

SEQ ID NO: 578666 - DNA, 33 bp, Homo sapien
ttataatgaggaatgatgactctgctcagcctc

SEQ ID NO: 578667 - DNA, 33 bp, Homo sapien
tgttcctctcctctcacggggcttcaaaagaca

SEQ ID NO: 578668 - DNA, 33 bp, Homo sapien
tgttcctctcctctcatggggcttcaaaagaca

SEQ ID NO: 578669 - DNA, 33 bp, Homo sapien
caatctaatcgagaaaacaacaacaggaattac

SEQ ID NO: 578670 - DNA, 33 bp, Homo sapien
caatctaatcgagaaagcaacaacaggaattac

SEQ ID NO: 578671 - DNA, 33 bp, Homo sapien
gaaagtgaaatgctacactctgaaaactccatt

SEQ ID NO: 578672 - DNA, 33 bp, Homo sapien
gaaagtgaaatgctacgctctgaaaactccatt

SEQ ID NO: 578673 - DNA, 33 bp, Homo sapien
tcagcgaggattctaacatagttcatctcaaat

SEQ ID NO: 578674 - DNA, 33 bp, Homo sapien
tcagcgaggattctaatatagttcatctcaaat

SEQ ID NO: 578675 - DNA, 33 bp, Homo sapien
atttacgaggatgtcaaacacacttgggaggcc

SEQ ID NO: 578676 - DNA, 33 bp, Homo sapien
atttacgaggatgtcagacacacttgggaggcc

SEQ ID NO: 578677 - DNA, 33 bp, Homo sapien
gcatcatttcttctccaagtcgtttctccttgt

SEQ ID NO: 578678 - DNA, 33 bp, Homo sapien
gcatcatttcttctccgagtcgtttctccttgt

SEQ ID NO: 578679 - DNA, 33 bp, Homo sapien
gcaacggtggctcctagagggacagagcttcca

SEQ ID NO: 578680 - DNA, 33 bp, Homo sapien
gcaacggtggctcctatagggacagagcttcca

SEQ ID NO: 578681 - DNA, 33 bp, Homo sapien
aattagggtaaagatacactttctaacattccc

SEQ ID NO: 578682 - DNA, 33 bp, Homo sapien
aattagggtaaagatatactttctaacattccc

SEQ ID NO: 578683 - DNA, 33 bp, Homo sapien
aagcttctgtgctccacgtaaggagaaatgagg

SEQ ID NO: 578684 - DNA, 33 bp, Homo sapien
aagcttctgtgctccatgtaaggagaaatgagg

SEQ ID NO: 578685 - DNA, 33 bp, Homo sapien
tccaggcacctcagcacaaaggaaatgaaggca

SEQ ID NO: 578686 - DNA, 33 bp, Homo sapien
tccaggcacctcagcataaaggaaatgaaggca

SEQ ID NO: 578687 - DNA, 33 bp, Homo sapien
aatcaattctatcaccagattaaaaaaaaggat

SEQ ID NO: 578688 - DNA, 33 bp, Homo sapien
aatcaattctatcaccggattaaaaaaaaggat

SEQ ID NO: 578689 - DNA, 33 bp, Homo sapien
cttgctttctgagtccaatgcacgaacattttt

SEQ ID NO: 578690 - DNA, 33 bp, Homo sapien
cttgctttctgagtccgatgcacgaacattttt

SEQ ID NO: 578691 - DNA, 33 bp, Homo sapien
gtatacaagtattaataagatgtctgcattttt

SEQ ID NO: 578692 - DNA, 33 bp, Homo sapien
gtatacaagtattaatgagatgtctgcattttt

SEQ ID NO: 578693 - DNA, 33 bp, Homo sapien
cagaagatactagaataatcatcagcttaggag

SEQ ID NO: 578694 - DNA, 33 bp, Homo sapien
cagaagatactagaatgatcatcagcttaggag

SEQ ID NO: 578695 - DNA, 33 bp, Homo sapien
tgcagctgtggcagacacactacagaaatgtaa

SEQ ID NO: 578696 - DNA, 33 bp, Homo sapien
tgcagctgtggcagacgcactacagaaatgtaa

SEQ ID NO: 578697 - DNA, 33 bp, Homo sapien
ttagttttcttcttagacctttttgatctgtga

SEQ ID NO: 578698 - DNA, 33 bp, Homo sapien
ttagttttcttcttaggcctttttgatctgtga

SEQ ID NO: 578699 - DNA, 33 bp, Homo sapien
acataggaaggtcttaaaagatccacagcagat

SEQ ID NO: 578700 - DNA, 33 bp, Homo sapien
acataggaaggtcttagaagatccacagcagat

SEQ ID NO: 578701 - DNA, 33 bp, Homo sapien
aatcagagggctctacactcttttttcctcctc

SEQ ID NO: 578702 - DNA, 33 bp, Homo sapien
aatcagagggctctacgctcttttttcctcctc

SEQ ID NO: 578703 - DNA, 33 bp, Homo sapien
gtcaagattttgctgcccgaactacttatgatt

SEQ ID NO: 578704 - DNA, 33 bp, Homo sapien
gtcaagattttgctgctcgaactacttatgatt

SEQ ID NO: 578705 - DNA, 33 bp, Homo sapien
tgttcattacgctacaaagttggtctcagctta

SEQ ID NO: 578706 - DNA, 33 bp, Homo sapien
tgttcattacgctacagagttggtctcagctta

SEQ ID NO: 578707 - DNA, 33 bp, Homo sapien
ctagtttctattccaaccttcatctctacttca

SEQ ID NO: 578708 - DNA, 33 bp, Homo sapien
ctagtttctattccaagcttcatctctacttca

SEQ ID NO: 578709 - DNA, 33 bp, Homo sapien
tggtgggagtagaaaccatgcagggaagagaga

SEQ ID NO: 578710 - DNA, 33 bp, Homo sapien
tggtgggagtagaaactatgcagggaagagaga

SEQ ID NO: 578711 - DNA, 33 bp, Homo sapien
cccctgcctgcccttcaagcatggtggggtgat

SEQ ID NO: 578712 - DNA, 33 bp, Homo sapien
cccctgcctgcccttcgagcatggtggggtgat

SEQ ID NO: 578713 - DNA, 33 bp, Homo sapien
ggataagttgccaagaataagatagtaagggga

SEQ ID NO: 578714 - DNA, 33 bp, Homo sapien
ggataagttgccaagagtaagatagtaagggga

SEQ ID NO: 578715 - DNA, 33 bp, Homo sapien
ttcttagaacactggacggcaagatacttcttt

SEQ ID NO: 578716 - DNA, 33 bp, Homo sapien
ttcttagaacactggatggcaagatacttcttt

SEQ ID NO: 578717 - DNA, 33 bp, Homo sapien
agttgtggggcgaaaccgtccaccagcgggcca

SEQ ID NO: 578718 - DNA, 33 bp, Homo sapien
agttgtggggcgaaactgtccaccagcgggcca

SEQ ID NO: 578719 - DNA, 33 bp, Homo sapien
tgatggctcatttggaccctattcattcattcg

SEQ ID NO: 578720 - DNA, 33 bp, Homo sapien
tgatggctcatttggatcctattcattcattcg

SEQ ID NO: 578721 - DNA, 33 bp, Homo sapien
gattggtgtggtgacaacagagtcttttttatc

SEQ ID NO: 578722 - DNA, 33 bp, Homo sapien
gattggtgtggtgacatcagagtcttttttatc

SEQ ID NO: 578723 - DNA, 33 bp, Homo sapien
atatgctgttggactacgaaaacaggtaaagga

SEQ ID NO: 578724 - DNA, 33 bp, Homo sapien
atatgctgttggactatgaaaacaggtaaagga

SEQ ID NO: 578725 - DNA, 33 bp, Homo sapien
cctggagatatgtacccggagccctgctcatcc

SEQ ID NO: 578726 - DNA, 33 bp, Homo sapien
cctggagatatgtacctggagccctgctcatcc

SEQ ID NO: 578727 - DNA, 33 bp, Homo sapien
gtgcacatggaagaaactcagtcagaaacctca

SEQ ID NO: 578728 - DNA, 33 bp, Homo sapien
gtgcacatggaagaaattcagtcagaaacctca

SEQ ID NO: 578729 - DNA, 33 bp, Homo sapien
gagggatctgtcagcaaccataataaaaatgga

SEQ ID NO: 578730 - DNA, 33 bp, Homo sapien
gagggatctgtcagcatccataataaaaatgga

SEQ ID NO: 578731 - DNA, 33 bp, Homo sapien
gccccatctttgattaccacaagctaaggatgg

SEQ ID NO: 578732 - DNA, 33 bp, Homo sapien
gccccatctttgattatcacaagctaaggatgg

SEQ ID NO: 578733 - DNA, 33 bp, Homo sapien
tgtttgagaactcatcagaacaattcccagaac

SEQ ID NO: 578734 - DNA, 33 bp, Homo sapien
tgtttgagaactcatcggaacaattcccagaac

SEQ ID NO: 578735 - DNA, 33 bp, Homo sapien
aatgccacagggaatcaataacccatcagttcc

SEQ ID NO: 578736 - DNA, 33 bp, Homo sapien
aatgccacagggaatccataacccatcagttcc

SEQ ID NO: 578737 - DNA, 33 bp, Homo sapien
aaggacggcgagtgtcaaaagccatgtctccaa

SEQ ID NO: 578738 - DNA, 33 bp, Homo sapien
aaggacggcgagtgtcgaaagccatgtctccaa

SEQ ID NO: 578739 - DNA, 33 bp, Homo sapien
agtccaagtcagcctcacccacttcctcctgaa

SEQ ID NO: 578740 - DNA, 33 bp, Homo sapien
agtccaagtcagcctcgcccacttcctcctgaa

SEQ ID NO: 578741 - DNA, 33 bp, Homo sapien
tctggttatgttattacgggaactgactccact

SEQ ID NO: 578742 - DNA, 33 bp, Homo sapien
tctggttatgttattatgggaactgactccact

SEQ ID NO: 578743 - DNA, 33 bp, Homo sapien
ccaaaaacagctctaacacaagtaacagcaaag

SEQ ID NO: 578744 - DNA, 33 bp, Homo sapien
ccaaaaacagctctaatacaagtaacagcaaag

SEQ ID NO: 578745 - DNA, 33 bp, Homo sapien
atagtaagggccctgcagaatgacaaaaatagt

SEQ ID NO: 578746 - DNA, 33 bp, Homo sapien
atagtaagggccctgcggaatgacaaaaatagt

SEQ ID NO: 578747 - DNA, 33 bp, Homo sapien
tggaccagagtcctacagtaaacttggtgtaac

SEQ ID NO: 578748 - DNA, 33 bp, Homo sapien
tggaccagagtcctacggtaaacttggtgtaac

SEQ ID NO: 578749 - DNA, 33 bp, Homo sapien
ggtgcacgcacgcaggcatgaccggtcggcccc

SEQ ID NO: 578750 - DNA, 33 bp, Homo sapien
ggtgcacgcacgcaggtatgaccggtcggcccc

SEQ ID NO: 578751 - DNA, 33 bp, Homo sapien
aacccagaccgtgaagaatcagagccacagcaa

SEQ ID NO: 578752 - DNA, 33 bp, Homo sapien
aacccagaccgtgaagcatcagagccacagcaa

SEQ ID NO: 578753 - DNA, 33 bp, Homo sapien
cagtccggcacattaactaaaaacttgacactt

SEQ ID NO: 578754 - DNA, 33 bp, Homo sapien
cagtccggcacattaattaaaaacttgacactt

SEQ ID NO: 578755 - DNA, 33 bp, Homo sapien
aacctcatttatgttcaagatggatgttgcttt

SEQ ID NO: 578756 - DNA, 33 bp, Homo sapien
aacctcatttatgttctagatggatgttgcttt

SEQ ID NO: 578757 - DNA, 33 bp, Homo sapien
tgctggagcaaggccaactgcaatagagaattg

SEQ ID NO: 578758 - DNA, 33 bp, Homo sapien
tgctggagcaaggccatctgcaatagagaattg

SEQ ID NO: 578759 - DNA, 33 bp, Homo sapien
gcatggcaaatcctagcaagagagtcacagtgt

SEQ ID NO: 578760 - DNA, 33 bp, Homo sapien
gcatggcaaatcctagtaagagagtcacagtgt

SEQ ID NO: 578761 - DNA, 33 bp, Homo sapien
tgggcagccttgtgtaccactcactaaattagt

SEQ ID NO: 578762 - DNA, 33 bp, Homo sapien
tgggcagccttgtgtatcactcactaaattagt

SEQ ID NO: 578763 - DNA, 33 bp, Homo sapien
cagggcaaagtagaccagagagtcctgaagctt

SEQ ID NO: 578764 - DNA, 33 bp, Homo sapien
cagggcaaagtagaccggagagtcctgaagctt

SEQ ID NO: 578765 - DNA, 33 bp, Homo sapien
gttgttttgagggtgaaatttataatagacacc

SEQ ID NO: 578766 - DNA, 33 bp, Homo sapien
gttgttttgagggtgagatttataatagacacc

SEQ ID NO: 578767 - DNA, 33 bp, Homo sapien
ggtaagcaaaatgatacgatttctgccttcata

SEQ ID NO: 578768 - DNA, 33 bp, Homo sapien
ggtaagcaaaatgataggatttctgccttcata

SEQ ID NO: 578769 - DNA, 33 bp, Homo sapien
ccgtcctgtgtgtgcaaacagctgaacaaccag

SEQ ID NO: 578770 - DNA, 33 bp, Homo sapien
ccgtcctgtgtgtgcagacagctgaacaaccag

SEQ ID NO: 578771 - DNA, 33 bp, Homo sapien
aatcataatacaataccatcctttgtttcataa

SEQ ID NO: 578772 - DNA, 33 bp, Homo sapien
aatcataatacaatactatcctttgtttcataa

SEQ ID NO: 578773 - DNA, 33 bp, Homo sapien
ctcggcagcttcgtgagaccaggattctcccta

SEQ ID NO: 578774 - DNA, 33 bp, Homo sapien
ctcggcagcttcgtgataccaggattctcccta

SEQ ID NO: 578775 - DNA, 33 bp, Homo sapien
cttggtcaccagtaggcatgaagtggtagagtt

SEQ ID NO: 578776 - DNA, 33 bp, Homo sapien
cttggtcaccagtaggtatgaagtggtagagtt

SEQ ID NO: 578777 - DNA, 33 bp, Homo sapien
tgatggtggcagggaacctgatctttgttctgg

SEQ ID NO: 578778 - DNA, 33 bp, Homo sapien
tgatggtggcagggaatctgatctttgttctgg

SEQ ID NO: 578779 - DNA, 33 bp, Homo sapien
agccaagccaacgtgcaagtgggaggtcataac

SEQ ID NO: 578780 - DNA, 33 bp, Homo sapien
agccaagccaacgtgccagtgggaggtcataac

SEQ ID NO: 578781 - DNA, 33 bp, Homo sapien
aaaggtaatttacttcccttctcaccgaggtca

SEQ ID NO: 578782 - DNA, 33 bp, Homo sapien
aaaggtaatttacttcgcttctcaccgaggtca

SEQ ID NO: 578783 - DNA, 33 bp, Homo sapien
gtctttgcacaaaaaaaggagagcttcaaattg

SEQ ID NO: 578784 - DNA, 33 bp, Homo sapien
gtctttgcacaaaaaagggagagcttcaaattg

SEQ ID NO: 578785 - DNA, 33 bp, Homo sapien
tcggcagggcaagaaacagtaatggactttatt

SEQ ID NO: 578786 - DNA, 33 bp, Homo sapien
tcggcagggcaagaaatagtaatggactttatt

SEQ ID NO: 578787 - DNA, 33 bp, Homo sapien
ggacttcctctagcacagtactcattggaggag

SEQ ID NO: 578788 - DNA, 33 bp, Homo sapien
ggacttcctctagcactgtactcattggaggag

SEQ ID NO: 578789 - DNA, 33 bp, Homo sapien
gatcaaaatggggctaccgtgagaaactaatgt

SEQ ID NO: 578790 - DNA, 33 bp, Homo sapien
gatcaaaatggggctatcgtgagaaactaatgt

SEQ ID NO: 578791 - DNA, 33 bp, Homo sapien
agagctggtcctgataaagaggcatctttctac

SEQ ID NO: 578792 - DNA, 33 bp, Homo sapien
agagctggtcctgatagagaggcatctttctac

SEQ ID NO: 578793 - DNA, 33 bp, Homo sapien
ttgtttttcctgcgcaatgcatacacacacacg

SEQ ID NO: 578794 - DNA, 33 bp, Homo sapien
ttgtttttcctgcgcagtgcatacacacacacg

SEQ ID NO: 578795 - DNA, 33 bp, Homo sapien
ttttggacacgtgcaacctcactcggatacgca

SEQ ID NO: 578796 - DNA, 33 bp, Homo sapien
ttttggacacgtgcaagctcactcggatacgca

SEQ ID NO: 578797 - DNA, 33 bp, Homo sapien
tggctatatctcgatgacaactgtttatgaaat

SEQ ID NO: 578798 - DNA, 33 bp, Homo sapien
tggctatatctcgatggcaactgtttatgaaat

SEQ ID NO: 578799 - DNA, 33 bp, Homo sapien
cctgaatgtgaactagacggagagagaacaggg

SEQ ID NO: 578800 - DNA, 33 bp, Homo sapien
cctgaatgtgaactagccggagagagaacaggg

SEQ ID NO: 578801 - DNA, 33 bp, Homo sapien
tgtccaccgtgtctgacggtcacagtgccaggt

SEQ ID NO: 578802 - DNA, 33 bp, Homo sapien
tgtccaccgtgtctgatggtcacagtgccaggt

SEQ ID NO: 578803 - DNA, 33 bp, Homo sapien
tcccttgatcctgctacgttgggcagtgaccac

SEQ ID NO: 578804 - DNA, 33 bp, Homo sapien
tcccttgatcctgctatgttgggcagtgaccac

SEQ ID NO: 578805 - DNA, 33 bp, Homo sapien
ttttgtttattttacacggcatttattaaacat

SEQ ID NO: 578806 - DNA, 33 bp, Homo sapien
ttttgtttattttacatggcatttattaaacat

SEQ ID NO: 578807 - DNA, 33 bp, Homo sapien
ttgtggtgagtccacccgggtctttctggaagg

SEQ ID NO: 578808 - DNA, 33 bp, Homo sapien
ttgtggtgagtccacctgggtctttctggaagg

SEQ ID NO: 578809 - DNA, 33 bp, Homo sapien
tacgtatttctaccaacatccaaaaaatgaaac

SEQ ID NO: 578810 - DNA, 33 bp, Homo sapien
tacgtatttctaccaagatccaaaaaatgaaac

SEQ ID NO: 578811 - DNA, 33 bp, Homo sapien
cttcccagccttttacaagcatcgttttacgta

SEQ ID NO: 578812 - DNA, 33 bp, Homo sapien
cttcccagccttttacgagcatcgttttacgta

SEQ ID NO: 578813 - DNA, 33 bp, Homo sapien
ataaaaacaaaacagcaaaagtagaatgagtaa

SEQ ID NO: 578814 - DNA, 33 bp, Homo sapien
ataaaaacaaaacagcgaaagtagaatgagtaa

SEQ ID NO: 578815 - DNA, 33 bp, Homo sapien
gctccctcccatcctccataaagctgcaggcat

SEQ ID NO: 578816 - DNA, 33 bp, Homo sapien
gctccctcccatcctctataaagctgcaggcat

SEQ ID NO: 578817 - DNA, 33 bp, Homo sapien
aaacccatctctccaccgagccatcttctgtac

SEQ ID NO: 578818 - DNA, 33 bp, Homo sapien
aaacccatctctccactgagccatcttctgtac

SEQ ID NO: 578819 - DNA, 33 bp, Homo sapien
tgattctagcaacatcactgagtacagatctcc

SEQ ID NO: 578820 - DNA, 33 bp, Homo sapien
tgattctagcaacatcgctgagtacagatctcc

SEQ ID NO: 578821 - DNA, 33 bp, Homo sapien
ccactggcctgaagaaaatgctaacctttctca

SEQ ID NO: 578822 - DNA, 33 bp, Homo sapien
ccactggcctgaagaagatgctaacctttctca

SEQ ID NO: 578823 - DNA, 33 bp, Homo sapien
ggccaagtaaaaagtacaatgtcagaaggagac

SEQ ID NO: 578824 - DNA, 33 bp, Homo sapien
ggccaagtaaaaagtagaatgtcagaaggagac

SEQ ID NO: 578825 - DNA, 33 bp, Homo sapien
aacattattgtatatcactaaccgggcacgtgg

SEQ ID NO: 578826 - DNA, 33 bp, Homo sapien
aacattattgtatatccctaaccgggcacgtgg

SEQ ID NO: 578827 - DNA, 33 bp, Homo sapien
caccctcctcctttaacaagtgctgatcttgga

SEQ ID NO: 578828 - DNA, 33 bp, Homo sapien
caccctcctcctttaataagtgctgatcttgga

SEQ ID NO: 578829 - DNA, 33 bp, Homo sapien
catagcttcccctacacagttctagcatctttg

SEQ ID NO: 578830 - DNA, 33 bp, Homo sapien
catagcttcccctacatagttctagcatctttg

SEQ ID NO: 578831 - DNA, 33 bp, Homo sapien
aggcgaacgctcattacgtttcaacaaaatatc

SEQ ID NO: 578832 - DNA, 33 bp, Homo sapien
aggcgaacgctcattatgtttcaacaaaatatc

SEQ ID NO: 578833 - DNA, 33 bp, Homo sapien
tccccttctcgttgccaacctaccctgagagat

SEQ ID NO: 578834 - DNA, 33 bp, Homo sapien
tccccttctcgttgcccacctaccctgagagat

SEQ ID NO: 578835 - DNA, 33 bp, Homo sapien
aagggaagtgcctggacggagcaggtgctgaat

SEQ ID NO: 578836 - DNA, 33 bp, Homo sapien
aagggaagtgcctggatggagcaggtgctgaat

SEQ ID NO: 578837 - DNA, 33 bp, Homo sapien
gtgtgtagcagaaccaagacataaggttgctaa

SEQ ID NO: 578838 - DNA, 33 bp, Homo sapien
gtgtgtagcagaaccaggacataaggttgctaa

SEQ ID NO: 578839 - DNA, 33 bp, Homo sapien
tgtatgccaggcactacctttggcccaatggat

SEQ ID NO: 578840 - DNA, 33 bp, Homo sapien
tgtatgccaggcactatctttggcccaatggat

SEQ ID NO: 578841 - DNA, 33 bp, Homo sapien
cctggtgggggtgattcaaacattgggagactt

SEQ ID NO: 578842 - DNA, 33 bp, Homo sapien
cctggtgggggtgattgaaacattgggagactt

SEQ ID NO: 578843 - DNA, 33 bp, Homo sapien
ccaattcagcaaagaaactggcttgtatcattg

SEQ ID NO: 578844 - DNA, 33 bp, Homo sapien
ccaattcagcaaagaatctggcttgtatcattg

SEQ ID NO: 578845 - DNA, 33 bp, Homo sapien
tacataccactgatacaaagggtgtgtagcaca

SEQ ID NO: 578846 - DNA, 33 bp, Homo sapien
tacataccactgatacgaagggtgtgtagcaca

SEQ ID NO: 578847 - DNA, 33 bp, Homo sapien
gaccacgagcctcatccaagacactggtggtca

SEQ ID NO: 578848 - DNA, 33 bp, Homo sapien
gaccacgagcctcatcgaagacactggtggtca

SEQ ID NO: 578849 - DNA, 33 bp, Homo sapien
atacaaggctggcataccatctgaaaattaaat

SEQ ID NO: 578850 - DNA, 33 bp, Homo sapien
atacaaggctggcatatcatctgaaaattaaat

SEQ ID NO: 578851 - DNA, 33 bp, Homo sapien
gcaaatacagctgtaacatttttgtagaatacc

SEQ ID NO: 578852 - DNA, 33 bp, Homo sapien
gcaaatacagctgtaatatttttgtagaatacc

SEQ ID NO: 578853 - DNA, 33 bp, Homo sapien
tgggatgaagttaagacctgaaagaggaaagat

SEQ ID NO: 578854 - DNA, 33 bp, Homo sapien
tgggatgaagttaagatctgaaagaggaaagat

SEQ ID NO: 578855 - DNA, 33 bp, Homo sapien
gtcatcctgcaaaatccgaatggaaagacatct

SEQ ID NO: 578856 - DNA, 33 bp, Homo sapien
gtcatcctgcaaaatctgaatggaaagacatct

SEQ ID NO: 578857 - DNA, 33 bp, Homo sapien
acttgggggaattctacggtgaccatgcttctt

SEQ ID NO: 578858 - DNA, 33 bp, Homo sapien
acttgggggaattctatggtgaccatgcttctt

SEQ ID NO: 578859 - DNA, 33 bp, Homo sapien
aagcaaagaagaattcaagcaaaaatcaaattt

SEQ ID NO: 578860 - DNA, 33 bp, Homo sapien
aagcaaagaagaattcgagcaaaaatcaaattt

SEQ ID NO: 578861 - DNA, 33 bp, Homo sapien
atggctatcctttttcaagttgaggaggaagtc

SEQ ID NO: 578862 - DNA, 33 bp, Homo sapien
atggctatcctttttccagttgaggaggaagtc

SEQ ID NO: 578863 - DNA, 33 bp, Homo sapien
tacttaaaaacaattgaactctttagtctgcac

SEQ ID NO: 578864 - DNA, 33 bp, Homo sapien
tacttaaaaacaattggactctttagtctgcac

SEQ ID NO: 578865 - DNA, 33 bp, Homo sapien
tggacacttcgggccacggcttcactctctgct

SEQ ID NO: 578866 - DNA, 33 bp, Homo sapien
tggacacttcgggccatggcttcactctctgct

SEQ ID NO: 578867 - DNA, 33 bp, Homo sapien
ccctagttctccattgaaatcattcccagtaag

SEQ ID NO: 578868 - DNA, 33 bp, Homo sapien
ccctagttctccattgcaatcattcccagtaag

SEQ ID NO: 578869 - DNA, 33 bp, Homo sapien
gggctgtcccagcgaacgggaatgtgcagtccc

SEQ ID NO: 578870 - DNA, 33 bp, Homo sapien
gggctgtcccagcgaatgggaatgtgcagtccc

SEQ ID NO: 578871 - DNA, 33 bp, Homo sapien
cccaaatcctgtagagacccttgtcagtggcag

SEQ ID NO: 578872 - DNA, 33 bp, Homo sapien
cccaaatcctgtagagccccttgtcagtggcag

SEQ ID NO: 578873 - DNA, 33 bp, Homo sapien
tatccctgatttaatgaatacaagaggatgtat

SEQ ID NO: 578874 - DNA, 33 bp, Homo sapien
tatccctgatttaatggatacaagaggatgtat

SEQ ID NO: 578875 - DNA, 33 bp, Homo sapien
ggtgactgtcagagaaatgagaagcatcggggc

SEQ ID NO: 578876 - DNA, 33 bp, Homo sapien
ggtgactgtcagagaagtgagaagcatcggggc

SEQ ID NO: 578877 - DNA, 33 bp, Homo sapien
aaaaagagggcaaaaactaaatgaagaggcaac

SEQ ID NO: 578878 - DNA, 33 bp, Homo sapien
aaaaagagggcaaaaagtaaatgaagaggcaac

SEQ ID NO: 578879 - DNA, 33 bp, Homo sapien
agtgacaaactgtgggccaaaggaaacacaagt

SEQ ID NO: 578880 - DNA, 33 bp, Homo sapien
agtgacaaactgtgggtcaaaggaaacacaagt

SEQ ID NO: 578881 - DNA, 33 bp, Homo sapien
aaagtgtctgacagcacgtcaatgcttgttgtt

SEQ ID NO: 578882 - DNA, 33 bp, Homo sapien
aaagtgtctgacagcaggtcaatgcttgttgtt

SEQ ID NO: 578883 - DNA, 33 bp, Homo sapien
taagctctaggctctacaaaagtgctgtcagca

SEQ ID NO: 578884 - DNA, 33 bp, Homo sapien
taagctctaggctctataaaagtgctgtcagca

SEQ ID NO: 578885 - DNA, 33 bp, Homo sapien
tgatcttaattgccaactgtaattaaatgatta

SEQ ID NO: 578886 - DNA, 33 bp, Homo sapien
tgatcttaattgccaagtgtaattaaatgatta

SEQ ID NO: 578887 - DNA, 33 bp, Homo sapien
atgatggctccttttaaaacaagagttgacaat

SEQ ID NO: 578888 - DNA, 33 bp, Homo sapien
atgatggctccttttataacaagagttgacaat

SEQ ID NO: 578889 - DNA, 33 bp, Homo sapien
caaaccagcatcccccacttccatcctgtgctt

SEQ ID NO: 578890 - DNA, 33 bp, Homo sapien
caaaccagcatcccccgcttccatcctgtgctt

SEQ ID NO: 578891 - DNA, 33 bp, Homo sapien
gttggtgaaaattgcccctcttttggtgctctc

SEQ ID NO: 578892 - DNA, 33 bp, Homo sapien
gttggtgaaaattgcctctcttttggtgctctc

SEQ ID NO: 578893 - DNA, 33 bp, Homo sapien
gagggatttggtaaaacgttcatgaagaagggg

SEQ ID NO: 578894 - DNA, 33 bp, Homo sapien
gagggatttggtaaaatgttcatgaagaagggg

SEQ ID NO: 578895 - DNA, 33 bp, Homo sapien
aataataacactattaacaccagtatttcccaa

SEQ ID NO: 578896 - DNA, 33 bp, Homo sapien
aataataacactattatcaccagtatttcccaa

SEQ ID NO: 578897 - DNA, 33 bp, Homo sapien
attctataaagacatacgcatacgtgtgtttat

SEQ ID NO: 578898 - DNA, 33 bp, Homo sapien
attctataaagacatatgcatacgtgtgtttat

SEQ ID NO: 578899 - DNA, 33 bp, Homo sapien
ctgcagccattaatcaagataatatgaagcttt

SEQ ID NO: 578900 - DNA, 33 bp, Homo sapien
ctgcagccattaatcaggataatatgaagcttt

SEQ ID NO: 578901 - DNA, 33 bp, Homo sapien
gacagtagagcatagcagatgggttgatgagct

SEQ ID NO: 578902 - DNA, 33 bp, Homo sapien
gacagtagagcatagcggatgggttgatgagct

SEQ ID NO: 578903 - DNA, 33 bp, Homo sapien
tgagatgcaaggtaaaatttacaaccctatgat

SEQ ID NO: 578904 - DNA, 33 bp, Homo sapien
tgagatgcaaggtaaactttacaaccctatgat

SEQ ID NO: 578905 - DNA, 33 bp, Homo sapien
tgctaatggagagagcacgtctcagaggctgca

SEQ ID NO: 578906 - DNA, 33 bp, Homo sapien
tgctaatggagagagcgcgtctcagaggctgca

SEQ ID NO: 578907 - DNA, 33 bp, Homo sapien
tggcttctcttgtccacagggtgaccgctagtg

SEQ ID NO: 578908 - DNA, 33 bp, Homo sapien
tggcttctcttgtccagagggtgaccgctagtg

SEQ ID NO: 578909 - DNA, 33 bp, Homo sapien
tttgtttcctgggaacaaagctctccaccattt

SEQ ID NO: 578910 - DNA, 33 bp, Homo sapien
tttgtttcctgggaacgaagctctccaccattt

SEQ ID NO: 578911 - DNA, 33 bp, Homo sapien
ttatgtgcgtgtataacgatggtaaccacatac

SEQ ID NO: 578912 - DNA, 33 bp, Homo sapien
ttatgtgcgtgtataatgatggtaaccacatac

SEQ ID NO: 578913 - DNA, 33 bp, Homo sapien
cagtctccccaccaaacgaaggtctccttccac

SEQ ID NO: 578914 - DNA, 33 bp, Homo sapien
cagtctccccaccaaatgaaggtctccttccac

SEQ ID NO: 578915 - DNA, 33 bp, Homo sapien
gcttccagaaacttcaaaacaagtggactgtga

SEQ ID NO: 578916 - DNA, 33 bp, Homo sapien
gcttccagaaacttcagaacaagtggactgtga

SEQ ID NO: 578917 - DNA, 33 bp, Homo sapien
ttctttatggcaatccaagaatgaactaatgca

SEQ ID NO: 578918 - DNA, 33 bp, Homo sapien
ttctttatggcaatccgagaatgaactaatgca

SEQ ID NO: 578919 - DNA, 33 bp, Homo sapien
gaagattccaagaacagggaaaatatctaaaac

SEQ ID NO: 578920 - DNA, 33 bp, Homo sapien
gaagattccaagaacatggaaaatatctaaaac

SEQ ID NO: 578921 - DNA, 33 bp, Homo sapien
attcaaggggaatgacaacatctaggagactgg

SEQ ID NO: 578922 - DNA, 33 bp, Homo sapien
attcaaggggaatgacgacatctaggagactgg

SEQ ID NO: 578923 - DNA, 33 bp, Homo sapien
accaattctaaaccaccctttgccagttaaaac

SEQ ID NO: 578924 - DNA, 33 bp, Homo sapien
accaattctaaaccacgctttgccagttaaaac

SEQ ID NO: 578925 - DNA, 33 bp, Homo sapien
agaatctagaacttcaaagttttgtaagattgg

SEQ ID NO: 578926 - DNA, 33 bp, Homo sapien
agaatctagaacttcacagttttgtaagattgg

SEQ ID NO: 578927 - DNA, 33 bp, Homo sapien
ttaataggcaaaaaacacaagcgtgggtgaagg

SEQ ID NO: 578928 - DNA, 33 bp, Homo sapien
ttaataggcaaaaaacgcaagcgtgggtgaagg

SEQ ID NO: 578929 - DNA, 33 bp, Homo sapien
ctcgcattagattgaaccatttaaaactgccaa

SEQ ID NO: 578930 - DNA, 33 bp, Homo sapien
ctcgcattagattgaagcatttaaaactgccaa

SEQ ID NO: 578931 - DNA, 33 bp, Homo sapien
ataaatgttcccttccaaaagcaaatgactgaa

SEQ ID NO: 578932 - DNA, 33 bp, Homo sapien
ataaatgttcccttccgaaagcaaatgactgaa

SEQ ID NO: 578933 - DNA, 33 bp, Homo sapien
aagcagtgtgactataagacacttgtcaaatgg

SEQ ID NO: 578934 - DNA, 33 bp, Homo sapien
aagcagtgtgactatacgacacttgtcaaatgg

SEQ ID NO: 578935 - DNA, 33 bp, Homo sapien
attcctaagtaatgaccgaagagcatgatattt

SEQ ID NO: 578936 - DNA, 33 bp, Homo sapien
attcctaagtaatgactgaagagcatgatattt

SEQ ID NO: 578937 - DNA, 33 bp, Homo sapien
caagaccctagcaagcaaagaactattttcatc

SEQ ID NO: 578938 - DNA, 33 bp, Homo sapien
caagaccctagcaagcgaagaactattttcatc

SEQ ID NO: 578939 - DNA, 33 bp, Homo sapien
gcatcttttttttttaccaacagatgtggaaac

SEQ ID NO: 578940 - DNA, 33 bp, Homo sapien
gcatcttttttttttatcaacagatgtggaaac

SEQ ID NO: 578941 - DNA, 33 bp, Homo sapien
aaggacctgagtcccaaccaggctccgatttaa

SEQ ID NO: 578942 - DNA, 33 bp, Homo sapien
aaggacctgagtcccatccaggctccgatttaa

SEQ ID NO: 578943 - DNA, 33 bp, Homo sapien
ggcaggactgagaataaatgagcacattgcccc

SEQ ID NO: 578944 - DNA, 33 bp, Homo sapien
ggcaggactgagaatagatgagcacattgcccc

SEQ ID NO: 578945 - DNA, 33 bp, Homo sapien
aactgatctgagataaacaggccaaagaaaacc

SEQ ID NO: 578946 - DNA, 33 bp, Homo sapien
aactgatctgagataatcaggccaaagaaaacc

SEQ ID NO: 578947 - DNA, 33 bp, Homo sapien
ccttccgccatatgacacgccacgtgtgaagat

SEQ ID NO: 578948 - DNA, 33 bp, Homo sapien
ccttccgccatatgacgcgccacgtgtgaagat

SEQ ID NO: 578949 - DNA, 33 bp, Homo sapien
gggtgggatattgtgcacgccctgtctcattgg

SEQ ID NO: 578950 - DNA, 33 bp, Homo sapien
gggtgggatattgtgcgcgccctgtctcattgg

SEQ ID NO: 578951 - DNA, 33 bp, Homo sapien
ttttgtcattgtttcccctctttagactcgaag

SEQ ID NO: 578952 - DNA, 33 bp, Homo sapien
ttttgtcattgtttcctctctttagactcgaag

SEQ ID NO: 578953 - DNA, 33 bp, Homo sapien
acacgtagccggtgataagtaaacacctgttta

SEQ ID NO: 578954 - DNA, 33 bp, Homo sapien
acacgtagccggtgatcagtaaacacctgttta

SEQ ID NO: 578955 - DNA, 33 bp, Homo sapien
ctcttctctctctccaatctgtgggctgtttat

SEQ ID NO: 578956 - DNA, 33 bp, Homo sapien
ctcttctctctctccattctgtgggctgtttat

SEQ ID NO: 578957 - DNA, 33 bp, Homo sapien
ttttgacaatgaagacaacagatgacaatgacg

SEQ ID NO: 578958 - DNA, 33 bp, Homo sapien
ttttgacaatgaagacgacagatgacaatgacg

SEQ ID NO: 578959 - DNA, 33 bp, Homo sapien
tgtgtgaggtcactgcactgtatgctcttcacg

SEQ ID NO: 578960 - DNA, 33 bp, Homo sapien
tgtgtgaggtcactgctctgtatgctcttcacg

SEQ ID NO: 578961 - DNA, 33 bp, Homo sapien
gaccttgtttggaataagggtctctcaactgcc

SEQ ID NO: 578962 - DNA, 33 bp, Homo sapien
gaccttgtttggaatacgggtctctcaactgcc

SEQ ID NO: 578963 - DNA, 33 bp, Homo sapien
cccagaagggtctcccagcttgactttccttta

SEQ ID NO: 578964 - DNA, 33 bp, Homo sapien
cccagaagggtctcccggcttgactttccttta

SEQ ID NO: 578965 - DNA, 33 bp, Homo sapien
gggacacagacagataccagcatgatccctcat

SEQ ID NO: 578966 - DNA, 33 bp, Homo sapien
gggacacagacagatagcagcatgatccctcat

SEQ ID NO: 578967 - DNA, 33 bp, Homo sapien
tgtgtccatcatcccacggtacctggttctaag

SEQ ID NO: 578968 - DNA, 33 bp, Homo sapien
tgtgtccatcatcccagggtacctggttctaag

SEQ ID NO: 578969 - DNA, 33 bp, Homo sapien
acatctgtgaccctgaggaatctgatttgtccc

SEQ ID NO: 578970 - DNA, 33 bp, Homo sapien
acatctgtgaccctgatgaatctgatttgtccc

SEQ ID NO: 578971 - DNA, 33 bp, Homo sapien
ctttgtgctgatgtccagatgaccctgaagtcc

SEQ ID NO: 578972 - DNA, 33 bp, Homo sapien
ctttgtgctgatgtccggatgaccctgaagtcc

SEQ ID NO: 578973 - DNA, 33 bp, Homo sapien
gcgagaccaagtcttcacctctgtagttcttac

SEQ ID NO: 578974 - DNA, 33 bp, Homo sapien
gcgagaccaagtcttcgcctctgtagttcttac

SEQ ID NO: 578975 - DNA, 33 bp, Homo sapien
ttcaatattggtcatacagaaagtatataaatg

SEQ ID NO: 578976 - DNA, 33 bp, Homo sapien
ttcaatattggtcatagagaaagtatataaatg

SEQ ID NO: 578977 - DNA, 33 bp, Homo sapien
tccagtcatcaaaagcaaattttatgagaaaca

SEQ ID NO: 578978 - DNA, 33 bp, Homo sapien
tccagtcatcaaaagcgaattttatgagaaaca

SEQ ID NO: 578979 - DNA, 33 bp, Homo sapien
ctttgatgtggaaacacggagatgacattagct

SEQ ID NO: 578980 - DNA, 33 bp, Homo sapien
ctttgatgtggaaacatggagatgacattagct

SEQ ID NO: 578981 - DNA, 33 bp, Homo sapien
attcaatgtctgtacaacatgaagttttctgtc

SEQ ID NO: 578982 - DNA, 33 bp, Homo sapien
attcaatgtctgtacaccatgaagttttctgtc

SEQ ID NO: 578983 - DNA, 33 bp, Homo sapien
ccacaacaaaaacttacagatctgactgatctt

SEQ ID NO: 578984 - DNA, 33 bp, Homo sapien
ccacaacaaaaacttatagatctgactgatctt

SEQ ID NO: 578985 - DNA, 33 bp, Homo sapien
gaacgccttacaccacaatgtcatatgacagca

SEQ ID NO: 578986 - DNA, 33 bp, Homo sapien
gaacgccttacaccacgatgtcatatgacagca

SEQ ID NO: 578987 - DNA, 33 bp, Homo sapien
caccaggaaaaggcccaggaacactcagaagat

SEQ ID NO: 578988 - DNA, 33 bp, Homo sapien
caccaggaaaaggccccggaacactcagaagat

SEQ ID NO: 578989 - DNA, 33 bp, Homo sapien
gcagattgtgaactacacatatgagggatctgg

SEQ ID NO: 578990 - DNA, 33 bp, Homo sapien
gcagattgtgaactacgcatatgagggatctgg

SEQ ID NO: 578991 - DNA, 33 bp, Homo sapien
ctgcggtagatccttcactcggcatcagtctct

SEQ ID NO: 578992 - DNA, 33 bp, Homo sapien
ctgcggtagatccttcgctcggcatcagtctct

SEQ ID NO: 578993 - DNA, 33 bp, Homo sapien
attaaatgatctcatacgggtgtaaaatgaaaa

SEQ ID NO: 578994 - DNA, 33 bp, Homo sapien
attaaatgatctcatatgggtgtaaaatgaaaa

SEQ ID NO: 578995 - DNA, 33 bp, Homo sapien
aaaggaaaaatggtgacgagcctgatgccaagg

SEQ ID NO: 578996 - DNA, 33 bp, Homo sapien
aaaggaaaaatggtgatgagcctgatgccaagg

SEQ ID NO: 578997 - DNA, 33 bp, Homo sapien
agtccagaccaggcaaagtttgggcgacagatc

SEQ ID NO: 578998 - DNA, 33 bp, Homo sapien
agtccagaccaggcaaggtttgggcgacagatc

SEQ ID NO: 578999 - DNA, 33 bp, Homo sapien
actagagagggcttccaagctaaggacaaacct

SEQ ID NO: 579000 - DNA, 33 bp, Homo sapien
actagagagggcttccgagctaaggacaaacct

SEQ ID NO: 579001 - DNA, 33 bp, Homo sapien
gtataaatatttgaaacgcatcttttacataaa

SEQ ID NO: 579002 - DNA, 33 bp, Homo sapien
gtataaatatttgaaatgcatcttttacataaa

SEQ ID NO: 579003 - DNA, 33 bp, Homo sapien
gcaaaaagaagtgagactaaatctgctatcaat

SEQ ID NO: 579004 - DNA, 33 bp, Homo sapien
gcaaaaagaagtgagagtaaatctgctatcaat

SEQ ID NO: 579005 - DNA, 33 bp, Homo sapien
taacgagctcttctccaactggtgagatttgac

SEQ ID NO: 579006 - DNA, 33 bp, Homo sapien
taacgagctcttctccgactggtgagatttgac

SEQ ID NO: 579007 - DNA, 33 bp, Homo sapien
tgcaaagtaacccacacagttgtctgtaagtta

SEQ ID NO: 579008 - DNA, 33 bp, Homo sapien
tgcaaagtaacccacatagttgtctgtaagtta

SEQ ID NO: 579009 - DNA, 33 bp, Homo sapien
gagacaaaaatcaataccctacatgctagcatg

SEQ ID NO: 579010 - DNA, 33 bp, Homo sapien
gagacaaaaatcaatatcctacatgctagcatg

SEQ ID NO: 579011 - DNA, 33 bp, Homo sapien
aggtgtcaatggagtacgtaagatgttttgata

SEQ ID NO: 579012 - DNA, 33 bp, Homo sapien
aggtgtcaatggagtatgtaagatgttttgata

SEQ ID NO: 579013 - DNA, 33 bp, Homo sapien
gaagaaaggaaaagaaccatccagataaatctc

SEQ ID NO: 579014 - DNA, 33 bp, Homo sapien
gaagaaaggaaaagaatcatccagataaatctc

SEQ ID NO: 579015 - DNA, 33 bp, Homo sapien
tgtcctccgtttgtgcagacaaagtctatgatc

SEQ ID NO: 579016 - DNA, 33 bp, Homo sapien
tgtcctccgtttgtgcggacaaagtctatgatc

SEQ ID NO: 579017 - DNA, 33 bp, Homo sapien
gcacctaactgcatataataaaccactgtattc

SEQ ID NO: 579018 - DNA, 33 bp, Homo sapien
gcacctaactgcatatgataaaccactgtattc

SEQ ID NO: 579019 - DNA, 33 bp, Homo sapien
cagaggccgtgaatcactcatttaggcaacctg

SEQ ID NO: 579020 - DNA, 33 bp, Homo sapien
cagaggccgtgaatcattcatttaggcaacctg

SEQ ID NO: 579021 - DNA, 33 bp, Homo sapien
attcagggagaatttgaaccctagaaatcacag

SEQ ID NO: 579022 - DNA, 33 bp, Homo sapien
attcagggagaatttggaccctagaaatcacag

SEQ ID NO: 579023 - DNA, 33 bp, Homo sapien
cttgcacagaccatgaccatcactaggtcctcc

SEQ ID NO: 579024 - DNA, 33 bp, Homo sapien
cttgcacagaccatgatcatcactaggtcctcc

SEQ ID NO: 579025 - DNA, 33 bp, Homo sapien
caagctgaaggtgaaacagtcacttagtctctc

SEQ ID NO: 579026 - DNA, 33 bp, Homo sapien
caagctgaaggtgaaatagtcacttagtctctc

SEQ ID NO: 579027 - DNA, 33 bp, Homo sapien
actcggaggctatagacgtgatcgtgttgccat

SEQ ID NO: 579028 - DNA, 33 bp, Homo sapien
actcggaggctatagatgtgatcgtgttgccat

SEQ ID NO: 579029 - DNA, 33 bp, Homo sapien
agggaaaagatacagacgtaaatcacacaagga

SEQ ID NO: 579030 - DNA, 33 bp, Homo sapien
agggaaaagatacagatgtaaatcacacaagga

SEQ ID NO: 579031 - DNA, 33 bp, Homo sapien
actagtgagcctaacaaaatcccatttagggaa

SEQ ID NO: 579032 - DNA, 33 bp, Homo sapien
actagtgagcctaacacaatcccatttagggaa

SEQ ID NO: 579033 - DNA, 33 bp, Homo sapien
tatttaccaaggttacagagatataatcagtaa

SEQ ID NO: 579034 - DNA, 33 bp, Homo sapien
tatttaccaaggttacggagatataatcagtaa

SEQ ID NO: 579035 - DNA, 33 bp, Homo sapien
caaaacacattgtatccatgccatcacagaaga

SEQ ID NO: 579036 - DNA, 33 bp, Homo sapien
caaaacacattgtatctatgccatcacagaaga

SEQ ID NO: 579037 - DNA, 33 bp, Homo sapien
gcctttgggagacaatcaggtttagatgagctc

SEQ ID NO: 579038 - DNA, 33 bp, Homo sapien
gcctttgggagacaattaggtttagatgagctc

SEQ ID NO: 579039 - DNA, 33 bp, Homo sapien
ttagaactttctaggacagcagtgataacttct

SEQ ID NO: 579040 - DNA, 33 bp, Homo sapien
ttagaactttctaggagagcagtgataacttct

SEQ ID NO: 579041 - DNA, 33 bp, Homo sapien
tgtgcttatcattccacaggcctgagttcccac

SEQ ID NO: 579042 - DNA, 33 bp, Homo sapien
tgtgcttatcattccataggcctgagttcccac

SEQ ID NO: 579043 - DNA, 33 bp, Homo sapien
acagaactagaaataccgccgagcatttgagag

SEQ ID NO: 579044 - DNA, 33 bp, Homo sapien
acagaactagaaatactgccgagcatttgagag

SEQ ID NO: 579045 - DNA, 33 bp, Homo sapien
gcgtgacagtagtgacagaatgaccaaagttca

SEQ ID NO: 579046 - DNA, 33 bp, Homo sapien
gcgtgacagtagtgacggaatgaccaaagttca

SEQ ID NO: 579047 - DNA, 33 bp, Homo sapien
aacccactcactatgacgtatttaatgcatttc

SEQ ID NO: 579048 - DNA, 33 bp, Homo sapien
aacccactcactatgatgtatttaatgcatttc

SEQ ID NO: 579049 - DNA, 33 bp, Homo sapien
cagcctcatacttgcacaaaatttcagcagtag

SEQ ID NO: 579050 - DNA, 33 bp, Homo sapien
cagcctcatacttgcataaaatttcagcagtag

SEQ ID NO: 579051 - DNA, 33 bp, Homo sapien
gtacaatgaagtcatgcatacctatcatctaga

SEQ ID NO: 579052 - DNA, 33 bp, Homo sapien
gtacaatgaagtcatgtatacctatcatctaga

SEQ ID NO: 579053 - DNA, 33 bp, Homo sapien
gacaggcttttaaaaacgtggcagatcaaaaga

SEQ ID NO: 579054 - DNA, 33 bp, Homo sapien
gacaggcttttaaaaatgtggcagatcaaaaga

SEQ ID NO: 579055 - DNA, 33 bp, Homo sapien
ggagatgattcaaaaccctgagcagggagttca

SEQ ID NO: 579056 - DNA, 33 bp, Homo sapien
ggagatgattcaaaacgctgagcagggagttca

SEQ ID NO: 579057 - DNA, 33 bp, Homo sapien
gcgctgccacatttggaacagaatggagcagcc

SEQ ID NO: 579058 - DNA, 33 bp, Homo sapien
gcgctgccacatttgggacagaatggagcagcc

SEQ ID NO: 579059 - DNA, 33 bp, Homo sapien
tcactgaaaccaggaacaaaggagtattctgat

SEQ ID NO: 579060 - DNA, 33 bp, Homo sapien
tcactgaaaccaggaagaaaggagtattctgat

SEQ ID NO: 579061 - DNA, 33 bp, Homo sapien
ggttgttgtgacttccaatcaagaggtcctgac

SEQ ID NO: 579062 - DNA, 33 bp, Homo sapien
ggttgttgtgacttcccatcaagaggtcctgac

SEQ ID NO: 579063 - DNA, 33 bp, Homo sapien
taggaactagagacaacgttcataatacacctg

SEQ ID NO: 579064 - DNA, 33 bp, Homo sapien
taggaactagagacaatgttcataatacacctg

SEQ ID NO: 579065 - DNA, 33 bp, Homo sapien
acctgtggctcacatagctaaggacagcagggc

SEQ ID NO: 579066 - DNA, 33 bp, Homo sapien
acctgtggctcacatatctaaggacagcagggc

SEQ ID NO: 579067 - DNA, 33 bp, Homo sapien
tggcatctagtacagaacaatgatggtctatct

SEQ ID NO: 579068 - DNA, 33 bp, Homo sapien
tggcatctagtacagagcaatgatggtctatct

SEQ ID NO: 579069 - DNA, 33 bp, Homo sapien
gggcattagtatgaaacgaccaaagagacttag

SEQ ID NO: 579070 - DNA, 33 bp, Homo sapien
gggcattagtatgaaatgaccaaagagacttag

SEQ ID NO: 579071 - DNA, 33 bp, Homo sapien
taactatgacggttatcaagggcaggggtctcc

SEQ ID NO: 579072 - DNA, 33 bp, Homo sapien
taactatgacggttattaagggcaggggtctcc

SEQ ID NO: 579073 - DNA, 33 bp, Homo sapien
gcatccttcattctaaacaggattctgaacaaa

SEQ ID NO: 579074 - DNA, 33 bp, Homo sapien
gcatccttcattctaagcaggattctgaacaaa

SEQ ID NO: 579075 - DNA, 33 bp, Homo sapien
tgcagctggttcctgacaggccaggcagcactt

SEQ ID NO: 579076 - DNA, 33 bp, Homo sapien
tgcagctggttcctgagaggccaggcagcactt

SEQ ID NO: 579077 - DNA, 33 bp, Homo sapien
cggtgctgccattactaaacccttactgtgtgc

SEQ ID NO: 579078 - DNA, 33 bp, Homo sapien
cggtgctgccattactgaacccttactgtgtgc

SEQ ID NO: 579079 - DNA, 33 bp, Homo sapien
caggacatgtgaaaagccaaaaataagtctcag

SEQ ID NO: 579080 - DNA, 33 bp, Homo sapien
caggacatgtgaaaagtcaaaaataagtctcag

SEQ ID NO: 579081 - DNA, 33 bp, Homo sapien
cacagcccgtgtctagaagaacatcttgtccaa

SEQ ID NO: 579082 - DNA, 33 bp, Homo sapien
cacagcccgtgtctaggagaacatcttgtccaa

SEQ ID NO: 579083 - DNA, 33 bp, Homo sapien
ccgtctaagtctcatcactcatcaggaacaccc

SEQ ID NO: 579084 - DNA, 33 bp, Homo sapien
ccgtctaagtctcatcgctcatcaggaacaccc

SEQ ID NO: 579085 - DNA, 33 bp, Homo sapien
gacctaaagtcatgataagcaaattgggacaga

SEQ ID NO: 579086 - DNA, 33 bp, Homo sapien
gacctaaagtcatgatgagcaaattgggacaga

SEQ ID NO: 579087 - DNA, 33 bp, Homo sapien
tgctttaaagtggaaacaactctgtagtattct

SEQ ID NO: 579088 - DNA, 33 bp, Homo sapien
tgctttaaagtggaaataactctgtagtattct

SEQ ID NO: 579089 - DNA, 33 bp, Homo sapien
atggtgccactgcattcaagcgtgggtgacaga

SEQ ID NO: 579090 - DNA, 33 bp, Homo sapien
atggtgccactgcattgaagcgtgggtgacaga

SEQ ID NO: 579091 - DNA, 33 bp, Homo sapien
ctccttctggacccccaagcctgataccagcac

SEQ ID NO: 579092 - DNA, 33 bp, Homo sapien
ctccttctggacccccgagcctgataccagcac

SEQ ID NO: 579093 - DNA, 33 bp, Homo sapien
ttgtttgccagagttacaggcactgattcagga

SEQ ID NO: 579094 - DNA, 33 bp, Homo sapien
ttgtttgccagagttataggcactgattcagga

SEQ ID NO: 579095 - DNA, 33 bp, Homo sapien
tcactcagattggaccaactggaggcatctttc

SEQ ID NO: 579096 - DNA, 33 bp, Homo sapien
tcactcagattggaccgactggaggcatctttc

SEQ ID NO: 579097 - DNA, 33 bp, Homo sapien
gagagggacaaagcccagaacaatcacagagaa

SEQ ID NO: 579098 - DNA, 33 bp, Homo sapien
gagagggacaaagcccggaacaatcacagagaa

SEQ ID NO: 579099 - DNA, 33 bp, Homo sapien
gcataggacatttgacaaggacattcttacctc

SEQ ID NO: 579100 - DNA, 33 bp, Homo sapien
gcataggacatttgacgaggacattcttacctc

SEQ ID NO: 579101 - DNA, 33 bp, Homo sapien
tcggcagtcagtgtccaagatggctccccacgc

SEQ ID NO: 579102 - DNA, 33 bp, Homo sapien
tcggcagtcagtgtcccagatggctccccacgc

SEQ ID NO: 579103 - DNA, 33 bp, Homo sapien
agatgttaacaggccacgtaatcagatgcatca

SEQ ID NO: 579104 - DNA, 33 bp, Homo sapien
agatgttaacaggccatgtaatcagatgcatca

SEQ ID NO: 579105 - DNA, 33 bp, Homo sapien
cctgtcacagctttgacacaccatcacaaactg

SEQ ID NO: 579106 - DNA, 33 bp, Homo sapien
cctgtcacagctttgagacaccatcacaaactg

SEQ ID NO: 579107 - DNA, 33 bp, Homo sapien
cttgtctttgatgaacactgtagcagttggaca

SEQ ID NO: 579108 - DNA, 33 bp, Homo sapien
cttgtctttgatgaacgctgtagcagttggaca

SEQ ID NO: 579109 - DNA, 33 bp, Homo sapien
gcttggcctttgaagacgacataggaagtctct

SEQ ID NO: 579110 - DNA, 33 bp, Homo sapien
gcttggcctttgaagatgacataggaagtctct

SEQ ID NO: 579111 - DNA, 33 bp, Homo sapien
gtccatgcccactctcactcttgcaagttcaag

SEQ ID NO: 579112 - DNA, 33 bp, Homo sapien
gtccatgcccactctccctcttgcaagttcaag

SEQ ID NO: 579113 - DNA, 33 bp, Homo sapien
agtcatcaaagatagacatgcatgaaggccctg

SEQ ID NO: 579114 - DNA, 33 bp, Homo sapien
agtcatcaaagatagatatgcatgaaggccctg

SEQ ID NO: 579115 - DNA, 33 bp, Homo sapien
ccctacgttgcaattcgcagccatattgattgg

SEQ ID NO: 579116 - DNA, 33 bp, Homo sapien
ccctacgttgcaattctcagccatattgattgg

SEQ ID NO: 579117 - DNA, 33 bp, Homo sapien
gtgccttagtttttaacgaactaagagcgaaaa

SEQ ID NO: 579118 - DNA, 33 bp, Homo sapien
gtgccttagtttttaatgaactaagagcgaaaa

SEQ ID NO: 579119 - DNA, 33 bp, Homo sapien
cagcctgtgactataccgagtgctgtacagcag

SEQ ID NO: 579120 - DNA, 33 bp, Homo sapien
cagcctgtgactatactgagtgctgtacagcag

SEQ ID NO: 579121 - DNA, 33 bp, Homo sapien
tgaatcaagttgagacccatcaatgcagtttcc

SEQ ID NO: 579122 - DNA, 33 bp, Homo sapien
tgaatcaagttgagactcatcaatgcagtttcc

SEQ ID NO: 579123 - DNA, 33 bp, Homo sapien
catggcgtgtgttctacattcacaagaaggaaa

SEQ ID NO: 579124 - DNA, 33 bp, Homo sapien
catggcgtgtgttctatattcacaagaaggaaa

SEQ ID NO: 579125 - DNA, 33 bp, Homo sapien
gagaacctctgagccaaatgtttatttcacacc

SEQ ID NO: 579126 - DNA, 33 bp, Homo sapien
gagaacctctgagccagatgtttatttcacacc

SEQ ID NO: 579127 - DNA, 33 bp, Homo sapien
tgtgttccctgtgcaaagacagctttagtattc

SEQ ID NO: 579128 - DNA, 33 bp, Homo sapien
tgtgttccctgtgcaatgacagctttagtattc

SEQ ID NO: 579129 - DNA, 33 bp, Homo sapien
atacgttttttgtcaactcgaaaacaaataaat

SEQ ID NO: 579130 - DNA, 33 bp, Homo sapien
atacgttttttgtcaattcgaaaacaaataaat

SEQ ID NO: 579131 - DNA, 33 bp, Homo sapien
cccgggactccgttccacagtcatcaatacaga

SEQ ID NO: 579132 - DNA, 33 bp, Homo sapien
cccgggactccgttccgcagtcatcaatacaga

SEQ ID NO: 579133 - DNA, 33 bp, Homo sapien
actgagtctgggccacccactggtgagctgttc

SEQ ID NO: 579134 - DNA, 33 bp, Homo sapien
actgagtctgggccacgcactggtgagctgttc

SEQ ID NO: 579135 - DNA, 33 bp, Homo sapien
gaggtcgtgctgctaccatcattggacacatga

SEQ ID NO: 579136 - DNA, 33 bp, Homo sapien
gaggtcgtgctgctactatcattggacacatga

SEQ ID NO: 579137 - DNA, 33 bp, Homo sapien
tactcagttgatcctagagtccctgaacttatc

SEQ ID NO: 579138 - DNA, 33 bp, Homo sapien
tactcagttgatcctatagtccctgaacttatc

SEQ ID NO: 579139 - DNA, 33 bp, Homo sapien
cttttctttgctatacaaaagtctagtctctcc

SEQ ID NO: 579140 - DNA, 33 bp, Homo sapien
cttttctttgctatacgaaagtctagtctctcc

SEQ ID NO: 579141 - DNA, 33 bp, Homo sapien
gagacaggacccatagaatatttgagaggggtt

SEQ ID NO: 579142 - DNA, 33 bp, Homo sapien
gagacaggacccataggatatttgagaggggtt

SEQ ID NO: 579143 - DNA, 33 bp, Homo sapien
ccattataaacaataccagtcaatatccttgca

SEQ ID NO: 579144 - DNA, 33 bp, Homo sapien
ccattataaacaatactagtcaatatccttgca

SEQ ID NO: 579145 - DNA, 33 bp, Homo sapien
accagatgttggctgaagcattgatttatgggc

SEQ ID NO: 579146 - DNA, 33 bp, Homo sapien
accagatgttggctgaggcattgatttatgggc

SEQ ID NO: 579147 - DNA, 33 bp, Homo sapien
tgatttatgggcatgaacttccatgtgccccga

SEQ ID NO: 579148 - DNA, 33 bp, Homo sapien
tgatttatgggcatgaccttccatgtgccccga

SEQ ID NO: 579149 - DNA, 33 bp, Homo sapien
tgcagagtagggaaacagaaaaagctaagtgag

SEQ ID NO: 579150 - DNA, 33 bp, Homo sapien
tgcagagtagggaaacggaaaaagctaagtgag

SEQ ID NO: 579151 - DNA, 33 bp, Homo sapien
ggctgacctgcgctcagtagaatactaaagaac

SEQ ID NO: 579152 - DNA, 33 bp, Homo sapien
ggctgacctgcgctcattagaatactaaagaac

SEQ ID NO: 579153 - DNA, 33 bp, Homo sapien
agtttttcactggaacccttaacatactaacca

SEQ ID NO: 579154 - DNA, 33 bp, Homo sapien
agtttttcactggaactcttaacatactaacca

SEQ ID NO: 579155 - DNA, 33 bp, Homo sapien
cccactgaaagactgaaatttaatttgatgatt

SEQ ID NO: 579156 - DNA, 33 bp, Homo sapien
cccactgaaagactgagatttaatttgatgatt

SEQ ID NO: 579157 - DNA, 33 bp, Homo sapien
ctctgataagcctgataaagtgcttcacctggg

SEQ ID NO: 579158 - DNA, 33 bp, Homo sapien
ctctgataagcctgatgaagtgcttcacctggg

SEQ ID NO: 579159 - DNA, 33 bp, Homo sapien
ttcatgatggccaagcaattaagacaatgatcc

SEQ ID NO: 579160 - DNA, 33 bp, Homo sapien
ttcatgatggccaagcgattaagacaatgatcc

SEQ ID NO: 579161 - DNA, 33 bp, Homo sapien
caggcaactttgcagaatatcaaaagacataga

SEQ ID NO: 579162 - DNA, 33 bp, Homo sapien
caggcaactttgcagactatcaaaagacataga

SEQ ID NO: 579163 - DNA, 33 bp, Homo sapien
agggaataggcagatacagttttcagatatcta

SEQ ID NO: 579164 - DNA, 33 bp, Homo sapien
agggaataggcagatagagttttcagatatcta

SEQ ID NO: 579165 - DNA, 33 bp, Homo sapien
ttctatttttgtgccaatatcaactcatcctga

SEQ ID NO: 579166 - DNA, 33 bp, Homo sapien
ttctatttttgtgccagtatcaactcatcctga

SEQ ID NO: 579167 - DNA, 33 bp, Homo sapien
acacttgggttgcatacaatgtttcagtcaatg

SEQ ID NO: 579168 - DNA, 33 bp, Homo sapien
acacttgggttgcatagaatgtttcagtcaatg

SEQ ID NO: 579169 - DNA, 33 bp, Homo sapien
taaatgcagtcaagtaaagatcaggttatgtta

SEQ ID NO: 579170 - DNA, 33 bp, Homo sapien
taaatgcagtcaagtatagatcaggttatgtta

SEQ ID NO: 579171 - DNA, 33 bp, Homo sapien
cattgatgagaatgaacgaagtacaaatgtaaa

SEQ ID NO: 579172 - DNA, 33 bp, Homo sapien
cattgatgagaatgaatgaagtacaaatgtaaa

SEQ ID NO: 579173 - DNA, 33 bp, Homo sapien
agacacctttattgtacggacaaatggcatttt

SEQ ID NO: 579174 - DNA, 33 bp, Homo sapien
agacacctttattgtatggacaaatggcatttt

SEQ ID NO: 579175 - DNA, 33 bp, Homo sapien
cagtatgtctgatgctcaatattttaagcctgc

SEQ ID NO: 579176 - DNA, 33 bp, Homo sapien
cagtatgtctgatgctgaatattttaagcctgc

SEQ ID NO: 579177 - DNA, 33 bp, Homo sapien
attcacgacagattgcaagtgaatgtgatttgt

SEQ ID NO: 579178 - DNA, 33 bp, Homo sapien
attcacgacagattgcgagtgaatgtgatttgt

SEQ ID NO: 579179 - DNA, 33 bp, Homo sapien
agaggtgccggatgacaactggtacacacagtc

SEQ ID NO: 579180 - DNA, 33 bp, Homo sapien
agaggtgccggatgacgactggtacacacagtc

SEQ ID NO: 579181 - DNA, 33 bp, Homo sapien
atacttttgtaagcaaagacaccaaccatttag

SEQ ID NO: 579182 - DNA, 33 bp, Homo sapien
atacttttgtaagcaaggacaccaaccatttag

SEQ ID NO: 579183 - DNA, 33 bp, Homo sapien
cctgcccactccccaaataatggttttaagatt

SEQ ID NO: 579184 - DNA, 33 bp, Homo sapien
cctgcccactccccaactaatggttttaagatt

SEQ ID NO: 579185 - DNA, 33 bp, Homo sapien
aaataaggtccatacactgcaattggttgataa

SEQ ID NO: 579186 - DNA, 33 bp, Homo sapien
aaataaggtccatacattgcaattggttgataa

SEQ ID NO: 579187 - DNA, 33 bp, Homo sapien
ttctgtcttcagcccaatcaactttcacatccg

SEQ ID NO: 579188 - DNA, 33 bp, Homo sapien
ttctgtcttcagcccagtcaactttcacatccg

SEQ ID NO: 579189 - DNA, 33 bp, Homo sapien
cttctctcctacatagacatttaagaccatgaa

SEQ ID NO: 579190 - DNA, 33 bp, Homo sapien
cttctctcctacataggcatttaagaccatgaa

SEQ ID NO: 579191 - DNA, 33 bp, Homo sapien
tacatactcaatagacaagtctaacagcacatt

SEQ ID NO: 579192 - DNA, 33 bp, Homo sapien
tacatactcaatagacgagtctaacagcacatt

SEQ ID NO: 579193 - DNA, 33 bp, Homo sapien
tttattaacaacttcaagatgaggttgtgtcat

SEQ ID NO: 579194 - DNA, 33 bp, Homo sapien
tttattaacaacttcaggatgaggttgtgtcat

SEQ ID NO: 579195 - DNA, 33 bp, Homo sapien
acatcactgatcactaaaaatatgtcaatatca

SEQ ID NO: 579196 - DNA, 33 bp, Homo sapien
acatcactgatcactagaaatatgtcaatatca

SEQ ID NO: 579197 - DNA, 33 bp, Homo sapien
atgttagaaggtactacatttgagagctgtttg

SEQ ID NO: 579198 - DNA, 33 bp, Homo sapien
atgttagaaggtactatatttgagagctgtttg

SEQ ID NO: 579199 - DNA, 33 bp, Homo sapien
acagcaattccgctcccagggatataaccatga

SEQ ID NO: 579200 - DNA, 33 bp, Homo sapien
acagcaattccgctcctagggatataaccatga

SEQ ID NO: 579201 - DNA, 33 bp, Homo sapien
catacttttatgtcaaatgaatcctttggaaat

SEQ ID NO: 579202 - DNA, 33 bp, Homo sapien
catacttttatgtcaagtgaatcctttggaaat

SEQ ID NO: 579203 - DNA, 33 bp, Homo sapien
gggtgtgtttaccatcaatctctctctctggca

SEQ ID NO: 579204 - DNA, 33 bp, Homo sapien
gggtgtgtttaccatctatctctctctctggca

SEQ ID NO: 579205 - DNA, 33 bp, Homo sapien
ttctgagcccttacataaattctcatcccaggc

SEQ ID NO: 579206 - DNA, 33 bp, Homo sapien
ttctgagcccttacatgaattctcatcccaggc

SEQ ID NO: 579207 - DNA, 33 bp, Homo sapien
ggcacaggtaaaaacgaacatttatgatttgga

SEQ ID NO: 579208 - DNA, 33 bp, Homo sapien
ggcacaggtaaaaacgcacatttatgatttgga

SEQ ID NO: 579209 - DNA, 33 bp, Homo sapien
aaatttggggagatcacgttcaggccatagaag

SEQ ID NO: 579210 - DNA, 33 bp, Homo sapien
aaatttggggagatcatgttcaggccatagaag

SEQ ID NO: 579211 - DNA, 33 bp, Homo sapien
catacaaaagttcatcaaactgagcattttccg

SEQ ID NO: 579212 - DNA, 33 bp, Homo sapien
catacaaaagttcatccaactgagcattttccg

SEQ ID NO: 579213 - DNA, 33 bp, Homo sapien
acaaaggctggggatcaaatacaactgcgcaca

SEQ ID NO: 579214 - DNA, 33 bp, Homo sapien
acaaaggctggggatcgaatacaactgcgcaca

SEQ ID NO: 579215 - DNA, 33 bp, Homo sapien
gtggaaccaaattgcacggcccaaaaggcacag

SEQ ID NO: 579216 - DNA, 33 bp, Homo sapien
gtggaaccaaattgcatggcccaaaaggcacag

SEQ ID NO: 579217 - DNA, 33 bp, Homo sapien
catgtaaatacaaaccggaagccggggctcctt

SEQ ID NO: 579218 - DNA, 33 bp, Homo sapien
catgtaaatacaaacctgaagccggggctcctt

SEQ ID NO: 579219 - DNA, 33 bp, Homo sapien
gggcaaaataatctccactcctttatggcaagt

SEQ ID NO: 579220 - DNA, 33 bp, Homo sapien
gggcaaaataatctcccctcctttatggcaagt

SEQ ID NO: 579221 - DNA, 33 bp, Homo sapien
tttggagtcctactaacgtggatttaaatctga

SEQ ID NO: 579222 - DNA, 33 bp, Homo sapien
tttggagtcctactaatgtggatttaaatctga

SEQ ID NO: 579223 - DNA, 33 bp, Homo sapien
atcttgatattggtaacgttaaatgttcctttt

SEQ ID NO: 579224 - DNA, 33 bp, Homo sapien
atcttgatattggtaatgttaaatgttcctttt

SEQ ID NO: 579225 - DNA, 33 bp, Homo sapien
tatcctaattcccacccagtggcaacatctacc

SEQ ID NO: 579226 - DNA, 33 bp, Homo sapien
tatcctaattcccacctagtggcaacatctacc

SEQ ID NO: 579227 - DNA, 33 bp, Homo sapien
ggggaggcctcaggacacttacaatcacagtgg

SEQ ID NO: 579228 - DNA, 33 bp, Homo sapien
ggggaggcctcaggacgcttacaatcacagtgg

SEQ ID NO: 579229 - DNA, 33 bp, Homo sapien
tacacgttaaagaaaaatgtgagacatcataaa

SEQ ID NO: 579230 - DNA, 33 bp, Homo sapien
tacacgttaaagaaaagtgtgagacatcataaa

SEQ ID NO: 579231 - DNA, 33 bp, Homo sapien
gggttggatactcggcactagaactgttaaggg

SEQ ID NO: 579232 - DNA, 33 bp, Homo sapien
gggttggatactcggccctagaactgttaaggg

SEQ ID NO: 579233 - DNA, 33 bp, Homo sapien
tgctggacccctgctacgcctcagcacggatgt

SEQ ID NO: 579234 - DNA, 33 bp, Homo sapien
tgctggacccctgctatgcctcagcacggatgt

SEQ ID NO: 579235 - DNA, 33 bp, Homo sapien
cctacaaaaacgtaagacagcaatgaggaaaga

SEQ ID NO: 579236 - DNA, 33 bp, Homo sapien
cctacaaaaacgtaaggcagcaatgaggaaaga

SEQ ID NO: 579237 - DNA, 33 bp, Homo sapien
agcaagcagacaaataaatcacagtaattgtat

SEQ ID NO: 579238 - DNA, 33 bp, Homo sapien
agcaagcagacaaatacatcacagtaattgtat

SEQ ID NO: 579239 - DNA, 33 bp, Homo sapien
cacacacaaccaggccaaataaaccaccaggct

SEQ ID NO: 579240 - DNA, 33 bp, Homo sapien
cacacacaaccaggccgaataaaccaccaggct

SEQ ID NO: 579241 - DNA, 33 bp, Homo sapien
gttcaagaactcacccactacatatgagcagtg

SEQ ID NO: 579242 - DNA, 33 bp, Homo sapien
gttcaagaactcacccgctacatatgagcagtg

SEQ ID NO: 579243 - DNA, 33 bp, Homo sapien
aggacacctctggatgcaaaatgagcctgtctc

SEQ ID NO: 579244 - DNA, 33 bp, Homo sapien
aggacacctctggatggaaaatgagcctgtctc

SEQ ID NO: 579245 - DNA, 33 bp, Homo sapien
gagtacatagcagagagattattcctggatcct

SEQ ID NO: 579246 - DNA, 33 bp, Homo sapien
gagtacatagcagagatattattcctggatcct

SEQ ID NO: 579247 - DNA, 33 bp, Homo sapien
actcggaatctgcttaaaaggctgcctattccc

SEQ ID NO: 579248 - DNA, 33 bp, Homo sapien
actcggaatctgcttacaaggctgcctattccc

SEQ ID NO: 579249 - DNA, 33 bp, Homo sapien
atctgagaagaatccaccaacctcgtaggtgtc

SEQ ID NO: 579250 - DNA, 33 bp, Homo sapien
atctgagaagaatccatcaacctcgtaggtgtc

SEQ ID NO: 579251 - DNA, 33 bp, Homo sapien
catccttgaaatgggcactgagcaaaatgtatg

SEQ ID NO: 579252 - DNA, 33 bp, Homo sapien
catccttgaaatgggcgctgagcaaaatgtatg

SEQ ID NO: 579253 - DNA, 33 bp, Homo sapien
tatagtcgctactcagaaattttgactgaggtt

SEQ ID NO: 579254 - DNA, 33 bp, Homo sapien
tatagtcgctactcaggaattttgactgaggtt

SEQ ID NO: 579255 - DNA, 33 bp, Homo sapien
agagggttggctgagtcaatttatgacaagaac

SEQ ID NO: 579256 - DNA, 33 bp, Homo sapien
agagggttggctgagtgaatttatgacaagaac

SEQ ID NO: 579257 - DNA, 33 bp, Homo sapien
tctgaaagtctgagcacgaattaactcttcttg

SEQ ID NO: 579258 - DNA, 33 bp, Homo sapien
tctgaaagtctgagcatgaattaactcttcttg

SEQ ID NO: 579259 - DNA, 33 bp, Homo sapien
agataactgatgtgcaaccgcaataaaaacaaa

SEQ ID NO: 579260 - DNA, 33 bp, Homo sapien
agataactgatgtgcacccgcaataaaaacaaa

SEQ ID NO: 579261 - DNA, 33 bp, Homo sapien
atgatcaaaattcagactcctgattccatccca

SEQ ID NO: 579262 - DNA, 33 bp, Homo sapien
atgatcaaaattcagattcctgattccatccca

SEQ ID NO: 579263 - DNA, 33 bp, Homo sapien
agtgtttctcaaagtacagccctcagtcaccct

SEQ ID NO: 579264 - DNA, 33 bp, Homo sapien
agtgtttctcaaagtatagccctcagtcaccct

SEQ ID NO: 579265 - DNA, 33 bp, Homo sapien
attttgaaagaggataaaagaattccatatact

SEQ ID NO: 579266 - DNA, 33 bp, Homo sapien
attttgaaagaggatagaagaattccatatact

SEQ ID NO: 579267 - DNA, 33 bp, Homo sapien
gggaagtatttacttaacttttggctgtctttt

SEQ ID NO: 579268 - DNA, 33 bp, Homo sapien
gggaagtatttacttatcttttggctgtctttt

SEQ ID NO: 579269 - DNA, 33 bp, Homo sapien
ttttattttaaatctacctccagctgattgata

SEQ ID NO: 579270 - DNA, 33 bp, Homo sapien
ttttattttaaatctatctccagctgattgata

SEQ ID NO: 579271 - DNA, 33 bp, Homo sapien
agaagtccaaagtcaacgtgtcggtggggccac

SEQ ID NO: 579272 - DNA, 33 bp, Homo sapien
agaagtccaaagtcaatgtgtcggtggggccac

SEQ ID NO: 579273 - DNA, 33 bp, Homo sapien
catcccccatcagcacagcgagaacagtggttt

SEQ ID NO: 579274 - DNA, 33 bp, Homo sapien
catcccccatcagcacggcgagaacagtggttt

SEQ ID NO: 579275 - DNA, 33 bp, Homo sapien
cctgcagccagaaatacgattcatcctcaactc

SEQ ID NO: 579276 - DNA, 33 bp, Homo sapien
cctgcagccagaaatatgattcatcctcaactc

SEQ ID NO: 579277 - DNA, 33 bp, Homo sapien
ggtgaaggtgagggaccgagactgtcaatgcaa

SEQ ID NO: 579278 - DNA, 33 bp, Homo sapien
ggtgaaggtgagggactgagactgtcaatgcaa

SEQ ID NO: 579279 - DNA, 33 bp, Homo sapien
agatgcaagtgaactccgagacggccttagatg

SEQ ID NO: 579280 - DNA, 33 bp, Homo sapien
agatgcaagtgaactctgagacggccttagatg

SEQ ID NO: 579281 - DNA, 33 bp, Homo sapien
ttgaatctagcattaagccaggagtctagatta

SEQ ID NO: 579282 - DNA, 33 bp, Homo sapien
ttgaatctagcattaatccaggagtctagatta

SEQ ID NO: 579283 - DNA, 33 bp, Homo sapien
cacacacgagaaacacccagtctcacacgtctg

SEQ ID NO: 579284 - DNA, 33 bp, Homo sapien
cacacacgagaaacacgcagtctcacacgtctg

SEQ ID NO: 579285 - DNA, 33 bp, Homo sapien
cacggagagcatgaataagtggagcctacactg

SEQ ID NO: 579286 - DNA, 33 bp, Homo sapien
cacggagagcatgaatgagtggagcctacactg

SEQ ID NO: 579287 - DNA, 33 bp, Homo sapien
ctggttctttctctccactctcaaagcaaccat

SEQ ID NO: 579288 - DNA, 33 bp, Homo sapien
ctggttctttctctcctctctcaaagcaaccat

SEQ ID NO: 579289 - DNA, 33 bp, Homo sapien
gaggggtccaaggtcaaaaagccaaagggccag

SEQ ID NO: 579290 - DNA, 33 bp, Homo sapien
gaggggtccaaggtcagaaagccaaagggccag

SEQ ID NO: 579291 - DNA, 33 bp, Homo sapien
agcttccccaaatgaaatgaatccgaggaccac

SEQ ID NO: 579292 - DNA, 33 bp, Homo sapien
agcttccccaaatgaagtgaatccgaggaccac

SEQ ID NO: 579293 - DNA, 33 bp, Homo sapien
ggttgtacagacttcacggatagggaacctgaa

SEQ ID NO: 579294 - DNA, 33 bp, Homo sapien
ggttgtacagacttcatggatagggaacctgaa

SEQ ID NO: 579295 - DNA, 33 bp, Homo sapien
tgactttgcaatcataacaagcaaaatgttcta

SEQ ID NO: 579296 - DNA, 33 bp, Homo sapien
tgactttgcaatcatagcaagcaaaatgttcta

SEQ ID NO: 579297 - DNA, 33 bp, Homo sapien
aagccaccatgtttccacctacaagagttagct

SEQ ID NO: 579298 - DNA, 33 bp, Homo sapien
aagccaccatgtttccgcctacaagagttagct

SEQ ID NO: 579299 - DNA, 33 bp, Homo sapien
acattgtatcaggcaaacctactccatgcagaa

SEQ ID NO: 579300 - DNA, 33 bp, Homo sapien
acattgtatcaggcaaccctactccatgcagaa

SEQ ID NO: 579301 - DNA, 33 bp, Homo sapien
caagactgcaagggacacagatttgtgagtggg

SEQ ID NO: 579302 - DNA, 33 bp, Homo sapien
caagactgcaagggacgcagatttgtgagtggg

SEQ ID NO: 579303 - DNA, 33 bp, Homo sapien
agaacatgatggaaaggcattctgcaggttcca

SEQ ID NO: 579304 - DNA, 33 bp, Homo sapien
agaacatgatggaaagtcattctgcaggttcca

SEQ ID NO: 579305 - DNA, 33 bp, Homo sapien
ataaacaagtcaccatcatacgtaagatgcaat

SEQ ID NO: 579306 - DNA, 33 bp, Homo sapien
ataaacaagtcaccatgatacgtaagatgcaat

SEQ ID NO: 579307 - DNA, 33 bp, Homo sapien
atgtctctcctagaagaatgtaggcaaatgtag

SEQ ID NO: 579308 - DNA, 33 bp, Homo sapien
atgtctctcctagaaggatgtaggcaaatgtag

SEQ ID NO: 579309 - DNA, 33 bp, Homo sapien
atatacatactcaggaagaaagagtttaagagc

SEQ ID NO: 579310 - DNA, 33 bp, Homo sapien
atatacatactcaggacgaaagagtttaagagc

SEQ ID NO: 579311 - DNA, 33 bp, Homo sapien
cctgcacatctttgaccagggtcctaaggagaa

SEQ ID NO: 579312 - DNA, 33 bp, Homo sapien
cctgcacatctttgactagggtcctaaggagaa

SEQ ID NO: 579313 - DNA, 33 bp, Homo sapien
gctctgaagaagattaaagacggtgatgggtag

SEQ ID NO: 579314 - DNA, 33 bp, Homo sapien
gctctgaagaagattacagacggtgatgggtag

SEQ ID NO: 579315 - DNA, 33 bp, Homo sapien
gaagaatatagggacagactctgaaacattaca

SEQ ID NO: 579316 - DNA, 33 bp, Homo sapien
gaagaatatagggacatactctgaaacattaca

SEQ ID NO: 579317 - DNA, 33 bp, Homo sapien
cagtccttagatttccaagtttctaacctgtca

SEQ ID NO: 579318 - DNA, 33 bp, Homo sapien
cagtccttagatttccgagtttctaacctgtca

SEQ ID NO: 579319 - DNA, 33 bp, Homo sapien
ataaaaagaaaaatcccccatcatcagaagaaa

SEQ ID NO: 579320 - DNA, 33 bp, Homo sapien
ataaaaagaaaaatcctccatcatcagaagaaa

SEQ ID NO: 579321 - DNA, 33 bp, Homo sapien
ctcaaaccccctggaccaaaaacaggagaagtg

SEQ ID NO: 579322 - DNA, 33 bp, Homo sapien
ctcaaaccccctggactaaaaacaggagaagtg

SEQ ID NO: 579323 - DNA, 33 bp, Homo sapien
cctgaagctggcagataagcaaggtaaacaatg

SEQ ID NO: 579324 - DNA, 33 bp, Homo sapien
cctgaagctggcagatcagcaaggtaaacaatg

SEQ ID NO: 579325 - DNA, 33 bp, Homo sapien
tcactcttgatacttacgcaagtactgtctaag

SEQ ID NO: 579326 - DNA, 33 bp, Homo sapien
tcactcttgatacttatgcaagtactgtctaag

SEQ ID NO: 579327 - DNA, 33 bp, Homo sapien
agagcaactttcaatacatcttctacacacaca

SEQ ID NO: 579328 - DNA, 33 bp, Homo sapien
agagcaactttcaatatatcttctacacacaca

SEQ ID NO: 579329 - DNA, 33 bp, Homo sapien
gtggtggctatcccatcatctctttgatggcat

SEQ ID NO: 579330 - DNA, 33 bp, Homo sapien
gtggtggctatcccattatctctttgatggcat

SEQ ID NO: 579331 - DNA, 33 bp, Homo sapien
gctcattttggcttcaggaggcactgggataca

SEQ ID NO: 579332 - DNA, 33 bp, Homo sapien
gctcattttggcttcatgaggcactgggataca

SEQ ID NO: 579333 - DNA, 33 bp, Homo sapien
cttaatttactcggtcccagggcccacaggcta

SEQ ID NO: 579334 - DNA, 33 bp, Homo sapien
cttaatttactcggtctcagggcccacaggcta

SEQ ID NO: 579335 - DNA, 33 bp, Homo sapien
aggcgctatagatgagaattttatggaagaagg

SEQ ID NO: 579336 - DNA, 33 bp, Homo sapien
aggcgctatagatgagcattttatggaagaagg

SEQ ID NO: 579337 - DNA, 33 bp, Homo sapien
gaatgcatggggctcaatattctttctctgtac

SEQ ID NO: 579338 - DNA, 33 bp, Homo sapien
gaatgcatggggctcattattctttctctgtac

SEQ ID NO: 579339 - DNA, 33 bp, Homo sapien
tctgacaccatagtccggctctcaacctccaca

SEQ ID NO: 579340 - DNA, 33 bp, Homo sapien
tctgacaccatagtcctgctctcaacctccaca

SEQ ID NO: 579341 - DNA, 33 bp, Homo sapien
agggtagactgttttacctgcaagtcagagtgc

SEQ ID NO: 579342 - DNA, 33 bp, Homo sapien
agggtagactgttttatctgcaagtcagagtgc

SEQ ID NO: 579343 - DNA, 33 bp, Homo sapien
aaggaaatttgcagaacggtggtctctggggtc

SEQ ID NO: 579344 - DNA, 33 bp, Homo sapien
aaggaaatttgcagaatggtggtctctggggtc

SEQ ID NO: 579345 - DNA, 33 bp, Homo sapien
cacatgaaaggctgctcaacatcattagttatt

SEQ ID NO: 579346 - DNA, 33 bp, Homo sapien
cacatgaaaggctgcttaacatcattagttatt

SEQ ID NO: 579347 - DNA, 33 bp, Homo sapien
ggagaatatcagtaaaaactcattaagtgaatg

SEQ ID NO: 579348 - DNA, 33 bp, Homo sapien
ggagaatatcagtaaagactcattaagtgaatg

SEQ ID NO: 579349 - DNA, 33 bp, Homo sapien
ttctaacacattaccaacaacacagtgctttaa

SEQ ID NO: 579350 - DNA, 33 bp, Homo sapien
ttctaacacattaccatcaacacagtgctttaa

SEQ ID NO: 579351 - DNA, 33 bp, Homo sapien
ttctacaacaaagaagcatttgagcgtgaaaaa

SEQ ID NO: 579352 - DNA, 33 bp, Homo sapien
ttctacaacaaagaaggatttgagcgtgaaaaa

SEQ ID NO: 579353 - DNA, 33 bp, Homo sapien
ctctcaagggttagtacaggcaccgcctcctct

SEQ ID NO: 579354 - DNA, 33 bp, Homo sapien
ctctcaagggttagtataggcaccgcctcctct

SEQ ID NO: 579355 - DNA, 33 bp, Homo sapien
tgatggagtaggaagccatgcaccacgttctca

SEQ ID NO: 579356 - DNA, 33 bp, Homo sapien
tgatggagtaggaagctatgcaccacgttctca

SEQ ID NO: 579357 - DNA, 33 bp, Homo sapien
ttttgttccagtgagacatgcacaagcattcca

SEQ ID NO: 579358 - DNA, 33 bp, Homo sapien
ttttgttccagtgagatatgcacaagcattcca

SEQ ID NO: 579359 - DNA, 33 bp, Homo sapien
catacagaagtactcaagtgcattttttatgaa

SEQ ID NO: 579360 - DNA, 33 bp, Homo sapien
catacagaagtactcacgtgcattttttatgaa

SEQ ID NO: 579361 - DNA, 33 bp, Homo sapien
gtaataagtggaattagatgcaaacagaatcca

SEQ ID NO: 579362 - DNA, 33 bp, Homo sapien
gtaataagtggaattatatgcaaacagaatcca

SEQ ID NO: 579363 - DNA, 33 bp, Homo sapien
acacgaccttctccagccaagggttttcctact

SEQ ID NO: 579364 - DNA, 33 bp, Homo sapien
acacgaccttctccagtcaagggttttcctact

SEQ ID NO: 579365 - DNA, 33 bp, Homo sapien
tctgcaaagcatctataaaaccaaagtcaagct

SEQ ID NO: 579366 - DNA, 33 bp, Homo sapien
tctgcaaagcatctatgaaaccaaagtcaagct

SEQ ID NO: 579367 - DNA, 33 bp, Homo sapien
cctccccctgcaattaaactgtgaacatcaaga

SEQ ID NO: 579368 - DNA, 33 bp, Homo sapien
cctccccctgcaattacactgtgaacatcaaga

SEQ ID NO: 579369 - DNA, 33 bp, Homo sapien
ttaacccagattcaccacctggccatcactgtg

SEQ ID NO: 579370 - DNA, 33 bp, Homo sapien
ttaacccagattcaccgcctggccatcactgtg

SEQ ID NO: 579371 - DNA, 33 bp, Homo sapien
gttccatttccaaagaagaataatagctccgca

SEQ ID NO: 579372 - DNA, 33 bp, Homo sapien
gttccatttccaaagacgaataatagctccgca

SEQ ID NO: 579373 - DNA, 33 bp, Homo sapien
tctcacaggtcctaacactgaggtgcccatgat

SEQ ID NO: 579374 - DNA, 33 bp, Homo sapien
tctcacaggtcctaacgctgaggtgcccatgat

SEQ ID NO: 579375 - DNA, 33 bp, Homo sapien
attacagaccacgttgcaatgaatattgtgaaa

SEQ ID NO: 579376 - DNA, 33 bp, Homo sapien
attacagaccacgttgtaatgaatattgtgaaa

SEQ ID NO: 579377 - DNA, 33 bp, Homo sapien
attattgaatgaaaccagacattcttacattat

SEQ ID NO: 579378 - DNA, 33 bp, Homo sapien
attattgaatgaaaccggacattcttacattat

SEQ ID NO: 579379 - DNA, 33 bp, Homo sapien
ctgcctgggtctcaccactaaagattctgatag

SEQ ID NO: 579380 - DNA, 33 bp, Homo sapien
ctgcctgggtctcaccgctaaagattctgatag

SEQ ID NO: 579381 - DNA, 33 bp, Homo sapien
ggagagtcagttcacaaccagcaatccctggat

SEQ ID NO: 579382 - DNA, 33 bp, Homo sapien
ggagagtcagttcacagccagcaatccctggat

SEQ ID NO: 579383 - DNA, 33 bp, Homo sapien
tgcgtaactgcaaccacgtgagaaaccccaagt

SEQ ID NO: 579384 - DNA, 33 bp, Homo sapien
tgcgtaactgcaaccatgtgagaaaccccaagt

SEQ ID NO: 579385 - DNA, 33 bp, Homo sapien
ttcctttacactgaatgatgagttggacatgcc

SEQ ID NO: 579386 - DNA, 33 bp, Homo sapien
ttcctttacactgaattatgagttggacatgcc

SEQ ID NO: 579387 - DNA, 33 bp, Homo sapien
cattcacctcgctacccagccaattattcaaaa

SEQ ID NO: 579388 - DNA, 33 bp, Homo sapien
cattcacctcgctacctagccaattattcaaaa

SEQ ID NO: 579389 - DNA, 33 bp, Homo sapien
gggactggtaagaaccaccataaccaaacaatt

SEQ ID NO: 579390 - DNA, 33 bp, Homo sapien
gggactggtaagaacccccataaccaaacaatt

SEQ ID NO: 579391 - DNA, 33 bp, Homo sapien
ggcaccagttcactcaagtgtttgtgtgtgctg

SEQ ID NO: 579392 - DNA, 33 bp, Homo sapien
ggcaccagttcactcatgtgtttgtgtgtgctg

SEQ ID NO: 579393 - DNA, 33 bp, Homo sapien
tgtatataactgctccaatcttcctcctgagct

SEQ ID NO: 579394 - DNA, 33 bp, Homo sapien
tgtatataactgctccgatcttcctcctgagct

SEQ ID NO: 579395 - DNA, 33 bp, Homo sapien
cgggtatctgcagggaagttcattgtcaccctg

SEQ ID NO: 579396 - DNA, 33 bp, Homo sapien
cgggtatctgcagggacgttcattgtcaccctg

SEQ ID NO: 579397 - DNA, 33 bp, Homo sapien
cttacagtatacctggacatttcctgtgtctcc

SEQ ID NO: 579398 - DNA, 33 bp, Homo sapien
cttacagtatacctgggcatttcctgtgtctcc

SEQ ID NO: 579399 - DNA, 33 bp, Homo sapien
actccagcatcctcaccgtacatcaaagagaga

SEQ ID NO: 579400 - DNA, 33 bp, Homo sapien
actccagcatcctcactgtacatcaaagagaga

SEQ ID NO: 579401 - DNA, 33 bp, Homo sapien
tattcaagttgtgtaaccttgaacataacctct

SEQ ID NO: 579402 - DNA, 33 bp, Homo sapien
tattcaagttgtgtaatcttgaacataacctct

SEQ ID NO: 579403 - DNA, 33 bp, Homo sapien
gtccaggcttttctgacgttcagagagatctgg

SEQ ID NO: 579404 - DNA, 33 bp, Homo sapien
gtccaggcttttctgatgttcagagagatctgg

SEQ ID NO: 579405 - DNA, 33 bp, Homo sapien
ttctcactagacacccacacacaaagatatata

SEQ ID NO: 579406 - DNA, 33 bp, Homo sapien
ttctcactagacacccccacacaaagatatata

SEQ ID NO: 579407 - DNA, 33 bp, Homo sapien
atcaaaacgtgaagccactggtcactattctgc

SEQ ID NO: 579408 - DNA, 33 bp, Homo sapien
atcaaaacgtgaagccgctggtcactattctgc

SEQ ID NO: 579409 - DNA, 33 bp, Homo sapien
atgtatgagagattgacgaattgtgaataagat

SEQ ID NO: 579410 - DNA, 33 bp, Homo sapien
atgtatgagagattgatgaattgtgaataagat

SEQ ID NO: 579411 - DNA, 33 bp, Homo sapien
tgtttcgaacccaaacggaaggagatggcaaaa

SEQ ID NO: 579412 - DNA, 33 bp, Homo sapien
tgtttcgaacccaaactgaaggagatggcaaaa

SEQ ID NO: 579413 - DNA, 33 bp, Homo sapien
tattggtccttttgcagaactcagtgtctgcct

SEQ ID NO: 579414 - DNA, 33 bp, Homo sapien
tattggtccttttgcataactcagtgtctgcct

SEQ ID NO: 579415 - DNA, 33 bp, Homo sapien
ctccctttgggacaggaactaagacgcagaggc

SEQ ID NO: 579416 - DNA, 33 bp, Homo sapien
ctccctttgggacaggtactaagacgcagaggc

SEQ ID NO: 579417 - DNA, 33 bp, Homo sapien
agtgggttctctcttacgtccaaagaaatccta

SEQ ID NO: 579418 - DNA, 33 bp, Homo sapien
agtgggttctctcttatgtccaaagaaatccta

SEQ ID NO: 579419 - DNA, 33 bp, Homo sapien
tcctcccatcactctcactcactcagttctggt

SEQ ID NO: 579420 - DNA, 33 bp, Homo sapien
tcctcccatcactctcgctcactcagttctggt

SEQ ID NO: 579421 - DNA, 33 bp, Homo sapien
caataggtcagtgtgacgggaccagaactgagt

SEQ ID NO: 579422 - DNA, 33 bp, Homo sapien
caataggtcagtgtgatgggaccagaactgagt

SEQ ID NO: 579423 - DNA, 33 bp, Homo sapien
atcttcataagcctcacaattagcgcttcaaga

SEQ ID NO: 579424 - DNA, 33 bp, Homo sapien
atcttcataagcctcataattagcgcttcaaga

SEQ ID NO: 579425 - DNA, 33 bp, Homo sapien
cctcaacctgtccccaactgcataacctcagca

SEQ ID NO: 579426 - DNA, 33 bp, Homo sapien
cctcaacctgtccccacctgcataacctcagca

SEQ ID NO: 579427 - DNA, 33 bp, Homo sapien
tacttatagagacttcacctaaaatatggaaac

SEQ ID NO: 579428 - DNA, 33 bp, Homo sapien
tacttatagagacttcccctaaaatatggaaac

SEQ ID NO: 579429 - DNA, 33 bp, Homo sapien
agatcagatgcatttacgaaaggattaaaaatg

SEQ ID NO: 579430 - DNA, 33 bp, Homo sapien
agatcagatgcatttatgaaaggattaaaaatg

SEQ ID NO: 579431 - DNA, 33 bp, Homo sapien
ttatacctccctaacaatacatggctataatta

SEQ ID NO: 579432 - DNA, 33 bp, Homo sapien
ttatacctccctaacagtacatggctataatta

SEQ ID NO: 579433 - DNA, 33 bp, Homo sapien
ttcaccatagttcccaccattttcctgttactt

SEQ ID NO: 579434 - DNA, 33 bp, Homo sapien
ttcaccatagttcccatcattttcctgttactt

SEQ ID NO: 579435 - DNA, 33 bp, Homo sapien
actctctggggcagaaggaaaactgctgctttg

SEQ ID NO: 579436 - DNA, 33 bp, Homo sapien
actctctggggcagaatgaaaactgctgctttg

SEQ ID NO: 579437 - DNA, 33 bp, Homo sapien
tggttgaagaagaccaaaaaagattgcacataa

SEQ ID NO: 579438 - DNA, 33 bp, Homo sapien
tggttgaagaagaccagaaaagattgcacataa

SEQ ID NO: 579439 - DNA, 33 bp, Homo sapien
gagccaaagcggaacacgctctcggcgcatcgg

SEQ ID NO: 579440 - DNA, 33 bp, Homo sapien
gagccaaagcggaacatgctctcggcgcatcgg

SEQ ID NO: 579441 - DNA, 33 bp, Homo sapien
agtctgccacattataaggactcaatcaatggt

SEQ ID NO: 579442 - DNA, 33 bp, Homo sapien
agtctgccacattatagggactcaatcaatggt

SEQ ID NO: 579443 - DNA, 33 bp, Homo sapien
gtctttcttgtacatcaaatacatgggcttaag

SEQ ID NO: 579444 - DNA, 33 bp, Homo sapien
gtctttcttgtacatcgaatacatgggcttaag

SEQ ID NO: 579445 - DNA, 33 bp, Homo sapien
gccacatgcaaacatcagagcttgaatgattag

SEQ ID NO: 579446 - DNA, 33 bp, Homo sapien
gccacatgcaaacatccgagcttgaatgattag

SEQ ID NO: 579447 - DNA, 33 bp, Homo sapien
atcaatggccatgtcaccaaaaacttgaaaatg

SEQ ID NO: 579448 - DNA, 33 bp, Homo sapien
atcaatggccatgtcatcaaaaacttgaaaatg

SEQ ID NO: 579449 - DNA, 33 bp, Homo sapien
ggaacagagaaaaccccgcttgctgagtgcaga

SEQ ID NO: 579450 - DNA, 33 bp, Homo sapien
ggaacagagaaaaccctgcttgctgagtgcaga

SEQ ID NO: 579451 - DNA, 33 bp, Homo sapien
gtataacaaactgacaaactggtatataggtaa

SEQ ID NO: 579452 - DNA, 33 bp, Homo sapien
gtataacaaactgacacactggtatataggtaa

SEQ ID NO: 579453 - DNA, 33 bp, Homo sapien
ctcagtctgcaaaaaccctgatgcgcaggtgac

SEQ ID NO: 579454 - DNA, 33 bp, Homo sapien
ctcagtctgcaaaaacgctgatgcgcaggtgac

SEQ ID NO: 579455 - DNA, 33 bp, Homo sapien
gtgggaattataggcagatgtacaatttggtgc

SEQ ID NO: 579456 - DNA, 33 bp, Homo sapien
gtgggaattataggcatatgtacaatttggtgc

SEQ ID NO: 579457 - DNA, 33 bp, Homo sapien
ccaagacctcttgtcaagtgcacacatatacaa

SEQ ID NO: 579458 - DNA, 33 bp, Homo sapien
ccaagacctcttgtcaggtgcacacatatacaa

SEQ ID NO: 579459 - DNA, 33 bp, Homo sapien
tgagcatttgaagtaccaatttttctgaaagtg

SEQ ID NO: 579460 - DNA, 33 bp, Homo sapien
tgagcatttgaagtactaatttttctgaaagtg

SEQ ID NO: 579461 - DNA, 33 bp, Homo sapien
acaagacaggctcccccgcactcaaacaattgt

SEQ ID NO: 579462 - DNA, 33 bp, Homo sapien
acaagacaggctcccctgcactcaaacaattgt

SEQ ID NO: 579463 - DNA, 33 bp, Homo sapien
agccctcattcaggcaagtcggggatggggacc

SEQ ID NO: 579464 - DNA, 33 bp, Homo sapien
agccctcattcaggcacgtcggggatggggacc

SEQ ID NO: 579465 - DNA, 33 bp, Homo sapien
cccaatcactacggcactgaaacccctgacatt

SEQ ID NO: 579466 - DNA, 33 bp, Homo sapien
cccaatcactacggcattgaaacccctgacatt

SEQ ID NO: 579467 - DNA, 33 bp, Homo sapien
tttgcaaagtttctgccgcaaataatacagcta

SEQ ID NO: 579468 - DNA, 33 bp, Homo sapien
tttgcaaagtttctgctgcaaataatacagcta

SEQ ID NO: 579469 - DNA, 33 bp, Homo sapien
atgtttcaataaagaacgtaagtgtgcttttct

SEQ ID NO: 579470 - DNA, 33 bp, Homo sapien
atgtttcaataaagaatgtaagtgtgcttttct

SEQ ID NO: 579471 - DNA, 33 bp, Homo sapien
atttgcaaaaataataaagcattcaactaccct

SEQ ID NO: 579472 - DNA, 33 bp, Homo sapien
atttgcaaaaataatagagcattcaactaccct

SEQ ID NO: 579473 - DNA, 33 bp, Homo sapien
gttccacaaccttgacactactgatacctggca

SEQ ID NO: 579474 - DNA, 33 bp, Homo sapien
gttccacaaccttgacgctactgatacctggca

SEQ ID NO: 579475 - DNA, 33 bp, Homo sapien
acaaaactcttcatccgaacaatccctttaccc

SEQ ID NO: 579476 - DNA, 33 bp, Homo sapien
acaaaactcttcatcctaacaatccctttaccc

SEQ ID NO: 579477 - DNA, 33 bp, Homo sapien
tgaaaacatcaaagacaatcaaagcaccagctc

SEQ ID NO: 579478 - DNA, 33 bp, Homo sapien
tgaaaacatcaaagactatcaaagcaccagctc

SEQ ID NO: 579479 - DNA, 33 bp, Homo sapien
attgagaggggaatctaaagggaattctgttgt

SEQ ID NO: 579480 - DNA, 33 bp, Homo sapien
attgagaggggaatctcaagggaattctgttgt

SEQ ID NO: 579481 - DNA, 33 bp, Homo sapien
tgggttttgccttgagaaacagggagctgctaa

SEQ ID NO: 579482 - DNA, 33 bp, Homo sapien
tgggttttgccttgaggaacagggagctgctaa

SEQ ID NO: 579483 - DNA, 33 bp, Homo sapien
actatttgaaataataccacatagacagataga

SEQ ID NO: 579484 - DNA, 33 bp, Homo sapien
actatttgaaataatatcacatagacagataga

SEQ ID NO: 579485 - DNA, 33 bp, Homo sapien
gcgcctccagagaccactgggtgtgagtcctca

SEQ ID NO: 579486 - DNA, 33 bp, Homo sapien
gcgcctccagagaccattgggtgtgagtcctca

SEQ ID NO: 579487 - DNA, 33 bp, Homo sapien
ccacacggtctgtaacagaaacagaatttgaat

SEQ ID NO: 579488 - DNA, 33 bp, Homo sapien
ccacacggtctgtaacggaaacagaatttgaat

SEQ ID NO: 579489 - DNA, 33 bp, Homo sapien
agatgaacatagaacaaaagtctcccactgagg

SEQ ID NO: 579490 - DNA, 33 bp, Homo sapien
agatgaacatagaacacaagtctcccactgagg

SEQ ID NO: 579491 - DNA, 33 bp, Homo sapien
gcaaagatagcaaagaactggtgtatttggtgg

SEQ ID NO: 579492 - DNA, 33 bp, Homo sapien
gcaaagatagcaaagatctggtgtatttggtgg

SEQ ID NO: 579493 - DNA, 33 bp, Homo sapien
ataagctgaagctacacataccaacatggatgg

SEQ ID NO: 579494 - DNA, 33 bp, Homo sapien
ataagctgaagctacatataccaacatggatgg

SEQ ID NO: 579495 - DNA, 33 bp, Homo sapien
tgttgatgagtgaatcaataatgttataaggga

SEQ ID NO: 579496 - DNA, 33 bp, Homo sapien
tgttgatgagtgaatcgataatgttataaggga

SEQ ID NO: 579497 - DNA, 33 bp, Homo sapien
ctaagatgtaggcacactgaaacagttgccagc

SEQ ID NO: 579498 - DNA, 33 bp, Homo sapien
ctaagatgtaggcacagtgaaacagttgccagc

SEQ ID NO: 579499 - DNA, 33 bp, Homo sapien
ggatgagtctgaaggcacatgattgggataaag

SEQ ID NO: 579500 - DNA, 33 bp, Homo sapien
ggatgagtctgaaggcgcatgattgggataaag

SEQ ID NO: 579501 - DNA, 33 bp, Homo sapien
gttctcctttgctcaaataaattttctaaaaga

SEQ ID NO: 579502 - DNA, 33 bp, Homo sapien
gttctcctttgctcaagtaaattttctaaaaga

SEQ ID NO: 579503 - DNA, 33 bp, Homo sapien
ggaggtggggagtcaccgcaacagttaagacca

SEQ ID NO: 579504 - DNA, 33 bp, Homo sapien
ggaggtggggagtcactgcaacagttaagacca

SEQ ID NO: 579505 - DNA, 33 bp, Homo sapien
acctccagccaggagacgattgcctcactggtt

SEQ ID NO: 579506 - DNA, 33 bp, Homo sapien
acctccagccaggagatgattgcctcactggtt

SEQ ID NO: 579507 - DNA, 33 bp, Homo sapien
ttgtaaatttgaagaactatactcagaggttag

SEQ ID NO: 579508 - DNA, 33 bp, Homo sapien
ttgtaaatttgaagaagtatactcagaggttag

SEQ ID NO: 579509 - DNA, 33 bp, Homo sapien
gccaaaattcactaaaacctaaacagtgcagtc

SEQ ID NO: 579510 - DNA, 33 bp, Homo sapien
gccaaaattcactaaagcctaaacagtgcagtc

SEQ ID NO: 579511 - DNA, 33 bp, Homo sapien
ttaataggttgccaaaggaatcgtacaataagc

SEQ ID NO: 579512 - DNA, 33 bp, Homo sapien
ttaataggttgccaaatgaatcgtacaataagc

SEQ ID NO: 579513 - DNA, 33 bp, Homo sapien
aggaaagcaagtgtaacagtctgggatccaaaa

SEQ ID NO: 579514 - DNA, 33 bp, Homo sapien
aggaaagcaagtgtaagagtctgggatccaaaa

SEQ ID NO: 579515 - DNA, 33 bp, Homo sapien
ctgtgatgtctatcatcaaaaagacagatggcc

SEQ ID NO: 579516 - DNA, 33 bp, Homo sapien
ctgtgatgtctatcatgaaaaagacagatggcc

SEQ ID NO: 579517 - DNA, 33 bp, Homo sapien
aaaggtcctgcatgacagagtgtatagtctaag

SEQ ID NO: 579518 - DNA, 33 bp, Homo sapien
aaaggtcctgcatgacggagtgtatagtctaag

SEQ ID NO: 579519 - DNA, 33 bp, Homo sapien
tggggatgcagattgacgggtatctcttacatc

SEQ ID NO: 579520 - DNA, 33 bp, Homo sapien
tggggatgcagattgatgggtatctcttacatc

SEQ ID NO: 579521 - DNA, 33 bp, Homo sapien
aacggtggcatttgcaactggttatctctttca

SEQ ID NO: 579522 - DNA, 33 bp, Homo sapien
aacggtggcatttgcagctggttatctctttca

SEQ ID NO: 579523 - DNA, 33 bp, Homo sapien
aaaacccagggatatcaagattttctgagacta

SEQ ID NO: 579524 - DNA, 33 bp, Homo sapien
aaaacccagggatatcgagattttctgagacta

SEQ ID NO: 579525 - DNA, 33 bp, Homo sapien
agccatttcacttctacgagcctgcacccctaa

SEQ ID NO: 579526 - DNA, 33 bp, Homo sapien
agccatttcacttctatgagcctgcacccctaa

SEQ ID NO: 579527 - DNA, 33 bp, Homo sapien
gttatattgactcatgcagtttattctccaaac

SEQ ID NO: 579528 - DNA, 33 bp, Homo sapien
gttatattgactcatgtagtttattctccaaac

SEQ ID NO: 579529 - DNA, 33 bp, Homo sapien
gaaggagcagcacactcaagggcatgaaatagg

SEQ ID NO: 579530 - DNA, 33 bp, Homo sapien
gaaggagcagcacacttaagggcatgaaatagg

SEQ ID NO: 579531 - DNA, 33 bp, Homo sapien
cagtaatgctggtctcagagaaggaaagtgaat

SEQ ID NO: 579532 - DNA, 33 bp, Homo sapien
cagtaatgctggtctcggagaaggaaagtgaat

SEQ ID NO: 579533 - DNA, 33 bp, Homo sapien
attctcaaacagattcaattggagggaggagct

SEQ ID NO: 579534 - DNA, 33 bp, Homo sapien
attctcaaacagattcgattggagggaggagct

SEQ ID NO: 579535 - DNA, 33 bp, Homo sapien
ggaaccacaccgtctacatggcagtggacccag

SEQ ID NO: 579536 - DNA, 33 bp, Homo sapien
ggaaccacaccgtctagatggcagtggacccag

SEQ ID NO: 579537 - DNA, 33 bp, Homo sapien
tctgcactatcagcagcctacatttacccggaa

SEQ ID NO: 579538 - DNA, 33 bp, Homo sapien
tctgcactatcagcaggctacatttacccggaa

SEQ ID NO: 579539 - DNA, 33 bp, Homo sapien
agggtttttgaagggcaacgtgcagaagctgtt

SEQ ID NO: 579540 - DNA, 33 bp, Homo sapien
agggtttttgaagggctacgtgcagaagctgtt

SEQ ID NO: 579541 - DNA, 33 bp, Homo sapien
gacatttcacatacacaaaagtgcataaaacat

SEQ ID NO: 579542 - DNA, 33 bp, Homo sapien
gacatttcacatacacgaaagtgcataaaacat

SEQ ID NO: 579543 - DNA, 33 bp, Homo sapien
aatacactgagtacaacaagccagatgcagaag

SEQ ID NO: 579544 - DNA, 33 bp, Homo sapien
aatacactgagtacaataagccagatgcagaag

SEQ ID NO: 579545 - DNA, 33 bp, Homo sapien
aaacaactgataagtacaaacttcagtggaagt

SEQ ID NO: 579546 - DNA, 33 bp, Homo sapien
aaacaactgataagtataaacttcagtggaagt

SEQ ID NO: 579547 - DNA, 33 bp, Homo sapien
ggaaaataggctttccaatgtcatggttagttt

SEQ ID NO: 579548 - DNA, 33 bp, Homo sapien
ggaaaataggctttccgatgtcatggttagttt

SEQ ID NO: 579549 - DNA, 33 bp, Homo sapien
gtcaaatccacacacaatgaaaactctttctat

SEQ ID NO: 579550 - DNA, 33 bp, Homo sapien
gtcaaatccacacacattgaaaactctttctat

SEQ ID NO: 579551 - DNA, 33 bp, Homo sapien
ctcttttcatagcagcaatcataaacctcagtg

SEQ ID NO: 579552 - DNA, 33 bp, Homo sapien
ctcttttcatagcagccatcataaacctcagtg

SEQ ID NO: 579553 - DNA, 33 bp, Homo sapien
gaaaatatttgtgagccatctatctgatgagga

SEQ ID NO: 579554 - DNA, 33 bp, Homo sapien
gaaaatatttgtgagctatctatctgatgagga

SEQ ID NO: 579555 - DNA, 33 bp, Homo sapien
ctctcaggctctgaacgccaaccaagctgggat

SEQ ID NO: 579556 - DNA, 33 bp, Homo sapien
ctctcaggctctgaactccaaccaagctgggat

SEQ ID NO: 579557 - DNA, 33 bp, Homo sapien
ctttgaagtacaaggacgaagggtacaaagatc

SEQ ID NO: 579558 - DNA, 33 bp, Homo sapien
ctttgaagtacaaggatgaagggtacaaagatc

SEQ ID NO: 579559 - DNA, 33 bp, Homo sapien
ctgtaaggtcgacaagaaacctggaaatttagg

SEQ ID NO: 579560 - DNA, 33 bp, Homo sapien
ctgtaaggtcgacaagcaacctggaaatttagg

SEQ ID NO: 579561 - DNA, 33 bp, Homo sapien
agccctcagaagtcaccggccctgaggcttcag

SEQ ID NO: 579562 - DNA, 33 bp, Homo sapien
agccctcagaagtcactggccctgaggcttcag

SEQ ID NO: 579563 - DNA, 33 bp, Homo sapien
ggtccactttcagggaaggaatcacagagtggg

SEQ ID NO: 579564 - DNA, 33 bp, Homo sapien
ggtccactttcagggatggaatcacagagtggg

SEQ ID NO: 579565 - DNA, 33 bp, Homo sapien
aaagcaggggtggagacgaaggcatgcagagag

SEQ ID NO: 579566 - DNA, 33 bp, Homo sapien
aaagcaggggtggagatgaaggcatgcagagag

SEQ ID NO: 579567 - DNA, 33 bp, Homo sapien
caggtaggcagctgaacaatcagtgtttctccc

SEQ ID NO: 579568 - DNA, 33 bp, Homo sapien
caggtaggcagctgaagaatcagtgtttctccc

SEQ ID NO: 579569 - DNA, 33 bp, Homo sapien
gtgtgtcttattccaaccctgctgcagtgacca

SEQ ID NO: 579570 - DNA, 33 bp, Homo sapien
gtgtgtcttattccaatcctgctgcagtgacca

SEQ ID NO: 579571 - DNA, 33 bp, Homo sapien
tcacaggataggcctgaactaatcattctccat

SEQ ID NO: 579572 - DNA, 33 bp, Homo sapien
tcacaggataggcctgcactaatcattctccat

SEQ ID NO: 579573 - DNA, 33 bp, Homo sapien
aacaatgctgttagaacgcaccgggcttatgct

SEQ ID NO: 579574 - DNA, 33 bp, Homo sapien
aacaatgctgttagaatgcaccgggcttatgct

SEQ ID NO: 579575 - DNA, 33 bp, Homo sapien
taggctgagcataaaactttatcagtatataga

SEQ ID NO: 579576 - DNA, 33 bp, Homo sapien
taggctgagcataaaagtttatcagtatataga

SEQ ID NO: 579577 - DNA, 33 bp, Homo sapien
tacattgttagttgtaaatggaattttggagtt

SEQ ID NO: 579578 - DNA, 33 bp, Homo sapien
tacattgttagttgtacatggaattttggagtt

SEQ ID NO: 579579 - DNA, 33 bp, Homo sapien
ggtcccagccagctatcaaatcctctttttggg

SEQ ID NO: 579580 - DNA, 33 bp, Homo sapien
ggtcccagccagctatgaaatcctctttttggg

SEQ ID NO: 579581 - DNA, 33 bp, Homo sapien
tctcagatttaatcaactaagaatgctgcaaat

SEQ ID NO: 579582 - DNA, 33 bp, Homo sapien
tctcagatttaatcaagtaagaatgctgcaaat

SEQ ID NO: 579583 - DNA, 33 bp, Homo sapien
tcgatcacatcaggaacattcaaacaacacctg

SEQ ID NO: 579584 - DNA, 33 bp, Homo sapien
tcgatcacatcaggaatattcaaacaacacctg

SEQ ID NO: 579585 - DNA, 33 bp, Homo sapien
caggtgtattctaaaaatgaggaggaagcagca

SEQ ID NO: 579586 - DNA, 33 bp, Homo sapien
caggtgtattctaaaagtgaggaggaagcagca

SEQ ID NO: 579587 - DNA, 33 bp, Homo sapien
cccatagctataggaactgatggctaaggtcta

SEQ ID NO: 579588 - DNA, 33 bp, Homo sapien
cccatagctataggaattgatggctaaggtcta

SEQ ID NO: 579589 - DNA, 33 bp, Homo sapien
aataagaatgtttccacgttatcagttgtttaa

SEQ ID NO: 579590 - DNA, 33 bp, Homo sapien
aataagaatgtttccatgttatcagttgtttaa

SEQ ID NO: 579591 - DNA, 33 bp, Homo sapien
tgtaaacagattttccagcaaagaaaaaaaata

SEQ ID NO: 579592 - DNA, 33 bp, Homo sapien
tgtaaacagattttccggcaaagaaaaaaaata

SEQ ID NO: 579593 - DNA, 33 bp, Homo sapien
aggggtgggtcggatgaaatgggcaccaaggag

SEQ ID NO: 579594 - DNA, 33 bp, Homo sapien
aggggtgggtcggatggaatgggcaccaaggag

SEQ ID NO: 579595 - DNA, 33 bp, Homo sapien
ataggtcacagtgtgaagttttgcaggttagag

SEQ ID NO: 579596 - DNA, 33 bp, Homo sapien
ataggtcacagtgtgaggttttgcaggttagag

SEQ ID NO: 579597 - DNA, 33 bp, Homo sapien
aaaagcaagtgtcaaaagctgcatactatatgc

SEQ ID NO: 579598 - DNA, 33 bp, Homo sapien
aaaagcaagtgtcaaaggctgcatactatatgc

SEQ ID NO: 579599 - DNA, 33 bp, Homo sapien
agattgtctgcaaatgaaagcaaagatgggccc

SEQ ID NO: 579600 - DNA, 33 bp, Homo sapien
agattgtctgcaaatggaagcaaagatgggccc

SEQ ID NO: 579601 - DNA, 33 bp, Homo sapien
cgtaatcatcgaagaacgtcaaggaggaaggct

SEQ ID NO: 579602 - DNA, 33 bp, Homo sapien
cgtaatcatcgaagaatgtcaaggaggaaggct

SEQ ID NO: 579603 - DNA, 33 bp, Homo sapien
atttctccaaagaaagaacagtgcagctattac

SEQ ID NO: 579604 - DNA, 33 bp, Homo sapien
atttctccaaagaaagcacagtgcagctattac

SEQ ID NO: 579605 - DNA, 33 bp, Homo sapien
tctatacactcacaacaaacaatctgaaaggaa

SEQ ID NO: 579606 - DNA, 33 bp, Homo sapien
tctatacactcacaacgaacaatctgaaaggaa

SEQ ID NO: 579607 - DNA, 33 bp, Homo sapien
tgtgacacaacctacacgaggtatctagagtgg

SEQ ID NO: 579608 - DNA, 33 bp, Homo sapien
tgtgacacaacctacatgaggtatctagagtgg

SEQ ID NO: 579609 - DNA, 33 bp, Homo sapien
attgctctgcacatggcatgcaattatcttttc

SEQ ID NO: 579610 - DNA, 33 bp, Homo sapien
attgctctgcacatgggatgcaattatcttttc

SEQ ID NO: 579611 - DNA, 33 bp, Homo sapien
atggggattttgcctgaactattttgtatcttg

SEQ ID NO: 579612 - DNA, 33 bp, Homo sapien
atggggattttgcctgcactattttgtatcttg

SEQ ID NO: 579613 - DNA, 33 bp, Homo sapien
tcgcagggcttggaaagctgtaaaaggagagaa

SEQ ID NO: 579614 - DNA, 33 bp, Homo sapien
tcgcagggcttggaaatctgtaaaaggagagaa

SEQ ID NO: 579615 - DNA, 33 bp, Homo sapien
ccaagccctgcgatgaaccggatctctaaagag

SEQ ID NO: 579616 - DNA, 33 bp, Homo sapien
ccaagccctgcgatgacccggatctctaaagag

SEQ ID NO: 579617 - DNA, 33 bp, Homo sapien
agagattggccttgaacgggagcgtggatagta

SEQ ID NO: 579618 - DNA, 33 bp, Homo sapien
agagattggccttgaatgggagcgtggatagta

SEQ ID NO: 579619 - DNA, 33 bp, Homo sapien
agggagtagggctagaaatgaaattgtatgagt

SEQ ID NO: 579620 - DNA, 33 bp, Homo sapien
agggagtagggctagacatgaaattgtatgagt

SEQ ID NO: 579621 - DNA, 33 bp, Homo sapien
gtctgtgtctgctatcgaacttcaaattagttc

SEQ ID NO: 579622 - DNA, 33 bp, Homo sapien
gtctgtgtctgctatctaacttcaaattagttc

SEQ ID NO: 579623 - DNA, 33 bp, Homo sapien
ttccatgcagggtacggacattgctgatgttgt

SEQ ID NO: 579624 - DNA, 33 bp, Homo sapien
ttccatgcagggtacgtacattgctgatgttgt

SEQ ID NO: 579625 - DNA, 33 bp, Homo sapien
tggtgtggctacaacaagtgtatcagtctgttc

SEQ ID NO: 579626 - DNA, 33 bp, Homo sapien
tggtgtggctacaacaggtgtatcagtctgttc

SEQ ID NO: 579627 - DNA, 33 bp, Homo sapien
ctgtgtaccattgccacatcatattctgggtgt

SEQ ID NO: 579628 - DNA, 33 bp, Homo sapien
ctgtgtaccattgccatatcatattctgggtgt

SEQ ID NO: 579629 - DNA, 33 bp, Homo sapien
ccaagctgaaaatgcacatttaagtggccctgc

SEQ ID NO: 579630 - DNA, 33 bp, Homo sapien
ccaagctgaaaatgcatatttaagtggccctgc

SEQ ID NO: 579631 - DNA, 33 bp, Homo sapien
gcgggcaggggcttgcagaatcgctaccttctt

SEQ ID NO: 579632 - DNA, 33 bp, Homo sapien
gcgggcaggggcttgcggaatcgctaccttctt

SEQ ID NO: 579633 - DNA, 33 bp, Homo sapien
aacaactcaagcagaacacggtttgccagccag

SEQ ID NO: 579634 - DNA, 33 bp, Homo sapien
aacaactcaagcagaatacggtttgccagccag

SEQ ID NO: 579635 - DNA, 33 bp, Homo sapien
tttctgaacaggcaacgggcttcttagtcttga

SEQ ID NO: 579636 - DNA, 33 bp, Homo sapien
tttctgaacaggcaactggcttcttagtcttga

SEQ ID NO: 579637 - DNA, 33 bp, Homo sapien
acaaaatggcataaaaaactgagatgtgtgttc

SEQ ID NO: 579638 - DNA, 33 bp, Homo sapien
acaaaatggcataaaagactgagatgtgtgttc

SEQ ID NO: 579639 - DNA, 33 bp, Homo sapien
tatgatgtaaatgtccacatgaaaagatgtaaa

SEQ ID NO: 579640 - DNA, 33 bp, Homo sapien
tatgatgtaaatgtccgcatgaaaagatgtaaa

SEQ ID NO: 579641 - DNA, 33 bp, Homo sapien
gtgtgttttttcatccgcctgtcaccaatcata

SEQ ID NO: 579642 - DNA, 33 bp, Homo sapien
gtgtgttttttcatcctcctgtcaccaatcata

SEQ ID NO: 579643 - DNA, 33 bp, Homo sapien
aagaaacacaactgaacgtcattaaggagatca

SEQ ID NO: 579644 - DNA, 33 bp, Homo sapien
aagaaacacaactgaatgtcattaaggagatca

SEQ ID NO: 579645 - DNA, 33 bp, Homo sapien
cacctctgtttactatcagcattagtgaggctg

SEQ ID NO: 579646 - DNA, 33 bp, Homo sapien
cacctctgtttactatgagcattagtgaggctg

SEQ ID NO: 579647 - DNA, 33 bp, Homo sapien
tcttactgcccaagaacgtgcttgatgctgtcc

SEQ ID NO: 579648 - DNA, 33 bp, Homo sapien
tcttactgcccaagaatgtgcttgatgctgtcc

SEQ ID NO: 579649 - DNA, 33 bp, Homo sapien
agctcattctacctaaagatagatccctggagt

SEQ ID NO: 579650 - DNA, 33 bp, Homo sapien
agctcattctacctaaggatagatccctggagt

SEQ ID NO: 579651 - DNA, 33 bp, Homo sapien
cttatgagaagaaaacaagggtccatgtccagg

SEQ ID NO: 579652 - DNA, 33 bp, Homo sapien
cttatgagaagaaaacgagggtccatgtccagg

SEQ ID NO: 579653 - DNA, 33 bp, Homo sapien
gcagccacccgtagccagcgctctgttagcagt

SEQ ID NO: 579654 - DNA, 33 bp, Homo sapien
gcagccacccgtagccggcgctctgttagcagt

SEQ ID NO: 579655 - DNA, 33 bp, Homo sapien
gaaagttcccaagaccaactttcacttcatgca

SEQ ID NO: 579656 - DNA, 33 bp, Homo sapien
gaaagttcccaagaccgactttcacttcatgca

SEQ ID NO: 579657 - DNA, 33 bp, Homo sapien
cctcccgtgcacatcacgagtctcctccacttt

SEQ ID NO: 579658 - DNA, 33 bp, Homo sapien
cctcccgtgcacatcatgagtctcctccacttt

SEQ ID NO: 579659 - DNA, 33 bp, Homo sapien
tctcatgtttggtctgaaaaacaggatgaacat

SEQ ID NO: 579660 - DNA, 33 bp, Homo sapien
tctcatgtttggtctggaaaacaggatgaacat

SEQ ID NO: 579661 - DNA, 33 bp, Homo sapien
acagcataaggacggcaattacaggatatgcat

SEQ ID NO: 579662 - DNA, 33 bp, Homo sapien
acagcataaggacggcgattacaggatatgcat

SEQ ID NO: 579663 - DNA, 33 bp, Homo sapien
gctgtagtgtgccaagcagctccctccagtctc

SEQ ID NO: 579664 - DNA, 33 bp, Homo sapien
gctgtagtgtgccaagtagctccctccagtctc

SEQ ID NO: 579665 - DNA, 33 bp, Homo sapien
caccaaatgaactaacacagctcttattcttgc

SEQ ID NO: 579666 - DNA, 33 bp, Homo sapien
caccaaatgaactaacgcagctcttattcttgc

SEQ ID NO: 579667 - DNA, 33 bp, Homo sapien
gagtcattttaaattggattagtgagggcaact

SEQ ID NO: 579668 - DNA, 33 bp, Homo sapien
gagtcattttaaattgtattagtgagggcaact

SEQ ID NO: 579669 - DNA, 33 bp, Homo sapien
aagacttggtcagatcaccccagttctggttgc

SEQ ID NO: 579670 - DNA, 33 bp, Homo sapien
aagacttggtcagatcgccccagttctggttgc

SEQ ID NO: 579671 - DNA, 33 bp, Homo sapien
tttaaaaagcaaatgcacaaagcataataaaag

SEQ ID NO: 579672 - DNA, 33 bp, Homo sapien
tttaaaaagcaaatgcgcaaagcataataaaag

SEQ ID NO: 579673 - DNA, 33 bp, Homo sapien
ggcaattgttaccaaaccagaacactcccactg

SEQ ID NO: 579674 - DNA, 33 bp, Homo sapien
ggcaattgttaccaaatcagaacactcccactg

SEQ ID NO: 579675 - DNA, 33 bp, Homo sapien
ctgtctacggatggaaagaatcaacccaaatta

SEQ ID NO: 579676 - DNA, 33 bp, Homo sapien
ctgtctacggatggaaggaatcaacccaaatta

SEQ ID NO: 579677 - DNA, 33 bp, Homo sapien
atatcctcagctaggacgataccctcaggccct

SEQ ID NO: 579678 - DNA, 33 bp, Homo sapien
atatcctcagctaggatgataccctcaggccct

SEQ ID NO: 579679 - DNA, 33 bp, Homo sapien
aactacaagggcagccaatataactgggtcttt

SEQ ID NO: 579680 - DNA, 33 bp, Homo sapien
aactacaagggcagccgatataactgggtcttt

SEQ ID NO: 579681 - DNA, 33 bp, Homo sapien
tccttgcactcaggccccagatgcttttgagag

SEQ ID NO: 579682 - DNA, 33 bp, Homo sapien
tccttgcactcaggcctcagatgcttttgagag

SEQ ID NO: 579683 - DNA, 33 bp, Homo sapien
tatgctcagtaacaaacttgtctggcaccaaga

SEQ ID NO: 579684 - DNA, 33 bp, Homo sapien
tatgctcagtaacaaagttgtctggcaccaaga

SEQ ID NO: 579685 - DNA, 33 bp, Homo sapien
gtatcatatgcagcaacattaccatagttagaa

SEQ ID NO: 579686 - DNA, 33 bp, Homo sapien
gtatcatatgcagcaagattaccatagttagaa

SEQ ID NO: 579687 - DNA, 33 bp, Homo sapien
agagttattgttgtgaaggtttcagcagagcga

SEQ ID NO: 579688 - DNA, 33 bp, Homo sapien
agagttattgttgtgatggtttcagcagagcga

SEQ ID NO: 579689 - DNA, 33 bp, Homo sapien
ctgtggtactttgctacggctgcccgagaagac

SEQ ID NO: 579690 - DNA, 33 bp, Homo sapien
ctgtggtactttgctatggctgcccgagaagac

SEQ ID NO: 579691 - DNA, 33 bp, Homo sapien
aatgttaaataaagatcaggttctaatttgcta

SEQ ID NO: 579692 - DNA, 33 bp, Homo sapien
aatgttaaataaagatgaggttctaatttgcta

SEQ ID NO: 579693 - DNA, 33 bp, Homo sapien
aaaaaaagttatagccccctatgaccaagaata

SEQ ID NO: 579694 - DNA, 33 bp, Homo sapien
aaaaaaagttatagcctcctatgaccaagaata

SEQ ID NO: 579695 - DNA, 33 bp, Homo sapien
taaaacattgcacaaaattatgttacgatatgt

SEQ ID NO: 579696 - DNA, 33 bp, Homo sapien
taaaacattgcacaaagttatgttacgatatgt

SEQ ID NO: 579697 - DNA, 33 bp, Homo sapien
taaaaagtgcaacataaaagttacggactaaac

SEQ ID NO: 579698 - DNA, 33 bp, Homo sapien
taaaaagtgcaacatagaagttacggactaaac

SEQ ID NO: 579699 - DNA, 33 bp, Homo sapien
tttgaggactttctgacagtttgagcacaggaa

SEQ ID NO: 579700 - DNA, 33 bp, Homo sapien
tttgaggactttctgatagtttgagcacaggaa

SEQ ID NO: 579701 - DNA, 33 bp, Homo sapien
gagtgctacacaatagcccccatgcaaactccg

SEQ ID NO: 579702 - DNA, 33 bp, Homo sapien
gagtgctacacaatagtccccatgcaaactccg

SEQ ID NO: 579703 - DNA, 33 bp, Homo sapien
ctgaatggtcttgatacaaaaggaaaatgataa

SEQ ID NO: 579704 - DNA, 33 bp, Homo sapien
ctgaatggtcttgatataaaaggaaaatgataa

SEQ ID NO: 579705 - DNA, 33 bp, Homo sapien
caaataacttgcaccaataagaagaaagattgc

SEQ ID NO: 579706 - DNA, 33 bp, Homo sapien
caaataacttgcaccagtaagaagaaagattgc

SEQ ID NO: 579707 - DNA, 33 bp, Homo sapien
atgtagagtgacctcaagactatcatcccagac

SEQ ID NO: 579708 - DNA, 33 bp, Homo sapien
atgtagagtgacctcaggactatcatcccagac

SEQ ID NO: 579709 - DNA, 33 bp, Homo sapien
tctgtacattttgtgccatgtctcttatgatat

SEQ ID NO: 579710 - DNA, 33 bp, Homo sapien
tctgtacattttgtgcgatgtctcttatgatat

SEQ ID NO: 579711 - DNA, 33 bp, Homo sapien
atatacactgttagcaaacatgtagaaatcttt

SEQ ID NO: 579712 - DNA, 33 bp, Homo sapien
atatacactgttagcatacatgtagaaatcttt

SEQ ID NO: 579713 - DNA, 33 bp, Homo sapien
tgatccattggaagcaactatgtggagaagaag

SEQ ID NO: 579714 - DNA, 33 bp, Homo sapien
tgatccattggaagcacctatgtggagaagaag

SEQ ID NO: 579715 - DNA, 33 bp, Homo sapien
gcgtttaaatagttccactccagacctacagag

SEQ ID NO: 579716 - DNA, 33 bp, Homo sapien
gcgtttaaatagttccgctccagacctacagag

SEQ ID NO: 579717 - DNA, 33 bp, Homo sapien
ttctggaagagcgtgaggtaaatagtgcttgag

SEQ ID NO: 579718 - DNA, 33 bp, Homo sapien
ttctggaagagcgtgatgtaaatagtgcttgag

SEQ ID NO: 579719 - DNA, 33 bp, Homo sapien
ggaggcatttagaatccgagtgatccagggtca

SEQ ID NO: 579720 - DNA, 33 bp, Homo sapien
ggaggcatttagaatctgagtgatccagggtca

SEQ ID NO: 579721 - DNA, 33 bp, Homo sapien
acaaaagtttgccaaccgtgattcagaaagcag

SEQ ID NO: 579722 - DNA, 33 bp, Homo sapien
acaaaagtttgccaactgtgattcagaaagcag

SEQ ID NO: 579723 - DNA, 33 bp, Homo sapien
ccaatacacttggtcaagtatttctaaaacact

SEQ ID NO: 579724 - DNA, 33 bp, Homo sapien
ccaatacacttggtcaggtatttctaaaacact

SEQ ID NO: 579725 - DNA, 33 bp, Homo sapien
agtggtcatgtttttacgtgtttgactctacat

SEQ ID NO: 579726 - DNA, 33 bp, Homo sapien
agtggtcatgtttttatgtgtttgactctacat

SEQ ID NO: 579727 - DNA, 33 bp, Homo sapien
ggaagtttaaaggctaggtgttcccaagaggac

SEQ ID NO: 579728 - DNA, 33 bp, Homo sapien
ggaagtttaaaggctatgtgttcccaagaggac

SEQ ID NO: 579729 - DNA, 33 bp, Homo sapien
ctcatttgtggctgcaagatgctagacaagcac

SEQ ID NO: 579730 - DNA, 33 bp, Homo sapien
ctcatttgtggctgcaggatgctagacaagcac

SEQ ID NO: 579731 - DNA, 33 bp, Homo sapien
ccaagagaaggtggaaactcaccaaagatgccc

SEQ ID NO: 579732 - DNA, 33 bp, Homo sapien
ccaagagaaggtggaacctcaccaaagatgccc

SEQ ID NO: 579733 - DNA, 33 bp, Homo sapien
atacatacatattgaacgatttctaggcgtcag

SEQ ID NO: 579734 - DNA, 33 bp, Homo sapien
atacatacatattgaatgatttctaggcgtcag

SEQ ID NO: 579735 - DNA, 33 bp, Homo sapien
ggccatccttggcttcacagacaaaagtacccc

SEQ ID NO: 579736 - DNA, 33 bp, Homo sapien
ggccatccttggcttcgcagacaaaagtacccc

SEQ ID NO: 579737 - DNA, 33 bp, Homo sapien
ccagcgtaattacaaaaatgaaagctcagtgag

SEQ ID NO: 579738 - DNA, 33 bp, Homo sapien
ccagcgtaattacaaagatgaaagctcagtgag

SEQ ID NO: 579739 - DNA, 33 bp, Homo sapien
ggccgctgtcttaggaacaacctctcctaatgc

SEQ ID NO: 579740 - DNA, 33 bp, Homo sapien
ggccgctgtcttaggagcaacctctcctaatgc

SEQ ID NO: 579741 - DNA, 33 bp, Homo sapien
ggctggtgccacttacaatgcacccggcagtgt

SEQ ID NO: 579742 - DNA, 33 bp, Homo sapien
ggctggtgccacttacgatgcacccggcagtgt

SEQ ID NO: 579743 - DNA, 33 bp, Homo sapien
atatgcccagctcttacgggaaattgaggaaca

SEQ ID NO: 579744 - DNA, 33 bp, Homo sapien
atatgcccagctcttatgggaaattgaggaaca

SEQ ID NO: 579745 - DNA, 33 bp, Homo sapien
gaaaaatcagtagccacgaaccaaatgaagaaa

SEQ ID NO: 579746 - DNA, 33 bp, Homo sapien
gaaaaatcagtagccatgaaccaaatgaagaaa

SEQ ID NO: 579747 - DNA, 33 bp, Homo sapien
cacagctaaggagacacgagaatgtgatgagca

SEQ ID NO: 579748 - DNA, 33 bp, Homo sapien
cacagctaaggagacatgagaatgtgatgagca

SEQ ID NO: 579749 - DNA, 33 bp, Homo sapien
agctccactcagcaccaaatgaaagaaagaacg

SEQ ID NO: 579750 - DNA, 33 bp, Homo sapien
agctccactcagcaccgaatgaaagaaagaacg

SEQ ID NO: 579751 - DNA, 33 bp, Homo sapien
ttgctttagcagagcaatgcagaatgccatctt

SEQ ID NO: 579752 - DNA, 33 bp, Homo sapien
ttgctttagcagagcagtgcagaatgccatctt

SEQ ID NO: 579753 - DNA, 33 bp, Homo sapien
ttcaggctcctgggtaagtggctttagaaaaga

SEQ ID NO: 579754 - DNA, 33 bp, Homo sapien
ttcaggctcctgggtacgtggctttagaaaaga

SEQ ID NO: 579755 - DNA, 33 bp, Homo sapien
taaggatcggatcacaaaacctgcatctggcca

SEQ ID NO: 579756 - DNA, 33 bp, Homo sapien
taaggatcggatcacagaacctgcatctggcca

SEQ ID NO: 579757 - DNA, 33 bp, Homo sapien
cttcttacaaaggtaacgccattgagtccctac

SEQ ID NO: 579758 - DNA, 33 bp, Homo sapien
cttcttacaaaggtaatgccattgagtccctac

SEQ ID NO: 579759 - DNA, 33 bp, Homo sapien
ccacctgtcctgccgaacatggaaactgttaaa

SEQ ID NO: 579760 - DNA, 33 bp, Homo sapien
ccacctgtcctgccgagcatggaaactgttaaa

SEQ ID NO: 579761 - DNA, 33 bp, Homo sapien
agaacattctgtctgacgtgctttctcgccagc

SEQ ID NO: 579762 - DNA, 33 bp, Homo sapien
agaacattctgtctgatgtgctttctcgccagc

SEQ ID NO: 579763 - DNA, 33 bp, Homo sapien
agtgatgtgtgtcttccaagagctatgttcctt

SEQ ID NO: 579764 - DNA, 33 bp, Homo sapien
agtgatgtgtgtcttcgaagagctatgttcctt

SEQ ID NO: 579765 - DNA, 33 bp, Homo sapien
attcagttttcagtaacggatacttttctaggc

SEQ ID NO: 579766 - DNA, 33 bp, Homo sapien
attcagttttcagtaatggatacttttctaggc

SEQ ID NO: 579767 - DNA, 33 bp, Homo sapien
ggagcctccaaatagacactggaaattggacaa

SEQ ID NO: 579768 - DNA, 33 bp, Homo sapien
ggagcctccaaatagatactggaaattggacaa

SEQ ID NO: 579769 - DNA, 33 bp, Homo sapien
agggcccccaacacagaatgacgaagcacgtgg

SEQ ID NO: 579770 - DNA, 33 bp, Homo sapien
agggcccccaacacaggatgacgaagcacgtgg

SEQ ID NO: 579771 - DNA, 33 bp, Homo sapien
tctgaccccaatgctaagacaaactgtccactg

SEQ ID NO: 579772 - DNA, 33 bp, Homo sapien
tctgaccccaatgctaggacaaactgtccactg

SEQ ID NO: 579773 - DNA, 33 bp, Homo sapien
caataggctgggaataactgaagaaaaattagt

SEQ ID NO: 579774 - DNA, 33 bp, Homo sapien
caataggctgggaatagctgaagaaaaattagt

SEQ ID NO: 579775 - DNA, 33 bp, Homo sapien
agacagtgtgttaatccaggtagagtctgactg

SEQ ID NO: 579776 - DNA, 33 bp, Homo sapien
agacagtgtgttaatctaggtagagtctgactg

SEQ ID NO: 579777 - DNA, 33 bp, Homo sapien
caggctgctggtatgcaaggccacttgtagctc

SEQ ID NO: 579778 - DNA, 33 bp, Homo sapien
caggctgctggtatgcgaggccacttgtagctc

SEQ ID NO: 579779 - DNA, 33 bp, Homo sapien
tccctcaaagcctaccacaataccaggtgggga

SEQ ID NO: 579780 - DNA, 33 bp, Homo sapien
tccctcaaagcctacctcaataccaggtgggga

SEQ ID NO: 579781 - DNA, 33 bp, Homo sapien
caatggtgagaacggacgggattcttttcagaa

SEQ ID NO: 579782 - DNA, 33 bp, Homo sapien
caatggtgagaacggatgggattcttttcagaa

SEQ ID NO: 579783 - DNA, 33 bp, Homo sapien
attaaggcaaaatgaaatctttggggtaggccc

SEQ ID NO: 579784 - DNA, 33 bp, Homo sapien
attaaggcaaaatgaagtctttggggtaggccc

SEQ ID NO: 579785 - DNA, 33 bp, Homo sapien
acgaatgaatcaatcacggtagaggattgatca

SEQ ID NO: 579786 - DNA, 33 bp, Homo sapien
acgaatgaatcaatcatggtagaggattgatca

SEQ ID NO: 579787 - DNA, 33 bp, Homo sapien
atggatagtggatgaaaggtaaacagatgatga

SEQ ID NO: 579788 - DNA, 33 bp, Homo sapien
atggatagtggatgaatggtaaacagatgatga

SEQ ID NO: 579789 - DNA, 33 bp, Homo sapien
agaatgttgtgaactacggatttttcattcaaa

SEQ ID NO: 579790 - DNA, 33 bp, Homo sapien
agaatgttgtgaactatggatttttcattcaaa

SEQ ID NO: 579791 - DNA, 33 bp, Homo sapien
agtttcttggagactaacccagacagttgcaac

SEQ ID NO: 579792 - DNA, 33 bp, Homo sapien
agtttcttggagactatcccagacagttgcaac

SEQ ID NO: 579793 - DNA, 33 bp, Homo sapien
atcagttgtttgagtaccatcttcaaggctttc

SEQ ID NO: 579794 - DNA, 33 bp, Homo sapien
atcagttgtttgagtagcatcttcaaggctttc

SEQ ID NO: 579795 - DNA, 33 bp, Homo sapien
aggacagaggatgttacgtttcccaacagacgt

SEQ ID NO: 579796 - DNA, 33 bp, Homo sapien
aggacagaggatgttatgtttcccaacagacgt

SEQ ID NO: 579797 - DNA, 33 bp, Homo sapien
ccacagcagaggatcccccatccggctcaggcc

SEQ ID NO: 579798 - DNA, 33 bp, Homo sapien
ccacagcagaggatccgccatccggctcaggcc

SEQ ID NO: 579799 - DNA, 33 bp, Homo sapien
cctgcgttagacgagacctatctcctgcaatag

SEQ ID NO: 579800 - DNA, 33 bp, Homo sapien
cctgcgttagacgagatctatctcctgcaatag

SEQ ID NO: 579801 - DNA, 33 bp, Homo sapien
tggacgagcaaaagaggaagtcaaaagcatgtg

SEQ ID NO: 579802 - DNA, 33 bp, Homo sapien
tggacgagcaaaagagtaagtcaaaagcatgtg

SEQ ID NO: 579803 - DNA, 33 bp, Homo sapien
taactaggtcatcttccccgagcctagcagtta

SEQ ID NO: 579804 - DNA, 33 bp, Homo sapien
taactaggtcatcttctccgagcctagcagtta

SEQ ID NO: 579805 - DNA, 33 bp, Homo sapien
tcagaaaaatgattgccgattactctttagtta

SEQ ID NO: 579806 - DNA, 33 bp, Homo sapien
tcagaaaaatgattgctgattactctttagtta

SEQ ID NO: 579807 - DNA, 33 bp, Homo sapien
tcatcgaggagaagtcaaatactcattgcatta

SEQ ID NO: 579808 - DNA, 33 bp, Homo sapien
tcatcgaggagaagtcgaatactcattgcatta

SEQ ID NO: 579809 - DNA, 33 bp, Homo sapien
agaacaaagatctctcccctttcttctctgtca

SEQ ID NO: 579810 - DNA, 33 bp, Homo sapien
agaacaaagatctctcgcctttcttctctgtca

SEQ ID NO: 579811 - DNA, 33 bp, Homo sapien
ttctcactcatataaccgatcactagatctgcc

SEQ ID NO: 579812 - DNA, 33 bp, Homo sapien
ttctcactcatataactgatcactagatctgcc

SEQ ID NO: 579813 - DNA, 33 bp, Homo sapien
tctgtgcatccattacgatttcagctgtaagtc

SEQ ID NO: 579814 - DNA, 33 bp, Homo sapien
tctgtgcatccattactatttcagctgtaagtc

SEQ ID NO: 579815 - DNA, 33 bp, Homo sapien
gcagctgtaaacatccaaacactctcatagtca

SEQ ID NO: 579816 - DNA, 33 bp, Homo sapien
gcagctgtaaacatccgaacactctcatagtca

SEQ ID NO: 579817 - DNA, 33 bp, Homo sapien
tgagtacattacggtacgtgagagaatgcagcc

SEQ ID NO: 579818 - DNA, 33 bp, Homo sapien
tgagtacattacggtatgtgagagaatgcagcc

SEQ ID NO: 579819 - DNA, 33 bp, Homo sapien
caccatctcttctcaaagccacctgaaacacag

SEQ ID NO: 579820 - DNA, 33 bp, Homo sapien
caccatctcttctcaacgccacctgaaacacag

SEQ ID NO: 579821 - DNA, 33 bp, Homo sapien
cattgcacttaccttaaatcctgcccttaggtc

SEQ ID NO: 579822 - DNA, 33 bp, Homo sapien
cattgcacttaccttatatcctgcccttaggtc

SEQ ID NO: 579823 - DNA, 33 bp, Homo sapien
caaaaccatgaggagaggccattaacatctaat

SEQ ID NO: 579824 - DNA, 33 bp, Homo sapien
caaaaccatgaggagatgccattaacatctaat

SEQ ID NO: 579825 - DNA, 33 bp, Homo sapien
aggtcaccgatgagaccgataagactgccagca

SEQ ID NO: 579826 - DNA, 33 bp, Homo sapien
aggtcaccgatgagacggataagactgccagca

SEQ ID NO: 579827 - DNA, 33 bp, Homo sapien
ctggtgggatgagaagaaccatggtaggagcca

SEQ ID NO: 579828 - DNA, 33 bp, Homo sapien
ctggtgggatgagaaggaccatggtaggagcca

SEQ ID NO: 579829 - DNA, 33 bp, Homo sapien
tggttcaaggctcttaagtgatttggttattat

SEQ ID NO: 579830 - DNA, 33 bp, Homo sapien
tggttcaaggctcttaggtgatttggttattat

SEQ ID NO: 579831 - DNA, 33 bp, Homo sapien
caactgattctcttacagctctgagattaggac

SEQ ID NO: 579832 - DNA, 33 bp, Homo sapien
caactgattctcttacggctctgagattaggac

SEQ ID NO: 579833 - DNA, 33 bp, Homo sapien
cccacaaactgagagaaatgtgtagaaacaggc

SEQ ID NO: 579834 - DNA, 33 bp, Homo sapien
cccacaaactgagagagatgtgtagaaacaggc

SEQ ID NO: 579835 - DNA, 33 bp, Homo sapien
atccagagtgggtttaagtgacagccaatgtta

SEQ ID NO: 579836 - DNA, 33 bp, Homo sapien
atccagagtgggtttatgtgacagccaatgtta

SEQ ID NO: 579837 - DNA, 33 bp, Homo sapien
ccattgggtccttgacaggtgaggattgtgggg

SEQ ID NO: 579838 - DNA, 33 bp, Homo sapien
ccattgggtccttgaccggtgaggattgtgggg

SEQ ID NO: 579839 - DNA, 33 bp, Homo sapien
ccattcaaaacatctcaaatgaaaaacgcctgt

SEQ ID NO: 579840 - DNA, 33 bp, Homo sapien
ccattcaaaacatctccaatgaaaaacgcctgt

SEQ ID NO: 579841 - DNA, 33 bp, Homo sapien
cagaggatttcttcccactctgctatggacaat

SEQ ID NO: 579842 - DNA, 33 bp, Homo sapien
cagaggatttcttcccgctctgctatggacaat

SEQ ID NO: 579843 - DNA, 33 bp, Homo sapien
gagggtttaagcatggcatcactggtgaagtca

SEQ ID NO: 579844 - DNA, 33 bp, Homo sapien
gagggtttaagcatggtatcactggtgaagtca

SEQ ID NO: 579845 - DNA, 33 bp, Homo sapien
cctatgacattagtaaaaacactttgtgatata

SEQ ID NO: 579846 - DNA, 33 bp, Homo sapien
cctatgacattagtaagaacactttgtgatata

SEQ ID NO: 579847 - DNA, 33 bp, Homo sapien
cgatagtagcgatgaaaatcataatgacaccat

SEQ ID NO: 579848 - DNA, 33 bp, Homo sapien
cgatagtagcgatgaagatcataatgacaccat

SEQ ID NO: 579849 - DNA, 33 bp, Homo sapien
cattccctcttggaaaatggggaaatggcccct

SEQ ID NO: 579850 - DNA, 33 bp, Homo sapien
cattccctcttggaaactggggaaatggcccct

SEQ ID NO: 579851 - DNA, 33 bp, Homo sapien
gttcgacttgattcacagacccactggtggttt

SEQ ID NO: 579852 - DNA, 33 bp, Homo sapien
gttcgacttgattcacggacccactggtggttt

SEQ ID NO: 579853 - DNA, 33 bp, Homo sapien
tgctttgaattgatgaaaaatgctataatgcag

SEQ ID NO: 579854 - DNA, 33 bp, Homo sapien
tgctttgaattgatgagaaatgctataatgcag

SEQ ID NO: 579855 - DNA, 33 bp, Homo sapien
cttggacttggctcgccacttgtgcatacgtta

SEQ ID NO: 579856 - DNA, 33 bp, Homo sapien
cttggacttggctcgctacttgtgcatacgtta

SEQ ID NO: 579857 - DNA, 33 bp, Homo sapien
gagcaaactgatgaaacatatgagaaacccaag

SEQ ID NO: 579858 - DNA, 33 bp, Homo sapien
gagcaaactgatgaaatatatgagaaacccaag

SEQ ID NO: 579859 - DNA, 33 bp, Homo sapien
ttaaaacaaggtctccagaatttgaactgcaca

SEQ ID NO: 579860 - DNA, 33 bp, Homo sapien
ttaaaacaaggtctccggaatttgaactgcaca

SEQ ID NO: 579861 - DNA, 33 bp, Homo sapien
aagagcagctaaggaaaagacccaaaagctcag

SEQ ID NO: 579862 - DNA, 33 bp, Homo sapien
aagagcagctaaggaatagacccaaaagctcag

SEQ ID NO: 579863 - DNA, 33 bp, Homo sapien
agactttgggtgattacagtgtgtctgcatagg

SEQ ID NO: 579864 - DNA, 33 bp, Homo sapien
agactttgggtgattagagtgtgtctgcatagg

SEQ ID NO: 579865 - DNA, 33 bp, Homo sapien
gctcaggggctaaccaaagtgattccaggcaga

SEQ ID NO: 579866 - DNA, 33 bp, Homo sapien
gctcaggggctaaccacagtgattccaggcaga

SEQ ID NO: 579867 - DNA, 33 bp, Homo sapien
cagctcacccaattgcacggaggttaatgatgc

SEQ ID NO: 579868 - DNA, 33 bp, Homo sapien
cagctcacccaattgcgcggaggttaatgatgc

SEQ ID NO: 579869 - DNA, 33 bp, Homo sapien
ttcctacctagtctcgcccccgtctggtttata

SEQ ID NO: 579870 - DNA, 33 bp, Homo sapien
ttcctacctagtctcgtccccgtctggtttata

SEQ ID NO: 579871 - DNA, 33 bp, Homo sapien
ctgaggatattcccaactgtcttgaaagaataa

SEQ ID NO: 579872 - DNA, 33 bp, Homo sapien
ctgaggatattcccaagtgtcttgaaagaataa

SEQ ID NO: 579873 - DNA, 33 bp, Homo sapien
ttatttcctggccataagcattttccctgtgga

SEQ ID NO: 579874 - DNA, 33 bp, Homo sapien
ttatttcctggccatacgcattttccctgtgga

SEQ ID NO: 579875 - DNA, 33 bp, Homo sapien
cacaactttccacaacaaatcagttggcttata

SEQ ID NO: 579876 - DNA, 33 bp, Homo sapien
cacaactttccacaacgaatcagttggcttata

SEQ ID NO: 579877 - DNA, 33 bp, Homo sapien
agacttttctggcccaacctgtgaactgtacct

SEQ ID NO: 579878 - DNA, 33 bp, Homo sapien
agacttttctggcccagcctgtgaactgtacct

SEQ ID NO: 579879 - DNA, 33 bp, Homo sapien
ttgagagtctcgtaccaattgttgcatatgcga

SEQ ID NO: 579880 - DNA, 33 bp, Homo sapien
ttgagagtctcgtaccgattgttgcatatgcga

SEQ ID NO: 579881 - DNA, 33 bp, Homo sapien
accaaagtgcaactacggatgcgttcagcccat

SEQ ID NO: 579882 - DNA, 33 bp, Homo sapien
accaaagtgcaactactgatgcgttcagcccat

SEQ ID NO: 579883 - DNA, 33 bp, Homo sapien
gagacttgctggtaaaagtgtgtcagaagccca

SEQ ID NO: 579884 - DNA, 33 bp, Homo sapien
gagacttgctggtaaaggtgtgtcagaagccca

SEQ ID NO: 579885 - DNA, 33 bp, Homo sapien
ttcaatcccaatcatccctggtttcctctgtgt

SEQ ID NO: 579886 - DNA, 33 bp, Homo sapien
ttcaatcccaatcatcgctggtttcctctgtgt

SEQ ID NO: 579887 - DNA, 33 bp, Homo sapien
aagagaataaaatcccagcattccccaagagaa

SEQ ID NO: 579888 - DNA, 33 bp, Homo sapien
aagagaataaaatcccggcattccccaagagaa

SEQ ID NO: 579889 - DNA, 33 bp, Homo sapien
cgtgatgagaattcaacgcagtcattgcgaagg

SEQ ID NO: 579890 - DNA, 33 bp, Homo sapien
cgtgatgagaattcaatgcagtcattgcgaagg

SEQ ID NO: 579891 - DNA, 33 bp, Homo sapien
ctatgcagtccttcaaaggattggacaaggccc

SEQ ID NO: 579892 - DNA, 33 bp, Homo sapien
ctatgcagtccttcaacggattggacaaggccc

SEQ ID NO: 579893 - DNA, 33 bp, Homo sapien
gctagatgagcaaaagcagcaaacgcccctttg

SEQ ID NO: 579894 - DNA, 33 bp, Homo sapien
gctagatgagcaaaagtagcaaacgcccctttg

SEQ ID NO: 579895 - DNA, 33 bp, Homo sapien
tggctgttagcagaaacccattcattaatgtgg

SEQ ID NO: 579896 - DNA, 33 bp, Homo sapien
tggctgttagcagaaatccattcattaatgtgg

SEQ ID NO: 579897 - DNA, 33 bp, Homo sapien
taggccaaggatgagcgctttgaaaactctggc

SEQ ID NO: 579898 - DNA, 33 bp, Homo sapien
taggccaaggatgagctctttgaaaactctggc

SEQ ID NO: 579899 - DNA, 33 bp, Homo sapien
caggtgtaagcagaaaagaggatctactggtga

SEQ ID NO: 579900 - DNA, 33 bp, Homo sapien
caggtgtaagcagaaatgaggatctactggtga

SEQ ID NO: 579901 - DNA, 33 bp, Homo sapien
ttttggaaggtcaaaggacttttataatcccta

SEQ ID NO: 579902 - DNA, 33 bp, Homo sapien
ttttggaaggtcaaagtacttttataatcccta

SEQ ID NO: 579903 - DNA, 33 bp, Homo sapien
atttgtaaattcataacagtaatagatctccct

SEQ ID NO: 579904 - DNA, 33 bp, Homo sapien
atttgtaaattcataatagtaatagatctccct

SEQ ID NO: 579905 - DNA, 33 bp, Homo sapien
cttcacccaccaggaaaaaatggcacatttact

SEQ ID NO: 579906 - DNA, 33 bp, Homo sapien
cttcacccaccaggaacaaatggcacatttact

SEQ ID NO: 579907 - DNA, 33 bp, Homo sapien
atataaatgcccggctaaaacgaattaaatatt

SEQ ID NO: 579908 - DNA, 33 bp, Homo sapien
atataaatgcccggctgaaacgaattaaatatt

SEQ ID NO: 579909 - DNA, 33 bp, Homo sapien
gggaggtacggcagcacaggtaccgcaaggctg

SEQ ID NO: 579910 - DNA, 33 bp, Homo sapien
gggaggtacggcagcataggtaccgcaaggctg

SEQ ID NO: 579911 - DNA, 33 bp, Homo sapien
aaacacaataacaagaccaaagtttactataac

SEQ ID NO: 579912 - DNA, 33 bp, Homo sapien
aaacacaataacaagatcaaagtttactataac

SEQ ID NO: 579913 - DNA, 33 bp, Homo sapien
gcttgtttagttatcaatcctcccaaacacaat

SEQ ID NO: 579914 - DNA, 33 bp, Homo sapien
gcttgtttagttatcactcctcccaaacacaat

SEQ ID NO: 579915 - DNA, 33 bp, Homo sapien
taagttggggagtcacagaaagaaaagaaaaag

SEQ ID NO: 579916 - DNA, 33 bp, Homo sapien
taagttggggagtcacggaaagaaaagaaaaag

SEQ ID NO: 579917 - DNA, 33 bp, Homo sapien
gtttgaaatatgagagccaggctacaggtctgc

SEQ ID NO: 579918 - DNA, 33 bp, Homo sapien
gtttgaaatatgagagtcaggctacaggtctgc

SEQ ID NO: 579919 - DNA, 33 bp, Homo sapien
cggtcagcaaaagagacgggcctttacaataga

SEQ ID NO: 579920 - DNA, 33 bp, Homo sapien
cggtcagcaaaagagatgggcctttacaataga

SEQ ID NO: 579921 - DNA, 33 bp, Homo sapien
caaatgacagagcccactcttgataaatgttta

SEQ ID NO: 579922 - DNA, 33 bp, Homo sapien
caaatgacagagcccattcttgataaatgttta

SEQ ID NO: 579923 - DNA, 33 bp, Homo sapien
tactacacatggagacagccattttttttcatg

SEQ ID NO: 579924 - DNA, 33 bp, Homo sapien
tactacacatggagactgccattttttttcatg

SEQ ID NO: 579925 - DNA, 33 bp, Homo sapien
tccagaagacattatacacagtgctacataagg

SEQ ID NO: 579926 - DNA, 33 bp, Homo sapien
tccagaagacattatatacagtgctacataagg

SEQ ID NO: 579927 - DNA, 33 bp, Homo sapien
tgggttgggctctagactcattttgaaaagggc

SEQ ID NO: 579928 - DNA, 33 bp, Homo sapien
tgggttgggctctagagtcattttgaaaagggc

SEQ ID NO: 579929 - DNA, 33 bp, Homo sapien
tcacaggtcccaaacaacagagaaccaatgata

SEQ ID NO: 579930 - DNA, 33 bp, Homo sapien
tcacaggtcccaaacaccagagaaccaatgata

SEQ ID NO: 579931 - DNA, 33 bp, Homo sapien
aggagcagtgagtgaaactggctaaacccatct

SEQ ID NO: 579932 - DNA, 33 bp, Homo sapien
aggagcagtgagtgaacctggctaaacccatct

SEQ ID NO: 579933 - DNA, 33 bp, Homo sapien
tagaattcgggtcagacgttgagccagttcaca

SEQ ID NO: 579934 - DNA, 33 bp, Homo sapien
tagaattcgggtcagatgttgagccagttcaca

SEQ ID NO: 579935 - DNA, 33 bp, Homo sapien
tcaaaataaaaggaaggctcagtggcaaacagt

SEQ ID NO: 579936 - DNA, 33 bp, Homo sapien
tcaaaataaaaggaagtctcagtggcaaacagt

SEQ ID NO: 579937 - DNA, 33 bp, Homo sapien
gttgcttcagttcttgaatctcaaaatcactgg

SEQ ID NO: 579938 - DNA, 33 bp, Homo sapien
gttgcttcagttcttggatctcaaaatcactgg

SEQ ID NO: 579939 - DNA, 33 bp, Homo sapien
ctctgagcttgtggtccatatattaaaaggcac

SEQ ID NO: 579940 - DNA, 33 bp, Homo sapien
ctctgagcttgtggtctatatattaaaaggcac

SEQ ID NO: 579941 - DNA, 33 bp, Homo sapien
ccctgcagtggtttccagaattattgatacact

SEQ ID NO: 579942 - DNA, 33 bp, Homo sapien
ccctgcagtggtttccggaattattgatacact

SEQ ID NO: 579943 - DNA, 33 bp, Homo sapien
caagcaaataattgctcaaaagaaaggctggct

SEQ ID NO: 579944 - DNA, 33 bp, Homo sapien
caagcaaataattgctgaaaagaaaggctggct

SEQ ID NO: 579945 - DNA, 33 bp, Homo sapien
tggacagctttgaagaacactggagagcgacgt

SEQ ID NO: 579946 - DNA, 33 bp, Homo sapien
tggacagctttgaagagcactggagagcgacgt

SEQ ID NO: 579947 - DNA, 33 bp, Homo sapien
agtaatcactcactcaagttccttaatcacatc

SEQ ID NO: 579948 - DNA, 33 bp, Homo sapien
agtaatcactcactcaggttccttaatcacatc

SEQ ID NO: 579949 - DNA, 33 bp, Homo sapien
aaatccagctctgtgacaagcctgctatttaca

SEQ ID NO: 579950 - DNA, 33 bp, Homo sapien
aaatccagctctgtgataagcctgctatttaca

SEQ ID NO: 579951 - DNA, 33 bp, Homo sapien
ctaacccccagcatgacggtattcagagatggg

SEQ ID NO: 579952 - DNA, 33 bp, Homo sapien
ctaacccccagcatgatggtattcagagatggg

SEQ ID NO: 579953 - DNA, 33 bp, Homo sapien
cgtccaggagttgccaaaaaggccctgccaggc

SEQ ID NO: 579954 - DNA, 33 bp, Homo sapien
cgtccaggagttgccagaaaggccctgccaggc

SEQ ID NO: 579955 - DNA, 33 bp, Homo sapien
gaaggttttcagtcataatcccatgcgatcctc

SEQ ID NO: 579956 - DNA, 33 bp, Homo sapien
gaaggttttcagtcatgatcccatgcgatcctc

SEQ ID NO: 579957 - DNA, 33 bp, Homo sapien
gagaccagtacagatcactccctgccttccatt

SEQ ID NO: 579958 - DNA, 33 bp, Homo sapien
gagaccagtacagatcgctccctgccttccatt

SEQ ID NO: 579959 - DNA, 33 bp, Homo sapien
ataatcctgcaattacaataaagctaattggta

SEQ ID NO: 579960 - DNA, 33 bp, Homo sapien
ataatcctgcaattacgataaagctaattggta

SEQ ID NO: 579961 - DNA, 33 bp, Homo sapien
atctccctgcatagccaatgtccagcaccggcc

SEQ ID NO: 579962 - DNA, 33 bp, Homo sapien
atctccctgcatagccgatgtccagcaccggcc

SEQ ID NO: 579963 - DNA, 33 bp, Homo sapien
acagtcactactccacactgtcttatgcccagg

SEQ ID NO: 579964 - DNA, 33 bp, Homo sapien
acagtcactactccacgctgtcttatgcccagg

SEQ ID NO: 579965 - DNA, 33 bp, Homo sapien
aataaaaggctgtgacagagactttaatggggc

SEQ ID NO: 579966 - DNA, 33 bp, Homo sapien
aataaaaggctgtgacggagactttaatggggc

SEQ ID NO: 579967 - DNA, 33 bp, Homo sapien
ccatcattatctgcccagcaaaaaatgctccgt

SEQ ID NO: 579968 - DNA, 33 bp, Homo sapien
ccatcattatctgcccggcaaaaaatgctccgt

SEQ ID NO: 579969 - DNA, 33 bp, Homo sapien
tgtccagctaatcaagccgggaagaaagcgggg

SEQ ID NO: 579970 - DNA, 33 bp, Homo sapien
tgtccagctaatcaagtcgggaagaaagcgggg

SEQ ID NO: 579971 - DNA, 33 bp, Homo sapien
tattttcagttttcaacgtcttgtgaaccagag

SEQ ID NO: 579972 - DNA, 33 bp, Homo sapien
tattttcagttttcaatgtcttgtgaaccagag

SEQ ID NO: 579973 - DNA, 33 bp, Homo sapien
ggtaactgtgcactaaacctcactctgcacctc

SEQ ID NO: 579974 - DNA, 33 bp, Homo sapien
ggtaactgtgcactaaccctcactctgcacctc

SEQ ID NO: 579975 - DNA, 33 bp, Homo sapien
ctccctcaataccgcacggtcagtgttctaact

SEQ ID NO: 579976 - DNA, 33 bp, Homo sapien
ctccctcaataccgcatggtcagtgttctaact

SEQ ID NO: 579977 - DNA, 33 bp, Homo sapien
acacatctgcaccacaatgaggatacggactgc

SEQ ID NO: 579978 - DNA, 33 bp, Homo sapien
acacatctgcaccacagtgaggatacggactgc

SEQ ID NO: 579979 - DNA, 33 bp, Homo sapien
gagtcaccggaggttcacttcactgtatggatc

SEQ ID NO: 579980 - DNA, 33 bp, Homo sapien
gagtcaccggaggttcgcttcactgtatggatc

SEQ ID NO: 579981 - DNA, 33 bp, Homo sapien
aaaagtaatgaaatcacaaaggaaaagatggat

SEQ ID NO: 579982 - DNA, 33 bp, Homo sapien
aaaagtaatgaaatcagaaaggaaaagatggat

SEQ ID NO: 579983 - DNA, 33 bp, Homo sapien
ttaacatctattaggacggtgagttcccctttc

SEQ ID NO: 579984 - DNA, 33 bp, Homo sapien
ttaacatctattaggatggtgagttcccctttc

SEQ ID NO: 579985 - DNA, 33 bp, Homo sapien
acagccccggctttgcagaagacaccagcctgg

SEQ ID NO: 579986 - DNA, 33 bp, Homo sapien
acagccccggctttgcggaagacaccagcctgg

SEQ ID NO: 579987 - DNA, 33 bp, Homo sapien
cctctggctgaagtaaaacatttcatggtagtg

SEQ ID NO: 579988 - DNA, 33 bp, Homo sapien
cctctggctgaagtaacacatttcatggtagtg

SEQ ID NO: 579989 - DNA, 33 bp, Homo sapien
gatatgacattttagtcaatcaatggtgcaagc

SEQ ID NO: 579990 - DNA, 33 bp, Homo sapien
gatatgacattttagttaatcaatggtgcaagc

SEQ ID NO: 579991 - DNA, 33 bp, Homo sapien
cagttgccttcaagaaaagtatccgcatgtcct

SEQ ID NO: 579992 - DNA, 33 bp, Homo sapien
cagttgccttcaagaagagtatccgcatgtcct

SEQ ID NO: 579993 - DNA, 33 bp, Homo sapien
cattatcaaagttgcacggctctttgcaaaatt

SEQ ID NO: 579994 - DNA, 33 bp, Homo sapien
cattatcaaagttgcatggctctttgcaaaatt

SEQ ID NO: 579995 - DNA, 33 bp, Homo sapien
ttctctgggaagccggacatcgctgtcgagtgt

SEQ ID NO: 579996 - DNA, 33 bp, Homo sapien
ttctctgggaagccgggcatcgctgtcgagtgt

SEQ ID NO: 579997 - DNA, 33 bp, Homo sapien
caagacaggatgcagacgctagcccctttacac

SEQ ID NO: 579998 - DNA, 33 bp, Homo sapien
caagacaggatgcagatgctagcccctttacac

SEQ ID NO: 579999 - DNA, 33 bp, Homo sapien
acacagcacagttgggcactcaggtgcatccta

SEQ ID NO: 580000 - DNA, 33 bp, Homo sapien
acacagcacagttgggtactcaggtgcatccta

SEQ ID NO: 580001 - DNA, 33 bp, Homo sapien
agaagtgatttttatcgcgtttggattcctagc

SEQ ID NO: 580002 - DNA, 33 bp, Homo sapien
agaagtgatttttatctcgtttggattcctagc

SEQ ID NO: 580003 - DNA, 33 bp, Homo sapien
gaattaattacaagaacgaacactgcttttaaa

SEQ ID NO: 580004 - DNA, 33 bp, Homo sapien
gaattaattacaagaatgaacactgcttttaaa

SEQ ID NO: 580005 - DNA, 33 bp, Homo sapien
tccatgttcagtacagccacaattcttcctccg

SEQ ID NO: 580006 - DNA, 33 bp, Homo sapien
tccatgttcagtacaggcacaattcttcctccg

SEQ ID NO: 580007 - DNA, 33 bp, Homo sapien
acacaggcagagagaacgttgaggcttcctggg

SEQ ID NO: 580008 - DNA, 33 bp, Homo sapien
acacaggcagagagaatgttgaggcttcctggg

SEQ ID NO: 580009 - DNA, 33 bp, Homo sapien
ccacctgtggaaagcacatacatgatgaatgtg

SEQ ID NO: 580010 - DNA, 33 bp, Homo sapien
ccacctgtggaaagcatatacatgatgaatgtg

SEQ ID NO: 580011 - DNA, 33 bp, Homo sapien
ttcaaagaaaatatcacactatcactggccttt

SEQ ID NO: 580012 - DNA, 33 bp, Homo sapien
ttcaaagaaaatatcagactatcactggccttt

SEQ ID NO: 580013 - DNA, 33 bp, Homo sapien
aaaaaaagtctgcaacaaaattatctacacaat

SEQ ID NO: 580014 - DNA, 33 bp, Homo sapien
aaaaaaagtctgcaaccaaattatctacacaat

SEQ ID NO: 580015 - DNA, 33 bp, Homo sapien
acaaagactaatttgacattgtcctgggaagct

SEQ ID NO: 580016 - DNA, 33 bp, Homo sapien
acaaagactaatttgatattgtcctgggaagct

SEQ ID NO: 580017 - DNA, 33 bp, Homo sapien
ggtatcctttccattaaacatttctgctcagaa

SEQ ID NO: 580018 - DNA, 33 bp, Homo sapien
ggtatcctttccattagacatttctgctcagaa

SEQ ID NO: 580019 - DNA, 33 bp, Homo sapien
agatgtaatgacattaaggatcctgggatgaga

SEQ ID NO: 580020 - DNA, 33 bp, Homo sapien
agatgtaatgacattagggatcctgggatgaga

SEQ ID NO: 580021 - DNA, 33 bp, Homo sapien
tgcctttggaggagaccgagaggttttgttcct

SEQ ID NO: 580022 - DNA, 33 bp, Homo sapien
tgcctttggaggagactgagaggttttgttcct

SEQ ID NO: 580023 - DNA, 33 bp, Homo sapien
atgtctcctgtctggacgagggtgtcatggatg

SEQ ID NO: 580024 - DNA, 33 bp, Homo sapien
atgtctcctgtctggaggagggtgtcatggatg

SEQ ID NO: 580025 - DNA, 33 bp, Homo sapien
catgtgcagttctctaagaagggcagagccagg

SEQ ID NO: 580026 - DNA, 33 bp, Homo sapien
catgtgcagttctctaggaagggcagagccagg

SEQ ID NO: 580027 - DNA, 33 bp, Homo sapien
aatttaacagcacgggaaaatgtcttttgaatc

SEQ ID NO: 580028 - DNA, 33 bp, Homo sapien
aatttaacagcacgggcaaatgtcttttgaatc

SEQ ID NO: 580029 - DNA, 33 bp, Homo sapien
ctgtgagaaacagtccaaggttcaaatttaaca

SEQ ID NO: 580030 - DNA, 33 bp, Homo sapien
ctgtgagaaacagtccgaggttcaaatttaaca

SEQ ID NO: 580031 - DNA, 33 bp, Homo sapien
tctctatgtctctatcaaagtggaaacaggaaa

SEQ ID NO: 580032 - DNA, 33 bp, Homo sapien
tctctatgtctctatcgaagtggaaacaggaaa

SEQ ID NO: 580033 - DNA, 33 bp, Homo sapien
ttgagggctttcccaacgagacctagaatcacc

SEQ ID NO: 580034 - DNA, 33 bp, Homo sapien
ttgagggctttcccaatgagacctagaatcacc

SEQ ID NO: 580035 - DNA, 33 bp, Homo sapien
gctgcgatacggccaaacgttcatgctaaagtt

SEQ ID NO: 580036 - DNA, 33 bp, Homo sapien
gctgcgatacggccaagcgttcatgctaaagtt

SEQ ID NO: 580037 - DNA, 33 bp, Homo sapien
tgcaaatctaccataaggcagaatcaggcctct

SEQ ID NO: 580038 - DNA, 33 bp, Homo sapien
tgcaaatctaccataatgcagaatcaggcctct

SEQ ID NO: 580039 - DNA, 33 bp, Homo sapien
tggcaaagggacgtcaacttagaaagtagttag

SEQ ID NO: 580040 - DNA, 33 bp, Homo sapien
tggcaaagggacgtcagcttagaaagtagttag

SEQ ID NO: 580041 - DNA, 33 bp, Homo sapien
tatagaagtccatcatcaaatgcatgtgcagct

SEQ ID NO: 580042 - DNA, 33 bp, Homo sapien
tatagaagtccatcattaaatgcatgtgcagct

SEQ ID NO: 580043 - DNA, 33 bp, Homo sapien
tggaagtcccacaaaacgtttccacttaatcac

SEQ ID NO: 580044 - DNA, 33 bp, Homo sapien
tggaagtcccacaaaatgtttccacttaatcac

SEQ ID NO: 580045 - DNA, 33 bp, Homo sapien
gtgagaggacacttgacgatggagaggtcggag

SEQ ID NO: 580046 - DNA, 33 bp, Homo sapien
gtgagaggacacttgatgatggagaggtcggag

SEQ ID NO: 580047 - DNA, 33 bp, Homo sapien
atcatctctgcatctcaaactccttaacttcat

SEQ ID NO: 580048 - DNA, 33 bp, Homo sapien
atcatctctgcatctcgaactccttaacttcat

SEQ ID NO: 580049 - DNA, 33 bp, Homo sapien
gggtgtcattggtagaagaatcagaggaatgga

SEQ ID NO: 580050 - DNA, 33 bp, Homo sapien
gggtgtcattggtagaggaatcagaggaatgga

SEQ ID NO: 580051 - DNA, 33 bp, Homo sapien
aagacctaacagaaacccatgcccaggtgcagc

SEQ ID NO: 580052 - DNA, 33 bp, Homo sapien
aagacctaacagaaacgcatgcccaggtgcagc

SEQ ID NO: 580053 - DNA, 33 bp, Homo sapien
tctgcgtgaggcccacaaagctgcacgtggtgg

SEQ ID NO: 580054 - DNA, 33 bp, Homo sapien
tctgcgtgaggcccacgaagctgcacgtggtgg

SEQ ID NO: 580055 - DNA, 33 bp, Homo sapien
ctgatctgtcaccggcaaggctgggattgtttc

SEQ ID NO: 580056 - DNA, 33 bp, Homo sapien
ctgatctgtcaccggcgaggctgggattgtttc

SEQ ID NO: 580057 - DNA, 33 bp, Homo sapien
tctccccactatttcaaatcttaaattactatg

SEQ ID NO: 580058 - DNA, 33 bp, Homo sapien
tctccccactatttcatatcttaaattactatg

SEQ ID NO: 580059 - DNA, 33 bp, Homo sapien
aagtctaaagccagctcacatagacccacccac

SEQ ID NO: 580060 - DNA, 33 bp, Homo sapien
aagtctaaagccagcttacatagacccacccac

SEQ ID NO: 580061 - DNA, 33 bp, Homo sapien
catggattccatttcaaccccactggccagaca

SEQ ID NO: 580062 - DNA, 33 bp, Homo sapien
catggattccatttcatccccactggccagaca

SEQ ID NO: 580063 - DNA, 33 bp, Homo sapien
tctgctagacagtgtcagaagtgaattgcagga

SEQ ID NO: 580064 - DNA, 33 bp, Homo sapien
tctgctagacagtgtccgaagtgaattgcagga

SEQ ID NO: 580065 - DNA, 33 bp, Homo sapien
cgcattttcctttctacggtctccttgcaagtc

SEQ ID NO: 580066 - DNA, 33 bp, Homo sapien
cgcattttcctttctatggtctccttgcaagtc

SEQ ID NO: 580067 - DNA, 33 bp, Homo sapien
ctaggcccttagtagaaagctgtttatttgcct

SEQ ID NO: 580068 - DNA, 33 bp, Homo sapien
ctaggcccttagtagagagctgtttatttgcct

SEQ ID NO: 580069 - DNA, 33 bp, Homo sapien
gacacactccacacgacggttaggaaaattcca

SEQ ID NO: 580070 - DNA, 33 bp, Homo sapien
gacacactccacacgatggttaggaaaattcca

SEQ ID NO: 580071 - DNA, 33 bp, Homo sapien
aaagtagaaaatggcacgtgggtataattggtt

SEQ ID NO: 580072 - DNA, 33 bp, Homo sapien
aaagtagaaaatggcatgtgggtataattggtt

SEQ ID NO: 580073 - DNA, 33 bp, Homo sapien
agtccttaactgtagacgtcatatatctctgct

SEQ ID NO: 580074 - DNA, 33 bp, Homo sapien
agtccttaactgtagatgtcatatatctctgct

SEQ ID NO: 580075 - DNA, 33 bp, Homo sapien
aggagtggtctgtacaagaatgccttttttccc

SEQ ID NO: 580076 - DNA, 33 bp, Homo sapien
aggagtggtctgtacatgaatgccttttttccc

SEQ ID NO: 580077 - DNA, 33 bp, Homo sapien
tcaggattactacacccccttgatttaccaggt

SEQ ID NO: 580078 - DNA, 33 bp, Homo sapien
tcaggattactacacctccttgatttaccaggt

SEQ ID NO: 580079 - DNA, 33 bp, Homo sapien
cacatacagtcacagacctcattagtacagatt

SEQ ID NO: 580080 - DNA, 33 bp, Homo sapien
cacatacagtcacagatctcattagtacagatt

SEQ ID NO: 580081 - DNA, 33 bp, Homo sapien
cccaagatggagtgggaatctaccctgtgtgca

SEQ ID NO: 580082 - DNA, 33 bp, Homo sapien
cccaagatggagtggggatctaccctgtgtgca

SEQ ID NO: 580083 - DNA, 33 bp, Homo sapien
tacattaatgaagcaaaatttcctagagaaaaa

SEQ ID NO: 580084 - DNA, 33 bp, Homo sapien
tacattaatgaagcaacatttcctagagaaaaa

SEQ ID NO: 580085 - DNA, 33 bp, Homo sapien
cctggacctgcagaaagcctggacacctgcatt

SEQ ID NO: 580086 - DNA, 33 bp, Homo sapien
cctggacctgcagaaatcctggacacctgcatt

SEQ ID NO: 580087 - DNA, 33 bp, Homo sapien
aatgtcatctatggaccgtaagaaatctgtaat

SEQ ID NO: 580088 - DNA, 33 bp, Homo sapien
aatgtcatctatggactgtaagaaatctgtaat

SEQ ID NO: 580089 - DNA, 33 bp, Homo sapien
aattcccaaaccacacaaggcattgaacagacc

SEQ ID NO: 580090 - DNA, 33 bp, Homo sapien
aattcccaaaccacacgaggcattgaacagacc

SEQ ID NO: 580091 - DNA, 33 bp, Homo sapien
aaggcagcatctcttccccatgtgtttgtggct

SEQ ID NO: 580092 - DNA, 33 bp, Homo sapien
aaggcagcatctcttcgccatgtgtttgtggct

SEQ ID NO: 580093 - DNA, 33 bp, Homo sapien
cagacgcattaagtgaaaagaaaaagccataaa

SEQ ID NO: 580094 - DNA, 33 bp, Homo sapien
cagacgcattaagtgagaagaaaaagccataaa

SEQ ID NO: 580095 - DNA, 33 bp, Homo sapien
agggtgatcatgaaaaaaaagtccacgtcagca

SEQ ID NO: 580096 - DNA, 33 bp, Homo sapien
agggtgatcatgaaaagaaagtccacgtcagca

SEQ ID NO: 580097 - DNA, 33 bp, Homo sapien
ctccgcatcctcgccaaaattaaagataaatac

SEQ ID NO: 580098 - DNA, 33 bp, Homo sapien
ctccgcatcctcgccataattaaagataaatac

SEQ ID NO: 580099 - DNA, 33 bp, Homo sapien
gggtgttctgcacacaaacttttgttaaacagc

SEQ ID NO: 580100 - DNA, 33 bp, Homo sapien
gggtgttctgcacacagacttttgttaaacagc

SEQ ID NO: 580101 - DNA, 33 bp, Homo sapien
atccagcgccgcgtcactatcgtataactagaa

SEQ ID NO: 580102 - DNA, 33 bp, Homo sapien
atccagcgccgcgtcattatcgtataactagaa

SEQ ID NO: 580103 - DNA, 33 bp, Homo sapien
gtaactcagagtcttaggatgaggttgtcctgg

SEQ ID NO: 580104 - DNA, 33 bp, Homo sapien
gtaactcagagtcttatgatgaggttgtcctgg

SEQ ID NO: 580105 - DNA, 33 bp, Homo sapien
gtcagtcttatacagacgattcctctttcagaa

SEQ ID NO: 580106 - DNA, 33 bp, Homo sapien
gtcagtcttatacagatgattcctctttcagaa

SEQ ID NO: 580107 - DNA, 33 bp, Homo sapien
cagctgagtgttaaagcccagagaatagaaccc

SEQ ID NO: 580108 - DNA, 33 bp, Homo sapien
cagctgagtgttaaagtccagagaatagaaccc

SEQ ID NO: 580109 - DNA, 33 bp, Homo sapien
ggtcaattgttaaacacgcagaactgttagggc

SEQ ID NO: 580110 - DNA, 33 bp, Homo sapien
ggtcaattgttaaacaggcagaactgttagggc

SEQ ID NO: 580111 - DNA, 33 bp, Homo sapien
acaggcccgagataacaaccagtatactttctg

SEQ ID NO: 580112 - DNA, 33 bp, Homo sapien
acaggcccgagataaccaccagtatactttctg

SEQ ID NO: 580113 - DNA, 33 bp, Homo sapien
tttccaactgaacgcgacactgctttctggatg

SEQ ID NO: 580114 - DNA, 33 bp, Homo sapien
tttccaactgaacgcggcactgctttctggatg

SEQ ID NO: 580115 - DNA, 33 bp, Homo sapien
ctctcgcctgggaatacgctgaaaggagaggcc

SEQ ID NO: 580116 - DNA, 33 bp, Homo sapien
ctctcgcctgggaatatgctgaaaggagaggcc

SEQ ID NO: 580117 - DNA, 33 bp, Homo sapien
gtggtgcctgttttcaagtctccatcaaatgca

SEQ ID NO: 580118 - DNA, 33 bp, Homo sapien
gtggtgcctgttttcacgtctccatcaaatgca

SEQ ID NO: 580119 - DNA, 33 bp, Homo sapien
tgtttggttttacaacaatgattcagagagaca

SEQ ID NO: 580120 - DNA, 33 bp, Homo sapien
tgtttggttttacaacgatgattcagagagaca

SEQ ID NO: 580121 - DNA, 33 bp, Homo sapien
acagagagtgtgaaaccaagagggggcaggaga

SEQ ID NO: 580122 - DNA, 33 bp, Homo sapien
acagagagtgtgaaacgaagagggggcaggaga

SEQ ID NO: 580123 - DNA, 33 bp, Homo sapien
actgccgtctctgaccagaaaggccgtgacagg

SEQ ID NO: 580124 - DNA, 33 bp, Homo sapien
actgccgtctctgaccggaaaggccgtgacagg

SEQ ID NO: 580125 - DNA, 33 bp, Homo sapien
cgtgggtcacaggttcaaaatctgggggcgaca

SEQ ID NO: 580126 - DNA, 33 bp, Homo sapien
cgtgggtcacaggttcgaaatctgggggcgaca

SEQ ID NO: 580127 - DNA, 33 bp, Homo sapien
tgccaacgcttatttgaacacagataaatctcc

SEQ ID NO: 580128 - DNA, 33 bp, Homo sapien
tgccaacgcttatttggacacagataaatctcc

SEQ ID NO: 580129 - DNA, 33 bp, Homo sapien
gtgtgtgcttctctctgaagatccctaatatac

SEQ ID NO: 580130 - DNA, 33 bp, Homo sapien
gtgtgtgcttctctcttaagatccctaatatac

SEQ ID NO: 580131 - DNA, 33 bp, Homo sapien
ggcagttcttaagggcacctccaacgttcacac

SEQ ID NO: 580132 - DNA, 33 bp, Homo sapien
ggcagttcttaagggcgcctccaacgttcacac

SEQ ID NO: 580133 - DNA, 33 bp, Homo sapien
attcaccaccttgcacggacctcagaaccgtcg

SEQ ID NO: 580134 - DNA, 33 bp, Homo sapien
attcaccaccttgcactgacctcagaaccgtcg

SEQ ID NO: 580135 - DNA, 33 bp, Homo sapien
acttctgctaggacaagttgcgctagggcaaag

SEQ ID NO: 580136 - DNA, 33 bp, Homo sapien
acttctgctaggacaatttgcgctagggcaaag

SEQ ID NO: 580137 - DNA, 33 bp, Homo sapien
gaaagcggcagaaggaaaggaacgccgcgacag

SEQ ID NO: 580138 - DNA, 33 bp, Homo sapien
gaaagcggcagaaggagaggaacgccgcgacag

SEQ ID NO: 580139 - DNA, 33 bp, Homo sapien
cctgaaaataatcaccaagggtccttctcaggg

SEQ ID NO: 580140 - DNA, 33 bp, Homo sapien
cctgaaaataatcaccgagggtccttctcaggg

SEQ ID NO: 580141 - DNA, 33 bp, Homo sapien
ttcacagtaaccttgaatagggcaggagaaact

SEQ ID NO: 580142 - DNA, 33 bp, Homo sapien
ttcacagtaaccttgagtagggcaggagaaact

SEQ ID NO: 580143 - DNA, 33 bp, Homo sapien
ctgtgaaggagaagacaaactgtcctggaaaga

SEQ ID NO: 580144 - DNA, 33 bp, Homo sapien
ctgtgaaggagaagacgaactgtcctggaaaga

SEQ ID NO: 580145 - DNA, 33 bp, Homo sapien
ggcccagggtgtcaacaaggatgagggaaaggg

SEQ ID NO: 580146 - DNA, 33 bp, Homo sapien
ggcccagggtgtcaacgaggatgagggaaaggg

SEQ ID NO: 580147 - DNA, 33 bp, Homo sapien
accacgatcccagaaacagccaggaaagcatcg

SEQ ID NO: 580148 - DNA, 33 bp, Homo sapien
accacgatcccagaaatagccaggaaagcatcg

SEQ ID NO: 580149 - DNA, 33 bp, Homo sapien
agacaaataggtgacactccagaaagaaacatg

SEQ ID NO: 580150 - DNA, 33 bp, Homo sapien
agacaaataggtgacattccagaaagaaacatg

SEQ ID NO: 580151 - DNA, 33 bp, Homo sapien
cagacttaaggcagaaagaatttccgaatcatt

SEQ ID NO: 580152 - DNA, 33 bp, Homo sapien
cagacttaaggcagaaggaatttccgaatcatt

SEQ ID NO: 580153 - DNA, 33 bp, Homo sapien
cctagacacattgtaactgtagtccgcggacca

SEQ ID NO: 580154 - DNA, 33 bp, Homo sapien
cctagacacattgtaattgtagtccgcggacca

SEQ ID NO: 580155 - DNA, 33 bp, Homo sapien
aggcccagttctgcccacagacatacattccct

SEQ ID NO: 580156 - DNA, 33 bp, Homo sapien
aggcccagttctgcccgcagacatacattccct

SEQ ID NO: 580157 - DNA, 33 bp, Homo sapien
ggaaacaaacacaccaaacacattcccgagctg

SEQ ID NO: 580158 - DNA, 33 bp, Homo sapien
ggaaacaaacacaccagacacattcccgagctg

SEQ ID NO: 580159 - DNA, 33 bp, Homo sapien
ggccacatgagtgaacaacagtggacacttgac

SEQ ID NO: 580160 - DNA, 33 bp, Homo sapien
ggccacatgagtgaacgacagtggacacttgac

SEQ ID NO: 580161 - DNA, 33 bp, Homo sapien
tttagagttatggatgcaaaacgcatggagcta

SEQ ID NO: 580162 - DNA, 33 bp, Homo sapien
tttagagttatggatgtaaaacgcatggagcta

SEQ ID NO: 580163 - DNA, 33 bp, Homo sapien
gccccatcttgtcgtacgatattaacacggctg

SEQ ID NO: 580164 - DNA, 33 bp, Homo sapien
gccccatcttgtcgtatgatattaacacggctg

SEQ ID NO: 580165 - DNA, 33 bp, Homo sapien
gcgaaacagaaactgccaggaattatccactct

SEQ ID NO: 580166 - DNA, 33 bp, Homo sapien
gcgaaacagaaactgctaggaattatccactct

SEQ ID NO: 580167 - DNA, 33 bp, Homo sapien
tgcagaaaggtcaatgaaccagaaatgattttt

SEQ ID NO: 580168 - DNA, 33 bp, Homo sapien
tgcagaaaggtcaatgcaccagaaatgattttt

SEQ ID NO: 580169 - DNA, 33 bp, Homo sapien
cagcaatatcctcacaaggcttcatggagccct

SEQ ID NO: 580170 - DNA, 33 bp, Homo sapien
cagcaatatcctcacacggcttcatggagccct

SEQ ID NO: 580171 - DNA, 33 bp, Homo sapien
gttggtttggaatatcacagtgttcatgtccat

SEQ ID NO: 580172 - DNA, 33 bp, Homo sapien
gttggtttggaatatctcagtgttcatgtccat

SEQ ID NO: 580173 - DNA, 33 bp, Homo sapien
gagggtttgaaactcaccctctcctcagcacgg

SEQ ID NO: 580174 - DNA, 33 bp, Homo sapien
gagggtttgaaactcatcctctcctcagcacgg

SEQ ID NO: 580175 - DNA, 33 bp, Homo sapien
cattgttagaaaagccagctacggtactgcctc

SEQ ID NO: 580176 - DNA, 33 bp, Homo sapien
cattgttagaaaagccggctacggtactgcctc

SEQ ID NO: 580177 - DNA, 33 bp, Homo sapien
tcccagtagcctaagtaaagagggaaaccattt

SEQ ID NO: 580178 - DNA, 33 bp, Homo sapien
tcccagtagcctaagtgaagagggaaaccattt

SEQ ID NO: 580179 - DNA, 33 bp, Homo sapien
ggtcacgatacggttacgcaaatggtgctggcc

SEQ ID NO: 580180 - DNA, 33 bp, Homo sapien
ggtcacgatacggttatgcaaatggtgctggcc

SEQ ID NO: 580181 - DNA, 33 bp, Homo sapien
cttggagtggaaaaacaggtccattagtggctt

SEQ ID NO: 580182 - DNA, 33 bp, Homo sapien
cttggagtggaaaaacgggtccattagtggctt

SEQ ID NO: 580183 - DNA, 33 bp, Homo sapien
cagaagggcggtaacaatggcagcaaccacgca

SEQ ID NO: 580184 - DNA, 33 bp, Homo sapien
cagaagggcggtaacagtggcagcaaccacgca

SEQ ID NO: 580185 - DNA, 33 bp, Homo sapien
gtgaccgcactcccataaagtccaaattcgggt

SEQ ID NO: 580186 - DNA, 33 bp, Homo sapien
gtgaccgcactcccatgaagtccaaattcgggt

SEQ ID NO: 580187 - DNA, 33 bp, Homo sapien
tcgcggtcctcaccaaagtcttcccgaatcaca

SEQ ID NO: 580188 - DNA, 33 bp, Homo sapien
tcgcggtcctcaccaacgtcttcccgaatcaca

SEQ ID NO: 580189 - DNA, 33 bp, Homo sapien
ctgtgtagaatggtgacgggcacagaacagatc

SEQ ID NO: 580190 - DNA, 33 bp, Homo sapien
ctgtgtagaatggtgatgggcacagaacagatc

SEQ ID NO: 580191 - DNA, 33 bp, Homo sapien
ctgggggtccgatttgcataagcagataaacta

SEQ ID NO: 580192 - DNA, 33 bp, Homo sapien
ctgggggtccgatttgtataagcagataaacta

SEQ ID NO: 580193 - DNA, 33 bp, Homo sapien
agaaagaccatgagaccacccagacccctcgag

SEQ ID NO: 580194 - DNA, 33 bp, Homo sapien
agaaagaccatgagacgacccagacccctcgag

SEQ ID NO: 580195 - DNA, 33 bp, Homo sapien
taatgcttccagttacacttaaaaatattttct

SEQ ID NO: 580196 - DNA, 33 bp, Homo sapien
taatgcttccagttacgcttaaaaatattttct

SEQ ID NO: 580197 - DNA, 33 bp, Homo sapien
ggcagagggtaaagaacgatctggttggcgaat

SEQ ID NO: 580198 - DNA, 33 bp, Homo sapien
ggcagagggtaaagaatgatctggttggcgaat

SEQ ID NO: 580199 - DNA, 33 bp, Homo sapien
ttcacaccaagcactacggcgaactgaagcagg

SEQ ID NO: 580200 - DNA, 33 bp, Homo sapien
ttcacaccaagcactatggcgaactgaagcagg

SEQ ID NO: 580201 - DNA, 33 bp, Homo sapien
taagcacccactttccaatactctaaagcatcc

SEQ ID NO: 580202 - DNA, 33 bp, Homo sapien
taagcacccactttccgatactctaaagcatcc

SEQ ID NO: 580203 - DNA, 33 bp, Homo sapien
gcaacagtcagcagacagaaagaactaagcaga

SEQ ID NO: 580204 - DNA, 33 bp, Homo sapien
gcaacagtcagcagacggaaagaactaagcaga

SEQ ID NO: 580205 - DNA, 33 bp, Homo sapien
aaggtctgtgcggtgaaaatatgagtgagggaa

SEQ ID NO: 580206 - DNA, 33 bp, Homo sapien
aaggtctgtgcggtgagaatatgagtgagggaa

SEQ ID NO: 580207 - DNA, 33 bp, Homo sapien
tccacgctcggcacaacccgcccgggctggcag

SEQ ID NO: 580208 - DNA, 33 bp, Homo sapien
tccacgctcggcacaatccgcccgggctggcag

SEQ ID NO: 580209 - DNA, 33 bp, Homo sapien
cttggtgtccactgaaatctttggtagcacaag

SEQ ID NO: 580210 - DNA, 33 bp, Homo sapien
cttggtgtccactgaagtctttggtagcacaag

SEQ ID NO: 580211 - DNA, 33 bp, Homo sapien
cacgggctgaaacaacaaagaacccgtctcggc

SEQ ID NO: 580212 - DNA, 33 bp, Homo sapien
cacgggctgaaacaacgaagaacccgtctcggc

SEQ ID NO: 580213 - DNA, 33 bp, Homo sapien
tgaatgctaataaaaggcatgaatatgttctca

SEQ ID NO: 580214 - DNA, 33 bp, Homo sapien
tgaatgctaataaaagtcatgaatatgttctca

SEQ ID NO: 580215 - DNA, 33 bp, Homo sapien
gtatttcggaaaatgcaagaaatacaaacatct

SEQ ID NO: 580216 - DNA, 33 bp, Homo sapien
gtatttcggaaaatgcgagaaatacaaacatct

SEQ ID NO: 580217 - DNA, 33 bp, Homo sapien
aacctgttctcataaaattaattggacaaatgt

SEQ ID NO: 580218 - DNA, 33 bp, Homo sapien
aacctgttctcataaagttaattggacaaatgt

SEQ ID NO: 580219 - DNA, 33 bp, Homo sapien
agctgagggatgtgacaaaggttcacgagtaag

SEQ ID NO: 580220 - DNA, 33 bp, Homo sapien
agctgagggatgtgacgaaggttcacgagtaag

SEQ ID NO: 580221 - DNA, 33 bp, Homo sapien
tgctcacgtgctaggagacatcgccaggagagg

SEQ ID NO: 580222 - DNA, 33 bp, Homo sapien
tgctcacgtgctaggatacatcgccaggagagg

SEQ ID NO: 580223 - DNA, 33 bp, Homo sapien
ggtcccaagtccaaagaaagctagaaaaggctg

SEQ ID NO: 580224 - DNA, 33 bp, Homo sapien
ggtcccaagtccaaagtaagctagaaaaggctg

SEQ ID NO: 580225 - DNA, 33 bp, Homo sapien
tgaggcaccgtctgaaacagggtcggagctgga

SEQ ID NO: 580226 - DNA, 33 bp, Homo sapien
tgaggcaccgtctgaagcagggtcggagctgga

SEQ ID NO: 580227 - DNA, 33 bp, Homo sapien
gagttggtgggaatgcaaaggctgcctctggtg

SEQ ID NO: 580228 - DNA, 33 bp, Homo sapien
gagttggtgggaatgcgaaggctgcctctggtg

SEQ ID NO: 580229 - DNA, 33 bp, Homo sapien
gcctgagtacgctgacaactgtgacacgtgtca

SEQ ID NO: 580230 - DNA, 33 bp, Homo sapien
gcctgagtacgctgacgactgtgacacgtgtca

SEQ ID NO: 580231 - DNA, 33 bp, Homo sapien
gcccttcttcccaccactcctgagcttttccag

SEQ ID NO: 580232 - DNA, 33 bp, Homo sapien
gcccttcttcccaccattcctgagcttttccag

SEQ ID NO: 580233 - DNA, 33 bp, Homo sapien
actatgttgagtgaaacgtccatggactctcag

SEQ ID NO: 580234 - DNA, 33 bp, Homo sapien
actatgttgagtgaaatgtccatggactctcag

SEQ ID NO: 580235 - DNA, 33 bp, Homo sapien
tcagccatgtctgaacaatgcagttttctggcc

SEQ ID NO: 580236 - DNA, 33 bp, Homo sapien
tcagccatgtctgaacgatgcagttttctggcc

SEQ ID NO: 580237 - DNA, 33 bp, Homo sapien
ttttaaggccaaatgacacacttttgagaattc

SEQ ID NO: 580238 - DNA, 33 bp, Homo sapien
ttttaaggccaaatgatacacttttgagaattc

SEQ ID NO: 580239 - DNA, 33 bp, Homo sapien
aaaagcagattcctgaacgtagcaaaaagaaaa

SEQ ID NO: 580240 - DNA, 33 bp, Homo sapien
aaaagcagattcctgagcgtagcaaaaagaaaa

SEQ ID NO: 580241 - DNA, 33 bp, Homo sapien
tttcccgggaaggagacgatgccgacggctggg

SEQ ID NO: 580242 - DNA, 33 bp, Homo sapien
tttcccgggaaggagatgatgccgacggctggg

SEQ ID NO: 580243 - DNA, 33 bp, Homo sapien
ttccgtggtacagagacgcgggaatgctgtaga

SEQ ID NO: 580244 - DNA, 33 bp, Homo sapien
ttccgtggtacagagatgcgggaatgctgtaga

SEQ ID NO: 580245 - DNA, 33 bp, Homo sapien
gatgcgtgactggcccaagttcctgcacgtggg

SEQ ID NO: 580246 - DNA, 33 bp, Homo sapien
gatgcgtgactggcccgagttcctgcacgtggg

SEQ ID NO: 580247 - DNA, 33 bp, Homo sapien
cccatctgtacctctgaagcatcacgtgtgtgg

SEQ ID NO: 580248 - DNA, 33 bp, Homo sapien
cccatctgtacctctggagcatcacgtgtgtgg

SEQ ID NO: 580249 - DNA, 33 bp, Homo sapien
gatcctgtgatgcactcaaagcccgttggtgac

SEQ ID NO: 580250 - DNA, 33 bp, Homo sapien
gatcctgtgatgcacttaaagcccgttggtgac

SEQ ID NO: 580251 - DNA, 33 bp, Homo sapien
gcccgttggtgactcacagctgtccacagactg

SEQ ID NO: 580252 - DNA, 33 bp, Homo sapien
gcccgttggtgactcatagctgtccacagactg

SEQ ID NO: 580253 - DNA, 33 bp, Homo sapien
tgggcctcagtggcaccactgtccgtcagaggt

SEQ ID NO: 580254 - DNA, 33 bp, Homo sapien
tgggcctcagtggcactactgtccgtcagaggt

SEQ ID NO: 580255 - DNA, 33 bp, Homo sapien
ggggctatgtttgttcccctgagcatggcaggt

SEQ ID NO: 580256 - DNA, 33 bp, Homo sapien
ggggctatgtttgttctcctgagcatggcaggt

SEQ ID NO: 580257 - DNA, 33 bp, Homo sapien
cagaaatagggacggcactagttctctaggtca

SEQ ID NO: 580258 - DNA, 33 bp, Homo sapien
cagaaatagggacggcgctagttctctaggtca

SEQ ID NO: 580259 - DNA, 33 bp, Homo sapien
agtgacgttgggcaccaataccaggtgtgccat

SEQ ID NO: 580260 - DNA, 33 bp, Homo sapien
agtgacgttgggcaccgataccaggtgtgccat

SEQ ID NO: 580261 - DNA, 33 bp, Homo sapien
gatccatgtgacacgcaatgggtctccagtgca

SEQ ID NO: 580262 - DNA, 33 bp, Homo sapien
gatccatgtgacacgcgatgggtctccagtgca

SEQ ID NO: 580263 - DNA, 33 bp, Homo sapien
ggctcaggagcttccaatcaaagtctcactctg

SEQ ID NO: 580264 - DNA, 33 bp, Homo sapien
ggctcaggagcttccattcaaagtctcactctg

SEQ ID NO: 580265 - DNA, 33 bp, Homo sapien
caggggcttgttcataacgctaccacgacgtga

SEQ ID NO: 580266 - DNA, 33 bp, Homo sapien
caggggcttgttcatagcgctaccacgacgtga

SEQ ID NO: 580267 - DNA, 33 bp, Homo sapien
gcgcagatctgcgagaagcccaacctgaacgcc

SEQ ID NO: 580268 - DNA, 33 bp, Homo sapien
gcgcagatctgcgagaggcccaacctgaacgcc

SEQ ID NO: 580269 - DNA, 33 bp, Homo sapien
ataggcaaagtcattgaacagacaattcacaga

SEQ ID NO: 580270 - DNA, 33 bp, Homo sapien
ataggcaaagtcattggacagacaattcacaga

SEQ ID NO: 580271 - DNA, 33 bp, Homo sapien
agggtggacagaagtcagaacctggcagttatg

SEQ ID NO: 580272 - DNA, 33 bp, Homo sapien
agggtggacagaagtcggaacctggcagttatg

SEQ ID NO: 580273 - DNA, 33 bp, Homo sapien
ctctgtacaattggaacgcgttttacttttctt

SEQ ID NO: 580274 - DNA, 33 bp, Homo sapien
ctctgtacaattggaatgcgttttacttttctt

SEQ ID NO: 580275 - DNA, 33 bp, Homo sapien
actccaaggagtctgagaattccaaattggccc

SEQ ID NO: 580276 - DNA, 33 bp, Homo sapien
actccaaggagtctgataattccaaattggccc

SEQ ID NO: 580277 - DNA, 33 bp, Homo sapien
accaccagcacgatgactacgtggaacattccc

SEQ ID NO: 580278 - DNA, 33 bp, Homo sapien
accaccagcacgatgattacgtggaacattccc

SEQ ID NO: 580279 - DNA, 33 bp, Homo sapien
acattcccatcacaccaaaactagttgtgtaac

SEQ ID NO: 580280 - DNA, 33 bp, Homo sapien
acattcccatcacaccgaaactagttgtgtaac

SEQ ID NO: 580281 - DNA, 33 bp, Homo sapien
ggggattgagtgtaaaaaggcccagggagggaa

SEQ ID NO: 580282 - DNA, 33 bp, Homo sapien
ggggattgagtgtaaagaggcccagggagggaa

SEQ ID NO: 580283 - DNA, 33 bp, Homo sapien
cagactcaaaatgctgcatcctgggtggtttca

SEQ ID NO: 580284 - DNA, 33 bp, Homo sapien
cagactcaaaatgctgtatcctgggtggtttca

SEQ ID NO: 580285 - DNA, 33 bp, Homo sapien
gctttattcataatagacgtgaacgggagacaa

SEQ ID NO: 580286 - DNA, 33 bp, Homo sapien
gctttattcataatagccgtgaacgggagacaa

SEQ ID NO: 580287 - DNA, 33 bp, Homo sapien
tcacagcactagcagcgatcgggcccaggaaaa

SEQ ID NO: 580288 - DNA, 33 bp, Homo sapien
tcacagcactagcagctatcgggcccaggaaaa

SEQ ID NO: 580289 - DNA, 33 bp, Homo sapien
tcctgggaacagtaacaccccagtaacactgag

SEQ ID NO: 580290 - DNA, 33 bp, Homo sapien
tcctgggaacagtaacgccccagtaacactgag

SEQ ID NO: 580291 - DNA, 33 bp, Homo sapien
cttaggaactctaaccccactccagtagaaaag

SEQ ID NO: 580292 - DNA, 33 bp, Homo sapien
cttaggaactctaaccgcactccagtagaaaag

SEQ ID NO: 580293 - DNA, 33 bp, Homo sapien
cattccctttcccctaaagcctgttgcatagga

SEQ ID NO: 580294 - DNA, 33 bp, Homo sapien
cattccctttcccctacagcctgttgcatagga

SEQ ID NO: 580295 - DNA, 33 bp, Homo sapien
acttctttcaagaaaacgcaccacctcttggaa

SEQ ID NO: 580296 - DNA, 33 bp, Homo sapien
acttctttcaagaaaatgcaccacctcttggaa

SEQ ID NO: 580297 - DNA, 33 bp, Homo sapien
cgccatgtttccgagaggttctcacagttctgg

SEQ ID NO: 580298 - DNA, 33 bp, Homo sapien
cgccatgtttccgagatgttctcacagttctgg

SEQ ID NO: 580299 - DNA, 33 bp, Homo sapien
gcaaggactgaagatacggcattgacaggacat

SEQ ID NO: 580300 - DNA, 33 bp, Homo sapien
gcaaggactgaagatatggcattgacaggacat

SEQ ID NO: 580301 - DNA, 33 bp, Homo sapien
tgtatcaggtgaccacaaaagcaacaccaaggg

SEQ ID NO: 580302 - DNA, 33 bp, Homo sapien
tgtatcaggtgaccacgaaagcaacaccaaggg

SEQ ID NO: 580303 - DNA, 33 bp, Homo sapien
atagactgatgaatcgcattgatcggaagctct

SEQ ID NO: 580304 - DNA, 33 bp, Homo sapien
atagactgatgaatcggattgatcggaagctct

SEQ ID NO: 580305 - DNA, 33 bp, Homo sapien
cacagggttggtgacccgaaaagagcgctgaat

SEQ ID NO: 580306 - DNA, 33 bp, Homo sapien
cacagggttggtgacctgaaaagagcgctgaat

SEQ ID NO: 580307 - DNA, 33 bp, Homo sapien
ggtctgtgagttttaacgatagtcacgtcacca

SEQ ID NO: 580308 - DNA, 33 bp, Homo sapien
ggtctgtgagttttaatgatagtcacgtcacca

SEQ ID NO: 580309 - DNA, 33 bp, Homo sapien
atgacaaccacagccacaactgcctttccttcc

SEQ ID NO: 580310 - DNA, 33 bp, Homo sapien
atgacaaccacagccataactgcctttccttcc

SEQ ID NO: 580311 - DNA, 33 bp, Homo sapien
ggggcgactcttctcacggcgaagtctggttgg

SEQ ID NO: 580312 - DNA, 33 bp, Homo sapien
ggggcgactcttctcatggcgaagtctggttgg

SEQ ID NO: 580313 - DNA, 33 bp, Homo sapien
tgcctgcccaagtcccagatgagaaagggggct

SEQ ID NO: 580314 - DNA, 33 bp, Homo sapien
tgcctgcccaagtcccggatgagaaagggggct

SEQ ID NO: 580315 - DNA, 33 bp, Homo sapien
agatgaggccacaacactcaaaacaggtaacac

SEQ ID NO: 580316 - DNA, 33 bp, Homo sapien
agatgaggccacaacagtcaaaacaggtaacac

SEQ ID NO: 580317 - DNA, 33 bp, Homo sapien
tccccaagcaactccgccagcaagctgccagat

SEQ ID NO: 580318 - DNA, 33 bp, Homo sapien
tccccaagcaactccgtcagcaagctgccagat

SEQ ID NO: 580319 - DNA, 33 bp, Homo sapien
agaaaaaaacaagaacacgcttatacaaatagg

SEQ ID NO: 580320 - DNA, 33 bp, Homo sapien
agaaaaaaacaagaacgcgcttatacaaatagg

SEQ ID NO: 580321 - DNA, 33 bp, Homo sapien
taaatagccaacatccacatgaacgaggtctaa

SEQ ID NO: 580322 - DNA, 33 bp, Homo sapien
taaatagccaacatccgcatgaacgaggtctaa

SEQ ID NO: 580323 - DNA, 33 bp, Homo sapien
ggacagactccaagcaactcgacctagaataaa

SEQ ID NO: 580324 - DNA, 33 bp, Homo sapien
ggacagactccaagcagctcgacctagaataaa

SEQ ID NO: 580325 - DNA, 33 bp, Homo sapien
gttgggatttacgaagaaagctcagtattaatc

SEQ ID NO: 580326 - DNA, 33 bp, Homo sapien
gttgggatttacgaaggaagctcagtattaatc

SEQ ID NO: 580327 - DNA, 33 bp, Homo sapien
aggatggaaatgtctaacctatgcctatcccac

SEQ ID NO: 580328 - DNA, 33 bp, Homo sapien
aggatggaaatgtctatcctatgcctatcccac

SEQ ID NO: 580329 - DNA, 33 bp, Homo sapien
gactcactagtaggaacggtgctaatgctgggg

SEQ ID NO: 580330 - DNA, 33 bp, Homo sapien
gactcactagtaggaatggtgctaatgctgggg

SEQ ID NO: 580331 - DNA, 33 bp, Homo sapien
tttctcagaaatgctaagaacattcactgtttg

SEQ ID NO: 580332 - DNA, 33 bp, Homo sapien
tttctcagaaatgctacgaacattcactgtttg

SEQ ID NO: 580333 - DNA, 33 bp, Homo sapien
aagcaagaagatacaacaaaggcatccatattg

SEQ ID NO: 580334 - DNA, 33 bp, Homo sapien
aagcaagaagatacaataaaggcatccatattg

SEQ ID NO: 580335 - DNA, 33 bp, Homo sapien
tttccaatcatagtgaaaaaagaagtgggagga

SEQ ID NO: 580336 - DNA, 33 bp, Homo sapien
tttccaatcatagtgacaaaagaagtgggagga

SEQ ID NO: 580337 - DNA, 33 bp, Homo sapien
gcgacttagttaacaaccctccaattccattat

SEQ ID NO: 580338 - DNA, 33 bp, Homo sapien
gcgacttagttaacaatcctccaattccattat

SEQ ID NO: 580339 - DNA, 33 bp, Homo sapien
atatctactaaagacacaaaaattagcccggta

SEQ ID NO: 580340 - DNA, 33 bp, Homo sapien
atatctactaaagacagaaaaattagcccggta

SEQ ID NO: 580341 - DNA, 33 bp, Homo sapien
tcagggctcctgtaccagccactctttcctccc

SEQ ID NO: 580342 - DNA, 33 bp, Homo sapien
tcagggctcctgtaccggccactctttcctccc

SEQ ID NO: 580343 - DNA, 33 bp, Homo sapien
tgttgatgacaggcagaaaagtcagacagggtt

SEQ ID NO: 580344 - DNA, 33 bp, Homo sapien
tgttgatgacaggcaggaaagtcagacagggtt

SEQ ID NO: 580345 - DNA, 33 bp, Homo sapien
gatctacagagtcaaacgtgaacagggaggcct

SEQ ID NO: 580346 - DNA, 33 bp, Homo sapien
gatctacagagtcaaatgtgaacagggaggcct

SEQ ID NO: 580347 - DNA, 33 bp, Homo sapien
ttgaacctgggaagccaaagttgcaatgagctg

SEQ ID NO: 580348 - DNA, 33 bp, Homo sapien
ttgaacctgggaagccgaagttgcaatgagctg

SEQ ID NO: 580349 - DNA, 33 bp, Homo sapien
tctgatggcttcccgcagcacttggaacaaaag

SEQ ID NO: 580350 - DNA, 33 bp, Homo sapien
tctgatggcttcccgcggcacttggaacaaaag

SEQ ID NO: 580351 - DNA, 33 bp, Homo sapien
tccatctatcctagccccctccttgtctaggag

SEQ ID NO: 580352 - DNA, 33 bp, Homo sapien
tccatctatcctagcctcctccttgtctaggag

SEQ ID NO: 580353 - DNA, 33 bp, Homo sapien
agaaaaataaatgttacgtgtgccagatactgg

SEQ ID NO: 580354 - DNA, 33 bp, Homo sapien
agaaaaataaatgttatgtgtgccagatactgg

SEQ ID NO: 580355 - DNA, 33 bp, Homo sapien
tacggttctttcctcacatgcagtttcttaatt

SEQ ID NO: 580356 - DNA, 33 bp, Homo sapien
tacggttctttcctcatatgcagtttcttaatt

SEQ ID NO: 580357 - DNA, 33 bp, Homo sapien
agactccacacccggcaactggatggcagacag

SEQ ID NO: 580358 - DNA, 33 bp, Homo sapien
agactccacacccggcgactggatggcagacag

SEQ ID NO: 580359 - DNA, 33 bp, Homo sapien
catgtcagaaagaaaaagcagtgtcagcacatg

SEQ ID NO: 580360 - DNA, 33 bp, Homo sapien
catgtcagaaagaaaaggcagtgtcagcacatg

SEQ ID NO: 580361 - DNA, 33 bp, Homo sapien
gattcgtagtttcttacgtgtctgtgtttatga

SEQ ID NO: 580362 - DNA, 33 bp, Homo sapien
gattcgtagtttcttatgtgtctgtgtttatga

SEQ ID NO: 580363 - DNA, 33 bp, Homo sapien
ggaagaatacctgagcaaaggaggagatacact

SEQ ID NO: 580364 - DNA, 33 bp, Homo sapien
ggaagaatacctgagcgaaggaggagatacact

SEQ ID NO: 580365 - DNA, 33 bp, Homo sapien
agggaggcaacaagagccggcaggacccgtgtt

SEQ ID NO: 580366 - DNA, 33 bp, Homo sapien
agggaggcaacaagagtcggcaggacccgtgtt

SEQ ID NO: 580367 - DNA, 33 bp, Homo sapien
aacccacaacaagctacggaagtacctatcagc

SEQ ID NO: 580368 - DNA, 33 bp, Homo sapien
aacccacaacaagctatggaagtacctatcagc

SEQ ID NO: 580369 - DNA, 33 bp, Homo sapien
gtttgaaggtggctataacacatccgccaatct

SEQ ID NO: 580370 - DNA, 33 bp, Homo sapien
gtttgaaggtggctatgacacatccgccaatct

SEQ ID NO: 580371 - DNA, 33 bp, Homo sapien
catttggcccgtgtggacaattccaggacgaag

SEQ ID NO: 580372 - DNA, 33 bp, Homo sapien
catttggcccgtgtgggcaattccaggacgaag

SEQ ID NO: 580373 - DNA, 33 bp, Homo sapien
ggtagatgtagagaagcctaaagaccatgtaac

SEQ ID NO: 580374 - DNA, 33 bp, Homo sapien
ggtagatgtagagaagtctaaagaccatgtaac

SEQ ID NO: 580375 - DNA, 33 bp, Homo sapien
attttcgttgagcggaaccttgctattccataa

SEQ ID NO: 580376 - DNA, 33 bp, Homo sapien
attttcgttgagcggatccttgctattccataa

SEQ ID NO: 580377 - DNA, 33 bp, Homo sapien
agccagcggcacccaccgaacccaccacacagg

SEQ ID NO: 580378 - DNA, 33 bp, Homo sapien
agccagcggcacccactgaacccaccacacagg

SEQ ID NO: 580379 - DNA, 33 bp, Homo sapien
cggtaactgcctggcgcagcacaagggttctct

SEQ ID NO: 580380 - DNA, 33 bp, Homo sapien
cggtaactgcctggcgtagcacaagggttctct

SEQ ID NO: 580381 - DNA, 33 bp, Homo sapien
gctgctgcagtctcgacggtcaaatgcagggcc

SEQ ID NO: 580382 - DNA, 33 bp, Homo sapien
gctgctgcagtctcgagggtcaaatgcagggcc

SEQ ID NO: 580383 - DNA, 33 bp, Homo sapien
ctctgctagaagaagaaagcgtgaggtcagctg

SEQ ID NO: 580384 - DNA, 33 bp, Homo sapien
ctctgctagaagaagacagcgtgaggtcagctg

SEQ ID NO: 580385 - DNA, 33 bp, Homo sapien
ccattcaccctgaagacgtgacattagcaagcc

SEQ ID NO: 580386 - DNA, 33 bp, Homo sapien
ccattcaccctgaagatgtgacattagcaagcc

SEQ ID NO: 580387 - DNA, 33 bp, Homo sapien
accctggtttgcagataaaactgagtgatcaca

SEQ ID NO: 580388 - DNA, 33 bp, Homo sapien
accctggtttgcagatgaaactgagtgatcaca

SEQ ID NO: 580389 - DNA, 33 bp, Homo sapien
ccgaaattctgacacacagtaatgcagcatgat

SEQ ID NO: 580390 - DNA, 33 bp, Homo sapien
ccgaaattctgacacagagtaatgcagcatgat

SEQ ID NO: 580391 - DNA, 33 bp, Homo sapien
caccacgcacctcgaggaacattaccttgtaat

SEQ ID NO: 580392 - DNA, 33 bp, Homo sapien
caccacgcacctcgagtaacattaccttgtaat

SEQ ID NO: 580393 - DNA, 33 bp, Homo sapien
ttaaaatgaggattaaaatgccagacacaagct

SEQ ID NO: 580394 - DNA, 33 bp, Homo sapien
ttaaaatgaggattaagatgccagacacaagct

SEQ ID NO: 580395 - DNA, 33 bp, Homo sapien
ccttccagtacgtccccagttggttctcttttg

SEQ ID NO: 580396 - DNA, 33 bp, Homo sapien
ccttccagtacgtccctagttggttctcttttg

SEQ ID NO: 580397 - DNA, 33 bp, Homo sapien
ctcaccactcatcaaccgggaccactgacccgg

SEQ ID NO: 580398 - DNA, 33 bp, Homo sapien
ctcaccactcatcaactgggaccactgacccgg

SEQ ID NO: 580399 - DNA, 33 bp, Homo sapien
aataaataaaaaataacgcagacatttgagata

SEQ ID NO: 580400 - DNA, 33 bp, Homo sapien
aataaataaaaaataatgcagacatttgagata

SEQ ID NO: 580401 - DNA, 33 bp, Homo sapien
catggcaaagcagggacgggggacttaaaagcc

SEQ ID NO: 580402 - DNA, 33 bp, Homo sapien
catggcaaagcagggatgggggacttaaaagcc

SEQ ID NO: 580403 - DNA, 33 bp, Homo sapien
tgtgagggtctcacacaatccatagggggttgg

SEQ ID NO: 580404 - DNA, 33 bp, Homo sapien
tgtgagggtctcacacgatccatagggggttgg

SEQ ID NO: 580405 - DNA, 33 bp, Homo sapien
cgcagtgtgtgacacacgtctgaacaagcacac

SEQ ID NO: 580406 - DNA, 33 bp, Homo sapien
cgcagtgtgtgacacatgtctgaacaagcacac

SEQ ID NO: 580407 - DNA, 33 bp, Homo sapien
ggtcacaatgaggtccagcaaactcaggctggc

SEQ ID NO: 580408 - DNA, 33 bp, Homo sapien
ggtcacaatgaggtccggcaaactcaggctggc

SEQ ID NO: 580409 - DNA, 33 bp, Homo sapien
ttctttggctttatgccgacctatatttccgaa

SEQ ID NO: 580410 - DNA, 33 bp, Homo sapien
ttctttggctttatgctgacctatatttccgaa

SEQ ID NO: 580411 - DNA, 33 bp, Homo sapien
tgcaggcaggataacacggtccatcccggggaa

SEQ ID NO: 580412 - DNA, 33 bp, Homo sapien
tgcaggcaggataacatggtccatcccggggaa

SEQ ID NO: 580413 - DNA, 33 bp, Homo sapien
ctatcaatttcttgaccatgtggatttttgaaa

SEQ ID NO: 580414 - DNA, 33 bp, Homo sapien
ctatcaatttcttgactatgtggatttttgaaa

SEQ ID NO: 580415 - DNA, 33 bp, Homo sapien
cagccgtgcagatgtcacagtactggccctgca

SEQ ID NO: 580416 - DNA, 33 bp, Homo sapien
cagccgtgcagatgtcgcagtactggccctgca

SEQ ID NO: 580417 - DNA, 33 bp, Homo sapien
ataggtgctatttggcaagactctaggacgcac

SEQ ID NO: 580418 - DNA, 33 bp, Homo sapien
ataggtgctatttggcgagactctaggacgcac

SEQ ID NO: 580419 - DNA, 33 bp, Homo sapien
gccagtttaaaacttacgctatctgcggggcca

SEQ ID NO: 580420 - DNA, 33 bp, Homo sapien
gccagtttaaaacttatgctatctgcggggcca

SEQ ID NO: 580421 - DNA, 33 bp, Homo sapien; identical to SEQ ID NO: 580419

SEQ ID NO: 580422 - DNA, 33 bp, Homo sapien; identical to SEQ ID NO: 580420

SEQ ID NO: 580423 - DNA, 33 bp, Homo sapien; identical to SEQ ID NO: 580419

SEQ ID NO: 580424 - DNA, 33 bp, Homo sapien; identical to SEQ ID NO: 580420

SEQ ID NO: 580425 - DNA, 33 bp, Homo sapien
tcaggcaccatcacacactccaatgcgcacggt

SEQ ID NO: 580426 - DNA, 33 bp, Homo sapien
tcaggcaccatcacacgctccaatgcgcacggt

SEQ ID NO: 580427 - DNA, 33 bp, Homo sapien
aaatagaatcaaacagcatttggctcttcgtgt

SEQ ID NO: 580428 - DNA, 33 bp, Homo sapien
aaatagaatcaaacagtatttggctcttcgtgt

SEQ ID NO: 580429 - DNA, 33 bp, Homo sapien
gctcagcagggtgttcacggccacactcgtgct

SEQ ID NO: 580430 - DNA, 33 bp, Homo sapien
gctcagcagggtgttcccggccacactcgtgct

SEQ ID NO: 580431 - DNA, 33 bp, Homo sapien
caacagaaattcattcacccagctatggaggcc

SEQ ID NO: 580432 - DNA, 33 bp, Homo sapien
caacagaaattcattctcccagctatggaggcc

SEQ ID NO: 580433 - DNA, 33 bp, Homo sapien
atccagaaaggcactccatagacattcgtgaga

SEQ ID NO: 580434 - DNA, 33 bp, Homo sapien
atccagaaaggcactctatagacattcgtgaga

SEQ ID NO: 580435 - DNA, 33 bp, Homo sapien
tccaccttcccaggccgataacttccaagctat

SEQ ID NO: 580436 - DNA, 33 bp, Homo sapien
tccaccttcccaggcctataacttccaagctat

SEQ ID NO: 580437 - DNA, 33 bp, Homo sapien
atctcatccgaggttacgtcttgggaatgctcc

SEQ ID NO: 580438 - DNA, 33 bp, Homo sapien
atctcatccgaggttatgtcttgggaatgctcc

SEQ ID NO: 580439 - DNA, 33 bp, Homo sapien
gaagggaggctaaaaaggaagagcaatgaggga

SEQ ID NO: 580440 - DNA, 33 bp, Homo sapien
gaagggaggctaaaaatgaagagcaatgaggga

SEQ ID NO: 580441 - DNA, 33 bp, Homo sapien
tgcacctgcccttccccgaggacggtgttagat

SEQ ID NO: 580442 - DNA, 33 bp, Homo sapien
tgcacctgcccttccctgaggacggtgttagat

SEQ ID NO: 580443 - DNA, 33 bp, Homo sapien
agtcccttgtacaaaaatctccatctcagactc

SEQ ID NO: 580444 - DNA, 33 bp, Homo sapien
agtcccttgtacaaaagtctccatctcagactc

SEQ ID NO: 580445 - DNA, 33 bp, Homo sapien
ccttgagctacatgcaactttaaaacacacatg

SEQ ID NO: 580446 - DNA, 33 bp, Homo sapien
ccttgagctacatgcagctttaaaacacacatg

SEQ ID NO: 580447 - DNA, 33 bp, Homo sapien
atacattacacttgacaccatgttagctccact

SEQ ID NO: 580448 - DNA, 33 bp, Homo sapien
atacattacacttgacgccatgttagctccact

SEQ ID NO: 580449 - DNA, 33 bp, Homo sapien
gcggggcagcttcaggaattcatccgccgtcac

SEQ ID NO: 580450 - DNA, 33 bp, Homo sapien
gcggggcagcttcaggtattcatccgccgtcac

SEQ ID NO: 580451 - DNA, 33 bp, Homo sapien
ctctggctatgaagaaagaaagcatccagacac

SEQ ID NO: 580452 - DNA, 33 bp, Homo sapien
ctctggctatgaagaaggaaagcatccagacac

SEQ ID NO: 580453 - DNA, 33 bp, Homo sapien
taggcatcctgggtcaatccgtctggcagccct

SEQ ID NO: 580454 - DNA, 33 bp, Homo sapien
taggcatcctgggtcagtccgtctggcagccct

SEQ ID NO: 580455 - DNA, 33 bp, Homo sapien
acatgtatgtgcattaagtgtgggggcacagag

SEQ ID NO: 580456 - DNA, 33 bp, Homo sapien
acatgtatgtgcattaggtgtgggggcacagag

SEQ ID NO: 580457 - DNA, 33 bp, Homo sapien
ccgcttcctccagatcacagcctggacaggccg

SEQ ID NO: 580458 - DNA, 33 bp, Homo sapien
ccgcttcctccagatcgcagcctggacaggccg

SEQ ID NO: 580459 - DNA, 33 bp, Homo sapien
gactagagctccgacacatgaattattaatgcc

SEQ ID NO: 580460 - DNA, 33 bp, Homo sapien
gactagagctccgacagatgaattattaatgcc

SEQ ID NO: 580461 - DNA, 33 bp, Homo sapien
gggctccattctatgacgacaccattggcctgc

SEQ ID NO: 580462 - DNA, 33 bp, Homo sapien
gggctccattctatgatgacaccattggcctgc

SEQ ID NO: 580463 - DNA, 33 bp, Homo sapien
tttaagactcttctgcactgttgtgtgtttcca

SEQ ID NO: 580464 - DNA, 33 bp, Homo sapien
tttaagactcttctgcgctgttgtgtgtttcca

SEQ ID NO: 580465 - DNA, 33 bp, Homo sapien
caggtgcgtacgacgaagtgcctctgtcccagt

SEQ ID NO: 580466 - DNA, 33 bp, Homo sapien
caggtgcgtacgacgaggtgcctctgtcccagt

SEQ ID NO: 580467 - DNA, 33 bp, Homo sapien
acgtattcaaattcccacgtccgccaataaagt

SEQ ID NO: 580468 - DNA, 33 bp, Homo sapien
acgtattcaaattcccgcgtccgccaataaagt

SEQ ID NO: 580469 - DNA, 33 bp, Homo sapien
gatgccatgaagatacagtacgtgtccaattag

SEQ ID NO: 580470 - DNA, 33 bp, Homo sapien
gatgccatgaagatacggtacgtgtccaattag

SEQ ID NO: 580471 - DNA, 33 bp, Homo sapien
ccttccgggatttcacacccgaattatgtaaca

SEQ ID NO: 580472 - DNA, 33 bp, Homo sapien
ccttccgggatttcacgcccgaattatgtaaca

SEQ ID NO: 580473 - DNA, 33 bp, Homo sapien
cagcagcgggagcaaacggatctcagaggacag

SEQ ID NO: 580474 - DNA, 33 bp, Homo sapien
cagcagcgggagcaaatggatctcagaggacag

SEQ ID NO: 580475 - DNA, 33 bp, Homo sapien
cagcactcaacacctaacccctgctgtcactgt

SEQ ID NO: 580476 - DNA, 33 bp, Homo sapien
cagcactcaacacctagcccctgctgtcactgt

SEQ ID NO: 580477 - DNA, 33 bp, Homo sapien
ttggatctatgtaggcccccaactgattggacg

SEQ ID NO: 580478 - DNA, 33 bp, Homo sapien
ttggatctatgtaggctcccaactgattggacg

SEQ ID NO: 580479 - DNA, 33 bp, Homo sapien
ggctgcttcacagctacctaagagtaaagatct

SEQ ID NO: 580480 - DNA, 33 bp, Homo sapien
ggctgcttcacagctatctaagagtaaagatct

SEQ ID NO: 580481 - DNA, 33 bp, Homo sapien
gcattcctgcactaacagcaactctacggtaag

SEQ ID NO: 580482 - DNA, 33 bp, Homo sapien
gcattcctgcactaacggcaactctacggtaag

SEQ ID NO: 580483 - DNA, 33 bp, Homo sapien
ggaactggtccaacaaccagaaaatttgacgtt

SEQ ID NO: 580484 - DNA, 33 bp, Homo sapien
ggaactggtccaacaatcagaaaatttgacgtt

SEQ ID NO: 580485 - DNA, 33 bp, Homo sapien
ctgtctgtcccactaccggtgttagcttgtcag

SEQ ID NO: 580486 - DNA, 33 bp, Homo sapien
ctgtctgtcccactactggtgttagcttgtcag

SEQ ID NO: 580487 - DNA, 33 bp, Homo sapien
gcttcagggtccatccacggcctcgagcctcca

SEQ ID NO: 580488 - DNA, 33 bp, Homo sapien
gcttcagggtccatccgcggcctcgagcctcca

SEQ ID NO: 580489 - DNA, 33 bp, Homo sapien
gagtaatcgctccctacggttcatcttttgtgt

SEQ ID NO: 580490 - DNA, 33 bp, Homo sapien
gagtaatcgctccctatggttcatcttttgtgt

SEQ ID NO: 580491 - DNA, 33 bp, Homo sapien
caggtgcccccaccgacagtgatggaaaagccc

SEQ ID NO: 580492 - DNA, 33 bp, Homo sapien
caggtgcccccaccgagagtgatggaaaagccc

SEQ ID NO: 580493 - DNA, 33 bp, Homo sapien
ttgccgtgctgaatacaagaggcaactgtaacg

SEQ ID NO: 580494 - DNA, 33 bp, Homo sapien
ttgccgtgctgaatacgagaggcaactgtaacg

SEQ ID NO: 580495 - DNA, 33 bp, Homo sapien
cctccaagctgtagacacagggctggtaaacag

SEQ ID NO: 580496 - DNA, 33 bp, Homo sapien
cctccaagctgtagacgcagggctggtaaacag

SEQ ID NO: 580497 - DNA, 33 bp, Homo sapien
acttctcagctgggggaaggaaggctcgtttcc

SEQ ID NO: 580498 - DNA, 33 bp, Homo sapien
acttctcagctggggggaggaaggctcgtttcc

SEQ ID NO: 580499 - DNA, 33 bp, Homo sapien
tgaactgtcaggccccaaattggaagccagtag

SEQ ID NO: 580500 - DNA, 33 bp, Homo sapien
tgaactgtcaggccccgaattggaagccagtag

SEQ ID NO: 580501 - DNA, 33 bp, Homo sapien
tggtttctactctgaacgctcctgaacagccct

SEQ ID NO: 580502 - DNA, 33 bp, Homo sapien
tggtttctactctgaatgctcctgaacagccct

SEQ ID NO: 580503 - DNA, 33 bp, Homo sapien
ccacaggacctgccgaaatcacaccttctctct

SEQ ID NO: 580504 - DNA, 33 bp, Homo sapien
ccacaggacctgccgagatcacaccttctctct

SEQ ID NO: 580505 - DNA, 33 bp, Homo sapien
ttcccgttgtcttaaaccacgcagtccaccaac

SEQ ID NO: 580506 - DNA, 33 bp, Homo sapien
ttcccgttgtcttaaatcacgcagtccaccaac

SEQ ID NO: 580507 - DNA, 33 bp, Homo sapien
ctgtaccttgatcaaacttgcactttacaggat

SEQ ID NO: 580508 - DNA, 33 bp, Homo sapien
ctgtaccttgatcaaatttgcactttacaggat

SEQ ID NO: 580509 - DNA, 33 bp, Homo sapien
caacagtaggatccagccctgagcttctcaagc

SEQ ID NO: 580510 - DNA, 33 bp, Homo sapien
caacagtaggatccagtcctgagcttctcaagc

SEQ ID NO: 580511 - DNA, 33 bp, Homo sapien
agaatgcaatgacaaccgagagtggccatctcc

SEQ ID NO: 580512 - DNA, 33 bp, Homo sapien
agaatgcaatgacaactgagagtggccatctcc

SEQ ID NO: 580513 - DNA, 33 bp, Homo sapien
aagatgctgctcattcaacctgcgtcccgggtc

SEQ ID NO: 580514 - DNA, 33 bp, Homo sapien
aagatgctgctcattcgacctgcgtcccgggtc

SEQ ID NO: 580515 - DNA, 33 bp, Homo sapien
gagaaaccttgcccacaaagctccacgtccctc

SEQ ID NO: 580516 - DNA, 33 bp, Homo sapien
gagaaaccttgcccacgaagctccacgtccctc

SEQ ID NO: 580517 - DNA, 33 bp, Homo sapien
aggacggacggtgttccaaggaggatctttaaa

SEQ ID NO: 580518 - DNA, 33 bp, Homo sapien
aggacggacggtgttcgaaggaggatctttaaa

SEQ ID NO: 580519 - DNA, 33 bp, Homo sapien
ggggcagaaacgtggacgtgttagaggcacaga

SEQ ID NO: 580520 - DNA, 33 bp, Homo sapien
ggggcagaaacgtggatgtgttagaggcacaga

SEQ ID NO: 580521 - DNA, 33 bp, Homo sapien
tcccagctacacactacgaaaatgcccagctgg

SEQ ID NO: 580522 - DNA, 33 bp, Homo sapien
tcccagctacacactaggaaaatgcccagctgg

SEQ ID NO: 580523 - DNA, 33 bp, Homo sapien
gaagaaggctttcagaaaaaacaaggaggaggc

SEQ ID NO: 580524 - DNA, 33 bp, Homo sapien
gaagaaggctttcagagaaaacaaggaggaggc

SEQ ID NO: 580525 - DNA, 33 bp, Homo sapien
cacttgaggttctggaaaacgctgagccgttgg

SEQ ID NO: 580526 - DNA, 33 bp, Homo sapien
cacttgaggttctggacaacgctgagccgttgg

SEQ ID NO: 580527 - DNA, 33 bp, Homo sapien
gggatgtaaaatcccaaagtaggcacgggtggc

SEQ ID NO: 580528 - DNA, 33 bp, Homo sapien
gggatgtaaaatcccagagtaggcacgggtggc

SEQ ID NO: 580529 - DNA, 33 bp, Homo sapien
caactataaaattgtaaacgatgtatcaggcag

SEQ ID NO: 580530 - DNA, 33 bp, Homo sapien
caactataaaattgtacacgatgtatcaggcag

SEQ ID NO: 580531 - DNA, 33 bp, Homo sapien
tggcttcaggtgaacacgctgaccccctgggtg

SEQ ID NO: 580532 - DNA, 33 bp, Homo sapien
tggcttcaggtgaacatgctgaccccctgggtg

SEQ ID NO: 580533 - DNA, 33 bp, Homo sapien
tgtattcctggcttgtaaaaggtttttctcaca

SEQ ID NO: 580534 - DNA, 33 bp, Homo sapien
tgtattcctggcttgtgaaaggtttttctcaca

SEQ ID NO: 580535 - DNA, 33 bp, Homo sapien
taggttttaatcttctcaccatgtggaattttt

SEQ ID NO: 580536 - DNA, 33 bp, Homo sapien
taggttttaatcttcttaccatgtggaattttt

SEQ ID NO: 580537 - DNA, 33 bp, Homo sapien
gccacatggcctcaacagtccaagtcaggatgg

SEQ ID NO: 580538 - DNA, 33 bp, Homo sapien
gccacatggcctcaacggtccaagtcaggatgg

SEQ ID NO: 580539 - DNA, 33 bp, Homo sapien
gcctgagccacaagagaccggtgacagcagagt

SEQ ID NO: 580540 - DNA, 33 bp, Homo sapien
gcctgagccacaagaggccggtgacagcagagt

SEQ ID NO: 580541 - DNA, 33 bp, Homo sapien
tgaaatactcagaacaccctgaatgaatgaatg

SEQ ID NO: 580542 - DNA, 33 bp, Homo sapien
tgaaatactcagaacatcctgaatgaatgaatg

SEQ ID NO: 580543 - DNA, 33 bp, Homo sapien
agtcctggacatgcgcagagggagggtgtgcac

SEQ ID NO: 580544 - DNA, 33 bp, Homo sapien
agtcctggacatgcgcggagggagggtgtgcac

SEQ ID NO: 580545 - DNA, 33 bp, Homo sapien
aaaagctggagtagacaggacagaaaacagggt

SEQ ID NO: 580546 - DNA, 33 bp, Homo sapien
aaaagctggagtagacgggacagaaaacagggt

SEQ ID NO: 580547 - DNA, 33 bp, Homo sapien
cacaaaaggcgaggacacaatctctcccctgag

SEQ ID NO: 580548 - DNA, 33 bp, Homo sapien
cacaaaaggcgaggactcaatctctcccctgag

SEQ ID NO: 580549 - DNA, 33 bp, Homo sapien
ctctctgggtctcggacgcccacaccgcagtgt

SEQ ID NO: 580550 - DNA, 33 bp, Homo sapien
ctctctgggtctcggatgcccacaccgcagtgt

SEQ ID NO: 580551 - DNA, 33 bp, Homo sapien
caagtgatcagtgaagaccttttaaagccgccc

SEQ ID NO: 580552 - DNA, 33 bp, Homo sapien
caagtgatcagtgaaggccttttaaagccgccc

SEQ ID NO: 580553 - DNA, 33 bp, Homo sapien
aaacacccaggatggaaacattacacttgaaaa

SEQ ID NO: 580554 - DNA, 33 bp, Homo sapien
aaacacccaggatggagacattacacttgaaaa

SEQ ID NO: 580555 - DNA, 33 bp, Homo sapien
ctgtggtgagtgtcacacatcatttcacaccgc

SEQ ID NO: 580556 - DNA, 33 bp, Homo sapien
ctgtggtgagtgtcacgcatcatttcacaccgc

SEQ ID NO: 580557 - DNA, 33 bp, Homo sapien
cggcctgggcccttgaccccaagaggctggagt

SEQ ID NO: 580558 - DNA, 33 bp, Homo sapien
cggcctgggcccttgatcccaagaggctggagt

SEQ ID NO: 580559 - DNA, 33 bp, Homo sapien
gctggcactgtgtgacaggcgagcgggttaact

SEQ ID NO: 580560 - DNA, 33 bp, Homo sapien
gctggcactgtgtgacgggcgagcgggttaact

SEQ ID NO: 580561 - DNA, 33 bp, Homo sapien
ggagctgggcattttacctgaagtggtaccagg

SEQ ID NO: 580562 - DNA, 33 bp, Homo sapien
ggagctgggcattttatctgaagtggtaccagg

SEQ ID NO: 580563 - DNA, 33 bp, Homo sapien
tcagtgttcattcctcaagattggcgtggaggc

SEQ ID NO: 580564 - DNA, 33 bp, Homo sapien
tcagtgttcattcctcgagattggcgtggaggc

SEQ ID NO: 580565 - DNA, 33 bp, Homo sapien
gccactgctttccagccaaagtgagcccctagc

SEQ ID NO: 580566 - DNA, 33 bp, Homo sapien
gccactgctttccagctaaagtgagcccctagc

SEQ ID NO: 580567 - DNA, 33 bp, Homo sapien
aaatggaaatattcaacgtatgcacaggtcaat

SEQ ID NO: 580568 - DNA, 33 bp, Homo sapien
aaatggaaatattcaatgtatgcacaggtcaat

SEQ ID NO: 580569 - DNA, 33 bp, Homo sapien
agctcaggtggccagaagtaaggaggcataaac

SEQ ID NO: 580570 - DNA, 33 bp, Homo sapien
agctcaggtggccagaggtaaggaggcataaac

SEQ ID NO: 580571 - DNA, 33 bp, Homo sapien
cagtggccatgttcaaaaacagaatgaaaatcc

SEQ ID NO: 580572 - DNA, 33 bp, Homo sapien
cagtggccatgttcaagaacagaatgaaaatcc

SEQ ID NO: 580573 - DNA, 33 bp, Homo sapien
ttgcccatcgtggtcacactggaggatggcaaa

SEQ ID NO: 580574 - DNA, 33 bp, Homo sapien
ttgcccatcgtggtcagactggaggatggcaaa

SEQ ID NO: 580575 - DNA, 33 bp, Homo sapien
taaacaatatggtataacaagtattcatttagc

SEQ ID NO: 580576 - DNA, 33 bp, Homo sapien
taaacaatatggtatatcaagtattcatttagc

SEQ ID NO: 580577 - DNA, 33 bp, Homo sapien
ggtctctgctttctcactgacgtgtttaaacct

SEQ ID NO: 580578 - DNA, 33 bp, Homo sapien
ggtctctgctttctcattgacgtgtttaaacct

SEQ ID NO: 580579 - DNA, 33 bp, Homo sapien
agatgtcttcacgagcgaatcctactaaacatt

SEQ ID NO: 580580 - DNA, 33 bp, Homo sapien
agatgtcttcacgagctaatcctactaaacatt

SEQ ID NO: 580581 - DNA, 33 bp, Homo sapien
tctatgactgccttaaagtaagtccttatctcc

SEQ ID NO: 580582 - DNA, 33 bp, Homo sapien
tctatgactgccttaacgtaagtccttatctcc

SEQ ID NO: 580583 - DNA, 33 bp, Homo sapien
aaaatttagatgcagagagaaaaagattaagga

SEQ ID NO: 580584 - DNA, 33 bp, Homo sapien
aaaatttagatgcagatagaaaaagattaagga

SEQ ID NO: 580585 - DNA, 33 bp, Homo sapien
aagattaaggaaaataccaaattaacgacagca

SEQ ID NO: 580586 - DNA, 33 bp, Homo sapien
aagattaaggaaaatatcaaattaacgacagca

SEQ ID NO: 580587 - DNA, 33 bp, Homo sapien
tgcactagaaaccttgaagtgttttaatatcac

SEQ ID NO: 580588 - DNA, 33 bp, Homo sapien
tgcactagaaaccttggagtgttttaatatcac

SEQ ID NO: 580589 - DNA, 33 bp, Homo sapien
taatgatgtttaacgcgcaccttgttgcaagtt

SEQ ID NO: 580590 - DNA, 33 bp, Homo sapien
taatgatgtttaacgctcaccttgttgcaagtt

SEQ ID NO: 580591 - DNA, 33 bp, Homo sapien
ttgctttgaactattacgttgtgtataacttca

SEQ ID NO: 580592 - DNA, 33 bp, Homo sapien
ttgctttgaactattaggttgtgtataacttca

SEQ ID NO: 580593 - DNA, 33 bp, Homo sapien
gttttggaatactcaaagctttccttggtcagt

SEQ ID NO: 580594 - DNA, 33 bp, Homo sapien
gttttggaatactcaaggctttccttggtcagt

SEQ ID NO: 580595 - DNA, 33 bp, Homo sapien
cacgtggacagatggacgttccactcaactgca

SEQ ID NO: 580596 - DNA, 33 bp, Homo sapien
cacgtggacagatggatgttccactcaactgca

SEQ ID NO: 580597 - DNA, 33 bp, Homo sapien
ccaagatctcccacaccagtaatttaaccttta

SEQ ID NO: 580598 - DNA, 33 bp, Homo sapien
ccaagatctcccacacgagtaatttaaccttta

SEQ ID NO: 580599 - DNA, 33 bp, Homo sapien
gggatgaagagaatacaaatacttaccagagcc

SEQ ID NO: 580600 - DNA, 33 bp, Homo sapien
gggatgaagagaatacgaatacttaccagagcc

SEQ ID NO: 580601 - DNA, 33 bp, Homo sapien
cagatgtggcctctgacagcagcgcagcatgag

SEQ ID NO: 580602 - DNA, 33 bp, Homo sapien
cagatgtggcctctgatagcagcgcagcatgag

SEQ ID NO: 580603 - DNA, 33 bp, Homo sapien
gtttgtccgctgagaccagcattcagcagtcgg

SEQ ID NO: 580604 - DNA, 33 bp, Homo sapien
gtttgtccgctgagacgagcattcagcagtcgg

SEQ ID NO: 580605 - DNA, 33 bp, Homo sapien
attgttctctatttaacggctggacataaagtc

SEQ ID NO: 580606 - DNA, 33 bp, Homo sapien
attgttctctatttaatggctggacataaagtc

SEQ ID NO: 580607 - DNA, 33 bp, Homo sapien
tgccacacttgcggcacgaggtggatttcttca

SEQ ID NO: 580608 - DNA, 33 bp, Homo sapien
tgccacacttgcggcatgaggtggatttcttca

SEQ ID NO: 580609 - DNA, 33 bp, Homo sapien
acggggtatatagcaaagttatgtgaatatacc

SEQ ID NO: 580610 - DNA, 33 bp, Homo sapien
acggggtatatagcaaggttatgtgaatatacc

SEQ ID NO: 580611 - DNA, 33 bp, Homo sapien
ttctattctgatactacgcgtgttgttttttac

SEQ ID NO: 580612 - DNA, 33 bp, Homo sapien
ttctattctgatactatgcgtgttgttttttac

SEQ ID NO: 580613 - DNA, 33 bp, Homo sapien
catttaaagtcctgtacgaaccataacctgctg

SEQ ID NO: 580614 - DNA, 33 bp, Homo sapien
catttaaagtcctgtatgaaccataacctgctg

SEQ ID NO: 580615 - DNA, 33 bp, Homo sapien
aggcgagcagcaaaccagagagtgtgggtgccg

SEQ ID NO: 580616 - DNA, 33 bp, Homo sapien
aggcgagcagcaaaccggagagtgtgggtgccg

SEQ ID NO: 580617 - DNA, 33 bp, Homo sapien
agaacccggaggcttcccatgccagatcctgag

SEQ ID NO: 580618 - DNA, 33 bp, Homo sapien
agaacccggaggcttctcatgccagatcctgag

SEQ ID NO: 580619 - DNA, 33 bp, Homo sapien
acatgacgatggataacagcagcctggcctcgc

SEQ ID NO: 580620 - DNA, 33 bp, Homo sapien
acatgacgatggataagagcagcctggcctcgc

SEQ ID NO: 580621 - DNA, 33 bp, Homo sapien
gacggccaccaccagacgcagaaagaggcaagg

SEQ ID NO: 580622 - DNA, 33 bp, Homo sapien
gacggccaccaccagatgcagaaagaggcaagg

SEQ ID NO: 580623 - DNA, 33 bp, Homo sapien
ctaccactcaggccaccgcgggtattttcttct

SEQ ID NO: 580624 - DNA, 33 bp, Homo sapien
ctaccactcaggccactgcgggtattttcttct

SEQ ID NO: 580625 - DNA, 33 bp, Homo sapien
gttcacaggtcaagacaggggacaaaagtgacc

SEQ ID NO: 580626 - DNA, 33 bp, Homo sapien
gttcacaggtcaagacgggggacaaaagtgacc

SEQ ID NO: 580627 - DNA, 33 bp, Homo sapien
ccatcctgtggacaaacggacgatccaatccag

SEQ ID NO: 580628 - DNA, 33 bp, Homo sapien
ccatcctgtggacaaatggacgatccaatccag

SEQ ID NO: 580629 - DNA, 33 bp, Homo sapien
gggtagttgttattcacggagacagggtttctg

SEQ ID NO: 580630 - DNA, 33 bp, Homo sapien
gggtagttgttattcatggagacagggtttctg

SEQ ID NO: 580631 - DNA, 33 bp, Homo sapien
agtcactcacactgagaacattttcacgaggcg

SEQ ID NO: 580632 - DNA, 33 bp, Homo sapien
agtcactcacactgaggacattttcacgaggcg

SEQ ID NO: 580633 - DNA, 33 bp, Homo sapien
tctgatgcacattcccgcttgcagtttggtttt

SEQ ID NO: 580634 - DNA, 33 bp, Homo sapien
tctgatgcacattccctcttgcagtttggtttt

SEQ ID NO: 580635 - DNA, 33 bp, Homo sapien
ggcgtattggctgacacgtgtaatccaacactg

SEQ ID NO: 580636 - DNA, 33 bp, Homo sapien
ggcgtattggctgacatgtgtaatccaacactg

SEQ ID NO: 580637 - DNA, 33 bp, Homo sapien
ccacaggatatggcaaaatgtgaaactcagaaa

SEQ ID NO: 580638 - DNA, 33 bp, Homo sapien
ccacaggatatggcaacatgtgaaactcagaaa

SEQ ID NO: 580639 - DNA, 33 bp, Homo sapien
tgcgggaccaatctccaagacgtgagttggcac

SEQ ID NO: 580640 - DNA, 33 bp, Homo sapien
tgcgggaccaatctccgagacgtgagttggcac

SEQ ID NO: 580641 - DNA, 33 bp, Homo sapien
ttcatactcctggagagaactgggaaatgcccc

SEQ ID NO: 580642 - DNA, 33 bp, Homo sapien
ttcatactcctggagataactgggaaatgcccc

SEQ ID NO: 580643 - DNA, 33 bp, Homo sapien
tagaggaagtgagtcaagtgagaagaagttaag

SEQ ID NO: 580644 - DNA, 33 bp, Homo sapien
tagaggaagtgagtcaggtgagaagaagttaag

SEQ ID NO: 580645 - DNA, 33 bp, Homo sapien
gagccctgatacccgcaaggcaccgagaaggga

SEQ ID NO: 580646 - DNA, 33 bp, Homo sapien
gagccctgatacccgccaggcaccgagaaggga

SEQ ID NO: 580647 - DNA, 33 bp, Homo sapien
acccatttttggacaccgggggcttcaatatct

SEQ ID NO: 580648 - DNA, 33 bp, Homo sapien
acccatttttggacactgggggcttcaatatct

SEQ ID NO: 580649 - DNA, 33 bp, Homo sapien
acctcagtttaagggcagcaaagctgtgagcca

SEQ ID NO: 580650 - DNA, 33 bp, Homo sapien
acctcagtttaagggcggcaaagctgtgagcca

SEQ ID NO: 580651 - DNA, 33 bp, Homo sapien
aggggccaaagaaggcaaaagcagacaacgggt

SEQ ID NO: 580652 - DNA, 33 bp, Homo sapien
aggggccaaagaaggcgaaagcagacaacgggt

SEQ ID NO: 580653 - DNA, 33 bp, Homo sapien
atcagtgctggacaaaagaccatctcatggaaa

SEQ ID NO: 580654 - DNA, 33 bp, Homo sapien
atcagtgctggacaaaggaccatctcatggaaa

SEQ ID NO: 580655 - DNA, 33 bp, Homo sapien
gtctgtctggatgaccagccaccacgcagacag

SEQ ID NO: 580656 - DNA, 33 bp, Homo sapien
gtctgtctggatgaccggccaccacgcagacag

SEQ ID NO: 580657 - DNA, 33 bp, Homo sapien
gcggttctgaagtggcagcaccatgcacagccc

SEQ ID NO: 580658 - DNA, 33 bp, Homo sapien
gcggttctgaagtggccgcaccatgcacagccc

SEQ ID NO: 580659 - DNA, 33 bp, Homo sapien
atttgcatataagcgcaaatgccccctgaaaac

SEQ ID NO: 580660 - DNA, 33 bp, Homo sapien
atttgcatataagcgcgaatgccccctgaaaac

SEQ ID NO: 580661 - DNA, 33 bp, Homo sapien
ggaatatcatatcacaagagaaagtgcaaaagt

SEQ ID NO: 580662 - DNA, 33 bp, Homo sapien
ggaatatcatatcacaggagaaagtgcaaaagt

SEQ ID NO: 580663 - DNA, 33 bp, Homo sapien
ttgattgggcctttccacctctctgtagccgtt

SEQ ID NO: 580664 - DNA, 33 bp, Homo sapien
ttgattgggcctttccgcctctctgtagccgtt

SEQ ID NO: 580665 - DNA, 33 bp, Homo sapien
taggatttttgacttacggtgggttcatccaga

SEQ ID NO: 580666 - DNA, 33 bp, Homo sapien
taggatttttgacttatggtgggttcatccaga

SEQ ID NO: 580667 - DNA, 33 bp, Homo sapien
cccatctgttcactcacatcctcaaaaatattt

SEQ ID NO: 580668 - DNA, 33 bp, Homo sapien
cccatctgttcactcatatcctcaaaaatattt

SEQ ID NO: 580669 - DNA, 33 bp, Homo sapien
aacgtcagggagcctcacaaacgtcgtgctcag

SEQ ID NO: 580670 - DNA, 33 bp, Homo sapien
aacgtcagggagcctcgcaaacgtcgtgctcag

SEQ ID NO: 580671 - DNA, 33 bp, Homo sapien
cctaagcagcccctgaaccagctaaccttggac

SEQ ID NO: 580672 - DNA, 33 bp, Homo sapien
cctaagcagcccctgacccagctaaccttggac

SEQ ID NO: 580673 - DNA, 33 bp, Homo sapien
tgtctgtgcattcctacggtaaggcacatgatc

SEQ ID NO: 580674 - DNA, 33 bp, Homo sapien
tgtctgtgcattcctatggtaaggcacatgatc

SEQ ID NO: 580675 - DNA, 33 bp, Homo sapien
agctgtcatctcctgtcacaccaattgccttct

SEQ ID NO: 580676 - DNA, 33 bp, Homo sapien
agctgtcatctcctgtgacaccaattgccttct

SEQ ID NO: 580677 - DNA, 33 bp, Homo sapien
gtgacagaaactcaaaactaaaaatgaaatgta

SEQ ID NO: 580678 - DNA, 33 bp, Homo sapien
gtgacagaaactcaaagctaaaaatgaaatgta

SEQ ID NO: 580679 - DNA, 33 bp, Homo sapien
aatttgtgtctgtaaggaatctctattaacata

SEQ ID NO: 580680 - DNA, 33 bp, Homo sapien
aatttgtgtctgtaagtaatctctattaacata

SEQ ID NO: 580681 - DNA, 33 bp, Homo sapien
ggctttttaataactaacatgacaagatcttca

SEQ ID NO: 580682 - DNA, 33 bp, Homo sapien
ggctttttaataactagcatgacaagatcttca

SEQ ID NO: 580683 - DNA, 33 bp, Homo sapien
gagggatatggaaacaacttggcccactgcggc

SEQ ID NO: 580684 - DNA, 33 bp, Homo sapien
gagggatatggaaacagcttggcccactgcggc

SEQ ID NO: 580685 - DNA, 33 bp, Homo sapien
tggattctccagggacaaggacgtggtcacact

SEQ ID NO: 580686 - DNA, 33 bp, Homo sapien
tggattctccagggacgaggacgtggtcacact

SEQ ID NO: 580687 - DNA, 33 bp, Homo sapien
aagttgggcttcccctaaagtggcgcttgcagg

SEQ ID NO: 580688 - DNA, 33 bp, Homo sapien
aagttgggcttcccctgaagtggcgcttgcagg

SEQ ID NO: 580689 - DNA, 33 bp, Homo sapien
agaaaccttacattccaaaggatcctgctgttc

SEQ ID NO: 580690 - DNA, 33 bp, Homo sapien
agaaaccttacattccgaaggatcctgctgttc

SEQ ID NO: 580691 - DNA, 33 bp, Homo sapien
ctagaagctaaaagacacacccatgactccaca

SEQ ID NO: 580692 - DNA, 33 bp, Homo sapien
ctagaagctaaaagacgcacccatgactccaca

SEQ ID NO: 580693 - DNA, 33 bp, Homo sapien
gttcctgctactcagaagaccggagcaggagga

SEQ ID NO: 580694 - DNA, 33 bp, Homo sapien
gttcctgctactcagacgaccggagcaggagga

SEQ ID NO: 580695 - DNA, 33 bp, Homo sapien
gtactaatgaatgcacactgcttcagggtttat

SEQ ID NO: 580696 - DNA, 33 bp, Homo sapien
gtactaatgaatgcacgctgcttcagggtttat

SEQ ID NO: 580697 - DNA, 33 bp, Homo sapien
gcgccgtgtagggctcaatgtggcttcaagtaa

SEQ ID NO: 580698 - DNA, 33 bp, Homo sapien
gcgccgtgtagggctcgatgtggcttcaagtaa

SEQ ID NO: 580699 - DNA, 33 bp, Homo sapien
tgtcggtgattaggaacggaggtgccggtgtgt

SEQ ID NO: 580700 - DNA, 33 bp, Homo sapien
tgtcggtgattaggaatggaggtgccggtgtgt

SEQ ID NO: 580701 - DNA, 33 bp, Homo sapien
tgcccccacccttgacagctgcaggagagccct

SEQ ID NO: 580702 - DNA, 33 bp, Homo sapien
tgcccccacccttgacggctgcaggagagccct

SEQ ID NO: 580703 - DNA, 33 bp, Homo sapien
cgagggccacgtgtgcacggaaggggctgcctg

SEQ ID NO: 580704 - DNA, 33 bp, Homo sapien
cgagggccacgtgtgcgcggaaggggctgcctg

SEQ ID NO: 580705 - DNA, 33 bp, Homo sapien
gtggctccccagggaacctttgatcttaacaag

SEQ ID NO: 580706 - DNA, 33 bp, Homo sapien
gtggctccccagggaatctttgatcttaacaag

SEQ ID NO: 580707 - DNA, 33 bp, Homo sapien
aggaattgttccggaaagtctggcagggagtgt

SEQ ID NO: 580708 - DNA, 33 bp, Homo sapien
aggaattgttccggaaggtctggcagggagtgt

SEQ ID NO: 580709 - DNA, 33 bp, Homo sapien
ggtcagtgaacatgagaatagatcaatacctaa

SEQ ID NO: 580710 - DNA, 33 bp, Homo sapien
ggtcagtgaacatgaggatagatcaatacctaa

SEQ ID NO: 580711 - DNA, 33 bp, Homo sapien
cgtttgtttaaattgtaaaatacacagcataaa

SEQ ID NO: 580712 - DNA, 33 bp, Homo sapien
cgtttgtttaaattgtgaaatacacagcataaa

SEQ ID NO: 580713 - DNA, 33 bp, Homo sapien
cccacccttacaagacagcaaagttcagcaaac

SEQ ID NO: 580714 - DNA, 33 bp, Homo sapien
cccacccttacaagacggcaaagttcagcaaac

SEQ ID NO: 580715 - DNA, 33 bp, Homo sapien
tacgcctgtatgcggacatgtatgtgagcacgt

SEQ ID NO: 580716 - DNA, 33 bp, Homo sapien
tacgcctgtatgcggatatgtatgtgagcacgt

SEQ ID NO: 580717 - DNA, 33 bp, Homo sapien
gaataattctgttcagacatgaagctgcagggt

SEQ ID NO: 580718 - DNA, 33 bp, Homo sapien
gaataattctgttcagccatgaagctgcagggt

SEQ ID NO: 580719 - DNA, 33 bp, Homo sapien
ctgcctcgggtggaaacgcagagagaggaattg

SEQ ID NO: 580720 - DNA, 33 bp, Homo sapien
ctgcctcgggtggaaatgcagagagaggaattg

SEQ ID NO: 580721 - DNA, 33 bp, Homo sapien
ggaatgattctcttccacgtgactttccagggg

SEQ ID NO: 580722 - DNA, 33 bp, Homo sapien
ggaatgattctcttccgcgtgactttccagggg

SEQ ID NO: 580723 - DNA, 33 bp, Homo sapien
ccggttctgatgtcacacccgcgcttgtaggcg

SEQ ID NO: 580724 - DNA, 33 bp, Homo sapien
ccggttctgatgtcacgcccgcgcttgtaggcg

SEQ ID NO: 580725 - DNA, 33 bp, Homo sapien
ctgcaggcagcgcgaaaaaggagacaccgatga

SEQ ID NO: 580726 - DNA, 33 bp, Homo sapien
ctgcaggcagcgcgaagaaggagacaccgatga

SEQ ID NO: 580727 - DNA, 33 bp, Homo sapien
gatagcattttaaagccagtaattcagaggcgt

SEQ ID NO: 580728 - DNA, 33 bp, Homo sapien
gatagcattttaaagcgagtaattcagaggcgt

SEQ ID NO: 580729 - DNA, 33 bp, Homo sapien
tgctgcttagttacacagtggagtcaatctctg

SEQ ID NO: 580730 - DNA, 33 bp, Homo sapien
tgctgcttagttacacggtggagtcaatctctg

SEQ ID NO: 580731 - DNA, 33 bp, Homo sapien
gacgttggggatagacagcaacttacacaagct

SEQ ID NO: 580732 - DNA, 33 bp, Homo sapien
gacgttggggatagacggcaacttacacaagct

SEQ ID NO: 580733 - DNA, 33 bp, Homo sapien
ctcactctcctgctaacccggtcacctgtggct

SEQ ID NO: 580734 - DNA, 33 bp, Homo sapien
ctcactctcctgctaagccggtcacctgtggct

SEQ ID NO: 580735 - DNA, 33 bp, Homo sapien
gagtagactctccacacgatgttcagtattcag

SEQ ID NO: 580736 - DNA, 33 bp, Homo sapien
gagtagactctccacatgatgttcagtattcag

SEQ ID NO: 580737 - DNA, 33 bp, Homo sapien
atgctttgtcagtgtcaatgtcgaaagcccaaa

SEQ ID NO: 580738 - DNA, 33 bp, Homo sapien
atgctttgtcagtgtcgatgtcgaaagcccaaa

SEQ ID NO: 580739 - DNA, 33 bp, Homo sapien
tgtcaggaacgctcaacgcggggacaatctaca

SEQ ID NO: 580740 - DNA, 33 bp, Homo sapien
tgtcaggaacgctcaatgcggggacaatctaca

SEQ ID NO: 580741 - DNA, 33 bp, Homo sapien
gcgcccagcctgtttccactttttagctaacat

SEQ ID NO: 580742 - DNA, 33 bp, Homo sapien
gcgcccagcctgtttctactttttagctaacat

SEQ ID NO: 580743 - DNA, 33 bp, Homo sapien
agtaagtttggcctcagtaaacctggtgtggtt

SEQ ID NO: 580744 - DNA, 33 bp, Homo sapien
agtaagtttggcctcattaaacctggtgtggtt

SEQ ID NO: 580745 - DNA, 33 bp, Homo sapien
ctggggcccgtgcatcagaggaacaaggccaag

SEQ ID NO: 580746 - DNA, 33 bp, Homo sapien
ctggggcccgtgcatcggaggaacaaggccaag

SEQ ID NO: 580747 - DNA, 33 bp, Homo sapien
ctgcagtgcagaatcacgccaggaccttgacgt

SEQ ID NO: 580748 - DNA, 33 bp, Homo sapien
ctgcagtgcagaatcatgccaggaccttgacgt

SEQ ID NO: 580749 - DNA, 33 bp, Homo sapien
agtggccatacgtcccaggctgatttctggatt

SEQ ID NO: 580750 - DNA, 33 bp, Homo sapien
agtggccatacgtcccgggctgatttctggatt

SEQ ID NO: 580751 - DNA, 33 bp, Homo sapien
atgaactatatgcaaactgaaaatgtttttatc

SEQ ID NO: 580752 - DNA, 33 bp, Homo sapien
atgaactatatgcaaattgaaaatgtttttatc

SEQ ID NO: 580753 - DNA, 33 bp, Homo sapien
cagattccatgtgtacaagacagagctcctgct

SEQ ID NO: 580754 - DNA, 33 bp, Homo sapien
cagattccatgtgtacgagacagagctcctgct

SEQ ID NO: 580755 - DNA, 33 bp, Homo sapien
ttcggcgtgatgttgaccttttgatgtacatac

SEQ ID NO: 580756 - DNA, 33 bp, Homo sapien
ttcggcgtgatgttgatcttttgatgtacatac

SEQ ID NO: 580757 - DNA, 33 bp, Homo sapien
agtctcaatttccagacggtagaagaacagatt

SEQ ID NO: 580758 - DNA, 33 bp, Homo sapien
agtctcaatttccagatggtagaagaacagatt

SEQ ID NO: 580759 - DNA, 33 bp, Homo sapien
ggctcaacgaggagaccgggccagatgtcctgc

SEQ ID NO: 580760 - DNA, 33 bp, Homo sapien
ggctcaacgaggagactgggccagatgtcctgc

SEQ ID NO: 580761 - DNA, 33 bp, Homo sapien
ggctatgagtgcctccccttagtgagtgcaggg

SEQ ID NO: 580762 - DNA, 33 bp, Homo sapien
ggctatgagtgcctcctcttagtgagtgcaggg

SEQ ID NO: 580763 - DNA, 33 bp, Homo sapien
ctcaaccgacattttccagcatgggaacatttt

SEQ ID NO: 580764 - DNA, 33 bp, Homo sapien
ctcaaccgacattttctagcatgggaacatttt

SEQ ID NO: 580765 - DNA, 33 bp, Homo sapien
cagcagtatacctcaaacatcatgccctaagga

SEQ ID NO: 580766 - DNA, 33 bp, Homo sapien
cagcagtatacctcaaccatcatgccctaagga

SEQ ID NO: 580767 - DNA, 33 bp, Homo sapien
ttgttctattgacaacagtgattttaagatatg

SEQ ID NO: 580768 - DNA, 33 bp, Homo sapien
ttgttctattgacaacggtgattttaagatatg

SEQ ID NO: 580769 - DNA, 33 bp, Homo sapien
ctcacacaggtcatcaacgagcttcggaacacc

SEQ ID NO: 580770 - DNA, 33 bp, Homo sapien
ctcacacaggtcatcagcgagcttcggaacacc

SEQ ID NO: 580771 - DNA, 33 bp, Homo sapien
tgtctttttcctgtgccgaccttgctgcggaaa

SEQ ID NO: 580772 - DNA, 33 bp, Homo sapien
tgtctttttcctgtgctgaccttgctgcggaaa

SEQ ID NO: 580773 - DNA, 33 bp, Homo sapien
aggtgtatttccacacagcgctagtcacggcat

SEQ ID NO: 580774 - DNA, 33 bp, Homo sapien
aggtgtatttccacacggcgctagtcacggcat

SEQ ID NO: 580775 - DNA, 33 bp, Homo sapien
cgctagtcacggcatacgtggaaaacgtggaaa

SEQ ID NO: 580776 - DNA, 33 bp, Homo sapien
cgctagtcacggcatatgtggaaaacgtggaaa

SEQ ID NO: 580777 - DNA, 33 bp, Homo sapien
agggctctctaataaaactgctggcagtgccca

SEQ ID NO: 580778 - DNA, 33 bp, Homo sapien
agggctctctaataaagctgctggcagtgccca

SEQ ID NO: 580779 - DNA, 33 bp, Homo sapien
agatcagagcatgtatcaggggaacctgttgac

SEQ ID NO: 580780 - DNA, 33 bp, Homo sapien
agatcagagcatgtattaggggaacctgttgac

SEQ ID NO: 580781 - DNA, 33 bp, Homo sapien
agagtgggtaaggaaaactgctgaggaagggcc

SEQ ID NO: 580782 - DNA, 33 bp, Homo sapien
agagtgggtaaggaaagctgctgaggaagggcc

SEQ ID NO: 580783 - DNA, 33 bp, Homo sapien
tacagggctgttgcacagatgaatgaaagtata

SEQ ID NO: 580784 - DNA, 33 bp, Homo sapien
tacagggctgttgcacggatgaatgaaagtata

SEQ ID NO: 580785 - DNA, 33 bp, Homo sapien
gacactcttgaataaccagtaagtcgaacaaaa

SEQ ID NO: 580786 - DNA, 33 bp, Homo sapien
gacactcttgaataacgagtaagtcgaacaaaa

SEQ ID NO: 580787 - DNA, 33 bp, Homo sapien
cagcaggtgccactgaagggaaccaccctggac

SEQ ID NO: 580788 - DNA, 33 bp, Homo sapien
cagcaggtgccactgatgggaaccaccctggac

SEQ ID NO: 580789 - DNA, 33 bp, Homo sapien
cggacgacaaggatgaagaagactcgccgcggc

SEQ ID NO: 580790 - DNA, 33 bp, Homo sapien
cggacgacaaggatgaggaagactcgccgcggc

SEQ ID NO: 580791 - DNA, 33 bp, Homo sapien
tgcccctgaaggtctcacatccctggacagcgc

SEQ ID NO: 580792 - DNA, 33 bp, Homo sapien
tgcccctgaaggtctcgcatccctggacagcgc

SEQ ID NO: 580793 - DNA, 33 bp, Homo sapien
aggtccgattctcctgcagcggaaagcgcactg

SEQ ID NO: 580794 - DNA, 33 bp, Homo sapien
aggtccgattctcctggagcggaaagcgcactg

SEQ ID NO: 580795 - DNA, 33 bp, Homo sapien
aaacaaaaaaacaaagaacagttgatgtttgga

SEQ ID NO: 580796 - DNA, 33 bp, Homo sapien
aaacaaaaaaacaaagtacagttgatgtttgga

SEQ ID NO: 580797 - DNA, 33 bp, Homo sapien
aattgtgaacagttgccgactaaagggcatttg

SEQ ID NO: 580798 - DNA, 33 bp, Homo sapien
aattgtgaacagttgctgactaaagggcatttg

SEQ ID NO: 580799 - DNA, 33 bp, Homo sapien
ctttaacttgattctgaatcgagactggaattg

SEQ ID NO: 580800 - DNA, 33 bp, Homo sapien
ctttaacttgattctggatcgagactggaattg

SEQ ID NO: 580801 - DNA, 33 bp, Homo sapien
tggtatggtatattcaaagcatcctgtagccat

SEQ ID NO: 580802 - DNA, 33 bp, Homo sapien
tggtatggtatattcacagcatcctgtagccat

SEQ ID NO: 580803 - DNA, 33 bp, Homo sapien
aaaacctctgaactgcagactttaaatgggtga

SEQ ID NO: 580804 - DNA, 33 bp, Homo sapien
aaaacctctgaactgcggactttaaatgggtga

SEQ ID NO: 580805 - DNA, 33 bp, Homo sapien
gacacccaaacgcccaaatccagacaaccacag

SEQ ID NO: 580806 - DNA, 33 bp, Homo sapien
gacacccaaacgcccacatccagacaaccacag

SEQ ID NO: 580807 - DNA, 33 bp, Homo sapien
ctcatcttagcaactcagaataatctaatggaa

SEQ ID NO: 580808 - DNA, 33 bp, Homo sapien
ctcatcttagcaactcggaataatctaatggaa

SEQ ID NO: 580809 - DNA, 33 bp, Homo sapien
atgagaatgaataaaagctacattgtgtcaaag

SEQ ID NO: 580810 - DNA, 33 bp, Homo sapien
atgagaatgaataaaatctacattgtgtcaaag

SEQ ID NO: 580811 - DNA, 33 bp, Homo sapien
aatcttttctcagagtcaagcacgtgtctttta

SEQ ID NO: 580812 - DNA, 33 bp, Homo sapien
aatcttttctcagagttaagcacgtgtctttta

SEQ ID NO: 580813 - DNA, 33 bp, Homo sapien
agcgacagaacccaaactacgggagcaacggcg

SEQ ID NO: 580814 - DNA, 33 bp, Homo sapien
agcgacagaacccaaattacgggagcaacggcg

SEQ ID NO: 580815 - DNA, 33 bp, Homo sapien
ggctactgccaggtgacagaaaagggaacatca

SEQ ID NO: 580816 - DNA, 33 bp, Homo sapien
ggctactgccaggtgatagaaaagggaacatca

SEQ ID NO: 580817 - DNA, 33 bp, Homo sapien
gagctgtgggtatagcagaactgatgttccctt

SEQ ID NO: 580818 - DNA, 33 bp, Homo sapien
gagctgtgggtatagcggaactgatgttccctt

SEQ ID NO: 580819 - DNA, 33 bp, Homo sapien
aaaggatctacaaacacgtgggtcaggatgcag

SEQ ID NO: 580820 - DNA, 33 bp, Homo sapien
aaaggatctacaaacatgtgggtcaggatgcag

SEQ ID NO: 580821 - DNA, 33 bp, Homo sapien
cacgtctgtggggaacaagcgtcacagagtggc

SEQ ID NO: 580822 - DNA, 33 bp, Homo sapien
cacgtctgtggggaacgagcgtcacagagtggc

SEQ ID NO: 580823 - DNA, 33 bp, Homo sapien
tcacctcgtcaaacacaagccagtgacttaggg

SEQ ID NO: 580824 - DNA, 33 bp, Homo sapien
tcacctcgtcaaacacgagccagtgacttaggg

SEQ ID NO: 580825 - DNA, 33 bp, Homo sapien
ttgaagaataagcacaaataatgtcatcataca

SEQ ID NO: 580826 - DNA, 33 bp, Homo sapien
ttgaagaataagcacacataatgtcatcataca

SEQ ID NO: 580827 - DNA, 33 bp, Homo sapien
gcttctgaaacgcctacgttcctaagattcgtc

SEQ ID NO: 580828 - DNA, 33 bp, Homo sapien
gcttctgaaacgcctatgttcctaagattcgtc

SEQ ID NO: 580829 - DNA, 33 bp, Homo sapien
atgctagagaatcaacgcatcatcccgaaagtt

SEQ ID NO: 580830 - DNA, 33 bp, Homo sapien
atgctagagaatcaactcatcatcccgaaagtt

SEQ ID NO: 580831 - DNA, 33 bp, Homo sapien
gactccctttatgtgacgtctgaaaagaggcaa

SEQ ID NO: 580832 - DNA, 33 bp, Homo sapien
gactccctttatgtgatgtctgaaaagaggcaa

SEQ ID NO: 580833 - DNA, 33 bp, Homo sapien
gactgctctttgcctccaagctaagtgggattt

SEQ ID NO: 580834 - DNA, 33 bp, Homo sapien
gactgctctttgcctctaagctaagtgggattt

SEQ ID NO: 580835 - DNA, 33 bp, Homo sapien
cgtgtgattccactcacggtgtcggacgatgca

SEQ ID NO: 580836 - DNA, 33 bp, Homo sapien
cgtgtgattccactcatggtgtcggacgatgca

SEQ ID NO: 580837 - DNA, 33 bp, Homo sapien
tgacagtgtgagttggaaacaggggcctttgtc

SEQ ID NO: 580838 - DNA, 33 bp, Homo sapien
tgacagtgtgagttggcaacaggggcctttgtc

SEQ ID NO: 580839 - DNA, 33 bp, Homo sapien
ggtagactcatcacacccaacctcgctctttcc

SEQ ID NO: 580840 - DNA, 33 bp, Homo sapien
ggtagactcatcacacgcaacctcgctctttcc

SEQ ID NO: 580841 - DNA, 33 bp, Homo sapien
ggaggtgcccgggttccccaagactgtggagaa

SEQ ID NO: 580842 - DNA, 33 bp, Homo sapien
ggaggtgcccgggttctccaagactgtggagaa

SEQ ID NO: 580843 - DNA, 33 bp, Homo sapien
accttgctggggtgaaatgtgctcttcgtctgg

SEQ ID NO: 580844 - DNA, 33 bp, Homo sapien
accttgctggggtgaagtgtgctcttcgtctgg

SEQ ID NO: 580845 - DNA, 33 bp, Homo sapien
gagttagaacagctgacggagaccctggagtct

SEQ ID NO: 580846 - DNA, 33 bp, Homo sapien
gagttagaacagctgatggagaccctggagtct

SEQ ID NO: 580847 - DNA, 33 bp, Homo sapien
ctctggagcaagtcaccatcaaggagccagcag

SEQ ID NO: 580848 - DNA, 33 bp, Homo sapien
ctctggagcaagtcactatcaaggagccagcag

SEQ ID NO: 580849 - DNA, 33 bp, Homo sapien
tccccgtgcaccgagcactttactctttctggg

SEQ ID NO: 580850 - DNA, 33 bp, Homo sapien
tccccgtgcaccgagcgctttactctttctggg

SEQ ID NO: 580851 - DNA, 33 bp, Homo sapien
cagaaacactggttacaaagaatacccagccag

SEQ ID NO: 580852 - DNA, 33 bp, Homo sapien
cagaaacactggttacgaagaatacccagccag

SEQ ID NO: 580853 - DNA, 33 bp, Homo sapien
aaacttagccgcttaaaacaacttctactattt

SEQ ID NO: 580854 - DNA, 33 bp, Homo sapien
aaacttagccgcttaagacaacttctactattt

SEQ ID NO: 580855 - DNA, 33 bp, Homo sapien
cactgcaactcaataccccccacaagccggatg

SEQ ID NO: 580856 - DNA, 33 bp, Homo sapien
cactgcaactcaatactccccacaagccggatg

SEQ ID NO: 580857 - DNA, 33 bp, Homo sapien
actcacatgctacacacagttacacacatacgc

SEQ ID NO: 580858 - DNA, 33 bp, Homo sapien
actcacatgctacacatagttacacacatacgc

SEQ ID NO: 580859 - DNA, 33 bp, Homo sapien
tctcctggaaaacaagactctcgggatcagctc

SEQ ID NO: 580860 - DNA, 33 bp, Homo sapien
tctcctggaaaacaagcctctcgggatcagctc

SEQ ID NO: 580861 - DNA, 33 bp, Homo sapien
gattaactcactagaaactcaataacccaagag

SEQ ID NO: 580862 - DNA, 33 bp, Homo sapien
gattaactcactagaagctcaataacccaagag

SEQ ID NO: 580863 - DNA, 33 bp, Homo sapien
tgctgcagttatgtagaaagcaggttgtcatgg

SEQ ID NO: 580864 - DNA, 33 bp, Homo sapien
tgctgcagttatgtagcaagcaggttgtcatgg

SEQ ID NO: 580865 - DNA, 33 bp, Homo sapien
ctgaactaccgaagaaaaaataaaccaggctct

SEQ ID NO: 580866 - DNA, 33 bp, Homo sapien
ctgaactaccgaagaagaaataaaccaggctct

SEQ ID NO: 580867 - DNA, 33 bp, Homo sapien
cttcagtgatggctgcaaagatgcacggggctc

SEQ ID NO: 580868 - DNA, 33 bp, Homo sapien
cttcagtgatggctgccaagatgcacggggctc

SEQ ID NO: 580869 - DNA, 33 bp, Homo sapien
ctgctgtttgcatcccaagccaatggaagactc

SEQ ID NO: 580870 - DNA, 33 bp, Homo sapien
ctgctgtttgcatcccgagccaatggaagactc

SEQ ID NO: 580871 - DNA, 33 bp, Homo sapien
tcttaggagaatagagcccaagtgcccaggtgc

SEQ ID NO: 580872 - DNA, 33 bp, Homo sapien
tcttaggagaatagaggccaagtgcccaggtgc

SEQ ID NO: 580873 - DNA, 33 bp, Homo sapien
ttcccagggttggcaagtccgtgtctcctgcat

SEQ ID NO: 580874 - DNA, 33 bp, Homo sapien
ttcccagggttggcaattccgtgtctcctgcat

SEQ ID NO: 580875 - DNA, 33 bp, Homo sapien
catgccccttgaattacgtctcactcaggtctg

SEQ ID NO: 580876 - DNA, 33 bp, Homo sapien
catgccccttgaattatgtctcactcaggtctg

SEQ ID NO: 580877 - DNA, 33 bp, Homo sapien
tcccgtgaggaactagaactcacacacagctcc

SEQ ID NO: 580878 - DNA, 33 bp, Homo sapien
tcccgtgaggaactaggactcacacacagctcc

SEQ ID NO: 580879 - DNA, 33 bp, Homo sapien
aagatcatctggctggaactttgccaattatgt

SEQ ID NO: 580880 - DNA, 33 bp, Homo sapien
aagatcatctggctgggactttgccaattatgt

SEQ ID NO: 580881 - DNA, 33 bp, Homo sapien
ctttgatctaaatcaccgataaaatgtcaaacc

SEQ ID NO: 580882 - DNA, 33 bp, Homo sapien
ctttgatctaaatcactgataaaatgtcaaacc

SEQ ID NO: 580883 - DNA, 33 bp, Homo sapien
catggagactaatcacagaaaagaaagcagaat

SEQ ID NO: 580884 - DNA, 33 bp, Homo sapien
catggagactaatcacggaaaagaaagcagaat

SEQ ID NO: 580885 - DNA, 33 bp, Homo sapien
gacaagagcagagtaacgagacacgtggggctg

SEQ ID NO: 580886 - DNA, 33 bp, Homo sapien
gacaagagcagagtaatgagacacgtggggctg

SEQ ID NO: 580887 - DNA, 33 bp, Homo sapien
agcctgtttgccagtaaagacaagagcagagta

SEQ ID NO: 580888 - DNA, 33 bp, Homo sapien
agcctgtttgccagtagagacaagagcagagta

SEQ ID NO: 580889 - DNA, 33 bp, Homo sapien
ggggacttctcctgcacggcgggtttcagttcc

SEQ ID NO: 580890 - DNA, 33 bp, Homo sapien
ggggacttctcctgcatggcgggtttcagttcc

SEQ ID NO: 580891 - DNA, 33 bp, Homo sapien
gaaggcggatattggcaagactttggatgaggg

SEQ ID NO: 580892 - DNA, 33 bp, Homo sapien
gaaggcggatattggcgagactttggatgaggg

SEQ ID NO: 580893 - DNA, 33 bp, Homo sapien
ccctcttcatgggacccattcatctctgctcat

SEQ ID NO: 580894 - DNA, 33 bp, Homo sapien
ccctcttcatgggacctattcatctctgctcat

SEQ ID NO: 580895 - DNA, 33 bp, Homo sapien
gtttgacttgtcaaaaaagtcatcactaaaccc

SEQ ID NO: 580896 - DNA, 33 bp, Homo sapien
gtttgacttgtcaaaagagtcatcactaaaccc

SEQ ID NO: 580897 - DNA, 33 bp, Homo sapien
gacgtttctttcacaaccatatacagtccaccc

SEQ ID NO: 580898 - DNA, 33 bp, Homo sapien
gacgtttctttcacaagcatatacagtccaccc

SEQ ID NO: 580899 - DNA, 33 bp, Homo sapien
cccaagaagcttaacaccaaacagtagtaacac

SEQ ID NO: 580900 - DNA, 33 bp, Homo sapien
cccaagaagcttaacatcaaacagtagtaacac

SEQ ID NO: 580901 - DNA, 33 bp, Homo sapien
taagcagttaattctaataacagatatgagata

SEQ ID NO: 580902 - DNA, 33 bp, Homo sapien
taagcagttaattctagtaacagatatgagata

SEQ ID NO: 580903 - DNA, 33 bp, Homo sapien
gagggtctggttgaaacgagccgttccctgtgg

SEQ ID NO: 580904 - DNA, 33 bp, Homo sapien
gagggtctggttgaaatgagccgttccctgtgg

SEQ ID NO: 580905 - DNA, 33 bp, Homo sapien
ggactgtaccattgtacgtatcacaacgaacac

SEQ ID NO: 580906 - DNA, 33 bp, Homo sapien
ggactgtaccattgtatgtatcacaacgaacac

SEQ ID NO: 580907 - DNA, 33 bp, Homo sapien
atctccactgttcttcagaaaccctcaaacagg

SEQ ID NO: 580908 - DNA, 33 bp, Homo sapien
atctccactgttcttcggaaaccctcaaacagg

SEQ ID NO: 580909 - DNA, 33 bp, Homo sapien
gacaattaaagctcacaatttcatgcaggcaac

SEQ ID NO: 580910 - DNA, 33 bp, Homo sapien
gacaattaaagctcacgatttcatgcaggcaac

SEQ ID NO: 580911 - DNA, 33 bp, Homo sapien
gtgagacacagtcaaacgcatcggagtgacacc

SEQ ID NO: 580912 - DNA, 33 bp, Homo sapien
gtgagacacagtcaaatgcatcggagtgacacc

SEQ ID NO: 580913 - DNA, 33 bp, Homo sapien
tattgctctagattggacagtttaagtcatttt

SEQ ID NO: 580914 - DNA, 33 bp, Homo sapien
tattgctctagattgggcagtttaagtcatttt

SEQ ID NO: 580915 - DNA, 33 bp, Homo sapien
agggttgaggcactgacattacaatgtggacga

SEQ ID NO: 580916 - DNA, 33 bp, Homo sapien
agggttgaggcactgatattacaatgtggacga

SEQ ID NO: 580917 - DNA, 33 bp, Homo sapien
gatgtattcgacggtccacctctgtatgatgat

SEQ ID NO: 580918 - DNA, 33 bp, Homo sapien
gatgtattcgacggtctacctctgtatgatgat

SEQ ID NO: 580919 - DNA, 33 bp, Homo sapien
ggaatagggttagtaacaggagaatttgagaca

SEQ ID NO: 580920 - DNA, 33 bp, Homo sapien
ggaatagggttagtaataggagaatttgagaca

SEQ ID NO: 580921 - DNA, 33 bp, Homo sapien
tttcatggtctaataaccataaacttttagaat

SEQ ID NO: 580922 - DNA, 33 bp, Homo sapien
tttcatggtctaataatcataaacttttagaat

SEQ ID NO: 580923 - DNA, 33 bp, Homo sapien
agaacctctgacttagaatcacttgggacattg

SEQ ID NO: 580924 - DNA, 33 bp, Homo sapien
agaacctctgacttaggatcacttgggacattg

SEQ ID NO: 580925 - DNA, 33 bp, Homo sapien
agtctaaaatgaaaccaaataacaggtggcaat

SEQ ID NO: 580926 - DNA, 33 bp, Homo sapien
agtctaaaatgaaaccgaataacaggtggcaat

SEQ ID NO: 580927 - DNA, 33 bp, Homo sapien
ttaacggacagaatccagcaatttaataataaa

SEQ ID NO: 580928 - DNA, 33 bp, Homo sapien
ttaacggacagaatccggcaatttaataataaa

SEQ ID NO: 580929 - DNA, 33 bp, Homo sapien
ggaaataataagtcaaaaagatgaacactctga

SEQ ID NO: 580930 - DNA, 33 bp, Homo sapien
ggaaataataagtcaagaagatgaacactctga

SEQ ID NO: 580931 - DNA, 33 bp, Homo sapien
aaaatctttcagccaacaatattatagccagca

SEQ ID NO: 580932 - DNA, 33 bp, Homo sapien
aaaatctttcagccaagaatattatagccagca

SEQ ID NO: 580933 - DNA, 33 bp, Homo sapien
tcagagaaatcccagccaaaacaaagaacagag

SEQ ID NO: 580934 - DNA, 33 bp, Homo sapien
tcagagaaatcccagctaaaacaaagaacagag

SEQ ID NO: 580935 - DNA, 33 bp, Homo sapien
cctacaactaataaaccagctgttctaaaaaaa

SEQ ID NO: 580936 - DNA, 33 bp, Homo sapien
cctacaactaataaactagctgttctaaaaaaa

SEQ ID NO: 580937 - DNA, 33 bp, Homo sapien
gtcctatctccaggaacgtttaggaagattttg

SEQ ID NO: 580938 - DNA, 33 bp, Homo sapien
gtcctatctccaggaaggtttaggaagattttg

SEQ ID NO: 580939 - DNA, 33 bp, Homo sapien
tacatttcagagagatcagaaggataggatttg

SEQ ID NO: 580940 - DNA, 33 bp, Homo sapien
tacatttcagagagattagaaggataggatttg

SEQ ID NO: 580941 - DNA, 33 bp, Homo sapien
taggaccaagaaaatacgggcatactaattgtg

SEQ ID NO: 580942 - DNA, 33 bp, Homo sapien
taggaccaagaaaatatgggcatactaattgtg

SEQ ID NO: 580943 - DNA, 33 bp, Homo sapien
aactactaaaatcctacagtatcatggttattg

SEQ ID NO: 580944 - DNA, 33 bp, Homo sapien
aactactaaaatcctatagtatcatggttattg

SEQ ID NO: 580945 - DNA, 33 bp, Homo sapien
atgaaatggcaactgcaaaattgttctgcaaaa

SEQ ID NO: 580946 - DNA, 33 bp, Homo sapien
atgaaatggcaactgcgaaattgttctgcaaaa

SEQ ID NO: 580947 - DNA, 33 bp, Homo sapien
aaaagcaacctgacaaacttctttgtggtgtgt

SEQ ID NO: 580948 - DNA, 33 bp, Homo sapien
aaaagcaacctgacaagcttctttgtggtgtgt

SEQ ID NO: 580949 - DNA, 33 bp, Homo sapien
aagtgtgcactgatctcaaagagttaagccttt

SEQ ID NO: 580950 - DNA, 33 bp, Homo sapien
aagtgtgcactgatctgaaagagttaagccttt

SEQ ID NO: 580951 - DNA, 33 bp, Homo sapien
catgggatgataactcccaagaattagagttgt

SEQ ID NO: 580952 - DNA, 33 bp, Homo sapien
catgggatgataactctcaagaattagagttgt

SEQ ID NO: 580953 - DNA, 33 bp, Homo sapien
ggctagggttggacggaacactctaagctaatt

SEQ ID NO: 580954 - DNA, 33 bp, Homo sapien
ggctagggttggacggcacactctaagctaatt

SEQ ID NO: 580955 - DNA, 33 bp, Homo sapien
tatcttttcattaccaacctcagtatttctagt

SEQ ID NO: 580956 - DNA, 33 bp, Homo sapien
tatcttttcattaccatcctcagtatttctagt

SEQ ID NO: 580957 - DNA, 33 bp, Homo sapien
atagtggccagcaagaatacaaaaatagtgctc

SEQ ID NO: 580958 - DNA, 33 bp, Homo sapien
atagtggccagcaagactacaaaaatagtgctc

SEQ ID NO: 580959 - DNA, 33 bp, Homo sapien
ttccctgtttctgaaagcacactttgaaatcaa

SEQ ID NO: 580960 - DNA, 33 bp, Homo sapien
ttccctgtttctgaaatcacactttgaaatcaa

SEQ ID NO: 580961 - DNA, 33 bp, Homo sapien; identical to SEQ ID NO: 580959

SEQ ID NO: 580962 - DNA, 33 bp, Homo sapien; identical to SEQ ID NO: 580960

SEQ ID NO: 580963 - DNA, 33 bp, Homo sapien
agatgtttaagcaaaactctggtcatctctgtg

SEQ ID NO: 580964 - DNA, 33 bp, Homo sapien
agatgtttaagcaaaattctggtcatctctgtg

SEQ ID NO: 580965 - DNA, 33 bp, Homo sapien; identical to SEQ ID NO: 580963

SEQ ID NO: 580966 - DNA, 33 bp, Homo sapien; identical to SEQ ID NO: 580964

SEQ ID NO: 580967 - DNA, 33 bp, Homo sapien
ttgtttattgttttgacctgaggatggaggctt

SEQ ID NO: 580968 - DNA, 33 bp, Homo sapien
ttgtttattgttttgatctgaggatggaggctt

SEQ ID NO: 580969 - DNA, 33 bp, Homo sapien; identical to SEQ ID NO: 580967

SEQ ID NO: 580970 - DNA, 33 bp, Homo sapien; identical to SEQ ID NO: 580968

SEQ ID NO: 580971 - DNA, 33 bp, Homo sapien
cattcagtctatataactgctcttgaaattaat

SEQ ID NO: 580972 - DNA, 33 bp, Homo sapien
cattcagtctatataagtgctcttgaaattaat

SEQ ID NO: 580973 - DNA, 33 bp, Homo sapien; identical to SEQ ID NO: 580971

SEQ ID NO: 580974 - DNA, 33 bp, Homo sapien; identical to SEQ ID NO: 580972

SEQ ID NO: 580975 - DNA, 33 bp, Homo sapien
atctttgcactctcccagactcagcctatcagc

SEQ ID NO: 580976 - DNA, 33 bp, Homo sapien
atctttgcactctcccggactcagcctatcagc

SEQ ID NO: 580977 - DNA, 33 bp, Homo sapien
ttttagcttcaagtaacggatacacaacccaaa

SEQ ID NO: 580978 - DNA, 33 bp, Homo sapien
ttttagcttcaagtaatggatacacaacccaaa

SEQ ID NO: 580979 - DNA, 33 bp, Homo sapien
gactttgcatgagaaaactaaggattcaactga

SEQ ID NO: 580980 - DNA, 33 bp, Homo sapien
gactttgcatgagaaagctaaggattcaactga

SEQ ID NO: 580981 - DNA, 33 bp, Homo sapien
ggatgtgaggaatagacagagcttgaattagat

SEQ ID NO: 580982 - DNA, 33 bp, Homo sapien
ggatgtgaggaatagatagagcttgaattagat

SEQ ID NO: 580983 - DNA, 33 bp, Homo sapien
tgataaatgtacttaccatatcagcttagaaac

SEQ ID NO: 580984 - DNA, 33 bp, Homo sapien
tgataaatgtacttactatatcagcttagaaac

SEQ ID NO: 580985 - DNA, 33 bp, Homo sapien
tgcaggagatgatctaagagaaaatgcattggt

SEQ ID NO: 580986 - DNA, 33 bp, Homo sapien
tgcaggagatgatctaggagaaaatgcattggt

SEQ ID NO: 580987 - DNA, 33 bp, Homo sapien
atggtgtaggattctacattcagctttgacatt

SEQ ID NO: 580988 - DNA, 33 bp, Homo sapien
atggtgtaggattctatattcagctttgacatt

SEQ ID NO: 580989 - DNA, 33 bp, Homo sapien
aaatgatgaacaaatacggtccactgccctctc

SEQ ID NO: 580990 - DNA, 33 bp, Homo sapien
aaatgatgaacaaatatggtccactgccctctc

SEQ ID NO: 580991 - DNA, 33 bp, Homo sapien; identical to SEQ ID NO: 580989

SEQ ID NO: 580992 - DNA, 33 bp, Homo sapien; identical to SEQ ID NO: 580990

SEQ ID NO: 580993 - DNA, 33 bp, Homo sapien
aaccaccatgtccagccgaaactcatgttcttt

SEQ ID NO: 580994 - DNA, 33 bp, Homo sapien
aaccaccatgtccagctgaaactcatgttcttt

SEQ ID NO: 580995 - DNA, 33 bp, Homo sapien
taagagtaagctgtcacataaggaaagaggttg

SEQ ID NO: 580996 - DNA, 33 bp, Homo sapien
taagagtaagctgtcatataaggaaagaggttg

SEQ ID NO: 580997 - DNA, 33 bp, Homo sapien; identical to SEQ ID NO: 580995

SEQ ID NO: 580998 - DNA, 33 bp, Homo sapien; identical to SEQ ID NO: 580996

SEQ ID NO: 580999 - DNA, 33 bp, Homo sapien
ttagaagtcaatttccagagaatttttatatat

SEQ ID NO: 581000 - DNA, 33 bp, Homo sapien
ttagaagtcaatttccggagaatttttatatat

SEQ ID NO: 581001 - DNA, 33 bp, Homo sapien
agtagcaagtgtattgcattttgtttgaaatgg

SEQ ID NO: 581002 - DNA, 33 bp, Homo sapien
agtagcaagtgtattgtattttgtttgaaatgg

SEQ ID NO: 581003 - DNA, 33 bp, Homo sapien; identical to SEQ ID NO: 581001

SEQ ID NO: 581004 - DNA, 33 bp, Homo sapien; identical to SEQ ID NO: 581002

SEQ ID NO: 581005 - DNA, 33 bp, Homo sapien
attagagctatggtaccgcaacacattagatct

SEQ ID NO: 581006 - DNA, 33 bp, Homo sapien
attagagctatggtactgcaacacattagatct

SEQ ID NO: 581007 - DNA, 33 bp, Homo sapien
aactttacactatcggcatattaaagaagaacc

SEQ ID NO: 581008 - DNA, 33 bp, Homo sapien
aactttacactatcgggatattaaagaagaacc

SEQ ID NO: 581009 - DNA, 33 bp, Homo sapien
gaattcaaaggtacaacttacttatcattgcag

SEQ ID NO: 581010 - DNA, 33 bp, Homo sapien
gaattcaaaggtacaatttacttatcattgcag

SEQ ID NO: 581011 - DNA, 33 bp, Homo sapien; identical to SEQ ID NO: 581009

SEQ ID NO: 581012 - DNA, 33 bp, Homo sapien; identical to SEQ ID NO: 581010

SEQ ID NO: 581013 - DNA, 33 bp, Homo sapien; identical to SEQ ID NO: 581009

SEQ ID NO: 581014 - DNA, 33 bp, Homo sapien; identical to SEQ ID NO: 581010

SEQ ID NO: 581015 - DNA, 33 bp, Homo sapien
ctcttcgggcttccaaagttccggagttacagg

SEQ ID NO: 581016 - DNA, 33 bp, Homo sapien
ctcttcgggcttccaaggttccggagttacagg

SEQ ID NO: 581017 - DNA, 33 bp, Homo sapien
cttcactgatctatcaaaaaggagataaaaata

SEQ ID NO: 581018 - DNA, 33 bp, Homo sapien
cttcactgatctatcacaaaggagataaaaata

SEQ ID NO: 581019 - DNA, 33 bp, Homo sapien
tcattaaagaagtgggaataacaatctaaaaat

SEQ ID NO: 581020 - DNA, 33 bp, Homo sapien
tcattaaagaagtggggataacaatctaaaaat

SEQ ID NO: 581021 - DNA, 33 bp, Homo sapien
tatgctcttggtgttgcatctaaagaatctttg

SEQ ID NO: 581022 - DNA, 33 bp, Homo sapien
tatgctcttggtgttgtatctaaagaatctttg

SEQ ID NO: 581023 - DNA, 33 bp, Homo sapien
ttgagaaggtcatctcactgttgttcaggcttg

SEQ ID NO: 581024 - DNA, 33 bp, Homo sapien
ttgagaaggtcatctcgctgttgttcaggcttg

SEQ ID NO: 581025 - DNA, 33 bp, Homo sapien
tcctgtctctactctacctcctgtagcggcctc

SEQ ID NO: 581026 - DNA, 33 bp, Homo sapien
tcctgtctctactctatctcctgtagcggcctc

SEQ ID NO: 581027 - DNA, 33 bp, Homo sapien
acccagatggtacaataaaagtttagaaattgt

SEQ ID NO: 581028 - DNA, 33 bp, Homo sapien
acccagatggtacaatgaaagtttagaaattgt

SEQ ID NO: 581029 - DNA, 33 bp, Homo sapien; identical to SEQ ID NO: 581027

SEQ ID NO: 581030 - DNA, 33 bp, Homo sapien; identical to SEQ ID NO: 581028

SEQ ID NO: 581031 - DNA, 33 bp, Homo sapien
acagatgtggcaccaaatgaggagtgagacagc

SEQ ID NO: 581032 - DNA, 33 bp, Homo sapien
acagatgtggcaccaactgaggagtgagacagc

SEQ ID NO: 581033 - DNA, 33 bp, Homo sapien; identical to SEQ ID NO: 581031

SEQ ID NO: 581034 - DNA, 33 bp, Homo sapien; identical to SEQ ID NO: 581032

SEQ ID NO: 581035 - DNA, 33 bp, Homo sapien
gaatcttctgtcaaccgatttgtatgtttgaat

SEQ ID NO: 581036 - DNA, 33 bp, Homo sapien
gaatcttctgtcaacctatttgtatgtttgaat

SEQ ID NO: 581037 - DNA, 33 bp, Homo sapien
aatctcaggaaagtaacaaagggtgaagaggag

SEQ ID NO: 581038 - DNA, 33 bp, Homo sapien
aatctcaggaaagtaataaagggtgaagaggag

SEQ ID NO: 581039 - DNA, 33 bp, Homo sapien
attgcattttcaaagacggtaagttagaataca

SEQ ID NO: 581040 - DNA, 33 bp, Homo sapien
attgcattttcaaagatggtaagttagaataca

SEQ ID NO: 581041 - DNA, 33 bp, Homo sapien; identical to SEQ ID NO: 581039

SEQ ID NO: 581042 - DNA, 33 bp, Homo sapien; identical to SEQ ID NO: 581040

SEQ ID NO: 581043 - DNA, 33 bp, Homo sapien
ggaagatacagatgtgcattcacaacccaaaac

SEQ ID NO: 581044 - DNA, 33 bp, Homo sapien
ggaagatacagatgtggattcacaacccaaaac

SEQ ID NO: 581045 - DNA, 33 bp, Homo sapien
aaattctaggtattagcccactattagatgaac

SEQ ID NO: 581046 - DNA, 33 bp, Homo sapien
aaattctaggtattagtccactattagatgaac

SEQ ID NO: 581047 - DNA, 33 bp, Homo sapien
cacatttaaaaatcaaatcttggtgagaatgtg

SEQ ID NO: 581048 - DNA, 33 bp, Homo sapien
cacatttaaaaatcaagtcttggtgagaatgtg

SEQ ID NO: 581049 - DNA, 33 bp, Homo sapien
cactaaaagctaagaaaatagtgtgttcatttt

SEQ ID NO: 581050 - DNA, 33 bp, Homo sapien
cactaaaagctaagaagatagtgtgttcatttt

SEQ ID NO: 581051 - DNA, 33 bp, Homo sapien
aactattatttataggacattgcagtaagttag

SEQ ID NO: 581052 - DNA, 33 bp, Homo sapien
aactattatttatagggcattgcagtaagttag

SEQ ID NO: 581053 - DNA, 33 bp, Homo sapien; identical to SEQ ID NO: 581051

SEQ ID NO: 581054 - DNA, 33 bp, Homo sapien; identical to SEQ ID NO: 581052

SEQ ID NO: 581055 - DNA, 33 bp, Homo sapien
ggtttaacagatgtgaaacccctttgtcttgtc

SEQ ID NO: 581056 - DNA, 33 bp, Homo sapien
ggtttaacagatgtgagacccctttgtcttgtc

SEQ ID NO: 581057 - DNA, 33 bp, Homo sapien
attctattctgttaaacttatatccagacattt

SEQ ID NO: 581058 - DNA, 33 bp, Homo sapien
attctattctgttaaagttatatccagacattt

SEQ ID NO: 581059 - DNA, 33 bp, Homo sapien; identical to SEQ ID NO: 581057

SEQ ID NO: 581060 - DNA, 33 bp, Homo sapien; identical to SEQ ID NO: 581058

SEQ ID NO: 581061 - DNA, 33 bp, Homo sapien
ctgttcctggaagagacgcaactgaactgctct

SEQ ID NO: 581062 - DNA, 33 bp, Homo sapien
ctgttcctggaagagatgcaactgaactgctct

SEQ ID NO: 581063 - DNA, 33 bp, Homo sapien
tttcataagtgaaaggaagtcagaactcatttc

SEQ ID NO: 581064 - DNA, 33 bp, Homo sapien
tttcataagtgaaagggagtcagaactcatttc

SEQ ID NO: 581065 - DNA, 33 bp, Homo sapien; identical to SEQ ID NO: 581063

SEQ ID NO: 581066 - DNA, 33 bp, Homo sapien; identical to SEQ ID NO: 581064

SEQ ID NO: 581067 - DNA, 33 bp, Homo sapien
aggaactgggatgaaacagagaactggaaattg

SEQ ID NO: 581068 - DNA, 33 bp, Homo sapien
aggaactgggatgaaatagagaactggaaattg

SEQ ID NO: 581069 - DNA, 33 bp, Homo sapien
gagatcaccttgttaacaaattactcccacatg

SEQ ID NO: 581070 - DNA, 33 bp, Homo sapien
gagatcaccttgttaataaattactcccacatg

SEQ ID NO: 581071 - DNA, 33 bp, Homo sapien; identical to SEQ ID NO: 581069

SEQ ID NO: 581072 - DNA, 33 bp, Homo sapien; identical to SEQ ID NO: 581070

SEQ ID NO: 581073 - DNA, 33 bp, Homo sapien
acaggggcgcagtgtacgccgactcggggaata

SEQ ID NO: 581074 - DNA, 33 bp, Homo sapien
acaggggcgcagtgtatgccgactcggggaata

SEQ ID NO: 581075 - DNA, 33 bp, Homo sapien; identical to SEQ ID NO: 581073

SEQ ID NO: 581076 - DNA, 33 bp, Homo sapien; identical to SEQ ID NO: 581074

SEQ ID NO: 581077 - DNA, 33 bp, Homo sapien
gggggtcctcaccaaaagggtccgggaagtgga

SEQ ID NO: 581078 - DNA, 33 bp, Homo sapien
gggggtcctcaccaaaggggtccgggaagtgga

SEQ ID NO: 581079 - DNA, 33 bp, Homo sapien; identical to SEQ ID NO: 581077

SEQ ID NO: 581080 - DNA, 33 bp, Homo sapien; identical to SEQ ID NO: 581078

SEQ ID NO: 581081 - DNA, 33 bp, Homo sapien
gttctctttctaatgagaatggaaaattggaaa

SEQ ID NO: 581082 - DNA, 33 bp, Homo sapien
gttctctttctaatgataatggaaaattggaaa

SEQ ID NO: 581083 - DNA, 33 bp, Homo sapien; identical to SEQ ID NO: 581081

SEQ ID NO: 581084 - DNA, 33 bp, Homo sapien; identical to SEQ ID NO: 581082

SEQ ID NO: 581085 - DNA, 33 bp, Homo sapien
tggtagattcaaggccaactataaacaaatgct

SEQ ID NO: 581086 - DNA, 33 bp, Homo sapien
tggtagattcaaggccgactataaacaaatgct

SEQ ID NO: 581087 - DNA, 33 bp, Homo sapien
attttataagggtacaatataatgtgtttaatc

SEQ ID NO: 581088 - DNA, 33 bp, Homo sapien
attttataagggtacagtataatgtgtttaatc

SEQ ID NO: 581089 - DNA, 33 bp, Homo sapien
atctactaaaatatgcactatcttgaaagagtc

SEQ ID NO: 581090 - DNA, 33 bp, Homo sapien
atctactaaaatatgcgctatcttgaaagagtc

SEQ ID NO: 581091 - DNA, 33 bp, Homo sapien
ttacttgtgatgcatactaatgtcccagagttg

SEQ ID NO: 581092 - DNA, 33 bp, Homo sapien
ttacttgtgatgcatattaatgtcccagagttg

SEQ ID NO: 581093 - DNA, 33 bp, Homo sapien; identical to SEQ ID NO: 581091

SEQ ID NO: 581094 - DNA, 33 bp, Homo sapien; identical to SEQ ID NO: 581092

SEQ ID NO: 581095 - DNA, 33 bp, Homo sapien
ccagcttcatccatgactattttgagaaaagtt

SEQ ID NO: 581096 - DNA, 33 bp, Homo sapien
ccagcttcatccatgattattttgagaaaagtt

SEQ ID NO: 581097 - DNA, 33 bp, Homo sapien
ctgccatatagacagcaagatggtgacaaggtg

SEQ ID NO: 581098 - DNA, 33 bp, Homo sapien
ctgccatatagacagcgagatggtgacaaggtg

SEQ ID NO: 581099 - DNA, 33 bp, Homo sapien; identical to SEQ ID NO: 581097

SEQ ID NO: 581100 - DNA, 33 bp, Homo sapien; identical to SEQ ID NO: 581098

SEQ ID NO: 581101 - DNA, 33 bp, Homo sapien
acagaggttaattgaaagagaagacccaaagga

SEQ ID NO: 581102 - DNA, 33 bp, Homo sapien
acagaggttaattgaaggagaagacccaaagga

SEQ ID NO: 581103 - DNA, 33 bp, Homo sapien; identical to SEQ ID NO: 581101

SEQ ID NO: 581104 - DNA, 33 bp, Homo sapien; identical to SEQ ID NO: 581102

SEQ ID NO: 581105 - DNA, 33 bp, Homo sapien
tgtcttctgcagttcactcagggacacatcgag

SEQ ID NO: 581106 - DNA, 33 bp, Homo sapien
tgtcttctgcagttcagtcagggacacatcgag

SEQ ID NO: 581107 - DNA, 33 bp, Homo sapien
aggccacggtgtcttcacaaagctaactgcaac

SEQ ID NO: 581108 - DNA, 33 bp, Homo sapien
aggccacggtgtcttcgcaaagctaactgcaac

SEQ ID NO: 581109 - DNA, 33 bp, Homo sapien
taaacaaagtaggctacaaaacaacaagcatta

SEQ ID NO: 581110 - DNA, 33 bp, Homo sapien
taaacaaagtaggctataaaacaacaagcatta

SEQ ID NO: 581111 - DNA, 33 bp, Homo sapien
aagaaaatgttttgtaaagatggtgtcttgcta

SEQ ID NO: 581112 - DNA, 33 bp, Homo sapien
aagaaaatgttttgtagagatggtgtcttgcta

SEQ ID NO: 581113 - DNA, 33 bp, Homo sapien
ctaggtggaacactggccatttgtaaagttgta

SEQ ID NO: 581114 - DNA, 33 bp, Homo sapien
ctaggtggaacactggtcatttgtaaagttgta

SEQ ID NO: 581115 - DNA, 33 bp, Homo sapien
gggctgcagtgaactacgatcaaactactgtct

SEQ ID NO: 581116 - DNA, 33 bp, Homo sapien
gggctgcagtgaactatgatcaaactactgtct

SEQ ID NO: 581117 - DNA, 33 bp, Homo sapien; identical to SEQ ID NO: 581115

SEQ ID NO: 581118 - DNA, 33 bp, Homo sapien; identical to SEQ ID NO: 581116

SEQ ID NO: 581119 - DNA, 33 bp, Homo sapien
tatctaactgtaattccatatccattaaccaac

SEQ ID NO: 581120 - DNA, 33 bp, Homo sapien
tatctaactgtaattctatatccattaaccaac

SEQ ID NO: 581121 - DNA, 33 bp, Homo sapien; identical to SEQ ID NO: 581119

SEQ ID NO: 581122 - DNA, 33 bp, Homo sapien; identical to SEQ ID NO: 581120

SEQ ID NO: 581123 - DNA, 33 bp, Homo sapien
taagccgcatggtatcccttttactgcattcta

SEQ ID NO: 581124 - DNA, 33 bp, Homo sapien
taagccgcatggtatctcttttactgcattcta

SEQ ID NO: 581125 - DNA, 33 bp, Homo sapien
tagagcatcaagatcaatagctaattcctgcgg

SEQ ID NO: 581126 - DNA, 33 bp, Homo sapien
tagagcatcaagatcagtagctaattcctgcgg

SEQ ID NO: 581127 - DNA, 33 bp, Homo sapien
cttatatctgcagaaacgtacagaattagtaag

SEQ ID NO: 581128 - DNA, 33 bp, Homo sapien
cttatatctgcagaaatgtacagaattagtaag

SEQ ID NO: 581129 - DNA, 33 bp, Homo sapien; identical to SEQ ID NO: 581127

SEQ ID NO: 581130 - DNA, 33 bp, Homo sapien; identical to SEQ ID NO: 581128

SEQ ID NO: 581131 - DNA, 33 bp, Homo sapien
aataagctctagattccagattcttttttctgt

SEQ ID NO: 581132 - DNA, 33 bp, Homo sapien
aataagctctagattctagattcttttttctgt

SEQ ID NO: 581133 - DNA, 33 bp, Homo sapien; identical to SEQ ID NO: 581131

SEQ ID NO: 581134 - DNA, 33 bp, Homo sapien; identical to SEQ ID NO: 581132

SEQ ID NO: 581135 - DNA, 33 bp, Homo sapien
aaacaacatgaagtacaataaagtacatgggga

SEQ ID NO: 581136 - DNA, 33 bp, Homo sapien
aaacaacatgaagtacgataaagtacatgggga

SEQ ID NO: 581137 - DNA, 33 bp, Homo sapien; identical to SEQ ID NO: 581135

SEQ ID NO: 581138 - DNA, 33 bp, Homo sapien; identical to SEQ ID NO: 581136

SEQ ID NO: 581139 - DNA, 33 bp, Homo sapien
taggagccctctataaacctgctcctgaaaaat

SEQ ID NO: 581140 - DNA, 33 bp, Homo sapien
taggagccctctataaccctgctcctgaaaaat

SEQ ID NO: 581141 - DNA, 33 bp, Homo sapien
tacttccattgggttcaccagctaattccattt

SEQ ID NO: 581142 - DNA, 33 bp, Homo sapien
tacttccattgggttcgccagctaattccattt

SEQ ID NO: 581143 - DNA, 33 bp, Homo sapien
gtgtcttgcttaaatacatcatcataacaggtt

SEQ ID NO: 581144 - DNA, 33 bp, Homo sapien
gtgtcttgcttaaatatatcatcataacaggtt

SEQ ID NO: 581145 - DNA, 33 bp, Homo sapien
gactaacaggtatttgcatataagttaccatag

SEQ ID NO: 581146 - DNA, 33 bp, Homo sapien
gactaacaggtatttgtatataagttaccatag

SEQ ID NO: 581147 - DNA, 33 bp, Homo sapien; identical to SEQ ID NO: 581145

SEQ ID NO: 581148 - DNA, 33 bp, Homo sapien; identical to SEQ ID NO: 581146

SEQ ID NO: 581149 - DNA, 33 bp, Homo sapien
atgaaatcttttctgcacaacgcttatagcccc

SEQ ID NO: 581150 - DNA, 33 bp, Homo sapien
atgaaatcttttctgcccaacgcttatagcccc

SEQ ID NO: 581151 - DNA, 33 bp, Homo sapien
tcaaggctgttctatcactctaaatttgttttt

SEQ ID NO: 581152 - DNA, 33 bp, Homo sapien
tcaaggctgttctatcgctctaaatttgttttt

SEQ ID NO: 581153 - DNA, 33 bp, Homo sapien; identical to SEQ ID NO: 581151

SEQ ID NO: 581154 - DNA, 33 bp, Homo sapien; identical to SEQ ID NO: 581152

SEQ ID NO: 581155 - DNA, 33 bp, Homo sapien
tcccttgtttgggaagaactgtttttgatatac

SEQ ID NO: 581156 - DNA, 33 bp, Homo sapien
tcccttgtttgggaaggactgtttttgatatac

SEQ ID NO: 581157 - DNA, 33 bp, Homo sapien
ggcggacagaggtagcggaatgaggacagcggg

SEQ ID NO: 581158 - DNA, 33 bp, Homo sapien
ggcggacagaggtagctgaatgaggacagcggg

SEQ ID NO: 581159 - DNA, 33 bp, Homo sapien
gtacctgtgtggaaacagcatgacgaggctaac

SEQ ID NO: 581160 - DNA, 33 bp, Homo sapien
gtacctgtgtggaaaccgcatgacgaggctaac

SEQ ID NO: 581161 - DNA, 33 bp, Homo sapien; identical to SEQ ID NO: 581159

SEQ ID NO: 581162 - DNA, 33 bp, Homo sapien; identical to SEQ ID NO: 581160

SEQ ID NO: 581163 - DNA, 33 bp, Homo sapien
tgtgccatgatcccaacttcagcctgacactgg

SEQ ID NO: 581164 - DNA, 33 bp, Homo sapien
tgtgccatgatcccaatttcagcctgacactgg

SEQ ID NO: 581165 - DNA, 33 bp, Homo sapien
aatgacatgaagaacactgtagataaagtatgt

SEQ ID NO: 581166 - DNA, 33 bp, Homo sapien
aatgacatgaagaacattgtagataaagtatgt

SEQ ID NO: 581167 - DNA, 33 bp, Homo sapien
agcgtatagttaagcaatgaaatcagatagcat

SEQ ID NO: 581168 - DNA, 33 bp, Homo sapien
agcgtatagttaagcagtgaaatcagatagcat

SEQ ID NO: 581169 - DNA, 33 bp, Homo sapien; identical to SEQ ID NO: 581167

SEQ ID NO: 581170 - DNA, 33 bp, Homo sapien; identical to SEQ ID NO: 581168

SEQ ID NO: 581171 - DNA, 33 bp, Homo sapien
ccagtatactcctactaaaaaaatggctaaaat

SEQ ID NO: 581172 - DNA, 33 bp, Homo sapien
ccagtatactcctacttaaaaaatggctaaaat

SEQ ID NO: 581173 - DNA, 33 bp, Homo sapien
ccacaatcactccggggacttgcgcgcacttgg

SEQ ID NO: 581174 - DNA, 33 bp, Homo sapien
ccacaatcactccgggtacttgcgcgcacttgg

SEQ ID NO: 581175 - DNA, 33 bp, Homo sapien
ggtggtcagaacaaccccatcctgttggctttg

SEQ ID NO: 581176 - DNA, 33 bp, Homo sapien
ggtggtcagaacaacctcatcctgttggctttg

SEQ ID NO: 581177 - DNA, 33 bp, Homo sapien
cacgcatgtggtccgaaaggtggcagctggccg

SEQ ID NO: 581178 - DNA, 33 bp, Homo sapien
cacgcatgtggtccgagaggtggcagctggccg

SEQ ID NO: 581179 - DNA, 33 bp, Homo sapien
ttccaagtccccatgccgagttggagagcggtc

SEQ ID NO: 581180 - DNA, 33 bp, Homo sapien
ttccaagtccccatgcggagttggagagcggtc

SEQ ID NO: 581181 - DNA, 33 bp, Homo sapien
cggcaggtgcctcagacgtccaggacctgtact

SEQ ID NO: 581182 - DNA, 33 bp, Homo sapien
cggcaggtgcctcagatgtccaggacctgtact

SEQ ID NO: 581183 - DNA, 33 bp, Homo sapien
cccgggtcaaccagcgaacagtggaggaacggt

SEQ ID NO: 581184 - DNA, 33 bp, Homo sapien
cccgggtcaaccagcggacagtggaggaacggt

SEQ ID NO: 581185 - DNA, 33 bp, Homo sapien
cccaaatccaccaaaaatttcccagcataagcc

SEQ ID NO: 581186 - DNA, 33 bp, Homo sapien
cccaaatccaccaaaagtttcccagcataagcc

SEQ ID NO: 581187 - DNA, 33 bp, Homo sapien
tgaaaaattactcaccaagtgtctgcagccagg

SEQ ID NO: 581188 - DNA, 33 bp, Homo sapien
tgaaaaattactcaccgagtgtctgcagccagg

SEQ ID NO: 581189 - DNA, 33 bp, Homo sapien
aagtagaaattcccacgcaggttgttactttta

SEQ ID NO: 581190 - DNA, 33 bp, Homo sapien
aagtagaaattcccactcaggttgttactttta

SEQ ID NO: 581191 - DNA, 33 bp, Homo sapien
aggcaaactgtatcccggagtttcagtggatcc

SEQ ID NO: 581192 - DNA, 33 bp, Homo sapien
aggcaaactgtatccctgagtttcagtggatcc

SEQ ID NO: 581193 - DNA, 33 bp, Homo sapien; identical to SEQ ID NO: 581191

SEQ ID NO: 581194 - DNA, 33 bp, Homo sapien; identical to SEQ ID NO: 581192

SEQ ID NO: 581195 - DNA, 33 bp, Homo sapien; identical to SEQ ID NO: 581191

SEQ ID NO: 581196 - DNA, 33 bp, Homo sapien; identical to SEQ ID NO: 581192

SEQ ID NO: 581197 - DNA, 33 bp, Homo sapien
cagtgggtaatgaagtcaaaatgagactgctag

SEQ ID NO: 581198 - DNA, 33 bp, Homo sapien
cagtgggtaatgaagttaaaatgagactgctag

SEQ ID NO: 581199 - DNA, 33 bp, Homo sapien
tcttttaaggggaccagtcagattagattaggg

SEQ ID NO: 581200 - DNA, 33 bp, Homo sapien
tcttttaaggggaccattcagattagattaggg

SEQ ID NO: 581201 - DNA, 33 bp, Homo sapien
ttcttttatccttgcacatggctgccctattgc

SEQ ID NO: 581202 - DNA, 33 bp, Homo sapien
ttcttttatccttgcagatggctgccctattgc
